United States Patent Application Publication US 2007/0042381 A1 - sequence listing, part 81

SEQ ID NO: 3705468 - RNA, 19 nt, Human
uguaguaucaaauauuaga

SEQ ID NO: 3705469 - RNA, 18 nt, Human
uguaguauggccuguguc

SEQ ID NO: 3705470 - RNA, 20 nt, Human
uguaguauuuuuuguauaau

SEQ ID NO: 3705471 - RNA, 22 nt, Human
uguagucagaauuagcugcuuc

SEQ ID NO: 3705472 - RNA, 15 nt, Human
uguagucccagccac

SEQ ID NO: 3705473 - RNA, 14 nt, Human
uguagucccagcua

SEQ ID NO: 3705474 - RNA, 22 nt, Human
uguagugaaucacguaaagcua

SEQ ID NO: 3705475 - RNA, 21 nt, Human
uguagugagauagcauuguga

SEQ ID NO: 3705476 - RNA, 15 nt, Human
uguagugagccgaga

SEQ ID NO: 3705477 - RNA, 14 nt, Human
uguagugauucaaa

SEQ ID NO: 3705478 - RNA, 21 nt, Human
uguaguguccauuuugugaag

SEQ ID NO: 3705479 - RNA, 16 nt, Human
uguaguguucagaaaa

SEQ ID NO: 3705480 - RNA, 16 nt, Human
uguaguguuggagaag

SEQ ID NO: 3705481 - RNA, 18 nt, Human
uguaguguuggagaagaa

SEQ ID NO: 3705482 - RNA, 18 nt, Human
uguaguuaauuuaucuaa

SEQ ID NO: 3705483 - RNA, 12 nt, Human
uguaguuaggaa

SEQ ID NO: 3705484 - RNA, 14 nt, Human
uguaguuaggaaau

SEQ ID NO: 3705485 - RNA, 23 nt, Human
uguaguuaggaaauaaaaccuuu

SEQ ID NO: 3705486 - RNA, 14 nt, Human
uguaguucauguaa

SEQ ID NO: 3705487 - RNA, 15 nt, Human
uguaguucuaagacu

SEQ ID NO: 3705488 - RNA, 12 nt, Human
uguaguucuuua

SEQ ID NO: 3705489 - RNA, 16 nt, Human
uguaguugauguaucc

SEQ ID NO: 3705490 - RNA, 17 nt, Human
uguaguugauguaucca

SEQ ID NO: 3705491 - RNA, 20 nt, Human
uguaguugcguggacucugc

SEQ ID NO: 3705492 - RNA, 22 nt, Human
uguaguuugaggaaauuugcag

SEQ ID NO: 3705493 - RNA, 20 nt, Human
uguaguuuuuauauguugua

SEQ ID NO: 3705494 - RNA, 13 nt, Human
uguauaaaauaau

SEQ ID NO: 3705495 - RNA, 19 nt, Human
uguauaaaauacauaguga

SEQ ID NO: 3705496 - RNA, 16 nt, Human
uguauaaaaucagcca

SEQ ID NO: 3705497 - RNA, 20 nt, Human
uguauaaacauuaaaugucu

SEQ ID NO: 3705498 - RNA, 19 nt, Human
uguauaaagcaacuguuau

SEQ ID NO: 3705499 - RNA, 23 nt, Human
uguauaaagcaacuguuaugaaa

SEQ ID NO: 3705500 - RNA, 12 nt, Human
uguauaaauaua

SEQ ID NO: 3705501 - RNA, 23 nt, Human
uguauaaaugaaguuuauacagu

SEQ ID NO: 3705502 - RNA, 19 nt, Human
guuggcguaggcuacagag

SEQ ID NO: 3705503 - RNA, 21 nt, Human
guuggcguaggcuacagagaa

SEQ ID NO: 3705504 - RNA, 22 nt, Human
guuggcguaggcuacagagaag

SEQ ID NO: 3705505 - RNA, 22 nt, Human
guuggcucugccaguccugucc

SEQ ID NO: 3705506 - RNA, 13 nt, Human
guuggcuggccuu

SEQ ID NO: 3705507 - RNA, 12 nt, Human
guuggcugggua

SEQ ID NO: 3705508 - RNA, 14 nt, Human
guuggcuuaccugg

SEQ ID NO: 3705509 - RNA, 13 nt, Human
guuggcuucuguu

SEQ ID NO: 3705510 - RNA, 23 nt, Human
guugggaaugaggaaaauucuua

SEQ ID NO: 3705511 - RNA, 19 nt, Human
guugggaaugaggcuugcu

SEQ ID NO: 3705512 - RNA, 21 nt, Human
guugggaaugaggcuugcuga

SEQ ID NO: 3705513 - RNA, 14 nt, Human
guugggagaauguc

SEQ ID NO: 3705514 - RNA, 14 nt, Human
guugggagcacugg

SEQ ID NO: 3705515 - RNA, 16 nt, Human
guugggagccugaaau

SEQ ID NO: 3705516 - RNA, 22 nt, Human
guugggaucagggguaggaaug

SEQ ID NO: 3705517 - RNA, 19 nt, Human
guugggauuccugacccag

SEQ ID NO: 3705518 - RNA, 22 nt, Human
guugggcagggugacccugaag

SEQ ID NO: 3705519 - RNA, 16 nt, Human
guugggcccagaucug

SEQ ID NO: 3705520 - RNA, 15 nt, Human
guugggcugguguca

SEQ ID NO: 3705521 - RNA, 21 nt, Human
guuggggacacauguauuugg

SEQ ID NO: 3705522 - RNA, 21 nt, Human
guugggggaggggagacuuug

SEQ ID NO: 3705523 - RNA, 14 nt, Human
guugggggucagug

SEQ ID NO: 3705524 - RNA, 16 nt, Human
guuggggucuggcagc

SEQ ID NO: 3705525 - RNA, 14 nt, Human
guuggggugacagu

SEQ ID NO: 3705526 - RNA, 19 nt, Human
guuggggugacagucauca

SEQ ID NO: 3705527 - RNA, 23 nt, Human
guugggguggguauaaaagaugg

SEQ ID NO: 3705528 - RNA, 21 nt, Human
guugggucaccagacggggcu

SEQ ID NO: 3705529 - RNA, 21 nt, Human
guugggugucuccuuaagcug

SEQ ID NO: 3705530 - RNA, 13 nt, Human
guugguaguuucu

SEQ ID NO: 3705531 - RNA, 15 nt, Human
guuggucaggcuggu

SEQ ID NO: 3705532 - RNA, 14 nt, Human
guugguccagagcg

SEQ ID NO: 3705533 - RNA, 16 nt, Human
guuggucuguacugau

SEQ ID NO: 3705534 - RNA, 17 nt, Human
guuggugcacagcacaa

SEQ ID NO: 3705535 - RNA, 13 nt, Human
guugguggugcug

SEQ ID NO: 3705536 - RNA, 15 nt, Human
guugguguguuuuug

SEQ ID NO: 3705537 - RNA, 15 nt, Human
guugguugugucuuu

SEQ ID NO: 3705538 - RNA, 18 nt, Human
guugguuuugacuucaga

SEQ ID NO: 3705539 - RNA, 14 nt, Human
guuguaaagcaaua

SEQ ID NO: 3705540 - RNA, 14 nt, Human
guuguaaauauaua

SEQ ID NO: 3705541 - RNA, 16 nt, Human
guuguaaauauauaaa

SEQ ID NO: 3705542 - RNA, 16 nt, Human
guuguaaauuggcaug

SEQ ID NO: 3705543 - RNA, 18 nt, Human
guuguaacuaggcucaga

SEQ ID NO: 3705544 - RNA, 15 nt, Human
guuguaacuuauauu

SEQ ID NO: 3705545 - RNA, 19 nt, Human
guuguaacuuauguagaua

SEQ ID NO: 3705546 - RNA, 16 nt, Human
guuguaagaauucuga

SEQ ID NO: 3705547 - RNA, 17 nt, Human
guuguaauauuucuuca

SEQ ID NO: 3705548 - RNA, 16 nt, Human
guuguacaugaaauuu

SEQ ID NO: 3705549 - RNA, 23 nt, Human
guuguacauuuaugauuuaauaa

SEQ ID NO: 3705550 - RNA, 15 nt, Human
guuguagacaaagua

SEQ ID NO: 3705551 - RNA, 16 nt, Human
guuguauaaauuuauu

SEQ ID NO: 3705552 - RNA, 14 nt, Human
guuguaugaucugu

SEQ ID NO: 3705553 - RNA, 23 nt, Human
guuguaugccuuuaaaucuguga

SEQ ID NO: 3705554 - RNA, 13 nt, Human
guuguauuaacaa

SEQ ID NO: 3705555 - RNA, 22 nt, Human
guugucaagaauagcauuguaa

SEQ ID NO: 3705556 - RNA, 22 nt, Human
guugucacugcuuuuggccugg

SEQ ID NO: 3705557 - RNA, 18 nt, Human
guugucagguuauuuauu

SEQ ID NO: 3705558 - RNA, 15 nt, Human
guugucauugcuuua

SEQ ID NO: 3705559 - RNA, 17 nt, Human
guugucccucugcuacg

SEQ ID NO: 3705560 - RNA, 15 nt, Human
guuguccuaugggag

SEQ ID NO: 3705561 - RNA, 19 nt, Human
guuguccuccccuugggcg

SEQ ID NO: 3705562 - RNA, 20 nt, Human
guuguccuccuuccggggaa

SEQ ID NO: 3705563 - RNA, 22 nt, Human
guuguccuccuuccggggaagg

SEQ ID NO: 3705564 - RNA, 14 nt, Human
guuguccuuuucau

SEQ ID NO: 3705565 - RNA, 14 nt, Human
guugucuaagaaau

SEQ ID NO: 3705566 - RNA, 21 nt, Human
guugucuaagaaauugaauac

SEQ ID NO: 3705567 - RNA, 15 nt, Human
guugucucccuggcc

SEQ ID NO: 3705568 - RNA, 17 nt, Human
guugucucccuggcccu

SEQ ID NO: 3705569 - RNA, 20 nt, Human
guugucucugaugcagcuua

SEQ ID NO: 3705570 - RNA, 13 nt, Human
guugucucuguuu

SEQ ID NO: 3705571 - RNA, 14 nt, Human
guugucuggcaagg

SEQ ID NO: 3705572 - RNA, 14 nt, Human
guugugaauguugu

SEQ ID NO: 3705573 - RNA, 13 nt, Human
guugugaccugaa

SEQ ID NO: 3705574 - RNA, 17 nt, Human
guugugaccuuaguguu

SEQ ID NO: 3705575 - RNA, 20 nt, Human
guugugaguuuaccuuguau

SEQ ID NO: 3705576 - RNA, 21 nt, Human
guugugaugucuuuucuuggc

SEQ ID NO: 3705577 - RNA, 17 nt, Human
guugugcaaauuaacag

SEQ ID NO: 3705578 - RNA, 22 nt, Human
guugugccacagaguguagcca

SEQ ID NO: 3705579 - RNA, 16 nt, Human
guugugccucccuggu

SEQ ID NO: 3705580 - RNA, 18 nt, Human
guugugccucccugguga

SEQ ID NO: 3705581 - RNA, 16 nt, Human
guuguggauuucaguu

SEQ ID NO: 3705582 - RNA, 24 nt, Human
guuguggccuuugcgcuccuggcc

SEQ ID NO: 3705583 - RNA, 15 nt, Human
guuguguaagagaau

SEQ ID NO: 3705584 - RNA, 14 nt, Human
guuguguauagaug

SEQ ID NO: 3705585 - RNA, 21 nt, Human
guugugugccucuagcugaau

SEQ ID NO: 3705586 - RNA, 13 nt, Human
guuguguguggga

SEQ ID NO: 3705587 - RNA, 22 nt, Human
guugugugugggaguguguaau

SEQ ID NO: 3705588 - RNA, 12 nt, Human
guuguguuguca

SEQ ID NO: 3705589 - RNA, 20 nt, Human
guuguguuuguugcuggcuu

SEQ ID NO: 3705590 - RNA, 16 nt, Human
guuguguuuuuuaaga

SEQ ID NO: 3705591 - RNA, 15 nt, Human
guuguuaauaaaagu

SEQ ID NO: 3705592 - RNA, 18 nt, Human
guuguuaaugaaaauguc

SEQ ID NO: 3705593 - RNA, 14 nt, Human
guuguuacauuuuu

SEQ ID NO: 3705594 - RNA, 20 nt, Human
guuguuacuaacuaaacucu

SEQ ID NO: 3705595 - RNA, 14 nt, Human
guuguuaugaugug

SEQ ID NO: 3705596 - RNA, 23 nt, Human
guuguuaugaugugcuuaacagg

SEQ ID NO: 3705597 - RNA, 15 nt, Human
guuguucaacuauuu

SEQ ID NO: 3705598 - RNA, 16 nt, Human
guuguucaacuauuuu

SEQ ID NO: 3705599 - RNA, 16 nt, Human
guuguucgggccaagg

SEQ ID NO: 3705600 - RNA, 12 nt, Human
guuguucuguua

SEQ ID NO: 3705601 - RNA, 15 nt, Human
guuguucuguuaacu

SEQ ID NO: 3705602 - RNA, 14 nt, Human
guuguugcauguuu

SEQ ID NO: 3705603 - RNA, 20 nt, Human
guuguugcuucuugugaagg

SEQ ID NO: 3705604 - RNA, 20 nt, Human
guuguuuacuuaaagauuua

SEQ ID NO: 3705605 - RNA, 13 nt, Human
guuguuucuucca

SEQ ID NO: 3705606 - RNA, 13 nt, Human
guuguuucuuucu

SEQ ID NO: 3705607 - RNA, 23 nt, Human
guuguuugauucagacagcugcc

SEQ ID NO: 3705608 - RNA, 13 nt, Human
guuguuuguaugu

SEQ ID NO: 3705609 - RNA, 15 nt, Human
guuguuuuguacaga

SEQ ID NO: 3705610 - RNA, 17 nt, Human
guuguuuuguacagaug

SEQ ID NO: 3705611 - RNA, 20 nt, Human
guuguuuuuuccuuugcucu

SEQ ID NO: 3705612 - RNA, 22 nt, Human
guuuaaaaaaguuuaaaaugua

SEQ ID NO: 3705613 - RNA, 23 nt, Human
guuuaaaaaaguuuaaaauguau

SEQ ID NO: 3705614 - RNA, 19 nt, Human
guuuaaaaaucaacuuuuu

SEQ ID NO: 3705615 - RNA, 13 nt, Human
guuuaaaacagua

SEQ ID NO: 3705616 - RNA, 17 nt, Human
guuuaaaacaguauuua

SEQ ID NO: 3705617 - RNA, 19 nt, Human
guuuaaaacaguauuuauu

SEQ ID NO: 3705618 - RNA, 14 nt, Human
guuuaaaagaaaaa

SEQ ID NO: 3705619 - RNA, 23 nt, Human
guuuaaaagacacacuuguccac

SEQ ID NO: 3705620 - RNA, 10 nt, Human
guuuaaaauc

SEQ ID NO: 3705621 - RNA, 16 nt, Human
guuuaaaaucauuucu

SEQ ID NO: 3705622 - RNA, 20 nt, Human
guuuaaaauguaauuuaaau

SEQ ID NO: 3705623 - RNA, 12 nt, Human
guuuaaacugau

SEQ ID NO: 3705624 - RNA, 18 nt, Human
guuuaaacuucucugaag

SEQ ID NO: 3705625 - RNA, 13 nt, Human
guuuaaagaaagu

SEQ ID NO: 3705626 - RNA, 18 nt, Human
guuuaaagaaaguguauu

SEQ ID NO: 3705627 - RNA, 21 nt, Human
guuuaaagaaaguguauuugg

SEQ ID NO: 3705628 - RNA, 16 nt, Human
guuuaaagagagguua

SEQ ID NO: 3705629 - RNA, 14 nt, Human
guuuaaagagucua

SEQ ID NO: 3705630 - RNA, 17 nt, Human
guuuaaagagucuagau

SEQ ID NO: 3705631 - RNA, 14 nt, Human
guuuaaagcaacug

SEQ ID NO: 3705632 - RNA, 16 nt, Human
guuuaaaguguauuau

SEQ ID NO: 3705633 - RNA, 23 nt, Human
guuuaaaguguauuauaacagug

SEQ ID NO: 3705634 - RNA, 15 nt, Human
guuuaaauaaaguau

SEQ ID NO: 3705635 - RNA, 19 nt, Human
guuuaaauauuucaagaca

SEQ ID NO: 3705636 - RNA, 12 nt, Human
guuuaacauaaa

SEQ ID NO: 3705637 - RNA, 21 nt, Human
guuuaacauuugccuugcaga

SEQ ID NO: 3705638 - RNA, 12 nt, Human
guuuaacucaga

SEQ ID NO: 3705639 - RNA, 16 nt, Human
guuuaacucagaucac

SEQ ID NO: 3705640 - RNA, 17 nt, Human
guuuaacucagaucacu

SEQ ID NO: 3705641 - RNA, 22 nt, Human
guuuaacucagaucacuacugc

SEQ ID NO: 3705642 - RNA, 23 nt, Human
guuuaagaaaaaauaacacacau

SEQ ID NO: 3705643 - RNA, 20 nt, Human
guuuaagaaaaguauuuuga

SEQ ID NO: 3705644 - RNA, 23 nt, Human
guuuaagaaaaguauuuugaagu

SEQ ID NO: 3705645 - RNA, 20 nt, Human
guuuaagacauuuuuggaag

SEQ ID NO: 3705646 - RNA, 23 nt, Human
guuuaagauuuaauuugccaaaa

SEQ ID NO: 3705647 - RNA, 12 nt, Human
guuuaagcagaa

SEQ ID NO: 3705648 - RNA, 19 nt, Human
guuuaagcagaauuggaaa

SEQ ID NO: 3705649 - RNA, 20 nt, Human
uggcguagaaguuuuuguac

SEQ ID NO: 3705650 - RNA, 20 nt, Human
uggcguagagggugcugccc

SEQ ID NO: 3705651 - RNA, 23 nt, Human
uggcguagagggugcugccccau

SEQ ID NO: 3705652 - RNA, 22 nt, Human
uggcgucugucuucaagggcuu

SEQ ID NO: 3705653 - RNA, 14 nt, Human
uggcgugaacccag

SEQ ID NO: 3705654 - RNA, 21 nt, Human
uggcgugacccgaccuggccg

SEQ ID NO: 3705655 - RNA, 22 nt, Human
uggcgugcaguggugcgaucug

SEQ ID NO: 3705656 - RNA, 15 nt, Human
uggcguggagcaggc

SEQ ID NO: 3705657 - RNA, 16 nt, Human
uggcguggauuaaacu

SEQ ID NO: 3705658 - RNA, 18 nt, Human
uggcgugucccucucgga

SEQ ID NO: 3705659 - RNA, 14 nt, Human
uggcguuguugcau

SEQ ID NO: 3705660 - RNA, 12 nt, Human
uggcuaaagaua

SEQ ID NO: 3705661 - RNA, 21 nt, Human
uggcuaacuauauuugcuuuu

SEQ ID NO: 3705662 - RNA, 15 nt, Human
uggcuacgccucuuc

SEQ ID NO: 3705663 - RNA, 14 nt, Human
uggcuacucugugc

SEQ ID NO: 3705664 - RNA, 19 nt, Human
uggcuacucugugccagag

SEQ ID NO: 3705665 - RNA, 20 nt, Human
uggcuacucugugccagagc

SEQ ID NO: 3705666 - RNA, 24 nt, Human
uggcuacucugugccagagccugg

SEQ ID NO: 3705667 - RNA, 22 nt, Human
uggcuacuuugguuucugucug

SEQ ID NO: 3705668 - RNA, 23 nt, Human
uggcuacuuugguuucugucugu

SEQ ID NO: 3705669 - RNA, 18 nt, Human
uggcuagaguccucacuc

SEQ ID NO: 3705670 - RNA, 17 nt, Human
uggcuagucaagcuccu

SEQ ID NO: 3705671 - RNA, 20 nt, Human
uggcuagucaagcuccuccu

SEQ ID NO: 3705672 - RNA, 21 nt, Human
uggcuagucaagcuccuccuc

SEQ ID NO: 3705673 - RNA, 17 nt, Human
uggcuagugucuaucag

SEQ ID NO: 3705674 - RNA, 19 nt, Human
uggcuauagaugucuuuuc

SEQ ID NO: 3705675 - RNA, 13 nt, Human
uggcuauguuuuu

SEQ ID NO: 3705676 - RNA, 17 nt, Human
uggcucaagucuggccc

SEQ ID NO: 3705677 - RNA, 16 nt, Human
uggcucaauccucuaa

SEQ ID NO: 3705678 - RNA, 16 nt, Human
uggcucacaccuguaa

SEQ ID NO: 3705679 - RNA, 17 nt, Human
uggcucacaccuguaau

SEQ ID NO: 3705680 - RNA, 17 nt, Human
uggcucacacucgacau

SEQ ID NO: 3705681 - RNA, 14 nt, Human
uggcucacagacug

SEQ ID NO: 3705682 - RNA, 18 nt, Human
uggcucacagacuggaga

SEQ ID NO: 3705683 - RNA, 19 nt, Human
uggcucacaugguuuacau

SEQ ID NO: 3705684 - RNA, 16 nt, Human
uggcucacgccuguaa

SEQ ID NO: 3705685 - RNA, 16 nt, Human
uggcucacguguguga

SEQ ID NO: 3705686 - RNA, 15 nt, Human
uggcucacugcagcc

SEQ ID NO: 3705687 - RNA, 14 nt, Human
uggcucagcucggg

SEQ ID NO: 3705688 - RNA, 16 nt, Human
uggcuccaaacccucg

SEQ ID NO: 3705689 - RNA, 20 nt, Human
uggcuccaaacccucgaggc

SEQ ID NO: 3705690 - RNA, 23 nt, Human
uggcuccacacacacaaaaaaag

SEQ ID NO: 3705691 - RNA, 15 nt, Human
uggcuccagccugga

SEQ ID NO: 3705692 - RNA, 14 nt, Human
uggcuccaggccaa

SEQ ID NO: 3705693 - RNA, 13 nt, Human
uguccagugccca

SEQ ID NO: 3705694 - RNA, 14 nt, Human
uguccagugcccau

SEQ ID NO: 3705695 - RNA, 16 nt, Human
uguccaucugcccgcc

SEQ ID NO: 3705696 - RNA, 19 nt, Human
uguccaucugcccgccugc

SEQ ID NO: 3705697 - RNA, 22 nt, Human
uguccaucugcccgccugccca

SEQ ID NO: 3705698 - RNA, 22 nt, Human
uguccaugcgcucagggccaug

SEQ ID NO: 3705699 - RNA, 16 nt, Human
uguccaugugugugca

SEQ ID NO: 3705700 - RNA, 14 nt, Human
uguccauugacaug

SEQ ID NO: 3705701 - RNA, 16 nt, Human
uguccauugacaugua

SEQ ID NO: 3705702 - RNA, 12 nt, Human
uguccauuuaua

SEQ ID NO: 3705703 - RNA, 13 nt, Human
uguccauuuguaa

SEQ ID NO: 3705704 - RNA, 21 nt, Human
uguccauuuugugaagcccug

SEQ ID NO: 3705705 - RNA, 14 nt, Human
ugucccaagugcca

SEQ ID NO: 3705706 - RNA, 13 nt, Human
ugucccacagcuu

SEQ ID NO: 3705707 - RNA, 14 nt, Human
ugucccacagcuug

SEQ ID NO: 3705708 - RNA, 18 nt, Human
ugucccaccauacgagca

SEQ ID NO: 3705709 - RNA, 23 nt, Human
ugucccaccauacgagcaccucc

SEQ ID NO: 3705710 - RNA, 17 nt, Human
ugucccacccccacccc

SEQ ID NO: 3705711 - RNA, 19 nt, Human
ugucccacccccuuccccc

SEQ ID NO: 3705712 - RNA, 21 nt, Human
ugucccaccucuucucuuccu

SEQ ID NO: 3705713 - RNA, 16 nt, Human
ugucccagaagaugac

SEQ ID NO: 3705714 - RNA, 16 nt, Human
ugucccaggcacugua

SEQ ID NO: 3705715 - RNA, 20 nt, Human
ugucccaucuggucauuugg

SEQ ID NO: 3705716 - RNA, 17 nt, Human
ugucccaugacccaccc

SEQ ID NO: 3705717 - RNA, 18 nt, Human
ugucccaugacccacccc

SEQ ID NO: 3705718 - RNA, 20 nt, Human
ugucccaugacccaccccug

SEQ ID NO: 3705719 - RNA, 17 nt, Human
ugucccauggacacucc

SEQ ID NO: 3705720 - RNA, 18 nt, Human
ugucccauggacacucca

SEQ ID NO: 3705721 - RNA, 20 nt, Human
ugucccaugugagcugcugc

SEQ ID NO: 3705722 - RNA, 16 nt, Human
ugucccauucccuggg

SEQ ID NO: 3705723 - RNA, 21 nt, Human
uguccccaaauccgaaccucc

SEQ ID NO: 3705724 - RNA, 16 nt, Human
uguccccacacuccua

SEQ ID NO: 3705725 - RNA, 12 nt, Human
uguccccaccau

SEQ ID NO: 3705726 - RNA, 17 nt, Human
uguccccacccuccacu

SEQ ID NO: 3705727 - RNA, 19 nt, Human
uguccccacccuccacuca

SEQ ID NO: 3705728 - RNA, 13 nt, Human
uguccccaccgca

SEQ ID NO: 3705729 - RNA, 18 nt, Human
uguccccaccgcagacag

SEQ ID NO: 3705730 - RNA, 19 nt, Human
uguccccaccgcagacagg

SEQ ID NO: 3705731 - RNA, 16 nt, Human
uguccccagcccacug

SEQ ID NO: 3705732 - RNA, 13 nt, Human
ugucccccagcuc

SEQ ID NO: 3705733 - RNA, 14 nt, Human
uguccccccacucc

SEQ ID NO: 3705734 - RNA, 18 nt, Human
ugucccccucuguccagg

SEQ ID NO: 3705735 - RNA, 12 nt, Human
uguccccuccca

SEQ ID NO: 3705736 - RNA, 17 nt, Human
uguccccucuugcccca

SEQ ID NO: 3705737 - RNA, 17 nt, Human
ugucccgauuguaacuc

SEQ ID NO: 3705738 - RNA, 20 nt, Human
ugucccuaccgagucucuuc

SEQ ID NO: 3705739 - RNA, 21 nt, Human
ugucccuaguaaaaauacaaa

SEQ ID NO: 3705740 - RNA, 19 nt, Human
ugucccucaaaugacccaa

SEQ ID NO: 3705741 - RNA, 12 nt, Human
ugucccuccugg

SEQ ID NO: 3705742 - RNA, 16 nt, Human
ugucccuccugguguc

SEQ ID NO: 3705743 - RNA, 13 nt, Human
ugucccucuaaag

SEQ ID NO: 3705744 - RNA, 15 nt, Human
ugucccucucucugg

SEQ ID NO: 3705745 - RNA, 16 nt, Human
ugucccucucucugga

SEQ ID NO: 3705746 - RNA, 14 nt, Human
ugucccucugcccc

SEQ ID NO: 3705747 - RNA, 20 nt, Human
ugucccugcacuugcagacu

SEQ ID NO: 3705748 - RNA, 15 nt, Human
ugucccuggccaucu

SEQ ID NO: 3705749 - RNA, 16 nt, Human
ugucccuggccaucuc

SEQ ID NO: 3705750 - RNA, 17 nt, Human
ugucccuggccaucucu

SEQ ID NO: 3705751 - RNA, 14 nt, Human
ugucccugggccag

SEQ ID NO: 3705752 - RNA, 13 nt, Human
ugucccugucacc

SEQ ID NO: 3705753 - RNA, 23 nt, Human
ugucccuuacgugaguccuggca

SEQ ID NO: 3705754 - RNA, 17 nt, Human
ugucccuugaugcacag

SEQ ID NO: 3705755 - RNA, 19 nt, Human
ugucccuugaugcacagag

SEQ ID NO: 3705756 - RNA, 20 nt, Human
ugucccuugaugcacagaga

SEQ ID NO: 3705757 - RNA, 21 nt, Human
ugucccuugccccccuggccu

SEQ ID NO: 3705758 - RNA, 14 nt, Human
ugucccuuggagcu

SEQ ID NO: 3705759 - RNA, 12 nt, Human
ugucccuuucuu

SEQ ID NO: 3705760 - RNA, 14 nt, Human
ugucccuuucuucu

SEQ ID NO: 3705761 - RNA, 15 nt, Human
ugucccuuucuucuc

SEQ ID NO: 3705762 - RNA, 16 nt, Human
ugucccuuucuucucc

SEQ ID NO: 3705763 - RNA, 17 nt, Human
ugucccuuucuucuccc

SEQ ID NO: 3705764 - RNA, 18 nt, Human
ugucccuuucuuggccag

SEQ ID NO: 3705765 - RNA, 15 nt, Human
uguccgacucuucug

SEQ ID NO: 3705766 - RNA, 22 nt, Human
uguccgagaacuaaagccaagg

SEQ ID NO: 3705767 - RNA, 12 nt, Human
uguccgcccucu

SEQ ID NO: 3705768 - RNA, 13 nt, Human
uguccgcccucuu

SEQ ID NO: 3705769 - RNA, 20 nt, Human
uguccgcugggugguacccu

SEQ ID NO: 3705770 - RNA, 17 nt, Human
uguccggaaugccaccc

SEQ ID NO: 3705771 - RNA, 18 nt, Human
uguccuaaggacacacua

SEQ ID NO: 3705772 - RNA, 20 nt, Human
uguccuaaggacacacuaau

SEQ ID NO: 3705773 - RNA, 22 nt, Human
uguccuaauaauaucccacugg

SEQ ID NO: 3705774 - RNA, 16 nt, Human
uguccuaauucuucug

SEQ ID NO: 3705775 - RNA, 18 nt, Human
uguccuaauucuucuguc

SEQ ID NO: 3705776 - RNA, 20 nt, Human
uguccuaauucuucuguccu

SEQ ID NO: 3705777 - RNA, 16 nt, Human
uguccuacagaaaaac

SEQ ID NO: 3705778 - RNA, 20 nt, Human
uguccuaggaguauccucau

SEQ ID NO: 3705779 - RNA, 16 nt, Human
uguccuaugcaauaaa

SEQ ID NO: 3705780 - RNA, 14 nt, Human
uguccuauguguga

SEQ ID NO: 3705781 - RNA, 16 nt, Human
uguccuauuaguguua

SEQ ID NO: 3705782 - RNA, 20 nt, Human
uguccucaccaugauggggc

SEQ ID NO: 3705783 - RNA, 15 nt, Human
uguccucacugcucc

SEQ ID NO: 3705784 - RNA, 22 nt, Human
uguccucacugcucccugaagc

SEQ ID NO: 3705785 - RNA, 13 nt, Human
uguccucagccuu

SEQ ID NO: 3705786 - RNA, 18 nt, Human
uguccucagguggccaug

SEQ ID NO: 3705787 - RNA, 17 nt, Human
uguccucauuucuccag

SEQ ID NO: 3705788 - RNA, 16 nt, Human
uguccuccagaagccu

SEQ ID NO: 3705789 - RNA, 15 nt, Human
uguccuccaggagcu

SEQ ID NO: 3705790 - RNA, 21 nt, Human
uguccuccaggagcuucuugu

SEQ ID NO: 3705791 - RNA, 21 nt, Human
uguccucccaccccugccccc

SEQ ID NO: 3705792 - RNA, 19 nt, Human
uguccucccauccccugga

SEQ ID NO: 3705793 - RNA, 23 nt, Human
uguccucccauccccuggacugg

SEQ ID NO: 3705794 - RNA, 14 nt, Human
uguccuccccuugg

SEQ ID NO: 3705795 - RNA, 21 nt, Human
uguccucccgagcuccucuuc

SEQ ID NO: 3705796 - RNA, 19 nt, Human
uguccucccuccaccuacc

SEQ ID NO: 3705797 - RNA, 11 nt, Human
uguccuccucg

SEQ ID NO: 3705798 - RNA, 12 nt, Human
uguccuccuggu

SEQ ID NO: 3705799 - RNA, 13 nt, Human
uguccucuccccu

SEQ ID NO: 3705800 - RNA, 13 nt, Human
uguccucuucccu

SEQ ID NO: 3705801 - RNA, 16 nt, Human
uguccucuucccucuc

SEQ ID NO: 3705802 - RNA, 15 nt, Human
uguccucuugcucaa

SEQ ID NO: 3705803 - RNA, 15 nt, Human
uguccugaccacccu

SEQ ID NO: 3705804 - RNA, 16 nt, Human
uguccugaccacccuc

SEQ ID NO: 3705805 - RNA, 19 nt, Human
uguccugaccacccucccc

SEQ ID NO: 3705806 - RNA, 17 nt, Human
uguccugaccugucuca

SEQ ID NO: 3705807 - RNA, 22 nt, Human
uguccugacuucaggggcugcc

SEQ ID NO: 3705808 - RNA, 10 nt, Human
uguccugccu

SEQ ID NO: 3705809 - RNA, 17 nt, Human
uguccugccuauuaucu

SEQ ID NO: 3705810 - RNA, 24 nt, Human
uguccugccuauuaucugucagcu

SEQ ID NO: 3705811 - RNA, 12 nt, Human
uguccugccugu

SEQ ID NO: 3705812 - RNA, 14 nt, Human
uguccugccugucu

SEQ ID NO: 3705813 - RNA, 16 nt, Human
uguccugcuccacagu

SEQ ID NO: 3705814 - RNA, 19 nt, Human
uguccugggagugagcugg

SEQ ID NO: 3705815 - RNA, 10 nt, Human
uguccugggc

SEQ ID NO: 3705816 - RNA, 17 nt, Human
uguccugggcgcccugg

SEQ ID NO: 3705817 - RNA, 17 nt, Human
uguccugggcugguggc

SEQ ID NO: 3705818 - RNA, 19 nt, Human
uguccuggugcucucugcc

SEQ ID NO: 3705819 - RNA, 17 nt, Human
uguccuggugguauuuu

SEQ ID NO: 3705820 - RNA, 20 nt, Human
uguccuguaaacacucagcu

SEQ ID NO: 3705821 - RNA, 15 nt, Human
uguccuguaaagguu

SEQ ID NO: 3705822 - RNA, 22 nt, Human
uguccuguaaagguuacaagcc

SEQ ID NO: 3705823 - RNA, 16 nt, Human
uguccuguacauugug

SEQ ID NO: 3705824 - RNA, 17 nt, Human
uguccugugucaguuua

SEQ ID NO: 3705825 - RNA, 21 nt, Human
uguccugugucaguuuauguu

SEQ ID NO: 3705826 - RNA, 15 nt, Human
uguccuuagccugga

SEQ ID NO: 3705827 - RNA, 14 nt, Human
uguccuucccugca

SEQ ID NO: 3705828 - RNA, 19 nt, Human
uguccuucucucaccuccu

SEQ ID NO: 3705829 - RNA, 21 nt, Human
uguccuucucucaccuccuaa

SEQ ID NO: 3705830 - RNA, 14 nt, Human
uguccuugugcaug

SEQ ID NO: 3705831 - RNA, 15 nt, Human
uguccuuguguguuu

SEQ ID NO: 3705832 - RNA, 14 nt, Human
uguccuuucccuuc

SEQ ID NO: 3705833 - RNA, 13 nt, Human
uguccuuucuaga

SEQ ID NO: 3705834 - RNA, 18 nt, Human
uguccuuucuagagcacu

SEQ ID NO: 3705835 - RNA, 15 nt, Human
uguccuuuuuccucu

SEQ ID NO: 3705836 - RNA, 16 nt, Human
uguccuuuuuccucuc

SEQ ID NO: 3705837 - RNA, 16 nt, Human
uguccuuuuuguuauu

SEQ ID NO: 3705838 - RNA, 22 nt, Human
ugucgaaaagagucuuccaauu

SEQ ID NO: 3705839 - RNA, 14 nt, Human
ugucgauuagacug

SEQ ID NO: 3705840 - RNA, 16 nt, Human
ugucgcccaggcugga

SEQ ID NO: 3705841 - RNA, 20 nt, Human
ugucgcgccuucuccccccc

SEQ ID NO: 3705842 - RNA, 14 nt, Human
ugucgcucaugugu

SEQ ID NO: 3705843 - RNA, 15 nt, Human
ugucgggcaccagcc

SEQ ID NO: 3705844 - RNA, 19 nt, Human
ugucgggcaccagccagcg

SEQ ID NO: 3705845 - RNA, 15 nt, Human
ugucgggcaugacac

SEQ ID NO: 3705846 - RNA, 22 nt, Human
ugucgggcccuucuugcugccc

SEQ ID NO: 3705847 - RNA, 20 nt, Human
ugucgggcuuugugugaagg

SEQ ID NO: 3705848 - RNA, 23 nt, Human
ugucguagccaaggugggcugag

SEQ ID NO: 3705849 - RNA, 22 nt, Human
ugucguauuuggcacacagcag

SEQ ID NO: 3705850 - RNA, 18 nt, Human
ugucuaaaaaacaaaaca

SEQ ID NO: 3705851 - RNA, 13 nt, Human
ugucuaaaaacac

SEQ ID NO: 3705852 - RNA, 15 nt, Human
ugucuaaaacaauaa

SEQ ID NO: 3705853 - RNA, 22 nt, Human
ugucuaaaaugccucaguguau

SEQ ID NO: 3705854 - RNA, 21 nt, Human
ugucuaaacaaugcugauuug

SEQ ID NO: 3705855 - RNA, 13 nt, Human
ugucuaaacugca

SEQ ID NO: 3705856 - RNA, 12 nt, Human
ugucuaaagugu

SEQ ID NO: 3705857 - RNA, 20 nt, Human
ugucuaacucagaauuauuu

SEQ ID NO: 3705858 - RNA, 22 nt, Human
ugucuaacuuuagaagugcauu

SEQ ID NO: 3705859 - RNA, 18 nt, Human
ugucuaagaaauugaaua

SEQ ID NO: 3705860 - RNA, 15 nt, Human
ugucuaagauaguaa

SEQ ID NO: 3705861 - RNA, 21 nt, Human
ugucuaagauuaauagcauuc

SEQ ID NO: 3705862 - RNA, 16 nt, Human
ugucuaagauucuaga

SEQ ID NO: 3705863 - RNA, 22 nt, Human
ugucuacacuaagagagaauga

SEQ ID NO: 3705864 - RNA, 12 nt, Human
ugucuacagaga

SEQ ID NO: 3705865 - RNA, 14 nt, Human
ugucuaccaucucc

SEQ ID NO: 3705866 - RNA, 16 nt, Human
ugucuaccaucucccu

SEQ ID NO: 3705867 - RNA, 19 nt, Human
ugucuaggauuuuggaugu

SEQ ID NO: 3705868 - RNA, 15 nt, Human
ugucuaguuguuuga

SEQ ID NO: 3705869 - RNA, 22 nt, Human
ugucuauaaucccagcacuuug

SEQ ID NO: 3705870 - RNA, 17 nt, Human
ugucuauaguugucagu

SEQ ID NO: 3705871 - RNA, 19 nt, Human
ugucuauucaaaauaucaa

SEQ ID NO: 3705872 - RNA, 14 nt, Human
ugucuauucuccag

SEQ ID NO: 3705873 - RNA, 18 nt, Human
ugucuauuucugcugaau

SEQ ID NO: 3705874 - RNA, 15 nt, Human
ugucuauuuuaaaau

SEQ ID NO: 3705875 - RNA, 22 nt, Human
ugucuauuuuaaaauaaauuag

SEQ ID NO: 3705876 - RNA, 15 nt, Human
ugucucaaugcucau

SEQ ID NO: 3705877 - RNA, 17 nt, Human
ugucucaaugcucauaa

SEQ ID NO: 3705878 - RNA, 14 nt, Human
ugucucagacuuuu

SEQ ID NO: 3705879 - RNA, 15 nt, Human
ugucucagacuuuug

SEQ ID NO: 3705880 - RNA, 20 nt, Human
ugucucaggcugccugaguc

SEQ ID NO: 3705881 - RNA, 21 nt, Human
ugucucaguccaugaagaugu

SEQ ID NO: 3705882 - RNA, 11 nt, Human
ugucucauccc

SEQ ID NO: 3705883 - RNA, 12 nt, Human
ugucucauccca

SEQ ID NO: 3705884 - RNA, 15 nt, Human
ugucucauccuccug

SEQ ID NO: 3705885 - RNA, 13 nt, Human
ugucucaugccag

SEQ ID NO: 3705886 - RNA, 16 nt, Human
ugucuccaacccccca

SEQ ID NO: 3705887 - RNA, 13 nt, Human
ugucuccacugug

SEQ ID NO: 3705888 - RNA, 12 nt, Human
ugucuccagacc

SEQ ID NO: 3705889 - RNA, 20 nt, Human
ugucuccagacccccacccc

SEQ ID NO: 3705890 - RNA, 22 nt, Human
ugucuccagacccccaccccuu

SEQ ID NO: 3705891 - RNA, 23 nt, Human
ugucuccagacccccaccccuuc

SEQ ID NO: 3705892 - RNA, 15 nt, Human
ugucuccauggcccu

SEQ ID NO: 3705893 - RNA, 20 nt, Human
ugucucccuauaaugcugga

SEQ ID NO: 3705894 - RNA, 21 nt, Human
ugucuccuaagcaccuguaau

SEQ ID NO: 3705895 - RNA, 16 nt, Human
ugucuccuacuccuga

SEQ ID NO: 3705896 - RNA, 18 nt, Human
ugucuccuauauauuucu

SEQ ID NO: 3705897 - RNA, 21 nt, Human
ugucuccuuaagcugcagaga

SEQ ID NO: 3705898 - RNA, 17 nt, Human
ugucuccuugguuauau

SEQ ID NO: 3705899 - RNA, 17 nt, Human
ugucuccuuuaagagcu

SEQ ID NO: 3705900 - RNA, 21 nt, Human
ugucuccuuucaccccagggc

SEQ ID NO: 3705901 - RNA, 22 nt, Human
ugucuccuuucaccccagggcc

SEQ ID NO: 3705902 - RNA, 15 nt, Human
ugucucgaacuauuu

SEQ ID NO: 3705903 - RNA, 17 nt, Human
ugucucgagcgcccugc

SEQ ID NO: 3705904 - RNA, 20 nt, Human
ugucucgagcgcccugcaga

SEQ ID NO: 3705905 - RNA, 14 nt, Human
ugucucguuuguga

SEQ ID NO: 3705906 - RNA, 15 nt, Human
ugucucuaacuuauu

SEQ ID NO: 3705907 - RNA, 17 nt, Human
ugucucuacuaaaaaua

SEQ ID NO: 3705908 - RNA, 13 nt, Human
ugucucuccuuuu

SEQ ID NO: 3705909 - RNA, 20 nt, Human
ugucucucuucucagagugg

SEQ ID NO: 3705910 - RNA, 13 nt, Human
ugucucugaugca

SEQ ID NO: 3705911 - RNA, 14 nt, Human
ugucucugaugcag

SEQ ID NO: 3705912 - RNA, 19 nt, Human
ugucucugaugcagcuuau

SEQ ID NO: 3705913 - RNA, 20 nt, Human
ugucucugaugcagcuuaua

SEQ ID NO: 3705914 - RNA, 18 nt, Human
ugucucugcaaacugccu

SEQ ID NO: 3705915 - RNA, 13 nt, Human
ugucucugccucc

SEQ ID NO: 3705916 - RNA, 11 nt, Human
ugucucugcuc

SEQ ID NO: 3705917 - RNA, 22 nt, Human
ugucucuggauuauauuaugaa

SEQ ID NO: 3705918 - RNA, 18 nt, Human
ugucucuggcgugugggu

SEQ ID NO: 3705919 - RNA, 19 nt, Human
ugucucuggcgugugggua

SEQ ID NO: 3705920 - RNA, 16 nt, Human
ugucucugggccacuu

SEQ ID NO: 3705921 - RNA, 13 nt, Human
ugucucugugaga

SEQ ID NO: 3705922 - RNA, 20 nt, Human
ugucucuuaaaaaaauaaaa

SEQ ID NO: 3705923 - RNA, 22 nt, Human
ugucucuuauggauguccccag

SEQ ID NO: 3705924 - RNA, 21 nt, Human
ugucucuuccauaugaccuca

SEQ ID NO: 3705925 - RNA, 17 nt, Human
ugucucuucuuuagaac

SEQ ID NO: 3705926 - RNA, 20 nt, Human
ugucucuugguccugcugca

SEQ ID NO: 3705927 - RNA, 21 nt, Human
ugucucuugguccugcugcag

SEQ ID NO: 3705928 - RNA, 17 nt, Human
ugucucuuuaagggcau

SEQ ID NO: 3705929 - RNA, 21 nt, Human
ugucucuuuaaugucacaggc

SEQ ID NO: 3705930 - RNA, 16 nt, Human
ugucucuuuuuuaagu

SEQ ID NO: 3705931 - RNA, 19 nt, Human
ugucugaaacauuucauaa

SEQ ID NO: 3705932 - RNA, 16 nt, Human
ugucugaacuugcauu

SEQ ID NO: 3705933 - RNA, 17 nt, Human
ugucugaacuuugggaa

SEQ ID NO: 3705934 - RNA, 18 nt, Human
ugucugaaggacacuucc

SEQ ID NO: 3705935 - RNA, 16 nt, Human
ugucugaagucacugc

SEQ ID NO: 3705936 - RNA, 17 nt, Human
ugucugaagucacugca

SEQ ID NO: 3705937 - RNA, 23 nt, Human
ugucugaaucgagugagacaaaa

SEQ ID NO: 3705938 - RNA, 17 nt, Human
ugucugagcccucaaag

SEQ ID NO: 3705939 - RNA, 17 nt, Human
ugucugagugaaccugu

SEQ ID NO: 3705940 - RNA, 16 nt, Human
ugucugaguggcuuca

SEQ ID NO: 3705941 - RNA, 21 nt, Human
ugucugaucguucaaagcaug

SEQ ID NO: 3705942 - RNA, 16 nt, Human
ugucugaucugugcuu

SEQ ID NO: 3705943 - RNA, 23 nt, Human
ugucugaucugugcuuuccagcu

SEQ ID NO: 3705944 - RNA, 14 nt, Human
ugucugcacccagg

SEQ ID NO: 3705945 - RNA, 13 nt, Human
ugucugcagccuu

SEQ ID NO: 3705946 - RNA, 16 nt, Human
ugucugccacauuaac

SEQ ID NO: 3705947 - RNA, 19 nt, Human
ugucugccagccagcagcc

SEQ ID NO: 3705948 - RNA, 13 nt, Human
ugucugccagggc

SEQ ID NO: 3705949 - RNA, 18 nt, Human
ugucugccauguugcccc

SEQ ID NO: 3705950 - RNA, 19 nt, Human
ugucugcccaaugaauaau

SEQ ID NO: 3705951 - RNA, 22 nt, Human
ugucugccccaaguuuugugaa

SEQ ID NO: 3705952 - RNA, 18 nt, Human
ugucugcuggucacuucu

SEQ ID NO: 3705953 - RNA, 22 nt, Human
ugucugcuggucacuucuucug

SEQ ID NO: 3705954 - RNA, 15 nt, Human
ugucuggaagauggg

SEQ ID NO: 3705955 - RNA, 14 nt, Human
ugucuggagaauaa

SEQ ID NO: 3705956 - RNA, 18 nt, Human
ugucuggagaccaccagg

SEQ ID NO: 3705957 - RNA, 22 nt, Human
ugucuggaggggagcucugucu

SEQ ID NO: 3705958 - RNA, 15 nt, Human
ugucuggaucaguaa

SEQ ID NO: 3705959 - RNA, 15 nt, Human
ugucuggauucccag

SEQ ID NO: 3705960 - RNA, 19 nt, Human
ugucuggauucccaggaug

SEQ ID NO: 3705961 - RNA, 18 nt, Human
ugucuggcaaaagaaaaa

SEQ ID NO: 3705962 - RNA, 16 nt, Human
ugucuggcaaugccac

SEQ ID NO: 3705963 - RNA, 15 nt, Human
ugucuggccaggccu

SEQ ID NO: 3705964 - RNA, 17 nt, Human
ugucuggcugcagagca

SEQ ID NO: 3705965 - RNA, 12 nt, Human
ugucugggcuga

SEQ ID NO: 3705966 - RNA, 16 nt, Human
ugucugggugcuacug

SEQ ID NO: 3705967 - RNA, 17 nt, Human
ugucuggguuugagaaa

SEQ ID NO: 3705968 - RNA, 13 nt, Human
ugucugguggccc

SEQ ID NO: 3705969 - RNA, 21 nt, Human
ugucuggugguggcaccaucu

SEQ ID NO: 3705970 - RNA, 14 nt, Human
ugucugguucucaa

SEQ ID NO: 3705971 - RNA, 22 nt, Human
ugucugguuuuaacaauuuccu

SEQ ID NO: 3705972 - RNA, 17 nt, Human
ugucuguaaauauguuu

SEQ ID NO: 3705973 - RNA, 15 nt, Human
ugucuguacacgugu

SEQ ID NO: 3705974 - RNA, 21 nt, Human
ugucuguagagggcccuggug

SEQ ID NO: 3705975 - RNA, 17 nt, Human
ugucuguagcuccucaa

SEQ ID NO: 3705976 - RNA, 22 nt, Human
ugucuguauuucauguggcugu

SEQ ID NO: 3705977 - RNA, 13 nt, Human
ugucugucauugu

SEQ ID NO: 3705978 - RNA, 14 nt, Human
ugucugucuguccc

SEQ ID NO: 3705979 - RNA, 14 nt, Human
ugucugugaacaga

SEQ ID NO: 3705980 - RNA, 19 nt, Human
ugucugugaagugagaccu

SEQ ID NO: 3705981 - RNA, 20 nt, Human
ugucuguggauggucauugc

SEQ ID NO: 3705982 - RNA, 21 nt, Human
ugucuguggauggucauugca

SEQ ID NO: 3705983 - RNA, 15 nt, Human
ugucuguggauuuuu

SEQ ID NO: 3705984 - RNA, 17 nt, Human
ugucuguuuaagaaaag

SEQ ID NO: 3705985 - RNA, 20 nt, Human
ugucuguuuguuucaagaac

SEQ ID NO: 3705986 - RNA, 20 nt, Human
ugucuuaaacuaaaugugca

SEQ ID NO: 3705987 - RNA, 19 nt, Human
ugucuuaaauaaaagaaau

SEQ ID NO: 3705988 - RNA, 14 nt, Human
ugucuuaaugaagu

SEQ ID NO: 3705989 - RNA, 18 nt, Human
ugucuuaaugaaguuuga

SEQ ID NO: 3705990 - RNA, 21 nt, Human
ugucuuaaugaaguuugaaug

SEQ ID NO: 3705991 - RNA, 13 nt, Human
ugucuuauauaua

SEQ ID NO: 3705992 - RNA, 19 nt, Human
ugucuuauggauucauuua

SEQ ID NO: 3705993 - RNA, 14 nt, Human
ugucuuauugacag

SEQ ID NO: 3705994 - RNA, 17 nt, Human
guuugugacagggcggg

SEQ ID NO: 3705995 - RNA, 23 nt, Human
guuugugauucuuccagauguga

SEQ ID NO: 3705996 - RNA, 13 nt, Human
guuuguggccuca

SEQ ID NO: 3705997 - RNA, 15 nt, Human
guuuguggccucaga

SEQ ID NO: 3705998 - RNA, 23 nt, Human
guuuguggggugacgggacucag

SEQ ID NO: 3705999 - RNA, 21 nt, Human
guuuguguguugucuugaaag

SEQ ID NO: 3706000 - RNA, 20 nt, Human
guuuguguucuguuuguuaa

SEQ ID NO: 3706001 - RNA, 17 nt, Human
guuuguuaaaacuggca

SEQ ID NO: 3706002 - RNA, 14 nt, Human
guuuguucaucugu

SEQ ID NO: 3706003 - RNA, 13 nt, Human
guuuguucccugu

SEQ ID NO: 3706004 - RNA, 18 nt, Human
guuuguucuuguuuuuaa

SEQ ID NO: 3706005 - RNA, 16 nt, Human
guuuguugugaggauu

SEQ ID NO: 3706006 - RNA, 18 nt, Human
guuuguuuacaaaaucag

SEQ ID NO: 3706007 - RNA, 12 nt, Human
guuuguuuaguc

SEQ ID NO: 3706008 - RNA, 19 nt, Human
guuuguuucucccccuggg

SEQ ID NO: 3706009 - RNA, 20 nt, Human
guuuguuucucccccugggc

SEQ ID NO: 3706010 - RNA, 12 nt, Human
guuuguuucuuu

SEQ ID NO: 3706011 - RNA, 14 nt, Human
guuuguuuguauuu

SEQ ID NO: 3706012 - RNA, 15 nt, Human
guuuguuugucuguu

SEQ ID NO: 3706013 - RNA, 17 nt, Human
guuuguuuguuugucug

SEQ ID NO: 3706014 - RNA, 15 nt, Human
guuuguuuguuuugu

SEQ ID NO: 3706015 - RNA, 13 nt, Human
guuuguuuuccuu

SEQ ID NO: 3706016 - RNA, 15 nt, Human
guuuguuuugugaau

SEQ ID NO: 3706017 - RNA, 16 nt, Human
guuuguuuuugcuugu

SEQ ID NO: 3706018 - RNA, 17 nt, Human
guuuguuuuuuugccac

SEQ ID NO: 3706019 - RNA, 20 nt, Human
guuuuaaaaaaauaaaacau

SEQ ID NO: 3706020 - RNA, 17 nt, Human
guuuuaaaaaccuguuc

SEQ ID NO: 3706021 - RNA, 21 nt, Human
guuuuaaaacuggaccuguau

SEQ ID NO: 3706022 - RNA, 16 nt, Human
guuuuaaaauacugua

SEQ ID NO: 3706023 - RNA, 14 nt, Human
guuuuaaaauuaaa

SEQ ID NO: 3706024 - RNA, 19 nt, Human
guuuuaaacauagaaaguu

SEQ ID NO: 3706025 - RNA, 23 nt, Human
guuuuaaacauuaauagcagccu

SEQ ID NO: 3706026 - RNA, 14 nt, Human
guuuuaaacucauu

SEQ ID NO: 3706027 - RNA, 15 nt, Human
guuuuaaagugauua

SEQ ID NO: 3706028 - RNA, 20 nt, Human
guuuuaaaguucauugcaau

SEQ ID NO: 3706029 - RNA, 14 nt, Human
guuuuaaauguaca

SEQ ID NO: 3706030 - RNA, 13 nt, Human
guuuuaaauucug

SEQ ID NO: 3706031 - RNA, 21 nt, Human
guuuuaacaaaugcuauuaaa

SEQ ID NO: 3706032 - RNA, 22 nt, Human
guuuuaacuguggauauuguua

SEQ ID NO: 3706033 - RNA, 18 nt, Human
guuuuaaggacugacuga

SEQ ID NO: 3706034 - RNA, 22 nt, Human
guuuuaaggaugcuuguacaua

SEQ ID NO: 3706035 - RNA, 16 nt, Human
guuuuaaguacuacac

SEQ ID NO: 3706036 - RNA, 17 nt, Human
guuuuaaguuguuugca

SEQ ID NO: 3706037 - RNA, 19 nt, Human
guuuuaaucugaaauucua

SEQ ID NO: 3706038 - RNA, 20 nt, Human
guuuuaaucugaaauucuaa

SEQ ID NO: 3706039 - RNA, 12 nt, Human
guuuuaauguau

SEQ ID NO: 3706040 - RNA, 13 nt, Human
guuuuaauuccau

SEQ ID NO: 3706041 - RNA, 22 nt, Human
guuuuaauuuauacuggcaugc

SEQ ID NO: 3706042 - RNA, 20 nt, Human
guuuuacaaguuggagucac

SEQ ID NO: 3706043 - RNA, 23 nt, Human
guuuuacaauaaaaucuugaaaa

SEQ ID NO: 3706044 - RNA, 20 nt, Human
guuuuacaauaguucugugg

SEQ ID NO: 3706045 - RNA, 14 nt, Human
guuuuacaguguuu

SEQ ID NO: 3706046 - RNA, 14 nt, Human
guuuuacuaaagaa

SEQ ID NO: 3706047 - RNA, 14 nt, Human
guuuuacugugaaa

SEQ ID NO: 3706048 - RNA, 17 nt, Human
guuuuagacaaauacuc

SEQ ID NO: 3706049 - RNA, 20 nt, Human
guuuuagccauuguuggcuu

SEQ ID NO: 3706050 - RNA, 16 nt, Human
guuuuagguagaaaaa

SEQ ID NO: 3706051 - RNA, 17 nt, Human
guuuuagguucuaaagu

SEQ ID NO: 3706052 - RNA, 20 nt, Human
guuuuauaagcaucauuauu

SEQ ID NO: 3706053 - RNA, 22 nt, Human
guuuuauaagcaucauuauuua

SEQ ID NO: 3706054 - RNA, 21 nt, Human
guuuuauaaggucugacauca

SEQ ID NO: 3706055 - RNA, 16 nt, Human
guuuuauaaugaaccc

SEQ ID NO: 3706056 - RNA, 15 nt, Human
guuuuauacugaagg

SEQ ID NO: 3706057 - RNA, 18 nt, Human
guuuuauagccuggacug

SEQ ID NO: 3706058 - RNA, 11 nt, Human
guuuuaucaag

SEQ ID NO: 3706059 - RNA, 22 nt, Human
guuuuaucaugacauguuauau

SEQ ID NO: 3706060 - RNA, 17 nt, Human
guuuuaucucugucuac

SEQ ID NO: 3706061 - RNA, 18 nt, Human
guuuuaugacuucauuaa

SEQ ID NO: 3706062 - RNA, 14 nt, Human
guuuuauuuauauu

SEQ ID NO: 3706063 - RNA, 12 nt, Human
guuuuauuucau

SEQ ID NO: 3706064 - RNA, 20 nt, Human
guuuuauuuucuaaaguacu

SEQ ID NO: 3706065 - RNA, 20 nt, Human
guuuucaaaauuguuacaaa

SEQ ID NO: 3706066 - RNA, 17 nt, Human
guuuucaaauuggacuu

SEQ ID NO: 3706067 - RNA, 15 nt, Human
guuuucaagucaaau

SEQ ID NO: 3706068 - RNA, 17 nt, Human
guuuucaagucaaauua

SEQ ID NO: 3706069 - RNA, 18 nt, Human
guuuucaagucaaauuaa

SEQ ID NO: 3706070 - RNA, 21 nt, Human
guuuucagaaccucuucccca

SEQ ID NO: 3706071 - RNA, 17 nt, Human
guuuucagacucagacu

SEQ ID NO: 3706072 - RNA, 19 nt, Human
guuuucagcauugauauuu

SEQ ID NO: 3706073 - RNA, 18 nt, Human
guuuucaggcuagaugua

SEQ ID NO: 3706074 - RNA, 17 nt, Human
guuuucaguguacaugg

SEQ ID NO: 3706075 - RNA, 22 nt, Human
guuuucauaauaaaacuuuaaa

SEQ ID NO: 3706076 - RNA, 17 nt, Human
guuuucauuugguucau

SEQ ID NO: 3706077 - RNA, 11 nt, Human
guuuuccaaac

SEQ ID NO: 3706078 - RNA, 23 nt, Human
guuuuccacccauaauccuuucu

SEQ ID NO: 3706079 - RNA, 20 nt, Human
guuuuccagguuuaagcugu

SEQ ID NO: 3706080 - RNA, 13 nt, Human
guuuuccaugaaa

SEQ ID NO: 3706081 - RNA, 20 nt, Human
guuuuccaugaguccccugu

SEQ ID NO: 3706082 - RNA, 15 nt, Human
guuuuccccaugaca

SEQ ID NO: 3706083 - RNA, 22 nt, Human
guuuucccgagcaaagucuaaa

SEQ ID NO: 3706084 - RNA, 15 nt, Human
guuuucccugaaguu

SEQ ID NO: 3706085 - RNA, 16 nt, Human
guuuucccugaaguua

SEQ ID NO: 3706086 - RNA, 21 nt, Human
guuuucccugaccucccucua

SEQ ID NO: 3706087 - RNA, 21 nt, Human
guuuuccuaugcuuugaaaca

SEQ ID NO: 3706088 - RNA, 13 nt, Human
guuuuccucccuu

SEQ ID NO: 3706089 - RNA, 18 nt, Human
guuuuccucccuucugcu

SEQ ID NO: 3706090 - RNA, 20 nt, Human
guuuuccucuauacaucucu

SEQ ID NO: 3706091 - RNA, 16 nt, Human
guuuuccuuucucacc

SEQ ID NO: 3706092 - RNA, 20 nt, Human
guuuuccuuuuauuucuuca

SEQ ID NO: 3706093 - RNA, 16 nt, Human
guuuucgaaaaucaaa

SEQ ID NO: 3706094 - RNA, 18 nt, Human
guuuucgaagcucagccc

SEQ ID NO: 3706095 - RNA, 22 nt, Human
guuuucggugccaucagugccc

SEQ ID NO: 3706096 - RNA, 18 nt, Human
guuuucuccaagagcuac

SEQ ID NO: 3706097 - RNA, 13 nt, Human
guuuucucucuau

SEQ ID NO: 3706098 - RNA, 17 nt, Human
guuuucucuuugugggg

SEQ ID NO: 3706099 - RNA, 15 nt, Human
guuuucugagaaaga

SEQ ID NO: 3706100 - RNA, 22 nt, Human
guuuucugagaaagacuauuca

SEQ ID NO: 3706101 - RNA, 23 nt, Human
guuuucugagaaagacuauucaa

SEQ ID NO: 3706102 - RNA, 15 nt, Human
guuuucugagcccgg

SEQ ID NO: 3706103 - RNA, 17 nt, Human
guuuucuggcuggagcc

SEQ ID NO: 3706104 - RNA, 18 nt, Human
guuuucuggcuggagccu

SEQ ID NO: 3706105 - RNA, 17 nt, Human
guuuucuggguguccaa

SEQ ID NO: 3706106 - RNA, 18 nt, Human
guuuucuguagucauuua

SEQ ID NO: 3706107 - RNA, 12 nt, Human
guuuucuguucu

SEQ ID NO: 3706108 - RNA, 12 nt, Human
guuuucuuccuu

SEQ ID NO: 3706109 - RNA, 19 nt, Human
guuuucuuccuuguaaauu

SEQ ID NO: 3706110 - RNA, 21 nt, Human
guuuucuugauaauuuuccuu

SEQ ID NO: 3706111 - RNA, 18 nt, Human
guuuucuuguugcuuugu

SEQ ID NO: 3706112 - RNA, 20 nt, Human
guuuucuuguugcuuuguug

SEQ ID NO: 3706113 - RNA, 22 nt, Human
guuuucuuguugcuuuguugca

SEQ ID NO: 3706114 - RNA, 15 nt, Human
guuuucuuuccuccu

SEQ ID NO: 3706115 - RNA, 16 nt, Human
guuuucuuuccuccuu

SEQ ID NO: 3706116 - RNA, 14 nt, Human
guuuucuuuuaaga

SEQ ID NO: 3706117 - RNA, 16 nt, Human
guuuucuuuuaauuuu

SEQ ID NO: 3706118 - RNA, 17 nt, Human
guuuucuuuugccauga

SEQ ID NO: 3706119 - RNA, 14 nt, Human
guuuugaaaagcua

SEQ ID NO: 3706120 - RNA, 13 nt, Human
guuuugaaaugcu

SEQ ID NO: 3706121 - RNA, 17 nt, Human
guuuugaacuaauaaaa

SEQ ID NO: 3706122 - RNA, 23 nt, Human
guuuugaacuaauaaaagcauaa

SEQ ID NO: 3706123 - RNA, 18 nt, Human
guuuugaagcuacugugu

SEQ ID NO: 3706124 - RNA, 19 nt, Human
guuuugaagcuacugugug

SEQ ID NO: 3706125 - RNA, 15 nt, Human
guuuugaaggcaaaa

SEQ ID NO: 3706126 - RNA, 21 nt, Human
guuuugaaggcaaaauugcaa

SEQ ID NO: 3706127 - RNA, 14 nt, Human
guuuugacauuuuu

SEQ ID NO: 3706128 - RNA, 16 nt, Human
guuuugagaguaaugc

SEQ ID NO: 3706129 - RNA, 21 nt, Human
guuuugagcuacuggauucuu

SEQ ID NO: 3706130 - RNA, 12 nt, Human
guuuugagcuuu

SEQ ID NO: 3706131 - RNA, 23 nt, Human
guuuugagguuuccuucagacag

SEQ ID NO: 3706132 - RNA, 21 nt, Human
guuuugauguuuguggccuca

SEQ ID NO: 3706133 - RNA, 15 nt, Human
guuuugcacagccaa

SEQ ID NO: 3706134 - RNA, 22 nt, Human
guuuugcacagccaaauuuaaa

SEQ ID NO: 3706135 - RNA, 14 nt, Human
guuuugccaacauu

SEQ ID NO: 3706136 - RNA, 16 nt, Human
guuuugccaacauugc

SEQ ID NO: 3706137 - RNA, 19 nt, Human
guuuugcuauuagacugua

SEQ ID NO: 3706138 - RNA, 16 nt, Human
guuuugcuguuuccuu

SEQ ID NO: 3706139 - RNA, 18 nt, Human
guuuugcuuuuucugacu

SEQ ID NO: 3706140 - RNA, 17 nt, Human
guuuuggacaguuuacc

SEQ ID NO: 3706141 - RNA, 18 nt, Human
guuuuggaucuugaaugu

SEQ ID NO: 3706142 - RNA, 17 nt, Human
guuuugguagauuaaau

SEQ ID NO: 3706143 - RNA, 21 nt, Human
guuuugguaucuguucuuuaa

SEQ ID NO: 3706144 - RNA, 15 nt, Human
uggcuccaggccaaa

SEQ ID NO: 3706145 - RNA, 23 nt, Human
uggcuccagucugcugcccucca

SEQ ID NO: 3706146 - RNA, 17 nt, Human
uggcucccacaggcagc

SEQ ID NO: 3706147 - RNA, 14 nt, Human
uggcucccaggaca

SEQ ID NO: 3706148 - RNA, 17 nt, Human
uggcucccagggccaug

SEQ ID NO: 3706149 - RNA, 17 nt, Human
uggcucccccuccaccu

SEQ ID NO: 3706150 - RNA, 12 nt, Human
uggcuccccugc

SEQ ID NO: 3706151 - RNA, 14 nt, Human
uggcuccccugcag

SEQ ID NO: 3706152 - RNA, 15 nt, Human
uggcuccccugcagc

SEQ ID NO: 3706153 - RNA, 17 nt, Human
uggcuccccugcagccc

SEQ ID NO: 3706154 - RNA, 18 nt, Human
uggcuccccugcagcccu

SEQ ID NO: 3706155 - RNA, 19 nt, Human
uggcuccccugcagcccug

SEQ ID NO: 3706156 - RNA, 22 nt, Human
uggcuccccugcagcccuggcc

SEQ ID NO: 3706157 - RNA, 14 nt, Human
uggcuccccugggg

SEQ ID NO: 3706158 - RNA, 20 nt, Human
uggcucccggagggcccuga

SEQ ID NO: 3706159 - RNA, 16 nt, Human
uggcucccucacucuc

SEQ ID NO: 3706160 - RNA, 17 nt, Human
uggcucccucacucuca

SEQ ID NO: 3706161 - RNA, 19 nt, Human
uggcucccucacucucagg

SEQ ID NO: 3706162 - RNA, 17 nt, Human
uggcucccuccuccagg

SEQ ID NO: 3706163 - RNA, 16 nt, Human
uggcucccuuacuuua

SEQ ID NO: 3706164 - RNA, 19 nt, Human
uggcuccucccggugccca

SEQ ID NO: 3706165 - RNA, 12 nt, Human
uggcuccucuca

SEQ ID NO: 3706166 - RNA, 20 nt, Human
uggcuccugaggggcaucug

SEQ ID NO: 3706167 - RNA, 12 nt, Human
uggcuccugauc

SEQ ID NO: 3706168 - RNA, 13 nt, Human
uggcuccugccca

SEQ ID NO: 3706169 - RNA, 17 nt, Human
uggcuccuucccaucgc

SEQ ID NO: 3706170 - RNA, 19 nt, Human
uggcuccuucccaucgcug

SEQ ID NO: 3706171 - RNA, 14 nt, Human
uggcuccuuuacaa

SEQ ID NO: 3706172 - RNA, 16 nt, Human
uggcuccuuuacaaaa

SEQ ID NO: 3706173 - RNA, 18 nt, Human
uggcucgaaucucugugc

SEQ ID NO: 3706174 - RNA, 12 nt, Human
uggcucuacaca

SEQ ID NO: 3706175 - RNA, 14 nt, Human
uggcucuacuuccc

SEQ ID NO: 3706176 - RNA, 15 nt, Human
uggcucucaccucua

SEQ ID NO: 3706177 - RNA, 17 nt, Human
uggcucuccuggcccug

SEQ ID NO: 3706178 - RNA, 12 nt, Human
uggcucugccag

SEQ ID NO: 3706179 - RNA, 13 nt, Human
uggcucuggagac

SEQ ID NO: 3706180 - RNA, 14 nt, Human
uggcucuggagaca

SEQ ID NO: 3706181 - RNA, 18 nt, Human
uggcucugggauccuggg

SEQ ID NO: 3706182 - RNA, 13 nt, Human
uggcucuuccagg

SEQ ID NO: 3706183 - RNA, 16 nt, Human
uggcucuuccaggcug

SEQ ID NO: 3706184 - RNA, 21 nt, Human
uggcucuuccaggcugggaga

SEQ ID NO: 3706185 - RNA, 19 nt, Human
uggcucuuuggagaucaag

SEQ ID NO: 3706186 - RNA, 22 nt, Human
uggcucuuuuacccaauaagau

SEQ ID NO: 3706187 - RNA, 16 nt, Human
uggcugaaaggaagcu

SEQ ID NO: 3706188 - RNA, 21 nt, Human
uggcugaaauucuccuggagg

SEQ ID NO: 3706189 - RNA, 23 nt, Human
uggcugaacccugugcugguguc

SEQ ID NO: 3706190 - RNA, 20 nt, Human
uggcugaagacuuuuguuau

SEQ ID NO: 3706191 - RNA, 14 nt, Human
uggcugaaggacug

SEQ ID NO: 3706192 - RNA, 18 nt, Human
uggcugacaugaagcugu

SEQ ID NO: 3706193 - RNA, 20 nt, Human
uggcugaccccaaagagccu

SEQ ID NO: 3706194 - RNA, 16 nt, Human
uggcugagccuggcug

SEQ ID NO: 3706195 - RNA, 19 nt, Human
uggcugagccuggcuggca

SEQ ID NO: 3706196 - RNA, 17 nt, Human
uggcugaggccacccag

SEQ ID NO: 3706197 - RNA, 14 nt, Human
uggcugagggcagc

SEQ ID NO: 3706198 - RNA, 14 nt, Human
uggcugagggcagu

SEQ ID NO: 3706199 - RNA, 13 nt, Human
uggcugauaaaag

SEQ ID NO: 3706200 - RNA, 18 nt, Human
uggcugcagagcaguggg

SEQ ID NO: 3706201 - RNA, 12 nt, Human
uggcugcagcag

SEQ ID NO: 3706202 - RNA, 23 nt, Human
uggcugcagcagcgguggccucu

SEQ ID NO: 3706203 - RNA, 12 nt, Human
uggcugcagccu

SEQ ID NO: 3706204 - RNA, 23 nt, Human
uggcugcagccucaggacuggga

SEQ ID NO: 3706205 - RNA, 15 nt, Human
uggcugcagggaguc

SEQ ID NO: 3706206 - RNA, 13 nt, Human
uggcugcccacac

SEQ ID NO: 3706207 - RNA, 17 nt, Human
uggcugccccaaccugc

SEQ ID NO: 3706208 - RNA, 22 nt, Human
uggcugccccauuuauccaccu

SEQ ID NO: 3706209 - RNA, 15 nt, Human
uggcugcccuggccc

SEQ ID NO: 3706210 - RNA, 17 nt, Human
uggcugcccuggcccug

SEQ ID NO: 3706211 - RNA, 17 nt, Human
uggcugccucauuuaga

SEQ ID NO: 3706212 - RNA, 20 nt, Human
uggcugccuccacucccacu

SEQ ID NO: 3706213 - RNA, 15 nt, Human
uggcugccuggagcc

SEQ ID NO: 3706214 - RNA, 16 nt, Human
uggcugccuggagccc

SEQ ID NO: 3706215 - RNA, 22 nt, Human
uggcugccuugugaaggaauua

SEQ ID NO: 3706216 - RNA, 15 nt, Human
uggcugcuagcacuu

SEQ ID NO: 3706217 - RNA, 15 nt, Human
uggcugcugaagcug

SEQ ID NO: 3706218 - RNA, 14 nt, Human
uggcugcuguggga

SEQ ID NO: 3706219 - RNA, 15 nt, Human
uggcugcuucaagga

SEQ ID NO: 3706220 - RNA, 15 nt, Human
uggcugcuuggccuu

SEQ ID NO: 3706221 - RNA, 20 nt, Human
uggcuggaagauccugcggg

SEQ ID NO: 3706222 - RNA, 18 nt, Human
uggcuggaagggguccag

SEQ ID NO: 3706223 - RNA, 14 nt, Human
uggcuggacaaacu

SEQ ID NO: 3706224 - RNA, 13 nt, Human
uggcuggacccag

SEQ ID NO: 3706225 - RNA, 15 nt, Human
uggcuggacccagcc

SEQ ID NO: 3706226 - RNA, 21 nt, Human
uggcuggacccagccaggccc

SEQ ID NO: 3706227 - RNA, 22 nt, Human
uggcuggacccagccaggccca

SEQ ID NO: 3706228 - RNA, 23 nt, Human
uggcuggacccagccaggcccag

SEQ ID NO: 3706229 - RNA, 19 nt, Human
uggcuggaugaaauuuucu

SEQ ID NO: 3706230 - RNA, 22 nt, Human
uggcuggaugaaauuuucuaga

SEQ ID NO: 3706231 - RNA, 15 nt, Human
uggcuggccacugca

SEQ ID NO: 3706232 - RNA, 15 nt, Human
uggcuggccucaccc

SEQ ID NO: 3706233 - RNA, 21 nt, Human
uggcuggccuuccacuuggcu

SEQ ID NO: 3706234 - RNA, 12 nt, Human
uggcuggcugag

SEQ ID NO: 3706235 - RNA, 15 nt, Human
uggcuggcugagggc

SEQ ID NO: 3706236 - RNA, 13 nt, Human
uggcuggcugcag

SEQ ID NO: 3706237 - RNA, 17 nt, Human
uggcugggaacugcaga

SEQ ID NO: 3706238 - RNA, 23 nt, Human
uggcugggacguggcucagccag

SEQ ID NO: 3706239 - RNA, 18 nt, Human
uggcugggacugggaaca

SEQ ID NO: 3706240 - RNA, 17 nt, Human
uggcugggggcaggagg

SEQ ID NO: 3706241 - RNA, 17 nt, Human
uggcugggggccucagu

SEQ ID NO: 3706242 - RNA, 16 nt, Human
uggcugggguggccug

SEQ ID NO: 3706243 - RNA, 22 nt, Human
uggcugggguggccuguguggc

SEQ ID NO: 3706244 - RNA, 22 nt, Human
uggcuggucaacuugagcaugu

SEQ ID NO: 3706245 - RNA, 11 nt, Human
uggcuggugug

SEQ ID NO: 3706246 - RNA, 13 nt, Human
uggcugguguggu

SEQ ID NO: 3706247 - RNA, 20 nt, Human
uggcuggugugguacagaga

SEQ ID NO: 3706248 - RNA, 12 nt, Human
uggcugguguua

SEQ ID NO: 3706249 - RNA, 16 nt, Human
uggcugguguuaacag

SEQ ID NO: 3706250 - RNA, 18 nt, Human
uggcugguguuaacagaa

SEQ ID NO: 3706251 - RNA, 20 nt, Human
uggcugguguuaacagaagg

SEQ ID NO: 3706252 - RNA, 19 nt, Human
uggcuguaaggcucuagau

SEQ ID NO: 3706253 - RNA, 22 nt, Human
uggcuguaaucauuuguuuaca

SEQ ID NO: 3706254 - RNA, 18 nt, Human
uggcuguagaucccaaga

SEQ ID NO: 3706255 - RNA, 17 nt, Human
uggcugucagcaggaag

SEQ ID NO: 3706256 - RNA, 18 nt, Human
uggcuguccagugcccau

SEQ ID NO: 3706257 - RNA, 18 nt, Human
uggcugucuggaaagccc

SEQ ID NO: 3706258 - RNA, 14 nt, Human
uggcugugccucug

SEQ ID NO: 3706259 - RNA, 15 nt, Human
uggcugugccucugc

SEQ ID NO: 3706260 - RNA, 18 nt, Human
uggcugugccucugccug

SEQ ID NO: 3706261 - RNA, 22 nt, Human
uggcuguggagacaaugucugc

SEQ ID NO: 3706262 - RNA, 16 nt, Human
uggcuguggagugugg

SEQ ID NO: 3706263 - RNA, 17 nt, Human
uggcuguggcauccaga

SEQ ID NO: 3706264 - RNA, 15 nt, Human
uggcugugggcuccc

SEQ ID NO: 3706265 - RNA, 15 nt, Human
uggcugugucuaaac

SEQ ID NO: 3706266 - RNA, 17 nt, Human
uggcugugucuaaacug

SEQ ID NO: 3706267 - RNA, 20 nt, Human
uggcugugucuaaacugcau

SEQ ID NO: 3706268 - RNA, 21 nt, Human
uggcuguguuugcagccugcu

SEQ ID NO: 3706269 - RNA, 21 nt, Human
uggcuguuaaucuuucaaagu

SEQ ID NO: 3706270 - RNA, 14 nt, Human
uggcuguucuggaa

SEQ ID NO: 3706271 - RNA, 20 nt, Human
uggcuguugacgcaccugug

SEQ ID NO: 3706272 - RNA, 16 nt, Human
uggcuguuggcugggg

SEQ ID NO: 3706273 - RNA, 23 nt, Human
uggcuguuggcugggggccucag

SEQ ID NO: 3706274 - RNA, 16 nt, Human
uggcuguuuggacuuu

SEQ ID NO: 3706275 - RNA, 17 nt, Human
uggcuuaaaacaacacu

SEQ ID NO: 3706276 - RNA, 13 nt, Human
uggcuuaaauaua

SEQ ID NO: 3706277 - RNA, 15 nt, Human
uggcuuaaugcuucu

SEQ ID NO: 3706278 - RNA, 14 nt, Human
uggcuuaauguuua

SEQ ID NO: 3706279 - RNA, 13 nt, Human
uggcuuacacugg

SEQ ID NO: 3706280 - RNA, 19 nt, Human
uggcuuaccugaccucuug

SEQ ID NO: 3706281 - RNA, 14 nt, Human
uggcuuaccuggcc

SEQ ID NO: 3706282 - RNA, 18 nt, Human
uggcuuauaauucuuuca

SEQ ID NO: 3706283 - RNA, 19 nt, Human
uggcuuauuuaauaugcuu

SEQ ID NO: 3706284 - RNA, 18 nt, Human
uggcuuauuuuaauguga

SEQ ID NO: 3706285 - RNA, 21 nt, Human
uggcuuauuuuaaugugauga

SEQ ID NO: 3706286 - RNA, 14 nt, Human
uggcuucacggaag

SEQ ID NO: 3706287 - RNA, 13 nt, Human
uggcuucagcucc

SEQ ID NO: 3706288 - RNA, 17 nt, Human
uggcuucagcuccagcc

SEQ ID NO: 3706289 - RNA, 20 nt, Human
uggcuucagcuccagccccu

SEQ ID NO: 3706290 - RNA, 22 nt, Human
uggcuuccagguaucuccagga

SEQ ID NO: 3706291 - RNA, 23 nt, Human
uggcuuccagguaucuccaggau

SEQ ID NO: 3706292 - RNA, 23 nt, Human
uggcuucccaaaugugugcccag

SEQ ID NO: 3706293 - RNA, 18 nt, Human
uggcuucccauccccagc

SEQ ID NO: 3706294 - RNA, 18 nt, Human
uggcuucccgcucagccc

SEQ ID NO: 3706295 - RNA, 16 nt, Human
ugucuucaaacuguga

SEQ ID NO: 3706296 - RNA, 20 nt, Human
ugucuucaauuuguauaaaa

SEQ ID NO: 3706297 - RNA, 14 nt, Human
ugucuucacaacag

SEQ ID NO: 3706298 - RNA, 17 nt, Human
ugucuucauaaaguacu

SEQ ID NO: 3706299 - RNA, 19 nt, Human
ugucuucauccuuagcaac

SEQ ID NO: 3706300 - RNA, 16 nt, Human
ugucuucauuucauug

SEQ ID NO: 3706301 - RNA, 19 nt, Human
ugucuucauuucauuguau

SEQ ID NO: 3706302 - RNA, 23 nt, Human
ugucuucauuucauuguaugaug

SEQ ID NO: 3706303 - RNA, 22 nt, Human
ugucuuccuaucaaaaagauau

SEQ ID NO: 3706304 - RNA, 17 nt, Human
ugucuuccuauuucaga

SEQ ID NO: 3706305 - RNA, 20 nt, Human
ugucuuccuauuucagaagu

SEQ ID NO: 3706306 - RNA, 17 nt, Human
ugucuuccugcauucac

SEQ ID NO: 3706307 - RNA, 16 nt, Human
ugucuucggaaaccuu

SEQ ID NO: 3706308 - RNA, 21 nt, Human
ugucuucggaaaccuuggugu

SEQ ID NO: 3706309 - RNA, 16 nt, Human
ugucuucguacaguuc

SEQ ID NO: 3706310 - RNA, 17 nt, Human
ugucuucguacaguucu

SEQ ID NO: 3706311 - RNA, 18 nt, Human
ugucuucguacaguucuu

SEQ ID NO: 3706312 - RNA, 16 nt, Human
ugucuucucaggcucu

SEQ ID NO: 3706313 - RNA, 23 nt, Human
ugucuucucaggcucugcccugc

SEQ ID NO: 3706314 - RNA, 14 nt, Human
ugucuucuccccag

SEQ ID NO: 3706315 - RNA, 12 nt, Human
ugucuucugccu

SEQ ID NO: 3706316 - RNA, 14 nt, Human
ugucuucugccugu

SEQ ID NO: 3706317 - RNA, 18 nt, Human
ugucuucugccuguuaua

SEQ ID NO: 3706318 - RNA, 22 nt, Human
ugucuucuguauauaaauggga

SEQ ID NO: 3706319 - RNA, 17 nt, Human
ugucuugaaugucuuuu

SEQ ID NO: 3706320 - RNA, 20 nt, Human
ugucuugaaugucuuuugaa

SEQ ID NO: 3706321 - RNA, 14 nt, Human
ugucuugagcucua

SEQ ID NO: 3706322 - RNA, 21 nt, Human
ugucuugccuuuuucauuauu

SEQ ID NO: 3706323 - RNA, 23 nt, Human
ugucuugcuauggggagaaaaga

SEQ ID NO: 3706324 - RNA, 14 nt, Human
ugucuugcugucau

SEQ ID NO: 3706325 - RNA, 19 nt, Human
ugucuugcuguugacauau

SEQ ID NO: 3706326 - RNA, 19 nt, Human
ugucuuggacacuguacaa

SEQ ID NO: 3706327 - RNA, 13 nt, Human
ugucuugggcaga

SEQ ID NO: 3706328 - RNA, 16 nt, Human
ugucuugggcagagcu

SEQ ID NO: 3706329 - RNA, 22 nt, Human
ugucuugggcagagcuggcucu

SEQ ID NO: 3706330 - RNA, 19 nt, Human
ugucuuguaauauuuugua

SEQ ID NO: 3706331 - RNA, 16 nt, Human
ugucuuguacaugugu

SEQ ID NO: 3706332 - RNA, 22 nt, Human
ugucuuguacauguguagccug

SEQ ID NO: 3706333 - RNA, 18 nt, Human
ugucuuguguuucuuuag

SEQ ID NO: 3706334 - RNA, 21 nt, Human
ugucuuguguuuuugucuuau

SEQ ID NO: 3706335 - RNA, 17 nt, Human
ugucuuguuaauauucu

SEQ ID NO: 3706336 - RNA, 18 nt, Human
ugucuuguucugucacuc

SEQ ID NO: 3706337 - RNA, 19 nt, Human
ugucuuguucugucacuca

SEQ ID NO: 3706338 - RNA, 15 nt, Human
ugucuuuaaaagaga

SEQ ID NO: 3706339 - RNA, 14 nt, Human
ugucuuuaaauaga

SEQ ID NO: 3706340 - RNA, 19 nt, Human
ugucuuuaaauagauacaa

SEQ ID NO: 3706341 - RNA, 17 nt, Human
ugucuuuaaaugcugcu

SEQ ID NO: 3706342 - RNA, 15 nt, Human
ugucuuuaaugcaau

SEQ ID NO: 3706343 - RNA, 12 nt, Human
ugucuuuacucc

SEQ ID NO: 3706344 - RNA, 15 nt, Human
ugucuuuagauagcc

SEQ ID NO: 3706345 - RNA, 19 nt, Human
ugucuuuaggcagcagcuu

SEQ ID NO: 3706346 - RNA, 20 nt, Human
ugucuuucaaacuccaaggu

SEQ ID NO: 3706347 - RNA, 15 nt, Human
ugucuuucagauaca

SEQ ID NO: 3706348 - RNA, 21 nt, Human
ugucuuuccacuccuccuagc

SEQ ID NO: 3706349 - RNA, 15 nt, Human
ugucuuucuaagaaa

SEQ ID NO: 3706350 - RNA, 17 nt, Human
ugucuuucuccaaaguu

SEQ ID NO: 3706351 - RNA, 15 nt, Human
ugucuuucugagcac

SEQ ID NO: 3706352 - RNA, 13 nt, Human
ugucuuucuuugg

SEQ ID NO: 3706353 - RNA, 22 nt, Human
ugucuuucuuuggugccuuucc

SEQ ID NO: 3706354 - RNA, 14 nt, Human
ugucuuuggacccu

SEQ ID NO: 3706355 - RNA, 18 nt, Human
ugucuuuggacccugagg

SEQ ID NO: 3706356 - RNA, 10 nt, Human
ugucuuuggu

SEQ ID NO: 3706357 - RNA, 15 nt, Human
ugucuuugguccucu

SEQ ID NO: 3706358 - RNA, 11 nt, Human
ugucuuuguaa

SEQ ID NO: 3706359 - RNA, 13 nt, Human
ugucuuuguaagu

SEQ ID NO: 3706360 - RNA, 19 nt, Human
ugucuuuguuggaaaagaa

SEQ ID NO: 3706361 - RNA, 16 nt, Human
ugucuuuuaaaaugca

SEQ ID NO: 3706362 - RNA, 20 nt, Human
ugucuuuuaaaaugcaaugu

SEQ ID NO: 3706363 - RNA, 14 nt, Human
ugucuuuuaaacuc

SEQ ID NO: 3706364 - RNA, 18 nt, Human
ugucuuuuaaugcuucau

SEQ ID NO: 3706365 - RNA, 20 nt, Human
ugucuuuuauaguggaaaaa

SEQ ID NO: 3706366 - RNA, 18 nt, Human
ugucuuuuauauuuguau

SEQ ID NO: 3706367 - RNA, 19 nt, Human
ugucuuuucccauuuaucu

SEQ ID NO: 3706368 - RNA, 20 nt, Human
ugucuuuucuuugccaucuc

SEQ ID NO: 3706369 - RNA, 13 nt, Human
ugucuuuugaaua

SEQ ID NO: 3706370 - RNA, 14 nt, Human
ugucuuuugaauau

SEQ ID NO: 3706371 - RNA, 13 nt, Human
ugucuuuugucau

SEQ ID NO: 3706372 - RNA, 16 nt, Human
ugucuuuuuucacuac

SEQ ID NO: 3706373 - RNA, 20 nt, Human
ugugaaaaaaaaaaugcuga

SEQ ID NO: 3706374 - RNA, 12 nt, Human
ugugaaaaaauu

SEQ ID NO: 3706375 - RNA, 23 nt, Human
ugugaaaaaauuuacuuuaaacu

SEQ ID NO: 3706376 - RNA, 22 nt, Human
ugugaaaaagaugccaauuauu

SEQ ID NO: 3706377 - RNA, 18 nt, Human
ugugaaaauaucugcuca

SEQ ID NO: 3706378 - RNA, 16 nt, Human
ugugaaaaugugugug

SEQ ID NO: 3706379 - RNA, 20 nt, Human
ugugaaaccuuuuuuaagau

SEQ ID NO: 3706380 - RNA, 22 nt, Human
ugugaaaccuuuuuuaagauuu

SEQ ID NO: 3706381 - RNA, 14 nt, Human
ugugaaacuuucau

SEQ ID NO: 3706382 - RNA, 15 nt, Human
ugugaaaggaaagag

SEQ ID NO: 3706383 - RNA, 21 nt, Human
ugugaaagucagaugcccaga

SEQ ID NO: 3706384 - RNA, 20 nt, Human
ugugaaauaaaacuggcuuu

SEQ ID NO: 3706385 - RNA, 18 nt, Human
ugugaaauugcauacuuu

SEQ ID NO: 3706386 - RNA, 12 nt, Human
ugugaacauuua

SEQ ID NO: 3706387 - RNA, 16 nt, Human
ugugaaccaagaucua

SEQ ID NO: 3706388 - RNA, 20 nt, Human
ugugaaccaccacacccagc

SEQ ID NO: 3706389 - RNA, 16 nt, Human
ugugaacccaggacaa

SEQ ID NO: 3706390 - RNA, 21 nt, Human
ugugaacccaggacaagcaug

SEQ ID NO: 3706391 - RNA, 23 nt, Human
ugugaacccuggggccugacugc

SEQ ID NO: 3706392 - RNA, 21 nt, Human
ugugaacgauuuagaaagaag

SEQ ID NO: 3706393 - RNA, 14 nt, Human
ugugaacuaaacuu

SEQ ID NO: 3706394 - RNA, 19 nt, Human
ugugaacuaaacuuucaca

SEQ ID NO: 3706395 - RNA, 19 nt, Human
ugugaacucagccaagcac

SEQ ID NO: 3706396 - RNA, 18 nt, Human
ugugaacugaaauuaaaa

SEQ ID NO: 3706397 - RNA, 14 nt, Human
ugugaacugaacuc

SEQ ID NO: 3706398 - RNA, 18 nt, Human
ugugaacuuggaagcaca

SEQ ID NO: 3706399 - RNA, 12 nt, Human
ugugaacuugua

SEQ ID NO: 3706400 - RNA, 16 nt, Human
ugugaagaaaaaugua

SEQ ID NO: 3706401 - RNA, 14 nt, Human
ugugaagauguuug

SEQ ID NO: 3706402 - RNA, 14 nt, Human
ugugaagcaaaauu

SEQ ID NO: 3706403 - RNA, 22 nt, Human
ugugaagcacagaccccuucca

SEQ ID NO: 3706404 - RNA, 14 nt, Human
ugugaaggacccuu

SEQ ID NO: 3706405 - RNA, 19 nt, Human
ugugaaggcagagaaaggg

SEQ ID NO: 3706406 - RNA, 14 nt, Human
ugugaaggccauga

SEQ ID NO: 3706407 - RNA, 15 nt, Human
ugugaaguuagaauu

SEQ ID NO: 3706408 - RNA, 20 nt, Human
ugugaaguuagaauuccuuc

SEQ ID NO: 3706409 - RNA, 14 nt, Human
ugugaauaauuaca

SEQ ID NO: 3706410 - RNA, 14 nt, Human
ugugaauacugcuu

SEQ ID NO: 3706411 - RNA, 15 nt, Human
ugugaauauaaaugu

SEQ ID NO: 3706412 - RNA, 17 nt, Human
ugugaaucaagggucag

SEQ ID NO: 3706413 - RNA, 16 nt, Human
ugugaaucauuuuacc

SEQ ID NO: 3706414 - RNA, 17 nt, Human
ugugaaugaacacucuu

SEQ ID NO: 3706415 - RNA, 23 nt, Human
ugugaaugaacacucuuuugcuu

SEQ ID NO: 3706416 - RNA, 19 nt, Human
ugugaaugauucauguuau

SEQ ID NO: 3706417 - RNA, 20 nt, Human
ugugaaugauucauguuaua

SEQ ID NO: 3706418 - RNA, 14 nt, Human
ugugaaugcuucuc

SEQ ID NO: 3706419 - RNA, 13 nt, Human
ugugaauggauug

SEQ ID NO: 3706420 - RNA, 12 nt, Human
ugugaauguggg

SEQ ID NO: 3706421 - RNA, 16 nt, Human
ugugaauuaagcccaa

SEQ ID NO: 3706422 - RNA, 17 nt, Human
ugugaauuacuaacuuc

SEQ ID NO: 3706423 - RNA, 19 nt, Human
ugugaauuacuaacuucua

SEQ ID NO: 3706424 - RNA, 20 nt, Human
ugugaauuacuaacuucuaa

SEQ ID NO: 3706425 - RNA, 20 nt, Human
ugugaauuagcucacuuggu

SEQ ID NO: 3706426 - RNA, 24 nt, Human
ugugaauuaggcuguaacuacuuu

SEQ ID NO: 3706427 - RNA, 18 nt, Human
ugugaauugagcugcaga

SEQ ID NO: 3706428 - RNA, 15 nt, Human
ugugaauuuuuaagc

SEQ ID NO: 3706429 - RNA, 16 nt, Human
ugugaauuuuuaagcu

SEQ ID NO: 3706430 - RNA, 20 nt, Human
ugugaauuuuuauuguugua

SEQ ID NO: 3706431 - RNA, 19 nt, Human
ugugacaauucuguuuuua

SEQ ID NO: 3706432 - RNA, 18 nt, Human
ugugacagauuauacaga

SEQ ID NO: 3706433 - RNA, 16 nt, Human
ugugacaggcagcaga

SEQ ID NO: 3706434 - RNA, 15 nt, Human
ugugacagggccagu

SEQ ID NO: 3706435 - RNA, 22 nt, Human
ugugacagggccaguggggccu

SEQ ID NO: 3706436 - RNA, 23 nt, Human
ugugacagggccaguggggccug

SEQ ID NO: 3706437 - RNA, 12 nt, Human
ugugacagggcg

SEQ ID NO: 3706438 - RNA, 18 nt, Human
ugugacauauuaugucuu

SEQ ID NO: 3706439 - RNA, 20 nt, Human
ugugacaucucuauucccca

SEQ ID NO: 3706440 - RNA, 12 nt, Human
ugugacauguaa

SEQ ID NO: 3706441 - RNA, 14 nt, Human
ugugacauguaaca

SEQ ID NO: 3706442 - RNA, 11 nt, Human
ugugacauucc

SEQ ID NO: 3706443 - RNA, 15 nt, Human
ugugacauuugucau

SEQ ID NO: 3706444 - RNA, 17 nt, Human
ugugacauuuuacauua

SEQ ID NO: 3706445 - RNA, 21 nt, Human
uggcuucccgcucagcccucc

SEQ ID NO: 3706446 - RNA, 16 nt, Human
uggcuuccuggcaaua

SEQ ID NO: 3706447 - RNA, 20 nt, Human
uggcuucggacaaaauaucu

SEQ ID NO: 3706448 - RNA, 13 nt, Human
uggcuucucauac

SEQ ID NO: 3706449 - RNA, 18 nt, Human
uggcuucucugaggaagc

SEQ ID NO: 3706450 - RNA, 17 nt, Human
uggcuucugaugaaucu

SEQ ID NO: 3706451 - RNA, 14 nt, Human
uggcuucuggagcc

SEQ ID NO: 3706452 - RNA, 13 nt, Human
uggcuucuggcca

SEQ ID NO: 3706453 - RNA, 17 nt, Human
uggcuucuggccaggaa

SEQ ID NO: 3706454 - RNA, 13 nt, Human
uggcuucugugau

SEQ ID NO: 3706455 - RNA, 14 nt, Human
uggcuucugugaug

SEQ ID NO: 3706456 - RNA, 17 nt, Human
uggcuucugugaugagc

SEQ ID NO: 3706457 - RNA, 21 nt, Human
uggcuucugugaugagcugau

SEQ ID NO: 3706458 - RNA, 14 nt, Human
uggcuucugugggg

SEQ ID NO: 3706459 - RNA, 15 nt, Human
uggcuucuguuucua

SEQ ID NO: 3706460 - RNA, 20 nt, Human
uggcuugccauuuuucaaaa

SEQ ID NO: 3706461 - RNA, 19 nt, Human
uggcuuggccacagccagg

SEQ ID NO: 3706462 - RNA, 22 nt, Human
uggcuuggccacagccagggga

SEQ ID NO: 3706463 - RNA, 23 nt, Human
uggcuuggccacagccaggggag

SEQ ID NO: 3706464 - RNA, 16 nt, Human
uggcuuggcccuggca

SEQ ID NO: 3706465 - RNA, 22 nt, Human
uggcuuggccuaucuccuaggg

SEQ ID NO: 3706466 - RNA, 17 nt, Human
uggcuugggcagggucu

SEQ ID NO: 3706467 - RNA, 22 nt, Human
uggcuuggggucaagaaacagc

SEQ ID NO: 3706468 - RNA, 12 nt, Human
uggcuuguagaa

SEQ ID NO: 3706469 - RNA, 18 nt, Human
uggcuuguagaauuguua

SEQ ID NO: 3706470 - RNA, 18 nt, Human
uggcuugugaucugggaa

SEQ ID NO: 3706471 - RNA, 19 nt, Human
uggcuuguguguuucacuu

SEQ ID NO: 3706472 - RNA, 20 nt, Human
uggcuuguguguuucacuuu

SEQ ID NO: 3706473 - RNA, 22 nt, Human
uggcuuguucaucauccagaug

SEQ ID NO: 3706474 - RNA, 14 nt, Human
uggcuuuaaugaau

SEQ ID NO: 3706475 - RNA, 16 nt, Human
uggcuuuaugcacauu

SEQ ID NO: 3706476 - RNA, 17 nt, Human
uggcuuuauuuguuuuu

SEQ ID NO: 3706477 - RNA, 16 nt, Human
uggcuuuccagucaua

SEQ ID NO: 3706478 - RNA, 21 nt, Human
uggcuuucccggacugcaagc

SEQ ID NO: 3706479 - RNA, 23 nt, Human
uggcuuucuccgacugcuaggga

SEQ ID NO: 3706480 - RNA, 14 nt, Human
uggcuuuggucucu

SEQ ID NO: 3706481 - RNA, 21 nt, Human
uggcuuuggucucuugcuugu

SEQ ID NO: 3706482 - RNA, 22 nt, Human
uggcuuugucccacagcuuggg

SEQ ID NO: 3706483 - RNA, 13 nt, Human
uggcuuuucugau

SEQ ID NO: 3706484 - RNA, 14 nt, Human
uggcuuuucugauc

SEQ ID NO: 3706485 - RNA, 16 nt, Human
ugggaaaacacugcca

SEQ ID NO: 3706486 - RNA, 17 nt, Human
ugggaaaccauguagca

SEQ ID NO: 3706487 - RNA, 23 nt, Human
ugggaaagacauccauaaagaag

SEQ ID NO: 3706488 - RNA, 14 nt, Human
ugggaaagcauugu

SEQ ID NO: 3706489 - RNA, 16 nt, Human
ugggaaagcauuguaa

SEQ ID NO: 3706490 - RNA, 16 nt, Human
ugggaaagccaccucu

SEQ ID NO: 3706491 - RNA, 22 nt, Human
ugggaaagccaccucucccuca

SEQ ID NO: 3706492 - RNA, 16 nt, Human
ugggaaaggggaaguu

SEQ ID NO: 3706493 - RNA, 20 nt, Human
ugggaaauauuuagcaaaua

SEQ ID NO: 3706494 - RNA, 15 nt, Human
ugggaaaugagcagg

SEQ ID NO: 3706495 - RNA, 17 nt, Human
ugggaacacuggcagac

SEQ ID NO: 3706496 - RNA, 14 nt, Human
ugggaacauuuauu

SEQ ID NO: 3706497 - RNA, 18 nt, Human
ugggaacauuuauuuuau

SEQ ID NO: 3706498 - RNA, 23 nt, Human
ugggaacauuuauuuuaugagaa

SEQ ID NO: 3706499 - RNA, 21 nt, Human
ugggaaccccccucccaccca

SEQ ID NO: 3706500 - RNA, 22 nt, Human
ugggaaccccuucauccucuga

SEQ ID NO: 3706501 - RNA, 22 nt, Human
ugggaaccucccagagguccag

SEQ ID NO: 3706502 - RNA, 18 nt, Human
ugggaacgugacugcccc

SEQ ID NO: 3706503 - RNA, 17 nt, Human
ugggaacucccaagaac

SEQ ID NO: 3706504 - RNA, 18 nt, Human
ugggaacugcagaccugu

SEQ ID NO: 3706505 - RNA, 22 nt, Human
ugggaacuuauuaaauggaaac

SEQ ID NO: 3706506 - RNA, 18 nt, Human
ugggaagacgccugagcu

SEQ ID NO: 3706507 - RNA, 20 nt, Human
ugggaagacuccuagcuguc

SEQ ID NO: 3706508 - RNA, 22 nt, Human
ugggaagauaggcucugcacag

SEQ ID NO: 3706509 - RNA, 19 nt, Human
ugggaagcccauccugacc

SEQ ID NO: 3706510 - RNA, 21 nt, Human
ugggaagccuuuacugacccu

SEQ ID NO: 3706511 - RNA, 13 nt, Human
ugggaaggacuug

SEQ ID NO: 3706512 - RNA, 22 nt, Human
ugggaaggacuuggcgcgcccu

SEQ ID NO: 3706513 - RNA, 16 nt, Human
ugggaaggccagcugc

SEQ ID NO: 3706514 - RNA, 17 nt, Human
ugggaaggcuugggauu

SEQ ID NO: 3706515 - RNA, 15 nt, Human
ugggaaguuaaaggg

SEQ ID NO: 3706516 - RNA, 15 nt, Human
ugggaauaauugcuu

SEQ ID NO: 3706517 - RNA, 16 nt, Human
ugggaauaauugcuuu

SEQ ID NO: 3706518 - RNA, 16 nt, Human
ugggaauauuugaauc

SEQ ID NO: 3706519 - RNA, 19 nt, Human
ugggaauauuugaaucuug

SEQ ID NO: 3706520 - RNA, 14 nt, Human
ugggaaucaagauu

SEQ ID NO: 3706521 - RNA, 20 nt, Human
ugggaaugaagcuuguguau

SEQ ID NO: 3706522 - RNA, 22 nt, Human
ugggaaugcggcaagaaggaau

SEQ ID NO: 3706523 - RNA, 19 nt, Human
ugggaauggaggggcagag

SEQ ID NO: 3706524 - RNA, 14 nt, Human
ugggaauguauagu

SEQ ID NO: 3706525 - RNA, 14 nt, Human
ugggaauuguguga

SEQ ID NO: 3706526 - RNA, 19 nt, Human
ugggacaaaucaagcuuca

SEQ ID NO: 3706527 - RNA, 20 nt, Human
ugggacacaaaacuccgccc

SEQ ID NO: 3706528 - RNA, 21 nt, Human
ugggacaccccgacuuuuguu

SEQ ID NO: 3706529 - RNA, 15 nt, Human
ugggacacccuguga

SEQ ID NO: 3706530 - RNA, 14 nt, Human
ugggacagcccaga

SEQ ID NO: 3706531 - RNA, 19 nt, Human
ugggacagggagcagcccc

SEQ ID NO: 3706532 - RNA, 20 nt, Human
ugggacagucaccucaugga

SEQ ID NO: 3706533 - RNA, 21 nt, Human
ugggacagucaccucauggaa

SEQ ID NO: 3706534 - RNA, 23 nt, Human
ugggacaguuuaucaugaagccu

SEQ ID NO: 3706535 - RNA, 19 nt, Human
ugggacauccugucaucug

SEQ ID NO: 3706536 - RNA, 17 nt, Human
ugggacauuccaaagaa

SEQ ID NO: 3706537 - RNA, 19 nt, Human
ugggaccacgugagaucau

SEQ ID NO: 3706538 - RNA, 13 nt, Human
ugggaccaggcac

SEQ ID NO: 3706539 - RNA, 17 nt, Human
ugggacccaguggcagg

SEQ ID NO: 3706540 - RNA, 22 nt, Human
ugggacccaguggcagggcaca

SEQ ID NO: 3706541 - RNA, 13 nt, Human
ugggaccccaggc

SEQ ID NO: 3706542 - RNA, 17 nt, Human
ugggacccccguggggc

SEQ ID NO: 3706543 - RNA, 19 nt, Human
ugggacccugcuuuagagc

SEQ ID NO: 3706544 - RNA, 14 nt, Human
ugggacccuuuccu

SEQ ID NO: 3706545 - RNA, 17 nt, Human
ugggacccuuuccuucc

SEQ ID NO: 3706546 - RNA, 16 nt, Human
ugggaccuagggaggc

SEQ ID NO: 3706547 - RNA, 23 nt, Human
ugggaccuauaacugcccagcgg

SEQ ID NO: 3706548 - RNA, 23 nt, Human
ugggaccugccaggcaggggugg

SEQ ID NO: 3706549 - RNA, 18 nt, Human
ugggaccuguggcugucg

SEQ ID NO: 3706550 - RNA, 15 nt, Human
ugggacgcucugcug

SEQ ID NO: 3706551 - RNA, 18 nt, Human
ugggacuaaaugcccugc

SEQ ID NO: 3706552 - RNA, 16 nt, Human
ugggacuacaggugug

SEQ ID NO: 3706553 - RNA, 17 nt, Human
ugggacuagccuggcuu

SEQ ID NO: 3706554 - RNA, 23 nt, Human
ugggacucagccuucagacagag

SEQ ID NO: 3706555 - RNA, 18 nt, Human
ugggacucguggcuguca

SEQ ID NO: 3706556 - RNA, 16 nt, Human
ugggacugagccaguc

SEQ ID NO: 3706557 - RNA, 20 nt, Human
ugggacugagccagucccag

SEQ ID NO: 3706558 - RNA, 20 nt, Human
ugggacugagccuggcccau

SEQ ID NO: 3706559 - RNA, 18 nt, Human
ugggacugggagggccca

SEQ ID NO: 3706560 - RNA, 14 nt, Human
ugggacuguacaca

SEQ ID NO: 3706561 - RNA, 18 nt, Human
ugggacuguacacacuuu

SEQ ID NO: 3706562 - RNA, 21 nt, Human
ugggacuguacacacuuuauu

SEQ ID NO: 3706563 - RNA, 17 nt, Human
ugggacuuccuugcucu

SEQ ID NO: 3706564 - RNA, 20 nt, Human
ugggacuucuuuucacauuc

SEQ ID NO: 3706565 - RNA, 21 nt, Human
ugggacuucuuuucacauucu

SEQ ID NO: 3706566 - RNA, 17 nt, Human
ugggagaagggcagagu

SEQ ID NO: 3706567 - RNA, 19 nt, Human
ugggagacacccaaagggu

SEQ ID NO: 3706568 - RNA, 12 nt, Human
ugggagacagac

SEQ ID NO: 3706569 - RNA, 13 nt, Human
ugggagacagacc

SEQ ID NO: 3706570 - RNA, 14 nt, Human
ugggagacauguga

SEQ ID NO: 3706571 - RNA, 15 nt, Human
ugggagagacuuguu

SEQ ID NO: 3706572 - RNA, 21 nt, Human
ugggagagacuuguuuuggau

SEQ ID NO: 3706573 - RNA, 14 nt, Human
ugggagagccccug

SEQ ID NO: 3706574 - RNA, 15 nt, Human
ugggagagccccugg

SEQ ID NO: 3706575 - RNA, 18 nt, Human
ugggagagccccuggggc

SEQ ID NO: 3706576 - RNA, 19 nt, Human
ugggagagccccuggggcc

SEQ ID NO: 3706577 - RNA, 14 nt, Human
ugggagaggcagcc

SEQ ID NO: 3706578 - RNA, 22 nt, Human
ugggagaggugccagcaacuga

SEQ ID NO: 3706579 - RNA, 18 nt, Human
ugggagagugucaaccag

SEQ ID NO: 3706580 - RNA, 18 nt, Human
ugggagcaaacugcaugc

SEQ ID NO: 3706581 - RNA, 12 nt, Human
ugggagcacugg

SEQ ID NO: 3706582 - RNA, 21 nt, Human
ugggagcagcgguuuggggag

SEQ ID NO: 3706583 - RNA, 13 nt, Human
ugggagcaggaga

SEQ ID NO: 3706584 - RNA, 14 nt, Human
ugggagcaggagau

SEQ ID NO: 3706585 - RNA, 12 nt, Human
ugggagccaggg

SEQ ID NO: 3706586 - RNA, 20 nt, Human
ugggagcccccagccuguca

SEQ ID NO: 3706587 - RNA, 23 nt, Human
ugggagccgggcaaacuggccgc

SEQ ID NO: 3706588 - RNA, 15 nt, Human
ugggagccucugggg

SEQ ID NO: 3706589 - RNA, 20 nt, Human
ugggagccugcaaacucacu

SEQ ID NO: 3706590 - RNA, 13 nt, Human
ugggagcuccucu

SEQ ID NO: 3706591 - RNA, 14 nt, Human
ugggagcuccucuc

SEQ ID NO: 3706592 - RNA, 17 nt, Human
ugggagcuccucuccug

SEQ ID NO: 3706593 - RNA, 18 nt, Human
ugggagcuccucuccugg

SEQ ID NO: 3706594 - RNA, 17 nt, Human
guuuuggugguuuuagu

SEQ ID NO: 3706595 - RNA, 20 nt, Human
guuuugguuaaguuggcuuc

SEQ ID NO: 3706596 - RNA, 16 nt, Human
guuuugguugcuuuaa

SEQ ID NO: 3706597 - RNA, 19 nt, Human
guuuuguaccagugaauuu

SEQ ID NO: 3706598 - RNA, 21 nt, Human
guuuuguauacaaauauauug

SEQ ID NO: 3706599 - RNA, 19 nt, Human
guuuuguaucuuaaauuug

SEQ ID NO: 3706600 - RNA, 20 nt, Human
guuuugucauucagagucag

SEQ ID NO: 3706601 - RNA, 14 nt, Human
guuuugugaaauuu

SEQ ID NO: 3706602 - RNA, 18 nt, Human
guuuugugaaauuuuuca

SEQ ID NO: 3706603 - RNA, 20 nt, Human
guuuugugaaauuuuucaua

SEQ ID NO: 3706604 - RNA, 16 nt, Human
guuuuguguacuuuua

SEQ ID NO: 3706605 - RNA, 17 nt, Human
guuuuguguacuuuuaa

SEQ ID NO: 3706606 - RNA, 15 nt, Human
guuuuguguuguuug

SEQ ID NO: 3706607 - RNA, 14 nt, Human
guuuuguuccccuc

SEQ ID NO: 3706608 - RNA, 15 nt, Human
guuuuguuccccucc

SEQ ID NO: 3706609 - RNA, 15 nt, Human
guuuuguucuuuaaa

SEQ ID NO: 3706610 - RNA, 16 nt, Human
guuuuguugacauucu

SEQ ID NO: 3706611 - RNA, 21 nt, Human
guuuuguugacauucugaaug

SEQ ID NO: 3706612 - RNA, 19 nt, Human
guuuuguugcacugaaguu

SEQ ID NO: 3706613 - RNA, 13 nt, Human
guuuuguuuacag

SEQ ID NO: 3706614 - RNA, 17 nt, Human
guuuuguuuauuaaaua

SEQ ID NO: 3706615 - RNA, 18 nt, Human
guuuuguuugcuaucuua

SEQ ID NO: 3706616 - RNA, 13 nt, Human
guuuuguuugucu

SEQ ID NO: 3706617 - RNA, 22 nt, Human
guuuuguuugucucuccuuuuc

SEQ ID NO: 3706618 - RNA, 15 nt, Human
guuuuguuuuuacaa

SEQ ID NO: 3706619 - RNA, 13 nt, Human
guuuuuaaaaucu

SEQ ID NO: 3706620 - RNA, 22 nt, Human
guuuuuaaacuguacagugucu

SEQ ID NO: 3706621 - RNA, 15 nt, Human
guuuuuaaauauauu

SEQ ID NO: 3706622 - RNA, 15 nt, Human
guuuuuaaauuuugu

SEQ ID NO: 3706623 - RNA, 15 nt, Human
guuuuuaacucaaua

SEQ ID NO: 3706624 - RNA, 14 nt, Human
guuuuuaacucuac

SEQ ID NO: 3706625 - RNA, 13 nt, Human
guuuuuaauguau

SEQ ID NO: 3706626 - RNA, 18 nt, Human
guuuuuaauguauaguaa

SEQ ID NO: 3706627 - RNA, 16 nt, Human
guuuuuacccauaucc

SEQ ID NO: 3706628 - RNA, 18 nt, Human
guuuuuacccauaucccc

SEQ ID NO: 3706629 - RNA, 17 nt, Human
guuuuuaccucugucuu

SEQ ID NO: 3706630 - RNA, 14 nt, Human
guuuuuacuccagu

SEQ ID NO: 3706631 - RNA, 18 nt, Human
guuuuuacugcucugaga

SEQ ID NO: 3706632 - RNA, 17 nt, Human
guuuuuaguaaucugua

SEQ ID NO: 3706633 - RNA, 17 nt, Human
guuuuuauauuaaugua

SEQ ID NO: 3706634 - RNA, 21 nt, Human
guuuuuaucugaaaucaauua

SEQ ID NO: 3706635 - RNA, 15 nt, Human
guuuuuaugagaaac

SEQ ID NO: 3706636 - RNA, 22 nt, Human
guuuuuauggcuuuugugcauu

SEQ ID NO: 3706637 - RNA, 14 nt, Human
guuuuuauuaguac

SEQ ID NO: 3706638 - RNA, 16 nt, Human
guuuuuauuccuugug

SEQ ID NO: 3706639 - RNA, 19 nt, Human
guuuuuauuuccuaugaug

SEQ ID NO: 3706640 - RNA, 16 nt, Human
guuuuuauuucuccuu

SEQ ID NO: 3706641 - RNA, 13 nt, Human
guuuuucaauuaa

SEQ ID NO: 3706642 - RNA, 14 nt, Human
guuuuucaauuaaa

SEQ ID NO: 3706643 - RNA, 19 nt, Human
guuuuucaauuaaacggau

SEQ ID NO: 3706644 - RNA, 23 nt, Human
guuuuucaauuaaacggauuauu

SEQ ID NO: 3706645 - RNA, 16 nt, Human
guuuuucacauuuucc

SEQ ID NO: 3706646 - RNA, 20 nt, Human
guuuuucaccacuucacuga

SEQ ID NO: 3706647 - RNA, 20 nt, Human
guuuuuccuaucauguuaac

SEQ ID NO: 3706648 - RNA, 18 nt, Human
guuuuuccuccauaaauu

SEQ ID NO: 3706649 - RNA, 19 nt, Human
guuuuuccuguucuuaaga

SEQ ID NO: 3706650 - RNA, 22 nt, Human
guuuuuccuuccaaugucugga

SEQ ID NO: 3706651 - RNA, 19 nt, Human
guuuuuccuuguauuuaaa

SEQ ID NO: 3706652 - RNA, 15 nt, Human
guuuuuccuuuaaaa

SEQ ID NO: 3706653 - RNA, 16 nt, Human
guuuuucggacaguuu

SEQ ID NO: 3706654 - RNA, 13 nt, Human
guuuuucuauuaa

SEQ ID NO: 3706655 - RNA, 11 nt, Human
guuuuucucac

SEQ ID NO: 3706656 - RNA, 15 nt, Human
guuuuucugauaugu

SEQ ID NO: 3706657 - RNA, 17 nt, Human
guuuuucugccagggag

SEQ ID NO: 3706658 - RNA, 16 nt, Human
guuuuucugcuuuaga

SEQ ID NO: 3706659 - RNA, 20 nt, Human
guuuuucugugugucaguuu

SEQ ID NO: 3706660 - RNA, 21 nt, Human
guuuuucuuaaauaauaaaga

SEQ ID NO: 3706661 - RNA, 22 nt, Human
guuuuucuucaacaucaauguu

SEQ ID NO: 3706662 - RNA, 17 nt, Human
guuuuucuuuucuugga

SEQ ID NO: 3706663 - RNA, 20 nt, Human
guuuuucuuuucuuggacac

SEQ ID NO: 3706664 - RNA, 20 nt, Human
guuuuugaaggcagaaagca

SEQ ID NO: 3706665 - RNA, 23 nt, Human
guuuuugaucaaaaacuauuugg

SEQ ID NO: 3706666 - RNA, 13 nt, Human
guuuuugggaugu

SEQ ID NO: 3706667 - RNA, 20 nt, Human
guuuuuggucuuuuauaauu

SEQ ID NO: 3706668 - RNA, 20 nt, Human
guuuuuguaaagaaaaauau

SEQ ID NO: 3706669 - RNA, 15 nt, Human
guuuuuguaaagugu

SEQ ID NO: 3706670 - RNA, 14 nt, Human
guuuuuguauauug

SEQ ID NO: 3706671 - RNA, 15 nt, Human
guuuuuguuaacuuu

SEQ ID NO: 3706672 - RNA, 19 nt, Human
guuuuuguuaacuuugggu

SEQ ID NO: 3706673 - RNA, 15 nt, Human
guuuuuguucaaagc

SEQ ID NO: 3706674 - RNA, 14 nt, Human
guuuuuguuuuguu

SEQ ID NO: 3706675 - RNA, 21 nt, Human
guuuuuuaaaauauuuaucug

SEQ ID NO: 3706676 - RNA, 18 nt, Human
guuuuuuaagauagugua

SEQ ID NO: 3706677 - RNA, 19 nt, Human
guuuuuuaucuuuucuaca

SEQ ID NO: 3706678 - RNA, 16 nt, Human
guuuuuuauuauugug

SEQ ID NO: 3706679 - RNA, 14 nt, Human
guuuuuucaaaaua

SEQ ID NO: 3706680 - RNA, 15 nt, Human
guuuuuucaaaauag

SEQ ID NO: 3706681 - RNA, 14 nt, Human
guuuuuugccacag

SEQ ID NO: 3706682 - RNA, 9 nt, Human
guuuuuugg

SEQ ID NO: 3706683 - RNA, 10 nt, Human
guuuuuuggu

SEQ ID NO: 3706684 - RNA, 19 nt, Human
guuuuuuucuucuguauuu

SEQ ID NO: 3706685 - RNA, 11 nt, Human
guuuuuuugcc

SEQ ID NO: 3706686 - RNA, 20 nt, Human
guuuuuuugucaacauugug

SEQ ID NO: 3706687 - RNA, 12 nt, Human
guuuuuuuuagu

SEQ ID NO: 3706688 - RNA, 15 nt, Human
guuuuuuuucaguug

SEQ ID NO: 3706689 - RNA, 17 nt, Human
guuuuuuuucuaaaacu

SEQ ID NO: 3706690 - RNA, 14 nt, Human
guuuuuuuucuucu

SEQ ID NO: 3706691 - RNA, 17 nt, Human
guuuuuuuuuaaagacu

SEQ ID NO: 3706692 - RNA, 23 nt, Human
guuuuuuuuuuuuuuaugugauc

SEQ ID NO: 3706693 - RNA, 19 nt, Human
uaaaaaaaaaaaaaagcuu

SEQ ID NO: 3706694 - RNA, 22 nt, Human
uaaaaaaaaaaaaaggaaaaaa

SEQ ID NO: 3706695 - RNA, 19 nt, Human
uaaaaaaaaaaaaguuaua

SEQ ID NO: 3706696 - RNA, 17 nt, Human
uaaaaaaaaaaguuaca

SEQ ID NO: 3706697 - RNA, 21 nt, Human
uaaaaaaaaaccugagcccca

SEQ ID NO: 3706698 - RNA, 22 nt, Human
uaaaaaaaaaggcauauugcuu

SEQ ID NO: 3706699 - RNA, 19 nt, Human
uaaaaaaaaagucagagac

SEQ ID NO: 3706700 - RNA, 16 nt, Human
uaaaaaaaaaugccuu

SEQ ID NO: 3706701 - RNA, 17 nt, Human
uaaaaaaaaaugccuuu

SEQ ID NO: 3706702 - RNA, 15 nt, Human
uaaaaaaaaauugua

SEQ ID NO: 3706703 - RNA, 19 nt, Human
uaaaaaaaacaaaaagaac

SEQ ID NO: 3706704 - RNA, 21 nt, Human
uaaaaaaaacaaaaagaacaa

SEQ ID NO: 3706705 - RNA, 20 nt, Human
uaaaaaaaacucuuuaacuu

SEQ ID NO: 3706706 - RNA, 14 nt, Human
uaaaaaaaagaaaa

SEQ ID NO: 3706707 - RNA, 16 nt, Human
uaaaaaaaagaaauga

SEQ ID NO: 3706708 - RNA, 17 nt, Human
uaaaaaaaauaauaaau

SEQ ID NO: 3706709 - RNA, 13 nt, Human
uaaaaaaaaugaa

SEQ ID NO: 3706710 - RNA, 21 nt, Human
uaaaaaaacaaucauuugcuu

SEQ ID NO: 3706711 - RNA, 14 nt, Human
uaaaaaaacagcuu

SEQ ID NO: 3706712 - RNA, 12 nt, Human
uaaaaaaaccac

SEQ ID NO: 3706713 - RNA, 11 nt, Human
uaaaaaaagaa

SEQ ID NO: 3706714 - RNA, 18 nt, Human
uaaaaaaaggcauuguuu

SEQ ID NO: 3706715 - RNA, 15 nt, Human
uaaaaaaauaagaag

SEQ ID NO: 3706716 - RNA, 13 nt, Human
uaaaaaaaugaca

SEQ ID NO: 3706717 - RNA, 14 nt, Human
uaaaaaaauggcag

SEQ ID NO: 3706718 - RNA, 13 nt, Human
uaaaaaaauuggu

SEQ ID NO: 3706719 - RNA, 16 nt, Human
uaaaaaaauuuaagug

SEQ ID NO: 3706720 - RNA, 17 nt, Human
uaaaaaaauuuaagugc

SEQ ID NO: 3706721 - RNA, 23 nt, Human
uaaaaaacaugugguuacacagu

SEQ ID NO: 3706722 - RNA, 15 nt, Human
uaaaaaaccacaugg

SEQ ID NO: 3706723 - RNA, 20 nt, Human
uaaaaaacugcugacuguuu

SEQ ID NO: 3706724 - RNA, 17 nt, Human
uaaaaaagauaaacaca

SEQ ID NO: 3706725 - RNA, 14 nt, Human
uaaaaaagccuucc

SEQ ID NO: 3706726 - RNA, 15 nt, Human
uaaaaaagccuuccu

SEQ ID NO: 3706727 - RNA, 15 nt, Human
uaaaaaagcugugug

SEQ ID NO: 3706728 - RNA, 13 nt, Human
uaaaaaagucucu

SEQ ID NO: 3706729 - RNA, 14 nt, Human
uaaaaaagucucua

SEQ ID NO: 3706730 - RNA, 20 nt, Human
uaaaaaagucucuauuuaaa

SEQ ID NO: 3706731 - RNA, 22 nt, Human
uaaaaaagucucuauuuaaauu

SEQ ID NO: 3706732 - RNA, 13 nt, Human
uaaaaaauauuuu

SEQ ID NO: 3706733 - RNA, 15 nt, Human
uaaaaaaugaaaaua

SEQ ID NO: 3706734 - RNA, 14 nt, Human
uaaaaaaugacaaa

SEQ ID NO: 3706735 - RNA, 15 nt, Human
uaaaaaauggugccu

SEQ ID NO: 3706736 - RNA, 13 nt, Human
uaaaaaaugucca

SEQ ID NO: 3706737 - RNA, 20 nt, Human
uaaaaaauguguguauucuu

SEQ ID NO: 3706738 - RNA, 18 nt, Human
uaaaaaauuaugacaaug

SEQ ID NO: 3706739 - RNA, 22 nt, Human
uaaaaacaaaaacaucccaaga

SEQ ID NO: 3706740 - RNA, 21 nt, Human
uaaaaacaaagaaauuaugug

SEQ ID NO: 3706741 - RNA, 18 nt, Human
uaaaaacaacuuuauacc

SEQ ID NO: 3706742 - RNA, 16 nt, Human
uaaaaacagcauugcu

SEQ ID NO: 3706743 - RNA, 22 nt, Human
uaaaaacagcauugcuuucuga

SEQ ID NO: 3706744 - RNA, 14 nt, Human
uaaaaaccaagaag

SEQ ID NO: 3706745 - RNA, 14 nt, Human
ugugaccaacugug

SEQ ID NO: 3706746 - RNA, 14 nt, Human
ugugaccagcacug

SEQ ID NO: 3706747 - RNA, 15 nt, Human
ugugaccagggguga

SEQ ID NO: 3706748 - RNA, 21 nt, Human
ugugacccagauccucacaac

SEQ ID NO: 3706749 - RNA, 15 nt, Human
ugugaccccuccugg

SEQ ID NO: 3706750 - RNA, 19 nt, Human
ugugaccccuccuggggcc

SEQ ID NO: 3706751 - RNA, 11 nt, Human
ugugacccucc

SEQ ID NO: 3706752 - RNA, 13 nt, Human
ugugacccuccaa

SEQ ID NO: 3706753 - RNA, 15 nt, Human
ugugacccuccaaau

SEQ ID NO: 3706754 - RNA, 16 nt, Human
ugugacccucugaaug

SEQ ID NO: 3706755 - RNA, 20 nt, Human
ugugaccucaggcacuagcc

SEQ ID NO: 3706756 - RNA, 14 nt, Human
ugugaccugcugag

SEQ ID NO: 3706757 - RNA, 15 nt, Human
ugugaccuuaguguu

SEQ ID NO: 3706758 - RNA, 13 nt, Human
ugugaccuucucu

SEQ ID NO: 3706759 - RNA, 22 nt, Human
ugugacuaauuguauaacaggu

SEQ ID NO: 3706760 - RNA, 15 nt, Human
ugugacuagugcuga

SEQ ID NO: 3706761 - RNA, 17 nt, Human
ugugacuagugcugaag

SEQ ID NO: 3706762 - RNA, 22 nt, Human
ugugacuagugcugaagcuuau

SEQ ID NO: 3706763 - RNA, 18 nt, Human
ugugacuauauagagaug

SEQ ID NO: 3706764 - RNA, 12 nt, Human
ugugacucuuuc

SEQ ID NO: 3706765 - RNA, 15 nt, Human
ugugacugaauuucu

SEQ ID NO: 3706766 - RNA, 16 nt, Human
ugugacugaauuucuu

SEQ ID NO: 3706767 - RNA, 20 nt, Human
ugugacugauguuaggcugg

SEQ ID NO: 3706768 - RNA, 23 nt, Human
ugugacugauguuaggcugggcc

SEQ ID NO: 3706769 - RNA, 17 nt, Human
ugugacuggcuaaagcu

SEQ ID NO: 3706770 - RNA, 17 nt, Human
ugugacuuaagaagccu

SEQ ID NO: 3706771 - RNA, 15 nt, Human
ugugacuuaaugcca

SEQ ID NO: 3706772 - RNA, 23 nt, Human
ugugacuucuauuuuaaagacaa

SEQ ID NO: 3706773 - RNA, 23 nt, Human
ugugacuugcaucguggagacag

SEQ ID NO: 3706774 - RNA, 22 nt, Human
ugugagaaaaccccuucccauu

SEQ ID NO: 3706775 - RNA, 21 nt, Human
ugugagaagccagccagaggc

SEQ ID NO: 3706776 - RNA, 18 nt, Human
ugugagaagguuuauugu

SEQ ID NO: 3706777 - RNA, 22 nt, Human
ugugagaagugaaugcugggac

SEQ ID NO: 3706778 - RNA, 14 nt, Human
ugugagacccccac

SEQ ID NO: 3706779 - RNA, 15 nt, Human
ugugagacccccaca

SEQ ID NO: 3706780 - RNA, 19 nt, Human
ugugagacccccacaccuc

SEQ ID NO: 3706781 - RNA, 17 nt, Human
ugugagagcgaggcuga

SEQ ID NO: 3706782 - RNA, 15 nt, Human
ugugagagguuugac

SEQ ID NO: 3706783 - RNA, 15 nt, Human
ugugagaugcuagaa

SEQ ID NO: 3706784 - RNA, 22 nt, Human
ugugagaugcuagaacucccuu

SEQ ID NO: 3706785 - RNA, 13 nt, Human
ugugagaugugua

SEQ ID NO: 3706786 - RNA, 22 nt, Human
ugugagauuuuuuauugcuagu

SEQ ID NO: 3706787 - RNA, 15 nt, Human
ugugagcagcaccca

SEQ ID NO: 3706788 - RNA, 18 nt, Human
ugugagcaucacaguuuu

SEQ ID NO: 3706789 - RNA, 12 nt, Human
ugugagccccug

SEQ ID NO: 3706790 - RNA, 17 nt, Human
ugugagccccugguccu

SEQ ID NO: 3706791 - RNA, 21 nt, Human
ugugagccccugguccugagg

SEQ ID NO: 3706792 - RNA, 19 nt, Human
ugugagcucccaggugcag

SEQ ID NO: 3706793 - RNA, 23 nt, Human
ugugaggaaagucauuggcuuua

SEQ ID NO: 3706794 - RNA, 13 nt, Human
ugugaggccaggg

SEQ ID NO: 3706795 - RNA, 15 nt, Human
ugugaggccagggca

SEQ ID NO: 3706796 - RNA, 22 nt, Human
ugugaggccagggcagagugag

SEQ ID NO: 3706797 - RNA, 22 nt, Human
ugugaggccccuggacaagcag

SEQ ID NO: 3706798 - RNA, 14 nt, Human
ugugaggcuguccu

SEQ ID NO: 3706799 - RNA, 21 nt, Human
ugugagguuucccaauggugu

SEQ ID NO: 3706800 - RNA, 19 nt, Human
ugugaguacuacaguccuc

SEQ ID NO: 3706801 - RNA, 20 nt, Human
ugugaguacuacaguccucc

SEQ ID NO: 3706802 - RNA, 13 nt, Human
ugugaguauucuc

SEQ ID NO: 3706803 - RNA, 15 nt, Human
ugugagucaccaagc

SEQ ID NO: 3706804 - RNA, 17 nt, Human
ugugagucaccaagccc

SEQ ID NO: 3706805 - RNA, 21 nt, Human
ugugagucaccaagcccaguu

SEQ ID NO: 3706806 - RNA, 18 nt, Human
ugugagucuuugguucua

SEQ ID NO: 3706807 - RNA, 20 nt, Human
ugugagucuuugguucuaag

SEQ ID NO: 3706808 - RNA, 16 nt, Human
ugugagugccuuuugc

SEQ ID NO: 3706809 - RNA, 12 nt, Human
uguguuuccaca

SEQ ID NO: 3706810 - RNA, 11 nt, Human
uguguuuccuu

SEQ ID NO: 3706811 - RNA, 14 nt, Human
uguguuugcuuucu

SEQ ID NO: 3706812 - RNA, 17 nt, Human
uguguuuggaagacuau

SEQ ID NO: 3706813 - RNA, 15 nt, Human
uguguuuggcuuuca

SEQ ID NO: 3706814 - RNA, 18 nt, Human
uguguuugguucuggggc

SEQ ID NO: 3706815 - RNA, 11 nt, Human
uguguuugugu

SEQ ID NO: 3706816 - RNA, 13 nt, Human
uguguuuguguga

SEQ ID NO: 3706817 - RNA, 20 nt, Human
uguguuuguucuuuuuauug

SEQ ID NO: 3706818 - RNA, 14 nt, Human
uguguuuuagagua

SEQ ID NO: 3706819 - RNA, 17 nt, Human
uguguuuucucuggaau

SEQ ID NO: 3706820 - RNA, 14 nt, Human
uguguuuucugaau

SEQ ID NO: 3706821 - RNA, 13 nt, Human
uguguuuugcaag

SEQ ID NO: 3706822 - RNA, 19 nt, Human
uguguuuugcuaaaggaaa

SEQ ID NO: 3706823 - RNA, 18 nt, Human
uguguuuuucauaaagca

SEQ ID NO: 3706824 - RNA, 16 nt, Human
uguguuuuucuauuaa

SEQ ID NO: 3706825 - RNA, 17 nt, Human
uguguuuuucuauuaaa

SEQ ID NO: 3706826 - RNA, 21 nt, Human
uguguuuuucuauuaaaagac

SEQ ID NO: 3706827 - RNA, 20 nt, Human
uguguuuuucuccagugcug

SEQ ID NO: 3706828 - RNA, 18 nt, Human
uguguuuuugggaugucu

SEQ ID NO: 3706829 - RNA, 15 nt, Human
uguguuuuuuaagau

SEQ ID NO: 3706830 - RNA, 22 nt, Human
uguguuuuuuuuucguuuguuu

SEQ ID NO: 3706831 - RNA, 19 nt, Human
uguuaaaaaaauaagaaga

SEQ ID NO: 3706832 - RNA, 14 nt, Human
uguuaaaaauguca

SEQ ID NO: 3706833 - RNA, 19 nt, Human
uguuaaaacuggcaucuga

SEQ ID NO: 3706834 - RNA, 15 nt, Human
uguuaaaaguuuuau

SEQ ID NO: 3706835 - RNA, 14 nt, Human
uguuaaaauaacua

SEQ ID NO: 3706836 - RNA, 22 nt, Human
uguuaaaauuauaccuguugcu

SEQ ID NO: 3706837 - RNA, 23 nt, Human
uguuaaaauuaucaauaucuaau

SEQ ID NO: 3706838 - RNA, 16 nt, Human
uguuaaaccaugggau

SEQ ID NO: 3706839 - RNA, 11 nt, Human
uguuaaacugu

SEQ ID NO: 3706840 - RNA, 14 nt, Human
uguuaaacuguuag

SEQ ID NO: 3706841 - RNA, 22 nt, Human
uguuaaacuguuagcacuguug

SEQ ID NO: 3706842 - RNA, 14 nt, Human
uguuaaagauguag

SEQ ID NO: 3706843 - RNA, 20 nt, Human
uguuaaauaaauuguauauu

SEQ ID NO: 3706844 - RNA, 22 nt, Human
uguuaaauaucaguagaaacuc

SEQ ID NO: 3706845 - RNA, 24 nt, Human
uguuaaaucccauucauaacuuuc

SEQ ID NO: 3706846 - RNA, 18 nt, Human
uguuaaaugaaauuguaa

SEQ ID NO: 3706847 - RNA, 15 nt, Human
uguuaaauuuguaag

SEQ ID NO: 3706848 - RNA, 16 nt, Human
uguuaaauuuguaagu

SEQ ID NO: 3706849 - RNA, 17 nt, Human
uguuaaauuuguaaguu

SEQ ID NO: 3706850 - RNA, 18 nt, Human
uguuaacacauuuuguau

SEQ ID NO: 3706851 - RNA, 21 nt, Human
uguuaacagaagggagggcag

SEQ ID NO: 3706852 - RNA, 22 nt, Human
uguuaacagaagggagggcaga

SEQ ID NO: 3706853 - RNA, 21 nt, Human
uguuaacauggacaugaucuu

SEQ ID NO: 3706854 - RNA, 15 nt, Human
uguuaaccucagugu

SEQ ID NO: 3706855 - RNA, 17 nt, Human
uguuaaccucaguguca

SEQ ID NO: 3706856 - RNA, 19 nt, Human
uguuaacucuugucuauuu

SEQ ID NO: 3706857 - RNA, 12 nt, Human
uguuaacugaau

SEQ ID NO: 3706858 - RNA, 15 nt, Human
uguuaacugaauacc

SEQ ID NO: 3706859 - RNA, 18 nt, Human
uguuaacugaauaccacu

SEQ ID NO: 3706860 - RNA, 22 nt, Human
uguuaacugaauaccacucugu

SEQ ID NO: 3706861 - RNA, 14 nt, Human
uguuaacuuagcuu

SEQ ID NO: 3706862 - RNA, 15 nt, Human
uguuaacuuauucaa

SEQ ID NO: 3706863 - RNA, 15 nt, Human
uguuaagaauugacc

SEQ ID NO: 3706864 - RNA, 15 nt, Human
uguuaagacuugaca

SEQ ID NO: 3706865 - RNA, 20 nt, Human
uguuaagacuugacagugga

SEQ ID NO: 3706866 - RNA, 23 nt, Human
uguuaagcagauggaaugcugug

SEQ ID NO: 3706867 - RNA, 18 nt, Human
uguuaagcagcuaaauuu

SEQ ID NO: 3706868 - RNA, 14 nt, Human
uguuaaggaaacuc

SEQ ID NO: 3706869 - RNA, 17 nt, Human
uguuaagggaccaggga

SEQ ID NO: 3706870 - RNA, 22 nt, Human
uguuaagguccugaaaguaacu

SEQ ID NO: 3706871 - RNA, 15 nt, Human
uguuaagguucaaga

SEQ ID NO: 3706872 - RNA, 22 nt, Human
uguuaaguugauggugaugaaa

SEQ ID NO: 3706873 - RNA, 18 nt, Human
uguuaauaaaaguacaug

SEQ ID NO: 3706874 - RNA, 22 nt, Human
uguuaauacaagguauaauaaa

SEQ ID NO: 3706875 - RNA, 12 nt, Human
uguuaauaucac

SEQ ID NO: 3706876 - RNA, 17 nt, Human
uguuaauaucacucauu

SEQ ID NO: 3706877 - RNA, 21 nt, Human
uguuaauaucacucauuaauu

SEQ ID NO: 3706878 - RNA, 22 nt, Human
uguuaauaucacucauuaauua

SEQ ID NO: 3706879 - RNA, 14 nt, Human
uguuaaucaauuua

SEQ ID NO: 3706880 - RNA, 20 nt, Human
uguuaaucaauuuaaaccca

SEQ ID NO: 3706881 - RNA, 22 nt, Human
uguuaaucaauuuaaacccauu

SEQ ID NO: 3706882 - RNA, 19 nt, Human
uguuaaucucuguuaugua

SEQ ID NO: 3706883 - RNA, 19 nt, Human
uguuaaugaaaaugucaga

SEQ ID NO: 3706884 - RNA, 23 nt, Human
uguuaauggauuucagaagccua

SEQ ID NO: 3706885 - RNA, 20 nt, Human
uguuaauggugcaaauccua

SEQ ID NO: 3706886 - RNA, 12 nt, Human
uguuaauguauu

SEQ ID NO: 3706887 - RNA, 19 nt, Human
uguuaauguauuuguucau

SEQ ID NO: 3706888 - RNA, 15 nt, Human
uguuaauuacaccau

SEQ ID NO: 3706889 - RNA, 15 nt, Human
uguuaauucagcacu

SEQ ID NO: 3706890 - RNA, 22 nt, Human
uguuaauucagcacugauuuca

SEQ ID NO: 3706891 - RNA, 20 nt, Human
uguuaauuuagaaaacuuua

SEQ ID NO: 3706892 - RNA, 22 nt, Human
uguuaauuuagaaaacuuuaaa

SEQ ID NO: 3706893 - RNA, 15 nt, Human
uguuaauuuggacca

SEQ ID NO: 3706894 - RNA, 22 nt, Human
uguuaauuuggaccauuuuccu

SEQ ID NO: 3706895 - RNA, 19 nt, Human
uguuaauuuuuugguacaa

SEQ ID NO: 3706896 - RNA, 21 nt, Human
uguuaauuuuuugguacaaaa

SEQ ID NO: 3706897 - RNA, 14 nt, Human
uguuacaaauugua

SEQ ID NO: 3706898 - RNA, 18 nt, Human
uguuacaaauuguagaag

SEQ ID NO: 3706899 - RNA, 18 nt, Human
uguuacacuuuuuggaag

SEQ ID NO: 3706900 - RNA, 23 nt, Human
uguuacaggcaccgagaauguug

SEQ ID NO: 3706901 - RNA, 17 nt, Human
uguuacauaacaagaaa

SEQ ID NO: 3706902 - RNA, 22 nt, Human
uguuacauaacaagaaaaucaa

SEQ ID NO: 3706903 - RNA, 19 nt, Human
uguuacauaagauaaaugu

SEQ ID NO: 3706904 - RNA, 19 nt, Human
uguuaccaaaaauaaauau

SEQ ID NO: 3706905 - RNA, 23 nt, Human
uguuaccaaaaauaaauauaucu

SEQ ID NO: 3706906 - RNA, 15 nt, Human
uguuacccaugaaaa

SEQ ID NO: 3706907 - RNA, 23 nt, Human
uguuaccccaagcgcccuggccc

SEQ ID NO: 3706908 - RNA, 15 nt, Human
uguuaccgccugucu

SEQ ID NO: 3706909 - RNA, 16 nt, Human
uguuaccuacuuugac

SEQ ID NO: 3706910 - RNA, 19 nt, Human
uguuaccuccaacagaacu

SEQ ID NO: 3706911 - RNA, 23 nt, Human
uguuaccugaaaacacugugcac

SEQ ID NO: 3706912 - RNA, 21 nt, Human
uguuaccugaucaaugacaga

SEQ ID NO: 3706913 - RNA, 14 nt, Human
uguuaccuguagau

SEQ ID NO: 3706914 - RNA, 20 nt, Human
uguuacuaaaaaaaagauga

SEQ ID NO: 3706915 - RNA, 15 nt, Human
uguuacuaucugcuu

SEQ ID NO: 3706916 - RNA, 14 nt, Human
uguuacuauuuucu

SEQ ID NO: 3706917 - RNA, 18 nt, Human
uguuacuauuuucuacaa

SEQ ID NO: 3706918 - RNA, 22 nt, Human
uguuacuauuuucuacaauuaa

SEQ ID NO: 3706919 - RNA, 15 nt, Human
uguuacucugguucu

SEQ ID NO: 3706920 - RNA, 20 nt, Human
uguuacucugguucuuuguu

SEQ ID NO: 3706921 - RNA, 14 nt, Human
uguuacucuuacga

SEQ ID NO: 3706922 - RNA, 14 nt, Human
uguuacucuuggga

SEQ ID NO: 3706923 - RNA, 17 nt, Human
uguuacucuugggacau

SEQ ID NO: 3706924 - RNA, 15 nt, Human
uguuacuguaauucc

SEQ ID NO: 3706925 - RNA, 15 nt, Human
uguuacuguucuugc

SEQ ID NO: 3706926 - RNA, 19 nt, Human
uguuacuguucuugcugcu

SEQ ID NO: 3706927 - RNA, 24 nt, Human
uguuacuguucuugcugcuagaac

SEQ ID NO: 3706928 - RNA, 14 nt, Human
uguuacuuaccuaa

SEQ ID NO: 3706929 - RNA, 14 nt, Human
uguuacuucucuaa

SEQ ID NO: 3706930 - RNA, 20 nt, Human
uguuagaacacuauuuucag

SEQ ID NO: 3706931 - RNA, 19 nt, Human
uguuagaauguaagguaua

SEQ ID NO: 3706932 - RNA, 21 nt, Human
uguuagagacuuuuuucuagu

SEQ ID NO: 3706933 - RNA, 11 nt, Human
uguuagagcac

SEQ ID NO: 3706934 - RNA, 19 nt, Human
uguuagauauuuuucauaa

SEQ ID NO: 3706935 - RNA, 18 nt, Human
uggggacaucucuuugaa

SEQ ID NO: 3706936 - RNA, 20 nt, Human
uggggacaucucuuugaauu

SEQ ID NO: 3706937 - RNA, 14 nt, Human
uggggaccagagcu

SEQ ID NO: 3706938 - RNA, 15 nt, Human
uggggaccagagcug

SEQ ID NO: 3706939 - RNA, 22 nt, Human
uggggaccagcagccccacacc

SEQ ID NO: 3706940 - RNA, 11 nt, Human
uggggacccac

SEQ ID NO: 3706941 - RNA, 13 nt, Human
uggggacccaggc

SEQ ID NO: 3706942 - RNA, 14 nt, Human
uggggaccucaggc

SEQ ID NO: 3706943 - RNA, 15 nt, Human
uggggaccucaggcc

SEQ ID NO: 3706944 - RNA, 19 nt, Human
uggggacuuggccucucuc

SEQ ID NO: 3706945 - RNA, 18 nt, Human
uggggagacaccucagag

SEQ ID NO: 3706946 - RNA, 20 nt, Human
uggggagacaccucagagcc

SEQ ID NO: 3706947 - RNA, 21 nt, Human
uggggagacugggcugaggga

SEQ ID NO: 3706948 - RNA, 15 nt, Human
uggggagaggaaaga

SEQ ID NO: 3706949 - RNA, 20 nt, Human
uggggagaggaacuccuugg

SEQ ID NO: 3706950 - RNA, 17 nt, Human
uggggagcaggcagcca

SEQ ID NO: 3706951 - RNA, 16 nt, Human
uggggagccaacagaa

SEQ ID NO: 3706952 - RNA, 22 nt, Human
uggggagccaacagaagcuucc

SEQ ID NO: 3706953 - RNA, 17 nt, Human
uggggagcgggucugcu

SEQ ID NO: 3706954 - RNA, 22 nt, Human
uggggaggcggacguuccagcc

SEQ ID NO: 3706955 - RNA, 14 nt, Human
uggggagggauuug

SEQ ID NO: 3706956 - RNA, 19 nt, Human
uggggaggggcgcuggccc

SEQ ID NO: 3706957 - RNA, 20 nt, Human
uggggaggggcgcuggccca

SEQ ID NO: 3706958 - RNA, 19 nt, Human
uggggaggggcggcaggag

SEQ ID NO: 3706959 - RNA, 15 nt, Human
uggggaggggcugug

SEQ ID NO: 3706960 - RNA, 19 nt, Human
uggggagugggacagaguc

SEQ ID NO: 3706961 - RNA, 18 nt, Human
uggggaguuuaggguggg

SEQ ID NO: 3706962 - RNA, 18 nt, Human
uggggauagaugugugga

SEQ ID NO: 3706963 - RNA, 18 nt, Human
uggggauccccgccuggc

SEQ ID NO: 3706964 - RNA, 22 nt, Human
uggggauccccgccuggccagg

SEQ ID NO: 3706965 - RNA, 12 nt, Human
uggggauucuua

SEQ ID NO: 3706966 - RNA, 23 nt, Human
uggggauugggugggcaggaaaa

SEQ ID NO: 3706967 - RNA, 18 nt, Human
uggggcaagauuuuccuu

SEQ ID NO: 3706968 - RNA, 18 nt, Human
uggggcacagggagaggc

SEQ ID NO: 3706969 - RNA, 18 nt, Human
uggggcagaaaucugagg

SEQ ID NO: 3706970 - RNA, 16 nt, Human
uggggcagcuccucug

SEQ ID NO: 3706971 - RNA, 13 nt, Human
uggggcaggagua

SEQ ID NO: 3706972 - RNA, 15 nt, Human
uggggcaggaguagc

SEQ ID NO: 3706973 - RNA, 19 nt, Human
uggggcaggaguagcugag

SEQ ID NO: 3706974 - RNA, 21 nt, Human
uggggcaggaguagcugagcu

SEQ ID NO: 3706975 - RNA, 14 nt, Human
uggggcaggcuggg

SEQ ID NO: 3706976 - RNA, 17 nt, Human
uggggcaguagaagguc

SEQ ID NO: 3706977 - RNA, 20 nt, Human
uggggcagugcuuggcccag

SEQ ID NO: 3706978 - RNA, 16 nt, Human
uggggcauccaugggg

SEQ ID NO: 3706979 - RNA, 20 nt, Human
uggggccaccaaagcugccc

SEQ ID NO: 3706980 - RNA, 22 nt, Human
uggggccaggccgggccuguac

SEQ ID NO: 3706981 - RNA, 21 nt, Human
uggggccaggcugggucgccc

SEQ ID NO: 3706982 - RNA, 21 nt, Human
uggggccaguuggucccccuu

SEQ ID NO: 3706983 - RNA, 19 nt, Human
uggggccaugccuccucag

SEQ ID NO: 3706984 - RNA, 21 nt, Human
uggggccaugccuccucagga

SEQ ID NO: 3706985 - RNA, 13 nt, Human
uggggcccaaaug

SEQ ID NO: 3706986 - RNA, 13 nt, Human
uggggcccagugc

SEQ ID NO: 3706987 - RNA, 12 nt, Human
uggggcccuaau

SEQ ID NO: 3706988 - RNA, 19 nt, Human
uggggccgccgccucuuuc

SEQ ID NO: 3706989 - RNA, 20 nt, Human
uggggccuaauaaaacugau

SEQ ID NO: 3706990 - RNA, 23 nt, Human
uggggccuaauaaaacugaugug

SEQ ID NO: 3706991 - RNA, 18 nt, Human
uggggccuagauccacac

SEQ ID NO: 3706992 - RNA, 13 nt, Human
uggggccucagac

SEQ ID NO: 3706993 - RNA, 14 nt, Human
uggggccucagacg

SEQ ID NO: 3706994 - RNA, 18 nt, Human
uggggccugacugcucag

SEQ ID NO: 3706995 - RNA, 11 nt, Human
uggggccugag

SEQ ID NO: 3706996 - RNA, 16 nt, Human
uggggccugagagaau

SEQ ID NO: 3706997 - RNA, 17 nt, Human
uggggccugaggucauc

SEQ ID NO: 3706998 - RNA, 16 nt, Human
uggggccuggaccugc

SEQ ID NO: 3706999 - RNA, 15 nt, Human
uggggccuggagcag

SEQ ID NO: 3707000 - RNA, 13 nt, Human
uggggccugggac

SEQ ID NO: 3707001 - RNA, 13 nt, Human
uggggccugugga

SEQ ID NO: 3707002 - RNA, 16 nt, Human
uggggccuguggaaug

SEQ ID NO: 3707003 - RNA, 14 nt, Human
uggggccuuggccu

SEQ ID NO: 3707004 - RNA, 17 nt, Human
uggggcgaggcagagga

SEQ ID NO: 3707005 - RNA, 19 nt, Human
uggggcguggggagggccg

SEQ ID NO: 3707006 - RNA, 23 nt, Human
uggggcuaggaaauccagggugg

SEQ ID NO: 3707007 - RNA, 13 nt, Human
uggggcucagagc

SEQ ID NO: 3707008 - RNA, 15 nt, Human
uggggcucagagugg

SEQ ID NO: 3707009 - RNA, 18 nt, Human
uggggcucccagccaggc

SEQ ID NO: 3707010 - RNA, 19 nt, Human
uggggcucccagccaggcc

SEQ ID NO: 3707011 - RNA, 21 nt, Human
uggggcucccagccaggcccu

SEQ ID NO: 3707012 - RNA, 14 nt, Human
uggggcucccgccc

SEQ ID NO: 3707013 - RNA, 23 nt, Human
uggggcuccuccaggguggcagc

SEQ ID NO: 3707014 - RNA, 11 nt, Human
uggggcuccuu

SEQ ID NO: 3707015 - RNA, 17 nt, Human
uggggcucuaacgccug

SEQ ID NO: 3707016 - RNA, 18 nt, Human
uggggcucuaacgccuga

SEQ ID NO: 3707017 - RNA, 19 nt, Human
uggggcucuaacgccugag

SEQ ID NO: 3707018 - RNA, 21 nt, Human
uggggcucuaacgccugagcc

SEQ ID NO: 3707019 - RNA, 22 nt, Human
uggggcucuaacgccugagccc

SEQ ID NO: 3707020 - RNA, 13 nt, Human
uggggcucucagu

SEQ ID NO: 3707021 - RNA, 15 nt, Human
uggggcucugugcag

SEQ ID NO: 3707022 - RNA, 18 nt, Human
uggggcugaucucaggga

SEQ ID NO: 3707023 - RNA, 19 nt, Human
uggggcugaucucagggaa

SEQ ID NO: 3707024 - RNA, 21 nt, Human
uggggcugaucucagggaagc

SEQ ID NO: 3707025 - RNA, 20 nt, Human
uggggcugcaccggcuggcc

SEQ ID NO: 3707026 - RNA, 23 nt, Human
uggggcugcaccggcuggccugg

SEQ ID NO: 3707027 - RNA, 15 nt, Human
uggggcugcuccucc

SEQ ID NO: 3707028 - RNA, 16 nt, Human
uggggcugcuccucca

SEQ ID NO: 3707029 - RNA, 19 nt, Human
uggggcugcuccuccaggg

SEQ ID NO: 3707030 - RNA, 12 nt, Human
uggggcugcugg

SEQ ID NO: 3707031 - RNA, 13 nt, Human
uggggcugcuggc

SEQ ID NO: 3707032 - RNA, 14 nt, Human
uggggcugcuguga

SEQ ID NO: 3707033 - RNA, 17 nt, Human
uggggcuggagaggaca

SEQ ID NO: 3707034 - RNA, 13 nt, Human
uggggcugggccc

SEQ ID NO: 3707035 - RNA, 18 nt, Human
uggggcugggcccaccca

SEQ ID NO: 3707036 - RNA, 11 nt, Human
uggggcugggg

SEQ ID NO: 3707037 - RNA, 22 nt, Human
uggggcugggggaugggccuga

SEQ ID NO: 3707038 - RNA, 16 nt, Human
uggggcugguucugua

SEQ ID NO: 3707039 - RNA, 12 nt, Human
uggggcuguguu

SEQ ID NO: 3707040 - RNA, 18 nt, Human
uggggcuucuccugaccc

SEQ ID NO: 3707041 - RNA, 12 nt, Human
uggggcuuggcg

SEQ ID NO: 3707042 - RNA, 23 nt, Human
uggggcuuucguccacagcuucc

SEQ ID NO: 3707043 - RNA, 18 nt, Human
ugggggaagagcacagcc

SEQ ID NO: 3707044 - RNA, 19 nt, Human
ugggggaagagcacagccc

SEQ ID NO: 3707045 - RNA, 21 nt, Human
ugggggaagagcacagcccuc

SEQ ID NO: 3707046 - RNA, 23 nt, Human
ugggggaagagcacagcccuccc

SEQ ID NO: 3707047 - RNA, 15 nt, Human
ugggggaagcccugg

SEQ ID NO: 3707048 - RNA, 14 nt, Human
ugggggacuuacau

SEQ ID NO: 3707049 - RNA, 14 nt, Human
ugggggagagccgu

SEQ ID NO: 3707050 - RNA, 11 nt, Human
ugggggagggc

SEQ ID NO: 3707051 - RNA, 15 nt, Human
ugggggaguggaaua

SEQ ID NO: 3707052 - RNA, 16 nt, Human
ugggggaguggccaca

SEQ ID NO: 3707053 - RNA, 18 nt, Human
ugggggcagcacaggagg

SEQ ID NO: 3707054 - RNA, 17 nt, Human
ugggggcagggcaugac

SEQ ID NO: 3707055 - RNA, 14 nt, Human
ugggggcagggcug

SEQ ID NO: 3707056 - RNA, 15 nt, Human
ugggggccuggcugg

SEQ ID NO: 3707057 - RNA, 18 nt, Human
ugggggcucagcaaggcc

SEQ ID NO: 3707058 - RNA, 23 nt, Human
ugggggcucagcaaggccaccuc

SEQ ID NO: 3707059 - RNA, 21 nt, Human
ugggggcugcagcauguugcu

SEQ ID NO: 3707060 - RNA, 20 nt, Human
uggggggaacgcccacuucc

SEQ ID NO: 3707061 - RNA, 21 nt, Human
uggggggccaacaccagggau

SEQ ID NO: 3707062 - RNA, 17 nt, Human
uggggggcuucauacac

SEQ ID NO: 3707063 - RNA, 20 nt, Human
ugggggggccaaaaggaaaa

SEQ ID NO: 3707064 - RNA, 14 nt, Human
uggggggguggccg

SEQ ID NO: 3707065 - RNA, 15 nt, Human
uggggguagcagcug

SEQ ID NO: 3707066 - RNA, 18 nt, Human
uggggguagcagcuggac

SEQ ID NO: 3707067 - RNA, 19 nt, Human
ugggggucaggcagccagu

SEQ ID NO: 3707068 - RNA, 21 nt, Human
uggggguccuccuccagggac

SEQ ID NO: 3707069 - RNA, 15 nt, Human
ugggggugagggucc

SEQ ID NO: 3707070 - RNA, 11 nt, Human
ugggggugggu

SEQ ID NO: 3707071 - RNA, 15 nt, Human
uggggguuggcuggg

SEQ ID NO: 3707072 - RNA, 16 nt, Human
uggggguuggcugggu

SEQ ID NO: 3707073 - RNA, 14 nt, Human
ugggguacccacug

SEQ ID NO: 3707074 - RNA, 20 nt, Human
ugggguacccacugcucugg

SEQ ID NO: 3707075 - RNA, 18 nt, Human
ugggguagcuagaggaac

SEQ ID NO: 3707076 - RNA, 21 nt, Human
ugggguaggaggaugggcucg

SEQ ID NO: 3707077 - RNA, 20 nt, Human
ugggguauuuaccacagcag

SEQ ID NO: 3707078 - RNA, 24 nt, Human
ugggguauuuaccacagcagcuga

SEQ ID NO: 3707079 - RNA, 21 nt, Human
ugggguauuuggggcuuauuu

SEQ ID NO: 3707080 - RNA, 12 nt, Human
ugggguauuuuu

SEQ ID NO: 3707081 - RNA, 17 nt, Human
uggggucacucuggcag

SEQ ID NO: 3707082 - RNA, 18 nt, Human
uggggucacucuggcagc

SEQ ID NO: 3707083 - RNA, 22 nt, Human
uggggucacucuggcagcucag

SEQ ID NO: 3707084 - RNA, 15 nt, Human
uggggucagccaggg

SEQ ID NO: 3707085 - RNA, 16 nt, Human
uaaaaugcuagguucu

SEQ ID NO: 3707086 - RNA, 18 nt, Human
uaaaauggaugccuugaa

SEQ ID NO: 3707087 - RNA, 20 nt, Human
uaaaauggcaacaaacugca

SEQ ID NO: 3707088 - RNA, 19 nt, Human
uaaaauggcaaguuuucca

SEQ ID NO: 3707089 - RNA, 15 nt, Human
uaaaauguaaacugu

SEQ ID NO: 3707090 - RNA, 18 nt, Human
uaaaauguaaagccaugc

SEQ ID NO: 3707091 - RNA, 15 nt, Human
uaaaauguaauuuaa

SEQ ID NO: 3707092 - RNA, 16 nt, Human
uaaaauguaauuuaaa

SEQ ID NO: 3707093 - RNA, 21 nt, Human
uaaaauguaauuuaaaugaaa

SEQ ID NO: 3707094 - RNA, 15 nt, Human
uaaaauguacaugua

SEQ ID NO: 3707095 - RNA, 16 nt, Human
uaaaauguaucuucca

SEQ ID NO: 3707096 - RNA, 20 nt, Human
uaaaauguauuauguccugu

SEQ ID NO: 3707097 - RNA, 14 nt, Human
uaaaaugucuucaa

SEQ ID NO: 3707098 - RNA, 21 nt, Human
uaaaaugugauguucuaaggc

SEQ ID NO: 3707099 - RNA, 19 nt, Human
uaaaaugugauuuuucuga

SEQ ID NO: 3707100 - RNA, 13 nt, Human
uaaaaugugcagu

SEQ ID NO: 3707101 - RNA, 15 nt, Human
uaaaauguugaaaag

SEQ ID NO: 3707102 - RNA, 14 nt, Human
uaaaauguugaaua

SEQ ID NO: 3707103 - RNA, 12 nt, Human
uaaaauguuuuc

SEQ ID NO: 3707104 - RNA, 21 nt, Human
uaaaauguuuucagcuaggaa

SEQ ID NO: 3707105 - RNA, 23 nt, Human
uaaaauguuuucagcuaggaaca

SEQ ID NO: 3707106 - RNA, 14 nt, Human
uaaaauuaaagcua

SEQ ID NO: 3707107 - RNA, 10 nt, Human
uaaaauuaag

SEQ ID NO: 3707108 - RNA, 15 nt, Human
uaaaauuacaacuaa

SEQ ID NO: 3707109 - RNA, 11 nt, Human
uaaaauuagau

SEQ ID NO: 3707110 - RNA, 14 nt, Human
uaaaauuauacugu

SEQ ID NO: 3707111 - RNA, 15 nt, Human
uaaaauuauagcucu

SEQ ID NO: 3707112 - RNA, 20 nt, Human
uaaaauuauagcucuaaugu

SEQ ID NO: 3707113 - RNA, 21 nt, Human
uaaaauuauagcucuaauguu

SEQ ID NO: 3707114 - RNA, 21 nt, Human
uaaaauuaucaccuuugucag

SEQ ID NO: 3707115 - RNA, 15 nt, Human
uaaaauuaugagauu

SEQ ID NO: 3707116 - RNA, 22 nt, Human
uaaaauuaugagauugguuuuc

SEQ ID NO: 3707117 - RNA, 16 nt, Human
uaaaauuauggaaaca

SEQ ID NO: 3707118 - RNA, 14 nt, Human
uaaaauuauuccuu

SEQ ID NO: 3707119 - RNA, 15 nt, Human
uaaaauuauuucaug

SEQ ID NO: 3707120 - RNA, 12 nt, Human
uaaaauucuaaa

SEQ ID NO: 3707121 - RNA, 14 nt, Human
uaaaauucuaaaua

SEQ ID NO: 3707122 - RNA, 12 nt, Human
uaaaauugccau

SEQ ID NO: 3707123 - RNA, 14 nt, Human
uaaaauugccauau

SEQ ID NO: 3707124 - RNA, 14 nt, Human
uaaaauuguaaaau

SEQ ID NO: 3707125 - RNA, 22 nt, Human
uaaaauuguaaaauuguauaga

SEQ ID NO: 3707126 - RNA, 16 nt, Human
uaaaauugugaugugu

SEQ ID NO: 3707127 - RNA, 15 nt, Human
uaaaauuguuaucaa

SEQ ID NO: 3707128 - RNA, 17 nt, Human
uaaaauuuauauuguaa

SEQ ID NO: 3707129 - RNA, 23 nt, Human
uaaaauuuauugcuugauacuuu

SEQ ID NO: 3707130 - RNA, 21 nt, Human
uaaaauuuccccuaaucuuuu

SEQ ID NO: 3707131 - RNA, 18 nt, Human
uaaaauuucuuagaaaac

SEQ ID NO: 3707132 - RNA, 9 nt, Human
uaaaauuug

SEQ ID NO: 3707133 - RNA, 21 nt, Human
uaaaauuugaaacauugcuuu

SEQ ID NO: 3707134 - RNA, 14 nt, Human
uaaaauuuguugca

SEQ ID NO: 3707135 - RNA, 15 nt, Human
uaaaauuuguugcau

SEQ ID NO: 3707136 - RNA, 18 nt, Human
uaaaauuuuaagcuagga

SEQ ID NO: 3707137 - RNA, 19 nt, Human
uaaaauuuuaagcuaggaa

SEQ ID NO: 3707138 - RNA, 17 nt, Human
uaaaauuuuaggcaagu

SEQ ID NO: 3707139 - RNA, 17 nt, Human
uaaaauuuuaucucuua

SEQ ID NO: 3707140 - RNA, 19 nt, Human
uaaaauuuugccuaauaca

SEQ ID NO: 3707141 - RNA, 19 nt, Human
uaaaauuuuuaaucuuuaa

SEQ ID NO: 3707142 - RNA, 17 nt, Human
uaaaauuuuuuuagaaa

SEQ ID NO: 3707143 - RNA, 19 nt, Human
uaaaauuuuuuuagaaagc

SEQ ID NO: 3707144 - RNA, 22 nt, Human
uaaaauuuuuuuggucuuuuug

SEQ ID NO: 3707145 - RNA, 17 nt, Human
uaaaauuuuuuuucaug

SEQ ID NO: 3707146 - RNA, 20 nt, Human
uaaaauuuuuuuucauguuu

SEQ ID NO: 3707147 - RNA, 18 nt, Human
uaaacaaaauagaaaguu

SEQ ID NO: 3707148 - RNA, 15 nt, Human
uaaacaaacauugug

SEQ ID NO: 3707149 - RNA, 14 nt, Human
uaaacaaaccagaa

SEQ ID NO: 3707150 - RNA, 22 nt, Human
uaaacaaacuguguaacugccc

SEQ ID NO: 3707151 - RNA, 16 nt, Human
uaaacaaagauucaug

SEQ ID NO: 3707152 - RNA, 18 nt, Human
uaaacaaagauucaugau

SEQ ID NO: 3707153 - RNA, 14 nt, Human
uaaacaaaguuacu

SEQ ID NO: 3707154 - RNA, 15 nt, Human
uaaacaaaguuacua

SEQ ID NO: 3707155 - RNA, 18 nt, Human
uaaacaaaguuucagagu

SEQ ID NO: 3707156 - RNA, 13 nt, Human
uaaacaaaucuuu

SEQ ID NO: 3707157 - RNA, 17 nt, Human
uaaacaagaaaaauaaa

SEQ ID NO: 3707158 - RNA, 18 nt, Human
uaaacaagaaaaauaaag

SEQ ID NO: 3707159 - RNA, 20 nt, Human
uaaacaagaaaaauaaagaa

SEQ ID NO: 3707160 - RNA, 20 nt, Human
uaaacaagaaucagucuauc

SEQ ID NO: 3707161 - RNA, 22 nt, Human
uaaacaaguauuuguuaauuua

SEQ ID NO: 3707162 - RNA, 18 nt, Human
uaaacaauuuauuuuauu

SEQ ID NO: 3707163 - RNA, 22 nt, Human
uaaacacaagauugguguuuuu

SEQ ID NO: 3707164 - RNA, 12 nt, Human
uaaacacacaga

SEQ ID NO: 3707165 - RNA, 18 nt, Human
uaaacacacagauacaca

SEQ ID NO: 3707166 - RNA, 22 nt, Human
uaaacacacagauacacacaca

SEQ ID NO: 3707167 - RNA, 14 nt, Human
uaaacacagacagg

SEQ ID NO: 3707168 - RNA, 18 nt, Human
uaaacacagucaaaauaa

SEQ ID NO: 3707169 - RNA, 22 nt, Human
uaaacacccaugaaucaaagac

SEQ ID NO: 3707170 - RNA, 18 nt, Human
uaaacacccuucacauac

SEQ ID NO: 3707171 - RNA, 14 nt, Human
uaaacacucaccuu

SEQ ID NO: 3707172 - RNA, 12 nt, Human
uaaacacucagc

SEQ ID NO: 3707173 - RNA, 16 nt, Human
uaaacacucagcuguu

SEQ ID NO: 3707174 - RNA, 15 nt, Human
uaaacacucuugaaa

SEQ ID NO: 3707175 - RNA, 17 nt, Human
uaaacacucuugaaaaa

SEQ ID NO: 3707176 - RNA, 18 nt, Human
uaaacacucuugaaaaau

SEQ ID NO: 3707177 - RNA, 14 nt, Human
uaaacacugcgcuu

SEQ ID NO: 3707178 - RNA, 16 nt, Human
uaaacacuugcaaccu

SEQ ID NO: 3707179 - RNA, 12 nt, Human
uaaacagaaaug

SEQ ID NO: 3707180 - RNA, 14 nt, Human
uaaacagaaaugga

SEQ ID NO: 3707181 - RNA, 17 nt, Human
uaaacagaugaugagaa

SEQ ID NO: 3707182 - RNA, 18 nt, Human
uaaacagaugaugagaau

SEQ ID NO: 3707183 - RNA, 19 nt, Human
uaaacagaugaugagaauu

SEQ ID NO: 3707184 - RNA, 21 nt, Human
uaaacagauguccaucagaug

SEQ ID NO: 3707185 - RNA, 15 nt, Human
uaaacagauuuuuac

SEQ ID NO: 3707186 - RNA, 22 nt, Human
uaaacagcaguguuccccaucu

SEQ ID NO: 3707187 - RNA, 18 nt, Human
uaaacagcuucaugccuu

SEQ ID NO: 3707188 - RNA, 12 nt, Human
uaaacaggccca

SEQ ID NO: 3707189 - RNA, 19 nt, Human
uaaacagggcaucuccagg

SEQ ID NO: 3707190 - RNA, 18 nt, Human
uaaacagugccugcugaa

SEQ ID NO: 3707191 - RNA, 13 nt, Human
uaaacaguucuug

SEQ ID NO: 3707192 - RNA, 16 nt, Human
uaaacaguugcacagc

SEQ ID NO: 3707193 - RNA, 17 nt, Human
uaaacaguugcacagca

SEQ ID NO: 3707194 - RNA, 17 nt, Human
uaaacauaaauaaauau

SEQ ID NO: 3707195 - RNA, 23 nt, Human
uaaacauaaguguacgauucuua

SEQ ID NO: 3707196 - RNA, 20 nt, Human
uaaacauaauucuuguauau

SEQ ID NO: 3707197 - RNA, 19 nt, Human
uaaacauauccaaguuuga

SEQ ID NO: 3707198 - RNA, 15 nt, Human
uaaacaucacacaca

SEQ ID NO: 3707199 - RNA, 19 nt, Human
uaaacaugcuguacauacu

SEQ ID NO: 3707200 - RNA, 20 nt, Human
uaaacaugcuguacauacuu

SEQ ID NO: 3707201 - RNA, 21 nt, Human
uaaacauuaaaugucuuauau

SEQ ID NO: 3707202 - RNA, 22 nt, Human
uaaacauuaauagcagccuuuc

SEQ ID NO: 3707203 - RNA, 18 nt, Human
uaaacauuaguucuauuu

SEQ ID NO: 3707204 - RNA, 23 nt, Human
uaaacauuaguucuauuucuauc

SEQ ID NO: 3707205 - RNA, 19 nt, Human
uaaacauuauuaaguaacu

SEQ ID NO: 3707206 - RNA, 20 nt, Human
uaaacauugacgauuccuuc

SEQ ID NO: 3707207 - RNA, 16 nt, Human
uaaaccaaaaacugaa

SEQ ID NO: 3707208 - RNA, 21 nt, Human
uaaaccaaaggacauuaugug

SEQ ID NO: 3707209 - RNA, 15 nt, Human
uaaaccaaggacuga

SEQ ID NO: 3707210 - RNA, 21 nt, Human
uaaaccacaaggcuguugcau

SEQ ID NO: 3707211 - RNA, 22 nt, Human
uaaaccaccagugcccaaaguc

SEQ ID NO: 3707212 - RNA, 19 nt, Human
uaaaccaguuuagauuuca

SEQ ID NO: 3707213 - RNA, 22 nt, Human
uaaaccaucucccuggugcuua

SEQ ID NO: 3707214 - RNA, 14 nt, Human
uaaaccauugugca

SEQ ID NO: 3707215 - RNA, 19 nt, Human
uaaaccauuuuuguuacuc

SEQ ID NO: 3707216 - RNA, 19 nt, Human
uaaacccaguaguggugac

SEQ ID NO: 3707217 - RNA, 17 nt, Human
uaaaccgcuaaaagaaa

SEQ ID NO: 3707218 - RNA, 15 nt, Human
uaaaccucaguuauu

SEQ ID NO: 3707219 - RNA, 15 nt, Human
uaaaccuccgccaau

SEQ ID NO: 3707220 - RNA, 18 nt, Human
uaaaccucuaauuuauuu

SEQ ID NO: 3707221 - RNA, 20 nt, Human
uaaaccugucuccacugugc

SEQ ID NO: 3707222 - RNA, 14 nt, Human
uaaaccuuaauauu

SEQ ID NO: 3707223 - RNA, 22 nt, Human
uaaacgaaacaaagacaauuua

SEQ ID NO: 3707224 - RNA, 18 nt, Human
uaaacgauuuuuaaaaug

SEQ ID NO: 3707225 - RNA, 14 nt, Human
uaaacggauuauuu

SEQ ID NO: 3707226 - RNA, 21 nt, Human
uaaacggauuauuuuuucaga

SEQ ID NO: 3707227 - RNA, 17 nt, Human
uaaacguaagcacuguu

SEQ ID NO: 3707228 - RNA, 23 nt, Human
uaaacguggagaaucacaggcug

SEQ ID NO: 3707229 - RNA, 18 nt, Human
uaaacguguauguuuuuc

SEQ ID NO: 3707230 - RNA, 17 nt, Human
uaaacuaaagaaaaauu

SEQ ID NO: 3707231 - RNA, 14 nt, Human
uaaacuaaaugugc

SEQ ID NO: 3707232 - RNA, 14 nt, Human
uaaacuacucuuug

SEQ ID NO: 3707233 - RNA, 17 nt, Human
uaaacuagaugaccuca

SEQ ID NO: 3707234 - RNA, 14 nt, Human
uaaacuaggaaaau

SEQ ID NO: 3707235 - RNA, 17 nt, Human
uguuagauguuuguuga

SEQ ID NO: 3707236 - RNA, 20 nt, Human
uguuagauuaagaaauagac

SEQ ID NO: 3707237 - RNA, 12 nt, Human
uguuagcacugu

SEQ ID NO: 3707238 - RNA, 21 nt, Human
uguuagcccaagguuaaaaag

SEQ ID NO: 3707239 - RNA, 18 nt, Human
uguuagcuccaaagcauu

SEQ ID NO: 3707240 - RNA, 16 nt, Human
uguuaggaaaauuuca

SEQ ID NO: 3707241 - RNA, 13 nt, Human
uguuaguaacaug

SEQ ID NO: 3707242 - RNA, 15 nt, Human
uguuaguaauaccuc

SEQ ID NO: 3707243 - RNA, 16 nt, Human
uguuaguaauaccucu

SEQ ID NO: 3707244 - RNA, 22 nt, Human
uguuaguacuauaucuguuuua

SEQ ID NO: 3707245 - RNA, 20 nt, Human
uguuaguagaaauuuuacaa

SEQ ID NO: 3707246 - RNA, 15 nt, Human
uguuagucauuugcu

SEQ ID NO: 3707247 - RNA, 14 nt, Human
uguuaguggcaccg

SEQ ID NO: 3707248 - RNA, 22 nt, Human
uguuaguguuuuaagaaaugua

SEQ ID NO: 3707249 - RNA, 23 nt, Human
uguuaguuaccuuauaguuacug

SEQ ID NO: 3707250 - RNA, 12 nt, Human
uguuaguuccca

SEQ ID NO: 3707251 - RNA, 22 nt, Human
uguuaguuccuguaugaaagau

SEQ ID NO: 3707252 - RNA, 14 nt, Human
uguuauaacucugc

SEQ ID NO: 3707253 - RNA, 18 nt, Human
uguuauaacucugcacua

SEQ ID NO: 3707254 - RNA, 23 nt, Human
uguuauaacucugcacuacuccu

SEQ ID NO: 3707255 - RNA, 15 nt, Human
uguuauauaauuuag

SEQ ID NO: 3707256 - RNA, 15 nt, Human
uguuauauauaaaua

SEQ ID NO: 3707257 - RNA, 17 nt, Human
uguuauauauaaauaua

SEQ ID NO: 3707258 - RNA, 18 nt, Human
uguuauauauaaauauau

SEQ ID NO: 3707259 - RNA, 19 nt, Human
uguuauauccccugcuacc

SEQ ID NO: 3707260 - RNA, 13 nt, Human
uguuauaugaaca

SEQ ID NO: 3707261 - RNA, 19 nt, Human
uguuauauguuguucuuac

SEQ ID NO: 3707262 - RNA, 16 nt, Human
uguuauauuaagcaga

SEQ ID NO: 3707263 - RNA, 20 nt, Human
uguuaucaaaacuuucuuuu

SEQ ID NO: 3707264 - RNA, 19 nt, Human
uguuaucaccgugggcucc

SEQ ID NO: 3707265 - RNA, 18 nt, Human
uguuaucauuuuuuccug

SEQ ID NO: 3707266 - RNA, 13 nt, Human
uguuauccuauuu

SEQ ID NO: 3707267 - RNA, 14 nt, Human
uguuaucuguuuga

SEQ ID NO: 3707268 - RNA, 18 nt, Human
uguuaucuguuugagaaa

SEQ ID NO: 3707269 - RNA, 19 nt, Human
uguuaucuuauacuguaca

SEQ ID NO: 3707270 - RNA, 21 nt, Human
uguuaucuuauacuguacaau

SEQ ID NO: 3707271 - RNA, 12 nt, Human
uguuaugauaaa

SEQ ID NO: 3707272 - RNA, 14 nt, Human
uguuaugaugugcu

SEQ ID NO: 3707273 - RNA, 17 nt, Human
uguuaugaugugcuuaa

SEQ ID NO: 3707274 - RNA, 19 nt, Human
uguuaugaugugcuuaaca

SEQ ID NO: 3707275 - RNA, 14 nt, Human
uguuauggaaacug

SEQ ID NO: 3707276 - RNA, 18 nt, Human
uguuauggcuuaaugaca

SEQ ID NO: 3707277 - RNA, 15 nt, Human
uguuaugguagaaaa

SEQ ID NO: 3707278 - RNA, 16 nt, Human
uguuaugguagaaaaa

SEQ ID NO: 3707279 - RNA, 16 nt, Human
uguuauguacuguacu

SEQ ID NO: 3707280 - RNA, 13 nt, Human
uguuauguauuuc

SEQ ID NO: 3707281 - RNA, 21 nt, Human
uguuaugucuguuuaagaaaa

SEQ ID NO: 3707282 - RNA, 20 nt, Human
uguuauuaaacguaugcaug

SEQ ID NO: 3707283 - RNA, 21 nt, Human
uguuauuaaacguaugcaugu

SEQ ID NO: 3707284 - RNA, 14 nt, Human
uguuauugaaaaaa

SEQ ID NO: 3707285 - RNA, 20 nt, Human
uguuauugagagagaugugu

SEQ ID NO: 3707286 - RNA, 12 nt, Human
uguuauugugaa

SEQ ID NO: 3707287 - RNA, 19 nt, Human
uguuauuuaacccauuugu

SEQ ID NO: 3707288 - RNA, 18 nt, Human
uguuauuuauugaaauga

SEQ ID NO: 3707289 - RNA, 14 nt, Human
uguuauuucugcaa

SEQ ID NO: 3707290 - RNA, 15 nt, Human
uguuauuucugcaaa

SEQ ID NO: 3707291 - RNA, 16 nt, Human
uguuauuuguacaguu

SEQ ID NO: 3707292 - RNA, 19 nt, Human
uguuauuuuaaucucagaa

SEQ ID NO: 3707293 - RNA, 18 nt, Human
uguuauuuucaaguagcu

SEQ ID NO: 3707294 - RNA, 15 nt, Human
uguuauuuucagcau

SEQ ID NO: 3707295 - RNA, 19 nt, Human
uguuauuuucuuugaaauu

SEQ ID NO: 3707296 - RNA, 17 nt, Human
uguuauuuuucaaggaa

SEQ ID NO: 3707297 - RNA, 19 nt, Human
uguuauuuuucaaggaagg

SEQ ID NO: 3707298 - RNA, 21 nt, Human
uguuauuuuuguuucuuccaa

SEQ ID NO: 3707299 - RNA, 22 nt, Human
uguucaaacaauaucauaucau

SEQ ID NO: 3707300 - RNA, 22 nt, Human
uguucaaagccagcguccuccu

SEQ ID NO: 3707301 - RNA, 15 nt, Human
uguucaauauuuucu

SEQ ID NO: 3707302 - RNA, 16 nt, Human
uguucaauguuuaaug

SEQ ID NO: 3707303 - RNA, 16 nt, Human
uguucacaauauauuu

SEQ ID NO: 3707304 - RNA, 16 nt, Human
uguucacacucucaca

SEQ ID NO: 3707305 - RNA, 16 nt, Human
uguucacagccagacu

SEQ ID NO: 3707306 - RNA, 16 nt, Human
uguucaccaucggcag

SEQ ID NO: 3707307 - RNA, 18 nt, Human
uguucacuggacacuuca

SEQ ID NO: 3707308 - RNA, 13 nt, Human
uguucacuguccc

SEQ ID NO: 3707309 - RNA, 16 nt, Human
uguucacuuuuccucc

SEQ ID NO: 3707310 - RNA, 15 nt, Human
uguucagaagaaauu

SEQ ID NO: 3707311 - RNA, 18 nt, Human
uguucagaagguugcucu

SEQ ID NO: 3707312 - RNA, 18 nt, Human
uguucagcacugucccuu

SEQ ID NO: 3707313 - RNA, 14 nt, Human
uguucagcuccagc

SEQ ID NO: 3707314 - RNA, 20 nt, Human
uguucagcuccagcucacca

SEQ ID NO: 3707315 - RNA, 11 nt, Human
uguucagcugg

SEQ ID NO: 3707316 - RNA, 21 nt, Human
uguucagcuguccucccucca

SEQ ID NO: 3707317 - RNA, 17 nt, Human
uguucagugucccgggc

SEQ ID NO: 3707318 - RNA, 18 nt, Human
uguucaguuacagaaagu

SEQ ID NO: 3707319 - RNA, 14 nt, Human
uguucauacauauu

SEQ ID NO: 3707320 - RNA, 14 nt, Human
uguucauagcccag

SEQ ID NO: 3707321 - RNA, 15 nt, Human
uguucauagcccagu

SEQ ID NO: 3707322 - RNA, 19 nt, Human
uguucauagcccaguagac

SEQ ID NO: 3707323 - RNA, 22 nt, Human
uguucaucaacagugagagacu

SEQ ID NO: 3707324 - RNA, 15 nt, Human
uguucaucauccaga

SEQ ID NO: 3707325 - RNA, 16 nt, Human
uguucaucauccagau

SEQ ID NO: 3707326 - RNA, 14 nt, Human
uguucaucuguaac

SEQ ID NO: 3707327 - RNA, 13 nt, Human
uguucauggcaga

SEQ ID NO: 3707328 - RNA, 19 nt, Human
uguucauuguaauguuacu

SEQ ID NO: 3707329 - RNA, 20 nt, Human
uguucauuguaauguuacug

SEQ ID NO: 3707330 - RNA, 14 nt, Human
uguucauuuccuca

SEQ ID NO: 3707331 - RNA, 18 nt, Human
uguucauuuugagcugaa

SEQ ID NO: 3707332 - RNA, 10 nt, Human
uguuccaaau

SEQ ID NO: 3707333 - RNA, 17 nt, Human
uguuccaaaugaauguu

SEQ ID NO: 3707334 - RNA, 14 nt, Human
uguuccaacugccc

SEQ ID NO: 3707335 - RNA, 18 nt, Human
uguuccaagacauuguca

SEQ ID NO: 3707336 - RNA, 21 nt, Human
uguuccaagacauugucaaua

SEQ ID NO: 3707337 - RNA, 18 nt, Human
uguuccaaugucaaugug

SEQ ID NO: 3707338 - RNA, 19 nt, Human
uguuccacaaguuaaauaa

SEQ ID NO: 3707339 - RNA, 20 nt, Human
uguuccacaaguuaaauaaa

SEQ ID NO: 3707340 - RNA, 22 nt, Human
uguucccaagagcaucaugccu

SEQ ID NO: 3707341 - RNA, 19 nt, Human
uguucccauccucuucuuu

SEQ ID NO: 3707342 - RNA, 17 nt, Human
uguuccccacuggagca

SEQ ID NO: 3707343 - RNA, 16 nt, Human
uguucccccgccgcuu

SEQ ID NO: 3707344 - RNA, 21 nt, Human
uguucccccgccgcuuuucuc

SEQ ID NO: 3707345 - RNA, 12 nt, Human
uguuccccuccu

SEQ ID NO: 3707346 - RNA, 23 nt, Human
uguuccccuccuccacucucccc

SEQ ID NO: 3707347 - RNA, 14 nt, Human
uguuccccucuccc

SEQ ID NO: 3707348 - RNA, 17 nt, Human
uguuccccucucccuuc

SEQ ID NO: 3707349 - RNA, 21 nt, Human
uguuccccucucccuucccuc

SEQ ID NO: 3707350 - RNA, 15 nt, Human
uguuccccucuuguc

SEQ ID NO: 3707351 - RNA, 18 nt, Human
uguuccccucuugucucc

SEQ ID NO: 3707352 - RNA, 14 nt, Human
uguuccccuuccac

SEQ ID NO: 3707353 - RNA, 21 nt, Human
uguuccccuuccacugagggc

SEQ ID NO: 3707354 - RNA, 22 nt, Human
uguuccccuuugcuucauucaa

SEQ ID NO: 3707355 - RNA, 16 nt, Human
uguucccuauccaauc

SEQ ID NO: 3707356 - RNA, 22 nt, Human
uguucccuauuuuucucuccug

SEQ ID NO: 3707357 - RNA, 16 nt, Human
uguucccucugcuccu

SEQ ID NO: 3707358 - RNA, 21 nt, Human
uguuccuauauuccagguuua

SEQ ID NO: 3707359 - RNA, 12 nt, Human
uguuccugcugc

SEQ ID NO: 3707360 - RNA, 13 nt, Human
uguuccugcugcu

SEQ ID NO: 3707361 - RNA, 23 nt, Human
uguuccuggaggucagcauuuga

SEQ ID NO: 3707362 - RNA, 22 nt, Human
uguuccuuccagugucauuucu

SEQ ID NO: 3707363 - RNA, 15 nt, Human
uguucgcgugugugg

SEQ ID NO: 3707364 - RNA, 19 nt, Human
uguucgcuuggcuccaugc

SEQ ID NO: 3707365 - RNA, 19 nt, Human
uguucguucuuguucuguu

SEQ ID NO: 3707366 - RNA, 16 nt, Human
uguucuaaagcucuga

SEQ ID NO: 3707367 - RNA, 22 nt, Human
uguucuaaauaucccuuggaca

SEQ ID NO: 3707368 - RNA, 13 nt, Human
uguucuaagaugu

SEQ ID NO: 3707369 - RNA, 15 nt, Human
uguucuaaggcucug

SEQ ID NO: 3707370 - RNA, 23 nt, Human
uguucuaaggcucugagagucua

SEQ ID NO: 3707371 - RNA, 16 nt, Human
uguucuaaguuucuaa

SEQ ID NO: 3707372 - RNA, 17 nt, Human
uguucuaaguuucuaag

SEQ ID NO: 3707373 - RNA, 19 nt, Human
uguucuaaguuucuaagau

SEQ ID NO: 3707374 - RNA, 22 nt, Human
uguucuaaguuucuaagauucu

SEQ ID NO: 3707375 - RNA, 13 nt, Human
uguucuauccaaa

SEQ ID NO: 3707376 - RNA, 16 nt, Human
uguucuauucaucuca

SEQ ID NO: 3707377 - RNA, 21 nt, Human
uguucuauuucagugccaaua

SEQ ID NO: 3707378 - RNA, 17 nt, Human
uguucucacacuggucu

SEQ ID NO: 3707379 - RNA, 17 nt, Human
uguucucagcucccccu

SEQ ID NO: 3707380 - RNA, 20 nt, Human
uguucucagcucccccuguc

SEQ ID NO: 3707381 - RNA, 17 nt, Human
uguucucccuucggugg

SEQ ID NO: 3707382 - RNA, 11 nt, Human
uguucuccugc

SEQ ID NO: 3707383 - RNA, 22 nt, Human
uguucuccugcugcucccucag

SEQ ID NO: 3707384 - RNA, 15 nt, Human
uguucucuaucauuu

SEQ ID NO: 3707385 - RNA, 19 nt, Human
uggggucaggccgggcaga

SEQ ID NO: 3707386 - RNA, 14 nt, Human
uggggucccagcag

SEQ ID NO: 3707387 - RNA, 15 nt, Human
uggggucccagcagc

SEQ ID NO: 3707388 - RNA, 20 nt, Human
ugggguccuggagcagacca

SEQ ID NO: 3707389 - RNA, 15 nt, Human
ugggguccuggccau

SEQ ID NO: 3707390 - RNA, 16 nt, Human
ugggguccuggccauc

SEQ ID NO: 3707391 - RNA, 19 nt, Human
ugggguccuggccauccca

SEQ ID NO: 3707392 - RNA, 22 nt, Human
ugggguccuguggggcccccac

SEQ ID NO: 3707393 - RNA, 23 nt, Human
ugggguccuguggggcccccaca

SEQ ID NO: 3707394 - RNA, 23 nt, Human
uggggucucacaguguugcccag

SEQ ID NO: 3707395 - RNA, 13 nt, Human
uggggucucccuc

SEQ ID NO: 3707396 - RNA, 17 nt, Human
uggggucucucacagac

SEQ ID NO: 3707397 - RNA, 21 nt, Human
uggggucucucacagacagga

SEQ ID NO: 3707398 - RNA, 17 nt, Human
uggggucuggcagccuc

SEQ ID NO: 3707399 - RNA, 18 nt, Human
uggggucuggcagccucc

SEQ ID NO: 3707400 - RNA, 14 nt, Human
uggggugacaguca

SEQ ID NO: 3707401 - RNA, 23 nt, Human
uggggugacagucaucaucaggg

SEQ ID NO: 3707402 - RNA, 22 nt, Human
uggggugacccggcacccccug

SEQ ID NO: 3707403 - RNA, 23 nt, Human
uggggugacccggcacccccugc

SEQ ID NO: 3707404 - RNA, 14 nt, Human
uggggugaggacca

SEQ ID NO: 3707405 - RNA, 17 nt, Human
uggggugaggaccacuc

SEQ ID NO: 3707406 - RNA, 15 nt, Human
uggggugcagggaug

SEQ ID NO: 3707407 - RNA, 18 nt, Human
uggggugcagggaugugg

SEQ ID NO: 3707408 - RNA, 19 nt, Human
uggggugcagggauguggg

SEQ ID NO: 3707409 - RNA, 13 nt, Human
uggggugcuggga

SEQ ID NO: 3707410 - RNA, 12 nt, Human
ugggguggcugc

SEQ ID NO: 3707411 - RNA, 15 nt, Human
uggggugggagaggu

SEQ ID NO: 3707412 - RNA, 17 nt, Human
ugggguggggaccucag

SEQ ID NO: 3707413 - RNA, 19 nt, Human
ugggguggggggggugcug

SEQ ID NO: 3707414 - RNA, 14 nt, Human
uggggugguugagg

SEQ ID NO: 3707415 - RNA, 15 nt, Human
uggggugugggaggc

SEQ ID NO: 3707416 - RNA, 23 nt, Human
ugggguuaucugaagucagaucu

SEQ ID NO: 3707417 - RNA, 15 nt, Human
ugggguucagccccu

SEQ ID NO: 3707418 - RNA, 17 nt, Human
ugggguucagccccucc

SEQ ID NO: 3707419 - RNA, 14 nt, Human
ugggguucguggaa

SEQ ID NO: 3707420 - RNA, 18 nt, Human
ugggguuggcugggccca

SEQ ID NO: 3707421 - RNA, 19 nt, Human
ugggguugggauugggggc

SEQ ID NO: 3707422 - RNA, 14 nt, Human
ugggguuuccuggc

SEQ ID NO: 3707423 - RNA, 23 nt, Human
uggguaaaauacuuuuacucugc

SEQ ID NO: 3707424 - RNA, 14 nt, Human
uggguaaaauuaga

SEQ ID NO: 3707425 - RNA, 15 nt, Human
uggguaaaauuagau

SEQ ID NO: 3707426 - RNA, 18 nt, Human
uggguaaucgauggggga

SEQ ID NO: 3707427 - RNA, 16 nt, Human
uggguacuucuugaag

SEQ ID NO: 3707428 - RNA, 17 nt, Human
uggguagacacacauga

SEQ ID NO: 3707429 - RNA, 12 nt, Human
uggguauaaaag

SEQ ID NO: 3707430 - RNA, 15 nt, Human
uggguauaaaagaug

SEQ ID NO: 3707431 - RNA, 17 nt, Human
uggguauaaaagauggg

SEQ ID NO: 3707432 - RNA, 20 nt, Human
uggguauaguucaugucugc

SEQ ID NO: 3707433 - RNA, 20 nt, Human
uggguaucaaacagcucagg

SEQ ID NO: 3707434 - RNA, 18 nt, Human
uggguaucaagacauagc

SEQ ID NO: 3707435 - RNA, 19 nt, Human
uggguauccugcccagugu

SEQ ID NO: 3707436 - RNA, 20 nt, Human
uggguauccugcccaguguu

SEQ ID NO: 3707437 - RNA, 17 nt, Human
uggguauguguaggcag

SEQ ID NO: 3707438 - RNA, 19 nt, Human
ugggucagaacccugccau

SEQ ID NO: 3707439 - RNA, 13 nt, Human
ugggucaggcagg

SEQ ID NO: 3707440 - RNA, 14 nt, Human
ugggucaggccacc

SEQ ID NO: 3707441 - RNA, 22 nt, Human
uggguccaaauaaaaacuaaau

SEQ ID NO: 3707442 - RNA, 14 nt, Human
uggguccaggagga

SEQ ID NO: 3707443 - RNA, 21 nt, Human
uggguccaggccuacuccugu

SEQ ID NO: 3707444 - RNA, 15 nt, Human
uggguccaggggaug

SEQ ID NO: 3707445 - RNA, 20 nt, Human
uggguccaggggaugggagg

SEQ ID NO: 3707446 - RNA, 18 nt, Human
uggguccaggggccccuc

SEQ ID NO: 3707447 - RNA, 14 nt, Human
uggguccaugggca

SEQ ID NO: 3707448 - RNA, 19 nt, Human
ugggucccacuuccccucc

SEQ ID NO: 3707449 - RNA, 18 nt, Human
ugggucccccucagcaag

SEQ ID NO: 3707450 - RNA, 14 nt, Human
uggguccugaagaa

SEQ ID NO: 3707451 - RNA, 15 nt, Human
uggguccuuccugaa

SEQ ID NO: 3707452 - RNA, 18 nt, Human
ugggucgcccuggacugu

SEQ ID NO: 3707453 - RNA, 22 nt, Human
ugggucuaggacacaguuccug

SEQ ID NO: 3707454 - RNA, 15 nt, Human
ugggucuauuccagc

SEQ ID NO: 3707455 - RNA, 18 nt, Human
ugggucuauuccagcuca

SEQ ID NO: 3707456 - RNA, 19 nt, Human
ugggucuauuccagcucau

SEQ ID NO: 3707457 - RNA, 20 nt, Human
ugggucuauuccagcucauu

SEQ ID NO: 3707458 - RNA, 23 nt, Human
ugggucucaccggcucucaccug

SEQ ID NO: 3707459 - RNA, 15 nt, Human
ugggucugggaguca

SEQ ID NO: 3707460 - RNA, 14 nt, Human
ugggucugugucuc

SEQ ID NO: 3707461 - RNA, 19 nt, Human
ugggucuguuuuccuuucu

SEQ ID NO: 3707462 - RNA, 22 nt, Human
ugggucuucagggggccaggug

SEQ ID NO: 3707463 - RNA, 20 nt, Human
ugggugaaagaaaucauguu

SEQ ID NO: 3707464 - RNA, 19 nt, Human
ugggugaaggcuggcauga

SEQ ID NO: 3707465 - RNA, 23 nt, Human
ugggugaccaguugcacuuggcc

SEQ ID NO: 3707466 - RNA, 16 nt, Human
ugggugagguaauaaa

SEQ ID NO: 3707467 - RNA, 18 nt, Human
ugggugcccaagcucaga

SEQ ID NO: 3707468 - RNA, 16 nt, Human
ugggugcccacagccc

SEQ ID NO: 3707469 - RNA, 19 nt, Human
ugggugcgaccccaucugc

SEQ ID NO: 3707470 - RNA, 21 nt, Human
ugggugcgaccccaucugccc

SEQ ID NO: 3707471 - RNA, 23 nt, Human
ugggugcgaccccaucugcccag

SEQ ID NO: 3707472 - RNA, 22 nt, Human
ugggugcucagaauaaggcagg

SEQ ID NO: 3707473 - RNA, 18 nt, Human
ugggugcugauccuugca

SEQ ID NO: 3707474 - RNA, 21 nt, Human
ugggugcugcuaauucuuugc

SEQ ID NO: 3707475 - RNA, 14 nt, Human
uggguggagaagcc

SEQ ID NO: 3707476 - RNA, 16 nt, Human
uggguggagaagccau

SEQ ID NO: 3707477 - RNA, 22 nt, Human
uggguggagaagccauugucuu

SEQ ID NO: 3707478 - RNA, 15 nt, Human
ugggugggcucugug

SEQ ID NO: 3707479 - RNA, 16 nt, Human
ugggugggcucugugc

SEQ ID NO: 3707480 - RNA, 13 nt, Human
uggguggggcugc

SEQ ID NO: 3707481 - RNA, 21 nt, Human
uggguggggcugcuccuccag

SEQ ID NO: 3707482 - RNA, 16 nt, Human
uggguggggggcuuca

SEQ ID NO: 3707483 - RNA, 15 nt, Human
ugggugggugguggg

SEQ ID NO: 3707484 - RNA, 14 nt, Human
ugggugguacccuc

SEQ ID NO: 3707485 - RNA, 15 nt, Human
uggguguaaacacau

SEQ ID NO: 3707486 - RNA, 22 nt, Human
uggguguaacaggucuccucuu

SEQ ID NO: 3707487 - RNA, 12 nt, Human
uggguguccugc

SEQ ID NO: 3707488 - RNA, 17 nt, Human
uggguguccugccuguc

SEQ ID NO: 3707489 - RNA, 19 nt, Human
uggguguccugccugucug

SEQ ID NO: 3707490 - RNA, 14 nt, Human
uggguguggcgcag

SEQ ID NO: 3707491 - RNA, 18 nt, Human
uggguguguguagccaag

SEQ ID NO: 3707492 - RNA, 14 nt, Human
uggguguuaauuuu

SEQ ID NO: 3707493 - RNA, 15 nt, Human
uggguguuccuggca

SEQ ID NO: 3707494 - RNA, 16 nt, Human
uggguuagacugccag

SEQ ID NO: 3707495 - RNA, 20 nt, Human
uggguuagacugccagcucu

SEQ ID NO: 3707496 - RNA, 16 nt, Human
uggguuagggaaaaca

SEQ ID NO: 3707497 - RNA, 14 nt, Human
uggguuaguggaug

SEQ ID NO: 3707498 - RNA, 16 nt, Human
uggguuauucuggagu

SEQ ID NO: 3707499 - RNA, 22 nt, Human
uggguucagaaaugcugccugc

SEQ ID NO: 3707500 - RNA, 17 nt, Human
uggguucaugaugcagu

SEQ ID NO: 3707501 - RNA, 11 nt, Human
uggguucauua

SEQ ID NO: 3707502 - RNA, 18 nt, Human
uggguucauuauuggaau

SEQ ID NO: 3707503 - RNA, 20 nt, Human
uggguucauuauuggaauua

SEQ ID NO: 3707504 - RNA, 18 nt, Human
uggguuccaauccuggcu

SEQ ID NO: 3707505 - RNA, 14 nt, Human
uggguuccacagac

SEQ ID NO: 3707506 - RNA, 13 nt, Human
uggguuccucuuc

SEQ ID NO: 3707507 - RNA, 22 nt, Human
uggguucuacccaggugcuagg

SEQ ID NO: 3707508 - RNA, 16 nt, Human
uggguucuauguuuac

SEQ ID NO: 3707509 - RNA, 17 nt, Human
uggguucugauauugcc

SEQ ID NO: 3707510 - RNA, 14 nt, Human
uggguucugggugg

SEQ ID NO: 3707511 - RNA, 23 nt, Human
uggguucuuuggaaggagugaga

SEQ ID NO: 3707512 - RNA, 21 nt, Human
uggguugcagacaggaaucuu

SEQ ID NO: 3707513 - RNA, 15 nt, Human
uggguugcuaacuga

SEQ ID NO: 3707514 - RNA, 15 nt, Human
uggguuggcgcaccc

SEQ ID NO: 3707515 - RNA, 22 nt, Human
uggguuggcgcacccuccccuc

SEQ ID NO: 3707516 - RNA, 19 nt, Human
uggguuggugcacagugau

SEQ ID NO: 3707517 - RNA, 16 nt, Human
uggguuggugcuucua

SEQ ID NO: 3707518 - RNA, 13 nt, Human
uggguuuauuugg

SEQ ID NO: 3707519 - RNA, 22 nt, Human
uggguuucacaagugaaaaaca

SEQ ID NO: 3707520 - RNA, 16 nt, Human
uggguuucuagcccau

SEQ ID NO: 3707521 - RNA, 14 nt, Human
uggguuugagaaau

SEQ ID NO: 3707522 - RNA, 24 nt, Human
uggguuuucuucccaucacuggag

SEQ ID NO: 3707523 - RNA, 22 nt, Human
uggguuuuuguuaccuuuaugg

SEQ ID NO: 3707524 - RNA, 14 nt, Human
ugguaaaacacuug

SEQ ID NO: 3707525 - RNA, 14 nt, Human
ugguaaaauugcau

SEQ ID NO: 3707526 - RNA, 13 nt, Human
ugguaaacuauuu

SEQ ID NO: 3707527 - RNA, 22 nt, Human
ugguaaagauauuauucaccau

SEQ ID NO: 3707528 - RNA, 13 nt, Human
ugguaaaugccac

SEQ ID NO: 3707529 - RNA, 21 nt, Human
ugguaaauuaguauuuauuua

SEQ ID NO: 3707530 - RNA, 18 nt, Human
ugguaacaguucauguuu

SEQ ID NO: 3707531 - RNA, 10 nt, Human
ugguaacauu

SEQ ID NO: 3707532 - RNA, 16 nt, Human
ugguaacuuuugugaa

SEQ ID NO: 3707533 - RNA, 23 nt, Human
ugguaagaaaaagcaaaaggcau

SEQ ID NO: 3707534 - RNA, 14 nt, Human
ugguaagagaaaag

SEQ ID NO: 3707535 - RNA, 18 nt, Human
uaaacuaguuuuuccuau

SEQ ID NO: 3707536 - RNA, 14 nt, Human
uaaacuauaaaaca

SEQ ID NO: 3707537 - RNA, 13 nt, Human
uaaacuaucaguu

SEQ ID NO: 3707538 - RNA, 14 nt, Human
uaaacuaucuuuuu

SEQ ID NO: 3707539 - RNA, 14 nt, Human
uaaacucaaaauau

SEQ ID NO: 3707540 - RNA, 16 nt, Human
uaaacucaaaauauuu

SEQ ID NO: 3707541 - RNA, 23 nt, Human
uaaacucaaaauauuuguacaua

SEQ ID NO: 3707542 - RNA, 11 nt, Human
uaaacucaggg

SEQ ID NO: 3707543 - RNA, 12 nt, Human
uaaacucauuuc

SEQ ID NO: 3707544 - RNA, 15 nt, Human
uaaacuccuguccuu

SEQ ID NO: 3707545 - RNA, 16 nt, Human
uaaacuccuuccuggc

SEQ ID NO: 3707546 - RNA, 21 nt, Human
uaaacucucuuugggaauguu

SEQ ID NO: 3707547 - RNA, 14 nt, Human
uaaacucugaauaa

SEQ ID NO: 3707548 - RNA, 22 nt, Human
uaaacucugaauaagcacuuuu

SEQ ID NO: 3707549 - RNA, 18 nt, Human
uaaacucugaauuuaucu

SEQ ID NO: 3707550 - RNA, 20 nt, Human
uaaacucuucacaaaaucug

SEQ ID NO: 3707551 - RNA, 15 nt, Human
uaaacugacuuuauc

SEQ ID NO: 3707552 - RNA, 10 nt, Human
uaaacugcau

SEQ ID NO: 3707553 - RNA, 13 nt, Human
uaaacugccauau

SEQ ID NO: 3707554 - RNA, 15 nt, Human
uaaacugcccugucu

SEQ ID NO: 3707555 - RNA, 16 nt, Human
uaaacugcccugucua

SEQ ID NO: 3707556 - RNA, 12 nt, Human
uaaacuggagac

SEQ ID NO: 3707557 - RNA, 14 nt, Human
uaaacuggagacug

SEQ ID NO: 3707558 - RNA, 20 nt, Human
uaaacuguacagugucuuuu

SEQ ID NO: 3707559 - RNA, 20 nt, Human
uaaacuguacuagucugugu

SEQ ID NO: 3707560 - RNA, 17 nt, Human
uaaacugucgugucaua

SEQ ID NO: 3707561 - RNA, 12 nt, Human
uaaacugugcac

SEQ ID NO: 3707562 - RNA, 16 nt, Human
uaaacuguuagcacug

SEQ ID NO: 3707563 - RNA, 23 nt, Human
uaaacuguuagcacuguugaugu

SEQ ID NO: 3707564 - RNA, 18 nt, Human
uaaacuguuucagauuuu

SEQ ID NO: 3707565 - RNA, 22 nt, Human
uaaacuuagugcggacaaguuu

SEQ ID NO: 3707566 - RNA, 16 nt, Human
uaaacuuauaaaucau

SEQ ID NO: 3707567 - RNA, 12 nt, Human
uaaacuuaugaa

SEQ ID NO: 3707568 - RNA, 18 nt, Human
uaaacuuaugaauguuuc

SEQ ID NO: 3707569 - RNA, 19 nt, Human
uaaacuuaugaauguuucc

SEQ ID NO: 3707570 - RNA, 18 nt, Human
uaaacuucauauguaauc

SEQ ID NO: 3707571 - RNA, 17 nt, Human
uaaacuuccaaagaaag

SEQ ID NO: 3707572 - RNA, 21 nt, Human
uaaacuuccaaagaaaguucu

SEQ ID NO: 3707573 - RNA, 21 nt, Human
uaaacuucucugaagggaggu

SEQ ID NO: 3707574 - RNA, 22 nt, Human
uaaacuugguuuuuaaaaaacu

SEQ ID NO: 3707575 - RNA, 13 nt, Human
uaaacuugugaau

SEQ ID NO: 3707576 - RNA, 20 nt, Human
uaaacuuguuugcugugaac

SEQ ID NO: 3707577 - RNA, 20 nt, Human
uaaacuuuacccaaaaacua

SEQ ID NO: 3707578 - RNA, 18 nt, Human
uaaacuuucuuaauauuu

SEQ ID NO: 3707579 - RNA, 13 nt, Human
uaaacuuugaaau

SEQ ID NO: 3707580 - RNA, 14 nt, Human
uaaacuuugaaaua

SEQ ID NO: 3707581 - RNA, 15 nt, Human
uaaacuuugaaauau

SEQ ID NO: 3707582 - RNA, 16 nt, Human
uaaacuuugaaauaua

SEQ ID NO: 3707583 - RNA, 14 nt, Human
uaaacuuuuaccac

SEQ ID NO: 3707584 - RNA, 17 nt, Human
uaaacuuuuuguucugg

SEQ ID NO: 3707585 - RNA, 16 nt, Human
uaaacuuuuuuucaau

SEQ ID NO: 3707586 - RNA, 17 nt, Human
uaaacuuuuuuucaaug

SEQ ID NO: 3707587 - RNA, 18 nt, Human
uaaacuuuuuuucaaugu

SEQ ID NO: 3707588 - RNA, 19 nt, Human
uaaacuuuuuuucaaugug

SEQ ID NO: 3707589 - RNA, 16 nt, Human
uaaacuuuuuuucugu

SEQ ID NO: 3707590 - RNA, 20 nt, Human
uaaacuuuuuuucuguacca

SEQ ID NO: 3707591 - RNA, 23 nt, Human
uaaagaaaaaaauguauuuuaug

SEQ ID NO: 3707592 - RNA, 23 nt, Human
uaaagaaaaaaauugaaauguaa

SEQ ID NO: 3707593 - RNA, 20 nt, Human
uaaagaaaaauaucuuggcc

SEQ ID NO: 3707594 - RNA, 22 nt, Human
uaaagaaaaauauuuaauguug

SEQ ID NO: 3707595 - RNA, 10 nt, Human
uaaagaaaag

SEQ ID NO: 3707596 - RNA, 16 nt, Human
uaaagaaaaguuuugu

SEQ ID NO: 3707597 - RNA, 22 nt, Human
uaaagaaaaguuuuguaaauuu

SEQ ID NO: 3707598 - RNA, 20 nt, Human
uaaagaaacagcuuucaagu

SEQ ID NO: 3707599 - RNA, 17 nt, Human
uaaagaaagagagaaaa

SEQ ID NO: 3707600 - RNA, 16 nt, Human
uaaagaaaggaaaaga

SEQ ID NO: 3707601 - RNA, 17 nt, Human
uaaagaaaggaaaagaa

SEQ ID NO: 3707602 - RNA, 21 nt, Human
uaaagaaagucgaauuaauag

SEQ ID NO: 3707603 - RNA, 13 nt, Human
uaaagaaagugua

SEQ ID NO: 3707604 - RNA, 17 nt, Human
uaaagaaaguguauuug

SEQ ID NO: 3707605 - RNA, 14 nt, Human
uaaagaaauaauuu

SEQ ID NO: 3707606 - RNA, 17 nt, Human
uaaagaaauagaacaag

SEQ ID NO: 3707607 - RNA, 15 nt, Human
uaaagaaaugucuua

SEQ ID NO: 3707608 - RNA, 17 nt, Human
uaaagaaauugcaauaa

SEQ ID NO: 3707609 - RNA, 18 nt, Human
uaaagaaauuuacuauau

SEQ ID NO: 3707610 - RNA, 15 nt, Human
uaaagaacauaaaua

SEQ ID NO: 3707611 - RNA, 23 nt, Human
uaaagaacugcacaugaagaaau

SEQ ID NO: 3707612 - RNA, 13 nt, Human
uaaagaagaaaaa

SEQ ID NO: 3707613 - RNA, 23 nt, Human
uaaagaagaaaaaaaaaaauuca

SEQ ID NO: 3707614 - RNA, 11 nt, Human
uaaagaagacc

SEQ ID NO: 3707615 - RNA, 16 nt, Human
uaaagaagaccugaga

SEQ ID NO: 3707616 - RNA, 21 nt, Human
uaaagaagcaauaaagaagag

SEQ ID NO: 3707617 - RNA, 14 nt, Human
uaaagaaguauuuu

SEQ ID NO: 3707618 - RNA, 14 nt, Human
uaaagaauacuuga

SEQ ID NO: 3707619 - RNA, 15 nt, Human
uaaagaauacuugaa

SEQ ID NO: 3707620 - RNA, 17 nt, Human
uaaagaauacuugaacu

SEQ ID NO: 3707621 - RNA, 20 nt, Human
uaaagaauacuugaacuugu

SEQ ID NO: 3707622 - RNA, 19 nt, Human
uaaagaauaggacuuguuu

SEQ ID NO: 3707623 - RNA, 17 nt, Human
uaaagaauaugaaacau

SEQ ID NO: 3707624 - RNA, 16 nt, Human
uaaagaauaugacuuu

SEQ ID NO: 3707625 - RNA, 19 nt, Human
uaaagaauaugacuuuuua

SEQ ID NO: 3707626 - RNA, 14 nt, Human
uaaagaauuuguca

SEQ ID NO: 3707627 - RNA, 11 nt, Human
uaaagacaaag

SEQ ID NO: 3707628 - RNA, 22 nt, Human
uaaagacaaagacaaauucugu

SEQ ID NO: 3707629 - RNA, 20 nt, Human
uaaagacaaccauauuuagc

SEQ ID NO: 3707630 - RNA, 9 nt, Human
uaaagacag

SEQ ID NO: 3707631 - RNA, 10 nt, Human
uaaagacaga

SEQ ID NO: 3707632 - RNA, 13 nt, Human
uaaagacaugaag

SEQ ID NO: 3707633 - RNA, 16 nt, Human
uaaagacaugaagcca

SEQ ID NO: 3707634 - RNA, 14 nt, Human
uaaagaccaaacuu

SEQ ID NO: 3707635 - RNA, 16 nt, Human
uaaagaccagaaauuc

SEQ ID NO: 3707636 - RNA, 21 nt, Human
uaaagacccagggggagaaug

SEQ ID NO: 3707637 - RNA, 23 nt, Human
uaaagacccuccuauucuauaaa

SEQ ID NO: 3707638 - RNA, 21 nt, Human
uaaagacguuuuauaagcauc

SEQ ID NO: 3707639 - RNA, 14 nt, Human
uaaagacuggcuuu

SEQ ID NO: 3707640 - RNA, 15 nt, Human
uaaagacuggcuuuu

SEQ ID NO: 3707641 - RNA, 19 nt, Human
uaaagacugguuuucugcc

SEQ ID NO: 3707642 - RNA, 22 nt, Human
uaaagacuuguauagcaugaaa

SEQ ID NO: 3707643 - RNA, 15 nt, Human
uaaagagaaaauuga

SEQ ID NO: 3707644 - RNA, 16 nt, Human
uaaagagaaaauugaa

SEQ ID NO: 3707645 - RNA, 20 nt, Human
uaaagagaaaauugaauuua

SEQ ID NO: 3707646 - RNA, 20 nt, Human
uaaagagaaacuuugugcua

SEQ ID NO: 3707647 - RNA, 12 nt, Human
uaaagagaagac

SEQ ID NO: 3707648 - RNA, 19 nt, Human
uaaagagaccuaccucagg

SEQ ID NO: 3707649 - RNA, 20 nt, Human
uaaagagaccuaccucaggu

SEQ ID NO: 3707650 - RNA, 17 nt, Human
uaaagagcccuugccuc

SEQ ID NO: 3707651 - RNA, 14 nt, Human
uaaagauaauugcu

SEQ ID NO: 3707652 - RNA, 17 nt, Human
uaaagauauggagaauu

SEQ ID NO: 3707653 - RNA, 20 nt, Human
uaaagauauggagaauugcu

SEQ ID NO: 3707654 - RNA, 14 nt, Human
uaaagauauuauuc

SEQ ID NO: 3707655 - RNA, 21 nt, Human
uaaagauauuuuuaucuuuau

SEQ ID NO: 3707656 - RNA, 22 nt, Human
uaaagauauuuuuaucuuuaua

SEQ ID NO: 3707657 - RNA, 18 nt, Human
uaaagauggaguuucuaa

SEQ ID NO: 3707658 - RNA, 22 nt, Human
uaaagauggaguuucuaagguc

SEQ ID NO: 3707659 - RNA, 12 nt, Human
uaaagauuucug

SEQ ID NO: 3707660 - RNA, 14 nt, Human
uaaagauuucuuga

SEQ ID NO: 3707661 - RNA, 15 nt, Human
uaaagauuuuuguuu

SEQ ID NO: 3707662 - RNA, 16 nt, Human
uaaagcaacugucuau

SEQ ID NO: 3707663 - RNA, 21 nt, Human
uaaagcaacugucuauuucug

SEQ ID NO: 3707664 - RNA, 23 nt, Human
uaaagcaacugucuauuucugcu

SEQ ID NO: 3707665 - RNA, 16 nt, Human
uaaagcaauaaaauuu

SEQ ID NO: 3707666 - RNA, 14 nt, Human
uaaagcaauagaaa

SEQ ID NO: 3707667 - RNA, 17 nt, Human
uaaagcaauaugcauuu

SEQ ID NO: 3707668 - RNA, 11 nt, Human
uaaagcaauuu

SEQ ID NO: 3707669 - RNA, 15 nt, Human
uaaagcaauuuuccu

SEQ ID NO: 3707670 - RNA, 22 nt, Human
uaaagcaauuuuccuugaagcc

SEQ ID NO: 3707671 - RNA, 17 nt, Human
uaaagcagcguuucuau

SEQ ID NO: 3707672 - RNA, 19 nt, Human
uaaagcaggccuuuugaua

SEQ ID NO: 3707673 - RNA, 19 nt, Human
uaaagcaguggacaccagg

SEQ ID NO: 3707674 - RNA, 17 nt, Human
uaaagcauaaguauaca

SEQ ID NO: 3707675 - RNA, 23 nt, Human
uaaagcauauccauucagaauga

SEQ ID NO: 3707676 - RNA, 14 nt, Human
uaaagcaucuaaac

SEQ ID NO: 3707677 - RNA, 16 nt, Human
uaaagcaucuaaacuu

SEQ ID NO: 3707678 - RNA, 14 nt, Human
uaaagcaugaaaug

SEQ ID NO: 3707679 - RNA, 15 nt, Human
uaaagcauugcuguu

SEQ ID NO: 3707680 - RNA, 21 nt, Human
uaaagcauugcuguuaugucu

SEQ ID NO: 3707681 - RNA, 21 nt, Human
uaaagcauugcuuuuauuuug

SEQ ID NO: 3707682 - RNA, 13 nt, Human
uaaagcauuuaga

SEQ ID NO: 3707683 - RNA, 19 nt, Human
uaaagcauuuagaaaacuu

SEQ ID NO: 3707684 - RNA, 13 nt, Human
uaaagccauguuu

SEQ ID NO: 3707685 - RNA, 20 nt, Human
uaaagccauguuuauuacag

SEQ ID NO: 3707686 - RNA, 15 nt, Human
uguucucucccaggg

SEQ ID NO: 3707687 - RNA, 16 nt, Human
uguucucugaggacac

SEQ ID NO: 3707688 - RNA, 12 nt, Human
uguucucugccc

SEQ ID NO: 3707689 - RNA, 15 nt, Human
uguucucugcccucc

SEQ ID NO: 3707690 - RNA, 16 nt, Human
uguucucugcccucca

SEQ ID NO: 3707691 - RNA, 19 nt, Human
uguucucugcccuccaaga

SEQ ID NO: 3707692 - RNA, 15 nt, Human
uguucucugggagaa

SEQ ID NO: 3707693 - RNA, 23 nt, Human
uguucucuugggaacugaacuca

SEQ ID NO: 3707694 - RNA, 13 nt, Human
uguucugacauua

SEQ ID NO: 3707695 - RNA, 22 nt, Human
uguucugacauuaacaguuuuc

SEQ ID NO: 3707696 - RNA, 22 nt, Human
uguucugauuagaaaugaccaa

SEQ ID NO: 3707697 - RNA, 23 nt, Human
uguucugcaaaaauauuuauaaa

SEQ ID NO: 3707698 - RNA, 17 nt, Human
uguucugcacacagcac

SEQ ID NO: 3707699 - RNA, 15 nt, Human
uguucuggcccucac

SEQ ID NO: 3707700 - RNA, 13 nt, Human
uguucuggcucuu

SEQ ID NO: 3707701 - RNA, 20 nt, Human
uguucuggcucuuccaggcu

SEQ ID NO: 3707702 - RNA, 21 nt, Human
uguucuggcucuuccaggcug

SEQ ID NO: 3707703 - RNA, 13 nt, Human
uguucugggacac

SEQ ID NO: 3707704 - RNA, 15 nt, Human
uguucugggcucuuu

SEQ ID NO: 3707705 - RNA, 22 nt, Human
uguucuggggggacccagugca

SEQ ID NO: 3707706 - RNA, 23 nt, Human
uguucuggggggacccagugcag

SEQ ID NO: 3707707 - RNA, 13 nt, Human
uguucugucacca

SEQ ID NO: 3707708 - RNA, 18 nt, Human
uguucugucccuugcccc

SEQ ID NO: 3707709 - RNA, 23 nt, Human
uguucugugaugaggggaggggg

SEQ ID NO: 3707710 - RNA, 19 nt, Human
uguucuguggaaaguguaa

SEQ ID NO: 3707711 - RNA, 21 nt, Human
uguucuguggaaaguguaaag

SEQ ID NO: 3707712 - RNA, 23 nt, Human
uguucugugguuccucugcucac

SEQ ID NO: 3707713 - RNA, 16 nt, Human
uguucuguuaacugaa

SEQ ID NO: 3707714 - RNA, 17 nt, Human
uguucuguuaacugaau

SEQ ID NO: 3707715 - RNA, 18 nt, Human
uguucuguuaacugaaua

SEQ ID NO: 3707716 - RNA, 22 nt, Human
uguucuguuaacugaauaccac

SEQ ID NO: 3707717 - RNA, 23 nt, Human
uguucuguuaacugaauaccacu

SEQ ID NO: 3707718 - RNA, 14 nt, Human
uguucuguuacaaa

SEQ ID NO: 3707719 - RNA, 19 nt, Human
uguucuguuacaaaaugua

SEQ ID NO: 3707720 - RNA, 22 nt, Human
uguucuguuacaaaauguaacu

SEQ ID NO: 3707721 - RNA, 23 nt, Human
uguucuguuacaaaauguaacug

SEQ ID NO: 3707722 - RNA, 16 nt, Human
uguucuuaagacguga

SEQ ID NO: 3707723 - RNA, 22 nt, Human
uguucuuacacauacaguuuua

SEQ ID NO: 3707724 - RNA, 17 nt, Human
uguucuuaccuguaugu

SEQ ID NO: 3707725 - RNA, 20 nt, Human
uguucuuagcucaaugagca

SEQ ID NO: 3707726 - RNA, 20 nt, Human
uguucuuaugcaaaauggaa

SEQ ID NO: 3707727 - RNA, 13 nt, Human
uguucuucagaga

SEQ ID NO: 3707728 - RNA, 21 nt, Human
uguucuuccaguuacuuucca

SEQ ID NO: 3707729 - RNA, 22 nt, Human
uguucuuccaguuacuuuccaa

SEQ ID NO: 3707730 - RNA, 15 nt, Human
uguucuuccucagcc

SEQ ID NO: 3707731 - RNA, 17 nt, Human
uguucuuccucagccag

SEQ ID NO: 3707732 - RNA, 21 nt, Human
uguucuuccucagccagccuc

SEQ ID NO: 3707733 - RNA, 13 nt, Human
uguucuugaagca

SEQ ID NO: 3707734 - RNA, 12 nt, Human
uguucuugcugc

SEQ ID NO: 3707735 - RNA, 22 nt, Human
uguucuugcugcuagaacuuuu

SEQ ID NO: 3707736 - RNA, 19 nt, Human
uguucuugguuuguaaauu

SEQ ID NO: 3707737 - RNA, 10 nt, Human
uguucuugua

SEQ ID NO: 3707738 - RNA, 15 nt, Human
uguucuuuaggagau

SEQ ID NO: 3707739 - RNA, 11 nt, Human
uguucuuuaua

SEQ ID NO: 3707740 - RNA, 14 nt, Human
uguucuuucagaaa

SEQ ID NO: 3707741 - RNA, 14 nt, Human
uguucuuuccaaag

SEQ ID NO: 3707742 - RNA, 18 nt, Human
uguucuuuccaaaguaca

SEQ ID NO: 3707743 - RNA, 14 nt, Human
uguucuuucuggcu

SEQ ID NO: 3707744 - RNA, 23 nt, Human
uguucuuucuggcuaugcauuug

SEQ ID NO: 3707745 - RNA, 22 nt, Human
uguucuuuggaaaguacacucu

SEQ ID NO: 3707746 - RNA, 20 nt, Human
uguucuuuuaaaugauugaa

SEQ ID NO: 3707747 - RNA, 12 nt, Human
uguucuuuucaa

SEQ ID NO: 3707748 - RNA, 16 nt, Human
uguucuuuugucccag

SEQ ID NO: 3707749 - RNA, 23 nt, Human
uguugaaaaaaaaguuucagaga

SEQ ID NO: 3707750 - RNA, 12 nt, Human
uguugaaaaaau

SEQ ID NO: 3707751 - RNA, 15 nt, Human
uguugaaaaccaaaa

SEQ ID NO: 3707752 - RNA, 22 nt, Human
uguugaaaagccauguuuaaga

SEQ ID NO: 3707753 - RNA, 14 nt, Human
uguugaaaauguuc

SEQ ID NO: 3707754 - RNA, 17 nt, Human
uguugaaaauguucaga

SEQ ID NO: 3707755 - RNA, 22 nt, Human
uguugaaaauuauuuuaaacaa

SEQ ID NO: 3707756 - RNA, 20 nt, Human
uguugaaacggaugauuucu

SEQ ID NO: 3707757 - RNA, 11 nt, Human
uguugaaagau

SEQ ID NO: 3707758 - RNA, 17 nt, Human
uguugaaagcaaaaaug

SEQ ID NO: 3707759 - RNA, 24 nt, Human
uguugaaagguaauuugagagaaa

SEQ ID NO: 3707760 - RNA, 22 nt, Human
uguugaaauuauguauguuuac

SEQ ID NO: 3707761 - RNA, 18 nt, Human
uguugaaauuuugcaaau

SEQ ID NO: 3707762 - RNA, 14 nt, Human
uguugaacuguuag

SEQ ID NO: 3707763 - RNA, 22 nt, Human
uguugaagaaauuauaaagaua

SEQ ID NO: 3707764 - RNA, 17 nt, Human
uguugaagggagguggc

SEQ ID NO: 3707765 - RNA, 17 nt, Human
uguugaagucucaggag

SEQ ID NO: 3707766 - RNA, 16 nt, Human
uguugacacaggucuu

SEQ ID NO: 3707767 - RNA, 18 nt, Human
uguugacauaccuuuuau

SEQ ID NO: 3707768 - RNA, 21 nt, Human
uguugacauauuuaauguuuu

SEQ ID NO: 3707769 - RNA, 22 nt, Human
uguugacauuaagaauguuggu

SEQ ID NO: 3707770 - RNA, 15 nt, Human
uguugacauucugaa

SEQ ID NO: 3707771 - RNA, 17 nt, Human
uguugacauucugaaug

SEQ ID NO: 3707772 - RNA, 18 nt, Human
uguugacauucugaaugc

SEQ ID NO: 3707773 - RNA, 21 nt, Human
uguugaccaggcaccuccccu

SEQ ID NO: 3707774 - RNA, 16 nt, Human
uguugacgaagucucu

SEQ ID NO: 3707775 - RNA, 18 nt, Human
uguugacgaagucucuuu

SEQ ID NO: 3707776 - RNA, 19 nt, Human
uguugacucuaguacugug

SEQ ID NO: 3707777 - RNA, 13 nt, Human
uguugacuuauuu

SEQ ID NO: 3707778 - RNA, 21 nt, Human
uguugacuuauuuucucugug

SEQ ID NO: 3707779 - RNA, 20 nt, Human
uguugagcaucacagaaugu

SEQ ID NO: 3707780 - RNA, 18 nt, Human
uguugagccuuuucccuc

SEQ ID NO: 3707781 - RNA, 21 nt, Human
uguugagguggucugaauguu

SEQ ID NO: 3707782 - RNA, 22 nt, Human
uguugaguuaguuaaguugggu

SEQ ID NO: 3707783 - RNA, 15 nt, Human
uguugauaauucuua

SEQ ID NO: 3707784 - RNA, 15 nt, Human
uguugauacuguugc

SEQ ID NO: 3707785 - RNA, 19 nt, Human
uguugauguaucugaguug

SEQ ID NO: 3707786 - RNA, 15 nt, Human
uguugauuaaagaug

SEQ ID NO: 3707787 - RNA, 20 nt, Human
uguugauuaauuucugccau

SEQ ID NO: 3707788 - RNA, 14 nt, Human
uguugauucucucc

SEQ ID NO: 3707789 - RNA, 12 nt, Human
uguugauugcua

SEQ ID NO: 3707790 - RNA, 15 nt, Human
uguugauugcuaaau

SEQ ID NO: 3707791 - RNA, 18 nt, Human
uguugauugcuaaaugua

SEQ ID NO: 3707792 - RNA, 14 nt, Human
uguugauuucuagu

SEQ ID NO: 3707793 - RNA, 15 nt, Human
uguugauuucuaguu

SEQ ID NO: 3707794 - RNA, 18 nt, Human
uguugauuucuaguuauu

SEQ ID NO: 3707795 - RNA, 20 nt, Human
uguugauuucuuuccagagg

SEQ ID NO: 3707796 - RNA, 14 nt, Human
uguugauuuucugu

SEQ ID NO: 3707797 - RNA, 18 nt, Human
uguugauuuuuacugugu

SEQ ID NO: 3707798 - RNA, 17 nt, Human
uguugcaagaugugaau

SEQ ID NO: 3707799 - RNA, 18 nt, Human
uguugcaagaugugaauu

SEQ ID NO: 3707800 - RNA, 16 nt, Human
uguugcaagccccucu

SEQ ID NO: 3707801 - RNA, 17 nt, Human
uguugcaaguacugcug

SEQ ID NO: 3707802 - RNA, 19 nt, Human
uguugcaaguacugcugua

SEQ ID NO: 3707803 - RNA, 21 nt, Human
uguugcaaugugaaaaaucug

SEQ ID NO: 3707804 - RNA, 20 nt, Human
uguugcacacccacucagcu

SEQ ID NO: 3707805 - RNA, 16 nt, Human
uguugcacccagcccu

SEQ ID NO: 3707806 - RNA, 21 nt, Human
uguugcacguguguuuuucua

SEQ ID NO: 3707807 - RNA, 15 nt, Human
uguugcacugaaguu

SEQ ID NO: 3707808 - RNA, 19 nt, Human
uguugcacugaaguuugau

SEQ ID NO: 3707809 - RNA, 22 nt, Human
uguugcacugaaguuugauaaa

SEQ ID NO: 3707810 - RNA, 23 nt, Human
uguugcacugaaguuugauaaau

SEQ ID NO: 3707811 - RNA, 17 nt, Human
uguugcagguucaugga

SEQ ID NO: 3707812 - RNA, 17 nt, Human
uguugcaugauguauuu

SEQ ID NO: 3707813 - RNA, 20 nt, Human
uguugcaugggcuaaugaag

SEQ ID NO: 3707814 - RNA, 21 nt, Human
uguugccaaaaugguggccug

SEQ ID NO: 3707815 - RNA, 19 nt, Human
uguugccaaauauguccug

SEQ ID NO: 3707816 - RNA, 14 nt, Human
uguugccaagcugg

SEQ ID NO: 3707817 - RNA, 16 nt, Human
uguugccacaggacac

SEQ ID NO: 3707818 - RNA, 18 nt, Human
uguugccacuuuccaagu

SEQ ID NO: 3707819 - RNA, 12 nt, Human
uguugccagaga

SEQ ID NO: 3707820 - RNA, 17 nt, Human
uguugccaguuguccuc

SEQ ID NO: 3707821 - RNA, 18 nt, Human
uguugccaguuguccucc

SEQ ID NO: 3707822 - RNA, 19 nt, Human
uguugccaugugcaccuug

SEQ ID NO: 3707823 - RNA, 14 nt, Human
uguugccauguguu

SEQ ID NO: 3707824 - RNA, 22 nt, Human
uguugcccacagcuguaugauu

SEQ ID NO: 3707825 - RNA, 16 nt, Human
uguugcccaggcaggu

SEQ ID NO: 3707826 - RNA, 13 nt, Human
uguugcccaggcu

SEQ ID NO: 3707827 - RNA, 15 nt, Human
uguugcccaggcugg

SEQ ID NO: 3707828 - RNA, 20 nt, Human
uguugcccaggcuggagugc

SEQ ID NO: 3707829 - RNA, 21 nt, Human
uguugcccaggcuggagugca

SEQ ID NO: 3707830 - RNA, 16 nt, Human
uguugccccuuucucu

SEQ ID NO: 3707831 - RNA, 13 nt, Human
uguugcccugagu

SEQ ID NO: 3707832 - RNA, 12 nt, Human
uguugccuaagu

SEQ ID NO: 3707833 - RNA, 17 nt, Human
uguugccuauaagccaa

SEQ ID NO: 3707834 - RNA, 22 nt, Human
uguugccuauaagccaaaauua

SEQ ID NO: 3707835 - RNA, 16 nt, Human
ugguaagagaauguua

SEQ ID NO: 3707836 - RNA, 22 nt, Human
ugguaagagacagaauguaucu

SEQ ID NO: 3707837 - RNA, 17 nt, Human
ugguaagcuauguccca

SEQ ID NO: 3707838 - RNA, 16 nt, Human
ugguaagggccaaguc

SEQ ID NO: 3707839 - RNA, 16 nt, Human
ugguaauaagggaaaa

SEQ ID NO: 3707840 - RNA, 21 nt, Human
ugguaauaagggaaaaaucaa

SEQ ID NO: 3707841 - RNA, 15 nt, Human
ugguaaucuugcucu

SEQ ID NO: 3707842 - RNA, 21 nt, Human
ugguaauuaucauuuuagaag

SEQ ID NO: 3707843 - RNA, 22 nt, Human
ugguaauuauuuugguacuuuu

SEQ ID NO: 3707844 - RNA, 22 nt, Human
ugguaauuuaagauuccagaga

SEQ ID NO: 3707845 - RNA, 19 nt, Human
ugguaauuuguaucugaag

SEQ ID NO: 3707846 - RNA, 21 nt, Human
ugguaauuuguaucugaagga

SEQ ID NO: 3707847 - RNA, 14 nt, Human
ugguacagagaagc

SEQ ID NO: 3707848 - RNA, 22 nt, Human
ugguacaguauggggguuguaa

SEQ ID NO: 3707849 - RNA, 13 nt, Human
ugguacaugucuu

SEQ ID NO: 3707850 - RNA, 15 nt, Human
ugguaccagauaaaa

SEQ ID NO: 3707851 - RNA, 18 nt, Human
ugguaccagauaaaauua

SEQ ID NO: 3707852 - RNA, 14 nt, Human
ugguaccagauaac

SEQ ID NO: 3707853 - RNA, 13 nt, Human
ugguaccagaugc

SEQ ID NO: 3707854 - RNA, 13 nt, Human
ugguaccagcccu

SEQ ID NO: 3707855 - RNA, 15 nt, Human
ugguaccaggucucc

SEQ ID NO: 3707856 - RNA, 18 nt, Human
ugguaccaggucuccucc

SEQ ID NO: 3707857 - RNA, 14 nt, Human
ugguacccagccau

SEQ ID NO: 3707858 - RNA, 17 nt, Human
ugguacccagccaucug

SEQ ID NO: 3707859 - RNA, 18 nt, Human
ugguacccagccaucugc

SEQ ID NO: 3707860 - RNA, 15 nt, Human
ugguacccuccuggc

SEQ ID NO: 3707861 - RNA, 21 nt, Human
ugguacccuccuggcucuuga

SEQ ID NO: 3707862 - RNA, 15 nt, Human
ugguaccuauuugac

SEQ ID NO: 3707863 - RNA, 18 nt, Human
ugguacggagauguuuca

SEQ ID NO: 3707864 - RNA, 13 nt, Human
ugguacucuccua

SEQ ID NO: 3707865 - RNA, 19 nt, Human
ugguacuguacagcuggcu

SEQ ID NO: 3707866 - RNA, 17 nt, Human
ugguacuuauuacugcu

SEQ ID NO: 3707867 - RNA, 19 nt, Human
ugguacuuauuacugcuaa

SEQ ID NO: 3707868 - RNA, 18 nt, Human
ugguacuugcugcuauuu

SEQ ID NO: 3707869 - RNA, 19 nt, Human
ugguacuuuuaugauguau

SEQ ID NO: 3707870 - RNA, 22 nt, Human
ugguagagaccgagccucuguc

SEQ ID NO: 3707871 - RNA, 20 nt, Human
ugguagauuaaauauagauu

SEQ ID NO: 3707872 - RNA, 18 nt, Human
ugguagcauuuuaaacaa

SEQ ID NO: 3707873 - RNA, 20 nt, Human
ugguaggaacugcugggcuu

SEQ ID NO: 3707874 - RNA, 22 nt, Human
ugguaggaccaagcaucuuggg

SEQ ID NO: 3707875 - RNA, 17 nt, Human
ugguaggacuguagaaa

SEQ ID NO: 3707876 - RNA, 18 nt, Human
ugguaggacuguagaaaa

SEQ ID NO: 3707877 - RNA, 21 nt, Human
ugguaggccuuuuaacauuuu

SEQ ID NO: 3707878 - RNA, 18 nt, Human
ugguagggggaaaaugug

SEQ ID NO: 3707879 - RNA, 19 nt, Human
ugguagggugggagugguu

SEQ ID NO: 3707880 - RNA, 20 nt, Human
ugguagguacuuuuugugaa

SEQ ID NO: 3707881 - RNA, 14 nt, Human
ugguagguugggac

SEQ ID NO: 3707882 - RNA, 14 nt, Human
ugguaguaaaacac

SEQ ID NO: 3707883 - RNA, 17 nt, Human
ugguaguuucugugguu

SEQ ID NO: 3707884 - RNA, 15 nt, Human
ugguauaaguaacuu

SEQ ID NO: 3707885 - RNA, 14 nt, Human
ugguauagaaaugc

SEQ ID NO: 3707886 - RNA, 19 nt, Human
ugguauauccaaaagcuuu

SEQ ID NO: 3707887 - RNA, 22 nt, Human
ugguauccugugacauguaaca

SEQ ID NO: 3707888 - RNA, 21 nt, Human
ugguaucuaauucuuuaauga

SEQ ID NO: 3707889 - RNA, 22 nt, Human
ugguaucucagaaagugccuga

SEQ ID NO: 3707890 - RNA, 14 nt, Human
ugguaucuguucuu

SEQ ID NO: 3707891 - RNA, 13 nt, Human
ugguaugucugcc

SEQ ID NO: 3707892 - RNA, 19 nt, Human
ugguaugugacaccaaagc

SEQ ID NO: 3707893 - RNA, 17 nt, Human
ugguauguguguguaug

SEQ ID NO: 3707894 - RNA, 16 nt, Human
ugguauuccugccucc

SEQ ID NO: 3707895 - RNA, 19 nt, Human
ugguauucgcuugagaaaa

SEQ ID NO: 3707896 - RNA, 21 nt, Human
ugguauucuguucuggaggaa

SEQ ID NO: 3707897 - RNA, 23 nt, Human
ugguauuggcuagagguucaaag

SEQ ID NO: 3707898 - RNA, 12 nt, Human
ugguauuguauu

SEQ ID NO: 3707899 - RNA, 13 nt, Human
ugguauuguauuu

SEQ ID NO: 3707900 - RNA, 18 nt, Human
ugguauuguauuuauuca

SEQ ID NO: 3707901 - RNA, 20 nt, Human
ugguauuuaucuauuguaag

SEQ ID NO: 3707902 - RNA, 19 nt, Human
ugguauuugagacauucca

SEQ ID NO: 3707903 - RNA, 18 nt, Human
ugguauuuggauaucugu

SEQ ID NO: 3707904 - RNA, 20 nt, Human
ugguauuuucaauagccacu

SEQ ID NO: 3707905 - RNA, 20 nt, Human
uggucaaaccgcacucaccc

SEQ ID NO: 3707906 - RNA, 18 nt, Human
uggucaaccuccuggaca

SEQ ID NO: 3707907 - RNA, 15 nt, Human
uggucaagauuuuga

SEQ ID NO: 3707908 - RNA, 14 nt, Human
uggucacacacuga

SEQ ID NO: 3707909 - RNA, 15 nt, Human
uggucacagccaggc

SEQ ID NO: 3707910 - RNA, 17 nt, Human
uggucacagccaggcgc

SEQ ID NO: 3707911 - RNA, 13 nt, Human
uggucacagccuc

SEQ ID NO: 3707912 - RNA, 21 nt, Human
uggucacagcggaggugugga

SEQ ID NO: 3707913 - RNA, 14 nt, Human
uggucacagcugua

SEQ ID NO: 3707914 - RNA, 23 nt, Human
uggucacaggacucugccuccuc

SEQ ID NO: 3707915 - RNA, 20 nt, Human
uggucaccaaaucagcugcu

SEQ ID NO: 3707916 - RNA, 21 nt, Human
uggucaccaaaucagcugcua

SEQ ID NO: 3707917 - RNA, 15 nt, Human
uggucaccagcuccu

SEQ ID NO: 3707918 - RNA, 16 nt, Human
uggucaccaugaaacu

SEQ ID NO: 3707919 - RNA, 21 nt, Human
uggucaccuaggaagccucag

SEQ ID NO: 3707920 - RNA, 14 nt, Human
uggucacugccaug

SEQ ID NO: 3707921 - RNA, 22 nt, Human
uggucacugccauggaggcaca

SEQ ID NO: 3707922 - RNA, 13 nt, Human
uggucacugcugu

SEQ ID NO: 3707923 - RNA, 22 nt, Human
uggucagacacaaacaaacaag

SEQ ID NO: 3707924 - RNA, 21 nt, Human
uggucagaguaagcugcuuuu

SEQ ID NO: 3707925 - RNA, 16 nt, Human
uggucagcccaaacca

SEQ ID NO: 3707926 - RNA, 22 nt, Human
uggucagcccuaggguggagag

SEQ ID NO: 3707927 - RNA, 16 nt, Human
uggucagcguugcaug

SEQ ID NO: 3707928 - RNA, 17 nt, Human
uggucagcguugcaugu

SEQ ID NO: 3707929 - RNA, 13 nt, Human
uggucagcucccu

SEQ ID NO: 3707930 - RNA, 21 nt, Human
uggucagguauuucaguucuu

SEQ ID NO: 3707931 - RNA, 21 nt, Human
uggucagguuauacuccuccu

SEQ ID NO: 3707932 - RNA, 22 nt, Human
uggucaugugggucuuccaggg

SEQ ID NO: 3707933 - RNA, 11 nt, Human
ugguccaaaua

SEQ ID NO: 3707934 - RNA, 15 nt, Human
ugguccaaauaggca

SEQ ID NO: 3707935 - RNA, 15 nt, Human
ugguccaagauuccg

SEQ ID NO: 3707936 - RNA, 18 nt, Human
ugguccaauuaguuuccu

SEQ ID NO: 3707937 - RNA, 21 nt, Human
ugguccaauuaguuuccuuuu

SEQ ID NO: 3707938 - RNA, 23 nt, Human
ugguccaauuaguuuccuuuuua

SEQ ID NO: 3707939 - RNA, 13 nt, Human
ugguccacagggc

SEQ ID NO: 3707940 - RNA, 15 nt, Human
ugguccacuuuucca

SEQ ID NO: 3707941 - RNA, 12 nt, Human
ugguccagagcg

SEQ ID NO: 3707942 - RNA, 14 nt, Human
ugguccagccuggu

SEQ ID NO: 3707943 - RNA, 15 nt, Human
ugguccauagagagc

SEQ ID NO: 3707944 - RNA, 20 nt, Human
ugguccaucugguuuucucu

SEQ ID NO: 3707945 - RNA, 15 nt, Human
uggucccacaucccu

SEQ ID NO: 3707946 - RNA, 16 nt, Human
uggucccacaucccug

SEQ ID NO: 3707947 - RNA, 19 nt, Human
uggucccacaucccugggc

SEQ ID NO: 3707948 - RNA, 16 nt, Human
uggucccagccagcag

SEQ ID NO: 3707949 - RNA, 17 nt, Human
uggucccauccaggcag

SEQ ID NO: 3707950 - RNA, 18 nt, Human
uggucccauccaggcagu

SEQ ID NO: 3707951 - RNA, 19 nt, Human
ugguccccaacaaugugag

SEQ ID NO: 3707952 - RNA, 14 nt, Human
ugguccccaagacc

SEQ ID NO: 3707953 - RNA, 18 nt, Human
uggucccccuuccaugga

SEQ ID NO: 3707954 - RNA, 17 nt, Human
ugguccccguuccaccc

SEQ ID NO: 3707955 - RNA, 22 nt, Human
uggucccuccagaaccaccccg

SEQ ID NO: 3707956 - RNA, 12 nt, Human
uggucccugggg

SEQ ID NO: 3707957 - RNA, 23 nt, Human
uggucccuuguauccccugcagg

SEQ ID NO: 3707958 - RNA, 15 nt, Human
ugguccgguguccuu

SEQ ID NO: 3707959 - RNA, 18 nt, Human
ugguccgugcuaaggacu

SEQ ID NO: 3707960 - RNA, 20 nt, Human
ugguccgugcuaaggacuug

SEQ ID NO: 3707961 - RNA, 17 nt, Human
ugguccuaaaagcaaaa

SEQ ID NO: 3707962 - RNA, 21 nt, Human
ugguccuaaaagcaaaauaaa

SEQ ID NO: 3707963 - RNA, 18 nt, Human
ugguccuaagucccugcc

SEQ ID NO: 3707964 - RNA, 20 nt, Human
ugguccuaagucccugcccc

SEQ ID NO: 3707965 - RNA, 12 nt, Human
ugguccuaccca

SEQ ID NO: 3707966 - RNA, 18 nt, Human
uguuuuugaaggcagaaa

SEQ ID NO: 3707967 - RNA, 16 nt, Human
uguuuuugcacauguu

SEQ ID NO: 3707968 - RNA, 23 nt, Human
uguuuuugcgugggagugugugc

SEQ ID NO: 3707969 - RNA, 20 nt, Human
uguuuuugcuuguuauauua

SEQ ID NO: 3707970 - RNA, 10 nt, Human
uguuuuuggg

SEQ ID NO: 3707971 - RNA, 13 nt, Human
uguuuuuguaaag

SEQ ID NO: 3707972 - RNA, 14 nt, Human
uguuuuuguaaaga

SEQ ID NO: 3707973 - RNA, 13 nt, Human
uguuuuuguugug

SEQ ID NO: 3707974 - RNA, 20 nt, Human
uguuuuuuaaacuaggaaaa

SEQ ID NO: 3707975 - RNA, 16 nt, Human
uguuuuuuaagauagu

SEQ ID NO: 3707976 - RNA, 17 nt, Human
uguuuuuuagaucaaau

SEQ ID NO: 3707977 - RNA, 13 nt, Human
uguuuuuuccuuu

SEQ ID NO: 3707978 - RNA, 12 nt, Human
uguuuuuucuaa

SEQ ID NO: 3707979 - RNA, 13 nt, Human
uguuuuuugaagu

SEQ ID NO: 3707980 - RNA, 15 nt, Human
uguuuuuugaagugu

SEQ ID NO: 3707981 - RNA, 16 nt, Human
uguuuuuugaaguguu

SEQ ID NO: 3707982 - RNA, 21 nt, Human
uguuuuuuuaggguuucugau

SEQ ID NO: 3707983 - RNA, 19 nt, Human
uguuuuuuuuuuccacuua

SEQ ID NO: 3707984 - RNA, 19 nt, Human
uuaaaaaaaaaaaaaagcu

SEQ ID NO: 3707985 - RNA, 20 nt, Human
uuaaaaaaaaaaaaaagcuu

SEQ ID NO: 3707986 - RNA, 21 nt, Human
uuaaaaaaaaaaaaaggaaaa

SEQ ID NO: 3707987 - RNA, 15 nt, Human
uuaaaaaaaaaaguc

SEQ ID NO: 3707988 - RNA, 22 nt, Human
uuaaaaaaaacaaaaagaacaa

SEQ ID NO: 3707989 - RNA, 14 nt, Human
uuaaaaaaaacuca

SEQ ID NO: 3707990 - RNA, 21 nt, Human
uuaaaaaaaacucuuuaacuu

SEQ ID NO: 3707991 - RNA, 13 nt, Human
uuaaaaaaaauaa

SEQ ID NO: 3707992 - RNA, 14 nt, Human
uuaaaaaaaauaau

SEQ ID NO: 3707993 - RNA, 17 nt, Human
uuaaaaaaaauaauaaa

SEQ ID NO: 3707994 - RNA, 21 nt, Human
uuaaaaaaaaucaucauuauu

SEQ ID NO: 3707995 - RNA, 19 nt, Human
uuaaaaaaaauccuucuaa

SEQ ID NO: 3707996 - RNA, 12 nt, Human
uuaaaaaaagaa

SEQ ID NO: 3707997 - RNA, 18 nt, Human
uuaaaaaaagaagagaaa

SEQ ID NO: 3707998 - RNA, 23 nt, Human
uuaaaaaaauaaaacauuuuaaa

SEQ ID NO: 3707999 - RNA, 17 nt, Human
uuaaaaaaaucacaaaa

SEQ ID NO: 3708000 - RNA, 16 nt, Human
uuaaaaaaauggcagu

SEQ ID NO: 3708001 - RNA, 20 nt, Human
uuaaaaaaauugguuggaga

SEQ ID NO: 3708002 - RNA, 13 nt, Human
uuaaaaaacuugu

SEQ ID NO: 3708003 - RNA, 22 nt, Human
uuaaaaaacuuucuacucauuu

SEQ ID NO: 3708004 - RNA, 13 nt, Human
uuaaaaaagagac

SEQ ID NO: 3708005 - RNA, 12 nt, Human
uuaaaaaagcuu

SEQ ID NO: 3708006 - RNA, 12 nt, Human
uuaaaaaaguuu

SEQ ID NO: 3708007 - RNA, 18 nt, Human
uuaaaaaaguuuaaaaug

SEQ ID NO: 3708008 - RNA, 20 nt, Human
uuaaaaaaguuuaaaaugua

SEQ ID NO: 3708009 - RNA, 19 nt, Human
uuaaaaaauauuuauuaaa

SEQ ID NO: 3708010 - RNA, 16 nt, Human
uuaaaaaauguccaug

SEQ ID NO: 3708011 - RNA, 17 nt, Human
uuaaaaacaaaaggcaa

SEQ ID NO: 3708012 - RNA, 19 nt, Human
uuaaaaacauaacauaaau

SEQ ID NO: 3708013 - RNA, 13 nt, Human
uuaaaaacuagua

SEQ ID NO: 3708014 - RNA, 18 nt, Human
uuaaaaacuaguaguucu

SEQ ID NO: 3708015 - RNA, 13 nt, Human
uuaaaaacuggaa

SEQ ID NO: 3708016 - RNA, 14 nt, Human
uuaaaaagcccaac

SEQ ID NO: 3708017 - RNA, 16 nt, Human
uuaaaaagguuuacag

SEQ ID NO: 3708018 - RNA, 20 nt, Human
uuaaaaaguauugccaaaca

SEQ ID NO: 3708019 - RNA, 17 nt, Human
uuaaaaagucuuuuaaa

SEQ ID NO: 3708020 - RNA, 16 nt, Human
uuaaaaauaaauccca

SEQ ID NO: 3708021 - RNA, 22 nt, Human
uuaaaaauaagucaacaguaaa

SEQ ID NO: 3708022 - RNA, 12 nt, Human
uuaaaaauacau

SEQ ID NO: 3708023 - RNA, 20 nt, Human
uuaaaaauauggaacuucua

SEQ ID NO: 3708024 - RNA, 21 nt, Human
uuaaaaaucuaccuucuguag

SEQ ID NO: 3708025 - RNA, 17 nt, Human
uaaauuauauuugugcu

SEQ ID NO: 3708026 - RNA, 21 nt, Human
uaaauuauauuugugcuauag

SEQ ID NO: 3708027 - RNA, 19 nt, Human
uaaauuauguaaugcaaaa

SEQ ID NO: 3708028 - RNA, 19 nt, Human
uaaauuauguuuauauaaa

SEQ ID NO: 3708029 - RNA, 12 nt, Human
uaaauuauucag

SEQ ID NO: 3708030 - RNA, 17 nt, Human
uaaauuauugaugaaaa

SEQ ID NO: 3708031 - RNA, 20 nt, Human
uaaauuauuugauuauuuaa

SEQ ID NO: 3708032 - RNA, 23 nt, Human
uaaauuauuugauuauuuaagac

SEQ ID NO: 3708033 - RNA, 11 nt, Human
uaaauuauuuu

SEQ ID NO: 3708034 - RNA, 16 nt, Human
uaaauuauuuuaaauu

SEQ ID NO: 3708035 - RNA, 15 nt, Human
uaaauucaacuuugu

SEQ ID NO: 3708036 - RNA, 23 nt, Human
uaaauucagauauauuuuucaca

SEQ ID NO: 3708037 - RNA, 18 nt, Human
uaaauucaguccuaagaa

SEQ ID NO: 3708038 - RNA, 20 nt, Human
uaaauucauuuuaauuuugu

SEQ ID NO: 3708039 - RNA, 18 nt, Human
uaaauucccguuuuguca

SEQ ID NO: 3708040 - RNA, 20 nt, Human
uaaauuccucuuugcuuugc

SEQ ID NO: 3708041 - RNA, 22 nt, Human
uaaauucugagacaugugucaa

SEQ ID NO: 3708042 - RNA, 14 nt, Human
uaaauucugauuuc

SEQ ID NO: 3708043 - RNA, 15 nt, Human
uaaauucugauuucu

SEQ ID NO: 3708044 - RNA, 20 nt, Human
uaaauucugauuucuuuuca

SEQ ID NO: 3708045 - RNA, 18 nt, Human
uaaauucuugcaaaguau

SEQ ID NO: 3708046 - RNA, 21 nt, Human
uaaauucuuuauuucugucau

SEQ ID NO: 3708047 - RNA, 19 nt, Human
uaaauucuuuuuuaaauuu

SEQ ID NO: 3708048 - RNA, 22 nt, Human
uaaauucuuuuuuaaauuuucu

SEQ ID NO: 3708049 - RNA, 16 nt, Human
uaaauugaauaauggu

SEQ ID NO: 3708050 - RNA, 19 nt, Human
uaaauugaaucaguauaaa

SEQ ID NO: 3708051 - RNA, 22 nt, Human
uaaauugaaucaguauaaacaa

SEQ ID NO: 3708052 - RNA, 20 nt, Human
uaaauugacacuuaaaaaug

SEQ ID NO: 3708053 - RNA, 23 nt, Human
uaaauugacacuuaaaaaugguu

SEQ ID NO: 3708054 - RNA, 18 nt, Human
uaaauugauguugaugca

SEQ ID NO: 3708055 - RNA, 19 nt, Human
uaaauugauguugaugcaa

SEQ ID NO: 3708056 - RNA, 16 nt, Human
uaaauugauguugcug

SEQ ID NO: 3708057 - RNA, 13 nt, Human
uaaauugauuuuu

SEQ ID NO: 3708058 - RNA, 22 nt, Human
uaaauugauuuuuauaaauacu

SEQ ID NO: 3708059 - RNA, 13 nt, Human
uaaauugcaagaa

SEQ ID NO: 3708060 - RNA, 16 nt, Human
uaaauugcaucacugu

SEQ ID NO: 3708061 - RNA, 18 nt, Human
uaaauugcaugcugcuuu

SEQ ID NO: 3708062 - RNA, 24 nt, Human
uaaauugcucacaguuauuacaua

SEQ ID NO: 3708063 - RNA, 15 nt, Human
uaaauugcuguguau

SEQ ID NO: 3708064 - RNA, 20 nt, Human
uaaauuggcauggaaauuua

SEQ ID NO: 3708065 - RNA, 13 nt, Human
uaaauuguauauu

SEQ ID NO: 3708066 - RNA, 23 nt, Human
uaaauuguuuggcuuccuccuga

SEQ ID NO: 3708067 - RNA, 15 nt, Human
uaaauuuaaagauau

SEQ ID NO: 3708068 - RNA, 22 nt, Human
uaaauuuaagcuuaagccauaa

SEQ ID NO: 3708069 - RNA, 23 nt, Human
uaaauuuaaguaaguuuuauaag

SEQ ID NO: 3708070 - RNA, 15 nt, Human
uaaauuuaaugcugc

SEQ ID NO: 3708071 - RNA, 17 nt, Human
uaaauuuacuuuacaca

SEQ ID NO: 3708072 - RNA, 14 nt, Human
uaaauuuaguauuu

SEQ ID NO: 3708073 - RNA, 18 nt, Human
uaaauuuauuuacugcua

SEQ ID NO: 3708074 - RNA, 17 nt, Human
uaaauuuccccaacagu

SEQ ID NO: 3708075 - RNA, 20 nt, Human
uaaauuucgcuucuuagaac

SEQ ID NO: 3708076 - RNA, 22 nt, Human
uaaauuucuuaugugacauuaa

SEQ ID NO: 3708077 - RNA, 14 nt, Human
uaaauuugaauguu

SEQ ID NO: 3708078 - RNA, 22 nt, Human
uaaauuugaauguuaagcagau

SEQ ID NO: 3708079 - RNA, 19 nt, Human
uaaauuugacuuuucugua

SEQ ID NO: 3708080 - RNA, 13 nt, Human
uaaauuugauuua

SEQ ID NO: 3708081 - RNA, 14 nt, Human
uaaauuugcuagca

SEQ ID NO: 3708082 - RNA, 17 nt, Human
uaaauuuggcuucuguu

SEQ ID NO: 3708083 - RNA, 17 nt, Human
uaaauuuguaaguuuca

SEQ ID NO: 3708084 - RNA, 20 nt, Human
uaaauuuguaaguuucaggu

SEQ ID NO: 3708085 - RNA, 19 nt, Human
uaaauuuguacuauuuaac

SEQ ID NO: 3708086 - RNA, 20 nt, Human
uaaauuuguacuauuuaacu

SEQ ID NO: 3708087 - RNA, 16 nt, Human
uaaauuuguguaauau

SEQ ID NO: 3708088 - RNA, 13 nt, Human
uaaauuuuaaagc

SEQ ID NO: 3708089 - RNA, 18 nt, Human
uaaauuuuccuguccucu

SEQ ID NO: 3708090 - RNA, 22 nt, Human
uaaauuuugaaaaguaauauuu

SEQ ID NO: 3708091 - RNA, 15 nt, Human
uaaauuuugugucuc

SEQ ID NO: 3708092 - RNA, 16 nt, Human
uaaauuuuuuuccuua

SEQ ID NO: 3708093 - RNA, 16 nt, Human
uaaauuuuuuuguaug

SEQ ID NO: 3708094 - RNA, 21 nt, Human
uaaauuuuuuuguaugaaaac

SEQ ID NO: 3708095 - RNA, 22 nt, Human
uaaauuuuuuuguaugaaaaca

SEQ ID NO: 3708096 - RNA, 15 nt, Human
uaacaaaaaagcuaa

SEQ ID NO: 3708097 - RNA, 12 nt, Human
uaacaaaagaug

SEQ ID NO: 3708098 - RNA, 15 nt, Human
uaacaaaauggacau

SEQ ID NO: 3708099 - RNA, 16 nt, Human
uaacaaaauguauguc

SEQ ID NO: 3708100 - RNA, 21 nt, Human
uaacaaacccucguuucugau

SEQ ID NO: 3708101 - RNA, 17 nt, Human
uaacaaaggauacuuau

SEQ ID NO: 3708102 - RNA, 18 nt, Human
uaacaaaggauacuuauu

SEQ ID NO: 3708103 - RNA, 19 nt, Human
uaacaaaugcuauuaaagu

SEQ ID NO: 3708104 - RNA, 12 nt, Human
uaacaaauuaug

SEQ ID NO: 3708105 - RNA, 18 nt, Human
uaacaacaccuucagagg

SEQ ID NO: 3708106 - RNA, 13 nt, Human
uaacaacuaggga

SEQ ID NO: 3708107 - RNA, 17 nt, Human
uaacaagaaaggagagu

SEQ ID NO: 3708108 - RNA, 13 nt, Human
uaacaagaagaug

SEQ ID NO: 3708109 - RNA, 14 nt, Human
uaacaagaagauga

SEQ ID NO: 3708110 - RNA, 19 nt, Human
uaacaagaagaugaauggc

SEQ ID NO: 3708111 - RNA, 19 nt, Human
uaacaagagugauucuugc

SEQ ID NO: 3708112 - RNA, 16 nt, Human
uaacaagaucuuucag

SEQ ID NO: 3708113 - RNA, 17 nt, Human
uaacaagaucuuucagg

SEQ ID NO: 3708114 - RNA, 18 nt, Human
uaacaagaucuuucagga

SEQ ID NO: 3708115 - RNA, 20 nt, Human
uaacaagucgaugaacuauu

SEQ ID NO: 3708116 - RNA, 17 nt, Human
uaacaauaacuacugug

SEQ ID NO: 3708117 - RNA, 21 nt, Human
uaacaauaacuacuguguucc

SEQ ID NO: 3708118 - RNA, 13 nt, Human
uaacaauacaaau

SEQ ID NO: 3708119 - RNA, 17 nt, Human
uaacaauacaaauggau

SEQ ID NO: 3708120 - RNA, 19 nt, Human
uaacaaugauauauggaua

SEQ ID NO: 3708121 - RNA, 18 nt, Human
uaacaaugccuauuguaa

SEQ ID NO: 3708122 - RNA, 24 nt, Human
uaacaauggaagauuugcccauuu

SEQ ID NO: 3708123 - RNA, 12 nt, Human
uaacaauguuaa

SEQ ID NO: 3708124 - RNA, 13 nt, Human
uaacaauguuaag

SEQ ID NO: 3708125 - RNA, 14 nt, Human
uaacaauuaauugu

SEQ ID NO: 3708126 - RNA, 14 nt, Human
uaacaauuccucua

SEQ ID NO: 3708127 - RNA, 19 nt, Human
uaacaauuguguagccuuu

SEQ ID NO: 3708128 - RNA, 23 nt, Human
uaacaauuguguagccuuuuugu

SEQ ID NO: 3708129 - RNA, 16 nt, Human
uaacacaagccacaga

SEQ ID NO: 3708130 - RNA, 17 nt, Human
uaacacaagccacagaa

SEQ ID NO: 3708131 - RNA, 18 nt, Human
uaacacaaguccugugaa

SEQ ID NO: 3708132 - RNA, 23 nt, Human
uaacacaaguccugugaauuucu

SEQ ID NO: 3708133 - RNA, 12 nt, Human
uaacacacagcu

SEQ ID NO: 3708134 - RNA, 21 nt, Human
uaacacacuaccgaauguguc

SEQ ID NO: 3708135 - RNA, 23 nt, Human
uaacacacuaccgaaugugucuu

SEQ ID NO: 3708136 - RNA, 18 nt, Human
uaacacacuuuuuauuag

SEQ ID NO: 3708137 - RNA, 19 nt, Human
uaacacagugccuucaaua

SEQ ID NO: 3708138 - RNA, 11 nt, Human
uaacacauuau

SEQ ID NO: 3708139 - RNA, 14 nt, Human
uaacacauuuugua

SEQ ID NO: 3708140 - RNA, 21 nt, Human
uaacaccagguuuauggaaaa

SEQ ID NO: 3708141 - RNA, 13 nt, Human
uaacacccuuccu

SEQ ID NO: 3708142 - RNA, 23 nt, Human
uaacacccuuccuucuguaaaua

SEQ ID NO: 3708143 - RNA, 14 nt, Human
uaacaccugaugug

SEQ ID NO: 3708144 - RNA, 18 nt, Human
uaacacuaaaauuuuagg

SEQ ID NO: 3708145 - RNA, 20 nt, Human
uaacacuaauauauuuaaaa

SEQ ID NO: 3708146 - RNA, 15 nt, Human
uaacacuauuuuaug

SEQ ID NO: 3708147 - RNA, 18 nt, Human
uaacacucagaagccugg

SEQ ID NO: 3708148 - RNA, 14 nt, Human
uaacacuccucugc

SEQ ID NO: 3708149 - RNA, 13 nt, Human
uaacacuguuuau

SEQ ID NO: 3708150 - RNA, 21 nt, Human
uaacagaaagggcaacaauaa

SEQ ID NO: 3708151 - RNA, 17 nt, Human
uaacagaacagcuucag

SEQ ID NO: 3708152 - RNA, 18 nt, Human
uaacagaacagcuucagg

SEQ ID NO: 3708153 - RNA, 22 nt, Human
uaacagaacagcuucagguuau

SEQ ID NO: 3708154 - RNA, 19 nt, Human
uaacagaagaaaauagaau

SEQ ID NO: 3708155 - RNA, 18 nt, Human
uaacagacauuguuuugc

SEQ ID NO: 3708156 - RNA, 18 nt, Human
uaacagauaagcaagaga

SEQ ID NO: 3708157 - RNA, 13 nt, Human
uaacagauacauu

SEQ ID NO: 3708158 - RNA, 20 nt, Human
uaacagcaacacaaagcuuu

SEQ ID NO: 3708159 - RNA, 19 nt, Human
uaacagcaguuucagguag

SEQ ID NO: 3708160 - RNA, 22 nt, Human
uaacagcauucuugucacaaua

SEQ ID NO: 3708161 - RNA, 18 nt, Human
uaacagccgcuccagagu

SEQ ID NO: 3708162 - RNA, 15 nt, Human
uaacagcuccuuggg

SEQ ID NO: 3708163 - RNA, 20 nt, Human
uaacagcuccuugggaggaa

SEQ ID NO: 3708164 - RNA, 22 nt, Human
uaacagcuccuugggaggaagc

SEQ ID NO: 3708165 - RNA, 15 nt, Human
uaacagcugaauuau

SEQ ID NO: 3708166 - RNA, 12 nt, Human
uaacagcugagg

SEQ ID NO: 3708167 - RNA, 21 nt, Human
uaacaggaagaucuuaaauuu

SEQ ID NO: 3708168 - RNA, 15 nt, Human
uaacaggcaaacauu

SEQ ID NO: 3708169 - RNA, 21 nt, Human
uaacaggcucaaacaaugaca

SEQ ID NO: 3708170 - RNA, 14 nt, Human
uaacaggcuuagug

SEQ ID NO: 3708171 - RNA, 14 nt, Human
uaacagggaaggca

SEQ ID NO: 3708172 - RNA, 17 nt, Human
uaacagggaaggcaggc

SEQ ID NO: 3708173 - RNA, 22 nt, Human
uaacagggaaggcaggcagggc

SEQ ID NO: 3708174 - RNA, 20 nt, Human
uguaauaaacucauuucuag

SEQ ID NO: 3708175 - RNA, 13 nt, Human
uguaauaaacuuu

SEQ ID NO: 3708176 - RNA, 20 nt, Human
uguaauaaaguguuuucaga

SEQ ID NO: 3708177 - RNA, 15 nt, Human
uguaauaagacauaa

SEQ ID NO: 3708178 - RNA, 18 nt, Human
uguaauaagacauaacgu

SEQ ID NO: 3708179 - RNA, 13 nt, Human
uguaauaagcaau

SEQ ID NO: 3708180 - RNA, 14 nt, Human
uguaauaauaccuc

SEQ ID NO: 3708181 - RNA, 14 nt, Human
uguaauaauagacu

SEQ ID NO: 3708182 - RNA, 14 nt, Human
uguaauaauugcuc

SEQ ID NO: 3708183 - RNA, 11 nt, Human
uguaauacaau

SEQ ID NO: 3708184 - RNA, 18 nt, Human
uguaauacuucuugugug

SEQ ID NO: 3708185 - RNA, 18 nt, Human
uguaauagaaaacugaaa

SEQ ID NO: 3708186 - RNA, 23 nt, Human
uguaauauagaaaaaaacauucu

SEQ ID NO: 3708187 - RNA, 19 nt, Human
uguaauauuuacaauguau

SEQ ID NO: 3708188 - RNA, 23 nt, Human
uguaauauuuuguauuauugcug

SEQ ID NO: 3708189 - RNA, 22 nt, Human
uguaauauuuuuauauacagag

SEQ ID NO: 3708190 - RNA, 14 nt, Human
uguaaucaacaugg

SEQ ID NO: 3708191 - RNA, 16 nt, Human
uguaaucaauaaacga

SEQ ID NO: 3708192 - RNA, 20 nt, Human
uguaaucaauguuucuucua

SEQ ID NO: 3708193 - RNA, 17 nt, Human
uguaaucauauaauaaa

SEQ ID NO: 3708194 - RNA, 21 nt, Human
uguaaucauuucuugggcccu

SEQ ID NO: 3708195 - RNA, 15 nt, Human
uguaaucccagcacu

SEQ ID NO: 3708196 - RNA, 20 nt, Human
uguaaucccagcuacucagg

SEQ ID NO: 3708197 - RNA, 23 nt, Human
uguaaucccagcuacucaggagg

SEQ ID NO: 3708198 - RNA, 20 nt, Human
uguaaucccagcuacucggg

SEQ ID NO: 3708199 - RNA, 17 nt, Human
uguaaucccagcuacuu

SEQ ID NO: 3708200 - RNA, 22 nt, Human
uguaaucccagcuacuugggag

SEQ ID NO: 3708201 - RNA, 13 nt, Human
uguaaucccccag

SEQ ID NO: 3708202 - RNA, 21 nt, Human
uguaaucguuauguguguaua

SEQ ID NO: 3708203 - RNA, 16 nt, Human
uguaaucuauguauau

SEQ ID NO: 3708204 - RNA, 20 nt, Human
uguaaucuuauuuaggaagu

SEQ ID NO: 3708205 - RNA, 15 nt, Human
uguaaucuugaauug

SEQ ID NO: 3708206 - RNA, 12 nt, Human
uguaaugaaaac

SEQ ID NO: 3708207 - RNA, 17 nt, Human
uguaaugaaaaccacau

SEQ ID NO: 3708208 - RNA, 15 nt, Human
uguaaugaaaaugaa

SEQ ID NO: 3708209 - RNA, 16 nt, Human
uguaaugaaacaccuu

SEQ ID NO: 3708210 - RNA, 14 nt, Human
uguaaugaauaccu

SEQ ID NO: 3708211 - RNA, 20 nt, Human
uguaaugaaucuaagcagca

SEQ ID NO: 3708212 - RNA, 21 nt, Human
uguaaugaaucuaagcagcau

SEQ ID NO: 3708213 - RNA, 13 nt, Human
uguaaugaucaua

SEQ ID NO: 3708214 - RNA, 18 nt, Human
uguaaugcugcacuuccu

SEQ ID NO: 3708215 - RNA, 19 nt, Human
uguaaugcugcacuuccug

SEQ ID NO: 3708216 - RNA, 20 nt, Human
uguaaugcugcacuuccugu

SEQ ID NO: 3708217 - RNA, 20 nt, Human
uguaauggagcaucaagcca

SEQ ID NO: 3708218 - RNA, 14 nt, Human
uguaauguaacugc

SEQ ID NO: 3708219 - RNA, 18 nt, Human
uguaauguaacugcucuu

SEQ ID NO: 3708220 - RNA, 23 nt, Human
uguaauguaucaaauacauuuaa

SEQ ID NO: 3708221 - RNA, 13 nt, Human
uguaaugucacca

SEQ ID NO: 3708222 - RNA, 16 nt, Human
uguaaugucaccaccu

SEQ ID NO: 3708223 - RNA, 20 nt, Human
uguaaugucaccaccuuccc

SEQ ID NO: 3708224 - RNA, 20 nt, Human
uguaaugucuugagcucuau

SEQ ID NO: 3708225 - RNA, 23 nt, Human
uguaaugugugaaaaagaugcca

SEQ ID NO: 3708226 - RNA, 17 nt, Human
uguaauguuacugauca

SEQ ID NO: 3708227 - RNA, 14 nt, Human
uguaauguugugaa

SEQ ID NO: 3708228 - RNA, 15 nt, Human
uguaauguugugaau

SEQ ID NO: 3708229 - RNA, 19 nt, Human
uguaauguuuucuuugcaa

SEQ ID NO: 3708230 - RNA, 20 nt, Human
uguaauuaaaagcaaaucau

SEQ ID NO: 3708231 - RNA, 19 nt, Human
uguaauuaaguacuaugua

SEQ ID NO: 3708232 - RNA, 21 nt, Human
uguaauuagugccacuuaaug

SEQ ID NO: 3708233 - RNA, 13 nt, Human
uguaauuauaucu

SEQ ID NO: 3708234 - RNA, 15 nt, Human
uguaauuaugauuug

SEQ ID NO: 3708235 - RNA, 14 nt, Human
uguaauuauuguga

SEQ ID NO: 3708236 - RNA, 19 nt, Human
uguaauucagguuuuuccu

SEQ ID NO: 3708237 - RNA, 14 nt, Human
uguaauucuaaaug

SEQ ID NO: 3708238 - RNA, 15 nt, Human
uguaauucuaaauga

SEQ ID NO: 3708239 - RNA, 18 nt, Human
uguaauugcuuacauuuu

SEQ ID NO: 3708240 - RNA, 23 nt, Human
uguaauugcuuacauuuuuacaa

SEQ ID NO: 3708241 - RNA, 16 nt, Human
uguaauugcuuuuuua

SEQ ID NO: 3708242 - RNA, 16 nt, Human
uguaauuguuccuuuu

SEQ ID NO: 3708243 - RNA, 16 nt, Human
uguaauuguuguuugu

SEQ ID NO: 3708244 - RNA, 17 nt, Human
uguaauuguuguuugua

SEQ ID NO: 3708245 - RNA, 20 nt, Human
uguaauuguuguuuguaugu

SEQ ID NO: 3708246 - RNA, 16 nt, Human
uguaauuuaaacaggc

SEQ ID NO: 3708247 - RNA, 20 nt, Human
uguaauuuaaacaggcccag

SEQ ID NO: 3708248 - RNA, 16 nt, Human
uguaauuuaaaugaaa

SEQ ID NO: 3708249 - RNA, 23 nt, Human
uguaauuuaggguacuaaauuua

SEQ ID NO: 3708250 - RNA, 16 nt, Human
uguaauuuauaaaauu

SEQ ID NO: 3708251 - RNA, 14 nt, Human
uguaauuuucuuga

SEQ ID NO: 3708252 - RNA, 16 nt, Human
uguaauuuuguguaag

SEQ ID NO: 3708253 - RNA, 23 nt, Human
uguaauuuuguucuaguuuucag

SEQ ID NO: 3708254 - RNA, 22 nt, Human
uguaauuuuucagcucucugua

SEQ ID NO: 3708255 - RNA, 16 nt, Human
uguaauuuuucuguau

SEQ ID NO: 3708256 - RNA, 20 nt, Human
uguaauuuuuuuaucgucac

SEQ ID NO: 3708257 - RNA, 21 nt, Human
uguacaaaaaaaucuuccaau

SEQ ID NO: 3708258 - RNA, 11 nt, Human
uguacaaaagc

SEQ ID NO: 3708259 - RNA, 13 nt, Human
uguacaaaagcaa

SEQ ID NO: 3708260 - RNA, 15 nt, Human
uguacaaaagcaaug

SEQ ID NO: 3708261 - RNA, 17 nt, Human
uguacaaaauaaacaaa

SEQ ID NO: 3708262 - RNA, 15 nt, Human
uguacaaaguauuaa

SEQ ID NO: 3708263 - RNA, 15 nt, Human
uguacaaauauaaga

SEQ ID NO: 3708264 - RNA, 15 nt, Human
uguacaacuuaaguu

SEQ ID NO: 3708265 - RNA, 16 nt, Human
uguacaagaugaagga

SEQ ID NO: 3708266 - RNA, 16 nt, Human
uguacaaggacagccc

SEQ ID NO: 3708267 - RNA, 20 nt, Human
uguacaaggacagccccucc

SEQ ID NO: 3708268 - RNA, 23 nt, Human
uguacaaggacagccccuccucc

SEQ ID NO: 3708269 - RNA, 17 nt, Human
uguacaauauuuaaaau

SEQ ID NO: 3708270 - RNA, 18 nt, Human
uguacaauauuuuaagca

SEQ ID NO: 3708271 - RNA, 19 nt, Human
uguacaauauuuuaagcau

SEQ ID NO: 3708272 - RNA, 15 nt, Human
uguacacaacucacu

SEQ ID NO: 3708273 - RNA, 22 nt, Human
uguacacacugguacuuagagu

SEQ ID NO: 3708274 - RNA, 22 nt, Human
uguacacaugggaguuuagugu

SEQ ID NO: 3708275 - RNA, 13 nt, Human
uguacacgggacu

SEQ ID NO: 3708276 - RNA, 14 nt, Human
uguacacgggacug

SEQ ID NO: 3708277 - RNA, 15 nt, Human
uguacacgggacuga

SEQ ID NO: 3708278 - RNA, 20 nt, Human
uguacacgggacugacgcaa

SEQ ID NO: 3708279 - RNA, 16 nt, Human
uguacacguguccugu

SEQ ID NO: 3708280 - RNA, 20 nt, Human
uguacacugaauauuuauau

SEQ ID NO: 3708281 - RNA, 23 nt, Human
uguacagaauauuucuauugaau

SEQ ID NO: 3708282 - RNA, 15 nt, Human
uguacagacagagaa

SEQ ID NO: 3708283 - RNA, 22 nt, Human
uguacagagaacuaacacuauu

SEQ ID NO: 3708284 - RNA, 22 nt, Human
uguacagagccguaaaaacuga

SEQ ID NO: 3708285 - RNA, 21 nt, Human
uguacagaguggaauaagaca

SEQ ID NO: 3708286 - RNA, 14 nt, Human
uguacagauucuuu

SEQ ID NO: 3708287 - RNA, 23 nt, Human
uguacagcaaggagauuuacaac

SEQ ID NO: 3708288 - RNA, 17 nt, Human
uguacagcguuuuaaaa

SEQ ID NO: 3708289 - RNA, 14 nt, Human
uguacaguagauuu

SEQ ID NO: 3708290 - RNA, 17 nt, Human
uguacaguagauuuucc

SEQ ID NO: 3708291 - RNA, 12 nt, Human
uguacagucugu

SEQ ID NO: 3708292 - RNA, 15 nt, Human
uguacagucugucau

SEQ ID NO: 3708293 - RNA, 16 nt, Human
uguacagucugucaug

SEQ ID NO: 3708294 - RNA, 14 nt, Human
uguacagucuugua

SEQ ID NO: 3708295 - RNA, 15 nt, Human
uguacagucuuguau

SEQ ID NO: 3708296 - RNA, 17 nt, Human
uguacagucuuguauua

SEQ ID NO: 3708297 - RNA, 19 nt, Human
uguacaguguguaaagugu

SEQ ID NO: 3708298 - RNA, 22 nt, Human
uguacaguuaucuaaguuaauu

SEQ ID NO: 3708299 - RNA, 14 nt, Human
uguacaguuuguuu

SEQ ID NO: 3708300 - RNA, 12 nt, Human
uguacaguuuuu

SEQ ID NO: 3708301 - RNA, 13 nt, Human
uguacauaaaaga

SEQ ID NO: 3708302 - RNA, 16 nt, Human
uguacauaaaagaauu

SEQ ID NO: 3708303 - RNA, 14 nt, Human
uguacauaaacaau

SEQ ID NO: 3708304 - RNA, 23 nt, Human
uguacauaaauugcauaaagcau

SEQ ID NO: 3708305 - RNA, 14 nt, Human
uguacauaacugaa

SEQ ID NO: 3708306 - RNA, 18 nt, Human
uguacauaacugaaaaug

SEQ ID NO: 3708307 - RNA, 19 nt, Human
uguacauaacugaaaaugu

SEQ ID NO: 3708308 - RNA, 22 nt, Human
uguacauaaugcuuaauuucua

SEQ ID NO: 3708309 - RNA, 18 nt, Human
uguacauacgauuuaagg

SEQ ID NO: 3708310 - RNA, 15 nt, Human
uguacauacuuuuug

SEQ ID NO: 3708311 - RNA, 16 nt, Human
uguacauagccuauau

SEQ ID NO: 3708312 - RNA, 23 nt, Human
uguacauagccuauauuuacagu

SEQ ID NO: 3708313 - RNA, 18 nt, Human
uguacauaguuauuuauu

SEQ ID NO: 3708314 - RNA, 14 nt, Human
uguacauauaagug

SEQ ID NO: 3708315 - RNA, 15 nt, Human
uguacauauguaaaa

SEQ ID NO: 3708316 - RNA, 17 nt, Human
uguacauaugugcugga

SEQ ID NO: 3708317 - RNA, 20 nt, Human
uguacauauuugagacuagu

SEQ ID NO: 3708318 - RNA, 18 nt, Human
uguacauauuuguggaau

SEQ ID NO: 3708319 - RNA, 20 nt, Human
uguacaucccauguaacaga

SEQ ID NO: 3708320 - RNA, 22 nt, Human
uguacaucccauguaacagaaa

SEQ ID NO: 3708321 - RNA, 14 nt, Human
uguacaucuauuuu

SEQ ID NO: 3708322 - RNA, 18 nt, Human
uguacaucuauuuuggau

SEQ ID NO: 3708323 - RNA, 21 nt, Human
uguacaucuauuuuggauugu

SEQ ID NO: 3708324 - RNA, 12 nt, Human
uuaaaaauggaa

SEQ ID NO: 3708325 - RNA, 17 nt, Human
uuaaaaaugguaucaaa

SEQ ID NO: 3708326 - RNA, 22 nt, Human
uuaaaaaugguaucaaaauuac

SEQ ID NO: 3708327 - RNA, 23 nt, Human
uuaaaaaugguaucaaaauuaca

SEQ ID NO: 3708328 - RNA, 22 nt, Human
uuaaaaaugguggcuucagcuc

SEQ ID NO: 3708329 - RNA, 16 nt, Human
uuaaaaauguaaauau

SEQ ID NO: 3708330 - RNA, 17 nt, Human
uuaaaaauguaaauauu

SEQ ID NO: 3708331 - RNA, 19 nt, Human
uuaaaaauguaaauauucu

SEQ ID NO: 3708332 - RNA, 20 nt, Human
uuaaaaauguuuuuucaugu

SEQ ID NO: 3708333 - RNA, 24 nt, Human
uuaaaaauguuuuuucauguguuu

SEQ ID NO: 3708334 - RNA, 20 nt, Human
uuaaaaauucuugaaagaau

SEQ ID NO: 3708335 - RNA, 22 nt, Human
uuaaaaauuggcuaguugaauc

SEQ ID NO: 3708336 - RNA, 14 nt, Human
uuaaaaauuguuau

SEQ ID NO: 3708337 - RNA, 21 nt, Human
uuaaaacacguuuuaaggacu

SEQ ID NO: 3708338 - RNA, 17 nt, Human
uuaaaacacuucugucc

SEQ ID NO: 3708339 - RNA, 18 nt, Human
uuaaaacacuuucaaaac

SEQ ID NO: 3708340 - RNA, 23 nt, Human
uuaaaacaguauuuauuuuguaa

SEQ ID NO: 3708341 - RNA, 13 nt, Human
uuaaaacauguaa

SEQ ID NO: 3708342 - RNA, 14 nt, Human
uuaaaacauguaau

SEQ ID NO: 3708343 - RNA, 16 nt, Human
uuaaaacuaaauuuca

SEQ ID NO: 3708344 - RNA, 20 nt, Human
uuaaaacuaggcauuuguaa

SEQ ID NO: 3708345 - RNA, 12 nt, Human
uuaaaacuccug

SEQ ID NO: 3708346 - RNA, 16 nt, Human
uuaaaacugaagucug

SEQ ID NO: 3708347 - RNA, 17 nt, Human
uuaaaacugaagucuga

SEQ ID NO: 3708348 - RNA, 19 nt, Human
uuaaaacugaagucugaaa

SEQ ID NO: 3708349 - RNA, 12 nt, Human
uuaaaacugcuu

SEQ ID NO: 3708350 - RNA, 15 nt, Human
uuaaaacuucuuaaa

SEQ ID NO: 3708351 - RNA, 19 nt, Human
uuaaaacuucuuaaauauc

SEQ ID NO: 3708352 - RNA, 15 nt, Human
uuaaaacuuguaauu

SEQ ID NO: 3708353 - RNA, 15 nt, Human
uuaaaacuuugaagu

SEQ ID NO: 3708354 - RNA, 12 nt, Human
uuaaaagaauau

SEQ ID NO: 3708355 - RNA, 23 nt, Human
uuaaaagaauaucuggcaaauua

SEQ ID NO: 3708356 - RNA, 21 nt, Human
uuaaaagaauauuuuaacuuc

SEQ ID NO: 3708357 - RNA, 22 nt, Human
uuaaaagaauauuuuaacuucc

SEQ ID NO: 3708358 - RNA, 12 nt, Human
uuaaaagaauga

SEQ ID NO: 3708359 - RNA, 14 nt, Human
uuaaaagaaugacu

SEQ ID NO: 3708360 - RNA, 15 nt, Human
uuaaaagaaugacua

SEQ ID NO: 3708361 - RNA, 19 nt, Human
uuaaaagaaugauuaugaa

SEQ ID NO: 3708362 - RNA, 13 nt, Human
uuaaaagaauggg

SEQ ID NO: 3708363 - RNA, 17 nt, Human
uuaaaagauucauuuuu

SEQ ID NO: 3708364 - RNA, 21 nt, Human
uuaaaagauucauuuuuaauc

SEQ ID NO: 3708365 - RNA, 19 nt, Human
uuaaaagccaucauguaaa

SEQ ID NO: 3708366 - RNA, 21 nt, Human
uuaaaagccaucauguaaauu

SEQ ID NO: 3708367 - RNA, 16 nt, Human
uuaaaagcuaucuuca

SEQ ID NO: 3708368 - RNA, 19 nt, Human
uuaaaagcuaucuucaugu

SEQ ID NO: 3708369 - RNA, 15 nt, Human
uuaaaaggauaguau

SEQ ID NO: 3708370 - RNA, 22 nt, Human
uuaaaaggauuuuuaucuuucg

SEQ ID NO: 3708371 - RNA, 15 nt, Human
uuaaaaguaaaaugu

SEQ ID NO: 3708372 - RNA, 20 nt, Human
uuaaaagucacaauguucuu

SEQ ID NO: 3708373 - RNA, 17 nt, Human
uuaaaaguuucaaugug

SEQ ID NO: 3708374 - RNA, 16 nt, Human
uuaaaauaaacuuucu

SEQ ID NO: 3708375 - RNA, 15 nt, Human
uuaaaauaagucuga

SEQ ID NO: 3708376 - RNA, 18 nt, Human
uuaaaauacacacucaaa

SEQ ID NO: 3708377 - RNA, 11 nt, Human
uuaaaauacug

SEQ ID NO: 3708378 - RNA, 13 nt, Human
uuaaaauacugua

SEQ ID NO: 3708379 - RNA, 17 nt, Human
uuaaaauagaaauuuug

SEQ ID NO: 3708380 - RNA, 21 nt, Human
uuaaaauagaaauuuuguaag

SEQ ID NO: 3708381 - RNA, 12 nt, Human
uuaaaauauauu

SEQ ID NO: 3708382 - RNA, 16 nt, Human
uuaaaauaugcacuaa

SEQ ID NO: 3708383 - RNA, 19 nt, Human
uuaaaauaugcacuaaguc

SEQ ID NO: 3708384 - RNA, 16 nt, Human
uuaaaauauuccugca

SEQ ID NO: 3708385 - RNA, 18 nt, Human
uuaaaaucuauucugugu

SEQ ID NO: 3708386 - RNA, 18 nt, Human
uuaaaaucugagggaaau

SEQ ID NO: 3708387 - RNA, 11 nt, Human
uuaaaaucuua

SEQ ID NO: 3708388 - RNA, 14 nt, Human
uuaaaaucuuaaac

SEQ ID NO: 3708389 - RNA, 15 nt, Human
uuaaaaucuuauuaa

SEQ ID NO: 3708390 - RNA, 16 nt, Human
uuaaaaucuuauuaaa

SEQ ID NO: 3708391 - RNA, 20 nt, Human
uuaaaaucuuauuaaaguuu

SEQ ID NO: 3708392 - RNA, 19 nt, Human
uuaaaaugauugaaaauaa

SEQ ID NO: 3708393 - RNA, 11 nt, Human
uuaaaauggaa

SEQ ID NO: 3708394 - RNA, 21 nt, Human
uuaaaauggugcuuaaguucc

SEQ ID NO: 3708395 - RNA, 19 nt, Human
uuaaaaugguuuguccuga

SEQ ID NO: 3708396 - RNA, 21 nt, Human
uuaaaaugguuuguccugaug

SEQ ID NO: 3708397 - RNA, 17 nt, Human
uuaaaauguaagauuau

SEQ ID NO: 3708398 - RNA, 13 nt, Human
uuaaaauguaauu

SEQ ID NO: 3708399 - RNA, 19 nt, Human
uuaaaauguacauguauua

SEQ ID NO: 3708400 - RNA, 21 nt, Human
uuaaaauguacauguauuaaa

SEQ ID NO: 3708401 - RNA, 19 nt, Human
uuaaaauguaugcauguug

SEQ ID NO: 3708402 - RNA, 20 nt, Human
uuaaaauuaugaaucugauu

SEQ ID NO: 3708403 - RNA, 13 nt, Human
uuaaaauucaugu

SEQ ID NO: 3708404 - RNA, 14 nt, Human
uuaaaauucugaau

SEQ ID NO: 3708405 - RNA, 15 nt, Human
uuaaaauucugaauu

SEQ ID NO: 3708406 - RNA, 18 nt, Human
uuaaaauucugaauuuug

SEQ ID NO: 3708407 - RNA, 15 nt, Human
uuaaaauuuauugcu

SEQ ID NO: 3708408 - RNA, 13 nt, Human
uuaaaauuucuua

SEQ ID NO: 3708409 - RNA, 22 nt, Human
uuaaaauuucuuagaaaacaau

SEQ ID NO: 3708410 - RNA, 14 nt, Human
uuaaaauuugaaac

SEQ ID NO: 3708411 - RNA, 12 nt, Human
uuaaaauuuguu

SEQ ID NO: 3708412 - RNA, 18 nt, Human
uuaaaauuuuuuuagaaa

SEQ ID NO: 3708413 - RNA, 16 nt, Human
uuaaacaauuuauuuu

SEQ ID NO: 3708414 - RNA, 22 nt, Human
uuaaacacacagauacacacac

SEQ ID NO: 3708415 - RNA, 14 nt, Human
uuaaacacauuaaa

SEQ ID NO: 3708416 - RNA, 14 nt, Human
uuaaacaccccuca

SEQ ID NO: 3708417 - RNA, 13 nt, Human
uuaaacaccuccu

SEQ ID NO: 3708418 - RNA, 11 nt, Human
uuaaacagaug

SEQ ID NO: 3708419 - RNA, 14 nt, Human
uuaaacagcagugu

SEQ ID NO: 3708420 - RNA, 19 nt, Human
uuaaacagccuauuccuga

SEQ ID NO: 3708421 - RNA, 17 nt, Human
uuaaacaguugcacagc

SEQ ID NO: 3708422 - RNA, 18 nt, Human
uuaaacaguugcacagca

SEQ ID NO: 3708423 - RNA, 19 nt, Human
uuaaacaguugcacagcau

SEQ ID NO: 3708424 - RNA, 22 nt, Human
uuaaacauauccaaguuugaau

SEQ ID NO: 3708425 - RNA, 19 nt, Human
uuaaacaucaaucuuuaaa

SEQ ID NO: 3708426 - RNA, 10 nt, Human
uuaaacauua

SEQ ID NO: 3708427 - RNA, 19 nt, Human
uuaaacauuaauagcagcc

SEQ ID NO: 3708428 - RNA, 18 nt, Human
uuaaaccaucucccuggu

SEQ ID NO: 3708429 - RNA, 21 nt, Human
uuaaaccaucucccuggugcu

SEQ ID NO: 3708430 - RNA, 17 nt, Human
uuaaaccaugggauaaa

SEQ ID NO: 3708431 - RNA, 13 nt, Human
uuaaaccuuuuau

SEQ ID NO: 3708432 - RNA, 14 nt, Human
uuaaaccuuuuauu

SEQ ID NO: 3708433 - RNA, 19 nt, Human
uuaaacgaagaguucccuu

SEQ ID NO: 3708434 - RNA, 13 nt, Human
uuaaacggauuau

SEQ ID NO: 3708435 - RNA, 23 nt, Human
uuaaacggauuauuuuuucagac

SEQ ID NO: 3708436 - RNA, 14 nt, Human
uuaaacuaaaugug

SEQ ID NO: 3708437 - RNA, 14 nt, Human
uuaaacuagaugac

SEQ ID NO: 3708438 - RNA, 18 nt, Human
uuaaacuagaugaccuca

SEQ ID NO: 3708439 - RNA, 21 nt, Human
uuaaacuagcauaucugccuu

SEQ ID NO: 3708440 - RNA, 22 nt, Human
uuaaacuaggagaaccaaaucu

SEQ ID NO: 3708441 - RNA, 14 nt, Human
uuaaacuaucuugu

SEQ ID NO: 3708442 - RNA, 14 nt, Human
uuaaacucaagaca

SEQ ID NO: 3708443 - RNA, 16 nt, Human
uuaaacucaagacaau

SEQ ID NO: 3708444 - RNA, 22 nt, Human
uuaaacucgagauacagcuuuu

SEQ ID NO: 3708445 - RNA, 13 nt, Human
uuaaacucugaau

SEQ ID NO: 3708446 - RNA, 13 nt, Human
uuaaacugguauu

SEQ ID NO: 3708447 - RNA, 15 nt, Human
uuaaacuguacagug

SEQ ID NO: 3708448 - RNA, 16 nt, Human
uuaaacuguacagugu

SEQ ID NO: 3708449 - RNA, 21 nt, Human
uuaaacuguguggacugugau

SEQ ID NO: 3708450 - RNA, 18 nt, Human
uuaaacuguuagcacugu

SEQ ID NO: 3708451 - RNA, 21 nt, Human
uuaaacuguuagcacuguuga

SEQ ID NO: 3708452 - RNA, 16 nt, Human
uuaaacuuaaucuaaa

SEQ ID NO: 3708453 - RNA, 18 nt, Human
uuaaacuuaaucuaaaug

SEQ ID NO: 3708454 - RNA, 20 nt, Human
uuaaacuuaaucuaaaugga

SEQ ID NO: 3708455 - RNA, 23 nt, Human
uuaaacuuauaaaucauauugau

SEQ ID NO: 3708456 - RNA, 16 nt, Human
uuaaacuuaugaaugu

SEQ ID NO: 3708457 - RNA, 14 nt, Human
uuaaacuucucuga

SEQ ID NO: 3708458 - RNA, 14 nt, Human
uuaaacuugugaau

SEQ ID NO: 3708459 - RNA, 15 nt, Human
uuaaacuuuuuuaac

SEQ ID NO: 3708460 - RNA, 16 nt, Human
uuaaagaaaaaaaugu

SEQ ID NO: 3708461 - RNA, 20 nt, Human
uuaaagaaaaaaauugaaau

SEQ ID NO: 3708462 - RNA, 22 nt, Human
uuaaagaaaaaaauugaaaugu

SEQ ID NO: 3708463 - RNA, 17 nt, Human
uuaaagaaaagaugaaa

SEQ ID NO: 3708464 - RNA, 23 nt, Human
uuaaagaaaauaaaauuaagaau

SEQ ID NO: 3708465 - RNA, 14 nt, Human
uuaaagaaacagcu

SEQ ID NO: 3708466 - RNA, 17 nt, Human
uuaaagaaacaugguuu

SEQ ID NO: 3708467 - RNA, 18 nt, Human
uuaaagaauaugaaacau

SEQ ID NO: 3708468 - RNA, 20 nt, Human
uuaaagaauaugacuuuuua

SEQ ID NO: 3708469 - RNA, 17 nt, Human
uuaaagaauucaaauuu

SEQ ID NO: 3708470 - RNA, 20 nt, Human
uuaaagacccuccuauucua

SEQ ID NO: 3708471 - RNA, 14 nt, Human
uuaaagagaaugag

SEQ ID NO: 3708472 - RNA, 14 nt, Human
uuaaagagagguua

SEQ ID NO: 3708473 - RNA, 20 nt, Human
uuaaagagagguuauagagu

SEQ ID NO: 3708474 - RNA, 16 nt, Human
uguacaugaaaacaca

SEQ ID NO: 3708475 - RNA, 17 nt, Human
uguacaugaaaacacau

SEQ ID NO: 3708476 - RNA, 19 nt, Human
uguacaugaaaacacauuu

SEQ ID NO: 3708477 - RNA, 16 nt, Human
uguacaugagaaggaa

SEQ ID NO: 3708478 - RNA, 14 nt, Human
uguacaugcauuca

SEQ ID NO: 3708479 - RNA, 20 nt, Human
uguacauggaauaacaugua

SEQ ID NO: 3708480 - RNA, 19 nt, Human
uguacauggcagaguuugu

SEQ ID NO: 3708481 - RNA, 13 nt, Human
uguacauguauua

SEQ ID NO: 3708482 - RNA, 21 nt, Human
uguacauguauuaaauuacau

SEQ ID NO: 3708483 - RNA, 11 nt, Human
uguacaugugu

SEQ ID NO: 3708484 - RNA, 20 nt, Human
uguacauguguagccugugc

SEQ ID NO: 3708485 - RNA, 21 nt, Human
uguacauguguagccugugca

SEQ ID NO: 3708486 - RNA, 21 nt, Human
uguacauguucgggugugggu

SEQ ID NO: 3708487 - RNA, 15 nt, Human
uguacauuuaaaauu

SEQ ID NO: 3708488 - RNA, 21 nt, Human
uguacauuucuauaaauagau

SEQ ID NO: 3708489 - RNA, 22 nt, Human
uguacauuuuguuguaaaaaga

SEQ ID NO: 3708490 - RNA, 23 nt, Human
uguaccaaaauucaucugucuau

SEQ ID NO: 3708491 - RNA, 16 nt, Human
uguaccaagugaaauu

SEQ ID NO: 3708492 - RNA, 16 nt, Human
uguaccacuuuugcaa

SEQ ID NO: 3708493 - RNA, 20 nt, Human
uguaccagcccagauguuuu

SEQ ID NO: 3708494 - RNA, 21 nt, Human
uguaccaggaaaggauuuuau

SEQ ID NO: 3708495 - RNA, 15 nt, Human
uguaccaguuaauuu

SEQ ID NO: 3708496 - RNA, 22 nt, Human
uguaccaguuaauuuuuccaac

SEQ ID NO: 3708497 - RNA, 17 nt, Human
uguaccauauagcaaaa

SEQ ID NO: 3708498 - RNA, 21 nt, Human
uguaccaugaaacaaagcugc

SEQ ID NO: 3708499 - RNA, 12 nt, Human
uguaccauguac

SEQ ID NO: 3708500 - RNA, 14 nt, Human
uguaccauuaaaau

SEQ ID NO: 3708501 - RNA, 14 nt, Human
uguaccauuugccu

SEQ ID NO: 3708502 - RNA, 14 nt, Human
uguaccccccaacc

SEQ ID NO: 3708503 - RNA, 17 nt, Human
uguacccccgcccaggc

SEQ ID NO: 3708504 - RNA, 19 nt, Human
uguacccccgcccaggcug

SEQ ID NO: 3708505 - RNA, 18 nt, Human
uguaccgcgucuacccug

SEQ ID NO: 3708506 - RNA, 20 nt, Human
uguaccgcgucuacccuggg

SEQ ID NO: 3708507 - RNA, 21 nt, Human
uguaccgggcuggccugugcc

SEQ ID NO: 3708508 - RNA, 22 nt, Human
uguaccguaggcuuuguauuca

SEQ ID NO: 3708509 - RNA, 17 nt, Human
uguaccuccccugccuu

SEQ ID NO: 3708510 - RNA, 20 nt, Human
uguaccuccucucaguguuu

SEQ ID NO: 3708511 - RNA, 21 nt, Human
uguaccucuuuuagucauuuu

SEQ ID NO: 3708512 - RNA, 18 nt, Human
uguaccugcccccaaucc

SEQ ID NO: 3708513 - RNA, 17 nt, Human
uguaccuggugaccccu

SEQ ID NO: 3708514 - RNA, 22 nt, Human
uguacgacgucagauguuuaaa

SEQ ID NO: 3708515 - RNA, 17 nt, Human
uguacguccagccugcc

SEQ ID NO: 3708516 - RNA, 15 nt, Human
uguacgucugacagg

SEQ ID NO: 3708517 - RNA, 12 nt, Human
uguacguggaga

SEQ ID NO: 3708518 - RNA, 14 nt, Human
uguacguggagagg

SEQ ID NO: 3708519 - RNA, 23 nt, Human
uguacguggccauguaugaagcc

SEQ ID NO: 3708520 - RNA, 19 nt, Human
uguacguuuguaugugugu

SEQ ID NO: 3708521 - RNA, 18 nt, Human
uguacuaggauacugcug

SEQ ID NO: 3708522 - RNA, 16 nt, Human
uguacuaguacugugu

SEQ ID NO: 3708523 - RNA, 17 nt, Human
uguacuaguacugugua

SEQ ID NO: 3708524 - RNA, 15 nt, Human
uguacuagucugugu

SEQ ID NO: 3708525 - RNA, 19 nt, Human
uguacuagucuguguggga

SEQ ID NO: 3708526 - RNA, 13 nt, Human
uguacuaguuuua

SEQ ID NO: 3708527 - RNA, 18 nt, Human
uguacuauuuaacugacu

SEQ ID NO: 3708528 - RNA, 13 nt, Human
uguacucaauuuu

SEQ ID NO: 3708529 - RNA, 13 nt, Human
uguacuccuccca

SEQ ID NO: 3708530 - RNA, 20 nt, Human
uguacucgcuugugcagaaa

SEQ ID NO: 3708531 - RNA, 13 nt, Human
uguacucuuccga

SEQ ID NO: 3708532 - RNA, 15 nt, Human
uguacugauucaauu

SEQ ID NO: 3708533 - RNA, 19 nt, Human
uguacugcauaugaaagga

SEQ ID NO: 3708534 - RNA, 13 nt, Human
uguacugccugcu

SEQ ID NO: 3708535 - RNA, 15 nt, Human
uguacugcucaggcu

SEQ ID NO: 3708536 - RNA, 12 nt, Human
uguacugggggu

SEQ ID NO: 3708537 - RNA, 15 nt, Human
uguacuguacuaauu

SEQ ID NO: 3708538 - RNA, 16 nt, Human
uguacuguaguuuuuc

SEQ ID NO: 3708539 - RNA, 23 nt, Human
uguacuguauagacaguuuguaa

SEQ ID NO: 3708540 - RNA, 17 nt, Human
uguacuguaugugauga

SEQ ID NO: 3708541 - RNA, 15 nt, Human
uguacuguucugugu

SEQ ID NO: 3708542 - RNA, 16 nt, Human
uguacuguucuguguc

SEQ ID NO: 3708543 - RNA, 19 nt, Human
uguacuguuuaauguucug

SEQ ID NO: 3708544 - RNA, 15 nt, Human
uguacuuaacuauuc

SEQ ID NO: 3708545 - RNA, 14 nt, Human
uguacuucaaguua

SEQ ID NO: 3708546 - RNA, 13 nt, Human
uguacuucacugu

SEQ ID NO: 3708547 - RNA, 23 nt, Human
uguacuugcccugaccaugcauu

SEQ ID NO: 3708548 - RNA, 15 nt, Human
uguacuugcucuuga

SEQ ID NO: 3708549 - RNA, 21 nt, Human
uguacuuuaucaugaaugcuu

SEQ ID NO: 3708550 - RNA, 12 nt, Human
uguacuuucugu

SEQ ID NO: 3708551 - RNA, 19 nt, Human
uguacuuucuguuaaaaug

SEQ ID NO: 3708552 - RNA, 20 nt, Human
uguacuuugauucacauguu

SEQ ID NO: 3708553 - RNA, 18 nt, Human
uguacuuugcuugcucau

SEQ ID NO: 3708554 - RNA, 23 nt, Human
uguacuuuuauuuuacacagaaa

SEQ ID NO: 3708555 - RNA, 13 nt, Human
uguacuuuucauu

SEQ ID NO: 3708556 - RNA, 23 nt, Human
uguagaaaauuuguuauuuugca

SEQ ID NO: 3708557 - RNA, 21 nt, Human
uguagaaaugguuguauuaga

SEQ ID NO: 3708558 - RNA, 18 nt, Human
uguagaacacuaauucau

SEQ ID NO: 3708559 - RNA, 17 nt, Human
uguagaaccuaauucaa

SEQ ID NO: 3708560 - RNA, 19 nt, Human
uguagaacucacucugggc

SEQ ID NO: 3708561 - RNA, 17 nt, Human
uguagaaggagacagag

SEQ ID NO: 3708562 - RNA, 21 nt, Human
uguagaaggagacagagcugg

SEQ ID NO: 3708563 - RNA, 18 nt, Human
uguagaaugauuucaugc

SEQ ID NO: 3708564 - RNA, 16 nt, Human
uguagacaaaguacau

SEQ ID NO: 3708565 - RNA, 19 nt, Human
uguagacaaaguacauucu

SEQ ID NO: 3708566 - RNA, 17 nt, Human
uguagacaguuggguuu

SEQ ID NO: 3708567 - RNA, 21 nt, Human
uguagaccuagggaggaccuu

SEQ ID NO: 3708568 - RNA, 19 nt, Human
uguagacuauauacaugug

SEQ ID NO: 3708569 - RNA, 21 nt, Human
uguagacuauauacaugugug

SEQ ID NO: 3708570 - RNA, 23 nt, Human
uguagagaacacgcguauuuaca

SEQ ID NO: 3708571 - RNA, 14 nt, Human
uguagagcuucugg

SEQ ID NO: 3708572 - RNA, 14 nt, Human
uguagagggcccug

SEQ ID NO: 3708573 - RNA, 14 nt, Human
uguagagugggagc

SEQ ID NO: 3708574 - RNA, 13 nt, Human
uguagaguuaaga

SEQ ID NO: 3708575 - RNA, 19 nt, Human
uguagaguuaagaagcugu

SEQ ID NO: 3708576 - RNA, 13 nt, Human
uguagauaagugu

SEQ ID NO: 3708577 - RNA, 19 nt, Human
uguagauacaaucagcugc

SEQ ID NO: 3708578 - RNA, 20 nt, Human
uguagaugaaaaagcaugua

SEQ ID NO: 3708579 - RNA, 23 nt, Human
uguagauggaaaaacuugugcua

SEQ ID NO: 3708580 - RNA, 21 nt, Human
uguagauuaaggugaugugau

SEQ ID NO: 3708581 - RNA, 22 nt, Human
uguagauugauuguauuguuga

SEQ ID NO: 3708582 - RNA, 15 nt, Human
uguagauuuauuuca

SEQ ID NO: 3708583 - RNA, 22 nt, Human
uguagcaaaauucuuaaguaug

SEQ ID NO: 3708584 - RNA, 15 nt, Human
uguagcaaacccugu

SEQ ID NO: 3708585 - RNA, 22 nt, Human
uguagcaaacccugucaaacau

SEQ ID NO: 3708586 - RNA, 17 nt, Human
uguagcacugacagauu

SEQ ID NO: 3708587 - RNA, 15 nt, Human
uguagcacuuacugg

SEQ ID NO: 3708588 - RNA, 19 nt, Human
uguagcacuuacugguagg

SEQ ID NO: 3708589 - RNA, 17 nt, Human
uguagcauuucuugaug

SEQ ID NO: 3708590 - RNA, 16 nt, Human
uguagccacaccagga

SEQ ID NO: 3708591 - RNA, 22 nt, Human
uguagccagguauggcucugca

SEQ ID NO: 3708592 - RNA, 14 nt, Human
uguagccagguccc

SEQ ID NO: 3708593 - RNA, 11 nt, Human
uguagccaugg

SEQ ID NO: 3708594 - RNA, 16 nt, Human
uguagccaugggacca

SEQ ID NO: 3708595 - RNA, 14 nt, Human
uguagcccacacuu

SEQ ID NO: 3708596 - RNA, 16 nt, Human
uguagcccacucugcu

SEQ ID NO: 3708597 - RNA, 16 nt, Human
uguagccccagugaca

SEQ ID NO: 3708598 - RNA, 13 nt, Human
uguagccugugca

SEQ ID NO: 3708599 - RNA, 15 nt, Human
uguagccuuccucca

SEQ ID NO: 3708600 - RNA, 12 nt, Human
uguagccuuuuu

SEQ ID NO: 3708601 - RNA, 20 nt, Human
uguagcguguuuacaugugu

SEQ ID NO: 3708602 - RNA, 15 nt, Human
uguagcuacagagaa

SEQ ID NO: 3708603 - RNA, 19 nt, Human
uguagcuacagagaaacca

SEQ ID NO: 3708604 - RNA, 23 nt, Human
uguagcuacagagaaaccagcuu

SEQ ID NO: 3708605 - RNA, 11 nt, Human
uguagcuccuc

SEQ ID NO: 3708606 - RNA, 18 nt, Human
uguagcuccuccccugga

SEQ ID NO: 3708607 - RNA, 17 nt, Human
uguagcucuaaaaucug

SEQ ID NO: 3708608 - RNA, 20 nt, Human
uguagcucuuugucagggag

SEQ ID NO: 3708609 - RNA, 15 nt, Human
uguagcugaggaggc

SEQ ID NO: 3708610 - RNA, 14 nt, Human
uguagcugguuucc

SEQ ID NO: 3708611 - RNA, 15 nt, Human
uguagcugugaccug

SEQ ID NO: 3708612 - RNA, 21 nt, Human
uguagcugugaccugcugagc

SEQ ID NO: 3708613 - RNA, 22 nt, Human
uguagcugugaccugcugagcu

SEQ ID NO: 3708614 - RNA, 19 nt, Human
uguagcuucagucauuaaa

SEQ ID NO: 3708615 - RNA, 15 nt, Human
uguagcuuuaucaaa

SEQ ID NO: 3708616 - RNA, 23 nt, Human
uguagcuuuggaaguuuagcucu

SEQ ID NO: 3708617 - RNA, 16 nt, Human
uguagcuuuucaccuu

SEQ ID NO: 3708618 - RNA, 22 nt, Human
uguaggaagguacuguaugauc

SEQ ID NO: 3708619 - RNA, 20 nt, Human
uguaggaagguuaauguuca

SEQ ID NO: 3708620 - RNA, 21 nt, Human
uguaggaauucuuuuggggaa

SEQ ID NO: 3708621 - RNA, 13 nt, Human
uguaggagaaacu

SEQ ID NO: 3708622 - RNA, 18 nt, Human
uguaggagaaacucccau

SEQ ID NO: 3708623 - RNA, 14 nt, Human
uaacaggggcuggu

SEQ ID NO: 3708624 - RNA, 16 nt, Human
uaacaggucuccucuu

SEQ ID NO: 3708625 - RNA, 21 nt, Human
uaacaguaugugggauauuga

SEQ ID NO: 3708626 - RNA, 19 nt, Human
uaacagucuuacugcaggc

SEQ ID NO: 3708627 - RNA, 14 nt, Human
uaacagugccauug

SEQ ID NO: 3708628 - RNA, 19 nt, Human
uaacagugccauugucuuu

SEQ ID NO: 3708629 - RNA, 22 nt, Human
uaacagugccauugucuuuaua

SEQ ID NO: 3708630 - RNA, 14 nt, Human
uaacaguucauguu

SEQ ID NO: 3708631 - RNA, 16 nt, Human
uaacaguuuuccauga

SEQ ID NO: 3708632 - RNA, 20 nt, Human
uaacaguuuuccaugaaaac

SEQ ID NO: 3708633 - RNA, 21 nt, Human
uaacaguuuuccaugaaaacg

SEQ ID NO: 3708634 - RNA, 19 nt, Human
uaacaguuuuguguaacuc

SEQ ID NO: 3708635 - RNA, 16 nt, Human
uaacauaaaucuguga

SEQ ID NO: 3708636 - RNA, 15 nt, Human
uaacauaagcuauuu

SEQ ID NO: 3708637 - RNA, 23 nt, Human
uaacauagaauugcaaucuauaa

SEQ ID NO: 3708638 - RNA, 13 nt, Human
uaacauauaauau

SEQ ID NO: 3708639 - RNA, 20 nt, Human
uaacauauaauauauguuuu

SEQ ID NO: 3708640 - RNA, 17 nt, Human
uaacauauguacauaaa

SEQ ID NO: 3708641 - RNA, 23 nt, Human
uaacauauuuacuaagccacaag

SEQ ID NO: 3708642 - RNA, 14 nt, Human
uaacaucuaaaaau

SEQ ID NO: 3708643 - RNA, 16 nt, Human
uaacaucuucaacaug

SEQ ID NO: 3708644 - RNA, 23 nt, Human
uaacaucuugaauacucugcccu

SEQ ID NO: 3708645 - RNA, 15 nt, Human
uaacaugaaaugaua

SEQ ID NO: 3708646 - RNA, 15 nt, Human
uaacaugaagaccuu

SEQ ID NO: 3708647 - RNA, 19 nt, Human
uaacaugaauauuuagugu

SEQ ID NO: 3708648 - RNA, 22 nt, Human
uaacaugcuggugaauauuuuc

SEQ ID NO: 3708649 - RNA, 21 nt, Human
uaacaugcuguguaagcugug

SEQ ID NO: 3708650 - RNA, 23 nt, Human
uaacauggacaugaucuucuuua

SEQ ID NO: 3708651 - RNA, 18 nt, Human
uaacaugggcucuucacu

SEQ ID NO: 3708652 - RNA, 18 nt, Human
uaacaugguuuaaaagaa

SEQ ID NO: 3708653 - RNA, 22 nt, Human
uaacauguccugccuauuaucu

SEQ ID NO: 3708654 - RNA, 15 nt, Human
uaacauguuaaacca

SEQ ID NO: 3708655 - RNA, 13 nt, Human
uaacauuauauug

SEQ ID NO: 3708656 - RNA, 16 nt, Human
uaacauuauauugcaa

SEQ ID NO: 3708657 - RNA, 12 nt, Human
uaacauuauuua

SEQ ID NO: 3708658 - RNA, 15 nt, Human
uaacauuauuuauau

SEQ ID NO: 3708659 - RNA, 12 nt, Human
uaacauuccaag

SEQ ID NO: 3708660 - RNA, 16 nt, Human
uaacauuccuaaaaug

SEQ ID NO: 3708661 - RNA, 11 nt, Human
uaacauuccuc

SEQ ID NO: 3708662 - RNA, 20 nt, Human
uaacauuccucaugaaugua

SEQ ID NO: 3708663 - RNA, 16 nt, Human
uaacauugaccaagaa

SEQ ID NO: 3708664 - RNA, 20 nt, Human
uaacauugaccaagaacugc

SEQ ID NO: 3708665 - RNA, 20 nt, Human
uaacauugggaaaucuuaua

SEQ ID NO: 3708666 - RNA, 20 nt, Human
uaacauuggguccugggucu

SEQ ID NO: 3708667 - RNA, 12 nt, Human
uaacauuugccu

SEQ ID NO: 3708668 - RNA, 16 nt, Human
uaacauuugccuugca

SEQ ID NO: 3708669 - RNA, 22 nt, Human
uaacauuugcuguuuuaaacau

SEQ ID NO: 3708670 - RNA, 12 nt, Human
uaacauuuuguu

SEQ ID NO: 3708671 - RNA, 14 nt, Human
uaacauuuuguucu

SEQ ID NO: 3708672 - RNA, 15 nt, Human
uaacauuuuguucuu

SEQ ID NO: 3708673 - RNA, 16 nt, Human
uaacauuuuguucuua

SEQ ID NO: 3708674 - RNA, 22 nt, Human
uaacauuuuguucuuacacaua

SEQ ID NO: 3708675 - RNA, 13 nt, Human
uaaccaaaugcau

SEQ ID NO: 3708676 - RNA, 21 nt, Human
uaaccaagagauaacuguaaa

SEQ ID NO: 3708677 - RNA, 20 nt, Human
uaaccaagcugaguuuccua

SEQ ID NO: 3708678 - RNA, 15 nt, Human
uaaccaaggaaauau

SEQ ID NO: 3708679 - RNA, 14 nt, Human
uaaccaaucuacaa

SEQ ID NO: 3708680 - RNA, 23 nt, Human
uaaccacaaagcacaguuugaac

SEQ ID NO: 3708681 - RNA, 14 nt, Human
uaaccacagcuccu

SEQ ID NO: 3708682 - RNA, 11 nt, Human
uaaccacccca

SEQ ID NO: 3708683 - RNA, 19 nt, Human
uaaccacgucugucuucac

SEQ ID NO: 3708684 - RNA, 20 nt, Human
uaaccacgucugucuucaca

SEQ ID NO: 3708685 - RNA, 17 nt, Human
uaaccacugcaaguccu

SEQ ID NO: 3708686 - RNA, 18 nt, Human
uaaccacugcaaguccuu

SEQ ID NO: 3708687 - RNA, 20 nt, Human
uaaccacuuaaaaaaugucc

SEQ ID NO: 3708688 - RNA, 21 nt, Human
uaaccagggcaccaagcccac

SEQ ID NO: 3708689 - RNA, 22 nt, Human
uaaccaguuguggugugaguau

SEQ ID NO: 3708690 - RNA, 19 nt, Human
uaaccauguguuauguuuu

SEQ ID NO: 3708691 - RNA, 15 nt, Human
uaaccauuaaaacug

SEQ ID NO: 3708692 - RNA, 14 nt, Human
uaacccaacucucc

SEQ ID NO: 3708693 - RNA, 16 nt, Human
uaacccagaaaaucug

SEQ ID NO: 3708694 - RNA, 19 nt, Human
uaaccccaaaaugaagauu

SEQ ID NO: 3708695 - RNA, 13 nt, Human
uaaccccagcucc

SEQ ID NO: 3708696 - RNA, 15 nt, Human
uaaccccaggccccg

SEQ ID NO: 3708697 - RNA, 18 nt, Human
uaacccccacuggacuga

SEQ ID NO: 3708698 - RNA, 16 nt, Human
uaaccccccuguacac

SEQ ID NO: 3708699 - RNA, 15 nt, Human
uaaccccgggcgggu

SEQ ID NO: 3708700 - RNA, 18 nt, Human
uaaccccgucaacaaauc

SEQ ID NO: 3708701 - RNA, 16 nt, Human
uaaccccuuuccugcg

SEQ ID NO: 3708702 - RNA, 17 nt, Human
uaacccuguuacaaagc

SEQ ID NO: 3708703 - RNA, 20 nt, Human
uaacccuucaucuuccugug

SEQ ID NO: 3708704 - RNA, 21 nt, Human
uaacccuucaucuuccugugu

SEQ ID NO: 3708705 - RNA, 20 nt, Human
uaacccuuugguuuuuuucu

SEQ ID NO: 3708706 - RNA, 17 nt, Human
uaaccgaugcuuuacca

SEQ ID NO: 3708707 - RNA, 13 nt, Human
uaaccgcuccagg

SEQ ID NO: 3708708 - RNA, 21 nt, Human
uaaccggcauguuuccagcag

SEQ ID NO: 3708709 - RNA, 20 nt, Human
uaaccguccucgagcaacug

SEQ ID NO: 3708710 - RNA, 13 nt, Human
uaaccuaguuaaa

SEQ ID NO: 3708711 - RNA, 11 nt, Human
uaaccuccuuu

SEQ ID NO: 3708712 - RNA, 14 nt, Human
uaaccucgcccucu

SEQ ID NO: 3708713 - RNA, 17 nt, Human
uaaccucuuuucugcau

SEQ ID NO: 3708714 - RNA, 22 nt, Human
uaaccugagauggcccucuggu

SEQ ID NO: 3708715 - RNA, 11 nt, Human
uaaccuggagg

SEQ ID NO: 3708716 - RNA, 18 nt, Human
uaaccuggugcuggauau

SEQ ID NO: 3708717 - RNA, 19 nt, Human
uaaccuggugcuggauauu

SEQ ID NO: 3708718 - RNA, 22 nt, Human
uaaccuggugcuggauauuuuc

SEQ ID NO: 3708719 - RNA, 19 nt, Human
uaaccuguacuucaaguua

SEQ ID NO: 3708720 - RNA, 12 nt, Human
uaaccugugucu

SEQ ID NO: 3708721 - RNA, 14 nt, Human
uaaccugugucugc

SEQ ID NO: 3708722 - RNA, 19 nt, Human
uaaccuuacuaauuauacu

SEQ ID NO: 3708723 - RNA, 21 nt, Human
uaaccuuauccugcauuguua

SEQ ID NO: 3708724 - RNA, 18 nt, Human
uaaccuugaaugcugcca

SEQ ID NO: 3708725 - RNA, 22 nt, Human
uaaccuugaaugcugccagugu

SEQ ID NO: 3708726 - RNA, 19 nt, Human
uaaccuugccugguacagu

SEQ ID NO: 3708727 - RNA, 13 nt, Human
uaaccuuguauaa

SEQ ID NO: 3708728 - RNA, 16 nt, Human
uaacgaaguugggcaa

SEQ ID NO: 3708729 - RNA, 14 nt, Human
uaacgacuucaggg

SEQ ID NO: 3708730 - RNA, 20 nt, Human
uaacgauaaaagacagugaa

SEQ ID NO: 3708731 - RNA, 14 nt, Human
uaacgcaaccaagu

SEQ ID NO: 3708732 - RNA, 17 nt, Human
uaacgcaaguucccagu

SEQ ID NO: 3708733 - RNA, 23 nt, Human
uaacgcaccgacuagacacacaa

SEQ ID NO: 3708734 - RNA, 22 nt, Human
uaacgcguaucuaggcuuuggu

SEQ ID NO: 3708735 - RNA, 13 nt, Human
uaacggcuccagg

SEQ ID NO: 3708736 - RNA, 23 nt, Human
uaacggucuguucuguuucaagg

SEQ ID NO: 3708737 - RNA, 22 nt, Human
uaacguuagaccacaaauagug

SEQ ID NO: 3708738 - RNA, 16 nt, Human
uaacguugcuguggga

SEQ ID NO: 3708739 - RNA, 18 nt, Human
uaacguugcugugggaac

SEQ ID NO: 3708740 - RNA, 20 nt, Human
uaacguuuuuccuuuaaaaa

SEQ ID NO: 3708741 - RNA, 15 nt, Human
uaacuaaaagguaug

SEQ ID NO: 3708742 - RNA, 18 nt, Human
uaacuaaaauaauuuugu

SEQ ID NO: 3708743 - RNA, 19 nt, Human
uaacuaaaauaauuuugua

SEQ ID NO: 3708744 - RNA, 20 nt, Human
uaacuaaaauaauuuuguaa

SEQ ID NO: 3708745 - RNA, 18 nt, Human
uaacuaaauuugauacuu

SEQ ID NO: 3708746 - RNA, 23 nt, Human
uaacuaauaugggcauuguaguu

SEQ ID NO: 3708747 - RNA, 19 nt, Human
uaacuaaucuauuggguuc

SEQ ID NO: 3708748 - RNA, 23 nt, Human
uaacuaaucuauuggguucauua

SEQ ID NO: 3708749 - RNA, 12 nt, Human
uaacuacauuua

SEQ ID NO: 3708750 - RNA, 21 nt, Human
uaacuaccuuuggcuuaauuc

SEQ ID NO: 3708751 - RNA, 22 nt, Human
uaacuaccuuuggcuuaauucc

SEQ ID NO: 3708752 - RNA, 12 nt, Human
uaacuacugugu

SEQ ID NO: 3708753 - RNA, 13 nt, Human
uaacuacuuuaua

SEQ ID NO: 3708754 - RNA, 12 nt, Human
uaacuagaacug

SEQ ID NO: 3708755 - RNA, 17 nt, Human
uaacuagacaccaaagu

SEQ ID NO: 3708756 - RNA, 18 nt, Human
uaacuagauggugcugag

SEQ ID NO: 3708757 - RNA, 16 nt, Human
uaacuaggcucagaga

SEQ ID NO: 3708758 - RNA, 16 nt, Human
uaacuagggaagaaag

SEQ ID NO: 3708759 - RNA, 21 nt, Human
uaacuaucacugguuugguuc

SEQ ID NO: 3708760 - RNA, 18 nt, Human
uaacuauguacaauauuu

SEQ ID NO: 3708761 - RNA, 12 nt, Human
uaacuauucagu

SEQ ID NO: 3708762 - RNA, 22 nt, Human
uaacuauucaguuguguuuguu

SEQ ID NO: 3708763 - RNA, 16 nt, Human
uaacuauugcauuuau

SEQ ID NO: 3708764 - RNA, 17 nt, Human
uaacuauugcccagguu

SEQ ID NO: 3708765 - RNA, 15 nt, Human
uaacucaaauacaca

SEQ ID NO: 3708766 - RNA, 18 nt, Human
uaacucaaauacacauuu

SEQ ID NO: 3708767 - RNA, 22 nt, Human
uaacucaaggauaccuucuuau

SEQ ID NO: 3708768 - RNA, 14 nt, Human
uaacucaauauuuu

SEQ ID NO: 3708769 - RNA, 15 nt, Human
uaacucaccagcccc

SEQ ID NO: 3708770 - RNA, 16 nt, Human
uaacucaccagcccca

SEQ ID NO: 3708771 - RNA, 18 nt, Human
uaacucaccuggcaucuu

SEQ ID NO: 3708772 - RNA, 22 nt, Human
uaacucagaaacaucaguuacu

SEQ ID NO: 3708773 - RNA, 16 nt, Human
uuaaagagucuagauu

SEQ ID NO: 3708774 - RNA, 18 nt, Human
uuaaagagucuagauuca

SEQ ID NO: 3708775 - RNA, 11 nt, Human
uuaaagaugua

SEQ ID NO: 3708776 - RNA, 13 nt, Human
uuaaagauguucc

SEQ ID NO: 3708777 - RNA, 17 nt, Human
uuaaagauuuaucaaau

SEQ ID NO: 3708778 - RNA, 21 nt, Human
uuaaagcauugcuguuauguc

SEQ ID NO: 3708779 - RNA, 20 nt, Human
uuaaagcauuuacuuugaau

SEQ ID NO: 3708780 - RNA, 20 nt, Human
uuaaagccauguuuauuaca

SEQ ID NO: 3708781 - RNA, 14 nt, Human
uuaaagcugccugu

SEQ ID NO: 3708782 - RNA, 15 nt, Human
uuaaagcugccugua

SEQ ID NO: 3708783 - RNA, 17 nt, Human
uuaaagcugccuguagu

SEQ ID NO: 3708784 - RNA, 18 nt, Human
uuaaagcugccuguaguu

SEQ ID NO: 3708785 - RNA, 14 nt, Human
uuaaagcuguuauu

SEQ ID NO: 3708786 - RNA, 20 nt, Human
uuaaaggcccagccccuaga

SEQ ID NO: 3708787 - RNA, 15 nt, Human
uuaaaggcuguggua

SEQ ID NO: 3708788 - RNA, 19 nt, Human
uuaaaggcuucucucucac

SEQ ID NO: 3708789 - RNA, 16 nt, Human
uuaaagggaagaaaac

SEQ ID NO: 3708790 - RNA, 23 nt, Human
uuaaagggaagaaaacacuguua

SEQ ID NO: 3708791 - RNA, 20 nt, Human
uuaaagggagaugguaagaa

SEQ ID NO: 3708792 - RNA, 23 nt, Human
uuaaaggggagaccucagaagua

SEQ ID NO: 3708793 - RNA, 19 nt, Human
uuaaaggguguacuuauau

SEQ ID NO: 3708794 - RNA, 16 nt, Human
uuaaaguauauauuua

SEQ ID NO: 3708795 - RNA, 15 nt, Human
uuaaaguaugaaucu

SEQ ID NO: 3708796 - RNA, 19 nt, Human
uuaaagucgagcuuuucua

SEQ ID NO: 3708797 - RNA, 20 nt, Human
uuaaagugaggccacugaag

SEQ ID NO: 3708798 - RNA, 12 nt, Human
uuaaagugauua

SEQ ID NO: 3708799 - RNA, 13 nt, Human
uuaaagugccagu

SEQ ID NO: 3708800 - RNA, 19 nt, Human
uuaaagugcuaagguucua

SEQ ID NO: 3708801 - RNA, 17 nt, Human
uuaaaguguaauaauau

SEQ ID NO: 3708802 - RNA, 18 nt, Human
uuaaaguguauuauaaca

SEQ ID NO: 3708803 - RNA, 19 nt, Human
uuaaaguguauuauaacag

SEQ ID NO: 3708804 - RNA, 19 nt, Human
uuaaaguguccauugacau

SEQ ID NO: 3708805 - RNA, 20 nt, Human
uuaaaguuaguaucuuuuga

SEQ ID NO: 3708806 - RNA, 14 nt, Human
uuaaaguucauugc

SEQ ID NO: 3708807 - RNA, 15 nt, Human
uuaaaguucuguaaa

SEQ ID NO: 3708808 - RNA, 18 nt, Human
uuaaaguucuguguauuu

SEQ ID NO: 3708809 - RNA, 19 nt, Human
uuaaaguucuguguauuua

SEQ ID NO: 3708810 - RNA, 17 nt, Human
uuaaaguugaauuuauu

SEQ ID NO: 3708811 - RNA, 14 nt, Human
uuaaaguuggaauu

SEQ ID NO: 3708812 - RNA, 18 nt, Human
uuaaaguuucaaaaaucu

SEQ ID NO: 3708813 - RNA, 20 nt, Human
uuaaauaaaagaaaugcaca

SEQ ID NO: 3708814 - RNA, 13 nt, Human
uuaaauaaaagcu

SEQ ID NO: 3708815 - RNA, 15 nt, Human
uuaaauaaaaucaau

SEQ ID NO: 3708816 - RNA, 19 nt, Human
uuaaauaaacuuuuuuuca

SEQ ID NO: 3708817 - RNA, 17 nt, Human
uuaaauaaaguaucaug

SEQ ID NO: 3708818 - RNA, 13 nt, Human
uuaaauaaauuug

SEQ ID NO: 3708819 - RNA, 22 nt, Human
uuaaauaaauuugacuuuucug

SEQ ID NO: 3708820 - RNA, 14 nt, Human
uuaaauaagauucu

SEQ ID NO: 3708821 - RNA, 16 nt, Human
uuaaauaauaaagauc

SEQ ID NO: 3708822 - RNA, 20 nt, Human
uuaaauaaugcuucagauau

SEQ ID NO: 3708823 - RNA, 20 nt, Human
uuaaauaaugugaaacugga

SEQ ID NO: 3708824 - RNA, 14 nt, Human
uuaaauaauuuaac

SEQ ID NO: 3708825 - RNA, 16 nt, Human
uuaaauaauuuaacua

SEQ ID NO: 3708826 - RNA, 18 nt, Human
uuaaauacaaaacuucca

SEQ ID NO: 3708827 - RNA, 16 nt, Human
uuaaauacagacacua

SEQ ID NO: 3708828 - RNA, 20 nt, Human
uuaaauacagacacuaaguu

SEQ ID NO: 3708829 - RNA, 13 nt, Human
uuaaauacagucu

SEQ ID NO: 3708830 - RNA, 18 nt, Human
uuaaauacauauggaugu

SEQ ID NO: 3708831 - RNA, 19 nt, Human
uuaaauacauauggauguu

SEQ ID NO: 3708832 - RNA, 19 nt, Human
uuaaauacgcacuacaugu

SEQ ID NO: 3708833 - RNA, 14 nt, Human
uuaaauauaauucu

SEQ ID NO: 3708834 - RNA, 16 nt, Human
uuaaauauaauucugu

SEQ ID NO: 3708835 - RNA, 23 nt, Human
uuaaauauaguuccuaagaagcu

SEQ ID NO: 3708836 - RNA, 12 nt, Human
uuaaauaucaau

SEQ ID NO: 3708837 - RNA, 21 nt, Human
uuaaauaucugaacauuuacu

SEQ ID NO: 3708838 - RNA, 21 nt, Human
uuaaauaucuuuuauguuuga

SEQ ID NO: 3708839 - RNA, 22 nt, Human
uuaaauaucuuuuauguuugaa

SEQ ID NO: 3708840 - RNA, 21 nt, Human
uuaaauauguuagcaaagagu

SEQ ID NO: 3708841 - RNA, 20 nt, Human
uuaaauauuaguuaauggau

SEQ ID NO: 3708842 - RNA, 15 nt, Human
uuaaauauuucaaga

SEQ ID NO: 3708843 - RNA, 22 nt, Human
uuaaauauuucaagacauuaaa

SEQ ID NO: 3708844 - RNA, 13 nt, Human
uuaaauauuuucu

SEQ ID NO: 3708845 - RNA, 22 nt, Human
uuaaauauuuucuauuuuaaga

SEQ ID NO: 3708846 - RNA, 20 nt, Human
uuaaauauuuugacuuguug

SEQ ID NO: 3708847 - RNA, 18 nt, Human
uuaaauccuguugaaaag

SEQ ID NO: 3708848 - RNA, 16 nt, Human
uuaaaucugucccuga

SEQ ID NO: 3708849 - RNA, 14 nt, Human
uuaaaucugugaug

SEQ ID NO: 3708850 - RNA, 14 nt, Human
uuaaaucuuaaugu

SEQ ID NO: 3708851 - RNA, 15 nt, Human
uuaaaucuuaauguu

SEQ ID NO: 3708852 - RNA, 16 nt, Human
uuaaaugaaagaaaau

SEQ ID NO: 3708853 - RNA, 17 nt, Human
uuaaaugaacaagagaa

SEQ ID NO: 3708854 - RNA, 20 nt, Human
uuaaaugaacaagagaagca

SEQ ID NO: 3708855 - RNA, 22 nt, Human
uuaaaugacacucauauaauua

SEQ ID NO: 3708856 - RNA, 12 nt, Human
uuaaaugagaag

SEQ ID NO: 3708857 - RNA, 23 nt, Human
uuaaaugagaaggaauuugaguu

SEQ ID NO: 3708858 - RNA, 11 nt, Human
uuaaaugcacc

SEQ ID NO: 3708859 - RNA, 16 nt, Human
uuaaaugcaccuggaa

SEQ ID NO: 3708860 - RNA, 20 nt, Human
uuaaaugcaguuacaaauua

SEQ ID NO: 3708861 - RNA, 14 nt, Human
uuaaaugcccagcc

SEQ ID NO: 3708862 - RNA, 19 nt, Human
uuaaauggaaacugaaacu

SEQ ID NO: 3708863 - RNA, 21 nt, Human
uuaaaugggaauauuuauaaa

SEQ ID NO: 3708864 - RNA, 13 nt, Human
uuaaauguaaaga

SEQ ID NO: 3708865 - RNA, 17 nt, Human
uuaaauguaaagauauu

SEQ ID NO: 3708866 - RNA, 16 nt, Human
uuaaauguaaauaauc

SEQ ID NO: 3708867 - RNA, 12 nt, Human
uuaaauguauac

SEQ ID NO: 3708868 - RNA, 19 nt, Human
uuaaauguauacuauagua

SEQ ID NO: 3708869 - RNA, 14 nt, Human
uuaaaugucuaaug

SEQ ID NO: 3708870 - RNA, 18 nt, Human
uuaaaugucuaauguauu

SEQ ID NO: 3708871 - RNA, 19 nt, Human
uuaaaugucuaauguauuu

SEQ ID NO: 3708872 - RNA, 18 nt, Human
uuaaaugucuucuguauu

SEQ ID NO: 3708873 - RNA, 11 nt, Human
uuaaaugugaa

SEQ ID NO: 3708874 - RNA, 21 nt, Human
uuaaaugugaauuacuaacuu

SEQ ID NO: 3708875 - RNA, 22 nt, Human
uuaaaugugaauuacuaacuuc

SEQ ID NO: 3708876 - RNA, 17 nt, Human
uuaaauguguacaaugu

SEQ ID NO: 3708877 - RNA, 11 nt, Human
uuaaauguguu

SEQ ID NO: 3708878 - RNA, 17 nt, Human
uuaaauguuaccucuga

SEQ ID NO: 3708879 - RNA, 13 nt, Human
uuaaauguuaugu

SEQ ID NO: 3708880 - RNA, 13 nt, Human
uuaaauguuauua

SEQ ID NO: 3708881 - RNA, 22 nt, Human
uuaaauguuuuauaaguucaca

SEQ ID NO: 3708882 - RNA, 14 nt, Human
uuaaauguuuugua

SEQ ID NO: 3708883 - RNA, 23 nt, Human
uuaaauguuuuguaaacuuugaa

SEQ ID NO: 3708884 - RNA, 14 nt, Human
uuaaauuaaacaau

SEQ ID NO: 3708885 - RNA, 19 nt, Human
uuaaauuaaacaauuuauu

SEQ ID NO: 3708886 - RNA, 16 nt, Human
uuaaauuaauaucuuu

SEQ ID NO: 3708887 - RNA, 15 nt, Human
uuaaauuacaauuuu

SEQ ID NO: 3708888 - RNA, 17 nt, Human
uuaaauuacaauuuuau

SEQ ID NO: 3708889 - RNA, 15 nt, Human
uuaaauuagaaaaua

SEQ ID NO: 3708890 - RNA, 13 nt, Human
uuaaauuagauaa

SEQ ID NO: 3708891 - RNA, 21 nt, Human
uuaaauucaguccuaagaaag

SEQ ID NO: 3708892 - RNA, 23 nt, Human
uuaaauucucucucuugcaggaa

SEQ ID NO: 3708893 - RNA, 12 nt, Human
uuaaauucugag

SEQ ID NO: 3708894 - RNA, 13 nt, Human
uuaaauucuugca

SEQ ID NO: 3708895 - RNA, 17 nt, Human
uuaaauuggaaagcagg

SEQ ID NO: 3708896 - RNA, 15 nt, Human
uuaaauuuaauacca

SEQ ID NO: 3708897 - RNA, 17 nt, Human
uuaaauuucuuauguga

SEQ ID NO: 3708898 - RNA, 22 nt, Human
uuaaauuucuuaugugacauua

SEQ ID NO: 3708899 - RNA, 16 nt, Human
uuaaauuuuaagguag

SEQ ID NO: 3708900 - RNA, 17 nt, Human
uuaaauuuuaagguaga

SEQ ID NO: 3708901 - RNA, 15 nt, Human
uuaaauuuugaguuc

SEQ ID NO: 3708902 - RNA, 16 nt, Human
uuaaauuuugugucuc

SEQ ID NO: 3708903 - RNA, 14 nt, Human
uuaaauuuuuuggc

SEQ ID NO: 3708904 - RNA, 16 nt, Human
uuaaauuuuuuguuga

SEQ ID NO: 3708905 - RNA, 17 nt, Human
uuaaauuuuuuuguaug

SEQ ID NO: 3708906 - RNA, 21 nt, Human
uuaaauuuuuuuguaugaaaa

SEQ ID NO: 3708907 - RNA, 23 nt, Human
uuaaauuuuuuuguaugaaaaca

SEQ ID NO: 3708908 - RNA, 19 nt, Human
uuaacaaaaagugcuucau

SEQ ID NO: 3708909 - RNA, 16 nt, Human
uuaacaaaaguucccu

SEQ ID NO: 3708910 - RNA, 23 nt, Human
uuaacaaacccucguuucugauu

SEQ ID NO: 3708911 - RNA, 17 nt, Human
uuaacaaauaacaacuu

SEQ ID NO: 3708912 - RNA, 22 nt, Human
uuaacaacauguuuccagcauu

SEQ ID NO: 3708913 - RNA, 14 nt, Human
uuaacaacuugucu

SEQ ID NO: 3708914 - RNA, 17 nt, Human
uuaacaagaagaugaau

SEQ ID NO: 3708915 - RNA, 20 nt, Human
uuaacaagaagaugaauggc

SEQ ID NO: 3708916 - RNA, 12 nt, Human
uuaacaagaagc

SEQ ID NO: 3708917 - RNA, 20 nt, Human
uuaacaauaacuacuguguu

SEQ ID NO: 3708918 - RNA, 17 nt, Human
uuaacaaugauauaugg

SEQ ID NO: 3708919 - RNA, 15 nt, Human
uuaacaaugccuauu

SEQ ID NO: 3708920 - RNA, 19 nt, Human
uuaacaaugccuauuguaa

SEQ ID NO: 3708921 - RNA, 21 nt, Human
uuaacaaugccuauuguaaua

SEQ ID NO: 3708922 - RNA, 18 nt, Human
uuaacacacauaaaggau

SEQ ID NO: 3708923 - RNA, 18 nt, Human
uguaggagacuugccaga

SEQ ID NO: 3708924 - RNA, 20 nt, Human
uguaggagcuacccuuuucc

SEQ ID NO: 3708925 - RNA, 15 nt, Human
uguaggagcugccuu

SEQ ID NO: 3708926 - RNA, 14 nt, Human
uguaggcagacaca

SEQ ID NO: 3708927 - RNA, 20 nt, Human
uguaggccaaauuuguagug

SEQ ID NO: 3708928 - RNA, 22 nt, Human
uguagggagggcggcaggggcc

SEQ ID NO: 3708929 - RNA, 16 nt, Human
uguagggcuggaccua

SEQ ID NO: 3708930 - RNA, 22 nt, Human
uguaggggaggggcuccuuucc

SEQ ID NO: 3708931 - RNA, 17 nt, Human
uguaggguuauaauaau

SEQ ID NO: 3708932 - RNA, 16 nt, Human
uguaggugguauguga

SEQ ID NO: 3708933 - RNA, 23 nt, Human
uguagguggucuggagcuguccg

SEQ ID NO: 3708934 - RNA, 15 nt, Human
uguagguugcacacu

SEQ ID NO: 3708935 - RNA, 17 nt, Human
uguaguaacacuaauau

SEQ ID NO: 3708936 - RNA, 19 nt, Human
uguaguaaucugcauuauu

SEQ ID NO: 3708937 - RNA, 14 nt, Human
uguaguaauugaca

SEQ ID NO: 3708938 - RNA, 13 nt, Human
uguaguagucuca

SEQ ID NO: 3708939 - RNA, 18 nt, Human
uguaguaucaaauauuag

SEQ ID NO: 3708940 - RNA, 21 nt, Human
uguaguaucaaauauuagaug

SEQ ID NO: 3708941 - RNA, 14 nt, Human
uguagucauuuacu

SEQ ID NO: 3708942 - RNA, 24 nt, Human
uguagucauuuacuaaacauauga

SEQ ID NO: 3708943 - RNA, 20 nt, Human
uguaguccgugcugacagcu

SEQ ID NO: 3708944 - RNA, 21 nt, Human
uguagugauuuuuaugccacc

SEQ ID NO: 3708945 - RNA, 15 nt, Human
uguaguguuggagaa

SEQ ID NO: 3708946 - RNA, 19 nt, Human
uguaguguuggagaagaac

SEQ ID NO: 3708947 - RNA, 21 nt, Human
uguaguguuggagaagaacug

SEQ ID NO: 3708948 - RNA, 14 nt, Human
uguaguuaauuuau

SEQ ID NO: 3708949 - RNA, 15 nt, Human
uguaguuaggaaaua

SEQ ID NO: 3708950 - RNA, 22 nt, Human
uguaguuccacuuauagccucu

SEQ ID NO: 3708951 - RNA, 20 nt, Human
uguaguucugcuccagacag

SEQ ID NO: 3708952 - RNA, 19 nt, Human
uguaguucuugucugauug

SEQ ID NO: 3708953 - RNA, 15 nt, Human
uguaguugcguggac

SEQ ID NO: 3708954 - RNA, 21 nt, Human
uguaguugcguggacucugca

SEQ ID NO: 3708955 - RNA, 16 nt, Human
uguaguuuacagaaaa

SEQ ID NO: 3708956 - RNA, 22 nt, Human
uguaguuuuaucacauguaugu

SEQ ID NO: 3708957 - RNA, 17 nt, Human
uguaguuuuauuuuaug

SEQ ID NO: 3708958 - RNA, 18 nt, Human
uguauaaaagugugaaau

SEQ ID NO: 3708959 - RNA, 21 nt, Human
uguauaaaagugugaaauaaa

SEQ ID NO: 3708960 - RNA, 14 nt, Human
uguauaaaauacau

SEQ ID NO: 3708961 - RNA, 16 nt, Human
uguauaaaauacauag

SEQ ID NO: 3708962 - RNA, 13 nt, Human
uguauaaaauaga

SEQ ID NO: 3708963 - RNA, 15 nt, Human
uguauaaaauagaca

SEQ ID NO: 3708964 - RNA, 14 nt, Human
uguauaaaaucagc

SEQ ID NO: 3708965 - RNA, 16 nt, Human
uguauaaacaagaaaa

SEQ ID NO: 3708966 - RNA, 14 nt, Human
uguauaaauaugua

SEQ ID NO: 3708967 - RNA, 21 nt, Human
uguauaaaucuuucuuuugau

SEQ ID NO: 3708968 - RNA, 11 nt, Human
uguauaaaugu

SEQ ID NO: 3708969 - RNA, 15 nt, Human
uguauaaauguauau

SEQ ID NO: 3708970 - RNA, 16 nt, Human
uguauaaauguauaua

SEQ ID NO: 3708971 - RNA, 20 nt, Human
uguauaaauguauauacaca

SEQ ID NO: 3708972 - RNA, 21 nt, Human
uguauaaauguauauacacau

SEQ ID NO: 3708973 - RNA, 14 nt, Human
uguauaaaugugau

SEQ ID NO: 3708974 - RNA, 15 nt, Human
uguauaaauugucuu

SEQ ID NO: 3708975 - RNA, 14 nt, Human
uguauaaauuuauu

SEQ ID NO: 3708976 - RNA, 21 nt, Human
uguauaacagguuauuuuagu

SEQ ID NO: 3708977 - RNA, 18 nt, Human
uguauaacuucuuaaaag

SEQ ID NO: 3708978 - RNA, 17 nt, Human
uguauaagauccuagau

SEQ ID NO: 3708979 - RNA, 21 nt, Human
uguauaagugcacacagaaau

SEQ ID NO: 3708980 - RNA, 19 nt, Human
uguauaaguggaggcacuu

SEQ ID NO: 3708981 - RNA, 20 nt, Human
uguauaaguggaggcacuuu

SEQ ID NO: 3708982 - RNA, 23 nt, Human
uguauaaguggaggcacuuuagg

SEQ ID NO: 3708983 - RNA, 16 nt, Human
uguauaaguugaggca

SEQ ID NO: 3708984 - RNA, 19 nt, Human
uguauaaguugaggcauuu

SEQ ID NO: 3708985 - RNA, 14 nt, Human
uguauaauaagaaa

SEQ ID NO: 3708986 - RNA, 17 nt, Human
uguauaauacuuuguau

SEQ ID NO: 3708987 - RNA, 20 nt, Human
uguauaauacuuuguauaca

SEQ ID NO: 3708988 - RNA, 20 nt, Human
uguauaauucaaagcaccaa

SEQ ID NO: 3708989 - RNA, 13 nt, Human
uguauaauuguau

SEQ ID NO: 3708990 - RNA, 12 nt, Human
uguauacaaaua

SEQ ID NO: 3708991 - RNA, 15 nt, Human
uguauacaaauauau

SEQ ID NO: 3708992 - RNA, 16 nt, Human
uguauacaacccuggc

SEQ ID NO: 3708993 - RNA, 19 nt, Human
uguauacaaguacugguaa

SEQ ID NO: 3708994 - RNA, 13 nt, Human
uguauacagugca

SEQ ID NO: 3708995 - RNA, 23 nt, Human
uguauacagugcagagccuucuc

SEQ ID NO: 3708996 - RNA, 13 nt, Human
uguauacaugcca

SEQ ID NO: 3708997 - RNA, 15 nt, Human
uguauacaugccagu

SEQ ID NO: 3708998 - RNA, 23 nt, Human
uguauaccccgugaagcauccag

SEQ ID NO: 3708999 - RNA, 13 nt, Human
uguauaccuguaa

SEQ ID NO: 3709000 - RNA, 15 nt, Human
uguauaccuguaacu

SEQ ID NO: 3709001 - RNA, 14 nt, Human
uguauacuauagua

SEQ ID NO: 3709002 - RNA, 17 nt, Human
uguauacuauaguacca

SEQ ID NO: 3709003 - RNA, 19 nt, Human
uguauacuauaguaccagu

SEQ ID NO: 3709004 - RNA, 14 nt, Human
uguauacuuuaaau

SEQ ID NO: 3709005 - RNA, 16 nt, Human
uguauacuuuaaauaa

SEQ ID NO: 3709006 - RNA, 21 nt, Human
uguauacuuuaaauaauuuaa

SEQ ID NO: 3709007 - RNA, 21 nt, Human
uguauagacaguuuguaaaug

SEQ ID NO: 3709008 - RNA, 21 nt, Human
uguauagauuagaauucugua

SEQ ID NO: 3709009 - RNA, 19 nt, Human
uguauagcaugaaauaaaa

SEQ ID NO: 3709010 - RNA, 15 nt, Human
uguauagcugcuucc

SEQ ID NO: 3709011 - RNA, 15 nt, Human
uguauaguguaaaau

SEQ ID NO: 3709012 - RNA, 24 nt, Human
uguauaguguaaaauaagaaugau

SEQ ID NO: 3709013 - RNA, 15 nt, Human
uguauaguuaacaca

SEQ ID NO: 3709014 - RNA, 20 nt, Human
uguauaguuaggauagcauu

SEQ ID NO: 3709015 - RNA, 16 nt, Human
uguauaguuauguaaa

SEQ ID NO: 3709016 - RNA, 14 nt, Human
uguauaguugcuug

SEQ ID NO: 3709017 - RNA, 16 nt, Human
uguauaguugcuugcc

SEQ ID NO: 3709018 - RNA, 17 nt, Human
uguauauacaauaacau

SEQ ID NO: 3709019 - RNA, 18 nt, Human
uguauauacaauaacaua

SEQ ID NO: 3709020 - RNA, 16 nt, Human
uguauauacacauaua

SEQ ID NO: 3709021 - RNA, 20 nt, Human
uguauauacacauauaccua

SEQ ID NO: 3709022 - RNA, 22 nt, Human
uguauauacauuuaugaauuaa

SEQ ID NO: 3709023 - RNA, 17 nt, Human
uguauauacgcaucuau

SEQ ID NO: 3709024 - RNA, 13 nt, Human
uguauauauacau

SEQ ID NO: 3709025 - RNA, 17 nt, Human
uguauauauacauaaca

SEQ ID NO: 3709026 - RNA, 19 nt, Human
uguauauauacauacacuu

SEQ ID NO: 3709027 - RNA, 17 nt, Human
uguauauauauuaagag

SEQ ID NO: 3709028 - RNA, 15 nt, Human
uguauauauguguau

SEQ ID NO: 3709029 - RNA, 21 nt, Human
uguauauauguguauauauac

SEQ ID NO: 3709030 - RNA, 23 nt, Human
uguauauauguguauauauacau

SEQ ID NO: 3709031 - RNA, 15 nt, Human
uguauauaugugugu

SEQ ID NO: 3709032 - RNA, 14 nt, Human
uguauauauuauua

SEQ ID NO: 3709033 - RNA, 20 nt, Human
uguauauauuauuauaaucu

SEQ ID NO: 3709034 - RNA, 16 nt, Human
uguauauauuuagugc

SEQ ID NO: 3709035 - RNA, 18 nt, Human
uguauauauuuagugcug

SEQ ID NO: 3709036 - RNA, 14 nt, Human
uguauauuacaaug

SEQ ID NO: 3709037 - RNA, 21 nt, Human
uguauauuauuuggcaguuug

SEQ ID NO: 3709038 - RNA, 22 nt, Human
uguauauuauuuggcaguuugg

SEQ ID NO: 3709039 - RNA, 24 nt, Human
uguauauuauuuggcaguuuggua

SEQ ID NO: 3709040 - RNA, 14 nt, Human
uguauauucacuuu

SEQ ID NO: 3709041 - RNA, 14 nt, Human
uguauauugguuuu

SEQ ID NO: 3709042 - RNA, 19 nt, Human
uguauauugucagauauuu

SEQ ID NO: 3709043 - RNA, 20 nt, Human
uguauauuguguuuguguau

SEQ ID NO: 3709044 - RNA, 12 nt, Human
uguauauuugau

SEQ ID NO: 3709045 - RNA, 22 nt, Human
uguauauuugauuuauuaacuu

SEQ ID NO: 3709046 - RNA, 12 nt, Human
uguauauuugua

SEQ ID NO: 3709047 - RNA, 16 nt, Human
uguauauuuguaugau

SEQ ID NO: 3709048 - RNA, 22 nt, Human
uguauauuuuaagaaauaacag

SEQ ID NO: 3709049 - RNA, 17 nt, Human
uguauauuuuauauaaa

SEQ ID NO: 3709050 - RNA, 17 nt, Human
uguaucaaacccacgau

SEQ ID NO: 3709051 - RNA, 21 nt, Human
uguaucaggaaauauauaugu

SEQ ID NO: 3709052 - RNA, 23 nt, Human
uguaucaguguuuaugugcuauu

SEQ ID NO: 3709053 - RNA, 17 nt, Human
uguaucauagaaaugua

SEQ ID NO: 3709054 - RNA, 21 nt, Human
uguaucaucuggauaggagcc

SEQ ID NO: 3709055 - RNA, 22 nt, Human
uguaucaugugcuagauuggag

SEQ ID NO: 3709056 - RNA, 15 nt, Human
uguauccaggccugg

SEQ ID NO: 3709057 - RNA, 14 nt, Human
uguauccauuauca

SEQ ID NO: 3709058 - RNA, 17 nt, Human
uguauccauuaucaugu

SEQ ID NO: 3709059 - RNA, 21 nt, Human
uguauccccccccuguauagu

SEQ ID NO: 3709060 - RNA, 19 nt, Human
uguauccuggaacaauauu

SEQ ID NO: 3709061 - RNA, 15 nt, Human
uguaucggagacagu

SEQ ID NO: 3709062 - RNA, 18 nt, Human
uguaucggagacagugau

SEQ ID NO: 3709063 - RNA, 15 nt, Human
uguaucguauagcug

SEQ ID NO: 3709064 - RNA, 17 nt, Human
uguaucguauagcugua

SEQ ID NO: 3709065 - RNA, 18 nt, Human
uguaucguauagcuguau

SEQ ID NO: 3709066 - RNA, 21 nt, Human
uguaucuagugcagcugauuu

SEQ ID NO: 3709067 - RNA, 18 nt, Human
uguaucucugaagcaugu

SEQ ID NO: 3709068 - RNA, 19 nt, Human
uguaucucugaagcauguu

SEQ ID NO: 3709069 - RNA, 22 nt, Human
uguaucucugaagcauguuuca

SEQ ID NO: 3709070 - RNA, 18 nt, Human
uguaucugaaggagauuu

SEQ ID NO: 3709071 - RNA, 22 nt, Human
uguaucugaaggagauuuuccu

SEQ ID NO: 3709072 - RNA, 11 nt, Human
uuaacacauuu

SEQ ID NO: 3709073 - RNA, 15 nt, Human
uuaacacuacucaaa

SEQ ID NO: 3709074 - RNA, 17 nt, Human
uuaacacuacucaaagc

SEQ ID NO: 3709075 - RNA, 13 nt, Human
uuaacacugagcu

SEQ ID NO: 3709076 - RNA, 19 nt, Human
uuaacacugcuuguguuuu

SEQ ID NO: 3709077 - RNA, 14 nt, Human
uuaacagaaaaaca

SEQ ID NO: 3709078 - RNA, 15 nt, Human
uuaacagaaauugua

SEQ ID NO: 3709079 - RNA, 19 nt, Human
uuaacagaaauuguauauu

SEQ ID NO: 3709080 - RNA, 14 nt, Human
uuaacagaagggag

SEQ ID NO: 3709081 - RNA, 13 nt, Human
uuaacagggaggg

SEQ ID NO: 3709082 - RNA, 16 nt, Human
uuaacagucauuuaaa

SEQ ID NO: 3709083 - RNA, 18 nt, Human
uuaacaguuccuuucaaa

SEQ ID NO: 3709084 - RNA, 22 nt, Human
uuaacaguuccuuucaaaggag

SEQ ID NO: 3709085 - RNA, 16 nt, Human
uuaacaguuuuccaug

SEQ ID NO: 3709086 - RNA, 11 nt, Human
uuaacauaaag

SEQ ID NO: 3709087 - RNA, 21 nt, Human
uuaacauaaagguuauuuucu

SEQ ID NO: 3709088 - RNA, 12 nt, Human
uuaacauaccua

SEQ ID NO: 3709089 - RNA, 17 nt, Human
uuaacauaccuaagaag

SEQ ID NO: 3709090 - RNA, 13 nt, Human
uuaacauauaaua

SEQ ID NO: 3709091 - RNA, 22 nt, Human
uuaacaugaacacccuuagaaa

SEQ ID NO: 3709092 - RNA, 14 nt, Human
uuaacaugcugugu

SEQ ID NO: 3709093 - RNA, 19 nt, Human
uuaacaugcuuaugacaau

SEQ ID NO: 3709094 - RNA, 13 nt, Human
uuaacauuccaag

SEQ ID NO: 3709095 - RNA, 14 nt, Human
uuaacauucuguaa

SEQ ID NO: 3709096 - RNA, 20 nt, Human
uuaacauugaccaagaacug

SEQ ID NO: 3709097 - RNA, 12 nt, Human
uuaacauuugcc

SEQ ID NO: 3709098 - RNA, 16 nt, Human
uuaacauuuuguucuu

SEQ ID NO: 3709099 - RNA, 22 nt, Human
uuaacauuuuguucuuacacau

SEQ ID NO: 3709100 - RNA, 12 nt, Human
uuaaccaaaggu

SEQ ID NO: 3709101 - RNA, 18 nt, Human
uuaaccaaaggugaagga

SEQ ID NO: 3709102 - RNA, 17 nt, Human
uuaaccauuaaaacuga

SEQ ID NO: 3709103 - RNA, 18 nt, Human
uuaaccauuaaaacugaa

SEQ ID NO: 3709104 - RNA, 14 nt, Human
uuaaccauuuaagu

SEQ ID NO: 3709105 - RNA, 18 nt, Human
uuaacccaaggagcacag

SEQ ID NO: 3709106 - RNA, 18 nt, Human
uuaaccccccuguacaca

SEQ ID NO: 3709107 - RNA, 20 nt, Human
uuaaccuaugauauuuucug

SEQ ID NO: 3709108 - RNA, 21 nt, Human
uuaaccuaugauauuuucugu

SEQ ID NO: 3709109 - RNA, 14 nt, Human
uuaaccugcauaaa

SEQ ID NO: 3709110 - RNA, 13 nt, Human
uuaaccuggugcu

SEQ ID NO: 3709111 - RNA, 17 nt, Human
uuaaccuggugcuggau

SEQ ID NO: 3709112 - RNA, 21 nt, Human
uuaaccuuguauaaauuauuc

SEQ ID NO: 3709113 - RNA, 14 nt, Human
uuaacgauguccaa

SEQ ID NO: 3709114 - RNA, 18 nt, Human
uuaacuaaauuuuaaagc

SEQ ID NO: 3709115 - RNA, 23 nt, Human
uuaacuaauaugggcauuguagu

SEQ ID NO: 3709116 - RNA, 20 nt, Human
uuaacuacccuuaauuacuu

SEQ ID NO: 3709117 - RNA, 19 nt, Human
uuaacuacuauauugauug

SEQ ID NO: 3709118 - RNA, 14 nt, Human
uuaacuagaauuua

SEQ ID NO: 3709119 - RNA, 21 nt, Human
uuaacuauugcauuuauaugu

SEQ ID NO: 3709120 - RNA, 22 nt, Human
uuaacuauugcauuuauaugua

SEQ ID NO: 3709121 - RNA, 19 nt, Human
uuaacuauuuuauuuucua

SEQ ID NO: 3709122 - RNA, 22 nt, Human
uuaacucagaucacuacugcag

SEQ ID NO: 3709123 - RNA, 14 nt, Human
ugcacaguaaaaau

SEQ ID NO: 3709124 - RNA, 16 nt, Human
ugcacaguauuuguaa

SEQ ID NO: 3709125 - RNA, 15 nt, Human
ugcacagugacuucu

SEQ ID NO: 3709126 - RNA, 16 nt, Human
ugcacagugacuucug

SEQ ID NO: 3709127 - RNA, 15 nt, Human
ugcacagugcaucuc

SEQ ID NO: 3709128 - RNA, 16 nt, Human
ugcacagugcaucuca

SEQ ID NO: 3709129 - RNA, 22 nt, Human
ugcacauaagcuuccauuuuaa

SEQ ID NO: 3709130 - RNA, 22 nt, Human
ugcacauagcuaucaagugugc

SEQ ID NO: 3709131 - RNA, 15 nt, Human
ugcacauauggacuc

SEQ ID NO: 3709132 - RNA, 17 nt, Human
ugcacauauggacucug

SEQ ID NO: 3709133 - RNA, 18 nt, Human
ugcacauccauucccaag

SEQ ID NO: 3709134 - RNA, 18 nt, Human
ugcacaucugugucuugu

SEQ ID NO: 3709135 - RNA, 13 nt, Human
ugcacaucuguuu

SEQ ID NO: 3709136 - RNA, 24 nt, Human
ugcacaucuuggcuauguaauucu

SEQ ID NO: 3709137 - RNA, 17 nt, Human
ugcacaugaacuuagau

SEQ ID NO: 3709138 - RNA, 16 nt, Human
ugcacaugaagaaaua

SEQ ID NO: 3709139 - RNA, 23 nt, Human
ugcacaugaaucccacccacaug

SEQ ID NO: 3709140 - RNA, 22 nt, Human
ugcacaugauuucacaaauauu

SEQ ID NO: 3709141 - RNA, 21 nt, Human
ugcacaugcacgugugugcac

SEQ ID NO: 3709142 - RNA, 16 nt, Human
ugcacaugucuuaaug

SEQ ID NO: 3709143 - RNA, 22 nt, Human
ugcacaugucuuguacaugugu

SEQ ID NO: 3709144 - RNA, 17 nt, Human
ugcacauguuuccucua

SEQ ID NO: 3709145 - RNA, 17 nt, Human
ugcacauuguuguuuuu

SEQ ID NO: 3709146 - RNA, 22 nt, Human
ugcacauuuauuuccucccucu

SEQ ID NO: 3709147 - RNA, 15 nt, Human
ugcacauuuugauuu

SEQ ID NO: 3709148 - RNA, 21 nt, Human
ugcaccacugcacuccagccu

SEQ ID NO: 3709149 - RNA, 23 nt, Human
ugcaccagagcaaccucucacuc

SEQ ID NO: 3709150 - RNA, 12 nt, Human
ugcaccaggaga

SEQ ID NO: 3709151 - RNA, 15 nt, Human
ugcaccaggagacag

SEQ ID NO: 3709152 - RNA, 21 nt, Human
ugcaccagguagaacgccagg

SEQ ID NO: 3709153 - RNA, 21 nt, Human
ugcaccaucccuuuuugaagu

SEQ ID NO: 3709154 - RNA, 23 nt, Human
ugcaccaucccuuuuugaagugu

SEQ ID NO: 3709155 - RNA, 19 nt, Human
ugcaccauuuaaaaacagg

SEQ ID NO: 3709156 - RNA, 18 nt, Human
ugcacccacccaggagug

SEQ ID NO: 3709157 - RNA, 20 nt, Human
ugcacccacuaaugugucau

SEQ ID NO: 3709158 - RNA, 16 nt, Human
ugcacccagcccuggu

SEQ ID NO: 3709159 - RNA, 22 nt, Human
ugcacccaggaggggaacacug

SEQ ID NO: 3709160 - RNA, 15 nt, Human
ugcacccaggggugg

SEQ ID NO: 3709161 - RNA, 20 nt, Human
ugcacccaugggcucugaca

SEQ ID NO: 3709162 - RNA, 22 nt, Human
ugcacccaugggcucugacaga

SEQ ID NO: 3709163 - RNA, 14 nt, Human
ugcaccccaugcug

SEQ ID NO: 3709164 - RNA, 16 nt, Human
ugcaccccaugcuguu

SEQ ID NO: 3709165 - RNA, 15 nt, Human
ugcaccccccugggc

SEQ ID NO: 3709166 - RNA, 14 nt, Human
ugcaccccucccau

SEQ ID NO: 3709167 - RNA, 15 nt, Human
ugcaccccucccauu

SEQ ID NO: 3709168 - RNA, 16 nt, Human
ugcaccccuuccuggg

SEQ ID NO: 3709169 - RNA, 17 nt, Human
ugcaccccuuccugggc

SEQ ID NO: 3709170 - RNA, 17 nt, Human
ugcacccucaggcaggu

SEQ ID NO: 3709171 - RNA, 16 nt, Human
ugcacccuccacccug

SEQ ID NO: 3709172 - RNA, 22 nt, Human
ugcacccuggggccuggaccug

SEQ ID NO: 3709173 - RNA, 14 nt, Human
ugcaccggcuggcc

SEQ ID NO: 3709174 - RNA, 16 nt, Human
ugcaccggcuggccug

SEQ ID NO: 3709175 - RNA, 14 nt, Human
ugcaccgggccaca

SEQ ID NO: 3709176 - RNA, 15 nt, Human
ugcaccgggccacag

SEQ ID NO: 3709177 - RNA, 22 nt, Human
ugcaccgggccacagagaaagu

SEQ ID NO: 3709178 - RNA, 16 nt, Human
ugcaccuaaagaaaaa

SEQ ID NO: 3709179 - RNA, 23 nt, Human
ugcaccuacccauacacccccuc

SEQ ID NO: 3709180 - RNA, 17 nt, Human
ugcaccuagcugugcaa

SEQ ID NO: 3709181 - RNA, 20 nt, Human
ugcaccuagcugugcaagac

SEQ ID NO: 3709182 - RNA, 16 nt, Human
ugcaccuccccccacu

SEQ ID NO: 3709183 - RNA, 14 nt, Human
ugcaccuugugucu

SEQ ID NO: 3709184 - RNA, 15 nt, Human
ugcaccuugugucug

SEQ ID NO: 3709185 - RNA, 18 nt, Human
ugcacgaccgccccaguu

SEQ ID NO: 3709186 - RNA, 15 nt, Human
ugcacgacgcccucu

SEQ ID NO: 3709187 - RNA, 13 nt, Human
ugcacgcagauua

SEQ ID NO: 3709188 - RNA, 15 nt, Human
ugcacgcccaugugu

SEQ ID NO: 3709189 - RNA, 22 nt, Human
ugcacgcccaugugugagugug

SEQ ID NO: 3709190 - RNA, 19 nt, Human
ugcacgcgcccuuucuacc

SEQ ID NO: 3709191 - RNA, 14 nt, Human
ugcacgcuggggaa

SEQ ID NO: 3709192 - RNA, 13 nt, Human
ugcacggcugcug

SEQ ID NO: 3709193 - RNA, 15 nt, Human
ugcacggcugcugag

SEQ ID NO: 3709194 - RNA, 23 nt, Human
ugcacggugaauggcuuuguaua

SEQ ID NO: 3709195 - RNA, 21 nt, Human
ugcacggugggccuugcuggg

SEQ ID NO: 3709196 - RNA, 23 nt, Human
ugcacggugggccuugcugggga

SEQ ID NO: 3709197 - RNA, 19 nt, Human
ugcacguaguagggucagg

SEQ ID NO: 3709198 - RNA, 12 nt, Human
ugcacguggaga

SEQ ID NO: 3709199 - RNA, 14 nt, Human
ugcacguggccucu

SEQ ID NO: 3709200 - RNA, 19 nt, Human
ugcacguggccucuugagc

SEQ ID NO: 3709201 - RNA, 16 nt, Human
ugcacguggcuucuga

SEQ ID NO: 3709202 - RNA, 18 nt, Human
ugcacguggcuucugaug

SEQ ID NO: 3709203 - RNA, 14 nt, Human
ugcacgugugugca

SEQ ID NO: 3709204 - RNA, 15 nt, Human
ugcacguuauggugu

SEQ ID NO: 3709205 - RNA, 18 nt, Human
ugcacuaaaucagagaca

SEQ ID NO: 3709206 - RNA, 23 nt, Human
ugcacuauagccuaggugacaga

SEQ ID NO: 3709207 - RNA, 14 nt, Human
guccuaucugggcu

SEQ ID NO: 3709208 - RNA, 19 nt, Human
guccuaucugggcuuccug

SEQ ID NO: 3709209 - RNA, 19 nt, Human
guccuaugaaugcuuugca

SEQ ID NO: 3709210 - RNA, 20 nt, Human
guccuaugaaugcuuugcau

SEQ ID NO: 3709211 - RNA, 14 nt, Human
guccuauggccuca

SEQ ID NO: 3709212 - RNA, 16 nt, Human
guccuauggccucaug

SEQ ID NO: 3709213 - RNA, 13 nt, Human
guccuauguguga

SEQ ID NO: 3709214 - RNA, 20 nt, Human
guccucaccccuguccucac

SEQ ID NO: 3709215 - RNA, 21 nt, Human
guccucaccccuguccucacu

SEQ ID NO: 3709216 - RNA, 17 nt, Human
guccucacucccagucc

SEQ ID NO: 3709217 - RNA, 21 nt, Human
guccucacugcucccugaagc

SEQ ID NO: 3709218 - RNA, 12 nt, Human
guccucagcccc

SEQ ID NO: 3709219 - RNA, 12 nt, Human
guccucagccuu

SEQ ID NO: 3709220 - RNA, 17 nt, Human
guccucagcuucuuaau

SEQ ID NO: 3709221 - RNA, 16 nt, Human
guccucagggagcagg

SEQ ID NO: 3709222 - RNA, 18 nt, Human
guccuccacacaagggaa

SEQ ID NO: 3709223 - RNA, 12 nt, Human
guccuccagaac

SEQ ID NO: 3709224 - RNA, 13 nt, Human
guccuccagaagc

SEQ ID NO: 3709225 - RNA, 19 nt, Human
guccuccagaagccucugg

SEQ ID NO: 3709226 - RNA, 23 nt, Human
guccuccaucccaacagccaugc

SEQ ID NO: 3709227 - RNA, 21 nt, Human
guccucccauccccuggacug

SEQ ID NO: 3709228 - RNA, 14 nt, Human
guccucccaucuca

SEQ ID NO: 3709229 - RNA, 21 nt, Human
guccucccccugccagugccu

SEQ ID NO: 3709230 - RNA, 15 nt, Human
guccuccccucaagg

SEQ ID NO: 3709231 - RNA, 16 nt, Human
guccuccccucaagga

SEQ ID NO: 3709232 - RNA, 15 nt, Human
guccuccccucacag

SEQ ID NO: 3709233 - RNA, 20 nt, Human
guccuccccucacagccucu

SEQ ID NO: 3709234 - RNA, 22 nt, Human
guccuccccucacagccucuga

SEQ ID NO: 3709235 - RNA, 19 nt, Human
guccuccccuugggcggcu

SEQ ID NO: 3709236 - RNA, 22 nt, Human
guccucccgagcuccucuucca

SEQ ID NO: 3709237 - RNA, 16 nt, Human
guccucccgggcccuc

SEQ ID NO: 3709238 - RNA, 22 nt, Human
guccuccuaccgaaaccuugcc

SEQ ID NO: 3709239 - RNA, 21 nt, Human
guccuccucaccucaugccca

SEQ ID NO: 3709240 - RNA, 12 nt, Human
guccuccucugu

SEQ ID NO: 3709241 - RNA, 17 nt, Human
guccucguagccaucuc

SEQ ID NO: 3709242 - RNA, 13 nt, Human
guccucuccaccu

SEQ ID NO: 3709243 - RNA, 14 nt, Human
guccucuccaccua

SEQ ID NO: 3709244 - RNA, 19 nt, Human
guccucucccaaguccaca

SEQ ID NO: 3709245 - RNA, 17 nt, Human
guccucuccccuccagc

SEQ ID NO: 3709246 - RNA, 19 nt, Human
guccucuccccuccagccu

SEQ ID NO: 3709247 - RNA, 18 nt, Human
guccucugucagucacag

SEQ ID NO: 3709248 - RNA, 19 nt, Human
guccucugucagucacagc

SEQ ID NO: 3709249 - RNA, 20 nt, Human
guccucugucagucacagcc

SEQ ID NO: 3709250 - RNA, 23 nt, Human
guccucugucagucacagccacc

SEQ ID NO: 3709251 - RNA, 18 nt, Human
guccucuuaacuguggug

SEQ ID NO: 3709252 - RNA, 18 nt, Human
guccucuuccaccacaga

SEQ ID NO: 3709253 - RNA, 18 nt, Human
guccucuucccucucugc

SEQ ID NO: 3709254 - RNA, 20 nt, Human
guccucuucccucucugcag

SEQ ID NO: 3709255 - RNA, 13 nt, Human
guccucuucuggg

SEQ ID NO: 3709256 - RNA, 18 nt, Human
guccucuugccuccugga

SEQ ID NO: 3709257 - RNA, 20 nt, Human
guccucuuuacaugaaacua

SEQ ID NO: 3709258 - RNA, 17 nt, Human
guccucuuucagaaaac

SEQ ID NO: 3709259 - RNA, 18 nt, Human
guccucuuucagaaaaca

SEQ ID NO: 3709260 - RNA, 15 nt, Human
guccucuuucagcuc

SEQ ID NO: 3709261 - RNA, 16 nt, Human
guccucuuucagcucc

SEQ ID NO: 3709262 - RNA, 20 nt, Human
guccugaagaggcgggccag

SEQ ID NO: 3709263 - RNA, 23 nt, Human
guccugaagaggcgggccagcca

SEQ ID NO: 3709264 - RNA, 12 nt, Human
guccugaccacc

SEQ ID NO: 3709265 - RNA, 15 nt, Human
guccugaccugucuc

SEQ ID NO: 3709266 - RNA, 16 nt, Human
guccugaccugucuca

SEQ ID NO: 3709267 - RNA, 21 nt, Human
guccugacggcgcccccagug

SEQ ID NO: 3709268 - RNA, 16 nt, Human
guccugagaaagcuca

SEQ ID NO: 3709269 - RNA, 20 nt, Human
guccugagauggaaaagugu

SEQ ID NO: 3709270 - RNA, 13 nt, Human
guccugagcacug

SEQ ID NO: 3709271 - RNA, 14 nt, Human
guccugagcacugc

SEQ ID NO: 3709272 - RNA, 16 nt, Human
guccugagcacugcca

SEQ ID NO: 3709273 - RNA, 17 nt, Human
guccugagcacugccag

SEQ ID NO: 3709274 - RNA, 20 nt, Human
guccugagcacugccaggag

SEQ ID NO: 3709275 - RNA, 23 nt, Human
guccugagcacugccaggaggga

SEQ ID NO: 3709276 - RNA, 16 nt, Human
guccugagcucagcgu

SEQ ID NO: 3709277 - RNA, 19 nt, Human
guccugagcucagcgugga

SEQ ID NO: 3709278 - RNA, 15 nt, Human
guccugaucagagcc

SEQ ID NO: 3709279 - RNA, 15 nt, Human
guccugauggucagc

SEQ ID NO: 3709280 - RNA, 18 nt, Human
guccugauggucagcucc

SEQ ID NO: 3709281 - RNA, 15 nt, Human
guccugcaccggggc

SEQ ID NO: 3709282 - RNA, 17 nt, Human
guccugccucagccucc

SEQ ID NO: 3709283 - RNA, 14 nt, Human
guccugccuggcca

SEQ ID NO: 3709284 - RNA, 18 nt, Human
guccugccugucugcccc

SEQ ID NO: 3709285 - RNA, 16 nt, Human
guccugcuccacagug

SEQ ID NO: 3709286 - RNA, 17 nt, Human
guccugcuccacagugu

SEQ ID NO: 3709287 - RNA, 22 nt, Human
guccugcuccagaauuuggaaa

SEQ ID NO: 3709288 - RNA, 22 nt, Human
guccugcucucuacccagccca

SEQ ID NO: 3709289 - RNA, 13 nt, Human
guccugcugcagu

SEQ ID NO: 3709290 - RNA, 12 nt, Human
guccugcuucug

SEQ ID NO: 3709291 - RNA, 13 nt, Human
guccugcuucuga

SEQ ID NO: 3709292 - RNA, 21 nt, Human
guccuggaagcgcgagggccu

SEQ ID NO: 3709293 - RNA, 20 nt, Human
guccuggacaccgggccagu

SEQ ID NO: 3709294 - RNA, 19 nt, Human
guccuggagcagaccaccc

SEQ ID NO: 3709295 - RNA, 13 nt, Human
guccuggaggggc

SEQ ID NO: 3709296 - RNA, 19 nt, Human
guccuggaugauacuaaua

SEQ ID NO: 3709297 - RNA, 15 nt, Human
guccuggccauccca

SEQ ID NO: 3709298 - RNA, 17 nt, Human
guccuggccaucccaca

SEQ ID NO: 3709299 - RNA, 17 nt, Human
guccuggccuggcuucu

SEQ ID NO: 3709300 - RNA, 22 nt, Human
guccuggcgccuggcaguccgu

SEQ ID NO: 3709301 - RNA, 14 nt, Human
guccuggcuccuga

SEQ ID NO: 3709302 - RNA, 21 nt, Human
guccugggagaaccucaggcu

SEQ ID NO: 3709303 - RNA, 17 nt, Human
guccugggagacccaug

SEQ ID NO: 3709304 - RNA, 14 nt, Human
guccugggcgcccu

SEQ ID NO: 3709305 - RNA, 20 nt, Human
guccugggcgcccuggaagc

SEQ ID NO: 3709306 - RNA, 19 nt, Human
guccuggggaaccugaccc

SEQ ID NO: 3709307 - RNA, 20 nt, Human
guccuggggaaccugacccc

SEQ ID NO: 3709308 - RNA, 14 nt, Human
guccuggggccucg

SEQ ID NO: 3709309 - RNA, 22 nt, Human
guccuggggccucggagccuca

SEQ ID NO: 3709310 - RNA, 15 nt, Human
guccuggggcucugu

SEQ ID NO: 3709311 - RNA, 18 nt, Human
guccugggggccugaccu

SEQ ID NO: 3709312 - RNA, 20 nt, Human
guccuggugcccuggaugcc

SEQ ID NO: 3709313 - RNA, 16 nt, Human
guccugguggggcagc

SEQ ID NO: 3709314 - RNA, 20 nt, Human
guccugguggggcagcuccu

SEQ ID NO: 3709315 - RNA, 20 nt, Human
guccuggugguauuuucaau

SEQ ID NO: 3709316 - RNA, 23 nt, Human
guccuguaguugcguggacucug

SEQ ID NO: 3709317 - RNA, 16 nt, Human
guccugucaucaucau

SEQ ID NO: 3709318 - RNA, 19 nt, Human
guccuguccacacccagcu

SEQ ID NO: 3709319 - RNA, 14 nt, Human
guccuguccugcuc

SEQ ID NO: 3709320 - RNA, 18 nt, Human
guccugucggagcccugu

SEQ ID NO: 3709321 - RNA, 20 nt, Human
guccugucggagcccugucu

SEQ ID NO: 3709322 - RNA, 21 nt, Human
guccugucggagcccugucuc

SEQ ID NO: 3709323 - RNA, 18 nt, Human
guccugugaaugccacug

SEQ ID NO: 3709324 - RNA, 15 nt, Human
guccuguggcaggca

SEQ ID NO: 3709325 - RNA, 21 nt, Human
guccuguggcaggcagcgcca

SEQ ID NO: 3709326 - RNA, 16 nt, Human
guccugugucaguuua

SEQ ID NO: 3709327 - RNA, 21 nt, Human
guccuguguuuuuucugccac

SEQ ID NO: 3709328 - RNA, 14 nt, Human
guccuuagccugga

SEQ ID NO: 3709329 - RNA, 16 nt, Human
guccuuagccuggacc

SEQ ID NO: 3709330 - RNA, 17 nt, Human
guccuuaggccucugag

SEQ ID NO: 3709331 - RNA, 18 nt, Human
guccuuaucuagcugcau

SEQ ID NO: 3709332 - RNA, 15 nt, Human
guccuuauguuaagc

SEQ ID NO: 3709333 - RNA, 21 nt, Human
guccuucaccucacugaaaac

SEQ ID NO: 3709334 - RNA, 15 nt, Human
guccuucagauggaa

SEQ ID NO: 3709335 - RNA, 14 nt, Human
guccuuccaggccc

SEQ ID NO: 3709336 - RNA, 15 nt, Human
guccuucucauucau

SEQ ID NO: 3709337 - RNA, 17 nt, Human
guccuucucucaccucc

SEQ ID NO: 3709338 - RNA, 16 nt, Human
guccuugauuucaaag

SEQ ID NO: 3709339 - RNA, 18 nt, Human
guccuugcaccccucacu

SEQ ID NO: 3709340 - RNA, 14 nt, Human
guccuugcaccugc

SEQ ID NO: 3709341 - RNA, 18 nt, Human
guccuugcaccugcaucc

SEQ ID NO: 3709342 - RNA, 14 nt, Human
guccuuggccugcu

SEQ ID NO: 3709343 - RNA, 14 nt, Human
guccuuggugugac

SEQ ID NO: 3709344 - RNA, 21 nt, Human
guccuugucucugggccacuu

SEQ ID NO: 3709345 - RNA, 21 nt, Human
guccuuuacacucaggcuuuc

SEQ ID NO: 3709346 - RNA, 13 nt, Human
guccuuuaugugg

SEQ ID NO: 3709347 - RNA, 20 nt, Human
guccuuuauguggaaaacag

SEQ ID NO: 3709348 - RNA, 21 nt, Human
guccuuuauguggaaaacaga

SEQ ID NO: 3709349 - RNA, 22 nt, Human
guccuuuauguggaaaacagaa

SEQ ID NO: 3709350 - RNA, 20 nt, Human
guccuuuccaaggcuucucc

SEQ ID NO: 3709351 - RNA, 15 nt, Human
guccuuuccaguggc

SEQ ID NO: 3709352 - RNA, 23 nt, Human
guccuuuccaguggccuggcucc

SEQ ID NO: 3709353 - RNA, 15 nt, Human
guccuuucccuccac

SEQ ID NO: 3709354 - RNA, 18 nt, Human
guccuuugcgccugugac

SEQ ID NO: 3709355 - RNA, 15 nt, Human
guccuuuucacuaca

SEQ ID NO: 3709356 - RNA, 15 nt, Human
ugcucuuuucuccuc

SEQ ID NO: 3709357 - RNA, 22 nt, Human
ugcugaaaaccaucuggccugg

SEQ ID NO: 3709358 - RNA, 15 nt, Human
ugcugaaacaggaga

SEQ ID NO: 3709359 - RNA, 17 nt, Human
ugcugaaacaggagaga

SEQ ID NO: 3709360 - RNA, 20 nt, Human
ugcugaaacgcaucuaguuc

SEQ ID NO: 3709361 - RNA, 14 nt, Human
ugcugaacagugga

SEQ ID NO: 3709362 - RNA, 19 nt, Human
ugcugaacauugcauauaa

SEQ ID NO: 3709363 - RNA, 22 nt, Human
ugcugaacauuggagaaucuca

SEQ ID NO: 3709364 - RNA, 13 nt, Human
ugcugaagcuuau

SEQ ID NO: 3709365 - RNA, 19 nt, Human
ugcugaagcuuauuaaugc

SEQ ID NO: 3709366 - RNA, 21 nt, Human
ugcugaagcuuauuaaugcua

SEQ ID NO: 3709367 - RNA, 13 nt, Human
ugcugaaggcucg

SEQ ID NO: 3709368 - RNA, 21 nt, Human
ugcugaaggcucgagcaugcc

SEQ ID NO: 3709369 - RNA, 13 nt, Human
ugcugaagggacc

SEQ ID NO: 3709370 - RNA, 16 nt, Human
ugcugaaguccggaac

SEQ ID NO: 3709371 - RNA, 18 nt, Human
ugcugaauaggcgaucac

SEQ ID NO: 3709372 - RNA, 16 nt, Human
ugcugaauuuucacau

SEQ ID NO: 3709373 - RNA, 17 nt, Human
ugcugacagcugcuccu

SEQ ID NO: 3709374 - RNA, 20 nt, Human
ugcugacauggcucuggacu

SEQ ID NO: 3709375 - RNA, 18 nt, Human
ugcugacauucaccugcc

SEQ ID NO: 3709376 - RNA, 18 nt, Human
ugcugaccaauugugcug

SEQ ID NO: 3709377 - RNA, 20 nt, Human
ugcugaccaauugugcugcc

SEQ ID NO: 3709378 - RNA, 22 nt, Human
ugcugaccaauugugcugccau

SEQ ID NO: 3709379 - RNA, 15 nt, Human
ugcugacccaugggc

SEQ ID NO: 3709380 - RNA, 17 nt, Human
ugcugacccuccccaaa

SEQ ID NO: 3709381 - RNA, 15 nt, Human
ugcugacccuccugu

SEQ ID NO: 3709382 - RNA, 15 nt, Human
ugcugaccuccacag

SEQ ID NO: 3709383 - RNA, 14 nt, Human
ugcugaccugugca

SEQ ID NO: 3709384 - RNA, 15 nt, Human
ugcugacggccaggg

SEQ ID NO: 3709385 - RNA, 20 nt, Human
ugcugacgggacccacaugc

SEQ ID NO: 3709386 - RNA, 14 nt, Human
ugcugacuguacuc

SEQ ID NO: 3709387 - RNA, 22 nt, Human
ugcugacuguacuccucccagg

SEQ ID NO: 3709388 - RNA, 16 nt, Human
ugcugacuguuuucuc

SEQ ID NO: 3709389 - RNA, 21 nt, Human
ugcugacuguuuucucuugag

SEQ ID NO: 3709390 - RNA, 13 nt, Human
ugcugacuuagaa

SEQ ID NO: 3709391 - RNA, 10 nt, Human
ugcugagacu

SEQ ID NO: 3709392 - RNA, 15 nt, Human
ugcugagagacccaa

SEQ ID NO: 3709393 - RNA, 14 nt, Human
ugcugagauccugg

SEQ ID NO: 3709394 - RNA, 18 nt, Human
ugcugagauccuggacug

SEQ ID NO: 3709395 - RNA, 18 nt, Human
ugcugagccucacagcag

SEQ ID NO: 3709396 - RNA, 21 nt, Human
ugcugagccucacagcaguga

SEQ ID NO: 3709397 - RNA, 16 nt, Human
ugcugagccucugcuc

SEQ ID NO: 3709398 - RNA, 15 nt, Human
ugcugagcucugaga

SEQ ID NO: 3709399 - RNA, 17 nt, Human
ugcugagcucugagagg

SEQ ID NO: 3709400 - RNA, 12 nt, Human
ugcugagggucc

SEQ ID NO: 3709401 - RNA, 13 nt, Human
ugcugagggucca

SEQ ID NO: 3709402 - RNA, 21 nt, Human
ugcugaguauguuaagcucuu

SEQ ID NO: 3709403 - RNA, 18 nt, Human
ugcugagucccaggcuga

SEQ ID NO: 3709404 - RNA, 15 nt, Human
ugcugagucucccaa

SEQ ID NO: 3709405 - RNA, 14 nt, Human
ugcugagucugaag

SEQ ID NO: 3709406 - RNA, 16 nt, Human
ugcugagucugaaggc

SEQ ID NO: 3709407 - RNA, 18 nt, Human
ugcugagucugaaggcug

SEQ ID NO: 3709408 - RNA, 22 nt, Human
ugcugagucugaaggcuggguu

SEQ ID NO: 3709409 - RNA, 15 nt, Human
ugcugaguugguguu

SEQ ID NO: 3709410 - RNA, 21 nt, Human
ugcugauauuuucucuaggaa

SEQ ID NO: 3709411 - RNA, 18 nt, Human
ugcugaucgccuucccca

SEQ ID NO: 3709412 - RNA, 21 nt, Human
ugcugaugaacucuuaaucaa

SEQ ID NO: 3709413 - RNA, 20 nt, Human
ugcugaugaaucacuguuuu

SEQ ID NO: 3709414 - RNA, 22 nt, Human
ugcugaugacccccccagcuuc

SEQ ID NO: 3709415 - RNA, 22 nt, Human
ugcugaugcucaugguccccau

SEQ ID NO: 3709416 - RNA, 15 nt, Human
ugcugauggagccuu

SEQ ID NO: 3709417 - RNA, 17 nt, Human
ugcugauggugcaauga

SEQ ID NO: 3709418 - RNA, 18 nt, Human
ugcugauggugcaaugac

SEQ ID NO: 3709419 - RNA, 23 nt, Human
ugcugauggugcaaugaccuuuc

SEQ ID NO: 3709420 - RNA, 17 nt, Human
ugcugauguucagugua

SEQ ID NO: 3709421 - RNA, 17 nt, Human
ugcugauucucccguuc

SEQ ID NO: 3709422 - RNA, 19 nt, Human
ugcugauuuccccucuucc

SEQ ID NO: 3709423 - RNA, 18 nt, Human
ugcugauuuggugaccaa

SEQ ID NO: 3709424 - RNA, 16 nt, Human
ugcugauuuuauucuu

SEQ ID NO: 3709425 - RNA, 17 nt, Human
ugcugauuuuauucuug

SEQ ID NO: 3709426 - RNA, 14 nt, Human
ugcugcaaaccuga

SEQ ID NO: 3709427 - RNA, 22 nt, Human
ugcugcagagaaacuuaagcaa

SEQ ID NO: 3709428 - RNA, 23 nt, Human
ugcugcagaggggcaggcccugc

SEQ ID NO: 3709429 - RNA, 23 nt, Human
ugcugcagcaccgaggggccuuu

SEQ ID NO: 3709430 - RNA, 15 nt, Human
ugcugcagcucccug

SEQ ID NO: 3709431 - RNA, 19 nt, Human
ugcugcagcucccuggcuu

SEQ ID NO: 3709432 - RNA, 21 nt, Human
ugcugcagcucccuggcuucu

SEQ ID NO: 3709433 - RNA, 21 nt, Human
ugcugcaggacuugagaagac

SEQ ID NO: 3709434 - RNA, 15 nt, Human
ugcugcaguugccag

SEQ ID NO: 3709435 - RNA, 14 nt, Human
ugcugcauacauuc

SEQ ID NO: 3709436 - RNA, 15 nt, Human
ugcugcaugcccucu

SEQ ID NO: 3709437 - RNA, 19 nt, Human
ugcugcaugcccucucagg

SEQ ID NO: 3709438 - RNA, 15 nt, Human
ugcugcaugccuggu

SEQ ID NO: 3709439 - RNA, 23 nt, Human
ugcugcauuuaaaagauacaguu

SEQ ID NO: 3709440 - RNA, 21 nt, Human
ugcugccaaccauaccuuccu

SEQ ID NO: 3709441 - RNA, 15 nt, Human
ugcugccaauauccu

SEQ ID NO: 3709442 - RNA, 17 nt, Human
ugcugccaauauccuaa

SEQ ID NO: 3709443 - RNA, 18 nt, Human
ugcugccaauauccuaau

SEQ ID NO: 3709444 - RNA, 19 nt, Human
ugcugccaauauccuaaua

SEQ ID NO: 3709445 - RNA, 21 nt, Human
ugcugccaauauccuaauaaa

SEQ ID NO: 3709446 - RNA, 19 nt, Human
ugcugccacacuucaggcu

SEQ ID NO: 3709447 - RNA, 14 nt, Human
ugcugccacugagg

SEQ ID NO: 3709448 - RNA, 14 nt, Human
ugcugccacuuuuu

SEQ ID NO: 3709449 - RNA, 14 nt, Human
ugcugccauccagg

SEQ ID NO: 3709450 - RNA, 15 nt, Human
ugcugccauccaggu

SEQ ID NO: 3709451 - RNA, 19 nt, Human
ugcugccauuacagaggua

SEQ ID NO: 3709452 - RNA, 14 nt, Human
ugcugcccagccuc

SEQ ID NO: 3709453 - RNA, 16 nt, Human
ugcugcccaugccacc

SEQ ID NO: 3709454 - RNA, 19 nt, Human
ugcugccccaucagugcuc

SEQ ID NO: 3709455 - RNA, 17 nt, Human
ugcugccccaugaagcc

SEQ ID NO: 3709456 - RNA, 14 nt, Human
ugcugcccuaggcu

SEQ ID NO: 3709457 - RNA, 17 nt, Human
ugcugcccugcccaccu

SEQ ID NO: 3709458 - RNA, 18 nt, Human
ugcugcccugcccaccug

SEQ ID NO: 3709459 - RNA, 15 nt, Human
ugcugcccugcccca

SEQ ID NO: 3709460 - RNA, 13 nt, Human
ugcugcccugcgg

SEQ ID NO: 3709461 - RNA, 16 nt, Human
ugcugccgccucccag

SEQ ID NO: 3709462 - RNA, 14 nt, Human
ugcugccuccagaa

SEQ ID NO: 3709463 - RNA, 19 nt, Human
ugcugccuccccaacccug

SEQ ID NO: 3709464 - RNA, 20 nt, Human
ugcugccuccccaacccugc

SEQ ID NO: 3709465 - RNA, 16 nt, Human
ugcugccucccucugc

SEQ ID NO: 3709466 - RNA, 19 nt, Human
ugcugccucggauccccuu

SEQ ID NO: 3709467 - RNA, 14 nt, Human
ugcugccugaaucc

SEQ ID NO: 3709468 - RNA, 16 nt, Human
ugcugccugccugucu

SEQ ID NO: 3709469 - RNA, 15 nt, Human
ugcugccugcuuuuu

SEQ ID NO: 3709470 - RNA, 17 nt, Human
ugcugccugcuuuuuau

SEQ ID NO: 3709471 - RNA, 13 nt, Human
ugcugccuggcca

SEQ ID NO: 3709472 - RNA, 14 nt, Human
ugcugccugucccc

SEQ ID NO: 3709473 - RNA, 21 nt, Human
ugcugccuucugacggcccug

SEQ ID NO: 3709474 - RNA, 13 nt, Human
ugcugccuucugg

SEQ ID NO: 3709475 - RNA, 16 nt, Human
ugcugcgcccuuaccu

SEQ ID NO: 3709476 - RNA, 18 nt, Human
ugcugcuaauucuuugca

SEQ ID NO: 3709477 - RNA, 15 nt, Human
ugcugcuacccuccc

SEQ ID NO: 3709478 - RNA, 19 nt, Human
ugcugcuacccucccugcu

SEQ ID NO: 3709479 - RNA, 21 nt, Human
ugcugcuacccucccugcugu

SEQ ID NO: 3709480 - RNA, 22 nt, Human
ugcugcuacccucccugcuguc

SEQ ID NO: 3709481 - RNA, 23 nt, Human
ugcugcuacccucccugcugucc

SEQ ID NO: 3709482 - RNA, 15 nt, Human
ugcugcuacuuaauu

SEQ ID NO: 3709483 - RNA, 15 nt, Human
ugcugcuagaacuuu

SEQ ID NO: 3709484 - RNA, 19 nt, Human
ugcugcuagaacuuuuuua

SEQ ID NO: 3709485 - RNA, 21 nt, Human
ugcugcuauuuuacugucuua

SEQ ID NO: 3709486 - RNA, 14 nt, Human
ugcugcucccucag

SEQ ID NO: 3709487 - RNA, 17 nt, Human
ugcugcucccucagacu

SEQ ID NO: 3709488 - RNA, 20 nt, Human
ugcugcuccuuagcugccaa

SEQ ID NO: 3709489 - RNA, 12 nt, Human
ugcugcucuuca

SEQ ID NO: 3709490 - RNA, 21 nt, Human
ugcugcucuuggcuggaccca

SEQ ID NO: 3709491 - RNA, 13 nt, Human
ugcugcugccugc

SEQ ID NO: 3709492 - RNA, 14 nt, Human
ugcugcugccugcc

SEQ ID NO: 3709493 - RNA, 15 nt, Human
ugcugcugcgcccuu

SEQ ID NO: 3709494 - RNA, 16 nt, Human
ugcugcugcugcgccc

SEQ ID NO: 3709495 - RNA, 23 nt, Human
ugcugcuggacaguaucacuguc

SEQ ID NO: 3709496 - RNA, 11 nt, Human
ugcugcuggcc

SEQ ID NO: 3709497 - RNA, 21 nt, Human
ugcugcuggccaaauagcaaa

SEQ ID NO: 3709498 - RNA, 17 nt, Human
ugcugcugggcucagug

SEQ ID NO: 3709499 - RNA, 14 nt, Human
ugcugcuggggaag

SEQ ID NO: 3709500 - RNA, 15 nt, Human
ugcugcuggggaaga

SEQ ID NO: 3709501 - RNA, 21 nt, Human
ugcugcuggggaagacagugg

SEQ ID NO: 3709502 - RNA, 23 nt, Human
ugcugcuggggaagacaguggcc

SEQ ID NO: 3709503 - RNA, 13 nt, Human
ugcugcugucacc

SEQ ID NO: 3709504 - RNA, 17 nt, Human
ugcugcugucugggugc

SEQ ID NO: 3709505 - RNA, 12 nt, Human
ugcugcugucuu

SEQ ID NO: 3709506 - RNA, 13 nt, Human
ugcugcuucaauu

SEQ ID NO: 3709507 - RNA, 15 nt, Human
ugcugcuucccucug

SEQ ID NO: 3709508 - RNA, 16 nt, Human
ugcugcuucccucugc

SEQ ID NO: 3709509 - RNA, 20 nt, Human
ugcugcuucucccaggcaag

SEQ ID NO: 3709510 - RNA, 23 nt, Human
ugcugcuucucccaggcaaggcu

SEQ ID NO: 3709511 - RNA, 16 nt, Human
ugcugcuuuccccugu

SEQ ID NO: 3709512 - RNA, 17 nt, Human
ugcugcuuuccccugug

SEQ ID NO: 3709513 - RNA, 18 nt, Human
ugcugcuuuccccugugg

SEQ ID NO: 3709514 - RNA, 19 nt, Human
ugcugcuuuuauaucugua

SEQ ID NO: 3709515 - RNA, 17 nt, Human
ugcugcuuuuccuuggg

SEQ ID NO: 3709516 - RNA, 12 nt, Human
ugcuggaaagag

SEQ ID NO: 3709517 - RNA, 17 nt, Human
ugcuggaaccugcaaaa

SEQ ID NO: 3709518 - RNA, 14 nt, Human
ugcuggaagcccag

SEQ ID NO: 3709519 - RNA, 16 nt, Human
ugcuggaauucuaaca

SEQ ID NO: 3709520 - RNA, 17 nt, Human
ugcuggaauucuaacaa

SEQ ID NO: 3709521 - RNA, 19 nt, Human
ugcuggacggcauuccugc

SEQ ID NO: 3709522 - RNA, 20 nt, Human
ugcuggacggggacugggga

SEQ ID NO: 3709523 - RNA, 21 nt, Human
ugcuggacggggacuggggau

SEQ ID NO: 3709524 - RNA, 22 nt, Human
ugcuggagaggccccagccgcu

SEQ ID NO: 3709525 - RNA, 16 nt, Human
ugcuggagcacugggc

SEQ ID NO: 3709526 - RNA, 20 nt, Human
ugcuggagccacuaacuaga

SEQ ID NO: 3709527 - RNA, 11 nt, Human
ugcuggagccu

SEQ ID NO: 3709528 - RNA, 12 nt, Human
ugcuggagccug

SEQ ID NO: 3709529 - RNA, 16 nt, Human
ugcuggaggccucagg

SEQ ID NO: 3709530 - RNA, 20 nt, Human
ugcuggaggccucaggugcu

SEQ ID NO: 3709531 - RNA, 21 nt, Human
ugcuggaggccucaggugcug

SEQ ID NO: 3709532 - RNA, 16 nt, Human
ugcuggaggugggagc

SEQ ID NO: 3709533 - RNA, 17 nt, Human
ugcuggaggugggagca

SEQ ID NO: 3709534 - RNA, 23 nt, Human
ugcuggaggugggagcaggagau

SEQ ID NO: 3709535 - RNA, 15 nt, Human
ugcuggauaaaauga

SEQ ID NO: 3709536 - RNA, 22 nt, Human
ugcuggauauuuucaaauugua

SEQ ID NO: 3709537 - RNA, 19 nt, Human
ugcuggaucucccagggcu

SEQ ID NO: 3709538 - RNA, 13 nt, Human
ugcuggccaaaua

SEQ ID NO: 3709539 - RNA, 19 nt, Human
ugcuggccaaauagcaaag

SEQ ID NO: 3709540 - RNA, 20 nt, Human
ugcuggccaaauagcaaaga

SEQ ID NO: 3709541 - RNA, 15 nt, Human
ugcuggccagccugg

SEQ ID NO: 3709542 - RNA, 22 nt, Human
ugcuggccagccuggggccugg

SEQ ID NO: 3709543 - RNA, 23 nt, Human
ugcuggccagccuggggccuggc

SEQ ID NO: 3709544 - RNA, 18 nt, Human
ugcuggcccagggcccag

SEQ ID NO: 3709545 - RNA, 13 nt, Human
ugcuggccccagc

SEQ ID NO: 3709546 - RNA, 14 nt, Human
ugcuggccccagcc

SEQ ID NO: 3709547 - RNA, 13 nt, Human
ugcuggccccuca

SEQ ID NO: 3709548 - RNA, 15 nt, Human
ugcuggccccucacc

SEQ ID NO: 3709549 - RNA, 20 nt, Human
ugcuggccccucaccugggc

SEQ ID NO: 3709550 - RNA, 14 nt, Human
ugcuggccuggauc

SEQ ID NO: 3709551 - RNA, 16 nt, Human
ugcuggccuggaucuc

SEQ ID NO: 3709552 - RNA, 18 nt, Human
ugcuggccuggaucuccc

SEQ ID NO: 3709553 - RNA, 16 nt, Human
ugcuggcgccucugca

SEQ ID NO: 3709554 - RNA, 19 nt, Human
ugcuggcucacaguacagc

SEQ ID NO: 3709555 - RNA, 15 nt, Human
ugcuggcucccaggg

SEQ ID NO: 3709556 - RNA, 16 nt, Human
ugcuggcucccagggc

SEQ ID NO: 3709557 - RNA, 18 nt, Human
ugcuggcucccagggcca

SEQ ID NO: 3709558 - RNA, 21 nt, Human
ugcuggcugcccagaccccuc

SEQ ID NO: 3709559 - RNA, 14 nt, Human
ugcuggcugccuua

SEQ ID NO: 3709560 - RNA, 21 nt, Human
ugcuggcuguuggcugggggc

SEQ ID NO: 3709561 - RNA, 21 nt, Human
ugcugggaaccucaggguauu

SEQ ID NO: 3709562 - RNA, 17 nt, Human
ugcugggacuggccagg

SEQ ID NO: 3709563 - RNA, 23 nt, Human
ugcugggagcuccacucugcuuc

SEQ ID NO: 3709564 - RNA, 21 nt, Human
ugcugggagcugaaaaaucac

SEQ ID NO: 3709565 - RNA, 18 nt, Human
ugcugggaggagggagag

SEQ ID NO: 3709566 - RNA, 13 nt, Human
ugcugggcagccc

SEQ ID NO: 3709567 - RNA, 14 nt, Human
ugcugggcagcccg

SEQ ID NO: 3709568 - RNA, 17 nt, Human
ugcugggccccugccuc

SEQ ID NO: 3709569 - RNA, 21 nt, Human
ugcugggccccugccucucug

SEQ ID NO: 3709570 - RNA, 14 nt, Human
ugcugggcggcugu

SEQ ID NO: 3709571 - RNA, 16 nt, Human
ugcugggcggcugugc

SEQ ID NO: 3709572 - RNA, 13 nt, Human
ugcugggcucagu

SEQ ID NO: 3709573 - RNA, 15 nt, Human
ugcugggcucaguga

SEQ ID NO: 3709574 - RNA, 17 nt, Human
ugcugggcucagugaag

SEQ ID NO: 3709575 - RNA, 17 nt, Human
ugcugggcucuccaccu

SEQ ID NO: 3709576 - RNA, 22 nt, Human
ugcugggcucuccaccucagcc

SEQ ID NO: 3709577 - RNA, 21 nt, Human
ugcugggcugacggugcaguc

SEQ ID NO: 3709578 - RNA, 17 nt, Human
ugcugggcuggggccug

SEQ ID NO: 3709579 - RNA, 17 nt, Human
ugcuggggaagacagug

SEQ ID NO: 3709580 - RNA, 20 nt, Human
ugcuggggacggggggcccc

SEQ ID NO: 3709581 - RNA, 18 nt, Human
ugcuggggccugguuccc

SEQ ID NO: 3709582 - RNA, 14 nt, Human
ugcugggggaauga

SEQ ID NO: 3709583 - RNA, 20 nt, Human
ugcugggggaaugagcccag

SEQ ID NO: 3709584 - RNA, 19 nt, Human
ugcuggggucaaggcagua

SEQ ID NO: 3709585 - RNA, 17 nt, Human
ugcugggguuaucugaa

SEQ ID NO: 3709586 - RNA, 20 nt, Human
ugcugggguuaucugaaguc

SEQ ID NO: 3709587 - RNA, 16 nt, Human
ugcuggguaaacugug

SEQ ID NO: 3709588 - RNA, 17 nt, Human
ugcuggguuggugcaca

SEQ ID NO: 3709589 - RNA, 19 nt, Human
ugcuggguuggugcacagu

SEQ ID NO: 3709590 - RNA, 23 nt, Human
ugcuggguuggugcacagugauu

SEQ ID NO: 3709591 - RNA, 22 nt, Human
ugcugguaauuuguaucugaag

SEQ ID NO: 3709592 - RNA, 16 nt, Human
ugcuggucacugccau

SEQ ID NO: 3709593 - RNA, 19 nt, Human
ugcuggucccggggccagc

SEQ ID NO: 3709594 - RNA, 13 nt, Human
ugcugguccgugg

SEQ ID NO: 3709595 - RNA, 16 nt, Human
ugcugguccgugggac

SEQ ID NO: 3709596 - RNA, 16 nt, Human
ugcugguugcugugug

SEQ ID NO: 3709597 - RNA, 13 nt, Human
ugcugguuuguag

SEQ ID NO: 3709598 - RNA, 22 nt, Human
ugcugguuuguaguugaauauu

SEQ ID NO: 3709599 - RNA, 13 nt, Human
ugcugguuuuagu

SEQ ID NO: 3709600 - RNA, 14 nt, Human
ugcugguuuuccua

SEQ ID NO: 3709601 - RNA, 16 nt, Human
ugcugguuuuucaguu

SEQ ID NO: 3709602 - RNA, 15 nt, Human
ugcuguaaaagcaag

SEQ ID NO: 3709603 - RNA, 11 nt, Human
ugcuguacaua

SEQ ID NO: 3709604 - RNA, 15 nt, Human
ugcuguacaucuauu

SEQ ID NO: 3709605 - RNA, 17 nt, Human
ugcuguacaucuauuuu

SEQ ID NO: 3709606 - RNA, 21 nt, Human
ugcuguacaucuauuuuggau

SEQ ID NO: 3709607 - RNA, 21 nt, Human
ugcuguacuagagaucugguu

SEQ ID NO: 3709608 - RNA, 21 nt, Human
ugcuguacugaaguaaaacaa

SEQ ID NO: 3709609 - RNA, 18 nt, Human
ugcuguaggaucuaaggc

SEQ ID NO: 3709610 - RNA, 15 nt, Human
ugcuguauaaaauca

SEQ ID NO: 3709611 - RNA, 17 nt, Human
ugcuguauaaaaucagc

SEQ ID NO: 3709612 - RNA, 18 nt, Human
ugcuguauaaaaucagcc

SEQ ID NO: 3709613 - RNA, 16 nt, Human
ugcuguauaaguuauu

SEQ ID NO: 3709614 - RNA, 15 nt, Human
ugcuguauucccaua

SEQ ID NO: 3709615 - RNA, 23 nt, Human
ugcuguauuuuaaaagaaugauu

SEQ ID NO: 3709616 - RNA, 15 nt, Human
ugcugucaccucucc

SEQ ID NO: 3709617 - RNA, 13 nt, Human
ugcugucauugcu

SEQ ID NO: 3709618 - RNA, 21 nt, Human
ugcuguccagacagccuguau

SEQ ID NO: 3709619 - RNA, 17 nt, Human
ugcuguccaugcuucuc

SEQ ID NO: 3709620 - RNA, 21 nt, Human
ugcugucccauagucccugcc

SEQ ID NO: 3709621 - RNA, 20 nt, Human
ugcuguccccucuugcccca

SEQ ID NO: 3709622 - RNA, 21 nt, Human
ugcuguccccucuugccccaa

SEQ ID NO: 3709623 - RNA, 17 nt, Human
ugcugucccucccccuu

SEQ ID NO: 3709624 - RNA, 14 nt, Human
ugcuguccuaggcc

SEQ ID NO: 3709625 - RNA, 16 nt, Human
ugcuguccuaggccac

SEQ ID NO: 3709626 - RNA, 18 nt, Human
ugcuguccucagguggcc

SEQ ID NO: 3709627 - RNA, 21 nt, Human
ugcuguccucagguggccaug

SEQ ID NO: 3709628 - RNA, 19 nt, Human
ugcuguccuugaaugccau

SEQ ID NO: 3709629 - RNA, 14 nt, Human
ugcugucuaugugg

SEQ ID NO: 3709630 - RNA, 16 nt, Human
ugcugucucugcucgc

SEQ ID NO: 3709631 - RNA, 15 nt, Human
ugcugucugcagccu

SEQ ID NO: 3709632 - RNA, 21 nt, Human
ugcugucuuaaacuaaaugug

SEQ ID NO: 3709633 - RNA, 15 nt, Human
ugcugucuucuggac

SEQ ID NO: 3709634 - RNA, 13 nt, Human
ugcugucuuucuu

SEQ ID NO: 3709635 - RNA, 22 nt, Human
ugcugugaaaaaaaaaaugcug

SEQ ID NO: 3709636 - RNA, 17 nt, Human
ugcugugaaauucccaa

SEQ ID NO: 3709637 - RNA, 18 nt, Human
ugcugugaagcuggaacu

SEQ ID NO: 3709638 - RNA, 13 nt, Human
ugcugugaggcug

SEQ ID NO: 3709639 - RNA, 19 nt, Human
ugcugugaggcuguccugu

SEQ ID NO: 3709640 - RNA, 17 nt, Human
ugcugugagggagggga

SEQ ID NO: 3709641 - RNA, 18 nt, Human
ugcugugagggaggggaa

SEQ ID NO: 3709642 - RNA, 23 nt, Human
ugcugugagucuuugguucuaag

SEQ ID NO: 3709643 - RNA, 16 nt, Human
ugcugugcgcccaggg

SEQ ID NO: 3709644 - RNA, 22 nt, Human
ugcuguggaacuacauuacugu

SEQ ID NO: 3709645 - RNA, 13 nt, Human
ugcuguggccagg

SEQ ID NO: 3709646 - RNA, 17 nt, Human
ugcuguggccaggaggu

SEQ ID NO: 3709647 - RNA, 19 nt, Human
ugcugugggaacgagaggg

SEQ ID NO: 3709648 - RNA, 15 nt, Human
ugcuguggugugucc

SEQ ID NO: 3709649 - RNA, 17 nt, Human
ugcuguggugugucccc

SEQ ID NO: 3709650 - RNA, 15 nt, Human
ugcuguguaucugau

SEQ ID NO: 3709651 - RNA, 14 nt, Human
ugcugugugguuug

SEQ ID NO: 3709652 - RNA, 18 nt, Human
ugcuguguguggcuucug

SEQ ID NO: 3709653 - RNA, 13 nt, Human
ugcuguguuugcu

SEQ ID NO: 3709654 - RNA, 16 nt, Human
ugcuguucaugaaaga

SEQ ID NO: 3709655 - RNA, 13 nt, Human
ugcuguugaaagc

SEQ ID NO: 3709656 - RNA, 16 nt, Human
guccuuuucuugcuua

SEQ ID NO: 3709657 - RNA, 20 nt, Human
guccuuuuuccucuccacac

SEQ ID NO: 3709658 - RNA, 16 nt, Human
guccuuuuuuuccauc

SEQ ID NO: 3709659 - RNA, 19 nt, Human
guccuuuuuuuccaucuuu

SEQ ID NO: 3709660 - RNA, 13 nt, Human
gucgaaaguuagu

SEQ ID NO: 3709661 - RNA, 12 nt, Human
gucgagacacuu

SEQ ID NO: 3709662 - RNA, 21 nt, Human
gucgagccugggggcuggagc

SEQ ID NO: 3709663 - RNA, 23 nt, Human
gucgagcuggaugucccaccucu

SEQ ID NO: 3709664 - RNA, 16 nt, Human
gucgaggacagggagg

SEQ ID NO: 3709665 - RNA, 14 nt, Human
gucgauaaucagag

SEQ ID NO: 3709666 - RNA, 14 nt, Human
gucgaugaacuauu

SEQ ID NO: 3709667 - RNA, 13 nt, Human
gucgcccaggaga

SEQ ID NO: 3709668 - RNA, 14 nt, Human
gucgcccaggcugg

SEQ ID NO: 3709669 - RNA, 20 nt, Human
gucgcccaggcuggagugca

SEQ ID NO: 3709670 - RNA, 13 nt, Human
gucgcccagucug

SEQ ID NO: 3709671 - RNA, 14 nt, Human
gucgcccagucugg

SEQ ID NO: 3709672 - RNA, 21 nt, Human
gucgccuuucagcaggcagcc

SEQ ID NO: 3709673 - RNA, 18 nt, Human
gucgcgcaccgaaaaacu

SEQ ID NO: 3709674 - RNA, 13 nt, Human
gucgcgcucagca

SEQ ID NO: 3709675 - RNA, 12 nt, Human
gucgcgcugccu

SEQ ID NO: 3709676 - RNA, 16 nt, Human
gucgcgcugccugugu

SEQ ID NO: 3709677 - RNA, 18 nt, Human
gucgcgcugccugugugg

SEQ ID NO: 3709678 - RNA, 11 nt, Human
gucgcuccugc

SEQ ID NO: 3709679 - RNA, 15 nt, Human
gucgcuccugcccac

SEQ ID NO: 3709680 - RNA, 15 nt, Human
gucggaacagcagau

SEQ ID NO: 3709681 - RNA, 12 nt, Human
gucggagcccug

SEQ ID NO: 3709682 - RNA, 14 nt, Human
gucggaggcuuggg

SEQ ID NO: 3709683 - RNA, 17 nt, Human
gucggccccaccagugc

SEQ ID NO: 3709684 - RNA, 20 nt, Human
gucggccucuaaccccaggc

SEQ ID NO: 3709685 - RNA, 21 nt, Human
gucggccucuaaccccaggcc

SEQ ID NO: 3709686 - RNA, 12 nt, Human
gucggcuccagu

SEQ ID NO: 3709687 - RNA, 22 nt, Human
gucggcuccaguccccagaacu

SEQ ID NO: 3709688 - RNA, 14 nt, Human
gucggcugaccaug

SEQ ID NO: 3709689 - RNA, 18 nt, Human
gucggcugaccaugcuca

SEQ ID NO: 3709690 - RNA, 22 nt, Human
gucgggaugucauguccuccag

SEQ ID NO: 3709691 - RNA, 21 nt, Human
gucgggcccuucuugcugccc

SEQ ID NO: 3709692 - RNA, 22 nt, Human
gucgggcccuucuugcugcccu

SEQ ID NO: 3709693 - RNA, 21 nt, Human
gucgggcucagcucuggcuca

SEQ ID NO: 3709694 - RNA, 18 nt, Human
gucggggcaucuggccug

SEQ ID NO: 3709695 - RNA, 14 nt, Human
gucgggggcugagg

SEQ ID NO: 3709696 - RNA, 17 nt, Human
gucggggggacagcucc

SEQ ID NO: 3709697 - RNA, 12 nt, Human
gucguaaagauu

SEQ ID NO: 3709698 - RNA, 14 nt, Human
gucguaaagauuug

SEQ ID NO: 3709699 - RNA, 19 nt, Human
gucgucacuaauacacagu

SEQ ID NO: 3709700 - RNA, 17 nt, Human
gucgucaucagaugcuu

SEQ ID NO: 3709701 - RNA, 17 nt, Human
gucgucgcacagucucu

SEQ ID NO: 3709702 - RNA, 19 nt, Human
gucgucgcacagucucucu

SEQ ID NO: 3709703 - RNA, 13 nt, Human
gucgugccugugu

SEQ ID NO: 3709704 - RNA, 18 nt, Human
gucgugccuguguccaug

SEQ ID NO: 3709705 - RNA, 19 nt, Human
gucguggagagcuaggagc

SEQ ID NO: 3709706 - RNA, 21 nt, Human
gucguggagagcuaggagcaa

SEQ ID NO: 3709707 - RNA, 15 nt, Human
gucguggcagauaau

SEQ ID NO: 3709708 - RNA, 15 nt, Human
gucguuuuaaaaaca

SEQ ID NO: 3709709 - RNA, 16 nt, Human
gucguuuuuuuuuugu

SEQ ID NO: 3709710 - RNA, 21 nt, Human
gucguuuuuuuuuuguuuguu

SEQ ID NO: 3709711 - RNA, 15 nt, Human
gucuaaaaauucaga

SEQ ID NO: 3709712 - RNA, 20 nt, Human
gucuaaaauuuuuaaggacu

SEQ ID NO: 3709713 - RNA, 16 nt, Human
gucuaaacaaugcuga

SEQ ID NO: 3709714 - RNA, 21 nt, Human
gucuaaacaaugcugauuugg

SEQ ID NO: 3709715 - RNA, 21 nt, Human
gucuaaagauggaguuucuaa

SEQ ID NO: 3709716 - RNA, 15 nt, Human
gucuaaaugcugaaa

SEQ ID NO: 3709717 - RNA, 18 nt, Human
gucuaacuuuugugugaa

SEQ ID NO: 3709718 - RNA, 14 nt, Human
gucuaagauucuag

SEQ ID NO: 3709719 - RNA, 15 nt, Human
gucuaagauucuaga

SEQ ID NO: 3709720 - RNA, 20 nt, Human
gucuaaggaugcuaaaccuu

SEQ ID NO: 3709721 - RNA, 21 nt, Human
gucuaaucuagauaucgacuu

SEQ ID NO: 3709722 - RNA, 22 nt, Human
gucuaauugcaucucaaaauua

SEQ ID NO: 3709723 - RNA, 23 nt, Human
gucuacacuaagagagaaugaga

SEQ ID NO: 3709724 - RNA, 15 nt, Human
gucuaccaauuauaa

SEQ ID NO: 3709725 - RNA, 13 nt, Human
gucuaccaucucc

SEQ ID NO: 3709726 - RNA, 20 nt, Human
gucuaccugaggggccucuu

SEQ ID NO: 3709727 - RNA, 21 nt, Human
gucuagagagggaggcaagcc

SEQ ID NO: 3709728 - RNA, 20 nt, Human
gucuagauggcuccucucag

SEQ ID NO: 3709729 - RNA, 11 nt, Human
gucuagauuca

SEQ ID NO: 3709730 - RNA, 19 nt, Human
gucuagauucaaagguucu

SEQ ID NO: 3709731 - RNA, 19 nt, Human
gucuagcagagcaggggca

SEQ ID NO: 3709732 - RNA, 22 nt, Human
gucuagcuaugcuguaucugug

SEQ ID NO: 3709733 - RNA, 23 nt, Human
gucuaggcaggaccuguggccaa

SEQ ID NO: 3709734 - RNA, 12 nt, Human
gucuagggagag

SEQ ID NO: 3709735 - RNA, 14 nt, Human
gucuagggagagac

SEQ ID NO: 3709736 - RNA, 23 nt, Human
gucuaguugccaaaucuggcucc

SEQ ID NO: 3709737 - RNA, 13 nt, Human
gucuauaaagcau

SEQ ID NO: 3709738 - RNA, 17 nt, Human
gucuauaugaaaaacaa

SEQ ID NO: 3709739 - RNA, 14 nt, Human
gucuauauguuugu

SEQ ID NO: 3709740 - RNA, 21 nt, Human
gucuaucaaccccagacacug

SEQ ID NO: 3709741 - RNA, 23 nt, Human
gucuaucaaccccagacacuggu

SEQ ID NO: 3709742 - RNA, 20 nt, Human
gucuaucugguauuaaaugc

SEQ ID NO: 3709743 - RNA, 15 nt, Human
gucuaugggacucaa

SEQ ID NO: 3709744 - RNA, 12 nt, Human
gucuauucauua

SEQ ID NO: 3709745 - RNA, 12 nt, Human
gucuauuccagc

SEQ ID NO: 3709746 - RNA, 16 nt, Human
gucuauuccagcucau

SEQ ID NO: 3709747 - RNA, 10 nt, Human
gucuauuuaa

SEQ ID NO: 3709748 - RNA, 22 nt, Human
gucuauuucaucagaacagcug

SEQ ID NO: 3709749 - RNA, 19 nt, Human
gucucaaaaaaagaaaaag

SEQ ID NO: 3709750 - RNA, 17 nt, Human
gucucaaaaauacaaaa

SEQ ID NO: 3709751 - RNA, 16 nt, Human
gucucaaacuccuggg

SEQ ID NO: 3709752 - RNA, 14 nt, Human
gucucaaaggccag

SEQ ID NO: 3709753 - RNA, 15 nt, Human
gucucaagagggcac

SEQ ID NO: 3709754 - RNA, 23 nt, Human
gucucacaguguugcccaggcug

SEQ ID NO: 3709755 - RNA, 23 nt, Human
gucucacaugauuccagccauca

SEQ ID NO: 3709756 - RNA, 21 nt, Human
gucucaccauuuccccagggc

SEQ ID NO: 3709757 - RNA, 15 nt, Human
gucucacccuggagg

SEQ ID NO: 3709758 - RNA, 20 nt, Human
gucucaccggcucucaccug

SEQ ID NO: 3709759 - RNA, 23 nt, Human
gucucacuauguugcccaggcag

SEQ ID NO: 3709760 - RNA, 15 nt, Human
gucucacucugucgc

SEQ ID NO: 3709761 - RNA, 18 nt, Human
gucucacucugucgccca

SEQ ID NO: 3709762 - RNA, 18 nt, Human
gucucacuguugcccagg

SEQ ID NO: 3709763 - RNA, 22 nt, Human
gucucacuguugcccaggcugg

SEQ ID NO: 3709764 - RNA, 16 nt, Human
gucucagaaucuuucc

SEQ ID NO: 3709765 - RNA, 18 nt, Human
gucucagacuuuuguaca

SEQ ID NO: 3709766 - RNA, 20 nt, Human
gucucagacuuuuguacauc

SEQ ID NO: 3709767 - RNA, 13 nt, Human
gucucagauuuua

SEQ ID NO: 3709768 - RNA, 14 nt, Human
gucucagauuuuau

SEQ ID NO: 3709769 - RNA, 15 nt, Human
gucucagauuuuauu

SEQ ID NO: 3709770 - RNA, 16 nt, Human
gucucagauuuuauua

SEQ ID NO: 3709771 - RNA, 12 nt, Human
gucucaggagca

SEQ ID NO: 3709772 - RNA, 16 nt, Human
gucucaggagucucug

SEQ ID NO: 3709773 - RNA, 18 nt, Human
gucucagggugcagaggu

SEQ ID NO: 3709774 - RNA, 20 nt, Human
gucucagguuuguuuuguga

SEQ ID NO: 3709775 - RNA, 23 nt, Human
gucucaguccaugaagauguaga

SEQ ID NO: 3709776 - RNA, 16 nt, Human
gucucagugaagacua

SEQ ID NO: 3709777 - RNA, 15 nt, Human
gucucaguuggaaau

SEQ ID NO: 3709778 - RNA, 19 nt, Human
gucucaguuugugugucuu

SEQ ID NO: 3709779 - RNA, 22 nt, Human
gucucauaguuggacuuucuag

SEQ ID NO: 3709780 - RNA, 16 nt, Human
gucucauccaucauca

SEQ ID NO: 3709781 - RNA, 12 nt, Human
gucucaucccau

SEQ ID NO: 3709782 - RNA, 13 nt, Human
gucucauccccag

SEQ ID NO: 3709783 - RNA, 16 nt, Human
gucucauccccagggg

SEQ ID NO: 3709784 - RNA, 22 nt, Human
gucucaugccaguaacaggcuc

SEQ ID NO: 3709785 - RNA, 16 nt, Human
gucucauuuuaaugua

SEQ ID NO: 3709786 - RNA, 23 nt, Human
gucuccaaaaaaaaaaaaaauac

SEQ ID NO: 3709787 - RNA, 20 nt, Human
gucuccacacacagcugggc

SEQ ID NO: 3709788 - RNA, 23 nt, Human
gucuccacacacagcugggcugu

SEQ ID NO: 3709789 - RNA, 12 nt, Human
gucuccacugug

SEQ ID NO: 3709790 - RNA, 19 nt, Human
gucuccacugugccuuugc

SEQ ID NO: 3709791 - RNA, 23 nt, Human
gucuccagaaagccccacccagg

SEQ ID NO: 3709792 - RNA, 15 nt, Human
gucuccagaccccca

SEQ ID NO: 3709793 - RNA, 17 nt, Human
gucuccagacccccacc

SEQ ID NO: 3709794 - RNA, 11 nt, Human
gucuccagccc

SEQ ID NO: 3709795 - RNA, 19 nt, Human
gucuccaggggcugcuucc

SEQ ID NO: 3709796 - RNA, 21 nt, Human
gucuccaguauccacuuugca

SEQ ID NO: 3709797 - RNA, 18 nt, Human
gucuccagugguugcugu

SEQ ID NO: 3709798 - RNA, 19 nt, Human
gucuccauguuugauguau

SEQ ID NO: 3709799 - RNA, 22 nt, Human
gucucccccacccuuguuccag

SEQ ID NO: 3709800 - RNA, 17 nt, Human
gucuccccuguuccccu

SEQ ID NO: 3709801 - RNA, 20 nt, Human
gucucccgauucccaacuga

SEQ ID NO: 3709802 - RNA, 16 nt, Human
gucucccuccucugcc

SEQ ID NO: 3709803 - RNA, 19 nt, Human
gucucccuccucugcccgg

SEQ ID NO: 3709804 - RNA, 16 nt, Human
gucucccucuccugcc

SEQ ID NO: 3709805 - RNA, 17 nt, Human
gucucccucuccugccu

SEQ ID NO: 3709806 - RNA, 14 nt, Human
ugcacuauauacau

SEQ ID NO: 3709807 - RNA, 16 nt, Human
ugcacuaucuuucagc

SEQ ID NO: 3709808 - RNA, 22 nt, Human
ugcacucaaaucuuaagaaaua

SEQ ID NO: 3709809 - RNA, 18 nt, Human
ugcacuccagccugggcg

SEQ ID NO: 3709810 - RNA, 19 nt, Human
ugcacuccagccugggcga

SEQ ID NO: 3709811 - RNA, 15 nt, Human
ugcacucccaccuga

SEQ ID NO: 3709812 - RNA, 16 nt, Human
ugcacuccccugcugg

SEQ ID NO: 3709813 - RNA, 12 nt, Human
ugcacuccucag

SEQ ID NO: 3709814 - RNA, 15 nt, Human
ugcacucuagccgga

SEQ ID NO: 3709815 - RNA, 15 nt, Human
ugcacucugugccca

SEQ ID NO: 3709816 - RNA, 10 nt, Human
ugcacugaag

SEQ ID NO: 3709817 - RNA, 15 nt, Human
ugcacugacccuucc

SEQ ID NO: 3709818 - RNA, 12 nt, Human
ugcacugacucu

SEQ ID NO: 3709819 - RNA, 17 nt, Human
ugcacugacucuggaaa

SEQ ID NO: 3709820 - RNA, 17 nt, Human
ugcacugagcagagucu

SEQ ID NO: 3709821 - RNA, 12 nt, Human
ugcacugagggc

SEQ ID NO: 3709822 - RNA, 16 nt, Human
ugcacugagggccaca

SEQ ID NO: 3709823 - RNA, 19 nt, Human
ugcacugagggccacacua

SEQ ID NO: 3709824 - RNA, 22 nt, Human
ugcacugauauaucaugaguga

SEQ ID NO: 3709825 - RNA, 17 nt, Human
ugcacugaugcugcccc

SEQ ID NO: 3709826 - RNA, 21 nt, Human
ugcacugaugcugccccucau

SEQ ID NO: 3709827 - RNA, 22 nt, Human
ugcacugaugcugccccucauc

SEQ ID NO: 3709828 - RNA, 14 nt, Human
ugcacugauguugu

SEQ ID NO: 3709829 - RNA, 15 nt, Human
ugcacugauguugug

SEQ ID NO: 3709830 - RNA, 21 nt, Human
ugcacugauguuguguuuuua

SEQ ID NO: 3709831 - RNA, 15 nt, Human
ugcacuggccccacc

SEQ ID NO: 3709832 - RNA, 17 nt, Human
ugcacuggccuucugau

SEQ ID NO: 3709833 - RNA, 20 nt, Human
ugcacuggggagcccgucuc

SEQ ID NO: 3709834 - RNA, 17 nt, Human
ugcacuguaaaaugugg

SEQ ID NO: 3709835 - RNA, 15 nt, Human
ugcacugucacuuug

SEQ ID NO: 3709836 - RNA, 19 nt, Human
ugcacugucacuuugcucu

SEQ ID NO: 3709837 - RNA, 23 nt, Human
ugcacugucacuuugcucugggu

SEQ ID NO: 3709838 - RNA, 14 nt, Human
ugcacuguccugcu

SEQ ID NO: 3709839 - RNA, 15 nt, Human
ugcacuguccugcuc

SEQ ID NO: 3709840 - RNA, 18 nt, Human
ugcacuguccugcuccac

SEQ ID NO: 3709841 - RNA, 20 nt, Human
ugcacuguccugcuccacag

SEQ ID NO: 3709842 - RNA, 21 nt, Human
ugcacuguccugcuccacagu

SEQ ID NO: 3709843 - RNA, 19 nt, Human
ugcacugucgauaaucaga

SEQ ID NO: 3709844 - RNA, 15 nt, Human
ugcacugugaaggac

SEQ ID NO: 3709845 - RNA, 13 nt, Human
ugcacuguucccc

SEQ ID NO: 3709846 - RNA, 17 nt, Human
ugcacuuaaauaucaau

SEQ ID NO: 3709847 - RNA, 18 nt, Human
ugcacuuaacaagcuccc

SEQ ID NO: 3709848 - RNA, 16 nt, Human
ugcacuuaaggcacuc

SEQ ID NO: 3709849 - RNA, 15 nt, Human
ugcacuuacuugcuu

SEQ ID NO: 3709850 - RNA, 16 nt, Human
ugcacuuacuugcuua

SEQ ID NO: 3709851 - RNA, 23 nt, Human
ugcacuuauugaccauuuuuuaa

SEQ ID NO: 3709852 - RNA, 22 nt, Human
ugcacuuauuuaugaaccugcc

SEQ ID NO: 3709853 - RNA, 15 nt, Human
ugcacuucaaauuca

SEQ ID NO: 3709854 - RNA, 16 nt, Human
ugcacuugcagacucu

SEQ ID NO: 3709855 - RNA, 22 nt, Human
ugcacuugcgguuccggcaugg

SEQ ID NO: 3709856 - RNA, 21 nt, Human
ugcacuugggggcucagcaag

SEQ ID NO: 3709857 - RNA, 14 nt, Human
ugcacuuucagacu

SEQ ID NO: 3709858 - RNA, 19 nt, Human
ugcacuuugaugucaugug

SEQ ID NO: 3709859 - RNA, 16 nt, Human
ugcacuuugcuuuaau

SEQ ID NO: 3709860 - RNA, 12 nt, Human
ugcacuuuguaa

SEQ ID NO: 3709861 - RNA, 17 nt, Human
ugcacuuuguaaauucc

SEQ ID NO: 3709862 - RNA, 15 nt, Human
ugcacuuuguagugu

SEQ ID NO: 3709863 - RNA, 12 nt, Human
ugcacuuuguuc

SEQ ID NO: 3709864 - RNA, 21 nt, Human
ugcacuuuucuaaacuaggcu

SEQ ID NO: 3709865 - RNA, 18 nt, Human
ugcacuuuuuuucuauau

SEQ ID NO: 3709866 - RNA, 16 nt, Human
ugcagaaaagcaccug

SEQ ID NO: 3709867 - RNA, 20 nt, Human
ugcagaaaagcaccugccga

SEQ ID NO: 3709868 - RNA, 19 nt, Human
ugcagaaauagacaaaaag

SEQ ID NO: 3709869 - RNA, 14 nt, Human
ugcagaacaaauga

SEQ ID NO: 3709870 - RNA, 18 nt, Human
ugcagaacaaaugaagac

SEQ ID NO: 3709871 - RNA, 21 nt, Human
ugcagaacacauuucaaauga

SEQ ID NO: 3709872 - RNA, 20 nt, Human
ugcagaaccggagagccagc

SEQ ID NO: 3709873 - RNA, 15 nt, Human
ugcagaacucccaag

SEQ ID NO: 3709874 - RNA, 21 nt, Human
ugcagaacuugaagccugcuc

SEQ ID NO: 3709875 - RNA, 15 nt, Human
ugcagaaggaaaaau

SEQ ID NO: 3709876 - RNA, 20 nt, Human
ugcagaaguucuuaguguug

SEQ ID NO: 3709877 - RNA, 18 nt, Human
ugcagaauggcauuugca

SEQ ID NO: 3709878 - RNA, 11 nt, Human
ugcagaaugua

SEQ ID NO: 3709879 - RNA, 21 nt, Human
ugcagacacgccuuccccuca

SEQ ID NO: 3709880 - RNA, 13 nt, Human
ugcagacaggaau

SEQ ID NO: 3709881 - RNA, 18 nt, Human
ugcagacaggaaucuuaa

SEQ ID NO: 3709882 - RNA, 20 nt, Human
ugcagacaggaaucuuaagg

SEQ ID NO: 3709883 - RNA, 13 nt, Human
ugcagacaggcaa

SEQ ID NO: 3709884 - RNA, 22 nt, Human
ugcagacagggggccagaacac

SEQ ID NO: 3709885 - RNA, 23 nt, Human
ugcagaccacgcccguccugccu

SEQ ID NO: 3709886 - RNA, 19 nt, Human
ugcagaccuguccuccugg

SEQ ID NO: 3709887 - RNA, 20 nt, Human
ugcagaccuguccuccuggu

SEQ ID NO: 3709888 - RNA, 23 nt, Human
ugcagaccuguccuccugguggg

SEQ ID NO: 3709889 - RNA, 19 nt, Human
ugcagacuagaauucuagu

SEQ ID NO: 3709890 - RNA, 16 nt, Human
ugcagacucaauaaaa

SEQ ID NO: 3709891 - RNA, 14 nt, Human
ugcagacucacugu

SEQ ID NO: 3709892 - RNA, 17 nt, Human
ugcagacucuacagagg

SEQ ID NO: 3709893 - RNA, 18 nt, Human
ugcagacucuacagaggc

SEQ ID NO: 3709894 - RNA, 20 nt, Human
ugcagacucuacagaggcca

SEQ ID NO: 3709895 - RNA, 22 nt, Human
ugcagacucuacagaggccaug

SEQ ID NO: 3709896 - RNA, 16 nt, Human
ugcagacuucccagcu

SEQ ID NO: 3709897 - RNA, 21 nt, Human
ugcagagaaacuuaagcaaag

SEQ ID NO: 3709898 - RNA, 14 nt, Human
ugcagagagaagcc

SEQ ID NO: 3709899 - RNA, 17 nt, Human
ugcagagagccauuuug

SEQ ID NO: 3709900 - RNA, 13 nt, Human
ugcagagauuucu

SEQ ID NO: 3709901 - RNA, 17 nt, Human
ugcagagcaguaaggga

SEQ ID NO: 3709902 - RNA, 15 nt, Human
ugcagagccuucuca

SEQ ID NO: 3709903 - RNA, 20 nt, Human
ugcagagccuucucagaagc

SEQ ID NO: 3709904 - RNA, 15 nt, Human
ugcagagcugaagau

SEQ ID NO: 3709905 - RNA, 11 nt, Human
ugcagagcugc

SEQ ID NO: 3709906 - RNA, 11 nt, Human
ugcagaggcug

SEQ ID NO: 3709907 - RNA, 14 nt, Human
ugcagaggcugugg

SEQ ID NO: 3709908 - RNA, 15 nt, Human
ugcagaggcuguggc

SEQ ID NO: 3709909 - RNA, 22 nt, Human
ugcagaggcuguggcuggugag

SEQ ID NO: 3709910 - RNA, 13 nt, Human
ugcagaggggaaa

SEQ ID NO: 3709911 - RNA, 18 nt, Human
ugcagaggggcaggcccu

SEQ ID NO: 3709912 - RNA, 21 nt, Human
ugcagaggggcuuucuggaga

SEQ ID NO: 3709913 - RNA, 18 nt, Human
ugcagagguacccugggu

SEQ ID NO: 3709914 - RNA, 19 nt, Human
ugcagagguccacaacaca

SEQ ID NO: 3709915 - RNA, 16 nt, Human
ugcagaggucugugcu

SEQ ID NO: 3709916 - RNA, 21 nt, Human
ugcagaggucugugcugaggc

SEQ ID NO: 3709917 - RNA, 22 nt, Human
ugcagaguaggggucugucuuu

SEQ ID NO: 3709918 - RNA, 19 nt, Human
ugcagaguauuucuaaagu

SEQ ID NO: 3709919 - RNA, 14 nt, Human
ugcagagucagcag

SEQ ID NO: 3709920 - RNA, 15 nt, Human
ugcagaugacaaaaa

SEQ ID NO: 3709921 - RNA, 11 nt, Human
ugcagaugcca

SEQ ID NO: 3709922 - RNA, 17 nt, Human
ugcagaugccacccuag

SEQ ID NO: 3709923 - RNA, 18 nt, Human
ugcagauggugagagaua

SEQ ID NO: 3709924 - RNA, 22 nt, Human
ugcagauugagaccuacaggcu

SEQ ID NO: 3709925 - RNA, 19 nt, Human
ugcagcaaacacuccaccc

SEQ ID NO: 3709926 - RNA, 22 nt, Human
ugcagcaaacacuccacccucc

SEQ ID NO: 3709927 - RNA, 19 nt, Human
ugcagcaaccagagcacug

SEQ ID NO: 3709928 - RNA, 16 nt, Human
ugcagcaauaaagcag

SEQ ID NO: 3709929 - RNA, 18 nt, Human
ugcagcaauuaaaaauug

SEQ ID NO: 3709930 - RNA, 17 nt, Human
ugcagcaccgaggggcc

SEQ ID NO: 3709931 - RNA, 20 nt, Human
ugcagcaccgaggggccuuu

SEQ ID NO: 3709932 - RNA, 15 nt, Human
ugcagcaccuccagg

SEQ ID NO: 3709933 - RNA, 16 nt, Human
ugcagcaccuccaggc

SEQ ID NO: 3709934 - RNA, 18 nt, Human
ugcagcaccuccaggccu

SEQ ID NO: 3709935 - RNA, 19 nt, Human
ugcagcaccuccaggccug

SEQ ID NO: 3709936 - RNA, 20 nt, Human
ugcagcacggacaauaaacc

SEQ ID NO: 3709937 - RNA, 17 nt, Human
ugcagcacucacacagg

SEQ ID NO: 3709938 - RNA, 16 nt, Human
ugcagcagauuggaag

SEQ ID NO: 3709939 - RNA, 22 nt, Human
ugcagcagauuggaaggagaca

SEQ ID NO: 3709940 - RNA, 20 nt, Human
ugcagcagcaacacaauguu

SEQ ID NO: 3709941 - RNA, 22 nt, Human
ugcagcagcaacacaauguuau

SEQ ID NO: 3709942 - RNA, 16 nt, Human
ugcagcagcuugcugc

SEQ ID NO: 3709943 - RNA, 23 nt, Human
ugcagcaggaauauaugugugcc

SEQ ID NO: 3709944 - RNA, 21 nt, Human
ugcagcaggaucuagaggggg

SEQ ID NO: 3709945 - RNA, 14 nt, Human
ugcagcagggaugc

SEQ ID NO: 3709946 - RNA, 18 nt, Human
ugcagcagggaugcccug

SEQ ID NO: 3709947 - RNA, 19 nt, Human
ugcagcagggaugcccugg

SEQ ID NO: 3709948 - RNA, 22 nt, Human
ugcagcagggaugcccuggagg

SEQ ID NO: 3709949 - RNA, 22 nt, Human
ugcagcagugagucucuucaga

SEQ ID NO: 3709950 - RNA, 22 nt, Human
ugcagcaguucaccuauuucaa

SEQ ID NO: 3709951 - RNA, 15 nt, Human
ugcagcauaugagga

SEQ ID NO: 3709952 - RNA, 20 nt, Human
ugcagcauaugaggaugcag

SEQ ID NO: 3709953 - RNA, 13 nt, Human
ugcagcaugaccu

SEQ ID NO: 3709954 - RNA, 19 nt, Human
ugcagcaugaccugugacc

SEQ ID NO: 3709955 - RNA, 16 nt, Human
ugcuguugaaagcaaa

SEQ ID NO: 3709956 - RNA, 17 nt, Human
ugcuguugaaagcaaaa

SEQ ID NO: 3709957 - RNA, 22 nt, Human
ugcuguugaaagcaaaaaugcu

SEQ ID NO: 3709958 - RNA, 18 nt, Human
ugcuguugauugcuaaau

SEQ ID NO: 3709959 - RNA, 19 nt, Human
ugcuguugauugcuaaaug

SEQ ID NO: 3709960 - RNA, 14 nt, Human
ugcuguugccucau

SEQ ID NO: 3709961 - RNA, 17 nt, Human
ugcuguugcugauuuua

SEQ ID NO: 3709962 - RNA, 23 nt, Human
ugcuguugucauugcuuuacugg

SEQ ID NO: 3709963 - RNA, 23 nt, Human
ugcuguuguccaacuauuuauug

SEQ ID NO: 3709964 - RNA, 12 nt, Human
ugcuguuguccc

SEQ ID NO: 3709965 - RNA, 15 nt, Human
ugcuguuguuaugau

SEQ ID NO: 3709966 - RNA, 16 nt, Human
ugcuguuguuaugaug

SEQ ID NO: 3709967 - RNA, 17 nt, Human
ugcuguuguuaugaugu

SEQ ID NO: 3709968 - RNA, 22 nt, Human
ugcuguuuaucccuuaagaaug

SEQ ID NO: 3709969 - RNA, 18 nt, Human
ugcuguuucacaauaccu

SEQ ID NO: 3709970 - RNA, 11 nt, Human
ugcuguuuccu

SEQ ID NO: 3709971 - RNA, 12 nt, Human
ugcuguuuccuu

SEQ ID NO: 3709972 - RNA, 14 nt, Human
ugcuguuuccuuuu

SEQ ID NO: 3709973 - RNA, 16 nt, Human
ugcuguuuguagugaa

SEQ ID NO: 3709974 - RNA, 21 nt, Human
ugcuguuuguagugaaauaau

SEQ ID NO: 3709975 - RNA, 23 nt, Human
ugcuguuuuaaacauuaauagca

SEQ ID NO: 3709976 - RNA, 14 nt, Human
ugcuguuuuccucc

SEQ ID NO: 3709977 - RNA, 16 nt, Human
ugcuguuuuccucccu

SEQ ID NO: 3709978 - RNA, 16 nt, Human
ugcuguuuugccagcc

SEQ ID NO: 3709979 - RNA, 19 nt, Human
ugcuguuuuguuauauaau

SEQ ID NO: 3709980 - RNA, 17 nt, Human
ugcuuaaaaaucauuga

SEQ ID NO: 3709981 - RNA, 18 nt, Human
ugcuuaaaaaucauugau

SEQ ID NO: 3709982 - RNA, 19 nt, Human
ugcuuaaaaaucauugauu

SEQ ID NO: 3709983 - RNA, 18 nt, Human
ugcuuaaaagguugcaua

SEQ ID NO: 3709984 - RNA, 19 nt, Human
ugcuuaaaauaagcaggug

SEQ ID NO: 3709985 - RNA, 21 nt, Human
ugcuuaaaccacuuaaacgaa

SEQ ID NO: 3709986 - RNA, 16 nt, Human
ugcuuaaauuucuuau

SEQ ID NO: 3709987 - RNA, 22 nt, Human
ugcuuaaauuucuuaugugaca

SEQ ID NO: 3709988 - RNA, 17 nt, Human
ugcuuaacuucacauau

SEQ ID NO: 3709989 - RNA, 19 nt, Human
ugcuuaacuucacauauug

SEQ ID NO: 3709990 - RNA, 19 nt, Human
ugcuuaagggaguuuaaua

SEQ ID NO: 3709991 - RNA, 15 nt, Human
ugcuuaaguuccagc

SEQ ID NO: 3709992 - RNA, 21 nt, Human
ugcuuaaucuucaaagccuuc

SEQ ID NO: 3709993 - RNA, 14 nt, Human
ugcuuaaugaaaag

SEQ ID NO: 3709994 - RNA, 20 nt, Human
ugcuuaauucaaauaauaau

SEQ ID NO: 3709995 - RNA, 14 nt, Human
ugcuuaauuucuaa

SEQ ID NO: 3709996 - RNA, 22 nt, Human
ugcuuacaauuuuuuuaauuuu

SEQ ID NO: 3709997 - RNA, 15 nt, Human
ugcuuacacaucuca

SEQ ID NO: 3709998 - RNA, 12 nt, Human
ugcuuacauuuu

SEQ ID NO: 3709999 - RNA, 19 nt, Human
ugcuuaccuacuuucuuca

SEQ ID NO: 3710000 - RNA, 23 nt, Human
ugcuuaccuugacuguugaugua

SEQ ID NO: 3710001 - RNA, 14 nt, Human
ugcuuacuuaugcc

SEQ ID NO: 3710002 - RNA, 17 nt, Human
ugcuuagacauaacaaa

SEQ ID NO: 3710003 - RNA, 13 nt, Human
ugcuuagcaaaaa

SEQ ID NO: 3710004 - RNA, 15 nt, Human
ugcuuagccuccuga

SEQ ID NO: 3710005 - RNA, 18 nt, Human
ugcuuagcucaucuuaga

SEQ ID NO: 3710006 - RNA, 18 nt, Human
ugcuuagucacugccugc

SEQ ID NO: 3710007 - RNA, 16 nt, Human
ugcuuauauuguucac

SEQ ID NO: 3710008 - RNA, 17 nt, Human
ugcuuauauuguuuuca

SEQ ID NO: 3710009 - RNA, 18 nt, Human
ugcuuaugaauauuuaua

SEQ ID NO: 3710010 - RNA, 19 nt, Human
ugcuuaugaauauuuauaa

SEQ ID NO: 3710011 - RNA, 12 nt, Human
ugcuuauguugu

SEQ ID NO: 3710012 - RNA, 19 nt, Human
ugcuuauguuguuuuguac

SEQ ID NO: 3710013 - RNA, 17 nt, Human
ugcuuauuauguaggua

SEQ ID NO: 3710014 - RNA, 19 nt, Human
ugcuuauuccaugacugcu

SEQ ID NO: 3710015 - RNA, 13 nt, Human
ugcuuauugauau

SEQ ID NO: 3710016 - RNA, 14 nt, Human
ugcuuauuguucca

SEQ ID NO: 3710017 - RNA, 13 nt, Human
ugcuucaaaaaca

SEQ ID NO: 3710018 - RNA, 19 nt, Human
ugcuucaaauccauccaga

SEQ ID NO: 3710019 - RNA, 16 nt, Human
ugcuucaagagaaaau

SEQ ID NO: 3710020 - RNA, 12 nt, Human
ugcuucaaggau

SEQ ID NO: 3710021 - RNA, 18 nt, Human
ugcuucaaggauccugag

SEQ ID NO: 3710022 - RNA, 23 nt, Human
ugcuucaaggauccugagccaga

SEQ ID NO: 3710023 - RNA, 16 nt, Human
ugcuucaaggcuucca

SEQ ID NO: 3710024 - RNA, 23 nt, Human
ugcuucaauacccaaauccucuc

SEQ ID NO: 3710025 - RNA, 23 nt, Human
ugcuucaauuaauaaaaaaugga

SEQ ID NO: 3710026 - RNA, 15 nt, Human
ugcuucacaacccau

SEQ ID NO: 3710027 - RNA, 20 nt, Human
ugcuucacaguagagccagc

SEQ ID NO: 3710028 - RNA, 21 nt, Human
ugcuucacaguagagccagcu

SEQ ID NO: 3710029 - RNA, 16 nt, Human
ugcuucacuucuccca

SEQ ID NO: 3710030 - RNA, 22 nt, Human
ugcuucagauguggagccaggc

SEQ ID NO: 3710031 - RNA, 14 nt, Human
ugcuucagccuccc

SEQ ID NO: 3710032 - RNA, 23 nt, Human
ugcuucagccugaggcugagacu

SEQ ID NO: 3710033 - RNA, 16 nt, Human
ugcuucaguggagaau

SEQ ID NO: 3710034 - RNA, 20 nt, Human
ugcuucauaaaugaagcagc

SEQ ID NO: 3710035 - RNA, 15 nt, Human
ugcuucauacaggga

SEQ ID NO: 3710036 - RNA, 18 nt, Human
ugcuucaucuucccaggu

SEQ ID NO: 3710037 - RNA, 19 nt, Human
ugcuucaucuucccaggua

SEQ ID NO: 3710038 - RNA, 17 nt, Human
ugcuucaugaaaauccu

SEQ ID NO: 3710039 - RNA, 18 nt, Human
ugcuucaugaaaauccua

SEQ ID NO: 3710040 - RNA, 20 nt, Human
ugcuucaugaaaauccuacc

SEQ ID NO: 3710041 - RNA, 15 nt, Human
ugcuucauguguccc

SEQ ID NO: 3710042 - RNA, 19 nt, Human
ugcuucaugugucccagaa

SEQ ID NO: 3710043 - RNA, 15 nt, Human
ugcuuccaauuuucu

SEQ ID NO: 3710044 - RNA, 16 nt, Human
ugcuuccaccucaccc

SEQ ID NO: 3710045 - RNA, 19 nt, Human
ugcuuccaccucaccccac

SEQ ID NO: 3710046 - RNA, 13 nt, Human
ugcuuccagaaac

SEQ ID NO: 3710047 - RNA, 14 nt, Human
ugcuuccagaaaca

SEQ ID NO: 3710048 - RNA, 19 nt, Human
ugcuuccagugaggcucug

SEQ ID NO: 3710049 - RNA, 21 nt, Human
ugcuucccaccucccugccca

SEQ ID NO: 3710050 - RNA, 23 nt, Human
ugcuucccaccucccugcccagg

SEQ ID NO: 3710051 - RNA, 14 nt, Human
ugcuucccagguuc

SEQ ID NO: 3710052 - RNA, 15 nt, Human
ugcuucccauccuac

SEQ ID NO: 3710053 - RNA, 23 nt, Human
ugcuucccauccuacccucgggc

SEQ ID NO: 3710054 - RNA, 15 nt, Human
ugcuuccccuuuugc

SEQ ID NO: 3710055 - RNA, 15 nt, Human
ugcuucccuaaucua

SEQ ID NO: 3710056 - RNA, 20 nt, Human
ugcuucccucugccuguccc

SEQ ID NO: 3710057 - RNA, 15 nt, Human
ugcuucccuuacuuu

SEQ ID NO: 3710058 - RNA, 16 nt, Human
ugcuucccuuuccuga

SEQ ID NO: 3710059 - RNA, 21 nt, Human
ugcuuccuagaaguuacugaa

SEQ ID NO: 3710060 - RNA, 13 nt, Human
ugcuuccuccugg

SEQ ID NO: 3710061 - RNA, 22 nt, Human
ugcuuccugucuuauccuccac

SEQ ID NO: 3710062 - RNA, 16 nt, Human
ugcuucuaaguaaaua

SEQ ID NO: 3710063 - RNA, 17 nt, Human
ugcuucuaaguaaauac

SEQ ID NO: 3710064 - RNA, 19 nt, Human
ugcuucuaaguaaauacaa

SEQ ID NO: 3710065 - RNA, 22 nt, Human
ugcuucuaauauuuauugcuuu

SEQ ID NO: 3710066 - RNA, 18 nt, Human
ugcuucuaguucugccag

SEQ ID NO: 3710067 - RNA, 19 nt, Human
ugcuucucauagccccggu

SEQ ID NO: 3710068 - RNA, 19 nt, Human
ugcuucucaucuugugaaa

SEQ ID NO: 3710069 - RNA, 13 nt, Human
ugcuucucccagg

SEQ ID NO: 3710070 - RNA, 17 nt, Human
ugcuucucccaggcaag

SEQ ID NO: 3710071 - RNA, 14 nt, Human
ugcuucuccccaga

SEQ ID NO: 3710072 - RNA, 16 nt, Human
ugcuucuccccagaau

SEQ ID NO: 3710073 - RNA, 22 nt, Human
ugcuucucuagcucucuaggcc

SEQ ID NO: 3710074 - RNA, 23 nt, Human
ugcuucucuagcucucuaggccu

SEQ ID NO: 3710075 - RNA, 19 nt, Human
ugcuucucugacuucugcc

SEQ ID NO: 3710076 - RNA, 20 nt, Human
ugcuucucugacuucugccu

SEQ ID NO: 3710077 - RNA, 21 nt, Human
ugcuucucugacuucugccug

SEQ ID NO: 3710078 - RNA, 23 nt, Human
ugcuucucugacuucugccugga

SEQ ID NO: 3710079 - RNA, 16 nt, Human
ugcuucugaauacaaa

SEQ ID NO: 3710080 - RNA, 13 nt, Human
ugcuucugccacc

SEQ ID NO: 3710081 - RNA, 12 nt, Human
ugcuucugggaa

SEQ ID NO: 3710082 - RNA, 13 nt, Human
ugcuucugggaga

SEQ ID NO: 3710083 - RNA, 17 nt, Human
ugcuucuguuuuauaau

SEQ ID NO: 3710084 - RNA, 15 nt, Human
ugcuucuuacugaua

SEQ ID NO: 3710085 - RNA, 21 nt, Human
ugcuucuucccuuaaaauuua

SEQ ID NO: 3710086 - RNA, 22 nt, Human
ugcuucuucccuuaaaauuuau

SEQ ID NO: 3710087 - RNA, 19 nt, Human
ugcuucuuucuuugggaau

SEQ ID NO: 3710088 - RNA, 17 nt, Human
ugcuugaaaaaugugca

SEQ ID NO: 3710089 - RNA, 22 nt, Human
ugcuugaaaaaugugcaaaaca

SEQ ID NO: 3710090 - RNA, 21 nt, Human
ugcuugaaagaaaauaugcau

SEQ ID NO: 3710091 - RNA, 12 nt, Human
ugcuugaacaca

SEQ ID NO: 3710092 - RNA, 13 nt, Human
ugcuugaacacag

SEQ ID NO: 3710093 - RNA, 17 nt, Human
ugcuugaacccaggaga

SEQ ID NO: 3710094 - RNA, 20 nt, Human
ugcuugaauaaacaccacug

SEQ ID NO: 3710095 - RNA, 13 nt, Human
ugcuugaggaaaa

SEQ ID NO: 3710096 - RNA, 16 nt, Human
ugcuugaggaaaacaa

SEQ ID NO: 3710097 - RNA, 14 nt, Human
ugcuugagucaggu

SEQ ID NO: 3710098 - RNA, 23 nt, Human
ugcuugagucagguuugaguaga

SEQ ID NO: 3710099 - RNA, 13 nt, Human
ugcuugauacagg

SEQ ID NO: 3710100 - RNA, 21 nt, Human
ugcuugauaggaauucaucuu

SEQ ID NO: 3710101 - RNA, 20 nt, Human
ugcuugaugggauucuggac

SEQ ID NO: 3710102 - RNA, 15 nt, Human
ugcuugaugguuuau

SEQ ID NO: 3710103 - RNA, 22 nt, Human
ugcuugccaaggcagaggccug

SEQ ID NO: 3710104 - RNA, 17 nt, Human
ugcuugccacagagcgg

SEQ ID NO: 3710105 - RNA, 16 nt, Human
ugcuugccaucccucc

SEQ ID NO: 3710106 - RNA, 21 nt, Human
ugcuugcccuaagcagaaagu

SEQ ID NO: 3710107 - RNA, 15 nt, Human
ugcuugccucucugu

SEQ ID NO: 3710108 - RNA, 15 nt, Human
ugcuugccugcaggg

SEQ ID NO: 3710109 - RNA, 17 nt, Human
ugcuugcggcaaaagga

SEQ ID NO: 3710110 - RNA, 21 nt, Human
ugcuugcggcaaaaggaaagc

SEQ ID NO: 3710111 - RNA, 19 nt, Human
ugcuugcugccuucuggau

SEQ ID NO: 3710112 - RNA, 19 nt, Human
ugcuuggaccucgugcuuu

SEQ ID NO: 3710113 - RNA, 21 nt, Human
ugcuuggaccucgugcuuuaa

SEQ ID NO: 3710114 - RNA, 16 nt, Human
ugcuuggaggaaggaa

SEQ ID NO: 3710115 - RNA, 16 nt, Human
ugcuuggcccaggagu

SEQ ID NO: 3710116 - RNA, 14 nt, Human
ugcuuggcccaggg

SEQ ID NO: 3710117 - RNA, 16 nt, Human
ugcuugggcuucaucc

SEQ ID NO: 3710118 - RNA, 16 nt, Human
ugcuuggguggagaag

SEQ ID NO: 3710119 - RNA, 21 nt, Human
ugcuuggguggagaagccauu

SEQ ID NO: 3710120 - RNA, 13 nt, Human
ugcuuggucuguu

SEQ ID NO: 3710121 - RNA, 20 nt, Human
ugcuuguaacaagaaaacau

SEQ ID NO: 3710122 - RNA, 21 nt, Human
ugcuuguaacaagaaaacaua

SEQ ID NO: 3710123 - RNA, 15 nt, Human
ugcuuguaacuaaaa

SEQ ID NO: 3710124 - RNA, 16 nt, Human
ugcuuguacacucauu

SEQ ID NO: 3710125 - RNA, 16 nt, Human
ugcuuguacauaaugc

SEQ ID NO: 3710126 - RNA, 15 nt, Human
ugcuuguauagguuu

SEQ ID NO: 3710127 - RNA, 17 nt, Human
ugcuugucccugcccag

SEQ ID NO: 3710128 - RNA, 15 nt, Human
ugcuugucuucuggu

SEQ ID NO: 3710129 - RNA, 12 nt, Human
ugcuuguuacau

SEQ ID NO: 3710130 - RNA, 19 nt, Human
ugcuuguugggauuccuga

SEQ ID NO: 3710131 - RNA, 14 nt, Human
ugcuuguuuacagc

SEQ ID NO: 3710132 - RNA, 13 nt, Human
ugcuuguuucuug

SEQ ID NO: 3710133 - RNA, 12 nt, Human
ugcuuguuuuau

SEQ ID NO: 3710134 - RNA, 13 nt, Human
ugcuuuaaaaacu

SEQ ID NO: 3710135 - RNA, 19 nt, Human
ugcuuuaaagggccugccu

SEQ ID NO: 3710136 - RNA, 20 nt, Human
ugcuuuaaagggccugccug

SEQ ID NO: 3710137 - RNA, 21 nt, Human
ugcuuuaaagggccugccugg

SEQ ID NO: 3710138 - RNA, 15 nt, Human
ugcuuuaaaguguaa

SEQ ID NO: 3710139 - RNA, 14 nt, Human
ugcuuuaauauaaa

SEQ ID NO: 3710140 - RNA, 21 nt, Human
ugcuuuaauauaaaugcaaau

SEQ ID NO: 3710141 - RNA, 22 nt, Human
ugcuuuaauauaaaugcaaaua

SEQ ID NO: 3710142 - RNA, 13 nt, Human
ugcuuuaauauca

SEQ ID NO: 3710143 - RNA, 22 nt, Human
ugcuuuaccaaacagcaaacca

SEQ ID NO: 3710144 - RNA, 18 nt, Human
ugcuuuaccuuuucaggg

SEQ ID NO: 3710145 - RNA, 11 nt, Human
ugcuuuacugg

SEQ ID NO: 3710146 - RNA, 14 nt, Human
ugcuuuagacuuga

SEQ ID NO: 3710147 - RNA, 18 nt, Human
ugcuuuagacuugaaaag

SEQ ID NO: 3710148 - RNA, 13 nt, Human
ugcuuuagcuuga

SEQ ID NO: 3710149 - RNA, 14 nt, Human
ugcuuuaugcugaa

SEQ ID NO: 3710150 - RNA, 15 nt, Human
ugcuuuaugcugaaa

SEQ ID NO: 3710151 - RNA, 17 nt, Human
ugcuuuaugcugaaaca

SEQ ID NO: 3710152 - RNA, 18 nt, Human
ugcuuuauuaauguuuuc

SEQ ID NO: 3710153 - RNA, 23 nt, Human
ugcuuuauuaauguuuucaaaag

SEQ ID NO: 3710154 - RNA, 15 nt, Human
ugcuuuauuccagaa

SEQ ID NO: 3710155 - RNA, 23 nt, Human
ugcuuucaagaucuaaaucauau

SEQ ID NO: 3710156 - RNA, 23 nt, Human
ugcuuucagaagugcccuuccug

SEQ ID NO: 3710157 - RNA, 16 nt, Human
ugcuuucagauacugg

SEQ ID NO: 3710158 - RNA, 20 nt, Human
ugcuuucagauacuggauug

SEQ ID NO: 3710159 - RNA, 20 nt, Human
ugcuuuccacaccuggcacu

SEQ ID NO: 3710160 - RNA, 13 nt, Human
ugcuuuccagcuc

SEQ ID NO: 3710161 - RNA, 14 nt, Human
ugcuuuccccugug

SEQ ID NO: 3710162 - RNA, 16 nt, Human
ugcuuucccugaacug

SEQ ID NO: 3710163 - RNA, 17 nt, Human
ugcuuuccguggcacug

SEQ ID NO: 3710164 - RNA, 20 nt, Human
ugcuuuccguggcacugcau

SEQ ID NO: 3710165 - RNA, 19 nt, Human
ugcuuucuaugcuguuugu

SEQ ID NO: 3710166 - RNA, 12 nt, Human
ugcuuucuauug

SEQ ID NO: 3710167 - RNA, 12 nt, Human
ugcuuucucccc

SEQ ID NO: 3710168 - RNA, 15 nt, Human
ugcuuucuccuuuaa

SEQ ID NO: 3710169 - RNA, 12 nt, Human
ugcuuucugaaa

SEQ ID NO: 3710170 - RNA, 20 nt, Human
ugcuuucugaacucgcuucu

SEQ ID NO: 3710171 - RNA, 21 nt, Human
ugcuuucugaagcuuuaccag

SEQ ID NO: 3710172 - RNA, 12 nt, Human
ugcuuucugcuc

SEQ ID NO: 3710173 - RNA, 14 nt, Human
ugcuuucuguucca

SEQ ID NO: 3710174 - RNA, 16 nt, Human
ugcuuucuguuccaaa

SEQ ID NO: 3710175 - RNA, 17 nt, Human
ugcuuucuguuccaaau

SEQ ID NO: 3710176 - RNA, 22 nt, Human
ugcuuucuuucguuuguuuguu

SEQ ID NO: 3710177 - RNA, 16 nt, Human
ugcuuugaaacagaaa

SEQ ID NO: 3710178 - RNA, 21 nt, Human
ugcuuugaaacagaaaaauau

SEQ ID NO: 3710179 - RNA, 20 nt, Human
ugcuuugaaacuagacuuga

SEQ ID NO: 3710180 - RNA, 23 nt, Human
ugcuuugaaagccccagaaauca

SEQ ID NO: 3710181 - RNA, 14 nt, Human
ugcuuugaagcagu

SEQ ID NO: 3710182 - RNA, 19 nt, Human
ugcuuugaagcaguugugu

SEQ ID NO: 3710183 - RNA, 18 nt, Human
ugcuuugacucaccuguu

SEQ ID NO: 3710184 - RNA, 20 nt, Human
ugcuuugacugagcagacug

SEQ ID NO: 3710185 - RNA, 22 nt, Human
ugcuuugacugagcagacuggu

SEQ ID NO: 3710186 - RNA, 22 nt, Human
ugcuuugaggcucaccagaauu

SEQ ID NO: 3710187 - RNA, 13 nt, Human
ugcuuugauauau

SEQ ID NO: 3710188 - RNA, 18 nt, Human
ugcuuugauuuacagcaa

SEQ ID NO: 3710189 - RNA, 13 nt, Human
ugcuuugcccagc

SEQ ID NO: 3710190 - RNA, 14 nt, Human
ugcuuugcccagca

SEQ ID NO: 3710191 - RNA, 22 nt, Human
ugcuuugcgugcccggggcagc

SEQ ID NO: 3710192 - RNA, 23 nt, Human
ugcuuuggaccuaaauggccuca

SEQ ID NO: 3710193 - RNA, 16 nt, Human
ugcuuugggcugcccu

SEQ ID NO: 3710194 - RNA, 17 nt, Human
ugcuuugggcugcccug

SEQ ID NO: 3710195 - RNA, 19 nt, Human
ugcuuugggcugcccuggu

SEQ ID NO: 3710196 - RNA, 20 nt, Human
ugcuuugggcugcccuggug

SEQ ID NO: 3710197 - RNA, 17 nt, Human
ugcuuugggcuugggcc

SEQ ID NO: 3710198 - RNA, 21 nt, Human
ugcuuugucuggaagaaagau

SEQ ID NO: 3710199 - RNA, 18 nt, Human
ugcuuuguugugugccuc

SEQ ID NO: 3710200 - RNA, 23 nt, Human
ugcuuuguugugugccucuagcu

SEQ ID NO: 3710201 - RNA, 17 nt, Human
ugcuuuuaaaauuuuaa

SEQ ID NO: 3710202 - RNA, 16 nt, Human
ugcuuuuaacucuaga

SEQ ID NO: 3710203 - RNA, 17 nt, Human
ugcuuuuaacucuagaa

SEQ ID NO: 3710204 - RNA, 13 nt, Human
ugcuuuuaauuaa

SEQ ID NO: 3710205 - RNA, 13 nt, Human
ugcuuuuagaaaa

SEQ ID NO: 3710206 - RNA, 24 nt, Human
ugcuuuuaguauuuuagugaacuu

SEQ ID NO: 3710207 - RNA, 15 nt, Human
ugcuuuuauaucugu

SEQ ID NO: 3710208 - RNA, 15 nt, Human
ugcuuuuauuuugaa

SEQ ID NO: 3710209 - RNA, 16 nt, Human
ugcuuuucacugcugc

SEQ ID NO: 3710210 - RNA, 13 nt, Human
ugcuuuucugucu

SEQ ID NO: 3710211 - RNA, 20 nt, Human
ugcuuuugaaggaauacaau

SEQ ID NO: 3710212 - RNA, 14 nt, Human
ugcuuuugcccauu

SEQ ID NO: 3710213 - RNA, 18 nt, Human
ugcuuuugcccauuuuga

SEQ ID NO: 3710214 - RNA, 19 nt, Human
ugcuuuuggcaaaacucua

SEQ ID NO: 3710215 - RNA, 13 nt, Human
ugcuuuuggccug

SEQ ID NO: 3710216 - RNA, 17 nt, Human
ugcuuuuggcggggagg

SEQ ID NO: 3710217 - RNA, 21 nt, Human
ugcuuuuggggggcauauauu

SEQ ID NO: 3710218 - RNA, 14 nt, Human
ugcuuuuggucugu

SEQ ID NO: 3710219 - RNA, 20 nt, Human
ugcuuuugucuaugggacuc

SEQ ID NO: 3710220 - RNA, 15 nt, Human
ugcuuuuuauuucug

SEQ ID NO: 3710221 - RNA, 12 nt, Human
ugcuuuuucuga

SEQ ID NO: 3710222 - RNA, 17 nt, Human
ugcuuuuugaaaugaaa

SEQ ID NO: 3710223 - RNA, 13 nt, Human
ugcuuuuuggaaa

SEQ ID NO: 3710224 - RNA, 14 nt, Human
ugcuuuuuuaaaua

SEQ ID NO: 3710225 - RNA, 23 nt, Human
ugcuuuuuuauggcgauucccau

SEQ ID NO: 3710226 - RNA, 19 nt, Human
ugcuuuuuuccaaaacaaa

SEQ ID NO: 3710227 - RNA, 13 nt, Human
ugcuuuuuuguau

SEQ ID NO: 3710228 - RNA, 17 nt, Human
ugcuuuuuuugugugua

SEQ ID NO: 3710229 - RNA, 14 nt, Human
ugcuuuuuuuuccu

SEQ ID NO: 3710230 - RNA, 17 nt, Human
ugcuuuuuuuuccuucu

SEQ ID NO: 3710231 - RNA, 20 nt, Human
uggaaaaaaaaaaaagagga

SEQ ID NO: 3710232 - RNA, 21 nt, Human
uggaaaaaaaaaaaagaggaa

SEQ ID NO: 3710233 - RNA, 12 nt, Human
uggaaaaaguga

SEQ ID NO: 3710234 - RNA, 16 nt, Human
uggaaaaauaaacacu

SEQ ID NO: 3710235 - RNA, 17 nt, Human
uggaaaaauagccugcc

SEQ ID NO: 3710236 - RNA, 12 nt, Human
uggaaaaauauu

SEQ ID NO: 3710237 - RNA, 23 nt, Human
uggaaaaaucacaauuuuuaaug

SEQ ID NO: 3710238 - RNA, 18 nt, Human
uggaaaaauccagaaaga

SEQ ID NO: 3710239 - RNA, 15 nt, Human
uggaaaaauguuugu

SEQ ID NO: 3710240 - RNA, 17 nt, Human
uggaaaacaaggaaguc

SEQ ID NO: 3710241 - RNA, 17 nt, Human
uggaaaacagaacacuu

SEQ ID NO: 3710242 - RNA, 14 nt, Human
uggaaaagaauaca

SEQ ID NO: 3710243 - RNA, 19 nt, Human
uggaaaagaauacagaaag

SEQ ID NO: 3710244 - RNA, 12 nt, Human
uggaaaagacag

SEQ ID NO: 3710245 - RNA, 16 nt, Human
uggaaaagccaagagg

SEQ ID NO: 3710246 - RNA, 19 nt, Human
uggaaaagccaagaggcug

SEQ ID NO: 3710247 - RNA, 22 nt, Human
uggaaaaggaagacuagaggcu

SEQ ID NO: 3710248 - RNA, 14 nt, Human
uggaaaaggcauau

SEQ ID NO: 3710249 - RNA, 16 nt, Human
uggaaaaguguccuuc

SEQ ID NO: 3710250 - RNA, 15 nt, Human
uggaaaauaaaucaa

SEQ ID NO: 3710251 - RNA, 18 nt, Human
uggaaaaugccaugaauu

SEQ ID NO: 3710252 - RNA, 21 nt, Human
uggaaacaaaguggaaggaaa

SEQ ID NO: 3710253 - RNA, 19 nt, Human
uggaaacacuaaauguuaa

SEQ ID NO: 3710254 - RNA, 20 nt, Human
uggaaacacuaaauguuaaa

SEQ ID NO: 3710255 - RNA, 18 nt, Human
ugcagcauguugcugagg

SEQ ID NO: 3710256 - RNA, 20 nt, Human
ugcagcauguugcugaggag

SEQ ID NO: 3710257 - RNA, 14 nt, Human
ugcagcauuucacu

SEQ ID NO: 3710258 - RNA, 15 nt, Human
ugcagcauuucacuu

SEQ ID NO: 3710259 - RNA, 18 nt, Human
ugcagcauuugauaauga

SEQ ID NO: 3710260 - RNA, 16 nt, Human
ugcagccacuuaggac

SEQ ID NO: 3710261 - RNA, 13 nt, Human
ugcagccagaccu

SEQ ID NO: 3710262 - RNA, 14 nt, Human
ugcagccagaccua

SEQ ID NO: 3710263 - RNA, 11 nt, Human
ugcagccagag

SEQ ID NO: 3710264 - RNA, 13 nt, Human
ugcagccagaggc

SEQ ID NO: 3710265 - RNA, 14 nt, Human
ugcagccagaggca

SEQ ID NO: 3710266 - RNA, 13 nt, Human
ugcagccagccca

SEQ ID NO: 3710267 - RNA, 16 nt, Human
ugcagccagcccagcc

SEQ ID NO: 3710268 - RNA, 22 nt, Human
ugcagccagcccagcccagcug

SEQ ID NO: 3710269 - RNA, 14 nt, Human
ugcagcccaugccc

SEQ ID NO: 3710270 - RNA, 19 nt, Human
ugcagcccaugcccaccug

SEQ ID NO: 3710271 - RNA, 21 nt, Human
ugcagcccaugcccaccugcc

SEQ ID NO: 3710272 - RNA, 23 nt, Human
ugcagcccccacugccuuugacc

SEQ ID NO: 3710273 - RNA, 20 nt, Human
ugcagccccgccuccaggcc

SEQ ID NO: 3710274 - RNA, 20 nt, Human
ugcagcccggcgccaccauc

SEQ ID NO: 3710275 - RNA, 21 nt, Human
ugcagcccguguggccccuuc

SEQ ID NO: 3710276 - RNA, 16 nt, Human
ugcagcccugagaaag

SEQ ID NO: 3710277 - RNA, 22 nt, Human
ugcagcccugagaaagcccugu

SEQ ID NO: 3710278 - RNA, 14 nt, Human
ugcagccgcugagc

SEQ ID NO: 3710279 - RNA, 18 nt, Human
ugcagccggcacaggguc

SEQ ID NO: 3710280 - RNA, 14 nt, Human
uggagaugcagagg

SEQ ID NO: 3710281 - RNA, 16 nt, Human
uggagaugggaugcuu

SEQ ID NO: 3710282 - RNA, 18 nt, Human
uggagaugggaugcuugc

SEQ ID NO: 3710283 - RNA, 17 nt, Human
uggagauggggagaaac

SEQ ID NO: 3710284 - RNA, 19 nt, Human
uggagauuauaauaaauau

SEQ ID NO: 3710285 - RNA, 15 nt, Human
uggagauugaccugg

SEQ ID NO: 3710286 - RNA, 17 nt, Human
uggagcaaagugguagg

SEQ ID NO: 3710287 - RNA, 18 nt, Human
uggagcacaaaagccucu

SEQ ID NO: 3710288 - RNA, 19 nt, Human
uggagcacaaagacccugg

SEQ ID NO: 3710289 - RNA, 17 nt, Human
uggagcaccaggcacga

SEQ ID NO: 3710290 - RNA, 17 nt, Human
uggagcacugggcuccc

SEQ ID NO: 3710291 - RNA, 21 nt, Human
uggagcacugggcucccgggc

SEQ ID NO: 3710292 - RNA, 17 nt, Human
uggagcagaccaccccg

SEQ ID NO: 3710293 - RNA, 12 nt, Human
uggagcagagca

SEQ ID NO: 3710294 - RNA, 17 nt, Human
gucuuguuagaaaacaa

SEQ ID NO: 3710295 - RNA, 16 nt, Human
gucuuuaaauagauac

SEQ ID NO: 3710296 - RNA, 14 nt, Human
gucuuuaacuguca

SEQ ID NO: 3710297 - RNA, 21 nt, Human
gucuuuagauagcccuguccu

SEQ ID NO: 3710298 - RNA, 13 nt, Human
gucuuuagcuauu

SEQ ID NO: 3710299 - RNA, 17 nt, Human
gucuuuaggcagcagcu

SEQ ID NO: 3710300 - RNA, 18 nt, Human
gucuuuaggucuuuguaa

SEQ ID NO: 3710301 - RNA, 22 nt, Human
gucuuuaggucuuuguaagaac

SEQ ID NO: 3710302 - RNA, 15 nt, Human
gucuuucaagaauga

SEQ ID NO: 3710303 - RNA, 15 nt, Human
gucuuucacagcucc

SEQ ID NO: 3710304 - RNA, 19 nt, Human
gucuuucacaguaccaucu

SEQ ID NO: 3710305 - RNA, 23 nt, Human
gucuuucagcaagauaaacauua

SEQ ID NO: 3710306 - RNA, 22 nt, Human
gucuuucaguacuuuuuuaaau

SEQ ID NO: 3710307 - RNA, 16 nt, Human
gucuuucauggcugcu

SEQ ID NO: 3710308 - RNA, 18 nt, Human
gucuuuccacggagccac

SEQ ID NO: 3710309 - RNA, 10 nt, Human
gucuuuccca

SEQ ID NO: 3710310 - RNA, 20 nt, Human
gucuuucccauggggaggga

SEQ ID NO: 3710311 - RNA, 19 nt, Human
gucuuucuaagaaaucaag

SEQ ID NO: 3710312 - RNA, 14 nt, Human
gucuuucucucuca

SEQ ID NO: 3710313 - RNA, 14 nt, Human
gucuuucucuuucc

SEQ ID NO: 3710314 - RNA, 16 nt, Human
gucuuucucuuucccu

SEQ ID NO: 3710315 - RNA, 15 nt, Human
gucuuucuucuucaa

SEQ ID NO: 3710316 - RNA, 15 nt, Human
gucuuucuuuggugc

SEQ ID NO: 3710317 - RNA, 16 nt, Human
gucuuugagcucccac

SEQ ID NO: 3710318 - RNA, 20 nt, Human
gucuuuggaaaaauguuugu

SEQ ID NO: 3710319 - RNA, 15 nt, Human
gucuuuggacccuga

SEQ ID NO: 3710320 - RNA, 18 nt, Human
gucuuuggagaaaugcuu

SEQ ID NO: 3710321 - RNA, 17 nt, Human
gucuuugguucuaagga

SEQ ID NO: 3710322 - RNA, 13 nt, Human
gucuuuguaagag

SEQ ID NO: 3710323 - RNA, 14 nt, Human
gucuuuguaagagu

SEQ ID NO: 3710324 - RNA, 22 nt, Human
gucuuuguaagaguguagaagc

SEQ ID NO: 3710325 - RNA, 16 nt, Human
gucuuuguaaugucac

SEQ ID NO: 3710326 - RNA, 20 nt, Human
gucuuuguaaugucaccacc

SEQ ID NO: 3710327 - RNA, 22 nt, Human
gucuuuguaaugucaccaccuu

SEQ ID NO: 3710328 - RNA, 17 nt, Human
gucuuuguaucuuccau

SEQ ID NO: 3710329 - RNA, 15 nt, Human
gucuuuuaaaaagua

SEQ ID NO: 3710330 - RNA, 17 nt, Human
gucuuuuaaaaaguauu

SEQ ID NO: 3710331 - RNA, 23 nt, Human
gucuuuuauaguggaaaaacaca

SEQ ID NO: 3710332 - RNA, 14 nt, Human
gucuuuucuugcau

SEQ ID NO: 3710333 - RNA, 24 nt, Human
gucuuuucuugcaugaggcuagug

SEQ ID NO: 3710334 - RNA, 14 nt, Human
gucuuuugaauauu

SEQ ID NO: 3710335 - RNA, 19 nt, Human
gucuuuugaauauucccaa

SEQ ID NO: 3710336 - RNA, 16 nt, Human
gucuuuugacaugugg

SEQ ID NO: 3710337 - RNA, 13 nt, Human
gucuuuugcauga

SEQ ID NO: 3710338 - RNA, 12 nt, Human
gucuuuugcuuu

SEQ ID NO: 3710339 - RNA, 16 nt, Human
gucuuuugcuuuuggc

SEQ ID NO: 3710340 - RNA, 15 nt, Human
gucuuuuuaaaaaua

SEQ ID NO: 3710341 - RNA, 20 nt, Human
gucuuuuuaagcuuauuuaa

SEQ ID NO: 3710342 - RNA, 16 nt, Human
gucuuuuuaugcauuu

SEQ ID NO: 3710343 - RNA, 22 nt, Human
gucuuuuucuguuguaacuuau

SEQ ID NO: 3710344 - RNA, 14 nt, Human
gucuuuuuguaagu

SEQ ID NO: 3710345 - RNA, 13 nt, Human
gucuuuuuuugua

SEQ ID NO: 3710346 - RNA, 22 nt, Human
gucuuuuuuuguauaguuaaca

SEQ ID NO: 3710347 - RNA, 17 nt, Human
gucuuuuuuuuaaugug

SEQ ID NO: 3710348 - RNA, 21 nt, Human
gucuuuuuuuuuuaagugaaa

SEQ ID NO: 3710349 - RNA, 18 nt, Human
gugaaaaaaaaaaugcug

SEQ ID NO: 3710350 - RNA, 20 nt, Human
gugaaaaaagcuuuuaugag

SEQ ID NO: 3710351 - RNA, 19 nt, Human
gugaaaacacauuugcuuu

SEQ ID NO: 3710352 - RNA, 15 nt, Human
gugaaaacggagcug

SEQ ID NO: 3710353 - RNA, 14 nt, Human
gugaaaagaaaaau

SEQ ID NO: 3710354 - RNA, 14 nt, Human
gugaaaagcuccau

SEQ ID NO: 3710355 - RNA, 12 nt, Human
gugaaaaucuug

SEQ ID NO: 3710356 - RNA, 14 nt, Human
gugaaaauguacug

SEQ ID NO: 3710357 - RNA, 18 nt, Human
gugaaacacaccaggcug

SEQ ID NO: 3710358 - RNA, 20 nt, Human
gugaaacacaccaggcugug

SEQ ID NO: 3710359 - RNA, 13 nt, Human
gugaaacacagcu

SEQ ID NO: 3710360 - RNA, 17 nt, Human
gugaaaccuuuuuuaag

SEQ ID NO: 3710361 - RNA, 19 nt, Human
gugaaaccuuuuuuaagau

SEQ ID NO: 3710362 - RNA, 19 nt, Human
gugaaacuaacagauaagc

SEQ ID NO: 3710363 - RNA, 20 nt, Human
gugaaacugcuuguuuccua

SEQ ID NO: 3710364 - RNA, 22 nt, Human
gugaaacuuuucuagaauuauu

SEQ ID NO: 3710365 - RNA, 19 nt, Human
gugaaagaaaauaacaaua

SEQ ID NO: 3710366 - RNA, 20 nt, Human
gugaaagcaucacuugggau

SEQ ID NO: 3710367 - RNA, 20 nt, Human
gugaaagcugagaacuccug

SEQ ID NO: 3710368 - RNA, 19 nt, Human
gugaaaggaaagagggagg

SEQ ID NO: 3710369 - RNA, 15 nt, Human
gugaaagugaggaaa

SEQ ID NO: 3710370 - RNA, 21 nt, Human
gugaaauaguucaaagccaag

SEQ ID NO: 3710371 - RNA, 17 nt, Human
gugaaaucaaaggugcu

SEQ ID NO: 3710372 - RNA, 14 nt, Human
gugaaauuauuuug

SEQ ID NO: 3710373 - RNA, 21 nt, Human
gugaaauuuauuaguuaauau

SEQ ID NO: 3710374 - RNA, 18 nt, Human
gugaaauuucuagccugc

SEQ ID NO: 3710375 - RNA, 22 nt, Human
gugaaauuucuagccugcacuu

SEQ ID NO: 3710376 - RNA, 22 nt, Human
gugaaauuuucuugauuugagu

SEQ ID NO: 3710377 - RNA, 21 nt, Human
gugaacaaauuuacagagaca

SEQ ID NO: 3710378 - RNA, 19 nt, Human
gugaacaagugaacacauu

SEQ ID NO: 3710379 - RNA, 19 nt, Human
gugaacaggcugggcugcu

SEQ ID NO: 3710380 - RNA, 24 nt, Human
gugaacauuuaucaaucaguauaa

SEQ ID NO: 3710381 - RNA, 18 nt, Human
gugaaccacuucauucug

SEQ ID NO: 3710382 - RNA, 17 nt, Human
gugaacccaggacaagc

SEQ ID NO: 3710383 - RNA, 21 nt, Human
gugaacccuggggccugacug

SEQ ID NO: 3710384 - RNA, 16 nt, Human
gugaaccuaccuucau

SEQ ID NO: 3710385 - RNA, 14 nt, Human
gugaaccuguauaa

SEQ ID NO: 3710386 - RNA, 15 nt, Human
gugaacguggacucc

SEQ ID NO: 3710387 - RNA, 17 nt, Human
gugaacuagggaagcuc

SEQ ID NO: 3710388 - RNA, 16 nt, Human
gugaacucagccaagc

SEQ ID NO: 3710389 - RNA, 23 nt, Human
gugaacuggacccuguugcuaag

SEQ ID NO: 3710390 - RNA, 19 nt, Human
gugaacuugggccacugug

SEQ ID NO: 3710391 - RNA, 23 nt, Human
gugaagaaaagugaaugcucaag

SEQ ID NO: 3710392 - RNA, 23 nt, Human
gugaagaauccuuuuguagaaug

SEQ ID NO: 3710393 - RNA, 14 nt, Human
gugaagacagaagu

SEQ ID NO: 3710394 - RNA, 16 nt, Human
gugaagacuccagaaa

SEQ ID NO: 3710395 - RNA, 12 nt, Human
gugaagaggggc

SEQ ID NO: 3710396 - RNA, 16 nt, Human
gugaagaggggcagcc

SEQ ID NO: 3710397 - RNA, 17 nt, Human
gugaagaggggcagccc

SEQ ID NO: 3710398 - RNA, 19 nt, Human
gugaagaggggcagcccuu

SEQ ID NO: 3710399 - RNA, 19 nt, Human
gugaagaucucacucugcc

SEQ ID NO: 3710400 - RNA, 17 nt, Human
gugaagcaccaagcuca

SEQ ID NO: 3710401 - RNA, 15 nt, Human
gugaagcauccaggc

SEQ ID NO: 3710402 - RNA, 17 nt, Human
gugaagcauccaggcac

SEQ ID NO: 3710403 - RNA, 22 nt, Human
gugaagccaauucagacaggca

SEQ ID NO: 3710404 - RNA, 11 nt, Human
gugaagccuuc

SEQ ID NO: 3710405 - RNA, 17 nt, Human
gugaaggaggcuccagg

SEQ ID NO: 3710406 - RNA, 20 nt, Human
gugaaggccgagaagcaaga

SEQ ID NO: 3710407 - RNA, 22 nt, Human
gugaaggcuucucucuguggga

SEQ ID NO: 3710408 - RNA, 18 nt, Human
gugaagggaagagacagc

SEQ ID NO: 3710409 - RNA, 17 nt, Human
gugaagguccugcuauu

SEQ ID NO: 3710410 - RNA, 16 nt, Human
gugaaggugacagcag

SEQ ID NO: 3710411 - RNA, 19 nt, Human
gugaaguauacuguauuuu

SEQ ID NO: 3710412 - RNA, 14 nt, Human
gugaaguuagaauu

SEQ ID NO: 3710413 - RNA, 20 nt, Human
gugaaguuagguucuuaaaa

SEQ ID NO: 3710414 - RNA, 16 nt, Human
gugaauaaaugucuug

SEQ ID NO: 3710415 - RNA, 14 nt, Human
gugaauaaugauuu

SEQ ID NO: 3710416 - RNA, 14 nt, Human
gugaauaauuacag

SEQ ID NO: 3710417 - RNA, 15 nt, Human
gugaauaccugcuca

SEQ ID NO: 3710418 - RNA, 19 nt, Human
gugaauagccauauuugua

SEQ ID NO: 3710419 - RNA, 22 nt, Human
gugaauaugccuguaauucagu

SEQ ID NO: 3710420 - RNA, 15 nt, Human
gugaaucaaggguca

SEQ ID NO: 3710421 - RNA, 17 nt, Human
gugaaucaagggucagg

SEQ ID NO: 3710422 - RNA, 21 nt, Human
gugaaucaagggucaggccuu

SEQ ID NO: 3710423 - RNA, 16 nt, Human
gugaaucacguaaagc

SEQ ID NO: 3710424 - RNA, 14 nt, Human
gugaaucagagcac

SEQ ID NO: 3710425 - RNA, 19 nt, Human
gugaaugaaagauuaaaca

SEQ ID NO: 3710426 - RNA, 22 nt, Human
gugaaugaaagucuugugacua

SEQ ID NO: 3710427 - RNA, 23 nt, Human
gugaaugauucauguuauauuua

SEQ ID NO: 3710428 - RNA, 13 nt, Human
gugaaugcuggga

SEQ ID NO: 3710429 - RNA, 15 nt, Human
gugaaugcugggacu

SEQ ID NO: 3710430 - RNA, 14 nt, Human
gugaaugcuucuca

SEQ ID NO: 3710431 - RNA, 15 nt, Human
gugaauggauuggau

SEQ ID NO: 3710432 - RNA, 13 nt, Human
gugaauggcuuug

SEQ ID NO: 3710433 - RNA, 23 nt, Human
gugaauguaggcuggcuuucaga

SEQ ID NO: 3710434 - RNA, 21 nt, Human
gugaauuaggcuguaacuacu

SEQ ID NO: 3710435 - RNA, 22 nt, Human
gugaauuaggcuguaacuacuu

SEQ ID NO: 3710436 - RNA, 14 nt, Human
gugaauuauugaca

SEQ ID NO: 3710437 - RNA, 16 nt, Human
gugaauuauugacacu

SEQ ID NO: 3710438 - RNA, 18 nt, Human
gugaauuauugacacuga

SEQ ID NO: 3710439 - RNA, 13 nt, Human
gugaauucccuca

SEQ ID NO: 3710440 - RNA, 22 nt, Human
gugaauucuugaaggaaaauga

SEQ ID NO: 3710441 - RNA, 13 nt, Human
gugaauugacuac

SEQ ID NO: 3710442 - RNA, 13 nt, Human
gugaauugauaau

SEQ ID NO: 3710443 - RNA, 22 nt, Human
gugaauugccugcagagagaag

SEQ ID NO: 3710444 - RNA, 21 nt, Human
ugccaauuauuguuacacauu

SEQ ID NO: 3710445 - RNA, 15 nt, Human
ugccaauuugcacau

SEQ ID NO: 3710446 - RNA, 18 nt, Human
ugccacaaugcaguucug

SEQ ID NO: 3710447 - RNA, 13 nt, Human
ugccacacagagu

SEQ ID NO: 3710448 - RNA, 23 nt, Human
ugccacacagaguggucuuucug

SEQ ID NO: 3710449 - RNA, 19 nt, Human
ugccacaccaagcugugcc

SEQ ID NO: 3710450 - RNA, 20 nt, Human
ugccacaccaagcugugcca

SEQ ID NO: 3710451 - RNA, 23 nt, Human
ugccacaccccccaccccuagga

SEQ ID NO: 3710452 - RNA, 14 nt, Human
ugccacacccuccc

SEQ ID NO: 3710453 - RNA, 18 nt, Human
ugccacacucuccaucac

SEQ ID NO: 3710454 - RNA, 23 nt, Human
ugccacacuucaggcucuucucc

SEQ ID NO: 3710455 - RNA, 15 nt, Human
ugccacagagcgggg

SEQ ID NO: 3710456 - RNA, 17 nt, Human
ugccacagcccugucag

SEQ ID NO: 3710457 - RNA, 22 nt, Human
ugccacagcccugucagcauga

SEQ ID NO: 3710458 - RNA, 13 nt, Human
ugccacagccucc

SEQ ID NO: 3710459 - RNA, 22 nt, Human
ugccacagcuggagcucucaaa

SEQ ID NO: 3710460 - RNA, 17 nt, Human
ugccacagcuuuugcaa

SEQ ID NO: 3710461 - RNA, 12 nt, Human
ugccacaggaca

SEQ ID NO: 3710462 - RNA, 13 nt, Human
ugccacaggccuc

SEQ ID NO: 3710463 - RNA, 17 nt, Human
ugccacaggcuuaggga

SEQ ID NO: 3710464 - RNA, 21 nt, Human
ugccacaggcuuagggacagg

SEQ ID NO: 3710465 - RNA, 22 nt, Human
ugccacaucaaaccuuugagua

SEQ ID NO: 3710466 - RNA, 18 nt, Human
ugccaccaaaggccaggg

SEQ ID NO: 3710467 - RNA, 18 nt, Human
ugccaccaacuggcccuc

SEQ ID NO: 3710468 - RNA, 19 nt, Human
ugccaccagagaccguccu

SEQ ID NO: 3710469 - RNA, 12 nt, Human
ugccaccaggag

SEQ ID NO: 3710470 - RNA, 13 nt, Human
ugccaccaggcca

SEQ ID NO: 3710471 - RNA, 16 nt, Human
ugccaccagucacugu

SEQ ID NO: 3710472 - RNA, 13 nt, Human
ugccacccaccuc

SEQ ID NO: 3710473 - RNA, 17 nt, Human
ugccacccaccucccug

SEQ ID NO: 3710474 - RNA, 16 nt, Human
ugccaccccacccucc

SEQ ID NO: 3710475 - RNA, 17 nt, Human
ugccaccccacccuccc

SEQ ID NO: 3710476 - RNA, 20 nt, Human
ugccaccccacccucccugg

SEQ ID NO: 3710477 - RNA, 13 nt, Human
ugccaccccuaaa

SEQ ID NO: 3710478 - RNA, 21 nt, Human
ugccaccccuaaacuccaggg

SEQ ID NO: 3710479 - RNA, 12 nt, Human
ugccacccuacc

SEQ ID NO: 3710480 - RNA, 13 nt, Human
ugccacccugggc

SEQ ID NO: 3710481 - RNA, 15 nt, Human
ugccacccugggcuc

SEQ ID NO: 3710482 - RNA, 20 nt, Human
ugccacccugggcucugugg

SEQ ID NO: 3710483 - RNA, 21 nt, Human
ugccacccugggcucuguggg

SEQ ID NO: 3710484 - RNA, 18 nt, Human
ugccaccuccccuaucca

SEQ ID NO: 3710485 - RNA, 17 nt, Human
ugccaccuccccuugcc

SEQ ID NO: 3710486 - RNA, 14 nt, Human
ugccaccucccuga

SEQ ID NO: 3710487 - RNA, 19 nt, Human
ugccaccuggaccccugca

SEQ ID NO: 3710488 - RNA, 19 nt, Human
ugccaccuggggcagucac

SEQ ID NO: 3710489 - RNA, 10 nt, Human
ugccaccugu

SEQ ID NO: 3710490 - RNA, 11 nt, Human
ugccaccuguc

SEQ ID NO: 3710491 - RNA, 14 nt, Human
ugccaccugucugu

SEQ ID NO: 3710492 - RNA, 16 nt, Human
ugccacgaauuucugu

SEQ ID NO: 3710493 - RNA, 14 nt, Human
ugccacguuccaca

SEQ ID NO: 3710494 - RNA, 19 nt, Human
ugccacguuccacaguugc

SEQ ID NO: 3710495 - RNA, 22 nt, Human
ugccacguuggagaagcccgug

SEQ ID NO: 3710496 - RNA, 20 nt, Human
ugccacuaaauugacacuua

SEQ ID NO: 3710497 - RNA, 19 nt, Human
ugccacuaaccuuccaaaa

SEQ ID NO: 3710498 - RNA, 20 nt, Human
ugccacuaccccuugauuuu

SEQ ID NO: 3710499 - RNA, 16 nt, Human
ugccacuaggcugggu

SEQ ID NO: 3710500 - RNA, 18 nt, Human
ugccacucacuaggcccc

SEQ ID NO: 3710501 - RNA, 22 nt, Human
ugccacugaggggggauccagu

SEQ ID NO: 3710502 - RNA, 17 nt, Human
ugccacugcccgagcug

SEQ ID NO: 3710503 - RNA, 13 nt, Human
ugccacugccucu

SEQ ID NO: 3710504 - RNA, 19 nt, Human
ugccacugccucuuccucc

SEQ ID NO: 3710505 - RNA, 19 nt, Human
ugccacugccuucgcuucu

SEQ ID NO: 3710506 - RNA, 13 nt, Human
ugccacuggagug

SEQ ID NO: 3710507 - RNA, 20 nt, Human
ugccacuggcaaauguaacu

SEQ ID NO: 3710508 - RNA, 16 nt, Human
ugccacuucccaggua

SEQ ID NO: 3710509 - RNA, 23 nt, Human
ugccacuucuaagaaaagccuaa

SEQ ID NO: 3710510 - RNA, 19 nt, Human
ugccacuugaacaaaaucu

SEQ ID NO: 3710511 - RNA, 12 nt, Human
ugccacuuugca

SEQ ID NO: 3710512 - RNA, 13 nt, Human
ugccacuuugcac

SEQ ID NO: 3710513 - RNA, 19 nt, Human
ugccacuuugcacauuuug

SEQ ID NO: 3710514 - RNA, 19 nt, Human
ugccagaacaguuuguaca

SEQ ID NO: 3710515 - RNA, 17 nt, Human
ugccagaauuuuaggaa

SEQ ID NO: 3710516 - RNA, 13 nt, Human
ugccagacaugug

SEQ ID NO: 3710517 - RNA, 13 nt, Human
ugccagagaaccc

SEQ ID NO: 3710518 - RNA, 21 nt, Human
ugccagagacggaagccuuuu

SEQ ID NO: 3710519 - RNA, 15 nt, Human
ugccagagauggagg

SEQ ID NO: 3710520 - RNA, 21 nt, Human
ugccagagauggagguucucu

SEQ ID NO: 3710521 - RNA, 12 nt, Human
ugccagagccgg

SEQ ID NO: 3710522 - RNA, 11 nt, Human
ugccagagccu

SEQ ID NO: 3710523 - RNA, 13 nt, Human
ugccagagccugg

SEQ ID NO: 3710524 - RNA, 19 nt, Human
ugccagagccuggggcucu

SEQ ID NO: 3710525 - RNA, 20 nt, Human
ugccagaggugggcaggugg

SEQ ID NO: 3710526 - RNA, 21 nt, Human
ugccagaugccuuuauggcug

SEQ ID NO: 3710527 - RNA, 17 nt, Human
ugccagaugcugauguu

SEQ ID NO: 3710528 - RNA, 21 nt, Human
ugccagauguccuaaugguga

SEQ ID NO: 3710529 - RNA, 13 nt, Human
ugccagcaaagcc

SEQ ID NO: 3710530 - RNA, 24 nt, Human
ugccagcaaagccccaugcuggag

SEQ ID NO: 3710531 - RNA, 13 nt, Human
ugccagcaacuga

SEQ ID NO: 3710532 - RNA, 17 nt, Human
ugccagcaacugaauaa

SEQ ID NO: 3710533 - RNA, 18 nt, Human
ugccagcaacugaauaaa

SEQ ID NO: 3710534 - RNA, 22 nt, Human
ugccagcaaugacaucucaggg

SEQ ID NO: 3710535 - RNA, 16 nt, Human
ugccagcacccccacg

SEQ ID NO: 3710536 - RNA, 16 nt, Human
ugccagcagcagcagg

SEQ ID NO: 3710537 - RNA, 16 nt, Human
ugccagccagcagcca

SEQ ID NO: 3710538 - RNA, 23 nt, Human
ugccagccagcagccagcucuca

SEQ ID NO: 3710539 - RNA, 15 nt, Human
ugccagcccagaggc

SEQ ID NO: 3710540 - RNA, 15 nt, Human
ugccagcccauuugg

SEQ ID NO: 3710541 - RNA, 17 nt, Human
ugccagccccacacagc

SEQ ID NO: 3710542 - RNA, 23 nt, Human
ugccagcccccuaaaagcacucc

SEQ ID NO: 3710543 - RNA, 19 nt, Human
ugccagccccugccauugu

SEQ ID NO: 3710544 - RNA, 22 nt, Human
ugccagccugaggcagccacuu

SEQ ID NO: 3710545 - RNA, 14 nt, Human
ugccagccuuccuc

SEQ ID NO: 3710546 - RNA, 19 nt, Human
ugccagccuugagcccugg

SEQ ID NO: 3710547 - RNA, 23 nt, Human
ugccagccuugagcccuggcugu

SEQ ID NO: 3710548 - RNA, 23 nt, Human
ugccagcucuuccuagcuggaga

SEQ ID NO: 3710549 - RNA, 15 nt, Human
ugccagcugacaucu

SEQ ID NO: 3710550 - RNA, 16 nt, Human
ugccagcugcugagcc

SEQ ID NO: 3710551 - RNA, 15 nt, Human
ugccagcuggccuuu

SEQ ID NO: 3710552 - RNA, 14 nt, Human
ugccaggaaccugu

SEQ ID NO: 3710553 - RNA, 21 nt, Human
ugccaggacuccccaggccag

SEQ ID NO: 3710554 - RNA, 15 nt, Human
ugccaggagcacggc

SEQ ID NO: 3710555 - RNA, 20 nt, Human
ugccaggagcacggcucugu

SEQ ID NO: 3710556 - RNA, 21 nt, Human
ugccaggaggacccagggcuc

SEQ ID NO: 3710557 - RNA, 15 nt, Human
ugccaggcacaggca

SEQ ID NO: 3710558 - RNA, 21 nt, Human
ugccaggcacaggcagggcag

SEQ ID NO: 3710559 - RNA, 22 nt, Human
ugccaggcacaggcagggcagg

SEQ ID NO: 3710560 - RNA, 12 nt, Human
ugccaggcaggg

SEQ ID NO: 3710561 - RNA, 15 nt, Human
ugccaggcaggggug

SEQ ID NO: 3710562 - RNA, 18 nt, Human
ugccaggcaggggugggg

SEQ ID NO: 3710563 - RNA, 16 nt, Human
ugccaggccagccucc

SEQ ID NO: 3710564 - RNA, 11 nt, Human
ugccaggcccc

SEQ ID NO: 3710565 - RNA, 20 nt, Human
ugccaggcccccaccacaca

SEQ ID NO: 3710566 - RNA, 20 nt, Human
ugccaggcuagagugcagug

SEQ ID NO: 3710567 - RNA, 12 nt, Human
ugccaggcucuc

SEQ ID NO: 3710568 - RNA, 19 nt, Human
ugccaggcuggagugcagu

SEQ ID NO: 3710569 - RNA, 22 nt, Human
ugccagggacagaggggguggc

SEQ ID NO: 3710570 - RNA, 18 nt, Human
ugccagggagacagagcu

SEQ ID NO: 3710571 - RNA, 12 nt, Human
ugccagggagcu

SEQ ID NO: 3710572 - RNA, 11 nt, Human
ugccagggcag

SEQ ID NO: 3710573 - RNA, 16 nt, Human
ugccagggcagggccc

SEQ ID NO: 3710574 - RNA, 19 nt, Human
ugccagggcagugcuagug

SEQ ID NO: 3710575 - RNA, 21 nt, Human
ugccagggccccucuccccag

SEQ ID NO: 3710576 - RNA, 16 nt, Human
ugccagggccgaccag

SEQ ID NO: 3710577 - RNA, 23 nt, Human
ugccaggguuucgagaagcugcu

SEQ ID NO: 3710578 - RNA, 20 nt, Human
ugccagguucuauuuggaau

SEQ ID NO: 3710579 - RNA, 22 nt, Human
ugccagguuuuuggucugaccc

SEQ ID NO: 3710580 - RNA, 22 nt, Human
ugccaguaacgcgucuuccuga

SEQ ID NO: 3710581 - RNA, 23 nt, Human
ugccaguaacgcgucuuccugag

SEQ ID NO: 3710582 - RNA, 22 nt, Human
ugccaguaccagccccacccug

SEQ ID NO: 3710583 - RNA, 17 nt, Human
ugccaguauuuuaaaau

SEQ ID NO: 3710584 - RNA, 21 nt, Human
ugccaguauuuuaaaauagcg

SEQ ID NO: 3710585 - RNA, 17 nt, Human
ugccagucaagaagaaa

SEQ ID NO: 3710586 - RNA, 23 nt, Human
ugccagucaccccggccaccugc

SEQ ID NO: 3710587 - RNA, 17 nt, Human
ugccagucccccugccc

SEQ ID NO: 3710588 - RNA, 20 nt, Human
ugccagucccccugccccag

SEQ ID NO: 3710589 - RNA, 14 nt, Human
ugccaguccugucc

SEQ ID NO: 3710590 - RNA, 23 nt, Human
ugccagucgcgcugccugugugg

SEQ ID NO: 3710591 - RNA, 23 nt, Human
ugccagucucacugugggaaggc

SEQ ID NO: 3710592 - RNA, 11 nt, Human
ugccagugccu

SEQ ID NO: 3710593 - RNA, 22 nt, Human
uggagcagagcaagucugcagg

SEQ ID NO: 3710594 - RNA, 13 nt, Human
uggagcagagggg

SEQ ID NO: 3710595 - RNA, 19 nt, Human
uggagcagggacagaucau

SEQ ID NO: 3710596 - RNA, 11 nt, Human
uggagcaucug

SEQ ID NO: 3710597 - RNA, 17 nt, Human
uggagccaacugcugcu

SEQ ID NO: 3710598 - RNA, 16 nt, Human
uggagccaaguccaga

SEQ ID NO: 3710599 - RNA, 17 nt, Human
uggagccaauggagacu

SEQ ID NO: 3710600 - RNA, 16 nt, Human
uggagccacucuguuc

SEQ ID NO: 3710601 - RNA, 12 nt, Human
uggagccaggcg

SEQ ID NO: 3710602 - RNA, 14 nt, Human
uggagccagggagc

SEQ ID NO: 3710603 - RNA, 23 nt, Human
uggagccagggagcggccgccug

SEQ ID NO: 3710604 - RNA, 19 nt, Human
uggagcccagaggagggca

SEQ ID NO: 3710605 - RNA, 13 nt, Human
uggagcccaggcg

SEQ ID NO: 3710606 - RNA, 16 nt, Human
uggagcccaggcggga

SEQ ID NO: 3710607 - RNA, 22 nt, Human
uggagcccaggcgggagcggug

SEQ ID NO: 3710608 - RNA, 13 nt, Human
uggagccccagcc

SEQ ID NO: 3710609 - RNA, 13 nt, Human
uggagccccuggg

SEQ ID NO: 3710610 - RNA, 18 nt, Human
uggagcccgcacccccac

SEQ ID NO: 3710611 - RNA, 15 nt, Human
uggagcccuccgccu

SEQ ID NO: 3710612 - RNA, 17 nt, Human
uggagccgaggccuacc

SEQ ID NO: 3710613 - RNA, 20 nt, Human
uggagccggacuuucggagu

SEQ ID NO: 3710614 - RNA, 22 nt, Human
uggagccggacuuucggaguug

SEQ ID NO: 3710615 - RNA, 17 nt, Human
uggagccugacagccag

SEQ ID NO: 3710616 - RNA, 18 nt, Human
uggagccugacagccaga

SEQ ID NO: 3710617 - RNA, 13 nt, Human
uggagccugcagg

SEQ ID NO: 3710618 - RNA, 15 nt, Human
uggagccugcagggu

SEQ ID NO: 3710619 - RNA, 23 nt, Human
uggagccugcaggguggugcugg

SEQ ID NO: 3710620 - RNA, 18 nt, Human
uggagccuggcacaggac

SEQ ID NO: 3710621 - RNA, 22 nt, Human
uggagccuguguaacagcuccu

SEQ ID NO: 3710622 - RNA, 20 nt, Human
uggagccuuuuaacugugca

SEQ ID NO: 3710623 - RNA, 14 nt, Human
uggagcgcaccugc

SEQ ID NO: 3710624 - RNA, 23 nt, Human
uggagcggaauuuaccugauuuc

SEQ ID NO: 3710625 - RNA, 18 nt, Human
uggagcucagagagggca

SEQ ID NO: 3710626 - RNA, 12 nt, Human
uggagcucagcc

SEQ ID NO: 3710627 - RNA, 13 nt, Human
uggagcucagccc

SEQ ID NO: 3710628 - RNA, 14 nt, Human
uggagcuccagccu

SEQ ID NO: 3710629 - RNA, 17 nt, Human
uggagcuccagccugac

SEQ ID NO: 3710630 - RNA, 14 nt, Human
uggagcuccuggga

SEQ ID NO: 3710631 - RNA, 17 nt, Human
uggagcucguggaacag

SEQ ID NO: 3710632 - RNA, 21 nt, Human
uggagcucguggaacaguuac

SEQ ID NO: 3710633 - RNA, 21 nt, Human
uggagcucgugggacagucac

SEQ ID NO: 3710634 - RNA, 13 nt, Human
uggagcugagccu

SEQ ID NO: 3710635 - RNA, 16 nt, Human
uggagcuuuuuucuuu

SEQ ID NO: 3710636 - RNA, 23 nt, Human
uggaggaaaaccaagccguggcu

SEQ ID NO: 3710637 - RNA, 13 nt, Human
uggaggaaagcaa

SEQ ID NO: 3710638 - RNA, 16 nt, Human
uggaggaaagggagga

SEQ ID NO: 3710639 - RNA, 17 nt, Human
uggaggaagaacugaaa

SEQ ID NO: 3710640 - RNA, 20 nt, Human
uggaggaagaacugaaaggc

SEQ ID NO: 3710641 - RNA, 18 nt, Human
uggaggaagagggacaga

SEQ ID NO: 3710642 - RNA, 19 nt, Human
uggaggaaggauuguaaaa

SEQ ID NO: 3710643 - RNA, 16 nt, Human
uggaggaaugcucccc

SEQ ID NO: 3710644 - RNA, 22 nt, Human
uggaggaaugcucccccauccu

SEQ ID NO: 3710645 - RNA, 14 nt, Human
uggaggaccugagc

SEQ ID NO: 3710646 - RNA, 18 nt, Human
uggaggaccugagccugc

SEQ ID NO: 3710647 - RNA, 20 nt, Human
uggaggaccugagccugccg

SEQ ID NO: 3710648 - RNA, 21 nt, Human
uggaggacuagaaccuggagg

SEQ ID NO: 3710649 - RNA, 11 nt, Human
uggaggagagc

SEQ ID NO: 3710650 - RNA, 16 nt, Human
uggaggagcaaaggcu

SEQ ID NO: 3710651 - RNA, 20 nt, Human
uggaggagcagugcaggcac

SEQ ID NO: 3710652 - RNA, 21 nt, Human
uggaggagcagugcaggcaca

SEQ ID NO: 3710653 - RNA, 13 nt, Human
uggaggagcccag

SEQ ID NO: 3710654 - RNA, 23 nt, Human
uggaggagcccaggccaggacuc

SEQ ID NO: 3710655 - RNA, 19 nt, Human
uggaggagcucaggacacu

SEQ ID NO: 3710656 - RNA, 20 nt, Human
uggaggagcucaggacacua

SEQ ID NO: 3710657 - RNA, 14 nt, Human
uggaggaggaaggc

SEQ ID NO: 3710658 - RNA, 12 nt, Human
uggaggaggagg

SEQ ID NO: 3710659 - RNA, 16 nt, Human
uggaggaggaggcaau

SEQ ID NO: 3710660 - RNA, 17 nt, Human
uggaggagguugggagg

SEQ ID NO: 3710661 - RNA, 17 nt, Human
uggaggaugugggcagc

SEQ ID NO: 3710662 - RNA, 13 nt, Human
uggaggcacuuua

SEQ ID NO: 3710663 - RNA, 17 nt, Human
uggaggcagccagggcu

SEQ ID NO: 3710664 - RNA, 14 nt, Human
uggaggcaggggcu

SEQ ID NO: 3710665 - RNA, 22 nt, Human
uggaggcaugugaugagaggaa

SEQ ID NO: 3710666 - RNA, 23 nt, Human
uggaggcccaggcugggaacuca

SEQ ID NO: 3710667 - RNA, 20 nt, Human
uggaggccccuggagccaga

SEQ ID NO: 3710668 - RNA, 19 nt, Human
uggaggccgggugcucagg

SEQ ID NO: 3710669 - RNA, 20 nt, Human
uggaggccucaggugcuguc

SEQ ID NO: 3710670 - RNA, 24 nt, Human
uggaggccucaggugcuguccaug

SEQ ID NO: 3710671 - RNA, 14 nt, Human
uggaggccucuggg

SEQ ID NO: 3710672 - RNA, 22 nt, Human
uggaggccucugggccuccucu

SEQ ID NO: 3710673 - RNA, 20 nt, Human
uggaggccuuccagcugcug

SEQ ID NO: 3710674 - RNA, 17 nt, Human
uggaggcugccucccaa

SEQ ID NO: 3710675 - RNA, 20 nt, Human
uggaggcugccucccaacag

SEQ ID NO: 3710676 - RNA, 12 nt, Human
uggaggcugcuc

SEQ ID NO: 3710677 - RNA, 16 nt, Human
uggaggcuuccugcgu

SEQ ID NO: 3710678 - RNA, 20 nt, Human
uggaggcuuccugcguccuc

SEQ ID NO: 3710679 - RNA, 14 nt, Human
uggagggaggcccc

SEQ ID NO: 3710680 - RNA, 16 nt, Human
uggagggaggccccag

SEQ ID NO: 3710681 - RNA, 13 nt, Human
uggagggagggaa

SEQ ID NO: 3710682 - RNA, 17 nt, Human
uggagggagggaagggu

SEQ ID NO: 3710683 - RNA, 15 nt, Human
uggagggccugggcc

SEQ ID NO: 3710684 - RNA, 17 nt, Human
uggagggccugggccug

SEQ ID NO: 3710685 - RNA, 22 nt, Human
uggagggccugggccuggcucc

SEQ ID NO: 3710686 - RNA, 22 nt, Human
uggagggcuagaaccuggagaa

SEQ ID NO: 3710687 - RNA, 21 nt, Human
uggagggcuagaacuggagag

SEQ ID NO: 3710688 - RNA, 22 nt, Human
uggagggcuagaaucuggagag

SEQ ID NO: 3710689 - RNA, 12 nt, Human
uggagggcugga

SEQ ID NO: 3710690 - RNA, 16 nt, Human
uggaggggaguguugg

SEQ ID NO: 3710691 - RNA, 23 nt, Human
uggaggggcagagccaggaagau

SEQ ID NO: 3710692 - RNA, 16 nt, Human
uggaggggcuggggac

SEQ ID NO: 3710693 - RNA, 21 nt, Human
uggagggguaggggcugggaa

SEQ ID NO: 3710694 - RNA, 22 nt, Human
uggagggguaggggcugggaac

SEQ ID NO: 3710695 - RNA, 13 nt, Human
uggaggggugugg

SEQ ID NO: 3710696 - RNA, 18 nt, Human
uggagggguguggcagug

SEQ ID NO: 3710697 - RNA, 18 nt, Human
uggagggucccaagcugg

SEQ ID NO: 3710698 - RNA, 20 nt, Human
uggagguacgaaaagagggg

SEQ ID NO: 3710699 - RNA, 17 nt, Human
uggaggugccagcaaag

SEQ ID NO: 3710700 - RNA, 20 nt, Human
uggaggugggagcaggagau

SEQ ID NO: 3710701 - RNA, 22 nt, Human
uggagguggggcgaggcaggcc

SEQ ID NO: 3710702 - RNA, 21 nt, Human
uggaggugucaggcugcuggc

SEQ ID NO: 3710703 - RNA, 22 nt, Human
uggaggugucaggcugcuggcg

SEQ ID NO: 3710704 - RNA, 16 nt, Human
uggagguuaaggcaua

SEQ ID NO: 3710705 - RNA, 19 nt, Human
uggagguuaaggcugagga

SEQ ID NO: 3710706 - RNA, 24 nt, Human
uggagguuaaggcugaggaaaggc

SEQ ID NO: 3710707 - RNA, 16 nt, Human
uggagguucuaaggcc

SEQ ID NO: 3710708 - RNA, 22 nt, Human
uggagguugaagccaagugggg

SEQ ID NO: 3710709 - RNA, 20 nt, Human
uggagguugauaacuuugcu

SEQ ID NO: 3710710 - RNA, 20 nt, Human
uggagguugcagugagcuga

SEQ ID NO: 3710711 - RNA, 15 nt, Human
uggaguacuuagcua

SEQ ID NO: 3710712 - RNA, 18 nt, Human
uggaguagaccccuggcu

SEQ ID NO: 3710713 - RNA, 20 nt, Human
uggaguagaccccuggcugg

SEQ ID NO: 3710714 - RNA, 16 nt, Human
uggaguauaauauuca

SEQ ID NO: 3710715 - RNA, 14 nt, Human
uggaguauauguca

SEQ ID NO: 3710716 - RNA, 15 nt, Human
uggaguccagucucu

SEQ ID NO: 3710717 - RNA, 20 nt, Human
uggaguccccucaccuccuc

SEQ ID NO: 3710718 - RNA, 21 nt, Human
uggaguccccucaccuccucu

SEQ ID NO: 3710719 - RNA, 13 nt, Human
uggagucuccagu

SEQ ID NO: 3710720 - RNA, 15 nt, Human
uggagucugccaccc

SEQ ID NO: 3710721 - RNA, 17 nt, Human
uggagucugccacccag

SEQ ID NO: 3710722 - RNA, 18 nt, Human
uggagucugccacccagg

SEQ ID NO: 3710723 - RNA, 19 nt, Human
uggagucuggagugggcag

SEQ ID NO: 3710724 - RNA, 16 nt, Human
uggagugcaaaaggcu

SEQ ID NO: 3710725 - RNA, 17 nt, Human
uggagugcaaugacaca

SEQ ID NO: 3710726 - RNA, 18 nt, Human
uggagugcaccaaagaga

SEQ ID NO: 3710727 - RNA, 18 nt, Human
uggagugcccacccuggg

SEQ ID NO: 3710728 - RNA, 13 nt, Human
uggaguggaugcc

SEQ ID NO: 3710729 - RNA, 17 nt, Human
uggaguggaugccucag

SEQ ID NO: 3710730 - RNA, 16 nt, Human
uggaguggcagcccag

SEQ ID NO: 3710731 - RNA, 19 nt, Human
uggaguggcagcccagcca

SEQ ID NO: 3710732 - RNA, 14 nt, Human
uggagugggcagag

SEQ ID NO: 3710733 - RNA, 13 nt, Human
uggaguggggcag

SEQ ID NO: 3710734 - RNA, 17 nt, Human
uggaguggggcaguaga

SEQ ID NO: 3710735 - RNA, 14 nt, Human
uggaguguaugacu

SEQ ID NO: 3710736 - RNA, 15 nt, Human
uggaguguguauugu

SEQ ID NO: 3710737 - RNA, 20 nt, Human
uggaguguguauuguuccca

SEQ ID NO: 3710738 - RNA, 20 nt, Human
uggaguguuucuaauaaacu

SEQ ID NO: 3710739 - RNA, 20 nt, Human
uggaguuacauuaauguuaa

SEQ ID NO: 3710740 - RNA, 22 nt, Human
uggaguuauugaagcagagugg

SEQ ID NO: 3710741 - RNA, 17 nt, Human
uggaguucaucuugaau

SEQ ID NO: 3710742 - RNA, 18 nt, Human
gugaauuguuaguuucug

SEQ ID NO: 3710743 - RNA, 14 nt, Human
gugaauuugaaucu

SEQ ID NO: 3710744 - RNA, 17 nt, Human
gugaauuuuuaagcugc

SEQ ID NO: 3710745 - RNA, 15 nt, Human
gugaauuuuuauugu

SEQ ID NO: 3710746 - RNA, 16 nt, Human
gugaauuuuucucuaa

SEQ ID NO: 3710747 - RNA, 15 nt, Human
gugaauuuuugcaau

SEQ ID NO: 3710748 - RNA, 21 nt, Human
gugaauuuuugcaauaaugca

SEQ ID NO: 3710749 - RNA, 16 nt, Human
gugacaacacuugugu

SEQ ID NO: 3710750 - RNA, 23 nt, Human
gugacaagcuccuggucuugaga

SEQ ID NO: 3710751 - RNA, 21 nt, Human
gugacaauaauauuguuguau

SEQ ID NO: 3710752 - RNA, 19 nt, Human
gugacaauucuguuuuuaa

SEQ ID NO: 3710753 - RNA, 16 nt, Human
gugacaauuuuguaca

SEQ ID NO: 3710754 - RNA, 14 nt, Human
gugacacaaacaca

SEQ ID NO: 3710755 - RNA, 19 nt, Human
gugacacagacucauccug

SEQ ID NO: 3710756 - RNA, 20 nt, Human
gugacacuucagagagcugg

SEQ ID NO: 3710757 - RNA, 17 nt, Human
gugacagacaggcucuu

SEQ ID NO: 3710758 - RNA, 19 nt, Human
gugacagacuccugaggac

SEQ ID NO: 3710759 - RNA, 22 nt, Human
gugacagagcaagacucugucu

SEQ ID NO: 3710760 - RNA, 16 nt, Human
gugacagaggcagccc

SEQ ID NO: 3710761 - RNA, 19 nt, Human
gugacagaggcagccccau

SEQ ID NO: 3710762 - RNA, 23 nt, Human
gugacagaggcagccccauucug

SEQ ID NO: 3710763 - RNA, 18 nt, Human
gugacagaguucacuaua

SEQ ID NO: 3710764 - RNA, 16 nt, Human
gugacagauuauacag

SEQ ID NO: 3710765 - RNA, 22 nt, Human
gugacagcucuuuuugugaagu

SEQ ID NO: 3710766 - RNA, 14 nt, Human
gugacaggcagcag

SEQ ID NO: 3710767 - RNA, 16 nt, Human
gugacagggaagcuac

SEQ ID NO: 3710768 - RNA, 17 nt, Human
gugacagggaagcuaca

SEQ ID NO: 3710769 - RNA, 20 nt, Human
gugacagggaagcuacaggu

SEQ ID NO: 3710770 - RNA, 12 nt, Human
gugacagggcca

SEQ ID NO: 3710771 - RNA, 13 nt, Human
gugacagggccag

SEQ ID NO: 3710772 - RNA, 19 nt, Human
gugacagggccaguggggc

SEQ ID NO: 3710773 - RNA, 20 nt, Human
gugacagggccaguggggcc

SEQ ID NO: 3710774 - RNA, 21 nt, Human
gugacagggccaguggggccu

SEQ ID NO: 3710775 - RNA, 19 nt, Human
gugacaguauuuugguucu

SEQ ID NO: 3710776 - RNA, 22 nt, Human
gugacagucaucaucagggccu

SEQ ID NO: 3710777 - RNA, 14 nt, Human
gugacaucaguggc

SEQ ID NO: 3710778 - RNA, 16 nt, Human
gugacaucggaaaaau

SEQ ID NO: 3710779 - RNA, 19 nt, Human
gugacaucggaaaaauaau

SEQ ID NO: 3710780 - RNA, 14 nt, Human
gugacaucucuuac

SEQ ID NO: 3710781 - RNA, 16 nt, Human
gugacaugcgggcugg

SEQ ID NO: 3710782 - RNA, 22 nt, Human
gugacauggugccugagaggca

SEQ ID NO: 3710783 - RNA, 14 nt, Human
gugacaugucuuuu

SEQ ID NO: 3710784 - RNA, 19 nt, Human
gugacaugucuuuucuugc

SEQ ID NO: 3710785 - RNA, 15 nt, Human
gugacaugugaaacc

SEQ ID NO: 3710786 - RNA, 19 nt, Human
gugacaugugaaaccuuuu

SEQ ID NO: 3710787 - RNA, 19 nt, Human
gugacauuugucauuuuca

SEQ ID NO: 3710788 - RNA, 20 nt, Human
gugacauuugucauuuucau

SEQ ID NO: 3710789 - RNA, 23 nt, Human
gugacauuugucauuuucauuag

SEQ ID NO: 3710790 - RNA, 19 nt, Human
gugacauuuuacauuaaau

SEQ ID NO: 3710791 - RNA, 20 nt, Human
gugacauuuuacauuaaauu

SEQ ID NO: 3710792 - RNA, 17 nt, Human
gugaccaaaaguuacau

SEQ ID NO: 3710793 - RNA, 16 nt, Human
gugaccaaaauccccu

SEQ ID NO: 3710794 - RNA, 22 nt, Human
gugaccaacuagacauucuguc

SEQ ID NO: 3710795 - RNA, 19 nt, Human
gugaccaacuguguuguau

SEQ ID NO: 3710796 - RNA, 14 nt, Human
gugaccaaggagga

SEQ ID NO: 3710797 - RNA, 19 nt, Human
gugaccaaguuauaaauca

SEQ ID NO: 3710798 - RNA, 17 nt, Human
gugaccaggcauccucc

SEQ ID NO: 3710799 - RNA, 15 nt, Human
gugaccauuuauaau

SEQ ID NO: 3710800 - RNA, 16 nt, Human
gugacccacaugccau

SEQ ID NO: 3710801 - RNA, 15 nt, Human
gugacccagucagag

SEQ ID NO: 3710802 - RNA, 21 nt, Human
gugaccccagggcacaggagc

SEQ ID NO: 3710803 - RNA, 17 nt, Human
gugacccccagcuccgg

SEQ ID NO: 3710804 - RNA, 13 nt, Human
gugaccccuccug

SEQ ID NO: 3710805 - RNA, 21 nt, Human
gugaccccuccuggggccagg

SEQ ID NO: 3710806 - RNA, 23 nt, Human
gugaccccuccuggggccaggcc

SEQ ID NO: 3710807 - RNA, 17 nt, Human
gugacccggcacccccu

SEQ ID NO: 3710808 - RNA, 12 nt, Human
gugacccuccaa

SEQ ID NO: 3710809 - RNA, 21 nt, Human
gugacccucugcugaagacuu

SEQ ID NO: 3710810 - RNA, 23 nt, Human
gugacccuucccaaucagcacug

SEQ ID NO: 3710811 - RNA, 20 nt, Human
gugaccuaucaguuauuaau

SEQ ID NO: 3710812 - RNA, 16 nt, Human
gugaccucagcuuuga

SEQ ID NO: 3710813 - RNA, 19 nt, Human
gugaccucaggcacuagcc

SEQ ID NO: 3710814 - RNA, 20 nt, Human
gugaccucuagcccugcccg

SEQ ID NO: 3710815 - RNA, 16 nt, Human
gugaccucucucucug

SEQ ID NO: 3710816 - RNA, 12 nt, Human
gugaccucugcc

SEQ ID NO: 3710817 - RNA, 15 nt, Human
gugaccucugccuga

SEQ ID NO: 3710818 - RNA, 13 nt, Human
gugaccugcuagg

SEQ ID NO: 3710819 - RNA, 16 nt, Human
gugaccugcugagcuc

SEQ ID NO: 3710820 - RNA, 18 nt, Human
gugaccugcugagcucug

SEQ ID NO: 3710821 - RNA, 19 nt, Human
gugaccugcugagcucuga

SEQ ID NO: 3710822 - RNA, 20 nt, Human
gugaccugcugagcucugag

SEQ ID NO: 3710823 - RNA, 21 nt, Human
gugaccugcugagcucugaga

SEQ ID NO: 3710824 - RNA, 23 nt, Human
gugaccuuaguguuucugugcau

SEQ ID NO: 3710825 - RNA, 14 nt, Human
gugacggcccucau

SEQ ID NO: 3710826 - RNA, 15 nt, Human
gugacggucccacac

SEQ ID NO: 3710827 - RNA, 23 nt, Human
gugacuaacuagacaccaaaguu

SEQ ID NO: 3710828 - RNA, 17 nt, Human
gugacuaauggcaugag

SEQ ID NO: 3710829 - RNA, 17 nt, Human
gugacuaauuguauaac

SEQ ID NO: 3710830 - RNA, 18 nt, Human
gugacuaauuguauaaca

SEQ ID NO: 3710831 - RNA, 23 nt, Human
gugacuaauuguauaacagguua

SEQ ID NO: 3710832 - RNA, 19 nt, Human
gugacuaguacaaauuaua

SEQ ID NO: 3710833 - RNA, 15 nt, Human
gugacuagugcugaa

SEQ ID NO: 3710834 - RNA, 12 nt, Human
gugacuccagga

SEQ ID NO: 3710835 - RNA, 17 nt, Human
gugacucgggcuccugu

SEQ ID NO: 3710836 - RNA, 19 nt, Human
gugacucgggcuccugugc

SEQ ID NO: 3710837 - RNA, 16 nt, Human
gugacucuuuuuaggg

SEQ ID NO: 3710838 - RNA, 19 nt, Human
gugacugauguuaggcugg

SEQ ID NO: 3710839 - RNA, 15 nt, Human
gugacuguauauaaa

SEQ ID NO: 3710840 - RNA, 15 nt, Human
gugacuguaucugug

SEQ ID NO: 3710841 - RNA, 19 nt, Human
gugacuguaucuguguaga

SEQ ID NO: 3710842 - RNA, 15 nt, Human
gugacugucugggga

SEQ ID NO: 3710843 - RNA, 21 nt, Human
gugacuuagcagaugcugguc

SEQ ID NO: 3710844 - RNA, 11 nt, Human
gugacuucuga

SEQ ID NO: 3710845 - RNA, 22 nt, Human
gugacuugcaucguggagacag

SEQ ID NO: 3710846 - RNA, 17 nt, Human
gugacuugugucccaug

SEQ ID NO: 3710847 - RNA, 15 nt, Human
gugacuuuggauaau

SEQ ID NO: 3710848 - RNA, 18 nt, Human
gugacuuuucaaguauuu

SEQ ID NO: 3710849 - RNA, 15 nt, Human
gugacuuuugcuuua

SEQ ID NO: 3710850 - RNA, 11 nt, Human
gugagaaaccu

SEQ ID NO: 3710851 - RNA, 15 nt, Human
gugagaaaccuguau

SEQ ID NO: 3710852 - RNA, 17 nt, Human
gugagaaaccuguaucu

SEQ ID NO: 3710853 - RNA, 20 nt, Human
gugagaaccuggguugcaga

SEQ ID NO: 3710854 - RNA, 22 nt, Human
gugagaaccuggguugcagaca

SEQ ID NO: 3710855 - RNA, 17 nt, Human
gugagaagguuuauugu

SEQ ID NO: 3710856 - RNA, 20 nt, Human
gugagaagugaaugcuggga

SEQ ID NO: 3710857 - RNA, 14 nt, Human
gugagaauaagaga

SEQ ID NO: 3710858 - RNA, 22 nt, Human
gugagaauaagagagucauaaa

SEQ ID NO: 3710859 - RNA, 17 nt, Human
gugagaauaggcagccc

SEQ ID NO: 3710860 - RNA, 12 nt, Human
gugagacagacu

SEQ ID NO: 3710861 - RNA, 13 nt, Human
gugagaccaccuc

SEQ ID NO: 3710862 - RNA, 14 nt, Human
gugagaccaccucu

SEQ ID NO: 3710863 - RNA, 16 nt, Human
gugagacccccacacc

SEQ ID NO: 3710864 - RNA, 16 nt, Human
gugagaccccugucuc

SEQ ID NO: 3710865 - RNA, 20 nt, Human
gugagacucgagaacuuuca

SEQ ID NO: 3710866 - RNA, 19 nt, Human
gugagagacauuaacucau

SEQ ID NO: 3710867 - RNA, 23 nt, Human
gugagagacauuaacucauuaga

SEQ ID NO: 3710868 - RNA, 17 nt, Human
gugagagagaugggagc

SEQ ID NO: 3710869 - RNA, 14 nt, Human
gugagagauucugu

SEQ ID NO: 3710870 - RNA, 22 nt, Human
gugagaguaaugaggcuugggg

SEQ ID NO: 3710871 - RNA, 22 nt, Human
gugagaugagggaugggccugg

SEQ ID NO: 3710872 - RNA, 16 nt, Human
gugagaugcagcugga

SEQ ID NO: 3710873 - RNA, 15 nt, Human
gugagauuuuuuauu

SEQ ID NO: 3710874 - RNA, 18 nt, Human
gugagauuuuuuauugcu

SEQ ID NO: 3710875 - RNA, 21 nt, Human
gugagcacuaaggugugcucu

SEQ ID NO: 3710876 - RNA, 16 nt, Human
gugagcacucccaagu

SEQ ID NO: 3710877 - RNA, 17 nt, Human
gugagcagccuggagcc

SEQ ID NO: 3710878 - RNA, 21 nt, Human
gugagcagugugucuccugca

SEQ ID NO: 3710879 - RNA, 19 nt, Human
gugagcauguuuggaaggg

SEQ ID NO: 3710880 - RNA, 16 nt, Human
gugagccaccacgccc

SEQ ID NO: 3710881 - RNA, 13 nt, Human
gugagccacugca

SEQ ID NO: 3710882 - RNA, 14 nt, Human
gugagccacugcac

SEQ ID NO: 3710883 - RNA, 15 nt, Human
gugagccacugcacc

SEQ ID NO: 3710884 - RNA, 15 nt, Human
gugagcccagcuggg

SEQ ID NO: 3710885 - RNA, 20 nt, Human
gugagcccagcugggucagg

SEQ ID NO: 3710886 - RNA, 12 nt, Human
gugagccccauc

SEQ ID NO: 3710887 - RNA, 18 nt, Human
gugagccgcaucuucucc

SEQ ID NO: 3710888 - RNA, 14 nt, Human
gugagccuggcucu

SEQ ID NO: 3710889 - RNA, 14 nt, Human
gugagcgcuugggc

SEQ ID NO: 3710890 - RNA, 22 nt, Human
gugagcucccaggugcagccag

SEQ ID NO: 3710891 - RNA, 14 nt, Human
uggaguugaaaauc

SEQ ID NO: 3710892 - RNA, 19 nt, Human
uggaguugaucuggaaccc

SEQ ID NO: 3710893 - RNA, 16 nt, Human
uggaguuggaguucau

SEQ ID NO: 3710894 - RNA, 19 nt, Human
uggaguuggggcagaggag

SEQ ID NO: 3710895 - RNA, 16 nt, Human
uggaguugguggugcu

SEQ ID NO: 3710896 - RNA, 17 nt, Human
uggaguuucuaaggucc

SEQ ID NO: 3710897 - RNA, 16 nt, Human
uggaguuuuguuuccu

SEQ ID NO: 3710898 - RNA, 23 nt, Human
uggaguuuuuguuuggagagcac

SEQ ID NO: 3710899 - RNA, 16 nt, Human
uggauaaagccacuga

SEQ ID NO: 3710900 - RNA, 14 nt, Human
uggauaacaaagau

SEQ ID NO: 3710901 - RNA, 15 nt, Human
uggauaacaccacca

SEQ ID NO: 3710902 - RNA, 21 nt, Human
uggauaacuuagguggcaagc

SEQ ID NO: 3710903 - RNA, 16 nt, Human
uggauaacuuccacag

SEQ ID NO: 3710904 - RNA, 20 nt, Human
uggauaauaaggaaaaguuu

SEQ ID NO: 3710905 - RNA, 18 nt, Human
uggauaaugcuguugccu

SEQ ID NO: 3710906 - RNA, 18 nt, Human
uggauacagcaguagaca

SEQ ID NO: 3710907 - RNA, 13 nt, Human
uggauacauaaag

SEQ ID NO: 3710908 - RNA, 16 nt, Human
uggauacauaaagacu

SEQ ID NO: 3710909 - RNA, 17 nt, Human
uggauacauaaagacua

SEQ ID NO: 3710910 - RNA, 13 nt, Human
uggauagcauguc

SEQ ID NO: 3710911 - RNA, 16 nt, Human
uggauaggagccugcu

SEQ ID NO: 3710912 - RNA, 16 nt, Human
uggauaggcacauaga

SEQ ID NO: 3710913 - RNA, 14 nt, Human
uggauauaaauaua

SEQ ID NO: 3710914 - RNA, 17 nt, Human
uggauauaguuuuacuu

SEQ ID NO: 3710915 - RNA, 19 nt, Human
uggauauauaggcuauuuu

SEQ ID NO: 3710916 - RNA, 13 nt, Human
uggauaucuguua

SEQ ID NO: 3710917 - RNA, 18 nt, Human
uggauaucuguuagaugc

SEQ ID NO: 3710918 - RNA, 21 nt, Human
uggauauguaaaacauuuauu

SEQ ID NO: 3710919 - RNA, 23 nt, Human
uggauauuuucaaauuguaucua

SEQ ID NO: 3710920 - RNA, 24 nt, Human
uggaucaaaaucuguagagcaggg

SEQ ID NO: 3710921 - RNA, 19 nt, Human
uggaucaaauccagccugc

SEQ ID NO: 3710922 - RNA, 23 nt, Human
uggaucacagaggcuucuucaga

SEQ ID NO: 3710923 - RNA, 15 nt, Human
uggaucacucaccau

SEQ ID NO: 3710924 - RNA, 17 nt, Human
uggaucacucaccauuc

SEQ ID NO: 3710925 - RNA, 18 nt, Human
uggaucagcguggccuug

SEQ ID NO: 3710926 - RNA, 12 nt, Human
uggaucaggaaa

SEQ ID NO: 3710927 - RNA, 19 nt, Human
uggaucaguccuuugauca

SEQ ID NO: 3710928 - RNA, 19 nt, Human
uggaucauaagacaaugga

SEQ ID NO: 3710929 - RNA, 20 nt, Human
uggauccccucugucuacaa

SEQ ID NO: 3710930 - RNA, 16 nt, Human
uggaucuaccuggagg

SEQ ID NO: 3710931 - RNA, 20 nt, Human
uggaucuauuucauguuuuu

SEQ ID NO: 3710932 - RNA, 18 nt, Human
uggaucuccaaggaccag

SEQ ID NO: 3710933 - RNA, 19 nt, Human
uggaucuguauguguucua

SEQ ID NO: 3710934 - RNA, 15 nt, Human
uggaucugugagggg

SEQ ID NO: 3710935 - RNA, 19 nt, Human
uggaucugugaggggcucu

SEQ ID NO: 3710936 - RNA, 18 nt, Human
uggaucuucaauggcuuu

SEQ ID NO: 3710937 - RNA, 16 nt, Human
uggaucuugaaugugg

SEQ ID NO: 3710938 - RNA, 16 nt, Human
uggaucuuuucauucu

SEQ ID NO: 3710939 - RNA, 15 nt, Human
uggaugaaauuuucu

SEQ ID NO: 3710940 - RNA, 22 nt, Human
uggaugaaguuaucuggcuuca

SEQ ID NO: 3710941 - RNA, 14 nt, Human
uggaugacauuaaa

SEQ ID NO: 3710942 - RNA, 22 nt, Human
uggaugauccccacgccacagc

SEQ ID NO: 3710943 - RNA, 12 nt, Human
uggaugauguuu

SEQ ID NO: 3710944 - RNA, 21 nt, Human
uggaugcagccucacaguccu

SEQ ID NO: 3710945 - RNA, 14 nt, Human
uggaugcagugcuc

SEQ ID NO: 3710946 - RNA, 15 nt, Human
uggaugcagugcucg

SEQ ID NO: 3710947 - RNA, 22 nt, Human
uggaugccgauuucuguaaacu

SEQ ID NO: 3710948 - RNA, 12 nt, Human
uggaugccuuga

SEQ ID NO: 3710949 - RNA, 18 nt, Human
uggaugcggccauucaag

SEQ ID NO: 3710950 - RNA, 20 nt, Human
uggauggaagguuggaugga

SEQ ID NO: 3710951 - RNA, 15 nt, Human
uggauggccccagca

SEQ ID NO: 3710952 - RNA, 17 nt, Human
uggauggccccagcaca

SEQ ID NO: 3710953 - RNA, 18 nt, Human
uggauggccguggaugcg

SEQ ID NO: 3710954 - RNA, 14 nt, Human
uggauggugugccu

SEQ ID NO: 3710955 - RNA, 12 nt, Human
uggauguaaaua

SEQ ID NO: 3710956 - RNA, 17 nt, Human
uggaugucugccaauuu

SEQ ID NO: 3710957 - RNA, 20 nt, Human
uggaugucugccaauuuuug

SEQ ID NO: 3710958 - RNA, 15 nt, Human
uggaugucuuccuug

SEQ ID NO: 3710959 - RNA, 12 nt, Human
uggauguucuga

SEQ ID NO: 3710960 - RNA, 18 nt, Human
uggauuaaacuuaugaau

SEQ ID NO: 3710961 - RNA, 20 nt, Human
uggauuaaacuuaugaaugu

SEQ ID NO: 3710962 - RNA, 14 nt, Human
uggauuaaauacau

SEQ ID NO: 3710963 - RNA, 21 nt, Human
uggauuaaauacauauggaug

SEQ ID NO: 3710964 - RNA, 21 nt, Human
uggauuaaauuaguuugugaa

SEQ ID NO: 3710965 - RNA, 13 nt, Human
uggauuauuuaau

SEQ ID NO: 3710966 - RNA, 16 nt, Human
uggauuauuuaauaac

SEQ ID NO: 3710967 - RNA, 17 nt, Human
uggauucauauuuaauu

SEQ ID NO: 3710968 - RNA, 13 nt, Human
uggauucaucagc

SEQ ID NO: 3710969 - RNA, 16 nt, Human
uggauucauugucucu

SEQ ID NO: 3710970 - RNA, 12 nt, Human
uggauuccagag

SEQ ID NO: 3710971 - RNA, 13 nt, Human
uggauuccaugcu

SEQ ID NO: 3710972 - RNA, 15 nt, Human
uggauuccaugcuaa

SEQ ID NO: 3710973 - RNA, 18 nt, Human
uggauuccgaguggugac

SEQ ID NO: 3710974 - RNA, 17 nt, Human
uggauucucuaaccuuu

SEQ ID NO: 3710975 - RNA, 17 nt, Human
uggauucugagagcugu

SEQ ID NO: 3710976 - RNA, 20 nt, Human
uggauucugaggcccugccc

SEQ ID NO: 3710977 - RNA, 17 nt, Human
uggauugacaguaacuu

SEQ ID NO: 3710978 - RNA, 19 nt, Human
uggauugcaauaucugaag

SEQ ID NO: 3710979 - RNA, 17 nt, Human
uggauugcacguggccu

SEQ ID NO: 3710980 - RNA, 21 nt, Human
uggauugcacguggccucuug

SEQ ID NO: 3710981 - RNA, 16 nt, Human
uggauugccucugaaa

SEQ ID NO: 3710982 - RNA, 20 nt, Human
uggauuggacaaaaugacuu

SEQ ID NO: 3710983 - RNA, 13 nt, Human
uggauuggauuug

SEQ ID NO: 3710984 - RNA, 17 nt, Human
uggauugguguaaaagg

SEQ ID NO: 3710985 - RNA, 21 nt, Human
uggauuguuaauuucaguccu

SEQ ID NO: 3710986 - RNA, 16 nt, Human
uggauuuaaaagccug

SEQ ID NO: 3710987 - RNA, 24 nt, Human
uggauuuaacagaaauguacagca

SEQ ID NO: 3710988 - RNA, 15 nt, Human
uggauuuaguuucag

SEQ ID NO: 3710989 - RNA, 22 nt, Human
uggauuuauguuguauagauua

SEQ ID NO: 3710990 - RNA, 14 nt, Human
uggauuucagaaag

SEQ ID NO: 3710991 - RNA, 13 nt, Human
uggauuucagaag

SEQ ID NO: 3710992 - RNA, 15 nt, Human
uggauuucuuugaaa

SEQ ID NO: 3710993 - RNA, 18 nt, Human
uggauuucuuugaaaaaa

SEQ ID NO: 3710994 - RNA, 14 nt, Human
uggauuucuuuugu

SEQ ID NO: 3710995 - RNA, 13 nt, Human
uggauuugaagca

SEQ ID NO: 3710996 - RNA, 19 nt, Human
uggauuuggagagaaauau

SEQ ID NO: 3710997 - RNA, 16 nt, Human
uggauuuguuuaaaag

SEQ ID NO: 3710998 - RNA, 13 nt, Human
uggauuuuauguu

SEQ ID NO: 3710999 - RNA, 15 nt, Human
uggauuuuauguuga

SEQ ID NO: 3711000 - RNA, 22 nt, Human
uggauuuuauguugacauuugu

SEQ ID NO: 3711001 - RNA, 22 nt, Human
uggauuuuuaccagucucacau

SEQ ID NO: 3711002 - RNA, 20 nt, Human
uggauuuuugacucuggcaa

SEQ ID NO: 3711003 - RNA, 17 nt, Human
uggauuuuugucuugug

SEQ ID NO: 3711004 - RNA, 23 nt, Human
uggauuuuuuccuucaaaguuua

SEQ ID NO: 3711005 - RNA, 16 nt, Human
uggcaaaaaggcagga

SEQ ID NO: 3711006 - RNA, 16 nt, Human
uggcaaaagccuugug

SEQ ID NO: 3711007 - RNA, 19 nt, Human
uggcaaaagccuuguguau

SEQ ID NO: 3711008 - RNA, 21 nt, Human
uggcaaaagccuuguguauau

SEQ ID NO: 3711009 - RNA, 21 nt, Human
uggcaaaaggaucuuuguggc

SEQ ID NO: 3711010 - RNA, 24 nt, Human
uggcaaacagggccucugcggagc

SEQ ID NO: 3711011 - RNA, 24 nt, Human
uggcaaacgcuaaagagcccuugc

SEQ ID NO: 3711012 - RNA, 19 nt, Human
uggcaaacucuccaccaca

SEQ ID NO: 3711013 - RNA, 18 nt, Human
uggcaaagcagaauguga

SEQ ID NO: 3711014 - RNA, 16 nt, Human
uggcaaagcuuuuaga

SEQ ID NO: 3711015 - RNA, 17 nt, Human
uggcaaaggaaggugga

SEQ ID NO: 3711016 - RNA, 22 nt, Human
uggcaaagggagcagaacugaa

SEQ ID NO: 3711017 - RNA, 14 nt, Human
uggcaaauauaaaa

SEQ ID NO: 3711018 - RNA, 15 nt, Human
uggcaacaaacugca

SEQ ID NO: 3711019 - RNA, 13 nt, Human
uggcaacacagag

SEQ ID NO: 3711020 - RNA, 14 nt, Human
uggcaacagaagug

SEQ ID NO: 3711021 - RNA, 20 nt, Human
uggcaacagaucuggaaccu

SEQ ID NO: 3711022 - RNA, 16 nt, Human
uggcaacauucauugc

SEQ ID NO: 3711023 - RNA, 16 nt, Human
uggcaacauuccaaga

SEQ ID NO: 3711024 - RNA, 16 nt, Human
uggcaaccagaccauu

SEQ ID NO: 3711025 - RNA, 19 nt, Human
uggcaagaauguguuuaaa

SEQ ID NO: 3711026 - RNA, 23 nt, Human
uggcaaggacgcuucacaggaca

SEQ ID NO: 3711027 - RNA, 20 nt, Human
uggcaaggacuuuguacauu

SEQ ID NO: 3711028 - RNA, 16 nt, Human
uggcaagucacaugcg

SEQ ID NO: 3711029 - RNA, 18 nt, Human
uggcaauaaauuuugaaa

SEQ ID NO: 3711030 - RNA, 12 nt, Human
uggcaauagacc

SEQ ID NO: 3711031 - RNA, 20 nt, Human
uggcaauagucaaauugugu

SEQ ID NO: 3711032 - RNA, 18 nt, Human
uggcaauaguguguucug

SEQ ID NO: 3711033 - RNA, 20 nt, Human
uggcaaucaaacauuuucug

SEQ ID NO: 3711034 - RNA, 13 nt, Human
uggcaaugccaca

SEQ ID NO: 3711035 - RNA, 14 nt, Human
uggcaaugccacag

SEQ ID NO: 3711036 - RNA, 19 nt, Human
uggcaaugguaguuucugu

SEQ ID NO: 3711037 - RNA, 17 nt, Human
uggcaauuccaauauuu

SEQ ID NO: 3711038 - RNA, 19 nt, Human
uggcaauuccaauauuucu

SEQ ID NO: 3711039 - RNA, 14 nt, Human
uggcaauucuuuga

SEQ ID NO: 3711040 - RNA, 18 nt, Human
uggcaauuuauuuuaaga

SEQ ID NO: 3711041 - RNA, 13 nt, Human
uggcaauuuugua

SEQ ID NO: 3711042 - RNA, 14 nt, Human
uggcaauuuuguaa

SEQ ID NO: 3711043 - RNA, 14 nt, Human
uggcacagaaacac

SEQ ID NO: 3711044 - RNA, 20 nt, Human
uggcacagcccaaagaagga

SEQ ID NO: 3711045 - RNA, 15 nt, Human
uggcacagggcagug

SEQ ID NO: 3711046 - RNA, 18 nt, Human
uggcacagggcaguggga

SEQ ID NO: 3711047 - RNA, 19 nt, Human
uggcacagggcaugaaaug

SEQ ID NO: 3711048 - RNA, 20 nt, Human
uggcacagggcaugaaauga

SEQ ID NO: 3711049 - RNA, 15 nt, Human
uggcacauccuaugc

SEQ ID NO: 3711050 - RNA, 18 nt, Human
uggcacauccuaugcaau

SEQ ID NO: 3711051 - RNA, 23 nt, Human
uggcacauccuaugcaauauauc

SEQ ID NO: 3711052 - RNA, 18 nt, Human
uggcacauuuaagagaca

SEQ ID NO: 3711053 - RNA, 21 nt, Human
uggcacauuuccccagaccug

SEQ ID NO: 3711054 - RNA, 11 nt, Human
uggcaccaaag

SEQ ID NO: 3711055 - RNA, 20 nt, Human
uggcaccaaagaugcagccg

SEQ ID NO: 3711056 - RNA, 18 nt, Human
uggcaccacugcacucca

SEQ ID NO: 3711057 - RNA, 19 nt, Human
uggcaccacugcacuccag

SEQ ID NO: 3711058 - RNA, 14 nt, Human
uggcaccagacacc

SEQ ID NO: 3711059 - RNA, 16 nt, Human
uggcaccagacaccca

SEQ ID NO: 3711060 - RNA, 21 nt, Human
uggcaccagacacccaggacu

SEQ ID NO: 3711061 - RNA, 19 nt, Human
uggcaccagaggcugcaga

SEQ ID NO: 3711062 - RNA, 20 nt, Human
uggcaccagaggcugcagaa

SEQ ID NO: 3711063 - RNA, 18 nt, Human
uggcaccagcagccugga

SEQ ID NO: 3711064 - RNA, 18 nt, Human
uggcacccggccccugcu

SEQ ID NO: 3711065 - RNA, 23 nt, Human
uggcaccgccuccccaccuccag

SEQ ID NO: 3711066 - RNA, 20 nt, Human
uggcaccuaauccaggcaga

SEQ ID NO: 3711067 - RNA, 22 nt, Human
uggcaccuccucggcuggcugu

SEQ ID NO: 3711068 - RNA, 13 nt, Human
uggcaccugucug

SEQ ID NO: 3711069 - RNA, 14 nt, Human
uggcacggugguac

SEQ ID NO: 3711070 - RNA, 22 nt, Human
uggcacuaacguugagccccug

SEQ ID NO: 3711071 - RNA, 15 nt, Human
uggcacuauaaugua

SEQ ID NO: 3711072 - RNA, 16 nt, Human
uggcacuauaauguaa

SEQ ID NO: 3711073 - RNA, 22 nt, Human
uggcacuauaauguaagcucua

SEQ ID NO: 3711074 - RNA, 15 nt, Human
uggcacucaacauga

SEQ ID NO: 3711075 - RNA, 15 nt, Human
uggcacucccuccag

SEQ ID NO: 3711076 - RNA, 19 nt, Human
uggcacugacugggcauag

SEQ ID NO: 3711077 - RNA, 14 nt, Human
uggcacugagcccc

SEQ ID NO: 3711078 - RNA, 19 nt, Human
uggcacugcauacaaucug

SEQ ID NO: 3711079 - RNA, 22 nt, Human
uggcacugcuuccagugaggcu

SEQ ID NO: 3711080 - RNA, 16 nt, Human
uggcacuggaccccag

SEQ ID NO: 3711081 - RNA, 13 nt, Human
uggcacuggcaaa

SEQ ID NO: 3711082 - RNA, 20 nt, Human
uggcacuggcauugucccug

SEQ ID NO: 3711083 - RNA, 21 nt, Human
uggcacugguagguugggaca

SEQ ID NO: 3711084 - RNA, 16 nt, Human
uggcacuugcaucugu

SEQ ID NO: 3711085 - RNA, 14 nt, Human
uggcacuugccugg

SEQ ID NO: 3711086 - RNA, 16 nt, Human
uggcacuugccugggu

SEQ ID NO: 3711087 - RNA, 17 nt, Human
uggcacuugccuggguc

SEQ ID NO: 3711088 - RNA, 11 nt, Human
uggcacuuuga

SEQ ID NO: 3711089 - RNA, 16 nt, Human
uggcacuuugaagggg

SEQ ID NO: 3711090 - RNA, 16 nt, Human
uggcacuuuuucauuu

SEQ ID NO: 3711091 - RNA, 20 nt, Human
uggcagaaaaaaugucugua

SEQ ID NO: 3711092 - RNA, 18 nt, Human
uggcagaagacaccagag

SEQ ID NO: 3711093 - RNA, 21 nt, Human
uggcagaagggagcagcacac

SEQ ID NO: 3711094 - RNA, 17 nt, Human
uggcagacuguguaaaa

SEQ ID NO: 3711095 - RNA, 13 nt, Human
uggcagagagaga

SEQ ID NO: 3711096 - RNA, 18 nt, Human
uggcagagaugccucccu

SEQ ID NO: 3711097 - RNA, 13 nt, Human
uggcagagcuucu

SEQ ID NO: 3711098 - RNA, 22 nt, Human
uggcagagcuuggacuggaugc

SEQ ID NO: 3711099 - RNA, 21 nt, Human
uggcagaguggauucuugaac

SEQ ID NO: 3711100 - RNA, 12 nt, Human
uggcagaguuac

SEQ ID NO: 3711101 - RNA, 19 nt, Human
uggcagaguuacaguucug

SEQ ID NO: 3711102 - RNA, 15 nt, Human
uggcagaguugaaga

SEQ ID NO: 3711103 - RNA, 19 nt, Human
uggcagaguuguaaauaua

SEQ ID NO: 3711104 - RNA, 21 nt, Human
uggcagaugcagcucuuccug

SEQ ID NO: 3711105 - RNA, 19 nt, Human
uggcagauguaggagggac

SEQ ID NO: 3711106 - RNA, 20 nt, Human
uggcagcaggccuguugcuu

SEQ ID NO: 3711107 - RNA, 17 nt, Human
uggcagcaggugcugcu

SEQ ID NO: 3711108 - RNA, 13 nt, Human
uggcagcauaaag

SEQ ID NO: 3711109 - RNA, 11 nt, Human
uggcagcccag

SEQ ID NO: 3711110 - RNA, 15 nt, Human
uggcagccccagcac

SEQ ID NO: 3711111 - RNA, 11 nt, Human
uggcagcccug

SEQ ID NO: 3711112 - RNA, 12 nt, Human
uggcagcccugu

SEQ ID NO: 3711113 - RNA, 17 nt, Human
uggcagcccuguaggga

SEQ ID NO: 3711114 - RNA, 17 nt, Human
uggcagccgugccuuca

SEQ ID NO: 3711115 - RNA, 22 nt, Human
uggcagccgugccuucagcucu

SEQ ID NO: 3711116 - RNA, 20 nt, Human
uggcagccucccauccaggg

SEQ ID NO: 3711117 - RNA, 12 nt, Human
uggcagccuugu

SEQ ID NO: 3711118 - RNA, 15 nt, Human
uggcagccuugugau

SEQ ID NO: 3711119 - RNA, 15 nt, Human
uggcagcucaccucu

SEQ ID NO: 3711120 - RNA, 19 nt, Human
uggcagcucaccucucccu

SEQ ID NO: 3711121 - RNA, 21 nt, Human
uggcagcugcgguccacccag

SEQ ID NO: 3711122 - RNA, 13 nt, Human
uggcagcugcuuu

SEQ ID NO: 3711123 - RNA, 11 nt, Human
uggcagcuuuu

SEQ ID NO: 3711124 - RNA, 18 nt, Human
uggcagcuuuuaaaagau

SEQ ID NO: 3711125 - RNA, 13 nt, Human
uggcaggacagga

SEQ ID NO: 3711126 - RNA, 11 nt, Human
uggcaggacca

SEQ ID NO: 3711127 - RNA, 22 nt, Human
uggcaggaugacccugcgaagg

SEQ ID NO: 3711128 - RNA, 19 nt, Human
uggcaggauggccuggcca

SEQ ID NO: 3711129 - RNA, 14 nt, Human
uggcaggcaccugu

SEQ ID NO: 3711130 - RNA, 18 nt, Human
uggcaggcagaggcccag

SEQ ID NO: 3711131 - RNA, 15 nt, Human
uggcaggcagcgcca

SEQ ID NO: 3711132 - RNA, 15 nt, Human
uggcaggccagcugu

SEQ ID NO: 3711133 - RNA, 20 nt, Human
uggcagggcacagggccugg

SEQ ID NO: 3711134 - RNA, 21 nt, Human
uggcagggcacagggccuggc

SEQ ID NO: 3711135 - RNA, 11 nt, Human
uggcagggcuc

SEQ ID NO: 3711136 - RNA, 23 nt, Human
uggcagggcuggccccagggcac

SEQ ID NO: 3711137 - RNA, 15 nt, Human
uggcaggggacagga

SEQ ID NO: 3711138 - RNA, 18 nt, Human
uggcagggggcugcugcu

SEQ ID NO: 3711139 - RNA, 24 nt, Human
uggcagggguggaggagagccugg

SEQ ID NO: 3711140 - RNA, 15 nt, Human
uggcagguccucccc

SEQ ID NO: 3711141 - RNA, 19 nt, Human
uggcaguaaagagaaacuu

SEQ ID NO: 3711142 - RNA, 22 nt, Human
uggcaguaaagagaaacuuugu

SEQ ID NO: 3711143 - RNA, 18 nt, Human
uggcaguccgugggacgg

SEQ ID NO: 3711144 - RNA, 13 nt, Human
uggcagucuauau

SEQ ID NO: 3711145 - RNA, 22 nt, Human
uggcagucugaauuuuuaaaac

SEQ ID NO: 3711146 - RNA, 14 nt, Human
uggcagugagugag

SEQ ID NO: 3711147 - RNA, 18 nt, Human
uggcagugagugagccug

SEQ ID NO: 3711148 - RNA, 19 nt, Human
uggcagugggaaaaaugua

SEQ ID NO: 3711149 - RNA, 15 nt, Human
uggcagugggagcug

SEQ ID NO: 3711150 - RNA, 16 nt, Human
uggcaguguuuugaga

SEQ ID NO: 3711151 - RNA, 21 nt, Human
uggcaguuuugacaucagcca

SEQ ID NO: 3711152 - RNA, 15 nt, Human
uggcauaaauugcau

SEQ ID NO: 3711153 - RNA, 22 nt, Human
uggcauacgccuguaguccuag

SEQ ID NO: 3711154 - RNA, 15 nt, Human
uggcauagagcagca

SEQ ID NO: 3711155 - RNA, 17 nt, Human
uggcauagcccagacac

SEQ ID NO: 3711156 - RNA, 19 nt, Human
uggcauagcccagacacag

SEQ ID NO: 3711157 - RNA, 23 nt, Human
uggcaucaagaggugggagggcc

SEQ ID NO: 3711158 - RNA, 15 nt, Human
uggcaucacagggca

SEQ ID NO: 3711159 - RNA, 15 nt, Human
uggcaucagcuggcg

SEQ ID NO: 3711160 - RNA, 15 nt, Human
uggcaucccugggcc

SEQ ID NO: 3711161 - RNA, 16 nt, Human
uggcaucccugggccu

SEQ ID NO: 3711162 - RNA, 20 nt, Human
uggcaucccugggccuuggg

SEQ ID NO: 3711163 - RNA, 17 nt, Human
uggcauccugugaaguc

SEQ ID NO: 3711164 - RNA, 23 nt, Human
uggcaucgcaccauucugacucg

SEQ ID NO: 3711165 - RNA, 20 nt, Human
uggcaucuuagaccuccaca

SEQ ID NO: 3711166 - RNA, 22 nt, Human
uggcaucuucgucuucacucuu

SEQ ID NO: 3711167 - RNA, 20 nt, Human
uggcaucuuugccuugggcu

SEQ ID NO: 3711168 - RNA, 23 nt, Human
uggcaucuuugccuugggcugcu

SEQ ID NO: 3711169 - RNA, 13 nt, Human
uggcaugagaaau

SEQ ID NO: 3711170 - RNA, 15 nt, Human
uggcaugccuuccag

SEQ ID NO: 3711171 - RNA, 16 nt, Human
uggcaugcuuaaauuu

SEQ ID NO: 3711172 - RNA, 19 nt, Human
uggcauggaaauuuaaagc

SEQ ID NO: 3711173 - RNA, 17 nt, Human
uggcaugggggccucag

SEQ ID NO: 3711174 - RNA, 19 nt, Human
uggcaugggggccucaggg

SEQ ID NO: 3711175 - RNA, 21 nt, Human
uggcaugguuuugugccaucu

SEQ ID NO: 3711176 - RNA, 15 nt, Human
uggcauguggccugu

SEQ ID NO: 3711177 - RNA, 12 nt, Human
uggcauguguuu

SEQ ID NO: 3711178 - RNA, 19 nt, Human
uggcauuacagcuggagaa

SEQ ID NO: 3711179 - RNA, 17 nt, Human
uggcauucuuguacagu

SEQ ID NO: 3711180 - RNA, 13 nt, Human
uggcauuggcagc

SEQ ID NO: 3711181 - RNA, 19 nt, Human
uggcauuggcagcaggugc

SEQ ID NO: 3711182 - RNA, 20 nt, Human
uggcauugucccugugccua

SEQ ID NO: 3711183 - RNA, 15 nt, Human
uggcauuugcaauaa

SEQ ID NO: 3711184 - RNA, 19 nt, Human
uggcauuugcagauuuuua

SEQ ID NO: 3711185 - RNA, 20 nt, Human
uggccaaauuauuuguguaa

SEQ ID NO: 3711186 - RNA, 13 nt, Human
uggccaagaagca

SEQ ID NO: 3711187 - RNA, 16 nt, Human
uggccaagaagcagug

SEQ ID NO: 3711188 - RNA, 21 nt, Human
uggccaagaagcaguggccuu

SEQ ID NO: 3711189 - RNA, 22 nt, Human
uggccaagaagcaguggccuua

SEQ ID NO: 3711190 - RNA, 20 nt, Human
uggccaagagaaacuuccua

SEQ ID NO: 3711191 - RNA, 20 nt, Human
ugccagugucuuucuuuggu

SEQ ID NO: 3711192 - RNA, 19 nt, Human
ugccagugugcugaugggc

SEQ ID NO: 3711193 - RNA, 18 nt, Human
ugccaguuacuugcuuua

SEQ ID NO: 3711194 - RNA, 13 nt, Human
ugccauaaaacau

SEQ ID NO: 3711195 - RNA, 14 nt, Human
ugccauaaaacauu

SEQ ID NO: 3711196 - RNA, 13 nt, Human
ugccauaauuacu

SEQ ID NO: 3711197 - RNA, 23 nt, Human
ugccauacaucaguuauucauuc

SEQ ID NO: 3711198 - RNA, 16 nt, Human
ugccauagucacaugg

SEQ ID NO: 3711199 - RNA, 18 nt, Human
ugccaucaaacuguaaaa

SEQ ID NO: 3711200 - RNA, 15 nt, Human
ugccaucaucuccug

SEQ ID NO: 3711201 - RNA, 15 nt, Human
ugccaucauugcugu

SEQ ID NO: 3711202 - RNA, 19 nt, Human
ugccaucccucccuccacc

SEQ ID NO: 3711203 - RNA, 22 nt, Human
ugccaucccucccuccaccucc

SEQ ID NO: 3711204 - RNA, 23 nt, Human
ugccauccucaaacacugcaggc

SEQ ID NO: 3711205 - RNA, 18 nt, Human
ugccauccuggcccaggg

SEQ ID NO: 3711206 - RNA, 20 nt, Human
ugccaucucaccuccugcug

SEQ ID NO: 3711207 - RNA, 22 nt, Human
ugccaucucaccuccugcuggg

SEQ ID NO: 3711208 - RNA, 23 nt, Human
ugccaucucaccuccugcugggc

SEQ ID NO: 3711209 - RNA, 16 nt, Human
ugccaugaacuggagg

SEQ ID NO: 3711210 - RNA, 18 nt, Human
ugccauggaacuguuucc

SEQ ID NO: 3711211 - RNA, 14 nt, Human
ugccauggaagagg

SEQ ID NO: 3711212 - RNA, 22 nt, Human
ugccauggaagaggcuacaggg

SEQ ID NO: 3711213 - RNA, 18 nt, Human
ugccauggacagaagaag

SEQ ID NO: 3711214 - RNA, 23 nt, Human
ugccauggacagaagaaggcagc

SEQ ID NO: 3711215 - RNA, 20 nt, Human
ugccaugggcuucacuguau

SEQ ID NO: 3711216 - RNA, 22 nt, Human
ugccaugggcuucacuguauaa

SEQ ID NO: 3711217 - RNA, 18 nt, Human
ugccauguacaguauguu

SEQ ID NO: 3711218 - RNA, 12 nt, Human
ugccauguaccu

SEQ ID NO: 3711219 - RNA, 17 nt, Human
ugccauguaccuccccu

SEQ ID NO: 3711220 - RNA, 23 nt, Human
ugccauguaccuccccugccuug

SEQ ID NO: 3711221 - RNA, 17 nt, Human
ugccaugucaaacaaau

SEQ ID NO: 3711222 - RNA, 18 nt, Human
ugccaugucaaacaaaua

SEQ ID NO: 3711223 - RNA, 18 nt, Human
ugccaugucagcgcucug

SEQ ID NO: 3711224 - RNA, 15 nt, Human
ugccaugugccaggu

SEQ ID NO: 3711225 - RNA, 20 nt, Human
ugccaugugcuucugccacc

SEQ ID NO: 3711226 - RNA, 21 nt, Human
ugccauguugccccuuucucu

SEQ ID NO: 3711227 - RNA, 15 nt, Human
ugccauguuggccag

SEQ ID NO: 3711228 - RNA, 17 nt, Human
ugccauguuggccaggc

SEQ ID NO: 3711229 - RNA, 18 nt, Human
ugccauguuggccaggcu

SEQ ID NO: 3711230 - RNA, 21 nt, Human
ugccauguuggccaggcuggu

SEQ ID NO: 3711231 - RNA, 21 nt, Human
ugccauguuuugccacccccu

SEQ ID NO: 3711232 - RNA, 14 nt, Human
ugccauuaaagaau

SEQ ID NO: 3711233 - RNA, 14 nt, Human
ugccauuaacaaau

SEQ ID NO: 3711234 - RNA, 22 nt, Human
ugccauuacagagguauuaaaa

SEQ ID NO: 3711235 - RNA, 23 nt, Human
ugccauuaucccugaaucccccu

SEQ ID NO: 3711236 - RNA, 20 nt, Human
ugccauuauuuucugucaga

SEQ ID NO: 3711237 - RNA, 16 nt, Human
ugccauucacuucaua

SEQ ID NO: 3711238 - RNA, 20 nt, Human
ugccauuccaaaauauuaug

SEQ ID NO: 3711239 - RNA, 13 nt, Human
ugccauugucuuu

SEQ ID NO: 3711240 - RNA, 14 nt, Human
ugccauugucuuua

SEQ ID NO: 3711241 - RNA, 18 nt, Human
ugccauugucuuuauaug

SEQ ID NO: 3711242 - RNA, 14 nt, Human
ugccauuuaaaaag

SEQ ID NO: 3711243 - RNA, 17 nt, Human
ugccauuuaaaaaguug

SEQ ID NO: 3711244 - RNA, 14 nt, Human
ugccauuuauuuau

SEQ ID NO: 3711245 - RNA, 15 nt, Human
ugccauuucaugucc

SEQ ID NO: 3711246 - RNA, 20 nt, Human
ugccauuugauaccccuggg

SEQ ID NO: 3711247 - RNA, 18 nt, Human
ugccauuugauuuuucua

SEQ ID NO: 3711248 - RNA, 15 nt, Human
ugcccaacaccagcc

SEQ ID NO: 3711249 - RNA, 19 nt, Human
ugcccaacaccagccccug

SEQ ID NO: 3711250 - RNA, 22 nt, Human
ugcccaacaccagccccugccc

SEQ ID NO: 3711251 - RNA, 19 nt, Human
ugcccaacccuucccucac

SEQ ID NO: 3711252 - RNA, 20 nt, Human
ugcccaacccuucccucacc

SEQ ID NO: 3711253 - RNA, 14 nt, Human
ugcccaaccucagc

SEQ ID NO: 3711254 - RNA, 15 nt, Human
ugcccaaccucagca

SEQ ID NO: 3711255 - RNA, 11 nt, Human
ugcccaagcca

SEQ ID NO: 3711256 - RNA, 15 nt, Human
ugcccaagccagagg

SEQ ID NO: 3711257 - RNA, 14 nt, Human
ugcccaagggaaag

SEQ ID NO: 3711258 - RNA, 20 nt, Human
ugcccaaugaauaauggaaa

SEQ ID NO: 3711259 - RNA, 21 nt, Human
ugcccaauuggaggaaagcaa

SEQ ID NO: 3711260 - RNA, 17 nt, Human
ugcccacaccuccuggg

SEQ ID NO: 3711261 - RNA, 12 nt, Human
ugcccacagccc

SEQ ID NO: 3711262 - RNA, 19 nt, Human
ugcccacaggaucagucug

SEQ ID NO: 3711263 - RNA, 21 nt, Human
ugcccacaggccgcccugcgg

SEQ ID NO: 3711264 - RNA, 18 nt, Human
ugcccacagugucaggca

SEQ ID NO: 3711265 - RNA, 24 nt, Human
ugcccacccccucaagccaauccc

SEQ ID NO: 3711266 - RNA, 18 nt, Human
ugcccacccccugcccug

SEQ ID NO: 3711267 - RNA, 17 nt, Human
ugcccacccuccacucu

SEQ ID NO: 3711268 - RNA, 22 nt, Human
ugcccacccugggagacagacc

SEQ ID NO: 3711269 - RNA, 11 nt, Human
ugcccaccugc

SEQ ID NO: 3711270 - RNA, 17 nt, Human
ugcccaccugcccauca

SEQ ID NO: 3711271 - RNA, 19 nt, Human
ugcccaccugcccaucaca

SEQ ID NO: 3711272 - RNA, 17 nt, Human
ugcccaccugccuggcc

SEQ ID NO: 3711273 - RNA, 17 nt, Human
ugcccaccuggccucug

SEQ ID NO: 3711274 - RNA, 20 nt, Human
ugcccaccuggccucugcac

SEQ ID NO: 3711275 - RNA, 11 nt, Human
ugcccaccugu

SEQ ID NO: 3711276 - RNA, 13 nt, Human
ugcccacucccug

SEQ ID NO: 3711277 - RNA, 18 nt, Human
ugcccacuccugcucugc

SEQ ID NO: 3711278 - RNA, 12 nt, Human
ugcccacuguuu

SEQ ID NO: 3711279 - RNA, 17 nt, Human
ugcccagaacuucccug

SEQ ID NO: 3711280 - RNA, 18 nt, Human
ugcccagaacuucccuga

SEQ ID NO: 3711281 - RNA, 18 nt, Human
ugcccagaauacugaugg

SEQ ID NO: 3711282 - RNA, 18 nt, Human
ugcccagaaugaggcugc

SEQ ID NO: 3711283 - RNA, 19 nt, Human
ugcccagaaugaggcugcu

SEQ ID NO: 3711284 - RNA, 21 nt, Human
ugcccagaauucccagcuguc

SEQ ID NO: 3711285 - RNA, 18 nt, Human
ugcccagaccccucuggc

SEQ ID NO: 3711286 - RNA, 17 nt, Human
ugcccagagacccagcg

SEQ ID NO: 3711287 - RNA, 20 nt, Human
ugcccagagacccagcggac

SEQ ID NO: 3711288 - RNA, 18 nt, Human
ugcccagagaugccucca

SEQ ID NO: 3711289 - RNA, 20 nt, Human
ugcccagagaugccuccacc

SEQ ID NO: 3711290 - RNA, 22 nt, Human
ugcccagagaugccuccaccgc

SEQ ID NO: 3711291 - RNA, 15 nt, Human
ugcccagagauggga

SEQ ID NO: 3711292 - RNA, 14 nt, Human
ugcccagagcuggg

SEQ ID NO: 3711293 - RNA, 17 nt, Human
ugcccagagcuggguga

SEQ ID NO: 3711294 - RNA, 16 nt, Human
ugcccagaucagccag

SEQ ID NO: 3711295 - RNA, 20 nt, Human
ugcccagaucagccagaagc

SEQ ID NO: 3711296 - RNA, 22 nt, Human
ugcccagcccccuggucuuuga

SEQ ID NO: 3711297 - RNA, 12 nt, Human
ugcccagccccu

SEQ ID NO: 3711298 - RNA, 20 nt, Human
ugcccagccccuucugaccc

SEQ ID NO: 3711299 - RNA, 17 nt, Human
ugcccagccucuuuccc

SEQ ID NO: 3711300 - RNA, 18 nt, Human
ugcccagccuggaugcca

SEQ ID NO: 3711301 - RNA, 21 nt, Human
ugcccagcuagcugcagagcc

SEQ ID NO: 3711302 - RNA, 21 nt, Human
ugcccagcuauaccugugccu

SEQ ID NO: 3711303 - RNA, 14 nt, Human
ugcccagcuugggc

SEQ ID NO: 3711304 - RNA, 18 nt, Human
ugcccagcuugggcccag

SEQ ID NO: 3711305 - RNA, 23 nt, Human
ugcccagcuugggcccagcuggg

SEQ ID NO: 3711306 - RNA, 21 nt, Human
ugcccaggacggggccggcca

SEQ ID NO: 3711307 - RNA, 16 nt, Human
ugcccaggagagccag

SEQ ID NO: 3711308 - RNA, 20 nt, Human
ugcccaggagagccagcccu

SEQ ID NO: 3711309 - RNA, 22 nt, Human
ugcccaggagagccagcccucc

SEQ ID NO: 3711310 - RNA, 13 nt, Human
ugcccaggcaggu

SEQ ID NO: 3711311 - RNA, 16 nt, Human
ugcccaggcaggucuu

SEQ ID NO: 3711312 - RNA, 17 nt, Human
ugcccaggcaggucuug

SEQ ID NO: 3711313 - RNA, 11 nt, Human
ugcccaggccc

SEQ ID NO: 3711314 - RNA, 14 nt, Human
ugcccaggccccug

SEQ ID NO: 3711315 - RNA, 17 nt, Human
ugcccaggccccugcca

SEQ ID NO: 3711316 - RNA, 18 nt, Human
ugcccaggccccugccac

SEQ ID NO: 3711317 - RNA, 15 nt, Human
ugcccaggccggcca

SEQ ID NO: 3711318 - RNA, 13 nt, Human
ugcccaggcugga

SEQ ID NO: 3711319 - RNA, 15 nt, Human
ugcccaggcuggagu

SEQ ID NO: 3711320 - RNA, 20 nt, Human
ugcccaggcuggagugcaau

SEQ ID NO: 3711321 - RNA, 19 nt, Human
ugcccaggcuggcgugcag

SEQ ID NO: 3711322 - RNA, 23 nt, Human
ugcccaggcuggcgugcaguggu

SEQ ID NO: 3711323 - RNA, 16 nt, Human
ugcccaggcuggucuu

SEQ ID NO: 3711324 - RNA, 19 nt, Human
ugcccagggccacucugcc

SEQ ID NO: 3711325 - RNA, 21 nt, Human
ugcccagggccacucugccuc

SEQ ID NO: 3711326 - RNA, 15 nt, Human
ugcccagggcucagc

SEQ ID NO: 3711327 - RNA, 17 nt, Human
ugcccagggcucagccu

SEQ ID NO: 3711328 - RNA, 14 nt, Human
ugcccaggggagcc

SEQ ID NO: 3711329 - RNA, 20 nt, Human
ugcccaggggcccacaggga

SEQ ID NO: 3711330 - RNA, 19 nt, Human
ugcccaggggugcccccuc

SEQ ID NO: 3711331 - RNA, 23 nt, Human
ugcccaggggugcccccuccucu

SEQ ID NO: 3711332 - RNA, 19 nt, Human
ugcccaguacauuuaaauu

SEQ ID NO: 3711333 - RNA, 22 nt, Human
ugcccagucccccaaccccagc

SEQ ID NO: 3711334 - RNA, 21 nt, Human
ugcccagucgauaucucacuu

SEQ ID NO: 3711335 - RNA, 14 nt, Human
ugcccagucuuuca

SEQ ID NO: 3711336 - RNA, 17 nt, Human
ugcccagucuuucaugu

SEQ ID NO: 3711337 - RNA, 19 nt, Human
ugcccaguguuguuuguaa

SEQ ID NO: 3711338 - RNA, 20 nt, Human
ugcccaguguuguuuguaaa

SEQ ID NO: 3711339 - RNA, 16 nt, Human
gugagcuccuaagcca

SEQ ID NO: 3711340 - RNA, 23 nt, Human
gugagcucuuccuaucccucucc

SEQ ID NO: 3711341 - RNA, 18 nt, Human
gugaggaaagcacacagu

SEQ ID NO: 3711342 - RNA, 18 nt, Human
gugaggaaaucaaagugc

SEQ ID NO: 3711343 - RNA, 22 nt, Human
gugaggaaaucaaagugcuauu

SEQ ID NO: 3711344 - RNA, 16 nt, Human
gugaggaagccgcugg

SEQ ID NO: 3711345 - RNA, 16 nt, Human
gugaggaagcuccagu

SEQ ID NO: 3711346 - RNA, 18 nt, Human
gugaggagcugcuggcuu

SEQ ID NO: 3711347 - RNA, 17 nt, Human
gugaggaugggaaggag

SEQ ID NO: 3711348 - RNA, 19 nt, Human
gugaggaugggaaggaggg

SEQ ID NO: 3711349 - RNA, 15 nt, Human
gugaggaugucuggg

SEQ ID NO: 3711350 - RNA, 23 nt, Human
gugaggauuaaauaauguaaaua

SEQ ID NO: 3711351 - RNA, 23 nt, Human
gugaggcaaugggagcugaggcc

SEQ ID NO: 3711352 - RNA, 12 nt, Human
gugaggcagggg

SEQ ID NO: 3711353 - RNA, 17 nt, Human
gugaggcaggggcggag

SEQ ID NO: 3711354 - RNA, 13 nt, Human
gugaggcaguggg

SEQ ID NO: 3711355 - RNA, 15 nt, Human
gugaggccacugaag

SEQ ID NO: 3711356 - RNA, 16 nt, Human
gugaggccacugaaga

SEQ ID NO: 3711357 - RNA, 21 nt, Human
gugaggccacugaagaggagg

SEQ ID NO: 3711358 - RNA, 22 nt, Human
gugaggccacugaagaggagga

SEQ ID NO: 3711359 - RNA, 17 nt, Human
gugaggccagagacaca

SEQ ID NO: 3711360 - RNA, 15 nt, Human
gugaggcccagggag

SEQ ID NO: 3711361 - RNA, 14 nt, Human
gugaggccugucug

SEQ ID NO: 3711362 - RNA, 14 nt, Human
gugaggcucugccc

SEQ ID NO: 3711363 - RNA, 19 nt, Human
gugagggguaaaagcugau

SEQ ID NO: 3711364 - RNA, 13 nt, Human
gugaggggucccu

SEQ ID NO: 3711365 - RNA, 19 nt, Human
gugaggugcagagugccca

SEQ ID NO: 3711366 - RNA, 14 nt, Human
gugaggugcccagc

SEQ ID NO: 3711367 - RNA, 16 nt, Human
gugagguucuuggguu

SEQ ID NO: 3711368 - RNA, 16 nt, Human
gugagguugggcagcu

SEQ ID NO: 3711369 - RNA, 22 nt, Human
gugagguuucccaaugguguuu

SEQ ID NO: 3711370 - RNA, 17 nt, Human
gugagucaccaagccca

SEQ ID NO: 3711371 - RNA, 19 nt, Human
gugagucaccaagcccagu

SEQ ID NO: 3711372 - RNA, 14 nt, Human
gugagucauuuaaa

SEQ ID NO: 3711373 - RNA, 19 nt, Human
gugaguccuagagcuacag

SEQ ID NO: 3711374 - RNA, 20 nt, Human
gugaguccuggcaugggaau

SEQ ID NO: 3711375 - RNA, 18 nt, Human
gugagucucucugggccu

SEQ ID NO: 3711376 - RNA, 16 nt, Human
gugagucuuggcggca

SEQ ID NO: 3711377 - RNA, 21 nt, Human
gugagucuuggcggcagcagc

SEQ ID NO: 3711378 - RNA, 22 nt, Human
gugagucuuggcggcagcagcc

SEQ ID NO: 3711379 - RNA, 19 nt, Human
gugagucuuugguucuaag

SEQ ID NO: 3711380 - RNA, 13 nt, Human
gugagugccuuuu

SEQ ID NO: 3711381 - RNA, 17 nt, Human
gugagugccuuuugcag

SEQ ID NO: 3711382 - RNA, 16 nt, Human
gugagugguugaauau

SEQ ID NO: 3711383 - RNA, 15 nt, Human
gugaguguggcuccc

SEQ ID NO: 3711384 - RNA, 14 nt, Human
gugaguucucaggg

SEQ ID NO: 3711385 - RNA, 13 nt, Human
gugaguucucccu

SEQ ID NO: 3711386 - RNA, 22 nt, Human
gugaguucucccuguacagugu

SEQ ID NO: 3711387 - RNA, 20 nt, Human
gugaguuggcuuaccuggcc

SEQ ID NO: 3711388 - RNA, 21 nt, Human
gugaguuugagcugccuuccc

SEQ ID NO: 3711389 - RNA, 12 nt, Human
gugauaaaauca

SEQ ID NO: 3711390 - RNA, 13 nt, Human
gugauaaacuuug

SEQ ID NO: 3711391 - RNA, 21 nt, Human
gugauaacuccuaagaggagc

SEQ ID NO: 3711392 - RNA, 19 nt, Human
gugauaagggaaaagauaa

SEQ ID NO: 3711393 - RNA, 20 nt, Human
gugauacccauagcuuccau

SEQ ID NO: 3711394 - RNA, 21 nt, Human
gugauauauaaguguacauau

SEQ ID NO: 3711395 - RNA, 13 nt, Human
gugauauggagca

SEQ ID NO: 3711396 - RNA, 16 nt, Human
gugauauggcagaaga

SEQ ID NO: 3711397 - RNA, 12 nt, Human
gugauauucccc

SEQ ID NO: 3711398 - RNA, 23 nt, Human
gugauauucuuuguuaauuugga

SEQ ID NO: 3711399 - RNA, 20 nt, Human
gugaucaauauuuuuauauc

SEQ ID NO: 3711400 - RNA, 16 nt, Human
gugaucauguguggaa

SEQ ID NO: 3711401 - RNA, 20 nt, Human
gugauccacccaccucagcc

SEQ ID NO: 3711402 - RNA, 24 nt, Human
gugauccacccgccucagccuccc

SEQ ID NO: 3711403 - RNA, 14 nt, Human
gugauccacucgcc

SEQ ID NO: 3711404 - RNA, 16 nt, Human
gugauccauguaacug

SEQ ID NO: 3711405 - RNA, 20 nt, Human
gugauccgcccgccucggcc

SEQ ID NO: 3711406 - RNA, 21 nt, Human
gugauccucucaccucagccu

SEQ ID NO: 3711407 - RNA, 14 nt, Human
gugauccuuuuaug

SEQ ID NO: 3711408 - RNA, 12 nt, Human
gugaucuccaua

SEQ ID NO: 3711409 - RNA, 13 nt, Human
gugaucuccauau

SEQ ID NO: 3711410 - RNA, 12 nt, Human
gugaucugggaa

SEQ ID NO: 3711411 - RNA, 22 nt, Human
gugaucuuggcuuacugcagcc

SEQ ID NO: 3711412 - RNA, 22 nt, Human
gugaugaagaaaagugggccag

SEQ ID NO: 3711413 - RNA, 12 nt, Human
gugaugagcuga

SEQ ID NO: 3711414 - RNA, 16 nt, Human
gugaugagggcagcag

SEQ ID NO: 3711415 - RNA, 18 nt, Human
gugaugagggcagcagcc

SEQ ID NO: 3711416 - RNA, 19 nt, Human
gugaugagggcagcagcca

SEQ ID NO: 3711417 - RNA, 22 nt, Human
gugaugagggcagcagccagcc

SEQ ID NO: 3711418 - RNA, 23 nt, Human
gugaugccagguucuauuuggaa

SEQ ID NO: 3711419 - RNA, 16 nt, Human
gugaugcccugcccuu

SEQ ID NO: 3711420 - RNA, 13 nt, Human
gugaugccucccu

SEQ ID NO: 3711421 - RNA, 12 nt, Human
gugaugcggcag

SEQ ID NO: 3711422 - RNA, 15 nt, Human
gugaugcugggcugg

SEQ ID NO: 3711423 - RNA, 23 nt, Human
gugauggagugcuguuuuguuau

SEQ ID NO: 3711424 - RNA, 16 nt, Human
gugaugguuccccugu

SEQ ID NO: 3711425 - RNA, 19 nt, Human
gugauguauauuccuuuga

SEQ ID NO: 3711426 - RNA, 19 nt, Human
gugauguauguguaauaaa

SEQ ID NO: 3711427 - RNA, 19 nt, Human
gugaugucauacagagaag

SEQ ID NO: 3711428 - RNA, 15 nt, Human
gugauguccuguaaa

SEQ ID NO: 3711429 - RNA, 21 nt, Human
gugauguccuguaaacacuca

SEQ ID NO: 3711430 - RNA, 15 nt, Human
gugaugugaagccaa

SEQ ID NO: 3711431 - RNA, 12 nt, Human
gugauguucuaa

SEQ ID NO: 3711432 - RNA, 18 nt, Human
gugauguucuaaggcucu

SEQ ID NO: 3711433 - RNA, 22 nt, Human
gugauguuuaacaggaagaucu

SEQ ID NO: 3711434 - RNA, 14 nt, Human
ugccucugugcugu

SEQ ID NO: 3711435 - RNA, 16 nt, Human
ugccucugugcugugu

SEQ ID NO: 3711436 - RNA, 17 nt, Human
ugccucugugcugugug

SEQ ID NO: 3711437 - RNA, 15 nt, Human
ugccucuuagacuuc

SEQ ID NO: 3711438 - RNA, 21 nt, Human
ugccucuuccagucuuccuga

SEQ ID NO: 3711439 - RNA, 13 nt, Human
ugccucuucuggg

SEQ ID NO: 3711440 - RNA, 16 nt, Human
ugccucuucugugggu

SEQ ID NO: 3711441 - RNA, 17 nt, Human
ugccugaacauccuucc

SEQ ID NO: 3711442 - RNA, 16 nt, Human
ugccugaaccuuccau

SEQ ID NO: 3711443 - RNA, 17 nt, Human
ugccugaagucacacag

SEQ ID NO: 3711444 - RNA, 15 nt, Human
ugccugaauauuugu

SEQ ID NO: 3711445 - RNA, 19 nt, Human
ugccugacagagggaugga

SEQ ID NO: 3711446 - RNA, 18 nt, Human
ugccugacauuuggagug

SEQ ID NO: 3711447 - RNA, 21 nt, Human
ugccugacugcccagcauuug

SEQ ID NO: 3711448 - RNA, 16 nt, Human
ugccugagaggcaggc

SEQ ID NO: 3711449 - RNA, 17 nt, Human
ugccugagaggcaggca

SEQ ID NO: 3711450 - RNA, 11 nt, Human
ugccugagcuu

SEQ ID NO: 3711451 - RNA, 16 nt, Human
ugccugagggccccuc

SEQ ID NO: 3711452 - RNA, 19 nt, Human
ugccugagggccccucugc

SEQ ID NO: 3711453 - RNA, 20 nt, Human
ugccugagggccccucugcc

SEQ ID NO: 3711454 - RNA, 22 nt, Human
ugccugagggccccucugccca

SEQ ID NO: 3711455 - RNA, 23 nt, Human
ugccugagggccccucugcccag

SEQ ID NO: 3711456 - RNA, 16 nt, Human
ugccugaggggcagcc

SEQ ID NO: 3711457 - RNA, 11 nt, Human
ugccugagggu

SEQ ID NO: 3711458 - RNA, 16 nt, Human
ugccugaggucuguac

SEQ ID NO: 3711459 - RNA, 24 nt, Human
ugccugagucgugaccugcuaggc

SEQ ID NO: 3711460 - RNA, 16 nt, Human
ugccugagugccuggc

SEQ ID NO: 3711461 - RNA, 15 nt, Human
ugccugauauaaaug

SEQ ID NO: 3711462 - RNA, 22 nt, Human
ugccugauauuucccuccccug

SEQ ID NO: 3711463 - RNA, 19 nt, Human
ugccugcacaaacucacca

SEQ ID NO: 3711464 - RNA, 17 nt, Human
ugccugcaccaggagac

SEQ ID NO: 3711465 - RNA, 18 nt, Human
ugccugcaccaggagaca

SEQ ID NO: 3711466 - RNA, 14 nt, Human
ugccugcagagaga

SEQ ID NO: 3711467 - RNA, 21 nt, Human
ugccugcagaggucugugcug

SEQ ID NO: 3711468 - RNA, 11 nt, Human
ugccugcagcc

SEQ ID NO: 3711469 - RNA, 23 nt, Human
ugccugcagggccauggcucagg

SEQ ID NO: 3711470 - RNA, 23 nt, Human
ugccugcauaggaguuuggagga

SEQ ID NO: 3711471 - RNA, 21 nt, Human
ugccugccauguaccuccccu

SEQ ID NO: 3711472 - RNA, 14 nt, Human
ugccugcccacccg

SEQ ID NO: 3711473 - RNA, 13 nt, Human
ugccugcccaggc

SEQ ID NO: 3711474 - RNA, 14 nt, Human
ugccugcccaggcc

SEQ ID NO: 3711475 - RNA, 17 nt, Human
ugccugcccaggccccu

SEQ ID NO: 3711476 - RNA, 22 nt, Human
ugccugcccaggccccugccac

SEQ ID NO: 3711477 - RNA, 24 nt, Human
ugccugcccaggccccugccaccc

SEQ ID NO: 3711478 - RNA, 19 nt, Human
ugccugcccgcacagcagc

SEQ ID NO: 3711479 - RNA, 15 nt, Human
ugccugcccuauucu

SEQ ID NO: 3711480 - RNA, 15 nt, Human
ugccugcccugguga

SEQ ID NO: 3711481 - RNA, 21 nt, Human
ugccugcccuuuguccuccug

SEQ ID NO: 3711482 - RNA, 13 nt, Human
ugccugccugcuc

SEQ ID NO: 3711483 - RNA, 14 nt, Human
ugccugccugucug

SEQ ID NO: 3711484 - RNA, 15 nt, Human
ugccugccugucugu

SEQ ID NO: 3711485 - RNA, 14 nt, Human
ugccugccuuucca

SEQ ID NO: 3711486 - RNA, 15 nt, Human
ugccugccuuuccau

SEQ ID NO: 3711487 - RNA, 22 nt, Human
ugccugccuuuccauccauggc

SEQ ID NO: 3711488 - RNA, 14 nt, Human
ugccugcgcccacc

SEQ ID NO: 3711489 - RNA, 19 nt, Human
ugccugcggaguugugcac

SEQ ID NO: 3711490 - RNA, 17 nt, Human
ugccugcggucaaggcc

SEQ ID NO: 3711491 - RNA, 19 nt, Human
ugccugcggucaaggccag

SEQ ID NO: 3711492 - RNA, 23 nt, Human
ugccugcucuuuggccugaugac

SEQ ID NO: 3711493 - RNA, 23 nt, Human
ugccugcuuuucacugcugcaag

SEQ ID NO: 3711494 - RNA, 15 nt, Human
ugccugcuuuuugga

SEQ ID NO: 3711495 - RNA, 17 nt, Human
ugccugcuuuuuggaaa

SEQ ID NO: 3711496 - RNA, 22 nt, Human
ugccugcuuuuuggaaagucag

SEQ ID NO: 3711497 - RNA, 15 nt, Human
ugccuggacaaaccc

SEQ ID NO: 3711498 - RNA, 20 nt, Human
ugccuggagacuuagggcac

SEQ ID NO: 3711499 - RNA, 11 nt, Human
ugccuggagga

SEQ ID NO: 3711500 - RNA, 19 nt, Human
ugccuggaggaccugagcc

SEQ ID NO: 3711501 - RNA, 22 nt, Human
ugccuggaggaccugagccugc

SEQ ID NO: 3711502 - RNA, 21 nt, Human
ugccuggagugcccacccugg

SEQ ID NO: 3711503 - RNA, 15 nt, Human
ugccuggauggggcu

SEQ ID NO: 3711504 - RNA, 17 nt, Human
ugccuggauggggcugc

SEQ ID NO: 3711505 - RNA, 15 nt, Human
ugccuggcaggcugu

SEQ ID NO: 3711506 - RNA, 23 nt, Human
ugccuggccacugcucccuaagc

SEQ ID NO: 3711507 - RNA, 11 nt, Human
ugccuggcccc

SEQ ID NO: 3711508 - RNA, 19 nt, Human
ugccuggcccccuguccuc

SEQ ID NO: 3711509 - RNA, 18 nt, Human
ugccuggccggccagcca

SEQ ID NO: 3711510 - RNA, 23 nt, Human
ugccuggccggccagccagccac

SEQ ID NO: 3711511 - RNA, 22 nt, Human
ugccuggccuuguccucagcca

SEQ ID NO: 3711512 - RNA, 15 nt, Human
ugccuggcucagagc

SEQ ID NO: 3711513 - RNA, 16 nt, Human
ugccuggcucagagcc

SEQ ID NO: 3711514 - RNA, 18 nt, Human
ugccugggaaccuuccug

SEQ ID NO: 3711515 - RNA, 14 nt, Human
ugccugggaaugua

SEQ ID NO: 3711516 - RNA, 15 nt, Human
ugccugggaauguau

SEQ ID NO: 3711517 - RNA, 16 nt, Human
ugccugggaauguauu

SEQ ID NO: 3711518 - RNA, 22 nt, Human
ugccugggaguuuuguauucau

SEQ ID NO: 3711519 - RNA, 21 nt, Human
ugccugggaucccucauccuc

SEQ ID NO: 3711520 - RNA, 18 nt, Human
ugccugggcagaaggaag

SEQ ID NO: 3711521 - RNA, 16 nt, Human
ugccugggcuguuggc

SEQ ID NO: 3711522 - RNA, 19 nt, Human
ugccugggguguuaguggc

SEQ ID NO: 3711523 - RNA, 16 nt, Human
ugccuggguggggcug

SEQ ID NO: 3711524 - RNA, 17 nt, Human
ugccuggguggggcugc

SEQ ID NO: 3711525 - RNA, 21 nt, Human
ugccuggguggggcugcuccu

SEQ ID NO: 3711526 - RNA, 22 nt, Human
ugccuggguggggcugcuccuc

SEQ ID NO: 3711527 - RNA, 24 nt, Human
ugccuggguggggcugcuccucca

SEQ ID NO: 3711528 - RNA, 22 nt, Human
ugccuggguuccaauccuggcu

SEQ ID NO: 3711529 - RNA, 14 nt, Human
ugccugguacagua

SEQ ID NO: 3711530 - RNA, 18 nt, Human
ugccuggucuccugcccc

SEQ ID NO: 3711531 - RNA, 21 nt, Human
ugccuggucuccugcccccac

SEQ ID NO: 3711532 - RNA, 18 nt, Human
ugccuggugaauggccuu

SEQ ID NO: 3711533 - RNA, 16 nt, Human
ugccugguggcagcug

SEQ ID NO: 3711534 - RNA, 14 nt, Human
ugccugguuuugau

SEQ ID NO: 3711535 - RNA, 22 nt, Human
ugccuguacucgcuugugcaga

SEQ ID NO: 3711536 - RNA, 15 nt, Human
ugccuguagcaguga

SEQ ID NO: 3711537 - RNA, 18 nt, Human
ugccuguagcccacucug

SEQ ID NO: 3711538 - RNA, 20 nt, Human
ugccuguagcccacucugcu

SEQ ID NO: 3711539 - RNA, 15 nt, Human
ugccuguaguuagga

SEQ ID NO: 3711540 - RNA, 18 nt, Human
ugccuguaguuaggaaau

SEQ ID NO: 3711541 - RNA, 19 nt, Human
ugccuguaguuaggaaaua

SEQ ID NO: 3711542 - RNA, 20 nt, Human
ugccuguaguuaggaaauaa

SEQ ID NO: 3711543 - RNA, 21 nt, Human
ugccuguaguuaggaaauaaa

SEQ ID NO: 3711544 - RNA, 22 nt, Human
ugccugucuccuuugcaggcuc

SEQ ID NO: 3711545 - RNA, 23 nt, Human
ugccugucuccuuugcaggcuca

SEQ ID NO: 3711546 - RNA, 14 nt, Human
ugccugucugaagc

SEQ ID NO: 3711547 - RNA, 15 nt, Human
ugccugucugcccca

SEQ ID NO: 3711548 - RNA, 18 nt, Human
ugccugucugucucucca

SEQ ID NO: 3711549 - RNA, 21 nt, Human
ugccugucugucucuccaucu

SEQ ID NO: 3711550 - RNA, 14 nt, Human
ugccugugaacuga

SEQ ID NO: 3711551 - RNA, 18 nt, Human
ugccugugaacugaacuc

SEQ ID NO: 3711552 - RNA, 14 nt, Human
ugccugugccaccc

SEQ ID NO: 3711553 - RNA, 16 nt, Human
ugccugugccacccac

SEQ ID NO: 3711554 - RNA, 12 nt, Human
ugccugugccug

SEQ ID NO: 3711555 - RNA, 22 nt, Human
ugccuguggaagagugugugug

SEQ ID NO: 3711556 - RNA, 18 nt, Human
ugccuguuauaacucugc

SEQ ID NO: 3711557 - RNA, 16 nt, Human
ugccuguucagcucca

SEQ ID NO: 3711558 - RNA, 17 nt, Human
ugccuguucagcuccag

SEQ ID NO: 3711559 - RNA, 12 nt, Human
ugccuguucagu

SEQ ID NO: 3711560 - RNA, 13 nt, Human
ugccuguucaguu

SEQ ID NO: 3711561 - RNA, 21 nt, Human
ugccuguucaguuacagaaag

SEQ ID NO: 3711562 - RNA, 14 nt, Human
ugccuguucccauu

SEQ ID NO: 3711563 - RNA, 17 nt, Human
ugccuguugggccagga

SEQ ID NO: 3711564 - RNA, 14 nt, Human
ugccuguuucccag

SEQ ID NO: 3711565 - RNA, 15 nt, Human
ugccuuaaaaccaaa

SEQ ID NO: 3711566 - RNA, 18 nt, Human
ugccuuaaaaccaaagag

SEQ ID NO: 3711567 - RNA, 15 nt, Human
ugccuuaccuccugc

SEQ ID NO: 3711568 - RNA, 19 nt, Human
ugccuuaccuccugcccag

SEQ ID NO: 3711569 - RNA, 15 nt, Human
ugccuuacucuucuu

SEQ ID NO: 3711570 - RNA, 17 nt, Human
ugccuuacuuuguauga

SEQ ID NO: 3711571 - RNA, 19 nt, Human
ugccuuacuuuguaugaua

SEQ ID NO: 3711572 - RNA, 18 nt, Human
ugccuuagagccaggcac

SEQ ID NO: 3711573 - RNA, 19 nt, Human
ugccuuagagccaggcaca

SEQ ID NO: 3711574 - RNA, 23 nt, Human
ugccuuagagccaggcacacacu

SEQ ID NO: 3711575 - RNA, 19 nt, Human
ugccuuagaggagcccacg

SEQ ID NO: 3711576 - RNA, 14 nt, Human
ugccuuagcuucag

SEQ ID NO: 3711577 - RNA, 20 nt, Human
ugccuuagucucaguuugug

SEQ ID NO: 3711578 - RNA, 21 nt, Human
ugccuuauggaacacucugag

SEQ ID NO: 3711579 - RNA, 17 nt, Human
ugccuuauguugaaaaa

SEQ ID NO: 3711580 - RNA, 18 nt, Human
ugccuuauucagggaagg

SEQ ID NO: 3711581 - RNA, 12 nt, Human
ugccuucaagaa

SEQ ID NO: 3711582 - RNA, 14 nt, Human
ugccuucaauaaau

SEQ ID NO: 3711583 - RNA, 15 nt, Human
ugccuuccagaaaac

SEQ ID NO: 3711584 - RNA, 18 nt, Human
ugccuuccagcacccugc

SEQ ID NO: 3711585 - RNA, 21 nt, Human
ugccuuccauaauuaugacag

SEQ ID NO: 3711586 - RNA, 20 nt, Human
ugccuuccaugucggccucu

SEQ ID NO: 3711587 - RNA, 15 nt, Human
ugccuuccccugggc

SEQ ID NO: 3711588 - RNA, 20 nt, Human
ugccuuccccugggcccuga

SEQ ID NO: 3711589 - RNA, 16 nt, Human
ugccuucccuagcuuu

SEQ ID NO: 3711590 - RNA, 17 nt, Human
ugccuucccuagcuuua

SEQ ID NO: 3711591 - RNA, 17 nt, Human
ugccuuccuccugggcc

SEQ ID NO: 3711592 - RNA, 20 nt, Human
ugccuuccuccugggcccuc

SEQ ID NO: 3711593 - RNA, 19 nt, Human
ugccuuccuguuuuucaca

SEQ ID NO: 3711594 - RNA, 16 nt, Human
ugccuucgcuucuugc

SEQ ID NO: 3711595 - RNA, 20 nt, Human
ugccuucgcuucuugccucu

SEQ ID NO: 3711596 - RNA, 21 nt, Human
ugccuucgcuucuugccucug

SEQ ID NO: 3711597 - RNA, 22 nt, Human
ugccuucgcuucuugccucugu

SEQ ID NO: 3711598 - RNA, 18 nt, Human
ugccuucgguacccacca

SEQ ID NO: 3711599 - RNA, 15 nt, Human
ugccuucucaacucc

SEQ ID NO: 3711600 - RNA, 22 nt, Human
ugccuucucaacuccaaacuga

SEQ ID NO: 3711601 - RNA, 16 nt, Human
ugccuucucaccagcu

SEQ ID NO: 3711602 - RNA, 18 nt, Human
ugccuucucaccagcugc

SEQ ID NO: 3711603 - RNA, 13 nt, Human
ugccuucucucuc

SEQ ID NO: 3711604 - RNA, 18 nt, Human
ugccuucugacggcccug

SEQ ID NO: 3711605 - RNA, 18 nt, Human
ugccuucuguccuggugu

SEQ ID NO: 3711606 - RNA, 20 nt, Human
ugccuucuguccugguguca

SEQ ID NO: 3711607 - RNA, 22 nt, Human
ugccuucuguggggacuccggc

SEQ ID NO: 3711608 - RNA, 17 nt, Human
ugccuucuucagggccu

SEQ ID NO: 3711609 - RNA, 19 nt, Human
ugccuucuucagggccugg

SEQ ID NO: 3711610 - RNA, 12 nt, Human
ugccuucuucuu

SEQ ID NO: 3711611 - RNA, 21 nt, Human
ugccuucuucuuuuugcuguu

SEQ ID NO: 3711612 - RNA, 14 nt, Human
ugccuucuuuugua

SEQ ID NO: 3711613 - RNA, 23 nt, Human
ugccuugaaccugugaguaaaua

SEQ ID NO: 3711614 - RNA, 14 nt, Human
ugccuugaagccac

SEQ ID NO: 3711615 - RNA, 15 nt, Human
ugccuugaagccacu

SEQ ID NO: 3711616 - RNA, 14 nt, Human
ugccuugacaaacu

SEQ ID NO: 3711617 - RNA, 14 nt, Human
ugccuugagguacu

SEQ ID NO: 3711618 - RNA, 20 nt, Human
ugccuugcauaauggucaga

SEQ ID NO: 3711619 - RNA, 19 nt, Human
ugccuugcccacuccugcu

SEQ ID NO: 3711620 - RNA, 13 nt, Human
ugccuugccuuua

SEQ ID NO: 3711621 - RNA, 13 nt, Human
ugccuuggcucag

SEQ ID NO: 3711622 - RNA, 16 nt, Human
ugccuugggcugcucc

SEQ ID NO: 3711623 - RNA, 18 nt, Human
ugccuuggggaauuuccu

SEQ ID NO: 3711624 - RNA, 16 nt, Human
ugccuuggugugcugu

SEQ ID NO: 3711625 - RNA, 17 nt, Human
ugccuugucacgccaga

SEQ ID NO: 3711626 - RNA, 19 nt, Human
ugccuugugaaggaauuau

SEQ ID NO: 3711627 - RNA, 15 nt, Human
ugccuuuaaaucugu

SEQ ID NO: 3711628 - RNA, 11 nt, Human
ugccuuuagaa

SEQ ID NO: 3711629 - RNA, 20 nt, Human
ugccuuuagccccucccaag

SEQ ID NO: 3711630 - RNA, 20 nt, Human
ugccuuuauuguguuuguca

SEQ ID NO: 3711631 - RNA, 20 nt, Human
ugccuuuccauccauggcca

SEQ ID NO: 3711632 - RNA, 22 nt, Human
ugccuuuccauccauggccagc

SEQ ID NO: 3711633 - RNA, 16 nt, Human
ugccuuucgaggccug

SEQ ID NO: 3711634 - RNA, 17 nt, Human
ugccuuucgaggccuga

SEQ ID NO: 3711635 - RNA, 13 nt, Human
ugccuuucuaguc

SEQ ID NO: 3711636 - RNA, 20 nt, Human
ugccuuucucgauuuuaucu

SEQ ID NO: 3711637 - RNA, 12 nt, Human
ugccuuugaaga

SEQ ID NO: 3711638 - RNA, 18 nt, Human
ugccuuugaagagugaaa

SEQ ID NO: 3711639 - RNA, 18 nt, Human
ugccuuugagacaguuuc

SEQ ID NO: 3711640 - RNA, 19 nt, Human
ugccuuugagacaguuucu

SEQ ID NO: 3711641 - RNA, 23 nt, Human
ugccuuugagacaguuucuuagc

SEQ ID NO: 3711642 - RNA, 18 nt, Human
ugccuuugaguuuccuca

SEQ ID NO: 3711643 - RNA, 19 nt, Human
ugccuuugcaccacgggac

SEQ ID NO: 3711644 - RNA, 18 nt, Human
ugccuuugcagaaacaga

SEQ ID NO: 3711645 - RNA, 18 nt, Human
ugccuuugcagcucagaa

SEQ ID NO: 3711646 - RNA, 12 nt, Human
ugccuuugggag

SEQ ID NO: 3711647 - RNA, 15 nt, Human
ugccuuuguuuugau

SEQ ID NO: 3711648 - RNA, 18 nt, Human
ugccuuuuaguuccugug

SEQ ID NO: 3711649 - RNA, 17 nt, Human
ugccuuuuauagcuauu

SEQ ID NO: 3711650 - RNA, 22 nt, Human
ugccuuuuauagcuauuacugu

SEQ ID NO: 3711651 - RNA, 15 nt, Human
ugccuuuucuagccc

SEQ ID NO: 3711652 - RNA, 14 nt, Human
ugccuuuugcaccc

SEQ ID NO: 3711653 - RNA, 18 nt, Human
ugccuuuugcaccccucc

SEQ ID NO: 3711654 - RNA, 19 nt, Human
ugccuuuugcaccccuccc

SEQ ID NO: 3711655 - RNA, 22 nt, Human
ugccuuuugcaccccucccauu

SEQ ID NO: 3711656 - RNA, 16 nt, Human
ugccuuuugcagaaga

SEQ ID NO: 3711657 - RNA, 19 nt, Human
ugccuuuugcagaagaggg

SEQ ID NO: 3711658 - RNA, 19 nt, Human
ugccuuuuuauuuauaugu

SEQ ID NO: 3711659 - RNA, 14 nt, Human
ugccuuuuucauua

SEQ ID NO: 3711660 - RNA, 19 nt, Human
ugccuuuuucauuuuccaa

SEQ ID NO: 3711661 - RNA, 13 nt, Human
ugccuuuuuccua

SEQ ID NO: 3711662 - RNA, 20 nt, Human
ugcgaagacccucuugccca

SEQ ID NO: 3711663 - RNA, 21 nt, Human
ugcgaaggggcccugguccuu

SEQ ID NO: 3711664 - RNA, 18 nt, Human
ugcgaccccaucugccca

SEQ ID NO: 3711665 - RNA, 14 nt, Human
ugcgacccuggggg

SEQ ID NO: 3711666 - RNA, 15 nt, Human
ugcgacgcuugcucu

SEQ ID NO: 3711667 - RNA, 16 nt, Human
ugcgacuuucugccug

SEQ ID NO: 3711668 - RNA, 21 nt, Human
ugcgacuuucugccuggagug

SEQ ID NO: 3711669 - RNA, 15 nt, Human
ugcgagagaugugug

SEQ ID NO: 3711670 - RNA, 16 nt, Human
ugcgagagaugugugu

SEQ ID NO: 3711671 - RNA, 23 nt, Human
ugcgagagauguguguugauacu

SEQ ID NO: 3711672 - RNA, 15 nt, Human
ugcgaguauguguuu

SEQ ID NO: 3711673 - RNA, 13 nt, Human
ugcgagugugugc

SEQ ID NO: 3711674 - RNA, 16 nt, Human
ugcgauagagucucac

SEQ ID NO: 3711675 - RNA, 14 nt, Human
ugcgaucuggguuc

SEQ ID NO: 3711676 - RNA, 22 nt, Human
ugcgauggcgugggcugcguga

SEQ ID NO: 3711677 - RNA, 12 nt, Human
ugcgauucugga

SEQ ID NO: 3711678 - RNA, 21 nt, Human
ugcgauucuggauaaagccac

SEQ ID NO: 3711679 - RNA, 17 nt, Human
uggcuaugcauuugaaa

SEQ ID NO: 3711680 - RNA, 19 nt, Human
uggcuaugcauuugaaaau

SEQ ID NO: 3711681 - RNA, 12 nt, Human
uggcuauuuuau

SEQ ID NO: 3711682 - RNA, 18 nt, Human
uggcucaaguccucuuuu

SEQ ID NO: 3711683 - RNA, 14 nt, Human
uggcucacacugag

SEQ ID NO: 3711684 - RNA, 15 nt, Human
uggcucacacugaga

SEQ ID NO: 3711685 - RNA, 16 nt, Human
uggcucacacugagaa

SEQ ID NO: 3711686 - RNA, 13 nt, Human
uggcucacccagu

SEQ ID NO: 3711687 - RNA, 19 nt, Human
uggcucacgccuguaaucc

SEQ ID NO: 3711688 - RNA, 13 nt, Human
uggcucacugcag

SEQ ID NO: 3711689 - RNA, 17 nt, Human
uggcucacugcagccuc

SEQ ID NO: 3711690 - RNA, 13 nt, Human
uggcucagagggg

SEQ ID NO: 3711691 - RNA, 12 nt, Human
uggcucagccag

SEQ ID NO: 3711692 - RNA, 22 nt, Human
uggcucagcucggggagccuua

SEQ ID NO: 3711693 - RNA, 22 nt, Human
uggcucagguggggucacucug

SEQ ID NO: 3711694 - RNA, 22 nt, Human
uggcucauauuccugcagccug

SEQ ID NO: 3711695 - RNA, 17 nt, Human
uggcuccacacacacaa

SEQ ID NO: 3711696 - RNA, 20 nt, Human
uggcuccagaugcagggcag

SEQ ID NO: 3711697 - RNA, 21 nt, Human
uggcuccagaugcagggcagu

SEQ ID NO: 3711698 - RNA, 23 nt, Human
uggcuccagaugcagggcaguca

SEQ ID NO: 3711699 - RNA, 13 nt, Human
uggcuccagcacc

SEQ ID NO: 3711700 - RNA, 21 nt, Human
uggcuccagcaccauccgcca

SEQ ID NO: 3711701 - RNA, 17 nt, Human
uggcuccagcuggccgg

SEQ ID NO: 3711702 - RNA, 15 nt, Human
uggcuccaggccagg

SEQ ID NO: 3711703 - RNA, 15 nt, Human
uggcuccaugcuccu

SEQ ID NO: 3711704 - RNA, 14 nt, Human
uggcucccacaggc

SEQ ID NO: 3711705 - RNA, 18 nt, Human
uggcucccacaggcagcu

SEQ ID NO: 3711706 - RNA, 19 nt, Human
uggcucccaggggcucccu

SEQ ID NO: 3711707 - RNA, 21 nt, Human
uggcucccaggggcucccucc

SEQ ID NO: 3711708 - RNA, 23 nt, Human
uggcucccaugaccauacugagg

SEQ ID NO: 3711709 - RNA, 17 nt, Human
uggcucccauucacucu

SEQ ID NO: 3711710 - RNA, 15 nt, Human
uggcuccccaaaggg

SEQ ID NO: 3711711 - RNA, 13 nt, Human
uggcuccccucua

SEQ ID NO: 3711712 - RNA, 14 nt, Human
uggcuccccucuau

SEQ ID NO: 3711713 - RNA, 21 nt, Human
uggcuccccucuauuuagcau

SEQ ID NO: 3711714 - RNA, 23 nt, Human
uggcuccccucuauuuagcauga

SEQ ID NO: 3711715 - RNA, 13 nt, Human
uggcuccccugca

SEQ ID NO: 3711716 - RNA, 12 nt, Human
uggcuccccugg

SEQ ID NO: 3711717 - RNA, 13 nt, Human
uggcuccccuggg

SEQ ID NO: 3711718 - RNA, 15 nt, Human
uggcucccuccucca

SEQ ID NO: 3711719 - RNA, 19 nt, Human
uggcucccuccuccaggcc

SEQ ID NO: 3711720 - RNA, 20 nt, Human
uggcucccuccuccaggccu

SEQ ID NO: 3711721 - RNA, 17 nt, Human
uggcucccucuucuuuc

SEQ ID NO: 3711722 - RNA, 19 nt, Human
uggcuccggccucugccuu

SEQ ID NO: 3711723 - RNA, 16 nt, Human
uggcuccuaucugugu

SEQ ID NO: 3711724 - RNA, 16 nt, Human
uggcuccucccggugc

SEQ ID NO: 3711725 - RNA, 22 nt, Human
uggcuccucuguggugucugcc

SEQ ID NO: 3711726 - RNA, 14 nt, Human
uggcuccugagggg

SEQ ID NO: 3711727 - RNA, 15 nt, Human
uggcuccuuuacaaa

SEQ ID NO: 3711728 - RNA, 20 nt, Human
uggcucgaaucucugugccu

SEQ ID NO: 3711729 - RNA, 19 nt, Human
uggcucuaauucacagugc

SEQ ID NO: 3711730 - RNA, 16 nt, Human
uggcucucagaaggua

SEQ ID NO: 3711731 - RNA, 21 nt, Human
uggcucucaguuaaaauguga

SEQ ID NO: 3711732 - RNA, 13 nt, Human
uggcucuccaagu

SEQ ID NO: 3711733 - RNA, 15 nt, Human
uggcucuccaagugc

SEQ ID NO: 3711734 - RNA, 20 nt, Human
uggcucuccaagugccagag

SEQ ID NO: 3711735 - RNA, 23 nt, Human
uggcucuccaagugccagaggug

SEQ ID NO: 3711736 - RNA, 19 nt, Human
uggcucugaccgaaacagc

SEQ ID NO: 3711737 - RNA, 14 nt, Human
uggcucugcaaugg

SEQ ID NO: 3711738 - RNA, 19 nt, Human
uggcucugccaguccuguc

SEQ ID NO: 3711739 - RNA, 12 nt, Human
uggcucugcugg

SEQ ID NO: 3711740 - RNA, 19 nt, Human
uggcucugcuguccccuug

SEQ ID NO: 3711741 - RNA, 17 nt, Human
uggcucuggaaugacau

SEQ ID NO: 3711742 - RNA, 15 nt, Human
uggcucuggacucua

SEQ ID NO: 3711743 - RNA, 22 nt, Human
uggcucuggagacagccccaga

SEQ ID NO: 3711744 - RNA, 15 nt, Human
uggcucugggauccu

SEQ ID NO: 3711745 - RNA, 15 nt, Human
uggcucuuccaggcu

SEQ ID NO: 3711746 - RNA, 20 nt, Human
uggcugaaauucuccuggag

SEQ ID NO: 3711747 - RNA, 13 nt, Human
uggcugaacucau

SEQ ID NO: 3711748 - RNA, 12 nt, Human
uggcugaaggac

SEQ ID NO: 3711749 - RNA, 13 nt, Human
uggcugaaggacu

SEQ ID NO: 3711750 - RNA, 15 nt, Human
uggcugaaggacugu

SEQ ID NO: 3711751 - RNA, 16 nt, Human
uggcugaaggacugug

SEQ ID NO: 3711752 - RNA, 16 nt, Human
uggcugacccaguccc

SEQ ID NO: 3711753 - RNA, 17 nt, Human
uggcugacccagucccu

SEQ ID NO: 3711754 - RNA, 19 nt, Human
uggcugacccagucccugg

SEQ ID NO: 3711755 - RNA, 21 nt, Human
uggcugacccagucccugggg

SEQ ID NO: 3711756 - RNA, 21 nt, Human
uggcugaccccaaagagccug

SEQ ID NO: 3711757 - RNA, 15 nt, Human
uggcugaccccccuc

SEQ ID NO: 3711758 - RNA, 16 nt, Human
uggcugaccccccuca

SEQ ID NO: 3711759 - RNA, 15 nt, Human
uggcugacuaaauuu

SEQ ID NO: 3711760 - RNA, 20 nt, Human
uggcugacuaaauuugggga

SEQ ID NO: 3711761 - RNA, 22 nt, Human
uggcugacuaaauuuggggaca

SEQ ID NO: 3711762 - RNA, 13 nt, Human
uggcugagccccu

SEQ ID NO: 3711763 - RNA, 17 nt, Human
uggcugagccccugucu

SEQ ID NO: 3711764 - RNA, 19 nt, Human
uggcugagcggaugcaucu

SEQ ID NO: 3711765 - RNA, 13 nt, Human
uggcugagggcag

SEQ ID NO: 3711766 - RNA, 15 nt, Human
uggcugagggcagcu

SEQ ID NO: 3711767 - RNA, 23 nt, Human
uggcugagggcagcugcgcgggc

SEQ ID NO: 3711768 - RNA, 23 nt, Human
uggcugagggcaguucgcagcca

SEQ ID NO: 3711769 - RNA, 18 nt, Human
uggcugagguuccucugc

SEQ ID NO: 3711770 - RNA, 20 nt, Human
uggcugagguuccucugccu

SEQ ID NO: 3711771 - RNA, 23 nt, Human
uggcugagguuccucugccugcc

SEQ ID NO: 3711772 - RNA, 12 nt, Human
uggcugcaaagg

SEQ ID NO: 3711773 - RNA, 22 nt, Human
uggcugcagagcagugggccug

SEQ ID NO: 3711774 - RNA, 14 nt, Human
uggcugcaggaauc

SEQ ID NO: 3711775 - RNA, 16 nt, Human
uggcugcaggaaucuu

SEQ ID NO: 3711776 - RNA, 19 nt, Human
uggcugcaggaaucuuuaa

SEQ ID NO: 3711777 - RNA, 20 nt, Human
uggcugcaucccccccaccu

SEQ ID NO: 3711778 - RNA, 12 nt, Human
uggcugcaugcg

SEQ ID NO: 3711779 - RNA, 20 nt, Human
uggcugccaaugggagcuca

SEQ ID NO: 3711780 - RNA, 14 nt, Human
uggcugccagcuau

SEQ ID NO: 3711781 - RNA, 20 nt, Human
uggcugcccagaccccucug

SEQ ID NO: 3711782 - RNA, 13 nt, Human
uggcugcccuggc

SEQ ID NO: 3711783 - RNA, 14 nt, Human
uggcugcccuggcc

SEQ ID NO: 3711784 - RNA, 16 nt, Human
uggcugcccuggcccu

SEQ ID NO: 3711785 - RNA, 14 nt, Human
uggcugccuggagc

SEQ ID NO: 3711786 - RNA, 16 nt, Human
uggcugcggcacccuu

SEQ ID NO: 3711787 - RNA, 17 nt, Human
uggcugcggcacccuug

SEQ ID NO: 3711788 - RNA, 13 nt, Human
uggcugcuagcac

SEQ ID NO: 3711789 - RNA, 14 nt, Human
uggcugcuagcacu

SEQ ID NO: 3711790 - RNA, 12 nt, Human
uggcugcugaag

SEQ ID NO: 3711791 - RNA, 21 nt, Human
uggcugcugaagcugccugcu

SEQ ID NO: 3711792 - RNA, 22 nt, Human
uggcugcugaagcugccugcuu

SEQ ID NO: 3711793 - RNA, 20 nt, Human
uggcugcugaucgccuuccc

SEQ ID NO: 3711794 - RNA, 11 nt, Human
uggcugcugcc

SEQ ID NO: 3711795 - RNA, 12 nt, Human
uggcugcugccc

SEQ ID NO: 3711796 - RNA, 15 nt, Human
uggcugcugccccca

SEQ ID NO: 3711797 - RNA, 20 nt, Human
uggcugcugcccccaccccg

SEQ ID NO: 3711798 - RNA, 19 nt, Human
uggcuggaagauccugcgg

SEQ ID NO: 3711799 - RNA, 13 nt, Human
uggcuggaagggg

SEQ ID NO: 3711800 - RNA, 14 nt, Human
uggcuggacccagc

SEQ ID NO: 3711801 - RNA, 23 nt, Human
uggcuggccuugugguccaaaua

SEQ ID NO: 3711802 - RNA, 17 nt, Human
uggcuggcugagggcag

SEQ ID NO: 3711803 - RNA, 18 nt, Human
uggcuggcugagggcagu

SEQ ID NO: 3711804 - RNA, 21 nt, Human
uggcugggaacugcagaccug

SEQ ID NO: 3711805 - RNA, 19 nt, Human
uggcugggacguggcucag

SEQ ID NO: 3711806 - RNA, 12 nt, Human
uggcugggcaug

SEQ ID NO: 3711807 - RNA, 12 nt, Human
uggcugggccca

SEQ ID NO: 3711808 - RNA, 14 nt, Human
uggcuggggcaugg

SEQ ID NO: 3711809 - RNA, 22 nt, Human
uggcuggggccuaucagugugc

SEQ ID NO: 3711810 - RNA, 12 nt, Human
uggcugggggcc

SEQ ID NO: 3711811 - RNA, 21 nt, Human
uggcugggggccucagugcca

SEQ ID NO: 3711812 - RNA, 18 nt, Human
uggcugggguggccugug

SEQ ID NO: 3711813 - RNA, 20 nt, Human
uggcugggguggccugugug

SEQ ID NO: 3711814 - RNA, 22 nt, Human
uggcugguaacaguucauguuu

SEQ ID NO: 3711815 - RNA, 14 nt, Human
uggcuggucaacuu

SEQ ID NO: 3711816 - RNA, 13 nt, Human
uggcugguccagg

SEQ ID NO: 3711817 - RNA, 22 nt, Human
uggcuggugugguacagagaag

SEQ ID NO: 3711818 - RNA, 23 nt, Human
uggcuggugugguacagagaagc

SEQ ID NO: 3711819 - RNA, 19 nt, Human
uggcugguguuaacagaag

SEQ ID NO: 3711820 - RNA, 20 nt, Human
uggcuguaaggcucuagauc

SEQ ID NO: 3711821 - RNA, 17 nt, Human
uggcuguaucuuguuuu

SEQ ID NO: 3711822 - RNA, 14 nt, Human
uggcugucagcagg

SEQ ID NO: 3711823 - RNA, 15 nt, Human
uggcuguccagugcc

SEQ ID NO: 3711824 - RNA, 23 nt, Human
uggcuguccagugcccauuccuc

SEQ ID NO: 3711825 - RNA, 14 nt, Human
uggcugugaacuga

SEQ ID NO: 3711826 - RNA, 16 nt, Human
uggcugugccucugcc

SEQ ID NO: 3711827 - RNA, 21 nt, Human
uggcuguggaauaggaacgcu

SEQ ID NO: 3711828 - RNA, 14 nt, Human
uggcugugucuccc

SEQ ID NO: 3711829 - RNA, 22 nt, Human
uggcuguguucuggugaggccu

SEQ ID NO: 3711830 - RNA, 18 nt, Human
gugcugagucugaaggcu

SEQ ID NO: 3711831 - RNA, 19 nt, Human
gugcugagucugaaggcug

SEQ ID NO: 3711832 - RNA, 15 nt, Human
gugcugauccuugca

SEQ ID NO: 3711833 - RNA, 22 nt, Human
gugcugcagggcuuuaaaauuc

SEQ ID NO: 3711834 - RNA, 12 nt, Human
gugcugccacac

SEQ ID NO: 3711835 - RNA, 19 nt, Human
gugcugccauccagguuca

SEQ ID NO: 3711836 - RNA, 21 nt, Human
gugcugccauuugauuuuucu

SEQ ID NO: 3711837 - RNA, 18 nt, Human
gugcugcccgucuucagc

SEQ ID NO: 3711838 - RNA, 11 nt, Human
gugcugcccug

SEQ ID NO: 3711839 - RNA, 21 nt, Human
gugcugcccugcccaccuggc

SEQ ID NO: 3711840 - RNA, 23 nt, Human
gugcugcccugcccaccuggccu

SEQ ID NO: 3711841 - RNA, 12 nt, Human
gugcugccucua

SEQ ID NO: 3711842 - RNA, 19 nt, Human
gugcugccucuaccugaca

SEQ ID NO: 3711843 - RNA, 17 nt, Human
gugcugcuaauucuuug

SEQ ID NO: 3711844 - RNA, 18 nt, Human
gugcugcuaauucuuugc

SEQ ID NO: 3711845 - RNA, 19 nt, Human
gugcugcuacccucccugc

SEQ ID NO: 3711846 - RNA, 22 nt, Human
gugcugcuacccucccugcugu

SEQ ID NO: 3711847 - RNA, 20 nt, Human
gugcugcugcugcuguggcg

SEQ ID NO: 3711848 - RNA, 13 nt, Human
gugcugcuucccu

SEQ ID NO: 3711849 - RNA, 16 nt, Human
gugcugcuucccucug

SEQ ID NO: 3711850 - RNA, 16 nt, Human
gugcuggagcacuggg

SEQ ID NO: 3711851 - RNA, 22 nt, Human
gugcuggagcacugggcucccg

SEQ ID NO: 3711852 - RNA, 12 nt, Human
gugcuggagcca

SEQ ID NO: 3711853 - RNA, 15 nt, Human
gugcuggagccacua

SEQ ID NO: 3711854 - RNA, 19 nt, Human
gugcuggagccacuaacua

SEQ ID NO: 3711855 - RNA, 14 nt, Human
gugcuggaggacug

SEQ ID NO: 3711856 - RNA, 21 nt, Human
gugcuggauauuuuacuacca

SEQ ID NO: 3711857 - RNA, 19 nt, Human
gugcuggauggagcccagg

SEQ ID NO: 3711858 - RNA, 18 nt, Human
gugcuggcaccaccaggc

SEQ ID NO: 3711859 - RNA, 18 nt, Human
gugcugggacugagccag

SEQ ID NO: 3711860 - RNA, 20 nt, Human
gugcugggacugagccaguc

SEQ ID NO: 3711861 - RNA, 23 nt, Human
gugcugggagcuccacucugcuu

SEQ ID NO: 3711862 - RNA, 17 nt, Human
gugcugggaggagggag

SEQ ID NO: 3711863 - RNA, 18 nt, Human
gugcugggaggagggaga

SEQ ID NO: 3711864 - RNA, 16 nt, Human
gugcugggccccugcc

SEQ ID NO: 3711865 - RNA, 21 nt, Human
gugcugggggaaugagcccag

SEQ ID NO: 3711866 - RNA, 20 nt, Human
gugcuggucccggggccagc

SEQ ID NO: 3711867 - RNA, 19 nt, Human
gugcugguguccugaccac

SEQ ID NO: 3711868 - RNA, 23 nt, Human
gugcugguguccugaccacccuc

SEQ ID NO: 3711869 - RNA, 12 nt, Human
gugcuguaauuu

SEQ ID NO: 3711870 - RNA, 21 nt, Human
gugcuguauaaaaucagccaa

SEQ ID NO: 3711871 - RNA, 15 nt, Human
gugcugugcccaagu

SEQ ID NO: 3711872 - RNA, 11 nt, Human
gugcuguggcc

SEQ ID NO: 3711873 - RNA, 17 nt, Human
gugcuguggccagggug

SEQ ID NO: 3711874 - RNA, 23 nt, Human
gugcuguggccagggugagagcu

SEQ ID NO: 3711875 - RNA, 13 nt, Human
gugcuguguaaag

SEQ ID NO: 3711876 - RNA, 14 nt, Human
gugcuguguaaagu

SEQ ID NO: 3711877 - RNA, 18 nt, Human
gugcuguguaaaguuagu

SEQ ID NO: 3711878 - RNA, 19 nt, Human
gugcuguguuugcuccccu

SEQ ID NO: 3711879 - RNA, 17 nt, Human
gugcuguuacaguuuuc

SEQ ID NO: 3711880 - RNA, 19 nt, Human
gugcuguugucauugcuuu

SEQ ID NO: 3711881 - RNA, 20 nt, Human
gugcuguugucauugcuuua

SEQ ID NO: 3711882 - RNA, 14 nt, Human
gugcuguuguuaug

SEQ ID NO: 3711883 - RNA, 19 nt, Human
gugcuguuguuaugaugug

SEQ ID NO: 3711884 - RNA, 20 nt, Human
gugcuguuguuaugaugugc

SEQ ID NO: 3711885 - RNA, 15 nt, Human
gugcuguuuauuaau

SEQ ID NO: 3711886 - RNA, 14 nt, Human
gugcuuaaguucca

SEQ ID NO: 3711887 - RNA, 15 nt, Human
gugcuucaauuaaua

SEQ ID NO: 3711888 - RNA, 13 nt, Human
gugcuucagccug

SEQ ID NO: 3711889 - RNA, 18 nt, Human
gugcuucagccugaggcu

SEQ ID NO: 3711890 - RNA, 14 nt, Human
gugcuucuuucuuu

SEQ ID NO: 3711891 - RNA, 13 nt, Human
gugcuugaaggcc

SEQ ID NO: 3711892 - RNA, 15 nt, Human
gugcuugaaggcccu

SEQ ID NO: 3711893 - RNA, 14 nt, Human
gugcuugagccagg

SEQ ID NO: 3711894 - RNA, 18 nt, Human
gugcuugauagaaaugcc

SEQ ID NO: 3711895 - RNA, 13 nt, Human
gugcuuggaggaa

SEQ ID NO: 3711896 - RNA, 14 nt, Human
gugcuuggaggaag

SEQ ID NO: 3711897 - RNA, 15 nt, Human
gugcuuggaggaagg

SEQ ID NO: 3711898 - RNA, 19 nt, Human
gugcuuggcccaggaguuu

SEQ ID NO: 3711899 - RNA, 14 nt, Human
gugcuugucccugu

SEQ ID NO: 3711900 - RNA, 13 nt, Human
gugcuuguguaau

SEQ ID NO: 3711901 - RNA, 14 nt, Human
gugcuuguguaauu

SEQ ID NO: 3711902 - RNA, 19 nt, Human
gugcuuguuuacagcacua

SEQ ID NO: 3711903 - RNA, 22 nt, Human
gugcuuguuugcucaccugggg

SEQ ID NO: 3711904 - RNA, 13 nt, Human
gugcuuuauauuu

SEQ ID NO: 3711905 - RNA, 14 nt, Human
gugcuuuaugcuga

SEQ ID NO: 3711906 - RNA, 14 nt, Human
gugcuuuccagcuc

SEQ ID NO: 3711907 - RNA, 18 nt, Human
gugcuuuccagcucaccc

SEQ ID NO: 3711908 - RNA, 15 nt, Human
gugcuuugagagaga

SEQ ID NO: 3711909 - RNA, 17 nt, Human
gugcuuugagagagaaa

SEQ ID NO: 3711910 - RNA, 18 nt, Human
gugcuuuuuauaaaaaga

SEQ ID NO: 3711911 - RNA, 14 nt, Human
guggaaaauaacuc

SEQ ID NO: 3711912 - RNA, 15 nt, Human
guggaaagccucugc

SEQ ID NO: 3711913 - RNA, 20 nt, Human
guggaaagggugcugcuucc

SEQ ID NO: 3711914 - RNA, 20 nt, Human
guggaaaguguaaagcauuc

SEQ ID NO: 3711915 - RNA, 18 nt, Human
guggaaaugcgcaugagu

SEQ ID NO: 3711916 - RNA, 21 nt, Human
guggaaauuaagaagaaacua

SEQ ID NO: 3711917 - RNA, 20 nt, Human
guggaacauaaaaaggacau

SEQ ID NO: 3711918 - RNA, 14 nt, Human
guggaaccucuguc

SEQ ID NO: 3711919 - RNA, 15 nt, Human
guggaaccucugucu

SEQ ID NO: 3711920 - RNA, 23 nt, Human
guggaacuacauuaguacacagc

SEQ ID NO: 3711921 - RNA, 18 nt, Human
guggaagaagggagaaga

SEQ ID NO: 3711922 - RNA, 20 nt, Human
guggaagaagggagaagaaa

SEQ ID NO: 3711923 - RNA, 17 nt, Human
guggaagcccuccuucc

SEQ ID NO: 3711924 - RNA, 12 nt, Human
guggaaggaaag

SEQ ID NO: 3711925 - RNA, 15 nt, Human
guggaaggcagacag

SEQ ID NO: 3711926 - RNA, 20 nt, Human
guggaaggcagacagcaggc

SEQ ID NO: 3711927 - RNA, 15 nt, Human
guggaaguguggguc

SEQ ID NO: 3711928 - RNA, 20 nt, Human
guggaagugugggucugugu

SEQ ID NO: 3711929 - RNA, 22 nt, Human
guggaagugugggucugugugu

SEQ ID NO: 3711930 - RNA, 21 nt, Human
guggaauaguauccuccaggu

SEQ ID NO: 3711931 - RNA, 23 nt, Human
guggaauaguauccuccagguuu

SEQ ID NO: 3711932 - RNA, 13 nt, Human
guggaauauaaag

SEQ ID NO: 3711933 - RNA, 14 nt, Human
guggaaugagugug

SEQ ID NO: 3711934 - RNA, 17 nt, Human
guggaauguuggauaag

SEQ ID NO: 3711935 - RNA, 18 nt, Human
guggaauuauuuuaaaag

SEQ ID NO: 3711936 - RNA, 20 nt, Human
guggaauuauuuuaaaagau

SEQ ID NO: 3711937 - RNA, 23 nt, Human
guggaauuucuuguuucuccaga

SEQ ID NO: 3711938 - RNA, 20 nt, Human
guggacaaacuggagucugg

SEQ ID NO: 3711939 - RNA, 16 nt, Human
guggacacacacagac

SEQ ID NO: 3711940 - RNA, 15 nt, Human
guggacacagcucuu

SEQ ID NO: 3711941 - RNA, 23 nt, Human
guggacacagcucuucuccaggc

SEQ ID NO: 3711942 - RNA, 12 nt, Human
guggacaccugc

SEQ ID NO: 3711943 - RNA, 18 nt, Human
guggacaccugcccugcc

SEQ ID NO: 3711944 - RNA, 15 nt, Human
guggacaguccuggg

SEQ ID NO: 3711945 - RNA, 20 nt, Human
guggaccaauuauugauaua

SEQ ID NO: 3711946 - RNA, 18 nt, Human
guggaccaggacaggacc

SEQ ID NO: 3711947 - RNA, 19 nt, Human
guggaccucuacuuuccag

SEQ ID NO: 3711948 - RNA, 14 nt, Human
guggacucagggca

SEQ ID NO: 3711949 - RNA, 15 nt, Human
guggacucagggcag

SEQ ID NO: 3711950 - RNA, 16 nt, Human
guggacucagggcagc

SEQ ID NO: 3711951 - RNA, 21 nt, Human
guggacucagggcagcgccag

SEQ ID NO: 3711952 - RNA, 14 nt, Human
guggacuccagacu

SEQ ID NO: 3711953 - RNA, 14 nt, Human
guggacucugcaca

SEQ ID NO: 3711954 - RNA, 12 nt, Human
guggacucuggu

SEQ ID NO: 3711955 - RNA, 17 nt, Human
guggacucuuugguggc

SEQ ID NO: 3711956 - RNA, 21 nt, Human
guggacuguggcacuugccug

SEQ ID NO: 3711957 - RNA, 18 nt, Human
guggacuuagaaagcagg

SEQ ID NO: 3711958 - RNA, 19 nt, Human
guggacuugaacuuuccug

SEQ ID NO: 3711959 - RNA, 17 nt, Human
guggacuuuccaccccc

SEQ ID NO: 3711960 - RNA, 20 nt, Human
guggacuuuccacccccucc

SEQ ID NO: 3711961 - RNA, 22 nt, Human
guggacuuuccacccccucccu

SEQ ID NO: 3711962 - RNA, 13 nt, Human
guggacuuuuauu

SEQ ID NO: 3711963 - RNA, 15 nt, Human
guggagaagcacacu

SEQ ID NO: 3711964 - RNA, 12 nt, Human
guggagaagcca

SEQ ID NO: 3711965 - RNA, 17 nt, Human
guggagaagccacaggc

SEQ ID NO: 3711966 - RNA, 20 nt, Human
guggagaagccacaggccug

SEQ ID NO: 3711967 - RNA, 18 nt, Human
guggagaagccauugucu

SEQ ID NO: 3711968 - RNA, 20 nt, Human
guggagaagccauugucuuc

SEQ ID NO: 3711969 - RNA, 20 nt, Human
guggagaagcggcuggcagc

SEQ ID NO: 3711970 - RNA, 18 nt, Human
guggagaaucacaggcug

SEQ ID NO: 3711971 - RNA, 18 nt, Human
guggagacaaugucugca

SEQ ID NO: 3711972 - RNA, 15 nt, Human
guggagacugcuccu

SEQ ID NO: 3711973 - RNA, 18 nt, Human
guggagaggcccggccuc

SEQ ID NO: 3711974 - RNA, 22 nt, Human
guggagagggaugaggugcugg

SEQ ID NO: 3711975 - RNA, 15 nt, Human
guggagaugucuucg

SEQ ID NO: 3711976 - RNA, 16 nt, Human
guggagaugucuucgu

SEQ ID NO: 3711977 - RNA, 16 nt, Human
guggagcaugggccug

SEQ ID NO: 3711978 - RNA, 11 nt, Human
guggagccagg

SEQ ID NO: 3711979 - RNA, 13 nt, Human
guggagccaggcg

SEQ ID NO: 3711980 - RNA, 13 nt, Human
uggcuguuggcug

SEQ ID NO: 3711981 - RNA, 11 nt, Human
uggcuguuugg

SEQ ID NO: 3711982 - RNA, 19 nt, Human
uggcuuaaaaaaaacucuu

SEQ ID NO: 3711983 - RNA, 15 nt, Human
uggcuuaaucauuuu

SEQ ID NO: 3711984 - RNA, 16 nt, Human
uggcuuaaugcuucuu

SEQ ID NO: 3711985 - RNA, 20 nt, Human
uggcuuaaugcuucuuucau

SEQ ID NO: 3711986 - RNA, 15 nt, Human
uggcuuaauguuuau

SEQ ID NO: 3711987 - RNA, 19 nt, Human
uggcuuauaauucuuucaa

SEQ ID NO: 3711988 - RNA, 19 nt, Human
uggcuuauuuuaaugugau

SEQ ID NO: 3711989 - RNA, 22 nt, Human
uggcuucacggaagagccuugc

SEQ ID NO: 3711990 - RNA, 23 nt, Human
uggcuucacuccugcuguaaauu

SEQ ID NO: 3711991 - RNA, 19 nt, Human
uggcuucagcuccagcccc

SEQ ID NO: 3711992 - RNA, 16 nt, Human
uggcuucaucugucaa

SEQ ID NO: 3711993 - RNA, 14 nt, Human
uggcuuccagguau

SEQ ID NO: 3711994 - RNA, 20 nt, Human
uggcuuccagguaucuccag

SEQ ID NO: 3711995 - RNA, 20 nt, Human
uggcuucccauccccagcga

SEQ ID NO: 3711996 - RNA, 15 nt, Human
uggcuucccgcucag

SEQ ID NO: 3711997 - RNA, 20 nt, Human
uggcuucccgcucagcccuc

SEQ ID NO: 3711998 - RNA, 22 nt, Human
uggcuucccgcucagcccuccc

SEQ ID NO: 3711999 - RNA, 22 nt, Human
uggcuuccuaaaauucagugga

SEQ ID NO: 3712000 - RNA, 13 nt, Human
uggcuuccuccug

SEQ ID NO: 3712001 - RNA, 14 nt, Human
uggcuuccuccuga

SEQ ID NO: 3712002 - RNA, 15 nt, Human
uggcuuccuccugcg

SEQ ID NO: 3712003 - RNA, 16 nt, Human
uggcuucggacaaaau

SEQ ID NO: 3712004 - RNA, 14 nt, Human
uggcuucuccaggg

SEQ ID NO: 3712005 - RNA, 12 nt, Human
uggcuucugaug

SEQ ID NO: 3712006 - RNA, 15 nt, Human
uggcuucugaugaau

SEQ ID NO: 3712007 - RNA, 20 nt, Human
uggcuucugaugaaucuugc

SEQ ID NO: 3712008 - RNA, 22 nt, Human
uggcuucuuuucuuuguaucau

SEQ ID NO: 3712009 - RNA, 18 nt, Human
uggcuugaauuaagaaga

SEQ ID NO: 3712010 - RNA, 23 nt, Human
uggcuuggauuaauauucauagu

SEQ ID NO: 3712011 - RNA, 18 nt, Human
uggcuuggccacagccag

SEQ ID NO: 3712012 - RNA, 19 nt, Human
uggcuuguagaauuguuau

SEQ ID NO: 3712013 - RNA, 14 nt, Human
uggcuuguguguuu

SEQ ID NO: 3712014 - RNA, 18 nt, Human
uggcuuguguguuucacu

SEQ ID NO: 3712015 - RNA, 12 nt, Human
uggcuuguucau

SEQ ID NO: 3712016 - RNA, 21 nt, Human
uggcuuguucaucauccagau

SEQ ID NO: 3712017 - RNA, 15 nt, Human
uggcuuuaagccuuc

SEQ ID NO: 3712018 - RNA, 23 nt, Human
uggcuuuaagccuucaaaacuau

SEQ ID NO: 3712019 - RNA, 17 nt, Human
uggcuuuaggagcagug

SEQ ID NO: 3712020 - RNA, 15 nt, Human
uggcuuucagagccu

SEQ ID NO: 3712021 - RNA, 17 nt, Human
uggcuuucagagccucc

SEQ ID NO: 3712022 - RNA, 12 nt, Human
uggcuuucccgg

SEQ ID NO: 3712023 - RNA, 20 nt, Human
uggcuuuccuuguggcagag

SEQ ID NO: 3712024 - RNA, 20 nt, Human
uggcuuucucccacugaguu

SEQ ID NO: 3712025 - RNA, 22 nt, Human
uggcuuucuccgacugcuaggg

SEQ ID NO: 3712026 - RNA, 22 nt, Human
uggcuuugcccaaccucagcaa

SEQ ID NO: 3712027 - RNA, 17 nt, Human
uggcuuuuacccuuuuu

SEQ ID NO: 3712028 - RNA, 15 nt, Human
uggcuuuuagacaga

SEQ ID NO: 3712029 - RNA, 17 nt, Human
uggcuuuuauuaaugca

SEQ ID NO: 3712030 - RNA, 20 nt, Human
uggcuuuuauuaaugcacuu

SEQ ID NO: 3712031 - RNA, 16 nt, Human
uggcuuuucacugcug

SEQ ID NO: 3712032 - RNA, 19 nt, Human
uggcuuuucacugcuggcu

SEQ ID NO: 3712033 - RNA, 17 nt, Human
uggcuuuucugauccag

SEQ ID NO: 3712034 - RNA, 16 nt, Human
uggcuuuucuguuucc

SEQ ID NO: 3712035 - RNA, 20 nt, Human
uggcuuuugcgguucaggaa

SEQ ID NO: 3712036 - RNA, 15 nt, Human
uggcuuuugugcauu

SEQ ID NO: 3712037 - RNA, 22 nt, Human
uggcuuuuuuaaaaaagcaaca

SEQ ID NO: 3712038 - RNA, 23 nt, Human
ugggaaaaaugcccuuaaaucau

SEQ ID NO: 3712039 - RNA, 18 nt, Human
ugggaaacaaaaggauaa

SEQ ID NO: 3712040 - RNA, 20 nt, Human
ugggaaacacuccuugcauc

SEQ ID NO: 3712041 - RNA, 21 nt, Human
ugggaaaccccuucucuguga

SEQ ID NO: 3712042 - RNA, 18 nt, Human
ugggaaacuuggcucgaa

SEQ ID NO: 3712043 - RNA, 22 nt, Human
ugggaaacuugucacuugcaug

SEQ ID NO: 3712044 - RNA, 21 nt, Human
ugggaaagcauuguaaaugug

SEQ ID NO: 3712045 - RNA, 20 nt, Human
ugggaaagccaccucucccu

SEQ ID NO: 3712046 - RNA, 22 nt, Human
ugggaaagccccugccccuccu

SEQ ID NO: 3712047 - RNA, 21 nt, Human
ugggaaaggaggcaugccucu

SEQ ID NO: 3712048 - RNA, 20 nt, Human
ugggaaaugagaaggcagcc

SEQ ID NO: 3712049 - RNA, 16 nt, Human
ugggaaaugagcaggg

SEQ ID NO: 3712050 - RNA, 22 nt, Human
ugggaacauuuauuuuaugaga

SEQ ID NO: 3712051 - RNA, 20 nt, Human
ugggaaccaagcuauuccuu

SEQ ID NO: 3712052 - RNA, 14 nt, Human
ugggaaccucccag

SEQ ID NO: 3712053 - RNA, 21 nt, Human
ugggaaccucccagaggucca

SEQ ID NO: 3712054 - RNA, 16 nt, Human
ugggaaccuuccuguc

SEQ ID NO: 3712055 - RNA, 16 nt, Human
ugggaacgagagggga

SEQ ID NO: 3712056 - RNA, 21 nt, Human
ugggaacgcagaugauccaug

SEQ ID NO: 3712057 - RNA, 24 nt, Human
ugggaacgcagaugauccaugagu

SEQ ID NO: 3712058 - RNA, 13 nt, Human
ugggaacuagacu

SEQ ID NO: 3712059 - RNA, 18 nt, Human
ugggaacucaccuggggc

SEQ ID NO: 3712060 - RNA, 22 nt, Human
ugggaacucccaagaacagcag

SEQ ID NO: 3712061 - RNA, 13 nt, Human
ugggaacucugac

SEQ ID NO: 3712062 - RNA, 16 nt, Human
ugggaacucugacaag

SEQ ID NO: 3712063 - RNA, 21 nt, Human
ugggaagacgccugagcucac

SEQ ID NO: 3712064 - RNA, 22 nt, Human
ugggaagacuccuagcuguccu

SEQ ID NO: 3712065 - RNA, 23 nt, Human
ugggaagacuccuagcuguccuu

SEQ ID NO: 3712066 - RNA, 22 nt, Human
ugggaagcccauccugaccagc

SEQ ID NO: 3712067 - RNA, 12 nt, Human
ugggaaggacuu

SEQ ID NO: 3712068 - RNA, 21 nt, Human
ugggaagggagagcggggcag

SEQ ID NO: 3712069 - RNA, 19 nt, Human
ugggaaggggacccccgcc

SEQ ID NO: 3712070 - RNA, 22 nt, Human
ugggaaggggacccccgccccc

SEQ ID NO: 3712071 - RNA, 18 nt, Human
ugggaaguccggccccag

SEQ ID NO: 3712072 - RNA, 23 nt, Human
ugggaagucguccuuacuccugu

SEQ ID NO: 3712073 - RNA, 23 nt, Human
ugggaaguuaaagggaagaaaac

SEQ ID NO: 3712074 - RNA, 13 nt, Human
ugggaauaaauau

SEQ ID NO: 3712075 - RNA, 23 nt, Human
ugggaauaagugccaggauggaa

SEQ ID NO: 3712076 - RNA, 13 nt, Human
ugggaauauuuga

SEQ ID NO: 3712077 - RNA, 15 nt, Human
ugggaauauuugaau

SEQ ID NO: 3712078 - RNA, 12 nt, Human
ugggaaugaagc

SEQ ID NO: 3712079 - RNA, 14 nt, Human
ugggaaugaagcaa

SEQ ID NO: 3712080 - RNA, 18 nt, Human
ugggaaugaagcuugugu

SEQ ID NO: 3712081 - RNA, 16 nt, Human
ugggaaugaaugucag

SEQ ID NO: 3712082 - RNA, 21 nt, Human
ugggaaugaaugucaguguga

SEQ ID NO: 3712083 - RNA, 22 nt, Human
ugggaaugaaugucagugugac

SEQ ID NO: 3712084 - RNA, 16 nt, Human
ugggaaugaggaaaau

SEQ ID NO: 3712085 - RNA, 17 nt, Human
ugggaaugaggcuugcu

SEQ ID NO: 3712086 - RNA, 14 nt, Human
ugggaaugaggugg

SEQ ID NO: 3712087 - RNA, 17 nt, Human
ugggaaugaggugggag

SEQ ID NO: 3712088 - RNA, 20 nt, Human
ugggaauguauaguauuuga

SEQ ID NO: 3712089 - RNA, 17 nt, Human
ugggaauugugugaugu

SEQ ID NO: 3712090 - RNA, 12 nt, Human
ugggacaauuag

SEQ ID NO: 3712091 - RNA, 22 nt, Human
ugggacaauuagauaaaugucc

SEQ ID NO: 3712092 - RNA, 16 nt, Human
ugggacaauuguuuua

SEQ ID NO: 3712093 - RNA, 20 nt, Human
ugggacagcccagagccugg

SEQ ID NO: 3712094 - RNA, 16 nt, Human
ugggacagggcauggc

SEQ ID NO: 3712095 - RNA, 20 nt, Human
ugggacauuugcucauggaa

SEQ ID NO: 3712096 - RNA, 17 nt, Human
ugggaccaaaccuagcc

SEQ ID NO: 3712097 - RNA, 18 nt, Human
ugggacccaguggcaggg

SEQ ID NO: 3712098 - RNA, 19 nt, Human
ugggacccaguggcagggc

SEQ ID NO: 3712099 - RNA, 21 nt, Human
ugggacccauagaucuucuga

SEQ ID NO: 3712100 - RNA, 15 nt, Human
ugggaccccaggccc

SEQ ID NO: 3712101 - RNA, 22 nt, Human
ugggaccccaggcccacucagg

SEQ ID NO: 3712102 - RNA, 20 nt, Human
ugggaccgcuacaccacucu

SEQ ID NO: 3712103 - RNA, 24 nt, Human
ugggaccuccaccguugguguuca

SEQ ID NO: 3712104 - RNA, 19 nt, Human
ugggaccugccaggcaggg

SEQ ID NO: 3712105 - RNA, 15 nt, Human
ugggaccuuuagugg

SEQ ID NO: 3712106 - RNA, 16 nt, Human
ugggacgcucugcugu

SEQ ID NO: 3712107 - RNA, 13 nt, Human
ugggacggcggca

SEQ ID NO: 3712108 - RNA, 15 nt, Human
ugggacguggcucag

SEQ ID NO: 3712109 - RNA, 16 nt, Human
ugggacguggcucagc

SEQ ID NO: 3712110 - RNA, 20 nt, Human
ugggacguggcucagccagc

SEQ ID NO: 3712111 - RNA, 15 nt, Human
ugggacuaaaugccc

SEQ ID NO: 3712112 - RNA, 14 nt, Human
ugggacuacaggca

SEQ ID NO: 3712113 - RNA, 15 nt, Human
ugggacuacaggcac

SEQ ID NO: 3712114 - RNA, 18 nt, Human
ugggacuagagcuuucuu

SEQ ID NO: 3712115 - RNA, 13 nt, Human
ugggacucagccu

SEQ ID NO: 3712116 - RNA, 18 nt, Human
ugggacugcugcuucuua

SEQ ID NO: 3712117 - RNA, 12 nt, Human
ugggacugggag

SEQ ID NO: 3712118 - RNA, 15 nt, Human
ugggacugggagggc

SEQ ID NO: 3712119 - RNA, 16 nt, Human
ugggacugggagggcc

SEQ ID NO: 3712120 - RNA, 15 nt, Human
ugggacuguacacac

SEQ ID NO: 3712121 - RNA, 17 nt, Human
ugggacuguacacacuu

SEQ ID NO: 3712122 - RNA, 18 nt, Human
ugggacuuccaugccuua

SEQ ID NO: 3712123 - RNA, 20 nt, Human
ugggacuuccuugcucuccc

SEQ ID NO: 3712124 - RNA, 22 nt, Human
ugggacuucuuuucacauucuu

SEQ ID NO: 3712125 - RNA, 18 nt, Human
ugggagaaauugacagau

SEQ ID NO: 3712126 - RNA, 15 nt, Human
ugggagaaccucagg

SEQ ID NO: 3712127 - RNA, 22 nt, Human
ugggagaagggggucaaagcaa

SEQ ID NO: 3712128 - RNA, 14 nt, Human
guggagccccacac

SEQ ID NO: 3712129 - RNA, 21 nt, Human
guggagccugacagccagaac

SEQ ID NO: 3712130 - RNA, 19 nt, Human
guggagcgggguaugaaga

SEQ ID NO: 3712131 - RNA, 16 nt, Human
guggagcguucaccag

SEQ ID NO: 3712132 - RNA, 13 nt, Human
guggagcugccug

SEQ ID NO: 3712133 - RNA, 14 nt, Human
guggaggaaggauu

SEQ ID NO: 3712134 - RNA, 16 nt, Human
guggaggagagccugg

SEQ ID NO: 3712135 - RNA, 17 nt, Human
guggaggagagccuggu

SEQ ID NO: 3712136 - RNA, 16 nt, Human
guggaggagcucagga

SEQ ID NO: 3712137 - RNA, 13 nt, Human
guggaggcagcca

SEQ ID NO: 3712138 - RNA, 14 nt, Human
guggaggcugcucg

SEQ ID NO: 3712139 - RNA, 12 nt, Human
guggagggccac

SEQ ID NO: 3712140 - RNA, 15 nt, Human
guggagggguguggc

SEQ ID NO: 3712141 - RNA, 13 nt, Human
guggaggugcugc

SEQ ID NO: 3712142 - RNA, 18 nt, Human
guggaggugggcugggcc

SEQ ID NO: 3712143 - RNA, 17 nt, Human
guggaggugucaggcug

SEQ ID NO: 3712144 - RNA, 22 nt, Human
guggaggugucaggcugcuggc

SEQ ID NO: 3712145 - RNA, 23 nt, Human
guggagguugcagugagccaaga

SEQ ID NO: 3712146 - RNA, 19 nt, Human
guggagguugcagugagcu

SEQ ID NO: 3712147 - RNA, 20 nt, Human
guggagguugcugguacaca

SEQ ID NO: 3712148 - RNA, 14 nt, Human
guggagugcagugg

SEQ ID NO: 3712149 - RNA, 19 nt, Human
guggaguuggcauugcauu

SEQ ID NO: 3712150 - RNA, 20 nt, Human
guggaguuugacauuguaug

SEQ ID NO: 3712151 - RNA, 18 nt, Human
guggauaacaaagauauc

SEQ ID NO: 3712152 - RNA, 17 nt, Human
guggauacgugucaaug

SEQ ID NO: 3712153 - RNA, 20 nt, Human
guggauagaugcccugcuag

SEQ ID NO: 3712154 - RNA, 17 nt, Human
guggauauaaaaugugc

SEQ ID NO: 3712155 - RNA, 15 nt, Human
guggaucacagaggc

SEQ ID NO: 3712156 - RNA, 21 nt, Human
guggaucagagaugcaccacc

SEQ ID NO: 3712157 - RNA, 19 nt, Human
guggauccaaacugaucca

SEQ ID NO: 3712158 - RNA, 19 nt, Human
guggauccaauguuagaga

SEQ ID NO: 3712159 - RNA, 19 nt, Human
guggaucuauuucauguuu

SEQ ID NO: 3712160 - RNA, 18 nt, Human
guggaucuccaaggacca

SEQ ID NO: 3712161 - RNA, 17 nt, Human
guggaucuguccaagga

SEQ ID NO: 3712162 - RNA, 12 nt, Human
guggaugaucaa

SEQ ID NO: 3712163 - RNA, 20 nt, Human
guggaugcugcugccccugc

SEQ ID NO: 3712164 - RNA, 13 nt, Human
guggauggcccca

SEQ ID NO: 3712165 - RNA, 16 nt, Human
guggauggccccagca

SEQ ID NO: 3712166 - RNA, 14 nt, Human
guggauuaaacuua

SEQ ID NO: 3712167 - RNA, 18 nt, Human
guggauucugaggcccug

SEQ ID NO: 3712168 - RNA, 21 nt, Human
guggauuuaacagaaauguac

SEQ ID NO: 3712169 - RNA, 22 nt, Human
guggcaaagcuguucuuccugg

SEQ ID NO: 3712170 - RNA, 16 nt, Human
guggcaaauauaaaac

SEQ ID NO: 3712171 - RNA, 18 nt, Human
guggcaccagcagccugg

SEQ ID NO: 3712172 - RNA, 15 nt, Human
guggcacugagcccc

SEQ ID NO: 3712173 - RNA, 14 nt, Human
guggcacuggggca

SEQ ID NO: 3712174 - RNA, 17 nt, Human
guggcacuggggcaggg

SEQ ID NO: 3712175 - RNA, 18 nt, Human
guggcacuggggcagggg

SEQ ID NO: 3712176 - RNA, 17 nt, Human
guggcacuugccugggu

SEQ ID NO: 3712177 - RNA, 23 nt, Human
guggcagagcuuggacuggaugc

SEQ ID NO: 3712178 - RNA, 20 nt, Human
guggcagauaaucagccucu

SEQ ID NO: 3712179 - RNA, 23 nt, Human
guggcagauaaucagccucuuaa

SEQ ID NO: 3712180 - RNA, 18 nt, Human
guggcagauuuuacaaaa

SEQ ID NO: 3712181 - RNA, 17 nt, Human
guggcagcccagccagc

SEQ ID NO: 3712182 - RNA, 12 nt, Human
guggcagcccug

SEQ ID NO: 3712183 - RNA, 13 nt, Human
guggcagcccugu

SEQ ID NO: 3712184 - RNA, 14 nt, Human
guggcagcccugua

SEQ ID NO: 3712185 - RNA, 17 nt, Human
guggcagcuauaggaaa

SEQ ID NO: 3712186 - RNA, 16 nt, Human
guggcagcucaccucu

SEQ ID NO: 3712187 - RNA, 14 nt, Human
guggcagcugcggu

SEQ ID NO: 3712188 - RNA, 17 nt, Human
guggcagcugcggucca

SEQ ID NO: 3712189 - RNA, 11 nt, Human
guggcagcugu

SEQ ID NO: 3712190 - RNA, 15 nt, Human
guggcaggaccagga

SEQ ID NO: 3712191 - RNA, 17 nt, Human
guggcaggaccaggacu

SEQ ID NO: 3712192 - RNA, 12 nt, Human
guggcaggcaga

SEQ ID NO: 3712193 - RNA, 13 nt, Human
guggcaggcagag

SEQ ID NO: 3712194 - RNA, 18 nt, Human
guggcagggcacagggcc

SEQ ID NO: 3712195 - RNA, 19 nt, Human
guggcagggcacagggccu

SEQ ID NO: 3712196 - RNA, 18 nt, Human
guggcaggggacaggagu

SEQ ID NO: 3712197 - RNA, 14 nt, Human
guggcaguaaagag

SEQ ID NO: 3712198 - RNA, 22 nt, Human
guggcagugcagcaaccagagc

SEQ ID NO: 3712199 - RNA, 15 nt, Human
guggcagugggagcu

SEQ ID NO: 3712200 - RNA, 19 nt, Human
guggcagugggagcugccu

SEQ ID NO: 3712201 - RNA, 21 nt, Human
guggcagugguuuuggcaaac

SEQ ID NO: 3712202 - RNA, 15 nt, Human
guggcauagcccaga

SEQ ID NO: 3712203 - RNA, 13 nt, Human
guggcauggccac

SEQ ID NO: 3712204 - RNA, 14 nt, Human
guggcauguggccu

SEQ ID NO: 3712205 - RNA, 17 nt, Human
guggcauguggccugug

SEQ ID NO: 3712206 - RNA, 22 nt, Human
guggcauguucaucguauaaca

SEQ ID NO: 3712207 - RNA, 14 nt, Human
guggcauugaaaug

SEQ ID NO: 3712208 - RNA, 15 nt, Human
guggcauugaaauga

SEQ ID NO: 3712209 - RNA, 19 nt, Human
guggccaaauuauuugugu

SEQ ID NO: 3712210 - RNA, 15 nt, Human
guggccaagaagcag

SEQ ID NO: 3712211 - RNA, 16 nt, Human
guggccaaggagcugc

SEQ ID NO: 3712212 - RNA, 22 nt, Human
guggccacaccucuaucccggc

SEQ ID NO: 3712213 - RNA, 23 nt, Human
guggccacaccucuaucccggcu

SEQ ID NO: 3712214 - RNA, 21 nt, Human
guggccacagcgccagccuca

SEQ ID NO: 3712215 - RNA, 21 nt, Human
guggccacuccagaccccugg

SEQ ID NO: 3712216 - RNA, 23 nt, Human
guggccagagcugggaggcaugg

SEQ ID NO: 3712217 - RNA, 19 nt, Human
guggccagaggugucaccc

SEQ ID NO: 3712218 - RNA, 21 nt, Human
guggccagcgagggcgugucu

SEQ ID NO: 3712219 - RNA, 10 nt, Human
guggccaggc

SEQ ID NO: 3712220 - RNA, 13 nt, Human
guggccaggguga

SEQ ID NO: 3712221 - RNA, 11 nt, Human
guggccccacc

SEQ ID NO: 3712222 - RNA, 23 nt, Human
guggccccacccugggcccuggg

SEQ ID NO: 3712223 - RNA, 22 nt, Human
guggccccaccuggcccucucu

SEQ ID NO: 3712224 - RNA, 12 nt, Human
guggccccagcc

SEQ ID NO: 3712225 - RNA, 16 nt, Human
guggccccagccuggc

SEQ ID NO: 3712226 - RNA, 16 nt, Human
guggcccgacagccug

SEQ ID NO: 3712227 - RNA, 14 nt, Human
guggcccucucccc

SEQ ID NO: 3712228 - RNA, 17 nt, Human
guggcccucuccccugc

SEQ ID NO: 3712229 - RNA, 22 nt, Human
guggcccugccaucuucccagc

SEQ ID NO: 3712230 - RNA, 17 nt, Human
guggcccugcccucucc

SEQ ID NO: 3712231 - RNA, 23 nt, Human
guggcccugcccucuccuuccuu

SEQ ID NO: 3712232 - RNA, 16 nt, Human
guggcccuggccugcu

SEQ ID NO: 3712233 - RNA, 17 nt, Human
guggcccugucccuccc

SEQ ID NO: 3712234 - RNA, 23 nt, Human
guggcccugucccucccaccucu

SEQ ID NO: 3712235 - RNA, 13 nt, Human
guggcccuuccug

SEQ ID NO: 3712236 - RNA, 18 nt, Human
guggccgaaccagaacca

SEQ ID NO: 3712237 - RNA, 9 nt, Human
guggccuca

SEQ ID NO: 3712238 - RNA, 20 nt, Human
guggccucaacccucccuca

SEQ ID NO: 3712239 - RNA, 11 nt, Human
guggccucaga

SEQ ID NO: 3712240 - RNA, 11 nt, Human
guggccucagc

SEQ ID NO: 3712241 - RNA, 18 nt, Human
guggccucagcugaaugc

SEQ ID NO: 3712242 - RNA, 22 nt, Human
guggccucccaacucaccccag

SEQ ID NO: 3712243 - RNA, 23 nt, Human
guggccucgaacuccuggcacua

SEQ ID NO: 3712244 - RNA, 21 nt, Human
guggccucuugagcaguggcu

SEQ ID NO: 3712245 - RNA, 16 nt, Human
guggccucuuugucua

SEQ ID NO: 3712246 - RNA, 19 nt, Human
guggccucuuugucuaaaa

SEQ ID NO: 3712247 - RNA, 13 nt, Human
guggccugccagu

SEQ ID NO: 3712248 - RNA, 13 nt, Human
guggccuggcucc

SEQ ID NO: 3712249 - RNA, 12 nt, Human
guggccugggca

SEQ ID NO: 3712250 - RNA, 14 nt, Human
guggccugggcaag

SEQ ID NO: 3712251 - RNA, 22 nt, Human
guggccuguagaauagccugug

SEQ ID NO: 3712252 - RNA, 13 nt, Human
guggccuguggcu

SEQ ID NO: 3712253 - RNA, 12 nt, Human
guggccugugug

SEQ ID NO: 3712254 - RNA, 19 nt, Human
guggccuuggccggcugug

SEQ ID NO: 3712255 - RNA, 17 nt, Human
guggccuuugcgcuccu

SEQ ID NO: 3712256 - RNA, 20 nt, Human
guggccuuugcgcuccuggc

SEQ ID NO: 3712257 - RNA, 20 nt, Human
guggcgacucuauagacucu

SEQ ID NO: 3712258 - RNA, 20 nt, Human
guggcgagccauuuguccca

SEQ ID NO: 3712259 - RNA, 23 nt, Human
guggcgagccauuugucccaagu

SEQ ID NO: 3712260 - RNA, 23 nt, Human
guggcgcagcauauucaggaagc

SEQ ID NO: 3712261 - RNA, 21 nt, Human
guggcgccgucuccaggggcu

SEQ ID NO: 3712262 - RNA, 19 nt, Human
guggcgcgaucucagcuca

SEQ ID NO: 3712263 - RNA, 19 nt, Human
guggcgugaucucagcuca

SEQ ID NO: 3712264 - RNA, 18 nt, Human
guggcgugggagccagcc

SEQ ID NO: 3712265 - RNA, 15 nt, Human
guggcuacucugugc

SEQ ID NO: 3712266 - RNA, 22 nt, Human
guggcuacucugugccagagcc

SEQ ID NO: 3712267 - RNA, 14 nt, Human
guggcuacugacau

SEQ ID NO: 3712268 - RNA, 12 nt, Human
guggcuaggcag

SEQ ID NO: 3712269 - RNA, 21 nt, Human
guggcuagucaagcuccuccu

SEQ ID NO: 3712270 - RNA, 17 nt, Human
guggcuauuaaaacucu

SEQ ID NO: 3712271 - RNA, 19 nt, Human
guggcuauuaaaacucuuu

SEQ ID NO: 3712272 - RNA, 21 nt, Human
guggcucaagucuggccccac

SEQ ID NO: 3712273 - RNA, 22 nt, Human
guggcucacucagcacuuggcc

SEQ ID NO: 3712274 - RNA, 15 nt, Human
guggcuccagcacca

SEQ ID NO: 3712275 - RNA, 23 nt, Human
guggcuccccucuauuuagcaug

SEQ ID NO: 3712276 - RNA, 20 nt, Human
guggcuccuaucuguguuuu

SEQ ID NO: 3712277 - RNA, 13 nt, Human
guggcuccucccg

SEQ ID NO: 3712278 - RNA, 15 nt, Human
ugcgauuuuauuacu

SEQ ID NO: 3712279 - RNA, 19 nt, Human
ugcgauuuugccugugucu

SEQ ID NO: 3712280 - RNA, 16 nt, Human
ugcgcacaacuuaaaa

SEQ ID NO: 3712281 - RNA, 13 nt, Human
ugcgcaggcuggc

SEQ ID NO: 3712282 - RNA, 17 nt, Human
ugcgcaggcuggcccug

SEQ ID NO: 3712283 - RNA, 19 nt, Human
ugcgcaggcuggcccugcc

SEQ ID NO: 3712284 - RNA, 13 nt, Human
ugcgcaguugcug

SEQ ID NO: 3712285 - RNA, 22 nt, Human
ugcgcaucuugccuccaggugc

SEQ ID NO: 3712286 - RNA, 20 nt, Human
ugcgcauucuaaccuggagg

SEQ ID NO: 3712287 - RNA, 17 nt, Human
ugcgcauucucauggag

SEQ ID NO: 3712288 - RNA, 19 nt, Human
ugcgcauucucauggagaa

SEQ ID NO: 3712289 - RNA, 14 nt, Human
ugcgccacugcucc

SEQ ID NO: 3712290 - RNA, 19 nt, Human
ugcgccacugcuccgugga

SEQ ID NO: 3712291 - RNA, 15 nt, Human
ugcgccaguccugcu

SEQ ID NO: 3712292 - RNA, 16 nt, Human
ugcgccaguccugcua

SEQ ID NO: 3712293 - RNA, 17 nt, Human
ugcgcccaccccgcucu

SEQ ID NO: 3712294 - RNA, 21 nt, Human
ugcgcccccuccgcccugcca

SEQ ID NO: 3712295 - RNA, 21 nt, Human
ugcgcccuuaacugcauccag

SEQ ID NO: 3712296 - RNA, 16 nt, Human
ugcgcccuuaccuucc

SEQ ID NO: 3712297 - RNA, 15 nt, Human
ugcgccgagucuguc

SEQ ID NO: 3712298 - RNA, 13 nt, Human
ugcgccuacagga

SEQ ID NO: 3712299 - RNA, 14 nt, Human
ugcgccuacaggag

SEQ ID NO: 3712300 - RNA, 16 nt, Human
ugcgccuacaggagug

SEQ ID NO: 3712301 - RNA, 11 nt, Human
ugcgccugcug

SEQ ID NO: 3712302 - RNA, 18 nt, Human
ugcgccugugaugcuggg

SEQ ID NO: 3712303 - RNA, 17 nt, Human
ugcgcgcacaauaguaa

SEQ ID NO: 3712304 - RNA, 18 nt, Human
ugcgcguucugaaauauu

SEQ ID NO: 3712305 - RNA, 19 nt, Human
ugcgcuaaacuuuucugau

SEQ ID NO: 3712306 - RNA, 15 nt, Human
ugcgcucagggccau

SEQ ID NO: 3712307 - RNA, 19 nt, Human
ugcgcucagggccaugcug

SEQ ID NO: 3712308 - RNA, 14 nt, Human
ugcgcuccuggccc

SEQ ID NO: 3712309 - RNA, 20 nt, Human
ugcgcuccuggcccagccuu

SEQ ID NO: 3712310 - RNA, 11 nt, Human
ugcgcuucacu

SEQ ID NO: 3712311 - RNA, 15 nt, Human
ugcgcuucacuuggg

SEQ ID NO: 3712312 - RNA, 14 nt, Human
ugcgcuugcuuuuc

SEQ ID NO: 3712313 - RNA, 16 nt, Human
ugcgcuuuauuuucuu

SEQ ID NO: 3712314 - RNA, 15 nt, Human
ugcggaaucagcuuc

SEQ ID NO: 3712315 - RNA, 22 nt, Human
ugcggaccccagcugugagccu

SEQ ID NO: 3712316 - RNA, 13 nt, Human
ugcggagaacaaa

SEQ ID NO: 3712317 - RNA, 19 nt, Human
ugcggagaaccuugugccu

SEQ ID NO: 3712318 - RNA, 13 nt, Human
ugcggagcacacu

SEQ ID NO: 3712319 - RNA, 13 nt, Human
ugcggauggccgg

SEQ ID NO: 3712320 - RNA, 15 nt, Human
ugcggcagggaagag

SEQ ID NO: 3712321 - RNA, 23 nt, Human
ugcggcagguucacaggcgaggc

SEQ ID NO: 3712322 - RNA, 17 nt, Human
ugcggcauuaaagccau

SEQ ID NO: 3712323 - RNA, 13 nt, Human
ugcggcccagccc

SEQ ID NO: 3712324 - RNA, 14 nt, Human
ugcggcccagcccg

SEQ ID NO: 3712325 - RNA, 18 nt, Human
ugcggcccagcccggcuc

SEQ ID NO: 3712326 - RNA, 13 nt, Human
ugcggccccuccc

SEQ ID NO: 3712327 - RNA, 19 nt, Human
ugcggccgcauucccugag

SEQ ID NO: 3712328 - RNA, 23 nt, Human
ugcggcuggccauggagaaagcu

SEQ ID NO: 3712329 - RNA, 13 nt, Human
ugcggcugugcag

SEQ ID NO: 3712330 - RNA, 17 nt, Human
ugcgggcugggcagcug

SEQ ID NO: 3712331 - RNA, 20 nt, Human
ugcgggcuuccuccuggugu

SEQ ID NO: 3712332 - RNA, 22 nt, Human
ugcggggguuccguguccaccc

SEQ ID NO: 3712333 - RNA, 16 nt, Human
ugcgggucacaggagg

SEQ ID NO: 3712334 - RNA, 18 nt, Human
ugcgggugaacaaagcag

SEQ ID NO: 3712335 - RNA, 22 nt, Human
ugcgggugaacaaagcagccac

SEQ ID NO: 3712336 - RNA, 18 nt, Human
ugcgguccacccaggagc

SEQ ID NO: 3712337 - RNA, 16 nt, Human
ugcgguuaauuuugaa

SEQ ID NO: 3712338 - RNA, 19 nt, Human
ugcgguuauaaaaaauggu

SEQ ID NO: 3712339 - RNA, 23 nt, Human
ugcguacguuuccugagaagugu

SEQ ID NO: 3712340 - RNA, 16 nt, Human
ugcguaugcaguguag

SEQ ID NO: 3712341 - RNA, 19 nt, Human
ugcguaugucuguuaccau

SEQ ID NO: 3712342 - RNA, 19 nt, Human
ugcguccacgagcuguuua

SEQ ID NO: 3712343 - RNA, 19 nt, Human
ugcguccuccucaccucau

SEQ ID NO: 3712344 - RNA, 22 nt, Human
ugcguccuccucaccucaugcc

SEQ ID NO: 3712345 - RNA, 16 nt, Human
ugcgucgguccuggug

SEQ ID NO: 3712346 - RNA, 16 nt, Human
ugcgucuauccugugu

SEQ ID NO: 3712347 - RNA, 23 nt, Human
ugcgucuggaggggccccugcuu

SEQ ID NO: 3712348 - RNA, 14 nt, Human
ugcgucuuccgccc

SEQ ID NO: 3712349 - RNA, 22 nt, Human
ugcgugaaacacaccaggcugu

SEQ ID NO: 3712350 - RNA, 19 nt, Human
ugcgugacacucuccuugc

SEQ ID NO: 3712351 - RNA, 20 nt, Human
ugcgugacacucuccuugca

SEQ ID NO: 3712352 - RNA, 21 nt, Human
ugcgugacacucuccuugcag

SEQ ID NO: 3712353 - RNA, 17 nt, Human
ugcgugccccugcugcu

SEQ ID NO: 3712354 - RNA, 18 nt, Human
ugcgugccgugugagugu

SEQ ID NO: 3712355 - RNA, 16 nt, Human
ugcguggacucugcac

SEQ ID NO: 3712356 - RNA, 17 nt, Human
ugcguggacucugcaca

SEQ ID NO: 3712357 - RNA, 19 nt, Human
ugcguggcauagcccagac

SEQ ID NO: 3712358 - RNA, 13 nt, Human
ugcgugggucaga

SEQ ID NO: 3712359 - RNA, 16 nt, Human
ugcgugggucagaaga

SEQ ID NO: 3712360 - RNA, 23 nt, Human
ugcgugggugugugcguguuugg

SEQ ID NO: 3712361 - RNA, 18 nt, Human
ugcgugguggucccuggg

SEQ ID NO: 3712362 - RNA, 18 nt, Human
ugcgugugcgugcaugug

SEQ ID NO: 3712363 - RNA, 20 nt, Human
ugcguguguagaguuaagaa

SEQ ID NO: 3712364 - RNA, 17 nt, Human
ugcguguguccaugugu

SEQ ID NO: 3712365 - RNA, 19 nt, Human
ugcguguguccaugugugu

SEQ ID NO: 3712366 - RNA, 14 nt, Human
ugcguguuugcacg

SEQ ID NO: 3712367 - RNA, 16 nt, Human
ugcguguuugcacguu

SEQ ID NO: 3712368 - RNA, 15 nt, Human
ugcuaaaaaugggac

SEQ ID NO: 3712369 - RNA, 14 nt, Human
ugcuaaaauaacag

SEQ ID NO: 3712370 - RNA, 22 nt, Human
ugcuaaacacugcgcuuuauuu

SEQ ID NO: 3712371 - RNA, 16 nt, Human
ugcuaaacguguaugu

SEQ ID NO: 3712372 - RNA, 17 nt, Human
ugcuaaacguguauguu

SEQ ID NO: 3712373 - RNA, 19 nt, Human
ugcuaaacguguauguuuu

SEQ ID NO: 3712374 - RNA, 12 nt, Human
ugcuaaagacau

SEQ ID NO: 3712375 - RNA, 17 nt, Human
ugcuaaauaaaauuugu

SEQ ID NO: 3712376 - RNA, 21 nt, Human
ugcuaaauaaaauuuguugca

SEQ ID NO: 3712377 - RNA, 12 nt, Human
ugcuaaaucucc

SEQ ID NO: 3712378 - RNA, 20 nt, Human
ugcuaaauggucgcccagga

SEQ ID NO: 3712379 - RNA, 14 nt, Human
ugcuaaauguaaca

SEQ ID NO: 3712380 - RNA, 16 nt, Human
ugcuaaauguaacagu

SEQ ID NO: 3712381 - RNA, 24 nt, Human
ugcuaaauguaagaaucauuguaa

SEQ ID NO: 3712382 - RNA, 18 nt, Human
ugcuaaauugauguugau

SEQ ID NO: 3712383 - RNA, 21 nt, Human
ugcuaaauugauguugaugca

SEQ ID NO: 3712384 - RNA, 23 nt, Human
ugcuaacaaagacaaaagucugu

SEQ ID NO: 3712385 - RNA, 21 nt, Human
ugcuaagaauauuugaaugua

SEQ ID NO: 3712386 - RNA, 22 nt, Human
ugcuaagacucaguggggaggg

SEQ ID NO: 3712387 - RNA, 13 nt, Human
ugcuaagagaagu

SEQ ID NO: 3712388 - RNA, 16 nt, Human
ugcuaagagaaguaga

SEQ ID NO: 3712389 - RNA, 22 nt, Human
ugcuaagagaaguagaaaucau

SEQ ID NO: 3712390 - RNA, 20 nt, Human
ugcuaagcaagcuaaccuua

SEQ ID NO: 3712391 - RNA, 15 nt, Human
ugcuaagcauuccaa

SEQ ID NO: 3712392 - RNA, 18 nt, Human
ugcuaagccccagcaagc

SEQ ID NO: 3712393 - RNA, 20 nt, Human
ugcuaagccccagcaagcaa

SEQ ID NO: 3712394 - RNA, 15 nt, Human
ugcuaaggucuugga

SEQ ID NO: 3712395 - RNA, 12 nt, Human
ugcuaagguucu

SEQ ID NO: 3712396 - RNA, 20 nt, Human
ugcuaaguaaaucucuucug

SEQ ID NO: 3712397 - RNA, 12 nt, Human
ugcuaaguauuu

SEQ ID NO: 3712398 - RNA, 16 nt, Human
ugcuaaguauuuccca

SEQ ID NO: 3712399 - RNA, 14 nt, Human
ugcuaagugugaac

SEQ ID NO: 3712400 - RNA, 16 nt, Human
ugcuaaucaaagccag

SEQ ID NO: 3712401 - RNA, 23 nt, Human
ugcuaaucagggaggucauuuug

SEQ ID NO: 3712402 - RNA, 14 nt, Human
ugcuaaucaguguc

SEQ ID NO: 3712403 - RNA, 20 nt, Human
ugcuaaucggguugucacuc

SEQ ID NO: 3712404 - RNA, 23 nt, Human
ugcuaaucuugugaaaauaauug

SEQ ID NO: 3712405 - RNA, 21 nt, Human
ugcuaaugucaaacuugaguc

SEQ ID NO: 3712406 - RNA, 17 nt, Human
ugcuaauuaaaaaguua

SEQ ID NO: 3712407 - RNA, 13 nt, Human
ugcuaauucuuug

SEQ ID NO: 3712408 - RNA, 16 nt, Human
ugcuaauucuuugcaa

SEQ ID NO: 3712409 - RNA, 17 nt, Human
ugcuaauucuuugcaaa

SEQ ID NO: 3712410 - RNA, 18 nt, Human
ugcuaauugcuguugaaa

SEQ ID NO: 3712411 - RNA, 21 nt, Human
ugcuaauugcuguugaaagca

SEQ ID NO: 3712412 - RNA, 22 nt, Human
ugcuaauugcuguugaaagcaa

SEQ ID NO: 3712413 - RNA, 15 nt, Human
ugcuaauuuucucaa

SEQ ID NO: 3712414 - RNA, 17 nt, Human
ugcuaauuuucucaaaa

SEQ ID NO: 3712415 - RNA, 20 nt, Human
ugcuaauuuugaaaaacugc

SEQ ID NO: 3712416 - RNA, 14 nt, Human
ugcuacaaaaacac

SEQ ID NO: 3712417 - RNA, 18 nt, Human
ugcuacaaaaacacagca

SEQ ID NO: 3712418 - RNA, 18 nt, Human
ugcuacaaagaagacaug

SEQ ID NO: 3712419 - RNA, 20 nt, Human
ugcuacaaagaagacauguu

SEQ ID NO: 3712420 - RNA, 21 nt, Human
ugcuacaaagaagacauguuu

SEQ ID NO: 3712421 - RNA, 11 nt, Human
ugcuacacacu

SEQ ID NO: 3712422 - RNA, 13 nt, Human
ugcuacaguaaua

SEQ ID NO: 3712423 - RNA, 14 nt, Human
ugcuaccaccagcu

SEQ ID NO: 3712424 - RNA, 15 nt, Human
ugcuaccaccagcug

SEQ ID NO: 3712425 - RNA, 17 nt, Human
ugcuaccaccagcugug

SEQ ID NO: 3712426 - RNA, 18 nt, Human
ugcuaccaccagcugugu

SEQ ID NO: 3712427 - RNA, 22 nt, Human
ugcuaccaccagcuguguccaa

SEQ ID NO: 3712428 - RNA, 23 nt, Human
ugggagaagggggucaaagcaag

SEQ ID NO: 3712429 - RNA, 23 nt, Human
ugggagaaucgcuccugcagccc

SEQ ID NO: 3712430 - RNA, 19 nt, Human
ugggagaaugucaguaugu

SEQ ID NO: 3712431 - RNA, 20 nt, Human
ugggagaaugucaguaugug

SEQ ID NO: 3712432 - RNA, 21 nt, Human
ugggagaauucuuacauguuu

SEQ ID NO: 3712433 - RNA, 16 nt, Human
ugggagacaugugaca

SEQ ID NO: 3712434 - RNA, 18 nt, Human
ugggagacugcugaguca

SEQ ID NO: 3712435 - RNA, 21 nt, Human
ugggagagaagagaaugcaca

SEQ ID NO: 3712436 - RNA, 14 nt, Human
ugggagagacuugu

SEQ ID NO: 3712437 - RNA, 16 nt, Human
ugggagagccauacau

SEQ ID NO: 3712438 - RNA, 23 nt, Human
ugggagagccccuggggccuaga

SEQ ID NO: 3712439 - RNA, 23 nt, Human
ugggagaggauuuuuuucugagc

SEQ ID NO: 3712440 - RNA, 15 nt, Human
ugggagaggcagccc

SEQ ID NO: 3712441 - RNA, 18 nt, Human
ugggagaggcagcccagg

SEQ ID NO: 3712442 - RNA, 14 nt, Human
ugggagagggcgca

SEQ ID NO: 3712443 - RNA, 22 nt, Human
ugggagagugucaaccagacag

SEQ ID NO: 3712444 - RNA, 14 nt, Human
ugggagauguggaa

SEQ ID NO: 3712445 - RNA, 14 nt, Human
ugggagauguuaga

SEQ ID NO: 3712446 - RNA, 23 nt, Human
ugggagauucaagggacccauga

SEQ ID NO: 3712447 - RNA, 13 nt, Human
ugggagcaaaaga

SEQ ID NO: 3712448 - RNA, 19 nt, Human
ugggagcaaacugcaugcc

SEQ ID NO: 3712449 - RNA, 23 nt, Human
ugggagcaggagauugagaagga

SEQ ID NO: 3712450 - RNA, 14 nt, Human
ugggagcaguccau

SEQ ID NO: 3712451 - RNA, 16 nt, Human
ugggagcccccagccu

SEQ ID NO: 3712452 - RNA, 18 nt, Human
ugggagccgggucugccu

SEQ ID NO: 3712453 - RNA, 16 nt, Human
ugggagcuccacucug

SEQ ID NO: 3712454 - RNA, 19 nt, Human
ugggagcuccacucugcuu

SEQ ID NO: 3712455 - RNA, 17 nt, Human
ugggagcugaaaaauca

SEQ ID NO: 3712456 - RNA, 16 nt, Human
ugggagcugaggccac

SEQ ID NO: 3712457 - RNA, 13 nt, Human
ugggagcugccug

SEQ ID NO: 3712458 - RNA, 17 nt, Human
ugggagcugccuguuca

SEQ ID NO: 3712459 - RNA, 23 nt, Human
ugggagcugccuguucagcucca

SEQ ID NO: 3712460 - RNA, 18 nt, Human
ugggagcugguuagaaau

SEQ ID NO: 3712461 - RNA, 19 nt, Human
ugggagcugguuagaaaug

SEQ ID NO: 3712462 - RNA, 16 nt, Human
ugggagcugucaagca

SEQ ID NO: 3712463 - RNA, 16 nt, Human
ugggagcuugggaaug

SEQ ID NO: 3712464 - RNA, 16 nt, Human
ugggagcuuuuguaga

SEQ ID NO: 3712465 - RNA, 16 nt, Human
ugggaggaaagagagc

SEQ ID NO: 3712466 - RNA, 15 nt, Human
ugggaggaaauuuga

SEQ ID NO: 3712467 - RNA, 11 nt, Human
ugggaggaagc

SEQ ID NO: 3712468 - RNA, 17 nt, Human
ugggaggaagcagaaua

SEQ ID NO: 3712469 - RNA, 22 nt, Human
ugggaggaagcagaauaaagca

SEQ ID NO: 3712470 - RNA, 23 nt, Human
ugggaggaagcagaauaaagcaa

SEQ ID NO: 3712471 - RNA, 18 nt, Human
ugggaggagcagauuuuu

SEQ ID NO: 3712472 - RNA, 13 nt, Human
ugggaggagggag

SEQ ID NO: 3712473 - RNA, 18 nt, Human
ugggaggagggagaggga

SEQ ID NO: 3712474 - RNA, 19 nt, Human
ugggaggagggagagggag

SEQ ID NO: 3712475 - RNA, 18 nt, Human
ugggaggaucucuugagc

SEQ ID NO: 3712476 - RNA, 22 nt, Human
ugggaggaucucuugagccugg

SEQ ID NO: 3712477 - RNA, 15 nt, Human
ugggaggaugugaau

SEQ ID NO: 3712478 - RNA, 23 nt, Human
ugggaggcaagagggguggagac

SEQ ID NO: 3712479 - RNA, 20 nt, Human
ugggaggcagagguugcagu

SEQ ID NO: 3712480 - RNA, 14 nt, Human
ugggaggccaagga

SEQ ID NO: 3712481 - RNA, 19 nt, Human
ugggaggccaaggugggag

SEQ ID NO: 3712482 - RNA, 20 nt, Human
ugggaggccaaggugggagg

SEQ ID NO: 3712483 - RNA, 18 nt, Human
ugggaggccccacugggg

SEQ ID NO: 3712484 - RNA, 12 nt, Human
ugggaggcgggc

SEQ ID NO: 3712485 - RNA, 20 nt, Human
ugggaggcucacccccuucu

SEQ ID NO: 3712486 - RNA, 14 nt, Human
ugggaggcuccugu

SEQ ID NO: 3712487 - RNA, 17 nt, Human
ugggaggcucuggagcc

SEQ ID NO: 3712488 - RNA, 19 nt, Human
ugggaggcugagaugggag

SEQ ID NO: 3712489 - RNA, 15 nt, Human
ugggaggcuggaguu

SEQ ID NO: 3712490 - RNA, 14 nt, Human
ugggaggcuucccc

SEQ ID NO: 3712491 - RNA, 14 nt, Human
ugggagggaaaagg

SEQ ID NO: 3712492 - RNA, 19 nt, Human
ugggagggagcugagaaga

SEQ ID NO: 3712493 - RNA, 18 nt, Human
ugggagggcagcagggcu

SEQ ID NO: 3712494 - RNA, 15 nt, Human
ugggaggggcaggcu

SEQ ID NO: 3712495 - RNA, 19 nt, Human
ugggaggggcgcccaccuc

SEQ ID NO: 3712496 - RNA, 20 nt, Human
ugggaggggguugggguggu

SEQ ID NO: 3712497 - RNA, 18 nt, Human
ugggaggucaaggcugca

SEQ ID NO: 3712498 - RNA, 19 nt, Human
ugggaggucaaggcugcag

SEQ ID NO: 3712499 - RNA, 16 nt, Human
ugggaggucaggaaac

SEQ ID NO: 3712500 - RNA, 17 nt, Human
ugggaggucaggaaacu

SEQ ID NO: 3712501 - RNA, 13 nt, Human
ugggaggucgagg

SEQ ID NO: 3712502 - RNA, 19 nt, Human
ugggaggugagaccaccuc

SEQ ID NO: 3712503 - RNA, 22 nt, Human
ugggagguggaagaagggagaa

SEQ ID NO: 3712504 - RNA, 19 nt, Human
ugggagguggagguugcau

SEQ ID NO: 3712505 - RNA, 20 nt, Human
ugggaguaguuggagcauug

SEQ ID NO: 3712506 - RNA, 23 nt, Human
ugggagucacacaguguuggagg

SEQ ID NO: 3712507 - RNA, 14 nt, Human
ugggaguccaggca

SEQ ID NO: 3712508 - RNA, 17 nt, Human
ugggaguccaggcacag

SEQ ID NO: 3712509 - RNA, 16 nt, Human
ugggagugggcccaau

SEQ ID NO: 3712510 - RNA, 11 nt, Human
ugggagugugu

SEQ ID NO: 3712511 - RNA, 20 nt, Human
ugggaguuuuguauucaucu

SEQ ID NO: 3712512 - RNA, 23 nt, Human
ugggauaaagaugcaaggaccag

SEQ ID NO: 3712513 - RNA, 13 nt, Human
ugggauaaaugcc

SEQ ID NO: 3712514 - RNA, 12 nt, Human
ugggauagagaa

SEQ ID NO: 3712515 - RNA, 20 nt, Human
ugggaucagggguaggaaug

SEQ ID NO: 3712516 - RNA, 20 nt, Human
ugggaucccucugggcacug

SEQ ID NO: 3712517 - RNA, 12 nt, Human
ugggauccucca

SEQ ID NO: 3712518 - RNA, 14 nt, Human
ugggauccuccagg

SEQ ID NO: 3712519 - RNA, 15 nt, Human
ugggaucuaggagag

SEQ ID NO: 3712520 - RNA, 16 nt, Human
ugggaugagccgcugu

SEQ ID NO: 3712521 - RNA, 14 nt, Human
ugggaugauugaag

SEQ ID NO: 3712522 - RNA, 16 nt, Human
ugggaugauugaagaa

SEQ ID NO: 3712523 - RNA, 23 nt, Human
ugggaugauugaagaaacagcua

SEQ ID NO: 3712524 - RNA, 12 nt, Human
ugggaugcuccu

SEQ ID NO: 3712525 - RNA, 19 nt, Human
ugggaugcuugccuagggc

SEQ ID NO: 3712526 - RNA, 14 nt, Human
ugggauggaggaga

SEQ ID NO: 3712527 - RNA, 16 nt, Human
ugggauggaggagaag

SEQ ID NO: 3712528 - RNA, 15 nt, Human
ugggauggaggggag

SEQ ID NO: 3712529 - RNA, 16 nt, Human
ugggaugguggagggc

SEQ ID NO: 3712530 - RNA, 20 nt, Human
ugggauggugggcuucaggg

SEQ ID NO: 3712531 - RNA, 21 nt, Human
ugggauguaugaauacagcag

SEQ ID NO: 3712532 - RNA, 23 nt, Human
ugggauguccacagaugccucca

SEQ ID NO: 3712533 - RNA, 15 nt, Human
ugggaugucuuauuu

SEQ ID NO: 3712534 - RNA, 16 nt, Human
ugggaugucuuauuuu

SEQ ID NO: 3712535 - RNA, 20 nt, Human
ugggaugugguuuucuuaag

SEQ ID NO: 3712536 - RNA, 16 nt, Human
ugggauguucagcacu

SEQ ID NO: 3712537 - RNA, 14 nt, Human
ugggauguuucugu

SEQ ID NO: 3712538 - RNA, 22 nt, Human
ugggauuacaagcgugagccac

SEQ ID NO: 3712539 - RNA, 17 nt, Human
ugggauuauauaucccu

SEQ ID NO: 3712540 - RNA, 18 nt, Human
ugggauuaugggucacag

SEQ ID NO: 3712541 - RNA, 20 nt, Human
ugggauuaugggucacagga

SEQ ID NO: 3712542 - RNA, 20 nt, Human
ugggauucaggaaaaggccu

SEQ ID NO: 3712543 - RNA, 22 nt, Human
ugggauucaggaaaaggccugg

SEQ ID NO: 3712544 - RNA, 24 nt, Human
ugggauuccugacccaggccgcag

SEQ ID NO: 3712545 - RNA, 23 nt, Human
ugggauugacagaagcuucugcc

SEQ ID NO: 3712546 - RNA, 14 nt, Human
ugggauugggggcu

SEQ ID NO: 3712547 - RNA, 21 nt, Human
ugggauugggggcuggugcca

SEQ ID NO: 3712548 - RNA, 14 nt, Human
ugggauuuaauuuc

SEQ ID NO: 3712549 - RNA, 17 nt, Human
ugggauuucuaugcagu

SEQ ID NO: 3712550 - RNA, 14 nt, Human
ugggauuugcugug

SEQ ID NO: 3712551 - RNA, 21 nt, Human
ugggauuuuaaacuagaugac

SEQ ID NO: 3712552 - RNA, 22 nt, Human
ugggcaaaacugaauuauaaga

SEQ ID NO: 3712553 - RNA, 16 nt, Human
ugggcaaacaggcagu

SEQ ID NO: 3712554 - RNA, 21 nt, Human
ugggcaaagccuagugaaggc

SEQ ID NO: 3712555 - RNA, 12 nt, Human
ugggcaacaaag

SEQ ID NO: 3712556 - RNA, 12 nt, Human
ugggcaacagag

SEQ ID NO: 3712557 - RNA, 16 nt, Human
ugggcaacagagcaag

SEQ ID NO: 3712558 - RNA, 19 nt, Human
ugggcaacagagcaagacu

SEQ ID NO: 3712559 - RNA, 16 nt, Human
ugggcaacauugcugg

SEQ ID NO: 3712560 - RNA, 16 nt, Human
ugggcaacccccagcc

SEQ ID NO: 3712561 - RNA, 20 nt, Human
ugggcaacccccagccugcu

SEQ ID NO: 3712562 - RNA, 14 nt, Human
ugggcaaggaaaaa

SEQ ID NO: 3712563 - RNA, 14 nt, Human
ugggcaaggaggcc

SEQ ID NO: 3712564 - RNA, 17 nt, Human
ugggcaauauaaccaau

SEQ ID NO: 3712565 - RNA, 16 nt, Human
ugggcaauauagcaag

SEQ ID NO: 3712566 - RNA, 13 nt, Human
ugggcaauauucu

SEQ ID NO: 3712567 - RNA, 17 nt, Human
ugggcaauauucucugu

SEQ ID NO: 3712568 - RNA, 21 nt, Human
ugggcacacgccucccacugg

SEQ ID NO: 3712569 - RNA, 15 nt, Human
ugggcacacgcugcu

SEQ ID NO: 3712570 - RNA, 23 nt, Human
ugggcacacgcugcucugcccca

SEQ ID NO: 3712571 - RNA, 16 nt, Human
ugggcacacucugcca

SEQ ID NO: 3712572 - RNA, 17 nt, Human
ugggcacccccagccug

SEQ ID NO: 3712573 - RNA, 20 nt, Human
ugggcacccccagccugggc

SEQ ID NO: 3712574 - RNA, 22 nt, Human
ugggcacccccagccugggccu

SEQ ID NO: 3712575 - RNA, 23 nt, Human
ugggcacccccagccugggccua

SEQ ID NO: 3712576 - RNA, 17 nt, Human
ugggcaccuauaauacc

SEQ ID NO: 3712577 - RNA, 19 nt, Human
ugggcaccuauaauaccag

SEQ ID NO: 3712578 - RNA, 21 nt, Human
ugggcacgcugugggcaggug

SEQ ID NO: 3712579 - RNA, 15 nt, Human
ugggcacuggcccag

SEQ ID NO: 3712580 - RNA, 16 nt, Human
ugggcacugggaugag

SEQ ID NO: 3712581 - RNA, 23 nt, Human
ugggcagaaggaagacuucaucc

SEQ ID NO: 3712582 - RNA, 17 nt, Human
ugggcagaagggagaag

SEQ ID NO: 3712583 - RNA, 11 nt, Human
ugggcagagca

SEQ ID NO: 3712584 - RNA, 14 nt, Human
ugggcagagcagag

SEQ ID NO: 3712585 - RNA, 15 nt, Human
ugggcagagcagaga

SEQ ID NO: 3712586 - RNA, 18 nt, Human
ugggcagagcagagacca

SEQ ID NO: 3712587 - RNA, 23 nt, Human
ugggcagagcagagaccaucccu

SEQ ID NO: 3712588 - RNA, 18 nt, Human
ugggcagagcccccagga

SEQ ID NO: 3712589 - RNA, 23 nt, Human
uggguccaggccuacuccugucu

SEQ ID NO: 3712590 - RNA, 21 nt, Human
uggguccaggggccccuccag

SEQ ID NO: 3712591 - RNA, 18 nt, Human
uggguccaugggcagagc

SEQ ID NO: 3712592 - RNA, 15 nt, Human
uggguccccagcccu

SEQ ID NO: 3712593 - RNA, 19 nt, Human
uggguccccagcccuuccu

SEQ ID NO: 3712594 - RNA, 17 nt, Human
ugggucccccacgugac

SEQ ID NO: 3712595 - RNA, 21 nt, Human
uggguccgauaauaucuuugu

SEQ ID NO: 3712596 - RNA, 18 nt, Human
uggguccucacaucuuuc

SEQ ID NO: 3712597 - RNA, 21 nt, Human
uggguccugggucuuucaugg

SEQ ID NO: 3712598 - RNA, 16 nt, Human
ugggucuauuccagcu

SEQ ID NO: 3712599 - RNA, 17 nt, Human
ugggucuauuccagcuc

SEQ ID NO: 3712600 - RNA, 18 nt, Human
ugggucucaccggcucuc

SEQ ID NO: 3712601 - RNA, 19 nt, Human
ugggucugagucauggccg

SEQ ID NO: 3712602 - RNA, 21 nt, Human
ugggucugggagucacacagu

SEQ ID NO: 3712603 - RNA, 14 nt, Human
ugggucugugcauu

SEQ ID NO: 3712604 - RNA, 15 nt, Human
ugggucugugugugu

SEQ ID NO: 3712605 - RNA, 14 nt, Human
ugggucuguuuucc

SEQ ID NO: 3712606 - RNA, 14 nt, Human
ugggugaaggcugg

SEQ ID NO: 3712607 - RNA, 15 nt, Human
ugggugaagggagag

SEQ ID NO: 3712608 - RNA, 12 nt, Human
ugggugacauuu

SEQ ID NO: 3712609 - RNA, 13 nt, Human
ugggugagaacaa

SEQ ID NO: 3712610 - RNA, 19 nt, Human
ugggugagaugcuggagaa

SEQ ID NO: 3712611 - RNA, 15 nt, Human
ugggugcccacagcc

SEQ ID NO: 3712612 - RNA, 23 nt, Human
ugggugcccacagcccgcaugca

SEQ ID NO: 3712613 - RNA, 17 nt, Human
ugggugccuaggccugg

SEQ ID NO: 3712614 - RNA, 13 nt, Human
ugggugcgacccc

SEQ ID NO: 3712615 - RNA, 22 nt, Human
ugggugcgaccccaucugccca

SEQ ID NO: 3712616 - RNA, 17 nt, Human
ugggugcuacuggggaa

SEQ ID NO: 3712617 - RNA, 15 nt, Human
ugggugcuuggagga

SEQ ID NO: 3712618 - RNA, 19 nt, Human
uggguggaaccaggaaccu

SEQ ID NO: 3712619 - RNA, 18 nt, Human
guguccaaaaccgccagc

SEQ ID NO: 3712620 - RNA, 20 nt, Human
guguccaaaaccgccagcuc

SEQ ID NO: 3712621 - RNA, 23 nt, Human
guguccaaaaccgccagcucugu

SEQ ID NO: 3712622 - RNA, 13 nt, Human
guguccaaagcag

SEQ ID NO: 3712623 - RNA, 16 nt, Human
guguccaacuccagua

SEQ ID NO: 3712624 - RNA, 11 nt, Human
guguccacccc

SEQ ID NO: 3712625 - RNA, 16 nt, Human
guguccaccugugggu

SEQ ID NO: 3712626 - RNA, 13 nt, Human
guguccaucccag

SEQ ID NO: 3712627 - RNA, 19 nt, Human
guguccaucccagcggcug

SEQ ID NO: 3712628 - RNA, 21 nt, Human
guguccaugcgcucagggcca

SEQ ID NO: 3712629 - RNA, 15 nt, Human
guguccaugugugug

SEQ ID NO: 3712630 - RNA, 16 nt, Human
guguccauugacaugu

SEQ ID NO: 3712631 - RNA, 11 nt, Human
guguccccacc

SEQ ID NO: 3712632 - RNA, 17 nt, Human
guguccccaccaucugc

SEQ ID NO: 3712633 - RNA, 18 nt, Human
guguccccaccaucugcu

SEQ ID NO: 3712634 - RNA, 20 nt, Human
guguccccaccaucugcugu

SEQ ID NO: 3712635 - RNA, 12 nt, Human
guguccccagcc

SEQ ID NO: 3712636 - RNA, 15 nt, Human
guguccccagcccac

SEQ ID NO: 3712637 - RNA, 14 nt, Human
gugucccccucugu

SEQ ID NO: 3712638 - RNA, 19 nt, Human
guguccccgcugcugugca

SEQ ID NO: 3712639 - RNA, 17 nt, Human
guguccccggggcccag

SEQ ID NO: 3712640 - RNA, 14 nt, Human
gugucccuaaugug

SEQ ID NO: 3712641 - RNA, 18 nt, Human
gugucccucucucuggaa

SEQ ID NO: 3712642 - RNA, 13 nt, Human
guguccuacagaa

SEQ ID NO: 3712643 - RNA, 21 nt, Human
guguccugaaacgcuccuuug

SEQ ID NO: 3712644 - RNA, 13 nt, Human
guguccugacacu

SEQ ID NO: 3712645 - RNA, 12 nt, Human
guguccuucccu

SEQ ID NO: 3712646 - RNA, 15 nt, Human
guguccuucccugca

SEQ ID NO: 3712647 - RNA, 19 nt, Human
guguccuugcaccugcauc

SEQ ID NO: 3712648 - RNA, 17 nt, Human
gugucgagucaaaaugu

SEQ ID NO: 3712649 - RNA, 13 nt, Human
gugucgggcccuu

SEQ ID NO: 3712650 - RNA, 17 nt, Human
gugucuaaaaacaccaa

SEQ ID NO: 3712651 - RNA, 15 nt, Human
gugucuaagauucua

SEQ ID NO: 3712652 - RNA, 18 nt, Human
gugucucacuaaagcaug

SEQ ID NO: 3712653 - RNA, 12 nt, Human
gugucucaggcu

SEQ ID NO: 3712654 - RNA, 14 nt, Human
gugucucaggcugc

SEQ ID NO: 3712655 - RNA, 19 nt, Human
gugucucaggcugccugag

SEQ ID NO: 3712656 - RNA, 18 nt, Human
gugucuccaaccccccag

SEQ ID NO: 3712657 - RNA, 14 nt, Human
gugucuccugcaug

SEQ ID NO: 3712658 - RNA, 18 nt, Human
gugucucuugguccugcu

SEQ ID NO: 3712659 - RNA, 22 nt, Human
gugucucuugguccugcugcag

SEQ ID NO: 3712660 - RNA, 16 nt, Human
gugucugagagauuca

SEQ ID NO: 3712661 - RNA, 13 nt, Human
gugucugcccccu

SEQ ID NO: 3712662 - RNA, 14 nt, Human
gugucugcccccuc

SEQ ID NO: 3712663 - RNA, 18 nt, Human
gugucuggaauuguggcu

SEQ ID NO: 3712664 - RNA, 16 nt, Human
gugucuggaucaguaa

SEQ ID NO: 3712665 - RNA, 20 nt, Human
gugucuggaucaguaaaauu

SEQ ID NO: 3712666 - RNA, 16 nt, Human
gugucuguacacgugu

SEQ ID NO: 3712667 - RNA, 21 nt, Human
gugucuguauuucauguggcu

SEQ ID NO: 3712668 - RNA, 15 nt, Human
gugucuuccucccaa

SEQ ID NO: 3712669 - RNA, 19 nt, Human
gugucuuccucccaagugg

SEQ ID NO: 3712670 - RNA, 12 nt, Human
gugucuuccugu

SEQ ID NO: 3712671 - RNA, 14 nt, Human
gugucuuccugugg

SEQ ID NO: 3712672 - RNA, 15 nt, Human
gugucuuguguuuuu

SEQ ID NO: 3712673 - RNA, 14 nt, Human
gugucuuguucugu

SEQ ID NO: 3712674 - RNA, 18 nt, Human
gugucuuuaaaugcugcu

SEQ ID NO: 3712675 - RNA, 17 nt, Human
gugucuuuagauagccc

SEQ ID NO: 3712676 - RNA, 15 nt, Human
gugucuuucuaagaa

SEQ ID NO: 3712677 - RNA, 15 nt, Human
gugucuuucucuuuu

SEQ ID NO: 3712678 - RNA, 21 nt, Human
gugucuuugugauuuugagua

SEQ ID NO: 3712679 - RNA, 16 nt, Human
gugucuuuuuuuguau

SEQ ID NO: 3712680 - RNA, 21 nt, Human
gugugaaaggaagcuccacug

SEQ ID NO: 3712681 - RNA, 15 nt, Human
gugugaacuuggaag

SEQ ID NO: 3712682 - RNA, 11 nt, Human
gugugaaguua

SEQ ID NO: 3712683 - RNA, 21 nt, Human
gugugaaguuagaauuccuuc

SEQ ID NO: 3712684 - RNA, 17 nt, Human
gugugaauaccccaaga

SEQ ID NO: 3712685 - RNA, 15 nt, Human
gugugaaugaacacu

SEQ ID NO: 3712686 - RNA, 18 nt, Human
gugugacagggccagugg

SEQ ID NO: 3712687 - RNA, 15 nt, Human
gugugacauuccagg

SEQ ID NO: 3712688 - RNA, 19 nt, Human
gugugacauuuggagaggg

SEQ ID NO: 3712689 - RNA, 21 nt, Human
gugugaccacugcagaagaca

SEQ ID NO: 3712690 - RNA, 14 nt, Human
gugugaccccuccu

SEQ ID NO: 3712691 - RNA, 23 nt, Human
gugugaccccuccuggggccagg

SEQ ID NO: 3712692 - RNA, 21 nt, Human
gugugagaagugaaugcuggg

SEQ ID NO: 3712693 - RNA, 12 nt, Human
gugugagacugg

SEQ ID NO: 3712694 - RNA, 13 nt, Human
gugugaggcagga

SEQ ID NO: 3712695 - RNA, 12 nt, Human
gugugaggccag

SEQ ID NO: 3712696 - RNA, 14 nt, Human
gugugaggccaggg

SEQ ID NO: 3712697 - RNA, 15 nt, Human
gugugaggccagggc

SEQ ID NO: 3712698 - RNA, 17 nt, Human
gugugaggguccugcag

SEQ ID NO: 3712699 - RNA, 17 nt, Human
gugugauauuucagaaa

SEQ ID NO: 3712700 - RNA, 19 nt, Human
gugugaucccaagugccag

SEQ ID NO: 3712701 - RNA, 22 nt, Human
gugugaugaacuuucucuucau

SEQ ID NO: 3712702 - RNA, 16 nt, Human
gugugauugaaucuga

SEQ ID NO: 3712703 - RNA, 16 nt, Human
gugugcaaguauguga

SEQ ID NO: 3712704 - RNA, 22 nt, Human
gugugcacacacaccacacaua

SEQ ID NO: 3712705 - RNA, 23 nt, Human
gugugcacauccgcgugugccug

SEQ ID NO: 3712706 - RNA, 22 nt, Human
gugugcaccuuaccaacuuucu

SEQ ID NO: 3712707 - RNA, 13 nt, Human
gugugcaggagcg

SEQ ID NO: 3712708 - RNA, 12 nt, Human
gugugcauaaua

SEQ ID NO: 3712709 - RNA, 18 nt, Human
gugugcauauuguacacu

SEQ ID NO: 3712710 - RNA, 21 nt, Human
gugugcauauuguacacuuuu

SEQ ID NO: 3712711 - RNA, 22 nt, Human
gugugcauauuguacacuuuuu

SEQ ID NO: 3712712 - RNA, 18 nt, Human
gugugcccagcuuauaaa

SEQ ID NO: 3712713 - RNA, 22 nt, Human
gugugccccccauccuggccca

SEQ ID NO: 3712714 - RNA, 13 nt, Human
gugugcccucugg

SEQ ID NO: 3712715 - RNA, 17 nt, Human
gugugcccucugggcuc

SEQ ID NO: 3712716 - RNA, 21 nt, Human
gugugcccucugggcucugag

SEQ ID NO: 3712717 - RNA, 22 nt, Human
gugugcccucugggcucugagu

SEQ ID NO: 3712718 - RNA, 19 nt, Human
gugugccugacugcccagc

SEQ ID NO: 3712719 - RNA, 20 nt, Human
gugugccugacugcccagca

SEQ ID NO: 3712720 - RNA, 14 nt, Human
gugugccugcagcc

SEQ ID NO: 3712721 - RNA, 13 nt, Human
gugugccugucug

SEQ ID NO: 3712722 - RNA, 14 nt, Human
gugugcguccuguc

SEQ ID NO: 3712723 - RNA, 22 nt, Human
gugugcuaaacguguauguuuu

SEQ ID NO: 3712724 - RNA, 16 nt, Human
gugugcucaggagccc

SEQ ID NO: 3712725 - RNA, 19 nt, Human
gugugcucaggagcccugg

SEQ ID NO: 3712726 - RNA, 16 nt, Human
gugugcucuccauucu

SEQ ID NO: 3712727 - RNA, 15 nt, Human
gugugcucugaucau

SEQ ID NO: 3712728 - RNA, 13 nt, Human
gugugcucuucuu

SEQ ID NO: 3712729 - RNA, 17 nt, Human
gugugcugaugggcgua

SEQ ID NO: 3712730 - RNA, 22 nt, Human
gugugcuuuaugcugaaacaga

SEQ ID NO: 3712731 - RNA, 16 nt, Human
gugugcuuuuuuugug

SEQ ID NO: 3712732 - RNA, 19 nt, Human
guguggaaauuaagaagaa

SEQ ID NO: 3712733 - RNA, 14 nt, Human
guguggacaggacu

SEQ ID NO: 3712734 - RNA, 15 nt, Human
guguggacugugaug

SEQ ID NO: 3712735 - RNA, 16 nt, Human
guguggacugugaugc

SEQ ID NO: 3712736 - RNA, 23 nt, Human
guguggagaagccacaggccuga

SEQ ID NO: 3712737 - RNA, 20 nt, Human
guguggagagggaaugugaa

SEQ ID NO: 3712738 - RNA, 18 nt, Human
guguggauccaauguuag

SEQ ID NO: 3712739 - RNA, 23 nt, Human
guguggauugccucugaaaagug

SEQ ID NO: 3712740 - RNA, 15 nt, Human
guguggcagagagag

SEQ ID NO: 3712741 - RNA, 13 nt, Human
guguggcagcagg

SEQ ID NO: 3712742 - RNA, 14 nt, Human
guguggcagugguu

SEQ ID NO: 3712743 - RNA, 14 nt, Human
guguggcccugcca

SEQ ID NO: 3712744 - RNA, 15 nt, Human
guguggccuguggcu

SEQ ID NO: 3712745 - RNA, 19 nt, Human
guguggcucacguguguga

SEQ ID NO: 3712746 - RNA, 20 nt, Human
guguggcugaggaggccucc

SEQ ID NO: 3712747 - RNA, 16 nt, Human
gugugggaagggagag

SEQ ID NO: 3712748 - RNA, 17 nt, Human
gugugggaguguguaau

SEQ ID NO: 3712749 - RNA, 23 nt, Human
guguggggccaugccuccucagg

SEQ ID NO: 3712750 - RNA, 14 nt, Human
gugugggucugugu

SEQ ID NO: 3712751 - RNA, 14 nt, Human
gugugguacagaga

SEQ ID NO: 3712752 - RNA, 13 nt, Human
gugugguggccuc

SEQ ID NO: 3712753 - RNA, 16 nt, Human
gugugguggccucagc

SEQ ID NO: 3712754 - RNA, 23 nt, Human
gugugguggccucagcugaaugc

SEQ ID NO: 3712755 - RNA, 15 nt, Human
gugugguguuuccug

SEQ ID NO: 3712756 - RNA, 21 nt, Human
gugugguuugguguguucccg

SEQ ID NO: 3712757 - RNA, 12 nt, Human
guguguaaacaa

SEQ ID NO: 3712758 - RNA, 14 nt, Human
guguguaauuuaaa

SEQ ID NO: 3712759 - RNA, 17 nt, Human
guguguagaguuaagaa

SEQ ID NO: 3712760 - RNA, 16 nt, Human
guguguagauaguaug

SEQ ID NO: 3712761 - RNA, 20 nt, Human
guguguaugugcgugugugc

SEQ ID NO: 3712762 - RNA, 12 nt, Human
guguguaugugg

SEQ ID NO: 3712763 - RNA, 15 nt, Human
guguguauguggggg

SEQ ID NO: 3712764 - RNA, 15 nt, Human
guguguauguguauu

SEQ ID NO: 3712765 - RNA, 20 nt, Human
gugugucacccuuaggccag

SEQ ID NO: 3712766 - RNA, 16 nt, Human
gugugucagcugaggc

SEQ ID NO: 3712767 - RNA, 19 nt, Human
guguguccacgacugucuc

SEQ ID NO: 3712768 - RNA, 14 nt, Human
gugugucccaggca

SEQ ID NO: 3712769 - RNA, 10 nt, Human
guguguccuu

SEQ ID NO: 3712770 - RNA, 12 nt, Human
guguguccuugu

SEQ ID NO: 3712771 - RNA, 18 nt, Human
ugcuggaggugggagcag

SEQ ID NO: 3712772 - RNA, 18 nt, Human
ugcuggagucuccugagg

SEQ ID NO: 3712773 - RNA, 20 nt, Human
ugcuggaguuucauguacaa

SEQ ID NO: 3712774 - RNA, 16 nt, Human
ugcuggauauuuucaa

SEQ ID NO: 3712775 - RNA, 20 nt, Human
ugcuggaucucccagggcua

SEQ ID NO: 3712776 - RNA, 19 nt, Human
ugcuggauggagcccaggc

SEQ ID NO: 3712777 - RNA, 20 nt, Human
ugcuggauggagcccaggcg

SEQ ID NO: 3712778 - RNA, 18 nt, Human
ugcuggaugucugccaau

SEQ ID NO: 3712779 - RNA, 18 nt, Human
ugcuggcacauuucccca

SEQ ID NO: 3712780 - RNA, 18 nt, Human
ugcuggccagccuggggc

SEQ ID NO: 3712781 - RNA, 17 nt, Human
ugcuggcccagggccca

SEQ ID NO: 3712782 - RNA, 19 nt, Human
ugcuggcccagggcccaga

SEQ ID NO: 3712783 - RNA, 21 nt, Human
ugcuggcccagggcccagagc

SEQ ID NO: 3712784 - RNA, 16 nt, Human
ugcuggccccagcccu

SEQ ID NO: 3712785 - RNA, 12 nt, Human
ugcuggccccuc

SEQ ID NO: 3712786 - RNA, 22 nt, Human
ugcuggccccucaccugggcac

SEQ ID NO: 3712787 - RNA, 15 nt, Human
ugcuggccgccucac

SEQ ID NO: 3712788 - RNA, 17 nt, Human
ugcuggccgccucaccc

SEQ ID NO: 3712789 - RNA, 15 nt, Human
ugcuggccggacacc

SEQ ID NO: 3712790 - RNA, 16 nt, Human
ugcuggccgggcacag

SEQ ID NO: 3712791 - RNA, 18 nt, Human
ugcuggccgggcacagcu

SEQ ID NO: 3712792 - RNA, 13 nt, Human
ugcuggccucugc

SEQ ID NO: 3712793 - RNA, 16 nt, Human
ugcuggccucugcgag

SEQ ID NO: 3712794 - RNA, 12 nt, Human
ugcuggccugga

SEQ ID NO: 3712795 - RNA, 14 nt, Human
ugcuggccuuugcu

SEQ ID NO: 3712796 - RNA, 14 nt, Human
ugcuggcgccucug

SEQ ID NO: 3712797 - RNA, 13 nt, Human
ugcuggcucuucu

SEQ ID NO: 3712798 - RNA, 14 nt, Human
ugcuggcugcccag

SEQ ID NO: 3712799 - RNA, 18 nt, Human
ugcuggcuguuggcuggg

SEQ ID NO: 3712800 - RNA, 19 nt, Human
ugcuggcuguuggcugggg

SEQ ID NO: 3712801 - RNA, 18 nt, Human
ugcugggacucagccuuc

SEQ ID NO: 3712802 - RNA, 15 nt, Human
ugcugggacugagcc

SEQ ID NO: 3712803 - RNA, 16 nt, Human
ugcugggacugagcca

SEQ ID NO: 3712804 - RNA, 20 nt, Human
ugcugggacugagccagucc

SEQ ID NO: 3712805 - RNA, 15 nt, Human
ugcugggacuggcca

SEQ ID NO: 3712806 - RNA, 17 nt, Human
ugcugggagaggcagcc

SEQ ID NO: 3712807 - RNA, 17 nt, Human
ugcugggagcuccacuc

SEQ ID NO: 3712808 - RNA, 18 nt, Human
ugcugggagcuccacucu

SEQ ID NO: 3712809 - RNA, 21 nt, Human
ugcugggagcuccacucugcu

SEQ ID NO: 3712810 - RNA, 20 nt, Human
ugcugggaggagggagaggg

SEQ ID NO: 3712811 - RNA, 16 nt, Human
ugcugggauggugggc

SEQ ID NO: 3712812 - RNA, 20 nt, Human
ugcugggauggugggcuuca

SEQ ID NO: 3712813 - RNA, 11 nt, Human
ugcugggcagc

SEQ ID NO: 3712814 - RNA, 14 nt, Human
ugcugggccccugc

SEQ ID NO: 3712815 - RNA, 16 nt, Human
ugcugggccccugccu

SEQ ID NO: 3712816 - RNA, 23 nt, Human
ugcugggccccugccucucugca

SEQ ID NO: 3712817 - RNA, 24 nt, Human
ugcugggccccugccucucugcag

SEQ ID NO: 3712818 - RNA, 14 nt, Human
ugcugggcucagug

SEQ ID NO: 3712819 - RNA, 16 nt, Human
ugcugggcucuccacc

SEQ ID NO: 3712820 - RNA, 18 nt, Human
ugcugggcucuccaccuc

SEQ ID NO: 3712821 - RNA, 24 nt, Human
ugcugggcugacggugcagucugg

SEQ ID NO: 3712822 - RNA, 22 nt, Human
ugcuggggaagacaguggcccc

SEQ ID NO: 3712823 - RNA, 22 nt, Human
ugcuggggacggggggccccag

SEQ ID NO: 3712824 - RNA, 17 nt, Human
ugcuggggccucagacg

SEQ ID NO: 3712825 - RNA, 22 nt, Human
ugcugggggaaugagcccagag

SEQ ID NO: 3712826 - RNA, 20 nt, Human
ugcugggggcaacuggccau

SEQ ID NO: 3712827 - RNA, 16 nt, Human
ugcugggggccgcccu

SEQ ID NO: 3712828 - RNA, 20 nt, Human
ugcugggggggauuguaaaa

SEQ ID NO: 3712829 - RNA, 22 nt, Human
ugcuggguccauaucacacaca

SEQ ID NO: 3712830 - RNA, 13 nt, Human
ugcuggguggccc

SEQ ID NO: 3712831 - RNA, 14 nt, Human
ugcuggguggccca

SEQ ID NO: 3712832 - RNA, 21 nt, Human
ugcuggguuggugcacaguga

SEQ ID NO: 3712833 - RNA, 18 nt, Human
ugcugguaaaaugaagaa

SEQ ID NO: 3712834 - RNA, 16 nt, Human
ugcuggucacagccuc

SEQ ID NO: 3712835 - RNA, 17 nt, Human
ugcuggucacagccucc

SEQ ID NO: 3712836 - RNA, 18 nt, Human
ugcuggugagccaagcag

SEQ ID NO: 3712837 - RNA, 13 nt, Human
ugcugguguaugu

SEQ ID NO: 3712838 - RNA, 15 nt, Human
ugcugguguccugac

SEQ ID NO: 3712839 - RNA, 16 nt, Human
ugcugguguccugacc

SEQ ID NO: 3712840 - RNA, 22 nt, Human
ugcugguguccugaccacccuc

SEQ ID NO: 3712841 - RNA, 13 nt, Human
ugcugguugcugu

SEQ ID NO: 3712842 - RNA, 23 nt, Human
ugcugguugucauuuuugcagua

SEQ ID NO: 3712843 - RNA, 15 nt, Human
ugcugguuuuaacaa

SEQ ID NO: 3712844 - RNA, 13 nt, Human
ugcugguuuucua

SEQ ID NO: 3712845 - RNA, 18 nt, Human
ugcugguuuuucaguuuu

SEQ ID NO: 3712846 - RNA, 17 nt, Human
ugcuguaaaaacugugg

SEQ ID NO: 3712847 - RNA, 18 nt, Human
ugcuguaaauuuggcuuc

SEQ ID NO: 3712848 - RNA, 20 nt, Human
ugcuguaaauuuggcuucug

SEQ ID NO: 3712849 - RNA, 15 nt, Human
ugcuguaagaugucu

SEQ ID NO: 3712850 - RNA, 14 nt, Human
ugcuguacaaaagc

SEQ ID NO: 3712851 - RNA, 20 nt, Human
ugcuguacacauauuugaag

SEQ ID NO: 3712852 - RNA, 15 nt, Human
ugcuguacauacuuu

SEQ ID NO: 3712853 - RNA, 17 nt, Human
ugcuguacauacuuuuu

SEQ ID NO: 3712854 - RNA, 14 nt, Human
ugcuguacuagaga

SEQ ID NO: 3712855 - RNA, 17 nt, Human
ugcuguagccuauuuuu

SEQ ID NO: 3712856 - RNA, 13 nt, Human
ugcuguauaaaau

SEQ ID NO: 3712857 - RNA, 20 nt, Human
ugcuguaugcugaucaucgc

SEQ ID NO: 3712858 - RNA, 22 nt, Human
ugcuguaugcugaucaucgcca

SEQ ID NO: 3712859 - RNA, 21 nt, Human
ugcuguauuuuaaaagaauga

SEQ ID NO: 3712860 - RNA, 14 nt, Human
ugcuguauuuucuu

SEQ ID NO: 3712861 - RNA, 18 nt, Human
ugcuguauuuucuuuuua

SEQ ID NO: 3712862 - RNA, 17 nt, Human
ugcugucaccuugcuca

SEQ ID NO: 3712863 - RNA, 22 nt, Human
ugcugucaugaaaucagcaaga

SEQ ID NO: 3712864 - RNA, 15 nt, Human
ugcuguccagacagc

SEQ ID NO: 3712865 - RNA, 20 nt, Human
ugcuguccccuuggcagguc

SEQ ID NO: 3712866 - RNA, 16 nt, Human
ugcugucccucccccu

SEQ ID NO: 3712867 - RNA, 15 nt, Human
ugcugucccuuuucc

SEQ ID NO: 3712868 - RNA, 23 nt, Human
ugcuguccuaggccacaccaucu

SEQ ID NO: 3712869 - RNA, 12 nt, Human
ugcuguccucag

SEQ ID NO: 3712870 - RNA, 19 nt, Human
ugcuguccugaucugugau

SEQ ID NO: 3712871 - RNA, 17 nt, Human
ugcugucuaaccuguga

SEQ ID NO: 3712872 - RNA, 12 nt, Human
ugcugucugcag

SEQ ID NO: 3712873 - RNA, 17 nt, Human
ugcugucugcagccuug

SEQ ID NO: 3712874 - RNA, 13 nt, Human
ugcugucuuaaac

SEQ ID NO: 3712875 - RNA, 23 nt, Human
ugcugucuuuucuuugccaucuc

SEQ ID NO: 3712876 - RNA, 14 nt, Human
ugcugugaaaaaaa

SEQ ID NO: 3712877 - RNA, 18 nt, Human
ugcugugaacccuggggc

SEQ ID NO: 3712878 - RNA, 21 nt, Human
ugcugugaacccuggggccug

SEQ ID NO: 3712879 - RNA, 17 nt, Human
ugcugugaagcuggaac

SEQ ID NO: 3712880 - RNA, 21 nt, Human
ugcugugaauuuguguaagga

SEQ ID NO: 3712881 - RNA, 18 nt, Human
ugcugugaccauuuauaa

SEQ ID NO: 3712882 - RNA, 14 nt, Human
ugcugugaggcugu

SEQ ID NO: 3712883 - RNA, 18 nt, Human
ugcugugaggcuguccug

SEQ ID NO: 3712884 - RNA, 23 nt, Human
ugcugugagggaggggaaaagca

SEQ ID NO: 3712885 - RNA, 12 nt, Human
ugcugugccccu

SEQ ID NO: 3712886 - RNA, 16 nt, Human
ugcugugccccuggcc

SEQ ID NO: 3712887 - RNA, 18 nt, Human
ugcugugcgcccagggcu

SEQ ID NO: 3712888 - RNA, 12 nt, Human
ugcuguggccag

SEQ ID NO: 3712889 - RNA, 15 nt, Human
ugcuguggccaggag

SEQ ID NO: 3712890 - RNA, 14 nt, Human
ugcuguggccaggg

SEQ ID NO: 3712891 - RNA, 17 nt, Human
ugcuguggccaggguga

SEQ ID NO: 3712892 - RNA, 23 nt, Human
ugcuguggccagggugagagcug

SEQ ID NO: 3712893 - RNA, 16 nt, Human
ugcuguggccugggca

SEQ ID NO: 3712894 - RNA, 17 nt, Human
ugcugugggaacgagag

SEQ ID NO: 3712895 - RNA, 22 nt, Human
ugcugugggaacgagaggggaa

SEQ ID NO: 3712896 - RNA, 12 nt, Human
ugcuguguaaag

SEQ ID NO: 3712897 - RNA, 13 nt, Human
ugcuguguaaagu

SEQ ID NO: 3712898 - RNA, 14 nt, Human
ugcuguguaaaguu

SEQ ID NO: 3712899 - RNA, 15 nt, Human
ugcuguguaaaguua

SEQ ID NO: 3712900 - RNA, 19 nt, Human
ugcuguguauaugguauau

SEQ ID NO: 3712901 - RNA, 21 nt, Human
ugcuguguaucugauagcucu

SEQ ID NO: 3712902 - RNA, 15 nt, Human
ugcugugugcuuuuu

SEQ ID NO: 3712903 - RNA, 18 nt, Human
ugcugugugucccaggca

SEQ ID NO: 3712904 - RNA, 23 nt, Human
ugcugugugucccaggcagggag

SEQ ID NO: 3712905 - RNA, 11 nt, Human
ugcuguguuaa

SEQ ID NO: 3712906 - RNA, 18 nt, Human
ugcuguguuaaauaaacc

SEQ ID NO: 3712907 - RNA, 21 nt, Human
ugcuguguuugagcucugcag

SEQ ID NO: 3712908 - RNA, 22 nt, Human
ugcuguuaacugcaaccuuguu

SEQ ID NO: 3712909 - RNA, 15 nt, Human
ugcuguuauauuuca

SEQ ID NO: 3712910 - RNA, 18 nt, Human
ugcuguuauauuucauca

SEQ ID NO: 3712911 - RNA, 21 nt, Human
ugcuguucacuggacacuuca

SEQ ID NO: 3712912 - RNA, 17 nt, Human
ugcuguucaugaaagau

SEQ ID NO: 3712913 - RNA, 14 nt, Human
ugcuguuccagugg

SEQ ID NO: 3712914 - RNA, 22 nt, Human
ugcuguucucuugggaacugaa

SEQ ID NO: 3712915 - RNA, 14 nt, Human
ugcuguugaaagca

SEQ ID NO: 3712916 - RNA, 12 nt, Human
ugcuguugcuua

SEQ ID NO: 3712917 - RNA, 14 nt, Human
ugcuguugcuugaa

SEQ ID NO: 3712918 - RNA, 22 nt, Human
ugcuguugucauugcuuuacug

SEQ ID NO: 3712919 - RNA, 18 nt, Human
ugcuguuguuaugaugug

SEQ ID NO: 3712920 - RNA, 20 nt, Human
ugcuguuguuaugaugugcu

SEQ ID NO: 3712921 - RNA, 16 nt, Human
uggguggacaggggcc

SEQ ID NO: 3712922 - RNA, 23 nt, Human
uggguggagaagccauugucuuc

SEQ ID NO: 3712923 - RNA, 17 nt, Human
uggguggcaccagcagc

SEQ ID NO: 3712924 - RNA, 15 nt, Human
uggguggcccauccc

SEQ ID NO: 3712925 - RNA, 15 nt, Human
uggguggccucggga

SEQ ID NO: 3712926 - RNA, 16 nt, Human
ugggugggcaggaaaa

SEQ ID NO: 3712927 - RNA, 18 nt, Human
ugggugggcaggaaaagg

SEQ ID NO: 3712928 - RNA, 12 nt, Human
uggguggggcug

SEQ ID NO: 3712929 - RNA, 16 nt, Human
ugggugggguauuuuu

SEQ ID NO: 3712930 - RNA, 15 nt, Human
uggguggggugagga

SEQ ID NO: 3712931 - RNA, 13 nt, Human
ugggugguacccu

SEQ ID NO: 3712932 - RNA, 18 nt, Human
ugggugguacccucugga

SEQ ID NO: 3712933 - RNA, 14 nt, Human
ugggugguggaucu

SEQ ID NO: 3712934 - RNA, 15 nt, Human
ugggugguggaucug

SEQ ID NO: 3712935 - RNA, 14 nt, Human
uggguguagccagg

SEQ ID NO: 3712936 - RNA, 22 nt, Human
uggguguauuuauuuuccuccc

SEQ ID NO: 3712937 - RNA, 17 nt, Human
uggguguggucuccacu

SEQ ID NO: 3712938 - RNA, 22 nt, Human
uggguguuaucaccuagcugaa

SEQ ID NO: 3712939 - RNA, 20 nt, Human
uggguguuccuggcaguuua

SEQ ID NO: 3712940 - RNA, 19 nt, Human
uggguuagggaaaacauuc

SEQ ID NO: 3712941 - RNA, 15 nt, Human
uggguuaugaauauu

SEQ ID NO: 3712942 - RNA, 20 nt, Human
uggguucagaaaugcugccu

SEQ ID NO: 3712943 - RNA, 24 nt, Human
uggguucaggggacucagcccuga

SEQ ID NO: 3712944 - RNA, 19 nt, Human
uggguucaugaugcagucu

SEQ ID NO: 3712945 - RNA, 13 nt, Human
uggguuccacaga

SEQ ID NO: 3712946 - RNA, 15 nt, Human
uggguuccacagacg

SEQ ID NO: 3712947 - RNA, 15 nt, Human
uggguuccauucuca

SEQ ID NO: 3712948 - RNA, 21 nt, Human
uggguuccucuuccccacucc

SEQ ID NO: 3712949 - RNA, 22 nt, Human
uggguuccuuccucugagccuu

SEQ ID NO: 3712950 - RNA, 16 nt, Human
uggguucuacccaggu

SEQ ID NO: 3712951 - RNA, 19 nt, Human
uggguucugccugccagcu

SEQ ID NO: 3712952 - RNA, 21 nt, Human
uggguucugccugccagcugc

SEQ ID NO: 3712953 - RNA, 17 nt, Human
uggguucuuuggaagga

SEQ ID NO: 3712954 - RNA, 14 nt, Human
uggguugacuuuca

SEQ ID NO: 3712955 - RNA, 17 nt, Human
uggguuggaaaacagua

SEQ ID NO: 3712956 - RNA, 17 nt, Human
uggguuggcgcacccuc

SEQ ID NO: 3712957 - RNA, 15 nt, Human
uggguugggaucagg

SEQ ID NO: 3712958 - RNA, 16 nt, Human
uggguuucauauuucu

SEQ ID NO: 3712959 - RNA, 18 nt, Human
uggguuuccaacaauuca

SEQ ID NO: 3712960 - RNA, 17 nt, Human
uggguuucuaaagcugc

SEQ ID NO: 3712961 - RNA, 18 nt, Human
uggguuucuaaagcugcc

SEQ ID NO: 3712962 - RNA, 16 nt, Human
uggguuuuaugagaug

SEQ ID NO: 3712963 - RNA, 19 nt, Human
uggguuuucuuaaccaucu

SEQ ID NO: 3712964 - RNA, 21 nt, Human
uggguuuuguauucucugagc

SEQ ID NO: 3712965 - RNA, 16 nt, Human
uggguuuuguucuugu

SEQ ID NO: 3712966 - RNA, 22 nt, Human
uggguuuuuauuuccuaugaug

SEQ ID NO: 3712967 - RNA, 17 nt, Human
uggguuuuuggacuucu

SEQ ID NO: 3712968 - RNA, 19 nt, Human
ugguaaaaugaagaauuua

SEQ ID NO: 3712969 - RNA, 16 nt, Human
ugguaaagacuggcuu

SEQ ID NO: 3712970 - RNA, 17 nt, Human
ugguaaagacuggcuuu

SEQ ID NO: 3712971 - RNA, 15 nt, Human
ugguaaauguuucuu

SEQ ID NO: 3712972 - RNA, 20 nt, Human
ugguaaauuuccccaacagu

SEQ ID NO: 3712973 - RNA, 22 nt, Human
ugguaaauuuccccaacagugu

SEQ ID NO: 3712974 - RNA, 17 nt, Human
ugguaacaguucauguu

SEQ ID NO: 3712975 - RNA, 22 nt, Human
ugguaacugcuuucuguuccaa

SEQ ID NO: 3712976 - RNA, 24 nt, Human
ugguaacuuuugugaauuaggcug

SEQ ID NO: 3712977 - RNA, 12 nt, Human
ugguaagaaaaa

SEQ ID NO: 3712978 - RNA, 13 nt, Human
ugguaagaaaaag

SEQ ID NO: 3712979 - RNA, 17 nt, Human
ugguaagaaaaagcaaa

SEQ ID NO: 3712980 - RNA, 22 nt, Human
ugguaagaaaaagcaaaaggca

SEQ ID NO: 3712981 - RNA, 15 nt, Human
ugguaagagacagaa

SEQ ID NO: 3712982 - RNA, 20 nt, Human
ugguaagcaacauggcuuug

SEQ ID NO: 3712983 - RNA, 15 nt, Human
ugguaagcucuggcu

SEQ ID NO: 3712984 - RNA, 19 nt, Human
ugguaagcuuccaggaaaa

SEQ ID NO: 3712985 - RNA, 13 nt, Human
ugguaagggaaaa

SEQ ID NO: 3712986 - RNA, 14 nt, Human
ugguaaucauauua

SEQ ID NO: 3712987 - RNA, 17 nt, Human
ugguaauguguuuuaga

SEQ ID NO: 3712988 - RNA, 13 nt, Human
ugguaauuguugc

SEQ ID NO: 3712989 - RNA, 15 nt, Human
ugguacaaaaauaaa

SEQ ID NO: 3712990 - RNA, 15 nt, Human
ugguacaacggaggc

SEQ ID NO: 3712991 - RNA, 16 nt, Human
ugguacaacggaggcc

SEQ ID NO: 3712992 - RNA, 16 nt, Human
ugguacagagaagcca

SEQ ID NO: 3712993 - RNA, 18 nt, Human
ugguacagagaagccagc

SEQ ID NO: 3712994 - RNA, 20 nt, Human
ugguacagagaagccagcuu

SEQ ID NO: 3712995 - RNA, 15 nt, Human
ugguacaugguguuu

SEQ ID NO: 3712996 - RNA, 14 nt, Human
ugguaccagauaaa

SEQ ID NO: 3712997 - RNA, 16 nt, Human
ugguaccagcccuggg

SEQ ID NO: 3712998 - RNA, 18 nt, Human
ugguaccagcccuggggc

SEQ ID NO: 3712999 - RNA, 20 nt, Human
ugguaccagcccuggggcug

SEQ ID NO: 3713000 - RNA, 16 nt, Human
ugguacccccuucugg

SEQ ID NO: 3713001 - RNA, 17 nt, Human
ugguacccccuucuggg

SEQ ID NO: 3713002 - RNA, 17 nt, Human
ugguacucccucucagg

SEQ ID NO: 3713003 - RNA, 22 nt, Human
ugguacucccucucaggaucca

SEQ ID NO: 3713004 - RNA, 17 nt, Human
ugguacucuccuagaga

SEQ ID NO: 3713005 - RNA, 16 nt, Human
ugguacucugaaacac

SEQ ID NO: 3713006 - RNA, 17 nt, Human
ugguacugacuuugcuu

SEQ ID NO: 3713007 - RNA, 21 nt, Human
ugguacugacuuugcuugcuu

SEQ ID NO: 3713008 - RNA, 17 nt, Human
ugguacuuuugagugug

SEQ ID NO: 3713009 - RNA, 12 nt, Human
ugguagaaacaa

SEQ ID NO: 3713010 - RNA, 19 nt, Human
ugguagaaguuuggcugcu

SEQ ID NO: 3713011 - RNA, 20 nt, Human
ugguagaauuggagaguaaa

SEQ ID NO: 3713012 - RNA, 17 nt, Human
ugguagaccacugccau

SEQ ID NO: 3713013 - RNA, 23 nt, Human
ugguagaccacugccauaugauu

SEQ ID NO: 3713014 - RNA, 13 nt, Human
ugguagagauuca

SEQ ID NO: 3713015 - RNA, 18 nt, Human
ugguagauuaaauauaga

SEQ ID NO: 3713016 - RNA, 19 nt, Human
ugguagauuaaauauagau

SEQ ID NO: 3713017 - RNA, 17 nt, Human
ugguagcuuuucccuuc

SEQ ID NO: 3713018 - RNA, 21 nt, Human
ugguagcuuuucccuucuuuu

SEQ ID NO: 3713019 - RNA, 18 nt, Human
ugguaggaauagcauguc

SEQ ID NO: 3713020 - RNA, 13 nt, Human
ugguaggguggga

SEQ ID NO: 3713021 - RNA, 21 nt, Human
ugguagguugggacaccaggg

SEQ ID NO: 3713022 - RNA, 19 nt, Human
ugguaguaaaacacagagg

SEQ ID NO: 3713023 - RNA, 17 nt, Human
ugguaguuaguagcaug

SEQ ID NO: 3713024 - RNA, 13 nt, Human
ugguauauauaca

SEQ ID NO: 3713025 - RNA, 18 nt, Human
ugguaucaaaauuacaua

SEQ ID NO: 3713026 - RNA, 22 nt, Human
ugguaucuagacccaucuucuu

SEQ ID NO: 3713027 - RNA, 13 nt, Human
ugguaucucagaa

SEQ ID NO: 3713028 - RNA, 19 nt, Human
ugguaugaacuugaggaca

SEQ ID NO: 3713029 - RNA, 19 nt, Human
ugguauggguuucucccag

SEQ ID NO: 3713030 - RNA, 15 nt, Human
ugguaugugugugua

SEQ ID NO: 3713031 - RNA, 19 nt, Human
ugguauguguguguaugcu

SEQ ID NO: 3713032 - RNA, 21 nt, Human
ugguauguguguguaugcuac

SEQ ID NO: 3713033 - RNA, 13 nt, Human
ugguauguuuuca

SEQ ID NO: 3713034 - RNA, 18 nt, Human
ugguauuacacuguauuu

SEQ ID NO: 3713035 - RNA, 20 nt, Human
ugguauuacacuguauuugu

SEQ ID NO: 3713036 - RNA, 19 nt, Human
ugguauucaggauuacaug

SEQ ID NO: 3713037 - RNA, 23 nt, Human
ugguauuggccauaagcaacaau

SEQ ID NO: 3713038 - RNA, 23 nt, Human
ugguauuguauuuauucaauaaa

SEQ ID NO: 3713039 - RNA, 19 nt, Human
ugguauuuaucuauuguaa

SEQ ID NO: 3713040 - RNA, 22 nt, Human
ugguauuuaucuauuguaagau

SEQ ID NO: 3713041 - RNA, 15 nt, Human
ugguauuugaaacac

SEQ ID NO: 3713042 - RNA, 17 nt, Human
ugguauuuucaauagcc

SEQ ID NO: 3713043 - RNA, 17 nt, Human
uggucaaaagcuggauu

SEQ ID NO: 3713044 - RNA, 18 nt, Human
uggucaacuugagcaugu

SEQ ID NO: 3713045 - RNA, 22 nt, Human
uggucaagauuuugaaugcuuc

SEQ ID NO: 3713046 - RNA, 22 nt, Human
uggucaauccgaaguaugaggg

SEQ ID NO: 3713047 - RNA, 22 nt, Human
uggucacaacuugauggcugcg

SEQ ID NO: 3713048 - RNA, 16 nt, Human
uggucacacacugaug

SEQ ID NO: 3713049 - RNA, 14 nt, Human
uggucacagagaac

SEQ ID NO: 3713050 - RNA, 15 nt, Human
uggucacagcggagg

SEQ ID NO: 3713051 - RNA, 20 nt, Human
uggucacaggacucugccuc

SEQ ID NO: 3713052 - RNA, 23 nt, Human
uggucaccaaaucagcugcuacu

SEQ ID NO: 3713053 - RNA, 22 nt, Human
uggucaccuaggaagccucaga

SEQ ID NO: 3713054 - RNA, 13 nt, Human
uggucacugccau

SEQ ID NO: 3713055 - RNA, 14 nt, Human
uggucacugcuguc

SEQ ID NO: 3713056 - RNA, 15 nt, Human
uggucacuucuucug

SEQ ID NO: 3713057 - RNA, 19 nt, Human
uggucagcucccuucucug

SEQ ID NO: 3713058 - RNA, 13 nt, Human
uggucaggcuggu

SEQ ID NO: 3713059 - RNA, 21 nt, Human
uggucauagcccagaucagcu

SEQ ID NO: 3713060 - RNA, 16 nt, Human
uggucaucuuuuucuc

SEQ ID NO: 3713061 - RNA, 19 nt, Human
uggucaugugggucuucca

SEQ ID NO: 3713062 - RNA, 20 nt, Human
uggucaugugggucuuccag

SEQ ID NO: 3713063 - RNA, 16 nt, Human
ugguccaacugcaacu

SEQ ID NO: 3713064 - RNA, 19 nt, Human
ugguccaauuaguuuccuu

SEQ ID NO: 3713065 - RNA, 21 nt, Human
ugguccacagggcaccugcca

SEQ ID NO: 3713066 - RNA, 17 nt, Human
ugguccagggaagcugg

SEQ ID NO: 3713067 - RNA, 19 nt, Human
ugguccagggaagcuggcc

SEQ ID NO: 3713068 - RNA, 14 nt, Human
ugguccaggguuga

SEQ ID NO: 3713069 - RNA, 16 nt, Human
ugguccauagagagca

SEQ ID NO: 3713070 - RNA, 17 nt, Human
ugguccauggaaugcuu

SEQ ID NO: 3713071 - RNA, 13 nt, Human
uggucccacaucc

SEQ ID NO: 3713072 - RNA, 22 nt, Human
uggucccacaucccugggccug

SEQ ID NO: 3713073 - RNA, 14 nt, Human
uggucccaccccac

SEQ ID NO: 3713074 - RNA, 16 nt, Human
uggucccaccccacac

SEQ ID NO: 3713075 - RNA, 16 nt, Human
uggucccccuuccaug

SEQ ID NO: 3713076 - RNA, 23 nt, Human
uggucccccuuccauggacuuug

SEQ ID NO: 3713077 - RNA, 17 nt, Human
uggucccugcccucauc

SEQ ID NO: 3713078 - RNA, 14 nt, Human
uggucccugggagg

SEQ ID NO: 3713079 - RNA, 19 nt, Human
uggucccugggaggaaauu

SEQ ID NO: 3713080 - RNA, 22 nt, Human
uggucccuuguauccccugcag

SEQ ID NO: 3713081 - RNA, 17 nt, Human
ugguccgugcuaaggac

SEQ ID NO: 3713082 - RNA, 22 nt, Human
ugguccuaaaagcaaaauaaaa

SEQ ID NO: 3713083 - RNA, 19 nt, Human
ugguccuaaucuucugaac

SEQ ID NO: 3713084 - RNA, 17 nt, Human
ugguccuagaggcccuu

SEQ ID NO: 3713085 - RNA, 18 nt, Human
ugguccuaggcuggaagg

SEQ ID NO: 3713086 - RNA, 17 nt, Human
ugguccuaguaagaaga

SEQ ID NO: 3713087 - RNA, 14 nt, Human
ugguccucacacuc

SEQ ID NO: 3713088 - RNA, 20 nt, Human
ugguccucuugccuccugga

SEQ ID NO: 3713089 - RNA, 20 nt, Human
ugguccugaggguccccacc

SEQ ID NO: 3713090 - RNA, 20 nt, Human
ugguccuggaggcucaaauu

SEQ ID NO: 3713091 - RNA, 16 nt, Human
ugguccuggggcucug

SEQ ID NO: 3713092 - RNA, 20 nt, Human
ugguccuguaggaguucuau

SEQ ID NO: 3713093 - RNA, 20 nt, Human
ugguccugugugcagugaag

SEQ ID NO: 3713094 - RNA, 23 nt, Human
ugguccuuccaggcccccaccac

SEQ ID NO: 3713095 - RNA, 14 nt, Human
ugguccuuuacacu

SEQ ID NO: 3713096 - RNA, 21 nt, Human
ugguccuuuacacucaggcuu

SEQ ID NO: 3713097 - RNA, 12 nt, Human
ugguccuuuggg

SEQ ID NO: 3713098 - RNA, 13 nt, Human
uggucgcccagga

SEQ ID NO: 3713099 - RNA, 15 nt, Human
uggucgcccaggaga

SEQ ID NO: 3713100 - RNA, 14 nt, Human
uggucggaaaacau

SEQ ID NO: 3713101 - RNA, 13 nt, Human
uggucguuuuuuu

SEQ ID NO: 3713102 - RNA, 18 nt, Human
uggucuaaguccagucca

SEQ ID NO: 3713103 - RNA, 17 nt, Human
uggucuacacugugcug

SEQ ID NO: 3713104 - RNA, 19 nt, Human
uggucuacacugugcugag

SEQ ID NO: 3713105 - RNA, 19 nt, Human
uggucuauaccuuaagaau

SEQ ID NO: 3713106 - RNA, 18 nt, Human
uggucucaaacuccugac

SEQ ID NO: 3713107 - RNA, 23 nt, Human
uggucucaaacucuugaccucag

SEQ ID NO: 3713108 - RNA, 12 nt, Human
uggucucagaaa

SEQ ID NO: 3713109 - RNA, 12 nt, Human
uggucucaggau

SEQ ID NO: 3713110 - RNA, 20 nt, Human
uggucuccucuuuguuuugu

SEQ ID NO: 3713111 - RNA, 16 nt, Human
uggucuccuuggaaau

SEQ ID NO: 3713112 - RNA, 16 nt, Human
uggucucuaggcuggg

SEQ ID NO: 3713113 - RNA, 19 nt, Human
uggucucuaggcuggggaa

SEQ ID NO: 3713114 - RNA, 15 nt, Human
uggucucugcauuuu

SEQ ID NO: 3713115 - RNA, 19 nt, Human
uggucucugcauuuuucug

SEQ ID NO: 3713116 - RNA, 22 nt, Human
uggucugaauguucugacauua

SEQ ID NO: 3713117 - RNA, 18 nt, Human
uggucugacccacugcuu

SEQ ID NO: 3713118 - RNA, 15 nt, Human
uggucugccaggccc

SEQ ID NO: 3713119 - RNA, 16 nt, Human
uggucuggacugacag

SEQ ID NO: 3713120 - RNA, 21 nt, Human
uggucugggacuuccuugcuc

SEQ ID NO: 3713121 - RNA, 17 nt, Human
uggucugguugggcagc

SEQ ID NO: 3713122 - RNA, 18 nt, Human
uggucuguuggcaggcug

SEQ ID NO: 3713123 - RNA, 20 nt, Human
uggucuuacagcaggcagua

SEQ ID NO: 3713124 - RNA, 13 nt, Human
uggucuuauauuu

SEQ ID NO: 3713125 - RNA, 16 nt, Human
uggucuuauuuguaaa

SEQ ID NO: 3713126 - RNA, 15 nt, Human
uggucuucagccucu

SEQ ID NO: 3713127 - RNA, 14 nt, Human
uggucuuccuuuuu

SEQ ID NO: 3713128 - RNA, 20 nt, Human
uggucuuggcagcaccuguc

SEQ ID NO: 3713129 - RNA, 13 nt, Human
uggucuuguaaga

SEQ ID NO: 3713130 - RNA, 14 nt, Human
uggucuuguaagag

SEQ ID NO: 3713131 - RNA, 14 nt, Human
uggucuuucuggag

SEQ ID NO: 3713132 - RNA, 13 nt, Human
uggucuuuguaag

SEQ ID NO: 3713133 - RNA, 19 nt, Human
uggucuuuuccucgcuucu

SEQ ID NO: 3713134 - RNA, 14 nt, Human
uggucuuuugguua

SEQ ID NO: 3713135 - RNA, 23 nt, Human
uggugaaaagcagguugauaaau

SEQ ID NO: 3713136 - RNA, 14 nt, Human
uggugaacuauauu

SEQ ID NO: 3713137 - RNA, 18 nt, Human
uggugacaucagguuuuu

SEQ ID NO: 3713138 - RNA, 22 nt, Human
uggugaccccuuuucagcuucu

SEQ ID NO: 3713139 - RNA, 15 nt, Human
uggugaccucugccu

SEQ ID NO: 3713140 - RNA, 16 nt, Human
uggugaccucugccug

SEQ ID NO: 3713141 - RNA, 23 nt, Human
uggugacuuccucgccucuccca

SEQ ID NO: 3713142 - RNA, 23 nt, Human
uggugacuuuggauaauaaggaa

SEQ ID NO: 3713143 - RNA, 20 nt, Human
uggugagaaaccuguaucuu

SEQ ID NO: 3713144 - RNA, 22 nt, Human
uggugagaacuacucagggaau

SEQ ID NO: 3713145 - RNA, 14 nt, Human
uggugagaggcauc

SEQ ID NO: 3713146 - RNA, 16 nt, Human
uggugagaugcagcug

SEQ ID NO: 3713147 - RNA, 18 nt, Human
uggugaggcaggcuuugu

SEQ ID NO: 3713148 - RNA, 18 nt, Human
uggugaucaauuaaaugu

SEQ ID NO: 3713149 - RNA, 21 nt, Human
uggugaucucccaagcuaucu

SEQ ID NO: 3713150 - RNA, 14 nt, Human
uggugaugcagucu

SEQ ID NO: 3713151 - RNA, 14 nt, Human
uggugcaaauccua

SEQ ID NO: 3713152 - RNA, 16 nt, Human
uggugcaaguugagga

SEQ ID NO: 3713153 - RNA, 19 nt, Human
uggugcaaugaccuuucaa

SEQ ID NO: 3713154 - RNA, 20 nt, Human
uggugcaaugaccuuucaau

SEQ ID NO: 3713155 - RNA, 23 nt, Human
uggugcagguagaccugucuccu

SEQ ID NO: 3713156 - RNA, 13 nt, Human
uggugcauuacag

SEQ ID NO: 3713157 - RNA, 19 nt, Human
uggugcauuacagagagga

SEQ ID NO: 3713158 - RNA, 16 nt, Human
uggugccauccccagg

SEQ ID NO: 3713159 - RNA, 16 nt, Human
uggugcccugcuuuca

SEQ ID NO: 3713160 - RNA, 22 nt, Human
uggugccuaaaguuuaaccaaa

SEQ ID NO: 3713161 - RNA, 22 nt, Human
uggugccuaguauugacaaaau

SEQ ID NO: 3713162 - RNA, 13 nt, Human
uggugccuccaga

SEQ ID NO: 3713163 - RNA, 12 nt, Human
uggugccuggcc

SEQ ID NO: 3713164 - RNA, 20 nt, Human
uggugccuuuccuguucagc

SEQ ID NO: 3713165 - RNA, 17 nt, Human
uggugcggcuggccaug

SEQ ID NO: 3713166 - RNA, 22 nt, Human
uggugcuauaggcuggagaagc

SEQ ID NO: 3713167 - RNA, 14 nt, Human
uggugcucaguugu

SEQ ID NO: 3713168 - RNA, 16 nt, Human
uggugcucucugccac

SEQ ID NO: 3713169 - RNA, 19 nt, Human
uggugcugcugcugcugug

SEQ ID NO: 3713170 - RNA, 21 nt, Human
uggugcuggauauuuucaaau

SEQ ID NO: 3713171 - RNA, 20 nt, Human
uggugcugggagaggcagcc

SEQ ID NO: 3713172 - RNA, 19 nt, Human
uggugcuuaaguuccagca

SEQ ID NO: 3713173 - RNA, 16 nt, Human
ugguggacaguccugg

SEQ ID NO: 3713174 - RNA, 13 nt, Human
ugguggagggcca

SEQ ID NO: 3713175 - RNA, 14 nt, Human
ugguggauguaaau

SEQ ID NO: 3713176 - RNA, 15 nt, Human
ugguggcacaggccc

SEQ ID NO: 3713177 - RNA, 17 nt, Human
ugguggcagaguccugg

SEQ ID NO: 3713178 - RNA, 19 nt, Human
ugguggcagcucaccucuc

SEQ ID NO: 3713179 - RNA, 15 nt, Human
ugguggcagcugcgg

SEQ ID NO: 3713180 - RNA, 19 nt, Human
ugguggcaguggagguggg

SEQ ID NO: 3713181 - RNA, 20 nt, Human
ugguggccaugcuccucuuc

SEQ ID NO: 3713182 - RNA, 16 nt, Human
ugguggcccucucccc

SEQ ID NO: 3713183 - RNA, 13 nt, Human
ugguggccucagc

SEQ ID NO: 3713184 - RNA, 16 nt, Human
ugguggcgcaagccug

SEQ ID NO: 3713185 - RNA, 21 nt, Human
ugguggcucccggagggcccu

SEQ ID NO: 3713186 - RNA, 13 nt, Human
ugguggcuggguu

SEQ ID NO: 3713187 - RNA, 14 nt, Human
ugguggcuguggaa

SEQ ID NO: 3713188 - RNA, 15 nt, Human
ugguggcuucagcuc

SEQ ID NO: 3713189 - RNA, 16 nt, Human
ugguggcuucagcucc

SEQ ID NO: 3713190 - RNA, 17 nt, Human
ugguggcuucagcucca

SEQ ID NO: 3713191 - RNA, 21 nt, Human
ugguggcuucagcuccagccc

SEQ ID NO: 3713192 - RNA, 21 nt, Human
uggugggaagcgucuguccgu

SEQ ID NO: 3713193 - RNA, 21 nt, Human
uggugggaggggcgcccaccu

SEQ ID NO: 3713194 - RNA, 23 nt, Human
uggugggaggggcgcccaccucc

SEQ ID NO: 3713195 - RNA, 15 nt, Human
uggugggagggggag

SEQ ID NO: 3713196 - RNA, 17 nt, Human
uggugggcaccaagagc

SEQ ID NO: 3713197 - RNA, 23 nt, Human
uggugggccaacaaagaacacua

SEQ ID NO: 3713198 - RNA, 15 nt, Human
ugguggggaggggcg

SEQ ID NO: 3713199 - RNA, 21 nt, Human
ugguggggaggggcgcuggcc

SEQ ID NO: 3713200 - RNA, 22 nt, Human
ugguggggaggggcgcuggccc

SEQ ID NO: 3713201 - RNA, 23 nt, Human
ugguggggaggggcgcuggccca

SEQ ID NO: 3713202 - RNA, 23 nt, Human
uggugggugccuaggccugggca

SEQ ID NO: 3713203 - RNA, 16 nt, Human
uggugguaacccuggu

SEQ ID NO: 3713204 - RNA, 15 nt, Human
ugguggucagcccua

SEQ ID NO: 3713205 - RNA, 14 nt, Human
ugguggucccuggg

SEQ ID NO: 3713206 - RNA, 23 nt, Human
uggugguugggacccaguggcag

SEQ ID NO: 3713207 - RNA, 18 nt, Human
uggugguuucagaaaugu

SEQ ID NO: 3713208 - RNA, 13 nt, Human
ugguguaauuuau

SEQ ID NO: 3713209 - RNA, 16 nt, Human
ugguguagcuacagag

SEQ ID NO: 3713210 - RNA, 23 nt, Human
ugguguauccccccccuguauag

SEQ ID NO: 3713211 - RNA, 15 nt, Human
uggugucaccccaga

SEQ ID NO: 3713212 - RNA, 16 nt, Human
uggugucaccugaaga

SEQ ID NO: 3713213 - RNA, 20 nt, Human
uggugucacugucccuccug

SEQ ID NO: 3713214 - RNA, 21 nt, Human
uggugucacugucccuccugg

SEQ ID NO: 3713215 - RNA, 16 nt, Human
uggugucacuuacugu

SEQ ID NO: 3713216 - RNA, 18 nt, Human
uggugucacuuacuguuu

SEQ ID NO: 3713217 - RNA, 20 nt, Human
uggugucacuuacuguuucu

SEQ ID NO: 3713218 - RNA, 13 nt, Human
ugguguccaccug

SEQ ID NO: 3713219 - RNA, 19 nt, Human
ugcuguuuguuugacaaag

SEQ ID NO: 3713220 - RNA, 17 nt, Human
ugcuguuuuccucccuu

SEQ ID NO: 3713221 - RNA, 22 nt, Human
ugcuguuuuccucccuucugcu

SEQ ID NO: 3713222 - RNA, 18 nt, Human
ugcuguuuugauuuguac

SEQ ID NO: 3713223 - RNA, 12 nt, Human
ugcuguuuuguu

SEQ ID NO: 3713224 - RNA, 18 nt, Human
ugcuguuuuguuauauaa

SEQ ID NO: 3713225 - RNA, 18 nt, Human
ugcuguuuuguucugugg

SEQ ID NO: 3713226 - RNA, 15 nt, Human
ugcuuaaaauaagca

SEQ ID NO: 3713227 - RNA, 18 nt, Human
ugcuuaaagaauucaaau

SEQ ID NO: 3713228 - RNA, 15 nt, Human
ugcuuaaaugugaau

SEQ ID NO: 3713229 - RNA, 20 nt, Human
ugcuuaaaugugaauuacua

SEQ ID NO: 3713230 - RNA, 16 nt, Human
ugcuuaaauuuuaacu

SEQ ID NO: 3713231 - RNA, 22 nt, Human
ugcuuaacagggaacgugauua

SEQ ID NO: 3713232 - RNA, 13 nt, Human
ugcuuaaguucca

SEQ ID NO: 3713233 - RNA, 15 nt, Human
ugcuuaauaaauugu

SEQ ID NO: 3713234 - RNA, 12 nt, Human
ugcuuaaugaaa

SEQ ID NO: 3713235 - RNA, 18 nt, Human
ugcuuaauucaaauaaua

SEQ ID NO: 3713236 - RNA, 16 nt, Human
ugcuuacacaucucag

SEQ ID NO: 3713237 - RNA, 20 nt, Human
ugcuuacacaucucagaccc

SEQ ID NO: 3713238 - RNA, 17 nt, Human
ugcuuacauuuuuacaa

SEQ ID NO: 3713239 - RNA, 20 nt, Human
ugcuuacauuuuuacaauaa

SEQ ID NO: 3713240 - RNA, 20 nt, Human
ugcuuaccuugguuggaagg

SEQ ID NO: 3713241 - RNA, 14 nt, Human
ugcuuacugauaua

SEQ ID NO: 3713242 - RNA, 22 nt, Human
ugcuuacugauauauuuuacaa

SEQ ID NO: 3713243 - RNA, 22 nt, Human
ugcuuacuuuggaauacauuuc

SEQ ID NO: 3713244 - RNA, 16 nt, Human
ugcuuagagacuauca

SEQ ID NO: 3713245 - RNA, 18 nt, Human
ugcuuagccuccugaccu

SEQ ID NO: 3713246 - RNA, 15 nt, Human
ugcuuaguaaugcua

SEQ ID NO: 3713247 - RNA, 15 nt, Human
ugcuuagucacugcc

SEQ ID NO: 3713248 - RNA, 16 nt, Human
ugcuuagucacugccu

SEQ ID NO: 3713249 - RNA, 20 nt, Human
ugcuuaguguacuuggagua

SEQ ID NO: 3713250 - RNA, 22 nt, Human
ugcuuaugcaguuuuucagagu

SEQ ID NO: 3713251 - RNA, 18 nt, Human
ugcuuaugcucuuaauug

SEQ ID NO: 3713252 - RNA, 22 nt, Human
ugcuuauuccaugacugcuugc

SEQ ID NO: 3713253 - RNA, 14 nt, Human
ugcuuauugcuuag

SEQ ID NO: 3713254 - RNA, 16 nt, Human
ugcuuauuguuccaag

SEQ ID NO: 3713255 - RNA, 17 nt, Human
ugcuuauuguuccaaga

SEQ ID NO: 3713256 - RNA, 21 nt, Human
ugcuuauuguuccaagacauu

SEQ ID NO: 3713257 - RNA, 23 nt, Human
ugcuuauuguuccaagacauugu

SEQ ID NO: 3713258 - RNA, 16 nt, Human
ugcuucaaggauccug

SEQ ID NO: 3713259 - RNA, 19 nt, Human
ugcuucaaggauccugagc

SEQ ID NO: 3713260 - RNA, 20 nt, Human
ugcuucaaggauccugagcc

SEQ ID NO: 3713261 - RNA, 13 nt, Human
ugcuucaauaguu

SEQ ID NO: 3713262 - RNA, 22 nt, Human
ugcuucaauaguucaaggaacu

SEQ ID NO: 3713263 - RNA, 16 nt, Human
ugcuucaauuaauaaa

SEQ ID NO: 3713264 - RNA, 14 nt, Human
ugcuucacaauguu

SEQ ID NO: 3713265 - RNA, 19 nt, Human
ugcuucagauguggagcca

SEQ ID NO: 3713266 - RNA, 21 nt, Human
ugcuucagauguggagccagg

SEQ ID NO: 3713267 - RNA, 12 nt, Human
ugcuucagccug

SEQ ID NO: 3713268 - RNA, 14 nt, Human
ugcuucagccugag

SEQ ID NO: 3713269 - RNA, 15 nt, Human
ugcuucagccugagg

SEQ ID NO: 3713270 - RNA, 16 nt, Human
ugcuucaugaaaaucc

SEQ ID NO: 3713271 - RNA, 15 nt, Human
ugcuucauucaauau

SEQ ID NO: 3713272 - RNA, 11 nt, Human
ugcuuccaccu

SEQ ID NO: 3713273 - RNA, 14 nt, Human
ugcuuccaccucac

SEQ ID NO: 3713274 - RNA, 15 nt, Human
ugcuuccaccucacc

SEQ ID NO: 3713275 - RNA, 18 nt, Human
ugcuuccaccucacccca

SEQ ID NO: 3713276 - RNA, 16 nt, Human
ugcuuccaggaaacuc

SEQ ID NO: 3713277 - RNA, 19 nt, Human
ugcuuccaggaaacuccac

SEQ ID NO: 3713278 - RNA, 23 nt, Human
ugcuuccagugaggcucugcccu

SEQ ID NO: 3713279 - RNA, 12 nt, Human
ugcuuccagugu

SEQ ID NO: 3713280 - RNA, 22 nt, Human
ugcuuccauggccguguagaag

SEQ ID NO: 3713281 - RNA, 14 nt, Human
ugcuucccauccua

SEQ ID NO: 3713282 - RNA, 20 nt, Human
ugcuucccauuguggcuccu

SEQ ID NO: 3713283 - RNA, 22 nt, Human
ugcuuccuagaaguuacugaau

SEQ ID NO: 3713284 - RNA, 14 nt, Human
ugcuuccuccugga

SEQ ID NO: 3713285 - RNA, 15 nt, Human
ugcuuccuccuggaa

SEQ ID NO: 3713286 - RNA, 13 nt, Human
ugcuucgggcccu

SEQ ID NO: 3713287 - RNA, 12 nt, Human
ugcuucucacug

SEQ ID NO: 3713288 - RNA, 21 nt, Human
ugcuucuccaaaaaucugccu

SEQ ID NO: 3713289 - RNA, 24 nt, Human
ugcuucuccaaaaaucugccuggg

SEQ ID NO: 3713290 - RNA, 20 nt, Human
ugcuucucccaggcaaggcu

SEQ ID NO: 3713291 - RNA, 13 nt, Human
ugcuucuccccag

SEQ ID NO: 3713292 - RNA, 15 nt, Human
ugcuucuccccagaa

SEQ ID NO: 3713293 - RNA, 19 nt, Human
ugcuucuccccagaauuca

SEQ ID NO: 3713294 - RNA, 10 nt, Human
ugcuucucua

SEQ ID NO: 3713295 - RNA, 14 nt, Human
ugcuucucuacaga

SEQ ID NO: 3713296 - RNA, 21 nt, Human
ugcuucucuagcucucuaggc

SEQ ID NO: 3713297 - RNA, 14 nt, Human
ugcuucucugacuu

SEQ ID NO: 3713298 - RNA, 17 nt, Human
ugcuucucugacuucug

SEQ ID NO: 3713299 - RNA, 12 nt, Human
ugcuucugccac

SEQ ID NO: 3713300 - RNA, 21 nt, Human
ugcuucuucuccuauguguaa

SEQ ID NO: 3713301 - RNA, 15 nt, Human
ugcuucuugugaagg

SEQ ID NO: 3713302 - RNA, 17 nt, Human
ugcuucuuucauuuucu

SEQ ID NO: 3713303 - RNA, 14 nt, Human
ugcuucuuucuaga

SEQ ID NO: 3713304 - RNA, 15 nt, Human
ugcuucuuucuagaa

SEQ ID NO: 3713305 - RNA, 14 nt, Human
ugcuugaacacagu

SEQ ID NO: 3713306 - RNA, 16 nt, Human
ugcuugaacacaguau

SEQ ID NO: 3713307 - RNA, 17 nt, Human
ugcuugaacuuacaggu

SEQ ID NO: 3713308 - RNA, 19 nt, Human
ugcuugaagcaaacaguug

SEQ ID NO: 3713309 - RNA, 20 nt, Human
ugcuugaagcaaacaguuga

SEQ ID NO: 3713310 - RNA, 19 nt, Human
ugcuugaaggcccugcuga

SEQ ID NO: 3713311 - RNA, 15 nt, Human
ugcuugaauaaacac

SEQ ID NO: 3713312 - RNA, 16 nt, Human
ugcuugacaacaucug

SEQ ID NO: 3713313 - RNA, 13 nt, Human
ugcuugagcccag

SEQ ID NO: 3713314 - RNA, 14 nt, Human
ugcuugagcccagg

SEQ ID NO: 3713315 - RNA, 18 nt, Human
ugcuugagcucaggaguu

SEQ ID NO: 3713316 - RNA, 18 nt, Human
ugcuugauagaaaugcca

SEQ ID NO: 3713317 - RNA, 16 nt, Human
ugcuugauauuuucua

SEQ ID NO: 3713318 - RNA, 17 nt, Human
ugcuugaugaagcaagg

SEQ ID NO: 3713319 - RNA, 18 nt, Human
ugcuugaugaagcaagga

SEQ ID NO: 3713320 - RNA, 19 nt, Human
ugcuugaugaagcaaggaa

SEQ ID NO: 3713321 - RNA, 20 nt, Human
ugcuugaugaagcaaggaag

SEQ ID NO: 3713322 - RNA, 22 nt, Human
ugcuugaugggauucuggacag

SEQ ID NO: 3713323 - RNA, 15 nt, Human
ugcuugcaguagauu

SEQ ID NO: 3713324 - RNA, 17 nt, Human
ugcuugcaguagauuuu

SEQ ID NO: 3713325 - RNA, 14 nt, Human
ugcuugccaaagua

SEQ ID NO: 3713326 - RNA, 15 nt, Human
ugcuugccaucccuc

SEQ ID NO: 3713327 - RNA, 20 nt, Human
ugcuugcccuaagcagaaag

SEQ ID NO: 3713328 - RNA, 20 nt, Human
ugcuugccgaaacuggaagu

SEQ ID NO: 3713329 - RNA, 15 nt, Human
ugcuugccugauaua

SEQ ID NO: 3713330 - RNA, 18 nt, Human
ugcuugcggcaaaaggaa

SEQ ID NO: 3713331 - RNA, 15 nt, Human
ugcuugcuuugaagu

SEQ ID NO: 3713332 - RNA, 23 nt, Human
ugcuugcuuuucaugcaaacucu

SEQ ID NO: 3713333 - RNA, 22 nt, Human
ugcuuggaacauacuguucacu

SEQ ID NO: 3713334 - RNA, 15 nt, Human
ugcuuggaggaagga

SEQ ID NO: 3713335 - RNA, 21 nt, Human
ugcuuggaggaaggaaaccca

SEQ ID NO: 3713336 - RNA, 12 nt, Human
ugcuuggcccag

SEQ ID NO: 3713337 - RNA, 13 nt, Human
ugcuuggcccagg

SEQ ID NO: 3713338 - RNA, 15 nt, Human
ugcuuggcccagggg

SEQ ID NO: 3713339 - RNA, 19 nt, Human
ugcuuggccuugggcuuca

SEQ ID NO: 3713340 - RNA, 21 nt, Human
ugcuuggggggugaugagggc

SEQ ID NO: 3713341 - RNA, 15 nt, Human
ugcuuggguggagaa

SEQ ID NO: 3713342 - RNA, 17 nt, Human
ugcuuggguggagaagc

SEQ ID NO: 3713343 - RNA, 18 nt, Human
ugcuuggguggagaagcc

SEQ ID NO: 3713344 - RNA, 22 nt, Human
ugcuuggguggagaagccauug

SEQ ID NO: 3713345 - RNA, 15 nt, Human
ugcuuggucuguuug

SEQ ID NO: 3713346 - RNA, 19 nt, Human
ugcuuguaacaagaaaaca

SEQ ID NO: 3713347 - RNA, 23 nt, Human
ugcuuguaacaagaaaacauaag

SEQ ID NO: 3713348 - RNA, 19 nt, Human
ugcuuguacacucauucau

SEQ ID NO: 3713349 - RNA, 12 nt, Human
ugcuuguacaua

SEQ ID NO: 3713350 - RNA, 22 nt, Human
ugcuugucuucugguacuuucu

SEQ ID NO: 3713351 - RNA, 14 nt, Human
ugcuuguuaacuga

SEQ ID NO: 3713352 - RNA, 16 nt, Human
ugcuuguuaacugagu

SEQ ID NO: 3713353 - RNA, 16 nt, Human
ugcuuguucccucucc

SEQ ID NO: 3713354 - RNA, 19 nt, Human
ugcuuguucccucucccug

SEQ ID NO: 3713355 - RNA, 15 nt, Human
ugcuuguugggauuc

SEQ ID NO: 3713356 - RNA, 14 nt, Human
ugcuuguuuccuag

SEQ ID NO: 3713357 - RNA, 23 nt, Human
ugcuuguuugcucaccuggggug

SEQ ID NO: 3713358 - RNA, 21 nt, Human
ugcuuuaaccaccccaucugc

SEQ ID NO: 3713359 - RNA, 13 nt, Human
ugcuuuaauauaa

SEQ ID NO: 3713360 - RNA, 18 nt, Human
ugcuuuaauaucaucagu

SEQ ID NO: 3713361 - RNA, 15 nt, Human
ugcuuuaauuuuagc

SEQ ID NO: 3713362 - RNA, 17 nt, Human
ugcuuuaccaaacagca

SEQ ID NO: 3713363 - RNA, 21 nt, Human
ugcuuuagacuugaaaagaga

SEQ ID NO: 3713364 - RNA, 14 nt, Human
ugcuuuauaaauaa

SEQ ID NO: 3713365 - RNA, 15 nt, Human
ugcuuuauuaauguu

SEQ ID NO: 3713366 - RNA, 17 nt, Human
ugcuuuauuaauguuuu

SEQ ID NO: 3713367 - RNA, 16 nt, Human
ugcuuuauugcuuuuu

SEQ ID NO: 3713368 - RNA, 14 nt, Human
ugcuuuauuuguaa

SEQ ID NO: 3713369 - RNA, 21 nt, Human
ugcuuucagauacuggauugu

SEQ ID NO: 3713370 - RNA, 15 nt, Human
gugugucuguucacu

SEQ ID NO: 3713371 - RNA, 22 nt, Human
gugugucuguucacuuuuccuc

SEQ ID NO: 3713372 - RNA, 21 nt, Human
gugugucuuaauuauuauuug

SEQ ID NO: 3713373 - RNA, 14 nt, Human
gugugugaaaggaa

SEQ ID NO: 3713374 - RNA, 15 nt, Human
gugugugaugugaca

SEQ ID NO: 3713375 - RNA, 14 nt, Human
gugugugcccucug

SEQ ID NO: 3713376 - RNA, 21 nt, Human
gugugugcccucugggcucug

SEQ ID NO: 3713377 - RNA, 17 nt, Human
gugugugcucugcuuca

SEQ ID NO: 3713378 - RNA, 15 nt, Human
guguguguauauaua

SEQ ID NO: 3713379 - RNA, 12 nt, Human
guguguguaugu

SEQ ID NO: 3713380 - RNA, 17 nt, Human
guguguguauguuugca

SEQ ID NO: 3713381 - RNA, 9 nt, Human
gugugugug

SEQ ID NO: 3713382 - RNA, 13 nt, Human
guguguguguggc

SEQ ID NO: 3713383 - RNA, 16 nt, Human
guguguguguguaugu

SEQ ID NO: 3713384 - RNA, 13 nt, Human
gugugugugugug

SEQ ID NO: 3713385 - RNA, 14 nt, Human
gugugugugugugu

SEQ ID NO: 3713386 - RNA, 15 nt, Human
gugugugugugugua

SEQ ID NO: 3713387 - RNA, 17 nt, Human
guguguguugugugugg

SEQ ID NO: 3713388 - RNA, 15 nt, Human
guguguuacaaugua

SEQ ID NO: 3713389 - RNA, 17 nt, Human
guguguugauacuguug

SEQ ID NO: 3713390 - RNA, 19 nt, Human
guguguugauacuguugca

SEQ ID NO: 3713391 - RNA, 15 nt, Human
guguguuuaaauaaa

SEQ ID NO: 3713392 - RNA, 16 nt, Human
guguguuuaaauaaag

SEQ ID NO: 3713393 - RNA, 19 nt, Human
guguguuuaaauaaaguau

SEQ ID NO: 3713394 - RNA, 16 nt, Human
guguguuuaugugugu

SEQ ID NO: 3713395 - RNA, 14 nt, Human
guguguuucacuuu

SEQ ID NO: 3713396 - RNA, 15 nt, Human
guguguuucugaucu

SEQ ID NO: 3713397 - RNA, 19 nt, Human
guguguuuuaaaaugagaa

SEQ ID NO: 3713398 - RNA, 21 nt, Human
guguguuuugagaguauauua

SEQ ID NO: 3713399 - RNA, 15 nt, Human
guguguuuuucuauu

SEQ ID NO: 3713400 - RNA, 21 nt, Human
guguguuuuucuauuaaaaga

SEQ ID NO: 3713401 - RNA, 22 nt, Human
guguuaacagaagggagggcag

SEQ ID NO: 3713402 - RNA, 14 nt, Human
guguuaacauucca

SEQ ID NO: 3713403 - RNA, 15 nt, Human
guguuaagcucugcu

SEQ ID NO: 3713404 - RNA, 18 nt, Human
guguuaaucaauuuaaac

SEQ ID NO: 3713405 - RNA, 16 nt, Human
guguuaaucauuucau

SEQ ID NO: 3713406 - RNA, 15 nt, Human
guguuaauuuuugau

SEQ ID NO: 3713407 - RNA, 16 nt, Human
guguuaccugaaaaca

SEQ ID NO: 3713408 - RNA, 16 nt, Human
guguuagggaagggcc

SEQ ID NO: 3713409 - RNA, 23 nt, Human
guguuagggaagggccugccaca

SEQ ID NO: 3713410 - RNA, 15 nt, Human
guguuaguggcaccg

SEQ ID NO: 3713411 - RNA, 14 nt, Human
guguuauaugaaca

SEQ ID NO: 3713412 - RNA, 18 nt, Human
guguuaugacuccagaau

SEQ ID NO: 3713413 - RNA, 15 nt, Human
guguuaugagccagg

SEQ ID NO: 3713414 - RNA, 22 nt, Human
guguuauugagagagaugugua

SEQ ID NO: 3713415 - RNA, 17 nt, Human
guguuauuuaaaugagu

SEQ ID NO: 3713416 - RNA, 20 nt, Human
guguuauuuucauucaaagu

SEQ ID NO: 3713417 - RNA, 23 nt, Human
guguuauuuuguuuuuccuucca

SEQ ID NO: 3713418 - RNA, 16 nt, Human
guguucaauauuuucu

SEQ ID NO: 3713419 - RNA, 17 nt, Human
guguucccauuucagcu

SEQ ID NO: 3713420 - RNA, 17 nt, Human
guguuccccacuguauc

SEQ ID NO: 3713421 - RNA, 19 nt, Human
guguuccccaucugggucc

SEQ ID NO: 3713422 - RNA, 18 nt, Human
guguuccuggcaauagug

SEQ ID NO: 3713423 - RNA, 19 nt, Human
guguuccuggcaguuuaaa

SEQ ID NO: 3713424 - RNA, 15 nt, Human
guguucguucuuguu

SEQ ID NO: 3713425 - RNA, 13 nt, Human
guguucuaagaug

SEQ ID NO: 3713426 - RNA, 13 nt, Human
guguucucagagg

SEQ ID NO: 3713427 - RNA, 15 nt, Human
guguucuccugcugc

SEQ ID NO: 3713428 - RNA, 18 nt, Human
guguucuggugaggccuu

SEQ ID NO: 3713429 - RNA, 19 nt, Human
guguucuguuacaaaaugu

SEQ ID NO: 3713430 - RNA, 14 nt, Human
guguucuguuuguu

SEQ ID NO: 3713431 - RNA, 17 nt, Human
guguucuguuuguuaaa

SEQ ID NO: 3713432 - RNA, 16 nt, Human
guguugaaaauguuca

SEQ ID NO: 3713433 - RNA, 23 nt, Human
guguugaaacggaugauuucuau

SEQ ID NO: 3713434 - RNA, 18 nt, Human
guguugacuuuauaaauu

SEQ ID NO: 3713435 - RNA, 15 nt, Human
guguugauacuguug

SEQ ID NO: 3713436 - RNA, 20 nt, Human
guguugauacuguugcacgu

SEQ ID NO: 3713437 - RNA, 21 nt, Human
guguugauacuguugcacgug

SEQ ID NO: 3713438 - RNA, 15 nt, Human
guguugaucccaaga

SEQ ID NO: 3713439 - RNA, 19 nt, Human
guguugauuuucuguugua

SEQ ID NO: 3713440 - RNA, 19 nt, Human
guguugccaaauauguccu

SEQ ID NO: 3713441 - RNA, 18 nt, Human
guguugccacaggacaca

SEQ ID NO: 3713442 - RNA, 19 nt, Human
guguuggacaaaugugaag

SEQ ID NO: 3713443 - RNA, 21 nt, Human
guguuggcuaaugaagggaaa

SEQ ID NO: 3713444 - RNA, 14 nt, Human
guguugggagggau

SEQ ID NO: 3713445 - RNA, 20 nt, Human
guguuguaauucuucaguug

SEQ ID NO: 3713446 - RNA, 19 nt, Human
guguuguacucaauuuuaa

SEQ ID NO: 3713447 - RNA, 18 nt, Human
guguuguauuaacaaaag

SEQ ID NO: 3713448 - RNA, 15 nt, Human
guguugucauuguaa

SEQ ID NO: 3713449 - RNA, 21 nt, Human
guguugucauuguaaacaaac

SEQ ID NO: 3713450 - RNA, 14 nt, Human
guguugucccuucu

SEQ ID NO: 3713451 - RNA, 18 nt, Human
guguugucuugaaagauu

SEQ ID NO: 3713452 - RNA, 16 nt, Human
guguugugcuuucaag

SEQ ID NO: 3713453 - RNA, 15 nt, Human
guguuguguguggga

SEQ ID NO: 3713454 - RNA, 15 nt, Human
guguuguugcuucuu

SEQ ID NO: 3713455 - RNA, 12 nt, Human
guguuuaaaaaa

SEQ ID NO: 3713456 - RNA, 12 nt, Human
guguuuaaaacu

SEQ ID NO: 3713457 - RNA, 11 nt, Human
guguuuaaaua

SEQ ID NO: 3713458 - RNA, 23 nt, Human
guguuuaacggcacuguggccuu

SEQ ID NO: 3713459 - RNA, 17 nt, Human
guguuuaucagaaaggg

SEQ ID NO: 3713460 - RNA, 17 nt, Human
guguuuauccuuucaua

SEQ ID NO: 3713461 - RNA, 18 nt, Human
guguuuaugugcuauuaa

SEQ ID NO: 3713462 - RNA, 13 nt, Human
guguuuauuuaua

SEQ ID NO: 3713463 - RNA, 13 nt, Human
guguuucacaguu

SEQ ID NO: 3713464 - RNA, 21 nt, Human
guguuucacaguuugaaauaa

SEQ ID NO: 3713465 - RNA, 18 nt, Human
guguuucacuuuuaggga

SEQ ID NO: 3713466 - RNA, 17 nt, Human
guguuucauccuuccca

SEQ ID NO: 3713467 - RNA, 18 nt, Human
guguuuccacagccugca

SEQ ID NO: 3713468 - RNA, 14 nt, Human
guguuuccaucuca

SEQ ID NO: 3713469 - RNA, 19 nt, Human
guguuucuagcacuggccu

SEQ ID NO: 3713470 - RNA, 22 nt, Human
guguuucuagcacuggccugca

SEQ ID NO: 3713471 - RNA, 19 nt, Human
guguuucuaugaguggaaa

SEQ ID NO: 3713472 - RNA, 12 nt, Human
guguuucugggg

SEQ ID NO: 3713473 - RNA, 20 nt, Human
guguuucuguccuguaacug

SEQ ID NO: 3713474 - RNA, 15 nt, Human
guguuucuguuauua

SEQ ID NO: 3713475 - RNA, 15 nt, Human
guguuucuugccuca

SEQ ID NO: 3713476 - RNA, 22 nt, Human
guguuugcacguuaugguguuu

SEQ ID NO: 3713477 - RNA, 20 nt, Human
guguuugcagccugcucuag

SEQ ID NO: 3713478 - RNA, 21 nt, Human
guguuugggucaccccuccag

SEQ ID NO: 3713479 - RNA, 14 nt, Human
guguuugguuuaca

SEQ ID NO: 3713480 - RNA, 16 nt, Human
guguuugguuuacauu

SEQ ID NO: 3713481 - RNA, 15 nt, Human
guguuugucucuucu

SEQ ID NO: 3713482 - RNA, 12 nt, Human
guguuuguguga

SEQ ID NO: 3713483 - RNA, 13 nt, Human
guguuuuaauuua

SEQ ID NO: 3713484 - RNA, 13 nt, Human
guguuuucauaau

SEQ ID NO: 3713485 - RNA, 16 nt, Human
guguuuucauaauaaa

SEQ ID NO: 3713486 - RNA, 19 nt, Human
guguuuucugaauaacauu

SEQ ID NO: 3713487 - RNA, 14 nt, Human
guguuuucugugua

SEQ ID NO: 3713488 - RNA, 20 nt, Human
guguuuugaaagaauagaac

SEQ ID NO: 3713489 - RNA, 15 nt, Human
guguuuuuaacucaa

SEQ ID NO: 3713490 - RNA, 17 nt, Human
guguuuuuagcugugac

SEQ ID NO: 3713491 - RNA, 19 nt, Human
guguuuuucuauuaaaaga

SEQ ID NO: 3713492 - RNA, 23 nt, Human
guguuuuucuauuaaaagacuca

SEQ ID NO: 3713493 - RNA, 14 nt, Human
guguuuuucuccag

SEQ ID NO: 3713494 - RNA, 15 nt, Human
guguuuuuuaagaua

SEQ ID NO: 3713495 - RNA, 21 nt, Human
guguuuuuuaagauaguguaa

SEQ ID NO: 3713496 - RNA, 17 nt, Human
guguuuuuuuauuucua

SEQ ID NO: 3713497 - RNA, 19 nt, Human
guuaaaaaaaaaaaaagga

SEQ ID NO: 3713498 - RNA, 23 nt, Human
guuaaaaaaaaaaaaaggaaaaa

SEQ ID NO: 3713499 - RNA, 20 nt, Human
guuaaaaaaaggcauuguuu

SEQ ID NO: 3713500 - RNA, 14 nt, Human
guuaaaaauaaggu

SEQ ID NO: 3713501 - RNA, 14 nt, Human
guuaaaagaugaaa

SEQ ID NO: 3713502 - RNA, 22 nt, Human
guuaaaauaccagccaguaaau

SEQ ID NO: 3713503 - RNA, 12 nt, Human
guuaaaaugugu

SEQ ID NO: 3713504 - RNA, 18 nt, Human
guuaaaccaugggauaaa

SEQ ID NO: 3713505 - RNA, 15 nt, Human
guuaaacuagcauau

SEQ ID NO: 3713506 - RNA, 20 nt, Human
guuaaacuagcauaucugcc

SEQ ID NO: 3713507 - RNA, 21 nt, Human
guuaaacuguuagcacuguug

SEQ ID NO: 3713508 - RNA, 15 nt, Human
guuaaagagaaugag

SEQ ID NO: 3713509 - RNA, 16 nt, Human
guuaaagggaagaaaa

SEQ ID NO: 3713510 - RNA, 21 nt, Human
guuaaagggauauuuuuuucu

SEQ ID NO: 3713511 - RNA, 13 nt, Human
guuaaauaaauug

SEQ ID NO: 3713512 - RNA, 19 nt, Human
guuaaauaaauuguauauu

SEQ ID NO: 3713513 - RNA, 16 nt, Human
guuaaauauuuacaua

SEQ ID NO: 3713514 - RNA, 17 nt, Human
guuaaaugaaauuguaa

SEQ ID NO: 3713515 - RNA, 12 nt, Human
guuaaauguaga

SEQ ID NO: 3713516 - RNA, 16 nt, Human
guuaaauuuguaaguu

SEQ ID NO: 3713517 - RNA, 18 nt, Human
guuaaauuuguaaguuuc

SEQ ID NO: 3713518 - RNA, 13 nt, Human
guuaacacauuuu

SEQ ID NO: 3713519 - RNA, 16 nt, Human
guuaacacauuuugua

SEQ ID NO: 3713520 - RNA, 23 nt, Human
guuaacacauuuuguauaauugu

SEQ ID NO: 3713521 - RNA, 20 nt, Human
ugcuuucagauuaaaauugu

SEQ ID NO: 3713522 - RNA, 14 nt, Human
ugcuuuccagcuca

SEQ ID NO: 3713523 - RNA, 21 nt, Human
ugcuuuccauauuuuuuuccu

SEQ ID NO: 3713524 - RNA, 18 nt, Human
ugcuuuccauucgugaaa

SEQ ID NO: 3713525 - RNA, 15 nt, Human
ugcuuuccccugugg

SEQ ID NO: 3713526 - RNA, 20 nt, Human
ugcuuuccccuguggggauc

SEQ ID NO: 3713527 - RNA, 20 nt, Human
ugcuuucgucuccagccccu

SEQ ID NO: 3713528 - RNA, 20 nt, Human
ugcuuucuccuuuaauugua

SEQ ID NO: 3713529 - RNA, 13 nt, Human
ugcuuucugaaau

SEQ ID NO: 3713530 - RNA, 14 nt, Human
ugcuuucugaacuc

SEQ ID NO: 3713531 - RNA, 23 nt, Human
ugcuuucugaagcuuuaccagcu

SEQ ID NO: 3713532 - RNA, 19 nt, Human
ugcuuucugauguugccuu

SEQ ID NO: 3713533 - RNA, 13 nt, Human
ugcuuucugcuca

SEQ ID NO: 3713534 - RNA, 14 nt, Human
ugcuuucugcucag

SEQ ID NO: 3713535 - RNA, 19 nt, Human
ugcuuucugcucagcuucu

SEQ ID NO: 3713536 - RNA, 22 nt, Human
ugcuuucuguuccaaauucagu

SEQ ID NO: 3713537 - RNA, 23 nt, Human
ugcuuucuguugucauugcuguu

SEQ ID NO: 3713538 - RNA, 22 nt, Human
ugcuuugaaaaaguuaaugcuu

SEQ ID NO: 3713539 - RNA, 22 nt, Human
ugcuuugaaagccccagaaauc

SEQ ID NO: 3713540 - RNA, 23 nt, Human
ugcuuugaaauugaaccuuugug

SEQ ID NO: 3713541 - RNA, 15 nt, Human
ugcuuugaagcaguu

SEQ ID NO: 3713542 - RNA, 18 nt, Human
ugcuuugaauaaaugugu

SEQ ID NO: 3713543 - RNA, 12 nt, Human
ugcuuugauaua

SEQ ID NO: 3713544 - RNA, 22 nt, Human
ugcuuugauuuacagcaaguag

SEQ ID NO: 3713545 - RNA, 12 nt, Human
ugcuuugcauuu

SEQ ID NO: 3713546 - RNA, 15 nt, Human
ugcuuugccccugag

SEQ ID NO: 3713547 - RNA, 22 nt, Human
ugcuuugcccuucuuucuaccc

SEQ ID NO: 3713548 - RNA, 13 nt, Human
ugcuuugcucuug

SEQ ID NO: 3713549 - RNA, 18 nt, Human
ugcuuugcuuugucugga

SEQ ID NO: 3713550 - RNA, 20 nt, Human
ugcuuuggaaaacccagaua

SEQ ID NO: 3713551 - RNA, 13 nt, Human
ugcuuuggaaauc

SEQ ID NO: 3713552 - RNA, 21 nt, Human
ugcuuuggaccuaaauggccu

SEQ ID NO: 3713553 - RNA, 14 nt, Human
ugcuuugggcugcc

SEQ ID NO: 3713554 - RNA, 15 nt, Human
ugcuuugggcugccc

SEQ ID NO: 3713555 - RNA, 18 nt, Human
ugcuuugggcugcccugg

SEQ ID NO: 3713556 - RNA, 16 nt, Human
ugcuuuggucauauga

SEQ ID NO: 3713557 - RNA, 16 nt, Human
ugcuuuguagaguuuu

SEQ ID NO: 3713558 - RNA, 17 nt, Human
ugcuuugucuccucuau

SEQ ID NO: 3713559 - RNA, 14 nt, Human
ugcuuugugaacaa

SEQ ID NO: 3713560 - RNA, 14 nt, Human
ugcuuugugauuuu

SEQ ID NO: 3713561 - RNA, 17 nt, Human
ugcuuugugugauugaa

SEQ ID NO: 3713562 - RNA, 22 nt, Human
ugcuuuguuaaaaaaaaaaaga

SEQ ID NO: 3713563 - RNA, 20 nt, Human
ugcuuuguuaccuuaaaacu

SEQ ID NO: 3713564 - RNA, 14 nt, Human
ugcuuuuaaaacua

SEQ ID NO: 3713565 - RNA, 16 nt, Human
ugcuuuuaauuaaaua

SEQ ID NO: 3713566 - RNA, 19 nt, Human
ugcuuuuagugugugcaua

SEQ ID NO: 3713567 - RNA, 14 nt, Human
ugcuuuuauuuuga

SEQ ID NO: 3713568 - RNA, 18 nt, Human
ugcuuuucacugcugcaa

SEQ ID NO: 3713569 - RNA, 20 nt, Human
ugcuuuucaugcaaacucuu

SEQ ID NO: 3713570 - RNA, 12 nt, Human
ugcuuuucucca

SEQ ID NO: 3713571 - RNA, 20 nt, Human
ugcuuuucuccaauaucagu

SEQ ID NO: 3713572 - RNA, 23 nt, Human
ugcuuuucuccaauaucagugcu

SEQ ID NO: 3713573 - RNA, 16 nt, Human
ugcuuuucugcccugg

SEQ ID NO: 3713574 - RNA, 17 nt, Human
ugcuuuuggucugugug

SEQ ID NO: 3713575 - RNA, 23 nt, Human
ugcuuuuguuccaaugucaaugu

SEQ ID NO: 3713576 - RNA, 22 nt, Human
ugcuuuuucuuguuuguuuaaa

SEQ ID NO: 3713577 - RNA, 17 nt, Human
ugcuuuuugagguggca

SEQ ID NO: 3713578 - RNA, 15 nt, Human
ugcuuuuuuuggccu

SEQ ID NO: 3713579 - RNA, 22 nt, Human
ugcuuuuuuuuuuccagcaagu

SEQ ID NO: 3713580 - RNA, 20 nt, Human
uggaaaaaccacccccaaau

SEQ ID NO: 3713581 - RNA, 17 nt, Human
uggaaaaagugauggag

SEQ ID NO: 3713582 - RNA, 12 nt, Human
uggaaaaauaaa

SEQ ID NO: 3713583 - RNA, 19 nt, Human
uggaaaaauccagaaagaa

SEQ ID NO: 3713584 - RNA, 13 nt, Human
uggaaaaaugcca

SEQ ID NO: 3713585 - RNA, 19 nt, Human
uggaaaaaugccaucaaau

SEQ ID NO: 3713586 - RNA, 16 nt, Human
uggaaaacagaacacu

SEQ ID NO: 3713587 - RNA, 19 nt, Human
uggaaaacagaacacuuau

SEQ ID NO: 3713588 - RNA, 20 nt, Human
uggaaaacagaacacuuaug

SEQ ID NO: 3713589 - RNA, 16 nt, Human
uggaaaacuuaguuug

SEQ ID NO: 3713590 - RNA, 14 nt, Human
uggaaaagaauaaa

SEQ ID NO: 3713591 - RNA, 18 nt, Human
uggaaaaggaagacuaga

SEQ ID NO: 3713592 - RNA, 22 nt, Human
uggaaaagggucuugggaaaua

SEQ ID NO: 3713593 - RNA, 11 nt, Human
uggaaaauaaa

SEQ ID NO: 3713594 - RNA, 13 nt, Human
uggaaacaaagug

SEQ ID NO: 3713595 - RNA, 14 nt, Human
uggaaacaaagugg

SEQ ID NO: 3713596 - RNA, 23 nt, Human
uggaaacaaaguggaaggaaaga

SEQ ID NO: 3713597 - RNA, 24 nt, Human
uggaaacaaaguggaaggaaagau

SEQ ID NO: 3713598 - RNA, 17 nt, Human
uggaaacaagucaguca

SEQ ID NO: 3713599 - RNA, 13 nt, Human
uggaaacacuaaa

SEQ ID NO: 3713600 - RNA, 16 nt, Human
uggaaacacuaaaugu

SEQ ID NO: 3713601 - RNA, 18 nt, Human
uggaaacacuaaauguua

SEQ ID NO: 3713602 - RNA, 22 nt, Human
uggaaacacuaaauguuaaaga

SEQ ID NO: 3713603 - RNA, 18 nt, Human
uggaaacagaggaccagc

SEQ ID NO: 3713604 - RNA, 20 nt, Human
uggaaacagaggaccagcac

SEQ ID NO: 3713605 - RNA, 17 nt, Human
uggaaacagcucgacuu

SEQ ID NO: 3713606 - RNA, 18 nt, Human
uggaaacauucaggagcu

SEQ ID NO: 3713607 - RNA, 12 nt, Human
uggaaaccacag

SEQ ID NO: 3713608 - RNA, 17 nt, Human
uggaaaccucuacauau

SEQ ID NO: 3713609 - RNA, 19 nt, Human
uggaaaccugcccugccug

SEQ ID NO: 3713610 - RNA, 20 nt, Human
uggaaaccugcccugccuga

SEQ ID NO: 3713611 - RNA, 21 nt, Human
uggaaaccugcccugccugag

SEQ ID NO: 3713612 - RNA, 24 nt, Human
uggaaaccugcccugccugagggc

SEQ ID NO: 3713613 - RNA, 16 nt, Human
uggaaacuaauaaaau

SEQ ID NO: 3713614 - RNA, 14 nt, Human
uggaaacugaaugc

SEQ ID NO: 3713615 - RNA, 14 nt, Human
uggaaacuuuucuu

SEQ ID NO: 3713616 - RNA, 19 nt, Human
uggaaagacagcuucucau

SEQ ID NO: 3713617 - RNA, 20 nt, Human
uggaaagaguaggaagacuu

SEQ ID NO: 3713618 - RNA, 23 nt, Human
uggaaagauaacuaggaaaucca

SEQ ID NO: 3713619 - RNA, 15 nt, Human
uggaaagcaaagggc

SEQ ID NO: 3713620 - RNA, 15 nt, Human
uggaaagccucugcu

SEQ ID NO: 3713621 - RNA, 18 nt, Human
uggaaagccucugcugcc

SEQ ID NO: 3713622 - RNA, 12 nt, Human
uggaaaggaaug

SEQ ID NO: 3713623 - RNA, 19 nt, Human
uggaaaggagaggaaagaa

SEQ ID NO: 3713624 - RNA, 21 nt, Human
uggaaaggcucagucucagga

SEQ ID NO: 3713625 - RNA, 14 nt, Human
uggaaaggggagag

SEQ ID NO: 3713626 - RNA, 17 nt, Human
uggaaaggggagagccu

SEQ ID NO: 3713627 - RNA, 23 nt, Human
uggaaaggggagagccugcuggc

SEQ ID NO: 3713628 - RNA, 18 nt, Human
uggaaaggggggagcugg

SEQ ID NO: 3713629 - RNA, 19 nt, Human
uggaaaggugugagacugg

SEQ ID NO: 3713630 - RNA, 19 nt, Human
uggaaaguacacucugcug

SEQ ID NO: 3713631 - RNA, 12 nt, Human
uggaaagucaga

SEQ ID NO: 3713632 - RNA, 16 nt, Human
uggaaagugaauuuga

SEQ ID NO: 3713633 - RNA, 20 nt, Human
uggaaagugaauuugaauga

SEQ ID NO: 3713634 - RNA, 16 nt, Human
uggaaauaaagucaga

SEQ ID NO: 3713635 - RNA, 18 nt, Human
uggaaauaaaucuuccua

SEQ ID NO: 3713636 - RNA, 15 nt, Human
uggaaauaaauguau

SEQ ID NO: 3713637 - RNA, 18 nt, Human
uggaaauacaguuguugg

SEQ ID NO: 3713638 - RNA, 22 nt, Human
uggaaauacaguuguuggccuc

SEQ ID NO: 3713639 - RNA, 15 nt, Human
uggaaauacuagauu

SEQ ID NO: 3713640 - RNA, 16 nt, Human
uggaaauagugauuuc

SEQ ID NO: 3713641 - RNA, 14 nt, Human
uggaaauauauauu

SEQ ID NO: 3713642 - RNA, 22 nt, Human
uggaaauaucaguuacucagcc

SEQ ID NO: 3713643 - RNA, 18 nt, Human
uggaaaucaaauguaaag

SEQ ID NO: 3713644 - RNA, 19 nt, Human
uggaaaucaaauguaaagu

SEQ ID NO: 3713645 - RNA, 23 nt, Human
uggaaaugggcagagcagagacc

SEQ ID NO: 3713646 - RNA, 22 nt, Human
uggaaauuagguugaaacauau

SEQ ID NO: 3713647 - RNA, 13 nt, Human
uggaaauuccugu

SEQ ID NO: 3713648 - RNA, 17 nt, Human
uggaaauuggaagagca

SEQ ID NO: 3713649 - RNA, 21 nt, Human
uggaaauuuaaagcagguucu

SEQ ID NO: 3713650 - RNA, 22 nt, Human
uggaaauuuaaagcagguucuu

SEQ ID NO: 3713651 - RNA, 23 nt, Human
uggaaauuuguuauaaugaauga

SEQ ID NO: 3713652 - RNA, 16 nt, Human
uggaacaaagugaagg

SEQ ID NO: 3713653 - RNA, 19 nt, Human
uggaacacaaacacauugu

SEQ ID NO: 3713654 - RNA, 20 nt, Human
uggaacacuagacaagccag

SEQ ID NO: 3713655 - RNA, 13 nt, Human
uggaacacuucga

SEQ ID NO: 3713656 - RNA, 12 nt, Human
uggaacagugcu

SEQ ID NO: 3713657 - RNA, 21 nt, Human
uggaacauaaaauacaauguu

SEQ ID NO: 3713658 - RNA, 23 nt, Human
uggaacaucaucaaggcacugcc

SEQ ID NO: 3713659 - RNA, 17 nt, Human
uggaacauuggaauguu

SEQ ID NO: 3713660 - RNA, 17 nt, Human
uggaaccacauugaaga

SEQ ID NO: 3713661 - RNA, 16 nt, Human
uggaacccagacucag

SEQ ID NO: 3713662 - RNA, 16 nt, Human
uggaaccgcaggaagc

SEQ ID NO: 3713663 - RNA, 18 nt, Human
uggaaccguugccaaccg

SEQ ID NO: 3713664 - RNA, 16 nt, Human
uggaaccucagccugg

SEQ ID NO: 3713665 - RNA, 23 nt, Human
uggaaccucagccuggccagaca

SEQ ID NO: 3713666 - RNA, 15 nt, Human
uggaaccuccuuucu

SEQ ID NO: 3713667 - RNA, 21 nt, Human
uggaaccuccuuucucuucuc

SEQ ID NO: 3713668 - RNA, 13 nt, Human
uggaaccucuguc

SEQ ID NO: 3713669 - RNA, 13 nt, Human
uggaaccuugcug

SEQ ID NO: 3713670 - RNA, 20 nt, Human
guuaacaucaugaauuuauu

SEQ ID NO: 3713671 - RNA, 16 nt, Human
guuaacauggacauga

SEQ ID NO: 3713672 - RNA, 15 nt, Human
guuaacauugaccaa

SEQ ID NO: 3713673 - RNA, 13 nt, Human
guuaacauuguug

SEQ ID NO: 3713674 - RNA, 17 nt, Human
guuaacuauugcauuua

SEQ ID NO: 3713675 - RNA, 20 nt, Human
guuaacugaauaccacucug

SEQ ID NO: 3713676 - RNA, 23 nt, Human
guuaacugaauaccacucuguaa

SEQ ID NO: 3713677 - RNA, 17 nt, Human
guuaacugauuugcaau

SEQ ID NO: 3713678 - RNA, 17 nt, Human
guuaacuuuaagacuga

SEQ ID NO: 3713679 - RNA, 23 nt, Human
guuaacuuuaagacugagcaccu

SEQ ID NO: 3713680 - RNA, 15 nt, Human
guuaagaaaauaaau

SEQ ID NO: 3713681 - RNA, 13 nt, Human
guuaagaagcugu

SEQ ID NO: 3713682 - RNA, 20 nt, Human
guuaagaagcuguuguacau

SEQ ID NO: 3713683 - RNA, 18 nt, Human
guuaagacaaacugcaua

SEQ ID NO: 3713684 - RNA, 13 nt, Human
guuaagaccuggc

SEQ ID NO: 3713685 - RNA, 16 nt, Human
guuaagaccuggcagc

SEQ ID NO: 3713686 - RNA, 14 nt, Human
guuaagagaaacuu

SEQ ID NO: 3713687 - RNA, 18 nt, Human
guuaagagaaaugagcuu

SEQ ID NO: 3713688 - RNA, 21 nt, Human
guuaagagaggucuggaaagu

SEQ ID NO: 3713689 - RNA, 22 nt, Human
guuaagagugggggagagcagg

SEQ ID NO: 3713690 - RNA, 15 nt, Human
guuaagauaugaugu

SEQ ID NO: 3713691 - RNA, 14 nt, Human
guuaagcagccgcc

SEQ ID NO: 3713692 - RNA, 20 nt, Human
guuaagcauuaccacucagg

SEQ ID NO: 3713693 - RNA, 14 nt, Human
guuaagcccuggca

SEQ ID NO: 3713694 - RNA, 14 nt, Human
guuaaggaaacucu

SEQ ID NO: 3713695 - RNA, 22 nt, Human
guuaaggagaaucauguuucuu

SEQ ID NO: 3713696 - RNA, 17 nt, Human
guuaaggcugaggaaag

SEQ ID NO: 3713697 - RNA, 17 nt, Human
guuaaguccucccugac

SEQ ID NO: 3713698 - RNA, 14 nt, Human
guuaaguucuauug

SEQ ID NO: 3713699 - RNA, 22 nt, Human
guuaaguuuuucccuucaucug

SEQ ID NO: 3713700 - RNA, 15 nt, Human
guuaauaaauuaaaa

SEQ ID NO: 3713701 - RNA, 14 nt, Human
guuaauacaaggua

SEQ ID NO: 3713702 - RNA, 13 nt, Human
guuaauaccagcu

SEQ ID NO: 3713703 - RNA, 18 nt, Human
guuaauaucacucauuaa

SEQ ID NO: 3713704 - RNA, 14 nt, Human
guuaauauggcuga

SEQ ID NO: 3713705 - RNA, 21 nt, Human
guuaauauugauuuauuaaua

SEQ ID NO: 3713706 - RNA, 19 nt, Human
guuaauauuuauaggucac

SEQ ID NO: 3713707 - RNA, 12 nt, Human
guuaaucaauuu

SEQ ID NO: 3713708 - RNA, 18 nt, Human
guuaaucauuagguguga

SEQ ID NO: 3713709 - RNA, 22 nt, Human
guuaaucucuguuauguacugu

SEQ ID NO: 3713710 - RNA, 12 nt, Human
guuaaucuuagg

SEQ ID NO: 3713711 - RNA, 16 nt, Human
guuaaucuugcuuucu

SEQ ID NO: 3713712 - RNA, 17 nt, Human
guuaaugaaaaugucag

SEQ ID NO: 3713713 - RNA, 22 nt, Human
guuaaugaugguugauggguuc

SEQ ID NO: 3713714 - RNA, 13 nt, Human
guuaaugcuuucu

SEQ ID NO: 3713715 - RNA, 15 nt, Human
guuaaugcuuucuga

SEQ ID NO: 3713716 - RNA, 20 nt, Human
guuaauguaaucugauggcu

SEQ ID NO: 3713717 - RNA, 17 nt, Human
guuaauguauauaaaaa

SEQ ID NO: 3713718 - RNA, 11 nt, Human
guuaauguauu

SEQ ID NO: 3713719 - RNA, 22 nt, Human
guuaauguauuuguucauguuu

SEQ ID NO: 3713720 - RNA, 15 nt, Human
guuaauguuauauca

SEQ ID NO: 3713721 - RNA, 19 nt, Human
guuaauuccaauuauauga

SEQ ID NO: 3713722 - RNA, 12 nt, Human
guuaauuuaagu

SEQ ID NO: 3713723 - RNA, 19 nt, Human
guuaauuuagaaaacuuua

SEQ ID NO: 3713724 - RNA, 22 nt, Human
guuaauuuaguggaaaaggcac

SEQ ID NO: 3713725 - RNA, 12 nt, Human
guuaauuuggac

SEQ ID NO: 3713726 - RNA, 17 nt, Human
guuaauuuggaccauuu

SEQ ID NO: 3713727 - RNA, 20 nt, Human
guuaauuuggaccauuuucc

SEQ ID NO: 3713728 - RNA, 18 nt, Human
guuaauuuuuugguacaa

SEQ ID NO: 3713729 - RNA, 14 nt, Human
guuacaaaauguaa

SEQ ID NO: 3713730 - RNA, 18 nt, Human
guuacaaaauguaacugu

SEQ ID NO: 3713731 - RNA, 13 nt, Human
guuacaaacugca

SEQ ID NO: 3713732 - RNA, 21 nt, Human
guuacaaacugcaauagagac

SEQ ID NO: 3713733 - RNA, 15 nt, Human
guuacaaauuauaau

SEQ ID NO: 3713734 - RNA, 13 nt, Human
guuacaacagauu

SEQ ID NO: 3713735 - RNA, 20 nt, Human
guuacaacagauuugugaac

SEQ ID NO: 3713736 - RNA, 13 nt, Human
guuacaaguauac

SEQ ID NO: 3713737 - RNA, 21 nt, Human
guuacacacuuuuuaagaaau

SEQ ID NO: 3713738 - RNA, 21 nt, Human
guuacacagaaaugcugcugg

SEQ ID NO: 3713739 - RNA, 22 nt, Human
guuacacagaaaugcugcuggc

SEQ ID NO: 3713740 - RNA, 14 nt, Human
guuacacuguuaga

SEQ ID NO: 3713741 - RNA, 19 nt, Human
guuacacuguuagaacacu

SEQ ID NO: 3713742 - RNA, 13 nt, Human
guuacagaaagug

SEQ ID NO: 3713743 - RNA, 22 nt, Human
guuacagaaaguggugcucagu

SEQ ID NO: 3713744 - RNA, 13 nt, Human
guuacagaagccc

SEQ ID NO: 3713745 - RNA, 13 nt, Human
guuacagaagcug

SEQ ID NO: 3713746 - RNA, 17 nt, Human
guuacagacaaagcgug

SEQ ID NO: 3713747 - RNA, 15 nt, Human
guuacagcacaaaau

SEQ ID NO: 3713748 - RNA, 23 nt, Human
guuacagccaagugccaaaugcu

SEQ ID NO: 3713749 - RNA, 12 nt, Human
guuacagccugg

SEQ ID NO: 3713750 - RNA, 19 nt, Human
uaugaagauaaguguauuu

SEQ ID NO: 3713751 - RNA, 24 nt, Human
uaugaagcucaccuguugcuuaca

SEQ ID NO: 3713752 - RNA, 22 nt, Human
uaugaagcuuuuaugugaaaca

SEQ ID NO: 3713753 - RNA, 21 nt, Human
uaugaaguuuaaaacaguauu

SEQ ID NO: 3713754 - RNA, 20 nt, Human
uaugaauacagcagcaagaa

SEQ ID NO: 3713755 - RNA, 15 nt, Human
uaugaaucuaugcca

SEQ ID NO: 3713756 - RNA, 22 nt, Human
uaugaaucuaugccaaagauca

SEQ ID NO: 3713757 - RNA, 18 nt, Human
uaugaaucuauuauacug

SEQ ID NO: 3713758 - RNA, 21 nt, Human
uaugaaucucuacgcaaaaaa

SEQ ID NO: 3713759 - RNA, 15 nt, Human
uaugaaucugagaga

SEQ ID NO: 3713760 - RNA, 21 nt, Human
uaugaaugcccccagcuggcc

SEQ ID NO: 3713761 - RNA, 22 nt, Human
uaugaaugggcaaaacugaauu

SEQ ID NO: 3713762 - RNA, 20 nt, Human
uaugaauguacugcauguua

SEQ ID NO: 3713763 - RNA, 19 nt, Human
uaugaauuauucaauuuau

SEQ ID NO: 3713764 - RNA, 22 nt, Human
uaugaauuguacagaauauuuc

SEQ ID NO: 3713765 - RNA, 21 nt, Human
uaugaauuuaaauauaauucu

SEQ ID NO: 3713766 - RNA, 13 nt, Human
uaugacaaauguu

SEQ ID NO: 3713767 - RNA, 14 nt, Human
uaugacaaauguuu

SEQ ID NO: 3713768 - RNA, 16 nt, Human
uaugacaaauguuucu

SEQ ID NO: 3713769 - RNA, 17 nt, Human
uaugacaaauguuucua

SEQ ID NO: 3713770 - RNA, 12 nt, Human
uaugacacaugc

SEQ ID NO: 3713771 - RNA, 22 nt, Human
uaugacacaugcaaggucauuu

SEQ ID NO: 3713772 - RNA, 19 nt, Human
uaugacauaaaaacaacuu

SEQ ID NO: 3713773 - RNA, 23 nt, Human
uaugacaucacuuguacaaaaua

SEQ ID NO: 3713774 - RNA, 14 nt, Human
uaugaccacacucc

SEQ ID NO: 3713775 - RNA, 17 nt, Human
uaugacgcugauacaua

SEQ ID NO: 3713776 - RNA, 20 nt, Human
uaugacggaagaacauagaa

SEQ ID NO: 3713777 - RNA, 16 nt, Human
uaugacuaaagagaga

SEQ ID NO: 3713778 - RNA, 18 nt, Human
uaugacuaaagagagaau

SEQ ID NO: 3713779 - RNA, 16 nt, Human
uaugacuccagaauuu

SEQ ID NO: 3713780 - RNA, 23 nt, Human
uaugacuccagaauuucccaaag

SEQ ID NO: 3713781 - RNA, 17 nt, Human
uaugacugcuucaugac

SEQ ID NO: 3713782 - RNA, 23 nt, Human
uaugacugcuucaugacauuccu

SEQ ID NO: 3713783 - RNA, 20 nt, Human
uaugacuucauuaauaauaa

SEQ ID NO: 3713784 - RNA, 23 nt, Human
uaugacuugggcacccccagccu

SEQ ID NO: 3713785 - RNA, 15 nt, Human
uaugagacacaggau

SEQ ID NO: 3713786 - RNA, 13 nt, Human
uaugagcagaagg

SEQ ID NO: 3713787 - RNA, 15 nt, Human
uaugagcagaaggaa

SEQ ID NO: 3713788 - RNA, 17 nt, Human
uaugagcauccugagcc

SEQ ID NO: 3713789 - RNA, 16 nt, Human
uaugagccagacaaau

SEQ ID NO: 3713790 - RNA, 17 nt, Human
uaugagccagacaaaug

SEQ ID NO: 3713791 - RNA, 19 nt, Human
uaugagccagacaaaugga

SEQ ID NO: 3713792 - RNA, 17 nt, Human
uaugagcucauguagca

SEQ ID NO: 3713793 - RNA, 16 nt, Human
uaugagcugagggggg

SEQ ID NO: 3713794 - RNA, 21 nt, Human
uaugagcuuccuucugugaaa

SEQ ID NO: 3713795 - RNA, 16 nt, Human
uaugagcuuuauguaa

SEQ ID NO: 3713796 - RNA, 14 nt, Human
uaugaggaggggag

SEQ ID NO: 3713797 - RNA, 21 nt, Human
uaugaggcauuuguuugaacu

SEQ ID NO: 3713798 - RNA, 20 nt, Human
uaugaguacaaaugccuuaa

SEQ ID NO: 3713799 - RNA, 15 nt, Human
uaugaguauacaaua

SEQ ID NO: 3713800 - RNA, 23 nt, Human
uaugagucaaugugcaguguagc

SEQ ID NO: 3713801 - RNA, 14 nt, Human
uaugagucuagaug

SEQ ID NO: 3713802 - RNA, 23 nt, Human
uaugauacuucgacacuguucuu

SEQ ID NO: 3713803 - RNA, 20 nt, Human
uaugauagcgggaaaaggag

SEQ ID NO: 3713804 - RNA, 15 nt, Human
uaugauauuuucugu

SEQ ID NO: 3713805 - RNA, 22 nt, Human
uaugauauuuuuuuaagucuuu

SEQ ID NO: 3713806 - RNA, 14 nt, Human
uaugaucaaauguu

SEQ ID NO: 3713807 - RNA, 17 nt, Human
uaugaucaguguuguug

SEQ ID NO: 3713808 - RNA, 11 nt, Human
uaugauccagc

SEQ ID NO: 3713809 - RNA, 16 nt, Human
uaugaucugucugugg

SEQ ID NO: 3713810 - RNA, 22 nt, Human
uaugaugaugaaaauuuuacca

SEQ ID NO: 3713811 - RNA, 21 nt, Human
uaugauggaagacaggaaagu

SEQ ID NO: 3713812 - RNA, 21 nt, Human
uaugauggguguuuuuagcag

SEQ ID NO: 3713813 - RNA, 16 nt, Human
uaugaugguuuuaaac

SEQ ID NO: 3713814 - RNA, 14 nt, Human
uaugaugugcuuaa

SEQ ID NO: 3713815 - RNA, 18 nt, Human
uaugaugugggucaagga

SEQ ID NO: 3713816 - RNA, 14 nt, Human
uaugauguuaaaaa

SEQ ID NO: 3713817 - RNA, 18 nt, Human
uaugauguuaaaaaaaua

SEQ ID NO: 3713818 - RNA, 17 nt, Human
uaugauuaaaaauauca

SEQ ID NO: 3713819 - RNA, 21 nt, Human
uaugauuaaguaaugauaacu

SEQ ID NO: 3713820 - RNA, 15 nt, Human
uaugauuacuggccu

SEQ ID NO: 3713821 - RNA, 21 nt, Human
uaugauucagauuguuaucua

SEQ ID NO: 3713822 - RNA, 14 nt, Human
uaugauuuaauaaa

SEQ ID NO: 3713823 - RNA, 17 nt, Human
uaugauuuaauaaaaua

SEQ ID NO: 3713824 - RNA, 17 nt, Human
uaugauuuaauuugaaa

SEQ ID NO: 3713825 - RNA, 17 nt, Human
uaugauuuggaaaauaa

SEQ ID NO: 3713826 - RNA, 21 nt, Human
uaugauuuuuuaaaagaaauu

SEQ ID NO: 3713827 - RNA, 17 nt, Human
uaugauuuuuuuuucau

SEQ ID NO: 3713828 - RNA, 13 nt, Human
uaugcaaaaugga

SEQ ID NO: 3713829 - RNA, 13 nt, Human
uaugcaaagucua

SEQ ID NO: 3713830 - RNA, 20 nt, Human
uaugcaaauauuuuuuugua

SEQ ID NO: 3713831 - RNA, 14 nt, Human
uaugcaaauuccca

SEQ ID NO: 3713832 - RNA, 13 nt, Human
uaugcaagcaguu

SEQ ID NO: 3713833 - RNA, 23 nt, Human
uaugcaagcaguuucaauaaagu

SEQ ID NO: 3713834 - RNA, 14 nt, Human
uaugcacacacaua

SEQ ID NO: 3713835 - RNA, 13 nt, Human
uaugcacacauuu

SEQ ID NO: 3713836 - RNA, 21 nt, Human
uaugcacaccucccacccccu

SEQ ID NO: 3713837 - RNA, 13 nt, Human
uaugcacauaugg

SEQ ID NO: 3713838 - RNA, 19 nt, Human
uaugcacauauggacucug

SEQ ID NO: 3713839 - RNA, 19 nt, Human
uaugcacaugaacuuagau

SEQ ID NO: 3713840 - RNA, 15 nt, Human
uaugcacuaaauaug

SEQ ID NO: 3713841 - RNA, 18 nt, Human
uaugcacuaagucucuuu

SEQ ID NO: 3713842 - RNA, 14 nt, Human
uaugcacuuggccu

SEQ ID NO: 3713843 - RNA, 20 nt, Human
uaugcagaaauagacaaaaa

SEQ ID NO: 3713844 - RNA, 22 nt, Human
uaugcagaaauagacaaaaagu

SEQ ID NO: 3713845 - RNA, 20 nt, Human
uaugcagaacacauuucaaa

SEQ ID NO: 3713846 - RNA, 15 nt, Human
uaugcagaauacuuu

SEQ ID NO: 3713847 - RNA, 19 nt, Human
uaugcagaauggcauuugc

SEQ ID NO: 3713848 - RNA, 18 nt, Human
uaugcagagguccacaac

SEQ ID NO: 3713849 - RNA, 22 nt, Human
uaugcagugauauggcagaaga

SEQ ID NO: 3713850 - RNA, 15 nt, Human
uaugcagugcugcuu

SEQ ID NO: 3713851 - RNA, 14 nt, Human
uaugcauaaaguca

SEQ ID NO: 3713852 - RNA, 20 nt, Human
uaugcauaacugacaaauca

SEQ ID NO: 3713853 - RNA, 17 nt, Human
uaugcaucauuucagga

SEQ ID NO: 3713854 - RNA, 18 nt, Human
uaugcaucauuucaggag

SEQ ID NO: 3713855 - RNA, 17 nt, Human
uaugcaucuaauaaaaa

SEQ ID NO: 3713856 - RNA, 13 nt, Human
uaugcaugaagua

SEQ ID NO: 3713857 - RNA, 18 nt, Human
uaugcaugaaguaauaug

SEQ ID NO: 3713858 - RNA, 18 nt, Human
uaugcauggugccccagg

SEQ ID NO: 3713859 - RNA, 16 nt, Human
uaugcaugguuucagc

SEQ ID NO: 3713860 - RNA, 21 nt, Human
uaugcauuuaaauacagucuu

SEQ ID NO: 3713861 - RNA, 22 nt, Human
uaugcauuuaaauacagucuuc

SEQ ID NO: 3713862 - RNA, 14 nt, Human
uaugccaaagauca

SEQ ID NO: 3713863 - RNA, 15 nt, Human
uaugccacuuccuuu

SEQ ID NO: 3713864 - RNA, 17 nt, Human
uaugccaugauggaaau

SEQ ID NO: 3713865 - RNA, 15 nt, Human
uaugcccacauuuag

SEQ ID NO: 3713866 - RNA, 18 nt, Human
uaugcccacauuuagucu

SEQ ID NO: 3713867 - RNA, 23 nt, Human
uaugcccacauuuagucucuuua

SEQ ID NO: 3713868 - RNA, 15 nt, Human
uaugccccaaauaua

SEQ ID NO: 3713869 - RNA, 21 nt, Human
uaugccggaugugcuuuucuc

SEQ ID NO: 3713870 - RNA, 20 nt, Human
uaugccucuccuuuguauau

SEQ ID NO: 3713871 - RNA, 14 nt, Human
uaugccugcuauuu

SEQ ID NO: 3713872 - RNA, 17 nt, Human
uaugccugggcagaagg

SEQ ID NO: 3713873 - RNA, 22 nt, Human
uaugccuuuaaaucugugauga

SEQ ID NO: 3713874 - RNA, 20 nt, Human
uaugccuuugauguauuuuc

SEQ ID NO: 3713875 - RNA, 13 nt, Human
ucaaccagauaac

SEQ ID NO: 3713876 - RNA, 14 nt, Human
ucaaccagcagaug

SEQ ID NO: 3713877 - RNA, 16 nt, Human
ucaaccaucgcuuuau

SEQ ID NO: 3713878 - RNA, 20 nt, Human
ucaaccccaccacuucuuuu

SEQ ID NO: 3713879 - RNA, 18 nt, Human
ucaaccccacccuguuug

SEQ ID NO: 3713880 - RNA, 16 nt, Human
ucaaccccagacacug

SEQ ID NO: 3713881 - RNA, 17 nt, Human
ucaaccccagacacugg

SEQ ID NO: 3713882 - RNA, 18 nt, Human
ucaacccccauuucuauu

SEQ ID NO: 3713883 - RNA, 16 nt, Human
ucaaccccuccccucc

SEQ ID NO: 3713884 - RNA, 21 nt, Human
ucaaccccuccccuccauccc

SEQ ID NO: 3713885 - RNA, 18 nt, Human
ucaaccccuucgcuccug

SEQ ID NO: 3713886 - RNA, 19 nt, Human
ucaaccccuucgcuccugu

SEQ ID NO: 3713887 - RNA, 18 nt, Human
ucaacccuaaaaagcaga

SEQ ID NO: 3713888 - RNA, 13 nt, Human
ucaacccuggaga

SEQ ID NO: 3713889 - RNA, 14 nt, Human
ucaacccuggagag

SEQ ID NO: 3713890 - RNA, 20 nt, Human
ucaacccuuuugucugccuc

SEQ ID NO: 3713891 - RNA, 21 nt, Human
ucaacccuuuugucugccucu

SEQ ID NO: 3713892 - RNA, 15 nt, Human
ucaaccguacaaugg

SEQ ID NO: 3713893 - RNA, 20 nt, Human
ucaaccuaccaccccuuccu

SEQ ID NO: 3713894 - RNA, 21 nt, Human
ucaaccuaccaccccuuccug

SEQ ID NO: 3713895 - RNA, 12 nt, Human
ucaaccucccaa

SEQ ID NO: 3713896 - RNA, 18 nt, Human
ucaaccuccuguggaacc

SEQ ID NO: 3713897 - RNA, 18 nt, Human
ucaaccucuucuggcuca

SEQ ID NO: 3713898 - RNA, 18 nt, Human
ucaaccugggcaaagccu

SEQ ID NO: 3713899 - RNA, 12 nt, Human
ucaaccuguaaa

SEQ ID NO: 3713900 - RNA, 13 nt, Human
ucaaccuguaaau

SEQ ID NO: 3713901 - RNA, 15 nt, Human
ucaaccuguaaauua

SEQ ID NO: 3713902 - RNA, 15 nt, Human
ucaaccugugaugag

SEQ ID NO: 3713903 - RNA, 15 nt, Human
ucaaccuuaagaccu

SEQ ID NO: 3713904 - RNA, 19 nt, Human
ucaacgccucacugaaaca

SEQ ID NO: 3713905 - RNA, 19 nt, Human
ucaacuaaaaaaaaaaaag

SEQ ID NO: 3713906 - RNA, 18 nt, Human
ucaacuaaaguuguacuu

SEQ ID NO: 3713907 - RNA, 21 nt, Human
ucaacuaaaguuguacuuuaa

SEQ ID NO: 3713908 - RNA, 15 nt, Human
ucaacuaggaucaga

SEQ ID NO: 3713909 - RNA, 21 nt, Human
ucaacuagugggguuuccugg

SEQ ID NO: 3713910 - RNA, 19 nt, Human
ucaacucauaagacuuugg

SEQ ID NO: 3713911 - RNA, 16 nt, Human
ucaacucccugccccc

SEQ ID NO: 3713912 - RNA, 23 nt, Human
ucaacucccugccccccagcccu

SEQ ID NO: 3713913 - RNA, 14 nt, Human
ucaacuccucccau

SEQ ID NO: 3713914 - RNA, 19 nt, Human
ucaacuccucgacaucacu

SEQ ID NO: 3713915 - RNA, 20 nt, Human
ucaacucuccuccagaguca

SEQ ID NO: 3713916 - RNA, 21 nt, Human
ucaacucucuuauugccucac

SEQ ID NO: 3713917 - RNA, 22 nt, Human
ucaacucuuuguuauuugaaaa

SEQ ID NO: 3713918 - RNA, 18 nt, Human
ucaacugccuacuccaaa

SEQ ID NO: 3713919 - RNA, 20 nt, Human
ucaacugccuacuccaaaau

SEQ ID NO: 3713920 - RNA, 18 nt, Human
ucaacugggcugaacacu

SEQ ID NO: 3713921 - RNA, 17 nt, Human
ucaacuggguccagaag

SEQ ID NO: 3713922 - RNA, 18 nt, Human
ucaacuggguccagaaga

SEQ ID NO: 3713923 - RNA, 22 nt, Human
ucaacugucuccuaccucugcu

SEQ ID NO: 3713924 - RNA, 19 nt, Human
ucaacuuauuaacaauuag

SEQ ID NO: 3713925 - RNA, 14 nt, Human
ucaacuucaggaaa

SEQ ID NO: 3713926 - RNA, 13 nt, Human
ucaacuugcaaaa

SEQ ID NO: 3713927 - RNA, 14 nt, Human
ucaacuugcaaaau

SEQ ID NO: 3713928 - RNA, 14 nt, Human
ucaacuugcuuauc

SEQ ID NO: 3713929 - RNA, 14 nt, Human
ucaacuuuaugcag

SEQ ID NO: 3713930 - RNA, 15 nt, Human
ucaacuuugaauaaa

SEQ ID NO: 3713931 - RNA, 14 nt, Human
ucaacuuuguaaaa

SEQ ID NO: 3713932 - RNA, 21 nt, Human
ucaacuuuuccuuugaauccu

SEQ ID NO: 3713933 - RNA, 16 nt, Human
ucaagaaaaaauaaau

SEQ ID NO: 3713934 - RNA, 18 nt, Human
ucaagaaaaaauaaaugg

SEQ ID NO: 3713935 - RNA, 21 nt, Human
ucaagaaaaauuauuguauaa

SEQ ID NO: 3713936 - RNA, 15 nt, Human
ucaagaaaacaggca

SEQ ID NO: 3713937 - RNA, 20 nt, Human
ucaagaaacagccagcaaga

SEQ ID NO: 3713938 - RNA, 13 nt, Human
ucaagaaacugag

SEQ ID NO: 3713939 - RNA, 22 nt, Human
ucaagaaauaaaaggaagccaa

SEQ ID NO: 3713940 - RNA, 15 nt, Human
ucaagaaaugaagag

SEQ ID NO: 3713941 - RNA, 18 nt, Human
ucaagaaaugaagagcug

SEQ ID NO: 3713942 - RNA, 14 nt, Human
ucaagaacuuguuu

SEQ ID NO: 3713943 - RNA, 14 nt, Human
ucaagaagaaaaag

SEQ ID NO: 3713944 - RNA, 18 nt, Human
ucaagaagaaaaagguuu

SEQ ID NO: 3713945 - RNA, 14 nt, Human
ucaagaagggcugc

SEQ ID NO: 3713946 - RNA, 22 nt, Human
ucaagaauggggaucacagaga

SEQ ID NO: 3713947 - RNA, 13 nt, Human
ucaagaccaaaug

SEQ ID NO: 3713948 - RNA, 19 nt, Human
ucaagaccaaauggaaaca

SEQ ID NO: 3713949 - RNA, 13 nt, Human
ucaagaccagccu

SEQ ID NO: 3713950 - RNA, 15 nt, Human
ucaagaccagccugg

SEQ ID NO: 3713951 - RNA, 20 nt, Human
ucaagacuggaaggugggga

SEQ ID NO: 3713952 - RNA, 11 nt, Human
ucaagagccuu

SEQ ID NO: 3713953 - RNA, 15 nt, Human
ucaagagccuuaaaa

SEQ ID NO: 3713954 - RNA, 18 nt, Human
ucaagagccuuaaaacau

SEQ ID NO: 3713955 - RNA, 21 nt, Human
ucaagagccuuaaaacaucau

SEQ ID NO: 3713956 - RNA, 16 nt, Human
ucaagagcugcccucc

SEQ ID NO: 3713957 - RNA, 17 nt, Human
ucaagagcugcccuccu

SEQ ID NO: 3713958 - RNA, 20 nt, Human
ucaagaggagcccccacccu

SEQ ID NO: 3713959 - RNA, 18 nt, Human
ucaagaggcaaaggaauc

SEQ ID NO: 3713960 - RNA, 13 nt, Human
ucaagauagaaag

SEQ ID NO: 3713961 - RNA, 19 nt, Human
ucaagaucaaaaaggcuua

SEQ ID NO: 3713962 - RNA, 22 nt, Human
ucaagaucaaugaaaugauguc

SEQ ID NO: 3713963 - RNA, 17 nt, Human
ucaagauucccaggagu

SEQ ID NO: 3713964 - RNA, 20 nt, Human
ucaagauucccaggaguucu

SEQ ID NO: 3713965 - RNA, 17 nt, Human
ucaagauuucaggauua

SEQ ID NO: 3713966 - RNA, 17 nt, Human
ucaagcaagauuucaga

SEQ ID NO: 3713967 - RNA, 18 nt, Human
ucaagcaauccuccugag

SEQ ID NO: 3713968 - RNA, 20 nt, Human
ucaagcaauccucucaccuc

SEQ ID NO: 3713969 - RNA, 12 nt, Human
ucaagcagccaa

SEQ ID NO: 3713970 - RNA, 17 nt, Human
ucaagcagguuagagaa

SEQ ID NO: 3713971 - RNA, 23 nt, Human
ucaagcagguuagagaaaauaga

SEQ ID NO: 3713972 - RNA, 14 nt, Human
ucaagcaucuccug

SEQ ID NO: 3713973 - RNA, 18 nt, Human
ucaagcaucuccugagga

SEQ ID NO: 3713974 - RNA, 23 nt, Human
ucaagcaucuccugaggaucaga

SEQ ID NO: 3713975 - RNA, 15 nt, Human
ucaagcauguauuuu

SEQ ID NO: 3713976 - RNA, 15 nt, Human
ucaagccaagcagcc

SEQ ID NO: 3713977 - RNA, 20 nt, Human
ucaagccaagcagccaagcu

SEQ ID NO: 3713978 - RNA, 16 nt, Human
ucaagccaauccccuc

SEQ ID NO: 3713979 - RNA, 21 nt, Human
ucaagccaauccccuccuugg

SEQ ID NO: 3713980 - RNA, 19 nt, Human
ucaagccagcaacacagag

SEQ ID NO: 3713981 - RNA, 21 nt, Human
ucaagccagcaacacagagca

SEQ ID NO: 3713982 - RNA, 21 nt, Human
ucaagcccagccacguggagc

SEQ ID NO: 3713983 - RNA, 13 nt, Human
ucaagcccaggag

SEQ ID NO: 3713984 - RNA, 16 nt, Human
ucaagcgauucuccug

SEQ ID NO: 3713985 - RNA, 16 nt, Human
ucaagcgauucuucug

SEQ ID NO: 3713986 - RNA, 17 nt, Human
ucaagcgauucuucugc

SEQ ID NO: 3713987 - RNA, 18 nt, Human
ucaagcgauucuucugcu

SEQ ID NO: 3713988 - RNA, 21 nt, Human
ucaagcgauucuucugcuuca

SEQ ID NO: 3713989 - RNA, 19 nt, Human
ucaagcuaauaaaauauca

SEQ ID NO: 3713990 - RNA, 22 nt, Human
ucaagcuaauaaaauaucauuc

SEQ ID NO: 3713991 - RNA, 14 nt, Human
ucaagcuccuccuc

SEQ ID NO: 3713992 - RNA, 13 nt, Human
ucaagcucugagg

SEQ ID NO: 3713993 - RNA, 15 nt, Human
ucaagcucugaggga

SEQ ID NO: 3713994 - RNA, 23 nt, Human
ucaagcugaguauuaaaauguau

SEQ ID NO: 3713995 - RNA, 21 nt, Human
ucaagcugugagacaguggga

SEQ ID NO: 3713996 - RNA, 19 nt, Human
ucaagcuucaguuuccugg

SEQ ID NO: 3713997 - RNA, 22 nt, Human
ucaaggaacuugaaaaauacuu

SEQ ID NO: 3713998 - RNA, 18 nt, Human
ucaaggaagguucaugua

SEQ ID NO: 3713999 - RNA, 20 nt, Human
ucaaggaaguagaaacaaaa

SEQ ID NO: 3714000 - RNA, 23 nt, Human
ucaaggaauuucuuaacuucuug

SEQ ID NO: 3714001 - RNA, 21 nt, Human
ucaaggacaaagucuccagcc

SEQ ID NO: 3714002 - RNA, 19 nt, Human
ucaaggacuugaaagcauc

SEQ ID NO: 3714003 - RNA, 14 nt, Human
ucaaggagaggagg

SEQ ID NO: 3714004 - RNA, 16 nt, Human
ucaaggcacucuagau

SEQ ID NO: 3714005 - RNA, 18 nt, Human
ucaaggcacucuagauuc

SEQ ID NO: 3714006 - RNA, 20 nt, Human
ucaaggcacucuagauucca

SEQ ID NO: 3714007 - RNA, 13 nt, Human
ucaaggcacugcc

SEQ ID NO: 3714008 - RNA, 17 nt, Human
ucaaggcaucaugcaga

SEQ ID NO: 3714009 - RNA, 14 nt, Human
ucaaggccucccac

SEQ ID NO: 3714010 - RNA, 18 nt, Human
ucaaggccucccacagug

SEQ ID NO: 3714011 - RNA, 16 nt, Human
ucaaggcggugcuuga

SEQ ID NO: 3714012 - RNA, 20 nt, Human
ucaaggcuacagaugugcug

SEQ ID NO: 3714013 - RNA, 11 nt, Human
ucaaggcucag

SEQ ID NO: 3714014 - RNA, 17 nt, Human
ucaaggcugcuuagaau

SEQ ID NO: 3714015 - RNA, 18 nt, Human
ucaaggcuuauauucaac

SEQ ID NO: 3714016 - RNA, 19 nt, Human
ucaagggaauguaacugcu

SEQ ID NO: 3714017 - RNA, 15 nt, Human
ucaagggacaaggac

SEQ ID NO: 3714018 - RNA, 23 nt, Human
ucaagggcagcuuugcucauauu

SEQ ID NO: 3714019 - RNA, 14 nt, Human
ucaaggggucacuu

SEQ ID NO: 3714020 - RNA, 15 nt, Human
ucaagggucaggccu

SEQ ID NO: 3714021 - RNA, 15 nt, Human
ucaagguaaaauucu

SEQ ID NO: 3714022 - RNA, 18 nt, Human
ucaagguaaaauucuaaa

SEQ ID NO: 3714023 - RNA, 18 nt, Human
ucaaggucacuguuuccu

SEQ ID NO: 3714024 - RNA, 21 nt, Human
ucaaggucguuuuuuucauuc

SEQ ID NO: 3714025 - RNA, 17 nt, Human
uaugcuaaaauacauuu

SEQ ID NO: 3714026 - RNA, 14 nt, Human
uaugcuaccaccag

SEQ ID NO: 3714027 - RNA, 15 nt, Human
uaugcuauugacaau

SEQ ID NO: 3714028 - RNA, 17 nt, Human
uaugcuauugacaauaa

SEQ ID NO: 3714029 - RNA, 20 nt, Human
uaugcuauugacaauaaaau

SEQ ID NO: 3714030 - RNA, 16 nt, Human
uaugcuauuucuauau

SEQ ID NO: 3714031 - RNA, 13 nt, Human
uaugcuauuucug

SEQ ID NO: 3714032 - RNA, 14 nt, Human
uaugcuauuucugu

SEQ ID NO: 3714033 - RNA, 14 nt, Human
uaugcucugcaugu

SEQ ID NO: 3714034 - RNA, 22 nt, Human
uaugcugaguauguuaagcucu

SEQ ID NO: 3714035 - RNA, 22 nt, Human
uaugcugaucaucgccagaggu

SEQ ID NO: 3714036 - RNA, 15 nt, Human
uaugcugauuuauuu

SEQ ID NO: 3714037 - RNA, 19 nt, Human
uaugcugcaacaaaaugua

SEQ ID NO: 3714038 - RNA, 16 nt, Human
uaugcugccaaauuuu

SEQ ID NO: 3714039 - RNA, 13 nt, Human
uaugcuguauuuu

SEQ ID NO: 3714040 - RNA, 20 nt, Human
uaugcuguauuuucuuuuua

SEQ ID NO: 3714041 - RNA, 17 nt, Human
uaugcuuauuuuaaaau

SEQ ID NO: 3714042 - RNA, 19 nt, Human
uaugcuuauuuuaaaauuu

SEQ ID NO: 3714043 - RNA, 16 nt, Human
uaugcuucauacaggg

SEQ ID NO: 3714044 - RNA, 15 nt, Human
uaugcuuuaaacauu

SEQ ID NO: 3714045 - RNA, 21 nt, Human
uaugcuuuccuucuuugggau

SEQ ID NO: 3714046 - RNA, 14 nt, Human
uauggaaaaauaaa

SEQ ID NO: 3714047 - RNA, 16 nt, Human
uauggaaaaucagcug

SEQ ID NO: 3714048 - RNA, 17 nt, Human
uauggaaauaaauguau

SEQ ID NO: 3714049 - RNA, 14 nt, Human
uauggaaauauaua

SEQ ID NO: 3714050 - RNA, 13 nt, Human
uauggaacacucu

SEQ ID NO: 3714051 - RNA, 17 nt, Human
uauggaacacucugaga

SEQ ID NO: 3714052 - RNA, 18 nt, Human
uauggaacacucugagac

SEQ ID NO: 3714053 - RNA, 19 nt, Human
uauggaacacucugagacu

SEQ ID NO: 3714054 - RNA, 17 nt, Human
uauggaacucucuccac

SEQ ID NO: 3714055 - RNA, 22 nt, Human
uauggaaggguuuguggcuggg

SEQ ID NO: 3714056 - RNA, 14 nt, Human
uauggaauacagug

SEQ ID NO: 3714057 - RNA, 13 nt, Human
uauggaaucaauu

SEQ ID NO: 3714058 - RNA, 15 nt, Human
uauggaaucaauuca

SEQ ID NO: 3714059 - RNA, 22 nt, Human
uauggaauuacauguaaaacau

SEQ ID NO: 3714060 - RNA, 11 nt, Human
uauggaauuga

SEQ ID NO: 3714061 - RNA, 18 nt, Human
uauggaauugauuugcau

SEQ ID NO: 3714062 - RNA, 16 nt, Human
uauggacaaaacaaga

SEQ ID NO: 3714063 - RNA, 14 nt, Human
uauggacacagggu

SEQ ID NO: 3714064 - RNA, 18 nt, Human
uauggacagggcugucuc

SEQ ID NO: 3714065 - RNA, 13 nt, Human
uauggacuaucug

SEQ ID NO: 3714066 - RNA, 17 nt, Human
uauggacuaucugucug

SEQ ID NO: 3714067 - RNA, 18 nt, Human
uauggacuaucugucugg

SEQ ID NO: 3714068 - RNA, 21 nt, Human
uauggacuaucugucuggugg

SEQ ID NO: 3714069 - RNA, 16 nt, Human
uauggagaauugcuga

SEQ ID NO: 3714070 - RNA, 13 nt, Human
uauggagccuggc

SEQ ID NO: 3714071 - RNA, 18 nt, Human
uauggaggaacaacucuc

SEQ ID NO: 3714072 - RNA, 14 nt, Human
uauggaggcaggag

SEQ ID NO: 3714073 - RNA, 13 nt, Human
uauggauaaugcc

SEQ ID NO: 3714074 - RNA, 23 nt, Human
uauggauccacuggcuggacaaa

SEQ ID NO: 3714075 - RNA, 16 nt, Human
uauggauguccccagc

SEQ ID NO: 3714076 - RNA, 14 nt, Human
uauggauucuaaaa

SEQ ID NO: 3714077 - RNA, 14 nt, Human
uauggcagaagaca

SEQ ID NO: 3714078 - RNA, 16 nt, Human
uauggcagaagacacc

SEQ ID NO: 3714079 - RNA, 23 nt, Human
uauggcagaagacaccagagcag

SEQ ID NO: 3714080 - RNA, 17 nt, Human
uauggcagaguuguaaa

SEQ ID NO: 3714081 - RNA, 21 nt, Human
uauggcagaguuguaaauaua

SEQ ID NO: 3714082 - RNA, 19 nt, Human
uauggccacauuuaauauc

SEQ ID NO: 3714083 - RNA, 22 nt, Human
uauggcccuggccuagcauacg

SEQ ID NO: 3714084 - RNA, 23 nt, Human
uauggccuaaauuuauuaaauaa

SEQ ID NO: 3714085 - RNA, 14 nt, Human
uauggccuguggau

SEQ ID NO: 3714086 - RNA, 20 nt, Human
uauggcguaaguacagagaa

SEQ ID NO: 3714087 - RNA, 17 nt, Human
uauggcucacuaugaau

SEQ ID NO: 3714088 - RNA, 22 nt, Human
uauggcucugcaccccucugcc

SEQ ID NO: 3714089 - RNA, 21 nt, Human
uauggcuuuauuuuuuugaac

SEQ ID NO: 3714090 - RNA, 16 nt, Human
uauggcuuuugugcau

SEQ ID NO: 3714091 - RNA, 18 nt, Human
uauggcuuuugugcauua

SEQ ID NO: 3714092 - RNA, 21 nt, Human
uauggcuuuugugcauuaucu

SEQ ID NO: 3714093 - RNA, 14 nt, Human
uaugggagaaauag

SEQ ID NO: 3714094 - RNA, 13 nt, Human
uaugggagcuguc

SEQ ID NO: 3714095 - RNA, 15 nt, Human
uaugggcauugacaa

SEQ ID NO: 3714096 - RNA, 16 nt, Human
uaugggcauugacaaa

SEQ ID NO: 3714097 - RNA, 15 nt, Human
uaugggccccuggca

SEQ ID NO: 3714098 - RNA, 17 nt, Human
uauggggauagaugugu

SEQ ID NO: 3714099 - RNA, 21 nt, Human
uauggguaucaaacagcucag

SEQ ID NO: 3714100 - RNA, 22 nt, Human
uauggguuuaguuacuuuagau

SEQ ID NO: 3714101 - RNA, 11 nt, Human
uaugguaaaaa

SEQ ID NO: 3714102 - RNA, 15 nt, Human
uaugguaaagauauu

SEQ ID NO: 3714103 - RNA, 14 nt, Human
uaugguaaucauau

SEQ ID NO: 3714104 - RNA, 16 nt, Human
uaugguagaaaaauuu

SEQ ID NO: 3714105 - RNA, 22 nt, Human
uaugguagaaaaauuucacgau

SEQ ID NO: 3714106 - RNA, 21 nt, Human
uaugguaggaacugcugggcu

SEQ ID NO: 3714107 - RNA, 20 nt, Human
uaugguauaaugguugacug

SEQ ID NO: 3714108 - RNA, 19 nt, Human
uaugguccuaaaagcaaaa

SEQ ID NO: 3714109 - RNA, 13 nt, Human
uauggucuaaugu

SEQ ID NO: 3714110 - RNA, 14 nt, Human
uauggugagaugca

SEQ ID NO: 3714111 - RNA, 20 nt, Human
uauggugcaauguguguaua

SEQ ID NO: 3714112 - RNA, 13 nt, Human
uauggugccaaug

SEQ ID NO: 3714113 - RNA, 15 nt, Human
uauggugccaaugga

SEQ ID NO: 3714114 - RNA, 19 nt, Human
uauggugccaauggaaccu

SEQ ID NO: 3714115 - RNA, 17 nt, Human
uauggugccuaguauug

SEQ ID NO: 3714116 - RNA, 19 nt, Human
uauggugccuaguauugac

SEQ ID NO: 3714117 - RNA, 22 nt, Human
uauggugccuaguauugacaaa

SEQ ID NO: 3714118 - RNA, 19 nt, Human
uaugguuacuucuucucuu

SEQ ID NO: 3714119 - RNA, 13 nt, Human
uaugguuauguuu

SEQ ID NO: 3714120 - RNA, 14 nt, Human
uaugguuauguuuu

SEQ ID NO: 3714121 - RNA, 22 nt, Human
uaugguugauaguuuaccugaa

SEQ ID NO: 3714122 - RNA, 10 nt, Human
uauguaaaaa

SEQ ID NO: 3714123 - RNA, 23 nt, Human
uauguaaaaggccaaaccucugu

SEQ ID NO: 3714124 - RNA, 17 nt, Human
uauguaaaauguuuuag

SEQ ID NO: 3714125 - RNA, 21 nt, Human
uauguaaacaaaucuuuccau

SEQ ID NO: 3714126 - RNA, 15 nt, Human
uauguaaauaauucu

SEQ ID NO: 3714127 - RNA, 19 nt, Human
uauguaaaucccauuauuc

SEQ ID NO: 3714128 - RNA, 23 nt, Human
uauguaaaucccauuauucaaag

SEQ ID NO: 3714129 - RNA, 10 nt, Human
uauguaaaug

SEQ ID NO: 3714130 - RNA, 20 nt, Human
uauguaaaugguaugucauu

SEQ ID NO: 3714131 - RNA, 21 nt, Human
uauguaaaugguaugucauuc

SEQ ID NO: 3714132 - RNA, 14 nt, Human
uauguaaauguaua

SEQ ID NO: 3714133 - RNA, 21 nt, Human
uauguaacaaaccugcacuua

SEQ ID NO: 3714134 - RNA, 15 nt, Human
uauguaauaauguga

SEQ ID NO: 3714135 - RNA, 13 nt, Human
uauguaaucuaug

SEQ ID NO: 3714136 - RNA, 14 nt, Human
uauguaaugcaaaa

SEQ ID NO: 3714137 - RNA, 21 nt, Human
uauguacaauauuuuaagcau

SEQ ID NO: 3714138 - RNA, 14 nt, Human
uauguacaauugug

SEQ ID NO: 3714139 - RNA, 21 nt, Human
uauguaccauaugaucuguuu

SEQ ID NO: 3714140 - RNA, 22 nt, Human
uauguaccauaugaucuguuuu

SEQ ID NO: 3714141 - RNA, 18 nt, Human
uauguacccucugaaaua

SEQ ID NO: 3714142 - RNA, 16 nt, Human
uauguaccucuuuuag

SEQ ID NO: 3714143 - RNA, 21 nt, Human
uauguacguuuguaugugugu

SEQ ID NO: 3714144 - RNA, 22 nt, Human
uauguacguuuguaugugugua

SEQ ID NO: 3714145 - RNA, 14 nt, Human
uauguacuguacua

SEQ ID NO: 3714146 - RNA, 13 nt, Human
uauguacuucaug

SEQ ID NO: 3714147 - RNA, 17 nt, Human
uauguacuucaugcugu

SEQ ID NO: 3714148 - RNA, 16 nt, Human
uauguacuugucaaag

SEQ ID NO: 3714149 - RNA, 21 nt, Human
uauguacuuuuauuuuacaca

SEQ ID NO: 3714150 - RNA, 15 nt, Human
uauguagacaauaua

SEQ ID NO: 3714151 - RNA, 17 nt, Human
uauguagacuauauaca

SEQ ID NO: 3714152 - RNA, 18 nt, Human
uauguagacuauauacau

SEQ ID NO: 3714153 - RNA, 14 nt, Human
uauguagauaacaa

SEQ ID NO: 3714154 - RNA, 23 nt, Human
uauguagauauuuggcuuaaaua

SEQ ID NO: 3714155 - RNA, 21 nt, Human
uauguagcaggaaauaaagua

SEQ ID NO: 3714156 - RNA, 21 nt, Human
uauguagguaagacuguagau

SEQ ID NO: 3714157 - RNA, 17 nt, Human
uauguaguaauugacau

SEQ ID NO: 3714158 - RNA, 19 nt, Human
uauguaguaucuauaugac

SEQ ID NO: 3714159 - RNA, 13 nt, Human
uauguauacaugu

SEQ ID NO: 3714160 - RNA, 18 nt, Human
uauguauauuaaaaaaga

SEQ ID NO: 3714161 - RNA, 23 nt, Human
uauguauauuuuuuuaauuuaac

SEQ ID NO: 3714162 - RNA, 17 nt, Human
uauguaugguauccaag

SEQ ID NO: 3714163 - RNA, 17 nt, Human
uauguaugguuugaaaa

SEQ ID NO: 3714164 - RNA, 13 nt, Human
uauguaugugugu

SEQ ID NO: 3714165 - RNA, 13 nt, Human
uauguauguguuu

SEQ ID NO: 3714166 - RNA, 16 nt, Human
uauguauguguuuaga

SEQ ID NO: 3714167 - RNA, 21 nt, Human
uauguauguguuuagaauuga

SEQ ID NO: 3714168 - RNA, 13 nt, Human
uauguauguuuac

SEQ ID NO: 3714169 - RNA, 18 nt, Human
uauguauguuuacacugu

SEQ ID NO: 3714170 - RNA, 14 nt, Human
uauguauuaacacu

SEQ ID NO: 3714171 - RNA, 19 nt, Human
uauguauuauuuacauuua

SEQ ID NO: 3714172 - RNA, 21 nt, Human
uauguauuauuuauaauuccu

SEQ ID NO: 3714173 - RNA, 13 nt, Human
uauguauucugua

SEQ ID NO: 3714174 - RNA, 14 nt, Human
uauguauucuuuuc

SEQ ID NO: 3714175 - RNA, 15 nt, Human
gccucccucugcugu

SEQ ID NO: 3714176 - RNA, 22 nt, Human
gccucccugaaaauguuuuucu

SEQ ID NO: 3714177 - RNA, 13 nt, Human
gccucccugaagc

SEQ ID NO: 3714178 - RNA, 23 nt, Human
gccucccugacccugcagagaug

SEQ ID NO: 3714179 - RNA, 17 nt, Human
gccucccugccucaggc

SEQ ID NO: 3714180 - RNA, 20 nt, Human
gccucccuguugaagcucug

SEQ ID NO: 3714181 - RNA, 22 nt, Human
gccucccuucaugcauggaaau

SEQ ID NO: 3714182 - RNA, 15 nt, Human
gccuccgagagggag

SEQ ID NO: 3714183 - RNA, 18 nt, Human
gccuccgagagggagaga

SEQ ID NO: 3714184 - RNA, 13 nt, Human
gccuccgagggac

SEQ ID NO: 3714185 - RNA, 21 nt, Human
gccuccgagggacgcggcucc

SEQ ID NO: 3714186 - RNA, 15 nt, Human
gccuccgcuucccug

SEQ ID NO: 3714187 - RNA, 16 nt, Human
gccuccgcuucccugg

SEQ ID NO: 3714188 - RNA, 20 nt, Human
gccuccggcgucagccucca

SEQ ID NO: 3714189 - RNA, 17 nt, Human
gccuccgggacccccag

SEQ ID NO: 3714190 - RNA, 18 nt, Human
gccuccgggacccccagg

SEQ ID NO: 3714191 - RNA, 12 nt, Human
gccuccucaucc

SEQ ID NO: 3714192 - RNA, 14 nt, Human
gccuccucaucugg

SEQ ID NO: 3714193 - RNA, 23 nt, Human
gccuccucaucugggggagugga

SEQ ID NO: 3714194 - RNA, 11 nt, Human
gccuccucccu

SEQ ID NO: 3714195 - RNA, 16 nt, Human
gccuccucccucccuc

SEQ ID NO: 3714196 - RNA, 17 nt, Human
gccuccucccucccucu

SEQ ID NO: 3714197 - RNA, 13 nt, Human
gccuccucuucac

SEQ ID NO: 3714198 - RNA, 21 nt, Human
gccuccugaccugaggcuccu

SEQ ID NO: 3714199 - RNA, 19 nt, Human
gccuccugaguagcuggga

SEQ ID NO: 3714200 - RNA, 14 nt, Human
gccuccugccugcc

SEQ ID NO: 3714201 - RNA, 21 nt, Human
gccuccuggcugucugaggcu

SEQ ID NO: 3714202 - RNA, 18 nt, Human
gccuccuguggccugcca

SEQ ID NO: 3714203 - RNA, 20 nt, Human
gccuccuguggccugccagu

SEQ ID NO: 3714204 - RNA, 12 nt, Human
gccuccuguggg

SEQ ID NO: 3714205 - RNA, 13 nt, Human
gccuccuguguaa

SEQ ID NO: 3714206 - RNA, 16 nt, Human
gccuccuguguacugu

SEQ ID NO: 3714207 - RNA, 18 nt, Human
gccuccuguguacugugu

SEQ ID NO: 3714208 - RNA, 18 nt, Human
gccuccuguguagcuggg

SEQ ID NO: 3714209 - RNA, 19 nt, Human
gccuccuuagaaaaaaaau

SEQ ID NO: 3714210 - RNA, 20 nt, Human
gccuccuuccuugcuguccu

SEQ ID NO: 3714211 - RNA, 20 nt, Human
gccuccuucugagcuccugu

SEQ ID NO: 3714212 - RNA, 20 nt, Human
gccuccuugauauuuguauu

SEQ ID NO: 3714213 - RNA, 10 nt, Human
gccuccuuua

SEQ ID NO: 3714214 - RNA, 16 nt, Human
gccuccuuuccccucc

SEQ ID NO: 3714215 - RNA, 19 nt, Human
gccuccuuugugaggaagc

SEQ ID NO: 3714216 - RNA, 16 nt, Human
gccucgaaacacagaa

SEQ ID NO: 3714217 - RNA, 19 nt, Human
gccucgaacuccugggcuc

SEQ ID NO: 3714218 - RNA, 20 nt, Human
gccucgaacuccugggcuca

SEQ ID NO: 3714219 - RNA, 13 nt, Human
gccucgaacuggc

SEQ ID NO: 3714220 - RNA, 23 nt, Human
gccucgaggugccuucuucaggg

SEQ ID NO: 3714221 - RNA, 12 nt, Human
gccucgcaaccc

SEQ ID NO: 3714222 - RNA, 14 nt, Human
gccucgcaggaaga

SEQ ID NO: 3714223 - RNA, 20 nt, Human
gccucgcccaccgcaugccc

SEQ ID NO: 3714224 - RNA, 23 nt, Human
gccucgcccaccgcaugcccccu

SEQ ID NO: 3714225 - RNA, 14 nt, Human
gccucgccccuggc

SEQ ID NO: 3714226 - RNA, 16 nt, Human
gccucgcuccccacuc

SEQ ID NO: 3714227 - RNA, 23 nt, Human
gccucgcuccccacucugcucug

SEQ ID NO: 3714228 - RNA, 20 nt, Human
gccucgcucuguuacccagg

SEQ ID NO: 3714229 - RNA, 15 nt, Human
gccucggagccucau

SEQ ID NO: 3714230 - RNA, 23 nt, Human
gccucggagccucauccgaggca

SEQ ID NO: 3714231 - RNA, 18 nt, Human
gccucggcuccugcugca

SEQ ID NO: 3714232 - RNA, 15 nt, Human
gccucggcuggcucc

SEQ ID NO: 3714233 - RNA, 18 nt, Human
gccucggcuggcuccccu

SEQ ID NO: 3714234 - RNA, 19 nt, Human
gccucuaaccccaggcccc

SEQ ID NO: 3714235 - RNA, 21 nt, Human
gccucuaaccccaggccccga

SEQ ID NO: 3714236 - RNA, 13 nt, Human
gccucuagcugaa

SEQ ID NO: 3714237 - RNA, 19 nt, Human
gccucuagggaccccuccu

SEQ ID NO: 3714238 - RNA, 20 nt, Human
gccucuagggaccccuccuc

SEQ ID NO: 3714239 - RNA, 21 nt, Human
gccucuauccuacaaggccua

SEQ ID NO: 3714240 - RNA, 13 nt, Human
gccucucacacac

SEQ ID NO: 3714241 - RNA, 23 nt, Human
gccucucaccucugugccucugu

SEQ ID NO: 3714242 - RNA, 16 nt, Human
gccucucaucaacuga

SEQ ID NO: 3714243 - RNA, 17 nt, Human
gccucucaucccccauu

SEQ ID NO: 3714244 - RNA, 14 nt, Human
gccucuccagccuc

SEQ ID NO: 3714245 - RNA, 23 nt, Human
gccucuccaggcaccaucucccu

SEQ ID NO: 3714246 - RNA, 13 nt, Human
gccucucccaccc

SEQ ID NO: 3714247 - RNA, 15 nt, Human
gccucucccaggcag

SEQ ID NO: 3714248 - RNA, 20 nt, Human
gccucucccaggcaggggcc

SEQ ID NO: 3714249 - RNA, 15 nt, Human
gccucucccaucacu

SEQ ID NO: 3714250 - RNA, 21 nt, Human
gccucucccaucacuucccua

SEQ ID NO: 3714251 - RNA, 12 nt, Human
gccucuccccug

SEQ ID NO: 3714252 - RNA, 16 nt, Human
gccucuccccugccug

SEQ ID NO: 3714253 - RNA, 17 nt, Human
gccucucccgucagggc

SEQ ID NO: 3714254 - RNA, 22 nt, Human
gccucucccuccuccaggaagc

SEQ ID NO: 3714255 - RNA, 19 nt, Human
gccucucccugcugcuccu

SEQ ID NO: 3714256 - RNA, 21 nt, Human
gccucucccugcugcuccuag

SEQ ID NO: 3714257 - RNA, 14 nt, Human
gccucucccuggcc

SEQ ID NO: 3714258 - RNA, 16 nt, Human
gccucucccuggcccu

SEQ ID NO: 3714259 - RNA, 20 nt, Human
gccucuccgccccugagccc

SEQ ID NO: 3714260 - RNA, 20 nt, Human
gccucuccuuguggccuggg

SEQ ID NO: 3714261 - RNA, 21 nt, Human
gccucuccuuguggccugggc

SEQ ID NO: 3714262 - RNA, 14 nt, Human
gccucuccuuugua

SEQ ID NO: 3714263 - RNA, 15 nt, Human
gccucuccuuuguau

SEQ ID NO: 3714264 - RNA, 17 nt, Human
gccucuccuuuguauau

SEQ ID NO: 3714265 - RNA, 19 nt, Human
gccucucgcuccucaaccc

SEQ ID NO: 3714266 - RNA, 22 nt, Human
gccucucgcuccucaaccccuc

SEQ ID NO: 3714267 - RNA, 18 nt, Human
gccucucgguugaaaccu

SEQ ID NO: 3714268 - RNA, 22 nt, Human
gccucucgguugaaaccuguau

SEQ ID NO: 3714269 - RNA, 20 nt, Human
gccucucuauccucucuucc

SEQ ID NO: 3714270 - RNA, 17 nt, Human
gccucucugcagguccc

SEQ ID NO: 3714271 - RNA, 15 nt, Human
gccucucuggccucc

SEQ ID NO: 3714272 - RNA, 16 nt, Human
gccucucuggccuccc

SEQ ID NO: 3714273 - RNA, 19 nt, Human
gccucucuggccucccacc

SEQ ID NO: 3714274 - RNA, 23 nt, Human
gccucucuuccuaucccauccca

SEQ ID NO: 3714275 - RNA, 23 nt, Human
gccucucuuguaauuuggaucuc

SEQ ID NO: 3714276 - RNA, 15 nt, Human
gccucugacacacag

SEQ ID NO: 3714277 - RNA, 21 nt, Human
gccucugacacacagcucugu

SEQ ID NO: 3714278 - RNA, 19 nt, Human
gccucugaccccuccucac

SEQ ID NO: 3714279 - RNA, 19 nt, Human
gccucugacuuaagcugcc

SEQ ID NO: 3714280 - RNA, 13 nt, Human
gccucugagagca

SEQ ID NO: 3714281 - RNA, 13 nt, Human
gccucugaggcca

SEQ ID NO: 3714282 - RNA, 18 nt, Human
gccucugaggccagccug

SEQ ID NO: 3714283 - RNA, 20 nt, Human
gccucugaggccagccuggc

SEQ ID NO: 3714284 - RNA, 21 nt, Human
gccucugaggccagccuggcc

SEQ ID NO: 3714285 - RNA, 22 nt, Human
gccucugagggaaagcccagaa

SEQ ID NO: 3714286 - RNA, 17 nt, Human
gccucugauaugggacu

SEQ ID NO: 3714287 - RNA, 23 nt, Human
gccucugauaugggacugagccu

SEQ ID NO: 3714288 - RNA, 21 nt, Human
gccucugcacacccuccagag

SEQ ID NO: 3714289 - RNA, 17 nt, Human
gccucugcacuccccug

SEQ ID NO: 3714290 - RNA, 20 nt, Human
gccucugcacuccccugcug

SEQ ID NO: 3714291 - RNA, 21 nt, Human
gccucugcacuccccugcugg

SEQ ID NO: 3714292 - RNA, 15 nt, Human
gccucugcauucagg

SEQ ID NO: 3714293 - RNA, 10 nt, Human
gccucugccu

SEQ ID NO: 3714294 - RNA, 18 nt, Human
gccucugccucugacaca

SEQ ID NO: 3714295 - RNA, 21 nt, Human
gccucugccugucucccccac

SEQ ID NO: 3714296 - RNA, 18 nt, Human
gccucugccuuagaggag

SEQ ID NO: 3714297 - RNA, 19 nt, Human
gccucugccuuagaggagc

SEQ ID NO: 3714298 - RNA, 19 nt, Human
gccucugcgagugguuucu

SEQ ID NO: 3714299 - RNA, 15 nt, Human
gccucugcugccaug

SEQ ID NO: 3714300 - RNA, 12 nt, Human
gccucugcuggc

SEQ ID NO: 3714301 - RNA, 17 nt, Human
gccucuggaaagcaaag

SEQ ID NO: 3714302 - RNA, 12 nt, Human
gccucuggcuag

SEQ ID NO: 3714303 - RNA, 23 nt, Human
gccucugguuuggggcgaggcag

SEQ ID NO: 3714304 - RNA, 20 nt, Human
gccucugucacugcaggcac

SEQ ID NO: 3714305 - RNA, 18 nt, Human
gccucuguccccuucucu

SEQ ID NO: 3714306 - RNA, 22 nt, Human
gccucuguccccuucucucauc

SEQ ID NO: 3714307 - RNA, 15 nt, Human
gccucuguccucgcu

SEQ ID NO: 3714308 - RNA, 15 nt, Human
gccucugucuagcau

SEQ ID NO: 3714309 - RNA, 21 nt, Human
gccucugucuagcaugccaac

SEQ ID NO: 3714310 - RNA, 17 nt, Human
gccucugugcugugugu

SEQ ID NO: 3714311 - RNA, 18 nt, Human
gccucugugcugugugug

SEQ ID NO: 3714312 - RNA, 12 nt, Human
gccucuguguca

SEQ ID NO: 3714313 - RNA, 22 nt, Human
gccucugugucacuggcugccu

SEQ ID NO: 3714314 - RNA, 14 nt, Human
gccucuguguccuu

SEQ ID NO: 3714315 - RNA, 17 nt, Human
gccucuguuugacaaac

SEQ ID NO: 3714316 - RNA, 20 nt, Human
gccucuuaaagcugccugua

SEQ ID NO: 3714317 - RNA, 18 nt, Human
gccucuuagacuucugcu

SEQ ID NO: 3714318 - RNA, 21 nt, Human
gccucuuccagucuuccugac

SEQ ID NO: 3714319 - RNA, 18 nt, Human
gccucuucccccugcuuc

SEQ ID NO: 3714320 - RNA, 20 nt, Human
gccucuucccgccgcccagc

SEQ ID NO: 3714321 - RNA, 15 nt, Human
gccucuucucucaga

SEQ ID NO: 3714322 - RNA, 14 nt, Human
gccucuucugggag

SEQ ID NO: 3714323 - RNA, 20 nt, Human
gccucuugaccaggcugccu

SEQ ID NO: 3714324 - RNA, 16 nt, Human
ucaaggugcuguuguc

SEQ ID NO: 3714325 - RNA, 20 nt, Human
ucaagguggccaaauuauuu

SEQ ID NO: 3714326 - RNA, 11 nt, Human
ucaagguucua

SEQ ID NO: 3714327 - RNA, 21 nt, Human
ucaagguuuuagguucuaaag

SEQ ID NO: 3714328 - RNA, 22 nt, Human
ucaaguaagaagacaugaacca

SEQ ID NO: 3714329 - RNA, 13 nt, Human
ucaaguacacuga

SEQ ID NO: 3714330 - RNA, 18 nt, Human
ucaaguagacuacuguuc

SEQ ID NO: 3714331 - RNA, 13 nt, Human
ucaaguagcauuu

SEQ ID NO: 3714332 - RNA, 17 nt, Human
ucaaguauagaaaaucu

SEQ ID NO: 3714333 - RNA, 11 nt, Human
ucaaguauuau

SEQ ID NO: 3714334 - RNA, 14 nt, Human
ucaaguauuauaaa

SEQ ID NO: 3714335 - RNA, 15 nt, Human
ucaaguauuauaccu

SEQ ID NO: 3714336 - RNA, 16 nt, Human
ucaaguauuauaccuu

SEQ ID NO: 3714337 - RNA, 12 nt, Human
ucaaguauuuug

SEQ ID NO: 3714338 - RNA, 14 nt, Human
ucaagucagcucuu

SEQ ID NO: 3714339 - RNA, 20 nt, Human
ucaaguccugccucuuaaau

SEQ ID NO: 3714340 - RNA, 20 nt, Human
ucaagucggaucuaguccag

SEQ ID NO: 3714341 - RNA, 15 nt, Human
ucaagucuaccaacc

SEQ ID NO: 3714342 - RNA, 16 nt, Human
ucaagucucugcuggc

SEQ ID NO: 3714343 - RNA, 19 nt, Human
ucaagucucugcuggccca

SEQ ID NO: 3714344 - RNA, 20 nt, Human
ucaagucugugccuggagcu

SEQ ID NO: 3714345 - RNA, 15 nt, Human
ucaagucuuucucuu

SEQ ID NO: 3714346 - RNA, 21 nt, Human
ucaagucuuucucuuucccug

SEQ ID NO: 3714347 - RNA, 22 nt, Human
ucaagucuuucucuuucccugg

SEQ ID NO: 3714348 - RNA, 19 nt, Human
ucaagugaaucuaaaagcu

SEQ ID NO: 3714349 - RNA, 20 nt, Human
ucaagugcaugcucucugca

SEQ ID NO: 3714350 - RNA, 14 nt, Human
ucaaguggcaaagc

SEQ ID NO: 3714351 - RNA, 16 nt, Human
ucaaguggggcucgcc

SEQ ID NO: 3714352 - RNA, 21 nt, Human
ucaagugucucaguccaccug

SEQ ID NO: 3714353 - RNA, 13 nt, Human
ucaaguucacacc

SEQ ID NO: 3714354 - RNA, 16 nt, Human
ucaaguucacaccugc

SEQ ID NO: 3714355 - RNA, 14 nt, Human
ucaaguuccuuugg

SEQ ID NO: 3714356 - RNA, 16 nt, Human
ucaaguuccuuugggu

SEQ ID NO: 3714357 - RNA, 15 nt, Human
ucaaguucuaagauu

SEQ ID NO: 3714358 - RNA, 20 nt, Human
ucaaguugcacacucacugg

SEQ ID NO: 3714359 - RNA, 16 nt, Human
ucaaguuguaaauaau

SEQ ID NO: 3714360 - RNA, 21 nt, Human
ucaaguuguaacuuauauuga

SEQ ID NO: 3714361 - RNA, 13 nt, Human
ucaaguugugcuu

SEQ ID NO: 3714362 - RNA, 23 nt, Human
ucaaguuguuccuuaagucagaa

SEQ ID NO: 3714363 - RNA, 17 nt, Human
ucaaguuuuaaaguuca

SEQ ID NO: 3714364 - RNA, 19 nt, Human
ucaaguuuuggguauguuu

SEQ ID NO: 3714365 - RNA, 22 nt, Human
ucaauaaaaaaaagaaaugaaa

SEQ ID NO: 3714366 - RNA, 14 nt, Human
ucaauaaaaaauua

SEQ ID NO: 3714367 - RNA, 16 nt, Human
ucaauaaaaaauuaug

SEQ ID NO: 3714368 - RNA, 19 nt, Human
ucaauaaaaaauuaugaca

SEQ ID NO: 3714369 - RNA, 16 nt, Human
ucaauaaaaucaugua

SEQ ID NO: 3714370 - RNA, 14 nt, Human
ucaauaaaauguga

SEQ ID NO: 3714371 - RNA, 16 nt, Human
ucaauaaaaugugauu

SEQ ID NO: 3714372 - RNA, 22 nt, Human
ucaauaaaaugugauuuuucug

SEQ ID NO: 3714373 - RNA, 14 nt, Human
ucaauaaaauuaua

SEQ ID NO: 3714374 - RNA, 16 nt, Human
ucaauaaacaacagcu

SEQ ID NO: 3714375 - RNA, 21 nt, Human
ucaauaaacagcuucaugccu

SEQ ID NO: 3714376 - RNA, 23 nt, Human
ucaauaaacagcuucaugccuuu

SEQ ID NO: 3714377 - RNA, 13 nt, Human
ucaauaaacgauu

SEQ ID NO: 3714378 - RNA, 15 nt, Human
ucaauaaacgauuua

SEQ ID NO: 3714379 - RNA, 17 nt, Human
ucaauaaacgauuuaau

SEQ ID NO: 3714380 - RNA, 12 nt, Human
ucaauaaacuua

SEQ ID NO: 3714381 - RNA, 15 nt, Human
ucaauaaagaaaacu

SEQ ID NO: 3714382 - RNA, 16 nt, Human
ucaauaaagaaaacuu

SEQ ID NO: 3714383 - RNA, 13 nt, Human
ucaauaaaguauc

SEQ ID NO: 3714384 - RNA, 14 nt, Human
ucaauaaaguuuga

SEQ ID NO: 3714385 - RNA, 17 nt, Human
ucaauaaaguuugaucu

SEQ ID NO: 3714386 - RNA, 15 nt, Human
ucaauaaaugguaua

SEQ ID NO: 3714387 - RNA, 15 nt, Human
ucaauaaaugucugu

SEQ ID NO: 3714388 - RNA, 16 nt, Human
ucaauaaaugucuguu

SEQ ID NO: 3714389 - RNA, 14 nt, Human
ucaauaacagccgc

SEQ ID NO: 3714390 - RNA, 18 nt, Human
ucaauaacagccgcucca

SEQ ID NO: 3714391 - RNA, 21 nt, Human
ucaauaacagccgcuccagag

SEQ ID NO: 3714392 - RNA, 22 nt, Human
ucaauaacgaaguugggcaaua

SEQ ID NO: 3714393 - RNA, 22 nt, Human
ucaauaagccucagcuuucuaa

SEQ ID NO: 3714394 - RNA, 20 nt, Human
ucaauaauauauuuucuguu

SEQ ID NO: 3714395 - RNA, 16 nt, Human
ucaauaauccaugaaa

SEQ ID NO: 3714396 - RNA, 23 nt, Human
ucaauaauuuguggugauuugga

SEQ ID NO: 3714397 - RNA, 14 nt, Human
ucaauacagauaua

SEQ ID NO: 3714398 - RNA, 17 nt, Human
ucaauacaguacaggca

SEQ ID NO: 3714399 - RNA, 16 nt, Human
ucaauagcguguguag

SEQ ID NO: 3714400 - RNA, 14 nt, Human
ucaauaguaauaua

SEQ ID NO: 3714401 - RNA, 13 nt, Human
ucaauaguguccu

SEQ ID NO: 3714402 - RNA, 21 nt, Human
ucaauaguguccuaugcaaua

SEQ ID NO: 3714403 - RNA, 14 nt, Human
ucaauaguucaagg

SEQ ID NO: 3714404 - RNA, 15 nt, Human
ucaauaguugaauua

SEQ ID NO: 3714405 - RNA, 16 nt, Human
ucaauaguugaauuag

SEQ ID NO: 3714406 - RNA, 18 nt, Human
ucaauauaagcuuuucuu

SEQ ID NO: 3714407 - RNA, 16 nt, Human
ucaauauauugaacuu

SEQ ID NO: 3714408 - RNA, 18 nt, Human
ucaauauccaaaccaaau

SEQ ID NO: 3714409 - RNA, 16 nt, Human
ucaauauccuuugccu

SEQ ID NO: 3714410 - RNA, 22 nt, Human
ucaauaucuuuuuuuuaauaaa

SEQ ID NO: 3714411 - RNA, 19 nt, Human
ucaauauuaaauacagaca

SEQ ID NO: 3714412 - RNA, 17 nt, Human
ucaauauuccugaauga

SEQ ID NO: 3714413 - RNA, 21 nt, Human
ucaauauuccugaaugaaaua

SEQ ID NO: 3714414 - RNA, 22 nt, Human
ucaauauugaauuuuuccuaug

SEQ ID NO: 3714415 - RNA, 18 nt, Human
ucaauauugacauuugua

SEQ ID NO: 3714416 - RNA, 17 nt, Human
ucaauauugucauuccu

SEQ ID NO: 3714417 - RNA, 10 nt, Human
ucaauauuua

SEQ ID NO: 3714418 - RNA, 13 nt, Human
ucaauauuuaaac

SEQ ID NO: 3714419 - RNA, 23 nt, Human
ucaauauuucagauaaucacaau

SEQ ID NO: 3714420 - RNA, 15 nt, Human
ucaauauuuuccaug

SEQ ID NO: 3714421 - RNA, 13 nt, Human
ucaaucaacacua

SEQ ID NO: 3714422 - RNA, 15 nt, Human
ucaaucaacacuacc

SEQ ID NO: 3714423 - RNA, 17 nt, Human
ucaaucaagccauguau

SEQ ID NO: 3714424 - RNA, 20 nt, Human
ucaaucacagcuuguauuuu

SEQ ID NO: 3714425 - RNA, 22 nt, Human
ucaaucacuguccuccacacaa

SEQ ID NO: 3714426 - RNA, 14 nt, Human
ucaaucaguauaau

SEQ ID NO: 3714427 - RNA, 16 nt, Human
ucaaucaguauaauuc

SEQ ID NO: 3714428 - RNA, 21 nt, Human
ucaaucaguauaauucuguac

SEQ ID NO: 3714429 - RNA, 19 nt, Human
ucaaucagucucagaaugu

SEQ ID NO: 3714430 - RNA, 15 nt, Human
ucaaucauuguacag

SEQ ID NO: 3714431 - RNA, 15 nt, Human
ucaauccagcuaugu

SEQ ID NO: 3714432 - RNA, 17 nt, Human
ucaauccccucauucag

SEQ ID NO: 3714433 - RNA, 20 nt, Human
ucaauccccucauucaggaa

SEQ ID NO: 3714434 - RNA, 21 nt, Human
ucaauccugauuccucucuaa

SEQ ID NO: 3714435 - RNA, 18 nt, Human
ucaaucucccgcugcugc

SEQ ID NO: 3714436 - RNA, 20 nt, Human
ucaaucucccgcugcugcug

SEQ ID NO: 3714437 - RNA, 16 nt, Human
ucaaucucguauagaa

SEQ ID NO: 3714438 - RNA, 20 nt, Human
ucaaucucguauagaagucu

SEQ ID NO: 3714439 - RNA, 15 nt, Human
ucaaucucucuuaga

SEQ ID NO: 3714440 - RNA, 13 nt, Human
ucaaucuguaaac

SEQ ID NO: 3714441 - RNA, 14 nt, Human
ucaaucuguaaacu

SEQ ID NO: 3714442 - RNA, 17 nt, Human
ucaaucuguaaacugug

SEQ ID NO: 3714443 - RNA, 16 nt, Human
ucaaucuguuuuucau

SEQ ID NO: 3714444 - RNA, 17 nt, Human
ucaaugacagagccuuc

SEQ ID NO: 3714445 - RNA, 18 nt, Human
ucaaugacagagccuucu

SEQ ID NO: 3714446 - RNA, 16 nt, Human
ucaaugacaugaauuu

SEQ ID NO: 3714447 - RNA, 12 nt, Human
ucaaugagcaug

SEQ ID NO: 3714448 - RNA, 15 nt, Human
ucaaugaucuagguu

SEQ ID NO: 3714449 - RNA, 17 nt, Human
ucaaugaucuagguuua

SEQ ID NO: 3714450 - RNA, 22 nt, Human
ucaaugcaagagugauugcagc

SEQ ID NO: 3714451 - RNA, 14 nt, Human
ucaaugcacugaca

SEQ ID NO: 3714452 - RNA, 15 nt, Human
ucaaugcagccagac

SEQ ID NO: 3714453 - RNA, 19 nt, Human
ucaaugcagccagaccuau

SEQ ID NO: 3714454 - RNA, 17 nt, Human
ucaaugcaguugucucu

SEQ ID NO: 3714455 - RNA, 17 nt, Human
ucaaugccccugaauuu

SEQ ID NO: 3714456 - RNA, 18 nt, Human
ucaaugccccugaauuua

SEQ ID NO: 3714457 - RNA, 16 nt, Human
ucaaugcuuuauuugu

SEQ ID NO: 3714458 - RNA, 19 nt, Human
ucaaugcuuuauuuguaaa

SEQ ID NO: 3714459 - RNA, 20 nt, Human
ucaaugcuuuauuuguaaau

SEQ ID NO: 3714460 - RNA, 20 nt, Human
ucaauggauuugaugcuguu

SEQ ID NO: 3714461 - RNA, 21 nt, Human
ucaauggccuaaaacuggccu

SEQ ID NO: 3714462 - RNA, 12 nt, Human
ucaauggcuuuu

SEQ ID NO: 3714463 - RNA, 14 nt, Human
ucaaugggaaauac

SEQ ID NO: 3714464 - RNA, 16 nt, Human
ucaaugggaccugugg

SEQ ID NO: 3714465 - RNA, 17 nt, Human
ucaaugggcaaugacag

SEQ ID NO: 3714466 - RNA, 14 nt, Human
ucaauggggccagu

SEQ ID NO: 3714467 - RNA, 19 nt, Human
ucaaugguuuaacauauaa

SEQ ID NO: 3714468 - RNA, 15 nt, Human
ucaaugugauucuaa

SEQ ID NO: 3714469 - RNA, 16 nt, Human
ucaaugugauucuaau

SEQ ID NO: 3714470 - RNA, 18 nt, Human
ucaauguggugaugaaau

SEQ ID NO: 3714471 - RNA, 18 nt, Human
ucaauguucauuguaaug

SEQ ID NO: 3714472 - RNA, 11 nt, Human
ucaauguuuga

SEQ ID NO: 3714473 - RNA, 22 nt, Human
ucaauguuugaggagcauguuu

SEQ ID NO: 3714474 - RNA, 14 nt, Human
ucaauguuuuuaaa

SEQ ID NO: 3714475 - RNA, 18 nt, Human
uauguauuguaaacaugu

SEQ ID NO: 3714476 - RNA, 22 nt, Human
uauguauuguaaacauguguuu

SEQ ID NO: 3714477 - RNA, 15 nt, Human
uauguauugugcaau

SEQ ID NO: 3714478 - RNA, 10 nt, Human
uauguauuuu

SEQ ID NO: 3714479 - RNA, 19 nt, Human
uauguauuuuauguauguu

SEQ ID NO: 3714480 - RNA, 14 nt, Human
uaugucaaagcagg

SEQ ID NO: 3714481 - RNA, 23 nt, Human
uaugucaagggcagcuuugcuca

SEQ ID NO: 3714482 - RNA, 15 nt, Human
uaugucaucacucua

SEQ ID NO: 3714483 - RNA, 15 nt, Human
uaugucauuucaugu

SEQ ID NO: 3714484 - RNA, 23 nt, Human
uaugucauuuccuucaaggcauc

SEQ ID NO: 3714485 - RNA, 23 nt, Human
uauguccacuguguauagaagua

SEQ ID NO: 3714486 - RNA, 15 nt, Human
uaugucccuugcugu

SEQ ID NO: 3714487 - RNA, 20 nt, Human
uauguccugugagaugugua

SEQ ID NO: 3714488 - RNA, 18 nt, Human
uaugucugcuccuuuccc

SEQ ID NO: 3714489 - RNA, 13 nt, Human
uaugucugguucu

SEQ ID NO: 3714490 - RNA, 10 nt, Human
uaugucuguu

SEQ ID NO: 3714491 - RNA, 18 nt, Human
uaugucuguuuaagaaaa

SEQ ID NO: 3714492 - RNA, 14 nt, Human
uaugucuuaaaacc

SEQ ID NO: 3714493 - RNA, 17 nt, Human
uaugucuuaaaaccugc

SEQ ID NO: 3714494 - RNA, 14 nt, Human
uaugucuuggacac

SEQ ID NO: 3714495 - RNA, 19 nt, Human
uaugucuuggacacuguac

SEQ ID NO: 3714496 - RNA, 12 nt, Human
uaugugaacagu

SEQ ID NO: 3714497 - RNA, 22 nt, Human
uaugugaacaguuguguuugaa

SEQ ID NO: 3714498 - RNA, 12 nt, Human
uaugugaaugau

SEQ ID NO: 3714499 - RNA, 12 nt, Human
uaugugaauuuu

SEQ ID NO: 3714500 - RNA, 18 nt, Human
uaugugacauuuuacauu

SEQ ID NO: 3714501 - RNA, 19 nt, Human
uaugugacauuuuacauua

SEQ ID NO: 3714502 - RNA, 21 nt, Human
uaugugacauuuuacauuaaa

SEQ ID NO: 3714503 - RNA, 13 nt, Human
uaugugagugugu

SEQ ID NO: 3714504 - RNA, 18 nt, Human
uaugugaucugucuugua

SEQ ID NO: 3714505 - RNA, 19 nt, Human
uaugugaucugucuuguaa

SEQ ID NO: 3714506 - RNA, 18 nt, Human
uaugugauuuuaacucug

SEQ ID NO: 3714507 - RNA, 22 nt, Human
uaugugauuuuuuuucccauuu

SEQ ID NO: 3714508 - RNA, 20 nt, Human
uaugugcacugucacuuugc

SEQ ID NO: 3714509 - RNA, 20 nt, Human
uauguggaguucaucuugaa

SEQ ID NO: 3714510 - RNA, 17 nt, Human
uaugugggcagauuuuc

SEQ ID NO: 3714511 - RNA, 19 nt, Human
uaugugguuuuagauuuuc

SEQ ID NO: 3714512 - RNA, 13 nt, Human
uauguguaggcag

SEQ ID NO: 3714513 - RNA, 17 nt, Human
uauguguauauauacau

SEQ ID NO: 3714514 - RNA, 22 nt, Human
uauguguauauauacauacacu

SEQ ID NO: 3714515 - RNA, 16 nt, Human
uaugugugaggagcug

SEQ ID NO: 3714516 - RNA, 13 nt, Human
uaugugugcaugu

SEQ ID NO: 3714517 - RNA, 20 nt, Human
uaugugugcauguguguaua

SEQ ID NO: 3714518 - RNA, 12 nt, Human
uauguguguaug

SEQ ID NO: 3714519 - RNA, 13 nt, Human
uauguguguguau

SEQ ID NO: 3714520 - RNA, 19 nt, Human
uauguguguguauguuugc

SEQ ID NO: 3714521 - RNA, 14 nt, Human
uauguguguguguu

SEQ ID NO: 3714522 - RNA, 14 nt, Human
uauguguguuuaaa

SEQ ID NO: 3714523 - RNA, 16 nt, Human
uauguguugaaaacca

SEQ ID NO: 3714524 - RNA, 18 nt, Human
uauguguugaaaaccaaa

SEQ ID NO: 3714525 - RNA, 23 nt, Human
uauguguugaaaaccaaaaugac

SEQ ID NO: 3714526 - RNA, 14 nt, Human
uauguguuggcuug

SEQ ID NO: 3714527 - RNA, 16 nt, Human
uauguguuuacuuuaa

SEQ ID NO: 3714528 - RNA, 17 nt, Human
uauguguuuuucacauu

SEQ ID NO: 3714529 - RNA, 21 nt, Human
uauguguuuuucucauauuug

SEQ ID NO: 3714530 - RNA, 12 nt, Human
uauguuaaaacu

SEQ ID NO: 3714531 - RNA, 21 nt, Human
uauguuaaacuagcauaucug

SEQ ID NO: 3714532 - RNA, 20 nt, Human
uauguuaaccucagugucau

SEQ ID NO: 3714533 - RNA, 22 nt, Human
uauguuaaccucagugucauuu

SEQ ID NO: 3714534 - RNA, 19 nt, Human
uauguuaagcucuuuauga

SEQ ID NO: 3714535 - RNA, 19 nt, Human
uauguuaagggaagaauuc

SEQ ID NO: 3714536 - RNA, 15 nt, Human
uauguuaaguuacuu

SEQ ID NO: 3714537 - RNA, 22 nt, Human
uauguuacaucuguuuuaaauu

SEQ ID NO: 3714538 - RNA, 16 nt, Human
uauguuacuauuuucu

SEQ ID NO: 3714539 - RNA, 20 nt, Human
uauguuauacaaccuucauu

SEQ ID NO: 3714540 - RNA, 21 nt, Human
uauguuauacaaccuucauuu

SEQ ID NO: 3714541 - RNA, 22 nt, Human
uauguuauagaacuucauggau

SEQ ID NO: 3714542 - RNA, 20 nt, Human
uauguuauauauaaauauau

SEQ ID NO: 3714543 - RNA, 14 nt, Human
uauguucacaccua

SEQ ID NO: 3714544 - RNA, 17 nt, Human
uauguucuaagaaguga

SEQ ID NO: 3714545 - RNA, 16 nt, Human
uauguugaaaaaauuu

SEQ ID NO: 3714546 - RNA, 12 nt, Human
uauguugaauac

SEQ ID NO: 3714547 - RNA, 15 nt, Human
uauguugacauuugu

SEQ ID NO: 3714548 - RNA, 16 nt, Human
uauguugacauuuguu

SEQ ID NO: 3714549 - RNA, 18 nt, Human
uauguugaccuaagauuu

SEQ ID NO: 3714550 - RNA, 18 nt, Human
uauguugauccauccagc

SEQ ID NO: 3714551 - RNA, 16 nt, Human
uauguugcauagaaua

SEQ ID NO: 3714552 - RNA, 13 nt, Human
uauguugcccagg

SEQ ID NO: 3714553 - RNA, 20 nt, Human
uauguugcccaggcaggucu

SEQ ID NO: 3714554 - RNA, 18 nt, Human
uauguugccuuuaugguu

SEQ ID NO: 3714555 - RNA, 20 nt, Human
uauguugccuuuaugguuuc

SEQ ID NO: 3714556 - RNA, 18 nt, Human
uauguugguagauucuaa

SEQ ID NO: 3714557 - RNA, 16 nt, Human
uauguuguccaauugu

SEQ ID NO: 3714558 - RNA, 15 nt, Human
uauguugugaagaug

SEQ ID NO: 3714559 - RNA, 18 nt, Human
uauguuguuuauaauaaa

SEQ ID NO: 3714560 - RNA, 16 nt, Human
uauguuguuuuguaca

SEQ ID NO: 3714561 - RNA, 22 nt, Human
uauguuuaaaguaauuguucca

SEQ ID NO: 3714562 - RNA, 13 nt, Human
uauguuuacacug

SEQ ID NO: 3714563 - RNA, 15 nt, Human
uauguuuacacuguc

SEQ ID NO: 3714564 - RNA, 16 nt, Human
uauguuuacacuguca

SEQ ID NO: 3714565 - RNA, 15 nt, Human
uauguuucaaacuuu

SEQ ID NO: 3714566 - RNA, 12 nt, Human
uauguuuccuug

SEQ ID NO: 3714567 - RNA, 23 nt, Human
uauguuucucuuugauuauuugc

SEQ ID NO: 3714568 - RNA, 14 nt, Human
uauguuugaauaug

SEQ ID NO: 3714569 - RNA, 17 nt, Human
uauguuugaauauggac

SEQ ID NO: 3714570 - RNA, 14 nt, Human
uauguuugcacacu

SEQ ID NO: 3714571 - RNA, 19 nt, Human
uauguuugcacacuugugu

SEQ ID NO: 3714572 - RNA, 23 nt, Human
uauguuugcucagaacacauucu

SEQ ID NO: 3714573 - RNA, 17 nt, Human
uauguuuuaagaggcag

SEQ ID NO: 3714574 - RNA, 19 nt, Human
uauguuuuaagaggcaggg

SEQ ID NO: 3714575 - RNA, 15 nt, Human
uauguuuuauauagc

SEQ ID NO: 3714576 - RNA, 14 nt, Human
uauguuuugguauc

SEQ ID NO: 3714577 - RNA, 18 nt, Human
uauguuuugguaucuguu

SEQ ID NO: 3714578 - RNA, 15 nt, Human
uauguuuuguuucug

SEQ ID NO: 3714579 - RNA, 13 nt, Human
uauguuuuuaaug

SEQ ID NO: 3714580 - RNA, 11 nt, Human
uauguuuuuca

SEQ ID NO: 3714581 - RNA, 16 nt, Human
uauguuuuucaguuca

SEQ ID NO: 3714582 - RNA, 13 nt, Human
uauguuuuucugu

SEQ ID NO: 3714583 - RNA, 22 nt, Human
uauguuuuucugugugucaguu

SEQ ID NO: 3714584 - RNA, 14 nt, Human
uauguuuuugugua

SEQ ID NO: 3714585 - RNA, 14 nt, Human
uauuaaaaaaaaca

SEQ ID NO: 3714586 - RNA, 15 nt, Human
uauuaaaaaacuuca

SEQ ID NO: 3714587 - RNA, 15 nt, Human
uauuaaaaaagucua

SEQ ID NO: 3714588 - RNA, 22 nt, Human
uauuaaaaauauggaacuucua

SEQ ID NO: 3714589 - RNA, 18 nt, Human
uauuaaaaaucucaaauu

SEQ ID NO: 3714590 - RNA, 23 nt, Human
uauuaaaaaucucaaauuucuaa

SEQ ID NO: 3714591 - RNA, 17 nt, Human
uauuaaaacauuggauu

SEQ ID NO: 3714592 - RNA, 19 nt, Human
uauuaaaacauuggauuau

SEQ ID NO: 3714593 - RNA, 12 nt, Human
uauuaaaacuaa

SEQ ID NO: 3714594 - RNA, 16 nt, Human
uauuaaaacucauuuu

SEQ ID NO: 3714595 - RNA, 16 nt, Human
uauuaaaauauuucag

SEQ ID NO: 3714596 - RNA, 22 nt, Human
uauuaaaaugauuguaaaauag

SEQ ID NO: 3714597 - RNA, 13 nt, Human
uauuaaaauguau

SEQ ID NO: 3714598 - RNA, 14 nt, Human
uauuaaaauuccaa

SEQ ID NO: 3714599 - RNA, 19 nt, Human
uauuaaaauucugaauuuu

SEQ ID NO: 3714600 - RNA, 16 nt, Human
uauuaaaauuguuguc

SEQ ID NO: 3714601 - RNA, 13 nt, Human
uauuaaacaaagu

SEQ ID NO: 3714602 - RNA, 19 nt, Human
uauuaaacaaaguuucaga

SEQ ID NO: 3714603 - RNA, 21 nt, Human
uauuaaacagauuuuuacaaa

SEQ ID NO: 3714604 - RNA, 15 nt, Human
uauuaaacaugcugu

SEQ ID NO: 3714605 - RNA, 20 nt, Human
uauuaaacguaugcauguga

SEQ ID NO: 3714606 - RNA, 22 nt, Human
uauuaaacguaugcaugugaag

SEQ ID NO: 3714607 - RNA, 13 nt, Human
uauuaaagaaaaa

SEQ ID NO: 3714608 - RNA, 22 nt, Human
uauuaaagaaaaaaauguauuu

SEQ ID NO: 3714609 - RNA, 20 nt, Human
uauuaaagccauguuuauua

SEQ ID NO: 3714610 - RNA, 22 nt, Human
uauuaaagugcuaagguucuaa

SEQ ID NO: 3714611 - RNA, 13 nt, Human
uauuaaaguuuca

SEQ ID NO: 3714612 - RNA, 16 nt, Human
uauuaaaguuucaaaa

SEQ ID NO: 3714613 - RNA, 14 nt, Human
uauuaaauaaaaug

SEQ ID NO: 3714614 - RNA, 23 nt, Human
uauuaaauaaaaugcacaaaacu

SEQ ID NO: 3714615 - RNA, 16 nt, Human
uauuaaauacaaaacu

SEQ ID NO: 3714616 - RNA, 19 nt, Human
uauuaaauacaaaacuucc

SEQ ID NO: 3714617 - RNA, 18 nt, Human
uauuaaauacagacacua

SEQ ID NO: 3714618 - RNA, 23 nt, Human
uauuaaauauaugauuagccagg

SEQ ID NO: 3714619 - RNA, 19 nt, Human
uauuaaaugcccagccccu

SEQ ID NO: 3714620 - RNA, 19 nt, Human
uauuaaauuaaauuuugug

SEQ ID NO: 3714621 - RNA, 20 nt, Human
uauuaaauuuuuuuguauga

SEQ ID NO: 3714622 - RNA, 22 nt, Human
uauuaaauuuuuuuguaugaaa

SEQ ID NO: 3714623 - RNA, 14 nt, Human
uauuaacaaaaguu

SEQ ID NO: 3714624 - RNA, 23 nt, Human
uauuaacaaacaucacucugcug

SEQ ID NO: 3714625 - RNA, 23 nt, Human
ucaauuaaaauagucucuuuaaa

SEQ ID NO: 3714626 - RNA, 14 nt, Human
ucaauuaaacggau

SEQ ID NO: 3714627 - RNA, 12 nt, Human
ucaauuaaaugu

SEQ ID NO: 3714628 - RNA, 13 nt, Human
ucaauuaacaaua

SEQ ID NO: 3714629 - RNA, 13 nt, Human
ucaauuacaggaa

SEQ ID NO: 3714630 - RNA, 21 nt, Human
ucaauuacaggaaguacugga

SEQ ID NO: 3714631 - RNA, 23 nt, Human
ucaauuacaggaaguacuggaga

SEQ ID NO: 3714632 - RNA, 17 nt, Human
ucaauuaccagaaagau

SEQ ID NO: 3714633 - RNA, 13 nt, Human
ucaauuacugguc

SEQ ID NO: 3714634 - RNA, 16 nt, Human
ucaauuacugguccaa

SEQ ID NO: 3714635 - RNA, 20 nt, Human
ucaauuaguaacauucaugu

SEQ ID NO: 3714636 - RNA, 14 nt, Human
ucaauuauaguuuc

SEQ ID NO: 3714637 - RNA, 15 nt, Human
ucaauuauaguuucu

SEQ ID NO: 3714638 - RNA, 18 nt, Human
ucaauuauaguuucugag

SEQ ID NO: 3714639 - RNA, 23 nt, Human
ucaauuccaacacugauuucccc

SEQ ID NO: 3714640 - RNA, 19 nt, Human
ucaauuccaacaguuuaau

SEQ ID NO: 3714641 - RNA, 15 nt, Human
ucaauugaaugguca

SEQ ID NO: 3714642 - RNA, 18 nt, Human
ucaauugcaucucccaga

SEQ ID NO: 3714643 - RNA, 13 nt, Human
ucaauuguaaauu

SEQ ID NO: 3714644 - RNA, 14 nt, Human
ucaauuguaaauug

SEQ ID NO: 3714645 - RNA, 20 nt, Human
ucaauuuauucaagaaaagu

SEQ ID NO: 3714646 - RNA, 20 nt, Human
ucaauuuauuugaaugauuu

SEQ ID NO: 3714647 - RNA, 20 nt, Human
ucaauuuccaagagcugagg

SEQ ID NO: 3714648 - RNA, 18 nt, Human
ucaauuucccugacuccu

SEQ ID NO: 3714649 - RNA, 15 nt, Human
ucaauuucuguguug

SEQ ID NO: 3714650 - RNA, 23 nt, Human
ucaauuucuguguugccaagcuc

SEQ ID NO: 3714651 - RNA, 18 nt, Human
ucaauuugucauuuugaa

SEQ ID NO: 3714652 - RNA, 17 nt, Human
ucaauuuuugucucaga

SEQ ID NO: 3714653 - RNA, 20 nt, Human
ucacaaaaauuugaacacug

SEQ ID NO: 3714654 - RNA, 21 nt, Human
ucacaaaaauuugaacacugg

SEQ ID NO: 3714655 - RNA, 16 nt, Human
ucacaaaacagccuuu

SEQ ID NO: 3714656 - RNA, 22 nt, Human
ucacaaaacagccuuugggaaa

SEQ ID NO: 3714657 - RNA, 15 nt, Human
ucacaaaauaucacc

SEQ ID NO: 3714658 - RNA, 14 nt, Human
ucacaaaauuuuau

SEQ ID NO: 3714659 - RNA, 15 nt, Human
ucacaaacuuuuaua

SEQ ID NO: 3714660 - RNA, 11 nt, Human
ucacaaaggau

SEQ ID NO: 3714661 - RNA, 14 nt, Human
ucacaaauauuaaa

SEQ ID NO: 3714662 - RNA, 15 nt, Human
ucacaaauauuaaaa

SEQ ID NO: 3714663 - RNA, 15 nt, Human
ucacaaaugacuuua

SEQ ID NO: 3714664 - RNA, 14 nt, Human
ucacaaauuucucu

SEQ ID NO: 3714665 - RNA, 19 nt, Human
ucacaaauuucucuguucc

SEQ ID NO: 3714666 - RNA, 21 nt, Human
ucacaacagauuauuaccuua

SEQ ID NO: 3714667 - RNA, 14 nt, Human
ucacaacagccuga

SEQ ID NO: 3714668 - RNA, 19 nt, Human
ucacaaccaccguuacaag

SEQ ID NO: 3714669 - RNA, 14 nt, Human
ucacaaccugaacc

SEQ ID NO: 3714670 - RNA, 19 nt, Human
ucacaaccugaaccuagga

SEQ ID NO: 3714671 - RNA, 14 nt, Human
ucacaaccuucugu

SEQ ID NO: 3714672 - RNA, 16 nt, Human
ucacaacgugcauugu

SEQ ID NO: 3714673 - RNA, 18 nt, Human
ucacaacgugcauugugc

SEQ ID NO: 3714674 - RNA, 19 nt, Human
ucacaacgugcauugugcu

SEQ ID NO: 3714675 - RNA, 21 nt, Human
ucacaacgugcauugugcuuc

SEQ ID NO: 3714676 - RNA, 12 nt, Human
ucacaagaacac

SEQ ID NO: 3714677 - RNA, 22 nt, Human
ucacaagacccaaaaggcagaa

SEQ ID NO: 3714678 - RNA, 13 nt, Human
ucacaagcugccu

SEQ ID NO: 3714679 - RNA, 23 nt, Human
ucacaagcugccucccuguccac

SEQ ID NO: 3714680 - RNA, 18 nt, Human
ucacaaggcagcaaggcc

SEQ ID NO: 3714681 - RNA, 18 nt, Human
ucacaagggacgcuuugg

SEQ ID NO: 3714682 - RNA, 22 nt, Human
ucacaagggcaaacuuuuuccu

SEQ ID NO: 3714683 - RNA, 20 nt, Human
ucacaauaaaaauggcucag

SEQ ID NO: 3714684 - RNA, 18 nt, Human
ucacaauaaauguauuca

SEQ ID NO: 3714685 - RNA, 14 nt, Human
ucacaauacagaua

SEQ ID NO: 3714686 - RNA, 15 nt, Human
ucacaauacagauaa

SEQ ID NO: 3714687 - RNA, 21 nt, Human
ucacaauggugcucauuucau

SEQ ID NO: 3714688 - RNA, 14 nt, Human
ucacaauguucuuu

SEQ ID NO: 3714689 - RNA, 16 nt, Human
ucacaauguucuuuau

SEQ ID NO: 3714690 - RNA, 17 nt, Human
ucacaauguucuuuaua

SEQ ID NO: 3714691 - RNA, 13 nt, Human
ucacaauuuuuaa

SEQ ID NO: 3714692 - RNA, 10 nt, Human
ucacacacac

SEQ ID NO: 3714693 - RNA, 19 nt, Human
ucacacacagacuguuguc

SEQ ID NO: 3714694 - RNA, 14 nt, Human
ucacacacauagau

SEQ ID NO: 3714695 - RNA, 16 nt, Human
ucacacacccugaggu

SEQ ID NO: 3714696 - RNA, 15 nt, Human
ucacacacuuuggcu

SEQ ID NO: 3714697 - RNA, 18 nt, Human
ucacacagccaggugccu

SEQ ID NO: 3714698 - RNA, 22 nt, Human
ucacacagccaggugccuugga

SEQ ID NO: 3714699 - RNA, 19 nt, Human
ucacacaggcauuuccugg

SEQ ID NO: 3714700 - RNA, 22 nt, Human
ucacacaugagcaucaggccag

SEQ ID NO: 3714701 - RNA, 20 nt, Human
ucacaccacuagccucaggg

SEQ ID NO: 3714702 - RNA, 22 nt, Human
ucacaccaggcuugccugcagg

SEQ ID NO: 3714703 - RNA, 22 nt, Human
ucacacccaacuugguuuugcu

SEQ ID NO: 3714704 - RNA, 11 nt, Human
ucacacccacc

SEQ ID NO: 3714705 - RNA, 20 nt, Human
ucacacccaccguccgcccu

SEQ ID NO: 3714706 - RNA, 21 nt, Human
ucacacccaccguccgcccug

SEQ ID NO: 3714707 - RNA, 16 nt, Human
ucacaccccaccugcg

SEQ ID NO: 3714708 - RNA, 12 nt, Human
ucacacccugca

SEQ ID NO: 3714709 - RNA, 13 nt, Human
ucacacccugcaa

SEQ ID NO: 3714710 - RNA, 15 nt, Human
ucacacccugcaagg

SEQ ID NO: 3714711 - RNA, 17 nt, Human
ucacacccugcaaggcc

SEQ ID NO: 3714712 - RNA, 21 nt, Human
ucacacccugcaaggcccaca

SEQ ID NO: 3714713 - RNA, 19 nt, Human
ucacaccugacucugaaau

SEQ ID NO: 3714714 - RNA, 13 nt, Human
ucacaccugcaga

SEQ ID NO: 3714715 - RNA, 19 nt, Human
ucacaccuguaaucccaac

SEQ ID NO: 3714716 - RNA, 17 nt, Human
ucacacgggggcagcug

SEQ ID NO: 3714717 - RNA, 18 nt, Human
ucacacgggggcagcuga

SEQ ID NO: 3714718 - RNA, 22 nt, Human
ucacacgucuggcuucacagau

SEQ ID NO: 3714719 - RNA, 16 nt, Human
ucacacucuaacugua

SEQ ID NO: 3714720 - RNA, 21 nt, Human
ucacacucuaacuguauauuu

SEQ ID NO: 3714721 - RNA, 17 nt, Human
ucacacucucacauguu

SEQ ID NO: 3714722 - RNA, 19 nt, Human
ucacacugagaauguaaga

SEQ ID NO: 3714723 - RNA, 21 nt, Human
ucacacugagaauguaagaac

SEQ ID NO: 3714724 - RNA, 20 nt, Human
ucacacugcaagagccuugg

SEQ ID NO: 3714725 - RNA, 16 nt, Human
ucacacuggguggugg

SEQ ID NO: 3714726 - RNA, 20 nt, Human
ucacacugguucucaaugaa

SEQ ID NO: 3714727 - RNA, 16 nt, Human
ucacacugucuucuga

SEQ ID NO: 3714728 - RNA, 18 nt, Human
ucacacuuccaccagccu

SEQ ID NO: 3714729 - RNA, 16 nt, Human
ucacacuucugugaga

SEQ ID NO: 3714730 - RNA, 23 nt, Human
ucacagaaaugagaucaggcucu

SEQ ID NO: 3714731 - RNA, 12 nt, Human
ucacagaagaau

SEQ ID NO: 3714732 - RNA, 15 nt, Human
ucacagacaggaccc

SEQ ID NO: 3714733 - RNA, 14 nt, Human
ucacagaccuggag

SEQ ID NO: 3714734 - RNA, 19 nt, Human
ucacagaccuggagccccu

SEQ ID NO: 3714735 - RNA, 22 nt, Human
ucacagaccuggagccccuggg

SEQ ID NO: 3714736 - RNA, 16 nt, Human
ucacagacuggagaca

SEQ ID NO: 3714737 - RNA, 15 nt, Human
ucacagagacacagg

SEQ ID NO: 3714738 - RNA, 23 nt, Human
ucacagagacauuccuccgagcc

SEQ ID NO: 3714739 - RNA, 12 nt, Human
ucacagaggcuu

SEQ ID NO: 3714740 - RNA, 17 nt, Human
ucacagaggcuucuuca

SEQ ID NO: 3714741 - RNA, 12 nt, Human
ucacagagucaa

SEQ ID NO: 3714742 - RNA, 16 nt, Human
ucacagagucaaggcc

SEQ ID NO: 3714743 - RNA, 18 nt, Human
ucacagagucaaggccug

SEQ ID NO: 3714744 - RNA, 14 nt, Human
ucacagagugugcu

SEQ ID NO: 3714745 - RNA, 19 nt, Human
ucacagagugugcuggagg

SEQ ID NO: 3714746 - RNA, 22 nt, Human
ucacagaugaguuaucuaagaa

SEQ ID NO: 3714747 - RNA, 23 nt, Human
ucacagcaagucacuggccagug

SEQ ID NO: 3714748 - RNA, 13 nt, Human
ucacagcagccuc

SEQ ID NO: 3714749 - RNA, 16 nt, Human
ucacagccaccccuga

SEQ ID NO: 3714750 - RNA, 15 nt, Human
ucacagcccagcccg

SEQ ID NO: 3714751 - RNA, 13 nt, Human
ucacagccuccuc

SEQ ID NO: 3714752 - RNA, 17 nt, Human
ucacagccuccucuguc

SEQ ID NO: 3714753 - RNA, 19 nt, Human
ucacagccuccucugucug

SEQ ID NO: 3714754 - RNA, 20 nt, Human
ucacagccuccucugucugc

SEQ ID NO: 3714755 - RNA, 11 nt, Human
ucacagccucu

SEQ ID NO: 3714756 - RNA, 13 nt, Human
ucacagccucuga

SEQ ID NO: 3714757 - RNA, 17 nt, Human
ucacagccucugacccc

SEQ ID NO: 3714758 - RNA, 18 nt, Human
ucacagccucugaccccu

SEQ ID NO: 3714759 - RNA, 19 nt, Human
ucacagccucugaccccuc

SEQ ID NO: 3714760 - RNA, 11 nt, Human
ucacagcugcu

SEQ ID NO: 3714761 - RNA, 13 nt, Human
ucacagcugcuuu

SEQ ID NO: 3714762 - RNA, 15 nt, Human
ucacagcuucagcca

SEQ ID NO: 3714763 - RNA, 16 nt, Human
ucacagcuucagccag

SEQ ID NO: 3714764 - RNA, 17 nt, Human
ucacagcuucagccagg

SEQ ID NO: 3714765 - RNA, 19 nt, Human
ucacagcuucagccaggag

SEQ ID NO: 3714766 - RNA, 17 nt, Human
ucacagcuuguuuugga

SEQ ID NO: 3714767 - RNA, 14 nt, Human
ucacaggaaguaga

SEQ ID NO: 3714768 - RNA, 19 nt, Human
ucacaggaaguagaggagg

SEQ ID NO: 3714769 - RNA, 18 nt, Human
ucacaggacucugccucc

SEQ ID NO: 3714770 - RNA, 22 nt, Human
ucacaggagggagggggaaggc

SEQ ID NO: 3714771 - RNA, 19 nt, Human
ucacaggcagccagugccc

SEQ ID NO: 3714772 - RNA, 22 nt, Human
ucacaggcagccagugcccuga

SEQ ID NO: 3714773 - RNA, 11 nt, Human
ucacaggcagg

SEQ ID NO: 3714774 - RNA, 12 nt, Human
ucacaggcaggu

SEQ ID NO: 3714775 - RNA, 17 nt, Human
gccucuuguaaagacug

SEQ ID NO: 3714776 - RNA, 12 nt, Human
gccucuugucuu

SEQ ID NO: 3714777 - RNA, 16 nt, Human
gccucuuucccuagga

SEQ ID NO: 3714778 - RNA, 14 nt, Human
gccucuuucccuuc

SEQ ID NO: 3714779 - RNA, 17 nt, Human
gccucuuucugucccuu

SEQ ID NO: 3714780 - RNA, 17 nt, Human
gccucuuuuaccugcug

SEQ ID NO: 3714781 - RNA, 22 nt, Human
gccucuuuuaccugcugcuucu

SEQ ID NO: 3714782 - RNA, 16 nt, Human
gccugaaagaggcuga

SEQ ID NO: 3714783 - RNA, 23 nt, Human
gccugaaagaggcugaggccugg

SEQ ID NO: 3714784 - RNA, 17 nt, Human
gccugaaaggagcccuu

SEQ ID NO: 3714785 - RNA, 23 nt, Human
gccugaaaggagcccuuaucugu

SEQ ID NO: 3714786 - RNA, 19 nt, Human
gccugaaauccugguuccu

SEQ ID NO: 3714787 - RNA, 18 nt, Human
gccugaaauuucaccauu

SEQ ID NO: 3714788 - RNA, 20 nt, Human
gccugaacagaagcucuuac

SEQ ID NO: 3714789 - RNA, 15 nt, Human
gccugaacauccuuc

SEQ ID NO: 3714790 - RNA, 18 nt, Human
gccugaagaguccucuga

SEQ ID NO: 3714791 - RNA, 15 nt, Human
gccugaagccagcug

SEQ ID NO: 3714792 - RNA, 17 nt, Human
gccugaagucacacagu

SEQ ID NO: 3714793 - RNA, 18 nt, Human
gccugaagucacacagug

SEQ ID NO: 3714794 - RNA, 14 nt, Human
gccugaccuccccc

SEQ ID NO: 3714795 - RNA, 14 nt, Human
gccugacugccaag

SEQ ID NO: 3714796 - RNA, 15 nt, Human
gccugacugccaagc

SEQ ID NO: 3714797 - RNA, 16 nt, Human
gccugacugccaagcc

SEQ ID NO: 3714798 - RNA, 13 nt, Human
gccugacuugggg

SEQ ID NO: 3714799 - RNA, 15 nt, Human
gccugagacccagga

SEQ ID NO: 3714800 - RNA, 19 nt, Human
gccugagagaauuggcuca

SEQ ID NO: 3714801 - RNA, 19 nt, Human
gccugagagacauggcuuu

SEQ ID NO: 3714802 - RNA, 21 nt, Human
gccugagaguauuuaggcaga

SEQ ID NO: 3714803 - RNA, 13 nt, Human
gccugagaugguc

SEQ ID NO: 3714804 - RNA, 22 nt, Human
gccugagauuucaucugcucuc

SEQ ID NO: 3714805 - RNA, 23 nt, Human
gccugagauuucaucugcucucc

SEQ ID NO: 3714806 - RNA, 20 nt, Human
gccugagcaccucccagccc

SEQ ID NO: 3714807 - RNA, 16 nt, Human
gccugagcccagggag

SEQ ID NO: 3714808 - RNA, 20 nt, Human
gccugagcgacagugagacu

SEQ ID NO: 3714809 - RNA, 16 nt, Human
gccugaggagcagcag

SEQ ID NO: 3714810 - RNA, 14 nt, Human
gccugaggaugagc

SEQ ID NO: 3714811 - RNA, 15 nt, Human
gccugaggcugagac

SEQ ID NO: 3714812 - RNA, 17 nt, Human
gccugaggcugagacug

SEQ ID NO: 3714813 - RNA, 18 nt, Human
gccugaggcugagacugc

SEQ ID NO: 3714814 - RNA, 13 nt, Human
gccugaggcuggg

SEQ ID NO: 3714815 - RNA, 18 nt, Human
gccugagggaaaggccag

SEQ ID NO: 3714816 - RNA, 16 nt, Human
gccugagggccccucu

SEQ ID NO: 3714817 - RNA, 17 nt, Human
gccugagggccccucug

SEQ ID NO: 3714818 - RNA, 19 nt, Human
gccugagggccccucugcc

SEQ ID NO: 3714819 - RNA, 21 nt, Human
gccugagggccccucugccca

SEQ ID NO: 3714820 - RNA, 23 nt, Human
gccugagggcgaggggagggugg

SEQ ID NO: 3714821 - RNA, 19 nt, Human
gccugaggggcagccugcc

SEQ ID NO: 3714822 - RNA, 17 nt, Human
gccugaggguggagacu

SEQ ID NO: 3714823 - RNA, 21 nt, Human
gccugaggucucgcugaugcu

SEQ ID NO: 3714824 - RNA, 18 nt, Human
gccugaggucuggcugcu

SEQ ID NO: 3714825 - RNA, 19 nt, Human
gccugaggucuggcugcuu

SEQ ID NO: 3714826 - RNA, 20 nt, Human
gccugaggucuggcugcuug

SEQ ID NO: 3714827 - RNA, 18 nt, Human
gccugaggucuguacguu

SEQ ID NO: 3714828 - RNA, 13 nt, Human
gccugaguacucc

SEQ ID NO: 3714829 - RNA, 18 nt, Human
gccugagucagggcccag

SEQ ID NO: 3714830 - RNA, 22 nt, Human
gccugagucagggcccagaggc

SEQ ID NO: 3714831 - RNA, 23 nt, Human
gccugaguccacgaccuaggcag

SEQ ID NO: 3714832 - RNA, 22 nt, Human
gccugagucgugaccugcuagg

SEQ ID NO: 3714833 - RNA, 15 nt, Human
gccugagucuccugu

SEQ ID NO: 3714834 - RNA, 16 nt, Human
gccugagucuccugug

SEQ ID NO: 3714835 - RNA, 20 nt, Human
gccugauaagcuucaaagcu

SEQ ID NO: 3714836 - RNA, 18 nt, Human
gccugauccagccucucc

SEQ ID NO: 3714837 - RNA, 22 nt, Human
gccugauccagccucuccccug

SEQ ID NO: 3714838 - RNA, 14 nt, Human
gccugaucucuucc

SEQ ID NO: 3714839 - RNA, 15 nt, Human
gccugaucugcccau

SEQ ID NO: 3714840 - RNA, 20 nt, Human
gccugaugacaauaaagcuu

SEQ ID NO: 3714841 - RNA, 12 nt, Human
gccugaugacag

SEQ ID NO: 3714842 - RNA, 16 nt, Human
gccugaugcucccucc

SEQ ID NO: 3714843 - RNA, 20 nt, Human
gccugaugcucccuccccug

SEQ ID NO: 3714844 - RNA, 17 nt, Human
gccugauggggaggguc

SEQ ID NO: 3714845 - RNA, 13 nt, Human
gccugauuaaaga

SEQ ID NO: 3714846 - RNA, 17 nt, Human
gccugauucggcugucu

SEQ ID NO: 3714847 - RNA, 19 nt, Human
gccugauugccaagcucag

SEQ ID NO: 3714848 - RNA, 21 nt, Human
gccugauugccaagcucagga

SEQ ID NO: 3714849 - RNA, 17 nt, Human
gccugcaaacgcugccu

SEQ ID NO: 3714850 - RNA, 18 nt, Human
gccugcaaacgcugccug

SEQ ID NO: 3714851 - RNA, 20 nt, Human
gccugcaaacgcugccugcc

SEQ ID NO: 3714852 - RNA, 21 nt, Human
gccugcaaacgcugccugccc

SEQ ID NO: 3714853 - RNA, 17 nt, Human
gccugcaaacugggaac

SEQ ID NO: 3714854 - RNA, 12 nt, Human
gccugcaccagg

SEQ ID NO: 3714855 - RNA, 13 nt, Human
gccugcaccagga

SEQ ID NO: 3714856 - RNA, 16 nt, Human
gccugcaccaggagac

SEQ ID NO: 3714857 - RNA, 23 nt, Human
gccugcacggugaauggcuuugu

SEQ ID NO: 3714858 - RNA, 21 nt, Human
gccugcacggugggccuugcu

SEQ ID NO: 3714859 - RNA, 22 nt, Human
gccugcacggugggccuugcug

SEQ ID NO: 3714860 - RNA, 16 nt, Human
gccugcagaauuuggg

SEQ ID NO: 3714861 - RNA, 12 nt, Human
gccugcagagag

SEQ ID NO: 3714862 - RNA, 17 nt, Human
gccugcagagagaagcc

SEQ ID NO: 3714863 - RNA, 18 nt, Human
gccugcagagagaagccu

SEQ ID NO: 3714864 - RNA, 21 nt, Human
gccugcagaggucugugcuga

SEQ ID NO: 3714865 - RNA, 23 nt, Human
gccugcaggaccucgugccaccc

SEQ ID NO: 3714866 - RNA, 17 nt, Human
gccugcaggaccugccu

SEQ ID NO: 3714867 - RNA, 20 nt, Human
gccugcagggaagccccaca

SEQ ID NO: 3714868 - RNA, 13 nt, Human
gccugcagggcca

SEQ ID NO: 3714869 - RNA, 19 nt, Human
gccugcaggguggugcugg

SEQ ID NO: 3714870 - RNA, 14 nt, Human
gccugcaggugcug

SEQ ID NO: 3714871 - RNA, 19 nt, Human
gccugcaggugcugcugcg

SEQ ID NO: 3714872 - RNA, 22 nt, Human
gccugcauaggaguuuggagga

SEQ ID NO: 3714873 - RNA, 23 nt, Human
gccugcaucccaggaugcugggu

SEQ ID NO: 3714874 - RNA, 13 nt, Human
gccugcauucugc

SEQ ID NO: 3714875 - RNA, 21 nt, Human
gccugcauugagcuugcaugc

SEQ ID NO: 3714876 - RNA, 15 nt, Human
gccugccagcugcac

SEQ ID NO: 3714877 - RNA, 11 nt, Human
gccugccagga

SEQ ID NO: 3714878 - RNA, 12 nt, Human
gccugccaggag

SEQ ID NO: 3714879 - RNA, 14 nt, Human
gccugccaggagga

SEQ ID NO: 3714880 - RNA, 20 nt, Human
gccugccaggaggacccagg

SEQ ID NO: 3714881 - RNA, 21 nt, Human
gccugccaggaggacccaggg

SEQ ID NO: 3714882 - RNA, 19 nt, Human
gccugccaguccuagcugc

SEQ ID NO: 3714883 - RNA, 14 nt, Human
gccugccauguacc

SEQ ID NO: 3714884 - RNA, 10 nt, Human
gccugcccac

SEQ ID NO: 3714885 - RNA, 19 nt, Human
gccugcccaccugccuggc

SEQ ID NO: 3714886 - RNA, 16 nt, Human
gccugcccagacaaga

SEQ ID NO: 3714887 - RNA, 13 nt, Human
gccugcccaggcc

SEQ ID NO: 3714888 - RNA, 19 nt, Human
gccugcccaggccccugcc

SEQ ID NO: 3714889 - RNA, 22 nt, Human
gccugcccauucugcccugugg

SEQ ID NO: 3714890 - RNA, 23 nt, Human
gccugccccaaacaaauaugcaa

SEQ ID NO: 3714891 - RNA, 12 nt, Human
gccugcccccac

SEQ ID NO: 3714892 - RNA, 19 nt, Human
gccugcccccaccccauuc

SEQ ID NO: 3714893 - RNA, 20 nt, Human
gccugccccgcccccagucc

SEQ ID NO: 3714894 - RNA, 22 nt, Human
gccugccccuacccuggacuug

SEQ ID NO: 3714895 - RNA, 14 nt, Human
gccugccccuccca

SEQ ID NO: 3714896 - RNA, 15 nt, Human
gccugccccucccag

SEQ ID NO: 3714897 - RNA, 16 nt, Human
gccugccccucccaga

SEQ ID NO: 3714898 - RNA, 14 nt, Human
gccugcccgcacag

SEQ ID NO: 3714899 - RNA, 19 nt, Human
gccugcccgcacagcagcc

SEQ ID NO: 3714900 - RNA, 21 nt, Human
gccugcccgcacagcagccug

SEQ ID NO: 3714901 - RNA, 16 nt, Human
gccugcccguaaacac

SEQ ID NO: 3714902 - RNA, 20 nt, Human
gccugcccgucucucuccca

SEQ ID NO: 3714903 - RNA, 14 nt, Human
gccugcccucaggg

SEQ ID NO: 3714904 - RNA, 22 nt, Human
gccugcccucauggccccucug

SEQ ID NO: 3714905 - RNA, 15 nt, Human
gccugcccuccccag

SEQ ID NO: 3714906 - RNA, 18 nt, Human
gccugcccuccccagagc

SEQ ID NO: 3714907 - RNA, 21 nt, Human
gccugcccuccccagagcacu

SEQ ID NO: 3714908 - RNA, 19 nt, Human
gccuguucccauucuugca

SEQ ID NO: 3714909 - RNA, 23 nt, Human
gccuguucccauucuugcauggc

SEQ ID NO: 3714910 - RNA, 16 nt, Human
gccuguugggccagga

SEQ ID NO: 3714911 - RNA, 18 nt, Human
gccuguugggccaggagc

SEQ ID NO: 3714912 - RNA, 14 nt, Human
gccuuaaaaccaaa

SEQ ID NO: 3714913 - RNA, 13 nt, Human
gccuuaaaacuuu

SEQ ID NO: 3714914 - RNA, 13 nt, Human
gccuuaaaaugga

SEQ ID NO: 3714915 - RNA, 19 nt, Human
gccuuaaaauggaauugaa

SEQ ID NO: 3714916 - RNA, 22 nt, Human
gccuuaaaauggaauugaaaaa

SEQ ID NO: 3714917 - RNA, 20 nt, Human
gccuuaaacacucaccuucu

SEQ ID NO: 3714918 - RNA, 22 nt, Human
gccuuaaagacaagacagcauu

SEQ ID NO: 3714919 - RNA, 14 nt, Human
gccuuaagcugauc

SEQ ID NO: 3714920 - RNA, 19 nt, Human
gccuuaauaaaaaaugaaa

SEQ ID NO: 3714921 - RNA, 19 nt, Human
gccuuaauuuccuuuuuga

SEQ ID NO: 3714922 - RNA, 23 nt, Human
gccuuaauuuccuuuuugacacu

SEQ ID NO: 3714923 - RNA, 16 nt, Human
gccuuacacaaugguu

SEQ ID NO: 3714924 - RNA, 19 nt, Human
gccuuaccuccugcccagg

SEQ ID NO: 3714925 - RNA, 21 nt, Human
gccuuaccuccugcccaggag

SEQ ID NO: 3714926 - RNA, 13 nt, Human
gccuuacuuugua

SEQ ID NO: 3714927 - RNA, 16 nt, Human
gccuuacuuuguauga

SEQ ID NO: 3714928 - RNA, 19 nt, Human
gccuuacuuuguaugauau

SEQ ID NO: 3714929 - RNA, 22 nt, Human
gccuuagaaauguaaacugcca

SEQ ID NO: 3714930 - RNA, 17 nt, Human
gccuuagaaccuuucuu

SEQ ID NO: 3714931 - RNA, 20 nt, Human
gccuuagaagucacacagua

SEQ ID NO: 3714932 - RNA, 13 nt, Human
gccuuagagccag

SEQ ID NO: 3714933 - RNA, 15 nt, Human
gccuuagagccaggc

SEQ ID NO: 3714934 - RNA, 23 nt, Human
gccuuagagccaggcacacacug

SEQ ID NO: 3714935 - RNA, 13 nt, Human
gccuuagaggagc

SEQ ID NO: 3714936 - RNA, 17 nt, Human
gccuuagcauguuugcu

SEQ ID NO: 3714937 - RNA, 15 nt, Human
gccuuagcuucagga

SEQ ID NO: 3714938 - RNA, 16 nt, Human
gccuuagcuucaggaa

SEQ ID NO: 3714939 - RNA, 17 nt, Human
gccuuagcuucaggaac

SEQ ID NO: 3714940 - RNA, 18 nt, Human
gccuuagcuucaggaacc

SEQ ID NO: 3714941 - RNA, 19 nt, Human
gccuuagcuucaggaaccu

SEQ ID NO: 3714942 - RNA, 14 nt, Human
gccuuagugggcca

SEQ ID NO: 3714943 - RNA, 17 nt, Human
gccuuagugggccaggg

SEQ ID NO: 3714944 - RNA, 13 nt, Human
gccuuaucaagug

SEQ ID NO: 3714945 - RNA, 14 nt, Human
gccuuaucaagugu

SEQ ID NO: 3714946 - RNA, 17 nt, Human
gccuuaucaagugucuu

SEQ ID NO: 3714947 - RNA, 20 nt, Human
gccuuaucaagugucuucca

SEQ ID NO: 3714948 - RNA, 16 nt, Human
gccuuauccucugauc

SEQ ID NO: 3714949 - RNA, 17 nt, Human
gccuuauccucugaucu

SEQ ID NO: 3714950 - RNA, 22 nt, Human
gccuuaucuugcaccccaaagc

SEQ ID NO: 3714951 - RNA, 18 nt, Human
gccuuauggaacacucug

SEQ ID NO: 3714952 - RNA, 19 nt, Human
gccuucaaaacuauagcuu

SEQ ID NO: 3714953 - RNA, 22 nt, Human
gccuucaaaacuauagcuugca

SEQ ID NO: 3714954 - RNA, 20 nt, Human
gccuucaagaaaacaggcac

SEQ ID NO: 3714955 - RNA, 22 nt, Human
gccuucaagaaaacaggcacug

SEQ ID NO: 3714956 - RNA, 22 nt, Human
gccuucaagcucugagggaaag

SEQ ID NO: 3714957 - RNA, 22 nt, Human
gccuucacaaucugucaguucu

SEQ ID NO: 3714958 - RNA, 17 nt, Human
gccuucagaaccaucca

SEQ ID NO: 3714959 - RNA, 21 nt, Human
gccuucagggagugagggauu

SEQ ID NO: 3714960 - RNA, 18 nt, Human
gccuucauaucauccaca

SEQ ID NO: 3714961 - RNA, 13 nt, Human
gccuucaucuccc

SEQ ID NO: 3714962 - RNA, 13 nt, Human
gccuucauuaccu

SEQ ID NO: 3714963 - RNA, 21 nt, Human
gccuuccagauccucucuggg

SEQ ID NO: 3714964 - RNA, 15 nt, Human
gccuuccagcugcug

SEQ ID NO: 3714965 - RNA, 14 nt, Human
uauuuaaggagaug

SEQ ID NO: 3714966 - RNA, 11 nt, Human
uauuuaauaac

SEQ ID NO: 3714967 - RNA, 17 nt, Human
uauuuaauaacaauugu

SEQ ID NO: 3714968 - RNA, 13 nt, Human
uauuuaauaacau

SEQ ID NO: 3714969 - RNA, 14 nt, Human
uauuuaauauuuaa

SEQ ID NO: 3714970 - RNA, 15 nt, Human
uauuuaaucuuuuau

SEQ ID NO: 3714971 - RNA, 21 nt, Human
uauuuaaugaaagacuguaca

SEQ ID NO: 3714972 - RNA, 19 nt, Human
uauuuaaugauaaguaaau

SEQ ID NO: 3714973 - RNA, 21 nt, Human
uauuuaaugccgauauacucu

SEQ ID NO: 3714974 - RNA, 20 nt, Human
uauuuaauggaaguguauuu

SEQ ID NO: 3714975 - RNA, 20 nt, Human
uauuuaauguugaacaaaau

SEQ ID NO: 3714976 - RNA, 13 nt, Human
uauuuaauguuuu

SEQ ID NO: 3714977 - RNA, 14 nt, Human
uauuuaauuauuaa

SEQ ID NO: 3714978 - RNA, 18 nt, Human
uauuuaauuguaaacugu

SEQ ID NO: 3714979 - RNA, 16 nt, Human
uauuuaauuugaaggu

SEQ ID NO: 3714980 - RNA, 23 nt, Human
uauuuaauuuuuuugagacagag

SEQ ID NO: 3714981 - RNA, 21 nt, Human
uauuuacaaauguuuugcuca

SEQ ID NO: 3714982 - RNA, 14 nt, Human
uauuuacaauguau

SEQ ID NO: 3714983 - RNA, 20 nt, Human
uauuuacagugaaaauguaa

SEQ ID NO: 3714984 - RNA, 14 nt, Human
uauuuaccaaaaau

SEQ ID NO: 3714985 - RNA, 18 nt, Human
uauuuacuaaaauggacu

SEQ ID NO: 3714986 - RNA, 19 nt, Human
uauuuacugagcuucucug

SEQ ID NO: 3714987 - RNA, 22 nt, Human
uauuuacugagcuucucuguga

SEQ ID NO: 3714988 - RNA, 15 nt, Human
uauuuagacaagaga

SEQ ID NO: 3714989 - RNA, 19 nt, Human
uauuuagacaagagauggg

SEQ ID NO: 3714990 - RNA, 17 nt, Human
uauuuagauuguuaaaa

SEQ ID NO: 3714991 - RNA, 22 nt, Human
uauuuagcuccaaaccuucaca

SEQ ID NO: 3714992 - RNA, 17 nt, Human
uauuuaguuauaguuuc

SEQ ID NO: 3714993 - RNA, 24 nt, Human
uauuuauaaaaauaaaaaacacug

SEQ ID NO: 3714994 - RNA, 15 nt, Human
uauuuauaaaacuuc

SEQ ID NO: 3714995 - RNA, 17 nt, Human
uauuuauaaaacuucuc

SEQ ID NO: 3714996 - RNA, 16 nt, Human
uauuuauaaauauauu

SEQ ID NO: 3714997 - RNA, 17 nt, Human
uauuuauaaauauauuu

SEQ ID NO: 3714998 - RNA, 19 nt, Human
uauuuauaacaaccuaaau

SEQ ID NO: 3714999 - RNA, 13 nt, Human
uauuuauaacuca

SEQ ID NO: 3715000 - RNA, 20 nt, Human
uauuuauaacucaucauaaa

SEQ ID NO: 3715001 - RNA, 23 nt, Human
uauuuauaacucaucauaaaaua

SEQ ID NO: 3715002 - RNA, 16 nt, Human
uauuuauaauacagaa

SEQ ID NO: 3715003 - RNA, 20 nt, Human
uauuuauaauacagaaucuu

SEQ ID NO: 3715004 - RNA, 15 nt, Human
uauuuauaauuccua

SEQ ID NO: 3715005 - RNA, 13 nt, Human
uauuuauauaauu

SEQ ID NO: 3715006 - RNA, 17 nt, Human
uauuuauauaauuaugu

SEQ ID NO: 3715007 - RNA, 18 nt, Human
uauuuauauaauuauguu

SEQ ID NO: 3715008 - RNA, 17 nt, Human
uauuuauauauuuauaa

SEQ ID NO: 3715009 - RNA, 15 nt, Human
uauuuauauguacau

SEQ ID NO: 3715010 - RNA, 21 nt, Human
uauuuauauguauguguuuag

SEQ ID NO: 3715011 - RNA, 22 nt, Human
uauuuauauguauguguuuaga

SEQ ID NO: 3715012 - RNA, 16 nt, Human
uauuuauauuuauuga

SEQ ID NO: 3715013 - RNA, 14 nt, Human
uauuuauauuucac

SEQ ID NO: 3715014 - RNA, 20 nt, Human
uauuuauccagaaaacugug

SEQ ID NO: 3715015 - RNA, 21 nt, Human
uauuuauccagaaaacuguga

SEQ ID NO: 3715016 - RNA, 19 nt, Human
uauuuaucuauuguaagau

SEQ ID NO: 3715017 - RNA, 16 nt, Human
uauuuaucugauuaag

SEQ ID NO: 3715018 - RNA, 16 nt, Human
uauuuaucuguucaaa

SEQ ID NO: 3715019 - RNA, 22 nt, Human
uauuuaugaaguuuaaaacagu

SEQ ID NO: 3715020 - RNA, 20 nt, Human
uauuuaugccucuguauuua

SEQ ID NO: 3715021 - RNA, 19 nt, Human
uauuuaugccuugaugauu

SEQ ID NO: 3715022 - RNA, 22 nt, Human
uauuuaugggccccuggcacuc

SEQ ID NO: 3715023 - RNA, 18 nt, Human
uauuuauguaaugaagua

SEQ ID NO: 3715024 - RNA, 11 nt, Human
uauuuauuaaa

SEQ ID NO: 3715025 - RNA, 13 nt, Human
uauuuauuaaaua

SEQ ID NO: 3715026 - RNA, 17 nt, Human
uauuuauuaauauuuaa

SEQ ID NO: 3715027 - RNA, 15 nt, Human
uauuuauuaccucug

SEQ ID NO: 3715028 - RNA, 16 nt, Human
uauuuauuaccucuga

SEQ ID NO: 3715029 - RNA, 14 nt, Human
uauuuauuacuaug

SEQ ID NO: 3715030 - RNA, 20 nt, Human
uauuuauucaauaaaguauu

SEQ ID NO: 3715031 - RNA, 12 nt, Human
uauuuauugaaa

SEQ ID NO: 3715032 - RNA, 16 nt, Human
uauuuauugaaaugau

SEQ ID NO: 3715033 - RNA, 21 nt, Human
uauuuauugaagaaacagaua

SEQ ID NO: 3715034 - RNA, 14 nt, Human
uauuuauugguuuu

SEQ ID NO: 3715035 - RNA, 17 nt, Human
uauuuauuguauucugg

SEQ ID NO: 3715036 - RNA, 22 nt, Human
uauuuauuguuuauuuaucagu

SEQ ID NO: 3715037 - RNA, 12 nt, Human
uauuuauuuaaa

SEQ ID NO: 3715038 - RNA, 16 nt, Human
uauuuauuuaaagcau

SEQ ID NO: 3715039 - RNA, 18 nt, Human
uauuuauuuaaaugucua

SEQ ID NO: 3715040 - RNA, 15 nt, Human
uauuuauuuacaaau

SEQ ID NO: 3715041 - RNA, 18 nt, Human
uauuuauuuauguacuuu

SEQ ID NO: 3715042 - RNA, 14 nt, Human
uauuuauuuauuua

SEQ ID NO: 3715043 - RNA, 16 nt, Human
uauuuauuuuaauaau

SEQ ID NO: 3715044 - RNA, 20 nt, Human
uauuucaaaaauuuggaauu

SEQ ID NO: 3715045 - RNA, 19 nt, Human
uauuucaaguacacugaau

SEQ ID NO: 3715046 - RNA, 15 nt, Human
uauuucaauguaauu

SEQ ID NO: 3715047 - RNA, 16 nt, Human
uauuucaauguaauua

SEQ ID NO: 3715048 - RNA, 19 nt, Human
uauuucaauguaauuaaac

SEQ ID NO: 3715049 - RNA, 15 nt, Human
uauuucaauguuagc

SEQ ID NO: 3715050 - RNA, 15 nt, Human
uauuucacaacagcc

SEQ ID NO: 3715051 - RNA, 16 nt, Human
uauuucacuugaugau

SEQ ID NO: 3715052 - RNA, 20 nt, Human
uauuucacuuuagaugcuga

SEQ ID NO: 3715053 - RNA, 12 nt, Human
uauuucagaaau

SEQ ID NO: 3715054 - RNA, 14 nt, Human
uauuucagaaauac

SEQ ID NO: 3715055 - RNA, 21 nt, Human
uauuucagauguaauguuuuc

SEQ ID NO: 3715056 - RNA, 16 nt, Human
uauuucagauuuugau

SEQ ID NO: 3715057 - RNA, 18 nt, Human
uauuucagauuuugauaa

SEQ ID NO: 3715058 - RNA, 16 nt, Human
uauuucagcaaacuug

SEQ ID NO: 3715059 - RNA, 14 nt, Human
uauuucaggauucu

SEQ ID NO: 3715060 - RNA, 21 nt, Human
uauuucaguguaguuaauuua

SEQ ID NO: 3715061 - RNA, 18 nt, Human
uauuucaguguuaccugu

SEQ ID NO: 3715062 - RNA, 19 nt, Human
uauuucaguguuaccugug

SEQ ID NO: 3715063 - RNA, 20 nt, Human
uauuucaguguuaccugugu

SEQ ID NO: 3715064 - RNA, 22 nt, Human
uauuucaguuauugucccuggc

SEQ ID NO: 3715065 - RNA, 22 nt, Human
uauuucaguuccgucagaaagu

SEQ ID NO: 3715066 - RNA, 20 nt, Human
uauuucaguuuuaaauguac

SEQ ID NO: 3715067 - RNA, 20 nt, Human
uauuucauaaacaacuuaau

SEQ ID NO: 3715068 - RNA, 12 nt, Human
uauuucaugugg

SEQ ID NO: 3715069 - RNA, 15 nt, Human
uauuuccacuaaaaa

SEQ ID NO: 3715070 - RNA, 13 nt, Human
uauuuccacuucu

SEQ ID NO: 3715071 - RNA, 21 nt, Human
uauuuccauuaaaaaaucagu

SEQ ID NO: 3715072 - RNA, 22 nt, Human
uauuuccccaggggaaaaugaa

SEQ ID NO: 3715073 - RNA, 16 nt, Human
uauuucccuaaaauac

SEQ ID NO: 3715074 - RNA, 20 nt, Human
uauuucccuaaaauacauuu

SEQ ID NO: 3715075 - RNA, 21 nt, Human
uauuucccuaaaauacauuua

SEQ ID NO: 3715076 - RNA, 13 nt, Human
uauuucccuuuag

SEQ ID NO: 3715077 - RNA, 19 nt, Human
uauuuccuauaccauuucc

SEQ ID NO: 3715078 - RNA, 23 nt, Human
uauuuccuauauuguuuucagug

SEQ ID NO: 3715079 - RNA, 11 nt, Human
uauuuccuuua

SEQ ID NO: 3715080 - RNA, 14 nt, Human
uauuuccuuuaugu

SEQ ID NO: 3715081 - RNA, 17 nt, Human
uauuuccuuuaugugaa

SEQ ID NO: 3715082 - RNA, 18 nt, Human
uauuuccuuuaugugaau

SEQ ID NO: 3715083 - RNA, 12 nt, Human
uauuucuacugu

SEQ ID NO: 3715084 - RNA, 17 nt, Human
uauuucuaggaagaauu

SEQ ID NO: 3715085 - RNA, 13 nt, Human
uauuucuaugaaa

SEQ ID NO: 3715086 - RNA, 14 nt, Human
uauuucuauuauua

SEQ ID NO: 3715087 - RNA, 18 nt, Human
uauuucuauuuccuggaa

SEQ ID NO: 3715088 - RNA, 15 nt, Human
uauuucuccuuuugu

SEQ ID NO: 3715089 - RNA, 16 nt, Human
uauuucucuaguaguu

SEQ ID NO: 3715090 - RNA, 19 nt, Human
uauuucucugauuugcaaa

SEQ ID NO: 3715091 - RNA, 11 nt, Human
uauuucugaga

SEQ ID NO: 3715092 - RNA, 21 nt, Human
uauuucugagaagguccuuaa

SEQ ID NO: 3715093 - RNA, 17 nt, Human
uauuucugcauauguug

SEQ ID NO: 3715094 - RNA, 21 nt, Human
uauuucugcugaauuuucaca

SEQ ID NO: 3715095 - RNA, 20 nt, Human
uauuucugucauucaaaugg

SEQ ID NO: 3715096 - RNA, 18 nt, Human
uauuucuuaauuauuaua

SEQ ID NO: 3715097 - RNA, 23 nt, Human
uauuucuucaaauaucucuauuu

SEQ ID NO: 3715098 - RNA, 22 nt, Human
uauuucuuccuaccaagucaaa

SEQ ID NO: 3715099 - RNA, 16 nt, Human
uauuugaaaaaaacuu

SEQ ID NO: 3715100 - RNA, 23 nt, Human
uauuugaaaaaaacuucauucuc

SEQ ID NO: 3715101 - RNA, 14 nt, Human
uauuugaaaacaga

SEQ ID NO: 3715102 - RNA, 18 nt, Human
uauuugaaaacagaaauu

SEQ ID NO: 3715103 - RNA, 19 nt, Human
uauuugaaaacagaaauug

SEQ ID NO: 3715104 - RNA, 22 nt, Human
uauuugaaaacauauaaagcac

SEQ ID NO: 3715105 - RNA, 12 nt, Human
uauuugaaacuu

SEQ ID NO: 3715106 - RNA, 14 nt, Human
uauuugaaagugcc

SEQ ID NO: 3715107 - RNA, 19 nt, Human
uauuugaaucuugucucaa

SEQ ID NO: 3715108 - RNA, 23 nt, Human
uauuugaauguaugcuucauaca

SEQ ID NO: 3715109 - RNA, 18 nt, Human
uauuugaauuaaaacuuc

SEQ ID NO: 3715110 - RNA, 21 nt, Human
uauuugaauuuuaaaucuaaa

SEQ ID NO: 3715111 - RNA, 21 nt, Human
uauuugacaacguuucagcga

SEQ ID NO: 3715112 - RNA, 17 nt, Human
uauuugacuugcaugaa

SEQ ID NO: 3715113 - RNA, 20 nt, Human
uauuugacuuuaauuuaugu

SEQ ID NO: 3715114 - RNA, 18 nt, Human
uauuugagaguucuaaau

SEQ ID NO: 3715115 - RNA, 17 nt, Human
uauuugaggaguguuaa

SEQ ID NO: 3715116 - RNA, 14 nt, Human
uauuugauuauuua

SEQ ID NO: 3715117 - RNA, 13 nt, Human
uauuugauuuauu

SEQ ID NO: 3715118 - RNA, 15 nt, Human
uauuugauuuauuaa

SEQ ID NO: 3715119 - RNA, 19 nt, Human
uauuugauuuauuaacuua

SEQ ID NO: 3715120 - RNA, 14 nt, Human
uauuugcaacauuu

SEQ ID NO: 3715121 - RNA, 14 nt, Human
uauuugcaauuccu

SEQ ID NO: 3715122 - RNA, 18 nt, Human
uauuugcacuaagauauu

SEQ ID NO: 3715123 - RNA, 16 nt, Human
uauuugcagacuagaa

SEQ ID NO: 3715124 - RNA, 22 nt, Human
uauuugcaggucuuuaaaucau

SEQ ID NO: 3715125 - RNA, 20 nt, Human
uauuugcagugcaguauaga

SEQ ID NO: 3715126 - RNA, 22 nt, Human
uauuugcagugcaguauagaau

SEQ ID NO: 3715127 - RNA, 23 nt, Human
uauuugcaguucaccugcacuua

SEQ ID NO: 3715128 - RNA, 21 nt, Human
uauuugcauaacaauuccucu

SEQ ID NO: 3715129 - RNA, 22 nt, Human
uauuugcauaacaauuccucua

SEQ ID NO: 3715130 - RNA, 11 nt, Human
uauuugcaugu

SEQ ID NO: 3715131 - RNA, 16 nt, Human
uauuugcauguuaccu

SEQ ID NO: 3715132 - RNA, 19 nt, Human
uauuugcauguuauguuua

SEQ ID NO: 3715133 - RNA, 14 nt, Human
uauuugcuaauuuu

SEQ ID NO: 3715134 - RNA, 16 nt, Human
uauuuggaaauaaagu

SEQ ID NO: 3715135 - RNA, 14 nt, Human
uauuuggaauuaga

SEQ ID NO: 3715136 - RNA, 14 nt, Human
uauuuggauaucug

SEQ ID NO: 3715137 - RNA, 16 nt, Human
uauuuggauaucuguu

SEQ ID NO: 3715138 - RNA, 14 nt, Human
uauuuggcaguuug

SEQ ID NO: 3715139 - RNA, 17 nt, Human
uauuuggcaguuuggua

SEQ ID NO: 3715140 - RNA, 15 nt, Human
uauuuggcuuaaaua

SEQ ID NO: 3715141 - RNA, 16 nt, Human
uauuuggcuuaaauau

SEQ ID NO: 3715142 - RNA, 21 nt, Human
uauuugggaaacuugucacuu

SEQ ID NO: 3715143 - RNA, 22 nt, Human
uauuugggagggaaaagggaag

SEQ ID NO: 3715144 - RNA, 22 nt, Human
uauuugggguugcaucagaaau

SEQ ID NO: 3715145 - RNA, 18 nt, Human
uauuuggucucuauuuca

SEQ ID NO: 3715146 - RNA, 13 nt, Human
uauuuguaaagcu

SEQ ID NO: 3715147 - RNA, 16 nt, Human
uauuuguaaauuuaug

SEQ ID NO: 3715148 - RNA, 12 nt, Human
uauuuguacaua

SEQ ID NO: 3715149 - RNA, 24 nt, Human
uauuuguacuguuuaauguucugu

SEQ ID NO: 3715150 - RNA, 16 nt, Human
uauuuguacuuucugu

SEQ ID NO: 3715151 - RNA, 14 nt, Human
uauuuguaguguua

SEQ ID NO: 3715152 - RNA, 22 nt, Human
uauuuguauaaaagugugaaau

SEQ ID NO: 3715153 - RNA, 17 nt, Human
uauuuguauaguugcuu

SEQ ID NO: 3715154 - RNA, 12 nt, Human
uauuuguaucuc

SEQ ID NO: 3715155 - RNA, 22 nt, Human
uauuuguaucucugaagcaugu

SEQ ID NO: 3715156 - RNA, 14 nt, Human
uauuuguaugauau

SEQ ID NO: 3715157 - RNA, 20 nt, Human
uauuuguaugauauuuuaaa

SEQ ID NO: 3715158 - RNA, 13 nt, Human
uauuugugcauuu

SEQ ID NO: 3715159 - RNA, 21 nt, Human
uauuugugcuauaguauuuga

SEQ ID NO: 3715160 - RNA, 17 nt, Human
uauuuguguaauagaaa

SEQ ID NO: 3715161 - RNA, 15 nt, Human
uauuuguguauuuaa

SEQ ID NO: 3715162 - RNA, 16 nt, Human
uauuuguuauggcaga

SEQ ID NO: 3715163 - RNA, 14 nt, Human
uauuuguucauguu

SEQ ID NO: 3715164 - RNA, 15 nt, Human
uauuuguucauguuu

SEQ ID NO: 3715165 - RNA, 17 nt, Human
uauuuguucccaagagc

SEQ ID NO: 3715166 - RNA, 16 nt, Human
uauuuguucuucaaga

SEQ ID NO: 3715167 - RNA, 13 nt, Human
uauuuguuuucau

SEQ ID NO: 3715168 - RNA, 14 nt, Human
uauuuguuuucaug

SEQ ID NO: 3715169 - RNA, 19 nt, Human
uauuuuaaaaaaugaaaau

SEQ ID NO: 3715170 - RNA, 14 nt, Human
uauuuuaaaaauau

SEQ ID NO: 3715171 - RNA, 14 nt, Human
uauuuuaaaagaau

SEQ ID NO: 3715172 - RNA, 18 nt, Human
uauuuuaaaagaaugauu

SEQ ID NO: 3715173 - RNA, 21 nt, Human
uauuuuaaaagauaaauauua

SEQ ID NO: 3715174 - RNA, 12 nt, Human
uauuuuaaaagc

SEQ ID NO: 3715175 - RNA, 22 nt, Human
uauuuuaaaauagcguucuugu

SEQ ID NO: 3715176 - RNA, 15 nt, Human
uauuuuaaaauuuca

SEQ ID NO: 3715177 - RNA, 20 nt, Human
uauuuuaaauuauaaggacu

SEQ ID NO: 3715178 - RNA, 18 nt, Human
uauuuuaagacugauuuu

SEQ ID NO: 3715179 - RNA, 13 nt, Human
uauuuuaagcauu

SEQ ID NO: 3715180 - RNA, 20 nt, Human
uauuuuaagcauuacucuug

SEQ ID NO: 3715181 - RNA, 17 nt, Human
uauuuuaauaaacacuc

SEQ ID NO: 3715182 - RNA, 13 nt, Human
uauuuuaauuuca

SEQ ID NO: 3715183 - RNA, 16 nt, Human
uauuuuaauuucaagc

SEQ ID NO: 3715184 - RNA, 14 nt, Human
uauuuuacaauuuu

SEQ ID NO: 3715185 - RNA, 23 nt, Human
uauuuuacaauuuuuuaucaugc

SEQ ID NO: 3715186 - RNA, 18 nt, Human
uauuuuacagcucauuaa

SEQ ID NO: 3715187 - RNA, 21 nt, Human
uauuuuacagcucauuaaacu

SEQ ID NO: 3715188 - RNA, 13 nt, Human
uauuuuacauaaa

SEQ ID NO: 3715189 - RNA, 13 nt, Human
uauuuuacuuuuu

SEQ ID NO: 3715190 - RNA, 13 nt, Human
uauuuuagcaguu

SEQ ID NO: 3715191 - RNA, 22 nt, Human
uauuuuagguguaaaauaauua

SEQ ID NO: 3715192 - RNA, 21 nt, Human
uauuuuagugaacuugaaaua

SEQ ID NO: 3715193 - RNA, 20 nt, Human
uauuuuaguuucuguucugu

SEQ ID NO: 3715194 - RNA, 15 nt, Human
uauuuuauaagaaaa

SEQ ID NO: 3715195 - RNA, 17 nt, Human
uauuuuauaagaaaaac

SEQ ID NO: 3715196 - RNA, 16 nt, Human
uauuuuauaaugucca

SEQ ID NO: 3715197 - RNA, 13 nt, Human
uauuuuauauaaa

SEQ ID NO: 3715198 - RNA, 21 nt, Human
uauuuuauaucaauuuaaaaa

SEQ ID NO: 3715199 - RNA, 15 nt, Human
uauuuuaugagaaau

SEQ ID NO: 3715200 - RNA, 16 nt, Human
uauuuuaugagaaaug

SEQ ID NO: 3715201 - RNA, 23 nt, Human
uauuuuaugguuauguuuuucug

SEQ ID NO: 3715202 - RNA, 14 nt, Human
uauuuuauguaugu

SEQ ID NO: 3715203 - RNA, 16 nt, Human
uauuuuauguugcaua

SEQ ID NO: 3715204 - RNA, 17 nt, Human
uauuuuauguugcauag

SEQ ID NO: 3715205 - RNA, 21 nt, Human
uauuuuauuacaucuuucaca

SEQ ID NO: 3715206 - RNA, 13 nt, Human
uauuuuauuauga

SEQ ID NO: 3715207 - RNA, 11 nt, Human
uauuuuauuca

SEQ ID NO: 3715208 - RNA, 15 nt, Human
uauuuuauucaaggu

SEQ ID NO: 3715209 - RNA, 19 nt, Human
uauuuuauucccuuucaca

SEQ ID NO: 3715210 - RNA, 16 nt, Human
uauuuuauuguaacag

SEQ ID NO: 3715211 - RNA, 17 nt, Human
uauuuuauuguaacaga

SEQ ID NO: 3715212 - RNA, 23 nt, Human
uauuuuauuguaacagacauugu

SEQ ID NO: 3715213 - RNA, 17 nt, Human
uauuuuauuuuuuucua

SEQ ID NO: 3715214 - RNA, 13 nt, Human
uauuuucaagaaa

SEQ ID NO: 3715215 - RNA, 16 nt, Human
uauuuucaagaaacug

SEQ ID NO: 3715216 - RNA, 21 nt, Human
uauuuucaaggcccucagcau

SEQ ID NO: 3715217 - RNA, 22 nt, Human
uauuuucagaaucugaauguaa

SEQ ID NO: 3715218 - RNA, 23 nt, Human
uauuuucagaaucugaauguaau

SEQ ID NO: 3715219 - RNA, 17 nt, Human
uauuuucaguauuuugg

SEQ ID NO: 3715220 - RNA, 19 nt, Human
uauuuucagucaaaacuuu

SEQ ID NO: 3715221 - RNA, 21 nt, Human
uauuuucagucaaaacuuuaa

SEQ ID NO: 3715222 - RNA, 18 nt, Human
uauuuucauacagcauua

SEQ ID NO: 3715223 - RNA, 13 nt, Human
uauuuucauuaca

SEQ ID NO: 3715224 - RNA, 15 nt, Human
uauuuucauucuccu

SEQ ID NO: 3715225 - RNA, 15 nt, Human
uauuuucauuguaaa

SEQ ID NO: 3715226 - RNA, 15 nt, Human
uauuuuccaagugug

SEQ ID NO: 3715227 - RNA, 24 nt, Human
uauuuuccaagugugcauauugua

SEQ ID NO: 3715228 - RNA, 13 nt, Human
uauuuuccaggcu

SEQ ID NO: 3715229 - RNA, 19 nt, Human
uauuuuccccuaucauuua

SEQ ID NO: 3715230 - RNA, 20 nt, Human
uauuuuccccuaucauuuau

SEQ ID NO: 3715231 - RNA, 21 nt, Human
uauuuuccccuaucauuuauu

SEQ ID NO: 3715232 - RNA, 12 nt, Human
uauuuuccuaaa

SEQ ID NO: 3715233 - RNA, 12 nt, Human
uauuuuccuccc

SEQ ID NO: 3715234 - RNA, 14 nt, Human
uauuuuccugauag

SEQ ID NO: 3715235 - RNA, 14 nt, Human
uauuuucuacguuu

SEQ ID NO: 3715236 - RNA, 16 nt, Human
uauuuucuauguacua

SEQ ID NO: 3715237 - RNA, 21 nt, Human
uauuuucucugauacuuuuuu

SEQ ID NO: 3715238 - RNA, 21 nt, Human
uauuuucugucagaugagaac

SEQ ID NO: 3715239 - RNA, 11 nt, Human
uauuuucugug

SEQ ID NO: 3715240 - RNA, 14 nt, Human
uauuuucugugugu

SEQ ID NO: 3715241 - RNA, 16 nt, Human
uauuuucuguguguuc

SEQ ID NO: 3715242 - RNA, 13 nt, Human
uauuuucuuggau

SEQ ID NO: 3715243 - RNA, 11 nt, Human
uauuuugaagu

SEQ ID NO: 3715244 - RNA, 16 nt, Human
uauuuugaaucaauaa

SEQ ID NO: 3715245 - RNA, 18 nt, Human
uauuuugacauaaaguug

SEQ ID NO: 3715246 - RNA, 15 nt, Human
uauuuugauaauaaa

SEQ ID NO: 3715247 - RNA, 20 nt, Human
uauuuugauaauaaauugaa

SEQ ID NO: 3715248 - RNA, 19 nt, Human
uauuuugauaauaauauug

SEQ ID NO: 3715249 - RNA, 15 nt, Human
uauuuugaucuucaa

SEQ ID NO: 3715250 - RNA, 23 nt, Human
uauuuugaugcagcauuugauaa

SEQ ID NO: 3715251 - RNA, 18 nt, Human
uauuuugauuauuguauu

SEQ ID NO: 3715252 - RNA, 13 nt, Human
uauuuugccauuu

SEQ ID NO: 3715253 - RNA, 14 nt, Human
uauuuugcuggaau

SEQ ID NO: 3715254 - RNA, 20 nt, Human
uauuuugcuuugugauuuuu

SEQ ID NO: 3715255 - RNA, 16 nt, Human
uauuuuguaaaaugua

SEQ ID NO: 3715256 - RNA, 14 nt, Human
uauuuuguaauuau

SEQ ID NO: 3715257 - RNA, 13 nt, Human
uauuuuguaugca

SEQ ID NO: 3715258 - RNA, 19 nt, Human
uauuuuguauuauugcugu

SEQ ID NO: 3715259 - RNA, 16 nt, Human
uauuuuguauuguggu

SEQ ID NO: 3715260 - RNA, 16 nt, Human
uauuuugucauaucaa

SEQ ID NO: 3715261 - RNA, 13 nt, Human
uauuuugucuaaa

SEQ ID NO: 3715262 - RNA, 17 nt, Human
uauuuuguggaggcagu

SEQ ID NO: 3715263 - RNA, 21 nt, Human
uauuuuguggaggcaguguca

SEQ ID NO: 3715264 - RNA, 12 nt, Human
uauuuuguguaa

SEQ ID NO: 3715265 - RNA, 13 nt, Human
ucacuuuuuucca

SEQ ID NO: 3715266 - RNA, 16 nt, Human
ucacuuuuuuccacau

SEQ ID NO: 3715267 - RNA, 17 nt, Human
ucacuuuuuuuuuccaa

SEQ ID NO: 3715268 - RNA, 19 nt, Human
ucacuuuuuuuuuccaaaa

SEQ ID NO: 3715269 - RNA, 18 nt, Human
ucacuuuuuuuuuuuguu

SEQ ID NO: 3715270 - RNA, 16 nt, Human
ucagaaaaacaauaag

SEQ ID NO: 3715271 - RNA, 12 nt, Human
ucagaaaacaga

SEQ ID NO: 3715272 - RNA, 18 nt, Human
ucagaaaacuuuaaaaaa

SEQ ID NO: 3715273 - RNA, 18 nt, Human
ucagaaaaugaaaaaucu

SEQ ID NO: 3715274 - RNA, 22 nt, Human
ucagaaacacccucacacuggg

SEQ ID NO: 3715275 - RNA, 15 nt, Human
ucagaaacuugugaa

SEQ ID NO: 3715276 - RNA, 18 nt, Human
ucagaaacuugugaagug

SEQ ID NO: 3715277 - RNA, 13 nt, Human
ucagaaagacuug

SEQ ID NO: 3715278 - RNA, 17 nt, Human
ucagaaagcauuacauu

SEQ ID NO: 3715279 - RNA, 17 nt, Human
ucagaaagccuuucauu

SEQ ID NO: 3715280 - RNA, 19 nt, Human
ucagaaagcuuuauuuuga

SEQ ID NO: 3715281 - RNA, 14 nt, Human
ucagaaagggaggg

SEQ ID NO: 3715282 - RNA, 17 nt, Human
ucagaaagggagggcuc

SEQ ID NO: 3715283 - RNA, 20 nt, Human
ucagaaagggagggcucuga

SEQ ID NO: 3715284 - RNA, 23 nt, Human
ucagaaagggagggcucugaggc

SEQ ID NO: 3715285 - RNA, 20 nt, Human
ucagaaagggcagaaguagg

SEQ ID NO: 3715286 - RNA, 16 nt, Human
ucagaaaguaauuucu

SEQ ID NO: 3715287 - RNA, 23 nt, Human
ucagaaagugccugacacacuaa

SEQ ID NO: 3715288 - RNA, 23 nt, Human
ucagaaagugugcuuuaugcuga

SEQ ID NO: 3715289 - RNA, 17 nt, Human
ucagaaauacagauaaa

SEQ ID NO: 3715290 - RNA, 20 nt, Human
ucagaaauacagauuuugau

SEQ ID NO: 3715291 - RNA, 13 nt, Human
ucagaaauauaac

SEQ ID NO: 3715292 - RNA, 12 nt, Human
ucagaaauaugu

SEQ ID NO: 3715293 - RNA, 15 nt, Human
ucagaaaugcugccu

SEQ ID NO: 3715294 - RNA, 19 nt, Human
ucagaaaugcugccugccu

SEQ ID NO: 3715295 - RNA, 10 nt, Human
ucagaaaugu

SEQ ID NO: 3715296 - RNA, 16 nt, Human
ucagaaauuggaacag

SEQ ID NO: 3715297 - RNA, 23 nt, Human
ucagaaauuuaauucauguuucu

SEQ ID NO: 3715298 - RNA, 12 nt, Human
ucagaacacauu

SEQ ID NO: 3715299 - RNA, 14 nt, Human
ucagaacagcuguu

SEQ ID NO: 3715300 - RNA, 13 nt, Human
ucagaacccaggg

SEQ ID NO: 3715301 - RNA, 23 nt, Human
ucagaacccagggcucugcccca

SEQ ID NO: 3715302 - RNA, 16 nt, Human
ucagaacccugccaug

SEQ ID NO: 3715303 - RNA, 18 nt, Human
ucagaacccuuggcuugc

SEQ ID NO: 3715304 - RNA, 20 nt, Human
ucagaacccuuggcuugccc

SEQ ID NO: 3715305 - RNA, 24 nt, Human
ucagaacccuuggcuugcccacgu

SEQ ID NO: 3715306 - RNA, 22 nt, Human
ucagaacucaaauggggccaga

SEQ ID NO: 3715307 - RNA, 15 nt, Human
ucagaacuguuuuug

SEQ ID NO: 3715308 - RNA, 17 nt, Human
ucagaacuugcugcugu

SEQ ID NO: 3715309 - RNA, 19 nt, Human
ucagaacuugcugcugucu

SEQ ID NO: 3715310 - RNA, 13 nt, Human
ucagaagaaaaag

SEQ ID NO: 3715311 - RNA, 16 nt, Human
ucagaagaaaaagaag

SEQ ID NO: 3715312 - RNA, 14 nt, Human
ucagaagaaauaaa

SEQ ID NO: 3715313 - RNA, 14 nt, Human
ucagaagcaaacaa

SEQ ID NO: 3715314 - RNA, 13 nt, Human
ucagaagccugag

SEQ ID NO: 3715315 - RNA, 13 nt, Human
ucagaagccuggg

SEQ ID NO: 3715316 - RNA, 16 nt, Human
ucagaagccugggggc

SEQ ID NO: 3715317 - RNA, 22 nt, Human
ucagaagccugggggccuggcu

SEQ ID NO: 3715318 - RNA, 15 nt, Human
ucagaaggagcuaca

SEQ ID NO: 3715319 - RNA, 19 nt, Human
ucagaaggcaaaugacuuu

SEQ ID NO: 3715320 - RNA, 22 nt, Human
ucagaaggcaaaugacuuugga

SEQ ID NO: 3715321 - RNA, 20 nt, Human
ucagaaggcucuucugacua

SEQ ID NO: 3715322 - RNA, 12 nt, Human
ucagaagggagg

SEQ ID NO: 3715323 - RNA, 14 nt, Human
ucagaaggucuguu

SEQ ID NO: 3715324 - RNA, 15 nt, Human
ucagaagucuuucag

SEQ ID NO: 3715325 - RNA, 15 nt, Human
ucagaagugagcuuu

SEQ ID NO: 3715326 - RNA, 17 nt, Human
ucagaaguuaguuugua

SEQ ID NO: 3715327 - RNA, 15 nt, Human
ucagaaguuuaaaua

SEQ ID NO: 3715328 - RNA, 19 nt, Human
ucagaaguuucugccgcag

SEQ ID NO: 3715329 - RNA, 16 nt, Human
ucagaauagaaauuag

SEQ ID NO: 3715330 - RNA, 21 nt, Human
ucagaauagccacauuuggaa

SEQ ID NO: 3715331 - RNA, 19 nt, Human
ucagaaucacuucugagaa

SEQ ID NO: 3715332 - RNA, 22 nt, Human
ucagaauccaagugaacacuag

SEQ ID NO: 3715333 - RNA, 18 nt, Human
ucagaaucucaaauaacu

SEQ ID NO: 3715334 - RNA, 19 nt, Human
ucagaaugcuauugaaaau

SEQ ID NO: 3715335 - RNA, 22 nt, Human
ucagaauggaagagagaaagca

SEQ ID NO: 3715336 - RNA, 18 nt, Human
ucagaauguaaaagaacu

SEQ ID NO: 3715337 - RNA, 20 nt, Human
ucagaauuaaacuuuuaauu

SEQ ID NO: 3715338 - RNA, 23 nt, Human
ucagaauuaaacuuuuaauucau

SEQ ID NO: 3715339 - RNA, 14 nt, Human
ucagaauuaugaug

SEQ ID NO: 3715340 - RNA, 23 nt, Human
ucagaauucucuaguuugauuaa

SEQ ID NO: 3715341 - RNA, 16 nt, Human
ucagaauugaaacacu

SEQ ID NO: 3715342 - RNA, 17 nt, Human
ucagaauugaaacacuu

SEQ ID NO: 3715343 - RNA, 21 nt, Human
ucagaauugaucauuuucccc

SEQ ID NO: 3715344 - RNA, 21 nt, Human
ucagaauuuaguguauccaua

SEQ ID NO: 3715345 - RNA, 22 nt, Human
ucagaauuuguguugaaggaac

SEQ ID NO: 3715346 - RNA, 13 nt, Human
ucagacaaaaugg

SEQ ID NO: 3715347 - RNA, 21 nt, Human
ucagacaaaauggauacauaa

SEQ ID NO: 3715348 - RNA, 17 nt, Human
ucagacacccucaaccu

SEQ ID NO: 3715349 - RNA, 15 nt, Human
ucagacacucuggcu

SEQ ID NO: 3715350 - RNA, 17 nt, Human
ucagacacucuggcugg

SEQ ID NO: 3715351 - RNA, 22 nt, Human
ucagacagaucuggaaugugaa

SEQ ID NO: 3715352 - RNA, 14 nt, Human
ucagacagcugccu

SEQ ID NO: 3715353 - RNA, 12 nt, Human
ucagacauaaag

SEQ ID NO: 3715354 - RNA, 21 nt, Human
ucagacauccauguuuguaaa

SEQ ID NO: 3715355 - RNA, 14 nt, Human
ucagacauguuuuc

SEQ ID NO: 3715356 - RNA, 20 nt, Human
ucagacauguuuuccgugaa

SEQ ID NO: 3715357 - RNA, 13 nt, Human
ucagaccagagaa

SEQ ID NO: 3715358 - RNA, 17 nt, Human
ucagaccccagcggcug

SEQ ID NO: 3715359 - RNA, 12 nt, Human
ucagacccccac

SEQ ID NO: 3715360 - RNA, 22 nt, Human
ucagacccccacucucauuccc

SEQ ID NO: 3715361 - RNA, 13 nt, Human
ucagacccuuuag

SEQ ID NO: 3715362 - RNA, 18 nt, Human
ucagacgcacucgcauug

SEQ ID NO: 3715363 - RNA, 15 nt, Human
ucagacuaagccagc

SEQ ID NO: 3715364 - RNA, 21 nt, Human
ucagacucccauuccugaaga

SEQ ID NO: 3715365 - RNA, 20 nt, Human
ucagacucucagcccagaag

SEQ ID NO: 3715366 - RNA, 21 nt, Human
ucagacucucagcccagaaga

SEQ ID NO: 3715367 - RNA, 14 nt, Human
ucagacugaacaug

SEQ ID NO: 3715368 - RNA, 13 nt, Human
ucagacugcuggg

SEQ ID NO: 3715369 - RNA, 16 nt, Human
ucagacugcugggacu

SEQ ID NO: 3715370 - RNA, 17 nt, Human
ucagacugcugggacug

SEQ ID NO: 3715371 - RNA, 23 nt, Human
ucagacugcugggacuggccagg

SEQ ID NO: 3715372 - RNA, 16 nt, Human
ucagacugcuuugaga

SEQ ID NO: 3715373 - RNA, 23 nt, Human
ucagacuuuaaagaauaauaugc

SEQ ID NO: 3715374 - RNA, 14 nt, Human
ucagagaaggaaca

SEQ ID NO: 3715375 - RNA, 13 nt, Human
ucagagaauuucu

SEQ ID NO: 3715376 - RNA, 19 nt, Human
ucagagacaucagcccuug

SEQ ID NO: 3715377 - RNA, 15 nt, Human
ucagagacaugcaga

SEQ ID NO: 3715378 - RNA, 12 nt, Human
ucagagaccagg

SEQ ID NO: 3715379 - RNA, 18 nt, Human
ucagagaccaggcccugg

SEQ ID NO: 3715380 - RNA, 14 nt, Human
ucagagaccagggc

SEQ ID NO: 3715381 - RNA, 15 nt, Human
ucagagaccauugca

SEQ ID NO: 3715382 - RNA, 19 nt, Human
ucagagacucagggcccca

SEQ ID NO: 3715383 - RNA, 16 nt, Human
ucagagacuccugcag

SEQ ID NO: 3715384 - RNA, 21 nt, Human
ucagagacuccugcaggcagc

SEQ ID NO: 3715385 - RNA, 12 nt, Human
ucagagagcagu

SEQ ID NO: 3715386 - RNA, 22 nt, Human
ucagagagcgagcgcuacccac

SEQ ID NO: 3715387 - RNA, 13 nt, Human
ucagagagcuggu

SEQ ID NO: 3715388 - RNA, 17 nt, Human
ucagagaggagucagag

SEQ ID NO: 3715389 - RNA, 20 nt, Human
ucagagaggagucagagaga

SEQ ID NO: 3715390 - RNA, 18 nt, Human
ucagagaugaacaucuaa

SEQ ID NO: 3715391 - RNA, 20 nt, Human
ucagagaugcauuuggaaca

SEQ ID NO: 3715392 - RNA, 16 nt, Human
ucagagcaaauuuggg

SEQ ID NO: 3715393 - RNA, 18 nt, Human
ucagagcaggaccucccu

SEQ ID NO: 3715394 - RNA, 19 nt, Human
ucagagcaggugcuggcuc

SEQ ID NO: 3715395 - RNA, 21 nt, Human
ucagagccaccccuaaagaga

SEQ ID NO: 3715396 - RNA, 22 nt, Human
ucagagccaugucuucucccug

SEQ ID NO: 3715397 - RNA, 12 nt, Human
ucagagccugca

SEQ ID NO: 3715398 - RNA, 20 nt, Human
ucagagccuuuccucaaaac

SEQ ID NO: 3715399 - RNA, 17 nt, Human
ucagagcuacuugggcc

SEQ ID NO: 3715400 - RNA, 14 nt, Human
ucagagcuccucug

SEQ ID NO: 3715401 - RNA, 22 nt, Human
ucagagcugcccucuccugggc

SEQ ID NO: 3715402 - RNA, 14 nt, Human
ucagaggaccugua

SEQ ID NO: 3715403 - RNA, 21 nt, Human
ucagaggaccuguauuuaagc

SEQ ID NO: 3715404 - RNA, 23 nt, Human
ucagaggaccuguauuuaagcaa

SEQ ID NO: 3715405 - RNA, 21 nt, Human
ucagaggagagauagccugug

SEQ ID NO: 3715406 - RNA, 23 nt, Human
ucagaggagagauagccuguggc

SEQ ID NO: 3715407 - RNA, 12 nt, Human
ucagaggcccca

SEQ ID NO: 3715408 - RNA, 15 nt, Human
ucagaggccuauaau

SEQ ID NO: 3715409 - RNA, 20 nt, Human
ucagaggccuauaaugaagc

SEQ ID NO: 3715410 - RNA, 16 nt, Human
ucagaggcgcacugug

SEQ ID NO: 3715411 - RNA, 15 nt, Human
ucagaggcugaggug

SEQ ID NO: 3715412 - RNA, 14 nt, Human
ucagagggaggaau

SEQ ID NO: 3715413 - RNA, 14 nt, Human
ucagagggcccaaa

SEQ ID NO: 3715414 - RNA, 21 nt, Human
ucagaggggaauaaacuguug

SEQ ID NO: 3715415 - RNA, 16 nt, Human
gccuuccagcugcugu

SEQ ID NO: 3715416 - RNA, 17 nt, Human
gccuuccagcugcuguc

SEQ ID NO: 3715417 - RNA, 16 nt, Human
gccuuccagggguggg

SEQ ID NO: 3715418 - RNA, 21 nt, Human
gccuuccaggggugggacacc

SEQ ID NO: 3715419 - RNA, 16 nt, Human
gccuuccauaauuaug

SEQ ID NO: 3715420 - RNA, 21 nt, Human
gccuuccauaauuaugacagu

SEQ ID NO: 3715421 - RNA, 18 nt, Human
gccuuccaugucggccuc

SEQ ID NO: 3715422 - RNA, 20 nt, Human
gccuucccaaguugugcuug

SEQ ID NO: 3715423 - RNA, 22 nt, Human
gccuuccccacccaccaacccu

SEQ ID NO: 3715424 - RNA, 14 nt, Human
gccuuccccugggc

SEQ ID NO: 3715425 - RNA, 16 nt, Human
gccuuccccuugccca

SEQ ID NO: 3715426 - RNA, 18 nt, Human
gccuuccccuugcccagg

SEQ ID NO: 3715427 - RNA, 13 nt, Human
gccuucccuccug

SEQ ID NO: 3715428 - RNA, 20 nt, Human
gccuuccuaagccuguggcu

SEQ ID NO: 3715429 - RNA, 19 nt, Human
gccuuccuauuuugcauaa

SEQ ID NO: 3715430 - RNA, 17 nt, Human
gccuuccuccacauccu

SEQ ID NO: 3715431 - RNA, 17 nt, Human
gccuuccuccugggccc

SEQ ID NO: 3715432 - RNA, 22 nt, Human
gccuuccuccugggcccucucu

SEQ ID NO: 3715433 - RNA, 13 nt, Human
gccuuccucucuc

SEQ ID NO: 3715434 - RNA, 17 nt, Human
gccuuccucucuccaga

SEQ ID NO: 3715435 - RNA, 11 nt, Human
gccuuccuucc

SEQ ID NO: 3715436 - RNA, 19 nt, Human
gccuuccuugaccuuccuc

SEQ ID NO: 3715437 - RNA, 20 nt, Human
gccuuccuugaccuuccucu

SEQ ID NO: 3715438 - RNA, 20 nt, Human
gccuuccuuucuccaggacc

SEQ ID NO: 3715439 - RNA, 21 nt, Human
gccuuccuuucuccaggacca

SEQ ID NO: 3715440 - RNA, 23 nt, Human
gccuucgauacaccgggccugga

SEQ ID NO: 3715441 - RNA, 22 nt, Human
gccuucgcgguggaaggcccga

SEQ ID NO: 3715442 - RNA, 20 nt, Human
gccuucgcuucuugccucug

SEQ ID NO: 3715443 - RNA, 19 nt, Human
gccuucgguacccaccaca

SEQ ID NO: 3715444 - RNA, 19 nt, Human
gccuucgugcccccccuuc

SEQ ID NO: 3715445 - RNA, 18 nt, Human
gccuucguuaacugugua

SEQ ID NO: 3715446 - RNA, 21 nt, Human
gccuucucaccagcugcaaag

SEQ ID NO: 3715447 - RNA, 22 nt, Human
gccuucucaccagcugcaaagu

SEQ ID NO: 3715448 - RNA, 16 nt, Human
gccuucucagaagcac

SEQ ID NO: 3715449 - RNA, 13 nt, Human
gccuucuccuccc

SEQ ID NO: 3715450 - RNA, 16 nt, Human
gccuucucugaaggac

SEQ ID NO: 3715451 - RNA, 14 nt, Human
gccuucucuguuca

SEQ ID NO: 3715452 - RNA, 16 nt, Human
gccuucucuguucauu

SEQ ID NO: 3715453 - RNA, 16 nt, Human
gccuucugaugaaaug

SEQ ID NO: 3715454 - RNA, 19 nt, Human
gccuucuggauucuuggcc

SEQ ID NO: 3715455 - RNA, 19 nt, Human
gccuucugguguuggacaa

SEQ ID NO: 3715456 - RNA, 17 nt, Human
gccuucuucagggccug

SEQ ID NO: 3715457 - RNA, 19 nt, Human
gccuucuucagggccuggu

SEQ ID NO: 3715458 - RNA, 14 nt, Human
gccuucuuccaucc

SEQ ID NO: 3715459 - RNA, 23 nt, Human
gccuucuucggggaacuccugga

SEQ ID NO: 3715460 - RNA, 21 nt, Human
gccuucuucuuuuugcuguug

SEQ ID NO: 3715461 - RNA, 11 nt, Human
gccuucuuuga

SEQ ID NO: 3715462 - RNA, 14 nt, Human
gccuucuuugaaga

SEQ ID NO: 3715463 - RNA, 15 nt, Human
gccuucuuugaagaa

SEQ ID NO: 3715464 - RNA, 18 nt, Human
gccuucuuugcuugccuc

SEQ ID NO: 3715465 - RNA, 17 nt, Human
gccuugaaccugugagu

SEQ ID NO: 3715466 - RNA, 21 nt, Human
gccuugacaucaguuccuuug

SEQ ID NO: 3715467 - RNA, 19 nt, Human
gccuugaccauucuccacc

SEQ ID NO: 3715468 - RNA, 21 nt, Human
gccuugaccauucuccaccug

SEQ ID NO: 3715469 - RNA, 22 nt, Human
gccuugaccauucuccaccugc

SEQ ID NO: 3715470 - RNA, 15 nt, Human
gccuugagcccuggc

SEQ ID NO: 3715471 - RNA, 20 nt, Human
gccuugauucccuuguuauu

SEQ ID NO: 3715472 - RNA, 17 nt, Human
gccuugcagaacugcca

SEQ ID NO: 3715473 - RNA, 20 nt, Human
gccuugcagaacugccauua

SEQ ID NO: 3715474 - RNA, 21 nt, Human
gccuugcagcacucacacagg

SEQ ID NO: 3715475 - RNA, 23 nt, Human
gccuugcagcacucacacaggac

SEQ ID NO: 3715476 - RNA, 12 nt, Human
gccuugccagag

SEQ ID NO: 3715477 - RNA, 13 nt, Human
gccuugccagaga

SEQ ID NO: 3715478 - RNA, 14 nt, Human
gccuugccagagau

SEQ ID NO: 3715479 - RNA, 12 nt, Human
gccuugcccaga

SEQ ID NO: 3715480 - RNA, 16 nt, Human
gccuugcccagagaug

SEQ ID NO: 3715481 - RNA, 22 nt, Human
gccuugcgguauccgcccccaa

SEQ ID NO: 3715482 - RNA, 22 nt, Human
gccuugcucccaaccccacacg

SEQ ID NO: 3715483 - RNA, 14 nt, Human
gccuugcuggacgg

SEQ ID NO: 3715484 - RNA, 13 nt, Human
gccuuggaaauuc

SEQ ID NO: 3715485 - RNA, 19 nt, Human
gccuuggaaguugcauggc

SEQ ID NO: 3715486 - RNA, 19 nt, Human
gccuuggagggucccaagc

SEQ ID NO: 3715487 - RNA, 21 nt, Human
gccuuggagggucccaagcug

SEQ ID NO: 3715488 - RNA, 21 nt, Human
gccuuggauaaugcuguugcc

SEQ ID NO: 3715489 - RNA, 15 nt, Human
gccuuggccggcugu

SEQ ID NO: 3715490 - RNA, 12 nt, Human
gccuuggccugg

SEQ ID NO: 3715491 - RNA, 13 nt, Human
gccuuggccugga

SEQ ID NO: 3715492 - RNA, 15 nt, Human
gccuuggccuguguu

SEQ ID NO: 3715493 - RNA, 20 nt, Human
gccuuggcuguuggcaguga

SEQ ID NO: 3715494 - RNA, 17 nt, Human
gccuugggcucugcuga

SEQ ID NO: 3715495 - RNA, 14 nt, Human
gccuugggcugcuc

SEQ ID NO: 3715496 - RNA, 16 nt, Human
gccuugggcugcuccu

SEQ ID NO: 3715497 - RNA, 18 nt, Human
gccuugggcugcuccuca

SEQ ID NO: 3715498 - RNA, 19 nt, Human
gccuuggggaauuuccucu

SEQ ID NO: 3715499 - RNA, 19 nt, Human
gccuugguguccaccuggc

SEQ ID NO: 3715500 - RNA, 17 nt, Human
gccuuguaauucuaaau

SEQ ID NO: 3715501 - RNA, 17 nt, Human
gccuugucccagaggcu

SEQ ID NO: 3715502 - RNA, 23 nt, Human
gccuuguccccugccugugccug

SEQ ID NO: 3715503 - RNA, 20 nt, Human
gccuugucuccuacuccuga

SEQ ID NO: 3715504 - RNA, 23 nt, Human
gccuuguuuaaugguaguuuuac

SEQ ID NO: 3715505 - RNA, 15 nt, Human
gccuuguuuuuuucu

SEQ ID NO: 3715506 - RNA, 19 nt, Human
gccuuuaaaucugugauga

SEQ ID NO: 3715507 - RNA, 20 nt, Human
gccuuuacauggacagaauu

SEQ ID NO: 3715508 - RNA, 23 nt, Human
gccuuuacugacccuggggcugg

SEQ ID NO: 3715509 - RNA, 21 nt, Human
gccuuuauuaaaaacugagug

SEQ ID NO: 3715510 - RNA, 13 nt, Human
gccuuuauugugu

SEQ ID NO: 3715511 - RNA, 20 nt, Human
gccuuuauuguguuugucau

SEQ ID NO: 3715512 - RNA, 23 nt, Human
gccuuuauuguguuugucauuag

SEQ ID NO: 3715513 - RNA, 14 nt, Human
gccuuuauuuguua

SEQ ID NO: 3715514 - RNA, 16 nt, Human
gccuuucagcaggcag

SEQ ID NO: 3715515 - RNA, 17 nt, Human
gccuuucagcaggcagc

SEQ ID NO: 3715516 - RNA, 17 nt, Human
gccuuucaggaucuauu

SEQ ID NO: 3715517 - RNA, 18 nt, Human
gccuuucaggaucuauuu

SEQ ID NO: 3715518 - RNA, 15 nt, Human
gccuuucauuuugcu

SEQ ID NO: 3715519 - RNA, 18 nt, Human
gccuuucauuuugcuuua

SEQ ID NO: 3715520 - RNA, 14 nt, Human
gccuuuccucaaaa

SEQ ID NO: 3715521 - RNA, 13 nt, Human
gccuuuccucucu

SEQ ID NO: 3715522 - RNA, 18 nt, Human
gccuuuccuguucagcau

SEQ ID NO: 3715523 - RNA, 23 nt, Human
gccuuuccuuuucgccuuuccuc

SEQ ID NO: 3715524 - RNA, 19 nt, Human
gccuuucugcaguuuuuca

SEQ ID NO: 3715525 - RNA, 13 nt, Human
gccuuucugugug

SEQ ID NO: 3715526 - RNA, 17 nt, Human
gccuuucuuuucuuucu

SEQ ID NO: 3715527 - RNA, 14 nt, Human
gccuuugaauguua

SEQ ID NO: 3715528 - RNA, 19 nt, Human
gccuuugagacaguuucuu

SEQ ID NO: 3715529 - RNA, 18 nt, Human
gccuuugagcccacaaag

SEQ ID NO: 3715530 - RNA, 17 nt, Human
gccuuugaucagguggg

SEQ ID NO: 3715531 - RNA, 18 nt, Human
gccuuugcaaaucagugu

SEQ ID NO: 3715532 - RNA, 15 nt, Human
gccuuugcagaaaca

SEQ ID NO: 3715533 - RNA, 16 nt, Human
gccuuugcagcucaga

SEQ ID NO: 3715534 - RNA, 14 nt, Human
gccuuugccaggug

SEQ ID NO: 3715535 - RNA, 15 nt, Human
gccuuugcgcuccug

SEQ ID NO: 3715536 - RNA, 19 nt, Human
gccuuugcgcuccuggccc

SEQ ID NO: 3715537 - RNA, 13 nt, Human
gccuuugcuccuc

SEQ ID NO: 3715538 - RNA, 16 nt, Human
gccuuuggcagaguuc

SEQ ID NO: 3715539 - RNA, 13 nt, Human
gccuuuggcaggu

SEQ ID NO: 3715540 - RNA, 13 nt, Human
gccuuuggcucug

SEQ ID NO: 3715541 - RNA, 16 nt, Human
gccuuuggcucuggag

SEQ ID NO: 3715542 - RNA, 22 nt, Human
gccuuuguaaccacaacuuuca

SEQ ID NO: 3715543 - RNA, 21 nt, Human
gccuuuguuccccacuggagc

SEQ ID NO: 3715544 - RNA, 22 nt, Human
gccuuuguuccccacuggagca

SEQ ID NO: 3715545 - RNA, 15 nt, Human
gccuuuuaacauuuu

SEQ ID NO: 3715546 - RNA, 21 nt, Human
gccuuuuaacauuuuguucuu

SEQ ID NO: 3715547 - RNA, 14 nt, Human
gccuuuuaauuuuu

SEQ ID NO: 3715548 - RNA, 16 nt, Human
gccuuuuaguuccugu

SEQ ID NO: 3715549 - RNA, 14 nt, Human
gccuuuuauagcua

SEQ ID NO: 3715550 - RNA, 20 nt, Human
gccuuuucccucuuuggcuc

SEQ ID NO: 3715551 - RNA, 15 nt, Human
gccuuuucuggcacc

SEQ ID NO: 3715552 - RNA, 16 nt, Human
gccuuuucuggcaccg

SEQ ID NO: 3715553 - RNA, 12 nt, Human
gccuuuugaaag

SEQ ID NO: 3715554 - RNA, 15 nt, Human
gccuuuugcaccccu

SEQ ID NO: 3715555 - RNA, 16 nt, Human
gccuuuugcaccccuc

SEQ ID NO: 3715556 - RNA, 13 nt, Human
gccuuuuguauac

SEQ ID NO: 3715557 - RNA, 14 nt, Human
gccuuuuguauaca

SEQ ID NO: 3715558 - RNA, 22 nt, Human
gccuuuuuaaaacacauguuuu

SEQ ID NO: 3715559 - RNA, 19 nt, Human
gccuuuuuauaacuuuuua

SEQ ID NO: 3715560 - RNA, 15 nt, Human
gccuuuuucauuuau

SEQ ID NO: 3715561 - RNA, 17 nt, Human
gccuuuuucauuuaucu

SEQ ID NO: 3715562 - RNA, 18 nt, Human
gccuuuuucauuuaucua

SEQ ID NO: 3715563 - RNA, 17 nt, Human
gccuuuuucauuuucca

SEQ ID NO: 3715564 - RNA, 19 nt, Human
gccuuuuucauuuuccaau

SEQ ID NO: 3715565 - RNA, 23 nt, Human
uauuuuguguccuccaggagcuu

SEQ ID NO: 3715566 - RNA, 15 nt, Human
uauuuugugugacca

SEQ ID NO: 3715567 - RNA, 21 nt, Human
uauuuugugugaccaacugug

SEQ ID NO: 3715568 - RNA, 23 nt, Human
uauuuugugugaccaacuguguu

SEQ ID NO: 3715569 - RNA, 15 nt, Human
uauuuuguucauaca

SEQ ID NO: 3715570 - RNA, 23 nt, Human
uauuuuuaaaaaaugaaauccuu

SEQ ID NO: 3715571 - RNA, 12 nt, Human
uauuuuuaaugg

SEQ ID NO: 3715572 - RNA, 21 nt, Human
uauuuuuaauuaauugggcca

SEQ ID NO: 3715573 - RNA, 13 nt, Human
uauuuuuagaugg

SEQ ID NO: 3715574 - RNA, 20 nt, Human
uauuuuuagaugguuacacu

SEQ ID NO: 3715575 - RNA, 20 nt, Human
uauuuuuauaauuguacaaa

SEQ ID NO: 3715576 - RNA, 17 nt, Human
uauuuuuauacaaaccu

SEQ ID NO: 3715577 - RNA, 19 nt, Human
uauuuuuauauagcuugaa

SEQ ID NO: 3715578 - RNA, 19 nt, Human
uauuuuuauaucaugcaaa

SEQ ID NO: 3715579 - RNA, 16 nt, Human
uauuuuuauauuuacu

SEQ ID NO: 3715580 - RNA, 21 nt, Human
uauuuuuauauuuaguuauag

SEQ ID NO: 3715581 - RNA, 21 nt, Human
uauuuuuaucaguuacacaug

SEQ ID NO: 3715582 - RNA, 18 nt, Human
uauuuuuaucuauauaaa

SEQ ID NO: 3715583 - RNA, 17 nt, Human
uauuuuuauuuguuugu

SEQ ID NO: 3715584 - RNA, 20 nt, Human
uauuuuucaauaaagcauuu

SEQ ID NO: 3715585 - RNA, 15 nt, Human
uauuuuucacaguuu

SEQ ID NO: 3715586 - RNA, 13 nt, Human
uauuuuucacaua

SEQ ID NO: 3715587 - RNA, 12 nt, Human
uauuuuucacuc

SEQ ID NO: 3715588 - RNA, 21 nt, Human
uauuuuucagagauuuauaua

SEQ ID NO: 3715589 - RNA, 18 nt, Human
uauuuuucauaaacaagu

SEQ ID NO: 3715590 - RNA, 14 nt, Human
uauuuuucauauug

SEQ ID NO: 3715591 - RNA, 15 nt, Human
uauuuuucauauugu

SEQ ID NO: 3715592 - RNA, 16 nt, Human
uauuuuucauccuaaa

SEQ ID NO: 3715593 - RNA, 13 nt, Human
uauuuuucuaaac

SEQ ID NO: 3715594 - RNA, 13 nt, Human
uauuuuucuaacu

SEQ ID NO: 3715595 - RNA, 15 nt, Human
uauuuuugacagaau

SEQ ID NO: 3715596 - RNA, 13 nt, Human
uauuuuugcccug

SEQ ID NO: 3715597 - RNA, 16 nt, Human
uauuuuugcugcuucu

SEQ ID NO: 3715598 - RNA, 16 nt, Human
uauuuuuggagguuua

SEQ ID NO: 3715599 - RNA, 20 nt, Human
uauuuuuggcagucugaauu

SEQ ID NO: 3715600 - RNA, 14 nt, Human
uauuuuuguacaug

SEQ ID NO: 3715601 - RNA, 13 nt, Human
uauuuuuguagca

SEQ ID NO: 3715602 - RNA, 19 nt, Human
uauuuuuguagcacugaca

SEQ ID NO: 3715603 - RNA, 20 nt, Human
uauuuuuguuuuuauuaaaa

SEQ ID NO: 3715604 - RNA, 13 nt, Human
uauuuuuuaaaaa

SEQ ID NO: 3715605 - RNA, 16 nt, Human
uauuuuuuaauuugau

SEQ ID NO: 3715606 - RNA, 16 nt, Human
uauuuuuuauauauac

SEQ ID NO: 3715607 - RNA, 19 nt, Human
uauuuuuuauaucuggaau

SEQ ID NO: 3715608 - RNA, 12 nt, Human
uauuuuuucaga

SEQ ID NO: 3715609 - RNA, 14 nt, Human
uauuuuuucagacc

SEQ ID NO: 3715610 - RNA, 14 nt, Human
uauuuuuucccaaa

SEQ ID NO: 3715611 - RNA, 14 nt, Human
uauuuuuuccuuuu

SEQ ID NO: 3715612 - RNA, 18 nt, Human
uauuuuuucuugcauuga

SEQ ID NO: 3715613 - RNA, 19 nt, Human
uauuuuuucuugcauugac

SEQ ID NO: 3715614 - RNA, 13 nt, Human
uauuuuuugaaaa

SEQ ID NO: 3715615 - RNA, 15 nt, Human
uauuuuuuggacuuc

SEQ ID NO: 3715616 - RNA, 16 nt, Human
uauuuuuuuaaaauuu

SEQ ID NO: 3715617 - RNA, 19 nt, Human
uauuuuuuuaagcuguaaa

SEQ ID NO: 3715618 - RNA, 18 nt, Human
uauuuuuuuccuuacaua

SEQ ID NO: 3715619 - RNA, 23 nt, Human
uauuuuuuucuaccuugaggucu

SEQ ID NO: 3715620 - RNA, 13 nt, Human
uauuuuuuugcaa

SEQ ID NO: 3715621 - RNA, 19 nt, Human
uauuuuuuuguaauugcuu

SEQ ID NO: 3715622 - RNA, 20 nt, Human
ucaaaaaaaaaaaaaugcac

SEQ ID NO: 3715623 - RNA, 16 nt, Human
ucaaaaaaacacuagu

SEQ ID NO: 3715624 - RNA, 14 nt, Human
ucaaaaaacuugua

SEQ ID NO: 3715625 - RNA, 22 nt, Human
ucaaaaacugucaaagaaucaa

SEQ ID NO: 3715626 - RNA, 22 nt, Human
ucaaaaacuuuggaguccccuc

SEQ ID NO: 3715627 - RNA, 17 nt, Human
ucaaaaaggcuuauaaa

SEQ ID NO: 3715628 - RNA, 23 nt, Human
ucaaaaagucuacgcucuccuuu

SEQ ID NO: 3715629 - RNA, 12 nt, Human
ucaaaaaguguu

SEQ ID NO: 3715630 - RNA, 15 nt, Human
ucaaaaaguguuuau

SEQ ID NO: 3715631 - RNA, 14 nt, Human
ucaaaaauauaacu

SEQ ID NO: 3715632 - RNA, 16 nt, Human
ucaaaaaucugaagau

SEQ ID NO: 3715633 - RNA, 17 nt, Human
ucaaaaaucugaagauu

SEQ ID NO: 3715634 - RNA, 23 nt, Human
ucaaaaauguacaaaauaaaguu

SEQ ID NO: 3715635 - RNA, 12 nt, Human
ucaaaaauuaaa

SEQ ID NO: 3715636 - RNA, 22 nt, Human
ucaaaacaaacagaugcucuga

SEQ ID NO: 3715637 - RNA, 12 nt, Human
ucaaaacacugu

SEQ ID NO: 3715638 - RNA, 17 nt, Human
ucaaaacacuuguaauu

SEQ ID NO: 3715639 - RNA, 15 nt, Human
ucaaaacagagaugu

SEQ ID NO: 3715640 - RNA, 14 nt, Human
ucaaaacucaaaug

SEQ ID NO: 3715641 - RNA, 15 nt, Human
ucaaaacucaaaugc

SEQ ID NO: 3715642 - RNA, 18 nt, Human
ucaaaacucacaagugcu

SEQ ID NO: 3715643 - RNA, 18 nt, Human
ucaaaagaaagaaaauca

SEQ ID NO: 3715644 - RNA, 23 nt, Human
ucaaaagacaauucuuuauacaa

SEQ ID NO: 3715645 - RNA, 18 nt, Human
ucaaaagcaaaugagauc

SEQ ID NO: 3715646 - RNA, 15 nt, Human
ucaaaagcuggauua

SEQ ID NO: 3715647 - RNA, 21 nt, Human
ucaaaaggaaccaggagguuu

SEQ ID NO: 3715648 - RNA, 14 nt, Human
ucaaaagggccaaa

SEQ ID NO: 3715649 - RNA, 17 nt, Human
ucaaaaguaaugccucu

SEQ ID NO: 3715650 - RNA, 15 nt, Human
ucaaaaguauuuucc

SEQ ID NO: 3715651 - RNA, 16 nt, Human
ucaaaaguauuuuccu

SEQ ID NO: 3715652 - RNA, 17 nt, Human
ucaaaaguauuuuccug

SEQ ID NO: 3715653 - RNA, 12 nt, Human
ucaaaagugccu

SEQ ID NO: 3715654 - RNA, 14 nt, Human
ucaaaaguuccaag

SEQ ID NO: 3715655 - RNA, 15 nt, Human
ucaaaaguuccaaga

SEQ ID NO: 3715656 - RNA, 17 nt, Human
ucaaaaguuccaagagu

SEQ ID NO: 3715657 - RNA, 22 nt, Human
ucaaaaguuccaagagucuaaa

SEQ ID NO: 3715658 - RNA, 12 nt, Human
ucaaaauaaaaa

SEQ ID NO: 3715659 - RNA, 20 nt, Human
ucaaaauaaaaagugacaca

SEQ ID NO: 3715660 - RNA, 23 nt, Human
ucaaaauaaaaagugacacagca

SEQ ID NO: 3715661 - RNA, 23 nt, Human
ucaaaauaccaugccauuuaaag

SEQ ID NO: 3715662 - RNA, 14 nt, Human
ucaaaauagaaaag

SEQ ID NO: 3715663 - RNA, 17 nt, Human
ucaaaauagguuuuuau

SEQ ID NO: 3715664 - RNA, 20 nt, Human
ucaaaauauaaaaugccaag

SEQ ID NO: 3715665 - RNA, 21 nt, Human
ucaaaauaugccccauucaac

SEQ ID NO: 3715666 - RNA, 15 nt, Human
ucaaaauauuacuca

SEQ ID NO: 3715667 - RNA, 13 nt, Human
ucaaaauauugag

SEQ ID NO: 3715668 - RNA, 22 nt, Human
ucaaaauauugagcagaauuca

SEQ ID NO: 3715669 - RNA, 19 nt, Human
ucaaaauauuuaaaaaugu

SEQ ID NO: 3715670 - RNA, 23 nt, Human
ucaaaauauuuaaaaaugucuug

SEQ ID NO: 3715671 - RNA, 17 nt, Human
ucaaaauauuuguacau

SEQ ID NO: 3715672 - RNA, 20 nt, Human
ucaaaauauuuuuaaaagau

SEQ ID NO: 3715673 - RNA, 19 nt, Human
ucaaaaucuagaagagucu

SEQ ID NO: 3715674 - RNA, 23 nt, Human
ucaaaaucucuccacuuucagcu

SEQ ID NO: 3715675 - RNA, 12 nt, Human
ucaaaaucuuuc

SEQ ID NO: 3715676 - RNA, 15 nt, Human
ucaaaaugacagcca

SEQ ID NO: 3715677 - RNA, 21 nt, Human
ucaaaaugauuuccucuguaa

SEQ ID NO: 3715678 - RNA, 22 nt, Human
ucaaaaugauuuccucuguaau

SEQ ID NO: 3715679 - RNA, 13 nt, Human
ucaaaaugcaaaa

SEQ ID NO: 3715680 - RNA, 22 nt, Human
ucaaaauguauauauuuagugc

SEQ ID NO: 3715681 - RNA, 22 nt, Human
ucaaaauuauaggagacuugua

SEQ ID NO: 3715682 - RNA, 16 nt, Human
ucaaaauuguuacaaa

SEQ ID NO: 3715683 - RNA, 19 nt, Human
ucaaaauuguuuaaaaauu

SEQ ID NO: 3715684 - RNA, 21 nt, Human
ucaaaauuuaacaguuaccug

SEQ ID NO: 3715685 - RNA, 16 nt, Human
ucaaaauuugaagaau

SEQ ID NO: 3715686 - RNA, 14 nt, Human
ucaaacaaagccag

SEQ ID NO: 3715687 - RNA, 21 nt, Human
ucaaacaaagccagaagcuga

SEQ ID NO: 3715688 - RNA, 19 nt, Human
ucaaacaaugacaaagcag

SEQ ID NO: 3715689 - RNA, 21 nt, Human
ucaaacaccaacauaaaaaug

SEQ ID NO: 3715690 - RNA, 13 nt, Human
ucaaacagucuca

SEQ ID NO: 3715691 - RNA, 20 nt, Human
ucaaacagucucaggaaauc

SEQ ID NO: 3715692 - RNA, 22 nt, Human
ucaaacagucucaggaaaucaa

SEQ ID NO: 3715693 - RNA, 17 nt, Human
ucaaacaugagaugugu

SEQ ID NO: 3715694 - RNA, 15 nt, Human
ucaaacauuaguacu

SEQ ID NO: 3715695 - RNA, 19 nt, Human
ucaaacauuaguacuuuau

SEQ ID NO: 3715696 - RNA, 12 nt, Human
ucaaacauuuug

SEQ ID NO: 3715697 - RNA, 17 nt, Human
ucaaacauuuugaaagu

SEQ ID NO: 3715698 - RNA, 18 nt, Human
ucaaacauuuugaaaguc

SEQ ID NO: 3715699 - RNA, 18 nt, Human
ucaaacccuagccuugcu

SEQ ID NO: 3715700 - RNA, 17 nt, Human
ucaaaccuccucuucug

SEQ ID NO: 3715701 - RNA, 17 nt, Human
ucaaaccuguuuaaaua

SEQ ID NO: 3715702 - RNA, 19 nt, Human
ucaaaccuguuuaaauauu

SEQ ID NO: 3715703 - RNA, 22 nt, Human
ucaaaccuguuuaaauauuuca

SEQ ID NO: 3715704 - RNA, 23 nt, Human
ucaaacggccucacuaggcuucu

SEQ ID NO: 3715705 - RNA, 16 nt, Human
ucaaacgugaaaaugc

SEQ ID NO: 3715706 - RNA, 14 nt, Human
ucaaacuaaaagac

SEQ ID NO: 3715707 - RNA, 17 nt, Human
ucaaacuaaaagacauu

SEQ ID NO: 3715708 - RNA, 13 nt, Human
ucaaacuaacagg

SEQ ID NO: 3715709 - RNA, 23 nt, Human
ucaaacucaaugcuuuauuugua

SEQ ID NO: 3715710 - RNA, 22 nt, Human
ucaaacuccaagguucccuugu

SEQ ID NO: 3715711 - RNA, 21 nt, Human
ucaaacuccugaccucaggca

SEQ ID NO: 3715712 - RNA, 14 nt, Human
ucaaacucuuaaaa

SEQ ID NO: 3715713 - RNA, 12 nt, Human
ucaaacugaaaa

SEQ ID NO: 3715714 - RNA, 23 nt, Human
ucaaacugaaugaaacccccaca

SEQ ID NO: 3715715 - RNA, 17 nt, Human
ucagagggggacugcug

SEQ ID NO: 3715716 - RNA, 21 nt, Human
ucagaguaauccaagcaaaug

SEQ ID NO: 3715717 - RNA, 22 nt, Human
ucagaguaauccaagcaaaugu

SEQ ID NO: 3715718 - RNA, 14 nt, Human
ucagaguagaaaua

SEQ ID NO: 3715719 - RNA, 15 nt, Human
ucagaguagaaauaa

SEQ ID NO: 3715720 - RNA, 22 nt, Human
ucagaguauauuguugaagaga

SEQ ID NO: 3715721 - RNA, 13 nt, Human
ucagaguccaggc

SEQ ID NO: 3715722 - RNA, 14 nt, Human
ucagaguccaggcc

SEQ ID NO: 3715723 - RNA, 18 nt, Human
ucagaguccuuaaaaugu

SEQ ID NO: 3715724 - RNA, 20 nt, Human
ucagaguucccaagaaagga

SEQ ID NO: 3715725 - RNA, 16 nt, Human
ucagaguucuuuuuga

SEQ ID NO: 3715726 - RNA, 22 nt, Human
ucagaguugaugguuguacaua

SEQ ID NO: 3715727 - RNA, 21 nt, Human
ucagaguugcugcaaaccuga

SEQ ID NO: 3715728 - RNA, 14 nt, Human
ucagauacaucacu

SEQ ID NO: 3715729 - RNA, 19 nt, Human
ucagauacaucacugcuug

SEQ ID NO: 3715730 - RNA, 14 nt, Human
ucagauacuggauu

SEQ ID NO: 3715731 - RNA, 17 nt, Human
ucagauagaaugacagu

SEQ ID NO: 3715732 - RNA, 21 nt, Human
ucagauaucuuggacaaauca

SEQ ID NO: 3715733 - RNA, 16 nt, Human
ucagauaugauucaaa

SEQ ID NO: 3715734 - RNA, 15 nt, Human
ucagauauucugcuc

SEQ ID NO: 3715735 - RNA, 13 nt, Human
ucagauauuugca

SEQ ID NO: 3715736 - RNA, 21 nt, Human
ucagauauuuuuucagaaaua

SEQ ID NO: 3715737 - RNA, 23 nt, Human
ucagauauuuuuucagaaauaug

SEQ ID NO: 3715738 - RNA, 15 nt, Human
ucagaucacuacugc

SEQ ID NO: 3715739 - RNA, 13 nt, Human
ucagaucagugcu

SEQ ID NO: 3715740 - RNA, 16 nt, Human
ucagauccaggagcuc

SEQ ID NO: 3715741 - RNA, 14 nt, Human
ucagauccuacccc

SEQ ID NO: 3715742 - RNA, 13 nt, Human
ucagauccuccuc

SEQ ID NO: 3715743 - RNA, 14 nt, Human
ucagauccuccuca

SEQ ID NO: 3715744 - RNA, 20 nt, Human
ucagauccugaucuuaagag

SEQ ID NO: 3715745 - RNA, 19 nt, Human
ucagauccuuguuucaaac

SEQ ID NO: 3715746 - RNA, 16 nt, Human
ucagaucucuaacuuc

SEQ ID NO: 3715747 - RNA, 13 nt, Human
ucagaucugucug

SEQ ID NO: 3715748 - RNA, 16 nt, Human
ucagaugagaacaaag

SEQ ID NO: 3715749 - RNA, 21 nt, Human
ucagaugagaacaaagcuguu

SEQ ID NO: 3715750 - RNA, 16 nt, Human
ucagaugcaguuugga

SEQ ID NO: 3715751 - RNA, 19 nt, Human
ucagaugccacuucuaaga

SEQ ID NO: 3715752 - RNA, 13 nt, Human
ucagaugcucaaa

SEQ ID NO: 3715753 - RNA, 19 nt, Human
ucagauggaaaauucauuu

SEQ ID NO: 3715754 - RNA, 18 nt, Human
ucagaugggaagacauga

SEQ ID NO: 3715755 - RNA, 22 nt, Human
ucagaugggaggaaagagagca

SEQ ID NO: 3715756 - RNA, 16 nt, Human
ucagauguaauguuuu

SEQ ID NO: 3715757 - RNA, 13 nt, Human
ucagaugucccuu

SEQ ID NO: 3715758 - RNA, 14 nt, Human
ucagaugucuucug

SEQ ID NO: 3715759 - RNA, 20 nt, Human
ucagaugucuucugccuguu

SEQ ID NO: 3715760 - RNA, 15 nt, Human
ucagauguggagcca

SEQ ID NO: 3715761 - RNA, 20 nt, Human
ucagauguggagccaggcgu

SEQ ID NO: 3715762 - RNA, 15 nt, Human
ucagauguuaaaaua

SEQ ID NO: 3715763 - RNA, 13 nt, Human
ucagauguuuaaa

SEQ ID NO: 3715764 - RNA, 16 nt, Human
ucagauucaggcauuu

SEQ ID NO: 3715765 - RNA, 15 nt, Human
ucagauuccuuuccc

SEQ ID NO: 3715766 - RNA, 14 nt, Human
ucagauugcaugug

SEQ ID NO: 3715767 - RNA, 16 nt, Human
ucagauugcaugugac

SEQ ID NO: 3715768 - RNA, 17 nt, Human
ucagauugcaugugacu

SEQ ID NO: 3715769 - RNA, 23 nt, Human
ucagauuguggaauguuggauaa

SEQ ID NO: 3715770 - RNA, 17 nt, Human
ucagauuuccagucucc

SEQ ID NO: 3715771 - RNA, 19 nt, Human
ucagauuucucuuugaaac

SEQ ID NO: 3715772 - RNA, 21 nt, Human
ucagauuugaacucuucaauc

SEQ ID NO: 3715773 - RNA, 20 nt, Human
ucagauuugcacaaaaagau

SEQ ID NO: 3715774 - RNA, 22 nt, Human
ucagauuugccuuauuggcagc

SEQ ID NO: 3715775 - RNA, 19 nt, Human
ucagauuuuaaaaagucuu

SEQ ID NO: 3715776 - RNA, 21 nt, Human
ucagauuuuaaaaagucuuca

SEQ ID NO: 3715777 - RNA, 13 nt, Human
ucagauuuuauua

SEQ ID NO: 3715778 - RNA, 22 nt, Human
ucagauuuuauuauguaaaucc

SEQ ID NO: 3715779 - RNA, 12 nt, Human
ucagauuuugau

SEQ ID NO: 3715780 - RNA, 21 nt, Human
ucagauuuugauaacuguuua

SEQ ID NO: 3715781 - RNA, 20 nt, Human
ucagcaaaaauauuuuauga

SEQ ID NO: 3715782 - RNA, 15 nt, Human
ucagcaaaagaugcu

SEQ ID NO: 3715783 - RNA, 15 nt, Human
ucagcaaagaaaaaa

SEQ ID NO: 3715784 - RNA, 18 nt, Human
ucagcaaagugguucccu

SEQ ID NO: 3715785 - RNA, 20 nt, Human
ucagcaaagugguucccucu

SEQ ID NO: 3715786 - RNA, 21 nt, Human
ucagcaaauuaauuggcagca

SEQ ID NO: 3715787 - RNA, 12 nt, Human
ucagcaagagaa

SEQ ID NO: 3715788 - RNA, 15 nt, Human
ucagcaagagagaac

SEQ ID NO: 3715789 - RNA, 16 nt, Human
ucagcaagagagaacc

SEQ ID NO: 3715790 - RNA, 15 nt, Human
ucagcaaggccaccu

SEQ ID NO: 3715791 - RNA, 18 nt, Human
ucagcaaggccaccucuu

SEQ ID NO: 3715792 - RNA, 23 nt, Human
ucagcaaggccaccucuuccugg

SEQ ID NO: 3715793 - RNA, 22 nt, Human
ucagcaaggcgcuaacuugcuu

SEQ ID NO: 3715794 - RNA, 19 nt, Human
ucagcaaguuagaacuagc

SEQ ID NO: 3715795 - RNA, 21 nt, Human
ucagcaaguuagaacuagcca

SEQ ID NO: 3715796 - RNA, 19 nt, Human
ucagcaauuuaacuagaca

SEQ ID NO: 3715797 - RNA, 13 nt, Human
ucagcacaaggcc

SEQ ID NO: 3715798 - RNA, 14 nt, Human
ucagcacaucucaa

SEQ ID NO: 3715799 - RNA, 16 nt, Human
ucagcacaucucaaca

SEQ ID NO: 3715800 - RNA, 20 nt, Human
ucagcacaucucaacaggcc

SEQ ID NO: 3715801 - RNA, 15 nt, Human
ucagcacgauuucug

SEQ ID NO: 3715802 - RNA, 19 nt, Human
ucagcacgauuucuguuua

SEQ ID NO: 3715803 - RNA, 11 nt, Human
ucagcacugaa

SEQ ID NO: 3715804 - RNA, 12 nt, Human
ucagcacugaaa

SEQ ID NO: 3715805 - RNA, 17 nt, Human
ucagcacugauuucaca

SEQ ID NO: 3715806 - RNA, 20 nt, Human
ucagcacugauuucacaaca

SEQ ID NO: 3715807 - RNA, 15 nt, Human
ucagcacugccugcu

SEQ ID NO: 3715808 - RNA, 18 nt, Human
ucagcacugccugcuccc

SEQ ID NO: 3715809 - RNA, 19 nt, Human
ucagcacuuggcccuucua

SEQ ID NO: 3715810 - RNA, 13 nt, Human
ucagcagacugau

SEQ ID NO: 3715811 - RNA, 22 nt, Human
ucagcagagugcuuuaccaauu

SEQ ID NO: 3715812 - RNA, 17 nt, Human
ucagcagccucccugaa

SEQ ID NO: 3715813 - RNA, 14 nt, Human
ucagcagcuagaaa

SEQ ID NO: 3715814 - RNA, 14 nt, Human
ucagcaggaagcaa

SEQ ID NO: 3715815 - RNA, 12 nt, Human
ucagcaggcagc

SEQ ID NO: 3715816 - RNA, 15 nt, Human
ucagcaggcagccuu

SEQ ID NO: 3715817 - RNA, 17 nt, Human
ucagcaguugcugguaa

SEQ ID NO: 3715818 - RNA, 19 nt, Human
ucagcaguugcugguaaaa

SEQ ID NO: 3715819 - RNA, 20 nt, Human
ucagcaguugcugguaaaau

SEQ ID NO: 3715820 - RNA, 17 nt, Human
ucagcauccuggcaccc

SEQ ID NO: 3715821 - RNA, 18 nt, Human
ucagcauccuggcacccg

SEQ ID NO: 3715822 - RNA, 13 nt, Human
ucagcaugaaaau

SEQ ID NO: 3715823 - RNA, 14 nt, Human
ucagcaugaauuug

SEQ ID NO: 3715824 - RNA, 15 nt, Human
ucagcaugaauuugu

SEQ ID NO: 3715825 - RNA, 20 nt, Human
ucagcauucuuagccugugg

SEQ ID NO: 3715826 - RNA, 22 nt, Human
ucagcauuucuuuucuggccaa

SEQ ID NO: 3715827 - RNA, 12 nt, Human
ucagcauuugac

SEQ ID NO: 3715828 - RNA, 22 nt, Human
ucagccaaauguaauugaauaa

SEQ ID NO: 3715829 - RNA, 23 nt, Human
ucagccaaauguaauugaauaaa

SEQ ID NO: 3715830 - RNA, 17 nt, Human
ucagccaaccuuacuua

SEQ ID NO: 3715831 - RNA, 22 nt, Human
ucagccaaccuuacuuacagca

SEQ ID NO: 3715832 - RNA, 21 nt, Human
ucagccaacgaguaauuuauu

SEQ ID NO: 3715833 - RNA, 20 nt, Human
ucagccaagcacaguggugg

SEQ ID NO: 3715834 - RNA, 13 nt, Human
ucagccaauuaug

SEQ ID NO: 3715835 - RNA, 15 nt, Human
ucagccaauuauguu

SEQ ID NO: 3715836 - RNA, 17 nt, Human
ucagccaauuauguuaa

SEQ ID NO: 3715837 - RNA, 18 nt, Human
ucagccaauuauguuaaa

SEQ ID NO: 3715838 - RNA, 15 nt, Human
ucagccacacccagg

SEQ ID NO: 3715839 - RNA, 12 nt, Human
ucagccagcacu

SEQ ID NO: 3715840 - RNA, 17 nt, Human
ucagccagccccaucag

SEQ ID NO: 3715841 - RNA, 13 nt, Human
ucagccagccucg

SEQ ID NO: 3715842 - RNA, 21 nt, Human
ucagccagccucgcccauccc

SEQ ID NO: 3715843 - RNA, 19 nt, Human
ucagccaggagcugggcag

SEQ ID NO: 3715844 - RNA, 18 nt, Human
ucagccaggagcugucac

SEQ ID NO: 3715845 - RNA, 19 nt, Human
ucagccaggagcugucacc

SEQ ID NO: 3715846 - RNA, 12 nt, Human
ucagccagggcc

SEQ ID NO: 3715847 - RNA, 18 nt, Human
ucagccagggccaggggu

SEQ ID NO: 3715848 - RNA, 21 nt, Human
ucagccaugaggaguugcugu

SEQ ID NO: 3715849 - RNA, 14 nt, Human
ucagccauguacag

SEQ ID NO: 3715850 - RNA, 14 nt, Human
ucagccauguauuu

SEQ ID NO: 3715851 - RNA, 14 nt, Human
ucagccaugugcug

SEQ ID NO: 3715852 - RNA, 21 nt, Human
ucagcccaaaccaccagaagc

SEQ ID NO: 3715853 - RNA, 16 nt, Human
ucagcccaagaugcuu

SEQ ID NO: 3715854 - RNA, 13 nt, Human
ucagcccaccccc

SEQ ID NO: 3715855 - RNA, 17 nt, Human
ucagcccaccccccuca

SEQ ID NO: 3715856 - RNA, 24 nt, Human
ucagcccagaagaaaauucuccug

SEQ ID NO: 3715857 - RNA, 16 nt, Human
ucagcccauauuucau

SEQ ID NO: 3715858 - RNA, 19 nt, Human
ucagcccccagccccuccc

SEQ ID NO: 3715859 - RNA, 12 nt, Human
ucagccccuccu

SEQ ID NO: 3715860 - RNA, 14 nt, Human
ucagccccuccucu

SEQ ID NO: 3715861 - RNA, 18 nt, Human
ucagccccuccucugcca

SEQ ID NO: 3715862 - RNA, 20 nt, Human
ucagccccuccucugccacc

SEQ ID NO: 3715863 - RNA, 22 nt, Human
ucagccccuccucugccaccuc

SEQ ID NO: 3715864 - RNA, 11 nt, Human
ucagccccucu

SEQ ID NO: 3715865 - RNA, 21 nt, Human
gccuuuuuccuagccuguuuc

SEQ ID NO: 3715866 - RNA, 15 nt, Human
gccuuuuuuccccag

SEQ ID NO: 3715867 - RNA, 16 nt, Human
gccuuuuuuccccaga

SEQ ID NO: 3715868 - RNA, 23 nt, Human
gccuuuuuucuguauaaaugucu

SEQ ID NO: 3715869 - RNA, 22 nt, Human
gcgaaaaaaucagguggcuuuu

SEQ ID NO: 3715870 - RNA, 23 nt, Human
gcgaaaaacucaaccaaauggua

SEQ ID NO: 3715871 - RNA, 11 nt, Human
gcgaaaauagu

SEQ ID NO: 3715872 - RNA, 19 nt, Human
gcgaaaauaguuuguuuaa

SEQ ID NO: 3715873 - RNA, 15 nt, Human
gcgaaccaauauuug

SEQ ID NO: 3715874 - RNA, 15 nt, Human
gcgaaggggcccugg

SEQ ID NO: 3715875 - RNA, 20 nt, Human
gcgaaguagcuugcucccug

SEQ ID NO: 3715876 - RNA, 17 nt, Human
gcgaaguccuauggaaa

SEQ ID NO: 3715877 - RNA, 21 nt, Human
gcgaauccaagcucccugccc

SEQ ID NO: 3715878 - RNA, 22 nt, Human
gcgaauggacuuuggaagcagg

SEQ ID NO: 3715879 - RNA, 20 nt, Human
gcgaaugguagucuaaccaa

SEQ ID NO: 3715880 - RNA, 13 nt, Human
gcgacaacagauu

SEQ ID NO: 3715881 - RNA, 12 nt, Human
gcgacaaugcaa

SEQ ID NO: 3715882 - RNA, 13 nt, Human
gcgacaaugcaaa

SEQ ID NO: 3715883 - RNA, 23 nt, Human
gcgacaaugcaaaccaucauuga

SEQ ID NO: 3715884 - RNA, 18 nt, Human
gcgacaggaguauuuuuu

SEQ ID NO: 3715885 - RNA, 16 nt, Human
gcgacauagcccaucc

SEQ ID NO: 3715886 - RNA, 18 nt, Human
gcgacauagcccaucccu

SEQ ID NO: 3715887 - RNA, 16 nt, Human
gcgaccaccccugccu

SEQ ID NO: 3715888 - RNA, 16 nt, Human
gcgaccccaucugccc

SEQ ID NO: 3715889 - RNA, 18 nt, Human
gcgaccccaucugcccag

SEQ ID NO: 3715890 - RNA, 21 nt, Human
gcgaccccaucugcccaggac

SEQ ID NO: 3715891 - RNA, 17 nt, Human
gcgaccccgucacagcc

SEQ ID NO: 3715892 - RNA, 23 nt, Human
gcgacccugggggcacaggaggc

SEQ ID NO: 3715893 - RNA, 14 nt, Human
gcgaccgcccccuc

SEQ ID NO: 3715894 - RNA, 15 nt, Human
gcgaccgcccccucc

SEQ ID NO: 3715895 - RNA, 22 nt, Human
gcgaccgcccuccgcgaaaaua

SEQ ID NO: 3715896 - RNA, 22 nt, Human
gcgaccuuccucauccacccca

SEQ ID NO: 3715897 - RNA, 16 nt, Human
gcgacggagagaaaaa

SEQ ID NO: 3715898 - RNA, 17 nt, Human
gcgacuaaacuagauuu

SEQ ID NO: 3715899 - RNA, 23 nt, Human
gcgacuaauuucaaaaugcuuuu

SEQ ID NO: 3715900 - RNA, 18 nt, Human
gcgacuccguuggccacu

SEQ ID NO: 3715901 - RNA, 14 nt, Human
gcgacuuucugccu

SEQ ID NO: 3715902 - RNA, 15 nt, Human
gcgagagaugugugu

SEQ ID NO: 3715903 - RNA, 22 nt, Human
gcgagagauguguguugauacu

SEQ ID NO: 3715904 - RNA, 16 nt, Human
gcgagagucugucuca

SEQ ID NO: 3715905 - RNA, 20 nt, Human
gcgagccauuugucccaagu

SEQ ID NO: 3715906 - RNA, 13 nt, Human
gcgagccugcuag

SEQ ID NO: 3715907 - RNA, 16 nt, Human
gcgaggaggcuccaga

SEQ ID NO: 3715908 - RNA, 13 nt, Human
gcgaggcaggccg

SEQ ID NO: 3715909 - RNA, 12 nt, Human
gcgagggcagcu

SEQ ID NO: 3715910 - RNA, 16 nt, Human
gcgagggcagcugcua

SEQ ID NO: 3715911 - RNA, 14 nt, Human
gcgaggggagggug

SEQ ID NO: 3715912 - RNA, 17 nt, Human
gcgaggucaacagagaa

SEQ ID NO: 3715913 - RNA, 23 nt, Human
gcgaggucaacagagaaggcagg

SEQ ID NO: 3715914 - RNA, 17 nt, Human
gcgaucauggcucacug

SEQ ID NO: 3715915 - RNA, 21 nt, Human
gcgaucauggcucacugcagc

SEQ ID NO: 3715916 - RNA, 16 nt, Human
gcgaucucggcucagu

SEQ ID NO: 3715917 - RNA, 17 nt, Human
gcgaucucuccacugug

SEQ ID NO: 3715918 - RNA, 13 nt, Human
gcgaugccagcca

SEQ ID NO: 3715919 - RNA, 14 nt, Human
gcgaugccagccaa

SEQ ID NO: 3715920 - RNA, 22 nt, Human
gcgaugggucagguagggggga

SEQ ID NO: 3715921 - RNA, 20 nt, Human
gcgauguggaacugcugcca

SEQ ID NO: 3715922 - RNA, 23 nt, Human
gcgauguggaacugcugccacug

SEQ ID NO: 3715923 - RNA, 23 nt, Human
gcgauguuucaggaggcuggagg

SEQ ID NO: 3715924 - RNA, 16 nt, Human
gcgauucccauugaaa

SEQ ID NO: 3715925 - RNA, 17 nt, Human
gcgauucuccugccuca

SEQ ID NO: 3715926 - RNA, 18 nt, Human
gcgauucucuugccucaa

SEQ ID NO: 3715927 - RNA, 13 nt, Human
gcgauucuucugc

SEQ ID NO: 3715928 - RNA, 15 nt, Human
gcgauuuuauuacug

SEQ ID NO: 3715929 - RNA, 13 nt, Human
gcgcaagccugua

SEQ ID NO: 3715930 - RNA, 17 nt, Human
gcgcacaaggcugacca

SEQ ID NO: 3715931 - RNA, 13 nt, Human
gcgcacacacaca

SEQ ID NO: 3715932 - RNA, 14 nt, Human
gcgcacagcugcuc

SEQ ID NO: 3715933 - RNA, 15 nt, Human
gcgcacccuccccuc

SEQ ID NO: 3715934 - RNA, 16 nt, Human
gcgcacccuccccucc

SEQ ID NO: 3715935 - RNA, 17 nt, Human
gcgcacccuccccuccc

SEQ ID NO: 3715936 - RNA, 15 nt, Human
gcgcaccgaaaaacu

SEQ ID NO: 3715937 - RNA, 17 nt, Human
gcgcaccugcccccugg

SEQ ID NO: 3715938 - RNA, 19 nt, Human
gcgcaccugcccccuggug

SEQ ID NO: 3715939 - RNA, 13 nt, Human
gcgcacugccucu

SEQ ID NO: 3715940 - RNA, 17 nt, Human
gcgcagcauccgaccag

SEQ ID NO: 3715941 - RNA, 19 nt, Human
gcgcaggccgugacgucug

SEQ ID NO: 3715942 - RNA, 18 nt, Human
gcgcaggcuggcccugcc

SEQ ID NO: 3715943 - RNA, 19 nt, Human
gcgcaggcuggcccugccc

SEQ ID NO: 3715944 - RNA, 20 nt, Human
gcgcaggcuggcccugcccu

SEQ ID NO: 3715945 - RNA, 21 nt, Human
gcgcaggcuggcccugcccug

SEQ ID NO: 3715946 - RNA, 14 nt, Human
gcgcagugccucug

SEQ ID NO: 3715947 - RNA, 15 nt, Human
gcgcagugccucugg

SEQ ID NO: 3715948 - RNA, 18 nt, Human
gcgcagugcuucucuaca

SEQ ID NO: 3715949 - RNA, 17 nt, Human
gcgcaguguuuugcaag

SEQ ID NO: 3715950 - RNA, 22 nt, Human
gcgcaguuuuuuuuuucuuguc

SEQ ID NO: 3715951 - RNA, 18 nt, Human
gcgcaucuugccuccagg

SEQ ID NO: 3715952 - RNA, 18 nt, Human
gcgccaaauaaugucucu

SEQ ID NO: 3715953 - RNA, 21 nt, Human
gcgccaagcaaccugggucca

SEQ ID NO: 3715954 - RNA, 14 nt, Human
gcgccacaggaccc

SEQ ID NO: 3715955 - RNA, 22 nt, Human
gcgccacuacacuccagccugg

SEQ ID NO: 3715956 - RNA, 19 nt, Human
gcgccacugcuccguggag

SEQ ID NO: 3715957 - RNA, 23 nt, Human
gcgccaguguaaucccccaggag

SEQ ID NO: 3715958 - RNA, 16 nt, Human
gcgcccaccccgcucu

SEQ ID NO: 3715959 - RNA, 16 nt, Human
gcgcccagccucaucu

SEQ ID NO: 3715960 - RNA, 14 nt, Human
gcgcccagcuccug

SEQ ID NO: 3715961 - RNA, 14 nt, Human
gcgccccccuccca

SEQ ID NO: 3715962 - RNA, 17 nt, Human
gcgccccccucccagag

SEQ ID NO: 3715963 - RNA, 18 nt, Human
gcgccccccucccagagg

SEQ ID NO: 3715964 - RNA, 21 nt, Human
gcgcccccuccgcccugccac

SEQ ID NO: 3715965 - RNA, 15 nt, Human
gcgcccgcugggcug

SEQ ID NO: 3715966 - RNA, 18 nt, Human
gcgcccugcagacccugc

SEQ ID NO: 3715967 - RNA, 15 nt, Human
gcgcccuggccccca

SEQ ID NO: 3715968 - RNA, 22 nt, Human
gcgcccuuaacugcauccagcc

SEQ ID NO: 3715969 - RNA, 14 nt, Human
gcgcccuuccucuc

SEQ ID NO: 3715970 - RNA, 20 nt, Human
gcgcccuuggcuucugugau

SEQ ID NO: 3715971 - RNA, 23 nt, Human
gcgcccuuuccccgacgcccacc

SEQ ID NO: 3715972 - RNA, 20 nt, Human
gcgccgagucugucucuguc

SEQ ID NO: 3715973 - RNA, 18 nt, Human
gcgccgcaaaccacacug

SEQ ID NO: 3715974 - RNA, 21 nt, Human
gcgccgcaaaccacacuggac

SEQ ID NO: 3715975 - RNA, 23 nt, Human
gcgccggcaaaacuuuggcacug

SEQ ID NO: 3715976 - RNA, 13 nt, Human
gcgccgucuccag

SEQ ID NO: 3715977 - RNA, 19 nt, Human
gcgccgugaguucucaggg

SEQ ID NO: 3715978 - RNA, 23 nt, Human
gcgccgugaguucucagggcucc

SEQ ID NO: 3715979 - RNA, 14 nt, Human
gcgccgugcugggc

SEQ ID NO: 3715980 - RNA, 20 nt, Human
gcgccgugcugggcagcccg

SEQ ID NO: 3715981 - RNA, 20 nt, Human
gcgccuacaggagugagcac

SEQ ID NO: 3715982 - RNA, 21 nt, Human
gcgccuacaggagugagcacu

SEQ ID NO: 3715983 - RNA, 21 nt, Human
gcgccucaacucugcugaggg

SEQ ID NO: 3715984 - RNA, 16 nt, Human
gcgccucccuccaccc

SEQ ID NO: 3715985 - RNA, 18 nt, Human
gcgccucccuccacccca

SEQ ID NO: 3715986 - RNA, 16 nt, Human
gcgccuggccuccagg

SEQ ID NO: 3715987 - RNA, 16 nt, Human
gcgccugugaugcugg

SEQ ID NO: 3715988 - RNA, 15 nt, Human
gcgccugugcacaca

SEQ ID NO: 3715989 - RNA, 17 nt, Human
gcgccugugcacacaca

SEQ ID NO: 3715990 - RNA, 21 nt, Human
gcgccuugucuccuacuccug

SEQ ID NO: 3715991 - RNA, 22 nt, Human
gcgccuugucuccuacuccuga

SEQ ID NO: 3715992 - RNA, 16 nt, Human
gcgccuuucccaacuc

SEQ ID NO: 3715993 - RNA, 20 nt, Human
gcgcgagggccucaaaggcc

SEQ ID NO: 3715994 - RNA, 14 nt, Human
gcgcgccccuagcc

SEQ ID NO: 3715995 - RNA, 15 nt, Human
gcgcggccagccccg

SEQ ID NO: 3715996 - RNA, 18 nt, Human
gcgcggcugggaggaggg

SEQ ID NO: 3715997 - RNA, 19 nt, Human
gcgcgugcaugugugcgug

SEQ ID NO: 3715998 - RNA, 15 nt, Human
gcgcuaacuugcuua

SEQ ID NO: 3715999 - RNA, 15 nt, Human
gcgcuaucucccugc

SEQ ID NO: 3716000 - RNA, 13 nt, Human
gcgcucagggcca

SEQ ID NO: 3716001 - RNA, 14 nt, Human
gcgcuccgggcuuu

SEQ ID NO: 3716002 - RNA, 20 nt, Human
gcgcuccugccgcagagcug

SEQ ID NO: 3716003 - RNA, 21 nt, Human
gcgcuccugccgcagagcugg

SEQ ID NO: 3716004 - RNA, 19 nt, Human
gcgcuccuggcccagccuu

SEQ ID NO: 3716005 - RNA, 16 nt, Human
gcgcucuagccugggc

SEQ ID NO: 3716006 - RNA, 11 nt, Human
gcgcugcaaau

SEQ ID NO: 3716007 - RNA, 18 nt, Human
gcgcugccccuggcagcc

SEQ ID NO: 3716008 - RNA, 17 nt, Human
gcgcugccgcaccccag

SEQ ID NO: 3716009 - RNA, 14 nt, Human
gcgcugccugugug

SEQ ID NO: 3716010 - RNA, 19 nt, Human
gcgcugccugugugguguc

SEQ ID NO: 3716011 - RNA, 11 nt, Human
gcgcuggccca

SEQ ID NO: 3716012 - RNA, 19 nt, Human
gcgcuggccgggaccccga

SEQ ID NO: 3716013 - RNA, 22 nt, Human
gcgcuguuuuuguugugugugc

SEQ ID NO: 3716014 - RNA, 19 nt, Human
ucaaacuggggccuccaga

SEQ ID NO: 3716015 - RNA, 22 nt, Human
ucaaacuggggccuccagaacu

SEQ ID NO: 3716016 - RNA, 17 nt, Human
ucaaacuguagaaauga

SEQ ID NO: 3716017 - RNA, 20 nt, Human
ucaaacuucuggcucccucu

SEQ ID NO: 3716018 - RNA, 12 nt, Human
ucaaacuuggau

SEQ ID NO: 3716019 - RNA, 13 nt, Human
ucaaacuuuacua

SEQ ID NO: 3716020 - RNA, 16 nt, Human
ucaaacuuuacuaugg

SEQ ID NO: 3716021 - RNA, 21 nt, Human
ucaaagaaagaaaguuuagaa

SEQ ID NO: 3716022 - RNA, 12 nt, Human
ucaaagaaagug

SEQ ID NO: 3716023 - RNA, 14 nt, Human
ucaaagaaagugua

SEQ ID NO: 3716024 - RNA, 15 nt, Human
ucaaagaaauauuaa

SEQ ID NO: 3716025 - RNA, 16 nt, Human
ucaaagaaggauggca

SEQ ID NO: 3716026 - RNA, 21 nt, Human
ucaaagaccuggggcugcugu

SEQ ID NO: 3716027 - RNA, 20 nt, Human
ucaaagagagaaaauaaaga

SEQ ID NO: 3716028 - RNA, 12 nt, Human
ucaaagaugcug

SEQ ID NO: 3716029 - RNA, 15 nt, Human
ucaaagcaaaagugc

SEQ ID NO: 3716030 - RNA, 16 nt, Human
ucaaagcaaaagugcu

SEQ ID NO: 3716031 - RNA, 15 nt, Human
ucaaagcaaaugucu

SEQ ID NO: 3716032 - RNA, 15 nt, Human
ucaaagcaagcauuc

SEQ ID NO: 3716033 - RNA, 19 nt, Human
ucaaagcaagcauucagaa

SEQ ID NO: 3716034 - RNA, 20 nt, Human
ucaaagcaaggaaacuaugu

SEQ ID NO: 3716035 - RNA, 16 nt, Human
ucaaagcaaugcauuu

SEQ ID NO: 3716036 - RNA, 21 nt, Human
ucaaagcaccaaaauaagaaa

SEQ ID NO: 3716037 - RNA, 20 nt, Human
ucaaagcauggacauuuaga

SEQ ID NO: 3716038 - RNA, 22 nt, Human
ucaaagcauggacauuuagaag

SEQ ID NO: 3716039 - RNA, 21 nt, Human
ucaaagcaugggauuauuaga

SEQ ID NO: 3716040 - RNA, 18 nt, Human
ucaaagccaaguuuauau

SEQ ID NO: 3716041 - RNA, 15 nt, Human
ucaaagccacauuau

SEQ ID NO: 3716042 - RNA, 17 nt, Human
ucaaagccacauuauuu

SEQ ID NO: 3716043 - RNA, 20 nt, Human
ucaaagccacauuauuucua

SEQ ID NO: 3716044 - RNA, 21 nt, Human
ucaaagccacauuauuucuag

SEQ ID NO: 3716045 - RNA, 17 nt, Human
ucaaagccccauuaacu

SEQ ID NO: 3716046 - RNA, 18 nt, Human
ucaaagccccauuaacug

SEQ ID NO: 3716047 - RNA, 20 nt, Human
ucaaagccccauuaacugcu

SEQ ID NO: 3716048 - RNA, 17 nt, Human
ucaaagcugaagccgcc

SEQ ID NO: 3716049 - RNA, 18 nt, Human
ucaaagcugccugucccu

SEQ ID NO: 3716050 - RNA, 21 nt, Human
ucaaagcuuggauuaaauaca

SEQ ID NO: 3716051 - RNA, 16 nt, Human
ucaaagcuuuuuccag

SEQ ID NO: 3716052 - RNA, 12 nt, Human
ucaaaggccaga

SEQ ID NO: 3716053 - RNA, 21 nt, Human
ucaaagguucuagguuucaaa

SEQ ID NO: 3716054 - RNA, 19 nt, Human
ucaaaguaaaacuugcugc

SEQ ID NO: 3716055 - RNA, 13 nt, Human
ucaaagucaaaaa

SEQ ID NO: 3716056 - RNA, 16 nt, Human
ucaaagucaugauguu

SEQ ID NO: 3716057 - RNA, 14 nt, Human
ucaaagugcuauua

SEQ ID NO: 3716058 - RNA, 19 nt, Human
ucaaaguguuuucucugaa

SEQ ID NO: 3716059 - RNA, 14 nt, Human
ucaaaguugaaaau

SEQ ID NO: 3716060 - RNA, 18 nt, Human
ucaaaguugaaaauucau

SEQ ID NO: 3716061 - RNA, 21 nt, Human
ucaaaguugccuaaauccauu

SEQ ID NO: 3716062 - RNA, 22 nt, Human
ucaaaguuuccuaaucagaaau

SEQ ID NO: 3716063 - RNA, 14 nt, Human
ucaaaguuuugaaa

SEQ ID NO: 3716064 - RNA, 17 nt, Human
ucaaaguuuugaaaagc

SEQ ID NO: 3716065 - RNA, 15 nt, Human
ucaaauaaaaauucu

SEQ ID NO: 3716066 - RNA, 15 nt, Human
gcuacucagaagccu

SEQ ID NO: 3716067 - RNA, 16 nt, Human
gcuacucagaagccug

SEQ ID NO: 3716068 - RNA, 11 nt, Human
gcuacucagca

SEQ ID NO: 3716069 - RNA, 12 nt, Human
gcuacucagcag

SEQ ID NO: 3716070 - RNA, 18 nt, Human
gcuacucagcagcccucc

SEQ ID NO: 3716071 - RNA, 23 nt, Human
gcuacucaggaggcugaggcaga

SEQ ID NO: 3716072 - RNA, 17 nt, Human
gcuacucgggaggcuga

SEQ ID NO: 3716073 - RNA, 23 nt, Human
gcuacucuccccacgagggcugg

SEQ ID NO: 3716074 - RNA, 15 nt, Human
gcuacucugugccag

SEQ ID NO: 3716075 - RNA, 20 nt, Human
gcuacucugugccagagccu

SEQ ID NO: 3716076 - RNA, 21 nt, Human
gcuacucugugccagagccug

SEQ ID NO: 3716077 - RNA, 16 nt, Human
gcuacugauuuuugug

SEQ ID NO: 3716078 - RNA, 20 nt, Human
gcuacugcacuccagccugg

SEQ ID NO: 3716079 - RNA, 18 nt, Human
gcuacugccgucagugcu

SEQ ID NO: 3716080 - RNA, 15 nt, Human
gcuacuggauucuua

SEQ ID NO: 3716081 - RNA, 18 nt, Human
gcuacuggggaaacuggc

SEQ ID NO: 3716082 - RNA, 20 nt, Human
gcuacuggggaaacuggcca

SEQ ID NO: 3716083 - RNA, 22 nt, Human
gcuacuguaauuuuauaugaag

SEQ ID NO: 3716084 - RNA, 19 nt, Human
gcuacugugugugugaaug

SEQ ID NO: 3716085 - RNA, 17 nt, Human
gcuacuuaauuccuuuc

SEQ ID NO: 3716086 - RNA, 21 nt, Human
gcuacuuaauuccuuucucau

SEQ ID NO: 3716087 - RNA, 23 nt, Human
gcuacuuaauuccuuucucaucc

SEQ ID NO: 3716088 - RNA, 20 nt, Human
gcuacuucccucacccacuu

SEQ ID NO: 3716089 - RNA, 18 nt, Human
gcuacuuccuccucccca

SEQ ID NO: 3716090 - RNA, 19 nt, Human
gcuacuuccuccuccccac

SEQ ID NO: 3716091 - RNA, 17 nt, Human
gcuacuuccugccuggu

SEQ ID NO: 3716092 - RNA, 11 nt, Human
gcuagaaaugg

SEQ ID NO: 3716093 - RNA, 18 nt, Human
gcuagaaccaagaagggc

SEQ ID NO: 3716094 - RNA, 20 nt, Human
gcuagaaccaagaagggcua

SEQ ID NO: 3716095 - RNA, 20 nt, Human
gcuagaaccuagaagggcua

SEQ ID NO: 3716096 - RNA, 20 nt, Human
gcuagaaccuguagagcuag

SEQ ID NO: 3716097 - RNA, 12 nt, Human
gcuagaacuccc

SEQ ID NO: 3716098 - RNA, 16 nt, Human
gcuagaacucccuuuc

SEQ ID NO: 3716099 - RNA, 19 nt, Human
gcuagaacucccuuucaac

SEQ ID NO: 3716100 - RNA, 10 nt, Human
gcuagaacuu

SEQ ID NO: 3716101 - RNA, 14 nt, Human
gcuagaacuuuuuu

SEQ ID NO: 3716102 - RNA, 19 nt, Human
gcuagaacuuuuuuaaaua

SEQ ID NO: 3716103 - RNA, 14 nt, Human
gcuagaagcuggag

SEQ ID NO: 3716104 - RNA, 15 nt, Human
gcuagaagcuggagg

SEQ ID NO: 3716105 - RNA, 15 nt, Human
gcuagaauacuuuuu

SEQ ID NO: 3716106 - RNA, 21 nt, Human
gcuagacgagcaggcuucuuc

SEQ ID NO: 3716107 - RNA, 13 nt, Human
gcuagacugguga

SEQ ID NO: 3716108 - RNA, 20 nt, Human
gcuagacuggugacugauuc

SEQ ID NO: 3716109 - RNA, 20 nt, Human
gcuagagauauggcagcgaa

SEQ ID NO: 3716110 - RNA, 13 nt, Human
gcuagagcuccuc

SEQ ID NO: 3716111 - RNA, 16 nt, Human
gcuagagcuccucccu

SEQ ID NO: 3716112 - RNA, 20 nt, Human
gcuagaggccagccccaccc

SEQ ID NO: 3716113 - RNA, 20 nt, Human
gcuagaggccauggaggcag

SEQ ID NO: 3716114 - RNA, 19 nt, Human
gcuagagguucaaagauau

SEQ ID NO: 3716115 - RNA, 21 nt, Human
gcuagagguucaaagauauuu

SEQ ID NO: 3716116 - RNA, 18 nt, Human
gcuagaguccucacuccc

SEQ ID NO: 3716117 - RNA, 19 nt, Human
gcuagaugggcauggggug

SEQ ID NO: 3716118 - RNA, 13 nt, Human
gcuagauguaugu

SEQ ID NO: 3716119 - RNA, 16 nt, Human
gcuagauguauguacu

SEQ ID NO: 3716120 - RNA, 18 nt, Human
gcuagauguauguacuuc

SEQ ID NO: 3716121 - RNA, 19 nt, Human
gcuagcaguaaaagaugaa

SEQ ID NO: 3716122 - RNA, 14 nt, Human
gcuagcaguggcag

SEQ ID NO: 3716123 - RNA, 15 nt, Human
gcuagcgcugccgca

SEQ ID NO: 3716124 - RNA, 14 nt, Human
gcuagcuagcucaa

SEQ ID NO: 3716125 - RNA, 17 nt, Human
gcuagcuagcucaacua

SEQ ID NO: 3716126 - RNA, 16 nt, Human
gcuagcuccccuccuc

SEQ ID NO: 3716127 - RNA, 16 nt, Human
gcuagcuuuuaggaaa

SEQ ID NO: 3716128 - RNA, 21 nt, Human
gcuagcuuuuaggaaaaucac

SEQ ID NO: 3716129 - RNA, 14 nt, Human
gcuaggaacaaauc

SEQ ID NO: 3716130 - RNA, 15 nt, Human
gcuaggaacacuccu

SEQ ID NO: 3716131 - RNA, 19 nt, Human
gcuaggaacacuccuucac

SEQ ID NO: 3716132 - RNA, 13 nt, Human
gcuaggaagaguc

SEQ ID NO: 3716133 - RNA, 16 nt, Human
gcuaggagcaaagccu

SEQ ID NO: 3716134 - RNA, 18 nt, Human
gcuaggagcaaagccugu

SEQ ID NO: 3716135 - RNA, 18 nt, Human
gcuaggauguugcucaga

SEQ ID NO: 3716136 - RNA, 19 nt, Human
gcuaggcagggugucugcc

SEQ ID NO: 3716137 - RNA, 16 nt, Human
gcuaggccagagccca

SEQ ID NO: 3716138 - RNA, 17 nt, Human
gcuaggccagagcccac

SEQ ID NO: 3716139 - RNA, 17 nt, Human
gcuaggccuggccagau

SEQ ID NO: 3716140 - RNA, 16 nt, Human
gcuaggcgagugccag

SEQ ID NO: 3716141 - RNA, 19 nt, Human
gcuaggcucgccuucccuc

SEQ ID NO: 3716142 - RNA, 21 nt, Human
gcuaggcucgccuucccuccu

SEQ ID NO: 3716143 - RNA, 22 nt, Human
gcuaggcucgccuucccuccug

SEQ ID NO: 3716144 - RNA, 23 nt, Human
gcuaggcucugucuggaagaugg

SEQ ID NO: 3716145 - RNA, 18 nt, Human
gcuagggaaacuucccgu

SEQ ID NO: 3716146 - RNA, 15 nt, Human
gcuaggguggcccuu

SEQ ID NO: 3716147 - RNA, 18 nt, Human
gcuaggguggggagagac

SEQ ID NO: 3716148 - RNA, 22 nt, Human
gcuaggugacauauacauacuu

SEQ ID NO: 3716149 - RNA, 19 nt, Human
gcuaggugcuaauuaauaa

SEQ ID NO: 3716150 - RNA, 19 nt, Human
gcuaggugggccagccccu

SEQ ID NO: 3716151 - RNA, 15 nt, Human
gcuaguauuugaauu

SEQ ID NO: 3716152 - RNA, 22 nt, Human
gcuaguauuugaauuaaaacuu

SEQ ID NO: 3716153 - RNA, 13 nt, Human
gcuagucaacagu

SEQ ID NO: 3716154 - RNA, 22 nt, Human
gcuagucaacaguacccugguu

SEQ ID NO: 3716155 - RNA, 23 nt, Human
gcuagucaagcuccuccucccug

SEQ ID NO: 3716156 - RNA, 14 nt, Human
gcuagucagagaga

SEQ ID NO: 3716157 - RNA, 15 nt, Human
gcuaguccuagugaa

SEQ ID NO: 3716158 - RNA, 16 nt, Human
gcuagucuuaagaacu

SEQ ID NO: 3716159 - RNA, 14 nt, Human
gcuagugacuugug

SEQ ID NO: 3716160 - RNA, 21 nt, Human
gcuaguugggcuuccucauag

SEQ ID NO: 3716161 - RNA, 15 nt, Human
gcuauaaauauauaa

SEQ ID NO: 3716162 - RNA, 18 nt, Human
gcuauaacaguagggaug

SEQ ID NO: 3716163 - RNA, 17 nt, Human
gcuauaccugugccucg

SEQ ID NO: 3716164 - RNA, 21 nt, Human
gcuauacugcauacuuuuuaa

SEQ ID NO: 3716165 - RNA, 16 nt, Human
gcuauagcuacaggaa

SEQ ID NO: 3716166 - RNA, 18 nt, Human
gcuauagcuacaggaagc

SEQ ID NO: 3716167 - RNA, 17 nt, Human
gcuauagcucaggaccu

SEQ ID NO: 3716168 - RNA, 19 nt, Human
gcuauaggcuggagaagcu

SEQ ID NO: 3716169 - RNA, 13 nt, Human
gcuauaggugcua

SEQ ID NO: 3716170 - RNA, 14 nt, Human
gcuauaguauuuga

SEQ ID NO: 3716171 - RNA, 17 nt, Human
gcuauauaagacaagaa

SEQ ID NO: 3716172 - RNA, 14 nt, Human
gcuauauauaaaac

SEQ ID NO: 3716173 - RNA, 14 nt, Human
gcuauauauauaaa

SEQ ID NO: 3716174 - RNA, 16 nt, Human
gcuauauauauaaaua

SEQ ID NO: 3716175 - RNA, 19 nt, Human
gcuauauauauaaauauuu

SEQ ID NO: 3716176 - RNA, 19 nt, Human
gcuauauccauguacugua

SEQ ID NO: 3716177 - RNA, 15 nt, Human
gcuauaucuauauau

SEQ ID NO: 3716178 - RNA, 19 nt, Human
gcuauauugcccaggcugg

SEQ ID NO: 3716179 - RNA, 23 nt, Human
gcuauauuuucaugacuuuucca

SEQ ID NO: 3716180 - RNA, 20 nt, Human
gcuaucaaaauaaauugaaa

SEQ ID NO: 3716181 - RNA, 23 nt, Human
gcuaucaaaauaaauugaaauau

SEQ ID NO: 3716182 - RNA, 23 nt, Human
gcuauccccaucucccugccugg

SEQ ID NO: 3716183 - RNA, 15 nt, Human
gcuauccuggcucuu

SEQ ID NO: 3716184 - RNA, 16 nt, Human
gcuaucguaaaauuaa

SEQ ID NO: 3716185 - RNA, 16 nt, Human
gcuaucucccccagcc

SEQ ID NO: 3716186 - RNA, 18 nt, Human
gcuaucucccccagcccc

SEQ ID NO: 3716187 - RNA, 23 nt, Human
gcuaucucucagugaacugugag

SEQ ID NO: 3716188 - RNA, 16 nt, Human
gcuaucucugugugca

SEQ ID NO: 3716189 - RNA, 12 nt, Human
gcuaucuuaauu

SEQ ID NO: 3716190 - RNA, 15 nt, Human
gcuaucuuaauuuug

SEQ ID NO: 3716191 - RNA, 11 nt, Human
gcuaugacuua

SEQ ID NO: 3716192 - RNA, 17 nt, Human
gcuaugagcuggggaug

SEQ ID NO: 3716193 - RNA, 17 nt, Human
gcuaugaucgcgccacu

SEQ ID NO: 3716194 - RNA, 13 nt, Human
gcuaugcuugaau

SEQ ID NO: 3716195 - RNA, 22 nt, Human
gcuauggauuuucuaaggaaga

SEQ ID NO: 3716196 - RNA, 17 nt, Human
gcuaugggagccccagg

SEQ ID NO: 3716197 - RNA, 21 nt, Human
gcuauggggauagaugugugg

SEQ ID NO: 3716198 - RNA, 16 nt, Human
gcuauggugagaugca

SEQ ID NO: 3716199 - RNA, 16 nt, Human
gcuauguauaaaauac

SEQ ID NO: 3716200 - RNA, 15 nt, Human
gcuaugucaguacua

SEQ ID NO: 3716201 - RNA, 12 nt, Human
gcuaugucauuu

SEQ ID NO: 3716202 - RNA, 11 nt, Human
gcuaugugacu

SEQ ID NO: 3716203 - RNA, 19 nt, Human
gcuauguuuugacauuuuu

SEQ ID NO: 3716204 - RNA, 12 nt, Human
gcuauuaaaaaa

SEQ ID NO: 3716205 - RNA, 16 nt, Human
gcuauuaaaaaagucu

SEQ ID NO: 3716206 - RNA, 13 nt, Human
ucauaaauucaaa

SEQ ID NO: 3716207 - RNA, 16 nt, Human
ucauaacagugccauu

SEQ ID NO: 3716208 - RNA, 20 nt, Human
ucauaacagugccauugucu

SEQ ID NO: 3716209 - RNA, 22 nt, Human
ucauaacagugccauugucuuu

SEQ ID NO: 3716210 - RNA, 23 nt, Human
ucauaacagugccauugucuuua

SEQ ID NO: 3716211 - RNA, 14 nt, Human
ucauaacggaucag

SEQ ID NO: 3716212 - RNA, 22 nt, Human
ucauaacggaucagaaauacag

SEQ ID NO: 3716213 - RNA, 23 nt, Human
ucauaacggaucagaaauacaga

SEQ ID NO: 3716214 - RNA, 13 nt, Human
ucauaacuagaac

SEQ ID NO: 3716215 - RNA, 15 nt, Human
ucauaacuagaacug

SEQ ID NO: 3716216 - RNA, 11 nt, Human
ucauaacuuau

SEQ ID NO: 3716217 - RNA, 15 nt, Human
ucauaacuuauugcu

SEQ ID NO: 3716218 - RNA, 18 nt, Human
ucauaacuuauugcugau

SEQ ID NO: 3716219 - RNA, 17 nt, Human
ucauaacuuccuguacu

SEQ ID NO: 3716220 - RNA, 17 nt, Human
ucauaacuuucauuaaa

SEQ ID NO: 3716221 - RNA, 19 nt, Human
ucauaagacuuugggauag

SEQ ID NO: 3716222 - RNA, 16 nt, Human
ucauaagauauuuuau

SEQ ID NO: 3716223 - RNA, 18 nt, Human
ucauaagauauuuuucau

SEQ ID NO: 3716224 - RNA, 21 nt, Human
ucauaagauauuuuucaugau

SEQ ID NO: 3716225 - RNA, 15 nt, Human
ucauaagccaauuuu

SEQ ID NO: 3716226 - RNA, 14 nt, Human
ucauaaggcuucaa

SEQ ID NO: 3716227 - RNA, 20 nt, Human
ucauaaggcuucaaaauguu

SEQ ID NO: 3716228 - RNA, 15 nt, Human
ucauaaguauuucaa

SEQ ID NO: 3716229 - RNA, 20 nt, Human
ucauaaguauuucaaauugg

SEQ ID NO: 3716230 - RNA, 19 nt, Human
ucauaauaaauaucuguac

SEQ ID NO: 3716231 - RNA, 15 nt, Human
ucauaaucuuugcuu

SEQ ID NO: 3716232 - RNA, 13 nt, Human
ucauaaugacuua

SEQ ID NO: 3716233 - RNA, 19 nt, Human
ucauaauggggguaaaguu

SEQ ID NO: 3716234 - RNA, 13 nt, Human
ucauaaugugaag

SEQ ID NO: 3716235 - RNA, 15 nt, Human
ucauaaugugaagug

SEQ ID NO: 3716236 - RNA, 19 nt, Human
ucauaauugcauugacuuu

SEQ ID NO: 3716237 - RNA, 19 nt, Human
ucauaauuuguuuccagca

SEQ ID NO: 3716238 - RNA, 13 nt, Human
ucauacacagaaa

SEQ ID NO: 3716239 - RNA, 11 nt, Human
ucauacagaga

SEQ ID NO: 3716240 - RNA, 12 nt, Human
ucauacagagaa

SEQ ID NO: 3716241 - RNA, 13 nt, Human
ucauacagagaag

SEQ ID NO: 3716242 - RNA, 17 nt, Human
ucauacagagaagucac

SEQ ID NO: 3716243 - RNA, 16 nt, Human
ucauacauuguacgaa

SEQ ID NO: 3716244 - RNA, 21 nt, Human
ucauacauuuucuaagaaaca

SEQ ID NO: 3716245 - RNA, 15 nt, Human
ucauacccaccccca

SEQ ID NO: 3716246 - RNA, 18 nt, Human
ucauaccuaaguacugua

SEQ ID NO: 3716247 - RNA, 16 nt, Human
ucauaccuacauguau

SEQ ID NO: 3716248 - RNA, 21 nt, Human
ucauacuacugaaacagauuu

SEQ ID NO: 3716249 - RNA, 16 nt, Human
ucauacuccuaugcuu

SEQ ID NO: 3716250 - RNA, 16 nt, Human
ucauacucgagucuga

SEQ ID NO: 3716251 - RNA, 14 nt, Human
ucauacucuagauu

SEQ ID NO: 3716252 - RNA, 14 nt, Human
ucauacugaugugu

SEQ ID NO: 3716253 - RNA, 17 nt, Human
ucauacugugcuggagc

SEQ ID NO: 3716254 - RNA, 15 nt, Human
ucauacuugaacguu

SEQ ID NO: 3716255 - RNA, 19 nt, Human
ucauacuugaacguuuucu

SEQ ID NO: 3716256 - RNA, 22 nt, Human
ucauagaaauaguuugagaaau

SEQ ID NO: 3716257 - RNA, 22 nt, Human
ucauagaaauguaacuuuugua

SEQ ID NO: 3716258 - RNA, 23 nt, Human
ucauagaaauguaacuuuuguaa

SEQ ID NO: 3716259 - RNA, 12 nt, Human
ucauagaagaac

SEQ ID NO: 3716260 - RNA, 12 nt, Human
ucauagaauagc

SEQ ID NO: 3716261 - RNA, 18 nt, Human
ucauagaauagcauguug

SEQ ID NO: 3716262 - RNA, 16 nt, Human
ucauagacccucucaa

SEQ ID NO: 3716263 - RNA, 19 nt, Human
ucauagauuucugauuuua

SEQ ID NO: 3716264 - RNA, 23 nt, Human
ucauagauuucugauuuuaugua

SEQ ID NO: 3716265 - RNA, 19 nt, Human
ucauagcauuaacuaaucu

SEQ ID NO: 3716266 - RNA, 13 nt, Human
ucauagcauucac

SEQ ID NO: 3716267 - RNA, 20 nt, Human
ucauagcauugucuauuuuu

SEQ ID NO: 3716268 - RNA, 22 nt, Human
ucauagcccaguagaccuuguu

SEQ ID NO: 3716269 - RNA, 12 nt, Human
ucauagcuaaga

SEQ ID NO: 3716270 - RNA, 20 nt, Human
ucauaggaagggaccaaggc

SEQ ID NO: 3716271 - RNA, 21 nt, Human
ucauaggaagggaccaaggca

SEQ ID NO: 3716272 - RNA, 19 nt, Human
ucauagggaagaccugcug

SEQ ID NO: 3716273 - RNA, 15 nt, Human
ucauaggucugaaau

SEQ ID NO: 3716274 - RNA, 14 nt, Human
ucauagguuaaaaa

SEQ ID NO: 3716275 - RNA, 15 nt, Human
ucauagguuaaaaaa

SEQ ID NO: 3716276 - RNA, 23 nt, Human
ucauagguuaaaaaaaaaaguca

SEQ ID NO: 3716277 - RNA, 16 nt, Human
ucauagguugccaaua

SEQ ID NO: 3716278 - RNA, 18 nt, Human
ucauaguaacuucuuaug

SEQ ID NO: 3716279 - RNA, 22 nt, Human
ucauaguaguuuuuacagcugu

SEQ ID NO: 3716280 - RNA, 20 nt, Human
ucauaguauccauauuuuau

SEQ ID NO: 3716281 - RNA, 15 nt, Human
ucauaguaugguggc

SEQ ID NO: 3716282 - RNA, 15 nt, Human
ucauaguuaaauguu

SEQ ID NO: 3716283 - RNA, 15 nt, Human
ucauaguuacugugu

SEQ ID NO: 3716284 - RNA, 20 nt, Human
ucauaguuacuguguaaacu

SEQ ID NO: 3716285 - RNA, 21 nt, Human
ucauaguuacuguguaaacuc

SEQ ID NO: 3716286 - RNA, 21 nt, Human
ucauaguuauuguuucugguc

SEQ ID NO: 3716287 - RNA, 13 nt, Human
ucauaguucagaa

SEQ ID NO: 3716288 - RNA, 14 nt, Human
ucauaguucagaau

SEQ ID NO: 3716289 - RNA, 13 nt, Human
ucauaguuuaauu

SEQ ID NO: 3716290 - RNA, 15 nt, Human
ucauauaauaaaugu

SEQ ID NO: 3716291 - RNA, 16 nt, Human
ucauauaauuauaugu

SEQ ID NO: 3716292 - RNA, 15 nt, Human
ucauauacugccaug

SEQ ID NO: 3716293 - RNA, 20 nt, Human
ucauauaguuagcuaauaaa

SEQ ID NO: 3716294 - RNA, 14 nt, Human
ucauauauauacau

SEQ ID NO: 3716295 - RNA, 14 nt, Human
ucauauauaucuau

SEQ ID NO: 3716296 - RNA, 22 nt, Human
ucauauauggggggccaacacc

SEQ ID NO: 3716297 - RNA, 20 nt, Human
ucauauauuaaacauccaca

SEQ ID NO: 3716298 - RNA, 16 nt, Human
ucauaucauccacaca

SEQ ID NO: 3716299 - RNA, 13 nt, Human
ucauaucauuucu

SEQ ID NO: 3716300 - RNA, 15 nt, Human
ucauaucuucacaau

SEQ ID NO: 3716301 - RNA, 12 nt, Human
ucauaugaaaaa

SEQ ID NO: 3716302 - RNA, 20 nt, Human
ucauaugaaaggugccaugg

SEQ ID NO: 3716303 - RNA, 20 nt, Human
ucauaugacauucaugccug

SEQ ID NO: 3716304 - RNA, 15 nt, Human
ucauaugauucugcu

SEQ ID NO: 3716305 - RNA, 19 nt, Human
ucauaugauucugcuuuua

SEQ ID NO: 3716306 - RNA, 13 nt, Human
ucauaugcauauu

SEQ ID NO: 3716307 - RNA, 16 nt, Human
ucauauguaaucucua

SEQ ID NO: 3716308 - RNA, 22 nt, Human
ucauauguaaucucuaggaagu

SEQ ID NO: 3716309 - RNA, 22 nt, Human
ucauauguaccauguacaugaa

SEQ ID NO: 3716310 - RNA, 15 nt, Human
ucauaugugaucugu

SEQ ID NO: 3716311 - RNA, 19 nt, Human
ucauauguugcucagucuc

SEQ ID NO: 3716312 - RNA, 20 nt, Human
ucauauguugcucagucucc

SEQ ID NO: 3716313 - RNA, 14 nt, Human
ucauauuaagaaug

SEQ ID NO: 3716314 - RNA, 19 nt, Human
ucauauuaauauauuucca

SEQ ID NO: 3716315 - RNA, 13 nt, Human
ucauauuacaaua

SEQ ID NO: 3716316 - RNA, 15 nt, Human
ucauauuacaauauu

SEQ ID NO: 3716317 - RNA, 13 nt, Human
ucauauuagacuu

SEQ ID NO: 3716318 - RNA, 12 nt, Human
ucauauuauaca

SEQ ID NO: 3716319 - RNA, 15 nt, Human
ucauauucagcuugc

SEQ ID NO: 3716320 - RNA, 14 nt, Human
ucauauucaugcaa

SEQ ID NO: 3716321 - RNA, 18 nt, Human
ucauauucuaaaaccauu

SEQ ID NO: 3716322 - RNA, 14 nt, Human
ucauauugaauaua

SEQ ID NO: 3716323 - RNA, 19 nt, Human
ucauauugaauguuuccaa

SEQ ID NO: 3716324 - RNA, 18 nt, Human
ucauauugaugaaaagau

SEQ ID NO: 3716325 - RNA, 19 nt, Human
ucauauugaugaaaagauu

SEQ ID NO: 3716326 - RNA, 21 nt, Human
ucauauugaugaaaagauuua

SEQ ID NO: 3716327 - RNA, 21 nt, Human
ucauauugugauucugccuuu

SEQ ID NO: 3716328 - RNA, 20 nt, Human
ucauauugugccaauaugua

SEQ ID NO: 3716329 - RNA, 22 nt, Human
ucauauugugccaauauguauu

SEQ ID NO: 3716330 - RNA, 14 nt, Human
ucauauuguuuccu

SEQ ID NO: 3716331 - RNA, 16 nt, Human
ucauauuuacuucuua

SEQ ID NO: 3716332 - RNA, 21 nt, Human
ucauauuuacuucuuauacau

SEQ ID NO: 3716333 - RNA, 19 nt, Human
ucauauuucccaugauuuc

SEQ ID NO: 3716334 - RNA, 22 nt, Human
ucauauuucuuaucaccacagu

SEQ ID NO: 3716335 - RNA, 14 nt, Human
ucauauuuguacuu

SEQ ID NO: 3716336 - RNA, 16 nt, Human
ucauauuuuaauuuca

SEQ ID NO: 3716337 - RNA, 21 nt, Human
ucauauuuuaauuucaagcuu

SEQ ID NO: 3716338 - RNA, 15 nt, Human
ucauauuuuguauau

SEQ ID NO: 3716339 - RNA, 17 nt, Human
ucaucaaagaacaaaca

SEQ ID NO: 3716340 - RNA, 19 nt, Human
ucaucaaauggaagacaca

SEQ ID NO: 3716341 - RNA, 13 nt, Human
ucaucaacaagau

SEQ ID NO: 3716342 - RNA, 22 nt, Human
ucaucaacugaaugaggucagc

SEQ ID NO: 3716343 - RNA, 13 nt, Human
ucaucaagaaggg

SEQ ID NO: 3716344 - RNA, 21 nt, Human
ucaucaagaagggcugcauga

SEQ ID NO: 3716345 - RNA, 17 nt, Human
ucaucaaggcacugccu

SEQ ID NO: 3716346 - RNA, 23 nt, Human
ucaucaaucaaauaaguauuuau

SEQ ID NO: 3716347 - RNA, 24 nt, Human
ucaucaauugaauggucagcguug

SEQ ID NO: 3716348 - RNA, 23 nt, Human
ucaucacaagaacacacacauau

SEQ ID NO: 3716349 - RNA, 16 nt, Human
ucaucacacacaugga

SEQ ID NO: 3716350 - RNA, 14 nt, Human
ucaucacacugggu

SEQ ID NO: 3716351 - RNA, 14 nt, Human
ucaucacuccccuc

SEQ ID NO: 3716352 - RNA, 16 nt, Human
ucaucacuccccucca

SEQ ID NO: 3716353 - RNA, 18 nt, Human
ucaucagaacagcuguug

SEQ ID NO: 3716354 - RNA, 22 nt, Human
ucaucagaugcuugcggcaaaa

SEQ ID NO: 3716355 - RNA, 15 nt, Human
ucaucagauggaaau

SEQ ID NO: 3716356 - RNA, 22 nt, Human
ucaauugcaucucccagauaau

SEQ ID NO: 3716357 - RNA, 13 nt, Human
ucaauuuaaaaaa

SEQ ID NO: 3716358 - RNA, 19 nt, Human
ucaauuuauaccucaauuu

SEQ ID NO: 3716359 - RNA, 14 nt, Human
ucaauuuauuugaa

SEQ ID NO: 3716360 - RNA, 16 nt, Human
ucaauuuauuugaaug

SEQ ID NO: 3716361 - RNA, 13 nt, Human
ucaauuucaggcu

SEQ ID NO: 3716362 - RNA, 15 nt, Human
ucaauuucugaacac

SEQ ID NO: 3716363 - RNA, 16 nt, Human
ucaauuugauguggug

SEQ ID NO: 3716364 - RNA, 13 nt, Human
ucaauuugucauu

SEQ ID NO: 3716365 - RNA, 14 nt, Human
ucaauuugucauuu

SEQ ID NO: 3716366 - RNA, 15 nt, Human
ucaauuugucauuuu

SEQ ID NO: 3716367 - RNA, 17 nt, Human
ucaauuugucauuuuga

SEQ ID NO: 3716368 - RNA, 15 nt, Human
ucaauuuuaaacaua

SEQ ID NO: 3716369 - RNA, 13 nt, Human
ucaauuuuaaaga

SEQ ID NO: 3716370 - RNA, 22 nt, Human
ucaauuuuaucccucaccugua

SEQ ID NO: 3716371 - RNA, 16 nt, Human
ucaauuuucacugugu

SEQ ID NO: 3716372 - RNA, 14 nt, Human
ucaauuuucuuuaa

SEQ ID NO: 3716373 - RNA, 13 nt, Human
ucaauuuugacuu

SEQ ID NO: 3716374 - RNA, 20 nt, Human
ucaauuuuucuuauuucauu

SEQ ID NO: 3716375 - RNA, 14 nt, Human
ucacaaaaaagaag

SEQ ID NO: 3716376 - RNA, 20 nt, Human
ucacaaaauauauuuuguuu

SEQ ID NO: 3716377 - RNA, 19 nt, Human
ucacaaacuucauuucaga

SEQ ID NO: 3716378 - RNA, 15 nt, Human
ucacaaagcccaagg

SEQ ID NO: 3716379 - RNA, 21 nt, Human
ucacaaaggaauggaggcucu

SEQ ID NO: 3716380 - RNA, 12 nt, Human
ucacaaauaaua

SEQ ID NO: 3716381 - RNA, 13 nt, Human
ucacaaauaauag

SEQ ID NO: 3716382 - RNA, 17 nt, Human
ucacaaauauuaaaaag

SEQ ID NO: 3716383 - RNA, 18 nt, Human
ucacaaauauuaaaaagu

SEQ ID NO: 3716384 - RNA, 23 nt, Human
ucacaaauauuaaaaagucuuuu

SEQ ID NO: 3716385 - RNA, 13 nt, Human
ucacaaaugacuu

SEQ ID NO: 3716386 - RNA, 18 nt, Human
ucacaaaugacuuuauua

SEQ ID NO: 3716387 - RNA, 20 nt, Human
ucacaaaugacuuuauuauu

SEQ ID NO: 3716388 - RNA, 12 nt, Human
ucacaacagauc

SEQ ID NO: 3716389 - RNA, 16 nt, Human
ucacaaccugaaccua

SEQ ID NO: 3716390 - RNA, 17 nt, Human
ucacaacgugcauugug

SEQ ID NO: 3716391 - RNA, 17 nt, Human
ucacaagacccaaaagg

SEQ ID NO: 3716392 - RNA, 23 nt, Human
ucacaagauggaauuuaucaaac

SEQ ID NO: 3716393 - RNA, 14 nt, Human
ucacaagcugccuc

SEQ ID NO: 3716394 - RNA, 16 nt, Human
ucacaagcugccuccc

SEQ ID NO: 3716395 - RNA, 22 nt, Human
ucacaagcugccucccugucca

SEQ ID NO: 3716396 - RNA, 16 nt, Human
ucacaaggcagcaagg

SEQ ID NO: 3716397 - RNA, 22 nt, Human
ucacaaggcagcaaggcccgag

SEQ ID NO: 3716398 - RNA, 20 nt, Human
ucacaagggacgcuuuggga

SEQ ID NO: 3716399 - RNA, 20 nt, Human
ucacaaguggguacccccag

SEQ ID NO: 3716400 - RNA, 22 nt, Human
ucacaaguggguacccccagga

SEQ ID NO: 3716401 - RNA, 16 nt, Human
ucacaauaauuuucua

SEQ ID NO: 3716402 - RNA, 13 nt, Human
ucacaauacuguu

SEQ ID NO: 3716403 - RNA, 15 nt, Human
ucacaaugagauuga

SEQ ID NO: 3716404 - RNA, 19 nt, Human
ucacaaugucaguauuuca

SEQ ID NO: 3716405 - RNA, 13 nt, Human
ucacacaaagcag

SEQ ID NO: 3716406 - RNA, 19 nt, Human
ucacacaauacaauaaguu

SEQ ID NO: 3716407 - RNA, 24 nt, Human
ucacacacacaaaaaaugcacaaa

SEQ ID NO: 3716408 - RNA, 14 nt, Human
ucacacacagacug

SEQ ID NO: 3716409 - RNA, 20 nt, Human
ucacacacaggcaacugagg

SEQ ID NO: 3716410 - RNA, 21 nt, Human
ucacacacaggcaacugaggc

SEQ ID NO: 3716411 - RNA, 13 nt, Human
ucacacacgugag

SEQ ID NO: 3716412 - RNA, 14 nt, Human
ucacacagacacua

SEQ ID NO: 3716413 - RNA, 19 nt, Human
ucacacagccaggugccuu

SEQ ID NO: 3716414 - RNA, 23 nt, Human
ucacacaggcauuuccugggugg

SEQ ID NO: 3716415 - RNA, 23 nt, Human
ucacacagugggugguggaucug

SEQ ID NO: 3716416 - RNA, 14 nt, Human
ucacacauccagac

SEQ ID NO: 3716417 - RNA, 19 nt, Human
ucacacauccagacaucau

SEQ ID NO: 3716418 - RNA, 21 nt, Human
ucacacaugagcaucaggcca

SEQ ID NO: 3716419 - RNA, 14 nt, Human
ucacacauuugccu

SEQ ID NO: 3716420 - RNA, 11 nt, Human
ucacaccagcc

SEQ ID NO: 3716421 - RNA, 13 nt, Human
ucacaccagccau

SEQ ID NO: 3716422 - RNA, 24 nt, Human
ucacacccaccguccgcccugcuc

SEQ ID NO: 3716423 - RNA, 18 nt, Human
ucacaccccaccugcgcu

SEQ ID NO: 3716424 - RNA, 20 nt, Human
ucacaccccaccugcgcuuc

SEQ ID NO: 3716425 - RNA, 20 nt, Human
ucacaccuagcgucaguauu

SEQ ID NO: 3716426 - RNA, 20 nt, Human
ucacaccugacucugaaauc

SEQ ID NO: 3716427 - RNA, 19 nt, Human
ucacacgaggggccccgug

SEQ ID NO: 3716428 - RNA, 13 nt, Human
ucacacuauuuua

SEQ ID NO: 3716429 - RNA, 21 nt, Human
ucacacucaguugugacuaac

SEQ ID NO: 3716430 - RNA, 16 nt, Human
ucacacucgacaugaa

SEQ ID NO: 3716431 - RNA, 18 nt, Human
ucacacucuaacuguaua

SEQ ID NO: 3716432 - RNA, 16 nt, Human
ucacacucucacaugu

SEQ ID NO: 3716433 - RNA, 23 nt, Human
ucacacugggugguggccugguc

SEQ ID NO: 3716434 - RNA, 18 nt, Human
ucacacuggucugcuguc

SEQ ID NO: 3716435 - RNA, 15 nt, Human
ucacacugguucuca

SEQ ID NO: 3716436 - RNA, 20 nt, Human
ucacacuuacuguaagacau

SEQ ID NO: 3716437 - RNA, 21 nt, Human
ucacacuuacuguaagacauu

SEQ ID NO: 3716438 - RNA, 22 nt, Human
ucacacuuacuguaagacauua

SEQ ID NO: 3716439 - RNA, 19 nt, Human
ucacacuuccaccagccug

SEQ ID NO: 3716440 - RNA, 22 nt, Human
ucacacuucugugagaccccca

SEQ ID NO: 3716441 - RNA, 21 nt, Human
ucacagaacccuuggagccaa

SEQ ID NO: 3716442 - RNA, 21 nt, Human
ucacagacaggaccccugcag

SEQ ID NO: 3716443 - RNA, 17 nt, Human
ucacagaccuggagccc

SEQ ID NO: 3716444 - RNA, 15 nt, Human
ucacagagcagaguc

SEQ ID NO: 3716445 - RNA, 19 nt, Human
ucacagagucaaggccugc

SEQ ID NO: 3716446 - RNA, 15 nt, Human
ucacagaugggugcu

SEQ ID NO: 3716447 - RNA, 17 nt, Human
ucacagcacaugcuggc

SEQ ID NO: 3716448 - RNA, 19 nt, Human
ucacagcacaugcuggcca

SEQ ID NO: 3716449 - RNA, 20 nt, Human
ucacagcacaugcuggccag

SEQ ID NO: 3716450 - RNA, 21 nt, Human
ucacagcacaugcuggccagc

SEQ ID NO: 3716451 - RNA, 23 nt, Human
ucacagcagugagacuggggcca

SEQ ID NO: 3716452 - RNA, 12 nt, Human
ucacagccucug

SEQ ID NO: 3716453 - RNA, 20 nt, Human
ucacagccucugaccccucc

SEQ ID NO: 3716454 - RNA, 11 nt, Human
ucacagcuccu

SEQ ID NO: 3716455 - RNA, 16 nt, Human
ucacagcuccucccac

SEQ ID NO: 3716456 - RNA, 22 nt, Human
ucacagcuuauuuccucauuuu

SEQ ID NO: 3716457 - RNA, 16 nt, Human
ucacaggacucugccu

SEQ ID NO: 3716458 - RNA, 19 nt, Human
ucacaggacucugccuccu

SEQ ID NO: 3716459 - RNA, 12 nt, Human
ucacaggcagcc

SEQ ID NO: 3716460 - RNA, 15 nt, Human
ucacaggcaggucca

SEQ ID NO: 3716461 - RNA, 12 nt, Human
ucacaggcuaau

SEQ ID NO: 3716462 - RNA, 18 nt, Human
ucacagggcagagccggg

SEQ ID NO: 3716463 - RNA, 18 nt, Human
ucacagggcaguaccuga

SEQ ID NO: 3716464 - RNA, 14 nt, Human
ucacagggccaacu

SEQ ID NO: 3716465 - RNA, 22 nt, Human
ucacagggccaacuugagggcc

SEQ ID NO: 3716466 - RNA, 16 nt, Human
ucacagggccccagaa

SEQ ID NO: 3716467 - RNA, 17 nt, Human
ucacagggccccagaag

SEQ ID NO: 3716468 - RNA, 23 nt, Human
ucacagggccccagaaggcaggg

SEQ ID NO: 3716469 - RNA, 12 nt, Human
ucacaggguggg

SEQ ID NO: 3716470 - RNA, 15 nt, Human
ucacagggugggccu

SEQ ID NO: 3716471 - RNA, 16 nt, Human
ucacaggguugggccc

SEQ ID NO: 3716472 - RNA, 20 nt, Human
ucacagguuggaagagaauc

SEQ ID NO: 3716473 - RNA, 16 nt, Human
ucacaguaaaaauaaa

SEQ ID NO: 3716474 - RNA, 17 nt, Human
ucacaguacagcaugug

SEQ ID NO: 3716475 - RNA, 14 nt, Human
ucacaguagagcca

SEQ ID NO: 3716476 - RNA, 18 nt, Human
ucacaguagagccagcuu

SEQ ID NO: 3716477 - RNA, 20 nt, Human
ucacaguagagccagcuugg

SEQ ID NO: 3716478 - RNA, 19 nt, Human
ucacagucacaugcuugau

SEQ ID NO: 3716479 - RNA, 15 nt, Human
ucacagucccacugu

SEQ ID NO: 3716480 - RNA, 17 nt, Human
ucacagucccacugugc

SEQ ID NO: 3716481 - RNA, 22 nt, Human
ucacaguccuuaccagcagagc

SEQ ID NO: 3716482 - RNA, 16 nt, Human
ucacagucuaauuuuu

SEQ ID NO: 3716483 - RNA, 19 nt, Human
ucacagucucuuuaaucuu

SEQ ID NO: 3716484 - RNA, 21 nt, Human
ucacagucucuuuaaucuuca

SEQ ID NO: 3716485 - RNA, 23 nt, Human
ucacagucucuuuaaucuucagu

SEQ ID NO: 3716486 - RNA, 17 nt, Human
ucacagugcucuuuucu

SEQ ID NO: 3716487 - RNA, 14 nt, Human
ucacagugcugugu

SEQ ID NO: 3716488 - RNA, 16 nt, Human
ucacagugugauuuug

SEQ ID NO: 3716489 - RNA, 13 nt, Human
ucacaguguguuu

SEQ ID NO: 3716490 - RNA, 11 nt, Human
ucacaguguuu

SEQ ID NO: 3716491 - RNA, 18 nt, Human
ucacaguguuugcaaugg

SEQ ID NO: 3716492 - RNA, 22 nt, Human
ucacaguuacccuaaacucucu

SEQ ID NO: 3716493 - RNA, 23 nt, Human
ucacaguucaaaauucuaaaugu

SEQ ID NO: 3716494 - RNA, 20 nt, Human
ucacaguuccucgcccuggg

SEQ ID NO: 3716495 - RNA, 22 nt, Human
ucacaguuccucgcccuggguc

SEQ ID NO: 3716496 - RNA, 16 nt, Human
ucacaguucucuccuu

SEQ ID NO: 3716497 - RNA, 20 nt, Human
ucacaguucucuccuucuuc

SEQ ID NO: 3716498 - RNA, 19 nt, Human
ucacaguucuuugggccag

SEQ ID NO: 3716499 - RNA, 22 nt, Human
ucacaguucuuugggccagaca

SEQ ID NO: 3716500 - RNA, 13 nt, Human
ucacaguugacaa

SEQ ID NO: 3716501 - RNA, 19 nt, Human
ucacaguuuuuccuggaau

SEQ ID NO: 3716502 - RNA, 18 nt, Human
ucacauaaaugcagccca

SEQ ID NO: 3716503 - RNA, 15 nt, Human
ucacauacccucccc

SEQ ID NO: 3716504 - RNA, 17 nt, Human
ucacauagagugaucuu

SEQ ID NO: 3716505 - RNA, 14 nt, Human
ucaucaggaugaac

SEQ ID NO: 3716506 - RNA, 12 nt, Human
ucaucagggccu

SEQ ID NO: 3716507 - RNA, 14 nt, Human
ucaucagggccugg

SEQ ID NO: 3716508 - RNA, 23 nt, Human
ucaucaguauugaagcauuuuau

SEQ ID NO: 3716509 - RNA, 13 nt, Human
ucaucauaaaaua

SEQ ID NO: 3716510 - RNA, 14 nt, Human
ucaucauaaaauaa

SEQ ID NO: 3716511 - RNA, 14 nt, Human
ucaucauauuauac

SEQ ID NO: 3716512 - RNA, 14 nt, Human
ucaucaucagagcc

SEQ ID NO: 3716513 - RNA, 14 nt, Human
ucaucaucagggcc

SEQ ID NO: 3716514 - RNA, 15 nt, Human
ucaucaucagggccu

SEQ ID NO: 3716515 - RNA, 17 nt, Human
ucaucaucauggccagc

SEQ ID NO: 3716516 - RNA, 16 nt, Human
ucaucaugauaauuca

SEQ ID NO: 3716517 - RNA, 13 nt, Human
ucaucaugcagcu

SEQ ID NO: 3716518 - RNA, 17 nt, Human
ucaucauggccagcugg

SEQ ID NO: 3716519 - RNA, 22 nt, Human
ucaucauggccagcuggaggca

SEQ ID NO: 3716520 - RNA, 15 nt, Human
ucaucauguuuugau

SEQ ID NO: 3716521 - RNA, 13 nt, Human
ucaucauuauuau

SEQ ID NO: 3716522 - RNA, 22 nt, Human
ucaucauucacuucacugugcu

SEQ ID NO: 3716523 - RNA, 17 nt, Human
ucaucauuccuugagaa

SEQ ID NO: 3716524 - RNA, 18 nt, Human
ucaucauucucugucuca

SEQ ID NO: 3716525 - RNA, 19 nt, Human
ucaucauuguauauaugug

SEQ ID NO: 3716526 - RNA, 12 nt, Human
ucaucauuguuu

SEQ ID NO: 3716527 - RNA, 22 nt, Human
ucaucauuguuucugcaugaau

SEQ ID NO: 3716528 - RNA, 19 nt, Human
ucauccaaacaauuuaaaa

SEQ ID NO: 3716529 - RNA, 15 nt, Human
ucauccacauuguuu

SEQ ID NO: 3716530 - RNA, 20 nt, Human
ucauccacuagugcaaauca

SEQ ID NO: 3716531 - RNA, 21 nt, Human
ucauccacuagugcaaaucau

SEQ ID NO: 3716532 - RNA, 20 nt, Human
ucauccaggcccaacuguga

SEQ ID NO: 3716533 - RNA, 15 nt, Human
ucauccauaacugaa

SEQ ID NO: 3716534 - RNA, 11 nt, Human
ucauccaucau

SEQ ID NO: 3716535 - RNA, 12 nt, Human
ucauccaucauc

SEQ ID NO: 3716536 - RNA, 14 nt, Human
ucauccaucaucau

SEQ ID NO: 3716537 - RNA, 15 nt, Human
ucauccaucaucaug

SEQ ID NO: 3716538 - RNA, 16 nt, Human
ucauccaucaucaugu

SEQ ID NO: 3716539 - RNA, 13 nt, Human
ucauccauccagg

SEQ ID NO: 3716540 - RNA, 23 nt, Human
ucaucccaaaggacagccgccug

SEQ ID NO: 3716541 - RNA, 16 nt, Human
ucaucccaacugucuu

SEQ ID NO: 3716542 - RNA, 13 nt, Human
ucaucccagcugc

SEQ ID NO: 3716543 - RNA, 22 nt, Human
ucaucccaucuaagcugcagcu

SEQ ID NO: 3716544 - RNA, 23 nt, Human
ucaucccauuccaggcagccucu

SEQ ID NO: 3716545 - RNA, 14 nt, Human
ucaucccauugucu

SEQ ID NO: 3716546 - RNA, 21 nt, Human
ucauccccaggggucccagcc

SEQ ID NO: 3716547 - RNA, 14 nt, Human
ucauccccucagaa

SEQ ID NO: 3716548 - RNA, 23 nt, Human
ucaucccgagcaccuccacaucc

SEQ ID NO: 3716549 - RNA, 13 nt, Human
ucaucccuuucca

SEQ ID NO: 3716550 - RNA, 17 nt, Human
ucauccggcagccugga

SEQ ID NO: 3716551 - RNA, 15 nt, Human
ucauccuaagcuauu

SEQ ID NO: 3716552 - RNA, 14 nt, Human
ucauccucaaagaa

SEQ ID NO: 3716553 - RNA, 21 nt, Human
ucauccucaaagaaaguguau

SEQ ID NO: 3716554 - RNA, 13 nt, Human
ucauccuccucag

SEQ ID NO: 3716555 - RNA, 19 nt, Human
ucauccuccucagaucuuc

SEQ ID NO: 3716556 - RNA, 16 nt, Human
ucauccuccuggaacc

SEQ ID NO: 3716557 - RNA, 23 nt, Human
ucauccuccuggaaccuugcugu

SEQ ID NO: 3716558 - RNA, 17 nt, Human
ucauccugacucugccc

SEQ ID NO: 3716559 - RNA, 13 nt, Human
ucauccugcaggc

SEQ ID NO: 3716560 - RNA, 15 nt, Human
ucauccugccuucau

SEQ ID NO: 3716561 - RNA, 17 nt, Human
ucauccugccuucaugg

SEQ ID NO: 3716562 - RNA, 11 nt, Human
ucauccuggcu

SEQ ID NO: 3716563 - RNA, 17 nt, Human
ucauccuuggucuuugu

SEQ ID NO: 3716564 - RNA, 21 nt, Human
ucauccuuggucuuuguaucu

SEQ ID NO: 3716565 - RNA, 14 nt, Human
ucauccuugucuua

SEQ ID NO: 3716566 - RNA, 23 nt, Human
ucauccuuucacuucuuucccuu

SEQ ID NO: 3716567 - RNA, 16 nt, Human
ucauccuuuccagcau

SEQ ID NO: 3716568 - RNA, 17 nt, Human
ucauccuuuccagcaug

SEQ ID NO: 3716569 - RNA, 19 nt, Human
ucauccuuuucuccuaucu

SEQ ID NO: 3716570 - RNA, 14 nt, Human
ucaucgaaucuacu

SEQ ID NO: 3716571 - RNA, 17 nt, Human
ucaucgccagacaacug

SEQ ID NO: 3716572 - RNA, 23 nt, Human
ucaucgcucguguguucuaucca

SEQ ID NO: 3716573 - RNA, 22 nt, Human
ucaucggagucagccaggagcu

SEQ ID NO: 3716574 - RNA, 15 nt, Human
ucaucggcuuucccc

SEQ ID NO: 3716575 - RNA, 19 nt, Human
ucaucgggaauacuaggga

SEQ ID NO: 3716576 - RNA, 22 nt, Human
ucaucuaccauuuucugguucu

SEQ ID NO: 3716577 - RNA, 16 nt, Human
ucaucuaccuuuucuc

SEQ ID NO: 3716578 - RNA, 17 nt, Human
ucaucuaccuuuucucu

SEQ ID NO: 3716579 - RNA, 20 nt, Human
ucaucuacucauuuaaagua

SEQ ID NO: 3716580 - RNA, 13 nt, Human
ucaucuaggauuu

SEQ ID NO: 3716581 - RNA, 13 nt, Human
ucaucuauaaaga

SEQ ID NO: 3716582 - RNA, 23 nt, Human
ucaucuauaaagaagaacuugca

SEQ ID NO: 3716583 - RNA, 17 nt, Human
ucaucuaugaggaaagg

SEQ ID NO: 3716584 - RNA, 21 nt, Human
ucaucuauucaagcacuuaca

SEQ ID NO: 3716585 - RNA, 18 nt, Human
ucaucucagcucacugca

SEQ ID NO: 3716586 - RNA, 16 nt, Human
ucaucucagguagaag

SEQ ID NO: 3716587 - RNA, 22 nt, Human
ucaucucagugaagaauacuuc

SEQ ID NO: 3716588 - RNA, 22 nt, Human
ucaucucauuuaagggaaaaau

SEQ ID NO: 3716589 - RNA, 17 nt, Human
ucaucuccaucagcugu

SEQ ID NO: 3716590 - RNA, 15 nt, Human
ucaucuccugccuuc

SEQ ID NO: 3716591 - RNA, 22 nt, Human
ucaucucuagggaccagaacca

SEQ ID NO: 3716592 - RNA, 23 nt, Human
ucaucucuccuccaagacacugu

SEQ ID NO: 3716593 - RNA, 14 nt, Human
ucaucucuguccca

SEQ ID NO: 3716594 - RNA, 14 nt, Human
ucaucucuuagcuc

SEQ ID NO: 3716595 - RNA, 19 nt, Human
ucaucucuuagcuccccuc

SEQ ID NO: 3716596 - RNA, 14 nt, Human
ucaucucuucuuuu

SEQ ID NO: 3716597 - RNA, 14 nt, Human
ucaucugaaauguu

SEQ ID NO: 3716598 - RNA, 13 nt, Human
ucaucugaagggg

SEQ ID NO: 3716599 - RNA, 22 nt, Human
ucaucugaauuugcccugggaa

SEQ ID NO: 3716600 - RNA, 15 nt, Human
ucaucugagaaugaa

SEQ ID NO: 3716601 - RNA, 16 nt, Human
ucaucugagaaugaac

SEQ ID NO: 3716602 - RNA, 18 nt, Human
ucaucugaggcauccagc

SEQ ID NO: 3716603 - RNA, 12 nt, Human
ucaucugcaaaa

SEQ ID NO: 3716604 - RNA, 13 nt, Human
ucaucugcaaaag

SEQ ID NO: 3716605 - RNA, 21 nt, Human
ucaucugcacccuucuuuucu

SEQ ID NO: 3716606 - RNA, 22 nt, Human
ucaucugcacccuucuuuucuc

SEQ ID NO: 3716607 - RNA, 13 nt, Human
ucaucugccgugc

SEQ ID NO: 3716608 - RNA, 14 nt, Human
ucaucugcucuccu

SEQ ID NO: 3716609 - RNA, 16 nt, Human
ucaucugcucuccuuc

SEQ ID NO: 3716610 - RNA, 21 nt, Human
ucaucugcucuccuuccugga

SEQ ID NO: 3716611 - RNA, 12 nt, Human
ucaucuggaacc

SEQ ID NO: 3716612 - RNA, 13 nt, Human
ucaucuggaacca

SEQ ID NO: 3716613 - RNA, 20 nt, Human
ucaucuggaguucucaaaga

SEQ ID NO: 3716614 - RNA, 22 nt, Human
ucaucuggauaggagccugcug

SEQ ID NO: 3716615 - RNA, 12 nt, Human
ucaucugggaaa

SEQ ID NO: 3716616 - RNA, 18 nt, Human
ucaucugggaaagacauc

SEQ ID NO: 3716617 - RNA, 21 nt, Human
ucaucuggggagcaggcagcc

SEQ ID NO: 3716618 - RNA, 18 nt, Human
ucaucugggggaguggaa

SEQ ID NO: 3716619 - RNA, 20 nt, Human
ucaucugggggaguggaaua

SEQ ID NO: 3716620 - RNA, 20 nt, Human
ucaucugguugaacucuggu

SEQ ID NO: 3716621 - RNA, 11 nt, Human
ucaucuguaag

SEQ ID NO: 3716622 - RNA, 13 nt, Human
ucaucuguagaua

SEQ ID NO: 3716623 - RNA, 17 nt, Human
ucaucugugugaaaaug

SEQ ID NO: 3716624 - RNA, 19 nt, Human
ucaucugugugaaaauggg

SEQ ID NO: 3716625 - RNA, 15 nt, Human
ucaucuguuacacaa

SEQ ID NO: 3716626 - RNA, 16 nt, Human
ucaucuguuagggccu

SEQ ID NO: 3716627 - RNA, 19 nt, Human
ucaucuguuagggccuugg

SEQ ID NO: 3716628 - RNA, 12 nt, Human
ucaucuuacugu

SEQ ID NO: 3716629 - RNA, 20 nt, Human
ucaucuucaguugucucuga

SEQ ID NO: 3716630 - RNA, 19 nt, Human
ucaucuucucagcucccau

SEQ ID NO: 3716631 - RNA, 13 nt, Human
ucaucuucucugg

SEQ ID NO: 3716632 - RNA, 16 nt, Human
ucaucuucuucaccau

SEQ ID NO: 3716633 - RNA, 22 nt, Human
ucaucuugaccaagcaggaagc

SEQ ID NO: 3716634 - RNA, 22 nt, Human
ucaucuugcuaccaguauuuag

SEQ ID NO: 3716635 - RNA, 22 nt, Human
ucaucuugguacuacuagaugu

SEQ ID NO: 3716636 - RNA, 13 nt, Human
ucaucuugugaaa

SEQ ID NO: 3716637 - RNA, 15 nt, Human
ucaucuugugaaaug

SEQ ID NO: 3716638 - RNA, 15 nt, Human
ucaucuuguguuuua

SEQ ID NO: 3716639 - RNA, 15 nt, Human
ucaucuuucccuccu

SEQ ID NO: 3716640 - RNA, 19 nt, Human
ucaucuuucccuccuuggu

SEQ ID NO: 3716641 - RNA, 13 nt, Human
ucaucuuucuuga

SEQ ID NO: 3716642 - RNA, 14 nt, Human
ucaucuuugugaag

SEQ ID NO: 3716643 - RNA, 16 nt, Human
ucaugaaagauucaau

SEQ ID NO: 3716644 - RNA, 22 nt, Human
ucaugaaaguagacaguuuuga

SEQ ID NO: 3716645 - RNA, 21 nt, Human
ucaugaaaugcuaugucauuu

SEQ ID NO: 3716646 - RNA, 15 nt, Human
ucaugaaauuacccu

SEQ ID NO: 3716647 - RNA, 12 nt, Human
ucaugaacacau

SEQ ID NO: 3716648 - RNA, 23 nt, Human
ucaugaacauguuccugaauucu

SEQ ID NO: 3716649 - RNA, 22 nt, Human
ucaugaaccucaagcugcaucu

SEQ ID NO: 3716650 - RNA, 15 nt, Human
ucaugaacuucgcau

SEQ ID NO: 3716651 - RNA, 21 nt, Human
ucaugaacuucgcaucaaaag

SEQ ID NO: 3716652 - RNA, 19 nt, Human
ucaugaagauauuuuucca

SEQ ID NO: 3716653 - RNA, 12 nt, Human
ucaugaagccca

SEQ ID NO: 3716654 - RNA, 13 nt, Human
ucaugaagcccaa

SEQ ID NO: 3716655 - RNA, 21 nt, Human
ucaugaauaacugauuaguaa

SEQ ID NO: 3716656 - RNA, 18 nt, Human
gcuauuaaaacucuuuua

SEQ ID NO: 3716657 - RNA, 15 nt, Human
gcuauuaauauuugu

SEQ ID NO: 3716658 - RNA, 23 nt, Human
gcuauuacuaaggaguaaucugu

SEQ ID NO: 3716659 - RNA, 19 nt, Human
gcuauuccagcuguccccc

SEQ ID NO: 3716660 - RNA, 19 nt, Human
gcuauuccuuucccuuccu

SEQ ID NO: 3716661 - RNA, 22 nt, Human
gcuauugauauaaauaaaacau

SEQ ID NO: 3716662 - RNA, 16 nt, Human
gcuauuggaggaucag

SEQ ID NO: 3716663 - RNA, 16 nt, Human
gcuauuguaaauaugu

SEQ ID NO: 3716664 - RNA, 16 nt, Human
gcuauugucaccaggg

SEQ ID NO: 3716665 - RNA, 20 nt, Human
gcuauugucaccagggcugg

SEQ ID NO: 3716666 - RNA, 21 nt, Human
gcuauugucaccagggcugga

SEQ ID NO: 3716667 - RNA, 13 nt, Human
gcuauuuaaaacu

SEQ ID NO: 3716668 - RNA, 15 nt, Human
gcuauuuauuuuccu

SEQ ID NO: 3716669 - RNA, 14 nt, Human
gcuauuucaucuau

SEQ ID NO: 3716670 - RNA, 17 nt, Human
gcuauuuccauuccaga

SEQ ID NO: 3716671 - RNA, 16 nt, Human
gcuauuucccaagcug

SEQ ID NO: 3716672 - RNA, 11 nt, Human
gcuauuucuau

SEQ ID NO: 3716673 - RNA, 15 nt, Human
gcuauuucuauauuu

SEQ ID NO: 3716674 - RNA, 18 nt, Human
gcuauuucuauauuuuca

SEQ ID NO: 3716675 - RNA, 19 nt, Human
gcuauuugauguaauacuu

SEQ ID NO: 3716676 - RNA, 17 nt, Human
gcuauuugcaauuccug

SEQ ID NO: 3716677 - RNA, 17 nt, Human
gcuauuuguaaaucugc

SEQ ID NO: 3716678 - RNA, 14 nt, Human
gcuauuugucaucu

SEQ ID NO: 3716679 - RNA, 16 nt, Human
gcuauuuuacugucuu

SEQ ID NO: 3716680 - RNA, 18 nt, Human
gcuauuuuacugucuuaa

SEQ ID NO: 3716681 - RNA, 18 nt, Human
gcuauuuucuaaagacuu

SEQ ID NO: 3716682 - RNA, 22 nt, Human
gcuauuuucuaaagacuuguau

SEQ ID NO: 3716683 - RNA, 22 nt, Human
gcuauuuuuauuuguuugugca

SEQ ID NO: 3716684 - RNA, 16 nt, Human
gcuauuuuuguaaagu

SEQ ID NO: 3716685 - RNA, 20 nt, Human
gcuauuuuuguaaaguuucc

SEQ ID NO: 3716686 - RNA, 23 nt, Human
gcucaaacaaugacaaagcagau

SEQ ID NO: 3716687 - RNA, 21 nt, Human
gcucaaaggcacagugaaggc

SEQ ID NO: 3716688 - RNA, 15 nt, Human
gcucaaaugaaaugu

SEQ ID NO: 3716689 - RNA, 19 nt, Human
gcucaagcaggaaguucaa

SEQ ID NO: 3716690 - RNA, 22 nt, Human
gcucaagcagucuacccaccuc

SEQ ID NO: 3716691 - RNA, 16 nt, Human
gcucaagcccaggagg

SEQ ID NO: 3716692 - RNA, 13 nt, Human
gcucaaggaaagg

SEQ ID NO: 3716693 - RNA, 15 nt, Human
gcucaagggacaagg

SEQ ID NO: 3716694 - RNA, 14 nt, Human
gcucaauaaagauu

SEQ ID NO: 3716695 - RNA, 23 nt, Human
gcucaauagauugcucaaaucag

SEQ ID NO: 3716696 - RNA, 19 nt, Human
gcucaauauuccugaauga

SEQ ID NO: 3716697 - RNA, 21 nt, Human
gcucaauauuccugaaugaaa

SEQ ID NO: 3716698 - RNA, 14 nt, Human
gcucaauccucuaa

SEQ ID NO: 3716699 - RNA, 16 nt, Human
gcucaauccucuaagc

SEQ ID NO: 3716700 - RNA, 14 nt, Human
gcucacaaaccaug

SEQ ID NO: 3716701 - RNA, 13 nt, Human
gcucacaaggcag

SEQ ID NO: 3716702 - RNA, 15 nt, Human
gcucacacaugagau

SEQ ID NO: 3716703 - RNA, 13 nt, Human
gcucacaccugua

SEQ ID NO: 3716704 - RNA, 21 nt, Human
gcucacacgggguauuuuagg

SEQ ID NO: 3716705 - RNA, 13 nt, Human
gcucacacugaga

SEQ ID NO: 3716706 - RNA, 15 nt, Human
gcucacaguacagca

SEQ ID NO: 3716707 - RNA, 16 nt, Human
gcucacaguuccucgc

SEQ ID NO: 3716708 - RNA, 16 nt, Human
gcucacauaucuguca

SEQ ID NO: 3716709 - RNA, 12 nt, Human
gcucaccagccc

SEQ ID NO: 3716710 - RNA, 18 nt, Human
gcucaccagccccagugc

SEQ ID NO: 3716711 - RNA, 20 nt, Human
gcucaccagccccagugccc

SEQ ID NO: 3716712 - RNA, 18 nt, Human
gcucacccagccccaggg

SEQ ID NO: 3716713 - RNA, 17 nt, Human
gcucaccccaucauccc

SEQ ID NO: 3716714 - RNA, 16 nt, Human
gcucaccccccacacu

SEQ ID NO: 3716715 - RNA, 18 nt, Human
gcucacccccuucuccau

SEQ ID NO: 3716716 - RNA, 20 nt, Human
gcucacccccuucuccaucc

SEQ ID NO: 3716717 - RNA, 15 nt, Human
gcucaccgcccauca

SEQ ID NO: 3716718 - RNA, 17 nt, Human
gcucaccgcccaucagg

SEQ ID NO: 3716719 - RNA, 15 nt, Human
gcucaccuagagcca

SEQ ID NO: 3716720 - RNA, 20 nt, Human
gcucaccuagagccagacca

SEQ ID NO: 3716721 - RNA, 14 nt, Human
gcucaccucucccu

SEQ ID NO: 3716722 - RNA, 16 nt, Human
gcucaccucucccuug

SEQ ID NO: 3716723 - RNA, 18 nt, Human
gcucaccucucccuugga

SEQ ID NO: 3716724 - RNA, 12 nt, Human
gcucaccugggg

SEQ ID NO: 3716725 - RNA, 23 nt, Human
gcucaccuguugcuuacaauuuu

SEQ ID NO: 3716726 - RNA, 13 nt, Human
gcucaccuuuguu

SEQ ID NO: 3716727 - RNA, 22 nt, Human
gcucacgccuguaaucccagca

SEQ ID NO: 3716728 - RNA, 14 nt, Human
gcucacgucacacu

SEQ ID NO: 3716729 - RNA, 15 nt, Human
gcucacgucacacuu

SEQ ID NO: 3716730 - RNA, 22 nt, Human
gcucacgugagagugucuucac

SEQ ID NO: 3716731 - RNA, 16 nt, Human
gcucacuaccuccuca

SEQ ID NO: 3716732 - RNA, 14 nt, Human
gcucacuaugaauc

SEQ ID NO: 3716733 - RNA, 17 nt, Human
gcucacucacagaguca

SEQ ID NO: 3716734 - RNA, 14 nt, Human
gcucacucagcacu

SEQ ID NO: 3716735 - RNA, 15 nt, Human
gcucacucagccacc

SEQ ID NO: 3716736 - RNA, 14 nt, Human
gcucacugcagccu

SEQ ID NO: 3716737 - RNA, 17 nt, Human
gcucacugcagccucaa

SEQ ID NO: 3716738 - RNA, 17 nt, Human
gcucacugcagccucga

SEQ ID NO: 3716739 - RNA, 20 nt, Human
gcucacugcauccuccgccu

SEQ ID NO: 3716740 - RNA, 13 nt, Human
gcucacugccagg

SEQ ID NO: 3716741 - RNA, 21 nt, Human
gcucacugccaggccagccuc

SEQ ID NO: 3716742 - RNA, 18 nt, Human
gcucacuguggugucugu

SEQ ID NO: 3716743 - RNA, 15 nt, Human
gcucacuucugggcu

SEQ ID NO: 3716744 - RNA, 14 nt, Human
gcucagaacacauu

SEQ ID NO: 3716745 - RNA, 23 nt, Human
gcucagaacccagggcucugccc

SEQ ID NO: 3716746 - RNA, 19 nt, Human
gcucagaacuugcugcugu

SEQ ID NO: 3716747 - RNA, 22 nt, Human
gcucagaauccaagugaacacu

SEQ ID NO: 3716748 - RNA, 16 nt, Human
gcucagacauguuuuc

SEQ ID NO: 3716749 - RNA, 23 nt, Human
gcucagacccccacucucauucc

SEQ ID NO: 3716750 - RNA, 16 nt, Human
gcucagagagggcagg

SEQ ID NO: 3716751 - RNA, 14 nt, Human
gcucagagagggug

SEQ ID NO: 3716752 - RNA, 16 nt, Human
gcucagagcaguguuu

SEQ ID NO: 3716753 - RNA, 21 nt, Human
gcucagaggcgcacugugacc

SEQ ID NO: 3716754 - RNA, 18 nt, Human
gcucagaggguguccugc

SEQ ID NO: 3716755 - RNA, 19 nt, Human
gcucagaggguguccugca

SEQ ID NO: 3716756 - RNA, 18 nt, Human
gcucagaugaagagaaau

SEQ ID NO: 3716757 - RNA, 17 nt, Human
gcucagcaaaagaugcu

SEQ ID NO: 3716758 - RNA, 23 nt, Human
gcucagcaaaagaugcuucucac

SEQ ID NO: 3716759 - RNA, 19 nt, Human
gcucagcaaggccaccucu

SEQ ID NO: 3716760 - RNA, 22 nt, Human
gcucagcacugccugcucccau

SEQ ID NO: 3716761 - RNA, 15 nt, Human
gcucagccagcacuu

SEQ ID NO: 3716762 - RNA, 17 nt, Human
gcucagccagccccauc

SEQ ID NO: 3716763 - RNA, 18 nt, Human
gcucagcccaccccccuc

SEQ ID NO: 3716764 - RNA, 16 nt, Human
gcucagccccagccca

SEQ ID NO: 3716765 - RNA, 18 nt, Human
gcucagccccgagcuguc

SEQ ID NO: 3716766 - RNA, 15 nt, Human
gcucagcccucccug

SEQ ID NO: 3716767 - RNA, 16 nt, Human
gcucagcccucccugc

SEQ ID NO: 3716768 - RNA, 12 nt, Human
gcucagcccuga

SEQ ID NO: 3716769 - RNA, 19 nt, Human
gcucagcccugacuggugc

SEQ ID NO: 3716770 - RNA, 21 nt, Human
gcucagcccugacuggugcua

SEQ ID NO: 3716771 - RNA, 15 nt, Human
gcucagccugguggg

SEQ ID NO: 3716772 - RNA, 17 nt, Human
gcucagcggggacagcu

SEQ ID NO: 3716773 - RNA, 20 nt, Human
gcucagcucuggcucacaga

SEQ ID NO: 3716774 - RNA, 16 nt, Human
gcucagcucugggcca

SEQ ID NO: 3716775 - RNA, 12 nt, Human
gcucagcugcau

SEQ ID NO: 3716776 - RNA, 21 nt, Human
gcucagcugucaaggcucagu

SEQ ID NO: 3716777 - RNA, 13 nt, Human
gcucagcuucucc

SEQ ID NO: 3716778 - RNA, 16 nt, Human
gcucaggaaccgaggc

SEQ ID NO: 3716779 - RNA, 14 nt, Human
gcucaggaccaggc

SEQ ID NO: 3716780 - RNA, 16 nt, Human
gcucaggaccaggcaa

SEQ ID NO: 3716781 - RNA, 16 nt, Human
gcucaggacucagaag

SEQ ID NO: 3716782 - RNA, 18 nt, Human
gcucaggacucagaagcc

SEQ ID NO: 3716783 - RNA, 15 nt, Human
gcucaggagcccugg

SEQ ID NO: 3716784 - RNA, 23 nt, Human
gcucaggagcccugggaggcucu

SEQ ID NO: 3716785 - RNA, 15 nt, Human
gcucaggaggcgccc

SEQ ID NO: 3716786 - RNA, 15 nt, Human
gcucaggaggcuugg

SEQ ID NO: 3716787 - RNA, 17 nt, Human
gcucaggaggcuuggaa

SEQ ID NO: 3716788 - RNA, 13 nt, Human
gcucaggaguuug

SEQ ID NO: 3716789 - RNA, 14 nt, Human
gcucaggaucucuu

SEQ ID NO: 3716790 - RNA, 24 nt, Human
gcucaggcaggggccuccaugggc

SEQ ID NO: 3716791 - RNA, 19 nt, Human
gcucaggcgauccaccugu

SEQ ID NO: 3716792 - RNA, 12 nt, Human
gcucaggcugca

SEQ ID NO: 3716793 - RNA, 14 nt, Human
gcucaggcugcagc

SEQ ID NO: 3716794 - RNA, 17 nt, Human
gcucaggcugcagcugg

SEQ ID NO: 3716795 - RNA, 18 nt, Human
gcucagggaccacagcaa

SEQ ID NO: 3716796 - RNA, 16 nt, Human
gcucagggccuggcuc

SEQ ID NO: 3716797 - RNA, 20 nt, Human
gcucagggccuggcucaggu

SEQ ID NO: 3716798 - RNA, 19 nt, Human
gcucaggggcagcucauag

SEQ ID NO: 3716799 - RNA, 16 nt, Human
gcucaggggcccugga

SEQ ID NO: 3716800 - RNA, 17 nt, Human
gcucaggggcccuggag

SEQ ID NO: 3716801 - RNA, 19 nt, Human
gcucaggggcccuggagca

SEQ ID NO: 3716802 - RNA, 22 nt, Human
gcucagggugcuagaggauuag

SEQ ID NO: 3716803 - RNA, 12 nt, Human
gcucaggguggu

SEQ ID NO: 3716804 - RNA, 19 nt, Human
gcucagguacagagaagga

SEQ ID NO: 3716805 - RNA, 20 nt, Human
gcucagguacagagaaggaa

SEQ ID NO: 3716806 - RNA, 17 nt, Human
ucacauagaugucccuu

SEQ ID NO: 3716807 - RNA, 14 nt, Human
ucacauagcccacu

SEQ ID NO: 3716808 - RNA, 16 nt, Human
ucacauagugaaaguu

SEQ ID NO: 3716809 - RNA, 14 nt, Human
ucacauaucuagua

SEQ ID NO: 3716810 - RNA, 14 nt, Human
ucacauauuuuaaa

SEQ ID NO: 3716811 - RNA, 20 nt, Human
ucacaucagagugacaucca

SEQ ID NO: 3716812 - RNA, 10 nt, Human
ucacauccug

SEQ ID NO: 3716813 - RNA, 15 nt, Human
ucacauccuggccug

SEQ ID NO: 3716814 - RNA, 18 nt, Human
ucacauccuggccuggca

SEQ ID NO: 3716815 - RNA, 19 nt, Human
ucacauccuguguuucuag

SEQ ID NO: 3716816 - RNA, 15 nt, Human
ucacaucuuggcaca

SEQ ID NO: 3716817 - RNA, 14 nt, Human
ucacaucuuucaca

SEQ ID NO: 3716818 - RNA, 17 nt, Human
ucacaucuuucacacuu

SEQ ID NO: 3716819 - RNA, 20 nt, Human
ucacaucuuucacacuucca

SEQ ID NO: 3716820 - RNA, 13 nt, Human
ucacaucuuuuaa

SEQ ID NO: 3716821 - RNA, 18 nt, Human
ucacaucuuuuaagacaa

SEQ ID NO: 3716822 - RNA, 17 nt, Human
ucacaugaauuauuaca

SEQ ID NO: 3716823 - RNA, 21 nt, Human
ucacaugaauuauuacagugu

SEQ ID NO: 3716824 - RNA, 13 nt, Human
ucacaugaccaca

SEQ ID NO: 3716825 - RNA, 12 nt, Human
ucacaugcugga

SEQ ID NO: 3716826 - RNA, 19 nt, Human
ucacauggaaugaggguuu

SEQ ID NO: 3716827 - RNA, 16 nt, Human
ucacauggccuaugca

SEQ ID NO: 3716828 - RNA, 16 nt, Human
ucacauggugccccua

SEQ ID NO: 3716829 - RNA, 13 nt, Human
ucacauguauguu

SEQ ID NO: 3716830 - RNA, 15 nt, Human
ucacauguauguuuu

SEQ ID NO: 3716831 - RNA, 15 nt, Human
ucacauguuuucaaa

SEQ ID NO: 3716832 - RNA, 17 nt, Human
ucacauguuuucaaaug

SEQ ID NO: 3716833 - RNA, 20 nt, Human
ucacauguuuucaaauggag

SEQ ID NO: 3716834 - RNA, 21 nt, Human
ucacauuaaaaaaugaaauau

SEQ ID NO: 3716835 - RNA, 19 nt, Human
ucacauuacuguauauacu

SEQ ID NO: 3716836 - RNA, 12 nt, Human
ucacauuagaag

SEQ ID NO: 3716837 - RNA, 15 nt, Human
ucacauuagaagaca

SEQ ID NO: 3716838 - RNA, 13 nt, Human
ucacauucaggaa

SEQ ID NO: 3716839 - RNA, 20 nt, Human
ucacauuccugaacaggaua

SEQ ID NO: 3716840 - RNA, 20 nt, Human
ucacauugcauucuauugcc

SEQ ID NO: 3716841 - RNA, 21 nt, Human
ucacauugcauucuauugccu

SEQ ID NO: 3716842 - RNA, 17 nt, Human
ucacauuggaaacaagu

SEQ ID NO: 3716843 - RNA, 18 nt, Human
ucacauugguguuguacu

SEQ ID NO: 3716844 - RNA, 22 nt, Human
ucacauuguauucagaguugau

SEQ ID NO: 3716845 - RNA, 11 nt, Human
ucacauuuucc

SEQ ID NO: 3716846 - RNA, 14 nt, Human
ucacauuuuccuuu

SEQ ID NO: 3716847 - RNA, 18 nt, Human
ucacauuuuccuuuucaa

SEQ ID NO: 3716848 - RNA, 16 nt, Human
ucaccaaaagacacug

SEQ ID NO: 3716849 - RNA, 20 nt, Human
ucaccaaaucagcugcuacu

SEQ ID NO: 3716850 - RNA, 13 nt, Human
ucaccaagcccag

SEQ ID NO: 3716851 - RNA, 13 nt, Human
ucaccaaggaaac

SEQ ID NO: 3716852 - RNA, 23 nt, Human
ucaccacaccaaaccucucuuau

SEQ ID NO: 3716853 - RNA, 14 nt, Human
ucaccacagacuuu

SEQ ID NO: 3716854 - RNA, 18 nt, Human
ucaccacaguaaguuccu

SEQ ID NO: 3716855 - RNA, 13 nt, Human
ucaccaccacccc

SEQ ID NO: 3716856 - RNA, 14 nt, Human
ucaccaccuuccca

SEQ ID NO: 3716857 - RNA, 16 nt, Human
ucaccaccuucccagc

SEQ ID NO: 3716858 - RNA, 20 nt, Human
ucaccacgacuggccagggc

SEQ ID NO: 3716859 - RNA, 16 nt, Human
ucaccacuccauuccc

SEQ ID NO: 3716860 - RNA, 13 nt, Human
ucaccagaauaaa

SEQ ID NO: 3716861 - RNA, 19 nt, Human
ucaccagacggggcuggag

SEQ ID NO: 3716862 - RNA, 14 nt, Human
ucaccagagacuuu

SEQ ID NO: 3716863 - RNA, 15 nt, Human
ucaccagagacuuua

SEQ ID NO: 3716864 - RNA, 19 nt, Human
ucaccagagacuuuagggg

SEQ ID NO: 3716865 - RNA, 13 nt, Human
ucaccagcaccaa

SEQ ID NO: 3716866 - RNA, 22 nt, Human
ucaccagccccacugccagcag

SEQ ID NO: 3716867 - RNA, 24 nt, Human
ucaccagccccacugccagcagca

SEQ ID NO: 3716868 - RNA, 13 nt, Human
ucaccagccccag

SEQ ID NO: 3716869 - RNA, 12 nt, Human
ucaccagcugca

SEQ ID NO: 3716870 - RNA, 13 nt, Human
ucaccagcugcaa

SEQ ID NO: 3716871 - RNA, 17 nt, Human
ucaccagcugcaaagug

SEQ ID NO: 3716872 - RNA, 15 nt, Human
ucaccagcugccucu

SEQ ID NO: 3716873 - RNA, 15 nt, Human
ucaccaggggcaggc

SEQ ID NO: 3716874 - RNA, 19 nt, Human
ucaccaggggcaggcacag

SEQ ID NO: 3716875 - RNA, 21 nt, Human
ucaccaggggcaggcacagca

SEQ ID NO: 3716876 - RNA, 22 nt, Human
ucaccaggggcaggcacagcac

SEQ ID NO: 3716877 - RNA, 19 nt, Human
ucaccagugaccuggaagg

SEQ ID NO: 3716878 - RNA, 22 nt, Human
ucaccaguggccuuaccccugc

SEQ ID NO: 3716879 - RNA, 13 nt, Human
ucaccaguguccc

SEQ ID NO: 3716880 - RNA, 23 nt, Human
ucaccaguguguggcuuucagag

SEQ ID NO: 3716881 - RNA, 15 nt, Human
ucaccaucaauccug

SEQ ID NO: 3716882 - RNA, 15 nt, Human
ucaccaucucaggcc

SEQ ID NO: 3716883 - RNA, 16 nt, Human
ucaccaucucaggcca

SEQ ID NO: 3716884 - RNA, 21 nt, Human
ucaccaugauggccaggcuga

SEQ ID NO: 3716885 - RNA, 20 nt, Human
ucaccauguaaaacaaaaaa

SEQ ID NO: 3716886 - RNA, 16 nt, Human
ucaccauguaagcacu

SEQ ID NO: 3716887 - RNA, 20 nt, Human
ucaccauuauaaugaauuua

SEQ ID NO: 3716888 - RNA, 13 nt, Human
ucaccauucccag

SEQ ID NO: 3716889 - RNA, 17 nt, Human
ucaccauuuccccaggg

SEQ ID NO: 3716890 - RNA, 19 nt, Human
ucaccauuuccccagggca

SEQ ID NO: 3716891 - RNA, 20 nt, Human
ucaccauuuccccagggcac

SEQ ID NO: 3716892 - RNA, 19 nt, Human
ucacccaagagauuguugu

SEQ ID NO: 3716893 - RNA, 15 nt, Human
ucacccacagaaaga

SEQ ID NO: 3716894 - RNA, 11 nt, Human
ucacccacagg

SEQ ID NO: 3716895 - RNA, 22 nt, Human
ucacccacagggcuaagagcua

SEQ ID NO: 3716896 - RNA, 19 nt, Human
ucacccaggcuggagugca

SEQ ID NO: 3716897 - RNA, 21 nt, Human
ucacccaugcaagcagaggac

SEQ ID NO: 3716898 - RNA, 12 nt, Human
ucaccccacccu

SEQ ID NO: 3716899 - RNA, 22 nt, Human
ucaccccacuuaucccucucca

SEQ ID NO: 3716900 - RNA, 14 nt, Human
ucaccccagagcca

SEQ ID NO: 3716901 - RNA, 13 nt, Human
ucaccccagcccc

SEQ ID NO: 3716902 - RNA, 20 nt, Human
ucaccccagggccugagccu

SEQ ID NO: 3716903 - RNA, 21 nt, Human
ucaccccagggccugagccug

SEQ ID NO: 3716904 - RNA, 13 nt, Human
ucaccccauccca

SEQ ID NO: 3716905 - RNA, 19 nt, Human
ucaccccaucccacacccu

SEQ ID NO: 3716906 - RNA, 13 nt, Human
ucacccccagcuu

SEQ ID NO: 3716907 - RNA, 18 nt, Human
ucacccccagcuuugcua

SEQ ID NO: 3716908 - RNA, 18 nt, Human
ucaccccccacacucacu

SEQ ID NO: 3716909 - RNA, 14 nt, Human
ucaccccccacuca

SEQ ID NO: 3716910 - RNA, 22 nt, Human
ucacccccucccacccccagcc

SEQ ID NO: 3716911 - RNA, 23 nt, Human
ucacccccucccacccccagccc

SEQ ID NO: 3716912 - RNA, 19 nt, Human
ucacccccucgggucuccu

SEQ ID NO: 3716913 - RNA, 13 nt, Human
ucacccccuucuc

SEQ ID NO: 3716914 - RNA, 16 nt, Human
ucacccccuucuccau

SEQ ID NO: 3716915 - RNA, 17 nt, Human
ucaccccgaggcccugc

SEQ ID NO: 3716916 - RNA, 20 nt, Human
ucaccccgaggcccugcaug

SEQ ID NO: 3716917 - RNA, 23 nt, Human
ucaccccgcuguaagcuccuuug

SEQ ID NO: 3716918 - RNA, 15 nt, Human
ucaccccggccaccu

SEQ ID NO: 3716919 - RNA, 18 nt, Human
ucaccccucccuuucucc

SEQ ID NO: 3716920 - RNA, 13 nt, Human
ucaccccugcccu

SEQ ID NO: 3716921 - RNA, 16 nt, Human
ucaccccugcccuggg

SEQ ID NO: 3716922 - RNA, 17 nt, Human
ucaccccugcccuggga

SEQ ID NO: 3716923 - RNA, 15 nt, Human
ucaccccugguucuc

SEQ ID NO: 3716924 - RNA, 21 nt, Human
ucaccccugguucucaucuuu

SEQ ID NO: 3716925 - RNA, 16 nt, Human
ucaccccuguccucac

SEQ ID NO: 3716926 - RNA, 19 nt, Human
ucacccgaggcugcccacu

SEQ ID NO: 3716927 - RNA, 19 nt, Human
ucacccgcuaagagggagg

SEQ ID NO: 3716928 - RNA, 20 nt, Human
ucacccguacaggcaauucc

SEQ ID NO: 3716929 - RNA, 18 nt, Human
ucacccguccagaccuug

SEQ ID NO: 3716930 - RNA, 15 nt, Human
ucacccuaccugugc

SEQ ID NO: 3716931 - RNA, 17 nt, Human
ucacccuagcccucucc

SEQ ID NO: 3716932 - RNA, 18 nt, Human
ucacccucuuccugugau

SEQ ID NO: 3716933 - RNA, 13 nt, Human
ucacccugagccc

SEQ ID NO: 3716934 - RNA, 13 nt, Human
ucacccugccuua

SEQ ID NO: 3716935 - RNA, 15 nt, Human
ucacccugccuuauc

SEQ ID NO: 3716936 - RNA, 18 nt, Human
ucacccuggaggcaccug

SEQ ID NO: 3716937 - RNA, 20 nt, Human
ucacccuggggcuaggaaau

SEQ ID NO: 3716938 - RNA, 13 nt, Human
ucacccuguccaa

SEQ ID NO: 3716939 - RNA, 21 nt, Human
ucacccuguccaaacugccua

SEQ ID NO: 3716940 - RNA, 18 nt, Human
ucacccuuaacccaagga

SEQ ID NO: 3716941 - RNA, 22 nt, Human
ucacccuuaacccaaggagcac

SEQ ID NO: 3716942 - RNA, 23 nt, Human
ucacccuuaacccaaggagcaca

SEQ ID NO: 3716943 - RNA, 18 nt, Human
ucacccuuaccaugugcc

SEQ ID NO: 3716944 - RNA, 13 nt, Human
ucacccuuugcug

SEQ ID NO: 3716945 - RNA, 14 nt, Human
ucaccgaaaacgug

SEQ ID NO: 3716946 - RNA, 15 nt, Human
ucaccgaaaacgugg

SEQ ID NO: 3716947 - RNA, 22 nt, Human
ucaccgaaaacguggcugcuuc

SEQ ID NO: 3716948 - RNA, 15 nt, Human
ucaccgaagccacuu

SEQ ID NO: 3716949 - RNA, 23 nt, Human
ucaccgagaguagccgagagccu

SEQ ID NO: 3716950 - RNA, 20 nt, Human
ucaccgcagucgucgcacag

SEQ ID NO: 3716951 - RNA, 22 nt, Human
ucaccgcagucgucgcacaguc

SEQ ID NO: 3716952 - RNA, 13 nt, Human
ucaccgcccauca

SEQ ID NO: 3716953 - RNA, 20 nt, Human
ucaccgcccaucaggguucu

SEQ ID NO: 3716954 - RNA, 23 nt, Human
ucaccggagcuuucaaagaagga

SEQ ID NO: 3716955 - RNA, 15 nt, Human
ucaccggcucucacc

SEQ ID NO: 3716956 - RNA, 18 nt, Human
ucaccguggaccuuccug

SEQ ID NO: 3716957 - RNA, 14 nt, Human
aacugggcugaaca

SEQ ID NO: 3716958 - RNA, 16 nt, Human
aacuggggcuccucca

SEQ ID NO: 3716959 - RNA, 16 nt, Human
aacugggguugagggc

SEQ ID NO: 3716960 - RNA, 23 nt, Human
aacuggguaaaugcaaaguucug

SEQ ID NO: 3716961 - RNA, 18 nt, Human
aacuggguaaugaaacaa

SEQ ID NO: 3716962 - RNA, 22 nt, Human
aacugguauucuguucuggagg

SEQ ID NO: 3716963 - RNA, 17 nt, Human
aacuggucuuccuuuuu

SEQ ID NO: 3716964 - RNA, 19 nt, Human
aacuggucuuccuuuuugg

SEQ ID NO: 3716965 - RNA, 14 nt, Human
aacuggugauauau

SEQ ID NO: 3716966 - RNA, 21 nt, Human
aacugguuuguugcagccaaa

SEQ ID NO: 3716967 - RNA, 13 nt, Human
aacuguaaauaaa

SEQ ID NO: 3716968 - RNA, 11 nt, Human
aacuguaaauc

SEQ ID NO: 3716969 - RNA, 17 nt, Human
aacuguaacguuuucuu

SEQ ID NO: 3716970 - RNA, 15 nt, Human
aacuguaauuauuug

SEQ ID NO: 3716971 - RNA, 10 nt, Human
aacuguacag

SEQ ID NO: 3716972 - RNA, 18 nt, Human
aacuguacagugucuuuu

SEQ ID NO: 3716973 - RNA, 13 nt, Human
aacuguacauuuc

SEQ ID NO: 3716974 - RNA, 22 nt, Human
aacuguacuuugauucacaugu

SEQ ID NO: 3716975 - RNA, 15 nt, Human
aacuguagaaaugau

SEQ ID NO: 3716976 - RNA, 20 nt, Human
aacuguagauaaagugguuu

SEQ ID NO: 3716977 - RNA, 20 nt, Human
aacuguagaugauguauuuu

SEQ ID NO: 3716978 - RNA, 16 nt, Human
aacuguauauuuguau

SEQ ID NO: 3716979 - RNA, 11 nt, Human
aacuguaucuu

SEQ ID NO: 3716980 - RNA, 14 nt, Human
aacuguaugucaga

SEQ ID NO: 3716981 - RNA, 14 nt, Human
aacuguccagagag

SEQ ID NO: 3716982 - RNA, 18 nt, Human
aacuguccguaagcagua

SEQ ID NO: 3716983 - RNA, 19 nt, Human
aacuguccguaagcaguau

SEQ ID NO: 3716984 - RNA, 20 nt, Human
aacuguccucuuucagaaaa

SEQ ID NO: 3716985 - RNA, 21 nt, Human
aacuguccucuuucagaaaac

SEQ ID NO: 3716986 - RNA, 16 nt, Human
aacuguccuguccugc

SEQ ID NO: 3716987 - RNA, 17 nt, Human
aacuguccuguccugcu

SEQ ID NO: 3716988 - RNA, 17 nt, Human
aacugucggaggaaaga

SEQ ID NO: 3716989 - RNA, 20 nt, Human
aacugucgugucauacucga

SEQ ID NO: 3716990 - RNA, 16 nt, Human
aacugucuauuucugc

SEQ ID NO: 3716991 - RNA, 22 nt, Human
aacugucucucuucucagagug

SEQ ID NO: 3716992 - RNA, 15 nt, Human
aacugucuuccucaa

SEQ ID NO: 3716993 - RNA, 22 nt, Human
aacuguggauacccuuacccuu

SEQ ID NO: 3716994 - RNA, 20 nt, Human
aacuguguacauaacugaaa

SEQ ID NO: 3716995 - RNA, 21 nt, Human
aacuguguacauaacugaaaa

SEQ ID NO: 3716996 - RNA, 15 nt, Human
aacuguguauguaca

SEQ ID NO: 3716997 - RNA, 15 nt, Human
aacugugugauuaaa

SEQ ID NO: 3716998 - RNA, 22 nt, Human
aacuguguguaauuguuccuuu

SEQ ID NO: 3716999 - RNA, 23 nt, Human
aacuguguuguauuaacaaaagu

SEQ ID NO: 3717000 - RNA, 22 nt, Human
aacuguguuucaaguucaaucc

SEQ ID NO: 3717001 - RNA, 19 nt, Human
aacuguuaccauuggaaau

SEQ ID NO: 3717002 - RNA, 23 nt, Human
aacuguuaccauuggaaauuuca

SEQ ID NO: 3717003 - RNA, 14 nt, Human
aacuguuagcacug

SEQ ID NO: 3717004 - RNA, 15 nt, Human
aacuguuagcacugu

SEQ ID NO: 3717005 - RNA, 22 nt, Human
aacuguuagcacuguugaugua

SEQ ID NO: 3717006 - RNA, 14 nt, Human
aacuguuaugaaau

SEQ ID NO: 3717007 - RNA, 15 nt, Human
aacuguuguauaaau

SEQ ID NO: 3717008 - RNA, 13 nt, Human
aacuguuuagaug

SEQ ID NO: 3717009 - RNA, 13 nt, Human
aacuguuuauaug

SEQ ID NO: 3717010 - RNA, 14 nt, Human
aacuguuuccuuca

SEQ ID NO: 3717011 - RNA, 15 nt, Human
aacuguuuuggguag

SEQ ID NO: 3717012 - RNA, 13 nt, Human
aacuuaaaaaugu

SEQ ID NO: 3717013 - RNA, 11 nt, Human
aacuuaaaaua

SEQ ID NO: 3717014 - RNA, 14 nt, Human
aacuuaaaauauuu

SEQ ID NO: 3717015 - RNA, 15 nt, Human
aacuuaaauaaaugu

SEQ ID NO: 3717016 - RNA, 19 nt, Human
aacuuaaauaaaugucauu

SEQ ID NO: 3717017 - RNA, 17 nt, Human
aacuuaaauaaugugaa

SEQ ID NO: 3717018 - RNA, 19 nt, Human
aacuuaaauguuauuaucu

SEQ ID NO: 3717019 - RNA, 19 nt, Human
aacuuaaauuuuaguucuu

SEQ ID NO: 3717020 - RNA, 12 nt, Human
aacuuaacaugc

SEQ ID NO: 3717021 - RNA, 13 nt, Human
aacuuaacaugcu

SEQ ID NO: 3717022 - RNA, 16 nt, Human
aacuuaacauucugua

SEQ ID NO: 3717023 - RNA, 17 nt, Human
aacuuaacauucuguaa

SEQ ID NO: 3717024 - RNA, 21 nt, Human
aacuuaacauucuguaaaaug

SEQ ID NO: 3717025 - RNA, 13 nt, Human
aacuuaacugaaa

SEQ ID NO: 3717026 - RNA, 13 nt, Human
aacuuaagccaau

SEQ ID NO: 3717027 - RNA, 17 nt, Human
aacuuaaggcauuuguu

SEQ ID NO: 3717028 - RNA, 17 nt, Human
aacuuaaguuaaacaua

SEQ ID NO: 3717029 - RNA, 18 nt, Human
aacuuaauaguauuuaug

SEQ ID NO: 3717030 - RNA, 18 nt, Human
aacuuaaucuaaauggaa

SEQ ID NO: 3717031 - RNA, 22 nt, Human
aacuuaauguucuuaugcaaaa

SEQ ID NO: 3717032 - RNA, 17 nt, Human
aacuuaauuuaauauuu

SEQ ID NO: 3717033 - RNA, 22 nt, Human
aacuuacaggugauuaacuugg

SEQ ID NO: 3717034 - RNA, 23 nt, Human
aacuuacauugugaaacuucugu

SEQ ID NO: 3717035 - RNA, 19 nt, Human
aacuuacauuguucaauua

SEQ ID NO: 3717036 - RNA, 20 nt, Human
aacuuacauuguucaauuag

SEQ ID NO: 3717037 - RNA, 21 nt, Human
aacuuaccaggcaccaaaaga

SEQ ID NO: 3717038 - RNA, 23 nt, Human
aacuuaccgugagcgacaaagau

SEQ ID NO: 3717039 - RNA, 19 nt, Human
aacuuaccugggcauucuu

SEQ ID NO: 3717040 - RNA, 23 nt, Human
aacuuacuauucauuaaauguuu

SEQ ID NO: 3717041 - RNA, 19 nt, Human
aacuuagcauguguugaaa

SEQ ID NO: 3717042 - RNA, 21 nt, Human
aacuuagcauuuucugcaucu

SEQ ID NO: 3717043 - RNA, 16 nt, Human
aacuuagguggcaagc

SEQ ID NO: 3717044 - RNA, 22 nt, Human
aacuuagugcggacaaguuuua

SEQ ID NO: 3717045 - RNA, 23 nt, Human
aacuuaguuugugaauugauuuu

SEQ ID NO: 3717046 - RNA, 16 nt, Human
aacuuaguuuugcaua

SEQ ID NO: 3717047 - RNA, 19 nt, Human
aacuuauaaaucauauuga

SEQ ID NO: 3717048 - RNA, 15 nt, Human
aacuuauauuguaag

SEQ ID NO: 3717049 - RNA, 19 nt, Human
aacuuauauuguaagaaau

SEQ ID NO: 3717050 - RNA, 15 nt, Human
aacuuaugaauguuu

SEQ ID NO: 3717051 - RNA, 15 nt, Human
aacuuauggccacag

SEQ ID NO: 3717052 - RNA, 19 nt, Human
aacuuauggggccaaaaua

SEQ ID NO: 3717053 - RNA, 19 nt, Human
aacuuauguagauauuugg

SEQ ID NO: 3717054 - RNA, 20 nt, Human
aacuuauguagauauuuggc

SEQ ID NO: 3717055 - RNA, 14 nt, Human
aacuuauucaaaga

SEQ ID NO: 3717056 - RNA, 13 nt, Human
aacuuauucugua

SEQ ID NO: 3717057 - RNA, 14 nt, Human
aacuuauucuguag

SEQ ID NO: 3717058 - RNA, 23 nt, Human
aacuuauucuguagauucugugg

SEQ ID NO: 3717059 - RNA, 13 nt, Human
aacuuauuugagu

SEQ ID NO: 3717060 - RNA, 21 nt, Human
aacuuauuuuuuucugauugu

SEQ ID NO: 3717061 - RNA, 13 nt, Human
aacuucaaauuuu

SEQ ID NO: 3717062 - RNA, 19 nt, Human
aacuucaacauuuacaugu

SEQ ID NO: 3717063 - RNA, 22 nt, Human
aacuucaagugcaugcucucug

SEQ ID NO: 3717064 - RNA, 17 nt, Human
aacuucacauuaaaaaa

SEQ ID NO: 3717065 - RNA, 22 nt, Human
aacuucagagggaaaguaaaua

SEQ ID NO: 3717066 - RNA, 12 nt, Human
aacuucagcacc

SEQ ID NO: 3717067 - RNA, 18 nt, Human
aacuucagcgguuuauau

SEQ ID NO: 3717068 - RNA, 20 nt, Human
aacuucagcuagagcuucaa

SEQ ID NO: 3717069 - RNA, 20 nt, Human
aacuucauauaugaggacuu

SEQ ID NO: 3717070 - RNA, 14 nt, Human
aacuucauguaacu

SEQ ID NO: 3717071 - RNA, 16 nt, Human
aacuucauguaauuuu

SEQ ID NO: 3717072 - RNA, 16 nt, Human
aacuucauuucagagu

SEQ ID NO: 3717073 - RNA, 12 nt, Human
aacuucauuuga

SEQ ID NO: 3717074 - RNA, 14 nt, Human
aacuucauuugaug

SEQ ID NO: 3717075 - RNA, 18 nt, Human
aacuuccagauccuggaa

SEQ ID NO: 3717076 - RNA, 18 nt, Human
aacuucccagugaauucu

SEQ ID NO: 3717077 - RNA, 16 nt, Human
aacuuccccauacaaa

SEQ ID NO: 3717078 - RNA, 23 nt, Human
aacuuccugcagguaaacaguuc

SEQ ID NO: 3717079 - RNA, 22 nt, Human
aacuuccuuggacucauuuuaa

SEQ ID NO: 3717080 - RNA, 22 nt, Human
aacuucuccccugguagaaaga

SEQ ID NO: 3717081 - RNA, 15 nt, Human
aacuucucuggaaag

SEQ ID NO: 3717082 - RNA, 19 nt, Human
aacuucucuugcuuucuau

SEQ ID NO: 3717083 - RNA, 19 nt, Human
aacuucugcaacaagcaug

SEQ ID NO: 3717084 - RNA, 13 nt, Human
aacuucugccugu

SEQ ID NO: 3717085 - RNA, 17 nt, Human
aacuucuuaaauaucuu

SEQ ID NO: 3717086 - RNA, 18 nt, Human
aacuucuuaaauaucuuu

SEQ ID NO: 3717087 - RNA, 20 nt, Human
aacuucuuaaauaucuuuua

SEQ ID NO: 3717088 - RNA, 22 nt, Human
aacuucuuauaggaaagcuuga

SEQ ID NO: 3717089 - RNA, 21 nt, Human
aacuucuucuccaucccucua

SEQ ID NO: 3717090 - RNA, 23 nt, Human
aacuucuugucagacauaaagcc

SEQ ID NO: 3717091 - RNA, 22 nt, Human
aacuucuuucuauuugacuugu

SEQ ID NO: 3717092 - RNA, 24 nt, Human
aacuucuuuguaaucguuaugugu

SEQ ID NO: 3717093 - RNA, 12 nt, Human
aacuugaaaaau

SEQ ID NO: 3717094 - RNA, 13 nt, Human
aacuugaaauuug

SEQ ID NO: 3717095 - RNA, 21 nt, Human
aacuugaacugauucacaucu

SEQ ID NO: 3717096 - RNA, 16 nt, Human
aacuugaaugugucag

SEQ ID NO: 3717097 - RNA, 20 nt, Human
aacuugagauguaugaaggc

SEQ ID NO: 3717098 - RNA, 20 nt, Human
aacuugaggacacaugucca

SEQ ID NO: 3717099 - RNA, 19 nt, Human
aacuugagggcccagagca

SEQ ID NO: 3717100 - RNA, 19 nt, Human
aacuugauccauuucuaau

SEQ ID NO: 3717101 - RNA, 14 nt, Human
aacuugaugcaugu

SEQ ID NO: 3717102 - RNA, 15 nt, Human
aacuugaugcaugug

SEQ ID NO: 3717103 - RNA, 15 nt, Human
aacuugcauggagca

SEQ ID NO: 3717104 - RNA, 18 nt, Human
aacuugccucuuuuaccu

SEQ ID NO: 3717105 - RNA, 16 nt, Human
aacuugccugccuuuc

SEQ ID NO: 3717106 - RNA, 14 nt, Human
ucaugaauaugaug

SEQ ID NO: 3717107 - RNA, 16 nt, Human
ucaugaaucugcaaug

SEQ ID NO: 3717108 - RNA, 15 nt, Human
ucaugaaugcuuuua

SEQ ID NO: 3717109 - RNA, 20 nt, Human
ucaugaauguaaauuuguac

SEQ ID NO: 3717110 - RNA, 21 nt, Human
ucaugaauuaguuuuauaugc

SEQ ID NO: 3717111 - RNA, 19 nt, Human
ucaugaauuuuacauggua

SEQ ID NO: 3717112 - RNA, 14 nt, Human
ucaugacagccucc

SEQ ID NO: 3717113 - RNA, 15 nt, Human
ucaugaccaguaaag

SEQ ID NO: 3717114 - RNA, 18 nt, Human
ucaugacuuuuccaugua

SEQ ID NO: 3717115 - RNA, 23 nt, Human
ucaugagaaauuaccaaaauguc

SEQ ID NO: 3717116 - RNA, 14 nt, Human
ucaugagccugcug

SEQ ID NO: 3717117 - RNA, 16 nt, Human
ucaugaggagauucug

SEQ ID NO: 3717118 - RNA, 21 nt, Human
ucaugaggagauucugccuuu

SEQ ID NO: 3717119 - RNA, 15 nt, Human
ucaugaguucugcug

SEQ ID NO: 3717120 - RNA, 17 nt, Human
ucaugauaaugaacaga

SEQ ID NO: 3717121 - RNA, 17 nt, Human
ucaugauaauucagcag

SEQ ID NO: 3717122 - RNA, 20 nt, Human
ucaugaugcagucuccucuu

SEQ ID NO: 3717123 - RNA, 22 nt, Human
ucaugaugcagucuccucuuua

SEQ ID NO: 3717124 - RNA, 15 nt, Human
ucaugaugcuagcca

SEQ ID NO: 3717125 - RNA, 16 nt, Human
ucaugaugcucuuucc

SEQ ID NO: 3717126 - RNA, 18 nt, Human
ucaugaugcucuuuccca

SEQ ID NO: 3717127 - RNA, 13 nt, Human
ucaugauguuuuu

SEQ ID NO: 3717128 - RNA, 13 nt, Human
ucaugauuagcaa

SEQ ID NO: 3717129 - RNA, 13 nt, Human
ucaugauuuauaa

SEQ ID NO: 3717130 - RNA, 17 nt, Human
ucaugauuucauuucaa

SEQ ID NO: 3717131 - RNA, 11 nt, Human
ucaugauuuuu

SEQ ID NO: 3717132 - RNA, 13 nt, Human
ucaugcaaaauau

SEQ ID NO: 3717133 - RNA, 14 nt, Human
ucaugcaaacuuua

SEQ ID NO: 3717134 - RNA, 23 nt, Human
ucaugcaaacuuuauuuuguguu

SEQ ID NO: 3717135 - RNA, 15 nt, Human
ucaugcaaugacauc

SEQ ID NO: 3717136 - RNA, 17 nt, Human
ucaugcacaguauuugu

SEQ ID NO: 3717137 - RNA, 20 nt, Human
ucaugcacaguauuuguaau

SEQ ID NO: 3717138 - RNA, 16 nt, Human
ucaugcacuuaaagaa

SEQ ID NO: 3717139 - RNA, 22 nt, Human
ucaugcacuuaaagaaguauuu

SEQ ID NO: 3717140 - RNA, 17 nt, Human
ucaugcagaguauuucu

SEQ ID NO: 3717141 - RNA, 13 nt, Human
ucaugcagccgug

SEQ ID NO: 3717142 - RNA, 16 nt, Human
ucaugcaucuccaccu

SEQ ID NO: 3717143 - RNA, 20 nt, Human
ucaugcaucuccaccugcuc

SEQ ID NO: 3717144 - RNA, 22 nt, Human
ucaugcaucuccaccugcuccc

SEQ ID NO: 3717145 - RNA, 18 nt, Human
ucaugcauguccuguaaa

SEQ ID NO: 3717146 - RNA, 12 nt, Human
ucaugcauuguu

SEQ ID NO: 3717147 - RNA, 16 nt, Human
ucaugccaagcauuua

SEQ ID NO: 3717148 - RNA, 22 nt, Human
ucaugccaccauggccagccaa

SEQ ID NO: 3717149 - RNA, 12 nt, Human
ucaugccagcua

SEQ ID NO: 3717150 - RNA, 13 nt, Human
ucaugcccacccc

SEQ ID NO: 3717151 - RNA, 19 nt, Human
ucaugcccacccccugccc

SEQ ID NO: 3717152 - RNA, 21 nt, Human
ucaugcccccuuucagauguc

SEQ ID NO: 3717153 - RNA, 16 nt, Human
ucaugccccuggcugg

SEQ ID NO: 3717154 - RNA, 15 nt, Human
ucaugcccugugcaa

SEQ ID NO: 3717155 - RNA, 23 nt, Human
ucaugccuggaagcuuugucccc

SEQ ID NO: 3717156 - RNA, 16 nt, Human
ucaugccuuuguaagu

SEQ ID NO: 3717157 - RNA, 14 nt, Human
ucaugcuccuuaau

SEQ ID NO: 3717158 - RNA, 13 nt, Human
ucaugcugccaau

SEQ ID NO: 3717159 - RNA, 19 nt, Human
ucaugcugccaauauccua

SEQ ID NO: 3717160 - RNA, 13 nt, Human
ucaugcugccccu

SEQ ID NO: 3717161 - RNA, 12 nt, Human
ucaugcugccuu

SEQ ID NO: 3717162 - RNA, 20 nt, Human
ucaugcuggaaccugcaaaa

SEQ ID NO: 3717163 - RNA, 22 nt, Human
ucaugcuggaaccugcaaaaaa

SEQ ID NO: 3717164 - RNA, 20 nt, Human
ucaugcugggauuuccaacu

SEQ ID NO: 3717165 - RNA, 17 nt, Human
ucaugcuguucaugaaa

SEQ ID NO: 3717166 - RNA, 17 nt, Human
ucaugcuucuuccuuac

SEQ ID NO: 3717167 - RNA, 13 nt, Human
ucaugcuuuaaag

SEQ ID NO: 3717168 - RNA, 19 nt, Human
ucaugcuuuaaaguguaau

SEQ ID NO: 3717169 - RNA, 20 nt, Human
ucaugcuuuaaaguguaaua

SEQ ID NO: 3717170 - RNA, 19 nt, Human
ucauggaacacaaacacau

SEQ ID NO: 3717171 - RNA, 23 nt, Human
ucauggaacacaaacacauuguu

SEQ ID NO: 3717172 - RNA, 18 nt, Human
ucauggaauggacauccu

SEQ ID NO: 3717173 - RNA, 20 nt, Human
ucauggaauggacauccugu

SEQ ID NO: 3717174 - RNA, 12 nt, Human
ucauggaauggu

SEQ ID NO: 3717175 - RNA, 21 nt, Human
ucauggaauuggagcucgugg

SEQ ID NO: 3717176 - RNA, 16 nt, Human
ucauggaccacuguuu

SEQ ID NO: 3717177 - RNA, 21 nt, Human
ucauggaccacuguuucuugc

SEQ ID NO: 3717178 - RNA, 22 nt, Human
ucauggaccacuguuucuugcu

SEQ ID NO: 3717179 - RNA, 21 nt, Human
ucauggagaaccaccuacccc

SEQ ID NO: 3717180 - RNA, 20 nt, Human
ucauggagaagcagaaauac

SEQ ID NO: 3717181 - RNA, 13 nt, Human
ucauggauuacuu

SEQ ID NO: 3717182 - RNA, 20 nt, Human
ucauggauucauuacagcuu

SEQ ID NO: 3717183 - RNA, 22 nt, Human
ucauggcagaaggcaaacccau

SEQ ID NO: 3717184 - RNA, 21 nt, Human
ucauggcagauguaggaggga

SEQ ID NO: 3717185 - RNA, 14 nt, Human
ucauggccacacug

SEQ ID NO: 3717186 - RNA, 17 nt, Human
ucauggccacacuguga

SEQ ID NO: 3717187 - RNA, 19 nt, Human
ucauggccacacugugaca

SEQ ID NO: 3717188 - RNA, 16 nt, Human
ucauggccagcuggag

SEQ ID NO: 3717189 - RNA, 18 nt, Human
ucauggccccucugaccu

SEQ ID NO: 3717190 - RNA, 15 nt, Human
ucauggccuugucua

SEQ ID NO: 3717191 - RNA, 21 nt, Human
ucauggcuaagcuuaaaaaaa

SEQ ID NO: 3717192 - RNA, 23 nt, Human
ucauggcuaagcuuaaaaaaaac

SEQ ID NO: 3717193 - RNA, 16 nt, Human
ucauggcugcuguugc

SEQ ID NO: 3717194 - RNA, 14 nt, Human
ucauggcuuaaugu

SEQ ID NO: 3717195 - RNA, 15 nt, Human
ucauggcuuaauguu

SEQ ID NO: 3717196 - RNA, 18 nt, Human
ucauggcuuaauguuuau

SEQ ID NO: 3717197 - RNA, 23 nt, Human
ucaugggagggggcuugaagcca

SEQ ID NO: 3717198 - RNA, 14 nt, Human
ucaugggguccaag

SEQ ID NO: 3717199 - RNA, 22 nt, Human
ucauggguuauguguaugugcc

SEQ ID NO: 3717200 - RNA, 23 nt, Human
ucaugguggguucaggggacuca

SEQ ID NO: 3717201 - RNA, 13 nt, Human
ucaugguguaaua

SEQ ID NO: 3717202 - RNA, 18 nt, Human
ucaugguguaauaagaca

SEQ ID NO: 3717203 - RNA, 13 nt, Human
ucauguaaaacag

SEQ ID NO: 3717204 - RNA, 18 nt, Human
ucauguaaaacagaaaaa

SEQ ID NO: 3717205 - RNA, 13 nt, Human
ucauguaaacugu

SEQ ID NO: 3717206 - RNA, 14 nt, Human
ucauguaaauaaau

SEQ ID NO: 3717207 - RNA, 19 nt, Human
ucauguaaauaauacauua

SEQ ID NO: 3717208 - RNA, 18 nt, Human
ucauguaaauacuguugg

SEQ ID NO: 3717209 - RNA, 13 nt, Human
ucauguaaauuga

SEQ ID NO: 3717210 - RNA, 20 nt, Human
ucauguaacuucccugaaaa

SEQ ID NO: 3717211 - RNA, 19 nt, Human
ucauguaagcugaaaauau

SEQ ID NO: 3717212 - RNA, 17 nt, Human
ucauguacaagaugaag

SEQ ID NO: 3717213 - RNA, 14 nt, Human
ucauguacauuucu

SEQ ID NO: 3717214 - RNA, 19 nt, Human
ucauguacugcauuauuug

SEQ ID NO: 3717215 - RNA, 13 nt, Human
ucauguacuuuuu

SEQ ID NO: 3717216 - RNA, 19 nt, Human
ucauguauguucagaagaa

SEQ ID NO: 3717217 - RNA, 14 nt, Human
ucauguauguuucu

SEQ ID NO: 3717218 - RNA, 18 nt, Human
ucaugucaacuucuggcu

SEQ ID NO: 3717219 - RNA, 21 nt, Human
ucaugucaacuucuggcuccu

SEQ ID NO: 3717220 - RNA, 14 nt, Human
ucaugucaggccug

SEQ ID NO: 3717221 - RNA, 19 nt, Human
ucaugucaggccugugugu

SEQ ID NO: 3717222 - RNA, 21 nt, Human
ucauguccaaacguccucuuu

SEQ ID NO: 3717223 - RNA, 21 nt, Human
ucauguccccaaaccugcaag

SEQ ID NO: 3717224 - RNA, 15 nt, Human
ucauguccuguguca

SEQ ID NO: 3717225 - RNA, 19 nt, Human
ucagacucuaagaaagaac

SEQ ID NO: 3717226 - RNA, 16 nt, Human
ucagacucucagccca

SEQ ID NO: 3717227 - RNA, 18 nt, Human
ucagacucucagcccaga

SEQ ID NO: 3717228 - RNA, 17 nt, Human
ucagacugcacccagga

SEQ ID NO: 3717229 - RNA, 18 nt, Human
ucagacugcacccaggag

SEQ ID NO: 3717230 - RNA, 19 nt, Human
ucagacugcacccaggagg

SEQ ID NO: 3717231 - RNA, 13 nt, Human
ucagacuggcugg

SEQ ID NO: 3717232 - RNA, 20 nt, Human
ucagacuggcuggcugcagu

SEQ ID NO: 3717233 - RNA, 12 nt, Human
ucagacuguaua

SEQ ID NO: 3717234 - RNA, 14 nt, Human
ucagacuguuuagu

SEQ ID NO: 3717235 - RNA, 15 nt, Human
ucagacuuaccagga

SEQ ID NO: 3717236 - RNA, 15 nt, Human
ucagacuugucaagc

SEQ ID NO: 3717237 - RNA, 16 nt, Human
ucagacuuuaaagaau

SEQ ID NO: 3717238 - RNA, 15 nt, Human
ucagacuuuggaaaa

SEQ ID NO: 3717239 - RNA, 16 nt, Human
ucagacuuuggaaaau

SEQ ID NO: 3717240 - RNA, 19 nt, Human
ucagacuuuggaaaaugca

SEQ ID NO: 3717241 - RNA, 14 nt, Human
ucagacuuuuguac

SEQ ID NO: 3717242 - RNA, 16 nt, Human
ucagacuuuuguacau

SEQ ID NO: 3717243 - RNA, 23 nt, Human
ucagagaauuucuaccauuucag

SEQ ID NO: 3717244 - RNA, 12 nt, Human
ucagagacacug

SEQ ID NO: 3717245 - RNA, 21 nt, Human
ucagagaccaggcccuggcua

SEQ ID NO: 3717246 - RNA, 15 nt, Human
ucagagaccagggcu

SEQ ID NO: 3717247 - RNA, 17 nt, Human
ucagagaccugaagugu

SEQ ID NO: 3717248 - RNA, 20 nt, Human
ucagagacuccugcaggcag

SEQ ID NO: 3717249 - RNA, 23 nt, Human
ucagagacuccugcaggcagcca

SEQ ID NO: 3717250 - RNA, 15 nt, Human
ucagagagcagugcu

SEQ ID NO: 3717251 - RNA, 14 nt, Human
ucagagagcuggua

SEQ ID NO: 3717252 - RNA, 16 nt, Human
ucagagagcugguagu

SEQ ID NO: 3717253 - RNA, 16 nt, Human
ucagagaggccuuuug

SEQ ID NO: 3717254 - RNA, 11 nt, Human
ucagagagggu

SEQ ID NO: 3717255 - RNA, 21 nt, Human
ucagagagggugggagugggc

SEQ ID NO: 3717256 - RNA, 23 nt, Human
ucagagagggugggagugggccc

SEQ ID NO: 3717257 - RNA, 21 nt, Human
ucagagaucguguauugagau

SEQ ID NO: 3717258 - RNA, 16 nt, Human
ucagagaugcaccacc

SEQ ID NO: 3717259 - RNA, 21 nt, Human
ucagagaugcaccaccaagcc

SEQ ID NO: 3717260 - RNA, 19 nt, Human
ucagagauuuauauaaaug

SEQ ID NO: 3717261 - RNA, 14 nt, Human
ucagagcaggaccu

SEQ ID NO: 3717262 - RNA, 20 nt, Human
ucagagccccuacagcauug

SEQ ID NO: 3717263 - RNA, 13 nt, Human
ucagagccugcag

SEQ ID NO: 3717264 - RNA, 14 nt, Human
ucagagccugcagu

SEQ ID NO: 3717265 - RNA, 15 nt, Human
ucagagccugcaguu

SEQ ID NO: 3717266 - RNA, 14 nt, Human
ucagagcgcacagg

SEQ ID NO: 3717267 - RNA, 18 nt, Human
ucagagcuaaacuccuuc

SEQ ID NO: 3717268 - RNA, 14 nt, Human
ucagagcucucucu

SEQ ID NO: 3717269 - RNA, 14 nt, Human
ucagagcugcccuc

SEQ ID NO: 3717270 - RNA, 20 nt, Human
ucagagcugcccucuccugg

SEQ ID NO: 3717271 - RNA, 21 nt, Human
ucagagcugcccucuccuggg

SEQ ID NO: 3717272 - RNA, 17 nt, Human
ucagaggaccuguauuu

SEQ ID NO: 3717273 - RNA, 14 nt, Human
ucagaggauggcca

SEQ ID NO: 3717274 - RNA, 19 nt, Human
ucagaggauggccaguguc

SEQ ID NO: 3717275 - RNA, 18 nt, Human
ucagaggcacaaaagggu

SEQ ID NO: 3717276 - RNA, 21 nt, Human
ucagaggcccucgcugccagc

SEQ ID NO: 3717277 - RNA, 22 nt, Human
ucagaggccuuaugaggguccu

SEQ ID NO: 3717278 - RNA, 21 nt, Human
ucagagggaaaguaaauauuu

SEQ ID NO: 3717279 - RNA, 22 nt, Human
ucagagggggacugcugcugcc

SEQ ID NO: 3717280 - RNA, 19 nt, Human
ucagaggguguccugcacc

SEQ ID NO: 3717281 - RNA, 18 nt, Human
ucagaguaagcugcuuuu

SEQ ID NO: 3717282 - RNA, 17 nt, Human
ucagaguccaggcccca

SEQ ID NO: 3717283 - RNA, 17 nt, Human
ucagaguccuuaaaaug

SEQ ID NO: 3717284 - RNA, 20 nt, Human
ucagagugacuacacacagu

SEQ ID NO: 3717285 - RNA, 20 nt, Human
ucagaguucuauacuguaaa

SEQ ID NO: 3717286 - RNA, 22 nt, Human
ucagauaacuguuauuuauaau

SEQ ID NO: 3717287 - RNA, 12 nt, Human
ucagauacauca

SEQ ID NO: 3717288 - RNA, 16 nt, Human
ucagauacaucacugc

SEQ ID NO: 3717289 - RNA, 17 nt, Human
ucagauacaucacugcu

SEQ ID NO: 3717290 - RNA, 21 nt, Human
ucagauacaucacugcuugau

SEQ ID NO: 3717291 - RNA, 14 nt, Human
ucagauauaaaaga

SEQ ID NO: 3717292 - RNA, 18 nt, Human
ucagauauaaaagacuga

SEQ ID NO: 3717293 - RNA, 16 nt, Human
ucagauauauuuuuca

SEQ ID NO: 3717294 - RNA, 23 nt, Human
ucagauaucuuggacaaaucaca

SEQ ID NO: 3717295 - RNA, 17 nt, Human
ucagauaugauucaaau

SEQ ID NO: 3717296 - RNA, 13 nt, Human
ucagauauuuaua

SEQ ID NO: 3717297 - RNA, 21 nt, Human
ucagauauuuauauuuuuauu

SEQ ID NO: 3717298 - RNA, 21 nt, Human
gcucuacuggucuuguggaau

SEQ ID NO: 3717299 - RNA, 22 nt, Human
gcucuagaucauaaggcuucaa

SEQ ID NO: 3717300 - RNA, 14 nt, Human
gcucuagccugggc

SEQ ID NO: 3717301 - RNA, 22 nt, Human
gcucuaggguugcuggagccug

SEQ ID NO: 3717302 - RNA, 15 nt, Human
gcucuagugccuucu

SEQ ID NO: 3717303 - RNA, 14 nt, Human
gcucuagugggaca

SEQ ID NO: 3717304 - RNA, 21 nt, Human
gcucuagugggacagcccaga

SEQ ID NO: 3717305 - RNA, 21 nt, Human
gcucuaucuugcucuguaauc

SEQ ID NO: 3717306 - RNA, 22 nt, Human
gcucuaucuugcucuguaaucu

SEQ ID NO: 3717307 - RNA, 14 nt, Human
gcucuaugagucua

SEQ ID NO: 3717308 - RNA, 21 nt, Human
gcucuaugagucuagauguuu

SEQ ID NO: 3717309 - RNA, 15 nt, Human
gcucuauguuuacaa

SEQ ID NO: 3717310 - RNA, 21 nt, Human
gcucuauuaugaaugugaagc

SEQ ID NO: 3717311 - RNA, 23 nt, Human
gcucuauuaugaaugugaagccu

SEQ ID NO: 3717312 - RNA, 17 nt, Human
gcucuauuguagcauuu

SEQ ID NO: 3717313 - RNA, 19 nt, Human
gcucucaacccaggagcau

SEQ ID NO: 3717314 - RNA, 17 nt, Human
gcucucaccuggcccug

SEQ ID NO: 3717315 - RNA, 17 nt, Human
gcucucagccaacgagu

SEQ ID NO: 3717316 - RNA, 18 nt, Human
gcucucagcucagcgcca

SEQ ID NO: 3717317 - RNA, 17 nt, Human
gcucucaggccagcugc

SEQ ID NO: 3717318 - RNA, 22 nt, Human
gcucucaguuccgauuucccag

SEQ ID NO: 3717319 - RNA, 12 nt, Human
gcucucaguucu

SEQ ID NO: 3717320 - RNA, 14 nt, Human
gcucucaucugagg

SEQ ID NO: 3717321 - RNA, 22 nt, Human
gcucucaucugaggcauccagc

SEQ ID NO: 3717322 - RNA, 19 nt, Human
gcucuccaagugccagagg

SEQ ID NO: 3717323 - RNA, 20 nt, Human
gcucuccaagugccagaggu

SEQ ID NO: 3717324 - RNA, 13 nt, Human
gcucuccaccuca

SEQ ID NO: 3717325 - RNA, 16 nt, Human
gcucuccaccucagcc

SEQ ID NO: 3717326 - RNA, 17 nt, Human
gcucuccagccugggag

SEQ ID NO: 3717327 - RNA, 13 nt, Human
gcucuccagcucc

SEQ ID NO: 3717328 - RNA, 15 nt, Human
gcucuccagcuccaa

SEQ ID NO: 3717329 - RNA, 19 nt, Human
gcucuccagucaggaggca

SEQ ID NO: 3717330 - RNA, 12 nt, Human
gcucuccauucu

SEQ ID NO: 3717331 - RNA, 19 nt, Human
gcucuccauucugcuccuu

SEQ ID NO: 3717332 - RNA, 19 nt, Human
gcucuccccugcccugcug

SEQ ID NO: 3717333 - RNA, 20 nt, Human
gcucucccucuggcccugcc

SEQ ID NO: 3717334 - RNA, 13 nt, Human
gcucuccgaccag

SEQ ID NO: 3717335 - RNA, 19 nt, Human
gcucuccggggccauuugc

SEQ ID NO: 3717336 - RNA, 19 nt, Human
gcucuccucagaagaaaga

SEQ ID NO: 3717337 - RNA, 23 nt, Human
gcucuccucuucuacucacuuuu

SEQ ID NO: 3717338 - RNA, 14 nt, Human
gcucuccugacuuu

SEQ ID NO: 3717339 - RNA, 14 nt, Human
gcucuccuggcccu

SEQ ID NO: 3717340 - RNA, 13 nt, Human
gcucuccuggcuu

SEQ ID NO: 3717341 - RNA, 12 nt, Human
gcucuccuuccu

SEQ ID NO: 3717342 - RNA, 16 nt, Human
gcucucgcggccucuu

SEQ ID NO: 3717343 - RNA, 19 nt, Human
gcucucggaacugcaugcu

SEQ ID NO: 3717344 - RNA, 18 nt, Human
gcucucuaggccucucca

SEQ ID NO: 3717345 - RNA, 19 nt, Human
gcucucucauugucugugu

SEQ ID NO: 3717346 - RNA, 13 nt, Human
gcucucuccagga

SEQ ID NO: 3717347 - RNA, 21 nt, Human
gcucucugaguccuggcccaa

SEQ ID NO: 3717348 - RNA, 13 nt, Human
gcucucugcagcc

SEQ ID NO: 3717349 - RNA, 18 nt, Human
gcucucugcagccagccc

SEQ ID NO: 3717350 - RNA, 22 nt, Human
gcucucugcagccagcccagcc

SEQ ID NO: 3717351 - RNA, 14 nt, Human
gcucucugcccugu

SEQ ID NO: 3717352 - RNA, 13 nt, Human
gcucucugcugua

SEQ ID NO: 3717353 - RNA, 12 nt, Human
gcucucuggccu

SEQ ID NO: 3717354 - RNA, 14 nt, Human
gcucucuggccuuc

SEQ ID NO: 3717355 - RNA, 17 nt, Human
gcucucuggccuucggc

SEQ ID NO: 3717356 - RNA, 19 nt, Human
gcucucugugggcuggcag

SEQ ID NO: 3717357 - RNA, 12 nt, Human
gcucucuuccug

SEQ ID NO: 3717358 - RNA, 15 nt, Human
gcucucuuccugccc

SEQ ID NO: 3717359 - RNA, 19 nt, Human
gcucucuuccugccccucu

SEQ ID NO: 3717360 - RNA, 22 nt, Human
gcucucuuccugccccucuuuc

SEQ ID NO: 3717361 - RNA, 15 nt, Human
gcucucuuucugucu

SEQ ID NO: 3717362 - RNA, 18 nt, Human
gcucucuuuucuguacuu

SEQ ID NO: 3717363 - RNA, 19 nt, Human
gcucucuuuucuguacuuc

SEQ ID NO: 3717364 - RNA, 17 nt, Human
gcucugaaagagaaaca

SEQ ID NO: 3717365 - RNA, 15 nt, Human
gcucugaaagccagc

SEQ ID NO: 3717366 - RNA, 23 nt, Human
gcucugaagucacaucacaggac

SEQ ID NO: 3717367 - RNA, 22 nt, Human
gcucugaccacuugaggccuga

SEQ ID NO: 3717368 - RNA, 17 nt, Human
gcucugacccagugaga

SEQ ID NO: 3717369 - RNA, 11 nt, Human
gcucugagaac

SEQ ID NO: 3717370 - RNA, 16 nt, Human
gcucugagaggcccug

SEQ ID NO: 3717371 - RNA, 17 nt, Human
gcucugagaggcccugg

SEQ ID NO: 3717372 - RNA, 21 nt, Human
gcucugagcaaauguggcucc

SEQ ID NO: 3717373 - RNA, 17 nt, Human
gcucugagcgccuccau

SEQ ID NO: 3717374 - RNA, 11 nt, Human
gcucugaggga

SEQ ID NO: 3717375 - RNA, 20 nt, Human
gcucugaucauccacugugc

SEQ ID NO: 3717376 - RNA, 22 nt, Human
gcucugaucauccacugugcca

SEQ ID NO: 3717377 - RNA, 13 nt, Human
gcucugaucccuc

SEQ ID NO: 3717378 - RNA, 23 nt, Human
gcucugaugaaaaauugcugacu

SEQ ID NO: 3717379 - RNA, 19 nt, Human
gcucugaugcaucagaaag

SEQ ID NO: 3717380 - RNA, 15 nt, Human
gcucugcaaaaggag

SEQ ID NO: 3717381 - RNA, 23 nt, Human
gcucugcaauuccccucugcugc

SEQ ID NO: 3717382 - RNA, 13 nt, Human
gcucugcacagau

SEQ ID NO: 3717383 - RNA, 14 nt, Human
gcucugcacagaug

SEQ ID NO: 3717384 - RNA, 15 nt, Human
gcucugcaccccucu

SEQ ID NO: 3717385 - RNA, 14 nt, Human
gcucugcaggcacc

SEQ ID NO: 3717386 - RNA, 18 nt, Human
gcucugcaggcaccuuag

SEQ ID NO: 3717387 - RNA, 18 nt, Human
gcucugcaguccuacuca

SEQ ID NO: 3717388 - RNA, 17 nt, Human
gcucugcaugcggccca

SEQ ID NO: 3717389 - RNA, 21 nt, Human
gcucugcaugcggcccagccc

SEQ ID NO: 3717390 - RNA, 23 nt, Human
gcucugccaacuucuucagagcu

SEQ ID NO: 3717391 - RNA, 17 nt, Human
gcucugccaguccuguc

SEQ ID NO: 3717392 - RNA, 12 nt, Human
gcucugcccaga

SEQ ID NO: 3717393 - RNA, 16 nt, Human
gcucugcccagagcug

SEQ ID NO: 3717394 - RNA, 18 nt, Human
gcucugcccagagcuggg

SEQ ID NO: 3717395 - RNA, 21 nt, Human
gcucugccccagaggccucuc

SEQ ID NO: 3717396 - RNA, 15 nt, Human
gcucugccccagcuc

SEQ ID NO: 3717397 - RNA, 23 nt, Human
gcucugcccuugguuaggcauug

SEQ ID NO: 3717398 - RNA, 17 nt, Human
gcucugccgucucugga

SEQ ID NO: 3717399 - RNA, 15 nt, Human
gcucugccucccauc

SEQ ID NO: 3717400 - RNA, 22 nt, Human
gcucugccucccaucacccgcu

SEQ ID NO: 3717401 - RNA, 22 nt, Human
gcucugccuucgaggucagagg

SEQ ID NO: 3717402 - RNA, 16 nt, Human
gcucugccuuugcucu

SEQ ID NO: 3717403 - RNA, 20 nt, Human
gcucugcgucgguccuggug

SEQ ID NO: 3717404 - RNA, 21 nt, Human
gcucugcgucgguccuggugc

SEQ ID NO: 3717405 - RNA, 21 nt, Human
gcucugcuccucuccccagca

SEQ ID NO: 3717406 - RNA, 19 nt, Human
gcucugcugacagacacag

SEQ ID NO: 3717407 - RNA, 23 nt, Human
gcucugcugacagacacaggccc

SEQ ID NO: 3717408 - RNA, 15 nt, Human
gcucugcuggccugg

SEQ ID NO: 3717409 - RNA, 18 nt, Human
gcucugcuggccuggccg

SEQ ID NO: 3717410 - RNA, 23 nt, Human
gcucugcugugggcacaggucag

SEQ ID NO: 3717411 - RNA, 21 nt, Human
gcucugcuugacaacaucuga

SEQ ID NO: 3717412 - RNA, 19 nt, Human
gcucugcuugccgaaacug

SEQ ID NO: 3717413 - RNA, 20 nt, Human
gcucugcuugccgaaacugg

SEQ ID NO: 3717414 - RNA, 22 nt, Human
gcucuggaaaaugugacccaga

SEQ ID NO: 3717415 - RNA, 20 nt, Human
gcucuggacagccccacccu

SEQ ID NO: 3717416 - RNA, 11 nt, Human
gcucuggacca

SEQ ID NO: 3717417 - RNA, 17 nt, Human
gcucuggaccagccugu

SEQ ID NO: 3717418 - RNA, 13 nt, Human
gcucuggaccugc

SEQ ID NO: 3717419 - RNA, 17 nt, Human
gcucuggaccugccccc

SEQ ID NO: 3717420 - RNA, 18 nt, Human
gcucuggagccaccuguc

SEQ ID NO: 3717421 - RNA, 16 nt, Human
gcucuggagcccacug

SEQ ID NO: 3717422 - RNA, 18 nt, Human
gcucuggauaacaagacu

SEQ ID NO: 3717423 - RNA, 21 nt, Human
gcucuggcucuccccaauauc

SEQ ID NO: 3717424 - RNA, 16 nt, Human
gcucuggcugaacccu

SEQ ID NO: 3717425 - RNA, 22 nt, Human
gcucuggcugaacccugugcug

SEQ ID NO: 3717426 - RNA, 15 nt, Human
gcucugggagaggau

SEQ ID NO: 3717427 - RNA, 21 nt, Human
gcucugggauagcugacccag

SEQ ID NO: 3717428 - RNA, 15 nt, Human
gcucugguccauaga

SEQ ID NO: 3717429 - RNA, 23 nt, Human
gcucuguaaguagaugcauuugg

SEQ ID NO: 3717430 - RNA, 14 nt, Human
gcucuguccccagc

SEQ ID NO: 3717431 - RNA, 17 nt, Human
gcucuguccccagccug

SEQ ID NO: 3717432 - RNA, 19 nt, Human
gcucugucuacuugcucag

SEQ ID NO: 3717433 - RNA, 21 nt, Human
gcucugucuacuugcucaggu

SEQ ID NO: 3717434 - RNA, 19 nt, Human
gcucugucuugguagguuu

SEQ ID NO: 3717435 - RNA, 17 nt, Human
gcucugugcccacccuc

SEQ ID NO: 3717436 - RNA, 16 nt, Human
gcucugugcugacccu

SEQ ID NO: 3717437 - RNA, 20 nt, Human
gcucuguggcgagccauuug

SEQ ID NO: 3717438 - RNA, 14 nt, Human
gcucugugggcugc

SEQ ID NO: 3717439 - RNA, 13 nt, Human
gcucuguggguga

SEQ ID NO: 3717440 - RNA, 17 nt, Human
gcucuguuacccagggu

SEQ ID NO: 3717441 - RNA, 18 nt, Human
gcucuguucuuccucagc

SEQ ID NO: 3717442 - RNA, 21 nt, Human
gcucuguucuuccucagccag

SEQ ID NO: 3717443 - RNA, 22 nt, Human
gcucuguucuuccucagccagc

SEQ ID NO: 3717444 - RNA, 18 nt, Human
gcucuguugcccaggcug

SEQ ID NO: 3717445 - RNA, 21 nt, Human
gcucuguuuguggggugacgg

SEQ ID NO: 3717446 - RNA, 13 nt, Human
gcucuuaaaugua

SEQ ID NO: 3717447 - RNA, 20 nt, Human
aacuugcugcaguaugaaaa

SEQ ID NO: 3717448 - RNA, 12 nt, Human
aacuugcugccu

SEQ ID NO: 3717449 - RNA, 14 nt, Human
aacuugcuuaaaug

SEQ ID NO: 3717450 - RNA, 16 nt, Human
aacuugcuuaaaugug

SEQ ID NO: 3717451 - RNA, 18 nt, Human
aacuugcuuaaaugugaa

SEQ ID NO: 3717452 - RNA, 20 nt, Human
aacuugcuuaaaugugaauu

SEQ ID NO: 3717453 - RNA, 21 nt, Human
aacuugcuuaaaugugaauua

SEQ ID NO: 3717454 - RNA, 14 nt, Human
aacuugcuuaaauu

SEQ ID NO: 3717455 - RNA, 20 nt, Human
aacuugcuuaaauuucuuau

SEQ ID NO: 3717456 - RNA, 14 nt, Human
aacuuggaaauagu

SEQ ID NO: 3717457 - RNA, 14 nt, Human
aacuuggauucucu

SEQ ID NO: 3717458 - RNA, 17 nt, Human
aacuuggcgcugccccu

SEQ ID NO: 3717459 - RNA, 21 nt, Human
aacuuggcucgaaucucugug

SEQ ID NO: 3717460 - RNA, 23 nt, Human
aacuugggagugugguuucuuuu

SEQ ID NO: 3717461 - RNA, 16 nt, Human
aacuugggcacaugcu

SEQ ID NO: 3717462 - RNA, 13 nt, Human
aacuuggggaaca

SEQ ID NO: 3717463 - RNA, 21 nt, Human
aacuuggggaguuaagaccug

SEQ ID NO: 3717464 - RNA, 23 nt, Human
aacuuggggaguuaagaccuggc

SEQ ID NO: 3717465 - RNA, 16 nt, Human
aacuugguucugcuuc

SEQ ID NO: 3717466 - RNA, 16 nt, Human
aacuugguuuugcuac

SEQ ID NO: 3717467 - RNA, 15 nt, Human
aacuuguaaaugugg

SEQ ID NO: 3717468 - RNA, 14 nt, Human
aacuuguagcugua

SEQ ID NO: 3717469 - RNA, 17 nt, Human
aacuuguagcuguaaaa

SEQ ID NO: 3717470 - RNA, 18 nt, Human
aacuuguagcuguaaaac

SEQ ID NO: 3717471 - RNA, 17 nt, Human
aacuugucacuugcaug

SEQ ID NO: 3717472 - RNA, 19 nt, Human
aacuuguccuagcacagau

SEQ ID NO: 3717473 - RNA, 19 nt, Human
aacuugucuaaauaaguuu

SEQ ID NO: 3717474 - RNA, 15 nt, Human
aacuugucucuucau

SEQ ID NO: 3717475 - RNA, 13 nt, Human
aacuugucuuaaa

SEQ ID NO: 3717476 - RNA, 17 nt, Human
aacuugucuuaaauaaa

SEQ ID NO: 3717477 - RNA, 18 nt, Human
aacuugucuuuggacccu

SEQ ID NO: 3717478 - RNA, 14 nt, Human
aacuugucuuuuca

SEQ ID NO: 3717479 - RNA, 11 nt, Human
aacuugugaau

SEQ ID NO: 3717480 - RNA, 13 nt, Human
aacuugugaaugc

SEQ ID NO: 3717481 - RNA, 16 nt, Human
aacuugugcccucccu

SEQ ID NO: 3717482 - RNA, 18 nt, Human
aacuuguuacuaaagaaa

SEQ ID NO: 3717483 - RNA, 15 nt, Human
aacuuguuauuguga

SEQ ID NO: 3717484 - RNA, 17 nt, Human
aacuuguuauugugaau

SEQ ID NO: 3717485 - RNA, 19 nt, Human
aacuuguuauugugaauga

SEQ ID NO: 3717486 - RNA, 16 nt, Human
aacuuguugaauuuau

SEQ ID NO: 3717487 - RNA, 17 nt, Human
aacuuguuugcugugaa

SEQ ID NO: 3717488 - RNA, 21 nt, Human
aacuuuaaaccuguagaauca

SEQ ID NO: 3717489 - RNA, 20 nt, Human
aacuuuaaaggauucuguau

SEQ ID NO: 3717490 - RNA, 18 nt, Human
aacuuuaaguuucaggau

SEQ ID NO: 3717491 - RNA, 12 nt, Human
aacuuuaaucaa

SEQ ID NO: 3717492 - RNA, 14 nt, Human
aacuuuaauguuuu

SEQ ID NO: 3717493 - RNA, 12 nt, Human
aacuuuaccaug

SEQ ID NO: 3717494 - RNA, 21 nt, Human
aacuuuagaagugcauuucug

SEQ ID NO: 3717495 - RNA, 21 nt, Human
aacuuuauacauuaguaaaug

SEQ ID NO: 3717496 - RNA, 23 nt, Human
aacuuuauacccagaaaguuauu

SEQ ID NO: 3717497 - RNA, 14 nt, Human
aacuuuauuaaaua

SEQ ID NO: 3717498 - RNA, 17 nt, Human
aacuuuauuaaauacaa

SEQ ID NO: 3717499 - RNA, 19 nt, Human
aacuuucaagaacuuguuu

SEQ ID NO: 3717500 - RNA, 17 nt, Human
aacuuucauuuuuuucc

SEQ ID NO: 3717501 - RNA, 16 nt, Human
aacuuuccaaacacca

SEQ ID NO: 3717502 - RNA, 19 nt, Human
aacuuuccuggaugucuga

SEQ ID NO: 3717503 - RNA, 14 nt, Human
aacuuugaaauaua

SEQ ID NO: 3717504 - RNA, 14 nt, Human
aacuuugaauaaag

SEQ ID NO: 3717505 - RNA, 23 nt, Human
aacuuugaauaaagaauacuuga

SEQ ID NO: 3717506 - RNA, 13 nt, Human
aacuuugaccucu

SEQ ID NO: 3717507 - RNA, 19 nt, Human
aacuuugaccucugcagca

SEQ ID NO: 3717508 - RNA, 20 nt, Human
aacuuugaccucugcagcaa

SEQ ID NO: 3717509 - RNA, 15 nt, Human
aacuuugcugagccu

SEQ ID NO: 3717510 - RNA, 15 nt, Human
aacuuuggaaccaga

SEQ ID NO: 3717511 - RNA, 24 nt, Human
aacuuuggaaccagacucuugccu

SEQ ID NO: 3717512 - RNA, 18 nt, Human
aacuuuguaaaaaucuuu

SEQ ID NO: 3717513 - RNA, 21 nt, Human
aacuuuguaaaaaucuuuuga

SEQ ID NO: 3717514 - RNA, 20 nt, Human
aacuuuguauaguuauguaa

SEQ ID NO: 3717515 - RNA, 11 nt, Human
aacuuuuaauu

SEQ ID NO: 3717516 - RNA, 22 nt, Human
aacuuuuaauuaaaugcucauc

SEQ ID NO: 3717517 - RNA, 16 nt, Human
aacuuuuauaaauuaa

SEQ ID NO: 3717518 - RNA, 20 nt, Human
aacuuuuauaaauuaaauau

SEQ ID NO: 3717519 - RNA, 14 nt, Human
aacuuuuaucuauu

SEQ ID NO: 3717520 - RNA, 20 nt, Human
aacuuuucaaggcuuauauu

SEQ ID NO: 3717521 - RNA, 18 nt, Human
aacuuuuccccuguccug

SEQ ID NO: 3717522 - RNA, 12 nt, Human
aacuuuucucag

SEQ ID NO: 3717523 - RNA, 12 nt, Human
aacuuuucugau

SEQ ID NO: 3717524 - RNA, 13 nt, Human
aacuuuucugaua

SEQ ID NO: 3717525 - RNA, 14 nt, Human
aacuuuucugauag

SEQ ID NO: 3717526 - RNA, 21 nt, Human
aacuuuucuuaaaaaguuaua

SEQ ID NO: 3717527 - RNA, 15 nt, Human
aacuuuuguaaagaa

SEQ ID NO: 3717528 - RNA, 11 nt, Human
aacuuuuguac

SEQ ID NO: 3717529 - RNA, 18 nt, Human
aacuuuuguacugaauuu

SEQ ID NO: 3717530 - RNA, 19 nt, Human
aacuuuuguacugaauuuu

SEQ ID NO: 3717531 - RNA, 20 nt, Human
aacuuuuguacugaauuuuu

SEQ ID NO: 3717532 - RNA, 15 nt, Human
aacuuuugugugaaa

SEQ ID NO: 3717533 - RNA, 15 nt, Human
aacuuuuuaaagagu

SEQ ID NO: 3717534 - RNA, 16 nt, Human
aacuuuuuauauucuc

SEQ ID NO: 3717535 - RNA, 14 nt, Human
aacuuuuuauugcc

SEQ ID NO: 3717536 - RNA, 21 nt, Human
aacuuuuucuuuucccucaau

SEQ ID NO: 3717537 - RNA, 17 nt, Human
aacuuuuuuaaauaaac

SEQ ID NO: 3717538 - RNA, 17 nt, Human
aacuuuuuuucaaugug

SEQ ID NO: 3717539 - RNA, 14 nt, Human
aacuuuuuuuuaag

SEQ ID NO: 3717540 - RNA, 20 nt, Human
aacuuuuuuuuaaguuacac

SEQ ID NO: 3717541 - RNA, 16 nt, Human
aacuuuuuuuugagaa

SEQ ID NO: 3717542 - RNA, 18 nt, Human
aacuuuuuuuuuucuuua

SEQ ID NO: 3717543 - RNA, 20 nt, Human
aagaaaaaaaaaaagaaaga

SEQ ID NO: 3717544 - RNA, 21 nt, Human
aagaaaaaaaaaaagaaagaa

SEQ ID NO: 3717545 - RNA, 19 nt, Human
aagaaaaaaaaaagaagaa

SEQ ID NO: 3717546 - RNA, 20 nt, Human
aagaaaaaaaaaagaagaag

SEQ ID NO: 3717547 - RNA, 15 nt, Human
aagaaaaaaaaaugc

SEQ ID NO: 3717548 - RNA, 20 nt, Human
aagaaaaaaaauaacacaga

SEQ ID NO: 3717549 - RNA, 20 nt, Human
aagaaaaaaauaauuuuaug

SEQ ID NO: 3717550 - RNA, 22 nt, Human
aagaaaaaaauacuauuuaaga

SEQ ID NO: 3717551 - RNA, 15 nt, Human
aagaaaaaaauguau

SEQ ID NO: 3717552 - RNA, 16 nt, Human
aagaaaaaaauguauu

SEQ ID NO: 3717553 - RNA, 23 nt, Human
aagaaaaaaauguauuuuauguu

SEQ ID NO: 3717554 - RNA, 18 nt, Human
aagaaaaaaauugaaaug

SEQ ID NO: 3717555 - RNA, 23 nt, Human
aagaaaaaaccguguuugucucu

SEQ ID NO: 3717556 - RNA, 18 nt, Human
aagaaaaaagagaaaaga

SEQ ID NO: 3717557 - RNA, 20 nt, Human
aagaaaaacaaacucguuuu

SEQ ID NO: 3717558 - RNA, 12 nt, Human
aagaaaaacuuu

SEQ ID NO: 3717559 - RNA, 17 nt, Human
aagaaaaagcaaaaggc

SEQ ID NO: 3717560 - RNA, 19 nt, Human
aagaaaaaggaugcacaga

SEQ ID NO: 3717561 - RNA, 20 nt, Human
aagaaaaaggaugcacagag

SEQ ID NO: 3717562 - RNA, 22 nt, Human
aagaaaaaggaugcacagaguu

SEQ ID NO: 3717563 - RNA, 16 nt, Human
aagaaaaauaaagaaa

SEQ ID NO: 3717564 - RNA, 14 nt, Human
aagaaaaaucaugu

SEQ ID NO: 3717565 - RNA, 19 nt, Human
aagaaaaaucauguuugcu

SEQ ID NO: 3717566 - RNA, 12 nt, Human
aagaaaaaugug

SEQ ID NO: 3717567 - RNA, 11 nt, Human
aagaaaacacu

SEQ ID NO: 3717568 - RNA, 16 nt, Human
aagaaaacaucuauuc

SEQ ID NO: 3717569 - RNA, 17 nt, Human
aagaaaacaucuuuaag

SEQ ID NO: 3717570 - RNA, 13 nt, Human
aagaaaaguauuu

SEQ ID NO: 3717571 - RNA, 22 nt, Human
aagaaaaguauuuugaaguuua

SEQ ID NO: 3717572 - RNA, 23 nt, Human
aagaaaaguauuuugaaguuuac

SEQ ID NO: 3717573 - RNA, 19 nt, Human
aagaaaagugaaugcucaa

SEQ ID NO: 3717574 - RNA, 15 nt, Human
aagaaaagugcauau

SEQ ID NO: 3717575 - RNA, 15 nt, Human
aagaaaagugggcca

SEQ ID NO: 3717576 - RNA, 16 nt, Human
aagaaaagugggccag

SEQ ID NO: 3717577 - RNA, 13 nt, Human
aagaaaauaaaaa

SEQ ID NO: 3717578 - RNA, 14 nt, Human
aagaaaauaaaauu

SEQ ID NO: 3717579 - RNA, 15 nt, Human
aagaaaauaaaauua

SEQ ID NO: 3717580 - RNA, 16 nt, Human
aagaaaauacaauaaa

SEQ ID NO: 3717581 - RNA, 18 nt, Human
aagaaaauacaauaaacu

SEQ ID NO: 3717582 - RNA, 13 nt, Human
aagaaaauaugca

SEQ ID NO: 3717583 - RNA, 11 nt, Human
aagaaaauauu

SEQ ID NO: 3717584 - RNA, 13 nt, Human
aagaaaauauuuu

SEQ ID NO: 3717585 - RNA, 14 nt, Human
aagaaaauauuuug

SEQ ID NO: 3717586 - RNA, 15 nt, Human
aagaaaauauuuugu

SEQ ID NO: 3717587 - RNA, 20 nt, Human
aagaaaauauuuugucuaaa

SEQ ID NO: 3717588 - RNA, 20 nt, Human
aagaaaaucauauugcuucu

SEQ ID NO: 3717589 - RNA, 15 nt, Human
aagaaaauuccuaua

SEQ ID NO: 3717590 - RNA, 16 nt, Human
aagaaaauugcugugc

SEQ ID NO: 3717591 - RNA, 16 nt, Human
aagaaacaaacccguu

SEQ ID NO: 3717592 - RNA, 14 nt, Human
aagaaacaaagaug

SEQ ID NO: 3717593 - RNA, 16 nt, Human
aagaaacaagguuuuc

SEQ ID NO: 3717594 - RNA, 19 nt, Human
aagaaacagcuaugagagg

SEQ ID NO: 3717595 - RNA, 11 nt, Human
aagaaacauuu

SEQ ID NO: 3717596 - RNA, 14 nt, Human
aagaaacauuuaua

SEQ ID NO: 3717597 - RNA, 18 nt, Human
aagaaacccgacagaggg

SEQ ID NO: 3717598 - RNA, 20 nt, Human
uccacucaggccuccaucuu

SEQ ID NO: 3717599 - RNA, 14 nt, Human
uccacucaugugac

SEQ ID NO: 3717600 - RNA, 13 nt, Human
uccacucccacuu

SEQ ID NO: 3717601 - RNA, 14 nt, Human
uccacucguguguu

SEQ ID NO: 3717602 - RNA, 16 nt, Human
uccacucguguguuuc

SEQ ID NO: 3717603 - RNA, 17 nt, Human
uccacucuacccuccca

SEQ ID NO: 3717604 - RNA, 14 nt, Human
uccacucuccccca

SEQ ID NO: 3717605 - RNA, 16 nt, Human
uccacucucccccacc

SEQ ID NO: 3717606 - RNA, 22 nt, Human
uccacucucccccacccccucc

SEQ ID NO: 3717607 - RNA, 21 nt, Human
uccacucugcuucucugacuu

SEQ ID NO: 3717608 - RNA, 19 nt, Human
uccacucuggauucagccu

SEQ ID NO: 3717609 - RNA, 12 nt, Human
uccacugcccuc

SEQ ID NO: 3717610 - RNA, 13 nt, Human
uccacugccucug

SEQ ID NO: 3717611 - RNA, 10 nt, Human
uccacuggac

SEQ ID NO: 3717612 - RNA, 12 nt, Human
uccacuggacuu

SEQ ID NO: 3717613 - RNA, 16 nt, Human
uccacugggcacaacu

SEQ ID NO: 3717614 - RNA, 18 nt, Human
uccacugggguggccuga

SEQ ID NO: 3717615 - RNA, 17 nt, Human
uccacuggguguaaaca

SEQ ID NO: 3717616 - RNA, 22 nt, Human
uccacugguucuucuuggucuc

SEQ ID NO: 3717617 - RNA, 17 nt, Human
uccacugucacccucca

SEQ ID NO: 3717618 - RNA, 19 nt, Human
uccacugucacuguuucuc

SEQ ID NO: 3717619 - RNA, 23 nt, Human
uccacuuagaaauugcauuuccu

SEQ ID NO: 3717620 - RNA, 17 nt, Human
uccacuucugacagccu

SEQ ID NO: 3717621 - RNA, 14 nt, Human
uccacuucuuccuu

SEQ ID NO: 3717622 - RNA, 17 nt, Human
uccacuucuuccuuucu

SEQ ID NO: 3717623 - RNA, 18 nt, Human
uccacuucuuccuuucuc

SEQ ID NO: 3717624 - RNA, 20 nt, Human
uccacuucuuccuuucucuu

SEQ ID NO: 3717625 - RNA, 23 nt, Human
uccacuuggucugugagaugcua

SEQ ID NO: 3717626 - RNA, 14 nt, Human
uccacuuguucagg

SEQ ID NO: 3717627 - RNA, 14 nt, Human
uccacuuucagcug

SEQ ID NO: 3717628 - RNA, 13 nt, Human
uccacuuuguucu

SEQ ID NO: 3717629 - RNA, 14 nt, Human
uccagaaaacaaaa

SEQ ID NO: 3717630 - RNA, 18 nt, Human
uccagaaaaccccagcau

SEQ ID NO: 3717631 - RNA, 14 nt, Human
uccagaaaacugug

SEQ ID NO: 3717632 - RNA, 17 nt, Human
uccagaaacacccacag

SEQ ID NO: 3717633 - RNA, 16 nt, Human
uccagaaacuuguucu

SEQ ID NO: 3717634 - RNA, 11 nt, Human
uccagaaagaa

SEQ ID NO: 3717635 - RNA, 22 nt, Human
uccagaaaggauauuuaagaaa

SEQ ID NO: 3717636 - RNA, 22 nt, Human
uccagaaaugucccuuucuucu

SEQ ID NO: 3717637 - RNA, 23 nt, Human
uccagaaaugucuaaaugcugaa

SEQ ID NO: 3717638 - RNA, 20 nt, Human
uccagaacacggcucacgcu

SEQ ID NO: 3717639 - RNA, 19 nt, Human
uccagaaccacacuugaaa

SEQ ID NO: 3717640 - RNA, 22 nt, Human
uccagaacucacuggggccuac

SEQ ID NO: 3717641 - RNA, 18 nt, Human
uccagaagaagagaagcu

SEQ ID NO: 3717642 - RNA, 19 nt, Human
uccagaagaagagaagcug

SEQ ID NO: 3717643 - RNA, 21 nt, Human
uccagaagaagagaagcugcu

SEQ ID NO: 3717644 - RNA, 22 nt, Human
uccagaagaagagaagcugcug

SEQ ID NO: 3717645 - RNA, 23 nt, Human
uccagaagaagagaagcugcuga

SEQ ID NO: 3717646 - RNA, 16 nt, Human
uccagaagaauauuca

SEQ ID NO: 3717647 - RNA, 17 nt, Human
uccagaagaauauucag

SEQ ID NO: 3717648 - RNA, 20 nt, Human
uccagaagaauauucaggac

SEQ ID NO: 3717649 - RNA, 21 nt, Human
uccagaagaauauucaggacu

SEQ ID NO: 3717650 - RNA, 16 nt, Human
uccagaagccucuggc

SEQ ID NO: 3717651 - RNA, 23 nt, Human
uccagaagggguuuggucuggga

SEQ ID NO: 3717652 - RNA, 20 nt, Human
uccagaagugugacuggcua

SEQ ID NO: 3717653 - RNA, 14 nt, Human
uccagaaucuaaag

SEQ ID NO: 3717654 - RNA, 19 nt, Human
uccagaaugaagaauucag

SEQ ID NO: 3717655 - RNA, 16 nt, Human
uccagaaugcuguaca

SEQ ID NO: 3717656 - RNA, 18 nt, Human
uccagaauggucuuucua

SEQ ID NO: 3717657 - RNA, 16 nt, Human
uccagaauuucccaaa

SEQ ID NO: 3717658 - RNA, 22 nt, Human
uccagaauuuggaaauccuagu

SEQ ID NO: 3717659 - RNA, 13 nt, Human
uccagacacaugu

SEQ ID NO: 3717660 - RNA, 18 nt, Human
uccagacagccuguaucu

SEQ ID NO: 3717661 - RNA, 14 nt, Human
uccagacccccacc

SEQ ID NO: 3717662 - RNA, 16 nt, Human
uccagacccccacccc

SEQ ID NO: 3717663 - RNA, 21 nt, Human
uccagacccccaccccuuccc

SEQ ID NO: 3717664 - RNA, 14 nt, Human
uccagacccccagc

SEQ ID NO: 3717665 - RNA, 15 nt, Human
uccagacccccagca

SEQ ID NO: 3717666 - RNA, 15 nt, Human
uccagaccccuggcu

SEQ ID NO: 3717667 - RNA, 17 nt, Human
uccagaccccuggcuuu

SEQ ID NO: 3717668 - RNA, 15 nt, Human
uccagaccugaagaa

SEQ ID NO: 3717669 - RNA, 22 nt, Human
uccagaccugauccuggaggcc

SEQ ID NO: 3717670 - RNA, 21 nt, Human
uccagaccuuguucacacucu

SEQ ID NO: 3717671 - RNA, 18 nt, Human
uccagacucagagcucuc

SEQ ID NO: 3717672 - RNA, 15 nt, Human
uccagacucucugug

SEQ ID NO: 3717673 - RNA, 19 nt, Human
uccagacuuccuugagaca

SEQ ID NO: 3717674 - RNA, 14 nt, Human
uccagagacaacag

SEQ ID NO: 3717675 - RNA, 14 nt, Human
uccagagagaccga

SEQ ID NO: 3717676 - RNA, 15 nt, Human
uccagagaguccucu

SEQ ID NO: 3717677 - RNA, 15 nt, Human
uccagagaguggcuc

SEQ ID NO: 3717678 - RNA, 22 nt, Human
uccagagaguggcuccucccgg

SEQ ID NO: 3717679 - RNA, 19 nt, Human
uccagagauucauuuucua

SEQ ID NO: 3717680 - RNA, 20 nt, Human
uccagagcauuccagucagg

SEQ ID NO: 3717681 - RNA, 17 nt, Human
uccagagccccacagcc

SEQ ID NO: 3717682 - RNA, 23 nt, Human
uccagagcggaggcugugugccu

SEQ ID NO: 3717683 - RNA, 16 nt, Human
uccagagcugcuuccc

SEQ ID NO: 3717684 - RNA, 17 nt, Human
uccagagggcacucugc

SEQ ID NO: 3717685 - RNA, 23 nt, Human
uccagaucccaggccccuggagg

SEQ ID NO: 3717686 - RNA, 17 nt, Human
uccagaugcagggcagu

SEQ ID NO: 3717687 - RNA, 21 nt, Human
uccagaugccuucuccagaca

SEQ ID NO: 3717688 - RNA, 21 nt, Human
uccagauggucauccagacuc

SEQ ID NO: 3717689 - RNA, 14 nt, Human
uccagaugguggga

SEQ ID NO: 3717690 - RNA, 13 nt, Human
uccagaugugaug

SEQ ID NO: 3717691 - RNA, 19 nt, Human
uccagaugugaugcuugau

SEQ ID NO: 3717692 - RNA, 21 nt, Human
uccagauguggcuacugacau

SEQ ID NO: 3717693 - RNA, 18 nt, Human
uccagauguuuccagacu

SEQ ID NO: 3717694 - RNA, 19 nt, Human
uccagauguuuccagacuu

SEQ ID NO: 3717695 - RNA, 19 nt, Human
uccagauuuacacugggag

SEQ ID NO: 3717696 - RNA, 20 nt, Human
uccagauuuacacugggaga

SEQ ID NO: 3717697 - RNA, 22 nt, Human
uccagauuuuuuacagcugccu

SEQ ID NO: 3717698 - RNA, 18 nt, Human
uccagcaaaucaagcuga

SEQ ID NO: 3717699 - RNA, 18 nt, Human
uccagcaacuucuucucc

SEQ ID NO: 3717700 - RNA, 20 nt, Human
uccagcaauucuccugccuc

SEQ ID NO: 3717701 - RNA, 15 nt, Human
uccagcaauugugug

SEQ ID NO: 3717702 - RNA, 21 nt, Human
uccagcacaaccuucaagcug

SEQ ID NO: 3717703 - RNA, 16 nt, Human
uccagcagauuauuca

SEQ ID NO: 3717704 - RNA, 22 nt, Human
uccagcaggagggacagucuca

SEQ ID NO: 3717705 - RNA, 12 nt, Human
uccagcaggccc

SEQ ID NO: 3717706 - RNA, 22 nt, Human
uccagcaggcccaugggaggcu

SEQ ID NO: 3717707 - RNA, 12 nt, Human
uccagcagggaa

SEQ ID NO: 3717708 - RNA, 17 nt, Human
uccagcagucucugccu

SEQ ID NO: 3717709 - RNA, 18 nt, Human
uccagcagucucugccuu

SEQ ID NO: 3717710 - RNA, 19 nt, Human
uccagcagucucugccuug

SEQ ID NO: 3717711 - RNA, 14 nt, Human
uccagcaguuuuca

SEQ ID NO: 3717712 - RNA, 16 nt, Human
uccagcauucccaggu

SEQ ID NO: 3717713 - RNA, 17 nt, Human
uccagcauugcuggacu

SEQ ID NO: 3717714 - RNA, 23 nt, Human
uccagccaaagccuccuccagcc

SEQ ID NO: 3717715 - RNA, 13 nt, Human
uccagccaacccc

SEQ ID NO: 3717716 - RNA, 20 nt, Human
uccagccaaccccuguggag

SEQ ID NO: 3717717 - RNA, 23 nt, Human
uccagccaaccccuguggagccc

SEQ ID NO: 3717718 - RNA, 17 nt, Human
uccagccacagaaaaga

SEQ ID NO: 3717719 - RNA, 13 nt, Human
uccagccagcgcc

SEQ ID NO: 3717720 - RNA, 20 nt, Human
uccagccagcgccucccucc

SEQ ID NO: 3717721 - RNA, 13 nt, Human
uccagccagggcu

SEQ ID NO: 3717722 - RNA, 19 nt, Human
uccagccaucaagagacug

SEQ ID NO: 3717723 - RNA, 24 nt, Human
uccagccaucaagagacugaguca

SEQ ID NO: 3717724 - RNA, 15 nt, Human
uccagccaucaccuu

SEQ ID NO: 3717725 - RNA, 14 nt, Human
uccagccccucugg

SEQ ID NO: 3717726 - RNA, 16 nt, Human
uccagccccucugguc

SEQ ID NO: 3717727 - RNA, 18 nt, Human
uccagccccucuggucgc

SEQ ID NO: 3717728 - RNA, 18 nt, Human
uccagccccucuuggaga

SEQ ID NO: 3717729 - RNA, 14 nt, Human
uccagccccuggau

SEQ ID NO: 3717730 - RNA, 17 nt, Human
uccagccccuggaugca

SEQ ID NO: 3717731 - RNA, 16 nt, Human
uccagccccuguccca

SEQ ID NO: 3717732 - RNA, 23 nt, Human
uccagccccugucccacccccuu

SEQ ID NO: 3717733 - RNA, 13 nt, Human
uccagcccgggag

SEQ ID NO: 3717734 - RNA, 19 nt, Human
uccagcccuauucugccac

SEQ ID NO: 3717735 - RNA, 15 nt, Human
uccagcccuggcuga

SEQ ID NO: 3717736 - RNA, 22 nt, Human
uccagccgccauugccaccagg

SEQ ID NO: 3717737 - RNA, 11 nt, Human
uccagccucac

SEQ ID NO: 3717738 - RNA, 13 nt, Human
uccagccucagcc

SEQ ID NO: 3717739 - RNA, 15 nt, Human
uccagccucagcccc

SEQ ID NO: 3717740 - RNA, 13 nt, Human
uccagccugccac

SEQ ID NO: 3717741 - RNA, 16 nt, Human
uccagccugccuggca

SEQ ID NO: 3717742 - RNA, 11 nt, Human
uccagccuggg

SEQ ID NO: 3717743 - RNA, 12 nt, Human
uccagccugggc

SEQ ID NO: 3717744 - RNA, 17 nt, Human
uccagccugggcgacag

SEQ ID NO: 3717745 - RNA, 20 nt, Human
uccagccugggcgacagagc

SEQ ID NO: 3717746 - RNA, 22 nt, Human
uccagcgaucucuccacugugc

SEQ ID NO: 3717747 - RNA, 15 nt, Human
uccagcucaccagcc

SEQ ID NO: 3717748 - RNA, 21 nt, Human
ucagaucacugaauuuauaaa

SEQ ID NO: 3717749 - RNA, 21 nt, Human
ucagaucauuucaaaacucau

SEQ ID NO: 3717750 - RNA, 15 nt, Human
ucagauccagggaca

SEQ ID NO: 3717751 - RNA, 16 nt, Human
ucagauccagggacag

SEQ ID NO: 3717752 - RNA, 12 nt, Human
ucagauccuacc

SEQ ID NO: 3717753 - RNA, 15 nt, Human
ucagauccuccucau

SEQ ID NO: 3717754 - RNA, 16 nt, Human
ucagauccuuguuuca

SEQ ID NO: 3717755 - RNA, 15 nt, Human
ucagaucucuaacuu

SEQ ID NO: 3717756 - RNA, 13 nt, Human
ucagaucugccua

SEQ ID NO: 3717757 - RNA, 21 nt, Human
ucagaucugccuaaggacuuc

SEQ ID NO: 3717758 - RNA, 18 nt, Human
ucagaucuuucuccuuga

SEQ ID NO: 3717759 - RNA, 21 nt, Human
ucagaugaacucuuagaaaug

SEQ ID NO: 3717760 - RNA, 13 nt, Human
ucagaugcuucug

SEQ ID NO: 3717761 - RNA, 19 nt, Human
ucagaugcuugcggcaaaa

SEQ ID NO: 3717762 - RNA, 20 nt, Human
ucagauggaaccgcaggaag

SEQ ID NO: 3717763 - RNA, 21 nt, Human
ucagauggaaccgcaggaagc

SEQ ID NO: 3717764 - RNA, 22 nt, Human
ucagauggauugauaauugcau

SEQ ID NO: 3717765 - RNA, 14 nt, Human
ucagauguaauguu

SEQ ID NO: 3717766 - RNA, 15 nt, Human
ucagauguaauguuu

SEQ ID NO: 3717767 - RNA, 17 nt, Human
ucagauguaauguuuuc

SEQ ID NO: 3717768 - RNA, 14 nt, Human
ucagaugucccuug

SEQ ID NO: 3717769 - RNA, 15 nt, Human
ucagaugucuucugc

SEQ ID NO: 3717770 - RNA, 14 nt, Human
ucagauguggagcc

SEQ ID NO: 3717771 - RNA, 18 nt, Human
ucagauguuaaaauaaau

SEQ ID NO: 3717772 - RNA, 15 nt, Human
ucagauguuuaaaac

SEQ ID NO: 3717773 - RNA, 12 nt, Human
ucagauguuuga

SEQ ID NO: 3717774 - RNA, 13 nt, Human
ucagauucaggca

SEQ ID NO: 3717775 - RNA, 21 nt, Human
ucagauucccagagcaaaaua

SEQ ID NO: 3717776 - RNA, 19 nt, Human
ucagauuccuuucccuuua

SEQ ID NO: 3717777 - RNA, 13 nt, Human
ucagauucuugca

SEQ ID NO: 3717778 - RNA, 14 nt, Human
ucagauucuugcau

SEQ ID NO: 3717779 - RNA, 15 nt, Human
ucagauugcauguga

SEQ ID NO: 3717780 - RNA, 18 nt, Human
ucagauuggacauaacug

SEQ ID NO: 3717781 - RNA, 15 nt, Human
ucagauuucucuuug

SEQ ID NO: 3717782 - RNA, 16 nt, Human
ucagauuucucuuuga

SEQ ID NO: 3717783 - RNA, 15 nt, Human
ucagauuucugagga

SEQ ID NO: 3717784 - RNA, 19 nt, Human
ucagauuucugguuguuau

SEQ ID NO: 3717785 - RNA, 14 nt, Human
ucagauuugcacaa

SEQ ID NO: 3717786 - RNA, 19 nt, Human
ucagauuugcacaaaaaga

SEQ ID NO: 3717787 - RNA, 16 nt, Human
ucagauuuuccugugg

SEQ ID NO: 3717788 - RNA, 14 nt, Human
ucagauuuuuuccu

SEQ ID NO: 3717789 - RNA, 20 nt, Human
ucagcaaaaaaguacuuaaa

SEQ ID NO: 3717790 - RNA, 13 nt, Human
ucagcaaaaagca

SEQ ID NO: 3717791 - RNA, 14 nt, Human
ucagcaaaaagcaa

SEQ ID NO: 3717792 - RNA, 15 nt, Human
ucagcaaaaagcaaa

SEQ ID NO: 3717793 - RNA, 20 nt, Human
ucagcaaaaagcaaaaucau

SEQ ID NO: 3717794 - RNA, 21 nt, Human
ucagcaaaaagcaaaaucauu

SEQ ID NO: 3717795 - RNA, 21 nt, Human
ucagcaaacaggaucaguuaa

SEQ ID NO: 3717796 - RNA, 22 nt, Human
ucagcaaaccauuuuuaaagua

SEQ ID NO: 3717797 - RNA, 20 nt, Human
ucagcaaacuuguugaauuu

SEQ ID NO: 3717798 - RNA, 23 nt, Human
ucagcaaauuaauuggcagcaga

SEQ ID NO: 3717799 - RNA, 19 nt, Human
ucagcaagacuucucuuug

SEQ ID NO: 3717800 - RNA, 13 nt, Human
ucagcaaggccac

SEQ ID NO: 3717801 - RNA, 17 nt, Human
ucagcaaggccaccucu

SEQ ID NO: 3717802 - RNA, 23 nt, Human
ucagcaaggcgcuaacuugcuua

SEQ ID NO: 3717803 - RNA, 13 nt, Human
ucagcaauauuua

SEQ ID NO: 3717804 - RNA, 20 nt, Human
ucagcacagauaaaaagugg

SEQ ID NO: 3717805 - RNA, 24 nt, Human
ucagcacauaggguucccacgaag

SEQ ID NO: 3717806 - RNA, 23 nt, Human
ucagcaccacccuagucccuucc

SEQ ID NO: 3717807 - RNA, 13 nt, Human
ucagcaccacuca

SEQ ID NO: 3717808 - RNA, 23 nt, Human
ucagcacccccuucucugcccau

SEQ ID NO: 3717809 - RNA, 13 nt, Human
ucagcaccccuuc

SEQ ID NO: 3717810 - RNA, 21 nt, Human
ucagcaccuacaguguacagu

SEQ ID NO: 3717811 - RNA, 21 nt, Human
ucagcacugaaaauaccauca

SEQ ID NO: 3717812 - RNA, 13 nt, Human
ucagcacuguccc

SEQ ID NO: 3717813 - RNA, 14 nt, Human
ucagcacugucccu

SEQ ID NO: 3717814 - RNA, 21 nt, Human
ucagcacugucccuugccuca

SEQ ID NO: 3717815 - RNA, 14 nt, Human
ucagcacuugucuc

SEQ ID NO: 3717816 - RNA, 17 nt, Human
ucagcacuugucucauu

SEQ ID NO: 3717817 - RNA, 21 nt, Human
ucagcacuuuagaauaugccu

SEQ ID NO: 3717818 - RNA, 23 nt, Human
ucagcagcgaccaccccugccuc

SEQ ID NO: 3717819 - RNA, 18 nt, Human
ucagcagggacuguaaac

SEQ ID NO: 3717820 - RNA, 18 nt, Human
ucagcaguugcugguaaa

SEQ ID NO: 3717821 - RNA, 17 nt, Human
ucagcauaccuuuauug

SEQ ID NO: 3717822 - RNA, 13 nt, Human
ucagcauauuugu

SEQ ID NO: 3717823 - RNA, 16 nt, Human
ucagcauccuggcacc

SEQ ID NO: 3717824 - RNA, 15 nt, Human
ucagcaucugugaug

SEQ ID NO: 3717825 - RNA, 20 nt, Human
ucagcaugaaaauguguguu

SEQ ID NO: 3717826 - RNA, 13 nt, Human
ucagcaugaauuu

SEQ ID NO: 3717827 - RNA, 17 nt, Human
ucagcaugaauuuguaa

SEQ ID NO: 3717828 - RNA, 21 nt, Human
ucagcaugucuauucagcuuc

SEQ ID NO: 3717829 - RNA, 19 nt, Human
ucagcauuaccucuuugga

SEQ ID NO: 3717830 - RNA, 14 nt, Human
ucagcauucccucc

SEQ ID NO: 3717831 - RNA, 17 nt, Human
ucagcauucucacuccu

SEQ ID NO: 3717832 - RNA, 21 nt, Human
ucagcauucuuagccuguggc

SEQ ID NO: 3717833 - RNA, 14 nt, Human
ucagccaaauguaa

SEQ ID NO: 3717834 - RNA, 22 nt, Human
ucagccaagaauucuuaaauau

SEQ ID NO: 3717835 - RNA, 12 nt, Human
ucagccaagcac

SEQ ID NO: 3717836 - RNA, 14 nt, Human
ucagccaagcacag

SEQ ID NO: 3717837 - RNA, 22 nt, Human
ucagccaagguuuuauaaggcu

SEQ ID NO: 3717838 - RNA, 16 nt, Human
ucagccaaguuuuaua

SEQ ID NO: 3717839 - RNA, 19 nt, Human
ucagccacccugaggccuc

SEQ ID NO: 3717840 - RNA, 16 nt, Human
ucagccacccugaguu

SEQ ID NO: 3717841 - RNA, 15 nt, Human
ucagccacugaggga

SEQ ID NO: 3717842 - RNA, 10 nt, Human
ucagccagac

SEQ ID NO: 3717843 - RNA, 14 nt, Human
ucagccagggccug

SEQ ID NO: 3717844 - RNA, 15 nt, Human
ucagccauguacaga

SEQ ID NO: 3717845 - RNA, 19 nt, Human
ucagcccaaucccugaucc

SEQ ID NO: 3717846 - RNA, 21 nt, Human
ucagcccaaucccugaucccu

SEQ ID NO: 3717847 - RNA, 18 nt, Human
ucagccccacccuggccu

SEQ ID NO: 3717848 - RNA, 12 nt, Human
ucagccccagcc

SEQ ID NO: 3717849 - RNA, 14 nt, Human
ucagccccagccca

SEQ ID NO: 3717850 - RNA, 15 nt, Human
ucagccccagcccag

SEQ ID NO: 3717851 - RNA, 17 nt, Human
ucagccccagcccagcc

SEQ ID NO: 3717852 - RNA, 18 nt, Human
ucagcccccagccccucc

SEQ ID NO: 3717853 - RNA, 17 nt, Human
ucagcccccugcuucag

SEQ ID NO: 3717854 - RNA, 14 nt, Human
ucagccccuaggag

SEQ ID NO: 3717855 - RNA, 23 nt, Human
ucagccccuccucugccaccucc

SEQ ID NO: 3717856 - RNA, 14 nt, Human
ucagccccugaucc

SEQ ID NO: 3717857 - RNA, 12 nt, Human
ucagcccucaga

SEQ ID NO: 3717858 - RNA, 14 nt, Human
ucagcccucagaau

SEQ ID NO: 3717859 - RNA, 13 nt, Human
ucagcccugagga

SEQ ID NO: 3717860 - RNA, 14 nt, Human
ucagcccugcacca

SEQ ID NO: 3717861 - RNA, 23 nt, Human
ucagcccugcccuucagcauccu

SEQ ID NO: 3717862 - RNA, 14 nt, Human
ucagcccuggaggu

SEQ ID NO: 3717863 - RNA, 17 nt, Human
ucagcccuggaggugcc

SEQ ID NO: 3717864 - RNA, 18 nt, Human
ucagccgagccgggccug

SEQ ID NO: 3717865 - RNA, 19 nt, Human
ucagccgagccgggccugg

SEQ ID NO: 3717866 - RNA, 22 nt, Human
ucagccggcguggcaaauauaa

SEQ ID NO: 3717867 - RNA, 16 nt, Human
ucagccgggcccugag

SEQ ID NO: 3717868 - RNA, 19 nt, Human
ucagccuacaggccucaca

SEQ ID NO: 3717869 - RNA, 19 nt, Human
ucagccuaguggcuugucc

SEQ ID NO: 3717870 - RNA, 14 nt, Human
ucagccuccagccu

SEQ ID NO: 3717871 - RNA, 19 nt, Human
ucagccuccagccucuguu

SEQ ID NO: 3717872 - RNA, 13 nt, Human
ucagccucccaaa

SEQ ID NO: 3717873 - RNA, 21 nt, Human
ucagccucccaaagugcuggg

SEQ ID NO: 3717874 - RNA, 20 nt, Human
ucagccucccgaguagcugg

SEQ ID NO: 3717875 - RNA, 21 nt, Human
ucagccucccgaguagcuggg

SEQ ID NO: 3717876 - RNA, 22 nt, Human
ucagccucccgaguagcuggga

SEQ ID NO: 3717877 - RNA, 13 nt, Human
ucagccuccucau

SEQ ID NO: 3717878 - RNA, 13 nt, Human
ucagccuccugag

SEQ ID NO: 3717879 - RNA, 20 nt, Human
ucagccuccugaguagcugg

SEQ ID NO: 3717880 - RNA, 13 nt, Human
ucagccucgcagg

SEQ ID NO: 3717881 - RNA, 18 nt, Human
ucagccucucucccaguc

SEQ ID NO: 3717882 - RNA, 20 nt, Human
ucagccucucucccagucua

SEQ ID NO: 3717883 - RNA, 22 nt, Human
ucagccucuuaaagcugccugu

SEQ ID NO: 3717884 - RNA, 13 nt, Human
ucagccugaggcu

SEQ ID NO: 3717885 - RNA, 15 nt, Human
ucagccugagucucc

SEQ ID NO: 3717886 - RNA, 16 nt, Human
ucagccugagucuccu

SEQ ID NO: 3717887 - RNA, 19 nt, Human
ucagccugagucuccugug

SEQ ID NO: 3717888 - RNA, 20 nt, Human
ucagccugcaguuaauuagc

SEQ ID NO: 3717889 - RNA, 16 nt, Human
ucagccugcugcccag

SEQ ID NO: 3717890 - RNA, 14 nt, Human
ucagccuggccaga

SEQ ID NO: 3717891 - RNA, 15 nt, Human
ucagccuggccagac

SEQ ID NO: 3717892 - RNA, 17 nt, Human
ucagccuggccagacac

SEQ ID NO: 3717893 - RNA, 19 nt, Human
ucagccuggccagacacag

SEQ ID NO: 3717894 - RNA, 16 nt, Human
ucagccugggcgcugg

SEQ ID NO: 3717895 - RNA, 18 nt, Human
ucagccugucucuuccau

SEQ ID NO: 3717896 - RNA, 21 nt, Human
ucagccuucccccucccaggg

SEQ ID NO: 3717897 - RNA, 24 nt, Human
ucagccuucccccucccagggcca

SEQ ID NO: 3717898 - RNA, 13 nt, Human
gcucuuaauugcc

SEQ ID NO: 3717899 - RNA, 14 nt, Human
gcucuuaauugcca

SEQ ID NO: 3717900 - RNA, 19 nt, Human
gcucuuaauuguucauuuu

SEQ ID NO: 3717901 - RNA, 16 nt, Human
gcucuuagcagcuucc

SEQ ID NO: 3717902 - RNA, 19 nt, Human
gcucuuagcagcuuccaga

SEQ ID NO: 3717903 - RNA, 13 nt, Human
gcucuucaucugc

SEQ ID NO: 3717904 - RNA, 17 nt, Human
gcucuucaucugcccaa

SEQ ID NO: 3717905 - RNA, 14 nt, Human
gcucuucauguuuc

SEQ ID NO: 3717906 - RNA, 20 nt, Human
gcucuuccuaucccucuccu

SEQ ID NO: 3717907 - RNA, 19 nt, Human
gcucuuccuggacaggcca

SEQ ID NO: 3717908 - RNA, 15 nt, Human
gcucuuccuuacucc

SEQ ID NO: 3717909 - RNA, 13 nt, Human
gcucuucgcgccc

SEQ ID NO: 3717910 - RNA, 12 nt, Human
gcucuucucauu

SEQ ID NO: 3717911 - RNA, 20 nt, Human
gcucuucucauuucaccccu

SEQ ID NO: 3717912 - RNA, 23 nt, Human
gcucuucucauuucaccccuccc

SEQ ID NO: 3717913 - RNA, 13 nt, Human
gcucuucuccuuu

SEQ ID NO: 3717914 - RNA, 17 nt, Human
gcucuucuccuuucaca

SEQ ID NO: 3717915 - RNA, 14 nt, Human
gcucuucugccggc

SEQ ID NO: 3717916 - RNA, 12 nt, Human
gcucuucuuaaa

SEQ ID NO: 3717917 - RNA, 17 nt, Human
gcucuugaacuccugac

SEQ ID NO: 3717918 - RNA, 18 nt, Human
gcucuugaccuuguagag

SEQ ID NO: 3717919 - RNA, 22 nt, Human
gcucuugauaccccccucuguc

SEQ ID NO: 3717920 - RNA, 23 nt, Human
gcucuugauaccccccucugucu

SEQ ID NO: 3717921 - RNA, 19 nt, Human
gcucuugaugccuggcggg

SEQ ID NO: 3717922 - RNA, 18 nt, Human
gcucuugcagagaagccu

SEQ ID NO: 3717923 - RNA, 16 nt, Human
gcucuugcccuucccu

SEQ ID NO: 3717924 - RNA, 17 nt, Human
gcucuugcccuucccug

SEQ ID NO: 3717925 - RNA, 13 nt, Human
gcucuugcuaauc

SEQ ID NO: 3717926 - RNA, 19 nt, Human
gcucuugcuaaucaguguc

SEQ ID NO: 3717927 - RNA, 23 nt, Human
gcucuugcuaaucagugucucac

SEQ ID NO: 3717928 - RNA, 14 nt, Human
gcucuuggcuggac

SEQ ID NO: 3717929 - RNA, 23 nt, Human
gcucuugggcaauauucucugua

SEQ ID NO: 3717930 - RNA, 14 nt, Human
gcucuugucccacg

SEQ ID NO: 3717931 - RNA, 15 nt, Human
gcucuugucccacgu

SEQ ID NO: 3717932 - RNA, 22 nt, Human
gcucuugucccacgugucuucc

SEQ ID NO: 3717933 - RNA, 21 nt, Human
gcucuuguugagccgugggca

SEQ ID NO: 3717934 - RNA, 14 nt, Human
gcucuuuagccagu

SEQ ID NO: 3717935 - RNA, 21 nt, Human
gcucuuuaugaaugaaaaaac

SEQ ID NO: 3717936 - RNA, 17 nt, Human
gcucuuucgucacccuu

SEQ ID NO: 3717937 - RNA, 16 nt, Human
gcucuuucucugccag

SEQ ID NO: 3717938 - RNA, 18 nt, Human
gcucuuucucugccagug

SEQ ID NO: 3717939 - RNA, 18 nt, Human
gcucuuucugggccaagu

SEQ ID NO: 3717940 - RNA, 23 nt, Human
gcucuuugaaauagucuguguga

SEQ ID NO: 3717941 - RNA, 22 nt, Human
gcucuuuggggucagccagggc

SEQ ID NO: 3717942 - RNA, 15 nt, Human
gcucuuuucaaugaa

SEQ ID NO: 3717943 - RNA, 14 nt, Human
gcucuuuuuuacuc

SEQ ID NO: 3717944 - RNA, 22 nt, Human
gcugaaaaccaucuggccuggc

SEQ ID NO: 3717945 - RNA, 23 nt, Human
gcugaaaaccaucuggccuggcc

SEQ ID NO: 3717946 - RNA, 12 nt, Human
gcugaaaauaua

SEQ ID NO: 3717947 - RNA, 18 nt, Human
gcugaaaauguccuugug

SEQ ID NO: 3717948 - RNA, 16 nt, Human
gcugaaacagaauacu

SEQ ID NO: 3717949 - RNA, 14 nt, Human
gcugaaagagaaaa

SEQ ID NO: 3717950 - RNA, 13 nt, Human
gcugaaagccauu

SEQ ID NO: 3717951 - RNA, 19 nt, Human
gcugaaagcugguggcaga

SEQ ID NO: 3717952 - RNA, 13 nt, Human
gcugaaaguucuu

SEQ ID NO: 3717953 - RNA, 12 nt, Human
gcugaaauacug

SEQ ID NO: 3717954 - RNA, 17 nt, Human
gcugaaauugaaaaguu

SEQ ID NO: 3717955 - RNA, 17 nt, Human
gcugaaauuuuagaaau

SEQ ID NO: 3717956 - RNA, 19 nt, Human
gcugaaauuuuagaaauau

SEQ ID NO: 3717957 - RNA, 15 nt, Human
gcugaaauuuuauau

SEQ ID NO: 3717958 - RNA, 17 nt, Human
gcugaaauuuuauaugc

SEQ ID NO: 3717959 - RNA, 16 nt, Human
gcugaacacauuucuu

SEQ ID NO: 3717960 - RNA, 21 nt, Human
gcugaacacuccaauuaagga

SEQ ID NO: 3717961 - RNA, 23 nt, Human
gcugaacacuccaauuaaggauu

SEQ ID NO: 3717962 - RNA, 17 nt, Human
gcugaacauugcauaua

SEQ ID NO: 3717963 - RNA, 16 nt, Human
gcugaacccugugcug

SEQ ID NO: 3717964 - RNA, 13 nt, Human
gcugaagauggca

SEQ ID NO: 3717965 - RNA, 12 nt, Human
gcugaaggacug

SEQ ID NO: 3717966 - RNA, 22 nt, Human
gcugaaggacugugacaggcag

SEQ ID NO: 3717967 - RNA, 20 nt, Human
gcugaaggcucgagcaugcc

SEQ ID NO: 3717968 - RNA, 20 nt, Human
gcugaagggaccuugaaggg

SEQ ID NO: 3717969 - RNA, 16 nt, Human
gcugaagguugaagag

SEQ ID NO: 3717970 - RNA, 19 nt, Human
gcugaaguugcagauguua

SEQ ID NO: 3717971 - RNA, 13 nt, Human
gcugaauaaaugu

SEQ ID NO: 3717972 - RNA, 14 nt, Human
gcugaauaaauguc

SEQ ID NO: 3717973 - RNA, 17 nt, Human
gcugaauacagaggcaa

SEQ ID NO: 3717974 - RNA, 13 nt, Human
gcugaaugccucc

SEQ ID NO: 3717975 - RNA, 13 nt, Human
gcugaauguuuuu

SEQ ID NO: 3717976 - RNA, 24 nt, Human
gcugaauuucccucucucauaccc

SEQ ID NO: 3717977 - RNA, 21 nt, Human
gcugaauuuucacaugaacau

SEQ ID NO: 3717978 - RNA, 21 nt, Human
gcugacacuucaaggugacag

SEQ ID NO: 3717979 - RNA, 14 nt, Human
gcugacagacacag

SEQ ID NO: 3717980 - RNA, 15 nt, Human
gcugacagacacagg

SEQ ID NO: 3717981 - RNA, 17 nt, Human
gcugacagacagcccuc

SEQ ID NO: 3717982 - RNA, 19 nt, Human
gcugacagcacuaaacuug

SEQ ID NO: 3717983 - RNA, 18 nt, Human
gcugacagcugcuccuag

SEQ ID NO: 3717984 - RNA, 23 nt, Human
gcugacaucuugaauccuuccau

SEQ ID NO: 3717985 - RNA, 19 nt, Human
gcugacauggcucuggacu

SEQ ID NO: 3717986 - RNA, 14 nt, Human
gcugaccaagagag

SEQ ID NO: 3717987 - RNA, 16 nt, Human
gcugaccaagagagaa

SEQ ID NO: 3717988 - RNA, 19 nt, Human
gcugaccaauugugcugcc

SEQ ID NO: 3717989 - RNA, 21 nt, Human
gcugaccacaggcaguuacuu

SEQ ID NO: 3717990 - RNA, 21 nt, Human
gcugaccagccgugagcaugu

SEQ ID NO: 3717991 - RNA, 21 nt, Human
gcugaccaugcucaucugcug

SEQ ID NO: 3717992 - RNA, 22 nt, Human
gcugacccagccccuugagaaa

SEQ ID NO: 3717993 - RNA, 17 nt, Human
gcugacccagucccugg

SEQ ID NO: 3717994 - RNA, 18 nt, Human
gcugaccccaaagagccu

SEQ ID NO: 3717995 - RNA, 19 nt, Human
gcugaccccccucaggacc

SEQ ID NO: 3717996 - RNA, 17 nt, Human
gcugaccuccacagcuu

SEQ ID NO: 3717997 - RNA, 13 nt, Human
gcugaccucuggu

SEQ ID NO: 3717998 - RNA, 18 nt, Human
gcugaccucuguuguccu

SEQ ID NO: 3717999 - RNA, 17 nt, Human
gcugaccugcugaccug

SEQ ID NO: 3718000 - RNA, 18 nt, Human
gcugaccuuccucgcaga

SEQ ID NO: 3718001 - RNA, 23 nt, Human
gcugaccuuccucgcagagaggc

SEQ ID NO: 3718002 - RNA, 23 nt, Human
gcugaccuugaacuccugggcuc

SEQ ID NO: 3718003 - RNA, 19 nt, Human
gcugacgaacuuccauggc

SEQ ID NO: 3718004 - RNA, 17 nt, Human
gcugacgaggcugggcc

SEQ ID NO: 3718005 - RNA, 15 nt, Human
gcugacggccaggga

SEQ ID NO: 3718006 - RNA, 17 nt, Human
gcugacggugcagucug

SEQ ID NO: 3718007 - RNA, 15 nt, Human
gcugacgugugaggg

SEQ ID NO: 3718008 - RNA, 16 nt, Human
gcugacguuccgggca

SEQ ID NO: 3718009 - RNA, 20 nt, Human
gcugacuaaacuuuuuuucu

SEQ ID NO: 3718010 - RNA, 17 nt, Human
gcugacuacagggccgc

SEQ ID NO: 3718011 - RNA, 21 nt, Human
gcugacuccacgauccugcca

SEQ ID NO: 3718012 - RNA, 16 nt, Human
gcugacuccugguccu

SEQ ID NO: 3718013 - RNA, 19 nt, Human
gcugacuguacuccuccca

SEQ ID NO: 3718014 - RNA, 14 nt, Human
gcugacuuggcugg

SEQ ID NO: 3718015 - RNA, 17 nt, Human
gcugacuuggcuggugu

SEQ ID NO: 3718016 - RNA, 22 nt, Human
gcugacuuggcuggugugguac

SEQ ID NO: 3718017 - RNA, 14 nt, Human
gcugagaacacugu

SEQ ID NO: 3718018 - RNA, 23 nt, Human
gcugagaacccugcguggggaca

SEQ ID NO: 3718019 - RNA, 16 nt, Human
gcugagaaccuggccu

SEQ ID NO: 3718020 - RNA, 21 nt, Human
gcugagaaccuggccuucagu

SEQ ID NO: 3718021 - RNA, 14 nt, Human
gcugagaacuccug

SEQ ID NO: 3718022 - RNA, 16 nt, Human
gcugagaacuccugac

SEQ ID NO: 3718023 - RNA, 19 nt, Human
gcugagagaccaggagggc

SEQ ID NO: 3718024 - RNA, 22 nt, Human
gcugagagaccaggagggcacu

SEQ ID NO: 3718025 - RNA, 17 nt, Human
gcugagagacccaagga

SEQ ID NO: 3718026 - RNA, 20 nt, Human
gcugagagacccaaggagga

SEQ ID NO: 3718027 - RNA, 22 nt, Human
gcugagagacccaaggaggaaa

SEQ ID NO: 3718028 - RNA, 14 nt, Human
gcugagagccccag

SEQ ID NO: 3718029 - RNA, 22 nt, Human
gcugagaggcagacuucccuga

SEQ ID NO: 3718030 - RNA, 16 nt, Human
gcugagauccuggacu

SEQ ID NO: 3718031 - RNA, 15 nt, Human
gcugagcaaacaugu

SEQ ID NO: 3718032 - RNA, 14 nt, Human
gcugagcaggccac

SEQ ID NO: 3718033 - RNA, 16 nt, Human
gcugagccaccugccc

SEQ ID NO: 3718034 - RNA, 12 nt, Human
gcugagccaggc

SEQ ID NO: 3718035 - RNA, 13 nt, Human
gcugagcccuggc

SEQ ID NO: 3718036 - RNA, 16 nt, Human
gcugagcccuggcagg

SEQ ID NO: 3718037 - RNA, 21 nt, Human
gcugagccucacagcagugag

SEQ ID NO: 3718038 - RNA, 16 nt, Human
gcugagccugcaggga

SEQ ID NO: 3718039 - RNA, 19 nt, Human
gcugagcucacaaggcagc

SEQ ID NO: 3718040 - RNA, 20 nt, Human
gcugagcucacaaggcagca

SEQ ID NO: 3718041 - RNA, 14 nt, Human
gcugagcucucugu

SEQ ID NO: 3718042 - RNA, 16 nt, Human
gcugagcucugagagg

SEQ ID NO: 3718043 - RNA, 20 nt, Human
gcugagcucugagaggcccu

SEQ ID NO: 3718044 - RNA, 15 nt, Human
gcugaggaaaggcca

SEQ ID NO: 3718045 - RNA, 16 nt, Human
gcugaggaaaggccag

SEQ ID NO: 3718046 - RNA, 18 nt, Human
gcugaggagugaggaaua

SEQ ID NO: 3718047 - RNA, 14 nt, Human
gcugaggcaauucu

SEQ ID NO: 3718048 - RNA, 16 nt, Human
uccagcucaccagccc

SEQ ID NO: 3718049 - RNA, 18 nt, Human
uccagcucagaacccagg

SEQ ID NO: 3718050 - RNA, 20 nt, Human
uccagcucagaacccagggc

SEQ ID NO: 3718051 - RNA, 16 nt, Human
uccagcuccaaccugc

SEQ ID NO: 3718052 - RNA, 20 nt, Human
uccagcucccugugccccca

SEQ ID NO: 3718053 - RNA, 23 nt, Human
uccagcuccucauccagggcucu

SEQ ID NO: 3718054 - RNA, 13 nt, Human
uccagcuccugua

SEQ ID NO: 3718055 - RNA, 14 nt, Human
uccagcuccuuugg

SEQ ID NO: 3718056 - RNA, 15 nt, Human
uccagcuccuuuggg

SEQ ID NO: 3718057 - RNA, 18 nt, Human
uccagcucuaauaaaaca

SEQ ID NO: 3718058 - RNA, 22 nt, Human
uccagcucuaauaaaacagcug

SEQ ID NO: 3718059 - RNA, 12 nt, Human
uccagcucugga

SEQ ID NO: 3718060 - RNA, 16 nt, Human
uccagcugagcgccag

SEQ ID NO: 3718061 - RNA, 17 nt, Human
uccagcugcaccagagc

SEQ ID NO: 3718062 - RNA, 18 nt, Human
uccagcugcugagauccu

SEQ ID NO: 3718063 - RNA, 22 nt, Human
uccagcugcugagauccuggac

SEQ ID NO: 3718064 - RNA, 17 nt, Human
uccagcugcugucuucu

SEQ ID NO: 3718065 - RNA, 11 nt, Human
uccagcuggcc

SEQ ID NO: 3718066 - RNA, 21 nt, Human
uccagcuggccgggagccuga

SEQ ID NO: 3718067 - RNA, 17 nt, Human
uccagcuggccuggaca

SEQ ID NO: 3718068 - RNA, 20 nt, Human
uccagcuguugagccccucc

SEQ ID NO: 3718069 - RNA, 14 nt, Human
uccagcuucccgag

SEQ ID NO: 3718070 - RNA, 21 nt, Human
uccagcuucugguacucuccu

SEQ ID NO: 3718071 - RNA, 13 nt, Human
uccagcuugccag

SEQ ID NO: 3718072 - RNA, 23 nt, Human
uccagcuugccagaugcugcaga

SEQ ID NO: 3718073 - RNA, 17 nt, Human
uccagcuugcucuucag

SEQ ID NO: 3718074 - RNA, 19 nt, Human
uccagcuuucuccccgcua

SEQ ID NO: 3718075 - RNA, 16 nt, Human
uccagcuuucugccau

SEQ ID NO: 3718076 - RNA, 17 nt, Human
uccaggaaaaaggacag

SEQ ID NO: 3718077 - RNA, 21 nt, Human
uccaggaaacuccacaucugc

SEQ ID NO: 3718078 - RNA, 22 nt, Human
uccaggaaaguggccaagaagc

SEQ ID NO: 3718079 - RNA, 17 nt, Human
uccaggaaggggcugga

SEQ ID NO: 3718080 - RNA, 13 nt, Human
uccaggaccccug

SEQ ID NO: 3718081 - RNA, 19 nt, Human
uccaggacuguuucaaaca

SEQ ID NO: 3718082 - RNA, 21 nt, Human
uccaggacuguuucaaacaug

SEQ ID NO: 3718083 - RNA, 20 nt, Human
uccaggagaaggccaauucc

SEQ ID NO: 3718084 - RNA, 13 nt, Human
uccaggagcagcc

SEQ ID NO: 3718085 - RNA, 16 nt, Human
uccaggagcagccaca

SEQ ID NO: 3718086 - RNA, 17 nt, Human
uccaggagcagccacau

SEQ ID NO: 3718087 - RNA, 22 nt, Human
uccaggagcuccaguguccuga

SEQ ID NO: 3718088 - RNA, 23 nt, Human
uccaggagcuccaguguccugag

SEQ ID NO: 3718089 - RNA, 22 nt, Human
uccaggaugguguuacugcagu

SEQ ID NO: 3718090 - RNA, 14 nt, Human
uccaggcaauggcc

SEQ ID NO: 3718091 - RNA, 22 nt, Human
uccaggcaauggccuaaacuuc

SEQ ID NO: 3718092 - RNA, 21 nt, Human
uccaggcaccaggacuagggc

SEQ ID NO: 3718093 - RNA, 16 nt, Human
uccaggcacccuucuu

SEQ ID NO: 3718094 - RNA, 23 nt, Human
uccaggcacccuucuuuccucuu

SEQ ID NO: 3718095 - RNA, 16 nt, Human
uccaggcacugagaua

SEQ ID NO: 3718096 - RNA, 14 nt, Human
uccaggcagaucca

SEQ ID NO: 3718097 - RNA, 18 nt, Human
uccaggcagauccaggac

SEQ ID NO: 3718098 - RNA, 23 nt, Human
uccaggcagucgggggcuggccu

SEQ ID NO: 3718099 - RNA, 16 nt, Human
uccaggccagggggcc

SEQ ID NO: 3718100 - RNA, 18 nt, Human
uccaggccagggggccag

SEQ ID NO: 3718101 - RNA, 21 nt, Human
uccaggccaucagaggccuag

SEQ ID NO: 3718102 - RNA, 17 nt, Human
uccaggcccaaggcucc

SEQ ID NO: 3718103 - RNA, 20 nt, Human
uccaggcccaaggcucccgg

SEQ ID NO: 3718104 - RNA, 17 nt, Human
uccaggccccucccucu

SEQ ID NO: 3718105 - RNA, 18 nt, Human
uccaggcccgucugucca

SEQ ID NO: 3718106 - RNA, 20 nt, Human
uccaggcccgucuguccauc

SEQ ID NO: 3718107 - RNA, 21 nt, Human
uccaggccgcgcccuuucccc

SEQ ID NO: 3718108 - RNA, 16 nt, Human
uccaggccugccuccc

SEQ ID NO: 3718109 - RNA, 18 nt, Human
uccaggccugccucccac

SEQ ID NO: 3718110 - RNA, 19 nt, Human
uccaggccugccucccacu

SEQ ID NO: 3718111 - RNA, 22 nt, Human
uccaggccugugaggugcagag

SEQ ID NO: 3718112 - RNA, 20 nt, Human
uccaggcuaguccggaccca

SEQ ID NO: 3718113 - RNA, 20 nt, Human
uccaggcuauguauaaaaua

SEQ ID NO: 3718114 - RNA, 22 nt, Human
uccaggcuccuuuagcgcccag

SEQ ID NO: 3718115 - RNA, 17 nt, Human
uccaggcugggagagcc

SEQ ID NO: 3718116 - RNA, 21 nt, Human
uccaggcugggagagccuucc

SEQ ID NO: 3718117 - RNA, 11 nt, Human
uccaggcuggu

SEQ ID NO: 3718118 - RNA, 13 nt, Human
uccaggcugguuc

SEQ ID NO: 3718119 - RNA, 18 nt, Human
uccaggcuuucccacuuc

SEQ ID NO: 3718120 - RNA, 16 nt, Human
uccagggaagcuggcc

SEQ ID NO: 3718121 - RNA, 23 nt, Human
uccagggaagcuggccgaggguc

SEQ ID NO: 3718122 - RNA, 14 nt, Human
uccagggaauccaa

SEQ ID NO: 3718123 - RNA, 12 nt, Human
uccagggacagc

SEQ ID NO: 3718124 - RNA, 13 nt, Human
uccagggacagca

SEQ ID NO: 3718125 - RNA, 21 nt, Human
uccagggacgaagaagagcca

SEQ ID NO: 3718126 - RNA, 14 nt, Human
uccagggacugaag

SEQ ID NO: 3718127 - RNA, 21 nt, Human
uccagggagccuagaagcugg

SEQ ID NO: 3718128 - RNA, 14 nt, Human
uccagggaggcugg

SEQ ID NO: 3718129 - RNA, 22 nt, Human
uccagggaggcugguccuaugg

SEQ ID NO: 3718130 - RNA, 23 nt, Human
uccagggaugauucaagccauuc

SEQ ID NO: 3718131 - RNA, 22 nt, Human
uccagggccacgugccaggccc

SEQ ID NO: 3718132 - RNA, 17 nt, Human
uccagggcccugagcuc

SEQ ID NO: 3718133 - RNA, 20 nt, Human
uccagggcucaacacuguga

SEQ ID NO: 3718134 - RNA, 22 nt, Human
uccagggcuggacugaggccug

SEQ ID NO: 3718135 - RNA, 23 nt, Human
uccagggcuggacugaggccuga

SEQ ID NO: 3718136 - RNA, 14 nt, Human
uccaggggaaccug

SEQ ID NO: 3718137 - RNA, 13 nt, Human
uccaggggccccu

SEQ ID NO: 3718138 - RNA, 18 nt, Human
uccaggggccccuccagc

SEQ ID NO: 3718139 - RNA, 21 nt, Human
uccaggggcugcuuccuccug

SEQ ID NO: 3718140 - RNA, 17 nt, Human
uccagggugugugcucg

SEQ ID NO: 3718141 - RNA, 23 nt, Human
uccagguaccuugaccuuuguac

SEQ ID NO: 3718142 - RNA, 15 nt, Human
uccagguacgcacag

SEQ ID NO: 3718143 - RNA, 16 nt, Human
uccagguacgcacaga

SEQ ID NO: 3718144 - RNA, 19 nt, Human
uccagguacgcacagacag

SEQ ID NO: 3718145 - RNA, 21 nt, Human
uccagguauucguuaucuaau

SEQ ID NO: 3718146 - RNA, 15 nt, Human
uccaggucaacagaa

SEQ ID NO: 3718147 - RNA, 21 nt, Human
uccaggucaacagaaugaaaa

SEQ ID NO: 3718148 - RNA, 15 nt, Human
uccagguccuggugg

SEQ ID NO: 3718149 - RNA, 22 nt, Human
uccaggucgggcucagcucugg

SEQ ID NO: 3718150 - RNA, 20 nt, Human
uccaggugcacaagcuccaa

SEQ ID NO: 3718151 - RNA, 15 nt, Human
uccaggugcagaggu

SEQ ID NO: 3718152 - RNA, 16 nt, Human
uccagguggggugagg

SEQ ID NO: 3718153 - RNA, 17 nt, Human
uccaggugugcacgugg

SEQ ID NO: 3718154 - RNA, 16 nt, Human
uccagguguuacugua

SEQ ID NO: 3718155 - RNA, 18 nt, Human
uccagguuuaagcuguua

SEQ ID NO: 3718156 - RNA, 14 nt, Human
uccagguuuuucaa

SEQ ID NO: 3718157 - RNA, 15 nt, Human
uccagguuuuucaau

SEQ ID NO: 3718158 - RNA, 20 nt, Human
uccagguuuuucaauuaaac

SEQ ID NO: 3718159 - RNA, 21 nt, Human
uccagguuuuucaauuaaacg

SEQ ID NO: 3718160 - RNA, 24 nt, Human
uccagguuuuucaauuaaacggau

SEQ ID NO: 3718161 - RNA, 14 nt, Human
uccaguaaaauaau

SEQ ID NO: 3718162 - RNA, 23 nt, Human
uccaguaagaucacuguuuagau

SEQ ID NO: 3718163 - RNA, 19 nt, Human
uccaguaaucuaauauggc

SEQ ID NO: 3718164 - RNA, 17 nt, Human
uccaguaccuuugucac

SEQ ID NO: 3718165 - RNA, 14 nt, Human
uccaguauaaccag

SEQ ID NO: 3718166 - RNA, 18 nt, Human
uccaguaucuugaagacu

SEQ ID NO: 3718167 - RNA, 13 nt, Human
uccagucaacaaa

SEQ ID NO: 3718168 - RNA, 22 nt, Human
uccagucaacaaacuauuucuu

SEQ ID NO: 3718169 - RNA, 13 nt, Human
uccagucaggaug

SEQ ID NO: 3718170 - RNA, 17 nt, Human
uccaguccaaucucaug

SEQ ID NO: 3718171 - RNA, 12 nt, Human
uccaguccccag

SEQ ID NO: 3718172 - RNA, 22 nt, Human
uccagucccccuauccuuggca

SEQ ID NO: 3718173 - RNA, 23 nt, Human
uccagucccccuauccuuggcac

SEQ ID NO: 3718174 - RNA, 19 nt, Human
uccaguccuaucugggcuu

SEQ ID NO: 3718175 - RNA, 16 nt, Human
uccaguccugcucucu

SEQ ID NO: 3718176 - RNA, 13 nt, Human
uccagucuauuca

SEQ ID NO: 3718177 - RNA, 15 nt, Human
uccagucuccaccag

SEQ ID NO: 3718178 - RNA, 19 nt, Human
uccagucuccaccaggaac

SEQ ID NO: 3718179 - RNA, 14 nt, Human
uccagucugcugcc

SEQ ID NO: 3718180 - RNA, 20 nt, Human
uccagucuuccaccuggaag

SEQ ID NO: 3718181 - RNA, 19 nt, Human
uccagucuuccugacacuu

SEQ ID NO: 3718182 - RNA, 21 nt, Human
uccagucuuccugacacuuua

SEQ ID NO: 3718183 - RNA, 19 nt, Human
uccagugaaaauaagccau

SEQ ID NO: 3718184 - RNA, 18 nt, Human
uccagugaaacuugggca

SEQ ID NO: 3718185 - RNA, 20 nt, Human
uccagugacaaaccauccag

SEQ ID NO: 3718186 - RNA, 20 nt, Human
uccagugaggcucugcccuu

SEQ ID NO: 3718187 - RNA, 15 nt, Human
uccagugcaaccaca

SEQ ID NO: 3718188 - RNA, 19 nt, Human
uccagugccaacaauccua

SEQ ID NO: 3718189 - RNA, 23 nt, Human
uccaguggacuucgcaguccacu

SEQ ID NO: 3718190 - RNA, 16 nt, Human
uccaguggccuggcuc

SEQ ID NO: 3718191 - RNA, 23 nt, Human
uccaguggccuggcuccgcugug

SEQ ID NO: 3718192 - RNA, 20 nt, Human
uccaguggggcaagauuuuc

SEQ ID NO: 3718193 - RNA, 13 nt, Human
uccaguguacaua

SEQ ID NO: 3718194 - RNA, 20 nt, Human
uccaguguacauaguguaau

SEQ ID NO: 3718195 - RNA, 17 nt, Human
uccaguguccugagcuc

SEQ ID NO: 3718196 - RNA, 20 nt, Human
uccaguguccugagcucagc

SEQ ID NO: 3718197 - RNA, 21 nt, Human
uccaguguccugagcucagcg

SEQ ID NO: 3718198 - RNA, 18 nt, Human
uccaguguccuuagaaca

SEQ ID NO: 3718199 - RNA, 23 nt, Human
uccagugucuauaaaagaaacac

SEQ ID NO: 3718200 - RNA, 16 nt, Human
uccagugucucacagc

SEQ ID NO: 3718201 - RNA, 17 nt, Human
uccaguguucuaugaac

SEQ ID NO: 3718202 - RNA, 17 nt, Human
uccaguuaaccaaguca

SEQ ID NO: 3718203 - RNA, 16 nt, Human
uccaguuacuuuccaa

SEQ ID NO: 3718204 - RNA, 20 nt, Human
uccaguucaucgauuuucua

SEQ ID NO: 3718205 - RNA, 16 nt, Human
uccaguucaugagaau

SEQ ID NO: 3718206 - RNA, 18 nt, Human
uccaguucccagaaggca

SEQ ID NO: 3718207 - RNA, 19 nt, Human
uccaguucuucgacuguug

SEQ ID NO: 3718208 - RNA, 21 nt, Human
uccaguucuucgacuguuguu

SEQ ID NO: 3718209 - RNA, 13 nt, Human
uccauaaacauga

SEQ ID NO: 3718210 - RNA, 16 nt, Human
uccauaaacaugaaaa

SEQ ID NO: 3718211 - RNA, 12 nt, Human
uccauaaucacu

SEQ ID NO: 3718212 - RNA, 18 nt, Human
uccauaaugcauucuucu

SEQ ID NO: 3718213 - RNA, 16 nt, Human
uccauaaugcuacugu

SEQ ID NO: 3718214 - RNA, 15 nt, Human
uccauaauguucugc

SEQ ID NO: 3718215 - RNA, 13 nt, Human
uccauacagcucu

SEQ ID NO: 3718216 - RNA, 14 nt, Human
uccauacagcucua

SEQ ID NO: 3718217 - RNA, 12 nt, Human
uccauaccagcu

SEQ ID NO: 3718218 - RNA, 14 nt, Human
uccauagagagcaa

SEQ ID NO: 3718219 - RNA, 20 nt, Human
uccauagagagcaagacgcu

SEQ ID NO: 3718220 - RNA, 15 nt, Human
uccauagcaacagga

SEQ ID NO: 3718221 - RNA, 22 nt, Human
uccauagccuaaucccugggca

SEQ ID NO: 3718222 - RNA, 17 nt, Human
uccauagcugcugcccu

SEQ ID NO: 3718223 - RNA, 16 nt, Human
uccauaguaacugaca

SEQ ID NO: 3718224 - RNA, 17 nt, Human
uccauaguauauuaaaa

SEQ ID NO: 3718225 - RNA, 20 nt, Human
uccauaguauauuaaaaaug

SEQ ID NO: 3718226 - RNA, 21 nt, Human
uccauaguauauuaaaaaugg

SEQ ID NO: 3718227 - RNA, 19 nt, Human
uccauaguuuggcauuugc

SEQ ID NO: 3718228 - RNA, 20 nt, Human
uccauaguuuggcauuugca

SEQ ID NO: 3718229 - RNA, 13 nt, Human
uccauaguuuuga

SEQ ID NO: 3718230 - RNA, 23 nt, Human
uccauaguuuugaugacuggcau

SEQ ID NO: 3718231 - RNA, 12 nt, Human
uccauauaaaua

SEQ ID NO: 3718232 - RNA, 19 nt, Human
uccauauaagcccuugauu

SEQ ID NO: 3718233 - RNA, 12 nt, Human
uccauauccaua

SEQ ID NO: 3718234 - RNA, 13 nt, Human
uccauauccuggu

SEQ ID NO: 3718235 - RNA, 17 nt, Human
uccauaugaccucaugc

SEQ ID NO: 3718236 - RNA, 14 nt, Human
uccauauucaugua

SEQ ID NO: 3718237 - RNA, 13 nt, Human
uccauauuuggaa

SEQ ID NO: 3718238 - RNA, 17 nt, Human
uccauauuuggaagaaa

SEQ ID NO: 3718239 - RNA, 18 nt, Human
uccauauuuucacaggug

SEQ ID NO: 3718240 - RNA, 23 nt, Human
uccauauuuuuuuccuuacauaa

SEQ ID NO: 3718241 - RNA, 15 nt, Human
uccaucagaaugaaa

SEQ ID NO: 3718242 - RNA, 13 nt, Human
uccaucagccagg

SEQ ID NO: 3718243 - RNA, 18 nt, Human
uccaucagguuccauccc

SEQ ID NO: 3718244 - RNA, 16 nt, Human
uccaucauguccccaa

SEQ ID NO: 3718245 - RNA, 13 nt, Human
uccauccaaggcc

SEQ ID NO: 3718246 - RNA, 16 nt, Human
uccauccaggccauuc

SEQ ID NO: 3718247 - RNA, 16 nt, Human
uccauccauggccagc

SEQ ID NO: 3718248 - RNA, 19 nt, Human
uccauccauggccagcagc

SEQ ID NO: 3718249 - RNA, 18 nt, Human
uccaucccaaccagugcc

SEQ ID NO: 3718250 - RNA, 21 nt, Human
uccaucccaaccagugccaag

SEQ ID NO: 3718251 - RNA, 23 nt, Human
uccaucccaaccagugccaagga

SEQ ID NO: 3718252 - RNA, 13 nt, Human
uccaucccagagg

SEQ ID NO: 3718253 - RNA, 15 nt, Human
uccaucccagcggcu

SEQ ID NO: 3718254 - RNA, 15 nt, Human
uccaucccaggacac

SEQ ID NO: 3718255 - RNA, 20 nt, Human
uccaucccgaaaaucucucg

SEQ ID NO: 3718256 - RNA, 14 nt, Human
uccaucccuacccc

SEQ ID NO: 3718257 - RNA, 22 nt, Human
uccaucccuacccccuaagagc

SEQ ID NO: 3718258 - RNA, 15 nt, Human
uccaucccucuaaug

SEQ ID NO: 3718259 - RNA, 23 nt, Human
uccaucccucuaaugagacugac

SEQ ID NO: 3718260 - RNA, 15 nt, Human
uccaucccuggcccc

SEQ ID NO: 3718261 - RNA, 15 nt, Human
uccauccugaggcuc

SEQ ID NO: 3718262 - RNA, 19 nt, Human
uccauccugaggcuccacu

SEQ ID NO: 3718263 - RNA, 20 nt, Human
uccauccugaggcuccacuu

SEQ ID NO: 3718264 - RNA, 15 nt, Human
uccauccuuucuccu

SEQ ID NO: 3718265 - RNA, 15 nt, Human
uccaucuaaaaauau

SEQ ID NO: 3718266 - RNA, 16 nt, Human
uccaucuaaacugccc

SEQ ID NO: 3718267 - RNA, 21 nt, Human
uccaucuaaauaccugcccug

SEQ ID NO: 3718268 - RNA, 21 nt, Human
uccaucuccaagaaugcugaa

SEQ ID NO: 3718269 - RNA, 20 nt, Human
uccaucuccuauaaucuguc

SEQ ID NO: 3718270 - RNA, 18 nt, Human
uccaucucucauccucca

SEQ ID NO: 3718271 - RNA, 20 nt, Human
uccaucucuuguuuaaauuc

SEQ ID NO: 3718272 - RNA, 16 nt, Human
uccaucugauuccagc

SEQ ID NO: 3718273 - RNA, 21 nt, Human
uccaucugcccgccugcccac

SEQ ID NO: 3718274 - RNA, 21 nt, Human
uccaucugguagaagggaaag

SEQ ID NO: 3718275 - RNA, 19 nt, Human
uccaucuguacuuggucca

SEQ ID NO: 3718276 - RNA, 16 nt, Human
uccaucuucagcuucu

SEQ ID NO: 3718277 - RNA, 22 nt, Human
uccaugaaaacguuuuauugug

SEQ ID NO: 3718278 - RNA, 15 nt, Human
uccaugaaaaugcaa

SEQ ID NO: 3718279 - RNA, 20 nt, Human
uccaugaagaccacauccac

SEQ ID NO: 3718280 - RNA, 21 nt, Human
uccaugaagaccacauccaca

SEQ ID NO: 3718281 - RNA, 21 nt, Human
uccaugaagauguagaggaga

SEQ ID NO: 3718282 - RNA, 16 nt, Human
uccaugaauguaucag

SEQ ID NO: 3718283 - RNA, 21 nt, Human
uccaugaauguaucaggaaau

SEQ ID NO: 3718284 - RNA, 15 nt, Human
uccaugaauguuccu

SEQ ID NO: 3718285 - RNA, 19 nt, Human
uccaugaauguuccugccu

SEQ ID NO: 3718286 - RNA, 13 nt, Human
uccaugagcaccc

SEQ ID NO: 3718287 - RNA, 19 nt, Human
uccaugagcaccccaaggc

SEQ ID NO: 3718288 - RNA, 23 nt, Human
uccaugaguuuuuucucuugggc

SEQ ID NO: 3718289 - RNA, 14 nt, Human
uccaugaugcuggg

SEQ ID NO: 3718290 - RNA, 14 nt, Human
uccaugauggaaua

SEQ ID NO: 3718291 - RNA, 12 nt, Human
uccaugauggag

SEQ ID NO: 3718292 - RNA, 14 nt, Human
uccaugcaccaaac

SEQ ID NO: 3718293 - RNA, 12 nt, Human
uccaugccugag

SEQ ID NO: 3718294 - RNA, 14 nt, Human
uccaugccugaggg

SEQ ID NO: 3718295 - RNA, 21 nt, Human
uccaugccuuaaaccuaccuc

SEQ ID NO: 3718296 - RNA, 15 nt, Human
uccaugcgcucaggg

SEQ ID NO: 3718297 - RNA, 16 nt, Human
uccaugcgcucagggc

SEQ ID NO: 3718298 - RNA, 18 nt, Human
uccaugcguguuucugac

SEQ ID NO: 3718299 - RNA, 22 nt, Human
uccaugcguguuucugacucug

SEQ ID NO: 3718300 - RNA, 15 nt, Human
uccaugcugccucca

SEQ ID NO: 3718301 - RNA, 21 nt, Human
uccaugcugugcgcccagggc

SEQ ID NO: 3718302 - RNA, 22 nt, Human
uccaugcugugcgcccagggcu

SEQ ID NO: 3718303 - RNA, 22 nt, Human
uccaugcuuagucacugccugc

SEQ ID NO: 3718304 - RNA, 17 nt, Human
uccauggaaugcuugaa

SEQ ID NO: 3718305 - RNA, 21 nt, Human
uccauggaaugcuugaaaaau

SEQ ID NO: 3718306 - RNA, 13 nt, Human
uccauggacuuug

SEQ ID NO: 3718307 - RNA, 14 nt, Human
uccauggacuuugu

SEQ ID NO: 3718308 - RNA, 18 nt, Human
uccauggcaggaaggcuu

SEQ ID NO: 3718309 - RNA, 15 nt, Human
uccauggccagcagc

SEQ ID NO: 3718310 - RNA, 17 nt, Human
uccaugggaaagauggu

SEQ ID NO: 3718311 - RNA, 18 nt, Human
uccaugggagaaaauaga

SEQ ID NO: 3718312 - RNA, 22 nt, Human
uccaugggcagagcccaaggga

SEQ ID NO: 3718313 - RNA, 22 nt, Human
uccauggggucucucacagaca

SEQ ID NO: 3718314 - RNA, 13 nt, Human
uccauggugccuc

SEQ ID NO: 3718315 - RNA, 12 nt, Human
uccauguaacug

SEQ ID NO: 3718316 - RNA, 14 nt, Human
uccauguaacugcc

SEQ ID NO: 3718317 - RNA, 14 nt, Human
uccauguacuguag

SEQ ID NO: 3718318 - RNA, 14 nt, Human
uccauguacuuguu

SEQ ID NO: 3718319 - RNA, 18 nt, Human
uccauguacuuguuugca

SEQ ID NO: 3718320 - RNA, 14 nt, Human
uccauguagcagga

SEQ ID NO: 3718321 - RNA, 20 nt, Human
uccauguaugcauaauaauc

SEQ ID NO: 3718322 - RNA, 16 nt, Human
uccauguccccuccca

SEQ ID NO: 3718323 - RNA, 17 nt, Human
uccauguccccucccag

SEQ ID NO: 3718324 - RNA, 18 nt, Human
uccauguccuauguguga

SEQ ID NO: 3718325 - RNA, 16 nt, Human
uccaugucgccucugc

SEQ ID NO: 3718326 - RNA, 17 nt, Human
uccaugucgccucugca

SEQ ID NO: 3718327 - RNA, 19 nt, Human
uccaugucgccucugcauu

SEQ ID NO: 3718328 - RNA, 15 nt, Human
uccaugucggccucu

SEQ ID NO: 3718329 - RNA, 21 nt, Human
uccaugucggccucuaacccc

SEQ ID NO: 3718330 - RNA, 14 nt, Human
uccaugugcccccu

SEQ ID NO: 3718331 - RNA, 13 nt, Human
uccauguggagaa

SEQ ID NO: 3718332 - RNA, 20 nt, Human
uccaugugggcuaguugggc

SEQ ID NO: 3718333 - RNA, 17 nt, Human
uccauguguggacucaa

SEQ ID NO: 3718334 - RNA, 14 nt, Human
uccaugugugugca

SEQ ID NO: 3718335 - RNA, 18 nt, Human
uccauguuaguuuuuacu

SEQ ID NO: 3718336 - RNA, 12 nt, Human
uccauguugcug

SEQ ID NO: 3718337 - RNA, 15 nt, Human
uccauguugcugcca

SEQ ID NO: 3718338 - RNA, 19 nt, Human
uccauuaaacgauuuuuaa

SEQ ID NO: 3718339 - RNA, 15 nt, Human
uccauuaucaugugu

SEQ ID NO: 3718340 - RNA, 15 nt, Human
uccauuaugauucuu

SEQ ID NO: 3718341 - RNA, 15 nt, Human
uccauuccucaggga

SEQ ID NO: 3718342 - RNA, 18 nt, Human
uccauuccuggagcccga

SEQ ID NO: 3718343 - RNA, 23 nt, Human
uccauucuccagggguuuacagu

SEQ ID NO: 3718344 - RNA, 12 nt, Human
uccauucuggaa

SEQ ID NO: 3718345 - RNA, 12 nt, Human
uccauucuuucu

SEQ ID NO: 3718346 - RNA, 18 nt, Human
uccauucuuucugauaac

SEQ ID NO: 3718347 - RNA, 21 nt, Human
ucagccuuccccuugcccagg

SEQ ID NO: 3718348 - RNA, 12 nt, Human
ucagccuucuuu

SEQ ID NO: 3718349 - RNA, 15 nt, Human
ucagccuugccagag

SEQ ID NO: 3718350 - RNA, 16 nt, Human
ucagccuugccagaga

SEQ ID NO: 3718351 - RNA, 21 nt, Human
ucagcgauguaugcagcuauc

SEQ ID NO: 3718352 - RNA, 20 nt, Human
ucagcgcugucaggauugcg

SEQ ID NO: 3718353 - RNA, 19 nt, Human
ucagcggcgaccgcccucc

SEQ ID NO: 3718354 - RNA, 14 nt, Human
ucagcggggacagc

SEQ ID NO: 3718355 - RNA, 19 nt, Human
ucagcggggacagcuccuu

SEQ ID NO: 3718356 - RNA, 15 nt, Human
ucagcguaaaauggu

SEQ ID NO: 3718357 - RNA, 16 nt, Human
ucagcguaaaauggug

SEQ ID NO: 3718358 - RNA, 13 nt, Human
ucagcguugcaug

SEQ ID NO: 3718359 - RNA, 23 nt, Human
ucagcuaaagaaguuugaacauu

SEQ ID NO: 3718360 - RNA, 20 nt, Human
ucagcuacuaaugauguuuu

SEQ ID NO: 3718361 - RNA, 17 nt, Human
ucagcuagcaaaagaag

SEQ ID NO: 3718362 - RNA, 22 nt, Human
ucagcuagcaaaagaaguaaca

SEQ ID NO: 3718363 - RNA, 18 nt, Human
ucagcuagcuuuuaggaa

SEQ ID NO: 3718364 - RNA, 20 nt, Human
ucagcuaggaacaaaucuuc

SEQ ID NO: 3718365 - RNA, 21 nt, Human
ucagcuaggaacaaaucuucc

SEQ ID NO: 3718366 - RNA, 20 nt, Human
ucagcuaucaguaggcuaau

SEQ ID NO: 3718367 - RNA, 22 nt, Human
ucagcuauuuaaaaaaaaaaga

SEQ ID NO: 3718368 - RNA, 18 nt, Human
ucagcuccacuuucagug

SEQ ID NO: 3718369 - RNA, 23 nt, Human
ucagcuccagacguaggggaggg

SEQ ID NO: 3718370 - RNA, 21 nt, Human
ucagcuccagccccuuuccaa

SEQ ID NO: 3718371 - RNA, 21 nt, Human
ucagcuccagcucaccagccc

SEQ ID NO: 3718372 - RNA, 22 nt, Human
ucagcuccagcucaccagcccc

SEQ ID NO: 3718373 - RNA, 14 nt, Human
ucagcuccaggugg

SEQ ID NO: 3718374 - RNA, 15 nt, Human
ucagcucccauuucu

SEQ ID NO: 3718375 - RNA, 20 nt, Human
ucagcucccauuucuacucu

SEQ ID NO: 3718376 - RNA, 20 nt, Human
ucagcucccccuguccccuc

SEQ ID NO: 3718377 - RNA, 22 nt, Human
ucagcucccccuguccccucag

SEQ ID NO: 3718378 - RNA, 18 nt, Human
ucagcuccccucggagaa

SEQ ID NO: 3718379 - RNA, 11 nt, Human
ucagcuccuga

SEQ ID NO: 3718380 - RNA, 12 nt, Human
ucccaugaagcc

SEQ ID NO: 3718381 - RNA, 13 nt, Human
ucccaugaagccu

SEQ ID NO: 3718382 - RNA, 17 nt, Human
ucccaugacccaccccu

SEQ ID NO: 3718383 - RNA, 24 nt, Human
ucccaugacccaccccugugcucc

SEQ ID NO: 3718384 - RNA, 15 nt, Human
ucccaugacccaggc

SEQ ID NO: 3718385 - RNA, 16 nt, Human
ucccaugacccaggcu

SEQ ID NO: 3718386 - RNA, 16 nt, Human
ucccaugagccucagc

SEQ ID NO: 3718387 - RNA, 19 nt, Human
ucccaugagggagaugcca

SEQ ID NO: 3718388 - RNA, 15 nt, Human
ucauacugaagaugc

SEQ ID NO: 3718389 - RNA, 18 nt, Human
ucauacugugcuggagcc

SEQ ID NO: 3718390 - RNA, 13 nt, Human
ucauacuuaaaaa

SEQ ID NO: 3718391 - RNA, 16 nt, Human
ucauacuuaagcaaaa

SEQ ID NO: 3718392 - RNA, 14 nt, Human
ucauacuugaacgu

SEQ ID NO: 3718393 - RNA, 21 nt, Human
ucauacuugaacguuuucuaa

SEQ ID NO: 3718394 - RNA, 23 nt, Human
ucauacuugaacguuuucuaauu

SEQ ID NO: 3718395 - RNA, 19 nt, Human
ucauagaaagugccagaaa

SEQ ID NO: 3718396 - RNA, 17 nt, Human
ucauagaaauucuuuau

SEQ ID NO: 3718397 - RNA, 15 nt, Human
ucauagauguuuccu

SEQ ID NO: 3718398 - RNA, 16 nt, Human
ucauagauuucugauu

SEQ ID NO: 3718399 - RNA, 18 nt, Human
ucauagcagauuuuaauu

SEQ ID NO: 3718400 - RNA, 12 nt, Human
ucauagcagcuu

SEQ ID NO: 3718401 - RNA, 16 nt, Human
ucauagcauugucuau

SEQ ID NO: 3718402 - RNA, 21 nt, Human
ucauagcccagaucagcuccu

SEQ ID NO: 3718403 - RNA, 14 nt, Human
ucauagcuaaaaaa

SEQ ID NO: 3718404 - RNA, 13 nt, Human
ucauagcuaagaa

SEQ ID NO: 3718405 - RNA, 16 nt, Human
ucauagcuaagaaaua

SEQ ID NO: 3718406 - RNA, 12 nt, Human
ucauagcugaga

SEQ ID NO: 3718407 - RNA, 19 nt, Human
ucauaggaaaguauuuuuu

SEQ ID NO: 3718408 - RNA, 16 nt, Human
ucauaggaaguuagcc

SEQ ID NO: 3718409 - RNA, 23 nt, Human
ucauaggucacuggcucuccaag

SEQ ID NO: 3718410 - RNA, 16 nt, Human
ucauaggucugaaauu

SEQ ID NO: 3718411 - RNA, 20 nt, Human
ucauagguuaaaaaaaaaag

SEQ ID NO: 3718412 - RNA, 20 nt, Human
ucauagguugccaauaauac

SEQ ID NO: 3718413 - RNA, 15 nt, Human
ucauaguaacuucuu

SEQ ID NO: 3718414 - RNA, 21 nt, Human
ucauaguaacuucuuauggaa

SEQ ID NO: 3718415 - RNA, 18 nt, Human
ucauaguaguuuuuacag

SEQ ID NO: 3718416 - RNA, 18 nt, Human
ucauaguaugguggcugg

SEQ ID NO: 3718417 - RNA, 19 nt, Human
ucauaguaugguggcuggg

SEQ ID NO: 3718418 - RNA, 13 nt, Human
ucauaguuaacau

SEQ ID NO: 3718419 - RNA, 14 nt, Human
ucauaguuaacaua

SEQ ID NO: 3718420 - RNA, 14 nt, Human
ucauaguuacugug

SEQ ID NO: 3718421 - RNA, 22 nt, Human
ucauaguuacuguguaaacuca

SEQ ID NO: 3718422 - RNA, 16 nt, Human
ucauaguuauuguuuc

SEQ ID NO: 3718423 - RNA, 17 nt, Human
ucauaguuauuguuucu

SEQ ID NO: 3718424 - RNA, 16 nt, Human
ucauaguuuuauuuau

SEQ ID NO: 3718425 - RNA, 17 nt, Human
ucauaguuuuauuuaua

SEQ ID NO: 3718426 - RNA, 16 nt, Human
ucauauaaaagcuaug

SEQ ID NO: 3718427 - RNA, 20 nt, Human
ucauauaaaagcuaugguga

SEQ ID NO: 3718428 - RNA, 16 nt, Human
ucauauaaauagaaug

SEQ ID NO: 3718429 - RNA, 21 nt, Human
ucauauaaauagaauguaaau

SEQ ID NO: 3718430 - RNA, 22 nt, Human
ucauauaaauagaauguaaaug

SEQ ID NO: 3718431 - RNA, 12 nt, Human
ucauauaagaca

SEQ ID NO: 3718432 - RNA, 16 nt, Human
ucauauaccagcaaua

SEQ ID NO: 3718433 - RNA, 14 nt, Human
ucauauacgugaaa

SEQ ID NO: 3718434 - RNA, 18 nt, Human
ucauauauggggggccaa

SEQ ID NO: 3718435 - RNA, 15 nt, Human
ucauauauuaaacau

SEQ ID NO: 3718436 - RNA, 16 nt, Human
ucauauauuuuaugaa

SEQ ID NO: 3718437 - RNA, 22 nt, Human
ucauauauuuuaugaaucagaa

SEQ ID NO: 3718438 - RNA, 21 nt, Human
ucauaucaucacauugagcug

SEQ ID NO: 3718439 - RNA, 13 nt, Human
ucauaucauccac

SEQ ID NO: 3718440 - RNA, 14 nt, Human
ucauaucauuucuu

SEQ ID NO: 3718441 - RNA, 18 nt, Human
ucauauccccuauuuaac

SEQ ID NO: 3718442 - RNA, 22 nt, Human
ucauauccuucuuacacgacua

SEQ ID NO: 3718443 - RNA, 21 nt, Human
ucauaugaaaaaaaugcauuu

SEQ ID NO: 3718444 - RNA, 20 nt, Human
ucauaugcaaagcauauuaa

SEQ ID NO: 3718445 - RNA, 18 nt, Human
ucauauggcccaguguca

SEQ ID NO: 3718446 - RNA, 17 nt, Human
ucauaugugaucugucu

SEQ ID NO: 3718447 - RNA, 14 nt, Human
ucauauguugcuca

SEQ ID NO: 3718448 - RNA, 17 nt, Human
ucauauuaagaaugauc

SEQ ID NO: 3718449 - RNA, 18 nt, Human
ucauauuaagaaugaucu

SEQ ID NO: 3718450 - RNA, 20 nt, Human
ucauauuagacuucuguuuu

SEQ ID NO: 3718451 - RNA, 21 nt, Human
ucauauucaugcaaguauucu

SEQ ID NO: 3718452 - RNA, 17 nt, Human
ucauauuccugcagccu

SEQ ID NO: 3718453 - RNA, 12 nt, Human
ucauauugaaua

SEQ ID NO: 3718454 - RNA, 13 nt, Human
ucauauugaugaa

SEQ ID NO: 3718455 - RNA, 16 nt, Human
ucauauugaugaaaag

SEQ ID NO: 3718456 - RNA, 22 nt, Human
ucauauugguauauccuuuucu

SEQ ID NO: 3718457 - RNA, 15 nt, Human
ucauauugugccaau

SEQ ID NO: 3718458 - RNA, 19 nt, Human
ucauauuuaaagacaggga

SEQ ID NO: 3718459 - RNA, 20 nt, Human
ucauauuuacuucuuauaca

SEQ ID NO: 3718460 - RNA, 22 nt, Human
ucauauuuacuucuuauacauu

SEQ ID NO: 3718461 - RNA, 22 nt, Human
ucauauuuaguauugaauacuu

SEQ ID NO: 3718462 - RNA, 13 nt, Human
ucauauuugcacu

SEQ ID NO: 3718463 - RNA, 14 nt, Human
ucauauuugcacua

SEQ ID NO: 3718464 - RNA, 22 nt, Human
ucauauuuguacuuucuguuaa

SEQ ID NO: 3718465 - RNA, 20 nt, Human
ucauauuuuaaacagaggau

SEQ ID NO: 3718466 - RNA, 15 nt, Human
ucauauuuucuuuca

SEQ ID NO: 3718467 - RNA, 18 nt, Human
ucauauuuucuuucaaaa

SEQ ID NO: 3718468 - RNA, 16 nt, Human
ucauauuuugauuauu

SEQ ID NO: 3718469 - RNA, 16 nt, Human
ucaucaacaaagaaau

SEQ ID NO: 3718470 - RNA, 17 nt, Human
ucaucaacccuaaaaag

SEQ ID NO: 3718471 - RNA, 11 nt, Human
ucaucaagaag

SEQ ID NO: 3718472 - RNA, 16 nt, Human
ucaucaagaagggcug

SEQ ID NO: 3718473 - RNA, 18 nt, Human
ucaucaagaagggcugca

SEQ ID NO: 3718474 - RNA, 18 nt, Human
ucaucaaggcacugccug

SEQ ID NO: 3718475 - RNA, 19 nt, Human
ucaucaaggcacugccuga

SEQ ID NO: 3718476 - RNA, 21 nt, Human
ucaucaauaguguccuaugca

SEQ ID NO: 3718477 - RNA, 13 nt, Human
ucaucaaucaaau

SEQ ID NO: 3718478 - RNA, 15 nt, Human
ucaucaaucauugua

SEQ ID NO: 3718479 - RNA, 17 nt, Human
ucaucaaugaaugaaug

SEQ ID NO: 3718480 - RNA, 15 nt, Human
ucaucacacacaugg

SEQ ID NO: 3718481 - RNA, 21 nt, Human
ucaucaccaacgucugugcca

SEQ ID NO: 3718482 - RNA, 18 nt, Human
ucaucacuacaguauuac

SEQ ID NO: 3718483 - RNA, 14 nt, Human
ucaucacuguggcu

SEQ ID NO: 3718484 - RNA, 17 nt, Human
ucaucacuuuucaguga

SEQ ID NO: 3718485 - RNA, 13 nt, Human
ucaucagaacagc

SEQ ID NO: 3718486 - RNA, 16 nt, Human
ucaucagaacagcugu

SEQ ID NO: 3718487 - RNA, 21 nt, Human
ucaucagaacagcuguugacu

SEQ ID NO: 3718488 - RNA, 15 nt, Human
ucaucagaagauaac

SEQ ID NO: 3718489 - RNA, 15 nt, Human
ucaucagagccuuuc

SEQ ID NO: 3718490 - RNA, 17 nt, Human
ucaucagagcuccucug

SEQ ID NO: 3718491 - RNA, 21 nt, Human
ucaucagagcuccucuguccu

SEQ ID NO: 3718492 - RNA, 18 nt, Human
ucaucagauggaaauauu

SEQ ID NO: 3718493 - RNA, 14 nt, Human
ucaucagcauaccu

SEQ ID NO: 3718494 - RNA, 21 nt, Human
ucaucagcauaccuuuauugu

SEQ ID NO: 3718495 - RNA, 19 nt, Human
ucaucaggacccuggaccu

SEQ ID NO: 3718496 - RNA, 11 nt, Human
ucaucaggaug

SEQ ID NO: 3718497 - RNA, 13 nt, Human
ucaucaggaugaa

SEQ ID NO: 3718498 - RNA, 22 nt, Human
ucaucaggaugaacccaggacg

SEQ ID NO: 3718499 - RNA, 21 nt, Human
ucaucagggccuggggccuga

SEQ ID NO: 3718500 - RNA, 20 nt, Human
ucaucaguauugaagcauuu

SEQ ID NO: 3718501 - RNA, 12 nt, Human
ucaucaguguua

SEQ ID NO: 3718502 - RNA, 19 nt, Human
ucaucaguguuaaaaaauu

SEQ ID NO: 3718503 - RNA, 19 nt, Human
ucaucauaaaauaaaguau

SEQ ID NO: 3718504 - RNA, 15 nt, Human
ucaucauacaugacu

SEQ ID NO: 3718505 - RNA, 16 nt, Human
ucaucaucagggccug

SEQ ID NO: 3718506 - RNA, 12 nt, Human
ucaucaugcagc

SEQ ID NO: 3718507 - RNA, 20 nt, Human
ucaucauggaggucauacau

SEQ ID NO: 3718508 - RNA, 18 nt, Human
ucaucauggccagcugga

SEQ ID NO: 3718509 - RNA, 22 nt, Human
ucaucauguaucgcuucaugua

SEQ ID NO: 3718510 - RNA, 13 nt, Human
ucaucaugucuau

SEQ ID NO: 3718511 - RNA, 16 nt, Human
ucaucaugucuauugu

SEQ ID NO: 3718512 - RNA, 17 nt, Human
ucaucauucacuucacu

SEQ ID NO: 3718513 - RNA, 21 nt, Human
ucaucauucacuucacugugc

SEQ ID NO: 3718514 - RNA, 23 nt, Human
ucaucauucacuucacugugcug

SEQ ID NO: 3718515 - RNA, 14 nt, Human
ucaucauuccuuga

SEQ ID NO: 3718516 - RNA, 20 nt, Human
ucaucauuguauauaugugu

SEQ ID NO: 3718517 - RNA, 14 nt, Human
ucaucauuuuuccu

SEQ ID NO: 3718518 - RNA, 17 nt, Human
ucauccaaguuaaaugu

SEQ ID NO: 3718519 - RNA, 14 nt, Human
ucauccacauuguu

SEQ ID NO: 3718520 - RNA, 17 nt, Human
ucauccacauuguuuua

SEQ ID NO: 3718521 - RNA, 22 nt, Human
ucauccacauuguuuuaaaaag

SEQ ID NO: 3718522 - RNA, 12 nt, Human
ucauccacccca

SEQ ID NO: 3718523 - RNA, 19 nt, Human
ucauccacuagugcaaauc

SEQ ID NO: 3718524 - RNA, 17 nt, Human
ucauccacugugccaug

SEQ ID NO: 3718525 - RNA, 18 nt, Human
ucauccacugugccaugu

SEQ ID NO: 3718526 - RNA, 23 nt, Human
ucauccacugugccaugugccag

SEQ ID NO: 3718527 - RNA, 20 nt, Human
ucauccagacucagagcucu

SEQ ID NO: 3718528 - RNA, 20 nt, Human
ucauccagauguggcuacug

SEQ ID NO: 3718529 - RNA, 14 nt, Human
ucauccagggcucu

SEQ ID NO: 3718530 - RNA, 19 nt, Human
ucauccauucuauuguuaa

SEQ ID NO: 3718531 - RNA, 13 nt, Human
ucaucccagcccc

SEQ ID NO: 3718532 - RNA, 14 nt, Human
ucaucccagcccca

SEQ ID NO: 3718533 - RNA, 21 nt, Human
ucaucccaucuaagcugcagc

SEQ ID NO: 3718534 - RNA, 14 nt, Human
ucaucccauguaca

SEQ ID NO: 3718535 - RNA, 20 nt, Human
ucaucccauuaaucauuucc

SEQ ID NO: 3718536 - RNA, 21 nt, Human
ucaucccauuaaucauuuccc

SEQ ID NO: 3718537 - RNA, 16 nt, Human
ucaucccauuccaggc

SEQ ID NO: 3718538 - RNA, 12 nt, Human
gcugcugccugg

SEQ ID NO: 3718539 - RNA, 23 nt, Human
gcugcugccuuuagucgcugagg

SEQ ID NO: 3718540 - RNA, 17 nt, Human
gcugcugcgcccugggc

SEQ ID NO: 3718541 - RNA, 13 nt, Human
gcugcugcugcug

SEQ ID NO: 3718542 - RNA, 17 nt, Human
gcugcugcugggcucag

SEQ ID NO: 3718543 - RNA, 12 nt, Human
gcugcuggagga

SEQ ID NO: 3718544 - RNA, 14 nt, Human
gcugcuggaggaaa

SEQ ID NO: 3718545 - RNA, 20 nt, Human
gcugcuggaucacagcugcu

SEQ ID NO: 3718546 - RNA, 14 nt, Human
gcugcuggcgccuc

SEQ ID NO: 3718547 - RNA, 16 nt, Human
gcugcuggcgccucug

SEQ ID NO: 3718548 - RNA, 18 nt, Human
gcugcuggcgccucugca

SEQ ID NO: 3718549 - RNA, 15 nt, Human
gcugcuggcuugcag

SEQ ID NO: 3718550 - RNA, 15 nt, Human
gcugcugggauggug

SEQ ID NO: 3718551 - RNA, 23 nt, Human
gcugcugggauggugggcuucag

SEQ ID NO: 3718552 - RNA, 20 nt, Human
gcugcugggcucagugaagu

SEQ ID NO: 3718553 - RNA, 20 nt, Human
gcugcuggggaagacagugg

SEQ ID NO: 3718554 - RNA, 21 nt, Human
gcugcuggggaagacaguggc

SEQ ID NO: 3718555 - RNA, 17 nt, Human
gcugcugucaccucucc

SEQ ID NO: 3718556 - RNA, 15 nt, Human
gcugcugucccuccc

SEQ ID NO: 3718557 - RNA, 16 nt, Human
gcugcugucccucccc

SEQ ID NO: 3718558 - RNA, 13 nt, Human
gcugcugucuggg

SEQ ID NO: 3718559 - RNA, 21 nt, Human
gcugcugucugggugcuacug

SEQ ID NO: 3718560 - RNA, 14 nt, Human
gcugcugucuuguu

SEQ ID NO: 3718561 - RNA, 12 nt, Human
gcugcugugaag

SEQ ID NO: 3718562 - RNA, 22 nt, Human
gcugcugugcaacggucuccug

SEQ ID NO: 3718563 - RNA, 16 nt, Human
gcugcuguggcgugag

SEQ ID NO: 3718564 - RNA, 21 nt, Human
gcugcuuaauaccaaacaugc

SEQ ID NO: 3718565 - RNA, 15 nt, Human
gcugcuucauguuug

SEQ ID NO: 3718566 - RNA, 20 nt, Human
gcugcuucccucugccuguc

SEQ ID NO: 3718567 - RNA, 23 nt, Human
gcugcuuccgguagggaggcagc

SEQ ID NO: 3718568 - RNA, 14 nt, Human
gcugcuuccuccug

SEQ ID NO: 3718569 - RNA, 19 nt, Human
gcugcuucucccaggcaag

SEQ ID NO: 3718570 - RNA, 22 nt, Human
gcugcuugcccccaugcuggcg

SEQ ID NO: 3718571 - RNA, 19 nt, Human
gcugcuugugucccuccug

SEQ ID NO: 3718572 - RNA, 23 nt, Human
gcugcuuuaauugugaauugaua

SEQ ID NO: 3718573 - RNA, 15 nt, Human
gcugcuuuccccugu

SEQ ID NO: 3718574 - RNA, 16 nt, Human
gcugcuuuccccugug

SEQ ID NO: 3718575 - RNA, 13 nt, Human
gcugcuuucuucu

SEQ ID NO: 3718576 - RNA, 12 nt, Human
gcugcuuuguua

SEQ ID NO: 3718577 - RNA, 14 nt, Human
gcugcuuuuauauc

SEQ ID NO: 3718578 - RNA, 18 nt, Human
gcugcuuuuauaucugua

SEQ ID NO: 3718579 - RNA, 18 nt, Human
gcugcuuuuugagguggc

SEQ ID NO: 3718580 - RNA, 22 nt, Human
gcuggaaaauaauacugcugag

SEQ ID NO: 3718581 - RNA, 14 nt, Human
gcuggaacucuuga

SEQ ID NO: 3718582 - RNA, 21 nt, Human
gcuggaacucuugacagcuau

SEQ ID NO: 3718583 - RNA, 14 nt, Human
gcuggaagauccug

SEQ ID NO: 3718584 - RNA, 15 nt, Human
gcuggaagauccugc

SEQ ID NO: 3718585 - RNA, 13 nt, Human
gcuggaagcccag

SEQ ID NO: 3718586 - RNA, 17 nt, Human
gcuggaagcugggaggu

SEQ ID NO: 3718587 - RNA, 13 nt, Human
gcuggaaggguca

SEQ ID NO: 3718588 - RNA, 19 nt, Human
gcuggaaucuggagagcua

SEQ ID NO: 3718589 - RNA, 21 nt, Human
gcuggaaucuggagagcuaga

SEQ ID NO: 3718590 - RNA, 23 nt, Human
gcuggaaugauuucagcucacug

SEQ ID NO: 3718591 - RNA, 18 nt, Human
gcuggaauuuuuuauucu

SEQ ID NO: 3718592 - RNA, 19 nt, Human
gcuggacaaacugcaccag

SEQ ID NO: 3718593 - RNA, 13 nt, Human
gcuggacagaggg

SEQ ID NO: 3718594 - RNA, 14 nt, Human
gcuggacaggucug

SEQ ID NO: 3718595 - RNA, 22 nt, Human
gcuggaccaaagcagcugcagc

SEQ ID NO: 3718596 - RNA, 20 nt, Human
gcuggaccaguggugccuug

SEQ ID NO: 3718597 - RNA, 14 nt, Human
gcuggacccagcca

SEQ ID NO: 3718598 - RNA, 20 nt, Human
gcuggacccagccaggccca

SEQ ID NO: 3718599 - RNA, 20 nt, Human
gcuggacccugaccagcucc

SEQ ID NO: 3718600 - RNA, 23 nt, Human
gcuggacccugaccagcuccccc

SEQ ID NO: 3718601 - RNA, 21 nt, Human
gcuggacggggacuggggaug

SEQ ID NO: 3718602 - RNA, 15 nt, Human
gcuggacgucuuucu

SEQ ID NO: 3718603 - RNA, 17 nt, Human
gcuggacuccagaucug

SEQ ID NO: 3718604 - RNA, 18 nt, Human
gcuggacuccagaucugc

SEQ ID NO: 3718605 - RNA, 22 nt, Human
gcuggacuccagaucugcaccg

SEQ ID NO: 3718606 - RNA, 13 nt, Human
gcuggacugaggc

SEQ ID NO: 3718607 - RNA, 16 nt, Human
gcuggacugaggccug

SEQ ID NO: 3718608 - RNA, 16 nt, Human
gcuggagaagagagga

SEQ ID NO: 3718609 - RNA, 21 nt, Human
gcuggagaagagaggagagga

SEQ ID NO: 3718610 - RNA, 20 nt, Human
gcuggagaccaugcagagcg

SEQ ID NO: 3718611 - RNA, 21 nt, Human
gcuggagaccaugcagagcgc

SEQ ID NO: 3718612 - RNA, 22 nt, Human
gcuggagaccaugcagagcgcc

SEQ ID NO: 3718613 - RNA, 18 nt, Human
gcuggagacgggugggcg

SEQ ID NO: 3718614 - RNA, 21 nt, Human
gcuggagacuccuaggcagga

SEQ ID NO: 3718615 - RNA, 17 nt, Human
gcuggagaggagcccug

SEQ ID NO: 3718616 - RNA, 18 nt, Human
gcuggagaggagcccugc

SEQ ID NO: 3718617 - RNA, 12 nt, Human
gcuggagagguu

SEQ ID NO: 3718618 - RNA, 13 nt, Human
gcuggagagguua

SEQ ID NO: 3718619 - RNA, 18 nt, Human
gcuggagaugaggccaga

SEQ ID NO: 3718620 - RNA, 21 nt, Human
gcuggagaugaggccagacca

SEQ ID NO: 3718621 - RNA, 21 nt, Human
gcuggagcacugggcucccgg

SEQ ID NO: 3718622 - RNA, 15 nt, Human
gcuggagccacuaac

SEQ ID NO: 3718623 - RNA, 19 nt, Human
gcuggagccacuaacuaga

SEQ ID NO: 3718624 - RNA, 17 nt, Human
gcuggagccuggugccc

SEQ ID NO: 3718625 - RNA, 13 nt, Human
gcuggagccugug

SEQ ID NO: 3718626 - RNA, 14 nt, Human
gcuggagcucugcc

SEQ ID NO: 3718627 - RNA, 12 nt, Human
gcuggagcuggc

SEQ ID NO: 3718628 - RNA, 17 nt, Human
gcuggaggagcccaggc

SEQ ID NO: 3718629 - RNA, 20 nt, Human
gcuggaggaugugggcagcu

SEQ ID NO: 3718630 - RNA, 13 nt, Human
gcuggaggcaggg

SEQ ID NO: 3718631 - RNA, 15 nt, Human
gcuggaggcagggcc

SEQ ID NO: 3718632 - RNA, 16 nt, Human
gcuggaggcagggccu

SEQ ID NO: 3718633 - RNA, 14 nt, Human
gcuggaggcccagg

SEQ ID NO: 3718634 - RNA, 23 nt, Human
gcuggagggaggcgggggcugcc

SEQ ID NO: 3718635 - RNA, 16 nt, Human
gcuggagguaaggccu

SEQ ID NO: 3718636 - RNA, 16 nt, Human
gcuggaggugggagca

SEQ ID NO: 3718637 - RNA, 19 nt, Human
gcuggaggugggagcagga

SEQ ID NO: 3718638 - RNA, 21 nt, Human
gcuggaggugggagcaggaga

SEQ ID NO: 3718639 - RNA, 22 nt, Human
gcuggaggugggagcaggagau

SEQ ID NO: 3718640 - RNA, 15 nt, Human
gcuggagucuccuga

SEQ ID NO: 3718641 - RNA, 16 nt, Human
gcuggagucuccugag

SEQ ID NO: 3718642 - RNA, 12 nt, Human
gcuggagugcag

SEQ ID NO: 3718643 - RNA, 14 nt, Human
gcuggagugcagug

SEQ ID NO: 3718644 - RNA, 18 nt, Human
gcuggagugcagugagcc

SEQ ID NO: 3718645 - RNA, 19 nt, Human
gcuggagugcaguggcgaa

SEQ ID NO: 3718646 - RNA, 20 nt, Human
gcuggagugcaguggcgcga

SEQ ID NO: 3718647 - RNA, 19 nt, Human
gcuggagugcaguggugca

SEQ ID NO: 3718648 - RNA, 20 nt, Human
gcuggagugcagugguguga

SEQ ID NO: 3718649 - RNA, 17 nt, Human
gcuggaguuagggacug

SEQ ID NO: 3718650 - RNA, 14 nt, Human
gcuggaucucccag

SEQ ID NO: 3718651 - RNA, 21 nt, Human
gcuggaugcuccuuccaacag

SEQ ID NO: 3718652 - RNA, 22 nt, Human
gcuggaugcuccuuccaacagg

SEQ ID NO: 3718653 - RNA, 18 nt, Human
gcuggauggagcccaggc

SEQ ID NO: 3718654 - RNA, 18 nt, Human
gcuggaugucugccaauu

SEQ ID NO: 3718655 - RNA, 21 nt, Human
gcuggaugucugccaauuuuu

SEQ ID NO: 3718656 - RNA, 16 nt, Human
gcuggauuacaggcau

SEQ ID NO: 3718657 - RNA, 15 nt, Human
gcuggcaaagacaga

SEQ ID NO: 3718658 - RNA, 15 nt, Human
gcuggcaaagguggc

SEQ ID NO: 3718659 - RNA, 20 nt, Human
gcuggcaaagguggcucucc

SEQ ID NO: 3718660 - RNA, 16 nt, Human
gcuggcacccaccgug

SEQ ID NO: 3718661 - RNA, 18 nt, Human
gcuggcaccgccuucucu

SEQ ID NO: 3718662 - RNA, 14 nt, Human
gcuggcagcucucc

SEQ ID NO: 3718663 - RNA, 15 nt, Human
gcuggcagcucucca

SEQ ID NO: 3718664 - RNA, 16 nt, Human
gcuggcagcucuccag

SEQ ID NO: 3718665 - RNA, 17 nt, Human
gcuggcagcucuccagu

SEQ ID NO: 3718666 - RNA, 16 nt, Human
gcuggcauagagcagc

SEQ ID NO: 3718667 - RNA, 16 nt, Human
gcuggcauuacaggug

SEQ ID NO: 3718668 - RNA, 12 nt, Human
gcuggccacugc

SEQ ID NO: 3718669 - RNA, 20 nt, Human
gcuggccacugcacagagcu

SEQ ID NO: 3718670 - RNA, 14 nt, Human
gcuggccagcccca

SEQ ID NO: 3718671 - RNA, 22 nt, Human
gcuggccagccccacagcccac

SEQ ID NO: 3718672 - RNA, 21 nt, Human
gcuggccagccgcucuccugc

SEQ ID NO: 3718673 - RNA, 22 nt, Human
gcuggccagccuggggccuggc

SEQ ID NO: 3718674 - RNA, 14 nt, Human
gcuggccaguccag

SEQ ID NO: 3718675 - RNA, 16 nt, Human
gcuggccauggagaaa

SEQ ID NO: 3718676 - RNA, 17 nt, Human
gcuggccauggagaaag

SEQ ID NO: 3718677 - RNA, 14 nt, Human
gcuggcccagcccu

SEQ ID NO: 3718678 - RNA, 16 nt, Human
gcuggcccagcccugc

SEQ ID NO: 3718679 - RNA, 19 nt, Human
gcuggcccagcccugcugg

SEQ ID NO: 3718680 - RNA, 13 nt, Human
gcuggcccagccg

SEQ ID NO: 3718681 - RNA, 17 nt, Human
gcuggcccagccggccu

SEQ ID NO: 3718682 - RNA, 18 nt, Human
gcuggcccagccggccuc

SEQ ID NO: 3718683 - RNA, 20 nt, Human
gcuggcccagccggccucuc

SEQ ID NO: 3718684 - RNA, 17 nt, Human
gcuggcccagggcccag

SEQ ID NO: 3718685 - RNA, 18 nt, Human
gcuggcccagggcccaga

SEQ ID NO: 3718686 - RNA, 14 nt, Human
gcuggccccagccc

SEQ ID NO: 3718687 - RNA, 23 nt, Human
gcuggccccgccgccugguacuc

SEQ ID NO: 3718688 - RNA, 19 nt, Human
ucccaugaucccuguguug

SEQ ID NO: 3718689 - RNA, 12 nt, Human
ucccaugaugua

SEQ ID NO: 3718690 - RNA, 14 nt, Human
ucccauggacacuc

SEQ ID NO: 3718691 - RNA, 15 nt, Human
ucccauggacacucc

SEQ ID NO: 3718692 - RNA, 20 nt, Human
ucccauggacacuccagugc

SEQ ID NO: 3718693 - RNA, 14 nt, Human
ucccauggggaggg

SEQ ID NO: 3718694 - RNA, 17 nt, Human
ucccauguaacagaaag

SEQ ID NO: 3718695 - RNA, 13 nt, Human
ucccauguagccc

SEQ ID NO: 3718696 - RNA, 13 nt, Human
ucccauuauucaa

SEQ ID NO: 3718697 - RNA, 14 nt, Human
ucccauucaagauu

SEQ ID NO: 3718698 - RNA, 19 nt, Human
ucccauucacucuuccaga

SEQ ID NO: 3718699 - RNA, 13 nt, Human
ucccauuccaggc

SEQ ID NO: 3718700 - RNA, 15 nt, Human
ucccauuccugaaga

SEQ ID NO: 3718701 - RNA, 13 nt, Human
ucccauucuaugu

SEQ ID NO: 3718702 - RNA, 14 nt, Human
ucccauucuaugug

SEQ ID NO: 3718703 - RNA, 18 nt, Human
ucccauucuaugugucau

SEQ ID NO: 3718704 - RNA, 19 nt, Human
ucccauucuccauuuguua

SEQ ID NO: 3718705 - RNA, 20 nt, Human
ucccauugaaaauguaagua

SEQ ID NO: 3718706 - RNA, 22 nt, Human
ucccauugcaucaccucuguaa

SEQ ID NO: 3718707 - RNA, 13 nt, Human
ucccauugucccu

SEQ ID NO: 3718708 - RNA, 15 nt, Human
ucccauugucuucug

SEQ ID NO: 3718709 - RNA, 18 nt, Human
ucccauuucucacugaga

SEQ ID NO: 3718710 - RNA, 22 nt, Human
uccccaaaaaccucacccgagg

SEQ ID NO: 3718711 - RNA, 23 nt, Human
uccccaaaucaauacacuaguug

SEQ ID NO: 3718712 - RNA, 23 nt, Human
uccccaacagcgacauagcccau

SEQ ID NO: 3718713 - RNA, 16 nt, Human
uccccaacagcgccca

SEQ ID NO: 3718714 - RNA, 18 nt, Human
uccccaacagugugaagu

SEQ ID NO: 3718715 - RNA, 19 nt, Human
uccccaacagugugaaguu

SEQ ID NO: 3718716 - RNA, 18 nt, Human
uccccaacauguaauaag

SEQ ID NO: 3718717 - RNA, 20 nt, Human
uccccaacccuagguucccu

SEQ ID NO: 3718718 - RNA, 16 nt, Human
uccccaacccugcccc

SEQ ID NO: 3718719 - RNA, 18 nt, Human
uccccaacccugccccug

SEQ ID NO: 3718720 - RNA, 14 nt, Human
uccccaacugacca

SEQ ID NO: 3718721 - RNA, 20 nt, Human
uccccaaggcccccugccug

SEQ ID NO: 3718722 - RNA, 21 nt, Human
uccccaaggcccccugccugc

SEQ ID NO: 3718723 - RNA, 23 nt, Human
uccccaagugguuuccacaugcu

SEQ ID NO: 3718724 - RNA, 21 nt, Human
uccccaauaauugcagaacua

SEQ ID NO: 3718725 - RNA, 18 nt, Human
uccccacagcgucccugg

SEQ ID NO: 3718726 - RNA, 18 nt, Human
uccccacaggagcccugc

SEQ ID NO: 3718727 - RNA, 13 nt, Human
uccccaccaguga

SEQ ID NO: 3718728 - RNA, 14 nt, Human
uccccaccaucugc

SEQ ID NO: 3718729 - RNA, 23 nt, Human
uccccaccaucugcugucuuuuc

SEQ ID NO: 3718730 - RNA, 21 nt, Human
uccccacccaccaacccucag

SEQ ID NO: 3718731 - RNA, 23 nt, Human
uccccacccaccaacccucaggg

SEQ ID NO: 3718732 - RNA, 14 nt, Human
uccccaccccuacc

SEQ ID NO: 3718733 - RNA, 15 nt, Human
uccccaccccuaccc

SEQ ID NO: 3718734 - RNA, 14 nt, Human
uccccaccccugcc

SEQ ID NO: 3718735 - RNA, 13 nt, Human
uccccacccucca

SEQ ID NO: 3718736 - RNA, 15 nt, Human
uccccacccuccacu

SEQ ID NO: 3718737 - RNA, 19 nt, Human
uccccacccuccacucagc

SEQ ID NO: 3718738 - RNA, 15 nt, Human
uccccacccuccugg

SEQ ID NO: 3718739 - RNA, 15 nt, Human
uccccaccgcagaca

SEQ ID NO: 3718740 - RNA, 17 nt, Human
uccccaccgcagacagg

SEQ ID NO: 3718741 - RNA, 18 nt, Human
uccccaccuucaauuccu

SEQ ID NO: 3718742 - RNA, 22 nt, Human
uccccaccuucaauuccugggc

SEQ ID NO: 3718743 - RNA, 16 nt, Human
uccccacgagggcugg

SEQ ID NO: 3718744 - RNA, 17 nt, Human
uccccacgagggcuggc

SEQ ID NO: 3718745 - RNA, 17 nt, Human
uccccacgccacagccc

SEQ ID NO: 3718746 - RNA, 18 nt, Human
uccccacggccgcuccag

SEQ ID NO: 3718747 - RNA, 22 nt, Human
uccccacggggccucgggaccu

SEQ ID NO: 3718748 - RNA, 22 nt, Human
uccccacucccuggcucucaga

SEQ ID NO: 3718749 - RNA, 16 nt, Human
uccccacucugcucug

SEQ ID NO: 3718750 - RNA, 17 nt, Human
uccccacucugcucuga

SEQ ID NO: 3718751 - RNA, 16 nt, Human
uccccacugacagccu

SEQ ID NO: 3718752 - RNA, 19 nt, Human
uccccacuguaucuaggca

SEQ ID NO: 3718753 - RNA, 19 nt, Human
uccccacuugcagcccugu

SEQ ID NO: 3718754 - RNA, 21 nt, Human
uccccacuuguccgcugggug

SEQ ID NO: 3718755 - RNA, 17 nt, Human
uccccagaaaggagacu

SEQ ID NO: 3718756 - RNA, 18 nt, Human
uccccagacgccuggcug

SEQ ID NO: 3718757 - RNA, 21 nt, Human
uccccagacgccuggcugcug

SEQ ID NO: 3718758 - RNA, 10 nt, Human
uccccagaga

SEQ ID NO: 3718759 - RNA, 17 nt, Human
uccccagagaaagcgca

SEQ ID NO: 3718760 - RNA, 23 nt, Human
uccccagagaaagcgcagaugcu

SEQ ID NO: 3718761 - RNA, 22 nt, Human
uccccagagaaaggggagccca

SEQ ID NO: 3718762 - RNA, 19 nt, Human
uccccagaguccucuauga

SEQ ID NO: 3718763 - RNA, 17 nt, Human
uccccagaguuccccau

SEQ ID NO: 3718764 - RNA, 18 nt, Human
uccccagaguuccccaug

SEQ ID NO: 3718765 - RNA, 22 nt, Human
uccccagauugcaacaggcugg

SEQ ID NO: 3718766 - RNA, 22 nt, Human
uccccagcagggucuuuucauc

SEQ ID NO: 3718767 - RNA, 18 nt, Human
uccccagcaucacucccc

SEQ ID NO: 3718768 - RNA, 21 nt, Human
uccccagcaugcaccacgggc

SEQ ID NO: 3718769 - RNA, 16 nt, Human
uccccagccagccugg

SEQ ID NO: 3718770 - RNA, 13 nt, Human
uccccagcccaga

SEQ ID NO: 3718771 - RNA, 16 nt, Human
uccccagcccagagac

SEQ ID NO: 3718772 - RNA, 15 nt, Human
uccccagcccagggu

SEQ ID NO: 3718773 - RNA, 22 nt, Human
uccccagcccaggguuccccca

SEQ ID NO: 3718774 - RNA, 16 nt, Human
uccccagccccuagcc

SEQ ID NO: 3718775 - RNA, 20 nt, Human
uccccagcccuuccucugcu

SEQ ID NO: 3718776 - RNA, 17 nt, Human
uccccagccucucuucc

SEQ ID NO: 3718777 - RNA, 11 nt, Human
uccccagccug

SEQ ID NO: 3718778 - RNA, 19 nt, Human
uccccagccugcgccugcu

SEQ ID NO: 3718779 - RNA, 14 nt, Human
uccccagccugggc

SEQ ID NO: 3718780 - RNA, 23 nt, Human
uccccagccuuugaucagguggg

SEQ ID NO: 3718781 - RNA, 13 nt, Human
uccccagcuccca

SEQ ID NO: 3718782 - RNA, 16 nt, Human
uccccagcucccagga

SEQ ID NO: 3718783 - RNA, 13 nt, Human
uccccaggaggcc

SEQ ID NO: 3718784 - RNA, 18 nt, Human
uccccaggaggccagccu

SEQ ID NO: 3718785 - RNA, 23 nt, Human
uccccaggaggccagccuugacc

SEQ ID NO: 3718786 - RNA, 19 nt, Human
uccccaggccaggccacca

SEQ ID NO: 3718787 - RNA, 23 nt, Human
uccccaggccaggccaccaggau

SEQ ID NO: 3718788 - RNA, 11 nt, Human
uccccaggccc

SEQ ID NO: 3718789 - RNA, 23 nt, Human
uccccaggccguggcugcccaca

SEQ ID NO: 3718790 - RNA, 21 nt, Human
uccccagggaagcagcagccu

SEQ ID NO: 3718791 - RNA, 12 nt, Human
uccccagggcac

SEQ ID NO: 3718792 - RNA, 15 nt, Human
uccccagguccagcu

SEQ ID NO: 3718793 - RNA, 17 nt, Human
uccccagguccagcucu

SEQ ID NO: 3718794 - RNA, 23 nt, Human
uccccauacuccuaugaucugag

SEQ ID NO: 3718795 - RNA, 16 nt, Human
uccccauacucugucu

SEQ ID NO: 3718796 - RNA, 17 nt, Human
uccccauacucugucuc

SEQ ID NO: 3718797 - RNA, 18 nt, Human
uccccauacucugucucc

SEQ ID NO: 3718798 - RNA, 16 nt, Human
uccccaucaucccagc

SEQ ID NO: 3718799 - RNA, 19 nt, Human
uccccaucaucccagcugc

SEQ ID NO: 3718800 - RNA, 16 nt, Human
uccccauccuccagcu

SEQ ID NO: 3718801 - RNA, 19 nt, Human
uccccauccuccagcuucu

SEQ ID NO: 3718802 - RNA, 22 nt, Human
uccccaucguugcccccauuuc

SEQ ID NO: 3718803 - RNA, 13 nt, Human
uccccaucucagg

SEQ ID NO: 3718804 - RNA, 19 nt, Human
uccccaucucccugccugg

SEQ ID NO: 3718805 - RNA, 17 nt, Human
uccccaucugucggccu

SEQ ID NO: 3718806 - RNA, 16 nt, Human
uccccaugcagacaug

SEQ ID NO: 3718807 - RNA, 20 nt, Human
uccccaugccacguuccaca

SEQ ID NO: 3718808 - RNA, 20 nt, Human
uccccaugccuguggcugcg

SEQ ID NO: 3718809 - RNA, 11 nt, Human
uccccauggga

SEQ ID NO: 3718810 - RNA, 22 nt, Human
uccccaugugccugcaccagga

SEQ ID NO: 3718811 - RNA, 19 nt, Human
uccccauuagagucagccu

SEQ ID NO: 3718812 - RNA, 21 nt, Human
uccccauuagagucagccuuc

SEQ ID NO: 3718813 - RNA, 14 nt, Human
uccccauuccuacc

SEQ ID NO: 3718814 - RNA, 14 nt, Human
uccccauucuuccu

SEQ ID NO: 3718815 - RNA, 17 nt, Human
uccccauucuuccuagu

SEQ ID NO: 3718816 - RNA, 22 nt, Human
uccccauucuuccuaguuuucu

SEQ ID NO: 3718817 - RNA, 18 nt, Human
uccccauugccuccuccu

SEQ ID NO: 3718818 - RNA, 13 nt, Human
ucccccaaagugg

SEQ ID NO: 3718819 - RNA, 14 nt, Human
ucccccaaccccca

SEQ ID NO: 3718820 - RNA, 22 nt, Human
ucccccaacuucaucuggaagu

SEQ ID NO: 3718821 - RNA, 10 nt, Human
ucccccaaga

SEQ ID NO: 3718822 - RNA, 19 nt, Human
ucccccacaguuugauguc

SEQ ID NO: 3718823 - RNA, 22 nt, Human
ucccccaccagcuaaggacauu

SEQ ID NO: 3718824 - RNA, 19 nt, Human
ucccccacccccuccccag

SEQ ID NO: 3718825 - RNA, 20 nt, Human
ucccccacccccuccccagg

SEQ ID NO: 3718826 - RNA, 19 nt, Human
ucccccacccccuccccgc

SEQ ID NO: 3718827 - RNA, 19 nt, Human
ucccccaccgguccagcug

SEQ ID NO: 3718828 - RNA, 23 nt, Human
ucccccaccgguccagcuggccu

SEQ ID NO: 3718829 - RNA, 20 nt, Human
ucccccaccucggucacucc

SEQ ID NO: 3718830 - RNA, 22 nt, Human
ucccccacuccucuuauuugcu

SEQ ID NO: 3718831 - RNA, 13 nt, Human
ucccccagccacu

SEQ ID NO: 3718832 - RNA, 20 nt, Human
ucccccagccccauccucug

SEQ ID NO: 3718833 - RNA, 22 nt, Human
ucccccagccccauccucugua

SEQ ID NO: 3718834 - RNA, 13 nt, Human
ucccccagcccug

SEQ ID NO: 3718835 - RNA, 16 nt, Human
ucccccagcccugugg

SEQ ID NO: 3718836 - RNA, 16 nt, Human
ucccccaguccccuuc

SEQ ID NO: 3718837 - RNA, 17 nt, Human
ucaucccauuccaggca

SEQ ID NO: 3718838 - RNA, 15 nt, Human
ucaucccauugucuu

SEQ ID NO: 3718839 - RNA, 12 nt, Human
ucauccccaggg

SEQ ID NO: 3718840 - RNA, 20 nt, Human
ucauccccaggggucccagc

SEQ ID NO: 3718841 - RNA, 14 nt, Human
ucauccccaguccc

SEQ ID NO: 3718842 - RNA, 15 nt, Human
ucauccccaguccca

SEQ ID NO: 3718843 - RNA, 17 nt, Human
ucauccccucacuugcc

SEQ ID NO: 3718844 - RNA, 20 nt, Human
ucauccccucagaaggucug

SEQ ID NO: 3718845 - RNA, 11 nt, Human
ucauccccuua

SEQ ID NO: 3718846 - RNA, 21 nt, Human
ucaucccgagcaccuccacau

SEQ ID NO: 3718847 - RNA, 18 nt, Human
ucaucccuaaugcugcag

SEQ ID NO: 3718848 - RNA, 16 nt, Human
ucaucccuucucuucc

SEQ ID NO: 3718849 - RNA, 17 nt, Human
ucauccucaaagaaagu

SEQ ID NO: 3718850 - RNA, 18 nt, Human
ucauccucaaagaaagug

SEQ ID NO: 3718851 - RNA, 22 nt, Human
ucauccucaaagaaaguguauu

SEQ ID NO: 3718852 - RNA, 23 nt, Human
ucauccucaaagaaaguguauug

SEQ ID NO: 3718853 - RNA, 14 nt, Human
ucauccuccuggaa

SEQ ID NO: 3718854 - RNA, 22 nt, Human
ucauccuccuggaaccuugcug

SEQ ID NO: 3718855 - RNA, 22 nt, Human
ucauccucuccacagcugccuc

SEQ ID NO: 3718856 - RNA, 11 nt, Human
ucauccucugg

SEQ ID NO: 3718857 - RNA, 20 nt, Human
ucauccugacucugcccccu

SEQ ID NO: 3718858 - RNA, 12 nt, Human
ucauccugcagg

SEQ ID NO: 3718859 - RNA, 23 nt, Human
ucauccugccuucauggaacuca

SEQ ID NO: 3718860 - RNA, 15 nt, Human
ucauccugugcucgg

SEQ ID NO: 3718861 - RNA, 13 nt, Human
ucauccuucccac

SEQ ID NO: 3718862 - RNA, 14 nt, Human
ucauccuucuggaa

SEQ ID NO: 3718863 - RNA, 22 nt, Human
ucauccuucuggaauaaggaga

SEQ ID NO: 3718864 - RNA, 20 nt, Human
ucauccuuggucuuuguauc

SEQ ID NO: 3718865 - RNA, 20 nt, Human
ucauccuuucacuucuuucc

SEQ ID NO: 3718866 - RNA, 22 nt, Human
ucauccuuuucuccuaucuuca

SEQ ID NO: 3718867 - RNA, 18 nt, Human
ucaucgaaaauucauuuc

SEQ ID NO: 3718868 - RNA, 22 nt, Human
ucaucgaaaauucauuucacau

SEQ ID NO: 3718869 - RNA, 21 nt, Human
ucaucgaaucuacuaauucca

SEQ ID NO: 3718870 - RNA, 20 nt, Human
ucaucuaccuagauuuaaua

SEQ ID NO: 3718871 - RNA, 14 nt, Human
ucaucuaggauuuu

SEQ ID NO: 3718872 - RNA, 22 nt, Human
ucaucuauaguugauauguuuu

SEQ ID NO: 3718873 - RNA, 11 nt, Human
ucaucuauuuc

SEQ ID NO: 3718874 - RNA, 14 nt, Human
ucaucuauuucuga

SEQ ID NO: 3718875 - RNA, 18 nt, Human
ucaucuauuucugagaag

SEQ ID NO: 3718876 - RNA, 17 nt, Human
ucaucuauuuugaugca

SEQ ID NO: 3718877 - RNA, 18 nt, Human
ucaucuauuuugaugcag

SEQ ID NO: 3718878 - RNA, 23 nt, Human
ucaucuauuuugaugcagcauuu

SEQ ID NO: 3718879 - RNA, 19 nt, Human
ucaucucagcucacugcaa

SEQ ID NO: 3718880 - RNA, 20 nt, Human
ucaucucaggccucccucaa

SEQ ID NO: 3718881 - RNA, 16 nt, Human
ucaucucauucaaacc

SEQ ID NO: 3718882 - RNA, 16 nt, Human
ucaucuccccaucauu

SEQ ID NO: 3718883 - RNA, 22 nt, Human
ucaucuccugccuuccuccugg

SEQ ID NO: 3718884 - RNA, 21 nt, Human
ucaucucuagggaccagaacc

SEQ ID NO: 3718885 - RNA, 11 nt, Human
ucaucugagag

SEQ ID NO: 3718886 - RNA, 20 nt, Human
ucaucugcacccuucuuuuc

SEQ ID NO: 3718887 - RNA, 12 nt, Human
ucaucugcucuc

SEQ ID NO: 3718888 - RNA, 15 nt, Human
ucaucugcucuccuu

SEQ ID NO: 3718889 - RNA, 18 nt, Human
ucaucugcucuccuuccu

SEQ ID NO: 3718890 - RNA, 19 nt, Human
ucaucugcugguccguggg

SEQ ID NO: 3718891 - RNA, 14 nt, Human
ucaucuggaguucu

SEQ ID NO: 3718892 - RNA, 17 nt, Human
ucaucuggauuccagag

SEQ ID NO: 3718893 - RNA, 19 nt, Human
ucaucuggcaacaucuuua

SEQ ID NO: 3718894 - RNA, 14 nt, Human
ucaucugggaaaga

SEQ ID NO: 3718895 - RNA, 16 nt, Human
ucaucugggaaagaca

SEQ ID NO: 3718896 - RNA, 23 nt, Human
ucaucugggaacuugucacagau

SEQ ID NO: 3718897 - RNA, 19 nt, Human
ucaucugggggaguggaau

SEQ ID NO: 3718898 - RNA, 13 nt, Human
ucaucuguaacuc

SEQ ID NO: 3718899 - RNA, 17 nt, Human
ucaucuguagauacuag

SEQ ID NO: 3718900 - RNA, 15 nt, Human
ucaucugucaagugg

SEQ ID NO: 3718901 - RNA, 20 nt, Human
ucaucugucuauauuuuauu

SEQ ID NO: 3718902 - RNA, 12 nt, Human
ucaucuguguga

SEQ ID NO: 3718903 - RNA, 16 nt, Human
ucaucuuauucagcac

SEQ ID NO: 3718904 - RNA, 18 nt, Human
ucaucuucaguugucucu

SEQ ID NO: 3718905 - RNA, 14 nt, Human
ucaucuuccugugu

SEQ ID NO: 3718906 - RNA, 13 nt, Human
ucaucuucucagc

SEQ ID NO: 3718907 - RNA, 14 nt, Human
ucaucuugugaaau

SEQ ID NO: 3718908 - RNA, 22 nt, Human
ucaucuuucauuaaaggcuucu

SEQ ID NO: 3718909 - RNA, 12 nt, Human
ucaucuuucuuc

SEQ ID NO: 3718910 - RNA, 16 nt, Human
ucaucuuuuaaagaaa

SEQ ID NO: 3718911 - RNA, 16 nt, Human
ucaugaaaauccuacc

SEQ ID NO: 3718912 - RNA, 22 nt, Human
ucaugaaaauccuaccaaccuc

SEQ ID NO: 3718913 - RNA, 11 nt, Human
ucaugaaaauu

SEQ ID NO: 3718914 - RNA, 20 nt, Human
ucaugaaacuuguuucacug

SEQ ID NO: 3718915 - RNA, 22 nt, Human
ucaugaacacaucagcuagcaa

SEQ ID NO: 3718916 - RNA, 11 nt, Human
ucaugaaccuc

SEQ ID NO: 3718917 - RNA, 18 nt, Human
ucaugaacuucgcaucaa

SEQ ID NO: 3718918 - RNA, 22 nt, Human
ucaugaacuucgcaucaaaaga

SEQ ID NO: 3718919 - RNA, 12 nt, Human
ucaugaagccug

SEQ ID NO: 3718920 - RNA, 16 nt, Human
ucaugaagccugugga

SEQ ID NO: 3718921 - RNA, 21 nt, Human
ucaugaauguaaauuuguacu

SEQ ID NO: 3718922 - RNA, 15 nt, Human
ucaugaauuuuaaag

SEQ ID NO: 3718923 - RNA, 16 nt, Human
ucaugaauuuuaaagu

SEQ ID NO: 3718924 - RNA, 13 nt, Human
ucaugaauuuuac

SEQ ID NO: 3718925 - RNA, 17 nt, Human
ucaugacauguuauaua

SEQ ID NO: 3718926 - RNA, 17 nt, Human
ucaugacuuuuccaugu

SEQ ID NO: 3718927 - RNA, 13 nt, Human
ucaugagccugcu

SEQ ID NO: 3718928 - RNA, 20 nt, Human
ucaugaggaaagcaguugaa

SEQ ID NO: 3718929 - RNA, 20 nt, Human
ucaugaggagauucugccuu

SEQ ID NO: 3718930 - RNA, 23 nt, Human
ucaugaggagauucugccuuugc

SEQ ID NO: 3718931 - RNA, 19 nt, Human
ucaugaggaggguggggga

SEQ ID NO: 3718932 - RNA, 18 nt, Human
ucaugagugaauaaaugu

SEQ ID NO: 3718933 - RNA, 13 nt, Human
ucaugaucucccu

SEQ ID NO: 3718934 - RNA, 18 nt, Human
ucaugaucuugugacaua

SEQ ID NO: 3718935 - RNA, 13 nt, Human
ucaugaugcaguc

SEQ ID NO: 3718936 - RNA, 15 nt, Human
ucaugaugcagucuc

SEQ ID NO: 3718937 - RNA, 17 nt, Human
ucaugaugcagucuccu

SEQ ID NO: 3718938 - RNA, 21 nt, Human
ucaugaugcagucuccucuuu

SEQ ID NO: 3718939 - RNA, 17 nt, Human
ucaugaugcucuuuccc

SEQ ID NO: 3718940 - RNA, 16 nt, Human
ucaugauuagcaaguu

SEQ ID NO: 3718941 - RNA, 23 nt, Human
ucaugauuucauuucaacuguuu

SEQ ID NO: 3718942 - RNA, 21 nt, Human
ucaugauuuugaaaucaugaa

SEQ ID NO: 3718943 - RNA, 13 nt, Human
ucaugcaaacucu

SEQ ID NO: 3718944 - RNA, 17 nt, Human
ucaugcaaaggcuggga

SEQ ID NO: 3718945 - RNA, 21 nt, Human
ucaugcacacaauuagauuuc

SEQ ID NO: 3718946 - RNA, 17 nt, Human
ucaugcacuuaaagaag

SEQ ID NO: 3718947 - RNA, 14 nt, Human
ucaugcagccguga

SEQ ID NO: 3718948 - RNA, 18 nt, Human
ucaugccaaccccgcccu

SEQ ID NO: 3718949 - RNA, 21 nt, Human
ucaugccaagcauuuaaugua

SEQ ID NO: 3718950 - RNA, 16 nt, Human
ucaugcccacccccug

SEQ ID NO: 3718951 - RNA, 23 nt, Human
ucaugcccacccccugcccugca

SEQ ID NO: 3718952 - RNA, 13 nt, Human
ucaugccccccuc

SEQ ID NO: 3718953 - RNA, 22 nt, Human
ucaugccccccucaaaccuccu

SEQ ID NO: 3718954 - RNA, 14 nt, Human
ucaugccucugagg

SEQ ID NO: 3718955 - RNA, 21 nt, Human
ucaugccucugaggccagccu

SEQ ID NO: 3718956 - RNA, 17 nt, Human
ucaugccuggcuucgca

SEQ ID NO: 3718957 - RNA, 14 nt, Human
ucaugccuguaauc

SEQ ID NO: 3718958 - RNA, 18 nt, Human
ucaugcuacccagccauu

SEQ ID NO: 3718959 - RNA, 24 nt, Human
ucaugcuccccugugccagcccag

SEQ ID NO: 3718960 - RNA, 14 nt, Human
ucaugcugaaagcc

SEQ ID NO: 3718961 - RNA, 23 nt, Human
ucaugcugccaauauccuaauaa

SEQ ID NO: 3718962 - RNA, 17 nt, Human
ucaugcugccccugccu

SEQ ID NO: 3718963 - RNA, 18 nt, Human
ucaugcugccccugccuu

SEQ ID NO: 3718964 - RNA, 19 nt, Human
ucaugcuggaaccugcaaa

SEQ ID NO: 3718965 - RNA, 22 nt, Human
ucaugcuuuaaaguguaauaau

SEQ ID NO: 3718966 - RNA, 21 nt, Human
ucauggaaugguuauaaaagu

SEQ ID NO: 3718967 - RNA, 22 nt, Human
ucauggaaugguuauaaaagug

SEQ ID NO: 3718968 - RNA, 24 nt, Human
ucauggacuucugccagcauaaua

SEQ ID NO: 3718969 - RNA, 17 nt, Human
ucauggagaaccaccua

SEQ ID NO: 3718970 - RNA, 23 nt, Human
ucauggagugacggucccacacu

SEQ ID NO: 3718971 - RNA, 18 nt, Human
ucauggcagauguaggag

SEQ ID NO: 3718972 - RNA, 22 nt, Human
ucauggcagauguaggagggac

SEQ ID NO: 3718973 - RNA, 13 nt, Human
ucauggccccucu

SEQ ID NO: 3718974 - RNA, 19 nt, Human
ucauggcucacugcagccu

SEQ ID NO: 3718975 - RNA, 18 nt, Human
ucaugggcaccaaccugc

SEQ ID NO: 3718976 - RNA, 22 nt, Human
ucauggggggagcacccugagg

SEQ ID NO: 3718977 - RNA, 13 nt, Human
ucauggucucagu

SEQ ID NO: 3718978 - RNA, 22 nt, Human
ucauggugaggcuuaacaaugu

SEQ ID NO: 3718979 - RNA, 17 nt, Human
ucaugguguaauaagac

SEQ ID NO: 3718980 - RNA, 20 nt, Human
ucaugguguaauaagacaua

SEQ ID NO: 3718981 - RNA, 22 nt, Human
ucaugguguaauaagacauaac

SEQ ID NO: 3718982 - RNA, 14 nt, Human
ucauguaaacauac

SEQ ID NO: 3718983 - RNA, 22 nt, Human
ucauguaaacauaccaacaugu

SEQ ID NO: 3718984 - RNA, 14 nt, Human
ucauguaaacugug

SEQ ID NO: 3718985 - RNA, 13 nt, Human
ucauguaaauaau

SEQ ID NO: 3718986 - RNA, 13 nt, Human
ucauguaaauuac

SEQ ID NO: 3718987 - RNA, 18 nt, Human
ucauguaagcugaaaaua

SEQ ID NO: 3718988 - RNA, 16 nt, Human
ucauguacaagaugaa

SEQ ID NO: 3718989 - RNA, 16 nt, Human
ucauguagagaaaagc

SEQ ID NO: 3718990 - RNA, 20 nt, Human
ucauguagagaaaagcacac

SEQ ID NO: 3718991 - RNA, 19 nt, Human
ucauguagcaaucagauuu

SEQ ID NO: 3718992 - RNA, 18 nt, Human
ucauguauuugagcauau

SEQ ID NO: 3718993 - RNA, 16 nt, Human
ucaugucaggccugug

SEQ ID NO: 3718994 - RNA, 17 nt, Human
ucaugucaggccugugu

SEQ ID NO: 3718995 - RNA, 17 nt, Human
ucauguccccaaaccug

SEQ ID NO: 3718996 - RNA, 19 nt, Human
ucauguccugugucaguuu

SEQ ID NO: 3718997 - RNA, 13 nt, Human
ucaugucuauugu

SEQ ID NO: 3718998 - RNA, 19 nt, Human
ucaugugacucuuuccaac

SEQ ID NO: 3718999 - RNA, 20 nt, Human
ucaugugauccuuuuauguu

SEQ ID NO: 3719000 - RNA, 13 nt, Human
ucauguggcugga

SEQ ID NO: 3719001 - RNA, 22 nt, Human
ucaugugggccacacaagugca

SEQ ID NO: 3719002 - RNA, 19 nt, Human
ucauguguaaucaauaaac

SEQ ID NO: 3719003 - RNA, 22 nt, Human
ucauguguaaucaauaaacgau

SEQ ID NO: 3719004 - RNA, 23 nt, Human
ucauguguaaucaauaaacgauu

SEQ ID NO: 3719005 - RNA, 20 nt, Human
ucauguguacaaaaguuuca

SEQ ID NO: 3719006 - RNA, 19 nt, Human
ucauguguaugggcaaaaa

SEQ ID NO: 3719007 - RNA, 20 nt, Human
ucaugugugcaacaggguau

SEQ ID NO: 3719008 - RNA, 16 nt, Human
ucaugugugcucuucu

SEQ ID NO: 3719009 - RNA, 16 nt, Human
ucauguguguccacga

SEQ ID NO: 3719010 - RNA, 21 nt, Human
ucauguguguccacgacuguc

SEQ ID NO: 3719011 - RNA, 12 nt, Human
ucauguguguua

SEQ ID NO: 3719012 - RNA, 17 nt, Human
ucauguguucccuuugu

SEQ ID NO: 3719013 - RNA, 22 nt, Human
ucauguuaaauaggcggggcuu

SEQ ID NO: 3719014 - RNA, 18 nt, Human
ucauguuaauccuagcug

SEQ ID NO: 3719015 - RNA, 21 nt, Human
ucauguuaguaauaccucuaa

SEQ ID NO: 3719016 - RNA, 19 nt, Human
ucauguuaguuaccuuaua

SEQ ID NO: 3719017 - RNA, 22 nt, Human
ucauguuauauuuaaugcauua

SEQ ID NO: 3719018 - RNA, 19 nt, Human
ucauguucccacuucaaaa

SEQ ID NO: 3719019 - RNA, 13 nt, Human
ucauguuccucaa

SEQ ID NO: 3719020 - RNA, 19 nt, Human
ucauguugaucauguacuu

SEQ ID NO: 3719021 - RNA, 13 nt, Human
ucauguuggucaa

SEQ ID NO: 3719022 - RNA, 19 nt, Human
ucauguuguuaaaauuaug

SEQ ID NO: 3719023 - RNA, 14 nt, Human
ucauguuuaugaaa

SEQ ID NO: 3719024 - RNA, 16 nt, Human
ucauguuuaugaaaau

SEQ ID NO: 3719025 - RNA, 16 nt, Human
ucauguuucuuaaaug

SEQ ID NO: 3719026 - RNA, 15 nt, Human
ucauguuucuuugau

SEQ ID NO: 3719027 - RNA, 21 nt, Human
ucauguuucuuugaucaugaa

SEQ ID NO: 3719028 - RNA, 21 nt, Human
ucauguuugcuucauaaauga

SEQ ID NO: 3719029 - RNA, 22 nt, Human
ucauguuuuaaauguacaguuu

SEQ ID NO: 3719030 - RNA, 15 nt, Human
ucauguuuuaacaaa

SEQ ID NO: 3719031 - RNA, 22 nt, Human
ucauguuuuccauuguuugaaa

SEQ ID NO: 3719032 - RNA, 15 nt, Human
ucauuaaauggggcu

SEQ ID NO: 3719033 - RNA, 13 nt, Human
ucauuaaauuacu

SEQ ID NO: 3719034 - RNA, 19 nt, Human
ucauuaaccgaugcuuuac

SEQ ID NO: 3719035 - RNA, 23 nt, Human
ucauuaaccgaugcuuuaccaaa

SEQ ID NO: 3719036 - RNA, 22 nt, Human
ucauuaagcccucuuccaucau

SEQ ID NO: 3719037 - RNA, 14 nt, Human
ucauuaaugacacu

SEQ ID NO: 3719038 - RNA, 13 nt, Human
ucauuaauucuau

SEQ ID NO: 3719039 - RNA, 14 nt, Human
ucauuaauucuaua

SEQ ID NO: 3719040 - RNA, 13 nt, Human
ucauuaccacagg

SEQ ID NO: 3719041 - RNA, 12 nt, Human
ucauuacuauaa

SEQ ID NO: 3719042 - RNA, 13 nt, Human
ucauuacuugauu

SEQ ID NO: 3719043 - RNA, 15 nt, Human
ucauuagaaauauuu

SEQ ID NO: 3719044 - RNA, 10 nt, Human
ucauuagaac

SEQ ID NO: 3719045 - RNA, 13 nt, Human
ucauuagacuccu

SEQ ID NO: 3719046 - RNA, 18 nt, Human
ucauuagcaaaaaaaguu

SEQ ID NO: 3719047 - RNA, 20 nt, Human
ucauuagcaaaaaaaguugu

SEQ ID NO: 3719048 - RNA, 22 nt, Human
ucauuagcaaaaaaaguuguau

SEQ ID NO: 3719049 - RNA, 16 nt, Human
ucauuaggugugacug

SEQ ID NO: 3719050 - RNA, 22 nt, Human
ucauuaggugugacugaauuuc

SEQ ID NO: 3719051 - RNA, 14 nt, Human
ucauuaguuuugaa

SEQ ID NO: 3719052 - RNA, 18 nt, Human
ucauuauagaucccccag

SEQ ID NO: 3719053 - RNA, 20 nt, Human
ucauuauaucauuggaacaa

SEQ ID NO: 3719054 - RNA, 20 nt, Human
ucauuauguaaaauguuuua

SEQ ID NO: 3719055 - RNA, 17 nt, Human
ucauuauguuaauauuu

SEQ ID NO: 3719056 - RNA, 19 nt, Human
ucauuauuacuuuugcugu

SEQ ID NO: 3719057 - RNA, 23 nt, Human
ucauuauucguagauauuggaca

SEQ ID NO: 3719058 - RNA, 17 nt, Human
ucauuauuuauguauug

SEQ ID NO: 3719059 - RNA, 14 nt, Human
ucauuauuuauuaa

SEQ ID NO: 3719060 - RNA, 14 nt, Human
ucauuauuugucaa

SEQ ID NO: 3719061 - RNA, 19 nt, Human
ucauuauuugucaaauugu

SEQ ID NO: 3719062 - RNA, 22 nt, Human
ucauucaaguguaaaauauuuu

SEQ ID NO: 3719063 - RNA, 22 nt, Human
ucauucaccaguacauucucag

SEQ ID NO: 3719064 - RNA, 20 nt, Human
ucauucacuucacugugcug

SEQ ID NO: 3719065 - RNA, 13 nt, Human
ucauucagaaaug

SEQ ID NO: 3719066 - RNA, 10 nt, Human
ucauucagca

SEQ ID NO: 3719067 - RNA, 13 nt, Human
ucauucaggaaaa

SEQ ID NO: 3719068 - RNA, 17 nt, Human
ucauucaguauuaaagg

SEQ ID NO: 3719069 - RNA, 19 nt, Human
ucauucauauuacaauauu

SEQ ID NO: 3719070 - RNA, 15 nt, Human
ucauucaugcuacug

SEQ ID NO: 3719071 - RNA, 20 nt, Human
ucauucauggaccacuguuu

SEQ ID NO: 3719072 - RNA, 22 nt, Human
ucauucauuuuauauugaaaaa

SEQ ID NO: 3719073 - RNA, 14 nt, Human
ucauucauuuuugu

SEQ ID NO: 3719074 - RNA, 23 nt, Human
ucauuccaccuucccaugcccug

SEQ ID NO: 3719075 - RNA, 18 nt, Human
ucauuccagaucccaggc

SEQ ID NO: 3719076 - RNA, 15 nt, Human
ucauuccauucugga

SEQ ID NO: 3719077 - RNA, 19 nt, Human
ucauuccauucuggaagug

SEQ ID NO: 3719078 - RNA, 12 nt, Human
ucauuccccagg

SEQ ID NO: 3719079 - RNA, 18 nt, Human
ucauuccuaacacagcau

SEQ ID NO: 3719080 - RNA, 16 nt, Human
ucauuccugaaagaaa

SEQ ID NO: 3719081 - RNA, 22 nt, Human
ucauuccugaaagaaacaguua

SEQ ID NO: 3719082 - RNA, 19 nt, Human
ucauuccugccugucuccu

SEQ ID NO: 3719083 - RNA, 15 nt, Human
ucauuccuuccacua

SEQ ID NO: 3719084 - RNA, 15 nt, Human
ucauucgggaugauu

SEQ ID NO: 3719085 - RNA, 21 nt, Human
ucauucgggccccaccugcag

SEQ ID NO: 3719086 - RNA, 15 nt, Human
ucauucguucugugg

SEQ ID NO: 3719087 - RNA, 12 nt, Human
ucauucuaaaga

SEQ ID NO: 3719088 - RNA, 22 nt, Human
ucauucuaaagauagaguaaaa

SEQ ID NO: 3719089 - RNA, 18 nt, Human
ucauucuaaugauggccc

SEQ ID NO: 3719090 - RNA, 16 nt, Human
ucauucucgugaguca

SEQ ID NO: 3719091 - RNA, 14 nt, Human
ucauucucugucuc

SEQ ID NO: 3719092 - RNA, 15 nt, Human
ucauucucugucuca

SEQ ID NO: 3719093 - RNA, 19 nt, Human
ucauucucugucucaucca

SEQ ID NO: 3719094 - RNA, 18 nt, Human
ucauucugaaggagcccc

SEQ ID NO: 3719095 - RNA, 14 nt, Human
ucauucuuauuuca

SEQ ID NO: 3719096 - RNA, 18 nt, Human
ucauucuugaaagcugug

SEQ ID NO: 3719097 - RNA, 14 nt, Human
ucauucuuugcagg

SEQ ID NO: 3719098 - RNA, 17 nt, Human
ucauugaaaugucacgu

SEQ ID NO: 3719099 - RNA, 15 nt, Human
ucauugaccugaggc

SEQ ID NO: 3719100 - RNA, 19 nt, Human
ucauugaccugaggcccuu

SEQ ID NO: 3719101 - RNA, 12 nt, Human
ucauugacuuuu

SEQ ID NO: 3719102 - RNA, 14 nt, Human
ucauugcaucauuu

SEQ ID NO: 3719103 - RNA, 19 nt, Human
ucauugccaagggcccaaa

SEQ ID NO: 3719104 - RNA, 15 nt, Human
ucauugccagugucu

SEQ ID NO: 3719105 - RNA, 18 nt, Human
ucauugccagugucuuuc

SEQ ID NO: 3719106 - RNA, 20 nt, Human
ucauugccagugucuuucuu

SEQ ID NO: 3719107 - RNA, 18 nt, Human
ucauugcccccagggcac

SEQ ID NO: 3719108 - RNA, 16 nt, Human
ucauugccuguguaug

SEQ ID NO: 3719109 - RNA, 22 nt, Human
ucauugccuguguauggaaaaa

SEQ ID NO: 3719110 - RNA, 16 nt, Human
ucauugcgaaucuuuu

SEQ ID NO: 3719111 - RNA, 14 nt, Human
ucauugcugaaaau

SEQ ID NO: 3719112 - RNA, 14 nt, Human
ucauugcuguagga

SEQ ID NO: 3719113 - RNA, 14 nt, Human
ucauugcuucuucu

SEQ ID NO: 3719114 - RNA, 16 nt, Human
ucauugcuucuucuga

SEQ ID NO: 3719115 - RNA, 21 nt, Human
ucauugcuuugaagcaguugu

SEQ ID NO: 3719116 - RNA, 11 nt, Human
ucauuggcuuu

SEQ ID NO: 3719117 - RNA, 16 nt, Human
ucauuggcuuuauccu

SEQ ID NO: 3719118 - RNA, 22 nt, Human
ucauugggccauguuuaagugu

SEQ ID NO: 3719119 - RNA, 23 nt, Human
ucauugggcuguuuucucaacaa

SEQ ID NO: 3719120 - RNA, 14 nt, Human
ucauuguaaacaaa

SEQ ID NO: 3719121 - RNA, 16 nt, Human
ucauuguaaacaaacu

SEQ ID NO: 3719122 - RNA, 24 nt, Human
ucauuguaacacuguuuauugaaa

SEQ ID NO: 3719123 - RNA, 16 nt, Human
ucauuguaauguuacu

SEQ ID NO: 3719124 - RNA, 20 nt, Human
ucauuguaauguuacugauc

SEQ ID NO: 3719125 - RNA, 15 nt, Human
ucauuguauaaaaau

SEQ ID NO: 3719126 - RNA, 16 nt, Human
ucauuguauauaugug

SEQ ID NO: 3719127 - RNA, 17 nt, Human
ucauuguauauaugugu

SEQ ID NO: 3719128 - RNA, 21 nt, Human
ucauuguauauauguguguuu

SEQ ID NO: 3719129 - RNA, 14 nt, Human
ucauuguaugaugu

SEQ ID NO: 3719130 - RNA, 17 nt, Human
ucauuguaugauguguu

SEQ ID NO: 3719131 - RNA, 22 nt, Human
ucauuguccagagcugcuuccc

SEQ ID NO: 3719132 - RNA, 13 nt, Human
ucauugucccucu

SEQ ID NO: 3719133 - RNA, 21 nt, Human
ucauugucccucuucacuccc

SEQ ID NO: 3719134 - RNA, 13 nt, Human
ucauugugguuau

SEQ ID NO: 3719135 - RNA, 15 nt, Human
ucauuguuauuuaua

SEQ ID NO: 3719136 - RNA, 22 nt, Human
gcuggcccgugacagacuccug

SEQ ID NO: 3719137 - RNA, 14 nt, Human
gcuggcccugcccu

SEQ ID NO: 3719138 - RNA, 19 nt, Human
gcuggcccuggcucccaca

SEQ ID NO: 3719139 - RNA, 20 nt, Human
gcuggccgaggguccuggcu

SEQ ID NO: 3719140 - RNA, 14 nt, Human
gcuggccggacacc

SEQ ID NO: 3719141 - RNA, 13 nt, Human
gcuggccgggacc

SEQ ID NO: 3719142 - RNA, 21 nt, Human
gcuggccgggcacagcugugg

SEQ ID NO: 3719143 - RNA, 22 nt, Human
gcuggccucccaaaugagccau

SEQ ID NO: 3719144 - RNA, 14 nt, Human
gcuggccucuacca

SEQ ID NO: 3719145 - RNA, 14 nt, Human
gcuggccucugcga

SEQ ID NO: 3719146 - RNA, 18 nt, Human
gcuggccucuggcucuca

SEQ ID NO: 3719147 - RNA, 19 nt, Human
gcuggccuggccccucagg

SEQ ID NO: 3719148 - RNA, 18 nt, Human
gcuggccuugugguccaa

SEQ ID NO: 3719149 - RNA, 17 nt, Human
gcuggcgcagccaaggc

SEQ ID NO: 3719150 - RNA, 16 nt, Human
gcuggcggccugcagc

SEQ ID NO: 3719151 - RNA, 20 nt, Human
gcuggcggcuacucagcagc

SEQ ID NO: 3719152 - RNA, 15 nt, Human
gcuggcuacgccucu

SEQ ID NO: 3719153 - RNA, 14 nt, Human
gcuggcuccagaug

SEQ ID NO: 3719154 - RNA, 14 nt, Human
gcuggcuccagccu

SEQ ID NO: 3719155 - RNA, 17 nt, Human
gcuggcuccccugcagc

SEQ ID NO: 3719156 - RNA, 21 nt, Human
gcuggcuccugauccacuuug

SEQ ID NO: 3719157 - RNA, 13 nt, Human
gcuggcucugagc

SEQ ID NO: 3719158 - RNA, 19 nt, Human
gcuggcucugugagggugc

SEQ ID NO: 3719159 - RNA, 18 nt, Human
gcuggcucuucugcccaa

SEQ ID NO: 3719160 - RNA, 13 nt, Human
gcuggcugcagug

SEQ ID NO: 3719161 - RNA, 22 nt, Human
gcuggcuggccuugugguccaa

SEQ ID NO: 3719162 - RNA, 15 nt, Human
gcuggcugggcaugg

SEQ ID NO: 3719163 - RNA, 17 nt, Human
gcuggcugggcauggac

SEQ ID NO: 3719164 - RNA, 20 nt, Human
gcuggcuguuggcugggggc

SEQ ID NO: 3719165 - RNA, 11 nt, Human
gcugggaaaca

SEQ ID NO: 3719166 - RNA, 21 nt, Human
gcugggaacucaccuggggcu

SEQ ID NO: 3719167 - RNA, 20 nt, Human
gcugggaauaagugccagga

SEQ ID NO: 3719168 - RNA, 21 nt, Human
gcugggaauggaggggcagag

SEQ ID NO: 3719169 - RNA, 20 nt, Human
gcugggacguggcucagcca

SEQ ID NO: 3719170 - RNA, 18 nt, Human
gcugggacuacaggcacc

SEQ ID NO: 3719171 - RNA, 16 nt, Human
gcugggacucagccuu

SEQ ID NO: 3719172 - RNA, 14 nt, Human
gcugggacugagcc

SEQ ID NO: 3719173 - RNA, 15 nt, Human
gcugggacugagcca

SEQ ID NO: 3719174 - RNA, 14 nt, Human
gcugggacuggcca

SEQ ID NO: 3719175 - RNA, 17 nt, Human
gcugggagagccuucca

SEQ ID NO: 3719176 - RNA, 22 nt, Human
gcugggagagccuuccaggggu

SEQ ID NO: 3719177 - RNA, 23 nt, Human
gcugggagaggcagcccaggaag

SEQ ID NO: 3719178 - RNA, 18 nt, Human
gcugggagcuccacucug

SEQ ID NO: 3719179 - RNA, 20 nt, Human
gcugggagcuccacucugcu

SEQ ID NO: 3719180 - RNA, 14 nt, Human
gcugggagcucugc

SEQ ID NO: 3719181 - RNA, 16 nt, Human
gcugggagcucugcag

SEQ ID NO: 3719182 - RNA, 14 nt, Human
gcugggaggcaugg

SEQ ID NO: 3719183 - RNA, 19 nt, Human
gcugggagggauagagggg

SEQ ID NO: 3719184 - RNA, 18 nt, Human
gcugggauagagggguca

SEQ ID NO: 3719185 - RNA, 22 nt, Human
gcugggaucugacugcacgugg

SEQ ID NO: 3719186 - RNA, 18 nt, Human
gcugggauggugggcuuc

SEQ ID NO: 3719187 - RNA, 20 nt, Human
gcugggauggugggcuucag

SEQ ID NO: 3719188 - RNA, 19 nt, Human
gcugggauuacaggcuccu

SEQ ID NO: 3719189 - RNA, 20 nt, Human
gcugggauuacaggcuccug

SEQ ID NO: 3719190 - RNA, 18 nt, Human
gcugggauuacaggugug

SEQ ID NO: 3719191 - RNA, 19 nt, Human
gcugggauuacagguguga

SEQ ID NO: 3719192 - RNA, 19 nt, Human
gcugggcacugcucucacc

SEQ ID NO: 3719193 - RNA, 19 nt, Human
gcugggcacuucccugcug

SEQ ID NO: 3719194 - RNA, 15 nt, Human
gcugggcagaggaaa

SEQ ID NO: 3719195 - RNA, 14 nt, Human
gcugggcagguugg

SEQ ID NO: 3719196 - RNA, 19 nt, Human
gcugggcaguuuuucugua

SEQ ID NO: 3719197 - RNA, 15 nt, Human
gcugggcccagaggc

SEQ ID NO: 3719198 - RNA, 17 nt, Human
gcugggccccagcccac

SEQ ID NO: 3719199 - RNA, 19 nt, Human
gcugggccccagcccaccc

SEQ ID NO: 3719200 - RNA, 21 nt, Human
gcugggccccagcccacccuc

SEQ ID NO: 3719201 - RNA, 17 nt, Human
gcugggccccccagcuc

SEQ ID NO: 3719202 - RNA, 12 nt, Human
gcugggccccug

SEQ ID NO: 3719203 - RNA, 20 nt, Human
gcugggccccugccucucug

SEQ ID NO: 3719204 - RNA, 13 nt, Human
gcugggccugguc

SEQ ID NO: 3719205 - RNA, 17 nt, Human
gcugggcggcugugcuu

SEQ ID NO: 3719206 - RNA, 12 nt, Human
gcugggcucccu

SEQ ID NO: 3719207 - RNA, 22 nt, Human
gcugggcucuccaccucagccu

SEQ ID NO: 3719208 - RNA, 13 nt, Human
gcugggcucugca

SEQ ID NO: 3719209 - RNA, 14 nt, Human
gcugggcucugcca

SEQ ID NO: 3719210 - RNA, 12 nt, Human
gcugggcugagc

SEQ ID NO: 3719211 - RNA, 13 nt, Human
gcugggcugagcc

SEQ ID NO: 3719212 - RNA, 20 nt, Human
gcugggcugagccccuaccc

SEQ ID NO: 3719213 - RNA, 13 nt, Human
gcugggcugggca

SEQ ID NO: 3719214 - RNA, 14 nt, Human
gcugggcugggcac

SEQ ID NO: 3719215 - RNA, 14 nt, Human
gcugggcugggcgc

SEQ ID NO: 3719216 - RNA, 12 nt, Human
gcugggcugggu

SEQ ID NO: 3719217 - RNA, 22 nt, Human
gcugggcuuggcagcccggguc

SEQ ID NO: 3719218 - RNA, 23 nt, Human
gcuggggaaaucaaaagggccaa

SEQ ID NO: 3719219 - RNA, 23 nt, Human
gcuggggaagaauuuacuuugga

SEQ ID NO: 3719220 - RNA, 15 nt, Human
gcuggggaaggaagc

SEQ ID NO: 3719221 - RNA, 15 nt, Human
gcuggggcagccucu

SEQ ID NO: 3719222 - RNA, 21 nt, Human
gcuggggcauggaaggcaaga

SEQ ID NO: 3719223 - RNA, 12 nt, Human
gcuggggccagu

SEQ ID NO: 3719224 - RNA, 12 nt, Human
gcuggggccuga

SEQ ID NO: 3719225 - RNA, 17 nt, Human
gcuggggcguggggagg

SEQ ID NO: 3719226 - RNA, 18 nt, Human
gcuggggcguggggaggg

SEQ ID NO: 3719227 - RNA, 19 nt, Human
gcuggggcguggggagggc

SEQ ID NO: 3719228 - RNA, 20 nt, Human
gcugggggaaugagcccaga

SEQ ID NO: 3719229 - RNA, 13 nt, Human
gcugggggcagga

SEQ ID NO: 3719230 - RNA, 20 nt, Human
gcugggggccucacuccagg

SEQ ID NO: 3719231 - RNA, 14 nt, Human
gcugggggccucag

SEQ ID NO: 3719232 - RNA, 19 nt, Human
gcugggggccucagugcca

SEQ ID NO: 3719233 - RNA, 19 nt, Human
gcuggggucccagcagcug

SEQ ID NO: 3719234 - RNA, 19 nt, Human
gcugggguggccugugugg

SEQ ID NO: 3719235 - RNA, 23 nt, Human
gcugggguggggaccucaggccu

SEQ ID NO: 3719236 - RNA, 16 nt, Human
gcugggucaggcaggg

SEQ ID NO: 3719237 - RNA, 12 nt, Human
gcugggucgccc

SEQ ID NO: 3719238 - RNA, 16 nt, Human
gcugggucgcccugga

SEQ ID NO: 3719239 - RNA, 17 nt, Human
gcugggucgcccuggac

SEQ ID NO: 3719240 - RNA, 19 nt, Human
gcugggugacagagcgaga

SEQ ID NO: 3719241 - RNA, 13 nt, Human
gcugggugcccac

SEQ ID NO: 3719242 - RNA, 16 nt, Human
gcugggugcccacagc

SEQ ID NO: 3719243 - RNA, 18 nt, Human
gcugggugcgaccccauc

SEQ ID NO: 3719244 - RNA, 14 nt, Human
gcuggguggcacug

SEQ ID NO: 3719245 - RNA, 16 nt, Human
gcuggguggcccaucc

SEQ ID NO: 3719246 - RNA, 20 nt, Human
gcuggguggcccaucccccc

SEQ ID NO: 3719247 - RNA, 22 nt, Human
gcuggguguauuaggacuggcu

SEQ ID NO: 3719248 - RNA, 21 nt, Human
gcuggguucuacccaggugcu

SEQ ID NO: 3719249 - RNA, 22 nt, Human
gcuggguuggcgcacccucccc

SEQ ID NO: 3719250 - RNA, 14 nt, Human
gcugguaaaaugaa

SEQ ID NO: 3719251 - RNA, 16 nt, Human
gcugguaaaaugaaga

SEQ ID NO: 3719252 - RNA, 14 nt, Human
gcugguaaacuauu

SEQ ID NO: 3719253 - RNA, 13 nt, Human
gcugguaacaguu

SEQ ID NO: 3719254 - RNA, 18 nt, Human
gcugguaagggccaaguc

SEQ ID NO: 3719255 - RNA, 14 nt, Human
gcugguagagaugg

SEQ ID NO: 3719256 - RNA, 15 nt, Human
gcugguagagaugga

SEQ ID NO: 3719257 - RNA, 15 nt, Human
gcugguagcucaggu

SEQ ID NO: 3719258 - RNA, 16 nt, Human
gcugguagcucaggug

SEQ ID NO: 3719259 - RNA, 19 nt, Human
gcugguagcucaggugggc

SEQ ID NO: 3719260 - RNA, 24 nt, Human
gcugguaucucagaaagugccuga

SEQ ID NO: 3719261 - RNA, 20 nt, Human
gcuggucacagccuccucug

SEQ ID NO: 3719262 - RNA, 22 nt, Human
gcuggucacagccuccucuguc

SEQ ID NO: 3719263 - RNA, 15 nt, Human
gcuggucacugccau

SEQ ID NO: 3719264 - RNA, 20 nt, Human
gcuggucacuucuucugucc

SEQ ID NO: 3719265 - RNA, 14 nt, Human
gcugguccagggcu

SEQ ID NO: 3719266 - RNA, 19 nt, Human
gcuggucccacucagucca

SEQ ID NO: 3719267 - RNA, 16 nt, Human
gcugguccgugggacg

SEQ ID NO: 3719268 - RNA, 20 nt, Human
gcuggucucaaacuccugac

SEQ ID NO: 3719269 - RNA, 20 nt, Human
gcuggugagugaugcggcag

SEQ ID NO: 3719270 - RNA, 21 nt, Human
gcuggugauggagguuucaua

SEQ ID NO: 3719271 - RNA, 20 nt, Human
gcuggugcacagccacuccc

SEQ ID NO: 3719272 - RNA, 14 nt, Human
gcuggugccagccu

SEQ ID NO: 3719273 - RNA, 23 nt, Human
gcuggugccagccuuccucugca

SEQ ID NO: 3719274 - RNA, 14 nt, Human
gcuggugcccggag

SEQ ID NO: 3719275 - RNA, 15 nt, Human
gcuggugcggcuggc

SEQ ID NO: 3719276 - RNA, 15 nt, Human
gcuggugcuguggcc

SEQ ID NO: 3719277 - RNA, 14 nt, Human
gcugguggcccagg

SEQ ID NO: 3719278 - RNA, 13 nt, Human
gcuggugggcacc

SEQ ID NO: 3719279 - RNA, 13 nt, Human
gcuggugguuuca

SEQ ID NO: 3719280 - RNA, 19 nt, Human
gcugguguagcuacagaga

SEQ ID NO: 3719281 - RNA, 14 nt, Human
gcuggugucaccug

SEQ ID NO: 3719282 - RNA, 21 nt, Human
gcugguguuaacagaagggag

SEQ ID NO: 3719283 - RNA, 14 nt, Human
gcugguuagaaaug

SEQ ID NO: 3719284 - RNA, 21 nt, Human
gcugguuagagguucccuuug

SEQ ID NO: 3719285 - RNA, 15 nt, Human
gcugguucaggguug

SEQ ID NO: 3719286 - RNA, 12 nt, Human
ucccccauagcc

SEQ ID NO: 3719287 - RNA, 19 nt, Human
ucccccauccuccccuucc

SEQ ID NO: 3719288 - RNA, 15 nt, Human
ucccccaucucccac

SEQ ID NO: 3719289 - RNA, 17 nt, Human
ucccccaucucccaccc

SEQ ID NO: 3719290 - RNA, 17 nt, Human
ucccccauuuuucccag

SEQ ID NO: 3719291 - RNA, 12 nt, Human
uccccccacucu

SEQ ID NO: 3719292 - RNA, 21 nt, Human
uccccccacucuccccacacu

SEQ ID NO: 3719293 - RNA, 12 nt, Human
uccccccaucuu

SEQ ID NO: 3719294 - RNA, 17 nt, Human
ucccccccaugcacugu

SEQ ID NO: 3719295 - RNA, 18 nt, Human
ucccccccaugcacugug

SEQ ID NO: 3719296 - RNA, 16 nt, Human
uccccccccuguauag

SEQ ID NO: 3719297 - RNA, 14 nt, Human
uccccccucaccag

SEQ ID NO: 3719298 - RNA, 21 nt, Human
ucccccgcaaugugcccccag

SEQ ID NO: 3719299 - RNA, 15 nt, Human
ucccccuauccuugg

SEQ ID NO: 3719300 - RNA, 16 nt, Human
ucccccucagcaagcc

SEQ ID NO: 3719301 - RNA, 19 nt, Human
ucccccucccagggccagg

SEQ ID NO: 3719302 - RNA, 21 nt, Human
ucccccucccccagccacucc

SEQ ID NO: 3719303 - RNA, 11 nt, Human
ucccccuccuu

SEQ ID NO: 3719304 - RNA, 18 nt, Human
ucccccuccuucccagcu

SEQ ID NO: 3719305 - RNA, 13 nt, Human
ucccccucuggcu

SEQ ID NO: 3719306 - RNA, 12 nt, Human
ucccccugcagc

SEQ ID NO: 3719307 - RNA, 16 nt, Human
ucccccugccagugcc

SEQ ID NO: 3719308 - RNA, 17 nt, Human
ucccccugccagugccu

SEQ ID NO: 3719309 - RNA, 20 nt, Human
ucccccugcccucguggcca

SEQ ID NO: 3719310 - RNA, 17 nt, Human
ucccccugcuuccaccu

SEQ ID NO: 3719311 - RNA, 17 nt, Human
ucccccuggcacugguu

SEQ ID NO: 3719312 - RNA, 12 nt, Human
ucccccugggcu

SEQ ID NO: 3719313 - RNA, 20 nt, Human
ucccccugggcucugcccca

SEQ ID NO: 3719314 - RNA, 16 nt, Human
ucccccugguugggug

SEQ ID NO: 3719315 - RNA, 16 nt, Human
ucccccuguccccuca

SEQ ID NO: 3719316 - RNA, 14 nt, Human
ucccccuucacaaa

SEQ ID NO: 3719317 - RNA, 20 nt, Human
ucccccuuccaaauaauaaa

SEQ ID NO: 3719318 - RNA, 12 nt, Human
ucccccuucucc

SEQ ID NO: 3719319 - RNA, 13 nt, Human
ucccccuucuccc

SEQ ID NO: 3719320 - RNA, 17 nt, Human
ucccccuugccacccca

SEQ ID NO: 3719321 - RNA, 23 nt, Human
ucccccuugccaccccacccucc

SEQ ID NO: 3719322 - RNA, 14 nt, Human
ucccccuuuuuugu

SEQ ID NO: 3719323 - RNA, 18 nt, Human
uccccgacgcccacccaa

SEQ ID NO: 3719324 - RNA, 18 nt, Human
uccccgaguuuccccaga

SEQ ID NO: 3719325 - RNA, 21 nt, Human
uccccgcaccccccaagcugu

SEQ ID NO: 3719326 - RNA, 19 nt, Human
uccccgcagugugcacuaa

SEQ ID NO: 3719327 - RNA, 20 nt, Human
uccccgcagugugcacuaag

SEQ ID NO: 3719328 - RNA, 16 nt, Human
uccccgcauuccaggc

SEQ ID NO: 3719329 - RNA, 13 nt, Human
uccccgccuggcc

SEQ ID NO: 3719330 - RNA, 18 nt, Human
uccccgccuggccaggag

SEQ ID NO: 3719331 - RNA, 13 nt, Human
uccccgccuguuc

SEQ ID NO: 3719332 - RNA, 15 nt, Human
uccccgcugcugugc

SEQ ID NO: 3719333 - RNA, 16 nt, Human
uccccgcuggcugggg

SEQ ID NO: 3719334 - RNA, 15 nt, Human
uccccggagggcugc

SEQ ID NO: 3719335 - RNA, 20 nt, Human
uccccggcacccucuggccg

SEQ ID NO: 3719336 - RNA, 22 nt, Human
uccccggcaugagacucagugc

SEQ ID NO: 3719337 - RNA, 17 nt, Human
uccccggcccuaccagc

SEQ ID NO: 3719338 - RNA, 16 nt, Human
uccccgggcaucuuug

SEQ ID NO: 3719339 - RNA, 13 nt, Human
uccccggggccca

SEQ ID NO: 3719340 - RNA, 17 nt, Human
uccccggggcccagggg

SEQ ID NO: 3719341 - RNA, 22 nt, Human
uccccggucccuugagaccuca

SEQ ID NO: 3719342 - RNA, 20 nt, Human
uccccgugccccgccucccc

SEQ ID NO: 3719343 - RNA, 13 nt, Human
uccccguggucuc

SEQ ID NO: 3719344 - RNA, 17 nt, Human
uccccguuccugacauc

SEQ ID NO: 3719345 - RNA, 20 nt, Human
uccccguuccugacaucaca

SEQ ID NO: 3719346 - RNA, 22 nt, Human
uccccuaaagccucaaaacaaa

SEQ ID NO: 3719347 - RNA, 16 nt, Human
uccccuaaucuuuucu

SEQ ID NO: 3719348 - RNA, 17 nt, Human
uccccuaccacugucuu

SEQ ID NO: 3719349 - RNA, 23 nt, Human
uccccuacccccuccucucugcc

SEQ ID NO: 3719350 - RNA, 15 nt, Human
uccccuacggaccag

SEQ ID NO: 3719351 - RNA, 16 nt, Human
uccccuacggaccagg

SEQ ID NO: 3719352 - RNA, 17 nt, Human
uccccuaguaagugccu

SEQ ID NO: 3719353 - RNA, 15 nt, Human
uccccuauccaccca

SEQ ID NO: 3719354 - RNA, 14 nt, Human
uccccucaaagucu

SEQ ID NO: 3719355 - RNA, 21 nt, Human
uccccucaaagucugcaacuu

SEQ ID NO: 3719356 - RNA, 16 nt, Human
uccccucacagccucu

SEQ ID NO: 3719357 - RNA, 12 nt, Human
uccccucacugg

SEQ ID NO: 3719358 - RNA, 18 nt, Human
uccccucagaaggucugu

SEQ ID NO: 3719359 - RNA, 21 nt, Human
uccccucagccacacccaggc

SEQ ID NO: 3719360 - RNA, 14 nt, Human
uccccucagcucca

SEQ ID NO: 3719361 - RNA, 15 nt, Human
uccccucagcuccag

SEQ ID NO: 3719362 - RNA, 19 nt, Human
uccccuccaaaaugugccu

SEQ ID NO: 3719363 - RNA, 12 nt, Human
uccccuccacug

SEQ ID NO: 3719364 - RNA, 14 nt, Human
uccccucccaggga

SEQ ID NO: 3719365 - RNA, 17 nt, Human
uccccucccagggagca

SEQ ID NO: 3719366 - RNA, 11 nt, Human
uccccucccau

SEQ ID NO: 3719367 - RNA, 14 nt, Human
uccccucccaucug

SEQ ID NO: 3719368 - RNA, 11 nt, Human
uccccuccccc

SEQ ID NO: 3719369 - RNA, 21 nt, Human
uccccucccccaccccugcug

SEQ ID NO: 3719370 - RNA, 16 nt, Human
uccccuccccugcugc

SEQ ID NO: 3719371 - RNA, 16 nt, Human
uccccucccuccucug

SEQ ID NO: 3719372 - RNA, 15 nt, Human
uccccucccuggcuc

SEQ ID NO: 3719373 - RNA, 21 nt, Human
uccccucccuggcucccauga

SEQ ID NO: 3719374 - RNA, 14 nt, Human
uccccucccugggu

SEQ ID NO: 3719375 - RNA, 14 nt, Human
uccccucccuguca

SEQ ID NO: 3719376 - RNA, 16 nt, Human
uccccuccggacuggu

SEQ ID NO: 3719377 - RNA, 21 nt, Human
uccccuccggacuggugcccu

SEQ ID NO: 3719378 - RNA, 13 nt, Human
uccccuccuaccc

SEQ ID NO: 3719379 - RNA, 14 nt, Human
uccccuccucacuc

SEQ ID NO: 3719380 - RNA, 12 nt, Human
uccccuccucca

SEQ ID NO: 3719381 - RNA, 14 nt, Human
uccccuccucuccc

SEQ ID NO: 3719382 - RNA, 15 nt, Human
uccccuccuucccaa

SEQ ID NO: 3719383 - RNA, 14 nt, Human
uccccuccuucucc

SEQ ID NO: 3719384 - RNA, 18 nt, Human
uccccuccuugccuccug

SEQ ID NO: 3719385 - RNA, 12 nt, Human
uccccuccuugg

SEQ ID NO: 3719386 - RNA, 17 nt, Human
uccccucggagaagagc

SEQ ID NO: 3719387 - RNA, 14 nt, Human
uccccucucugcac

SEQ ID NO: 3719388 - RNA, 13 nt, Human
uccccucugcugg

SEQ ID NO: 3719389 - RNA, 15 nt, Human
uccccucugcuggcc

SEQ ID NO: 3719390 - RNA, 15 nt, Human
uccccucuuccucuu

SEQ ID NO: 3719391 - RNA, 19 nt, Human
uccccucuugucuccccug

SEQ ID NO: 3719392 - RNA, 23 nt, Human
uccccucuuuuguuaaauaauau

SEQ ID NO: 3719393 - RNA, 15 nt, Human
uccccugacagggcc

SEQ ID NO: 3719394 - RNA, 21 nt, Human
uccccugauuacaccagccuc

SEQ ID NO: 3719395 - RNA, 17 nt, Human
uccccugcacuguaaaa

SEQ ID NO: 3719396 - RNA, 18 nt, Human
uccccugcacuguaaaau

SEQ ID NO: 3719397 - RNA, 13 nt, Human
uccccugcagccc

SEQ ID NO: 3719398 - RNA, 19 nt, Human
uccccugccaccaggccac

SEQ ID NO: 3719399 - RNA, 20 nt, Human
uccccugccagggcagggcc

SEQ ID NO: 3719400 - RNA, 22 nt, Human
uccccugccccuuuacggacac

SEQ ID NO: 3719401 - RNA, 23 nt, Human
uccccugcccugcugccgccucc

SEQ ID NO: 3719402 - RNA, 24 nt, Human
uccccugcccugguccagggaagc

SEQ ID NO: 3719403 - RNA, 12 nt, Human
uccccugccucc

SEQ ID NO: 3719404 - RNA, 17 nt, Human
uccccugccuccauccu

SEQ ID NO: 3719405 - RNA, 13 nt, Human
uccccugcuccug

SEQ ID NO: 3719406 - RNA, 17 nt, Human
uccccugcugcaggggc

SEQ ID NO: 3719407 - RNA, 15 nt, Human
uccccugcugggugu

SEQ ID NO: 3719408 - RNA, 21 nt, Human
uccccugcuggguguggcgca

SEQ ID NO: 3719409 - RNA, 11 nt, Human
uccccugcuuc

SEQ ID NO: 3719410 - RNA, 14 nt, Human
uccccugcuucaga

SEQ ID NO: 3719411 - RNA, 21 nt, Human
uccccuggaagcagugcccag

SEQ ID NO: 3719412 - RNA, 15 nt, Human
uccccugggcccuga

SEQ ID NO: 3719413 - RNA, 19 nt, Human
uccccuggggacagcaagg

SEQ ID NO: 3719414 - RNA, 18 nt, Human
uccccuggggugcaggcg

SEQ ID NO: 3719415 - RNA, 20 nt, Human
uccccuggggugcaggcgcc

SEQ ID NO: 3719416 - RNA, 19 nt, Human
uccccuguagagugggagc

SEQ ID NO: 3719417 - RNA, 15 nt, Human
uccccuguucacucu

SEQ ID NO: 3719418 - RNA, 13 nt, Human
uccccuguuucaa

SEQ ID NO: 3719419 - RNA, 18 nt, Human
uccccuuacccuuagaau

SEQ ID NO: 3719420 - RNA, 17 nt, Human
uccccuuauccucccug

SEQ ID NO: 3719421 - RNA, 18 nt, Human
uccccuuccccuuccuuc

SEQ ID NO: 3719422 - RNA, 13 nt, Human
uccccuucccugc

SEQ ID NO: 3719423 - RNA, 16 nt, Human
uccccuuccucacugc

SEQ ID NO: 3719424 - RNA, 18 nt, Human
uccccuuccucuugucug

SEQ ID NO: 3719425 - RNA, 13 nt, Human
uccccuucucuca

SEQ ID NO: 3719426 - RNA, 15 nt, Human
uccccuucucucauc

SEQ ID NO: 3719427 - RNA, 18 nt, Human
uccccuucucucaucucu

SEQ ID NO: 3719428 - RNA, 16 nt, Human
uccccuugagcugaga

SEQ ID NO: 3719429 - RNA, 19 nt, Human
uccccuugaggucucagcc

SEQ ID NO: 3719430 - RNA, 23 nt, Human
uccccuugauuuaaacacacaga

SEQ ID NO: 3719431 - RNA, 14 nt, Human
uccccuugcagccg

SEQ ID NO: 3719432 - RNA, 15 nt, Human
uccccuugccagcug

SEQ ID NO: 3719433 - RNA, 16 nt, Human
uccccuugccagcugc

SEQ ID NO: 3719434 - RNA, 22 nt, Human
uccccuugccagcugcugagcc

SEQ ID NO: 3719435 - RNA, 14 nt, Human
uccccuugcccuug

SEQ ID NO: 3719436 - RNA, 19 nt, Human
uccccuugcccuugcccug

SEQ ID NO: 3719437 - RNA, 18 nt, Human
uccccuugggcccacacc

SEQ ID NO: 3719438 - RNA, 22 nt, Human
ucauuguuauuuauacaagauu

SEQ ID NO: 3719439 - RNA, 18 nt, Human
ucauuguuggacauuugg

SEQ ID NO: 3719440 - RNA, 17 nt, Human
ucauuguuuugaauauu

SEQ ID NO: 3719441 - RNA, 15 nt, Human
ucauuuaaaaugauu

SEQ ID NO: 3719442 - RNA, 22 nt, Human
ucauuuaacugaagauguugag

SEQ ID NO: 3719443 - RNA, 15 nt, Human
ucauuuaagggaaaa

SEQ ID NO: 3719444 - RNA, 23 nt, Human
ucauuuaagggaaaaauauauau

SEQ ID NO: 3719445 - RNA, 14 nt, Human
ucauuuaauaauau

SEQ ID NO: 3719446 - RNA, 21 nt, Human
ucauuuaauaauauacuugug

SEQ ID NO: 3719447 - RNA, 15 nt, Human
ucauuuacuguggcu

SEQ ID NO: 3719448 - RNA, 23 nt, Human
ucauuuagcauguuguugaaagg

SEQ ID NO: 3719449 - RNA, 18 nt, Human
ucauuuagucaugugacc

SEQ ID NO: 3719450 - RNA, 22 nt, Human
ucauuuauaaagcuaaaauaac

SEQ ID NO: 3719451 - RNA, 14 nt, Human
ucauuuaugaaaag

SEQ ID NO: 3719452 - RNA, 11 nt, Human
ucauuuaugau

SEQ ID NO: 3719453 - RNA, 22 nt, Human
ucauuuauuguuuauguaaaug

SEQ ID NO: 3719454 - RNA, 18 nt, Human
ucauuucaaaaugcuuca

SEQ ID NO: 3719455 - RNA, 14 nt, Human
ucauuucacauuaa

SEQ ID NO: 3719456 - RNA, 14 nt, Human
ucauuucaccccuc

SEQ ID NO: 3719457 - RNA, 21 nt, Human
ucauuucaccccucccuuucu

SEQ ID NO: 3719458 - RNA, 13 nt, Human
ucauuucacugua

SEQ ID NO: 3719459 - RNA, 13 nt, Human
ucauuucagaagu

SEQ ID NO: 3719460 - RNA, 15 nt, Human
ucauuucauguccug

SEQ ID NO: 3719461 - RNA, 14 nt, Human
ucauuucauuccau

SEQ ID NO: 3719462 - RNA, 16 nt, Human
ucauuuccaagcaagu

SEQ ID NO: 3719463 - RNA, 16 nt, Human
ucauuuccauguaugc

SEQ ID NO: 3719464 - RNA, 17 nt, Human
ucauuuccauguaugca

SEQ ID NO: 3719465 - RNA, 18 nt, Human
ucauuuccccauaacuca

SEQ ID NO: 3719466 - RNA, 22 nt, Human
ucauuuccuauguaacugcauu

SEQ ID NO: 3719467 - RNA, 13 nt, Human
ucauuuccucaaa

SEQ ID NO: 3719468 - RNA, 16 nt, Human
ucauuuccugugucuu

SEQ ID NO: 3719469 - RNA, 21 nt, Human
ucauuuccuucaaggcaucau

SEQ ID NO: 3719470 - RNA, 13 nt, Human
ucauuucuaaaag

SEQ ID NO: 3719471 - RNA, 15 nt, Human
ucauuucuaaaagaa

SEQ ID NO: 3719472 - RNA, 19 nt, Human
ucauuucuacugugacuga

SEQ ID NO: 3719473 - RNA, 21 nt, Human
ucauuucuauuucuccuccau

SEQ ID NO: 3719474 - RNA, 24 nt, Human
ucauuucucacuguguacauaaug

SEQ ID NO: 3719475 - RNA, 15 nt, Human
ucauuucuuaugaau

SEQ ID NO: 3719476 - RNA, 19 nt, Human
ucauuugagcagggcucag

SEQ ID NO: 3719477 - RNA, 21 nt, Human
ucauuugagcagggcucagcg

SEQ ID NO: 3719478 - RNA, 16 nt, Human
ucauuugaugcuaaau

SEQ ID NO: 3719479 - RNA, 15 nt, Human
ucauuugcuuuggaa

SEQ ID NO: 3719480 - RNA, 18 nt, Human
ucauuugguucauuaauu

SEQ ID NO: 3719481 - RNA, 17 nt, Human
ucauuugguuggcacua

SEQ ID NO: 3719482 - RNA, 21 nt, Human
ucauuuguggcagucccuuau

SEQ ID NO: 3719483 - RNA, 12 nt, Human
ucauuuguguca

SEQ ID NO: 3719484 - RNA, 13 nt, Human
ucauuugugucaa

SEQ ID NO: 3719485 - RNA, 15 nt, Human
ucauuugugucaaug

SEQ ID NO: 3719486 - RNA, 16 nt, Human
ucauuugugugcucau

SEQ ID NO: 3719487 - RNA, 16 nt, Human
ucauuuguuauucuua

SEQ ID NO: 3719488 - RNA, 15 nt, Human
ucauuuguuuacauu

SEQ ID NO: 3719489 - RNA, 18 nt, Human
ucauuuguuuacauuuga

SEQ ID NO: 3719490 - RNA, 13 nt, Human
ucauuuuaaugua

SEQ ID NO: 3719491 - RNA, 20 nt, Human
ucauuuuagggguagcauuu

SEQ ID NO: 3719492 - RNA, 16 nt, Human
ucauuuuauaugucaa

SEQ ID NO: 3719493 - RNA, 14 nt, Human
ucauuuuaugucaa

SEQ ID NO: 3719494 - RNA, 17 nt, Human
ucauuuucauuagcaaa

SEQ ID NO: 3719495 - RNA, 14 nt, Human
ucauuuuccaauac

SEQ ID NO: 3719496 - RNA, 15 nt, Human
ucauuuuccccccac

SEQ ID NO: 3719497 - RNA, 21 nt, Human
ucauuuucuagauacaauaaa

SEQ ID NO: 3719498 - RNA, 14 nt, Human
ucauuuucuauaac

SEQ ID NO: 3719499 - RNA, 15 nt, Human
ucauuuucuauaaca

SEQ ID NO: 3719500 - RNA, 12 nt, Human
ucauuuucucua

SEQ ID NO: 3719501 - RNA, 16 nt, Human
ucauuuucucuaauau

SEQ ID NO: 3719502 - RNA, 14 nt, Human
ucauuuucucucag

SEQ ID NO: 3719503 - RNA, 15 nt, Human
ucauuuucucucagg

SEQ ID NO: 3719504 - RNA, 13 nt, Human
ucauuuucugcaa

SEQ ID NO: 3719505 - RNA, 16 nt, Human
ucauuuucugcaagcc

SEQ ID NO: 3719506 - RNA, 11 nt, Human
ucauuuugaag

SEQ ID NO: 3719507 - RNA, 14 nt, Human
ucauuuugcauuca

SEQ ID NO: 3719508 - RNA, 16 nt, Human
ucauuuugcauucaaa

SEQ ID NO: 3719509 - RNA, 17 nt, Human
ucauuuugcuucauagc

SEQ ID NO: 3719510 - RNA, 22 nt, Human
ucauuuugguaaaauacuucuu

SEQ ID NO: 3719511 - RNA, 14 nt, Human
ucauuuugguacuu

SEQ ID NO: 3719512 - RNA, 14 nt, Human
ucauuuuuaaaugu

SEQ ID NO: 3719513 - RNA, 15 nt, Human
ucauuuuuaaaugug

SEQ ID NO: 3719514 - RNA, 12 nt, Human
ucauuuuuaauc

SEQ ID NO: 3719515 - RNA, 20 nt, Human
ucauuuuuacaauguaauua

SEQ ID NO: 3719516 - RNA, 14 nt, Human
ucauuuuuauagca

SEQ ID NO: 3719517 - RNA, 19 nt, Human
ucauuuuucaauagcacau

SEQ ID NO: 3719518 - RNA, 12 nt, Human
ucauuuuuguac

SEQ ID NO: 3719519 - RNA, 15 nt, Human
ucauuuuuguacagu

SEQ ID NO: 3719520 - RNA, 12 nt, Human
ucauuuuuuccu

SEQ ID NO: 3719521 - RNA, 17 nt, Human
ucauuuuuuuaauuuau

SEQ ID NO: 3719522 - RNA, 15 nt, Human
ucauuuuuuuccuug

SEQ ID NO: 3719523 - RNA, 18 nt, Human
ucauuuuuuuccuugcaa

SEQ ID NO: 3719524 - RNA, 18 nt, Human
ucauuuuuuuuaagaaaa

SEQ ID NO: 3719525 - RNA, 23 nt, Human
ucauuuuuuuucuuugaauaaau

SEQ ID NO: 3719526 - RNA, 18 nt, Human
ucauuuuuuuuuuaucag

SEQ ID NO: 3719527 - RNA, 18 nt, Human
uccaaaaaaaaaaaaaau

SEQ ID NO: 3719528 - RNA, 19 nt, Human
uccaaaaaaaaaaaaaaua

SEQ ID NO: 3719529 - RNA, 22 nt, Human
uccaaaaaaaaaaaaaauacaa

SEQ ID NO: 3719530 - RNA, 23 nt, Human
uccaaaaaaaaaaaaaauacaau

SEQ ID NO: 3719531 - RNA, 19 nt, Human
uccaaaaagcuccuggggc

SEQ ID NO: 3719532 - RNA, 18 nt, Human
uccaaaaaucugccuggg

SEQ ID NO: 3719533 - RNA, 14 nt, Human
uccaaaaauuauua

SEQ ID NO: 3719534 - RNA, 18 nt, Human
uccaaaaccgccagcucu

SEQ ID NO: 3719535 - RNA, 13 nt, Human
uccaaaacugccu

SEQ ID NO: 3719536 - RNA, 13 nt, Human
uccaaaagaaaaa

SEQ ID NO: 3719537 - RNA, 13 nt, Human
uccaaaagcuuuu

SEQ ID NO: 3719538 - RNA, 23 nt, Human
uccaaaaguggccucuuugucua

SEQ ID NO: 3719539 - RNA, 19 nt, Human
uccaaaauaauuuuaagaa

SEQ ID NO: 3719540 - RNA, 23 nt, Human
uccaaaauuugaaauauuaaaau

SEQ ID NO: 3719541 - RNA, 19 nt, Human
uccagccugccuggcaggc

SEQ ID NO: 3719542 - RNA, 12 nt, Human
uccagccuggac

SEQ ID NO: 3719543 - RNA, 14 nt, Human
uccagccuggaccc

SEQ ID NO: 3719544 - RNA, 17 nt, Human
uccagccuggaccccca

SEQ ID NO: 3719545 - RNA, 18 nt, Human
uccagccuggacccccag

SEQ ID NO: 3719546 - RNA, 22 nt, Human
uccagccuggacccccagcuuu

SEQ ID NO: 3719547 - RNA, 19 nt, Human
uccagccugggaggcacag

SEQ ID NO: 3719548 - RNA, 13 nt, Human
uccagccugggca

SEQ ID NO: 3719549 - RNA, 20 nt, Human
uccagccugggcaacagagc

SEQ ID NO: 3719550 - RNA, 23 nt, Human
uccagccugggcagccaggcugc

SEQ ID NO: 3719551 - RNA, 19 nt, Human
uccagccuggggcugaggc

SEQ ID NO: 3719552 - RNA, 17 nt, Human
uccagccuggggucugg

SEQ ID NO: 3719553 - RNA, 12 nt, Human
uccagccugggu

SEQ ID NO: 3719554 - RNA, 24 nt, Human
uccagccugggugacagagcaagu

SEQ ID NO: 3719555 - RNA, 14 nt, Human
uccagcggcccugu

SEQ ID NO: 3719556 - RNA, 15 nt, Human
uccagcuagugaccc

SEQ ID NO: 3719557 - RNA, 17 nt, Human
uccagcucaccagcccc

SEQ ID NO: 3719558 - RNA, 23 nt, Human
uccagcucaccagccccagugcc

SEQ ID NO: 3719559 - RNA, 18 nt, Human
uccagcucauucauuuua

SEQ ID NO: 3719560 - RNA, 19 nt, Human
uccagcucauucauuuuau

SEQ ID NO: 3719561 - RNA, 17 nt, Human
uccagcucccugugccc

SEQ ID NO: 3719562 - RNA, 19 nt, Human
uccagcucccugugccccc

SEQ ID NO: 3719563 - RNA, 23 nt, Human
uccagcucccugugcccccaggg

SEQ ID NO: 3719564 - RNA, 19 nt, Human
uccagcuccuuugggcuuc

SEQ ID NO: 3719565 - RNA, 13 nt, Human
uccagcucuggag

SEQ ID NO: 3719566 - RNA, 18 nt, Human
uccagcucuuuccuccuu

SEQ ID NO: 3719567 - RNA, 23 nt, Human
uccagcugacccugguucucucu

SEQ ID NO: 3719568 - RNA, 13 nt, Human
uccagcugccccg

SEQ ID NO: 3719569 - RNA, 16 nt, Human
uccagcugccccgggg

SEQ ID NO: 3719570 - RNA, 21 nt, Human
uccagcugcccuuccgcagug

SEQ ID NO: 3719571 - RNA, 21 nt, Human
uccagcugcugagauccugga

SEQ ID NO: 3719572 - RNA, 19 nt, Human
uccagcugggcucugcaau

SEQ ID NO: 3719573 - RNA, 13 nt, Human
uccagcuggugag

SEQ ID NO: 3719574 - RNA, 17 nt, Human
uccagcuguccccccac

SEQ ID NO: 3719575 - RNA, 23 nt, Human
uccagcuucugguacucuccuag

SEQ ID NO: 3719576 - RNA, 16 nt, Human
uccagcuugcucuuca

SEQ ID NO: 3719577 - RNA, 16 nt, Human
uccagcuuguggagcc

SEQ ID NO: 3719578 - RNA, 19 nt, Human
uccagcuuguggagcccca

SEQ ID NO: 3719579 - RNA, 16 nt, Human
uccaggaaaaaggaca

SEQ ID NO: 3719580 - RNA, 23 nt, Human
uccaggaaacuccacaucugccu

SEQ ID NO: 3719581 - RNA, 18 nt, Human
uccaggaaccacaccaca

SEQ ID NO: 3719582 - RNA, 22 nt, Human
uccaggaaugccuccucccugg

SEQ ID NO: 3719583 - RNA, 18 nt, Human
uccaggacaggagaugcu

SEQ ID NO: 3719584 - RNA, 22 nt, Human
uccaggacaggagaugcugugc

SEQ ID NO: 3719585 - RNA, 17 nt, Human
uccaggacccugccagg

SEQ ID NO: 3719586 - RNA, 19 nt, Human
uccaggacccugccaggca

SEQ ID NO: 3719587 - RNA, 15 nt, Human
uccaggacuguuuca

SEQ ID NO: 3719588 - RNA, 20 nt, Human
uccaggacuguuucaaacau

SEQ ID NO: 3719589 - RNA, 23 nt, Human
uccaggagaaggccaauuccuau

SEQ ID NO: 3719590 - RNA, 12 nt, Human
uccaggagcagc

SEQ ID NO: 3719591 - RNA, 15 nt, Human
uccaggagcagccac

SEQ ID NO: 3719592 - RNA, 23 nt, Human
uccaggagccuggcuccguccag

SEQ ID NO: 3719593 - RNA, 21 nt, Human
uccaggagcuccaguguccug

SEQ ID NO: 3719594 - RNA, 16 nt, Human
uccaggagcuucuugu

SEQ ID NO: 3719595 - RNA, 19 nt, Human
uccaggaugcuaacaucua

SEQ ID NO: 3719596 - RNA, 22 nt, Human
uccaggauuccucuuuucucug

SEQ ID NO: 3719597 - RNA, 15 nt, Human
uccaggcacagcuga

SEQ ID NO: 3719598 - RNA, 17 nt, Human
uccaggcacagcugagu

SEQ ID NO: 3719599 - RNA, 12 nt, Human
uccaggcacagg

SEQ ID NO: 3719600 - RNA, 18 nt, Human
uccaggcacaggaugcug

SEQ ID NO: 3719601 - RNA, 22 nt, Human
uccaggcacaggaugcuguguu

SEQ ID NO: 3719602 - RNA, 13 nt, Human
uccaggcaccagg

SEQ ID NO: 3719603 - RNA, 20 nt, Human
uccaggcacccuucuuuccu

SEQ ID NO: 3719604 - RNA, 14 nt, Human
uccaggcacugaga

SEQ ID NO: 3719605 - RNA, 15 nt, Human
uccaggcagauccag

SEQ ID NO: 3719606 - RNA, 17 nt, Human
uccaggcagauccagga

SEQ ID NO: 3719607 - RNA, 20 nt, Human
uccaggcagauccaggacua

SEQ ID NO: 3719608 - RNA, 18 nt, Human
uccaggcagcagacacau

SEQ ID NO: 3719609 - RNA, 11 nt, Human
uccaggcagcc

SEQ ID NO: 3719610 - RNA, 15 nt, Human
uccaggcagccucug

SEQ ID NO: 3719611 - RNA, 22 nt, Human
uccaggcagucgggggcuggcc

SEQ ID NO: 3719612 - RNA, 17 nt, Human
uccaggccauggaggca

SEQ ID NO: 3719613 - RNA, 17 nt, Human
uccaggcccaacuguga

SEQ ID NO: 3719614 - RNA, 18 nt, Human
uccaggcccaaggcuccc

SEQ ID NO: 3719615 - RNA, 18 nt, Human
uccaggccgcgcccuuuc

SEQ ID NO: 3719616 - RNA, 20 nt, Human
uccaggccgcgcccuuuccc

SEQ ID NO: 3719617 - RNA, 18 nt, Human
uccaggccuacuccuguc

SEQ ID NO: 3719618 - RNA, 14 nt, Human
uccaggccugcagc

SEQ ID NO: 3719619 - RNA, 20 nt, Human
uccaggccugcagcaggagu

SEQ ID NO: 3719620 - RNA, 13 nt, Human
uccaggccugccu

SEQ ID NO: 3719621 - RNA, 17 nt, Human
uccaggccugccuccca

SEQ ID NO: 3719622 - RNA, 19 nt, Human
uccaggcgaugugcaagug

SEQ ID NO: 3719623 - RNA, 13 nt, Human
uccaggcuagucc

SEQ ID NO: 3719624 - RNA, 19 nt, Human
uccaggcuauguauaaaau

SEQ ID NO: 3719625 - RNA, 12 nt, Human
uccaggcuccuu

SEQ ID NO: 3719626 - RNA, 14 nt, Human
uccaggcuguaucc

SEQ ID NO: 3719627 - RNA, 20 nt, Human
uccguggguugcuaacugaa

SEQ ID NO: 3719628 - RNA, 16 nt, Human
uccguguccaccccca

SEQ ID NO: 3719629 - RNA, 16 nt, Human
uccguguggauccaau

SEQ ID NO: 3719630 - RNA, 17 nt, Human
uccguuagcuccugugg

SEQ ID NO: 3719631 - RNA, 15 nt, Human
uccguuggccacucc

SEQ ID NO: 3719632 - RNA, 21 nt, Human
uccguuuauuauaaacuguau

SEQ ID NO: 3719633 - RNA, 20 nt, Human
uccguuugauuugucacugc

SEQ ID NO: 3719634 - RNA, 21 nt, Human
uccguuugauuugucacugcu

SEQ ID NO: 3719635 - RNA, 16 nt, Human
uccuaaaagcaaaaua

SEQ ID NO: 3719636 - RNA, 23 nt, Human
uccuaaaauaagggcagagucac

SEQ ID NO: 3719637 - RNA, 19 nt, Human
uccuaaauuuuccuguccu

SEQ ID NO: 3719638 - RNA, 22 nt, Human
uccuaagaaagaggagugcuug

SEQ ID NO: 3719639 - RNA, 15 nt, Human
uccuaagaaauaugu

SEQ ID NO: 3719640 - RNA, 18 nt, Human
uccuaagaaauaugugag

SEQ ID NO: 3719641 - RNA, 15 nt, Human
uccuaagaagcuucu

SEQ ID NO: 3719642 - RNA, 16 nt, Human
uccuaagacacaaaug

SEQ ID NO: 3719643 - RNA, 18 nt, Human
uccuaagaccugggguug

SEQ ID NO: 3719644 - RNA, 20 nt, Human
uccuaagauguguucuuauu

SEQ ID NO: 3719645 - RNA, 13 nt, Human
uccuaagcaucua

SEQ ID NO: 3719646 - RNA, 14 nt, Human
uccuaagccuaaaa

SEQ ID NO: 3719647 - RNA, 17 nt, Human
uccuaagccuguggcug

SEQ ID NO: 3719648 - RNA, 20 nt, Human
uccuaagcuauucaguaaua

SEQ ID NO: 3719649 - RNA, 22 nt, Human
uccuaagcuggagugcaguggc

SEQ ID NO: 3719650 - RNA, 18 nt, Human
uccuaaggacacacuaau

SEQ ID NO: 3719651 - RNA, 16 nt, Human
uccuaagggucgaaag

SEQ ID NO: 3719652 - RNA, 23 nt, Human
uccuaagggucgaaagcucuaga

SEQ ID NO: 3719653 - RNA, 15 nt, Human
uccuaauaaaaaggu

SEQ ID NO: 3719654 - RNA, 18 nt, Human
uccuaauaaaaaggugac

SEQ ID NO: 3719655 - RNA, 18 nt, Human
uccuaauaaaguucugua

SEQ ID NO: 3719656 - RNA, 20 nt, Human
uccuaauaaucauuggauuc

SEQ ID NO: 3719657 - RNA, 22 nt, Human
uccuaaucagaaauuuuuauca

SEQ ID NO: 3719658 - RNA, 17 nt, Human
uccuaauggugaugcag

SEQ ID NO: 3719659 - RNA, 20 nt, Human
uccuaauggugaugcagucu

SEQ ID NO: 3719660 - RNA, 15 nt, Human
uccuaauuccacagc

SEQ ID NO: 3719661 - RNA, 18 nt, Human
uccuaauuucccuucuug

SEQ ID NO: 3719662 - RNA, 15 nt, Human
uccuaauuucuccuc

SEQ ID NO: 3719663 - RNA, 16 nt, Human
uccuaauuuugagaaa

SEQ ID NO: 3719664 - RNA, 15 nt, Human
uccuacaaagauguu

SEQ ID NO: 3719665 - RNA, 18 nt, Human
uccuacaagagcagccug

SEQ ID NO: 3719666 - RNA, 20 nt, Human
uccuacaagagcagccugug

SEQ ID NO: 3719667 - RNA, 23 nt, Human
uccuacaagagcagccuguggca

SEQ ID NO: 3719668 - RNA, 20 nt, Human
uccuacaagauuuagaaaaa

SEQ ID NO: 3719669 - RNA, 15 nt, Human
uccuacaauauauau

SEQ ID NO: 3719670 - RNA, 14 nt, Human
uccuacacaggaca

SEQ ID NO: 3719671 - RNA, 15 nt, Human
uccuacacaggacag

SEQ ID NO: 3719672 - RNA, 15 nt, Human
uccuacaccuaacuc

SEQ ID NO: 3719673 - RNA, 19 nt, Human
uccuacagaaaaaccuugg

SEQ ID NO: 3719674 - RNA, 13 nt, Human
uccuacagcacua

SEQ ID NO: 3719675 - RNA, 13 nt, Human
uccuacagccccu

SEQ ID NO: 3719676 - RNA, 23 nt, Human
uccuacaguuggaaauccaucca

SEQ ID NO: 3719677 - RNA, 19 nt, Human
uccuacauaucccuuccag

SEQ ID NO: 3719678 - RNA, 14 nt, Human
uccuaccaagucaa

SEQ ID NO: 3719679 - RNA, 15 nt, Human
uccuaccaaugcaug

SEQ ID NO: 3719680 - RNA, 21 nt, Human
uccuaccacccgguccccacu

SEQ ID NO: 3719681 - RNA, 16 nt, Human
uccuacccaaccacuc

SEQ ID NO: 3719682 - RNA, 21 nt, Human
uccuaccccaauuccuuguag

SEQ ID NO: 3719683 - RNA, 17 nt, Human
uccuaccccucccagcu

SEQ ID NO: 3719684 - RNA, 15 nt, Human
uccuacccugccucc

SEQ ID NO: 3719685 - RNA, 20 nt, Human
uccuacccugcgcccagucc

SEQ ID NO: 3719686 - RNA, 13 nt, Human
uccuaccgucuuu

SEQ ID NO: 3719687 - RNA, 15 nt, Human
uccuaccucaaaauu

SEQ ID NO: 3719688 - RNA, 14 nt, Human
uccuaccucagccu

SEQ ID NO: 3719689 - RNA, 14 nt, Human
uccuaccugcccug

SEQ ID NO: 3719690 - RNA, 16 nt, Human
uccuaccugcccugga

SEQ ID NO: 3719691 - RNA, 17 nt, Human
uccuacucccagacacc

SEQ ID NO: 3719692 - RNA, 19 nt, Human
uccuacucggcucugcagu

SEQ ID NO: 3719693 - RNA, 12 nt, Human
uccuacucugug

SEQ ID NO: 3719694 - RNA, 15 nt, Human
uccuacucuguguca

SEQ ID NO: 3719695 - RNA, 13 nt, Human
uccuacucuucuc

SEQ ID NO: 3719696 - RNA, 18 nt, Human
uccuacucuucucucugc

SEQ ID NO: 3719697 - RNA, 16 nt, Human
uccuacuuuuaaagaa

SEQ ID NO: 3719698 - RNA, 17 nt, Human
uccuacuuuuaaagaau

SEQ ID NO: 3719699 - RNA, 19 nt, Human
uccuagaaguuacugaaug

SEQ ID NO: 3719700 - RNA, 18 nt, Human
uccuagagaacgcagccc

SEQ ID NO: 3719701 - RNA, 23 nt, Human
uccuagagaacgcagcccuagag

SEQ ID NO: 3719702 - RNA, 15 nt, Human
uccuagaggaccuga

SEQ ID NO: 3719703 - RNA, 18 nt, Human
uccuagaggcccuuugcu

SEQ ID NO: 3719704 - RNA, 21 nt, Human
uccuagagggaggggccuagg

SEQ ID NO: 3719705 - RNA, 14 nt, Human
uccuagaguagagu

SEQ ID NO: 3719706 - RNA, 14 nt, Human
uccuagauaaaaag

SEQ ID NO: 3719707 - RNA, 21 nt, Human
uccuagauggcagucacugaa

SEQ ID NO: 3719708 - RNA, 22 nt, Human
uccuagauggcagucacugaau

SEQ ID NO: 3719709 - RNA, 20 nt, Human
uccuagauuauaucaaagua

SEQ ID NO: 3719710 - RNA, 19 nt, Human
uccuagcacacacuuuugg

SEQ ID NO: 3719711 - RNA, 15 nt, Human
uccuagcacagaugg

SEQ ID NO: 3719712 - RNA, 21 nt, Human
uccuagcacagauggccagcc

SEQ ID NO: 3719713 - RNA, 17 nt, Human
uccuagcacaugcuuca

SEQ ID NO: 3719714 - RNA, 20 nt, Human
uccuagcacuuugggaggcc

SEQ ID NO: 3719715 - RNA, 12 nt, Human
uccuagcagaga

SEQ ID NO: 3719716 - RNA, 13 nt, Human
uccuagccacuca

SEQ ID NO: 3719717 - RNA, 17 nt, Human
uccuagccuguuucuuc

SEQ ID NO: 3719718 - RNA, 19 nt, Human
uccuagccuuauccucuga

SEQ ID NO: 3719719 - RNA, 21 nt, Human
uccuagccuuauccucugauc

SEQ ID NO: 3719720 - RNA, 16 nt, Human
uccuagcugcacaggg

SEQ ID NO: 3719721 - RNA, 20 nt, Human
uccuagcugcacagggcagc

SEQ ID NO: 3719722 - RNA, 18 nt, Human
uccuagcuguccuuuuuc

SEQ ID NO: 3719723 - RNA, 14 nt, Human
uccuagcugugugc

SEQ ID NO: 3719724 - RNA, 21 nt, Human
uccuagcuugggaggcuuccc

SEQ ID NO: 3719725 - RNA, 20 nt, Human
uccuaggacccgucuccagc

SEQ ID NO: 3719726 - RNA, 13 nt, Human
uccuaggccacac

SEQ ID NO: 3719727 - RNA, 22 nt, Human
uccuaggccucaacuccuccca

SEQ ID NO: 3719728 - RNA, 15 nt, Human
uccuaggcuggaagg

SEQ ID NO: 3719729 - RNA, 20 nt, Human
uccuaggcuggaaggaggaa

SEQ ID NO: 3719730 - RNA, 19 nt, Human
uccuagggaaggguggugg

SEQ ID NO: 3719731 - RNA, 23 nt, Human
uccuagucucuaucauuaaaguu

SEQ ID NO: 3719732 - RNA, 14 nt, Human
uccuagugaaagag

SEQ ID NO: 3719733 - RNA, 17 nt, Human
uccuaguuccaccauca

SEQ ID NO: 3719734 - RNA, 18 nt, Human
uccuaguucuagaaaaac

SEQ ID NO: 3719735 - RNA, 18 nt, Human
uccuaguucuguagaaau

SEQ ID NO: 3719736 - RNA, 23 nt, Human
uccuaguucuguagaaaugguug

SEQ ID NO: 3719737 - RNA, 17 nt, Human
uccuaguuuccucuccu

SEQ ID NO: 3719738 - RNA, 21 nt, Human
uccuaguuugaccucacagug

SEQ ID NO: 3719739 - RNA, 17 nt, Human
uccuaguuuuccuacuu

SEQ ID NO: 3719740 - RNA, 13 nt, Human
uccuaguuuucuc

SEQ ID NO: 3719741 - RNA, 20 nt, Human
uccuauaacuugaugcaugu

SEQ ID NO: 3719742 - RNA, 18 nt, Human
uccuauacgcagcgugcu

SEQ ID NO: 3719743 - RNA, 19 nt, Human
uccuauacgcagcgugcuu

SEQ ID NO: 3719744 - RNA, 15 nt, Human
uccuauauaguuuau

SEQ ID NO: 3719745 - RNA, 20 nt, Human
uccuauauauuucuauuauu

SEQ ID NO: 3719746 - RNA, 18 nt, Human
uccuauauccugugacug

SEQ ID NO: 3719747 - RNA, 13 nt, Human
uccuauaugcacu

SEQ ID NO: 3719748 - RNA, 16 nt, Human
uccuaucaccuccccu

SEQ ID NO: 3719749 - RNA, 20 nt, Human
uccuaucaccugucuugccu

SEQ ID NO: 3719750 - RNA, 17 nt, Human
uccuaucagaaguuucu

SEQ ID NO: 3719751 - RNA, 15 nt, Human
uccuaucccauccca

SEQ ID NO: 3719752 - RNA, 16 nt, Human
uccuaucccaucccau

SEQ ID NO: 3719753 - RNA, 18 nt, Human
uccuaucccaucccaucc

SEQ ID NO: 3719754 - RNA, 17 nt, Human
uccuaucuccagcggcc

SEQ ID NO: 3719755 - RNA, 14 nt, Human
uccuaucuguguuu

SEQ ID NO: 3719756 - RNA, 16 nt, Human
uccuaugauguauacu

SEQ ID NO: 3719757 - RNA, 12 nt, Human
uccuaugcaugg

SEQ ID NO: 3719758 - RNA, 13 nt, Human
uccuaugcuuuag

SEQ ID NO: 3719759 - RNA, 13 nt, Human
uccuauggaaacc

SEQ ID NO: 3719760 - RNA, 22 nt, Human
uccuaugugauuuuaacucugu

SEQ ID NO: 3719761 - RNA, 19 nt, Human
uccuauguuuuuguucaaa

SEQ ID NO: 3719762 - RNA, 19 nt, Human
uccuauuaguguuauauga

SEQ ID NO: 3719763 - RNA, 16 nt, Human
uccuauucucaccagg

SEQ ID NO: 3719764 - RNA, 18 nt, Human
uccuauucucaccaggaa

SEQ ID NO: 3719765 - RNA, 19 nt, Human
uccuauugugauuugacug

SEQ ID NO: 3719766 - RNA, 21 nt, Human
uccuauugugcaauguaaaua

SEQ ID NO: 3719767 - RNA, 12 nt, Human
uccuauuucaga

SEQ ID NO: 3719768 - RNA, 20 nt, Human
uccuauuucagaaguuuaaa

SEQ ID NO: 3719769 - RNA, 13 nt, Human
uccuauuucagua

SEQ ID NO: 3719770 - RNA, 16 nt, Human
uccuauuugcacugua

SEQ ID NO: 3719771 - RNA, 18 nt, Human
uccuauuugccaugggcu

SEQ ID NO: 3719772 - RNA, 19 nt, Human
uccuauuuugcauaauaaa

SEQ ID NO: 3719773 - RNA, 17 nt, Human
uccucaaaacuggaguc

SEQ ID NO: 3719774 - RNA, 20 nt, Human
uccucaaaacuucagacaua

SEQ ID NO: 3719775 - RNA, 14 nt, Human
uccucaaacaacac

SEQ ID NO: 3719776 - RNA, 14 nt, Human
uccucaaacacugc

SEQ ID NO: 3719777 - RNA, 22 nt, Human
gcuuccaaggggcaaauuuuua

SEQ ID NO: 3719778 - RNA, 15 nt, Human
gcuuccaaggugguc

SEQ ID NO: 3719779 - RNA, 16 nt, Human
gcuuccaagguggucu

SEQ ID NO: 3719780 - RNA, 12 nt, Human
gcuuccaccuca

SEQ ID NO: 3719781 - RNA, 16 nt, Human
gcuuccaccucacccc

SEQ ID NO: 3719782 - RNA, 20 nt, Human
gcuuccaccucaccccacuu

SEQ ID NO: 3719783 - RNA, 13 nt, Human
gcuuccagagagu

SEQ ID NO: 3719784 - RNA, 19 nt, Human
gcuuccagagaguccucug

SEQ ID NO: 3719785 - RNA, 22 nt, Human
gcuuccagagaguccucuggau

SEQ ID NO: 3719786 - RNA, 14 nt, Human
gcuuccaggaaaaa

SEQ ID NO: 3719787 - RNA, 19 nt, Human
gcuuccaggaaacuccaca

SEQ ID NO: 3719788 - RNA, 20 nt, Human
gcuuccagguaucuccagga

SEQ ID NO: 3719789 - RNA, 19 nt, Human
gcuuccagugaggcucugc

SEQ ID NO: 3719790 - RNA, 20 nt, Human
gcuuccauagcugcugcccu

SEQ ID NO: 3719791 - RNA, 15 nt, Human
gcuuccaugauucua

SEQ ID NO: 3719792 - RNA, 18 nt, Human
gcuuccaugauucuauuu

SEQ ID NO: 3719793 - RNA, 17 nt, Human
gcuuccauuugugugug

SEQ ID NO: 3719794 - RNA, 20 nt, Human
gcuuccauuugugugugugc

SEQ ID NO: 3719795 - RNA, 18 nt, Human
gcuucccaagggcugccg

SEQ ID NO: 3719796 - RNA, 13 nt, Human
gcuucccaccucc

SEQ ID NO: 3719797 - RNA, 17 nt, Human
gcuucccaccucccugc

SEQ ID NO: 3719798 - RNA, 23 nt, Human
gcuucccaccucccugcccaggc

SEQ ID NO: 3719799 - RNA, 22 nt, Human
gcuucccaguggcugcugccca

SEQ ID NO: 3719800 - RNA, 16 nt, Human
gcuucccauccccagc

SEQ ID NO: 3719801 - RNA, 22 nt, Human
gcuucccauccuacccucgggc

SEQ ID NO: 3719802 - RNA, 17 nt, Human
gcuucccaugucuuucu

SEQ ID NO: 3719803 - RNA, 22 nt, Human
gcuuccccaacacgcaggagca

SEQ ID NO: 3719804 - RNA, 16 nt, Human
gcuuccccaguagcug

SEQ ID NO: 3719805 - RNA, 12 nt, Human
gcuuccccuccc

SEQ ID NO: 3719806 - RNA, 23 nt, Human
gcuucccgcucagcccucccugc

SEQ ID NO: 3719807 - RNA, 14 nt, Human
gcuucccuaaucua

SEQ ID NO: 3719808 - RNA, 15 nt, Human
gcuucccuccauccc

SEQ ID NO: 3719809 - RNA, 13 nt, Human
gcuucccuccugc

SEQ ID NO: 3719810 - RNA, 12 nt, Human
gcuucccucugc

SEQ ID NO: 3719811 - RNA, 23 nt, Human
gcuucccucugccugucccucuc

SEQ ID NO: 3719812 - RNA, 13 nt, Human
gcuucccugaagc

SEQ ID NO: 3719813 - RNA, 18 nt, Human
gcuucccugacucauucu

SEQ ID NO: 3719814 - RNA, 14 nt, Human
gcuuccgcauccua

SEQ ID NO: 3719815 - RNA, 16 nt, Human
gcuuccggcuccugug

SEQ ID NO: 3719816 - RNA, 20 nt, Human
gcuuccgguagggaggcagc

SEQ ID NO: 3719817 - RNA, 22 nt, Human
gcuuccgguagggaggcagccu

SEQ ID NO: 3719818 - RNA, 22 nt, Human
gcuuccuacccacaccucugcc

SEQ ID NO: 3719819 - RNA, 20 nt, Human
gcuuccucccaacaagcagc

SEQ ID NO: 3719820 - RNA, 14 nt, Human
gcuuccuccucccu

SEQ ID NO: 3719821 - RNA, 11 nt, Human
gcuuccuccug

SEQ ID NO: 3719822 - RNA, 13 nt, Human
gcuuccuccugcg

SEQ ID NO: 3719823 - RNA, 20 nt, Human
gcuuccucuagaagccaagg

SEQ ID NO: 3719824 - RNA, 22 nt, Human
gcuuccucuagaagccaaggga

SEQ ID NO: 3719825 - RNA, 15 nt, Human
gcuuccugaggggag

SEQ ID NO: 3719826 - RNA, 13 nt, Human
gcuuccuggagca

SEQ ID NO: 3719827 - RNA, 18 nt, Human
gcuuccuggagcagaagc

SEQ ID NO: 3719828 - RNA, 11 nt, Human
gcuuccuggug

SEQ ID NO: 3719829 - RNA, 16 nt, Human
gcuuccuguccuccca

SEQ ID NO: 3719830 - RNA, 17 nt, Human
gcuuccuucauuuccuc

SEQ ID NO: 3719831 - RNA, 22 nt, Human
gcuuccuucugugaaaguacau

SEQ ID NO: 3719832 - RNA, 23 nt, Human
gcuuccuuguagcgacuaaacua

SEQ ID NO: 3719833 - RNA, 16 nt, Human
gcuuccuuucccaagc

SEQ ID NO: 3719834 - RNA, 24 nt, Human
gcuuccuuucccaagccuucgggc

SEQ ID NO: 3719835 - RNA, 14 nt, Human
gcuucgacuuuucu

SEQ ID NO: 3719836 - RNA, 14 nt, Human
gcuucguuuauuuu

SEQ ID NO: 3719837 - RNA, 17 nt, Human
gcuucguuuauuuucaa

SEQ ID NO: 3719838 - RNA, 19 nt, Human
gcuucuaaguaaauacaau

SEQ ID NO: 3719839 - RNA, 20 nt, Human
gcuucuaaguaaauacaauu

SEQ ID NO: 3719840 - RNA, 21 nt, Human
gcuucuaaguaaauacaauuu

SEQ ID NO: 3719841 - RNA, 20 nt, Human
gcuucuaauauuuauugcuu

SEQ ID NO: 3719842 - RNA, 17 nt, Human
gcuucuaccaacuggaa

SEQ ID NO: 3719843 - RNA, 19 nt, Human
gcuucuaccaacuggaagc

SEQ ID NO: 3719844 - RNA, 18 nt, Human
gcuucuaguucugccagg

SEQ ID NO: 3719845 - RNA, 20 nt, Human
gcuucuaguucugccaggag

SEQ ID NO: 3719846 - RNA, 18 nt, Human
gcuucuaucccaggaggu

SEQ ID NO: 3719847 - RNA, 22 nt, Human
gcuucucacugccaugccagcu

SEQ ID NO: 3719848 - RNA, 12 nt, Human
gcuucucauccc

SEQ ID NO: 3719849 - RNA, 14 nt, Human
gcuucucaucccca

SEQ ID NO: 3719850 - RNA, 18 nt, Human
gcuucucaucuugugaaa

SEQ ID NO: 3719851 - RNA, 13 nt, Human
gcuucuccagccu

SEQ ID NO: 3719852 - RNA, 14 nt, Human
gcuucuccagccug

SEQ ID NO: 3719853 - RNA, 18 nt, Human
gcuucucccacuuggcca

SEQ ID NO: 3719854 - RNA, 11 nt, Human
gcuucucccag

SEQ ID NO: 3719855 - RNA, 13 nt, Human
gcuucucccaggc

SEQ ID NO: 3719856 - RNA, 16 nt, Human
gcuucucccaggcaag

SEQ ID NO: 3719857 - RNA, 14 nt, Human
gcuucuccccagaa

SEQ ID NO: 3719858 - RNA, 15 nt, Human
gcuucuccgccagcc

SEQ ID NO: 3719859 - RNA, 16 nt, Human
gcuucuccgccagccu

SEQ ID NO: 3719860 - RNA, 21 nt, Human
gcuucuccgccagccuccucu

SEQ ID NO: 3719861 - RNA, 14 nt, Human
gcuucuccugaccc

SEQ ID NO: 3719862 - RNA, 12 nt, Human
gcuucucucuca

SEQ ID NO: 3719863 - RNA, 17 nt, Human
gcuucucugacuucugc

SEQ ID NO: 3719864 - RNA, 20 nt, Human
gcuucucugacuucugccug

SEQ ID NO: 3719865 - RNA, 18 nt, Human
gcuucugagcagcgagcc

SEQ ID NO: 3719866 - RNA, 18 nt, Human
gcuucugaugaaucuugc

SEQ ID NO: 3719867 - RNA, 13 nt, Human
gcuucugcacccu

SEQ ID NO: 3719868 - RNA, 18 nt, Human
gcuucugcacccuccacc

SEQ ID NO: 3719869 - RNA, 16 nt, Human
gcuucugccacauaaa

SEQ ID NO: 3719870 - RNA, 16 nt, Human
gcuucugccacuuccc

SEQ ID NO: 3719871 - RNA, 16 nt, Human
gcuucugcccccugca

SEQ ID NO: 3719872 - RNA, 12 nt, Human
gcuucugccugc

SEQ ID NO: 3719873 - RNA, 22 nt, Human
gcuucugcugggcuggggccug

SEQ ID NO: 3719874 - RNA, 22 nt, Human
gcuucugcuggggccugggaca

SEQ ID NO: 3719875 - RNA, 16 nt, Human
gcuucugcuuuucugc

SEQ ID NO: 3719876 - RNA, 23 nt, Human
gcuucugcuuuucugcccuggcu

SEQ ID NO: 3719877 - RNA, 20 nt, Human
gcuucuggaauuuguucaag

SEQ ID NO: 3719878 - RNA, 23 nt, Human
gcuucuggaauuuguucaaguuu

SEQ ID NO: 3719879 - RNA, 13 nt, Human
gcuucuggagccc

SEQ ID NO: 3719880 - RNA, 14 nt, Human
gcuucuggagcccu

SEQ ID NO: 3719881 - RNA, 16 nt, Human
gcuucuggaugggaca

SEQ ID NO: 3719882 - RNA, 14 nt, Human
gcuucuggccagga

SEQ ID NO: 3719883 - RNA, 17 nt, Human
gcuucugguacucuccu

SEQ ID NO: 3719884 - RNA, 18 nt, Human
gcuucugguacucuccua

SEQ ID NO: 3719885 - RNA, 12 nt, Human
gcuucugucucc

SEQ ID NO: 3719886 - RNA, 16 nt, Human
gcuucugugaugagcu

SEQ ID NO: 3719887 - RNA, 19 nt, Human
gcuucugugaugagcugau

SEQ ID NO: 3719888 - RNA, 16 nt, Human
gcuucugugcaccugg

SEQ ID NO: 3719889 - RNA, 17 nt, Human
gcuucugugcaccuggg

SEQ ID NO: 3719890 - RNA, 19 nt, Human
gcuucuguugcugccucau

SEQ ID NO: 3719891 - RNA, 14 nt, Human
gcuucuuaaaugag

SEQ ID NO: 3719892 - RNA, 21 nt, Human
gcuucuuaauauaacugccuu

SEQ ID NO: 3719893 - RNA, 19 nt, Human
gcuucuuaaucuuuucaca

SEQ ID NO: 3719894 - RNA, 18 nt, Human
gcuucuuacuauuaagca

SEQ ID NO: 3719895 - RNA, 15 nt, Human
gcuucuuccaggugc

SEQ ID NO: 3719896 - RNA, 16 nt, Human
gcuucuuccaggugcc

SEQ ID NO: 3719897 - RNA, 19 nt, Human
gcuucuuccaggugcccag

SEQ ID NO: 3719898 - RNA, 19 nt, Human
gcuucuucccuuaaaauuu

SEQ ID NO: 3719899 - RNA, 21 nt, Human
gcuucuuccuauuugccaugg

SEQ ID NO: 3719900 - RNA, 14 nt, Human
gcuucuucucaggc

SEQ ID NO: 3719901 - RNA, 14 nt, Human
gcuucuugccucug

SEQ ID NO: 3719902 - RNA, 16 nt, Human
gcuucuugccucugug

SEQ ID NO: 3719903 - RNA, 13 nt, Human
gcuucuugugaag

SEQ ID NO: 3719904 - RNA, 18 nt, Human
gcuucuugugaaggccau

SEQ ID NO: 3719905 - RNA, 21 nt, Human
gcuucuuucaagggcuuuccu

SEQ ID NO: 3719906 - RNA, 23 nt, Human
gcuucuuuuaguuguaucucuuu

SEQ ID NO: 3719907 - RNA, 12 nt, Human
gcuugaacacag

SEQ ID NO: 3719908 - RNA, 17 nt, Human
gcuugaacacaguauuu

SEQ ID NO: 3719909 - RNA, 21 nt, Human
gcuugaagaucguuaguaucu

SEQ ID NO: 3719910 - RNA, 22 nt, Human
gcuugaagaucguuaguaucua

SEQ ID NO: 3719911 - RNA, 14 nt, Human
gcuugaagccaaag

SEQ ID NO: 3719912 - RNA, 18 nt, Human
gcuugaagccaaagaaaa

SEQ ID NO: 3719913 - RNA, 14 nt, Human
gcuugaagccaagu

SEQ ID NO: 3719914 - RNA, 15 nt, Human
gcuugacaacaucug

SEQ ID NO: 3719915 - RNA, 15 nt, Human
gcuugacaggacagc

SEQ ID NO: 3719916 - RNA, 16 nt, Human
gcuugaccgugaggcc

SEQ ID NO: 3719917 - RNA, 18 nt, Human
gcuugaccgugaggccag

SEQ ID NO: 3719918 - RNA, 23 nt, Human
gcuugacucaggauuuaaaaacu

SEQ ID NO: 3719919 - RNA, 22 nt, Human
gcuugacuuuuguauagguaga

SEQ ID NO: 3719920 - RNA, 14 nt, Human
gcuugagcccagga

SEQ ID NO: 3719921 - RNA, 22 nt, Human
gcuugagccgggccccugggcu

SEQ ID NO: 3719922 - RNA, 18 nt, Human
gcuugaggguugggcugg

SEQ ID NO: 3719923 - RNA, 19 nt, Human
gcuugaguuaggaaugaga

SEQ ID NO: 3719924 - RNA, 13 nt, Human
gcuugauacagga

SEQ ID NO: 3719925 - RNA, 14 nt, Human
gcuugauauuuucu

SEQ ID NO: 3719926 - RNA, 13 nt, Human
gcuugaugaagca

SEQ ID NO: 3719927 - RNA, 13 nt, Human
aagaauaggacuu

SEQ ID NO: 3719928 - RNA, 17 nt, Human
aagaauaggacuuguuu

SEQ ID NO: 3719929 - RNA, 19 nt, Human
aagaauaggacuuguuuuu

SEQ ID NO: 3719930 - RNA, 21 nt, Human
aagaauaggacuuguuuuugu

SEQ ID NO: 3719931 - RNA, 22 nt, Human
aagaauagggcccaugggaggg

SEQ ID NO: 3719932 - RNA, 18 nt, Human
aagaauauccuuuaaaau

SEQ ID NO: 3719933 - RNA, 20 nt, Human
aagaauauccuuuaaaauuu

SEQ ID NO: 3719934 - RNA, 17 nt, Human
aagaauaucuguaaugg

SEQ ID NO: 3719935 - RNA, 19 nt, Human
aagaauaucuguaauggua

SEQ ID NO: 3719936 - RNA, 14 nt, Human
aagaauaugacuuu

SEQ ID NO: 3719937 - RNA, 17 nt, Human
aagaauauucagagaau

SEQ ID NO: 3719938 - RNA, 15 nt, Human
aagaauauuguuccu

SEQ ID NO: 3719939 - RNA, 13 nt, Human
aagaauauuuuaa

SEQ ID NO: 3719940 - RNA, 21 nt, Human
aagaaucaccuaauuaauuuc

SEQ ID NO: 3719941 - RNA, 14 nt, Human
aagaaucagaguag

SEQ ID NO: 3719942 - RNA, 23 nt, Human
aagaaucagucuauccacagaga

SEQ ID NO: 3719943 - RNA, 23 nt, Human
aagaaucauuguaaacauuaguu

SEQ ID NO: 3719944 - RNA, 18 nt, Human
aagaauccacauuucuaa

SEQ ID NO: 3719945 - RNA, 18 nt, Human
aagaaucccuagacuuua

SEQ ID NO: 3719946 - RNA, 15 nt, Human
aagaaucccuguuca

SEQ ID NO: 3719947 - RNA, 23 nt, Human
aagaaucgaugggggaugcuuca

SEQ ID NO: 3719948 - RNA, 12 nt, Human
aagaaucuacuu

SEQ ID NO: 3719949 - RNA, 16 nt, Human
aagaaucuaucugcuu

SEQ ID NO: 3719950 - RNA, 12 nt, Human
aagaaucucauc

SEQ ID NO: 3719951 - RNA, 20 nt, Human
aagaaucucaucucagugaa

SEQ ID NO: 3719952 - RNA, 15 nt, Human
aagaaucuuuagaga

SEQ ID NO: 3719953 - RNA, 19 nt, Human
aagaaugaaagcuguuccu

SEQ ID NO: 3719954 - RNA, 18 nt, Human
aagaaugacuauauaauu

SEQ ID NO: 3719955 - RNA, 18 nt, Human
aagaaugcacaagaaugg

SEQ ID NO: 3719956 - RNA, 21 nt, Human
aagaaugcacaagaauggauc

SEQ ID NO: 3719957 - RNA, 22 nt, Human
aagaaugcacaagaauggauca

SEQ ID NO: 3719958 - RNA, 21 nt, Human
aagaaugcauugauauuguga

SEQ ID NO: 3719959 - RNA, 12 nt, Human
aagaaugcugaa

SEQ ID NO: 3719960 - RNA, 14 nt, Human
aagaaugcugaaac

SEQ ID NO: 3719961 - RNA, 15 nt, Human
aagaaugcugguuuu

SEQ ID NO: 3719962 - RNA, 15 nt, Human
aagaauggagaggaa

SEQ ID NO: 3719963 - RNA, 18 nt, Human
aagaaugggcaguuacau

SEQ ID NO: 3719964 - RNA, 17 nt, Human
aagaaugucgauuaaaa

SEQ ID NO: 3719965 - RNA, 19 nt, Human
aagaauguuaagacuugac

SEQ ID NO: 3719966 - RNA, 18 nt, Human
aagaauguuacugccuua

SEQ ID NO: 3719967 - RNA, 21 nt, Human
aagaauguuagaguaaugaaa

SEQ ID NO: 3719968 - RNA, 20 nt, Human
aagaauguugguuuacuuuc

SEQ ID NO: 3719969 - RNA, 19 nt, Human
aagaauuaagauacaaauu

SEQ ID NO: 3719970 - RNA, 13 nt, Human
aagaauucaaauu

SEQ ID NO: 3719971 - RNA, 18 nt, Human
aagaauucaaauuuuauc

SEQ ID NO: 3719972 - RNA, 14 nt, Human
aagaauuccaaagc

SEQ ID NO: 3719973 - RNA, 16 nt, Human
aagaauuccaaagcaa

SEQ ID NO: 3719974 - RNA, 19 nt, Human
aagaauucuccaaaacaau

SEQ ID NO: 3719975 - RNA, 20 nt, Human
aagaauucugauugauuuga

SEQ ID NO: 3719976 - RNA, 20 nt, Human
aagaauugaacccaggaggu

SEQ ID NO: 3719977 - RNA, 15 nt, Human
aagaauugaguaaug

SEQ ID NO: 3719978 - RNA, 20 nt, Human
aagaauugccagucuuuugu

SEQ ID NO: 3719979 - RNA, 20 nt, Human
aagaauugucuuucugucuc

SEQ ID NO: 3719980 - RNA, 20 nt, Human
aagaauugugguuuauauau

SEQ ID NO: 3719981 - RNA, 12 nt, Human
aagaauuguugg

SEQ ID NO: 3719982 - RNA, 13 nt, Human
aagaauuuaaaga

SEQ ID NO: 3719983 - RNA, 16 nt, Human
aagaauuuacuuugga

SEQ ID NO: 3719984 - RNA, 14 nt, Human
aagaauuucacaag

SEQ ID NO: 3719985 - RNA, 22 nt, Human
aagaauuucuugguaagaagcc

SEQ ID NO: 3719986 - RNA, 23 nt, Human
aagaauuucuugguaagaagccg

SEQ ID NO: 3719987 - RNA, 19 nt, Human
aagaauuucuuuauaaaau

SEQ ID NO: 3719988 - RNA, 17 nt, Human
aagaauuugaagacuuc

SEQ ID NO: 3719989 - RNA, 12 nt, Human
aagaauuugcau

SEQ ID NO: 3719990 - RNA, 13 nt, Human
aagaauuugcaua

SEQ ID NO: 3719991 - RNA, 13 nt, Human
aagaauuuuuaaa

SEQ ID NO: 3719992 - RNA, 20 nt, Human
aagaauuuuuuauuuuuugg

SEQ ID NO: 3719993 - RNA, 16 nt, Human
aagacaaaaagcuacu

SEQ ID NO: 3719994 - RNA, 16 nt, Human
aagacaaaaauacucu

SEQ ID NO: 3719995 - RNA, 16 nt, Human
aagacaaaagucuguc

SEQ ID NO: 3719996 - RNA, 17 nt, Human
aagacaaagguuuuccu

SEQ ID NO: 3719997 - RNA, 12 nt, Human
aagacaacacaa

SEQ ID NO: 3719998 - RNA, 15 nt, Human
aagacaacauuaaaa

SEQ ID NO: 3719999 - RNA, 14 nt, Human
aagacaacauugua

SEQ ID NO: 3720000 - RNA, 23 nt, Human
aagacaagugaugcuaaaaccug

SEQ ID NO: 3720001 - RNA, 22 nt, Human
aagacaaugacuuacuguacau

SEQ ID NO: 3720002 - RNA, 19 nt, Human
aagacaaugugaaaagaaa

SEQ ID NO: 3720003 - RNA, 20 nt, Human
aagacaauuugauacauaau

SEQ ID NO: 3720004 - RNA, 21 nt, Human
aagacacauuuuuuaggaaau

SEQ ID NO: 3720005 - RNA, 16 nt, Human
aagacaccagagcaga

SEQ ID NO: 3720006 - RNA, 20 nt, Human
aagacaccagagcagaugca

SEQ ID NO: 3720007 - RNA, 19 nt, Human
aagacacugcagaaacccu

SEQ ID NO: 3720008 - RNA, 12 nt, Human
aagacacugccu

SEQ ID NO: 3720009 - RNA, 13 nt, Human
aagacacugccug

SEQ ID NO: 3720010 - RNA, 15 nt, Human
aagacacugccuggg

SEQ ID NO: 3720011 - RNA, 20 nt, Human
aagacagaaccacagggcua

SEQ ID NO: 3720012 - RNA, 12 nt, Human
aagacagaagcc

SEQ ID NO: 3720013 - RNA, 13 nt, Human
aagacagaagccu

SEQ ID NO: 3720014 - RNA, 22 nt, Human
aagacagagccccacccucaga

SEQ ID NO: 3720015 - RNA, 16 nt, Human
aagacagagcugggau

SEQ ID NO: 3720016 - RNA, 22 nt, Human
aagacagcuucucauccugcag

SEQ ID NO: 3720017 - RNA, 20 nt, Human
aagacaggaaaguucagagu

SEQ ID NO: 3720018 - RNA, 23 nt, Human
aagacaggacagugcuucagccu

SEQ ID NO: 3720019 - RNA, 22 nt, Human
aagacaggagagauuauuuaca

SEQ ID NO: 3720020 - RNA, 22 nt, Human
aagacauaacguuuuuccuuua

SEQ ID NO: 3720021 - RNA, 15 nt, Human
aagacauaucucuaa

SEQ ID NO: 3720022 - RNA, 14 nt, Human
aagacaugauuucc

SEQ ID NO: 3720023 - RNA, 15 nt, Human
aagacaugauuuccu

SEQ ID NO: 3720024 - RNA, 16 nt, Human
aagacaugauuuccuu

SEQ ID NO: 3720025 - RNA, 12 nt, Human
aagacaugucug

SEQ ID NO: 3720026 - RNA, 17 nt, Human
aagacaugucuguucua

SEQ ID NO: 3720027 - RNA, 16 nt, Human
aagacauguuguaaau

SEQ ID NO: 3720028 - RNA, 18 nt, Human
aagacauguuguaaauua

SEQ ID NO: 3720029 - RNA, 13 nt, Human
aagacauguuuua

SEQ ID NO: 3720030 - RNA, 14 nt, Human
aagacauguuuuag

SEQ ID NO: 3720031 - RNA, 22 nt, Human
aagacauugggucuauuccagc

SEQ ID NO: 3720032 - RNA, 13 nt, Human
aagacauugucaa

SEQ ID NO: 3720033 - RNA, 14 nt, Human
aagacauugucaau

SEQ ID NO: 3720034 - RNA, 18 nt, Human
aagacauuuauacucuuu

SEQ ID NO: 3720035 - RNA, 14 nt, Human
aagacauuucuuuu

SEQ ID NO: 3720036 - RNA, 15 nt, Human
aagacauuucuuuuc

SEQ ID NO: 3720037 - RNA, 21 nt, Human
aagacauuucuuuucuuuuua

SEQ ID NO: 3720038 - RNA, 19 nt, Human
aagaccaaaaugacaauga

SEQ ID NO: 3720039 - RNA, 16 nt, Human
aagaccaccaccucag

SEQ ID NO: 3720040 - RNA, 19 nt, Human
aagaccaccaccucagagu

SEQ ID NO: 3720041 - RNA, 18 nt, Human
aagaccaccacuucgaaa

SEQ ID NO: 3720042 - RNA, 15 nt, Human
aagaccacguuucua

SEQ ID NO: 3720043 - RNA, 14 nt, Human
aagaccagaaauuc

SEQ ID NO: 3720044 - RNA, 19 nt, Human
aagacccaacacaugggac

SEQ ID NO: 3720045 - RNA, 13 nt, Human
aagaccccaccca

SEQ ID NO: 3720046 - RNA, 13 nt, Human
aagacccccagca

SEQ ID NO: 3720047 - RNA, 15 nt, Human
aagaccccugacuca

SEQ ID NO: 3720048 - RNA, 14 nt, Human
aagaccccugucuu

SEQ ID NO: 3720049 - RNA, 13 nt, Human
aagacccugucuc

SEQ ID NO: 3720050 - RNA, 17 nt, Human
aagacccuuuuggguuu

SEQ ID NO: 3720051 - RNA, 17 nt, Human
aagaccuacuguucuaa

SEQ ID NO: 3720052 - RNA, 18 nt, Human
aagaccuacuguucuaaa

SEQ ID NO: 3720053 - RNA, 16 nt, Human
aagaccucaccuagaa

SEQ ID NO: 3720054 - RNA, 13 nt, Human
aagaccucuguga

SEQ ID NO: 3720055 - RNA, 20 nt, Human
aagaccuucuccccauucug

SEQ ID NO: 3720056 - RNA, 15 nt, Human
aagaccuucuccuuc

SEQ ID NO: 3720057 - RNA, 19 nt, Human
aagaccuucuccuucaccu

SEQ ID NO: 3720058 - RNA, 22 nt, Human
aagaccuuguguguauguguac

SEQ ID NO: 3720059 - RNA, 21 nt, Human
aagaccuuuggagcaaagcug

SEQ ID NO: 3720060 - RNA, 15 nt, Human
aagaccuuuuucugc

SEQ ID NO: 3720061 - RNA, 14 nt, Human
aagacgcccucuau

SEQ ID NO: 3720062 - RNA, 14 nt, Human
aagacgccugagcu

SEQ ID NO: 3720063 - RNA, 17 nt, Human
aagacgcugugcugccc

SEQ ID NO: 3720064 - RNA, 19 nt, Human
aagacgcugugcugcccug

SEQ ID NO: 3720065 - RNA, 18 nt, Human
aagacgucccuuuuuucu

SEQ ID NO: 3720066 - RNA, 22 nt, Human
aagacgugauuuugcuguagaa

SEQ ID NO: 3720067 - RNA, 15 nt, Human
aagacguguuugugu

SEQ ID NO: 3720068 - RNA, 16 nt, Human
aagacuaauuuaaaaa

SEQ ID NO: 3720069 - RNA, 19 nt, Human
aagacuaauuuaaaaaaua

SEQ ID NO: 3720070 - RNA, 20 nt, Human
aagacuagaggcuugcauaa

SEQ ID NO: 3720071 - RNA, 21 nt, Human
aagacuauauauauaaaugua

SEQ ID NO: 3720072 - RNA, 20 nt, Human
aagacuauccaacuuaacau

SEQ ID NO: 3720073 - RNA, 15 nt, Human
aagacuaugaaaaug

SEQ ID NO: 3720074 - RNA, 16 nt, Human
aagacucaaauguucu

SEQ ID NO: 3720075 - RNA, 17 nt, Human
aagacucaaauguucua

SEQ ID NO: 3720076 - RNA, 21 nt, Human
aagacucaagugggaacgacu

SEQ ID NO: 3720077 - RNA, 21 nt, Human
uccaggcuguaucccaugagc

SEQ ID NO: 3720078 - RNA, 22 nt, Human
uccaggcuuucccacuucccac

SEQ ID NO: 3720079 - RNA, 18 nt, Human
uccagggaagcuggccga

SEQ ID NO: 3720080 - RNA, 15 nt, Human
uccagggacagaggc

SEQ ID NO: 3720081 - RNA, 21 nt, Human
uccagggacagaggccccagc

SEQ ID NO: 3720082 - RNA, 14 nt, Human
uccagggacagcaa

SEQ ID NO: 3720083 - RNA, 15 nt, Human
uccagggagccuaga

SEQ ID NO: 3720084 - RNA, 18 nt, Human
uccagggaguccccuccc

SEQ ID NO: 3720085 - RNA, 22 nt, Human
uccagggaugauucaagccauu

SEQ ID NO: 3720086 - RNA, 17 nt, Human
uccagggcccccaucuc

SEQ ID NO: 3720087 - RNA, 13 nt, Human
uccagggcccuga

SEQ ID NO: 3720088 - RNA, 20 nt, Human
uccagggcccugagcucggu

SEQ ID NO: 3720089 - RNA, 14 nt, Human
uccagggcuaguga

SEQ ID NO: 3720090 - RNA, 19 nt, Human
uccagggcuggacugaggc

SEQ ID NO: 3720091 - RNA, 18 nt, Human
uccagggggaaggccaag

SEQ ID NO: 3720092 - RNA, 20 nt, Human
uccaggggugggacacccug

SEQ ID NO: 3720093 - RNA, 22 nt, Human
uccaggggugggacacccugug

SEQ ID NO: 3720094 - RNA, 23 nt, Human
uccaggggugggacacccuguga

SEQ ID NO: 3720095 - RNA, 14 nt, Human
uccaggguggcagc

SEQ ID NO: 3720096 - RNA, 18 nt, Human
uccaggguggcagcaaca

SEQ ID NO: 3720097 - RNA, 20 nt, Human
uccaggguggcagcaacaau

SEQ ID NO: 3720098 - RNA, 21 nt, Human
uccaggguucucuuguuuuga

SEQ ID NO: 3720099 - RNA, 18 nt, Human
uccaggguugaucacacu

SEQ ID NO: 3720100 - RNA, 20 nt, Human
uccagguacgcacagacagg

SEQ ID NO: 3720101 - RNA, 17 nt, Human
uccagguaucuccagga

SEQ ID NO: 3720102 - RNA, 16 nt, Human
uccaggucaacagaau

SEQ ID NO: 3720103 - RNA, 18 nt, Human
uccaggucaacagaauga

SEQ ID NO: 3720104 - RNA, 19 nt, Human
uccaggucaacagaaugaa

SEQ ID NO: 3720105 - RNA, 14 nt, Human
uccaggucgggcuc

SEQ ID NO: 3720106 - RNA, 16 nt, Human
uccaggucucacgggc

SEQ ID NO: 3720107 - RNA, 22 nt, Human
uccaggugcacaagcuccaagc

SEQ ID NO: 3720108 - RNA, 13 nt, Human
uccaggugcccag

SEQ ID NO: 3720109 - RNA, 15 nt, Human
uccagguucagcuug

SEQ ID NO: 3720110 - RNA, 16 nt, Human
uccagguucagcuugu

SEQ ID NO: 3720111 - RNA, 20 nt, Human
uccagguucccucccagagg

SEQ ID NO: 3720112 - RNA, 17 nt, Human
uccagguuuaagcuguu

SEQ ID NO: 3720113 - RNA, 20 nt, Human
uccagguuuaagcuguuacu

SEQ ID NO: 3720114 - RNA, 17 nt, Human
uccagguuuuucaauua

SEQ ID NO: 3720115 - RNA, 23 nt, Human
uccagguuuuucaauuaaacgga

SEQ ID NO: 3720116 - RNA, 15 nt, Human
uccaguaagaucacu

SEQ ID NO: 3720117 - RNA, 20 nt, Human
uccaguaagaucacuguuua

SEQ ID NO: 3720118 - RNA, 21 nt, Human
uccaguaagaucacuguuuag

SEQ ID NO: 3720119 - RNA, 18 nt, Human
uccaguaaggaaugauau

SEQ ID NO: 3720120 - RNA, 15 nt, Human
uccaguaaucuaaua

SEQ ID NO: 3720121 - RNA, 21 nt, Human
uccaguacuggagcuucucuu

SEQ ID NO: 3720122 - RNA, 14 nt, Human
uccaguaucuugaa

SEQ ID NO: 3720123 - RNA, 14 nt, Human
uccaguauuuuagu

SEQ ID NO: 3720124 - RNA, 13 nt, Human
uccagucaggcuc

SEQ ID NO: 3720125 - RNA, 20 nt, Human
uccagucaggcucucugggc

SEQ ID NO: 3720126 - RNA, 14 nt, Human
uccagucauuaugu

SEQ ID NO: 3720127 - RNA, 15 nt, Human
uccagucauuauguu

SEQ ID NO: 3720128 - RNA, 23 nt, Human
uccagucauuauguuaauauuuc

SEQ ID NO: 3720129 - RNA, 23 nt, Human
uccaguccaaggaaaccacagcu

SEQ ID NO: 3720130 - RNA, 16 nt, Human
uccaguccccagaacu

SEQ ID NO: 3720131 - RNA, 18 nt, Human
uccagucccccuauccuu

SEQ ID NO: 3720132 - RNA, 22 nt, Human
uccaguccuaucugggcuuccu

SEQ ID NO: 3720133 - RNA, 23 nt, Human
uccaguccuaucugggcuuccug

SEQ ID NO: 3720134 - RNA, 13 nt, Human
uccaguccugcuc

SEQ ID NO: 3720135 - RNA, 21 nt, Human
uccaguccugcucucuaccca

SEQ ID NO: 3720136 - RNA, 16 nt, Human
uccagucuccaccagg

SEQ ID NO: 3720137 - RNA, 14 nt, Human
uccagucucuugua

SEQ ID NO: 3720138 - RNA, 16 nt, Human
uccagucugcugcccu

SEQ ID NO: 3720139 - RNA, 19 nt, Human
uccagucugcugcccucca

SEQ ID NO: 3720140 - RNA, 20 nt, Human
uccagucugcugcccuccau

SEQ ID NO: 3720141 - RNA, 22 nt, Human
uccagucuuccugacacuuuaa

SEQ ID NO: 3720142 - RNA, 23 nt, Human
uccagucuuccugacacuuuaau

SEQ ID NO: 3720143 - RNA, 12 nt, Human
uccagugacuuu

SEQ ID NO: 3720144 - RNA, 14 nt, Human
uccagugagacagc

SEQ ID NO: 3720145 - RNA, 17 nt, Human
uccagugaggcucugcc

SEQ ID NO: 3720146 - RNA, 14 nt, Human
uccagugcaauugu

SEQ ID NO: 3720147 - RNA, 14 nt, Human
uccagugccagcaa

SEQ ID NO: 3720148 - RNA, 20 nt, Human
uccagugcccauuccucacc

SEQ ID NO: 3720149 - RNA, 19 nt, Human
uccaguggaagaagaaaac

SEQ ID NO: 3720150 - RNA, 17 nt, Human
uccaguggaucauaaga

SEQ ID NO: 3720151 - RNA, 19 nt, Human
uccaguggggcaagauuuu

SEQ ID NO: 3720152 - RNA, 22 nt, Human
uccagugguccauggaaugcuu

SEQ ID NO: 3720153 - RNA, 12 nt, Human
uccaguggugaa

SEQ ID NO: 3720154 - RNA, 19 nt, Human
uccaguggugaagaaaacu

SEQ ID NO: 3720155 - RNA, 13 nt, Human
uccagugguucug

SEQ ID NO: 3720156 - RNA, 19 nt, Human
uccagugguugcuguugau

SEQ ID NO: 3720157 - RNA, 16 nt, Human
uccaguguccugagcu

SEQ ID NO: 3720158 - RNA, 16 nt, Human
uccagugucucggagg

SEQ ID NO: 3720159 - RNA, 19 nt, Human
uccagugugggcuugacca

SEQ ID NO: 3720160 - RNA, 18 nt, Human
uccaguuaauuacauccu

SEQ ID NO: 3720161 - RNA, 13 nt, Human
uccaguuauaaga

SEQ ID NO: 3720162 - RNA, 15 nt, Human
uccaguuauaagaag

SEQ ID NO: 3720163 - RNA, 19 nt, Human
uccaguuucagaguucuca

SEQ ID NO: 3720164 - RNA, 12 nt, Human
uccaguuuguuu

SEQ ID NO: 3720165 - RNA, 15 nt, Human
uccaguuuuguuugg

SEQ ID NO: 3720166 - RNA, 20 nt, Human
uccaguuuuuuguuauauag

SEQ ID NO: 3720167 - RNA, 15 nt, Human
uccauaaaaaaaaau

SEQ ID NO: 3720168 - RNA, 19 nt, Human
uccauaaaaaaaaauagau

SEQ ID NO: 3720169 - RNA, 21 nt, Human
uccauaaagaagauguuuaac

SEQ ID NO: 3720170 - RNA, 13 nt, Human
uccauaaagaagc

SEQ ID NO: 3720171 - RNA, 13 nt, Human
uccauaaagaccc

SEQ ID NO: 3720172 - RNA, 17 nt, Human
uccauaaccccacccuu

SEQ ID NO: 3720173 - RNA, 14 nt, Human
uccauaacugaaca

SEQ ID NO: 3720174 - RNA, 22 nt, Human
uccauaaucuggacuccucugu

SEQ ID NO: 3720175 - RNA, 18 nt, Human
uccauaaugcuacugucu

SEQ ID NO: 3720176 - RNA, 17 nt, Human
uccauaauguucugcua

SEQ ID NO: 3720177 - RNA, 21 nt, Human
uccauaauuaugacaguuaua

SEQ ID NO: 3720178 - RNA, 18 nt, Human
uccauaauuccauaugcu

SEQ ID NO: 3720179 - RNA, 17 nt, Human
uccauagaccuuuucau

SEQ ID NO: 3720180 - RNA, 17 nt, Human
uccauagagagcaagac

SEQ ID NO: 3720181 - RNA, 16 nt, Human
uccauagcaacaggaa

SEQ ID NO: 3720182 - RNA, 21 nt, Human
uccauagccuaaucccugggc

SEQ ID NO: 3720183 - RNA, 15 nt, Human
uccauagcugcugcc

SEQ ID NO: 3720184 - RNA, 15 nt, Human
uccauagcuguggug

SEQ ID NO: 3720185 - RNA, 15 nt, Human
uccauaguaacugac

SEQ ID NO: 3720186 - RNA, 18 nt, Human
uccauaguaguaugauga

SEQ ID NO: 3720187 - RNA, 14 nt, Human
uccauagugacuuu

SEQ ID NO: 3720188 - RNA, 16 nt, Human
uccauaguuuggcauu

SEQ ID NO: 3720189 - RNA, 13 nt, Human
uccauauaaauau

SEQ ID NO: 3720190 - RNA, 19 nt, Human
uccauauaaauauuagaaa

SEQ ID NO: 3720191 - RNA, 20 nt, Human
uccauauauccuuuucuucu

SEQ ID NO: 3720192 - RNA, 17 nt, Human
uccauauauuagcauuu

SEQ ID NO: 3720193 - RNA, 18 nt, Human
uccauauauuagcauuua

SEQ ID NO: 3720194 - RNA, 13 nt, Human
uccauaucacaca

SEQ ID NO: 3720195 - RNA, 14 nt, Human
uccauauccuggug

SEQ ID NO: 3720196 - RNA, 14 nt, Human
uccauaucuaacca

SEQ ID NO: 3720197 - RNA, 19 nt, Human
uccauaucuaaccagugau

SEQ ID NO: 3720198 - RNA, 19 nt, Human
uccauauggauccacuggc

SEQ ID NO: 3720199 - RNA, 21 nt, Human
uccauauggauccacuggcug

SEQ ID NO: 3720200 - RNA, 13 nt, Human
uccauauggauuu

SEQ ID NO: 3720201 - RNA, 18 nt, Human
uccauauggauuuucuau

SEQ ID NO: 3720202 - RNA, 13 nt, Human
uccauauuagaaa

SEQ ID NO: 3720203 - RNA, 14 nt, Human
uccauauuauugug

SEQ ID NO: 3720204 - RNA, 18 nt, Human
uccauauuuuauuacugu

SEQ ID NO: 3720205 - RNA, 23 nt, Human
uccauauuuuauuacuguuuauu

SEQ ID NO: 3720206 - RNA, 12 nt, Human
uccauauuuuca

SEQ ID NO: 3720207 - RNA, 16 nt, Human
uccauauuuuuuuccu

SEQ ID NO: 3720208 - RNA, 16 nt, Human
uccaucacuauaauaa

SEQ ID NO: 3720209 - RNA, 16 nt, Human
uccaucagaugacaag

SEQ ID NO: 3720210 - RNA, 22 nt, Human
uccaucagcuuaggggcugcug

SEQ ID NO: 3720211 - RNA, 14 nt, Human
uccaucaggccacu

SEQ ID NO: 3720212 - RNA, 21 nt, Human
uccaucaggugaggugugcuc

SEQ ID NO: 3720213 - RNA, 12 nt, Human
uccaucaugucc

SEQ ID NO: 3720214 - RNA, 11 nt, Human
uccauccaauc

SEQ ID NO: 3720215 - RNA, 18 nt, Human
uccauccaccuuucccaa

SEQ ID NO: 3720216 - RNA, 19 nt, Human
uccaucccaacagccaugc

SEQ ID NO: 3720217 - RNA, 21 nt, Human
uccaucccaggacaccacacc

SEQ ID NO: 3720218 - RNA, 14 nt, Human
uccaucccaucauc

SEQ ID NO: 3720219 - RNA, 18 nt, Human
uccaucccuacccccuaa

SEQ ID NO: 3720220 - RNA, 22 nt, Human
uccaucccuggcccccucccug

SEQ ID NO: 3720221 - RNA, 24 nt, Human
uccaucccuggcccccucccugga

SEQ ID NO: 3720222 - RNA, 21 nt, Human
uccauccugaggcuccacuug

SEQ ID NO: 3720223 - RNA, 17 nt, Human
uccauccuuucugccuc

SEQ ID NO: 3720224 - RNA, 14 nt, Human
uccaucuaaaaaua

SEQ ID NO: 3720225 - RNA, 16 nt, Human
uccaucuaaaaauaua

SEQ ID NO: 3720226 - RNA, 21 nt, Human
uccaucuaaaaauauacaugu

SEQ ID NO: 3720227 - RNA, 19 nt, Human
gcuugaugggauucuggac

SEQ ID NO: 3720228 - RNA, 20 nt, Human
gcuugaugggauucuggaca

SEQ ID NO: 3720229 - RNA, 14 nt, Human
gcuugauucugcag

SEQ ID NO: 3720230 - RNA, 19 nt, Human
gcuugcacuuuguaacaug

SEQ ID NO: 3720231 - RNA, 21 nt, Human
gcuugcaguagauuuucuuua

SEQ ID NO: 3720232 - RNA, 21 nt, Human
gcuugccaaaguacagaauuu

SEQ ID NO: 3720233 - RNA, 23 nt, Human
gcuugcccaguacauuuaaauuu

SEQ ID NO: 3720234 - RNA, 12 nt, Human
gcuugccccggc

SEQ ID NO: 3720235 - RNA, 17 nt, Human
gcuugccgaaacuggaa

SEQ ID NO: 3720236 - RNA, 13 nt, Human
gcuugccuagggc

SEQ ID NO: 3720237 - RNA, 17 nt, Human
gcuugccuagggccugg

SEQ ID NO: 3720238 - RNA, 21 nt, Human
gcuugccuagggccuggucca

SEQ ID NO: 3720239 - RNA, 20 nt, Human
gcuugccucggcuccugcug

SEQ ID NO: 3720240 - RNA, 22 nt, Human
gcuugccucggcuccugcugca

SEQ ID NO: 3720241 - RNA, 15 nt, Human
gcuugccucucuguu

SEQ ID NO: 3720242 - RNA, 19 nt, Human
gcuugccugauauaaaugc

SEQ ID NO: 3720243 - RNA, 17 nt, Human
gcuugccugcagggcca

SEQ ID NO: 3720244 - RNA, 21 nt, Human
gcuugcgaacuagagaugugc

SEQ ID NO: 3720245 - RNA, 22 nt, Human
gcuugcguuagaaugaggagga

SEQ ID NO: 3720246 - RNA, 22 nt, Human
gcuugcuagcuaugugaccuug

SEQ ID NO: 3720247 - RNA, 20 nt, Human
gcuugcuauucugucccuag

SEQ ID NO: 3720248 - RNA, 14 nt, Human
gcuugcuuuucaug

SEQ ID NO: 3720249 - RNA, 18 nt, Human
gcuuggaaacuggaugag

SEQ ID NO: 3720250 - RNA, 23 nt, Human
gcuuggaagagccugcaggugcu

SEQ ID NO: 3720251 - RNA, 16 nt, Human
gcuuggagcagagggg

SEQ ID NO: 3720252 - RNA, 15 nt, Human
gcuuggagcugagca

SEQ ID NO: 3720253 - RNA, 13 nt, Human
gcuuggaggaagg

SEQ ID NO: 3720254 - RNA, 17 nt, Human
gcuuggccacagccagg

SEQ ID NO: 3720255 - RNA, 13 nt, Human
gcuuggccagaag

SEQ ID NO: 3720256 - RNA, 14 nt, Human
gcuuggcccagggg

SEQ ID NO: 3720257 - RNA, 14 nt, Human
gcuuggcccuggca

SEQ ID NO: 3720258 - RNA, 15 nt, Human
gcuuggccugcugug

SEQ ID NO: 3720259 - RNA, 15 nt, Human
gcuugggaauuuuau

SEQ ID NO: 3720260 - RNA, 14 nt, Human
gcuugggacaaauc

SEQ ID NO: 3720261 - RNA, 15 nt, Human
gcuugggauuugcug

SEQ ID NO: 3720262 - RNA, 15 nt, Human
gcuugggcccagcug

SEQ ID NO: 3720263 - RNA, 14 nt, Human
gcuugggccuaggc

SEQ ID NO: 3720264 - RNA, 19 nt, Human
gcuugggccuaggcugcau

SEQ ID NO: 3720265 - RNA, 21 nt, Human
gcuugggccuaggcugcauug

SEQ ID NO: 3720266 - RNA, 23 nt, Human
gcuugggcuuccauuugugugug

SEQ ID NO: 3720267 - RNA, 17 nt, Human
gcuuggggaccagagcu

SEQ ID NO: 3720268 - RNA, 24 nt, Human
gcuugggggaugacuagaggcagg

SEQ ID NO: 3720269 - RNA, 20 nt, Human
gcuuggguggagaagccauu

SEQ ID NO: 3720270 - RNA, 21 nt, Human
gcuuggguggagaagccauug

SEQ ID NO: 3720271 - RNA, 22 nt, Human
gcuugguggaugaaaugucagu

SEQ ID NO: 3720272 - RNA, 22 nt, Human
gcuugguguuuguaagaaaaug

SEQ ID NO: 3720273 - RNA, 15 nt, Human
gcuugguuccuuccc

SEQ ID NO: 3720274 - RNA, 19 nt, Human
gcuuguaaauagcucaggu

SEQ ID NO: 3720275 - RNA, 15 nt, Human
gcuuguaacaagaaa

SEQ ID NO: 3720276 - RNA, 17 nt, Human
gcuuguaacaagaaaac

SEQ ID NO: 3720277 - RNA, 23 nt, Human
gcuuguaacuaaaauaauuuugu

SEQ ID NO: 3720278 - RNA, 15 nt, Human
gcuuguaacuccacc

SEQ ID NO: 3720279 - RNA, 14 nt, Human
gcuuguacauaaug

SEQ ID NO: 3720280 - RNA, 19 nt, Human
gcuuguacauaaugcgugc

SEQ ID NO: 3720281 - RNA, 16 nt, Human
gcuuguaccucuggcu

SEQ ID NO: 3720282 - RNA, 18 nt, Human
gcuuguagaacucacucu

SEQ ID NO: 3720283 - RNA, 19 nt, Human
gcuuguagaacucacucug

SEQ ID NO: 3720284 - RNA, 13 nt, Human
gcuuguagccagc

SEQ ID NO: 3720285 - RNA, 22 nt, Human
gcuuguagccagccggggcgag

SEQ ID NO: 3720286 - RNA, 22 nt, Human
gcuuguaggggaggggcuccuu

SEQ ID NO: 3720287 - RNA, 16 nt, Human
gcuuguaguucuuuaa

SEQ ID NO: 3720288 - RNA, 17 nt, Human
gcuuguaguucuuuaaa

SEQ ID NO: 3720289 - RNA, 18 nt, Human
gcuuguaugcaauggauu

SEQ ID NO: 3720290 - RNA, 13 nt, Human
gcuugucagagcu

SEQ ID NO: 3720291 - RNA, 14 nt, Human
gcuugucagagcug

SEQ ID NO: 3720292 - RNA, 15 nt, Human
gcuugucagagcugg

SEQ ID NO: 3720293 - RNA, 17 nt, Human
gcuugucauagccagug

SEQ ID NO: 3720294 - RNA, 16 nt, Human
gcuuguccccuccuca

SEQ ID NO: 3720295 - RNA, 16 nt, Human
gcuugucccugcccag

SEQ ID NO: 3720296 - RNA, 20 nt, Human
gcuugucuauacuccuuccc

SEQ ID NO: 3720297 - RNA, 18 nt, Human
gcuugugaaaauguguuc

SEQ ID NO: 3720298 - RNA, 16 nt, Human
gcuugugaucugggaa

SEQ ID NO: 3720299 - RNA, 22 nt, Human
gcuugugcagaaaacauuguuc

SEQ ID NO: 3720300 - RNA, 19 nt, Human
gcuuguggggacccaggcu

SEQ ID NO: 3720301 - RNA, 13 nt, Human
gcuuguggggccu

SEQ ID NO: 3720302 - RNA, 18 nt, Human
gcuuguggggccugggag

SEQ ID NO: 3720303 - RNA, 19 nt, Human
gcuuguggggccugggagg

SEQ ID NO: 3720304 - RNA, 18 nt, Human
gcuuguguauccauuauc

SEQ ID NO: 3720305 - RNA, 15 nt, Human
gcuuguguguuucac

SEQ ID NO: 3720306 - RNA, 21 nt, Human
gcuuguuaaugcuuucugaag

SEQ ID NO: 3720307 - RNA, 17 nt, Human
gcuuguuaucagcuuuc

SEQ ID NO: 3720308 - RNA, 15 nt, Human
gcuuguuauuuauaa

SEQ ID NO: 3720309 - RNA, 18 nt, Human
gcuuguucccucucccug

SEQ ID NO: 3720310 - RNA, 18 nt, Human
gcuuguugggauuccuga

SEQ ID NO: 3720311 - RNA, 22 nt, Human
gcuuguugggauuccugaccca

SEQ ID NO: 3720312 - RNA, 14 nt, Human
gcuuguuguaaagc

SEQ ID NO: 3720313 - RNA, 19 nt, Human
gcuuguuugcucaccuggg

SEQ ID NO: 3720314 - RNA, 21 nt, Human
gcuuguuugcucaccuggggu

SEQ ID NO: 3720315 - RNA, 21 nt, Human
gcuuuaaaaagggaagaaacu

SEQ ID NO: 3720316 - RNA, 14 nt, Human
gcuuuaaaauucuc

SEQ ID NO: 3720317 - RNA, 17 nt, Human
gcuuuaaacaaauucau

SEQ ID NO: 3720318 - RNA, 16 nt, Human
gcuuuaaacacccuuc

SEQ ID NO: 3720319 - RNA, 22 nt, Human
gcuuuaaacucagggacagagc

SEQ ID NO: 3720320 - RNA, 15 nt, Human
gcuuuaaaguguaau

SEQ ID NO: 3720321 - RNA, 19 nt, Human
gcuuuaaccauuaaaacug

SEQ ID NO: 3720322 - RNA, 16 nt, Human
gcuuuaauauaaaugc

SEQ ID NO: 3720323 - RNA, 20 nt, Human
gcuuuaauuccaugaauguu

SEQ ID NO: 3720324 - RNA, 14 nt, Human
gcuuuaccaaacag

SEQ ID NO: 3720325 - RNA, 17 nt, Human
gcuuuaccaaacagcaa

SEQ ID NO: 3720326 - RNA, 20 nt, Human
gcuuuaccuuuucagggcug

SEQ ID NO: 3720327 - RNA, 23 nt, Human
gcuuuacugucaaaauaauuuua

SEQ ID NO: 3720328 - RNA, 21 nt, Human
gcuuuacuuagcuuaucaauu

SEQ ID NO: 3720329 - RNA, 16 nt, Human
gcuuuagaaucccagc

SEQ ID NO: 3720330 - RNA, 20 nt, Human
gcuuuagaauguuuuccuuc

SEQ ID NO: 3720331 - RNA, 21 nt, Human
gcuuuagacacuggcugccag

SEQ ID NO: 3720332 - RNA, 14 nt, Human
gcuuuagacccugg

SEQ ID NO: 3720333 - RNA, 17 nt, Human
gcuuuagacuugaaaag

SEQ ID NO: 3720334 - RNA, 24 nt, Human
gcuuuagacuugaaaagagacagg

SEQ ID NO: 3720335 - RNA, 20 nt, Human
gcuuuaggcauaugcuucuu

SEQ ID NO: 3720336 - RNA, 21 nt, Human
gcuuuaguggccaucauuucu

SEQ ID NO: 3720337 - RNA, 10 nt, Human
gcuuuauaaa

SEQ ID NO: 3720338 - RNA, 20 nt, Human
gcuuuauccucuuuagaguu

SEQ ID NO: 3720339 - RNA, 21 nt, Human
gcuuuaugauaauagauucuc

SEQ ID NO: 3720340 - RNA, 15 nt, Human
gcuuuaugauuuuca

SEQ ID NO: 3720341 - RNA, 17 nt, Human
gcuuuauuccagaaugc

SEQ ID NO: 3720342 - RNA, 22 nt, Human
gcuuuauucuucagauacaaac

SEQ ID NO: 3720343 - RNA, 18 nt, Human
gcuuuauuuugagaugua

SEQ ID NO: 3720344 - RNA, 17 nt, Human
gcuuuauuuuuuaagua

SEQ ID NO: 3720345 - RNA, 20 nt, Human
gcuuucaagaccccugucuu

SEQ ID NO: 3720346 - RNA, 16 nt, Human
gcuuucaauuccguag

SEQ ID NO: 3720347 - RNA, 15 nt, Human
gcuuucagaauaugu

SEQ ID NO: 3720348 - RNA, 14 nt, Human
gcuuucagggccuc

SEQ ID NO: 3720349 - RNA, 22 nt, Human
gcuuucaucacaaauccaaagg

SEQ ID NO: 3720350 - RNA, 21 nt, Human
gcuuucauguaaacugugcac

SEQ ID NO: 3720351 - RNA, 19 nt, Human
gcuuucauuuucucucagg

SEQ ID NO: 3720352 - RNA, 21 nt, Human
gcuuuccccaugucucgacuc

SEQ ID NO: 3720353 - RNA, 12 nt, Human
gcuuuccccugu

SEQ ID NO: 3720354 - RNA, 14 nt, Human
gcuuuccccugugg

SEQ ID NO: 3720355 - RNA, 22 nt, Human
gcuuuccccuguggggaucuca

SEQ ID NO: 3720356 - RNA, 15 nt, Human
gcuuuccuaaaacag

SEQ ID NO: 3720357 - RNA, 19 nt, Human
gcuuuccucaucaggccau

SEQ ID NO: 3720358 - RNA, 12 nt, Human
gcuuuccugaau

SEQ ID NO: 3720359 - RNA, 12 nt, Human
gcuuuccugccc

SEQ ID NO: 3720360 - RNA, 23 nt, Human
gcuuuccuggagagucucacucc

SEQ ID NO: 3720361 - RNA, 13 nt, Human
gcuuuccugugcc

SEQ ID NO: 3720362 - RNA, 17 nt, Human
gcuuuccugugccaggu

SEQ ID NO: 3720363 - RNA, 19 nt, Human
gcuuuccuuguggcagagg

SEQ ID NO: 3720364 - RNA, 22 nt, Human
gcuuuccuuuuucccaauaaau

SEQ ID NO: 3720365 - RNA, 16 nt, Human
gcuuucgaacugcuag

SEQ ID NO: 3720366 - RNA, 20 nt, Human
gcuuucguccacagcuuccu

SEQ ID NO: 3720367 - RNA, 13 nt, Human
gcuuucuacccag

SEQ ID NO: 3720368 - RNA, 19 nt, Human
gcuuucuacccagcgagcc

SEQ ID NO: 3720369 - RNA, 12 nt, Human
gcuuucuagaag

SEQ ID NO: 3720370 - RNA, 15 nt, Human
gcuuucuauuguaca

SEQ ID NO: 3720371 - RNA, 19 nt, Human
gcuuucuccuuuaauugua

SEQ ID NO: 3720372 - RNA, 20 nt, Human
gcuuucucugcuucagcuug

SEQ ID NO: 3720373 - RNA, 14 nt, Human
gcuuucucuucaua

SEQ ID NO: 3720374 - RNA, 14 nt, Human
gcuuucucuuuucu

SEQ ID NO: 3720375 - RNA, 18 nt, Human
gcuuucugaacagcuggu

SEQ ID NO: 3720376 - RNA, 16 nt, Human
uccucaaacacugcag

SEQ ID NO: 3720377 - RNA, 13 nt, Human
uccucaauccagc

SEQ ID NO: 3720378 - RNA, 20 nt, Human
uccucaauuccaacacugau

SEQ ID NO: 3720379 - RNA, 20 nt, Human
uccucacaacauggugucug

SEQ ID NO: 3720380 - RNA, 19 nt, Human
uccucacacacccugaggu

SEQ ID NO: 3720381 - RNA, 15 nt, Human
uccucacacuuacug

SEQ ID NO: 3720382 - RNA, 23 nt, Human
uccucacacuuacuguaagacau

SEQ ID NO: 3720383 - RNA, 16 nt, Human
uccucacccccagcuu

SEQ ID NO: 3720384 - RNA, 20 nt, Human
uccucaccccgucugggguu

SEQ ID NO: 3720385 - RNA, 21 nt, Human
uccucaccccuguccucacug

SEQ ID NO: 3720386 - RNA, 12 nt, Human
uccucaccucug

SEQ ID NO: 3720387 - RNA, 22 nt, Human
uccucaccuuuucccggggagg

SEQ ID NO: 3720388 - RNA, 13 nt, Human
uccucacucccag

SEQ ID NO: 3720389 - RNA, 12 nt, Human
uccucacucccu

SEQ ID NO: 3720390 - RNA, 14 nt, Human
uccucacucccuuc

SEQ ID NO: 3720391 - RNA, 21 nt, Human
uccucacucccuucccauaag

SEQ ID NO: 3720392 - RNA, 16 nt, Human
uccucacucccuucua

SEQ ID NO: 3720393 - RNA, 23 nt, Human
uccucacucggguuucucugugg

SEQ ID NO: 3720394 - RNA, 15 nt, Human
uccucacugcccgca

SEQ ID NO: 3720395 - RNA, 13 nt, Human
uccucacugcucc

SEQ ID NO: 3720396 - RNA, 18 nt, Human
uccucacuggccaucccu

SEQ ID NO: 3720397 - RNA, 14 nt, Human
uccucacuguaucc

SEQ ID NO: 3720398 - RNA, 21 nt, Human
uccucagacucuaagaaagaa

SEQ ID NO: 3720399 - RNA, 11 nt, Human
uccucagacug

SEQ ID NO: 3720400 - RNA, 17 nt, Human
uccucagagaauuucua

SEQ ID NO: 3720401 - RNA, 12 nt, Human
uccucagccagc

SEQ ID NO: 3720402 - RNA, 13 nt, Human
uccucagccagcc

SEQ ID NO: 3720403 - RNA, 16 nt, Human
uccucagccagccucg

SEQ ID NO: 3720404 - RNA, 11 nt, Human
uccucagccuu

SEQ ID NO: 3720405 - RNA, 20 nt, Human
uccucagccuugccagagau

SEQ ID NO: 3720406 - RNA, 21 nt, Human
uccucaggagccgaagcccag

SEQ ID NO: 3720407 - RNA, 17 nt, Human
uccucaggcacacagcu

SEQ ID NO: 3720408 - RNA, 22 nt, Human
uccucaggcacacagcuacucu

SEQ ID NO: 3720409 - RNA, 19 nt, Human
uccucaggcugcuggagga

SEQ ID NO: 3720410 - RNA, 23 nt, Human
uccucagguggccaugccucagc

SEQ ID NO: 3720411 - RNA, 22 nt, Human
uccucaguaaguguuagaggga

SEQ ID NO: 3720412 - RNA, 16 nt, Human
uccucaguccauuuau

SEQ ID NO: 3720413 - RNA, 23 nt, Human
uccucaguccauuuauauaugaa

SEQ ID NO: 3720414 - RNA, 14 nt, Human
uccucauacccacc

SEQ ID NO: 3720415 - RNA, 18 nt, Human
uccucauacccaccccca

SEQ ID NO: 3720416 - RNA, 22 nt, Human
uccucauaguaugguggcuggg

SEQ ID NO: 3720417 - RNA, 15 nt, Human
uccucauauggccca

SEQ ID NO: 3720418 - RNA, 19 nt, Human
uccucaucugggggagugg

SEQ ID NO: 3720419 - RNA, 17 nt, Human
uccucaugaauguaaau

SEQ ID NO: 3720420 - RNA, 23 nt, Human
uccucaugucuucucacaagcca

SEQ ID NO: 3720421 - RNA, 19 nt, Human
uccucauuguaaacaaacu

SEQ ID NO: 3720422 - RNA, 23 nt, Human
uccuccaaaggaagucuaggagc

SEQ ID NO: 3720423 - RNA, 17 nt, Human
uccuccaagaaucuauc

SEQ ID NO: 3720424 - RNA, 16 nt, Human
uccuccacauccuuuc

SEQ ID NO: 3720425 - RNA, 15 nt, Human
uccuccaccaccgcc

SEQ ID NO: 3720426 - RNA, 17 nt, Human
uccuccaccucaacucc

SEQ ID NO: 3720427 - RNA, 22 nt, Human
uccuccacguucugcucaucau

SEQ ID NO: 3720428 - RNA, 12 nt, Human
uccuccagaacu

SEQ ID NO: 3720429 - RNA, 19 nt, Human
uccuccagaagccucuggc

SEQ ID NO: 3720430 - RNA, 20 nt, Human
uccuccagaagccucuggcu

SEQ ID NO: 3720431 - RNA, 10 nt, Human
uccuccagcu

SEQ ID NO: 3720432 - RNA, 21 nt, Human
uccuccagcugcaccagagca

SEQ ID NO: 3720433 - RNA, 13 nt, Human
uccuccaggagcu

SEQ ID NO: 3720434 - RNA, 21 nt, Human
uccuccagggaugaucaacag

SEQ ID NO: 3720435 - RNA, 19 nt, Human
uccuccagggccacgugcc

SEQ ID NO: 3720436 - RNA, 22 nt, Human
uccuccagggugauuuuaugau

SEQ ID NO: 3720437 - RNA, 14 nt, Human
uccuccaggugcac

SEQ ID NO: 3720438 - RNA, 22 nt, Human
uccuccaggugcacaagcucca

SEQ ID NO: 3720439 - RNA, 13 nt, Human
uccuccagguuuu

SEQ ID NO: 3720440 - RNA, 20 nt, Human
uccuccaucccaacagccau

SEQ ID NO: 3720441 - RNA, 17 nt, Human
uccucccaaguggugcc

SEQ ID NO: 3720442 - RNA, 19 nt, Human
uccucccaaguggugccua

SEQ ID NO: 3720443 - RNA, 21 nt, Human
uccucccacccggcugcagag

SEQ ID NO: 3720444 - RNA, 18 nt, Human
uccucccaccucagccuc

SEQ ID NO: 3720445 - RNA, 16 nt, Human
uccucccacugcccac

SEQ ID NO: 3720446 - RNA, 20 nt, Human
uccucccacuucagccuccc

SEQ ID NO: 3720447 - RNA, 12 nt, Human
uccucccagaaa

SEQ ID NO: 3720448 - RNA, 19 nt, Human
uccucccaggaagcccagg

SEQ ID NO: 3720449 - RNA, 23 nt, Human
uccucccaggaagcccaggagcc

SEQ ID NO: 3720450 - RNA, 11 nt, Human
uccucccaggg

SEQ ID NO: 3720451 - RNA, 19 nt, Human
uccucccaugucacugcag

SEQ ID NO: 3720452 - RNA, 21 nt, Human
uccucccauguuaugcccagc

SEQ ID NO: 3720453 - RNA, 19 nt, Human
uccuccccaaggagacaca

SEQ ID NO: 3720454 - RNA, 15 nt, Human
uccucccccugccag

SEQ ID NO: 3720455 - RNA, 17 nt, Human
uccucccccugccagug

SEQ ID NO: 3720456 - RNA, 24 nt, Human
uccucccccugccagugccuuacc

SEQ ID NO: 3720457 - RNA, 18 nt, Human
uccuccccucacagccuc

SEQ ID NO: 3720458 - RNA, 21 nt, Human
uccuccccucacagccucuga

SEQ ID NO: 3720459 - RNA, 20 nt, Human
uccuccccuccuccuggacu

SEQ ID NO: 3720460 - RNA, 14 nt, Human
uccuccccuggagg

SEQ ID NO: 3720461 - RNA, 14 nt, Human
uccuccccuucccu

SEQ ID NO: 3720462 - RNA, 18 nt, Human
uccuccccuucccugcaa

SEQ ID NO: 3720463 - RNA, 14 nt, Human
uccuccccuugggc

SEQ ID NO: 3720464 - RNA, 17 nt, Human
uccucccgagcuccucu

SEQ ID NO: 3720465 - RNA, 16 nt, Human
uccucccgggcccucc

SEQ ID NO: 3720466 - RNA, 13 nt, Human
uccucccucccag

SEQ ID NO: 3720467 - RNA, 15 nt, Human
uccucccucccucuu

SEQ ID NO: 3720468 - RNA, 14 nt, Human
uccucccugcaucu

SEQ ID NO: 3720469 - RNA, 12 nt, Human
uccucccuggcu

SEQ ID NO: 3720470 - RNA, 18 nt, Human
uccucccuggcugcccug

SEQ ID NO: 3720471 - RNA, 19 nt, Human
uccucccugggcagaaagu

SEQ ID NO: 3720472 - RNA, 11 nt, Human
uccucccugua

SEQ ID NO: 3720473 - RNA, 13 nt, Human
uccucccuuccuu

SEQ ID NO: 3720474 - RNA, 17 nt, Human
uccucccuucugcuacu

SEQ ID NO: 3720475 - RNA, 20 nt, Human
uccucccuuggguucugaua

SEQ ID NO: 3720476 - RNA, 18 nt, Human
uccucccuuuccuuccua

SEQ ID NO: 3720477 - RNA, 17 nt, Human
uccuccgguugcauacu

SEQ ID NO: 3720478 - RNA, 18 nt, Human
uccuccguccagccgcca

SEQ ID NO: 3720479 - RNA, 12 nt, Human
uccuccucaccu

SEQ ID NO: 3720480 - RNA, 12 nt, Human
uccuccucaggc

SEQ ID NO: 3720481 - RNA, 15 nt, Human
uccuccuccagggac

SEQ ID NO: 3720482 - RNA, 16 nt, Human
uccuccuccagggaca

SEQ ID NO: 3720483 - RNA, 17 nt, Human
uccuccuccagggacag

SEQ ID NO: 3720484 - RNA, 14 nt, Human
uccuccuccagggu

SEQ ID NO: 3720485 - RNA, 14 nt, Human
uccuccucccugca

SEQ ID NO: 3720486 - RNA, 18 nt, Human
uccuccucccugcaucug

SEQ ID NO: 3720487 - RNA, 13 nt, Human
uccuccucuguga

SEQ ID NO: 3720488 - RNA, 12 nt, Human
uccuccucuuuc

SEQ ID NO: 3720489 - RNA, 15 nt, Human
uccuccucuuucucu

SEQ ID NO: 3720490 - RNA, 19 nt, Human
uccuccucuuucucucccc

SEQ ID NO: 3720491 - RNA, 13 nt, Human
uccuccugacacc

SEQ ID NO: 3720492 - RNA, 22 nt, Human
uccuccugagugaucccauuuc

SEQ ID NO: 3720493 - RNA, 15 nt, Human
uccuccugcagacca

SEQ ID NO: 3720494 - RNA, 16 nt, Human
uccuccugcccaccug

SEQ ID NO: 3720495 - RNA, 12 nt, Human
uccuccugcuca

SEQ ID NO: 3720496 - RNA, 11 nt, Human
uccuccuggaa

SEQ ID NO: 3720497 - RNA, 15 nt, Human
uccuccugggcccuc

SEQ ID NO: 3720498 - RNA, 21 nt, Human
uccuccugguggguccagggg

SEQ ID NO: 3720499 - RNA, 16 nt, Human
uccuccuguauuccug

SEQ ID NO: 3720500 - RNA, 16 nt, Human
uccuccuguguacagg

SEQ ID NO: 3720501 - RNA, 15 nt, Human
uccuccuucacuguu

SEQ ID NO: 3720502 - RNA, 15 nt, Human
uccuccuuccaugga

SEQ ID NO: 3720503 - RNA, 13 nt, Human
uccuccuucuuca

SEQ ID NO: 3720504 - RNA, 16 nt, Human
uccuccuuggugccug

SEQ ID NO: 3720505 - RNA, 17 nt, Human
uccuccuuggugccugg

SEQ ID NO: 3720506 - RNA, 19 nt, Human
uccuccuuggugccuggcc

SEQ ID NO: 3720507 - RNA, 16 nt, Human
uccuccuuuccuccuc

SEQ ID NO: 3720508 - RNA, 16 nt, Human
uccucgagaucccaac

SEQ ID NO: 3720509 - RNA, 17 nt, Human
uccucgagggcagggac

SEQ ID NO: 3720510 - RNA, 15 nt, Human
uccucgcaagcuggg

SEQ ID NO: 3720511 - RNA, 23 nt, Human
uccucgcagagaggccaggugca

SEQ ID NO: 3720512 - RNA, 14 nt, Human
uccucgcagccucu

SEQ ID NO: 3720513 - RNA, 19 nt, Human
uccucgcagccucucagug

SEQ ID NO: 3720514 - RNA, 13 nt, Human
uccucgcccuggg

SEQ ID NO: 3720515 - RNA, 14 nt, Human
uccucgcccugggu

SEQ ID NO: 3720516 - RNA, 15 nt, Human
uccucgccugacaac

SEQ ID NO: 3720517 - RNA, 16 nt, Human
uccucggaucaccgag

SEQ ID NO: 3720518 - RNA, 14 nt, Human
uccucggccuggcu

SEQ ID NO: 3720519 - RNA, 15 nt, Human
uccucggccuggcuc

SEQ ID NO: 3720520 - RNA, 17 nt, Human
uccucguuccuuucucc

SEQ ID NO: 3720521 - RNA, 19 nt, Human
uccucguucucccugggag

SEQ ID NO: 3720522 - RNA, 13 nt, Human
uccucguuugugu

SEQ ID NO: 3720523 - RNA, 16 nt, Human
uccucguuuguguucu

SEQ ID NO: 3720524 - RNA, 21 nt, Human
uccucuaacaggggcuggugg

SEQ ID NO: 3720525 - RNA, 21 nt, Human
uccucuaagccacucuuccaa

SEQ ID NO: 3720526 - RNA, 19 nt, Human
uccucuagaagccaaggga

SEQ ID NO: 3720527 - RNA, 18 nt, Human
uccaucuccaagaaugcu

SEQ ID NO: 3720528 - RNA, 20 nt, Human
uccaucuccaagaaugcuga

SEQ ID NO: 3720529 - RNA, 12 nt, Human
uccaucuccuug

SEQ ID NO: 3720530 - RNA, 16 nt, Human
uccaucucgccacccc

SEQ ID NO: 3720531 - RNA, 23 nt, Human
uccaucucuauauaaaaacaaaa

SEQ ID NO: 3720532 - RNA, 16 nt, Human
uccaucucucuggccc

SEQ ID NO: 3720533 - RNA, 14 nt, Human
uccaucucugacuu

SEQ ID NO: 3720534 - RNA, 22 nt, Human
uccaucugcccgccugcccacc

SEQ ID NO: 3720535 - RNA, 22 nt, Human
uccaucugguagaagggaaagc

SEQ ID NO: 3720536 - RNA, 16 nt, Human
uccaucuucuuugcag

SEQ ID NO: 3720537 - RNA, 13 nt, Human
uccaucuuuacaa

SEQ ID NO: 3720538 - RNA, 15 nt, Human
uccaugaaaacguuu

SEQ ID NO: 3720539 - RNA, 16 nt, Human
uccaugaaaaugcaac

SEQ ID NO: 3720540 - RNA, 22 nt, Human
uccaugaagauguagaggagaa

SEQ ID NO: 3720541 - RNA, 23 nt, Human
uccaugacaauaugcccuuucug

SEQ ID NO: 3720542 - RNA, 20 nt, Human
uccaugaccuaguuuuccau

SEQ ID NO: 3720543 - RNA, 17 nt, Human
uccaugacugcauuuua

SEQ ID NO: 3720544 - RNA, 15 nt, Human
uccaugacugcuugc

SEQ ID NO: 3720545 - RNA, 15 nt, Human
uccaugagcacccca

SEQ ID NO: 3720546 - RNA, 15 nt, Human
uccaugaugcuggga

SEQ ID NO: 3720547 - RNA, 15 nt, Human
uccaugauggaguca

SEQ ID NO: 3720548 - RNA, 12 nt, Human
uccaugauucua

SEQ ID NO: 3720549 - RNA, 13 nt, Human
uccaugccugagg

SEQ ID NO: 3720550 - RNA, 19 nt, Human
uccaugcguguuucugacu

SEQ ID NO: 3720551 - RNA, 20 nt, Human
uccaugcguguuucugacuc

SEQ ID NO: 3720552 - RNA, 21 nt, Human
uccaugcuccucacugcccgc

SEQ ID NO: 3720553 - RNA, 22 nt, Human
uccaugcuccucacugcccgca

SEQ ID NO: 3720554 - RNA, 14 nt, Human
uccaugcugccucc

SEQ ID NO: 3720555 - RNA, 20 nt, Human
uccaugcugugcgcccaggg

SEQ ID NO: 3720556 - RNA, 23 nt, Human
uccaugcuucucaucuugugaaa

SEQ ID NO: 3720557 - RNA, 15 nt, Human
uccauggacuuuguu

SEQ ID NO: 3720558 - RNA, 14 nt, Human
uccauggauuuugg

SEQ ID NO: 3720559 - RNA, 14 nt, Human
uccauggccagcag

SEQ ID NO: 3720560 - RNA, 16 nt, Human
uccauggccagcagca

SEQ ID NO: 3720561 - RNA, 23 nt, Human
uccauggcgaaaacaucuccuua

SEQ ID NO: 3720562 - RNA, 17 nt, Human
uccaugggauacaaccu

SEQ ID NO: 3720563 - RNA, 16 nt, Human
uccaugggcagagccc

SEQ ID NO: 3720564 - RNA, 15 nt, Human
uccaugggggcaggg

SEQ ID NO: 3720565 - RNA, 15 nt, Human
uccaugggguaggag

SEQ ID NO: 3720566 - RNA, 21 nt, Human
uccauggguuccaguuucaga

SEQ ID NO: 3720567 - RNA, 16 nt, Human
uccauggugccucugg

SEQ ID NO: 3720568 - RNA, 17 nt, Human
uccauggugccucugga

SEQ ID NO: 3720569 - RNA, 15 nt, Human
uccauguaacugccu

SEQ ID NO: 3720570 - RNA, 21 nt, Human
uccauguacuguaguuuuucu

SEQ ID NO: 3720571 - RNA, 14 nt, Human
uccaugucaagauu

SEQ ID NO: 3720572 - RNA, 17 nt, Human
uccauguccuaugugug

SEQ ID NO: 3720573 - RNA, 18 nt, Human
uccaugugaucucauugu

SEQ ID NO: 3720574 - RNA, 19 nt, Human
uccauguggacuuaggaag

SEQ ID NO: 3720575 - RNA, 11 nt, Human
uccaugugugu

SEQ ID NO: 3720576 - RNA, 13 nt, Human
uccaugugugugc

SEQ ID NO: 3720577 - RNA, 18 nt, Human
uccaugugugugcaagug

SEQ ID NO: 3720578 - RNA, 17 nt, Human
uccauguugcugccaac

SEQ ID NO: 3720579 - RNA, 19 nt, Human
uccauguuggcuagccucu

SEQ ID NO: 3720580 - RNA, 19 nt, Human
uccauguuggucaggcugg

SEQ ID NO: 3720581 - RNA, 19 nt, Human
uccauuaaagucugaauca

SEQ ID NO: 3720582 - RNA, 14 nt, Human
uccauuaggauuug

SEQ ID NO: 3720583 - RNA, 17 nt, Human
uccauuaggccagcaac

SEQ ID NO: 3720584 - RNA, 20 nt, Human
uccauuaggccagcaacgcu

SEQ ID NO: 3720585 - RNA, 13 nt, Human
uccauuaucaugu

SEQ ID NO: 3720586 - RNA, 16 nt, Human
uccauuaucaugugua

SEQ ID NO: 3720587 - RNA, 17 nt, Human
uccauuaucauguguaa

SEQ ID NO: 3720588 - RNA, 11 nt, Human
uccauuauuua

SEQ ID NO: 3720589 - RNA, 12 nt, Human
uccauuauuuau

SEQ ID NO: 3720590 - RNA, 15 nt, Human
uccauuauuuauauu

SEQ ID NO: 3720591 - RNA, 12 nt, Human
uccauuccagaa

SEQ ID NO: 3720592 - RNA, 10 nt, Human
uccauuccca

SEQ ID NO: 3720593 - RNA, 20 nt, Human
uccauucccaacuagacauu

SEQ ID NO: 3720594 - RNA, 16 nt, Human
uccauucucccaggua

SEQ ID NO: 3720595 - RNA, 14 nt, Human
uccauucuccugag

SEQ ID NO: 3720596 - RNA, 16 nt, Human
uccauugacauguaca

SEQ ID NO: 3720597 - RNA, 17 nt, Human
uccauugacauguacag

SEQ ID NO: 3720598 - RNA, 18 nt, Human
uccauugacauguacaga

SEQ ID NO: 3720599 - RNA, 20 nt, Human
uccauugacauguacagaga

SEQ ID NO: 3720600 - RNA, 16 nt, Human
uccauuggaucucauu

SEQ ID NO: 3720601 - RNA, 22 nt, Human
uccauugguuuaccugugaaau

SEQ ID NO: 3720602 - RNA, 20 nt, Human
uccauuguuugaaacaaaga

SEQ ID NO: 3720603 - RNA, 21 nt, Human
uccauuguuugaaacaaagaa

SEQ ID NO: 3720604 - RNA, 19 nt, Human
uccauuguuuggagacauu

SEQ ID NO: 3720605 - RNA, 14 nt, Human
uccauuuaaacaga

SEQ ID NO: 3720606 - RNA, 21 nt, Human
uccauuuaaacagauguccau

SEQ ID NO: 3720607 - RNA, 17 nt, Human
uccauuuaauaauuaua

SEQ ID NO: 3720608 - RNA, 22 nt, Human
uccauuuacuuaagacuuaaug

SEQ ID NO: 3720609 - RNA, 15 nt, Human
uccauuuauauauga

SEQ ID NO: 3720610 - RNA, 17 nt, Human
uccauuuauauaugaaa

SEQ ID NO: 3720611 - RNA, 18 nt, Human
uccauuuauauaugaaaa

SEQ ID NO: 3720612 - RNA, 23 nt, Human
uccauuuauauaugaaaacuaua

SEQ ID NO: 3720613 - RNA, 15 nt, Human
uccauuuccauugcu

SEQ ID NO: 3720614 - RNA, 12 nt, Human
uccauuucuaau

SEQ ID NO: 3720615 - RNA, 13 nt, Human
uccauuucuaauu

SEQ ID NO: 3720616 - RNA, 17 nt, Human
uccauuucucauguuuu

SEQ ID NO: 3720617 - RNA, 16 nt, Human
uccauuucucucucca

SEQ ID NO: 3720618 - RNA, 18 nt, Human
uccauuucucucuccagu

SEQ ID NO: 3720619 - RNA, 15 nt, Human
uccauuugcauuugu

SEQ ID NO: 3720620 - RNA, 12 nt, Human
uccauuuggaaa

SEQ ID NO: 3720621 - RNA, 21 nt, Human
uccauuuucccccacuacugc

SEQ ID NO: 3720622 - RNA, 18 nt, Human
uccauuuuccuacaggca

SEQ ID NO: 3720623 - RNA, 13 nt, Human
uccauuuugugaa

SEQ ID NO: 3720624 - RNA, 23 nt, Human
ucccaaaaguaucgggggcuggg

SEQ ID NO: 3720625 - RNA, 14 nt, Human
ucccaaaauuguuu

SEQ ID NO: 3720626 - RNA, 15 nt, Human
ucccaaacgccuccc

SEQ ID NO: 3720627 - RNA, 21 nt, Human
ucccaaacuaagcuaugugaa

SEQ ID NO: 3720628 - RNA, 14 nt, Human
ucccaaagcaagca

SEQ ID NO: 3720629 - RNA, 16 nt, Human
ucccaaagcagugcau

SEQ ID NO: 3720630 - RNA, 17 nt, Human
ucccaaagcagugcaug

SEQ ID NO: 3720631 - RNA, 13 nt, Human
ucccaaagugcug

SEQ ID NO: 3720632 - RNA, 19 nt, Human
ucccaaagugcugagauua

SEQ ID NO: 3720633 - RNA, 15 nt, Human
ucccaaagugcuggg

SEQ ID NO: 3720634 - RNA, 20 nt, Human
ucccaaagugcugggauuac

SEQ ID NO: 3720635 - RNA, 16 nt, Human
ucccaaauccuuccca

SEQ ID NO: 3720636 - RNA, 16 nt, Human
ucccaaauuucauacc

SEQ ID NO: 3720637 - RNA, 19 nt, Human
ucccaacacaaggugggca

SEQ ID NO: 3720638 - RNA, 16 nt, Human
ucccaacacugccagc

SEQ ID NO: 3720639 - RNA, 16 nt, Human
ucccaacagccaugcc

SEQ ID NO: 3720640 - RNA, 11 nt, Human
ucccaacagga

SEQ ID NO: 3720641 - RNA, 18 nt, Human
ucccaacaggaggacaau

SEQ ID NO: 3720642 - RNA, 20 nt, Human
ucccaacaggaggacaauuc

SEQ ID NO: 3720643 - RNA, 19 nt, Human
ucccaaccagugccaagga

SEQ ID NO: 3720644 - RNA, 23 nt, Human
ucccaaccagugccaaggaccuc

SEQ ID NO: 3720645 - RNA, 21 nt, Human
ucccaaccccuuaagcccugg

SEQ ID NO: 3720646 - RNA, 22 nt, Human
ucccaaccccuuaagcccuggc

SEQ ID NO: 3720647 - RNA, 19 nt, Human
ucccaacucaccccagccc

SEQ ID NO: 3720648 - RNA, 15 nt, Human
ucccaacucuagcug

SEQ ID NO: 3720649 - RNA, 17 nt, Human
ucccaacucuagcuggg

SEQ ID NO: 3720650 - RNA, 14 nt, Human
ucccaacugcaagu

SEQ ID NO: 3720651 - RNA, 21 nt, Human
ucccaacuucucuugcuuucu

SEQ ID NO: 3720652 - RNA, 20 nt, Human
ucccaagaaaggaaaccuuu

SEQ ID NO: 3720653 - RNA, 13 nt, Human
ucccaagaaaugc

SEQ ID NO: 3720654 - RNA, 16 nt, Human
ucccaagaaugcaaga

SEQ ID NO: 3720655 - RNA, 13 nt, Human
ucccaagagcuac

SEQ ID NO: 3720656 - RNA, 18 nt, Human
ucccaagaucugugcagc

SEQ ID NO: 3720657 - RNA, 16 nt, Human
ucccaagcggugucuc

SEQ ID NO: 3720658 - RNA, 17 nt, Human
ucccaagcggugucucu

SEQ ID NO: 3720659 - RNA, 16 nt, Human
ucccaagcucagaggc

SEQ ID NO: 3720660 - RNA, 15 nt, Human
ucccaagcucugcuc

SEQ ID NO: 3720661 - RNA, 15 nt, Human
ucccaagcuggcugg

SEQ ID NO: 3720662 - RNA, 12 nt, Human
ucccaagcuggg

SEQ ID NO: 3720663 - RNA, 13 nt, Human
ucccaagcugggc

SEQ ID NO: 3720664 - RNA, 15 nt, Human
ucccaagcugggccc

SEQ ID NO: 3720665 - RNA, 21 nt, Human
ucccaagcugggccccagccc

SEQ ID NO: 3720666 - RNA, 18 nt, Human
ucccaaggaaagccccag

SEQ ID NO: 3720667 - RNA, 16 nt, Human
ucccaaggagaacaaa

SEQ ID NO: 3720668 - RNA, 18 nt, Human
ucccaaggggccugagca

SEQ ID NO: 3720669 - RNA, 16 nt, Human
ucccaagguuacuuaa

SEQ ID NO: 3720670 - RNA, 20 nt, Human
ucccaagguuacuuaauuca

SEQ ID NO: 3720671 - RNA, 17 nt, Human
ucccaagguuggagccc

SEQ ID NO: 3720672 - RNA, 17 nt, Human
ucccaaguagaaucuca

SEQ ID NO: 3720673 - RNA, 20 nt, Human
ucccaaguagcugagacuac

SEQ ID NO: 3720674 - RNA, 21 nt, Human
ucccaaguagcugggauuaca

SEQ ID NO: 3720675 - RNA, 13 nt, Human
ucccaaguccaca

SEQ ID NO: 3720676 - RNA, 14 nt, Human
ucccaagucuacag

SEQ ID NO: 3720677 - RNA, 17 nt, Human
ucccaagugagucucuc

SEQ ID NO: 3720678 - RNA, 21 nt, Human
gcuuucugaacagcuggugua

SEQ ID NO: 3720679 - RNA, 17 nt, Human
gcuuucugaucaaggcc

SEQ ID NO: 3720680 - RNA, 21 nt, Human
gcuuucugcucagcuucuccu

SEQ ID NO: 3720681 - RNA, 14 nt, Human
gcuuucuggggccu

SEQ ID NO: 3720682 - RNA, 17 nt, Human
gcuuucuggggccuagc

SEQ ID NO: 3720683 - RNA, 15 nt, Human
gcuuucuguuccaaa

SEQ ID NO: 3720684 - RNA, 16 nt, Human
gcuuucuguuccaaau

SEQ ID NO: 3720685 - RNA, 15 nt, Human
gcuuucuguugucau

SEQ ID NO: 3720686 - RNA, 22 nt, Human
gcuuucuguugucauugcuguu

SEQ ID NO: 3720687 - RNA, 13 nt, Human
gcuuucuugcugg

SEQ ID NO: 3720688 - RNA, 17 nt, Human
gcuuucuugcugguugu

SEQ ID NO: 3720689 - RNA, 17 nt, Human
gcuuucuuugauucucc

SEQ ID NO: 3720690 - RNA, 19 nt, Human
gcuuucuuugauucuccuu

SEQ ID NO: 3720691 - RNA, 18 nt, Human
gcuuucuuuuuaaagcuu

SEQ ID NO: 3720692 - RNA, 14 nt, Human
gcuuugacucaccu

SEQ ID NO: 3720693 - RNA, 16 nt, Human
gcuuugacucaggagc

SEQ ID NO: 3720694 - RNA, 15 nt, Human
gcuuugacugagcag

SEQ ID NO: 3720695 - RNA, 22 nt, Human
gcuuugacugagcagacuggug

SEQ ID NO: 3720696 - RNA, 16 nt, Human
gcuuugagagagaaag

SEQ ID NO: 3720697 - RNA, 12 nt, Human
gcuuugauauau

SEQ ID NO: 3720698 - RNA, 15 nt, Human
gcuuugaucccugac

SEQ ID NO: 3720699 - RNA, 21 nt, Human
gcuuugauguuccuuccagug

SEQ ID NO: 3720700 - RNA, 21 nt, Human
gcuuugauuaauccagaauaa

SEQ ID NO: 3720701 - RNA, 20 nt, Human
uccuuacgcuuugucacaca

SEQ ID NO: 3720702 - RNA, 16 nt, Human
uccuuacucccaggca

SEQ ID NO: 3720703 - RNA, 17 nt, Human
uccuuacuuuuuauaua

SEQ ID NO: 3720704 - RNA, 19 nt, Human
uccuuagaaaaaaaauuau

SEQ ID NO: 3720705 - RNA, 14 nt, Human
uccuuagaagugga

SEQ ID NO: 3720706 - RNA, 20 nt, Human
uccuuagagguccucuggag

SEQ ID NO: 3720707 - RNA, 13 nt, Human
uccuuagccugga

SEQ ID NO: 3720708 - RNA, 14 nt, Human
uccuuagccuggac

SEQ ID NO: 3720709 - RNA, 15 nt, Human
uccuuagccuggacc

SEQ ID NO: 3720710 - RNA, 22 nt, Human
uccuuagccuggaccucugaca

SEQ ID NO: 3720711 - RNA, 16 nt, Human
uccuuagcugccaagc

SEQ ID NO: 3720712 - RNA, 19 nt, Human
uccuuagcuuagaccucag

SEQ ID NO: 3720713 - RNA, 20 nt, Human
uccuuagcuuagaccucagc

SEQ ID NO: 3720714 - RNA, 21 nt, Human
uccuuagcuuagaccucagcc

SEQ ID NO: 3720715 - RNA, 22 nt, Human
uccuuagcuuagaccucagccu

SEQ ID NO: 3720716 - RNA, 23 nt, Human
uccuuagcuuagaccucagccug

SEQ ID NO: 3720717 - RNA, 18 nt, Human
uccccaccgcagacagga

SEQ ID NO: 3720718 - RNA, 21 nt, Human
uccccaccgcagacaggacca

SEQ ID NO: 3720719 - RNA, 14 nt, Human
uccccaccuccagg

SEQ ID NO: 3720720 - RNA, 23 nt, Human
uccccaccuucaauuccugggcc

SEQ ID NO: 3720721 - RNA, 20 nt, Human
uccccaccuucuucagccac

SEQ ID NO: 3720722 - RNA, 14 nt, Human
uccccacgccacag

SEQ ID NO: 3720723 - RNA, 19 nt, Human
uccccacgccacagcccuu

SEQ ID NO: 3720724 - RNA, 22 nt, Human
uccccacgccacagcccuuuug

SEQ ID NO: 3720725 - RNA, 14 nt, Human
uccccacgcccucc

SEQ ID NO: 3720726 - RNA, 18 nt, Human
uccccacucugcucugau

SEQ ID NO: 3720727 - RNA, 20 nt, Human
uccccacucugcucugaugc

SEQ ID NO: 3720728 - RNA, 14 nt, Human
uccccacugccugc

SEQ ID NO: 3720729 - RNA, 18 nt, Human
uccccacugccugcccac

SEQ ID NO: 3720730 - RNA, 22 nt, Human
uccccacugccugcccacccgu

SEQ ID NO: 3720731 - RNA, 12 nt, Human
uccccacuggag

SEQ ID NO: 3720732 - RNA, 14 nt, Human
uccccacuggagca

SEQ ID NO: 3720733 - RNA, 17 nt, Human
uccccagaacucugccu

SEQ ID NO: 3720734 - RNA, 21 nt, Human
uccccagaacucugccugccc

SEQ ID NO: 3720735 - RNA, 13 nt, Human
uccccagaccuga

SEQ ID NO: 3720736 - RNA, 22 nt, Human
uccccagacuccaccaagccug

SEQ ID NO: 3720737 - RNA, 21 nt, Human
uccccagagcacuggguugca

SEQ ID NO: 3720738 - RNA, 20 nt, Human
uccccagaguuccccaugca

SEQ ID NO: 3720739 - RNA, 20 nt, Human
uccccagauugcaacaggcu

SEQ ID NO: 3720740 - RNA, 20 nt, Human
uccccagcaagugagagcug

SEQ ID NO: 3720741 - RNA, 21 nt, Human
uccccagcaagugagagcugg

SEQ ID NO: 3720742 - RNA, 14 nt, Human
uccccagccagccu

SEQ ID NO: 3720743 - RNA, 20 nt, Human
uccccagccagccuggcugg

SEQ ID NO: 3720744 - RNA, 12 nt, Human
uccccagcccag

SEQ ID NO: 3720745 - RNA, 13 nt, Human
uccccagcccagg

SEQ ID NO: 3720746 - RNA, 15 nt, Human
uccccagccccuagc

SEQ ID NO: 3720747 - RNA, 19 nt, Human
uccccagccccuagcccag

SEQ ID NO: 3720748 - RNA, 15 nt, Human
uccccagcccuaaga

SEQ ID NO: 3720749 - RNA, 18 nt, Human
uccccagcccuggcucug

SEQ ID NO: 3720750 - RNA, 12 nt, Human
uccccagccucu

SEQ ID NO: 3720751 - RNA, 14 nt, Human
uccccagccucucu

SEQ ID NO: 3720752 - RNA, 16 nt, Human
uccccagccucucuuc

SEQ ID NO: 3720753 - RNA, 22 nt, Human
uccccagccucucuuccuaucc

SEQ ID NO: 3720754 - RNA, 12 nt, Human
uccccagccugc

SEQ ID NO: 3720755 - RNA, 17 nt, Human
uccccagccugcgccug

SEQ ID NO: 3720756 - RNA, 20 nt, Human
uccccagccugcgccugcug

SEQ ID NO: 3720757 - RNA, 14 nt, Human
uccccagccuggga

SEQ ID NO: 3720758 - RNA, 16 nt, Human
uccccagccugggccc

SEQ ID NO: 3720759 - RNA, 21 nt, Human
uccccagccugggcccaucuc

SEQ ID NO: 3720760 - RNA, 22 nt, Human
uccccagcgucccagucucugg

SEQ ID NO: 3720761 - RNA, 22 nt, Human
uccccagcucaccccuggagga

SEQ ID NO: 3720762 - RNA, 14 nt, Human
uccccagcuguuua

SEQ ID NO: 3720763 - RNA, 21 nt, Human
uccccaggaggccagccuuga

SEQ ID NO: 3720764 - RNA, 16 nt, Human
uccccaggcaccucac

SEQ ID NO: 3720765 - RNA, 16 nt, Human
uccccaggccaggcca

SEQ ID NO: 3720766 - RNA, 19 nt, Human
uccccaggccccaggaagc

SEQ ID NO: 3720767 - RNA, 20 nt, Human
uccccaggccccaggaagcc

SEQ ID NO: 3720768 - RNA, 21 nt, Human
uccccaggccccaggaagccg

SEQ ID NO: 3720769 - RNA, 21 nt, Human
uccccaggccguggcugccca

SEQ ID NO: 3720770 - RNA, 23 nt, Human
uccccagggaagcagcagccucg

SEQ ID NO: 3720771 - RNA, 10 nt, Human
uccccagggg

SEQ ID NO: 3720772 - RNA, 23 nt, Human
uccccaggggagagggucuggag

SEQ ID NO: 3720773 - RNA, 15 nt, Human
uccccaggggaguug

SEQ ID NO: 3720774 - RNA, 23 nt, Human
uccccaggggucccagccacccc

SEQ ID NO: 3720775 - RNA, 16 nt, Human
uccccagguccagcuc

SEQ ID NO: 3720776 - RNA, 14 nt, Human
uccccagugaaaac

SEQ ID NO: 3720777 - RNA, 14 nt, Human
uccccaucauccca

SEQ ID NO: 3720778 - RNA, 17 nt, Human
uccccaucaucccagcu

SEQ ID NO: 3720779 - RNA, 14 nt, Human
uccccauccuccag

SEQ ID NO: 3720780 - RNA, 15 nt, Human
uccccauccuccagc

SEQ ID NO: 3720781 - RNA, 18 nt, Human
uccccauccuccagcuuc

SEQ ID NO: 3720782 - RNA, 18 nt, Human
uccccaucguugccccca

SEQ ID NO: 3720783 - RNA, 22 nt, Human
uccccaucucccugccuggccc

SEQ ID NO: 3720784 - RNA, 14 nt, Human
uccccaucuggguc

SEQ ID NO: 3720785 - RNA, 19 nt, Human
uccccaucuucuaaaccca

SEQ ID NO: 3720786 - RNA, 21 nt, Human
uccccaugcuuaacauacccg

SEQ ID NO: 3720787 - RNA, 23 nt, Human
uccccaugggaagacgaggcccu

SEQ ID NO: 3720788 - RNA, 19 nt, Human
uccccauuuagguuucuga

SEQ ID NO: 3720789 - RNA, 22 nt, Human
ucccccaacauauaaaauaaug

SEQ ID NO: 3720790 - RNA, 19 nt, Human
ucccccaacccccacccca

SEQ ID NO: 3720791 - RNA, 20 nt, Human
ucccccaacccccaccccac

SEQ ID NO: 3720792 - RNA, 21 nt, Human
ucccccaacccccaccccaca

SEQ ID NO: 3720793 - RNA, 22 nt, Human
ucccccaacccccaccccacac

SEQ ID NO: 3720794 - RNA, 17 nt, Human
ucccccaacucugagcc

SEQ ID NO: 3720795 - RNA, 18 nt, Human
ucccccaacucugagccc

SEQ ID NO: 3720796 - RNA, 21 nt, Human
ucccccaacucugagcccaug

SEQ ID NO: 3720797 - RNA, 14 nt, Human
ucccccaacuugag

SEQ ID NO: 3720798 - RNA, 20 nt, Human
ucccccaccgguccagcugg

SEQ ID NO: 3720799 - RNA, 13 nt, Human
ucccccagacuuu

SEQ ID NO: 3720800 - RNA, 21 nt, Human
ucccccagcaaagcccccaga

SEQ ID NO: 3720801 - RNA, 22 nt, Human
ucccccagcaaagcccccagag

SEQ ID NO: 3720802 - RNA, 23 nt, Human
ucccccagcaaagcccccagagc

SEQ ID NO: 3720803 - RNA, 20 nt, Human
ucccccagccaugccagcug

SEQ ID NO: 3720804 - RNA, 23 nt, Human
ucccccagccaugccagcuggcc

SEQ ID NO: 3720805 - RNA, 21 nt, Human
ucccccagccccauccucugu

SEQ ID NO: 3720806 - RNA, 14 nt, Human
ucccccagcccugu

SEQ ID NO: 3720807 - RNA, 15 nt, Human
ucccccagcccugug

SEQ ID NO: 3720808 - RNA, 17 nt, Human
ucccccagcccugugga

SEQ ID NO: 3720809 - RNA, 17 nt, Human
ucccccauccuccccuu

SEQ ID NO: 3720810 - RNA, 18 nt, Human
ucccccauccuccccuuc

SEQ ID NO: 3720811 - RNA, 13 nt, Human
ucccccaucuccc

SEQ ID NO: 3720812 - RNA, 17 nt, Human
ucccccaucucuucugg

SEQ ID NO: 3720813 - RNA, 16 nt, Human
ucccccauguucuguc

SEQ ID NO: 3720814 - RNA, 17 nt, Human
uccccccacaagugccc

SEQ ID NO: 3720815 - RNA, 22 nt, Human
uccccccacaagugcccuccag

SEQ ID NO: 3720816 - RNA, 13 nt, Human
uccccccacugca

SEQ ID NO: 3720817 - RNA, 23 nt, Human
uccccccacugcaggccccgcuu

SEQ ID NO: 3720818 - RNA, 15 nt, Human
uccccccaucuugcu

SEQ ID NO: 3720819 - RNA, 17 nt, Human
uccccccuccucugaaa

SEQ ID NO: 3720820 - RNA, 14 nt, Human
ucccccgccacucc

SEQ ID NO: 3720821 - RNA, 19 nt, Human
ucccccgccgcuuuucucc

SEQ ID NO: 3720822 - RNA, 22 nt, Human
ucccccgggaggggcccgcuug

SEQ ID NO: 3720823 - RNA, 19 nt, Human
ucccccuccuucccagcug

SEQ ID NO: 3720824 - RNA, 21 nt, Human
ucccccuccuucccagcugcc

SEQ ID NO: 3720825 - RNA, 12 nt, Human
ucccccucuguc

SEQ ID NO: 3720826 - RNA, 15 nt, Human
ucccccucuguccag

SEQ ID NO: 3720827 - RNA, 13 nt, Human
ucccccugcagcu

SEQ ID NO: 3720828 - RNA, 14 nt, Human
ucccccugcagcua

SEQ ID NO: 3720829 - RNA, 15 nt, Human
ucccccugcccucgu

SEQ ID NO: 3720830 - RNA, 21 nt, Human
ucccccuggccaccacccccc

SEQ ID NO: 3720831 - RNA, 20 nt, Human
ucccccuggggcuucuccug

SEQ ID NO: 3720832 - RNA, 15 nt, Human
ucccccuguccccuc

SEQ ID NO: 3720833 - RNA, 21 nt, Human
ucccccuguuucagaggcuca

SEQ ID NO: 3720834 - RNA, 15 nt, Human
ucccccuucacaaag

SEQ ID NO: 3720835 - RNA, 15 nt, Human
ucccccuuccaugga

SEQ ID NO: 3720836 - RNA, 21 nt, Human
ucccccuuccauggacuuugu

SEQ ID NO: 3720837 - RNA, 13 nt, Human
ucccccuugccac

SEQ ID NO: 3720838 - RNA, 14 nt, Human
ucccccuugccacc

SEQ ID NO: 3720839 - RNA, 11 nt, Human
ucccccuuucu

SEQ ID NO: 3720840 - RNA, 15 nt, Human
ucccccuuucuuccu

SEQ ID NO: 3720841 - RNA, 19 nt, Human
ucccccuuuuuuguccccc

SEQ ID NO: 3720842 - RNA, 20 nt, Human
uccccgcacugggcuugggg

SEQ ID NO: 3720843 - RNA, 21 nt, Human
uccccgcagugugcacuaagg

SEQ ID NO: 3720844 - RNA, 22 nt, Human
uccccgcagugugcacuaaggg

SEQ ID NO: 3720845 - RNA, 18 nt, Human
uccccgcauuccaggcuc

SEQ ID NO: 3720846 - RNA, 19 nt, Human
uccccgcauuccaggcucc

SEQ ID NO: 3720847 - RNA, 15 nt, Human
uccccgcccuuuuuu

SEQ ID NO: 3720848 - RNA, 19 nt, Human
uccccgccuggccaggagc

SEQ ID NO: 3720849 - RNA, 14 nt, Human
uccccgccuguucc

SEQ ID NO: 3720850 - RNA, 13 nt, Human
uccccgcuggcug

SEQ ID NO: 3720851 - RNA, 15 nt, Human
uccccgcuggcuggg

SEQ ID NO: 3720852 - RNA, 17 nt, Human
uccccgcuggcuggggg

SEQ ID NO: 3720853 - RNA, 18 nt, Human
uccccgcuucugccugca

SEQ ID NO: 3720854 - RNA, 16 nt, Human
uccccggacucaagcc

SEQ ID NO: 3720855 - RNA, 15 nt, Human
uccccggcccuacca

SEQ ID NO: 3720856 - RNA, 21 nt, Human
uccccggcccuaccagcgccc

SEQ ID NO: 3720857 - RNA, 12 nt, Human
uccccggccuca

SEQ ID NO: 3720858 - RNA, 13 nt, Human
uccccggccucag

SEQ ID NO: 3720859 - RNA, 13 nt, Human
uccccggcucgag

SEQ ID NO: 3720860 - RNA, 11 nt, Human
uccccggggcc

SEQ ID NO: 3720861 - RNA, 15 nt, Human
uccccuaaagccuca

SEQ ID NO: 3720862 - RNA, 13 nt, Human
uccccuaaugccu

SEQ ID NO: 3720863 - RNA, 17 nt, Human
uccccuauccacccagc

SEQ ID NO: 3720864 - RNA, 19 nt, Human
uccccuauggggauggucc

SEQ ID NO: 3720865 - RNA, 23 nt, Human
uccccucaaggacaaagucucca

SEQ ID NO: 3720866 - RNA, 12 nt, Human
ggaagugugggu

SEQ ID NO: 3720867 - RNA, 22 nt, Human
ggaagugugggucugugugugu

SEQ ID NO: 3720868 - RNA, 16 nt, Human
ggaaguuaaaagcaca

SEQ ID NO: 3720869 - RNA, 16 nt, Human
ggaaguuuagcucuga

SEQ ID NO: 3720870 - RNA, 18 nt, Human
ggaaguuucauauauugu

SEQ ID NO: 3720871 - RNA, 14 nt, Human
ggaaguuuucaaug

SEQ ID NO: 3720872 - RNA, 21 nt, Human
ggaaguuuuguggaggagcuc

SEQ ID NO: 3720873 - RNA, 18 nt, Human
ggaauaaaaggcuugaag

SEQ ID NO: 3720874 - RNA, 13 nt, Human
ggaauaaauaugc

SEQ ID NO: 3720875 - RNA, 14 nt, Human
ggaauaaccuucca

SEQ ID NO: 3720876 - RNA, 21 nt, Human
ggaauaacuuuuacacgacca

SEQ ID NO: 3720877 - RNA, 20 nt, Human
ggaauaagaagcaaauaaau

SEQ ID NO: 3720878 - RNA, 13 nt, Human
ggaauaagacaga

SEQ ID NO: 3720879 - RNA, 15 nt, Human
ggaauacaauguaau

SEQ ID NO: 3720880 - RNA, 12 nt, Human
ggaauacuuuuu

SEQ ID NO: 3720881 - RNA, 17 nt, Human
ggaauacuuuuuguuau

SEQ ID NO: 3720882 - RNA, 18 nt, Human
ggaauaguauccuccagg

SEQ ID NO: 3720883 - RNA, 21 nt, Human
ggaauaguauccuccagguuu

SEQ ID NO: 3720884 - RNA, 22 nt, Human
ggaauaguauccuccagguuuu

SEQ ID NO: 3720885 - RNA, 15 nt, Human
ggaauauaauuguuu

SEQ ID NO: 3720886 - RNA, 21 nt, Human
ggaauauuauauuuggaugca

SEQ ID NO: 3720887 - RNA, 22 nt, Human
ggaauauuccccuaucucuaga

SEQ ID NO: 3720888 - RNA, 15 nt, Human
ggaauauuuuauuca

SEQ ID NO: 3720889 - RNA, 19 nt, Human
ggaauauuuuauucaaggu

SEQ ID NO: 3720890 - RNA, 16 nt, Human
ggaaucaagagcugcc

SEQ ID NO: 3720891 - RNA, 17 nt, Human
ggaaucaagagcugccc

SEQ ID NO: 3720892 - RNA, 12 nt, Human
ggaaucaagauu

SEQ ID NO: 3720893 - RNA, 15 nt, Human
ggaaucacucuugug

SEQ ID NO: 3720894 - RNA, 16 nt, Human
ggaaucagcaagaaga

SEQ ID NO: 3720895 - RNA, 19 nt, Human
ggaaucaugucaggccugu

SEQ ID NO: 3720896 - RNA, 20 nt, Human
ggaaucauuguccagagcug

SEQ ID NO: 3720897 - RNA, 19 nt, Human
ggaauccacucccaggcag

SEQ ID NO: 3720898 - RNA, 17 nt, Human
ggaauccuauauagaau

SEQ ID NO: 3720899 - RNA, 14 nt, Human
ggaauccuguccuc

SEQ ID NO: 3720900 - RNA, 19 nt, Human
ggaaucgaggaaccagagc

SEQ ID NO: 3720901 - RNA, 17 nt, Human
ggaaucuagaagaaaug

SEQ ID NO: 3720902 - RNA, 21 nt, Human
ggaaucuagccagugaacaua

SEQ ID NO: 3720903 - RNA, 22 nt, Human
ggaaucuagccagugaacauaa

SEQ ID NO: 3720904 - RNA, 18 nt, Human
ggaaugaagcaaugcuuc

SEQ ID NO: 3720905 - RNA, 18 nt, Human
ggaaugaagcuuguguau

SEQ ID NO: 3720906 - RNA, 19 nt, Human
ggaaugaaugucaguguga

SEQ ID NO: 3720907 - RNA, 21 nt, Human
ggaaugagcccagagaacagc

SEQ ID NO: 3720908 - RNA, 16 nt, Human
ggaaugaggaaaauuc

SEQ ID NO: 3720909 - RNA, 15 nt, Human
ggaaugagugugcau

SEQ ID NO: 3720910 - RNA, 14 nt, Human
ggaaugauuaauua

SEQ ID NO: 3720911 - RNA, 14 nt, Human
ggaaugccugagug

SEQ ID NO: 3720912 - RNA, 18 nt, Human
ggaaugccugagugccug

SEQ ID NO: 3720913 - RNA, 23 nt, Human
ggaaugccugagugccuggccaa

SEQ ID NO: 3720914 - RNA, 22 nt, Human
ggaaugcggccgcauucccuga

SEQ ID NO: 3720915 - RNA, 13 nt, Human
ggaaugcuccccc

SEQ ID NO: 3720916 - RNA, 14 nt, Human
ggaaugcuggacug

SEQ ID NO: 3720917 - RNA, 17 nt, Human
ggaauggaggggcagag

SEQ ID NO: 3720918 - RNA, 21 nt, Human
ggaauggaggggcagagccag

SEQ ID NO: 3720919 - RNA, 22 nt, Human
ggaauggauuuuucuuuaacug

SEQ ID NO: 3720920 - RNA, 12 nt, Human
ggaauggcagca

SEQ ID NO: 3720921 - RNA, 16 nt, Human
ggaaugggggccucuu

SEQ ID NO: 3720922 - RNA, 13 nt, Human
ggaauuaaaacaa

SEQ ID NO: 3720923 - RNA, 20 nt, Human
ggaauuaaccuggugcugga

SEQ ID NO: 3720924 - RNA, 16 nt, Human
ggaauuauuuuaaaag

SEQ ID NO: 3720925 - RNA, 17 nt, Human
ggaauuauuuuaaaaga

SEQ ID NO: 3720926 - RNA, 20 nt, Human
ggaauucaucucucuuuaau

SEQ ID NO: 3720927 - RNA, 22 nt, Human
ggaauucucuuggcuggcuucc

SEQ ID NO: 3720928 - RNA, 15 nt, Human
ggaauugauuugcau

SEQ ID NO: 3720929 - RNA, 20 nt, Human
ggaauugcuuaccaaaggau

SEQ ID NO: 3720930 - RNA, 21 nt, Human
ggaauugguggcagauuuuac

SEQ ID NO: 3720931 - RNA, 15 nt, Human
ggaauuucccaggac

SEQ ID NO: 3720932 - RNA, 21 nt, Human
ggaauuugcaagucauggcug

SEQ ID NO: 3720933 - RNA, 17 nt, Human
ggaauuuguaaccucag

SEQ ID NO: 3720934 - RNA, 22 nt, Human
ggacaaaaaugaacugaaguuu

SEQ ID NO: 3720935 - RNA, 15 nt, Human
ggacaaaacccaccu

SEQ ID NO: 3720936 - RNA, 20 nt, Human
ggacaaaaccccccagauau

SEQ ID NO: 3720937 - RNA, 16 nt, Human
ggacaaaauggaauac

SEQ ID NO: 3720938 - RNA, 11 nt, Human
ggacaaacugc

SEQ ID NO: 3720939 - RNA, 22 nt, Human
ggacaaagaauuccaaagcaaa

SEQ ID NO: 3720940 - RNA, 14 nt, Human
ggacaaaggagccu

SEQ ID NO: 3720941 - RNA, 18 nt, Human
ggacaaagucuccagccc

SEQ ID NO: 3720942 - RNA, 21 nt, Human
ggacaaagucuccagcccacg

SEQ ID NO: 3720943 - RNA, 23 nt, Human
ggacaaaucaagcuucaguuucc

SEQ ID NO: 3720944 - RNA, 18 nt, Human
ggacaaaucacauauuuu

SEQ ID NO: 3720945 - RNA, 17 nt, Human
ggacaaccuuggcuugg

SEQ ID NO: 3720946 - RNA, 22 nt, Human
ggacaaccuuggcuuggcccug

SEQ ID NO: 3720947 - RNA, 16 nt, Human
ggacaacgaggaagcc

SEQ ID NO: 3720948 - RNA, 17 nt, Human
ggacaacgaggaagccc

SEQ ID NO: 3720949 - RNA, 20 nt, Human
ggacaagcagagguggccag

SEQ ID NO: 3720950 - RNA, 13 nt, Human
ggacaagcagugg

SEQ ID NO: 3720951 - RNA, 21 nt, Human
ggacaagccaacuuguaaaua

SEQ ID NO: 3720952 - RNA, 23 nt, Human
ggacaagccaacuuguaaauaca

SEQ ID NO: 3720953 - RNA, 19 nt, Human
ggacaaggacuaggguccu

SEQ ID NO: 3720954 - RNA, 22 nt, Human
ggacaaggaugaucuaggaaga

SEQ ID NO: 3720955 - RNA, 22 nt, Human
ggacaaggcuagaucaugaaga

SEQ ID NO: 3720956 - RNA, 20 nt, Human
ggacaaguggacucagggca

SEQ ID NO: 3720957 - RNA, 18 nt, Human
ggacaauacagaacccau

SEQ ID NO: 3720958 - RNA, 22 nt, Human
ggacaaucaguccccucccauc

SEQ ID NO: 3720959 - RNA, 21 nt, Human
ggacaaucaugaaauaugcau

SEQ ID NO: 3720960 - RNA, 16 nt, Human
ggacaauggaccggag

SEQ ID NO: 3720961 - RNA, 18 nt, Human
ggacacaaaacuccgccc

SEQ ID NO: 3720962 - RNA, 21 nt, Human
ggacacaaaacuccgccccca

SEQ ID NO: 3720963 - RNA, 22 nt, Human
ggacacaaaacuccgcccccag

SEQ ID NO: 3720964 - RNA, 21 nt, Human
ggacacacaaggugcaaauca

SEQ ID NO: 3720965 - RNA, 13 nt, Human
ggacacacagccu

SEQ ID NO: 3720966 - RNA, 12 nt, Human
ggacacagcucu

SEQ ID NO: 3720967 - RNA, 18 nt, Human
ggacacagcucuucucca

SEQ ID NO: 3720968 - RNA, 21 nt, Human
ggacacagcucuucuccaggc

SEQ ID NO: 3720969 - RNA, 16 nt, Human
ggacacaggccugugu

SEQ ID NO: 3720970 - RNA, 20 nt, Human
ggacaccacacccagccuca

SEQ ID NO: 3720971 - RNA, 22 nt, Human
ggacaccacacccagccucagu

SEQ ID NO: 3720972 - RNA, 13 nt, Human
ggacaccagccag

SEQ ID NO: 3720973 - RNA, 14 nt, Human
ggacaccagccagg

SEQ ID NO: 3720974 - RNA, 22 nt, Human
ggacaccagccaggcucugugc

SEQ ID NO: 3720975 - RNA, 15 nt, Human
ggacacccccucgcu

SEQ ID NO: 3720976 - RNA, 20 nt, Human
ggacaccccuuauccaggac

SEQ ID NO: 3720977 - RNA, 21 nt, Human
ggacaccccuuauccaggacu

SEQ ID NO: 3720978 - RNA, 23 nt, Human
ggacacccugugauggggcccug

SEQ ID NO: 3720979 - RNA, 12 nt, Human
ggacaccgggca

SEQ ID NO: 3720980 - RNA, 16 nt, Human
ggacaccuaggcuagg

SEQ ID NO: 3720981 - RNA, 14 nt, Human
ggacaccugcccug

SEQ ID NO: 3720982 - RNA, 23 nt, Human
ggacacgcgccccccucccagag

SEQ ID NO: 3720983 - RNA, 23 nt, Human
ggacacgcucaguggggcagagg

SEQ ID NO: 3720984 - RNA, 21 nt, Human
ggacacgggccuguccacagg

SEQ ID NO: 3720985 - RNA, 23 nt, Human
ggacacgggccuguccacaggcu

SEQ ID NO: 3720986 - RNA, 22 nt, Human
ggacacggggcaguggcaaccu

SEQ ID NO: 3720987 - RNA, 22 nt, Human
ggacacuaaccacgcuggaccu

SEQ ID NO: 3720988 - RNA, 16 nt, Human
ggacacuacacccagc

SEQ ID NO: 3720989 - RNA, 22 nt, Human
ggacacuccagggacacacagc

SEQ ID NO: 3720990 - RNA, 23 nt, Human
ggacacuccagggacacacagcc

SEQ ID NO: 3720991 - RNA, 14 nt, Human
ggacacuccagugc

SEQ ID NO: 3720992 - RNA, 21 nt, Human
ggacacuccagugccagcaau

SEQ ID NO: 3720993 - RNA, 19 nt, Human
ggacacuuaauucuguucu

SEQ ID NO: 3720994 - RNA, 15 nt, Human
ggacacuuccugccu

SEQ ID NO: 3720995 - RNA, 16 nt, Human
ggacacuuccugccua

SEQ ID NO: 3720996 - RNA, 17 nt, Human
ggacagaagcagcucuu

SEQ ID NO: 3720997 - RNA, 23 nt, Human
ggacagacucacaaccugaaccu

SEQ ID NO: 3720998 - RNA, 20 nt, Human
ggacagaggccccagccucc

SEQ ID NO: 3720999 - RNA, 14 nt, Human
ggacagaggccugc

SEQ ID NO: 3721000 - RNA, 15 nt, Human
ggacagaggccugcc

SEQ ID NO: 3721001 - RNA, 23 nt, Human
ggacagaggggacucugggcuau

SEQ ID NO: 3721002 - RNA, 16 nt, Human
ggacagaggggguggc

SEQ ID NO: 3721003 - RNA, 13 nt, Human
ggacagaucauag

SEQ ID NO: 3721004 - RNA, 23 nt, Human
ggacagaucauagauuucugauu

SEQ ID NO: 3721005 - RNA, 19 nt, Human
ggacagauccagggacuga

SEQ ID NO: 3721006 - RNA, 15 nt, Human
ggacagaugccuccu

SEQ ID NO: 3721007 - RNA, 21 nt, Human
ggacagaugccuccuuccucu

SEQ ID NO: 3721008 - RNA, 22 nt, Human
ggacagauucagucuugccuua

SEQ ID NO: 3721009 - RNA, 15 nt, Human
ggacagcaaaaccau

SEQ ID NO: 3721010 - RNA, 21 nt, Human
ggacagcaaaaccauugcuuc

SEQ ID NO: 3721011 - RNA, 21 nt, Human
ggacagcagaagggggagacc

SEQ ID NO: 3721012 - RNA, 17 nt, Human
ggacagcauggugcaug

SEQ ID NO: 3721013 - RNA, 24 nt, Human
uccuuaggguuuucucucuauuuc

SEQ ID NO: 3721014 - RNA, 22 nt, Human
uccuuagguuuuuuuccuucug

SEQ ID NO: 3721015 - RNA, 16 nt, Human
uccuuagucuucucau

SEQ ID NO: 3721016 - RNA, 17 nt, Human
uccuuagucuucucaua

SEQ ID NO: 3721017 - RNA, 18 nt, Human
uccuuagucuucucauag

SEQ ID NO: 3721018 - RNA, 14 nt, Human
uccuuaucaaagga

SEQ ID NO: 3721019 - RNA, 14 nt, Human
uccuuaucagagcu

SEQ ID NO: 3721020 - RNA, 22 nt, Human
uccuuaucagagcuaagggugg

SEQ ID NO: 3721021 - RNA, 22 nt, Human
uccuuauguauauuuaaaagaa

SEQ ID NO: 3721022 - RNA, 20 nt, Human
uccuuauuugcuucauugua

SEQ ID NO: 3721023 - RNA, 20 nt, Human
uccuucaaaauccuuccaaa

SEQ ID NO: 3721024 - RNA, 18 nt, Human
uccuucaacaauucuaaa

SEQ ID NO: 3721025 - RNA, 20 nt, Human
uccuucaaguuagcucagga

SEQ ID NO: 3721026 - RNA, 19 nt, Human
uccuucaccucacugaaaa

SEQ ID NO: 3721027 - RNA, 13 nt, Human
uccuucaccucug

SEQ ID NO: 3721028 - RNA, 18 nt, Human
uccuucaccuuugucccc

SEQ ID NO: 3721029 - RNA, 21 nt, Human
uccuucaccuuuguccccacc

SEQ ID NO: 3721030 - RNA, 22 nt, Human
uccuucaccuuuguccccaccg

SEQ ID NO: 3721031 - RNA, 12 nt, Human
uccuucagacac

SEQ ID NO: 3721032 - RNA, 23 nt, Human
uccuucagacacccucaaccucu

SEQ ID NO: 3721033 - RNA, 13 nt, Human
uccuucagagagc

SEQ ID NO: 3721034 - RNA, 22 nt, Human
uccuucagagagcagugcuuuu

SEQ ID NO: 3721035 - RNA, 14 nt, Human
uccuucagauuugg

SEQ ID NO: 3721036 - RNA, 21 nt, Human
uccuucagcccucaccccugg

SEQ ID NO: 3721037 - RNA, 18 nt, Human
uccuucagcuuccauuuc

SEQ ID NO: 3721038 - RNA, 23 nt, Human
uccuucagggugaugccagguuc

SEQ ID NO: 3721039 - RNA, 20 nt, Human
uccuucagugccuuauggaa

SEQ ID NO: 3721040 - RNA, 11 nt, Human
uccuucauuuc

SEQ ID NO: 3721041 - RNA, 15 nt, Human
uccuucauuuccucc

SEQ ID NO: 3721042 - RNA, 18 nt, Human
uccuuccaaaaauuauua

SEQ ID NO: 3721043 - RNA, 15 nt, Human
uccuuccaaagaauu

SEQ ID NO: 3721044 - RNA, 21 nt, Human
uccuuccaacaggagcuggga

SEQ ID NO: 3721045 - RNA, 18 nt, Human
uccuuccaacugcugccc

SEQ ID NO: 3721046 - RNA, 18 nt, Human
uccuuccaaugucuggag

SEQ ID NO: 3721047 - RNA, 16 nt, Human
uccuuccacggacuca

SEQ ID NO: 3721048 - RNA, 13 nt, Human
uccuuccaggccc

SEQ ID NO: 3721049 - RNA, 16 nt, Human
uccuuccaucccuacc

SEQ ID NO: 3721050 - RNA, 14 nt, Human
uccuuccauuccac

SEQ ID NO: 3721051 - RNA, 10 nt, Human
uccuucccaa

SEQ ID NO: 3721052 - RNA, 22 nt, Human
uccuucccagaggggccugcca

SEQ ID NO: 3721053 - RNA, 13 nt, Human
uccuucccagcug

SEQ ID NO: 3721054 - RNA, 14 nt, Human
uccuucccagcugc

SEQ ID NO: 3721055 - RNA, 14 nt, Human
uccuucccuggcuu

SEQ ID NO: 3721056 - RNA, 15 nt, Human
uccuucccuggcuug

SEQ ID NO: 3721057 - RNA, 20 nt, Human
uccuucccugggcugugcua

SEQ ID NO: 3721058 - RNA, 17 nt, Human
uccuucccuugcuacca

SEQ ID NO: 3721059 - RNA, 16 nt, Human
uccuucccuuuucugu

SEQ ID NO: 3721060 - RNA, 23 nt, Human
uccuuccgcuuggagcuauuuuc

SEQ ID NO: 3721061 - RNA, 22 nt, Human
uccuuccuacacccuuggacuu

SEQ ID NO: 3721062 - RNA, 16 nt, Human
uccuuccucugagccu

SEQ ID NO: 3721063 - RNA, 12 nt, Human
uccuuccugccc

SEQ ID NO: 3721064 - RNA, 14 nt, Human
uccuuccugcccca

SEQ ID NO: 3721065 - RNA, 20 nt, Human
uccuuccuggagcccagagg

SEQ ID NO: 3721066 - RNA, 13 nt, Human
uccuuccuggccu

SEQ ID NO: 3721067 - RNA, 14 nt, Human
uccuuccuggccug

SEQ ID NO: 3721068 - RNA, 19 nt, Human
uccuuccugucuuccugca

SEQ ID NO: 3721069 - RNA, 21 nt, Human
uccuuccuguuagugguugug

SEQ ID NO: 3721070 - RNA, 19 nt, Human
uccuuccuguucugaacug

SEQ ID NO: 3721071 - RNA, 14 nt, Human
uccuuccuucccac

SEQ ID NO: 3721072 - RNA, 14 nt, Human
uccuuccuucccug

SEQ ID NO: 3721073 - RNA, 23 nt, Human
uccuuccuuguuacccaugaaaa

SEQ ID NO: 3721074 - RNA, 23 nt, Human
uccuucgugaacauccccuccca

SEQ ID NO: 3721075 - RNA, 17 nt, Human
uccuucuaguuucccac

SEQ ID NO: 3721076 - RNA, 21 nt, Human
uccuucucugaacacaggcag

SEQ ID NO: 3721077 - RNA, 23 nt, Human
uccuucucugaacacaggcagcu

SEQ ID NO: 3721078 - RNA, 15 nt, Human
uccuucugaaguguu

SEQ ID NO: 3721079 - RNA, 17 nt, Human
uccuucugaccacagca

SEQ ID NO: 3721080 - RNA, 12 nt, Human
uccuucugccuu

SEQ ID NO: 3721081 - RNA, 20 nt, Human
uccuucuggcagauucaaau

SEQ ID NO: 3721082 - RNA, 20 nt, Human
uccuucugugaaaguacauu

SEQ ID NO: 3721083 - RNA, 16 nt, Human
uccuucuuguaguagu

SEQ ID NO: 3721084 - RNA, 22 nt, Human
uccuucuuugauaauguuaaau

SEQ ID NO: 3721085 - RNA, 21 nt, Human
uccuucuuugggauagagaau

SEQ ID NO: 3721086 - RNA, 19 nt, Human
uccuugaagaacugcaggc

SEQ ID NO: 3721087 - RNA, 23 nt, Human
uccuugaagaacugcaggcccug

SEQ ID NO: 3721088 - RNA, 17 nt, Human
uccuugaagguauaucu

SEQ ID NO: 3721089 - RNA, 22 nt, Human
uccuugaccuuccucuggggcu

SEQ ID NO: 3721090 - RNA, 20 nt, Human
uccuugagagaccaggcaaa

SEQ ID NO: 3721091 - RNA, 15 nt, Human
uccuugauaacagcu

SEQ ID NO: 3721092 - RNA, 22 nt, Human
uccuugcacacuccccugcacu

SEQ ID NO: 3721093 - RNA, 17 nt, Human
uccuugcaccugcaucc

SEQ ID NO: 3721094 - RNA, 23 nt, Human
uccuugcacgcgcccuuucuacc

SEQ ID NO: 3721095 - RNA, 15 nt, Human
uccuugcaucaauuu

SEQ ID NO: 3721096 - RNA, 18 nt, Human
uccuugccuccuguguaa

SEQ ID NO: 3721097 - RNA, 20 nt, Human
uccuugcucucccucuucuc

SEQ ID NO: 3721098 - RNA, 21 nt, Human
uccuugcucucccucuucuca

SEQ ID NO: 3721099 - RNA, 23 nt, Human
uccuugcugaaacgcaucuaguu

SEQ ID NO: 3721100 - RNA, 22 nt, Human
uccuugcuuaugacaucacuug

SEQ ID NO: 3721101 - RNA, 13 nt, Human
uccuugcuuggcu

SEQ ID NO: 3721102 - RNA, 12 nt, Human
uccuuggaaauc

SEQ ID NO: 3721103 - RNA, 23 nt, Human
uccuuggaaaucaaauguaaagu

SEQ ID NO: 3721104 - RNA, 18 nt, Human
uccuuggagaaaugaaaa

SEQ ID NO: 3721105 - RNA, 14 nt, Human
uccuuggcaccaaa

SEQ ID NO: 3721106 - RNA, 20 nt, Human
uccuuggcaucacagggcag

SEQ ID NO: 3721107 - RNA, 15 nt, Human
uccuuggcaugccuu

SEQ ID NO: 3721108 - RNA, 17 nt, Human
uccuuggcaugccuucc

SEQ ID NO: 3721109 - RNA, 20 nt, Human
uccuuggcccccuuucccgg

SEQ ID NO: 3721110 - RNA, 13 nt, Human
uccuuggccuagc

SEQ ID NO: 3721111 - RNA, 20 nt, Human
uccuuggcuuuaugcacauu

SEQ ID NO: 3721112 - RNA, 23 nt, Human
uccuugggaggaagcagaauaaa

SEQ ID NO: 3721113 - RNA, 22 nt, Human
uccuugggaggccccacugggg

SEQ ID NO: 3721114 - RNA, 13 nt, Human
uccuugggcccuu

SEQ ID NO: 3721115 - RNA, 17 nt, Human
uccuuggggcaggcagu

SEQ ID NO: 3721116 - RNA, 19 nt, Human
uccuugguccuaguaagaa

SEQ ID NO: 3721117 - RNA, 17 nt, Human
uccuuggucuuuguauc

SEQ ID NO: 3721118 - RNA, 16 nt, Human
uccuugguuauauuuu

SEQ ID NO: 3721119 - RNA, 21 nt, Human
uccuugguuauauuuuuuuaa

SEQ ID NO: 3721120 - RNA, 20 nt, Human
uccuuguagcgacuaaacua

SEQ ID NO: 3721121 - RNA, 20 nt, Human
uccuuguccccacacuccua

SEQ ID NO: 3721122 - RNA, 12 nt, Human
uccuugugcaaa

SEQ ID NO: 3721123 - RNA, 15 nt, Human
uccuugugccagaga

SEQ ID NO: 3721124 - RNA, 19 nt, Human
uccuugugguuuaugucau

SEQ ID NO: 3721125 - RNA, 14 nt, Human
uccuuguguuacua

SEQ ID NO: 3721126 - RNA, 19 nt, Human
uccuuguuacccaugaaaa

SEQ ID NO: 3721127 - RNA, 21 nt, Human
uccuuguuguuucuugccuga

SEQ ID NO: 3721128 - RNA, 23 nt, Human
uccuuguuuaucagauacaucac

SEQ ID NO: 3721129 - RNA, 22 nt, Human
uccuuguuucaaacacaaaugc

SEQ ID NO: 3721130 - RNA, 21 nt, Human
uccuuuaaaaaaauuuaagug

SEQ ID NO: 3721131 - RNA, 18 nt, Human
uccuuuaaaaaagaaaag

SEQ ID NO: 3721132 - RNA, 15 nt, Human
uccuuuaauaugaaa

SEQ ID NO: 3721133 - RNA, 21 nt, Human
uccuuuaauuaagacugaaaa

SEQ ID NO: 3721134 - RNA, 21 nt, Human
uccuuuacaaaagaaauaccu

SEQ ID NO: 3721135 - RNA, 22 nt, Human
uccuuuacaaaagaaauaccuu

SEQ ID NO: 3721136 - RNA, 22 nt, Human
uccuuuacacauucggcucccu

SEQ ID NO: 3721137 - RNA, 12 nt, Human
uccuuuagaaac

SEQ ID NO: 3721138 - RNA, 20 nt, Human
uccuuuagauagcagccugg

SEQ ID NO: 3721139 - RNA, 19 nt, Human
uccuuuagcgcccaguugg

SEQ ID NO: 3721140 - RNA, 22 nt, Human
uccuuuagcgcccaguugggug

SEQ ID NO: 3721141 - RNA, 16 nt, Human
uccuuuagguaagaag

SEQ ID NO: 3721142 - RNA, 17 nt, Human
uccuuuaugugaauuuu

SEQ ID NO: 3721143 - RNA, 23 nt, Human
uccuuuaugugaauuuuuaagcu

SEQ ID NO: 3721144 - RNA, 19 nt, Human
uccuuucaaugguuugcaa

SEQ ID NO: 3721145 - RNA, 15 nt, Human
uccuuucaccacaug

SEQ ID NO: 3721146 - RNA, 17 nt, Human
uccuuucaccccagggc

SEQ ID NO: 3721147 - RNA, 18 nt, Human
uccuuucaccccagggcc

SEQ ID NO: 3721148 - RNA, 19 nt, Human
uccuuucaccccagggccu

SEQ ID NO: 3721149 - RNA, 21 nt, Human
uccuuucaccccagggccuga

SEQ ID NO: 3721150 - RNA, 18 nt, Human
uccuuucacuucuuuccc

SEQ ID NO: 3721151 - RNA, 17 nt, Human
uccuuuccaaggcuucu

SEQ ID NO: 3721152 - RNA, 22 nt, Human
uccuuuccaguggccuggcucc

SEQ ID NO: 3721153 - RNA, 16 nt, Human
uccuuucccaagccuu

SEQ ID NO: 3721154 - RNA, 16 nt, Human
uccuuuccccuuccuu

SEQ ID NO: 3721155 - RNA, 14 nt, Human
uccuuucccuccac

SEQ ID NO: 3721156 - RNA, 13 nt, Human
uccuuucccuucc

SEQ ID NO: 3721157 - RNA, 15 nt, Human
uccuuucccuuccuc

SEQ ID NO: 3721158 - RNA, 16 nt, Human
uccuuucccuuccucu

SEQ ID NO: 3721159 - RNA, 15 nt, Human
uccuuucuaaacaag

SEQ ID NO: 3721160 - RNA, 19 nt, Human
uccuuucuagagcacugcc

SEQ ID NO: 3721161 - RNA, 18 nt, Human
uccccucacagccucuga

SEQ ID NO: 3721162 - RNA, 21 nt, Human
uccccucacagccucugaccc

SEQ ID NO: 3721163 - RNA, 16 nt, Human
uccccucaggacugca

SEQ ID NO: 3721164 - RNA, 12 nt, Human
uccccuccaacc

SEQ ID NO: 3721165 - RNA, 15 nt, Human
uccccuccacuguca

SEQ ID NO: 3721166 - RNA, 12 nt, Human
uccccuccagcc

SEQ ID NO: 3721167 - RNA, 13 nt, Human
uccccuccagccu

SEQ ID NO: 3721168 - RNA, 14 nt, Human
uccccuccaucccu

SEQ ID NO: 3721169 - RNA, 20 nt, Human
uccccuccaucccuggcccc

SEQ ID NO: 3721170 - RNA, 15 nt, Human
uccccucccaucugg

SEQ ID NO: 3721171 - RNA, 13 nt, Human
uccccuccccugc

SEQ ID NO: 3721172 - RNA, 14 nt, Human
uccccuccccugcu

SEQ ID NO: 3721173 - RNA, 15 nt, Human
uccccuccccugcug

SEQ ID NO: 3721174 - RNA, 14 nt, Human
uccccucccuccuc

SEQ ID NO: 3721175 - RNA, 13 nt, Human
uccccucccuggg

SEQ ID NO: 3721176 - RNA, 17 nt, Human
uccccuccggacuggug

SEQ ID NO: 3721177 - RNA, 14 nt, Human
uccccuccuacccc

SEQ ID NO: 3721178 - RNA, 19 nt, Human
uccccuccuaccccuccca

SEQ ID NO: 3721179 - RNA, 18 nt, Human
uccccuccucuccccuac

SEQ ID NO: 3721180 - RNA, 12 nt, Human
uccccuccucug

SEQ ID NO: 3721181 - RNA, 18 nt, Human
uccccuccucugcuugcc

SEQ ID NO: 3721182 - RNA, 22 nt, Human
uccccuccuugccuccugugua

SEQ ID NO: 3721183 - RNA, 23 nt, Human
uccccuccuugccuccuguguaa

SEQ ID NO: 3721184 - RNA, 14 nt, Human
uccccuccuugggc

SEQ ID NO: 3721185 - RNA, 15 nt, Human
uccccucucccuucc

SEQ ID NO: 3721186 - RNA, 14 nt, Human
uccccucuccucca

SEQ ID NO: 3721187 - RNA, 15 nt, Human
uccccucuccuuccu

SEQ ID NO: 3721188 - RNA, 17 nt, Human
uccccucucuugcaccc

SEQ ID NO: 3721189 - RNA, 19 nt, Human
uccccucucuugcacccgc

SEQ ID NO: 3721190 - RNA, 20 nt, Human
uccccucucuugcacccgcc

SEQ ID NO: 3721191 - RNA, 22 nt, Human
uccccucugaaaguuguacaug

SEQ ID NO: 3721192 - RNA, 13 nt, Human
uccccucugcugc

SEQ ID NO: 3721193 - RNA, 14 nt, Human
uccccucugcugcu

SEQ ID NO: 3721194 - RNA, 17 nt, Human
uccccucugcugcuguc

SEQ ID NO: 3721195 - RNA, 20 nt, Human
uccccucugcugcugucccu

SEQ ID NO: 3721196 - RNA, 13 nt, Human
uccccucuuccuc

SEQ ID NO: 3721197 - RNA, 15 nt, Human
uccccucuugcccca

SEQ ID NO: 3721198 - RNA, 13 nt, Human
uccccugcacugu

SEQ ID NO: 3721199 - RNA, 14 nt, Human
uccccugcacugua

SEQ ID NO: 3721200 - RNA, 15 nt, Human
uccccugcacuguaa

SEQ ID NO: 3721201 - RNA, 16 nt, Human
uccccugcacuguaaa

SEQ ID NO: 3721202 - RNA, 14 nt, Human
uccccugccagggc

SEQ ID NO: 3721203 - RNA, 14 nt, Human
uccccugcccaugc

SEQ ID NO: 3721204 - RNA, 15 nt, Human
uccccugcccaugcu

SEQ ID NO: 3721205 - RNA, 13 nt, Human
uccccugccccca

SEQ ID NO: 3721206 - RNA, 15 nt, Human
uccccugcccccagg

SEQ ID NO: 3721207 - RNA, 16 nt, Human
uccccugcccccagga

SEQ ID NO: 3721208 - RNA, 22 nt, Human
uccccugcccccaggacugggc

SEQ ID NO: 3721209 - RNA, 15 nt, Human
uccccugcccugcug

SEQ ID NO: 3721210 - RNA, 17 nt, Human
uccccugcccuggucca

SEQ ID NO: 3721211 - RNA, 12 nt, Human
uccccugccuug

SEQ ID NO: 3721212 - RNA, 14 nt, Human
uccccugcuacccu

SEQ ID NO: 3721213 - RNA, 15 nt, Human
uccccugcugcaggg

SEQ ID NO: 3721214 - RNA, 21 nt, Human
uccccugcugcaggggcucug

SEQ ID NO: 3721215 - RNA, 13 nt, Human
uccccugcuggcc

SEQ ID NO: 3721216 - RNA, 20 nt, Human
uccccugcuggguguggcgc

SEQ ID NO: 3721217 - RNA, 24 nt, Human
uccccugcuggguguggcgcagca

SEQ ID NO: 3721218 - RNA, 18 nt, Human
uccccuggaacugucucu

SEQ ID NO: 3721219 - RNA, 17 nt, Human
uccccuggaagcagugc

SEQ ID NO: 3721220 - RNA, 22 nt, Human
uccccuggaagcagugcccagg

SEQ ID NO: 3721221 - RNA, 15 nt, Human
uccccuggacuggga

SEQ ID NO: 3721222 - RNA, 23 nt, Human
uccccuguccccgcacugggcuu

SEQ ID NO: 3721223 - RNA, 17 nt, Human
uccccugugccagccca

SEQ ID NO: 3721224 - RNA, 19 nt, Human
uccccugugccagcccaga

SEQ ID NO: 3721225 - RNA, 13 nt, Human
uccccuuauccuc

SEQ ID NO: 3721226 - RNA, 18 nt, Human
uccccuuauccucccugu

SEQ ID NO: 3721227 - RNA, 23 nt, Human
uccccuuauccucccuguaacuu

SEQ ID NO: 3721228 - RNA, 16 nt, Human
uccccuuccccuuccu

SEQ ID NO: 3721229 - RNA, 22 nt, Human
uccccuuccuaauuccacagcu

SEQ ID NO: 3721230 - RNA, 19 nt, Human
uccccuuccuaccacccgg

SEQ ID NO: 3721231 - RNA, 19 nt, Human
uccccuucgcguauuucag

SEQ ID NO: 3721232 - RNA, 15 nt, Human
uccccuucucaucac

SEQ ID NO: 3721233 - RNA, 14 nt, Human
uccccuucucugua

SEQ ID NO: 3721234 - RNA, 17 nt, Human
uccccuugaggucucag

SEQ ID NO: 3721235 - RNA, 18 nt, Human
uccccuugaggucucagc

SEQ ID NO: 3721236 - RNA, 20 nt, Human
uccccuugaggucucagccc

SEQ ID NO: 3721237 - RNA, 13 nt, Human
uccccuugcccag

SEQ ID NO: 3721238 - RNA, 16 nt, Human
uccccuugcccagggc

SEQ ID NO: 3721239 - RNA, 22 nt, Human
uccccuugcccagggcucagcc

SEQ ID NO: 3721240 - RNA, 21 nt, Human
uccccuugcccuugcccugac

SEQ ID NO: 3721241 - RNA, 16 nt, Human
uccccuugccugugcc

SEQ ID NO: 3721242 - RNA, 23 nt, Human
uccccuuggcagguccuggccag

SEQ ID NO: 3721243 - RNA, 16 nt, Human
uccccuugggcccaca

SEQ ID NO: 3721244 - RNA, 14 nt, Human
uccccuugggcggc

SEQ ID NO: 3721245 - RNA, 22 nt, Human
uccccuugggcggcugagagcc

SEQ ID NO: 3721246 - RNA, 14 nt, Human
uccccuuuccuguc

SEQ ID NO: 3721247 - RNA, 19 nt, Human
uccccuuucgcccacaguc

SEQ ID NO: 3721248 - RNA, 21 nt, Human
uccccuuuguauuccuuaaau

SEQ ID NO: 3721249 - RNA, 17 nt, Human
uccccuuuuauugcugc

SEQ ID NO: 3721250 - RNA, 15 nt, Human
ucccgaauagcuggg

SEQ ID NO: 3721251 - RNA, 16 nt, Human
ucccgaauagcuggga

SEQ ID NO: 3721252 - RNA, 18 nt, Human
ucccgaauagcugggacu

SEQ ID NO: 3721253 - RNA, 19 nt, Human
ucccgagacggcacugaga

SEQ ID NO: 3721254 - RNA, 19 nt, Human
ucccgagcaaagucuaaag

SEQ ID NO: 3721255 - RNA, 20 nt, Human
ucccgaguagcugagauuau

SEQ ID NO: 3721256 - RNA, 19 nt, Human
ucccgcagugggagcaaac

SEQ ID NO: 3721257 - RNA, 20 nt, Human
ucccgcagugggagcaaacu

SEQ ID NO: 3721258 - RNA, 23 nt, Human
ucccgccccccacacuucccugg

SEQ ID NO: 3721259 - RNA, 23 nt, Human
ucccgcggguuccgcaggcagac

SEQ ID NO: 3721260 - RNA, 13 nt, Human
ucccgcugcugcu

SEQ ID NO: 3721261 - RNA, 18 nt, Human
ucccggagguuggguggg

SEQ ID NO: 3721262 - RNA, 14 nt, Human
ucccggcccugccu

SEQ ID NO: 3721263 - RNA, 22 nt, Human
ucccggcugcccuuucugggca

SEQ ID NO: 3721264 - RNA, 21 nt, Human
ucccgggacaccuaggcuagg

SEQ ID NO: 3721265 - RNA, 15 nt, Human
ucccgggacgcagca

SEQ ID NO: 3721266 - RNA, 22 nt, Human
ucccgggacucacuggcagccc

SEQ ID NO: 3721267 - RNA, 16 nt, Human
ucccgggccagggcug

SEQ ID NO: 3721268 - RNA, 21 nt, Human
ucccgggccagggcugccccu

SEQ ID NO: 3721269 - RNA, 15 nt, Human
ucccgggcuguccac

SEQ ID NO: 3721270 - RNA, 14 nt, Human
ucccggggcagggc

SEQ ID NO: 3721271 - RNA, 16 nt, Human
ucccggggcagggcag

SEQ ID NO: 3721272 - RNA, 21 nt, Human
ucccggggcagggcagccguc

SEQ ID NO: 3721273 - RNA, 19 nt, Human
ucccgggguccuguggcag

SEQ ID NO: 3721274 - RNA, 19 nt, Human
ucccggguccuuggccccc

SEQ ID NO: 3721275 - RNA, 14 nt, Human
ucccggucccgagu

SEQ ID NO: 3721276 - RNA, 20 nt, Human
ucccgucaccccuguuucug

SEQ ID NO: 3721277 - RNA, 20 nt, Human
ucccgucccauauccugccu

SEQ ID NO: 3721278 - RNA, 21 nt, Human
ucccgucccauauccugccuc

SEQ ID NO: 3721279 - RNA, 13 nt, Human
ucccgugcagcuu

SEQ ID NO: 3721280 - RNA, 23 nt, Human
ucccguggaacguuuuuccuguu

SEQ ID NO: 3721281 - RNA, 16 nt, Human
ucccguggccccagcc

SEQ ID NO: 3721282 - RNA, 20 nt, Human
ucccguggccccagccuggc

SEQ ID NO: 3721283 - RNA, 17 nt, Human
ucccguuuuccccauga

SEQ ID NO: 3721284 - RNA, 15 nt, Human
ucccuaacacuuacc

SEQ ID NO: 3721285 - RNA, 11 nt, Human
ucccuaagcca

SEQ ID NO: 3721286 - RNA, 15 nt, Human
ucccuaagccaaggg

SEQ ID NO: 3721287 - RNA, 22 nt, Human
ucccuaaggcaugugugaaaca

SEQ ID NO: 3721288 - RNA, 15 nt, Human
ucccuaauaaagcug

SEQ ID NO: 3721289 - RNA, 14 nt, Human
ucccuaaugcugca

SEQ ID NO: 3721290 - RNA, 18 nt, Human
ucccuaccaccuccccag

SEQ ID NO: 3721291 - RNA, 19 nt, Human
ucccuaccgagucucuucu

SEQ ID NO: 3721292 - RNA, 16 nt, Human
ucccuaccucaaccug

SEQ ID NO: 3721293 - RNA, 13 nt, Human
ucccuaccucagg

SEQ ID NO: 3721294 - RNA, 15 nt, Human
ucccuacugaagccc

SEQ ID NO: 3721295 - RNA, 12 nt, Human
ucccuagacuuu

SEQ ID NO: 3721296 - RNA, 19 nt, Human
ucccuagaggguuccugua

SEQ ID NO: 3721297 - RNA, 20 nt, Human
ucccuagaggguuccuguag

SEQ ID NO: 3721298 - RNA, 23 nt, Human
ucccuagaucuuucuauuccaaa

SEQ ID NO: 3721299 - RNA, 15 nt, Human
ucccuagcagcccac

SEQ ID NO: 3721300 - RNA, 17 nt, Human
ucccuagccagcacuug

SEQ ID NO: 3721301 - RNA, 18 nt, Human
ucccuagcugugaccucu

SEQ ID NO: 3721302 - RNA, 19 nt, Human
ucccuagcuuuagacccug

SEQ ID NO: 3721303 - RNA, 15 nt, Human
ucccuaggagaccaa

SEQ ID NO: 3721304 - RNA, 21 nt, Human
ucccuagggcuggcagaaagg

SEQ ID NO: 3721305 - RNA, 22 nt, Human
ucccuagucuauucauuauauu

SEQ ID NO: 3721306 - RNA, 16 nt, Human
ucccuauaaugcugga

SEQ ID NO: 3721307 - RNA, 14 nt, Human
ucccuauggaaaga

SEQ ID NO: 3721308 - RNA, 13 nt, Human
ucccuauguauuu

SEQ ID NO: 3721309 - RNA, 15 nt, Human
ucccuauguauuugc

SEQ ID NO: 3721310 - RNA, 19 nt, Human
ucccucaaaugacccaaag

SEQ ID NO: 3721311 - RNA, 20 nt, Human
ucccucaaaugacccaaaga

SEQ ID NO: 3721312 - RNA, 17 nt, Human
ggacagccccacccugg

SEQ ID NO: 3721313 - RNA, 23 nt, Human
ggacagccuguggcggugccugg

SEQ ID NO: 3721314 - RNA, 17 nt, Human
ggacagcuccuucuguc

SEQ ID NO: 3721315 - RNA, 13 nt, Human
ggacagcuguccu

SEQ ID NO: 3721316 - RNA, 14 nt, Human
ggacagcugugccu

SEQ ID NO: 3721317 - RNA, 22 nt, Human
ggacagcuuguggcaagugaau

SEQ ID NO: 3721318 - RNA, 20 nt, Human
ggacaggaugaccuggauaa

SEQ ID NO: 3721319 - RNA, 17 nt, Human
ggacaggauguguuugc

SEQ ID NO: 3721320 - RNA, 18 nt, Human
ggacaggauguguuugcu

SEQ ID NO: 3721321 - RNA, 13 nt, Human
ggacaggcagaaa

SEQ ID NO: 3721322 - RNA, 15 nt, Human
ggacaggcagaaaga

SEQ ID NO: 3721323 - RNA, 13 nt, Human
ggacaggcaggug

SEQ ID NO: 3721324 - RNA, 23 nt, Human
ggacaggcauguucucugaggac

SEQ ID NO: 3721325 - RNA, 22 nt, Human
ggacaggcccggcgcgguggcu

SEQ ID NO: 3721326 - RNA, 11 nt, Human
ggacaggccuc

SEQ ID NO: 3721327 - RNA, 19 nt, Human
ggacaggcugcggccccuc

SEQ ID NO: 3721328 - RNA, 23 nt, Human
ggacaggcuggcuccagaugcag

SEQ ID NO: 3721329 - RNA, 17 nt, Human
ggacagggaggugaccc

SEQ ID NO: 3721330 - RNA, 22 nt, Human
ggacagggaugagcauggagcu

SEQ ID NO: 3721331 - RNA, 15 nt, Human
ggacagggcauggcc

SEQ ID NO: 3721332 - RNA, 21 nt, Human
ggacagggcuggcccagcccu

SEQ ID NO: 3721333 - RNA, 17 nt, Human
ggacaggggcaggagga

SEQ ID NO: 3721334 - RNA, 13 nt, Human
ggacaggugccag

SEQ ID NO: 3721335 - RNA, 15 nt, Human
ggacaguccugggag

SEQ ID NO: 3721336 - RNA, 19 nt, Human
ggacaguccugggagaacc

SEQ ID NO: 3721337 - RNA, 16 nt, Human
ggacagugcugcagcu

SEQ ID NO: 3721338 - RNA, 20 nt, Human
ggacagugcuucagccugag

SEQ ID NO: 3721339 - RNA, 23 nt, Human
ggacagugcuucagccugaggcu

SEQ ID NO: 3721340 - RNA, 17 nt, Human
ggacaguggcaggacag

SEQ ID NO: 3721341 - RNA, 22 nt, Human
ggacaguuccagaagugugacu

SEQ ID NO: 3721342 - RNA, 20 nt, Human
ggacaguuuaccaguugccu

SEQ ID NO: 3721343 - RNA, 19 nt, Human
ggacaguuuaucaugaagc

SEQ ID NO: 3721344 - RNA, 20 nt, Human
ggacaguuuaucaugaagcc

SEQ ID NO: 3721345 - RNA, 21 nt, Human
ggacaguuuaucaugaagccu

SEQ ID NO: 3721346 - RNA, 19 nt, Human
ggacauaaugggguccugg

SEQ ID NO: 3721347 - RNA, 15 nt, Human
ggacauagagaggga

SEQ ID NO: 3721348 - RNA, 20 nt, Human
ggacauagagagggagaaga

SEQ ID NO: 3721349 - RNA, 23 nt, Human
ggacauagagguauauuggaaga

SEQ ID NO: 3721350 - RNA, 18 nt, Human
ggacauagcgaauacaaa

SEQ ID NO: 3721351 - RNA, 19 nt, Human
ggacauauauuuuuuaaaa

SEQ ID NO: 3721352 - RNA, 14 nt, Human
ggacaucagcaaac

SEQ ID NO: 3721353 - RNA, 14 nt, Human
ggacauccccugcu

SEQ ID NO: 3721354 - RNA, 20 nt, Human
ggacauccccugcuggccgg

SEQ ID NO: 3721355 - RNA, 13 nt, Human
ggacauccuccuc

SEQ ID NO: 3721356 - RNA, 18 nt, Human
ggacauccuguauaagca

SEQ ID NO: 3721357 - RNA, 18 nt, Human
ggacaugcaauaaaauuu

SEQ ID NO: 3721358 - RNA, 22 nt, Human
ggacaugcaauaaaauuuaaaa

SEQ ID NO: 3721359 - RNA, 16 nt, Human
ggacaugcgguagcca

SEQ ID NO: 3721360 - RNA, 13 nt, Human
ggacaugcuuagc

SEQ ID NO: 3721361 - RNA, 21 nt, Human
ggacaugggucgcccaugaga

SEQ ID NO: 3721362 - RNA, 16 nt, Human
ggacauguucccuucu

SEQ ID NO: 3721363 - RNA, 17 nt, Human
ggacauguuuugauaaa

SEQ ID NO: 3721364 - RNA, 21 nt, Human
ggacauguuuuuguuuucuuu

SEQ ID NO: 3721365 - RNA, 17 nt, Human
ggacauuccaagacagu

SEQ ID NO: 3721366 - RNA, 12 nt, Human
ggacauucuugu

SEQ ID NO: 3721367 - RNA, 23 nt, Human
ggacauuuauuaguaucuuccau

SEQ ID NO: 3721368 - RNA, 16 nt, Human
ggaccaaaaaaauaag

SEQ ID NO: 3721369 - RNA, 16 nt, Human
ggaccaacccugggga

SEQ ID NO: 3721370 - RNA, 17 nt, Human
ggaccaacccuggggaa

SEQ ID NO: 3721371 - RNA, 17 nt, Human
ggaccaacccuguuucc

SEQ ID NO: 3721372 - RNA, 22 nt, Human
ggaccacaaaaaugaaagcaug

SEQ ID NO: 3721373 - RNA, 18 nt, Human
ggaccacaggugcccgcc

SEQ ID NO: 3721374 - RNA, 13 nt, Human
ggaccacauuuua

SEQ ID NO: 3721375 - RNA, 15 nt, Human
ggaccacccugagcc

SEQ ID NO: 3721376 - RNA, 13 nt, Human
ggaccacucagcc

SEQ ID NO: 3721377 - RNA, 17 nt, Human
ggaccacucagccccua

SEQ ID NO: 3721378 - RNA, 21 nt, Human
ggaccacugcaugagcuuuua

SEQ ID NO: 3721379 - RNA, 21 nt, Human
ggaccacuguuucuugcuugu

SEQ ID NO: 3721380 - RNA, 19 nt, Human
ggaccagaagccaaagacu

SEQ ID NO: 3721381 - RNA, 12 nt, Human
ggaccagaugcu

SEQ ID NO: 3721382 - RNA, 12 nt, Human
ggaccagcccac

SEQ ID NO: 3721383 - RNA, 15 nt, Human
ggaccagcccacgcu

SEQ ID NO: 3721384 - RNA, 17 nt, Human
ggaccagccuguuggac

SEQ ID NO: 3721385 - RNA, 13 nt, Human
ggaccagcucagg

SEQ ID NO: 3721386 - RNA, 16 nt, Human
ggaccagcucaggaca

SEQ ID NO: 3721387 - RNA, 22 nt, Human
ggaccagcucaggacagaugcc

SEQ ID NO: 3721388 - RNA, 11 nt, Human
ggaccaggacu

SEQ ID NO: 3721389 - RNA, 21 nt, Human
ggaccaggacuauagcccagg

SEQ ID NO: 3721390 - RNA, 21 nt, Human
ggaccaggaguggguggggag

SEQ ID NO: 3721391 - RNA, 23 nt, Human
ggaccaggaguggguggggagug

SEQ ID NO: 3721392 - RNA, 13 nt, Human
ggaccaggcaaug

SEQ ID NO: 3721393 - RNA, 23 nt, Human
ggaccaggcaaugugacuuugca

SEQ ID NO: 3721394 - RNA, 19 nt, Human
ggaccagucaaccugggca

SEQ ID NO: 3721395 - RNA, 23 nt, Human
ggaccaugcgacacugggaggcc

SEQ ID NO: 3721396 - RNA, 16 nt, Human
ggaccaugcugucugg

SEQ ID NO: 3721397 - RNA, 20 nt, Human
ggaccaugcugucuggcaca

SEQ ID NO: 3721398 - RNA, 22 nt, Human
ggaccaugugucacuugugcuu

SEQ ID NO: 3721399 - RNA, 14 nt, Human
ggaccauuuuccug

SEQ ID NO: 3721400 - RNA, 19 nt, Human
ggacccaaggaaaacugca

SEQ ID NO: 3721401 - RNA, 14 nt, Human
ggacccagacccag

SEQ ID NO: 3721402 - RNA, 16 nt, Human
ggacccagacccagug

SEQ ID NO: 3721403 - RNA, 23 nt, Human
ggacccagccgccaucagcccaa

SEQ ID NO: 3721404 - RNA, 13 nt, Human
ggacccaggacag

SEQ ID NO: 3721405 - RNA, 12 nt, Human
ggacccaggcuc

SEQ ID NO: 3721406 - RNA, 16 nt, Human
ggacccagggaacagc

SEQ ID NO: 3721407 - RNA, 22 nt, Human
ggacccagggaacagccacucc

SEQ ID NO: 3721408 - RNA, 11 nt, Human
ggacccagugc

SEQ ID NO: 3721409 - RNA, 14 nt, Human
ggacccaguggcag

SEQ ID NO: 3721410 - RNA, 21 nt, Human
ggaccccagcaagugguccua

SEQ ID NO: 3721411 - RNA, 15 nt, Human
ggaccccagccucaa

SEQ ID NO: 3721412 - RNA, 13 nt, Human
ggaccccagcugg

SEQ ID NO: 3721413 - RNA, 14 nt, Human
ggaccccagcuggg

SEQ ID NO: 3721414 - RNA, 18 nt, Human
ggaccccagcugggaggc

SEQ ID NO: 3721415 - RNA, 20 nt, Human
ggaccccagcugggaggcaa

SEQ ID NO: 3721416 - RNA, 18 nt, Human
ggaccccagcugugagcc

SEQ ID NO: 3721417 - RNA, 13 nt, Human
ggaccccaggccc

SEQ ID NO: 3721418 - RNA, 14 nt, Human
ggaccccaggccca

SEQ ID NO: 3721419 - RNA, 17 nt, Human
ggaccccaucugugaau

SEQ ID NO: 3721420 - RNA, 18 nt, Human
ggaccccccuuucacagg

SEQ ID NO: 3721421 - RNA, 20 nt, Human
ggacccccgcccccugcccu

SEQ ID NO: 3721422 - RNA, 23 nt, Human
ggacccccgcccccugcccuccc

SEQ ID NO: 3721423 - RNA, 22 nt, Human
ggacccccguggggcagggagc

SEQ ID NO: 3721424 - RNA, 12 nt, Human
ggacccccugaa

SEQ ID NO: 3721425 - RNA, 21 nt, Human
ggaccccgagccuggcuccaa

SEQ ID NO: 3721426 - RNA, 13 nt, Human
ggaccccucaccu

SEQ ID NO: 3721427 - RNA, 18 nt, Human
ggaccccuggugguucac

SEQ ID NO: 3721428 - RNA, 17 nt, Human
ggacccgcucuggacca

SEQ ID NO: 3721429 - RNA, 21 nt, Human
ggacccggaggggccuggcag

SEQ ID NO: 3721430 - RNA, 19 nt, Human
ggacccguucaugggggag

SEQ ID NO: 3721431 - RNA, 17 nt, Human
ggacccuccaaggccag

SEQ ID NO: 3721432 - RNA, 18 nt, Human
ggacccuccaaggccagg

SEQ ID NO: 3721433 - RNA, 20 nt, Human
ggacccucgcuggcccccac

SEQ ID NO: 3721434 - RNA, 11 nt, Human
ggacccugagg

SEQ ID NO: 3721435 - RNA, 12 nt, Human
ggacccugaggc

SEQ ID NO: 3721436 - RNA, 17 nt, Human
ggacccugccaggcaca

SEQ ID NO: 3721437 - RNA, 21 nt, Human
ggacccugccaggcacaggca

SEQ ID NO: 3721438 - RNA, 22 nt, Human
ggacccugccaggcacaggcag

SEQ ID NO: 3721439 - RNA, 21 nt, Human
ggacccugcuuuagagcuagg

SEQ ID NO: 3721440 - RNA, 13 nt, Human
ggacccuguccaa

SEQ ID NO: 3721441 - RNA, 22 nt, Human
ggacccugugacauggugccug

SEQ ID NO: 3721442 - RNA, 23 nt, Human
ggacccugugacauggugccuga

SEQ ID NO: 3721443 - RNA, 13 nt, Human
ggacccugugagc

SEQ ID NO: 3721444 - RNA, 23 nt, Human
ggacccuugagaguaucaggucu

SEQ ID NO: 3721445 - RNA, 17 nt, Human
ggacccuuuccuuccuu

SEQ ID NO: 3721446 - RNA, 21 nt, Human
ggacccuuuccuuccuucccu

SEQ ID NO: 3721447 - RNA, 22 nt, Human
ggacccuuuccuuccuucccug

SEQ ID NO: 3721448 - RNA, 17 nt, Human
ggaccgaguagaggcau

SEQ ID NO: 3721449 - RNA, 18 nt, Human
ggaccgcccccugucucu

SEQ ID NO: 3721450 - RNA, 19 nt, Human
ggaccgcuacaccacucug

SEQ ID NO: 3721451 - RNA, 20 nt, Human
ggaccguggcccugcccucu

SEQ ID NO: 3721452 - RNA, 17 nt, Human
ggaccuaaauggccuca

SEQ ID NO: 3721453 - RNA, 22 nt, Human
ggaccuaacauucgaucucauu

SEQ ID NO: 3721454 - RNA, 21 nt, Human
ggaccuauguccuaaggacac

SEQ ID NO: 3721455 - RNA, 20 nt, Human
ggaccucaggccugggggcu

SEQ ID NO: 3721456 - RNA, 11 nt, Human
ggaccucccuu

SEQ ID NO: 3721457 - RNA, 20 nt, Human
ggaccucccuuccgacccuc

SEQ ID NO: 3721458 - RNA, 13 nt, Human
ggaccuccugagc

SEQ ID NO: 3721459 - RNA, 20 nt, Human
ggaccucuacuuuccaggcu

SEQ ID NO: 3721460 - RNA, 15 nt, Human
ggaccucucccaggg

SEQ ID NO: 3721461 - RNA, 15 nt, Human
uccuuucucauccca

SEQ ID NO: 3721462 - RNA, 13 nt, Human
uccuuucuccagg

SEQ ID NO: 3721463 - RNA, 15 nt, Human
uccuuucucuuucuc

SEQ ID NO: 3721464 - RNA, 17 nt, Human
uccuuucugaucuucac

SEQ ID NO: 3721465 - RNA, 20 nt, Human
uccuuucuuccggccccucc

SEQ ID NO: 3721466 - RNA, 14 nt, Human
uccuuugcacugag

SEQ ID NO: 3721467 - RNA, 15 nt, Human
uccuuugcacugagg

SEQ ID NO: 3721468 - RNA, 16 nt, Human
uccuuugcagggcagc

SEQ ID NO: 3721469 - RNA, 13 nt, Human
uccuuugggaaag

SEQ ID NO: 3721470 - RNA, 23 nt, Human
uccuuugggcuucagcugccagu

SEQ ID NO: 3721471 - RNA, 18 nt, Human
uccuuugguccugucccc

SEQ ID NO: 3721472 - RNA, 19 nt, Human
uccuuuguauauuauuucu

SEQ ID NO: 3721473 - RNA, 17 nt, Human
uccuuuguauucugucu

SEQ ID NO: 3721474 - RNA, 21 nt, Human
uccuuuguauucugucuucau

SEQ ID NO: 3721475 - RNA, 21 nt, Human
uccuuugucuucaaacuguga

SEQ ID NO: 3721476 - RNA, 22 nt, Human
uccuuugugaggaagccgcugg

SEQ ID NO: 3721477 - RNA, 22 nt, Human
uccuuugugugugugucagcug

SEQ ID NO: 3721478 - RNA, 20 nt, Human
uccuuuguuuucugacuaau

SEQ ID NO: 3721479 - RNA, 13 nt, Human
uccuuuuagccua

SEQ ID NO: 3721480 - RNA, 12 nt, Human
uccuuuuaugug

SEQ ID NO: 3721481 - RNA, 24 nt, Human
uccuuuuauuucuucaccagauuu

SEQ ID NO: 3721482 - RNA, 14 nt, Human
uccuuuucagaagu

SEQ ID NO: 3721483 - RNA, 15 nt, Human
uccuuuucccugcuu

SEQ ID NO: 3721484 - RNA, 15 nt, Human
uccuuuuccucucuc

SEQ ID NO: 3721485 - RNA, 22 nt, Human
uccuuuucgcaggauucuuccu

SEQ ID NO: 3721486 - RNA, 14 nt, Human
uccuuuucuguguu

SEQ ID NO: 3721487 - RNA, 16 nt, Human
uccuuuucuucuaugu

SEQ ID NO: 3721488 - RNA, 13 nt, Human
uccuuuucuuguu

SEQ ID NO: 3721489 - RNA, 16 nt, Human
uccuuuucuuuuguua

SEQ ID NO: 3721490 - RNA, 22 nt, Human
uccuuuucuuuuguuacuguuc

SEQ ID NO: 3721491 - RNA, 18 nt, Human
uccuuuugacacugcucu

SEQ ID NO: 3721492 - RNA, 14 nt, Human
uccuuuugaccuuc

SEQ ID NO: 3721493 - RNA, 14 nt, Human
uccuuuuggaguca

SEQ ID NO: 3721494 - RNA, 15 nt, Human
uccuuuuguaaagug

SEQ ID NO: 3721495 - RNA, 17 nt, Human
uccuuuuguagaaugaa

SEQ ID NO: 3721496 - RNA, 18 nt, Human
uccuuuuguguacagugu

SEQ ID NO: 3721497 - RNA, 16 nt, Human
uccuuuuguguuccaa

SEQ ID NO: 3721498 - RNA, 19 nt, Human
uccuuuuguguuccaaaca

SEQ ID NO: 3721499 - RNA, 13 nt, Human
uccuuuuuauuua

SEQ ID NO: 3721500 - RNA, 16 nt, Human
uccuuuuuccucucca

SEQ ID NO: 3721501 - RNA, 21 nt, Human
uccuuuuuccucuccacacag

SEQ ID NO: 3721502 - RNA, 14 nt, Human
uccuuuuucuuuau

SEQ ID NO: 3721503 - RNA, 14 nt, Human
uccuuuuugacacu

SEQ ID NO: 3721504 - RNA, 16 nt, Human
uccuuuuugacacuga

SEQ ID NO: 3721505 - RNA, 12 nt, Human
uccuuuuuuccc

SEQ ID NO: 3721506 - RNA, 22 nt, Human
uccuuuuuucccauaagacaau

SEQ ID NO: 3721507 - RNA, 12 nt, Human
uccuuuuuuucc

SEQ ID NO: 3721508 - RNA, 21 nt, Human
uccuuuuuuuccaucuuuaca

SEQ ID NO: 3721509 - RNA, 17 nt, Human
ucgaaaaaauaauuauu

SEQ ID NO: 3721510 - RNA, 18 nt, Human
ucgaaaaaauaauuauuu

SEQ ID NO: 3721511 - RNA, 18 nt, Human
ucgaaacacagaaaccuu

SEQ ID NO: 3721512 - RNA, 16 nt, Human
ucgaaagcucuagaau

SEQ ID NO: 3721513 - RNA, 19 nt, Human
ucgaaagcucuagaaucug

SEQ ID NO: 3721514 - RNA, 18 nt, Human
ucgaaauaacaauguuaa

SEQ ID NO: 3721515 - RNA, 19 nt, Human
ucgaacccacacugcaaca

SEQ ID NO: 3721516 - RNA, 13 nt, Human
ucgaacuggcugc

SEQ ID NO: 3721517 - RNA, 14 nt, Human
ucgaacuggcugca

SEQ ID NO: 3721518 - RNA, 14 nt, Human
ucgaacuucacaac

SEQ ID NO: 3721519 - RNA, 14 nt, Human
ucgaagcucagccc

SEQ ID NO: 3721520 - RNA, 12 nt, Human
ucgaagucauua

SEQ ID NO: 3721521 - RNA, 17 nt, Human
ucgaagucauuaaacug

SEQ ID NO: 3721522 - RNA, 12 nt, Human
ucgaagugcuga

SEQ ID NO: 3721523 - RNA, 14 nt, Human
ucgaaucucugugc

SEQ ID NO: 3721524 - RNA, 16 nt, Human
ucgaaucucugugccu

SEQ ID NO: 3721525 - RNA, 17 nt, Human
ucgaaucucugugccuu

SEQ ID NO: 3721526 - RNA, 15 nt, Human
ucgaauuaauagcuu

SEQ ID NO: 3721527 - RNA, 23 nt, Human
ucgaauuuugucuuuaaaauuca

SEQ ID NO: 3721528 - RNA, 15 nt, Human
ucgaauuuuuauuau

SEQ ID NO: 3721529 - RNA, 22 nt, Human
ucgacacuguucuuagcucaau

SEQ ID NO: 3721530 - RNA, 14 nt, Human
ucgaccccaaagcc

SEQ ID NO: 3721531 - RNA, 14 nt, Human
ucgacucagccuca

SEQ ID NO: 3721532 - RNA, 16 nt, Human
ucgacucagccucagg

SEQ ID NO: 3721533 - RNA, 21 nt, Human
ucgacucaggauccagucccu

SEQ ID NO: 3721534 - RNA, 20 nt, Human
ucgacucugugcuggccagc

SEQ ID NO: 3721535 - RNA, 16 nt, Human
ucgacugugaccugug

SEQ ID NO: 3721536 - RNA, 14 nt, Human
ucgacuuuucuuaa

SEQ ID NO: 3721537 - RNA, 20 nt, Human
ucgagaaagaggcaccagga

SEQ ID NO: 3721538 - RNA, 21 nt, Human
ucgagaaagaggcaccaggaa

SEQ ID NO: 3721539 - RNA, 15 nt, Human
ucgagaacuuucauu

SEQ ID NO: 3721540 - RNA, 16 nt, Human
ucgagaacuuucauuu

SEQ ID NO: 3721541 - RNA, 14 nt, Human
ucgagacagaaccu

SEQ ID NO: 3721542 - RNA, 14 nt, Human
ucgagaccagccug

SEQ ID NO: 3721543 - RNA, 15 nt, Human
ucgagaccagccugg

SEQ ID NO: 3721544 - RNA, 17 nt, Human
ucgagaccagccuggcc

SEQ ID NO: 3721545 - RNA, 14 nt, Human
ucgagaccagucug

SEQ ID NO: 3721546 - RNA, 16 nt, Human
ucgagaccauccuggc

SEQ ID NO: 3721547 - RNA, 23 nt, Human
ucgagaggggccgaugcccagag

SEQ ID NO: 3721548 - RNA, 18 nt, Human
ucgagaucccaacacugc

SEQ ID NO: 3721549 - RNA, 19 nt, Human
ucgagauuaucguuuucuu

SEQ ID NO: 3721550 - RNA, 21 nt, Human
ucgagcaguccugccucagcc

SEQ ID NO: 3721551 - RNA, 22 nt, Human
ucgagcaguccugccucagccu

SEQ ID NO: 3721552 - RNA, 14 nt, Human
ucgagcaugccugg

SEQ ID NO: 3721553 - RNA, 16 nt, Human
ucgagcaugccuggau

SEQ ID NO: 3721554 - RNA, 18 nt, Human
ucgagcaugccuggaugg

SEQ ID NO: 3721555 - RNA, 19 nt, Human
ucgagcgcccugcagaccc

SEQ ID NO: 3721556 - RNA, 14 nt, Human
ucgagcuuggggca

SEQ ID NO: 3721557 - RNA, 14 nt, Human
ucgaggacagggag

SEQ ID NO: 3721558 - RNA, 17 nt, Human
ucgaggaguaacaauac

SEQ ID NO: 3721559 - RNA, 15 nt, Human
ucgaggccugaagcc

SEQ ID NO: 3721560 - RNA, 22 nt, Human
ucgaggcggaucuuuggacaga

SEQ ID NO: 3721561 - RNA, 16 nt, Human
ucgaggcugcagucag

SEQ ID NO: 3721562 - RNA, 14 nt, Human
ucgaggggcucuca

SEQ ID NO: 3721563 - RNA, 16 nt, Human
ucgaggggcucucagc

SEQ ID NO: 3721564 - RNA, 20 nt, Human
ucgaggggugggcugguauc

SEQ ID NO: 3721565 - RNA, 21 nt, Human
ucgagguagaguuugaaggag

SEQ ID NO: 3721566 - RNA, 17 nt, Human
ucgaggugccuucuuca

SEQ ID NO: 3721567 - RNA, 22 nt, Human
ucgagguuucucaaagaaauuu

SEQ ID NO: 3721568 - RNA, 17 nt, Human
ucgaguacugugggcaa

SEQ ID NO: 3721569 - RNA, 14 nt, Human
ucgagucaaaaugu

SEQ ID NO: 3721570 - RNA, 22 nt, Human
ucgagugccgcaucucacagcu

SEQ ID NO: 3721571 - RNA, 18 nt, Human
ucgaguucggcucugggu

SEQ ID NO: 3721572 - RNA, 22 nt, Human
ucgauacugcgacuuucugccu

SEQ ID NO: 3721573 - RNA, 16 nt, Human
ucgauaucuucuuuuu

SEQ ID NO: 3721574 - RNA, 14 nt, Human
ucgauauuuccauc

SEQ ID NO: 3721575 - RNA, 19 nt, Human
ucgauauuuccaucauuaa

SEQ ID NO: 3721576 - RNA, 19 nt, Human
ucgaugaagcccaauaaac

SEQ ID NO: 3721577 - RNA, 15 nt, Human
ucgaugaaggcugcc

SEQ ID NO: 3721578 - RNA, 14 nt, Human
ucgaugcaaugaac

SEQ ID NO: 3721579 - RNA, 18 nt, Human
ucgaugcguucacuccaa

SEQ ID NO: 3721580 - RNA, 22 nt, Human
ucgaugggggaugcuucaugug

SEQ ID NO: 3721581 - RNA, 23 nt, Human
ucgaugguacgugacccucugcu

SEQ ID NO: 3721582 - RNA, 20 nt, Human
ucgauguguacucuaacuua

SEQ ID NO: 3721583 - RNA, 22 nt, Human
ucgauuagacuggacagcuugu

SEQ ID NO: 3721584 - RNA, 20 nt, Human
ucgauuauucccuguacaau

SEQ ID NO: 3721585 - RNA, 15 nt, Human
ucgauucauauugaa

SEQ ID NO: 3721586 - RNA, 13 nt, Human
ucgcaagcugggu

SEQ ID NO: 3721587 - RNA, 13 nt, Human
ucgcacagucucu

SEQ ID NO: 3721588 - RNA, 14 nt, Human
ucgcacagucucuc

SEQ ID NO: 3721589 - RNA, 16 nt, Human
ucgcacagucucucuc

SEQ ID NO: 3721590 - RNA, 19 nt, Human
ucgcaccccccuguucuaa

SEQ ID NO: 3721591 - RNA, 13 nt, Human
ucgcaccggagug

SEQ ID NO: 3721592 - RNA, 14 nt, Human
ucgcagagaggcca

SEQ ID NO: 3721593 - RNA, 17 nt, Human
ucgcagagcuuuucaga

SEQ ID NO: 3721594 - RNA, 12 nt, Human
ucgcagccaccc

SEQ ID NO: 3721595 - RNA, 16 nt, Human
ucgcagccacccugag

SEQ ID NO: 3721596 - RNA, 17 nt, Human
ucgcagccacccugagg

SEQ ID NO: 3721597 - RNA, 18 nt, Human
ucgcagccacccugagga

SEQ ID NO: 3721598 - RNA, 23 nt, Human
ucgcagccacccugaggagucug

SEQ ID NO: 3721599 - RNA, 13 nt, Human
ucgcagccugagu

SEQ ID NO: 3721600 - RNA, 15 nt, Human
ucgcaggccucccug

SEQ ID NO: 3721601 - RNA, 20 nt, Human
ucgcaggccucccugccagu

SEQ ID NO: 3721602 - RNA, 22 nt, Human
ucgcauagaaaucaauaauuug

SEQ ID NO: 3721603 - RNA, 15 nt, Human
ucgcaucaaaagaca

SEQ ID NO: 3721604 - RNA, 13 nt, Human
ucgcaucauugca

SEQ ID NO: 3721605 - RNA, 16 nt, Human
ucgccacacaguauuu

SEQ ID NO: 3721606 - RNA, 21 nt, Human
ucgccaccuggcauuccuucu

SEQ ID NO: 3721607 - RNA, 18 nt, Human
ucgcccaaagccagacag

SEQ ID NO: 3721608 - RNA, 21 nt, Human
ucgcccagcggcaucaggcuu

SEQ ID NO: 3721609 - RNA, 12 nt, Human
ucgcccaggaga

SEQ ID NO: 3721610 - RNA, 19 nt, Human
ucgcccagucuggaaugca

SEQ ID NO: 3721611 - RNA, 23 nt, Human
ucgcccagucuggaaugcagugg

SEQ ID NO: 3721612 - RNA, 23 nt, Human
ucccucaacaagggagagaccuc

SEQ ID NO: 3721613 - RNA, 16 nt, Human
ucccucaaccccacca

SEQ ID NO: 3721614 - RNA, 14 nt, Human
ucccucacccaucc

SEQ ID NO: 3721615 - RNA, 18 nt, Human
ucccucacccauccuaga

SEQ ID NO: 3721616 - RNA, 17 nt, Human
ucccucacccccuccca

SEQ ID NO: 3721617 - RNA, 15 nt, Human
ucccucacccugagc

SEQ ID NO: 3721618 - RNA, 20 nt, Human
ucccucacccugagccccuu

SEQ ID NO: 3721619 - RNA, 22 nt, Human
ucccucacccugagccccuucc

SEQ ID NO: 3721620 - RNA, 22 nt, Human
ucccucaccuuggcaccagaca

SEQ ID NO: 3721621 - RNA, 14 nt, Human
ucccucacucucag

SEQ ID NO: 3721622 - RNA, 18 nt, Human
ucccucagucuggcccuu

SEQ ID NO: 3721623 - RNA, 13 nt, Human
ucccucaucucuc

SEQ ID NO: 3721624 - RNA, 21 nt, Human
ucccucaucugucccuccggg

SEQ ID NO: 3721625 - RNA, 11 nt, Human
ucccuccaccc

SEQ ID NO: 3721626 - RNA, 19 nt, Human
ucccuccaccucccugcaa

SEQ ID NO: 3721627 - RNA, 17 nt, Human
ucccuccagcacaaaca

SEQ ID NO: 3721628 - RNA, 19 nt, Human
ucccucccaccucugugac

SEQ ID NO: 3721629 - RNA, 21 nt, Human
ucccucccaccucugugaccu

SEQ ID NO: 3721630 - RNA, 16 nt, Human
ucccuccccugccauu

SEQ ID NO: 3721631 - RNA, 22 nt, Human
ucccuccccuggggacagcaag

SEQ ID NO: 3721632 - RNA, 14 nt, Human
ucccucccucuccg

SEQ ID NO: 3721633 - RNA, 14 nt, Human
ucccucccucugcc

SEQ ID NO: 3721634 - RNA, 16 nt, Human
ucccucccucugccgg

SEQ ID NO: 3721635 - RNA, 10 nt, Human
ucccucccuu

SEQ ID NO: 3721636 - RNA, 15 nt, Human
ucccuccgauccuuc

SEQ ID NO: 3721637 - RNA, 19 nt, Human
ucccuccgauccuuccucc

SEQ ID NO: 3721638 - RNA, 13 nt, Human
ucccuccucaccu

SEQ ID NO: 3721639 - RNA, 17 nt, Human
ucccuccucaccucugg

SEQ ID NO: 3721640 - RNA, 19 nt, Human
ucccuccugggaaugaagc

SEQ ID NO: 3721641 - RNA, 18 nt, Human
ucccuccugggaucugcu

SEQ ID NO: 3721642 - RNA, 19 nt, Human
ucccuccugggaucugcuc

SEQ ID NO: 3721643 - RNA, 20 nt, Human
ucccuccuggugucacccca

SEQ ID NO: 3721644 - RNA, 14 nt, Human
ucccuccuguuggg

SEQ ID NO: 3721645 - RNA, 22 nt, Human
ucccucgcugcacaaauacucc

SEQ ID NO: 3721646 - RNA, 19 nt, Human
ucccucuaaugagacugac

SEQ ID NO: 3721647 - RNA, 21 nt, Human
ucccucuacagagcuucccug

SEQ ID NO: 3721648 - RNA, 22 nt, Human
ucccucuacagagcuucccuga

SEQ ID NO: 3721649 - RNA, 18 nt, Human
ucccucuaggcucugccu

SEQ ID NO: 3721650 - RNA, 13 nt, Human
ucccucuauuuau

SEQ ID NO: 3721651 - RNA, 19 nt, Human
ucccucuauuuauguuugc

SEQ ID NO: 3721652 - RNA, 14 nt, Human
ucccucucaucuca

SEQ ID NO: 3721653 - RNA, 13 nt, Human
ucccucucccagg

SEQ ID NO: 3721654 - RNA, 15 nt, Human
ucccucucccaggcc

SEQ ID NO: 3721655 - RNA, 21 nt, Human
ucccucucccaggccccauga

SEQ ID NO: 3721656 - RNA, 12 nt, Human
ucccucucccug

SEQ ID NO: 3721657 - RNA, 17 nt, Human
ucccucucucugacucu

SEQ ID NO: 3721658 - RNA, 22 nt, Human
ucccucucucugacucucaaau

SEQ ID NO: 3721659 - RNA, 12 nt, Human
ucccucucucuu

SEQ ID NO: 3721660 - RNA, 18 nt, Human
ucccucucucuucugcuc

SEQ ID NO: 3721661 - RNA, 21 nt, Human
ucccucucucuucugcuccac

SEQ ID NO: 3721662 - RNA, 16 nt, Human
ucccucucugcuggac

SEQ ID NO: 3721663 - RNA, 15 nt, Human
ucccucucuggagaa

SEQ ID NO: 3721664 - RNA, 18 nt, Human
ucccucugaccugcaggc

SEQ ID NO: 3721665 - RNA, 22 nt, Human
ucccucugagaauuccaaggag

SEQ ID NO: 3721666 - RNA, 22 nt, Human
ucccucugcagucucuauacca

SEQ ID NO: 3721667 - RNA, 11 nt, Human
ucccucugccu

SEQ ID NO: 3721668 - RNA, 18 nt, Human
ucccucugccugucccuc

SEQ ID NO: 3721669 - RNA, 15 nt, Human
ucccucugcucagcc

SEQ ID NO: 3721670 - RNA, 20 nt, Human
ucccucugcuccuggagccu

SEQ ID NO: 3721671 - RNA, 13 nt, Human
ucccucuguuucu

SEQ ID NO: 3721672 - RNA, 14 nt, Human
ucccucuguuucuc

SEQ ID NO: 3721673 - RNA, 22 nt, Human
ucccucuuccuucccugcugug

SEQ ID NO: 3721674 - RNA, 23 nt, Human
ucccucuuccuucccugcuguga

SEQ ID NO: 3721675 - RNA, 15 nt, Human
ucccucuuguuuugu

SEQ ID NO: 3721676 - RNA, 16 nt, Human
ucccucuuguuuuguu

SEQ ID NO: 3721677 - RNA, 19 nt, Human
ucccucuuguuuuguuugu

SEQ ID NO: 3721678 - RNA, 14 nt, Human
ucccucuuucccuc

SEQ ID NO: 3721679 - RNA, 20 nt, Human
ucccucuuucccucccuucc

SEQ ID NO: 3721680 - RNA, 18 nt, Human
ucccucuuuggcuccccu

SEQ ID NO: 3721681 - RNA, 17 nt, Human
ucccugaaaacccagag

SEQ ID NO: 3721682 - RNA, 22 nt, Human
ucccugaaacacgaaacuuguu

SEQ ID NO: 3721683 - RNA, 12 nt, Human
ucccugaagcca

SEQ ID NO: 3721684 - RNA, 16 nt, Human
ucccugaagccagccu

SEQ ID NO: 3721685 - RNA, 18 nt, Human
ucccugaagccagccuuc

SEQ ID NO: 3721686 - RNA, 11 nt, Human
ucccugaaggc

SEQ ID NO: 3721687 - RNA, 21 nt, Human
ucccugaaucccccuugccac

SEQ ID NO: 3721688 - RNA, 22 nt, Human
ucccugacucauucugaaggag

SEQ ID NO: 3721689 - RNA, 16 nt, Human
ucccugacucucugug

SEQ ID NO: 3721690 - RNA, 17 nt, Human
ucccugacucucuguga

SEQ ID NO: 3721691 - RNA, 18 nt, Human
ucccugacucucugugac

SEQ ID NO: 3721692 - RNA, 20 nt, Human
ucccugacucucugugaccu

SEQ ID NO: 3721693 - RNA, 16 nt, Human
ucccugacuuuucugu

SEQ ID NO: 3721694 - RNA, 20 nt, Human
ucccugagagugucucugau

SEQ ID NO: 3721695 - RNA, 23 nt, Human
ucccugagaugggcuucccaagg

SEQ ID NO: 3721696 - RNA, 20 nt, Human
ucccugaggcagguccccag

SEQ ID NO: 3721697 - RNA, 14 nt, Human
ucccugagucacca

SEQ ID NO: 3721698 - RNA, 17 nt, Human
ucccugagucaccagga

SEQ ID NO: 3721699 - RNA, 21 nt, Human
ucccugauaacaaccuggaga

SEQ ID NO: 3721700 - RNA, 14 nt, Human
ucccugaucccuuc

SEQ ID NO: 3721701 - RNA, 12 nt, Human
ucccugauguac

SEQ ID NO: 3721702 - RNA, 16 nt, Human
ucccugauguacaguu

SEQ ID NO: 3721703 - RNA, 17 nt, Human
ucccugauugaccugcu

SEQ ID NO: 3721704 - RNA, 23 nt, Human
ucccugauugaccugcuccgcug

SEQ ID NO: 3721705 - RNA, 13 nt, Human
ucccugauuuaau

SEQ ID NO: 3721706 - RNA, 16 nt, Human
ucccugcaaccaacua

SEQ ID NO: 3721707 - RNA, 16 nt, Human
ucccugcaauaaaaug

SEQ ID NO: 3721708 - RNA, 15 nt, Human
ucccugcacaagcca

SEQ ID NO: 3721709 - RNA, 16 nt, Human
ucccugcacaagccag

SEQ ID NO: 3721710 - RNA, 20 nt, Human
ucccugcacuaaagccagcc

SEQ ID NO: 3721711 - RNA, 14 nt, Human
ucccugcacuugca

SEQ ID NO: 3721712 - RNA, 16 nt, Human
ucccugcagaugccac

SEQ ID NO: 3721713 - RNA, 22 nt, Human
ucccugcaucugaccagcagcg

SEQ ID NO: 3721714 - RNA, 13 nt, Human
ucccugcauggca

SEQ ID NO: 3721715 - RNA, 20 nt, Human
ucccugcauggcauccucca

SEQ ID NO: 3721716 - RNA, 22 nt, Human
ucccugcauggcauccuccagc

SEQ ID NO: 3721717 - RNA, 14 nt, Human
ucccugcauuucug

SEQ ID NO: 3721718 - RNA, 14 nt, Human
ucccugccaaugga

SEQ ID NO: 3721719 - RNA, 16 nt, Human
ucccugccaauggacu

SEQ ID NO: 3721720 - RNA, 23 nt, Human
ucccugcccagaauucccagcug

SEQ ID NO: 3721721 - RNA, 18 nt, Human
ucccugccccucccuuca

SEQ ID NO: 3721722 - RNA, 19 nt, Human
ucccugccccucccuucaa

SEQ ID NO: 3721723 - RNA, 14 nt, Human
ucccugccgccuca

SEQ ID NO: 3721724 - RNA, 11 nt, Human
ucccugccuca

SEQ ID NO: 3721725 - RNA, 17 nt, Human
ucccugccucaggccuc

SEQ ID NO: 3721726 - RNA, 20 nt, Human
ucccugccucaggccucugu

SEQ ID NO: 3721727 - RNA, 13 nt, Human
ucccugccuggac

SEQ ID NO: 3721728 - RNA, 20 nt, Human
ucccugccuuaggccuaccu

SEQ ID NO: 3721729 - RNA, 16 nt, Human
ucccugcgccugugau

SEQ ID NO: 3721730 - RNA, 17 nt, Human
ucccugcgccugugaug

SEQ ID NO: 3721731 - RNA, 22 nt, Human
ucccugcugucauugcuucuuc

SEQ ID NO: 3721732 - RNA, 23 nt, Human
ucccugcugucauugcuucuucu

SEQ ID NO: 3721733 - RNA, 14 nt, Human
ucccugcugucccc

SEQ ID NO: 3721734 - RNA, 12 nt, Human
ucccugcuucca

SEQ ID NO: 3721735 - RNA, 18 nt, Human
ucccugcuuuggucuugc

SEQ ID NO: 3721736 - RNA, 19 nt, Human
ucccugcuuuuuguguuuu

SEQ ID NO: 3721737 - RNA, 20 nt, Human
ucccuggaaugaguugaggc

SEQ ID NO: 3721738 - RNA, 22 nt, Human
ucccuggagccagacucugguc

SEQ ID NO: 3721739 - RNA, 18 nt, Human
ucccuggaugacauuaaa

SEQ ID NO: 3721740 - RNA, 17 nt, Human
ucccuggauuuuuacca

SEQ ID NO: 3721741 - RNA, 19 nt, Human
ucccuggauuuuuaccagu

SEQ ID NO: 3721742 - RNA, 15 nt, Human
ucccuggccaucucu

SEQ ID NO: 3721743 - RNA, 14 nt, Human
ucccuggccuguuc

SEQ ID NO: 3721744 - RNA, 18 nt, Human
ucccuggccuguucuguu

SEQ ID NO: 3721745 - RNA, 11 nt, Human
ucccuggccuu

SEQ ID NO: 3721746 - RNA, 16 nt, Human
ucccuggccuuucaua

SEQ ID NO: 3721747 - RNA, 14 nt, Human
ucccuggcucccau

SEQ ID NO: 3721748 - RNA, 14 nt, Human
ucccuggcugcccu

SEQ ID NO: 3721749 - RNA, 15 nt, Human
ucccuggcugcccug

SEQ ID NO: 3721750 - RNA, 18 nt, Human
ucccuggcugcccuggcc

SEQ ID NO: 3721751 - RNA, 15 nt, Human
ucccuggcuuccuua

SEQ ID NO: 3721752 - RNA, 16 nt, Human
ucccuggcuuccuuac

SEQ ID NO: 3721753 - RNA, 19 nt, Human
ucccuggcuuguaacucca

SEQ ID NO: 3721754 - RNA, 15 nt, Human
ucccugggaucuggu

SEQ ID NO: 3721755 - RNA, 12 nt, Human
ucccugggcauu

SEQ ID NO: 3721756 - RNA, 18 nt, Human
ucccugggcauugcuuuc

SEQ ID NO: 3721757 - RNA, 16 nt, Human
ucccugggccaggguc

SEQ ID NO: 3721758 - RNA, 13 nt, Human
ucccugggccugc

SEQ ID NO: 3721759 - RNA, 16 nt, Human
ucccugggccugcugc

SEQ ID NO: 3721760 - RNA, 21 nt, Human
ucccugggccugcugcugaga

SEQ ID NO: 3721761 - RNA, 19 nt, Human
ucccugggcugugcuaccu

SEQ ID NO: 3721762 - RNA, 13 nt, Human
ggaccucugacag

SEQ ID NO: 3721763 - RNA, 14 nt, Human
ggaccucugcucug

SEQ ID NO: 3721764 - RNA, 19 nt, Human
ggaccugaaauuccaaagu

SEQ ID NO: 3721765 - RNA, 13 nt, Human
ggaccugagccug

SEQ ID NO: 3721766 - RNA, 19 nt, Human
ggaccugagccugccgagc

SEQ ID NO: 3721767 - RNA, 20 nt, Human
ggaccugagccugccgagca

SEQ ID NO: 3721768 - RNA, 17 nt, Human
ggaccugccaggcaggg

SEQ ID NO: 3721769 - RNA, 10 nt, Human
ggaccugccc

SEQ ID NO: 3721770 - RNA, 23 nt, Human
ggaccugcccccgcauccccugc

SEQ ID NO: 3721771 - RNA, 19 nt, Human
ggaccugccuccugccugc

SEQ ID NO: 3721772 - RNA, 23 nt, Human
ggaccugccuccugccugccccu

SEQ ID NO: 3721773 - RNA, 21 nt, Human
ggaccuggggcacaguccagg

SEQ ID NO: 3721774 - RNA, 17 nt, Human
ggaccuggugcugccuc

SEQ ID NO: 3721775 - RNA, 18 nt, Human
ggaccuguauuuaagcaa

SEQ ID NO: 3721776 - RNA, 21 nt, Human
ggaccuuacgaucaggcacag

SEQ ID NO: 3721777 - RNA, 19 nt, Human
ggaccuucgggcugugccc

SEQ ID NO: 3721778 - RNA, 18 nt, Human
ggaccuuuccaccacagc

SEQ ID NO: 3721779 - RNA, 19 nt, Human
ggaccuuuccaccacagcc

SEQ ID NO: 3721780 - RNA, 22 nt, Human
ggaccuuuccaccacagccagc

SEQ ID NO: 3721781 - RNA, 13 nt, Human
ggaccuuuuaaag

SEQ ID NO: 3721782 - RNA, 16 nt, Human
ggaccuuuugggggag

SEQ ID NO: 3721783 - RNA, 14 nt, Human
ggacgacucugacc

SEQ ID NO: 3721784 - RNA, 24 nt, Human
ggacgccgggccggcccuagccca

SEQ ID NO: 3721785 - RNA, 14 nt, Human
ggacgccugggggu

SEQ ID NO: 3721786 - RNA, 20 nt, Human
ggacgcuacccgggaagggg

SEQ ID NO: 3721787 - RNA, 13 nt, Human
ggacgcucucugg

SEQ ID NO: 3721788 - RNA, 15 nt, Human
ggacgcucucuggcc

SEQ ID NO: 3721789 - RNA, 13 nt, Human
ggacgcuucugaa

SEQ ID NO: 3721790 - RNA, 14 nt, Human
ggacggcggcagua

SEQ ID NO: 3721791 - RNA, 16 nt, Human
ggacggggccggccag

SEQ ID NO: 3721792 - RNA, 15 nt, Human
ggacggucaguuugg

SEQ ID NO: 3721793 - RNA, 16 nt, Human
ggacgucccugcccau

SEQ ID NO: 3721794 - RNA, 16 nt, Human
ggacguggcaccuccu

SEQ ID NO: 3721795 - RNA, 18 nt, Human
ggacguggcucagccagc

SEQ ID NO: 3721796 - RNA, 13 nt, Human
ggacguuccagcc

SEQ ID NO: 3721797 - RNA, 14 nt, Human
ggacuaaaagauau

SEQ ID NO: 3721798 - RNA, 23 nt, Human
ggacuaacacucagaagccuggg

SEQ ID NO: 3721799 - RNA, 20 nt, Human
ggacuaacuugucuuuggac

SEQ ID NO: 3721800 - RNA, 19 nt, Human
ggacuaagccuaccugcuc

SEQ ID NO: 3721801 - RNA, 20 nt, Human
ggacuacaggugugagucac

SEQ ID NO: 3721802 - RNA, 13 nt, Human
ggacuacugaagc

SEQ ID NO: 3721803 - RNA, 16 nt, Human
ggacuagagcuuucuu

SEQ ID NO: 3721804 - RNA, 18 nt, Human
ggacuagagggaccucuc

SEQ ID NO: 3721805 - RNA, 19 nt, Human
ggacuagagggaccucucc

SEQ ID NO: 3721806 - RNA, 20 nt, Human
ggacuauauuugggccugcu

SEQ ID NO: 3721807 - RNA, 14 nt, Human
ggacuauuauaauu

SEQ ID NO: 3721808 - RNA, 18 nt, Human
ggacucaagccccggacu

SEQ ID NO: 3721809 - RNA, 15 nt, Human
ggacucaaugcacug

SEQ ID NO: 3721810 - RNA, 19 nt, Human
ggacucaauuucuccccag

SEQ ID NO: 3721811 - RNA, 17 nt, Human
ggacucagaaacuccau

SEQ ID NO: 3721812 - RNA, 14 nt, Human
ggacucagagaaaa

SEQ ID NO: 3721813 - RNA, 13 nt, Human
ggacucagcccug

SEQ ID NO: 3721814 - RNA, 16 nt, Human
ggacucagcccugagg

SEQ ID NO: 3721815 - RNA, 17 nt, Human
ggacucagcccugaggu

SEQ ID NO: 3721816 - RNA, 17 nt, Human
ggacucaggaugcccag

SEQ ID NO: 3721817 - RNA, 20 nt, Human
ggacucaggaugcccagggc

SEQ ID NO: 3721818 - RNA, 22 nt, Human
ggacucaggcgggacagugcug

SEQ ID NO: 3721819 - RNA, 20 nt, Human
ggacucagguggcccuacug

SEQ ID NO: 3721820 - RNA, 21 nt, Human
ggacucaucuuucccuccuug

SEQ ID NO: 3721821 - RNA, 22 nt, Human
ggacuccaggcagcagacacau

SEQ ID NO: 3721822 - RNA, 14 nt, Human
ggacuccccaggcc

SEQ ID NO: 3721823 - RNA, 19 nt, Human
ggacuccccaggccaggcc

SEQ ID NO: 3721824 - RNA, 22 nt, Human
ggacucccuccucaccucugga

SEQ ID NO: 3721825 - RNA, 17 nt, Human
ggacuccggcugugcug

SEQ ID NO: 3721826 - RNA, 11 nt, Human
ggacucucccc

SEQ ID NO: 3721827 - RNA, 17 nt, Human
ggacucugaagccucug

SEQ ID NO: 3721828 - RNA, 13 nt, Human
ggacucugcacau

SEQ ID NO: 3721829 - RNA, 15 nt, Human
ggacucugcacauga

SEQ ID NO: 3721830 - RNA, 16 nt, Human
ggacucuguccugaag

SEQ ID NO: 3721831 - RNA, 23 nt, Human
ggacucuguccugaaggccugag

SEQ ID NO: 3721832 - RNA, 18 nt, Human
ggacucuugcucuuucua

SEQ ID NO: 3721833 - RNA, 16 nt, Human
ggacugaaaaccucuc

SEQ ID NO: 3721834 - RNA, 17 nt, Human
ggacugaaaaccucucc

SEQ ID NO: 3721835 - RNA, 14 nt, Human
ggacugaagccugc

SEQ ID NO: 3721836 - RNA, 16 nt, Human
ggacugaagccugcag

SEQ ID NO: 3721837 - RNA, 14 nt, Human
ggacugaccagcag

SEQ ID NO: 3721838 - RNA, 11 nt, Human
ggacugacuga

SEQ ID NO: 3721839 - RNA, 16 nt, Human
ggacugacugaggcag

SEQ ID NO: 3721840 - RNA, 14 nt, Human
ggacugaggccuga

SEQ ID NO: 3721841 - RNA, 17 nt, Human
ggacugagggacucuga

SEQ ID NO: 3721842 - RNA, 20 nt, Human
ggacugagggggccuggaug

SEQ ID NO: 3721843 - RNA, 15 nt, Human
ggacugaugucuccu

SEQ ID NO: 3721844 - RNA, 19 nt, Human
ggacugcaugguaauuuau

SEQ ID NO: 3721845 - RNA, 18 nt, Human
ggacugccccgugcagac

SEQ ID NO: 3721846 - RNA, 13 nt, Human
ggacugccucugc

SEQ ID NO: 3721847 - RNA, 22 nt, Human
ggacugccucugccacacucug

SEQ ID NO: 3721848 - RNA, 16 nt, Human
ggacugcugcugccug

SEQ ID NO: 3721849 - RNA, 18 nt, Human
ggacugcugcugccuggc

SEQ ID NO: 3721850 - RNA, 21 nt, Human
ggacuggaggccccuggagcc

SEQ ID NO: 3721851 - RNA, 17 nt, Human
ggacuggccccuggguc

SEQ ID NO: 3721852 - RNA, 13 nt, Human
ggacuggccucug

SEQ ID NO: 3721853 - RNA, 22 nt, Human
ggacuggcgaguccagagagga

SEQ ID NO: 3721854 - RNA, 22 nt, Human
ggacuggcuagaguccucacuc

SEQ ID NO: 3721855 - RNA, 21 nt, Human
ggacugggagcccccagccug

SEQ ID NO: 3721856 - RNA, 17 nt, Human
uccucaagaaauaaaag

SEQ ID NO: 3721857 - RNA, 23 nt, Human
uccucaagaaauaaaaggaagcc

SEQ ID NO: 3721858 - RNA, 14 nt, Human
uccucaaggggcca

SEQ ID NO: 3721859 - RNA, 21 nt, Human
uccucaaggggccauccuguc

SEQ ID NO: 3721860 - RNA, 18 nt, Human
uccucaaguccccaagau

SEQ ID NO: 3721861 - RNA, 15 nt, Human
uccucacacacagac

SEQ ID NO: 3721862 - RNA, 14 nt, Human
uccucacaguccca

SEQ ID NO: 3721863 - RNA, 20 nt, Human
uccucacaucuuucacacuu

SEQ ID NO: 3721864 - RNA, 12 nt, Human
uccucaccccug

SEQ ID NO: 3721865 - RNA, 14 nt, Human
uccucaccccuguc

SEQ ID NO: 3721866 - RNA, 19 nt, Human
uccucaccccuguccucac

SEQ ID NO: 3721867 - RNA, 20 nt, Human
uccucaccccuguccucacu

SEQ ID NO: 3721868 - RNA, 15 nt, Human
uccucaccucaugcc

SEQ ID NO: 3721869 - RNA, 16 nt, Human
uccucaccucaugccc

SEQ ID NO: 3721870 - RNA, 21 nt, Human
uccucaccucaugcccacccc

SEQ ID NO: 3721871 - RNA, 13 nt, Human
uccucaccucugg

SEQ ID NO: 3721872 - RNA, 15 nt, Human
uccucaccucuggac

SEQ ID NO: 3721873 - RNA, 15 nt, Human
uccucaccuuuuccc

SEQ ID NO: 3721874 - RNA, 17 nt, Human
uccucacucccagucca

SEQ ID NO: 3721875 - RNA, 22 nt, Human
uccucacuggccaucccucgug

SEQ ID NO: 3721876 - RNA, 13 nt, Human
uccucacugggug

SEQ ID NO: 3721877 - RNA, 22 nt, Human
uccucacugugguaaaugccac

SEQ ID NO: 3721878 - RNA, 15 nt, Human
uccucagccagccuc

SEQ ID NO: 3721879 - RNA, 12 nt, Human
uccucagccagu

SEQ ID NO: 3721880 - RNA, 15 nt, Human
uccucaggcacacag

SEQ ID NO: 3721881 - RNA, 18 nt, Human
uccucagggacagagaca

SEQ ID NO: 3721882 - RNA, 22 nt, Human
uccucagggacagagacaccug

SEQ ID NO: 3721883 - RNA, 24 nt, Human
uccucagggacagagacaccugca

SEQ ID NO: 3721884 - RNA, 12 nt, Human
uccucagggcag

SEQ ID NO: 3721885 - RNA, 16 nt, Human
uccucagguggccaug

SEQ ID NO: 3721886 - RNA, 18 nt, Human
uccucaguccauuuauau

SEQ ID NO: 3721887 - RNA, 19 nt, Human
uccucaguccauuuauaua

SEQ ID NO: 3721888 - RNA, 21 nt, Human
uccucaguccauuuauauaug

SEQ ID NO: 3721889 - RNA, 23 nt, Human
uccucauaaaaagcaaaacaaaa

SEQ ID NO: 3721890 - RNA, 22 nt, Human
uccucauacccacccccaccca

SEQ ID NO: 3721891 - RNA, 16 nt, Human
uccucauccagggcuc

SEQ ID NO: 3721892 - RNA, 12 nt, Human
uccucaucucua

SEQ ID NO: 3721893 - RNA, 20 nt, Human
uccucaucucuaacagcuca

SEQ ID NO: 3721894 - RNA, 22 nt, Human
uccucaucucuaacagcucagg

SEQ ID NO: 3721895 - RNA, 21 nt, Human
uccucaucugggggaguggaa

SEQ ID NO: 3721896 - RNA, 22 nt, Human
uccucauggcagccuacucucc

SEQ ID NO: 3721897 - RNA, 20 nt, Human
uccucaugucuucucacaag

SEQ ID NO: 3721898 - RNA, 17 nt, Human
uccucauuaaauuaccu

SEQ ID NO: 3721899 - RNA, 14 nt, Human
uccucauuccugaa

SEQ ID NO: 3721900 - RNA, 16 nt, Human
uccucauuucuccaga

SEQ ID NO: 3721901 - RNA, 19 nt, Human
uccucauuugggguagcua

SEQ ID NO: 3721902 - RNA, 21 nt, Human
uccucauuugggguagcuaga

SEQ ID NO: 3721903 - RNA, 22 nt, Human
uccucauuuuuauaaugucccu

SEQ ID NO: 3721904 - RNA, 17 nt, Human
uccuccaaaggcccccu

SEQ ID NO: 3721905 - RNA, 22 nt, Human
uccuccaacaccaagcacagca

SEQ ID NO: 3721906 - RNA, 13 nt, Human
uccuccaacagcu

SEQ ID NO: 3721907 - RNA, 14 nt, Human
uccuccaaggacag

SEQ ID NO: 3721908 - RNA, 15 nt, Human
uccuccacauccuuu

SEQ ID NO: 3721909 - RNA, 16 nt, Human
uccuccacauuuguuu

SEQ ID NO: 3721910 - RNA, 21 nt, Human
uccuccaccaccgcccgucug

SEQ ID NO: 3721911 - RNA, 22 nt, Human
uccuccaccaccgcccgucugu

SEQ ID NO: 3721912 - RNA, 23 nt, Human
uccuccacguucugcucaucauu

SEQ ID NO: 3721913 - RNA, 21 nt, Human
uccuccagaacucuuccucca

SEQ ID NO: 3721914 - RNA, 16 nt, Human
uccuccagaagccucu

SEQ ID NO: 3721915 - RNA, 18 nt, Human
uccuccagaagccucugg

SEQ ID NO: 3721916 - RNA, 14 nt, Human
uccuccagcaggga

SEQ ID NO: 3721917 - RNA, 14 nt, Human
uccuccagccccug

SEQ ID NO: 3721918 - RNA, 17 nt, Human
uccuccagccccuguag

SEQ ID NO: 3721919 - RNA, 13 nt, Human
uccuccagcugca

SEQ ID NO: 3721920 - RNA, 14 nt, Human
uccuccagggacag

SEQ ID NO: 3721921 - RNA, 16 nt, Human
uccuccagggacagca

SEQ ID NO: 3721922 - RNA, 13 nt, Human
uccuccagggcca

SEQ ID NO: 3721923 - RNA, 20 nt, Human
uccuccagggccacgugcca

SEQ ID NO: 3721924 - RNA, 23 nt, Human
uccuccagggccacgugccaggc

SEQ ID NO: 3721925 - RNA, 17 nt, Human
uccuccagggugauuuu

SEQ ID NO: 3721926 - RNA, 11 nt, Human
uccuccagguu

SEQ ID NO: 3721927 - RNA, 15 nt, Human
uccuccagguuuuuc

SEQ ID NO: 3721928 - RNA, 16 nt, Human
uccuccagguuuuuca

SEQ ID NO: 3721929 - RNA, 17 nt, Human
uccuccagguuuuucaa

SEQ ID NO: 3721930 - RNA, 21 nt, Human
uccuccagguuuuucaauuaa

SEQ ID NO: 3721931 - RNA, 23 nt, Human
uccuccagguuuuucaauuaaac

SEQ ID NO: 3721932 - RNA, 17 nt, Human
uccuccaguaccuugcu

SEQ ID NO: 3721933 - RNA, 17 nt, Human
uccuccaucgcaguguu

SEQ ID NO: 3721934 - RNA, 16 nt, Human
uccuccaucuccaaga

SEQ ID NO: 3721935 - RNA, 12 nt, Human
uccuccauggga

SEQ ID NO: 3721936 - RNA, 21 nt, Human
uccucccaauuucagacuccc

SEQ ID NO: 3721937 - RNA, 14 nt, Human
uccucccaccucag

SEQ ID NO: 3721938 - RNA, 16 nt, Human
uccucccaccucagcc

SEQ ID NO: 3721939 - RNA, 20 nt, Human
uccucccaccucagccuccc

SEQ ID NO: 3721940 - RNA, 23 nt, Human
uccucccaggguuuuaacuuugu

SEQ ID NO: 3721941 - RNA, 20 nt, Human
uccucccauagauacucucu

SEQ ID NO: 3721942 - RNA, 13 nt, Human
uccucccaucccc

SEQ ID NO: 3721943 - RNA, 15 nt, Human
uccucccauccccug

SEQ ID NO: 3721944 - RNA, 18 nt, Human
uccucccauccccuggac

SEQ ID NO: 3721945 - RNA, 16 nt, Human
uccuccccaaaucaau

SEQ ID NO: 3721946 - RNA, 21 nt, Human
uccuccccccuccucugaaac

SEQ ID NO: 3721947 - RNA, 14 nt, Human
uccucccccugcca

SEQ ID NO: 3721948 - RNA, 20 nt, Human
uccucccccugccagugccu

SEQ ID NO: 3721949 - RNA, 16 nt, Human
uccuccccucacagcc

SEQ ID NO: 3721950 - RNA, 17 nt, Human
uccuccccucacagccu

SEQ ID NO: 3721951 - RNA, 18 nt, Human
uccuccccuccuccugga

SEQ ID NO: 3721952 - RNA, 17 nt, Human
ucuagaauuauuuuuca

SEQ ID NO: 3721953 - RNA, 19 nt, Human
ucuagaauuauuuuucacu

SEQ ID NO: 3721954 - RNA, 13 nt, Human
ucuagacaagaua

SEQ ID NO: 3721955 - RNA, 17 nt, Human
ucuagacaagauauugu

SEQ ID NO: 3721956 - RNA, 23 nt, Human
ucuagacacuuuuucuuuacaaa

SEQ ID NO: 3721957 - RNA, 18 nt, Human
ucuagacauggagguucu

SEQ ID NO: 3721958 - RNA, 19 nt, Human
ucuagacauggagguucua

SEQ ID NO: 3721959 - RNA, 22 nt, Human
ucuagacauggagguucuaagg

SEQ ID NO: 3721960 - RNA, 16 nt, Human
ucuagacuauaaaugu

SEQ ID NO: 3721961 - RNA, 24 nt, Human
ucuagacucaagguucccagagau

SEQ ID NO: 3721962 - RNA, 14 nt, Human
ucuagagagggaau

SEQ ID NO: 3721963 - RNA, 22 nt, Human
ucuagagagggaauucucuugg

SEQ ID NO: 3721964 - RNA, 13 nt, Human
ucuagagagggag

SEQ ID NO: 3721965 - RNA, 15 nt, Human
ucuagagcacugcca

SEQ ID NO: 3721966 - RNA, 19 nt, Human
ucuagagccugcuggaucu

SEQ ID NO: 3721967 - RNA, 12 nt, Human
ucuagagccuuc

SEQ ID NO: 3721968 - RNA, 23 nt, Human
ucuagaggccugaaauccugguu

SEQ ID NO: 3721969 - RNA, 21 nt, Human
ucuagaggcuuccuucauuuc

SEQ ID NO: 3721970 - RNA, 13 nt, Human
ucuagaguccaag

SEQ ID NO: 3721971 - RNA, 15 nt, Human
ucuagaguccaaggu

SEQ ID NO: 3721972 - RNA, 14 nt, Human
ucuagaguucagag

SEQ ID NO: 3721973 - RNA, 16 nt, Human
ucuagauacaauaaau

SEQ ID NO: 3721974 - RNA, 20 nt, Human
ucuagauacaauaaauugcu

SEQ ID NO: 3721975 - RNA, 24 nt, Human
ucuagauacuguaucaugacaaag

SEQ ID NO: 3721976 - RNA, 21 nt, Human
ucuagaucagaugcuccaaga

SEQ ID NO: 3721977 - RNA, 14 nt, Human
ucuagaucauaagg

SEQ ID NO: 3721978 - RNA, 20 nt, Human
ucuagaugaaguuuuacauu

SEQ ID NO: 3721979 - RNA, 16 nt, Human
ucuagaugagcugggc

SEQ ID NO: 3721980 - RNA, 22 nt, Human
ucuagaugauuuuuugaaaguu

SEQ ID NO: 3721981 - RNA, 11 nt, Human
ucuagauguaa

SEQ ID NO: 3721982 - RNA, 17 nt, Human
ucuagauucaaagguuc

SEQ ID NO: 3721983 - RNA, 20 nt, Human
ucuagauucaaagguucuag

SEQ ID NO: 3721984 - RNA, 14 nt, Human
ucuagcacuggccu

SEQ ID NO: 3721985 - RNA, 15 nt, Human
ucuagcacuuccuug

SEQ ID NO: 3721986 - RNA, 17 nt, Human
ucuagcacuuccuugcc

SEQ ID NO: 3721987 - RNA, 17 nt, Human
ucuagcauggcauauuu

SEQ ID NO: 3721988 - RNA, 23 nt, Human
ucuagcauggcauauuuuucaca

SEQ ID NO: 3721989 - RNA, 18 nt, Human
ucuagcauggcugccaau

SEQ ID NO: 3721990 - RNA, 23 nt, Human
ucuagccacuuuggucccgugca

SEQ ID NO: 3721991 - RNA, 14 nt, Human
ucuagccugcacuu

SEQ ID NO: 3721992 - RNA, 13 nt, Human
ucuagccuggcua

SEQ ID NO: 3721993 - RNA, 16 nt, Human
ucuagcuagaaauaug

SEQ ID NO: 3721994 - RNA, 19 nt, Human
ucuagcuaugcuguaucug

SEQ ID NO: 3721995 - RNA, 17 nt, Human
ucuagcuggugguuuca

SEQ ID NO: 3721996 - RNA, 19 nt, Human
ucuagcuguugagcuguuu

SEQ ID NO: 3721997 - RNA, 16 nt, Human
ucuagcuuuguuuagu

SEQ ID NO: 3721998 - RNA, 14 nt, Human
ucuaggaaaauuau

SEQ ID NO: 3721999 - RNA, 15 nt, Human
ucuaggaaauauacu

SEQ ID NO: 3722000 - RNA, 17 nt, Human
ucuaggaaauauuuauu

SEQ ID NO: 3722001 - RNA, 20 nt, Human
ucuaggaagaauuuuaaaaa

SEQ ID NO: 3722002 - RNA, 22 nt, Human
ucuaggaagaauuuuaaaaaug

SEQ ID NO: 3722003 - RNA, 15 nt, Human
ucuaggaagacauuu

SEQ ID NO: 3722004 - RNA, 12 nt, Human
ucuaggaagacu

SEQ ID NO: 3722005 - RNA, 13 nt, Human
ucuaggacacagu

SEQ ID NO: 3722006 - RNA, 16 nt, Human
ucuaggacugaauuau

SEQ ID NO: 3722007 - RNA, 14 nt, Human
ucuaggauagcuaa

SEQ ID NO: 3722008 - RNA, 22 nt, Human
ucuaggcacuguaguucuaaga

SEQ ID NO: 3722009 - RNA, 21 nt, Human
ucuaggcaguucaaagcagga

SEQ ID NO: 3722010 - RNA, 18 nt, Human
ucuaggcaucccagggga

SEQ ID NO: 3722011 - RNA, 15 nt, Human
ucuaggccucuccag

SEQ ID NO: 3722012 - RNA, 12 nt, Human
ucuaggcucugc

SEQ ID NO: 3722013 - RNA, 14 nt, Human
ucuaggcucugccu

SEQ ID NO: 3722014 - RNA, 22 nt, Human
ucuagggaaaaaccagcgugug

SEQ ID NO: 3722015 - RNA, 17 nt, Human
ucuagggaaaugaaaga

SEQ ID NO: 3722016 - RNA, 23 nt, Human
ucuagggaaggccaccugcaggu

SEQ ID NO: 3722017 - RNA, 17 nt, Human
ucuagggaccagaacca

SEQ ID NO: 3722018 - RNA, 18 nt, Human
ucuagggaccccuccucc

SEQ ID NO: 3722019 - RNA, 13 nt, Human
ucuagggcuggga

SEQ ID NO: 3722020 - RNA, 17 nt, Human
ucuaggguugcuggagc

SEQ ID NO: 3722021 - RNA, 13 nt, Human
ucuagguaauuuu

SEQ ID NO: 3722022 - RNA, 20 nt, Human
ucuagguaggggcccacuuc

SEQ ID NO: 3722023 - RNA, 17 nt, Human
ucuagguagugcccuau

SEQ ID NO: 3722024 - RNA, 16 nt, Human
ucuaggucaaggccug

SEQ ID NO: 3722025 - RNA, 20 nt, Human
ucuaggucaguacccaccug

SEQ ID NO: 3722026 - RNA, 15 nt, Human
ucuagguccccauac

SEQ ID NO: 3722027 - RNA, 19 nt, Human
ucuagguggaguugaaaga

SEQ ID NO: 3722028 - RNA, 17 nt, Human
ucuagguggcaaggcug

SEQ ID NO: 3722029 - RNA, 17 nt, Human
ucuagguuuaugacagu

SEQ ID NO: 3722030 - RNA, 15 nt, Human
ucuaguaauaaagac

SEQ ID NO: 3722031 - RNA, 13 nt, Human
ucuaguacuguga

SEQ ID NO: 3722032 - RNA, 22 nt, Human
ucuaguacuugggagaccugua

SEQ ID NO: 3722033 - RNA, 20 nt, Human
ucuagucaaugacaugaauu

SEQ ID NO: 3722034 - RNA, 22 nt, Human
ucuagucaaugacaugaauuuu

SEQ ID NO: 3722035 - RNA, 20 nt, Human
ucuagugcagcugaaauuga

SEQ ID NO: 3722036 - RNA, 16 nt, Human
ucuagugcagcugauu

SEQ ID NO: 3722037 - RNA, 23 nt, Human
ucuagugcagcugauuuuaacaa

SEQ ID NO: 3722038 - RNA, 14 nt, Human
ucuagugcccucca

SEQ ID NO: 3722039 - RNA, 20 nt, Human
ucuagugcccuccacagccg

SEQ ID NO: 3722040 - RNA, 14 nt, Human
ucuagugccuucua

SEQ ID NO: 3722041 - RNA, 23 nt, Human
ucuagugccuucuaaagguguug

SEQ ID NO: 3722042 - RNA, 13 nt, Human
ucuagugcuguga

SEQ ID NO: 3722043 - RNA, 14 nt, Human
ucuagugcugugaa

SEQ ID NO: 3722044 - RNA, 16 nt, Human
ucuagugcugugaaaa

SEQ ID NO: 3722045 - RNA, 19 nt, Human
ucuagugcugugaaaaaaa

SEQ ID NO: 3722046 - RNA, 12 nt, Human
ucuagugggaag

SEQ ID NO: 3722047 - RNA, 13 nt, Human
ucuagugggacag

SEQ ID NO: 3722048 - RNA, 15 nt, Human
ucuagugggacagcc

SEQ ID NO: 3722049 - RNA, 24 nt, Human
ucuagugggacagcccagagccug

SEQ ID NO: 3722050 - RNA, 15 nt, Human
ucuaguggucuuugu

SEQ ID NO: 3722051 - RNA, 23 nt, Human
ucuaguggucuuuguaagagugu

SEQ ID NO: 3722052 - RNA, 14 nt, Human
ucuaguguaucaaa

SEQ ID NO: 3722053 - RNA, 16 nt, Human
ucuaguguaucaaaau

SEQ ID NO: 3722054 - RNA, 22 nt, Human
ucuaguguaucaaaaugcucuu

SEQ ID NO: 3722055 - RNA, 16 nt, Human
ucuaguuauuuauucu

SEQ ID NO: 3722056 - RNA, 12 nt, Human
ucuaguucacuc

SEQ ID NO: 3722057 - RNA, 19 nt, Human
ucuaguucacucuccauuu

SEQ ID NO: 3722058 - RNA, 21 nt, Human
ucuaguuccccuguuuauuca

SEQ ID NO: 3722059 - RNA, 17 nt, Human
ucuaguucugccaggag

SEQ ID NO: 3722060 - RNA, 14 nt, Human
ucuaguugaggagu

SEQ ID NO: 3722061 - RNA, 20 nt, Human
ucuaguugaggaguuuccua

SEQ ID NO: 3722062 - RNA, 21 nt, Human
ucuaguugaggaguuuccuaa

SEQ ID NO: 3722063 - RNA, 14 nt, Human
ucuaguuuacagaa

SEQ ID NO: 3722064 - RNA, 13 nt, Human
ucuaguuucccac

SEQ ID NO: 3722065 - RNA, 15 nt, Human
ucuaguuugcauucc

SEQ ID NO: 3722066 - RNA, 12 nt, Human
ucuaguuuucag

SEQ ID NO: 3722067 - RNA, 17 nt, Human
ucuaguuuucaguuugu

SEQ ID NO: 3722068 - RNA, 13 nt, Human
ucuaguuuuguca

SEQ ID NO: 3722069 - RNA, 20 nt, Human
ucuaguuuuuucuuccuuuu

SEQ ID NO: 3722070 - RNA, 22 nt, Human
ucuaguuuuuucuuccuuuuca

SEQ ID NO: 3722071 - RNA, 15 nt, Human
ucuauaaaaaauaug

SEQ ID NO: 3722072 - RNA, 15 nt, Human
ucuauaaacacuguu

SEQ ID NO: 3722073 - RNA, 20 nt, Human
ucuauaaagaagaacuugca

SEQ ID NO: 3722074 - RNA, 20 nt, Human
ucuauaaagcgauauacaga

SEQ ID NO: 3722075 - RNA, 13 nt, Human
ucuauaaauaacc

SEQ ID NO: 3722076 - RNA, 23 nt, Human
ucuauaacaaaggauacuuauuu

SEQ ID NO: 3722077 - RNA, 15 nt, Human
ucuauaacaugcauu

SEQ ID NO: 3722078 - RNA, 21 nt, Human
ucuauaagcaaauugcuuuuu

SEQ ID NO: 3722079 - RNA, 16 nt, Human
ucuauaaggccauaaa

SEQ ID NO: 3722080 - RNA, 21 nt, Human
ucuauaauauuuguguguuca

SEQ ID NO: 3722081 - RNA, 13 nt, Human
ucuauaauuuaaa

SEQ ID NO: 3722082 - RNA, 12 nt, Human
ucuauaauuuac

SEQ ID NO: 3722083 - RNA, 19 nt, Human
ucuauaauuuccauuuacu

SEQ ID NO: 3722084 - RNA, 22 nt, Human
ucuauaauuuccauuuacuuaa

SEQ ID NO: 3722085 - RNA, 18 nt, Human
ucuauacaucucucccca

SEQ ID NO: 3722086 - RNA, 16 nt, Human
ucuauaccaauaaagu

SEQ ID NO: 3722087 - RNA, 17 nt, Human
ucuauacccacccagaa

SEQ ID NO: 3722088 - RNA, 20 nt, Human
ucuauaccugucuccuuucu

SEQ ID NO: 3722089 - RNA, 15 nt, Human
ucuauacuugcuuug

SEQ ID NO: 3722090 - RNA, 12 nt, Human
ucuauagaaagu

SEQ ID NO: 3722091 - RNA, 19 nt, Human
ucuauagaaaguguucugu

SEQ ID NO: 3722092 - RNA, 22 nt, Human
ucuauagaaaguguucuguuac

SEQ ID NO: 3722093 - RNA, 13 nt, Human
ucuauagacucua

SEQ ID NO: 3722094 - RNA, 17 nt, Human
ucuauagcaccagggcu

SEQ ID NO: 3722095 - RNA, 19 nt, Human
ucuauagcaucacuuaaaa

SEQ ID NO: 3722096 - RNA, 21 nt, Human
ucuauaggaacauaugaaaau

SEQ ID NO: 3722097 - RNA, 18 nt, Human
ucuauaguagacacacua

SEQ ID NO: 3722098 - RNA, 16 nt, Human
ucuauauauguguaug

SEQ ID NO: 3722099 - RNA, 13 nt, Human
ucuauauguacuu

SEQ ID NO: 3722100 - RNA, 20 nt, Human
ucuauauguacuugucaaag

SEQ ID NO: 3722101 - RNA, 18 nt, Human
ucuauauguuuaaaagua

SEQ ID NO: 3722102 - RNA, 16 nt, Human
ggaggcccuccugugc

SEQ ID NO: 3722103 - RNA, 18 nt, Human
ggaggccgggugcucagg

SEQ ID NO: 3722104 - RNA, 13 nt, Human
ggaggccucaggu

SEQ ID NO: 3722105 - RNA, 16 nt, Human
ggaggccucaggugcu

SEQ ID NO: 3722106 - RNA, 17 nt, Human
ggaggccucaggugcug

SEQ ID NO: 3722107 - RNA, 19 nt, Human
ggaggccugcgacccuggg

SEQ ID NO: 3722108 - RNA, 21 nt, Human
ggaggccugcgacccuggggg

SEQ ID NO: 3722109 - RNA, 17 nt, Human
ggaggccuuccagcugc

SEQ ID NO: 3722110 - RNA, 21 nt, Human
ggaggccuuccagcugcuguc

SEQ ID NO: 3722111 - RNA, 17 nt, Human
ggaggccuuccagggac

SEQ ID NO: 3722112 - RNA, 20 nt, Human
ggaggccuugggcucugcug

SEQ ID NO: 3722113 - RNA, 23 nt, Human
ggaggcgcccuuggcuucuguga

SEQ ID NO: 3722114 - RNA, 12 nt, Human
ggaggcgcgagc

SEQ ID NO: 3722115 - RNA, 20 nt, Human
ggaggcggaccuuguaguga

SEQ ID NO: 3722116 - RNA, 20 nt, Human
ggaggcggcacuccaaccua

SEQ ID NO: 3722117 - RNA, 16 nt, Human
ggaggcggugcggcag

SEQ ID NO: 3722118 - RNA, 15 nt, Human
ggaggcuccaggcag

SEQ ID NO: 3722119 - RNA, 21 nt, Human
ggaggcucuggagcccacugu

SEQ ID NO: 3722120 - RNA, 14 nt, Human
ggaggcugagacag

SEQ ID NO: 3722121 - RNA, 18 nt, Human
ggaggcugaggcagaaga

SEQ ID NO: 3722122 - RNA, 17 nt, Human
ggaggcugcgugccagu

SEQ ID NO: 3722123 - RNA, 11 nt, Human
ggaggcugcuc

SEQ ID NO: 3722124 - RNA, 14 nt, Human
ggaggcugcucggg

SEQ ID NO: 3722125 - RNA, 22 nt, Human
ggaggcugcucggggugcacag

SEQ ID NO: 3722126 - RNA, 13 nt, Human
ggaggcuggcagg

SEQ ID NO: 3722127 - RNA, 16 nt, Human
ggaggcuggcuggggc

SEQ ID NO: 3722128 - RNA, 15 nt, Human
ggaggcuuccugcgu

SEQ ID NO: 3722129 - RNA, 20 nt, Human
ggaggcuugucagagcuggg

SEQ ID NO: 3722130 - RNA, 22 nt, Human
ggaggcuugucagagcugggag

SEQ ID NO: 3722131 - RNA, 19 nt, Human
ggagggaaaagggaaguag

SEQ ID NO: 3722132 - RNA, 15 nt, Human
ggagggaagagugga

SEQ ID NO: 3722133 - RNA, 20 nt, Human
ggagggaagaguggaggugg

SEQ ID NO: 3722134 - RNA, 16 nt, Human
ggagggaagggagcca

SEQ ID NO: 3722135 - RNA, 17 nt, Human
ggagggaagggagccaa

SEQ ID NO: 3722136 - RNA, 15 nt, Human
ggagggaauugaggu

SEQ ID NO: 3722137 - RNA, 17 nt, Human
ggagggaauugaggucu

SEQ ID NO: 3722138 - RNA, 13 nt, Human
ggagggagaggga

SEQ ID NO: 3722139 - RNA, 13 nt, Human
ggagggagaugga

SEQ ID NO: 3722140 - RNA, 16 nt, Human
ggagggaggcucaggu

SEQ ID NO: 3722141 - RNA, 20 nt, Human
ggagggauagaggggggcug

SEQ ID NO: 3722142 - RNA, 17 nt, Human
ggagggauucugguucc

SEQ ID NO: 3722143 - RNA, 21 nt, Human
ggagggcacaggugucugccc

SEQ ID NO: 3722144 - RNA, 14 nt, Human
ggagggcagagcug

SEQ ID NO: 3722145 - RNA, 16 nt, Human
ggagggcagcagggcu

SEQ ID NO: 3722146 - RNA, 21 nt, Human
ggagggccguaccccacccuc

SEQ ID NO: 3722147 - RNA, 13 nt, Human
ggagggccugggc

SEQ ID NO: 3722148 - RNA, 16 nt, Human
ggagggccugggccug

SEQ ID NO: 3722149 - RNA, 21 nt, Human
ggagggcggcaggggccugga

SEQ ID NO: 3722150 - RNA, 19 nt, Human
ggagggcuagaaccuggag

SEQ ID NO: 3722151 - RNA, 20 nt, Human
ggagggcuagaaccuggaga

SEQ ID NO: 3722152 - RNA, 13 nt, Human
ggagggcuccaga

SEQ ID NO: 3722153 - RNA, 15 nt, Human
ggagggcuccagaca

SEQ ID NO: 3722154 - RNA, 12 nt, Human
ggagggcucuga

SEQ ID NO: 3722155 - RNA, 14 nt, Human
ggagggcucugagg

SEQ ID NO: 3722156 - RNA, 15 nt, Human
ggagggcucugaggc

SEQ ID NO: 3722157 - RNA, 14 nt, Human
ggagggcuggaauc

SEQ ID NO: 3722158 - RNA, 16 nt, Human
ggagggcuggaaucug

SEQ ID NO: 3722159 - RNA, 22 nt, Human
ggagggcugucaucugugcacu

SEQ ID NO: 3722160 - RNA, 17 nt, Human
ggaggggaaaaaaaugu

SEQ ID NO: 3722161 - RNA, 13 nt, Human
ggaggggacgcug

SEQ ID NO: 3722162 - RNA, 21 nt, Human
ggaggggacuauuuaugaagg

SEQ ID NO: 3722163 - RNA, 16 nt, Human
ggaggggagacuuuga

SEQ ID NO: 3722164 - RNA, 19 nt, Human
ggaggggagcaugggaagu

SEQ ID NO: 3722165 - RNA, 11 nt, Human
ggaggggagcu

SEQ ID NO: 3722166 - RNA, 13 nt, Human
ggaggggaggggg

SEQ ID NO: 3722167 - RNA, 12 nt, Human
ggaggggcagag

SEQ ID NO: 3722168 - RNA, 13 nt, Human
ggaggggcagagc

SEQ ID NO: 3722169 - RNA, 16 nt, Human
ggaggggcagagccag

SEQ ID NO: 3722170 - RNA, 13 nt, Human
ggaggggccccug

SEQ ID NO: 3722171 - RNA, 13 nt, Human
ggaggggcccgcu

SEQ ID NO: 3722172 - RNA, 23 nt, Human
ggaggggcccgcuugccucggcu

SEQ ID NO: 3722173 - RNA, 21 nt, Human
ggaggggccuggcagccgugc

SEQ ID NO: 3722174 - RNA, 16 nt, Human
ggaggggcgcuggccc

SEQ ID NO: 3722175 - RNA, 18 nt, Human
ggaggggcuccuuuccau

SEQ ID NO: 3722176 - RNA, 14 nt, Human
ggagggggaauggc

SEQ ID NO: 3722177 - RNA, 19 nt, Human
ggagggggaauggcagcag

SEQ ID NO: 3722178 - RNA, 18 nt, Human
ggagggggaauguaguga

SEQ ID NO: 3722179 - RNA, 15 nt, Human
ggagggggagggggu

SEQ ID NO: 3722180 - RNA, 18 nt, Human
ggagggggcuugaagcca

SEQ ID NO: 3722181 - RNA, 18 nt, Human
ggaggggguugggguggu

SEQ ID NO: 3722182 - RNA, 18 nt, Human
ggaggggguuugggggcu

SEQ ID NO: 3722183 - RNA, 15 nt, Human
ggagggguaggggcu

SEQ ID NO: 3722184 - RNA, 16 nt, Human
ggagggguaggggcug

SEQ ID NO: 3722185 - RNA, 17 nt, Human
ggaggggugguccugac

SEQ ID NO: 3722186 - RNA, 14 nt, Human
ggagggucaggaag

SEQ ID NO: 3722187 - RNA, 14 nt, Human
ggagggucccaagc

SEQ ID NO: 3722188 - RNA, 21 nt, Human
ggagggucccaagcugggccc

SEQ ID NO: 3722189 - RNA, 14 nt, Human
ggagggugggaagg

SEQ ID NO: 3722190 - RNA, 20 nt, Human
ggagggugggggccaccugc

SEQ ID NO: 3722191 - RNA, 17 nt, Human
ggaggucacuggaaagg

SEQ ID NO: 3722192 - RNA, 21 nt, Human
ggaggucacuggaaaggggag

SEQ ID NO: 3722193 - RNA, 20 nt, Human
ggagguccuuaggccucuga

SEQ ID NO: 3722194 - RNA, 16 nt, Human
ggaggucgaggcagga

SEQ ID NO: 3722195 - RNA, 14 nt, Human
ggaggugaccccag

SEQ ID NO: 3722196 - RNA, 13 nt, Human
ggaggugccugga

SEQ ID NO: 3722197 - RNA, 22 nt, Human
ggaggugcuuaagcagaagcau

SEQ ID NO: 3722198 - RNA, 20 nt, Human
ggagguggaagaagggagaa

SEQ ID NO: 3722199 - RNA, 20 nt, Human
ggagguggaggcugcaguga

SEQ ID NO: 3722200 - RNA, 20 nt, Human
ggagguggagguugcaguga

SEQ ID NO: 3722201 - RNA, 20 nt, Human
ggagguggagguugcauuga

SEQ ID NO: 3722202 - RNA, 15 nt, Human
ggagguggcagcccu

SEQ ID NO: 3722203 - RNA, 13 nt, Human
ggagguggcuggg

SEQ ID NO: 3722204 - RNA, 19 nt, Human
ggaggugggagcaggagau

SEQ ID NO: 3722205 - RNA, 23 nt, Human
ggaggugggauccuccaggugca

SEQ ID NO: 3722206 - RNA, 19 nt, Human
ggagguggggcgaggcagg

SEQ ID NO: 3722207 - RNA, 16 nt, Human
ggaggugucaggcugc

SEQ ID NO: 3722208 - RNA, 20 nt, Human
ggaggugucucaggcugccu

SEQ ID NO: 3722209 - RNA, 22 nt, Human
ggaggugucucaggcugccuga

SEQ ID NO: 3722210 - RNA, 16 nt, Human
ggaggugucuguauca

SEQ ID NO: 3722211 - RNA, 17 nt, Human
ggaggugugaggcagga

SEQ ID NO: 3722212 - RNA, 18 nt, Human
ggagguguggagccgagg

SEQ ID NO: 3722213 - RNA, 9 nt, Human
ggagguucc

SEQ ID NO: 3722214 - RNA, 12 nt, Human
ggagguucuaag

SEQ ID NO: 3722215 - RNA, 16 nt, Human
ggagguugaagccaag

SEQ ID NO: 3722216 - RNA, 14 nt, Human
ggagguugcaguga

SEQ ID NO: 3722217 - RNA, 14 nt, Human
ggagguuugucggg

SEQ ID NO: 3722218 - RNA, 17 nt, Human
ggaguaaccgcuccagg

SEQ ID NO: 3722219 - RNA, 21 nt, Human
ggaguaauaguaaacacaggg

SEQ ID NO: 3722220 - RNA, 18 nt, Human
ggaguaaucuguguacaa

SEQ ID NO: 3722221 - RNA, 15 nt, Human
ggaguagcugagcuc

SEQ ID NO: 3722222 - RNA, 16 nt, Human
ggaguagcugagcuca

SEQ ID NO: 3722223 - RNA, 20 nt, Human
ggaguagugaagacuccaga

SEQ ID NO: 3722224 - RNA, 13 nt, Human
ggaguaucuggga

SEQ ID NO: 3722225 - RNA, 15 nt, Human
ggaguaucugggaac

SEQ ID NO: 3722226 - RNA, 17 nt, Human
ggaguaugucugaugga

SEQ ID NO: 3722227 - RNA, 21 nt, Human
ggagucacacaguguuggagg

SEQ ID NO: 3722228 - RNA, 14 nt, Human
ggagucacugagac

SEQ ID NO: 3722229 - RNA, 15 nt, Human
ggagucagccaggag

SEQ ID NO: 3722230 - RNA, 18 nt, Human
ggagucagccaggagcug

SEQ ID NO: 3722231 - RNA, 17 nt, Human
ggagucaucucaaccau

SEQ ID NO: 3722232 - RNA, 16 nt, Human
ggagucauuucugauu

SEQ ID NO: 3722233 - RNA, 21 nt, Human
ggagucauuugagucucuuaa

SEQ ID NO: 3722234 - RNA, 17 nt, Human
ggaguccaggcacagga

SEQ ID NO: 3722235 - RNA, 21 nt, Human
ggagucccaccuuggcugcag

SEQ ID NO: 3722236 - RNA, 23 nt, Human
ggagucccaccuuggcugcaggg

SEQ ID NO: 3722237 - RNA, 15 nt, Human
ggagucccgucagga

SEQ ID NO: 3722238 - RNA, 21 nt, Human
ggagucuccagugguugcugu

SEQ ID NO: 3722239 - RNA, 21 nt, Human
ggagugaaaccuuuagggcag

SEQ ID NO: 3722240 - RNA, 22 nt, Human
ggagugaaaccuuuagggcagc

SEQ ID NO: 3722241 - RNA, 17 nt, Human
ggagugaagaggggcag

SEQ ID NO: 3722242 - RNA, 19 nt, Human
ggagugaagaggggcagcc

SEQ ID NO: 3722243 - RNA, 17 nt, Human
ggagugacagaggcagc

SEQ ID NO: 3722244 - RNA, 19 nt, Human
ggagugagaggucucucuu

SEQ ID NO: 3722245 - RNA, 15 nt, Human
ggagugagaugccug

SEQ ID NO: 3722246 - RNA, 14 nt, Human
ggagugagcugguu

SEQ ID NO: 3722247 - RNA, 21 nt, Human
ggagugaggaaggcaggaaga

SEQ ID NO: 3722248 - RNA, 21 nt, Human
ggagugaggaauaguugagcc

SEQ ID NO: 3722249 - RNA, 15 nt, Human
ggagugaguggcccu

SEQ ID NO: 3722250 - RNA, 21 nt, Human
ggagugaguguggcuccccuc

SEQ ID NO: 3722251 - RNA, 15 nt, Human
ggagugcagggagga

SEQ ID NO: 3722252 - RNA, 15 nt, Human
ggagugcagugagcc

SEQ ID NO: 3722253 - RNA, 14 nt, Human
aagacucaguguuc

SEQ ID NO: 3722254 - RNA, 17 nt, Human
aagacucauucuucugu

SEQ ID NO: 3722255 - RNA, 14 nt, Human
aagacuccaaagaa

SEQ ID NO: 3722256 - RNA, 16 nt, Human
aagacuccaaagaaau

SEQ ID NO: 3722257 - RNA, 14 nt, Human
aagacuccagaaau

SEQ ID NO: 3722258 - RNA, 14 nt, Human
aagacuccuagcug

SEQ ID NO: 3722259 - RNA, 17 nt, Human
aagacucuauucucaaa

SEQ ID NO: 3722260 - RNA, 22 nt, Human
aagacucuugggagggaguuac

SEQ ID NO: 3722261 - RNA, 19 nt, Human
aagacugagcaccugcuuc

SEQ ID NO: 3722262 - RNA, 21 nt, Human
aagacugcuguggccaggagg

SEQ ID NO: 3722263 - RNA, 22 nt, Human
aagacugcuguggccaggaggu

SEQ ID NO: 3722264 - RNA, 20 nt, Human
aagacuggaagcuaauuugc

SEQ ID NO: 3722265 - RNA, 22 nt, Human
aagacuggaagcuaauuugcau

SEQ ID NO: 3722266 - RNA, 21 nt, Human
aagacuggaagguggggacag

SEQ ID NO: 3722267 - RNA, 16 nt, Human
aagacugguuuucugc

SEQ ID NO: 3722268 - RNA, 20 nt, Human
aagacugguuuucugccaau

SEQ ID NO: 3722269 - RNA, 16 nt, Human
aagacuguagauaugu

SEQ ID NO: 3722270 - RNA, 17 nt, Human
aagacuguagauaugua

SEQ ID NO: 3722271 - RNA, 16 nt, Human
aagacuguugcucaaa

SEQ ID NO: 3722272 - RNA, 14 nt, Human
aagacuuacucuaa

SEQ ID NO: 3722273 - RNA, 15 nt, Human
aagacuuacucuaag

SEQ ID NO: 3722274 - RNA, 17 nt, Human
aagacuuacucuaagau

SEQ ID NO: 3722275 - RNA, 12 nt, Human
aagacuucaaaa

SEQ ID NO: 3722276 - RNA, 21 nt, Human
aagacuucaaaauauugagca

SEQ ID NO: 3722277 - RNA, 18 nt, Human
aagacuucaguauguugu

SEQ ID NO: 3722278 - RNA, 22 nt, Human
aagacuucaguauguugucaaa

SEQ ID NO: 3722279 - RNA, 16 nt, Human
aagacuuggcaacaga

SEQ ID NO: 3722280 - RNA, 21 nt, Human
aagacuuuccccauacucugu

SEQ ID NO: 3722281 - RNA, 23 nt, Human
aagacuuuccccauacucugucu

SEQ ID NO: 3722282 - RNA, 16 nt, Human
aagacuuuggaaagac

SEQ ID NO: 3722283 - RNA, 20 nt, Human
aagacuuugggauaggaaaa

SEQ ID NO: 3722284 - RNA, 13 nt, Human
aagacuuugguua

SEQ ID NO: 3722285 - RNA, 23 nt, Human
aagacuuugguuauuuuacuuuu

SEQ ID NO: 3722286 - RNA, 17 nt, Human
aagacuuuuccaacccu

SEQ ID NO: 3722287 - RNA, 12 nt, Human
aagacuuuucuu

SEQ ID NO: 3722288 - RNA, 17 nt, Human
aagagaaaaagaaaugc

SEQ ID NO: 3722289 - RNA, 18 nt, Human
aagagaaaaagaaaugca

SEQ ID NO: 3722290 - RNA, 11 nt, Human
aagagaaaaga

SEQ ID NO: 3722291 - RNA, 13 nt, Human
aagagaaaauuga

SEQ ID NO: 3722292 - RNA, 15 nt, Human
aagagaaaauugaau

SEQ ID NO: 3722293 - RNA, 21 nt, Human
aagagaaacaggguguuguca

SEQ ID NO: 3722294 - RNA, 20 nt, Human
aagagaaacaguugguaacu

SEQ ID NO: 3722295 - RNA, 13 nt, Human
aagagaaacuucc

SEQ ID NO: 3722296 - RNA, 20 nt, Human
aagagaaacuuuauacauua

SEQ ID NO: 3722297 - RNA, 18 nt, Human
aagagaaagugauuucua

SEQ ID NO: 3722298 - RNA, 14 nt, Human
aagagaaaucucau

SEQ ID NO: 3722299 - RNA, 15 nt, Human
aagagaaaugagcug

SEQ ID NO: 3722300 - RNA, 20 nt, Human
aagagaacucgcgcucagua

SEQ ID NO: 3722301 - RNA, 21 nt, Human
aagagaacugaugacacugag

SEQ ID NO: 3722302 - RNA, 11 nt, Human
aagagaagaag

SEQ ID NO: 3722303 - RNA, 16 nt, Human
aagagaagaagaaaaa

SEQ ID NO: 3722304 - RNA, 17 nt, Human
aagagaagaagaaaaaa

SEQ ID NO: 3722305 - RNA, 18 nt, Human
aagagaagggcagggcug

SEQ ID NO: 3722306 - RNA, 21 nt, Human
aagagaaguuauuuucuacag

SEQ ID NO: 3722307 - RNA, 21 nt, Human
aagagaaguuguaaaguaugu

SEQ ID NO: 3722308 - RNA, 20 nt, Human
aagagaaugaugcucaaaau

SEQ ID NO: 3722309 - RNA, 14 nt, Human
aagagaauguuaua

SEQ ID NO: 3722310 - RNA, 15 nt, Human
aagagacagcccagg

SEQ ID NO: 3722311 - RNA, 16 nt, Human
aagagacagcccagga

SEQ ID NO: 3722312 - RNA, 22 nt, Human
aagagacaggagggcaagggcc

SEQ ID NO: 3722313 - RNA, 14 nt, Human
aagagacagucacc

SEQ ID NO: 3722314 - RNA, 17 nt, Human
aagagacaguuauuuau

SEQ ID NO: 3722315 - RNA, 18 nt, Human
aagagaccuaccucaggu

SEQ ID NO: 3722316 - RNA, 14 nt, Human
aagagacucagccu

SEQ ID NO: 3722317 - RNA, 15 nt, Human
aagagacucuggccu

SEQ ID NO: 3722318 - RNA, 18 nt, Human
aagagacuggagcaucug

SEQ ID NO: 3722319 - RNA, 13 nt, Human
aagagagaaaaua

SEQ ID NO: 3722320 - RNA, 17 nt, Human
aagagagaaaauaaaaa

SEQ ID NO: 3722321 - RNA, 20 nt, Human
aagagagaaaauaaaaaguu

SEQ ID NO: 3722322 - RNA, 13 nt, Human
aagagagaaacaa

SEQ ID NO: 3722323 - RNA, 14 nt, Human
aagagagaaagaag

SEQ ID NO: 3722324 - RNA, 21 nt, Human
aagagagaaagaaguaggcau

SEQ ID NO: 3722325 - RNA, 11 nt, Human
aagagagaaau

SEQ ID NO: 3722326 - RNA, 20 nt, Human
aagagagaaccuaacuguau

SEQ ID NO: 3722327 - RNA, 12 nt, Human
aagagagaaugu

SEQ ID NO: 3722328 - RNA, 19 nt, Human
aagagagagaaacaaacuu

SEQ ID NO: 3722329 - RNA, 20 nt, Human
aagagagagagagaaaaaaa

SEQ ID NO: 3722330 - RNA, 18 nt, Human
aagagagccugcaggauc

SEQ ID NO: 3722331 - RNA, 16 nt, Human
aagagagccuugguuc

SEQ ID NO: 3722332 - RNA, 19 nt, Human
aagagaggaugugcaagcg

SEQ ID NO: 3722333 - RNA, 21 nt, Human
aagagagggccaugcaauuca

SEQ ID NO: 3722334 - RNA, 11 nt, Human
aagagagguua

SEQ ID NO: 3722335 - RNA, 14 nt, Human
aagagagucauaaa

SEQ ID NO: 3722336 - RNA, 20 nt, Human
aagagagucauaaaccuuaa

SEQ ID NO: 3722337 - RNA, 21 nt, Human
aagagauauguagaaggcaca

SEQ ID NO: 3722338 - RNA, 16 nt, Human
aagagaucaggaagag

SEQ ID NO: 3722339 - RNA, 17 nt, Human
aagagauccaaagacuc

SEQ ID NO: 3722340 - RNA, 20 nt, Human
aagagaugaugaaaauauuu

SEQ ID NO: 3722341 - RNA, 15 nt, Human
aagagauuccugagc

SEQ ID NO: 3722342 - RNA, 19 nt, Human
aagagauugcuaauugcug

SEQ ID NO: 3722343 - RNA, 13 nt, Human
aagagauuucaag

SEQ ID NO: 3722344 - RNA, 14 nt, Human
aagagauuucaaga

SEQ ID NO: 3722345 - RNA, 15 nt, Human
aagagauuuuucaug

SEQ ID NO: 3722346 - RNA, 20 nt, Human
aagagcaaaagaauggcaga

SEQ ID NO: 3722347 - RNA, 12 nt, Human
aagagcacagcc

SEQ ID NO: 3722348 - RNA, 16 nt, Human
aagagcagccuguggc

SEQ ID NO: 3722349 - RNA, 18 nt, Human
aagagcagccuguggcau

SEQ ID NO: 3722350 - RNA, 17 nt, Human
aagagcaggacuccagg

SEQ ID NO: 3722351 - RNA, 14 nt, Human
aagagccaauggag

SEQ ID NO: 3722352 - RNA, 11 nt, Human
aagagccacag

SEQ ID NO: 3722353 - RNA, 9 nt, Human
aagagccau

SEQ ID NO: 3722354 - RNA, 19 nt, Human
aagagccauauaaguuuga

SEQ ID NO: 3722355 - RNA, 12 nt, Human
aagagcccaggc

SEQ ID NO: 3722356 - RNA, 14 nt, Human
aagagcccaggccu

SEQ ID NO: 3722357 - RNA, 12 nt, Human
aagagccccacu

SEQ ID NO: 3722358 - RNA, 13 nt, Human
aagagccccacuc

SEQ ID NO: 3722359 - RNA, 19 nt, Human
aagagccccacucucagag

SEQ ID NO: 3722360 - RNA, 14 nt, Human
aagagcccuugccu

SEQ ID NO: 3722361 - RNA, 19 nt, Human
aagagccggagccuccagc

SEQ ID NO: 3722362 - RNA, 20 nt, Human
aagagccugaucucuuccug

SEQ ID NO: 3722363 - RNA, 11 nt, Human
aagagccugga

SEQ ID NO: 3722364 - RNA, 21 nt, Human
aagagccuggagaagcugaug

SEQ ID NO: 3722365 - RNA, 14 nt, Human
aagagccuuaaaac

SEQ ID NO: 3722366 - RNA, 22 nt, Human
aagagccuugguguccaccugg

SEQ ID NO: 3722367 - RNA, 18 nt, Human
aagagcgagagaucaaag

SEQ ID NO: 3722368 - RNA, 16 nt, Human
aagagcuagcgcugcc

SEQ ID NO: 3722369 - RNA, 20 nt, Human
aagagcuagcgcugccgcac

SEQ ID NO: 3722370 - RNA, 16 nt, Human
aagagcuaggcagggu

SEQ ID NO: 3722371 - RNA, 20 nt, Human
aagagcuauugccaaccagu

SEQ ID NO: 3722372 - RNA, 13 nt, Human
aagagcucaggau

SEQ ID NO: 3722373 - RNA, 12 nt, Human
aagagcucuggu

SEQ ID NO: 3722374 - RNA, 18 nt, Human
aagagcugaggcaauucu

SEQ ID NO: 3722375 - RNA, 18 nt, Human
aagagcuguucacagcca

SEQ ID NO: 3722376 - RNA, 13 nt, Human
aagagcuuagaaa

SEQ ID NO: 3722377 - RNA, 13 nt, Human
aagagcuugcuuu

SEQ ID NO: 3722378 - RNA, 16 nt, Human
aagagcuugcuuugau

SEQ ID NO: 3722379 - RNA, 12 nt, Human
aagagcuuuccu

SEQ ID NO: 3722380 - RNA, 23 nt, Human
aagaggaaaacccucaagggcau

SEQ ID NO: 3722381 - RNA, 13 nt, Human
aagaggaaaauga

SEQ ID NO: 3722382 - RNA, 14 nt, Human
aagaggaaaaugaa

SEQ ID NO: 3722383 - RNA, 14 nt, Human
aagaggaaagaaug

SEQ ID NO: 3722384 - RNA, 15 nt, Human
aagaggaacugggcc

SEQ ID NO: 3722385 - RNA, 16 nt, Human
aagaggaacugggccu

SEQ ID NO: 3722386 - RNA, 22 nt, Human
aagaggacauaaugggguccug

SEQ ID NO: 3722387 - RNA, 22 nt, Human
aagaggacucgcuuguaaauac

SEQ ID NO: 3722388 - RNA, 16 nt, Human
aagaggaggaggaggg

SEQ ID NO: 3722389 - RNA, 21 nt, Human
aagaggaguuucgagguagag

SEQ ID NO: 3722390 - RNA, 19 nt, Human
aagaggaucuccuguccau

SEQ ID NO: 3722391 - RNA, 14 nt, Human
aagaggaugcugug

SEQ ID NO: 3722392 - RNA, 15 nt, Human
aagaggcaccaggaa

SEQ ID NO: 3722393 - RNA, 19 nt, Human
aagaggcagaaaauugcac

SEQ ID NO: 3722394 - RNA, 19 nt, Human
aagaggcaguugcccagcc

SEQ ID NO: 3722395 - RNA, 15 nt, Human
aagaggccaaugccc

SEQ ID NO: 3722396 - RNA, 18 nt, Human
aagaggccguggcugcug

SEQ ID NO: 3722397 - RNA, 18 nt, Human
aagaggcgggccagccag

SEQ ID NO: 3722398 - RNA, 21 nt, Human
aagaggcgggccagccaggcg

SEQ ID NO: 3722399 - RNA, 22 nt, Human
aagaggcgggccagccaggcgg

SEQ ID NO: 3722400 - RNA, 15 nt, Human
aagaggcugaggccu

SEQ ID NO: 3722401 - RNA, 17 nt, Human
aagaggcugcccuccug

SEQ ID NO: 3722402 - RNA, 12 nt, Human
aagaggcugcug

SEQ ID NO: 3722403 - RNA, 11 nt, Human
aagaggcuggu

SEQ ID NO: 3722404 - RNA, 17 nt, Human
aagaggcuggugcugug

SEQ ID NO: 3722405 - RNA, 13 nt, Human
uccuccccuuggg

SEQ ID NO: 3722406 - RNA, 19 nt, Human
uccucccgggcccucccuu

SEQ ID NO: 3722407 - RNA, 21 nt, Human
uccucccgggcccucccuugg

SEQ ID NO: 3722408 - RNA, 22 nt, Human
uccucccgggcccucccuugga

SEQ ID NO: 3722409 - RNA, 15 nt, Human
uccucccucagugcc

SEQ ID NO: 3722410 - RNA, 11 nt, Human
uccucccuccc

SEQ ID NO: 3722411 - RNA, 15 nt, Human
uccucccucccagcu

SEQ ID NO: 3722412 - RNA, 17 nt, Human
uccucccucccucuccg

SEQ ID NO: 3722413 - RNA, 19 nt, Human
uccucccuggcugcccugg

SEQ ID NO: 3722414 - RNA, 12 nt, Human
uccucccuguaa

SEQ ID NO: 3722415 - RNA, 15 nt, Human
uccucccuguaacuu

SEQ ID NO: 3722416 - RNA, 18 nt, Human
uccucccuuccuuuuccc

SEQ ID NO: 3722417 - RNA, 19 nt, Human
uccucccuuccuuuucccu

SEQ ID NO: 3722418 - RNA, 15 nt, Human
uccucccuucugcua

SEQ ID NO: 3722419 - RNA, 19 nt, Human
uccucccuuggguucugau

SEQ ID NO: 3722420 - RNA, 15 nt, Human
uccuccgaggccagu

SEQ ID NO: 3722421 - RNA, 18 nt, Human
uccuccgccuuaccagga

SEQ ID NO: 3722422 - RNA, 20 nt, Human
uccuccgguugcauacugga

SEQ ID NO: 3722423 - RNA, 17 nt, Human
uccuccgucaccucaga

SEQ ID NO: 3722424 - RNA, 16 nt, Human
uccuccguccagccgc

SEQ ID NO: 3722425 - RNA, 18 nt, Human
uccuccuccaccaccgcc

SEQ ID NO: 3722426 - RNA, 15 nt, Human
uccuccuccagggug

SEQ ID NO: 3722427 - RNA, 22 nt, Human
uccuccucggaaccgcucaccu

SEQ ID NO: 3722428 - RNA, 23 nt, Human
uccuccucggaaccgcucaccua

SEQ ID NO: 3722429 - RNA, 14 nt, Human
uccuccucuuucuc

SEQ ID NO: 3722430 - RNA, 16 nt, Human
uccuccucuuucucuc

SEQ ID NO: 3722431 - RNA, 16 nt, Human
uccuccugacacccca

SEQ ID NO: 3722432 - RNA, 23 nt, Human
uccuccugagugaucccauuucu

SEQ ID NO: 3722433 - RNA, 12 nt, Human
uccuccugccca

SEQ ID NO: 3722434 - RNA, 20 nt, Human
uccuccuggaaccuugcugu

SEQ ID NO: 3722435 - RNA, 22 nt, Human
uccuccuggaaccuugcugucc

SEQ ID NO: 3722436 - RNA, 13 nt, Human
uccuccuggacuc

SEQ ID NO: 3722437 - RNA, 13 nt, Human
uccuccuggcaga

SEQ ID NO: 3722438 - RNA, 16 nt, Human
uccuccugggcccucu

SEQ ID NO: 3722439 - RNA, 22 nt, Human
uccuccugggcccucucugcuc

SEQ ID NO: 3722440 - RNA, 16 nt, Human
uccuccuucacuguuu

SEQ ID NO: 3722441 - RNA, 19 nt, Human
uccuccuugucuuggcagc

SEQ ID NO: 3722442 - RNA, 17 nt, Human
uccuccuuuccuccucu

SEQ ID NO: 3722443 - RNA, 17 nt, Human
uccucgacaucacuguu

SEQ ID NO: 3722444 - RNA, 21 nt, Human
uccucgacaucacuguucaug

SEQ ID NO: 3722445 - RNA, 13 nt, Human
uccucgcaagcug

SEQ ID NO: 3722446 - RNA, 16 nt, Human
uccucgcaagcugggu

SEQ ID NO: 3722447 - RNA, 24 nt, Human
uccucgcagagaggccaggugcag

SEQ ID NO: 3722448 - RNA, 19 nt, Human
uccucggcccccuccaucg

SEQ ID NO: 3722449 - RNA, 20 nt, Human
uccucggcuggcuguccacc

SEQ ID NO: 3722450 - RNA, 15 nt, Human
uccucgguacuccca

SEQ ID NO: 3722451 - RNA, 15 nt, Human
uccucguuccuuucu

SEQ ID NO: 3722452 - RNA, 15 nt, Human
uccucguucucccug

SEQ ID NO: 3722453 - RNA, 16 nt, Human
uccucguucucccugg

SEQ ID NO: 3722454 - RNA, 18 nt, Human
uccucuacuaacaaucag

SEQ ID NO: 3722455 - RNA, 14 nt, Human
uccucuagaagcca

SEQ ID NO: 3722456 - RNA, 15 nt, Human
uccucuagcuguggg

SEQ ID NO: 3722457 - RNA, 22 nt, Human
uccucuagugaauguaggcugg

SEQ ID NO: 3722458 - RNA, 17 nt, Human
uccucuauacaucucuc

SEQ ID NO: 3722459 - RNA, 18 nt, Human
uccucucaaccaccuuuc

SEQ ID NO: 3722460 - RNA, 21 nt, Human
uccucucaaccaccuuucaga

SEQ ID NO: 3722461 - RNA, 13 nt, Human
uccucucacuccc

SEQ ID NO: 3722462 - RNA, 15 nt, Human
uccucucacucccca

SEQ ID NO: 3722463 - RNA, 14 nt, Human
uccucucaguguuu

SEQ ID NO: 3722464 - RNA, 19 nt, Human
uccucucauccuuuucucc

SEQ ID NO: 3722465 - RNA, 16 nt, Human
uccucuccacccuccc

SEQ ID NO: 3722466 - RNA, 13 nt, Human
uccucuccacugc

SEQ ID NO: 3722467 - RNA, 14 nt, Human
uccucuccacugcc

SEQ ID NO: 3722468 - RNA, 14 nt, Human
uccucuccaggcac

SEQ ID NO: 3722469 - RNA, 17 nt, Human
uccucucccaaguccac

SEQ ID NO: 3722470 - RNA, 20 nt, Human
uccucucccaucccccugcc

SEQ ID NO: 3722471 - RNA, 17 nt, Human
uccucucccauccuuga

SEQ ID NO: 3722472 - RNA, 19 nt, Human
uccucucccauugucccuc

SEQ ID NO: 3722473 - RNA, 14 nt, Human
uccucuccccagcc

SEQ ID NO: 3722474 - RNA, 16 nt, Human
uccucuccccagccca

SEQ ID NO: 3722475 - RNA, 18 nt, Human
uccucuccccagcccaga

SEQ ID NO: 3722476 - RNA, 11 nt, Human
uccucuccccu

SEQ ID NO: 3722477 - RNA, 13 nt, Human
uccucuccccucc

SEQ ID NO: 3722478 - RNA, 17 nt, Human
uccucuccccuccagcc

SEQ ID NO: 3722479 - RNA, 18 nt, Human
uccucuccccuccagccu

SEQ ID NO: 3722480 - RNA, 17 nt, Human
uccucuccuagccccug

SEQ ID NO: 3722481 - RNA, 14 nt, Human
uccucuccuggagg

SEQ ID NO: 3722482 - RNA, 16 nt, Human
uccucuccuggaggau

SEQ ID NO: 3722483 - RNA, 15 nt, Human
uccucuccuuccuug

SEQ ID NO: 3722484 - RNA, 17 nt, Human
uccucuccuuugaaacc

SEQ ID NO: 3722485 - RNA, 19 nt, Human
uccucucgcggcccucagu

SEQ ID NO: 3722486 - RNA, 14 nt, Human
uccucucuccagau

SEQ ID NO: 3722487 - RNA, 19 nt, Human
uccucucuccagauguuuc

SEQ ID NO: 3722488 - RNA, 16 nt, Human
uccucucucuguguua

SEQ ID NO: 3722489 - RNA, 14 nt, Human
uccucucugcccua

SEQ ID NO: 3722490 - RNA, 23 nt, Human
uccucucuggggcuguguuuuga

SEQ ID NO: 3722491 - RNA, 23 nt, Human
uccucucuuuguucucagcuccc

SEQ ID NO: 3722492 - RNA, 13 nt, Human
uccucugaaacag

SEQ ID NO: 3722493 - RNA, 17 nt, Human
uccucugaaacagcugc

SEQ ID NO: 3722494 - RNA, 18 nt, Human
uccucugacucagggcuc

SEQ ID NO: 3722495 - RNA, 17 nt, Human
uccucugagccuuggga

SEQ ID NO: 3722496 - RNA, 17 nt, Human
uccucugaucuccaugg

SEQ ID NO: 3722497 - RNA, 18 nt, Human
uccucugcagugccuugg

SEQ ID NO: 3722498 - RNA, 12 nt, Human
uccucugccacc

SEQ ID NO: 3722499 - RNA, 18 nt, Human
uccucugccaccuccccu

SEQ ID NO: 3722500 - RNA, 22 nt, Human
uccucugccaccuccccuaucc

SEQ ID NO: 3722501 - RNA, 23 nt, Human
uccucugccaccuccccuaucca

SEQ ID NO: 3722502 - RNA, 10 nt, Human
uccucugccu

SEQ ID NO: 3722503 - RNA, 12 nt, Human
uccucugccugc

SEQ ID NO: 3722504 - RNA, 19 nt, Human
uccucugcuaaauugaugu

SEQ ID NO: 3722505 - RNA, 12 nt, Human
uccucugcuccc

SEQ ID NO: 3722506 - RNA, 19 nt, Human
uccucugcucccccuuuuc

SEQ ID NO: 3722507 - RNA, 12 nt, Human
uccucugcugcu

SEQ ID NO: 3722508 - RNA, 15 nt, Human
uccucugcugcuggc

SEQ ID NO: 3722509 - RNA, 20 nt, Human
uccucugcuugccaucccuc

SEQ ID NO: 3722510 - RNA, 15 nt, Human
uccucugcuuugaaa

SEQ ID NO: 3722511 - RNA, 9 nt, Human
uccucuggc

SEQ ID NO: 3722512 - RNA, 13 nt, Human
uccucuguacaga

SEQ ID NO: 3722513 - RNA, 16 nt, Human
uccucuguacagagcc

SEQ ID NO: 3722514 - RNA, 21 nt, Human
uccucugucagucacagccac

SEQ ID NO: 3722515 - RNA, 13 nt, Human
uccucuguccagg

SEQ ID NO: 3722516 - RNA, 14 nt, Human
uccucuguccaggg

SEQ ID NO: 3722517 - RNA, 16 nt, Human
uccucuguccagggcc

SEQ ID NO: 3722518 - RNA, 17 nt, Human
uccucuguccugcuucu

SEQ ID NO: 3722519 - RNA, 12 nt, Human
uccucugucugc

SEQ ID NO: 3722520 - RNA, 18 nt, Human
uccucuguggugucugcc

SEQ ID NO: 3722521 - RNA, 21 nt, Human
uccucuguggugucugccugu

SEQ ID NO: 3722522 - RNA, 16 nt, Human
uccucuuaacuguggu

SEQ ID NO: 3722523 - RNA, 20 nt, Human
uccucuuagaagaauauugu

SEQ ID NO: 3722524 - RNA, 18 nt, Human
uccucuuccccuugcccu

SEQ ID NO: 3722525 - RNA, 16 nt, Human
uccucuucggcccuca

SEQ ID NO: 3722526 - RNA, 16 nt, Human
uccucuugacccugca

SEQ ID NO: 3722527 - RNA, 14 nt, Human
uccucuugcucaaa

SEQ ID NO: 3722528 - RNA, 19 nt, Human
uccucuuguccuacaauga

SEQ ID NO: 3722529 - RNA, 20 nt, Human
uccucuugugauuucuuuaa

SEQ ID NO: 3722530 - RNA, 15 nt, Human
uccucuuuaaaacaa

SEQ ID NO: 3722531 - RNA, 17 nt, Human
uccucuuuaaaacaaaa

SEQ ID NO: 3722532 - RNA, 21 nt, Human
uccucuuuagaguuagacugu

SEQ ID NO: 3722533 - RNA, 12 nt, Human
uccucuuucagc

SEQ ID NO: 3722534 - RNA, 18 nt, Human
uccucuuucagcuccuga

SEQ ID NO: 3722535 - RNA, 17 nt, Human
uccucuuucucucccca

SEQ ID NO: 3722536 - RNA, 23 nt, Human
uccucuuuuguuguuucuuaauu

SEQ ID NO: 3722537 - RNA, 21 nt, Human
uccucuuuuuccaucauaauu

SEQ ID NO: 3722538 - RNA, 17 nt, Human
uccugaaacgcuccuuu

SEQ ID NO: 3722539 - RNA, 14 nt, Human
uccugaaacuauau

SEQ ID NO: 3722540 - RNA, 15 nt, Human
uccugaacagcaugg

SEQ ID NO: 3722541 - RNA, 18 nt, Human
uccugaacagcauggcac

SEQ ID NO: 3722542 - RNA, 22 nt, Human
uccugaacagcauggcacuccc

SEQ ID NO: 3722543 - RNA, 17 nt, Human
uccugaaccgcacagcu

SEQ ID NO: 3722544 - RNA, 21 nt, Human
uccugaaccgcacagcucagg

SEQ ID NO: 3722545 - RNA, 16 nt, Human
uccugaaccugaugcu

SEQ ID NO: 3722546 - RNA, 19 nt, Human
uccugaacucuucugcaaa

SEQ ID NO: 3722547 - RNA, 13 nt, Human
uccugaagaacca

SEQ ID NO: 3722548 - RNA, 23 nt, Human
uccugaagaaccaguccccccac

SEQ ID NO: 3722549 - RNA, 15 nt, Human
uccugaagaauugaa

SEQ ID NO: 3722550 - RNA, 17 nt, Human
uccugaagaggcgggcc

SEQ ID NO: 3722551 - RNA, 18 nt, Human
uccugaagcugaggcuca

SEQ ID NO: 3722552 - RNA, 15 nt, Human
uccugaauucuauuu

SEQ ID NO: 3722553 - RNA, 21 nt, Human
uccugaauuuauuauuguucu

SEQ ID NO: 3722554 - RNA, 22 nt, Human
uccugaauuuauuauuguucuu

SEQ ID NO: 3722555 - RNA, 20 nt, Human
uccugacaccccacuuagcc

SEQ ID NO: 3722556 - RNA, 15 nt, Human
ucuauauuuucauuc

SEQ ID NO: 3722557 - RNA, 16 nt, Human
ucuauauuuucauucu

SEQ ID NO: 3722558 - RNA, 23 nt, Human
ucuauauuuugggaaaaaaacau

SEQ ID NO: 3722559 - RNA, 22 nt, Human
ucuaucaagucaaucauuucuc

SEQ ID NO: 3722560 - RNA, 23 nt, Human
ucuaucaagucaaucauuucuca

SEQ ID NO: 3722561 - RNA, 14 nt, Human
ucuaucaccaagga

SEQ ID NO: 3722562 - RNA, 16 nt, Human
ucuaucagauuaaguu

SEQ ID NO: 3722563 - RNA, 13 nt, Human
ucuaucauuguug

SEQ ID NO: 3722564 - RNA, 12 nt, Human
ucuaucauuuaa

SEQ ID NO: 3722565 - RNA, 15 nt, Human
ucuaucauuuaauaa

SEQ ID NO: 3722566 - RNA, 15 nt, Human
ucuaucauuuuugua

SEQ ID NO: 3722567 - RNA, 14 nt, Human
ucuaucuaaugaca

SEQ ID NO: 3722568 - RNA, 10 nt, Human
ucuaucuacu

SEQ ID NO: 3722569 - RNA, 14 nt, Human
ucuaucugguauua

SEQ ID NO: 3722570 - RNA, 21 nt, Human
ucuaucugguauuaaaugcca

SEQ ID NO: 3722571 - RNA, 17 nt, Human
ucuaucuugcucuguaa

SEQ ID NO: 3722572 - RNA, 19 nt, Human
ucuaucuugcucuguaauc

SEQ ID NO: 3722573 - RNA, 22 nt, Human
ucuaucuuguuccaaggccagg

SEQ ID NO: 3722574 - RNA, 14 nt, Human
ucuaugaaauauua

SEQ ID NO: 3722575 - RNA, 18 nt, Human
ucuaugaaauauuauguu

SEQ ID NO: 3722576 - RNA, 17 nt, Human
ucuaugacacaugcaag

SEQ ID NO: 3722577 - RNA, 14 nt, Human
ucuaugagucuaga

SEQ ID NO: 3722578 - RNA, 16 nt, Human
ucuaugagucuagaug

SEQ ID NO: 3722579 - RNA, 11 nt, Human
ucuaugauaua

SEQ ID NO: 3722580 - RNA, 15 nt, Human
ucuaugaugcuguug

SEQ ID NO: 3722581 - RNA, 14 nt, Human
ucuaugccagcuca

SEQ ID NO: 3722582 - RNA, 13 nt, Human
ucuaugccugucu

SEQ ID NO: 3722583 - RNA, 20 nt, Human
ucuaugcugaguuugugcug

SEQ ID NO: 3722584 - RNA, 13 nt, Human
ucuaugggacuca

SEQ ID NO: 3722585 - RNA, 23 nt, Human
ucuaugggacucaaugcacugac

SEQ ID NO: 3722586 - RNA, 19 nt, Human
ucuauggggagaggaacuc

SEQ ID NO: 3722587 - RNA, 22 nt, Human
ucuauggguaucaaacagcuca

SEQ ID NO: 3722588 - RNA, 14 nt, Human
ucuaugguuaugaa

SEQ ID NO: 3722589 - RNA, 19 nt, Human
ucuauguaaaugcaucugu

SEQ ID NO: 3722590 - RNA, 12 nt, Human
ucuauguacuag

SEQ ID NO: 3722591 - RNA, 18 nt, Human
ucuauguacuaguacugu

SEQ ID NO: 3722592 - RNA, 19 nt, Human
ucuauguaggaaaaaaaua

SEQ ID NO: 3722593 - RNA, 19 nt, Human
ucuauguauauacauuuau

SEQ ID NO: 3722594 - RNA, 21 nt, Human
ucuauguggcuguaucuuguu

SEQ ID NO: 3722595 - RNA, 16 nt, Human
ucuauguuaauauuuu

SEQ ID NO: 3722596 - RNA, 14 nt, Human
ucuauuaaaagacu

SEQ ID NO: 3722597 - RNA, 20 nt, Human
ucuauuaaaagacucauccg

SEQ ID NO: 3722598 - RNA, 21 nt, Human
ucuauuaaaagacucauccgu

SEQ ID NO: 3722599 - RNA, 23 nt, Human
ucuauuaaauaguuauauaauuc

SEQ ID NO: 3722600 - RNA, 17 nt, Human
ucuauuaagauuuccaa

SEQ ID NO: 3722601 - RNA, 10 nt, Human
ucuauuaaua

SEQ ID NO: 3722602 - RNA, 16 nt, Human
ucuauuaauauaugua

SEQ ID NO: 3722603 - RNA, 21 nt, Human
ucuauuaccacugaagauaga

SEQ ID NO: 3722604 - RNA, 15 nt, Human
ucuauuauacuguau

SEQ ID NO: 3722605 - RNA, 15 nt, Human
ucuauuaugaaugug

SEQ ID NO: 3722606 - RNA, 16 nt, Human
ucuauuauuuuuauaa

SEQ ID NO: 3722607 - RNA, 16 nt, Human
ucuauucagacaagca

SEQ ID NO: 3722608 - RNA, 18 nt, Human
ucuauuccagcucauuca

SEQ ID NO: 3722609 - RNA, 23 nt, Human
ucuauuccagcucauucauuuua

SEQ ID NO: 3722610 - RNA, 16 nt, Human
ucuauucuccagcuga

SEQ ID NO: 3722611 - RNA, 17 nt, Human
ucuauucugaucuuauu

SEQ ID NO: 3722612 - RNA, 17 nt, Human
ucuauucuguguugcau

SEQ ID NO: 3722613 - RNA, 13 nt, Human
ucuauugaaaaau

SEQ ID NO: 3722614 - RNA, 20 nt, Human
ucuauugauguacagucugu

SEQ ID NO: 3722615 - RNA, 19 nt, Human
ucuauugccucugagagca

SEQ ID NO: 3722616 - RNA, 21 nt, Human
ucuauugccuucuuugaagaa

SEQ ID NO: 3722617 - RNA, 16 nt, Human
ucuauugcuucaccau

SEQ ID NO: 3722618 - RNA, 16 nt, Human
ucuauuggguucauua

SEQ ID NO: 3722619 - RNA, 18 nt, Human
ucuauuggguucauuauu

SEQ ID NO: 3722620 - RNA, 19 nt, Human
ucuauuguaagauaaaaaa

SEQ ID NO: 3722621 - RNA, 17 nt, Human
ucuauuguagcauuucu

SEQ ID NO: 3722622 - RNA, 20 nt, Human
ucuauuguagcauuucuuga

SEQ ID NO: 3722623 - RNA, 22 nt, Human
ucuauuguuguacacagaaaua

SEQ ID NO: 3722624 - RNA, 17 nt, Human
ucuauuguuuauucuuu

SEQ ID NO: 3722625 - RNA, 16 nt, Human
ucuauuguuucuuuca

SEQ ID NO: 3722626 - RNA, 17 nt, Human
ucuauuuaaauucuuuu

SEQ ID NO: 3722627 - RNA, 13 nt, Human
ucuauuuaauauu

SEQ ID NO: 3722628 - RNA, 13 nt, Human
ucuauuuagcaug

SEQ ID NO: 3722629 - RNA, 13 nt, Human
ucuauuuauaugu

SEQ ID NO: 3722630 - RNA, 19 nt, Human
ucuauuuaucuucauuuga

SEQ ID NO: 3722631 - RNA, 14 nt, Human
ucuauuuauuuauu

SEQ ID NO: 3722632 - RNA, 17 nt, Human
ucuauuucacuggagca

SEQ ID NO: 3722633 - RNA, 13 nt, Human
ucuauuucacuua

SEQ ID NO: 3722634 - RNA, 16 nt, Human
ucuauuucauaccaug

SEQ ID NO: 3722635 - RNA, 14 nt, Human
ucuauuucauguuu

SEQ ID NO: 3722636 - RNA, 16 nt, Human
ucuauuucauguuuuu

SEQ ID NO: 3722637 - RNA, 18 nt, Human
ucuauuucccccuuucuu

SEQ ID NO: 3722638 - RNA, 14 nt, Human
ucuauuucuccucc

SEQ ID NO: 3722639 - RNA, 15 nt, Human
ucuauuucugagaag

SEQ ID NO: 3722640 - RNA, 11 nt, Human
ucuauuucugc

SEQ ID NO: 3722641 - RNA, 12 nt, Human
ucuauuucugcu

SEQ ID NO: 3722642 - RNA, 21 nt, Human
ucuauuucugcugaauuuuca

SEQ ID NO: 3722643 - RNA, 16 nt, Human
ucuauuuggaauuuau

SEQ ID NO: 3722644 - RNA, 13 nt, Human
ucuauuuggggcu

SEQ ID NO: 3722645 - RNA, 22 nt, Human
ucuauuuguauauauacauaac

SEQ ID NO: 3722646 - RNA, 13 nt, Human
ucuauuuuacaac

SEQ ID NO: 3722647 - RNA, 16 nt, Human
ucuauuuuauuaugaa

SEQ ID NO: 3722648 - RNA, 20 nt, Human
ucuauuuuauuaugaagaag

SEQ ID NO: 3722649 - RNA, 16 nt, Human
ucuauuuucuauguac

SEQ ID NO: 3722650 - RNA, 15 nt, Human
ucuauuuuggauugu

SEQ ID NO: 3722651 - RNA, 16 nt, Human
ucuauuuuuacauuua

SEQ ID NO: 3722652 - RNA, 15 nt, Human
ucuauuuuuaucuga

SEQ ID NO: 3722653 - RNA, 15 nt, Human
ucuauuuuuggaggu

SEQ ID NO: 3722654 - RNA, 22 nt, Human
ucuauuuuuggagguuuauuac

SEQ ID NO: 3722655 - RNA, 16 nt, Human
ucucaaaaaaagaaaa

SEQ ID NO: 3722656 - RNA, 14 nt, Human
ucucaaaaauacaa

SEQ ID NO: 3722657 - RNA, 23 nt, Human
ucucaaaagcauuuaucauucuu

SEQ ID NO: 3722658 - RNA, 13 nt, Human
ucucaaacacagu

SEQ ID NO: 3722659 - RNA, 20 nt, Human
ucucaaaccaagcaaaggaa

SEQ ID NO: 3722660 - RNA, 19 nt, Human
ucucaaaccuguuuaaaua

SEQ ID NO: 3722661 - RNA, 23 nt, Human
ucucaaaccuguuuaaauauuuc

SEQ ID NO: 3722662 - RNA, 14 nt, Human
ucucaaacuccuga

SEQ ID NO: 3722663 - RNA, 16 nt, Human
ucucaaacuccugacc

SEQ ID NO: 3722664 - RNA, 23 nt, Human
ucucaaacuccugaccucaggca

SEQ ID NO: 3722665 - RNA, 22 nt, Human
ucucaaacucuugaccucaggu

SEQ ID NO: 3722666 - RNA, 14 nt, Human
ucucaaacuggggc

SEQ ID NO: 3722667 - RNA, 17 nt, Human
ucucaaagaccuggggc

SEQ ID NO: 3722668 - RNA, 18 nt, Human
ucucaaaggguacuucca

SEQ ID NO: 3722669 - RNA, 22 nt, Human
ucucaaaguuuccuaaucagaa

SEQ ID NO: 3722670 - RNA, 18 nt, Human
ucucaaaguuuugaaaag

SEQ ID NO: 3722671 - RNA, 20 nt, Human
ucucaaauaggcuauuaaaa

SEQ ID NO: 3722672 - RNA, 22 nt, Human
ucucaaauaggcuauuaaaaaa

SEQ ID NO: 3722673 - RNA, 14 nt, Human
ucucaaauuucuaa

SEQ ID NO: 3722674 - RNA, 22 nt, Human
ucucaacaaggcaaaaacaaag

SEQ ID NO: 3722675 - RNA, 21 nt, Human
ucucaacaccaugauuccuuu

SEQ ID NO: 3722676 - RNA, 19 nt, Human
ucucaacacccaguuuccu

SEQ ID NO: 3722677 - RNA, 18 nt, Human
ucucaacaggccucaggg

SEQ ID NO: 3722678 - RNA, 20 nt, Human
ucucaacaggccucagggcu

SEQ ID NO: 3722679 - RNA, 21 nt, Human
ucucaacccuuuugucugccu

SEQ ID NO: 3722680 - RNA, 23 nt, Human
ucucaacccuuuugucugccucu

SEQ ID NO: 3722681 - RNA, 15 nt, Human
ucucaagagcccugu

SEQ ID NO: 3722682 - RNA, 19 nt, Human
ucucaagagggcacuggug

SEQ ID NO: 3722683 - RNA, 13 nt, Human
ucucaagcccugc

SEQ ID NO: 3722684 - RNA, 21 nt, Human
ucucaauaaaauuauagcucu

SEQ ID NO: 3722685 - RNA, 23 nt, Human
ucucaauaaaauuauagcucuaa

SEQ ID NO: 3722686 - RNA, 14 nt, Human
ucucaauaugcuua

SEQ ID NO: 3722687 - RNA, 18 nt, Human
ucucaauauucaauaaag

SEQ ID NO: 3722688 - RNA, 20 nt, Human
ucucaauauucaauaaagcu

SEQ ID NO: 3722689 - RNA, 23 nt, Human
ucucaauccuaauuucuccuccc

SEQ ID NO: 3722690 - RNA, 14 nt, Human
ucucaaugaaaaau

SEQ ID NO: 3722691 - RNA, 19 nt, Human
ucucaaugaaccauaaauu

SEQ ID NO: 3722692 - RNA, 16 nt, Human
ucucaaugaagccagc

SEQ ID NO: 3722693 - RNA, 17 nt, Human
ucucaaugaagccagcu

SEQ ID NO: 3722694 - RNA, 15 nt, Human
ucucaauuccaacag

SEQ ID NO: 3722695 - RNA, 23 nt, Human
ucucaauuccaacaguuuaauga

SEQ ID NO: 3722696 - RNA, 14 nt, Human
ucucacaagccagc

SEQ ID NO: 3722697 - RNA, 14 nt, Human
ucucacacacauag

SEQ ID NO: 3722698 - RNA, 16 nt, Human
ucucacacaugagcau

SEQ ID NO: 3722699 - RNA, 23 nt, Human
ucucacacaugagcaucaggcca

SEQ ID NO: 3722700 - RNA, 22 nt, Human
ucucacacugguucucaaugaa

SEQ ID NO: 3722701 - RNA, 20 nt, Human
ucucacagacaggaccccug

SEQ ID NO: 3722702 - RNA, 22 nt, Human
ucucacagacaggaccccugca

SEQ ID NO: 3722703 - RNA, 17 nt, Human
ucucacagcacaugcug

SEQ ID NO: 3722704 - RNA, 14 nt, Human
ucucacagcuaugc

SEQ ID NO: 3722705 - RNA, 13 nt, Human
ucucaccagcugc

SEQ ID NO: 3722706 - RNA, 12 nt, Human
ggagugcagugg

SEQ ID NO: 3722707 - RNA, 14 nt, Human
ggagugcaguggug

SEQ ID NO: 3722708 - RNA, 16 nt, Human
ggagugcuggcucaca

SEQ ID NO: 3722709 - RNA, 22 nt, Human
ggaguggaauaguauccuccag

SEQ ID NO: 3722710 - RNA, 13 nt, Human
ggaguggagugga

SEQ ID NO: 3722711 - RNA, 17 nt, Human
ggaguggcagcccagcc

SEQ ID NO: 3722712 - RNA, 14 nt, Human
ggaguggccacaga

SEQ ID NO: 3722713 - RNA, 15 nt, Human
ggaguggccacagaa

SEQ ID NO: 3722714 - RNA, 17 nt, Human
ggaguggcucgccaggc

SEQ ID NO: 3722715 - RNA, 18 nt, Human
ggagugggacagagucug

SEQ ID NO: 3722716 - RNA, 12 nt, Human
ggagugggccca

SEQ ID NO: 3722717 - RNA, 19 nt, Human
ggagugggugacaagagcc

SEQ ID NO: 3722718 - RNA, 20 nt, Human
ggagugggugacaagagccu

SEQ ID NO: 3722719 - RNA, 15 nt, Human
ggaguggugcagaca

SEQ ID NO: 3722720 - RNA, 20 nt, Human
ggagugguuuaggcuauuug

SEQ ID NO: 3722721 - RNA, 15 nt, Human
ggaguguacucccag

SEQ ID NO: 3722722 - RNA, 18 nt, Human
ggaguguacucccagggc

SEQ ID NO: 3722723 - RNA, 19 nt, Human
ggaguguacucccagggcu

SEQ ID NO: 3722724 - RNA, 24 nt, Human
ggaguguccucuucccucucugca

SEQ ID NO: 3722725 - RNA, 18 nt, Human
ggagugucuggaauugug

SEQ ID NO: 3722726 - RNA, 22 nt, Human
ggaguguggcugaggaggccuc

SEQ ID NO: 3722727 - RNA, 11 nt, Human
ggaguguguaa

SEQ ID NO: 3722728 - RNA, 22 nt, Human
ggaguguguaauuuaaaauugu

SEQ ID NO: 3722729 - RNA, 17 nt, Human
ggaguguguauuguucc

SEQ ID NO: 3722730 - RNA, 18 nt, Human
ggaguguguauuguuccc

SEQ ID NO: 3722731 - RNA, 15 nt, Human
ggaguguuucauggg

SEQ ID NO: 3722732 - RNA, 19 nt, Human
ggaguguuucuaauaaacu

SEQ ID NO: 3722733 - RNA, 23 nt, Human
ggaguuaagaccuggcagcucug

SEQ ID NO: 3722734 - RNA, 22 nt, Human
ggaguuacauuaauguuaauuc

SEQ ID NO: 3722735 - RNA, 18 nt, Human
ggaguuagaggccagccu

SEQ ID NO: 3722736 - RNA, 17 nt, Human
ggaguucaaugaucuag

SEQ ID NO: 3722737 - RNA, 16 nt, Human
ggaguucaucuugaau

SEQ ID NO: 3722738 - RNA, 14 nt, Human
ggaguuccacagau

SEQ ID NO: 3722739 - RNA, 14 nt, Human
ggaguuccaugaag

SEQ ID NO: 3722740 - RNA, 21 nt, Human
ggaguucgaggcugcagucag

SEQ ID NO: 3722741 - RNA, 12 nt, Human
ggaguucuucuu

SEQ ID NO: 3722742 - RNA, 17 nt, Human
ggaguugaucuggaacc

SEQ ID NO: 3722743 - RNA, 21 nt, Human
ggaguugaucuggaacccaga

SEQ ID NO: 3722744 - RNA, 18 nt, Human
ggaguuucuuuccugccu

SEQ ID NO: 3722745 - RNA, 13 nt, Human
ggaguuuggccag

SEQ ID NO: 3722746 - RNA, 18 nt, Human
ggaguuuuuaugagaaac

SEQ ID NO: 3722747 - RNA, 16 nt, Human
ggaguuuuuuguacca

SEQ ID NO: 3722748 - RNA, 17 nt, Human
ggauaaaaagccagggc

SEQ ID NO: 3722749 - RNA, 19 nt, Human
ggauaaaaagccagggcug

SEQ ID NO: 3722750 - RNA, 14 nt, Human
ggauaaaaugaggu

SEQ ID NO: 3722751 - RNA, 20 nt, Human
ggauaaacuuuuagaaacuu

SEQ ID NO: 3722752 - RNA, 15 nt, Human
ggauaaagccacuga

SEQ ID NO: 3722753 - RNA, 13 nt, Human
ggauaacaaagau

SEQ ID NO: 3722754 - RNA, 20 nt, Human
ggauaacaaagauaucuuuu

SEQ ID NO: 3722755 - RNA, 19 nt, Human
ggauaauuagcaucucagg

SEQ ID NO: 3722756 - RNA, 20 nt, Human
ggauacaggcuggaaaguaa

SEQ ID NO: 3722757 - RNA, 21 nt, Human
ggauacugcagggccaggacu

SEQ ID NO: 3722758 - RNA, 16 nt, Human
ggauacugcccggggc

SEQ ID NO: 3722759 - RNA, 15 nt, Human
ggauacuggcacaga

SEQ ID NO: 3722760 - RNA, 13 nt, Human
ggauacuuauuua

SEQ ID NO: 3722761 - RNA, 19 nt, Human
ggauagagaauguuccaga

SEQ ID NO: 3722762 - RNA, 12 nt, Human
ggauagaggggu

SEQ ID NO: 3722763 - RNA, 19 nt, Human
ggauagauaacucuuugga

SEQ ID NO: 3722764 - RNA, 20 nt, Human
ggauagauaacucuuuggau

SEQ ID NO: 3722765 - RNA, 15 nt, Human
ggauagaugcccugc

SEQ ID NO: 3722766 - RNA, 14 nt, Human
ggauagaugugugg

SEQ ID NO: 3722767 - RNA, 19 nt, Human
ggauagcuaacuguaaauc

SEQ ID NO: 3722768 - RNA, 17 nt, Human
ggauaggagccugcugg

SEQ ID NO: 3722769 - RNA, 15 nt, Human
ggauaggccagccgc

SEQ ID NO: 3722770 - RNA, 14 nt, Human
ggauaggggcagag

SEQ ID NO: 3722771 - RNA, 16 nt, Human
ggauaguaugagcccu

SEQ ID NO: 3722772 - RNA, 18 nt, Human
ggauaguauuuuuaucca

SEQ ID NO: 3722773 - RNA, 17 nt, Human
ggauagucaccuuuuaa

SEQ ID NO: 3722774 - RNA, 18 nt, Human
ggauaguugcuccgccuc

SEQ ID NO: 3722775 - RNA, 16 nt, Human
ggauauaguuuuacuu

SEQ ID NO: 3722776 - RNA, 20 nt, Human
ggauauccuuaucagagcua

SEQ ID NO: 3722777 - RNA, 17 nt, Human
ggauaucuguuagaugc

SEQ ID NO: 3722778 - RNA, 22 nt, Human
ggauaucuguuagaugcuacua

SEQ ID NO: 3722779 - RNA, 22 nt, Human
ggaucaaaccccgaccaccugc

SEQ ID NO: 3722780 - RNA, 16 nt, Human
ggaucaaaguucugcu

SEQ ID NO: 3722781 - RNA, 18 nt, Human
ggaucacaagauggaauu

SEQ ID NO: 3722782 - RNA, 14 nt, Human
ggaucacagggccc

SEQ ID NO: 3722783 - RNA, 13 nt, Human
ggaucacuggagc

SEQ ID NO: 3722784 - RNA, 18 nt, Human
ggaucacuggagcccagg

SEQ ID NO: 3722785 - RNA, 17 nt, Human
ggaucacuugagcccag

SEQ ID NO: 3722786 - RNA, 17 nt, Human
ggaucagaacagcagag

SEQ ID NO: 3722787 - RNA, 12 nt, Human
ggaucagaauag

SEQ ID NO: 3722788 - RNA, 15 nt, Human
ggaucagagcaggac

SEQ ID NO: 3722789 - RNA, 18 nt, Human
ggaucagagcaggaccuc

SEQ ID NO: 3722790 - RNA, 16 nt, Human
ggaucagaugaacucu

SEQ ID NO: 3722791 - RNA, 13 nt, Human
ggaucagccagga

SEQ ID NO: 3722792 - RNA, 19 nt, Human
ggaucagcccucauuuugu

SEQ ID NO: 3722793 - RNA, 17 nt, Human
ggaucagcguggccuug

SEQ ID NO: 3722794 - RNA, 18 nt, Human
ggaucagggguaggaaug

SEQ ID NO: 3722795 - RNA, 12 nt, Human
ggaucaguuuuu

SEQ ID NO: 3722796 - RNA, 13 nt, Human
ggaucauaaaguu

SEQ ID NO: 3722797 - RNA, 19 nt, Human
ggaucaucaacaagauuuc

SEQ ID NO: 3722798 - RNA, 19 nt, Human
ggaucaucugccgugccug

SEQ ID NO: 3722799 - RNA, 17 nt, Human
ggauccaaacugaucca

SEQ ID NO: 3722800 - RNA, 20 nt, Human
ggauccacgacgcuuaaaua

SEQ ID NO: 3722801 - RNA, 13 nt, Human
ggauccaggcccc

SEQ ID NO: 3722802 - RNA, 17 nt, Human
ggaucccaugagcuccu

SEQ ID NO: 3722803 - RNA, 20 nt, Human
ggaucccaugagcuccuuaa

SEQ ID NO: 3722804 - RNA, 16 nt, Human
ggauccccgccuggcc

SEQ ID NO: 3722805 - RNA, 22 nt, Human
ggauccccgccuggccaggagc

SEQ ID NO: 3722806 - RNA, 23 nt, Human
ggauccccgccuggccaggagca

SEQ ID NO: 3722807 - RNA, 13 nt, Human
ggauccccuuccu

SEQ ID NO: 3722808 - RNA, 22 nt, Human
ggaucccucauccucauaccca

SEQ ID NO: 3722809 - RNA, 13 nt, Human
ggaucccucaucu

SEQ ID NO: 3722810 - RNA, 21 nt, Human
ggauccgacugcuuuggaccu

SEQ ID NO: 3722811 - RNA, 21 nt, Human
ggauccuauucucaccaggaa

SEQ ID NO: 3722812 - RNA, 12 nt, Human
ggauccuccagg

SEQ ID NO: 3722813 - RNA, 14 nt, Human
ggauccugagccag

SEQ ID NO: 3722814 - RNA, 21 nt, Human
ggauccuggaguucugguucc

SEQ ID NO: 3722815 - RNA, 15 nt, Human
ggaucggccuccucu

SEQ ID NO: 3722816 - RNA, 18 nt, Human
ggaucuaccagcauaaau

SEQ ID NO: 3722817 - RNA, 16 nt, Human
ggaucuaccuggaggg

SEQ ID NO: 3722818 - RNA, 13 nt, Human
ggaucucaggggc

SEQ ID NO: 3722819 - RNA, 21 nt, Human
ggaucuccaaggaccagguua

SEQ ID NO: 3722820 - RNA, 14 nt, Human
ggaucuccccacuc

SEQ ID NO: 3722821 - RNA, 21 nt, Human
ggaucucucaggagcacaggc

SEQ ID NO: 3722822 - RNA, 22 nt, Human
ggaucucucaggagcacaggca

SEQ ID NO: 3722823 - RNA, 17 nt, Human
ggaucucuuaagacagc

SEQ ID NO: 3722824 - RNA, 21 nt, Human
ggaucucuucuuaauguacau

SEQ ID NO: 3722825 - RNA, 21 nt, Human
ggaucugguagggggaaaaug

SEQ ID NO: 3722826 - RNA, 15 nt, Human
ggaucugguggucag

SEQ ID NO: 3722827 - RNA, 18 nt, Human
ggaucuguauguguucua

SEQ ID NO: 3722828 - RNA, 19 nt, Human
ggaucugucacaccagcca

SEQ ID NO: 3722829 - RNA, 22 nt, Human
ggaucugugaggggcucucuca

SEQ ID NO: 3722830 - RNA, 23 nt, Human
ggaucuguuguguacguggagag

SEQ ID NO: 3722831 - RNA, 14 nt, Human
ggaucuugaaugug

SEQ ID NO: 3722832 - RNA, 20 nt, Human
ggaucuugaauguggucuca

SEQ ID NO: 3722833 - RNA, 21 nt, Human
ggaucuugaauguggucucag

SEQ ID NO: 3722834 - RNA, 20 nt, Human
ggaucuuucacccacagaaa

SEQ ID NO: 3722835 - RNA, 21 nt, Human
ggaugaauuccaaauucugcu

SEQ ID NO: 3722836 - RNA, 16 nt, Human
ggaugacaugucccua

SEQ ID NO: 3722837 - RNA, 22 nt, Human
ggaugacgguauuaugcuucuu

SEQ ID NO: 3722838 - RNA, 23 nt, Human
ggaugacgguauuaugcuucuug

SEQ ID NO: 3722839 - RNA, 19 nt, Human
ggaugacuagaggcaggga

SEQ ID NO: 3722840 - RNA, 21 nt, Human
ggaugagaauuugagugcucu

SEQ ID NO: 3722841 - RNA, 23 nt, Human
ggaugagagcccagagguaacag

SEQ ID NO: 3722842 - RNA, 23 nt, Human
ggaugagcucccacaagccugag

SEQ ID NO: 3722843 - RNA, 20 nt, Human
ggaugagggaaaagaaaaag

SEQ ID NO: 3722844 - RNA, 18 nt, Human
ggaugaggugcugggagg

SEQ ID NO: 3722845 - RNA, 15 nt, Human
ggaugaugccucaug

SEQ ID NO: 3722846 - RNA, 16 nt, Human
ggaugauucagaaauu

SEQ ID NO: 3722847 - RNA, 21 nt, Human
ggaugauuggaggggggaggu

SEQ ID NO: 3722848 - RNA, 17 nt, Human
ggaugauuggauuauuc

SEQ ID NO: 3722849 - RNA, 13 nt, Human
ggaugcagcauua

SEQ ID NO: 3722850 - RNA, 18 nt, Human
ggaugcaggcuccccuga

SEQ ID NO: 3722851 - RNA, 12 nt, Human
ggaugccaccuc

SEQ ID NO: 3722852 - RNA, 18 nt, Human
ggaugccacuccucccuc

SEQ ID NO: 3722853 - RNA, 17 nt, Human
ggaugccagggccgacc

SEQ ID NO: 3722854 - RNA, 15 nt, Human
ggaugccauccaagu

SEQ ID NO: 3722855 - RNA, 15 nt, Human
ucucaccagcugcaa

SEQ ID NO: 3722856 - RNA, 15 nt, Human
ucucaccaggaaggg

SEQ ID NO: 3722857 - RNA, 17 nt, Human
ucucaccaggcagccuc

SEQ ID NO: 3722858 - RNA, 21 nt, Human
ucucaccaggcagccucuggg

SEQ ID NO: 3722859 - RNA, 16 nt, Human
ucucaccauuuggauc

SEQ ID NO: 3722860 - RNA, 22 nt, Human
ucucacccaugcaagcagagga

SEQ ID NO: 3722861 - RNA, 13 nt, Human
ucucacccuggag

SEQ ID NO: 3722862 - RNA, 19 nt, Human
ucucacccuggaggcaccu

SEQ ID NO: 3722863 - RNA, 12 nt, Human
ucucaccucagc

SEQ ID NO: 3722864 - RNA, 19 nt, Human
ucucaccuccugcugggca

SEQ ID NO: 3722865 - RNA, 16 nt, Human
ucucaccuggcccugc

SEQ ID NO: 3722866 - RNA, 19 nt, Human
ucucaccuggcccugcuuc

SEQ ID NO: 3722867 - RNA, 17 nt, Human
ucucaccuugguuccug

SEQ ID NO: 3722868 - RNA, 20 nt, Human
ucucacggccacacagcugc

SEQ ID NO: 3722869 - RNA, 21 nt, Human
ucucacgggcaugggcacucc

SEQ ID NO: 3722870 - RNA, 15 nt, Human
ucucacuaaacuuua

SEQ ID NO: 3722871 - RNA, 18 nt, Human
ucucacuaaagcaugaaa

SEQ ID NO: 3722872 - RNA, 23 nt, Human
ucucacuaaagcaugaaauguga

SEQ ID NO: 3722873 - RNA, 19 nt, Human
ucucacuauguugcccagg

SEQ ID NO: 3722874 - RNA, 22 nt, Human
ucucacuauguugcccaggcag

SEQ ID NO: 3722875 - RNA, 14 nt, Human
ucucacuccaccac

SEQ ID NO: 3722876 - RNA, 21 nt, Human
ucucacuccccagccugggcc

SEQ ID NO: 3722877 - RNA, 22 nt, Human
ucucacuccccagccugggccc

SEQ ID NO: 3722878 - RNA, 20 nt, Human
ucucacucccuucuccuuga

SEQ ID NO: 3722879 - RNA, 13 nt, Human
ucucacuccuacc

SEQ ID NO: 3722880 - RNA, 11 nt, Human
ucucacuccuu

SEQ ID NO: 3722881 - RNA, 23 nt, Human
ucucacucugcccccccccccca

SEQ ID NO: 3722882 - RNA, 16 nt, Human
ucucacucugucgccc

SEQ ID NO: 3722883 - RNA, 17 nt, Human
ucucacucugucgccca

SEQ ID NO: 3722884 - RNA, 23 nt, Human
ucucacucugucgcccagucugg

SEQ ID NO: 3722885 - RNA, 21 nt, Human
ucucacugagaagauugugaa

SEQ ID NO: 3722886 - RNA, 18 nt, Human
ucucacugagcacuguuu

SEQ ID NO: 3722887 - RNA, 20 nt, Human
ucucacugccaucaaacugu

SEQ ID NO: 3722888 - RNA, 16 nt, Human
ucucacugcuugaacu

SEQ ID NO: 3722889 - RNA, 17 nt, Human
ucucacuggaugcaaag

SEQ ID NO: 3722890 - RNA, 14 nt, Human
ucucacuguguccc

SEQ ID NO: 3722891 - RNA, 21 nt, Human
ucucacugugucccucucucu

SEQ ID NO: 3722892 - RNA, 19 nt, Human
ucucagaaagugccugaca

SEQ ID NO: 3722893 - RNA, 19 nt, Human
ucucagaaggcaaaugacu

SEQ ID NO: 3722894 - RNA, 21 nt, Human
ucucagaaggcaaaugacuuu

SEQ ID NO: 3722895 - RNA, 14 nt, Human
ucucagaagggagg

SEQ ID NO: 3722896 - RNA, 15 nt, Human
ucucagaagggaggc

SEQ ID NO: 3722897 - RNA, 18 nt, Human
ucucagaagggaggcugg

SEQ ID NO: 3722898 - RNA, 20 nt, Human
ucucagacuuuuguacaucu

SEQ ID NO: 3722899 - RNA, 14 nt, Human
ucucagauauuuau

SEQ ID NO: 3722900 - RNA, 20 nt, Human
ucucagauccuuguuucaaa

SEQ ID NO: 3722901 - RNA, 22 nt, Human
ucucagauccuuguuucaaaca

SEQ ID NO: 3722902 - RNA, 15 nt, Human
ucucagaugcaguuu

SEQ ID NO: 3722903 - RNA, 18 nt, Human
ucucagauuucugaggaa

SEQ ID NO: 3722904 - RNA, 13 nt, Human
ucucagauuuuau

SEQ ID NO: 3722905 - RNA, 18 nt, Human
ucucagauuuuauuaugu

SEQ ID NO: 3722906 - RNA, 19 nt, Human
ucucagauuuuauuaugua

SEQ ID NO: 3722907 - RNA, 21 nt, Human
ucucagcauuaccucuuugga

SEQ ID NO: 3722908 - RNA, 15 nt, Human
ucucagccaacgagu

SEQ ID NO: 3722909 - RNA, 14 nt, Human
ucucagcccagaag

SEQ ID NO: 3722910 - RNA, 16 nt, Human
ucucagcccagaagaa

SEQ ID NO: 3722911 - RNA, 18 nt, Human
ucucagcccagaagaaaa

SEQ ID NO: 3722912 - RNA, 22 nt, Human
ucucagcccagaagaaaauucu

SEQ ID NO: 3722913 - RNA, 15 nt, Human
ucucagccuuacauu

SEQ ID NO: 3722914 - RNA, 15 nt, Human
ucucagcuaagcuca

SEQ ID NO: 3722915 - RNA, 16 nt, Human
ucucagcucacugcaa

SEQ ID NO: 3722916 - RNA, 16 nt, Human
ucucagcucaucuuca

SEQ ID NO: 3722917 - RNA, 11 nt, Human
ucucagcuccc

SEQ ID NO: 3722918 - RNA, 22 nt, Human
ucucagcucccauuucuacucu

SEQ ID NO: 3722919 - RNA, 18 nt, Human
ucucagcucccccugucc

SEQ ID NO: 3722920 - RNA, 22 nt, Human
ucucagcucccccuguccccuc

SEQ ID NO: 3722921 - RNA, 15 nt, Human
ucucaggacacaggc

SEQ ID NO: 3722922 - RNA, 16 nt, Human
ucucaggacacaggcc

SEQ ID NO: 3722923 - RNA, 18 nt, Human
ucucaggagcacaggcag

SEQ ID NO: 3722924 - RNA, 23 nt, Human
ucucaggagcacaggcagcugga

SEQ ID NO: 3722925 - RNA, 14 nt, Human
ucucaggauccaag

SEQ ID NO: 3722926 - RNA, 15 nt, Human
ucucaggauccaagc

SEQ ID NO: 3722927 - RNA, 18 nt, Human
ucucaggcaugccugugu

SEQ ID NO: 3722928 - RNA, 20 nt, Human
ucucaggcaugccuguguga

SEQ ID NO: 3722929 - RNA, 21 nt, Human
ucucaggcaugccugugugac

SEQ ID NO: 3722930 - RNA, 17 nt, Human
ucucaggcugccugagu

SEQ ID NO: 3722931 - RNA, 22 nt, Human
ucucagggaagcccagcuccag

SEQ ID NO: 3722932 - RNA, 12 nt, Human
ucucagggccug

SEQ ID NO: 3722933 - RNA, 13 nt, Human
ucucagggcuccu

SEQ ID NO: 3722934 - RNA, 16 nt, Human
ucucaggggcuguuug

SEQ ID NO: 3722935 - RNA, 17 nt, Human
ucucaggggcuguuuga

SEQ ID NO: 3722936 - RNA, 15 nt, Human
ucucagggucucugc

SEQ ID NO: 3722937 - RNA, 16 nt, Human
ucucagggucucugcu

SEQ ID NO: 3722938 - RNA, 17 nt, Human
ucucagggucucugcug

SEQ ID NO: 3722939 - RNA, 16 nt, Human
ucucagggugucccag

SEQ ID NO: 3722940 - RNA, 22 nt, Human
ucucagguuaagugugaguaau

SEQ ID NO: 3722941 - RNA, 15 nt, Human
ucucagucaguaauu

SEQ ID NO: 3722942 - RNA, 20 nt, Human
ucucagucaugcauaaauau

SEQ ID NO: 3722943 - RNA, 23 nt, Human
ucucagucaugcauaaauaugca

SEQ ID NO: 3722944 - RNA, 13 nt, Human
ucucagucucuga

SEQ ID NO: 3722945 - RNA, 14 nt, Human
ucucagugcccucc

SEQ ID NO: 3722946 - RNA, 23 nt, Human
ucucagugcuucuuacuauuaag

SEQ ID NO: 3722947 - RNA, 13 nt, Human
ucucagugcuuuc

SEQ ID NO: 3722948 - RNA, 14 nt, Human
ucucaguugcagcc

SEQ ID NO: 3722949 - RNA, 21 nt, Human
ucucaguugcagcccugcugc

SEQ ID NO: 3722950 - RNA, 15 nt, Human
ucucaguuggaaaua

SEQ ID NO: 3722951 - RNA, 21 nt, Human
ucucaguuuuucuuaauauau

SEQ ID NO: 3722952 - RNA, 16 nt, Human
ucucauaauuuauaca

SEQ ID NO: 3722953 - RNA, 15 nt, Human
ucucauaccucugac

SEQ ID NO: 3722954 - RNA, 14 nt, Human
ucucauacguccac

SEQ ID NO: 3722955 - RNA, 18 nt, Human
ucucauacucaccucacc

SEQ ID NO: 3722956 - RNA, 13 nt, Human
ucucauagcauua

SEQ ID NO: 3722957 - RNA, 16 nt, Human
ucucauaggaaaagua

SEQ ID NO: 3722958 - RNA, 23 nt, Human
ucucauaggaaaaguacauuuaa

SEQ ID NO: 3722959 - RNA, 22 nt, Human
ucucauauauagacagcuuuga

SEQ ID NO: 3722960 - RNA, 15 nt, Human
ucucaucaacugaau

SEQ ID NO: 3722961 - RNA, 12 nt, Human
ucucaucacaca

SEQ ID NO: 3722962 - RNA, 14 nt, Human
ucucaucacacaca

SEQ ID NO: 3722963 - RNA, 15 nt, Human
ucucaucacacacau

SEQ ID NO: 3722964 - RNA, 16 nt, Human
ucucaucacacacaug

SEQ ID NO: 3722965 - RNA, 14 nt, Human
ucucauccaucauc

SEQ ID NO: 3722966 - RNA, 14 nt, Human
ucucauccccaggg

SEQ ID NO: 3722967 - RNA, 23 nt, Human
ucucauccccagucccaaugcac

SEQ ID NO: 3722968 - RNA, 17 nt, Human
ucucauccuccuggaac

SEQ ID NO: 3722969 - RNA, 21 nt, Human
ucucauccuuuucuccuaucu

SEQ ID NO: 3722970 - RNA, 13 nt, Human
ucucaucugaggc

SEQ ID NO: 3722971 - RNA, 15 nt, Human
ucucaucugcacccu

SEQ ID NO: 3722972 - RNA, 19 nt, Human
ucucaucugcacccuucuu

SEQ ID NO: 3722973 - RNA, 16 nt, Human
ucucaugaggggagag

SEQ ID NO: 3722974 - RNA, 16 nt, Human
ucucaugugauccuuu

SEQ ID NO: 3722975 - RNA, 23 nt, Human
ucucaugugauccuuuuauguua

SEQ ID NO: 3722976 - RNA, 19 nt, Human
ucucauguuuucaacugcc

SEQ ID NO: 3722977 - RNA, 15 nt, Human
ucucauuaaaagaau

SEQ ID NO: 3722978 - RNA, 23 nt, Human
ucucauuaauacucuuuauuuau

SEQ ID NO: 3722979 - RNA, 13 nt, Human
ucucauuccccag

SEQ ID NO: 3722980 - RNA, 12 nt, Human
ucucauucuugu

SEQ ID NO: 3722981 - RNA, 17 nt, Human
ucucauuggaaauuuag

SEQ ID NO: 3722982 - RNA, 19 nt, Human
ucucauuggaaauuuagca

SEQ ID NO: 3722983 - RNA, 20 nt, Human
ucucauuggacccuuccaug

SEQ ID NO: 3722984 - RNA, 19 nt, Human
ucucauuucaccccucccu

SEQ ID NO: 3722985 - RNA, 21 nt, Human
ucucauuuuuccguaaaaaug

SEQ ID NO: 3722986 - RNA, 14 nt, Human
ucuccaaaccacuu

SEQ ID NO: 3722987 - RNA, 22 nt, Human
ucuccaaacugaagcagccucu

SEQ ID NO: 3722988 - RNA, 23 nt, Human
ucuccaaacugaagcagccucuc

SEQ ID NO: 3722989 - RNA, 17 nt, Human
ucuccaacaucacagcc

SEQ ID NO: 3722990 - RNA, 22 nt, Human
ucuccaaccccccagcacugag

SEQ ID NO: 3722991 - RNA, 14 nt, Human
ucuccaagaaugcu

SEQ ID NO: 3722992 - RNA, 15 nt, Human
ucuccaagaaugcug

SEQ ID NO: 3722993 - RNA, 17 nt, Human
ucuccaagaaugcugaa

SEQ ID NO: 3722994 - RNA, 15 nt, Human
ucuccaagcaggaca

SEQ ID NO: 3722995 - RNA, 18 nt, Human
ucuccaagcaggacaugg

SEQ ID NO: 3722996 - RNA, 16 nt, Human
ucuccaagggcuucug

SEQ ID NO: 3722997 - RNA, 20 nt, Human
ucuccaagggcuucugcacc

SEQ ID NO: 3722998 - RNA, 20 nt, Human
ucuccaauuuuuuuuuccuu

SEQ ID NO: 3722999 - RNA, 22 nt, Human
ucuccacacacagcugggcugu

SEQ ID NO: 3723000 - RNA, 17 nt, Human
ucuccacccugcucucc

SEQ ID NO: 3723001 - RNA, 12 nt, Human
ucuccaccucag

SEQ ID NO: 3723002 - RNA, 14 nt, Human
ucuccaccucagcc

SEQ ID NO: 3723003 - RNA, 15 nt, Human
ucuccaccucagccu

SEQ ID NO: 3723004 - RNA, 15 nt, Human
ucuccaccugccagg

SEQ ID NO: 3723005 - RNA, 22 nt, Human
uccugacacccuucucccacuc

SEQ ID NO: 3723006 - RNA, 14 nt, Human
uccugacagaaggu

SEQ ID NO: 3723007 - RNA, 15 nt, Human
uccugacagaaggug

SEQ ID NO: 3723008 - RNA, 16 nt, Human
uccugacagaaggugc

SEQ ID NO: 3723009 - RNA, 15 nt, Human
uccugacauugucuc

SEQ ID NO: 3723010 - RNA, 13 nt, Human
uccugaccacccu

SEQ ID NO: 3723011 - RNA, 15 nt, Human
uccugaccacccucc

SEQ ID NO: 3723012 - RNA, 20 nt, Human
uccugaccacccuccccucu

SEQ ID NO: 3723013 - RNA, 12 nt, Human
uccugacccagg

SEQ ID NO: 3723014 - RNA, 16 nt, Human
uccugacccaggccgc

SEQ ID NO: 3723015 - RNA, 14 nt, Human
uccugacccagucc

SEQ ID NO: 3723016 - RNA, 15 nt, Human
ggcagggcugaggcc

SEQ ID NO: 3723017 - RNA, 21 nt, Human
ggcagggcuggccccagggca

SEQ ID NO: 3723018 - RNA, 20 nt, Human
ggcaggggcccugcagcucu

SEQ ID NO: 3723019 - RNA, 21 nt, Human
ggcaggggcccugcagcucuc

SEQ ID NO: 3723020 - RNA, 17 nt, Human
ggcaggggccuggagau

SEQ ID NO: 3723021 - RNA, 12 nt, Human
ggcaggggcgga

SEQ ID NO: 3723022 - RNA, 13 nt, Human
ggcaggggcuucc

SEQ ID NO: 3723023 - RNA, 12 nt, Human
ggcagggggcug

SEQ ID NO: 3723024 - RNA, 14 nt, Human
ggcagggggcugcu

SEQ ID NO: 3723025 - RNA, 22 nt, Human
ggcagggggcugcugcugggcu

SEQ ID NO: 3723026 - RNA, 23 nt, Human
ggcagggguggaggagagccugg

SEQ ID NO: 3723027 - RNA, 13 nt, Human
ggcaggggugggg

SEQ ID NO: 3723028 - RNA, 18 nt, Human
ggcagggucucacucugu

SEQ ID NO: 3723029 - RNA, 19 nt, Human
ggcagggucucacucuguc

SEQ ID NO: 3723030 - RNA, 19 nt, Human
ggcagggugucugcccccu

SEQ ID NO: 3723031 - RNA, 21 nt, Human
ggcagguaugaucggcaggac

SEQ ID NO: 3723032 - RNA, 17 nt, Human
ggcaggugacagugagg

SEQ ID NO: 3723033 - RNA, 21 nt, Human
ggcaggugacagugagguccu

SEQ ID NO: 3723034 - RNA, 22 nt, Human
ggcaggugccaugucugggaac

SEQ ID NO: 3723035 - RNA, 14 nt, Human
ggcaggugccucca

SEQ ID NO: 3723036 - RNA, 18 nt, Human
ggcaggugccuccaggug

SEQ ID NO: 3723037 - RNA, 20 nt, Human
ggcaggugccuccaggugug

SEQ ID NO: 3723038 - RNA, 23 nt, Human
ggcagguggaggugucaggcugc

SEQ ID NO: 3723039 - RNA, 12 nt, Human
ggcaggugggag

SEQ ID NO: 3723040 - RNA, 22 nt, Human
ggcagguguuuauuaaaauucu

SEQ ID NO: 3723041 - RNA, 15 nt, Human
ggcagguuggugggg

SEQ ID NO: 3723042 - RNA, 17 nt, Human
ggcaguaccugggcaag

SEQ ID NO: 3723043 - RNA, 21 nt, Human
ggcaguagaaggucggaggcu

SEQ ID NO: 3723044 - RNA, 22 nt, Human
ggcaguauccuguuugaggaaa

SEQ ID NO: 3723045 - RNA, 19 nt, Human
ggcaguauuuuguguccuc

SEQ ID NO: 3723046 - RNA, 13 nt, Human
uccuugucaguug

SEQ ID NO: 3723047 - RNA, 16 nt, Human
uccuuguccacccacc

SEQ ID NO: 3723048 - RNA, 16 nt, Human
uccuuguccccacacu

SEQ ID NO: 3723049 - RNA, 17 nt, Human
uccuuguccccacacuc

SEQ ID NO: 3723050 - RNA, 18 nt, Human
uccuuguccccacacucc

SEQ ID NO: 3723051 - RNA, 17 nt, Human
uccuugugaugugcacg

SEQ ID NO: 3723052 - RNA, 14 nt, Human
uccuuguggcagag

SEQ ID NO: 3723053 - RNA, 15 nt, Human
uccuuguggcagagg

SEQ ID NO: 3723054 - RNA, 19 nt, Human
uccuugugggccugggcuc

SEQ ID NO: 3723055 - RNA, 23 nt, Human
uccuugugggccugggcuccugg

SEQ ID NO: 3723056 - RNA, 17 nt, Human
uccuugugguuuauguc

SEQ ID NO: 3723057 - RNA, 16 nt, Human
uccuuuaaaaaaauuu

SEQ ID NO: 3723058 - RNA, 16 nt, Human
uccuuuaaagaugaac

SEQ ID NO: 3723059 - RNA, 12 nt, Human
uccuuuacaaaa

SEQ ID NO: 3723060 - RNA, 12 nt, Human
uccuuuacacau

SEQ ID NO: 3723061 - RNA, 15 nt, Human
uccuuuacccucauc

SEQ ID NO: 3723062 - RNA, 16 nt, Human
uccuuuacccucaucu

SEQ ID NO: 3723063 - RNA, 17 nt, Human
uccuuuacccucaucug

SEQ ID NO: 3723064 - RNA, 16 nt, Human
uccuuuacguguuuaa

SEQ ID NO: 3723065 - RNA, 18 nt, Human
uccuuuacuuucccuugc

SEQ ID NO: 3723066 - RNA, 20 nt, Human
uccuuuacuuucccuugcuu

SEQ ID NO: 3723067 - RNA, 17 nt, Human
uccuuuagcgcccaguu

SEQ ID NO: 3723068 - RNA, 23 nt, Human
uccuuuagcgcccaguugggugg

SEQ ID NO: 3723069 - RNA, 23 nt, Human
uccuuuaggagggaguuaucuaa

SEQ ID NO: 3723070 - RNA, 20 nt, Human
uccuuuaggguucugccucu

SEQ ID NO: 3723071 - RNA, 12 nt, Human
uccuuuauagag

SEQ ID NO: 3723072 - RNA, 15 nt, Human
uccuuuaugugaauu

SEQ ID NO: 3723073 - RNA, 16 nt, Human
uccuuuaugugaauuu

SEQ ID NO: 3723074 - RNA, 17 nt, Human
uccuuuauuauuauuuu

SEQ ID NO: 3723075 - RNA, 16 nt, Human
uccuuucacaaccuuc

SEQ ID NO: 3723076 - RNA, 19 nt, Human
uccuuucacaaccuucugu

SEQ ID NO: 3723077 - RNA, 16 nt, Human
uccuuucacuucuuuc

SEQ ID NO: 3723078 - RNA, 20 nt, Human
uccuuucaguggcuuggacu

SEQ ID NO: 3723079 - RNA, 18 nt, Human
uccuuucauccccaccuu

SEQ ID NO: 3723080 - RNA, 16 nt, Human
uccuuucauuuacugu

SEQ ID NO: 3723081 - RNA, 18 nt, Human
uccuuuccaaggcuucuc

SEQ ID NO: 3723082 - RNA, 13 nt, Human
uccuuucccaagc

SEQ ID NO: 3723083 - RNA, 13 nt, Human
uccuuuccccagc

SEQ ID NO: 3723084 - RNA, 14 nt, Human
uccuuuccccagcc

SEQ ID NO: 3723085 - RNA, 17 nt, Human
uccuuuccccagcccag

SEQ ID NO: 3723086 - RNA, 18 nt, Human
uccuuuccccagcccagg

SEQ ID NO: 3723087 - RNA, 13 nt, Human
uccuuucccucca

SEQ ID NO: 3723088 - RNA, 14 nt, Human
uccuuucccuuccu

SEQ ID NO: 3723089 - RNA, 17 nt, Human
uccuuucccuuccucuu

SEQ ID NO: 3723090 - RNA, 12 nt, Human
uccuuucccuuu

SEQ ID NO: 3723091 - RNA, 14 nt, Human
uccuuuccuccucu

SEQ ID NO: 3723092 - RNA, 21 nt, Human
uccuuucuaucauuuuuguac

SEQ ID NO: 3723093 - RNA, 13 nt, Human
uccuuucucaccg

SEQ ID NO: 3723094 - RNA, 14 nt, Human
uccuuucucagccg

SEQ ID NO: 3723095 - RNA, 23 nt, Human
uccuuucucagccgcuucugacu

SEQ ID NO: 3723096 - RNA, 17 nt, Human
uccuuucuccaggacca

SEQ ID NO: 3723097 - RNA, 16 nt, Human
uccuuucugccgaccc

SEQ ID NO: 3723098 - RNA, 13 nt, Human
uccuuucuggcuu

SEQ ID NO: 3723099 - RNA, 17 nt, Human
uccuuucugugcccuac

SEQ ID NO: 3723100 - RNA, 12 nt, Human
uccuuucuuuuc

SEQ ID NO: 3723101 - RNA, 16 nt, Human
uccuuucuuuuucuuc

SEQ ID NO: 3723102 - RNA, 17 nt, Human
uccuuucuuuuucuucu

SEQ ID NO: 3723103 - RNA, 20 nt, Human
uccuuucuuuuucuucuucc

SEQ ID NO: 3723104 - RNA, 14 nt, Human
uccuuugaagagga

SEQ ID NO: 3723105 - RNA, 15 nt, Human
uccuuugaagaggaa

SEQ ID NO: 3723106 - RNA, 12 nt, Human
uccuuugaagau

SEQ ID NO: 3723107 - RNA, 20 nt, Human
uccuuugauaaaauaaauga

SEQ ID NO: 3723108 - RNA, 15 nt, Human
uccuuugcaggcuca

SEQ ID NO: 3723109 - RNA, 15 nt, Human
uccuuugcagggcag

SEQ ID NO: 3723110 - RNA, 18 nt, Human
uccuuugcagggcagccc

SEQ ID NO: 3723111 - RNA, 13 nt, Human
uccuuuguacuuu

SEQ ID NO: 3723112 - RNA, 11 nt, Human
uccuuuguaua

SEQ ID NO: 3723113 - RNA, 14 nt, Human
uccuuugugaaaaa

SEQ ID NO: 3723114 - RNA, 18 nt, Human
uccuuugugaggaagccg

SEQ ID NO: 3723115 - RNA, 17 nt, Human
uccuuugugcuuaguua

SEQ ID NO: 3723116 - RNA, 17 nt, Human
uccuuugugguuuuaug

SEQ ID NO: 3723117 - RNA, 20 nt, Human
uccuuuguguguacucacug

SEQ ID NO: 3723118 - RNA, 15 nt, Human
uccuuuguguuucua

SEQ ID NO: 3723119 - RNA, 10 nt, Human
uccuuuguuc

SEQ ID NO: 3723120 - RNA, 18 nt, Human
uccuuuguuuucugacua

SEQ ID NO: 3723121 - RNA, 22 nt, Human
uccuuuguuuucugacuaauua

SEQ ID NO: 3723122 - RNA, 15 nt, Human
uccuuuguuuuuaug

SEQ ID NO: 3723123 - RNA, 19 nt, Human
uccuuuuaaaacacuucca

SEQ ID NO: 3723124 - RNA, 12 nt, Human
uccuuuuaaaga

SEQ ID NO: 3723125 - RNA, 14 nt, Human
uccuuuuaaagaaa

SEQ ID NO: 3723126 - RNA, 14 nt, Human
uccuuuuagccuag

SEQ ID NO: 3723127 - RNA, 14 nt, Human
uccuuuuauguuau

SEQ ID NO: 3723128 - RNA, 15 nt, Human
uccuuuuauguuauu

SEQ ID NO: 3723129 - RNA, 20 nt, Human
uccuuuucauaggucugaaa

SEQ ID NO: 3723130 - RNA, 14 nt, Human
uccuuuuccagagc

SEQ ID NO: 3723131 - RNA, 15 nt, Human
uccuuuuccagagca

SEQ ID NO: 3723132 - RNA, 23 nt, Human
uccuuuuccagagcauuccaguc

SEQ ID NO: 3723133 - RNA, 16 nt, Human
uccuuuucuccuaucu

SEQ ID NO: 3723134 - RNA, 19 nt, Human
uccuuuucuccuaucuuca

SEQ ID NO: 3723135 - RNA, 19 nt, Human
uccuuuucuuuuguuacug

SEQ ID NO: 3723136 - RNA, 20 nt, Human
uccuuuugacacugcucuaa

SEQ ID NO: 3723137 - RNA, 23 nt, Human
uccuuuugaccuucauuucaugu

SEQ ID NO: 3723138 - RNA, 15 nt, Human
uccuuuugguguguu

SEQ ID NO: 3723139 - RNA, 14 nt, Human
uccuuuugucuucu

SEQ ID NO: 3723140 - RNA, 22 nt, Human
uccuuuugucuucucugucuca

SEQ ID NO: 3723141 - RNA, 12 nt, Human
uccuuuuuaagg

SEQ ID NO: 3723142 - RNA, 17 nt, Human
uccuuuuuaauaugcuu

SEQ ID NO: 3723143 - RNA, 12 nt, Human
uccuuuuuauga

SEQ ID NO: 3723144 - RNA, 15 nt, Human
uccuuuuuauuuaua

SEQ ID NO: 3723145 - RNA, 22 nt, Human
uccuuuuuauuuauauguaugu

SEQ ID NO: 3723146 - RNA, 18 nt, Human
uccuuuuucccaauaaau

SEQ ID NO: 3723147 - RNA, 12 nt, Human
uccuuuuuccuc

SEQ ID NO: 3723148 - RNA, 20 nt, Human
uccuuuuucucccucuggau

SEQ ID NO: 3723149 - RNA, 14 nt, Human
uccuuuuucugauu

SEQ ID NO: 3723150 - RNA, 15 nt, Human
uccuuuuucugauua

SEQ ID NO: 3723151 - RNA, 22 nt, Human
uccuuuuucugauuagcuuugu

SEQ ID NO: 3723152 - RNA, 23 nt, Human
uccuuuuuggucgaggaguaaca

SEQ ID NO: 3723153 - RNA, 14 nt, Human
uccuuuuuuaaaag

SEQ ID NO: 3723154 - RNA, 16 nt, Human
uccuuuuuuauacaca

SEQ ID NO: 3723155 - RNA, 18 nt, Human
uccuuuuuuauacacaua

SEQ ID NO: 3723156 - RNA, 13 nt, Human
ucgaaaaaauaau

SEQ ID NO: 3723157 - RNA, 14 nt, Human
ucgaaaaucaaaug

SEQ ID NO: 3723158 - RNA, 15 nt, Human
ucgaaaauucauuuc

SEQ ID NO: 3723159 - RNA, 21 nt, Human
ucgaaaauucauuucacauua

SEQ ID NO: 3723160 - RNA, 24 nt, Human
ucgaaaauucauuucacauuaaug

SEQ ID NO: 3723161 - RNA, 13 nt, Human
ucgaaacacagaa

SEQ ID NO: 3723162 - RNA, 20 nt, Human
ucgaaaguuaguaggauaug

SEQ ID NO: 3723163 - RNA, 14 nt, Human
ucgaaauaacaaug

SEQ ID NO: 3723164 - RNA, 13 nt, Human
ucgaacccacacu

SEQ ID NO: 3723165 - RNA, 15 nt, Human
ucgaaccguuuugaa

SEQ ID NO: 3723166 - RNA, 15 nt, Human
ucgaacuccugaccu

SEQ ID NO: 3723167 - RNA, 16 nt, Human
ucgaacuccugggcuc

SEQ ID NO: 3723168 - RNA, 16 nt, Human
ucgaagucauuaaacu

SEQ ID NO: 3723169 - RNA, 18 nt, Human
ucgaagucauuaaacugg

SEQ ID NO: 3723170 - RNA, 13 nt, Human
ucgaagugcugag

SEQ ID NO: 3723171 - RNA, 12 nt, Human
ucgaaugaaauu

SEQ ID NO: 3723172 - RNA, 21 nt, Human
ucgaauuaauagcuuuuauug

SEQ ID NO: 3723173 - RNA, 19 nt, Human
ucgacacucaccaugaagc

SEQ ID NO: 3723174 - RNA, 18 nt, Human
ucgacaucacuguucaug

SEQ ID NO: 3723175 - RNA, 13 nt, Human
ucgaccugccucg

SEQ ID NO: 3723176 - RNA, 20 nt, Human
ucgaccugcggcugcugugu

SEQ ID NO: 3723177 - RNA, 12 nt, Human
ucgacucugugc

SEQ ID NO: 3723178 - RNA, 14 nt, Human
ucgacuguuguuau

SEQ ID NO: 3723179 - RNA, 22 nt, Human
ucgagaacuuucauuuuuuucc

SEQ ID NO: 3723180 - RNA, 19 nt, Human
ucgagaagcugcucuggaa

SEQ ID NO: 3723181 - RNA, 11 nt, Human
ucgagaauugu

SEQ ID NO: 3723182 - RNA, 16 nt, Human
ucgagacacagugaag

SEQ ID NO: 3723183 - RNA, 14 nt, Human
ucgagacacuugcc

SEQ ID NO: 3723184 - RNA, 13 nt, Human
ucgagaccagccu

SEQ ID NO: 3723185 - RNA, 15 nt, Human
ucgagaccauccugg

SEQ ID NO: 3723186 - RNA, 18 nt, Human
ucgagaccauccuggcua

SEQ ID NO: 3723187 - RNA, 14 nt, Human
ucgagacugcaaug

SEQ ID NO: 3723188 - RNA, 17 nt, Human
ucgagaucccaacacug

SEQ ID NO: 3723189 - RNA, 21 nt, Human
ucgagaucccaacacugccag

SEQ ID NO: 3723190 - RNA, 14 nt, Human
ucgagcagggugcu

SEQ ID NO: 3723191 - RNA, 14 nt, Human
ucgagcgcccugca

SEQ ID NO: 3723192 - RNA, 15 nt, Human
ucgagcgcccugcag

SEQ ID NO: 3723193 - RNA, 19 nt, Human
ucgagcuccccccaggucu

SEQ ID NO: 3723194 - RNA, 17 nt, Human
ucgaggaaccagagcca

SEQ ID NO: 3723195 - RNA, 13 nt, Human
ucgaggacaggga

SEQ ID NO: 3723196 - RNA, 19 nt, Human
ucgaggacuguauuuguga

SEQ ID NO: 3723197 - RNA, 11 nt, Human
ucgaggccuga

SEQ ID NO: 3723198 - RNA, 15 nt, Human
ucgagggcagggacu

SEQ ID NO: 3723199 - RNA, 13 nt, Human
ucucugacuucug

SEQ ID NO: 3723200 - RNA, 16 nt, Human
ucucugacuucugccu

SEQ ID NO: 3723201 - RNA, 19 nt, Human
ucucugacuucugccugga

SEQ ID NO: 3723202 - RNA, 15 nt, Human
ucucugagcugugca

SEQ ID NO: 3723203 - RNA, 14 nt, Human
ucucugaggacacu

SEQ ID NO: 3723204 - RNA, 17 nt, Human
ucucugaggacacuaac

SEQ ID NO: 3723205 - RNA, 23 nt, Human
ucucugaggggcuaccaggaaag

SEQ ID NO: 3723206 - RNA, 22 nt, Human
ucucugaguucuguguauuuuc

SEQ ID NO: 3723207 - RNA, 18 nt, Human
ucucugcaccguacugug

SEQ ID NO: 3723208 - RNA, 15 nt, Human
ucucugcagacuucc

SEQ ID NO: 3723209 - RNA, 20 nt, Human
ucucugcagacuucccagcu

SEQ ID NO: 3723210 - RNA, 16 nt, Human
ucucugcagccagccc

SEQ ID NO: 3723211 - RNA, 19 nt, Human
ucucugcagccagcccagc

SEQ ID NO: 3723212 - RNA, 16 nt, Human
ucucugcagcugccgg

SEQ ID NO: 3723213 - RNA, 20 nt, Human
ucucugcaggcagccugccu

SEQ ID NO: 3723214 - RNA, 15 nt, Human
ucucugcaucugacc

SEQ ID NO: 3723215 - RNA, 20 nt, Human
ucucugcauuuuucugcaga

SEQ ID NO: 3723216 - RNA, 14 nt, Human
ucucugccagugac

SEQ ID NO: 3723217 - RNA, 18 nt, Human
ucucugccauaucaguga

SEQ ID NO: 3723218 - RNA, 19 nt, Human
ucucugcccagcuuuucau

SEQ ID NO: 3723219 - RNA, 11 nt, Human
ucucugcccua

SEQ ID NO: 3723220 - RNA, 17 nt, Human
ucucugcccuccaagac

SEQ ID NO: 3723221 - RNA, 19 nt, Human
ucucugccugugagccagu

SEQ ID NO: 3723222 - RNA, 12 nt, Human
ucucugccuugc

SEQ ID NO: 3723223 - RNA, 19 nt, Human
ucucugccuuugacauuua

SEQ ID NO: 3723224 - RNA, 13 nt, Human
ucucugcuauaua

SEQ ID NO: 3723225 - RNA, 19 nt, Human
ucucugcuccaccacaucc

SEQ ID NO: 3723226 - RNA, 22 nt, Human
ucucugcucgcccuccuuucug

SEQ ID NO: 3723227 - RNA, 18 nt, Human
ucucugcucugcguguca

SEQ ID NO: 3723228 - RNA, 23 nt, Human
ucucugcucugcgugucaccugu

SEQ ID NO: 3723229 - RNA, 13 nt, Human
ucucugcugccgc

SEQ ID NO: 3723230 - RNA, 15 nt, Human
ucucugcuggcccag

SEQ ID NO: 3723231 - RNA, 11 nt, Human
ucucugcugua

SEQ ID NO: 3723232 - RNA, 14 nt, Human
ucucugcuucagcu

SEQ ID NO: 3723233 - RNA, 15 nt, Human
ucucuggaauuugaa

SEQ ID NO: 3723234 - RNA, 18 nt, Human
ucucuggagccaagucca

SEQ ID NO: 3723235 - RNA, 15 nt, Human
ucucuggccucccac

SEQ ID NO: 3723236 - RNA, 19 nt, Human
ucucuggcuguaaggcucu

SEQ ID NO: 3723237 - RNA, 13 nt, Human
ucucugggagaaa

SEQ ID NO: 3723238 - RNA, 16 nt, Human
ucucugggagaaaauc

SEQ ID NO: 3723239 - RNA, 15 nt, Human
ucucugggccucaga

SEQ ID NO: 3723240 - RNA, 15 nt, Human
ucucugggcuggaug

SEQ ID NO: 3723241 - RNA, 16 nt, Human
ucucugggcuggauga

SEQ ID NO: 3723242 - RNA, 16 nt, Human
ucucuggggcuguguu

SEQ ID NO: 3723243 - RNA, 18 nt, Human
ucucugggggcugaggag

SEQ ID NO: 3723244 - RNA, 20 nt, Human
ucucugguccggacacuccu

SEQ ID NO: 3723245 - RNA, 17 nt, Human
ucucuggugagcgagga

SEQ ID NO: 3723246 - RNA, 18 nt, Human
ucucuguaauaaacucau

SEQ ID NO: 3723247 - RNA, 19 nt, Human
ucucugucccauucccugg

SEQ ID NO: 3723248 - RNA, 20 nt, Human
ucucugucccuugcuguaug

SEQ ID NO: 3723249 - RNA, 15 nt, Human
ucucugucuaccauc

SEQ ID NO: 3723250 - RNA, 18 nt, Human
ucucugucuaccaucucc

SEQ ID NO: 3723251 - RNA, 16 nt, Human
ucucugugaacgauuu

SEQ ID NO: 3723252 - RNA, 22 nt, Human
ucucugugaacgauuuagaaag

SEQ ID NO: 3723253 - RNA, 13 nt, Human
ucucugugagaag

SEQ ID NO: 3723254 - RNA, 12 nt, Human
ucucugugccuu

SEQ ID NO: 3723255 - RNA, 17 nt, Human
ucucugugccuucgucu

SEQ ID NO: 3723256 - RNA, 16 nt, Human
ucucugugcuuugacu

SEQ ID NO: 3723257 - RNA, 22 nt, Human
ucucugugcuuugacucaccug

SEQ ID NO: 3723258 - RNA, 16 nt, Human
ucucugugucuaagau

SEQ ID NO: 3723259 - RNA, 23 nt, Human
ucucugugucuaagauucuagau

SEQ ID NO: 3723260 - RNA, 20 nt, Human
ucucuguguuuguuccuaca

SEQ ID NO: 3723261 - RNA, 14 nt, Human
ucucuguucauuuc

SEQ ID NO: 3723262 - RNA, 23 nt, Human
ucucuguucuacccguuccaaaa

SEQ ID NO: 3723263 - RNA, 13 nt, Human
ucucuguugucgu

SEQ ID NO: 3723264 - RNA, 18 nt, Human
ucucuuacccuucugugc

SEQ ID NO: 3723265 - RNA, 19 nt, Human
ucucuuacugcaaauguca

SEQ ID NO: 3723266 - RNA, 13 nt, Human
ucucuuaucugug

SEQ ID NO: 3723267 - RNA, 21 nt, Human
ucucuuaucuuacgaaaaaau

SEQ ID NO: 3723268 - RNA, 16 nt, Human
ucucuuauugccucac

SEQ ID NO: 3723269 - RNA, 22 nt, Human
ucucuuauugccucacuucagg

SEQ ID NO: 3723270 - RNA, 17 nt, Human
ucucuucagacucucag

SEQ ID NO: 3723271 - RNA, 22 nt, Human
ucucuucagacucucagcccag

SEQ ID NO: 3723272 - RNA, 15 nt, Human
ucucuucagguucuu

SEQ ID NO: 3723273 - RNA, 16 nt, Human
ucucuucagguucuua

SEQ ID NO: 3723274 - RNA, 17 nt, Human
ucucuucagucucuaua

SEQ ID NO: 3723275 - RNA, 14 nt, Human
ucucuucauacuuu

SEQ ID NO: 3723276 - RNA, 15 nt, Human
ucucuuccaggcagc

SEQ ID NO: 3723277 - RNA, 14 nt, Human
ucucuuccccucuc

SEQ ID NO: 3723278 - RNA, 15 nt, Human
ucucuuccuauccca

SEQ ID NO: 3723279 - RNA, 14 nt, Human
ucucuuccugcccc

SEQ ID NO: 3723280 - RNA, 11 nt, Human
ucucuucucca

SEQ ID NO: 3723281 - RNA, 18 nt, Human
ucucuucuccccuuccau

SEQ ID NO: 3723282 - RNA, 13 nt, Human
ucucuucugcucc

SEQ ID NO: 3723283 - RNA, 17 nt, Human
ucucuucugcuccaccc

SEQ ID NO: 3723284 - RNA, 14 nt, Human
ucucuucuuaaugu

SEQ ID NO: 3723285 - RNA, 15 nt, Human
ucucuucuuguuucu

SEQ ID NO: 3723286 - RNA, 13 nt, Human
ucucuucuuuaaa

SEQ ID NO: 3723287 - RNA, 16 nt, Human
ucucuucuuuuggcuu

SEQ ID NO: 3723288 - RNA, 13 nt, Human
ucucuugagccug

SEQ ID NO: 3723289 - RNA, 14 nt, Human
ucucuugagcuggc

SEQ ID NO: 3723290 - RNA, 18 nt, Human
ucucuugaggccaggagu

SEQ ID NO: 3723291 - RNA, 13 nt, Human
ucucuugagggag

SEQ ID NO: 3723292 - RNA, 14 nt, Human
ucucuugauucaua

SEQ ID NO: 3723293 - RNA, 22 nt, Human
ucucuugcaccaaauuaucuug

SEQ ID NO: 3723294 - RNA, 14 nt, Human
ucucuugcacccgc

SEQ ID NO: 3723295 - RNA, 22 nt, Human
ucucuugcacccgccucucccg

SEQ ID NO: 3723296 - RNA, 12 nt, Human
ucucuugccuca

SEQ ID NO: 3723297 - RNA, 13 nt, Human
ucucuugguguua

SEQ ID NO: 3723298 - RNA, 16 nt, Human
ucucuugguuuccuuc

SEQ ID NO: 3723299 - RNA, 18 nt, Human
ucucuugguuuccuuccu

SEQ ID NO: 3723300 - RNA, 19 nt, Human
ucucuugguuuccuuccuu

SEQ ID NO: 3723301 - RNA, 18 nt, Human
ucucuuguaauuuggauc

SEQ ID NO: 3723302 - RNA, 22 nt, Human
ucucuuguauaagauccuagau

SEQ ID NO: 3723303 - RNA, 20 nt, Human
ucucuuuaaugucacaggca

SEQ ID NO: 3723304 - RNA, 22 nt, Human
ucucuuuaaugucacaggcagg

SEQ ID NO: 3723305 - RNA, 16 nt, Human
ucucuuuauacagcug

SEQ ID NO: 3723306 - RNA, 17 nt, Human
ucucuuuauacagcugu

SEQ ID NO: 3723307 - RNA, 13 nt, Human
ucucuuuauuccu

SEQ ID NO: 3723308 - RNA, 22 nt, Human
ucucuuucacauuguuugcugc

SEQ ID NO: 3723309 - RNA, 12 nt, Human
ucucuuuccaug

SEQ ID NO: 3723310 - RNA, 14 nt, Human
ucucuuucccuggu

SEQ ID NO: 3723311 - RNA, 18 nt, Human
ucucuuuccuucuugccu

SEQ ID NO: 3723312 - RNA, 12 nt, Human
ucucuuuccuug

SEQ ID NO: 3723313 - RNA, 14 nt, Human
ucucuuucucuccu

SEQ ID NO: 3723314 - RNA, 13 nt, Human
ucucuuucucucu

SEQ ID NO: 3723315 - RNA, 15 nt, Human
ucucuuucucucuuc

SEQ ID NO: 3723316 - RNA, 19 nt, Human
ucucuuucucucuucccuc

SEQ ID NO: 3723317 - RNA, 12 nt, Human
ucucuuucuguc

SEQ ID NO: 3723318 - RNA, 19 nt, Human
ucucuuugauuauuugcau

SEQ ID NO: 3723319 - RNA, 16 nt, Human
ucucuuugggaauguu

SEQ ID NO: 3723320 - RNA, 13 nt, Human
ucucuuuguucuc

SEQ ID NO: 3723321 - RNA, 23 nt, Human
ucucuuuguucucagcucccccu

SEQ ID NO: 3723322 - RNA, 20 nt, Human
ucucuuuuccccuuuccugu

SEQ ID NO: 3723323 - RNA, 14 nt, Human
ucucuuuucuaguu

SEQ ID NO: 3723324 - RNA, 17 nt, Human
ucucuuuucucuuuuua

SEQ ID NO: 3723325 - RNA, 20 nt, Human
ucucuuuucuuuagagcauu

SEQ ID NO: 3723326 - RNA, 20 nt, Human
ucucuuuugaauccaugcuu

SEQ ID NO: 3723327 - RNA, 21 nt, Human
ucucuuuuugcccccucuccu

SEQ ID NO: 3723328 - RNA, 17 nt, Human
ucucuuuuuggaggugc

SEQ ID NO: 3723329 - RNA, 19 nt, Human
ucucuuuuuggaggugcuu

SEQ ID NO: 3723330 - RNA, 15 nt, Human
ucucuuuuuuacaaa

SEQ ID NO: 3723331 - RNA, 15 nt, Human
ucugaaaacggcccu

SEQ ID NO: 3723332 - RNA, 15 nt, Human
ucugaaaagugugua

SEQ ID NO: 3723333 - RNA, 23 nt, Human
ucugaaaaguguguauauauuuu

SEQ ID NO: 3723334 - RNA, 18 nt, Human
ucugaaaauauaaccagc

SEQ ID NO: 3723335 - RNA, 14 nt, Human
ucugaaaauguaug

SEQ ID NO: 3723336 - RNA, 23 nt, Human
ucugaaaauguauguguaaguau

SEQ ID NO: 3723337 - RNA, 22 nt, Human
ucugaaaauuccagaaaggaua

SEQ ID NO: 3723338 - RNA, 18 nt, Human
ucugaaacacacugaaag

SEQ ID NO: 3723339 - RNA, 10 nt, Human
ucugaaacag

SEQ ID NO: 3723340 - RNA, 11 nt, Human
ucugaaacagc

SEQ ID NO: 3723341 - RNA, 18 nt, Human
ucugaaacagcugccuua

SEQ ID NO: 3723342 - RNA, 12 nt, Human
ucugaaagcaca

SEQ ID NO: 3723343 - RNA, 12 nt, Human
ucugaaagccac

SEQ ID NO: 3723344 - RNA, 15 nt, Human
ucugaaaguuguaca

SEQ ID NO: 3723345 - RNA, 12 nt, Human
ucugaaaucuga

SEQ ID NO: 3723346 - RNA, 15 nt, Human
ucugaaaucugaaga

SEQ ID NO: 3723347 - RNA, 22 nt, Human
ucugaaaucuucccaugcauuc

SEQ ID NO: 3723348 - RNA, 22 nt, Human
ucugaaauguuacaaaaauaaa

SEQ ID NO: 3723349 - RNA, 12 nt, Human
ucugaaauucua

SEQ ID NO: 3723350 - RNA, 18 nt, Human
ucugaaauuuccugggag

SEQ ID NO: 3723351 - RNA, 20 nt, Human
ucgaggggcucucagcucag

SEQ ID NO: 3723352 - RNA, 16 nt, Human
ucgagguuucucaaag

SEQ ID NO: 3723353 - RNA, 16 nt, Human
ucgaguacugugggca

SEQ ID NO: 3723354 - RNA, 20 nt, Human
ucgaguacugugggcaauuu

SEQ ID NO: 3723355 - RNA, 23 nt, Human
ucgaguacugugggcaauuuaga

SEQ ID NO: 3723356 - RNA, 13 nt, Human
ucgagucugaggc

SEQ ID NO: 3723357 - RNA, 14 nt, Human
ucgagucugaggcc

SEQ ID NO: 3723358 - RNA, 23 nt, Human
ucgagugccgcaucucacagcua

SEQ ID NO: 3723359 - RNA, 21 nt, Human
ucgauacccaggaccaagcca

SEQ ID NO: 3723360 - RNA, 14 nt, Human
ucgauccaaauugu

SEQ ID NO: 3723361 - RNA, 15 nt, Human
ucgauccaaauugug

SEQ ID NO: 3723362 - RNA, 23 nt, Human
ucgaugaagcccaauaaaccucu

SEQ ID NO: 3723363 - RNA, 15 nt, Human
ucgaugauucaggug

SEQ ID NO: 3723364 - RNA, 22 nt, Human
ucgauguuuuauuauuucuauu

SEQ ID NO: 3723365 - RNA, 14 nt, Human
ucgauuagacugga

SEQ ID NO: 3723366 - RNA, 21 nt, Human
ucgauuagacuggacagcuug

SEQ ID NO: 3723367 - RNA, 17 nt, Human
ucgauucauauugaaua

SEQ ID NO: 3723368 - RNA, 15 nt, Human
ucgauuucuccagga

SEQ ID NO: 3723369 - RNA, 20 nt, Human
ucgcaacccgugccaagucc

SEQ ID NO: 3723370 - RNA, 16 nt, Human
ucgcaccauucugacu

SEQ ID NO: 3723371 - RNA, 15 nt, Human
ucgcaccccccuguu

SEQ ID NO: 3723372 - RNA, 17 nt, Human
ucgcaccccccuguucu

SEQ ID NO: 3723373 - RNA, 22 nt, Human
ucgcaccccccuguucuaaggg

SEQ ID NO: 3723374 - RNA, 22 nt, Human
ucgcaccggagugucuggaauu

SEQ ID NO: 3723375 - RNA, 19 nt, Human
ucgcagagaggccaggugc

SEQ ID NO: 3723376 - RNA, 21 nt, Human
ucgcagagaggccaggugcag

SEQ ID NO: 3723377 - RNA, 10 nt, Human
ucgcagccac

SEQ ID NO: 3723378 - RNA, 14 nt, Human
ucgcagccacccug

SEQ ID NO: 3723379 - RNA, 20 nt, Human
ucgcagccacccugaggagu

SEQ ID NO: 3723380 - RNA, 11 nt, Human
ucgcagccuga

SEQ ID NO: 3723381 - RNA, 17 nt, Human
ucgcaggauucuuccuc

SEQ ID NO: 3723382 - RNA, 23 nt, Human
ucgcaggauucuuccucccuccc

SEQ ID NO: 3723383 - RNA, 19 nt, Human
ucgcaggccucccugccag

SEQ ID NO: 3723384 - RNA, 20 nt, Human
ucgcaucaaaagacaauucu

SEQ ID NO: 3723385 - RNA, 22 nt, Human
ucgcaucaaaagacaauucuuu

SEQ ID NO: 3723386 - RNA, 20 nt, Human
ucgcauggucacacacugau

SEQ ID NO: 3723387 - RNA, 16 nt, Human
ucgccagcugaugacu

SEQ ID NO: 3723388 - RNA, 19 nt, Human
ucgccagcugaugacucaa

SEQ ID NO: 3723389 - RNA, 21 nt, Human
ucgcccaccgcaugcccccuc

SEQ ID NO: 3723390 - RNA, 12 nt, Human
ucgcccaggcug

SEQ ID NO: 3723391 - RNA, 19 nt, Human
ucgcccagucccagcagcc

SEQ ID NO: 3723392 - RNA, 21 nt, Human
ucgcccagucccagcagccag

SEQ ID NO: 3723393 - RNA, 14 nt, Human
ucgcccagucugga

SEQ ID NO: 3723394 - RNA, 16 nt, Human
ucgcccagugcccugg

SEQ ID NO: 3723395 - RNA, 19 nt, Human
ucgcccagugcccuggggc

SEQ ID NO: 3723396 - RNA, 16 nt, Human
ucgcccauccccuuga

SEQ ID NO: 3723397 - RNA, 22 nt, Human
ucgcccaugagagcgcagcccg

SEQ ID NO: 3723398 - RNA, 18 nt, Human
ucgccccagaucaccagc

SEQ ID NO: 3723399 - RNA, 20 nt, Human
ucgccccagcaggugcugac

SEQ ID NO: 3723400 - RNA, 13 nt, Human
ucgcccgcccacu

SEQ ID NO: 3723401 - RNA, 21 nt, Human
ucgcccgcccacuguccuggg

SEQ ID NO: 3723402 - RNA, 23 nt, Human
ucgcccgcccacuguccugggcg

SEQ ID NO: 3723403 - RNA, 19 nt, Human
ucgcccuuacuucuugccc

SEQ ID NO: 3723404 - RNA, 20 nt, Human
ucgcccuuacuucuugcccu

SEQ ID NO: 3723405 - RNA, 16 nt, Human
ucgccggaucugaggg

SEQ ID NO: 3723406 - RNA, 17 nt, Human
ucgccguugaagaggaa

SEQ ID NO: 3723407 - RNA, 12 nt, Human
ucgccucagccu

SEQ ID NO: 3723408 - RNA, 23 nt, Human
ucgccucggaucagcugagccuu

SEQ ID NO: 3723409 - RNA, 13 nt, Human
ucgccuggagccc

SEQ ID NO: 3723410 - RNA, 20 nt, Human
ucgccuguggagcucagccc

SEQ ID NO: 3723411 - RNA, 21 nt, Human
ucgccuguggagcucagcccc

SEQ ID NO: 3723412 - RNA, 20 nt, Human
ucgccuuagcauguuugcug

SEQ ID NO: 3723413 - RNA, 19 nt, Human
ucgccuuucagcaggcagc

SEQ ID NO: 3723414 - RNA, 22 nt, Human
ucgcgaugggaaccgauggugg

SEQ ID NO: 3723415 - RNA, 14 nt, Human
ucgcgcucagcaug

SEQ ID NO: 3723416 - RNA, 15 nt, Human
ucgcgcucaguaaac

SEQ ID NO: 3723417 - RNA, 15 nt, Human
ucgcgcugccugugu

SEQ ID NO: 3723418 - RNA, 18 nt, Human
ucgcggcggagcuggccc

SEQ ID NO: 3723419 - RNA, 19 nt, Human
ucgcggcggagcuggcccc

SEQ ID NO: 3723420 - RNA, 20 nt, Human
ucgcggcggagcuggccccg

SEQ ID NO: 3723421 - RNA, 18 nt, Human
ucgcgugcccucgcugcu

SEQ ID NO: 3723422 - RNA, 13 nt, Human
ucgcuaugugcac

SEQ ID NO: 3723423 - RNA, 18 nt, Human
ucgcuauugucaccaggg

SEQ ID NO: 3723424 - RNA, 14 nt, Human
ucgcuccaacucca

SEQ ID NO: 3723425 - RNA, 18 nt, Human
ucgcuccaccuugcagcu

SEQ ID NO: 3723426 - RNA, 21 nt, Human
ucgcucccacauucugaugag

SEQ ID NO: 3723427 - RNA, 15 nt, Human
ucgcuccccacucug

SEQ ID NO: 3723428 - RNA, 13 nt, Human
ucgcucccuccca

SEQ ID NO: 3723429 - RNA, 19 nt, Human
ucgcuccucaaccccuccc

SEQ ID NO: 3723430 - RNA, 12 nt, Human
ucgcuccugugu

SEQ ID NO: 3723431 - RNA, 13 nt, Human
ucgcuccuguguc

SEQ ID NO: 3723432 - RNA, 20 nt, Human
ucgcucugcuggccuggccg

SEQ ID NO: 3723433 - RNA, 21 nt, Human
ucgcucugcuggccuggccgg

SEQ ID NO: 3723434 - RNA, 22 nt, Human
ucgcucugucacccaggcugga

SEQ ID NO: 3723435 - RNA, 16 nt, Human
ucgcugacuucaugga

SEQ ID NO: 3723436 - RNA, 17 nt, Human
ucgcugaugcugggcug

SEQ ID NO: 3723437 - RNA, 16 nt, Human
ucgcugcuucguggga

SEQ ID NO: 3723438 - RNA, 11 nt, Human
ucgcuggcccc

SEQ ID NO: 3723439 - RNA, 14 nt, Human
ucgcuggcccccac

SEQ ID NO: 3723440 - RNA, 17 nt, Human
ucgcuggcccccacugg

SEQ ID NO: 3723441 - RNA, 14 nt, Human
ucgcuguugcugaa

SEQ ID NO: 3723442 - RNA, 15 nt, Human
ucgcuucccccauag

SEQ ID NO: 3723443 - RNA, 19 nt, Human
ucgcuucccccauagccac

SEQ ID NO: 3723444 - RNA, 22 nt, Human
ucgcuucuuagaacaguggaaa

SEQ ID NO: 3723445 - RNA, 17 nt, Human
ucgcuucuugccucugu

SEQ ID NO: 3723446 - RNA, 19 nt, Human
ucgcuucuugccucugugc

SEQ ID NO: 3723447 - RNA, 22 nt, Human
ucgcuuggcuccaugcuccuca

SEQ ID NO: 3723448 - RNA, 17 nt, Human
ucgcuuguaaauaccag

SEQ ID NO: 3723449 - RNA, 13 nt, Human
ucggaaaaauaau

SEQ ID NO: 3723450 - RNA, 18 nt, Human
ucggaaaacaugcuacac

SEQ ID NO: 3723451 - RNA, 21 nt, Human
ucggaaaccuugguguaguug

SEQ ID NO: 3723452 - RNA, 15 nt, Human
ucggaaaucuuaaac

SEQ ID NO: 3723453 - RNA, 17 nt, Human
ucggaaccgcucaccua

SEQ ID NO: 3723454 - RNA, 19 nt, Human
ucggacaagacccccagca

SEQ ID NO: 3723455 - RNA, 10 nt, Human
ucggaccagc

SEQ ID NO: 3723456 - RNA, 17 nt, Human
ucggaccuuucagcugu

SEQ ID NO: 3723457 - RNA, 19 nt, Human
ucggacuaagccuaccugc

SEQ ID NO: 3723458 - RNA, 12 nt, Human
ucggagaagagc

SEQ ID NO: 3723459 - RNA, 16 nt, Human
ucggagaagagcgcag

SEQ ID NO: 3723460 - RNA, 16 nt, Human
ucggagaagagcuguu

SEQ ID NO: 3723461 - RNA, 23 nt, Human
ucggagacagugaucuccauaug

SEQ ID NO: 3723462 - RNA, 16 nt, Human
ucggagcaucccggag

SEQ ID NO: 3723463 - RNA, 22 nt, Human
ucggagccucauccgaggcagg

SEQ ID NO: 3723464 - RNA, 13 nt, Human
ucggaggccccac

SEQ ID NO: 3723465 - RNA, 17 nt, Human
ucggaggccccacugau

SEQ ID NO: 3723466 - RNA, 18 nt, Human
ucggaggccccacugaug

SEQ ID NO: 3723467 - RNA, 14 nt, Human
ucggaggcugcccc

SEQ ID NO: 3723468 - RNA, 22 nt, Human
ucggagggaauugaggucugcu

SEQ ID NO: 3723469 - RNA, 19 nt, Human
ucggauaugauuguuucuc

SEQ ID NO: 3723470 - RNA, 18 nt, Human
ucggauccagggaggcug

SEQ ID NO: 3723471 - RNA, 14 nt, Human
ucggauuuuuucca

SEQ ID NO: 3723472 - RNA, 13 nt, Human
ucggcacagccug

SEQ ID NO: 3723473 - RNA, 14 nt, Human
ucggcacagccugg

SEQ ID NO: 3723474 - RNA, 15 nt, Human
ucggcacuguacaaa

SEQ ID NO: 3723475 - RNA, 16 nt, Human
ucggcagauacugucu

SEQ ID NO: 3723476 - RNA, 22 nt, Human
ucggcauugguucccuuugcuc

SEQ ID NO: 3723477 - RNA, 15 nt, Human
ucggccuagggcccc

SEQ ID NO: 3723478 - RNA, 13 nt, Human
ucggccuccaucc

SEQ ID NO: 3723479 - RNA, 15 nt, Human
ucggccugcccccac

SEQ ID NO: 3723480 - RNA, 19 nt, Human
ucggccugcccccacccca

SEQ ID NO: 3723481 - RNA, 19 nt, Human
ucggcuccccauguguccu

SEQ ID NO: 3723482 - RNA, 12 nt, Human
ucggcuccugcu

SEQ ID NO: 3723483 - RNA, 17 nt, Human
ucggcuggcuccccugc

SEQ ID NO: 3723484 - RNA, 18 nt, Human
ucggcuggcuccccugca

SEQ ID NO: 3723485 - RNA, 20 nt, Human
ucggcuggcuccccugcagc

SEQ ID NO: 3723486 - RNA, 14 nt, Human
ucgggaacaguguu

SEQ ID NO: 3723487 - RNA, 24 nt, Human
ucgggaagagaggaguucaaugau

SEQ ID NO: 3723488 - RNA, 16 nt, Human
ucgggacaccugcccu

SEQ ID NO: 3723489 - RNA, 19 nt, Human
ucgggacaccugcccugcc

SEQ ID NO: 3723490 - RNA, 19 nt, Human
ucgggaggcugaggcacaa

SEQ ID NO: 3723491 - RNA, 21 nt, Human
ucgggaggucgaggcaggagg

SEQ ID NO: 3723492 - RNA, 11 nt, Human
ucgggcaugac

SEQ ID NO: 3723493 - RNA, 18 nt, Human
ucgggcccuucuugcugc

SEQ ID NO: 3723494 - RNA, 20 nt, Human
ucgggcccuucuugcugccc

SEQ ID NO: 3723495 - RNA, 23 nt, Human
ucgggcccuucuugcugcccugc

SEQ ID NO: 3723496 - RNA, 13 nt, Human
ucgggcugugccc

SEQ ID NO: 3723497 - RNA, 13 nt, Human
ucggggagccuua

SEQ ID NO: 3723498 - RNA, 17 nt, Human
ucggggcaugcuggggc

SEQ ID NO: 3723499 - RNA, 14 nt, Human
ucggggccagaggc

SEQ ID NO: 3723500 - RNA, 13 nt, Human
ucgggggcuggcc

SEQ ID NO: 3723501 - RNA, 19 nt, Human
ggcagucaccugcccagau

SEQ ID NO: 3723502 - RNA, 23 nt, Human
ggcagucauucagcaccagagca

SEQ ID NO: 3723503 - RNA, 11 nt, Human
ggcagucccuu

SEQ ID NO: 3723504 - RNA, 19 nt, Human
ggcagucugaauuuuuaaa

SEQ ID NO: 3723505 - RNA, 20 nt, Human
ggcagucugagagaggccau

SEQ ID NO: 3723506 - RNA, 13 nt, Human
ggcagucuggagg

SEQ ID NO: 3723507 - RNA, 21 nt, Human
ggcagucuggaggggcauggc

SEQ ID NO: 3723508 - RNA, 16 nt, Human
ggcagugcagcaacca

SEQ ID NO: 3723509 - RNA, 21 nt, Human
ggcagugcagcaaccagagca

SEQ ID NO: 3723510 - RNA, 14 nt, Human
ggcagugccagggc

SEQ ID NO: 3723511 - RNA, 14 nt, Human
ggcagugggagcug

SEQ ID NO: 3723512 - RNA, 17 nt, Human
ggcagugggagcugccu

SEQ ID NO: 3723513 - RNA, 19 nt, Human
ggcagugggagcugccugu

SEQ ID NO: 3723514 - RNA, 23 nt, Human
ggcagugggucccacuuccccuc

SEQ ID NO: 3723515 - RNA, 16 nt, Human
ggcaguucgcagccac

SEQ ID NO: 3723516 - RNA, 17 nt, Human
ggcaguucgcagccacc

SEQ ID NO: 3723517 - RNA, 16 nt, Human
ggcaguugcccagccu

SEQ ID NO: 3723518 - RNA, 18 nt, Human
ggcaguuuaaagcacaau

SEQ ID NO: 3723519 - RNA, 16 nt, Human
ggcaguuuuucuguau

SEQ ID NO: 3723520 - RNA, 16 nt, Human
ggcauaaaacagcuuu

SEQ ID NO: 3723521 - RNA, 13 nt, Human
ggcauaaacuguu

SEQ ID NO: 3723522 - RNA, 12 nt, Human
ggcauaaaguaa

SEQ ID NO: 3723523 - RNA, 16 nt, Human
ggcauaacauaaaucu

SEQ ID NO: 3723524 - RNA, 19 nt, Human
ggcauagaugcaggugagc

SEQ ID NO: 3723525 - RNA, 19 nt, Human
ggcauagcccagacacaga

SEQ ID NO: 3723526 - RNA, 13 nt, Human
ggcauagcuacgu

SEQ ID NO: 3723527 - RNA, 16 nt, Human
ggcaucacagggcaga

SEQ ID NO: 3723528 - RNA, 22 nt, Human
ggcaucacagggcagagccggg

SEQ ID NO: 3723529 - RNA, 23 nt, Human
ggcaucacagggcagagccggga

SEQ ID NO: 3723530 - RNA, 16 nt, Human
ggcaucagcuggcguc

SEQ ID NO: 3723531 - RNA, 18 nt, Human
ggcauccagagucccugc

SEQ ID NO: 3723532 - RNA, 13 nt, Human
ggcauccaugggg

SEQ ID NO: 3723533 - RNA, 22 nt, Human
ggcauccauggggucucucaca

SEQ ID NO: 3723534 - RNA, 13 nt, Human
ggcaucccugggc

SEQ ID NO: 3723535 - RNA, 22 nt, Human
ggcaucccuuuuucauaaauua

SEQ ID NO: 3723536 - RNA, 16 nt, Human
ggcauccuccagcccc

SEQ ID NO: 3723537 - RNA, 17 nt, Human
ggcauccucuuuuucca

SEQ ID NO: 3723538 - RNA, 20 nt, Human
ggcauccuuccucacaccag

SEQ ID NO: 3723539 - RNA, 20 nt, Human
ggcaucgcaauguaagacuc

SEQ ID NO: 3723540 - RNA, 23 nt, Human
ggcaucggggagccgggagccug

SEQ ID NO: 3723541 - RNA, 13 nt, Human
ggcaucuccagga

SEQ ID NO: 3723542 - RNA, 14 nt, Human
ggcaucuccaggaa

SEQ ID NO: 3723543 - RNA, 15 nt, Human
ggcaucuccaggaag

SEQ ID NO: 3723544 - RNA, 14 nt, Human
ggcaucuccugugc

SEQ ID NO: 3723545 - RNA, 16 nt, Human
ggcaucugacacaaaa

SEQ ID NO: 3723546 - RNA, 20 nt, Human
ggcaucugacacaaaaaaag

SEQ ID NO: 3723547 - RNA, 15 nt, Human
ggcaucugcacccuc

SEQ ID NO: 3723548 - RNA, 16 nt, Human
ggcaucugccccuccc

SEQ ID NO: 3723549 - RNA, 18 nt, Human
ggcaucuggccuggccag

SEQ ID NO: 3723550 - RNA, 21 nt, Human
ggcaucuggccuggccagugc

SEQ ID NO: 3723551 - RNA, 17 nt, Human
ggcaucuugcuggcuac

SEQ ID NO: 3723552 - RNA, 16 nt, Human
ggcaucuuugccuugg

SEQ ID NO: 3723553 - RNA, 21 nt, Human
ggcaucuuugccuugggcugc

SEQ ID NO: 3723554 - RNA, 16 nt, Human
ggcaucuuuggggagg

SEQ ID NO: 3723555 - RNA, 11 nt, Human
ggcaucuuuug

SEQ ID NO: 3723556 - RNA, 14 nt, Human
ggcaucuuuuguau

SEQ ID NO: 3723557 - RNA, 16 nt, Human
ggcaucuuuuguauua

SEQ ID NO: 3723558 - RNA, 14 nt, Human
ggcaugaacaugua

SEQ ID NO: 3723559 - RNA, 20 nt, Human
ggcaugaagagcaaaaauau

SEQ ID NO: 3723560 - RNA, 22 nt, Human
ggcaugaaguuuccuuggcugg

SEQ ID NO: 3723561 - RNA, 22 nt, Human
ggcaugacacgaauauugcuga

SEQ ID NO: 3723562 - RNA, 20 nt, Human
ggcaugagggguuccucccc

SEQ ID NO: 3723563 - RNA, 15 nt, Human
ggcaugauccaagca

SEQ ID NO: 3723564 - RNA, 15 nt, Human
ggcaugcacagcugu

SEQ ID NO: 3723565 - RNA, 19 nt, Human
ggcaugccccggccaccuc

SEQ ID NO: 3723566 - RNA, 21 nt, Human
ggcaugccccggccaccucug

SEQ ID NO: 3723567 - RNA, 15 nt, Human
ggcaugccuggacaa

SEQ ID NO: 3723568 - RNA, 14 nt, Human
ggcaugccuugugc

SEQ ID NO: 3723569 - RNA, 16 nt, Human
ggcaugcggucgggca

SEQ ID NO: 3723570 - RNA, 17 nt, Human
ggcaugcuaaagccuuc

SEQ ID NO: 3723571 - RNA, 22 nt, Human
ggcaugcuggcucccagggcca

SEQ ID NO: 3723572 - RNA, 14 nt, Human
ggcauggacuucug

SEQ ID NO: 3723573 - RNA, 13 nt, Human
ggcauggcagccc

SEQ ID NO: 3723574 - RNA, 18 nt, Human
ggcauggccagguggcca

SEQ ID NO: 3723575 - RNA, 12 nt, Human
ggcauggcccug

SEQ ID NO: 3723576 - RNA, 17 nt, Human
ggcauggcccugggguc

SEQ ID NO: 3723577 - RNA, 16 nt, Human
ggcauggcuccagucu

SEQ ID NO: 3723578 - RNA, 19 nt, Human
ggcaugggggccucagggc

SEQ ID NO: 3723579 - RNA, 19 nt, Human
ggcauggggugggccucug

SEQ ID NO: 3723580 - RNA, 21 nt, Human
ggcauggggugggccucuggu

SEQ ID NO: 3723581 - RNA, 16 nt, Human
ggcaugguaccagccc

SEQ ID NO: 3723582 - RNA, 17 nt, Human
ggcaugguaccagcccu

SEQ ID NO: 3723583 - RNA, 18 nt, Human
ggcaugguaccagcccug

SEQ ID NO: 3723584 - RNA, 19 nt, Human
ggcaugguggcgcaagccu

SEQ ID NO: 3723585 - RNA, 22 nt, Human
ggcaugguguucuccugcugcu

SEQ ID NO: 3723586 - RNA, 22 nt, Human
ggcaugguuuugugccaucugu

SEQ ID NO: 3723587 - RNA, 21 nt, Human
ggcauguaaauguaaacucag

SEQ ID NO: 3723588 - RNA, 15 nt, Human
ggcauguauuggccu

SEQ ID NO: 3723589 - RNA, 16 nt, Human
ggcauguauuggccug

SEQ ID NO: 3723590 - RNA, 13 nt, Human
ggcaugugaaggg

SEQ ID NO: 3723591 - RNA, 23 nt, Human
ggcaugugaugagaggaaaucac

SEQ ID NO: 3723592 - RNA, 16 nt, Human
ggcauguggccugugg

SEQ ID NO: 3723593 - RNA, 17 nt, Human
ggcauguguauguuccc

SEQ ID NO: 3723594 - RNA, 20 nt, Human
ggcauguucucugaggacac

SEQ ID NO: 3723595 - RNA, 16 nt, Human
ggcauguuuccagcag

SEQ ID NO: 3723596 - RNA, 17 nt, Human
ggcauuaauguuucuau

SEQ ID NO: 3723597 - RNA, 19 nt, Human
ggcauuagaauuauuuaaa

SEQ ID NO: 3723598 - RNA, 20 nt, Human
ggcauuauguccacugugua

SEQ ID NO: 3723599 - RNA, 16 nt, Human
ggcauuccccaggagg

SEQ ID NO: 3723600 - RNA, 19 nt, Human
ggcauuccccaggaggcca

SEQ ID NO: 3723601 - RNA, 12 nt, Human
ggcauucucucu

SEQ ID NO: 3723602 - RNA, 16 nt, Human
ggcauucuuguacagu

SEQ ID NO: 3723603 - RNA, 19 nt, Human
ggcauugccucggcuggcu

SEQ ID NO: 3723604 - RNA, 19 nt, Human
ggcauuggcagcaggugcu

SEQ ID NO: 3723605 - RNA, 13 nt, Human
ggcauuucacaaa

SEQ ID NO: 3723606 - RNA, 12 nt, Human
ggcauuuccugg

SEQ ID NO: 3723607 - RNA, 15 nt, Human
ggcauuugcaauaaa

SEQ ID NO: 3723608 - RNA, 21 nt, Human
ggcauuugcaggguccucuuc

SEQ ID NO: 3723609 - RNA, 23 nt, Human
ggcauuuguuucuuucucugagg

SEQ ID NO: 3723610 - RNA, 17 nt, Human
ggccaaaagcaguaaau

SEQ ID NO: 3723611 - RNA, 14 nt, Human
ggccaaacaagugu

SEQ ID NO: 3723612 - RNA, 15 nt, Human
ggccaaaccucuguu

SEQ ID NO: 3723613 - RNA, 12 nt, Human
ggccaaacugcu

SEQ ID NO: 3723614 - RNA, 17 nt, Human
ggccaaagaaccaaaga

SEQ ID NO: 3723615 - RNA, 15 nt, Human
ggccaaagacaaaua

SEQ ID NO: 3723616 - RNA, 16 nt, Human
ggccaaagacaaauag

SEQ ID NO: 3723617 - RNA, 14 nt, Human
ggccaaaggaagca

SEQ ID NO: 3723618 - RNA, 22 nt, Human
ggccaaaggagggucaggaagg

SEQ ID NO: 3723619 - RNA, 21 nt, Human
ggccaaauauauucucuuugg

SEQ ID NO: 3723620 - RNA, 13 nt, Human
ggccaaauucccu

SEQ ID NO: 3723621 - RNA, 15 nt, Human
ggccaacaccaggga

SEQ ID NO: 3723622 - RNA, 13 nt, Human
ggccaacauggua

SEQ ID NO: 3723623 - RNA, 20 nt, Human
ggccaacccuucuccucuug

SEQ ID NO: 3723624 - RNA, 15 nt, Human
ggccaagaagcagug

SEQ ID NO: 3723625 - RNA, 22 nt, Human
ggccaagaauauugcaaaauac

SEQ ID NO: 3723626 - RNA, 21 nt, Human
ggccaagaauguacguccagc

SEQ ID NO: 3723627 - RNA, 19 nt, Human
ggccaagagaaacuuccua

SEQ ID NO: 3723628 - RNA, 22 nt, Human
ggccaagagaugcagugccagg

SEQ ID NO: 3723629 - RNA, 14 nt, Human
ggccaagaguggcc

SEQ ID NO: 3723630 - RNA, 17 nt, Human
ggccaagaguggcccca

SEQ ID NO: 3723631 - RNA, 19 nt, Human
ggccaagaguggccccacc

SEQ ID NO: 3723632 - RNA, 22 nt, Human
ggccaagaguggccccaccugg

SEQ ID NO: 3723633 - RNA, 17 nt, Human
ggccaagauaggaccuu

SEQ ID NO: 3723634 - RNA, 22 nt, Human
ggccaagcugaggugcccagga

SEQ ID NO: 3723635 - RNA, 15 nt, Human
ggccaaggaccugag

SEQ ID NO: 3723636 - RNA, 16 nt, Human
ggccaaggaccugaga

SEQ ID NO: 3723637 - RNA, 19 nt, Human
ggccaaggaccugagaccu

SEQ ID NO: 3723638 - RNA, 11 nt, Human
ggccaaggacu

SEQ ID NO: 3723639 - RNA, 13 nt, Human
ggccaaggacugc

SEQ ID NO: 3723640 - RNA, 17 nt, Human
ggccaaggacugccgac

SEQ ID NO: 3723641 - RNA, 16 nt, Human
ggccaaggagcugcua

SEQ ID NO: 3723642 - RNA, 21 nt, Human
ggccaaggaugccccgucccc

SEQ ID NO: 3723643 - RNA, 21 nt, Human
ggccaaggggagucaccuucc

SEQ ID NO: 3723644 - RNA, 14 nt, Human
ggccaagucccacc

SEQ ID NO: 3723645 - RNA, 16 nt, Human
ggccaagugcaggcug

SEQ ID NO: 3723646 - RNA, 16 nt, Human
ggccaaucagaagcua

SEQ ID NO: 3723647 - RNA, 17 nt, Human
ggccaauggaaaccuca

SEQ ID NO: 3723648 - RNA, 22 nt, Human
ggccaauggaaaccucacgcug

SEQ ID NO: 3723649 - RNA, 16 nt, Human
ggccacaagacccuug

SEQ ID NO: 3723650 - RNA, 17 nt, Human
ggccacaagacccuugu

SEQ ID NO: 3723651 - RNA, 16 nt, Human
ucggggggacagcucc

SEQ ID NO: 3723652 - RNA, 23 nt, Human
ucgggggggacccuccaaggcca

SEQ ID NO: 3723653 - RNA, 18 nt, Human
ucggguuucucuguggcu

SEQ ID NO: 3723654 - RNA, 21 nt, Human
ucgguacccggggcccagggc

SEQ ID NO: 3723655 - RNA, 22 nt, Human
ucgguacccggggcccagggca

SEQ ID NO: 3723656 - RNA, 13 nt, Human
ucgguacucccau

SEQ ID NO: 3723657 - RNA, 14 nt, Human
ucgguccugucucc

SEQ ID NO: 3723658 - RNA, 18 nt, Human
ucgguccugucuccccuc

SEQ ID NO: 3723659 - RNA, 12 nt, Human
ucggugaagaaa

SEQ ID NO: 3723660 - RNA, 22 nt, Human
ucgguggagacuaucagcccaa

SEQ ID NO: 3723661 - RNA, 22 nt, Human
ucgguguccauuuauagaauaa

SEQ ID NO: 3723662 - RNA, 13 nt, Human
ucguaaaauuaag

SEQ ID NO: 3723663 - RNA, 17 nt, Human
ucguaaacaucucagag

SEQ ID NO: 3723664 - RNA, 13 nt, Human
ucguaaagauuug

SEQ ID NO: 3723665 - RNA, 15 nt, Human
ucguaaagauuuggg

SEQ ID NO: 3723666 - RNA, 15 nt, Human
ucguacagaaagcug

SEQ ID NO: 3723667 - RNA, 16 nt, Human
ucguacagaaagcugc

SEQ ID NO: 3723668 - RNA, 14 nt, Human
ucguacauaauacu

SEQ ID NO: 3723669 - RNA, 13 nt, Human
ucguaugaaaaug

SEQ ID NO: 3723670 - RNA, 15 nt, Human
ucguaugaaaaugag

SEQ ID NO: 3723671 - RNA, 18 nt, Human
ucguaugauacuucgaca

SEQ ID NO: 3723672 - RNA, 22 nt, Human
ucguaugauacuucgacacugu

SEQ ID NO: 3723673 - RNA, 15 nt, Human
ucguauucaccuuca

SEQ ID NO: 3723674 - RNA, 23 nt, Human
ucgucaucauuuuuccuucccuu

SEQ ID NO: 3723675 - RNA, 15 nt, Human
ucguccacagcuucc

SEQ ID NO: 3723676 - RNA, 16 nt, Human
ucguccacagcuuccu

SEQ ID NO: 3723677 - RNA, 17 nt, Human
ucguccacagcuuccug

SEQ ID NO: 3723678 - RNA, 14 nt, Human
ucguccccaaguga

SEQ ID NO: 3723679 - RNA, 14 nt, Human
ucguccucccccug

SEQ ID NO: 3723680 - RNA, 16 nt, Human
ucguccucccccugcc

SEQ ID NO: 3723681 - RNA, 23 nt, Human
ucguccucccccugccagugccu

SEQ ID NO: 3723682 - RNA, 19 nt, Human
ucguccucguuuguguucu

SEQ ID NO: 3723683 - RNA, 19 nt, Human
ucguccuuacuccuguggg

SEQ ID NO: 3723684 - RNA, 18 nt, Human
ucgucgagcuccccccag

SEQ ID NO: 3723685 - RNA, 16 nt, Human
ucgucgcacagucucu

SEQ ID NO: 3723686 - RNA, 21 nt, Human
ucgucucggccuucacaaucu

SEQ ID NO: 3723687 - RNA, 23 nt, Human
ucgucucuuuuacccuggccccu

SEQ ID NO: 3723688 - RNA, 14 nt, Human
ucgucuucacucuu

SEQ ID NO: 3723689 - RNA, 15 nt, Human
ucgucuuucccaaag

SEQ ID NO: 3723690 - RNA, 15 nt, Human
ucgucuuucccaugg

SEQ ID NO: 3723691 - RNA, 20 nt, Human
ucgucuuucccauggggagg

SEQ ID NO: 3723692 - RNA, 16 nt, Human
ucgugagcucuuguga

SEQ ID NO: 3723693 - RNA, 22 nt, Human
ucgugagcucuugugaggaaag

SEQ ID NO: 3723694 - RNA, 14 nt, Human
ucgugagucauuua

SEQ ID NO: 3723695 - RNA, 21 nt, Human
ucgugaugcuaugauguuagu

SEQ ID NO: 3723696 - RNA, 13 nt, Human
ucgugauggggca

SEQ ID NO: 3723697 - RNA, 20 nt, Human
ucgugauuuucaagcagcau

SEQ ID NO: 3723698 - RNA, 19 nt, Human
ucgugcagcauaugaggau

SEQ ID NO: 3723699 - RNA, 20 nt, Human
ucgugcauuggaagacccca

SEQ ID NO: 3723700 - RNA, 20 nt, Human
ucgugccagucgcgcugccu

SEQ ID NO: 3723701 - RNA, 21 nt, Human
ucgugccagucgcgcugccug

SEQ ID NO: 3723702 - RNA, 23 nt, Human
ucgugccuccuuccaccucccuc

SEQ ID NO: 3723703 - RNA, 12 nt, Human
ucgugccugugu

SEQ ID NO: 3723704 - RNA, 21 nt, Human
ucgugccuguguccaugcgcu

SEQ ID NO: 3723705 - RNA, 22 nt, Human
ucguggacacacacagacuauu

SEQ ID NO: 3723706 - RNA, 19 nt, Human
ucguggacaccugcccugc

SEQ ID NO: 3723707 - RNA, 22 nt, Human
ucguggacugagugggaagccc

SEQ ID NO: 3723708 - RNA, 19 nt, Human
ucguggccuuccccagccu

SEQ ID NO: 3723709 - RNA, 12 nt, Human
ucguggcuguca

SEQ ID NO: 3723710 - RNA, 12 nt, Human
ucguggggaggu

SEQ ID NO: 3723711 - RNA, 15 nt, Human
ucguggggugugcug

SEQ ID NO: 3723712 - RNA, 15 nt, Human
ucguguaaauuaugu

SEQ ID NO: 3723713 - RNA, 13 nt, Human
ucguguauccugg

SEQ ID NO: 3723714 - RNA, 16 nt, Human
ucguguccccuauccu

SEQ ID NO: 3723715 - RNA, 21 nt, Human
ucgugucuggcacagccuggc

SEQ ID NO: 3723716 - RNA, 19 nt, Human
ucgugugcaacagacaagu

SEQ ID NO: 3723717 - RNA, 16 nt, Human
ucguuaaaaaguuguu

SEQ ID NO: 3723718 - RNA, 15 nt, Human
ucguuagaccgcucu

SEQ ID NO: 3723719 - RNA, 20 nt, Human
ucguuagggaagagaaacag

SEQ ID NO: 3723720 - RNA, 19 nt, Human
ucguuaguaucuaacaugu

SEQ ID NO: 3723721 - RNA, 15 nt, Human
ucguuauguguguau

SEQ ID NO: 3723722 - RNA, 15 nt, Human
ucguucaaagcauga

SEQ ID NO: 3723723 - RNA, 12 nt, Human
ucguuccuuucu

SEQ ID NO: 3723724 - RNA, 17 nt, Human
ucguucuuguucuguuu

SEQ ID NO: 3723725 - RNA, 14 nt, Human
ucguucuuucuagc

SEQ ID NO: 3723726 - RNA, 14 nt, Human
ucguucuuuuuaag

SEQ ID NO: 3723727 - RNA, 17 nt, Human
ucguugacuuuagggac

SEQ ID NO: 3723728 - RNA, 12 nt, Human
ucguugugaggg

SEQ ID NO: 3723729 - RNA, 19 nt, Human
ucguuuauuuucaagaaua

SEQ ID NO: 3723730 - RNA, 13 nt, Human
ucguuuuccaaac

SEQ ID NO: 3723731 - RNA, 11 nt, Human
ucguuuuugua

SEQ ID NO: 3723732 - RNA, 18 nt, Human
ucuaaaaaacagaggcca

SEQ ID NO: 3723733 - RNA, 14 nt, Human
ucuaaaaacaccaa

SEQ ID NO: 3723734 - RNA, 14 nt, Human
ucuaaaaagucaga

SEQ ID NO: 3723735 - RNA, 15 nt, Human
ucuaaaaauauacau

SEQ ID NO: 3723736 - RNA, 11 nt, Human
ucuaaaacucc

SEQ ID NO: 3723737 - RNA, 15 nt, Human
ucuaaaacuguacuu

SEQ ID NO: 3723738 - RNA, 22 nt, Human
ucuaaaacuguacuuugauuca

SEQ ID NO: 3723739 - RNA, 18 nt, Human
ucuaaaagaaaaaggcau

SEQ ID NO: 3723740 - RNA, 22 nt, Human
ucuaaaagaauauucagagaau

SEQ ID NO: 3723741 - RNA, 13 nt, Human
ucuaaaagacuuc

SEQ ID NO: 3723742 - RNA, 17 nt, Human
ucuaaaagguaaugugu

SEQ ID NO: 3723743 - RNA, 18 nt, Human
ucuaaaagguaaugugug

SEQ ID NO: 3723744 - RNA, 16 nt, Human
ucuaaaagguucaggg

SEQ ID NO: 3723745 - RNA, 23 nt, Human
ucuaaaagguucagggaaccguu

SEQ ID NO: 3723746 - RNA, 22 nt, Human
ucuaaaauauuuaugaagaaaa

SEQ ID NO: 3723747 - RNA, 15 nt, Human
ucuaaaauccugcuu

SEQ ID NO: 3723748 - RNA, 15 nt, Human
ucuaaaaucuuauag

SEQ ID NO: 3723749 - RNA, 18 nt, Human
ucuaaaaucuuauaguuc

SEQ ID NO: 3723750 - RNA, 22 nt, Human
ucuaaaaugugauguucuaagg

SEQ ID NO: 3723751 - RNA, 22 nt, Human
ucuaaaauugaguucuuccugu

SEQ ID NO: 3723752 - RNA, 23 nt, Human
ucuaaaauugaguucuuccugua

SEQ ID NO: 3723753 - RNA, 20 nt, Human
ucuaaacaaugcugauuugg

SEQ ID NO: 3723754 - RNA, 14 nt, Human
ucuaaacauuaauc

SEQ ID NO: 3723755 - RNA, 14 nt, Human
ucuaaacugcauua

SEQ ID NO: 3723756 - RNA, 14 nt, Human
ucuaaacugccccc

SEQ ID NO: 3723757 - RNA, 17 nt, Human
ucuaaacuuccccaucu

SEQ ID NO: 3723758 - RNA, 21 nt, Human
ucuaaacuuuauuccaaguca

SEQ ID NO: 3723759 - RNA, 20 nt, Human
ucuaaagaccaaacuucacu

SEQ ID NO: 3723760 - RNA, 15 nt, Human
ucuaaagagcacuua

SEQ ID NO: 3723761 - RNA, 21 nt, Human
ucuaaagaguuuauuuuaaga

SEQ ID NO: 3723762 - RNA, 19 nt, Human
ucuaaagauggaguuucua

SEQ ID NO: 3723763 - RNA, 20 nt, Human
ucuaaagauggaguuucuaa

SEQ ID NO: 3723764 - RNA, 22 nt, Human
ucuaaagauggaguuucuaagg

SEQ ID NO: 3723765 - RNA, 23 nt, Human
ucuaaagauggaguuucuaaggu

SEQ ID NO: 3723766 - RNA, 20 nt, Human
ucuaaagauucuauaguucu

SEQ ID NO: 3723767 - RNA, 14 nt, Human
ucuaaagcucugac

SEQ ID NO: 3723768 - RNA, 17 nt, Human
ucuaaagcugccagccg

SEQ ID NO: 3723769 - RNA, 19 nt, Human
ucuaaagcugguuuaaugu

SEQ ID NO: 3723770 - RNA, 13 nt, Human
ucuaaaggcuacc

SEQ ID NO: 3723771 - RNA, 16 nt, Human
ucuaaaggcuaccuuu

SEQ ID NO: 3723772 - RNA, 14 nt, Human
ucuaaaguaaaaag

SEQ ID NO: 3723773 - RNA, 19 nt, Human
ucuaaaguguguuguugcu

SEQ ID NO: 3723774 - RNA, 14 nt, Human
ucuaaaguuauauu

SEQ ID NO: 3723775 - RNA, 11 nt, Human
ucuaaaguucu

SEQ ID NO: 3723776 - RNA, 14 nt, Human
ucuaaaguucuaag

SEQ ID NO: 3723777 - RNA, 17 nt, Human
ucuaaaguucuaagauu

SEQ ID NO: 3723778 - RNA, 18 nt, Human
ucuaaaguucuaagauuc

SEQ ID NO: 3723779 - RNA, 16 nt, Human
ucuaaaguuuacagua

SEQ ID NO: 3723780 - RNA, 22 nt, Human
ucuaaaguuuacaguaaauaaa

SEQ ID NO: 3723781 - RNA, 16 nt, Human
ucuaaauaaaagaagu

SEQ ID NO: 3723782 - RNA, 15 nt, Human
ucuaaauaaaaugcu

SEQ ID NO: 3723783 - RNA, 16 nt, Human
ucuaaauauggacugc

SEQ ID NO: 3723784 - RNA, 19 nt, Human
ucuaaaucuauuuauuaau

SEQ ID NO: 3723785 - RNA, 13 nt, Human
ucuaaaugaagug

SEQ ID NO: 3723786 - RNA, 23 nt, Human
ucuaaaugcauauccugagccau

SEQ ID NO: 3723787 - RNA, 21 nt, Human
ucuaaauguaguucugcucca

SEQ ID NO: 3723788 - RNA, 18 nt, Human
ucuaaauuaaagccuuua

SEQ ID NO: 3723789 - RNA, 19 nt, Human
ucuaacaauguauuuucuu

SEQ ID NO: 3723790 - RNA, 20 nt, Human
ucuaacacuagucugugugc

SEQ ID NO: 3723791 - RNA, 23 nt, Human
ucuaacagcccuccucugcacuc

SEQ ID NO: 3723792 - RNA, 14 nt, Human
ucuaaccaaaugca

SEQ ID NO: 3723793 - RNA, 16 nt, Human
ucuaaccaaaugcauc

SEQ ID NO: 3723794 - RNA, 17 nt, Human
ucuaaccaagaggcugg

SEQ ID NO: 3723795 - RNA, 16 nt, Human
ucuaaccacacagccu

SEQ ID NO: 3723796 - RNA, 18 nt, Human
ucuaaccacacagccuac

SEQ ID NO: 3723797 - RNA, 22 nt, Human
ucuaaccacagcuccuuuucca

SEQ ID NO: 3723798 - RNA, 17 nt, Human
ucuaaccacaucaauau

SEQ ID NO: 3723799 - RNA, 19 nt, Human
ucuaaccagagcaagcuuu

SEQ ID NO: 3723800 - RNA, 21 nt, Human
ucuaaccagagcaagcuuuuu

SEQ ID NO: 3723801 - RNA, 14 nt, Human
ucugaaauuuuucu

SEQ ID NO: 3723802 - RNA, 17 nt, Human
ucugaaauuuuucuucu

SEQ ID NO: 3723803 - RNA, 15 nt, Human
ucugaacacaggcag

SEQ ID NO: 3723804 - RNA, 17 nt, Human
ucugaacacaggcagcu

SEQ ID NO: 3723805 - RNA, 12 nt, Human
ucugaacagcug

SEQ ID NO: 3723806 - RNA, 14 nt, Human
ucugaacucaaacu

SEQ ID NO: 3723807 - RNA, 17 nt, Human
ucugaacucaaacugag

SEQ ID NO: 3723808 - RNA, 21 nt, Human
ucugaacuuggcgcugccccu

SEQ ID NO: 3723809 - RNA, 17 nt, Human
ucugaacuuuggagagu

SEQ ID NO: 3723810 - RNA, 13 nt, Human
ucugaagcaaggc

SEQ ID NO: 3723811 - RNA, 14 nt, Human
ucugaagcauguuu

SEQ ID NO: 3723812 - RNA, 15 nt, Human
ucugaagcauguuuc

SEQ ID NO: 3723813 - RNA, 17 nt, Human
ucugaagcccucccagg

SEQ ID NO: 3723814 - RNA, 13 nt, Human
ucugaagccucac

SEQ ID NO: 3723815 - RNA, 20 nt, Human
ucugaagcugacgaacuucc

SEQ ID NO: 3723816 - RNA, 16 nt, Human
ucugaagcuugacucc

SEQ ID NO: 3723817 - RNA, 22 nt, Human
ucugaagcuugacucccaaguu

SEQ ID NO: 3723818 - RNA, 21 nt, Human
ucugaaggacacuuccugccu

SEQ ID NO: 3723819 - RNA, 22 nt, Human
ucugaaggacauugcggacagc

SEQ ID NO: 3723820 - RNA, 21 nt, Human
ucugaaggagccccauuccug

SEQ ID NO: 3723821 - RNA, 20 nt, Human
ucugaaggaggccaccuccu

SEQ ID NO: 3723822 - RNA, 12 nt, Human
ucugaagggagg

SEQ ID NO: 3723823 - RNA, 20 nt, Human
ucugaagucacaucacagga

SEQ ID NO: 3723824 - RNA, 22 nt, Human
ucugaagucacaucacaggaca

SEQ ID NO: 3723825 - RNA, 15 nt, Human
ucugaagucacugca

SEQ ID NO: 3723826 - RNA, 18 nt, Human
ucugaagugaaacugcuu

SEQ ID NO: 3723827 - RNA, 17 nt, Human
ucugaaguuauauuucc

SEQ ID NO: 3723828 - RNA, 15 nt, Human
ucugaaguuggacag

SEQ ID NO: 3723829 - RNA, 16 nt, Human
ucugaaguuucauuua

SEQ ID NO: 3723830 - RNA, 18 nt, Human
ucugaaguuucauuuaug

SEQ ID NO: 3723831 - RNA, 15 nt, Human
ucugaauaauuucuu

SEQ ID NO: 3723832 - RNA, 16 nt, Human
ucugaauaauuucuua

SEQ ID NO: 3723833 - RNA, 17 nt, Human
ucugaauaccucuuuga

SEQ ID NO: 3723834 - RNA, 19 nt, Human
ucugaauaccucuuugaaa

SEQ ID NO: 3723835 - RNA, 13 nt, Human
ucugaauccuaag

SEQ ID NO: 3723836 - RNA, 22 nt, Human
ucugaaucgagugagacaaaau

SEQ ID NO: 3723837 - RNA, 17 nt, Human
ucugaaucuucugaaac

SEQ ID NO: 3723838 - RNA, 16 nt, Human
ucugaaugcugcuacu

SEQ ID NO: 3723839 - RNA, 22 nt, Human
ucugaaugcuucuaaguaaaua

SEQ ID NO: 3723840 - RNA, 12 nt, Human
ucugaauguucu

SEQ ID NO: 3723841 - RNA, 17 nt, Human
ucugaauguucugacau

SEQ ID NO: 3723842 - RNA, 10 nt, Human
ucugaauuau

SEQ ID NO: 3723843 - RNA, 13 nt, Human
ucugaauuugcaa

SEQ ID NO: 3723844 - RNA, 14 nt, Human
ucugaauuugcaaa

SEQ ID NO: 3723845 - RNA, 22 nt, Human
ucugaauuugcaaaguacugua

SEQ ID NO: 3723846 - RNA, 20 nt, Human
ucugaauuugcccugggaaa

SEQ ID NO: 3723847 - RNA, 21 nt, Human
ucugaauuuuggggauuuuca

SEQ ID NO: 3723848 - RNA, 16 nt, Human
ucugaauuuuuaaaca

SEQ ID NO: 3723849 - RNA, 16 nt, Human
ucugacaacagacuuc

SEQ ID NO: 3723850 - RNA, 13 nt, Human
ucugacaagggcu

SEQ ID NO: 3723851 - RNA, 14 nt, Human
ucugacacacagcu

SEQ ID NO: 3723852 - RNA, 17 nt, Human
ucugacacacagcucug

SEQ ID NO: 3723853 - RNA, 20 nt, Human
ucugacaccuauuuuagaca

SEQ ID NO: 3723854 - RNA, 22 nt, Human
ucugacagcagcaucucuaccu

SEQ ID NO: 3723855 - RNA, 12 nt, Human
ucugacagccuc

SEQ ID NO: 3723856 - RNA, 14 nt, Human
ucugacagccucag

SEQ ID NO: 3723857 - RNA, 22 nt, Human
ucugacaggcaaugcuggcugu

SEQ ID NO: 3723858 - RNA, 17 nt, Human
ucugacaguuuuucugu

SEQ ID NO: 3723859 - RNA, 13 nt, Human
ucugacauaaucc

SEQ ID NO: 3723860 - RNA, 14 nt, Human
ucugacaucucugc

SEQ ID NO: 3723861 - RNA, 19 nt, Human
ucugacauuaacaguuuuc

SEQ ID NO: 3723862 - RNA, 13 nt, Human
ucugacauucuca

SEQ ID NO: 3723863 - RNA, 21 nt, Human
ucugacauucucaggaagccc

SEQ ID NO: 3723864 - RNA, 12 nt, Human
ucugaccacacu

SEQ ID NO: 3723865 - RNA, 20 nt, Human
ucugaccacuugaggccuga

SEQ ID NO: 3723866 - RNA, 18 nt, Human
ucugaccagcagcgccuu

SEQ ID NO: 3723867 - RNA, 15 nt, Human
ucugacccacugcuu

SEQ ID NO: 3723868 - RNA, 15 nt, Human
ucugacccagugccc

SEQ ID NO: 3723869 - RNA, 22 nt, Human
ucugacccagugcccccacuga

SEQ ID NO: 3723870 - RNA, 18 nt, Human
ucugacccaugcugcccu

SEQ ID NO: 3723871 - RNA, 19 nt, Human
ucugacccaugcugcccug

SEQ ID NO: 3723872 - RNA, 16 nt, Human
ucugaccccuccucac

SEQ ID NO: 3723873 - RNA, 13 nt, Human
ucugaccucagca

SEQ ID NO: 3723874 - RNA, 18 nt, Human
ucugaccucuuggccaca

SEQ ID NO: 3723875 - RNA, 12 nt, Human
ucugaccugcag

SEQ ID NO: 3723876 - RNA, 14 nt, Human
ucugaccugcaggc

SEQ ID NO: 3723877 - RNA, 21 nt, Human
ucugaccugcaggccaagagc

SEQ ID NO: 3723878 - RNA, 14 nt, Human
ucugaccuuaaaug

SEQ ID NO: 3723879 - RNA, 16 nt, Human
ucugacggcccugcaa

SEQ ID NO: 3723880 - RNA, 14 nt, Human
ucugacuaugacau

SEQ ID NO: 3723881 - RNA, 14 nt, Human
ucugacucacaaga

SEQ ID NO: 3723882 - RNA, 15 nt, Human
ucugacucagggcuc

SEQ ID NO: 3723883 - RNA, 19 nt, Human
ucugacucauauccccuau

SEQ ID NO: 3723884 - RNA, 23 nt, Human
ucugacuccaguggggcaagauu

SEQ ID NO: 3723885 - RNA, 19 nt, Human
ucugacucgguuucuccaa

SEQ ID NO: 3723886 - RNA, 12 nt, Human
ucugacucucaa

SEQ ID NO: 3723887 - RNA, 22 nt, Human
ucugacucuccgcggugguugu

SEQ ID NO: 3723888 - RNA, 13 nt, Human
ucugacugacaug

SEQ ID NO: 3723889 - RNA, 12 nt, Human
ucugacugugug

SEQ ID NO: 3723890 - RNA, 20 nt, Human
ucugacuuaagcaaaagaaa

SEQ ID NO: 3723891 - RNA, 17 nt, Human
ucugacuucugccugga

SEQ ID NO: 3723892 - RNA, 19 nt, Human
ucugacuucugccuggaga

SEQ ID NO: 3723893 - RNA, 20 nt, Human
ucugacuucugccuggagac

SEQ ID NO: 3723894 - RNA, 14 nt, Human
ucugagaaaacaag

SEQ ID NO: 3723895 - RNA, 22 nt, Human
ucugagaaaagcuuugaacccu

SEQ ID NO: 3723896 - RNA, 15 nt, Human
ucugagaaagacuau

SEQ ID NO: 3723897 - RNA, 19 nt, Human
ucugagaaagacuauucaa

SEQ ID NO: 3723898 - RNA, 20 nt, Human
ucugagaaagacuauucaaa

SEQ ID NO: 3723899 - RNA, 21 nt, Human
ucugagaaagacuauucaaac

SEQ ID NO: 3723900 - RNA, 19 nt, Human
ucugagaagaggagcccuc

SEQ ID NO: 3723901 - RNA, 23 nt, Human
ucugagaaucuuuauugagaaag

SEQ ID NO: 3723902 - RNA, 16 nt, Human
ucugagaaugaacaaa

SEQ ID NO: 3723903 - RNA, 22 nt, Human
ucugagaauuguugagauacuu

SEQ ID NO: 3723904 - RNA, 19 nt, Human
ucugagacaaagcaaugga

SEQ ID NO: 3723905 - RNA, 21 nt, Human
ucugagacucgcgacaaugca

SEQ ID NO: 3723906 - RNA, 22 nt, Human
ucugagacucucuuaggagcag

SEQ ID NO: 3723907 - RNA, 20 nt, Human
ucugagagaggccauucuuu

SEQ ID NO: 3723908 - RNA, 21 nt, Human
ucugagagaggcuaaaauguu

SEQ ID NO: 3723909 - RNA, 14 nt, Human
ucugagagauuugg

SEQ ID NO: 3723910 - RNA, 18 nt, Human
ucugagaggacuuuucuu

SEQ ID NO: 3723911 - RNA, 18 nt, Human
ucugagaggcccuggauc

SEQ ID NO: 3723912 - RNA, 14 nt, Human
ucugagagucuaga

SEQ ID NO: 3723913 - RNA, 16 nt, Human
ucugagagucuagauu

SEQ ID NO: 3723914 - RNA, 18 nt, Human
ucugagagucuagauucu

SEQ ID NO: 3723915 - RNA, 22 nt, Human
ucugagaucuguugauugauga

SEQ ID NO: 3723916 - RNA, 22 nt, Human
ucugagauggcucccaggggcu

SEQ ID NO: 3723917 - RNA, 20 nt, Human
ucugagauuauuuuaaucua

SEQ ID NO: 3723918 - RNA, 12 nt, Human
ucugagcacaga

SEQ ID NO: 3723919 - RNA, 22 nt, Human
ucugagcacuguuuauacacug

SEQ ID NO: 3723920 - RNA, 19 nt, Human
ucugagccacagcagcauu

SEQ ID NO: 3723921 - RNA, 12 nt, Human
ucugagcccaug

SEQ ID NO: 3723922 - RNA, 23 nt, Human
ucugagcccauguucugccccca

SEQ ID NO: 3723923 - RNA, 16 nt, Human
ucugagcccgggcugc

SEQ ID NO: 3723924 - RNA, 17 nt, Human
ucugagcccgggcugcc

SEQ ID NO: 3723925 - RNA, 20 nt, Human
ucugagcuauuucaucuauu

SEQ ID NO: 3723926 - RNA, 14 nt, Human
ucugagcugccagu

SEQ ID NO: 3723927 - RNA, 19 nt, Human
ucugagcugucaacgagac

SEQ ID NO: 3723928 - RNA, 17 nt, Human
ucugagcuuacguaguu

SEQ ID NO: 3723929 - RNA, 19 nt, Human
ucugagcuuacguaguucu

SEQ ID NO: 3723930 - RNA, 17 nt, Human
ucugaggaauccagacc

SEQ ID NO: 3723931 - RNA, 22 nt, Human
ucugaggaauccagacccggcu

SEQ ID NO: 3723932 - RNA, 16 nt, Human
ucugaggaauucugua

SEQ ID NO: 3723933 - RNA, 20 nt, Human
ucugaggacauuccaagaca

SEQ ID NO: 3723934 - RNA, 19 nt, Human
ucugaggagccugcaacau

SEQ ID NO: 3723935 - RNA, 12 nt, Human
ucugaggccagc

SEQ ID NO: 3723936 - RNA, 14 nt, Human
ucugaggccagccu

SEQ ID NO: 3723937 - RNA, 14 nt, Human
ucugaggcccugcc

SEQ ID NO: 3723938 - RNA, 17 nt, Human
ucugaggccguugcuga

SEQ ID NO: 3723939 - RNA, 22 nt, Human
ucugaggccguugcugacuuag

SEQ ID NO: 3723940 - RNA, 23 nt, Human
ucugaggccuccucucucaguuu

SEQ ID NO: 3723941 - RNA, 21 nt, Human
ucugaggcgccccaacccgug

SEQ ID NO: 3723942 - RNA, 15 nt, Human
ucugaggcuuccaga

SEQ ID NO: 3723943 - RNA, 16 nt, Human
ucugaggcuuccagag

SEQ ID NO: 3723944 - RNA, 16 nt, Human
ucugagggaaagugca

SEQ ID NO: 3723945 - RNA, 17 nt, Human
ucugagggaggaggcca

SEQ ID NO: 3723946 - RNA, 23 nt, Human
ucugagggaggaggccaccucuc

SEQ ID NO: 3723947 - RNA, 17 nt, Human
ucugagggcuuguaguu

SEQ ID NO: 3723948 - RNA, 19 nt, Human
ucugagggcuuguaguucu

SEQ ID NO: 3723949 - RNA, 14 nt, Human
ucugagguccugag

SEQ ID NO: 3723950 - RNA, 15 nt, Human
ucugagguccugagc

SEQ ID NO: 3723951 - RNA, 21 nt, Human
ucuaacccucccauggcaccu

SEQ ID NO: 3723952 - RNA, 20 nt, Human
ucuaaccucaucuucuucac

SEQ ID NO: 3723953 - RNA, 13 nt, Human
ucuaaccuccuuu

SEQ ID NO: 3723954 - RNA, 15 nt, Human
ucuaaccugauggca

SEQ ID NO: 3723955 - RNA, 13 nt, Human
ucuaaccuggagg

SEQ ID NO: 3723956 - RNA, 18 nt, Human
ucuaaccuugaaugcugc

SEQ ID NO: 3723957 - RNA, 16 nt, Human
ucuaacgccugagccc

SEQ ID NO: 3723958 - RNA, 21 nt, Human
ucuaacgccugagcccaggga

SEQ ID NO: 3723959 - RNA, 23 nt, Human
ucuaacgccugagcccagggagg

SEQ ID NO: 3723960 - RNA, 17 nt, Human
ucuaacggucuguucug

SEQ ID NO: 3723961 - RNA, 15 nt, Human
ucuaacucagaaaca

SEQ ID NO: 3723962 - RNA, 21 nt, Human
ucuaacucugauguaaaugaa

SEQ ID NO: 3723963 - RNA, 17 nt, Human
ucuaacuguauauuugu

SEQ ID NO: 3723964 - RNA, 21 nt, Human
ucuaacugugcucaagagguu

SEQ ID NO: 3723965 - RNA, 15 nt, Human
ucuaacuucaccaua

SEQ ID NO: 3723966 - RNA, 22 nt, Human
ucuaacuucaccauauuaccac

SEQ ID NO: 3723967 - RNA, 19 nt, Human
ucuaacuuggcucacacuc

SEQ ID NO: 3723968 - RNA, 13 nt, Human
ucuaacuuuagaa

SEQ ID NO: 3723969 - RNA, 14 nt, Human
ucuaagaaacauug

SEQ ID NO: 3723970 - RNA, 18 nt, Human
ucuaagaaacauuggaag

SEQ ID NO: 3723971 - RNA, 15 nt, Human
ucuaagaaacauuua

SEQ ID NO: 3723972 - RNA, 23 nt, Human
ucuaagaaauaucugugaaauau

SEQ ID NO: 3723973 - RNA, 12 nt, Human
ucuaagaaauug

SEQ ID NO: 3723974 - RNA, 19 nt, Human
ucuaagaauaauaaaauca

SEQ ID NO: 3723975 - RNA, 16 nt, Human
ucuaagaauacagcuu

SEQ ID NO: 3723976 - RNA, 20 nt, Human
ucuaagacuuacucuaagau

SEQ ID NO: 3723977 - RNA, 21 nt, Human
ucuaagauaguaacaaugaag

SEQ ID NO: 3723978 - RNA, 21 nt, Human
ucuaagaucuuagauucucug

SEQ ID NO: 3723979 - RNA, 12 nt, Human
ucuaagauguga

SEQ ID NO: 3723980 - RNA, 13 nt, Human
ucuaagaugugau

SEQ ID NO: 3723981 - RNA, 14 nt, Human
ucuaagauguuaua

SEQ ID NO: 3723982 - RNA, 18 nt, Human
ucuaagauguuauauuuu

SEQ ID NO: 3723983 - RNA, 14 nt, Human
ucuaagauucuaaa

SEQ ID NO: 3723984 - RNA, 17 nt, Human
ucuaagauucuaaaggu

SEQ ID NO: 3723985 - RNA, 19 nt, Human
ucuaagauucuaaaggucc

SEQ ID NO: 3723986 - RNA, 14 nt, Human
ucuaagauucuaau

SEQ ID NO: 3723987 - RNA, 16 nt, Human
ucuaagauucuaauga

SEQ ID NO: 3723988 - RNA, 13 nt, Human
ucuaagauucuag

SEQ ID NO: 3723989 - RNA, 14 nt, Human
ucuaagauucuaga

SEQ ID NO: 3723990 - RNA, 12 nt, Human
ucuaagauucug

SEQ ID NO: 3723991 - RNA, 19 nt, Human
ucuaagauucugauuuuag

SEQ ID NO: 3723992 - RNA, 16 nt, Human
ucuaagcaauuucuug

SEQ ID NO: 3723993 - RNA, 18 nt, Human
ucuaagcagcuuauuguu

SEQ ID NO: 3723994 - RNA, 18 nt, Human
ucuaagccuuuccauaag

SEQ ID NO: 3723995 - RNA, 12 nt, Human
ucuaagcugcag

SEQ ID NO: 3723996 - RNA, 17 nt, Human
ucuaagcugcagcuucc

SEQ ID NO: 3723997 - RNA, 18 nt, Human
ucuaagcugcagcuuccu

SEQ ID NO: 3723998 - RNA, 19 nt, Human
ucuaagcugcagcuuccug

SEQ ID NO: 3723999 - RNA, 22 nt, Human
ucuaaggccuaggauucuaaaa

SEQ ID NO: 3724000 - RNA, 16 nt, Human
ucuaaggcucugagag

SEQ ID NO: 3724001 - RNA, 14 nt, Human
ucuaagggggaggg

SEQ ID NO: 3724002 - RNA, 22 nt, Human
ucuaagguccgguguucuaaga

SEQ ID NO: 3724003 - RNA, 23 nt, Human
ucuaagguccgguguucuaagau

SEQ ID NO: 3724004 - RNA, 14 nt, Human
ucuaagguucucau

SEQ ID NO: 3724005 - RNA, 20 nt, Human
ucuaaguaaaaccacagcag

SEQ ID NO: 3724006 - RNA, 14 nt, Human
ucuaaguaaauaca

SEQ ID NO: 3724007 - RNA, 16 nt, Human
ucuaaguaaauacaau

SEQ ID NO: 3724008 - RNA, 22 nt, Human
ucuaagucaaacacuugugacu

SEQ ID NO: 3724009 - RNA, 19 nt, Human
ucuaagucauguauguuuc

SEQ ID NO: 3724010 - RNA, 18 nt, Human
ucuaagugggcauugcca

SEQ ID NO: 3724011 - RNA, 14 nt, Human
ucuaaguuauaaga

SEQ ID NO: 3724012 - RNA, 16 nt, Human
ucuaaguuauaagacu

SEQ ID NO: 3724013 - RNA, 20 nt, Human
ucuaaguuauaagacucuca

SEQ ID NO: 3724014 - RNA, 14 nt, Human
ucuaaguuucuaag

SEQ ID NO: 3724015 - RNA, 16 nt, Human
ucuaaguuucuaagau

SEQ ID NO: 3724016 - RNA, 23 nt, Human
ucuaaguuucuaagauucuaaag

SEQ ID NO: 3724017 - RNA, 16 nt, Human
ucuaauaaacuuggau

SEQ ID NO: 3724018 - RNA, 22 nt, Human
ucuaauaaacuuggauucucua

SEQ ID NO: 3724019 - RNA, 22 nt, Human
ucuaauaauaaauaguucuucu

SEQ ID NO: 3724020 - RNA, 18 nt, Human
ucuaauaauuucuaaugu

SEQ ID NO: 3724021 - RNA, 19 nt, Human
ucuaauagaacucaguuuu

SEQ ID NO: 3724022 - RNA, 22 nt, Human
ucuaauagaacucaguuuuaac

SEQ ID NO: 3724023 - RNA, 22 nt, Human
ucuaauagggcaauuaauuccu

SEQ ID NO: 3724024 - RNA, 14 nt, Human
ucuaauaguauaaa

SEQ ID NO: 3724025 - RNA, 14 nt, Human
ucuaauaucagcaa

SEQ ID NO: 3724026 - RNA, 14 nt, Human
ucuaauaucauuca

SEQ ID NO: 3724027 - RNA, 19 nt, Human
ucuaauauccccaaauuag

SEQ ID NO: 3724028 - RNA, 20 nt, Human
ucuaauauccccaaauuagg

SEQ ID NO: 3724029 - RNA, 20 nt, Human
ucuaauauggcaaaaauggc

SEQ ID NO: 3724030 - RNA, 14 nt, Human
ucuaauauggccac

SEQ ID NO: 3724031 - RNA, 20 nt, Human
ucuaauauuuauugcuuuau

SEQ ID NO: 3724032 - RNA, 19 nt, Human
ucuaaucuagauaucgacu

SEQ ID NO: 3724033 - RNA, 20 nt, Human
ucuaaucuagauaucgacuu

SEQ ID NO: 3724034 - RNA, 21 nt, Human
ucuaaugacaugccuauauga

SEQ ID NO: 3724035 - RNA, 16 nt, Human
ucuaauguuugcauau

SEQ ID NO: 3724036 - RNA, 19 nt, Human
ucuaauguuugcauauaag

SEQ ID NO: 3724037 - RNA, 23 nt, Human
ucuaauuaaccuuacuaauuaua

SEQ ID NO: 3724038 - RNA, 19 nt, Human
ucuaauuauguagcucuuu

SEQ ID NO: 3724039 - RNA, 16 nt, Human
ucuaauucacagugcu

SEQ ID NO: 3724040 - RNA, 21 nt, Human
ucuaauuccauccauaaaucc

SEQ ID NO: 3724041 - RNA, 18 nt, Human
ucuaauucccauuuugca

SEQ ID NO: 3724042 - RNA, 22 nt, Human
ucuaauucccauuuugcaaaau

SEQ ID NO: 3724043 - RNA, 13 nt, Human
ucuaauuccuguu

SEQ ID NO: 3724044 - RNA, 19 nt, Human
ucuaauucuauuaaagugc

SEQ ID NO: 3724045 - RNA, 21 nt, Human
ucuaauucuauuaaagugcua

SEQ ID NO: 3724046 - RNA, 13 nt, Human
ucuaauucuuuaa

SEQ ID NO: 3724047 - RNA, 13 nt, Human
ucuaauugccaug

SEQ ID NO: 3724048 - RNA, 14 nt, Human
ucuaauugccaugu

SEQ ID NO: 3724049 - RNA, 12 nt, Human
ucuaauugcuua

SEQ ID NO: 3724050 - RNA, 13 nt, Human
ucuaauugcuuau

SEQ ID NO: 3724051 - RNA, 18 nt, Human
ucuaauugcuuauuuauu

SEQ ID NO: 3724052 - RNA, 21 nt, Human
ucuaauuggcuuuacuauuuu

SEQ ID NO: 3724053 - RNA, 14 nt, Human
ucuaauuugcugcu

SEQ ID NO: 3724054 - RNA, 18 nt, Human
ucuaauuuuuauucauaa

SEQ ID NO: 3724055 - RNA, 13 nt, Human
ucuacaaaacauu

SEQ ID NO: 3724056 - RNA, 13 nt, Human
ucuacaaagcacu

SEQ ID NO: 3724057 - RNA, 23 nt, Human
ucuacaaagcacuagagaaugca

SEQ ID NO: 3724058 - RNA, 19 nt, Human
ucuacaaauaauuuuagug

SEQ ID NO: 3724059 - RNA, 19 nt, Human
ucuacaaguauucugccuu

SEQ ID NO: 3724060 - RNA, 23 nt, Human
ucuacaaucucccuucacaaguu

SEQ ID NO: 3724061 - RNA, 14 nt, Human
ucuacacagagcag

SEQ ID NO: 3724062 - RNA, 16 nt, Human
ucuacacauacaugua

SEQ ID NO: 3724063 - RNA, 15 nt, Human
ucuacacucaucuua

SEQ ID NO: 3724064 - RNA, 15 nt, Human
ucuacacucuccugg

SEQ ID NO: 3724065 - RNA, 18 nt, Human
ucuacacucuccugggcc

SEQ ID NO: 3724066 - RNA, 21 nt, Human
ucuacacugggugcugauccu

SEQ ID NO: 3724067 - RNA, 14 nt, Human
ucuacacugugaac

SEQ ID NO: 3724068 - RNA, 15 nt, Human
ucuacagaggccaug

SEQ ID NO: 3724069 - RNA, 16 nt, Human
ucuacagaugucccau

SEQ ID NO: 3724070 - RNA, 19 nt, Human
ucuacagccuugucccccu

SEQ ID NO: 3724071 - RNA, 12 nt, Human
ucuacagcuccc

SEQ ID NO: 3724072 - RNA, 21 nt, Human
ucuacagugguuuuauacuga

SEQ ID NO: 3724073 - RNA, 17 nt, Human
ucuacauaaguaauuca

SEQ ID NO: 3724074 - RNA, 21 nt, Human
ucuacauaugaucugucugug

SEQ ID NO: 3724075 - RNA, 15 nt, Human
ucuacauauucuuua

SEQ ID NO: 3724076 - RNA, 16 nt, Human
ucuacauauucuuuaa

SEQ ID NO: 3724077 - RNA, 15 nt, Human
ucuacaucuucugcc

SEQ ID NO: 3724078 - RNA, 19 nt, Human
ucuacaucuuuuuucacaa

SEQ ID NO: 3724079 - RNA, 11 nt, Human
ucuacaugaau

SEQ ID NO: 3724080 - RNA, 21 nt, Human
ucuacaugaggaacuguagau

SEQ ID NO: 3724081 - RNA, 15 nt, Human
ucuacauuauugcuu

SEQ ID NO: 3724082 - RNA, 11 nt, Human
ucuacauuuca

SEQ ID NO: 3724083 - RNA, 13 nt, Human
ucuacauuucaca

SEQ ID NO: 3724084 - RNA, 16 nt, Human
ucuacauuucacauua

SEQ ID NO: 3724085 - RNA, 23 nt, Human
ucuacauuucaccuacuuuguaa

SEQ ID NO: 3724086 - RNA, 20 nt, Human
ucuaccaacuggaagcacag

SEQ ID NO: 3724087 - RNA, 16 nt, Human
ucuaccagacugugua

SEQ ID NO: 3724088 - RNA, 22 nt, Human
ucuaccagccucccuauuuuuu

SEQ ID NO: 3724089 - RNA, 20 nt, Human
ucuaccagugcaggcuggcc

SEQ ID NO: 3724090 - RNA, 22 nt, Human
ucuaccagugcaggcuggccag

SEQ ID NO: 3724091 - RNA, 18 nt, Human
ucuaccauuucagagagg

SEQ ID NO: 3724092 - RNA, 20 nt, Human
ucuaccauuuucugguucuu

SEQ ID NO: 3724093 - RNA, 13 nt, Human
ucuacccaaagga

SEQ ID NO: 3724094 - RNA, 22 nt, Human
ucuacccagagaagccccuucc

SEQ ID NO: 3724095 - RNA, 14 nt, Human
ucuacccagcccau

SEQ ID NO: 3724096 - RNA, 16 nt, Human
ucuacccagggccugc

SEQ ID NO: 3724097 - RNA, 15 nt, Human
ucuacccguuccaaa

SEQ ID NO: 3724098 - RNA, 16 nt, Human
ucuacccguuccaaaa

SEQ ID NO: 3724099 - RNA, 18 nt, Human
ucuacccucccacccccu

SEQ ID NO: 3724100 - RNA, 19 nt, Human
ucuacccuggcacuauaau

SEQ ID NO: 3724101 - RNA, 13 nt, Human
ggccacacagcug

SEQ ID NO: 3724102 - RNA, 21 nt, Human
ggccacacuauuaccaugaga

SEQ ID NO: 3724103 - RNA, 22 nt, Human
ggccacacuauuaccaugagaa

SEQ ID NO: 3724104 - RNA, 16 nt, Human
ggccacacucagcaca

SEQ ID NO: 3724105 - RNA, 22 nt, Human
ggccacagaaaauucuucucca

SEQ ID NO: 3724106 - RNA, 12 nt, Human
ggccacagccag

SEQ ID NO: 3724107 - RNA, 13 nt, Human
ggccacagccagg

SEQ ID NO: 3724108 - RNA, 19 nt, Human
ggccacaucaaagaggcug

SEQ ID NO: 3724109 - RNA, 12 nt, Human
ggccacauggcg

SEQ ID NO: 3724110 - RNA, 16 nt, Human
ggccacauggcggaga

SEQ ID NO: 3724111 - RNA, 15 nt, Human
ggccaccaaagcugc

SEQ ID NO: 3724112 - RNA, 16 nt, Human
ggccaccaaagcugcc

SEQ ID NO: 3724113 - RNA, 17 nt, Human
ggccaccaaagcugccc

SEQ ID NO: 3724114 - RNA, 13 nt, Human
ggccaccaggcug

SEQ ID NO: 3724115 - RNA, 14 nt, Human
ggccaccaggcugg

SEQ ID NO: 3724116 - RNA, 16 nt, Human
ggccaccaggcuggcg

SEQ ID NO: 3724117 - RNA, 19 nt, Human
ggccaccaggcuggcgcag

SEQ ID NO: 3724118 - RNA, 21 nt, Human
ggccaccaggcuggcgcagcc

SEQ ID NO: 3724119 - RNA, 16 nt, Human
ggccaccgccuugccc

SEQ ID NO: 3724120 - RNA, 20 nt, Human
ggccaccgccuugcccagcc

SEQ ID NO: 3724121 - RNA, 21 nt, Human
ggccaccuccuaaaaggccca

SEQ ID NO: 3724122 - RNA, 11 nt, Human
ggccaccucuc

SEQ ID NO: 3724123 - RNA, 19 nt, Human
ggccaccucuuccuggccg

SEQ ID NO: 3724124 - RNA, 20 nt, Human
ggccaccucuuccuggccgg

SEQ ID NO: 3724125 - RNA, 22 nt, Human
ggccaccugaggugggcccagg

SEQ ID NO: 3724126 - RNA, 23 nt, Human
ggccaccugaggugggcccagga

SEQ ID NO: 3724127 - RNA, 10 nt, Human
ggccaccugc

SEQ ID NO: 3724128 - RNA, 11 nt, Human
ggccaccugcc

SEQ ID NO: 3724129 - RNA, 13 nt, Human
ggccaccugccug

SEQ ID NO: 3724130 - RNA, 15 nt, Human
ggccaccugccugcg

SEQ ID NO: 3724131 - RNA, 21 nt, Human
ggccaccugccugcgucuucc

SEQ ID NO: 3724132 - RNA, 22 nt, Human
ggccaccuggcucucaccucua

SEQ ID NO: 3724133 - RNA, 16 nt, Human
ggccacgcagccagga

SEQ ID NO: 3724134 - RNA, 14 nt, Human
ggccacgcuccagc

SEQ ID NO: 3724135 - RNA, 18 nt, Human
ggccacgcuccagcugcc

SEQ ID NO: 3724136 - RNA, 19 nt, Human
ggccacgucuuccuucugc

SEQ ID NO: 3724137 - RNA, 16 nt, Human
ggccacgugccaggcc

SEQ ID NO: 3724138 - RNA, 11 nt, Human
ggccacuaagc

SEQ ID NO: 3724139 - RNA, 20 nt, Human
ggccacuaagcagaggaggg

SEQ ID NO: 3724140 - RNA, 21 nt, Human
ggccacuaagcagaggagggg

SEQ ID NO: 3724141 - RNA, 16 nt, Human
ggccacuccuuccugc

SEQ ID NO: 3724142 - RNA, 20 nt, Human
ggccacucugccucugccug

SEQ ID NO: 3724143 - RNA, 12 nt, Human
ggccacugaaga

SEQ ID NO: 3724144 - RNA, 16 nt, Human
ggccacugugaagaga

SEQ ID NO: 3724145 - RNA, 16 nt, Human
ggccacuguguuccuu

SEQ ID NO: 3724146 - RNA, 20 nt, Human
ggccacuguuuggaaauaaa

SEQ ID NO: 3724147 - RNA, 21 nt, Human
ggccacuucuggguggggcag

SEQ ID NO: 3724148 - RNA, 19 nt, Human
ggccagaaguagcuuugca

SEQ ID NO: 3724149 - RNA, 16 nt, Human
ggccagacacaggccc

SEQ ID NO: 3724150 - RNA, 18 nt, Human
ggccagacacaggcccuc

SEQ ID NO: 3724151 - RNA, 23 nt, Human
ggccagaccagagcucuggagcc

SEQ ID NO: 3724152 - RNA, 18 nt, Human
ggccagaccugcagacgc

SEQ ID NO: 3724153 - RNA, 22 nt, Human
ggccagaccugcagacgcccag

SEQ ID NO: 3724154 - RNA, 17 nt, Human
ggccagagacacaagcc

SEQ ID NO: 3724155 - RNA, 18 nt, Human
ggccagagacacaagccu

SEQ ID NO: 3724156 - RNA, 22 nt, Human
ggccagagagccuggugcugcu

SEQ ID NO: 3724157 - RNA, 23 nt, Human
ggccagagagccuggugcugcug

SEQ ID NO: 3724158 - RNA, 12 nt, Human
ggccagagccag

SEQ ID NO: 3724159 - RNA, 14 nt, Human
ggccagagccaggg

SEQ ID NO: 3724160 - RNA, 17 nt, Human
ggccagagcccacucca

SEQ ID NO: 3724161 - RNA, 16 nt, Human
ggccagagcugggagg

SEQ ID NO: 3724162 - RNA, 19 nt, Human
ggccagaggcagaacccug

SEQ ID NO: 3724163 - RNA, 19 nt, Human
ggccagagggagugacaga

SEQ ID NO: 3724164 - RNA, 22 nt, Human
ggccagagggagugacagaggc

SEQ ID NO: 3724165 - RNA, 19 nt, Human
ggccagaguauuggucucc

SEQ ID NO: 3724166 - RNA, 12 nt, Human
ggccagauccag

SEQ ID NO: 3724167 - RNA, 13 nt, Human
ggccagauccagc

SEQ ID NO: 3724168 - RNA, 21 nt, Human
ggccagaugcacaucccugga

SEQ ID NO: 3724169 - RNA, 17 nt, Human
ggccagaugcaccagcc

SEQ ID NO: 3724170 - RNA, 20 nt, Human
ggccagaugcaccagcccuu

SEQ ID NO: 3724171 - RNA, 23 nt, Human
ggccagauggcccggaugcugcu

SEQ ID NO: 3724172 - RNA, 19 nt, Human
ggccagcaccaucucuuua

SEQ ID NO: 3724173 - RNA, 12 nt, Human
ggccagcagcac

SEQ ID NO: 3724174 - RNA, 18 nt, Human
ggccagcagcaccugccc

SEQ ID NO: 3724175 - RNA, 16 nt, Human
ggccagccagccacuc

SEQ ID NO: 3724176 - RNA, 21 nt, Human
ggccagccagccacucuacca

SEQ ID NO: 3724177 - RNA, 11 nt, Human
ggccagccagg

SEQ ID NO: 3724178 - RNA, 14 nt, Human
ggccagccaugucu

SEQ ID NO: 3724179 - RNA, 21 nt, Human
ucuggucaaccuccuggacau

SEQ ID NO: 3724180 - RNA, 20 nt, Human
ucuggucaagggcugucauu

SEQ ID NO: 3724181 - RNA, 18 nt, Human
ucugguccggacacuccu

SEQ ID NO: 3724182 - RNA, 14 nt, Human
ucugguccuaccca

SEQ ID NO: 3724183 - RNA, 17 nt, Human
ucuggucuccucagccu

SEQ ID NO: 3724184 - RNA, 17 nt, Human
ucuggucuccucuuugu

SEQ ID NO: 3724185 - RNA, 14 nt, Human
ucuggucucgaacu

SEQ ID NO: 3724186 - RNA, 21 nt, Human
ucuggucucuaggcuggggaa

SEQ ID NO: 3724187 - RNA, 14 nt, Human
ucuggucugggugc

SEQ ID NO: 3724188 - RNA, 22 nt, Human
ucuggugagcgaggacauucuc

SEQ ID NO: 3724189 - RNA, 17 nt, Human
ucuggugaggccuugcu

SEQ ID NO: 3724190 - RNA, 18 nt, Human
ucuggugaggccuugcuc

SEQ ID NO: 3724191 - RNA, 17 nt, Human
ucuggugauaaggacau

SEQ ID NO: 3724192 - RNA, 17 nt, Human
ucuggugaucucccaag

SEQ ID NO: 3724193 - RNA, 15 nt, Human
ucuggugccuccaga

SEQ ID NO: 3724194 - RNA, 21 nt, Human
ucugguggccgaucggggcac

SEQ ID NO: 3724195 - RNA, 23 nt, Human
ucuggugggguguguuccaacug

SEQ ID NO: 3724196 - RNA, 16 nt, Human
ucugguggucagcccu

SEQ ID NO: 3724197 - RNA, 21 nt, Human
ucugguuccagggucccucug

SEQ ID NO: 3724198 - RNA, 23 nt, Human
ucugguuccagggucccucugug

SEQ ID NO: 3724199 - RNA, 21 nt, Human
ucugguuccuccccuccuccu

SEQ ID NO: 3724200 - RNA, 11 nt, Human
ucugguucuaa

SEQ ID NO: 3724201 - RNA, 14 nt, Human
ucugguucucaauu

SEQ ID NO: 3724202 - RNA, 18 nt, Human
ucugguucucaauuccaa

SEQ ID NO: 3724203 - RNA, 16 nt, Human
ucugguuguuucuguu

SEQ ID NO: 3724204 - RNA, 18 nt, Human
ucugguuugacuccgcug

SEQ ID NO: 3724205 - RNA, 13 nt, Human
ucugguuuggggc

SEQ ID NO: 3724206 - RNA, 14 nt, Human
ucugguuuugcuau

SEQ ID NO: 3724207 - RNA, 17 nt, Human
ucuguaaaaucuuucuu

SEQ ID NO: 3724208 - RNA, 23 nt, Human
ucuguaaaaucuuucuuucuuag

SEQ ID NO: 3724209 - RNA, 15 nt, Human
ucuguaaacucaaaa

SEQ ID NO: 3724210 - RNA, 15 nt, Human
ucuguaaacugugua

SEQ ID NO: 3724211 - RNA, 19 nt, Human
ucuguaaacuguguauucc

SEQ ID NO: 3724212 - RNA, 22 nt, Human
ucuguaaacuguguauuccaag

SEQ ID NO: 3724213 - RNA, 13 nt, Human
ucuguaaauacca

SEQ ID NO: 3724214 - RNA, 21 nt, Human
ucuguaaauaccauugacaca

SEQ ID NO: 3724215 - RNA, 22 nt, Human
ucuguaaauaccauugacacau

SEQ ID NO: 3724216 - RNA, 16 nt, Human
ucuguaaaucuacaca

SEQ ID NO: 3724217 - RNA, 23 nt, Human
ucuguaacagguauuuuguuucu

SEQ ID NO: 3724218 - RNA, 23 nt, Human
ucuguaacaucacuauccaugca

SEQ ID NO: 3724219 - RNA, 14 nt, Human
ucuguaagaaaccu

SEQ ID NO: 3724220 - RNA, 20 nt, Human
ucuguaagaaaccuacugcc

SEQ ID NO: 3724221 - RNA, 22 nt, Human
ucuguaagaaaccuacugccca

SEQ ID NO: 3724222 - RNA, 19 nt, Human
ucuguaauaauagacugua

SEQ ID NO: 3724223 - RNA, 20 nt, Human
ucuguaauauuuacaaugua

SEQ ID NO: 3724224 - RNA, 22 nt, Human
ucuguaauauuuacaauguauu

SEQ ID NO: 3724225 - RNA, 14 nt, Human
ucuguaaucccagc

SEQ ID NO: 3724226 - RNA, 20 nt, Human
ucuguaaucucguuucaaaa

SEQ ID NO: 3724227 - RNA, 20 nt, Human
ucuguaauuauaucuaaaau

SEQ ID NO: 3724228 - RNA, 20 nt, Human
ucuguaauucagguuuuucc

SEQ ID NO: 3724229 - RNA, 13 nt, Human
ucuguaauugugu

SEQ ID NO: 3724230 - RNA, 12 nt, Human
ucuguacaaagg

SEQ ID NO: 3724231 - RNA, 23 nt, Human
ucuguacaaaggggaaagaacau

SEQ ID NO: 3724232 - RNA, 23 nt, Human
ucuguacaaugaacccccaugau

SEQ ID NO: 3724233 - RNA, 13 nt, Human
ucuguacacgugu

SEQ ID NO: 3724234 - RNA, 17 nt, Human
ucuguacacguguccug

SEQ ID NO: 3724235 - RNA, 14 nt, Human
ucuguacagagccc

SEQ ID NO: 3724236 - RNA, 13 nt, Human
ucuguacauuuug

SEQ ID NO: 3724237 - RNA, 19 nt, Human
ucuguacauuuuguuguaa

SEQ ID NO: 3724238 - RNA, 22 nt, Human
ucuguacauuuuguuguaaaaa

SEQ ID NO: 3724239 - RNA, 13 nt, Human
ucuguaccaguua

SEQ ID NO: 3724240 - RNA, 18 nt, Human
ucuguaccccaugaccuu

SEQ ID NO: 3724241 - RNA, 23 nt, Human
ucuguaccccaugaccuuauccu

SEQ ID NO: 3724242 - RNA, 16 nt, Human
ucuguacugauucaau

SEQ ID NO: 3724243 - RNA, 14 nt, Human
ucuguacuuuucau

SEQ ID NO: 3724244 - RNA, 20 nt, Human
ucuguacuuuucauucucuu

SEQ ID NO: 3724245 - RNA, 17 nt, Human
ucuguacuuuuuggcau

SEQ ID NO: 3724246 - RNA, 17 nt, Human
ucuguagaaaugguugu

SEQ ID NO: 3724247 - RNA, 16 nt, Human
ucuguagagcagggca

SEQ ID NO: 3724248 - RNA, 18 nt, Human
ucuguagagccuucugau

SEQ ID NO: 3724249 - RNA, 19 nt, Human
ucuguagauucuguggaac

SEQ ID NO: 3724250 - RNA, 15 nt, Human
ucuguagccacuagu

SEQ ID NO: 3724251 - RNA, 14 nt, Human
ucuguagcuccuca

SEQ ID NO: 3724252 - RNA, 19 nt, Human
ucuguagggaacucugggg

SEQ ID NO: 3724253 - RNA, 14 nt, Human
ucuguagggcugga

SEQ ID NO: 3724254 - RNA, 15 nt, Human
ucuguagggcuggac

SEQ ID NO: 3724255 - RNA, 17 nt, Human
ucuguagggcuggaccu

SEQ ID NO: 3724256 - RNA, 20 nt, Human
ucuguaggguaauuaguaac

SEQ ID NO: 3724257 - RNA, 17 nt, Human
ucuguagguugcacacu

SEQ ID NO: 3724258 - RNA, 19 nt, Human
ucuguagguugcacacuuu

SEQ ID NO: 3724259 - RNA, 18 nt, Human
ucuguagucauuuacuaa

SEQ ID NO: 3724260 - RNA, 14 nt, Human
ucuguagugagaua

SEQ ID NO: 3724261 - RNA, 17 nt, Human
ucuguagugagauagca

SEQ ID NO: 3724262 - RNA, 21 nt, Human
ucuguaguuuuaucacaugua

SEQ ID NO: 3724263 - RNA, 21 nt, Human
ucuguauaaacauuaaauguc

SEQ ID NO: 3724264 - RNA, 15 nt, Human
ucuguauacaacccu

SEQ ID NO: 3724265 - RNA, 14 nt, Human
ucuguauacugugg

SEQ ID NO: 3724266 - RNA, 17 nt, Human
ucuguauagauuagaau

SEQ ID NO: 3724267 - RNA, 16 nt, Human
ucuguauagauuagag

SEQ ID NO: 3724268 - RNA, 16 nt, Human
ucuguauauaaauggg

SEQ ID NO: 3724269 - RNA, 23 nt, Human
ucuguauauaaaugggaacauuu

SEQ ID NO: 3724270 - RNA, 15 nt, Human
ucuguauauacaaua

SEQ ID NO: 3724271 - RNA, 20 nt, Human
ucuguaucaggacccagagg

SEQ ID NO: 3724272 - RNA, 20 nt, Human
ucuguauccuggaacaauau

SEQ ID NO: 3724273 - RNA, 14 nt, Human
ucuguauguauuag

SEQ ID NO: 3724274 - RNA, 15 nt, Human
ucuguauuucaugug

SEQ ID NO: 3724275 - RNA, 18 nt, Human
ucuguauuucauguggcu

SEQ ID NO: 3724276 - RNA, 12 nt, Human
ucuguauuugaa

SEQ ID NO: 3724277 - RNA, 14 nt, Human
ucuguauuugaaag

SEQ ID NO: 3724278 - RNA, 23 nt, Human
ucuguauuugaaucagccuacag

SEQ ID NO: 3724279 - RNA, 15 nt, Human
ucugucaaaacacug

SEQ ID NO: 3724280 - RNA, 18 nt, Human
ucugucaaaacacugugg

SEQ ID NO: 3724281 - RNA, 14 nt, Human
ucugucaaugaaaa

SEQ ID NO: 3724282 - RNA, 15 nt, Human
ucugucacaccagcc

SEQ ID NO: 3724283 - RNA, 18 nt, Human
ucugucacaguaaaaaua

SEQ ID NO: 3724284 - RNA, 14 nt, Human
ucugucacucaggc

SEQ ID NO: 3724285 - RNA, 15 nt, Human
ucugucagaugagaa

SEQ ID NO: 3724286 - RNA, 20 nt, Human
ucugucagaugagaacaaag

SEQ ID NO: 3724287 - RNA, 23 nt, Human
ucugucagaugagaacaaagcug

SEQ ID NO: 3724288 - RNA, 18 nt, Human
ucugucagaugggaagac

SEQ ID NO: 3724289 - RNA, 17 nt, Human
ucucaaccaccuuucag

SEQ ID NO: 3724290 - RNA, 13 nt, Human
ucucaaccauccc

SEQ ID NO: 3724291 - RNA, 21 nt, Human
ucucaaccuaccaccccuucc

SEQ ID NO: 3724292 - RNA, 17 nt, Human
ucucaagagggcacugg

SEQ ID NO: 3724293 - RNA, 23 nt, Human
ucucaagggcuagcaucccugag

SEQ ID NO: 3724294 - RNA, 12 nt, Human
ucucaaguucua

SEQ ID NO: 3724295 - RNA, 13 nt, Human
ucucaaguucuaa

SEQ ID NO: 3724296 - RNA, 14 nt, Human
ucucaaguucuaag

SEQ ID NO: 3724297 - RNA, 16 nt, Human
ucucaaguucuaagau

SEQ ID NO: 3724298 - RNA, 17 nt, Human
ucucaaguucuaagauu

SEQ ID NO: 3724299 - RNA, 18 nt, Human
ucucaaguucuaagauuc

SEQ ID NO: 3724300 - RNA, 20 nt, Human
ucucaaguucuaagauucua

SEQ ID NO: 3724301 - RNA, 22 nt, Human
ucucaaguucuaagauucuaau

SEQ ID NO: 3724302 - RNA, 18 nt, Human
ucucaaguuuaugucuca

SEQ ID NO: 3724303 - RNA, 22 nt, Human
ucucaauccuaauuucuccucc

SEQ ID NO: 3724304 - RNA, 18 nt, Human
ucucaauccugcaguggg

SEQ ID NO: 3724305 - RNA, 19 nt, Human
ucucaauccugcagugggg

SEQ ID NO: 3724306 - RNA, 13 nt, Human
ucucaaugaaaaa

SEQ ID NO: 3724307 - RNA, 14 nt, Human
ucucaaugaaauag

SEQ ID NO: 3724308 - RNA, 13 nt, Human
ucucaaugcucau

SEQ ID NO: 3724309 - RNA, 22 nt, Human
ucucaauuccaacaguuuaaug

SEQ ID NO: 3724310 - RNA, 12 nt, Human
ucucacaaacau

SEQ ID NO: 3724311 - RNA, 15 nt, Human
ucucacacacauaga

SEQ ID NO: 3724312 - RNA, 23 nt, Human
ucucacacccaccguccgcccug

SEQ ID NO: 3724313 - RNA, 21 nt, Human
ucucacacuggcguagaaguu

SEQ ID NO: 3724314 - RNA, 19 nt, Human
ucucacacuggucugcugu

SEQ ID NO: 3724315 - RNA, 21 nt, Human
ucucacacugguucucaauga

SEQ ID NO: 3724316 - RNA, 23 nt, Human
ucucacacugguucucaaugaaa

SEQ ID NO: 3724317 - RNA, 16 nt, Human
ucucacagcacaugcu

SEQ ID NO: 3724318 - RNA, 17 nt, Human
ucucacagcuaugcaaa

SEQ ID NO: 3724319 - RNA, 21 nt, Human
ucucacagugggagccagggc

SEQ ID NO: 3724320 - RNA, 17 nt, Human
ucucacauauacaagua

SEQ ID NO: 3724321 - RNA, 22 nt, Human
ucucacaugauuccagccauca

SEQ ID NO: 3724322 - RNA, 20 nt, Human
ucucacauggaaugaggguu

SEQ ID NO: 3724323 - RNA, 14 nt, Human
ucucaccagcugca

SEQ ID NO: 3724324 - RNA, 18 nt, Human
ucucaccagcugcaaagu

SEQ ID NO: 3724325 - RNA, 17 nt, Human
ucucaccagcugcugcu

SEQ ID NO: 3724326 - RNA, 16 nt, Human
ucucaccaggcagccu

SEQ ID NO: 3724327 - RNA, 22 nt, Human
ucucaccaggcagccucugggg

SEQ ID NO: 3724328 - RNA, 15 nt, Human
ucucaccccauccca

SEQ ID NO: 3724329 - RNA, 16 nt, Human
ucucaccgcagucguc

SEQ ID NO: 3724330 - RNA, 14 nt, Human
ucucaccggcucuc

SEQ ID NO: 3724331 - RNA, 18 nt, Human
ucucaccggcucucaccu

SEQ ID NO: 3724332 - RNA, 19 nt, Human
ucucaccuaaaaaaagaga

SEQ ID NO: 3724333 - RNA, 14 nt, Human
ucucaccuccugcu

SEQ ID NO: 3724334 - RNA, 17 nt, Human
ucucaccuccugcuggg

SEQ ID NO: 3724335 - RNA, 14 nt, Human
ucucaccucugugc

SEQ ID NO: 3724336 - RNA, 19 nt, Human
ucucaccucugugccucug

SEQ ID NO: 3724337 - RNA, 13 nt, Human
ucucaccuggacu

SEQ ID NO: 3724338 - RNA, 24 nt, Human
ucucaccuggacuuaagcaucugg

SEQ ID NO: 3724339 - RNA, 12 nt, Human
ucucaccuggcc

SEQ ID NO: 3724340 - RNA, 22 nt, Human
ucucacgggcaugggcacuccc

SEQ ID NO: 3724341 - RNA, 17 nt, Human
ucucacuaaacuuuacc

SEQ ID NO: 3724342 - RNA, 20 nt, Human
ucucacuauguugcccaggc

SEQ ID NO: 3724343 - RNA, 18 nt, Human
ucucacuccccagccugg

SEQ ID NO: 3724344 - RNA, 12 nt, Human
ucucacuccccu

SEQ ID NO: 3724345 - RNA, 13 nt, Human
ucucacuccccuc

SEQ ID NO: 3724346 - RNA, 18 nt, Human
ucucacucccuucuccuu

SEQ ID NO: 3724347 - RNA, 13 nt, Human
ucucacuccuuga

SEQ ID NO: 3724348 - RNA, 20 nt, Human
ucucacucuaggaguucagu

SEQ ID NO: 3724349 - RNA, 22 nt, Human
ucucacugagaagauugugaau

SEQ ID NO: 3724350 - RNA, 20 nt, Human
ucucacugccaugccagcuu

SEQ ID NO: 3724351 - RNA, 18 nt, Human
ucucacugcuugaacuag

SEQ ID NO: 3724352 - RNA, 20 nt, Human
ucucacugugggaaggccag

SEQ ID NO: 3724353 - RNA, 13 nt, Human
ucucacugugucc

SEQ ID NO: 3724354 - RNA, 14 nt, Human
ucucacuguucccu

SEQ ID NO: 3724355 - RNA, 18 nt, Human
ucucacuguugcccaggc

SEQ ID NO: 3724356 - RNA, 15 nt, Human
ucucacuguuuguuu

SEQ ID NO: 3724357 - RNA, 11 nt, Human
ucucagaaagu

SEQ ID NO: 3724358 - RNA, 21 nt, Human
ucucagaaagugccugacaca

SEQ ID NO: 3724359 - RNA, 14 nt, Human
ucucagaagcacag

SEQ ID NO: 3724360 - RNA, 21 nt, Human
ucucagaaucucaaauaacua

SEQ ID NO: 3724361 - RNA, 16 nt, Human
ucucagaaucuuuccu

SEQ ID NO: 3724362 - RNA, 18 nt, Human
ucucagaaugucauuuug

SEQ ID NO: 3724363 - RNA, 17 nt, Human
ucucagacccuuuagcc

SEQ ID NO: 3724364 - RNA, 19 nt, Human
ucucagaccgucuuccucc

SEQ ID NO: 3724365 - RNA, 20 nt, Human
ucucagagcuacuugggcca

SEQ ID NO: 3724366 - RNA, 20 nt, Human
ucucagauauuuauauuuuu

SEQ ID NO: 3724367 - RNA, 14 nt, Human
ucucagauauuugc

SEQ ID NO: 3724368 - RNA, 17 nt, Human
ucucagauauuugcacc

SEQ ID NO: 3724369 - RNA, 14 nt, Human
ucucagauguuaaa

SEQ ID NO: 3724370 - RNA, 20 nt, Human
ucucagauguuaaaauaaau

SEQ ID NO: 3724371 - RNA, 14 nt, Human
ucucagauuucuga

SEQ ID NO: 3724372 - RNA, 17 nt, Human
ucucagauuucugagga

SEQ ID NO: 3724373 - RNA, 15 nt, Human
ucucagauuuuauua

SEQ ID NO: 3724374 - RNA, 14 nt, Human
ucucagcagagugc

SEQ ID NO: 3724375 - RNA, 13 nt, Human
ucucagcccagaa

SEQ ID NO: 3724376 - RNA, 17 nt, Human
ucucagccccuuucccu

SEQ ID NO: 3724377 - RNA, 12 nt, Human
ucucagcccuca

SEQ ID NO: 3724378 - RNA, 21 nt, Human
ucucagccgcuucugacugcu

SEQ ID NO: 3724379 - RNA, 12 nt, Human
ucucagccuccc

SEQ ID NO: 3724380 - RNA, 15 nt, Human
ucucagcucacugca

SEQ ID NO: 3724381 - RNA, 18 nt, Human
ucucagcucacugcaacc

SEQ ID NO: 3724382 - RNA, 16 nt, Human
ucucagcuccaggugg

SEQ ID NO: 3724383 - RNA, 17 nt, Human
ucucagcucccauuucu

SEQ ID NO: 3724384 - RNA, 18 nt, Human
ucucagcucccauuucua

SEQ ID NO: 3724385 - RNA, 21 nt, Human
ucucagcucccccuguccccu

SEQ ID NO: 3724386 - RNA, 19 nt, Human
ucucagcucuucugacuua

SEQ ID NO: 3724387 - RNA, 12 nt, Human
ucucaggaaauc

SEQ ID NO: 3724388 - RNA, 14 nt, Human
ucucaggaaaucaa

SEQ ID NO: 3724389 - RNA, 21 nt, Human
ucucaggaaaucaaauaugca

SEQ ID NO: 3724390 - RNA, 23 nt, Human
ucucaggaccaaagcuuucaugu

SEQ ID NO: 3724391 - RNA, 21 nt, Human
ucucaggaccuagggauguuc

SEQ ID NO: 3724392 - RNA, 20 nt, Human
ucucaggagcacaggcagcu

SEQ ID NO: 3724393 - RNA, 16 nt, Human
ucucaggagucucugg

SEQ ID NO: 3724394 - RNA, 23 nt, Human
ucucaggauauccuuaucagagc

SEQ ID NO: 3724395 - RNA, 16 nt, Human
ucucaggauccaagcu

SEQ ID NO: 3724396 - RNA, 13 nt, Human
ucucaggcaccag

SEQ ID NO: 3724397 - RNA, 12 nt, Human
ucucaggccaaa

SEQ ID NO: 3724398 - RNA, 13 nt, Human
ucucaggccaaac

SEQ ID NO: 3724399 - RNA, 13 nt, Human
ucucaggccaccu

SEQ ID NO: 3724400 - RNA, 12 nt, Human
ucucaggccagc

SEQ ID NO: 3724401 - RNA, 16 nt, Human
ucucaggccaucauca

SEQ ID NO: 3724402 - RNA, 15 nt, Human
ucucaggcucugccc

SEQ ID NO: 3724403 - RNA, 17 nt, Human
ucucaggcucugcccug

SEQ ID NO: 3724404 - RNA, 20 nt, Human
ucucaggcucugcccugccc

SEQ ID NO: 3724405 - RNA, 14 nt, Human
ucucaggcugccug

SEQ ID NO: 3724406 - RNA, 18 nt, Human
ucucaggcuggugggagg

SEQ ID NO: 3724407 - RNA, 19 nt, Human
ucucaggcuggugggaggg

SEQ ID NO: 3724408 - RNA, 18 nt, Human
ucucagggaagcccagcu

SEQ ID NO: 3724409 - RNA, 19 nt, Human
ucucagggaagcccagcuc

SEQ ID NO: 3724410 - RNA, 20 nt, Human
ucucagggaagcccagcucc

SEQ ID NO: 3724411 - RNA, 14 nt, Human
ucucagggccuggu

SEQ ID NO: 3724412 - RNA, 19 nt, Human
ucucagggccuggucguuu

SEQ ID NO: 3724413 - RNA, 17 nt, Human
ucucagggcuccugccu

SEQ ID NO: 3724414 - RNA, 23 nt, Human
ucucagggcuccugccuucuguc

SEQ ID NO: 3724415 - RNA, 20 nt, Human
ucucagggucucugcugccg

SEQ ID NO: 3724416 - RNA, 17 nt, Human
ucucagggugaggugcu

SEQ ID NO: 3724417 - RNA, 18 nt, Human
ucucagggugucccagac

SEQ ID NO: 3724418 - RNA, 15 nt, Human
ucucaggucccugca

SEQ ID NO: 3724419 - RNA, 12 nt, Human
ucucagguucuc

SEQ ID NO: 3724420 - RNA, 20 nt, Human
ucucagguuuguuuugugaa

SEQ ID NO: 3724421 - RNA, 21 nt, Human
ucucagguuuguuuugugaau

SEQ ID NO: 3724422 - RNA, 20 nt, Human
ucucaguaccccauggagcu

SEQ ID NO: 3724423 - RNA, 19 nt, Human
ucucagucaugcauaaaua

SEQ ID NO: 3724424 - RNA, 21 nt, Human
ucucagucaugcauaaauaug

SEQ ID NO: 3724425 - RNA, 23 nt, Human
ucucaguccaugaagauguagag

SEQ ID NO: 3724426 - RNA, 12 nt, Human
ucucagucucac

SEQ ID NO: 3724427 - RNA, 13 nt, Human
ucucagucucaca

SEQ ID NO: 3724428 - RNA, 15 nt, Human
ucucagucugucacc

SEQ ID NO: 3724429 - RNA, 16 nt, Human
ucucagugaagacuau

SEQ ID NO: 3724430 - RNA, 23 nt, Human
ucucagugccaacuguggcuggu

SEQ ID NO: 3724431 - RNA, 20 nt, Human
ucucaguggcuucaucuguc

SEQ ID NO: 3724432 - RNA, 14 nt, Human
ucucagugucaaug

SEQ ID NO: 3724433 - RNA, 21 nt, Human
ucucagugucaaugcagcccc

SEQ ID NO: 3724434 - RNA, 16 nt, Human
ucucaguuuguguguc

SEQ ID NO: 3724435 - RNA, 18 nt, Human
ucucaguuugugugucuu

SEQ ID NO: 3724436 - RNA, 16 nt, Human
ucucaguuuucauaag

SEQ ID NO: 3724437 - RNA, 13 nt, Human
ucucaguuuuucu

SEQ ID NO: 3724438 - RNA, 18 nt, Human
ucucauaauuccuacagc

SEQ ID NO: 3724439 - RNA, 14 nt, Human
ggccguccucccgg

SEQ ID NO: 3724440 - RNA, 21 nt, Human
ggccgugaaugggugcccaca

SEQ ID NO: 3724441 - RNA, 16 nt, Human
ggccgugacgucuggg

SEQ ID NO: 3724442 - RNA, 21 nt, Human
ggccgugacgucuggguggcc

SEQ ID NO: 3724443 - RNA, 14 nt, Human
ggccgugggccugg

SEQ ID NO: 3724444 - RNA, 16 nt, Human
ggccguugcugacuua

SEQ ID NO: 3724445 - RNA, 13 nt, Human
ggccguuggccac

SEQ ID NO: 3724446 - RNA, 16 nt, Human
ggccuaaaaguaaaca

SEQ ID NO: 3724447 - RNA, 15 nt, Human
ggccuaaccugccga

SEQ ID NO: 3724448 - RNA, 22 nt, Human
ggccuaaccugccgagagucca

SEQ ID NO: 3724449 - RNA, 16 nt, Human
ggccuacaaaucagua

SEQ ID NO: 3724450 - RNA, 16 nt, Human
ggccuaccccgcagac

SEQ ID NO: 3724451 - RNA, 24 nt, Human
ggccuacuagagucugaacagcug

SEQ ID NO: 3724452 - RNA, 17 nt, Human
ggccuacuccugucuuc

SEQ ID NO: 3724453 - RNA, 23 nt, Human
ggccuacuccugucuucugcuuu

SEQ ID NO: 3724454 - RNA, 13 nt, Human
ggccuagacucug

SEQ ID NO: 3724455 - RNA, 22 nt, Human
ggccuagcauacguacacauuu

SEQ ID NO: 3724456 - RNA, 16 nt, Human
ggccuagcccacccug

SEQ ID NO: 3724457 - RNA, 22 nt, Human
ggccuagcccacccugcugccu

SEQ ID NO: 3724458 - RNA, 21 nt, Human
ggccuagcgaucucuccuggc

SEQ ID NO: 3724459 - RNA, 23 nt, Human
ggccuaggaggguccucugagac

SEQ ID NO: 3724460 - RNA, 20 nt, Human
ggccuauaaugaagcuuuau

SEQ ID NO: 3724461 - RNA, 16 nt, Human
ggccuaucagugugcc

SEQ ID NO: 3724462 - RNA, 18 nt, Human
ggccuaucagugugcccc

SEQ ID NO: 3724463 - RNA, 20 nt, Human
ggccuaucagugugcccccc

SEQ ID NO: 3724464 - RNA, 16 nt, Human
ggccuaucuaaacugg

SEQ ID NO: 3724465 - RNA, 15 nt, Human
ggccuauggagagcc

SEQ ID NO: 3724466 - RNA, 16 nt, Human
ggccuauggagagccc

SEQ ID NO: 3724467 - RNA, 18 nt, Human
ggccuauggagagcccug

SEQ ID NO: 3724468 - RNA, 21 nt, Human
ggccuauggagagcccuggga

SEQ ID NO: 3724469 - RNA, 19 nt, Human
ggccucaaaggcccgcucu

SEQ ID NO: 3724470 - RNA, 19 nt, Human
ggccucaaaugcaccaugu

SEQ ID NO: 3724471 - RNA, 18 nt, Human
ggccucaacccucccuca

SEQ ID NO: 3724472 - RNA, 22 nt, Human
ggccucaacccucccucagccc

SEQ ID NO: 3724473 - RNA, 19 nt, Human
ggccucacuaggcuucugg

SEQ ID NO: 3724474 - RNA, 15 nt, Human
ggccucacuccagga

SEQ ID NO: 3724475 - RNA, 18 nt, Human
ggccucagacugcaccca

SEQ ID NO: 3724476 - RNA, 19 nt, Human
ggccucagacugcacccag

SEQ ID NO: 3724477 - RNA, 19 nt, Human
ggccucagcucaaugcagu

SEQ ID NO: 3724478 - RNA, 18 nt, Human
ggccucagcucccacaag

SEQ ID NO: 3724479 - RNA, 22 nt, Human
ggccucagcugccucacuuccu

SEQ ID NO: 3724480 - RNA, 13 nt, Human
ggccucaggugcu

SEQ ID NO: 3724481 - RNA, 19 nt, Human
ggccucauguggcuggaag

SEQ ID NO: 3724482 - RNA, 20 nt, Human
ggccuccagcccucucacug

SEQ ID NO: 3724483 - RNA, 12 nt, Human
ggccuccagcuc

SEQ ID NO: 3724484 - RNA, 13 nt, Human
ggccuccagcuca

SEQ ID NO: 3724485 - RNA, 14 nt, Human
ggccuccagcucag

SEQ ID NO: 3724486 - RNA, 16 nt, Human
ggccuccagcucagca

SEQ ID NO: 3724487 - RNA, 13 nt, Human
ggccuccaggccc

SEQ ID NO: 3724488 - RNA, 14 nt, Human
ggccuccaggcccg

SEQ ID NO: 3724489 - RNA, 17 nt, Human
ggccuccaggcccgucu

SEQ ID NO: 3724490 - RNA, 13 nt, Human
ggccuccauccug

SEQ ID NO: 3724491 - RNA, 16 nt, Human
ggccuccauccugagg

SEQ ID NO: 3724492 - RNA, 18 nt, Human
ggccuccaugggccccag

SEQ ID NO: 3724493 - RNA, 19 nt, Human
ggccuccaugggccccagg

SEQ ID NO: 3724494 - RNA, 21 nt, Human
ggccuccauuccuggagcccg

SEQ ID NO: 3724495 - RNA, 22 nt, Human
ggccuccauuccuggagcccga

SEQ ID NO: 3724496 - RNA, 13 nt, Human
ggccucccaacuc

SEQ ID NO: 3724497 - RNA, 14 nt, Human
ggccucccaacuca

SEQ ID NO: 3724498 - RNA, 19 nt, Human
ggccucccaacucacccca

SEQ ID NO: 3724499 - RNA, 16 nt, Human
ggccucccacagacuc

SEQ ID NO: 3724500 - RNA, 13 nt, Human
ggccucccacagu

SEQ ID NO: 3724501 - RNA, 14 nt, Human
ggccucccacccga

SEQ ID NO: 3724502 - RNA, 20 nt, Human
ggccucccacccgaugcugc

SEQ ID NO: 3724503 - RNA, 21 nt, Human
ggccucccacccgaugcugcu

SEQ ID NO: 3724504 - RNA, 23 nt, Human
ggccucccacccgaugcugcuuu

SEQ ID NO: 3724505 - RNA, 14 nt, Human
ggccucccccacuu

SEQ ID NO: 3724506 - RNA, 17 nt, Human
ggccuccccugccacca

SEQ ID NO: 3724507 - RNA, 15 nt, Human
ggccucccucucucu

SEQ ID NO: 3724508 - RNA, 19 nt, Human
ggccucccugccaguaggg

SEQ ID NO: 3724509 - RNA, 23 nt, Human
ggccuccggcgucagccuccagc

SEQ ID NO: 3724510 - RNA, 21 nt, Human
ggccuccguccaggagccugg

SEQ ID NO: 3724511 - RNA, 22 nt, Human
ggccuccucacaacaugguguc

SEQ ID NO: 3724512 - RNA, 17 nt, Human
ggccuccucccuuagcu

SEQ ID NO: 3724513 - RNA, 15 nt, Human
ggccuccucuaacag

SEQ ID NO: 3724514 - RNA, 23 nt, Human
ggccuccucuaacaggggcuggu

SEQ ID NO: 3724515 - RNA, 21 nt, Human
ggccuccucuucaccccggca

SEQ ID NO: 3724516 - RNA, 14 nt, Human
ggccucgccuggcc

SEQ ID NO: 3724517 - RNA, 15 nt, Human
ggccucggagccuca

SEQ ID NO: 3724518 - RNA, 16 nt, Human
ggccucgggaccucag

SEQ ID NO: 3724519 - RNA, 18 nt, Human
ggccucuaaccccaggcc

SEQ ID NO: 3724520 - RNA, 15 nt, Human
ggccucuccagccuc

SEQ ID NO: 3724521 - RNA, 20 nt, Human
ggccucuccauuugcucuuc

SEQ ID NO: 3724522 - RNA, 21 nt, Human
ggccucucuggccucccaccc

SEQ ID NO: 3724523 - RNA, 23 nt, Human
ggccucugccccgucucaugagg

SEQ ID NO: 3724524 - RNA, 20 nt, Human
ggccucugcgagugguuucu

SEQ ID NO: 3724525 - RNA, 14 nt, Human
ggccucuguguccu

SEQ ID NO: 3724526 - RNA, 20 nt, Human
ggccucuguguccuucccug

SEQ ID NO: 3724527 - RNA, 19 nt, Human
ggccucuuccgugacguca

SEQ ID NO: 3724528 - RNA, 18 nt, Human
ggccucuucucucagacc

SEQ ID NO: 3724529 - RNA, 22 nt, Human
ggccucuugagcaguggcuggu

SEQ ID NO: 3724530 - RNA, 21 nt, Human
ggccucuuucagugaauuugu

SEQ ID NO: 3724531 - RNA, 23 nt, Human
ggccugaaagaggcugaggccug

SEQ ID NO: 3724532 - RNA, 16 nt, Human
ggccugaaaggagccc

SEQ ID NO: 3724533 - RNA, 18 nt, Human
ggccugaaccacaggaga

SEQ ID NO: 3724534 - RNA, 15 nt, Human
ggccugaagccagcu

SEQ ID NO: 3724535 - RNA, 18 nt, Human
ggccugaagccagcugcc

SEQ ID NO: 3724536 - RNA, 19 nt, Human
ggccugaagccagcugccc

SEQ ID NO: 3724537 - RNA, 23 nt, Human
ggccugaaucaugagccugcugg

SEQ ID NO: 3724538 - RNA, 23 nt, Human
ggccugaaugcuuauagguggcc

SEQ ID NO: 3724539 - RNA, 17 nt, Human
ggccugacugccaagcc

SEQ ID NO: 3724540 - RNA, 14 nt, Human
ggccugacugcuca

SEQ ID NO: 3724541 - RNA, 20 nt, Human
ggccugagacccaggacucc

SEQ ID NO: 3724542 - RNA, 18 nt, Human
ggccugagaggggaagcg

SEQ ID NO: 3724543 - RNA, 20 nt, Human
ggccugagauuucaucugcu

SEQ ID NO: 3724544 - RNA, 13 nt, Human
ggccugaggauga

SEQ ID NO: 3724545 - RNA, 15 nt, Human
ggccugaucagacca

SEQ ID NO: 3724546 - RNA, 18 nt, Human
ggccugaucagaccacgg

SEQ ID NO: 3724547 - RNA, 18 nt, Human
ggccugaugacagagcga

SEQ ID NO: 3724548 - RNA, 19 nt, Human
ggccugaugggguggaagg

SEQ ID NO: 3724549 - RNA, 14 nt, Human
ggccugcaaacugg

SEQ ID NO: 3724550 - RNA, 18 nt, Human
ggccugcaaacugggaac

SEQ ID NO: 3724551 - RNA, 13 nt, Human
ggccugcacacaa

SEQ ID NO: 3724552 - RNA, 14 nt, Human
ggccugccaccugg

SEQ ID NO: 3724553 - RNA, 17 nt, Human
ggccugcccagugcacu

SEQ ID NO: 3724554 - RNA, 12 nt, Human
ggccugccccca

SEQ ID NO: 3724555 - RNA, 14 nt, Human
ggccugccgggcug

SEQ ID NO: 3724556 - RNA, 15 nt, Human
ggccugcuaaggucu

SEQ ID NO: 3724557 - RNA, 16 nt, Human
ggccugcuccagaccu

SEQ ID NO: 3724558 - RNA, 18 nt, Human
ggccugcuccagaccuga

SEQ ID NO: 3724559 - RNA, 13 nt, Human
ggccugcugcuga

SEQ ID NO: 3724560 - RNA, 16 nt, Human
ggccugcugcugagaa

SEQ ID NO: 3724561 - RNA, 18 nt, Human
ggccugcugcugagaacc

SEQ ID NO: 3724562 - RNA, 16 nt, Human
ggccugcuggaggccu

SEQ ID NO: 3724563 - RNA, 17 nt, Human
ggccugcuggaggccuc

SEQ ID NO: 3724564 - RNA, 21 nt, Human
ggccugcugggcucuccaccu

SEQ ID NO: 3724565 - RNA, 23 nt, Human
ggccugcugggcucuccaccuca

SEQ ID NO: 3724566 - RNA, 22 nt, Human
ggccuggaccugccuccugccu

SEQ ID NO: 3724567 - RNA, 18 nt, Human
ggccuggacuuuccugca

SEQ ID NO: 3724568 - RNA, 15 nt, Human
ggccuggagauccuc

SEQ ID NO: 3724569 - RNA, 17 nt, Human
ggccuggagauccuccu

SEQ ID NO: 3724570 - RNA, 18 nt, Human
ggccuggagauccuccug

SEQ ID NO: 3724571 - RNA, 19 nt, Human
ggccuggagauccuccugc

SEQ ID NO: 3724572 - RNA, 20 nt, Human
ggccuggagauccuccugca

SEQ ID NO: 3724573 - RNA, 22 nt, Human
ggccuggagcacaaagacccug

SEQ ID NO: 3724574 - RNA, 15 nt, Human
ggccuggagcaggcc

SEQ ID NO: 3724575 - RNA, 16 nt, Human
ggccuggagcaggccu

SEQ ID NO: 3724576 - RNA, 15 nt, Human
ggccuggcagccgug

SEQ ID NO: 3724577 - RNA, 15 nt, Human
ggccuggccagaugc

SEQ ID NO: 3724578 - RNA, 16 nt, Human
ggccuggccagaugca

SEQ ID NO: 3724579 - RNA, 21 nt, Human
ggccuggccagaugcaccagc

SEQ ID NO: 3724580 - RNA, 16 nt, Human
ggccuggccaggagcu

SEQ ID NO: 3724581 - RNA, 23 nt, Human
ggccuggccaggagcucuucagg

SEQ ID NO: 3724582 - RNA, 17 nt, Human
ggccuggccagggccug

SEQ ID NO: 3724583 - RNA, 13 nt, Human
ggccuggcccugc

SEQ ID NO: 3724584 - RNA, 14 nt, Human
ggccuggcccugcc

SEQ ID NO: 3724585 - RNA, 18 nt, Human
ggccuggcccugcccuga

SEQ ID NO: 3724586 - RNA, 19 nt, Human
ggccuggcccugcccugag

SEQ ID NO: 3724587 - RNA, 15 nt, Human
ggccuggccugagcu

SEQ ID NO: 3724588 - RNA, 20 nt, Human
ucucauaauuccuacagcac

SEQ ID NO: 3724589 - RNA, 16 nt, Human
ucucauacccucccuc

SEQ ID NO: 3724590 - RNA, 24 nt, Human
ucucauagcauuaacuaaucuauu

SEQ ID NO: 3724591 - RNA, 19 nt, Human
ucucauaggaaaaguacau

SEQ ID NO: 3724592 - RNA, 16 nt, Human
ucucauagguuaaaaa

SEQ ID NO: 3724593 - RNA, 17 nt, Human
ucucauagguuaaaaaa

SEQ ID NO: 3724594 - RNA, 20 nt, Human
ucucauagguugagcaauuu

SEQ ID NO: 3724595 - RNA, 17 nt, Human
ucucaucaacugaauga

SEQ ID NO: 3724596 - RNA, 15 nt, Human
ucucaucacuccccu

SEQ ID NO: 3724597 - RNA, 16 nt, Human
ucucaucacuccccuc

SEQ ID NO: 3724598 - RNA, 10 nt, Human
ucucaucaug

SEQ ID NO: 3724599 - RNA, 10 nt, Human
ucucauccca

SEQ ID NO: 3724600 - RNA, 15 nt, Human
ucucauccccagggg

SEQ ID NO: 3724601 - RNA, 22 nt, Human
ucucauccccaggggucccagc

SEQ ID NO: 3724602 - RNA, 16 nt, Human
ucucauccccaguccc

SEQ ID NO: 3724603 - RNA, 14 nt, Human
ucucauccuccugg

SEQ ID NO: 3724604 - RNA, 15 nt, Human
ucucauccuccugga

SEQ ID NO: 3724605 - RNA, 16 nt, Human
ucucauccuccuggaa

SEQ ID NO: 3724606 - RNA, 16 nt, Human
ucucauccuuuucucc

SEQ ID NO: 3724607 - RNA, 18 nt, Human
ucucauccuuuucuccua

SEQ ID NO: 3724608 - RNA, 13 nt, Human
ucucaucugcacc

SEQ ID NO: 3724609 - RNA, 22 nt, Human
ucucaucugcacccuucuuuuc

SEQ ID NO: 3724610 - RNA, 22 nt, Human
ucucaucuggggagcaggcagc

SEQ ID NO: 3724611 - RNA, 13 nt, Human
ucucaucugugau

SEQ ID NO: 3724612 - RNA, 17 nt, Human
ucucaucuugacagagc

SEQ ID NO: 3724613 - RNA, 22 nt, Human
ucucaucuugacagagccugcc

SEQ ID NO: 3724614 - RNA, 14 nt, Human
ucucaugaaccuca

SEQ ID NO: 3724615 - RNA, 22 nt, Human
ucucaugaaccucaagcugcau

SEQ ID NO: 3724616 - RNA, 18 nt, Human
ucucaugaaucugcaaug

SEQ ID NO: 3724617 - RNA, 20 nt, Human
ucucaugccaguaacaggcu

SEQ ID NO: 3724618 - RNA, 13 nt, Human
ucucaugccucag

SEQ ID NO: 3724619 - RNA, 16 nt, Human
ucucaugcuccuuaau

SEQ ID NO: 3724620 - RNA, 19 nt, Human
ucucaugcugccccugccu

SEQ ID NO: 3724621 - RNA, 22 nt, Human
ucucauggagaagcagaaauac

SEQ ID NO: 3724622 - RNA, 17 nt, Human
ucucauggguggcacuc

SEQ ID NO: 3724623 - RNA, 18 nt, Human
ucucauguaucaucugga

SEQ ID NO: 3724624 - RNA, 15 nt, Human
ucucaugugauccuu

SEQ ID NO: 3724625 - RNA, 19 nt, Human
ucucaugugauccuuuuau

SEQ ID NO: 3724626 - RNA, 21 nt, Human
ucucaugugugcucuucuucu

SEQ ID NO: 3724627 - RNA, 17 nt, Human
ucucauguguuugcaua

SEQ ID NO: 3724628 - RNA, 17 nt, Human
ucucauguuuucaacug

SEQ ID NO: 3724629 - RNA, 16 nt, Human
ucucauuacuuuugaa

SEQ ID NO: 3724630 - RNA, 12 nt, Human
ucucauucagua

SEQ ID NO: 3724631 - RNA, 13 nt, Human
ucucauucaguau

SEQ ID NO: 3724632 - RNA, 17 nt, Human
ucucauucaguauuaaa

SEQ ID NO: 3724633 - RNA, 19 nt, Human
ucucauuccaacagugagu

SEQ ID NO: 3724634 - RNA, 14 nt, Human
ucucauuccguugu

SEQ ID NO: 3724635 - RNA, 20 nt, Human
ucucauuccguugucugugg

SEQ ID NO: 3724636 - RNA, 20 nt, Human
ucucauugaauuauaaaagc

SEQ ID NO: 3724637 - RNA, 23 nt, Human
ucucauuggaaauuuagcauugu

SEQ ID NO: 3724638 - RNA, 24 nt, Human
ucucauuggaaauuuagcauugua

SEQ ID NO: 3724639 - RNA, 19 nt, Human
ucucauuuaagggaaaaau

SEQ ID NO: 3724640 - RNA, 16 nt, Human
ucucauuucaccccuc

SEQ ID NO: 3724641 - RNA, 15 nt, Human
ucucauuuccaagca

SEQ ID NO: 3724642 - RNA, 19 nt, Human
ucucauuugccaauaauaa

SEQ ID NO: 3724643 - RNA, 21 nt, Human
ucuccaaaaaaaaaaaaaaua

SEQ ID NO: 3724644 - RNA, 20 nt, Human
ucuccaaaaaucugccuggg

SEQ ID NO: 3724645 - RNA, 22 nt, Human
ucuccaaaaaucugccuggguu

SEQ ID NO: 3724646 - RNA, 13 nt, Human
ucuccaaaauaaa

SEQ ID NO: 3724647 - RNA, 22 nt, Human
ucuccaaaauaaaacuuuuuaa

SEQ ID NO: 3724648 - RNA, 21 nt, Human
ucuccaaagcuuuccuggaga

SEQ ID NO: 3724649 - RNA, 19 nt, Human
ucuccaaccccccagcacu

SEQ ID NO: 3724650 - RNA, 15 nt, Human
ucuccaaccuggaca

SEQ ID NO: 3724651 - RNA, 17 nt, Human
ucuccaagaccagagau

SEQ ID NO: 3724652 - RNA, 13 nt, Human
ucuccaagcagcu

SEQ ID NO: 3724653 - RNA, 14 nt, Human
ucuccaaggaccag

SEQ ID NO: 3724654 - RNA, 23 nt, Human
ucuccaagggcuucugcacccuc

SEQ ID NO: 3724655 - RNA, 20 nt, Human
ucuccaagugccagaggugg

SEQ ID NO: 3724656 - RNA, 16 nt, Human
ucuccaccaggaaccu

SEQ ID NO: 3724657 - RNA, 23 nt, Human
ucuccaccaucgucuucuuggcc

SEQ ID NO: 3724658 - RNA, 23 nt, Human
ucuccacccucccagaccugccu

SEQ ID NO: 3724659 - RNA, 16 nt, Human
ucuccacccugcucuc

SEQ ID NO: 3724660 - RNA, 16 nt, Human
ucuccaccuaguggcu

SEQ ID NO: 3724661 - RNA, 22 nt, Human
ucuccaccuaguggcuguccag

SEQ ID NO: 3724662 - RNA, 13 nt, Human
ucuccaccucagc

SEQ ID NO: 3724663 - RNA, 18 nt, Human
ucuccaccucagccuugg

SEQ ID NO: 3724664 - RNA, 19 nt, Human
ucuccaccucagccuugga

SEQ ID NO: 3724665 - RNA, 14 nt, Human
ucuccaccugccag

SEQ ID NO: 3724666 - RNA, 16 nt, Human
ucuccaccugccaggg

SEQ ID NO: 3724667 - RNA, 22 nt, Human
ucuccaccugccagggacagag

SEQ ID NO: 3724668 - RNA, 13 nt, Human
ucuccaccugcuc

SEQ ID NO: 3724669 - RNA, 10 nt, Human
ucuccacugu

SEQ ID NO: 3724670 - RNA, 18 nt, Human
ucuccacugugcuuucag

SEQ ID NO: 3724671 - RNA, 15 nt, Human
ucuccacuuucagcu

SEQ ID NO: 3724672 - RNA, 16 nt, Human
ucuccacuuucagcug

SEQ ID NO: 3724673 - RNA, 19 nt, Human
ucuccacuuucagcugucu

SEQ ID NO: 3724674 - RNA, 14 nt, Human
ucuccagauguuuc

SEQ ID NO: 3724675 - RNA, 12 nt, Human
ucuccagccagc

SEQ ID NO: 3724676 - RNA, 16 nt, Human
ucuccagccagcaaug

SEQ ID NO: 3724677 - RNA, 13 nt, Human
ucuccagcccacg

SEQ ID NO: 3724678 - RNA, 16 nt, Human
ucuccagccucagccu

SEQ ID NO: 3724679 - RNA, 18 nt, Human
ucuccagccucagcucuc

SEQ ID NO: 3724680 - RNA, 21 nt, Human
ucuccagccugggaggcacag

SEQ ID NO: 3724681 - RNA, 23 nt, Human
ucuccagccugggaggcacagca

SEQ ID NO: 3724682 - RNA, 16 nt, Human
ucuccagcggcccugu

SEQ ID NO: 3724683 - RNA, 21 nt, Human
ucuccagcgucagcugcuccc

SEQ ID NO: 3724684 - RNA, 22 nt, Human
ucuccagcucagaacccagggc

SEQ ID NO: 3724685 - RNA, 14 nt, Human
ucuccagcuccaag

SEQ ID NO: 3724686 - RNA, 11 nt, Human
ucuccagcugg

SEQ ID NO: 3724687 - RNA, 19 nt, Human
ucuccagcugggcucugca

SEQ ID NO: 3724688 - RNA, 18 nt, Human
ucuccaggaaggcggggc

SEQ ID NO: 3724689 - RNA, 13 nt, Human
ucuccaggaccaa

SEQ ID NO: 3724690 - RNA, 19 nt, Human
ucuccaggauugaagagca

SEQ ID NO: 3724691 - RNA, 16 nt, Human
ucuccaggcuguaucc

SEQ ID NO: 3724692 - RNA, 20 nt, Human
ucuccagggaguccccuccc

SEQ ID NO: 3724693 - RNA, 21 nt, Human
ucuccagggaguccccucccc

SEQ ID NO: 3724694 - RNA, 17 nt, Human
ucuccaggggcugcuuc

SEQ ID NO: 3724695 - RNA, 20 nt, Human
ucuccaggggcugcuuccuc

SEQ ID NO: 3724696 - RNA, 15 nt, Human
ucuccagugcaccug

SEQ ID NO: 3724697 - RNA, 17 nt, Human
ucuccagugguugcugu

SEQ ID NO: 3724698 - RNA, 18 nt, Human
ucuccaguuugcaccugu

SEQ ID NO: 3724699 - RNA, 21 nt, Human
ucuccauaaacaugaaaacac

SEQ ID NO: 3724700 - RNA, 18 nt, Human
ucuccauaaccccacccu

SEQ ID NO: 3724701 - RNA, 20 nt, Human
ucuccaucacccucuuccug

SEQ ID NO: 3724702 - RNA, 13 nt, Human
ucuccaucagcug

SEQ ID NO: 3724703 - RNA, 19 nt, Human
ucuccauccacaugggagc

SEQ ID NO: 3724704 - RNA, 18 nt, Human
ucuccaucucucuggccc

SEQ ID NO: 3724705 - RNA, 15 nt, Human
ucuccauggccaccu

SEQ ID NO: 3724706 - RNA, 14 nt, Human
ucuccauggcccug

SEQ ID NO: 3724707 - RNA, 18 nt, Human
ucuccauggcccugcaaa

SEQ ID NO: 3724708 - RNA, 24 nt, Human
ucuccauggcccugccaugcucuc

SEQ ID NO: 3724709 - RNA, 19 nt, Human
ucuccauggcuuccuccuc

SEQ ID NO: 3724710 - RNA, 16 nt, Human
ucuccauucugcuccu

SEQ ID NO: 3724711 - RNA, 18 nt, Human
ucuccauucugcuccuuc

SEQ ID NO: 3724712 - RNA, 12 nt, Human
ucuccauuuaau

SEQ ID NO: 3724713 - RNA, 16 nt, Human
ucuccauuuaauaauu

SEQ ID NO: 3724714 - RNA, 13 nt, Human
ucuccauuugcuc

SEQ ID NO: 3724715 - RNA, 16 nt, Human
ucuccauuugcucuuc

SEQ ID NO: 3724716 - RNA, 19 nt, Human
ucucccaacucuugcacag

SEQ ID NO: 3724717 - RNA, 22 nt, Human
ucucccaagcuaucuaaaguuu

SEQ ID NO: 3724718 - RNA, 12 nt, Human
ucucccaaggcu

SEQ ID NO: 3724719 - RNA, 14 nt, Human
ucucccacaugcca

SEQ ID NO: 3724720 - RNA, 15 nt, Human
ucucccaccccugcc

SEQ ID NO: 3724721 - RNA, 17 nt, Human
ucucccacccucuuccu

SEQ ID NO: 3724722 - RNA, 14 nt, Human
ucucccacccugua

SEQ ID NO: 3724723 - RNA, 14 nt, Human
ucucccaccuagca

SEQ ID NO: 3724724 - RNA, 14 nt, Human
ucucccacguggga

SEQ ID NO: 3724725 - RNA, 15 nt, Human
ucucccacgugggag

SEQ ID NO: 3724726 - RNA, 16 nt, Human
ucucccacucuccuag

SEQ ID NO: 3724727 - RNA, 18 nt, Human
ucucccagauaaugugaa

SEQ ID NO: 3724728 - RNA, 11 nt, Human
ucucccaggaa

SEQ ID NO: 3724729 - RNA, 13 nt, Human
ucucccaggaagc

SEQ ID NO: 3724730 - RNA, 13 nt, Human
ucucccaggcagg

SEQ ID NO: 3724731 - RNA, 12 nt, Human
ucucccaggggc

SEQ ID NO: 3724732 - RNA, 18 nt, Human
ucucccagguaccagcug

SEQ ID NO: 3724733 - RNA, 19 nt, Human
ucucccagguaccagcugc

SEQ ID NO: 3724734 - RNA, 19 nt, Human
ucucccagucuacccagag

SEQ ID NO: 3724735 - RNA, 12 nt, Human
ucucccaucccc

SEQ ID NO: 3724736 - RNA, 15 nt, Human
ucucccaucccccug

SEQ ID NO: 3724737 - RNA, 21 nt, Human
ucucccaucuuaacucuuugc

SEQ ID NO: 3724738 - RNA, 13 nt, Human
ucugucagucaca

SEQ ID NO: 3724739 - RNA, 18 nt, Human
ucugucauaucuucacaa

SEQ ID NO: 3724740 - RNA, 15 nt, Human
ucugucauuugagca

SEQ ID NO: 3724741 - RNA, 17 nt, Human
ucuguccaaaggaggcu

SEQ ID NO: 3724742 - RNA, 22 nt, Human
ucuguccaaaggaggcuggcag

SEQ ID NO: 3724743 - RNA, 19 nt, Human
ucuguccagggcccugagc

SEQ ID NO: 3724744 - RNA, 15 nt, Human
ucuguccaucugccc

SEQ ID NO: 3724745 - RNA, 21 nt, Human
ucugucccacuuggcaucagc

SEQ ID NO: 3724746 - RNA, 17 nt, Human
ucugucccauucccugg

SEQ ID NO: 3724747 - RNA, 16 nt, Human
ucuguccccagccugg

SEQ ID NO: 3724748 - RNA, 22 nt, Human
ucugucccccuuuagaucucug

SEQ ID NO: 3724749 - RNA, 19 nt, Human
ucugucccgggguccugug

SEQ ID NO: 3724750 - RNA, 14 nt, Human
ucugucccucacag

SEQ ID NO: 3724751 - RNA, 16 nt, Human
ucugucccuugccccc

SEQ ID NO: 3724752 - RNA, 15 nt, Human
ucugucccuuggagc

SEQ ID NO: 3724753 - RNA, 20 nt, Human
ucuguccguucacaugugug

SEQ ID NO: 3724754 - RNA, 23 nt, Human
ucuguccucagccuugccagaga

SEQ ID NO: 3724755 - RNA, 18 nt, Human
ucuguccugaaggccuga

SEQ ID NO: 3724756 - RNA, 14 nt, Human
ucuguccuucagau

SEQ ID NO: 3724757 - RNA, 20 nt, Human
ucuguccuucagauggaaac

SEQ ID NO: 3724758 - RNA, 15 nt, Human
ucuguccuugaagga

SEQ ID NO: 3724759 - RNA, 19 nt, Human
ucuguccuuuuggcacuga

SEQ ID NO: 3724760 - RNA, 14 nt, Human
ucugucgcccaguc

SEQ ID NO: 3724761 - RNA, 17 nt, Human
ucugucgccuuagcaug

SEQ ID NO: 3724762 - RNA, 19 nt, Human
ucugucgccuuagcauguu

SEQ ID NO: 3724763 - RNA, 22 nt, Human
ucugucgccuuagcauguuugc

SEQ ID NO: 3724764 - RNA, 16 nt, Human
ucugucuaaaaaccag

SEQ ID NO: 3724765 - RNA, 23 nt, Human
ucugucuagcaugccaacaagaa

SEQ ID NO: 3724766 - RNA, 21 nt, Human
ucugucucaaaaaauaaaaau

SEQ ID NO: 3724767 - RNA, 19 nt, Human
ucugucucagacuuuugua

SEQ ID NO: 3724768 - RNA, 13 nt, Human
ucugucucaucca

SEQ ID NO: 3724769 - RNA, 18 nt, Human
ucugucucauccuccugg

SEQ ID NO: 3724770 - RNA, 17 nt, Human
ucugucucugccucccu

SEQ ID NO: 3724771 - RNA, 9 nt, Human
ucugucugc

SEQ ID NO: 3724772 - RNA, 13 nt, Human
ucugucugcuggu

SEQ ID NO: 3724773 - RNA, 17 nt, Human
ucugucugguggccccg

SEQ ID NO: 3724774 - RNA, 16 nt, Human
ucugucugucccaaag

SEQ ID NO: 3724775 - RNA, 12 nt, Human
ucugucuucaca

SEQ ID NO: 3724776 - RNA, 12 nt, Human
ucugucuuccuu

SEQ ID NO: 3724777 - RNA, 13 nt, Human
ucugucuucugua

SEQ ID NO: 3724778 - RNA, 14 nt, Human
ucugucuucuguau

SEQ ID NO: 3724779 - RNA, 18 nt, Human
ucugucuucuguauauaa

SEQ ID NO: 3724780 - RNA, 14 nt, Human
ucugucuuguaaua

SEQ ID NO: 3724781 - RNA, 19 nt, Human
ucugucuuguaauauuuug

SEQ ID NO: 3724782 - RNA, 12 nt, Human
ucugucuuucca

SEQ ID NO: 3724783 - RNA, 16 nt, Human
ucugucuuuccacucu

SEQ ID NO: 3724784 - RNA, 14 nt, Human
ucugugaaaccugu

SEQ ID NO: 3724785 - RNA, 22 nt, Human
ucugugaaaggaaagagggagg

SEQ ID NO: 3724786 - RNA, 20 nt, Human
ucugugaaaugcuggcauuu

SEQ ID NO: 3724787 - RNA, 21 nt, Human
ucugugaacgauuuagaaaga

SEQ ID NO: 3724788 - RNA, 14 nt, Human
ucugugaacuugaa

SEQ ID NO: 3724789 - RNA, 18 nt, Human
ucugugaacuugaaauuu

SEQ ID NO: 3724790 - RNA, 20 nt, Human
ucugugaaguaguucuguuu

SEQ ID NO: 3724791 - RNA, 20 nt, Human
ucugugaagugagaccuucc

SEQ ID NO: 3724792 - RNA, 12 nt, Human
ucugugaauaag

SEQ ID NO: 3724793 - RNA, 18 nt, Human
ucugugaauugagcugca

SEQ ID NO: 3724794 - RNA, 23 nt, Human
ucugugacccacuucucaucaca

SEQ ID NO: 3724795 - RNA, 14 nt, Human
ucugugaccucagg

SEQ ID NO: 3724796 - RNA, 15 nt, Human
ucugugaccucaggc

SEQ ID NO: 3724797 - RNA, 20 nt, Human
ucugugagaagguuuauugu

SEQ ID NO: 3724798 - RNA, 23 nt, Human
ucugugagaugcuagaacucccu

SEQ ID NO: 3724799 - RNA, 19 nt, Human
ucugugagauggcuggcug

SEQ ID NO: 3724800 - RNA, 20 nt, Human
ucugugagcaucacaguuuu

SEQ ID NO: 3724801 - RNA, 14 nt, Human
ucugugaucauuua

SEQ ID NO: 3724802 - RNA, 20 nt, Human
ucugugaucugggucucuaa

SEQ ID NO: 3724803 - RNA, 15 nt, Human
ucugugaucuuuuaa

SEQ ID NO: 3724804 - RNA, 13 nt, Human
ucugugcaccugg

SEQ ID NO: 3724805 - RNA, 23 nt, Human
ucugugccagagccuggggcucu

SEQ ID NO: 3724806 - RNA, 16 nt, Human
ucugugcccaugggca

SEQ ID NO: 3724807 - RNA, 17 nt, Human
ucugugccccaugccug

SEQ ID NO: 3724808 - RNA, 17 nt, Human
ucugugccugaauauuu

SEQ ID NO: 3724809 - RNA, 21 nt, Human
ucugugccuggagcuccuggg

SEQ ID NO: 3724810 - RNA, 22 nt, Human
ucugugccuucuuuugauuaug

SEQ ID NO: 3724811 - RNA, 16 nt, Human
ucugugcgugaaacac

SEQ ID NO: 3724812 - RNA, 19 nt, Human
ucugugcugacccuccugu

SEQ ID NO: 3724813 - RNA, 13 nt, Human
ucugugcuggcca

SEQ ID NO: 3724814 - RNA, 12 nt, Human
ucugugcugugu

SEQ ID NO: 3724815 - RNA, 14 nt, Human
ucugugcuguuuca

SEQ ID NO: 3724816 - RNA, 14 nt, Human
ucuguggaaagugu

SEQ ID NO: 3724817 - RNA, 15 nt, Human
ucuguggaaagugua

SEQ ID NO: 3724818 - RNA, 16 nt, Human
ucuguggaaaguguaa

SEQ ID NO: 3724819 - RNA, 22 nt, Human
ucuguggaccacugcaugagcu

SEQ ID NO: 3724820 - RNA, 21 nt, Human
ucuguggcuucccaugucuuu

SEQ ID NO: 3724821 - RNA, 23 nt, Human
ucugugggcuacaugcugggguc

SEQ ID NO: 3724822 - RNA, 19 nt, Human
ucugugggcugcacucugu

SEQ ID NO: 3724823 - RNA, 14 nt, Human
ucuguggggacucc

SEQ ID NO: 3724824 - RNA, 22 nt, Human
ucuguggguccgauaauaucuu

SEQ ID NO: 3724825 - RNA, 22 nt, Human
ucugugggugauggggaggggc

SEQ ID NO: 3724826 - RNA, 18 nt, Human
ucugugguuccucugcuc

SEQ ID NO: 3724827 - RNA, 19 nt, Human
ucugugguuuuccccuccc

SEQ ID NO: 3724828 - RNA, 20 nt, Human
ucugugguuuuccccucccu

SEQ ID NO: 3724829 - RNA, 18 nt, Human
ucuguguauauuauuugg

SEQ ID NO: 3724830 - RNA, 15 nt, Human
ucugugucacuggcu

SEQ ID NO: 3724831 - RNA, 17 nt, Human
ucugugucacuggcugc

SEQ ID NO: 3724832 - RNA, 15 nt, Human
ucugugucagccugu

SEQ ID NO: 3724833 - RNA, 17 nt, Human
ucugugucagguggggc

SEQ ID NO: 3724834 - RNA, 20 nt, Human
ucugugucagguggggcagc

SEQ ID NO: 3724835 - RNA, 17 nt, Human
ucugugucuaagauucu

SEQ ID NO: 3724836 - RNA, 18 nt, Human
ucugugucuaagauucua

SEQ ID NO: 3724837 - RNA, 20 nt, Human
ucugugucuaagauucuaga

SEQ ID NO: 3724838 - RNA, 12 nt, Human
ucugugucucuu

SEQ ID NO: 3724839 - RNA, 21 nt, Human
ucugugucuuucacagcuccu

SEQ ID NO: 3724840 - RNA, 13 nt, Human
ucugugugaaaau

SEQ ID NO: 3724841 - RNA, 15 nt, Human
ucugugugaaugugg

SEQ ID NO: 3724842 - RNA, 18 nt, Human
ucugugugaugaacuuuc

SEQ ID NO: 3724843 - RNA, 20 nt, Human
ucugugugaugaacuuucuc

SEQ ID NO: 3724844 - RNA, 22 nt, Human
ucugugugcaagugugugcaca

SEQ ID NO: 3724845 - RNA, 15 nt, Human
ucugugugucaguuu

SEQ ID NO: 3724846 - RNA, 18 nt, Human
ucugugugugaccccucc

SEQ ID NO: 3724847 - RNA, 11 nt, Human
ucugugugugu

SEQ ID NO: 3724848 - RNA, 18 nt, Human
ucuguguguguguaugug

SEQ ID NO: 3724849 - RNA, 22 nt, Human
ucuguguguguguauguggggg

SEQ ID NO: 3724850 - RNA, 12 nt, Human
ucuguguguucc

SEQ ID NO: 3724851 - RNA, 14 nt, Human
ucuguguguuccug

SEQ ID NO: 3724852 - RNA, 15 nt, Human
ucuguguguuuaugu

SEQ ID NO: 3724853 - RNA, 16 nt, Human
ucuguguguuuaugug

SEQ ID NO: 3724854 - RNA, 14 nt, Human
ucuguguugccaag

SEQ ID NO: 3724855 - RNA, 21 nt, Human
ucuguguuggcccaagcucuu

SEQ ID NO: 3724856 - RNA, 17 nt, Human
ucuguguuuaauuucuu

SEQ ID NO: 3724857 - RNA, 22 nt, Human
ucuguguuuaauuucuucaaaa

SEQ ID NO: 3724858 - RNA, 13 nt, Human
ucuguguuuauaa

SEQ ID NO: 3724859 - RNA, 18 nt, Human
ucuguguuuugaaagaau

SEQ ID NO: 3724860 - RNA, 15 nt, Human
ucuguuaaaaucuau

SEQ ID NO: 3724861 - RNA, 21 nt, Human
ucuguuaacugaauaccacuc

SEQ ID NO: 3724862 - RNA, 12 nt, Human
ucuguuacaaaa

SEQ ID NO: 3724863 - RNA, 13 nt, Human
ucuguuacccagg

SEQ ID NO: 3724864 - RNA, 13 nt, Human
ucuguuagaugcu

SEQ ID NO: 3724865 - RNA, 20 nt, Human
ucuguuagcuggguuuacau

SEQ ID NO: 3724866 - RNA, 22 nt, Human
ucuguuauagguccuuuagaaa

SEQ ID NO: 3724867 - RNA, 15 nt, Human
ucuguuauauaaaug

SEQ ID NO: 3724868 - RNA, 19 nt, Human
ucuguuauauccccugcua

SEQ ID NO: 3724869 - RNA, 18 nt, Human
ucuguuauuuagacucau

SEQ ID NO: 3724870 - RNA, 20 nt, Human
ucuguucagcguuuugcaag

SEQ ID NO: 3724871 - RNA, 22 nt, Human
ucuguucaggaaguccuuaucu

SEQ ID NO: 3724872 - RNA, 17 nt, Human
ucuguuccaaauucagu

SEQ ID NO: 3724873 - RNA, 22 nt, Human
ucuguuccaaauucaguuucau

SEQ ID NO: 3724874 - RNA, 20 nt, Human
ucuguuccccauggccacuu

SEQ ID NO: 3724875 - RNA, 13 nt, Human
ucuguucccccuu

SEQ ID NO: 3724876 - RNA, 21 nt, Human
ucuguucuacccguuccaaaa

SEQ ID NO: 3724877 - RNA, 15 nt, Human
ucuguucuaguuuuu

SEQ ID NO: 3724878 - RNA, 12 nt, Human
ucuguucugugg

SEQ ID NO: 3724879 - RNA, 15 nt, Human
ucuguucuuccucag

SEQ ID NO: 3724880 - RNA, 17 nt, Human
ucuguucuuccucagcc

SEQ ID NO: 3724881 - RNA, 19 nt, Human
ucuguucuuccucagccag

SEQ ID NO: 3724882 - RNA, 14 nt, Human
ucuguucuugcuac

SEQ ID NO: 3724883 - RNA, 17 nt, Human
ucuguugauaaauccau

SEQ ID NO: 3724884 - RNA, 12 nt, Human
ucuguugcaaac

SEQ ID NO: 3724885 - RNA, 22 nt, Human
ucuguugccacccaggugaugu

SEQ ID NO: 3724886 - RNA, 13 nt, Human
ucuguugcccagg

SEQ ID NO: 3724887 - RNA, 15 nt, Human
ucuguugcugccuca

SEQ ID NO: 3724888 - RNA, 20 nt, Human
ucucccauggagccccagcc

SEQ ID NO: 3724889 - RNA, 22 nt, Human
ucucccauggagccccagcccc

SEQ ID NO: 3724890 - RNA, 22 nt, Human
ucucccauggcuuaaugcuucu

SEQ ID NO: 3724891 - RNA, 22 nt, Human
ucuccccaacccuagguucccu

SEQ ID NO: 3724892 - RNA, 11 nt, Human
ucuccccacac

SEQ ID NO: 3724893 - RNA, 14 nt, Human
ucuccccagcccag

SEQ ID NO: 3724894 - RNA, 17 nt, Human
ucuccccagcccagaga

SEQ ID NO: 3724895 - RNA, 19 nt, Human
ucuccccagcccagagaca

SEQ ID NO: 3724896 - RNA, 18 nt, Human
ucuccccagcucccagga

SEQ ID NO: 3724897 - RNA, 15 nt, Human
ucuccccagguccag

SEQ ID NO: 3724898 - RNA, 20 nt, Human
ucuccccagguccagcucug

SEQ ID NO: 3724899 - RNA, 22 nt, Human
ucuccccagguccagcucugga

SEQ ID NO: 3724900 - RNA, 12 nt, Human
ucucccccaaca

SEQ ID NO: 3724901 - RNA, 12 nt, Human
ucucccccaccc

SEQ ID NO: 3724902 - RNA, 13 nt, Human
ucucccccagccc

SEQ ID NO: 3724903 - RNA, 17 nt, Human
ucucccccagccccauc

SEQ ID NO: 3724904 - RNA, 16 nt, Human
ucuccccccccccucc

SEQ ID NO: 3724905 - RNA, 21 nt, Human
ucucccccccggggcuggguu

SEQ ID NO: 3724906 - RNA, 12 nt, Human
ucucccccuggg

SEQ ID NO: 3724907 - RNA, 18 nt, Human
ucucccccuuaccccaca

SEQ ID NO: 3724908 - RNA, 23 nt, Human
ucuccccucaaagucugcaacuu

SEQ ID NO: 3724909 - RNA, 13 nt, Human
ucuccccucagcu

SEQ ID NO: 3724910 - RNA, 12 nt, Human
ucuccccucuua

SEQ ID NO: 3724911 - RNA, 12 nt, Human
ucuccccugcac

SEQ ID NO: 3724912 - RNA, 15 nt, Human
ucuccccugcacugu

SEQ ID NO: 3724913 - RNA, 21 nt, Human
ucuccccugcacuguaaaaug

SEQ ID NO: 3724914 - RNA, 21 nt, Human
ucuccccugcccccaggacug

SEQ ID NO: 3724915 - RNA, 19 nt, Human
ucuccccugcccccugcag

SEQ ID NO: 3724916 - RNA, 15 nt, Human
ucuccccugcccugc

SEQ ID NO: 3724917 - RNA, 17 nt, Human
ucuccccugcccugcug

SEQ ID NO: 3724918 - RNA, 17 nt, Human
ucucccgccccccacac

SEQ ID NO: 3724919 - RNA, 13 nt, Human
ucucccgcugcug

SEQ ID NO: 3724920 - RNA, 14 nt, Human
ucucccgcugcugc

SEQ ID NO: 3724921 - RNA, 16 nt, Human
ucucccgcugcugcug

SEQ ID NO: 3724922 - RNA, 15 nt, Human
ucucccgguucuucc

SEQ ID NO: 3724923 - RNA, 22 nt, Human
ucucccgucagggcccaagucc

SEQ ID NO: 3724924 - RNA, 21 nt, Human
ucucccuauaaugcuggagcg

SEQ ID NO: 3724925 - RNA, 23 nt, Human
ucucccucacagcacagagaaga

SEQ ID NO: 3724926 - RNA, 18 nt, Human
ucucccucuaggcucugc

SEQ ID NO: 3724927 - RNA, 22 nt, Human
ucucccucuaggcucugccuuc

SEQ ID NO: 3724928 - RNA, 14 nt, Human
ucucccucuggccc

SEQ ID NO: 3724929 - RNA, 15 nt, Human
ucucccucuggcccu

SEQ ID NO: 3724930 - RNA, 13 nt, Human
ucucccugcaugg

SEQ ID NO: 3724931 - RNA, 19 nt, Human
ucucccugcauggcauccu

SEQ ID NO: 3724932 - RNA, 13 nt, Human
ucucccugccgcc

SEQ ID NO: 3724933 - RNA, 15 nt, Human
ucucccugccgccuc

SEQ ID NO: 3724934 - RNA, 15 nt, Human
ucucccugccuccug

SEQ ID NO: 3724935 - RNA, 16 nt, Human
ucucccugccuggccc

SEQ ID NO: 3724936 - RNA, 16 nt, Human
ucucccugcuuugguc

SEQ ID NO: 3724937 - RNA, 21 nt, Human
ucucccuggaucuaccuggag

SEQ ID NO: 3724938 - RNA, 14 nt, Human
ucucccuggcuccc

SEQ ID NO: 3724939 - RNA, 20 nt, Human
ucucccuggcucccuccucc

SEQ ID NO: 3724940 - RNA, 23 nt, Human
ucucccuggcucccuccuccagg

SEQ ID NO: 3724941 - RNA, 14 nt, Human
ucucccuguacagu

SEQ ID NO: 3724942 - RNA, 18 nt, Human
ucucccuguacaguguua

SEQ ID NO: 3724943 - RNA, 16 nt, Human
ucucccuucauccuuc

SEQ ID NO: 3724944 - RNA, 17 nt, Human
ucucccuucccuccucc

SEQ ID NO: 3724945 - RNA, 22 nt, Human
ucucccuucgguggaagagcuc

SEQ ID NO: 3724946 - RNA, 18 nt, Human
ucucccuuggauuguccc

SEQ ID NO: 3724947 - RNA, 14 nt, Human
ucucccuugggcuc

SEQ ID NO: 3724948 - RNA, 15 nt, Human
ucucccuugggcucu

SEQ ID NO: 3724949 - RNA, 20 nt, Human
ucucccuugggcucugauga

SEQ ID NO: 3724950 - RNA, 22 nt, Human
ucucccuugggcucugaugaaa

SEQ ID NO: 3724951 - RNA, 15 nt, Human
ucucccuuuuccaug

SEQ ID NO: 3724952 - RNA, 20 nt, Human
ucuccgaaaugcugucuuuc

SEQ ID NO: 3724953 - RNA, 18 nt, Human
ucuccgccccugagccca

SEQ ID NO: 3724954 - RNA, 19 nt, Human
ucuccgccccugagcccac

SEQ ID NO: 3724955 - RNA, 20 nt, Human
ucuccgccccugagcccacu

SEQ ID NO: 3724956 - RNA, 21 nt, Human
ucuccggcucccagccucagc

SEQ ID NO: 3724957 - RNA, 22 nt, Human
ucuccggcucccagccucagcg

SEQ ID NO: 3724958 - RNA, 16 nt, Human
ucuccggggccauuug

SEQ ID NO: 3724959 - RNA, 16 nt, Human
ucuccguuagcuccug

SEQ ID NO: 3724960 - RNA, 18 nt, Human
ucuccguuagcuccugug

SEQ ID NO: 3724961 - RNA, 14 nt, Human
ucuccuacugagga

SEQ ID NO: 3724962 - RNA, 23 nt, Human
ucuccuagacugacccugaucag

SEQ ID NO: 3724963 - RNA, 19 nt, Human
ucuccuauauauuucuauu

SEQ ID NO: 3724964 - RNA, 23 nt, Human
ucuccuauccugguuuuuguagc

SEQ ID NO: 3724965 - RNA, 14 nt, Human
ucuccucagccucc

SEQ ID NO: 3724966 - RNA, 22 nt, Human
ucuccucagccuccucaucugg

SEQ ID NO: 3724967 - RNA, 10 nt, Human
ucuccucagg

SEQ ID NO: 3724968 - RNA, 23 nt, Human
ucuccuccaagacacuguggacu

SEQ ID NO: 3724969 - RNA, 14 nt, Human
ucuccucccuuccu

SEQ ID NO: 3724970 - RNA, 16 nt, Human
ucuccuccugcccacc

SEQ ID NO: 3724971 - RNA, 21 nt, Human
ucuccucggcccccuccaucg

SEQ ID NO: 3724972 - RNA, 16 nt, Human
ucuccucuccccucua

SEQ ID NO: 3724973 - RNA, 13 nt, Human
ucuccucugcugc

SEQ ID NO: 3724974 - RNA, 14 nt, Human
ucuccucuuaaaaa

SEQ ID NO: 3724975 - RNA, 22 nt, Human
ucuccucuugccacugccucuu

SEQ ID NO: 3724976 - RNA, 15 nt, Human
ucuccucuuguaaau

SEQ ID NO: 3724977 - RNA, 21 nt, Human
ucuccucuuguaaauaaagcc

SEQ ID NO: 3724978 - RNA, 17 nt, Human
ucuccucuuuaaaacaa

SEQ ID NO: 3724979 - RNA, 17 nt, Human
ucuccugaagauacuua

SEQ ID NO: 3724980 - RNA, 15 nt, Human
ucuccugacagaagg

SEQ ID NO: 3724981 - RNA, 17 nt, Human
ucuccugacccaguccc

SEQ ID NO: 3724982 - RNA, 18 nt, Human
ucuccugaggaucagaaa

SEQ ID NO: 3724983 - RNA, 16 nt, Human
ucuccugauuauuuau

SEQ ID NO: 3724984 - RNA, 19 nt, Human
ucuccugccacauuagaac

SEQ ID NO: 3724985 - RNA, 16 nt, Human
ucuccugcccccacac

SEQ ID NO: 3724986 - RNA, 21 nt, Human
ucuccugcccccacaccuggc

SEQ ID NO: 3724987 - RNA, 11 nt, Human
ucuccugccua

SEQ ID NO: 3724988 - RNA, 12 nt, Human
ucuccugccuac

SEQ ID NO: 3724989 - RNA, 15 nt, Human
ucuccugccuacuca

SEQ ID NO: 3724990 - RNA, 15 nt, Human
ucuccugccucagcc

SEQ ID NO: 3724991 - RNA, 19 nt, Human
ucuccugccucagccuccc

SEQ ID NO: 3724992 - RNA, 13 nt, Human
ucuccugccugua

SEQ ID NO: 3724993 - RNA, 16 nt, Human
ucuccugccuugaaaa

SEQ ID NO: 3724994 - RNA, 12 nt, Human
ucuccugccuuu

SEQ ID NO: 3724995 - RNA, 15 nt, Human
ucuccugccuuugcc

SEQ ID NO: 3724996 - RNA, 17 nt, Human
ucuccugccuuugccuc

SEQ ID NO: 3724997 - RNA, 19 nt, Human
ucuccugcguguucucaga

SEQ ID NO: 3724998 - RNA, 14 nt, Human
ucuccugcugcucc

SEQ ID NO: 3724999 - RNA, 17 nt, Human
ucuccugcugcucccuc

SEQ ID NO: 3725000 - RNA, 18 nt, Human
ucuccugcugcucccuca

SEQ ID NO: 3725001 - RNA, 21 nt, Human
ucuccuggaaauauuaagaaa

SEQ ID NO: 3725002 - RNA, 19 nt, Human
ucuccuggaguugcauuga

SEQ ID NO: 3725003 - RNA, 19 nt, Human
ucuccuggccuauccgcug

SEQ ID NO: 3725004 - RNA, 15 nt, Human
ucuccugggcagcug

SEQ ID NO: 3725005 - RNA, 19 nt, Human
ucuccugggcagcugccuc

SEQ ID NO: 3725006 - RNA, 20 nt, Human
ucuccugggcagcugccucc

SEQ ID NO: 3725007 - RNA, 19 nt, Human
ucuccuguaccucuugagc

SEQ ID NO: 3725008 - RNA, 17 nt, Human
ucuccugugcaugggug

SEQ ID NO: 3725009 - RNA, 16 nt, Human
ucuccugugcccacau

SEQ ID NO: 3725010 - RNA, 17 nt, Human
ucuccugugcccacauc

SEQ ID NO: 3725011 - RNA, 19 nt, Human
ucuccuuaagagacaauuu

SEQ ID NO: 3725012 - RNA, 12 nt, Human
ucuccuuaagcu

SEQ ID NO: 3725013 - RNA, 20 nt, Human
ucuccuucaccuuugucccc

SEQ ID NO: 3725014 - RNA, 16 nt, Human
ucuccuuccaacugcu

SEQ ID NO: 3725015 - RNA, 23 nt, Human
ucuccuucguaucccgagucugg

SEQ ID NO: 3725016 - RNA, 14 nt, Human
ucuccuucuuagcu

SEQ ID NO: 3725017 - RNA, 17 nt, Human
ucuccuugauaacagcu

SEQ ID NO: 3725018 - RNA, 14 nt, Human
ucuccuugcaguuc

SEQ ID NO: 3725019 - RNA, 17 nt, Human
ucuccuugcaguucuug

SEQ ID NO: 3725020 - RNA, 15 nt, Human
ucuccuugcuaccca

SEQ ID NO: 3725021 - RNA, 18 nt, Human
ucuccuugcuacccagaa

SEQ ID NO: 3725022 - RNA, 13 nt, Human
ucuccuuguucug

SEQ ID NO: 3725023 - RNA, 18 nt, Human
ucuccuuguucugauaau

SEQ ID NO: 3725024 - RNA, 22 nt, Human
ucuccuuuaauuguaaaguaaa

SEQ ID NO: 3725025 - RNA, 14 nt, Human
ucuccuuucaggga

SEQ ID NO: 3725026 - RNA, 23 nt, Human
ucuccuuugauaaaauaaaugag

SEQ ID NO: 3725027 - RNA, 17 nt, Human
ucuccuuugcacugagg

SEQ ID NO: 3725028 - RNA, 21 nt, Human
ucuccuuugcacugagggcca

SEQ ID NO: 3725029 - RNA, 22 nt, Human
ucuccuuuuacuucacuucaaa

SEQ ID NO: 3725030 - RNA, 19 nt, Human
ucuccuuuuccucucuccc

SEQ ID NO: 3725031 - RNA, 21 nt, Human
ucuccuuuucuuuuguuacug

SEQ ID NO: 3725032 - RNA, 23 nt, Human
ucuccuuuucuuuuguuacuguu

SEQ ID NO: 3725033 - RNA, 23 nt, Human
ucucgaacauggaacucauuccu

SEQ ID NO: 3725034 - RNA, 20 nt, Human
ucucgaacuccuaaccucaa

SEQ ID NO: 3725035 - RNA, 18 nt, Human
ucucgagcgcccugcaga

SEQ ID NO: 3725036 - RNA, 13 nt, Human
ucucgagcuuggg

SEQ ID NO: 3725037 - RNA, 13 nt, Human
ucucgaucuccug

SEQ ID NO: 3725038 - RNA, 18 nt, Human
ucuguuggcaggcuggcc

SEQ ID NO: 3725039 - RNA, 17 nt, Human
ucuguuggccaguguga

SEQ ID NO: 3725040 - RNA, 19 nt, Human
ucuguuggccagugugaca

SEQ ID NO: 3725041 - RNA, 12 nt, Human
ucuguuguaacu

SEQ ID NO: 3725042 - RNA, 15 nt, Human
ucuguuguaacuuau

SEQ ID NO: 3725043 - RNA, 21 nt, Human
ucuguuguaacuuauguagau

SEQ ID NO: 3725044 - RNA, 17 nt, Human
ucuguuguacuauggaa

SEQ ID NO: 3725045 - RNA, 18 nt, Human
ucuguugucaccuucacc

SEQ ID NO: 3725046 - RNA, 14 nt, Human
ucuguugucauugc

SEQ ID NO: 3725047 - RNA, 19 nt, Human
ucuguuguccuccccuugg

SEQ ID NO: 3725048 - RNA, 21 nt, Human
ucuguuguccuccccuugggc

SEQ ID NO: 3725049 - RNA, 23 nt, Human
ucuguugucguaaagauuugggu

SEQ ID NO: 3725050 - RNA, 18 nt, Human
ucuguugugugucaugcc

SEQ ID NO: 3725051 - RNA, 19 nt, Human
ucuguuuaaagcauauaga

SEQ ID NO: 3725052 - RNA, 14 nt, Human
ucuguuuaaagugg

SEQ ID NO: 3725053 - RNA, 14 nt, Human
ucuguuuaagaaaa

SEQ ID NO: 3725054 - RNA, 23 nt, Human
ucuguuuaauacucauccuugua

SEQ ID NO: 3725055 - RNA, 14 nt, Human
ucuguuuacagugu

SEQ ID NO: 3725056 - RNA, 20 nt, Human
ucuguuuauggccacauuua

SEQ ID NO: 3725057 - RNA, 16 nt, Human
ucuguuuccugacauu

SEQ ID NO: 3725058 - RNA, 13 nt, Human
ucuguuucuaguu

SEQ ID NO: 3725059 - RNA, 14 nt, Human
ucuguuugacaaac

SEQ ID NO: 3725060 - RNA, 12 nt, Human
ucuguuuguuaa

SEQ ID NO: 3725061 - RNA, 21 nt, Human
ucuguuuguuucaagaaccug

SEQ ID NO: 3725062 - RNA, 22 nt, Human
ucuguuuuauaauuuugugaag

SEQ ID NO: 3725063 - RNA, 15 nt, Human
ucuguuuuaugacuu

SEQ ID NO: 3725064 - RNA, 16 nt, Human
ucuguuuuaugacuuc

SEQ ID NO: 3725065 - RNA, 17 nt, Human
ucuguuuuccuuucuca

SEQ ID NO: 3725066 - RNA, 17 nt, Human
ucuguuuuguaucuuaa

SEQ ID NO: 3725067 - RNA, 18 nt, Human
ucuguuuuguaucuuaaa

SEQ ID NO: 3725068 - RNA, 19 nt, Human
ucuguuuuguguacuuuua

SEQ ID NO: 3725069 - RNA, 16 nt, Human
ucuguuuuuaaaaauc

SEQ ID NO: 3725070 - RNA, 18 nt, Human
ucuuaaaaaauaaaaacu

SEQ ID NO: 3725071 - RNA, 18 nt, Human
ucuuaaaaaguggaaaaa

SEQ ID NO: 3725072 - RNA, 23 nt, Human
ucuuaaaaccugcuuuucaaugu

SEQ ID NO: 3725073 - RNA, 12 nt, Human
ucuuaaaacucc

SEQ ID NO: 3725074 - RNA, 15 nt, Human
ucuuaaaauaacuua

SEQ ID NO: 3725075 - RNA, 16 nt, Human
ucuuaaacacuugcaa

SEQ ID NO: 3725076 - RNA, 16 nt, Human
ucuuaaacuugugaau

SEQ ID NO: 3725077 - RNA, 19 nt, Human
ucuuaaagaaaacccaccc

SEQ ID NO: 3725078 - RNA, 18 nt, Human
ucuuaaagaaacagcuuu

SEQ ID NO: 3725079 - RNA, 23 nt, Human
ucuuaaagaaacagcuuucaagu

SEQ ID NO: 3725080 - RNA, 16 nt, Human
ucuuaaagcugccugu

SEQ ID NO: 3725081 - RNA, 18 nt, Human
ucuuaaaguauucuucuc

SEQ ID NO: 3725082 - RNA, 22 nt, Human
ucuuaaaguauucuucucuucc

SEQ ID NO: 3725083 - RNA, 21 nt, Human
ucuuaaagugccaguauuuua

SEQ ID NO: 3725084 - RNA, 12 nt, Human
ucuuaaaguuga

SEQ ID NO: 3725085 - RNA, 13 nt, Human
ucuuaaaguugaa

SEQ ID NO: 3725086 - RNA, 19 nt, Human
ucuuaaaguugaauuuauu

SEQ ID NO: 3725087 - RNA, 20 nt, Human
ucuuaaaguugaauuuauug

SEQ ID NO: 3725088 - RNA, 22 nt, Human
ucuuaaaguugaauuuauuggc

SEQ ID NO: 3725089 - RNA, 18 nt, Human
ucuuaaauaagaaacuuu

SEQ ID NO: 3725090 - RNA, 19 nt, Human
ucuuaaauaagaaacuuuu

SEQ ID NO: 3725091 - RNA, 19 nt, Human
ucuuaaauaaugcuucaga

SEQ ID NO: 3725092 - RNA, 14 nt, Human
ucuuaaauuuugug

SEQ ID NO: 3725093 - RNA, 16 nt, Human
ucuuaaccagaucauu

SEQ ID NO: 3725094 - RNA, 22 nt, Human
ucuuaaccagaucauugugaaa

SEQ ID NO: 3725095 - RNA, 23 nt, Human
ucuuaacuucuugcuucuuucua

SEQ ID NO: 3725096 - RNA, 13 nt, Human
ucuuaagaaauaa

SEQ ID NO: 3725097 - RNA, 12 nt, Human
ucuuaagaagac

SEQ ID NO: 3725098 - RNA, 16 nt, Human
ucuuaagacagcaugu

SEQ ID NO: 3725099 - RNA, 22 nt, Human
ucuuaagccaucuugguaaauu

SEQ ID NO: 3725100 - RNA, 20 nt, Human
ucuuaagccuaaaugccuua

SEQ ID NO: 3725101 - RNA, 17 nt, Human
ucuuaaguuucucagcu

SEQ ID NO: 3725102 - RNA, 14 nt, Human
ucuuaauacuguua

SEQ ID NO: 3725103 - RNA, 18 nt, Human
ucuuaauacuguuauucu

SEQ ID NO: 3725104 - RNA, 19 nt, Human
ucuuaauauaacugccuua

SEQ ID NO: 3725105 - RNA, 16 nt, Human
ucuuaauauuaaauau

SEQ ID NO: 3725106 - RNA, 20 nt, Human
ucuuaaucauuuuuuauaua

SEQ ID NO: 3725107 - RNA, 22 nt, Human
ucuuaaucauuuuuuauauaua

SEQ ID NO: 3725108 - RNA, 19 nt, Human
ucuuaaucuuuucacaaau

SEQ ID NO: 3725109 - RNA, 14 nt, Human
ucuuaauguacaua

SEQ ID NO: 3725110 - RNA, 18 nt, Human
ucuuaauguaucaaacug

SEQ ID NO: 3725111 - RNA, 14 nt, Human
ucuuaauuaaaaga

SEQ ID NO: 3725112 - RNA, 15 nt, Human
ucuuaauuaauuuga

SEQ ID NO: 3725113 - RNA, 23 nt, Human
ucuuaauuaauuugauuaacaaa

SEQ ID NO: 3725114 - RNA, 20 nt, Human
ucuuaauuauuauaaaaaua

SEQ ID NO: 3725115 - RNA, 11 nt, Human
ucuuaauugcc

SEQ ID NO: 3725116 - RNA, 17 nt, Human
ucuuaauuuggaaacua

SEQ ID NO: 3725117 - RNA, 18 nt, Human
ucuuaauuuggaaacuaa

SEQ ID NO: 3725118 - RNA, 22 nt, Human
ucuuaauuuggaaacuaauaaa

SEQ ID NO: 3725119 - RNA, 19 nt, Human
ucuuaauuuugguuguauu

SEQ ID NO: 3725120 - RNA, 20 nt, Human
ucuuaauuuugguuguauuc

SEQ ID NO: 3725121 - RNA, 14 nt, Human
ucuuacaaacaugu

SEQ ID NO: 3725122 - RNA, 23 nt, Human
ucuuacacauacaguuuuaugcu

SEQ ID NO: 3725123 - RNA, 17 nt, Human
ucuuacacugccuguau

SEQ ID NO: 3725124 - RNA, 22 nt, Human
ucuuacacugccuguauacuuu

SEQ ID NO: 3725125 - RNA, 19 nt, Human
ucuuacauaaaccauuuuu

SEQ ID NO: 3725126 - RNA, 20 nt, Human
ucuuacccuucugugcccag

SEQ ID NO: 3725127 - RNA, 15 nt, Human
ucuuaccgacaagca

SEQ ID NO: 3725128 - RNA, 18 nt, Human
ucuuacgauggcacccag

SEQ ID NO: 3725129 - RNA, 16 nt, Human
ucuuacuaaaaaguau

SEQ ID NO: 3725130 - RNA, 15 nt, Human
ucuuacuccuccucu

SEQ ID NO: 3725131 - RNA, 16 nt, Human
ucuuacuccuccucuu

SEQ ID NO: 3725132 - RNA, 14 nt, Human
ucuuacucuuuccu

SEQ ID NO: 3725133 - RNA, 20 nt, Human
ucuuacuuauuaucuucagg

SEQ ID NO: 3725134 - RNA, 15 nt, Human
ucuuacuuggaacug

SEQ ID NO: 3725135 - RNA, 19 nt, Human
ucuuacuuuccugaaaaua

SEQ ID NO: 3725136 - RNA, 11 nt, Human
ucuuacuuugu

SEQ ID NO: 3725137 - RNA, 15 nt, Human
ucuuacuuuguaaau

SEQ ID NO: 3725138 - RNA, 22 nt, Human
ucuuagaaaaggugauaaaauc

SEQ ID NO: 3725139 - RNA, 15 nt, Human
ucuuagaaauuuauu

SEQ ID NO: 3725140 - RNA, 16 nt, Human
ucuuagacuuuuccaa

SEQ ID NO: 3725141 - RNA, 16 nt, Human
ucuuagaucauaguuu

SEQ ID NO: 3725142 - RNA, 17 nt, Human
ucuuagaucauaguuuu

SEQ ID NO: 3725143 - RNA, 22 nt, Human
ucuuagaugcaguucugaagaa

SEQ ID NO: 3725144 - RNA, 23 nt, Human
ucuuagaugcaguucugaagaag

SEQ ID NO: 3725145 - RNA, 22 nt, Human
ucuuagauggauucuccacuca

SEQ ID NO: 3725146 - RNA, 13 nt, Human
ucuuagauucuua

SEQ ID NO: 3725147 - RNA, 16 nt, Human
ucuuagcagcuuccag

SEQ ID NO: 3725148 - RNA, 18 nt, Human
ucuuagcagugauuuuua

SEQ ID NO: 3725149 - RNA, 22 nt, Human
ucuuagcauagcuuauuauuga

SEQ ID NO: 3725150 - RNA, 17 nt, Human
ucuuagccuguggcagu

SEQ ID NO: 3725151 - RNA, 21 nt, Human
ucuuagcuaucauugcuuccu

SEQ ID NO: 3725152 - RNA, 13 nt, Human
ucuuagcuccccu

SEQ ID NO: 3725153 - RNA, 23 nt, Human
ucuuagcugucugcucagacaga

SEQ ID NO: 3725154 - RNA, 16 nt, Human
ucuuagcuuuuuaauu

SEQ ID NO: 3725155 - RNA, 22 nt, Human
ucuuagcuuuuuaauuguuguu

SEQ ID NO: 3725156 - RNA, 15 nt, Human
ucuuaggaagagaaa

SEQ ID NO: 3725157 - RNA, 19 nt, Human
ucuuaggagcagagcucug

SEQ ID NO: 3725158 - RNA, 16 nt, Human
ucuuaggcaaucacau

SEQ ID NO: 3725159 - RNA, 19 nt, Human
ucuuaggcaaucacauagu

SEQ ID NO: 3725160 - RNA, 17 nt, Human
ucuuaggggagagcuuu

SEQ ID NO: 3725161 - RNA, 14 nt, Human
ucuuaguagauuuu

SEQ ID NO: 3725162 - RNA, 18 nt, Human
ucuuagugccugagagua

SEQ ID NO: 3725163 - RNA, 14 nt, Human
ucuuaguguaugau

SEQ ID NO: 3725164 - RNA, 21 nt, Human
ucuuaguguugcguccugccu

SEQ ID NO: 3725165 - RNA, 14 nt, Human
ucuuaguuauauag

SEQ ID NO: 3725166 - RNA, 16 nt, Human
ucuuaguucucacugu

SEQ ID NO: 3725167 - RNA, 14 nt, Human
ucuuauaaauauga

SEQ ID NO: 3725168 - RNA, 21 nt, Human
ucuuauaaauaugaagcucac

SEQ ID NO: 3725169 - RNA, 21 nt, Human
ucuuauaauuguucucagaau

SEQ ID NO: 3725170 - RNA, 14 nt, Human
ucuuauaauuuaaa

SEQ ID NO: 3725171 - RNA, 16 nt, Human
ucuuauacgcuuuucu

SEQ ID NO: 3725172 - RNA, 20 nt, Human
ucuuauacgcuuuucuuugu

SEQ ID NO: 3725173 - RNA, 18 nt, Human
ucuuauacuguacaauaa

SEQ ID NO: 3725174 - RNA, 18 nt, Human
ucuuauagcacuuugaaa

SEQ ID NO: 3725175 - RNA, 20 nt, Human
ucuuauauauauuucuuugu

SEQ ID NO: 3725176 - RNA, 21 nt, Human
ucuuaucacaaaaaagaaaau

SEQ ID NO: 3725177 - RNA, 20 nt, Human
ucuuaucauggucucaguca

SEQ ID NO: 3725178 - RNA, 22 nt, Human
ucuuauccaacaucaacaucuu

SEQ ID NO: 3725179 - RNA, 22 nt, Human
ucuuaucucagucaugcauaaa

SEQ ID NO: 3725180 - RNA, 18 nt, Human
ucuuaucugagcugagcc

SEQ ID NO: 3725181 - RNA, 21 nt, Human
ucuuaugcucucacuguuugu

SEQ ID NO: 3725182 - RNA, 15 nt, Human
ucuuaugcuguaccc

SEQ ID NO: 3725183 - RNA, 23 nt, Human
ucuuaugcuguacccaguuucua

SEQ ID NO: 3725184 - RNA, 14 nt, Human
ucuuauggaauuga

SEQ ID NO: 3725185 - RNA, 15 nt, Human
ucuuauggaauugau

SEQ ID NO: 3725186 - RNA, 18 nt, Human
ucuuauggaauugauuug

SEQ ID NO: 3725187 - RNA, 14 nt, Human
ucucgauuuuaucu

SEQ ID NO: 3725188 - RNA, 14 nt, Human
ucucgcacaccucu

SEQ ID NO: 3725189 - RNA, 20 nt, Human
ucucgcuauugucaccaggg

SEQ ID NO: 3725190 - RNA, 17 nt, Human
ucucgcucuguugccca

SEQ ID NO: 3725191 - RNA, 18 nt, Human
ucucgcucuguugcccag

SEQ ID NO: 3725192 - RNA, 21 nt, Human
ucucggaccuuucagcuguga

SEQ ID NO: 3725193 - RNA, 19 nt, Human
ucucggacuaagccuaccu

SEQ ID NO: 3725194 - RNA, 18 nt, Human
ucucggauaguugcuauu

SEQ ID NO: 3725195 - RNA, 23 nt, Human
ucucggauaguugcuauuuuugu

SEQ ID NO: 3725196 - RNA, 15 nt, Human
ucucggcucacugca

SEQ ID NO: 3725197 - RNA, 21 nt, Human
ucucggcuccccauguguccu

SEQ ID NO: 3725198 - RNA, 14 nt, Human
ucucgggagaggau

SEQ ID NO: 3725199 - RNA, 15 nt, Human
ucucgugagucauuu

SEQ ID NO: 3725200 - RNA, 19 nt, Human
ucucgugguaggacuguag

SEQ ID NO: 3725201 - RNA, 21 nt, Human
ucucgugguaggacuguagaa

SEQ ID NO: 3725202 - RNA, 21 nt, Human
ucucuaaagaguuuauuuuaa

SEQ ID NO: 3725203 - RNA, 20 nt, Human
ucucuaacaguggacaaagu

SEQ ID NO: 3725204 - RNA, 15 nt, Human
ucucuaaccuccuuu

SEQ ID NO: 3725205 - RNA, 18 nt, Human
ucucuaacuuauuuuauu

SEQ ID NO: 3725206 - RNA, 17 nt, Human
ucucuaagguuuacaau

SEQ ID NO: 3725207 - RNA, 20 nt, Human
ucucuaagugggcauugcca

SEQ ID NO: 3725208 - RNA, 23 nt, Human
ucucuaagugggcauugccaugu

SEQ ID NO: 3725209 - RNA, 16 nt, Human
ucucuaaguuccacug

SEQ ID NO: 3725210 - RNA, 21 nt, Human
ucucuaaguuccacugagcuc

SEQ ID NO: 3725211 - RNA, 16 nt, Human
ucucuaauaagaaaac

SEQ ID NO: 3725212 - RNA, 11 nt, Human
ucucuaauaau

SEQ ID NO: 3725213 - RNA, 12 nt, Human
ucucuaauaaua

SEQ ID NO: 3725214 - RNA, 15 nt, Human
ucucuaauaauaaau

SEQ ID NO: 3725215 - RNA, 22 nt, Human
ucucuaauaauaaauaguucuu

SEQ ID NO: 3725216 - RNA, 11 nt, Human
ucucuaauaug

SEQ ID NO: 3725217 - RNA, 15 nt, Human
ucucuaaucgaaaga

SEQ ID NO: 3725218 - RNA, 18 nt, Human
ucucuaaucugugcuguu

SEQ ID NO: 3725219 - RNA, 20 nt, Human
ucucuaaucugugcuguuuc

SEQ ID NO: 3725220 - RNA, 19 nt, Human
ucucuaauuccauccauaa

SEQ ID NO: 3725221 - RNA, 20 nt, Human
ucucuacagaugucccauuu

SEQ ID NO: 3725222 - RNA, 18 nt, Human
ucucuacagucucgucuc

SEQ ID NO: 3725223 - RNA, 21 nt, Human
ucucuacagucucgucucuuu

SEQ ID NO: 3725224 - RNA, 20 nt, Human
ucucuaccacugcugauauu

SEQ ID NO: 3725225 - RNA, 18 nt, Human
ucucuacccagcccaucu

SEQ ID NO: 3725226 - RNA, 20 nt, Human
ucucuacccagcccaucuug

SEQ ID NO: 3725227 - RNA, 20 nt, Human
ucucuacccaucuuaaaaac

SEQ ID NO: 3725228 - RNA, 23 nt, Human
ucucuaccuucuccccagcuccc

SEQ ID NO: 3725229 - RNA, 14 nt, Human
ucucuacuaaaaau

SEQ ID NO: 3725230 - RNA, 19 nt, Human
ucucuacuccuaccucagc

SEQ ID NO: 3725231 - RNA, 17 nt, Human
ucucuagaauuuuaagu

SEQ ID NO: 3725232 - RNA, 13 nt, Human
ucucuagcacaau

SEQ ID NO: 3725233 - RNA, 19 nt, Human
ucucuaggccucuccaguu

SEQ ID NO: 3725234 - RNA, 18 nt, Human
ucucuaguaguuaaaaaa

SEQ ID NO: 3725235 - RNA, 14 nt, Human
ucucuagugcugug

SEQ ID NO: 3725236 - RNA, 17 nt, Human
ucucuagugcugugaaa

SEQ ID NO: 3725237 - RNA, 19 nt, Human
ucucuagugcugugaaaaa

SEQ ID NO: 3725238 - RNA, 17 nt, Human
ucucuaguuccacgccu

SEQ ID NO: 3725239 - RNA, 16 nt, Human
ucucuaguuugauuaa

SEQ ID NO: 3725240 - RNA, 19 nt, Human
ucucuaguuugauuaaauu

SEQ ID NO: 3725241 - RNA, 19 nt, Human
ucucuauaccaauaaagug

SEQ ID NO: 3725242 - RNA, 22 nt, Human
ucucuauagcaccagggcucac

SEQ ID NO: 3725243 - RNA, 13 nt, Human
ucucuaucauuaa

SEQ ID NO: 3725244 - RNA, 16 nt, Human
ucucuaucauuaaagu

SEQ ID NO: 3725245 - RNA, 17 nt, Human
ucucuaucauuuaauaa

SEQ ID NO: 3725246 - RNA, 20 nt, Human
ucucuaucauuuaauaauau

SEQ ID NO: 3725247 - RNA, 22 nt, Human
ucucuaucauuuaauaauauac

SEQ ID NO: 3725248 - RNA, 13 nt, Human
ucucuaugccucu

SEQ ID NO: 3725249 - RNA, 22 nt, Human
ucucuaugguaaagauauuauu

SEQ ID NO: 3725250 - RNA, 14 nt, Human
ucucuauuaaaaug

SEQ ID NO: 3725251 - RNA, 16 nt, Human
ucucuauuuaaauucu

SEQ ID NO: 3725252 - RNA, 17 nt, Human
ucucuauuuaaauucuu

SEQ ID NO: 3725253 - RNA, 18 nt, Human
ucucuauuuaaauucuuu

SEQ ID NO: 3725254 - RNA, 23 nt, Human
ucucuauuucccccuuucuuccu

SEQ ID NO: 3725255 - RNA, 13 nt, Human
ucucuauuugaga

SEQ ID NO: 3725256 - RNA, 21 nt, Human
ucucucaaaagagaaaaacaa

SEQ ID NO: 3725257 - RNA, 23 nt, Human
ucucucacagacaggaccccugc

SEQ ID NO: 3725258 - RNA, 23 nt, Human
ucucucacucccucccuuucuau

SEQ ID NO: 3725259 - RNA, 16 nt, Human
ucucucagaagggagg

SEQ ID NO: 3725260 - RNA, 14 nt, Human
ucucucaggagcac

SEQ ID NO: 3725261 - RNA, 18 nt, Human
ucucucaggagcacaggc

SEQ ID NO: 3725262 - RNA, 22 nt, Human
ucucucaggagcacaggcagcu

SEQ ID NO: 3725263 - RNA, 21 nt, Human
ucucucaggccaaacucaccu

SEQ ID NO: 3725264 - RNA, 23 nt, Human
ucucucaucucuuagcuccccuc

SEQ ID NO: 3725265 - RNA, 13 nt, Human
ucucuccacugug

SEQ ID NO: 3725266 - RNA, 16 nt, Human
ucucuccacuuucagc

SEQ ID NO: 3725267 - RNA, 22 nt, Human
ucucuccacuuucagcugucuu

SEQ ID NO: 3725268 - RNA, 13 nt, Human
ucucuccagaugu

SEQ ID NO: 3725269 - RNA, 16 nt, Human
ucucuccagccccugg

SEQ ID NO: 3725270 - RNA, 14 nt, Human
ucucuccauucccg

SEQ ID NO: 3725271 - RNA, 19 nt, Human
ucucucccagucuacccag

SEQ ID NO: 3725272 - RNA, 21 nt, Human
ucucucccagucuacccagag

SEQ ID NO: 3725273 - RNA, 22 nt, Human
ucucucccagucuacccagaga

SEQ ID NO: 3725274 - RNA, 13 nt, Human
ucucucccaugga

SEQ ID NO: 3725275 - RNA, 22 nt, Human
ucucuccccucaaagucugcaa

SEQ ID NO: 3725276 - RNA, 18 nt, Human
ucucucccucucccuguc

SEQ ID NO: 3725277 - RNA, 11 nt, Human
ucucucccugc

SEQ ID NO: 3725278 - RNA, 13 nt, Human
ucucuccucccca

SEQ ID NO: 3725279 - RNA, 14 nt, Human
ucucuccugcggga

SEQ ID NO: 3725280 - RNA, 11 nt, Human
ucucuccuggc

SEQ ID NO: 3725281 - RNA, 13 nt, Human
ucucuccuggccu

SEQ ID NO: 3725282 - RNA, 14 nt, Human
ucucuccuguacuu

SEQ ID NO: 3725283 - RNA, 14 nt, Human
ucucuccuuucuuu

SEQ ID NO: 3725284 - RNA, 11 nt, Human
ucucuccuuuu

SEQ ID NO: 3725285 - RNA, 12 nt, Human
ucucuccuuuuc

SEQ ID NO: 3725286 - RNA, 23 nt, Human
ucucucggaguaucugggaacug

SEQ ID NO: 3725287 - RNA, 20 nt, Human
ucucucggcuccccaugugu

SEQ ID NO: 3725288 - RNA, 20 nt, Human
ucucucguaacugguuucau

SEQ ID NO: 3725289 - RNA, 15 nt, Human
ucucucgugaguaua

SEQ ID NO: 3725290 - RNA, 15 nt, Human
ucucucuacagugcc

SEQ ID NO: 3725291 - RNA, 21 nt, Human
ucucucuauuucccccuuucu

SEQ ID NO: 3725292 - RNA, 11 nt, Human
ucucucucacc

SEQ ID NO: 3725293 - RNA, 12 nt, Human
ucucucuccaag

SEQ ID NO: 3725294 - RNA, 18 nt, Human
ucucucucccauggagcc

SEQ ID NO: 3725295 - RNA, 23 nt, Human
ucucucucccauggagccccagc

SEQ ID NO: 3725296 - RNA, 11 nt, Human
ucucucuccug

SEQ ID NO: 3725297 - RNA, 22 nt, Human
ucucucuccuguacuuuuucca

SEQ ID NO: 3725298 - RNA, 12 nt, Human
ucucucugcagc

SEQ ID NO: 3725299 - RNA, 14 nt, Human
ucucucugcagcug

SEQ ID NO: 3725300 - RNA, 16 nt, Human
ucucucugcagcugcc

SEQ ID NO: 3725301 - RNA, 12 nt, Human
ucucucugccca

SEQ ID NO: 3725302 - RNA, 14 nt, Human
ucucucugcccaac

SEQ ID NO: 3725303 - RNA, 16 nt, Human
ucucucugcccaaccc

SEQ ID NO: 3725304 - RNA, 13 nt, Human
ucucucugccugu

SEQ ID NO: 3725305 - RNA, 21 nt, Human
ucucucugugcuguggaagca

SEQ ID NO: 3725306 - RNA, 11 nt, Human
ucucucuucug

SEQ ID NO: 3725307 - RNA, 14 nt, Human
ucucucuucugccu

SEQ ID NO: 3725308 - RNA, 19 nt, Human
ucucucuucugcuccaccc

SEQ ID NO: 3725309 - RNA, 20 nt, Human
ucucucuucugcuccacccu

SEQ ID NO: 3725310 - RNA, 12 nt, Human
ucucucuuugga

SEQ ID NO: 3725311 - RNA, 15 nt, Human
ucucugaacuucagc

SEQ ID NO: 3725312 - RNA, 16 nt, Human
ucucugaacuucagcu

SEQ ID NO: 3725313 - RNA, 22 nt, Human
ucucugaagaguggguuucaca

SEQ ID NO: 3725314 - RNA, 14 nt, Human
ucucugaagcaugu

SEQ ID NO: 3725315 - RNA, 19 nt, Human
ucucugaagcauguuucau

SEQ ID NO: 3725316 - RNA, 21 nt, Human
ucucugaaggaggccaccucc

SEQ ID NO: 3725317 - RNA, 12 nt, Human
ucucugaccuac

SEQ ID NO: 3725318 - RNA, 17 nt, Human
ucucugacucucaaauc

SEQ ID NO: 3725319 - RNA, 14 nt, Human
ucucugagcaguga

SEQ ID NO: 3725320 - RNA, 23 nt, Human
ucucugagcuccaguggaagaag

SEQ ID NO: 3725321 - RNA, 16 nt, Human
ucucugagcucugcau

SEQ ID NO: 3725322 - RNA, 20 nt, Human
ucucugagggcuuccuuugg

SEQ ID NO: 3725323 - RNA, 22 nt, Human
ucucugaggggcuaccaggaaa

SEQ ID NO: 3725324 - RNA, 20 nt, Human
ucucugauuuucaaagcuuu

SEQ ID NO: 3725325 - RNA, 11 nt, Human
ucucugcagcc

SEQ ID NO: 3725326 - RNA, 18 nt, Human
ucucugcagccagcccag

SEQ ID NO: 3725327 - RNA, 14 nt, Human
ucucugcagcugcc

SEQ ID NO: 3725328 - RNA, 11 nt, Human
ucucugcaggu

SEQ ID NO: 3725329 - RNA, 15 nt, Human
ucucugcaggucccu

SEQ ID NO: 3725330 - RNA, 18 nt, Human
ucucugcaggucccuaau

SEQ ID NO: 3725331 - RNA, 21 nt, Human
ucucugcaggucccuaauaaa

SEQ ID NO: 3725332 - RNA, 19 nt, Human
ucucugcaucuacucccaa

SEQ ID NO: 3725333 - RNA, 16 nt, Human
ucucugcaucugacca

SEQ ID NO: 3725334 - RNA, 20 nt, Human
ucucugcauuuaaaaaaauc

SEQ ID NO: 3725335 - RNA, 18 nt, Human
ucucugccauaaaugauu

SEQ ID NO: 3725336 - RNA, 20 nt, Human
ggcugcccuggcccugaggu

SEQ ID NO: 3725337 - RNA, 13 nt, Human
ggcugcccuggug

SEQ ID NO: 3725338 - RNA, 22 nt, Human
ggcugcccuggugcugccacac

SEQ ID NO: 3725339 - RNA, 16 nt, Human
ggcugcccuugggcca

SEQ ID NO: 3725340 - RNA, 20 nt, Human
ggcugccuccacucccacuu

SEQ ID NO: 3725341 - RNA, 13 nt, Human
ggcugccucccaa

SEQ ID NO: 3725342 - RNA, 23 nt, Human
ggcugccugagucgugaccugcu

SEQ ID NO: 3725343 - RNA, 16 nt, Human
ggcugccuggccccca

SEQ ID NO: 3725344 - RNA, 17 nt, Human
ggcugccugggcuguug

SEQ ID NO: 3725345 - RNA, 21 nt, Human
ggcugcggcguacaggcuggc

SEQ ID NO: 3725346 - RNA, 21 nt, Human
ggcugcgucuggaggggcccc

SEQ ID NO: 3725347 - RNA, 15 nt, Human
ggcugcuacccagaa

SEQ ID NO: 3725348 - RNA, 13 nt, Human
ggcugcucccacc

SEQ ID NO: 3725349 - RNA, 15 nt, Human
ggcugcucugccugu

SEQ ID NO: 3725350 - RNA, 16 nt, Human
ggcugcucugccugug

SEQ ID NO: 3725351 - RNA, 17 nt, Human
ggcugcugaaggcucga

SEQ ID NO: 3725352 - RNA, 18 nt, Human
ggcugcugcugggcucag

SEQ ID NO: 3725353 - RNA, 14 nt, Human
ggcugcuggaggaa

SEQ ID NO: 3725354 - RNA, 13 nt, Human
ggcugcuggccug

SEQ ID NO: 3725355 - RNA, 11 nt, Human
ggcugcuggga

SEQ ID NO: 3725356 - RNA, 17 nt, Human
ggcugcugugggaaaug

SEQ ID NO: 3725357 - RNA, 22 nt, Human
ggcugcuucaaggauccugagc

SEQ ID NO: 3725358 - RNA, 18 nt, Human
ggcugcuucccugaagcu

SEQ ID NO: 3725359 - RNA, 19 nt, Human
ggcugcuucccugaagcuc

SEQ ID NO: 3725360 - RNA, 13 nt, Human
ggcugcuuccucc

SEQ ID NO: 3725361 - RNA, 14 nt, Human
ggcugcuuggccuu

SEQ ID NO: 3725362 - RNA, 22 nt, Human
ggcuggaacagauucacacugu

SEQ ID NO: 3725363 - RNA, 15 nt, Human
ggcuggaaggaggaa

SEQ ID NO: 3725364 - RNA, 16 nt, Human
ggcuggaaggaggaag

SEQ ID NO: 3725365 - RNA, 17 nt, Human
ggcuggaaggaggaaga

SEQ ID NO: 3725366 - RNA, 13 nt, Human
ggcuggaaucugg

SEQ ID NO: 3725367 - RNA, 14 nt, Human
ggcuggaaucugga

SEQ ID NO: 3725368 - RNA, 19 nt, Human
ggcuggaaucuggagagcu

SEQ ID NO: 3725369 - RNA, 20 nt, Human
ggcuggaaucuggagagcua

SEQ ID NO: 3725370 - RNA, 15 nt, Human
ggcuggacccagcca

SEQ ID NO: 3725371 - RNA, 20 nt, Human
ggcuggacccagccaggccc

SEQ ID NO: 3725372 - RNA, 23 nt, Human
ggcuggacccagccaggcccagc

SEQ ID NO: 3725373 - RNA, 22 nt, Human
ggcuggaccuauguccuaagga

SEQ ID NO: 3725374 - RNA, 16 nt, Human
ggcuggacugaggccu

SEQ ID NO: 3725375 - RNA, 19 nt, Human
ggcuggagaccaugcagag

SEQ ID NO: 3725376 - RNA, 15 nt, Human
ggcuggaggagccca

SEQ ID NO: 3725377 - RNA, 15 nt, Human
ggcuggaggcagggc

SEQ ID NO: 3725378 - RNA, 23 nt, Human
ggcuggaggcagggccuugccca

SEQ ID NO: 3725379 - RNA, 15 nt, Human
ucugagcugagccag

SEQ ID NO: 3725380 - RNA, 16 nt, Human
ucugagcugagccagg

SEQ ID NO: 3725381 - RNA, 18 nt, Human
ucugagcugagccaggcu

SEQ ID NO: 3725382 - RNA, 17 nt, Human
ucugagcugcucugaau

SEQ ID NO: 3725383 - RNA, 16 nt, Human
ucugaggaauccagac

SEQ ID NO: 3725384 - RNA, 18 nt, Human
ucugaggaauccagaccc

SEQ ID NO: 3725385 - RNA, 23 nt, Human
ucugaggaauccagacccggcug

SEQ ID NO: 3725386 - RNA, 21 nt, Human
ucugaggaauggacauuucua

SEQ ID NO: 3725387 - RNA, 14 nt, Human
ucugaggaauucug

SEQ ID NO: 3725388 - RNA, 20 nt, Human
ucugaggaauucuguauaga

SEQ ID NO: 3725389 - RNA, 17 nt, Human
ucugaggacaagagaaa

SEQ ID NO: 3725390 - RNA, 23 nt, Human
ucugaggacacuaaccacgcugg

SEQ ID NO: 3725391 - RNA, 22 nt, Human
ucugaggagaaacaaauaagac

SEQ ID NO: 3725392 - RNA, 17 nt, Human
ucugaggccagccuggc

SEQ ID NO: 3725393 - RNA, 18 nt, Human
ucugaggccagccuggcc

SEQ ID NO: 3725394 - RNA, 21 nt, Human
ucugaggccguugcugacuua

SEQ ID NO: 3725395 - RNA, 19 nt, Human
ucugaggcucuuucugggc

SEQ ID NO: 3725396 - RNA, 11 nt, Human
ucugaggcuga

SEQ ID NO: 3725397 - RNA, 23 nt, Human
ucugaggcugaaauucagaauau

SEQ ID NO: 3725398 - RNA, 21 nt, Human
ucugaggcuggauccuagccu

SEQ ID NO: 3725399 - RNA, 22 nt, Human
ucugaggcuggauccuagccuu

SEQ ID NO: 3725400 - RNA, 14 nt, Human
ucugaggcuuccag

SEQ ID NO: 3725401 - RNA, 13 nt, Human
ucugagggaggag

SEQ ID NO: 3725402 - RNA, 15 nt, Human
ucugagggcuuccuu

SEQ ID NO: 3725403 - RNA, 18 nt, Human
ucugagggcuuccuuugg

SEQ ID NO: 3725404 - RNA, 19 nt, Human
ucugaggggcaacugaguc

SEQ ID NO: 3725405 - RNA, 19 nt, Human
ucugaggggcuaccaggaa

SEQ ID NO: 3725406 - RNA, 20 nt, Human
ucugaggggcuaccaggaaa

SEQ ID NO: 3725407 - RNA, 12 nt, Human
ucugagggggag

SEQ ID NO: 3725408 - RNA, 18 nt, Human
ucugagguccugagcacu

SEQ ID NO: 3725409 - RNA, 20 nt, Human
ucugagguccugagcacugc

SEQ ID NO: 3725410 - RNA, 16 nt, Human
ucugaggugcacuggg

SEQ ID NO: 3725411 - RNA, 19 nt, Human
ucugaggugcacugggagg

SEQ ID NO: 3725412 - RNA, 18 nt, Human
ucugaguaucuccucgca

SEQ ID NO: 3725413 - RNA, 23 nt, Human
ucugaguaucuccucgcaagcug

SEQ ID NO: 3725414 - RNA, 16 nt, Human
ucugaguccuggccca

SEQ ID NO: 3725415 - RNA, 13 nt, Human
ucugagugaaccu

SEQ ID NO: 3725416 - RNA, 20 nt, Human
ucugagugaaccuguauaag

SEQ ID NO: 3725417 - RNA, 23 nt, Human
ucugagugcaaacuucagaguuc

SEQ ID NO: 3725418 - RNA, 17 nt, Human
ucugaguggcuucacuc

SEQ ID NO: 3725419 - RNA, 21 nt, Human
ucugaguggcuucacuccugc

SEQ ID NO: 3725420 - RNA, 22 nt, Human
ucugaguggcuucacuccugcu

SEQ ID NO: 3725421 - RNA, 19 nt, Human
ucugaguugccaagacaaa

SEQ ID NO: 3725422 - RNA, 19 nt, Human
ucugaguuguuaccccaag

SEQ ID NO: 3725423 - RNA, 20 nt, Human
ucugaguuucauucuccugc

SEQ ID NO: 3725424 - RNA, 16 nt, Human
ucugaguuuuaccaaa

SEQ ID NO: 3725425 - RNA, 21 nt, Human
ucugauaacuagauggugcug

SEQ ID NO: 3725426 - RNA, 13 nt, Human
ucugauacagaaa

SEQ ID NO: 3725427 - RNA, 15 nt, Human
ucugauaggccaagu

SEQ ID NO: 3725428 - RNA, 21 nt, Human
ucugauaggguuugugacagg

SEQ ID NO: 3725429 - RNA, 17 nt, Human
ucugauauuccaugaau

SEQ ID NO: 3725430 - RNA, 19 nt, Human
ucugauauuccaugaaugu

SEQ ID NO: 3725431 - RNA, 22 nt, Human
ucugauauuccaugaauguauc

SEQ ID NO: 3725432 - RNA, 16 nt, Human
ucugaucacugaaaua

SEQ ID NO: 3725433 - RNA, 17 nt, Human
ucugaucagaacaaaug

SEQ ID NO: 3725434 - RNA, 17 nt, Human
ucugaucguucuuucua

SEQ ID NO: 3725435 - RNA, 15 nt, Human
ucugaucuccauggc

SEQ ID NO: 3725436 - RNA, 23 nt, Human
ucugaucugugcuuuccagcuca

SEQ ID NO: 3725437 - RNA, 21 nt, Human
ucugaugaaaaauugcugacu

SEQ ID NO: 3725438 - RNA, 18 nt, Human
ucugaugaaauguuaaca

SEQ ID NO: 3725439 - RNA, 13 nt, Human
ucugaugaaucuu

SEQ ID NO: 3725440 - RNA, 16 nt, Human
ucugaugaugugccug

SEQ ID NO: 3725441 - RNA, 23 nt, Human
ucugaugcaagcaagaaacacug

SEQ ID NO: 3725442 - RNA, 19 nt, Human
ucugauggaccuucuagaa

SEQ ID NO: 3725443 - RNA, 20 nt, Human
ucugauggccuuaauuuccu

SEQ ID NO: 3725444 - RNA, 22 nt, Human
ucugauggccuuaauuuccuuu

SEQ ID NO: 3725445 - RNA, 15 nt, Human
ucugauguauuuugu

SEQ ID NO: 3725446 - RNA, 21 nt, Human
ucugauguauuuugugaguuu

SEQ ID NO: 3725447 - RNA, 20 nt, Human
ucugaugucucuaaagcacu

SEQ ID NO: 3725448 - RNA, 18 nt, Human
ucugauuacacaaaacaa

SEQ ID NO: 3725449 - RNA, 15 nt, Human
ucugauuagcuuugu

SEQ ID NO: 3725450 - RNA, 18 nt, Human
ucugauuagcuuuguguu

SEQ ID NO: 3725451 - RNA, 14 nt, Human
ucugauuccagcac

SEQ ID NO: 3725452 - RNA, 18 nt, Human
ucugauucccaagcucug

SEQ ID NO: 3725453 - RNA, 20 nt, Human
ucugauucccaagcucugcu

SEQ ID NO: 3725454 - RNA, 21 nt, Human
ucugauucccaagcucugcuc

SEQ ID NO: 3725455 - RNA, 23 nt, Human
ucugauucccaagcucugcuccu

SEQ ID NO: 3725456 - RNA, 20 nt, Human
ucugauucgaaugacacugu

SEQ ID NO: 3725457 - RNA, 22 nt, Human
ucugauucgaaugacacuguuc

SEQ ID NO: 3725458 - RNA, 15 nt, Human
ucugauucuucaaag

SEQ ID NO: 3725459 - RNA, 15 nt, Human
ucugauuggacauuu

SEQ ID NO: 3725460 - RNA, 19 nt, Human
ucugauuggacauuuucuu

SEQ ID NO: 3725461 - RNA, 21 nt, Human
ucugauuggcuuguagaauug

SEQ ID NO: 3725462 - RNA, 23 nt, Human
ucugauuggcuuguagaauuguu

SEQ ID NO: 3725463 - RNA, 23 nt, Human
ucugauuguaacguugcuguggg

SEQ ID NO: 3725464 - RNA, 16 nt, Human
ucugauuuauuuugua

SEQ ID NO: 3725465 - RNA, 17 nt, Human
ucugauuugcauauuca

SEQ ID NO: 3725466 - RNA, 17 nt, Human
ucugauuugcugcucuu

SEQ ID NO: 3725467 - RNA, 19 nt, Human
ucugauuugcugcucuuca

SEQ ID NO: 3725468 - RNA, 17 nt, Human
ucugauuuguaacccac

SEQ ID NO: 3725469 - RNA, 22 nt, Human
ucugauuuuaggagcuaaggcu

SEQ ID NO: 3725470 - RNA, 16 nt, Human
ucugcaaacaaacacc

SEQ ID NO: 3725471 - RNA, 22 nt, Human
ucugcaaacaaacaccuucuua

SEQ ID NO: 3725472 - RNA, 18 nt, Human
ucugcaaagaaugagaag

SEQ ID NO: 3725473 - RNA, 21 nt, Human
ucugcaaauagaaaacaggaa

SEQ ID NO: 3725474 - RNA, 14 nt, Human
ucugcaacucugaa

SEQ ID NO: 3725475 - RNA, 14 nt, Human
ucugcaacuuuaag

SEQ ID NO: 3725476 - RNA, 21 nt, Human
ucugcaagauucugaaacauu

SEQ ID NO: 3725477 - RNA, 14 nt, Human
ucugcaagccugcg

SEQ ID NO: 3725478 - RNA, 23 nt, Human
ucugcaagggcagaacacuaacc

SEQ ID NO: 3725479 - RNA, 17 nt, Human
ucugcaagucagaggau

SEQ ID NO: 3725480 - RNA, 17 nt, Human
ucugcaaucuucucaga

SEQ ID NO: 3725481 - RNA, 19 nt, Human
ucugcaaugggcacuggga

SEQ ID NO: 3725482 - RNA, 21 nt, Human
ucugcaauucaaaaguuccaa

SEQ ID NO: 3725483 - RNA, 16 nt, Human
ucugcacacaaauauu

SEQ ID NO: 3725484 - RNA, 17 nt, Human
ucugcacacaaauauua

SEQ ID NO: 3725485 - RNA, 10 nt, Human
ucugcacaga

SEQ ID NO: 3725486 - RNA, 17 nt, Human
ucugcacagcuggccuc

SEQ ID NO: 3725487 - RNA, 19 nt, Human
ucugcacauaaacucuuuu

SEQ ID NO: 3725488 - RNA, 12 nt, Human
ucugcacaugaa

SEQ ID NO: 3725489 - RNA, 23 nt, Human
ucugcacaugaaucccacccaca

SEQ ID NO: 3725490 - RNA, 22 nt, Human
ucugcacaugcagcugcacccu

SEQ ID NO: 3725491 - RNA, 19 nt, Human
ucugcacaugucuuguaca

SEQ ID NO: 3725492 - RNA, 20 nt, Human
ucugcacaugucuuguacau

SEQ ID NO: 3725493 - RNA, 22 nt, Human
ucugcacaugucuuguacaugu

SEQ ID NO: 3725494 - RNA, 13 nt, Human
ucugcacccaggg

SEQ ID NO: 3725495 - RNA, 24 nt, Human
ucugcacccuggggccuggaccug

SEQ ID NO: 3725496 - RNA, 13 nt, Human
ucugcacccuucu

SEQ ID NO: 3725497 - RNA, 19 nt, Human
ucugcacccuucuuuucuc

SEQ ID NO: 3725498 - RNA, 20 nt, Human
ucugcacccuucuuuucuca

SEQ ID NO: 3725499 - RNA, 15 nt, Human
ucugcaccuuaucuu

SEQ ID NO: 3725500 - RNA, 20 nt, Human
ucugcacuacugacaugugg

SEQ ID NO: 3725501 - RNA, 21 nt, Human
ucugcacuacugacauguggg

SEQ ID NO: 3725502 - RNA, 13 nt, Human
ucugcacuccccu

SEQ ID NO: 3725503 - RNA, 17 nt, Human
ucugcacuccccugcug

SEQ ID NO: 3725504 - RNA, 16 nt, Human
ucugcacuuaaauauc

SEQ ID NO: 3725505 - RNA, 15 nt, Human
ucugcagaaacagaa

SEQ ID NO: 3725506 - RNA, 15 nt, Human
ucugcagaaggaaaa

SEQ ID NO: 3725507 - RNA, 23 nt, Human
ucugcagaaggaaaaauguguaa

SEQ ID NO: 3725508 - RNA, 15 nt, Human
ucugcagacugcuag

SEQ ID NO: 3725509 - RNA, 23 nt, Human
ucugcagacugcuaguguucugu

SEQ ID NO: 3725510 - RNA, 16 nt, Human
ucugcagcaugaccug

SEQ ID NO: 3725511 - RNA, 13 nt, Human
ucugcagcccagg

SEQ ID NO: 3725512 - RNA, 15 nt, Human
ucugcagcccaggga

SEQ ID NO: 3725513 - RNA, 23 nt, Human
ucugcagcccggcgccaccaucc

SEQ ID NO: 3725514 - RNA, 14 nt, Human
ucugcagccucaga

SEQ ID NO: 3725515 - RNA, 12 nt, Human
ucugcagcugcc

SEQ ID NO: 3725516 - RNA, 19 nt, Human
ucugcaggaugauuguaca

SEQ ID NO: 3725517 - RNA, 17 nt, Human
ucugcaggcaccuuagu

SEQ ID NO: 3725518 - RNA, 13 nt, Human
ucugcaggcagac

SEQ ID NO: 3725519 - RNA, 14 nt, Human
ucugcaggcuuaau

SEQ ID NO: 3725520 - RNA, 11 nt, Human
ucugcaggucc

SEQ ID NO: 3725521 - RNA, 17 nt, Human
ucugcaggucccuaaua

SEQ ID NO: 3725522 - RNA, 19 nt, Human
ucugcaggucccuaauaaa

SEQ ID NO: 3725523 - RNA, 21 nt, Human
ucugcagguucuucuuccuga

SEQ ID NO: 3725524 - RNA, 18 nt, Human
ucugcagguugaagccau

SEQ ID NO: 3725525 - RNA, 15 nt, Human
ucugcaguaaaucuu

SEQ ID NO: 3725526 - RNA, 20 nt, Human
ucugcagucacuucguggga

SEQ ID NO: 3725527 - RNA, 18 nt, Human
ucuuuauauacaauaaug

SEQ ID NO: 3725528 - RNA, 15 nt, Human
ucuuuauaugaacau

SEQ ID NO: 3725529 - RNA, 15 nt, Human
ucuuuaugacuguuu

SEQ ID NO: 3725530 - RNA, 15 nt, Human
ucuuuaugcuugcaa

SEQ ID NO: 3725531 - RNA, 15 nt, Human
ucuuuauguugaguc

SEQ ID NO: 3725532 - RNA, 15 nt, Human
ucuuuauugaaauuc

SEQ ID NO: 3725533 - RNA, 14 nt, Human
ucuuuauugagaaa

SEQ ID NO: 3725534 - RNA, 15 nt, Human
ucuuuauugagaaag

SEQ ID NO: 3725535 - RNA, 19 nt, Human
ucuuuauugagaaagagca

SEQ ID NO: 3725536 - RNA, 12 nt, Human
ucuuuauugucu

SEQ ID NO: 3725537 - RNA, 17 nt, Human
ucuuuauugucuguaaa

SEQ ID NO: 3725538 - RNA, 12 nt, Human
ucuuuauuuugu

SEQ ID NO: 3725539 - RNA, 17 nt, Human
ucuuuauuuuguguaaa

SEQ ID NO: 3725540 - RNA, 21 nt, Human
ucuuucaaaaccuuuugaaau

SEQ ID NO: 3725541 - RNA, 20 nt, Human
ucuuucaaagguagccauca

SEQ ID NO: 3725542 - RNA, 22 nt, Human
ucuuucaaauugagagaaugga

SEQ ID NO: 3725543 - RNA, 21 nt, Human
ucuuucaagggcuuuccugug

SEQ ID NO: 3725544 - RNA, 20 nt, Human
ucuuucaauaaacuaaagaa

SEQ ID NO: 3725545 - RNA, 19 nt, Human
ucuuucaauacagauauau

SEQ ID NO: 3725546 - RNA, 20 nt, Human
ucuuucaauacagauauauu

SEQ ID NO: 3725547 - RNA, 21 nt, Human
ucuuucacacuuccaccagcc

SEQ ID NO: 3725548 - RNA, 15 nt, Human
ucuuucacagcuccu

SEQ ID NO: 3725549 - RNA, 17 nt, Human
ucuuucacauuuaaaua

SEQ ID NO: 3725550 - RNA, 21 nt, Human
ucuuucagacuugccauguga

SEQ ID NO: 3725551 - RNA, 23 nt, Human
ucuuucagacuugccaugugacu

SEQ ID NO: 3725552 - RNA, 22 nt, Human
ucuuucagauuuuuugaaccau

SEQ ID NO: 3725553 - RNA, 21 nt, Human
ucuuucagccaagaauucuua

SEQ ID NO: 3725554 - RNA, 11 nt, Human
ucuuucagcuc

SEQ ID NO: 3725555 - RNA, 13 nt, Human
ucuuucagcuccu

SEQ ID NO: 3725556 - RNA, 15 nt, Human
ucuuucagcuccuga

SEQ ID NO: 3725557 - RNA, 20 nt, Human
ucuuucagggggguugugag

SEQ ID NO: 3725558 - RNA, 21 nt, Human
ucuuucaguacuuuuuuaaau

SEQ ID NO: 3725559 - RNA, 12 nt, Human
ucuuucaugagu

SEQ ID NO: 3725560 - RNA, 14 nt, Human
ucuuucaugaguuu

SEQ ID NO: 3725561 - RNA, 23 nt, Human
ucuuuccaaaguacacuguuuca

SEQ ID NO: 3725562 - RNA, 18 nt, Human
ucuuuccaaauuauuucu

SEQ ID NO: 3725563 - RNA, 19 nt, Human
ucuuuccaaauuauuucuu

SEQ ID NO: 3725564 - RNA, 19 nt, Human
ucuuuccaaccggcuuugu

SEQ ID NO: 3725565 - RNA, 22 nt, Human
ucuuuccacuccuccuagccac

SEQ ID NO: 3725566 - RNA, 15 nt, Human
ucuuuccacucugga

SEQ ID NO: 3725567 - RNA, 23 nt, Human
ucuuuccaggcuauguauaaaau

SEQ ID NO: 3725568 - RNA, 15 nt, Human
ucuuuccauauccau

SEQ ID NO: 3725569 - RNA, 16 nt, Human
ucuuuccauauccaua

SEQ ID NO: 3725570 - RNA, 20 nt, Human
ucuuuccauuggaucucauu

SEQ ID NO: 3725571 - RNA, 13 nt, Human
ucuuuccauuugc

SEQ ID NO: 3725572 - RNA, 22 nt, Human
ucuuuccauuugcauuuguuua

SEQ ID NO: 3725573 - RNA, 17 nt, Human
ucuuucccaucuccccu

SEQ ID NO: 3725574 - RNA, 23 nt, Human
ucuuucccucccuuccucuuucc

SEQ ID NO: 3725575 - RNA, 14 nt, Human
ucuuucccuuccuc

SEQ ID NO: 3725576 - RNA, 16 nt, Human
ucuuucccuuccucca

SEQ ID NO: 3725577 - RNA, 11 nt, Human
ucuuuccucuu

SEQ ID NO: 3725578 - RNA, 14 nt, Human
ucuuuccugaggcu

SEQ ID NO: 3725579 - RNA, 14 nt, Human
ucuuuccugccuuc

SEQ ID NO: 3725580 - RNA, 15 nt, Human
ucuuuccuucuugcc

SEQ ID NO: 3725581 - RNA, 10 nt, Human
ucuuuccuug

SEQ ID NO: 3725582 - RNA, 17 nt, Human
ucuuucgcacagcaguu

SEQ ID NO: 3725583 - RNA, 14 nt, Human
ucuuucgucacccu

SEQ ID NO: 3725584 - RNA, 21 nt, Human
ucuuucuaacuccagugaagu

SEQ ID NO: 3725585 - RNA, 14 nt, Human
ucuuucuaaugcug

SEQ ID NO: 3725586 - RNA, 19 nt, Human
ucuuucuaaugugugaauc

SEQ ID NO: 3725587 - RNA, 17 nt, Human
ucuuucuccaaaguuau

SEQ ID NO: 3725588 - RNA, 14 nt, Human
ucuuucucucccca

SEQ ID NO: 3725589 - RNA, 14 nt, Human
ucuuucucucuucc

SEQ ID NO: 3725590 - RNA, 17 nt, Human
ucuuucucucuucccuc

SEQ ID NO: 3725591 - RNA, 12 nt, Human
ucuuucucuuuu

SEQ ID NO: 3725592 - RNA, 19 nt, Human
ucuuucugaaggcuuugug

SEQ ID NO: 3725593 - RNA, 16 nt, Human
ucuuucugaugucaaa

SEQ ID NO: 3725594 - RNA, 16 nt, Human
ucuuucuggccugccu

SEQ ID NO: 3725595 - RNA, 19 nt, Human
ucuuucuggcuaugcauuu

SEQ ID NO: 3725596 - RNA, 14 nt, Human
ucuuucugucccuu

SEQ ID NO: 3725597 - RNA, 15 nt, Human
ucuuucuuagaaauu

SEQ ID NO: 3725598 - RNA, 17 nt, Human
ucuuucuuccucugcug

SEQ ID NO: 3725599 - RNA, 22 nt, Human
ucuuucuucuucaaaccuuugu

SEQ ID NO: 3725600 - RNA, 19 nt, Human
ucuuucuuuggugccuuuc

SEQ ID NO: 3725601 - RNA, 22 nt, Human
ucuuucuuuugauucuuccuaa

SEQ ID NO: 3725602 - RNA, 22 nt, Human
ucuuugaaagacuuccaaagaa

SEQ ID NO: 3725603 - RNA, 16 nt, Human
ucuuugaaauuaugua

SEQ ID NO: 3725604 - RNA, 12 nt, Human
ucuuugaauaaa

SEQ ID NO: 3725605 - RNA, 20 nt, Human
ucuuugaauaaaugucacuu

SEQ ID NO: 3725606 - RNA, 15 nt, Human
ucuuugaaugacaaa

SEQ ID NO: 3725607 - RNA, 14 nt, Human
ucuuugaaugcuuu

SEQ ID NO: 3725608 - RNA, 22 nt, Human
ucuuugacaauuccuagauaaa

SEQ ID NO: 3725609 - RNA, 16 nt, Human
ucuuugacacucugca

SEQ ID NO: 3725610 - RNA, 14 nt, Human
ucuuugauguguug

SEQ ID NO: 3725611 - RNA, 19 nt, Human
ucuuugauucuccuucagc

SEQ ID NO: 3725612 - RNA, 20 nt, Human
ucuuugauucuccuucagcc

SEQ ID NO: 3725613 - RNA, 12 nt, Human
ucuuugcaaagu

SEQ ID NO: 3725614 - RNA, 21 nt, Human
ucuuugcaaaguauuguaaau

SEQ ID NO: 3725615 - RNA, 18 nt, Human
ucuuugcacuuuuucuua

SEQ ID NO: 3725616 - RNA, 14 nt, Human
ucuuugcagacagg

SEQ ID NO: 3725617 - RNA, 12 nt, Human
ucuuugcaugga

SEQ ID NO: 3725618 - RNA, 14 nt, Human
ucuuugccacccuc

SEQ ID NO: 3725619 - RNA, 16 nt, Human
ucuuugccacccucau

SEQ ID NO: 3725620 - RNA, 13 nt, Human
ucuuugccaucuc

SEQ ID NO: 3725621 - RNA, 17 nt, Human
ucuuugccaucucugcu

SEQ ID NO: 3725622 - RNA, 19 nt, Human
ucuuugccaucucugcucc

SEQ ID NO: 3725623 - RNA, 13 nt, Human
ucuuugcccuuua

SEQ ID NO: 3725624 - RNA, 12 nt, Human
ucuuugccuggu

SEQ ID NO: 3725625 - RNA, 12 nt, Human
ucuuugccuguu

SEQ ID NO: 3725626 - RNA, 16 nt, Human
ucuuugccuguucagu

SEQ ID NO: 3725627 - RNA, 17 nt, Human
ucuuugccuguucaguu

SEQ ID NO: 3725628 - RNA, 16 nt, Human
ucuuugcuugaacaca

SEQ ID NO: 3725629 - RNA, 19 nt, Human
ucuuugcuugaacacagua

SEQ ID NO: 3725630 - RNA, 13 nt, Human
ucuuugcuugccu

SEQ ID NO: 3725631 - RNA, 13 nt, Human
ucuuugcuuugcu

SEQ ID NO: 3725632 - RNA, 23 nt, Human
ucuuugcuuugcuuucugcucag

SEQ ID NO: 3725633 - RNA, 18 nt, Human
ucuuuggaaaaauguuug

SEQ ID NO: 3725634 - RNA, 21 nt, Human
ucuuuggaaaaggaagguagu

SEQ ID NO: 3725635 - RNA, 19 nt, Human
ucuuuggaaaguacacucu

SEQ ID NO: 3725636 - RNA, 17 nt, Human
ucuuuggaaggagugag

SEQ ID NO: 3725637 - RNA, 24 nt, Human
ucuuuggaaggagugagaucauuu

SEQ ID NO: 3725638 - RNA, 22 nt, Human
ucuuuggacagaagcagcucuu

SEQ ID NO: 3725639 - RNA, 15 nt, Human
ucuuuggacccugag

SEQ ID NO: 3725640 - RNA, 16 nt, Human
ucuuuggacccugagg

SEQ ID NO: 3725641 - RNA, 20 nt, Human
ucuuuggaguuaaaaugcac

SEQ ID NO: 3725642 - RNA, 15 nt, Human
ucuuuggauucuaaa

SEQ ID NO: 3725643 - RNA, 16 nt, Human
ucuuuggauucuaaau

SEQ ID NO: 3725644 - RNA, 14 nt, Human
ucuuugggaauguu

SEQ ID NO: 3725645 - RNA, 15 nt, Human
ucuuugggccagaca

SEQ ID NO: 3725646 - RNA, 20 nt, Human
ucuuuggggagguguucacu

SEQ ID NO: 3725647 - RNA, 10 nt, Human
ucuuuggggu

SEQ ID NO: 3725648 - RNA, 23 nt, Human
ucuuuggggucuacacugcaauc

SEQ ID NO: 3725649 - RNA, 21 nt, Human
ucuuuggucuacacugugcug

SEQ ID NO: 3725650 - RNA, 22 nt, Human
ucuuuggucuacacugugcuga

SEQ ID NO: 3725651 - RNA, 16 nt, Human
ucuuuggugaacauug

SEQ ID NO: 3725652 - RNA, 22 nt, Human
ucuuuggugaacauugcaauag

SEQ ID NO: 3725653 - RNA, 17 nt, Human
ucuuuggugccuuuccu

SEQ ID NO: 3725654 - RNA, 22 nt, Human
ucuuuggugccuuuccuguuca

SEQ ID NO: 3725655 - RNA, 23 nt, Human
ucuuuggugccuuuccuguucag

SEQ ID NO: 3725656 - RNA, 21 nt, Human
ucuuugguucuaaggaccuga

SEQ ID NO: 3725657 - RNA, 13 nt, Human
ucuuuguaagagu

SEQ ID NO: 3725658 - RNA, 14 nt, Human
ucuuuguaagagug

SEQ ID NO: 3725659 - RNA, 19 nt, Human
ucuuuguaagaguguagaa

SEQ ID NO: 3725660 - RNA, 21 nt, Human
ucuuuguaagaguguagaagc

SEQ ID NO: 3725661 - RNA, 17 nt, Human
ucuuuguaagucagugu

SEQ ID NO: 3725662 - RNA, 12 nt, Human
ucuuuguaauga

SEQ ID NO: 3725663 - RNA, 15 nt, Human
ucuuuguaaugaaaa

SEQ ID NO: 3725664 - RNA, 16 nt, Human
ucuuuguaaugaaaac

SEQ ID NO: 3725665 - RNA, 23 nt, Human
ucuuuguaaugucaccaccuucc

SEQ ID NO: 3725666 - RNA, 21 nt, Human
ucuuuguaccaaaauuuuaaa

SEQ ID NO: 3725667 - RNA, 23 nt, Human
ucuuuguaccaaaauuuuaaaaa

SEQ ID NO: 3725668 - RNA, 17 nt, Human
ucuuuguaucauucauc

SEQ ID NO: 3725669 - RNA, 14 nt, Human
ucuuugugauaauu

SEQ ID NO: 3725670 - RNA, 23 nt, Human
ucuuugugauaauuuaagagcua

SEQ ID NO: 3725671 - RNA, 22 nt, Human
ucuuuguggccaaggagcugcu

SEQ ID NO: 3725672 - RNA, 23 nt, Human
ucuuuguggccaaggagcugcua

SEQ ID NO: 3725673 - RNA, 22 nt, Human
ucuuuguggggcuuggcgugga

SEQ ID NO: 3725674 - RNA, 18 nt, Human
ucuuuguguagcuuugcu

SEQ ID NO: 3725675 - RNA, 16 nt, Human
ucuuuguucaagauga

SEQ ID NO: 3725676 - RNA, 23 nt, Human
ucuuuguucauagcccaguagac

SEQ ID NO: 3725677 - RNA, 14 nt, Human
ucugcagucucuau

SEQ ID NO: 3725678 - RNA, 14 nt, Human
ucugcagugccuug

SEQ ID NO: 3725679 - RNA, 15 nt, Human
ucugcauauguugaa

SEQ ID NO: 3725680 - RNA, 19 nt, Human
ucugcauauguugaauacu

SEQ ID NO: 3725681 - RNA, 19 nt, Human
ucugcaucagcugcugaaa

SEQ ID NO: 3725682 - RNA, 18 nt, Human
ucugcaucccagcaccug

SEQ ID NO: 3725683 - RNA, 19 nt, Human
ucugcaucccagcaccugc

SEQ ID NO: 3725684 - RNA, 23 nt, Human
ucugcaucccagcaccugccucc

SEQ ID NO: 3725685 - RNA, 14 nt, Human
ucugcauccucugg

SEQ ID NO: 3725686 - RNA, 17 nt, Human
ucugcaucuacucccaa

SEQ ID NO: 3725687 - RNA, 19 nt, Human
ucugcaucuacucccaagu

SEQ ID NO: 3725688 - RNA, 20 nt, Human
ucugcaucugaccacgugcu

SEQ ID NO: 3725689 - RNA, 17 nt, Human
ucugcaucuuggggaca

SEQ ID NO: 3725690 - RNA, 14 nt, Human
ucugcaugcggccc

SEQ ID NO: 3725691 - RNA, 15 nt, Human
ucugcaugcggccca

SEQ ID NO: 3725692 - RNA, 16 nt, Human
ucugcaugcggcccag

SEQ ID NO: 3725693 - RNA, 18 nt, Human
ucugcaugcggcccagcc

SEQ ID NO: 3725694 - RNA, 20 nt, Human
ucugcaugcggcccagcccg

SEQ ID NO: 3725695 - RNA, 21 nt, Human
ucugcaugcggcccagcccgg

SEQ ID NO: 3725696 - RNA, 17 nt, Human
ucugcauucaggaucaa

SEQ ID NO: 3725697 - RNA, 16 nt, Human
ucugcauucuaguacu

SEQ ID NO: 3725698 - RNA, 21 nt, Human
ucugcauugcuagauaaaagc

SEQ ID NO: 3725699 - RNA, 13 nt, Human
ucugcauuuagca

SEQ ID NO: 3725700 - RNA, 10 nt, Human
ucugcauuuu

SEQ ID NO: 3725701 - RNA, 21 nt, Human
ucugcauuuucugaaacuaau

SEQ ID NO: 3725702 - RNA, 18 nt, Human
ucugcauuuugcuauugu

SEQ ID NO: 3725703 - RNA, 19 nt, Human
ucugcauuuugcuauugua

SEQ ID NO: 3725704 - RNA, 20 nt, Human
ucugccacagggacuugccu

SEQ ID NO: 3725705 - RNA, 13 nt, Human
ucugccacccagg

SEQ ID NO: 3725706 - RNA, 17 nt, Human
ucugccacccugcugag

SEQ ID NO: 3725707 - RNA, 15 nt, Human
ucugccaccuccccu

SEQ ID NO: 3725708 - RNA, 13 nt, Human
ucugccagccaca

SEQ ID NO: 3725709 - RNA, 23 nt, Human
ucugccaggcccccaagccugca

SEQ ID NO: 3725710 - RNA, 13 nt, Human
ucugccagggagc

SEQ ID NO: 3725711 - RNA, 19 nt, Human
ucugccagggccccucucc

SEQ ID NO: 3725712 - RNA, 19 nt, Human
ucugccagugacagacagg

SEQ ID NO: 3725713 - RNA, 18 nt, Human
ucugccauauucuguugg

SEQ ID NO: 3725714 - RNA, 22 nt, Human
ucugccauauucuguuggccag

SEQ ID NO: 3725715 - RNA, 23 nt, Human
ucugccauauucuguuggccagu

SEQ ID NO: 3725716 - RNA, 16 nt, Human
ucugcccacucccugc

SEQ ID NO: 3725717 - RNA, 23 nt, Human
ucugcccacucccugcaaccuga

SEQ ID NO: 3725718 - RNA, 13 nt, Human
ucugcccagagcu

SEQ ID NO: 3725719 - RNA, 19 nt, Human
ucugcccagagcuggguga

SEQ ID NO: 3725720 - RNA, 19 nt, Human
ucugcccagcuugggccca

SEQ ID NO: 3725721 - RNA, 13 nt, Human
ucugcccagcuuu

SEQ ID NO: 3725722 - RNA, 12 nt, Human
ucugcccaggac

SEQ ID NO: 3725723 - RNA, 18 nt, Human
ucugcccauuccccagcc

SEQ ID NO: 3725724 - RNA, 18 nt, Human
ucugccccagaggccucu

SEQ ID NO: 3725725 - RNA, 16 nt, Human
ucugccccagcccaga

SEQ ID NO: 3725726 - RNA, 18 nt, Human
ucugccccagcuugggca

SEQ ID NO: 3725727 - RNA, 11 nt, Human
ucugccccagu

SEQ ID NO: 3725728 - RNA, 19 nt, Human
ucugccccauccuccagca

SEQ ID NO: 3725729 - RNA, 19 nt, Human
ucugcccccagcccaaagg

SEQ ID NO: 3725730 - RNA, 16 nt, Human
ucugcccccugcagaa

SEQ ID NO: 3725731 - RNA, 18 nt, Human
ucugccccucccccaacc

SEQ ID NO: 3725732 - RNA, 22 nt, Human
ucugccccucuccaggcgccgg

SEQ ID NO: 3725733 - RNA, 17 nt, Human
ucugcccgccugcccac

SEQ ID NO: 3725734 - RNA, 14 nt, Human
ucugcccuccaaga

SEQ ID NO: 3725735 - RNA, 21 nt, Human
ucugcccucugcauccucugg

SEQ ID NO: 3725736 - RNA, 14 nt, Human
ucugcccuggcugc

SEQ ID NO: 3725737 - RNA, 17 nt, Human
ucugcccuggcugcugc

SEQ ID NO: 3725738 - RNA, 12 nt, Human
ucugcccugugg

SEQ ID NO: 3725739 - RNA, 15 nt, Human
ucugcccuguguacu

SEQ ID NO: 3725740 - RNA, 16 nt, Human
ucugcccuucacccca

SEQ ID NO: 3725741 - RNA, 18 nt, Human
ucugcccuugccaacgga

SEQ ID NO: 3725742 - RNA, 23 nt, Human
ucugccgcagcccugcagagggc

SEQ ID NO: 3725743 - RNA, 15 nt, Human
ucugccgcuaccucc

SEQ ID NO: 3725744 - RNA, 18 nt, Human
ucugccgcuaccucccuc

SEQ ID NO: 3725745 - RNA, 19 nt, Human
ucugccgcuaccucccucc

SEQ ID NO: 3725746 - RNA, 15 nt, Human
ucugccggcccuggg

SEQ ID NO: 3725747 - RNA, 15 nt, Human
ucugccgucucugga

SEQ ID NO: 3725748 - RNA, 16 nt, Human
ucugccgucucuggag

SEQ ID NO: 3725749 - RNA, 14 nt, Human
ucugccuaaggacu

SEQ ID NO: 3725750 - RNA, 16 nt, Human
ucugccucaaugugaa

SEQ ID NO: 3725751 - RNA, 20 nt, Human
ucugccucacauagcuuaca

SEQ ID NO: 3725752 - RNA, 13 nt, Human
ucugccucccauc

SEQ ID NO: 3725753 - RNA, 15 nt, Human
ucugccucccaucac

SEQ ID NO: 3725754 - RNA, 15 nt, Human
ucugccucucuagga

SEQ ID NO: 3725755 - RNA, 15 nt, Human
ucugccucucuugua

SEQ ID NO: 3725756 - RNA, 21 nt, Human
ucugccucugacacacagcuc

SEQ ID NO: 3725757 - RNA, 23 nt, Human
ucugccucugacacacagcucug

SEQ ID NO: 3725758 - RNA, 18 nt, Human
ucugccucugauguauuu

SEQ ID NO: 3725759 - RNA, 18 nt, Human
ucugccucuucugggagg

SEQ ID NO: 3725760 - RNA, 20 nt, Human
ucugccugaagucacacagu

SEQ ID NO: 3725761 - RNA, 16 nt, Human
ucugccugccagcugc

SEQ ID NO: 3725762 - RNA, 22 nt, Human
ucugccugccagcugcacugau

SEQ ID NO: 3725763 - RNA, 16 nt, Human
ucugccugcccaggcc

SEQ ID NO: 3725764 - RNA, 17 nt, Human
ucugccugcccaggccc

SEQ ID NO: 3725765 - RNA, 18 nt, Human
ucugccugcccaggcccc

SEQ ID NO: 3725766 - RNA, 17 nt, Human
ucugccugucccucuca

SEQ ID NO: 3725767 - RNA, 17 nt, Human
ucugccugugagccagu

SEQ ID NO: 3725768 - RNA, 19 nt, Human
ucugccuuagucucaguuu

SEQ ID NO: 3725769 - RNA, 18 nt, Human
ucugccuuuauuguguuu

SEQ ID NO: 3725770 - RNA, 23 nt, Human
ucugccuuuauuguguuugucau

SEQ ID NO: 3725771 - RNA, 16 nt, Human
ucugccuuugacauuu

SEQ ID NO: 3725772 - RNA, 15 nt, Human
ucugccuuugccagg

SEQ ID NO: 3725773 - RNA, 22 nt, Human
ucugccuuuggggacuuuucuu

SEQ ID NO: 3725774 - RNA, 19 nt, Human
ucugcggaucucagcuuug

SEQ ID NO: 3725775 - RNA, 16 nt, Human
ucugcgucaugcuugu

SEQ ID NO: 3725776 - RNA, 19 nt, Human
ucugcgucuauccugugua

SEQ ID NO: 3725777 - RNA, 16 nt, Human
ucugcgugggucagaa

SEQ ID NO: 3725778 - RNA, 20 nt, Human
ucugcuaaauugauguugau

SEQ ID NO: 3725779 - RNA, 21 nt, Human
ucugcuaaauugauguugaug

SEQ ID NO: 3725780 - RNA, 22 nt, Human
ucugcuaacuuggagccccagu

SEQ ID NO: 3725781 - RNA, 14 nt, Human
ucugcuaauaaaac

SEQ ID NO: 3725782 - RNA, 14 nt, Human
ucugcuaccucacu

SEQ ID NO: 3725783 - RNA, 17 nt, Human
ucugcuaccuugcccca

SEQ ID NO: 3725784 - RNA, 19 nt, Human
ucugcuacguuccuauugu

SEQ ID NO: 3725785 - RNA, 16 nt, Human
ucugcuauauauaaaa

SEQ ID NO: 3725786 - RNA, 13 nt, Human
ucugcuaugcuug

SEQ ID NO: 3725787 - RNA, 16 nt, Human
ucugcuaugugacuug

SEQ ID NO: 3725788 - RNA, 16 nt, Human
ucugcucacauaucug

SEQ ID NO: 3725789 - RNA, 17 nt, Human
ucugcucacauaucugu

SEQ ID NO: 3725790 - RNA, 13 nt, Human
ucugcucacuuua

SEQ ID NO: 3725791 - RNA, 19 nt, Human
ucugcucacuuuaaaccug

SEQ ID NO: 3725792 - RNA, 22 nt, Human
ucugcucagacagaaccccuac

SEQ ID NO: 3725793 - RNA, 14 nt, Human
ucugcucagcccug

SEQ ID NO: 3725794 - RNA, 16 nt, Human
ucugcucagcccugga

SEQ ID NO: 3725795 - RNA, 16 nt, Human
ucugcucagcucuggg

SEQ ID NO: 3725796 - RNA, 14 nt, Human
ucugcucagcuucu

SEQ ID NO: 3725797 - RNA, 15 nt, Human
ucugcucagcuucuc

SEQ ID NO: 3725798 - RNA, 23 nt, Human
ucugcucaucauucucugucuca

SEQ ID NO: 3725799 - RNA, 10 nt, Human
ucugcuccac

SEQ ID NO: 3725800 - RNA, 14 nt, Human
ucugcuccaccaca

SEQ ID NO: 3725801 - RNA, 20 nt, Human
ucugcuccaccacauccucc

SEQ ID NO: 3725802 - RNA, 23 nt, Human
ucugcuccaccuuucagcccacg

SEQ ID NO: 3725803 - RNA, 20 nt, Human
ucugcuccagcucuggcaug

SEQ ID NO: 3725804 - RNA, 11 nt, Human
ucugcucccaa

SEQ ID NO: 3725805 - RNA, 22 nt, Human
ucugcucccaaggggccugagc

SEQ ID NO: 3725806 - RNA, 15 nt, Human
ucugcuccucuccag

SEQ ID NO: 3725807 - RNA, 17 nt, Human
ucugcuccucuccaggc

SEQ ID NO: 3725808 - RNA, 16 nt, Human
ucugcuccuuuccccu

SEQ ID NO: 3725809 - RNA, 17 nt, Human
ucugcucgcccuccuuu

SEQ ID NO: 3725810 - RNA, 19 nt, Human
ucugcucgcccuccuuucu

SEQ ID NO: 3725811 - RNA, 17 nt, Human
ucugcucgggcccaggc

SEQ ID NO: 3725812 - RNA, 14 nt, Human
ucugcucuccuucc

SEQ ID NO: 3725813 - RNA, 19 nt, Human
ucugcucuccuuccuggag

SEQ ID NO: 3725814 - RNA, 12 nt, Human
ucugcucugccc

SEQ ID NO: 3725815 - RNA, 13 nt, Human
ucugcucugcccu

SEQ ID NO: 3725816 - RNA, 18 nt, Human
ucugcucugguuguuucu

SEQ ID NO: 3725817 - RNA, 13 nt, Human
ucugcucuugcau

SEQ ID NO: 3725818 - RNA, 18 nt, Human
ucugcucuuucucugcca

SEQ ID NO: 3725819 - RNA, 20 nt, Human
ucugcucuuucucugccagu

SEQ ID NO: 3725820 - RNA, 16 nt, Human
ucugcugaagacuugc

SEQ ID NO: 3725821 - RNA, 18 nt, Human
ucugcugacagacacagg

SEQ ID NO: 3725822 - RNA, 21 nt, Human
ucugcugacagacacaggccc

SEQ ID NO: 3725823 - RNA, 19 nt, Human
ucugcugaccugcugaccu

SEQ ID NO: 3725824 - RNA, 20 nt, Human
ucugcugaccugcugaccug

SEQ ID NO: 3725825 - RNA, 22 nt, Human
ucugcugaugacccccccagcu

SEQ ID NO: 3725826 - RNA, 21 nt, Human
ucugcugccgccccacccaga

SEQ ID NO: 3725827 - RNA, 17 nt, Human
ucuuuguucucagcucc

SEQ ID NO: 3725828 - RNA, 18 nt, Human
ucuuuguucucagcuccc

SEQ ID NO: 3725829 - RNA, 19 nt, Human
ucuuuguuuugugucucuu

SEQ ID NO: 3725830 - RNA, 18 nt, Human
ucuuuuaaaaauucaaau

SEQ ID NO: 3725831 - RNA, 14 nt, Human
ucuuuuaaaagaca

SEQ ID NO: 3725832 - RNA, 13 nt, Human
ucuuuuaaagacc

SEQ ID NO: 3725833 - RNA, 20 nt, Human
ucuuuuaaauuagaaaauau

SEQ ID NO: 3725834 - RNA, 20 nt, Human
ucuuuuaauuguuucagaau

SEQ ID NO: 3725835 - RNA, 14 nt, Human
ucuuuuacauucug

SEQ ID NO: 3725836 - RNA, 18 nt, Human
ucuuuuacccuggccccu

SEQ ID NO: 3725837 - RNA, 13 nt, Human
ucuuuuaccugcu

SEQ ID NO: 3725838 - RNA, 21 nt, Human
ucuuuuaccugcugcuucucc

SEQ ID NO: 3725839 - RNA, 17 nt, Human
ucuuuuagcugaugaac

SEQ ID NO: 3725840 - RNA, 18 nt, Human
ucuuuuagucauuuugcu

SEQ ID NO: 3725841 - RNA, 24 nt, Human
ucuuuuauaaaaaaaaugaaaugu

SEQ ID NO: 3725842 - RNA, 22 nt, Human
ucuuuuauaacuaguccuuuac

SEQ ID NO: 3725843 - RNA, 13 nt, Human
ucuuuuauaauuc

SEQ ID NO: 3725844 - RNA, 22 nt, Human
ucuuuuauaauucucauuaaaa

SEQ ID NO: 3725845 - RNA, 20 nt, Human
ucuuuuauaguggaaaaaca

SEQ ID NO: 3725846 - RNA, 14 nt, Human
ucuuuuauauuugu

SEQ ID NO: 3725847 - RNA, 17 nt, Human
ucuuuuauauuuguauc

SEQ ID NO: 3725848 - RNA, 22 nt, Human
ucuuuuauauuuguaucgaugu

SEQ ID NO: 3725849 - RNA, 15 nt, Human
ucuuuucacaaauaa

SEQ ID NO: 3725850 - RNA, 13 nt, Human
ucuuuucacauuc

SEQ ID NO: 3725851 - RNA, 14 nt, Human
ucuuuucacauucu

SEQ ID NO: 3725852 - RNA, 13 nt, Human
ucuuuucauacau

SEQ ID NO: 3725853 - RNA, 14 nt, Human
ucuuuucauacauu

SEQ ID NO: 3725854 - RNA, 16 nt, Human
ucuuuucauugaacag

SEQ ID NO: 3725855 - RNA, 19 nt, Human
ucuuuuccaaacacaggca

SEQ ID NO: 3725856 - RNA, 21 nt, Human
ucuuuucccauuuaucuaaau

SEQ ID NO: 3725857 - RNA, 18 nt, Human
ucuuuucccccaaagugg

SEQ ID NO: 3725858 - RNA, 15 nt, Human
ucuuuuccuguugua

SEQ ID NO: 3725859 - RNA, 22 nt, Human
ucuuuuccuguuuuuguuaacu

SEQ ID NO: 3725860 - RNA, 22 nt, Human
ucuuuucgccguggcugcggca

SEQ ID NO: 3725861 - RNA, 16 nt, Human
ucuuuucuacagcaaa

SEQ ID NO: 3725862 - RNA, 14 nt, Human
ucuuuucuauuuuc

SEQ ID NO: 3725863 - RNA, 21 nt, Human
ucuuuucucccuuuuaauccu

SEQ ID NO: 3725864 - RNA, 13 nt, Human
ucuuuucucugug

SEQ ID NO: 3725865 - RNA, 17 nt, Human
ucuuuucucugugcuuc

SEQ ID NO: 3725866 - RNA, 14 nt, Human
ucuuuucugaaucu

SEQ ID NO: 3725867 - RNA, 19 nt, Human
ucuuuucugaaucuucuga

SEQ ID NO: 3725868 - RNA, 16 nt, Human
ucuuuucuguacuucc

SEQ ID NO: 3725869 - RNA, 18 nt, Human
ucuuuucuguacuuccug

SEQ ID NO: 3725870 - RNA, 19 nt, Human
ucuuuucuuacuccuccuc

SEQ ID NO: 3725871 - RNA, 15 nt, Human
ucuuuucuuccuggc

SEQ ID NO: 3725872 - RNA, 13 nt, Human
ucuuuucuuuaga

SEQ ID NO: 3725873 - RNA, 15 nt, Human
ucuuuucuuuagaga

SEQ ID NO: 3725874 - RNA, 18 nt, Human
ucuuuucuuugccaucuc

SEQ ID NO: 3725875 - RNA, 20 nt, Human
ucuuuucuuugccaucucug

SEQ ID NO: 3725876 - RNA, 14 nt, Human
ucuuuucuuuuuac

SEQ ID NO: 3725877 - RNA, 17 nt, Human
ucuuuucuuuuuacaua

SEQ ID NO: 3725878 - RNA, 14 nt, Human
ucuuuugaaacaau

SEQ ID NO: 3725879 - RNA, 23 nt, Human
ucuuuugaauauucccaagccca

SEQ ID NO: 3725880 - RNA, 15 nt, Human
ucuuuugacaugugg

SEQ ID NO: 3725881 - RNA, 11 nt, Human
ucuuuugaccu

SEQ ID NO: 3725882 - RNA, 13 nt, Human
ucuuuugccauga

SEQ ID NO: 3725883 - RNA, 19 nt, Human
ucuuuugccguuauuaaaa

SEQ ID NO: 3725884 - RNA, 20 nt, Human
ucuuuugcuugccaaaguac

SEQ ID NO: 3725885 - RNA, 13 nt, Human
ucuuuuggcuucc

SEQ ID NO: 3725886 - RNA, 16 nt, Human
ucuuuuggggaaguga

SEQ ID NO: 3725887 - RNA, 20 nt, Human
ucuuuuggggaagugaggaa

SEQ ID NO: 3725888 - RNA, 22 nt, Human
ucuuuugguaaagacuggcuuu

SEQ ID NO: 3725889 - RNA, 20 nt, Human
ucuuuugguuaugaauacuu

SEQ ID NO: 3725890 - RNA, 13 nt, Human
ucuuuuguaagug

SEQ ID NO: 3725891 - RNA, 15 nt, Human
ucuuuuguaauuuaa

SEQ ID NO: 3725892 - RNA, 20 nt, Human
ucuuuuguauguaaaugugc

SEQ ID NO: 3725893 - RNA, 22 nt, Human
ucuuuuguauguaaaugugcau

SEQ ID NO: 3725894 - RNA, 21 nt, Human
ucuuuuguccugcaucaucuu

SEQ ID NO: 3725895 - RNA, 15 nt, Human
ucuuuuguuacuguu

SEQ ID NO: 3725896 - RNA, 19 nt, Human
ucuuuuguuacuguucuug

SEQ ID NO: 3725897 - RNA, 16 nt, Human
ucuuuuguuugguaaa

SEQ ID NO: 3725898 - RNA, 21 nt, Human
ucuuuuguuuuuugaaguguu

SEQ ID NO: 3725899 - RNA, 15 nt, Human
ucuuuuuaaaauggu

SEQ ID NO: 3725900 - RNA, 14 nt, Human
ucuuuuuaaaguuc

SEQ ID NO: 3725901 - RNA, 21 nt, Human
ucuuuuuaagcuuauuuaauu

SEQ ID NO: 3725902 - RNA, 12 nt, Human
ucuuuuuacaua

SEQ ID NO: 3725903 - RNA, 20 nt, Human
ucuuuuuacauaacugccuu

SEQ ID NO: 3725904 - RNA, 12 nt, Human
ucuuuuuaguuu

SEQ ID NO: 3725905 - RNA, 15 nt, Human
ucuuuuucuggacuc

SEQ ID NO: 3725906 - RNA, 17 nt, Human
ucuuuuucuguuguaac

SEQ ID NO: 3725907 - RNA, 17 nt, Human
ucuuuuucuucuucccu

SEQ ID NO: 3725908 - RNA, 15 nt, Human
ucuuuuugaaguauu

SEQ ID NO: 3725909 - RNA, 20 nt, Human
ucuuuuugcucuaaaauauu

SEQ ID NO: 3725910 - RNA, 20 nt, Human
ucuuuuuguagcuggggcuu

SEQ ID NO: 3725911 - RNA, 16 nt, Human
ucuuuuuguuguaaaa

SEQ ID NO: 3725912 - RNA, 12 nt, Human
ucuuuuuguuug

SEQ ID NO: 3725913 - RNA, 17 nt, Human
ucuuuuuuaaauuuucu

SEQ ID NO: 3725914 - RNA, 23 nt, Human
ucuuuuuuaaccgguaagaguuu

SEQ ID NO: 3725915 - RNA, 16 nt, Human
ucuuuuuuauuaauca

SEQ ID NO: 3725916 - RNA, 21 nt, Human
ucuuuuuuauuaaucacugug

SEQ ID NO: 3725917 - RNA, 13 nt, Human
ucuuuuuucaaaa

SEQ ID NO: 3725918 - RNA, 13 nt, Human
ucuuuuuucguuu

SEQ ID NO: 3725919 - RNA, 21 nt, Human
ucuuuuuucuaaaguaaaaac

SEQ ID NO: 3725920 - RNA, 23 nt, Human
ucuuuuuuguuuguuucuuugug

SEQ ID NO: 3725921 - RNA, 17 nt, Human
ucuuuuuuuggcccagg

SEQ ID NO: 3725922 - RNA, 22 nt, Human
ucuuuuuuuggugauucaaaug

SEQ ID NO: 3725923 - RNA, 23 nt, Human
ucuuuuuuuguauaguuaacaca

SEQ ID NO: 3725924 - RNA, 14 nt, Human
ucuuuuuuugugau

SEQ ID NO: 3725925 - RNA, 20 nt, Human
ucuuuuuuuuaaugugcugu

SEQ ID NO: 3725926 - RNA, 18 nt, Human
ucuuuuuuuuuaaguucu

SEQ ID NO: 3725927 - RNA, 19 nt, Human
ucuuuuuuuuuuaagugaa

SEQ ID NO: 3725928 - RNA, 21 nt, Human
ugaaaaaaaaaaugcugaaca

SEQ ID NO: 3725929 - RNA, 22 nt, Human
ugaaaaaaaaaaugcugaacau

SEQ ID NO: 3725930 - RNA, 16 nt, Human
ugaaaaaaaacagugg

SEQ ID NO: 3725931 - RNA, 14 nt, Human
ugaaaaaaaaguuu

SEQ ID NO: 3725932 - RNA, 16 nt, Human
ugaaaaaaaauaaauu

SEQ ID NO: 3725933 - RNA, 16 nt, Human
ugaaaaaaacuucauu

SEQ ID NO: 3725934 - RNA, 18 nt, Human
ugaaaaaaauaauuuuaa

SEQ ID NO: 3725935 - RNA, 13 nt, Human
ugaaaaaagcuca

SEQ ID NO: 3725936 - RNA, 22 nt, Human
ugaaaaaauagagccugaggga

SEQ ID NO: 3725937 - RNA, 20 nt, Human
ugaaaaaauuuaaaaguaaa

SEQ ID NO: 3725938 - RNA, 21 nt, Human
ugaaaaaauuuacuuuaaacu

SEQ ID NO: 3725939 - RNA, 12 nt, Human
ugaaaaacauga

SEQ ID NO: 3725940 - RNA, 13 nt, Human
ugaaaaagcagac

SEQ ID NO: 3725941 - RNA, 21 nt, Human
ugaaaaagcagcuaccaggug

SEQ ID NO: 3725942 - RNA, 16 nt, Human
ugaaaaagcauguaca

SEQ ID NO: 3725943 - RNA, 21 nt, Human
ugaaaaagcauguacaguguu

SEQ ID NO: 3725944 - RNA, 13 nt, Human
ugaaaaagcgaaa

SEQ ID NO: 3725945 - RNA, 16 nt, Human
ugaaaaaggaggaaga

SEQ ID NO: 3725946 - RNA, 22 nt, Human
ugaaaaaguauccugcuucuga

SEQ ID NO: 3725947 - RNA, 18 nt, Human
ugaaaaaucggcuuacca

SEQ ID NO: 3725948 - RNA, 23 nt, Human
ugaaaaaucuguugauaaaucca

SEQ ID NO: 3725949 - RNA, 20 nt, Human
ugaaaaauuccuauugugau

SEQ ID NO: 3725950 - RNA, 19 nt, Human
ugaaaaauuccuuuguguu

SEQ ID NO: 3725951 - RNA, 13 nt, Human
ugaaaaauucuca

SEQ ID NO: 3725952 - RNA, 16 nt, Human
ugaaaaauugcugacu

SEQ ID NO: 3725953 - RNA, 23 nt, Human
ugaaaaauugcugacuguagcuu

SEQ ID NO: 3725954 - RNA, 12 nt, Human
ugaaaacaagug

SEQ ID NO: 3725955 - RNA, 13 nt, Human
ugaaaacaagugc

SEQ ID NO: 3725956 - RNA, 15 nt, Human
ugaaaacaagugcug

SEQ ID NO: 3725957 - RNA, 12 nt, Human
ugaaaacacauu

SEQ ID NO: 3725958 - RNA, 15 nt, Human
ugaaaacacauuuuu

SEQ ID NO: 3725959 - RNA, 18 nt, Human
ugaaaacacugugcacau

SEQ ID NO: 3725960 - RNA, 17 nt, Human
ugaaaacacuguucucu

SEQ ID NO: 3725961 - RNA, 20 nt, Human
ugaaaacacuguucucugcc

SEQ ID NO: 3725962 - RNA, 21 nt, Human
ugaaaacacuguucucugccc

SEQ ID NO: 3725963 - RNA, 23 nt, Human
ugaaaacacuguucucugcccuc

SEQ ID NO: 3725964 - RNA, 20 nt, Human
ugaaaacaguguguaaacaa

SEQ ID NO: 3725965 - RNA, 14 nt, Human
ugaaaacauaaaaa

SEQ ID NO: 3725966 - RNA, 13 nt, Human
ugaaaacaucugg

SEQ ID NO: 3725967 - RNA, 19 nt, Human
ugaaaacaugguagaauug

SEQ ID NO: 3725968 - RNA, 23 nt, Human
ugaaaacaugguagaauuggaga

SEQ ID NO: 3725969 - RNA, 18 nt, Human
ugaaaaccaacaccauca

SEQ ID NO: 3725970 - RNA, 18 nt, Human
ugaaaaccacauuggaga

SEQ ID NO: 3725971 - RNA, 18 nt, Human
ugaaaaccaucuggccug

SEQ ID NO: 3725972 - RNA, 20 nt, Human
ugaaaaccaucuggccuggc

SEQ ID NO: 3725973 - RNA, 15 nt, Human
ugaaaacccagagag

SEQ ID NO: 3725974 - RNA, 18 nt, Human
ugaaaaccuaaaagacag

SEQ ID NO: 3725975 - RNA, 16 nt, Human
ugaaaaccuacauauu

SEQ ID NO: 3725976 - RNA, 16 nt, Human
ugaaaacguuuuauug

SEQ ID NO: 3725977 - RNA, 19 nt, Human
ggcuggaggcccaggcugg

SEQ ID NO: 3725978 - RNA, 13 nt, Human
ggcuggaguacag

SEQ ID NO: 3725979 - RNA, 14 nt, Human
ggcuggagugagga

SEQ ID NO: 3725980 - RNA, 16 nt, Human
ggcuggagugaggaaa

SEQ ID NO: 3725981 - RNA, 20 nt, Human
ggcuggagugcaguggcgcg

SEQ ID NO: 3725982 - RNA, 23 nt, Human
ggcuggaguuauugaagcagagu

SEQ ID NO: 3725983 - RNA, 16 nt, Human
ggcuggaguuggggca

SEQ ID NO: 3725984 - RNA, 17 nt, Human
ggcuggaguuggggcag

SEQ ID NO: 3725985 - RNA, 22 nt, Human
ggcuggaguuggggcagaggag

SEQ ID NO: 3725986 - RNA, 14 nt, Human
ggcuggaugagcuc

SEQ ID NO: 3725987 - RNA, 18 nt, Human
ggcuggaugagcucccac

SEQ ID NO: 3725988 - RNA, 19 nt, Human
ggcuggaugagcucccaca

SEQ ID NO: 3725989 - RNA, 21 nt, Human
ggcuggauuuugaauuuucuu

SEQ ID NO: 3725990 - RNA, 14 nt, Human
ggcuggcacaggac

SEQ ID NO: 3725991 - RNA, 19 nt, Human
ggcuggcaccgccuucucu

SEQ ID NO: 3725992 - RNA, 14 nt, Human
ggcuggcagcucuc

SEQ ID NO: 3725993 - RNA, 18 nt, Human
ggcuggcagcucuccagu

SEQ ID NO: 3725994 - RNA, 22 nt, Human
ggcuggcaugauccaagcaaga

SEQ ID NO: 3725995 - RNA, 18 nt, Human
ggcuggccagccccacag

SEQ ID NO: 3725996 - RNA, 23 nt, Human
ggcuggccagccgcucuccugcc

SEQ ID NO: 3725997 - RNA, 21 nt, Human
ggcuggccaguccaggcugcc

SEQ ID NO: 3725998 - RNA, 22 nt, Human
ggcuggccaguccaggcugccg

SEQ ID NO: 3725999 - RNA, 12 nt, Human
ggcuggcccagc

SEQ ID NO: 3726000 - RNA, 13 nt, Human
ggcuggcccagcc

SEQ ID NO: 3726001 - RNA, 15 nt, Human
ggcuggcccagcccu

SEQ ID NO: 3726002 - RNA, 16 nt, Human
ggcuggcccagcccug

SEQ ID NO: 3726003 - RNA, 17 nt, Human
ggcuggcccagcccugc

SEQ ID NO: 3726004 - RNA, 20 nt, Human
ggcuggcccagcccugcugg

SEQ ID NO: 3726005 - RNA, 15 nt, Human
ggcuggcccugcccu

SEQ ID NO: 3726006 - RNA, 16 nt, Human
ggcuggcccugcccug

SEQ ID NO: 3726007 - RNA, 20 nt, Human
ggcuggccucccaaaugagc

SEQ ID NO: 3726008 - RNA, 13 nt, Human
ggcuggccuggcc

SEQ ID NO: 3726009 - RNA, 14 nt, Human
ggcuggccuggccc

SEQ ID NO: 3726010 - RNA, 14 nt, Human
ggcuggccuuccug

SEQ ID NO: 3726011 - RNA, 17 nt, Human
ggcuggcgcagccaagg

SEQ ID NO: 3726012 - RNA, 19 nt, Human
ggcuggcgcagccaaggcc

SEQ ID NO: 3726013 - RNA, 14 nt, Human
ggcuggcgugcagu

SEQ ID NO: 3726014 - RNA, 16 nt, Human
ggcuggcgugcagugg

SEQ ID NO: 3726015 - RNA, 20 nt, Human
ggcuggcgugcaguggugcg

SEQ ID NO: 3726016 - RNA, 24 nt, Human
ggcuggcuccagaugcagggcagu

SEQ ID NO: 3726017 - RNA, 18 nt, Human
ggcuggcuccccugcagc

SEQ ID NO: 3726018 - RNA, 20 nt, Human
ggcuggcuccccugcagccc

SEQ ID NO: 3726019 - RNA, 15 nt, Human
ggcuggcuccugauc

SEQ ID NO: 3726020 - RNA, 12 nt, Human
ggcuggcugagg

SEQ ID NO: 3726021 - RNA, 13 nt, Human
ggcuggcugggca

SEQ ID NO: 3726022 - RNA, 13 nt, Human
ggcuggcuucagg

SEQ ID NO: 3726023 - RNA, 14 nt, Human
ggcuggcuuuucug

SEQ ID NO: 3726024 - RNA, 19 nt, Human
ggcugggacguggcucagc

SEQ ID NO: 3726025 - RNA, 19 nt, Human
ggcugggagagccuuccag

SEQ ID NO: 3726026 - RNA, 19 nt, Human
ggcugggcaaggaaaaaga

SEQ ID NO: 3726027 - RNA, 23 nt, Human
ggcugggcaaggaaaaagaaaau

SEQ ID NO: 3726028 - RNA, 17 nt, Human
ggcugggcaaggaggcc

SEQ ID NO: 3726029 - RNA, 13 nt, Human
ggcugggcagagg

SEQ ID NO: 3726030 - RNA, 15 nt, Human
ggcugggcagaggaa

SEQ ID NO: 3726031 - RNA, 12 nt, Human
ggcugggcagcu

SEQ ID NO: 3726032 - RNA, 19 nt, Human
ggcugggccccccagcuca

SEQ ID NO: 3726033 - RNA, 20 nt, Human
ggcugggcucccuucccacc

SEQ ID NO: 3726034 - RNA, 18 nt, Human
ggcugggcuucaguggca

SEQ ID NO: 3726035 - RNA, 22 nt, Human
ggcugggcuucaguggcagcug

SEQ ID NO: 3726036 - RNA, 12 nt, Human
ggcuggggcagc

SEQ ID NO: 3726037 - RNA, 16 nt, Human
ggcuggggcugaccuu

SEQ ID NO: 3726038 - RNA, 19 nt, Human
ggcugggggaugggccuga

SEQ ID NO: 3726039 - RNA, 18 nt, Human
ggcugggggcaggagggc

SEQ ID NO: 3726040 - RNA, 15 nt, Human
ggcugggggccucac

SEQ ID NO: 3726041 - RNA, 17 nt, Human
ggcuggggucccagcag

SEQ ID NO: 3726042 - RNA, 20 nt, Human
ggcugggguggccugugugg

SEQ ID NO: 3726043 - RNA, 20 nt, Human
ggcugggucgcccuggacug

SEQ ID NO: 3726044 - RNA, 16 nt, Human
ggcugggugcccacag

SEQ ID NO: 3726045 - RNA, 19 nt, Human
ggcuggguucuacccaggu

SEQ ID NO: 3726046 - RNA, 15 nt, Human
ggcugguagcucagg

SEQ ID NO: 3726047 - RNA, 13 nt, Human
ggcuggugcaggg

SEQ ID NO: 3726048 - RNA, 15 nt, Human
ggcuggugccagccu

SEQ ID NO: 3726049 - RNA, 22 nt, Human
ggcugguggagaacucuggcuu

SEQ ID NO: 3726050 - RNA, 13 nt, Human
ggcugguggccca

SEQ ID NO: 3726051 - RNA, 14 nt, Human
ggcugguggcccag

SEQ ID NO: 3726052 - RNA, 21 nt, Human
ggcugguggcucccggagggc

SEQ ID NO: 3726053 - RNA, 13 nt, Human
ggcuggugggagg

SEQ ID NO: 3726054 - RNA, 23 nt, Human
ggcuggugggugccuaggccugg

SEQ ID NO: 3726055 - RNA, 22 nt, Human
ggcuggugugguacagagaagc

SEQ ID NO: 3726056 - RNA, 21 nt, Human
ggcugguguuaacagaaggga

SEQ ID NO: 3726057 - RNA, 18 nt, Human
ggcugguuuggaaugcuu

SEQ ID NO: 3726058 - RNA, 13 nt, Human
ggcugguuuugua

SEQ ID NO: 3726059 - RNA, 16 nt, Human
ggcuguaacugccagg

SEQ ID NO: 3726060 - RNA, 15 nt, Human
ggcuguaaggcucua

SEQ ID NO: 3726061 - RNA, 18 nt, Human
ggcuguaucccaugagcc

SEQ ID NO: 3726062 - RNA, 18 nt, Human
ggcugucagcaggaagca

SEQ ID NO: 3726063 - RNA, 22 nt, Human
ggcugucaguguuuggugcacg

SEQ ID NO: 3726064 - RNA, 13 nt, Human
ggcugucaucuga

SEQ ID NO: 3726065 - RNA, 17 nt, Human
ggcugucaucugugcac

SEQ ID NO: 3726066 - RNA, 14 nt, Human
ggcuguccacccgc

SEQ ID NO: 3726067 - RNA, 15 nt, Human
ggcuguccagugccc

SEQ ID NO: 3726068 - RNA, 19 nt, Human
ggcuguccagugcccauuc

SEQ ID NO: 3726069 - RNA, 18 nt, Human
ggcugucuucucaggcuc

SEQ ID NO: 3726070 - RNA, 11 nt, Human
ggcugugagug

SEQ ID NO: 3726071 - RNA, 16 nt, Human
ggcugugcugcccuga

SEQ ID NO: 3726072 - RNA, 19 nt, Human
ggcugugcuugaaggcccu

SEQ ID NO: 3726073 - RNA, 12 nt, Human
ggcuguggaagg

SEQ ID NO: 3726074 - RNA, 23 nt, Human
ggcuguggaccauggaguggcag

SEQ ID NO: 3726075 - RNA, 13 nt, Human
ggcuguggagaca

SEQ ID NO: 3726076 - RNA, 23 nt, Human
ggcuguggcauccagagucccug

SEQ ID NO: 3726077 - RNA, 14 nt, Human
ggcugugggcuccc

SEQ ID NO: 3726078 - RNA, 15 nt, Human
ggcugugggcucccu

SEQ ID NO: 3726079 - RNA, 16 nt, Human
ggcugugggcucccuu

SEQ ID NO: 3726080 - RNA, 15 nt, Human
ggcugugucuaaacu

SEQ ID NO: 3726081 - RNA, 16 nt, Human
ggcugugucuaaacug

SEQ ID NO: 3726082 - RNA, 14 nt, Human
ggcuguguuggugu

SEQ ID NO: 3726083 - RNA, 18 nt, Human
ggcuguucugugguuccu

SEQ ID NO: 3726084 - RNA, 12 nt, Human
ggcuguuggcac

SEQ ID NO: 3726085 - RNA, 15 nt, Human
ggcuguuggcaguga

SEQ ID NO: 3726086 - RNA, 16 nt, Human
ggcuguuuuugggugc

SEQ ID NO: 3726087 - RNA, 14 nt, Human
ggcuuaaaaaaaac

SEQ ID NO: 3726088 - RNA, 15 nt, Human
ggcuuaaaacaacac

SEQ ID NO: 3726089 - RNA, 19 nt, Human
ggcuuaagaaaucuaguau

SEQ ID NO: 3726090 - RNA, 22 nt, Human
ggcuuaauaaaaaugacagacu

SEQ ID NO: 3726091 - RNA, 12 nt, Human
ggcuuaauguuu

SEQ ID NO: 3726092 - RNA, 19 nt, Human
ggcuuaccugaccucuugc

SEQ ID NO: 3726093 - RNA, 22 nt, Human
ggcuuaccugaccucuugcugu

SEQ ID NO: 3726094 - RNA, 20 nt, Human
ggcuuaccuggcccaucagg

SEQ ID NO: 3726095 - RNA, 17 nt, Human
ggcuuacggcccuggcc

SEQ ID NO: 3726096 - RNA, 18 nt, Human
ggcuuagcuuugcucugc

SEQ ID NO: 3726097 - RNA, 22 nt, Human
ggcuuagggacaggaccccagc

SEQ ID NO: 3726098 - RNA, 17 nt, Human
ggcuuagugauguaauu

SEQ ID NO: 3726099 - RNA, 16 nt, Human
ggcuuauaauucuuuc

SEQ ID NO: 3726100 - RNA, 15 nt, Human
ggcuuauauucaacc

SEQ ID NO: 3726101 - RNA, 21 nt, Human
ggcuuauauucaaccauggac

SEQ ID NO: 3726102 - RNA, 20 nt, Human
ggcuuauuuauuaacaggau

SEQ ID NO: 3726103 - RNA, 21 nt, Human
ggcuucaauuuauugcacaaa

SEQ ID NO: 3726104 - RNA, 12 nt, Human
ggcuucacagau

SEQ ID NO: 3726105 - RNA, 17 nt, Human
ggcuucacuccugcugu

SEQ ID NO: 3726106 - RNA, 15 nt, Human
ggcuucacuguauaa

SEQ ID NO: 3726107 - RNA, 18 nt, Human
ggcuucacuguauaaaua

SEQ ID NO: 3726108 - RNA, 21 nt, Human
ggcuucacuguauaaauagga

SEQ ID NO: 3726109 - RNA, 13 nt, Human
ggcuucagccuag

SEQ ID NO: 3726110 - RNA, 24 nt, Human
ggcuucagccuaguggcuuguccu

SEQ ID NO: 3726111 - RNA, 18 nt, Human
ggcuucaggggagucccg

SEQ ID NO: 3726112 - RNA, 22 nt, Human
ggcuucagggugggaguaguug

SEQ ID NO: 3726113 - RNA, 16 nt, Human
ggcuucagguccaggc

SEQ ID NO: 3726114 - RNA, 15 nt, Human
ggcuucaguggcagc

SEQ ID NO: 3726115 - RNA, 17 nt, Human
ggcuucaguggcagcug

SEQ ID NO: 3726116 - RNA, 18 nt, Human
ggcuucaguggcagcugc

SEQ ID NO: 3726117 - RNA, 20 nt, Human
ggcuucaguggcagcugcuu

SEQ ID NO: 3726118 - RNA, 11 nt, Human
ggcuucauaca

SEQ ID NO: 3726119 - RNA, 18 nt, Human
ggcuucauccuccucaga

SEQ ID NO: 3726120 - RNA, 16 nt, Human
ggcuucaugccagcua

SEQ ID NO: 3726121 - RNA, 14 nt, Human
ggcuuccaaggugg

SEQ ID NO: 3726122 - RNA, 22 nt, Human
ggcuuccagagaguccucugga

SEQ ID NO: 3726123 - RNA, 23 nt, Human
ggcuuccaucccaaccagugcca

SEQ ID NO: 3726124 - RNA, 18 nt, Human
ggcuuccauuugugugug

SEQ ID NO: 3726125 - RNA, 23 nt, Human
ggcuucccaaaugugugcccagc

SEQ ID NO: 3726126 - RNA, 21 nt, Human
ggcuucccaguggcugcugcc

SEQ ID NO: 3726127 - RNA, 11 nt, Human
ucugcugcugg

SEQ ID NO: 3726128 - RNA, 19 nt, Human
ucugcuggaguuucaugua

SEQ ID NO: 3726129 - RNA, 18 nt, Human
ucugcuggauaaaaugag

SEQ ID NO: 3726130 - RNA, 12 nt, Human
ucugcuggccca

SEQ ID NO: 3726131 - RNA, 20 nt, Human
ucugcuggcccagccaaacc

SEQ ID NO: 3726132 - RNA, 18 nt, Human
ucugcuggccuggaucuc

SEQ ID NO: 3726133 - RNA, 24 nt, Human
ucugcugggcuggggccugauggg

SEQ ID NO: 3726134 - RNA, 16 nt, Human
ucugcuggggccuggg

SEQ ID NO: 3726135 - RNA, 15 nt, Human
ucugcuggucuucaa

SEQ ID NO: 3726136 - RNA, 17 nt, Human
ucugcugguuuuaacaa

SEQ ID NO: 3726137 - RNA, 13 nt, Human
ucugcuguagaaa

SEQ ID NO: 3726138 - RNA, 15 nt, Human
ucugcuguccagaca

SEQ ID NO: 3726139 - RNA, 19 nt, Human
ucugcuguccagacagccu

SEQ ID NO: 3726140 - RNA, 15 nt, Human
ucugcuguccccuug

SEQ ID NO: 3726141 - RNA, 22 nt, Human
ucugcuguccccuuggcagguc

SEQ ID NO: 3726142 - RNA, 16 nt, Human
ucugcuguccuugccu

SEQ ID NO: 3726143 - RNA, 15 nt, Human
ucugcugucucagcc

SEQ ID NO: 3726144 - RNA, 12 nt, Human
ucugcuuaaaaa

SEQ ID NO: 3726145 - RNA, 17 nt, Human
ucugcuuacaauucccu

SEQ ID NO: 3726146 - RNA, 20 nt, Human
ucugcuuacaauucccugcu

SEQ ID NO: 3726147 - RNA, 15 nt, Human
ucugcuucagccucc

SEQ ID NO: 3726148 - RNA, 14 nt, Human
ucugcuucagugga

SEQ ID NO: 3726149 - RNA, 14 nt, Human
ucugcuucccaggu

SEQ ID NO: 3726150 - RNA, 22 nt, Human
ucugcuucucugacuucugccu

SEQ ID NO: 3726151 - RNA, 20 nt, Human
ucugcuugagucagguuuga

SEQ ID NO: 3726152 - RNA, 12 nt, Human
ucugcuugccau

SEQ ID NO: 3726153 - RNA, 14 nt, Human
ucugcuugccaucc

SEQ ID NO: 3726154 - RNA, 18 nt, Human
ucugcuugcucuuguccu

SEQ ID NO: 3726155 - RNA, 16 nt, Human
ucugcuugcuuggccc

SEQ ID NO: 3726156 - RNA, 17 nt, Human
ucugcuuuagacuugaa

SEQ ID NO: 3726157 - RNA, 19 nt, Human
ucugcuuuagacuugaaaa

SEQ ID NO: 3726158 - RNA, 18 nt, Human
ucugcuuuguugugugcc

SEQ ID NO: 3726159 - RNA, 22 nt, Human
ucugcuuuuaucucagauguua

SEQ ID NO: 3726160 - RNA, 18 nt, Human
ucugcuuuucugcccugg

SEQ ID NO: 3726161 - RNA, 22 nt, Human
ucugcuuuucugcccuggcugc

SEQ ID NO: 3726162 - RNA, 13 nt, Human
ucuggaaaagagg

SEQ ID NO: 3726163 - RNA, 15 nt, Human
ucuggaaaggaggaa

SEQ ID NO: 3726164 - RNA, 19 nt, Human
ucuggaaaggggggagcug

SEQ ID NO: 3726165 - RNA, 15 nt, Human
ucuggaacccagacu

SEQ ID NO: 3726166 - RNA, 19 nt, Human
ucuggaaccucagccuggc

SEQ ID NO: 3726167 - RNA, 20 nt, Human
ucuggaaccucagccuggcc

SEQ ID NO: 3726168 - RNA, 14 nt, Human
ucuggaagaaaaaa

SEQ ID NO: 3726169 - RNA, 15 nt, Human
ucuggaagaugggga

SEQ ID NO: 3726170 - RNA, 18 nt, Human
ucuggaagcccuggagac

SEQ ID NO: 3726171 - RNA, 18 nt, Human
ucuggaaguuuguuuaaa

SEQ ID NO: 3726172 - RNA, 22 nt, Human
ucuggaauacaugaaauauaga

SEQ ID NO: 3726173 - RNA, 23 nt, Human
ucuggaaucauuguccagagcug

SEQ ID NO: 3726174 - RNA, 15 nt, Human
ucuggaaugcagugg

SEQ ID NO: 3726175 - RNA, 16 nt, Human
ucuggaauguaaucaa

SEQ ID NO: 3726176 - RNA, 18 nt, Human
ucuggaauguaaucaaug

SEQ ID NO: 3726177 - RNA, 18 nt, Human
ucuggacaggcucugcuu

SEQ ID NO: 3726178 - RNA, 17 nt, Human
ucuggacagucagcucu

SEQ ID NO: 3726179 - RNA, 23 nt, Human
ucuggaccaacccuguuuccuga

SEQ ID NO: 3726180 - RNA, 21 nt, Human
ucuggaccccaucugugaaua

SEQ ID NO: 3726181 - RNA, 23 nt, Human
ucuggaccccaucugugaauaag

SEQ ID NO: 3726182 - RNA, 14 nt, Human
ucuggacggcaggc

SEQ ID NO: 3726183 - RNA, 15 nt, Human
ucuggacggcaggcu

SEQ ID NO: 3726184 - RNA, 19 nt, Human
ucuggacggcaggcucacu

SEQ ID NO: 3726185 - RNA, 15 nt, Human
ucuggacuccucugu

SEQ ID NO: 3726186 - RNA, 16 nt, Human
ucuggacuccucuguc

SEQ ID NO: 3726187 - RNA, 22 nt, Human
ucuggacuccucuguccaggca

SEQ ID NO: 3726188 - RNA, 15 nt, Human
ucuggacucuaaaga

SEQ ID NO: 3726189 - RNA, 18 nt, Human
ucuggacucuaaagacca

SEQ ID NO: 3726190 - RNA, 17 nt, Human
ucuggacugaagccugc

SEQ ID NO: 3726191 - RNA, 19 nt, Human
ucuggacugaagccugcag

SEQ ID NO: 3726192 - RNA, 17 nt, Human
ucuggacugacagcaug

SEQ ID NO: 3726193 - RNA, 20 nt, Human
ucuggacuuucucuaauaau

SEQ ID NO: 3726194 - RNA, 16 nt, Human
ucuggagaagcaguga

SEQ ID NO: 3726195 - RNA, 16 nt, Human
ucuggagaauaauucu

SEQ ID NO: 3726196 - RNA, 15 nt, Human
ucuggagacagcccc

SEQ ID NO: 3726197 - RNA, 17 nt, Human
ucuggagacagccccag

SEQ ID NO: 3726198 - RNA, 20 nt, Human
ucuggagacagccccagagc

SEQ ID NO: 3726199 - RNA, 22 nt, Human
ucuggagacagccccagagcag

SEQ ID NO: 3726200 - RNA, 16 nt, Human
ucuggagaccaccagg

SEQ ID NO: 3726201 - RNA, 21 nt, Human
ucuggagaccagggagccuuu

SEQ ID NO: 3726202 - RNA, 23 nt, Human
ucuggagagcuagaaccuggagg

SEQ ID NO: 3726203 - RNA, 15 nt, Human
ucuggagcauuucuc

SEQ ID NO: 3726204 - RNA, 16 nt, Human
ucuggagccaagucca

SEQ ID NO: 3726205 - RNA, 19 nt, Human
ucuggagccaccuguccca

SEQ ID NO: 3726206 - RNA, 16 nt, Human
ucuggagcccacugua

SEQ ID NO: 3726207 - RNA, 22 nt, Human
ucuggagcccacuguacuugcu

SEQ ID NO: 3726208 - RNA, 14 nt, Human
ucuggaggccucug

SEQ ID NO: 3726209 - RNA, 15 nt, Human
ucuggaggccucugg

SEQ ID NO: 3726210 - RNA, 16 nt, Human
ucuggaggccuuccag

SEQ ID NO: 3726211 - RNA, 17 nt, Human
ucuggaggccuuccagc

SEQ ID NO: 3726212 - RNA, 19 nt, Human
ucuggaggccuuccagcug

SEQ ID NO: 3726213 - RNA, 20 nt, Human
ucuggaggccuuccagcugc

SEQ ID NO: 3726214 - RNA, 15 nt, Human
ucuggaggggagcuc

SEQ ID NO: 3726215 - RNA, 23 nt, Human
ucuggaggggccccugcuucucc

SEQ ID NO: 3726216 - RNA, 18 nt, Human
ucuggagguacgaaaaga

SEQ ID NO: 3726217 - RNA, 17 nt, Human
ucuggaguauucuauaa

SEQ ID NO: 3726218 - RNA, 21 nt, Human
ucuggagucucacuugucuca

SEQ ID NO: 3726219 - RNA, 15 nt, Human
ucuggaguggccacu

SEQ ID NO: 3726220 - RNA, 19 nt, Human
ucuggaguggccacuaagc

SEQ ID NO: 3726221 - RNA, 16 nt, Human
ucuggaguugaucugg

SEQ ID NO: 3726222 - RNA, 21 nt, Human
ucuggaguugaucuggaaccc

SEQ ID NO: 3726223 - RNA, 22 nt, Human
ucuggaguuuuuguuuggagag

SEQ ID NO: 3726224 - RNA, 18 nt, Human
ucuggauaacuuccacag

SEQ ID NO: 3726225 - RNA, 16 nt, Human
ucuggauaggagccug

SEQ ID NO: 3726226 - RNA, 13 nt, Human
ucuggaucaguaa

SEQ ID NO: 3726227 - RNA, 15 nt, Human
ucuggaucaguaaaa

SEQ ID NO: 3726228 - RNA, 14 nt, Human
ucuggaucugggac

SEQ ID NO: 3726229 - RNA, 22 nt, Human
ucuggaugccugauugccaagc

SEQ ID NO: 3726230 - RNA, 18 nt, Human
ucuggauuauauuaugaa

SEQ ID NO: 3726231 - RNA, 14 nt, Human
ucuggauucagccu

SEQ ID NO: 3726232 - RNA, 15 nt, Human
ucuggauucagccuu

SEQ ID NO: 3726233 - RNA, 16 nt, Human
ucuggauucagccuuc

SEQ ID NO: 3726234 - RNA, 19 nt, Human
ucuggauucagccuucuuu

SEQ ID NO: 3726235 - RNA, 15 nt, Human
ucuggauucauauuu

SEQ ID NO: 3726236 - RNA, 13 nt, Human
ucuggauucccag

SEQ ID NO: 3726237 - RNA, 22 nt, Human
ucuggauucccaggaugagcau

SEQ ID NO: 3726238 - RNA, 20 nt, Human
ucuggauuccccaucucagg

SEQ ID NO: 3726239 - RNA, 18 nt, Human
ucuggcaaggacuuugua

SEQ ID NO: 3726240 - RNA, 23 nt, Human
ucuggcaaggacuuuguacauuu

SEQ ID NO: 3726241 - RNA, 22 nt, Human
ucuggcaaugccacagcccugu

SEQ ID NO: 3726242 - RNA, 22 nt, Human
ucuggcaauggaugaacugaaa

SEQ ID NO: 3726243 - RNA, 13 nt, Human
ucuggcacagccu

SEQ ID NO: 3726244 - RNA, 15 nt, Human
ucuggcacagccugc

SEQ ID NO: 3726245 - RNA, 20 nt, Human
ucuggcagaguugaagacag

SEQ ID NO: 3726246 - RNA, 21 nt, Human
ucuggcagccacacuucucag

SEQ ID NO: 3726247 - RNA, 23 nt, Human
ucuggcagccacacuucucagga

SEQ ID NO: 3726248 - RNA, 21 nt, Human
ucuggcagccucccauccagg

SEQ ID NO: 3726249 - RNA, 14 nt, Human
ucuggcagcucaga

SEQ ID NO: 3726250 - RNA, 21 nt, Human
ucuggcagcucagagagggug

SEQ ID NO: 3726251 - RNA, 18 nt, Human
ucuggcagguccuccccu

SEQ ID NO: 3726252 - RNA, 22 nt, Human
ucuggcagguccuccccucucu

SEQ ID NO: 3726253 - RNA, 18 nt, Human
ucuggcaguucuggaaug

SEQ ID NO: 3726254 - RNA, 16 nt, Human
ucuggcccaccagggu

SEQ ID NO: 3726255 - RNA, 13 nt, Human
ucuggcccugccu

SEQ ID NO: 3726256 - RNA, 13 nt, Human
ucuggcccuggcc

SEQ ID NO: 3726257 - RNA, 21 nt, Human
ucuggccguccuugucucugg

SEQ ID NO: 3726258 - RNA, 22 nt, Human
ucuggccuaaaaucuuggaagu

SEQ ID NO: 3726259 - RNA, 18 nt, Human
ucuggccuagucccuucc

SEQ ID NO: 3726260 - RNA, 11 nt, Human
ucuggccucca

SEQ ID NO: 3726261 - RNA, 13 nt, Human
ucuggccucccac

SEQ ID NO: 3726262 - RNA, 14 nt, Human
ucuggccucccaca

SEQ ID NO: 3726263 - RNA, 16 nt, Human
ucuggccucccacccg

SEQ ID NO: 3726264 - RNA, 12 nt, Human
ucuggccuggcc

SEQ ID NO: 3726265 - RNA, 14 nt, Human
ucuggccuggccag

SEQ ID NO: 3726266 - RNA, 15 nt, Human
ucuggccuuacaccu

SEQ ID NO: 3726267 - RNA, 22 nt, Human
ucuggcgacaguuuuccuucuc

SEQ ID NO: 3726268 - RNA, 15 nt, Human
ucuggcuccagcugg

SEQ ID NO: 3726269 - RNA, 20 nt, Human
ucuggcucccucuucuuuca

SEQ ID NO: 3726270 - RNA, 17 nt, Human
ucuggcuccuuuacaaa

SEQ ID NO: 3726271 - RNA, 14 nt, Human
ucuggcugaaaaag

SEQ ID NO: 3726272 - RNA, 17 nt, Human
ucuggcugaacccugug

SEQ ID NO: 3726273 - RNA, 21 nt, Human
ucuggcugaacccugugcugg

SEQ ID NO: 3726274 - RNA, 21 nt, Human
ucuggcugagcugaacccauu

SEQ ID NO: 3726275 - RNA, 22 nt, Human
ucuggcugccccaaccugcuga

SEQ ID NO: 3726276 - RNA, 17 nt, Human
ugaaaacucuuugcugc

SEQ ID NO: 3726277 - RNA, 18 nt, Human
ugaaaacucuuugcugcu

SEQ ID NO: 3726278 - RNA, 13 nt, Human
ugaaaacuggaau

SEQ ID NO: 3726279 - RNA, 21 nt, Human
ugaaaacuggaauaagaagca

SEQ ID NO: 3726280 - RNA, 13 nt, Human
ugaaaacuuugua

SEQ ID NO: 3726281 - RNA, 16 nt, Human
ugaaaacuuuguagua

SEQ ID NO: 3726282 - RNA, 15 nt, Human
ugaaaagaaaaauga

SEQ ID NO: 3726283 - RNA, 22 nt, Human
ugaaaagaaaaaugagccuggc

SEQ ID NO: 3726284 - RNA, 13 nt, Human
ugaaaagaaauaa

SEQ ID NO: 3726285 - RNA, 15 nt, Human
ugaaaagaaggaaag

SEQ ID NO: 3726286 - RNA, 15 nt, Human
ugaaaagaaguagug

SEQ ID NO: 3726287 - RNA, 18 nt, Human
ugaaaagacaucaagcac

SEQ ID NO: 3726288 - RNA, 18 nt, Human
ugaaaagagagcagagaa

SEQ ID NO: 3726289 - RNA, 16 nt, Human
ugaaaagauaaauuau

SEQ ID NO: 3726290 - RNA, 14 nt, Human
ugaaaagauucuuc

SEQ ID NO: 3726291 - RNA, 16 nt, Human
ugaaaagcagacauuu

SEQ ID NO: 3726292 - RNA, 22 nt, Human
ugaaaagcagguugauaaauca

SEQ ID NO: 3726293 - RNA, 19 nt, Human
ugaaaagccauguuuaaga

SEQ ID NO: 3726294 - RNA, 20 nt, Human
ugaaaagccauguuuaagau

SEQ ID NO: 3726295 - RNA, 22 nt, Human
ugaaaagccucuguuuugauau

SEQ ID NO: 3726296 - RNA, 17 nt, Human
ugaaaagcuauuagcca

SEQ ID NO: 3726297 - RNA, 20 nt, Human
ugaaaagcuauuagccagga

SEQ ID NO: 3726298 - RNA, 23 nt, Human
ugaaaagcuauuagccaggauca

SEQ ID NO: 3726299 - RNA, 19 nt, Human
ugaaaagcuccaucaauga

SEQ ID NO: 3726300 - RNA, 20 nt, Human
ugaaaagcuccauuuuuagu

SEQ ID NO: 3726301 - RNA, 17 nt, Human
ugaaaagcuucuuaauu

SEQ ID NO: 3726302 - RNA, 17 nt, Human
ugaaaagcuuuguuugu

SEQ ID NO: 3726303 - RNA, 16 nt, Human
ugaaaaggcaaaaagc

SEQ ID NO: 3726304 - RNA, 19 nt, Human
ugaaaagggggugggaugg

SEQ ID NO: 3726305 - RNA, 21 nt, Human
ugaaaaguaauauuuauuaaa

SEQ ID NO: 3726306 - RNA, 12 nt, Human
ugaaaagucguu

SEQ ID NO: 3726307 - RNA, 17 nt, Human
ugaaaagugaagacaga

SEQ ID NO: 3726308 - RNA, 17 nt, Human
ugaaaauaaaguguaua

SEQ ID NO: 3726309 - RNA, 18 nt, Human
ugaaaauaagccaugaga

SEQ ID NO: 3726310 - RNA, 19 nt, Human
ugaaaauaagccaugagaa

SEQ ID NO: 3726311 - RNA, 19 nt, Human
ugaaaauacaacuuaaaua

SEQ ID NO: 3726312 - RNA, 18 nt, Human
ugaaaauaccaucaggcc

SEQ ID NO: 3726313 - RNA, 18 nt, Human
ugaaaauaucugcucaaa

SEQ ID NO: 3726314 - RNA, 20 nt, Human
ugaaaauauuaucuuuguaa

SEQ ID NO: 3726315 - RNA, 16 nt, Human
ugaaaauauuguuuua

SEQ ID NO: 3726316 - RNA, 11 nt, Human
ugaaaauauuu

SEQ ID NO: 3726317 - RNA, 13 nt, Human
ugaaaauauuuaa

SEQ ID NO: 3726318 - RNA, 14 nt, Human
ugaaaauauuuaaa

SEQ ID NO: 3726319 - RNA, 17 nt, Human
ugaaaauauuuguauca

SEQ ID NO: 3726320 - RNA, 23 nt, Human
ugaaaauauuuuuuauauauaca

SEQ ID NO: 3726321 - RNA, 13 nt, Human
ugaaaauccuacc

SEQ ID NO: 3726322 - RNA, 19 nt, Human
ugaaaaucgugacaacacu

SEQ ID NO: 3726323 - RNA, 18 nt, Human
ugaaaaugaguugugaaa

SEQ ID NO: 3726324 - RNA, 21 nt, Human
ugaaaaugcaacaacauguau

SEQ ID NO: 3726325 - RNA, 11 nt, Human
ugaaaauggaa

SEQ ID NO: 3726326 - RNA, 16 nt, Human
ugaaaaugggcucaac

SEQ ID NO: 3726327 - RNA, 21 nt, Human
ugaaaauggguuggugcuucu

SEQ ID NO: 3726328 - RNA, 15 nt, Human
ugaaaaugguauuuu

SEQ ID NO: 3726329 - RNA, 16 nt, Human
ugaaaauguacugaga

SEQ ID NO: 3726330 - RNA, 17 nt, Human
ugaaaauguauguguaa

SEQ ID NO: 3726331 - RNA, 15 nt, Human
ugaaaaugucagaaa

SEQ ID NO: 3726332 - RNA, 18 nt, Human
ugaaaaugucagaaacca

SEQ ID NO: 3726333 - RNA, 16 nt, Human
ugaaaauguccaggaa

SEQ ID NO: 3726334 - RNA, 13 nt, Human
ugaaaauguccuu

SEQ ID NO: 3726335 - RNA, 19 nt, Human
ugaaaauguccuugugaug

SEQ ID NO: 3726336 - RNA, 15 nt, Human
ugaaaaugucuugug

SEQ ID NO: 3726337 - RNA, 17 nt, Human
ugaaaaugugcuauacu

SEQ ID NO: 3726338 - RNA, 19 nt, Human
ugaaaaugugcuauacugc

SEQ ID NO: 3726339 - RNA, 21 nt, Human
ugaaaaugugcuauacugcau

SEQ ID NO: 3726340 - RNA, 13 nt, Human
ugaaaauguuuuu

SEQ ID NO: 3726341 - RNA, 21 nt, Human
ugaaaauuacaguccaaaaua

SEQ ID NO: 3726342 - RNA, 20 nt, Human
ugaaaauuaggauuucauga

SEQ ID NO: 3726343 - RNA, 13 nt, Human
ugaaaauuauuua

SEQ ID NO: 3726344 - RNA, 15 nt, Human
ugaaaauuauuuuaa

SEQ ID NO: 3726345 - RNA, 23 nt, Human
ugaaaauuauuuuguucauacau

SEQ ID NO: 3726346 - RNA, 20 nt, Human
ugaaaauuccagaaaggaua

SEQ ID NO: 3726347 - RNA, 20 nt, Human
ugaaaauucgcccgagcugu

SEQ ID NO: 3726348 - RNA, 21 nt, Human
ugaaaauucgcccgagcuguu

SEQ ID NO: 3726349 - RNA, 17 nt, Human
ugaaaauugaaaaguac

SEQ ID NO: 3726350 - RNA, 22 nt, Human
ugaaaauugccuuucuguguuu

SEQ ID NO: 3726351 - RNA, 17 nt, Human
ugaaaauuguauguuaa

SEQ ID NO: 3726352 - RNA, 13 nt, Human
ugaaaauuguauu

SEQ ID NO: 3726353 - RNA, 19 nt, Human
ugaaaauuuuaaaaauaca

SEQ ID NO: 3726354 - RNA, 21 nt, Human
ugaaaauuuuaaaaauacaua

SEQ ID NO: 3726355 - RNA, 22 nt, Human
ugaaaauuuuaaaaauacauau

SEQ ID NO: 3726356 - RNA, 19 nt, Human
ugaaaauuuugauguuuua

SEQ ID NO: 3726357 - RNA, 14 nt, Human
ugaaacaaagcugc

SEQ ID NO: 3726358 - RNA, 22 nt, Human
ugaaacaaauaaucacauugac

SEQ ID NO: 3726359 - RNA, 16 nt, Human
ugaaacaacuuggaaa

SEQ ID NO: 3726360 - RNA, 13 nt, Human
ugaaacacaaaca

SEQ ID NO: 3726361 - RNA, 16 nt, Human
ugaaacacaccaggcu

SEQ ID NO: 3726362 - RNA, 21 nt, Human
ugaaacacagcuguucuucug

SEQ ID NO: 3726363 - RNA, 21 nt, Human
ugaaacaccaagaugucuguc

SEQ ID NO: 3726364 - RNA, 22 nt, Human
ugaaacaccaagaugucugucu

SEQ ID NO: 3726365 - RNA, 19 nt, Human
ugaaacaccuucucuggag

SEQ ID NO: 3726366 - RNA, 17 nt, Human
ugaaacacgaaacuugu

SEQ ID NO: 3726367 - RNA, 21 nt, Human
ugaaacacugguuuuaaauau

SEQ ID NO: 3726368 - RNA, 15 nt, Human
ugaaacacuuugcau

SEQ ID NO: 3726369 - RNA, 16 nt, Human
ugaaacacuuugcaua

SEQ ID NO: 3726370 - RNA, 15 nt, Human
ugaaacacuuugccu

SEQ ID NO: 3726371 - RNA, 13 nt, Human
ugaaacacuuuuu

SEQ ID NO: 3726372 - RNA, 23 nt, Human
ugaaacagaaaaauauguaccaa

SEQ ID NO: 3726373 - RNA, 14 nt, Human
ugaaacagaaacaa

SEQ ID NO: 3726374 - RNA, 9 nt, Human
ugaaacagc

SEQ ID NO: 3726375 - RNA, 10 nt, Human
ugaaacagcu

SEQ ID NO: 3726376 - RNA, 11 nt, Human
ugaaacagcug

SEQ ID NO: 3726377 - RNA, 13 nt, Human
ugaaacagcugcc

SEQ ID NO: 3726378 - RNA, 22 nt, Human
ugaaacagcugccuuagcuuca

SEQ ID NO: 3726379 - RNA, 20 nt, Human
ugaaacaggagagaaagggg

SEQ ID NO: 3726380 - RNA, 21 nt, Human
ugaaacaggagagaaagggga

SEQ ID NO: 3726381 - RNA, 18 nt, Human
ugaaacauugcuuuuaaa

SEQ ID NO: 3726382 - RNA, 21 nt, Human
ugaaacauugcuuuuaaaacu

SEQ ID NO: 3726383 - RNA, 16 nt, Human
ugaaacauuuucuccc

SEQ ID NO: 3726384 - RNA, 20 nt, Human
ugaaacccagucacugugag

SEQ ID NO: 3726385 - RNA, 17 nt, Human
ugaaaccccaaacagug

SEQ ID NO: 3726386 - RNA, 23 nt, Human
ugaaaccccaaacagugacugua

SEQ ID NO: 3726387 - RNA, 15 nt, Human
ugaaacccuggacca

SEQ ID NO: 3726388 - RNA, 19 nt, Human
ugaaaccuaguacugcccc

SEQ ID NO: 3726389 - RNA, 13 nt, Human
ugaaaccuguaua

SEQ ID NO: 3726390 - RNA, 22 nt, Human
ugaaaccuguauaacccuguua

SEQ ID NO: 3726391 - RNA, 20 nt, Human
ugaaaccuuauuuuuuccca

SEQ ID NO: 3726392 - RNA, 22 nt, Human
ugaaaccuuuagggcagcuugc

SEQ ID NO: 3726393 - RNA, 16 nt, Human
ugaaacgcaaccacca

SEQ ID NO: 3726394 - RNA, 15 nt, Human
ugaaacgcaucuagu

SEQ ID NO: 3726395 - RNA, 15 nt, Human
ugaaacggaugauuu

SEQ ID NO: 3726396 - RNA, 19 nt, Human
ugaaacggaugauuucuau

SEQ ID NO: 3726397 - RNA, 20 nt, Human
ugaaacuaaagcaauagaaa

SEQ ID NO: 3726398 - RNA, 22 nt, Human
ugaaacuaaagcaauagaaaca

SEQ ID NO: 3726399 - RNA, 18 nt, Human
ugaaacucauagacacug

SEQ ID NO: 3726400 - RNA, 21 nt, Human
ugaaacuccaccuugcgggga

SEQ ID NO: 3726401 - RNA, 18 nt, Human
ugaaacuccagaugccac

SEQ ID NO: 3726402 - RNA, 19 nt, Human
ugaaacucguuaauuugua

SEQ ID NO: 3726403 - RNA, 15 nt, Human
ugaaacugcauuugu

SEQ ID NO: 3726404 - RNA, 16 nt, Human
ugaaacugcauuugug

SEQ ID NO: 3726405 - RNA, 18 nt, Human
ugaaacugcuuguuuccu

SEQ ID NO: 3726406 - RNA, 22 nt, Human
ugaaacugcuuguuuccuagca

SEQ ID NO: 3726407 - RNA, 18 nt, Human
ugaaacuggauuaaacuu

SEQ ID NO: 3726408 - RNA, 12 nt, Human
ugaaacuuggau

SEQ ID NO: 3726409 - RNA, 23 nt, Human
ugaaacuuucauuccuucagauu

SEQ ID NO: 3726410 - RNA, 17 nt, Human
ugaaagaaaauugaguu

SEQ ID NO: 3726411 - RNA, 14 nt, Human
ugaaagaaaucaug

SEQ ID NO: 3726412 - RNA, 16 nt, Human
ugaaagaaaucauguu

SEQ ID NO: 3726413 - RNA, 22 nt, Human
ugaaagaaaucauguuaugaua

SEQ ID NO: 3726414 - RNA, 14 nt, Human
ugaaagaauauauu

SEQ ID NO: 3726415 - RNA, 14 nt, Human
ugaaagaauguaaa

SEQ ID NO: 3726416 - RNA, 15 nt, Human
ugaaagaauguaaag

SEQ ID NO: 3726417 - RNA, 16 nt, Human
ugaaagaauguaaagc

SEQ ID NO: 3726418 - RNA, 12 nt, Human
ugaaagaccuuc

SEQ ID NO: 3726419 - RNA, 13 nt, Human
ugaaagacuguac

SEQ ID NO: 3726420 - RNA, 15 nt, Human
ugaaagacuguacaa

SEQ ID NO: 3726421 - RNA, 19 nt, Human
ugaaagacuguacaaagua

SEQ ID NO: 3726422 - RNA, 18 nt, Human
ugaaagacuuccaaagaa

SEQ ID NO: 3726423 - RNA, 13 nt, Human
ugaaagagaacca

SEQ ID NO: 3726424 - RNA, 17 nt, Human
ugaaagaggaaugaagu

SEQ ID NO: 3726425 - RNA, 20 nt, Human
ugaaagaguaaaggaaauga

SEQ ID NO: 3726426 - RNA, 15 nt, Human
ggcuucccgcucagc

SEQ ID NO: 3726427 - RNA, 16 nt, Human
ggcuucccgcucagcc

SEQ ID NO: 3726428 - RNA, 21 nt, Human
ggcuucccgcucagcccuccc

SEQ ID NO: 3726429 - RNA, 17 nt, Human
ggcuuccugaggggaga

SEQ ID NO: 3726430 - RNA, 13 nt, Human
ggcuuccuggagc

SEQ ID NO: 3726431 - RNA, 13 nt, Human
ggcuuccuggugc

SEQ ID NO: 3726432 - RNA, 18 nt, Human
ggcuuccuggugcuggag

SEQ ID NO: 3726433 - RNA, 19 nt, Human
ggcuucguuagaccgcucu

SEQ ID NO: 3726434 - RNA, 18 nt, Human
ggcuucuccgccagccuc

SEQ ID NO: 3726435 - RNA, 21 nt, Human
ggcuucuccgccagccuccuc

SEQ ID NO: 3726436 - RNA, 13 nt, Human
ggcuucuccugac

SEQ ID NO: 3726437 - RNA, 15 nt, Human
ggcuucuccugaccc

SEQ ID NO: 3726438 - RNA, 16 nt, Human
ggcuucucucucacca

SEQ ID NO: 3726439 - RNA, 13 nt, Human
ggcuucugagcag

SEQ ID NO: 3726440 - RNA, 16 nt, Human
ggcuucugaugaaucu

SEQ ID NO: 3726441 - RNA, 16 nt, Human
ggcuucugcacccucc

SEQ ID NO: 3726442 - RNA, 16 nt, Human
ggcuucuggagcccuu

SEQ ID NO: 3726443 - RNA, 12 nt, Human
ggcuugaagcca

SEQ ID NO: 3726444 - RNA, 13 nt, Human
ggcuugaagccaa

SEQ ID NO: 3726445 - RNA, 16 nt, Human
ggcuugaagccaaaga

SEQ ID NO: 3726446 - RNA, 14 nt, Human
ggcuugcaugccaa

SEQ ID NO: 3726447 - RNA, 16 nt, Human
ggcuugccacagcucu

SEQ ID NO: 3726448 - RNA, 14 nt, Human
ggcuugccugcagg

SEQ ID NO: 3726449 - RNA, 15 nt, Human
ggcuugccugcaggc

SEQ ID NO: 3726450 - RNA, 15 nt, Human
ggcuugcugagaggg

SEQ ID NO: 3726451 - RNA, 19 nt, Human
ggcuuggccacagccaggg

SEQ ID NO: 3726452 - RNA, 15 nt, Human
ggcuuggcccuggca

SEQ ID NO: 3726453 - RNA, 16 nt, Human
ggcuuggccuaucucc

SEQ ID NO: 3726454 - RNA, 12 nt, Human
ggcuuggccugc

SEQ ID NO: 3726455 - RNA, 12 nt, Human
ggcuugggauuu

SEQ ID NO: 3726456 - RNA, 17 nt, Human
ggcuugggccuaggcug

SEQ ID NO: 3726457 - RNA, 15 nt, Human
ggcuuguaacuccac

SEQ ID NO: 3726458 - RNA, 18 nt, Human
ggcuuguaacuccaccaa

SEQ ID NO: 3726459 - RNA, 19 nt, Human
ggcuuguagaauuguuaua

SEQ ID NO: 3726460 - RNA, 18 nt, Human
ggcuuguggggccuggga

SEQ ID NO: 3726461 - RNA, 12 nt, Human
ggcuuuaaaauu

SEQ ID NO: 3726462 - RNA, 14 nt, Human
ggcuuuaaaauucu

SEQ ID NO: 3726463 - RNA, 21 nt, Human
ggcuuuauccucuuuagaguu

SEQ ID NO: 3726464 - RNA, 20 nt, Human
ggcuuucauuuucucucagg

SEQ ID NO: 3726465 - RNA, 23 nt, Human
ggcuuucccacuucccacccugc

SEQ ID NO: 3726466 - RNA, 20 nt, Human
ggcuuuccuuguggcagagg

SEQ ID NO: 3726467 - RNA, 19 nt, Human
ggcuuucguccacagcuuc

SEQ ID NO: 3726468 - RNA, 13 nt, Human
ggcuuucuggaga

SEQ ID NO: 3726469 - RNA, 14 nt, Human
ggcuuucuggagag

SEQ ID NO: 3726470 - RNA, 16 nt, Human
ggcuuugauguuccuu

SEQ ID NO: 3726471 - RNA, 22 nt, Human
ggcuuugauuaguuuucuuguu

SEQ ID NO: 3726472 - RNA, 18 nt, Human
ggcuuugauuccaucucc

SEQ ID NO: 3726473 - RNA, 14 nt, Human
ggcuuugccagcuu

SEQ ID NO: 3726474 - RNA, 19 nt, Human
ggcuuugcccaaccucagc

SEQ ID NO: 3726475 - RNA, 20 nt, Human
ggcuuugcccaaccucagca

SEQ ID NO: 3726476 - RNA, 12 nt, Human
ggcuuuggauuu

SEQ ID NO: 3726477 - RNA, 19 nt, Human
ggcuuuuauuaaugcacuu

SEQ ID NO: 3726478 - RNA, 13 nt, Human
ggcuuuucugauc

SEQ ID NO: 3726479 - RNA, 13 nt, Human
ggcuuuucuguuu

SEQ ID NO: 3726480 - RNA, 10 nt, Human
ggcuuuugug

SEQ ID NO: 3726481 - RNA, 19 nt, Human
ggcuuuuuuaaaaaagcaa

SEQ ID NO: 3726482 - RNA, 23 nt, Human
gggaaaaagaggaucuggagaac

SEQ ID NO: 3726483 - RNA, 22 nt, Human
gggaaaacugccaauauagaaa

SEQ ID NO: 3726484 - RNA, 13 nt, Human
gggaaaagcagcu

SEQ ID NO: 3726485 - RNA, 16 nt, Human
gggaaacacuccuugc

SEQ ID NO: 3726486 - RNA, 14 nt, Human
gggaaacuggccau

SEQ ID NO: 3726487 - RNA, 21 nt, Human
gggaaagccuuaagcugcagg

SEQ ID NO: 3726488 - RNA, 22 nt, Human
gggaaaggcucugaaagccagc

SEQ ID NO: 3726489 - RNA, 13 nt, Human
gggaaaggggugc

SEQ ID NO: 3726490 - RNA, 20 nt, Human
gggaaagugcauaugaaauc

SEQ ID NO: 3726491 - RNA, 17 nt, Human
gggaaauacuacuccug

SEQ ID NO: 3726492 - RNA, 15 nt, Human
gggaguggccacaga

SEQ ID NO: 3726493 - RNA, 20 nt, Human
gggagugggacagagucugg

SEQ ID NO: 3726494 - RNA, 11 nt, Human
gggagugugua

SEQ ID NO: 3726495 - RNA, 17 nt, Human
gggaguuaagaccuggc

SEQ ID NO: 3726496 - RNA, 23 nt, Human
gggaguuaagaccuggcagcucu

SEQ ID NO: 3726497 - RNA, 23 nt, Human
gggaguucgagaccaaccugacc

SEQ ID NO: 3726498 - RNA, 15 nt, Human
gggauaaaaugacua

SEQ ID NO: 3726499 - RNA, 22 nt, Human
gggauacuuuagaaguagaauu

SEQ ID NO: 3726500 - RNA, 13 nt, Human
gggauagaugugu

SEQ ID NO: 3726501 - RNA, 14 nt, Human
gggauagaugugug

SEQ ID NO: 3726502 - RNA, 16 nt, Human
gggauagcacugagca

SEQ ID NO: 3726503 - RNA, 16 nt, Human
gggauauaggagagga

SEQ ID NO: 3726504 - RNA, 18 nt, Human
gggauaucacuuccauga

SEQ ID NO: 3726505 - RNA, 22 nt, Human
gggaucaaccagcuaagaaaag

SEQ ID NO: 3726506 - RNA, 13 nt, Human
gggaucacaaggu

SEQ ID NO: 3726507 - RNA, 22 nt, Human
gggaucacagagacauuccucc

SEQ ID NO: 3726508 - RNA, 18 nt, Human
gggaucaucaugcagcuc

SEQ ID NO: 3726509 - RNA, 13 nt, Human
gggaucaugaaag

SEQ ID NO: 3726510 - RNA, 17 nt, Human
gggauccccgccuggcc

SEQ ID NO: 3726511 - RNA, 20 nt, Human
gggauccccgccuggccagg

SEQ ID NO: 3726512 - RNA, 16 nt, Human
gggauccuccaggugc

SEQ ID NO: 3726513 - RNA, 16 nt, Human
gggaucuaggagagga

SEQ ID NO: 3726514 - RNA, 11 nt, Human
gggaugaaaga

SEQ ID NO: 3726515 - RNA, 17 nt, Human
gggaugacuagaggcag

SEQ ID NO: 3726516 - RNA, 16 nt, Human
gggaugagaagagggg

SEQ ID NO: 3726517 - RNA, 21 nt, Human
gggaugagcauggagcuggcc

SEQ ID NO: 3726518 - RNA, 16 nt, Human
gggaugauucaagcca

SEQ ID NO: 3726519 - RNA, 17 nt, Human
gggaugccaucuguggg

SEQ ID NO: 3726520 - RNA, 16 nt, Human
gggauggacaucuugu

SEQ ID NO: 3726521 - RNA, 18 nt, Human
gggauggacugaugcuuu

SEQ ID NO: 3726522 - RNA, 18 nt, Human
gggauggaggagaagaau

SEQ ID NO: 3726523 - RNA, 16 nt, Human
gggaugggagccgggc

SEQ ID NO: 3726524 - RNA, 14 nt, Human
gggaugggccaccg

SEQ ID NO: 3726525 - RNA, 14 nt, Human
gggaugggccugag

SEQ ID NO: 3726526 - RNA, 14 nt, Human
gggauggggcuggg

SEQ ID NO: 3726527 - RNA, 22 nt, Human
gggauguacaaggcgaucccau

SEQ ID NO: 3726528 - RNA, 22 nt, Human
gggaugugaauugccugcagag

SEQ ID NO: 3726529 - RNA, 13 nt, Human
gggauguguccug

SEQ ID NO: 3726530 - RNA, 20 nt, Human
gggauuaauaugaaaacuua

SEQ ID NO: 3726531 - RNA, 14 nt, Human
gggauuacaggcgu

SEQ ID NO: 3726532 - RNA, 13 nt, Human
gggauuacaggcu

SEQ ID NO: 3726533 - RNA, 16 nt, Human
gggauuacccaagcaa

SEQ ID NO: 3726534 - RNA, 23 nt, Human
gggauuauuagaaucaaacauuu

SEQ ID NO: 3726535 - RNA, 21 nt, Human
gggauucaggaaaaggccugg

SEQ ID NO: 3726536 - RNA, 14 nt, Human
gggauuccugaccc

SEQ ID NO: 3726537 - RNA, 19 nt, Human
gggauucugguuccagggu

SEQ ID NO: 3726538 - RNA, 20 nt, Human
gggauuuaauuuccaggguu

SEQ ID NO: 3726539 - RNA, 20 nt, Human
gggauuuccagccagggcug

SEQ ID NO: 3726540 - RNA, 15 nt, Human
gggauuucucccagc

SEQ ID NO: 3726541 - RNA, 13 nt, Human
gggauuucuuagg

SEQ ID NO: 3726542 - RNA, 18 nt, Human
gggcaaaauucccaggga

SEQ ID NO: 3726543 - RNA, 14 nt, Human
gggcaaacaggcag

SEQ ID NO: 3726544 - RNA, 15 nt, Human
gggcaaacaggcagu

SEQ ID NO: 3726545 - RNA, 16 nt, Human
gggcaaaugccagggc

SEQ ID NO: 3726546 - RNA, 18 nt, Human
gggcaacccuggugacca

SEQ ID NO: 3726547 - RNA, 13 nt, Human
gggcaagaggaau

SEQ ID NO: 3726548 - RNA, 21 nt, Human
gggcaagccuaagggauccug

SEQ ID NO: 3726549 - RNA, 16 nt, Human
gggcaaggaaaaagaa

SEQ ID NO: 3726550 - RNA, 13 nt, Human
gggcaagggccau

SEQ ID NO: 3726551 - RNA, 20 nt, Human
gggcaaggguuaaggccuga

SEQ ID NO: 3726552 - RNA, 23 nt, Human
gggcaauauucucuguacauauu

SEQ ID NO: 3726553 - RNA, 13 nt, Human
gggcaauggaaau

SEQ ID NO: 3726554 - RNA, 20 nt, Human
gggcaauuaauuccuucagc

SEQ ID NO: 3726555 - RNA, 23 nt, Human
gggcacaagacugacgccagggu

SEQ ID NO: 3726556 - RNA, 17 nt, Human
gggcacaccuccuccca

SEQ ID NO: 3726557 - RNA, 19 nt, Human
gggcacacgccucccacug

SEQ ID NO: 3726558 - RNA, 16 nt, Human
gggcacacgcugcucu

SEQ ID NO: 3726559 - RNA, 18 nt, Human
gggcacacgcugcucugc

SEQ ID NO: 3726560 - RNA, 22 nt, Human
gggcacacgcugcucugcccca

SEQ ID NO: 3726561 - RNA, 22 nt, Human
gggcacacucugccagcaaaga

SEQ ID NO: 3726562 - RNA, 21 nt, Human
gggcacagaaaauggaagaca

SEQ ID NO: 3726563 - RNA, 16 nt, Human
gggcacagggccuggc

SEQ ID NO: 3726564 - RNA, 23 nt, Human
gggcacaggugucugcccccucu

SEQ ID NO: 3726565 - RNA, 16 nt, Human
gggcacaguccaggaa

SEQ ID NO: 3726566 - RNA, 22 nt, Human
gggcaccacaaaauauacaaaa

SEQ ID NO: 3726567 - RNA, 15 nt, Human
gggcaccagccagcg

SEQ ID NO: 3726568 - RNA, 20 nt, Human
gggcaccagggguuucucgc

SEQ ID NO: 3726569 - RNA, 14 nt, Human
gggcacccccagcc

SEQ ID NO: 3726570 - RNA, 17 nt, Human
gggcacccccagccugg

SEQ ID NO: 3726571 - RNA, 14 nt, Human
gggcacccucccac

SEQ ID NO: 3726572 - RNA, 18 nt, Human
gggcaccuauaauaccag

SEQ ID NO: 3726573 - RNA, 16 nt, Human
gggcacgcacuggguu

SEQ ID NO: 3726574 - RNA, 19 nt, Human
gggcacucagaagacacug

SEQ ID NO: 3726575 - RNA, 16 nt, Human
gggcacugcugggugg

SEQ ID NO: 3726576 - RNA, 14 nt, Human
gggcagaacacuaa

SEQ ID NO: 3726577 - RNA, 22 nt, Human
gggcagaacacuaaccugaccg

SEQ ID NO: 3726578 - RNA, 22 nt, Human
gggcagaacagccgcuccuguc

SEQ ID NO: 3726579 - RNA, 14 nt, Human
gggcagaaggaaga

SEQ ID NO: 3726580 - RNA, 18 nt, Human
gggcagaaggaagacuuc

SEQ ID NO: 3726581 - RNA, 11 nt, Human
gggcagagagg

SEQ ID NO: 3726582 - RNA, 13 nt, Human
gggcagagccagg

SEQ ID NO: 3726583 - RNA, 14 nt, Human
gggcagagccagga

SEQ ID NO: 3726584 - RNA, 16 nt, Human
gggcagagccaggaag

SEQ ID NO: 3726585 - RNA, 14 nt, Human
gggcagagcccaag

SEQ ID NO: 3726586 - RNA, 21 nt, Human
gggcagaggaaagcaaaggag

SEQ ID NO: 3726587 - RNA, 23 nt, Human
gggcagaggagaacuugcugccu

SEQ ID NO: 3726588 - RNA, 23 nt, Human
gggcagaggcuggaggcagggcc

SEQ ID NO: 3726589 - RNA, 15 nt, Human
gggcagagggcugga

SEQ ID NO: 3726590 - RNA, 16 nt, Human
gggcagagggcuggag

SEQ ID NO: 3726591 - RNA, 16 nt, Human
gggcagagucacacgg

SEQ ID NO: 3726592 - RNA, 20 nt, Human
gggcagaucuuggacucaug

SEQ ID NO: 3726593 - RNA, 16 nt, Human
gggcagauuuucagca

SEQ ID NO: 3726594 - RNA, 15 nt, Human
gggcagcacaggagg

SEQ ID NO: 3726595 - RNA, 15 nt, Human
gggcagcagccagcc

SEQ ID NO: 3726596 - RNA, 18 nt, Human
gggcagcagccagcccug

SEQ ID NO: 3726597 - RNA, 19 nt, Human
gggcagcagccagcccugc

SEQ ID NO: 3726598 - RNA, 17 nt, Human
gggcagccaaacccaug

SEQ ID NO: 3726599 - RNA, 15 nt, Human
gggcagccucccccg

SEQ ID NO: 3726600 - RNA, 14 nt, Human
gggcagccugccuu

SEQ ID NO: 3726601 - RNA, 15 nt, Human
gggcagccuggcucc

SEQ ID NO: 3726602 - RNA, 15 nt, Human
gggcagcgccaggcu

SEQ ID NO: 3726603 - RNA, 16 nt, Human
gggcagcgcccuuccu

SEQ ID NO: 3726604 - RNA, 12 nt, Human
gggcagcugcca

SEQ ID NO: 3726605 - RNA, 23 nt, Human
gggcagcugccuccccuccucug

SEQ ID NO: 3726606 - RNA, 17 nt, Human
gggcagcugggcccaac

SEQ ID NO: 3726607 - RNA, 18 nt, Human
gggcaggaaggagagccu

SEQ ID NO: 3726608 - RNA, 21 nt, Human
gggcaggaaggagagccugcu

SEQ ID NO: 3726609 - RNA, 14 nt, Human
gggcaggaccagcc

SEQ ID NO: 3726610 - RNA, 16 nt, Human
gggcaggaccagccca

SEQ ID NO: 3726611 - RNA, 15 nt, Human
gggcaggaguagcug

SEQ ID NO: 3726612 - RNA, 19 nt, Human
gggcaggaguagcugagcu

SEQ ID NO: 3726613 - RNA, 15 nt, Human
gggcaggcaugaagu

SEQ ID NO: 3726614 - RNA, 14 nt, Human
gggcaggcccugca

SEQ ID NO: 3726615 - RNA, 21 nt, Human
gggcaggcccugcacuguccu

SEQ ID NO: 3726616 - RNA, 13 nt, Human
gggcaggcugaca

SEQ ID NO: 3726617 - RNA, 13 nt, Human
gggcaggcugggc

SEQ ID NO: 3726618 - RNA, 14 nt, Human
gggcaggcugggcc

SEQ ID NO: 3726619 - RNA, 12 nt, Human
gggcagggagcg

SEQ ID NO: 3726620 - RNA, 15 nt, Human
ugaaguaguuuguau

SEQ ID NO: 3726621 - RNA, 17 nt, Human
ugaaguauuucucacuc

SEQ ID NO: 3726622 - RNA, 20 nt, Human
ugaaguauuuugcuggaaua

SEQ ID NO: 3726623 - RNA, 21 nt, Human
ugaaguauuuuuucaguauua

SEQ ID NO: 3726624 - RNA, 13 nt, Human
ugaagucacacag

SEQ ID NO: 3726625 - RNA, 18 nt, Human
ugaagucacaucacagga

SEQ ID NO: 3726626 - RNA, 19 nt, Human
ugaagucacccggccccca

SEQ ID NO: 3726627 - RNA, 15 nt, Human
ugaagucacugcaca

SEQ ID NO: 3726628 - RNA, 16 nt, Human
ugaagucagauguggu

SEQ ID NO: 3726629 - RNA, 19 nt, Human
ugaagucucugaagugaaa

SEQ ID NO: 3726630 - RNA, 23 nt, Human
ugaagucuuaaggacaaagugcc

SEQ ID NO: 3726631 - RNA, 12 nt, Human
ugaagucuugua

SEQ ID NO: 3726632 - RNA, 19 nt, Human
ugaagucuuuaauaaauaa

SEQ ID NO: 3726633 - RNA, 20 nt, Human
ugaagucuuuguacagacaa

SEQ ID NO: 3726634 - RNA, 18 nt, Human
ugaagugagcacagccua

SEQ ID NO: 3726635 - RNA, 20 nt, Human
ugaagugauauggugagcag

SEQ ID NO: 3726636 - RNA, 22 nt, Human
ugaaguguaccuguguacauaa

SEQ ID NO: 3726637 - RNA, 17 nt, Human
ugaaguguaggcagaca

SEQ ID NO: 3726638 - RNA, 19 nt, Human
ugaaguguaggcagacaca

SEQ ID NO: 3726639 - RNA, 17 nt, Human
ugaaguguuaauacuag

SEQ ID NO: 3726640 - RNA, 14 nt, Human
ugaaguuaacagag

SEQ ID NO: 3726641 - RNA, 14 nt, Human
ugaaguuagaauuc

SEQ ID NO: 3726642 - RNA, 18 nt, Human
ugaaguuagcuuuaacuu

SEQ ID NO: 3726643 - RNA, 15 nt, Human
ugaaguuaguggaaa

SEQ ID NO: 3726644 - RNA, 21 nt, Human
ugaaguuaguggaaaucugaa

SEQ ID NO: 3726645 - RNA, 16 nt, Human
ugaaguuauauuuccu

SEQ ID NO: 3726646 - RNA, 13 nt, Human
ugaaguugcugcu

SEQ ID NO: 3726647 - RNA, 18 nt, Human
ugaaguuggacagcaaaa

SEQ ID NO: 3726648 - RNA, 15 nt, Human
ugaaguuguuacuaa

SEQ ID NO: 3726649 - RNA, 18 nt, Human
ugaaguuguuacuaacua

SEQ ID NO: 3726650 - RNA, 20 nt, Human
ugaaguuuaaaacaguauuu

SEQ ID NO: 3726651 - RNA, 21 nt, Human
ugaaguuuaaaacaguauuua

SEQ ID NO: 3726652 - RNA, 17 nt, Human
ugaaguuuacaaucaaa

SEQ ID NO: 3726653 - RNA, 14 nt, Human
ugaaguuuacauug

SEQ ID NO: 3726654 - RNA, 20 nt, Human
ugaaguuuacauuguaaaua

SEQ ID NO: 3726655 - RNA, 19 nt, Human
ugaaguuuacauuuuuauu

SEQ ID NO: 3726656 - RNA, 19 nt, Human
ugaaguuuauacaguacag

SEQ ID NO: 3726657 - RNA, 20 nt, Human
ugaaguuuauacaguacagu

SEQ ID NO: 3726658 - RNA, 13 nt, Human
ugaaguuucaagu

SEQ ID NO: 3726659 - RNA, 21 nt, Human
ugaaguuucaaguuuuaaagu

SEQ ID NO: 3726660 - RNA, 23 nt, Human
ugaaguuucaaguuuuaaaguuc

SEQ ID NO: 3726661 - RNA, 14 nt, Human
ugaaguuucacaug

SEQ ID NO: 3726662 - RNA, 19 nt, Human
ugaaguuuccuuggcuggu

SEQ ID NO: 3726663 - RNA, 13 nt, Human
ugaaguuugaaug

SEQ ID NO: 3726664 - RNA, 15 nt, Human
ugaaguuugaaugcu

SEQ ID NO: 3726665 - RNA, 16 nt, Human
ugaaguuugaauguua

SEQ ID NO: 3726666 - RNA, 18 nt, Human
ugaaguuugaauguuaaa

SEQ ID NO: 3726667 - RNA, 15 nt, Human
ugaaguuugauaaau

SEQ ID NO: 3726668 - RNA, 22 nt, Human
ugaaguuugauaaauaguguua

SEQ ID NO: 3726669 - RNA, 17 nt, Human
ugaaguuuuacugucua

SEQ ID NO: 3726670 - RNA, 16 nt, Human
ugaauaaaaacucaag

SEQ ID NO: 3726671 - RNA, 14 nt, Human
ugaauaaaaacuuu

SEQ ID NO: 3726672 - RNA, 15 nt, Human
ugaauaaaaauuaag

SEQ ID NO: 3726673 - RNA, 15 nt, Human
ugaauaaaagugcac

SEQ ID NO: 3726674 - RNA, 13 nt, Human
ugaauaaaauuau

SEQ ID NO: 3726675 - RNA, 20 nt, Human
ugaauaaaauuauuuuggau

SEQ ID NO: 3726676 - RNA, 13 nt, Human
ugaauaaacuuca

SEQ ID NO: 3726677 - RNA, 16 nt, Human
ugaauaaacuucagca

SEQ ID NO: 3726678 - RNA, 17 nt, Human
ugaauaaacuucagcac

SEQ ID NO: 3726679 - RNA, 19 nt, Human
ugaauaaacuucagcacca

SEQ ID NO: 3726680 - RNA, 11 nt, Human
ugaauaaagaa

SEQ ID NO: 3726681 - RNA, 18 nt, Human
ugaauaaagaauacuuga

SEQ ID NO: 3726682 - RNA, 20 nt, Human
ugaauaaagaauacuugaac

SEQ ID NO: 3726683 - RNA, 22 nt, Human
ugaauaaagaauacuugaacuu

SEQ ID NO: 3726684 - RNA, 20 nt, Human
ugaauaaagccugcuuuuua

SEQ ID NO: 3726685 - RNA, 13 nt, Human
ugaauaaagugcu

SEQ ID NO: 3726686 - RNA, 12 nt, Human
ugaauaaagugu

SEQ ID NO: 3726687 - RNA, 17 nt, Human
ugaauaaaguguaacaa

SEQ ID NO: 3726688 - RNA, 13 nt, Human
ugaauaaauguca

SEQ ID NO: 3726689 - RNA, 13 nt, Human
ugaauaaaugucu

SEQ ID NO: 3726690 - RNA, 14 nt, Human
ugaauaaaugucuu

SEQ ID NO: 3726691 - RNA, 15 nt, Human
ugaauaaaugucuug

SEQ ID NO: 3726692 - RNA, 12 nt, Human
ugaauaaaugug

SEQ ID NO: 3726693 - RNA, 13 nt, Human
ugaauaaaugugu

SEQ ID NO: 3726694 - RNA, 19 nt, Human
ugaauaaauucuauaggaa

SEQ ID NO: 3726695 - RNA, 20 nt, Human
ugaauaagacaacaaagaga

SEQ ID NO: 3726696 - RNA, 12 nt, Human
ugaauaagcacu

SEQ ID NO: 3726697 - RNA, 15 nt, Human
ugaauaagcacuuuu

SEQ ID NO: 3726698 - RNA, 20 nt, Human
ugaauaauaagcaggauguu

SEQ ID NO: 3726699 - RNA, 13 nt, Human
ugaauaaugauuu

SEQ ID NO: 3726700 - RNA, 22 nt, Human
ugaauacaaacaauggaaacug

SEQ ID NO: 3726701 - RNA, 16 nt, Human
ugaauacagcagcaag

SEQ ID NO: 3726702 - RNA, 16 nt, Human
ugaauaccacucugua

SEQ ID NO: 3726703 - RNA, 19 nt, Human
ugaauaccacucuguaauu

SEQ ID NO: 3726704 - RNA, 23 nt, Human
ugaauaccacucuguaauugcaa

SEQ ID NO: 3726705 - RNA, 17 nt, Human
ugaauaccauuaaaacu

SEQ ID NO: 3726706 - RNA, 22 nt, Human
ugaauaccauuaaaacugcuuu

SEQ ID NO: 3726707 - RNA, 16 nt, Human
ugaauacuguauuuug

SEQ ID NO: 3726708 - RNA, 18 nt, Human
ugaauacuuacauucucu

SEQ ID NO: 3726709 - RNA, 13 nt, Human
ugaauacuugaac

SEQ ID NO: 3726710 - RNA, 15 nt, Human
ugaauacuugaacca

SEQ ID NO: 3726711 - RNA, 15 nt, Human
ugaauacuuuauaaa

SEQ ID NO: 3726712 - RNA, 19 nt, Human
ugaauacuuugaauguguu

SEQ ID NO: 3726713 - RNA, 16 nt, Human
ugaauacuuuuuacaa

SEQ ID NO: 3726714 - RNA, 22 nt, Human
ugaauagccauauuuguaaaau

SEQ ID NO: 3726715 - RNA, 15 nt, Human
ugaauaguauugugu

SEQ ID NO: 3726716 - RNA, 13 nt, Human
ugaauauaaaaaa

SEQ ID NO: 3726717 - RNA, 13 nt, Human
ugaauauaaaugu

SEQ ID NO: 3726718 - RNA, 19 nt, Human
ugaauauaaauguguguau

SEQ ID NO: 3726719 - RNA, 12 nt, Human
ugaauauaauga

SEQ ID NO: 3726720 - RNA, 20 nt, Human
ugaauauauggcauuugcag

SEQ ID NO: 3726721 - RNA, 22 nt, Human
ugaauauauuuaagcaacaucu

SEQ ID NO: 3726722 - RNA, 18 nt, Human
ugaauauccccucccagu

SEQ ID NO: 3726723 - RNA, 16 nt, Human
ugaauaucuauuaaua

SEQ ID NO: 3726724 - RNA, 18 nt, Human
ugaauauguacauaggca

SEQ ID NO: 3726725 - RNA, 18 nt, Human
ugaauauuguucauauug

SEQ ID NO: 3726726 - RNA, 11 nt, Human
ugaauauuuau

SEQ ID NO: 3726727 - RNA, 17 nt, Human
ugaauauuuauaacagc

SEQ ID NO: 3726728 - RNA, 19 nt, Human
ugaauauuuauaacagcau

SEQ ID NO: 3726729 - RNA, 19 nt, Human
ugaauauuuauauuucacu

SEQ ID NO: 3726730 - RNA, 23 nt, Human
ugaauauuugucgauauuuccau

SEQ ID NO: 3726731 - RNA, 21 nt, Human
ugaauauuuucauuaaaagcu

SEQ ID NO: 3726732 - RNA, 18 nt, Human
ugaaucaagggucaggcc

SEQ ID NO: 3726733 - RNA, 20 nt, Human
ugaaucaagggucaggccuu

SEQ ID NO: 3726734 - RNA, 17 nt, Human
ugaaucaauaauauauu

SEQ ID NO: 3726735 - RNA, 19 nt, Human
ugaaucaauaauauauuuu

SEQ ID NO: 3726736 - RNA, 20 nt, Human
ugaaucaauaauauauuuuc

SEQ ID NO: 3726737 - RNA, 21 nt, Human
ugaaucacuguuuuuagacac

SEQ ID NO: 3726738 - RNA, 22 nt, Human
ugaaucacuguuuuuagacacc

SEQ ID NO: 3726739 - RNA, 21 nt, Human
ugaaucaguauaaacaaaguu

SEQ ID NO: 3726740 - RNA, 18 nt, Human
ugaaucaugagccugcug

SEQ ID NO: 3726741 - RNA, 14 nt, Human
ugaaucauguagua

SEQ ID NO: 3726742 - RNA, 18 nt, Human
ugaauccaaaagaaaaac

SEQ ID NO: 3726743 - RNA, 15 nt, Human
ugaauccaaacuaau

SEQ ID NO: 3726744 - RNA, 14 nt, Human
ugaauccaugcuug

SEQ ID NO: 3726745 - RNA, 20 nt, Human
ugaaucccacccacauguga

SEQ ID NO: 3726746 - RNA, 22 nt, Human
ugaauccuaagggcuggucucu

SEQ ID NO: 3726747 - RNA, 15 nt, Human
ugaauccuuugccug

SEQ ID NO: 3726748 - RNA, 15 nt, Human
ugaaucgcuucucuu

SEQ ID NO: 3726749 - RNA, 15 nt, Human
ugaaucuaagcagca

SEQ ID NO: 3726750 - RNA, 15 nt, Human
ugaaucuagcuuauu

SEQ ID NO: 3726751 - RNA, 18 nt, Human
ugaaucuaugccaaagau

SEQ ID NO: 3726752 - RNA, 19 nt, Human
ugaaucuauuauacuguau

SEQ ID NO: 3726753 - RNA, 12 nt, Human
ugaaucuauugg

SEQ ID NO: 3726754 - RNA, 16 nt, Human
ugaaucugcucacuuu

SEQ ID NO: 3726755 - RNA, 13 nt, Human
ugaaucuguacag

SEQ ID NO: 3726756 - RNA, 22 nt, Human
ugaaucuucugaaaccaaaugu

SEQ ID NO: 3726757 - RNA, 14 nt, Human
ugaaucuugcguuu

SEQ ID NO: 3726758 - RNA, 15 nt, Human
ugaaucuugucucaa

SEQ ID NO: 3726759 - RNA, 19 nt, Human
ugaaucuugucucaaugcu

SEQ ID NO: 3726760 - RNA, 21 nt, Human
ugaaucuugucucaaugcuca

SEQ ID NO: 3726761 - RNA, 23 nt, Human
ugaaucuugucucaaugcucaua

SEQ ID NO: 3726762 - RNA, 20 nt, Human
ugaaugaaaaauuuaagcau

SEQ ID NO: 3726763 - RNA, 18 nt, Human
ugaaugaaacccccacac

SEQ ID NO: 3726764 - RNA, 20 nt, Human
ugaaugaaacccccacacac

SEQ ID NO: 3726765 - RNA, 12 nt, Human
ugaaugaacacu

SEQ ID NO: 3726766 - RNA, 15 nt, Human
ugaaugaacacucuu

SEQ ID NO: 3726767 - RNA, 15 nt, Human
ugaaugaaccuucug

SEQ ID NO: 3726768 - RNA, 11 nt, Human
ugaaugaagca

SEQ ID NO: 3726769 - RNA, 20 nt, Human
ugaaugaauggcuaagcaaa

SEQ ID NO: 3726770 - RNA, 19 nt, Human
gggcagggagcugggcccg

SEQ ID NO: 3726771 - RNA, 12 nt, Human
gggcagggcagc

SEQ ID NO: 3726772 - RNA, 14 nt, Human
gggcagggcaugac

SEQ ID NO: 3726773 - RNA, 20 nt, Human
gggcaggggaggccaucugg

SEQ ID NO: 3726774 - RNA, 23 nt, Human
gggcaggggagggucagccaggg

SEQ ID NO: 3726775 - RNA, 22 nt, Human
gggcaggugcuggagcacuggg

SEQ ID NO: 3726776 - RNA, 16 nt, Human
gggcaggugguggcac

SEQ ID NO: 3726777 - RNA, 18 nt, Human
gggcaggugguggcacug

SEQ ID NO: 3726778 - RNA, 17 nt, Human
gggcaguaccugagggu

SEQ ID NO: 3726779 - RNA, 19 nt, Human
gggcagucugagagaggcc

SEQ ID NO: 3726780 - RNA, 23 nt, Human
gggcagugcuagugagcugggca

SEQ ID NO: 3726781 - RNA, 20 nt, Human
gggcaguucgcagccacccu

SEQ ID NO: 3726782 - RNA, 14 nt, Human
gggcauaaaguaaa

SEQ ID NO: 3726783 - RNA, 15 nt, Human
gggcauacuaauaaa

SEQ ID NO: 3726784 - RNA, 17 nt, Human
gggcauauccaccaccu

SEQ ID NO: 3726785 - RNA, 23 nt, Human
gggcauccauggggucucucaca

SEQ ID NO: 3726786 - RNA, 14 nt, Human
gggcaucucugggc

SEQ ID NO: 3726787 - RNA, 15 nt, Human
gggcaucucugggcu

SEQ ID NO: 3726788 - RNA, 17 nt, Human
gggcaucucugggcugg

SEQ ID NO: 3726789 - RNA, 14 nt, Human
gggcaucugccccu

SEQ ID NO: 3726790 - RNA, 20 nt, Human
gggcaucugccccuccccca

SEQ ID NO: 3726791 - RNA, 13 nt, Human
gggcaucuggccu

SEQ ID NO: 3726792 - RNA, 20 nt, Human
gggcaugccccggccaccuc

SEQ ID NO: 3726793 - RNA, 13 nt, Human
gggcaugccuugu

SEQ ID NO: 3726794 - RNA, 20 nt, Human
gggcauggggugggccucug

SEQ ID NO: 3726795 - RNA, 20 nt, Human
gggcaugguaccagcccugg

SEQ ID NO: 3726796 - RNA, 21 nt, Human
gggcaugguguucuccugcug

SEQ ID NO: 3726797 - RNA, 22 nt, Human
gggcauguauuggccuggaggu

SEQ ID NO: 3726798 - RNA, 23 nt, Human
gggcauugauggggaaggaggcu

SEQ ID NO: 3726799 - RNA, 17 nt, Human
gggccaaaaggaaaaag

SEQ ID NO: 3726800 - RNA, 15 nt, Human
gggccaaacgcugag

SEQ ID NO: 3726801 - RNA, 23 nt, Human
gggccaaauauauucucuuuggu

SEQ ID NO: 3726802 - RNA, 22 nt, Human
gggccaaauccgcucucuuccu

SEQ ID NO: 3726803 - RNA, 18 nt, Human
gggccaagccagggaugg

SEQ ID NO: 3726804 - RNA, 13 nt, Human
gggccaaggacug

SEQ ID NO: 3726805 - RNA, 14 nt, Human
gggccaccaaagcu

SEQ ID NO: 3726806 - RNA, 19 nt, Human
gggccaccaaagcugccca

SEQ ID NO: 3726807 - RNA, 13 nt, Human
gggccaccccucc

SEQ ID NO: 3726808 - RNA, 16 nt, Human
gggccaccuccccagg

SEQ ID NO: 3726809 - RNA, 17 nt, Human
gggccaccuccccaggc

SEQ ID NO: 3726810 - RNA, 16 nt, Human
gggccacgcuccagcu

SEQ ID NO: 3726811 - RNA, 19 nt, Human
gggccacgugccaggcccg

SEQ ID NO: 3726812 - RNA, 17 nt, Human
gggccacuccuuccugc

SEQ ID NO: 3726813 - RNA, 23 nt, Human
gggccagaggaacuguccagaga

SEQ ID NO: 3726814 - RNA, 12 nt, Human
gggccagaggca

SEQ ID NO: 3726815 - RNA, 20 nt, Human
gggccagaguauuggucucc

SEQ ID NO: 3726816 - RNA, 13 nt, Human
gggccagccccuc

SEQ ID NO: 3726817 - RNA, 16 nt, Human
gggccagccccuccau

SEQ ID NO: 3726818 - RNA, 15 nt, Human
gggccagccccuccc

SEQ ID NO: 3726819 - RNA, 16 nt, Human
gggccaggacaggccc

SEQ ID NO: 3726820 - RNA, 17 nt, Human
gggccaggacaggcccg

SEQ ID NO: 3726821 - RNA, 14 nt, Human
gggccaggacugag

SEQ ID NO: 3726822 - RNA, 13 nt, Human
gggccaggagccu

SEQ ID NO: 3726823 - RNA, 23 nt, Human
gggccaggcaggugccuggacau

SEQ ID NO: 3726824 - RNA, 10 nt, Human
gggccaggcc

SEQ ID NO: 3726825 - RNA, 21 nt, Human
gggccaggcugggucgcccug

SEQ ID NO: 3726826 - RNA, 14 nt, Human
gggccagggcccug

SEQ ID NO: 3726827 - RNA, 20 nt, Human
gggccagggcugcccugaga

SEQ ID NO: 3726828 - RNA, 18 nt, Human
gggccagggucuguguga

SEQ ID NO: 3726829 - RNA, 15 nt, Human
gggccaguccugccu

SEQ ID NO: 3726830 - RNA, 18 nt, Human
gggccaguccugccuggc

SEQ ID NO: 3726831 - RNA, 15 nt, Human
gggccaguggggccu

SEQ ID NO: 3726832 - RNA, 16 nt, Human
gggccaguggggccug

SEQ ID NO: 3726833 - RNA, 15 nt, Human
gggccauacuggccu

SEQ ID NO: 3726834 - RNA, 15 nt, Human
gggccauagcuccug

SEQ ID NO: 3726835 - RNA, 15 nt, Human
gggccaugaacuuug

SEQ ID NO: 3726836 - RNA, 19 nt, Human
gggccaugagcuccagacc

SEQ ID NO: 3726837 - RNA, 22 nt, Human
gggccaugauggcaacagaucu

SEQ ID NO: 3726838 - RNA, 13 nt, Human
gggccaugccucc

SEQ ID NO: 3726839 - RNA, 22 nt, Human
gggccaugccuccucaggagcc

SEQ ID NO: 3726840 - RNA, 19 nt, Human
gggccaugcugaggccugg

SEQ ID NO: 3726841 - RNA, 21 nt, Human
gggccaugcugaggccugggc

SEQ ID NO: 3726842 - RNA, 13 nt, Human
gggccauggcuca

SEQ ID NO: 3726843 - RNA, 15 nt, Human
gggccauggcucagg

SEQ ID NO: 3726844 - RNA, 17 nt, Human
gggccauguccaaagag

SEQ ID NO: 3726845 - RNA, 21 nt, Human
gggccauguccaaagaggcug

SEQ ID NO: 3726846 - RNA, 22 nt, Human
gggccauguccaaagaggcugc

SEQ ID NO: 3726847 - RNA, 17 nt, Human
gggccauguugugccuc

SEQ ID NO: 3726848 - RNA, 23 nt, Human
gggcccaagacagaugccccaga

SEQ ID NO: 3726849 - RNA, 12 nt, Human
gggcccacaccc

SEQ ID NO: 3726850 - RNA, 18 nt, Human
gggcccacaccuccuucc

SEQ ID NO: 3726851 - RNA, 10 nt, Human
gggcccaccu

SEQ ID NO: 3726852 - RNA, 17 nt, Human
gggcccagagagggugg

SEQ ID NO: 3726853 - RNA, 11 nt, Human
gggcccagagc

SEQ ID NO: 3726854 - RNA, 12 nt, Human
gggcccagagca

SEQ ID NO: 3726855 - RNA, 13 nt, Human
gggcccagagccc

SEQ ID NO: 3726856 - RNA, 16 nt, Human
gggcccagagcccagc

SEQ ID NO: 3726857 - RNA, 20 nt, Human
gggcccagagcccagcucca

SEQ ID NO: 3726858 - RNA, 14 nt, Human
gggcccagaggagc

SEQ ID NO: 3726859 - RNA, 24 nt, Human
gggcccaggaccagcuggggcgug

SEQ ID NO: 3726860 - RNA, 20 nt, Human
gggcccaggccaucuuccag

SEQ ID NO: 3726861 - RNA, 22 nt, Human
gggcccagggacaccagccagg

SEQ ID NO: 3726862 - RNA, 11 nt, Human
gggcccagggg

SEQ ID NO: 3726863 - RNA, 22 nt, Human
gggcccagugcaugguggccag

SEQ ID NO: 3726864 - RNA, 22 nt, Human
gggccccaaacgggcugcccug

SEQ ID NO: 3726865 - RNA, 18 nt, Human
gggccccagaaggcaggg

SEQ ID NO: 3726866 - RNA, 14 nt, Human
gggccccagucagc

SEQ ID NO: 3726867 - RNA, 14 nt, Human
gggcccccaucuca

SEQ ID NO: 3726868 - RNA, 15 nt, Human
gggccccccagcuca

SEQ ID NO: 3726869 - RNA, 15 nt, Human
gggccccccuccuug

SEQ ID NO: 3726870 - RNA, 13 nt, Human
gggccccccugcc

SEQ ID NO: 3726871 - RNA, 14 nt, Human
gggccccuccagcu

SEQ ID NO: 3726872 - RNA, 19 nt, Human
gggccccucccuaccucaa

SEQ ID NO: 3726873 - RNA, 12 nt, Human
gggccccucucc

SEQ ID NO: 3726874 - RNA, 12 nt, Human
gggccccucugc

SEQ ID NO: 3726875 - RNA, 17 nt, Human
gggccccucugcccagc

SEQ ID NO: 3726876 - RNA, 13 nt, Human
gggccccugccuc

SEQ ID NO: 3726877 - RNA, 17 nt, Human
gggccccugccucucug

SEQ ID NO: 3726878 - RNA, 12 nt, Human
gggccccuggca

SEQ ID NO: 3726879 - RNA, 23 nt, Human
gggccccugggcuuggccugcug

SEQ ID NO: 3726880 - RNA, 18 nt, Human
gggccccuuugcugaccc

SEQ ID NO: 3726881 - RNA, 14 nt, Human
gggcccgcuugccu

SEQ ID NO: 3726882 - RNA, 21 nt, Human
gggcccgcuugccucggcucc

SEQ ID NO: 3726883 - RNA, 13 nt, Human
gggcccggccagc

SEQ ID NO: 3726884 - RNA, 22 nt, Human
gggcccggguugggucaccaga

SEQ ID NO: 3726885 - RNA, 17 nt, Human
gggcccguugaggauga

SEQ ID NO: 3726886 - RNA, 22 nt, Human
gggcccguugucucccuggccc

SEQ ID NO: 3726887 - RNA, 12 nt, Human
gggcccuccuga

SEQ ID NO: 3726888 - RNA, 13 nt, Human
gggcccuccuucc

SEQ ID NO: 3726889 - RNA, 14 nt, Human
gggcccucucuucu

SEQ ID NO: 3726890 - RNA, 19 nt, Human
gggcccugcccuggcaggg

SEQ ID NO: 3726891 - RNA, 11 nt, Human
gggcccuggag

SEQ ID NO: 3726892 - RNA, 13 nt, Human
gggcccuggagca

SEQ ID NO: 3726893 - RNA, 21 nt, Human
gggcccuggagcagccacccc

SEQ ID NO: 3726894 - RNA, 14 nt, Human
gggcccugggcugg

SEQ ID NO: 3726895 - RNA, 12 nt, Human
gggcccuggggc

SEQ ID NO: 3726896 - RNA, 17 nt, Human
gggcccuggggccugua

SEQ ID NO: 3726897 - RNA, 18 nt, Human
gggcccuggggccuguac

SEQ ID NO: 3726898 - RNA, 20 nt, Human
gggcccuggggccuguacug

SEQ ID NO: 3726899 - RNA, 19 nt, Human
gggcccuuuuucaauaacu

SEQ ID NO: 3726900 - RNA, 13 nt, Human
gggccgaccagag

SEQ ID NO: 3726901 - RNA, 14 nt, Human
gggccgacuaagag

SEQ ID NO: 3726902 - RNA, 15 nt, Human
gggccgagccugccu

SEQ ID NO: 3726903 - RNA, 20 nt, Human
gggccgaggaggugccugga

SEQ ID NO: 3726904 - RNA, 19 nt, Human
gggccgccgguuugaguga

SEQ ID NO: 3726905 - RNA, 14 nt, Human
gggccgcugccacc

SEQ ID NO: 3726906 - RNA, 20 nt, Human
gggccgggcgcgguggcuca

SEQ ID NO: 3726907 - RNA, 23 nt, Human
gggccggggaacuggccaagcug

SEQ ID NO: 3726908 - RNA, 18 nt, Human
gggccguaccccacccuc

SEQ ID NO: 3726909 - RNA, 19 nt, Human
gggccguaucuccggcucc

SEQ ID NO: 3726910 - RNA, 23 nt, Human
gggccguaucuccggcucccagc

SEQ ID NO: 3726911 - RNA, 20 nt, Human
gggccuagcgaucucuccug

SEQ ID NO: 3726912 - RNA, 14 nt, Human
gggccuaucagugu

SEQ ID NO: 3726913 - RNA, 18 nt, Human
gggccuaucagugugccc

SEQ ID NO: 3726914 - RNA, 22 nt, Human
gggccuaucagugugcccccca

SEQ ID NO: 3726915 - RNA, 19 nt, Human
gggccucaaaggcccgcuc

SEQ ID NO: 3726916 - RNA, 20 nt, Human
gggccucaaaggcccgcucu

SEQ ID NO: 3726917 - RNA, 13 nt, Human
gggccucagugcc

SEQ ID NO: 3726918 - RNA, 14 nt, Human
gggccuccagaacu

SEQ ID NO: 3726919 - RNA, 20 nt, Human
gggccuccaugggccccagg

SEQ ID NO: 3726920 - RNA, 16 nt, Human
gggccucgggaccuca

SEQ ID NO: 3726921 - RNA, 20 nt, Human
ucuuagaagaauauuguauu

SEQ ID NO: 3726922 - RNA, 21 nt, Human
ucuuagaaguggaccaggaca

SEQ ID NO: 3726923 - RNA, 18 nt, Human
ucuuagacuucugcuuuc

SEQ ID NO: 3726924 - RNA, 23 nt, Human
ucuuagacuugaaauacuacuua

SEQ ID NO: 3726925 - RNA, 12 nt, Human
ucuuagauguau

SEQ ID NO: 3726926 - RNA, 14 nt, Human
ucuuagauucuuaa

SEQ ID NO: 3726927 - RNA, 16 nt, Human
ucuuagcauccugccu

SEQ ID NO: 3726928 - RNA, 18 nt, Human
ucuuagcucaaugagcau

SEQ ID NO: 3726929 - RNA, 19 nt, Human
ucuuagcucaaugagcaug

SEQ ID NO: 3726930 - RNA, 21 nt, Human
ucuuagcucaaugagcauguu

SEQ ID NO: 3726931 - RNA, 14 nt, Human
ucuuagcuccccuc

SEQ ID NO: 3726932 - RNA, 16 nt, Human
ucuuagcuccccucca

SEQ ID NO: 3726933 - RNA, 18 nt, Human
ucuuagcugucugcucag

SEQ ID NO: 3726934 - RNA, 14 nt, Human
ucuuaggcacuuug

SEQ ID NO: 3726935 - RNA, 19 nt, Human
ucuuaggggagagcuuucu

SEQ ID NO: 3726936 - RNA, 23 nt, Human
ucuuagguuggcaaaaaggcagg

SEQ ID NO: 3726937 - RNA, 17 nt, Human
ucuuagucuagguccuu

SEQ ID NO: 3726938 - RNA, 16 nt, Human
ucuuaguggauguucu

SEQ ID NO: 3726939 - RNA, 14 nt, Human
ucuuauacacauug

SEQ ID NO: 3726940 - RNA, 14 nt, Human
ucuuauacauuuga

SEQ ID NO: 3726941 - RNA, 15 nt, Human
ucuuauacauuugau

SEQ ID NO: 3726942 - RNA, 19 nt, Human
ucuuauacgcuuuucuuug

SEQ ID NO: 3726943 - RNA, 16 nt, Human
ucuuauacuguacaau

SEQ ID NO: 3726944 - RNA, 23 nt, Human
ucuuauagcacuuugaaauaccu

SEQ ID NO: 3726945 - RNA, 22 nt, Human
ucuuauauagcagcaaaaauau

SEQ ID NO: 3726946 - RNA, 23 nt, Human
ucuuaucaaggacucugguuucu

SEQ ID NO: 3726947 - RNA, 23 nt, Human
ucuuaucaccacaguaaguuccu

SEQ ID NO: 3726948 - RNA, 20 nt, Human
ucuuaucucagauauuugca

SEQ ID NO: 3726949 - RNA, 21 nt, Human
ucuuaucucagauauuugcac

SEQ ID NO: 3726950 - RNA, 20 nt, Human
ucuuaucucagucaugcaua

SEQ ID NO: 3726951 - RNA, 16 nt, Human
ucuuaugaggagggga

SEQ ID NO: 3726952 - RNA, 15 nt, Human
ucuuaugcaaaaugg

SEQ ID NO: 3726953 - RNA, 17 nt, Human
ucuuaugcuuccagaaa

SEQ ID NO: 3726954 - RNA, 21 nt, Human
ucuuauggaauugauuugcau

SEQ ID NO: 3726955 - RNA, 12 nt, Human
ucuuauggaugu

SEQ ID NO: 3726956 - RNA, 14 nt, Human
ucuuaugggcuggg

SEQ ID NO: 3726957 - RNA, 18 nt, Human
ucuuauguaccucuuuua

SEQ ID NO: 3726958 - RNA, 16 nt, Human
ucuuaugugacauuaa

SEQ ID NO: 3726959 - RNA, 14 nt, Human
ucuuauuaaaacac

SEQ ID NO: 3726960 - RNA, 14 nt, Human
ucuuauuaaaguuu

SEQ ID NO: 3726961 - RNA, 18 nt, Human
ucuuauuaaaguuucaaa

SEQ ID NO: 3726962 - RNA, 20 nt, Human
ucuuauuaaaguuucaaaaa

SEQ ID NO: 3726963 - RNA, 21 nt, Human
ucuuauuaaaguuucaaaaau

SEQ ID NO: 3726964 - RNA, 23 nt, Human
ucuuauuauauauauaauauaua

SEQ ID NO: 3726965 - RNA, 17 nt, Human
ucuuauucaguaaaaaa

SEQ ID NO: 3726966 - RNA, 18 nt, Human
ucuuauuccauauuagaa

SEQ ID NO: 3726967 - RNA, 16 nt, Human
ucuuauugcgcugcua

SEQ ID NO: 3726968 - RNA, 17 nt, Human
ucuuauugcgcugcuac

SEQ ID NO: 3726969 - RNA, 15 nt, Human
ucuuauuucauuucu

SEQ ID NO: 3726970 - RNA, 14 nt, Human
ucuuauuuugugga

SEQ ID NO: 3726971 - RNA, 16 nt, Human
ucuucaaaaguaaugc

SEQ ID NO: 3726972 - RNA, 19 nt, Human
ucuucaaauccuuccaaaa

SEQ ID NO: 3726973 - RNA, 14 nt, Human
ucuucaaaugccug

SEQ ID NO: 3726974 - RNA, 24 nt, Human
ucuucaacaucaauguucauugua

SEQ ID NO: 3726975 - RNA, 17 nt, Human
ucuucaacauccugcca

SEQ ID NO: 3726976 - RNA, 18 nt, Human
ucuucaacauccugccag

SEQ ID NO: 3726977 - RNA, 19 nt, Human
ucuucaacauccugccagc

SEQ ID NO: 3726978 - RNA, 21 nt, Human
ucuucaacauccugccagccc

SEQ ID NO: 3726979 - RNA, 16 nt, Human
ucuucaagaucccauu

SEQ ID NO: 3726980 - RNA, 17 nt, Human
ucuucaccauuuggcaa

SEQ ID NO: 3726981 - RNA, 20 nt, Human
ucuucacccagcuaaucugu

SEQ ID NO: 3726982 - RNA, 19 nt, Human
ucuucacccaggccuaugu

SEQ ID NO: 3726983 - RNA, 23 nt, Human
ucuucacccaggccuauguugau

SEQ ID NO: 3726984 - RNA, 15 nt, Human
ucuucaccccggcag

SEQ ID NO: 3726985 - RNA, 18 nt, Human
ucuucaccccggcaggcc

SEQ ID NO: 3726986 - RNA, 20 nt, Human
ucuucaccccggcaggcccu

SEQ ID NO: 3726987 - RNA, 19 nt, Human
ucuucaccuaagucucugu

SEQ ID NO: 3726988 - RNA, 18 nt, Human
ucuucaccuccugccagc

SEQ ID NO: 3726989 - RNA, 21 nt, Human
ucuucaccugauucaacuaaa

SEQ ID NO: 3726990 - RNA, 15 nt, Human
ucuucacucuuaggc

SEQ ID NO: 3726991 - RNA, 16 nt, Human
ucuucacuuuugcaag

SEQ ID NO: 3726992 - RNA, 17 nt, Human
ucuucagagacuccugc

SEQ ID NO: 3726993 - RNA, 18 nt, Human
ucuucagagaucauggaa

SEQ ID NO: 3726994 - RNA, 14 nt, Human
ucuucagaucucua

SEQ ID NO: 3726995 - RNA, 13 nt, Human
ucuucagaugcca

SEQ ID NO: 3726996 - RNA, 21 nt, Human
ucuucagcaaaaauauuuuau

SEQ ID NO: 3726997 - RNA, 22 nt, Human
ucuucagcaaaaauauuuuaug

SEQ ID NO: 3726998 - RNA, 23 nt, Human
ucuucagcaaaaauauuuuauga

SEQ ID NO: 3726999 - RNA, 19 nt, Human
ucuucagcauucccuccca

SEQ ID NO: 3727000 - RNA, 19 nt, Human
ucuucagccaccucucuuu

SEQ ID NO: 3727001 - RNA, 20 nt, Human
ucuucagcuugugcacaauu

SEQ ID NO: 3727002 - RNA, 14 nt, Human
ucuucaggccuccc

SEQ ID NO: 3727003 - RNA, 13 nt, Human
ucuucagggcacu

SEQ ID NO: 3727004 - RNA, 16 nt, Human
ucuucagguggaaaaa

SEQ ID NO: 3727005 - RNA, 22 nt, Human
ucuucaguugguugugucuuuu

SEQ ID NO: 3727006 - RNA, 17 nt, Human
ucuucaguuugcagagu

SEQ ID NO: 3727007 - RNA, 18 nt, Human
ucuucaguuugcagagua

SEQ ID NO: 3727008 - RNA, 20 nt, Human
ucuucauaaaguacuugagu

SEQ ID NO: 3727009 - RNA, 19 nt, Human
ucuucaucugacuaugaca

SEQ ID NO: 3727010 - RNA, 16 nt, Human
ucuucaucugcccaac

SEQ ID NO: 3727011 - RNA, 13 nt, Human
ucuucaucuucac

SEQ ID NO: 3727012 - RNA, 16 nt, Human
ucuucaugaaaugcua

SEQ ID NO: 3727013 - RNA, 20 nt, Human
ucuucaugaguagugggcua

SEQ ID NO: 3727014 - RNA, 17 nt, Human
ucuucaugcaaugacau

SEQ ID NO: 3727015 - RNA, 17 nt, Human
ucuucauggugacacuc

SEQ ID NO: 3727016 - RNA, 16 nt, Human
ucuucauguucaauua

SEQ ID NO: 3727017 - RNA, 14 nt, Human
ucuucauguuccca

SEQ ID NO: 3727018 - RNA, 19 nt, Human
ucuucauguucccacuuca

SEQ ID NO: 3727019 - RNA, 22 nt, Human
ucuucauuaccucagugagaag

SEQ ID NO: 3727020 - RNA, 14 nt, Human
ucuucauuucauug

SEQ ID NO: 3727021 - RNA, 24 nt, Human
ucuucauuucauuguaugaugugu

SEQ ID NO: 3727022 - RNA, 19 nt, Human
ucuucauuuuuuuuaauug

SEQ ID NO: 3727023 - RNA, 21 nt, Human
ucuuccaaccauuuaucuuga

SEQ ID NO: 3727024 - RNA, 21 nt, Human
ucuuccaauuuaguuguugua

SEQ ID NO: 3727025 - RNA, 18 nt, Human
ucuuccacaaagaaaauu

SEQ ID NO: 3727026 - RNA, 15 nt, Human
ucuuccacacaugca

SEQ ID NO: 3727027 - RNA, 19 nt, Human
ucuuccagaagugugauug

SEQ ID NO: 3727028 - RNA, 14 nt, Human
ucuuccaggcuggg

SEQ ID NO: 3727029 - RNA, 17 nt, Human
ucuuccaggcugggaga

SEQ ID NO: 3727030 - RNA, 22 nt, Human
ucuuccaggcugggagagccuu

SEQ ID NO: 3727031 - RNA, 13 nt, Human
ucuuccagguggg

SEQ ID NO: 3727032 - RNA, 19 nt, Human
ucuuccagguggggugagg

SEQ ID NO: 3727033 - RNA, 18 nt, Human
ucuuccagucuuccugac

SEQ ID NO: 3727034 - RNA, 18 nt, Human
ucuuccaguuacuuucca

SEQ ID NO: 3727035 - RNA, 19 nt, Human
ucuuccaguuacuuuccaa

SEQ ID NO: 3727036 - RNA, 14 nt, Human
ucuuccaugcugug

SEQ ID NO: 3727037 - RNA, 16 nt, Human
ucuuccauguaucuuu

SEQ ID NO: 3727038 - RNA, 18 nt, Human
ucuucccaacuugccuuu

SEQ ID NO: 3727039 - RNA, 13 nt, Human
ucuucccaugcau

SEQ ID NO: 3727040 - RNA, 14 nt, Human
ucuucccauucucc

SEQ ID NO: 3727041 - RNA, 13 nt, Human
ucuuccccaggaa

SEQ ID NO: 3727042 - RNA, 14 nt, Human
ucuucccccaccac

SEQ ID NO: 3727043 - RNA, 15 nt, Human
ucuuccccuugcccu

SEQ ID NO: 3727044 - RNA, 19 nt, Human
ucuucccgaaccccaagga

SEQ ID NO: 3727045 - RNA, 14 nt, Human
ucuucccuaccuca

SEQ ID NO: 3727046 - RNA, 20 nt, Human
ucuucccuagggcugggugu

SEQ ID NO: 3727047 - RNA, 16 nt, Human
ucuucccucaaaugug

SEQ ID NO: 3727048 - RNA, 10 nt, Human
ucuucccucc

SEQ ID NO: 3727049 - RNA, 20 nt, Human
ucuucccugguaagaaaaag

SEQ ID NO: 3727050 - RNA, 13 nt, Human
ucuucccuuaaaa

SEQ ID NO: 3727051 - RNA, 21 nt, Human
ucuuccgacucuuucugagug

SEQ ID NO: 3727052 - RNA, 15 nt, Human
ucuuccgccccugcc

SEQ ID NO: 3727053 - RNA, 18 nt, Human
ucuuccgccccugccugc

SEQ ID NO: 3727054 - RNA, 15 nt, Human
ucuuccgucuccccc

SEQ ID NO: 3727055 - RNA, 20 nt, Human
ucuuccuaccaagucaaacu

SEQ ID NO: 3727056 - RNA, 17 nt, Human
ucuuccuacuggucucu

SEQ ID NO: 3727057 - RNA, 14 nt, Human
ucuuccuaucccau

SEQ ID NO: 3727058 - RNA, 18 nt, Human
ucuuccuaucccauccca

SEQ ID NO: 3727059 - RNA, 14 nt, Human
ucuuccuauuucag

SEQ ID NO: 3727060 - RNA, 15 nt, Human
ucuuccuauuucaga

SEQ ID NO: 3727061 - RNA, 13 nt, Human
ucuuccucagcca

SEQ ID NO: 3727062 - RNA, 18 nt, Human
ucuuccucagccagccuc

SEQ ID NO: 3727063 - RNA, 13 nt, Human
ucuuccuccagcu

SEQ ID NO: 3727064 - RNA, 15 nt, Human
ucuuccuccagcugc

SEQ ID NO: 3727065 - RNA, 17 nt, Human
ucuuccuccagcugcac

SEQ ID NO: 3727066 - RNA, 22 nt, Human
ucuuccucccaaguggugccua

SEQ ID NO: 3727067 - RNA, 17 nt, Human
ucuuccuccgaggccag

SEQ ID NO: 3727068 - RNA, 12 nt, Human
ucuuccuccuga

SEQ ID NO: 3727069 - RNA, 13 nt, Human
ucuuccucugagg

SEQ ID NO: 3727070 - RNA, 12 nt, Human
ucuuccucugcu

SEQ ID NO: 3727071 - RNA, 15 nt, Human
ugaaugacaaagagu

SEQ ID NO: 3727072 - RNA, 16 nt, Human
ugaaugacaaaguaug

SEQ ID NO: 3727073 - RNA, 22 nt, Human
ugaaugacuuccccaauaucuu

SEQ ID NO: 3727074 - RNA, 14 nt, Human
ugaaugagaaucua

SEQ ID NO: 3727075 - RNA, 22 nt, Human
ugaaugaggucccaggcagaga

SEQ ID NO: 3727076 - RNA, 14 nt, Human
ugaaugaugagccu

SEQ ID NO: 3727077 - RNA, 16 nt, Human
ugaaugauucaguguu

SEQ ID NO: 3727078 - RNA, 18 nt, Human
ugaaugauucauguuaua

SEQ ID NO: 3727079 - RNA, 19 nt, Human
ugaaugauuuccaaagaga

SEQ ID NO: 3727080 - RNA, 20 nt, Human
ugaaugauuuuucuuuacaa

SEQ ID NO: 3727081 - RNA, 20 nt, Human
ugaaugcagguuuuaucaga

SEQ ID NO: 3727082 - RNA, 14 nt, Human
ugaaugcauaaaau

SEQ ID NO: 3727083 - RNA, 16 nt, Human
ugaaugcauaaaaugu

SEQ ID NO: 3727084 - RNA, 18 nt, Human
ugaaugccagugugcuga

SEQ ID NO: 3727085 - RNA, 21 nt, Human
ugaaugccauagucaaagaga

SEQ ID NO: 3727086 - RNA, 20 nt, Human
ugaaugcccccagcuggccc

SEQ ID NO: 3727087 - RNA, 14 nt, Human
ugaaugccguggau

SEQ ID NO: 3727088 - RNA, 17 nt, Human
ugaaugccucaauguga

SEQ ID NO: 3727089 - RNA, 13 nt, Human
ugaaugccuccug

SEQ ID NO: 3727090 - RNA, 13 nt, Human
ugaaugcggccca

SEQ ID NO: 3727091 - RNA, 19 nt, Human
ugaaugcugggacucagcc

SEQ ID NO: 3727092 - RNA, 17 nt, Human
ugaaugcuuaaagaauu

SEQ ID NO: 3727093 - RNA, 21 nt, Human
ugaaugcuuaaagaauucaaa

SEQ ID NO: 3727094 - RNA, 21 nt, Human
ugaaugcuuugcauuuggaau

SEQ ID NO: 3727095 - RNA, 23 nt, Human
ugaaugcuuuuagugugugcaua

SEQ ID NO: 3727096 - RNA, 18 nt, Human
ugaaugcuuuuugaaugu

SEQ ID NO: 3727097 - RNA, 22 nt, Human
ugaauggacgguuuaggugaaa

SEQ ID NO: 3727098 - RNA, 14 nt, Human
ugaauggauuggau

SEQ ID NO: 3727099 - RNA, 12 nt, Human
ugaauggccugc

SEQ ID NO: 3727100 - RNA, 21 nt, Human
ugaauggccugccuugaagcc

SEQ ID NO: 3727101 - RNA, 21 nt, Human
ugaauggcuauguuuuuaaug

SEQ ID NO: 3727102 - RNA, 22 nt, Human
ugaauggcuuuguauagaaccu

SEQ ID NO: 3727103 - RNA, 18 nt, Human
ugaaugggaucaugaaag

SEQ ID NO: 3727104 - RNA, 17 nt, Human
ugaaugggcaaaacuga

SEQ ID NO: 3727105 - RNA, 20 nt, Human
ugaaugggcaaaacugaauu

SEQ ID NO: 3727106 - RNA, 18 nt, Human
ugaaugguguuguaugcc

SEQ ID NO: 3727107 - RNA, 19 nt, Human
ugaaugguuccaugccuga

SEQ ID NO: 3727108 - RNA, 22 nt, Human
ugaaugguuccaugccugaggg

SEQ ID NO: 3727109 - RNA, 15 nt, Human
ugaauguaaauuugu

SEQ ID NO: 3727110 - RNA, 19 nt, Human
ugaauguaaauuuguacua

SEQ ID NO: 3727111 - RNA, 15 nt, Human
ugaauguaauuugug

SEQ ID NO: 3727112 - RNA, 23 nt, Human
ugaauguauuuauuugggagacc

SEQ ID NO: 3727113 - RNA, 14 nt, Human
ugaaugucagugug

SEQ ID NO: 3727114 - RNA, 18 nt, Human
ugaaugucagugugacug

SEQ ID NO: 3727115 - RNA, 19 nt, Human
ugaaugucagugugacuga

SEQ ID NO: 3727116 - RNA, 16 nt, Human
ugaaugucuaaaauug

SEQ ID NO: 3727117 - RNA, 20 nt, Human
ugaaugucuaaggucacaca

SEQ ID NO: 3727118 - RNA, 13 nt, Human
ugaaugugaagcc

SEQ ID NO: 3727119 - RNA, 20 nt, Human
ugaaugugcugaucauuuga

SEQ ID NO: 3727120 - RNA, 15 nt, Human
ugaaugugggcacug

SEQ ID NO: 3727121 - RNA, 16 nt, Human
ugaauguguuucacag

SEQ ID NO: 3727122 - RNA, 17 nt, Human
ugaauguguuucacagu

SEQ ID NO: 3727123 - RNA, 22 nt, Human
ugaauguguuucacaguuugaa

SEQ ID NO: 3727124 - RNA, 21 nt, Human
ugaauguuaaagggauauuuu

SEQ ID NO: 3727125 - RNA, 13 nt, Human
ugaauguuaaaua

SEQ ID NO: 3727126 - RNA, 20 nt, Human
ugaauguuaaauaaauugua

SEQ ID NO: 3727127 - RNA, 14 nt, Human
ugaauguuaagaau

SEQ ID NO: 3727128 - RNA, 15 nt, Human
ugaauguuauuuguu

SEQ ID NO: 3727129 - RNA, 23 nt, Human
ugaauguuauuuguuauuuucag

SEQ ID NO: 3727130 - RNA, 21 nt, Human
ugaauguugucuguuuguucu

SEQ ID NO: 3727131 - RNA, 22 nt, Human
ugaauguuuccaaccuggagua

SEQ ID NO: 3727132 - RNA, 18 nt, Human
ugaauguuuuucuaaagg

SEQ ID NO: 3727133 - RNA, 11 nt, Human
ugaauuaaaac

SEQ ID NO: 3727134 - RNA, 16 nt, Human
ugaauuaaaacuucuu

SEQ ID NO: 3727135 - RNA, 18 nt, Human
ugaauuaaaacuucuuaa

SEQ ID NO: 3727136 - RNA, 15 nt, Human
ugaauuaaaguaauu

SEQ ID NO: 3727137 - RNA, 17 nt, Human
ugaauuaaauaaacccu

SEQ ID NO: 3727138 - RNA, 16 nt, Human
ugaauuaaauuaggaa

SEQ ID NO: 3727139 - RNA, 18 nt, Human
ugaauuaagcccaauuaa

SEQ ID NO: 3727140 - RNA, 22 nt, Human
ugaauuaauaucccuacaugua

SEQ ID NO: 3727141 - RNA, 13 nt, Human
ugaauuacuaacu

SEQ ID NO: 3727142 - RNA, 18 nt, Human
ugaauuacuaacuucuaa

SEQ ID NO: 3727143 - RNA, 23 nt, Human
ugaauuagaaacauaaauaaaau

SEQ ID NO: 3727144 - RNA, 16 nt, Human
ugaauuaguccuugcu

SEQ ID NO: 3727145 - RNA, 18 nt, Human
ugaauuagugaguauagu

SEQ ID NO: 3727146 - RNA, 15 nt, Human
ugaauuaucagcaaa

SEQ ID NO: 3727147 - RNA, 18 nt, Human
ugaauuaucagcaaagaa

SEQ ID NO: 3727148 - RNA, 19 nt, Human
ugaauuaucagcaaagaaa

SEQ ID NO: 3727149 - RNA, 20 nt, Human
ugaauuaucagcaaagaaaa

SEQ ID NO: 3727150 - RNA, 20 nt, Human
ugaauuaucccuuuucuuga

SEQ ID NO: 3727151 - RNA, 15 nt, Human
ugaauuaucuauaca

SEQ ID NO: 3727152 - RNA, 15 nt, Human
ugaauuauugacacu

SEQ ID NO: 3727153 - RNA, 16 nt, Human
ugaauuauuuucucuc

SEQ ID NO: 3727154 - RNA, 16 nt, Human
ugaauuccuaaaauua

SEQ ID NO: 3727155 - RNA, 18 nt, Human
ugaauuccuagaauuaaa

SEQ ID NO: 3727156 - RNA, 19 nt, Human
ugaauucugcaauguuuuc

SEQ ID NO: 3727157 - RNA, 17 nt, Human
ugaauucuuaugcuuau

SEQ ID NO: 3727158 - RNA, 17 nt, Human
ugaauugauaauaaacu

SEQ ID NO: 3727159 - RNA, 13 nt, Human
ugaauugauuuug

SEQ ID NO: 3727160 - RNA, 22 nt, Human
ugaauugcauuuuuuaaaacaa

SEQ ID NO: 3727161 - RNA, 16 nt, Human
ugaauugcguuggucu

SEQ ID NO: 3727162 - RNA, 15 nt, Human
ugaauuggaaugcac

SEQ ID NO: 3727163 - RNA, 21 nt, Human
ugaauuguaaggaaugauuaa

SEQ ID NO: 3727164 - RNA, 13 nt, Human
ugaauuguuacau

SEQ ID NO: 3727165 - RNA, 17 nt, Human
ugaauuguuuucuuuaa

SEQ ID NO: 3727166 - RNA, 12 nt, Human
ugaauuuaaaua

SEQ ID NO: 3727167 - RNA, 16 nt, Human
ugaauuuaaauagcuu

SEQ ID NO: 3727168 - RNA, 14 nt, Human
ugaauuuaaauaua

SEQ ID NO: 3727169 - RNA, 15 nt, Human
ugaauuuaaauauaa

SEQ ID NO: 3727170 - RNA, 20 nt, Human
ugaauuuagugagauuuacc

SEQ ID NO: 3727171 - RNA, 17 nt, Human
ugaauuuagugagcaua

SEQ ID NO: 3727172 - RNA, 21 nt, Human
ugaauuuagugagcauaggug

SEQ ID NO: 3727173 - RNA, 15 nt, Human
ugaauuuauuauugu

SEQ ID NO: 3727174 - RNA, 18 nt, Human
ugaauuuauuauuguucu

SEQ ID NO: 3727175 - RNA, 22 nt, Human
ugaauuuauuggcuuuucugau

SEQ ID NO: 3727176 - RNA, 13 nt, Human
ugaauuucuaaaa

SEQ ID NO: 3727177 - RNA, 15 nt, Human
ugaauuucuuuugcc

SEQ ID NO: 3727178 - RNA, 23 nt, Human
ugaauuucuuuugccguuauuaa

SEQ ID NO: 3727179 - RNA, 12 nt, Human
ugaauuugcaaa

SEQ ID NO: 3727180 - RNA, 20 nt, Human
ugaauuugcaaaguacugua

SEQ ID NO: 3727181 - RNA, 21 nt, Human
ugaauuugcaaaguacuguaa

SEQ ID NO: 3727182 - RNA, 18 nt, Human
ugaauuugcccugggaaa

SEQ ID NO: 3727183 - RNA, 15 nt, Human
ugaauuuggagacuc

SEQ ID NO: 3727184 - RNA, 17 nt, Human
ugaauuuggagacucug

SEQ ID NO: 3727185 - RNA, 21 nt, Human
ugaauuuggccugcacuaauu

SEQ ID NO: 3727186 - RNA, 21 nt, Human
ugaauuuguaaugucuugagc

SEQ ID NO: 3727187 - RNA, 13 nt, Human
ugaauuuguacuu

SEQ ID NO: 3727188 - RNA, 23 nt, Human
ugaauuugugaagguggaaauaa

SEQ ID NO: 3727189 - RNA, 23 nt, Human
ugaauuuuaaaucuaaaucuauu

SEQ ID NO: 3727190 - RNA, 14 nt, Human
ugaauuuuaagggu

SEQ ID NO: 3727191 - RNA, 16 nt, Human
ugaauuuuacauggcu

SEQ ID NO: 3727192 - RNA, 13 nt, Human
ugaauuuuagcuu

SEQ ID NO: 3727193 - RNA, 16 nt, Human
ugaauuuuagcuuuug

SEQ ID NO: 3727194 - RNA, 19 nt, Human
ugaauuuuagcuuuugugg

SEQ ID NO: 3727195 - RNA, 15 nt, Human
ugaauuuucauuuua

SEQ ID NO: 3727196 - RNA, 18 nt, Human
ugaauuuucauuuuacag

SEQ ID NO: 3727197 - RNA, 19 nt, Human
ugaauuuucauuuuacagu

SEQ ID NO: 3727198 - RNA, 16 nt, Human
ugaauuuucccacugc

SEQ ID NO: 3727199 - RNA, 17 nt, Human
ugaauuuucuaaaagcu

SEQ ID NO: 3727200 - RNA, 22 nt, Human
ugaauuuucuaaaagcuuucau

SEQ ID NO: 3727201 - RNA, 23 nt, Human
ugaauuuucuuuuuaauaaaaag

SEQ ID NO: 3727202 - RNA, 22 nt, Human
ugaauuuuggggauuuucaaaa

SEQ ID NO: 3727203 - RNA, 22 nt, Human
ugaauuuuguucucugggagaa

SEQ ID NO: 3727204 - RNA, 21 nt, Human
ugaauuuuuaaacaaguauuu

SEQ ID NO: 3727205 - RNA, 23 nt, Human
ugaauuuuuaaacaaguauuugu

SEQ ID NO: 3727206 - RNA, 13 nt, Human
ugaauuuuuaagc

SEQ ID NO: 3727207 - RNA, 23 nt, Human
ugaauuuuuauauauauaucugu

SEQ ID NO: 3727208 - RNA, 15 nt, Human
ugaauuuuuauuguu

SEQ ID NO: 3727209 - RNA, 13 nt, Human
ugaauuuuucucu

SEQ ID NO: 3727210 - RNA, 15 nt, Human
ugaauuuuucucuaa

SEQ ID NO: 3727211 - RNA, 15 nt, Human
ugaauuuuucucuuc

SEQ ID NO: 3727212 - RNA, 21 nt, Human
ugaauuuuuuucaucuucucu

SEQ ID NO: 3727213 - RNA, 18 nt, Human
ugaauuuuuuuguaauaa

SEQ ID NO: 3727214 - RNA, 21 nt, Human
ugaauuuuuuuuaacauuccu

SEQ ID NO: 3727215 - RNA, 21 nt, Human
ugacaaaaaauguuuuaaaga

SEQ ID NO: 3727216 - RNA, 18 nt, Human
ugacaaaaauucaacuca

SEQ ID NO: 3727217 - RNA, 15 nt, Human
ugacaaaauguuauu

SEQ ID NO: 3727218 - RNA, 18 nt, Human
ugacaaaauuuguugaaa

SEQ ID NO: 3727219 - RNA, 17 nt, Human
ugacaaaccucuaaccc

SEQ ID NO: 3727220 - RNA, 18 nt, Human
ucuuccugaguggugcca

SEQ ID NO: 3727221 - RNA, 13 nt, Human
ucuuccugccccu

SEQ ID NO: 3727222 - RNA, 16 nt, Human
ucuuccugccccucuu

SEQ ID NO: 3727223 - RNA, 17 nt, Human
ucuuccugccccucuuu

SEQ ID NO: 3727224 - RNA, 13 nt, Human
ucuuccuggacag

SEQ ID NO: 3727225 - RNA, 17 nt, Human
ucuuccuggauuauuca

SEQ ID NO: 3727226 - RNA, 22 nt, Human
ucuuccuggcuuuuuaacuccc

SEQ ID NO: 3727227 - RNA, 15 nt, Human
ucuuccuguaaucuu

SEQ ID NO: 3727228 - RNA, 12 nt, Human
ucuuccuguggg

SEQ ID NO: 3727229 - RNA, 13 nt, Human
ucuuccugugucc

SEQ ID NO: 3727230 - RNA, 20 nt, Human
ucuuccuuacuuuuuauaua

SEQ ID NO: 3727231 - RNA, 15 nt, Human
ucuuccuucccugcu

SEQ ID NO: 3727232 - RNA, 15 nt, Human
ucuuccuugauguuu

SEQ ID NO: 3727233 - RNA, 18 nt, Human
ucuuccuugauguuuggg

SEQ ID NO: 3727234 - RNA, 13 nt, Human
ucuuccuuuacuu

SEQ ID NO: 3727235 - RNA, 19 nt, Human
ucuuccuuuacuuucccuu

SEQ ID NO: 3727236 - RNA, 17 nt, Human
ucuucgaagccuugccu

SEQ ID NO: 3727237 - RNA, 22 nt, Human
ucuucgacuguuguuaucuguu

SEQ ID NO: 3727238 - RNA, 23 nt, Human
ucuucgcgcccgccccugcagca

SEQ ID NO: 3727239 - RNA, 14 nt, Human
ucuucgggaagaga

SEQ ID NO: 3727240 - RNA, 22 nt, Human
ucuucgggaagagaggaguuca

SEQ ID NO: 3727241 - RNA, 14 nt, Human
ucuucgggaccagg

SEQ ID NO: 3727242 - RNA, 15 nt, Human
ucuucguacaguucu

SEQ ID NO: 3727243 - RNA, 18 nt, Human
ucuucgucuucacucuua

SEQ ID NO: 3727244 - RNA, 19 nt, Human
ucuucguucuuuuuaaguu

SEQ ID NO: 3727245 - RNA, 23 nt, Human
ucuucuagagccgugaugccucc

SEQ ID NO: 3727246 - RNA, 22 nt, Human
ucuucuagaugauuuuuugaaa

SEQ ID NO: 3727247 - RNA, 22 nt, Human
ucuucuauuuauuuauuuauuc

SEQ ID NO: 3727248 - RNA, 16 nt, Human
ucuucuauuuuauucc

SEQ ID NO: 3727249 - RNA, 13 nt, Human
ucuucuauuuugu

SEQ ID NO: 3727250 - RNA, 16 nt, Human
ucuucucaagugccuu

SEQ ID NO: 3727251 - RNA, 14 nt, Human
ucuucucaaguucu

SEQ ID NO: 3727252 - RNA, 17 nt, Human
ucuucucaaguucuaag

SEQ ID NO: 3727253 - RNA, 23 nt, Human
ucuucucaaguucuaagauucua

SEQ ID NO: 3727254 - RNA, 14 nt, Human
ucuucucagccacu

SEQ ID NO: 3727255 - RNA, 14 nt, Human
ucuucucaggcucu

SEQ ID NO: 3727256 - RNA, 19 nt, Human
ucuucucauagcauuaacu

SEQ ID NO: 3727257 - RNA, 15 nt, Human
ucuucucauuacuug

SEQ ID NO: 3727258 - RNA, 15 nt, Human
ucuucucauuucacc

SEQ ID NO: 3727259 - RNA, 22 nt, Human
ucuucucauuucaccccucccu

SEQ ID NO: 3727260 - RNA, 16 nt, Human
ucuucuccacuggaug

SEQ ID NO: 3727261 - RNA, 21 nt, Human
ucuucuccacuuucuagccag

SEQ ID NO: 3727262 - RNA, 17 nt, Human
ucuucuccagauuuuuc

SEQ ID NO: 3727263 - RNA, 14 nt, Human
ucuucuccaggaug

SEQ ID NO: 3727264 - RNA, 12 nt, Human
ucuucuccaggc

SEQ ID NO: 3727265 - RNA, 15 nt, Human
ucuucuccaggcugu

SEQ ID NO: 3727266 - RNA, 14 nt, Human
ucuucuccaucugg

SEQ ID NO: 3727267 - RNA, 12 nt, Human
ucuucucccaga

SEQ ID NO: 3727268 - RNA, 13 nt, Human
ucuucucccccau

SEQ ID NO: 3727269 - RNA, 16 nt, Human
ucuucucccccauccu

SEQ ID NO: 3727270 - RNA, 16 nt, Human
ucuucuccccuuccau

SEQ ID NO: 3727271 - RNA, 15 nt, Human
ucuucucccuggaau

SEQ ID NO: 3727272 - RNA, 12 nt, Human
ucuucucucaga

SEQ ID NO: 3727273 - RNA, 14 nt, Human
ucuucucuccagcu

SEQ ID NO: 3727274 - RNA, 18 nt, Human
ucuucucuccagcugacu

SEQ ID NO: 3727275 - RNA, 24 nt, Human
ucuucugaacucaaacugaggaau

SEQ ID NO: 3727276 - RNA, 14 nt, Human
ucuucugacaaacu

SEQ ID NO: 3727277 - RNA, 17 nt, Human
ucuucugacgugccuuu

SEQ ID NO: 3727278 - RNA, 21 nt, Human
ucuucugacuuaagugugcaa

SEQ ID NO: 3727279 - RNA, 21 nt, Human
ucuucugagcuauuucaucua

SEQ ID NO: 3727280 - RNA, 13 nt, Human
ucuucugccaaga

SEQ ID NO: 3727281 - RNA, 12 nt, Human
ucuucugccugu

SEQ ID NO: 3727282 - RNA, 15 nt, Human
ucuucugccuguuau

SEQ ID NO: 3727283 - RNA, 17 nt, Human
ucuucugcgccucaggc

SEQ ID NO: 3727284 - RNA, 17 nt, Human
ucuucugcuccacccuu

SEQ ID NO: 3727285 - RNA, 13 nt, Human
ucuucugcuuugu

SEQ ID NO: 3727286 - RNA, 17 nt, Human
ucuucuggagucuccag

SEQ ID NO: 3727287 - RNA, 19 nt, Human
ucuucuggagucuccagug

SEQ ID NO: 3727288 - RNA, 12 nt, Human
ucuucuggcuca

SEQ ID NO: 3727289 - RNA, 18 nt, Human
ucuucuggcucaaaaaga

SEQ ID NO: 3727290 - RNA, 21 nt, Human
ucuucuggcucaaaaagagaa

SEQ ID NO: 3727291 - RNA, 20 nt, Human
ucuucuguauauaaauggga

SEQ ID NO: 3727292 - RNA, 24 nt, Human
ucuucuguauauaaaugggaacau

SEQ ID NO: 3727293 - RNA, 14 nt, Human
ucuucuguauuuuu

SEQ ID NO: 3727294 - RNA, 12 nt, Human
ucuucugucccu

SEQ ID NO: 3727295 - RNA, 13 nt, Human
ucuucuguggacc

SEQ ID NO: 3727296 - RNA, 20 nt, Human
ucuucuguggguuucuaaag

SEQ ID NO: 3727297 - RNA, 12 nt, Human
ucuucuguguuu

SEQ ID NO: 3727298 - RNA, 13 nt, Human
ucuucuuaacuua

SEQ ID NO: 3727299 - RNA, 13 nt, Human
ucuucuucaccau

SEQ ID NO: 3727300 - RNA, 14 nt, Human
ucuucuucaccauu

SEQ ID NO: 3727301 - RNA, 14 nt, Human
ucuucuuccaggua

SEQ ID NO: 3727302 - RNA, 19 nt, Human
ucuucuuccugaagcugag

SEQ ID NO: 3727303 - RNA, 14 nt, Human
ucuucuucuucaga

SEQ ID NO: 3727304 - RNA, 13 nt, Human
ucuucuugaaauu

SEQ ID NO: 3727305 - RNA, 19 nt, Human
ucuucuuggccaugggagg

SEQ ID NO: 3727306 - RNA, 19 nt, Human
ucuucuuggggcccagugc

SEQ ID NO: 3727307 - RNA, 20 nt, Human
ucuucuuggggcccagugca

SEQ ID NO: 3727308 - RNA, 16 nt, Human
ucuucuuggucucagu

SEQ ID NO: 3727309 - RNA, 17 nt, Human
ucuucuuguucugagau

SEQ ID NO: 3727310 - RNA, 23 nt, Human
ucuucuuuaggauugugaugguu

SEQ ID NO: 3727311 - RNA, 21 nt, Human
ucuucuuuuugaaaucagcau

SEQ ID NO: 3727312 - RNA, 15 nt, Human
ucuucuuuuugcugu

SEQ ID NO: 3727313 - RNA, 18 nt, Human
ucuucuuuuugcuguugu

SEQ ID NO: 3727314 - RNA, 19 nt, Human
ucuucuuuuugcuucaaaa

SEQ ID NO: 3727315 - RNA, 12 nt, Human
ucuugaaaugaa

SEQ ID NO: 3727316 - RNA, 13 nt, Human
ucuugaaaugaaa

SEQ ID NO: 3727317 - RNA, 20 nt, Human
ucuugaacacucaugcugaa

SEQ ID NO: 3727318 - RNA, 16 nt, Human
ucuugaaccagaacca

SEQ ID NO: 3727319 - RNA, 12 nt, Human
ucuugaacuccu

SEQ ID NO: 3727320 - RNA, 17 nt, Human
ucuugaacuccugaccu

SEQ ID NO: 3727321 - RNA, 18 nt, Human
ucuugaacuccuggccuc

SEQ ID NO: 3727322 - RNA, 19 nt, Human
ucuugaaggaaaaugauac

SEQ ID NO: 3727323 - RNA, 23 nt, Human
ucuugaaguccuggcuucaggca

SEQ ID NO: 3727324 - RNA, 20 nt, Human
ucuugaauacucugcccucu

SEQ ID NO: 3727325 - RNA, 14 nt, Human
ucuugaauauaaaa

SEQ ID NO: 3727326 - RNA, 22 nt, Human
ucuugaaucuagggagggggaa

SEQ ID NO: 3727327 - RNA, 16 nt, Human
ucuugaaugucuuuug

SEQ ID NO: 3727328 - RNA, 11 nt, Human
ucuugaaugug

SEQ ID NO: 3727329 - RNA, 18 nt, Human
ucuugaauguggucucag

SEQ ID NO: 3727330 - RNA, 21 nt, Human
ucuugaauuguaaggaaugau

SEQ ID NO: 3727331 - RNA, 23 nt, Human
ucuugaauuuaauaaucuguagg

SEQ ID NO: 3727332 - RNA, 13 nt, Human
ucuugacaaaacc

SEQ ID NO: 3727333 - RNA, 22 nt, Human
ucuugacaccagcuguucuguc

SEQ ID NO: 3727334 - RNA, 19 nt, Human
ucuugacauucaaggcauu

SEQ ID NO: 3727335 - RNA, 21 nt, Human
ucuugaccaagcaggaagcuc

SEQ ID NO: 3727336 - RNA, 20 nt, Human
ucuugacgagugugaagcuu

SEQ ID NO: 3727337 - RNA, 16 nt, Human
ucuugacuacagucag

SEQ ID NO: 3727338 - RNA, 13 nt, Human
ucuugacuauugg

SEQ ID NO: 3727339 - RNA, 14 nt, Human
ucuugagcaguggc

SEQ ID NO: 3727340 - RNA, 19 nt, Human
ucuugagccuugaacuuug

SEQ ID NO: 3727341 - RNA, 13 nt, Human
ucuugagcucuau

SEQ ID NO: 3727342 - RNA, 14 nt, Human
ucuugagcucuauu

SEQ ID NO: 3727343 - RNA, 23 nt, Human
ucuugagcuggccucucuagcac

SEQ ID NO: 3727344 - RNA, 15 nt, Human
ucuugaggccaggag

SEQ ID NO: 3727345 - RNA, 13 nt, Human
ucuugauacauuc

SEQ ID NO: 3727346 - RNA, 14 nt, Human
ucuugauacauuca

SEQ ID NO: 3727347 - RNA, 18 nt, Human
ucuugauacauucaaauu

SEQ ID NO: 3727348 - RNA, 19 nt, Human
ucuugauacauucaaauuu

SEQ ID NO: 3727349 - RNA, 20 nt, Human
ucuugauaccccccucuguc

SEQ ID NO: 3727350 - RNA, 22 nt, Human
ucuugauaccccccucugucuu

SEQ ID NO: 3727351 - RNA, 20 nt, Human
ucuugaucaacaucuuuucu

SEQ ID NO: 3727352 - RNA, 23 nt, Human
ucuugaucaacaucuuuucuugc

SEQ ID NO: 3727353 - RNA, 17 nt, Human
ucuugaucaguuaagaa

SEQ ID NO: 3727354 - RNA, 23 nt, Human
ucuugaucaguuaagaaauuuca

SEQ ID NO: 3727355 - RNA, 17 nt, Human
ucuugaucugcucagcc

SEQ ID NO: 3727356 - RNA, 19 nt, Human
ucuugaucugcucagcccu

SEQ ID NO: 3727357 - RNA, 20 nt, Human
ucuugaucugcucagcccug

SEQ ID NO: 3727358 - RNA, 21 nt, Human
ucuugaucugcucagcccugg

SEQ ID NO: 3727359 - RNA, 16 nt, Human
ucuugaugacuggaau

SEQ ID NO: 3727360 - RNA, 13 nt, Human
ucuugaugcaugc

SEQ ID NO: 3727361 - RNA, 14 nt, Human
ucuugauguaaaau

SEQ ID NO: 3727362 - RNA, 15 nt, Human
ucuugauguaaaauc

SEQ ID NO: 3727363 - RNA, 19 nt, Human
ucuugauguaaaaucuugu

SEQ ID NO: 3727364 - RNA, 22 nt, Human
ucuugauguaaaaucuugucau

SEQ ID NO: 3727365 - RNA, 21 nt, Human
ucuugauguaaggaugggcau

SEQ ID NO: 3727366 - RNA, 16 nt, Human
ucuugauguugcuuag

SEQ ID NO: 3727367 - RNA, 13 nt, Human
ucuugauucauaa

SEQ ID NO: 3727368 - RNA, 13 nt, Human
ucuugauuugagu

SEQ ID NO: 3727369 - RNA, 19 nt, Human
ucuugauuuguuuuagaau

SEQ ID NO: 3727370 - RNA, 13 nt, Human
ucuugcaauggca

SEQ ID NO: 3727371 - RNA, 22 nt, Human
gggccucgguguggagaagcgg

SEQ ID NO: 3727372 - RNA, 19 nt, Human
gggccucuuaugggcuggg

SEQ ID NO: 3727373 - RNA, 21 nt, Human
gggccucuuggaaaaagugau

SEQ ID NO: 3727374 - RNA, 23 nt, Human
gggccugaccucccccuccuucc

SEQ ID NO: 3727375 - RNA, 14 nt, Human
gggccugacugcuc

SEQ ID NO: 3727376 - RNA, 15 nt, Human
gggccugagccuggc

SEQ ID NO: 3727377 - RNA, 18 nt, Human
gggccugagccuggccag

SEQ ID NO: 3727378 - RNA, 18 nt, Human
gggccugaggcuccuuag

SEQ ID NO: 3727379 - RNA, 16 nt, Human
gggccugcccagacaa

SEQ ID NO: 3727380 - RNA, 14 nt, Human
gggccugcccagug

SEQ ID NO: 3727381 - RNA, 13 nt, Human
gggccugcuccag

SEQ ID NO: 3727382 - RNA, 14 nt, Human
gggccugcuccaga

SEQ ID NO: 3727383 - RNA, 17 nt, Human
gggccugcugcugagaa

SEQ ID NO: 3727384 - RNA, 20 nt, Human
gggccugcugcugagaaccu

SEQ ID NO: 3727385 - RNA, 23 nt, Human
gggccugcugcugagaaccuggc

SEQ ID NO: 3727386 - RNA, 14 nt, Human
gggccugcuggagg

SEQ ID NO: 3727387 - RNA, 15 nt, Human
gggccugcuggaggc

SEQ ID NO: 3727388 - RNA, 21 nt, Human
gggccugcuggaggccucagg

SEQ ID NO: 3727389 - RNA, 13 nt, Human
gggccuggaccug

SEQ ID NO: 3727390 - RNA, 18 nt, Human
gggccuggagcaggccuu

SEQ ID NO: 3727391 - RNA, 20 nt, Human
gggccuggauucauuuccug

SEQ ID NO: 3727392 - RNA, 10 nt, Human
gggccuggca

SEQ ID NO: 3727393 - RNA, 13 nt, Human
gggccuggcaggg

SEQ ID NO: 3727394 - RNA, 22 nt, Human
gggccuggcauucuuguacagu

SEQ ID NO: 3727395 - RNA, 14 nt, Human
gggccuggcccaug

SEQ ID NO: 3727396 - RNA, 14 nt, Human
gggccuggccugag

SEQ ID NO: 3727397 - RNA, 19 nt, Human
gggccuggccugagcuggg

SEQ ID NO: 3727398 - RNA, 20 nt, Human
gggccuggcgggaugggcca

SEQ ID NO: 3727399 - RNA, 22 nt, Human
gggccuggcgggaugggccacc

SEQ ID NO: 3727400 - RNA, 14 nt, Human
gggccuggcucagg

SEQ ID NO: 3727401 - RNA, 17 nt, Human
gggccuggcucaggugg

SEQ ID NO: 3727402 - RNA, 15 nt, Human
gggccuggcucccuc

SEQ ID NO: 3727403 - RNA, 17 nt, Human
gggccuggcucccucac

SEQ ID NO: 3727404 - RNA, 13 nt, Human
gggccuggcuggc

SEQ ID NO: 3727405 - RNA, 16 nt, Human
gggccuggcuggcuga

SEQ ID NO: 3727406 - RNA, 17 nt, Human
gggccuggcuggcugag

SEQ ID NO: 3727407 - RNA, 23 nt, Human
gggccuggcuggcugagggcagu

SEQ ID NO: 3727408 - RNA, 13 nt, Human
gggccugggcagg

SEQ ID NO: 3727409 - RNA, 16 nt, Human
gggccugggcaggagg

SEQ ID NO: 3727410 - RNA, 15 nt, Human
gggccugggccuggc

SEQ ID NO: 3727411 - RNA, 18 nt, Human
gggccugggcuccuggac

SEQ ID NO: 3727412 - RNA, 16 nt, Human
gggccuggucccuggg

SEQ ID NO: 3727413 - RNA, 18 nt, Human
gggccuggucguuuucaa

SEQ ID NO: 3727414 - RNA, 21 nt, Human
gggccuggucucacccuggag

SEQ ID NO: 3727415 - RNA, 22 nt, Human
gggccugguuaaauaaggcagg

SEQ ID NO: 3727416 - RNA, 15 nt, Human
gggccugguugaaga

SEQ ID NO: 3727417 - RNA, 20 nt, Human
gggccuguacaaaagggaca

SEQ ID NO: 3727418 - RNA, 21 nt, Human
gggccuguacagucugucuuc

SEQ ID NO: 3727419 - RNA, 18 nt, Human
gggccuguacugccugcu

SEQ ID NO: 3727420 - RNA, 14 nt, Human
gggccuguugcccu

SEQ ID NO: 3727421 - RNA, 21 nt, Human
gggccuuagggcacugggcug

SEQ ID NO: 3727422 - RNA, 17 nt, Human
gggccuuagugggccag

SEQ ID NO: 3727423 - RNA, 18 nt, Human
gggccuuagugggccagg

SEQ ID NO: 3727424 - RNA, 22 nt, Human
gggccuuagugggccagggcug

SEQ ID NO: 3727425 - RNA, 22 nt, Human
gggccuugcccagagaugccuc

SEQ ID NO: 3727426 - RNA, 21 nt, Human
gggccuugcgguauccgcccc

SEQ ID NO: 3727427 - RNA, 23 nt, Human
gggccuugcuaccucaaggggga

SEQ ID NO: 3727428 - RNA, 20 nt, Human
gggccuuuguucugggggga

SEQ ID NO: 3727429 - RNA, 19 nt, Human
gggcgaagcccaggccccu

SEQ ID NO: 3727430 - RNA, 18 nt, Human
gggcgagucacugccucu

SEQ ID NO: 3727431 - RNA, 13 nt, Human
gggcgcccaccuc

SEQ ID NO: 3727432 - RNA, 20 nt, Human
gggcgccgugcugggcagcc

SEQ ID NO: 3727433 - RNA, 24 nt, Human
gggcgccgugcugggcagcccgcu

SEQ ID NO: 3727434 - RNA, 18 nt, Human
gggcgcgaucccacacag

SEQ ID NO: 3727435 - RNA, 18 nt, Human
gggcgcggccagccccgg

SEQ ID NO: 3727436 - RNA, 15 nt, Human
gggcgcuggcccagc

SEQ ID NO: 3727437 - RNA, 16 nt, Human
gggcgcuggcccagcc

SEQ ID NO: 3727438 - RNA, 17 nt, Human
gggcgcuggcccagccg

SEQ ID NO: 3727439 - RNA, 18 nt, Human
gggcgcuggcccagccgg

SEQ ID NO: 3727440 - RNA, 19 nt, Human
gggcgcuggcccagccggc

SEQ ID NO: 3727441 - RNA, 17 nt, Human
gggcgucuguucccccu

SEQ ID NO: 3727442 - RNA, 16 nt, Human
gggcgugagaccugcc

SEQ ID NO: 3727443 - RNA, 15 nt, Human
gggcguggagggagg

SEQ ID NO: 3727444 - RNA, 21 nt, Human
gggcguggagggaggccccag

SEQ ID NO: 3727445 - RNA, 19 nt, Human
gggcguggucacugcuguc

SEQ ID NO: 3727446 - RNA, 13 nt, Human
gggcuaauuuaac

SEQ ID NO: 3727447 - RNA, 19 nt, Human
gggcuacccugagcugagg

SEQ ID NO: 3727448 - RNA, 21 nt, Human
gggcuacccugagcugaggca

SEQ ID NO: 3727449 - RNA, 18 nt, Human
gggcuaguugggcuuccu

SEQ ID NO: 3727450 - RNA, 13 nt, Human
gggcuauggacac

SEQ ID NO: 3727451 - RNA, 22 nt, Human
gggcucaagcaauccucucacc

SEQ ID NO: 3727452 - RNA, 18 nt, Human
gggcucagcaaaagaugc

SEQ ID NO: 3727453 - RNA, 20 nt, Human
gggcucagcaaggccaccuc

SEQ ID NO: 3727454 - RNA, 16 nt, Human
gggcucagccuggugg

SEQ ID NO: 3727455 - RNA, 20 nt, Human
gggcucagccuggugggccu

SEQ ID NO: 3727456 - RNA, 19 nt, Human
gggcucagcggggacagcu

SEQ ID NO: 3727457 - RNA, 21 nt, Human
gggcucagcggggacagcucc

SEQ ID NO: 3727458 - RNA, 22 nt, Human
gggcucagcucuggcucacaga

SEQ ID NO: 3727459 - RNA, 13 nt, Human
gggcucaggaaaa

SEQ ID NO: 3727460 - RNA, 20 nt, Human
gggcucagggaccacagcaa

SEQ ID NO: 3727461 - RNA, 11 nt, Human
gggcucccagg

SEQ ID NO: 3727462 - RNA, 13 nt, Human
gggcucccagggg

SEQ ID NO: 3727463 - RNA, 13 nt, Human
gggcuccccucuu

SEQ ID NO: 3727464 - RNA, 20 nt, Human
gggcuccccuuucgcccaca

SEQ ID NO: 3727465 - RNA, 13 nt, Human
gggcucccgccuc

SEQ ID NO: 3727466 - RNA, 18 nt, Human
gggcucccgccuccaacc

SEQ ID NO: 3727467 - RNA, 19 nt, Human
gggcucccgccuccaaccc

SEQ ID NO: 3727468 - RNA, 14 nt, Human
gggcucccuccgcc

SEQ ID NO: 3727469 - RNA, 23 nt, Human
gggcucccuccgcccccagguag

SEQ ID NO: 3727470 - RNA, 14 nt, Human
gggcucccugacug

SEQ ID NO: 3727471 - RNA, 13 nt, Human
gggcucccuucau

SEQ ID NO: 3727472 - RNA, 13 nt, Human
gggcucccuuccc

SEQ ID NO: 3727473 - RNA, 23 nt, Human
gggcucccuucccaccucucuca

SEQ ID NO: 3727474 - RNA, 12 nt, Human
gggcuccuccca

SEQ ID NO: 3727475 - RNA, 18 nt, Human
gggcuccugcacuuacuu

SEQ ID NO: 3727476 - RNA, 18 nt, Human
gggcuccugccuucuguc

SEQ ID NO: 3727477 - RNA, 19 nt, Human
gggcuccuugugggccugg

SEQ ID NO: 3727478 - RNA, 12 nt, Human
gggcuccuuucc

SEQ ID NO: 3727479 - RNA, 18 nt, Human
gggcuccuuucuccagcc

SEQ ID NO: 3727480 - RNA, 21 nt, Human
gggcuccuuucuccagccagc

SEQ ID NO: 3727481 - RNA, 18 nt, Human
gggcucgaggggugggcu

SEQ ID NO: 3727482 - RNA, 15 nt, Human
gggcucggaggcugc

SEQ ID NO: 3727483 - RNA, 18 nt, Human
gggcucuaacgccugagc

SEQ ID NO: 3727484 - RNA, 22 nt, Human
gggcucuaacgccugagcccag

SEQ ID NO: 3727485 - RNA, 23 nt, Human
gggcucuaacgccugagcccagg

SEQ ID NO: 3727486 - RNA, 13 nt, Human
gggcucucagcuc

SEQ ID NO: 3727487 - RNA, 13 nt, Human
gggcucuccuggc

SEQ ID NO: 3727488 - RNA, 22 nt, Human
gggcucuccuggcuucccaucc

SEQ ID NO: 3727489 - RNA, 12 nt, Human
gggcucugaggc

SEQ ID NO: 3727490 - RNA, 15 nt, Human
gggcucugaggcgcc

SEQ ID NO: 3727491 - RNA, 20 nt, Human
gggcucugcaauuccccucu

SEQ ID NO: 3727492 - RNA, 23 nt, Human
gggcucugcaauuccccucugcu

SEQ ID NO: 3727493 - RNA, 11 nt, Human
gggcucugccc

SEQ ID NO: 3727494 - RNA, 12 nt, Human
gggcucugcccc

SEQ ID NO: 3727495 - RNA, 14 nt, Human
gggcucugccccag

SEQ ID NO: 3727496 - RNA, 23 nt, Human
gggcucugccccagaggccucuc

SEQ ID NO: 3727497 - RNA, 20 nt, Human
gggcucugccccagcucugg

SEQ ID NO: 3727498 - RNA, 16 nt, Human
gggcucugccucccau

SEQ ID NO: 3727499 - RNA, 16 nt, Human
gggcucugugcugaca

SEQ ID NO: 3727500 - RNA, 16 nt, Human
gggcucugugggcugc

SEQ ID NO: 3727501 - RNA, 19 nt, Human
gggcucugugggcugcacu

SEQ ID NO: 3727502 - RNA, 18 nt, Human
gggcugaacggggagaaa

SEQ ID NO: 3727503 - RNA, 16 nt, Human
gggcugaccuuccucg

SEQ ID NO: 3727504 - RNA, 21 nt, Human
gggcugaccuuccucgcagag

SEQ ID NO: 3727505 - RNA, 13 nt, Human
gggcugagcccug

SEQ ID NO: 3727506 - RNA, 15 nt, Human
gggcugagcccuggc

SEQ ID NO: 3727507 - RNA, 23 nt, Human
gggcugagccuggucccacgagg

SEQ ID NO: 3727508 - RNA, 16 nt, Human
gggcugagcugccugu

SEQ ID NO: 3727509 - RNA, 23 nt, Human
gggcugagcuggggaccugguac

SEQ ID NO: 3727510 - RNA, 12 nt, Human
gggcugagggag

SEQ ID NO: 3727511 - RNA, 13 nt, Human
gggcugagggagc

SEQ ID NO: 3727512 - RNA, 13 nt, Human
gggcugagggccu

SEQ ID NO: 3727513 - RNA, 16 nt, Human
gggcugagggccugcu

SEQ ID NO: 3727514 - RNA, 11 nt, Human
gggcugagggg

SEQ ID NO: 3727515 - RNA, 19 nt, Human
gggcugcaguucgacucug

SEQ ID NO: 3727516 - RNA, 16 nt, Human
gggcugcaugauguuu

SEQ ID NO: 3727517 - RNA, 18 nt, Human
gggcugccaugugaagag

SEQ ID NO: 3727518 - RNA, 14 nt, Human
gggcugcccgcucc

SEQ ID NO: 3727519 - RNA, 20 nt, Human
gggcugccggggcagccccc

SEQ ID NO: 3727520 - RNA, 22 nt, Human
gggcugcgacgcuugcucuguu

SEQ ID NO: 3727521 - RNA, 18 nt, Human
ugacaaagauggcucaga

SEQ ID NO: 3727522 - RNA, 20 nt, Human
ugacaaagguaaaucagacu

SEQ ID NO: 3727523 - RNA, 15 nt, Human
ugacaaaucaaguuu

SEQ ID NO: 3727524 - RNA, 16 nt, Human
ugacaaaucuguguau

SEQ ID NO: 3727525 - RNA, 23 nt, Human
ugacaaauguguaucggaugcuu

SEQ ID NO: 3727526 - RNA, 15 nt, Human
ugacaaauguuucua

SEQ ID NO: 3727527 - RNA, 21 nt, Human
ugacaaauguuucuaagguaa

SEQ ID NO: 3727528 - RNA, 17 nt, Human
ugacaaauuuuaauuau

SEQ ID NO: 3727529 - RNA, 13 nt, Human
ugacaacacucau

SEQ ID NO: 3727530 - RNA, 14 nt, Human
ugacaacagaagcu

SEQ ID NO: 3727531 - RNA, 12 nt, Human
ugacaacaucug

SEQ ID NO: 3727532 - RNA, 19 nt, Human
ugacaaccaccgcucccca

SEQ ID NO: 3727533 - RNA, 23 nt, Human
ugacaaccaccgcuccccagccc

SEQ ID NO: 3727534 - RNA, 16 nt, Human
ugacaaccacuggucu

SEQ ID NO: 3727535 - RNA, 19 nt, Human
ugacaaccaugagaccacu

SEQ ID NO: 3727536 - RNA, 16 nt, Human
ugacaaccauuaaagu

SEQ ID NO: 3727537 - RNA, 19 nt, Human
ugacaacuggaauaguuuu

SEQ ID NO: 3727538 - RNA, 14 nt, Human
ugacaacuggcagg

SEQ ID NO: 3727539 - RNA, 13 nt, Human
ugacaacugucua

SEQ ID NO: 3727540 - RNA, 21 nt, Human
ugacaacugucuaacuuuaga

SEQ ID NO: 3727541 - RNA, 12 nt, Human
ugacaacuguga

SEQ ID NO: 3727542 - RNA, 15 nt, Human
ugacaacugugacug

SEQ ID NO: 3727543 - RNA, 19 nt, Human
ugacaacuuugccagcuuu

SEQ ID NO: 3727544 - RNA, 22 nt, Human
ugacaagaaaggcugcuguacu

SEQ ID NO: 3727545 - RNA, 15 nt, Human
ugacaagcacugcua

SEQ ID NO: 3727546 - RNA, 21 nt, Human
ugacaagccccaggcaggcug

SEQ ID NO: 3727547 - RNA, 20 nt, Human
ugacaagcucacagaccuuu

SEQ ID NO: 3727548 - RNA, 22 nt, Human
ugacaagcuccuggucuugaga

SEQ ID NO: 3727549 - RNA, 21 nt, Human
ugacaagcuggcuuacacugg

SEQ ID NO: 3727550 - RNA, 23 nt, Human
ugacaagcuggcuuacacuggca

SEQ ID NO: 3727551 - RNA, 23 nt, Human
ugacaaggauugcuacuguccua

SEQ ID NO: 3727552 - RNA, 17 nt, Human
ugacaaggccccagaga

SEQ ID NO: 3727553 - RNA, 13 nt, Human
ugacaauaaaaca

SEQ ID NO: 3727554 - RNA, 15 nt, Human
ugacaauaaaauauu

SEQ ID NO: 3727555 - RNA, 20 nt, Human
ugacaauaaaauauuauuga

SEQ ID NO: 3727556 - RNA, 18 nt, Human
ugacaauaauauuguugu

SEQ ID NO: 3727557 - RNA, 19 nt, Human
ugacaauaauauuguugua

SEQ ID NO: 3727558 - RNA, 20 nt, Human
ugacaauaauauuguuguau

SEQ ID NO: 3727559 - RNA, 16 nt, Human
ugacaauauuccagau

SEQ ID NO: 3727560 - RNA, 15 nt, Human
ugacaaucaacucua

SEQ ID NO: 3727561 - RNA, 23 nt, Human
ugacaauuccuagauaaaaagau

SEQ ID NO: 3727562 - RNA, 16 nt, Human
ugacaauucuguuuuu

SEQ ID NO: 3727563 - RNA, 16 nt, Human
ugacaauuuuguacaa

SEQ ID NO: 3727564 - RNA, 18 nt, Human
ugacacaaaccugccugg

SEQ ID NO: 3727565 - RNA, 19 nt, Human
ugacacaaaccugccuggg

SEQ ID NO: 3727566 - RNA, 14 nt, Human
ugacacaaaggaag

SEQ ID NO: 3727567 - RNA, 20 nt, Human
ugacacaagaggaauaagaa

SEQ ID NO: 3727568 - RNA, 22 nt, Human
ugacacaccaggcgcuaauuca

SEQ ID NO: 3727569 - RNA, 23 nt, Human
ugacacaccaggcgcuaauucaa

SEQ ID NO: 3727570 - RNA, 19 nt, Human
ugacacacuacaccacaca

SEQ ID NO: 3727571 - RNA, 20 nt, Human
ugacacacuacaccacacac

SEQ ID NO: 3727572 - RNA, 22 nt, Human
ugacacacuacaccacacacaa

SEQ ID NO: 3727573 - RNA, 19 nt, Human
ugacacagaaaauguugag

SEQ ID NO: 3727574 - RNA, 11 nt, Human
ugacacagacu

SEQ ID NO: 3727575 - RNA, 18 nt, Human
ugacacaggucuuuccua

SEQ ID NO: 3727576 - RNA, 17 nt, Human
ugacacauaguuuuuca

SEQ ID NO: 3727577 - RNA, 16 nt, Human
ugacaccaaagccacc

SEQ ID NO: 3727578 - RNA, 13 nt, Human
ugacaccagccuu

SEQ ID NO: 3727579 - RNA, 22 nt, Human
ugacacccgugagcgccugugc

SEQ ID NO: 3727580 - RNA, 15 nt, Human
ugacacccuucuccc

SEQ ID NO: 3727581 - RNA, 21 nt, Human
ugacaccgggguggugggaac

SEQ ID NO: 3727582 - RNA, 15 nt, Human
ugacaccuaacucuu

SEQ ID NO: 3727583 - RNA, 19 nt, Human
ugacaccuuugcaggcaug

SEQ ID NO: 3727584 - RNA, 20 nt, Human
ugacacgucucgccaagcag

SEQ ID NO: 3727585 - RNA, 22 nt, Human
ugacacuagcccaaugaaauga

SEQ ID NO: 3727586 - RNA, 18 nt, Human
ugacacucccacccaguc

SEQ ID NO: 3727587 - RNA, 19 nt, Human
ugacacucuccuugcaguu

SEQ ID NO: 3727588 - RNA, 20 nt, Human
ugacacucuccuugcaguuc

SEQ ID NO: 3727589 - RNA, 10 nt, Human
ugacacugaa

SEQ ID NO: 3727590 - RNA, 18 nt, Human
ugacacugaaaguuuugu

SEQ ID NO: 3727591 - RNA, 22 nt, Human
ugacacugaaaugccuuacuuu

SEQ ID NO: 3727592 - RNA, 17 nt, Human
ugacacugcaauuggca

SEQ ID NO: 3727593 - RNA, 16 nt, Human
ugacacugcucuaaca

SEQ ID NO: 3727594 - RNA, 21 nt, Human
ugacacugguauuccugccuc

SEQ ID NO: 3727595 - RNA, 15 nt, Human
ugacacuuaaaaaug

SEQ ID NO: 3727596 - RNA, 16 nt, Human
ugacacuuaaaaaugg

SEQ ID NO: 3727597 - RNA, 17 nt, Human
ugacacuucagagagcu

SEQ ID NO: 3727598 - RNA, 18 nt, Human
ugacacuucagagagcug

SEQ ID NO: 3727599 - RNA, 14 nt, Human
ugacacuuccaguc

SEQ ID NO: 3727600 - RNA, 19 nt, Human
ugacagaaaauauguauua

SEQ ID NO: 3727601 - RNA, 13 nt, Human
ugacagaaagcag

SEQ ID NO: 3727602 - RNA, 15 nt, Human
ugacagaacacuguc

SEQ ID NO: 3727603 - RNA, 16 nt, Human
ugacagaacacugucu

SEQ ID NO: 3727604 - RNA, 15 nt, Human
ugacagaaggugcca

SEQ ID NO: 3727605 - RNA, 16 nt, Human
ugacagaauauguuuc

SEQ ID NO: 3727606 - RNA, 18 nt, Human
ugacagacacaggcccgg

SEQ ID NO: 3727607 - RNA, 20 nt, Human
ugacagacacaggcccggcu

SEQ ID NO: 3727608 - RNA, 14 nt, Human
ugacagacaggcuc

SEQ ID NO: 3727609 - RNA, 21 nt, Human
ugacagagagagauacucugg

SEQ ID NO: 3727610 - RNA, 18 nt, Human
ugacagagcaagacucug

SEQ ID NO: 3727611 - RNA, 21 nt, Human
ugacagagcaagacucugucu

SEQ ID NO: 3727612 - RNA, 20 nt, Human
ugacagagccugccccagcg

SEQ ID NO: 3727613 - RNA, 13 nt, Human
ugacagaggcagc

SEQ ID NO: 3727614 - RNA, 17 nt, Human
ugacagagugagacucu

SEQ ID NO: 3727615 - RNA, 19 nt, Human
ugacagagugagacucugu

SEQ ID NO: 3727616 - RNA, 15 nt, Human
ugacagaguucacua

SEQ ID NO: 3727617 - RNA, 17 nt, Human
ugacagaucaagcugug

SEQ ID NO: 3727618 - RNA, 19 nt, Human
ugacagaucaagcugugag

SEQ ID NO: 3727619 - RNA, 22 nt, Human
ugacagaugucagccgagccgg

SEQ ID NO: 3727620 - RNA, 19 nt, Human
ugacagauguugaaugccc

SEQ ID NO: 3727621 - RNA, 14 nt, Human
ugacagcagcaucu

SEQ ID NO: 3727622 - RNA, 14 nt, Human
ugacagcagguggg

SEQ ID NO: 3727623 - RNA, 20 nt, Human
ugacagcagucgguuggagc

SEQ ID NO: 3727624 - RNA, 18 nt, Human
ugacagcaugugcccucc

SEQ ID NO: 3727625 - RNA, 23 nt, Human
ugacagcaugugcccuccugagg

SEQ ID NO: 3727626 - RNA, 11 nt, Human
ugacagccccu

SEQ ID NO: 3727627 - RNA, 19 nt, Human
ugacagccccucccuccuc

SEQ ID NO: 3727628 - RNA, 19 nt, Human
ugacagccucccaccccca

SEQ ID NO: 3727629 - RNA, 22 nt, Human
ugacagccucccacccccaucu

SEQ ID NO: 3727630 - RNA, 14 nt, Human
ugacagccugcagc

SEQ ID NO: 3727631 - RNA, 16 nt, Human
ugacagcgcacagcug

SEQ ID NO: 3727632 - RNA, 19 nt, Human
ugacagcgcacagcugcuc

SEQ ID NO: 3727633 - RNA, 20 nt, Human
ugacagcuaggaugugcauu

SEQ ID NO: 3727634 - RNA, 15 nt, Human
ugacagcugcuccua

SEQ ID NO: 3727635 - RNA, 18 nt, Human
ugacagcugcuccuagag

SEQ ID NO: 3727636 - RNA, 21 nt, Human
ugacagcugcuccuagaggga

SEQ ID NO: 3727637 - RNA, 12 nt, Human
ugacagcugucc

SEQ ID NO: 3727638 - RNA, 17 nt, Human
ugacagcugucccuguc

SEQ ID NO: 3727639 - RNA, 21 nt, Human
ugacagcugucccugucacca

SEQ ID NO: 3727640 - RNA, 13 nt, Human
ugacagcuuugcu

SEQ ID NO: 3727641 - RNA, 21 nt, Human
ugacagcuuugcugcugaagg

SEQ ID NO: 3727642 - RNA, 14 nt, Human
ugacaggacgcuga

SEQ ID NO: 3727643 - RNA, 16 nt, Human
ugacaggacgcugacc

SEQ ID NO: 3727644 - RNA, 20 nt, Human
ugacaggcaaugcuggcugu

SEQ ID NO: 3727645 - RNA, 15 nt, Human
ugacaggcagcagag

SEQ ID NO: 3727646 - RNA, 20 nt, Human
ugacaggcagccuggacaua

SEQ ID NO: 3727647 - RNA, 18 nt, Human
ugacaggccugaagauau

SEQ ID NO: 3727648 - RNA, 19 nt, Human
ugacagggaagcuacaggu

SEQ ID NO: 3727649 - RNA, 21 nt, Human
ugacagggaagcuacagguua

SEQ ID NO: 3727650 - RNA, 23 nt, Human
ugacagggaagcuacagguuaca

SEQ ID NO: 3727651 - RNA, 20 nt, Human
ugacagggcacaccgggcac

SEQ ID NO: 3727652 - RNA, 22 nt, Human
gcauuuucuggguucugggugg

SEQ ID NO: 3727653 - RNA, 17 nt, Human
gcauuuugcuauuguaa

SEQ ID NO: 3727654 - RNA, 13 nt, Human
gcauuuuggcgcu

SEQ ID NO: 3727655 - RNA, 12 nt, Human
gcauuuuucugc

SEQ ID NO: 3727656 - RNA, 20 nt, Human
gcauuuuugauuuaugcaug

SEQ ID NO: 3727657 - RNA, 16 nt, Human
gcauuuuugcaggagc

SEQ ID NO: 3727658 - RNA, 16 nt, Human
gccaaaaaaaaauaca

SEQ ID NO: 3727659 - RNA, 14 nt, Human
gccaaaaaaagaca

SEQ ID NO: 3727660 - RNA, 13 nt, Human
gccaaaaaggaua

SEQ ID NO: 3727661 - RNA, 16 nt, Human
gccaaaaaggauacau

SEQ ID NO: 3727662 - RNA, 21 nt, Human
gccaaaagcuagacagauccc

SEQ ID NO: 3727663 - RNA, 14 nt, Human
gccaaaaggaaaaa

SEQ ID NO: 3727664 - RNA, 17 nt, Human
gccaaaaggaaaaagcu

SEQ ID NO: 3727665 - RNA, 21 nt, Human
gccaaaauaaugucuuguuaa

SEQ ID NO: 3727666 - RNA, 23 nt, Human
gccaaaauaaugucuuguuaaua

SEQ ID NO: 3727667 - RNA, 14 nt, Human
gccaaaauuaaggu

SEQ ID NO: 3727668 - RNA, 21 nt, Human
gccaaaauuaagguguuugaa

SEQ ID NO: 3727669 - RNA, 23 nt, Human
gccaaaauuaagguguuugaaaa

SEQ ID NO: 3727670 - RNA, 23 nt, Human
gccaaacaaaaugagaucucauu

SEQ ID NO: 3727671 - RNA, 15 nt, Human
gccaaacagccacac

SEQ ID NO: 3727672 - RNA, 22 nt, Human
gccaaacccaugaggcaauguc

SEQ ID NO: 3727673 - RNA, 13 nt, Human
gccaaaccucugu

SEQ ID NO: 3727674 - RNA, 14 nt, Human
gccaaaccucuguu

SEQ ID NO: 3727675 - RNA, 15 nt, Human
gccaaaccucuguuc

SEQ ID NO: 3727676 - RNA, 14 nt, Human
gccaaacucaccug

SEQ ID NO: 3727677 - RNA, 16 nt, Human
gccaaacucaccugcc

SEQ ID NO: 3727678 - RNA, 13 nt, Human
gccaaacugcugg

SEQ ID NO: 3727679 - RNA, 23 nt, Human
gccaaacugcuggacgucuuucu

SEQ ID NO: 3727680 - RNA, 17 nt, Human
gccaaagaaaugaacau

SEQ ID NO: 3727681 - RNA, 21 nt, Human
gccaaagaaccaaagaagaaa

SEQ ID NO: 3727682 - RNA, 16 nt, Human
gccaaagauaaucucu

SEQ ID NO: 3727683 - RNA, 12 nt, Human
gccaaaggaagc

SEQ ID NO: 3727684 - RNA, 13 nt, Human
gccaaaggcuggc

SEQ ID NO: 3727685 - RNA, 20 nt, Human
gccaaaggggaccuggaagg

SEQ ID NO: 3727686 - RNA, 15 nt, Human
gccaaaguacagaau

SEQ ID NO: 3727687 - RNA, 17 nt, Human
gccaaaguacagaauuu

SEQ ID NO: 3727688 - RNA, 12 nt, Human
gccaaaguguua

SEQ ID NO: 3727689 - RNA, 18 nt, Human
gccaaauaaugucucugu

SEQ ID NO: 3727690 - RNA, 17 nt, Human
gccaaauccgcucucuu

SEQ ID NO: 3727691 - RNA, 22 nt, Human
gccaaaugguuuaacuucugcc

SEQ ID NO: 3727692 - RNA, 12 nt, Human
gccaaauuaaaa

SEQ ID NO: 3727693 - RNA, 14 nt, Human
gccaaauuaaaaaa

SEQ ID NO: 3727694 - RNA, 19 nt, Human
gccaaauuauuuguguaau

SEQ ID NO: 3727695 - RNA, 21 nt, Human
gccaaauuuaaaacuguugga

SEQ ID NO: 3727696 - RNA, 22 nt, Human
gccaacaagaaugcauugauau

SEQ ID NO: 3727697 - RNA, 16 nt, Human
gccaacacucaagaag

SEQ ID NO: 3727698 - RNA, 15 nt, Human
gccaacacugugggu

SEQ ID NO: 3727699 - RNA, 21 nt, Human
gccaacacuguggguguguga

SEQ ID NO: 3727700 - RNA, 23 nt, Human
gccaacagguggcaggaccagga

SEQ ID NO: 3727701 - RNA, 22 nt, Human
gccaacaguguuaggccuggca

SEQ ID NO: 3727702 - RNA, 14 nt, Human
gccaacauggugaa

SEQ ID NO: 3727703 - RNA, 13 nt, Human
gccaacccuucuc

SEQ ID NO: 3727704 - RNA, 15 nt, Human
gccaaccuaaaacuc

SEQ ID NO: 3727705 - RNA, 23 nt, Human
gccaaccucgcuccaacuccaac

SEQ ID NO: 3727706 - RNA, 20 nt, Human
gccaaccuguaauaaauaug

SEQ ID NO: 3727707 - RNA, 18 nt, Human
gccaacggccccagcuuc

SEQ ID NO: 3727708 - RNA, 14 nt, Human
gccaacuauggccu

SEQ ID NO: 3727709 - RNA, 15 nt, Human
gccaacuauggccug

SEQ ID NO: 3727710 - RNA, 19 nt, Human
gccaacugcugcuuuuuga

SEQ ID NO: 3727711 - RNA, 20 nt, Human
gccaacuucuucagagcuga

SEQ ID NO: 3727712 - RNA, 20 nt, Human
gccaacuugagggcccagag

SEQ ID NO: 3727713 - RNA, 18 nt, Human
gccaacuuguaaauacac

SEQ ID NO: 3727714 - RNA, 21 nt, Human
gccaacuuuccccacguuaaa

SEQ ID NO: 3727715 - RNA, 22 nt, Human
gccaagaaacgucuucuaaacu

SEQ ID NO: 3727716 - RNA, 18 nt, Human
gccaagaacugaaaacau

SEQ ID NO: 3727717 - RNA, 15 nt, Human
gccaagaagcagugg

SEQ ID NO: 3727718 - RNA, 16 nt, Human
gccaagaagcaguggc

SEQ ID NO: 3727719 - RNA, 19 nt, Human
gccaagaagcaguggccuu

SEQ ID NO: 3727720 - RNA, 20 nt, Human
gccaagaagcaguggccuua

SEQ ID NO: 3727721 - RNA, 18 nt, Human
gccaagaaguuuaaggaa

SEQ ID NO: 3727722 - RNA, 15 nt, Human
gccaagaauauugca

SEQ ID NO: 3727723 - RNA, 23 nt, Human
gccaagaauauugcaaaauacau

SEQ ID NO: 3727724 - RNA, 12 nt, Human
gccaagaaugua

SEQ ID NO: 3727725 - RNA, 14 nt, Human
gccaagaauucuua

SEQ ID NO: 3727726 - RNA, 18 nt, Human
gccaagaauucuuaaaua

SEQ ID NO: 3727727 - RNA, 19 nt, Human
gccaagacaaaucaacaga

SEQ ID NO: 3727728 - RNA, 14 nt, Human
gccaagacugcugu

SEQ ID NO: 3727729 - RNA, 23 nt, Human
gccaagacuuggcaacagaagca

SEQ ID NO: 3727730 - RNA, 21 nt, Human
gccaagagaaaggccugcaca

SEQ ID NO: 3727731 - RNA, 12 nt, Human
gccaagaggcug

SEQ ID NO: 3727732 - RNA, 13 nt, Human
gccaagaggcugc

SEQ ID NO: 3727733 - RNA, 22 nt, Human
gccaagagguuuggcuccugcc

SEQ ID NO: 3727734 - RNA, 21 nt, Human
gccaagaguggccccaccugg

SEQ ID NO: 3727735 - RNA, 23 nt, Human
gccaagauuuuccucuugugauu

SEQ ID NO: 3727736 - RNA, 20 nt, Human
gccaagcacagugccugcau

SEQ ID NO: 3727737 - RNA, 16 nt, Human
gccaagcacaguggug

SEQ ID NO: 3727738 - RNA, 15 nt, Human
gccaagcacugugcu

SEQ ID NO: 3727739 - RNA, 14 nt, Human
gccaagcagggagg

SEQ ID NO: 3727740 - RNA, 21 nt, Human
gccaagccauggguagccugg

SEQ ID NO: 3727741 - RNA, 15 nt, Human
gccaagccccauccu

SEQ ID NO: 3727742 - RNA, 21 nt, Human
gccaagcccuccccaucccau

SEQ ID NO: 3727743 - RNA, 16 nt, Human
gccaagcuccuuggga

SEQ ID NO: 3727744 - RNA, 14 nt, Human
gccaagcugaggug

SEQ ID NO: 3727745 - RNA, 18 nt, Human
gccaagcugaggugccca

SEQ ID NO: 3727746 - RNA, 16 nt, Human
gccaagcuuuaaauua

SEQ ID NO: 3727747 - RNA, 14 nt, Human
gccaaggaaaggca

SEQ ID NO: 3727748 - RNA, 17 nt, Human
gccaaggacugccgacc

SEQ ID NO: 3727749 - RNA, 16 nt, Human
gccaaggagcugcuau

SEQ ID NO: 3727750 - RNA, 21 nt, Human
gccaaggagcugcuauagccu

SEQ ID NO: 3727751 - RNA, 23 nt, Human
gccaaggagcugcuauagccugg

SEQ ID NO: 3727752 - RNA, 14 nt, Human
gccaaggcagaggc

SEQ ID NO: 3727753 - RNA, 11 nt, Human
gccaaggccaa

SEQ ID NO: 3727754 - RNA, 18 nt, Human
gccaaggccgaagcucug

SEQ ID NO: 3727755 - RNA, 19 nt, Human
uacaaaggggaaagaacau

SEQ ID NO: 3727756 - RNA, 18 nt, Human
uacaaagguuuaaaugaa

SEQ ID NO: 3727757 - RNA, 12 nt, Human
uacaaaguauua

SEQ ID NO: 3727758 - RNA, 13 nt, Human
uacaaaguauuaa

SEQ ID NO: 3727759 - RNA, 23 nt, Human
uacaaaguguauuuuauaaaauu

SEQ ID NO: 3727760 - RNA, 18 nt, Human
uacaaaguguguauuaaa

SEQ ID NO: 3727761 - RNA, 17 nt, Human
uacaaaguuaaaauugu

SEQ ID NO: 3727762 - RNA, 18 nt, Human
uacaaaguuaaaauuguu

SEQ ID NO: 3727763 - RNA, 12 nt, Human
uacaaauauaag

SEQ ID NO: 3727764 - RNA, 18 nt, Human
uacaaauauaagaauaaa

SEQ ID NO: 3727765 - RNA, 16 nt, Human
uacaaaucaaguauuu

SEQ ID NO: 3727766 - RNA, 13 nt, Human
uacaaaucaauca

SEQ ID NO: 3727767 - RNA, 20 nt, Human
uacaaaucagaagucaucuu

SEQ ID NO: 3727768 - RNA, 22 nt, Human
uacaaaucagaagucaucuugc

SEQ ID NO: 3727769 - RNA, 18 nt, Human
uacaaaugcaucuuugau

SEQ ID NO: 3727770 - RNA, 20 nt, Human
uacaaaugccuuaaaaugga

SEQ ID NO: 3727771 - RNA, 21 nt, Human
uacaaauggacauaggacuca

SEQ ID NO: 3727772 - RNA, 23 nt, Human
uacaaauguuaaaauguguuguu

SEQ ID NO: 3727773 - RNA, 14 nt, Human
uacaaauuaaaaag

SEQ ID NO: 3727774 - RNA, 16 nt, Human
uacaaauuaaaaagau

SEQ ID NO: 3727775 - RNA, 16 nt, Human
uacaaauuuuucugug

SEQ ID NO: 3727776 - RNA, 22 nt, Human
uacaacaagaguuuauuuccaa

SEQ ID NO: 3727777 - RNA, 18 nt, Human
uacaacaccaaaaaauau

SEQ ID NO: 3727778 - RNA, 13 nt, Human
uacaacagauuug

SEQ ID NO: 3727779 - RNA, 16 nt, Human
uacaacagauuuguga

SEQ ID NO: 3727780 - RNA, 20 nt, Human
uacaacagauuugugaacuc

SEQ ID NO: 3727781 - RNA, 14 nt, Human
uacaacagugcuaa

SEQ ID NO: 3727782 - RNA, 20 nt, Human
uacaaccaagcucucugcau

SEQ ID NO: 3727783 - RNA, 23 nt, Human
uacaacccgguucacucuucuca

SEQ ID NO: 3727784 - RNA, 17 nt, Human
uacaaccucccucuugu

SEQ ID NO: 3727785 - RNA, 15 nt, Human
uacaaccuccgccuc

SEQ ID NO: 3727786 - RNA, 12 nt, Human
uacaaccugcuu

SEQ ID NO: 3727787 - RNA, 12 nt, Human
uacaaccuucau

SEQ ID NO: 3727788 - RNA, 15 nt, Human
uacaacggagucaaa

SEQ ID NO: 3727789 - RNA, 20 nt, Human
uacaacucauuccagauccc

SEQ ID NO: 3727790 - RNA, 23 nt, Human
uacaacugccucgaaacacagaa

SEQ ID NO: 3727791 - RNA, 17 nt, Human
uacaacuuaaguugguc

SEQ ID NO: 3727792 - RNA, 14 nt, Human
uacaacuucaagug

SEQ ID NO: 3727793 - RNA, 14 nt, Human
uacaacuucagcag

SEQ ID NO: 3727794 - RNA, 15 nt, Human
uacaagaagcauuuu

SEQ ID NO: 3727795 - RNA, 22 nt, Human
uacaagaaguuuauucucauuu

SEQ ID NO: 3727796 - RNA, 18 nt, Human
uacaagacaacauuguaa

SEQ ID NO: 3727797 - RNA, 19 nt, Human
uacaagacugccauauuaa

SEQ ID NO: 3727798 - RNA, 23 nt, Human
uacaagagaaaaagcagaggcca

SEQ ID NO: 3727799 - RNA, 13 nt, Human
uacaagauuagaa

SEQ ID NO: 3727800 - RNA, 22 nt, Human
uacaagccaaaguggcauguuu

SEQ ID NO: 3727801 - RNA, 20 nt, Human
uacaagcgugagccacugca

SEQ ID NO: 3727802 - RNA, 19 nt, Human
uacaagggaagauuuaugu

SEQ ID NO: 3727803 - RNA, 18 nt, Human
uacaagguauaauaaaau

SEQ ID NO: 3727804 - RNA, 20 nt, Human
uacaagguauaauaaaauua

SEQ ID NO: 3727805 - RNA, 14 nt, Human
uacaaguaguucug

SEQ ID NO: 3727806 - RNA, 19 nt, Human
uacaaguaguucuguauuu

SEQ ID NO: 3727807 - RNA, 19 nt, Human
uacaaguauuuuuaauuaa

SEQ ID NO: 3727808 - RNA, 16 nt, Human
uacaagucaguuucua

SEQ ID NO: 3727809 - RNA, 13 nt, Human
uacaaguguauau

SEQ ID NO: 3727810 - RNA, 14 nt, Human
uacaaguguauauc

SEQ ID NO: 3727811 - RNA, 16 nt, Human
uacaaguuauaguacu

SEQ ID NO: 3727812 - RNA, 15 nt, Human
uacaaguuggaguca

SEQ ID NO: 3727813 - RNA, 17 nt, Human
uacaaguuuauauauau

SEQ ID NO: 3727814 - RNA, 13 nt, Human
uacaauaaaaaca

SEQ ID NO: 3727815 - RNA, 12 nt, Human
uacaauaaacua

SEQ ID NO: 3727816 - RNA, 13 nt, Human
uacaauaaauaau

SEQ ID NO: 3727817 - RNA, 16 nt, Human
uacaauaaauaaucug

SEQ ID NO: 3727818 - RNA, 13 nt, Human
uacaauaacauaa

SEQ ID NO: 3727819 - RNA, 14 nt, Human
uacaauaauggaaa

SEQ ID NO: 3727820 - RNA, 18 nt, Human
uacaauaauucauauucu

SEQ ID NO: 3727821 - RNA, 14 nt, Human
uacaauacaucuga

SEQ ID NO: 3727822 - RNA, 15 nt, Human
uacaauauguacauu

SEQ ID NO: 3727823 - RNA, 14 nt, Human
uacaauauugauug

SEQ ID NO: 3727824 - RNA, 19 nt, Human
uacaauauugauugggaaa

SEQ ID NO: 3727825 - RNA, 16 nt, Human
uacaauauuuaaaauu

SEQ ID NO: 3727826 - RNA, 16 nt, Human
uacaauauuuuaagca

SEQ ID NO: 3727827 - RNA, 21 nt, Human
uacaauauuuuaagcauuacu

SEQ ID NO: 3727828 - RNA, 14 nt, Human
uacaaucagcugcu

SEQ ID NO: 3727829 - RNA, 19 nt, Human
uacaaucagcugcuuuguu

SEQ ID NO: 3727830 - RNA, 22 nt, Human
uacaaucgagacugcaauguga

SEQ ID NO: 3727831 - RNA, 22 nt, Human
uacaaucucccuucacaaguuu

SEQ ID NO: 3727832 - RNA, 23 nt, Human
uacaaugaaaaggacuuuauaga

SEQ ID NO: 3727833 - RNA, 14 nt, Human
uacaaugcugugcc

SEQ ID NO: 3727834 - RNA, 16 nt, Human
uacaaugcugugcccu

SEQ ID NO: 3727835 - RNA, 14 nt, Human
uacaauguauuuau

SEQ ID NO: 3727836 - RNA, 22 nt, Human
uacaauguauuuauuuaaaaga

SEQ ID NO: 3727837 - RNA, 14 nt, Human
uacaaugugaacuu

SEQ ID NO: 3727838 - RNA, 16 nt, Human
uacaaugugaacuuua

SEQ ID NO: 3727839 - RNA, 13 nt, Human
uacaaugugacuu

SEQ ID NO: 3727840 - RNA, 21 nt, Human
uacaauguguuuuucuccagu

SEQ ID NO: 3727841 - RNA, 15 nt, Human
uacaauguucauccc

SEQ ID NO: 3727842 - RNA, 19 nt, Human
uacaauuaaagcuguuauu

SEQ ID NO: 3727843 - RNA, 22 nt, Human
uacaauuaauaguuugucuauu

SEQ ID NO: 3727844 - RNA, 18 nt, Human
uacaauuauuuuuacagu

SEQ ID NO: 3727845 - RNA, 17 nt, Human
uacaauuuacaaagugu

SEQ ID NO: 3727846 - RNA, 17 nt, Human
uacaauuucuuuugguu

SEQ ID NO: 3727847 - RNA, 13 nt, Human
uacaauuuuaaga

SEQ ID NO: 3727848 - RNA, 18 nt, Human
uacaauuuuaucuguuuc

SEQ ID NO: 3727849 - RNA, 15 nt, Human
uacaauuuuguuucu

SEQ ID NO: 3727850 - RNA, 17 nt, Human
uacaauuuuguuucugu

SEQ ID NO: 3727851 - RNA, 18 nt, Human
uacaauuuuguuucugua

SEQ ID NO: 3727852 - RNA, 19 nt, Human
uacaauuuuguuucuguac

SEQ ID NO: 3727853 - RNA, 21 nt, Human
uacaauuuuguuucuguacuu

SEQ ID NO: 3727854 - RNA, 13 nt, Human
uacaauuuuuauu

SEQ ID NO: 3727855 - RNA, 20 nt, Human
uacaauuuuuuuaauuuugu

SEQ ID NO: 3727856 - RNA, 22 nt, Human
uacaauuuuuuuaauuuuguau

SEQ ID NO: 3727857 - RNA, 24 nt, Human
uacacaaaggggaucauaaaguua

SEQ ID NO: 3727858 - RNA, 20 nt, Human
uacacaaauacuuauucauu

SEQ ID NO: 3727859 - RNA, 14 nt, Human
uacacaacucacuc

SEQ ID NO: 3727860 - RNA, 14 nt, Human
uacacaaguaaaca

SEQ ID NO: 3727861 - RNA, 16 nt, Human
uacacaaguaaacauu

SEQ ID NO: 3727862 - RNA, 20 nt, Human
uacacaaugguuuuuaaauu

SEQ ID NO: 3727863 - RNA, 21 nt, Human
uacacaaugguuuuuaaauuu

SEQ ID NO: 3727864 - RNA, 13 nt, Human
uacacacacacac

SEQ ID NO: 3727865 - RNA, 18 nt, Human
uacacacacacacacaca

SEQ ID NO: 3727866 - RNA, 21 nt, Human
uacacacacacgcgugcacac

SEQ ID NO: 3727867 - RNA, 14 nt, Human
uacacacgcugccu

SEQ ID NO: 3727868 - RNA, 15 nt, Human
uacacacgcugccuu

SEQ ID NO: 3727869 - RNA, 17 nt, Human
uacacacgcugccuucg

SEQ ID NO: 3727870 - RNA, 17 nt, Human
uacacacuguacacaua

SEQ ID NO: 3727871 - RNA, 13 nt, Human
uacacagaaacac

SEQ ID NO: 3727872 - RNA, 17 nt, Human
uacacagaaaugcugcu

SEQ ID NO: 3727873 - RNA, 18 nt, Human
uacacagaaaugcugcug

SEQ ID NO: 3727874 - RNA, 17 nt, Human
uacacagacuauugaca

SEQ ID NO: 3727875 - RNA, 21 nt, Human
uacacagacuauugacaucag

SEQ ID NO: 3727876 - RNA, 22 nt, Human
uacacagacuauugacaucagc

SEQ ID NO: 3727877 - RNA, 14 nt, Human
uacacaggacaggg

SEQ ID NO: 3727878 - RNA, 22 nt, Human
uacacagugggaacucugacaa

SEQ ID NO: 3727879 - RNA, 23 nt, Human
uacacagugggaacucugacaag

SEQ ID NO: 3727880 - RNA, 22 nt, Human
uacacagugugaauaaagugcu

SEQ ID NO: 3727881 - RNA, 20 nt, Human
uacacauauaaauugucuua

SEQ ID NO: 3727882 - RNA, 13 nt, Human
uacacauauaccu

SEQ ID NO: 3727883 - RNA, 18 nt, Human
uacacauauuugaagggu

SEQ ID NO: 3727884 - RNA, 17 nt, Human
uacacaucucagacccu

SEQ ID NO: 3727885 - RNA, 13 nt, Human
uacacauuagauu

SEQ ID NO: 3727886 - RNA, 13 nt, Human
uacacauuugcua

SEQ ID NO: 3727887 - RNA, 18 nt, Human
uacacauuuguacagaau

SEQ ID NO: 3727888 - RNA, 21 nt, Human
uacacauuuuauuuuauuaug

SEQ ID NO: 3727889 - RNA, 19 nt, Human
uacacauuuuuaaauuguu

SEQ ID NO: 3727890 - RNA, 19 nt, Human
uacacauuuuucagauaua

SEQ ID NO: 3727891 - RNA, 13 nt, Human
uacaccacacaca

SEQ ID NO: 3727892 - RNA, 21 nt, Human
uacaccacacacaacagccaa

SEQ ID NO: 3727893 - RNA, 22 nt, Human
uacaccacacacaacagccaac

SEQ ID NO: 3727894 - RNA, 16 nt, Human
uacaccacuacauucu

SEQ ID NO: 3727895 - RNA, 17 nt, Human
uacaccacuacauucug

SEQ ID NO: 3727896 - RNA, 16 nt, Human
uacaccacucuggcag

SEQ ID NO: 3727897 - RNA, 19 nt, Human
uacaccagagauaauauga

SEQ ID NO: 3727898 - RNA, 17 nt, Human
uacaccagcauuccuuu

SEQ ID NO: 3727899 - RNA, 14 nt, Human
uacacccagacccc

SEQ ID NO: 3727900 - RNA, 14 nt, Human
uacacccagcaaua

SEQ ID NO: 3727901 - RNA, 14 nt, Human
uacacccuuggacu

SEQ ID NO: 3727902 - RNA, 15 nt, Human
uacaccgggccugga

SEQ ID NO: 3727903 - RNA, 15 nt, Human
uacaccuaaaggugu

SEQ ID NO: 3727904 - RNA, 23 nt, Human
uacaccuaaagguguauuuaaac

SEQ ID NO: 3727905 - RNA, 14 nt, Human
uagaaccucuuugu

SEQ ID NO: 3727906 - RNA, 22 nt, Human
uagaaccuggagggcuagaacc

SEQ ID NO: 3727907 - RNA, 23 nt, Human
uagaacgccagggaccccagaau

SEQ ID NO: 3727908 - RNA, 21 nt, Human
uagaacucaaccucuacaggg

SEQ ID NO: 3727909 - RNA, 23 nt, Human
uagaacucaaccucuacaggguu

SEQ ID NO: 3727910 - RNA, 15 nt, Human
uagaacucacucugg

SEQ ID NO: 3727911 - RNA, 16 nt, Human
uagaacucacucuggg

SEQ ID NO: 3727912 - RNA, 19 nt, Human
uagaacucacucugggcug

SEQ ID NO: 3727913 - RNA, 20 nt, Human
uagaacucacucugggcugu

SEQ ID NO: 3727914 - RNA, 16 nt, Human
uagaacuccaggcccu

SEQ ID NO: 3727915 - RNA, 19 nt, Human
uagaacuccaggcccuccu

SEQ ID NO: 3727916 - RNA, 17 nt, Human
uagaacugaauuuuguc

SEQ ID NO: 3727917 - RNA, 16 nt, Human
uagaacugucugugaa

SEQ ID NO: 3727918 - RNA, 15 nt, Human
uagaacuuacuauuc

SEQ ID NO: 3727919 - RNA, 23 nt, Human
uagaacuucuccguccucgaugg

SEQ ID NO: 3727920 - RNA, 12 nt, Human
uagaacuuugua

SEQ ID NO: 3727921 - RNA, 12 nt, Human
uagaacuuuuuu

SEQ ID NO: 3727922 - RNA, 21 nt, Human
uagaacuuuuuuaaauaaacu

SEQ ID NO: 3727923 - RNA, 22 nt, Human
uagaacuuuuuuaaauaaacuu

SEQ ID NO: 3727924 - RNA, 18 nt, Human
uagaagaaaaaagaaugu

SEQ ID NO: 3727925 - RNA, 22 nt, Human
uagaagaacauccaaggagaaa

SEQ ID NO: 3727926 - RNA, 14 nt, Human
uagaagaagugugu

SEQ ID NO: 3727927 - RNA, 22 nt, Human
uagaagaaugcaugcuuuccau

SEQ ID NO: 3727928 - RNA, 21 nt, Human
uagaagacucuaccagacugu

SEQ ID NO: 3727929 - RNA, 14 nt, Human
uagaagauguuugc

SEQ ID NO: 3727930 - RNA, 23 nt, Human
uagaagcauuccuucuuugauaa

SEQ ID NO: 3727931 - RNA, 12 nt, Human
uagaagccaagg

SEQ ID NO: 3727932 - RNA, 16 nt, Human
uagaagccaagggaaa

SEQ ID NO: 3727933 - RNA, 12 nt, Human
uagaagccugca

SEQ ID NO: 3727934 - RNA, 24 nt, Human
uagaagcgauuuaaguuacaaugu

SEQ ID NO: 3727935 - RNA, 23 nt, Human
uagaaggaaaaaaguuccuuccu

SEQ ID NO: 3727936 - RNA, 15 nt, Human
uagaaggagacagag

SEQ ID NO: 3727937 - RNA, 23 nt, Human
uagaaggagacagagcugguugg

SEQ ID NO: 3727938 - RNA, 19 nt, Human
uagaagguugacacaguug

SEQ ID NO: 3727939 - RNA, 14 nt, Human
uagaaguagauucu

SEQ ID NO: 3727940 - RNA, 16 nt, Human
uagaaguauaaagaau

SEQ ID NO: 3727941 - RNA, 17 nt, Human
uagaaguauaaagaauu

SEQ ID NO: 3727942 - RNA, 19 nt, Human
uagaaguauaaagaauugu

SEQ ID NO: 3727943 - RNA, 15 nt, Human
uagaagucacacagu

SEQ ID NO: 3727944 - RNA, 17 nt, Human
uagaagucuuagaugua

SEQ ID NO: 3727945 - RNA, 20 nt, Human
uagaagucuuagauguauau

SEQ ID NO: 3727946 - RNA, 18 nt, Human
uagaagucuucaugaaau

SEQ ID NO: 3727947 - RNA, 20 nt, Human
uagaagucuucaugaaaugc

SEQ ID NO: 3727948 - RNA, 21 nt, Human
uagaagucuucaugaaaugcu

SEQ ID NO: 3727949 - RNA, 15 nt, Human
uagaagugcauuucu

SEQ ID NO: 3727950 - RNA, 19 nt, Human
uagaaguggaccaggacag

SEQ ID NO: 3727951 - RNA, 15 nt, Human
uagaagugucauguu

SEQ ID NO: 3727952 - RNA, 20 nt, Human
uagaaguucuaguguuuuca

SEQ ID NO: 3727953 - RNA, 16 nt, Human
uagaaguuucccuucc

SEQ ID NO: 3727954 - RNA, 21 nt, Human
uagaaguuuggcugcugucau

SEQ ID NO: 3727955 - RNA, 15 nt, Human
uagaaguuuuaaauu

SEQ ID NO: 3727956 - RNA, 14 nt, Human
uagaaguuuuugua

SEQ ID NO: 3727957 - RNA, 18 nt, Human
uagaaguuuuuguacugu

SEQ ID NO: 3727958 - RNA, 19 nt, Human
uagaauaaaauuguaaaau

SEQ ID NO: 3727959 - RNA, 22 nt, Human
uagaauaaugugggaagaaaca

SEQ ID NO: 3727960 - RNA, 23 nt, Human
uagaauaaugugggaagaaacaa

SEQ ID NO: 3727961 - RNA, 12 nt, Human
uagaauagcaug

SEQ ID NO: 3727962 - RNA, 16 nt, Human
uagaauaggcacuuua

SEQ ID NO: 3727963 - RNA, 16 nt, Human
uagaauauaggucucu

SEQ ID NO: 3727964 - RNA, 16 nt, Human
uagaauauccuacuuc

SEQ ID NO: 3727965 - RNA, 14 nt, Human
uagaauauucagac

SEQ ID NO: 3727966 - RNA, 15 nt, Human
uagaauauucagaca

SEQ ID NO: 3727967 - RNA, 16 nt, Human
uagaaucaauuuaagu

SEQ ID NO: 3727968 - RNA, 14 nt, Human
uagaauccaaacuu

SEQ ID NO: 3727969 - RNA, 23 nt, Human
uagaauccaaacuuggauuuuug

SEQ ID NO: 3727970 - RNA, 13 nt, Human
uagaaucccugug

SEQ ID NO: 3727971 - RNA, 13 nt, Human
uagaaucuauuuu

SEQ ID NO: 3727972 - RNA, 18 nt, Human
uagaaucuauuuucuaug

SEQ ID NO: 3727973 - RNA, 22 nt, Human
uagaaucugcaauucaaaaguu

SEQ ID NO: 3727974 - RNA, 18 nt, Human
uagaaugaaccacugccc

SEQ ID NO: 3727975 - RNA, 12 nt, Human
uagaaugacagu

SEQ ID NO: 3727976 - RNA, 17 nt, Human
uagaaugagaucugaau

SEQ ID NO: 3727977 - RNA, 16 nt, Human
uagaauggugauuuua

SEQ ID NO: 3727978 - RNA, 17 nt, Human
uagaauguaaagcuugu

SEQ ID NO: 3727979 - RNA, 18 nt, Human
uagaauguaaagcuuguc

SEQ ID NO: 3727980 - RNA, 15 nt, Human
uagaauguaaauguc

SEQ ID NO: 3727981 - RNA, 18 nt, Human
uagaauguaaaugucuca

SEQ ID NO: 3727982 - RNA, 23 nt, Human
uagaauguaguuugaggaaauuu

SEQ ID NO: 3727983 - RNA, 18 nt, Human
uagaauguauuguaccuu

SEQ ID NO: 3727984 - RNA, 19 nt, Human
uagaaugugugucaauuua

SEQ ID NO: 3727985 - RNA, 19 nt, Human
uagaauguuuucaaauguu

SEQ ID NO: 3727986 - RNA, 19 nt, Human
uagaauuagcuuuuucauc

SEQ ID NO: 3727987 - RNA, 21 nt, Human
uagaauuauaacuggaaagaa

SEQ ID NO: 3727988 - RNA, 20 nt, Human
uagaauuauuucacaaauaa

SEQ ID NO: 3727989 - RNA, 15 nt, Human
uagaauuauuuuuca

SEQ ID NO: 3727990 - RNA, 15 nt, Human
uagaauucccucucu

SEQ ID NO: 3727991 - RNA, 23 nt, Human
uagaauuccuucagggugaugcc

SEQ ID NO: 3727992 - RNA, 16 nt, Human
uagaauucuagugcug

SEQ ID NO: 3727993 - RNA, 22 nt, Human
uagaauucuagugcugcugaag

SEQ ID NO: 3727994 - RNA, 15 nt, Human
uagaauucuguauag

SEQ ID NO: 3727995 - RNA, 17 nt, Human
uagaauugaagguuuuu

SEQ ID NO: 3727996 - RNA, 23 nt, Human
uagaauugaagguuuuugauagc

SEQ ID NO: 3727997 - RNA, 18 nt, Human
uagaauugcaaucuauaa

SEQ ID NO: 3727998 - RNA, 20 nt, Human
uagaauugcaaucuauaaua

SEQ ID NO: 3727999 - RNA, 15 nt, Human
uagaauugcauugac

SEQ ID NO: 3728000 - RNA, 14 nt, Human
uagaauuguuauag

SEQ ID NO: 3728001 - RNA, 22 nt, Human
uagaauuugauaugugaacagu

SEQ ID NO: 3728002 - RNA, 16 nt, Human
uagaauuuuaagugcu

SEQ ID NO: 3728003 - RNA, 21 nt, Human
uagaauuuugguauaaagaaa

SEQ ID NO: 3728004 - RNA, 13 nt, Human
uagacaaaaagua

SEQ ID NO: 3728005 - RNA, 20 nt, Human
uagacaaaaaguauauuaaa

SEQ ID NO: 3728006 - RNA, 12 nt, Human
uagacaaaguac

SEQ ID NO: 3728007 - RNA, 17 nt, Human
uagacaagauauuguac

SEQ ID NO: 3728008 - RNA, 14 nt, Human
uagacaagccagaa

SEQ ID NO: 3728009 - RNA, 18 nt, Human
uagacaauauaagagcuu

SEQ ID NO: 3728010 - RNA, 17 nt, Human
uagacaaucauuguuuu

SEQ ID NO: 3728011 - RNA, 18 nt, Human
uagacaauugagguaagu

SEQ ID NO: 3728012 - RNA, 19 nt, Human
uagacacauaugaggggga

SEQ ID NO: 3728013 - RNA, 17 nt, Human
uagacacauuuaaggau

SEQ ID NO: 3728014 - RNA, 18 nt, Human
uagacaccaaaguucuaa

SEQ ID NO: 3728015 - RNA, 18 nt, Human
uagacacccauuuucaca

SEQ ID NO: 3728016 - RNA, 14 nt, Human
uagacagaacaccu

SEQ ID NO: 3728017 - RNA, 15 nt, Human
uagacagaacaccua

SEQ ID NO: 3728018 - RNA, 12 nt, Human
uagacagaagaa

SEQ ID NO: 3728019 - RNA, 14 nt, Human
uagacagaagaaac

SEQ ID NO: 3728020 - RNA, 14 nt, Human
uagacagcaugaga

SEQ ID NO: 3728021 - RNA, 17 nt, Human
uagacagucccugccaa

SEQ ID NO: 3728022 - RNA, 18 nt, Human
uagacagucucacuuugu

SEQ ID NO: 3728023 - RNA, 13 nt, Human
uagacaguuugua

SEQ ID NO: 3728024 - RNA, 18 nt, Human
uagacaguuuguaaaugu

SEQ ID NO: 3728025 - RNA, 22 nt, Human
uagacaguuuguaaauguuauu

SEQ ID NO: 3728026 - RNA, 14 nt, Human
uagacaucaaacuc

SEQ ID NO: 3728027 - RNA, 22 nt, Human
uagacaucaaacucaaugcuuu

SEQ ID NO: 3728028 - RNA, 23 nt, Human
uagacaucaaacucaaugcuuua

SEQ ID NO: 3728029 - RNA, 17 nt, Human
uagacauggagguucua

SEQ ID NO: 3728030 - RNA, 20 nt, Human
uagacauggagguucuaagg

SEQ ID NO: 3728031 - RNA, 22 nt, Human
uagacauggagguucuaaggcc

SEQ ID NO: 3728032 - RNA, 21 nt, Human
uagacauuugcuaugagcugg

SEQ ID NO: 3728033 - RNA, 19 nt, Human
uagacauuuguaaauguaa

SEQ ID NO: 3728034 - RNA, 23 nt, Human
uagacauuuuaacaagaagauga

SEQ ID NO: 3728035 - RNA, 23 nt, Human
uagaccaaggaacaaaaaaacca

SEQ ID NO: 3728036 - RNA, 10 nt, Human
uagaccaaua

SEQ ID NO: 3728037 - RNA, 15 nt, Human
uagaccaccaagccu

SEQ ID NO: 3728038 - RNA, 22 nt, Human
uagaccagcagacagagccagg

SEQ ID NO: 3728039 - RNA, 23 nt, Human
uagaccauuuaucugggauuaug

SEQ ID NO: 3728040 - RNA, 18 nt, Human
uagaccccauacaaguuu

SEQ ID NO: 3728041 - RNA, 17 nt, Human
uagacccucaugcugcc

SEQ ID NO: 3728042 - RNA, 19 nt, Human
uagacccucaugcugccaa

SEQ ID NO: 3728043 - RNA, 14 nt, Human
uagacccucucaag

SEQ ID NO: 3728044 - RNA, 12 nt, Human
uagacccugggu

SEQ ID NO: 3728045 - RNA, 16 nt, Human
uagacccugggugggc

SEQ ID NO: 3728046 - RNA, 19 nt, Human
uagaccuagggaggaccuu

SEQ ID NO: 3728047 - RNA, 14 nt, Human
uagacuaaaugaaa

SEQ ID NO: 3728048 - RNA, 20 nt, Human
uagacuauauacaugugugu

SEQ ID NO: 3728049 - RNA, 22 nt, Human
uagacuauauacauguguguau

SEQ ID NO: 3728050 - RNA, 23 nt, Human
uagacuauauacauguguguaua

SEQ ID NO: 3728051 - RNA, 21 nt, Human
uagacucaugguguguuacac

SEQ ID NO: 3728052 - RNA, 20 nt, Human
uagacucggggugcuuccuu

SEQ ID NO: 3728053 - RNA, 20 nt, Human
gccaaggccgaagcucuggc

SEQ ID NO: 3728054 - RNA, 14 nt, Human
gccaaggccuucuc

SEQ ID NO: 3728055 - RNA, 19 nt, Human
gccaagggcauaaauuauu

SEQ ID NO: 3728056 - RNA, 15 nt, Human
gccaaggucugagcc

SEQ ID NO: 3728057 - RNA, 22 nt, Human
gccaaggucugagccacagcag

SEQ ID NO: 3728058 - RNA, 14 nt, Human
gccaaggugggagg

SEQ ID NO: 3728059 - RNA, 23 nt, Human
gccaaggugggcugagcccuggc

SEQ ID NO: 3728060 - RNA, 23 nt, Human
gccaagguguccuacagaaaaac

SEQ ID NO: 3728061 - RNA, 20 nt, Human
gccaagguuuuauaaggcug

SEQ ID NO: 3728062 - RNA, 22 nt, Human
gccaaguauaauuuuuuguaau

SEQ ID NO: 3728063 - RNA, 12 nt, Human
gccaaguccaga

SEQ ID NO: 3728064 - RNA, 15 nt, Human
gccaaguccaggucc

SEQ ID NO: 3728065 - RNA, 16 nt, Human
gccaaguccagguccu

SEQ ID NO: 3728066 - RNA, 17 nt, Human
gccaaguccagguccug

SEQ ID NO: 3728067 - RNA, 19 nt, Human
gccaaguccagguccuggu

SEQ ID NO: 3728068 - RNA, 22 nt, Human
gccaaguccagguccugguggg

SEQ ID NO: 3728069 - RNA, 21 nt, Human
gccaaguccgcagaagcccug

SEQ ID NO: 3728070 - RNA, 16 nt, Human
gccaagugcaggcugg

SEQ ID NO: 3728071 - RNA, 13 nt, Human
gccaaguggggug

SEQ ID NO: 3728072 - RNA, 21 nt, Human
gccaaguuccucuagugcccu

SEQ ID NO: 3728073 - RNA, 16 nt, Human
gccaauaaaccaauga

SEQ ID NO: 3728074 - RNA, 20 nt, Human
gccaauaauaauaccucccu

SEQ ID NO: 3728075 - RNA, 17 nt, Human
gccaauauccuaauaaa

SEQ ID NO: 3728076 - RNA, 23 nt, Human
gccaauauccuaauaaaaaggug

SEQ ID NO: 3728077 - RNA, 13 nt, Human
gccaauauguauu

SEQ ID NO: 3728078 - RNA, 18 nt, Human
gccaauccccuccuuggg

SEQ ID NO: 3728079 - RNA, 21 nt, Human
gccaauccccuccuugggcac

SEQ ID NO: 3728080 - RNA, 21 nt, Human
gccaaucccucaccuucugag

SEQ ID NO: 3728081 - RNA, 23 nt, Human
gccaaucucuucuaaaaaaaaac

SEQ ID NO: 3728082 - RNA, 19 nt, Human
gccaaugcaccuaaagaaa

SEQ ID NO: 3728083 - RNA, 21 nt, Human
gccaauggagacugucucaag

SEQ ID NO: 3728084 - RNA, 20 nt, Human
gccaaugugaacagcggcug

SEQ ID NO: 3728085 - RNA, 19 nt, Human
gccaauguuuuccacccau

SEQ ID NO: 3728086 - RNA, 19 nt, Human
gccaauuauuguuacacau

SEQ ID NO: 3728087 - RNA, 11 nt, Human
gccaauuuuuc

SEQ ID NO: 3728088 - RNA, 23 nt, Human
gccaauuuuugccuucauuaccu

SEQ ID NO: 3728089 - RNA, 21 nt, Human
gccacaacccuguuuuauacu

SEQ ID NO: 3728090 - RNA, 14 nt, Human
gccacaagaaauuu

SEQ ID NO: 3728091 - RNA, 15 nt, Human
gccacaaggaagaaa

SEQ ID NO: 3728092 - RNA, 23 nt, Human
gccacaaggaagaaauuaacuua

SEQ ID NO: 3728093 - RNA, 19 nt, Human
gccacacaaacguuuacuu

SEQ ID NO: 3728094 - RNA, 12 nt, Human
gccacacacaca

SEQ ID NO: 3728095 - RNA, 15 nt, Human
gccacacacacagaa

SEQ ID NO: 3728096 - RNA, 16 nt, Human
gccacacacacagaaa

SEQ ID NO: 3728097 - RNA, 18 nt, Human
gccacacacacagaaaau

SEQ ID NO: 3728098 - RNA, 21 nt, Human
gccacacacacagaaaauaua

SEQ ID NO: 3728099 - RNA, 22 nt, Human
gccacacacacagaaaauauac

SEQ ID NO: 3728100 - RNA, 21 nt, Human
gccacacacagaaaaggcugc

SEQ ID NO: 3728101 - RNA, 23 nt, Human
gccacacaucacccuuaccaugu

SEQ ID NO: 3728102 - RNA, 14 nt, Human
gccacacaugggca

SEQ ID NO: 3728103 - RNA, 18 nt, Human
gccacaccaagcugugcc

SEQ ID NO: 3728104 - RNA, 21 nt, Human
gccacaccaagcugugccacc

SEQ ID NO: 3728105 - RNA, 21 nt, Human
gccacaccaggauagagacug

SEQ ID NO: 3728106 - RNA, 15 nt, Human
gccacacccaggcac

SEQ ID NO: 3728107 - RNA, 22 nt, Human
gccacacccucccccgccacuc

SEQ ID NO: 3728108 - RNA, 14 nt, Human
gccacaccugagcc

SEQ ID NO: 3728109 - RNA, 16 nt, Human
gccacaccuuugucca

SEQ ID NO: 3728110 - RNA, 21 nt, Human
gccacacgucugacccucucc

SEQ ID NO: 3728111 - RNA, 18 nt, Human
gccacacuauuaccauga

SEQ ID NO: 3728112 - RNA, 17 nt, Human
gccacacucagcacaag

SEQ ID NO: 3728113 - RNA, 12 nt, Human
gccacacuguga

SEQ ID NO: 3728114 - RNA, 16 nt, Human
gccacacugugacaca

SEQ ID NO: 3728115 - RNA, 20 nt, Human
gccacacuucaggcucuucu

SEQ ID NO: 3728116 - RNA, 19 nt, Human
gccacacuucucaggacac

SEQ ID NO: 3728117 - RNA, 14 nt, Human
gccacagaagccag

SEQ ID NO: 3728118 - RNA, 13 nt, Human
gccacagagaaag

SEQ ID NO: 3728119 - RNA, 16 nt, Human
gccacagcagcauuuu

SEQ ID NO: 3728120 - RNA, 19 nt, Human
gccacagcccagccacgga

SEQ ID NO: 3728121 - RNA, 16 nt, Human
gccacagcccaggccu

SEQ ID NO: 3728122 - RNA, 23 nt, Human
gccacagcccaggccuccagcuc

SEQ ID NO: 3728123 - RNA, 16 nt, Human
gccacagccuccccug

SEQ ID NO: 3728124 - RNA, 21 nt, Human
gccacagccuccccugccagg

SEQ ID NO: 3728125 - RNA, 18 nt, Human
gccacagcgccagccuca

SEQ ID NO: 3728126 - RNA, 16 nt, Human
gccacaggccucccug

SEQ ID NO: 3728127 - RNA, 17 nt, Human
gccacaggccucccugu

SEQ ID NO: 3728128 - RNA, 21 nt, Human
gccacaggccucccuguuuga

SEQ ID NO: 3728129 - RNA, 15 nt, Human
gccacaggucuuuau

SEQ ID NO: 3728130 - RNA, 15 nt, Human
gccacaguagaacug

SEQ ID NO: 3728131 - RNA, 12 nt, Human
gccacaguuguu

SEQ ID NO: 3728132 - RNA, 16 nt, Human
gccacauacuugcagc

SEQ ID NO: 3728133 - RNA, 16 nt, Human
gccacaucaaaccuuu

SEQ ID NO: 3728134 - RNA, 15 nt, Human
gccacaucaaagagg

SEQ ID NO: 3728135 - RNA, 14 nt, Human
gccacaugaguccc

SEQ ID NO: 3728136 - RNA, 18 nt, Human
gccacaugagucccagug

SEQ ID NO: 3728137 - RNA, 15 nt, Human
gccacaugggaggcu

SEQ ID NO: 3728138 - RNA, 15 nt, Human
gccacauuagaacuu

SEQ ID NO: 3728139 - RNA, 23 nt, Human
gccacauuagaacuucuccgucc

SEQ ID NO: 3728140 - RNA, 14 nt, Human
gccacauuuggaau

SEQ ID NO: 3728141 - RNA, 22 nt, Human
gccacauuuggaauacuuuuug

SEQ ID NO: 3728142 - RNA, 17 nt, Human
gccacauuuucagccaa

SEQ ID NO: 3728143 - RNA, 14 nt, Human
gccaccaaagcugc

SEQ ID NO: 3728144 - RNA, 16 nt, Human
gccaccaaagcugccc

SEQ ID NO: 3728145 - RNA, 17 nt, Human
gccaccaaagcugccca

SEQ ID NO: 3728146 - RNA, 16 nt, Human
gccaccaaaggccagg

SEQ ID NO: 3728147 - RNA, 12 nt, Human
gccaccaacaua

SEQ ID NO: 3728148 - RNA, 21 nt, Human
gccaccaacauacucccaucu

SEQ ID NO: 3728149 - RNA, 22 nt, Human
gccaccaacucuugcaggucuc

SEQ ID NO: 3728150 - RNA, 18 nt, Human
gccaccaacuggcccucu

SEQ ID NO: 3728151 - RNA, 14 nt, Human
gccaccaagaggga

SEQ ID NO: 3728152 - RNA, 19 nt, Human
gccaccaagagggacgccu

SEQ ID NO: 3728153 - RNA, 16 nt, Human
gccaccaccccccacu

SEQ ID NO: 3728154 - RNA, 22 nt, Human
gccaccaccccccacucugugc

SEQ ID NO: 3728155 - RNA, 12 nt, Human
gccaccaccucu

SEQ ID NO: 3728156 - RNA, 14 nt, Human
gccaccaccucugu

SEQ ID NO: 3728157 - RNA, 21 nt, Human
gccaccagagaccguccucac

SEQ ID NO: 3728158 - RNA, 23 nt, Human
gccaccagagaccguccucaccc

SEQ ID NO: 3728159 - RNA, 19 nt, Human
gccaccagcucugccgucu

SEQ ID NO: 3728160 - RNA, 22 nt, Human
gccaccaggaucagccaggagg

SEQ ID NO: 3728161 - RNA, 17 nt, Human
gccaccaggauggcccu

SEQ ID NO: 3728162 - RNA, 18 nt, Human
gccaccauccuauugcaa

SEQ ID NO: 3728163 - RNA, 15 nt, Human
gccaccauccugcug

SEQ ID NO: 3728164 - RNA, 22 nt, Human
gccaccaugccucacuaauuuu

SEQ ID NO: 3728165 - RNA, 16 nt, Human
gccaccauuccuggaa

SEQ ID NO: 3728166 - RNA, 14 nt, Human
gccacccaaagcag

SEQ ID NO: 3728167 - RNA, 16 nt, Human
gccacccaccucccug

SEQ ID NO: 3728168 - RNA, 14 nt, Human
gccacccagcccca

SEQ ID NO: 3728169 - RNA, 17 nt, Human
gccacccaggaggcagg

SEQ ID NO: 3728170 - RNA, 12 nt, Human
gccacccaggau

SEQ ID NO: 3728171 - RNA, 13 nt, Human
gccacccaggauc

SEQ ID NO: 3728172 - RNA, 15 nt, Human
gccaccccacccucc

SEQ ID NO: 3728173 - RNA, 21 nt, Human
gccaccccacccucccuggag

SEQ ID NO: 3728174 - RNA, 22 nt, Human
gccaccccacccucccuggagu

SEQ ID NO: 3728175 - RNA, 16 nt, Human
gccaccccgagggcug

SEQ ID NO: 3728176 - RNA, 23 nt, Human
gccaccccgagggcugagccugg

SEQ ID NO: 3728177 - RNA, 19 nt, Human
gccaccccgggcucucugc

SEQ ID NO: 3728178 - RNA, 21 nt, Human
gccaccccgggcucucugcug

SEQ ID NO: 3728179 - RNA, 20 nt, Human
gccaccccuaaacuccaggg

SEQ ID NO: 3728180 - RNA, 21 nt, Human
gccacccguucugcuggccug

SEQ ID NO: 3728181 - RNA, 13 nt, Human
gccacccucaugc

SEQ ID NO: 3728182 - RNA, 12 nt, Human
gccacccugagg

SEQ ID NO: 3728183 - RNA, 14 nt, Human
gccacccugaggag

SEQ ID NO: 3728184 - RNA, 23 nt, Human
gccacccugaggagucugagguc

SEQ ID NO: 3728185 - RNA, 18 nt, Human
gccacccugaggccucug

SEQ ID NO: 3728186 - RNA, 13 nt, Human
gccacccugggga

SEQ ID NO: 3728187 - RNA, 19 nt, Human
gccacccuggggagaaagu

SEQ ID NO: 3728188 - RNA, 12 nt, Human
gccacccugugc

SEQ ID NO: 3728189 - RNA, 22 nt, Human
gccaccgccgacuuuguacccc

SEQ ID NO: 3728190 - RNA, 16 nt, Human
gccaccgccuccuaca

SEQ ID NO: 3728191 - RNA, 17 nt, Human
gccaccgcgcccagccu

SEQ ID NO: 3728192 - RNA, 22 nt, Human
gccaccgcgggugugggaaagc

SEQ ID NO: 3728193 - RNA, 20 nt, Human
gccaccuccccuauccaccc

SEQ ID NO: 3728194 - RNA, 20 nt, Human
gccaccuccccuugccagcu

SEQ ID NO: 3728195 - RNA, 22 nt, Human
gccaccuccccuugccagcugc

SEQ ID NO: 3728196 - RNA, 24 nt, Human
gccaccuccccuugccagcugcug

SEQ ID NO: 3728197 - RNA, 20 nt, Human
gccaccucccugacccgucu

SEQ ID NO: 3728198 - RNA, 22 nt, Human
gccaccuccuaaaaggcccaga

SEQ ID NO: 3728199 - RNA, 21 nt, Human
gccaccucuaacagcaccaaa

SEQ ID NO: 3728200 - RNA, 21 nt, Human
gccaccucugcggaccccagc

SEQ ID NO: 3728201 - RNA, 14 nt, Human
uacaccuaugucau

SEQ ID NO: 3728202 - RNA, 18 nt, Human
uacaccuauuaucccagc

SEQ ID NO: 3728203 - RNA, 15 nt, Human
uacaccuggcugagg

SEQ ID NO: 3728204 - RNA, 22 nt, Human
uacaccuggcugagguuccucu

SEQ ID NO: 3728205 - RNA, 19 nt, Human
uacaccuuucuccuuugua

SEQ ID NO: 3728206 - RNA, 21 nt, Human
uacacguauuugaauggccuu

SEQ ID NO: 3728207 - RNA, 15 nt, Human
uacacuaaaagguga

SEQ ID NO: 3728208 - RNA, 19 nt, Human
uacacucaagcaugaagau

SEQ ID NO: 3728209 - RNA, 21 nt, Human
uacacucucaaagcaaauaau

SEQ ID NO: 3728210 - RNA, 12 nt, Human
uacacucuuaua

SEQ ID NO: 3728211 - RNA, 20 nt, Human
uacacugaaguuaacagaga

SEQ ID NO: 3728212 - RNA, 17 nt, Human
uacacugaauauuuaua

SEQ ID NO: 3728213 - RNA, 22 nt, Human
uacacugaauuuuuauguguga

SEQ ID NO: 3728214 - RNA, 21 nt, Human
uacacugagagccuuuuugaa

SEQ ID NO: 3728215 - RNA, 16 nt, Human
uacacugcaaucauau

SEQ ID NO: 3728216 - RNA, 21 nt, Human
uacacugcaaucauaugugau

SEQ ID NO: 3728217 - RNA, 16 nt, Human
uacacugccugccuua

SEQ ID NO: 3728218 - RNA, 18 nt, Human
uacacugccugccuuaag

SEQ ID NO: 3728219 - RNA, 21 nt, Human
uacacugccugccuuaaguga

SEQ ID NO: 3728220 - RNA, 13 nt, Human
uacacugccugua

SEQ ID NO: 3728221 - RNA, 17 nt, Human
uacacugccuguauacu

SEQ ID NO: 3728222 - RNA, 19 nt, Human
uacacugccuguauacuuu

SEQ ID NO: 3728223 - RNA, 21 nt, Human
uacacugccuguauacuuuag

SEQ ID NO: 3728224 - RNA, 24 nt, Human
uacacuggcaaugguaguuucugu

SEQ ID NO: 3728225 - RNA, 16 nt, Human
uacacuguauuacaua

SEQ ID NO: 3728226 - RNA, 17 nt, Human
uacacuguguaaauacc

SEQ ID NO: 3728227 - RNA, 16 nt, Human
uacacuguuagaacac

SEQ ID NO: 3728228 - RNA, 19 nt, Human
uacacuguuagaacacuau

SEQ ID NO: 3728229 - RNA, 20 nt, Human
uacacuguuagaacacuauu

SEQ ID NO: 3728230 - RNA, 15 nt, Human
uacacuguuauuuuc

SEQ ID NO: 3728231 - RNA, 14 nt, Human
uacacuguuucaaa

SEQ ID NO: 3728232 - RNA, 17 nt, Human
uacacuguuucaaacuu

SEQ ID NO: 3728233 - RNA, 19 nt, Human
uacacuguuucaaacuuua

SEQ ID NO: 3728234 - RNA, 16 nt, Human
uacacuuacacuuuau

SEQ ID NO: 3728235 - RNA, 13 nt, Human
uacacuugcccug

SEQ ID NO: 3728236 - RNA, 15 nt, Human
uacacuugcccugcu

SEQ ID NO: 3728237 - RNA, 19 nt, Human
uacacuuguauaaauguau

SEQ ID NO: 3728238 - RNA, 13 nt, Human
uacacuuuaugca

SEQ ID NO: 3728239 - RNA, 13 nt, Human
uacacuuuguugc

SEQ ID NO: 3728240 - RNA, 16 nt, Human
uacagaaaaaccuugg

SEQ ID NO: 3728241 - RNA, 14 nt, Human
uacagaaaaaucuu

SEQ ID NO: 3728242 - RNA, 18 nt, Human
uacagaaaaguugaauuu

SEQ ID NO: 3728243 - RNA, 22 nt, Human
uacagaaaaguugaauuuuaca

SEQ ID NO: 3728244 - RNA, 21 nt, Human
uacagaaagauggaugugcuu

SEQ ID NO: 3728245 - RNA, 13 nt, Human
uacagaaagcugc

SEQ ID NO: 3728246 - RNA, 10 nt, Human
uacagaaagu

SEQ ID NO: 3728247 - RNA, 22 nt, Human
uacagaaaguggugcucaguug

SEQ ID NO: 3728248 - RNA, 24 nt, Human
uacagaaaguggugcucaguugua

SEQ ID NO: 3728249 - RNA, 22 nt, Human
uacagaaauacuauaacauaug

SEQ ID NO: 3728250 - RNA, 19 nt, Human
uacagaaauuuaauucaga

SEQ ID NO: 3728251 - RNA, 16 nt, Human
uacagaacucuuucaa

SEQ ID NO: 3728252 - RNA, 18 nt, Human
uacagaauauuucuauug

SEQ ID NO: 3728253 - RNA, 21 nt, Human
uacagaauauuucuauugaau

SEQ ID NO: 3728254 - RNA, 21 nt, Human
uacagaauucugcuaccucac

SEQ ID NO: 3728255 - RNA, 21 nt, Human
uacagaauugugucugcagga

SEQ ID NO: 3728256 - RNA, 14 nt, Human
uacagaauuugaau

SEQ ID NO: 3728257 - RNA, 13 nt, Human
uacagacacuaag

SEQ ID NO: 3728258 - RNA, 18 nt, Human
uacagacacuaaguuaua

SEQ ID NO: 3728259 - RNA, 18 nt, Human
uacagacauauuuaacug

SEQ ID NO: 3728260 - RNA, 19 nt, Human
uacagaccgaacuguugua

SEQ ID NO: 3728261 - RNA, 16 nt, Human
uacagaccugcuuuuu

SEQ ID NO: 3728262 - RNA, 17 nt, Human
uacagacgcugcuguca

SEQ ID NO: 3728263 - RNA, 16 nt, Human
uacagacguaugcuua

SEQ ID NO: 3728264 - RNA, 17 nt, Human
uacagagaaaccagcuu

SEQ ID NO: 3728265 - RNA, 20 nt, Human
uacagagaaaccagcuuccu

SEQ ID NO: 3728266 - RNA, 19 nt, Human
uacagagaacuaacacuau

SEQ ID NO: 3728267 - RNA, 23 nt, Human
uacagagaacuaacacuauuuua

SEQ ID NO: 3728268 - RNA, 10 nt, Human
uacagagaag

SEQ ID NO: 3728269 - RNA, 11 nt, Human
uacagagaagc

SEQ ID NO: 3728270 - RNA, 17 nt, Human
uacagagaagccagcuu

SEQ ID NO: 3728271 - RNA, 18 nt, Human
uacagagaagccagcuug

SEQ ID NO: 3728272 - RNA, 13 nt, Human
uacagagaagccu

SEQ ID NO: 3728273 - RNA, 14 nt, Human
uacagagaagccuu

SEQ ID NO: 3728274 - RNA, 17 nt, Human
uacagagaagccuucaa

SEQ ID NO: 3728275 - RNA, 21 nt, Human
uacagagaagccuucaagcuc

SEQ ID NO: 3728276 - RNA, 22 nt, Human
uacagagaagccuucaagcucu

SEQ ID NO: 3728277 - RNA, 14 nt, Human
uacagagaaggaau

SEQ ID NO: 3728278 - RNA, 13 nt, Human
uacagagaaguca

SEQ ID NO: 3728279 - RNA, 20 nt, Human
uacagagaagucacagggca

SEQ ID NO: 3728280 - RNA, 22 nt, Human
uacagagaagucacagggcagu

SEQ ID NO: 3728281 - RNA, 15 nt, Human
uacagagaagugaau

SEQ ID NO: 3728282 - RNA, 17 nt, Human
uacagagacagaaagca

SEQ ID NO: 3728283 - RNA, 22 nt, Human
uacagagccguaaaaacugaag

SEQ ID NO: 3728284 - RNA, 15 nt, Human
uacagagcuucccug

SEQ ID NO: 3728285 - RNA, 16 nt, Human
uacagagguauuaaaa

SEQ ID NO: 3728286 - RNA, 22 nt, Human
uacagaguggaauaagacagag

SEQ ID NO: 3728287 - RNA, 14 nt, Human
uacagauaaaaugu

SEQ ID NO: 3728288 - RNA, 15 nt, Human
uacagauaaaugauu

SEQ ID NO: 3728289 - RNA, 20 nt, Human
uacagauaaaugauucaaaa

SEQ ID NO: 3728290 - RNA, 21 nt, Human
uacagauaaaugauucaaaaa

SEQ ID NO: 3728291 - RNA, 19 nt, Human
uacagauagagaguuguug

SEQ ID NO: 3728292 - RNA, 12 nt, Human
uacagaugaaaa

SEQ ID NO: 3728293 - RNA, 15 nt, Human
uacagauuuugauag

SEQ ID NO: 3728294 - RNA, 21 nt, Human
uacagauuuugauagcaaagc

SEQ ID NO: 3728295 - RNA, 22 nt, Human
uacagauuuugauagcaaagcg

SEQ ID NO: 3728296 - RNA, 20 nt, Human
uacagcaacaauuuaugaau

SEQ ID NO: 3728297 - RNA, 24 nt, Human
uacagcaaggagauuuacaacugg

SEQ ID NO: 3728298 - RNA, 15 nt, Human
uacagcacuacucug

SEQ ID NO: 3728299 - RNA, 23 nt, Human
uacagcacuacugggugucauuu

SEQ ID NO: 3728300 - RNA, 14 nt, Human
uacagcaguagaca

SEQ ID NO: 3728301 - RNA, 16 nt, Human
uacagcauuacaaauu

SEQ ID NO: 3728302 - RNA, 22 nt, Human
uacagcauuacaaauugcuuac

SEQ ID NO: 3728303 - RNA, 12 nt, Human
uacagcccagag

SEQ ID NO: 3728304 - RNA, 19 nt, Human
uacagccccuuuuucauau

SEQ ID NO: 3728305 - RNA, 22 nt, Human
uacagccgagacucgacucugu

SEQ ID NO: 3728306 - RNA, 20 nt, Human
uacagccuuaauauuuuccu

SEQ ID NO: 3728307 - RNA, 14 nt, Human
uacagcgagaggca

SEQ ID NO: 3728308 - RNA, 16 nt, Human
uacagcuaugaagaaa

SEQ ID NO: 3728309 - RNA, 16 nt, Human
uacagcucccccagcu

SEQ ID NO: 3728310 - RNA, 17 nt, Human
uacagcucccccagcuc

SEQ ID NO: 3728311 - RNA, 14 nt, Human
uacagcuccuuuga

SEQ ID NO: 3728312 - RNA, 17 nt, Human
uacagcuggggugcagg

SEQ ID NO: 3728313 - RNA, 18 nt, Human
uacagcuguauugucuga

SEQ ID NO: 3728314 - RNA, 16 nt, Human
uacagcuguuuaagau

SEQ ID NO: 3728315 - RNA, 23 nt, Human
uacagcuugaccgugaggccaga

SEQ ID NO: 3728316 - RNA, 20 nt, Human
uacagcuuuacacacacaga

SEQ ID NO: 3728317 - RNA, 21 nt, Human
uacagcuuuacacacacagau

SEQ ID NO: 3728318 - RNA, 23 nt, Human
uacagcuuucugaccuucagcuc

SEQ ID NO: 3728319 - RNA, 23 nt, Human
uacagcuuucuugcucccuucag

SEQ ID NO: 3728320 - RNA, 15 nt, Human
uacaggaaacaguug

SEQ ID NO: 3728321 - RNA, 21 nt, Human
uacaggaagcaccccaugcca

SEQ ID NO: 3728322 - RNA, 14 nt, Human
uacaggaaguacug

SEQ ID NO: 3728323 - RNA, 15 nt, Human
uacaggaaguacugg

SEQ ID NO: 3728324 - RNA, 22 nt, Human
uacaggaaguacuggagaaaau

SEQ ID NO: 3728325 - RNA, 13 nt, Human
uacaggaaguccc

SEQ ID NO: 3728326 - RNA, 14 nt, Human
uacaggacauauau

SEQ ID NO: 3728327 - RNA, 15 nt, Human
uacaggagugagcac

SEQ ID NO: 3728328 - RNA, 14 nt, Human
uacaggauuugaaa

SEQ ID NO: 3728329 - RNA, 23 nt, Human
uacaggauuugaacucagaucug

SEQ ID NO: 3728330 - RNA, 13 nt, Human
uacaggcaauucc

SEQ ID NO: 3728331 - RNA, 14 nt, Human
uacaggcaauuccg

SEQ ID NO: 3728332 - RNA, 15 nt, Human
uacaggcagucucuc

SEQ ID NO: 3728333 - RNA, 14 nt, Human
uacaggcuccugcc

SEQ ID NO: 3728334 - RNA, 16 nt, Human
uacagggaaugccuga

SEQ ID NO: 3728335 - RNA, 17 nt, Human
uacagggagccuccugc

SEQ ID NO: 3728336 - RNA, 21 nt, Human
uacagggagccuccugcccag

SEQ ID NO: 3728337 - RNA, 17 nt, Human
uacagggaugguguuca

SEQ ID NO: 3728338 - RNA, 21 nt, Human
uacaggggaauauuuuauuca

SEQ ID NO: 3728339 - RNA, 13 nt, Human
uacaggggccaga

SEQ ID NO: 3728340 - RNA, 19 nt, Human
uacagggggucuggcuggu

SEQ ID NO: 3728341 - RNA, 24 nt, Human
uacaggguaacugugcugaaugcu

SEQ ID NO: 3728342 - RNA, 22 nt, Human
uacaggguagcagguaccacug

SEQ ID NO: 3728343 - RNA, 21 nt, Human
uacagguaaggugagggaaua

SEQ ID NO: 3728344 - RNA, 16 nt, Human
uacagguaccaguucu

SEQ ID NO: 3728345 - RNA, 15 nt, Human
uacagguacuuuguc

SEQ ID NO: 3728346 - RNA, 23 nt, Human
uacaggucauauuaauauauuuc

SEQ ID NO: 3728347 - RNA, 16 nt, Human
uacaggugugagucac

SEQ ID NO: 3728348 - RNA, 13 nt, Human
uacagguuacaac

SEQ ID NO: 3728349 - RNA, 17 nt, Human
uacagguuacaacagau

SEQ ID NO: 3728350 - RNA, 13 nt, Human
uagacucuuacuu

SEQ ID NO: 3728351 - RNA, 17 nt, Human
uagacugccagcucuuc

SEQ ID NO: 3728352 - RNA, 19 nt, Human
uagacuggaacuugaacug

SEQ ID NO: 3728353 - RNA, 16 nt, Human
uagacuggaaguucau

SEQ ID NO: 3728354 - RNA, 16 nt, Human
uagacuggacagcuug

SEQ ID NO: 3728355 - RNA, 18 nt, Human
uagacuggacagcuugug

SEQ ID NO: 3728356 - RNA, 17 nt, Human
uagacuggugacugauu

SEQ ID NO: 3728357 - RNA, 18 nt, Human
uagacuggugacugauuc

SEQ ID NO: 3728358 - RNA, 24 nt, Human
uagacuucagggagucagcuguuu

SEQ ID NO: 3728359 - RNA, 13 nt, Human
uagacuugaaaag

SEQ ID NO: 3728360 - RNA, 23 nt, Human
uagacuugaaaagagacaggcag

SEQ ID NO: 3728361 - RNA, 15 nt, Human
uagacuugaaauacu

SEQ ID NO: 3728362 - RNA, 21 nt, Human
uagacuuuaacauaagcuauu

SEQ ID NO: 3728363 - RNA, 18 nt, Human
uagacuuuagaaauaaau

SEQ ID NO: 3728364 - RNA, 15 nt, Human
uagacuuuaggcuuu

SEQ ID NO: 3728365 - RNA, 14 nt, Human
uagacuuuuccaau

SEQ ID NO: 3728366 - RNA, 20 nt, Human
uagacuuuuccaauauguga

SEQ ID NO: 3728367 - RNA, 23 nt, Human
uagacuuuuccaauaugugauuu

SEQ ID NO: 3728368 - RNA, 19 nt, Human
uagagaacgcagcccuaga

SEQ ID NO: 3728369 - RNA, 15 nt, Human
uagagaacugaaaag

SEQ ID NO: 3728370 - RNA, 16 nt, Human
uagagaacugaaaaga

SEQ ID NO: 3728371 - RNA, 15 nt, Human
uagagaagacaggcu

SEQ ID NO: 3728372 - RNA, 15 nt, Human
uagagaaugagaaau

SEQ ID NO: 3728373 - RNA, 15 nt, Human
uagagacagaagcag

SEQ ID NO: 3728374 - RNA, 18 nt, Human
uagagacagaagcaggcu

SEQ ID NO: 3728375 - RNA, 17 nt, Human
uagagaggaagauugaa

SEQ ID NO: 3728376 - RNA, 21 nt, Human
uagagaggacaauacuggggu

SEQ ID NO: 3728377 - RNA, 22 nt, Human
uagagaggacaauacugggguu

SEQ ID NO: 3728378 - RNA, 16 nt, Human
uagagagggagaagaa

SEQ ID NO: 3728379 - RNA, 19 nt, Human
uagagagggagaagaaguc

SEQ ID NO: 3728380 - RNA, 15 nt, Human
uagagaguguugaaa

SEQ ID NO: 3728381 - RNA, 22 nt, Human
uagagauauuuuguaaaaugua

SEQ ID NO: 3728382 - RNA, 20 nt, Human
uagagaucauccuuuccagc

SEQ ID NO: 3728383 - RNA, 23 nt, Human
uagagaucauccuuuccagcaug

SEQ ID NO: 3728384 - RNA, 23 nt, Human
uagagaugaaguuuguaguuguu

SEQ ID NO: 3728385 - RNA, 21 nt, Human
uagagaugagcuuucuuuuua

SEQ ID NO: 3728386 - RNA, 23 nt, Human
uagagaugcuguaacuuaaaaua

SEQ ID NO: 3728387 - RNA, 17 nt, Human
uagagauggagucuugc

SEQ ID NO: 3728388 - RNA, 21 nt, Human
uagagaugugcaauugauuuc

SEQ ID NO: 3728389 - RNA, 19 nt, Human
uagagauguuuuuaaaagu

SEQ ID NO: 3728390 - RNA, 23 nt, Human
uagagauguuuuuaaaaguuuca

SEQ ID NO: 3728391 - RNA, 17 nt, Human
uagagauuaccuccuga

SEQ ID NO: 3728392 - RNA, 18 nt, Human
uagagauuaccuccugag

SEQ ID NO: 3728393 - RNA, 21 nt, Human
uagagauuaccuccugagaaa

SEQ ID NO: 3728394 - RNA, 16 nt, Human
uagagauuugucuaau

SEQ ID NO: 3728395 - RNA, 23 nt, Human
uagagauuuuuuuguuguuuguu

SEQ ID NO: 3728396 - RNA, 14 nt, Human
uagagcaaaauuga

SEQ ID NO: 3728397 - RNA, 16 nt, Human
uagagcacacuguagc

SEQ ID NO: 3728398 - RNA, 14 nt, Human
uagagcacugccac

SEQ ID NO: 3728399 - RNA, 16 nt, Human
uagagcacugccacca

SEQ ID NO: 3728400 - RNA, 17 nt, Human
uagagcacugccaccag

SEQ ID NO: 3728401 - RNA, 12 nt, Human
uagagcagaaau

SEQ ID NO: 3728402 - RNA, 13 nt, Human
uagagcagaaauu

SEQ ID NO: 3728403 - RNA, 15 nt, Human
uagagcagaaauucu

SEQ ID NO: 3728404 - RNA, 14 nt, Human
uagagcagcccugg

SEQ ID NO: 3728405 - RNA, 14 nt, Human
uagagcagggcaag

SEQ ID NO: 3728406 - RNA, 17 nt, Human
uagagcaguuucugucc

SEQ ID NO: 3728407 - RNA, 16 nt, Human
uagagcauugccauuc

SEQ ID NO: 3728408 - RNA, 19 nt, Human
uagagccaggcacacacug

SEQ ID NO: 3728409 - RNA, 18 nt, Human
uagagccugccuggagcg

SEQ ID NO: 3728410 - RNA, 17 nt, Human
uagagccugcuggaucu

SEQ ID NO: 3728411 - RNA, 18 nt, Human
uagagcugauccagagca

SEQ ID NO: 3728412 - RNA, 20 nt, Human
uagagcuguauuaagccacu

SEQ ID NO: 3728413 - RNA, 17 nt, Human
uagagcuguucaacauc

SEQ ID NO: 3728414 - RNA, 22 nt, Human
uagagcuguucaacaucacuga

SEQ ID NO: 3728415 - RNA, 22 nt, Human
uagaggaaaaaaaugacuaaaa

SEQ ID NO: 3728416 - RNA, 23 nt, Human
uagaggcaguucgaccagccagg

SEQ ID NO: 3728417 - RNA, 15 nt, Human
uagaggccugaggau

SEQ ID NO: 3728418 - RNA, 17 nt, Human
uagaggcuuccuucauu

SEQ ID NO: 3728419 - RNA, 19 nt, Human
uagaggcuuccuucauuuc

SEQ ID NO: 3728420 - RNA, 20 nt, Human
uagaggcuucuccgccagcc

SEQ ID NO: 3728421 - RNA, 22 nt, Human
uagaggcuucuccgccagccuc

SEQ ID NO: 3728422 - RNA, 19 nt, Human
uagagggaccucucccagg

SEQ ID NO: 3728423 - RNA, 24 nt, Human
uagaggggaaaagagaugaugaaa

SEQ ID NO: 3728424 - RNA, 23 nt, Human
uagaggggggauuuccagccagg

SEQ ID NO: 3728425 - RNA, 17 nt, Human
uagagggugcugcccca

SEQ ID NO: 3728426 - RNA, 17 nt, Human
uagaggguuccuguaga

SEQ ID NO: 3728427 - RNA, 15 nt, Human
uagagguauaauugu

SEQ ID NO: 3728428 - RNA, 21 nt, Human
uagagguauaauugugugaua

SEQ ID NO: 3728429 - RNA, 16 nt, Human
uagaggugagaaauuu

SEQ ID NO: 3728430 - RNA, 19 nt, Human
uagaguaaaaagaaaacaa

SEQ ID NO: 3728431 - RNA, 19 nt, Human
uagaguagaagauuugaug

SEQ ID NO: 3728432 - RNA, 14 nt, Human
uagaguauaugcac

SEQ ID NO: 3728433 - RNA, 13 nt, Human
uagagucagccuu

SEQ ID NO: 3728434 - RNA, 22 nt, Human
uagagucaucuccaucagcugu

SEQ ID NO: 3728435 - RNA, 16 nt, Human
uagagucauuguaaug

SEQ ID NO: 3728436 - RNA, 13 nt, Human
uagaguccaaggu

SEQ ID NO: 3728437 - RNA, 17 nt, Human
uagagucugaacagcug

SEQ ID NO: 3728438 - RNA, 21 nt, Human
uagagucugagggcuuguagu

SEQ ID NO: 3728439 - RNA, 15 nt, Human
uagagugagggccug

SEQ ID NO: 3728440 - RNA, 19 nt, Human
uagagugagggccugaggu

SEQ ID NO: 3728441 - RNA, 20 nt, Human
uagaguguaguuuacagaaa

SEQ ID NO: 3728442 - RNA, 15 nt, Human
uagagugucuuucca

SEQ ID NO: 3728443 - RNA, 15 nt, Human
uagaguuaacaauga

SEQ ID NO: 3728444 - RNA, 19 nt, Human
uagaguuaagaagcuguug

SEQ ID NO: 3728445 - RNA, 14 nt, Human
uagaguuagacugu

SEQ ID NO: 3728446 - RNA, 17 nt, Human
uagaguugauacuacag

SEQ ID NO: 3728447 - RNA, 13 nt, Human
uagaguugcugag

SEQ ID NO: 3728448 - RNA, 14 nt, Human
uagaguugcugaga

SEQ ID NO: 3728449 - RNA, 14 nt, Human
uagaguuggccaua

SEQ ID NO: 3728450 - RNA, 21 nt, Human
uagaguuuagcccugaacauu

SEQ ID NO: 3728451 - RNA, 17 nt, Human
uagaguuuagcuggaaa

SEQ ID NO: 3728452 - RNA, 15 nt, Human
uagaguuucuguuug

SEQ ID NO: 3728453 - RNA, 20 nt, Human
uagauaaaacaucuuugaaa

SEQ ID NO: 3728454 - RNA, 12 nt, Human
uagauaaacuca

SEQ ID NO: 3728455 - RNA, 19 nt, Human
uagauaaauauuugacuug

SEQ ID NO: 3728456 - RNA, 19 nt, Human
uagauaacgcuuaaaggaa

SEQ ID NO: 3728457 - RNA, 15 nt, Human
uagauaacucuuugg

SEQ ID NO: 3728458 - RNA, 15 nt, Human
uagauaauuaaccaa

SEQ ID NO: 3728459 - RNA, 17 nt, Human
uagauacaaucagcugc

SEQ ID NO: 3728460 - RNA, 19 nt, Human
uagauacaaucagcugcuu

SEQ ID NO: 3728461 - RNA, 22 nt, Human
uagauacaaucagcugcuuugu

SEQ ID NO: 3728462 - RNA, 22 nt, Human
uagauacccuacgcuguccaga

SEQ ID NO: 3728463 - RNA, 20 nt, Human
uagauacuuugcuagccggc

SEQ ID NO: 3728464 - RNA, 15 nt, Human
uagauagcagccugg

SEQ ID NO: 3728465 - RNA, 15 nt, Human
uagauagcccugucc

SEQ ID NO: 3728466 - RNA, 22 nt, Human
uagauaggucagugcaaauacu

SEQ ID NO: 3728467 - RNA, 17 nt, Human
uagauaguuagaaccug

SEQ ID NO: 3728468 - RNA, 15 nt, Human
uagauauaugcucug

SEQ ID NO: 3728469 - RNA, 19 nt, Human
uagauauccacuugagaca

SEQ ID NO: 3728470 - RNA, 15 nt, Human
uagauaucuuuuuau

SEQ ID NO: 3728471 - RNA, 21 nt, Human
uagauaucuuuuuauugaugu

SEQ ID NO: 3728472 - RNA, 16 nt, Human
uagauauuggacaaag

SEQ ID NO: 3728473 - RNA, 15 nt, Human
uagauauuuuucaua

SEQ ID NO: 3728474 - RNA, 21 nt, Human
uagauauuuuucauaaacaag

SEQ ID NO: 3728475 - RNA, 14 nt, Human
uagaucaaauacuu

SEQ ID NO: 3728476 - RNA, 23 nt, Human
uagaucaaauacuuuaaaggaaa

SEQ ID NO: 3728477 - RNA, 13 nt, Human
uagaucagaacag

SEQ ID NO: 3728478 - RNA, 14 nt, Human
uagaucagaugcuc

SEQ ID NO: 3728479 - RNA, 18 nt, Human
uagaucagaugcuccaag

SEQ ID NO: 3728480 - RNA, 19 nt, Human
uagaucauaguuuuauuua

SEQ ID NO: 3728481 - RNA, 19 nt, Human
uagaucauuuguucuggga

SEQ ID NO: 3728482 - RNA, 14 nt, Human
uagaucuaguucac

SEQ ID NO: 3728483 - RNA, 15 nt, Human
uagaucuggcauguu

SEQ ID NO: 3728484 - RNA, 18 nt, Human
uagaugaaaaagcaugua

SEQ ID NO: 3728485 - RNA, 21 nt, Human
uagaugaaaaagcauguacag

SEQ ID NO: 3728486 - RNA, 16 nt, Human
uagaugaaguuuuaca

SEQ ID NO: 3728487 - RNA, 22 nt, Human
uagaugaccucauuaaccgaug

SEQ ID NO: 3728488 - RNA, 22 nt, Human
uagaugagaauucagcugcccc

SEQ ID NO: 3728489 - RNA, 19 nt, Human
uagaugauuaaauaagauu

SEQ ID NO: 3728490 - RNA, 23 nt, Human
uagaugauuaaauaagauucuaa

SEQ ID NO: 3728491 - RNA, 18 nt, Human
uagaugauuuuuugaaag

SEQ ID NO: 3728492 - RNA, 22 nt, Human
uagaugauuuuuugaaaguuaa

SEQ ID NO: 3728493 - RNA, 16 nt, Human
uagaugcacuuaugca

SEQ ID NO: 3728494 - RNA, 17 nt, Human
uagaugcaguucugaag

SEQ ID NO: 3728495 - RNA, 20 nt, Human
uagaugcaguucugaagaag

SEQ ID NO: 3728496 - RNA, 19 nt, Human
uagaugcauguugaccaug

SEQ ID NO: 3728497 - RNA, 15 nt, Human
uagaugcauuugggu

SEQ ID NO: 3728498 - RNA, 13 nt, Human
uacaguaacuuua

SEQ ID NO: 3728499 - RNA, 13 nt, Human
uacaguaauaaau

SEQ ID NO: 3728500 - RNA, 15 nt, Human
uacaguacaggcagc

SEQ ID NO: 3728501 - RNA, 14 nt, Human
uacaguaggagccc

SEQ ID NO: 3728502 - RNA, 18 nt, Human
uacaguaggagcccagcu

SEQ ID NO: 3728503 - RNA, 21 nt, Human
uacaguagugagaagaauauu

SEQ ID NO: 3728504 - RNA, 19 nt, Human
uacaguauaauuaacaugu

SEQ ID NO: 3728505 - RNA, 15 nt, Human
uacaguauagauuuu

SEQ ID NO: 3728506 - RNA, 18 nt, Human
uacaguaucucagggccu

SEQ ID NO: 3728507 - RNA, 15 nt, Human
uacaguaugcuugcu

SEQ ID NO: 3728508 - RNA, 22 nt, Human
uacaguauggggguuguaaauu

SEQ ID NO: 3728509 - RNA, 12 nt, Human
uacaguccuccc

SEQ ID NO: 3728510 - RNA, 15 nt, Human
uacaguccucccauc

SEQ ID NO: 3728511 - RNA, 17 nt, Human
uacaguccucccaucuc

SEQ ID NO: 3728512 - RNA, 18 nt, Human
uacaguccucccaucuca

SEQ ID NO: 3728513 - RNA, 19 nt, Human
uacagucugucuucuguau

SEQ ID NO: 3728514 - RNA, 20 nt, Human
uacagucugucuucuguaua

SEQ ID NO: 3728515 - RNA, 21 nt, Human
uacagugaaaauguaagcugu

SEQ ID NO: 3728516 - RNA, 14 nt, Human
uacagugagccaag

SEQ ID NO: 3728517 - RNA, 21 nt, Human
uacagugcagagccuucucag

SEQ ID NO: 3728518 - RNA, 22 nt, Human
uacagugcauaguuguagacaa

SEQ ID NO: 3728519 - RNA, 23 nt, Human
uacaguggaaccguugccaaccg

SEQ ID NO: 3728520 - RNA, 16 nt, Human
uacaguguacagucuu

SEQ ID NO: 3728521 - RNA, 12 nt, Human
uacagugucuuu

SEQ ID NO: 3728522 - RNA, 13 nt, Human
uacagugucuuuu

SEQ ID NO: 3728523 - RNA, 23 nt, Human
uacagugucuuuuuuuguauagu

SEQ ID NO: 3728524 - RNA, 19 nt, Human
uacaguuacucagaauucu

SEQ ID NO: 3728525 - RNA, 15 nt, Human
uacaguuacuuuucc

SEQ ID NO: 3728526 - RNA, 13 nt, Human
uacaguuauaaaa

SEQ ID NO: 3728527 - RNA, 17 nt, Human
uacaguuauaaaauuaa

SEQ ID NO: 3728528 - RNA, 16 nt, Human
uacaguucaauaaacu

SEQ ID NO: 3728529 - RNA, 12 nt, Human
uacaguucuucg

SEQ ID NO: 3728530 - RNA, 21 nt, Human
uacaguucuucgggaagagag

SEQ ID NO: 3728531 - RNA, 22 nt, Human
uacaguucuucgggaagagagg

SEQ ID NO: 3728532 - RNA, 17 nt, Human
uacaguugaaauaacug

SEQ ID NO: 3728533 - RNA, 16 nt, Human
uacaguuguuggccuc

SEQ ID NO: 3728534 - RNA, 12 nt, Human
uacaguuucaaa

SEQ ID NO: 3728535 - RNA, 15 nt, Human
uacaguuugcuguac

SEQ ID NO: 3728536 - RNA, 16 nt, Human
uacaguuugcuguacu

SEQ ID NO: 3728537 - RNA, 23 nt, Human
uacaguuuggggcaagucaugua

SEQ ID NO: 3728538 - RNA, 17 nt, Human
uacaguuuguuuacaca

SEQ ID NO: 3728539 - RNA, 14 nt, Human
uacaguuuuaaaga

SEQ ID NO: 3728540 - RNA, 17 nt, Human
uacaguuuuaacugugg

SEQ ID NO: 3728541 - RNA, 21 nt, Human
uacaguuuuaacuguggauau

SEQ ID NO: 3728542 - RNA, 14 nt, Human
uacaguuuuccuaa

SEQ ID NO: 3728543 - RNA, 22 nt, Human
uacaguuuuccuaaauguauac

SEQ ID NO: 3728544 - RNA, 17 nt, Human
uacauaaaagaaauaaa

SEQ ID NO: 3728545 - RNA, 14 nt, Human
uacauaaacaauga

SEQ ID NO: 3728546 - RNA, 21 nt, Human
uacauaaauugcauaaagcau

SEQ ID NO: 3728547 - RNA, 22 nt, Human
uacauaaauugcauaaagcaua

SEQ ID NO: 3728548 - RNA, 13 nt, Human
uacauaacuaaau

SEQ ID NO: 3728549 - RNA, 20 nt, Human
uacauaacucuguaaaaaca

SEQ ID NO: 3728550 - RNA, 23 nt, Human
uacauaacucuguaaaaacacug

SEQ ID NO: 3728551 - RNA, 15 nt, Human
uacauaacugaaaau

SEQ ID NO: 3728552 - RNA, 13 nt, Human
uacauaacugccu

SEQ ID NO: 3728553 - RNA, 22 nt, Human
uacauaacugccuugaaccugu

SEQ ID NO: 3728554 - RNA, 17 nt, Human
uacauaagauaaaugug

SEQ ID NO: 3728555 - RNA, 19 nt, Human
uacauaaguaauucaagaa

SEQ ID NO: 3728556 - RNA, 12 nt, Human
uacauaaucugu

SEQ ID NO: 3728557 - RNA, 15 nt, Human
uacauaaugcgugca

SEQ ID NO: 3728558 - RNA, 21 nt, Human
uacauaaugcgugcauaccac

SEQ ID NO: 3728559 - RNA, 23 nt, Human
uacauaaugcgugcauaccacuu

SEQ ID NO: 3728560 - RNA, 14 nt, Human
uacauacaccagca

SEQ ID NO: 3728561 - RNA, 15 nt, Human
uacauacaccagcau

SEQ ID NO: 3728562 - RNA, 20 nt, Human
uacauacaccagcauuccuu

SEQ ID NO: 3728563 - RNA, 22 nt, Human
uacauacacuuguauaaaugua

SEQ ID NO: 3728564 - RNA, 22 nt, Human
uacauacccuggccgcccccug

SEQ ID NO: 3728565 - RNA, 19 nt, Human
uacauacgauuuaagguau

SEQ ID NO: 3728566 - RNA, 15 nt, Human
uacauacggucaggu

SEQ ID NO: 3728567 - RNA, 22 nt, Human
uacauacggucagguuuaacau

SEQ ID NO: 3728568 - RNA, 15 nt, Human
uacauacugcaucuu

SEQ ID NO: 3728569 - RNA, 23 nt, Human
uacauacuuucauccugacucug

SEQ ID NO: 3728570 - RNA, 14 nt, Human
uacauacuuuuugg

SEQ ID NO: 3728571 - RNA, 22 nt, Human
uacauagauuuauuuuucaguu

SEQ ID NO: 3728572 - RNA, 23 nt, Human
uacauagcaugacauuucuuugu

SEQ ID NO: 3728573 - RNA, 21 nt, Human
uacauagccuauauuuacagu

SEQ ID NO: 3728574 - RNA, 15 nt, Human
uacauaggcagcacu

SEQ ID NO: 3728575 - RNA, 16 nt, Human
uacauagucugaagug

SEQ ID NO: 3728576 - RNA, 13 nt, Human
uacauagugaaaa

SEQ ID NO: 3728577 - RNA, 21 nt, Human
uacauagugcauuguuucugu

SEQ ID NO: 3728578 - RNA, 22 nt, Human
uacauagugcauuguuucugug

SEQ ID NO: 3728579 - RNA, 22 nt, Human
uacauaguguaggcuuuacuua

SEQ ID NO: 3728580 - RNA, 15 nt, Human
uacauaguuuuaaac

SEQ ID NO: 3728581 - RNA, 19 nt, Human
uacauaguuuuaaacucau

SEQ ID NO: 3728582 - RNA, 20 nt, Human
uacauauaaaauguaauuac

SEQ ID NO: 3728583 - RNA, 22 nt, Human
uacauauaagugauugcugguu

SEQ ID NO: 3728584 - RNA, 18 nt, Human
uacauauauauauauaac

SEQ ID NO: 3728585 - RNA, 14 nt, Human
uacauauauauauu

SEQ ID NO: 3728586 - RNA, 18 nt, Human
uacauaucaccucauggc

SEQ ID NO: 3728587 - RNA, 16 nt, Human
uacauaucccuuccag

SEQ ID NO: 3728588 - RNA, 12 nt, Human
uacauaucuuua

SEQ ID NO: 3728589 - RNA, 16 nt, Human
uacauaugagugugga

SEQ ID NO: 3728590 - RNA, 15 nt, Human
uacauaugauaaauu

SEQ ID NO: 3728591 - RNA, 13 nt, Human
uacauaugcuuua

SEQ ID NO: 3728592 - RNA, 19 nt, Human
uacauauggauguuacucu

SEQ ID NO: 3728593 - RNA, 12 nt, Human
uacauauguaaa

SEQ ID NO: 3728594 - RNA, 16 nt, Human
uacauauguaaaauaa

SEQ ID NO: 3728595 - RNA, 19 nt, Human
uacaucacugcuugaugaa

SEQ ID NO: 3728596 - RNA, 20 nt, Human
uacaucaguuauucauucug

SEQ ID NO: 3728597 - RNA, 22 nt, Human
uacaucaugcuggaaccugcaa

SEQ ID NO: 3728598 - RNA, 22 nt, Human
uacauccucaugcagccgugau

SEQ ID NO: 3728599 - RNA, 13 nt, Human
uacauccuugugg

SEQ ID NO: 3728600 - RNA, 14 nt, Human
uacaucgcccucca

SEQ ID NO: 3728601 - RNA, 20 nt, Human
uacaucuauuuuggauugua

SEQ ID NO: 3728602 - RNA, 22 nt, Human
uacaucuauuuuggauuguaua

SEQ ID NO: 3728603 - RNA, 23 nt, Human
uacaucuauuuuggauuguauau

SEQ ID NO: 3728604 - RNA, 20 nt, Human
uacaucuggcuuauuuuaau

SEQ ID NO: 3728605 - RNA, 13 nt, Human
uacaucugucaug

SEQ ID NO: 3728606 - RNA, 18 nt, Human
uacaugaaaacacauuuu

SEQ ID NO: 3728607 - RNA, 19 nt, Human
uacaugaaaacacauuuuu

SEQ ID NO: 3728608 - RNA, 15 nt, Human
uacaugaaacagaaa

SEQ ID NO: 3728609 - RNA, 19 nt, Human
uacaugaaauuuuuguaaa

SEQ ID NO: 3728610 - RNA, 20 nt, Human
uacaugaaauuuuuguaaau

SEQ ID NO: 3728611 - RNA, 21 nt, Human
uacaugaagaauagaaacaag

SEQ ID NO: 3728612 - RNA, 16 nt, Human
uacaugacauuuauuu

SEQ ID NO: 3728613 - RNA, 22 nt, Human
uacaugagaacagacuggccug

SEQ ID NO: 3728614 - RNA, 21 nt, Human
uacaugaggacucuauucuuu

SEQ ID NO: 3728615 - RNA, 23 nt, Human
uacaugaggacucuauucuuuaa

SEQ ID NO: 3728616 - RNA, 19 nt, Human
uacaugcaaaaagaaauga

SEQ ID NO: 3728617 - RNA, 16 nt, Human
uacaugcaauuuauua

SEQ ID NO: 3728618 - RNA, 20 nt, Human
uacaugcaauuuauuaaaau

SEQ ID NO: 3728619 - RNA, 18 nt, Human
uacaugcacacucaugug

SEQ ID NO: 3728620 - RNA, 22 nt, Human
uacaugcagcccaugcccaccu

SEQ ID NO: 3728621 - RNA, 17 nt, Human
uacaugcauacaaagag

SEQ ID NO: 3728622 - RNA, 21 nt, Human
uacaugcauacacucucaaag

SEQ ID NO: 3728623 - RNA, 19 nt, Human
uacaugcauacuucaaaag

SEQ ID NO: 3728624 - RNA, 14 nt, Human
uacaugcauauaau

SEQ ID NO: 3728625 - RNA, 20 nt, Human
uacaugcauuacugcaugca

SEQ ID NO: 3728626 - RNA, 22 nt, Human
uacaugcauugagcucucucau

SEQ ID NO: 3728627 - RNA, 17 nt, Human
uacaugccacaucaaac

SEQ ID NO: 3728628 - RNA, 16 nt, Human
uacaugccauugaaaa

SEQ ID NO: 3728629 - RNA, 18 nt, Human
uacauggaauaacaugua

SEQ ID NO: 3728630 - RNA, 19 nt, Human
uacauggaauaacauguaa

SEQ ID NO: 3728631 - RNA, 17 nt, Human
uacauggacagaauuuu

SEQ ID NO: 3728632 - RNA, 23 nt, Human
uacauggcuggagcuagaauuug

SEQ ID NO: 3728633 - RNA, 17 nt, Human
uacauggguagcuucug

SEQ ID NO: 3728634 - RNA, 16 nt, Human
uacaugguugugaccu

SEQ ID NO: 3728635 - RNA, 19 nt, Human
uacauguaaaacauuaucu

SEQ ID NO: 3728636 - RNA, 17 nt, Human
uacauguacugauuacu

SEQ ID NO: 3728637 - RNA, 19 nt, Human
uacauguaucaagccuaga

SEQ ID NO: 3728638 - RNA, 19 nt, Human
uacauguauugcacauugu

SEQ ID NO: 3728639 - RNA, 20 nt, Human
uacauguauugcacauugua

SEQ ID NO: 3728640 - RNA, 22 nt, Human
uacauguauugcacauuguaaa

SEQ ID NO: 3728641 - RNA, 19 nt, Human
uacaugugauacauuuuuu

SEQ ID NO: 3728642 - RNA, 16 nt, Human
uacauguggcccaaca

SEQ ID NO: 3728643 - RNA, 16 nt, Human
uacauguguagccugu

SEQ ID NO: 3728644 - RNA, 19 nt, Human
uacauguguagccugugca

SEQ ID NO: 3728645 - RNA, 18 nt, Human
uacauguuuauguaaaca

SEQ ID NO: 3728646 - RNA, 19 nt, Human
uagaugcauuuggguccag

SEQ ID NO: 3728647 - RNA, 18 nt, Human
uagaugcuggcccagggc

SEQ ID NO: 3728648 - RNA, 21 nt, Human
uagaugcuggcccagggccca

SEQ ID NO: 3728649 - RNA, 14 nt, Human
uagauggauucucc

SEQ ID NO: 3728650 - RNA, 14 nt, Human
uagauggcuccucu

SEQ ID NO: 3728651 - RNA, 17 nt, Human
uagaugggaaugaagcu

SEQ ID NO: 3728652 - RNA, 23 nt, Human
uagaugggaaugaagcuugugua

SEQ ID NO: 3728653 - RNA, 21 nt, Human
uagaugggagggaggcucagg

SEQ ID NO: 3728654 - RNA, 22 nt, Human
uagaugggggaaagcaaagcac

SEQ ID NO: 3728655 - RNA, 22 nt, Human
uagaugggucuggcugagcuga

SEQ ID NO: 3728656 - RNA, 16 nt, Human
uagauggugcugagaa

SEQ ID NO: 3728657 - RNA, 18 nt, Human
uagaugguuacacuguua

SEQ ID NO: 3728658 - RNA, 23 nt, Human
uagauguagauaaacucagaaau

SEQ ID NO: 3728659 - RNA, 20 nt, Human
uagauguaugcacacacaua

SEQ ID NO: 3728660 - RNA, 22 nt, Human
uagauguaugcacacacauaua

SEQ ID NO: 3728661 - RNA, 22 nt, Human
uagaugucccuuucuuggccag

SEQ ID NO: 3728662 - RNA, 21 nt, Human
uagaugucuagguacuucagg

SEQ ID NO: 3728663 - RNA, 21 nt, Human
uagaugucuuuaggcagcagc

SEQ ID NO: 3728664 - RNA, 13 nt, Human
uagaugucuuuuc

SEQ ID NO: 3728665 - RNA, 21 nt, Human
uagaugugauuuaauaguguu

SEQ ID NO: 3728666 - RNA, 23 nt, Human
uagauguucucuaucauuuaaua

SEQ ID NO: 3728667 - RNA, 13 nt, Human
uagauguugcuaa

SEQ ID NO: 3728668 - RNA, 13 nt, Human
uagauguuuuaua

SEQ ID NO: 3728669 - RNA, 20 nt, Human
uagauguuuugguagauuaa

SEQ ID NO: 3728670 - RNA, 18 nt, Human
uagauuaaauauagauua

SEQ ID NO: 3728671 - RNA, 18 nt, Human
uagauuaagagauggguu

SEQ ID NO: 3728672 - RNA, 23 nt, Human
uagauuaauacucuauuuuuaca

SEQ ID NO: 3728673 - RNA, 16 nt, Human
uagauuaauggcacug

SEQ ID NO: 3728674 - RNA, 18 nt, Human
uagauuaauggcacugau

SEQ ID NO: 3728675 - RNA, 21 nt, Human
uagauuacccccucauuguuu

SEQ ID NO: 3728676 - RNA, 17 nt, Human
uagauuagaauucugua

SEQ ID NO: 3728677 - RNA, 19 nt, Human
uagauuagaauucuguaua

SEQ ID NO: 3728678 - RNA, 20 nt, Human
uagauuagaauucuguauag

SEQ ID NO: 3728679 - RNA, 20 nt, Human
uagauuagagaguguugaaa

SEQ ID NO: 3728680 - RNA, 14 nt, Human
uagauuagcucugg

SEQ ID NO: 3728681 - RNA, 18 nt, Human
uagauuagcucuggacca

SEQ ID NO: 3728682 - RNA, 22 nt, Human
uagauuaguacuggauuauuca

SEQ ID NO: 3728683 - RNA, 18 nt, Human
uagauuauauugagacaa

SEQ ID NO: 3728684 - RNA, 22 nt, Human
uagauuauauugagacaaaaau

SEQ ID NO: 3728685 - RNA, 16 nt, Human
uagauuauggagcuuu

SEQ ID NO: 3728686 - RNA, 15 nt, Human
uagauucaccuguaa

SEQ ID NO: 3728687 - RNA, 21 nt, Human
uagauucaccuguaaaacuuu

SEQ ID NO: 3728688 - RNA, 19 nt, Human
uagauucagguaauacaaa

SEQ ID NO: 3728689 - RNA, 20 nt, Human
uagauuccauugguccaaga

SEQ ID NO: 3728690 - RNA, 21 nt, Human
uagauuccauugguccaagau

SEQ ID NO: 3728691 - RNA, 21 nt, Human
uagauuccauuuacugcauuc

SEQ ID NO: 3728692 - RNA, 11 nt, Human
uagauucuaaa

SEQ ID NO: 3728693 - RNA, 12 nt, Human
uagauucuaaag

SEQ ID NO: 3728694 - RNA, 14 nt, Human
uagauucuaaagau

SEQ ID NO: 3728695 - RNA, 17 nt, Human
uagauucuaaagauucu

SEQ ID NO: 3728696 - RNA, 18 nt, Human
uagauucuaaagauucua

SEQ ID NO: 3728697 - RNA, 20 nt, Human
uagauucuacauauucuuua

SEQ ID NO: 3728698 - RNA, 23 nt, Human
uagauucucuuguauaagauccu

SEQ ID NO: 3728699 - RNA, 23 nt, Human
uagauugaaaacuuuucucagau

SEQ ID NO: 3728700 - RNA, 21 nt, Human
uagauugagaaguuuuguaca

SEQ ID NO: 3728701 - RNA, 23 nt, Human
uagauugauuguauuguugaaaa

SEQ ID NO: 3728702 - RNA, 12 nt, Human
uagauugcagaa

SEQ ID NO: 3728703 - RNA, 20 nt, Human
uagauuguccuuuugcaaag

SEQ ID NO: 3728704 - RNA, 23 nt, Human
uagauuguccuuuugcaaagaaa

SEQ ID NO: 3728705 - RNA, 16 nt, Human
uagauuuaauauaaag

SEQ ID NO: 3728706 - RNA, 14 nt, Human
uagauuuaguguaa

SEQ ID NO: 3728707 - RNA, 14 nt, Human
uagauuuauuucau

SEQ ID NO: 3728708 - RNA, 22 nt, Human
uagauuucauaguucagaauuu

SEQ ID NO: 3728709 - RNA, 13 nt, Human
uagauuucugauu

SEQ ID NO: 3728710 - RNA, 15 nt, Human
uagauuuguuuugug

SEQ ID NO: 3728711 - RNA, 14 nt, Human
uagauuuuacauga

SEQ ID NO: 3728712 - RNA, 16 nt, Human
uagauuuuacaugaag

SEQ ID NO: 3728713 - RNA, 20 nt, Human
uagauuuuacaugaaguauu

SEQ ID NO: 3728714 - RNA, 21 nt, Human
uagauuuuacaugaaguauuu

SEQ ID NO: 3728715 - RNA, 22 nt, Human
uagauuuuagacccuauugcug

SEQ ID NO: 3728716 - RNA, 19 nt, Human
uagauuuuauaguguguug

SEQ ID NO: 3728717 - RNA, 14 nt, Human
uagauuuucauguu

SEQ ID NO: 3728718 - RNA, 22 nt, Human
uagauuuucugguucuaacauu

SEQ ID NO: 3728719 - RNA, 14 nt, Human
uagauuuucuuuaa

SEQ ID NO: 3728720 - RNA, 15 nt, Human
uagauuuuguguuua

SEQ ID NO: 3728721 - RNA, 21 nt, Human
uagauuuuguguuuauucuug

SEQ ID NO: 3728722 - RNA, 15 nt, Human
uagauuuuguuuugc

SEQ ID NO: 3728723 - RNA, 12 nt, Human
uagauuuuuuca

SEQ ID NO: 3728724 - RNA, 22 nt, Human
uagcaaaacgcauggagugugu

SEQ ID NO: 3728725 - RNA, 22 nt, Human
uagcaaaacuaaauacuugcuc

SEQ ID NO: 3728726 - RNA, 19 nt, Human
uagcaaaacuuuuaaacua

SEQ ID NO: 3728727 - RNA, 14 nt, Human
uagcaaaagaagaa

SEQ ID NO: 3728728 - RNA, 16 nt, Human
uagcaaaagaagaagu

SEQ ID NO: 3728729 - RNA, 12 nt, Human
uagcaaacagag

SEQ ID NO: 3728730 - RNA, 19 nt, Human
uagcaaacccugucaaaca

SEQ ID NO: 3728731 - RNA, 20 nt, Human
uagcaaacccugucaaacau

SEQ ID NO: 3728732 - RNA, 21 nt, Human
uagcaaacccugucaaacauu

SEQ ID NO: 3728733 - RNA, 14 nt, Human
uagcaaacuuugua

SEQ ID NO: 3728734 - RNA, 16 nt, Human
uagcaaagauaucuca

SEQ ID NO: 3728735 - RNA, 19 nt, Human
uagcaaagauaucucaucu

SEQ ID NO: 3728736 - RNA, 23 nt, Human
uagcaaauaauuuccugguguga

SEQ ID NO: 3728737 - RNA, 12 nt, Human
uagcaaauacau

SEQ ID NO: 3728738 - RNA, 17 nt, Human
uagcaaauguuuugaca

SEQ ID NO: 3728739 - RNA, 13 nt, Human
uagcaacuuuugu

SEQ ID NO: 3728740 - RNA, 17 nt, Human
uagcaacuuuuguguaa

SEQ ID NO: 3728741 - RNA, 12 nt, Human
uagcaagacaca

SEQ ID NO: 3728742 - RNA, 20 nt, Human
uagcaagauugcuuaaaaua

SEQ ID NO: 3728743 - RNA, 14 nt, Human
uagcaagcuggccu

SEQ ID NO: 3728744 - RNA, 23 nt, Human
uagcaagguuuggugcaaaguau

SEQ ID NO: 3728745 - RNA, 17 nt, Human
uagcaaucacaacacug

SEQ ID NO: 3728746 - RNA, 14 nt, Human
uagcaaucucuuca

SEQ ID NO: 3728747 - RNA, 21 nt, Human
uagcacaacgugguacuauuu

SEQ ID NO: 3728748 - RNA, 13 nt, Human
uagcacaaguuau

SEQ ID NO: 3728749 - RNA, 18 nt, Human
uagcacagacccugcccu

SEQ ID NO: 3728750 - RNA, 15 nt, Human
uagcacagauuuuaa

SEQ ID NO: 3728751 - RNA, 18 nt, Human
uagcacagauuuuaauug

SEQ ID NO: 3728752 - RNA, 23 nt, Human
uagcacagauuuuaauugucaug

SEQ ID NO: 3728753 - RNA, 14 nt, Human
uagcacagcucccu

SEQ ID NO: 3728754 - RNA, 20 nt, Human
uagcacaggcugagugcagg

SEQ ID NO: 3728755 - RNA, 15 nt, Human
uagcacaugcuucaa

SEQ ID NO: 3728756 - RNA, 19 nt, Human
uagcacaugcuucaauagu

SEQ ID NO: 3728757 - RNA, 13 nt, Human
uagcaccagggaa

SEQ ID NO: 3728758 - RNA, 13 nt, Human
uagcaccagggcu

SEQ ID NO: 3728759 - RNA, 16 nt, Human
uagcacguuuaaaguu

SEQ ID NO: 3728760 - RNA, 14 nt, Human
uagcacugacagau

SEQ ID NO: 3728761 - RNA, 19 nt, Human
uagcacuuaaauuccucaa

SEQ ID NO: 3728762 - RNA, 15 nt, Human
uagcacuuucauugc

SEQ ID NO: 3728763 - RNA, 20 nt, Human
uagcacuuugaaauaccuca

SEQ ID NO: 3728764 - RNA, 21 nt, Human
uagcacuuugaaauaccucau

SEQ ID NO: 3728765 - RNA, 23 nt, Human
uagcagaagguugcaccuccccc

SEQ ID NO: 3728766 - RNA, 19 nt, Human
uagcagagaaugaaagggc

SEQ ID NO: 3728767 - RNA, 18 nt, Human
uagcagagagacuuucag

SEQ ID NO: 3728768 - RNA, 23 nt, Human
uagcagauuguuuccucuuccaa

SEQ ID NO: 3728769 - RNA, 20 nt, Human
uagcagcagccuuuaaugca

SEQ ID NO: 3728770 - RNA, 15 nt, Human
uagcagcccacccug

SEQ ID NO: 3728771 - RNA, 16 nt, Human
uagcagcccacccugc

SEQ ID NO: 3728772 - RNA, 16 nt, Human
uagcagccuggcuccc

SEQ ID NO: 3728773 - RNA, 12 nt, Human
uagcagccuuuc

SEQ ID NO: 3728774 - RNA, 13 nt, Human
uagcagccuuucu

SEQ ID NO: 3728775 - RNA, 12 nt, Human
uagcagcuggac

SEQ ID NO: 3728776 - RNA, 14 nt, Human
uagcagcuuccaga

SEQ ID NO: 3728777 - RNA, 22 nt, Human
uagcaggagaggagagccagag

SEQ ID NO: 3728778 - RNA, 18 nt, Human
uagcaggccaaggucuga

SEQ ID NO: 3728779 - RNA, 22 nt, Human
uagcaggccaaggucugagcca

SEQ ID NO: 3728780 - RNA, 21 nt, Human
uagcagggaaaauauauaucu

SEQ ID NO: 3728781 - RNA, 23 nt, Human
uagcaggugguccugagaccuga

SEQ ID NO: 3728782 - RNA, 17 nt, Human
uagcagugugaaguaca

SEQ ID NO: 3728783 - RNA, 16 nt, Human
uagcaguucugcaaau

SEQ ID NO: 3728784 - RNA, 13 nt, Human
uagcauaagggcu

SEQ ID NO: 3728785 - RNA, 12 nt, Human
uagcauaucaau

SEQ ID NO: 3728786 - RNA, 16 nt, Human
uagcauaucugccuuu

SEQ ID NO: 3728787 - RNA, 17 nt, Human
uagcauaucugccuuua

SEQ ID NO: 3728788 - RNA, 22 nt, Human
uagcauaucugccuuuauugug

SEQ ID NO: 3728789 - RNA, 21 nt, Human
uagcauaugacaaauguuucu

SEQ ID NO: 3728790 - RNA, 22 nt, Human
uagcauaugacaaauguuucua

SEQ ID NO: 3728791 - RNA, 22 nt, Human
uagcauauucuuuucugcaaaa

SEQ ID NO: 3728792 - RNA, 17 nt, Human
uagcauccuaagaaaua

SEQ ID NO: 3728793 - RNA, 18 nt, Human
uagcauccuaagaaauau

SEQ ID NO: 3728794 - RNA, 15 nt, Human
gccaccugagguggg

SEQ ID NO: 3728795 - RNA, 17 nt, Human
gccaccugaguuccuga

SEQ ID NO: 3728796 - RNA, 12 nt, Human
gccaccugcagg

SEQ ID NO: 3728797 - RNA, 16 nt, Human
gccaccugcccccuuc

SEQ ID NO: 3728798 - RNA, 17 nt, Human
gccaccugcccccuucu

SEQ ID NO: 3728799 - RNA, 18 nt, Human
gccaccugcccccuucuc

SEQ ID NO: 3728800 - RNA, 23 nt, Human
gccaccugccugcgucuuccgcc

SEQ ID NO: 3728801 - RNA, 18 nt, Human
uacuaaacauuuuguuau

SEQ ID NO: 3728802 - RNA, 18 nt, Human
uacuaaagccaaacauau

SEQ ID NO: 3728803 - RNA, 15 nt, Human
uacuaaauuuaaauu

SEQ ID NO: 3728804 - RNA, 17 nt, Human
uacuaacauuuauuuga

SEQ ID NO: 3728805 - RNA, 18 nt, Human
uacuaaccagcagaaaug

SEQ ID NO: 3728806 - RNA, 14 nt, Human
uacuaacuaaacuc

SEQ ID NO: 3728807 - RNA, 18 nt, Human
uacuaacuucuaaaacug

SEQ ID NO: 3728808 - RNA, 15 nt, Human
uacuaagaaaagaua

SEQ ID NO: 3728809 - RNA, 14 nt, Human
uacuaagaagaaaa

SEQ ID NO: 3728810 - RNA, 15 nt, Human
uacuaagaagaaaau

SEQ ID NO: 3728811 - RNA, 15 nt, Human
uacuaagaugacauu

SEQ ID NO: 3728812 - RNA, 20 nt, Human
uacuaagcauugaauggcua

SEQ ID NO: 3728813 - RNA, 22 nt, Human
uacuaagcuuugccagcugcug

SEQ ID NO: 3728814 - RNA, 22 nt, Human
uacuaaggaguaaucuguguac

SEQ ID NO: 3728815 - RNA, 22 nt, Human
uacuaaggauacaggcuggaaa

SEQ ID NO: 3728816 - RNA, 22 nt, Human
uacuaauaaaauuuaaaagucu

SEQ ID NO: 3728817 - RNA, 20 nt, Human
uacuaauaaacuaauaauug

SEQ ID NO: 3728818 - RNA, 20 nt, Human
uacuaauagaauaaaggcag

SEQ ID NO: 3728819 - RNA, 15 nt, Human
uacuaauagacaauu

SEQ ID NO: 3728820 - RNA, 13 nt, Human
uacuaaugaaaac

SEQ ID NO: 3728821 - RNA, 13 nt, Human
uacuaaugauguu

SEQ ID NO: 3728822 - RNA, 14 nt, Human
uacuaaugauguuu

SEQ ID NO: 3728823 - RNA, 16 nt, Human
uacuaauuccacaccu

SEQ ID NO: 3728824 - RNA, 15 nt, Human
uacuaauuuuacaca

SEQ ID NO: 3728825 - RNA, 22 nt, Human
uacuacacauuuuuaaauuguu

SEQ ID NO: 3728826 - RNA, 13 nt, Human
uacuacacugagg

SEQ ID NO: 3728827 - RNA, 15 nt, Human
uacuacagcuaugaa

SEQ ID NO: 3728828 - RNA, 21 nt, Human
uacuacagucaagauagaaag

SEQ ID NO: 3728829 - RNA, 17 nt, Human
uacuacaucgcccucca

SEQ ID NO: 3728830 - RNA, 17 nt, Human
uacuaccuccucuccug

SEQ ID NO: 3728831 - RNA, 14 nt, Human
uacuaccuguaaug

SEQ ID NO: 3728832 - RNA, 22 nt, Human
uacuaccuguguauauaguuuu

SEQ ID NO: 3728833 - RNA, 18 nt, Human
uacuacuagaugucuuua

SEQ ID NO: 3728834 - RNA, 21 nt, Human
gccagggcagagugagaccca

SEQ ID NO: 3728835 - RNA, 15 nt, Human
gccagggccacgcuc

SEQ ID NO: 3728836 - RNA, 22 nt, Human
gccagggccccucacccugccu

SEQ ID NO: 3728837 - RNA, 17 nt, Human
gccagggccccucuccc

SEQ ID NO: 3728838 - RNA, 18 nt, Human
gccagggccccucucccc

SEQ ID NO: 3728839 - RNA, 20 nt, Human
gccagggccccucuccccag

SEQ ID NO: 3728840 - RNA, 23 nt, Human
gccagggccccucuccccaggga

SEQ ID NO: 3728841 - RNA, 13 nt, Human
gccagggcccugc

SEQ ID NO: 3728842 - RNA, 14 nt, Human
gccagggccugcga

SEQ ID NO: 3728843 - RNA, 16 nt, Human
gccagggccugcgagg

SEQ ID NO: 3728844 - RNA, 10 nt, Human
gccagggcug

SEQ ID NO: 3728845 - RNA, 11 nt, Human
gccagggcugc

SEQ ID NO: 3728846 - RNA, 15 nt, Human
gccagggcugccccu

SEQ ID NO: 3728847 - RNA, 16 nt, Human
gccagggcugccccua

SEQ ID NO: 3728848 - RNA, 15 nt, Human
gccagggcuggagaa

SEQ ID NO: 3728849 - RNA, 20 nt, Human
gccaggggagcagaggggca

SEQ ID NO: 3728850 - RNA, 17 nt, Human
gccagggucucucccuc

SEQ ID NO: 3728851 - RNA, 18 nt, Human
gccagggucucucccuca

SEQ ID NO: 3728852 - RNA, 20 nt, Human
gccagggucucucccucagg

SEQ ID NO: 3728853 - RNA, 16 nt, Human
gccagggucuguguga

SEQ ID NO: 3728854 - RNA, 19 nt, Human
gccagggucugugugaaug

SEQ ID NO: 3728855 - RNA, 16 nt, Human
gccagggugagagcug

SEQ ID NO: 3728856 - RNA, 17 nt, Human
gccagggugagagcugc

SEQ ID NO: 3728857 - RNA, 21 nt, Human
gccaggguuucgagaagcugc

SEQ ID NO: 3728858 - RNA, 16 nt, Human
gccagguaaugaggga

SEQ ID NO: 3728859 - RNA, 21 nt, Human
gccagguaaugugaauaaauu

SEQ ID NO: 3728860 - RNA, 15 nt, Human
gccaggucacacgac

SEQ ID NO: 3728861 - RNA, 14 nt, Human
gccaggucccucuc

SEQ ID NO: 3728862 - RNA, 18 nt, Human
gccaggugaggucagcac

SEQ ID NO: 3728863 - RNA, 18 nt, Human
gccaggugcaaccaggga

SEQ ID NO: 3728864 - RNA, 15 nt, Human
gccaggugccuccug

SEQ ID NO: 3728865 - RNA, 15 nt, Human
gccaggugccuugga

SEQ ID NO: 3728866 - RNA, 16 nt, Human
gccaggugccuuggag

SEQ ID NO: 3728867 - RNA, 21 nt, Human
gccaguaaaaaaaaaaaaugg

SEQ ID NO: 3728868 - RNA, 16 nt, Human
gccaguaacacaggcc

SEQ ID NO: 3728869 - RNA, 20 nt, Human
gccaguaacgcgucuuccug

SEQ ID NO: 3728870 - RNA, 22 nt, Human
gccaguaacgcgucuuccugag

SEQ ID NO: 3728871 - RNA, 23 nt, Human
gccaguaagggaaauagaaaaac

SEQ ID NO: 3728872 - RNA, 14 nt, Human
gccaguaauccugu

SEQ ID NO: 3728873 - RNA, 22 nt, Human
gccaguaucuauauauguguau

SEQ ID NO: 3728874 - RNA, 17 nt, Human
gccaguauuagacugga

SEQ ID NO: 3728875 - RNA, 14 nt, Human
gccaguauuuuaaa

SEQ ID NO: 3728876 - RNA, 14 nt, Human
gccaguauuuuuua

SEQ ID NO: 3728877 - RNA, 18 nt, Human
gccagucaccccggccac

SEQ ID NO: 3728878 - RNA, 21 nt, Human
gccagucaccccggccaccug

SEQ ID NO: 3728879 - RNA, 19 nt, Human
gccaguccacccugccugc

SEQ ID NO: 3728880 - RNA, 16 nt, Human
gccagucccaggggca

SEQ ID NO: 3728881 - RNA, 16 nt, Human
gccaguccugccuggc

SEQ ID NO: 3728882 - RNA, 17 nt, Human
gccaguccugccuggcc

SEQ ID NO: 3728883 - RNA, 15 nt, Human
gccagucgcgcugcc

SEQ ID NO: 3728884 - RNA, 20 nt, Human
gccagucuguggaucagaga

SEQ ID NO: 3728885 - RNA, 11 nt, Human
gccagucuuaa

SEQ ID NO: 3728886 - RNA, 18 nt, Human
gccagugaccugaggaag

SEQ ID NO: 3728887 - RNA, 20 nt, Human
gccagugaccugaggaagcg

SEQ ID NO: 3728888 - RNA, 16 nt, Human
gccagugacuccagga

SEQ ID NO: 3728889 - RNA, 17 nt, Human
gccagugacuccaggag

SEQ ID NO: 3728890 - RNA, 17 nt, Human
gccagugaugugcggug

SEQ ID NO: 3728891 - RNA, 16 nt, Human
gccagugcccugagcc

SEQ ID NO: 3728892 - RNA, 15 nt, Human
gccagugccuuaccu

SEQ ID NO: 3728893 - RNA, 18 nt, Human
gccagugcgggugcagac

SEQ ID NO: 3728894 - RNA, 21 nt, Human
gccaguggccuuccccagcau

SEQ ID NO: 3728895 - RNA, 23 nt, Human
gccaguggcuggaucugugaggg

SEQ ID NO: 3728896 - RNA, 19 nt, Human
gccaguggggccuguggaa

SEQ ID NO: 3728897 - RNA, 21 nt, Human
gccaguggggccuguggaaug

SEQ ID NO: 3728898 - RNA, 19 nt, Human
gccaguguaaucccccagg

SEQ ID NO: 3728899 - RNA, 16 nt, Human
gccaguguccugagcc

SEQ ID NO: 3728900 - RNA, 13 nt, Human
gccagugucuguc

SEQ ID NO: 3728901 - RNA, 16 nt, Human
gccagugucugucccg

SEQ ID NO: 3728902 - RNA, 22 nt, Human
gccagugucugucccggggucc

SEQ ID NO: 3728903 - RNA, 13 nt, Human
gccagugucuuuc

SEQ ID NO: 3728904 - RNA, 13 nt, Human
gccagugugcuga

SEQ ID NO: 3728905 - RNA, 17 nt, Human
gccaguuagacuagucc

SEQ ID NO: 3728906 - RNA, 21 nt, Human
gccaguucuuuccauaauaaa

SEQ ID NO: 3728907 - RNA, 16 nt, Human
gccaguuggucccccu

SEQ ID NO: 3728908 - RNA, 18 nt, Human
gccaguuggucccccuuc

SEQ ID NO: 3728909 - RNA, 20 nt, Human
gccaguuggucccccuucca

SEQ ID NO: 3728910 - RNA, 13 nt, Human
gccaguuguccuc

SEQ ID NO: 3728911 - RNA, 14 nt, Human
gccaguuguccucc

SEQ ID NO: 3728912 - RNA, 20 nt, Human
gccauaaaacauuaagaaaa

SEQ ID NO: 3728913 - RNA, 20 nt, Human
gccauaagcaacaauuuuca

SEQ ID NO: 3728914 - RNA, 23 nt, Human
gccauaagcaacaauuuucagau

SEQ ID NO: 3728915 - RNA, 15 nt, Human
gccauaauacaaaag

SEQ ID NO: 3728916 - RNA, 14 nt, Human
gccauacuggccuc

SEQ ID NO: 3728917 - RNA, 17 nt, Human
gccauacuggccucgcc

SEQ ID NO: 3728918 - RNA, 20 nt, Human
gccauacuggccucgccugg

SEQ ID NO: 3728919 - RNA, 21 nt, Human
gccauacuggccucgccuggc

SEQ ID NO: 3728920 - RNA, 23 nt, Human
gccauacuggccucgccuggccu

SEQ ID NO: 3728921 - RNA, 22 nt, Human
gccauacuuaucucucugugcu

SEQ ID NO: 3728922 - RNA, 22 nt, Human
gccauagaguacacugccugcc

SEQ ID NO: 3728923 - RNA, 12 nt, Human
gccauagcuccu

SEQ ID NO: 3728924 - RNA, 17 nt, Human
gccauagucaaagagag

SEQ ID NO: 3728925 - RNA, 16 nt, Human
gccauauaaguuugaa

SEQ ID NO: 3728926 - RNA, 17 nt, Human
gccauauaaguuugaag

SEQ ID NO: 3728927 - RNA, 19 nt, Human
gccauauauaacagauaca

SEQ ID NO: 3728928 - RNA, 21 nt, Human
gccauauauaacagauacauu

SEQ ID NO: 3728929 - RNA, 23 nt, Human
gccauauauaacagauacauuuc

SEQ ID NO: 3728930 - RNA, 20 nt, Human
gccauauuaaauuuuuuguu

SEQ ID NO: 3728931 - RNA, 23 nt, Human
gccauauuaaauuuuuuguugac

SEQ ID NO: 3728932 - RNA, 18 nt, Human
gccauauuuaccucagcc

SEQ ID NO: 3728933 - RNA, 19 nt, Human
gccauauuuaccucagccu

SEQ ID NO: 3728934 - RNA, 20 nt, Human
gccauauuuguaaaaugaca

SEQ ID NO: 3728935 - RNA, 17 nt, Human
gccauauuuucaccauu

SEQ ID NO: 3728936 - RNA, 16 nt, Human
gccaucaagagacuga

SEQ ID NO: 3728937 - RNA, 14 nt, Human
gccaucaccucaga

SEQ ID NO: 3728938 - RNA, 15 nt, Human
gccaucaccucagau

SEQ ID NO: 3728939 - RNA, 23 nt, Human
gccaucaccucagauggcagcuu

SEQ ID NO: 3728940 - RNA, 20 nt, Human
gccaucaccuuagaccacca

SEQ ID NO: 3728941 - RNA, 19 nt, Human
gccaucauaggaagggacc

SEQ ID NO: 3728942 - RNA, 21 nt, Human
gccaucauguuuacagaggac

SEQ ID NO: 3728943 - RNA, 19 nt, Human
gccauccagguucagcuug

SEQ ID NO: 3728944 - RNA, 13 nt, Human
gccaucccagccc

SEQ ID NO: 3728945 - RNA, 15 nt, Human
gccaucccagcccca

SEQ ID NO: 3728946 - RNA, 16 nt, Human
gccaucccagccccaa

SEQ ID NO: 3728947 - RNA, 16 nt, Human
gccauccccagggggc

SEQ ID NO: 3728948 - RNA, 13 nt, Human
gccaucccucccu

SEQ ID NO: 3728949 - RNA, 21 nt, Human
gccaucccucgugguccccaa

SEQ ID NO: 3728950 - RNA, 12 nt, Human
gccaucccugug

SEQ ID NO: 3728951 - RNA, 13 nt, Human
gccaucccuguga

SEQ ID NO: 3728952 - RNA, 18 nt, Human
gccauccucaaacacugc

SEQ ID NO: 3728953 - RNA, 20 nt, Human
gccauccucaaacacugcag

SEQ ID NO: 3728954 - RNA, 21 nt, Human
gccauccucaaacacugcagg

SEQ ID NO: 3728955 - RNA, 14 nt, Human
gccauccuggccca

SEQ ID NO: 3728956 - RNA, 23 nt, Human
gccaucuagccagccccucuucc

SEQ ID NO: 3728957 - RNA, 12 nt, Human
gccaucucugcu

SEQ ID NO: 3728958 - RNA, 15 nt, Human
gccaucucugcucca

SEQ ID NO: 3728959 - RNA, 19 nt, Human
gccaucucuggaugccuga

SEQ ID NO: 3728960 - RNA, 15 nt, Human
gccaucugcccaggg

SEQ ID NO: 3728961 - RNA, 17 nt, Human
gccaucugcccaggggu

SEQ ID NO: 3728962 - RNA, 20 nt, Human
gccaucugcccaggggugcc

SEQ ID NO: 3728963 - RNA, 16 nt, Human
gccaucugcuccugga

SEQ ID NO: 3728964 - RNA, 20 nt, Human
gccaucuggagagcccagag

SEQ ID NO: 3728965 - RNA, 13 nt, Human
gccaucuguagcu

SEQ ID NO: 3728966 - RNA, 17 nt, Human
gccaucuuccagguggg

SEQ ID NO: 3728967 - RNA, 14 nt, Human
gccaucuucccagc

SEQ ID NO: 3728968 - RNA, 14 nt, Human
gccaucuugguaaa

SEQ ID NO: 3728969 - RNA, 16 nt, Human
gccaucuugguaaauu

SEQ ID NO: 3728970 - RNA, 15 nt, Human
gccaugaacuggagg

SEQ ID NO: 3728971 - RNA, 23 nt, Human
gccaugacccugccucucccagg

SEQ ID NO: 3728972 - RNA, 20 nt, Human
gccaugagaauguuuuagca

SEQ ID NO: 3728973 - RNA, 21 nt, Human
gccaugagccgcccaaggccu

SEQ ID NO: 3728974 - RNA, 16 nt, Human
gccaugagcuccagac

SEQ ID NO: 3728975 - RNA, 18 nt, Human
gccaugagcuccagaccc

SEQ ID NO: 3728976 - RNA, 16 nt, Human
gccaugaggccucagu

SEQ ID NO: 3728977 - RNA, 20 nt, Human
gccaugaggccucaguggac

SEQ ID NO: 3728978 - RNA, 22 nt, Human
gccaugauggaaauauuuauuu

SEQ ID NO: 3728979 - RNA, 17 nt, Human
gccaugauguggagugg

SEQ ID NO: 3728980 - RNA, 18 nt, Human
gccaugccagcuuaucuc

SEQ ID NO: 3728981 - RNA, 15 nt, Human
gccaugccaggaacc

SEQ ID NO: 3728982 - RNA, 16 nt, Human
gccaugccaggaaccu

SEQ ID NO: 3728983 - RNA, 13 nt, Human
uacuacuccugua

SEQ ID NO: 3728984 - RNA, 17 nt, Human
uacuacuccuguaggaa

SEQ ID NO: 3728985 - RNA, 15 nt, Human
uacuacugaaacaga

SEQ ID NO: 3728986 - RNA, 19 nt, Human
uacuacuuuguuaggauuu

SEQ ID NO: 3728987 - RNA, 23 nt, Human
uacuacuuuguuaggauuuucac

SEQ ID NO: 3728988 - RNA, 20 nt, Human
uacuacuuuugcaugaaaau

SEQ ID NO: 3728989 - RNA, 14 nt, Human
uacuagaagaugaa

SEQ ID NO: 3728990 - RNA, 18 nt, Human
uacuagacugccacaagg

SEQ ID NO: 3728991 - RNA, 20 nt, Human
uacuagagauauuuuguaaa

SEQ ID NO: 3728992 - RNA, 18 nt, Human
uacuagcaaaauaaaaca

SEQ ID NO: 3728993 - RNA, 24 nt, Human
uacuagcaaaauaaaacauagcaa

SEQ ID NO: 3728994 - RNA, 23 nt, Human
uacuagcuuuucaaacaagaaug

SEQ ID NO: 3728995 - RNA, 23 nt, Human
uacuaggaagaacguuuuuuccu

SEQ ID NO: 3728996 - RNA, 18 nt, Human
uacuagggaaaugccuuu

SEQ ID NO: 3728997 - RNA, 15 nt, Human
uacuagguaacuuca

SEQ ID NO: 3728998 - RNA, 14 nt, Human
uacuaguacugugu

SEQ ID NO: 3728999 - RNA, 20 nt, Human
uacuagucaccagagacuuu

SEQ ID NO: 3729000 - RNA, 17 nt, Human
uacuagucuguguggga

SEQ ID NO: 3729001 - RNA, 19 nt, Human
uacuaguuuuaguuuucuc

SEQ ID NO: 3729002 - RNA, 21 nt, Human
uacuauaacauagaauugcaa

SEQ ID NO: 3729003 - RNA, 13 nt, Human
uacuauaacauau

SEQ ID NO: 3729004 - RNA, 17 nt, Human
uacuauaagaacuuuga

SEQ ID NO: 3729005 - RNA, 20 nt, Human
uacuauccuggcuuugccca

SEQ ID NO: 3729006 - RNA, 23 nt, Human
uacuauggcccuggccuagcaua

SEQ ID NO: 3729007 - RNA, 16 nt, Human
uacuauggcugaguuc

SEQ ID NO: 3729008 - RNA, 12 nt, Human
uacuauguauca

SEQ ID NO: 3729009 - RNA, 14 nt, Human
uacuauguaucaau

SEQ ID NO: 3729010 - RNA, 19 nt, Human
uacuauguggaugugacag

SEQ ID NO: 3729011 - RNA, 15 nt, Human
uacuauuaaacaugc

SEQ ID NO: 3729012 - RNA, 16 nt, Human
uacuauuaaacaugcu

SEQ ID NO: 3729013 - RNA, 20 nt, Human
uacuauuaagcaguaaaaac

SEQ ID NO: 3729014 - RNA, 22 nt, Human
uacuauucaguggcgagaaaua

SEQ ID NO: 3729015 - RNA, 21 nt, Human
uacuauuuaaagccuccucau

SEQ ID NO: 3729016 - RNA, 13 nt, Human
uacuauuuaacug

SEQ ID NO: 3729017 - RNA, 14 nt, Human
uacuauuuaacuga

SEQ ID NO: 3729018 - RNA, 19 nt, Human
uacuauuuaacugacuauu

SEQ ID NO: 3729019 - RNA, 17 nt, Human
uacuauuuaagauguga

SEQ ID NO: 3729020 - RNA, 19 nt, Human
uacuauuuaagaugugaaa

SEQ ID NO: 3729021 - RNA, 13 nt, Human
uacuauuuagaua

SEQ ID NO: 3729022 - RNA, 19 nt, Human
uacuauuuucuacaauuaa

SEQ ID NO: 3729023 - RNA, 15 nt, Human
uacuauuuuuacugc

SEQ ID NO: 3729024 - RNA, 17 nt, Human
uacucaaaugaguaaca

SEQ ID NO: 3729025 - RNA, 23 nt, Human
uacucaacccucucaggugacca

SEQ ID NO: 3729026 - RNA, 15 nt, Human
uacucaagaggcuga

SEQ ID NO: 3729027 - RNA, 15 nt, Human
uacucaagcccgcgg

SEQ ID NO: 3729028 - RNA, 14 nt, Human
uacucaauggauuu

SEQ ID NO: 3729029 - RNA, 12 nt, Human
uacucaauuuua

SEQ ID NO: 3729030 - RNA, 13 nt, Human
uacucaauuuuaa

SEQ ID NO: 3729031 - RNA, 14 nt, Human
uacucacacaggca

SEQ ID NO: 3729032 - RNA, 14 nt, Human
uacucaccucaccc

SEQ ID NO: 3729033 - RNA, 24 nt, Human
uacucaccuugaacaccacgcuug

SEQ ID NO: 3729034 - RNA, 16 nt, Human
uacucacuuuucccac

SEQ ID NO: 3729035 - RNA, 18 nt, Human
uacucacuuuucccacuc

SEQ ID NO: 3729036 - RNA, 16 nt, Human
uacucagcagcccucc

SEQ ID NO: 3729037 - RNA, 16 nt, Human
uacucagcccugggcc

SEQ ID NO: 3729038 - RNA, 13 nt, Human
uacucagccugcu

SEQ ID NO: 3729039 - RNA, 22 nt, Human
uacucaggaggcugaggcagaa

SEQ ID NO: 3729040 - RNA, 23 nt, Human
uacucaggcugguggagaacucu

SEQ ID NO: 3729041 - RNA, 17 nt, Human
uacucagggaaagcauu

SEQ ID NO: 3729042 - RNA, 21 nt, Human
uacucagggcuccucccagcu

SEQ ID NO: 3729043 - RNA, 21 nt, Human
uacucaguuuauguuguacaa

SEQ ID NO: 3729044 - RNA, 23 nt, Human
uacucauauauaucuaucuuaua

SEQ ID NO: 3729045 - RNA, 16 nt, Human
uacucaugaucuugug

SEQ ID NO: 3729046 - RNA, 20 nt, Human
uacucauguguaugggcaaa

SEQ ID NO: 3729047 - RNA, 15 nt, Human
uacucauuagaauua

SEQ ID NO: 3729048 - RNA, 14 nt, Human
uacucauucaggga

SEQ ID NO: 3729049 - RNA, 18 nt, Human
uacucauuccccggggcg

SEQ ID NO: 3729050 - RNA, 17 nt, Human
uacucauuuaaaguauu

SEQ ID NO: 3729051 - RNA, 18 nt, Human
uacucauuucuaaaagaa

SEQ ID NO: 3729052 - RNA, 14 nt, Human
uacuccacacugca

SEQ ID NO: 3729053 - RNA, 14 nt, Human
uacuccagugguga

SEQ ID NO: 3729054 - RNA, 14 nt, Human
uacucccagacacc

SEQ ID NO: 3729055 - RNA, 15 nt, Human
uacuccccuccuuga

SEQ ID NO: 3729056 - RNA, 22 nt, Human
uacucccucaaagcacacguca

SEQ ID NO: 3729057 - RNA, 16 nt, Human
uacucccugcagaugc

SEQ ID NO: 3729058 - RNA, 19 nt, Human
uacucccugcagaugccac

SEQ ID NO: 3729059 - RNA, 14 nt, Human
uacuccuaccucag

SEQ ID NO: 3729060 - RNA, 16 nt, Human
uacuccuaccucagcc

SEQ ID NO: 3729061 - RNA, 14 nt, Human
uacuccuauuuuug

SEQ ID NO: 3729062 - RNA, 14 nt, Human
uacuccucacacuu

SEQ ID NO: 3729063 - RNA, 13 nt, Human
uacuccuccucuu

SEQ ID NO: 3729064 - RNA, 14 nt, Human
uacuccucugcagu

SEQ ID NO: 3729065 - RNA, 21 nt, Human
uacuccucugcagugccuugg

SEQ ID NO: 3729066 - RNA, 17 nt, Human
uacuccucuuuacacug

SEQ ID NO: 3729067 - RNA, 13 nt, Human
uacuccugacucc

SEQ ID NO: 3729068 - RNA, 16 nt, Human
uacuccugcaaaauuu

SEQ ID NO: 3729069 - RNA, 17 nt, Human
uacuccuguaauuccua

SEQ ID NO: 3729070 - RNA, 12 nt, Human
uacuccuguggg

SEQ ID NO: 3729071 - RNA, 22 nt, Human
uacuccuuaagaacacaaagcg

SEQ ID NO: 3729072 - RNA, 15 nt, Human
uacucgggaggcuga

SEQ ID NO: 3729073 - RNA, 22 nt, Human
uacucgggaggcugaggcacaa

SEQ ID NO: 3729074 - RNA, 20 nt, Human
uacucuaagaucuuagauuc

SEQ ID NO: 3729075 - RNA, 22 nt, Human
uacucuaagaucuuagauucuc

SEQ ID NO: 3729076 - RNA, 16 nt, Human
uacucuacccucuuag

SEQ ID NO: 3729077 - RNA, 13 nt, Human
uacucuacugaua

SEQ ID NO: 3729078 - RNA, 16 nt, Human
uacucuagauuuuguu

SEQ ID NO: 3729079 - RNA, 23 nt, Human
uacucuauaaccaaaugaaauau

SEQ ID NO: 3729080 - RNA, 14 nt, Human
uacucuccaaccug

SEQ ID NO: 3729081 - RNA, 16 nt, Human
uacucucccauggcuu

SEQ ID NO: 3729082 - RNA, 12 nt, Human
uacucuccuaga

SEQ ID NO: 3729083 - RNA, 13 nt, Human
uacucugaaacac

SEQ ID NO: 3729084 - RNA, 16 nt, Human
uacucugcccucuaga

SEQ ID NO: 3729085 - RNA, 17 nt, Human
uacucuggggugcugcc

SEQ ID NO: 3729086 - RNA, 21 nt, Human
uacucugugucagguggggca

SEQ ID NO: 3729087 - RNA, 16 nt, Human
uacucuuaagccaucu

SEQ ID NO: 3729088 - RNA, 20 nt, Human
uacucuuaagccaucuuggu

SEQ ID NO: 3729089 - RNA, 22 nt, Human
uacucuuaagccaucuugguaa

SEQ ID NO: 3729090 - RNA, 20 nt, Human
uacucuuaaguuucucagcu

SEQ ID NO: 3729091 - RNA, 21 nt, Human
uacucuuaaguuucucagcuc

SEQ ID NO: 3729092 - RNA, 21 nt, Human
uacucuuaggaagagaaacca

SEQ ID NO: 3729093 - RNA, 14 nt, Human
uacucuucuugaaa

SEQ ID NO: 3729094 - RNA, 14 nt, Human
uacucuuguaagau

SEQ ID NO: 3729095 - RNA, 21 nt, Human
uacucuuguaagauuuugaaa

SEQ ID NO: 3729096 - RNA, 19 nt, Human
uacucuuuacccuugagcc

SEQ ID NO: 3729097 - RNA, 14 nt, Human
uacugaacaguaac

SEQ ID NO: 3729098 - RNA, 18 nt, Human
uacugaacaucugagucc

SEQ ID NO: 3729099 - RNA, 17 nt, Human
uacugaaccacuuguag

SEQ ID NO: 3729100 - RNA, 22 nt, Human
uacugaaccacuuguagauuug

SEQ ID NO: 3729101 - RNA, 15 nt, Human
uacugaacuuucuua

SEQ ID NO: 3729102 - RNA, 22 nt, Human
uacugaagaugcagcaaaaugu

SEQ ID NO: 3729103 - RNA, 18 nt, Human
uacugaaggaaaaacaca

SEQ ID NO: 3729104 - RNA, 17 nt, Human
uacugaaguaaaacaaa

SEQ ID NO: 3729105 - RNA, 13 nt, Human
uacugaaucugcu

SEQ ID NO: 3729106 - RNA, 21 nt, Human
uacugaaugaagcaguauuuu

SEQ ID NO: 3729107 - RNA, 19 nt, Human
uacugaaugucauugaaaa

SEQ ID NO: 3729108 - RNA, 17 nt, Human
uacugaccagacaagcu

SEQ ID NO: 3729109 - RNA, 22 nt, Human
uacugacccuggggcuggcuuu

SEQ ID NO: 3729110 - RNA, 14 nt, Human
uacugacuuucuca

SEQ ID NO: 3729111 - RNA, 20 nt, Human
uacugagaaaagccucucca

SEQ ID NO: 3729112 - RNA, 15 nt, Human
uacugagcagugaua

SEQ ID NO: 3729113 - RNA, 21 nt, Human
uacugagcagugauauucuuu

SEQ ID NO: 3729114 - RNA, 19 nt, Human
uacugagccuuguaauucu

SEQ ID NO: 3729115 - RNA, 14 nt, Human
uacugagcuucucu

SEQ ID NO: 3729116 - RNA, 22 nt, Human
uacugaggauauggacacuggu

SEQ ID NO: 3729117 - RNA, 23 nt, Human
uacugagggaccaacugggccca

SEQ ID NO: 3729118 - RNA, 16 nt, Human
uacugaguuacauugu

SEQ ID NO: 3729119 - RNA, 16 nt, Human
uacugauaaagaaaga

SEQ ID NO: 3729120 - RNA, 14 nt, Human
uacugauauauuuu

SEQ ID NO: 3729121 - RNA, 16 nt, Human
uacugauauauuuuac

SEQ ID NO: 3729122 - RNA, 18 nt, Human
uacugaucaugcauuguu

SEQ ID NO: 3729123 - RNA, 14 nt, Human
uacugauucaauuu

SEQ ID NO: 3729124 - RNA, 17 nt, Human
uacugauucaauuugau

SEQ ID NO: 3729125 - RNA, 15 nt, Human
uacugauuguuucau

SEQ ID NO: 3729126 - RNA, 18 nt, Human
uacugauuucaguaaguc

SEQ ID NO: 3729127 - RNA, 21 nt, Human
uacugauuugggcugaaugua

SEQ ID NO: 3729128 - RNA, 17 nt, Human
uacugauuuuuguaaga

SEQ ID NO: 3729129 - RNA, 15 nt, Human
uacugauuuuuguga

SEQ ID NO: 3729130 - RNA, 16 nt, Human
uacugcaaacuauuua

SEQ ID NO: 3729131 - RNA, 22 nt, Human
uacugcaaaucaggcuuuuguu

SEQ ID NO: 3729132 - RNA, 15 nt, Human
uacugcaagaaaaug

SEQ ID NO: 3729133 - RNA, 13 nt, Human
uaggugacauaua

SEQ ID NO: 3729134 - RNA, 16 nt, Human
uaggugauccauguaa

SEQ ID NO: 3729135 - RNA, 21 nt, Human
uaggugauccauguaacugcc

SEQ ID NO: 3729136 - RNA, 19 nt, Human
uaggugcccuuggaggcca

SEQ ID NO: 3729137 - RNA, 16 nt, Human
uaggugcuaauuaaua

SEQ ID NO: 3729138 - RNA, 19 nt, Human
uaggugcuaauuaauaaag

SEQ ID NO: 3729139 - RNA, 23 nt, Human
uaggugcuacaaaaacacagcaa

SEQ ID NO: 3729140 - RNA, 19 nt, Human
uaggugcuauuugucaucu

SEQ ID NO: 3729141 - RNA, 16 nt, Human
uagguggcaaggcugu

SEQ ID NO: 3729142 - RNA, 19 nt, Human
uaggugugacugaauuucu

SEQ ID NO: 3729143 - RNA, 17 nt, Human
uagguguucaggccagu

SEQ ID NO: 3729144 - RNA, 22 nt, Human
uagguguugauuuucuguugua

SEQ ID NO: 3729145 - RNA, 20 nt, Human
uagguuaaaaaaaaaaguca

SEQ ID NO: 3729146 - RNA, 17 nt, Human
uagguuaaaaaaaggca

SEQ ID NO: 3729147 - RNA, 22 nt, Human
uagguuaauuccaauuauauga

SEQ ID NO: 3729148 - RNA, 22 nt, Human
uagguuauuaugauuagcuuug

SEQ ID NO: 3729149 - RNA, 22 nt, Human
uagguucccuguucuuccucca

SEQ ID NO: 3729150 - RNA, 12 nt, Human
uagguucuaaaa

SEQ ID NO: 3729151 - RNA, 18 nt, Human
uagguucuaaaguucuaa

SEQ ID NO: 3729152 - RNA, 24 nt, Human
uagguuggaagcuagcuccccucc

SEQ ID NO: 3729153 - RNA, 13 nt, Human
uagguuuaacaua

SEQ ID NO: 3729154 - RNA, 15 nt, Human
uagguuuaacauaaa

SEQ ID NO: 3729155 - RNA, 17 nt, Human
uagguuuaacauaaagg

SEQ ID NO: 3729156 - RNA, 19 nt, Human
uagguuuaacucagaucac

SEQ ID NO: 3729157 - RNA, 19 nt, Human
uagguuuaugacaguaauu

SEQ ID NO: 3729158 - RNA, 21 nt, Human
uagguuuuuccuuauuugcuu

SEQ ID NO: 3729159 - RNA, 15 nt, Human
uagguuuuuuuguau

SEQ ID NO: 3729160 - RNA, 21 nt, Human
uaguaaaaaaucaauuaacca

SEQ ID NO: 3729161 - RNA, 13 nt, Human
uaguaaaaauaaa

SEQ ID NO: 3729162 - RNA, 15 nt, Human
uaguaaaacacagag

SEQ ID NO: 3729163 - RNA, 15 nt, Human
uaguaaaauuuauuu

SEQ ID NO: 3729164 - RNA, 12 nt, Human
uaguaaaccaau

SEQ ID NO: 3729165 - RNA, 22 nt, Human
uaguaaaccaauccuaugcaug

SEQ ID NO: 3729166 - RNA, 13 nt, Human
uaguaaagaaaug

SEQ ID NO: 3729167 - RNA, 17 nt, Human
uaguaaagucaaggaga

SEQ ID NO: 3729168 - RNA, 18 nt, Human
uaguaaaucacgcuuuuu

SEQ ID NO: 3729169 - RNA, 11 nt, Human
uaguaaauguc

SEQ ID NO: 3729170 - RNA, 12 nt, Human
uaguaaaugucu

SEQ ID NO: 3729171 - RNA, 15 nt, Human
uaguaaaugucuuug

SEQ ID NO: 3729172 - RNA, 16 nt, Human
uaguaaaugucuuugu

SEQ ID NO: 3729173 - RNA, 17 nt, Human
uaguaaaugucuuugua

SEQ ID NO: 3729174 - RNA, 18 nt, Human
uaguaaaugucuuuguaa

SEQ ID NO: 3729175 - RNA, 13 nt, Human
uaguaaauguuau

SEQ ID NO: 3729176 - RNA, 15 nt, Human
uaguaacugacauga

SEQ ID NO: 3729177 - RNA, 11 nt, Human
uaguaagcaua

SEQ ID NO: 3729178 - RNA, 23 nt, Human
uaguaagcggcucaagcccagga

SEQ ID NO: 3729179 - RNA, 14 nt, Human
uaguaauagccugg

SEQ ID NO: 3729180 - RNA, 13 nt, Human
uaguaauauauuu

SEQ ID NO: 3729181 - RNA, 17 nt, Human
uaguaauauauuuaaag

SEQ ID NO: 3729182 - RNA, 14 nt, Human
uaguaaucacaguu

SEQ ID NO: 3729183 - RNA, 15 nt, Human
uaguaaucacaguug

SEQ ID NO: 3729184 - RNA, 15 nt, Human
uaguaauguuuuaua

SEQ ID NO: 3729185 - RNA, 14 nt, Human
uaguacaaaguuuc

SEQ ID NO: 3729186 - RNA, 21 nt, Human
uaguacauaaaggugguaugu

SEQ ID NO: 3729187 - RNA, 16 nt, Human
uaguaccauuuauaca

SEQ ID NO: 3729188 - RNA, 19 nt, Human
uaguaccauuuauacaaau

SEQ ID NO: 3729189 - RNA, 18 nt, Human
uaguaccugaaaaguaac

SEQ ID NO: 3729190 - RNA, 14 nt, Human
uaguacuaagcauu

SEQ ID NO: 3729191 - RNA, 15 nt, Human
uaguacuaagcauuu

SEQ ID NO: 3729192 - RNA, 15 nt, Human
uaguacuagaaacug

SEQ ID NO: 3729193 - RNA, 22 nt, Human
uaguacuagagauauuuuguaa

SEQ ID NO: 3729194 - RNA, 23 nt, Human
uaguacuagagauauuuuguaaa

SEQ ID NO: 3729195 - RNA, 20 nt, Human
uaguacuccugcaaaauuuu

SEQ ID NO: 3729196 - RNA, 19 nt, Human
uaguacuucuucuguaaua

SEQ ID NO: 3729197 - RNA, 16 nt, Human
uaguacuuuauagaag

SEQ ID NO: 3729198 - RNA, 21 nt, Human
uaguacuuuauagaagaaugc

SEQ ID NO: 3729199 - RNA, 15 nt, Human
uaguagacacacuau

SEQ ID NO: 3729200 - RNA, 15 nt, Human
uaguagagacagggu

SEQ ID NO: 3729201 - RNA, 22 nt, Human
uaguagagacaggguuuugcca

SEQ ID NO: 3729202 - RNA, 20 nt, Human
uaguagagguacacuuguga

SEQ ID NO: 3729203 - RNA, 14 nt, Human
uaguagcauguuga

SEQ ID NO: 3729204 - RNA, 23 nt, Human
uaguagcguuuuuuaaauguaua

SEQ ID NO: 3729205 - RNA, 18 nt, Human
uaguaguaugaugauaca

SEQ ID NO: 3729206 - RNA, 18 nt, Human
uaguauaccggaauuacu

SEQ ID NO: 3729207 - RNA, 18 nt, Human
uaguauauuaaaaauggu

SEQ ID NO: 3729208 - RNA, 14 nt, Human
uaguaucaaauauu

SEQ ID NO: 3729209 - RNA, 20 nt, Human
uaguaucaaauauuagaugu

SEQ ID NO: 3729210 - RNA, 23 nt, Human
uaguaucaaauauuagaugugau

SEQ ID NO: 3729211 - RNA, 13 nt, Human
uaguaucaguguu

SEQ ID NO: 3729212 - RNA, 16 nt, Human
uaguaucaguguuuua

SEQ ID NO: 3729213 - RNA, 18 nt, Human
uaguaucaucagauagca

SEQ ID NO: 3729214 - RNA, 13 nt, Human
uaguauccuccag

SEQ ID NO: 3729215 - RNA, 17 nt, Human
uaguauccuccagguuu

SEQ ID NO: 3729216 - RNA, 19 nt, Human
uaguauccuccagguuuuu

SEQ ID NO: 3729217 - RNA, 22 nt, Human
uaguauccuccagguuuuucaa

SEQ ID NO: 3729218 - RNA, 16 nt, Human
uaguaucuagcaauca

SEQ ID NO: 3729219 - RNA, 19 nt, Human
uaguaucuagcaaucacaa

SEQ ID NO: 3729220 - RNA, 13 nt, Human
uaguaugaaaaug

SEQ ID NO: 3729221 - RNA, 17 nt, Human
uaguauggccuguguca

SEQ ID NO: 3729222 - RNA, 14 nt, Human
uaguauugacaaaa

SEQ ID NO: 3729223 - RNA, 13 nt, Human
uaguauuguuguc

SEQ ID NO: 3729224 - RNA, 17 nt, Human
uaguauuguuguccuuu

SEQ ID NO: 3729225 - RNA, 18 nt, Human
uaguauuuauuuauguac

SEQ ID NO: 3729226 - RNA, 12 nt, Human
uaguauuugaaa

SEQ ID NO: 3729227 - RNA, 12 nt, Human
uaguauuugaau

SEQ ID NO: 3729228 - RNA, 18 nt, Human
uaguauuuuuuguauaau

SEQ ID NO: 3729229 - RNA, 23 nt, Human
uagucaaauguaauguggcuucu

SEQ ID NO: 3729230 - RNA, 13 nt, Human
uagucaaauugug

SEQ ID NO: 3729231 - RNA, 14 nt, Human
uagucaagcuccuc

SEQ ID NO: 3729232 - RNA, 15 nt, Human
uagucaagcuccucc

SEQ ID NO: 3729233 - RNA, 18 nt, Human
uagucaaucaagucuguu

SEQ ID NO: 3729234 - RNA, 19 nt, Human
uagucaaugacaugaauuu

SEQ ID NO: 3729235 - RNA, 21 nt, Human
uagucacauggccuaugcaca

SEQ ID NO: 3729236 - RNA, 15 nt, Human
uagucaccagagacu

SEQ ID NO: 3729237 - RNA, 18 nt, Human
uagucaccagagacuuua

SEQ ID NO: 3729238 - RNA, 21 nt, Human
uagucaccuuuuaaauccugu

SEQ ID NO: 3729239 - RNA, 22 nt, Human
uagucaccuuuuaaauccuguu

SEQ ID NO: 3729240 - RNA, 17 nt, Human
uagucacugagacagcc

SEQ ID NO: 3729241 - RNA, 21 nt, Human
uagucagcgcaggaaugcaca

SEQ ID NO: 3729242 - RNA, 19 nt, Human
uagucagcuagaucauuug

SEQ ID NO: 3729243 - RNA, 18 nt, Human
uagucauuccaaauauga

SEQ ID NO: 3729244 - RNA, 14 nt, Human
uagucauucuuccc

SEQ ID NO: 3729245 - RNA, 18 nt, Human
uagucauuuacuaaacau

SEQ ID NO: 3729246 - RNA, 13 nt, Human
uagucauuuugcu

SEQ ID NO: 3729247 - RNA, 23 nt, Human
uagucccagcuacuugggaggcu

SEQ ID NO: 3729248 - RNA, 22 nt, Human
uagucccccaacucugagccca

SEQ ID NO: 3729249 - RNA, 18 nt, Human
uagucccucaugcaaauc

SEQ ID NO: 3729250 - RNA, 16 nt, Human
uagucccugccacgaa

SEQ ID NO: 3729251 - RNA, 11 nt, Human
uaguccuguga

SEQ ID NO: 3729252 - RNA, 22 nt, Human
uaguccuuuacuaauccaaccc

SEQ ID NO: 3729253 - RNA, 21 nt, Human
uagucguggagaugucuucgu

SEQ ID NO: 3729254 - RNA, 17 nt, Human
uagucuaaccaaaugca

SEQ ID NO: 3729255 - RNA, 21 nt, Human
uagucuacucuuaagccaucu

SEQ ID NO: 3729256 - RNA, 20 nt, Human
uagucuagauggcuccucuc

SEQ ID NO: 3729257 - RNA, 16 nt, Human
uagucuaguguaguau

SEQ ID NO: 3729258 - RNA, 17 nt, Human
uagucucagugaagacu

SEQ ID NO: 3729259 - RNA, 11 nt, Human
uagucucaguu

SEQ ID NO: 3729260 - RNA, 22 nt, Human
uagucucaguuugugugucuua

SEQ ID NO: 3729261 - RNA, 21 nt, Human
uagucucuaucauuaaaguuc

SEQ ID NO: 3729262 - RNA, 14 nt, Human
uagucucugugcuu

SEQ ID NO: 3729263 - RNA, 17 nt, Human
uagucucugugcuuuga

SEQ ID NO: 3729264 - RNA, 18 nt, Human
uagucucuuuaaaaggaa

SEQ ID NO: 3729265 - RNA, 19 nt, Human
uagucucuuuauuccuagu

SEQ ID NO: 3729266 - RNA, 12 nt, Human
uagucugguuuc

SEQ ID NO: 3729267 - RNA, 23 nt, Human
uagucugugugggacuguacaca

SEQ ID NO: 3729268 - RNA, 22 nt, Human
uagucuucucaaauuagaaagu

SEQ ID NO: 3729269 - RNA, 23 nt, Human
uagucuuggaagcuguuuggaaa

SEQ ID NO: 3729270 - RNA, 14 nt, Human
uagucuuuugcuuu

SEQ ID NO: 3729271 - RNA, 17 nt, Human
uagugaagacuccagaa

SEQ ID NO: 3729272 - RNA, 19 nt, Human
uagugaaggcuucucucug

SEQ ID NO: 3729273 - RNA, 22 nt, Human
uagugacuaaaccauugugcau

SEQ ID NO: 3729274 - RNA, 18 nt, Human
uagugagcagugagcaga

SEQ ID NO: 3729275 - RNA, 12 nt, Human
uagugauauuuc

SEQ ID NO: 3729276 - RNA, 17 nt, Human
uagugaucugaacagaa

SEQ ID NO: 3729277 - RNA, 13 nt, Human
uagugaugguucc

SEQ ID NO: 3729278 - RNA, 14 nt, Human
uagugaugguuccc

SEQ ID NO: 3729279 - RNA, 18 nt, Human
uagugaugguuccccugu

SEQ ID NO: 3729280 - RNA, 20 nt, Human
uagugauuuuuaugccaccu

SEQ ID NO: 3729281 - RNA, 14 nt, Human
uagugcaaauuguc

SEQ ID NO: 3729282 - RNA, 15 nt, Human
uagugcaauauauuu

SEQ ID NO: 3729283 - RNA, 19 nt, Human
uacugcaauuaaagugaua

SEQ ID NO: 3729284 - RNA, 20 nt, Human
uacugcagccuuugccuccc

SEQ ID NO: 3729285 - RNA, 22 nt, Human
uacugcagccuuugccuccccg

SEQ ID NO: 3729286 - RNA, 23 nt, Human
uacugcagcuuuacaugcaauuu

SEQ ID NO: 3729287 - RNA, 16 nt, Human
uacugcagggccagga

SEQ ID NO: 3729288 - RNA, 22 nt, Human
uacugcauacuuuuuaaaugua

SEQ ID NO: 3729289 - RNA, 17 nt, Human
uacugcauaugaaagga

SEQ ID NO: 3729290 - RNA, 16 nt, Human
uacugcauuauuugag

SEQ ID NO: 3729291 - RNA, 18 nt, Human
uacugcauuuagggagua

SEQ ID NO: 3729292 - RNA, 15 nt, Human
uacugccagaugcug

SEQ ID NO: 3729293 - RNA, 24 nt, Human
uacugccagaugcugauguucagu

SEQ ID NO: 3729294 - RNA, 19 nt, Human
uacugcccaggccugccug

SEQ ID NO: 3729295 - RNA, 22 nt, Human
uacugcccaggccugccuguuc

SEQ ID NO: 3729296 - RNA, 22 nt, Human
uacugcccuccagcucuuuccu

SEQ ID NO: 3729297 - RNA, 23 nt, Human
uacugcccuccagcucuuuccuc

SEQ ID NO: 3729298 - RNA, 14 nt, Human
uacugccuauuuua

SEQ ID NO: 3729299 - RNA, 21 nt, Human
uacugccucuacaguuaauag

SEQ ID NO: 3729300 - RNA, 11 nt, Human
uacugccugcu

SEQ ID NO: 3729301 - RNA, 12 nt, Human
uacugccugcuu

SEQ ID NO: 3729302 - RNA, 19 nt, Human
uacugccuuuagaaaauau

SEQ ID NO: 3729303 - RNA, 17 nt, Human
uacugcgacuuucugcc

SEQ ID NO: 3729304 - RNA, 15 nt, Human
uacugcucaggcugc

SEQ ID NO: 3729305 - RNA, 15 nt, Human
uacugcucuccucca

SEQ ID NO: 3729306 - RNA, 13 nt, Human
uacugcuuaauuc

SEQ ID NO: 3729307 - RNA, 19 nt, Human
uacugcuuaauucaaauaa

SEQ ID NO: 3729308 - RNA, 22 nt, Human
uacugcuucuaccaacuggaag

SEQ ID NO: 3729309 - RNA, 18 nt, Human
uacugcuugaauaaacac

SEQ ID NO: 3729310 - RNA, 15 nt, Human
uacugcuuuuaacuu

SEQ ID NO: 3729311 - RNA, 14 nt, Human
uacuggagaagucu

SEQ ID NO: 3729312 - RNA, 16 nt, Human
uacuggauaaauuguu

SEQ ID NO: 3729313 - RNA, 18 nt, Human
uacuggauuuguuguucu

SEQ ID NO: 3729314 - RNA, 22 nt, Human
uacuggcaaaaggaucuuugug

SEQ ID NO: 3729315 - RNA, 18 nt, Human
uacuggccuuuuucauuu

SEQ ID NO: 3729316 - RNA, 18 nt, Human
uacuggcuccucuguggu

SEQ ID NO: 3729317 - RNA, 19 nt, Human
uacuggcuccucuguggug

SEQ ID NO: 3729318 - RNA, 17 nt, Human
uacugggaaggcuacuu

SEQ ID NO: 3729319 - RNA, 16 nt, Human
uacugggagccuaccc

SEQ ID NO: 3729320 - RNA, 20 nt, Human
uacugggccauguugugccu

SEQ ID NO: 3729321 - RNA, 22 nt, Human
uacugggccuuagugggccagg

SEQ ID NO: 3729322 - RNA, 19 nt, Human
uacuggggaaacuggccau

SEQ ID NO: 3729323 - RNA, 24 nt, Human
uacuggggaaacuggccauggccu

SEQ ID NO: 3729324 - RNA, 15 nt, Human
uacuggggcugggga

SEQ ID NO: 3729325 - RNA, 14 nt, Human
uacugggugucauu

SEQ ID NO: 3729326 - RNA, 23 nt, Human
uacuguaaaaugcaaaaaaucuu

SEQ ID NO: 3729327 - RNA, 20 nt, Human
uacuguaaagaaagagagaa

SEQ ID NO: 3729328 - RNA, 23 nt, Human
uacuguaaagaaagagagaaaau

SEQ ID NO: 3729329 - RNA, 11 nt, Human
uacuguaacac

SEQ ID NO: 3729330 - RNA, 19 nt, Human
uacuguaaccuguugcugu

SEQ ID NO: 3729331 - RNA, 19 nt, Human
uacuguaagaauaauuuau

SEQ ID NO: 3729332 - RNA, 20 nt, Human
uacuguaagaauaauuuaua

SEQ ID NO: 3729333 - RNA, 14 nt, Human
uacuguaagacauu

SEQ ID NO: 3729334 - RNA, 18 nt, Human
uacuguaaggcaaucaug

SEQ ID NO: 3729335 - RNA, 16 nt, Human
uacuguaauaauaccu

SEQ ID NO: 3729336 - RNA, 17 nt, Human
uacuguaauaauaccuc

SEQ ID NO: 3729337 - RNA, 17 nt, Human
uacuguaauuugugaua

SEQ ID NO: 3729338 - RNA, 12 nt, Human
uacuguaauuuu

SEQ ID NO: 3729339 - RNA, 19 nt, Human
uacuguacaaugacuuuau

SEQ ID NO: 3729340 - RNA, 19 nt, Human
uacuguacagacagaaaaa

SEQ ID NO: 3729341 - RNA, 23 nt, Human
uacuguacagacagaaaaaacug

SEQ ID NO: 3729342 - RNA, 18 nt, Human
uacuguacagauugcugc

SEQ ID NO: 3729343 - RNA, 21 nt, Human
uacuguacauaaacaaugaug

SEQ ID NO: 3729344 - RNA, 18 nt, Human
uacuguacaugaaaacac

SEQ ID NO: 3729345 - RNA, 21 nt, Human
uacuguacaugaaaacacauu

SEQ ID NO: 3729346 - RNA, 14 nt, Human
uacuguacuuaaua

SEQ ID NO: 3729347 - RNA, 15 nt, Human
uacuguaguuuuucu

SEQ ID NO: 3729348 - RNA, 20 nt, Human
uacuguauagacaguuugua

SEQ ID NO: 3729349 - RNA, 15 nt, Human
uacuguaugaucaaa

SEQ ID NO: 3729350 - RNA, 18 nt, Human
uacuguaugaucaaaugu

SEQ ID NO: 3729351 - RNA, 19 nt, Human
uacugucaaaauaauuuua

SEQ ID NO: 3729352 - RNA, 15 nt, Human
uacugucaaaugaug

SEQ ID NO: 3729353 - RNA, 21 nt, Human
uacugucaaaugaugugcaaa

SEQ ID NO: 3729354 - RNA, 11 nt, Human
uacugucaaua

SEQ ID NO: 3729355 - RNA, 13 nt, Human
uacugucaauaaa

SEQ ID NO: 3729356 - RNA, 16 nt, Human
uacugucaauaaacag

SEQ ID NO: 3729357 - RNA, 16 nt, Human
uacuguccuacccacc

SEQ ID NO: 3729358 - RNA, 18 nt, Human
uacugucuauuaauauuc

SEQ ID NO: 3729359 - RNA, 19 nt, Human
uacugucuauuaauauuca

SEQ ID NO: 3729360 - RNA, 22 nt, Human
uacugucucacugaaacauuua

SEQ ID NO: 3729361 - RNA, 22 nt, Human
uacugucugguuuuaacaauuu

SEQ ID NO: 3729362 - RNA, 14 nt, Human
uacugucuuaauua

SEQ ID NO: 3729363 - RNA, 14 nt, Human
uacugugacuuuau

SEQ ID NO: 3729364 - RNA, 18 nt, Human
uacugugcuggagccacu

SEQ ID NO: 3729365 - RNA, 12 nt, Human
uacuguggagga

SEQ ID NO: 3729366 - RNA, 15 nt, Human
uacuguggcuucuua

SEQ ID NO: 3729367 - RNA, 18 nt, Human
uacugugggcaauuuaga

SEQ ID NO: 3729368 - RNA, 23 nt, Human
uacuguguaaacucaucugaaau

SEQ ID NO: 3729369 - RNA, 22 nt, Human
uacuguguacagaauucugcua

SEQ ID NO: 3729370 - RNA, 23 nt, Human
uacuguguacagaauucugcuac

SEQ ID NO: 3729371 - RNA, 16 nt, Human
uacugugucauaaaca

SEQ ID NO: 3729372 - RNA, 21 nt, Human
uacugugugcuuguuuuauaa

SEQ ID NO: 3729373 - RNA, 19 nt, Human
uacuguguggaacuuuuau

SEQ ID NO: 3729374 - RNA, 14 nt, Human
uacuguguguguga

SEQ ID NO: 3729375 - RNA, 17 nt, Human
uacugugugugugaaug

SEQ ID NO: 3729376 - RNA, 21 nt, Human
uacugugugugugaaugaaca

SEQ ID NO: 3729377 - RNA, 10 nt, Human
uacuguguua

SEQ ID NO: 3729378 - RNA, 12 nt, Human
uacuguguuccu

SEQ ID NO: 3729379 - RNA, 16 nt, Human
uacuguuaaaggaaaa

SEQ ID NO: 3729380 - RNA, 15 nt, Human
uacuguuaaccauuu

SEQ ID NO: 3729381 - RNA, 17 nt, Human
uacuguuacugggcccu

SEQ ID NO: 3729382 - RNA, 15 nt, Human
uacuguuacuugaua

SEQ ID NO: 3729383 - RNA, 15 nt, Human
uacuguuauucuuug

SEQ ID NO: 3729384 - RNA, 13 nt, Human
uacuguucuaaag

SEQ ID NO: 3729385 - RNA, 17 nt, Human
uacuguucuaaagcucu

SEQ ID NO: 3729386 - RNA, 18 nt, Human
uacuguucucuucuugaa

SEQ ID NO: 3729387 - RNA, 10 nt, Human
uacuguucuu

SEQ ID NO: 3729388 - RNA, 12 nt, Human
uacuguucuugc

SEQ ID NO: 3729389 - RNA, 13 nt, Human
uacuguucuugcu

SEQ ID NO: 3729390 - RNA, 20 nt, Human
uacuguugauaauucuuauu

SEQ ID NO: 3729391 - RNA, 22 nt, Human
uacuguuguaagaauucugauu

SEQ ID NO: 3729392 - RNA, 17 nt, Human
uacuguuguccuauggg

SEQ ID NO: 3729393 - RNA, 15 nt, Human
uacuguuuauuucug

SEQ ID NO: 3729394 - RNA, 19 nt, Human
uacuguuugucuucucccc

SEQ ID NO: 3729395 - RNA, 20 nt, Human
uacuguuugucuucucccca

SEQ ID NO: 3729396 - RNA, 23 nt, Human
uacuuaaaaaaaaaaaaaagcuu

SEQ ID NO: 3729397 - RNA, 14 nt, Human
uacuuaaagauuua

SEQ ID NO: 3729398 - RNA, 21 nt, Human
uacuuaaaugguaauaagcac

SEQ ID NO: 3729399 - RNA, 18 nt, Human
uacuuaaauguuauguau

SEQ ID NO: 3729400 - RNA, 19 nt, Human
uacuuaaauguuauguaua

SEQ ID NO: 3729401 - RNA, 16 nt, Human
uacuuaagaauaugcu

SEQ ID NO: 3729402 - RNA, 12 nt, Human
uacuuaagacuu

SEQ ID NO: 3729403 - RNA, 16 nt, Human
uacuuaagagaaaugg

SEQ ID NO: 3729404 - RNA, 15 nt, Human
uacuuaauucaacuu

SEQ ID NO: 3729405 - RNA, 23 nt, Human
uacuuacaugcauuacugcaugc

SEQ ID NO: 3729406 - RNA, 22 nt, Human
uacuuacauucucuaauaagaa

SEQ ID NO: 3729407 - RNA, 17 nt, Human
uacuuacuaaaauauau

SEQ ID NO: 3729408 - RNA, 19 nt, Human
uacuuagaguuucuguuug

SEQ ID NO: 3729409 - RNA, 20 nt, Human
uacuuagaguuucuguuuga

SEQ ID NO: 3729410 - RNA, 17 nt, Human
uacuuagcaaaaagugg

SEQ ID NO: 3729411 - RNA, 20 nt, Human
uacuuagcauccuaagaaau

SEQ ID NO: 3729412 - RNA, 18 nt, Human
uacuuagcuuaucaauuu

SEQ ID NO: 3729413 - RNA, 20 nt, Human
uacuuagcuuaucaauuugu

SEQ ID NO: 3729414 - RNA, 22 nt, Human
uacuuagcuuaucaauuuguca

SEQ ID NO: 3729415 - RNA, 15 nt, Human
uacuuaguauugcaa

SEQ ID NO: 3729416 - RNA, 20 nt, Human
uacuuauauuuucguaugaa

SEQ ID NO: 3729417 - RNA, 22 nt, Human
uacuuauauuuucguaugaaaa

SEQ ID NO: 3729418 - RNA, 21 nt, Human
uacuuauauuuuuaauaaaag

SEQ ID NO: 3729419 - RNA, 15 nt, Human
uacuuaucccugccc

SEQ ID NO: 3729420 - RNA, 21 nt, Human
uacuuaucccugcccauuuca

SEQ ID NO: 3729421 - RNA, 23 nt, Human
uacuuaucccugcccauuucaua

SEQ ID NO: 3729422 - RNA, 13 nt, Human
uacuuauucauug

SEQ ID NO: 3729423 - RNA, 12 nt, Human
uacuuauuuaaa

SEQ ID NO: 3729424 - RNA, 22 nt, Human
uacuuauuuaugaacagacuuu

SEQ ID NO: 3729425 - RNA, 19 nt, Human
uacuucaaaaguauuuucc

SEQ ID NO: 3729426 - RNA, 20 nt, Human
uacuucacuauacaaacaaa

SEQ ID NO: 3729427 - RNA, 19 nt, Human
uacuucacuuuaauucuca

SEQ ID NO: 3729428 - RNA, 13 nt, Human
uacuucagcaaga

SEQ ID NO: 3729429 - RNA, 14 nt, Human
uacuucagcaagag

SEQ ID NO: 3729430 - RNA, 17 nt, Human
uacuucagcaagagaga

SEQ ID NO: 3729431 - RNA, 21 nt, Human
uacuucagcaagagagaaccu

SEQ ID NO: 3729432 - RNA, 19 nt, Human
uagugcaauauauuuugua

SEQ ID NO: 3729433 - RNA, 23 nt, Human
uagugcaauauauuuuguaugca

SEQ ID NO: 3729434 - RNA, 16 nt, Human
uagugcagcugaaauu

SEQ ID NO: 3729435 - RNA, 18 nt, Human
uagugcagcugaaauuga

SEQ ID NO: 3729436 - RNA, 19 nt, Human
uagugcagcugauuuuaac

SEQ ID NO: 3729437 - RNA, 21 nt, Human
uagugccagaauuuuaggaac

SEQ ID NO: 3729438 - RNA, 23 nt, Human
uagugcccuccacagccgcagcc

SEQ ID NO: 3729439 - RNA, 22 nt, Human
uagugccugagaguauuuaggc

SEQ ID NO: 3729440 - RNA, 14 nt, Human
uagugcggacaagu

SEQ ID NO: 3729441 - RNA, 13 nt, Human
uagugcuaagugu

SEQ ID NO: 3729442 - RNA, 14 nt, Human
uagugcuaagugug

SEQ ID NO: 3729443 - RNA, 15 nt, Human
uagugcuaaguguga

SEQ ID NO: 3729444 - RNA, 19 nt, Human
uagugcuaagugugaacug

SEQ ID NO: 3729445 - RNA, 14 nt, Human
uagugcuauauaua

SEQ ID NO: 3729446 - RNA, 22 nt, Human
uagugcuauauauauaaauauu

SEQ ID NO: 3729447 - RNA, 19 nt, Human
uagugcugaagcuuauuaa

SEQ ID NO: 3729448 - RNA, 22 nt, Human
uagugcugcugaagaugaauca

SEQ ID NO: 3729449 - RNA, 12 nt, Human
uagugcugugaa

SEQ ID NO: 3729450 - RNA, 16 nt, Human
uagugcugugaaaaaa

SEQ ID NO: 3729451 - RNA, 17 nt, Human
uagugcugugaaaaaaa

SEQ ID NO: 3729452 - RNA, 12 nt, Human
uagugcuuugag

SEQ ID NO: 3729453 - RNA, 15 nt, Human
uaguggaaaaggcac

SEQ ID NO: 3729454 - RNA, 17 nt, Human
uaguggaaacauuuaua

SEQ ID NO: 3729455 - RNA, 15 nt, Human
uaguggacccugaaa

SEQ ID NO: 3729456 - RNA, 18 nt, Human
uaguggauggaaggggcu

SEQ ID NO: 3729457 - RNA, 15 nt, Human
uaguggauguucuga

SEQ ID NO: 3729458 - RNA, 23 nt, Human
uaguggauuacugccauucacuu

SEQ ID NO: 3729459 - RNA, 17 nt, Human
uaguggccagaccagag

SEQ ID NO: 3729460 - RNA, 19 nt, Human
uaguggccaucauuucugg

SEQ ID NO: 3729461 - RNA, 13 nt, Human
uaguggcugucca

SEQ ID NO: 3729462 - RNA, 20 nt, Human
uaguggcuuaaaacaacacu

SEQ ID NO: 3729463 - RNA, 14 nt, Human
uagugggccagggc

SEQ ID NO: 3729464 - RNA, 20 nt, Human
uaguggggucucccucuccu

SEQ ID NO: 3729465 - RNA, 21 nt, Human
uaguggucuuuguaagagugu

SEQ ID NO: 3729466 - RNA, 14 nt, Human
uagugguguuuuaa

SEQ ID NO: 3729467 - RNA, 20 nt, Human
uagugguuuaucagcaaaaa

SEQ ID NO: 3729468 - RNA, 17 nt, Human
uaguguaaaaaugagaa

SEQ ID NO: 3729469 - RNA, 23 nt, Human
uaguguaacuugcuuaaauuucu

SEQ ID NO: 3729470 - RNA, 15 nt, Human
uaguguaauauacca

SEQ ID NO: 3729471 - RNA, 20 nt, Human
uaguguaggucagcgugcuu

SEQ ID NO: 3729472 - RNA, 14 nt, Human
uaguguaguauucu

SEQ ID NO: 3729473 - RNA, 12 nt, Human
uaguguaucaaa

SEQ ID NO: 3729474 - RNA, 17 nt, Human
uaguguaucaaaaugcu

SEQ ID NO: 3729475 - RNA, 19 nt, Human
uaguguccauuuugugaag

SEQ ID NO: 3729476 - RNA, 16 nt, Human
uaguguccuaugcaau

SEQ ID NO: 3729477 - RNA, 18 nt, Human
uagugugguuuucuguuu

SEQ ID NO: 3729478 - RNA, 15 nt, Human
uaguguguucugauu

SEQ ID NO: 3729479 - RNA, 12 nt, Human
uaguguguugug

SEQ ID NO: 3729480 - RNA, 15 nt, Human
uaguguuaaucaauu

SEQ ID NO: 3729481 - RNA, 13 nt, Human
uaguguuauauga

SEQ ID NO: 3729482 - RNA, 15 nt, Human
uaguguuauaugaac

SEQ ID NO: 3729483 - RNA, 22 nt, Human
uaguguuauaugaacauacaaa

SEQ ID NO: 3729484 - RNA, 15 nt, Human
uaguguucuguuugu

SEQ ID NO: 3729485 - RNA, 15 nt, Human
uaguguuucugugca

SEQ ID NO: 3729486 - RNA, 16 nt, Human
uaguguuucugugcau

SEQ ID NO: 3729487 - RNA, 19 nt, Human
uaguguuuuaagaaaugua

SEQ ID NO: 3729488 - RNA, 13 nt, Human
uaguuaaagaaga

SEQ ID NO: 3729489 - RNA, 20 nt, Human
uaguuaaauguuaccucuga

SEQ ID NO: 3729490 - RNA, 19 nt, Human
uaguuaaauuucuggaccu

SEQ ID NO: 3729491 - RNA, 23 nt, Human
uaguuaauauugugaagaaaaau

SEQ ID NO: 3729492 - RNA, 16 nt, Human
uaguuaaucaucaaga

SEQ ID NO: 3729493 - RNA, 14 nt, Human
uaguuaaucuauaa

SEQ ID NO: 3729494 - RNA, 19 nt, Human
uaguuaauggauuaaauuu

SEQ ID NO: 3729495 - RNA, 19 nt, Human
uaguuaccuuauaguuacu

SEQ ID NO: 3729496 - RNA, 20 nt, Human
uaguuacuguaaaaugcaaa

SEQ ID NO: 3729497 - RNA, 19 nt, Human
uaguuacuguguaaacuca

SEQ ID NO: 3729498 - RNA, 22 nt, Human
uaguuagcuaauaaaaagcuuu

SEQ ID NO: 3729499 - RNA, 16 nt, Human
uaguuaggaaauaaaa

SEQ ID NO: 3729500 - RNA, 21 nt, Human
uaguuaggaugcucaguugcu

SEQ ID NO: 3729501 - RNA, 16 nt, Human
uaguuauaguuucaga

SEQ ID NO: 3729502 - RNA, 15 nt, Human
uaguuauguaaauaa

SEQ ID NO: 3729503 - RNA, 20 nt, Human
uaguuauguaaauaauucuu

SEQ ID NO: 3729504 - RNA, 17 nt, Human
uaguuauucacaaaaau

SEQ ID NO: 3729505 - RNA, 15 nt, Human
uaguucaagaaauga

SEQ ID NO: 3729506 - RNA, 20 nt, Human
uaguucaagaaaugaagagc

SEQ ID NO: 3729507 - RNA, 20 nt, Human
uaguucaucccuucucuucc

SEQ ID NO: 3729508 - RNA, 17 nt, Human
uaguucaugucugcuau

SEQ ID NO: 3729509 - RNA, 23 nt, Human
uaguuccccuguuuauucauaug

SEQ ID NO: 3729510 - RNA, 14 nt, Human
uaguuccuaagaag

SEQ ID NO: 3729511 - RNA, 15 nt, Human
uaguucguagcuuuc

SEQ ID NO: 3729512 - RNA, 13 nt, Human
uaguucuaagacu

SEQ ID NO: 3729513 - RNA, 14 nt, Human
uaguucuagaaaaa

SEQ ID NO: 3729514 - RNA, 11 nt, Human
uaguucuagac

SEQ ID NO: 3729515 - RNA, 15 nt, Human
uaguucuaggcacug

SEQ ID NO: 3729516 - RNA, 16 nt, Human
uaguucuaggcacugu

SEQ ID NO: 3729517 - RNA, 15 nt, Human
uaguucuauuucuau

SEQ ID NO: 3729518 - RNA, 20 nt, Human
uaguucuauuucuaucccaa

SEQ ID NO: 3729519 - RNA, 20 nt, Human
uaguucucacuguucccucu

SEQ ID NO: 3729520 - RNA, 18 nt, Human
uaguucugagcugccagu

SEQ ID NO: 3729521 - RNA, 18 nt, Human
uaguucugcuccagacag

SEQ ID NO: 3729522 - RNA, 14 nt, Human
uaguucuguagaaa

SEQ ID NO: 3729523 - RNA, 11 nt, Human
uaguucuguga

SEQ ID NO: 3729524 - RNA, 17 nt, Human
uaguucuuacugcuuaa

SEQ ID NO: 3729525 - RNA, 12 nt, Human
uaguucuuuaaa

SEQ ID NO: 3729526 - RNA, 15 nt, Human
uaguucuuuggaaau

SEQ ID NO: 3729527 - RNA, 20 nt, Human
uaguugaacugauaguuacu

SEQ ID NO: 3729528 - RNA, 16 nt, Human
uaguugaauacuugaa

SEQ ID NO: 3729529 - RNA, 20 nt, Human
uaguugaauacuugaaccau

SEQ ID NO: 3729530 - RNA, 12 nt, Human
uaguugaauuuu

SEQ ID NO: 3729531 - RNA, 21 nt, Human
uaguugagccagcagacauug

SEQ ID NO: 3729532 - RNA, 22 nt, Human
uaguugagccagcagacauugu

SEQ ID NO: 3729533 - RNA, 19 nt, Human
uaguugcauagcaguauau

SEQ ID NO: 3729534 - RNA, 20 nt, Human
uaguugcauagcaguauaug

SEQ ID NO: 3729535 - RNA, 17 nt, Human
uaguugccuuaaaauaa

SEQ ID NO: 3729536 - RNA, 22 nt, Human
uaguugcguggacucugcacau

SEQ ID NO: 3729537 - RNA, 13 nt, Human
uaguugcuauuuu

SEQ ID NO: 3729538 - RNA, 19 nt, Human
uaguugcuauuuuuguaaa

SEQ ID NO: 3729539 - RNA, 15 nt, Human
uaguugguguucaaa

SEQ ID NO: 3729540 - RNA, 18 nt, Human
uaguuucagauauauauc

SEQ ID NO: 3729541 - RNA, 13 nt, Human
uaguuucuccaag

SEQ ID NO: 3729542 - RNA, 14 nt, Human
uaguuucuccaagc

SEQ ID NO: 3729543 - RNA, 13 nt, Human
uaguuucugaggc

SEQ ID NO: 3729544 - RNA, 15 nt, Human
uaguuucuguucugu

SEQ ID NO: 3729545 - RNA, 17 nt, Human
uaguuucuuuauuuugu

SEQ ID NO: 3729546 - RNA, 14 nt, Human
uaguuucuuuggga

SEQ ID NO: 3729547 - RNA, 19 nt, Human
uaguuugaggaaauuugca

SEQ ID NO: 3729548 - RNA, 16 nt, Human
uaguuugauuaaauuc

SEQ ID NO: 3729549 - RNA, 23 nt, Human
uaguuugauuaaauucuugcaaa

SEQ ID NO: 3729550 - RNA, 21 nt, Human
uaguuugauuauucaguguca

SEQ ID NO: 3729551 - RNA, 12 nt, Human
uaguuugcaguu

SEQ ID NO: 3729552 - RNA, 17 nt, Human
uaguuugcauuccugau

SEQ ID NO: 3729553 - RNA, 17 nt, Human
uaguuugcauuuaagaa

SEQ ID NO: 3729554 - RNA, 21 nt, Human
uaguuugcauuuaagaauugc

SEQ ID NO: 3729555 - RNA, 21 nt, Human
uaguuugcucauacuacauug

SEQ ID NO: 3729556 - RNA, 16 nt, Human
uaguuuggcauuugca

SEQ ID NO: 3729557 - RNA, 18 nt, Human
uaguuuggggcaaaaauc

SEQ ID NO: 3729558 - RNA, 15 nt, Human
uaguuugucuauuuu

SEQ ID NO: 3729559 - RNA, 15 nt, Human
uaguuugugagaaac

SEQ ID NO: 3729560 - RNA, 14 nt, Human
uaguuuuacuuuua

SEQ ID NO: 3729561 - RNA, 19 nt, Human
uaguuuuaucacauguaug

SEQ ID NO: 3729562 - RNA, 21 nt, Human
uaguuuuaucacauguauguu

SEQ ID NO: 3729563 - RNA, 15 nt, Human
uaguuuuauuuauau

SEQ ID NO: 3729564 - RNA, 17 nt, Human
uaguuuuauuuucuaaa

SEQ ID NO: 3729565 - RNA, 23 nt, Human
uaguuuuauuuucuaaaguacug

SEQ ID NO: 3729566 - RNA, 20 nt, Human
uaguuuucuuuccuccuuuc

SEQ ID NO: 3729567 - RNA, 22 nt, Human
uaguuuugauuuaauguuuuca

SEQ ID NO: 3729568 - RNA, 20 nt, Human
uaguuuuuacagcuguguua

SEQ ID NO: 3729569 - RNA, 18 nt, Human
uaguuuuuaccuaccaca

SEQ ID NO: 3729570 - RNA, 21 nt, Human
uaguuuuuguucuuaauugca

SEQ ID NO: 3729571 - RNA, 17 nt, Human
uaguuuuuucuuuuaac

SEQ ID NO: 3729572 - RNA, 23 nt, Human
uaguuuuuuuuuuuuuuauguga

SEQ ID NO: 3729573 - RNA, 17 nt, Human
uauaaaaaaaaugaaau

SEQ ID NO: 3729574 - RNA, 23 nt, Human
uauaaaaaaaaugaaauguuuua

SEQ ID NO: 3729575 - RNA, 13 nt, Human
uauaaaaaauaug

SEQ ID NO: 3729576 - RNA, 14 nt, Human
uauaaaaaauaugu

SEQ ID NO: 3729577 - RNA, 17 nt, Human
uauaaaaaauauguauu

SEQ ID NO: 3729578 - RNA, 11 nt, Human
uauaaaaacaa

SEQ ID NO: 3729579 - RNA, 20 nt, Human
uauaaaaauaaaaaacacug

SEQ ID NO: 3729580 - RNA, 19 nt, Human
uauaaaaauaaaaaagauc

SEQ ID NO: 3729581 - RNA, 23 nt, Human
uauaaaacagcccuauuucuuga

SEQ ID NO: 3729582 - RNA, 18 nt, Human
gccaugccaggaaccugu

SEQ ID NO: 3729583 - RNA, 18 nt, Human
gccaugccgucugccgga

SEQ ID NO: 3729584 - RNA, 13 nt, Human
gccaugccucagc

SEQ ID NO: 3729585 - RNA, 15 nt, Human
gccaugcugaaggga

SEQ ID NO: 3729586 - RNA, 18 nt, Human
gccauggacucuguccug

SEQ ID NO: 3729587 - RNA, 20 nt, Human
gccauggacucuguccugaa

SEQ ID NO: 3729588 - RNA, 21 nt, Human
gccauggacucuguccugaag

SEQ ID NO: 3729589 - RNA, 14 nt, Human
gccauggagaaagc

SEQ ID NO: 3729590 - RNA, 15 nt, Human
gccauggagaaagcu

SEQ ID NO: 3729591 - RNA, 23 nt, Human
gccauggagagcuggagccuggu

SEQ ID NO: 3729592 - RNA, 15 nt, Human
gccauggaggcacac

SEQ ID NO: 3729593 - RNA, 21 nt, Human
gccauggaggcacacagcugc

SEQ ID NO: 3729594 - RNA, 13 nt, Human
gccauggaggcag

SEQ ID NO: 3729595 - RNA, 16 nt, Human
gccaugggccuccugu

SEQ ID NO: 3729596 - RNA, 16 nt, Human
gccaugguacccccuu

SEQ ID NO: 3729597 - RNA, 17 nt, Human
gccaugguacccccuuc

SEQ ID NO: 3729598 - RNA, 21 nt, Human
gccauguaaauccccacuggg

SEQ ID NO: 3729599 - RNA, 17 nt, Human
gccauguacagacagag

SEQ ID NO: 3729600 - RNA, 17 nt, Human
gccauguacuaguuuua

SEQ ID NO: 3729601 - RNA, 15 nt, Human
gccauguagaagcug

SEQ ID NO: 3729602 - RNA, 17 nt, Human
gccauguauaaauguga

SEQ ID NO: 3729603 - RNA, 19 nt, Human
gccauguauaaaugugaua

SEQ ID NO: 3729604 - RNA, 15 nt, Human
gccaugucagacaca

SEQ ID NO: 3729605 - RNA, 23 nt, Human
gccaugugacucuggcuuggccu

SEQ ID NO: 3729606 - RNA, 19 nt, Human
gccaugugcauaguuucuu

SEQ ID NO: 3729607 - RNA, 14 nt, Human
gccaugugccaggu

SEQ ID NO: 3729608 - RNA, 16 nt, Human
gccaugugcuucugcc

SEQ ID NO: 3729609 - RNA, 17 nt, Human
gccauguguuuauccua

SEQ ID NO: 3729610 - RNA, 19 nt, Human
gccauguuccaauaaacag

SEQ ID NO: 3729611 - RNA, 20 nt, Human
gccauguuccaauaaacagg

SEQ ID NO: 3729612 - RNA, 15 nt, Human
gccauguugccccuu

SEQ ID NO: 3729613 - RNA, 15 nt, Human
gccauguuggccagg

SEQ ID NO: 3729614 - RNA, 18 nt, Human
gccauguuggccaggcug

SEQ ID NO: 3729615 - RNA, 19 nt, Human
gccauguugugccucccug

SEQ ID NO: 3729616 - RNA, 20 nt, Human
gccauguugugccucccugg

SEQ ID NO: 3729617 - RNA, 22 nt, Human
gccauguugugccucccuggug

SEQ ID NO: 3729618 - RNA, 23 nt, Human
gccauguugugccucccugguga

SEQ ID NO: 3729619 - RNA, 15 nt, Human
gccauuaaaugaaua

SEQ ID NO: 3729620 - RNA, 14 nt, Human
gccauuaacaaaug

SEQ ID NO: 3729621 - RNA, 19 nt, Human
gccauuacccagcuaaaua

SEQ ID NO: 3729622 - RNA, 20 nt, Human
gccauuauuuucugucagau

SEQ ID NO: 3729623 - RNA, 19 nt, Human
gccauucauguaugucaga

SEQ ID NO: 3729624 - RNA, 20 nt, Human
gccauuccugguacccagcc

SEQ ID NO: 3729625 - RNA, 22 nt, Human
gccauuccugguacccagccau

SEQ ID NO: 3729626 - RNA, 15 nt, Human
gccauucugauuauu

SEQ ID NO: 3729627 - RNA, 22 nt, Human
gccauucugccgcccccuccug

SEQ ID NO: 3729628 - RNA, 21 nt, Human
gccauugcacccagcccagau

SEQ ID NO: 3729629 - RNA, 12 nt, Human
gccauuggaguc

SEQ ID NO: 3729630 - RNA, 22 nt, Human
gccauugucuucggaaaccuug

SEQ ID NO: 3729631 - RNA, 17 nt, Human
gccauugugaaccaaug

SEQ ID NO: 3729632 - RNA, 13 nt, Human
gccauuuauuuau

SEQ ID NO: 3729633 - RNA, 16 nt, Human
gccauuuauuuauuga

SEQ ID NO: 3729634 - RNA, 11 nt, Human
gccauuucaug

SEQ ID NO: 3729635 - RNA, 17 nt, Human
gccauuucuuccacaag

SEQ ID NO: 3729636 - RNA, 20 nt, Human
gccauuucuuccacaagagc

SEQ ID NO: 3729637 - RNA, 11 nt, Human
gccauuugaga

SEQ ID NO: 3729638 - RNA, 13 nt, Human
gccauuugauacc

SEQ ID NO: 3729639 - RNA, 14 nt, Human
gccauuuguacuga

SEQ ID NO: 3729640 - RNA, 16 nt, Human
gccauuugucccaagu

SEQ ID NO: 3729641 - RNA, 20 nt, Human
gccauuugucccaagugcca

SEQ ID NO: 3729642 - RNA, 22 nt, Human
gccauuuuaaggaaaacuaccu

SEQ ID NO: 3729643 - RNA, 20 nt, Human
gccauuuugcauuuucaucu

SEQ ID NO: 3729644 - RNA, 14 nt, Human
gccauuuugugaau

SEQ ID NO: 3729645 - RNA, 18 nt, Human
gccauuuugugaauggau

SEQ ID NO: 3729646 - RNA, 14 nt, Human
gccauuuuuacugu

SEQ ID NO: 3729647 - RNA, 18 nt, Human
gccauuuuucaaagcaau

SEQ ID NO: 3729648 - RNA, 19 nt, Human
gccauuuuucaaagcaauu

SEQ ID NO: 3729649 - RNA, 21 nt, Human
gcccaaaauuuauuuuauaag

SEQ ID NO: 3729650 - RNA, 16 nt, Human
gcccaaagccagacag

SEQ ID NO: 3729651 - RNA, 16 nt, Human
gcccaaaggacgcacu

SEQ ID NO: 3729652 - RNA, 19 nt, Human
gcccaaaggacgcacugag

SEQ ID NO: 3729653 - RNA, 20 nt, Human
gcccaaaggggacaggccuc

SEQ ID NO: 3729654 - RNA, 21 nt, Human
gcccaaaggggacaggccuca

SEQ ID NO: 3729655 - RNA, 20 nt, Human
gcccaaauuaucaagcuaau

SEQ ID NO: 3729656 - RNA, 14 nt, Human
gcccaacaccagcc

SEQ ID NO: 3729657 - RNA, 17 nt, Human
gcccaacaccagccccu

SEQ ID NO: 3729658 - RNA, 16 nt, Human
gcccaacccugucugu

SEQ ID NO: 3729659 - RNA, 15 nt, Human
gcccaacccuucccc

SEQ ID NO: 3729660 - RNA, 16 nt, Human
gcccaacccuucccca

SEQ ID NO: 3729661 - RNA, 13 nt, Human
gcccaaccucagc

SEQ ID NO: 3729662 - RNA, 23 nt, Human
gcccaaccucuuccuccugacac

SEQ ID NO: 3729663 - RNA, 17 nt, Human
gcccaacuguguagcau

SEQ ID NO: 3729664 - RNA, 20 nt, Human
gcccaagacagaugccccag

SEQ ID NO: 3729665 - RNA, 13 nt, Human
gcccaagaugcuu

SEQ ID NO: 3729666 - RNA, 15 nt, Human
gcccaagcccaggcc

SEQ ID NO: 3729667 - RNA, 17 nt, Human
gcccaagcccaggccac

SEQ ID NO: 3729668 - RNA, 17 nt, Human
gcccaaggcggccccuc

SEQ ID NO: 3729669 - RNA, 14 nt, Human
gcccaaggcucccg

SEQ ID NO: 3729670 - RNA, 15 nt, Human
gcccaaggcucccgg

SEQ ID NO: 3729671 - RNA, 15 nt, Human
gcccaagucccuguu

SEQ ID NO: 3729672 - RNA, 17 nt, Human
gcccaagucccuguuuu

SEQ ID NO: 3729673 - RNA, 20 nt, Human
gcccaaguggcagagcuugg

SEQ ID NO: 3729674 - RNA, 18 nt, Human
gcccaauauuauaauuuu

SEQ ID NO: 3729675 - RNA, 14 nt, Human
gcccaaugaaauga

SEQ ID NO: 3729676 - RNA, 20 nt, Human
gcccaaugagacucuagggu

SEQ ID NO: 3729677 - RNA, 21 nt, Human
gcccaaugcacuuuguucugg

SEQ ID NO: 3729678 - RNA, 14 nt, Human
gcccacacacaggu

SEQ ID NO: 3729679 - RNA, 23 nt, Human
gcccacacccagcuacuuuaaca

SEQ ID NO: 3729680 - RNA, 13 nt, Human
gcccacaccuccu

SEQ ID NO: 3729681 - RNA, 14 nt, Human
gcccacaccuccug

SEQ ID NO: 3729682 - RNA, 17 nt, Human
gcccacagcccgcaugc

SEQ ID NO: 3729683 - RNA, 24 nt, Human
gcccacaggaggcaagcaagcucu

SEQ ID NO: 3729684 - RNA, 12 nt, Human
gcccacagggaa

SEQ ID NO: 3729685 - RNA, 22 nt, Human
gcccacagguguccccagccca

SEQ ID NO: 3729686 - RNA, 15 nt, Human
gcccacaguauauuu

SEQ ID NO: 3729687 - RNA, 12 nt, Human
gcccacagucug

SEQ ID NO: 3729688 - RNA, 19 nt, Human
gcccacagucugacuuccc

SEQ ID NO: 3729689 - RNA, 14 nt, Human
gcccacaucccagg

SEQ ID NO: 3729690 - RNA, 23 nt, Human
gcccacauguguccaucccagcg

SEQ ID NO: 3729691 - RNA, 15 nt, Human
gcccacauuggaaga

SEQ ID NO: 3729692 - RNA, 15 nt, Human
gcccacauuuagucu

SEQ ID NO: 3729693 - RNA, 21 nt, Human
gcccacauuuagucucuuuau

SEQ ID NO: 3729694 - RNA, 13 nt, Human
gcccaccagagcu

SEQ ID NO: 3729695 - RNA, 21 nt, Human
gcccaccauuuggcaucccug

SEQ ID NO: 3729696 - RNA, 19 nt, Human
gcccacccaagcaggaggc

SEQ ID NO: 3729697 - RNA, 22 nt, Human
gcccaccccacccacuucugca

SEQ ID NO: 3729698 - RNA, 15 nt, Human
gcccaccccccucau

SEQ ID NO: 3729699 - RNA, 15 nt, Human
gcccacccccucaag

SEQ ID NO: 3729700 - RNA, 15 nt, Human
gcccacccccugccc

SEQ ID NO: 3729701 - RNA, 18 nt, Human
gcccacccccugcccugc

SEQ ID NO: 3729702 - RNA, 19 nt, Human
gcccacccguggagauggg

SEQ ID NO: 3729703 - RNA, 18 nt, Human
gcccacccuccugucuuc

SEQ ID NO: 3729704 - RNA, 12 nt, Human
gcccacccugcu

SEQ ID NO: 3729705 - RNA, 18 nt, Human
gcccacccugcugccuuc

SEQ ID NO: 3729706 - RNA, 21 nt, Human
gcccacccugcugcuggugca

SEQ ID NO: 3729707 - RNA, 17 nt, Human
gcccaccgcaugccccc

SEQ ID NO: 3729708 - RNA, 18 nt, Human
gcccaccgcaugcccccu

SEQ ID NO: 3729709 - RNA, 21 nt, Human
gcccaccuaccuucaaagcug

SEQ ID NO: 3729710 - RNA, 22 nt, Human
gcccaccuaccuucaaagcuga

SEQ ID NO: 3729711 - RNA, 10 nt, Human
gcccaccucc

SEQ ID NO: 3729712 - RNA, 12 nt, Human
gcccaccucccc

SEQ ID NO: 3729713 - RNA, 17 nt, Human
gcccaccuccccacgcc

SEQ ID NO: 3729714 - RNA, 14 nt, Human
gcccaccugcccau

SEQ ID NO: 3729715 - RNA, 15 nt, Human
gcccaccugcccauc

SEQ ID NO: 3729716 - RNA, 17 nt, Human
gcccaccugccuggccg

SEQ ID NO: 3729717 - RNA, 13 nt, Human
gcccaccuggcca

SEQ ID NO: 3729718 - RNA, 20 nt, Human
gcccaccuggccaccugagg

SEQ ID NO: 3729719 - RNA, 16 nt, Human
gcccaccuggccucug

SEQ ID NO: 3729720 - RNA, 17 nt, Human
gcccaccuuggcucaag

SEQ ID NO: 3729721 - RNA, 13 nt, Human
gcccacgccccca

SEQ ID NO: 3729722 - RNA, 21 nt, Human
gcccacgcccccacuggugac

SEQ ID NO: 3729723 - RNA, 17 nt, Human
gcccacgcuggagugca

SEQ ID NO: 3729724 - RNA, 19 nt, Human
gcccacgcuggagugcagu

SEQ ID NO: 3729725 - RNA, 23 nt, Human
gcccacggcuaagaggcugcuga

SEQ ID NO: 3729726 - RNA, 14 nt, Human
gcccacguccuguc

SEQ ID NO: 3729727 - RNA, 23 nt, Human
gcccacguucucucugccuguga

SEQ ID NO: 3729728 - RNA, 17 nt, Human
gcccacuagacccacug

SEQ ID NO: 3729729 - RNA, 23 nt, Human
gcccacuagacccacuggacuca

SEQ ID NO: 3729730 - RNA, 16 nt, Human
gcccacucagggguca

SEQ ID NO: 3729731 - RNA, 15 nt, Human
gcccacuccaucugg

SEQ ID NO: 3729732 - RNA, 16 nt, Human
uacuucaugcugucua

SEQ ID NO: 3729733 - RNA, 22 nt, Human
uacuuccaccucgggcacauuu

SEQ ID NO: 3729734 - RNA, 14 nt, Human
uacuuccccuuccu

SEQ ID NO: 3729735 - RNA, 14 nt, Human
uacuuccuccuccc

SEQ ID NO: 3729736 - RNA, 15 nt, Human
uacuuccugaguggc

SEQ ID NO: 3729737 - RNA, 12 nt, Human
uacuuccugccu

SEQ ID NO: 3729738 - RNA, 23 nt, Human
uacuuccugugacuucagcucug

SEQ ID NO: 3729739 - RNA, 18 nt, Human
uacuucgucuucuaauuu

SEQ ID NO: 3729740 - RNA, 13 nt, Human
uacuucuccaccc

SEQ ID NO: 3729741 - RNA, 18 nt, Human
uacuucuccacccugcuc

SEQ ID NO: 3729742 - RNA, 14 nt, Human
uacuucucuauaaa

SEQ ID NO: 3729743 - RNA, 13 nt, Human
uacuucugaggua

SEQ ID NO: 3729744 - RNA, 16 nt, Human
uacuucuguaauugug

SEQ ID NO: 3729745 - RNA, 22 nt, Human
uacuucuguaauuguguggauu

SEQ ID NO: 3729746 - RNA, 12 nt, Human
uacuucuucugu

SEQ ID NO: 3729747 - RNA, 20 nt, Human
uacuucuugaauauaaaaaa

SEQ ID NO: 3729748 - RNA, 21 nt, Human
uacuucuugaauauaaaaaau

SEQ ID NO: 3729749 - RNA, 19 nt, Human
uacuucuuguguguaugca

SEQ ID NO: 3729750 - RNA, 20 nt, Human
uacuucuuuuuucaaaagaa

SEQ ID NO: 3729751 - RNA, 22 nt, Human
uacuucuuuuuucaaaagaaag

SEQ ID NO: 3729752 - RNA, 14 nt, Human
uacuugaacaaaag

SEQ ID NO: 3729753 - RNA, 19 nt, Human
uacuugaaccauaaaaugu

SEQ ID NO: 3729754 - RNA, 20 nt, Human
uacuugaaccauaaaauguc

SEQ ID NO: 3729755 - RNA, 20 nt, Human
uacuugaacguuuucuaauu

SEQ ID NO: 3729756 - RNA, 21 nt, Human
uacuugaacguuuucuaauug

SEQ ID NO: 3729757 - RNA, 23 nt, Human
uacuugaagucuaaaagcagaaa

SEQ ID NO: 3729758 - RNA, 18 nt, Human
uacuugaauaaccaucug

SEQ ID NO: 3729759 - RNA, 21 nt, Human
uacuugauaacaauguuuuaa

SEQ ID NO: 3729760 - RNA, 14 nt, Human
uacuugcacucuuc

SEQ ID NO: 3729761 - RNA, 22 nt, Human
uacuugcagcucccauucuaug

SEQ ID NO: 3729762 - RNA, 16 nt, Human
uacuugcccugaccau

SEQ ID NO: 3729763 - RNA, 22 nt, Human
uacuugcccugaccaugcauuu

SEQ ID NO: 3729764 - RNA, 16 nt, Human
uacuugcucuggaccu

SEQ ID NO: 3729765 - RNA, 20 nt, Human
uacuugcucuggaccugccc

SEQ ID NO: 3729766 - RNA, 14 nt, Human
uacuugcucuugau

SEQ ID NO: 3729767 - RNA, 23 nt, Human
uacuugggagaccuguaaucaua

SEQ ID NO: 3729768 - RNA, 12 nt, Human
uacuugggaggc

SEQ ID NO: 3729769 - RNA, 18 nt, Human
uacuugggaggcugaggc

SEQ ID NO: 3729770 - RNA, 19 nt, Human
uacuugggccauagcuccu

SEQ ID NO: 3729771 - RNA, 17 nt, Human
uacuuggucacagccag

SEQ ID NO: 3729772 - RNA, 13 nt, Human
uacuuguaaauau

SEQ ID NO: 3729773 - RNA, 14 nt, Human
uacuuguaaauaua

SEQ ID NO: 3729774 - RNA, 15 nt, Human
uacuuguaaauauaa

SEQ ID NO: 3729775 - RNA, 12 nt, Human
uacuuguaauua

SEQ ID NO: 3729776 - RNA, 20 nt, Human
uacuugucaauauuuaaaca

SEQ ID NO: 3729777 - RNA, 14 nt, Human
uacuugucuguuuu

SEQ ID NO: 3729778 - RNA, 18 nt, Human
uacuugugaaacacagcu

SEQ ID NO: 3729779 - RNA, 15 nt, Human
uacuuguggacacag

SEQ ID NO: 3729780 - RNA, 22 nt, Human
uacuuguucaaaauauguucuu

SEQ ID NO: 3729781 - RNA, 14 nt, Human
uacuuguugccuau

SEQ ID NO: 3729782 - RNA, 17 nt, Human
uacuuguugccuauaag

SEQ ID NO: 3729783 - RNA, 13 nt, Human
uacuuguuuugga

SEQ ID NO: 3729784 - RNA, 15 nt, Human
uacuuguuuuuguaa

SEQ ID NO: 3729785 - RNA, 16 nt, Human
uacuuguuuuuguaaa

SEQ ID NO: 3729786 - RNA, 14 nt, Human
uacuuuaaacuugu

SEQ ID NO: 3729787 - RNA, 17 nt, Human
uacuuuaaacuugucuu

SEQ ID NO: 3729788 - RNA, 14 nt, Human
uacuuuaaaggaaa

SEQ ID NO: 3729789 - RNA, 16 nt, Human
uacuuuaaauaauuua

SEQ ID NO: 3729790 - RNA, 14 nt, Human
uacuuuaacaugcc

SEQ ID NO: 3729791 - RNA, 18 nt, Human
uacuuuacacaauucuua

SEQ ID NO: 3729792 - RNA, 15 nt, Human
uacuuuaguaugacg

SEQ ID NO: 3729793 - RNA, 19 nt, Human
uacuuuauaacuaacaugu

SEQ ID NO: 3729794 - RNA, 13 nt, Human
uacuuuauagaag

SEQ ID NO: 3729795 - RNA, 14 nt, Human
uacuuuauagaaga

SEQ ID NO: 3729796 - RNA, 17 nt, Human
uacuuuauguuacuaca

SEQ ID NO: 3729797 - RNA, 20 nt, Human
uacuuucauccugacucugc

SEQ ID NO: 3729798 - RNA, 15 nt, Human
uacuuuccaauucuc

SEQ ID NO: 3729799 - RNA, 19 nt, Human
uacuuucccuacccucuag

SEQ ID NO: 3729800 - RNA, 19 nt, Human
uacuuuccuuuccccagcc

SEQ ID NO: 3729801 - RNA, 17 nt, Human
uacuuucuucagguaaa

SEQ ID NO: 3729802 - RNA, 14 nt, Human
uacuuugaagucau

SEQ ID NO: 3729803 - RNA, 14 nt, Human
uacuuugaaugugu

SEQ ID NO: 3729804 - RNA, 20 nt, Human
uacuuugaauguguuucaca

SEQ ID NO: 3729805 - RNA, 15 nt, Human
uacuuugacaguguu

SEQ ID NO: 3729806 - RNA, 20 nt, Human
uacuuugacaguguuuuuag

SEQ ID NO: 3729807 - RNA, 14 nt, Human
uacuuugacuuuuu

SEQ ID NO: 3729808 - RNA, 23 nt, Human
uacuuugauauuuucaacgcagc

SEQ ID NO: 3729809 - RNA, 15 nt, Human
uacuuugauucacau

SEQ ID NO: 3729810 - RNA, 20 nt, Human
uacuuugauucacauguuuu

SEQ ID NO: 3729811 - RNA, 17 nt, Human
uacuuugccuuuugcaa

SEQ ID NO: 3729812 - RNA, 20 nt, Human
uacuuuggaauacauuucuc

SEQ ID NO: 3729813 - RNA, 18 nt, Human
uacuuugguuucugucug

SEQ ID NO: 3729814 - RNA, 13 nt, Human
uacuuuguaaaua

SEQ ID NO: 3729815 - RNA, 14 nt, Human
uacuuuguaaauuc

SEQ ID NO: 3729816 - RNA, 20 nt, Human
uacuuuguaugauauuccau

SEQ ID NO: 3729817 - RNA, 22 nt, Human
uacuuuguaugauauuccauag

SEQ ID NO: 3729818 - RNA, 16 nt, Human
uacuuuguauuguccu

SEQ ID NO: 3729819 - RNA, 16 nt, Human
uacuuuguauuuugau

SEQ ID NO: 3729820 - RNA, 21 nt, Human
uacuuuguauuuugauuauuu

SEQ ID NO: 3729821 - RNA, 11 nt, Human
uacuuugucag

SEQ ID NO: 3729822 - RNA, 14 nt, Human
uacuuugucugaaa

SEQ ID NO: 3729823 - RNA, 15 nt, Human
uacuuugugcauucu

SEQ ID NO: 3729824 - RNA, 22 nt, Human
uacuuugugcugggguuaucug

SEQ ID NO: 3729825 - RNA, 14 nt, Human
uacuuuguucugcu

SEQ ID NO: 3729826 - RNA, 22 nt, Human
uacuuuguucugcuguucucua

SEQ ID NO: 3729827 - RNA, 19 nt, Human
uacuuuguuuuuaaaugau

SEQ ID NO: 3729828 - RNA, 15 nt, Human
uacuuuuaaagaauu

SEQ ID NO: 3729829 - RNA, 20 nt, Human
uacuuuuacaaguaacaaaa

SEQ ID NO: 3729830 - RNA, 19 nt, Human
uacuuuuaugauguauauu

SEQ ID NO: 3729831 - RNA, 22 nt, Human
uacuuuucuucuauugccucug

SEQ ID NO: 3729832 - RNA, 16 nt, Human
uacuuuugagugugug

SEQ ID NO: 3729833 - RNA, 18 nt, Human
uacuuuuggaaucuagaa

SEQ ID NO: 3729834 - RNA, 10 nt, Human
uacuuuuugg

SEQ ID NO: 3729835 - RNA, 19 nt, Human
uacuuuuuggcauaacaua

SEQ ID NO: 3729836 - RNA, 13 nt, Human
uacuuuuuguuau

SEQ ID NO: 3729837 - RNA, 18 nt, Human
uacuuuuuuaaauauuuu

SEQ ID NO: 3729838 - RNA, 15 nt, Human
uagaaaaauaaaaau

SEQ ID NO: 3729839 - RNA, 12 nt, Human
uagaaaaaugga

SEQ ID NO: 3729840 - RNA, 15 nt, Human
uagaaaacaaugcaa

SEQ ID NO: 3729841 - RNA, 15 nt, Human
uagaaaacaggaaaa

SEQ ID NO: 3729842 - RNA, 17 nt, Human
uagaaaacaggaaaaaa

SEQ ID NO: 3729843 - RNA, 19 nt, Human
uagaaaacauuuggcagaa

SEQ ID NO: 3729844 - RNA, 17 nt, Human
uagaaaaggacuauaag

SEQ ID NO: 3729845 - RNA, 22 nt, Human
uagaaaaggugauaaaaucaua

SEQ ID NO: 3729846 - RNA, 16 nt, Human
uagaaaaguagacaau

SEQ ID NO: 3729847 - RNA, 17 nt, Human
uagaaaagugaauugaa

SEQ ID NO: 3729848 - RNA, 12 nt, Human
uagaaaaguuau

SEQ ID NO: 3729849 - RNA, 21 nt, Human
uagaaaauagagcuuuuaaaa

SEQ ID NO: 3729850 - RNA, 18 nt, Human
uagaaaauauucucuauu

SEQ ID NO: 3729851 - RNA, 12 nt, Human
uagaaaauguga

SEQ ID NO: 3729852 - RNA, 15 nt, Human
uagaaaauucauaac

SEQ ID NO: 3729853 - RNA, 22 nt, Human
uagaaaauuuguuauuuugcaa

SEQ ID NO: 3729854 - RNA, 17 nt, Human
uagaaacaaaauacaau

SEQ ID NO: 3729855 - RNA, 16 nt, Human
uagaaacaacacugua

SEQ ID NO: 3729856 - RNA, 18 nt, Human
uagaaacaacacuguagu

SEQ ID NO: 3729857 - RNA, 20 nt, Human
uagaaacacauaauuaacac

SEQ ID NO: 3729858 - RNA, 17 nt, Human
uagaaacaccaaaaaaa

SEQ ID NO: 3729859 - RNA, 16 nt, Human
uagaaacagugcaaca

SEQ ID NO: 3729860 - RNA, 23 nt, Human
uagaaacaugguuuugaaaugcu

SEQ ID NO: 3729861 - RNA, 15 nt, Human
uagaaaccuuaauau

SEQ ID NO: 3729862 - RNA, 19 nt, Human
uagaaacucaccauguaaa

SEQ ID NO: 3729863 - RNA, 14 nt, Human
uagaaacuggaaau

SEQ ID NO: 3729864 - RNA, 17 nt, Human
uagaaacuggaaauacu

SEQ ID NO: 3729865 - RNA, 23 nt, Human
uagaaacuuaucuuacaaagugu

SEQ ID NO: 3729866 - RNA, 23 nt, Human
uagaaagaauauuugguuuuccu

SEQ ID NO: 3729867 - RNA, 16 nt, Human
uagaaagagaaacagu

SEQ ID NO: 3729868 - RNA, 16 nt, Human
uagaaagcagagauuu

SEQ ID NO: 3729869 - RNA, 15 nt, Human
uagaaagcaggggcu

SEQ ID NO: 3729870 - RNA, 22 nt, Human
uagaaagcaggggcuacaagag

SEQ ID NO: 3729871 - RNA, 15 nt, Human
uagaaagcauuugaa

SEQ ID NO: 3729872 - RNA, 16 nt, Human
uagaaagcauuugaau

SEQ ID NO: 3729873 - RNA, 18 nt, Human
uagaaagcauuugaaugc

SEQ ID NO: 3729874 - RNA, 19 nt, Human
uagaaagcauuugaaugca

SEQ ID NO: 3729875 - RNA, 20 nt, Human
uagaaagugaauaaaaauua

SEQ ID NO: 3729876 - RNA, 18 nt, Human
uagaaagugccagaaagu

SEQ ID NO: 3729877 - RNA, 20 nt, Human
uagaaaguguucuguuacaa

SEQ ID NO: 3729878 - RNA, 20 nt, Human
uagaaauaaaggaugugauu

SEQ ID NO: 3729879 - RNA, 19 nt, Human
uagaaauaaauagcuauau

SEQ ID NO: 3729880 - RNA, 12 nt, Human
uagaaauaagug

SEQ ID NO: 3729881 - RNA, 23 nt, Human
uagaaauaagugguuauuucuca

SEQ ID NO: 3729882 - RNA, 19 nt, Human
uauaaaacugcguuaaagg

SEQ ID NO: 3729883 - RNA, 12 nt, Human
uauaaaacuucu

SEQ ID NO: 3729884 - RNA, 14 nt, Human
uauaaaagacugac

SEQ ID NO: 3729885 - RNA, 12 nt, Human
uauaaaagccug

SEQ ID NO: 3729886 - RNA, 17 nt, Human
uauaaaagccuguuuaa

SEQ ID NO: 3729887 - RNA, 14 nt, Human
uauaaaauaaauau

SEQ ID NO: 3729888 - RNA, 19 nt, Human
uauaaaauaaauauauaua

SEQ ID NO: 3729889 - RNA, 21 nt, Human
uauaaaauaaauauauauaaa

SEQ ID NO: 3729890 - RNA, 15 nt, Human
uauaaaauaacuaaa

SEQ ID NO: 3729891 - RNA, 11 nt, Human
uauaaaauaau

SEQ ID NO: 3729892 - RNA, 23 nt, Human
uauaaaauaauuuuuauauuuga

SEQ ID NO: 3729893 - RNA, 12 nt, Human
uauaaaauacau

SEQ ID NO: 3729894 - RNA, 21 nt, Human
uauaaaauacauagugaaaau

SEQ ID NO: 3729895 - RNA, 18 nt, Human
uauaaaauauaaacaaag

SEQ ID NO: 3729896 - RNA, 21 nt, Human
uauaaaauaugaagacauaaa

SEQ ID NO: 3729897 - RNA, 20 nt, Human
uauaaaaucagccaauuaug

SEQ ID NO: 3729898 - RNA, 21 nt, Human
uauaaaaucagccaauuaugu

SEQ ID NO: 3729899 - RNA, 17 nt, Human
uauaaaauccugugcaa

SEQ ID NO: 3729900 - RNA, 16 nt, Human
uauaaaauggcaacaa

SEQ ID NO: 3729901 - RNA, 12 nt, Human
uauaaaaugugc

SEQ ID NO: 3729902 - RNA, 21 nt, Human
uauaaaaugugcagaugcaau

SEQ ID NO: 3729903 - RNA, 18 nt, Human
uauaaaauuaaagaaaau

SEQ ID NO: 3729904 - RNA, 12 nt, Human
uauaaaauuaug

SEQ ID NO: 3729905 - RNA, 18 nt, Human
uauaaacaaagauucaug

SEQ ID NO: 3729906 - RNA, 14 nt, Human
uauaaacacuauau

SEQ ID NO: 3729907 - RNA, 16 nt, Human
uauaaacauuaaaugu

SEQ ID NO: 3729908 - RNA, 18 nt, Human
uauaaacauuaaaugucu

SEQ ID NO: 3729909 - RNA, 16 nt, Human
uauaaaccuaaaaaag

SEQ ID NO: 3729910 - RNA, 19 nt, Human
uauaaaccuaaaaaagaua

SEQ ID NO: 3729911 - RNA, 19 nt, Human
uauaaaccucuaauuuauu

SEQ ID NO: 3729912 - RNA, 19 nt, Human
uauaaacuaucaguuuguc

SEQ ID NO: 3729913 - RNA, 17 nt, Human
uauaaacuuuaccuuuu

SEQ ID NO: 3729914 - RNA, 13 nt, Human
uauaaacuuuaga

SEQ ID NO: 3729915 - RNA, 17 nt, Human
uauaaagacguuuuaua

SEQ ID NO: 3729916 - RNA, 14 nt, Human
uauaaagagaaaau

SEQ ID NO: 3729917 - RNA, 22 nt, Human
uauaaagagaaaauugaauuua

SEQ ID NO: 3729918 - RNA, 17 nt, Human
uauaaagagaagacgaa

SEQ ID NO: 3729919 - RNA, 15 nt, Human
uauaaagcaucuaaa

SEQ ID NO: 3729920 - RNA, 21 nt, Human
uauaaagccuguauucucaaa

SEQ ID NO: 3729921 - RNA, 16 nt, Human
uauaaagcuagaugcu

SEQ ID NO: 3729922 - RNA, 15 nt, Human
uauaaaguaaagcua

SEQ ID NO: 3729923 - RNA, 16 nt, Human
uauaaaguaaagcuaa

SEQ ID NO: 3729924 - RNA, 18 nt, Human
uauaaaguaguccuguga

SEQ ID NO: 3729925 - RNA, 18 nt, Human
uauaaaguauagagagaa

SEQ ID NO: 3729926 - RNA, 19 nt, Human
uauaaaguauagagagaag

SEQ ID NO: 3729927 - RNA, 19 nt, Human
uauaaagugcuuguguaau

SEQ ID NO: 3729928 - RNA, 19 nt, Human
uauaaaguggaaguaugua

SEQ ID NO: 3729929 - RNA, 17 nt, Human
uauaaaguuuuauauau

SEQ ID NO: 3729930 - RNA, 22 nt, Human
uauaaaguuuuauauauuauau

SEQ ID NO: 3729931 - RNA, 18 nt, Human
uauaaauaaauauauaua

SEQ ID NO: 3729932 - RNA, 20 nt, Human
uauaaauagaauguaaaugu

SEQ ID NO: 3729933 - RNA, 17 nt, Human
uauaaauaggagaggau

SEQ ID NO: 3729934 - RNA, 17 nt, Human
uauaaauauaagccuuu

SEQ ID NO: 3729935 - RNA, 19 nt, Human
uauaaauauauauaaagaa

SEQ ID NO: 3729936 - RNA, 15 nt, Human
uauaaauauauuauu

SEQ ID NO: 3729937 - RNA, 10 nt, Human
uauaaauaug

SEQ ID NO: 3729938 - RNA, 17 nt, Human
uauaaaugggaacauuu

SEQ ID NO: 3729939 - RNA, 16 nt, Human
uauaaauguauauaca

SEQ ID NO: 3729940 - RNA, 20 nt, Human
uauaaauguauauacacaua

SEQ ID NO: 3729941 - RNA, 15 nt, Human
uauaaaugugauaug

SEQ ID NO: 3729942 - RNA, 19 nt, Human
uauaaauuaaauauaugua

SEQ ID NO: 3729943 - RNA, 22 nt, Human
uauaaauuaaauauauguaugu

SEQ ID NO: 3729944 - RNA, 12 nt, Human
uauaaauucugu

SEQ ID NO: 3729945 - RNA, 23 nt, Human
uauaaauugucuuuaaaaacugu

SEQ ID NO: 3729946 - RNA, 20 nt, Human
uauaaauuucgcuucuuaga

SEQ ID NO: 3729947 - RNA, 18 nt, Human
uauaacaaugcuguauuu

SEQ ID NO: 3729948 - RNA, 13 nt, Human
uauaacacauuuu

SEQ ID NO: 3729949 - RNA, 23 nt, Human
uauaacacauuuuuuugcaugca

SEQ ID NO: 3729950 - RNA, 21 nt, Human
uauaacagguuauuuuaguuu

SEQ ID NO: 3729951 - RNA, 15 nt, Human
uauaacaugaaauga

SEQ ID NO: 3729952 - RNA, 19 nt, Human
uauaaccaacuuuucuauu

SEQ ID NO: 3729953 - RNA, 15 nt, Human
uauaaccaauguuua

SEQ ID NO: 3729954 - RNA, 17 nt, Human
uauaaccaauguuuaaa

SEQ ID NO: 3729955 - RNA, 15 nt, Human
uauaaccauaugaua

SEQ ID NO: 3729956 - RNA, 15 nt, Human
uauaaccuuaauuua

SEQ ID NO: 3729957 - RNA, 22 nt, Human
uauauggcagaguuguaaauau

SEQ ID NO: 3729958 - RNA, 20 nt, Human
uauauggggaugguaguuuu

SEQ ID NO: 3729959 - RNA, 19 nt, Human
uauauguacuugucaaaga

SEQ ID NO: 3729960 - RNA, 15 nt, Human
uauauguauccagua

SEQ ID NO: 3729961 - RNA, 19 nt, Human
uauauguauguguuuagaa

SEQ ID NO: 3729962 - RNA, 16 nt, Human
uauauguauuauuuau

SEQ ID NO: 3729963 - RNA, 14 nt, Human
uauauguguauaua

SEQ ID NO: 3729964 - RNA, 13 nt, Human
uauauguguccau

SEQ ID NO: 3729965 - RNA, 12 nt, Human
uauauguuuuaa

SEQ ID NO: 3729966 - RNA, 18 nt, Human
uauauuaaaaaagagaca

SEQ ID NO: 3729967 - RNA, 13 nt, Human
uauauuaaaaaug

SEQ ID NO: 3729968 - RNA, 15 nt, Human
uauauuaaaaauggu

SEQ ID NO: 3729969 - RNA, 22 nt, Human
uauauuaaaaaugguaaaauug

SEQ ID NO: 3729970 - RNA, 13 nt, Human
uauauuaaaauuc

SEQ ID NO: 3729971 - RNA, 21 nt, Human
uauauuaaaauuccaaauuca

SEQ ID NO: 3729972 - RNA, 15 nt, Human
uauauuaagcagaaa

SEQ ID NO: 3729973 - RNA, 15 nt, Human
uauauuaauaguaau

SEQ ID NO: 3729974 - RNA, 22 nt, Human
uauauuaauaguaauuuguaaa

SEQ ID NO: 3729975 - RNA, 17 nt, Human
uauauuaauguacuugu

SEQ ID NO: 3729976 - RNA, 17 nt, Human
uauauuacacauuugua

SEQ ID NO: 3729977 - RNA, 17 nt, Human
uauauuacagauauuug

SEQ ID NO: 3729978 - RNA, 21 nt, Human
uauauuaccagcaagaauaaa

SEQ ID NO: 3729979 - RNA, 14 nt, Human
uauauuaguugcuu

SEQ ID NO: 3729980 - RNA, 18 nt, Human
uauauuauacuuguaauu

SEQ ID NO: 3729981 - RNA, 20 nt, Human
uauauuaucaugcaaaugcu

SEQ ID NO: 3729982 - RNA, 13 nt, Human
uauauuaucuuuu

SEQ ID NO: 3729983 - RNA, 21 nt, Human
uauauucaaccauggacuuua

SEQ ID NO: 3729984 - RNA, 14 nt, Human
uauauucauauauu

SEQ ID NO: 3729985 - RNA, 17 nt, Human
uauauucuauuuuacaa

SEQ ID NO: 3729986 - RNA, 17 nt, Human
uauauucucagcagagu

SEQ ID NO: 3729987 - RNA, 14 nt, Human
uauauucucuuugg

SEQ ID NO: 3729988 - RNA, 22 nt, Human
uauauucuggccagacucgaug

SEQ ID NO: 3729989 - RNA, 14 nt, Human
uauauugaaaaaaa

SEQ ID NO: 3729990 - RNA, 18 nt, Human
uauauugaaauuuauuua

SEQ ID NO: 3729991 - RNA, 21 nt, Human
uauauugaacuuuuguacuga

SEQ ID NO: 3729992 - RNA, 19 nt, Human
uauauugagacaaaaauua

SEQ ID NO: 3729993 - RNA, 12 nt, Human
uauauugauaac

SEQ ID NO: 3729994 - RNA, 22 nt, Human
uauauugauaacagcacugacu

SEQ ID NO: 3729995 - RNA, 15 nt, Human
uauauugguuuuaug

SEQ ID NO: 3729996 - RNA, 17 nt, Human
uauauugguuuuaugau

SEQ ID NO: 3729997 - RNA, 23 nt, Human
uauauugguuuuaugaugacgua

SEQ ID NO: 3729998 - RNA, 20 nt, Human
uauauuguaagaaauacugu

SEQ ID NO: 3729999 - RNA, 18 nt, Human
uauauuguguuuguguau

SEQ ID NO: 3730000 - RNA, 14 nt, Human
uauauuuaaaaaua

SEQ ID NO: 3730001 - RNA, 14 nt, Human
uauauuuaaacuca

SEQ ID NO: 3730002 - RNA, 15 nt, Human
uauauuuaacaagau

SEQ ID NO: 3730003 - RNA, 22 nt, Human
uauauuuaaugcauuaaaccug

SEQ ID NO: 3730004 - RNA, 15 nt, Human
uauauuuaauuauua

SEQ ID NO: 3730005 - RNA, 18 nt, Human
uauauuuacaacacuuua

SEQ ID NO: 3730006 - RNA, 20 nt, Human
uauauuuacuaaaauggacu

SEQ ID NO: 3730007 - RNA, 21 nt, Human
uauauuuagauuguuaaaaua

SEQ ID NO: 3730008 - RNA, 22 nt, Human
uauauuuauaacucaucauaaa

SEQ ID NO: 3730009 - RNA, 15 nt, Human
uauauuuauaaggaa

SEQ ID NO: 3730010 - RNA, 15 nt, Human
uauauuuauuacugu

SEQ ID NO: 3730011 - RNA, 12 nt, Human
uauauuuauuga

SEQ ID NO: 3730012 - RNA, 13 nt, Human
uauauuuauugac

SEQ ID NO: 3730013 - RNA, 16 nt, Human
uauauuuauuuaaagc

SEQ ID NO: 3730014 - RNA, 22 nt, Human
uauauuuauuuaaagcauugcu

SEQ ID NO: 3730015 - RNA, 16 nt, Human
uauauuucagauguaa

SEQ ID NO: 3730016 - RNA, 22 nt, Human
uauauuuccuauaccauuuccg

SEQ ID NO: 3730017 - RNA, 18 nt, Human
uauauuuccuuuauguga

SEQ ID NO: 3730018 - RNA, 19 nt, Human
uauauuuccuuuaugugaa

SEQ ID NO: 3730019 - RNA, 17 nt, Human
uauauuugauuuauuaa

SEQ ID NO: 3730020 - RNA, 14 nt, Human
uauauuugcuuuuu

SEQ ID NO: 3730021 - RNA, 22 nt, Human
uauauuugggccugcuccagac

SEQ ID NO: 3730022 - RNA, 17 nt, Human
uauauuuguaaagcuau

SEQ ID NO: 3730023 - RNA, 20 nt, Human
uauauuuguaaauuuaugug

SEQ ID NO: 3730024 - RNA, 12 nt, Human
uauauuuguaca

SEQ ID NO: 3730025 - RNA, 13 nt, Human
uauauuuguacaa

SEQ ID NO: 3730026 - RNA, 13 nt, Human
uauauuuguauua

SEQ ID NO: 3730027 - RNA, 17 nt, Human
uauauuugugcuauagu

SEQ ID NO: 3730028 - RNA, 13 nt, Human
uauauuuuaagaa

SEQ ID NO: 3730029 - RNA, 13 nt, Human
uauauuuuaagac

SEQ ID NO: 3730030 - RNA, 15 nt, Human
uauauuuuaccauac

SEQ ID NO: 3730031 - RNA, 17 nt, Human
uauauuuuauuucaaug

SEQ ID NO: 3730032 - RNA, 18 nt, Human
uauauuuuauuucaaugu

SEQ ID NO: 3730033 - RNA, 18 nt, Human
uauauuuuauuuuuagaa

SEQ ID NO: 3730034 - RNA, 18 nt, Human
uauauuuucaauucaaaa

SEQ ID NO: 3730035 - RNA, 22 nt, Human
uauauuuucaauucaaaaaugu

SEQ ID NO: 3730036 - RNA, 12 nt, Human
uauauuuucgua

SEQ ID NO: 3730037 - RNA, 16 nt, Human
uauauuuuguaugcaa

SEQ ID NO: 3730038 - RNA, 21 nt, Human
uauauuuuguaugcaagcagu

SEQ ID NO: 3730039 - RNA, 18 nt, Human
uauauuuuuaaaaaauga

SEQ ID NO: 3730040 - RNA, 18 nt, Human
uauauuuuuauauuuacu

SEQ ID NO: 3730041 - RNA, 19 nt, Human
uauauuuuuauauuuacua

SEQ ID NO: 3730042 - RNA, 13 nt, Human
uauauuuuuaucu

SEQ ID NO: 3730043 - RNA, 16 nt, Human
uauauuuuuguuuguu

SEQ ID NO: 3730044 - RNA, 19 nt, Human
uauauuuuuuaaaauaagu

SEQ ID NO: 3730045 - RNA, 22 nt, Human
uauauuuuuuaauuugaugaaa

SEQ ID NO: 3730046 - RNA, 19 nt, Human
uauauuuuuuucugaaauu

SEQ ID NO: 3730047 - RNA, 14 nt, Human
uaucaaaagaaaga

SEQ ID NO: 3730048 - RNA, 14 nt, Human
uaucaaaaugcucu

SEQ ID NO: 3730049 - RNA, 23 nt, Human
uaucaaacaccaacauaaaaaug

SEQ ID NO: 3730050 - RNA, 18 nt, Human
uaucaaacccuagccuug

SEQ ID NO: 3730051 - RNA, 22 nt, Human
uaucaaacccuagccuugcuug

SEQ ID NO: 3730052 - RNA, 23 nt, Human
uaucaaacccuagccuugcuugu

SEQ ID NO: 3730053 - RNA, 20 nt, Human
uaucaaacuacuuuuuaaca

SEQ ID NO: 3730054 - RNA, 12 nt, Human
uaucaaagcaua

SEQ ID NO: 3730055 - RNA, 18 nt, Human
uaucaaagggugaaaauu

SEQ ID NO: 3730056 - RNA, 23 nt, Human
uaucaaauacauuuaaaacauua

SEQ ID NO: 3730057 - RNA, 18 nt, Human
uaucaaauauuagaugug

SEQ ID NO: 3730058 - RNA, 15 nt, Human
uaucaaauuaauugu

SEQ ID NO: 3730059 - RNA, 19 nt, Human
uaucaaauuaauuguguga

SEQ ID NO: 3730060 - RNA, 20 nt, Human
uaucaaauuaauugugugaa

SEQ ID NO: 3730061 - RNA, 21 nt, Human
uaucaaauuaauugugugaac

SEQ ID NO: 3730062 - RNA, 21 nt, Human
uaucaacacuguuacuuucgu

SEQ ID NO: 3730063 - RNA, 19 nt, Human
uaucaacuuagucaauaag

SEQ ID NO: 3730064 - RNA, 15 nt, Human
uaucaagacauagca

SEQ ID NO: 3730065 - RNA, 22 nt, Human
uaucaagccuagauguuuuaua

SEQ ID NO: 3730066 - RNA, 13 nt, Human
uaucaagcuaaua

SEQ ID NO: 3730067 - RNA, 21 nt, Human
uaucaaggucguuuuuuucau

SEQ ID NO: 3730068 - RNA, 19 nt, Human
uaucaaguauagaaaaucu

SEQ ID NO: 3730069 - RNA, 21 nt, Human
uaucaaguauuauaccuuuuu

SEQ ID NO: 3730070 - RNA, 13 nt, Human
uaucaauagucaa

SEQ ID NO: 3730071 - RNA, 20 nt, Human
uaucaauagucaagaaaaau

SEQ ID NO: 3730072 - RNA, 22 nt, Human
uagcagaagaaaggaacauuua

SEQ ID NO: 3730073 - RNA, 11 nt, Human
uagcagacagg

SEQ ID NO: 3730074 - RNA, 16 nt, Human
uagcagaguuaaaucu

SEQ ID NO: 3730075 - RNA, 14 nt, Human
uagcagaugguuuc

SEQ ID NO: 3730076 - RNA, 21 nt, Human
uagcagaugguuuccacauuu

SEQ ID NO: 3730077 - RNA, 18 nt, Human
uagcagauuuuaauuuug

SEQ ID NO: 3730078 - RNA, 20 nt, Human
uagcagauuuuaauuuugaa

SEQ ID NO: 3730079 - RNA, 17 nt, Human
uagcagcaaaaauauaa

SEQ ID NO: 3730080 - RNA, 20 nt, Human
uagcagcaccguucugugca

SEQ ID NO: 3730081 - RNA, 14 nt, Human
uagcagcaccuccu

SEQ ID NO: 3730082 - RNA, 17 nt, Human
uagcagcccacccugcu

SEQ ID NO: 3730083 - RNA, 21 nt, Human
uagcagcccacccugcugcug

SEQ ID NO: 3730084 - RNA, 22 nt, Human
uagcagccccgggagggcggca

SEQ ID NO: 3730085 - RNA, 15 nt, Human
uagcagccuggcucc

SEQ ID NO: 3730086 - RNA, 22 nt, Human
uagcagcggaacaaggagucag

SEQ ID NO: 3730087 - RNA, 22 nt, Human
uagcaggacugaauugucccca

SEQ ID NO: 3730088 - RNA, 11 nt, Human
uagcagggaaa

SEQ ID NO: 3730089 - RNA, 20 nt, Human
uagcagggcauggcugggaa

SEQ ID NO: 3730090 - RNA, 23 nt, Human
uagcaguaaaaaaugguguuuua

SEQ ID NO: 3730091 - RNA, 16 nt, Human
uagcaguaaaagauga

SEQ ID NO: 3730092 - RNA, 16 nt, Human
uagcaguggcaggcag

SEQ ID NO: 3730093 - RNA, 18 nt, Human
uagcaguggcaggcagag

SEQ ID NO: 3730094 - RNA, 24 nt, Human
uagcaguggcaggcagaggcccag

SEQ ID NO: 3730095 - RNA, 21 nt, Human
uagcagugugaaguacaauaa

SEQ ID NO: 3730096 - RNA, 20 nt, Human
uagcaguucugcaaauagaa

SEQ ID NO: 3730097 - RNA, 18 nt, Human
uagcauaaacacaucaca

SEQ ID NO: 3730098 - RNA, 17 nt, Human
uagcauacguacacauu

SEQ ID NO: 3730099 - RNA, 18 nt, Human
uagcauacguacacauuu

SEQ ID NO: 3730100 - RNA, 19 nt, Human
uagcauacguacacauuuu

SEQ ID NO: 3730101 - RNA, 14 nt, Human
uagcauacuggcuu

SEQ ID NO: 3730102 - RNA, 19 nt, Human
uagcauaugacaaauguuu

SEQ ID NO: 3730103 - RNA, 15 nt, Human
uagcaucauccugca

SEQ ID NO: 3730104 - RNA, 19 nt, Human
uagcauccuaagaaauaug

SEQ ID NO: 3730105 - RNA, 22 nt, Human
uagcauccuaagaaauauguga

SEQ ID NO: 3730106 - RNA, 13 nt, Human
uagcauccuggaa

SEQ ID NO: 3730107 - RNA, 16 nt, Human
uagcauccuggaauau

SEQ ID NO: 3730108 - RNA, 18 nt, Human
uagcaucugcauugccca

SEQ ID NO: 3730109 - RNA, 14 nt, Human
uagcaucuguacaa

SEQ ID NO: 3730110 - RNA, 15 nt, Human
uagcaugaaauaaaa

SEQ ID NO: 3730111 - RNA, 16 nt, Human
uagcaugaaauaaaau

SEQ ID NO: 3730112 - RNA, 16 nt, Human
uagcaugacauuucuu

SEQ ID NO: 3730113 - RNA, 13 nt, Human
uagcaugccaaca

SEQ ID NO: 3730114 - RNA, 20 nt, Human
uagcaugccaacaagaaugc

SEQ ID NO: 3730115 - RNA, 21 nt, Human
uagcaugccaacaagaaugca

SEQ ID NO: 3730116 - RNA, 17 nt, Human
uagcaugcuuguugcaa

SEQ ID NO: 3730117 - RNA, 17 nt, Human
uagcauggcauauuuuu

SEQ ID NO: 3730118 - RNA, 13 nt, Human
uagcauguauugu

SEQ ID NO: 3730119 - RNA, 19 nt, Human
uagcauguauugugucuuu

SEQ ID NO: 3730120 - RNA, 17 nt, Human
uagcaugucacuaaagc

SEQ ID NO: 3730121 - RNA, 21 nt, Human
uagcaugucgucaaagcugaa

SEQ ID NO: 3730122 - RNA, 13 nt, Human
uagcauguuguag

SEQ ID NO: 3730123 - RNA, 22 nt, Human
uagcauguuuauaucugcaaaa

SEQ ID NO: 3730124 - RNA, 13 nt, Human
uagcauguuugcu

SEQ ID NO: 3730125 - RNA, 16 nt, Human
uagcauguuugcugaa

SEQ ID NO: 3730126 - RNA, 12 nt, Human
uagcauuaacua

SEQ ID NO: 3730127 - RNA, 22 nt, Human
uagcauuacccccaaccucauu

SEQ ID NO: 3730128 - RNA, 22 nt, Human
uagcauuaugcaauuagguuuu

SEQ ID NO: 3730129 - RNA, 17 nt, Human
uagcauucuuuggaguu

SEQ ID NO: 3730130 - RNA, 19 nt, Human
uagcauuguaaaagcauuu

SEQ ID NO: 3730131 - RNA, 22 nt, Human
uagcauugucuauuuuucucuu

SEQ ID NO: 3730132 - RNA, 15 nt, Human
uagcauuucauucuu

SEQ ID NO: 3730133 - RNA, 18 nt, Human
uagcauuucauucuucuc

SEQ ID NO: 3730134 - RNA, 15 nt, Human
uagcauuuggugcuu

SEQ ID NO: 3730135 - RNA, 18 nt, Human
uagcauuuuaaacaaaau

SEQ ID NO: 3730136 - RNA, 23 nt, Human
uagcauuuuaaacaaaauagaaa

SEQ ID NO: 3730137 - RNA, 19 nt, Human
uagcauuuucugcaucucc

SEQ ID NO: 3730138 - RNA, 22 nt, Human
uagcauuuugcuaaaugugaau

SEQ ID NO: 3730139 - RNA, 15 nt, Human
uagcauuuuggcgcu

SEQ ID NO: 3730140 - RNA, 20 nt, Human
uagcauuuuugauuuaugca

SEQ ID NO: 3730141 - RNA, 16 nt, Human
uagccaaacccuuguc

SEQ ID NO: 3730142 - RNA, 14 nt, Human
uagccaaaccucac

SEQ ID NO: 3730143 - RNA, 22 nt, Human
uagccaaaccucaccaacuccu

SEQ ID NO: 3730144 - RNA, 20 nt, Human
uagccaaaugguuuaacuuc

SEQ ID NO: 3730145 - RNA, 22 nt, Human
uagccaaauugaaaaaagaaau

SEQ ID NO: 3730146 - RNA, 21 nt, Human
uagccaacacccaucuguuuu

SEQ ID NO: 3730147 - RNA, 14 nt, Human
uagccaagugcagg

SEQ ID NO: 3730148 - RNA, 15 nt, Human
uagccacaccaggau

SEQ ID NO: 3730149 - RNA, 22 nt, Human
uagccaccaacucuugcagguc

SEQ ID NO: 3730150 - RNA, 13 nt, Human
uagccaccaucuu

SEQ ID NO: 3730151 - RNA, 17 nt, Human
uagccaccugaguuccu

SEQ ID NO: 3730152 - RNA, 20 nt, Human
uagccacuaaccuugccugg

SEQ ID NO: 3730153 - RNA, 16 nt, Human
uagccacuuaccuuca

SEQ ID NO: 3730154 - RNA, 18 nt, Human
uagccacuuaccuucaau

SEQ ID NO: 3730155 - RNA, 17 nt, Human
uagccagaggcucuaau

SEQ ID NO: 3730156 - RNA, 18 nt, Human
uagccagcugucaagggc

SEQ ID NO: 3730157 - RNA, 23 nt, Human
uagccaggaucaugguguaauaa

SEQ ID NO: 3730158 - RNA, 19 nt, Human
uagccaggucccccugcag

SEQ ID NO: 3730159 - RNA, 16 nt, Human
uagccaguaauccugu

SEQ ID NO: 3730160 - RNA, 19 nt, Human
uagccauauuuguaaaaug

SEQ ID NO: 3730161 - RNA, 22 nt, Human
uagccauauuuguaaaaugaca

SEQ ID NO: 3730162 - RNA, 23 nt, Human
uagccauauuuguaaaaugacaa

SEQ ID NO: 3730163 - RNA, 14 nt, Human
uagccaugggacca

SEQ ID NO: 3730164 - RNA, 19 nt, Human
uagccauguuaacaugaca

SEQ ID NO: 3730165 - RNA, 18 nt, Human
uagccauuccugguaccc

SEQ ID NO: 3730166 - RNA, 17 nt, Human
uagccauugaucauaaa

SEQ ID NO: 3730167 - RNA, 18 nt, Human
uagccauuuuucaaagca

SEQ ID NO: 3730168 - RNA, 19 nt, Human
uagccauuuuucaaagcaa

SEQ ID NO: 3730169 - RNA, 13 nt, Human
uagcccacccugc

SEQ ID NO: 3730170 - RNA, 18 nt, Human
uagcccagcgcucugccu

SEQ ID NO: 3730171 - RNA, 16 nt, Human
uagcccaggagagaga

SEQ ID NO: 3730172 - RNA, 12 nt, Human
uagcccaucccu

SEQ ID NO: 3730173 - RNA, 13 nt, Human
uagccccagugac

SEQ ID NO: 3730174 - RNA, 17 nt, Human
uagcccccuggccucug

SEQ ID NO: 3730175 - RNA, 18 nt, Human
uagcccccuggccucugu

SEQ ID NO: 3730176 - RNA, 21 nt, Human
uagcccccugguaauagcugu

SEQ ID NO: 3730177 - RNA, 20 nt, Human
uagccccucccaagcuggcu

SEQ ID NO: 3730178 - RNA, 14 nt, Human
uagccccugaaagc

SEQ ID NO: 3730179 - RNA, 22 nt, Human
uagccccugggguggccaccag

SEQ ID NO: 3730180 - RNA, 13 nt, Human
uagcccucccacu

SEQ ID NO: 3730181 - RNA, 12 nt, Human
uagcccugcccg

SEQ ID NO: 3730182 - RNA, 18 nt, Human
uagcccuggccagaggcu

SEQ ID NO: 3730183 - RNA, 14 nt, Human
uagcccuguccugg

SEQ ID NO: 3730184 - RNA, 15 nt, Human
uagcccuguccuggu

SEQ ID NO: 3730185 - RNA, 22 nt, Human
uagcccuguccuggugguauuu

SEQ ID NO: 3730186 - RNA, 15 nt, Human
uagcccuuucugugu

SEQ ID NO: 3730187 - RNA, 13 nt, Human
uagccgaccucag

SEQ ID NO: 3730188 - RNA, 19 nt, Human
uagccgagagccugcuccc

SEQ ID NO: 3730189 - RNA, 22 nt, Human
uagccgauaucagaauuugugu

SEQ ID NO: 3730190 - RNA, 19 nt, Human
uagccggagugacagagua

SEQ ID NO: 3730191 - RNA, 19 nt, Human
uagccgggcaugguggcgc

SEQ ID NO: 3730192 - RNA, 21 nt, Human
uagccgguuccugucccugcg

SEQ ID NO: 3730193 - RNA, 18 nt, Human
uagccgugucacgggcau

SEQ ID NO: 3730194 - RNA, 20 nt, Human
uagccuaaggcuccuguuuu

SEQ ID NO: 3730195 - RNA, 21 nt, Human
uagccuaaggcuccuguuuug

SEQ ID NO: 3730196 - RNA, 20 nt, Human
uagccuaauacaacauguag

SEQ ID NO: 3730197 - RNA, 22 nt, Human
uagccuagauaugaauauaugg

SEQ ID NO: 3730198 - RNA, 23 nt, Human
uagccucacuuuuaaugaacaaa

SEQ ID NO: 3730199 - RNA, 12 nt, Human
uagccucccuga

SEQ ID NO: 3730200 - RNA, 19 nt, Human
uagccuccuucgcaggcau

SEQ ID NO: 3730201 - RNA, 20 nt, Human
uagccucgccgucugugaau

SEQ ID NO: 3730202 - RNA, 23 nt, Human
uagccugcacuuugaugucaugu

SEQ ID NO: 3730203 - RNA, 23 nt, Human
uagccugcagaaguaagccucau

SEQ ID NO: 3730204 - RNA, 21 nt, Human
uagccuggaccucugacagca

SEQ ID NO: 3730205 - RNA, 23 nt, Human
uagccuggaccucugacagcagc

SEQ ID NO: 3730206 - RNA, 20 nt, Human
uagccuggagcaccuuuccu

SEQ ID NO: 3730207 - RNA, 20 nt, Human
uagccuggauacaguauaaa

SEQ ID NO: 3730208 - RNA, 12 nt, Human
uagccuguccug

SEQ ID NO: 3730209 - RNA, 20 nt, Human
uagccugugccucugggacu

SEQ ID NO: 3730210 - RNA, 20 nt, Human
uagccuuccguaacccaacu

SEQ ID NO: 3730211 - RNA, 22 nt, Human
uagccuucucuguucauuuccu

SEQ ID NO: 3730212 - RNA, 22 nt, Human
uagccuugcccggauucuggga

SEQ ID NO: 3730213 - RNA, 21 nt, Human
uagccuuuacauggacagaau

SEQ ID NO: 3730214 - RNA, 22 nt, Human
uagccuuuacauggacagaauu

SEQ ID NO: 3730215 - RNA, 23 nt, Human
uagccuuuacauggacagaauuu

SEQ ID NO: 3730216 - RNA, 15 nt, Human
uagccuuuuuguaua

SEQ ID NO: 3730217 - RNA, 17 nt, Human
uagccuuuuuguauaaa

SEQ ID NO: 3730218 - RNA, 19 nt, Human
uagccuuuuuuccccagac

SEQ ID NO: 3730219 - RNA, 14 nt, Human
gccccaugcuggag

SEQ ID NO: 3730220 - RNA, 19 nt, Human
gccccaugcuggagccugu

SEQ ID NO: 3730221 - RNA, 20 nt, Human
gccccaugcuggagccugug

SEQ ID NO: 3730222 - RNA, 22 nt, Human
gccccaugcuggagccugugua

SEQ ID NO: 3730223 - RNA, 23 nt, Human
gccccaugcuggagccuguguaa

SEQ ID NO: 3730224 - RNA, 12 nt, Human
gccccauuccug

SEQ ID NO: 3730225 - RNA, 15 nt, Human
gccccauucugccug

SEQ ID NO: 3730226 - RNA, 19 nt, Human
gcccccaaagcagcccuuc

SEQ ID NO: 3730227 - RNA, 16 nt, Human
gcccccaaccucaggg

SEQ ID NO: 3730228 - RNA, 19 nt, Human
gcccccaaccucagggcuc

SEQ ID NO: 3730229 - RNA, 23 nt, Human
gcccccacagaaagacugagcuc

SEQ ID NO: 3730230 - RNA, 15 nt, Human
gcccccacagugcug

SEQ ID NO: 3730231 - RNA, 18 nt, Human
gcccccacaguugcucua

SEQ ID NO: 3730232 - RNA, 17 nt, Human
gcccccaccacacaucc

SEQ ID NO: 3730233 - RNA, 21 nt, Human
gcccccaccccggggacccug

SEQ ID NO: 3730234 - RNA, 11 nt, Human
gcccccacccu

SEQ ID NO: 3730235 - RNA, 17 nt, Human
gcccccaccgugggcag

SEQ ID NO: 3730236 - RNA, 20 nt, Human
gcccccaccgugggcaggga

SEQ ID NO: 3730237 - RNA, 13 nt, Human
gcccccaccucca

SEQ ID NO: 3730238 - RNA, 18 nt, Human
gcccccaccuccacccuc

SEQ ID NO: 3730239 - RNA, 17 nt, Human
gcccccacugaccagaa

SEQ ID NO: 3730240 - RNA, 13 nt, Human
gcccccacuggcu

SEQ ID NO: 3730241 - RNA, 18 nt, Human
gcccccacuggcuguggg

SEQ ID NO: 3730242 - RNA, 19 nt, Human
gcccccacuggcugugggc

SEQ ID NO: 3730243 - RNA, 14 nt, Human
gcccccacuugccu

SEQ ID NO: 3730244 - RNA, 11 nt, Human
gcccccagagc

SEQ ID NO: 3730245 - RNA, 17 nt, Human
gcccccagagccacagu

SEQ ID NO: 3730246 - RNA, 13 nt, Human
gcccccagagccc

SEQ ID NO: 3730247 - RNA, 18 nt, Human
gcccccagagcccaggcu

SEQ ID NO: 3730248 - RNA, 13 nt, Human
gcccccagcccaa

SEQ ID NO: 3730249 - RNA, 14 nt, Human
gcccccagcccaaa

SEQ ID NO: 3730250 - RNA, 18 nt, Human
gcccccagcccagggcuc

SEQ ID NO: 3730251 - RNA, 21 nt, Human
gcccccagcccagggcuccug

SEQ ID NO: 3730252 - RNA, 18 nt, Human
gcccccagcccccuccug

SEQ ID NO: 3730253 - RNA, 20 nt, Human
gcccccagccccggggugag

SEQ ID NO: 3730254 - RNA, 20 nt, Human
gcccccagccccucccccau

SEQ ID NO: 3730255 - RNA, 12 nt, Human
gcccccagccua

SEQ ID NO: 3730256 - RNA, 21 nt, Human
gcccccagccugucagaucca

SEQ ID NO: 3730257 - RNA, 15 nt, Human
gcccccagcuaagaa

SEQ ID NO: 3730258 - RNA, 18 nt, Human
gcccccagcuguggguac

SEQ ID NO: 3730259 - RNA, 18 nt, Human
gcccccagcuuccagcag

SEQ ID NO: 3730260 - RNA, 19 nt, Human
gcccccagcuuccagcagg

SEQ ID NO: 3730261 - RNA, 20 nt, Human
gcccccagggcacuucacag

SEQ ID NO: 3730262 - RNA, 22 nt, Human
gcccccaguaucucuucagucu

SEQ ID NO: 3730263 - RNA, 23 nt, Human
gcccccagugugcacgaguggga

SEQ ID NO: 3730264 - RNA, 21 nt, Human
gccccccacacuucccuggcg

SEQ ID NO: 3730265 - RNA, 13 nt, Human
gccccccacccca

SEQ ID NO: 3730266 - RNA, 15 nt, Human
gccccccagcucagg

SEQ ID NO: 3730267 - RNA, 22 nt, Human
gcccccccaacacugugcccug

SEQ ID NO: 3730268 - RNA, 23 nt, Human
gcccccccaacacugugcccugg

SEQ ID NO: 3730269 - RNA, 15 nt, Human
gcccccccuuccacu

SEQ ID NO: 3730270 - RNA, 14 nt, Human
gccccccucaaacc

SEQ ID NO: 3730271 - RNA, 18 nt, Human
gcccccgcauccccugcc

SEQ ID NO: 3730272 - RNA, 16 nt, Human
gcccccgccccgcccc

SEQ ID NO: 3730273 - RNA, 20 nt, Human
gcccccgcuguaaugaaaca

SEQ ID NO: 3730274 - RNA, 14 nt, Human
gcccccggcccccu

SEQ ID NO: 3730275 - RNA, 20 nt, Human
gcccccuccgcccugccacu

SEQ ID NO: 3730276 - RNA, 16 nt, Human
gcccccuccucuccca

SEQ ID NO: 3730277 - RNA, 14 nt, Human
gcccccucgugcca

SEQ ID NO: 3730278 - RNA, 15 nt, Human
gcccccucucaggag

SEQ ID NO: 3730279 - RNA, 15 nt, Human
gcccccucugcccug

SEQ ID NO: 3730280 - RNA, 17 nt, Human
gcccccucuucccuggu

SEQ ID NO: 3730281 - RNA, 12 nt, Human
gcccccugcagg

SEQ ID NO: 3730282 - RNA, 20 nt, Human
gcccccugcaggaaggagcu

SEQ ID NO: 3730283 - RNA, 22 nt, Human
gcccccugcaggaaggagcugc

SEQ ID NO: 3730284 - RNA, 13 nt, Human
gcccccugccccc

SEQ ID NO: 3730285 - RNA, 20 nt, Human
gcccccugcuggcucuucug

SEQ ID NO: 3730286 - RNA, 19 nt, Human
gcccccuggccucugugcc

SEQ ID NO: 3730287 - RNA, 13 nt, Human
gcccccuggucuc

SEQ ID NO: 3730288 - RNA, 14 nt, Human
gcccccuggucucu

SEQ ID NO: 3730289 - RNA, 16 nt, Human
gcccccuggucucugg

SEQ ID NO: 3730290 - RNA, 21 nt, Human
gcccccugguggacaguccug

SEQ ID NO: 3730291 - RNA, 14 nt, Human
gcccccugucucuc

SEQ ID NO: 3730292 - RNA, 17 nt, Human
gcccccuguggaugcug

SEQ ID NO: 3730293 - RNA, 17 nt, Human
gcccccuucucccacac

SEQ ID NO: 3730294 - RNA, 20 nt, Human
gcccccuucucccacacugc

SEQ ID NO: 3730295 - RNA, 22 nt, Human
gcccccuucucccacacugcua

SEQ ID NO: 3730296 - RNA, 16 nt, Human
gccccgaagggccccc

SEQ ID NO: 3730297 - RNA, 13 nt, Human
gccccgacuccag

SEQ ID NO: 3730298 - RNA, 14 nt, Human
gccccgacuccagc

SEQ ID NO: 3730299 - RNA, 18 nt, Human
gccccgacuccagccagc

SEQ ID NO: 3730300 - RNA, 19 nt, Human
gccccgacuccagccagcg

SEQ ID NO: 3730301 - RNA, 13 nt, Human
gccccgagcuguc

SEQ ID NO: 3730302 - RNA, 22 nt, Human
gccccgaggccuucucugaagg

SEQ ID NO: 3730303 - RNA, 23 nt, Human
gccccgaggccuucucugaagga

SEQ ID NO: 3730304 - RNA, 15 nt, Human
gccccgcagaccucc

SEQ ID NO: 3730305 - RNA, 18 nt, Human
gccccgcagaccucccca

SEQ ID NO: 3730306 - RNA, 19 nt, Human
gccccgcagaccuccccag

SEQ ID NO: 3730307 - RNA, 20 nt, Human
gccccgcagaccuccccagc

SEQ ID NO: 3730308 - RNA, 21 nt, Human
gccccgcagaccuccccagcc

SEQ ID NO: 3730309 - RNA, 14 nt, Human
gccccgccccacau

SEQ ID NO: 3730310 - RNA, 13 nt, Human
gccccgcccucau

SEQ ID NO: 3730311 - RNA, 18 nt, Human
gccccgcccucuuccuga

SEQ ID NO: 3730312 - RNA, 14 nt, Human
gccccgccuccccg

SEQ ID NO: 3730313 - RNA, 13 nt, Human
gccccgcguggaa

SEQ ID NO: 3730314 - RNA, 16 nt, Human
gccccgcuuguccagc

SEQ ID NO: 3730315 - RNA, 18 nt, Human
gccccgcuuguccagcgc

SEQ ID NO: 3730316 - RNA, 14 nt, Human
gccccggccaccuc

SEQ ID NO: 3730317 - RNA, 14 nt, Human
gccccggccccagc

SEQ ID NO: 3730318 - RNA, 18 nt, Human
gccccggucaccuagcaa

SEQ ID NO: 3730319 - RNA, 15 nt, Human
gccccgucaccaucu

SEQ ID NO: 3730320 - RNA, 18 nt, Human
gccccgucaccaucucag

SEQ ID NO: 3730321 - RNA, 20 nt, Human
gccccgucaccaucucaggc

SEQ ID NO: 3730322 - RNA, 17 nt, Human
gccccgucccccucugg

SEQ ID NO: 3730323 - RNA, 14 nt, Human
gccccgucucaggu

SEQ ID NO: 3730324 - RNA, 20 nt, Human
gccccgucucaugaggggcc

SEQ ID NO: 3730325 - RNA, 13 nt, Human
gccccgugaggca

SEQ ID NO: 3730326 - RNA, 22 nt, Human
gccccgugcagacuggagggga

SEQ ID NO: 3730327 - RNA, 19 nt, Human
gccccuacugcugugaacc

SEQ ID NO: 3730328 - RNA, 22 nt, Human
gccccuagcuuagagccucccu

SEQ ID NO: 3730329 - RNA, 23 nt, Human
gccccucaacucuccuccagagu

SEQ ID NO: 3730330 - RNA, 18 nt, Human
gccccucacccugccuua

SEQ ID NO: 3730331 - RNA, 17 nt, Human
gccccucaccugggcac

SEQ ID NO: 3730332 - RNA, 20 nt, Human
gccccucaccugggcaccug

SEQ ID NO: 3730333 - RNA, 18 nt, Human
gccccucagggucccugg

SEQ ID NO: 3730334 - RNA, 19 nt, Human
gccccucagggucccuggu

SEQ ID NO: 3730335 - RNA, 21 nt, Human
gccccucagggucccuggugg

SEQ ID NO: 3730336 - RNA, 21 nt, Human
gccccucaucucucugcccaa

SEQ ID NO: 3730337 - RNA, 21 nt, Human
gccccucccacacacacccac

SEQ ID NO: 3730338 - RNA, 21 nt, Human
gccccucccacacccaaagcu

SEQ ID NO: 3730339 - RNA, 23 nt, Human
gccccucccacacccaaagcuga

SEQ ID NO: 3730340 - RNA, 18 nt, Human
gccccucccacagcgcug

SEQ ID NO: 3730341 - RNA, 12 nt, Human
gccccucccacc

SEQ ID NO: 3730342 - RNA, 13 nt, Human
gccccucccacca

SEQ ID NO: 3730343 - RNA, 14 nt, Human
gccccucccaccac

SEQ ID NO: 3730344 - RNA, 15 nt, Human
gccccucccccaacc

SEQ ID NO: 3730345 - RNA, 22 nt, Human
gccccucccccaacccccaccc

SEQ ID NO: 3730346 - RNA, 14 nt, Human
gccccucccuaccu

SEQ ID NO: 3730347 - RNA, 16 nt, Human
gccccucccuaccuca

SEQ ID NO: 3730348 - RNA, 13 nt, Human
gccccucccuccu

SEQ ID NO: 3730349 - RNA, 18 nt, Human
gccccuccucucugcccu

SEQ ID NO: 3730350 - RNA, 13 nt, Human
gccccuccucugc

SEQ ID NO: 3730351 - RNA, 20 nt, Human
gccccuccucugccaccucc

SEQ ID NO: 3730352 - RNA, 21 nt, Human
gccccuccucugccaccuccc

SEQ ID NO: 3730353 - RNA, 15 nt, Human
gccccucucaccaaa

SEQ ID NO: 3730354 - RNA, 16 nt, Human
gccccucucagcccuc

SEQ ID NO: 3730355 - RNA, 20 nt, Human
gccccucucccuugggcucu

SEQ ID NO: 3730356 - RNA, 15 nt, Human
gccccucucugggcc

SEQ ID NO: 3730357 - RNA, 15 nt, Human
gccccucugaccccu

SEQ ID NO: 3730358 - RNA, 16 nt, Human
gccccucugcccagcu

SEQ ID NO: 3730359 - RNA, 19 nt, Human
gccccucugcccagcuugg

SEQ ID NO: 3730360 - RNA, 18 nt, Human
gccccucuggucgcuccu

SEQ ID NO: 3730361 - RNA, 19 nt, Human
gccccucuggucgcuccug

SEQ ID NO: 3730362 - RNA, 20 nt, Human
gccccucuggucgcuccugc

SEQ ID NO: 3730363 - RNA, 19 nt, Human
gccccucuugccccccacc

SEQ ID NO: 3730364 - RNA, 17 nt, Human
gccccucuuggagaagu

SEQ ID NO: 3730365 - RNA, 12 nt, Human
gccccucuuucu

SEQ ID NO: 3730366 - RNA, 22 nt, Human
gccccugagacaaauggaggcc

SEQ ID NO: 3730367 - RNA, 20 nt, Human
gccccugagcaaugucugug

SEQ ID NO: 3730368 - RNA, 12 nt, Human
gccccugagccc

SEQ ID NO: 3730369 - RNA, 14 nt, Human
uaucaauaucuaau

SEQ ID NO: 3730370 - RNA, 13 nt, Human
uaucaaucauuuu

SEQ ID NO: 3730371 - RNA, 12 nt, Human
uaucaauguguc

SEQ ID NO: 3730372 - RNA, 15 nt, Human
uaucaaugugucuuu

SEQ ID NO: 3730373 - RNA, 19 nt, Human
uaucaauuaccacaccauc

SEQ ID NO: 3730374 - RNA, 14 nt, Human
uaucacaaaucuua

SEQ ID NO: 3730375 - RNA, 16 nt, Human
uaucacaaaucuuaac

SEQ ID NO: 3730376 - RNA, 16 nt, Human
uaucacacaaagcaga

SEQ ID NO: 3730377 - RNA, 17 nt, Human
uaucacauguauguuuu

SEQ ID NO: 3730378 - RNA, 23 nt, Human
uaucaccaaaaaccuauuccacu

SEQ ID NO: 3730379 - RNA, 16 nt, Human
uaucacccaacgcucc

SEQ ID NO: 3730380 - RNA, 23 nt, Human
uaucacccagacauaaaggaaaa

SEQ ID NO: 3730381 - RNA, 14 nt, Human
uaucaccucauggc

SEQ ID NO: 3730382 - RNA, 13 nt, Human
uaucaccuccccu

SEQ ID NO: 3730383 - RNA, 16 nt, Human
uaucaccuccccuccu

SEQ ID NO: 3730384 - RNA, 18 nt, Human
uaucaccuggcuuguuua

SEQ ID NO: 3730385 - RNA, 20 nt, Human
uaucacuuccaugacauaag

SEQ ID NO: 3730386 - RNA, 16 nt, Human
uaucacuuuuugaacu

SEQ ID NO: 3730387 - RNA, 20 nt, Human
uaucacuuuuugaacuaaga

SEQ ID NO: 3730388 - RNA, 20 nt, Human
uaucagaacuauguuuuugu

SEQ ID NO: 3730389 - RNA, 14 nt, Human
uaucagaagaccac

SEQ ID NO: 3730390 - RNA, 15 nt, Human
uaucagaagagaggg

SEQ ID NO: 3730391 - RNA, 13 nt, Human
uaucagauacauc

SEQ ID NO: 3730392 - RNA, 16 nt, Human
uaucagauacaucacu

SEQ ID NO: 3730393 - RNA, 18 nt, Human
uaucagauacaucacugc

SEQ ID NO: 3730394 - RNA, 15 nt, Human
uaucagauugcuuuu

SEQ ID NO: 3730395 - RNA, 19 nt, Human
uaucagccugucucuucca

SEQ ID NO: 3730396 - RNA, 22 nt, Human
uaucagccugucucuuccauau

SEQ ID NO: 3730397 - RNA, 20 nt, Human
uaucagcggccccuugacuc

SEQ ID NO: 3730398 - RNA, 19 nt, Human
uaucagcuacuuaagagaa

SEQ ID NO: 3730399 - RNA, 21 nt, Human
uaucagcuacuuaagagaaau

SEQ ID NO: 3730400 - RNA, 14 nt, Human
uaucagcuucagaa

SEQ ID NO: 3730401 - RNA, 23 nt, Human
uaucaggauuuccucuugaacca

SEQ ID NO: 3730402 - RNA, 19 nt, Human
uaucaggcaaauuugcauu

SEQ ID NO: 3730403 - RNA, 22 nt, Human
uaucagggaaacuaagauucuu

SEQ ID NO: 3730404 - RNA, 21 nt, Human
uaucaguaacccccuuaaauu

SEQ ID NO: 3730405 - RNA, 20 nt, Human
uaucagucaauauuuuuaga

SEQ ID NO: 3730406 - RNA, 14 nt, Human
uaucagucucugag

SEQ ID NO: 3730407 - RNA, 17 nt, Human
uaucaguguaagcccug

SEQ ID NO: 3730408 - RNA, 15 nt, Human
uaucagugugccccc

SEQ ID NO: 3730409 - RNA, 17 nt, Human
uaucaguguuuuaaauu

SEQ ID NO: 3730410 - RNA, 19 nt, Human
uaucaguguuuuaaauucu

SEQ ID NO: 3730411 - RNA, 16 nt, Human
uaucaguuacccacuc

SEQ ID NO: 3730412 - RNA, 17 nt, Human
uaucaguuacucagccc

SEQ ID NO: 3730413 - RNA, 14 nt, Human
uaucaguugcaaua

SEQ ID NO: 3730414 - RNA, 12 nt, Human
uaucaguuugau

SEQ ID NO: 3730415 - RNA, 13 nt, Human
uaucaguuugauc

SEQ ID NO: 3730416 - RNA, 13 nt, Human
uaucaguuugcua

SEQ ID NO: 3730417 - RNA, 23 nt, Human
uaucauagaaauguaacuuuugu

SEQ ID NO: 3730418 - RNA, 16 nt, Human
uaucauaguuaacaua

SEQ ID NO: 3730419 - RNA, 15 nt, Human
uaucauauauuuaau

SEQ ID NO: 3730420 - RNA, 18 nt, Human
uaucaucacguauguuau

SEQ ID NO: 3730421 - RNA, 18 nt, Human
uaucaucagauagcaucu

SEQ ID NO: 3730422 - RNA, 15 nt, Human
uaucauccacacaug

SEQ ID NO: 3730423 - RNA, 16 nt, Human
uaucauccacauuguu

SEQ ID NO: 3730424 - RNA, 22 nt, Human
uaucaucuaccuagauuuaaua

SEQ ID NO: 3730425 - RNA, 19 nt, Human
uaucaucuggauaggagcc

SEQ ID NO: 3730426 - RNA, 12 nt, Human
uaucaugaauuu

SEQ ID NO: 3730427 - RNA, 15 nt, Human
uaucaugaauuuuaa

SEQ ID NO: 3730428 - RNA, 24 nt, Human
uaucaugaauuuuaaaguaugcau

SEQ ID NO: 3730429 - RNA, 17 nt, Human
uaucaugcaaaugcugu

SEQ ID NO: 3730430 - RNA, 12 nt, Human
uaucaugcauuc

SEQ ID NO: 3730431 - RNA, 17 nt, Human
uaucauggucucaguca

SEQ ID NO: 3730432 - RNA, 12 nt, Human
uaucauguaugg

SEQ ID NO: 3730433 - RNA, 22 nt, Human
uaucauguguaaucaauaaacg

SEQ ID NO: 3730434 - RNA, 21 nt, Human
uaucauguuaguaauaccucu

SEQ ID NO: 3730435 - RNA, 14 nt, Human
uaucauuaaaguuc

SEQ ID NO: 3730436 - RNA, 14 nt, Human
uaucauucaagugu

SEQ ID NO: 3730437 - RNA, 13 nt, Human
uaucauucagcaa

SEQ ID NO: 3730438 - RNA, 13 nt, Human
uaucauucauucu

SEQ ID NO: 3730439 - RNA, 17 nt, Human
uaucauucuaaagauag

SEQ ID NO: 3730440 - RNA, 23 nt, Human
uaucauucuaaagauagaguaaa

SEQ ID NO: 3730441 - RNA, 14 nt, Human
uaucauuuaauaau

SEQ ID NO: 3730442 - RNA, 16 nt, Human
uaucauuuaauaauau

SEQ ID NO: 3730443 - RNA, 21 nt, Human
uaucauuuaauaauauacuug

SEQ ID NO: 3730444 - RNA, 20 nt, Human
uaucauuuauuuuuuacauu

SEQ ID NO: 3730445 - RNA, 14 nt, Human
uaucauuuucugca

SEQ ID NO: 3730446 - RNA, 21 nt, Human
uaucauuuuuguacaguuugc

SEQ ID NO: 3730447 - RNA, 19 nt, Human
uauccaaaccaaauaaaaa

SEQ ID NO: 3730448 - RNA, 14 nt, Human
uauccaaucuguga

SEQ ID NO: 3730449 - RNA, 14 nt, Human
uauccaaugaaaua

SEQ ID NO: 3730450 - RNA, 21 nt, Human
uauccacagaaacauuuucau

SEQ ID NO: 3730451 - RNA, 22 nt, Human
uauccacagagagucccacugc

SEQ ID NO: 3730452 - RNA, 13 nt, Human
uauccaccaccuc

SEQ ID NO: 3730453 - RNA, 14 nt, Human
uauccacccagccc

SEQ ID NO: 3730454 - RNA, 15 nt, Human
uauccacccagccca

SEQ ID NO: 3730455 - RNA, 21 nt, Human
uauccacuguuuauucaacaa

SEQ ID NO: 3730456 - RNA, 13 nt, Human
uauccacuugucc

SEQ ID NO: 3730457 - RNA, 15 nt, Human
uauccacuuugcaca

SEQ ID NO: 3730458 - RNA, 15 nt, Human
uauccagaauggaau

SEQ ID NO: 3730459 - RNA, 11 nt, Human
uauccaggacu

SEQ ID NO: 3730460 - RNA, 17 nt, Human
uauccaggcaccaggac

SEQ ID NO: 3730461 - RNA, 20 nt, Human
uauccaggucaacagaauga

SEQ ID NO: 3730462 - RNA, 21 nt, Human
uauccaggucaacagaaugaa

SEQ ID NO: 3730463 - RNA, 22 nt, Human
uauccaggucaacagaaugaaa

SEQ ID NO: 3730464 - RNA, 19 nt, Human
uauccagguucccucccag

SEQ ID NO: 3730465 - RNA, 17 nt, Human
uauccauaaaaaaaaau

SEQ ID NO: 3730466 - RNA, 24 nt, Human
uauccauaaugcauucuucucugu

SEQ ID NO: 3730467 - RNA, 22 nt, Human
uauccauagugacuuuucaagu

SEQ ID NO: 3730468 - RNA, 17 nt, Human
uauccauauugagucaa

SEQ ID NO: 3730469 - RNA, 22 nt, Human
uauccauauuuuauuacuguuu

SEQ ID NO: 3730470 - RNA, 16 nt, Human
uauccaugcaccaaac

SEQ ID NO: 3730471 - RNA, 14 nt, Human
uauccauguacugu

SEQ ID NO: 3730472 - RNA, 18 nt, Human
uauccauguacuguaguu

SEQ ID NO: 3730473 - RNA, 16 nt, Human
uauccauuaucaugug

SEQ ID NO: 3730474 - RNA, 19 nt, Human
uauccauuaucauguguaa

SEQ ID NO: 3730475 - RNA, 14 nt, Human
uauccauucuuucu

SEQ ID NO: 3730476 - RNA, 22 nt, Human
uaucccaaaguuguuguaaccu

SEQ ID NO: 3730477 - RNA, 17 nt, Human
uaucccaacagucaugu

SEQ ID NO: 3730478 - RNA, 16 nt, Human
uaucccaaucauuguu

SEQ ID NO: 3730479 - RNA, 16 nt, Human
uaucccacauccaacu

SEQ ID NO: 3730480 - RNA, 19 nt, Human
uaucccacggaaaaugcca

SEQ ID NO: 3730481 - RNA, 14 nt, Human
uaucccagcugccu

SEQ ID NO: 3730482 - RNA, 20 nt, Human
uauccccccaucuugcuucc

SEQ ID NO: 3730483 - RNA, 21 nt, Human
uauccccccccuguauaguua

SEQ ID NO: 3730484 - RNA, 13 nt, Human
uauccccugcuac

SEQ ID NO: 3730485 - RNA, 20 nt, Human
uaucccuacuguaauuugug

SEQ ID NO: 3730486 - RNA, 12 nt, Human
uaucccucucca

SEQ ID NO: 3730487 - RNA, 10 nt, Human
uaucccuucc

SEQ ID NO: 3730488 - RNA, 16 nt, Human
uaucccuuccagaugg

SEQ ID NO: 3730489 - RNA, 12 nt, Human
uaucccuucuca

SEQ ID NO: 3730490 - RNA, 16 nt, Human
uaucccuuuucuugac

SEQ ID NO: 3730491 - RNA, 14 nt, Human
uauccgcugccagc

SEQ ID NO: 3730492 - RNA, 18 nt, Human
uauccuaauaaaaaggug

SEQ ID NO: 3730493 - RNA, 12 nt, Human
uauccuacuucu

SEQ ID NO: 3730494 - RNA, 22 nt, Human
uauccuagcacaugcuucaaua

SEQ ID NO: 3730495 - RNA, 13 nt, Human
uauccuauuucag

SEQ ID NO: 3730496 - RNA, 13 nt, Human
uauccucacugcc

SEQ ID NO: 3730497 - RNA, 16 nt, Human
uauccucacugcccuc

SEQ ID NO: 3730498 - RNA, 15 nt, Human
uauccuccaccgucu

SEQ ID NO: 3730499 - RNA, 14 nt, Human
uauccuccagguuu

SEQ ID NO: 3730500 - RNA, 18 nt, Human
uauccuccagguuuuuca

SEQ ID NO: 3730501 - RNA, 19 nt, Human
uauccuccagguuuuucaa

SEQ ID NO: 3730502 - RNA, 11 nt, Human
uauccucccug

SEQ ID NO: 3730503 - RNA, 14 nt, Human
uauccucccuguaa

SEQ ID NO: 3730504 - RNA, 16 nt, Human
uauccucgcucccggg

SEQ ID NO: 3730505 - RNA, 18 nt, Human
uauccucucuuccucuuc

SEQ ID NO: 3730506 - RNA, 11 nt, Human
uauccucugau

SEQ ID NO: 3730507 - RNA, 18 nt, Human
uauccugccaaaaucauu

SEQ ID NO: 3730508 - RNA, 10 nt, Human
uauccugccc

SEQ ID NO: 3730509 - RNA, 15 nt, Human
uauccugcccagugu

SEQ ID NO: 3730510 - RNA, 12 nt, Human
uauccugccuca

SEQ ID NO: 3730511 - RNA, 16 nt, Human
uauccugccucagccc

SEQ ID NO: 3730512 - RNA, 15 nt, Human
uauccugcuguucua

SEQ ID NO: 3730513 - RNA, 23 nt, Human
uauccugggcuuuuguuuugcuu

SEQ ID NO: 3730514 - RNA, 13 nt, Human
uauccugugacug

SEQ ID NO: 3730515 - RNA, 16 nt, Human
uauccugugacugucu

SEQ ID NO: 3730516 - RNA, 21 nt, Human
uauccuguuugaggaaagcaa

SEQ ID NO: 3730517 - RNA, 22 nt, Human
uauccuguuugaggaaagcaag

SEQ ID NO: 3730518 - RNA, 15 nt, Human
uauccuucagccuga

SEQ ID NO: 3730519 - RNA, 17 nt, Human
uauccuuccucuccuuc

SEQ ID NO: 3730520 - RNA, 19 nt, Human
uauccuugggggcucccag

SEQ ID NO: 3730521 - RNA, 20 nt, Human
uagccuuuuuuccccagacu

SEQ ID NO: 3730522 - RNA, 20 nt, Human
uagcgaacccuuuauuugaa

SEQ ID NO: 3730523 - RNA, 20 nt, Human
uagcgacuaaacuagauuuu

SEQ ID NO: 3730524 - RNA, 16 nt, Human
uagcgcacucuucaug

SEQ ID NO: 3730525 - RNA, 17 nt, Human
uagcgcccaguugggug

SEQ ID NO: 3730526 - RNA, 21 nt, Human
uagcgcugccgcaccccagag

SEQ ID NO: 3730527 - RNA, 13 nt, Human
uagcgcuguuuuu

SEQ ID NO: 3730528 - RNA, 19 nt, Human
uagcgugcccgugugcaug

SEQ ID NO: 3730529 - RNA, 16 nt, Human
uagcgugcucacugac

SEQ ID NO: 3730530 - RNA, 13 nt, Human
uagcguucccaac

SEQ ID NO: 3730531 - RNA, 18 nt, Human
uagcguucccaacaacau

SEQ ID NO: 3730532 - RNA, 13 nt, Human
uagcguucuugua

SEQ ID NO: 3730533 - RNA, 14 nt, Human
uagcguucuuguaa

SEQ ID NO: 3730534 - RNA, 17 nt, Human
uagcguucuuguaauuu

SEQ ID NO: 3730535 - RNA, 18 nt, Human
uagcuaaacggauuccaa

SEQ ID NO: 3730536 - RNA, 20 nt, Human
uagcuaacauuuuaaauaaa

SEQ ID NO: 3730537 - RNA, 22 nt, Human
uagcuaaguacacaauaagcaa

SEQ ID NO: 3730538 - RNA, 20 nt, Human
uagcuacagagaaaccagcu

SEQ ID NO: 3730539 - RNA, 23 nt, Human
uagcuacagagaaaccagcuucc

SEQ ID NO: 3730540 - RNA, 21 nt, Human
uagcuacguuuacucacagcc

SEQ ID NO: 3730541 - RNA, 19 nt, Human
uagcuagaagugggccagg

SEQ ID NO: 3730542 - RNA, 16 nt, Human
uagcuaggauuugaac

SEQ ID NO: 3730543 - RNA, 15 nt, Human
uagcuaggugacaua

SEQ ID NO: 3730544 - RNA, 23 nt, Human
uagcuauaauugggucauagaaa

SEQ ID NO: 3730545 - RNA, 14 nt, Human
uagcuauauccaug

SEQ ID NO: 3730546 - RNA, 15 nt, Human
uagcuauauccaugu

SEQ ID NO: 3730547 - RNA, 18 nt, Human
uagcuauauccauguacu

SEQ ID NO: 3730548 - RNA, 20 nt, Human
uagcuauauccauguacugu

SEQ ID NO: 3730549 - RNA, 22 nt, Human
uagcuauauccauguacuguag

SEQ ID NO: 3730550 - RNA, 14 nt, Human
uagcuaucagaaga

SEQ ID NO: 3730551 - RNA, 15 nt, Human
uagcuaucagaagac

SEQ ID NO: 3730552 - RNA, 16 nt, Human
uagcuaucagaagacc

SEQ ID NO: 3730553 - RNA, 21 nt, Human
uagcuaucagaagaccacaaa

SEQ ID NO: 3730554 - RNA, 14 nt, Human
uagcuaugcuguau

SEQ ID NO: 3730555 - RNA, 16 nt, Human
uagcuaugcuguaucu

SEQ ID NO: 3730556 - RNA, 21 nt, Human
uagcuaugcuguaucugugcu

SEQ ID NO: 3730557 - RNA, 16 nt, Human
uagcuaugugaccuug

SEQ ID NO: 3730558 - RNA, 17 nt, Human
uagcuauuuuuauggaa

SEQ ID NO: 3730559 - RNA, 21 nt, Human
uagcuauuuuuauggaauuuu

SEQ ID NO: 3730560 - RNA, 17 nt, Human
uagcucaaacguggcuu

SEQ ID NO: 3730561 - RNA, 13 nt, Human
uagcucaaugagc

SEQ ID NO: 3730562 - RNA, 17 nt, Human
uagcucaaugagcaugu

SEQ ID NO: 3730563 - RNA, 15 nt, Human
uagcucaauuagugu

SEQ ID NO: 3730564 - RNA, 21 nt, Human
uagcucaggugucccugcacu

SEQ ID NO: 3730565 - RNA, 21 nt, Human
uagcuccccgcuucugccugc

SEQ ID NO: 3730566 - RNA, 14 nt, Human
uagcuccccuccuc

SEQ ID NO: 3730567 - RNA, 16 nt, Human
uagcuccuguggcccc

SEQ ID NO: 3730568 - RNA, 20 nt, Human
uagcuccuguggccccaccc

SEQ ID NO: 3730569 - RNA, 22 nt, Human
uagcuccuguggccccacccug

SEQ ID NO: 3730570 - RNA, 22 nt, Human
uagcucuaaaaucugcuuguau

SEQ ID NO: 3730571 - RNA, 21 nt, Human
uagcucuaauguuugcauaua

SEQ ID NO: 3730572 - RNA, 21 nt, Human
uagcucuaggagggcuggcaa

SEQ ID NO: 3730573 - RNA, 11 nt, Human
uagcucugaga

SEQ ID NO: 3730574 - RNA, 17 nt, Human
uagcucugagccaguuc

SEQ ID NO: 3730575 - RNA, 22 nt, Human
uagcucuggggugggcaguuuu

SEQ ID NO: 3730576 - RNA, 20 nt, Human
uagcucuuaauuguucauuu

SEQ ID NO: 3730577 - RNA, 17 nt, Human
uagcugaagaauugaaa

SEQ ID NO: 3730578 - RNA, 19 nt, Human
uagcugaauguuuuucuaa

SEQ ID NO: 3730579 - RNA, 15 nt, Human
uagcugcaaaaauaa

SEQ ID NO: 3730580 - RNA, 15 nt, Human
uagcugcccauuucg

SEQ ID NO: 3730581 - RNA, 23 nt, Human
uagcugccuagcaagcuggccuc

SEQ ID NO: 3730582 - RNA, 12 nt, Human
uagcugcuacaa

SEQ ID NO: 3730583 - RNA, 15 nt, Human
uagcugcuacaaaga

SEQ ID NO: 3730584 - RNA, 16 nt, Human
uagcugcuacaaagaa

SEQ ID NO: 3730585 - RNA, 21 nt, Human
uagcugcuacaaagaagacau

SEQ ID NO: 3730586 - RNA, 23 nt, Human
uagcugcuacaaagaagacaugu

SEQ ID NO: 3730587 - RNA, 23 nt, Human
uagcuggaauuuuuuauucuugu

SEQ ID NO: 3730588 - RNA, 23 nt, Human
uagcuggagaggagcccugccuc

SEQ ID NO: 3730589 - RNA, 22 nt, Human
uagcuggcucugugagggugcu

SEQ ID NO: 3730590 - RNA, 16 nt, Human
uagcugggaaagcaua

SEQ ID NO: 3730591 - RNA, 12 nt, Human
uagcugggacua

SEQ ID NO: 3730592 - RNA, 15 nt, Human
uagcugggacuacag

SEQ ID NO: 3730593 - RNA, 17 nt, Human
uagcugggacuacaggc

SEQ ID NO: 3730594 - RNA, 20 nt, Human
uagcugggacuacaggcacc

SEQ ID NO: 3730595 - RNA, 15 nt, Human
uagcugggauuacag

SEQ ID NO: 3730596 - RNA, 21 nt, Human
uagcugggauuuuaaacuaga

SEQ ID NO: 3730597 - RNA, 22 nt, Human
uagcuggucuuauuuguaaagc

SEQ ID NO: 3730598 - RNA, 12 nt, Human
uagcuguaaggc

SEQ ID NO: 3730599 - RNA, 16 nt, Human
uagcuguacaaauaua

SEQ ID NO: 3730600 - RNA, 13 nt, Human
uagcugugaccug

SEQ ID NO: 3730601 - RNA, 14 nt, Human
uagcugugugaaau

SEQ ID NO: 3730602 - RNA, 11 nt, Human
uagcuguguua

SEQ ID NO: 3730603 - RNA, 13 nt, Human
uagcuguugagcu

SEQ ID NO: 3730604 - RNA, 16 nt, Human
uagcuuaccugacaca

SEQ ID NO: 3730605 - RNA, 19 nt, Human
uagcuuaccugacacaaga

SEQ ID NO: 3730606 - RNA, 17 nt, Human
uagcuuagaccucagcc

SEQ ID NO: 3730607 - RNA, 18 nt, Human
uagcuuagaccucagccu

SEQ ID NO: 3730608 - RNA, 20 nt, Human
uagcuuagaccucagccugu

SEQ ID NO: 3730609 - RNA, 23 nt, Human
uagcuuagaccucagccugugcu

SEQ ID NO: 3730610 - RNA, 19 nt, Human
uagcuuagagccucccuca

SEQ ID NO: 3730611 - RNA, 14 nt, Human
uagcuuaucaauuu

SEQ ID NO: 3730612 - RNA, 18 nt, Human
uagcuuaucaauuuguca

SEQ ID NO: 3730613 - RNA, 20 nt, Human
uagcuuaucaauuugucauu

SEQ ID NO: 3730614 - RNA, 19 nt, Human
uagcuuaucuacuuccaaa

SEQ ID NO: 3730615 - RNA, 22 nt, Human
uagcuuaucuacuuccaaacua

SEQ ID NO: 3730616 - RNA, 14 nt, Human
uagcuuauguuaac

SEQ ID NO: 3730617 - RNA, 11 nt, Human
uagcuucagga

SEQ ID NO: 3730618 - RNA, 18 nt, Human
uagcuucaggaaccucga

SEQ ID NO: 3730619 - RNA, 12 nt, Human
uagcuuccauga

SEQ ID NO: 3730620 - RNA, 21 nt, Human
uagcuucuaccaugaacagaa

SEQ ID NO: 3730621 - RNA, 13 nt, Human
uagcuucugaccu

SEQ ID NO: 3730622 - RNA, 17 nt, Human
uagcuucugaccucagc

SEQ ID NO: 3730623 - RNA, 16 nt, Human
uagcuucugcuuuucu

SEQ ID NO: 3730624 - RNA, 19 nt, Human
uagcuugaaggaucuguuu

SEQ ID NO: 3730625 - RNA, 19 nt, Human
uagcuugauaaagggccaa

SEQ ID NO: 3730626 - RNA, 17 nt, Human
uagcuugcagaacugua

SEQ ID NO: 3730627 - RNA, 20 nt, Human
uagcuuggaaacuggaugag

SEQ ID NO: 3730628 - RNA, 17 nt, Human
uagcuuggggccaggga

SEQ ID NO: 3730629 - RNA, 14 nt, Human
uagcuuuacccuca

SEQ ID NO: 3730630 - RNA, 15 nt, Human
uagcuuuacccucag

SEQ ID NO: 3730631 - RNA, 15 nt, Human
uagcuuuauucuuca

SEQ ID NO: 3730632 - RNA, 22 nt, Human
uagcuuuauuuuuuaaguauuu

SEQ ID NO: 3730633 - RNA, 22 nt, Human
uagcuuuggaaguuuagcucug

SEQ ID NO: 3730634 - RNA, 14 nt, Human
uagcuuuuaggaaa

SEQ ID NO: 3730635 - RNA, 20 nt, Human
uagcuuuuaggaaaaucacu

SEQ ID NO: 3730636 - RNA, 13 nt, Human
uagcuuuucaaac

SEQ ID NO: 3730637 - RNA, 19 nt, Human
uagcuuuugugggggacug

SEQ ID NO: 3730638 - RNA, 15 nt, Human
uagcuuuuuaauugu

SEQ ID NO: 3730639 - RNA, 23 nt, Human
uagcuuuuuucucugauacagaa

SEQ ID NO: 3730640 - RNA, 13 nt, Human
uaggaaaaacuga

SEQ ID NO: 3730641 - RNA, 16 nt, Human
uaggaaaagaaaucua

SEQ ID NO: 3730642 - RNA, 17 nt, Human
uaggaaaaguacauuua

SEQ ID NO: 3730643 - RNA, 12 nt, Human
uaggaaaauuau

SEQ ID NO: 3730644 - RNA, 23 nt, Human
uaggaaaauuggacauuaagcau

SEQ ID NO: 3730645 - RNA, 23 nt, Human
uaggaaaucuuguccagagacaa

SEQ ID NO: 3730646 - RNA, 23 nt, Human
uaggaaauggcuuugugauucaa

SEQ ID NO: 3730647 - RNA, 13 nt, Human
uaggaacaaaucu

SEQ ID NO: 3730648 - RNA, 14 nt, Human
uaggaacaaaucuu

SEQ ID NO: 3730649 - RNA, 20 nt, Human
uaggaacgguaaauuucugu

SEQ ID NO: 3730650 - RNA, 15 nt, Human
uaggaacugcugggc

SEQ ID NO: 3730651 - RNA, 21 nt, Human
uaggaacuuaaauaaugugaa

SEQ ID NO: 3730652 - RNA, 14 nt, Human
uaggaacuucagag

SEQ ID NO: 3730653 - RNA, 16 nt, Human
uaggaacuucagagau

SEQ ID NO: 3730654 - RNA, 17 nt, Human
uaggaagaaagaagaca

SEQ ID NO: 3730655 - RNA, 13 nt, Human
uaggaagaauuuu

SEQ ID NO: 3730656 - RNA, 21 nt, Human
uaggaagagccuuccacccag

SEQ ID NO: 3730657 - RNA, 14 nt, Human
uaggaagccucaga

SEQ ID NO: 3730658 - RNA, 17 nt, Human
uaggaaggcacuucugc

SEQ ID NO: 3730659 - RNA, 21 nt, Human
uaggaaggcacuucugccuga

SEQ ID NO: 3730660 - RNA, 15 nt, Human
uaggaagggaccaag

SEQ ID NO: 3730661 - RNA, 24 nt, Human
uaggaagguacuguaugaucaaau

SEQ ID NO: 3730662 - RNA, 16 nt, Human
uaggaaguaaauuaua

SEQ ID NO: 3730663 - RNA, 20 nt, Human
uaggaagucaauauguggaa

SEQ ID NO: 3730664 - RNA, 18 nt, Human
uaggaaguguaacagcug

SEQ ID NO: 3730665 - RNA, 20 nt, Human
uaggaaguguaacagcugag

SEQ ID NO: 3730666 - RNA, 21 nt, Human
uaggaaguguaacagcugagg

SEQ ID NO: 3730667 - RNA, 19 nt, Human
uaggaaguuaaaagcacaa

SEQ ID NO: 3730668 - RNA, 21 nt, Human
uaggaaguuagccuuuaucua

SEQ ID NO: 3730669 - RNA, 17 nt, Human
uaggaaguugacuuaua

SEQ ID NO: 3730670 - RNA, 23 nt, Human
uauccuugggggcucccagggca

SEQ ID NO: 3730671 - RNA, 12 nt, Human
uauccuuucaca

SEQ ID NO: 3730672 - RNA, 18 nt, Human
uauccuuucauauaguua

SEQ ID NO: 3730673 - RNA, 17 nt, Human
uauccuuucuaacaaaa

SEQ ID NO: 3730674 - RNA, 14 nt, Human
uauccuuuucugug

SEQ ID NO: 3730675 - RNA, 16 nt, Human
uauccuuuucuguguu

SEQ ID NO: 3730676 - RNA, 16 nt, Human
uaucgaaauaacaaug

SEQ ID NO: 3730677 - RNA, 16 nt, Human
uaucgaucucuuauuu

SEQ ID NO: 3730678 - RNA, 19 nt, Human
uaucgauguuauguaaaag

SEQ ID NO: 3730679 - RNA, 20 nt, Human
uaucgcugacuucauggaau

SEQ ID NO: 3730680 - RNA, 18 nt, Human
uaucgcuucauguaacua

SEQ ID NO: 3730681 - RNA, 14 nt, Human
uaucggaagcagug

SEQ ID NO: 3730682 - RNA, 16 nt, Human
uaucggagacagugau

SEQ ID NO: 3730683 - RNA, 17 nt, Human
uaucggggaagccagac

SEQ ID NO: 3730684 - RNA, 18 nt, Human
uaucggggaagccagacg

SEQ ID NO: 3730685 - RNA, 12 nt, Human
uaucgggggcug

SEQ ID NO: 3730686 - RNA, 16 nt, Human
uaucgguauaaaggca

SEQ ID NO: 3730687 - RNA, 18 nt, Human
uaucguuuucuuaaagug

SEQ ID NO: 3730688 - RNA, 14 nt, Human
uaucuaaaagaaau

SEQ ID NO: 3730689 - RNA, 12 nt, Human
uaucuaaaguua

SEQ ID NO: 3730690 - RNA, 19 nt, Human
uaucuaaaguuauauuuca

SEQ ID NO: 3730691 - RNA, 20 nt, Human
uaucuaaaguuauauuucag

SEQ ID NO: 3730692 - RNA, 12 nt, Human
uaucuaaaugau

SEQ ID NO: 3730693 - RNA, 12 nt, Human
uaucuaaauuaa

SEQ ID NO: 3730694 - RNA, 17 nt, Human
uaucuaaauugaauaau

SEQ ID NO: 3730695 - RNA, 21 nt, Human
uaucuaaauugaauaauggua

SEQ ID NO: 3730696 - RNA, 13 nt, Human
uaucuaagaauaa

SEQ ID NO: 3730697 - RNA, 15 nt, Human
uaucuaagaauaaua

SEQ ID NO: 3730698 - RNA, 19 nt, Human
uaucuaagaauaauaaaau

SEQ ID NO: 3730699 - RNA, 18 nt, Human
uaucuaagaauacagcuu

SEQ ID NO: 3730700 - RNA, 15 nt, Human
uaucuaauaccucug

SEQ ID NO: 3730701 - RNA, 17 nt, Human
uaucuaauauauaugaa

SEQ ID NO: 3730702 - RNA, 18 nt, Human
uaucuaauauauaugaau

SEQ ID NO: 3730703 - RNA, 21 nt, Human
uaucuaauauguaacaagcca

SEQ ID NO: 3730704 - RNA, 13 nt, Human
uaucuaaucauga

SEQ ID NO: 3730705 - RNA, 13 nt, Human
uaucuaaugacau

SEQ ID NO: 3730706 - RNA, 14 nt, Human
uaucuaauucuuua

SEQ ID NO: 3730707 - RNA, 16 nt, Human
uaucuacaucuuuuuu

SEQ ID NO: 3730708 - RNA, 15 nt, Human
uaucuaccaacuuuc

SEQ ID NO: 3730709 - RNA, 22 nt, Human
uaucuacccaagggcagaaagu

SEQ ID NO: 3730710 - RNA, 14 nt, Human
uaucuacucuccuc

SEQ ID NO: 3730711 - RNA, 20 nt, Human
uaucuacugauaaagaaaga

SEQ ID NO: 3730712 - RNA, 22 nt, Human
uaucuacuuuuacucauaagua

SEQ ID NO: 3730713 - RNA, 19 nt, Human
uaucuagauacuguaucau

SEQ ID NO: 3730714 - RNA, 15 nt, Human
uaucuagauguaaau

SEQ ID NO: 3730715 - RNA, 13 nt, Human
uaucuagcugcau

SEQ ID NO: 3730716 - RNA, 14 nt, Human
uaucuaguaauaua

SEQ ID NO: 3730717 - RNA, 20 nt, Human
uaucuagugcagcugauuuu

SEQ ID NO: 3730718 - RNA, 15 nt, Human
uaucuaguguuugau

SEQ ID NO: 3730719 - RNA, 21 nt, Human
uaucuauauaguaccuuugcu

SEQ ID NO: 3730720 - RNA, 17 nt, Human
uaucuauauauguguau

SEQ ID NO: 3730721 - RNA, 22 nt, Human
uaucuauauauguguauguacg

SEQ ID NO: 3730722 - RNA, 14 nt, Human
uaucuaucuuccaa

SEQ ID NO: 3730723 - RNA, 14 nt, Human
uaucuauguuuuac

SEQ ID NO: 3730724 - RNA, 13 nt, Human
uaucuauuaauau

SEQ ID NO: 3730725 - RNA, 18 nt, Human
uaucuauucugagaaaac

SEQ ID NO: 3730726 - RNA, 19 nt, Human
uaucuauuguaagauaaaa

SEQ ID NO: 3730727 - RNA, 19 nt, Human
uaucuauuuguauauauac

SEQ ID NO: 3730728 - RNA, 20 nt, Human
uaucuauuuguauauauaca

SEQ ID NO: 3730729 - RNA, 17 nt, Human
uaucucaaaacugcacu

SEQ ID NO: 3730730 - RNA, 22 nt, Human
uaucucaaugaaccauaaauuc

SEQ ID NO: 3730731 - RNA, 14 nt, Human
uaucucacagcaca

SEQ ID NO: 3730732 - RNA, 16 nt, Human
uaucucacagcacacu

SEQ ID NO: 3730733 - RNA, 12 nt, Human
uaucucagaaag

SEQ ID NO: 3730734 - RNA, 15 nt, Human
uaucucagggccugg

SEQ ID NO: 3730735 - RNA, 18 nt, Human
uaucucagucaugcauaa

SEQ ID NO: 3730736 - RNA, 14 nt, Human
uaucucaucaacaa

SEQ ID NO: 3730737 - RNA, 23 nt, Human
uaucucaucaacaaagaaauauu

SEQ ID NO: 3730738 - RNA, 11 nt, Human
uaucucaucuc

SEQ ID NO: 3730739 - RNA, 16 nt, Human
uaucuccagcggcccu

SEQ ID NO: 3730740 - RNA, 16 nt, Human
uaucucccccagcccc

SEQ ID NO: 3730741 - RNA, 18 nt, Human
uaucucccccagccccau

SEQ ID NO: 3730742 - RNA, 22 nt, Human
uaucucccugccuccugccggc

SEQ ID NO: 3730743 - RNA, 16 nt, Human
uaucuccggcucccag

SEQ ID NO: 3730744 - RNA, 18 nt, Human
uaucuccucgcaagcugg

SEQ ID NO: 3730745 - RNA, 14 nt, Human
uaucuccugacaga

SEQ ID NO: 3730746 - RNA, 20 nt, Human
uaucucuacugaaugucauu

SEQ ID NO: 3730747 - RNA, 16 nt, Human
uaucucuauuuaauau

SEQ ID NO: 3730748 - RNA, 12 nt, Human
uaucucucugug

SEQ ID NO: 3730749 - RNA, 17 nt, Human
uaucucugaagcauguu

SEQ ID NO: 3730750 - RNA, 18 nt, Human
uaucucugaagcauguuu

SEQ ID NO: 3730751 - RNA, 18 nt, Human
uaucucugaguucugugu

SEQ ID NO: 3730752 - RNA, 16 nt, Human
uaucucugugugcaca

SEQ ID NO: 3730753 - RNA, 23 nt, Human
uaucucugugugcacaaauauuu

SEQ ID NO: 3730754 - RNA, 14 nt, Human
uaucucuucagucu

SEQ ID NO: 3730755 - RNA, 16 nt, Human
uaucucuuuuauauuu

SEQ ID NO: 3730756 - RNA, 14 nt, Human
uaucugaaaacugg

SEQ ID NO: 3730757 - RNA, 16 nt, Human
uaucugaaaacuggaa

SEQ ID NO: 3730758 - RNA, 20 nt, Human
uaucugaaaauguaugugua

SEQ ID NO: 3730759 - RNA, 14 nt, Human
uaucugaacauuua

SEQ ID NO: 3730760 - RNA, 15 nt, Human
uaucugaacauuuac

SEQ ID NO: 3730761 - RNA, 18 nt, Human
uaucugacaucucugcaa

SEQ ID NO: 3730762 - RNA, 19 nt, Human
uaucugagcucuuugcacu

SEQ ID NO: 3730763 - RNA, 16 nt, Human
uaucugaggaauucug

SEQ ID NO: 3730764 - RNA, 17 nt, Human
uaucugaggaauucugu

SEQ ID NO: 3730765 - RNA, 21 nt, Human
uaucugaggaauucuguauag

SEQ ID NO: 3730766 - RNA, 13 nt, Human
uaucugaggucac

SEQ ID NO: 3730767 - RNA, 18 nt, Human
uaucugaguugccaagac

SEQ ID NO: 3730768 - RNA, 13 nt, Human
uaucugaucagaa

SEQ ID NO: 3730769 - RNA, 18 nt, Human
uaucugcaggcagacacg

SEQ ID NO: 3730770 - RNA, 21 nt, Human
uaucugcaggcagacacggau

SEQ ID NO: 3730771 - RNA, 14 nt, Human
uaucugccuuuauu

SEQ ID NO: 3730772 - RNA, 20 nt, Human
uaucugcuucaguggagaau

SEQ ID NO: 3730773 - RNA, 16 nt, Human
uaucuggaaugagccu

SEQ ID NO: 3730774 - RNA, 20 nt, Human
uaucuggaggccuuccagcu

SEQ ID NO: 3730775 - RNA, 19 nt, Human
uaucuggccauauuuacua

SEQ ID NO: 3730776 - RNA, 22 nt, Human
uaucuggccccagguagaaacu

SEQ ID NO: 3730777 - RNA, 18 nt, Human
uaucuggccuaaaaucuu

SEQ ID NO: 3730778 - RNA, 18 nt, Human
uaucugggaacugugccu

SEQ ID NO: 3730779 - RNA, 23 nt, Human
uaucugggaagcuauuuuuuuca

SEQ ID NO: 3730780 - RNA, 18 nt, Human
uaucugggcuuccuggag

SEQ ID NO: 3730781 - RNA, 22 nt, Human
uaucuggucaaccuccuggaca

SEQ ID NO: 3730782 - RNA, 15 nt, Human
uaucuguaagagugu

SEQ ID NO: 3730783 - RNA, 13 nt, Human
uaucuguaauggu

SEQ ID NO: 3730784 - RNA, 21 nt, Human
uaucuguagacggcucaguau

SEQ ID NO: 3730785 - RNA, 15 nt, Human
uaucugucagcugca

SEQ ID NO: 3730786 - RNA, 14 nt, Human
uaucugucuuucca

SEQ ID NO: 3730787 - RNA, 16 nt, Human
uaucugugaaauauca

SEQ ID NO: 3730788 - RNA, 17 nt, Human
uaucugugaaauaucau

SEQ ID NO: 3730789 - RNA, 19 nt, Human
uaucugugaaaugcuggca

SEQ ID NO: 3730790 - RNA, 22 nt, Human
uaucugugcucaggacucagaa

SEQ ID NO: 3730791 - RNA, 13 nt, Human
uaucuguggucuu

SEQ ID NO: 3730792 - RNA, 17 nt, Human
uaucuguguuuuugaaa

SEQ ID NO: 3730793 - RNA, 20 nt, Human
uaucuguguuuuugaaauau

SEQ ID NO: 3730794 - RNA, 12 nt, Human
uaucuguucuug

SEQ ID NO: 3730795 - RNA, 19 nt, Human
uaucuguucuuuaauuuau

SEQ ID NO: 3730796 - RNA, 20 nt, Human
uaucuguucuuuaauuuauu

SEQ ID NO: 3730797 - RNA, 18 nt, Human
uaucuguuuaaagcauau

SEQ ID NO: 3730798 - RNA, 19 nt, Human
uaucuguuuuacugcuuuu

SEQ ID NO: 3730799 - RNA, 20 nt, Human
uaucuguuuuacugcuuuua

SEQ ID NO: 3730800 - RNA, 18 nt, Human
uaucuuaucucagauauu

SEQ ID NO: 3730801 - RNA, 15 nt, Human
uaucuucacauaguu

SEQ ID NO: 3730802 - RNA, 14 nt, Human
uaucuucacuuguc

SEQ ID NO: 3730803 - RNA, 16 nt, Human
uaucuucauguaaauu

SEQ ID NO: 3730804 - RNA, 18 nt, Human
uaucuucauguaaauuga

SEQ ID NO: 3730805 - RNA, 21 nt, Human
uaucuucguuaguaaucugua

SEQ ID NO: 3730806 - RNA, 17 nt, Human
uaucuucucaaguucua

SEQ ID NO: 3730807 - RNA, 21 nt, Human
uaucuucucaaguucuaagau

SEQ ID NO: 3730808 - RNA, 17 nt, Human
uaucuucugcucuuucu

SEQ ID NO: 3730809 - RNA, 14 nt, Human
uaucuugaaggaaa

SEQ ID NO: 3730810 - RNA, 15 nt, Human
uaucuugauacauuc

SEQ ID NO: 3730811 - RNA, 16 nt, Human
uaucuugauacauuca

SEQ ID NO: 3730812 - RNA, 17 nt, Human
uaucuugauacauucaa

SEQ ID NO: 3730813 - RNA, 18 nt, Human
uaucuugauacauucaaa

SEQ ID NO: 3730814 - RNA, 20 nt, Human
uaucuugcuugaacuuacag

SEQ ID NO: 3730815 - RNA, 17 nt, Human
uaucuuggacaaaucac

SEQ ID NO: 3730816 - RNA, 20 nt, Human
uaucuuggacugacauuuag

SEQ ID NO: 3730817 - RNA, 16 nt, Human
uaucuuguagcuuuau

SEQ ID NO: 3730818 - RNA, 17 nt, Human
uaucuugucucugggcu

SEQ ID NO: 3730819 - RNA, 18 nt, Human
uaucuuguguuguccuuu

SEQ ID NO: 3730820 - RNA, 14 nt, Human
uaucuuguuuuucc

SEQ ID NO: 3730821 - RNA, 14 nt, Human
uaggaauauuauau

SEQ ID NO: 3730822 - RNA, 19 nt, Human
uaggaauucuuuuggggaa

SEQ ID NO: 3730823 - RNA, 12 nt, Human
uaggaauugacc

SEQ ID NO: 3730824 - RNA, 19 nt, Human
uaggacaagggaaaauaaa

SEQ ID NO: 3730825 - RNA, 19 nt, Human
uaggacaaggugcaggcag

SEQ ID NO: 3730826 - RNA, 20 nt, Human
uaggacauaaauuagagguc

SEQ ID NO: 3730827 - RNA, 20 nt, Human
uaggacauguucccuucucc

SEQ ID NO: 3730828 - RNA, 15 nt, Human
uaggaccacucagcc

SEQ ID NO: 3730829 - RNA, 14 nt, Human
uaggacccaagcag

SEQ ID NO: 3730830 - RNA, 15 nt, Human
uaggacgccacccag

SEQ ID NO: 3730831 - RNA, 18 nt, Human
uaggacucugaggcucuu

SEQ ID NO: 3730832 - RNA, 13 nt, Human
uaggacuguagaa

SEQ ID NO: 3730833 - RNA, 20 nt, Human
uaggagaaccaaaucuggaa

SEQ ID NO: 3730834 - RNA, 17 nt, Human
uaggagacuugccagag

SEQ ID NO: 3730835 - RNA, 17 nt, Human
uaggagcaaagccuguu

SEQ ID NO: 3730836 - RNA, 12 nt, Human
uaggagcaugag

SEQ ID NO: 3730837 - RNA, 11 nt, Human
uaggagccugc

SEQ ID NO: 3730838 - RNA, 14 nt, Human
uaggagcuaaggcu

SEQ ID NO: 3730839 - RNA, 16 nt, Human
uaggagcugagguuuc

SEQ ID NO: 3730840 - RNA, 18 nt, Human
uaggagcugccuuggcuc

SEQ ID NO: 3730841 - RNA, 23 nt, Human
uaggagcuuugacucaggagccu

SEQ ID NO: 3730842 - RNA, 20 nt, Human
uaggaggaccagagcuacug

SEQ ID NO: 3730843 - RNA, 16 nt, Human
uaggagggaguuaucu

SEQ ID NO: 3730844 - RNA, 17 nt, Human
uaggagugugugauuuu

SEQ ID NO: 3730845 - RNA, 22 nt, Human
uaggaguuaaccccugcgcucu

SEQ ID NO: 3730846 - RNA, 21 nt, Human
uaggaguucacuucaucuucu

SEQ ID NO: 3730847 - RNA, 16 nt, Human
uaggauaaaaagccag

SEQ ID NO: 3730848 - RNA, 23 nt, Human
uaggauaaaaagccagggcugga

SEQ ID NO: 3730849 - RNA, 13 nt, Human
uaggauagcauuu

SEQ ID NO: 3730850 - RNA, 19 nt, Human
uaggauagcuaacuguaaa

SEQ ID NO: 3730851 - RNA, 20 nt, Human
uaggaucauuuguuggaaug

SEQ ID NO: 3730852 - RNA, 20 nt, Human
uaggaucuaaggcuguuugc

SEQ ID NO: 3730853 - RNA, 21 nt, Human
uaggaucuaaggcuguuugcu

SEQ ID NO: 3730854 - RNA, 16 nt, Human
uaggaugguaaaguua

SEQ ID NO: 3730855 - RNA, 13 nt, Human
uaggauguugaaa

SEQ ID NO: 3730856 - RNA, 13 nt, Human
uaggauguuuuuc

SEQ ID NO: 3730857 - RNA, 21 nt, Human
uaggauucacaccccaccugc

SEQ ID NO: 3730858 - RNA, 12 nt, Human
uaggauucuaaa

SEQ ID NO: 3730859 - RNA, 14 nt, Human
uaggauucuaaaau

SEQ ID NO: 3730860 - RNA, 21 nt, Human
uaggauuuaacagucauuuaa

SEQ ID NO: 3730861 - RNA, 16 nt, Human
uaggauuuauuuaaaa

SEQ ID NO: 3730862 - RNA, 21 nt, Human
uaggauuuauuuaaaauagca

SEQ ID NO: 3730863 - RNA, 13 nt, Human
uaggauuuucaca

SEQ ID NO: 3730864 - RNA, 14 nt, Human
uaggauuuuuagaa

SEQ ID NO: 3730865 - RNA, 19 nt, Human
uaggcaagauggcacaggg

SEQ ID NO: 3730866 - RNA, 18 nt, Human
uaggcacccauccuagag

SEQ ID NO: 3730867 - RNA, 19 nt, Human
uaggcacccauccuagaga

SEQ ID NO: 3730868 - RNA, 20 nt, Human
uaggcacuguaguucuaaga

SEQ ID NO: 3730869 - RNA, 21 nt, Human
uaggcacuguaguucuaagac

SEQ ID NO: 3730870 - RNA, 22 nt, Human
uaggcacuguaguucuaagacu

SEQ ID NO: 3730871 - RNA, 11 nt, Human
uaggcagacac

SEQ ID NO: 3730872 - RNA, 22 nt, Human
uaggcagacacagggacuugaa

SEQ ID NO: 3730873 - RNA, 17 nt, Human
uaggcagacuggguuuc

SEQ ID NO: 3730874 - RNA, 12 nt, Human
uaggcagagccu

SEQ ID NO: 3730875 - RNA, 16 nt, Human
uaggcagccugagagu

SEQ ID NO: 3730876 - RNA, 15 nt, Human
uaggcaggaccugug

SEQ ID NO: 3730877 - RNA, 24 nt, Human
uaggcaguaggccggugugccuga

SEQ ID NO: 3730878 - RNA, 16 nt, Human
uaggcaguauaaagaa

SEQ ID NO: 3730879 - RNA, 19 nt, Human
uaggcaucccaggggacca

SEQ ID NO: 3730880 - RNA, 16 nt, Human
uaggcauuaacacaaa

SEQ ID NO: 3730881 - RNA, 18 nt, Human
uaggcauuaacacaaagg

SEQ ID NO: 3730882 - RNA, 12 nt, Human
uaggcauuuccu

SEQ ID NO: 3730883 - RNA, 16 nt, Human
uaggcauuugcugaau

SEQ ID NO: 3730884 - RNA, 13 nt, Human
uaggcauuuguaa

SEQ ID NO: 3730885 - RNA, 14 nt, Human
uaggcauuuguaaa

SEQ ID NO: 3730886 - RNA, 21 nt, Human
uaggcauuuguaaauauuaaa

SEQ ID NO: 3730887 - RNA, 21 nt, Human
uaggcauuuuuaccaucacug

SEQ ID NO: 3730888 - RNA, 18 nt, Human
uaggccaaagacaaauag

SEQ ID NO: 3730889 - RNA, 14 nt, Human
uaggccacuccucc

SEQ ID NO: 3730890 - RNA, 17 nt, Human
uaggccagagcccacuc

SEQ ID NO: 3730891 - RNA, 22 nt, Human
uaggccagccgcgcaucagacu

SEQ ID NO: 3730892 - RNA, 22 nt, Human
uaggccaggugcaaccagggag

SEQ ID NO: 3730893 - RNA, 16 nt, Human
uaggccaugggacagg

SEQ ID NO: 3730894 - RNA, 13 nt, Human
uaggcccacacac

SEQ ID NO: 3730895 - RNA, 14 nt, Human
uaggcccacacaca

SEQ ID NO: 3730896 - RNA, 17 nt, Human
uaggcccacacacaggu

SEQ ID NO: 3730897 - RNA, 14 nt, Human
uaggcccccacuug

SEQ ID NO: 3730898 - RNA, 19 nt, Human
uaggcccggagcugccccu

SEQ ID NO: 3730899 - RNA, 14 nt, Human
uaggccucagccag

SEQ ID NO: 3730900 - RNA, 14 nt, Human
uaggccuggccaga

SEQ ID NO: 3730901 - RNA, 16 nt, Human
uaggccugggugcugg

SEQ ID NO: 3730902 - RNA, 13 nt, Human
uaggccuucuugu

SEQ ID NO: 3730903 - RNA, 19 nt, Human
uaggccuucuugugaucuu

SEQ ID NO: 3730904 - RNA, 21 nt, Human
uaggccuugcggcuccucagg

SEQ ID NO: 3730905 - RNA, 24 nt, Human
uaggccuugcggcuccucagggac

SEQ ID NO: 3730906 - RNA, 18 nt, Human
uaggccuuuuaacauuuu

SEQ ID NO: 3730907 - RNA, 16 nt, Human
uaggcgugagaagcau

SEQ ID NO: 3730908 - RNA, 13 nt, Human
uaggcuacagaga

SEQ ID NO: 3730909 - RNA, 15 nt, Human
uaggcuacagagaag

SEQ ID NO: 3730910 - RNA, 18 nt, Human
uaggcuacagagaagccu

SEQ ID NO: 3730911 - RNA, 17 nt, Human
uaggcuauuaaaaaagu

SEQ ID NO: 3730912 - RNA, 18 nt, Human
uaggcuauuuguaaaucu

SEQ ID NO: 3730913 - RNA, 20 nt, Human
uaggcuccuucaacaaggcu

SEQ ID NO: 3730914 - RNA, 15 nt, Human
uaggcucugcacaga

SEQ ID NO: 3730915 - RNA, 20 nt, Human
uaggcucugcacagauggau

SEQ ID NO: 3730916 - RNA, 12 nt, Human
uaggcucugccu

SEQ ID NO: 3730917 - RNA, 17 nt, Human
uaggcucugccugacag

SEQ ID NO: 3730918 - RNA, 18 nt, Human
uaggcuggaaggaggaag

SEQ ID NO: 3730919 - RNA, 14 nt, Human
uaggcuggagaagc

SEQ ID NO: 3730920 - RNA, 16 nt, Human
uaggcuggagcccagg

SEQ ID NO: 3730921 - RNA, 16 nt, Human
uaggcugggcccagag

SEQ ID NO: 3730922 - RNA, 18 nt, Human
uaggcugggugcccacag

SEQ ID NO: 3730923 - RNA, 15 nt, Human
uaggcugguggccca

SEQ ID NO: 3730924 - RNA, 18 nt, Human
uaggcugguggcccagga

SEQ ID NO: 3730925 - RNA, 19 nt, Human
uaggcugguggcccaggac

SEQ ID NO: 3730926 - RNA, 14 nt, Human
uaggcuuuacuuag

SEQ ID NO: 3730927 - RNA, 14 nt, Human
uaggcuuuuuaauc

SEQ ID NO: 3730928 - RNA, 11 nt, Human
uagggaaaaac

SEQ ID NO: 3730929 - RNA, 19 nt, Human
uagggaaaaaccagcgugu

SEQ ID NO: 3730930 - RNA, 16 nt, Human
uagggaaaaguucaua

SEQ ID NO: 3730931 - RNA, 13 nt, Human
uagggaaagaaag

SEQ ID NO: 3730932 - RNA, 14 nt, Human
uagggaacaauuug

SEQ ID NO: 3730933 - RNA, 13 nt, Human
uagggaagagaaa

SEQ ID NO: 3730934 - RNA, 15 nt, Human
uagggaagagaaaca

SEQ ID NO: 3730935 - RNA, 19 nt, Human
uagggaagcuggccugaga

SEQ ID NO: 3730936 - RNA, 21 nt, Human
uagggacaggaccccagcucu

SEQ ID NO: 3730937 - RNA, 14 nt, Human
uagggaccagaacc

SEQ ID NO: 3730938 - RNA, 15 nt, Human
uagggaccagaacca

SEQ ID NO: 3730939 - RNA, 16 nt, Human
uagggaccccuccucc

SEQ ID NO: 3730940 - RNA, 17 nt, Human
uagggaccccuccuccc

SEQ ID NO: 3730941 - RNA, 16 nt, Human
uagggaccuggggaag

SEQ ID NO: 3730942 - RNA, 14 nt, Human
uagggacuuaaaaa

SEQ ID NO: 3730943 - RNA, 17 nt, Human
uagggagagucauauuu

SEQ ID NO: 3730944 - RNA, 23 nt, Human
uagggaggaccagggcagggcca

SEQ ID NO: 3730945 - RNA, 17 nt, Human
uagggaggcagccucca

SEQ ID NO: 3730946 - RNA, 17 nt, Human
uagggaucccucaucug

SEQ ID NO: 3730947 - RNA, 14 nt, Human
uagggaugccuccu

SEQ ID NO: 3730948 - RNA, 15 nt, Human
uagggaugccuccuu

SEQ ID NO: 3730949 - RNA, 19 nt, Human
uagggauggggcugugggg

SEQ ID NO: 3730950 - RNA, 18 nt, Human
uagggauuuauuuucaau

SEQ ID NO: 3730951 - RNA, 18 nt, Human
uagggcaauuaauuccuu

SEQ ID NO: 3730952 - RNA, 21 nt, Human
uagggcaauuaauuccuucag

SEQ ID NO: 3730953 - RNA, 14 nt, Human
uagggcacugggcu

SEQ ID NO: 3730954 - RNA, 15 nt, Human
uagggcagcuugccc

SEQ ID NO: 3730955 - RNA, 19 nt, Human
uagggcauaaugaugaugg

SEQ ID NO: 3730956 - RNA, 23 nt, Human
uagggccaagcccagcacugcuu

SEQ ID NO: 3730957 - RNA, 21 nt, Human
uagggccaggcaggugccugg

SEQ ID NO: 3730958 - RNA, 16 nt, Human
uagggcccuggaggcg

SEQ ID NO: 3730959 - RNA, 21 nt, Human
uagggccuggucccugggagg

SEQ ID NO: 3730960 - RNA, 13 nt, Human
uagggccuugguu

SEQ ID NO: 3730961 - RNA, 16 nt, Human
uagggcucuaauuucc

SEQ ID NO: 3730962 - RNA, 19 nt, Human
uagggcugggcaaggaaaa

SEQ ID NO: 3730963 - RNA, 12 nt, Human
uagggcugggug

SEQ ID NO: 3730964 - RNA, 14 nt, Human
uagggcuuaguguu

SEQ ID NO: 3730965 - RNA, 14 nt, Human
uaggggaaugaggg

SEQ ID NO: 3730966 - RNA, 13 nt, Human
uaggggagcaggg

SEQ ID NO: 3730967 - RNA, 18 nt, Human
uaggggaggggcuccuuu

SEQ ID NO: 3730968 - RNA, 23 nt, Human
uaggggagggguugccacaggcc

SEQ ID NO: 3730969 - RNA, 22 nt, Human
uaggggcuuauaauaaaggacu

SEQ ID NO: 3730970 - RNA, 20 nt, Human
uagggggcuggaggagccca

SEQ ID NO: 3730971 - RNA, 16 nt, Human
uagggguaccacugaa

SEQ ID NO: 3730972 - RNA, 15 nt, Human
uaucuuuauuaauca

SEQ ID NO: 3730973 - RNA, 16 nt, Human
uaucuuugauucuccu

SEQ ID NO: 3730974 - RNA, 17 nt, Human
uaucuuugauucuccuu

SEQ ID NO: 3730975 - RNA, 18 nt, Human
uaucuuugauucuccuuc

SEQ ID NO: 3730976 - RNA, 19 nt, Human
uaucuuugauucuccuuca

SEQ ID NO: 3730977 - RNA, 16 nt, Human
uaucuuugccacccuc

SEQ ID NO: 3730978 - RNA, 22 nt, Human
uaucuuugccacccucaugcug

SEQ ID NO: 3730979 - RNA, 16 nt, Human
uaucuuuuauguuuga

SEQ ID NO: 3730980 - RNA, 21 nt, Human
uaucuuuucauacauuuucua

SEQ ID NO: 3730981 - RNA, 23 nt, Human
uaucuuuucauacauuuucuaag

SEQ ID NO: 3730982 - RNA, 23 nt, Human
uaucuuuucuauuguuuauucuu

SEQ ID NO: 3730983 - RNA, 22 nt, Human
uaucuuuucuuuagagaacuga

SEQ ID NO: 3730984 - RNA, 15 nt, Human
uaugaaaaagaagaa

SEQ ID NO: 3730985 - RNA, 20 nt, Human
uaugaaaacauggaacagug

SEQ ID NO: 3730986 - RNA, 17 nt, Human
uaugaaaacuauacaac

SEQ ID NO: 3730987 - RNA, 13 nt, Human
uaugaaaacuuau

SEQ ID NO: 3730988 - RNA, 20 nt, Human
uaugaaagauggcugugccu

SEQ ID NO: 3730989 - RNA, 17 nt, Human
uaugaaagauugugggg

SEQ ID NO: 3730990 - RNA, 21 nt, Human
uaugaaauauuauguuaaaac

SEQ ID NO: 3730991 - RNA, 23 nt, Human
uaugaacccuuccugagcuuuau

SEQ ID NO: 3730992 - RNA, 16 nt, Human
uaugaacccuuuguuu

SEQ ID NO: 3730993 - RNA, 18 nt, Human
uaugaacggugagcauug

SEQ ID NO: 3730994 - RNA, 15 nt, Human
uaugaacugcaugua

SEQ ID NO: 3730995 - RNA, 15 nt, Human
uaugaacuuaacaug

SEQ ID NO: 3730996 - RNA, 19 nt, Human
uaugaacuuaacaugcugu

SEQ ID NO: 3730997 - RNA, 16 nt, Human
uaugaacuugaggaca

SEQ ID NO: 3730998 - RNA, 18 nt, Human
uaugaacuugaggacaca

SEQ ID NO: 3730999 - RNA, 19 nt, Human
uaugaacuugaggacacau

SEQ ID NO: 3731000 - RNA, 23 nt, Human
uaugaacuugaggacacaugucc

SEQ ID NO: 3731001 - RNA, 20 nt, Human
uaugaacuuuauaguuguuu

SEQ ID NO: 3731002 - RNA, 16 nt, Human
uaugaagaaaauacuu

SEQ ID NO: 3731003 - RNA, 18 nt, Human
uaugaagaaacgcaacaa

SEQ ID NO: 3731004 - RNA, 17 nt, Human
uaugaagcucaccuguu

SEQ ID NO: 3731005 - RNA, 20 nt, Human
uaugaagcuuuuaugugaaa

SEQ ID NO: 3731006 - RNA, 21 nt, Human
uaugaaggcuguacacugcac

SEQ ID NO: 3731007 - RNA, 20 nt, Human
uaugaaguaaagaacugcac

SEQ ID NO: 3731008 - RNA, 23 nt, Human
uaugaaguaaagaacugcacaug

SEQ ID NO: 3731009 - RNA, 14 nt, Human
uaugaaguauauaa

SEQ ID NO: 3731010 - RNA, 16 nt, Human
uaugaaguaucuaaaa

SEQ ID NO: 3731011 - RNA, 20 nt, Human
uaugaaguaucuaaaagugu

SEQ ID NO: 3731012 - RNA, 21 nt, Human
uaugaaguuacuuucuuaaug

SEQ ID NO: 3731013 - RNA, 18 nt, Human
uaugaaguuuaaaacagu

SEQ ID NO: 3731014 - RNA, 12 nt, Human
uaugaauaaagu

SEQ ID NO: 3731015 - RNA, 16 nt, Human
uaugaauacagcagca

SEQ ID NO: 3731016 - RNA, 15 nt, Human
uaugaauacuuugca

SEQ ID NO: 3731017 - RNA, 13 nt, Human
uaugaaucuaugc

SEQ ID NO: 3731018 - RNA, 21 nt, Human
uaugaaucuaugccaaagauc

SEQ ID NO: 3731019 - RNA, 21 nt, Human
uaugaaucuauuauacuguau

SEQ ID NO: 3731020 - RNA, 23 nt, Human
uaugaaucuauuauacuguauua

SEQ ID NO: 3731021 - RNA, 23 nt, Human
uaugaaucugcucacuuuaaacc

SEQ ID NO: 3731022 - RNA, 16 nt, Human
uaugaaugauuugcau

SEQ ID NO: 3731023 - RNA, 23 nt, Human
uaugaauguacugcauguuacca

SEQ ID NO: 3731024 - RNA, 15 nt, Human
uaugaaugugaagcc

SEQ ID NO: 3731025 - RNA, 16 nt, Human
uaugaaugugaagccu

SEQ ID NO: 3731026 - RNA, 19 nt, Human
uaugaaugugaagccuucc

SEQ ID NO: 3731027 - RNA, 23 nt, Human
uaugaauuacauuuguauaaaau

SEQ ID NO: 3731028 - RNA, 18 nt, Human
uaugaauugaauuaucuu

SEQ ID NO: 3731029 - RNA, 20 nt, Human
uaugaauuuaaauauaauuc

SEQ ID NO: 3731030 - RNA, 22 nt, Human
uaugacaguaauuguguuuaca

SEQ ID NO: 3731031 - RNA, 23 nt, Human
uaugacaguaauuguguuuacau

SEQ ID NO: 3731032 - RNA, 19 nt, Human
uaugacauucaugccuggc

SEQ ID NO: 3731033 - RNA, 19 nt, Human
uaugaccacacuccagcug

SEQ ID NO: 3731034 - RNA, 23 nt, Human
uaugacgcugauacauaacuaaa

SEQ ID NO: 3731035 - RNA, 19 nt, Human
uaugacggaagaacauaga

SEQ ID NO: 3731036 - RNA, 17 nt, Human
uaugacuaaagagagaa

SEQ ID NO: 3731037 - RNA, 19 nt, Human
uaugacuaaagagagaaug

SEQ ID NO: 3731038 - RNA, 20 nt, Human
uaugacuaaagagagaaugu

SEQ ID NO: 3731039 - RNA, 17 nt, Human
uaugacuauguaaacua

SEQ ID NO: 3731040 - RNA, 16 nt, Human
uaugacucccaaauuu

SEQ ID NO: 3731041 - RNA, 22 nt, Human
uaugacugcuccccagcccugg

SEQ ID NO: 3731042 - RNA, 19 nt, Human
uaugacuuuuuauaaaaug

SEQ ID NO: 3731043 - RNA, 23 nt, Human
uaugagaaaagaggcgucuguau

SEQ ID NO: 3731044 - RNA, 14 nt, Human
uaugagaaauguaa

SEQ ID NO: 3731045 - RNA, 15 nt, Human
uaugagaggcaauga

SEQ ID NO: 3731046 - RNA, 14 nt, Human
uaugagauacuuug

SEQ ID NO: 3731047 - RNA, 16 nt, Human
uaugagauacuuugca

SEQ ID NO: 3731048 - RNA, 21 nt, Human
uaugagauugguuuuccugug

SEQ ID NO: 3731049 - RNA, 13 nt, Human
uaugagcauccug

SEQ ID NO: 3731050 - RNA, 20 nt, Human
uaugagccgugaacugugca

SEQ ID NO: 3731051 - RNA, 12 nt, Human
uaugagcugagg

SEQ ID NO: 3731052 - RNA, 23 nt, Human
uaugagcuggggaugucucucau

SEQ ID NO: 3731053 - RNA, 18 nt, Human
uaugagcuuccuucugug

SEQ ID NO: 3731054 - RNA, 17 nt, Human
uaugaggaauaauuauu

SEQ ID NO: 3731055 - RNA, 17 nt, Human
uaugaggacuugugucu

SEQ ID NO: 3731056 - RNA, 19 nt, Human
uaugaggcaaccugauugu

SEQ ID NO: 3731057 - RNA, 22 nt, Human
uaugaggcaaccugauuguaaa

SEQ ID NO: 3731058 - RNA, 16 nt, Human
uaugaggcauuuggca

SEQ ID NO: 3731059 - RNA, 23 nt, Human
uaugaggcauuuguuugaacuga

SEQ ID NO: 3731060 - RNA, 16 nt, Human
uaugaguauacaauau

SEQ ID NO: 3731061 - RNA, 18 nt, Human
uaugaguggaaaaagcca

SEQ ID NO: 3731062 - RNA, 18 nt, Human
uaugaguuguuuucagac

SEQ ID NO: 3731063 - RNA, 21 nt, Human
uaugaguuucauagcuaagaa

SEQ ID NO: 3731064 - RNA, 23 nt, Human
uaugaguuuuugauagcuuuauu

SEQ ID NO: 3731065 - RNA, 19 nt, Human
uaugauaaaaaauuuugua

SEQ ID NO: 3731066 - RNA, 21 nt, Human
uaugauaaaaaauuuuguaau

SEQ ID NO: 3731067 - RNA, 13 nt, Human
uaugauaaauuug

SEQ ID NO: 3731068 - RNA, 15 nt, Human
uaugauaauagauuc

SEQ ID NO: 3731069 - RNA, 17 nt, Human
uaugauaauagauucuc

SEQ ID NO: 3731070 - RNA, 20 nt, Human
uaugauacuucgacacuguu

SEQ ID NO: 3731071 - RNA, 12 nt, Human
uaugaucaaaug

SEQ ID NO: 3731072 - RNA, 23 nt, Human
uaugaucacggcucacugcagcc

SEQ ID NO: 3731073 - RNA, 13 nt, Human
uaugaucaguguu

SEQ ID NO: 3731074 - RNA, 15 nt, Human
uaugaucccagcacu

SEQ ID NO: 3731075 - RNA, 15 nt, Human
uaugaucgcgccacu

SEQ ID NO: 3731076 - RNA, 19 nt, Human
uaugaucucagguucuccu

SEQ ID NO: 3731077 - RNA, 21 nt, Human
uaugaugaaaaccuacauauu

SEQ ID NO: 3731078 - RNA, 21 nt, Human
uaugaugacucccuuaaaaua

SEQ ID NO: 3731079 - RNA, 22 nt, Human
uaugaugauacaagauuagaag

SEQ ID NO: 3731080 - RNA, 15 nt, Human
uaugaugcuguugcc

SEQ ID NO: 3731081 - RNA, 17 nt, Human
uaugauguguugugaua

SEQ ID NO: 3731082 - RNA, 18 nt, Human
uaugauguguugugauag

SEQ ID NO: 3731083 - RNA, 21 nt, Human
uaugauuaaaaauaucaaauu

SEQ ID NO: 3731084 - RNA, 22 nt, Human
uaugauuacuggccuuuuucau

SEQ ID NO: 3731085 - RNA, 12 nt, Human
uaugauuauuaa

SEQ ID NO: 3731086 - RNA, 16 nt, Human
uaugauucaaaugucu

SEQ ID NO: 3731087 - RNA, 16 nt, Human
uaugauucccagccag

SEQ ID NO: 3731088 - RNA, 21 nt, Human
uaugauuguuucucaaaucuu

SEQ ID NO: 3731089 - RNA, 14 nt, Human
uaugauuuaaaaca

SEQ ID NO: 3731090 - RNA, 18 nt, Human
uaugauuuaauaaaauaa

SEQ ID NO: 3731091 - RNA, 18 nt, Human
uaugauuuaauuugaaau

SEQ ID NO: 3731092 - RNA, 20 nt, Human
uaugauuuauaaacagacaa

SEQ ID NO: 3731093 - RNA, 15 nt, Human
uaugauuuauaguuu

SEQ ID NO: 3731094 - RNA, 22 nt, Human
uaugauuucacuagaaaagcug

SEQ ID NO: 3731095 - RNA, 16 nt, Human
uaugauuuucauaacu

SEQ ID NO: 3731096 - RNA, 16 nt, Human
uaugauuuuuuaaaag

SEQ ID NO: 3731097 - RNA, 17 nt, Human
uaugauuuuuuaaaaga

SEQ ID NO: 3731098 - RNA, 19 nt, Human
uaugauuuuuuuuucauac

SEQ ID NO: 3731099 - RNA, 14 nt, Human
uaugcaaaagcaag

SEQ ID NO: 3731100 - RNA, 11 nt, Human
uaugcaaaagg

SEQ ID NO: 3731101 - RNA, 13 nt, Human
uaugcaaagcacu

SEQ ID NO: 3731102 - RNA, 15 nt, Human
uaugcaaagcacuga

SEQ ID NO: 3731103 - RNA, 12 nt, Human
uaugcaauaaaa

SEQ ID NO: 3731104 - RNA, 18 nt, Human
uaugcaaucaaaucugcu

SEQ ID NO: 3731105 - RNA, 22 nt, Human
uaugcaauggauuuucaaccag

SEQ ID NO: 3731106 - RNA, 20 nt, Human
uaugcacaauuccaugacaa

SEQ ID NO: 3731107 - RNA, 14 nt, Human
uaugcacaguaaaa

SEQ ID NO: 3731108 - RNA, 20 nt, Human
uaugcacauauggacucugc

SEQ ID NO: 3731109 - RNA, 18 nt, Human
uaugcaccuugugucugu

SEQ ID NO: 3731110 - RNA, 15 nt, Human
uaugcacgaccuugg

SEQ ID NO: 3731111 - RNA, 17 nt, Human
uaugcacuaagucucuu

SEQ ID NO: 3731112 - RNA, 20 nt, Human
uaugcacuuauaauuuuccu

SEQ ID NO: 3731113 - RNA, 16 nt, Human
uaugcagaauggcauu

SEQ ID NO: 3731114 - RNA, 15 nt, Human
uauuauauaaacuuu

SEQ ID NO: 3731115 - RNA, 13 nt, Human
uauuauauacaua

SEQ ID NO: 3731116 - RNA, 14 nt, Human
uauuauauguucua

SEQ ID NO: 3731117 - RNA, 17 nt, Human
uauuauauucauucuuu

SEQ ID NO: 3731118 - RNA, 11 nt, Human
uauuauauuug

SEQ ID NO: 3731119 - RNA, 16 nt, Human
uauuauauuuggaugc

SEQ ID NO: 3731120 - RNA, 20 nt, Human
uauuaucaaagggauaaaga

SEQ ID NO: 3731121 - RNA, 15 nt, Human
uauuaucaacaauag

SEQ ID NO: 3731122 - RNA, 14 nt, Human
uauuaucaaguaga

SEQ ID NO: 3731123 - RNA, 22 nt, Human
uauuaucaaguagacuacuguu

SEQ ID NO: 3731124 - RNA, 20 nt, Human
uauuaucaggggagaaaaau

SEQ ID NO: 3731125 - RNA, 18 nt, Human
uauuaucaugcaaaugcu

SEQ ID NO: 3731126 - RNA, 21 nt, Human
uauuauccuagauuauaucaa

SEQ ID NO: 3731127 - RNA, 23 nt, Human
uauuauccuagauuauaucaaag

SEQ ID NO: 3731128 - RNA, 18 nt, Human
uauuaucuuguucaggaa

SEQ ID NO: 3731129 - RNA, 21 nt, Human
uauuaucuuguucaggaaaag

SEQ ID NO: 3731130 - RNA, 12 nt, Human
uauuaucuuuaa

SEQ ID NO: 3731131 - RNA, 19 nt, Human
uauuaucuuuucauacauu

SEQ ID NO: 3731132 - RNA, 21 nt, Human
uauuaugaaacuuguguaaau

SEQ ID NO: 3731133 - RNA, 13 nt, Human
uauuaugaaugug

SEQ ID NO: 3731134 - RNA, 15 nt, Human
uauuaugcaaauucc

SEQ ID NO: 3731135 - RNA, 18 nt, Human
uauuaugcaaauucccag

SEQ ID NO: 3731136 - RNA, 19 nt, Human
uauuaugcaaauucccaga

SEQ ID NO: 3731137 - RNA, 19 nt, Human
uauuaugcauuauaucaaa

SEQ ID NO: 3731138 - RNA, 13 nt, Human
uauuaugcggaaa

SEQ ID NO: 3731139 - RNA, 16 nt, Human
uauuauggaaaacugu

SEQ ID NO: 3731140 - RNA, 20 nt, Human
uauuauggaggcaggaguuu

SEQ ID NO: 3731141 - RNA, 12 nt, Human
uauuauguguuu

SEQ ID NO: 3731142 - RNA, 17 nt, Human
uauuauuaacauaccua

SEQ ID NO: 3731143 - RNA, 11 nt, Human
uauuauuaaug

SEQ ID NO: 3731144 - RNA, 14 nt, Human
uauuauuaaugcuu

SEQ ID NO: 3731145 - RNA, 16 nt, Human
uauuauuaaugcuuug

SEQ ID NO: 3731146 - RNA, 13 nt, Human
uauuauuacuguu

SEQ ID NO: 3731147 - RNA, 14 nt, Human
uauuauuacuguuu

SEQ ID NO: 3731148 - RNA, 14 nt, Human
uauuauuacuugua

SEQ ID NO: 3731149 - RNA, 18 nt, Human
uauuauuagaaauuagaa

SEQ ID NO: 3731150 - RNA, 12 nt, Human
uauuauuagggc

SEQ ID NO: 3731151 - RNA, 22 nt, Human
uauuauuauaaucuuauaauug

SEQ ID NO: 3731152 - RNA, 15 nt, Human
uauuauuaucuuuaa

SEQ ID NO: 3731153 - RNA, 15 nt, Human
uauuauuauuuuggg

SEQ ID NO: 3731154 - RNA, 16 nt, Human
uauuauucccauucua

SEQ ID NO: 3731155 - RNA, 13 nt, Human
uauuauucugcag

SEQ ID NO: 3731156 - RNA, 14 nt, Human
uauuauugaaauug

SEQ ID NO: 3731157 - RNA, 15 nt, Human
uauuauugaaauugu

SEQ ID NO: 3731158 - RNA, 18 nt, Human
uauuauugcuguugcuug

SEQ ID NO: 3731159 - RNA, 15 nt, Human
uauuauuuauaauuc

SEQ ID NO: 3731160 - RNA, 19 nt, Human
uauaaauaggagaggauga

SEQ ID NO: 3731161 - RNA, 14 nt, Human
uauaaauauacagu

SEQ ID NO: 3731162 - RNA, 15 nt, Human
uauaaauauacagua

SEQ ID NO: 3731163 - RNA, 23 nt, Human
uauaaauauauauaaauauauau

SEQ ID NO: 3731164 - RNA, 23 nt, Human
uauaaaucaacaccuuaauaugc

SEQ ID NO: 3731165 - RNA, 18 nt, Human
uauaaaucauauugauga

SEQ ID NO: 3731166 - RNA, 14 nt, Human
uauaaauccaguga

SEQ ID NO: 3731167 - RNA, 18 nt, Human
uauaaaucgcuuuugaua

SEQ ID NO: 3731168 - RNA, 21 nt, Human
uauaaaugaaguuuauacagu

SEQ ID NO: 3731169 - RNA, 12 nt, Human
uauaaaugagca

SEQ ID NO: 3731170 - RNA, 17 nt, Human
uauaaaugcaaauaaca

SEQ ID NO: 3731171 - RNA, 18 nt, Human
uauaaaugcaaauaacaa

SEQ ID NO: 3731172 - RNA, 15 nt, Human
uauaaaugcaauauu

SEQ ID NO: 3731173 - RNA, 14 nt, Human
uauaaaugcuauuu

SEQ ID NO: 3731174 - RNA, 15 nt, Human
uauaaaugggaacau

SEQ ID NO: 3731175 - RNA, 16 nt, Human
uauaaauguauaaaua

SEQ ID NO: 3731176 - RNA, 20 nt, Human
uauaaauguauaaauauaca

SEQ ID NO: 3731177 - RNA, 23 nt, Human
uauaaaugucuuuaaugcaauau

SEQ ID NO: 3731178 - RNA, 14 nt, Human
uauaaaugugugua

SEQ ID NO: 3731179 - RNA, 11 nt, Human
uauaaauuaaa

SEQ ID NO: 3731180 - RNA, 13 nt, Human
uauaaauuaaaua

SEQ ID NO: 3731181 - RNA, 20 nt, Human
uauaaauuaaauauauguau

SEQ ID NO: 3731182 - RNA, 22 nt, Human
uauaaauuauguuuauauaaau

SEQ ID NO: 3731183 - RNA, 20 nt, Human
uauaaauuccucuuugcuuu

SEQ ID NO: 3731184 - RNA, 21 nt, Human
uauaaauuccucuuugcuuug

SEQ ID NO: 3731185 - RNA, 20 nt, Human
uauaaauugucuuaauggau

SEQ ID NO: 3731186 - RNA, 14 nt, Human
uauaaauugucuuu

SEQ ID NO: 3731187 - RNA, 14 nt, Human
uauaaauuuauuua

SEQ ID NO: 3731188 - RNA, 16 nt, Human
uauaaauuuauuuacu

SEQ ID NO: 3731189 - RNA, 16 nt, Human
uauaaauuuguguaau

SEQ ID NO: 3731190 - RNA, 20 nt, Human
uauaacaaaggauacuuauu

SEQ ID NO: 3731191 - RNA, 22 nt, Human
uauaacacauuuuuuugcaugc

SEQ ID NO: 3731192 - RNA, 20 nt, Human
uauaacagguuauuuuaguu

SEQ ID NO: 3731193 - RNA, 21 nt, Human
uauaacagugugguaguuaau

SEQ ID NO: 3731194 - RNA, 20 nt, Human
uauaaccuaguuaaagaaag

SEQ ID NO: 3731195 - RNA, 20 nt, Human
uauaaccuuaauuuauuauu

SEQ ID NO: 3731196 - RNA, 20 nt, Human
uauaacguguucaauauuuu

SEQ ID NO: 3731197 - RNA, 19 nt, Human
uauaacuacuccggagaca

SEQ ID NO: 3731198 - RNA, 21 nt, Human
uauaacucaucauaaaauaaa

SEQ ID NO: 3731199 - RNA, 16 nt, Human
uauaacuggaaagaag

SEQ ID NO: 3731200 - RNA, 13 nt, Human
uauaacuguauuu

SEQ ID NO: 3731201 - RNA, 19 nt, Human
uauaacuuaaaaaaaugac

SEQ ID NO: 3731202 - RNA, 22 nt, Human
uauaacuuaaaaaaaugacaga

SEQ ID NO: 3731203 - RNA, 18 nt, Human
uauaacuuaaaauauuuu

SEQ ID NO: 3731204 - RNA, 14 nt, Human
uauaacuuaaugaa

SEQ ID NO: 3731205 - RNA, 16 nt, Human
uauaacuuaaugaaaa

SEQ ID NO: 3731206 - RNA, 15 nt, Human
uauaacuucuuaaaa

SEQ ID NO: 3731207 - RNA, 11 nt, Human
uauaagaaaaa

SEQ ID NO: 3731208 - RNA, 13 nt, Human
uauaagaaagaca

SEQ ID NO: 3731209 - RNA, 16 nt, Human
uauaagaauaaaaugu

SEQ ID NO: 3731210 - RNA, 14 nt, Human
uauaagauccuaga

SEQ ID NO: 3731211 - RNA, 18 nt, Human
uauaagauccuagauccu

SEQ ID NO: 3731212 - RNA, 17 nt, Human
uauaagcaucauuauuu

SEQ ID NO: 3731213 - RNA, 16 nt, Human
uauaagcauggagaac

SEQ ID NO: 3731214 - RNA, 21 nt, Human
uauaagccaaaauuaaggugu

SEQ ID NO: 3731215 - RNA, 22 nt, Human
uauaaggaaagcaauaaaugaa

SEQ ID NO: 3731216 - RNA, 11 nt, Human
uauaaggacug

SEQ ID NO: 3731217 - RNA, 13 nt, Human
uauaaggacugca

SEQ ID NO: 3731218 - RNA, 14 nt, Human
uauaaggacugcau

SEQ ID NO: 3731219 - RNA, 16 nt, Human
uauaaggcagccuuga

SEQ ID NO: 3731220 - RNA, 24 nt, Human
uauaagggaaguaguuaucauguu

SEQ ID NO: 3731221 - RNA, 22 nt, Human
uauaagggcaaauuggagaaaa

SEQ ID NO: 3731222 - RNA, 23 nt, Human
uauaagguguuuucuguguaacc

SEQ ID NO: 3731223 - RNA, 15 nt, Human
uauaaguaagaaaau

SEQ ID NO: 3731224 - RNA, 16 nt, Human
uauaaguauucuaaau

SEQ ID NO: 3731225 - RNA, 18 nt, Human
uauaagugaagugauacu

SEQ ID NO: 3731226 - RNA, 23 nt, Human
uauaagugcacacagaaauauau

SEQ ID NO: 3731227 - RNA, 14 nt, Human
uauaagugcuguau

SEQ ID NO: 3731228 - RNA, 19 nt, Human
uauaagugcuguauaaaau

SEQ ID NO: 3731229 - RNA, 13 nt, Human
uauaaguguacau

SEQ ID NO: 3731230 - RNA, 17 nt, Human
uauaaguguguguuuuu

SEQ ID NO: 3731231 - RNA, 22 nt, Human
uauaaguuauuuuuguacaugu

SEQ ID NO: 3731232 - RNA, 16 nt, Human
uauaaguuugaaggaa

SEQ ID NO: 3731233 - RNA, 12 nt, Human
uauaauaaaagg

SEQ ID NO: 3731234 - RNA, 12 nt, Human
uauaauaaacau

SEQ ID NO: 3731235 - RNA, 13 nt, Human
uauaauaaaguau

SEQ ID NO: 3731236 - RNA, 14 nt, Human
uauaauaaauauau

SEQ ID NO: 3731237 - RNA, 14 nt, Human
uauaauacuuugua

SEQ ID NO: 3731238 - RNA, 19 nt, Human
uauaauacuuuguauacaa

SEQ ID NO: 3731239 - RNA, 20 nt, Human
uauaauacuuuguauacaag

SEQ ID NO: 3731240 - RNA, 21 nt, Human
uauaauacuuuguauacaagu

SEQ ID NO: 3731241 - RNA, 13 nt, Human
uauaauauaaaaa

SEQ ID NO: 3731242 - RNA, 15 nt, Human
uauaauauccuuugu

SEQ ID NO: 3731243 - RNA, 19 nt, Human
uauaauauugaaaauugaa

SEQ ID NO: 3731244 - RNA, 13 nt, Human
uauaauauuuuaa

SEQ ID NO: 3731245 - RNA, 22 nt, Human
uauaauauuuuuaauuaaauaa

SEQ ID NO: 3731246 - RNA, 20 nt, Human
uauaaucacuuuuuuccaca

SEQ ID NO: 3731247 - RNA, 17 nt, Human
uauaaucauuauuacuu

SEQ ID NO: 3731248 - RNA, 22 nt, Human
uauaauccuugauaauauauug

SEQ ID NO: 3731249 - RNA, 13 nt, Human
uauaaucugucaa

SEQ ID NO: 3731250 - RNA, 23 nt, Human
uauaaucugucaaaacacugugg

SEQ ID NO: 3731251 - RNA, 11 nt, Human
uauaaugaacc

SEQ ID NO: 3731252 - RNA, 18 nt, Human
uauaaugaaugaaacauu

SEQ ID NO: 3731253 - RNA, 16 nt, Human
uauaaugaauuuagug

SEQ ID NO: 3731254 - RNA, 14 nt, Human
uauaaugaggauga

SEQ ID NO: 3731255 - RNA, 15 nt, Human
uauaaugcuggagcg

SEQ ID NO: 3731256 - RNA, 20 nt, Human
uauaauggacagauuaauau

SEQ ID NO: 3731257 - RNA, 16 nt, Human
uauaaugguuucaaag

SEQ ID NO: 3731258 - RNA, 18 nt, Human
uauaaugguuucaaagau

SEQ ID NO: 3731259 - RNA, 19 nt, Human
uauaauguaagcucuacug

SEQ ID NO: 3731260 - RNA, 20 nt, Human
uauaauguaagcucuacuga

SEQ ID NO: 3731261 - RNA, 20 nt, Human
uauaaugucauuaaacauga

SEQ ID NO: 3731262 - RNA, 19 nt, Human
uauaaugugaaauguaacu

SEQ ID NO: 3731263 - RNA, 18 nt, Human
uauaauguuguuauuuaa

SEQ ID NO: 3731264 - RNA, 18 nt, Human
uauaauguuuauuaaaug

SEQ ID NO: 3731265 - RNA, 15 nt, Human
uauaauguuugcuau

SEQ ID NO: 3731266 - RNA, 19 nt, Human
uauaauuaacauguuaaac

SEQ ID NO: 3731267 - RNA, 22 nt, Human
uauaauuaacauguuaaaccau

SEQ ID NO: 3731268 - RNA, 18 nt, Human
uauaauuacauauuugca

SEQ ID NO: 3731269 - RNA, 13 nt, Human
uauaauuauaugu

SEQ ID NO: 3731270 - RNA, 15 nt, Human
uauaauucacauugu

SEQ ID NO: 3731271 - RNA, 20 nt, Human
uauaauucacucaagcacug

SEQ ID NO: 3731272 - RNA, 13 nt, Human
uauaauucaguau

SEQ ID NO: 3731273 - RNA, 22 nt, Human
uauaauucaguauguuuuacac

SEQ ID NO: 3731274 - RNA, 23 nt, Human
uauaauucaguauguuuuacacu

SEQ ID NO: 3731275 - RNA, 21 nt, Human
uauaauuccuauauccuguga

SEQ ID NO: 3731276 - RNA, 22 nt, Human
uauaauuccuauauccugugac

SEQ ID NO: 3731277 - RNA, 23 nt, Human
uauaauuccuguuuuuauuauua

SEQ ID NO: 3731278 - RNA, 17 nt, Human
uauaauucuacuuugag

SEQ ID NO: 3731279 - RNA, 15 nt, Human
uauaauucucauuaa

SEQ ID NO: 3731280 - RNA, 13 nt, Human
uauaauucuguaa

SEQ ID NO: 3731281 - RNA, 16 nt, Human
uauaauucuguaaaug

SEQ ID NO: 3731282 - RNA, 20 nt, Human
uauaauucuguacauagccu

SEQ ID NO: 3731283 - RNA, 13 nt, Human
uauaauucuuuca

SEQ ID NO: 3731284 - RNA, 22 nt, Human
uauaauuggauuuccuaauacu

SEQ ID NO: 3731285 - RNA, 20 nt, Human
uauaauugggucauagaaau

SEQ ID NO: 3731286 - RNA, 22 nt, Human
uauaauugugugauauuucaga

SEQ ID NO: 3731287 - RNA, 15 nt, Human
uauaauuguugcaua

SEQ ID NO: 3731288 - RNA, 18 nt, Human
uauaauuguuuuaucuga

SEQ ID NO: 3731289 - RNA, 20 nt, Human
uauaauuguuuuuuaucuuu

SEQ ID NO: 3731290 - RNA, 15 nt, Human
uauaauuuccauuua

SEQ ID NO: 3731291 - RNA, 21 nt, Human
uauaauuuccauuuacuuaag

SEQ ID NO: 3731292 - RNA, 20 nt, Human
uauaauuucgagauuuguag

SEQ ID NO: 3731293 - RNA, 22 nt, Human
uauaauuuuaugaaugucuuug

SEQ ID NO: 3731294 - RNA, 19 nt, Human
uauaauuuucugaaaguua

SEQ ID NO: 3731295 - RNA, 19 nt, Human
uauaauuuugugaagcaaa

SEQ ID NO: 3731296 - RNA, 19 nt, Human
uauaauuuuuaaaguauau

SEQ ID NO: 3731297 - RNA, 19 nt, Human
uauaauuuuuuguaaugug

SEQ ID NO: 3731298 - RNA, 22 nt, Human
uauaauuuuuuuauguuuuguu

SEQ ID NO: 3731299 - RNA, 20 nt, Human
uauacaaauauauuguuaau

SEQ ID NO: 3731300 - RNA, 18 nt, Human
uauacaaauuaaaaagau

SEQ ID NO: 3731301 - RNA, 14 nt, Human
uauacaaauuagaa

SEQ ID NO: 3731302 - RNA, 16 nt, Human
uauacaaauuagaaaa

SEQ ID NO: 3731303 - RNA, 18 nt, Human
uauacaaauuagaaaaug

SEQ ID NO: 3731304 - RNA, 18 nt, Human
uauacaacaccaaaaaau

SEQ ID NO: 3731305 - RNA, 21 nt, Human
uauacaacaccaaaaaauauc

SEQ ID NO: 3731306 - RNA, 12 nt, Human
uauacaacagug

SEQ ID NO: 3731307 - RNA, 15 nt, Human
uauacaacagugcua

SEQ ID NO: 3731308 - RNA, 16 nt, Human
uauacaacagugcuaa

SEQ ID NO: 3731309 - RNA, 13 nt, Human
uauuauuuauaua

SEQ ID NO: 3731310 - RNA, 12 nt, Human
uauuauuuggca

SEQ ID NO: 3731311 - RNA, 14 nt, Human
uauuauuuggcagu

SEQ ID NO: 3731312 - RNA, 13 nt, Human
uauuauuuugggg

SEQ ID NO: 3731313 - RNA, 20 nt, Human
uauuauuuuuuuaaaauuuu

SEQ ID NO: 3731314 - RNA, 23 nt, Human
uauucaaacagucucaggaaauc

SEQ ID NO: 3731315 - RNA, 12 nt, Human
uauucaaaguug

SEQ ID NO: 3731316 - RNA, 23 nt, Human
uauucaaaguugccuaaauccau

SEQ ID NO: 3731317 - RNA, 13 nt, Human
uauucaaauuccu

SEQ ID NO: 3731318 - RNA, 17 nt, Human
uauucaaccauggacuu

SEQ ID NO: 3731319 - RNA, 10 nt, Human
uauucaaggu

SEQ ID NO: 3731320 - RNA, 11 nt, Human
uauucaaggua

SEQ ID NO: 3731321 - RNA, 20 nt, Human
uauucaauaaaaaaaagaaa

SEQ ID NO: 3731322 - RNA, 13 nt, Human
uauucaauaaagc

SEQ ID NO: 3731323 - RNA, 14 nt, Human
uauucaauaaagua

SEQ ID NO: 3731324 - RNA, 19 nt, Human
uauucaauaaaguauuuaa

SEQ ID NO: 3731325 - RNA, 20 nt, Human
uauucaauaaaguauuuaau

SEQ ID NO: 3731326 - RNA, 16 nt, Human
uauucaauauccuuug

SEQ ID NO: 3731327 - RNA, 17 nt, Human
uauucaauuaaagaaau

SEQ ID NO: 3731328 - RNA, 17 nt, Human
uauucaauuccucuggg

SEQ ID NO: 3731329 - RNA, 22 nt, Human
uauucacaucgcuucuguguau

SEQ ID NO: 3731330 - RNA, 18 nt, Human
uauucaccauguaaaaca

SEQ ID NO: 3731331 - RNA, 19 nt, Human
uauucaccauguaaaacaa

SEQ ID NO: 3731332 - RNA, 23 nt, Human
uauucacgugcagcagcaacaca

SEQ ID NO: 3731333 - RNA, 15 nt, Human
uauucagaauauuca

SEQ ID NO: 3731334 - RNA, 15 nt, Human
uauucagaauuauga

SEQ ID NO: 3731335 - RNA, 19 nt, Human
uauucagaauuaugaugga

SEQ ID NO: 3731336 - RNA, 15 nt, Human
uauucagacaaaaug

SEQ ID NO: 3731337 - RNA, 18 nt, Human
uauucagacaagcaacag

SEQ ID NO: 3731338 - RNA, 13 nt, Human
uauucagacagau

SEQ ID NO: 3731339 - RNA, 17 nt, Human
uauucagagaauaucaa

SEQ ID NO: 3731340 - RNA, 23 nt, Human
uauucagcaaggcgcuaacuugc

SEQ ID NO: 3731341 - RNA, 19 nt, Human
uauucagcaccaagcaugu

SEQ ID NO: 3731342 - RNA, 15 nt, Human
uauucagcucaugga

SEQ ID NO: 3731343 - RNA, 16 nt, Human
uauucagcuucauuug

SEQ ID NO: 3731344 - RNA, 17 nt, Human
uauucaggaaaagccuc

SEQ ID NO: 3731345 - RNA, 14 nt, Human
uauucaggaagcuc

SEQ ID NO: 3731346 - RNA, 18 nt, Human
uauucaggaagcucaggg

SEQ ID NO: 3731347 - RNA, 22 nt, Human
uauucaggaagcucagggccug

SEQ ID NO: 3731348 - RNA, 23 nt, Human
uauucagggaaggaggagccugu

SEQ ID NO: 3731349 - RNA, 15 nt, Human
uauucagugcugugg

SEQ ID NO: 3731350 - RNA, 23 nt, Human
uauucaguugguaagcuuccagg

SEQ ID NO: 3731351 - RNA, 14 nt, Human
uauucauaauuauu

SEQ ID NO: 3731352 - RNA, 15 nt, Human
uauucauaugcauau

SEQ ID NO: 3731353 - RNA, 17 nt, Human
uauucauaugcauauuu

SEQ ID NO: 3731354 - RNA, 16 nt, Human
uauucauauuuguacu

SEQ ID NO: 3731355 - RNA, 21 nt, Human
uauucauccaaguuaaaugua

SEQ ID NO: 3731356 - RNA, 22 nt, Human
uauucauccaaguuaaauguag

SEQ ID NO: 3731357 - RNA, 23 nt, Human
uauucauccaaguuaaauguaga

SEQ ID NO: 3731358 - RNA, 13 nt, Human
uauucauguaaac

SEQ ID NO: 3731359 - RNA, 17 nt, Human
uauucauuauuugucaa

SEQ ID NO: 3731360 - RNA, 23 nt, Human
uauucauucuuuuugaaauguca

SEQ ID NO: 3731361 - RNA, 12 nt, Human
uauucauuuaaa

SEQ ID NO: 3731362 - RNA, 14 nt, Human
uauucauuuaaaau

SEQ ID NO: 3731363 - RNA, 21 nt, Human
uauuccaaaccaaauuuuaau

SEQ ID NO: 3731364 - RNA, 19 nt, Human
uauuccaccuuaaauuaaa

SEQ ID NO: 3731365 - RNA, 20 nt, Human
uauuccagaaugcuguacau

SEQ ID NO: 3731366 - RNA, 21 nt, Human
uauuccagaaugcuguacauc

SEQ ID NO: 3731367 - RNA, 22 nt, Human
uauuccagaucuuucagaaaua

SEQ ID NO: 3731368 - RNA, 13 nt, Human
uauuccagcucau

SEQ ID NO: 3731369 - RNA, 21 nt, Human
uauuccaguuuguuuauuacu

SEQ ID NO: 3731370 - RNA, 23 nt, Human
uauuccauaguauauuaaaaaug

SEQ ID NO: 3731371 - RNA, 14 nt, Human
uauuccauauauua

SEQ ID NO: 3731372 - RNA, 20 nt, Human
uauuccauauuagaaaacuu

SEQ ID NO: 3731373 - RNA, 15 nt, Human
uauuccauauuuauu

SEQ ID NO: 3731374 - RNA, 17 nt, Human
uauuccaugaauguauc

SEQ ID NO: 3731375 - RNA, 14 nt, Human
uauuccaugacugc

SEQ ID NO: 3731376 - RNA, 16 nt, Human
uauuccaugacugcuu

SEQ ID NO: 3731377 - RNA, 23 nt, Human
uauucccaagcucuagugggaag

SEQ ID NO: 3731378 - RNA, 22 nt, Human
uauuccccacccuccccuuccc

SEQ ID NO: 3731379 - RNA, 17 nt, Human
uauuccccauucuuccu

SEQ ID NO: 3731380 - RNA, 24 nt, Human
uauuccuaguuggugagaaaccug

SEQ ID NO: 3731381 - RNA, 20 nt, Human
uauuccuauauaguuuauug

SEQ ID NO: 3731382 - RNA, 21 nt, Human
uauuccuauauaguuuauuga

SEQ ID NO: 3731383 - RNA, 18 nt, Human
uauuccuccugcucauau

SEQ ID NO: 3731384 - RNA, 20 nt, Human
uauuccugcauuugugaaau

SEQ ID NO: 3731385 - RNA, 11 nt, Human
uauuccugccu

SEQ ID NO: 3731386 - RNA, 22 nt, Human
uauuccuguggauguaaaguga

SEQ ID NO: 3731387 - RNA, 15 nt, Human
uauuccuuucccuuc

SEQ ID NO: 3731388 - RNA, 19 nt, Human
uauucgccacacaguauuu

SEQ ID NO: 3731389 - RNA, 20 nt, Human
uauucgccacacaguauuuu

SEQ ID NO: 3731390 - RNA, 17 nt, Human
uauucguuaucuaauag

SEQ ID NO: 3731391 - RNA, 23 nt, Human
uauucuaagacuuacucuaagau

SEQ ID NO: 3731392 - RNA, 15 nt, Human
uauucuaauaagcua

SEQ ID NO: 3731393 - RNA, 20 nt, Human
uauucuaauaagcuaguuga

SEQ ID NO: 3731394 - RNA, 21 nt, Human
uauucuagccugcauugagcu

SEQ ID NO: 3731395 - RNA, 17 nt, Human
uauucuauuuuacaacu

SEQ ID NO: 3731396 - RNA, 15 nt, Human
uauucucacuccacc

SEQ ID NO: 3731397 - RNA, 21 nt, Human
uauucucagcagagugcuuua

SEQ ID NO: 3731398 - RNA, 13 nt, Human
uauucucauucuu

SEQ ID NO: 3731399 - RNA, 16 nt, Human
uauucuccuauguuug

SEQ ID NO: 3731400 - RNA, 15 nt, Human
uauucucuauuugaa

SEQ ID NO: 3731401 - RNA, 18 nt, Human
uauucucuccaaaaaugc

SEQ ID NO: 3731402 - RNA, 17 nt, Human
uauucucuccucagacu

SEQ ID NO: 3731403 - RNA, 13 nt, Human
uauucucuguaca

SEQ ID NO: 3731404 - RNA, 21 nt, Human
uauucucuuaauuuuucuuaa

SEQ ID NO: 3731405 - RNA, 15 nt, Human
uauucugagaaaaca

SEQ ID NO: 3731406 - RNA, 22 nt, Human
uauucugauuacacaaaacaaa

SEQ ID NO: 3731407 - RNA, 14 nt, Human
uauucugauuccac

SEQ ID NO: 3731408 - RNA, 22 nt, Human
uauucugcucuauuauauaaac

SEQ ID NO: 3731409 - RNA, 12 nt, Human
uauucuggaguu

SEQ ID NO: 3731410 - RNA, 16 nt, Human
uauucugggaauguau

SEQ ID NO: 3731411 - RNA, 21 nt, Human
uauucugggaauguauaguau

SEQ ID NO: 3731412 - RNA, 20 nt, Human
uauucugggcaccacaaaau

SEQ ID NO: 3731413 - RNA, 15 nt, Human
uauucugucuucauc

SEQ ID NO: 3731414 - RNA, 22 nt, Human
uauucuguguugcauuauucau

SEQ ID NO: 3731415 - RNA, 15 nt, Human
uauucuguuggaagc

SEQ ID NO: 3731416 - RNA, 22 nt, Human
uauucuuaagggaacuuccaca

SEQ ID NO: 3731417 - RNA, 15 nt, Human
uauucuuauuuaaug

SEQ ID NO: 3731418 - RNA, 15 nt, Human
uauucuucauauccu

SEQ ID NO: 3731419 - RNA, 13 nt, Human
uauucuucucuuc

SEQ ID NO: 3731420 - RNA, 15 nt, Human
uauucuugaaagaag

SEQ ID NO: 3731421 - RNA, 23 nt, Human
uauucuugaaagaagaauguguu

SEQ ID NO: 3731422 - RNA, 22 nt, Human
uauucuugaucaguaguuugca

SEQ ID NO: 3731423 - RNA, 14 nt, Human
uauucuugaugaaa

SEQ ID NO: 3731424 - RNA, 15 nt, Human
uauucuugaugaaaa

SEQ ID NO: 3731425 - RNA, 19 nt, Human
uauucuugaugaaaagcuu

SEQ ID NO: 3731426 - RNA, 13 nt, Human
uauucuugguuuu

SEQ ID NO: 3731427 - RNA, 14 nt, Human
uauucuugugaaua

SEQ ID NO: 3731428 - RNA, 15 nt, Human
uauucuugugaauau

SEQ ID NO: 3731429 - RNA, 12 nt, Human
uauucuuucucc

SEQ ID NO: 3731430 - RNA, 16 nt, Human
uauucuuucuccuuuu

SEQ ID NO: 3731431 - RNA, 20 nt, Human
uauucuuugauguuaacaca

SEQ ID NO: 3731432 - RNA, 23 nt, Human
uauucuuugauguuaacacauuu

SEQ ID NO: 3731433 - RNA, 16 nt, Human
uauucuuugcacuuuu

SEQ ID NO: 3731434 - RNA, 13 nt, Human
uauucuuuguuaa

SEQ ID NO: 3731435 - RNA, 15 nt, Human
uauucuuuguuaauu

SEQ ID NO: 3731436 - RNA, 20 nt, Human
uauugaaaauugaaaaguac

SEQ ID NO: 3731437 - RNA, 18 nt, Human
uauugaaagaauuauccu

SEQ ID NO: 3731438 - RNA, 20 nt, Human
uauugaaauuguacauauuu

SEQ ID NO: 3731439 - RNA, 14 nt, Human
uauugaacuuuuuu

SEQ ID NO: 3731440 - RNA, 13 nt, Human
uauugaagaaaca

SEQ ID NO: 3731441 - RNA, 14 nt, Human
uauugaagacaauu

SEQ ID NO: 3731442 - RNA, 14 nt, Human
uauugaagcagagu

SEQ ID NO: 3731443 - RNA, 16 nt, Human
uauugaagcagagugg

SEQ ID NO: 3731444 - RNA, 13 nt, Human
uauugaagcauuu

SEQ ID NO: 3731445 - RNA, 17 nt, Human
uauugaagcauuuuaua

SEQ ID NO: 3731446 - RNA, 22 nt, Human
uauugaaggaagccaaauuuau

SEQ ID NO: 3731447 - RNA, 20 nt, Human
uauugaauauaauauauuug

SEQ ID NO: 3731448 - RNA, 22 nt, Human
uauugaauauaauauauuugug

SEQ ID NO: 3731449 - RNA, 13 nt, Human
uauugaauauugu

SEQ ID NO: 3731450 - RNA, 12 nt, Human
uauugaauguuu

SEQ ID NO: 3731451 - RNA, 18 nt, Human
uauugaauuuuuccuaug

SEQ ID NO: 3731452 - RNA, 12 nt, Human
uauugacaaaau

SEQ ID NO: 3731453 - RNA, 16 nt, Human
uauugacaaaauguua

SEQ ID NO: 3731454 - RNA, 14 nt, Human
uauugacaaacucu

SEQ ID NO: 3731455 - RNA, 18 nt, Human
uauugacacagaaaaugu

SEQ ID NO: 3731456 - RNA, 13 nt, Human
uauugacacugaa

SEQ ID NO: 3731457 - RNA, 14 nt, Human
uauugacauuugua

SEQ ID NO: 3731458 - RNA, 15 nt, Human
uauugacauuuguag

SEQ ID NO: 3731459 - RNA, 18 nt, Human
uauacaaccuucauuuaa

SEQ ID NO: 3731460 - RNA, 20 nt, Human
uauacaaccuucauuuaaaa

SEQ ID NO: 3731461 - RNA, 20 nt, Human
uauacaagauaagcuuccag

SEQ ID NO: 3731462 - RNA, 16 nt, Human
uauacaaguacuggua

SEQ ID NO: 3731463 - RNA, 19 nt, Human
uauacaaguacugguaaga

SEQ ID NO: 3731464 - RNA, 15 nt, Human
uauacaauaauggaa

SEQ ID NO: 3731465 - RNA, 20 nt, Human
uauacaauuaugaagauuua

SEQ ID NO: 3731466 - RNA, 12 nt, Human
uauacacacaca

SEQ ID NO: 3731467 - RNA, 13 nt, Human
uauacacacacac

SEQ ID NO: 3731468 - RNA, 14 nt, Human
uauacacacacaca

SEQ ID NO: 3731469 - RNA, 21 nt, Human
uauacacuuacacuuuaugca

SEQ ID NO: 3731470 - RNA, 22 nt, Human
uauacacuuggaguuugcauuc

SEQ ID NO: 3731471 - RNA, 12 nt, Human
uauacagaugaa

SEQ ID NO: 3731472 - RNA, 13 nt, Human
uauacagaugaaa

SEQ ID NO: 3731473 - RNA, 15 nt, Human
uauacagaugaaaau

SEQ ID NO: 3731474 - RNA, 16 nt, Human
uauacaggucauauua

SEQ ID NO: 3731475 - RNA, 21 nt, Human
uauacaggucauauuaauaua

SEQ ID NO: 3731476 - RNA, 22 nt, Human
uauacaguaacuuuauguguaa

SEQ ID NO: 3731477 - RNA, 22 nt, Human
uauacaguauagauuuuugggu

SEQ ID NO: 3731478 - RNA, 14 nt, Human
uauacagugauaua

SEQ ID NO: 3731479 - RNA, 18 nt, Human
uauacagugcagagccuu

SEQ ID NO: 3731480 - RNA, 20 nt, Human
uauacaguuauaaaauuaaa

SEQ ID NO: 3731481 - RNA, 22 nt, Human
uauacaguuauaaaauuaaaag

SEQ ID NO: 3731482 - RNA, 23 nt, Human
uauacaguuauaaaauuaaaagu

SEQ ID NO: 3731483 - RNA, 16 nt, Human
uauacaguucaauaaa

SEQ ID NO: 3731484 - RNA, 14 nt, Human
uauacauaaacaag

SEQ ID NO: 3731485 - RNA, 21 nt, Human
uauacauaacaggguaaauua

SEQ ID NO: 3731486 - RNA, 23 nt, Human
uauacauaacaggguaaauuauu

SEQ ID NO: 3731487 - RNA, 19 nt, Human
uauacauacacuuguauaa

SEQ ID NO: 3731488 - RNA, 16 nt, Human
uauacauacuaugaaa

SEQ ID NO: 3731489 - RNA, 21 nt, Human
uauacauaucuuuauuaauca

SEQ ID NO: 3731490 - RNA, 15 nt, Human
uauacauauguagac

SEQ ID NO: 3731491 - RNA, 15 nt, Human
uauacaugacacuga

SEQ ID NO: 3731492 - RNA, 16 nt, Human
uauacaugacacugaa

SEQ ID NO: 3731493 - RNA, 20 nt, Human
uauacaugacacugaaaugc

SEQ ID NO: 3731494 - RNA, 23 nt, Human
uauacaugacacugaaaugccuu

SEQ ID NO: 3731495 - RNA, 11 nt, Human
uauacaugcca

SEQ ID NO: 3731496 - RNA, 13 nt, Human
uauacaugccagu

SEQ ID NO: 3731497 - RNA, 15 nt, Human
uauacaugugauaca

SEQ ID NO: 3731498 - RNA, 13 nt, Human
uauacaugugugu

SEQ ID NO: 3731499 - RNA, 22 nt, Human
uauacauguguguauauaugug

SEQ ID NO: 3731500 - RNA, 15 nt, Human
uauacauguuuaugu

SEQ ID NO: 3731501 - RNA, 16 nt, Human
uauacauguuuaugua

SEQ ID NO: 3731502 - RNA, 17 nt, Human
uauacauguuuauguaa

SEQ ID NO: 3731503 - RNA, 18 nt, Human
uauacauguuuauguaaa

SEQ ID NO: 3731504 - RNA, 20 nt, Human
uauacauguuuauguaaaca

SEQ ID NO: 3731505 - RNA, 16 nt, Human
uauacauuaguaaaug

SEQ ID NO: 3731506 - RNA, 20 nt, Human
uauacauuaguaaaugucuu

SEQ ID NO: 3731507 - RNA, 14 nt, Human
uauaccaauaaagu

SEQ ID NO: 3731508 - RNA, 19 nt, Human
uauaccauggugaauuaau

SEQ ID NO: 3731509 - RNA, 14 nt, Human
uauacccacccaga

SEQ ID NO: 3731510 - RNA, 16 nt, Human
uauacccagaaaguua

SEQ ID NO: 3731511 - RNA, 21 nt, Human
uauaccccgugaagcauccag

SEQ ID NO: 3731512 - RNA, 19 nt, Human
uauaccccuuacuuagcau

SEQ ID NO: 3731513 - RNA, 22 nt, Human
uauaccccuuacuuagcaugca

SEQ ID NO: 3731514 - RNA, 16 nt, Human
uauaccuaacugaaua

SEQ ID NO: 3731515 - RNA, 18 nt, Human
uauaccuauaaugugugu

SEQ ID NO: 3731516 - RNA, 22 nt, Human
uauaccucaauuuucacugugu

SEQ ID NO: 3731517 - RNA, 20 nt, Human
uauaccugauuuuuuuuccu

SEQ ID NO: 3731518 - RNA, 19 nt, Human
uauaccugugccucggcuu

SEQ ID NO: 3731519 - RNA, 23 nt, Human
uauaccuguguuucuugccucau

SEQ ID NO: 3731520 - RNA, 13 nt, Human
uauaccuguugcu

SEQ ID NO: 3731521 - RNA, 23 nt, Human
uauaccuguugcuuaauuacaau

SEQ ID NO: 3731522 - RNA, 17 nt, Human
uauacguguagcuauau

SEQ ID NO: 3731523 - RNA, 19 nt, Human
uauacuaagauguucacug

SEQ ID NO: 3731524 - RNA, 16 nt, Human
uauacuauauuuaugg

SEQ ID NO: 3731525 - RNA, 17 nt, Human
uauacucacuuucuaga

SEQ ID NO: 3731526 - RNA, 19 nt, Human
uauacucuuucuguauaua

SEQ ID NO: 3731527 - RNA, 22 nt, Human
uauacucuuucuguauauacuu

SEQ ID NO: 3731528 - RNA, 20 nt, Human
uauacugaaggaaaaacaca

SEQ ID NO: 3731529 - RNA, 22 nt, Human
uauacugaaggaaaaacacaag

SEQ ID NO: 3731530 - RNA, 17 nt, Human
uauacugcauacuuuuu

SEQ ID NO: 3731531 - RNA, 22 nt, Human
uauacuggaacccuuuuaaagu

SEQ ID NO: 3731532 - RNA, 11 nt, Human
uauacuguaaa

SEQ ID NO: 3731533 - RNA, 12 nt, Human
uauacuguaaag

SEQ ID NO: 3731534 - RNA, 17 nt, Human
uauacuguaaagaaaga

SEQ ID NO: 3731535 - RNA, 19 nt, Human
uauacuguaaagaaagaga

SEQ ID NO: 3731536 - RNA, 20 nt, Human
uauacuguaaagaaagagag

SEQ ID NO: 3731537 - RNA, 23 nt, Human
uauacuguaaagaaagagagaaa

SEQ ID NO: 3731538 - RNA, 17 nt, Human
uauacuguacaauaaaa

SEQ ID NO: 3731539 - RNA, 13 nt, Human
uauacuguauuaa

SEQ ID NO: 3731540 - RNA, 18 nt, Human
uauacugugugcuuguuu

SEQ ID NO: 3731541 - RNA, 14 nt, Human
uauacuuguaauua

SEQ ID NO: 3731542 - RNA, 17 nt, Human
uauacuuguggacuaaa

SEQ ID NO: 3731543 - RNA, 16 nt, Human
uauacuuuaaauaauu

SEQ ID NO: 3731544 - RNA, 15 nt, Human
uauacuuuaguauga

SEQ ID NO: 3731545 - RNA, 23 nt, Human
uauacuuugguuggcagcauucc

SEQ ID NO: 3731546 - RNA, 14 nt, Human
uauacuuuguggac

SEQ ID NO: 3731547 - RNA, 20 nt, Human
uauacuuuguggaccaauua

SEQ ID NO: 3731548 - RNA, 13 nt, Human
uauacuuuuacaa

SEQ ID NO: 3731549 - RNA, 16 nt, Human
uauagaaaaaaacauu

SEQ ID NO: 3731550 - RNA, 20 nt, Human
uauagaaaguguucuguuac

SEQ ID NO: 3731551 - RNA, 21 nt, Human
uauagaaauauauacgaacaa

SEQ ID NO: 3731552 - RNA, 18 nt, Human
uauagaagaaugcaugcu

SEQ ID NO: 3731553 - RNA, 19 nt, Human
uauagaaguauaaagaauu

SEQ ID NO: 3731554 - RNA, 14 nt, Human
uauagaagucuuca

SEQ ID NO: 3731555 - RNA, 15 nt, Human
uauagaagucuucau

SEQ ID NO: 3731556 - RNA, 19 nt, Human
uauagaagucuucaugaaa

SEQ ID NO: 3731557 - RNA, 21 nt, Human
uauagaagucuucaugaaaug

SEQ ID NO: 3731558 - RNA, 23 nt, Human
uauagaagucuucaugaaaugcu

SEQ ID NO: 3731559 - RNA, 20 nt, Human
uauagaauaggcacuuuaaa

SEQ ID NO: 3731560 - RNA, 23 nt, Human
uauagaauaggcacuuuaaaaca

SEQ ID NO: 3731561 - RNA, 20 nt, Human
uauagaauuagcuuuuucau

SEQ ID NO: 3731562 - RNA, 18 nt, Human
uauagacaggagaagaaa

SEQ ID NO: 3731563 - RNA, 21 nt, Human
uauagacaggagaagaaagaa

SEQ ID NO: 3731564 - RNA, 16 nt, Human
uauagacaguuuguaa

SEQ ID NO: 3731565 - RNA, 17 nt, Human
uauagacaguuuguaaa

SEQ ID NO: 3731566 - RNA, 11 nt, Human
uauagacucua

SEQ ID NO: 3731567 - RNA, 18 nt, Human
uauagagcagaaauucug

SEQ ID NO: 3731568 - RNA, 20 nt, Human
uauagagcagaaauucuguu

SEQ ID NO: 3731569 - RNA, 21 nt, Human
uauagaggcuagcuucugcuu

SEQ ID NO: 3731570 - RNA, 16 nt, Human
uauagaugggaaugaa

SEQ ID NO: 3731571 - RNA, 22 nt, Human
uauagaugggggaaagcaaagc

SEQ ID NO: 3731572 - RNA, 15 nt, Human
uauagaugucuuuuc

SEQ ID NO: 3731573 - RNA, 21 nt, Human
uauagauguugcuaacagcaa

SEQ ID NO: 3731574 - RNA, 15 nt, Human
uauagauuaaaucau

SEQ ID NO: 3731575 - RNA, 17 nt, Human
uauagauuagaaaaauu

SEQ ID NO: 3731576 - RNA, 12 nt, Human
uauagauucuaa

SEQ ID NO: 3731577 - RNA, 20 nt, Human
uauagcaaaacuuuuaaacu

SEQ ID NO: 3731578 - RNA, 13 nt, Human
uauagcaagacau

SEQ ID NO: 3731579 - RNA, 13 nt, Human
uauagcaauccau

SEQ ID NO: 3731580 - RNA, 15 nt, Human
uauagcacuuugaaa

SEQ ID NO: 3731581 - RNA, 23 nt, Human
uauagcacuuugaaauaccucau

SEQ ID NO: 3731582 - RNA, 18 nt, Human
uauagcaguaaaaaaugg

SEQ ID NO: 3731583 - RNA, 14 nt, Human
uauagcaucacuua

SEQ ID NO: 3731584 - RNA, 18 nt, Human
uauagcaucacuuaaaac

SEQ ID NO: 3731585 - RNA, 16 nt, Human
uauagcaugaaauaaa

SEQ ID NO: 3731586 - RNA, 19 nt, Human
uauagccaaaaauagcuaa

SEQ ID NO: 3731587 - RNA, 21 nt, Human
uauagccacaucccuuugaaa

SEQ ID NO: 3731588 - RNA, 22 nt, Human
uauagcccagccaggccccagg

SEQ ID NO: 3731589 - RNA, 20 nt, Human
uauagccuauggcagaaaaa

SEQ ID NO: 3731590 - RNA, 23 nt, Human
uauagcucuaauguuugcauaua

SEQ ID NO: 3731591 - RNA, 17 nt, Human
uauagcugcuuccagug

SEQ ID NO: 3731592 - RNA, 19 nt, Human
uauagcuguauugaaucau

SEQ ID NO: 3731593 - RNA, 16 nt, Human
uauagcuugaaacaua

SEQ ID NO: 3731594 - RNA, 15 nt, Human
uauagcuugcagaac

SEQ ID NO: 3731595 - RNA, 13 nt, Human
uauaggaauugac

SEQ ID NO: 3731596 - RNA, 19 nt, Human
uauaggaauugacccacaa

SEQ ID NO: 3731597 - RNA, 12 nt, Human
uauaggagagga

SEQ ID NO: 3731598 - RNA, 14 nt, Human
uauaggcuggagaa

SEQ ID NO: 3731599 - RNA, 14 nt, Human
uauaggucacuccu

SEQ ID NO: 3731600 - RNA, 17 nt, Human
uauagguccuuuagaaa

SEQ ID NO: 3731601 - RNA, 22 nt, Human
uauaggucucuucucccagaau

SEQ ID NO: 3731602 - RNA, 21 nt, Human
uauaggugcuacaaaaacaca

SEQ ID NO: 3731603 - RNA, 21 nt, Human
uauagguguugguuuuggggg

SEQ ID NO: 3731604 - RNA, 16 nt, Human
uauagguuuuguuugc

SEQ ID NO: 3731605 - RNA, 14 nt, Human
uauaguauuugaaa

SEQ ID NO: 3731606 - RNA, 17 nt, Human
uauaguauuugaaaaca

SEQ ID NO: 3731607 - RNA, 15 nt, Human
uauagucaauggcuu

SEQ ID NO: 3731608 - RNA, 19 nt, Human
gcccugguggcccucuccc

SEQ ID NO: 3731609 - RNA, 23 nt, Human
gcccuggugguggcucgggaggc

SEQ ID NO: 3731610 - RNA, 20 nt, Human
gcccugguuucacuggccca

SEQ ID NO: 3731611 - RNA, 22 nt, Human
gcccugguuucacuggcccaag

SEQ ID NO: 3731612 - RNA, 15 nt, Human
gcccugguuuccugc

SEQ ID NO: 3731613 - RNA, 21 nt, Human
gcccugguuuccugcccuggg

SEQ ID NO: 3731614 - RNA, 20 nt, Human
gcccugucagcaugaauuug

SEQ ID NO: 3731615 - RNA, 14 nt, Human
gcccugucagugca

SEQ ID NO: 3731616 - RNA, 19 nt, Human
gcccugucccucccaccuc

SEQ ID NO: 3731617 - RNA, 21 nt, Human
gcccugucccucccaccucug

SEQ ID NO: 3731618 - RNA, 23 nt, Human
gcccugucccucccaccucugug

SEQ ID NO: 3731619 - RNA, 22 nt, Human
gcccuguccugccuaaggcuga

SEQ ID NO: 3731620 - RNA, 20 nt, Human
gcccugucgggcuuugugug

SEQ ID NO: 3731621 - RNA, 22 nt, Human
gcccugugccccuugacaacug

SEQ ID NO: 3731622 - RNA, 20 nt, Human
gcccugugggaccccaggcc

SEQ ID NO: 3731623 - RNA, 17 nt, Human
gcccugugggcccccaa

SEQ ID NO: 3731624 - RNA, 15 nt, Human
gcccugugugcaggu

SEQ ID NO: 3731625 - RNA, 13 nt, Human
gcccuguuaaaag

SEQ ID NO: 3731626 - RNA, 20 nt, Human
gcccuguucagcuacuccca

SEQ ID NO: 3731627 - RNA, 22 nt, Human
gcccuguucucuaccaagcuau

SEQ ID NO: 3731628 - RNA, 21 nt, Human
gcccuguucugggugcagcug

SEQ ID NO: 3731629 - RNA, 20 nt, Human
gcccuguugacacaggucuu

SEQ ID NO: 3731630 - RNA, 14 nt, Human
gcccuguugugcca

SEQ ID NO: 3731631 - RNA, 17 nt, Human
gcccuguuguguauaga

SEQ ID NO: 3731632 - RNA, 15 nt, Human
gcccuuaaaaauaug

SEQ ID NO: 3731633 - RNA, 21 nt, Human
gcccuuaccugccaggaagcc

SEQ ID NO: 3731634 - RNA, 23 nt, Human
gcccuuaccugccaggaagccag

SEQ ID NO: 3731635 - RNA, 20 nt, Human
gcccuuagcagggaaacagc

SEQ ID NO: 3731636 - RNA, 17 nt, Human
gcccuuagucccccaac

SEQ ID NO: 3731637 - RNA, 15 nt, Human
gcccuuaucugugcu

SEQ ID NO: 3731638 - RNA, 19 nt, Human
gcccuuaucugugcucagg

SEQ ID NO: 3731639 - RNA, 17 nt, Human
gcccuuauuuucaagaa

SEQ ID NO: 3731640 - RNA, 16 nt, Human
gcccuucacaguguuu

SEQ ID NO: 3731641 - RNA, 15 nt, Human
gcccuucauuuggag

SEQ ID NO: 3731642 - RNA, 21 nt, Human
gcccuuccaugucgccucugc

SEQ ID NO: 3731643 - RNA, 22 nt, Human
gcccuuccaugucgccucugca

SEQ ID NO: 3731644 - RNA, 12 nt, Human
gcccuucccacu

SEQ ID NO: 3731645 - RNA, 12 nt, Human
gcccuucccugu

SEQ ID NO: 3731646 - RNA, 15 nt, Human
gcccuucccuguccc

SEQ ID NO: 3731647 - RNA, 13 nt, Human
gcccuuccucucc

SEQ ID NO: 3731648 - RNA, 16 nt, Human
gcccuuccucuccacu

SEQ ID NO: 3731649 - RNA, 19 nt, Human
gcccuuccucuccacugcc

SEQ ID NO: 3731650 - RNA, 13 nt, Human
gcccuuccucugc

SEQ ID NO: 3731651 - RNA, 17 nt, Human
gcccuuccucugcuccc

SEQ ID NO: 3731652 - RNA, 16 nt, Human
gcccuuccuggacagc

SEQ ID NO: 3731653 - RNA, 20 nt, Human
gcccuuccuggacagcugug

SEQ ID NO: 3731654 - RNA, 21 nt, Human
gcccuuccuggacagcugugc

SEQ ID NO: 3731655 - RNA, 21 nt, Human
gcccuucggaggaccagggcu

SEQ ID NO: 3731656 - RNA, 23 nt, Human
gcccuucucuccagccccuggau

SEQ ID NO: 3731657 - RNA, 17 nt, Human
gcccuugaguccccauu

SEQ ID NO: 3731658 - RNA, 16 nt, Human
gcccuugcccugaccu

SEQ ID NO: 3731659 - RNA, 18 nt, Human
gcccuugcccugaccucc

SEQ ID NO: 3731660 - RNA, 13 nt, Human
gcccuugccuccc

SEQ ID NO: 3731661 - RNA, 14 nt, Human
gcccuugccucccc

SEQ ID NO: 3731662 - RNA, 18 nt, Human
gcccuugcuuaccucuca

SEQ ID NO: 3731663 - RNA, 21 nt, Human
gcccuuggagcguggacuggu

SEQ ID NO: 3731664 - RNA, 15 nt, Human
gcccuuggcuucugu

SEQ ID NO: 3731665 - RNA, 21 nt, Human
gcccuuggggguccuccucca

SEQ ID NO: 3731666 - RNA, 16 nt, Human
gcccuugucggcccca

SEQ ID NO: 3731667 - RNA, 18 nt, Human
gcccuuguuuggggcagg

SEQ ID NO: 3731668 - RNA, 17 nt, Human
gcccuuuacuugucuuu

SEQ ID NO: 3731669 - RNA, 21 nt, Human
gcccuuuacuugucuuucugg

SEQ ID NO: 3731670 - RNA, 21 nt, Human
gcccuuuccccgacgcccacc

SEQ ID NO: 3731671 - RNA, 15 nt, Human
gcccuuuccuccuca

SEQ ID NO: 3731672 - RNA, 19 nt, Human
gcccuuucggauccaggga

SEQ ID NO: 3731673 - RNA, 22 nt, Human
gcccuuucuguaccauuuauuu

SEQ ID NO: 3731674 - RNA, 18 nt, Human
gcccuuugagugcagucc

SEQ ID NO: 3731675 - RNA, 20 nt, Human
gcccuuugcaucguccccuc

SEQ ID NO: 3731676 - RNA, 14 nt, Human
gcccuuugcugucc

SEQ ID NO: 3731677 - RNA, 17 nt, Human
gcccuuugggaggcuga

SEQ ID NO: 3731678 - RNA, 13 nt, Human
gcccuuuuccccu

SEQ ID NO: 3731679 - RNA, 19 nt, Human
gcccuuuuccccuaccaau

SEQ ID NO: 3731680 - RNA, 12 nt, Human
gccgaaacugga

SEQ ID NO: 3731681 - RNA, 15 nt, Human
gccgaaccaaaagaa

SEQ ID NO: 3731682 - RNA, 13 nt, Human
gccgaagcccagg

SEQ ID NO: 3731683 - RNA, 17 nt, Human
gccgaagcucuggcuga

SEQ ID NO: 3731684 - RNA, 15 nt, Human
gccgaauagcugaug

SEQ ID NO: 3731685 - RNA, 20 nt, Human
gccgaauccccucccuguca

SEQ ID NO: 3731686 - RNA, 17 nt, Human
gccgacauugucucccg

SEQ ID NO: 3731687 - RNA, 19 nt, Human
gccgaccagaggagccuuu

SEQ ID NO: 3731688 - RNA, 17 nt, Human
gccgaccucagccuucc

SEQ ID NO: 3731689 - RNA, 19 nt, Human
gccgaccucguccuccccc

SEQ ID NO: 3731690 - RNA, 13 nt, Human
gccgaccuuagau

SEQ ID NO: 3731691 - RNA, 15 nt, Human
gccgacucuggcccu

SEQ ID NO: 3731692 - RNA, 21 nt, Human
gccgacuuuguaccccccaac

SEQ ID NO: 3731693 - RNA, 23 nt, Human
gccgacuuuguaccccccaaccc

SEQ ID NO: 3731694 - RNA, 14 nt, Human
gccgagaagcaaga

SEQ ID NO: 3731695 - RNA, 12 nt, Human
gccgagagccug

SEQ ID NO: 3731696 - RNA, 22 nt, Human
gccgagagccugcucccccacc

SEQ ID NO: 3731697 - RNA, 20 nt, Human
gccgagaucacgccacugca

SEQ ID NO: 3731698 - RNA, 14 nt, Human
gccgagcaaccgug

SEQ ID NO: 3731699 - RNA, 14 nt, Human
gccgagcaggaggc

SEQ ID NO: 3731700 - RNA, 21 nt, Human
gccgagcucguguauccuggg

SEQ ID NO: 3731701 - RNA, 22 nt, Human
gccgagcucguguauccugggg

SEQ ID NO: 3731702 - RNA, 16 nt, Human
gccgaggagccaggca

SEQ ID NO: 3731703 - RNA, 15 nt, Human
gccgaguccaagcug

SEQ ID NO: 3731704 - RNA, 14 nt, Human
gccgaugcccagag

SEQ ID NO: 3731705 - RNA, 13 nt, Human
gccgauggagaca

SEQ ID NO: 3731706 - RNA, 17 nt, Human
gccgauuucuguaaacu

SEQ ID NO: 3731707 - RNA, 16 nt, Human
gccgcaaaccacacug

SEQ ID NO: 3731708 - RNA, 13 nt, Human
gccgcaccccaga

SEQ ID NO: 3731709 - RNA, 21 nt, Human
gccgcaccuaaagcagccagc

SEQ ID NO: 3731710 - RNA, 13 nt, Human
gccgcagcucuug

SEQ ID NO: 3731711 - RNA, 20 nt, Human
gccgcagcucuugcccuucc

SEQ ID NO: 3731712 - RNA, 23 nt, Human
gccgcaucucacagcuaugcaaa

SEQ ID NO: 3731713 - RNA, 18 nt, Human
gccgcaucuucuccaucu

SEQ ID NO: 3731714 - RNA, 20 nt, Human
gccgcaucuucuccaucugg

SEQ ID NO: 3731715 - RNA, 18 nt, Human
gccgcauucccugaguca

SEQ ID NO: 3731716 - RNA, 16 nt, Human
gccgccaucagcccaa

SEQ ID NO: 3731717 - RNA, 16 nt, Human
gccgccaugcuccugg

SEQ ID NO: 3731718 - RNA, 14 nt, Human
gccgccccacccag

SEQ ID NO: 3731719 - RNA, 20 nt, Human
gccgccccaucugccccaca

SEQ ID NO: 3731720 - RNA, 18 nt, Human
gccgcccugcgggugaac

SEQ ID NO: 3731721 - RNA, 13 nt, Human
gccgccgccucgc

SEQ ID NO: 3731722 - RNA, 13 nt, Human
gccgccgccucuu

SEQ ID NO: 3731723 - RNA, 23 nt, Human
gccgccggcaauaaaagcccagg

SEQ ID NO: 3731724 - RNA, 17 nt, Human
gccgccucccagccugg

SEQ ID NO: 3731725 - RNA, 18 nt, Human
gccgccuccgggaccccc

SEQ ID NO: 3731726 - RNA, 17 nt, Human
gccgccucgcccaccgc

SEQ ID NO: 3731727 - RNA, 13 nt, Human
gccgccugcacuc

SEQ ID NO: 3731728 - RNA, 23 nt, Human
gccgccugcccgucucucuccca

SEQ ID NO: 3731729 - RNA, 13 nt, Human
gccgccugguacu

SEQ ID NO: 3731730 - RNA, 15 nt, Human
gccgccuguggacag

SEQ ID NO: 3731731 - RNA, 16 nt, Human
gccgcguggugccauc

SEQ ID NO: 3731732 - RNA, 21 nt, Human
gccgcguggugccauccccag

SEQ ID NO: 3731733 - RNA, 11 nt, Human
gccgcuaccuc

SEQ ID NO: 3731734 - RNA, 17 nt, Human
gccgcuagaggccugag

SEQ ID NO: 3731735 - RNA, 11 nt, Human
gccgcuccaga

SEQ ID NO: 3731736 - RNA, 12 nt, Human
gccgcuccagag

SEQ ID NO: 3731737 - RNA, 13 nt, Human
gccgcuccagagu

SEQ ID NO: 3731738 - RNA, 16 nt, Human
gccgcuccagagucag

SEQ ID NO: 3731739 - RNA, 15 nt, Human
gccgcuccaggggug

SEQ ID NO: 3731740 - RNA, 15 nt, Human
gccgcucggaggccc

SEQ ID NO: 3731741 - RNA, 16 nt, Human
gccgcucggaggcccc

SEQ ID NO: 3731742 - RNA, 12 nt, Human
gccgcugccacc

SEQ ID NO: 3731743 - RNA, 14 nt, Human
gccgcugccaccca

SEQ ID NO: 3731744 - RNA, 17 nt, Human
gccgcugugagccccug

SEQ ID NO: 3731745 - RNA, 16 nt, Human
gccgcuguucacccac

SEQ ID NO: 3731746 - RNA, 19 nt, Human
gccgcuuggcgaugccagc

SEQ ID NO: 3731747 - RNA, 22 nt, Human
gccggacacccgacuccagucc

SEQ ID NO: 3731748 - RNA, 13 nt, Human
gccggagaggaag

SEQ ID NO: 3731749 - RNA, 18 nt, Human
gccggagaggaagagaca

SEQ ID NO: 3731750 - RNA, 16 nt, Human
gccggagucagugcca

SEQ ID NO: 3731751 - RNA, 21 nt, Human
gccggaguccacucccagugc

SEQ ID NO: 3731752 - RNA, 17 nt, Human
gccggaucugagggaga

SEQ ID NO: 3731753 - RNA, 20 nt, Human
gccggcaaccccaguucugc

SEQ ID NO: 3731754 - RNA, 21 nt, Human
gccggcaaccccaguucugcu

SEQ ID NO: 3731755 - RNA, 18 nt, Human
gccggcaauaaaagccca

SEQ ID NO: 3731756 - RNA, 13 nt, Human
gccggcacagggu

SEQ ID NO: 3731757 - RNA, 16 nt, Human
gccggcacggcccgug

SEQ ID NO: 3731758 - RNA, 16 nt, Human
uauugacauuuguagu

SEQ ID NO: 3731759 - RNA, 15 nt, Human
uauugacucuggguc

SEQ ID NO: 3731760 - RNA, 22 nt, Human
uauugacucuggguccuuccug

SEQ ID NO: 3731761 - RNA, 15 nt, Human
uauugacuuguauau

SEQ ID NO: 3731762 - RNA, 14 nt, Human
uauugacuuugucu

SEQ ID NO: 3731763 - RNA, 18 nt, Human
uauugagaauuuuaaauu

SEQ ID NO: 3731764 - RNA, 15 nt, Human
uauugagacaaaaau

SEQ ID NO: 3731765 - RNA, 19 nt, Human
uauugagagagauguguaa

SEQ ID NO: 3731766 - RNA, 15 nt, Human
uauugagauuucuua

SEQ ID NO: 3731767 - RNA, 22 nt, Human
uauugaggccaagaauauugca

SEQ ID NO: 3731768 - RNA, 20 nt, Human
uauugagggaaauguuuuca

SEQ ID NO: 3731769 - RNA, 14 nt, Human
uauugagucaaaug

SEQ ID NO: 3731770 - RNA, 21 nt, Human
uauugaguuccaguugaaguu

SEQ ID NO: 3731771 - RNA, 21 nt, Human
uauugaguuuguagguaaaau

SEQ ID NO: 3731772 - RNA, 14 nt, Human
uauugauaacagca

SEQ ID NO: 3731773 - RNA, 17 nt, Human
uauugauaagaucuuuu

SEQ ID NO: 3731774 - RNA, 23 nt, Human
uauugauaaguucauacauugua

SEQ ID NO: 3731775 - RNA, 15 nt, Human
uauugauaguacucu

SEQ ID NO: 3731776 - RNA, 20 nt, Human
uauugauaugcuuauacacu

SEQ ID NO: 3731777 - RNA, 11 nt, Human
uauugauauuc

SEQ ID NO: 3731778 - RNA, 18 nt, Human
uauugaugaaaagauuua

SEQ ID NO: 3731779 - RNA, 13 nt, Human
uauugaugaaaau

SEQ ID NO: 3731780 - RNA, 20 nt, Human
uauugaugugcaaaaauuuu

SEQ ID NO: 3731781 - RNA, 13 nt, Human
uauugauguuuuc

SEQ ID NO: 3731782 - RNA, 14 nt, Human
uauugauguuuuca

SEQ ID NO: 3731783 - RNA, 23 nt, Human
uauugauucaccuccuaaaacaa

SEQ ID NO: 3731784 - RNA, 12 nt, Human
uauugcaaaaua

SEQ ID NO: 3731785 - RNA, 15 nt, Human
uauugcaaaauacau

SEQ ID NO: 3731786 - RNA, 17 nt, Human
uauugcaaaauacauga

SEQ ID NO: 3731787 - RNA, 18 nt, Human
uauugcaaaauacaugaa

SEQ ID NO: 3731788 - RNA, 21 nt, Human
uauugcaaagguuccaacugu

SEQ ID NO: 3731789 - RNA, 20 nt, Human
uauugcaaagucaggaauca

SEQ ID NO: 3731790 - RNA, 20 nt, Human
uauugcagcaauuaaaaauu

SEQ ID NO: 3731791 - RNA, 11 nt, Human
uauugcaguuu

SEQ ID NO: 3731792 - RNA, 13 nt, Human
uauugcaguuuau

SEQ ID NO: 3731793 - RNA, 20 nt, Human
uauugcaguuuaucauucaa

SEQ ID NO: 3731794 - RNA, 19 nt, Human
uauugcauacuauuaaaca

SEQ ID NO: 3731795 - RNA, 15 nt, Human
uauugcauaugcaua

SEQ ID NO: 3731796 - RNA, 14 nt, Human
uauugcaucuguau

SEQ ID NO: 3731797 - RNA, 17 nt, Human
uauugcaucuguauaag

SEQ ID NO: 3731798 - RNA, 15 nt, Human
uauugcauuaauuuu

SEQ ID NO: 3731799 - RNA, 17 nt, Human
uauugcauuuauaugua

SEQ ID NO: 3731800 - RNA, 14 nt, Human
uauugccaaacauu

SEQ ID NO: 3731801 - RNA, 18 nt, Human
uauugccaaacauuaaug

SEQ ID NO: 3731802 - RNA, 21 nt, Human
uauugccaaacauuaauguug

SEQ ID NO: 3731803 - RNA, 15 nt, Human
uauugcccacgcugg

SEQ ID NO: 3731804 - RNA, 22 nt, Human
uauugccuaagaauaaacauuu

SEQ ID NO: 3731805 - RNA, 17 nt, Human
uauugccugagagcaca

SEQ ID NO: 3731806 - RNA, 11 nt, Human
uauugccuucu

SEQ ID NO: 3731807 - RNA, 17 nt, Human
uauugccuucucaccag

SEQ ID NO: 3731808 - RNA, 21 nt, Human
uauugccuucucaccagcugc

SEQ ID NO: 3731809 - RNA, 15 nt, Human
uauugccuucuuuga

SEQ ID NO: 3731810 - RNA, 16 nt, Human
uauugccuucuuugaa

SEQ ID NO: 3731811 - RNA, 18 nt, Human
uauugccuucuuugaaga

SEQ ID NO: 3731812 - RNA, 14 nt, Human
uauugcgcugcuac

SEQ ID NO: 3731813 - RNA, 18 nt, Human
uauugcuacuuccugccu

SEQ ID NO: 3731814 - RNA, 14 nt, Human
uauugcuagagcuc

SEQ ID NO: 3731815 - RNA, 15 nt, Human
uauugcuaguauuug

SEQ ID NO: 3731816 - RNA, 15 nt, Human
uauugcugaagaauc

SEQ ID NO: 3731817 - RNA, 17 nt, Human
uauugcugaaugcaaga

SEQ ID NO: 3731818 - RNA, 15 nt, Human
uauugcugagagaaa

SEQ ID NO: 3731819 - RNA, 16 nt, Human
uauugcugagagaaau

SEQ ID NO: 3731820 - RNA, 17 nt, Human
uauugcugauggugcaa

SEQ ID NO: 3731821 - RNA, 19 nt, Human
uauugcuguccuugaaugc

SEQ ID NO: 3731822 - RNA, 19 nt, Human
uauugcuguguaacacugu

SEQ ID NO: 3731823 - RNA, 18 nt, Human
uauugcuguugcuugaau

SEQ ID NO: 3731824 - RNA, 21 nt, Human
uauugcuuauugcuuaguaaa

SEQ ID NO: 3731825 - RNA, 15 nt, Human
uauuggaacuugcga

SEQ ID NO: 3731826 - RNA, 15 nt, Human
uauuggaauuaaccu

SEQ ID NO: 3731827 - RNA, 21 nt, Human
uauuggaauuaaccuggugcu

SEQ ID NO: 3731828 - RNA, 23 nt, Human
uauuggaauuaaccuggugcugg

SEQ ID NO: 3731829 - RNA, 23 nt, Human
uauuggaggaccaaaaaaauaag

SEQ ID NO: 3731830 - RNA, 15 nt, Human
uauuggcuuuucuga

SEQ ID NO: 3731831 - RNA, 17 nt, Human
uauuggggucugacccc

SEQ ID NO: 3731832 - RNA, 13 nt, Human
uauugguccagcu

SEQ ID NO: 3731833 - RNA, 16 nt, Human
uauugguggcuuuccu

SEQ ID NO: 3731834 - RNA, 18 nt, Human
uauugguggcuuuccuug

SEQ ID NO: 3731835 - RNA, 22 nt, Human
uauugguuuaaagaaaguguau

SEQ ID NO: 3731836 - RNA, 13 nt, Human
uauugguuuuaug

SEQ ID NO: 3731837 - RNA, 16 nt, Human
uauuguaaacaugugu

SEQ ID NO: 3731838 - RNA, 14 nt, Human
uauuguaaauaugu

SEQ ID NO: 3731839 - RNA, 15 nt, Human
uauuguaaauauguu

SEQ ID NO: 3731840 - RNA, 15 nt, Human
uauuguaacagacau

SEQ ID NO: 3731841 - RNA, 16 nt, Human
uauuguaacagacauu

SEQ ID NO: 3731842 - RNA, 19 nt, Human
uauuguaacagacauuguu

SEQ ID NO: 3731843 - RNA, 22 nt, Human
uauuguacaaaguauuaagcau

SEQ ID NO: 3731844 - RNA, 23 nt, Human
uauuguacaaaguauuaagcaua

SEQ ID NO: 3731845 - RNA, 11 nt, Human
uauuguacagu

SEQ ID NO: 3731846 - RNA, 13 nt, Human
uauuguacaguuu

SEQ ID NO: 3731847 - RNA, 17 nt, Human
uauuguacaguuuuuau

SEQ ID NO: 3731848 - RNA, 11 nt, Human
uauuguaccuc

SEQ ID NO: 3731849 - RNA, 14 nt, Human
uauuguaccucucu

SEQ ID NO: 3731850 - RNA, 20 nt, Human
uauuguagcauccuggaaua

SEQ ID NO: 3731851 - RNA, 15 nt, Human
uauuguagcauuucu

SEQ ID NO: 3731852 - RNA, 16 nt, Human
uauuguauaaacuauc

SEQ ID NO: 3731853 - RNA, 13 nt, Human
uauuguauucugg

SEQ ID NO: 3731854 - RNA, 18 nt, Human
uauuguauuguuagaugu

SEQ ID NO: 3731855 - RNA, 15 nt, Human
uauuguauuuauuca

SEQ ID NO: 3731856 - RNA, 16 nt, Human
uauuguauuuauucaa

SEQ ID NO: 3731857 - RNA, 17 nt, Human
uauuguauuuauucaau

SEQ ID NO: 3731858 - RNA, 20 nt, Human
uauuguauuuauucaauaaa

SEQ ID NO: 3731859 - RNA, 15 nt, Human
uauuguauuuauucc

SEQ ID NO: 3731860 - RNA, 15 nt, Human
uauuguccauugucc

SEQ ID NO: 3731861 - RNA, 13 nt, Human
uauugucuguaaa

SEQ ID NO: 3731862 - RNA, 14 nt, Human
uauugucuguaaau

SEQ ID NO: 3731863 - RNA, 14 nt, Human
uauugugaacauuu

SEQ ID NO: 3731864 - RNA, 19 nt, Human
uauugugauuugacuguuu

SEQ ID NO: 3731865 - RNA, 21 nt, Human
uauugugauuugacuguuuuu

SEQ ID NO: 3731866 - RNA, 17 nt, Human
uauugugcaauguaaau

SEQ ID NO: 3731867 - RNA, 16 nt, Human
uauugugcaaugugua

SEQ ID NO: 3731868 - RNA, 18 nt, Human
uauugugcaauguguaua

SEQ ID NO: 3731869 - RNA, 22 nt, Human
uauugugguaggccuuuuaaca

SEQ ID NO: 3731870 - RNA, 23 nt, Human
uauugugguaggccuuuuaacau

SEQ ID NO: 3731871 - RNA, 16 nt, Human
uauugugucuuuugca

SEQ ID NO: 3731872 - RNA, 16 nt, Human
uauuguguuuguguau

SEQ ID NO: 3731873 - RNA, 21 nt, Human
uauuguuaacucuugucuauu

SEQ ID NO: 3731874 - RNA, 15 nt, Human
uauuguuacucuggu

SEQ ID NO: 3731875 - RNA, 16 nt, Human
uauuguucaaacaaua

SEQ ID NO: 3731876 - RNA, 20 nt, Human
uauuguucaaacaauaucau

SEQ ID NO: 3731877 - RNA, 17 nt, Human
uauuguucagcaugcaa

SEQ ID NO: 3731878 - RNA, 13 nt, Human
uauuguuccaaga

SEQ ID NO: 3731879 - RNA, 17 nt, Human
uauuguuccaagacauu

SEQ ID NO: 3731880 - RNA, 19 nt, Human
uauuguuccaagacauugu

SEQ ID NO: 3731881 - RNA, 21 nt, Human
uauuguuccaagacauuguca

SEQ ID NO: 3731882 - RNA, 23 nt, Human
uauuguuccaagacauugucaau

SEQ ID NO: 3731883 - RNA, 17 nt, Human
uauuguucccagugaca

SEQ ID NO: 3731884 - RNA, 21 nt, Human
uauuguucccagugacacuuc

SEQ ID NO: 3731885 - RNA, 21 nt, Human
uauuguuccuaaguucuuaga

SEQ ID NO: 3731886 - RNA, 14 nt, Human
uauuguugaaaaag

SEQ ID NO: 3731887 - RNA, 20 nt, Human
uauuguugacaacugugacu

SEQ ID NO: 3731888 - RNA, 14 nt, Human
uauuguuguauaau

SEQ ID NO: 3731889 - RNA, 14 nt, Human
uauuguuguccuuu

SEQ ID NO: 3731890 - RNA, 13 nt, Human
uauuguuuaugua

SEQ ID NO: 3731891 - RNA, 22 nt, Human
uauuguuuauucuuuuuaaagu

SEQ ID NO: 3731892 - RNA, 13 nt, Human
uauuguuucuuua

SEQ ID NO: 3731893 - RNA, 15 nt, Human
uauuguuugguaaau

SEQ ID NO: 3731894 - RNA, 14 nt, Human
uauuuaaaaaacua

SEQ ID NO: 3731895 - RNA, 19 nt, Human
uauuuaaaaacaaaaggca

SEQ ID NO: 3731896 - RNA, 17 nt, Human
uauuuaaaaauaaguca

SEQ ID NO: 3731897 - RNA, 13 nt, Human
uauuuaaaaaugu

SEQ ID NO: 3731898 - RNA, 17 nt, Human
uauuuaaaaaugucuug

SEQ ID NO: 3731899 - RNA, 12 nt, Human
uauuuaaaagau

SEQ ID NO: 3731900 - RNA, 15 nt, Human
uauuuaaaagauuca

SEQ ID NO: 3731901 - RNA, 16 nt, Human
uauuuaaaagauucau

SEQ ID NO: 3731902 - RNA, 14 nt, Human
uauuuaaaauagca

SEQ ID NO: 3731903 - RNA, 15 nt, Human
uauuuaaacuaucuu

SEQ ID NO: 3731904 - RNA, 16 nt, Human
uauuuaaacuuauaaa

SEQ ID NO: 3731905 - RNA, 20 nt, Human
uauuuaaagaagaaacgucu

SEQ ID NO: 3731906 - RNA, 12 nt, Human
uauuuaaagaca

SEQ ID NO: 3731907 - RNA, 18 nt, Human
uauuuaaagacaaagaca

SEQ ID NO: 3731908 - RNA, 14 nt, Human
uauuuaaagacagg

SEQ ID NO: 3731909 - RNA, 18 nt, Human
uauuuaaagggaaauuga

SEQ ID NO: 3731910 - RNA, 15 nt, Human
uauuuaaauagauga

SEQ ID NO: 3731911 - RNA, 21 nt, Human
uauuuaaauccugaagagcau

SEQ ID NO: 3731912 - RNA, 18 nt, Human
uauuuaaauguaaagaca

SEQ ID NO: 3731913 - RNA, 14 nt, Human
uauuuaaaugucua

SEQ ID NO: 3731914 - RNA, 15 nt, Human
uauuuaaauucuuuu

SEQ ID NO: 3731915 - RNA, 13 nt, Human
uauuuaacagaaa

SEQ ID NO: 3731916 - RNA, 16 nt, Human
uauuuaacagaaauug

SEQ ID NO: 3731917 - RNA, 17 nt, Human
uauuuaaccucuaaauu

SEQ ID NO: 3731918 - RNA, 13 nt, Human
uauuuaacuaauu

SEQ ID NO: 3731919 - RNA, 14 nt, Human
uauuuaacuucuga

SEQ ID NO: 3731920 - RNA, 21 nt, Human
uauuuaagaaaauacaauaaa

SEQ ID NO: 3731921 - RNA, 14 nt, Human
uauuuaagauguga

SEQ ID NO: 3731922 - RNA, 13 nt, Human
uauuuaagcaaau

SEQ ID NO: 3731923 - RNA, 20 nt, Human
uauuuaaguaacuuuaaauu

SEQ ID NO: 3731924 - RNA, 18 nt, Human
uauuuaauagcaaagaau

SEQ ID NO: 3731925 - RNA, 22 nt, Human
uauuuaauagcaaagaauugac

SEQ ID NO: 3731926 - RNA, 21 nt, Human
uauuuaaugcauuaaaccugu

SEQ ID NO: 3731927 - RNA, 17 nt, Human
uauuuaauggaagugua

SEQ ID NO: 3731928 - RNA, 15 nt, Human
uauuuaauguuaugu

SEQ ID NO: 3731929 - RNA, 12 nt, Human
uauuuaauguug

SEQ ID NO: 3731930 - RNA, 13 nt, Human
uauuuaauguuga

SEQ ID NO: 3731931 - RNA, 17 nt, Human
uauuuaauguugaacaa

SEQ ID NO: 3731932 - RNA, 15 nt, Human
uauuuaauguuuuaa

SEQ ID NO: 3731933 - RNA, 17 nt, Human
uauuuaauguuuuaaau

SEQ ID NO: 3731934 - RNA, 21 nt, Human
uauuuaauuagugcuaagugu

SEQ ID NO: 3731935 - RNA, 14 nt, Human
uauuuaauucaugu

SEQ ID NO: 3731936 - RNA, 16 nt, Human
uauuuaauuguaaacu

SEQ ID NO: 3731937 - RNA, 17 nt, Human
uauuuaauuguaaacug

SEQ ID NO: 3731938 - RNA, 16 nt, Human
uauuuacaaccuagaa

SEQ ID NO: 3731939 - RNA, 16 nt, Human
uauuuacaagaagaac

SEQ ID NO: 3731940 - RNA, 15 nt, Human
uauuuacaauguauu

SEQ ID NO: 3731941 - RNA, 15 nt, Human
uauuuacacaauuua

SEQ ID NO: 3731942 - RNA, 13 nt, Human
uauuuaccucagc

SEQ ID NO: 3731943 - RNA, 15 nt, Human
uauuuaccucagccu

SEQ ID NO: 3731944 - RNA, 14 nt, Human
uauuuacgcuuuga

SEQ ID NO: 3731945 - RNA, 14 nt, Human
uauuuacugagcuu

SEQ ID NO: 3731946 - RNA, 21 nt, Human
uauuuacugagcuucucugug

SEQ ID NO: 3731947 - RNA, 13 nt, Human
uauuuagacaaga

SEQ ID NO: 3731948 - RNA, 22 nt, Human
uauuuagauuguuaaaauaacu

SEQ ID NO: 3731949 - RNA, 21 nt, Human
uauuuagcaugacaagcccca

SEQ ID NO: 3731950 - RNA, 20 nt, Human
uauuuagugcugcaucuuau

SEQ ID NO: 3731951 - RNA, 15 nt, Human
uauuuaguuauaguu

SEQ ID NO: 3731952 - RNA, 20 nt, Human
uauuuauaacaaccuaaauu

SEQ ID NO: 3731953 - RNA, 14 nt, Human
uauuuauaacagca

SEQ ID NO: 3731954 - RNA, 18 nt, Human
uauuuauaacagcauucu

SEQ ID NO: 3731955 - RNA, 22 nt, Human
uauuuauaacucaucauaaaau

SEQ ID NO: 3731956 - RNA, 16 nt, Human
uauuuauaagaaaaau

SEQ ID NO: 3731957 - RNA, 20 nt, Human
uauuuauaagaaaaauguga

SEQ ID NO: 3731958 - RNA, 17 nt, Human
uauuuauaaucacuuuu

SEQ ID NO: 3731959 - RNA, 19 nt, Human
uauuuauacaagauugaaa

SEQ ID NO: 3731960 - RNA, 23 nt, Human
uauuuauauaauuauguuauuga

SEQ ID NO: 3731961 - RNA, 17 nt, Human
uauuuauauguacuguu

SEQ ID NO: 3731962 - RNA, 16 nt, Human
uauuuauauguaugug

SEQ ID NO: 3731963 - RNA, 18 nt, Human
uauuuauauguauguguu

SEQ ID NO: 3731964 - RNA, 15 nt, Human
uauuuauauuucacu

SEQ ID NO: 3731965 - RNA, 16 nt, Human
uauuuauauuucacua

SEQ ID NO: 3731966 - RNA, 18 nt, Human
uauuuaucagugacagag

SEQ ID NO: 3731967 - RNA, 20 nt, Human
uauuuauccaaaauguguau

SEQ ID NO: 3731968 - RNA, 15 nt, Human
uauuuauccauuugu

SEQ ID NO: 3731969 - RNA, 17 nt, Human
uauuuaucuauuguaag

SEQ ID NO: 3731970 - RNA, 16 nt, Human
uauuuaucucuauuua

SEQ ID NO: 3731971 - RNA, 17 nt, Human
uauuuaucucuauuuaa

SEQ ID NO: 3731972 - RNA, 15 nt, Human
uauuuaucugauuaa

SEQ ID NO: 3731973 - RNA, 20 nt, Human
uauuuaucugugcaaauccu

SEQ ID NO: 3731974 - RNA, 13 nt, Human
uauuuaucuucau

SEQ ID NO: 3731975 - RNA, 12 nt, Human
uauuuaugaagu

SEQ ID NO: 3731976 - RNA, 14 nt, Human
uauuuaugaaguuu

SEQ ID NO: 3731977 - RNA, 16 nt, Human
uauuuaugaaguuuaa

SEQ ID NO: 3731978 - RNA, 21 nt, Human
uauuuaugccuugaugauuua

SEQ ID NO: 3731979 - RNA, 22 nt, Human
uauuuaugccuugaugauuuaa

SEQ ID NO: 3731980 - RNA, 19 nt, Human
uauuuauggaugcaacacg

SEQ ID NO: 3731981 - RNA, 20 nt, Human
uauuuauguauugugcaaug

SEQ ID NO: 3731982 - RNA, 21 nt, Human
uauuuaugucuauuuaagccu

SEQ ID NO: 3731983 - RNA, 13 nt, Human
uauuuauguuugc

SEQ ID NO: 3731984 - RNA, 15 nt, Human
uauuuauuaaauaaa

SEQ ID NO: 3731985 - RNA, 17 nt, Human
uauuuauuaaauaaaau

SEQ ID NO: 3731986 - RNA, 13 nt, Human
uauuuauuaaauu

SEQ ID NO: 3731987 - RNA, 14 nt, Human
uauuuauuaaauuu

SEQ ID NO: 3731988 - RNA, 24 nt, Human
uauuuauuaaauuuuuuuguauga

SEQ ID NO: 3731989 - RNA, 13 nt, Human
uauuuauuaauau

SEQ ID NO: 3731990 - RNA, 18 nt, Human
uauuuauuaauauuuaac

SEQ ID NO: 3731991 - RNA, 19 nt, Human
uauuuauuaauauuuaaca

SEQ ID NO: 3731992 - RNA, 20 nt, Human
uauuuauuacauaauuuagu

SEQ ID NO: 3731993 - RNA, 14 nt, Human
uauuuauuacugua

SEQ ID NO: 3731994 - RNA, 20 nt, Human
uauuuauuaugcuuuauugg

SEQ ID NO: 3731995 - RNA, 19 nt, Human
uauuuauuauuuucaccug

SEQ ID NO: 3731996 - RNA, 14 nt, Human
uauuuauucaauaa

SEQ ID NO: 3731997 - RNA, 24 nt, Human
uauuuauucagcuucauuuguguc

SEQ ID NO: 3731998 - RNA, 21 nt, Human
uauuuauucugggaauguaua

SEQ ID NO: 3731999 - RNA, 15 nt, Human
uauuuauugacucuu

SEQ ID NO: 3732000 - RNA, 17 nt, Human
uauuuauugacucuuga

SEQ ID NO: 3732001 - RNA, 21 nt, Human
uauuuauugacucuugaguug

SEQ ID NO: 3732002 - RNA, 21 nt, Human
uauuuauugcuacuuccugcc

SEQ ID NO: 3732003 - RNA, 13 nt, Human
uauuuauuguauu

SEQ ID NO: 3732004 - RNA, 16 nt, Human
uauuuauuguuuauuu

SEQ ID NO: 3732005 - RNA, 13 nt, Human
uauuuauuuaaaa

SEQ ID NO: 3732006 - RNA, 17 nt, Human
uauuuauuuaaagcauu

SEQ ID NO: 3732007 - RNA, 16 nt, Human
uauuuauuuaaauguc

SEQ ID NO: 3732008 - RNA, 12 nt, Human
uauuuauuuaau

SEQ ID NO: 3732009 - RNA, 11 nt, Human
uauuuauuuac

SEQ ID NO: 3732010 - RNA, 13 nt, Human
uauuuauuuacug

SEQ ID NO: 3732011 - RNA, 17 nt, Human
uauuuauuuacugagcu

SEQ ID NO: 3732012 - RNA, 13 nt, Human
uauuuauuuguga

SEQ ID NO: 3732013 - RNA, 21 nt, Human
uauuuauuuuccuaaagagag

SEQ ID NO: 3732014 - RNA, 21 nt, Human
uauuuauuuucuuuugaauug

SEQ ID NO: 3732015 - RNA, 14 nt, Human
uauuuauuuuguaa

SEQ ID NO: 3732016 - RNA, 15 nt, Human
uauuuauuuuguaau

SEQ ID NO: 3732017 - RNA, 19 nt, Human
uauuuauuuuguaauuaug

SEQ ID NO: 3732018 - RNA, 18 nt, Human
uauuuauuuuuacaagaa

SEQ ID NO: 3732019 - RNA, 14 nt, Human
uauuucaaaaauuu

SEQ ID NO: 3732020 - RNA, 17 nt, Human
uauuucaaaaauuugga

SEQ ID NO: 3732021 - RNA, 14 nt, Human
uauuucaaauugga

SEQ ID NO: 3732022 - RNA, 18 nt, Human
uauuucaaauuggagcuu

SEQ ID NO: 3732023 - RNA, 16 nt, Human
uauuucaauguuagcc

SEQ ID NO: 3732024 - RNA, 20 nt, Human
uauuucacaaauaauaggug

SEQ ID NO: 3732025 - RNA, 22 nt, Human
uauuucacacgcuguucuaaug

SEQ ID NO: 3732026 - RNA, 14 nt, Human
uauuucacuggagc

SEQ ID NO: 3732027 - RNA, 15 nt, Human
uauuucacuggagca

SEQ ID NO: 3732028 - RNA, 20 nt, Human
uauuucagauguaauguuuu

SEQ ID NO: 3732029 - RNA, 12 nt, Human
uauuucagauuu

SEQ ID NO: 3732030 - RNA, 19 nt, Human
uauuucagauuuugauaac

SEQ ID NO: 3732031 - RNA, 23 nt, Human
uauuucagauuuugauaacuguu

SEQ ID NO: 3732032 - RNA, 22 nt, Human
uauuucaguguaguuaauuuau

SEQ ID NO: 3732033 - RNA, 23 nt, Human
uauuucaguguaguuaauuuauc

SEQ ID NO: 3732034 - RNA, 21 nt, Human
uauuucaucauauuauacaga

SEQ ID NO: 3732035 - RNA, 21 nt, Human
uauuucaugcugggaaugaga

SEQ ID NO: 3732036 - RNA, 13 nt, Human
uauuucauguuuu

SEQ ID NO: 3732037 - RNA, 21 nt, Human
uauuucauguuuuugaucaaa

SEQ ID NO: 3732038 - RNA, 12 nt, Human
uauuucauugcc

SEQ ID NO: 3732039 - RNA, 13 nt, Human
uauuucauuuauu

SEQ ID NO: 3732040 - RNA, 13 nt, Human
uauuucauuucuu

SEQ ID NO: 3732041 - RNA, 14 nt, Human
uauuuccacuaaaa

SEQ ID NO: 3732042 - RNA, 17 nt, Human
uauuuccacuaaaaaua

SEQ ID NO: 3732043 - RNA, 22 nt, Human
uauuuccaguguucuaugaaca

SEQ ID NO: 3732044 - RNA, 18 nt, Human
uauuuccauucaacaaga

SEQ ID NO: 3732045 - RNA, 21 nt, Human
uauuuccauuccagaauaucu

SEQ ID NO: 3732046 - RNA, 19 nt, Human
uauuucccuaaaauacauu

SEQ ID NO: 3732047 - RNA, 15 nt, Human
uauuucccuacauua

SEQ ID NO: 3732048 - RNA, 16 nt, Human
uauuucccuacauuaa

SEQ ID NO: 3732049 - RNA, 22 nt, Human
uauuucccucaccuuucccauc

SEQ ID NO: 3732050 - RNA, 20 nt, Human
uauuucccuccccuggggac

SEQ ID NO: 3732051 - RNA, 17 nt, Human
uauuuccuauaccauuu

SEQ ID NO: 3732052 - RNA, 15 nt, Human
uauuuccuaugaugu

SEQ ID NO: 3732053 - RNA, 19 nt, Human
uauuuccucaugugaucac

SEQ ID NO: 3732054 - RNA, 19 nt, Human
uauuuccuuaaacugugug

SEQ ID NO: 3732055 - RNA, 16 nt, Human
uauuuccuuuauguga

SEQ ID NO: 3732056 - RNA, 15 nt, Human
uauuucgaaagcugc

SEQ ID NO: 3732057 - RNA, 19 nt, Human
uauuucuagggcugggaaa

SEQ ID NO: 3732058 - RNA, 16 nt, Human
uauuucuaucccaaac

SEQ ID NO: 3732059 - RNA, 14 nt, Human
uauuucuaugaaau

SEQ ID NO: 3732060 - RNA, 22 nt, Human
uauagucaauggcuuguucauc

SEQ ID NO: 3732061 - RNA, 13 nt, Human
uauaguccagcuu

SEQ ID NO: 3732062 - RNA, 20 nt, Human
uauagucuaagacuauauau

SEQ ID NO: 3732063 - RNA, 13 nt, Human
uauagugauguaa

SEQ ID NO: 3732064 - RNA, 15 nt, Human
uauagugcaauauau

SEQ ID NO: 3732065 - RNA, 16 nt, Human
uauagugcacaaaaug

SEQ ID NO: 3732066 - RNA, 18 nt, Human
uauagugcacaaaaugaa

SEQ ID NO: 3732067 - RNA, 15 nt, Human
uauaguggaaaaaca

SEQ ID NO: 3732068 - RNA, 18 nt, Human
uauaguguaaaauaagaa

SEQ ID NO: 3732069 - RNA, 13 nt, Human
uauaguuaacaca

SEQ ID NO: 3732070 - RNA, 18 nt, Human
uauaguuaacacacuacc

SEQ ID NO: 3732071 - RNA, 15 nt, Human
uauaguucuagacau

SEQ ID NO: 3732072 - RNA, 14 nt, Human
uauaguugcuugcc

SEQ ID NO: 3732073 - RNA, 22 nt, Human
uauaguugcuugccugauauaa

SEQ ID NO: 3732074 - RNA, 21 nt, Human
uauaguuguggacauuuaaga

SEQ ID NO: 3732075 - RNA, 14 nt, Human
uauaguuuaaaaca

SEQ ID NO: 3732076 - RNA, 16 nt, Human
uauaguuuacuauuuu

SEQ ID NO: 3732077 - RNA, 19 nt, Human
uauaguuuauugacaauaa

SEQ ID NO: 3732078 - RNA, 22 nt, Human
uauaguuucugaggcuuuauga

SEQ ID NO: 3732079 - RNA, 17 nt, Human
uauaguuugggcuucag

SEQ ID NO: 3732080 - RNA, 15 nt, Human
uauaguuuuacuuuu

SEQ ID NO: 3732081 - RNA, 16 nt, Human
uauaguuuuacuuuua

SEQ ID NO: 3732082 - RNA, 22 nt, Human
uauaguuuugaauccuuugccu

SEQ ID NO: 3732083 - RNA, 14 nt, Human
uauauaaaaauaua

SEQ ID NO: 3732084 - RNA, 22 nt, Human
uauauaaaauaaauauauauaa

SEQ ID NO: 3732085 - RNA, 23 nt, Human
uauauaaagaaaaugauacagca

SEQ ID NO: 3732086 - RNA, 15 nt, Human
uauauaaagaauaua

SEQ ID NO: 3732087 - RNA, 19 nt, Human
uauauaaagaauauauaua

SEQ ID NO: 3732088 - RNA, 12 nt, Human
uauauaaagaga

SEQ ID NO: 3732089 - RNA, 16 nt, Human
uauauaaaguauucuu

SEQ ID NO: 3732090 - RNA, 16 nt, Human
uauauaaauaaauaua

SEQ ID NO: 3732091 - RNA, 19 nt, Human
uauauaaauaaauauauau

SEQ ID NO: 3732092 - RNA, 22 nt, Human
uauauaaauaaauauauauauc

SEQ ID NO: 3732093 - RNA, 15 nt, Human
uauauaaauauauau

SEQ ID NO: 3732094 - RNA, 16 nt, Human
uauauaaauauauaua

SEQ ID NO: 3732095 - RNA, 17 nt, Human
uauauaaaugggaacau

SEQ ID NO: 3732096 - RNA, 19 nt, Human
uauauaacaaugcuguauu

SEQ ID NO: 3732097 - RNA, 22 nt, Human
uauauaagauggaagcuuccag

SEQ ID NO: 3732098 - RNA, 13 nt, Human
uauauaauaucua

SEQ ID NO: 3732099 - RNA, 17 nt, Human
uauauaauaucuaaagu

SEQ ID NO: 3732100 - RNA, 16 nt, Human
uauauaaucaucaagu

SEQ ID NO: 3732101 - RNA, 22 nt, Human
uauauaauuacauauuugcaua

SEQ ID NO: 3732102 - RNA, 14 nt, Human
uauauaauuauguu

SEQ ID NO: 3732103 - RNA, 21 nt, Human
uauauaauucacucaagcacu

SEQ ID NO: 3732104 - RNA, 14 nt, Human
uauauaauucugua

SEQ ID NO: 3732105 - RNA, 16 nt, Human
uauauacaaaaagaaa

SEQ ID NO: 3732106 - RNA, 12 nt, Human
uauauacacaua

SEQ ID NO: 3732107 - RNA, 13 nt, Human
uauauacacauau

SEQ ID NO: 3732108 - RNA, 23 nt, Human
uauauacagaggaaaucuguaac

SEQ ID NO: 3732109 - RNA, 14 nt, Human
uauauacaguaacu

SEQ ID NO: 3732110 - RNA, 13 nt, Human
uauauacauaugu

SEQ ID NO: 3732111 - RNA, 17 nt, Human
uauauacauauguagac

SEQ ID NO: 3732112 - RNA, 14 nt, Human
uauauacaugugug

SEQ ID NO: 3732113 - RNA, 17 nt, Human
uauauacauguguguau

SEQ ID NO: 3732114 - RNA, 21 nt, Human
uauauacauuuaugaauuaaa

SEQ ID NO: 3732115 - RNA, 15 nt, Human
uauauaccguggggg

SEQ ID NO: 3732116 - RNA, 20 nt, Human
uauauacuuguuguuuaaug

SEQ ID NO: 3732117 - RNA, 21 nt, Human
uauauagcagcaaaaauauaa

SEQ ID NO: 3732118 - RNA, 23 nt, Human
uauauagcaguaaaaaauggugu

SEQ ID NO: 3732119 - RNA, 15 nt, Human
uauauagcauuuaug

SEQ ID NO: 3732120 - RNA, 14 nt, Human
uauauagcuggcaa

SEQ ID NO: 3732121 - RNA, 19 nt, Human
uauauagcuggcaagaaug

SEQ ID NO: 3732122 - RNA, 20 nt, Human
uauauagcuggcaagaaugg

SEQ ID NO: 3732123 - RNA, 18 nt, Human
uauauaggcuauuuucua

SEQ ID NO: 3732124 - RNA, 21 nt, Human
uauauagguuuuguuugcuau

SEQ ID NO: 3732125 - RNA, 17 nt, Human
uauauaguaccuuugcu

SEQ ID NO: 3732126 - RNA, 14 nt, Human
uauauagugcuaua

SEQ ID NO: 3732127 - RNA, 17 nt, Human
uauauagugcuauauau

SEQ ID NO: 3732128 - RNA, 12 nt, Human
uauauauaaaau

SEQ ID NO: 3732129 - RNA, 13 nt, Human
uauauauaaaaua

SEQ ID NO: 3732130 - RNA, 12 nt, Human
uauauauaaaua

SEQ ID NO: 3732131 - RNA, 15 nt, Human
uauauauaaauguau

SEQ ID NO: 3732132 - RNA, 16 nt, Human
uauauauaacauauau

SEQ ID NO: 3732133 - RNA, 18 nt, Human
uauauauaauucuguaca

SEQ ID NO: 3732134 - RNA, 13 nt, Human
uauauauacagua

SEQ ID NO: 3732135 - RNA, 11 nt, Human
uauauauacau

SEQ ID NO: 3732136 - RNA, 12 nt, Human
uauauauacaua

SEQ ID NO: 3732137 - RNA, 13 nt, Human
uauauauacauau

SEQ ID NO: 3732138 - RNA, 14 nt, Human
uauauauacauaua

SEQ ID NO: 3732139 - RNA, 16 nt, Human
uauauauacauaugua

SEQ ID NO: 3732140 - RNA, 18 nt, Human
uauauauacauauguaga

SEQ ID NO: 3732141 - RNA, 13 nt, Human
uauauauagaauc

SEQ ID NO: 3732142 - RNA, 19 nt, Human
uauauauagugcuauauau

SEQ ID NO: 3732143 - RNA, 12 nt, Human
uauauauauaaa

SEQ ID NO: 3732144 - RNA, 14 nt, Human
uauauauauaaaau

SEQ ID NO: 3732145 - RNA, 14 nt, Human
uauauauauaaaua

SEQ ID NO: 3732146 - RNA, 15 nt, Human
uauauauauauaaag

SEQ ID NO: 3732147 - RNA, 15 nt, Human
uauauauauauauaa

SEQ ID NO: 3732148 - RNA, 14 nt, Human
uauauauauauaug

SEQ ID NO: 3732149 - RNA, 13 nt, Human
uauauauauaucu

SEQ ID NO: 3732150 - RNA, 15 nt, Human
uauauauauauguac

SEQ ID NO: 3732151 - RNA, 13 nt, Human
uauauauaucagu

SEQ ID NO: 3732152 - RNA, 13 nt, Human
uauauauaucugu

SEQ ID NO: 3732153 - RNA, 13 nt, Human
uauauauaugcau

SEQ ID NO: 3732154 - RNA, 15 nt, Human
uauauauaugcauau

SEQ ID NO: 3732155 - RNA, 13 nt, Human
uauauaucaguuu

SEQ ID NO: 3732156 - RNA, 17 nt, Human
uauauaucaguuugauc

SEQ ID NO: 3732157 - RNA, 22 nt, Human
uauauaucauauugguauucac

SEQ ID NO: 3732158 - RNA, 16 nt, Human
uauauauccucuguau

SEQ ID NO: 3732159 - RNA, 15 nt, Human
uauauaucuaucuua

SEQ ID NO: 3732160 - RNA, 19 nt, Human
uauauaucugcuucagugg

SEQ ID NO: 3732161 - RNA, 21 nt, Human
uauauaugccuuuuuccuagc

SEQ ID NO: 3732162 - RNA, 22 nt, Human
uauauauggggaugguaguuuu

SEQ ID NO: 3732163 - RNA, 14 nt, Human
uauauauguacagu

SEQ ID NO: 3732164 - RNA, 18 nt, Human
uauauauguauaaauaaa

SEQ ID NO: 3732165 - RNA, 14 nt, Human
uauauaugugagga

SEQ ID NO: 3732166 - RNA, 21 nt, Human
uauauauguguauauauacau

SEQ ID NO: 3732167 - RNA, 14 nt, Human
uauauaugugugug

SEQ ID NO: 3732168 - RNA, 16 nt, Human
uauauauuauacuugu

SEQ ID NO: 3732169 - RNA, 15 nt, Human
uauauauuauaugga

SEQ ID NO: 3732170 - RNA, 16 nt, Human
uauauauuauauggaa

SEQ ID NO: 3732171 - RNA, 15 nt, Human
uauauauuuaaaagu

SEQ ID NO: 3732172 - RNA, 19 nt, Human
uauauauuuaaaaguguca

SEQ ID NO: 3732173 - RNA, 13 nt, Human
uauauauuuauaa

SEQ ID NO: 3732174 - RNA, 18 nt, Human
uauauauuuugugugaaa

SEQ ID NO: 3732175 - RNA, 22 nt, Human
uauauauuuuugguugucaaua

SEQ ID NO: 3732176 - RNA, 20 nt, Human
uauauauuuuuuucugaaau

SEQ ID NO: 3732177 - RNA, 23 nt, Human
uauauauuuuuuucugaaauuuc

SEQ ID NO: 3732178 - RNA, 11 nt, Human
uauaucagccu

SEQ ID NO: 3732179 - RNA, 14 nt, Human
uauaucauauguau

SEQ ID NO: 3732180 - RNA, 19 nt, Human
uauaucauguaaagaaaug

SEQ ID NO: 3732181 - RNA, 16 nt, Human
uauaucauucuaaaga

SEQ ID NO: 3732182 - RNA, 20 nt, Human
uauauccaaaagcuuuuuau

SEQ ID NO: 3732183 - RNA, 19 nt, Human
uauauccauguacuguagu

SEQ ID NO: 3732184 - RNA, 16 nt, Human
uauaucccugauaaau

SEQ ID NO: 3732185 - RNA, 17 nt, Human
uauauccugugacuguc

SEQ ID NO: 3732186 - RNA, 17 nt, Human
uauauccuuucuaacaa

SEQ ID NO: 3732187 - RNA, 13 nt, Human
uauauccuuuucu

SEQ ID NO: 3732188 - RNA, 20 nt, Human
uauauccuuuucuucuaugu

SEQ ID NO: 3732189 - RNA, 19 nt, Human
uauaucuaaaucuguccaa

SEQ ID NO: 3732190 - RNA, 13 nt, Human
uauaucuaaauug

SEQ ID NO: 3732191 - RNA, 17 nt, Human
uauaucuaaauugaaua

SEQ ID NO: 3732192 - RNA, 21 nt, Human
uauaucuaccccagacuagau

SEQ ID NO: 3732193 - RNA, 18 nt, Human
uauaucuagguuuaugac

SEQ ID NO: 3732194 - RNA, 21 nt, Human
uauaucuauauauaauucugu

SEQ ID NO: 3732195 - RNA, 17 nt, Human
uauaucuauauauauaa

SEQ ID NO: 3732196 - RNA, 17 nt, Human
uauaucuauauguacuu

SEQ ID NO: 3732197 - RNA, 14 nt, Human
uauaucuaucuauu

SEQ ID NO: 3732198 - RNA, 14 nt, Human
uauaucucuauuug

SEQ ID NO: 3732199 - RNA, 16 nt, Human
uauaucucucaugcau

SEQ ID NO: 3732200 - RNA, 16 nt, Human
uauaucugaaaacugg

SEQ ID NO: 3732201 - RNA, 18 nt, Human
uauaucugaggaauucug

SEQ ID NO: 3732202 - RNA, 15 nt, Human
uauaucuguauauaa

SEQ ID NO: 3732203 - RNA, 14 nt, Human
uauaucuguggucu

SEQ ID NO: 3732204 - RNA, 18 nt, Human
uauaucuguggucuucaa

SEQ ID NO: 3732205 - RNA, 12 nt, Human
uauaucuuguuu

SEQ ID NO: 3732206 - RNA, 14 nt, Human
uauaugaaaaccug

SEQ ID NO: 3732207 - RNA, 14 nt, Human
uauaugaaaacuaa

SEQ ID NO: 3732208 - RNA, 19 nt, Human
uauaugaacauacaaaugc

SEQ ID NO: 3732209 - RNA, 19 nt, Human
uauaugaacuuaacaugcu

SEQ ID NO: 3732210 - RNA, 22 nt, Human
uauaugaacuuaacaugcugug

SEQ ID NO: 3732211 - RNA, 19 nt, Human
uauaugaagaaaaucacuu

SEQ ID NO: 3732212 - RNA, 22 nt, Human
uauaugaauuuaaauauaauuc

SEQ ID NO: 3732213 - RNA, 20 nt, Human
uauaugagaagaauagccua

SEQ ID NO: 3732214 - RNA, 18 nt, Human
uauaugagacuuuaugug

SEQ ID NO: 3732215 - RNA, 19 nt, Human
uauaugaggacuugugucu

SEQ ID NO: 3732216 - RNA, 13 nt, Human
uauaugauggggg

SEQ ID NO: 3732217 - RNA, 16 nt, Human
uauaugauuuauaguu

SEQ ID NO: 3732218 - RNA, 16 nt, Human
uauaugccaugaugga

SEQ ID NO: 3732219 - RNA, 16 nt, Human
uauaugcuauuucuau

SEQ ID NO: 3732220 - RNA, 20 nt, Human
uauaugcucugcauguuaca

SEQ ID NO: 3732221 - RNA, 21 nt, Human
uauaugcucugcauguuacau

SEQ ID NO: 3732222 - RNA, 16 nt, Human
uauaugcuuacugaua

SEQ ID NO: 3732223 - RNA, 14 nt, Human
uauaugcuucuguu

SEQ ID NO: 3732224 - RNA, 16 nt, Human
uauaugcuucuguuuu

SEQ ID NO: 3732225 - RNA, 18 nt, Human
uauaugcuuuauuaaugu

SEQ ID NO: 3732226 - RNA, 18 nt, Human
uauauggaaauauauauu

SEQ ID NO: 3732227 - RNA, 22 nt, Human
uauauggaaauauauauuauac

SEQ ID NO: 3732228 - RNA, 17 nt, Human
uauauggaagaggaaaa

SEQ ID NO: 3732229 - RNA, 16 nt, Human
uauauggaugauucag

SEQ ID NO: 3732230 - RNA, 20 nt, Human
uauauggcagaguuguaaau

SEQ ID NO: 3732231 - RNA, 23 nt, Human
uauauggcagaguuguaaauaua

SEQ ID NO: 3732232 - RNA, 20 nt, Human
uauauggugguaauaaggga

SEQ ID NO: 3732233 - RNA, 12 nt, Human
uauauguacagu

SEQ ID NO: 3732234 - RNA, 19 nt, Human
uauauguacccucugaaau

SEQ ID NO: 3732235 - RNA, 22 nt, Human
uauauguacccucugaaauaca

SEQ ID NO: 3732236 - RNA, 21 nt, Human
uauauguauauuuuuuuaauu

SEQ ID NO: 3732237 - RNA, 19 nt, Human
uauauguauuauuuauaau

SEQ ID NO: 3732238 - RNA, 12 nt, Human
uauauguauuuu

SEQ ID NO: 3732239 - RNA, 17 nt, Human
uauauguauuuuuauau

SEQ ID NO: 3732240 - RNA, 12 nt, Human
uauaugucaaag

SEQ ID NO: 3732241 - RNA, 18 nt, Human
uauaugugaaaggauaug

SEQ ID NO: 3732242 - RNA, 18 nt, Human
uauaugugaacauuuauc

SEQ ID NO: 3732243 - RNA, 22 nt, Human
uauaugugaauccucuucuuua

SEQ ID NO: 3732244 - RNA, 17 nt, Human
uauaugugccacauuuu

SEQ ID NO: 3732245 - RNA, 19 nt, Human
uauauguguauauauacau

SEQ ID NO: 3732246 - RNA, 20 nt, Human
uauauguguauauauacaua

SEQ ID NO: 3732247 - RNA, 14 nt, Human
uauauguguaugca

SEQ ID NO: 3732248 - RNA, 14 nt, Human
uauauguguaugua

SEQ ID NO: 3732249 - RNA, 13 nt, Human
uauaugugugugu

SEQ ID NO: 3732250 - RNA, 19 nt, Human
uauauguguguguauguuu

SEQ ID NO: 3732251 - RNA, 15 nt, Human
uauauguguguuuaa

SEQ ID NO: 3732252 - RNA, 14 nt, Human
uauauguucacugu

SEQ ID NO: 3732253 - RNA, 20 nt, Human
uauauguuuaccuuuuaauu

SEQ ID NO: 3732254 - RNA, 23 nt, Human
uauauguuuaccuuuuaauuaau

SEQ ID NO: 3732255 - RNA, 11 nt, Human
uauauguuuua

SEQ ID NO: 3732256 - RNA, 19 nt, Human
uauauguuuuugaaggcag

SEQ ID NO: 3732257 - RNA, 21 nt, Human
uauauuaaaaauauaaaacug

SEQ ID NO: 3732258 - RNA, 19 nt, Human
uauauuaaaaaugguaaaa

SEQ ID NO: 3732259 - RNA, 16 nt, Human
uauauuaaaagcaggc

SEQ ID NO: 3732260 - RNA, 22 nt, Human
uauauuaaaauuccaaauucau

SEQ ID NO: 3732261 - RNA, 13 nt, Human
uauauuaaacaaa

SEQ ID NO: 3732262 - RNA, 13 nt, Human
uauauuaagcaga

SEQ ID NO: 3732263 - RNA, 13 nt, Human
uauauuaauagua

SEQ ID NO: 3732264 - RNA, 20 nt, Human
uauauuacacauuuguacag

SEQ ID NO: 3732265 - RNA, 18 nt, Human
uauauuaccagcaagaau

SEQ ID NO: 3732266 - RNA, 18 nt, Human
uauauuaguugcuuuguu

SEQ ID NO: 3732267 - RNA, 13 nt, Human
uauauuauaauag

SEQ ID NO: 3732268 - RNA, 13 nt, Human
uauauuauaugga

SEQ ID NO: 3732269 - RNA, 19 nt, Human
uauauuauauggaaauaua

SEQ ID NO: 3732270 - RNA, 16 nt, Human
uauauuauuacuugua

SEQ ID NO: 3732271 - RNA, 19 nt, Human
uauauuauuacuuguaaau

SEQ ID NO: 3732272 - RNA, 13 nt, Human
uauauuauuuggc

SEQ ID NO: 3732273 - RNA, 12 nt, Human
uauauucaacca

SEQ ID NO: 3732274 - RNA, 14 nt, Human
uauauucaaccaug

SEQ ID NO: 3732275 - RNA, 22 nt, Human
uauauucaggacuugaaagaaa

SEQ ID NO: 3732276 - RNA, 16 nt, Human
guucuguuuacaucag

SEQ ID NO: 3732277 - RNA, 14 nt, Human
guucuguuucaagg

SEQ ID NO: 3732278 - RNA, 18 nt, Human
guucuguuucaaggcacu

SEQ ID NO: 3732279 - RNA, 15 nt, Human
guucuguuuguuaaa

SEQ ID NO: 3732280 - RNA, 17 nt, Human
guucuguuuguuaaaac

SEQ ID NO: 3732281 - RNA, 22 nt, Human
guucuguuuguuaaaacuggca

SEQ ID NO: 3732282 - RNA, 18 nt, Human
guucuguuuguuauuguu

SEQ ID NO: 3732283 - RNA, 23 nt, Human
guucuguuuguuauuguuuuguu

SEQ ID NO: 3732284 - RNA, 12 nt, Human
guucuguuuugu

SEQ ID NO: 3732285 - RNA, 17 nt, Human
guucuuaauucuuagcu

SEQ ID NO: 3732286 - RNA, 19 nt, Human
guucuuaauugcacucuaa

SEQ ID NO: 3732287 - RNA, 16 nt, Human
guucuuacacauacag

SEQ ID NO: 3732288 - RNA, 22 nt, Human
guucuuacacauacaguuuuau

SEQ ID NO: 3732289 - RNA, 16 nt, Human
guucuuagcucaauga

SEQ ID NO: 3732290 - RNA, 17 nt, Human
guucuuagcucaaugag

SEQ ID NO: 3732291 - RNA, 17 nt, Human
guucuuaugcaaaaugg

SEQ ID NO: 3732292 - RNA, 19 nt, Human
guucuuaugcaaaauggaa

SEQ ID NO: 3732293 - RNA, 16 nt, Human
guucuuccucagccag

SEQ ID NO: 3732294 - RNA, 16 nt, Human
guucuucgggaagaga

SEQ ID NO: 3732295 - RNA, 21 nt, Human
guucuucgggaagagaggagu

SEQ ID NO: 3732296 - RNA, 17 nt, Human
guucuucuuccugaagc

SEQ ID NO: 3732297 - RNA, 16 nt, Human
guucuugaggggacca

SEQ ID NO: 3732298 - RNA, 20 nt, Human
guucuugaggggaccaggag

SEQ ID NO: 3732299 - RNA, 22 nt, Human
guucuugaggggaccaggagug

SEQ ID NO: 3732300 - RNA, 22 nt, Human
guucuuggcaauaaauuuugaa

SEQ ID NO: 3732301 - RNA, 14 nt, Human
guucuugguuugua

SEQ ID NO: 3732302 - RNA, 12 nt, Human
guucuuguauuu

SEQ ID NO: 3732303 - RNA, 16 nt, Human
guucuuguucuguuuu

SEQ ID NO: 3732304 - RNA, 15 nt, Human
guucuuguuggugca

SEQ ID NO: 3732305 - RNA, 23 nt, Human
guucuuuaaaauguaaagccaug

SEQ ID NO: 3732306 - RNA, 16 nt, Human
guucuuuauauacaau

SEQ ID NO: 3732307 - RNA, 20 nt, Human
guucuuuauauacaauaaug

SEQ ID NO: 3732308 - RNA, 21 nt, Human
guucuuuauauacaauaaugg

SEQ ID NO: 3732309 - RNA, 18 nt, Human
guucuuucacccuuuucu

SEQ ID NO: 3732310 - RNA, 14 nt, Human
guucuuuccaaagu

SEQ ID NO: 3732311 - RNA, 18 nt, Human
guucuuuccaaaguacac

SEQ ID NO: 3732312 - RNA, 15 nt, Human
guucuuucuggaguc

SEQ ID NO: 3732313 - RNA, 22 nt, Human
guucuuugggccagacaugcca

SEQ ID NO: 3732314 - RNA, 12 nt, Human
guucuuugugua

SEQ ID NO: 3732315 - RNA, 15 nt, Human
guucuuuuaagccca

SEQ ID NO: 3732316 - RNA, 19 nt, Human
guucuuuucaauauauuug

SEQ ID NO: 3732317 - RNA, 12 nt, Human
guugaaaaaauu

SEQ ID NO: 3732318 - RNA, 17 nt, Human
guugaaaaccaaaauga

SEQ ID NO: 3732319 - RNA, 22 nt, Human
guugaaaauucaaaaaguguuu

SEQ ID NO: 3732320 - RNA, 21 nt, Human
guugaaacggaugauuucuau

SEQ ID NO: 3732321 - RNA, 22 nt, Human
guugaaacggaugauuucuaug

SEQ ID NO: 3732322 - RNA, 13 nt, Human
guugaaagguuuu

SEQ ID NO: 3732323 - RNA, 14 nt, Human
guugaaagguuuuu

SEQ ID NO: 3732324 - RNA, 21 nt, Human
guugaaagguuuuuuuucagu

SEQ ID NO: 3732325 - RNA, 23 nt, Human
guugaaagguuuuuuuucaguug

SEQ ID NO: 3732326 - RNA, 16 nt, Human
guugaaauaugauguu

SEQ ID NO: 3732327 - RNA, 20 nt, Human
guugaaauuguaauuauauc

SEQ ID NO: 3732328 - RNA, 24 nt, Human
guugaaauuuugcaaauauaaaca

SEQ ID NO: 3732329 - RNA, 14 nt, Human
guugaacaaaauaa

SEQ ID NO: 3732330 - RNA, 15 nt, Human
guugaacaaaauaaa

SEQ ID NO: 3732331 - RNA, 18 nt, Human
guugaaccuauuucucuu

SEQ ID NO: 3732332 - RNA, 21 nt, Human
guugaacugauaguuacuguu

SEQ ID NO: 3732333 - RNA, 17 nt, Human
guugaacuguuagaaug

SEQ ID NO: 3732334 - RNA, 19 nt, Human
guugaagagacagagacaa

SEQ ID NO: 3732335 - RNA, 20 nt, Human
guugaagagacagagacaag

SEQ ID NO: 3732336 - RNA, 22 nt, Human
guugaagagacagagacaagua

SEQ ID NO: 3732337 - RNA, 23 nt, Human
guugaagcaaaucgaaugaaauu

SEQ ID NO: 3732338 - RNA, 22 nt, Human
guugaagcuaagauuuagagau

SEQ ID NO: 3732339 - RNA, 16 nt, Human
guugaagucaugcucc

SEQ ID NO: 3732340 - RNA, 13 nt, Human
guugaauauuugu

SEQ ID NO: 3732341 - RNA, 13 nt, Human
guugaauguugca

SEQ ID NO: 3732342 - RNA, 21 nt, Human
guugaauuuauuggcuuuucu

SEQ ID NO: 3732343 - RNA, 22 nt, Human
guugaauuuauuggcuuuucug

SEQ ID NO: 3732344 - RNA, 21 nt, Human
guugaauuuuguucucuggga

SEQ ID NO: 3732345 - RNA, 16 nt, Human
guugacaacugugacu

SEQ ID NO: 3732346 - RNA, 19 nt, Human
guugacacaguuguagggu

SEQ ID NO: 3732347 - RNA, 15 nt, Human
uaaaauccucaaucc

SEQ ID NO: 3732348 - RNA, 17 nt, Human
uaaaaucuauucugugu

SEQ ID NO: 3732349 - RNA, 23 nt, Human
uaaaaucugagggaaauguuuug

SEQ ID NO: 3732350 - RNA, 21 nt, Human
uaaaaucugauauguauuguu

SEQ ID NO: 3732351 - RNA, 22 nt, Human
uaaaaucugauauguauuguuu

SEQ ID NO: 3732352 - RNA, 13 nt, Human
uaaaaucuuaaac

SEQ ID NO: 3732353 - RNA, 13 nt, Human
uaaaaucuuauag

SEQ ID NO: 3732354 - RNA, 22 nt, Human
uaaaaucuuggaaguacaugaa

SEQ ID NO: 3732355 - RNA, 14 nt, Human
uaaaaucuugucau

SEQ ID NO: 3732356 - RNA, 15 nt, Human
uaaaaucuugucaug

SEQ ID NO: 3732357 - RNA, 16 nt, Human
uaaaaucuugucaugu

SEQ ID NO: 3732358 - RNA, 20 nt, Human
uaaaaucuugucauguguau

SEQ ID NO: 3732359 - RNA, 18 nt, Human
uaaaaucuuucuuucuua

SEQ ID NO: 3732360 - RNA, 16 nt, Human
uaaaaugaaaauugua

SEQ ID NO: 3732361 - RNA, 14 nt, Human
uaaaaugaaauuac

SEQ ID NO: 3732362 - RNA, 15 nt, Human
uaaaaugaagaauuu

SEQ ID NO: 3732363 - RNA, 16 nt, Human
uaaaaugaagaauuua

SEQ ID NO: 3732364 - RNA, 17 nt, Human
uaaaaugaagaauuuaa

SEQ ID NO: 3732365 - RNA, 18 nt, Human
uaaaaugacaaucaugug

SEQ ID NO: 3732366 - RNA, 21 nt, Human
uaaaaugaccaguaauuguga

SEQ ID NO: 3732367 - RNA, 15 nt, Human
uaaaaugacuacuua

SEQ ID NO: 3732368 - RNA, 16 nt, Human
uaaaaugacuacuuag

SEQ ID NO: 3732369 - RNA, 19 nt, Human
uaaaaugacuacuuagcau

SEQ ID NO: 3732370 - RNA, 20 nt, Human
uaaaaugagguucaacuguu

SEQ ID NO: 3732371 - RNA, 14 nt, Human
uaaaaugauuguaa

SEQ ID NO: 3732372 - RNA, 16 nt, Human
uaaaaugauuguaaaa

SEQ ID NO: 3732373 - RNA, 18 nt, Human
uaaaaugauuguaaaaua

SEQ ID NO: 3732374 - RNA, 17 nt, Human
uaaaaugauuuguagug

SEQ ID NO: 3732375 - RNA, 23 nt, Human
uaaaaugauuuguaguggaaaca

SEQ ID NO: 3732376 - RNA, 20 nt, Human
uaaaaugcaaaaaaucuuaa

SEQ ID NO: 3732377 - RNA, 15 nt, Human
uaaaaugcaauguaa

SEQ ID NO: 3732378 - RNA, 16 nt, Human
uaaaaugcaugauuuu

SEQ ID NO: 3732379 - RNA, 21 nt, Human
uaaaaugccucaguguauuug

SEQ ID NO: 3732380 - RNA, 23 nt, Human
uaaaauggaauugaaaaacucuu

SEQ ID NO: 3732381 - RNA, 16 nt, Human
uaaaauggcaacaaac

SEQ ID NO: 3732382 - RNA, 17 nt, Human
uaaaauggcaacaaacu

SEQ ID NO: 3732383 - RNA, 18 nt, Human
uaaaauggcuguaaucau

SEQ ID NO: 3732384 - RNA, 18 nt, Human
uaaaaugguuuguccuga

SEQ ID NO: 3732385 - RNA, 10 nt, Human
uaaaauguaa

SEQ ID NO: 3732386 - RNA, 15 nt, Human
uaaaauguaaagcca

SEQ ID NO: 3732387 - RNA, 14 nt, Human
uaaaauguaagauu

SEQ ID NO: 3732388 - RNA, 17 nt, Human
uaaaauguaauuuaaau

SEQ ID NO: 3732389 - RNA, 18 nt, Human
uaaaauguacauguauua

SEQ ID NO: 3732390 - RNA, 22 nt, Human
uaaaauguaucuaagaauaaua

SEQ ID NO: 3732391 - RNA, 17 nt, Human
uaaaauguaugcauguu

SEQ ID NO: 3732392 - RNA, 22 nt, Human
uaaaauguauucuuaaauucau

SEQ ID NO: 3732393 - RNA, 23 nt, Human
uaaaauguauucuuaaauucauu

SEQ ID NO: 3732394 - RNA, 20 nt, Human
uaaaauguccaguaagauca

SEQ ID NO: 3732395 - RNA, 22 nt, Human
uaaaauguccaguaagaucacu

SEQ ID NO: 3732396 - RNA, 20 nt, Human
uaaaaugucuuuccaaauua

SEQ ID NO: 3732397 - RNA, 13 nt, Human
uaaaaugugaagu

SEQ ID NO: 3732398 - RNA, 19 nt, Human
uaaaaugugauguucuaag

SEQ ID NO: 3732399 - RNA, 20 nt, Human
uaaaaugugauguucuaagg

SEQ ID NO: 3732400 - RNA, 22 nt, Human
uaaaaugugauguucuaaggcu

SEQ ID NO: 3732401 - RNA, 18 nt, Human
uaaaaugugggauuaugg

SEQ ID NO: 3732402 - RNA, 23 nt, Human
uaaaaugugggauuaugggucac

SEQ ID NO: 3732403 - RNA, 23 nt, Human
uaaaauguguuguuccaaauacu

SEQ ID NO: 3732404 - RNA, 22 nt, Human
uaaaauguucacuuuugacaaa

SEQ ID NO: 3732405 - RNA, 14 nt, Human
uaaaauguugaaaa

SEQ ID NO: 3732406 - RNA, 17 nt, Human
uaaaauguugaaaaguc

SEQ ID NO: 3732407 - RNA, 19 nt, Human
uaaaauguugaaaagucaa

SEQ ID NO: 3732408 - RNA, 20 nt, Human
uaaaauguugaaaagucaaa

SEQ ID NO: 3732409 - RNA, 13 nt, Human
uaaaauguuuuca

SEQ ID NO: 3732410 - RNA, 12 nt, Human
uaaaauuaaaga

SEQ ID NO: 3732411 - RNA, 17 nt, Human
uaaaauuacaacuaagu

SEQ ID NO: 3732412 - RNA, 16 nt, Human
uaaaauuauacugugu

SEQ ID NO: 3732413 - RNA, 20 nt, Human
uaaaauuauacuguguguga

SEQ ID NO: 3732414 - RNA, 16 nt, Human
uaaaauuauagcucua

SEQ ID NO: 3732415 - RNA, 22 nt, Human
uaaaauuaucaauaucuaauau

SEQ ID NO: 3732416 - RNA, 20 nt, Human
uaaaauuaugaaucugauuu

SEQ ID NO: 3732417 - RNA, 21 nt, Human
uaaaauuauuuuggauuuugu

SEQ ID NO: 3732418 - RNA, 14 nt, Human
uaaaauucaguuuu

SEQ ID NO: 3732419 - RNA, 17 nt, Human
uaaaauuccaaauucau

SEQ ID NO: 3732420 - RNA, 15 nt, Human
uaaaauucucuucca

SEQ ID NO: 3732421 - RNA, 15 nt, Human
uaaaauucugaauuu

SEQ ID NO: 3732422 - RNA, 12 nt, Human
uaaaauugcaug

SEQ ID NO: 3732423 - RNA, 18 nt, Human
uaaaauugccauauugca

SEQ ID NO: 3732424 - RNA, 23 nt, Human
uaaaauugcuauguuacuauuuu

SEQ ID NO: 3732425 - RNA, 19 nt, Human
uaaaauuguaaaauuguau

SEQ ID NO: 3732426 - RNA, 20 nt, Human
uaaaauuguacauuuggaga

SEQ ID NO: 3732427 - RNA, 16 nt, Human
uaaaauuuauauugua

SEQ ID NO: 3732428 - RNA, 13 nt, Human
uaaaauuucaaca

SEQ ID NO: 3732429 - RNA, 16 nt, Human
uaaaauuucuuagaaa

SEQ ID NO: 3732430 - RNA, 14 nt, Human
uaaaauuugaaaca

SEQ ID NO: 3732431 - RNA, 16 nt, Human
uaaaauuugcccuccc

SEQ ID NO: 3732432 - RNA, 21 nt, Human
uaaaauuuggccaaacaagug

SEQ ID NO: 3732433 - RNA, 12 nt, Human
uaaaauuugugg

SEQ ID NO: 3732434 - RNA, 16 nt, Human
uaaaauuuugccuaau

SEQ ID NO: 3732435 - RNA, 17 nt, Human
uaaaauuuuuaaucuuu

SEQ ID NO: 3732436 - RNA, 16 nt, Human
uaaaauuuuuuuagaa

SEQ ID NO: 3732437 - RNA, 21 nt, Human
uaaaauuuuuuuagaaagcau

SEQ ID NO: 3732438 - RNA, 23 nt, Human
uaaaauuuuuuuucauguuuuaa

SEQ ID NO: 3732439 - RNA, 16 nt, Human
uaaacaaaauagaaag

SEQ ID NO: 3732440 - RNA, 17 nt, Human
uaaacaaacucuugaag

SEQ ID NO: 3732441 - RNA, 18 nt, Human
uaaacaaacuguguaacu

SEQ ID NO: 3732442 - RNA, 19 nt, Human
uaaacaaauguaugauuac

SEQ ID NO: 3732443 - RNA, 21 nt, Human
uaaacaaauucauauucuguc

SEQ ID NO: 3732444 - RNA, 14 nt, Human
uaaacaagaaaaau

SEQ ID NO: 3732445 - RNA, 19 nt, Human
uaaacaagaaaaauaaaga

SEQ ID NO: 3732446 - RNA, 21 nt, Human
uaaacaagaaaaauaaagaaa

SEQ ID NO: 3732447 - RNA, 21 nt, Human
uaaacaagaccacguuucuaa

SEQ ID NO: 3732448 - RNA, 22 nt, Human
uaaacaagaccacguuucuaaa

SEQ ID NO: 3732449 - RNA, 23 nt, Human
uaaacaagaccacguuucuaaag

SEQ ID NO: 3732450 - RNA, 18 nt, Human
uaaacaaguauuuguuaa

SEQ ID NO: 3732451 - RNA, 18 nt, Human
uaaacaauaucagacuuu

SEQ ID NO: 3732452 - RNA, 23 nt, Human
uaaacaaugaugcccugcuccag

SEQ ID NO: 3732453 - RNA, 24 nt, Human
uaaacaauuuauuuuauuuuagca

SEQ ID NO: 3732454 - RNA, 20 nt, Human
uaaacacaagauugguguuu

SEQ ID NO: 3732455 - RNA, 14 nt, Human
uaaacacacagaua

SEQ ID NO: 3732456 - RNA, 21 nt, Human
uaaacacagucaaaauaauuc

SEQ ID NO: 3732457 - RNA, 13 nt, Human
uaaacacauagau

SEQ ID NO: 3732458 - RNA, 16 nt, Human
uaaacacauagauuca

SEQ ID NO: 3732459 - RNA, 20 nt, Human
uaaacacauagauucaccug

SEQ ID NO: 3732460 - RNA, 17 nt, Human
uaaacacucaccuucua

SEQ ID NO: 3732461 - RNA, 14 nt, Human
uaaacacucagcug

SEQ ID NO: 3732462 - RNA, 15 nt, Human
uaaacacucagcugu

SEQ ID NO: 3732463 - RNA, 16 nt, Human
uaaacagauauaaaug

SEQ ID NO: 3732464 - RNA, 16 nt, Human
uaaacagaugaauaaa

SEQ ID NO: 3732465 - RNA, 23 nt, Human
uaaacagauguccaucagaugac

SEQ ID NO: 3732466 - RNA, 13 nt, Human
uaaacagcagugu

SEQ ID NO: 3732467 - RNA, 13 nt, Human
uaaacaggcccag

SEQ ID NO: 3732468 - RNA, 15 nt, Human
uaaacaggcccagca

SEQ ID NO: 3732469 - RNA, 20 nt, Human
uaaacagggcaucuccagga

SEQ ID NO: 3732470 - RNA, 17 nt, Human
uaaacagguggugagaa

SEQ ID NO: 3732471 - RNA, 20 nt, Human
uaaacagugagccugaauuu

SEQ ID NO: 3732472 - RNA, 17 nt, Human
uaaacagugccugcuga

SEQ ID NO: 3732473 - RNA, 22 nt, Human
uaaacaguugcacagcaucuca

SEQ ID NO: 3732474 - RNA, 15 nt, Human
uaaacauaauucuug

SEQ ID NO: 3732475 - RNA, 22 nt, Human
uaaacauaugauuucacuagaa

SEQ ID NO: 3732476 - RNA, 16 nt, Human
uaaacaucagguuagg

SEQ ID NO: 3732477 - RNA, 19 nt, Human
uaaacaucagguuaggcag

SEQ ID NO: 3732478 - RNA, 21 nt, Human
uaaacaucagguuaggcagua

SEQ ID NO: 3732479 - RNA, 15 nt, Human
uaaacaucauucauu

SEQ ID NO: 3732480 - RNA, 18 nt, Human
uaaacaugacuccauaga

SEQ ID NO: 3732481 - RNA, 22 nt, Human
uaaacaugacuccauagaccuu

SEQ ID NO: 3732482 - RNA, 22 nt, Human
uaaacaugcuguacauacuuuu

SEQ ID NO: 3732483 - RNA, 18 nt, Human
uaaacaugguuacaauca

SEQ ID NO: 3732484 - RNA, 15 nt, Human
uaaacauguguuuua

SEQ ID NO: 3732485 - RNA, 18 nt, Human
uaaacauuaaaugucuua

SEQ ID NO: 3732486 - RNA, 22 nt, Human
uaaacauuaaucaaucaucugu

SEQ ID NO: 3732487 - RNA, 18 nt, Human
uaaacauucuuuuaacuu

SEQ ID NO: 3732488 - RNA, 21 nt, Human
uaaacauugguucuuguauua

SEQ ID NO: 3732489 - RNA, 11 nt, Human
uaaacauuuuc

SEQ ID NO: 3732490 - RNA, 15 nt, Human
uaaaccaaaggacau

SEQ ID NO: 3732491 - RNA, 19 nt, Human
uaaaccaaaggacauuaug

SEQ ID NO: 3732492 - RNA, 23 nt, Human
uaaaccaaaggacauuaugugug

SEQ ID NO: 3732493 - RNA, 17 nt, Human
uaaaccaaugaacgaag

SEQ ID NO: 3732494 - RNA, 20 nt, Human
uaaaccacugaaaaaauaua

SEQ ID NO: 3732495 - RNA, 16 nt, Human
guugacaccugagaaa

SEQ ID NO: 3732496 - RNA, 18 nt, Human
guugacaguucauaugua

SEQ ID NO: 3732497 - RNA, 20 nt, Human
guugacauauuuaauguuuu

SEQ ID NO: 3732498 - RNA, 18 nt, Human
guugacaugggacauuug

SEQ ID NO: 3732499 - RNA, 14 nt, Human
guugacauucugaa

SEQ ID NO: 3732500 - RNA, 14 nt, Human
guugaccccagagg

SEQ ID NO: 3732501 - RNA, 22 nt, Human
guugaccuaagauuuauuuugu

SEQ ID NO: 3732502 - RNA, 22 nt, Human
guugacucuaguacugugaauc

SEQ ID NO: 3732503 - RNA, 19 nt, Human
guugacuuauaguacauga

SEQ ID NO: 3732504 - RNA, 21 nt, Human
guugacuuauuuucucugugu

SEQ ID NO: 3732505 - RNA, 20 nt, Human
guugacuugacagaacacug

SEQ ID NO: 3732506 - RNA, 16 nt, Human
guugagaaucccaaau

SEQ ID NO: 3732507 - RNA, 20 nt, Human
guugagaauugugcucaaaa

SEQ ID NO: 3732508 - RNA, 14 nt, Human
guugagaggacacu

SEQ ID NO: 3732509 - RNA, 17 nt, Human
guugagagugugaccaa

SEQ ID NO: 3732510 - RNA, 19 nt, Human
guugagcaugacagccugc

SEQ ID NO: 3732511 - RNA, 16 nt, Human
guugagccagcagaca

SEQ ID NO: 3732512 - RNA, 15 nt, Human
guugagccccaaguc

SEQ ID NO: 3732513 - RNA, 19 nt, Human
guugagccccaaguccuga

SEQ ID NO: 3732514 - RNA, 12 nt, Human
guugagcuauga

SEQ ID NO: 3732515 - RNA, 15 nt, Human
guugagcuaugacuu

SEQ ID NO: 3732516 - RNA, 13 nt, Human
guugagcuguuuu

SEQ ID NO: 3732517 - RNA, 17 nt, Human
guugaggaacuguacag

SEQ ID NO: 3732518 - RNA, 21 nt, Human
guugaggaguuuccuaaaagu

SEQ ID NO: 3732519 - RNA, 21 nt, Human
guugaggcagggcaaaugaca

SEQ ID NO: 3732520 - RNA, 19 nt, Human
guugaggccacuguguucc

SEQ ID NO: 3732521 - RNA, 19 nt, Human
guugagggaacagacagga

SEQ ID NO: 3732522 - RNA, 21 nt, Human
guugagguccagcccuggcug

SEQ ID NO: 3732523 - RNA, 22 nt, Human
guugagguccagcccuggcuga

SEQ ID NO: 3732524 - RNA, 20 nt, Human
guugagguggaagcccuccu

SEQ ID NO: 3732525 - RNA, 19 nt, Human
guugauacuguugcacgug

SEQ ID NO: 3732526 - RNA, 22 nt, Human
guugauagcaagugaauuuuuc

SEQ ID NO: 3732527 - RNA, 19 nt, Human
guugauagcacagacccug

SEQ ID NO: 3732528 - RNA, 23 nt, Human
guugauagcacagacccugcccu

SEQ ID NO: 3732529 - RNA, 20 nt, Human
guugaucacuggcaaugaaa

SEQ ID NO: 3732530 - RNA, 14 nt, Human
guugaucagaucug

SEQ ID NO: 3732531 - RNA, 15 nt, Human
guugauccauccagc

SEQ ID NO: 3732532 - RNA, 17 nt, Human
guugaucuggaacccag

SEQ ID NO: 3732533 - RNA, 15 nt, Human
guugaugaggccucu

SEQ ID NO: 3732534 - RNA, 20 nt, Human
guugauggugguauguuuuc

SEQ ID NO: 3732535 - RNA, 13 nt, Human
guugauuaaacuc

SEQ ID NO: 3732536 - RNA, 12 nt, Human
guugauuaaggc

SEQ ID NO: 3732537 - RNA, 13 nt, Human
guugauucucucc

SEQ ID NO: 3732538 - RNA, 14 nt, Human
guugauucucucca

SEQ ID NO: 3732539 - RNA, 12 nt, Human
guugauugcuaa

SEQ ID NO: 3732540 - RNA, 13 nt, Human
guugauugcuaaa

SEQ ID NO: 3732541 - RNA, 15 nt, Human
guugauugcuaaaug

SEQ ID NO: 3732542 - RNA, 16 nt, Human
guugauuucuaguuau

SEQ ID NO: 3732543 - RNA, 22 nt, Human
guugauuucuaguuauuuauuc

SEQ ID NO: 3732544 - RNA, 17 nt, Human
guugauuuuuacugugu

SEQ ID NO: 3732545 - RNA, 15 nt, Human
guugcaaacucagcc

SEQ ID NO: 3732546 - RNA, 17 nt, Human
guugcaaggccgcuguu

SEQ ID NO: 3732547 - RNA, 22 nt, Human
guugcaauagaacagagaaaga

SEQ ID NO: 3732548 - RNA, 16 nt, Human
guugcaaugugaaaaa

SEQ ID NO: 3732549 - RNA, 20 nt, Human
guugcacacccacucagcuc

SEQ ID NO: 3732550 - RNA, 10 nt, Human
guugcacagc

SEQ ID NO: 3732551 - RNA, 15 nt, Human
guugcacccagcccu

SEQ ID NO: 3732552 - RNA, 18 nt, Human
guugcacccagcccuggu

SEQ ID NO: 3732553 - RNA, 20 nt, Human
guugcacccagcccuggucu

SEQ ID NO: 3732554 - RNA, 23 nt, Human
guugcacguguguuuuucuauua

SEQ ID NO: 3732555 - RNA, 13 nt, Human
guugcacugaagu

SEQ ID NO: 3732556 - RNA, 21 nt, Human
guugcacugaaguuugauaaa

SEQ ID NO: 3732557 - RNA, 15 nt, Human
guugcagacaggaau

SEQ ID NO: 3732558 - RNA, 16 nt, Human
guugcagacaggaauc

SEQ ID NO: 3732559 - RNA, 19 nt, Human
guugcauacugagccaagu

SEQ ID NO: 3732560 - RNA, 18 nt, Human
guugcauagcaguauaug

SEQ ID NO: 3732561 - RNA, 14 nt, Human
guugcaucagaaau

SEQ ID NO: 3732562 - RNA, 16 nt, Human
guugcaucagaaaugu

SEQ ID NO: 3732563 - RNA, 13 nt, Human
guugcauggaaau

SEQ ID NO: 3732564 - RNA, 14 nt, Human
guugcauggaaauc

SEQ ID NO: 3732565 - RNA, 19 nt, Human
guugccaaauauguccugg

SEQ ID NO: 3732566 - RNA, 21 nt, Human
guugccaaauauguccugggg

SEQ ID NO: 3732567 - RNA, 20 nt, Human
guugccaagacaaaucaaca

SEQ ID NO: 3732568 - RNA, 13 nt, Human
guugccaagcugg

SEQ ID NO: 3732569 - RNA, 15 nt, Human
guugccacaggacac

SEQ ID NO: 3732570 - RNA, 16 nt, Human
guugccacaggccucc

SEQ ID NO: 3732571 - RNA, 19 nt, Human
guugccacaguagaacugu

SEQ ID NO: 3732572 - RNA, 17 nt, Human
guugccaccaccucugu

SEQ ID NO: 3732573 - RNA, 19 nt, Human
guugccaccaccucugugg

SEQ ID NO: 3732574 - RNA, 20 nt, Human
guugccaccaccucuguggc

SEQ ID NO: 3732575 - RNA, 18 nt, Human
guugcccagccucuuucc

SEQ ID NO: 3732576 - RNA, 22 nt, Human
guugcccagccucuuucccuuc

SEQ ID NO: 3732577 - RNA, 15 nt, Human
guugcccaggcuggc

SEQ ID NO: 3732578 - RNA, 21 nt, Human
guugcccaggcuggcgugcag

SEQ ID NO: 3732579 - RNA, 15 nt, Human
guugcccccauuucu

SEQ ID NO: 3732580 - RNA, 19 nt, Human
guugccccuuucucuuuuc

SEQ ID NO: 3732581 - RNA, 14 nt, Human
guugccuaaaucca

SEQ ID NO: 3732582 - RNA, 22 nt, Human
guugccuaaauccauuuggaaa

SEQ ID NO: 3732583 - RNA, 18 nt, Human
guugccuaagcauugccu

SEQ ID NO: 3732584 - RNA, 22 nt, Human
guugccuaaguauuaaaacauu

SEQ ID NO: 3732585 - RNA, 16 nt, Human
guugccuaauaaacau

SEQ ID NO: 3732586 - RNA, 24 nt, Human
guugccuuuuucauuuuccaauac

SEQ ID NO: 3732587 - RNA, 15 nt, Human
guugcgacggagaga

SEQ ID NO: 3732588 - RNA, 15 nt, Human
guugcggggggaggg

SEQ ID NO: 3732589 - RNA, 18 nt, Human
guugcguaacuggcugug

SEQ ID NO: 3732590 - RNA, 17 nt, Human
guugcguuccuuucuuu

SEQ ID NO: 3732591 - RNA, 23 nt, Human
guugcuaacagcaacacaaagcu

SEQ ID NO: 3732592 - RNA, 14 nt, Human
guugcuaacugaac

SEQ ID NO: 3732593 - RNA, 17 nt, Human
guugcuaagccccagca

SEQ ID NO: 3732594 - RNA, 20 nt, Human
guugcucaaaucuauucaga

SEQ ID NO: 3732595 - RNA, 22 nt, Human
guugcucagucucccuuucccu

SEQ ID NO: 3732596 - RNA, 18 nt, Human
guugcuccgccucugcug

SEQ ID NO: 3732597 - RNA, 20 nt, Human
guugcuccgccucugcuggc

SEQ ID NO: 3732598 - RNA, 23 nt, Human
guugcugaugaacucuuaaucaa

SEQ ID NO: 3732599 - RNA, 13 nt, Human
guugcugauuuua

SEQ ID NO: 3732600 - RNA, 14 nt, Human
guugcugauuuuau

SEQ ID NO: 3732601 - RNA, 18 nt, Human
guugcugauuuuauucuu

SEQ ID NO: 3732602 - RNA, 20 nt, Human
guugcugauuuuauucuuga

SEQ ID NO: 3732603 - RNA, 12 nt, Human
guugcugccuca

SEQ ID NO: 3732604 - RNA, 18 nt, Human
guugcuggcuuguuguaa

SEQ ID NO: 3732605 - RNA, 19 nt, Human
guugcuggcuuguuguaaa

SEQ ID NO: 3732606 - RNA, 21 nt, Human
guugcuggcuuguuguaaagc

SEQ ID NO: 3732607 - RNA, 23 nt, Human
guugcuggcuuguuguaaagcaa

SEQ ID NO: 3732608 - RNA, 15 nt, Human
guugcugguacacac

SEQ ID NO: 3732609 - RNA, 19 nt, Human
guugcugguugcugugugg

SEQ ID NO: 3732610 - RNA, 19 nt, Human
guugcugucauaagaauga

SEQ ID NO: 3732611 - RNA, 14 nt, Human
guugcugugggaac

SEQ ID NO: 3732612 - RNA, 19 nt, Human
guugcuguguuuaauuuga

SEQ ID NO: 3732613 - RNA, 17 nt, Human
guugcuguuuuccuccc

SEQ ID NO: 3732614 - RNA, 18 nt, Human
guugcuguuuuccucccu

SEQ ID NO: 3732615 - RNA, 16 nt, Human
guugcuuacaauuuuu

SEQ ID NO: 3732616 - RNA, 20 nt, Human
guugcuucuugugaaggcca

SEQ ID NO: 3732617 - RNA, 14 nt, Human
guugcuuuguugca

SEQ ID NO: 3732618 - RNA, 13 nt, Human
guuggaaaaaauu

SEQ ID NO: 3732619 - RNA, 22 nt, Human
guuggaaaagaauacagaaaga

SEQ ID NO: 3732620 - RNA, 15 nt, Human
guuggaaacacuaaa

SEQ ID NO: 3732621 - RNA, 19 nt, Human
guuggaaacacuaaauguu

SEQ ID NO: 3732622 - RNA, 20 nt, Human
guuggaaacacuaaauguua

SEQ ID NO: 3732623 - RNA, 22 nt, Human
guuggaaacacuaaauguuaaa

SEQ ID NO: 3732624 - RNA, 17 nt, Human
guuggacaagcuucuga

SEQ ID NO: 3732625 - RNA, 23 nt, Human
guuggacagcaaaaccauugcuu

SEQ ID NO: 3732626 - RNA, 17 nt, Human
guuggacccgcucugga

SEQ ID NO: 3732627 - RNA, 18 nt, Human
guuggacccgcucuggac

SEQ ID NO: 3732628 - RNA, 19 nt, Human
guuggagagcuagaaccug

SEQ ID NO: 3732629 - RNA, 13 nt, Human
guuggagcuccag

SEQ ID NO: 3732630 - RNA, 17 nt, Human
guuggagcuccagccug

SEQ ID NO: 3732631 - RNA, 14 nt, Human
guuggauguagcau

SEQ ID NO: 3732632 - RNA, 15 nt, Human
guuggauuccaugcu

SEQ ID NO: 3732633 - RNA, 20 nt, Human
guuggcaauuguuucaacca

SEQ ID NO: 3732634 - RNA, 15 nt, Human
guuggcacucacaga

SEQ ID NO: 3732635 - RNA, 18 nt, Human
guuggcagaugcagcucu

SEQ ID NO: 3732636 - RNA, 13 nt, Human
guuggcaggcugg

SEQ ID NO: 3732637 - RNA, 16 nt, Human
guuggcaggcuggcca

SEQ ID NO: 3732638 - RNA, 17 nt, Human
guuggcaggcuggccag

SEQ ID NO: 3732639 - RNA, 14 nt, Human
guuggcaugcaucc

SEQ ID NO: 3732640 - RNA, 13 nt, Human
guuggccaggcug

SEQ ID NO: 3732641 - RNA, 14 nt, Human
guuggccaggcugc

SEQ ID NO: 3732642 - RNA, 19 nt, Human
guuggccaggcugcucuca

SEQ ID NO: 3732643 - RNA, 14 nt, Human
guuggccaguguga

SEQ ID NO: 3732644 - RNA, 17 nt, Human
guuggcccaagcucuug

SEQ ID NO: 3732645 - RNA, 14 nt, Human
gauugagaaguuca

SEQ ID NO: 3732646 - RNA, 20 nt, Human
gauugagaccuacaggcuga

SEQ ID NO: 3732647 - RNA, 21 nt, Human
gauugagaccuacaggcugac

SEQ ID NO: 3732648 - RNA, 15 nt, Human
gauugauaauugcau

SEQ ID NO: 3732649 - RNA, 19 nt, Human
gauugauagaguguuauca

SEQ ID NO: 3732650 - RNA, 16 nt, Human
gauugauuuuaaaaug

SEQ ID NO: 3732651 - RNA, 17 nt, Human
gauugauuuuaaaaugu

SEQ ID NO: 3732652 - RNA, 18 nt, Human
gauugauuuuaaaaugua

SEQ ID NO: 3732653 - RNA, 21 nt, Human
gauugcaauuugcacaaguuu

SEQ ID NO: 3732654 - RNA, 16 nt, Human
gauugcaccacugcac

SEQ ID NO: 3732655 - RNA, 16 nt, Human
gauugcacguggccuc

SEQ ID NO: 3732656 - RNA, 19 nt, Human
gauugcacguggccucuug

SEQ ID NO: 3732657 - RNA, 23 nt, Human
gauugcacguggccucuugagca

SEQ ID NO: 3732658 - RNA, 15 nt, Human
gauugcagaauuguu

SEQ ID NO: 3732659 - RNA, 11 nt, Human
gauugcagcuu

SEQ ID NO: 3732660 - RNA, 21 nt, Human
gauugccuuuuuauaacuuuu

SEQ ID NO: 3732661 - RNA, 22 nt, Human
gauugccuuuuuauaacuuuuu

SEQ ID NO: 3732662 - RNA, 13 nt, Human
gauugcgagagau

SEQ ID NO: 3732663 - RNA, 15 nt, Human
gauugcgagagaugu

SEQ ID NO: 3732664 - RNA, 16 nt, Human
gauugcgagagaugug

SEQ ID NO: 3732665 - RNA, 18 nt, Human
gauugcgagagaugugug

SEQ ID NO: 3732666 - RNA, 19 nt, Human
gauugcgagagaugugugu

SEQ ID NO: 3732667 - RNA, 22 nt, Human
gauugcguggaauugugcugag

SEQ ID NO: 3732668 - RNA, 15 nt, Human
gauugcuaugaauga

SEQ ID NO: 3732669 - RNA, 21 nt, Human
gauugcuguguccaacuccag

SEQ ID NO: 3732670 - RNA, 14 nt, Human
gauugcuuaaaaua

SEQ ID NO: 3732671 - RNA, 18 nt, Human
gauugcuuaaaauagcaa

SEQ ID NO: 3732672 - RNA, 14 nt, Human
gauugcuuuuaaaa

SEQ ID NO: 3732673 - RNA, 18 nt, Human
gauuggaaggagacacag

SEQ ID NO: 3732674 - RNA, 15 nt, Human
gauuggacaaaauga

SEQ ID NO: 3732675 - RNA, 23 nt, Human
gauuggacggccugaugcucccu

SEQ ID NO: 3732676 - RNA, 11 nt, Human
gauuggauuau

SEQ ID NO: 3732677 - RNA, 17 nt, Human
gauuggauuauucauuu

SEQ ID NO: 3732678 - RNA, 21 nt, Human
gauuggauuauuuaauaacau

SEQ ID NO: 3732679 - RNA, 18 nt, Human
gauuggcucacacugaga

SEQ ID NO: 3732680 - RNA, 19 nt, Human
gauuggcuuguguguuuca

SEQ ID NO: 3732681 - RNA, 16 nt, Human
gauuggcuuuaaacac

SEQ ID NO: 3732682 - RNA, 16 nt, Human
gauugggaauccgccc

SEQ ID NO: 3732683 - RNA, 17 nt, Human
gauugggccccugccag

SEQ ID NO: 3732684 - RNA, 18 nt, Human
gauugggggcuggugcca

SEQ ID NO: 3732685 - RNA, 23 nt, Human
gauugggggggccaaaaggaaaa

SEQ ID NO: 3732686 - RNA, 21 nt, Human
gauugguuucucuucuccccu

SEQ ID NO: 3732687 - RNA, 23 nt, Human
gauugguuuuaauugaaggaaag

SEQ ID NO: 3732688 - RNA, 20 nt, Human
gauuguaaaauagcuuguau

SEQ ID NO: 3732689 - RNA, 22 nt, Human
gauuguaaaccgcuuuggccug

SEQ ID NO: 3732690 - RNA, 18 nt, Human
gauuguaacguugcugug

SEQ ID NO: 3732691 - RNA, 23 nt, Human
gauuguaauauguaaaugguaug

SEQ ID NO: 3732692 - RNA, 20 nt, Human
gauugucaaugcuggagaaa

SEQ ID NO: 3732693 - RNA, 15 nt, Human
gauuguccccgaccc

SEQ ID NO: 3732694 - RNA, 20 nt, Human
gauuguccccgacccuugcc

SEQ ID NO: 3732695 - RNA, 17 nt, Human
gauuguccuuuugcaaa

SEQ ID NO: 3732696 - RNA, 15 nt, Human
gauugucuuaauauu

SEQ ID NO: 3732697 - RNA, 21 nt, Human
gauugugaauauuuccauaug

SEQ ID NO: 3732698 - RNA, 21 nt, Human
gauuguuaagucuaaauauuu

SEQ ID NO: 3732699 - RNA, 16 nt, Human
gauuguuacagaagcu

SEQ ID NO: 3732700 - RNA, 15 nt, Human
gauuguuccugcuuu

SEQ ID NO: 3732701 - RNA, 18 nt, Human
gauuguucgggugugcaa

SEQ ID NO: 3732702 - RNA, 11 nt, Human
gauuguuucua

SEQ ID NO: 3732703 - RNA, 16 nt, Human
gauuuaaaaacuggaa

SEQ ID NO: 3732704 - RNA, 16 nt, Human
gauuuaaaagccugcu

SEQ ID NO: 3732705 - RNA, 13 nt, Human
gauuuaaacucug

SEQ ID NO: 3732706 - RNA, 13 nt, Human
gauuuaacagaaa

SEQ ID NO: 3732707 - RNA, 16 nt, Human
gauuuaacagaaaugu

SEQ ID NO: 3732708 - RNA, 18 nt, Human
gauuuaacagucauuuaa

SEQ ID NO: 3732709 - RNA, 19 nt, Human
gauuuaacagucauuuaaa

SEQ ID NO: 3732710 - RNA, 19 nt, Human
gauuuaauaaaauaauucu

SEQ ID NO: 3732711 - RNA, 19 nt, Human
gauuuaauaacauaacaaa

SEQ ID NO: 3732712 - RNA, 14 nt, Human
gauuuaauaguguu

SEQ ID NO: 3732713 - RNA, 17 nt, Human
gauuuaauaguguuaau

SEQ ID NO: 3732714 - RNA, 14 nt, Human
gauuuaauaugcaa

SEQ ID NO: 3732715 - RNA, 19 nt, Human
gauuuaaucugccaagggc

SEQ ID NO: 3732716 - RNA, 21 nt, Human
gauuuaauuaaucaugaaugu

SEQ ID NO: 3732717 - RNA, 12 nt, Human
gauuuaauucuc

SEQ ID NO: 3732718 - RNA, 13 nt, Human
gauuuaauuucca

SEQ ID NO: 3732719 - RNA, 14 nt, Human
gauuuaauuugcca

SEQ ID NO: 3732720 - RNA, 15 nt, Human
gauuuagaacuguau

SEQ ID NO: 3732721 - RNA, 20 nt, Human
gauuuagaagugucauguuu

SEQ ID NO: 3732722 - RNA, 22 nt, Human
gauuuaguguuuuuaccucugu

SEQ ID NO: 3732723 - RNA, 14 nt, Human
gauuuaguuucagu

SEQ ID NO: 3732724 - RNA, 16 nt, Human
gauuuaguuucaguag

SEQ ID NO: 3732725 - RNA, 14 nt, Human
gauuuauaaacaga

SEQ ID NO: 3732726 - RNA, 21 nt, Human
gauuuauuaauauauauuauc

SEQ ID NO: 3732727 - RNA, 18 nt, Human
gauuuauuucaucauauu

SEQ ID NO: 3732728 - RNA, 11 nt, Human
gauuuauuugc

SEQ ID NO: 3732729 - RNA, 15 nt, Human
gauuuauuugcuucu

SEQ ID NO: 3732730 - RNA, 21 nt, Human
gauuuauuuuguaugaaauau

SEQ ID NO: 3732731 - RNA, 15 nt, Human
gauuucaagccugcc

SEQ ID NO: 3732732 - RNA, 19 nt, Human
gauuucacaaauauuaaaa

SEQ ID NO: 3732733 - RNA, 13 nt, Human
gauuucacucucc

SEQ ID NO: 3732734 - RNA, 20 nt, Human
gauuucagcucacugcaacc

SEQ ID NO: 3732735 - RNA, 20 nt, Human
gauuucaggauacucuguca

SEQ ID NO: 3732736 - RNA, 19 nt, Human
gauuucaguucuaggaaaa

SEQ ID NO: 3732737 - RNA, 20 nt, Human
gauuucaguuuuaacaaaug

SEQ ID NO: 3732738 - RNA, 23 nt, Human
gauuucaguuuuaacaaaugcua

SEQ ID NO: 3732739 - RNA, 15 nt, Human
gauuucauacuguaa

SEQ ID NO: 3732740 - RNA, 15 nt, Human
gauuucaucugcucu

SEQ ID NO: 3732741 - RNA, 13 nt, Human
gauuucaugauuu

SEQ ID NO: 3732742 - RNA, 19 nt, Human
gauuucauguacugcauua

SEQ ID NO: 3732743 - RNA, 21 nt, Human
gauuucauuucaacuguuugc

SEQ ID NO: 3732744 - RNA, 19 nt, Human
gauuuccagaaccacacuu

SEQ ID NO: 3732745 - RNA, 15 nt, Human
gauuuccagccaggg

SEQ ID NO: 3732746 - RNA, 15 nt, Human
gauuuccagccuucu

SEQ ID NO: 3732747 - RNA, 22 nt, Human
gauuuccagucuccaccaggaa

SEQ ID NO: 3732748 - RNA, 17 nt, Human
gauuuccccuuuugcau

SEQ ID NO: 3732749 - RNA, 19 nt, Human
gauuuccccuuuugcauuc

SEQ ID NO: 3732750 - RNA, 23 nt, Human
gauuuccccuuuugcauucuccc

SEQ ID NO: 3732751 - RNA, 22 nt, Human
gauuuccguuaaaauaccagcc

SEQ ID NO: 3732752 - RNA, 22 nt, Human
gauuuccucccucugccccucc

SEQ ID NO: 3732753 - RNA, 22 nt, Human
gauuuccugcuuugggaagccg

SEQ ID NO: 3732754 - RNA, 13 nt, Human
gauuuccuugaau

SEQ ID NO: 3732755 - RNA, 14 nt, Human
gauuucuaaucaaa

SEQ ID NO: 3732756 - RNA, 18 nt, Human
gauuucuagguaggaaau

SEQ ID NO: 3732757 - RNA, 21 nt, Human
gauuucucacacucuaacugu

SEQ ID NO: 3732758 - RNA, 16 nt, Human
gauuucucauugacuu

SEQ ID NO: 3732759 - RNA, 22 nt, Human
gauuucucauugacuuuuauaa

SEQ ID NO: 3732760 - RNA, 11 nt, Human
gauuucuccca

SEQ ID NO: 3732761 - RNA, 20 nt, Human
gauuucucccagcucuagac

SEQ ID NO: 3732762 - RNA, 14 nt, Human
gauuucugaggaaa

SEQ ID NO: 3732763 - RNA, 17 nt, Human
gauuucugcagguucuu

SEQ ID NO: 3732764 - RNA, 14 nt, Human
gauuucuguucagc

SEQ ID NO: 3732765 - RNA, 13 nt, Human
gauuucuuaaaua

SEQ ID NO: 3732766 - RNA, 20 nt, Human
gauuucuuuaaaagaaugac

SEQ ID NO: 3732767 - RNA, 19 nt, Human
gauuucuuuucuuccuggc

SEQ ID NO: 3732768 - RNA, 15 nt, Human
gauuugaaaaauaua

SEQ ID NO: 3732769 - RNA, 20 nt, Human
gauuugaacacuuggugcug

SEQ ID NO: 3732770 - RNA, 18 nt, Human
gauuugaagaacauguga

SEQ ID NO: 3732771 - RNA, 13 nt, Human
gauuugaauccag

SEQ ID NO: 3732772 - RNA, 13 nt, Human
gauuugaccuccu

SEQ ID NO: 3732773 - RNA, 20 nt, Human
gauuugaccuccucccuguu

SEQ ID NO: 3732774 - RNA, 13 nt, Human
gauuugacuguuu

SEQ ID NO: 3732775 - RNA, 16 nt, Human
gauuugagcucagccc

SEQ ID NO: 3732776 - RNA, 23 nt, Human
gauuugaggagcagcuucaguug

SEQ ID NO: 3732777 - RNA, 15 nt, Human
gauuugaugcuggag

SEQ ID NO: 3732778 - RNA, 18 nt, Human
gauuugcuaucaaaauaa

SEQ ID NO: 3732779 - RNA, 15 nt, Human
gauuugcugcucuuc

SEQ ID NO: 3732780 - RNA, 19 nt, Human
gauuuggcacuagccaaag

SEQ ID NO: 3732781 - RNA, 15 nt, Human
gauuugggagaaggg

SEQ ID NO: 3732782 - RNA, 12 nt, Human
gauuugggcugg

SEQ ID NO: 3732783 - RNA, 13 nt, Human
gauuuggggugga

SEQ ID NO: 3732784 - RNA, 22 nt, Human
gauuugguacuuuugagugugu

SEQ ID NO: 3732785 - RNA, 18 nt, Human
gauuuggugaauuugaau

SEQ ID NO: 3732786 - RNA, 19 nt, Human
gauuugguguacaauucag

SEQ ID NO: 3732787 - RNA, 14 nt, Human
gauuuguacugaaa

SEQ ID NO: 3732788 - RNA, 21 nt, Human
gauuuguaggaaggucucauu

SEQ ID NO: 3732789 - RNA, 21 nt, Human
gauuuguuguucuuucagaaa

SEQ ID NO: 3732790 - RNA, 18 nt, Human
gauuuguuuuuaaacugu

SEQ ID NO: 3732791 - RNA, 13 nt, Human
gauuuuaaaaugu

SEQ ID NO: 3732792 - RNA, 18 nt, Human
gauuuuaaaauguacaug

SEQ ID NO: 3732793 - RNA, 21 nt, Human
gauuuuaaaauguacauguau

SEQ ID NO: 3732794 - RNA, 14 nt, Human
uaaaccacugugcg

SEQ ID NO: 3732795 - RNA, 22 nt, Human
uaaaccacuuaaacgaagaguu

SEQ ID NO: 3732796 - RNA, 21 nt, Human
uaaaccagguuuagacaguau

SEQ ID NO: 3732797 - RNA, 17 nt, Human
uaaaccauaaaaagcug

SEQ ID NO: 3732798 - RNA, 18 nt, Human
uaaaccauaaaaagcuga

SEQ ID NO: 3732799 - RNA, 13 nt, Human
uaaaccaucuccc

SEQ ID NO: 3732800 - RNA, 19 nt, Human
uaaaccaucucccuggugc

SEQ ID NO: 3732801 - RNA, 22 nt, Human
uaaaccaugggauaaaugccau

SEQ ID NO: 3732802 - RNA, 14 nt, Human
uaaacccauuuuag

SEQ ID NO: 3732803 - RNA, 22 nt, Human
uaaaccccaccccaaaauuagc

SEQ ID NO: 3732804 - RNA, 20 nt, Human
uaaaccccaccuuuauuccu

SEQ ID NO: 3732805 - RNA, 14 nt, Human
uaaaccccuguccc

SEQ ID NO: 3732806 - RNA, 16 nt, Human
uaaaccgccaaggcug

SEQ ID NO: 3732807 - RNA, 18 nt, Human
uaaaccgccaaggcuggg

SEQ ID NO: 3732808 - RNA, 18 nt, Human
uaaaccucaaaaugucua

SEQ ID NO: 3732809 - RNA, 19 nt, Human
uaaaccuguagaaucaauu

SEQ ID NO: 3732810 - RNA, 19 nt, Human
uaaaccuguuuuuuuuuca

SEQ ID NO: 3732811 - RNA, 15 nt, Human
uaaaccuuaaguaag

SEQ ID NO: 3732812 - RNA, 12 nt, Human
uaaaccuuaaua

SEQ ID NO: 3732813 - RNA, 16 nt, Human
uaaaccuuaguacuga

SEQ ID NO: 3732814 - RNA, 22 nt, Human
uaaacgauuuaauucucuugaa

SEQ ID NO: 3732815 - RNA, 16 nt, Human
uaaacggauuauuuuu

SEQ ID NO: 3732816 - RNA, 18 nt, Human
uaaacggauuauuuuuuc

SEQ ID NO: 3732817 - RNA, 19 nt, Human
uaaacggauuauuuuuuca

SEQ ID NO: 3732818 - RNA, 16 nt, Human
uaaacgguucaguuuc

SEQ ID NO: 3732819 - RNA, 18 nt, Human
uaaacguaagcacuguuu

SEQ ID NO: 3732820 - RNA, 15 nt, Human
uaaacguaugcaugu

SEQ ID NO: 3732821 - RNA, 17 nt, Human
uaaacgugaugaucagc

SEQ ID NO: 3732822 - RNA, 14 nt, Human
uaaacguggauguu

SEQ ID NO: 3732823 - RNA, 18 nt, Human
uaaacguggauguuacuc

SEQ ID NO: 3732824 - RNA, 20 nt, Human
uaaacguguauguuuuucag

SEQ ID NO: 3732825 - RNA, 16 nt, Human
uaaacuaauaauugca

SEQ ID NO: 3732826 - RNA, 17 nt, Human
uaaacuaauaauugcag

SEQ ID NO: 3732827 - RNA, 23 nt, Human
uaaacuaaugaguuucuuuuaua

SEQ ID NO: 3732828 - RNA, 11 nt, Human
uaaacuagaug

SEQ ID NO: 3732829 - RNA, 14 nt, Human
uaaacuagaugacc

SEQ ID NO: 3732830 - RNA, 21 nt, Human
uaaacuagcauaucugccuuu

SEQ ID NO: 3732831 - RNA, 22 nt, Human
uaaacuagcauaucugccuuua

SEQ ID NO: 3732832 - RNA, 15 nt, Human
uaaacuauaagcaag

SEQ ID NO: 3732833 - RNA, 17 nt, Human
uaaacuauaagcaagaa

SEQ ID NO: 3732834 - RNA, 20 nt, Human
uaaacuaucuuggugaauuu

SEQ ID NO: 3732835 - RNA, 21 nt, Human
uaaacuaucuuggugaauuuu

SEQ ID NO: 3732836 - RNA, 22 nt, Human
uaaacuaucuuggugaauuuuu

SEQ ID NO: 3732837 - RNA, 15 nt, Human
uaaacucaaaacuua

SEQ ID NO: 3732838 - RNA, 21 nt, Human
uaaacucaaaauauuuguaca

SEQ ID NO: 3732839 - RNA, 22 nt, Human
uaaacucaaaauauuuguacau

SEQ ID NO: 3732840 - RNA, 15 nt, Human
uaaacucaagacaau

SEQ ID NO: 3732841 - RNA, 17 nt, Human
uaaacucauuucuagca

SEQ ID NO: 3732842 - RNA, 14 nt, Human
uaaacuccuguccu

SEQ ID NO: 3732843 - RNA, 20 nt, Human
uaaacuccuuccuggccuga

SEQ ID NO: 3732844 - RNA, 21 nt, Human
uaaacuccuuccuggccugag

SEQ ID NO: 3732845 - RNA, 14 nt, Human
uaaacucuaaacau

SEQ ID NO: 3732846 - RNA, 22 nt, Human
uaaacucuaaacauuaaucaau

SEQ ID NO: 3732847 - RNA, 17 nt, Human
uaaacucugcauccaga

SEQ ID NO: 3732848 - RNA, 18 nt, Human
uaaacucugcauccagag

SEQ ID NO: 3732849 - RNA, 16 nt, Human
uaaacugcauuagaaa

SEQ ID NO: 3732850 - RNA, 12 nt, Human
uaaacugccccc

SEQ ID NO: 3732851 - RNA, 16 nt, Human
uaaacuggagacugug

SEQ ID NO: 3732852 - RNA, 20 nt, Human
uaaacugguauuuuaucuuu

SEQ ID NO: 3732853 - RNA, 13 nt, Human
uaaacuguacagu

SEQ ID NO: 3732854 - RNA, 19 nt, Human
uaaacuguacuagucugug

SEQ ID NO: 3732855 - RNA, 18 nt, Human
uaaacuguccucuuucag

SEQ ID NO: 3732856 - RNA, 19 nt, Human
uaaacuguccucuuucaga

SEQ ID NO: 3732857 - RNA, 22 nt, Human
uaaacuguguauuccaagacau

SEQ ID NO: 3732858 - RNA, 12 nt, Human
uaaacuguguuu

SEQ ID NO: 3732859 - RNA, 14 nt, Human
uaaacuguuaacuu

SEQ ID NO: 3732860 - RNA, 17 nt, Human
uaaacuguuagcacugu

SEQ ID NO: 3732861 - RNA, 20 nt, Human
uaaacuguuagcacuguuga

SEQ ID NO: 3732862 - RNA, 20 nt, Human
uaaacuuaacuuuaacugaa

SEQ ID NO: 3732863 - RNA, 20 nt, Human
uaaacuuagaauaaaauugu

SEQ ID NO: 3732864 - RNA, 13 nt, Human
uaaacuucagcac

SEQ ID NO: 3732865 - RNA, 16 nt, Human
uaaacuucagcaccau

SEQ ID NO: 3732866 - RNA, 13 nt, Human
uaaacuuccaaag

SEQ ID NO: 3732867 - RNA, 20 nt, Human
uaaacuucucugaagggagg

SEQ ID NO: 3732868 - RNA, 15 nt, Human
uaaacuugucuuuuc

SEQ ID NO: 3732869 - RNA, 16 nt, Human
uaaacuuuaauaugua

SEQ ID NO: 3732870 - RNA, 22 nt, Human
uaaacuuuaccuuuuuuauaca

SEQ ID NO: 3732871 - RNA, 16 nt, Human
uaaacuuuaucacuua

SEQ ID NO: 3732872 - RNA, 12 nt, Human
uaaacuuucaca

SEQ ID NO: 3732873 - RNA, 12 nt, Human
uaaacuuugaaa

SEQ ID NO: 3732874 - RNA, 17 nt, Human
uaaacuuuuaauucauu

SEQ ID NO: 3732875 - RNA, 22 nt, Human
uaaacuuuuaccacuugcugca

SEQ ID NO: 3732876 - RNA, 14 nt, Human
uaaacuuuuagaaa

SEQ ID NO: 3732877 - RNA, 12 nt, Human
uaaacuuuuugu

SEQ ID NO: 3732878 - RNA, 15 nt, Human
uaaagaaaaaaauac

SEQ ID NO: 3732879 - RNA, 14 nt, Human
uaaagaaaaaaaug

SEQ ID NO: 3732880 - RNA, 16 nt, Human
uaaagaaaaaaaugua

SEQ ID NO: 3732881 - RNA, 17 nt, Human
uaaagaaaaaaauguau

SEQ ID NO: 3732882 - RNA, 17 nt, Human
uaaagaaaaaaauguca

SEQ ID NO: 3732883 - RNA, 15 nt, Human
uaaagaaaaaaauug

SEQ ID NO: 3732884 - RNA, 16 nt, Human
uaaagaaaaaaauuga

SEQ ID NO: 3732885 - RNA, 18 nt, Human
uaaagaaaaaaauugaaa

SEQ ID NO: 3732886 - RNA, 21 nt, Human
uaaagaaaaaaauugaaaugu

SEQ ID NO: 3732887 - RNA, 14 nt, Human
uaaagaaaaacaaa

SEQ ID NO: 3732888 - RNA, 15 nt, Human
uaaagaaaaacaaac

SEQ ID NO: 3732889 - RNA, 17 nt, Human
uaaagaaaaagucaucc

SEQ ID NO: 3732890 - RNA, 15 nt, Human
uaaagaaaaauauuu

SEQ ID NO: 3732891 - RNA, 13 nt, Human
uaaagaaaagaug

SEQ ID NO: 3732892 - RNA, 16 nt, Human
uaaagaaaagaugaaa

SEQ ID NO: 3732893 - RNA, 14 nt, Human
uaaagaaaagaugc

SEQ ID NO: 3732894 - RNA, 21 nt, Human
uaaagaaaaguuuaccaucug

SEQ ID NO: 3732895 - RNA, 12 nt, Human
uaaagaaaauaa

SEQ ID NO: 3732896 - RNA, 13 nt, Human
uaaagaaacagcu

SEQ ID NO: 3732897 - RNA, 12 nt, Human
uaaagaaagaga

SEQ ID NO: 3732898 - RNA, 16 nt, Human
uaaagaaagagagaaa

SEQ ID NO: 3732899 - RNA, 20 nt, Human
uaaagaaagagagaaaauaa

SEQ ID NO: 3732900 - RNA, 21 nt, Human
uaaagaaagagagaaaauaaa

SEQ ID NO: 3732901 - RNA, 11 nt, Human
uaaagaaagau

SEQ ID NO: 3732902 - RNA, 23 nt, Human
uaaagaaaggaaaagaaaacaaa

SEQ ID NO: 3732903 - RNA, 14 nt, Human
uaaagaaaguguau

SEQ ID NO: 3732904 - RNA, 15 nt, Human
uaaagaaaguguauu

SEQ ID NO: 3732905 - RNA, 23 nt, Human
uaaagaaaguguauuuggaaaua

SEQ ID NO: 3732906 - RNA, 20 nt, Human
uaaagaaauuuacuauauau

SEQ ID NO: 3732907 - RNA, 22 nt, Human
uaaagaaauuuacuauauauau

SEQ ID NO: 3732908 - RNA, 13 nt, Human
uaaagaacaaagu

SEQ ID NO: 3732909 - RNA, 19 nt, Human
uaaagaacugcacaugaag

SEQ ID NO: 3732910 - RNA, 12 nt, Human
uaaagaagaccu

SEQ ID NO: 3732911 - RNA, 21 nt, Human
uaaagaagaccugagaaugua

SEQ ID NO: 3732912 - RNA, 18 nt, Human
uaaagaagauguuuaacu

SEQ ID NO: 3732913 - RNA, 19 nt, Human
uaaagaaguauuuuuagaa

SEQ ID NO: 3732914 - RNA, 16 nt, Human
uaaagaauacuugaac

SEQ ID NO: 3732915 - RNA, 19 nt, Human
uaaagaauacuugaacuug

SEQ ID NO: 3732916 - RNA, 14 nt, Human
uaaagaauaggacu

SEQ ID NO: 3732917 - RNA, 15 nt, Human
uaaagaauuauuuug

SEQ ID NO: 3732918 - RNA, 14 nt, Human
uaaagaauucaaau

SEQ ID NO: 3732919 - RNA, 18 nt, Human
uaaagaauugugguuuau

SEQ ID NO: 3732920 - RNA, 14 nt, Human
uaaagaauuucuuu

SEQ ID NO: 3732921 - RNA, 20 nt, Human
uaaagaauuugucacaggaa

SEQ ID NO: 3732922 - RNA, 15 nt, Human
uaaagacaaagacaa

SEQ ID NO: 3732923 - RNA, 15 nt, Human
uaaagacaccugguu

SEQ ID NO: 3732924 - RNA, 15 nt, Human
uaaagacagaggcag

SEQ ID NO: 3732925 - RNA, 15 nt, Human
uaaagacaggagaca

SEQ ID NO: 3732926 - RNA, 19 nt, Human
uaaagacaggguuucacca

SEQ ID NO: 3732927 - RNA, 11 nt, Human
uaaagacauuc

SEQ ID NO: 3732928 - RNA, 15 nt, Human
uaaagaccagaaauu

SEQ ID NO: 3732929 - RNA, 21 nt, Human
uaaagacccuaaaucugagga

SEQ ID NO: 3732930 - RNA, 15 nt, Human
uaaagacuaaguagc

SEQ ID NO: 3732931 - RNA, 17 nt, Human
uaaagagaaaauugaau

SEQ ID NO: 3732932 - RNA, 19 nt, Human
uaaagagaaaauugaauuu

SEQ ID NO: 3732933 - RNA, 23 nt, Human
uaaagagaaaauugaauuuaaca

SEQ ID NO: 3732934 - RNA, 11 nt, Human
uaaagagaaac

SEQ ID NO: 3732935 - RNA, 13 nt, Human
uaaagagaaacuu

SEQ ID NO: 3732936 - RNA, 13 nt, Human
uaaagagaaugag

SEQ ID NO: 3732937 - RNA, 15 nt, Human
uaaagagaccuaccu

SEQ ID NO: 3732938 - RNA, 12 nt, Human
uaaagagagaau

SEQ ID NO: 3732939 - RNA, 18 nt, Human
uaaagagauucacacaca

SEQ ID NO: 3732940 - RNA, 20 nt, Human
uaaagagcaucugauucuug

SEQ ID NO: 3732941 - RNA, 15 nt, Human
uaaagagcccuugcc

SEQ ID NO: 3732942 - RNA, 19 nt, Human
uaaagagcccuugccuccc

SEQ ID NO: 3732943 - RNA, 21 nt, Human
uaaagagcccuugccucccca

SEQ ID NO: 3732944 - RNA, 19 nt, Human
uaaagaggcguugcuuuca

SEQ ID NO: 3732945 - RNA, 20 nt, Human
guuggccccugcccggcugc

SEQ ID NO: 3732946 - RNA, 13 nt, Human
guuggccuccggc

SEQ ID NO: 3732947 - RNA, 20 nt, Human
guuggcguaggcuacagaga

SEQ ID NO: 3732948 - RNA, 23 nt, Human
guuggcguaggcuacagagaagc

SEQ ID NO: 3732949 - RNA, 15 nt, Human
guuggcucugccagu

SEQ ID NO: 3732950 - RNA, 20 nt, Human
guuggcugacuuccacaccu

SEQ ID NO: 3732951 - RNA, 14 nt, Human
guuggcuggaugaa

SEQ ID NO: 3732952 - RNA, 16 nt, Human
guuggcugggcccaga

SEQ ID NO: 3732953 - RNA, 17 nt, Human
guuggcugggcccagaa

SEQ ID NO: 3732954 - RNA, 23 nt, Human
guuggcuucuguuucuaguugag

SEQ ID NO: 3732955 - RNA, 14 nt, Human
guugggaagacaug

SEQ ID NO: 3732956 - RNA, 17 nt, Human
guugggaaugaggcuug

SEQ ID NO: 3732957 - RNA, 22 nt, Human
guugggacccaguggcagggca

SEQ ID NO: 3732958 - RNA, 23 nt, Human
guugggagagggcgcaggccgug

SEQ ID NO: 3732959 - RNA, 15 nt, Human
guugggagcacugga

SEQ ID NO: 3732960 - RNA, 21 nt, Human
guugggauacugcagggccag

SEQ ID NO: 3732961 - RNA, 18 nt, Human
guugggaucgcauugcau

SEQ ID NO: 3732962 - RNA, 18 nt, Human
guugggaucuaggagagg

SEQ ID NO: 3732963 - RNA, 22 nt, Human
guugggauuccugacccaggcc

SEQ ID NO: 3732964 - RNA, 22 nt, Human
guugggauugggggcuggugcc

SEQ ID NO: 3732965 - RNA, 19 nt, Human
guugggcagccagaccagc

SEQ ID NO: 3732966 - RNA, 12 nt, Human
guugggcaugug

SEQ ID NO: 3732967 - RNA, 17 nt, Human
guugggccaggagccuc

SEQ ID NO: 3732968 - RNA, 20 nt, Human
guugggccauacuggccucg

SEQ ID NO: 3732969 - RNA, 15 nt, Human
guugggcccagaucu

SEQ ID NO: 3732970 - RNA, 14 nt, Human
guuggggaggggcg

SEQ ID NO: 3732971 - RNA, 22 nt, Human
guuggggggacucugagcggga

SEQ ID NO: 3732972 - RNA, 22 nt, Human
guugggggucagugcugccugu

SEQ ID NO: 3732973 - RNA, 15 nt, Human
guuggggugacaguc

SEQ ID NO: 3732974 - RNA, 13 nt, Human
guuggguggaugc

SEQ ID NO: 3732975 - RNA, 18 nt, Human
guugguauuaauaaaaag

SEQ ID NO: 3732976 - RNA, 22 nt, Human
guugguccagagcggaggcugu

SEQ ID NO: 3732977 - RNA, 16 nt, Human
guuggucccccuucca

SEQ ID NO: 3732978 - RNA, 15 nt, Human
guuggucuguacuga

SEQ ID NO: 3732979 - RNA, 19 nt, Human
guuggugagaaaccuguau

SEQ ID NO: 3732980 - RNA, 12 nt, Human
guuguaaaaaga

SEQ ID NO: 3732981 - RNA, 13 nt, Human
guuguaaaauaua

SEQ ID NO: 3732982 - RNA, 22 nt, Human
guuguaaaauauagcuguacaa

SEQ ID NO: 3732983 - RNA, 15 nt, Human
guuguaaauauauaa

SEQ ID NO: 3732984 - RNA, 14 nt, Human
guuguaaauauuua

SEQ ID NO: 3732985 - RNA, 14 nt, Human
guuguaaauuggca

SEQ ID NO: 3732986 - RNA, 14 nt, Human
guuguaaccugcug

SEQ ID NO: 3732987 - RNA, 14 nt, Human
guuguaaugcugca

SEQ ID NO: 3732988 - RNA, 14 nt, Human
guuguacaugaaau

SEQ ID NO: 3732989 - RNA, 18 nt, Human
guuguaccgcaaugugac

SEQ ID NO: 3732990 - RNA, 15 nt, Human
guuguacuuaaaugg

SEQ ID NO: 3732991 - RNA, 17 nt, Human
guuguauaaauuuauuu

SEQ ID NO: 3732992 - RNA, 19 nt, Human
guuguauaaauuuauuuac

SEQ ID NO: 3732993 - RNA, 18 nt, Human
guuguaucagcacgugug

SEQ ID NO: 3732994 - RNA, 15 nt, Human
guuguauuagauguu

SEQ ID NO: 3732995 - RNA, 12 nt, Human
guuguauucauu

SEQ ID NO: 3732996 - RNA, 13 nt, Human
guuguauucuuug

SEQ ID NO: 3732997 - RNA, 20 nt, Human
guuguauucuuugauguuaa

SEQ ID NO: 3732998 - RNA, 16 nt, Human
guuguauuuaacagaa

SEQ ID NO: 3732999 - RNA, 17 nt, Human
guugucaagucucugcu

SEQ ID NO: 3733000 - RNA, 21 nt, Human
guugucaauauuaaauacaga

SEQ ID NO: 3733001 - RNA, 23 nt, Human
guugucaauauuaaauacagaca

SEQ ID NO: 3733002 - RNA, 14 nt, Human
guugucaccuucac

SEQ ID NO: 3733003 - RNA, 16 nt, Human
guugucacugcuuuug

SEQ ID NO: 3733004 - RNA, 22 nt, Human
guugucaguauuauucuacuau

SEQ ID NO: 3733005 - RNA, 20 nt, Human
guugucauugcuguuguccc

SEQ ID NO: 3733006 - RNA, 14 nt, Human
guugucauugcuuu

SEQ ID NO: 3733007 - RNA, 18 nt, Human
guuguccauauuuucaca

SEQ ID NO: 3733008 - RNA, 13 nt, Human
guugucccucugc

SEQ ID NO: 3733009 - RNA, 12 nt, Human
guugucccugca

SEQ ID NO: 3733010 - RNA, 15 nt, Human
guuguccuuuucaua

SEQ ID NO: 3733011 - RNA, 17 nt, Human
guugucguaaagauuug

SEQ ID NO: 3733012 - RNA, 13 nt, Human
guugucucccugg

SEQ ID NO: 3733013 - RNA, 18 nt, Human
guugucucuagagcaggg

SEQ ID NO: 3733014 - RNA, 11 nt, Human
guugucucuga

SEQ ID NO: 3733015 - RNA, 14 nt, Human
guugucucugaugc

SEQ ID NO: 3733016 - RNA, 15 nt, Human
guugucucugaugca

SEQ ID NO: 3733017 - RNA, 14 nt, Human
guugucucuucucc

SEQ ID NO: 3733018 - RNA, 19 nt, Human
guugugaaaguuuugagua

SEQ ID NO: 3733019 - RNA, 15 nt, Human
guugugaagauguuu

SEQ ID NO: 3733020 - RNA, 13 nt, Human
guugugaggccug

SEQ ID NO: 3733021 - RNA, 14 nt, Human
guugugaggccugg

SEQ ID NO: 3733022 - RNA, 21 nt, Human
guugugaucaucccaucuaag

SEQ ID NO: 3733023 - RNA, 10 nt, Human
guugugcagc

SEQ ID NO: 3733024 - RNA, 12 nt, Human
guugugccaaau

SEQ ID NO: 3733025 - RNA, 21 nt, Human
guugugccacagaguguagcc

SEQ ID NO: 3733026 - RNA, 19 nt, Human
guuguggaaagccucugcu

SEQ ID NO: 3733027 - RNA, 22 nt, Human
guuguggauuuaacagaaaugu

SEQ ID NO: 3733028 - RNA, 13 nt, Human
guuguggccuuug

SEQ ID NO: 3733029 - RNA, 14 nt, Human
guuguguaagagaa

SEQ ID NO: 3733030 - RNA, 16 nt, Human
guuguguacguggaga

SEQ ID NO: 3733031 - RNA, 20 nt, Human
guuguguacucuggccucug

SEQ ID NO: 3733032 - RNA, 10 nt, Human
guugugugcc

SEQ ID NO: 3733033 - RNA, 16 nt, Human
guugugugugggagug

SEQ ID NO: 3733034 - RNA, 14 nt, Human
guuguguugucacc

SEQ ID NO: 3733035 - RNA, 15 nt, Human
guuguuacauuuuua

SEQ ID NO: 3733036 - RNA, 21 nt, Human
guuguuacuaacuaaacucuc

SEQ ID NO: 3733037 - RNA, 17 nt, Human
guuguuaucuguuugag

SEQ ID NO: 3733038 - RNA, 13 nt, Human
guuguuaugaugu

SEQ ID NO: 3733039 - RNA, 13 nt, Human
guuguuaugcuau

SEQ ID NO: 3733040 - RNA, 16 nt, Human
guuguuauggaaacug

SEQ ID NO: 3733041 - RNA, 17 nt, Human
guuguuaugugaucaug

SEQ ID NO: 3733042 - RNA, 13 nt, Human
guuguucaacuau

SEQ ID NO: 3733043 - RNA, 13 nt, Human
guuguucgggcca

SEQ ID NO: 3733044 - RNA, 19 nt, Human
guuguucugaaaugucagu

SEQ ID NO: 3733045 - RNA, 13 nt, Human
guuguucuuuucc

SEQ ID NO: 3733046 - RNA, 17 nt, Human
guuguugcauguuugaa

SEQ ID NO: 3733047 - RNA, 15 nt, Human
guuguuuauaauaaa

SEQ ID NO: 3733048 - RNA, 18 nt, Human
guuguuuauaauaaaaau

SEQ ID NO: 3733049 - RNA, 19 nt, Human
guuguuucuuaauuuggaa

SEQ ID NO: 3733050 - RNA, 12 nt, Human
guuguuucuucc

SEQ ID NO: 3733051 - RNA, 13 nt, Human
guuguuugaaaau

SEQ ID NO: 3733052 - RNA, 18 nt, Human
guuguuugagaaauuaag

SEQ ID NO: 3733053 - RNA, 22 nt, Human
guuguuugaugcauuaaaagaa

SEQ ID NO: 3733054 - RNA, 12 nt, Human
guuguuugcaug

SEQ ID NO: 3733055 - RNA, 17 nt, Human
guuguuuguauguauaa

SEQ ID NO: 3733056 - RNA, 14 nt, Human
guuguuuuuguaua

SEQ ID NO: 3733057 - RNA, 20 nt, Human
guuuaaaaaaguuuaaaaug

SEQ ID NO: 3733058 - RNA, 21 nt, Human
guuuaaaaaaguuuaaaaugu

SEQ ID NO: 3733059 - RNA, 19 nt, Human
guuuaaaaaccgaauaaau

SEQ ID NO: 3733060 - RNA, 20 nt, Human
guuuaaaaaccgaauaaaug

SEQ ID NO: 3733061 - RNA, 16 nt, Human
guuuaaaaaucaacuu

SEQ ID NO: 3733062 - RNA, 12 nt, Human
guuuaaaaaugg

SEQ ID NO: 3733063 - RNA, 16 nt, Human
guuuaaacugauucau

SEQ ID NO: 3733064 - RNA, 14 nt, Human
guuuaaagaaagug

SEQ ID NO: 3733065 - RNA, 16 nt, Human
guuuaaagaaagugua

SEQ ID NO: 3733066 - RNA, 17 nt, Human
guuuaaagaaaguguau

SEQ ID NO: 3733067 - RNA, 19 nt, Human
guuuaaagagucuagauuc

SEQ ID NO: 3733068 - RNA, 17 nt, Human
guuuaaauaaaguauca

SEQ ID NO: 3733069 - RNA, 22 nt, Human
guuuaaauaaaguaucaugcau

SEQ ID NO: 3733070 - RNA, 13 nt, Human
guuuaaauauuuc

SEQ ID NO: 3733071 - RNA, 14 nt, Human
guuuaaaugaacaa

SEQ ID NO: 3733072 - RNA, 13 nt, Human
guuuaacauuugc

SEQ ID NO: 3733073 - RNA, 22 nt, Human
guuuaaccaaaaagaccagacu

SEQ ID NO: 3733074 - RNA, 15 nt, Human
guuuaacucagauca

SEQ ID NO: 3733075 - RNA, 23 nt, Human
guuuaacucagaucacuacugca

SEQ ID NO: 3733076 - RNA, 18 nt, Human
guuuaagaaaaguauuuu

SEQ ID NO: 3733077 - RNA, 20 nt, Human
guuuaagacuguaaugaauc

SEQ ID NO: 3733078 - RNA, 18 nt, Human
guuuaagcagaauuggaa

SEQ ID NO: 3733079 - RNA, 17 nt, Human
guuuaagccaaaacaau

SEQ ID NO: 3733080 - RNA, 18 nt, Human
guuuaaguagauuucaug

SEQ ID NO: 3733081 - RNA, 13 nt, Human
guuuaauacucau

SEQ ID NO: 3733082 - RNA, 17 nt, Human
guuuaauauugagaaag

SEQ ID NO: 3733083 - RNA, 19 nt, Human
guuuaauauugagaaagaa

SEQ ID NO: 3733084 - RNA, 14 nt, Human
guuuaaucuguuau

SEQ ID NO: 3733085 - RNA, 15 nt, Human
guuuaaugaaugcuu

SEQ ID NO: 3733086 - RNA, 13 nt, Human
guuuaauguuuug

SEQ ID NO: 3733087 - RNA, 15 nt, Human
guuuaauuguuuguc

SEQ ID NO: 3733088 - RNA, 14 nt, Human
guuuaauuucuuca

SEQ ID NO: 3733089 - RNA, 20 nt, Human
guuuaauuuuuauuucuucc

SEQ ID NO: 3733090 - RNA, 22 nt, Human
guuuacaagcccccccuuccac

SEQ ID NO: 3733091 - RNA, 16 nt, Human
guuuacaauuuacaaa

SEQ ID NO: 3733092 - RNA, 23 nt, Human
guuuacagcacuacucugugcca

SEQ ID NO: 3733093 - RNA, 14 nt, Human
guuuacaggcccug

SEQ ID NO: 3733094 - RNA, 19 nt, Human
guuuacaggcccugcuccu

SEQ ID NO: 3733095 - RNA, 16 nt, Human
guuuacagggagccuc

SEQ ID NO: 3733096 - RNA, 17 nt, Human
guuuacagggagccucc

SEQ ID NO: 3733097 - RNA, 23 nt, Human
gauuuuaaaccauaaaaagcuga

SEQ ID NO: 3733098 - RNA, 14 nt, Human
gauuuuaaacuaga

SEQ ID NO: 3733099 - RNA, 21 nt, Human
gauuuuaaacuagaugaccuc

SEQ ID NO: 3733100 - RNA, 23 nt, Human
gauuuuaaacuagaugaccucau

SEQ ID NO: 3733101 - RNA, 20 nt, Human
gauuuuaacaaaagcaagac

SEQ ID NO: 3733102 - RNA, 15 nt, Human
gauuuuaacaauaac

SEQ ID NO: 3733103 - RNA, 23 nt, Human
gauuuuaauggauuguuaauuuc

SEQ ID NO: 3733104 - RNA, 14 nt, Human
gauuuuaauuguca

SEQ ID NO: 3733105 - RNA, 19 nt, Human
gauuuuacaauugaaauga

SEQ ID NO: 3733106 - RNA, 16 nt, Human
gauuuuacaugaagua

SEQ ID NO: 3733107 - RNA, 15 nt, Human
gauuuuaguuuuauu

SEQ ID NO: 3733108 - RNA, 22 nt, Human
gauuuuaguuuuauuuucuaaa

SEQ ID NO: 3733109 - RNA, 18 nt, Human
gauuuuauguugacauuu

SEQ ID NO: 3733110 - RNA, 15 nt, Human
gauuuuauuauguaa

SEQ ID NO: 3733111 - RNA, 18 nt, Human
gauuuuauuauguaaauc

SEQ ID NO: 3733112 - RNA, 15 nt, Human
gauuuuauuuuacua

SEQ ID NO: 3733113 - RNA, 18 nt, Human
gauuuucaaagcuuuuuc

SEQ ID NO: 3733114 - RNA, 21 nt, Human
gauuuucaaccagauaacaua

SEQ ID NO: 3733115 - RNA, 11 nt, Human
gauuuucagcc

SEQ ID NO: 3733116 - RNA, 23 nt, Human
gauuuucauaacuuauugcugau

SEQ ID NO: 3733117 - RNA, 21 nt, Human
gauuuuccugaaacacuaaag

SEQ ID NO: 3733118 - RNA, 19 nt, Human
gauuuuccuuuuuuauaca

SEQ ID NO: 3733119 - RNA, 12 nt, Human
gauuuucuauug

SEQ ID NO: 3733120 - RNA, 22 nt, Human
gauuuucuauuguuacucuggu

SEQ ID NO: 3733121 - RNA, 14 nt, Human
gauuuucuccagcu

SEQ ID NO: 3733122 - RNA, 16 nt, Human
gauuuucuuuaaaaga

SEQ ID NO: 3733123 - RNA, 20 nt, Human
gauuuucuuuaaaagaaugg

SEQ ID NO: 3733124 - RNA, 24 nt, Human
gauuuucuuuaaaagaaugggcag

SEQ ID NO: 3733125 - RNA, 17 nt, Human
gauuuucuuuugccuuu

SEQ ID NO: 3733126 - RNA, 13 nt, Human
gauuuugaaaacu

SEQ ID NO: 3733127 - RNA, 17 nt, Human
gauuuugagguaaagau

SEQ ID NO: 3733128 - RNA, 20 nt, Human
gauuuugcaguucuuuggcu

SEQ ID NO: 3733129 - RNA, 13 nt, Human
gauuuugccugug

SEQ ID NO: 3733130 - RNA, 16 nt, Human
gauuuugcuguagaag

SEQ ID NO: 3733131 - RNA, 18 nt, Human
gauuuugcuguauauuug

SEQ ID NO: 3733132 - RNA, 19 nt, Human
gauuuuggccucauuacuu

SEQ ID NO: 3733133 - RNA, 13 nt, Human
gauuuuguuuugc

SEQ ID NO: 3733134 - RNA, 14 nt, Human
gauuuuuaauuaaa

SEQ ID NO: 3733135 - RNA, 20 nt, Human
gauuuuuaauuaaaaacuag

SEQ ID NO: 3733136 - RNA, 12 nt, Human
gauuuuuaccag

SEQ ID NO: 3733137 - RNA, 20 nt, Human
gauuuuuaccguuucuuccc

SEQ ID NO: 3733138 - RNA, 15 nt, Human
gauuuuuagaauuaa

SEQ ID NO: 3733139 - RNA, 14 nt, Human
gauuuuuauccaau

SEQ ID NO: 3733140 - RNA, 23 nt, Human
gauuuuucggaggccccacugau

SEQ ID NO: 3733141 - RNA, 22 nt, Human
gauuuuucuaaccuugaaugcu

SEQ ID NO: 3733142 - RNA, 12 nt, Human
gauuuuucucaa

SEQ ID NO: 3733143 - RNA, 20 nt, Human
gauuuuugcaauaccaagua

SEQ ID NO: 3733144 - RNA, 15 nt, Human
gauuuuuguaagaca

SEQ ID NO: 3733145 - RNA, 15 nt, Human
gauuuuuuaaaagaa

SEQ ID NO: 3733146 - RNA, 16 nt, Human
gauuuuuuaaaagaaa

SEQ ID NO: 3733147 - RNA, 19 nt, Human
gauuuuuuaauaauuuaga

SEQ ID NO: 3733148 - RNA, 12 nt, Human
gauuuuuuccaa

SEQ ID NO: 3733149 - RNA, 13 nt, Human
gauuuuuuccaaa

SEQ ID NO: 3733150 - RNA, 21 nt, Human
gauuuuuuccuucaaaguuua

SEQ ID NO: 3733151 - RNA, 23 nt, Human
gauuuuuuuucccauuuagaaug

SEQ ID NO: 3733152 - RNA, 18 nt, Human
gauuuuuuuuuccuucag

SEQ ID NO: 3733153 - RNA, 21 nt, Human
gauuuuuuuuuuuuuccuguc

SEQ ID NO: 3733154 - RNA, 21 nt, Human
gauuuuuuuuuuuuuuuccuu

SEQ ID NO: 3733155 - RNA, 19 nt, Human
gcaaaaaaaguuguaugau

SEQ ID NO: 3733156 - RNA, 13 nt, Human
gcaaaaaagaaaa

SEQ ID NO: 3733157 - RNA, 21 nt, Human
gcaaaaaauacuuuuucuaau

SEQ ID NO: 3733158 - RNA, 20 nt, Human
gcaaaaacaaaaagaaaaga

SEQ ID NO: 3733159 - RNA, 21 nt, Human
gcaaaaacaaaaagaaaagaa

SEQ ID NO: 3733160 - RNA, 15 nt, Human
gcaaaaacauguaug

SEQ ID NO: 3733161 - RNA, 17 nt, Human
gcaaaaacgaaagcugg

SEQ ID NO: 3733162 - RNA, 13 nt, Human
gcaaaaauauaaa

SEQ ID NO: 3733163 - RNA, 14 nt, Human
gcaaaaauauuuau

SEQ ID NO: 3733164 - RNA, 22 nt, Human
gcaaaaauauuuuaugauccag

SEQ ID NO: 3733165 - RNA, 14 nt, Human
gcaaaaauuuuugg

SEQ ID NO: 3733166 - RNA, 17 nt, Human
gcaaaacaugcuaccug

SEQ ID NO: 3733167 - RNA, 18 nt, Human
gcaaaaccauugcuucac

SEQ ID NO: 3733168 - RNA, 20 nt, Human
gcaaaacgcauggagugugu

SEQ ID NO: 3733169 - RNA, 22 nt, Human
gcaaaacucuacuuaauccaau

SEQ ID NO: 3733170 - RNA, 12 nt, Human
gcaaaacugaau

SEQ ID NO: 3733171 - RNA, 23 nt, Human
gcaaaagaguguaaaauauuuua

SEQ ID NO: 3733172 - RNA, 17 nt, Human
gcaaaagaugcuucuca

SEQ ID NO: 3733173 - RNA, 18 nt, Human
gcaaaagcagugggcucc

SEQ ID NO: 3733174 - RNA, 19 nt, Human
gcaaaagcuuacaaauacu

SEQ ID NO: 3733175 - RNA, 21 nt, Human
gcaaaaggaucuuuguggcca

SEQ ID NO: 3733176 - RNA, 21 nt, Human
gcaaaagguucacuaaagcag

SEQ ID NO: 3733177 - RNA, 16 nt, Human
gcaaaauaaaaacuau

SEQ ID NO: 3733178 - RNA, 13 nt, Human
gcaaaauaauuuu

SEQ ID NO: 3733179 - RNA, 13 nt, Human
gcaaaauacauga

SEQ ID NO: 3733180 - RNA, 14 nt, Human
gcaaaauacaugaa

SEQ ID NO: 3733181 - RNA, 13 nt, Human
gcaaaauagcauu

SEQ ID NO: 3733182 - RNA, 13 nt, Human
gcaaaaucaguuu

SEQ ID NO: 3733183 - RNA, 22 nt, Human
gcaaaauggaacgcuaaugaaa

SEQ ID NO: 3733184 - RNA, 13 nt, Human
gcaaaaugugaau

SEQ ID NO: 3733185 - RNA, 13 nt, Human
gcaaaauugcaaa

SEQ ID NO: 3733186 - RNA, 17 nt, Human
gcaaaauugcaaaucuu

SEQ ID NO: 3733187 - RNA, 21 nt, Human
gcaaaauuguuuuugguugga

SEQ ID NO: 3733188 - RNA, 15 nt, Human
gcaaaauuugaugcc

SEQ ID NO: 3733189 - RNA, 21 nt, Human
gcaaaauuugaugccaggaca

SEQ ID NO: 3733190 - RNA, 13 nt, Human
gcaaacaccugcu

SEQ ID NO: 3733191 - RNA, 14 nt, Human
gcaaacacuccacc

SEQ ID NO: 3733192 - RNA, 13 nt, Human
gcaaacagggccu

SEQ ID NO: 3733193 - RNA, 20 nt, Human
gcaaacauuuucucuuagaa

SEQ ID NO: 3733194 - RNA, 20 nt, Human
gcaaaccaagagauugcuaa

SEQ ID NO: 3733195 - RNA, 16 nt, Human
gcaaaccaucauugaa

SEQ ID NO: 3733196 - RNA, 19 nt, Human
gcaaaccaucauugaaauc

SEQ ID NO: 3733197 - RNA, 20 nt, Human
gcaaaccaucauugaaaucu

SEQ ID NO: 3733198 - RNA, 15 nt, Human
gcaaacccagacggc

SEQ ID NO: 3733199 - RNA, 19 nt, Human
gcaaacccaucaacaaaaa

SEQ ID NO: 3733200 - RNA, 18 nt, Human
gcaaacccccuuugugcu

SEQ ID NO: 3733201 - RNA, 22 nt, Human
gcaaacccccuuugugcugugg

SEQ ID NO: 3733202 - RNA, 19 nt, Human
gcaaaccuaauugcacaac

SEQ ID NO: 3733203 - RNA, 14 nt, Human
gcaaaccugcccca

SEQ ID NO: 3733204 - RNA, 16 nt, Human
gcaaacucaagcuucu

SEQ ID NO: 3733205 - RNA, 19 nt, Human
gcaaacugcaugcccagag

SEQ ID NO: 3733206 - RNA, 23 nt, Human
gcaaacuggccgcgggggcaggg

SEQ ID NO: 3733207 - RNA, 20 nt, Human
gcaaacuuaagaaacacuga

SEQ ID NO: 3733208 - RNA, 20 nt, Human
gcaaacuuuauuuuguguuu

SEQ ID NO: 3733209 - RNA, 23 nt, Human
gcaaagaaaaaaaaaaaagccag

SEQ ID NO: 3733210 - RNA, 12 nt, Human
gcaaagaaaaug

SEQ ID NO: 3733211 - RNA, 19 nt, Human
gcaaagagacccagucaau

SEQ ID NO: 3733212 - RNA, 21 nt, Human
gcaaagaggacucgcuuguaa

SEQ ID NO: 3733213 - RNA, 14 nt, Human
gcaaagaggcaaga

SEQ ID NO: 3733214 - RNA, 18 nt, Human
gcaaagaggcaagaggcu

SEQ ID NO: 3733215 - RNA, 16 nt, Human
gcaaagauaucucauc

SEQ ID NO: 3733216 - RNA, 12 nt, Human
gcaaagcacaga

SEQ ID NO: 3733217 - RNA, 22 nt, Human
gcaaagcagcaacuauucacaa

SEQ ID NO: 3733218 - RNA, 12 nt, Human
gcaaagcauuga

SEQ ID NO: 3733219 - RNA, 16 nt, Human
gcaaagccaggucccu

SEQ ID NO: 3733220 - RNA, 21 nt, Human
gcaaagcccagcuugaaaccu

SEQ ID NO: 3733221 - RNA, 20 nt, Human
gcaaagccccaugcuggagc

SEQ ID NO: 3733222 - RNA, 23 nt, Human
gcaaagccccaugcuggagccug

SEQ ID NO: 3733223 - RNA, 19 nt, Human
gcaaagcccccagagccca

SEQ ID NO: 3733224 - RNA, 23 nt, Human
gcaaagcccccagagcccaggcu

SEQ ID NO: 3733225 - RNA, 12 nt, Human
gcaaagccuguu

SEQ ID NO: 3733226 - RNA, 20 nt, Human
gcaaagccuguucauggcag

SEQ ID NO: 3733227 - RNA, 19 nt, Human
gcaaagcggguuauaauga

SEQ ID NO: 3733228 - RNA, 23 nt, Human
gcaaaggaaacuuugcagaugug

SEQ ID NO: 3733229 - RNA, 14 nt, Human
gcaaaggaaauacc

SEQ ID NO: 3733230 - RNA, 17 nt, Human
gcaaaggaguagaaaga

SEQ ID NO: 3733231 - RNA, 18 nt, Human
gcaaagggagcacugggu

SEQ ID NO: 3733232 - RNA, 18 nt, Human
gcaaagggagcagaacug

SEQ ID NO: 3733233 - RNA, 16 nt, Human
gcaaagggccaggaag

SEQ ID NO: 3733234 - RNA, 22 nt, Human
gcaaagggccugcccagacaag

SEQ ID NO: 3733235 - RNA, 15 nt, Human
gcaaagggcugaaag

SEQ ID NO: 3733236 - RNA, 13 nt, Human
gcaaaggggacag

SEQ ID NO: 3733237 - RNA, 14 nt, Human
gcaaaggggacagc

SEQ ID NO: 3733238 - RNA, 20 nt, Human
gcaaaggggucccauagagg

SEQ ID NO: 3733239 - RNA, 16 nt, Human
gcaaaguacaaugugu

SEQ ID NO: 3733240 - RNA, 12 nt, Human
gcaaaguacugu

SEQ ID NO: 3733241 - RNA, 13 nt, Human
gcaaaguacugua

SEQ ID NO: 3733242 - RNA, 14 nt, Human
gcaaaguacuguaa

SEQ ID NO: 3733243 - RNA, 23 nt, Human
gcaaaguaguacuucuucuguaa

SEQ ID NO: 3733244 - RNA, 16 nt, Human
gcaaaguauuguaaau

SEQ ID NO: 3733245 - RNA, 20 nt, Human
gcaaaguauuguaaauuaua

SEQ ID NO: 3733246 - RNA, 20 nt, Human
uaaagaggcugaaagaggcc

SEQ ID NO: 3733247 - RNA, 23 nt, Human
uaaagagucuagauucaaagguu

SEQ ID NO: 3733248 - RNA, 12 nt, Human
uaaagaguucuu

SEQ ID NO: 3733249 - RNA, 20 nt, Human
uaaagaguuguguuguucuu

SEQ ID NO: 3733250 - RNA, 15 nt, Human
uaaagauaauauuac

SEQ ID NO: 3733251 - RNA, 19 nt, Human
uaaagauaauauuacuguu

SEQ ID NO: 3733252 - RNA, 18 nt, Human
uaaagauaauugcuauuu

SEQ ID NO: 3733253 - RNA, 16 nt, Human
uaaagauauggagaau

SEQ ID NO: 3733254 - RNA, 13 nt, Human
uaaagauauuauu

SEQ ID NO: 3733255 - RNA, 17 nt, Human
uaaagaucuacaugaau

SEQ ID NO: 3733256 - RNA, 16 nt, Human
uaaagaugaacucuga

SEQ ID NO: 3733257 - RNA, 19 nt, Human
uaaagaugagcuuugucua

SEQ ID NO: 3733258 - RNA, 13 nt, Human
uaaagaugaucua

SEQ ID NO: 3733259 - RNA, 21 nt, Human
uaaagaugcaaggaccaggac

SEQ ID NO: 3733260 - RNA, 17 nt, Human
uaaagauggaguuucua

SEQ ID NO: 3733261 - RNA, 21 nt, Human
uaaagauggaguuucuaaggu

SEQ ID NO: 3733262 - RNA, 20 nt, Human
uaaagauguagcaaacccug

SEQ ID NO: 3733263 - RNA, 19 nt, Human
uaaagauucuauaguucua

SEQ ID NO: 3733264 - RNA, 24 nt, Human
uaaagauucuauaguucuagacau

SEQ ID NO: 3733265 - RNA, 13 nt, Human
uaaagauugugug

SEQ ID NO: 3733266 - RNA, 13 nt, Human
uaaagauuucugu

SEQ ID NO: 3733267 - RNA, 14 nt, Human
uaaagauuucuguu

SEQ ID NO: 3733268 - RNA, 15 nt, Human
uaaagauuuugaucu

SEQ ID NO: 3733269 - RNA, 21 nt, Human
uaaagauuuugaucucacauu

SEQ ID NO: 3733270 - RNA, 16 nt, Human
uaaagauuuuuuaaua

SEQ ID NO: 3733271 - RNA, 17 nt, Human
uaaagauuuuuuaauaa

SEQ ID NO: 3733272 - RNA, 20 nt, Human
uaaagauuuuuuaauaauuu

SEQ ID NO: 3733273 - RNA, 10 nt, Human
uaaagcaaaa

SEQ ID NO: 3733274 - RNA, 10 nt, Human
uaaagcaaau

SEQ ID NO: 3733275 - RNA, 20 nt, Human
uaaagcaacugucuauuucu

SEQ ID NO: 3733276 - RNA, 19 nt, Human
uaaagcaagcucacuugcu

SEQ ID NO: 3733277 - RNA, 23 nt, Human
uaaagcaauaauggucccaucca

SEQ ID NO: 3733278 - RNA, 16 nt, Human
uaaagcaauuuuccuu

SEQ ID NO: 3733279 - RNA, 17 nt, Human
uaaagcaauuuuccuug

SEQ ID NO: 3733280 - RNA, 14 nt, Human
uaaagcacugagca

SEQ ID NO: 3733281 - RNA, 20 nt, Human
uaaagcagagggacuuugua

SEQ ID NO: 3733282 - RNA, 16 nt, Human
uaaagcagcguuucua

SEQ ID NO: 3733283 - RNA, 19 nt, Human
uaaagcagcguuucuauga

SEQ ID NO: 3733284 - RNA, 20 nt, Human
uaaagcaggccuuuugauau

SEQ ID NO: 3733285 - RNA, 13 nt, Human
uaaagcaguauuu

SEQ ID NO: 3733286 - RNA, 14 nt, Human
uaaagcaguauuuu

SEQ ID NO: 3733287 - RNA, 16 nt, Human
uaaagcauaaguauac

SEQ ID NO: 3733288 - RNA, 12 nt, Human
uaaagcauauag

SEQ ID NO: 3733289 - RNA, 15 nt, Human
uaaagcaucuaaacu

SEQ ID NO: 3733290 - RNA, 16 nt, Human
uaaagcaugaaaugug

SEQ ID NO: 3733291 - RNA, 18 nt, Human
uaaagcaugaaaugugaa

SEQ ID NO: 3733292 - RNA, 20 nt, Human
uaaagcaugaaaugugaauu

SEQ ID NO: 3733293 - RNA, 23 nt, Human
uaaagcauucaauuuauucaaga

SEQ ID NO: 3733294 - RNA, 15 nt, Human
uaaagcauuccaaca

SEQ ID NO: 3733295 - RNA, 19 nt, Human
uaaagcauugcuguuaugu

SEQ ID NO: 3733296 - RNA, 20 nt, Human
uaaagcauugcuguuauguc

SEQ ID NO: 3733297 - RNA, 23 nt, Human
uaaagcauugcuguuaugucugu

SEQ ID NO: 3733298 - RNA, 13 nt, Human
uaaagcauugcuu

SEQ ID NO: 3733299 - RNA, 11 nt, Human
uaaagcauuua

SEQ ID NO: 3733300 - RNA, 13 nt, Human
uaaagcauuuaua

SEQ ID NO: 3733301 - RNA, 11 nt, Human
uaaagccaagg

SEQ ID NO: 3733302 - RNA, 17 nt, Human
uaaagccagccugaccu

SEQ ID NO: 3733303 - RNA, 15 nt, Human
uaaagccaugcugga

SEQ ID NO: 3733304 - RNA, 23 nt, Human
uaaagcccgccugacagaaacca

SEQ ID NO: 3733305 - RNA, 12 nt, Human
uaaagccuccuc

SEQ ID NO: 3733306 - RNA, 14 nt, Human
uaaagcgaaaaacu

SEQ ID NO: 3733307 - RNA, 17 nt, Human
uaaagcgaaaaacucaa

SEQ ID NO: 3733308 - RNA, 18 nt, Human
uaaagcgauauacagaug

SEQ ID NO: 3733309 - RNA, 23 nt, Human
uaaagcgauauacagaugaaaau

SEQ ID NO: 3733310 - RNA, 20 nt, Human
uaaagcuaaaaugauuuuau

SEQ ID NO: 3733311 - RNA, 15 nt, Human
uaaagcuaaggaccu

SEQ ID NO: 3733312 - RNA, 17 nt, Human
uaaagcucaaaugaaau

SEQ ID NO: 3733313 - RNA, 19 nt, Human
uaaagcucaaaugaaaugu

SEQ ID NO: 3733314 - RNA, 17 nt, Human
uaaagcucgaaaacaau

SEQ ID NO: 3733315 - RNA, 16 nt, Human
uaaagcugccuguagu

SEQ ID NO: 3733316 - RNA, 15 nt, Human
uaaagcugguuuaau

SEQ ID NO: 3733317 - RNA, 11 nt, Human
uaaaggaaaag

SEQ ID NO: 3733318 - RNA, 16 nt, Human
uaaaggaaaagacaca

SEQ ID NO: 3733319 - RNA, 16 nt, Human
uaaaggaaaugauuga

SEQ ID NO: 3733320 - RNA, 14 nt, Human
uaaaggaauuuaaa

SEQ ID NO: 3733321 - RNA, 16 nt, Human
uaaaggaguuaagagu

SEQ ID NO: 3733322 - RNA, 20 nt, Human
uaaaggaguuaagaguagca

SEQ ID NO: 3733323 - RNA, 17 nt, Human
uaaaggauguugguguu

SEQ ID NO: 3733324 - RNA, 20 nt, Human
uaaaggcagcuguugucucu

SEQ ID NO: 3733325 - RNA, 15 nt, Human
uaaaggccucugccu

SEQ ID NO: 3733326 - RNA, 16 nt, Human
uaaaggcuaacuauga

SEQ ID NO: 3733327 - RNA, 15 nt, Human
uaaaggcuaccuuug

SEQ ID NO: 3733328 - RNA, 19 nt, Human
uaaaggcuaccuuuguauu

SEQ ID NO: 3733329 - RNA, 20 nt, Human
uaaaggcuauacuugucuug

SEQ ID NO: 3733330 - RNA, 14 nt, Human
uaaaggcuucucuc

SEQ ID NO: 3733331 - RNA, 19 nt, Human
uaaaggcuucucucucacc

SEQ ID NO: 3733332 - RNA, 13 nt, Human
uaaagggaagaaa

SEQ ID NO: 3733333 - RNA, 20 nt, Human
uaaagggcccaaugaauuau

SEQ ID NO: 3733334 - RNA, 15 nt, Human
uaaaggggggagggg

SEQ ID NO: 3733335 - RNA, 20 nt, Human
uaaaggugaaaaaagcuuuu

SEQ ID NO: 3733336 - RNA, 21 nt, Human
uaaaggugacaucggaaaaau

SEQ ID NO: 3733337 - RNA, 22 nt, Human
uaaaggugacaucggaaaaaua

SEQ ID NO: 3733338 - RNA, 23 nt, Human
uaaaggugguauguguguguaug

SEQ ID NO: 3733339 - RNA, 20 nt, Human
uaaagguggugaggcaauaa

SEQ ID NO: 3733340 - RNA, 19 nt, Human
uaaagguuauuuucuccug

SEQ ID NO: 3733341 - RNA, 19 nt, Human
uaaaguaaaaacaaagaaa

SEQ ID NO: 3733342 - RNA, 21 nt, Human
uaaaguaaaaacaaagaaauu

SEQ ID NO: 3733343 - RNA, 15 nt, Human
uaaaguaaagcuaaa

SEQ ID NO: 3733344 - RNA, 17 nt, Human
uaaaguaauuguuccag

SEQ ID NO: 3733345 - RNA, 23 nt, Human
uaaaguacugagcagugauauuc

SEQ ID NO: 3733346 - RNA, 21 nt, Human
uaaaguacuugaguguaaugu

SEQ ID NO: 3733347 - RNA, 16 nt, Human
uaaaguacuuguaguu

SEQ ID NO: 3733348 - RNA, 13 nt, Human
uaaaguagaagag

SEQ ID NO: 3733349 - RNA, 13 nt, Human
uaaaguauaaugu

SEQ ID NO: 3733350 - RNA, 19 nt, Human
uaaaguauagagagaaguu

SEQ ID NO: 3733351 - RNA, 19 nt, Human
uaaaguauauauagaaucu

SEQ ID NO: 3733352 - RNA, 20 nt, Human
uaaaguaucaggauacuaua

SEQ ID NO: 3733353 - RNA, 13 nt, Human
uaaaguauucuuu

SEQ ID NO: 3733354 - RNA, 13 nt, Human
uaaagucaggggu

SEQ ID NO: 3733355 - RNA, 14 nt, Human
uaaagucugaauca

SEQ ID NO: 3733356 - RNA, 22 nt, Human
uaaagucuguugauuaaagaug

SEQ ID NO: 3733357 - RNA, 15 nt, Human
uaaagucuugcugug

SEQ ID NO: 3733358 - RNA, 23 nt, Human
uaaagugaggccacugaagagga

SEQ ID NO: 3733359 - RNA, 15 nt, Human
uaaagugauauuucc

SEQ ID NO: 3733360 - RNA, 16 nt, Human
uaaagugauauuuccc

SEQ ID NO: 3733361 - RNA, 15 nt, Human
uaaagugcuaagguu

SEQ ID NO: 3733362 - RNA, 19 nt, Human
uaaagugcuaagguucuaa

SEQ ID NO: 3733363 - RNA, 22 nt, Human
uaaagugcuaagguucuaaggc

SEQ ID NO: 3733364 - RNA, 16 nt, Human
uaaagugcuuguguaa

SEQ ID NO: 3733365 - RNA, 22 nt, Human
uaaaguggguuauucuggaguu

SEQ ID NO: 3733366 - RNA, 15 nt, Human
uaaaguguaaauccu

SEQ ID NO: 3733367 - RNA, 22 nt, Human
uaaaguguaaauccuuuuucuu

SEQ ID NO: 3733368 - RNA, 16 nt, Human
uaaaguguaacauaug

SEQ ID NO: 3733369 - RNA, 20 nt, Human
uaaaguguauuuuuuuacua

SEQ ID NO: 3733370 - RNA, 22 nt, Human
uaaaguguauuuuuuuacuaau

SEQ ID NO: 3733371 - RNA, 11 nt, Human
uaaaguguuuc

SEQ ID NO: 3733372 - RNA, 15 nt, Human
uaaaguguuucagcu

SEQ ID NO: 3733373 - RNA, 17 nt, Human
uaaaguguuucuguuau

SEQ ID NO: 3733374 - RNA, 14 nt, Human
uaaaguguuugaaa

SEQ ID NO: 3733375 - RNA, 15 nt, Human
uaaaguguuuucaga

SEQ ID NO: 3733376 - RNA, 18 nt, Human
uaaaguuaaacauuuuua

SEQ ID NO: 3733377 - RNA, 13 nt, Human
uaaaguuacauug

SEQ ID NO: 3733378 - RNA, 15 nt, Human
uaaaguuacauugcu

SEQ ID NO: 3733379 - RNA, 15 nt, Human
uaaaguuaguaaaga

SEQ ID NO: 3733380 - RNA, 16 nt, Human
uaaaguuagucuacuc

SEQ ID NO: 3733381 - RNA, 13 nt, Human
uaaaguuauucuu

SEQ ID NO: 3733382 - RNA, 14 nt, Human
uaaaguucaaacuc

SEQ ID NO: 3733383 - RNA, 12 nt, Human
uaaaguucuaag

SEQ ID NO: 3733384 - RNA, 14 nt, Human
uaaaguucuaagau

SEQ ID NO: 3733385 - RNA, 15 nt, Human
uaaaguucuaagauu

SEQ ID NO: 3733386 - RNA, 17 nt, Human
uaaaguucuaagauucu

SEQ ID NO: 3733387 - RNA, 23 nt, Human
uaaaguucuguacucaaauguag

SEQ ID NO: 3733388 - RNA, 21 nt, Human
uaaaguugaauuuauuggcuu

SEQ ID NO: 3733389 - RNA, 23 nt, Human
uaaaguugaauuuauuggcuuuu

SEQ ID NO: 3733390 - RNA, 17 nt, Human
uaaaguugguauuaaua

SEQ ID NO: 3733391 - RNA, 19 nt, Human
uaaaguugguauuaauaaa

SEQ ID NO: 3733392 - RNA, 16 nt, Human
uaaaguugguuggaua

SEQ ID NO: 3733393 - RNA, 17 nt, Human
uaaaguugguuggauaa

SEQ ID NO: 3733394 - RNA, 17 nt, Human
uaaaguuuacaguaaau

SEQ ID NO: 3733395 - RNA, 12 nt, Human
uaaaguuucaaa

SEQ ID NO: 3733396 - RNA, 17 nt, Human
uaaaguuucaaaaaucu

SEQ ID NO: 3733397 - RNA, 20 nt, Human
guuuacagggagccuccugc

SEQ ID NO: 3733398 - RNA, 23 nt, Human
guuuacagggagccuccugccca

SEQ ID NO: 3733399 - RNA, 14 nt, Human
guuuacagucuauu

SEQ ID NO: 3733400 - RNA, 16 nt, Human
guuuacagucuauuug

SEQ ID NO: 3733401 - RNA, 13 nt, Human
guuuacaguguuc

SEQ ID NO: 3733402 - RNA, 21 nt, Human
guuuacauguguagccuaugu

SEQ ID NO: 3733403 - RNA, 22 nt, Human
guuuacauguguagccuauguu

SEQ ID NO: 3733404 - RNA, 11 nt, Human
guuuacauuua

SEQ ID NO: 3733405 - RNA, 12 nt, Human
guuuacauuuaa

SEQ ID NO: 3733406 - RNA, 14 nt, Human
guuuacauuuaaag

SEQ ID NO: 3733407 - RNA, 21 nt, Human
guuuacauuuaaagcauugcu

SEQ ID NO: 3733408 - RNA, 23 nt, Human
guuuacauuuaaagcauugcugu

SEQ ID NO: 3733409 - RNA, 21 nt, Human
guuuacauuugaugcaugucu

SEQ ID NO: 3733410 - RNA, 11 nt, Human
guuuacauuuu

SEQ ID NO: 3733411 - RNA, 23 nt, Human
guuuacauuuuuauuuaugaagu

SEQ ID NO: 3733412 - RNA, 16 nt, Human
guuuacccaugaagau

SEQ ID NO: 3733413 - RNA, 23 nt, Human
guuuaccuagaagaagcuauguc

SEQ ID NO: 3733414 - RNA, 16 nt, Human
guuuaccugaauaaau

SEQ ID NO: 3733415 - RNA, 21 nt, Human
guuuaccuggcuuauuuaaua

SEQ ID NO: 3733416 - RNA, 13 nt, Human
guuuacuauuuua

SEQ ID NO: 3733417 - RNA, 23 nt, Human
guuuacuguuuugaaaucaaugc

SEQ ID NO: 3733418 - RNA, 14 nt, Human
guuuacuuaaagau

SEQ ID NO: 3733419 - RNA, 20 nt, Human
guuuacuuccccuauggaau

SEQ ID NO: 3733420 - RNA, 13 nt, Human
guuuacuuuaacu

SEQ ID NO: 3733421 - RNA, 15 nt, Human
guuuagaacagguuu

SEQ ID NO: 3733422 - RNA, 16 nt, Human
guuuagaagaagugug

SEQ ID NO: 3733423 - RNA, 18 nt, Human
guuuagauagggcugggc

SEQ ID NO: 3733424 - RNA, 19 nt, Human
guuuagauagggcugggca

SEQ ID NO: 3733425 - RNA, 18 nt, Human
guuuagaugaaugucagu

SEQ ID NO: 3733426 - RNA, 22 nt, Human
guuuagauuugccauagaguac

SEQ ID NO: 3733427 - RNA, 14 nt, Human
guuuagauuuugug

SEQ ID NO: 3733428 - RNA, 22 nt, Human
guuuagauuuuguguuuauucu

SEQ ID NO: 3733429 - RNA, 23 nt, Human
guuuagcagcagccuuuaaugca

SEQ ID NO: 3733430 - RNA, 13 nt, Human
guuuagcaguaua

SEQ ID NO: 3733431 - RNA, 15 nt, Human
guuuagcugacaaaa

SEQ ID NO: 3733432 - RNA, 17 nt, Human
guuuagcugacaaaaua

SEQ ID NO: 3733433 - RNA, 16 nt, Human
uaacaucuucuuuccu

SEQ ID NO: 3733434 - RNA, 17 nt, Human
uaacaucuuuauugaaa

SEQ ID NO: 3733435 - RNA, 21 nt, Human
uaacaucuuuauugaaauucu

SEQ ID NO: 3733436 - RNA, 22 nt, Human
uaacaucuuuauugaaauucua

SEQ ID NO: 3733437 - RNA, 13 nt, Human
uaacaugaaauga

SEQ ID NO: 3733438 - RNA, 14 nt, Human
uaacaugaaaugau

SEQ ID NO: 3733439 - RNA, 21 nt, Human
uaacaugaacacccuuagaaa

SEQ ID NO: 3733440 - RNA, 17 nt, Human
guuuugacaucagccag

SEQ ID NO: 3733441 - RNA, 17 nt, Human
guuuugacauuuuuagu

SEQ ID NO: 3733442 - RNA, 15 nt, Human
guuuugauaugagua

SEQ ID NO: 3733443 - RNA, 23 nt, Human
guuuugauguuuguggccucaga

SEQ ID NO: 3733444 - RNA, 19 nt, Human
guuuugauuuaauaacaua

SEQ ID NO: 3733445 - RNA, 20 nt, Human
guuuugauuuaauguuuuca

SEQ ID NO: 3733446 - RNA, 13 nt, Human
guuuugcacucuu

SEQ ID NO: 3733447 - RNA, 22 nt, Human
guuuugcacucuuguuucuccc

SEQ ID NO: 3733448 - RNA, 13 nt, Human
guuuugcacuuuu

SEQ ID NO: 3733449 - RNA, 16 nt, Human
guuuugccauguuggc

SEQ ID NO: 3733450 - RNA, 22 nt, Human
guuuugccauguuggccaggcu

SEQ ID NO: 3733451 - RNA, 18 nt, Human
guuuugcucuuguagccc

SEQ ID NO: 3733452 - RNA, 18 nt, Human
guuuuggacaguuuacca

SEQ ID NO: 3733453 - RNA, 16 nt, Human
guuuuggacuccaucu

SEQ ID NO: 3733454 - RNA, 19 nt, Human
guuuuggaucuugaaugug

SEQ ID NO: 3733455 - RNA, 23 nt, Human
guuuuggauuuggagagaaauau

SEQ ID NO: 3733456 - RNA, 22 nt, Human
guuuugggggucaggcagccag

SEQ ID NO: 3733457 - RNA, 16 nt, Human
guuuugguguaacauc

SEQ ID NO: 3733458 - RNA, 17 nt, Human
guuuuguaaacauuuau

SEQ ID NO: 3733459 - RNA, 16 nt, Human
guuuuguaaacuuuga

SEQ ID NO: 3733460 - RNA, 17 nt, Human
guuuuguaaagucccca

SEQ ID NO: 3733461 - RNA, 14 nt, Human
guuuuguaaauuuc

SEQ ID NO: 3733462 - RNA, 23 nt, Human
guuuuguaagaugcuggguuggu

SEQ ID NO: 3733463 - RNA, 14 nt, Human
guuuuguacauaga

SEQ ID NO: 3733464 - RNA, 12 nt, Human
guuuuguacaug

SEQ ID NO: 3733465 - RNA, 19 nt, Human
guuuuguacauguaacauu

SEQ ID NO: 3733466 - RNA, 15 nt, Human
guuuuguagguacuu

SEQ ID NO: 3733467 - RNA, 12 nt, Human
guuuuguauaca

SEQ ID NO: 3733468 - RNA, 13 nt, Human
guuuugugaaauu

SEQ ID NO: 3733469 - RNA, 23 nt, Human
guuuugugaaauuuuucauauuu

SEQ ID NO: 3733470 - RNA, 24 nt, Human
guuuugugacuauauagagauguu

SEQ ID NO: 3733471 - RNA, 16 nt, Human
guuuugugucucuuau

SEQ ID NO: 3733472 - RNA, 18 nt, Human
guuuuguguuuguuguag

SEQ ID NO: 3733473 - RNA, 15 nt, Human
guuuuguguuuuuuu

SEQ ID NO: 3733474 - RNA, 17 nt, Human
guuuuguuauauaauuu

SEQ ID NO: 3733475 - RNA, 21 nt, Human
guuuuguucaccauuauaaug

SEQ ID NO: 3733476 - RNA, 18 nt, Human
guuuuguugacauucuga

SEQ ID NO: 3733477 - RNA, 22 nt, Human
guuuuguugacauucugaaugc

SEQ ID NO: 3733478 - RNA, 12 nt, Human
guuuuguugagc

SEQ ID NO: 3733479 - RNA, 10 nt, Human
guuuuguugc

SEQ ID NO: 3733480 - RNA, 20 nt, Human
guuuuguuuggcaaggaaag

SEQ ID NO: 3733481 - RNA, 18 nt, Human
guuuuuaaaaguuucaau

SEQ ID NO: 3733482 - RNA, 17 nt, Human
guuuuuaaaauaucuuu

SEQ ID NO: 3733483 - RNA, 20 nt, Human
guuuuuaaaaucuuauuaaa

SEQ ID NO: 3733484 - RNA, 13 nt, Human
guuuuuaaacugu

SEQ ID NO: 3733485 - RNA, 17 nt, Human
guuuuuaaacuguacag

SEQ ID NO: 3733486 - RNA, 20 nt, Human
guuuuuaaacuguacagugu

SEQ ID NO: 3733487 - RNA, 18 nt, Human
guuuuuaaauagaguuug

SEQ ID NO: 3733488 - RNA, 19 nt, Human
guuuuuaacucaauauuuu

SEQ ID NO: 3733489 - RNA, 19 nt, Human
guuuuuaagcuguuuccau

SEQ ID NO: 3733490 - RNA, 21 nt, Human
guuuuuaaggguuuguggaaa

SEQ ID NO: 3733491 - RNA, 12 nt, Human
guuuuuaaugua

SEQ ID NO: 3733492 - RNA, 11 nt, Human
guuuuuacagc

SEQ ID NO: 3733493 - RNA, 17 nt, Human
guuuuuacagcuguguu

SEQ ID NO: 3733494 - RNA, 14 nt, Human
guuuuuacccauau

SEQ ID NO: 3733495 - RNA, 22 nt, Human
guuuuuaccuaccacagugucu

SEQ ID NO: 3733496 - RNA, 23 nt, Human
guuuuuaccugucacauugcauu

SEQ ID NO: 3733497 - RNA, 16 nt, Human
guuuuuacuacaguug

SEQ ID NO: 3733498 - RNA, 21 nt, Human
guuuuuagacaccuucauuuu

SEQ ID NO: 3733499 - RNA, 21 nt, Human
guuuuuaguaaucuguacauu

SEQ ID NO: 3733500 - RNA, 18 nt, Human
guuuuuauaaaaaauggu

SEQ ID NO: 3733501 - RNA, 15 nt, Human
guuuuuauaauaaaa

SEQ ID NO: 3733502 - RNA, 17 nt, Human
guuuuuauuaaaaggaa

SEQ ID NO: 3733503 - RNA, 15 nt, Human
guuuuuauuauuaac

SEQ ID NO: 3733504 - RNA, 18 nt, Human
guuuuuauuauuaacaaa

SEQ ID NO: 3733505 - RNA, 14 nt, Human
guuuuuauuuccua

SEQ ID NO: 3733506 - RNA, 15 nt, Human
guuuuucaauuaaac

SEQ ID NO: 3733507 - RNA, 17 nt, Human
guuuuucaauuaaacgg

SEQ ID NO: 3733508 - RNA, 21 nt, Human
guuuuucaauuaaacggauua

SEQ ID NO: 3733509 - RNA, 12 nt, Human
guuuuucauuca

SEQ ID NO: 3733510 - RNA, 15 nt, Human
guuuuuccacuacug

SEQ ID NO: 3733511 - RNA, 18 nt, Human
guuuuuccuaucauguua

SEQ ID NO: 3733512 - RNA, 14 nt, Human
guuuuuccuggaau

SEQ ID NO: 3733513 - RNA, 17 nt, Human
guuuuuccuuauuugcu

SEQ ID NO: 3733514 - RNA, 14 nt, Human
guuuuuccuuuaaa

SEQ ID NO: 3733515 - RNA, 18 nt, Human
guuuuuccuuuuuuugua

SEQ ID NO: 3733516 - RNA, 11 nt, Human
guuuuucuauu

SEQ ID NO: 3733517 - RNA, 19 nt, Human
guuuuucuauuaaaagacu

SEQ ID NO: 3733518 - RNA, 22 nt, Human
guuuuucuauuaaaagacucau

SEQ ID NO: 3733519 - RNA, 16 nt, Human
guuuuucuccagugcu

SEQ ID NO: 3733520 - RNA, 17 nt, Human
guuuuucugcuuuugaa

SEQ ID NO: 3733521 - RNA, 16 nt, Human
guuuuucuggguggcc

SEQ ID NO: 3733522 - RNA, 12 nt, Human
guuuuucuucaa

SEQ ID NO: 3733523 - RNA, 14 nt, Human
guuuuucuuguaaa

SEQ ID NO: 3733524 - RNA, 14 nt, Human
guuuuugaaacaga

SEQ ID NO: 3733525 - RNA, 24 nt, Human
guuuuuggaugguguuacauauua

SEQ ID NO: 3733526 - RNA, 18 nt, Human
guuuuugguuuuuaaaac

SEQ ID NO: 3733527 - RNA, 13 nt, Human
guuuuuguaaaga

SEQ ID NO: 3733528 - RNA, 21 nt, Human
guuuuuguaaagaaaaauauu

SEQ ID NO: 3733529 - RNA, 15 nt, Human
guuuuuguaaagauu

SEQ ID NO: 3733530 - RNA, 21 nt, Human
guuuuuguaaauuaaucuuuu

SEQ ID NO: 3733531 - RNA, 16 nt, Human
guuuuugucuuaaaaa

SEQ ID NO: 3733532 - RNA, 19 nt, Human
guuuuuguuuuuguuuugu

SEQ ID NO: 3733533 - RNA, 18 nt, Human
guuuuuuaaaaaucugug

SEQ ID NO: 3733534 - RNA, 21 nt, Human
guuuuuuaaagucuugcugug

SEQ ID NO: 3733535 - RNA, 23 nt, Human
guuuuuuaagggcccuuuuucaa

SEQ ID NO: 3733536 - RNA, 12 nt, Human
guuuuuuaaguc

SEQ ID NO: 3733537 - RNA, 19 nt, Human
guuuuuuagaucaaauacu

SEQ ID NO: 3733538 - RNA, 16 nt, Human
guuuuuuaugaagugc

SEQ ID NO: 3733539 - RNA, 11 nt, Human
guuuuuucauc

SEQ ID NO: 3733540 - RNA, 15 nt, Human
guuuuuuccucagug

SEQ ID NO: 3733541 - RNA, 14 nt, Human
guuuuuuccugagc

SEQ ID NO: 3733542 - RNA, 21 nt, Human
guuuuuuccugagcuuggcca

SEQ ID NO: 3733543 - RNA, 13 nt, Human
guuuuuuccuuug

SEQ ID NO: 3733544 - RNA, 12 nt, Human
guuuuuugaaaa

SEQ ID NO: 3733545 - RNA, 16 nt, Human
guuuuuugaaguguug

SEQ ID NO: 3733546 - RNA, 23 nt, Human
guuuuuugccacagcuuuugcaa

SEQ ID NO: 3733547 - RNA, 9 nt, Human
guuuuuugu

SEQ ID NO: 3733548 - RNA, 20 nt, Human
guuuuuuuaggguuucugau

SEQ ID NO: 3733549 - RNA, 13 nt, Human
guuuuuuuccagu

SEQ ID NO: 3733550 - RNA, 18 nt, Human
guuuuuuuuaaauaaaag

SEQ ID NO: 3733551 - RNA, 20 nt, Human
guuuuuuuuaaauaaaagca

SEQ ID NO: 3733552 - RNA, 13 nt, Human
guuuuuuuucuaa

SEQ ID NO: 3733553 - RNA, 14 nt, Human
guuuuuuuuucauu

SEQ ID NO: 3733554 - RNA, 20 nt, Human
guuuuuuuuuccuguccuuc

SEQ ID NO: 3733555 - RNA, 16 nt, Human
guuuuuuuuuuguuug

SEQ ID NO: 3733556 - RNA, 22 nt, Human
guuuuuuuuuuuaaaaaaagaa

SEQ ID NO: 3733557 - RNA, 19 nt, Human
guuuuuuuuuuuuuuuugg

SEQ ID NO: 3733558 - RNA, 18 nt, Human
uaaaaaaaaaaaaaagcu

SEQ ID NO: 3733559 - RNA, 22 nt, Human
uaaaaaaaaaaaaaagcuuuau

SEQ ID NO: 3733560 - RNA, 22 nt, Human
uaaaaaaaaaaaaaauguucuu

SEQ ID NO: 3733561 - RNA, 19 nt, Human
uaaaaaaaaaaaaaggaaa

SEQ ID NO: 3733562 - RNA, 18 nt, Human
uaaaaaaaaaaagauugu

SEQ ID NO: 3733563 - RNA, 14 nt, Human
uaaaaaaaaaggca

SEQ ID NO: 3733564 - RNA, 14 nt, Human
uaaaaaaaaaguca

SEQ ID NO: 3733565 - RNA, 15 nt, Human
uaaaaaaaaagucag

SEQ ID NO: 3733566 - RNA, 15 nt, Human
uaaaaaaaaaugccu

SEQ ID NO: 3733567 - RNA, 18 nt, Human
uaaaaaaaaaugccuuug

SEQ ID NO: 3733568 - RNA, 17 nt, Human
uaaaaaaaacaaaaaga

SEQ ID NO: 3733569 - RNA, 15 nt, Human
uaaaaaaaagaaaaa

SEQ ID NO: 3733570 - RNA, 16 nt, Human
uaaaaaaaauaauaaa

SEQ ID NO: 3733571 - RNA, 14 nt, Human
uaaaaaaaauaguu

SEQ ID NO: 3733572 - RNA, 19 nt, Human
uaaaaaaaauccuucuaau

SEQ ID NO: 3733573 - RNA, 20 nt, Human
uaaaaaaaaugaaauguuuu

SEQ ID NO: 3733574 - RNA, 13 nt, Human
uaaaaaaagaaaa

SEQ ID NO: 3733575 - RNA, 15 nt, Human
uaaaaaaagaaaaaa

SEQ ID NO: 3733576 - RNA, 14 nt, Human
uaaaaaaagaaaau

SEQ ID NO: 3733577 - RNA, 15 nt, Human
uaaaaaaagaaagca

SEQ ID NO: 3733578 - RNA, 17 nt, Human
uaaaaaaagaagagaaa

SEQ ID NO: 3733579 - RNA, 19 nt, Human
uaaaaaaauaaaacauuuu

SEQ ID NO: 3733580 - RNA, 20 nt, Human
uaaaaaaauaagaagaaugc

SEQ ID NO: 3733581 - RNA, 22 nt, Human
uaaaaaaauaagaagaaugcuu

SEQ ID NO: 3733582 - RNA, 20 nt, Human
uaaaaaaauaauaauaaugu

SEQ ID NO: 3733583 - RNA, 22 nt, Human
uaaaaaaauacaguauucugua

SEQ ID NO: 3733584 - RNA, 15 nt, Human
uaaaaaaauuuaagu

SEQ ID NO: 3733585 - RNA, 17 nt, Human
uaaaaaacuaaaaacua

SEQ ID NO: 3733586 - RNA, 23 nt, Human
uaaaaaacugcugacuguuuucu

SEQ ID NO: 3733587 - RNA, 21 nt, Human
uaaaaaacuuucuacucauuu

SEQ ID NO: 3733588 - RNA, 16 nt, Human
uaaaaaagaaacauuu

SEQ ID NO: 3733589 - RNA, 13 nt, Human
uaaaaaagagaca

SEQ ID NO: 3733590 - RNA, 18 nt, Human
uaaaaaagcucuuuuaau

SEQ ID NO: 3733591 - RNA, 20 nt, Human
uaaaaaagcuuaaaacuuug

SEQ ID NO: 3733592 - RNA, 16 nt, Human
uaaaaaagucucuauu

SEQ ID NO: 3733593 - RNA, 19 nt, Human
uaaaaaagucucuauuuaa

SEQ ID NO: 3733594 - RNA, 17 nt, Human
uaaaaaaguuuaaaaug

SEQ ID NO: 3733595 - RNA, 22 nt, Human
uaaaaaaguuuagaaugugugu

SEQ ID NO: 3733596 - RNA, 19 nt, Human
uaaaaaauaauaauacaag

SEQ ID NO: 3733597 - RNA, 16 nt, Human
uaaaaaauauuuucuc

SEQ ID NO: 3733598 - RNA, 13 nt, Human
uaaaaaaugaaau

SEQ ID NO: 3733599 - RNA, 15 nt, Human
uaaaaaauggaaaga

SEQ ID NO: 3733600 - RNA, 19 nt, Human
uaaaaaaugguucagaauu

SEQ ID NO: 3733601 - RNA, 22 nt, Human
uaaaaaauguguguauucuuaa

SEQ ID NO: 3733602 - RNA, 19 nt, Human
uaaaaaauuuuaaaaaucu

SEQ ID NO: 3733603 - RNA, 10 nt, Human
uaaaaacaaa

SEQ ID NO: 3733604 - RNA, 17 nt, Human
uaaaaacaaagaaauua

SEQ ID NO: 3733605 - RNA, 18 nt, Human
uaaaaacaacgaaagaag

SEQ ID NO: 3733606 - RNA, 18 nt, Human
uaaaaacagcauugcuuu

SEQ ID NO: 3733607 - RNA, 18 nt, Human
uaaaaaccagacaaggaa

SEQ ID NO: 3733608 - RNA, 23 nt, Human
uaaaaacccacaaaaauguugaa

SEQ ID NO: 3733609 - RNA, 20 nt, Human
uaaaaacuagaggugagaaa

SEQ ID NO: 3733610 - RNA, 19 nt, Human
uaaaaacuaguaguucucu

SEQ ID NO: 3733611 - RNA, 14 nt, Human
uaaaaacugaaguu

SEQ ID NO: 3733612 - RNA, 17 nt, Human
uaaaaacugacuccuua

SEQ ID NO: 3733613 - RNA, 14 nt, Human
uaaaaacuuugcua

SEQ ID NO: 3733614 - RNA, 23 nt, Human
uaaaaagaaaaaccacucccagu

SEQ ID NO: 3733615 - RNA, 18 nt, Human
uaaaaagaaaaaugugua

SEQ ID NO: 3733616 - RNA, 16 nt, Human
uaaaaagaaacaagau

SEQ ID NO: 3733617 - RNA, 18 nt, Human
uaaaaagaaacaagaugc

SEQ ID NO: 3733618 - RNA, 19 nt, Human
uaaaaagaaacaagaugcu

SEQ ID NO: 3733619 - RNA, 21 nt, Human
uaaaaagaaggaaaaugaucu

SEQ ID NO: 3733620 - RNA, 20 nt, Human
uaaaaagagagaaaacuuau

SEQ ID NO: 3733621 - RNA, 13 nt, Human
uaaaaagauucuu

SEQ ID NO: 3733622 - RNA, 19 nt, Human
uaaaaagauucuuuuucug

SEQ ID NO: 3733623 - RNA, 23 nt, Human
uaaaaagccacuagacucuucac

SEQ ID NO: 3733624 - RNA, 20 nt, Human
uaaaaagccagggcuggaga

SEQ ID NO: 3733625 - RNA, 16 nt, Human
uaaaaagcccaaccuc

SEQ ID NO: 3733626 - RNA, 22 nt, Human
uaaaaagccugcaauuucauau

SEQ ID NO: 3733627 - RNA, 18 nt, Human
uaaaaaggacaucagcaa

SEQ ID NO: 3733628 - RNA, 19 nt, Human
uaaaaaguauaaaauagua

SEQ ID NO: 3733629 - RNA, 20 nt, Human
uaaaaaguauugccaaacau

SEQ ID NO: 3733630 - RNA, 17 nt, Human
uaaaaaguggaauuucu

SEQ ID NO: 3733631 - RNA, 18 nt, Human
uaaaaaguggaauuucuu

SEQ ID NO: 3733632 - RNA, 11 nt, Human
uaaaaaguuaa

SEQ ID NO: 3733633 - RNA, 21 nt, Human
uaaaaaguuaaaaaaaauaau

SEQ ID NO: 3733634 - RNA, 12 nt, Human
uaaaaaguuaau

SEQ ID NO: 3733635 - RNA, 14 nt, Human
uaaaaaguuguuca

SEQ ID NO: 3733636 - RNA, 16 nt, Human
uaaaaauaaacauguu

SEQ ID NO: 3733637 - RNA, 21 nt, Human
uaaaaauaaauagaaaaguag

SEQ ID NO: 3733638 - RNA, 16 nt, Human
uaaaaauaaccuugca

SEQ ID NO: 3733639 - RNA, 13 nt, Human
uaaaaauaacugu

SEQ ID NO: 3733640 - RNA, 15 nt, Human
uaaaaauaagucaac

SEQ ID NO: 3733641 - RNA, 16 nt, Human
uaaaaauaagucaaca

SEQ ID NO: 3733642 - RNA, 12 nt, Human
uaaaaauagaaa

SEQ ID NO: 3733643 - RNA, 13 nt, Human
uaaaaauagaaac

SEQ ID NO: 3733644 - RNA, 15 nt, Human
uaaaaauagaaacau

SEQ ID NO: 3733645 - RNA, 16 nt, Human
uaaaaauauacauguu

SEQ ID NO: 3733646 - RNA, 22 nt, Human
uaaaaauauauauagugcuaua

SEQ ID NO: 3733647 - RNA, 15 nt, Human
uaaaaaucaacuuuu

SEQ ID NO: 3733648 - RNA, 20 nt, Human
uaaaaaucuaccuucuguag

SEQ ID NO: 3733649 - RNA, 16 nt, Human
uaaaaaucucaaauuu

SEQ ID NO: 3733650 - RNA, 19 nt, Human
uaaaaaucucaaauuucua

SEQ ID NO: 3733651 - RNA, 11 nt, Human
uaaaaaucuuu

SEQ ID NO: 3733652 - RNA, 13 nt, Human
uaaaaaugagaac

SEQ ID NO: 3733653 - RNA, 15 nt, Human
uaaaaaugaucuaaa

SEQ ID NO: 3733654 - RNA, 19 nt, Human
uaaaaaugcaaauccuaug

SEQ ID NO: 3733655 - RNA, 22 nt, Human
uaaaaauggaaacuauauugac

SEQ ID NO: 3733656 - RNA, 23 nt, Human
uaaaaauggcaggggguggaauu

SEQ ID NO: 3733657 - RNA, 19 nt, Human
uaaaaaugggacuucuuuu

SEQ ID NO: 3733658 - RNA, 16 nt, Human
uaaaaaugguaaaauu

SEQ ID NO: 3733659 - RNA, 17 nt, Human
uaaaaaugguaaaauug

SEQ ID NO: 3733660 - RNA, 20 nt, Human
uaaaaaugguggcuucagcu

SEQ ID NO: 3733661 - RNA, 18 nt, Human
uaaaaaugguuuaaaugg

SEQ ID NO: 3733662 - RNA, 13 nt, Human
uaaaaauguaaau

SEQ ID NO: 3733663 - RNA, 18 nt, Human
uaaaaauguaaauauucu

SEQ ID NO: 3733664 - RNA, 20 nt, Human
uaaaaauguaaauauucuau

SEQ ID NO: 3733665 - RNA, 16 nt, Human
uaaaaauuccagaaug

SEQ ID NO: 3733666 - RNA, 22 nt, Human
uaaaaauugccauuggacaguu

SEQ ID NO: 3733667 - RNA, 19 nt, Human
uaaaaauugucuucaugua

SEQ ID NO: 3733668 - RNA, 23 nt, Human
uaaaaauugucuucauguacauu

SEQ ID NO: 3733669 - RNA, 23 nt, Human
uaaaaauuguuucaaaauaaaaa

SEQ ID NO: 3733670 - RNA, 12 nt, Human
uaaaacaaaaca

SEQ ID NO: 3733671 - RNA, 17 nt, Human
uaaaacaaaauuuguuu

SEQ ID NO: 3733672 - RNA, 16 nt, Human
uaaaacaacagaugua

SEQ ID NO: 3733673 - RNA, 17 nt, Human
uaaaacaacagcucgau

SEQ ID NO: 3733674 - RNA, 19 nt, Human
uaaaacaagaaaguuuccc

SEQ ID NO: 3733675 - RNA, 21 nt, Human
uaaaacacaccuaagagaaaa

SEQ ID NO: 3733676 - RNA, 13 nt, Human
uaaaacacagagg

SEQ ID NO: 3733677 - RNA, 14 nt, Human
uaaaacacuucugu

SEQ ID NO: 3733678 - RNA, 14 nt, Human
uaaaacagaagccu

SEQ ID NO: 3733679 - RNA, 15 nt, Human
uaaaacagacacugg

SEQ ID NO: 3733680 - RNA, 19 nt, Human
uaaaacagacacuggcaug

SEQ ID NO: 3733681 - RNA, 17 nt, Human
uaaaacagaguaaucuu

SEQ ID NO: 3733682 - RNA, 20 nt, Human
uaaaacaguauuuauuuugu

SEQ ID NO: 3733683 - RNA, 21 nt, Human
uaaaacaguauuuauuuugua

SEQ ID NO: 3733684 - RNA, 21 nt, Human
uaaaacaguuggcaugcaucc

SEQ ID NO: 3733685 - RNA, 17 nt, Human
uaaaacaucauuacuau

SEQ ID NO: 3733686 - RNA, 18 nt, Human
uaaaacaugacuccuaca

SEQ ID NO: 3733687 - RNA, 14 nt, Human
uaaaacauuaagaa

SEQ ID NO: 3733688 - RNA, 12 nt, Human
uaaaacauuaau

SEQ ID NO: 3733689 - RNA, 12 nt, Human
uaaaacauuaug

SEQ ID NO: 3733690 - RNA, 15 nt, Human
uaaaacauuggauua

SEQ ID NO: 3733691 - RNA, 16 nt, Human
uaaaacauuggauuau

SEQ ID NO: 3733692 - RNA, 14 nt, Human
uaaaacauuuauuu

SEQ ID NO: 3733693 - RNA, 14 nt, Human
uaaaacauuuuaaa

SEQ ID NO: 3733694 - RNA, 18 nt, Human
uaaaacauuuuaaaugga

SEQ ID NO: 3733695 - RNA, 17 nt, Human
uaaaacauuuucacaca

SEQ ID NO: 3733696 - RNA, 21 nt, Human
uaaaaccauguagaaaauuug

SEQ ID NO: 3733697 - RNA, 18 nt, Human
uaaaacccguugauuacu

SEQ ID NO: 3733698 - RNA, 18 nt, Human
uaaaaccugagcuagaag

SEQ ID NO: 3733699 - RNA, 15 nt, Human
uaaaaccugucaaug

SEQ ID NO: 3733700 - RNA, 10 nt, Human
uaaaaccuuu

SEQ ID NO: 3733701 - RNA, 13 nt, Human
uaaaaccuuucaa

SEQ ID NO: 3733702 - RNA, 20 nt, Human
uaaaacgcugucaaaaguug

SEQ ID NO: 3733703 - RNA, 23 nt, Human
uaaaacggugcugugagggaggg

SEQ ID NO: 3733704 - RNA, 18 nt, Human
uaaaacuaaauagcaugu

SEQ ID NO: 3733705 - RNA, 15 nt, Human
uaaaacuacaaaaau

SEQ ID NO: 3733706 - RNA, 19 nt, Human
uaaaacuaggcauuuguaa

SEQ ID NO: 3733707 - RNA, 21 nt, Human
uaaaacuaggcauuuguaaau

SEQ ID NO: 3733708 - RNA, 16 nt, Human
uaaaacugaagucuga

SEQ ID NO: 3733709 - RNA, 19 nt, Human
uaaaacugaagucugaaau

SEQ ID NO: 3733710 - RNA, 16 nt, Human
uaaaacugaugugaaa

SEQ ID NO: 3733711 - RNA, 16 nt, Human
uaaaacuguacuuuga

SEQ ID NO: 3733712 - RNA, 19 nt, Human
uaaaacuguacuuugauuc

SEQ ID NO: 3733713 - RNA, 23 nt, Human
uaaaacuguacuuugauucacau

SEQ ID NO: 3733714 - RNA, 13 nt, Human
uaaaacugucccu

SEQ ID NO: 3733715 - RNA, 20 nt, Human
uaaaacuuaccuaagugaca

SEQ ID NO: 3733716 - RNA, 22 nt, Human
uaaaacuucaguuucacagaaa

SEQ ID NO: 3733717 - RNA, 20 nt, Human
uaaaacuucucaagauacug

SEQ ID NO: 3733718 - RNA, 18 nt, Human
uaaaacuucuuaaauauc

SEQ ID NO: 3733719 - RNA, 20 nt, Human
uaaaacuugauguguuaucu

SEQ ID NO: 3733720 - RNA, 13 nt, Human
uaaaacuuuaauc

SEQ ID NO: 3733721 - RNA, 15 nt, Human
uaaaacuuuccucgc

SEQ ID NO: 3733722 - RNA, 14 nt, Human
uaaaacuuugaagu

SEQ ID NO: 3733723 - RNA, 15 nt, Human
uaaaacuuugaaguu

SEQ ID NO: 3733724 - RNA, 15 nt, Human
uaaaacuuugcugcc

SEQ ID NO: 3733725 - RNA, 16 nt, Human
uaaaacuuuucugcug

SEQ ID NO: 3733726 - RNA, 14 nt, Human
uaaaagaaaauaaa

SEQ ID NO: 3733727 - RNA, 15 nt, Human
uaaaagaaaccacuu

SEQ ID NO: 3733728 - RNA, 21 nt, Human
uaaaagaaagccucagagaau

SEQ ID NO: 3733729 - RNA, 23 nt, Human
uaaaagaaaugcacaaugucuug

SEQ ID NO: 3733730 - RNA, 18 nt, Human
uaaaagaacuuacugauu

SEQ ID NO: 3733731 - RNA, 19 nt, Human
uaaaagaacuuacugauua

SEQ ID NO: 3733732 - RNA, 17 nt, Human
uaaaagaauauucagag

SEQ ID NO: 3733733 - RNA, 21 nt, Human
uaaaagaaugggcaguuacau

SEQ ID NO: 3733734 - RNA, 12 nt, Human
uaaaagaauugu

SEQ ID NO: 3733735 - RNA, 19 nt, Human
uaaaagaauuuuuuugucu

SEQ ID NO: 3733736 - RNA, 20 nt, Human
uaaaagaauuuuuuugucuu

SEQ ID NO: 3733737 - RNA, 11 nt, Human
uaaaagacaaa

SEQ ID NO: 3733738 - RNA, 22 nt, Human
uaaaagacaaaucaaagcagau

SEQ ID NO: 3733739 - RNA, 21 nt, Human
uaaaagacaguguauguagaa

SEQ ID NO: 3733740 - RNA, 20 nt, Human
uaacaugaauauuuaguguu

SEQ ID NO: 3733741 - RNA, 18 nt, Human
uaacaugaggggacauuu

SEQ ID NO: 3733742 - RNA, 19 nt, Human
uaacaugaggggacauuuu

SEQ ID NO: 3733743 - RNA, 14 nt, Human
uaacaugauuuggg

SEQ ID NO: 3733744 - RNA, 13 nt, Human
uaacaugcugugu

SEQ ID NO: 3733745 - RNA, 18 nt, Human
uaacaugcuguguaagcu

SEQ ID NO: 3733746 - RNA, 20 nt, Human
uaacauggaagggaagaaaa

SEQ ID NO: 3733747 - RNA, 14 nt, Human
uaacauggaaguac

SEQ ID NO: 3733748 - RNA, 11 nt, Human
uaacaugggcu

SEQ ID NO: 3733749 - RNA, 19 nt, Human
uaacauguaauuaaguacu

SEQ ID NO: 3733750 - RNA, 19 nt, Human
uaacaugugaaaagaauag

SEQ ID NO: 3733751 - RNA, 22 nt, Human
uaacauguguuaaguauuuuca

SEQ ID NO: 3733752 - RNA, 17 nt, Human
uaacauguuaaaccaug

SEQ ID NO: 3733753 - RNA, 18 nt, Human
uaacauguuaaaccaugg

SEQ ID NO: 3733754 - RNA, 21 nt, Human
uaacauuaaugccugcuuuuu

SEQ ID NO: 3733755 - RNA, 13 nt, Human
uaacauuaccuua

SEQ ID NO: 3733756 - RNA, 17 nt, Human
uaacauuaccuuacugu

SEQ ID NO: 3733757 - RNA, 22 nt, Human
uaacauuaucuaguucauugaa

SEQ ID NO: 3733758 - RNA, 14 nt, Human
uaacauuauuuaua

SEQ ID NO: 3733759 - RNA, 20 nt, Human
uaacauuccuaaaaugcuuc

SEQ ID NO: 3733760 - RNA, 21 nt, Human
uaacauuccucaugaauguaa

SEQ ID NO: 3733761 - RNA, 19 nt, Human
uaacauucuauuucaacuu

SEQ ID NO: 3733762 - RNA, 19 nt, Human
uaacauugaccaagaacug

SEQ ID NO: 3733763 - RNA, 16 nt, Human
uaacauuucaagggca

SEQ ID NO: 3733764 - RNA, 14 nt, Human
uaacauuugcuguu

SEQ ID NO: 3733765 - RNA, 13 nt, Human
uaacauuuuaaau

SEQ ID NO: 3733766 - RNA, 10 nt, Human
uaacauuuug

SEQ ID NO: 3733767 - RNA, 15 nt, Human
uaacauuuuucaaua

SEQ ID NO: 3733768 - RNA, 17 nt, Human
uaaccaaaaagaccaga

SEQ ID NO: 3733769 - RNA, 11 nt, Human
uaaccaaaggu

SEQ ID NO: 3733770 - RNA, 17 nt, Human
uaaccaaaggugaagga

SEQ ID NO: 3733771 - RNA, 21 nt, Human
uaaccaaaggugaaggaauau

SEQ ID NO: 3733772 - RNA, 21 nt, Human
uaaccaaaugcaucaauccug

SEQ ID NO: 3733773 - RNA, 14 nt, Human
uaaccaagaggcug

SEQ ID NO: 3733774 - RNA, 19 nt, Human
uaaccaagcugaguuuccu

SEQ ID NO: 3733775 - RNA, 22 nt, Human
uaaccaaucuacaaucucccuu

SEQ ID NO: 3733776 - RNA, 12 nt, Human
uaaccaauguuu

SEQ ID NO: 3733777 - RNA, 14 nt, Human
uaaccaauguuuaa

SEQ ID NO: 3733778 - RNA, 22 nt, Human
uaaccaauguuuaaaaaaguuu

SEQ ID NO: 3733779 - RNA, 14 nt, Human
uaaccacaacuuuc

SEQ ID NO: 3733780 - RNA, 17 nt, Human
uaaccacagcuccuuuu

SEQ ID NO: 3733781 - RNA, 18 nt, Human
uaaccacagcuccuuuuc

SEQ ID NO: 3733782 - RNA, 23 nt, Human
uaaccacagcuccuuuuccagag

SEQ ID NO: 3733783 - RNA, 21 nt, Human
uaaccaccuaccuuacaguga

SEQ ID NO: 3733784 - RNA, 13 nt, Human
uaaccagaucauu

SEQ ID NO: 3733785 - RNA, 20 nt, Human
uaaccagccagauccucuug

SEQ ID NO: 3733786 - RNA, 16 nt, Human
uaaccagggccagaag

SEQ ID NO: 3733787 - RNA, 21 nt, Human
uaaccagucugaaguuucauu

SEQ ID NO: 3733788 - RNA, 23 nt, Human
uaaccaguguuguggauuuaaca

SEQ ID NO: 3733789 - RNA, 20 nt, Human
uaaccauggaguagagguac

SEQ ID NO: 3733790 - RNA, 22 nt, Human
uaaccaugugaaaaggcaaaaa

SEQ ID NO: 3733791 - RNA, 10 nt, Human
uaaccauuuu

SEQ ID NO: 3733792 - RNA, 16 nt, Human
uaacccaacucuccug

SEQ ID NO: 3733793 - RNA, 19 nt, Human
uaacccaggccugucugac

SEQ ID NO: 3733794 - RNA, 16 nt, Human
uaacccauaauugaag

SEQ ID NO: 3733795 - RNA, 11 nt, Human
uaaccccaccc

SEQ ID NO: 3733796 - RNA, 13 nt, Human
uaaccccaggccc

SEQ ID NO: 3733797 - RNA, 17 nt, Human
uaaccccauucuuugcu

SEQ ID NO: 3733798 - RNA, 17 nt, Human
uaaccccccuguacaca

SEQ ID NO: 3733799 - RNA, 19 nt, Human
uaacccccuuaaauuuaau

SEQ ID NO: 3733800 - RNA, 18 nt, Human
uaaccccgggcggguggc

SEQ ID NO: 3733801 - RNA, 17 nt, Human
uaaccccgucaacaaau

SEQ ID NO: 3733802 - RNA, 12 nt, Human
uaaccccuuucc

SEQ ID NO: 3733803 - RNA, 13 nt, Human
uaaccccuuuccu

SEQ ID NO: 3733804 - RNA, 23 nt, Human
uaacccgcucaucacuggaugaa

SEQ ID NO: 3733805 - RNA, 23 nt, Human
uaacccuucaacguuucuucacu

SEQ ID NO: 3733806 - RNA, 18 nt, Human
uaacccuucaucuuccug

SEQ ID NO: 3733807 - RNA, 19 nt, Human
uaacccuuugugugcucuc

SEQ ID NO: 3733808 - RNA, 22 nt, Human
uaaccgagaucaguauuuaacu

SEQ ID NO: 3733809 - RNA, 14 nt, Human
uaaccgaugcuuua

SEQ ID NO: 3733810 - RNA, 19 nt, Human
uaaccgaugcuuuaccaaa

SEQ ID NO: 3733811 - RNA, 14 nt, Human
uaaccgcuccaggu

SEQ ID NO: 3733812 - RNA, 21 nt, Human
uaaccuaauuaauauauuaaa

SEQ ID NO: 3733813 - RNA, 22 nt, Human
uaaccuauaugauuuauaguuu

SEQ ID NO: 3733814 - RNA, 19 nt, Human
uaaccucaagugauccucc

SEQ ID NO: 3733815 - RNA, 13 nt, Human
uaaccucagcucu

SEQ ID NO: 3733816 - RNA, 17 nt, Human
uaaccucagcucuggga

SEQ ID NO: 3733817 - RNA, 19 nt, Human
uaaccucagcucugggaga

SEQ ID NO: 3733818 - RNA, 16 nt, Human
uaaccucgggccugcu

SEQ ID NO: 3733819 - RNA, 14 nt, Human
uaaccucugcacua

SEQ ID NO: 3733820 - RNA, 20 nt, Human
uaaccucugcuuuuaucuca

SEQ ID NO: 3733821 - RNA, 14 nt, Human
uaaccucuguucag

SEQ ID NO: 3733822 - RNA, 12 nt, Human
uaaccuggugcu

SEQ ID NO: 3733823 - RNA, 23 nt, Human
uaaccuggugcuggauauuuuca

SEQ ID NO: 3733824 - RNA, 19 nt, Human
uaacgaaguugggcaauau

SEQ ID NO: 3733825 - RNA, 17 nt, Human
uaacgaccacagggucu

SEQ ID NO: 3733826 - RNA, 23 nt, Human
uaacgcaauaaacgcauuaucag

SEQ ID NO: 3733827 - RNA, 12 nt, Human
uaacgccugagc

SEQ ID NO: 3733828 - RNA, 13 nt, Human
uaacgccugagcc

SEQ ID NO: 3733829 - RNA, 18 nt, Human
uaacgccugagcccaggg

SEQ ID NO: 3733830 - RNA, 19 nt, Human
uaacggaucagaaauacag

SEQ ID NO: 3733831 - RNA, 21 nt, Human
uaacggaucagaaauacagau

SEQ ID NO: 3733832 - RNA, 15 nt, Human
uaacggcuccaggau

SEQ ID NO: 3733833 - RNA, 17 nt, Human
uaacguauaaaagccug

SEQ ID NO: 3733834 - RNA, 15 nt, Human
uaacgugugcugugu

SEQ ID NO: 3733835 - RNA, 17 nt, Human
uaacgugugcuguguuu

SEQ ID NO: 3733836 - RNA, 22 nt, Human
uaacgugugcuguguuugcucc

SEQ ID NO: 3733837 - RNA, 20 nt, Human
uaacguuuaagccaaaacaa

SEQ ID NO: 3733838 - RNA, 12 nt, Human
uaacuaaaauaa

SEQ ID NO: 3733839 - RNA, 14 nt, Human
uaacuaaaauguau

SEQ ID NO: 3733840 - RNA, 17 nt, Human
uaacuaaacucucuuug

SEQ ID NO: 3733841 - RNA, 16 nt, Human
uaacuaaauuugauac

SEQ ID NO: 3733842 - RNA, 19 nt, Human
uaacuaaauuuuaaagcca

SEQ ID NO: 3733843 - RNA, 16 nt, Human
uaacuaacuaaaacaa

SEQ ID NO: 3733844 - RNA, 20 nt, Human
uaacuaauacagcugagcua

SEQ ID NO: 3733845 - RNA, 22 nt, Human
uaacuaaucuauuggguucauu

SEQ ID NO: 3733846 - RNA, 21 nt, Human
uaacuacaaagguuuaaauga

SEQ ID NO: 3733847 - RNA, 21 nt, Human
uaacuacuccggagacagggu

SEQ ID NO: 3733848 - RNA, 16 nt, Human
uaacuacuguguuccu

SEQ ID NO: 3733849 - RNA, 17 nt, Human
uaacuacuuuauaacua

SEQ ID NO: 3733850 - RNA, 23 nt, Human
uaacuacuuuauaacuaacaugu

SEQ ID NO: 3733851 - RNA, 17 nt, Human
uaacuagaauuuauuca

SEQ ID NO: 3733852 - RNA, 20 nt, Human
uaacuagacaccaaaguucu

SEQ ID NO: 3733853 - RNA, 22 nt, Human
uaacuagacaccaaaguucuaa

SEQ ID NO: 3733854 - RNA, 18 nt, Human
uaacuagagcagcccugg

SEQ ID NO: 3733855 - RNA, 20 nt, Human
uaacuagauggugcugagaa

SEQ ID NO: 3733856 - RNA, 15 nt, Human
uaacuagcuuggaaa

SEQ ID NO: 3733857 - RNA, 12 nt, Human
uaacuaggagcu

SEQ ID NO: 3733858 - RNA, 15 nt, Human
uaacuaggcucagag

SEQ ID NO: 3733859 - RNA, 17 nt, Human
uaacuaguccuuuacua

SEQ ID NO: 3733860 - RNA, 17 nt, Human
uaacuauauuugcuuuu

SEQ ID NO: 3733861 - RNA, 16 nt, Human
uaacuaucacugguuu

SEQ ID NO: 3733862 - RNA, 17 nt, Human
uaacuauguacaauauu

SEQ ID NO: 3733863 - RNA, 15 nt, Human
uaacuauguuuaaag

SEQ ID NO: 3733864 - RNA, 21 nt, Human
uaacuauugcauuuauaugua

SEQ ID NO: 3733865 - RNA, 21 nt, Human
uaacucaaauacacauuugcu

SEQ ID NO: 3733866 - RNA, 23 nt, Human
uaacucaaggauaccuucuuauu

SEQ ID NO: 3733867 - RNA, 16 nt, Human
uaacucaccuaacuca

SEQ ID NO: 3733868 - RNA, 13 nt, Human
uaacucagaucac

SEQ ID NO: 3733869 - RNA, 21 nt, Human
uaacucaggacuccagcccau

SEQ ID NO: 3733870 - RNA, 23 nt, Human
uaacucauacugugcuggagcca

SEQ ID NO: 3733871 - RNA, 16 nt, Human
uaacucauuagacugg

SEQ ID NO: 3733872 - RNA, 12 nt, Human
uaacucauuugu

SEQ ID NO: 3733873 - RNA, 22 nt, Human
uaacuccaccaacccaucagaa

SEQ ID NO: 3733874 - RNA, 14 nt, Human
uaacuccagugaag

SEQ ID NO: 3733875 - RNA, 19 nt, Human
uaacuccagugauguucuu

SEQ ID NO: 3733876 - RNA, 19 nt, Human
uaacucccagugaugcugu

SEQ ID NO: 3733877 - RNA, 14 nt, Human
uaacucccauuacc

SEQ ID NO: 3733878 - RNA, 19 nt, Human
uaacuccccuguuucaauc

SEQ ID NO: 3733879 - RNA, 14 nt, Human
uaacucuaaaagau

SEQ ID NO: 3733880 - RNA, 18 nt, Human
uaacucuaaaagauccuu

SEQ ID NO: 3733881 - RNA, 23 nt, Human
uaacucuaaaagauccuuuuuaa

SEQ ID NO: 3733882 - RNA, 22 nt, Human
uaacucuaauucccauuuugca

SEQ ID NO: 3733883 - RNA, 15 nt, Human
uaacucugucuucac

SEQ ID NO: 3733884 - RNA, 14 nt, Human
uaacucuugucuau

SEQ ID NO: 3733885 - RNA, 21 nt, Human
uaacucuuugccuuugccacc

SEQ ID NO: 3733886 - RNA, 21 nt, Human
uaacugaaaaugugcuauacu

SEQ ID NO: 3733887 - RNA, 20 nt, Human
uaacugaaaauuauuuaaac

SEQ ID NO: 3733888 - RNA, 15 nt, Human
uaacugaaggagaag

SEQ ID NO: 3733889 - RNA, 21 nt, Human
gcacacaccuguagucccagc

SEQ ID NO: 3733890 - RNA, 15 nt, Human
gcacacacucagugc

SEQ ID NO: 3733891 - RNA, 19 nt, Human
gcacacacugugcuuucua

SEQ ID NO: 3733892 - RNA, 15 nt, Human
gcacacagaaauaua

SEQ ID NO: 3733893 - RNA, 23 nt, Human
gcacacagaaauauauauacaua

SEQ ID NO: 3733894 - RNA, 18 nt, Human
gcacacagcuacucuccc

SEQ ID NO: 3733895 - RNA, 19 nt, Human
gcacacagcugcagagaca

SEQ ID NO: 3733896 - RNA, 14 nt, Human
gcacacagucaccu

SEQ ID NO: 3733897 - RNA, 16 nt, Human
gcacacaucaucugua

SEQ ID NO: 3733898 - RNA, 12 nt, Human
gcacacauuuuu

SEQ ID NO: 3733899 - RNA, 14 nt, Human
gcacacauuuuuua

SEQ ID NO: 3733900 - RNA, 14 nt, Human
gcacaccccacucc

SEQ ID NO: 3733901 - RNA, 20 nt, Human
gcacacccucacucugccag

SEQ ID NO: 3733902 - RNA, 15 nt, Human
gcacaccuccuccca

SEQ ID NO: 3733903 - RNA, 20 nt, Human
gcacaccuccucccacugcc

SEQ ID NO: 3733904 - RNA, 22 nt, Human
gcacaccuccucccacugccca

SEQ ID NO: 3733905 - RNA, 14 nt, Human
gcacacgccuccca

SEQ ID NO: 3733906 - RNA, 19 nt, Human
gcacacgccucccacuggg

SEQ ID NO: 3733907 - RNA, 15 nt, Human
gcacacgcugcucug

SEQ ID NO: 3733908 - RNA, 17 nt, Human
gcacacgucauguuucu

SEQ ID NO: 3733909 - RNA, 21 nt, Human
gcacacucagcacccccuucu

SEQ ID NO: 3733910 - RNA, 23 nt, Human
gcacacucagcacccccuucucu

SEQ ID NO: 3733911 - RNA, 17 nt, Human
gcacacugagccagcag

SEQ ID NO: 3733912 - RNA, 19 nt, Human
gcacacuggcucacccagu

SEQ ID NO: 3733913 - RNA, 12 nt, Human
gcacacuguagc

SEQ ID NO: 3733914 - RNA, 13 nt, Human
gcacacugucugc

SEQ ID NO: 3733915 - RNA, 14 nt, Human
gcacacuuugccau

SEQ ID NO: 3733916 - RNA, 18 nt, Human
gcacacuuuggcccaggg

SEQ ID NO: 3733917 - RNA, 20 nt, Human
gcacagaaaauggaagacag

SEQ ID NO: 3733918 - RNA, 22 nt, Human
gcacagaaaauggaagacagcu

SEQ ID NO: 3733919 - RNA, 21 nt, Human
gcacagaaaccucuacuaaaa

SEQ ID NO: 3733920 - RNA, 18 nt, Human
gcacagaaguccuguaug

SEQ ID NO: 3733921 - RNA, 12 nt, Human
gcacagaauaug

SEQ ID NO: 3733922 - RNA, 18 nt, Human
gcacagacccugcccugu

SEQ ID NO: 3733923 - RNA, 19 nt, Human
gcacagacccugcccugug

SEQ ID NO: 3733924 - RNA, 20 nt, Human
gcacagacccugcccugugg

SEQ ID NO: 3733925 - RNA, 12 nt, Human
gcacagagaagc

SEQ ID NO: 3733926 - RNA, 15 nt, Human
gcacagagagggggc

SEQ ID NO: 3733927 - RNA, 17 nt, Human
gcacagagagggggcca

SEQ ID NO: 3733928 - RNA, 22 nt, Human
gcacagaguuguuacauuuuua

SEQ ID NO: 3733929 - RNA, 17 nt, Human
gcacagauauacuuugu

SEQ ID NO: 3733930 - RNA, 13 nt, Human
gcacagauggauu

SEQ ID NO: 3733931 - RNA, 15 nt, Human
gcacagauggauuug

SEQ ID NO: 3733932 - RNA, 18 nt, Human
gcacagauggauuugccu

SEQ ID NO: 3733933 - RNA, 24 nt, Human
gcacagauggauuugccugugcca

SEQ ID NO: 3733934 - RNA, 14 nt, Human
gcacagauuuuaau

SEQ ID NO: 3733935 - RNA, 17 nt, Human
gcacagauuuuaauugu

SEQ ID NO: 3733936 - RNA, 14 nt, Human
gcacagcaaggagg

SEQ ID NO: 3733937 - RNA, 17 nt, Human
gcacagcagccugcuuc

SEQ ID NO: 3733938 - RNA, 22 nt, Human
gcacagcagccuggggcuggcc

SEQ ID NO: 3733939 - RNA, 12 nt, Human
gcacagcaggcu

SEQ ID NO: 3733940 - RNA, 18 nt, Human
gcacagcaggcugccagu

SEQ ID NO: 3733941 - RNA, 23 nt, Human
gcacagcaggcugccagugccug

SEQ ID NO: 3733942 - RNA, 13 nt, Human
gcacagcaucuca

SEQ ID NO: 3733943 - RNA, 17 nt, Human
gcacagccaaauuuaaa

SEQ ID NO: 3733944 - RNA, 15 nt, Human
gcacagccaaggacu

SEQ ID NO: 3733945 - RNA, 17 nt, Human
gcacagcccaaagaagg

SEQ ID NO: 3733946 - RNA, 18 nt, Human
gcacagcccucccgcccc

SEQ ID NO: 3733947 - RNA, 22 nt, Human
gcacagcccucccgccccuucc

SEQ ID NO: 3733948 - RNA, 18 nt, Human
gcacagccucuuagaugc

SEQ ID NO: 3733949 - RNA, 20 nt, Human
gcacagcucaggaggcgccc

SEQ ID NO: 3733950 - RNA, 16 nt, Human
gcacagcucccugcca

SEQ ID NO: 3733951 - RNA, 23 nt, Human
gcacagcuguagugggguucuag

SEQ ID NO: 3733952 - RNA, 17 nt, Human
gcacagcuuagauuuca

SEQ ID NO: 3733953 - RNA, 19 nt, Human
gcacagcuuagauuucaua

SEQ ID NO: 3733954 - RNA, 14 nt, Human
gcacaggacaugcg

SEQ ID NO: 3733955 - RNA, 21 nt, Human
gcacaggacaugcgguagcca

SEQ ID NO: 3733956 - RNA, 22 nt, Human
gcacaggacaugcgguagccag

SEQ ID NO: 3733957 - RNA, 12 nt, Human
gcacaggagcua

SEQ ID NO: 3733958 - RNA, 15 nt, Human
gcacaggaggcaggc

SEQ ID NO: 3733959 - RNA, 22 nt, Human
gcacaggagggggucguggaga

SEQ ID NO: 3733960 - RNA, 15 nt, Human
gcacaggaugcuggc

SEQ ID NO: 3733961 - RNA, 16 nt, Human
gcacaggaugcuggcc

SEQ ID NO: 3733962 - RNA, 20 nt, Human
gcacaggcagggcaggacca

SEQ ID NO: 3733963 - RNA, 14 nt, Human
gcacaggcccccuu

SEQ ID NO: 3733964 - RNA, 16 nt, Human
gcacaggcuaauuuuu

SEQ ID NO: 3733965 - RNA, 17 nt, Human
gcacaggcugagugcag

SEQ ID NO: 3733966 - RNA, 19 nt, Human
gcacaggcugagugcaggc

SEQ ID NO: 3733967 - RNA, 20 nt, Human
gcacaggcugagugcaggcc

SEQ ID NO: 3733968 - RNA, 16 nt, Human
gcacagggagaggccg

SEQ ID NO: 3733969 - RNA, 19 nt, Human
gcacagggcagcugggccc

SEQ ID NO: 3733970 - RNA, 16 nt, Human
gcacagggcaguggga

SEQ ID NO: 3733971 - RNA, 23 nt, Human
gcacagggcaugaaaugaacaca

SEQ ID NO: 3733972 - RNA, 14 nt, Human
gcacagggccuggc

SEQ ID NO: 3733973 - RNA, 19 nt, Human
gcacagggccuggcccaug

SEQ ID NO: 3733974 - RNA, 17 nt, Human
gcacagggucugcucuu

SEQ ID NO: 3733975 - RNA, 15 nt, Human
gcacaggucaggggu

SEQ ID NO: 3733976 - RNA, 22 nt, Human
gcacaggucaggggugacacag

SEQ ID NO: 3733977 - RNA, 23 nt, Human
gcacaggucaggggugacacaga

SEQ ID NO: 3733978 - RNA, 23 nt, Human
gcacaggucccaccuccagcccg

SEQ ID NO: 3733979 - RNA, 19 nt, Human
gcacaggucgggcgcagga

SEQ ID NO: 3733980 - RNA, 20 nt, Human
gcacaggucgggcgcaggau

SEQ ID NO: 3733981 - RNA, 12 nt, Human
gcacagugauuu

SEQ ID NO: 3733982 - RNA, 18 nt, Human
gcacaguuuucugagaaa

SEQ ID NO: 3733983 - RNA, 23 nt, Human
gcacaguuuucuggcuggagccu

SEQ ID NO: 3733984 - RNA, 17 nt, Human
gcacauaguagaacgcu

SEQ ID NO: 3733985 - RNA, 13 nt, Human
gcacauauggacu

SEQ ID NO: 3733986 - RNA, 20 nt, Human
gcacauauuagugcagccaa

SEQ ID NO: 3733987 - RNA, 19 nt, Human
gcacaucagcacgauuucu

SEQ ID NO: 3733988 - RNA, 21 nt, Human
gcacaucagcacgauuucugu

SEQ ID NO: 3733989 - RNA, 15 nt, Human
gcacauccauuccca

SEQ ID NO: 3733990 - RNA, 13 nt, Human
gcacaucccugga

SEQ ID NO: 3733991 - RNA, 19 nt, Human
gcacauccgcgugugccug

SEQ ID NO: 3733992 - RNA, 20 nt, Human
gcacauccuaugcaauauau

SEQ ID NO: 3733993 - RNA, 16 nt, Human
gcacaugaacuuagau

SEQ ID NO: 3733994 - RNA, 17 nt, Human
gcacaugauuucacaaa

SEQ ID NO: 3733995 - RNA, 20 nt, Human
gcacaugauuucacaaauau

SEQ ID NO: 3733996 - RNA, 22 nt, Human
gcacaugcagauggggcucccg

SEQ ID NO: 3733997 - RNA, 13 nt, Human
gcacaugccucuc

SEQ ID NO: 3733998 - RNA, 19 nt, Human
gcacaugccucucucaggc

SEQ ID NO: 3733999 - RNA, 21 nt, Human
gcacaugccucucucaggcca

SEQ ID NO: 3734000 - RNA, 19 nt, Human
gcacaugccuguaguccca

SEQ ID NO: 3734001 - RNA, 20 nt, Human
gcacaugcugagucucccaa

SEQ ID NO: 3734002 - RNA, 13 nt, Human
gcacaugcuggcc

SEQ ID NO: 3734003 - RNA, 22 nt, Human
gcacaugcuggccagccugggg

SEQ ID NO: 3734004 - RNA, 13 nt, Human
gcacaugcuucaa

SEQ ID NO: 3734005 - RNA, 22 nt, Human
gcacauggaggagcuuggggga

SEQ ID NO: 3734006 - RNA, 13 nt, Human
gcacaugucuuaa

SEQ ID NO: 3734007 - RNA, 12 nt, Human
gcacaugugugc

SEQ ID NO: 3734008 - RNA, 14 nt, Human
gcacauugagcugu

SEQ ID NO: 3734009 - RNA, 18 nt, Human
gcacauugagcugugcaa

SEQ ID NO: 3734010 - RNA, 17 nt, Human
gcacauuuaagagacag

SEQ ID NO: 3734011 - RNA, 22 nt, Human
gcacauuuccccagaccugagc

SEQ ID NO: 3734012 - RNA, 23 nt, Human
gcaccaaaucaaaaucucuccac

SEQ ID NO: 3734013 - RNA, 16 nt, Human
gcaccaacccagccgc

SEQ ID NO: 3734014 - RNA, 22 nt, Human
gcaccaacccagccgcugcccg

SEQ ID NO: 3734015 - RNA, 13 nt, Human
gcaccaagcccac

SEQ ID NO: 3734016 - RNA, 17 nt, Human
gcaccaagcccacaggu

SEQ ID NO: 3734017 - RNA, 22 nt, Human
gcaccaagugcggguccggcag

SEQ ID NO: 3734018 - RNA, 21 nt, Human
gcaccaauaaagccuucaaac

SEQ ID NO: 3734019 - RNA, 21 nt, Human
gcaccacugcacuccagccug

SEQ ID NO: 3734020 - RNA, 22 nt, Human
gcaccacugcacuccagccugg

SEQ ID NO: 3734021 - RNA, 23 nt, Human
gcaccacugcacuccagccuggg

SEQ ID NO: 3734022 - RNA, 17 nt, Human
gcaccagacacccagga

SEQ ID NO: 3734023 - RNA, 15 nt, Human
gcaccagaggcugca

SEQ ID NO: 3734024 - RNA, 14 nt, Human
gcaccagcagccug

SEQ ID NO: 3734025 - RNA, 15 nt, Human
gcaccagcagccugg

SEQ ID NO: 3734026 - RNA, 18 nt, Human
gcaccagcgaagggagug

SEQ ID NO: 3734027 - RNA, 16 nt, Human
gcaccagcuucuccag

SEQ ID NO: 3734028 - RNA, 18 nt, Human
gcaccagcuucuccaggc

SEQ ID NO: 3734029 - RNA, 21 nt, Human
gcaccagggaaggggacaagg

SEQ ID NO: 3734030 - RNA, 23 nt, Human
gcaccaggguugaccccagagga

SEQ ID NO: 3734031 - RNA, 14 nt, Human
gcaccagucccugu

SEQ ID NO: 3734032 - RNA, 19 nt, Human
gcaccaguguccuccccuc

SEQ ID NO: 3734033 - RNA, 22 nt, Human
gcaccaguugcugcuucaauuu

SEQ ID NO: 3734034 - RNA, 18 nt, Human
gcaccaugcugcugggga

SEQ ID NO: 3734035 - RNA, 15 nt, Human
gcaccauucaggaac

SEQ ID NO: 3734036 - RNA, 16 nt, Human
gcaccauucaggaacc

SEQ ID NO: 3734037 - RNA, 23 nt, Human
gcaccauucaggaaccuggacca

SEQ ID NO: 3734038 - RNA, 16 nt, Human
uaaaagagauuucaag

SEQ ID NO: 3734039 - RNA, 18 nt, Human
uaaaagagauuucaagag

SEQ ID NO: 3734040 - RNA, 18 nt, Human
uaaaagagguuuuucuua

SEQ ID NO: 3734041 - RNA, 14 nt, Human
uaaaagauacaguu

SEQ ID NO: 3734042 - RNA, 21 nt, Human
uaaaagauacauuuguauguu

SEQ ID NO: 3734043 - RNA, 16 nt, Human
uaaaagauauaagugc

SEQ ID NO: 3734044 - RNA, 19 nt, Human
uaaaagauauaagugcugu

SEQ ID NO: 3734045 - RNA, 20 nt, Human
uaaaagauauaagugcugua

SEQ ID NO: 3734046 - RNA, 14 nt, Human
uaaaagauccuuuu

SEQ ID NO: 3734047 - RNA, 15 nt, Human
uaaaagaucuucaaa

SEQ ID NO: 3734048 - RNA, 19 nt, Human
uaaaagaucuucaaaagua

SEQ ID NO: 3734049 - RNA, 20 nt, Human
uaaaagauggggucuguaaa

SEQ ID NO: 3734050 - RNA, 21 nt, Human
uaaaagauggggucuguaaaa

SEQ ID NO: 3734051 - RNA, 20 nt, Human
uaaaagaugucucugcaaac

SEQ ID NO: 3734052 - RNA, 14 nt, Human
uaaaagauucauuu

SEQ ID NO: 3734053 - RNA, 18 nt, Human
uaaaagcaaaaaagaaaa

SEQ ID NO: 3734054 - RNA, 14 nt, Human
uaaaagcaaaucau

SEQ ID NO: 3734055 - RNA, 20 nt, Human
uaaaagcaaaucauuuguuu

SEQ ID NO: 3734056 - RNA, 11 nt, Human
uaaaagcagca

SEQ ID NO: 3734057 - RNA, 21 nt, Human
uaaaagcagcaucugcuaaua

SEQ ID NO: 3734058 - RNA, 20 nt, Human
uaaaagccaucauguaaauu

SEQ ID NO: 3734059 - RNA, 19 nt, Human
uaaaagccuaggucuauuu

SEQ ID NO: 3734060 - RNA, 14 nt, Human
uaaaagccugcuca

SEQ ID NO: 3734061 - RNA, 19 nt, Human
uaaaagccuuggccucaga

SEQ ID NO: 3734062 - RNA, 22 nt, Human
uaaaagcuaucuucauguaaau

SEQ ID NO: 3734063 - RNA, 21 nt, Human
uaaaaggaaagaaaacaucuu

SEQ ID NO: 3734064 - RNA, 21 nt, Human
uaaaaggaaaucucaccccau

SEQ ID NO: 3734065 - RNA, 21 nt, Human
uaaaaggaagcuuacaugccu

SEQ ID NO: 3734066 - RNA, 14 nt, Human
uaaaaggauggcaa

SEQ ID NO: 3734067 - RNA, 18 nt, Human
uaaaaggccaaaccucug

SEQ ID NO: 3734068 - RNA, 20 nt, Human
uaaaaggccaaaccucuguu

SEQ ID NO: 3734069 - RNA, 13 nt, Human
uaaaaggcccaga

SEQ ID NO: 3734070 - RNA, 22 nt, Human
uaaaaggcccauagcagccagu

SEQ ID NO: 3734071 - RNA, 19 nt, Human
uaaaagggacugagaaauu

SEQ ID NO: 3734072 - RNA, 21 nt, Human
uaaaaggggguccguggaaga

SEQ ID NO: 3734073 - RNA, 15 nt, Human
uaaaagguaaugugu

SEQ ID NO: 3734074 - RNA, 18 nt, Human
uaaaaggucuaugcucau

SEQ ID NO: 3734075 - RNA, 15 nt, Human
uaaaagguucaggga

SEQ ID NO: 3734076 - RNA, 20 nt, Human
uaaaaguacauguuaaacuu

SEQ ID NO: 3734077 - RNA, 15 nt, Human
uaaaagucacaaugu

SEQ ID NO: 3734078 - RNA, 23 nt, Human
uaaaagugaaugaaagauuaaac

SEQ ID NO: 3734079 - RNA, 22 nt, Human
uaaaagugucaccuuuucuugc

SEQ ID NO: 3734080 - RNA, 18 nt, Human
uaaaagugugagcaguga

SEQ ID NO: 3734081 - RNA, 14 nt, Human
uaaaaguucauaac

SEQ ID NO: 3734082 - RNA, 17 nt, Human
uaaaaguuuuauaugcu

SEQ ID NO: 3734083 - RNA, 19 nt, Human
uaaaaguuuuauaugcuuu

SEQ ID NO: 3734084 - RNA, 21 nt, Human
uaaaaguuuuuuauuaugcau

SEQ ID NO: 3734085 - RNA, 21 nt, Human
uaaaauaaaaugaaaauugua

SEQ ID NO: 3734086 - RNA, 14 nt, Human
uaaaauaaacuuuc

SEQ ID NO: 3734087 - RNA, 17 nt, Human
uaaaauaaagaaauaga

SEQ ID NO: 3734088 - RNA, 17 nt, Human
uaaaauaaaguauauau

SEQ ID NO: 3734089 - RNA, 14 nt, Human
uaaaauaaauauug

SEQ ID NO: 3734090 - RNA, 17 nt, Human
uaaaauaagucugauuu

SEQ ID NO: 3734091 - RNA, 18 nt, Human
uaaaauaaugcaaagaau

SEQ ID NO: 3734092 - RNA, 18 nt, Human
uaaaauaauuauauaacu

SEQ ID NO: 3734093 - RNA, 20 nt, Human
uaaaauaauuauauaacugu

SEQ ID NO: 3734094 - RNA, 21 nt, Human
uaaaauaauuauauaacugua

SEQ ID NO: 3734095 - RNA, 14 nt, Human
uaaaauaauuuugu

SEQ ID NO: 3734096 - RNA, 21 nt, Human
uaaaauaauuuuguaauguau

SEQ ID NO: 3734097 - RNA, 21 nt, Human
uaaaauacacacucaaaucaa

SEQ ID NO: 3734098 - RNA, 19 nt, Human
uaaaauacauagugaaaau

SEQ ID NO: 3734099 - RNA, 20 nt, Human
uaaaauacuauuuuuacugc

SEQ ID NO: 3734100 - RNA, 16 nt, Human
uaaaauacuguagaua

SEQ ID NO: 3734101 - RNA, 20 nt, Human
uaaaauacuguagauaauua

SEQ ID NO: 3734102 - RNA, 21 nt, Human
uaaaauacuguagauaauuaa

SEQ ID NO: 3734103 - RNA, 19 nt, Human
uaaaauagaaauuuuguaa

SEQ ID NO: 3734104 - RNA, 23 nt, Human
uaaaauagaguguaguuuacaga

SEQ ID NO: 3734105 - RNA, 18 nt, Human
uaaaauagauauaaauuu

SEQ ID NO: 3734106 - RNA, 23 nt, Human
uaaaauagccacuuaccuucaau

SEQ ID NO: 3734107 - RNA, 21 nt, Human
uaaaauagcguucuuguaauu

SEQ ID NO: 3734108 - RNA, 19 nt, Human
uaaaauauagcuguacaaa

SEQ ID NO: 3734109 - RNA, 17 nt, Human
uaaaauauauuucagau

SEQ ID NO: 3734110 - RNA, 15 nt, Human
uaaaauaucauucag

SEQ ID NO: 3734111 - RNA, 17 nt, Human
uaaaauaucauucagca

SEQ ID NO: 3734112 - RNA, 19 nt, Human
uaaaauaugaagacauaaa

SEQ ID NO: 3734113 - RNA, 15 nt, Human
uaaaauauuauugaa

SEQ ID NO: 3734114 - RNA, 16 nt, Human
uaaaauauuauugaac

SEQ ID NO: 3734115 - RNA, 20 nt, Human
uaaaauauuuaugaagaaaa

SEQ ID NO: 3734116 - RNA, 21 nt, Human
uaaaauauuuaugaagaaaau

SEQ ID NO: 3734117 - RNA, 13 nt, Human
uaaaauauuuauu

SEQ ID NO: 3734118 - RNA, 19 nt, Human
uaaaauauuuucugugugu

SEQ ID NO: 3734119 - RNA, 14 nt, Human
uaaaauauuuugaa

SEQ ID NO: 3734120 - RNA, 11 nt, Human
uaaaaucacua

SEQ ID NO: 3734121 - RNA, 17 nt, Human
uaaaaucacuaacauua

SEQ ID NO: 3734122 - RNA, 13 nt, Human
uaaaaucagccaa

SEQ ID NO: 3734123 - RNA, 15 nt, Human
uaaaaucagccaauu

SEQ ID NO: 3734124 - RNA, 23 nt, Human
uaaaaucagccaauuauguuaaa

SEQ ID NO: 3734125 - RNA, 20 nt, Human
uaaaaucagcuauuuuguga

SEQ ID NO: 3734126 - RNA, 21 nt, Human
uaaaaucauaaguauuuggaa

SEQ ID NO: 3734127 - RNA, 12 nt, Human
uaaaaucaugaa

SEQ ID NO: 3734128 - RNA, 13 nt, Human
uaaaaucauuucu

SEQ ID NO: 3734129 - RNA, 22 nt, Human
uaaaaucauuucugcaucagcu

SEQ ID NO: 3734130 - RNA, 17 nt, Human
uaaaauccauacauuug

SEQ ID NO: 3734131 - RNA, 18 nt, Human
uaaaauccauacauuugu

SEQ ID NO: 3734132 - RNA, 23 nt, Human
uaaaauccccaugccuguggcug

SEQ ID NO: 3734133 - RNA, 20 nt, Human
uaaaauccugcuuaaaacuu

SEQ ID NO: 3734134 - RNA, 15 nt, Human
uaaaaucuauucugu

SEQ ID NO: 3734135 - RNA, 17 nt, Human
uaaaaucuccuaaaugc

SEQ ID NO: 3734136 - RNA, 21 nt, Human
uaaaaucugagggaaauguuu

SEQ ID NO: 3734137 - RNA, 20 nt, Human
uaaaaucugauauguauugu

SEQ ID NO: 3734138 - RNA, 14 nt, Human
uaaaaucugucacg

SEQ ID NO: 3734139 - RNA, 18 nt, Human
uaaaaucuuauuaaaguu

SEQ ID NO: 3734140 - RNA, 19 nt, Human
uaaaaucuuauuaaaguuu

SEQ ID NO: 3734141 - RNA, 21 nt, Human
uaaaaucuuauuaaaguuuca

SEQ ID NO: 3734142 - RNA, 20 nt, Human
uaaaaucuuggcacagaaac

SEQ ID NO: 3734143 - RNA, 19 nt, Human
uaaaaucuugucaugugua

SEQ ID NO: 3734144 - RNA, 19 nt, Human
uaaaaucuuucuuucuuag

SEQ ID NO: 3734145 - RNA, 15 nt, Human
uaaaaucuuuucuau

SEQ ID NO: 3734146 - RNA, 14 nt, Human
uaaaaugacaauca

SEQ ID NO: 3734147 - RNA, 15 nt, Human
uaaaaugagaaaucu

SEQ ID NO: 3734148 - RNA, 16 nt, Human
uaaaaugagaaaucua

SEQ ID NO: 3734149 - RNA, 17 nt, Human
uaaaaugauuguaaaau

SEQ ID NO: 3734150 - RNA, 16 nt, Human
uaaaaugauuguagua

SEQ ID NO: 3734151 - RNA, 18 nt, Human
uaaaaugauuuuaucugu

SEQ ID NO: 3734152 - RNA, 12 nt, Human
uaaaaugcaaua

SEQ ID NO: 3734153 - RNA, 19 nt, Human
uaaaaugcaugauuuugua

SEQ ID NO: 3734154 - RNA, 17 nt, Human
uaaaaugccucagugua

SEQ ID NO: 3734155 - RNA, 17 nt, Human
uaaaaugcuagguucua

SEQ ID NO: 3734156 - RNA, 20 nt, Human
uaaaaugcuagguucuaccu

SEQ ID NO: 3734157 - RNA, 21 nt, Human
uaaaaugcuucacuguacgua

SEQ ID NO: 3734158 - RNA, 12 nt, Human
uaaaauggaauu

SEQ ID NO: 3734159 - RNA, 13 nt, Human
uaaaauggaauug

SEQ ID NO: 3734160 - RNA, 15 nt, Human
uaaaauggaauugaa

SEQ ID NO: 3734161 - RNA, 22 nt, Human
uaaaauggaugccuugaauaau

SEQ ID NO: 3734162 - RNA, 22 nt, Human
uaaaauggcaacaaacugcaca

SEQ ID NO: 3734163 - RNA, 21 nt, Human
uaaaauggugaagaacuagca

SEQ ID NO: 3734164 - RNA, 16 nt, Human
uaaaaugguguuuuca

SEQ ID NO: 3734165 - RNA, 13 nt, Human
uaaaauguaaaaa

SEQ ID NO: 3734166 - RNA, 22 nt, Human
uaaaauguacauguauuaaauu

SEQ ID NO: 3734167 - RNA, 15 nt, Human
uaaaauguauaaguu

SEQ ID NO: 3734168 - RNA, 15 nt, Human
uaaaauguaucaaca

SEQ ID NO: 3734169 - RNA, 17 nt, Human
uaaaauguaucuaagaa

SEQ ID NO: 3734170 - RNA, 19 nt, Human
uaaaauguaugcauguugu

SEQ ID NO: 3734171 - RNA, 12 nt, Human
uaaaauguauua

SEQ ID NO: 3734172 - RNA, 13 nt, Human
uaaaauguauuuu

SEQ ID NO: 3734173 - RNA, 14 nt, Human
uaaaauguauuuuu

SEQ ID NO: 3734174 - RNA, 19 nt, Human
uaaaauguccaguaagauc

SEQ ID NO: 3734175 - RNA, 15 nt, Human
uaaaaugucuuucca

SEQ ID NO: 3734176 - RNA, 22 nt, Human
uaaaaugucuuuccaaauuauu

SEQ ID NO: 3734177 - RNA, 11 nt, Human
uaaaaugugaa

SEQ ID NO: 3734178 - RNA, 17 nt, Human
uaaaaugugauguucua

SEQ ID NO: 3734179 - RNA, 18 nt, Human
uaaaaugugauuuuucug

SEQ ID NO: 3734180 - RNA, 20 nt, Human
uaaaaugugggauuaugggu

SEQ ID NO: 3734181 - RNA, 18 nt, Human
uaaaauguguugaaacug

SEQ ID NO: 3734182 - RNA, 19 nt, Human
uaaaauguguugaaacugc

SEQ ID NO: 3734183 - RNA, 17 nt, Human
uaaaauguucacuuuug

SEQ ID NO: 3734184 - RNA, 18 nt, Human
uaaaauguugaaaaguca

SEQ ID NO: 3734185 - RNA, 14 nt, Human
uaaaauguuuucag

SEQ ID NO: 3734186 - RNA, 16 nt, Human
uaaaauguuuucagcu

SEQ ID NO: 3734187 - RNA, 19 nt, Human
uaacugaauaccacucugu

SEQ ID NO: 3734188 - RNA, 14 nt, Human
uaacugacaaauca

SEQ ID NO: 3734189 - RNA, 18 nt, Human
uaacugacaaaucaaguu

SEQ ID NO: 3734190 - RNA, 20 nt, Human
uaacugacaaaucaaguuuc

SEQ ID NO: 3734191 - RNA, 16 nt, Human
uaacugacaagccauc

SEQ ID NO: 3734192 - RNA, 20 nt, Human
uaacugacaagccaucuuga

SEQ ID NO: 3734193 - RNA, 21 nt, Human
uaacugacaagcuccauuuaa

SEQ ID NO: 3734194 - RNA, 17 nt, Human
uaacugacccucccuuc

SEQ ID NO: 3734195 - RNA, 23 nt, Human
uaacugcaaccuuguuuauuaaa

SEQ ID NO: 3734196 - RNA, 14 nt, Human
uaacugcauacacu

SEQ ID NO: 3734197 - RNA, 16 nt, Human
uaacugcauuuuuaga

SEQ ID NO: 3734198 - RNA, 18 nt, Human
uaacugccuuaaaacuuu

SEQ ID NO: 3734199 - RNA, 21 nt, Human
uaacugcuuucuguuccaaau

SEQ ID NO: 3734200 - RNA, 22 nt, Human
uaacuggaaaacagaacacuua

SEQ ID NO: 3734201 - RNA, 13 nt, Human
uaacuggaaagaa

SEQ ID NO: 3734202 - RNA, 18 nt, Human
uaacuggagccccaucag

SEQ ID NO: 3734203 - RNA, 17 nt, Human
uaacugggggaaaagau

SEQ ID NO: 3734204 - RNA, 15 nt, Human
uaacuguaaagaugu

SEQ ID NO: 3734205 - RNA, 18 nt, Human
uaacuguaauuauuugaa

SEQ ID NO: 3734206 - RNA, 16 nt, Human
uaacuguauauuugua

SEQ ID NO: 3734207 - RNA, 14 nt, Human
uaacuguauuugaa

SEQ ID NO: 3734208 - RNA, 22 nt, Human
uaacuguauuugaaauaagaau

SEQ ID NO: 3734209 - RNA, 22 nt, Human
uaacugucaggcugaaaacaau

SEQ ID NO: 3734210 - RNA, 11 nt, Human
uaacuguccug

SEQ ID NO: 3734211 - RNA, 12 nt, Human
uaacuguccugu

SEQ ID NO: 3734212 - RNA, 23 nt, Human
uaacuguccuuuuucuucccuua

SEQ ID NO: 3734213 - RNA, 18 nt, Human
uaacugugccaguucuuu

SEQ ID NO: 3734214 - RNA, 15 nt, Human
uaacuguguacuguu

SEQ ID NO: 3734215 - RNA, 11 nt, Human
uaacuguguau

SEQ ID NO: 3734216 - RNA, 13 nt, Human
uaacuguguaugu

SEQ ID NO: 3734217 - RNA, 14 nt, Human
uaacuguguaugua

SEQ ID NO: 3734218 - RNA, 15 nt, Human
uaacuguguauguac

SEQ ID NO: 3734219 - RNA, 15 nt, Human
uaacugugucauuug

SEQ ID NO: 3734220 - RNA, 21 nt, Human
uaacuguuacaguaaugucau

SEQ ID NO: 3734221 - RNA, 19 nt, Human
uaacuguuaccauuggaaa

SEQ ID NO: 3734222 - RNA, 21 nt, Human
uaacuguuauuuauaaucacu

SEQ ID NO: 3734223 - RNA, 15 nt, Human
uaacuguuuauaugu

SEQ ID NO: 3734224 - RNA, 20 nt, Human
uaacuuaaaaauguaaauau

SEQ ID NO: 3734225 - RNA, 17 nt, Human
uaacuuaaauaguauuu

SEQ ID NO: 3734226 - RNA, 14 nt, Human
uaacuuaacugaaa

SEQ ID NO: 3734227 - RNA, 16 nt, Human
uaacuuaacugaaaug

SEQ ID NO: 3734228 - RNA, 16 nt, Human
uaacuuaauaguauuu

SEQ ID NO: 3734229 - RNA, 16 nt, Human
uaacuuaaugaaaaca

SEQ ID NO: 3734230 - RNA, 17 nt, Human
uaacuuacccuuaggga

SEQ ID NO: 3734231 - RNA, 15 nt, Human
uaacuuauauuaaua

SEQ ID NO: 3734232 - RNA, 15 nt, Human
uaacuuauucaaaga

SEQ ID NO: 3734233 - RNA, 19 nt, Human
uaacuuauugcugauuuua

SEQ ID NO: 3734234 - RNA, 23 nt, Human
uaacuuauugcugauuuuaaugg

SEQ ID NO: 3734235 - RNA, 15 nt, Human
uaacuuauuuagaga

SEQ ID NO: 3734236 - RNA, 20 nt, Human
uaacuucccugaaaaaucua

SEQ ID NO: 3734237 - RNA, 14 nt, Human
uaacuuccuguacu

SEQ ID NO: 3734238 - RNA, 17 nt, Human
uaacuucuaaaacugua

SEQ ID NO: 3734239 - RNA, 23 nt, Human
uaacuucugauagcguuggaauu

SEQ ID NO: 3734240 - RNA, 18 nt, Human
uaacuucuuaaaaguugu

SEQ ID NO: 3734241 - RNA, 18 nt, Human
uaacuucuuauggaauug

SEQ ID NO: 3734242 - RNA, 15 nt, Human
uaacuucuugcuucu

SEQ ID NO: 3734243 - RNA, 12 nt, Human
uaacuucuuucu

SEQ ID NO: 3734244 - RNA, 23 nt, Human
uaacuucuuucuauuugacuugu

SEQ ID NO: 3734245 - RNA, 22 nt, Human
uaacuugagaguagaugguuug

SEQ ID NO: 3734246 - RNA, 12 nt, Human
uaacuugaugca

SEQ ID NO: 3734247 - RNA, 13 nt, Human
uaacuugcuuaaa

SEQ ID NO: 3734248 - RNA, 14 nt, Human
uaacuugcuuaaau

SEQ ID NO: 3734249 - RNA, 18 nt, Human
uaacuugcuuaaauguga

SEQ ID NO: 3734250 - RNA, 19 nt, Human
uaacuuggauguagccaug

SEQ ID NO: 3734251 - RNA, 20 nt, Human
uaacuugguuauacaugaca

SEQ ID NO: 3734252 - RNA, 16 nt, Human
uaacuuuauaaaucca

SEQ ID NO: 3734253 - RNA, 14 nt, Human
uaacuuuaugugua

SEQ ID NO: 3734254 - RNA, 15 nt, Human
uaacuuuauguguaa

SEQ ID NO: 3734255 - RNA, 18 nt, Human
uaacuuuauguguaaaua

SEQ ID NO: 3734256 - RNA, 18 nt, Human
uaacuuuauucuugaaag

SEQ ID NO: 3734257 - RNA, 12 nt, Human
uaacuuugcuug

SEQ ID NO: 3734258 - RNA, 24 nt, Human
uaacuuugcuugcaguagauuuuc

SEQ ID NO: 3734259 - RNA, 14 nt, Human
uaacuuuguuuuau

SEQ ID NO: 3734260 - RNA, 18 nt, Human
uaacuuuuauaaacuuua

SEQ ID NO: 3734261 - RNA, 19 nt, Human
uaacuuuuauaaacuuuac

SEQ ID NO: 3734262 - RNA, 20 nt, Human
uaacuuuuguaaauacacau

SEQ ID NO: 3734263 - RNA, 12 nt, Human
uaacuuuuguga

SEQ ID NO: 3734264 - RNA, 22 nt, Human
uaacuuuugugaauuaggcugu

SEQ ID NO: 3734265 - RNA, 16 nt, Human
uaacuuuugugugaaa

SEQ ID NO: 3734266 - RNA, 16 nt, Human
uaacuuuuuauauucu

SEQ ID NO: 3734267 - RNA, 19 nt, Human
uaacuuuuuuuuuucuuua

SEQ ID NO: 3734268 - RNA, 11 nt, Human
uaagaaaaacu

SEQ ID NO: 3734269 - RNA, 20 nt, Human
uaagaaaaacuuuuuugguu

SEQ ID NO: 3734270 - RNA, 19 nt, Human
uaagaaaaagcaaaaggca

SEQ ID NO: 3734271 - RNA, 17 nt, Human
uaagaaaaaucauguuu

SEQ ID NO: 3734272 - RNA, 21 nt, Human
uaagaaaaccaccccuuagau

SEQ ID NO: 3734273 - RNA, 15 nt, Human
uaagaaaaguauuuu

SEQ ID NO: 3734274 - RNA, 22 nt, Human
uaagaaaaguauuuugaaguuu

SEQ ID NO: 3734275 - RNA, 14 nt, Human
uaagaaaauacaau

SEQ ID NO: 3734276 - RNA, 21 nt, Human
uaagaaacacacugaggcagg

SEQ ID NO: 3734277 - RNA, 23 nt, Human
uaagaaacacacugaggcaggga

SEQ ID NO: 3734278 - RNA, 16 nt, Human
uaagaaacagagcagu

SEQ ID NO: 3734279 - RNA, 12 nt, Human
uaagaaacauug

SEQ ID NO: 3734280 - RNA, 16 nt, Human
uaagaaacauuggaag

SEQ ID NO: 3734281 - RNA, 21 nt, Human
uaagaaaccaaucaagauaaa

SEQ ID NO: 3734282 - RNA, 21 nt, Human
uaagaaacccucugucauucg

SEQ ID NO: 3734283 - RNA, 18 nt, Human
uaagaaacuuuuguaaag

SEQ ID NO: 3734284 - RNA, 24 nt, Human
uaagaaagacuaucuaaauguuga

SEQ ID NO: 3734285 - RNA, 18 nt, Human
uaagaaaggaagcauugu

SEQ ID NO: 3734286 - RNA, 20 nt, Human
uaagaaaggaagcauuguaa

SEQ ID NO: 3734287 - RNA, 21 nt, Human
uaagaaaggaagcauuguaaa

SEQ ID NO: 3734288 - RNA, 23 nt, Human
uaagaaaggaagcauuguaaaau

SEQ ID NO: 3734289 - RNA, 19 nt, Human
uaagaaauaaaacuguuaa

SEQ ID NO: 3734290 - RNA, 18 nt, Human
uaagaaauaucugugaaa

SEQ ID NO: 3734291 - RNA, 12 nt, Human
uaagaaauaugu

SEQ ID NO: 3734292 - RNA, 15 nt, Human
uaagaaaucaaguaa

SEQ ID NO: 3734293 - RNA, 19 nt, Human
uaagaaaucucccaugugc

SEQ ID NO: 3734294 - RNA, 22 nt, Human
uaagaaaucucccaugugcaua

SEQ ID NO: 3734295 - RNA, 15 nt, Human
uaagaaaucuguuuu

SEQ ID NO: 3734296 - RNA, 18 nt, Human
uaagaaauguauaaacuu

SEQ ID NO: 3734297 - RNA, 21 nt, Human
uaagaaauugaauacuuugaa

SEQ ID NO: 3734298 - RNA, 23 nt, Human
uaagaacccauggaaaaaugcca

SEQ ID NO: 3734299 - RNA, 15 nt, Human
uaagaacgaggauuu

SEQ ID NO: 3734300 - RNA, 17 nt, Human
uaagaacuaaagaagau

SEQ ID NO: 3734301 - RNA, 22 nt, Human
uaagaacugcuuucuuucguuu

SEQ ID NO: 3734302 - RNA, 13 nt, Human
uaagaagaaacua

SEQ ID NO: 3734303 - RNA, 15 nt, Human
uaagaagcuguugua

SEQ ID NO: 3734304 - RNA, 19 nt, Human
uaagaagcuguuguacauu

SEQ ID NO: 3734305 - RNA, 16 nt, Human
uaagaagcuucuaaua

SEQ ID NO: 3734306 - RNA, 19 nt, Human
uaagaagcuucuaauaaau

SEQ ID NO: 3734307 - RNA, 17 nt, Human
uaagaaggcaauauuaa

SEQ ID NO: 3734308 - RNA, 13 nt, Human
uaagaagugaaaa

SEQ ID NO: 3734309 - RNA, 17 nt, Human
uaagaauaaaauguuga

SEQ ID NO: 3734310 - RNA, 14 nt, Human
uaagaauaauaaaa

SEQ ID NO: 3734311 - RNA, 23 nt, Human
uaagaauaccacaucaaauaaga

SEQ ID NO: 3734312 - RNA, 19 nt, Human
uaagaauagaacaacauau

SEQ ID NO: 3734313 - RNA, 17 nt, Human
uaagaaucagaguagaa

SEQ ID NO: 3734314 - RNA, 18 nt, Human
uaagaaucagaguagaaa

SEQ ID NO: 3734315 - RNA, 21 nt, Human
uaagaaucuagcaagaauuga

SEQ ID NO: 3734316 - RNA, 14 nt, Human
uaagaaucuuuaga

SEQ ID NO: 3734317 - RNA, 15 nt, Human
uaagaaugaaauacu

SEQ ID NO: 3734318 - RNA, 21 nt, Human
uaagaaugaaauacuguuuga

SEQ ID NO: 3734319 - RNA, 18 nt, Human
uaagaaugaguuucuuag

SEQ ID NO: 3734320 - RNA, 20 nt, Human
uaagaaugaguuucuuagac

SEQ ID NO: 3734321 - RNA, 22 nt, Human
uaagaaugcugguuuuccuaaa

SEQ ID NO: 3734322 - RNA, 23 nt, Human
uaagaaugcugguuuuccuaaau

SEQ ID NO: 3734323 - RNA, 12 nt, Human
uaagaauuauuu

SEQ ID NO: 3734324 - RNA, 18 nt, Human
uaagaauucaaacugggg

SEQ ID NO: 3734325 - RNA, 13 nt, Human
uaagaauucugau

SEQ ID NO: 3734326 - RNA, 13 nt, Human
uaagaauugacca

SEQ ID NO: 3734327 - RNA, 18 nt, Human
uaagaauugaguaauggu

SEQ ID NO: 3734328 - RNA, 12 nt, Human
uaagaauuugca

SEQ ID NO: 3734329 - RNA, 13 nt, Human
uaagaauuugcau

SEQ ID NO: 3734330 - RNA, 23 nt, Human
uaagacacaaaugcaugaacaag

SEQ ID NO: 3734331 - RNA, 17 nt, Human
uaagacagcauguguua

SEQ ID NO: 3734332 - RNA, 12 nt, Human
uaagacauaacg

SEQ ID NO: 3734333 - RNA, 21 nt, Human
uaagacauaacguuuuuccuu

SEQ ID NO: 3734334 - RNA, 20 nt, Human
uaagacauacuccuuccauc

SEQ ID NO: 3734335 - RNA, 19 nt, Human
uaagacaugauuuccuuga

SEQ ID NO: 3734336 - RNA, 13 nt, Human
uaaaauuaaagaa

SEQ ID NO: 3734337 - RNA, 14 nt, Human
uaaaauuaaagaaa

SEQ ID NO: 3734338 - RNA, 14 nt, Human
uaaaauuaagaaug

SEQ ID NO: 3734339 - RNA, 15 nt, Human
uaaaauuaagaaugu

SEQ ID NO: 3734340 - RNA, 19 nt, Human
uaaaauuacaacuaaguga

SEQ ID NO: 3734341 - RNA, 15 nt, Human
uaaaauuauaccugu

SEQ ID NO: 3734342 - RNA, 19 nt, Human
uaaaauuauggaaacagau

SEQ ID NO: 3734343 - RNA, 13 nt, Human
uaaaauuauuuca

SEQ ID NO: 3734344 - RNA, 14 nt, Human
uaaaauuauuugca

SEQ ID NO: 3734345 - RNA, 12 nt, Human
uaaaauuccacu

SEQ ID NO: 3734346 - RNA, 13 nt, Human
uaaaauucuaaau

SEQ ID NO: 3734347 - RNA, 13 nt, Human
uaaaauugaaagg

SEQ ID NO: 3734348 - RNA, 13 nt, Human
uaaaauugcaugg

SEQ ID NO: 3734349 - RNA, 15 nt, Human
uaaaauugccauauu

SEQ ID NO: 3734350 - RNA, 14 nt, Human
uaaaauuguauaga

SEQ ID NO: 3734351 - RNA, 16 nt, Human
uaaaauuguauagaga

SEQ ID NO: 3734352 - RNA, 23 nt, Human
uaaaauuguauagagauaugcag

SEQ ID NO: 3734353 - RNA, 12 nt, Human
uaaaauuguuau

SEQ ID NO: 3734354 - RNA, 12 nt, Human
uaaaauuugaaa

SEQ ID NO: 3734355 - RNA, 17 nt, Human
uaaaauuugaaacauug

SEQ ID NO: 3734356 - RNA, 13 nt, Human
uaaaauuuguucu

SEQ ID NO: 3734357 - RNA, 20 nt, Human
uaaaauuuguucuuguauuu

SEQ ID NO: 3734358 - RNA, 21 nt, Human
uaaaauuuuaggcaaguuuuc

SEQ ID NO: 3734359 - RNA, 22 nt, Human
uaaaauuuuaggcacucuuaaa

SEQ ID NO: 3734360 - RNA, 19 nt, Human
uaaaauuuugcuuuuaauu

SEQ ID NO: 3734361 - RNA, 20 nt, Human
uaaaauuuuuuuagaaagca

SEQ ID NO: 3734362 - RNA, 16 nt, Human
uaaaauuuuuuugguc

SEQ ID NO: 3734363 - RNA, 19 nt, Human
uaaaauuuuuuuucauguu

SEQ ID NO: 3734364 - RNA, 15 nt, Human
uaaacaaaauagaaa

SEQ ID NO: 3734365 - RNA, 16 nt, Human
uaaacaaaaugaagcu

SEQ ID NO: 3734366 - RNA, 22 nt, Human
uaaacaaacauuguguugacau

SEQ ID NO: 3734367 - RNA, 13 nt, Human
uaaacaaacucuu

SEQ ID NO: 3734368 - RNA, 19 nt, Human
uaaacaaacuguguaacug

SEQ ID NO: 3734369 - RNA, 13 nt, Human
uaaacaaagguug

SEQ ID NO: 3734370 - RNA, 23 nt, Human
uaaacaaaguuucagaguauauu

SEQ ID NO: 3734371 - RNA, 16 nt, Human
uaaacaaaucuuucca

SEQ ID NO: 3734372 - RNA, 19 nt, Human
uaaacaaauucauauucug

SEQ ID NO: 3734373 - RNA, 15 nt, Human
uaaacaacagcugaa

SEQ ID NO: 3734374 - RNA, 24 nt, Human
uaaacaacauugagauuaugauga

SEQ ID NO: 3734375 - RNA, 20 nt, Human
uaaacaagaccacguuucua

SEQ ID NO: 3734376 - RNA, 15 nt, Human
uaaacaagauuuuaa

SEQ ID NO: 3734377 - RNA, 23 nt, Human
uaaacaaugaaauauugcuguau

SEQ ID NO: 3734378 - RNA, 22 nt, Human
uaaacaaugaugcccugcucca

SEQ ID NO: 3734379 - RNA, 21 nt, Human
uaaacacacagauacacacac

SEQ ID NO: 3734380 - RNA, 16 nt, Human
uaaacacagucaaaau

SEQ ID NO: 3734381 - RNA, 22 nt, Human
uaaacacauuaaagguacuuug

SEQ ID NO: 3734382 - RNA, 13 nt, Human
uaaacacauuuug

SEQ ID NO: 3734383 - RNA, 23 nt, Human
uaaacacccaugaaucaaagaca

SEQ ID NO: 3734384 - RNA, 18 nt, Human
uaaacacgccugcaaacg

SEQ ID NO: 3734385 - RNA, 22 nt, Human
uaaacacucagcuguucagauu

SEQ ID NO: 3734386 - RNA, 21 nt, Human
uaaacacucuugaaaaaugca

SEQ ID NO: 3734387 - RNA, 11 nt, Human
uaaacacugug

SEQ ID NO: 3734388 - RNA, 14 nt, Human
uaaacacuguguau

SEQ ID NO: 3734389 - RNA, 13 nt, Human
uaaacagacaaua

SEQ ID NO: 3734390 - RNA, 23 nt, Human
uaaacagacuauuuaacuugagg

SEQ ID NO: 3734391 - RNA, 16 nt, Human
uaaacagacuguuaau

SEQ ID NO: 3734392 - RNA, 19 nt, Human
uaaacagauuuuuacaaau

SEQ ID NO: 3734393 - RNA, 23 nt, Human
uaaacagcuucaugccuuuguaa

SEQ ID NO: 3734394 - RNA, 18 nt, Human
uaaacaggagacaggaag

SEQ ID NO: 3734395 - RNA, 14 nt, Human
uaaacaggcccagc

SEQ ID NO: 3734396 - RNA, 17 nt, Human
uaaacaguaagauaucu

SEQ ID NO: 3734397 - RNA, 13 nt, Human
uaaacagugccug

SEQ ID NO: 3734398 - RNA, 18 nt, Human
uaaacaguugcacagcau

SEQ ID NO: 3734399 - RNA, 19 nt, Human
uaaacaguugcacagcauc

SEQ ID NO: 3734400 - RNA, 15 nt, Human
uaaacauaaguguac

SEQ ID NO: 3734401 - RNA, 20 nt, Human
uaaacauauccaaguuugaa

SEQ ID NO: 3734402 - RNA, 15 nt, Human
uaaacauaugauuuc

SEQ ID NO: 3734403 - RNA, 16 nt, Human
uaaacaucacacacac

SEQ ID NO: 3734404 - RNA, 20 nt, Human
uaaacaucagguuaggcagu

SEQ ID NO: 3734405 - RNA, 17 nt, Human
uaaacauccaauauuuu

SEQ ID NO: 3734406 - RNA, 22 nt, Human
uaaacaugaaaacacuugaaau

SEQ ID NO: 3734407 - RNA, 23 nt, Human
uaaacaugcuguacauacuuuuu

SEQ ID NO: 3734408 - RNA, 16 nt, Human
uaaacaugguuacaau

SEQ ID NO: 3734409 - RNA, 12 nt, Human
uaaacauguguu

SEQ ID NO: 3734410 - RNA, 17 nt, Human
uaaacauuaaaaaugga

SEQ ID NO: 3734411 - RNA, 15 nt, Human
uaaacauuaaauguc

SEQ ID NO: 3734412 - RNA, 16 nt, Human
uaaacauuaaaugucu

SEQ ID NO: 3734413 - RNA, 20 nt, Human
uaaacauuaauagcagccuu

SEQ ID NO: 3734414 - RNA, 14 nt, Human
uaaacauucuuuua

SEQ ID NO: 3734415 - RNA, 19 nt, Human
uaaacauugguucuuguau

SEQ ID NO: 3734416 - RNA, 13 nt, Human
uaaaccacugaaa

SEQ ID NO: 3734417 - RNA, 18 nt, Human
uaaaccaguuuagauuuc

SEQ ID NO: 3734418 - RNA, 16 nt, Human
uaaaccaucucccugg

SEQ ID NO: 3734419 - RNA, 18 nt, Human
uaaaccaugggauaaaug

SEQ ID NO: 3734420 - RNA, 20 nt, Human
uaaaccaugggauaaaugcc

SEQ ID NO: 3734421 - RNA, 21 nt, Human
uaaaccaugggauaaaugcca

SEQ ID NO: 3734422 - RNA, 23 nt, Human
uaaacccauauuguaaaacaggu

SEQ ID NO: 3734423 - RNA, 23 nt, Human
uaaacccauuuuagucacuuuuu

SEQ ID NO: 3734424 - RNA, 15 nt, Human
uaaaccccuguccca

SEQ ID NO: 3734425 - RNA, 16 nt, Human
uaaacccucagagccu

SEQ ID NO: 3734426 - RNA, 13 nt, Human
uaaaccuaaaaaa

SEQ ID NO: 3734427 - RNA, 15 nt, Human
uaaaccuaaaaaaga

SEQ ID NO: 3734428 - RNA, 16 nt, Human
uaaaccuaaaaaagau

SEQ ID NO: 3734429 - RNA, 11 nt, Human
uaaaccuaccu

SEQ ID NO: 3734430 - RNA, 20 nt, Human
uaaaccuguuuuuuuuucau

SEQ ID NO: 3734431 - RNA, 18 nt, Human
uaaacgauuuaauucucu

SEQ ID NO: 3734432 - RNA, 16 nt, Human
uaaacgauuuuuaaaa

SEQ ID NO: 3734433 - RNA, 20 nt, Human
uaaacgauuuuuaaaaugua

SEQ ID NO: 3734434 - RNA, 21 nt, Human
uaaacgauuuuuaaaauguac

SEQ ID NO: 3734435 - RNA, 19 nt, Human
uaaacgcaagcugagcugg

SEQ ID NO: 3734436 - RNA, 16 nt, Human
uaaacgcauuaucagc

SEQ ID NO: 3734437 - RNA, 17 nt, Human
uaaacggauuauuuuuu

SEQ ID NO: 3734438 - RNA, 23 nt, Human
uaaacggauuauuuuuucagacc

SEQ ID NO: 3734439 - RNA, 15 nt, Human
uaaacggauuccaaa

SEQ ID NO: 3734440 - RNA, 21 nt, Human
uaaacgguucaguuucuucug

SEQ ID NO: 3734441 - RNA, 13 nt, Human
uaaacgucuuaaa

SEQ ID NO: 3734442 - RNA, 17 nt, Human
uaaacgucuuaaauauu

SEQ ID NO: 3734443 - RNA, 22 nt, Human
uaaacgugaugaucagcuguuu

SEQ ID NO: 3734444 - RNA, 13 nt, Human
uaaacguggagaa

SEQ ID NO: 3734445 - RNA, 15 nt, Human
uaaacguuucaguaa

SEQ ID NO: 3734446 - RNA, 13 nt, Human
uaaacuaaacacg

SEQ ID NO: 3734447 - RNA, 22 nt, Human
uaaacuacauuagguugugaau

SEQ ID NO: 3734448 - RNA, 15 nt, Human
uaaacuacucuuuga

SEQ ID NO: 3734449 - RNA, 15 nt, Human
uaaacuagaugaccu

SEQ ID NO: 3734450 - RNA, 17 nt, Human
uaaacuagcauaucugc

SEQ ID NO: 3734451 - RNA, 19 nt, Human
uaaacuagcauaucugccu

SEQ ID NO: 3734452 - RNA, 17 nt, Human
uaaacuaggaaaauugg

SEQ ID NO: 3734453 - RNA, 14 nt, Human
uaaacuauauuuuc

SEQ ID NO: 3734454 - RNA, 19 nt, Human
uaaacucaaaacuuaacau

SEQ ID NO: 3734455 - RNA, 20 nt, Human
uaaacucaaaacuuaacaua

SEQ ID NO: 3734456 - RNA, 19 nt, Human
uaaacucaaaauauuugua

SEQ ID NO: 3734457 - RNA, 23 nt, Human
uaaacucagcaucaaaauauuuc

SEQ ID NO: 3734458 - RNA, 18 nt, Human
uaaacucaucugaaaugu

SEQ ID NO: 3734459 - RNA, 22 nt, Human
uaaacucaucugaaauguuaca

SEQ ID NO: 3734460 - RNA, 15 nt, Human
uaaacuccuuccugg

SEQ ID NO: 3734461 - RNA, 13 nt, Human
uaaacucugaaua

SEQ ID NO: 3734462 - RNA, 20 nt, Human
uaaacucugagugcaaacuu

SEQ ID NO: 3734463 - RNA, 13 nt, Human
uaaacucugcauc

SEQ ID NO: 3734464 - RNA, 15 nt, Human
uaaacucuguugcaa

SEQ ID NO: 3734465 - RNA, 14 nt, Human
uaaacugacuauca

SEQ ID NO: 3734466 - RNA, 15 nt, Human
uaaacugacuaucau

SEQ ID NO: 3734467 - RNA, 18 nt, Human
uaaacugacuaucauaaa

SEQ ID NO: 3734468 - RNA, 21 nt, Human
uaaacugcccccucugcccug

SEQ ID NO: 3734469 - RNA, 22 nt, Human
uaaacugcccccucugcccugc

SEQ ID NO: 3734470 - RNA, 23 nt, Human
uaaacugcccccucugcccugcg

SEQ ID NO: 3734471 - RNA, 13 nt, Human
uaaacugcccugu

SEQ ID NO: 3734472 - RNA, 22 nt, Human
uaaacuggaauuaaaaggauag

SEQ ID NO: 3734473 - RNA, 13 nt, Human
uaaacuggagacu

SEQ ID NO: 3734474 - RNA, 12 nt, Human
uaaacuguacag

SEQ ID NO: 3734475 - RNA, 15 nt, Human
uaaacuguacagugu

SEQ ID NO: 3734476 - RNA, 17 nt, Human
uaaacuguacagugucu

SEQ ID NO: 3734477 - RNA, 18 nt, Human
uaaacuguacagugucuu

SEQ ID NO: 3734478 - RNA, 19 nt, Human
uaaacuguacagugucuuu

SEQ ID NO: 3734479 - RNA, 17 nt, Human
uaaacuguccucuuuca

SEQ ID NO: 3734480 - RNA, 23 nt, Human
uaaacuguccucuuucagaaaac

SEQ ID NO: 3734481 - RNA, 14 nt, Human
uaaacugugcacca

SEQ ID NO: 3734482 - RNA, 15 nt, Human
uaaacuguguacaua

SEQ ID NO: 3734483 - RNA, 17 nt, Human
uaaacuguguauuccaa

SEQ ID NO: 3734484 - RNA, 20 nt, Human
uaaacuguguggacugugau

SEQ ID NO: 3734485 - RNA, 21 nt, Human
uaaacuguuaacuuauucaaa

SEQ ID NO: 3734486 - RNA, 19 nt, Human
uaagaccaccucaaauuua

SEQ ID NO: 3734487 - RNA, 13 nt, Human
uaagaccuggcag

SEQ ID NO: 3734488 - RNA, 18 nt, Human
uaagaccuggcagcucug

SEQ ID NO: 3734489 - RNA, 20 nt, Human
uaagacggauuuauuuuucc

SEQ ID NO: 3734490 - RNA, 17 nt, Human
uaagacuaaaucuguaa

SEQ ID NO: 3734491 - RNA, 19 nt, Human
uaagacuauauauauaaau

SEQ ID NO: 3734492 - RNA, 15 nt, Human
uaagacuguguauuc

SEQ ID NO: 3734493 - RNA, 20 nt, Human
uaagacuuacucuaagaucu

SEQ ID NO: 3734494 - RNA, 14 nt, Human
uaagacuugacagu

SEQ ID NO: 3734495 - RNA, 13 nt, Human
uaagacuuuacuu

SEQ ID NO: 3734496 - RNA, 15 nt, Human
uaagacuuugggaua

SEQ ID NO: 3734497 - RNA, 15 nt, Human
uaagagaaaagagag

SEQ ID NO: 3734498 - RNA, 18 nt, Human
uaagagaaaagagagaaa

SEQ ID NO: 3734499 - RNA, 21 nt, Human
uaagagaaacuuuauacauua

SEQ ID NO: 3734500 - RNA, 13 nt, Human
uaagagaaagaaa

SEQ ID NO: 3734501 - RNA, 15 nt, Human
uaagagaaaugagcu

SEQ ID NO: 3734502 - RNA, 14 nt, Human
uaagagaaguagaa

SEQ ID NO: 3734503 - RNA, 19 nt, Human
uaagagaauauuuuaagua

SEQ ID NO: 3734504 - RNA, 20 nt, Human
uaagagacagaauguaucug

SEQ ID NO: 3734505 - RNA, 13 nt, Human
uaagagacaguca

SEQ ID NO: 3734506 - RNA, 18 nt, Human
uaagagagaaaucugaaa

SEQ ID NO: 3734507 - RNA, 22 nt, Human
uaagagcaccuuccucacuucc

SEQ ID NO: 3734508 - RNA, 16 nt, Human
uaagagcuagcgcugc

SEQ ID NO: 3734509 - RNA, 14 nt, Human
uaagagcuauacag

SEQ ID NO: 3734510 - RNA, 15 nt, Human
uaagagcuuuacaaa

SEQ ID NO: 3734511 - RNA, 17 nt, Human
uaagaggcugcccuccu

SEQ ID NO: 3734512 - RNA, 22 nt, Human
uaagagggagggagggcuccag

SEQ ID NO: 3734513 - RNA, 23 nt, Human
uaagagggagggagggcuccaga

SEQ ID NO: 3734514 - RNA, 18 nt, Human
uaagagggcacacacugu

SEQ ID NO: 3734515 - RNA, 20 nt, Human
uaagagggcacacacugugu

SEQ ID NO: 3734516 - RNA, 21 nt, Human
uaagaguagaaacugcaggga

SEQ ID NO: 3734517 - RNA, 22 nt, Human
uaagaguaugugccaggaaacu

SEQ ID NO: 3734518 - RNA, 16 nt, Human
uaagaguguagaagca

SEQ ID NO: 3734519 - RNA, 21 nt, Human
uaagaguuaguuucuuuggga

SEQ ID NO: 3734520 - RNA, 13 nt, Human
uaagauaaaaaag

SEQ ID NO: 3734521 - RNA, 12 nt, Human
uaagauaauaau

SEQ ID NO: 3734522 - RNA, 18 nt, Human
uaagauaauaguuuacau

SEQ ID NO: 3734523 - RNA, 13 nt, Human
uaagauaauuaua

SEQ ID NO: 3734524 - RNA, 22 nt, Human
uaagauacaaauuaauuuuacu

SEQ ID NO: 3734525 - RNA, 23 nt, Human
uaagauauacuuguuuuuguaaa

SEQ ID NO: 3734526 - RNA, 17 nt, Human
uaagauaucucaaugaa

SEQ ID NO: 3734527 - RNA, 21 nt, Human
uaagauaugggacauuuuuga

SEQ ID NO: 3734528 - RNA, 18 nt, Human
uaagaucacuguuuagau

SEQ ID NO: 3734529 - RNA, 16 nt, Human
uaagaucuuagauucu

SEQ ID NO: 3734530 - RNA, 20 nt, Human
uaagaucuuagauucucugu

SEQ ID NO: 3734531 - RNA, 17 nt, Human
uaagaugacauugcuaa

SEQ ID NO: 3734532 - RNA, 19 nt, Human
uaagaugaucaucuaauuu

SEQ ID NO: 3734533 - RNA, 17 nt, Human
uaagaugcuaccuugug

SEQ ID NO: 3734534 - RNA, 24 nt, Human
uaagaugcucuaucuugcucugua

SEQ ID NO: 3734535 - RNA, 13 nt, Human
uaagaugcugggu

SEQ ID NO: 3734536 - RNA, 17 nt, Human
uaagauggaagcuucca

SEQ ID NO: 3734537 - RNA, 19 nt, Human
uaagauggaagcuuccagu

SEQ ID NO: 3734538 - RNA, 15 nt, Human
uaagauggauucuca

SEQ ID NO: 3734539 - RNA, 18 nt, Human
uaagauggauucucagau

SEQ ID NO: 3734540 - RNA, 20 nt, Human
uaagauggauucucagauau

SEQ ID NO: 3734541 - RNA, 18 nt, Human
uaagaugggcagcuaguu

SEQ ID NO: 3734542 - RNA, 12 nt, Human
uaagaugugaaa

SEQ ID NO: 3734543 - RNA, 16 nt, Human
uaagaugugaaaauua

SEQ ID NO: 3734544 - RNA, 18 nt, Human
uaagaugugauauucuaa

SEQ ID NO: 3734545 - RNA, 19 nt, Human
uaagaugugauauucuaag

SEQ ID NO: 3734546 - RNA, 21 nt, Human
uaagaugugauauucuaagac

SEQ ID NO: 3734547 - RNA, 22 nt, Human
uaagaugugauauucuaagacu

SEQ ID NO: 3734548 - RNA, 17 nt, Human
uaagauguguucuuauu

SEQ ID NO: 3734549 - RNA, 14 nt, Human
uaagauguuauauu

SEQ ID NO: 3734550 - RNA, 15 nt, Human
uaagauguuauauuu

SEQ ID NO: 3734551 - RNA, 19 nt, Human
uaagauguuauauuuuucu

SEQ ID NO: 3734552 - RNA, 17 nt, Human
uaagauguucacugugg

SEQ ID NO: 3734553 - RNA, 19 nt, Human
uaagauuacaaaucagaag

SEQ ID NO: 3734554 - RNA, 13 nt, Human
uaagauuagaaug

SEQ ID NO: 3734555 - RNA, 18 nt, Human
uaagauuagaaugaaaau

SEQ ID NO: 3734556 - RNA, 15 nt, Human
uaagauuauaauugu

SEQ ID NO: 3734557 - RNA, 15 nt, Human
uaagauuauagauuc

SEQ ID NO: 3734558 - RNA, 16 nt, Human
uaagauuauagauucu

SEQ ID NO: 3734559 - RNA, 17 nt, Human
uaagauuauagauucua

SEQ ID NO: 3734560 - RNA, 18 nt, Human
uaagauuauagauucuaa

SEQ ID NO: 3734561 - RNA, 19 nt, Human
uaagauuauagauucuaaa

SEQ ID NO: 3734562 - RNA, 23 nt, Human
uaagauuauagauucuaaagauu

SEQ ID NO: 3734563 - RNA, 16 nt, Human
uaagauuaucugggga

SEQ ID NO: 3734564 - RNA, 14 nt, Human
uaagauucauauuu

SEQ ID NO: 3734565 - RNA, 14 nt, Human
uaagauuccuuuuc

SEQ ID NO: 3734566 - RNA, 11 nt, Human
uaagauucuaa

SEQ ID NO: 3734567 - RNA, 12 nt, Human
uaagauucuaau

SEQ ID NO: 3734568 - RNA, 14 nt, Human
uaagauucuaauga

SEQ ID NO: 3734569 - RNA, 15 nt, Human
uaagauucuaaugau

SEQ ID NO: 3734570 - RNA, 13 nt, Human
uaagauucuagau

SEQ ID NO: 3734571 - RNA, 13 nt, Human
uaagauucugauu

SEQ ID NO: 3734572 - RNA, 13 nt, Human
uaagauucuuggu

SEQ ID NO: 3734573 - RNA, 20 nt, Human
uaagauucuugguauuugga

SEQ ID NO: 3734574 - RNA, 14 nt, Human
uaagauucuuuuaa

SEQ ID NO: 3734575 - RNA, 23 nt, Human
uaagauugauaucuauaaaauag

SEQ ID NO: 3734576 - RNA, 21 nt, Human
uaagauuuaauuugccaaaau

SEQ ID NO: 3734577 - RNA, 15 nt, Human
uaagauuuguuuuua

SEQ ID NO: 3734578 - RNA, 18 nt, Human
uaagauuuguuuuuaaac

SEQ ID NO: 3734579 - RNA, 20 nt, Human
uaagauuuguuuuuaaacug

SEQ ID NO: 3734580 - RNA, 23 nt, Human
uaagauuuguuuuuaaacuguac

SEQ ID NO: 3734581 - RNA, 14 nt, Human
uaagauuuuacaaa

SEQ ID NO: 3734582 - RNA, 20 nt, Human
uaagauuuuucucaaaguuu

SEQ ID NO: 3734583 - RNA, 21 nt, Human
uaagauuuuucucaaaguuuu

SEQ ID NO: 3734584 - RNA, 21 nt, Human
uaagcaaagcacccauuucaa

SEQ ID NO: 3734585 - RNA, 19 nt, Human
uaagcaaaggggacagcug

SEQ ID NO: 3734586 - RNA, 22 nt, Human
uaagcaaaggggacagcugugu

SEQ ID NO: 3734587 - RNA, 12 nt, Human
uaagcaaauacu

SEQ ID NO: 3734588 - RNA, 17 nt, Human
uaauauggguucuuuuu

SEQ ID NO: 3734589 - RNA, 15 nt, Human
uaauauguauuuuau

SEQ ID NO: 3734590 - RNA, 23 nt, Human
uaauauguuaaccucagugucau

SEQ ID NO: 3734591 - RNA, 17 nt, Human
uaauauuaaaagucaca

SEQ ID NO: 3734592 - RNA, 14 nt, Human
uaauauuaaagcca

SEQ ID NO: 3734593 - RNA, 16 nt, Human
uaauauuaaagccaug

SEQ ID NO: 3734594 - RNA, 21 nt, Human
uaauauuaaagccauguuuau

SEQ ID NO: 3734595 - RNA, 22 nt, Human
uaauauuaauuuucuacaaaua

SEQ ID NO: 3734596 - RNA, 19 nt, Human
uaauauuaccuaaugaaag

SEQ ID NO: 3734597 - RNA, 22 nt, Human
uaauauuaccuaaugaaaguga

SEQ ID NO: 3734598 - RNA, 17 nt, Human
uaauauugaaaauugaa

SEQ ID NO: 3734599 - RNA, 21 nt, Human
uaauauugaaaauugaaaagu

SEQ ID NO: 3734600 - RNA, 18 nt, Human
uaauauugacuuguauau

SEQ ID NO: 3734601 - RNA, 14 nt, Human
uaauauugagaaag

SEQ ID NO: 3734602 - RNA, 13 nt, Human
uaauauuuaaaca

SEQ ID NO: 3734603 - RNA, 13 nt, Human
uaauauuuaacau

SEQ ID NO: 3734604 - RNA, 14 nt, Human
uaauauuuaaugga

SEQ ID NO: 3734605 - RNA, 15 nt, Human
uaauauuuacaaugu

SEQ ID NO: 3734606 - RNA, 16 nt, Human
uaauauuuauauauuu

SEQ ID NO: 3734607 - RNA, 16 nt, Human
uaauauuuauugcuuu

SEQ ID NO: 3734608 - RNA, 14 nt, Human
uaauauuugcugac

SEQ ID NO: 3734609 - RNA, 13 nt, Human
uaauauuuugcac

SEQ ID NO: 3734610 - RNA, 17 nt, Human
uaauauuuuuacaugca

SEQ ID NO: 3734611 - RNA, 21 nt, Human
uaaucaaaagggaaaagaaga

SEQ ID NO: 3734612 - RNA, 18 nt, Human
uaaucaaagccagggucu

SEQ ID NO: 3734613 - RNA, 18 nt, Human
uaaucaagagccuuaaaa

SEQ ID NO: 3734614 - RNA, 23 nt, Human
uaaucaagagccuuaaaacauca

SEQ ID NO: 3734615 - RNA, 14 nt, Human
uaaucaaguugaau

SEQ ID NO: 3734616 - RNA, 22 nt, Human
uaaucaauaaacgauuuaauuc

SEQ ID NO: 3734617 - RNA, 18 nt, Human
uaaucaauguuucuucua

SEQ ID NO: 3734618 - RNA, 23 nt, Human
uaaucaauuaauuuuuuuauugu

SEQ ID NO: 3734619 - RNA, 20 nt, Human
uaaucaauuuaaacccauuu

SEQ ID NO: 3734620 - RNA, 15 nt, Human
uaaucaccauguaag

SEQ ID NO: 3734621 - RNA, 15 nt, Human
uaaucacgcuuuccu

SEQ ID NO: 3734622 - RNA, 13 nt, Human
uaaucacugugua

SEQ ID NO: 3734623 - RNA, 16 nt, Human
uaaucacuguguauau

SEQ ID NO: 3734624 - RNA, 20 nt, Human
uaaucacuguguauauuuga

SEQ ID NO: 3734625 - RNA, 21 nt, Human
uaaucacuguguauauuugau

SEQ ID NO: 3734626 - RNA, 20 nt, Human
uaaucagaaauuuuuaucag

SEQ ID NO: 3734627 - RNA, 22 nt, Human
uaaucagaauggaagagagaaa

SEQ ID NO: 3734628 - RNA, 15 nt, Human
uaaucaggcugaggu

SEQ ID NO: 3734629 - RNA, 20 nt, Human
uaaucagggaccaccagagg

SEQ ID NO: 3734630 - RNA, 15 nt, Human
uaaucagugucucac

SEQ ID NO: 3734631 - RNA, 16 nt, Human
uaaucagugucucaca

SEQ ID NO: 3734632 - RNA, 17 nt, Human
uaaucagugugucuaaa

SEQ ID NO: 3734633 - RNA, 18 nt, Human
uaaucagugugucuaaau

SEQ ID NO: 3734634 - RNA, 21 nt, Human
uaaucauauaaauagaaugua

SEQ ID NO: 3734635 - RNA, 23 nt, Human
uaaucaucuaagucaguacccac

SEQ ID NO: 3734636 - RNA, 17 nt, Human
uaaucaucuauaaagaa

SEQ ID NO: 3734637 - RNA, 21 nt, Human
uaaucaugaaauuacuuauca

SEQ ID NO: 3734638 - RNA, 13 nt, Human
uaaucaugaaugu

SEQ ID NO: 3734639 - RNA, 22 nt, Human
uaaucauucuuauuucaugaaa

SEQ ID NO: 3734640 - RNA, 15 nt, Human
uaaucauugccuggu

SEQ ID NO: 3734641 - RNA, 19 nt, Human
uaaucauuucuugggcccu

SEQ ID NO: 3734642 - RNA, 19 nt, Human
uaaucauuuguuuacauuu

SEQ ID NO: 3734643 - RNA, 21 nt, Human
uaaucauuuguuuacauuuga

SEQ ID NO: 3734644 - RNA, 13 nt, Human
uaaucauuuucau

SEQ ID NO: 3734645 - RNA, 18 nt, Human
uaaucauuuucauuccua

SEQ ID NO: 3734646 - RNA, 19 nt, Human
uaauccaauggguuuuucc

SEQ ID NO: 3734647 - RNA, 23 nt, Human
uaauccaggcagauccaggacua

SEQ ID NO: 3734648 - RNA, 14 nt, Human
uaaucccagcaauu

SEQ ID NO: 3734649 - RNA, 19 nt, Human
uaaucccagcacuuuggga

SEQ ID NO: 3734650 - RNA, 21 nt, Human
uaaucccagcaugcugagauu

SEQ ID NO: 3734651 - RNA, 20 nt, Human
uaaucccagcuacucaggag

SEQ ID NO: 3734652 - RNA, 17 nt, Human
uaauccccaguaaaauu

SEQ ID NO: 3734653 - RNA, 19 nt, Human
uaauccccaguucgccugg

SEQ ID NO: 3734654 - RNA, 14 nt, Human
uaauccccuucucc

SEQ ID NO: 3734655 - RNA, 13 nt, Human
uaaucccugcuuu

SEQ ID NO: 3734656 - RNA, 14 nt, Human
uaaucccugggcau

SEQ ID NO: 3734657 - RNA, 19 nt, Human
uaaucccugggcauugcuu

SEQ ID NO: 3734658 - RNA, 21 nt, Human
uaauccgaaucucuuuuugcu

SEQ ID NO: 3734659 - RNA, 16 nt, Human
uaauccgccaauauua

SEQ ID NO: 3734660 - RNA, 17 nt, Human
uaauccuagcugugugc

SEQ ID NO: 3734661 - RNA, 22 nt, Human
uaauccuguaggaagguacugu

SEQ ID NO: 3734662 - RNA, 19 nt, Human
uaauccuucuaguuuccca

SEQ ID NO: 3734663 - RNA, 18 nt, Human
uaaucgcuuaaagauguu

SEQ ID NO: 3734664 - RNA, 16 nt, Human
uaaucguuaugugugu

SEQ ID NO: 3734665 - RNA, 19 nt, Human
uaaucguuauguguguaua

SEQ ID NO: 3734666 - RNA, 16 nt, Human
uaaucuacugcauuua

SEQ ID NO: 3734667 - RNA, 22 nt, Human
uaaucuagaacacaggcaaaau

SEQ ID NO: 3734668 - RNA, 17 nt, Human
uaaucuagauaucgacu

SEQ ID NO: 3734669 - RNA, 17 nt, Human
uaaucuaguuuacagaa

SEQ ID NO: 3734670 - RNA, 18 nt, Human
uaaucuaguuuacagaaa

SEQ ID NO: 3734671 - RNA, 16 nt, Human
uaaucuauuggguuca

SEQ ID NO: 3734672 - RNA, 20 nt, Human
uaaucuauuggguucauuau

SEQ ID NO: 3734673 - RNA, 22 nt, Human
uaaucuauuggguucauuauug

SEQ ID NO: 3734674 - RNA, 17 nt, Human
uaaucuauuucuaugag

SEQ ID NO: 3734675 - RNA, 16 nt, Human
uaaucucagugcuuuc

SEQ ID NO: 3734676 - RNA, 19 nt, Human
uaaaugugauucaccucuu

SEQ ID NO: 3734677 - RNA, 19 nt, Human
uaaaugugcaauagaaggu

SEQ ID NO: 3734678 - RNA, 22 nt, Human
uaaaugugcaauagaaggugau

SEQ ID NO: 3734679 - RNA, 21 nt, Human
uaaaugugcauucuuuuaaaa

SEQ ID NO: 3734680 - RNA, 23 nt, Human
uaaaugugcauucuuuuaaaaga

SEQ ID NO: 3734681 - RNA, 16 nt, Human
uaaaugugccuucauu

SEQ ID NO: 3734682 - RNA, 14 nt, Human
uaaauguguacaau

SEQ ID NO: 3734683 - RNA, 20 nt, Human
uaaaugugugagugcaugua

SEQ ID NO: 3734684 - RNA, 18 nt, Human
uaaauguuaaagauguag

SEQ ID NO: 3734685 - RNA, 22 nt, Human
uaaauguuaauggauuucagaa

SEQ ID NO: 3734686 - RNA, 17 nt, Human
uaaauguuaccaaaaau

SEQ ID NO: 3734687 - RNA, 18 nt, Human
uaaauguuaguuucuugg

SEQ ID NO: 3734688 - RNA, 19 nt, Human
uaaauguuaguuucuuggu

SEQ ID NO: 3734689 - RNA, 20 nt, Human
uaaauguuaugacuauguaa

SEQ ID NO: 3734690 - RNA, 14 nt, Human
uaaauguuauguau

SEQ ID NO: 3734691 - RNA, 19 nt, Human
uaaauguuauguauauggu

SEQ ID NO: 3734692 - RNA, 15 nt, Human
uaaauguuauuucug

SEQ ID NO: 3734693 - RNA, 16 nt, Human
uaaauguuauuucugc

SEQ ID NO: 3734694 - RNA, 22 nt, Human
uaaauguucuaugguuaugaaa

SEQ ID NO: 3734695 - RNA, 15 nt, Human
uaaauguugaaagau

SEQ ID NO: 3734696 - RNA, 15 nt, Human
uaaauguugacaugg

SEQ ID NO: 3734697 - RNA, 19 nt, Human
uaaauguuucuuuuguuug

SEQ ID NO: 3734698 - RNA, 17 nt, Human
uaaauguuugacacaau

SEQ ID NO: 3734699 - RNA, 14 nt, Human
uaaauguuuuauaa

SEQ ID NO: 3734700 - RNA, 19 nt, Human
uaaauguuuuauaaguuca

SEQ ID NO: 3734701 - RNA, 14 nt, Human
uaaauguuuuguaa

SEQ ID NO: 3734702 - RNA, 16 nt, Human
uaaauguuuuguaaac

SEQ ID NO: 3734703 - RNA, 19 nt, Human
uaaauguuuuguaaacuuu

SEQ ID NO: 3734704 - RNA, 23 nt, Human
uaaauguuuuuuuuuaaagacuu

SEQ ID NO: 3734705 - RNA, 18 nt, Human
uaaauuaaaacugaauug

SEQ ID NO: 3734706 - RNA, 18 nt, Human
uaaauuaaagccuuuagu

SEQ ID NO: 3734707 - RNA, 14 nt, Human
uaaauuaaauauau

SEQ ID NO: 3734708 - RNA, 12 nt, Human
uaaauuaacuuu

SEQ ID NO: 3734709 - RNA, 15 nt, Human
uaaauuaagacaugc

SEQ ID NO: 3734710 - RNA, 12 nt, Human
uaaauuaauauc

SEQ ID NO: 3734711 - RNA, 14 nt, Human
uaaauuaauaucuu

SEQ ID NO: 3734712 - RNA, 13 nt, Human
uaaauuaaucuuu

SEQ ID NO: 3734713 - RNA, 15 nt, Human
uaaauuacauuugua

SEQ ID NO: 3734714 - RNA, 21 nt, Human
uaaauuacauuuguaauuuaa

SEQ ID NO: 3734715 - RNA, 22 nt, Human
uaaauuaccaguaaaguguaac

SEQ ID NO: 3734716 - RNA, 20 nt, Human
uaaauuacuauagcaaagua

SEQ ID NO: 3734717 - RNA, 18 nt, Human
uaaauuagaaaauauucu

SEQ ID NO: 3734718 - RNA, 21 nt, Human
uaaauuaggaauaaauaaaaa

SEQ ID NO: 3734719 - RNA, 22 nt, Human
uaaauuaggaauaaauaaaaau

SEQ ID NO: 3734720 - RNA, 23 nt, Human
uaaauuaggaggcucaacaauaa

SEQ ID NO: 3734721 - RNA, 16 nt, Human
uaaauuauaaggacug

SEQ ID NO: 3734722 - RNA, 17 nt, Human
uaaauuauaaggacugc

SEQ ID NO: 3734723 - RNA, 22 nt, Human
uaaauuauacaaauuaaaaaga

SEQ ID NO: 3734724 - RNA, 22 nt, Human
uaaauuaucaggcaaauuugca

SEQ ID NO: 3734725 - RNA, 21 nt, Human
uaaauuaugggaaucaagauu

SEQ ID NO: 3734726 - RNA, 15 nt, Human
uaaauuauguuuaua

SEQ ID NO: 3734727 - RNA, 20 nt, Human
uaaauuauguuuauauaaau

SEQ ID NO: 3734728 - RNA, 14 nt, Human
uaaauuauucaguu

SEQ ID NO: 3734729 - RNA, 17 nt, Human
uaaauuauucaguuaag

SEQ ID NO: 3734730 - RNA, 22 nt, Human
uaaauuauucaguuaagaaaaa

SEQ ID NO: 3734731 - RNA, 10 nt, Human
uaaauuauuu

SEQ ID NO: 3734732 - RNA, 20 nt, Human
uaaauucaaccacuguaaaa

SEQ ID NO: 3734733 - RNA, 23 nt, Human
uaaauucaaccacuguaaaauga

SEQ ID NO: 3734734 - RNA, 18 nt, Human
uaaauucacaaacuuuua

SEQ ID NO: 3734735 - RNA, 16 nt, Human
uaaauucacuuucauu

SEQ ID NO: 3734736 - RNA, 18 nt, Human
uaaauucacuuucauuuu

SEQ ID NO: 3734737 - RNA, 14 nt, Human
uaaauucaguccua

SEQ ID NO: 3734738 - RNA, 13 nt, Human
uaaauucauuuua

SEQ ID NO: 3734739 - RNA, 17 nt, Human
uaaauucccaacuucuc

SEQ ID NO: 3734740 - RNA, 14 nt, Human
uaaauuccucuuug

SEQ ID NO: 3734741 - RNA, 16 nt, Human
uaaauuccucuuugcu

SEQ ID NO: 3734742 - RNA, 18 nt, Human
uaaauuccucuuugcuuu

SEQ ID NO: 3734743 - RNA, 19 nt, Human
uaaauucgugauuuucaag

SEQ ID NO: 3734744 - RNA, 16 nt, Human
uaaauucuugcaaagu

SEQ ID NO: 3734745 - RNA, 18 nt, Human
uaaauucuuuuuuaaauu

SEQ ID NO: 3734746 - RNA, 13 nt, Human
uaaauugaaauau

SEQ ID NO: 3734747 - RNA, 12 nt, Human
uaaauugaauaa

SEQ ID NO: 3734748 - RNA, 17 nt, Human
uaaauugaauaauggua

SEQ ID NO: 3734749 - RNA, 12 nt, Human
uaaauugacugu

SEQ ID NO: 3734750 - RNA, 14 nt, Human
uaaauugauguuga

SEQ ID NO: 3734751 - RNA, 15 nt, Human
uaaauugauguugau

SEQ ID NO: 3734752 - RNA, 20 nt, Human
uaaauugauguugaugcaau

SEQ ID NO: 3734753 - RNA, 21 nt, Human
uaaauugauuuuuauaaauac

SEQ ID NO: 3734754 - RNA, 16 nt, Human
uaaauugcauaaagca

SEQ ID NO: 3734755 - RNA, 17 nt, Human
uaaauugcauaaagcau

SEQ ID NO: 3734756 - RNA, 19 nt, Human
uaaauugcaucacuguauc

SEQ ID NO: 3734757 - RNA, 17 nt, Human
uaaauugcuaauguugc

SEQ ID NO: 3734758 - RNA, 15 nt, Human
uaaauugcuccuuga

SEQ ID NO: 3734759 - RNA, 21 nt, Human
uaaauuggcauggaaauuuaa

SEQ ID NO: 3734760 - RNA, 23 nt, Human
uaaauugggguuuauuucagcaa

SEQ ID NO: 3734761 - RNA, 16 nt, Human
uaaauuggguucauga

SEQ ID NO: 3734762 - RNA, 21 nt, Human
uaaauuggguucaugaugcag

SEQ ID NO: 3734763 - RNA, 13 nt, Human
uaaauuguaaaac

SEQ ID NO: 3734764 - RNA, 17 nt, Human
uaaauuguauauucacu

SEQ ID NO: 3734765 - RNA, 15 nt, Human
uaaauugucuuuaaa

SEQ ID NO: 3734766 - RNA, 21 nt, Human
uaaauuguuagcuuccuuaag

SEQ ID NO: 3734767 - RNA, 20 nt, Human
uaaauuguuuaguggaaaau

SEQ ID NO: 3734768 - RNA, 14 nt, Human
uaaauuuaaagaua

SEQ ID NO: 3734769 - RNA, 22 nt, Human
uaaauuuaaagauauuguucaa

SEQ ID NO: 3734770 - RNA, 13 nt, Human
uaaauuuaaauuu

SEQ ID NO: 3734771 - RNA, 16 nt, Human
uaaauuuaaugcugcc

SEQ ID NO: 3734772 - RNA, 15 nt, Human
uaaauuuaauucuuc

SEQ ID NO: 3734773 - RNA, 13 nt, Human
uaaauuuaguguu

SEQ ID NO: 3734774 - RNA, 15 nt, Human
uaaauuuauuucaaa

SEQ ID NO: 3734775 - RNA, 17 nt, Human
uaaauuuauuucaaaaa

SEQ ID NO: 3734776 - RNA, 19 nt, Human
uaaauuuccccaacagugu

SEQ ID NO: 3734777 - RNA, 21 nt, Human
uaaauuuccccaacaguguga

SEQ ID NO: 3734778 - RNA, 18 nt, Human
uaaauuucuuaugugaca

SEQ ID NO: 3734779 - RNA, 17 nt, Human
uaaauuugacuuuucug

SEQ ID NO: 3734780 - RNA, 18 nt, Human
uaaauuugacuuuucugu

SEQ ID NO: 3734781 - RNA, 17 nt, Human
uaaauuugauacuuaua

SEQ ID NO: 3734782 - RNA, 13 nt, Human
uaaauuugcuagc

SEQ ID NO: 3734783 - RNA, 14 nt, Human
uaaauuuggcuucu

SEQ ID NO: 3734784 - RNA, 20 nt, Human
uaaauuuggggacagauuca

SEQ ID NO: 3734785 - RNA, 12 nt, Human
uaaauuuguaag

SEQ ID NO: 3734786 - RNA, 15 nt, Human
uaaauuuguaaguuu

SEQ ID NO: 3734787 - RNA, 16 nt, Human
uaaauuuguaaguuuc

SEQ ID NO: 3734788 - RNA, 14 nt, Human
uaaauuuguacuau

SEQ ID NO: 3734789 - RNA, 22 nt, Human
uaaauuuguacuauuuaacuga

SEQ ID NO: 3734790 - RNA, 12 nt, Human
uaaauuuuaaag

SEQ ID NO: 3734791 - RNA, 14 nt, Human
uaaauuuuaaagcc

SEQ ID NO: 3734792 - RNA, 15 nt, Human
uaaauuuuaauuuau

SEQ ID NO: 3734793 - RNA, 18 nt, Human
uaaauuuuacccuuuaga

SEQ ID NO: 3734794 - RNA, 14 nt, Human
uaaauuuuauaucu

SEQ ID NO: 3734795 - RNA, 16 nt, Human
uaaauuuuccuguccu

SEQ ID NO: 3734796 - RNA, 15 nt, Human
uaaauuuucugaaac

SEQ ID NO: 3734797 - RNA, 15 nt, Human
uaaauuuucuucagu

SEQ ID NO: 3734798 - RNA, 16 nt, Human
uaaauuuucuucaguu

SEQ ID NO: 3734799 - RNA, 15 nt, Human
uaaauuuugaaaagu

SEQ ID NO: 3734800 - RNA, 16 nt, Human
uaaauuuugaguucua

SEQ ID NO: 3734801 - RNA, 17 nt, Human
uaaauuuugaguucuac

SEQ ID NO: 3734802 - RNA, 13 nt, Human
uaaauuuuguaau

SEQ ID NO: 3734803 - RNA, 15 nt, Human
uaaauuuuguaauga

SEQ ID NO: 3734804 - RNA, 20 nt, Human
uaaauuuugucuuuaacuca

SEQ ID NO: 3734805 - RNA, 13 nt, Human
uaaauuuugugau

SEQ ID NO: 3734806 - RNA, 16 nt, Human
uaaauuuuuuguugac

SEQ ID NO: 3734807 - RNA, 14 nt, Human
uaaauuuuuuuccu

SEQ ID NO: 3734808 - RNA, 15 nt, Human
uaacaaaagaugaaa

SEQ ID NO: 3734809 - RNA, 21 nt, Human
uaacaaaaguucccugaaaca

SEQ ID NO: 3734810 - RNA, 20 nt, Human
uaacaaaaucacuuccauag

SEQ ID NO: 3734811 - RNA, 13 nt, Human
uaacaaaauggac

SEQ ID NO: 3734812 - RNA, 15 nt, Human
uaacaaaauguaugu

SEQ ID NO: 3734813 - RNA, 13 nt, Human
uaacaaacaaauu

SEQ ID NO: 3734814 - RNA, 21 nt, Human
uaacaaacaucacucugcugc

SEQ ID NO: 3734815 - RNA, 20 nt, Human
uaacaaaugccaaauuaaaa

SEQ ID NO: 3734816 - RNA, 20 nt, Human
uaacaaaugcuauuaaagug

SEQ ID NO: 3734817 - RNA, 13 nt, Human
uaacaaauucuga

SEQ ID NO: 3734818 - RNA, 16 nt, Human
uaacaacuaugauuug

SEQ ID NO: 3734819 - RNA, 21 nt, Human
uaacaacuaugauuuggaaaa

SEQ ID NO: 3734820 - RNA, 22 nt, Human
uaacaacuaugauuuggaaaau

SEQ ID NO: 3734821 - RNA, 15 nt, Human
uaacaacugcccagu

SEQ ID NO: 3734822 - RNA, 14 nt, Human
uaacaagaaacuca

SEQ ID NO: 3734823 - RNA, 13 nt, Human
uaacaagaaagga

SEQ ID NO: 3734824 - RNA, 15 nt, Human
uaacaagaaaggaga

SEQ ID NO: 3734825 - RNA, 19 nt, Human
uaacaagaacuuuaaauug

SEQ ID NO: 3734826 - RNA, 18 nt, Human
uaacaagaagaugaaugg

SEQ ID NO: 3734827 - RNA, 20 nt, Human
uaaucucucugcagcugccg

SEQ ID NO: 3734828 - RNA, 16 nt, Human
uaaucucuguuaugua

SEQ ID NO: 3734829 - RNA, 17 nt, Human
uaaucucuguuauguac

SEQ ID NO: 3734830 - RNA, 24 nt, Human
uaaucucuguuauguacuguacua

SEQ ID NO: 3734831 - RNA, 15 nt, Human
uaaucugaaauucua

SEQ ID NO: 3734832 - RNA, 22 nt, Human
uaaucugaaauucuaaagagca

SEQ ID NO: 3734833 - RNA, 17 nt, Human
uaaucugaauaaagugu

SEQ ID NO: 3734834 - RNA, 23 nt, Human
uaaucugaauaaaguguaacaau

SEQ ID NO: 3734835 - RNA, 21 nt, Human
uaaucugcaaagaaugagaag

SEQ ID NO: 3734836 - RNA, 16 nt, Human
uaaucuggacuccucu

SEQ ID NO: 3734837 - RNA, 19 nt, Human
uaaucuggacuccucuguc

SEQ ID NO: 3734838 - RNA, 17 nt, Human
uaaucugggaagggaag

SEQ ID NO: 3734839 - RNA, 22 nt, Human
uaaucuguacauuuuguuguaa

SEQ ID NO: 3734840 - RNA, 17 nt, Human
uaaucuguagggcugga

SEQ ID NO: 3734841 - RNA, 15 nt, Human
uaaucugucaaaaca

SEQ ID NO: 3734842 - RNA, 20 nt, Human
uaaucugucaaaacacugug

SEQ ID NO: 3734843 - RNA, 21 nt, Human
uaaucugucaaaacacugugg

SEQ ID NO: 3734844 - RNA, 21 nt, Human
uaaucugugcuguuucaaagu

SEQ ID NO: 3734845 - RNA, 23 nt, Human
uaaucugugcuguuucaaaguuc

SEQ ID NO: 3734846 - RNA, 19 nt, Human
uaaucuguguacaaagaaa

SEQ ID NO: 3734847 - RNA, 17 nt, Human
uaaucuuaaucuguuua

SEQ ID NO: 3734848 - RNA, 13 nt, Human
uaaucuuagugua

SEQ ID NO: 3734849 - RNA, 21 nt, Human
uaaucuuauuagggagaaaau

SEQ ID NO: 3734850 - RNA, 22 nt, Human
uaaucuuauucauuuucucuaa

SEQ ID NO: 3734851 - RNA, 16 nt, Human
uaaucuucaaagccuu

SEQ ID NO: 3734852 - RNA, 17 nt, Human
uaaucuucaaagccuuc

SEQ ID NO: 3734853 - RNA, 19 nt, Human
uaaucuugugaaaauaauu

SEQ ID NO: 3734854 - RNA, 17 nt, Human
uaaucuuguuucugaaa

SEQ ID NO: 3734855 - RNA, 17 nt, Human
uaaucuuuaauuuuaca

SEQ ID NO: 3734856 - RNA, 14 nt, Human
uaaucuuucaaacc

SEQ ID NO: 3734857 - RNA, 16 nt, Human
uaaucuuucaaaccag

SEQ ID NO: 3734858 - RNA, 21 nt, Human
uaaucuuucuuuaccugagac

SEQ ID NO: 3734859 - RNA, 23 nt, Human
uaaucuuucuuuaccugagacca

SEQ ID NO: 3734860 - RNA, 14 nt, Human
uaaucuuuucugaa

SEQ ID NO: 3734861 - RNA, 13 nt, Human
uaaugaaaacaau

SEQ ID NO: 3734862 - RNA, 15 nt, Human
uaaugaaaaugucag

SEQ ID NO: 3734863 - RNA, 14 nt, Human
uaaugaaacuugga

SEQ ID NO: 3734864 - RNA, 14 nt, Human
uaaugaacaaaugg

SEQ ID NO: 3734865 - RNA, 16 nt, Human
uaaugaagaaagugga

SEQ ID NO: 3734866 - RNA, 16 nt, Human
uaaugaagaucuaaau

SEQ ID NO: 3734867 - RNA, 12 nt, Human
uaaugaauaccu

SEQ ID NO: 3734868 - RNA, 13 nt, Human
uaaugaauaccuu

SEQ ID NO: 3734869 - RNA, 18 nt, Human
uaaugaauaccuuagugc

SEQ ID NO: 3734870 - RNA, 12 nt, Human
uaaugaaugacu

SEQ ID NO: 3734871 - RNA, 15 nt, Human
uaaugaaugcauaaa

SEQ ID NO: 3734872 - RNA, 16 nt, Human
uaaugacaugccuaua

SEQ ID NO: 3734873 - RNA, 15 nt, Human
uaaugacuuaagcac

SEQ ID NO: 3734874 - RNA, 17 nt, Human
uaaugagcaauaucugc

SEQ ID NO: 3734875 - RNA, 13 nt, Human
uaaugaggaaacu

SEQ ID NO: 3734876 - RNA, 16 nt, Human
uaaugaguuucuuuua

SEQ ID NO: 3734877 - RNA, 23 nt, Human
uaaugauaacuggaaacuucagc

SEQ ID NO: 3734878 - RNA, 23 nt, Human
uaaugaugucguuugaaucacag

SEQ ID NO: 3734879 - RNA, 11 nt, Human
uaaugauguuu

SEQ ID NO: 3734880 - RNA, 14 nt, Human
uaaugcaaagaauc

SEQ ID NO: 3734881 - RNA, 21 nt, Human
uaaugcaguaugguacauuuu

SEQ ID NO: 3734882 - RNA, 17 nt, Human
uaaugcauguuaggaaa

SEQ ID NO: 3734883 - RNA, 16 nt, Human
uaaugcauuaaaccug

SEQ ID NO: 3734884 - RNA, 17 nt, Human
uaaugcauuaaaccugu

SEQ ID NO: 3734885 - RNA, 18 nt, Human
uaaugcauuaaaccuguc

SEQ ID NO: 3734886 - RNA, 15 nt, Human
uaaugccuuuguaac

SEQ ID NO: 3734887 - RNA, 18 nt, Human
uaaugcgauuuuauuacu

SEQ ID NO: 3734888 - RNA, 19 nt, Human
uaaugcgugcauaccacuu

SEQ ID NO: 3734889 - RNA, 17 nt, Human
uaaugcuaaucuuguga

SEQ ID NO: 3734890 - RNA, 19 nt, Human
uaaugcuaauuuaaagaga

SEQ ID NO: 3734891 - RNA, 14 nt, Human
uaaugcuacaauuu

SEQ ID NO: 3734892 - RNA, 15 nt, Human
uaaugcuacaauuuu

SEQ ID NO: 3734893 - RNA, 16 nt, Human
uaaugcuauuugaaca

SEQ ID NO: 3734894 - RNA, 17 nt, Human
uaaugcuauuugaacaa

SEQ ID NO: 3734895 - RNA, 24 nt, Human
uaaugcugcaaacuuaauguucuu

SEQ ID NO: 3734896 - RNA, 20 nt, Human
uaaugcuuaagggaguuuaa

SEQ ID NO: 3734897 - RNA, 16 nt, Human
uaaugcuuaauuucua

SEQ ID NO: 3734898 - RNA, 19 nt, Human
uaaugcuuagagaauguuc

SEQ ID NO: 3734899 - RNA, 20 nt, Human
uaaugcuucauucaauauug

SEQ ID NO: 3734900 - RNA, 21 nt, Human
uaaugcuucuuucauuuucug

SEQ ID NO: 3734901 - RNA, 19 nt, Human
uaaugcuuucacaacauuu

SEQ ID NO: 3734902 - RNA, 21 nt, Human
uaauggaaaaaaaaaaaagag

SEQ ID NO: 3734903 - RNA, 20 nt, Human
uaauggaaaaugauuuuacu

SEQ ID NO: 3734904 - RNA, 21 nt, Human
uaauggaaaaugccaugaauu

SEQ ID NO: 3734905 - RNA, 17 nt, Human
uaauggaagagaaaucu

SEQ ID NO: 3734906 - RNA, 13 nt, Human
uaauggacacuuu

SEQ ID NO: 3734907 - RNA, 23 nt, Human
uaauggacaugagauaauguuag

SEQ ID NO: 3734908 - RNA, 16 nt, Human
uaauggaugaaaucau

SEQ ID NO: 3734909 - RNA, 14 nt, Human
uaauggauuaaauu

SEQ ID NO: 3734910 - RNA, 22 nt, Human
uaauggauuaaauuuaauucuu

SEQ ID NO: 3734911 - RNA, 15 nt, Human
uaauggauuguuaau

SEQ ID NO: 3734912 - RNA, 13 nt, Human
uaauggcacugau

SEQ ID NO: 3734913 - RNA, 12 nt, Human
uaauggcagcag

SEQ ID NO: 3734914 - RNA, 14 nt, Human
uaauggcagcagaa

SEQ ID NO: 3734915 - RNA, 16 nt, Human
uaauggcaugucagac

SEQ ID NO: 3734916 - RNA, 19 nt, Human
uaauggccaugguaccccc

SEQ ID NO: 3734917 - RNA, 21 nt, Human
uaauggccaugguacccccuu

SEQ ID NO: 3734918 - RNA, 15 nt, Human
uaaugggauuuucuu

SEQ ID NO: 3734919 - RNA, 15 nt, Human
uaauggggguagcag

SEQ ID NO: 3734920 - RNA, 20 nt, Human
uaauggggguagcagcugga

SEQ ID NO: 3734921 - RNA, 21 nt, Human
uaauggggguagcagcuggac

SEQ ID NO: 3734922 - RNA, 18 nt, Human
uaaugguccacacccaau

SEQ ID NO: 3734923 - RNA, 14 nt, Human
uaauggucccaucc

SEQ ID NO: 3734924 - RNA, 16 nt, Human
uaauggucccauccag

SEQ ID NO: 3734925 - RNA, 21 nt, Human
uaauggucccauccaggcagu

SEQ ID NO: 3734926 - RNA, 16 nt, Human
uaauggugccuucauu

SEQ ID NO: 3734927 - RNA, 18 nt, Human
uaaugguguaaccugaga

SEQ ID NO: 3734928 - RNA, 15 nt, Human
uaaugguuugaauau

SEQ ID NO: 3734929 - RNA, 18 nt, Human
uaauguaaagauuugcuu

SEQ ID NO: 3734930 - RNA, 21 nt, Human
uaauguaacugcucuugggca

SEQ ID NO: 3734931 - RNA, 15 nt, Human
uaauguaagacaaau

SEQ ID NO: 3734932 - RNA, 13 nt, Human
uaauguacugcau

SEQ ID NO: 3734933 - RNA, 14 nt, Human
uaauguagccaugg

SEQ ID NO: 3734934 - RNA, 23 nt, Human
uaauguagcguguuuacaugugu

SEQ ID NO: 3734935 - RNA, 17 nt, Human
uaauguauguuaccaaa

SEQ ID NO: 3734936 - RNA, 14 nt, Human
uaauguauucauau

SEQ ID NO: 3734937 - RNA, 19 nt, Human
uaauguauuuuauuguaac

SEQ ID NO: 3734938 - RNA, 13 nt, Human
uaaugucaaacuu

SEQ ID NO: 3734939 - RNA, 15 nt, Human
uaaugucacaggcag

SEQ ID NO: 3734940 - RNA, 16 nt, Human
uaaugucacaggcagg

SEQ ID NO: 3734941 - RNA, 17 nt, Human
uaaugucacaggcaggu

SEQ ID NO: 3734942 - RNA, 22 nt, Human
uaaugucaccaccuucccagcu

SEQ ID NO: 3734943 - RNA, 16 nt, Human
uaaugucauaaaguga

SEQ ID NO: 3734944 - RNA, 19 nt, Human
uaaugucucugugagacuc

SEQ ID NO: 3734945 - RNA, 13 nt, Human
uaaugucuucauu

SEQ ID NO: 3734946 - RNA, 13 nt, Human
uaaugucuugagc

SEQ ID NO: 3734947 - RNA, 13 nt, Human
uaaugucuuguua

SEQ ID NO: 3734948 - RNA, 14 nt, Human
uaaugucuuguuaa

SEQ ID NO: 3734949 - RNA, 20 nt, Human
uaaugucuuguuaauauucu

SEQ ID NO: 3734950 - RNA, 22 nt, Human
uaaugucuuguuaauauucuuu

SEQ ID NO: 3734951 - RNA, 13 nt, Human
uaaugugaaaugu

SEQ ID NO: 3734952 - RNA, 14 nt, Human
uaaugugaaaugua

SEQ ID NO: 3734953 - RNA, 19 nt, Human
uaaugugaaauguaacugu

SEQ ID NO: 3734954 - RNA, 23 nt, Human
uaaugugaaauguaacuguccgu

SEQ ID NO: 3734955 - RNA, 10 nt, Human
uaaugugaac

SEQ ID NO: 3734956 - RNA, 12 nt, Human
uaaugugaacuu

SEQ ID NO: 3734957 - RNA, 20 nt, Human
uaaugugaugauguaauuga

SEQ ID NO: 3734958 - RNA, 18 nt, Human
uaaugugcuguguaaagu

SEQ ID NO: 3734959 - RNA, 22 nt, Human
uaaugugcuguguaaaguuagu

SEQ ID NO: 3734960 - RNA, 19 nt, Human
uaauguggaagaaaauggu

SEQ ID NO: 3734961 - RNA, 17 nt, Human
uaaugugggaagaaaca

SEQ ID NO: 3734962 - RNA, 19 nt, Human
uaaugugucaucuagcauu

SEQ ID NO: 3734963 - RNA, 19 nt, Human
uaaugugugguggccucag

SEQ ID NO: 3734964 - RNA, 14 nt, Human
uaauguguguaugu

SEQ ID NO: 3734965 - RNA, 15 nt, Human
uaauguguguaugug

SEQ ID NO: 3734966 - RNA, 17 nt, Human
uaauguguguaugugua

SEQ ID NO: 3734967 - RNA, 13 nt, Human
uaauguuaaauuu

SEQ ID NO: 3734968 - RNA, 16 nt, Human
uaauguuaaauuugua

SEQ ID NO: 3734969 - RNA, 20 nt, Human
uaauguuaaauuuguaaguu

SEQ ID NO: 3734970 - RNA, 22 nt, Human
uaauguuaaauuuguaaguuuc

SEQ ID NO: 3734971 - RNA, 13 nt, Human
uaauguuaauauu

SEQ ID NO: 3734972 - RNA, 13 nt, Human
uaauguuacugau

SEQ ID NO: 3734973 - RNA, 22 nt, Human
uaauguucugaauaauuucuua

SEQ ID NO: 3734974 - RNA, 18 nt, Human
uaauguugaacaaaauaa

SEQ ID NO: 3734975 - RNA, 13 nt, Human
uaauguugauuuc

SEQ ID NO: 3734976 - RNA, 18 nt, Human
uaauguugauuucuaguu

SEQ ID NO: 3734977 - RNA, 22 nt, Human
uaauguugcuggaucaggaagc

SEQ ID NO: 3734978 - RNA, 15 nt, Human
uaauguuuaaaacau

SEQ ID NO: 3734979 - RNA, 20 nt, Human
uaauguuuaaaauuucuuag

SEQ ID NO: 3734980 - RNA, 22 nt, Human
uaauguuuaagcagaauuggaa

SEQ ID NO: 3734981 - RNA, 17 nt, Human
uaauguuuaugagccag

SEQ ID NO: 3734982 - RNA, 16 nt, Human
uaauguuuauuaaaug

SEQ ID NO: 3734983 - RNA, 15 nt, Human
uaauguuucaaacau

SEQ ID NO: 3734984 - RNA, 22 nt, Human
uaauguuucaaacauauauaac

SEQ ID NO: 3734985 - RNA, 11 nt, Human
uaauguuuccu

SEQ ID NO: 3734986 - RNA, 13 nt, Human
uaauguuugcuau

SEQ ID NO: 3734987 - RNA, 16 nt, Human
uaauguuuuaaaugua

SEQ ID NO: 3734988 - RNA, 17 nt, Human
uaauguuuuaaauguac

SEQ ID NO: 3734989 - RNA, 19 nt, Human
uaauguuuucuuugcaaag

SEQ ID NO: 3734990 - RNA, 23 nt, Human
uaauguuuuuugccacagcuuuu

SEQ ID NO: 3734991 - RNA, 14 nt, Human
uaauuaaaaaauuu

SEQ ID NO: 3734992 - RNA, 15 nt, Human
uaauuaaaaaguuaa

SEQ ID NO: 3734993 - RNA, 20 nt, Human
uaauuaaaagaauauuuuaa

SEQ ID NO: 3734994 - RNA, 21 nt, Human
uaauuaaacauugugaucauu

SEQ ID NO: 3734995 - RNA, 15 nt, Human
uaauuaaacuguuaa

SEQ ID NO: 3734996 - RNA, 21 nt, Human
uaauuaaauaaaaaucugugg

SEQ ID NO: 3734997 - RNA, 19 nt, Human
uaauuaaauuaugguauua

SEQ ID NO: 3734998 - RNA, 14 nt, Human
uaauuaacauauaa

SEQ ID NO: 3734999 - RNA, 14 nt, Human
uaauuaacauguua

SEQ ID NO: 3735000 - RNA, 19 nt, Human
uaauuaacauguuaaacca

SEQ ID NO: 3735001 - RNA, 18 nt, Human
uaauuaaccuuacuaauu

SEQ ID NO: 3735002 - RNA, 18 nt, Human
uaauuaagacugaaaaua

SEQ ID NO: 3735003 - RNA, 14 nt, Human
uaauuaaguacuau

SEQ ID NO: 3735004 - RNA, 20 nt, Human
uaauuaauauauuaaaauuc

SEQ ID NO: 3735005 - RNA, 22 nt, Human
uaauuaauauauuaaaauucca

SEQ ID NO: 3735006 - RNA, 17 nt, Human
uaauuaaugaaauaucu

SEQ ID NO: 3735007 - RNA, 14 nt, Human
uaauuaauuucagu

SEQ ID NO: 3735008 - RNA, 13 nt, Human
uaauuaauuugau

SEQ ID NO: 3735009 - RNA, 23 nt, Human
uaauuaauuugauuaacaaauau

SEQ ID NO: 3735010 - RNA, 21 nt, Human
uaauuaccaaccuguuaccua

SEQ ID NO: 3735011 - RNA, 16 nt, Human
uaauuaccuacucugg

SEQ ID NO: 3735012 - RNA, 23 nt, Human
uaauuagauccauuaauuuaaau

SEQ ID NO: 3735013 - RNA, 13 nt, Human
uaauuagcauucu

SEQ ID NO: 3735014 - RNA, 14 nt, Human
uaauuagcauucug

SEQ ID NO: 3735015 - RNA, 14 nt, Human
uaauuaggaaaaaa

SEQ ID NO: 3735016 - RNA, 15 nt, Human
uaauuaggguacauu

SEQ ID NO: 3735017 - RNA, 21 nt, Human
uaauuaggguacauuuauaau

SEQ ID NO: 3735018 - RNA, 22 nt, Human
uaauuagguuaacuauguacaa

SEQ ID NO: 3735019 - RNA, 14 nt, Human
uaauuagugcuaag

SEQ ID NO: 3735020 - RNA, 15 nt, Human
uaauuauaaucucuu

SEQ ID NO: 3735021 - RNA, 20 nt, Human
uaauuauacccccugcaaag

SEQ ID NO: 3735022 - RNA, 23 nt, Human
uaauuauaccgcuaucauuccaa

SEQ ID NO: 3735023 - RNA, 16 nt, Human
uaauuauauaacugua

SEQ ID NO: 3735024 - RNA, 17 nt, Human
uaauuauauaacuguau

SEQ ID NO: 3735025 - RNA, 20 nt, Human
uaauuauauaacuguauuug

SEQ ID NO: 3735026 - RNA, 13 nt, Human
uaauuauaucuga

SEQ ID NO: 3735027 - RNA, 15 nt, Human
uaauuauauguugua

SEQ ID NO: 3735028 - RNA, 21 nt, Human
uaauuaugacaguuauacugu

SEQ ID NO: 3735029 - RNA, 14 nt, Human
uaauuaugauuugg

SEQ ID NO: 3735030 - RNA, 22 nt, Human
uaauuaugggaauaauugcuuu

SEQ ID NO: 3735031 - RNA, 21 nt, Human
uaauuaugguuaguagaggua

SEQ ID NO: 3735032 - RNA, 15 nt, Human
uaauuauguagcucu

SEQ ID NO: 3735033 - RNA, 16 nt, Human
uaauuauguagcucuu

SEQ ID NO: 3735034 - RNA, 19 nt, Human
uaauuauuaacuacauuua

SEQ ID NO: 3735035 - RNA, 16 nt, Human
uaauuauuauaaaaau

SEQ ID NO: 3735036 - RNA, 12 nt, Human
uaauuauuauuc

SEQ ID NO: 3735037 - RNA, 14 nt, Human
uaauuauuauucuu

SEQ ID NO: 3735038 - RNA, 16 nt, Human
uaauuauugauguuuu

SEQ ID NO: 3735039 - RNA, 15 nt, Human
uaauuauuguuuaua

SEQ ID NO: 3735040 - RNA, 18 nt, Human
uaauuauuucacuuuaga

SEQ ID NO: 3735041 - RNA, 12 nt, Human
uaauuauuugaa

SEQ ID NO: 3735042 - RNA, 14 nt, Human
uaauuauuuuaauu

SEQ ID NO: 3735043 - RNA, 15 nt, Human
uaauuauuuuaauua

SEQ ID NO: 3735044 - RNA, 13 nt, Human
uaauuauuuuggu

SEQ ID NO: 3735045 - RNA, 20 nt, Human
uaauuauuuugguacuuuua

SEQ ID NO: 3735046 - RNA, 19 nt, Human
uaauucaaagcaccaaaau

SEQ ID NO: 3735047 - RNA, 16 nt, Human
uaauucaauucaaagc

SEQ ID NO: 3735048 - RNA, 18 nt, Human
uaauucagcacugauuuc

SEQ ID NO: 3735049 - RNA, 19 nt, Human
uaauucagcacugauuuca

SEQ ID NO: 3735050 - RNA, 18 nt, Human
uaauucagccauguacag

SEQ ID NO: 3735051 - RNA, 14 nt, Human
uaauucauguuucu

SEQ ID NO: 3735052 - RNA, 16 nt, Human
uaauuccaauaugaug

SEQ ID NO: 3735053 - RNA, 17 nt, Human
uaauuccacagcugcuc

SEQ ID NO: 3735054 - RNA, 11 nt, Human
uaauuccauga

SEQ ID NO: 3735055 - RNA, 18 nt, Human
uaauucccauuuugcaaa

SEQ ID NO: 3735056 - RNA, 19 nt, Human
uaauuccuaccucccugca

SEQ ID NO: 3735057 - RNA, 21 nt, Human
uaauuccuauauccugugacu

SEQ ID NO: 3735058 - RNA, 18 nt, Human
uaauuccuguuuuuauua

SEQ ID NO: 3735059 - RNA, 14 nt, Human
uaauuccuucagca

SEQ ID NO: 3735060 - RNA, 13 nt, Human
uaauucuaaccag

SEQ ID NO: 3735061 - RNA, 19 nt, Human
uaauucuaaccagagcaag

SEQ ID NO: 3735062 - RNA, 23 nt, Human
uaauucuaaccagagcaagcuuu

SEQ ID NO: 3735063 - RNA, 12 nt, Human
uaauucucaggc

SEQ ID NO: 3735064 - RNA, 12 nt, Human
uaauucucuuga

SEQ ID NO: 3735065 - RNA, 13 nt, Human
uaauucucuugaa

SEQ ID NO: 3735066 - RNA, 17 nt, Human
uaauucuggagauacug

SEQ ID NO: 3735067 - RNA, 12 nt, Human
uaauucugggaa

SEQ ID NO: 3735068 - RNA, 10 nt, Human
uaauucugua

SEQ ID NO: 3735069 - RNA, 12 nt, Human
uaauucuguaca

SEQ ID NO: 3735070 - RNA, 14 nt, Human
uaauucuguacaua

SEQ ID NO: 3735071 - RNA, 15 nt, Human
uaauucuguacugau

SEQ ID NO: 3735072 - RNA, 23 nt, Human
uaauucuguacugauuuuuguaa

SEQ ID NO: 3735073 - RNA, 21 nt, Human
uaauucuguucugauauuaau

SEQ ID NO: 3735074 - RNA, 22 nt, Human
uaauucuuacacugccuguaua

SEQ ID NO: 3735075 - RNA, 22 nt, Human
uaauucuuauuccauauuagaa

SEQ ID NO: 3735076 - RNA, 18 nt, Human
uaauucuuauuuugugga

SEQ ID NO: 3735077 - RNA, 19 nt, Human
uaauucuucagcguaaaau

SEQ ID NO: 3735078 - RNA, 15 nt, Human
uaauucuugcauauu

SEQ ID NO: 3735079 - RNA, 19 nt, Human
uaauucuugcauauuuugu

SEQ ID NO: 3735080 - RNA, 13 nt, Human
uaauucuuugcaa

SEQ ID NO: 3735081 - RNA, 14 nt, Human
uaauucuuugcaaa

SEQ ID NO: 3735082 - RNA, 13 nt, Human
uaauugaaggaaa

SEQ ID NO: 3735083 - RNA, 15 nt, Human
uaauugaaggaaaga

SEQ ID NO: 3735084 - RNA, 19 nt, Human
uaauugacaggcgaaagaa

SEQ ID NO: 3735085 - RNA, 12 nt, Human
uaauugagaagc

SEQ ID NO: 3735086 - RNA, 14 nt, Human
uaauugauuucaag

SEQ ID NO: 3735087 - RNA, 23 nt, Human
uaauugcagauaacuuugacuuu

SEQ ID NO: 3735088 - RNA, 22 nt, Human
uaauugccaaaaagugaaauaa

SEQ ID NO: 3735089 - RNA, 14 nt, Human
uaauugccaccucu

SEQ ID NO: 3735090 - RNA, 14 nt, Human
uaauugcugugugu

SEQ ID NO: 3735091 - RNA, 22 nt, Human
uaauuggaaaggcagcucuaaa

SEQ ID NO: 3735092 - RNA, 21 nt, Human
uaauuggaagaaauuccugua

SEQ ID NO: 3735093 - RNA, 15 nt, Human
uaauuggauuuccua

SEQ ID NO: 3735094 - RNA, 15 nt, Human
uaauuggcagcagau

SEQ ID NO: 3735095 - RNA, 20 nt, Human
uaauuggcuuuacuauuuuu

SEQ ID NO: 3735096 - RNA, 20 nt, Human
uaauugggcacuauuuauuu

SEQ ID NO: 3735097 - RNA, 23 nt, Human
uaauugguacuuuuaaaaacaua

SEQ ID NO: 3735098 - RNA, 12 nt, Human
uaauuguaaacu

SEQ ID NO: 3735099 - RNA, 13 nt, Human
uaauuguaaacug

SEQ ID NO: 3735100 - RNA, 16 nt, Human
uaauuguaaacuguac

SEQ ID NO: 3735101 - RNA, 18 nt, Human
uaauuguaaacuguacua

SEQ ID NO: 3735102 - RNA, 17 nt, Human
uaauuguauaacagguu

SEQ ID NO: 3735103 - RNA, 18 nt, Human
uaauuguauaacagguua

SEQ ID NO: 3735104 - RNA, 13 nt, Human
uaauuguaucgua

SEQ ID NO: 3735105 - RNA, 15 nt, Human
uaauuguaucguaua

SEQ ID NO: 3735106 - RNA, 20 nt, Human
uaauuguaucguauagcugu

SEQ ID NO: 3735107 - RNA, 21 nt, Human
uaauuguaucguauagcugua

SEQ ID NO: 3735108 - RNA, 19 nt, Human
uaauugugugaacuuggaa

SEQ ID NO: 3735109 - RNA, 22 nt, Human
uaauugugugaacuuggaagca

SEQ ID NO: 3735110 - RNA, 20 nt, Human
uaauugugugauauuucaga

SEQ ID NO: 3735111 - RNA, 20 nt, Human
uaauuguguggauucuuuaa

SEQ ID NO: 3735112 - RNA, 21 nt, Human
uaauuguguuuacauuuuaug

SEQ ID NO: 3735113 - RNA, 16 nt, Human
uaauuguucucagaau

SEQ ID NO: 3735114 - RNA, 17 nt, Human
uaauuguucucagaauc

SEQ ID NO: 3735115 - RNA, 22 nt, Human
uaauuguugaaauuuugcaaau

SEQ ID NO: 3735116 - RNA, 16 nt, Human
uaauuguugcuaaucu

SEQ ID NO: 3735117 - RNA, 15 nt, Human
uaauuguuguucugu

SEQ ID NO: 3735118 - RNA, 17 nt, Human
uaauuguuguucuguua

SEQ ID NO: 3735119 - RNA, 19 nt, Human
uaauuguuguucuguuaac

SEQ ID NO: 3735120 - RNA, 16 nt, Human
uaauuguuguuucuuu

SEQ ID NO: 3735121 - RNA, 15 nt, Human
uaauuguuguuugua

SEQ ID NO: 3735122 - RNA, 13 nt, Human
uaauuguuuaaaa

SEQ ID NO: 3735123 - RNA, 17 nt, Human
uaauuguuugucuuuaa

SEQ ID NO: 3735124 - RNA, 21 nt, Human
uaauuguuuuuuaucuuuucu

SEQ ID NO: 3735125 - RNA, 22 nt, Human
uaauuguuuuuuaucuuuucua

SEQ ID NO: 3735126 - RNA, 15 nt, Human
uaauuuaaaaaauaa

SEQ ID NO: 3735127 - RNA, 12 nt, Human
gcagaagagggu

SEQ ID NO: 3735128 - RNA, 20 nt, Human
gcagaaggaaaaauguguaa

SEQ ID NO: 3735129 - RNA, 21 nt, Human
gcagaaggaaaaauguguaau

SEQ ID NO: 3735130 - RNA, 18 nt, Human
gcagaaggaagacuucau

SEQ ID NO: 3735131 - RNA, 22 nt, Human
gcagaaggaagggcauccuucu

SEQ ID NO: 3735132 - RNA, 15 nt, Human
gcagaaggccaagaa

SEQ ID NO: 3735133 - RNA, 14 nt, Human
gcagaaguguuuca

SEQ ID NO: 3735134 - RNA, 11 nt, Human
gcagaauaaag

SEQ ID NO: 3735135 - RNA, 12 nt, Human
gcagaauaaagc

SEQ ID NO: 3735136 - RNA, 15 nt, Human
gcagaauaaagcaau

SEQ ID NO: 3735137 - RNA, 18 nt, Human
gcagaauaaagcaauuuu

SEQ ID NO: 3735138 - RNA, 21 nt, Human
gcagaauaaagcaauuuuccu

SEQ ID NO: 3735139 - RNA, 22 nt, Human
gcagaauaaagcaauuuuccuu

SEQ ID NO: 3735140 - RNA, 14 nt, Human
gcagaauaguauuu

SEQ ID NO: 3735141 - RNA, 16 nt, Human
gcagaaugaaucuaug

SEQ ID NO: 3735142 - RNA, 13 nt, Human
gcagaauguuuuu

SEQ ID NO: 3735143 - RNA, 14 nt, Human
gcagaauuggaaaa

SEQ ID NO: 3735144 - RNA, 21 nt, Human
gcagacaauaaacccucagag

SEQ ID NO: 3735145 - RNA, 15 nt, Human
gcagacaaucuucug

SEQ ID NO: 3735146 - RNA, 16 nt, Human
gcagacacagggacuu

SEQ ID NO: 3735147 - RNA, 19 nt, Human
gcagacacagggacuugaa

SEQ ID NO: 3735148 - RNA, 16 nt, Human
gcagacacggaucuga

SEQ ID NO: 3735149 - RNA, 17 nt, Human
gcagacagaagucuccu

SEQ ID NO: 3735150 - RNA, 14 nt, Human
gcagacagagccag

SEQ ID NO: 3735151 - RNA, 17 nt, Human
gcagacagagccaggag

SEQ ID NO: 3735152 - RNA, 13 nt, Human
gcagacagcagcu

SEQ ID NO: 3735153 - RNA, 20 nt, Human
gcagacagcagcucaggcac

SEQ ID NO: 3735154 - RNA, 19 nt, Human
gcagacagcaggcagcgcc

SEQ ID NO: 3735155 - RNA, 13 nt, Human
gcagacaggacca

SEQ ID NO: 3735156 - RNA, 18 nt, Human
gcagacaggaccagggau

SEQ ID NO: 3735157 - RNA, 13 nt, Human
gcagacaggcaag

SEQ ID NO: 3735158 - RNA, 19 nt, Human
gcagacaggcaagcaccuc

SEQ ID NO: 3735159 - RNA, 19 nt, Human
gcagacaugugcacuugaa

SEQ ID NO: 3735160 - RNA, 15 nt, Human
gcagacauugucagc

SEQ ID NO: 3735161 - RNA, 17 nt, Human
gcagacauuuuaaaaaa

SEQ ID NO: 3735162 - RNA, 17 nt, Human
gcagaccacauugcuuu

SEQ ID NO: 3735163 - RNA, 13 nt, Human
gcagaccaccccg

SEQ ID NO: 3735164 - RNA, 21 nt, Human
gcagaccauuggggcucccag

SEQ ID NO: 3735165 - RNA, 18 nt, Human
gcagaccccuuggccagc

SEQ ID NO: 3735166 - RNA, 15 nt, Human
gcagacccugcccuu

SEQ ID NO: 3735167 - RNA, 14 nt, Human
gcagaccuguccuc

SEQ ID NO: 3735168 - RNA, 13 nt, Human
gcagacgcccaga

SEQ ID NO: 3735169 - RNA, 21 nt, Human
gcagacuagaauucuagugcu

SEQ ID NO: 3735170 - RNA, 13 nt, Human
gcagacucacugu

SEQ ID NO: 3735171 - RNA, 16 nt, Human
gcagacucagcucuga

SEQ ID NO: 3735172 - RNA, 21 nt, Human
gcagacugcugcuagagccag

SEQ ID NO: 3735173 - RNA, 11 nt, Human
gcagacuggcg

SEQ ID NO: 3735174 - RNA, 23 nt, Human
gcagacuguguaaaauguaaugc

SEQ ID NO: 3735175 - RNA, 17 nt, Human
gcagacuuuuaaagacu

SEQ ID NO: 3735176 - RNA, 20 nt, Human
gcagacuuuuaaagacuugc

SEQ ID NO: 3735177 - RNA, 16 nt, Human
gcagagaaagaagaga

SEQ ID NO: 3735178 - RNA, 16 nt, Human
gcagagaagccuuggu

SEQ ID NO: 3735179 - RNA, 23 nt, Human
gcagagaauauaacaugaaauga

SEQ ID NO: 3735180 - RNA, 22 nt, Human
gcagagaaugaaagggcccaga

SEQ ID NO: 3735181 - RNA, 13 nt, Human
gcagagacacuaa

SEQ ID NO: 3735182 - RNA, 15 nt, Human
gcagagaccaucccu

SEQ ID NO: 3735183 - RNA, 17 nt, Human
gcagagaccaucccuga

SEQ ID NO: 3735184 - RNA, 20 nt, Human
gcagagaccaucccugaagg

SEQ ID NO: 3735185 - RNA, 17 nt, Human
gcagagagagagaaaga

SEQ ID NO: 3735186 - RNA, 20 nt, Human
gcagagagaugcggccaaga

SEQ ID NO: 3735187 - RNA, 13 nt, Human
gcagagaggcugu

SEQ ID NO: 3735188 - RNA, 21 nt, Human
gcagagagguuugcaguccca

SEQ ID NO: 3735189 - RNA, 14 nt, Human
gcagagcaggggca

SEQ ID NO: 3735190 - RNA, 16 nt, Human
gcagagccaggaagau

SEQ ID NO: 3735191 - RNA, 16 nt, Human
gcagagcccaagggaa

SEQ ID NO: 3735192 - RNA, 20 nt, Human
gcagagcgccgugaguucuc

SEQ ID NO: 3735193 - RNA, 19 nt, Human
gcagagcgcgccccuagcc

SEQ ID NO: 3735194 - RNA, 19 nt, Human
gcagagcugcgggcugggu

SEQ ID NO: 3735195 - RNA, 13 nt, Human
gcagagcuggcuc

SEQ ID NO: 3735196 - RNA, 14 nt, Human
gcagagcuggcucu

SEQ ID NO: 3735197 - RNA, 17 nt, Human
gcagagcuggcucugag

SEQ ID NO: 3735198 - RNA, 13 nt, Human
gcagagcuggugc

SEQ ID NO: 3735199 - RNA, 17 nt, Human
gcagagcuuggacugga

SEQ ID NO: 3735200 - RNA, 16 nt, Human
gcagagcuuuucagau

SEQ ID NO: 3735201 - RNA, 14 nt, Human
gcagaggaccaggg

SEQ ID NO: 3735202 - RNA, 16 nt, Human
gcagaggaccagggcc

SEQ ID NO: 3735203 - RNA, 17 nt, Human
gcagaggaccagggccu

SEQ ID NO: 3735204 - RNA, 19 nt, Human
gcagaggagaacuugcugc

SEQ ID NO: 3735205 - RNA, 22 nt, Human
gcagaggagaacuugcugccuc

SEQ ID NO: 3735206 - RNA, 14 nt, Human
gcagaggaggggcc

SEQ ID NO: 3735207 - RNA, 16 nt, Human
gcagaggauguucaua

SEQ ID NO: 3735208 - RNA, 21 nt, Human
gcagaggcccacauuggaaga

SEQ ID NO: 3735209 - RNA, 20 nt, Human
gcagaggcccaggcugccgu

SEQ ID NO: 3735210 - RNA, 14 nt, Human
gcagaggccugggc

SEQ ID NO: 3735211 - RNA, 20 nt, Human
gcagaggccugggcugggaa

SEQ ID NO: 3735212 - RNA, 19 nt, Human
gcagaggcuggaggcaggg

SEQ ID NO: 3735213 - RNA, 12 nt, Human
gcagaggcuggc

SEQ ID NO: 3735214 - RNA, 15 nt, Human
gcagaggcuguggcu

SEQ ID NO: 3735215 - RNA, 18 nt, Human
gcagaggcuguggcuggu

SEQ ID NO: 3735216 - RNA, 16 nt, Human
gcagagggcagaggcu

SEQ ID NO: 3735217 - RNA, 14 nt, Human
gcagagggcuggag

SEQ ID NO: 3735218 - RNA, 16 nt, Human
gcagagggcuggaggc

SEQ ID NO: 3735219 - RNA, 17 nt, Human
gcagagggcuggaggcc

SEQ ID NO: 3735220 - RNA, 23 nt, Human
gcagagggcuggaggcccaggcu

SEQ ID NO: 3735221 - RNA, 11 nt, Human
gcagaggggca

SEQ ID NO: 3735222 - RNA, 16 nt, Human
gcagaggggcuuucug

SEQ ID NO: 3735223 - RNA, 21 nt, Human
gcagaggggcuuucuggagag

SEQ ID NO: 3735224 - RNA, 19 nt, Human
gcagagggguaggcagagc

SEQ ID NO: 3735225 - RNA, 21 nt, Human
gcagagguccacaacacacag

SEQ ID NO: 3735226 - RNA, 14 nt, Human
gcagagguggccag

SEQ ID NO: 3735227 - RNA, 23 nt, Human
gcagagucacacgggggcagcug

SEQ ID NO: 3735228 - RNA, 12 nt, Human
gcagagucagca

SEQ ID NO: 3735229 - RNA, 13 nt, Human
gcagagucagcag

SEQ ID NO: 3735230 - RNA, 22 nt, Human
gcagaguccugcacaguuuucu

SEQ ID NO: 3735231 - RNA, 15 nt, Human
gcagagucuugcuac

SEQ ID NO: 3735232 - RNA, 23 nt, Human
gcagagucuugcuaccucaguca

SEQ ID NO: 3735233 - RNA, 17 nt, Human
gcagagugcacagcugu

SEQ ID NO: 3735234 - RNA, 17 nt, Human
gcagagugccccaccug

SEQ ID NO: 3735235 - RNA, 22 nt, Human
gcagaguggcagucuucaguuu

SEQ ID NO: 3735236 - RNA, 14 nt, Human
gcagaguucaggga

SEQ ID NO: 3735237 - RNA, 20 nt, Human
gcagaguugaagacagagcu

SEQ ID NO: 3735238 - RNA, 22 nt, Human
gcagauacaggaaaagcugcug

SEQ ID NO: 3735239 - RNA, 18 nt, Human
gcagauacugcuguguaa

SEQ ID NO: 3735240 - RNA, 14 nt, Human
gcagaucccagcuc

SEQ ID NO: 3735241 - RNA, 19 nt, Human
gcagaugagguugcuagag

SEQ ID NO: 3735242 - RNA, 18 nt, Human
gcagaugcaaagaggcaa

SEQ ID NO: 3735243 - RNA, 22 nt, Human
gcagaugcaaagaggcaagagg

SEQ ID NO: 3735244 - RNA, 15 nt, Human
gcagaugcagagagc

SEQ ID NO: 3735245 - RNA, 13 nt, Human
gcagaugccagag

SEQ ID NO: 3735246 - RNA, 18 nt, Human
gcagauggaaugcugugu

SEQ ID NO: 3735247 - RNA, 20 nt, Human
gcagauguaaaguuauucuu

SEQ ID NO: 3735248 - RNA, 16 nt, Human
gcagauguaggaggga

SEQ ID NO: 3735249 - RNA, 13 nt, Human
gcagauuauucac

SEQ ID NO: 3735250 - RNA, 23 nt, Human
gcagauugagaccuacaggcuga

SEQ ID NO: 3735251 - RNA, 14 nt, Human
gcagauuggagaaa

SEQ ID NO: 3735252 - RNA, 19 nt, Human
gcagauuggagaaacccuu

SEQ ID NO: 3735253 - RNA, 20 nt, Human
gcagauuuuacaaaagaugu

SEQ ID NO: 3735254 - RNA, 21 nt, Human
gcagauuuuacaaaagaugua

SEQ ID NO: 3735255 - RNA, 15 nt, Human
gcagcaaccagagca

SEQ ID NO: 3735256 - RNA, 17 nt, Human
gcagcaaccagagcacu

SEQ ID NO: 3735257 - RNA, 18 nt, Human
gcagcaaccagagcacug

SEQ ID NO: 3735258 - RNA, 19 nt, Human
gcagcaaccagagcacugu

SEQ ID NO: 3735259 - RNA, 16 nt, Human
gcagcaacuuguccua

SEQ ID NO: 3735260 - RNA, 17 nt, Human
gcagcaaggcccugcug

SEQ ID NO: 3735261 - RNA, 21 nt, Human
gcagcaaggucuugcucuccu

SEQ ID NO: 3735262 - RNA, 16 nt, Human
gcagcaauaaagcagc

SEQ ID NO: 3735263 - RNA, 23 nt, Human
gcagcaauaaagcagcguuucua

SEQ ID NO: 3735264 - RNA, 17 nt, Human
gcagcaauaauuucugu

SEQ ID NO: 3735265 - RNA, 14 nt, Human
gcagcaaucuuuga

SEQ ID NO: 3735266 - RNA, 12 nt, Human
gcagcacagcaa

SEQ ID NO: 3735267 - RNA, 20 nt, Human
gcagcaccgaggggccuuug

SEQ ID NO: 3735268 - RNA, 19 nt, Human
gcagcaccgccucuucccg

SEQ ID NO: 3735269 - RNA, 17 nt, Human
gcagcaccguucugugc

SEQ ID NO: 3735270 - RNA, 15 nt, Human
gcagcaccuccaggc

SEQ ID NO: 3735271 - RNA, 18 nt, Human
gcagcacggacaauaaac

SEQ ID NO: 3735272 - RNA, 18 nt, Human
gcagcacucacacaggac

SEQ ID NO: 3735273 - RNA, 13 nt, Human
gcagcagaaaacu

SEQ ID NO: 3735274 - RNA, 14 nt, Human
gcagcagaaaacuu

SEQ ID NO: 3735275 - RNA, 13 nt, Human
gcagcagaagggg

SEQ ID NO: 3735276 - RNA, 13 nt, Human
gcagcagagccug

SEQ ID NO: 3735277 - RNA, 12 nt, Human
gcagcagaggca

SEQ ID NO: 3735278 - RNA, 13 nt, Human
uaacaagagugau

SEQ ID NO: 3735279 - RNA, 13 nt, Human
uaacaagccaccc

SEQ ID NO: 3735280 - RNA, 23 nt, Human
uaacaauaacuacuguguuccug

SEQ ID NO: 3735281 - RNA, 16 nt, Human
uaacaauacaaaugga

SEQ ID NO: 3735282 - RNA, 18 nt, Human
uaacaauacaaauggauu

SEQ ID NO: 3735283 - RNA, 19 nt, Human
uaacaauacaaauggauuu

SEQ ID NO: 3735284 - RNA, 22 nt, Human
uaacaaugauauauggauaaug

SEQ ID NO: 3735285 - RNA, 20 nt, Human
uaacaaugcagcaaggcccu

SEQ ID NO: 3735286 - RNA, 21 nt, Human
uaacaaugccuauuguaauau

SEQ ID NO: 3735287 - RNA, 15 nt, Human
uaacaaugcuguauu

SEQ ID NO: 3735288 - RNA, 12 nt, Human
uaacaaugucuu

SEQ ID NO: 3735289 - RNA, 14 nt, Human
uaacaauguuaagg

SEQ ID NO: 3735290 - RNA, 15 nt, Human
uaacaauguuaagga

SEQ ID NO: 3735291 - RNA, 19 nt, Human
uaacaauguuaaggaaacu

SEQ ID NO: 3735292 - RNA, 23 nt, Human
uaacaauguuaaggaaacucuua

SEQ ID NO: 3735293 - RNA, 17 nt, Human
uaacaauuaauugucuu

SEQ ID NO: 3735294 - RNA, 14 nt, Human
uaacaauuguguag

SEQ ID NO: 3735295 - RNA, 21 nt, Human
uaacaauuuccuuuauauuua

SEQ ID NO: 3735296 - RNA, 14 nt, Human
uaacaauuucuguc

SEQ ID NO: 3735297 - RNA, 16 nt, Human
uaacaauuucuguccu

SEQ ID NO: 3735298 - RNA, 16 nt, Human
uaacacacauaaagga

SEQ ID NO: 3735299 - RNA, 20 nt, Human
uaacacacuaccgaaugugu

SEQ ID NO: 3735300 - RNA, 16 nt, Human
uaacacagagagacag

SEQ ID NO: 3735301 - RNA, 21 nt, Human
uaacacagcauuguauaugug

SEQ ID NO: 3735302 - RNA, 20 nt, Human
uaacacagugccuucaauaa

SEQ ID NO: 3735303 - RNA, 21 nt, Human
uaacacagugccuucaauaaa

SEQ ID NO: 3735304 - RNA, 14 nt, Human
uaacacauguccuu

SEQ ID NO: 3735305 - RNA, 22 nt, Human
uaacacauuaucgggagcagug

SEQ ID NO: 3735306 - RNA, 17 nt, Human
uaacacauuugauucug

SEQ ID NO: 3735307 - RNA, 18 nt, Human
uaacacauuuuguauaau

SEQ ID NO: 3735308 - RNA, 12 nt, Human
uaacacauuuuu

SEQ ID NO: 3735309 - RNA, 20 nt, Human
uaacacauuuuuuugcaugc

SEQ ID NO: 3735310 - RNA, 21 nt, Human
uaacacauuuuuuugcaugca

SEQ ID NO: 3735311 - RNA, 17 nt, Human
uaacaccugauguguac

SEQ ID NO: 3735312 - RNA, 16 nt, Human
uaacacgugaugugau

SEQ ID NO: 3735313 - RNA, 16 nt, Human
uaacacuaauauauuu

SEQ ID NO: 3735314 - RNA, 17 nt, Human
uaacacuagucugugug

SEQ ID NO: 3735315 - RNA, 18 nt, Human
uaacacuagucugugugc

SEQ ID NO: 3735316 - RNA, 14 nt, Human
uaacacucagaagc

SEQ ID NO: 3735317 - RNA, 22 nt, Human
uaacacucuaggauguauauuu

SEQ ID NO: 3735318 - RNA, 15 nt, Human
uaacacuggccccua

SEQ ID NO: 3735319 - RNA, 15 nt, Human
uaacacugugaagag

SEQ ID NO: 3735320 - RNA, 12 nt, Human
uaacagaaaugu

SEQ ID NO: 3735321 - RNA, 15 nt, Human
uaacagaaauguaca

SEQ ID NO: 3735322 - RNA, 14 nt, Human
uaacagaaauugua

SEQ ID NO: 3735323 - RNA, 22 nt, Human
uaacagaaauuguauauuguaa

SEQ ID NO: 3735324 - RNA, 21 nt, Human
uaacagaacagcuucagguua

SEQ ID NO: 3735325 - RNA, 15 nt, Human
uaacagaagaaaaua

SEQ ID NO: 3735326 - RNA, 22 nt, Human
uaacagauuuugggguuguguu

SEQ ID NO: 3735327 - RNA, 23 nt, Human
uaacagcauucuugucacaauaa

SEQ ID NO: 3735328 - RNA, 20 nt, Human
uaacagcccuccucugcacu

SEQ ID NO: 3735329 - RNA, 14 nt, Human
uaacagcucaggau

SEQ ID NO: 3735330 - RNA, 17 nt, Human
uaacagcuccuugggag

SEQ ID NO: 3735331 - RNA, 23 nt, Human
uaacagcuccuugggaggaagca

SEQ ID NO: 3735332 - RNA, 15 nt, Human
uaacagcugaggucu

SEQ ID NO: 3735333 - RNA, 16 nt, Human
uaacaggauuagacag

SEQ ID NO: 3735334 - RNA, 22 nt, Human
uaacaggcaaacauuuucucuu

SEQ ID NO: 3735335 - RNA, 22 nt, Human
uaacaggcucaauauuccugaa

SEQ ID NO: 3735336 - RNA, 23 nt, Human
uaacaggcucaauauuccugaau

SEQ ID NO: 3735337 - RNA, 21 nt, Human
uaacaggcuuagugauguaau

SEQ ID NO: 3735338 - RNA, 15 nt, Human
uaacagggaacguga

SEQ ID NO: 3735339 - RNA, 18 nt, Human
uaacagggauugauuuua

SEQ ID NO: 3735340 - RNA, 15 nt, Human
uaacagggccuugcu

SEQ ID NO: 3735341 - RNA, 17 nt, Human
uaacagggccuugcuaa

SEQ ID NO: 3735342 - RNA, 15 nt, Human
uaacaggguaaauua

SEQ ID NO: 3735343 - RNA, 19 nt, Human
uaacaggguaaauuauuca

SEQ ID NO: 3735344 - RNA, 20 nt, Human
uaacaggguaaauuauucag

SEQ ID NO: 3735345 - RNA, 22 nt, Human
uaacaggucuagaaaaccagcu

SEQ ID NO: 3735346 - RNA, 18 nt, Human
uaacaggucuccucuuaa

SEQ ID NO: 3735347 - RNA, 15 nt, Human
uaacaguaacgcagg

SEQ ID NO: 3735348 - RNA, 14 nt, Human
uaacagucauuuaa

SEQ ID NO: 3735349 - RNA, 21 nt, Human
uaacaguccuaacugguauag

SEQ ID NO: 3735350 - RNA, 21 nt, Human
uaacagugcagggcaaaauau

SEQ ID NO: 3735351 - RNA, 21 nt, Human
uaacagugcauauuccuuucu

SEQ ID NO: 3735352 - RNA, 17 nt, Human
uaacagugccauugucu

SEQ ID NO: 3735353 - RNA, 18 nt, Human
uaacagugccauugucuu

SEQ ID NO: 3735354 - RNA, 15 nt, Human
uaacaguuuuccaug

SEQ ID NO: 3735355 - RNA, 17 nt, Human
uaacaguuuuccaugaa

SEQ ID NO: 3735356 - RNA, 14 nt, Human
uaacauaagcuauu

SEQ ID NO: 3735357 - RNA, 15 nt, Human
uaacauaauaaauua

SEQ ID NO: 3735358 - RNA, 17 nt, Human
uaacauaauaaauuaaa

SEQ ID NO: 3735359 - RNA, 16 nt, Human
uaacauaauuuguaca

SEQ ID NO: 3735360 - RNA, 14 nt, Human
uaacauauaauguu

SEQ ID NO: 3735361 - RNA, 20 nt, Human
uaacauauucuguaugaacu

SEQ ID NO: 3735362 - RNA, 14 nt, Human
uaacauauuuacua

SEQ ID NO: 3735363 - RNA, 14 nt, Human
uaacaucaaagauu

SEQ ID NO: 3735364 - RNA, 20 nt, Human
uaacaucacuauccaugcac

SEQ ID NO: 3735365 - RNA, 21 nt, Human
uaacaucacuauccaugcacc

SEQ ID NO: 3735366 - RNA, 20 nt, Human
uaacaucauuuuguuuucca

SEQ ID NO: 3735367 - RNA, 23 nt, Human
uaacauccaauaggaaugcuaac

SEQ ID NO: 3735368 - RNA, 20 nt, Human
uaacaucuaaaaauagacuu

SEQ ID NO: 3735369 - RNA, 18 nt, Human
uaacaugaaaugauagau

SEQ ID NO: 3735370 - RNA, 19 nt, Human
uaacaugaaaugauagauu

SEQ ID NO: 3735371 - RNA, 21 nt, Human
uaacaugaauauuuaguguuc

SEQ ID NO: 3735372 - RNA, 20 nt, Human
uaacaugaggggacauuuug

SEQ ID NO: 3735373 - RNA, 23 nt, Human
uaacaugaggggacauuuuggug

SEQ ID NO: 3735374 - RNA, 20 nt, Human
uaacaugcccauauuuuacu

SEQ ID NO: 3735375 - RNA, 15 nt, Human
uaacaugcuguguaa

SEQ ID NO: 3735376 - RNA, 18 nt, Human
uaacauggaagggaagaa

SEQ ID NO: 3735377 - RNA, 16 nt, Human
uaacauggaaguacua

SEQ ID NO: 3735378 - RNA, 21 nt, Human
uaacaugggcucuucacuagu

SEQ ID NO: 3735379 - RNA, 17 nt, Human
uaacauguaauuaagua

SEQ ID NO: 3735380 - RNA, 15 nt, Human
uaacauguaggaagu

SEQ ID NO: 3735381 - RNA, 15 nt, Human
uaacauguaucccaa

SEQ ID NO: 3735382 - RNA, 16 nt, Human
uaacauguuaaaccau

SEQ ID NO: 3735383 - RNA, 12 nt, Human
uaacauuaccuu

SEQ ID NO: 3735384 - RNA, 13 nt, Human
uaacauuccaaga

SEQ ID NO: 3735385 - RNA, 17 nt, Human
uaacauuccuaaaaugc

SEQ ID NO: 3735386 - RNA, 23 nt, Human
uaacauuccucaugaauguaaau

SEQ ID NO: 3735387 - RNA, 16 nt, Human
uaacauucgaucucau

SEQ ID NO: 3735388 - RNA, 15 nt, Human
uaacauucuauuuca

SEQ ID NO: 3735389 - RNA, 15 nt, Human
uaacauugaccaaga

SEQ ID NO: 3735390 - RNA, 23 nt, Human
uaacauugaccaagaacugcaug

SEQ ID NO: 3735391 - RNA, 18 nt, Human
uaacauuugagucccuuc

SEQ ID NO: 3735392 - RNA, 11 nt, Human
uaacauuugcc

SEQ ID NO: 3735393 - RNA, 23 nt, Human
uaacauuugccuugcagaacugc

SEQ ID NO: 3735394 - RNA, 13 nt, Human
uaacauuugcugu

SEQ ID NO: 3735395 - RNA, 16 nt, Human
uaacauuugcuguuuu

SEQ ID NO: 3735396 - RNA, 17 nt, Human
uaacauuugcuguuuua

SEQ ID NO: 3735397 - RNA, 21 nt, Human
uaacauuuuaaauaaaagaaa

SEQ ID NO: 3735398 - RNA, 11 nt, Human
uaacauuuugu

SEQ ID NO: 3735399 - RNA, 21 nt, Human
uaacauuuuguucuuacacau

SEQ ID NO: 3735400 - RNA, 19 nt, Human
uaacauuuuucaauagcgu

SEQ ID NO: 3735401 - RNA, 20 nt, Human
uaaccaaaaagaccagacua

SEQ ID NO: 3735402 - RNA, 18 nt, Human
uaaccaaaggugaaggaa

SEQ ID NO: 3735403 - RNA, 14 nt, Human
uaaccaaaugcauc

SEQ ID NO: 3735404 - RNA, 22 nt, Human
uaaccaaaugcaucaauccugu

SEQ ID NO: 3735405 - RNA, 15 nt, Human
uaaccaagaggcugg

SEQ ID NO: 3735406 - RNA, 16 nt, Human
uaaccaagaggcuggu

SEQ ID NO: 3735407 - RNA, 16 nt, Human
uaaccaagcugaguuu

SEQ ID NO: 3735408 - RNA, 11 nt, Human
uaaccaaguuc

SEQ ID NO: 3735409 - RNA, 15 nt, Human
uaaccaaucuacaau

SEQ ID NO: 3735410 - RNA, 19 nt, Human
uaaccacaaagcacaguuu

SEQ ID NO: 3735411 - RNA, 21 nt, Human
uaaccacaacuuucacuauaa

SEQ ID NO: 3735412 - RNA, 13 nt, Human
uaaccacagcucc

SEQ ID NO: 3735413 - RNA, 21 nt, Human
uaaccacagcuccuuuuccag

SEQ ID NO: 3735414 - RNA, 18 nt, Human
uaaccacaucaauauugu

SEQ ID NO: 3735415 - RNA, 16 nt, Human
uaaccaccccaucugc

SEQ ID NO: 3735416 - RNA, 13 nt, Human
uaaccacggaaaa

SEQ ID NO: 3735417 - RNA, 15 nt, Human
uaaccacggaaaaga

SEQ ID NO: 3735418 - RNA, 22 nt, Human
uaaccacgucugucuucacagc

SEQ ID NO: 3735419 - RNA, 12 nt, Human
uaaccacugcuu

SEQ ID NO: 3735420 - RNA, 13 nt, Human
uaaccacugcuuc

SEQ ID NO: 3735421 - RNA, 16 nt, Human
uaaccagacacaaacu

SEQ ID NO: 3735422 - RNA, 20 nt, Human
uaaccagacacauacucauu

SEQ ID NO: 3735423 - RNA, 13 nt, Human
uaaccagagcaag

SEQ ID NO: 3735424 - RNA, 21 nt, Human
uaaccagagcaagcuuuuuua

SEQ ID NO: 3735425 - RNA, 12 nt, Human
uaaccagcagaa

SEQ ID NO: 3735426 - RNA, 16 nt, Human
uaaccagcagaaaugc

SEQ ID NO: 3735427 - RNA, 22 nt, Human
uaauuuaaaaauauauuuauaa

SEQ ID NO: 3735428 - RNA, 19 nt, Human
uaauuuaaaauugugaugu

SEQ ID NO: 3735429 - RNA, 11 nt, Human
uaauuuaaaca

SEQ ID NO: 3735430 - RNA, 17 nt, Human
uaauuuaaacaccuccu

SEQ ID NO: 3735431 - RNA, 14 nt, Human
uaauuuaaagagac

SEQ ID NO: 3735432 - RNA, 22 nt, Human
uaauuuaaggucuguuugcugu

SEQ ID NO: 3735433 - RNA, 20 nt, Human
uaauuuaaguuuugacaagc

SEQ ID NO: 3735434 - RNA, 19 nt, Human
uaauuuacaaaaauauaaa

SEQ ID NO: 3735435 - RNA, 21 nt, Human
uaauuuaccuaagauuacaaa

SEQ ID NO: 3735436 - RNA, 22 nt, Human
uaauuuaccuaagauuacaaau

SEQ ID NO: 3735437 - RNA, 15 nt, Human
uaauuuagaaaacuu

SEQ ID NO: 3735438 - RNA, 17 nt, Human
uaauuuagaaaacuuua

SEQ ID NO: 3735439 - RNA, 21 nt, Human
uaauuuagaaaacuuuaaagc

SEQ ID NO: 3735440 - RNA, 15 nt, Human
uaauuuagaaaucau

SEQ ID NO: 3735441 - RNA, 21 nt, Human
uaauuuagacuuggauucuuu

SEQ ID NO: 3735442 - RNA, 16 nt, Human
uaauuuagauuguaaa

SEQ ID NO: 3735443 - RNA, 16 nt, Human
uaauuuaguaaauguu

SEQ ID NO: 3735444 - RNA, 17 nt, Human
uaauuuaguuucauaua

SEQ ID NO: 3735445 - RNA, 13 nt, Human
uaauuuauaaaaa

SEQ ID NO: 3735446 - RNA, 14 nt, Human
uaauuuauacuggc

SEQ ID NO: 3735447 - RNA, 19 nt, Human
uaauuuauacuggcaugcu

SEQ ID NO: 3735448 - RNA, 22 nt, Human
uaauuuauaguaaugaguuuaa

SEQ ID NO: 3735449 - RNA, 14 nt, Human
uaauuuaucuaaau

SEQ ID NO: 3735450 - RNA, 17 nt, Human
uaauuuauuaauugcuu

SEQ ID NO: 3735451 - RNA, 20 nt, Human
uaauuuauuaauugcuuuga

SEQ ID NO: 3735452 - RNA, 14 nt, Human
uaauuuauuauuga

SEQ ID NO: 3735453 - RNA, 14 nt, Human
uaauuuauuuauua

SEQ ID NO: 3735454 - RNA, 17 nt, Human
uaauuucaaaaauauaa

SEQ ID NO: 3735455 - RNA, 16 nt, Human
uaauuucaaaaugcuu

SEQ ID NO: 3735456 - RNA, 11 nt, Human
uaauuucaagc

SEQ ID NO: 3735457 - RNA, 12 nt, Human
uaauuucagggu

SEQ ID NO: 3735458 - RNA, 17 nt, Human
uaauuuccuuuuugaca

SEQ ID NO: 3735459 - RNA, 17 nt, Human
uaauuucuaaagauaau

SEQ ID NO: 3735460 - RNA, 22 nt, Human
uaauuucuaaagauaauauuac

SEQ ID NO: 3735461 - RNA, 20 nt, Human
uaauuucuagaaacaaacau

SEQ ID NO: 3735462 - RNA, 14 nt, Human
uaauuucuccuccc

SEQ ID NO: 3735463 - RNA, 19 nt, Human
uaauuucuccucccuuccu

SEQ ID NO: 3735464 - RNA, 19 nt, Human
uaauuucuuacuaaacauu

SEQ ID NO: 3735465 - RNA, 11 nt, Human
uaauuucuuca

SEQ ID NO: 3735466 - RNA, 23 nt, Human
uaauuucuucaaaauguauauau

SEQ ID NO: 3735467 - RNA, 17 nt, Human
uaauuucuuuuuuuccu

SEQ ID NO: 3735468 - RNA, 13 nt, Human
uaauuugaagauu

SEQ ID NO: 3735469 - RNA, 15 nt, Human
uaauuugacuagaaa

SEQ ID NO: 3735470 - RNA, 18 nt, Human
uaauuugaggacaaccau

SEQ ID NO: 3735471 - RNA, 22 nt, Human
uaauuugaggacaaccauucca

SEQ ID NO: 3735472 - RNA, 16 nt, Human
uaauuugaugaaagcu

SEQ ID NO: 3735473 - RNA, 19 nt, Human
uaauuugaugaaagcugau

SEQ ID NO: 3735474 - RNA, 15 nt, Human
uaauuugauuaacaa

SEQ ID NO: 3735475 - RNA, 16 nt, Human
uaauuugcauuaaauu

SEQ ID NO: 3735476 - RNA, 20 nt, Human
uaauuugcauuaaauucaca

SEQ ID NO: 3735477 - RNA, 17 nt, Human
uaauuugccaaaauaau

SEQ ID NO: 3735478 - RNA, 19 nt, Human
uaauuugccaaaauaaugu

SEQ ID NO: 3735479 - RNA, 14 nt, Human
uaauuugcugcuga

SEQ ID NO: 3735480 - RNA, 15 nt, Human
uaauuuggaaacuaa

SEQ ID NO: 3735481 - RNA, 17 nt, Human
uaauuuggaaacuaaua

SEQ ID NO: 3735482 - RNA, 22 nt, Human
uaauuuggaaacuaauaaaaua

SEQ ID NO: 3735483 - RNA, 19 nt, Human
uaauuuggaccauuuuccu

SEQ ID NO: 3735484 - RNA, 23 nt, Human
uaauuuggagcacaaaauucaaa

SEQ ID NO: 3735485 - RNA, 13 nt, Human
uaauuuguaucug

SEQ ID NO: 3735486 - RNA, 15 nt, Human
uaauuugugauacaa

SEQ ID NO: 3735487 - RNA, 22 nt, Human
uaauuugugauacaaugcugug

SEQ ID NO: 3735488 - RNA, 16 nt, Human
uaauuuguuuccagca

SEQ ID NO: 3735489 - RNA, 13 nt, Human
uaauuuuaaauaa

SEQ ID NO: 3735490 - RNA, 13 nt, Human
uaauuuuaagaaa

SEQ ID NO: 3735491 - RNA, 12 nt, Human
uaauuuuaauau

SEQ ID NO: 3735492 - RNA, 20 nt, Human
uaauuuuacacgcuuuugug

SEQ ID NO: 3735493 - RNA, 14 nt, Human
uaauuuuaguuuuu

SEQ ID NO: 3735494 - RNA, 20 nt, Human
uaauuuuaugaacugcaugu

SEQ ID NO: 3735495 - RNA, 18 nt, Human
uaauuuuauuuuaaaauu

SEQ ID NO: 3735496 - RNA, 14 nt, Human
uaauuuucuucaug

SEQ ID NO: 3735497 - RNA, 23 nt, Human
uaauuuucuucaugcaaugacau

SEQ ID NO: 3735498 - RNA, 17 nt, Human
uaauuuucuugaugacu

SEQ ID NO: 3735499 - RNA, 22 nt, Human
uaauuuugaagugcuguuuauu

SEQ ID NO: 3735500 - RNA, 20 nt, Human
uaauuuugacacugaaauaa

SEQ ID NO: 3735501 - RNA, 18 nt, Human
uaauuuugauagugggac

SEQ ID NO: 3735502 - RNA, 13 nt, Human
uaauuuuggauuu

SEQ ID NO: 3735503 - RNA, 21 nt, Human
uaauuuugguuguauucuuug

SEQ ID NO: 3735504 - RNA, 19 nt, Human
uaauuuuguaauguaucaa

SEQ ID NO: 3735505 - RNA, 14 nt, Human
uaauuuuguauuuu

SEQ ID NO: 3735506 - RNA, 18 nt, Human
uaauuuuguauuuuccaa

SEQ ID NO: 3735507 - RNA, 19 nt, Human
uaauuuuguucuaguuuuc

SEQ ID NO: 3735508 - RNA, 13 nt, Human
uaauuuuuaaagu

SEQ ID NO: 3735509 - RNA, 13 nt, Human
uaauuuuuaaaug

SEQ ID NO: 3735510 - RNA, 16 nt, Human
uaauuuuugcucuaga

SEQ ID NO: 3735511 - RNA, 20 nt, Human
uaauuuuugcuuuuagaaaa

SEQ ID NO: 3735512 - RNA, 15 nt, Human
uaauuuuuguauuuu

SEQ ID NO: 3735513 - RNA, 22 nt, Human
uaauuuuuguguuuuuaauaaa

SEQ ID NO: 3735514 - RNA, 15 nt, Human
uaauuuuuugguaca

SEQ ID NO: 3735515 - RNA, 17 nt, Human
uaauuuuuugguacaaa

SEQ ID NO: 3735516 - RNA, 20 nt, Human
uaauuuuuuuaaccaaaggu

SEQ ID NO: 3735517 - RNA, 21 nt, Human
uaauuuuuuucaccuagauuu

SEQ ID NO: 3735518 - RNA, 16 nt, Human
uaauuuuuuuuaguau

SEQ ID NO: 3735519 - RNA, 19 nt, Human
uacaaaaaaaaaguuuuau

SEQ ID NO: 3735520 - RNA, 17 nt, Human
uacaaaaacacagcaag

SEQ ID NO: 3735521 - RNA, 16 nt, Human
uacaaaaacauggccu

SEQ ID NO: 3735522 - RNA, 13 nt, Human
uacaaaaagaaaa

SEQ ID NO: 3735523 - RNA, 20 nt, Human
uacaaaaagcauaaaaauua

SEQ ID NO: 3735524 - RNA, 17 nt, Human
uacaaaaauaaauuuau

SEQ ID NO: 3735525 - RNA, 18 nt, Human
uacaaaaauauaaaauau

SEQ ID NO: 3735526 - RNA, 20 nt, Human
uacaaaaauauaaaauauga

SEQ ID NO: 3735527 - RNA, 16 nt, Human
uacaaaaaucagccag

SEQ ID NO: 3735528 - RNA, 17 nt, Human
uacaaaaaucagccaga

SEQ ID NO: 3735529 - RNA, 13 nt, Human
uacaaaaauuccu

SEQ ID NO: 3735530 - RNA, 14 nt, Human
uacaaaacaaacuc

SEQ ID NO: 3735531 - RNA, 22 nt, Human
uacaaaacaaacucauucauua

SEQ ID NO: 3735532 - RNA, 21 nt, Human
uacaaaaccacaguguaccau

SEQ ID NO: 3735533 - RNA, 17 nt, Human
uacaaaacgcgcagaug

SEQ ID NO: 3735534 - RNA, 12 nt, Human
uacaaaacuuua

SEQ ID NO: 3735535 - RNA, 16 nt, Human
uacaaaagaagaugaa

SEQ ID NO: 3735536 - RNA, 21 nt, Human
uacaaaagaagggcugguauu

SEQ ID NO: 3735537 - RNA, 13 nt, Human
uacaaaaggcucc

SEQ ID NO: 3735538 - RNA, 18 nt, Human
uacaaaauaaaguuacau

SEQ ID NO: 3735539 - RNA, 15 nt, Human
uacaaaauguaacug

SEQ ID NO: 3735540 - RNA, 15 nt, Human
uacaaaauuaagcaa

SEQ ID NO: 3735541 - RNA, 19 nt, Human
uacaaaauuugaaauuuag

SEQ ID NO: 3735542 - RNA, 18 nt, Human
uacaaacaagcauauaaa

SEQ ID NO: 3735543 - RNA, 17 nt, Human
uacaaacaccuggacuu

SEQ ID NO: 3735544 - RNA, 12 nt, Human
uacaaacauauu

SEQ ID NO: 3735545 - RNA, 15 nt, Human
uacaaacauauuugu

SEQ ID NO: 3735546 - RNA, 16 nt, Human
uacaaacuaaggugcu

SEQ ID NO: 3735547 - RNA, 11 nt, Human
uacaaacugca

SEQ ID NO: 3735548 - RNA, 12 nt, Human
uacaaacugcaa

SEQ ID NO: 3735549 - RNA, 13 nt, Human
uacaaacugcaau

SEQ ID NO: 3735550 - RNA, 17 nt, Human
uacaaacugcaauagag

SEQ ID NO: 3735551 - RNA, 22 nt, Human
uacaaagaagacauguuuuaga

SEQ ID NO: 3735552 - RNA, 16 nt, Human
uacaaagauucucuau

SEQ ID NO: 3735553 - RNA, 16 nt, Human
uacaaagcgugcacaa

SEQ ID NO: 3735554 - RNA, 23 nt, Human
uacaaaggggaaagaacauaaag

SEQ ID NO: 3735555 - RNA, 15 nt, Human
uacaaagguuuaaau

SEQ ID NO: 3735556 - RNA, 17 nt, Human
uacaaagguuuaaauga

SEQ ID NO: 3735557 - RNA, 15 nt, Human
uacaaaguguguauu

SEQ ID NO: 3735558 - RNA, 12 nt, Human
uacaaauacucu

SEQ ID NO: 3735559 - RNA, 19 nt, Human
uacaaauacucuuaggaag

SEQ ID NO: 3735560 - RNA, 17 nt, Human
uacaaauauaaaucuua

SEQ ID NO: 3735561 - RNA, 14 nt, Human
uacaaauauaagaa

SEQ ID NO: 3735562 - RNA, 17 nt, Human
uacaaauauaagaauaa

SEQ ID NO: 3735563 - RNA, 15 nt, Human
uacaaauauauuguu

SEQ ID NO: 3735564 - RNA, 17 nt, Human
uacaaauauauuguuaa

SEQ ID NO: 3735565 - RNA, 16 nt, Human
uacaaaucagaaguca

SEQ ID NO: 3735566 - RNA, 17 nt, Human
uacaaaucagaagucau

SEQ ID NO: 3735567 - RNA, 19 nt, Human
uacaaaucagaagucaucu

SEQ ID NO: 3735568 - RNA, 12 nt, Human
uacaaaugaaaa

SEQ ID NO: 3735569 - RNA, 23 nt, Human
uacaaaugauugcuuuuaaaauu

SEQ ID NO: 3735570 - RNA, 19 nt, Human
uacaaaugcaucuuugaug

SEQ ID NO: 3735571 - RNA, 19 nt, Human
uacaaaugccuuaaaaugg

SEQ ID NO: 3735572 - RNA, 21 nt, Human
uacaaaugccuuaaaauggaa

SEQ ID NO: 3735573 - RNA, 22 nt, Human
uacaaaugccuuaaaauggaau

SEQ ID NO: 3735574 - RNA, 12 nt, Human
uacaaauguuuu

SEQ ID NO: 3735575 - RNA, 19 nt, Human
uacaaauuaaaaagauucu

SEQ ID NO: 3735576 - RNA, 15 nt, Human
uacaaauuagaaaau

SEQ ID NO: 3735577 - RNA, 19 nt, Human
uacaaauuauaaaaagcca

SEQ ID NO: 3735578 - RNA, 19 nt, Human
uaaccagcagaaaugccuu

SEQ ID NO: 3735579 - RNA, 15 nt, Human
uaaccagcuguaaca

SEQ ID NO: 3735580 - RNA, 17 nt, Human
uaaccaggggccaugaa

SEQ ID NO: 3735581 - RNA, 22 nt, Human
uaaccaguuaccacacaucuau

SEQ ID NO: 3735582 - RNA, 17 nt, Human
uaaccaucacugguugc

SEQ ID NO: 3735583 - RNA, 17 nt, Human
uaaccauggugcuuguu

SEQ ID NO: 3735584 - RNA, 18 nt, Human
uaaccauugucuuguucu

SEQ ID NO: 3735585 - RNA, 20 nt, Human
uaaccauugucuuguucugu

SEQ ID NO: 3735586 - RNA, 23 nt, Human
uaaccauugucuuguucugugau

SEQ ID NO: 3735587 - RNA, 12 nt, Human
uaacccaaggag

SEQ ID NO: 3735588 - RNA, 24 nt, Human
uaacccacuugucacugacacaaa

SEQ ID NO: 3735589 - RNA, 13 nt, Human
uaacccagaaaau

SEQ ID NO: 3735590 - RNA, 13 nt, Human
uaacccagauuuu

SEQ ID NO: 3735591 - RNA, 15 nt, Human
uaaccccaaaaugaa

SEQ ID NO: 3735592 - RNA, 15 nt, Human
uaaccccauucuuug

SEQ ID NO: 3735593 - RNA, 16 nt, Human
uaaccccauucuuugc

SEQ ID NO: 3735594 - RNA, 14 nt, Human
uaacccuacaccca

SEQ ID NO: 3735595 - RNA, 17 nt, Human
uaacccuuugugugcuc

SEQ ID NO: 3735596 - RNA, 23 nt, Human
uaaccgagaucaguauuuaacua

SEQ ID NO: 3735597 - RNA, 15 nt, Human
uaaccgaugcuuuac

SEQ ID NO: 3735598 - RNA, 19 nt, Human
uaaccgcacaugcacacac

SEQ ID NO: 3735599 - RNA, 17 nt, Human
uaaccuaguuaaagaaa

SEQ ID NO: 3735600 - RNA, 20 nt, Human
uaaccuaguuaaagaaagga

SEQ ID NO: 3735601 - RNA, 15 nt, Human
uaaccucagcucugg

SEQ ID NO: 3735602 - RNA, 16 nt, Human
uaaccucagcucuggg

SEQ ID NO: 3735603 - RNA, 19 nt, Human
uaaccucagugucauuuau

SEQ ID NO: 3735604 - RNA, 14 nt, Human
uaaccucaucuucu

SEQ ID NO: 3735605 - RNA, 18 nt, Human
uaaccucaucuucuucac

SEQ ID NO: 3735606 - RNA, 16 nt, Human
uaaccucgcccucucc

SEQ ID NO: 3735607 - RNA, 16 nt, Human
uaaccucuaaauucuu

SEQ ID NO: 3735608 - RNA, 17 nt, Human
uaaccucuucagaggcc

SEQ ID NO: 3735609 - RNA, 18 nt, Human
uaaccugagauggcccuc

SEQ ID NO: 3735610 - RNA, 16 nt, Human
uaaccugcaaaaucug

SEQ ID NO: 3735611 - RNA, 19 nt, Human
uaaccugccagggagacag

SEQ ID NO: 3735612 - RNA, 15 nt, Human
uaaccuggugcugga

SEQ ID NO: 3735613 - RNA, 13 nt, Human
uaaccugugucug

SEQ ID NO: 3735614 - RNA, 22 nt, Human
uaaccugugucugcgaaguccu

SEQ ID NO: 3735615 - RNA, 17 nt, Human
uaaccuuaucauaaauu

SEQ ID NO: 3735616 - RNA, 18 nt, Human
uaaccuuauccugcauug

SEQ ID NO: 3735617 - RNA, 19 nt, Human
uaaccuugaaugcugccag

SEQ ID NO: 3735618 - RNA, 20 nt, Human
uaaccuugaaugcugccagu

SEQ ID NO: 3735619 - RNA, 16 nt, Human
uaaccuugccugguac

SEQ ID NO: 3735620 - RNA, 14 nt, Human
uaaccuuuacauga

SEQ ID NO: 3735621 - RNA, 20 nt, Human
uaacgcccuauuuuugcaau

SEQ ID NO: 3735622 - RNA, 14 nt, Human
uaacgccugagccc

SEQ ID NO: 3735623 - RNA, 15 nt, Human
uaacgcgucuuccug

SEQ ID NO: 3735624 - RNA, 14 nt, Human
uaacggaucagaaa

SEQ ID NO: 3735625 - RNA, 22 nt, Human
uaacggucuguucuguuucaag

SEQ ID NO: 3735626 - RNA, 15 nt, Human
uaacguaaauacaca

SEQ ID NO: 3735627 - RNA, 13 nt, Human
uaacguauaaaag

SEQ ID NO: 3735628 - RNA, 22 nt, Human
uaacguguaucuuuaagaaaaa

SEQ ID NO: 3735629 - RNA, 16 nt, Human
uaacguugagccccug

SEQ ID NO: 3735630 - RNA, 14 nt, Human
uaacguugcugugg

SEQ ID NO: 3735631 - RNA, 17 nt, Human
uaacguuuaagccaaaa

SEQ ID NO: 3735632 - RNA, 15 nt, Human
uaacguuuuuccuuu

SEQ ID NO: 3735633 - RNA, 18 nt, Human
uaacguuuuuccuuuaaa

SEQ ID NO: 3735634 - RNA, 20 nt, Human
uaacuaaaacaaagccacuu

SEQ ID NO: 3735635 - RNA, 21 nt, Human
uaacuaaaauaauuuuguaau

SEQ ID NO: 3735636 - RNA, 16 nt, Human
uaacuaaaauguaucu

SEQ ID NO: 3735637 - RNA, 17 nt, Human
uaacuaaaauguaucua

SEQ ID NO: 3735638 - RNA, 23 nt, Human
uaacuaaaauguaucuaagaaua

SEQ ID NO: 3735639 - RNA, 17 nt, Human
uaacuaaauuugauacu

SEQ ID NO: 3735640 - RNA, 16 nt, Human
uaacuaacauguccug

SEQ ID NO: 3735641 - RNA, 18 nt, Human
uaacuaacugcauacacu

SEQ ID NO: 3735642 - RNA, 15 nt, Human
uaacuacaaaugauc

SEQ ID NO: 3735643 - RNA, 14 nt, Human
uaacuacauuuaug

SEQ ID NO: 3735644 - RNA, 20 nt, Human
uaacuacccuuaauuacuua

SEQ ID NO: 3735645 - RNA, 22 nt, Human
uaacuacccuuaauuacuuaaa

SEQ ID NO: 3735646 - RNA, 17 nt, Human
uaacuaccuuuggcuua

SEQ ID NO: 3735647 - RNA, 15 nt, Human
uaacuacuaguuuuu

SEQ ID NO: 3735648 - RNA, 22 nt, Human
uaacuacuauauugauuguccu

SEQ ID NO: 3735649 - RNA, 15 nt, Human
uaacuacuguguucc

SEQ ID NO: 3735650 - RNA, 17 nt, Human
uaacuacuguguuccug

SEQ ID NO: 3735651 - RNA, 16 nt, Human
uaacuacuuuauaacu

SEQ ID NO: 3735652 - RNA, 18 nt, Human
uaacuagaauuuauucaa

SEQ ID NO: 3735653 - RNA, 18 nt, Human
uaacuagacaccaaaguu

SEQ ID NO: 3735654 - RNA, 21 nt, Human
uaacuagagcagcccuggagu

SEQ ID NO: 3735655 - RNA, 22 nt, Human
uaacuagagcagcccuggaguc

SEQ ID NO: 3735656 - RNA, 19 nt, Human
uaacuagauggugcugaga

SEQ ID NO: 3735657 - RNA, 21 nt, Human
uaacuagauggugcugagaag

SEQ ID NO: 3735658 - RNA, 13 nt, Human
uaacuaguggcuc

SEQ ID NO: 3735659 - RNA, 17 nt, Human
uaacuaguguugcuugg

SEQ ID NO: 3735660 - RNA, 18 nt, Human
uaacuauauuugcuuuuu

SEQ ID NO: 3735661 - RNA, 14 nt, Human
uaacuauguacaau

SEQ ID NO: 3735662 - RNA, 14 nt, Human
uaacuauucaguug

SEQ ID NO: 3735663 - RNA, 23 nt, Human
uaacuauugcauuuauauguacc

SEQ ID NO: 3735664 - RNA, 19 nt, Human
uaacuauuuuauuuucuaa

SEQ ID NO: 3735665 - RNA, 20 nt, Human
uaacucaaauacacauuugc

SEQ ID NO: 3735666 - RNA, 22 nt, Human
uaacucaauauuuuccaugaaa

SEQ ID NO: 3735667 - RNA, 14 nt, Human
uaacucagaucacu

SEQ ID NO: 3735668 - RNA, 20 nt, Human
uaacucagaucacuacugca

SEQ ID NO: 3735669 - RNA, 18 nt, Human
uaacucaggacuccagcc

SEQ ID NO: 3735670 - RNA, 19 nt, Human
uaacucauaccuuuaaagg

SEQ ID NO: 3735671 - RNA, 14 nt, Human
uaacucaucuguca

SEQ ID NO: 3735672 - RNA, 12 nt, Human
uaacucauuaga

SEQ ID NO: 3735673 - RNA, 15 nt, Human
uaacucauugcucug

SEQ ID NO: 3735674 - RNA, 15 nt, Human
uaacuccccacccca

SEQ ID NO: 3735675 - RNA, 23 nt, Human
uaacuccccuguuucaaucacug

SEQ ID NO: 3735676 - RNA, 17 nt, Human
uaacuccuaagaggagc

SEQ ID NO: 3735677 - RNA, 15 nt, Human
uaacuccucccaggg

SEQ ID NO: 3735678 - RNA, 18 nt, Human
uaacuccucccaggguuu

SEQ ID NO: 3735679 - RNA, 14 nt, Human
uaacuccuucuugu

SEQ ID NO: 3735680 - RNA, 16 nt, Human
uaacucuaaaagaucc

SEQ ID NO: 3735681 - RNA, 16 nt, Human
uaacucugauguaaau

SEQ ID NO: 3735682 - RNA, 17 nt, Human
uaacucugauguaaaug

SEQ ID NO: 3735683 - RNA, 18 nt, Human
uaacucuguaaaaacacu

SEQ ID NO: 3735684 - RNA, 22 nt, Human
uaacucuucuuucauuucuucu

SEQ ID NO: 3735685 - RNA, 13 nt, Human
uaacucuuuggau

SEQ ID NO: 3735686 - RNA, 14 nt, Human
uaacugaaaaugug

SEQ ID NO: 3735687 - RNA, 16 nt, Human
uaacugaaauaaaaaa

SEQ ID NO: 3735688 - RNA, 15 nt, Human
uaacugaacuuugaa

SEQ ID NO: 3735689 - RNA, 17 nt, Human
uaacugaagauguugag

SEQ ID NO: 3735690 - RNA, 15 nt, Human
uaacugaauaccacu

SEQ ID NO: 3735691 - RNA, 13 nt, Human
uaacugaauuugg

SEQ ID NO: 3735692 - RNA, 16 nt, Human
uaacugacaaaucaag

SEQ ID NO: 3735693 - RNA, 19 nt, Human
uaacugacaaaucaaguuu

SEQ ID NO: 3735694 - RNA, 11 nt, Human
uaacugacaag

SEQ ID NO: 3735695 - RNA, 22 nt, Human
uaacugacaagcuccauuuaaa

SEQ ID NO: 3735696 - RNA, 15 nt, Human
uaacugacuuaguuc

SEQ ID NO: 3735697 - RNA, 20 nt, Human
uaacugaguagcucuccuga

SEQ ID NO: 3735698 - RNA, 23 nt, Human
uaacugaguagcucuccugacuu

SEQ ID NO: 3735699 - RNA, 21 nt, Human
uaacugauuugcaauaaaaau

SEQ ID NO: 3735700 - RNA, 12 nt, Human
uaacugcaauuu

SEQ ID NO: 3735701 - RNA, 17 nt, Human
uaacugcccagcggaca

SEQ ID NO: 3735702 - RNA, 14 nt, Human
uaacugccuagaaa

SEQ ID NO: 3735703 - RNA, 22 nt, Human
uaacugccuugaaccugugagu

SEQ ID NO: 3735704 - RNA, 11 nt, Human
uaacugcucuu

SEQ ID NO: 3735705 - RNA, 16 nt, Human
uaacugcucuugggca

SEQ ID NO: 3735706 - RNA, 15 nt, Human
uaacuggaaaacaga

SEQ ID NO: 3735707 - RNA, 19 nt, Human
uaacuggaaaacagaacac

SEQ ID NO: 3735708 - RNA, 21 nt, Human
uaacuggaaaacagaacacuu

SEQ ID NO: 3735709 - RNA, 22 nt, Human
uaacuggaagcauguaggagaa

SEQ ID NO: 3735710 - RNA, 23 nt, Human
uaacuggcaguuuuccauugguu

SEQ ID NO: 3735711 - RNA, 13 nt, Human
uaacugguauaga

SEQ ID NO: 3735712 - RNA, 20 nt, Human
uaacuggugcacuuuguaaa

SEQ ID NO: 3735713 - RNA, 16 nt, Human
uaacuguaauuauuug

SEQ ID NO: 3735714 - RNA, 19 nt, Human
uaacuguauauuuguauga

SEQ ID NO: 3735715 - RNA, 20 nt, Human
uaacuguauauuuguaugau

SEQ ID NO: 3735716 - RNA, 11 nt, Human
uaacuguaucu

SEQ ID NO: 3735717 - RNA, 12 nt, Human
uaacuguauuug

SEQ ID NO: 3735718 - RNA, 14 nt, Human
uaacuguccugucc

SEQ ID NO: 3735719 - RNA, 15 nt, Human
uaacuguccuguccu

SEQ ID NO: 3735720 - RNA, 18 nt, Human
uaacugugaaguuuacau

SEQ ID NO: 3735721 - RNA, 15 nt, Human
uaacugugcugaaug

SEQ ID NO: 3735722 - RNA, 13 nt, Human
uaacugugguguu

SEQ ID NO: 3735723 - RNA, 22 nt, Human
uaacuguguauguacauauaua

SEQ ID NO: 3735724 - RNA, 14 nt, Human
uaacuguuacagua

SEQ ID NO: 3735725 - RNA, 17 nt, Human
uaacuguuacaguaaug

SEQ ID NO: 3735726 - RNA, 13 nt, Human
uaacuguuaccau

SEQ ID NO: 3735727 - RNA, 15 nt, Human
uaacuguuaccauug

SEQ ID NO: 3735728 - RNA, 18 nt, Human
uaacuguuaccauuggaa

SEQ ID NO: 3735729 - RNA, 15 nt, Human
gcagcagaggcacug

SEQ ID NO: 3735730 - RNA, 19 nt, Human
gcagcagauuggaaggaga

SEQ ID NO: 3735731 - RNA, 23 nt, Human
gcagcagauuggaaggagacaca

SEQ ID NO: 3735732 - RNA, 13 nt, Human
gcagcagauuuua

SEQ ID NO: 3735733 - RNA, 20 nt, Human
gcagcagauuuuaggaaaug

SEQ ID NO: 3735734 - RNA, 14 nt, Human
gcagcagcagcccu

SEQ ID NO: 3735735 - RNA, 15 nt, Human
gcagcagcagcccug

SEQ ID NO: 3735736 - RNA, 16 nt, Human
gcagcagcagcccugc

SEQ ID NO: 3735737 - RNA, 11 nt, Human
gcagcagccag

SEQ ID NO: 3735738 - RNA, 12 nt, Human
gcagcagccagc

SEQ ID NO: 3735739 - RNA, 18 nt, Human
gcagcagccagcccugcc

SEQ ID NO: 3735740 - RNA, 19 nt, Human
gcagcagccagcccugccu

SEQ ID NO: 3735741 - RNA, 22 nt, Human
gcagcagccagcccugccugga

SEQ ID NO: 3735742 - RNA, 13 nt, Human
gcagcagcccaag

SEQ ID NO: 3735743 - RNA, 11 nt, Human
gcagcagcccu

SEQ ID NO: 3735744 - RNA, 13 nt, Human
gcagcagcccugc

SEQ ID NO: 3735745 - RNA, 13 nt, Human
gcagcagcuugcu

SEQ ID NO: 3735746 - RNA, 23 nt, Human
gcagcagcuuuuaauacagggua

SEQ ID NO: 3735747 - RNA, 12 nt, Human
gcagcaggaggg

SEQ ID NO: 3735748 - RNA, 13 nt, Human
gcagcaggagggg

SEQ ID NO: 3735749 - RNA, 19 nt, Human
uaaguacuauguaucaaug

SEQ ID NO: 3735750 - RNA, 12 nt, Human
uaaguacuguaa

SEQ ID NO: 3735751 - RNA, 21 nt, Human
uaaguacuguaauaauaccuc

SEQ ID NO: 3735752 - RNA, 13 nt, Human
uaaguauacaguu

SEQ ID NO: 3735753 - RNA, 14 nt, Human
uaaguauuaaaaca

SEQ ID NO: 3735754 - RNA, 15 nt, Human
uaaguauuaaaacau

SEQ ID NO: 3735755 - RNA, 19 nt, Human
uaaguauuaaaacauugga

SEQ ID NO: 3735756 - RNA, 19 nt, Human
uaaguauucuuauuuaaug

SEQ ID NO: 3735757 - RNA, 12 nt, Human
uaaguauuuagg

SEQ ID NO: 3735758 - RNA, 14 nt, Human
uaaguauuuauaau

SEQ ID NO: 3735759 - RNA, 13 nt, Human
uaaguauuucaaa

SEQ ID NO: 3735760 - RNA, 21 nt, Human
uaaguauuucagaugcuuuag

SEQ ID NO: 3735761 - RNA, 17 nt, Human
uaaguauuugaaacuga

SEQ ID NO: 3735762 - RNA, 14 nt, Human
uaaguauuuggaau

SEQ ID NO: 3735763 - RNA, 20 nt, Human
uaaguauuuuccuguuguca

SEQ ID NO: 3735764 - RNA, 14 nt, Human
uaagucaacaguaa

SEQ ID NO: 3735765 - RNA, 22 nt, Human
uaagucacccuagcccucuccc

SEQ ID NO: 3735766 - RNA, 13 nt, Human
uaagucagaacag

SEQ ID NO: 3735767 - RNA, 16 nt, Human
uaagucaguguugaga

SEQ ID NO: 3735768 - RNA, 17 nt, Human
uaagucauguauguuuc

SEQ ID NO: 3735769 - RNA, 19 nt, Human
uaagucauguuccuucaag

SEQ ID NO: 3735770 - RNA, 18 nt, Human
uaagucauucauaaaccu

SEQ ID NO: 3735771 - RNA, 17 nt, Human
uacauucucaguuuuuc

SEQ ID NO: 3735772 - RNA, 20 nt, Human
uacauucucaguuuuucuua

SEQ ID NO: 3735773 - RNA, 13 nt, Human
uacauucuguuaa

SEQ ID NO: 3735774 - RNA, 17 nt, Human
uacauucuucaagaucc

SEQ ID NO: 3735775 - RNA, 21 nt, Human
uacauucuucaagaucccauu

SEQ ID NO: 3735776 - RNA, 22 nt, Human
uacauucuuuuugcucuaaaau

SEQ ID NO: 3735777 - RNA, 17 nt, Human
uacauugaauuagaaac

SEQ ID NO: 3735778 - RNA, 22 nt, Human
uacauugaguagacacauuuaa

SEQ ID NO: 3735779 - RNA, 21 nt, Human
uacauugcuggucuuguaaga

SEQ ID NO: 3735780 - RNA, 20 nt, Human
uacauuguacgaagaguauu

SEQ ID NO: 3735781 - RNA, 16 nt, Human
uacauugugaaacuuc

SEQ ID NO: 3735782 - RNA, 21 nt, Human
uacauuguuaccucuauauac

SEQ ID NO: 3735783 - RNA, 23 nt, Human
uacauuguugagcuauugcuguu

SEQ ID NO: 3735784 - RNA, 21 nt, Human
uacauuuaaaauugcuauguu

SEQ ID NO: 3735785 - RNA, 16 nt, Human
uacauuuaaagcauug

SEQ ID NO: 3735786 - RNA, 17 nt, Human
uacauuuaaagcauugc

SEQ ID NO: 3735787 - RNA, 15 nt, Human
uacauuuacaaacug

SEQ ID NO: 3735788 - RNA, 19 nt, Human
uacauuuauaauguuugcu

SEQ ID NO: 3735789 - RNA, 14 nt, Human
uacauuuaugauuu

SEQ ID NO: 3735790 - RNA, 23 nt, Human
uacauuuaugauuuaauaaaaua

SEQ ID NO: 3735791 - RNA, 17 nt, Human
uacauuuauuuauccag

SEQ ID NO: 3735792 - RNA, 20 nt, Human
uacauuuauuuauccagaaa

SEQ ID NO: 3735793 - RNA, 18 nt, Human
uacauuucacaggcuaau

SEQ ID NO: 3735794 - RNA, 16 nt, Human
uacauuuccaaaugaa

SEQ ID NO: 3735795 - RNA, 13 nt, Human
uacauuuccuaaa

SEQ ID NO: 3735796 - RNA, 23 nt, Human
uacauuucuccuuugauaaaaua

SEQ ID NO: 3735797 - RNA, 22 nt, Human
uacauuucuuagacuacauuua

SEQ ID NO: 3735798 - RNA, 16 nt, Human
uacauuugaacuugau

SEQ ID NO: 3735799 - RNA, 19 nt, Human
uacauuugaugcaugucuu

SEQ ID NO: 3735800 - RNA, 21 nt, Human
uacauuugaugcaugucuuuu

SEQ ID NO: 3735801 - RNA, 21 nt, Human
uacauuugggaguuuuuauga

SEQ ID NO: 3735802 - RNA, 16 nt, Human
uacauuuguauguugu

SEQ ID NO: 3735803 - RNA, 11 nt, Human
uacauuugugu

SEQ ID NO: 3735804 - RNA, 12 nt, Human
uacauuuuaaca

SEQ ID NO: 3735805 - RNA, 17 nt, Human
uacauuuuguaccaacc

SEQ ID NO: 3735806 - RNA, 17 nt, Human
uacauuuuuauuuauga

SEQ ID NO: 3735807 - RNA, 19 nt, Human
uacauuuuucaacuuugaa

SEQ ID NO: 3735808 - RNA, 21 nt, Human
uacauuuuucaacuuugaaua

SEQ ID NO: 3735809 - RNA, 15 nt, Human
uacauuuuuuaagcu

SEQ ID NO: 3735810 - RNA, 13 nt, Human
uacauuuuuugaa

SEQ ID NO: 3735811 - RNA, 15 nt, Human
uacauuuuuugaaau

SEQ ID NO: 3735812 - RNA, 20 nt, Human
uaccaaaaaaauuacaguuu

SEQ ID NO: 3735813 - RNA, 15 nt, Human
uaccaaaaauaaaua

SEQ ID NO: 3735814 - RNA, 17 nt, Human
uaccaaaauuauuucag

SEQ ID NO: 3735815 - RNA, 14 nt, Human
uaccaaacagcaaa

SEQ ID NO: 3735816 - RNA, 15 nt, Human
uaccaaacagcaaac

SEQ ID NO: 3735817 - RNA, 21 nt, Human
uaccaaacagcaaaccaagag

SEQ ID NO: 3735818 - RNA, 12 nt, Human
uaccaaagcaca

SEQ ID NO: 3735819 - RNA, 13 nt, Human
uaccaaauuaaaa

SEQ ID NO: 3735820 - RNA, 16 nt, Human
uaccaacacgagcagg

SEQ ID NO: 3735821 - RNA, 13 nt, Human
uaccaacuuucug

SEQ ID NO: 3735822 - RNA, 15 nt, Human
uaccaacuuucugua

SEQ ID NO: 3735823 - RNA, 20 nt, Human
uaccaaguauagccuauggc

SEQ ID NO: 3735824 - RNA, 16 nt, Human
uaccaaguuauauaaa

SEQ ID NO: 3735825 - RNA, 12 nt, Human
uaccaauaaagu

SEQ ID NO: 3735826 - RNA, 14 nt, Human
uaccaauaaaguga

SEQ ID NO: 3735827 - RNA, 16 nt, Human
uaccaauauuuaaucu

SEQ ID NO: 3735828 - RNA, 15 nt, Human
uaccaaucauuuuaa

SEQ ID NO: 3735829 - RNA, 13 nt, Human
uaccaaugaaaaa

SEQ ID NO: 3735830 - RNA, 11 nt, Human
uaccaaugcau

SEQ ID NO: 3735831 - RNA, 12 nt, Human
uaccaaugcaug

SEQ ID NO: 3735832 - RNA, 18 nt, Human
uaccacaaugcagugccu

SEQ ID NO: 3735833 - RNA, 12 nt, Human
uaccacagcagc

SEQ ID NO: 3735834 - RNA, 17 nt, Human
uaccacaucaaauaaga

SEQ ID NO: 3735835 - RNA, 15 nt, Human
uaccaccacgcccgg

SEQ ID NO: 3735836 - RNA, 13 nt, Human
uaccaccagcugu

SEQ ID NO: 3735837 - RNA, 14 nt, Human
uaccaccagcugug

SEQ ID NO: 3735838 - RNA, 21 nt, Human
uaccaccaucccgugcuuuua

SEQ ID NO: 3735839 - RNA, 15 nt, Human
uaccacccccacacc

SEQ ID NO: 3735840 - RNA, 15 nt, Human
uaccaccccuuccug

SEQ ID NO: 3735841 - RNA, 16 nt, Human
uaccaccccuuccugu

SEQ ID NO: 3735842 - RNA, 17 nt, Human
uaccaccccuuccuguc

SEQ ID NO: 3735843 - RNA, 14 nt, Human
uaccacucaggcca

SEQ ID NO: 3735844 - RNA, 13 nt, Human
uaccacuccugcc

SEQ ID NO: 3735845 - RNA, 18 nt, Human
uaccacugaagauagaag

SEQ ID NO: 3735846 - RNA, 19 nt, Human
uaccacugaagauagaaga

SEQ ID NO: 3735847 - RNA, 21 nt, Human
uaccacugaagauagaagaaa

SEQ ID NO: 3735848 - RNA, 20 nt, Human
uaccacugaaucuguacaga

SEQ ID NO: 3735849 - RNA, 13 nt, Human
uaccagaagggaa

SEQ ID NO: 3735850 - RNA, 15 nt, Human
uaccagacugcaggu

SEQ ID NO: 3735851 - RNA, 19 nt, Human
uaccagagaaaaagggagg

SEQ ID NO: 3735852 - RNA, 23 nt, Human
uaccagauaacuuuuuuuuuucu

SEQ ID NO: 3735853 - RNA, 12 nt, Human
uaccagaugcag

SEQ ID NO: 3735854 - RNA, 16 nt, Human
uaccagcccuggggcu

SEQ ID NO: 3735855 - RNA, 13 nt, Human
uaccagcgaggag

SEQ ID NO: 3735856 - RNA, 18 nt, Human
uaccagcgcccgcugggc

SEQ ID NO: 3735857 - RNA, 19 nt, Human
uaccagcgcccgcugggcu

SEQ ID NO: 3735858 - RNA, 20 nt, Human
uaccagcgcccgcugggcug

SEQ ID NO: 3735859 - RNA, 21 nt, Human
uaccagcguauauauaagaaa

SEQ ID NO: 3735860 - RNA, 22 nt, Human
uaccagcguauauauaagaaag

SEQ ID NO: 3735861 - RNA, 17 nt, Human
uaccagcuacccugugu

SEQ ID NO: 3735862 - RNA, 17 nt, Human
uaccagcuuuuaaccau

SEQ ID NO: 3735863 - RNA, 14 nt, Human
uaccaggauuuuuu

SEQ ID NO: 3735864 - RNA, 17 nt, Human
uaccaggcaccaaaaga

SEQ ID NO: 3735865 - RNA, 18 nt, Human
uaccaggcaccaaaagaa

SEQ ID NO: 3735866 - RNA, 21 nt, Human
uaccaggcaccaaaagaagua

SEQ ID NO: 3735867 - RNA, 20 nt, Human
uaccaggccgccccagccuc

SEQ ID NO: 3735868 - RNA, 19 nt, Human
uaccagguauuauuaucuu

SEQ ID NO: 3735869 - RNA, 14 nt, Human
uaccaggucuccuc

SEQ ID NO: 3735870 - RNA, 20 nt, Human
uaccaggucuccuccaccgc

SEQ ID NO: 3735871 - RNA, 22 nt, Human
uaccaggucuccuccaccgcca

SEQ ID NO: 3735872 - RNA, 14 nt, Human
uaccagguugaaag

SEQ ID NO: 3735873 - RNA, 16 nt, Human
uaccagguugaaagac

SEQ ID NO: 3735874 - RNA, 16 nt, Human
uaccaguaaaguguaa

SEQ ID NO: 3735875 - RNA, 19 nt, Human
uaccaguauuuagaagcca

SEQ ID NO: 3735876 - RNA, 20 nt, Human
uaccaguauuuagaagccaa

SEQ ID NO: 3735877 - RNA, 23 nt, Human
uaccagucuuuaaaggcccagcc

SEQ ID NO: 3735878 - RNA, 18 nt, Human
uaccagugaauuuuugca

SEQ ID NO: 3735879 - RNA, 20 nt, Human
uaccagugaauuuuugcaau

SEQ ID NO: 3735880 - RNA, 23 nt, Human
uaccagugaauuuuugcaauaau

SEQ ID NO: 3735881 - RNA, 19 nt, Human
uaccagugcaggcuggcca

SEQ ID NO: 3735882 - RNA, 11 nt, Human
uaccagugugg

SEQ ID NO: 3735883 - RNA, 15 nt, Human
uaccaguuaauuacu

SEQ ID NO: 3735884 - RNA, 12 nt, Human
uaccaguugccu

SEQ ID NO: 3735885 - RNA, 14 nt, Human
uaccaguuugcuga

SEQ ID NO: 3735886 - RNA, 20 nt, Human
uaccauaguaccauuuauac

SEQ ID NO: 3735887 - RNA, 15 nt, Human
uaccauauuuaucca

SEQ ID NO: 3735888 - RNA, 17 nt, Human
uaccaucacugaguuuu

SEQ ID NO: 3735889 - RNA, 20 nt, Human
uaccaucacugaguuuucca

SEQ ID NO: 3735890 - RNA, 18 nt, Human
uaccaucagggacaggau

SEQ ID NO: 3735891 - RNA, 17 nt, Human
uaccaucuuacuugagc

SEQ ID NO: 3735892 - RNA, 16 nt, Human
uaccaugccauuuaaa

SEQ ID NO: 3735893 - RNA, 18 nt, Human
uaccaugcuucacaaugu

SEQ ID NO: 3735894 - RNA, 14 nt, Human
uaccauuaaaacug

SEQ ID NO: 3735895 - RNA, 18 nt, Human
uaccauuaaaacugcuuu

SEQ ID NO: 3735896 - RNA, 20 nt, Human
uaccauuaaaacugcuuuuu

SEQ ID NO: 3735897 - RNA, 13 nt, Human
uaccauuaaaaua

SEQ ID NO: 3735898 - RNA, 14 nt, Human
uaccauuaaaccau

SEQ ID NO: 3735899 - RNA, 20 nt, Human
uaccauuaaaccaucucccu

SEQ ID NO: 3735900 - RNA, 20 nt, Human
uaccauucagaucacugaau

SEQ ID NO: 3735901 - RNA, 19 nt, Human
uaccauuuaguaagaauac

SEQ ID NO: 3735902 - RNA, 15 nt, Human
uaccauuuauacaaa

SEQ ID NO: 3735903 - RNA, 18 nt, Human
uaccauuuauacaaauua

SEQ ID NO: 3735904 - RNA, 22 nt, Human
uaccauuuccguaauucuuauu

SEQ ID NO: 3735905 - RNA, 21 nt, Human
uaccauuugcuacuguacaua

SEQ ID NO: 3735906 - RNA, 15 nt, Human
uaccauuuucugguu

SEQ ID NO: 3735907 - RNA, 14 nt, Human
uaccauuuuucauu

SEQ ID NO: 3735908 - RNA, 21 nt, Human
uaccauuuuuuaaggaaacaa

SEQ ID NO: 3735909 - RNA, 21 nt, Human
uacccaaccacucaaauuaau

SEQ ID NO: 3735910 - RNA, 18 nt, Human
uacccacaccucugccag

SEQ ID NO: 3735911 - RNA, 18 nt, Human
uacccacauguacagaca

SEQ ID NO: 3735912 - RNA, 12 nt, Human
uacccacccaga

SEQ ID NO: 3735913 - RNA, 22 nt, Human
uacccaccgggccacuccuucc

SEQ ID NO: 3735914 - RNA, 14 nt, Human
uacccaccucagcc

SEQ ID NO: 3735915 - RNA, 15 nt, Human
uacccaccucagccu

SEQ ID NO: 3735916 - RNA, 22 nt, Human
uacccagaaugucagauuccuu

SEQ ID NO: 3735917 - RNA, 20 nt, Human
uacccagccaucugcccagg

SEQ ID NO: 3735918 - RNA, 13 nt, Human
uacccagcccauc

SEQ ID NO: 3735919 - RNA, 14 nt, Human
uacccagcccaucu

SEQ ID NO: 3735920 - RNA, 18 nt, Human
uacccagcgagcccuggu

SEQ ID NO: 3735921 - RNA, 14 nt, Human
uaaguccaguccag

SEQ ID NO: 3735922 - RNA, 22 nt, Human
uaaguccaguccaguccuaucu

SEQ ID NO: 3735923 - RNA, 12 nt, Human
uaaguccagugu

SEQ ID NO: 3735924 - RNA, 18 nt, Human
uaagucccugcccccucc

SEQ ID NO: 3735925 - RNA, 23 nt, Human
uaagucccugcccccuccccuuc

SEQ ID NO: 3735926 - RNA, 19 nt, Human
uaagucccugucaccucuu

SEQ ID NO: 3735927 - RNA, 20 nt, Human
uaaguccuugcaagaaucag

SEQ ID NO: 3735928 - RNA, 15 nt, Human
uaaguccuuuaugug

SEQ ID NO: 3735929 - RNA, 18 nt, Human
uaagucuaaauauuuccu

SEQ ID NO: 3735930 - RNA, 14 nt, Human
uaagucucuuuuuu

SEQ ID NO: 3735931 - RNA, 16 nt, Human
uaagugaaaaggucau

SEQ ID NO: 3735932 - RNA, 15 nt, Human
uaagugaaaaucuua

SEQ ID NO: 3735933 - RNA, 19 nt, Human
uaagugaaagugaggaaau

SEQ ID NO: 3735934 - RNA, 11 nt, Human
uaagugaaauu

SEQ ID NO: 3735935 - RNA, 12 nt, Human
uaagugaaauuu

SEQ ID NO: 3735936 - RNA, 14 nt, Human
uaagugaauaauaa

SEQ ID NO: 3735937 - RNA, 13 nt, Human
uaagugaauuuau

SEQ ID NO: 3735938 - RNA, 24 nt, Human
uaagugagagagacaagaagcaaa

SEQ ID NO: 3735939 - RNA, 19 nt, Human
uaagugaggaaaucaaagu

SEQ ID NO: 3735940 - RNA, 20 nt, Human
uaagugagugugcugcugua

SEQ ID NO: 3735941 - RNA, 14 nt, Human
uaagugcacaacau

SEQ ID NO: 3735942 - RNA, 17 nt, Human
uaagugcacacagaaau

SEQ ID NO: 3735943 - RNA, 22 nt, Human
uaagugccaggauggaaugaug

SEQ ID NO: 3735944 - RNA, 16 nt, Human
uaagugcccucuccca

SEQ ID NO: 3735945 - RNA, 13 nt, Human
uaagugccuucca

SEQ ID NO: 3735946 - RNA, 18 nt, Human
uaagugcguguguagagu

SEQ ID NO: 3735947 - RNA, 16 nt, Human
uaagugcuacauaaau

SEQ ID NO: 3735948 - RNA, 22 nt, Human
uaagugcugcauuuaaaagaua

SEQ ID NO: 3735949 - RNA, 15 nt, Human
uaagugcuguauaaa

SEQ ID NO: 3735950 - RNA, 17 nt, Human
uaagugcuguauaaaau

SEQ ID NO: 3735951 - RNA, 15 nt, Human
uaaguggaggcacuu

SEQ ID NO: 3735952 - RNA, 20 nt, Human
uaagugggguugcaaccacu

SEQ ID NO: 3735953 - RNA, 21 nt, Human
uaagugggguugcaaccacug

SEQ ID NO: 3735954 - RNA, 22 nt, Human
uaagugguucuuugguuccagu

SEQ ID NO: 3735955 - RNA, 17 nt, Human
uaagugguuugaucauu

SEQ ID NO: 3735956 - RNA, 12 nt, Human
uaagugugaacu

SEQ ID NO: 3735957 - RNA, 14 nt, Human
uaaguguuggaaaa

SEQ ID NO: 3735958 - RNA, 14 nt, Human
uaaguuacuucacu

SEQ ID NO: 3735959 - RNA, 17 nt, Human
uaaguuaguuccacuga

SEQ ID NO: 3735960 - RNA, 20 nt, Human
uaaguuaguuccacugagac

SEQ ID NO: 3735961 - RNA, 14 nt, Human
uaaguuauaguaua

SEQ ID NO: 3735962 - RNA, 18 nt, Human
uaaguuauagugaauacu

SEQ ID NO: 3735963 - RNA, 23 nt, Human
uaaguuauuaagagguaagacuu

SEQ ID NO: 3735964 - RNA, 15 nt, Human
uaaguuauugcaguu

SEQ ID NO: 3735965 - RNA, 20 nt, Human
uaaguuauugcaguuuauca

SEQ ID NO: 3735966 - RNA, 17 nt, Human
uaaguuauuucuuguuu

SEQ ID NO: 3735967 - RNA, 18 nt, Human
uaaguuauuuuuguacau

SEQ ID NO: 3735968 - RNA, 17 nt, Human
uaaguugaauggccugc

SEQ ID NO: 3735969 - RNA, 16 nt, Human
uaaguuggaaacacua

SEQ ID NO: 3735970 - RNA, 17 nt, Human
uaaguuggaaacacuaa

SEQ ID NO: 3735971 - RNA, 22 nt, Human
uaaguuggaaacacuaaauguu

SEQ ID NO: 3735972 - RNA, 22 nt, Human
uaaguuggcuucuguuucuagu

SEQ ID NO: 3735973 - RNA, 13 nt, Human
uaaguuguuugca

SEQ ID NO: 3735974 - RNA, 15 nt, Human
uaaguuguuugcaug

SEQ ID NO: 3735975 - RNA, 19 nt, Human
uaaguuuaccuauguaaca

SEQ ID NO: 3735976 - RNA, 22 nt, Human
uaaguuucaggugacaugugaa

SEQ ID NO: 3735977 - RNA, 12 nt, Human
uaaguuucuaag

SEQ ID NO: 3735978 - RNA, 13 nt, Human
uaaguuucuaaga

SEQ ID NO: 3735979 - RNA, 18 nt, Human
uaaguuucuaagauucua

SEQ ID NO: 3735980 - RNA, 12 nt, Human
uaaguuugaagg

SEQ ID NO: 3735981 - RNA, 18 nt, Human
uaaguuugaaggaaacag

SEQ ID NO: 3735982 - RNA, 17 nt, Human
uaaguuugcacucaaau

SEQ ID NO: 3735983 - RNA, 17 nt, Human
uaauaaaaaaagaaagc

SEQ ID NO: 3735984 - RNA, 14 nt, Human
uaauaaaaaaugga

SEQ ID NO: 3735985 - RNA, 15 nt, Human
uaauaaaaagcuuuu

SEQ ID NO: 3735986 - RNA, 23 nt, Human
uaauaaaaaggaguauacaaaca

SEQ ID NO: 3735987 - RNA, 13 nt, Human
uaauaaaaauaaa

SEQ ID NO: 3735988 - RNA, 13 nt, Human
uaauaaaacaucu

SEQ ID NO: 3735989 - RNA, 15 nt, Human
uaauaaaacugaugu

SEQ ID NO: 3735990 - RNA, 19 nt, Human
uaauaaaacugaugugaaa

SEQ ID NO: 3735991 - RNA, 13 nt, Human
uaauaaaaggaaa

SEQ ID NO: 3735992 - RNA, 14 nt, Human
uaauaaaaggaaaa

SEQ ID NO: 3735993 - RNA, 17 nt, Human
uaauaaaaguacauguu

SEQ ID NO: 3735994 - RNA, 13 nt, Human
uaauaaaauaauu

SEQ ID NO: 3735995 - RNA, 16 nt, Human
uaauaaaauaauucua

SEQ ID NO: 3735996 - RNA, 21 nt, Human
uaauaaaauaucauucagcaa

SEQ ID NO: 3735997 - RNA, 18 nt, Human
uaauaaaauauuuucugu

SEQ ID NO: 3735998 - RNA, 19 nt, Human
uaauaaacauaaugaaaau

SEQ ID NO: 3735999 - RNA, 13 nt, Human
uaauaaacuaaua

SEQ ID NO: 3736000 - RNA, 19 nt, Human
uaauaaacuaauaauugca

SEQ ID NO: 3736001 - RNA, 17 nt, Human
uaauaaacuuagaauaa

SEQ ID NO: 3736002 - RNA, 18 nt, Human
uaauaaacuuagaauaaa

SEQ ID NO: 3736003 - RNA, 23 nt, Human
uaauaaacuuagaauaaaauugu

SEQ ID NO: 3736004 - RNA, 14 nt, Human
uaauaaagacucua

SEQ ID NO: 3736005 - RNA, 16 nt, Human
uaauaaagaucaugua

SEQ ID NO: 3736006 - RNA, 16 nt, Human
uaauaaagaugcucuu

SEQ ID NO: 3736007 - RNA, 22 nt, Human
uaauaaaguauuccaccuuaaa

SEQ ID NO: 3736008 - RNA, 15 nt, Human
uaauaaauaguucuu

SEQ ID NO: 3736009 - RNA, 12 nt, Human
uaauaaauauga

SEQ ID NO: 3736010 - RNA, 20 nt, Human
uaauaaauauguuucacaca

SEQ ID NO: 3736011 - RNA, 16 nt, Human
uaauaaauauuuaugu

SEQ ID NO: 3736012 - RNA, 15 nt, Human
uaauaaaucugguag

SEQ ID NO: 3736013 - RNA, 17 nt, Human
uaauaaauguacauuaa

SEQ ID NO: 3736014 - RNA, 13 nt, Human
uaauaaauucaga

SEQ ID NO: 3736015 - RNA, 13 nt, Human
uaauaaauugaaa

SEQ ID NO: 3736016 - RNA, 19 nt, Human
uaauaaauugaaauuguga

SEQ ID NO: 3736017 - RNA, 21 nt, Human
uaauaaauuguuuggcuuccu

SEQ ID NO: 3736018 - RNA, 12 nt, Human
uaauaacauuac

SEQ ID NO: 3736019 - RNA, 15 nt, Human
uaauaacauuaccuu

SEQ ID NO: 3736020 - RNA, 22 nt, Human
uaauaaccaaaugcaaugugaa

SEQ ID NO: 3736021 - RNA, 19 nt, Human
uaauaaccuuuaagucaga

SEQ ID NO: 3736022 - RNA, 16 nt, Human
uaauaaggaaaaguuu

SEQ ID NO: 3736023 - RNA, 20 nt, Human
uaauaaggaaaaguuuaaua

SEQ ID NO: 3736024 - RNA, 16 nt, Human
uaauaagggaaaaauc

SEQ ID NO: 3736025 - RNA, 18 nt, Human
uaauaagggaaaaaucaa

SEQ ID NO: 3736026 - RNA, 23 nt, Human
uaauaagggaaaaaucaaguauu

SEQ ID NO: 3736027 - RNA, 21 nt, Human
uaauaagguuuuaauuuagua

SEQ ID NO: 3736028 - RNA, 13 nt, Human
uaauaauaaauag

SEQ ID NO: 3736029 - RNA, 11 nt, Human
uaauaauacaa

SEQ ID NO: 3736030 - RNA, 12 nt, Human
uaauaauacaag

SEQ ID NO: 3736031 - RNA, 22 nt, Human
uaauaauauacuuguggacuaa

SEQ ID NO: 3736032 - RNA, 16 nt, Human
uaauaauauauguuua

SEQ ID NO: 3736033 - RNA, 12 nt, Human
uaauaaucaaga

SEQ ID NO: 3736034 - RNA, 16 nt, Human
uaauaauccugcaaag

SEQ ID NO: 3736035 - RNA, 15 nt, Human
uaauaauuauaugcu

SEQ ID NO: 3736036 - RNA, 16 nt, Human
uaauaauuauaugcua

SEQ ID NO: 3736037 - RNA, 17 nt, Human
uaauaauuauuauuaaa

SEQ ID NO: 3736038 - RNA, 13 nt, Human
uaauacaagguau

SEQ ID NO: 3736039 - RNA, 22 nt, Human
uaauacaagguauaauaaaauu

SEQ ID NO: 3736040 - RNA, 16 nt, Human
uaauacacaaaaucaa

SEQ ID NO: 3736041 - RNA, 19 nt, Human
uaauacaccacuacauucu

SEQ ID NO: 3736042 - RNA, 22 nt, Human
uaauacaccacuacauucuguu

SEQ ID NO: 3736043 - RNA, 20 nt, Human
uaauacacuaauuccuuucu

SEQ ID NO: 3736044 - RNA, 19 nt, Human
uaauacagcagugucauca

SEQ ID NO: 3736045 - RNA, 20 nt, Human
uaauacagccaaagauaauc

SEQ ID NO: 3736046 - RNA, 16 nt, Human
uaauacauuaaagcag

SEQ ID NO: 3736047 - RNA, 17 nt, Human
uaauacauuauauuucu

SEQ ID NO: 3736048 - RNA, 20 nt, Human
uaauacauuccaacucguau

SEQ ID NO: 3736049 - RNA, 22 nt, Human
uaauaccauuuuuuaaggaaac

SEQ ID NO: 3736050 - RNA, 15 nt, Human
uaauaccugggugau

SEQ ID NO: 3736051 - RNA, 17 nt, Human
uaauacuaaaauauguc

SEQ ID NO: 3736052 - RNA, 18 nt, Human
uaauacuaguugugaccu

SEQ ID NO: 3736053 - RNA, 15 nt, Human
uaauacucuguugua

SEQ ID NO: 3736054 - RNA, 20 nt, Human
uaauacuguuauucuuugca

SEQ ID NO: 3736055 - RNA, 22 nt, Human
uaauacuguuauucuuugcacu

SEQ ID NO: 3736056 - RNA, 20 nt, Human
uaauacuuuguauacaagua

SEQ ID NO: 3736057 - RNA, 16 nt, Human
uaauagaaaacugaaa

SEQ ID NO: 3736058 - RNA, 18 nt, Human
uaauagaaaacugaaaau

SEQ ID NO: 3736059 - RNA, 17 nt, Human
uaauagaaaaguauguu

SEQ ID NO: 3736060 - RNA, 14 nt, Human
uaauagaauaaagg

SEQ ID NO: 3736061 - RNA, 16 nt, Human
uaauagaauaaaggca

SEQ ID NO: 3736062 - RNA, 17 nt, Human
uaauagacuaaaugaaa

SEQ ID NO: 3736063 - RNA, 12 nt, Human
uaauagagcaaa

SEQ ID NO: 3736064 - RNA, 12 nt, Human
uaauagauucuc

SEQ ID NO: 3736065 - RNA, 13 nt, Human
uaauagcaaagaa

SEQ ID NO: 3736066 - RNA, 20 nt, Human
uaauagcaacuuuuguguaa

SEQ ID NO: 3736067 - RNA, 21 nt, Human
uaauagcaacuuuuguguaau

SEQ ID NO: 3736068 - RNA, 21 nt, Human
uaauagcagccuuucucucuu

SEQ ID NO: 3736069 - RNA, 19 nt, Human
uaauagcggguuacuuuca

SEQ ID NO: 3736070 - RNA, 18 nt, Human
uaauaggaaaaacggaag

SEQ ID NO: 3736071 - RNA, 14 nt, Human
uaauagggaauaua

SEQ ID NO: 3736072 - RNA, 11 nt, Human
gcaggcugggc

SEQ ID NO: 3736073 - RNA, 12 nt, Human
gcaggcugggcc

SEQ ID NO: 3736074 - RNA, 14 nt, Human
gcaggcugggccau

SEQ ID NO: 3736075 - RNA, 23 nt, Human
gcaggcugggccauguccaaaga

SEQ ID NO: 3736076 - RNA, 17 nt, Human
gcaggcugucuggccag

SEQ ID NO: 3736077 - RNA, 22 nt, Human
gcaggcuuaauaaaaaugacag

SEQ ID NO: 3736078 - RNA, 22 nt, Human
gcaggcuuuguuuauagcuugc

SEQ ID NO: 3736079 - RNA, 13 nt, Human
gcagggaaacagc

SEQ ID NO: 3736080 - RNA, 22 nt, Human
gcagggaaaggcucugaaagcc

SEQ ID NO: 3736081 - RNA, 21 nt, Human
gcagggaagaggggugcagag

SEQ ID NO: 3736082 - RNA, 18 nt, Human
gcagggaagccccacaug

SEQ ID NO: 3736083 - RNA, 17 nt, Human
gcagggagcugggcuuc

SEQ ID NO: 3736084 - RNA, 16 nt, Human
gcagggaggaagaagc

SEQ ID NO: 3736085 - RNA, 23 nt, Human
gcagggaggaagaagcuuaggca

SEQ ID NO: 3736086 - RNA, 13 nt, Human
gcagggaggcagc

SEQ ID NO: 3736087 - RNA, 14 nt, Human
gcagggagggcagu

SEQ ID NO: 3736088 - RNA, 14 nt, Human
gcagggaggggacu

SEQ ID NO: 3736089 - RNA, 18 nt, Human
gcagggaggucaggcccu

SEQ ID NO: 3736090 - RNA, 13 nt, Human
gcagggaugcccu

SEQ ID NO: 3736091 - RNA, 21 nt, Human
gcagggaugcccuggaggugg

SEQ ID NO: 3736092 - RNA, 23 nt, Human
gcagggaugcccuggagguggcu

SEQ ID NO: 3736093 - RNA, 13 nt, Human
gcagggauguggg

SEQ ID NO: 3736094 - RNA, 23 nt, Human
gcagggauguggguuccacagac

SEQ ID NO: 3736095 - RNA, 23 nt, Human
gcagggcaaaugacaugcacuga

SEQ ID NO: 3736096 - RNA, 15 nt, Human
gcagggcagccccac

SEQ ID NO: 3736097 - RNA, 17 nt, Human
gcagggcaggaccagcc

SEQ ID NO: 3736098 - RNA, 18 nt, Human
gcagggcaggaccagccc

SEQ ID NO: 3736099 - RNA, 19 nt, Human
gcagggcaucuccugugca

SEQ ID NO: 3736100 - RNA, 22 nt, Human
gcagggcaucuccugugcaugg

SEQ ID NO: 3736101 - RNA, 19 nt, Human
gcagggccaggacugagcc

SEQ ID NO: 3736102 - RNA, 22 nt, Human
gcagggccauggcucagggugg

SEQ ID NO: 3736103 - RNA, 21 nt, Human
gcagggccccaggcauugcca

SEQ ID NO: 3736104 - RNA, 15 nt, Human
gcagggccgccaggg

SEQ ID NO: 3736105 - RNA, 21 nt, Human
gcagggccgcccgggcccaga

SEQ ID NO: 3736106 - RNA, 20 nt, Human
gcagggcgggcagagggcug

SEQ ID NO: 3736107 - RNA, 20 nt, Human
gcagggcuacccugagcuga

SEQ ID NO: 3736108 - RNA, 14 nt, Human
gcagggcucagcgg

SEQ ID NO: 3736109 - RNA, 19 nt, Human
gcagggcucagcggggaca

SEQ ID NO: 3736110 - RNA, 12 nt, Human
gcagggcucagg

SEQ ID NO: 3736111 - RNA, 14 nt, Human
gcagggcucaggau

SEQ ID NO: 3736112 - RNA, 21 nt, Human
gcagggcucaggauuucgugg

SEQ ID NO: 3736113 - RNA, 15 nt, Human
gcagggcucuccugg

SEQ ID NO: 3736114 - RNA, 18 nt, Human
gcagggcucuccuggcuu

SEQ ID NO: 3736115 - RNA, 23 nt, Human
gcagggcucucuuuccuucuugc

SEQ ID NO: 3736116 - RNA, 14 nt, Human
gcagggcuuuaaaa

SEQ ID NO: 3736117 - RNA, 19 nt, Human
gcaggggaggccaucugga

SEQ ID NO: 3736118 - RNA, 20 nt, Human
gcaggggagggucagccagg

SEQ ID NO: 3736119 - RNA, 19 nt, Human
gcaggggcccugcagcucu

SEQ ID NO: 3736120 - RNA, 20 nt, Human
gcaggggccgggggcagucu

SEQ ID NO: 3736121 - RNA, 20 nt, Human
gcaggggcucuggagagaaa

SEQ ID NO: 3736122 - RNA, 21 nt, Human
gcaggggcucuggagagaaac

SEQ ID NO: 3736123 - RNA, 15 nt, Human
gcaggggcuuccugg

SEQ ID NO: 3736124 - RNA, 16 nt, Human
gcagggggcaugaugc

SEQ ID NO: 3736125 - RNA, 15 nt, Human
gcagggggcugcugc

SEQ ID NO: 3736126 - RNA, 16 nt, Human
gcagggggcugcugcu

SEQ ID NO: 3736127 - RNA, 19 nt, Human
gcagggguccuugguguga

SEQ ID NO: 3736128 - RNA, 22 nt, Human
gcagggguggcugccucauuua

SEQ ID NO: 3736129 - RNA, 20 nt, Human
gcagggguggggguggaggc

SEQ ID NO: 3736130 - RNA, 23 nt, Human
gcagggguggggguggaggcuuc

SEQ ID NO: 3736131 - RNA, 14 nt, Human
gcagggucaggaga

SEQ ID NO: 3736132 - RNA, 15 nt, Human
gcagggucaggagag

SEQ ID NO: 3736133 - RNA, 16 nt, Human
gcagggucaggagagg

SEQ ID NO: 3736134 - RNA, 16 nt, Human
gcagggucucacucug

SEQ ID NO: 3736135 - RNA, 18 nt, Human
gcagggucucacucuguc

SEQ ID NO: 3736136 - RNA, 20 nt, Human
gcagggucugggcaggacuc

SEQ ID NO: 3736137 - RNA, 15 nt, Human
gcagggucuuuucau

SEQ ID NO: 3736138 - RNA, 22 nt, Human
gcagggugcaguaucaugcccu

SEQ ID NO: 3736139 - RNA, 15 nt, Human
gcaggguggugcugg

SEQ ID NO: 3736140 - RNA, 19 nt, Human
gcaggguggugcugggacu

SEQ ID NO: 3736141 - RNA, 19 nt, Human
gcagggugucugcccccuc

SEQ ID NO: 3736142 - RNA, 23 nt, Human
gcagggugucugcccccuccuga

SEQ ID NO: 3736143 - RNA, 16 nt, Human
gcagguagccugcugg

SEQ ID NO: 3736144 - RNA, 21 nt, Human
gcaggucaacagcuaugcugg

SEQ ID NO: 3736145 - RNA, 13 nt, Human
gcaggucccuaau

SEQ ID NO: 3736146 - RNA, 18 nt, Human
gcaggucccuaauaaagc

SEQ ID NO: 3736147 - RNA, 21 nt, Human
gcaggucccuaauaaagcugu

SEQ ID NO: 3736148 - RNA, 20 nt, Human
gcaggucuugaacuccuggc

SEQ ID NO: 3736149 - RNA, 21 nt, Human
gcaggucuuuaaaucauuuua

SEQ ID NO: 3736150 - RNA, 16 nt, Human
gcaggugaaacccagu

SEQ ID NO: 3736151 - RNA, 17 nt, Human
gcaggugaaacccaguc

SEQ ID NO: 3736152 - RNA, 15 nt, Human
gcaggugacagugag

SEQ ID NO: 3736153 - RNA, 17 nt, Human
gcaggugagcaaccagu

SEQ ID NO: 3736154 - RNA, 18 nt, Human
gcaggugauuggaccagg

SEQ ID NO: 3736155 - RNA, 21 nt, Human
gcaggugauuggaccaggcca

SEQ ID NO: 3736156 - RNA, 13 nt, Human
gcaggugccucca

SEQ ID NO: 3736157 - RNA, 14 nt, Human
gcaggugccuggac

SEQ ID NO: 3736158 - RNA, 16 nt, Human
gcaggugcuauuguua

SEQ ID NO: 3736159 - RNA, 14 nt, Human
gcaggugcugcuac

SEQ ID NO: 3736160 - RNA, 23 nt, Human
gcaggugcugcuacccucccugc

SEQ ID NO: 3736161 - RNA, 15 nt, Human
gcaggugcugcugcg

SEQ ID NO: 3736162 - RNA, 16 nt, Human
gcaggugcuggagcac

SEQ ID NO: 3736163 - RNA, 21 nt, Human
gcaggugcuggagcacugggc

SEQ ID NO: 3736164 - RNA, 19 nt, Human
gcagguggaucuauuucau

SEQ ID NO: 3736165 - RNA, 18 nt, Human
gcagguggccaaguuccu

SEQ ID NO: 3736166 - RNA, 17 nt, Human
gcagguggggagacugg

SEQ ID NO: 3736167 - RNA, 17 nt, Human
gcagguggggagggggu

SEQ ID NO: 3736168 - RNA, 15 nt, Human
gcaggugguccugag

SEQ ID NO: 3736169 - RNA, 14 nt, Human
gcaggugguggcac

SEQ ID NO: 3736170 - RNA, 22 nt, Human
gcaggugguggcacugagcccc

SEQ ID NO: 3736171 - RNA, 18 nt, Human
gcaggugugagggcagug

SEQ ID NO: 3736172 - RNA, 15 nt, Human
gcagguuaaauguuu

SEQ ID NO: 3736173 - RNA, 18 nt, Human
gcagguuaaauguuuugu

SEQ ID NO: 3736174 - RNA, 19 nt, Human
gcagguuaaauguuuugua

SEQ ID NO: 3736175 - RNA, 14 nt, Human
gcagguucauggau

SEQ ID NO: 3736176 - RNA, 20 nt, Human
gcagguucuucuuccugaag

SEQ ID NO: 3736177 - RNA, 14 nt, Human
gcagguugaagcca

SEQ ID NO: 3736178 - RNA, 17 nt, Human
gcagguugaagccaugu

SEQ ID NO: 3736179 - RNA, 16 nt, Human
gcagguugaggggcuc

SEQ ID NO: 3736180 - RNA, 19 nt, Human
gcagguugaggggcuccug

SEQ ID NO: 3736181 - RNA, 20 nt, Human
gcagguugaggggcuccugg

SEQ ID NO: 3736182 - RNA, 19 nt, Human
gcagguugauaaaucauuu

SEQ ID NO: 3736183 - RNA, 22 nt, Human
gcaguaaaaaaugguguuuuau

SEQ ID NO: 3736184 - RNA, 15 nt, Human
gcaguaaagagaaac

SEQ ID NO: 3736185 - RNA, 18 nt, Human
gcaguaaagagaaacuuu

SEQ ID NO: 3736186 - RNA, 16 nt, Human
gcaguaacuugggagu

SEQ ID NO: 3736187 - RNA, 18 nt, Human
gcaguaagucuuuuuuga

SEQ ID NO: 3736188 - RNA, 16 nt, Human
gcaguaccuauaaagu

SEQ ID NO: 3736189 - RNA, 15 nt, Human
gcaguacuaacauuu

SEQ ID NO: 3736190 - RNA, 19 nt, Human
gcaguagaaauaauaugca

SEQ ID NO: 3736191 - RNA, 16 nt, Human
gcaguagacauuuuaa

SEQ ID NO: 3736192 - RNA, 18 nt, Human
gcaguagauuuucuuuaa

SEQ ID NO: 3736193 - RNA, 12 nt, Human
gcaguaucauga

SEQ ID NO: 3736194 - RNA, 15 nt, Human
gcaguaucaugaagc

SEQ ID NO: 3736195 - RNA, 21 nt, Human
gcaguaucaugcccugugcaa

SEQ ID NO: 3736196 - RNA, 15 nt, Human
gcaguaugaaaauaa

SEQ ID NO: 3736197 - RNA, 14 nt, Human
gcagucacuggagg

SEQ ID NO: 3736198 - RNA, 23 nt, Human
gcagucacuggagguugaagcca

SEQ ID NO: 3736199 - RNA, 23 nt, Human
gcagucaucuugaccaagcagga

SEQ ID NO: 3736200 - RNA, 12 nt, Human
gcagucauuuug

SEQ ID NO: 3736201 - RNA, 13 nt, Human
gcaguccaugcau

SEQ ID NO: 3736202 - RNA, 14 nt, Human
gcaguccaugcaug

SEQ ID NO: 3736203 - RNA, 21 nt, Human
gcaguccccuucccuccaaga

SEQ ID NO: 3736204 - RNA, 20 nt, Human
gcaguccuggaagccagcuu

SEQ ID NO: 3736205 - RNA, 14 nt, Human
gcaguccuuggccu

SEQ ID NO: 3736206 - RNA, 15 nt, Human
gcaguccuuggccug

SEQ ID NO: 3736207 - RNA, 18 nt, Human
gcaguccuuggccugcua

SEQ ID NO: 3736208 - RNA, 17 nt, Human
gcagucgggggcuggcc

SEQ ID NO: 3736209 - RNA, 15 nt, Human
gcagucgugccugug

SEQ ID NO: 3736210 - RNA, 16 nt, Human
gcagucgugccugugu

SEQ ID NO: 3736211 - RNA, 17 nt, Human
gcagucgugccuguguc

SEQ ID NO: 3736212 - RNA, 16 nt, Human
gcagucuccucuuuaa

SEQ ID NO: 3736213 - RNA, 17 nt, Human
gcagucuccucuuuaaa

SEQ ID NO: 3736214 - RNA, 22 nt, Human
gcagucuccucuuuaaaacaaa

SEQ ID NO: 3736215 - RNA, 22 nt, Human
gcagucucuauaccaauaaagu

SEQ ID NO: 3736216 - RNA, 15 nt, Human
gcagucucucuuacc

SEQ ID NO: 3736217 - RNA, 22 nt, Human
gcagucucucuuacccuucugu

SEQ ID NO: 3736218 - RNA, 12 nt, Human
gcagucugccug

SEQ ID NO: 3736219 - RNA, 14 nt, Human
gcagucugccugga

SEQ ID NO: 3736220 - RNA, 16 nt, Human
gcagucuggaggggca

SEQ ID NO: 3736221 - RNA, 19 nt, Human
uacccaguaacucaucugu

SEQ ID NO: 3736222 - RNA, 16 nt, Human
uacccauacacccccu

SEQ ID NO: 3736223 - RNA, 16 nt, Human
uacccauagacaugaa

SEQ ID NO: 3736224 - RNA, 18 nt, Human
uacccauagacaugaaag

SEQ ID NO: 3736225 - RNA, 20 nt, Human
uacccaucgguguccauuua

SEQ ID NO: 3736226 - RNA, 18 nt, Human
uacccaucuuaaaaacaa

SEQ ID NO: 3736227 - RNA, 18 nt, Human
uacccaugacuuuauaug

SEQ ID NO: 3736228 - RNA, 22 nt, Human
uacccauuuguucauauuaaga

SEQ ID NO: 3736229 - RNA, 19 nt, Human
uaccccaagacucccauga

SEQ ID NO: 3736230 - RNA, 16 nt, Human
uaccccaauuccuugu

SEQ ID NO: 3736231 - RNA, 22 nt, Human
uaccccaccacgauguggcccu

SEQ ID NO: 3736232 - RNA, 23 nt, Human
uaccccaccucccucaaccucau

SEQ ID NO: 3736233 - RNA, 21 nt, Human
uaccccagacuagauguagua

SEQ ID NO: 3736234 - RNA, 18 nt, Human
uaccccagcucugcuugc

SEQ ID NO: 3736235 - RNA, 16 nt, Human
uaccccaguuuuuuga

SEQ ID NO: 3736236 - RNA, 20 nt, Human
uaccccauggagcugggcua

SEQ ID NO: 3736237 - RNA, 16 nt, Human
uacccccaggguugag

SEQ ID NO: 3736238 - RNA, 12 nt, Human
uacccccgccca

SEQ ID NO: 3736239 - RNA, 16 nt, Human
uacccccgcccaggcu

SEQ ID NO: 3736240 - RNA, 16 nt, Human
uacccccuaagagcca

SEQ ID NO: 3736241 - RNA, 15 nt, Human
uacccccugcaaagc

SEQ ID NO: 3736242 - RNA, 23 nt, Human
uacccccugcaaagcccagcuug

SEQ ID NO: 3736243 - RNA, 17 nt, Human
uacccccuucugggcau

SEQ ID NO: 3736244 - RNA, 13 nt, Human
uaccccugaucug

SEQ ID NO: 3736245 - RNA, 17 nt, Human
uaccccuuacuuagcau

SEQ ID NO: 3736246 - RNA, 18 nt, Human
uaccccuuacuuagcaug

SEQ ID NO: 3736247 - RNA, 20 nt, Human
uacccgggaagggggcuggg

SEQ ID NO: 3736248 - RNA, 18 nt, Human
uacccggggcccagggca

SEQ ID NO: 3736249 - RNA, 16 nt, Human
uacccuaaccaaguuc

SEQ ID NO: 3736250 - RNA, 14 nt, Human
uacccuaaugucuu

SEQ ID NO: 3736251 - RNA, 22 nt, Human
uacccuaaugucuucauaaagu

SEQ ID NO: 3736252 - RNA, 14 nt, Human
uacccucccacccc

SEQ ID NO: 3736253 - RNA, 18 nt, Human
uacccucccugcuguccc

SEQ ID NO: 3736254 - RNA, 22 nt, Human
uacccucccugcuguccccucu

SEQ ID NO: 3736255 - RNA, 15 nt, Human
uacccuccuggcucu

SEQ ID NO: 3736256 - RNA, 15 nt, Human
uacccuccuguaaau

SEQ ID NO: 3736257 - RNA, 20 nt, Human
uacccucgggcccaccuggc

SEQ ID NO: 3736258 - RNA, 13 nt, Human
uacccucucagcu

SEQ ID NO: 3736259 - RNA, 17 nt, Human
uacccucucagcuccag

SEQ ID NO: 3736260 - RNA, 21 nt, Human
uacccucucagcuccaggugg

SEQ ID NO: 3736261 - RNA, 17 nt, Human
uacccucugaaauacau

SEQ ID NO: 3736262 - RNA, 14 nt, Human
uacccucuggaggg

SEQ ID NO: 3736263 - RNA, 22 nt, Human
uacccucuucauggauggggga

SEQ ID NO: 3736264 - RNA, 19 nt, Human
uacccucuuugcugcagag

SEQ ID NO: 3736265 - RNA, 12 nt, Human
uacccugccucc

SEQ ID NO: 3736266 - RNA, 20 nt, Human
uacccugcgauuuugccugu

SEQ ID NO: 3736267 - RNA, 21 nt, Human
uacccugcgcccaguccuucc

SEQ ID NO: 3736268 - RNA, 16 nt, Human
uacccuuagaauccac

SEQ ID NO: 3736269 - RNA, 20 nt, Human
uacccuucugugcccagcuc

SEQ ID NO: 3736270 - RNA, 14 nt, Human
uacccuucuuucca

SEQ ID NO: 3736271 - RNA, 20 nt, Human
uacccuuggcucaauccucu

SEQ ID NO: 3736272 - RNA, 15 nt, Human
uacccuuuucugggg

SEQ ID NO: 3736273 - RNA, 19 nt, Human
uaccgaaaccuugccuuuc

SEQ ID NO: 3736274 - RNA, 15 nt, Human
uaccgaaugugucuu

SEQ ID NO: 3736275 - RNA, 19 nt, Human
uaccgcgucuacccuggga

SEQ ID NO: 3736276 - RNA, 14 nt, Human
uaccgcguuguaaa

SEQ ID NO: 3736277 - RNA, 17 nt, Human
uaccggagagagaaugu

SEQ ID NO: 3736278 - RNA, 19 nt, Human
uaccuaaaaggaaaucuca

SEQ ID NO: 3736279 - RNA, 22 nt, Human
uaccuaaaaggaaaucucaccc

SEQ ID NO: 3736280 - RNA, 13 nt, Human
uaccuaacaucug

SEQ ID NO: 3736281 - RNA, 17 nt, Human
uaccuaagaaguacauu

SEQ ID NO: 3736282 - RNA, 17 nt, Human
uaccuaagauuacaaau

SEQ ID NO: 3736283 - RNA, 20 nt, Human
uaccuaagauuacaaaucag

SEQ ID NO: 3736284 - RNA, 22 nt, Human
uaccuaagauuacaaaucagaa

SEQ ID NO: 3736285 - RNA, 15 nt, Human
uaccuaaguacugua

SEQ ID NO: 3736286 - RNA, 17 nt, Human
uaccuaaguacuguaau

SEQ ID NO: 3736287 - RNA, 20 nt, Human
uaccuaagugacauuuguag

SEQ ID NO: 3736288 - RNA, 16 nt, Human
uaccuaccacaguguc

SEQ ID NO: 3736289 - RNA, 17 nt, Human
uaccuaccacagugucu

SEQ ID NO: 3736290 - RNA, 21 nt, Human
uaccuacuuugacuuuuugca

SEQ ID NO: 3736291 - RNA, 13 nt, Human
uaccuagauuuac

SEQ ID NO: 3736292 - RNA, 18 nt, Human
uaccuagcuaauuauuua

SEQ ID NO: 3736293 - RNA, 14 nt, Human
uaccuagugaaacu

SEQ ID NO: 3736294 - RNA, 19 nt, Human
uaccuagugaaacuuuucu

SEQ ID NO: 3736295 - RNA, 22 nt, Human
uaccuagugaaacuuuucuaga

SEQ ID NO: 3736296 - RNA, 14 nt, Human
uaccuauaaugugu

SEQ ID NO: 3736297 - RNA, 13 nt, Human
uaccuauuuucau

SEQ ID NO: 3736298 - RNA, 22 nt, Human
uaccucaacccccauuucuauu

SEQ ID NO: 3736299 - RNA, 17 nt, Human
uaccucaaccuauggua

SEQ ID NO: 3736300 - RNA, 16 nt, Human
uaccucaaccuguaaa

SEQ ID NO: 3736301 - RNA, 22 nt, Human
uaccucaaccuguaaauuauuu

SEQ ID NO: 3736302 - RNA, 20 nt, Human
uaccucaauuuucacugugu

SEQ ID NO: 3736303 - RNA, 21 nt, Human
uaccucaauuuucacuguguc

SEQ ID NO: 3736304 - RNA, 15 nt, Human
uaccucacccugcua

SEQ ID NO: 3736305 - RNA, 18 nt, Human
uaccucacccugcuacac

SEQ ID NO: 3736306 - RNA, 14 nt, Human
uaccucagccuggg

SEQ ID NO: 3736307 - RNA, 17 nt, Human
uaccucagccugggcgc

SEQ ID NO: 3736308 - RNA, 12 nt, Human
uaccucaggaaa

SEQ ID NO: 3736309 - RNA, 14 nt, Human
uaccucaggaaaga

SEQ ID NO: 3736310 - RNA, 16 nt, Human
uaccucaggaaagaau

SEQ ID NO: 3736311 - RNA, 18 nt, Human
uaccucaggaaagaauag

SEQ ID NO: 3736312 - RNA, 14 nt, Human
uaccucagguugcu

SEQ ID NO: 3736313 - RNA, 20 nt, Human
uaccucagguugcugguugc

SEQ ID NO: 3736314 - RNA, 21 nt, Human
uaccucccuccccgucucauu

SEQ ID NO: 3736315 - RNA, 13 nt, Human
uaccuccucucag

SEQ ID NO: 3736316 - RNA, 15 nt, Human
uaccuccucucagug

SEQ ID NO: 3736317 - RNA, 14 nt, Human
uaccuccugagaaa

SEQ ID NO: 3736318 - RNA, 13 nt, Human
uaccuccugccca

SEQ ID NO: 3736319 - RNA, 15 nt, Human
uaccuccugcccagg

SEQ ID NO: 3736320 - RNA, 21 nt, Human
uaccuccugucuuuacaaaua

SEQ ID NO: 3736321 - RNA, 16 nt, Human
uaccucuaauaguaua

SEQ ID NO: 3736322 - RNA, 18 nt, Human
uaccucuaauaguauaaa

SEQ ID NO: 3736323 - RNA, 14 nt, Human
uaccucucugucau

SEQ ID NO: 3736324 - RNA, 15 nt, Human
uaccucucugucccu

SEQ ID NO: 3736325 - RNA, 18 nt, Human
uaccucucugucccuugc

SEQ ID NO: 3736326 - RNA, 21 nt, Human
uaccucucugucccuugcugu

SEQ ID NO: 3736327 - RNA, 17 nt, Human
uaccucugaccaacagg

SEQ ID NO: 3736328 - RNA, 15 nt, Human
uaccucugauaccuc

SEQ ID NO: 3736329 - RNA, 17 nt, Human
uaccucuggcugacuaa

SEQ ID NO: 3736330 - RNA, 15 nt, Human
uaccucuuagcugag

SEQ ID NO: 3736331 - RNA, 21 nt, Human
uaccucuugagccuugaacuu

SEQ ID NO: 3736332 - RNA, 13 nt, Human
uaccucuuggcug

SEQ ID NO: 3736333 - RNA, 15 nt, Human
uaccucuuuggaaaa

SEQ ID NO: 3736334 - RNA, 13 nt, Human
uaccugaaaacac

SEQ ID NO: 3736335 - RNA, 19 nt, Human
uaccugaacacuuauugcu

SEQ ID NO: 3736336 - RNA, 21 nt, Human
uaccugaacacuuauugcuuu

SEQ ID NO: 3736337 - RNA, 17 nt, Human
uaccugacacucccuug

SEQ ID NO: 3736338 - RNA, 16 nt, Human
uaccugaccucuugcu

SEQ ID NO: 3736339 - RNA, 18 nt, Human
uaccugaccucuugcugu

SEQ ID NO: 3736340 - RNA, 20 nt, Human
uaccugaccucuugcugucu

SEQ ID NO: 3736341 - RNA, 13 nt, Human
uaccugagaccag

SEQ ID NO: 3736342 - RNA, 16 nt, Human
uaccugaggggccucu

SEQ ID NO: 3736343 - RNA, 11 nt, Human
uaccugagggu

SEQ ID NO: 3736344 - RNA, 18 nt, Human
uaccugaucaaugacaga

SEQ ID NO: 3736345 - RNA, 23 nt, Human
uaccugauggaaguaaagccuca

SEQ ID NO: 3736346 - RNA, 12 nt, Human
uaccugauuuuu

SEQ ID NO: 3736347 - RNA, 22 nt, Human
uaccugcaggcugagccacucu

SEQ ID NO: 3736348 - RNA, 19 nt, Human
uaccugccacucacacagc

SEQ ID NO: 3736349 - RNA, 21 nt, Human
uaccugccacucacacagcca

SEQ ID NO: 3736350 - RNA, 23 nt, Human
uaccugccaggaagccagcaggc

SEQ ID NO: 3736351 - RNA, 20 nt, Human
uaccugcgcuuguuuuaaag

SEQ ID NO: 3736352 - RNA, 14 nt, Human
uaccugcucuccaa

SEQ ID NO: 3736353 - RNA, 23 nt, Human
uaccugcucuccaagucucagug

SEQ ID NO: 3736354 - RNA, 19 nt, Human
uaccugcugcuucuccaaa

SEQ ID NO: 3736355 - RNA, 21 nt, Human
uaccuggaaucaaauaaaaau

SEQ ID NO: 3736356 - RNA, 17 nt, Human
uaccuggguccccagcc

SEQ ID NO: 3736357 - RNA, 21 nt, Human
uaccuggguccuuuucagaag

SEQ ID NO: 3736358 - RNA, 21 nt, Human
uaccugucacauugcauucua

SEQ ID NO: 3736359 - RNA, 16 nt, Human
uaccugugccucggcu

SEQ ID NO: 3736360 - RNA, 12 nt, Human
uaccugugccug

SEQ ID NO: 3736361 - RNA, 20 nt, Human
uaccugugcguuacuaauug

SEQ ID NO: 3736362 - RNA, 14 nt, Human
uaccuguguacaua

SEQ ID NO: 3736363 - RNA, 14 nt, Human
uaccuguguauaua

SEQ ID NO: 3736364 - RNA, 13 nt, Human
uaccugugugcuu

SEQ ID NO: 3736365 - RNA, 21 nt, Human
uaccugugugguacucugaaa

SEQ ID NO: 3736366 - RNA, 20 nt, Human
uaccuguguuucuugccuca

SEQ ID NO: 3736367 - RNA, 21 nt, Human
uaccuguguuucuugccucau

SEQ ID NO: 3736368 - RNA, 16 nt, Human
uaccuguucagugucc

SEQ ID NO: 3736369 - RNA, 13 nt, Human
uaccuguuuaaau

SEQ ID NO: 3736370 - RNA, 12 nt, Human
uaccuuaaaauu

SEQ ID NO: 3736371 - RNA, 19 nt, Human
gcagucuggcugagcccug

SEQ ID NO: 3736372 - RNA, 21 nt, Human
gcagucuuaugcuuccagaaa

SEQ ID NO: 3736373 - RNA, 21 nt, Human
gcagugaaaacaagugcuggc

SEQ ID NO: 3736374 - RNA, 21 nt, Human
gcagugaauugugaccaaguu

SEQ ID NO: 3736375 - RNA, 22 nt, Human
gcagugagagaguggcuggggc

SEQ ID NO: 3736376 - RNA, 23 nt, Human
gcagugagagaguggcuggggca

SEQ ID NO: 3736377 - RNA, 20 nt, Human
gcagugagccaagauugcgc

SEQ ID NO: 3736378 - RNA, 20 nt, Human
gcagugaguuacagcgagag

SEQ ID NO: 3736379 - RNA, 21 nt, Human
gcagugauauggcagaagaca

SEQ ID NO: 3736380 - RNA, 23 nt, Human
gcagugcaagagacucuggccuc

SEQ ID NO: 3736381 - RNA, 15 nt, Human
gcagugcaugcuguc

SEQ ID NO: 3736382 - RNA, 16 nt, Human
gcagugcaugcugucc

SEQ ID NO: 3736383 - RNA, 15 nt, Human
gcagugcccaggugg

SEQ ID NO: 3736384 - RNA, 16 nt, Human
gcagugccuuccauaa

SEQ ID NO: 3736385 - RNA, 15 nt, Human
gcagugccuugggga

SEQ ID NO: 3736386 - RNA, 19 nt, Human
gcagugcucgcuguugcug

SEQ ID NO: 3736387 - RNA, 21 nt, Human
gcagugcucgcuguugcugaa

SEQ ID NO: 3736388 - RNA, 15 nt, Human
gcagugcuucucaaa

SEQ ID NO: 3736389 - RNA, 23 nt, Human
gcaguggauggccgugaaugggu

SEQ ID NO: 3736390 - RNA, 15 nt, Human
gcaguggcaggcaga

SEQ ID NO: 3736391 - RNA, 20 nt, Human
gcaguggcgaaaucccugcu

SEQ ID NO: 3736392 - RNA, 22 nt, Human
gcaguggcgcgaucucagcuca

SEQ ID NO: 3736393 - RNA, 18 nt, Human
gcaguggcugguccaggg

SEQ ID NO: 3736394 - RNA, 19 nt, Human
gcaguggcugguccagggc

SEQ ID NO: 3736395 - RNA, 12 nt, Human
gcagugggagcu

SEQ ID NO: 3736396 - RNA, 16 nt, Human
gcagugggcuccuggc

SEQ ID NO: 3736397 - RNA, 22 nt, Human
gcagugggucccacuuccccuc

SEQ ID NO: 3736398 - RNA, 21 nt, Human
gcaguggugcgaucauggcuc

SEQ ID NO: 3736399 - RNA, 16 nt, Human
gcaguggugcgaucug

SEQ ID NO: 3736400 - RNA, 20 nt, Human
gcaguggugcgaucuggguu

SEQ ID NO: 3736401 - RNA, 19 nt, Human
gcaguggugguuuucuguu

SEQ ID NO: 3736402 - RNA, 20 nt, Human
gcaguggugguuuucuguuc

SEQ ID NO: 3736403 - RNA, 18 nt, Human
gcaguguagcccacacuu

SEQ ID NO: 3736404 - RNA, 20 nt, Human
gcaguguagggaguuguggg

SEQ ID NO: 3736405 - RNA, 23 nt, Human
gcagugucuguaaaagagccuag

SEQ ID NO: 3736406 - RNA, 12 nt, Human
gcagugugaaaa

SEQ ID NO: 3736407 - RNA, 21 nt, Human
gcagugugaggccagggcaga

SEQ ID NO: 3736408 - RNA, 21 nt, Human
gcagugugcacuaaggggccc

SEQ ID NO: 3736409 - RNA, 14 nt, Human
gcagugugcccccc

SEQ ID NO: 3736410 - RNA, 22 nt, Human
gcagugugccccccagccccgg

SEQ ID NO: 3736411 - RNA, 20 nt, Human
gcaguguuccccaucugggu

SEQ ID NO: 3736412 - RNA, 21 nt, Human
gcaguguuccuauuuggggcu

SEQ ID NO: 3736413 - RNA, 16 nt, Human
gcaguguucgcuuggc

SEQ ID NO: 3736414 - RNA, 17 nt, Human
gcaguuaauuagcauuc

SEQ ID NO: 3736415 - RNA, 21 nt, Human
gcaguuacaugcauacuucaa

SEQ ID NO: 3736416 - RNA, 14 nt, Human
gcaguuaccauuaa

SEQ ID NO: 3736417 - RNA, 15 nt, Human
gcaguuaccauuaaa

SEQ ID NO: 3736418 - RNA, 18 nt, Human
gcaguuaccauuaaacca

SEQ ID NO: 3736419 - RNA, 19 nt, Human
gcaguuaccauuaaaccau

SEQ ID NO: 3736420 - RNA, 17 nt, Human
gcaguuauuaacacuaa

SEQ ID NO: 3736421 - RNA, 12 nt, Human
gcaguuauuugc

SEQ ID NO: 3736422 - RNA, 16 nt, Human
gcaguucagagcugcc

SEQ ID NO: 3736423 - RNA, 22 nt, Human
gcaguucagagcugcccucucc

SEQ ID NO: 3736424 - RNA, 19 nt, Human
gcaguucagcaccacccua

SEQ ID NO: 3736425 - RNA, 23 nt, Human
gcaguuccccuggaagcagugcc

SEQ ID NO: 3736426 - RNA, 21 nt, Human
gcaguuccggauuggcuugug

SEQ ID NO: 3736427 - RNA, 18 nt, Human
gcaguucgaccagccagg

SEQ ID NO: 3736428 - RNA, 17 nt, Human
gcaguucgcagccaccc

SEQ ID NO: 3736429 - RNA, 20 nt, Human
gcaguucgcagccacccuga

SEQ ID NO: 3736430 - RNA, 19 nt, Human
gcaguucuacucaggcugg

SEQ ID NO: 3736431 - RNA, 11 nt, Human
gcaguucugca

SEQ ID NO: 3736432 - RNA, 18 nt, Human
gcaguucugcaaauagaa

SEQ ID NO: 3736433 - RNA, 19 nt, Human
gcaguucugcaaauagaaa

SEQ ID NO: 3736434 - RNA, 14 nt, Human
gcaguucuugaguu

SEQ ID NO: 3736435 - RNA, 16 nt, Human
gcaguugaaaagacuc

SEQ ID NO: 3736436 - RNA, 23 nt, Human
gcaguugccagucaccccggcca

SEQ ID NO: 3736437 - RNA, 18 nt, Human
gcaguugcugguaaaaug

SEQ ID NO: 3736438 - RNA, 19 nt, Human
gcaguugcugguaaaauga

SEQ ID NO: 3736439 - RNA, 15 nt, Human
gcaguuuauauuuaa

SEQ ID NO: 3736440 - RNA, 15 nt, Human
gcaguuuaucauuca

SEQ ID NO: 3736441 - RNA, 21 nt, Human
gcaguuugaaauucugaauuu

SEQ ID NO: 3736442 - RNA, 12 nt, Human
gcaguuugcaaa

SEQ ID NO: 3736443 - RNA, 12 nt, Human
gcaguuuuucag

SEQ ID NO: 3736444 - RNA, 22 nt, Human
gcaguuuuucagaguggaaugc

SEQ ID NO: 3736445 - RNA, 14 nt, Human
gcaguuuuucagga

SEQ ID NO: 3736446 - RNA, 18 nt, Human
gcaguuuuuugaaaaugg

SEQ ID NO: 3736447 - RNA, 11 nt, Human
gcaguuuuuuu

SEQ ID NO: 3736448 - RNA, 16 nt, Human
gcauaaaaacauuuua

SEQ ID NO: 3736449 - RNA, 12 nt, Human
gcauaaaacagc

SEQ ID NO: 3736450 - RNA, 13 nt, Human
gcauaaaacagcu

SEQ ID NO: 3736451 - RNA, 21 nt, Human
gcauaaagcucaaaugaaaug

SEQ ID NO: 3736452 - RNA, 13 nt, Human
gcauaaaguaaau

SEQ ID NO: 3736453 - RNA, 16 nt, Human
gcauaaaguaaauaca

SEQ ID NO: 3736454 - RNA, 13 nt, Human
gcauaaauaugca

SEQ ID NO: 3736455 - RNA, 13 nt, Human
gcauaaauuauug

SEQ ID NO: 3736456 - RNA, 15 nt, Human
gcauaaauugcauca

SEQ ID NO: 3736457 - RNA, 16 nt, Human
gcauaacaaauucuga

SEQ ID NO: 3736458 - RNA, 18 nt, Human
gcauaacaaauucugaau

SEQ ID NO: 3736459 - RNA, 19 nt, Human
gcauaaccugucucaccug

SEQ ID NO: 3736460 - RNA, 14 nt, Human
gcauaacugacaaa

SEQ ID NO: 3736461 - RNA, 15 nt, Human
gcauaacugacaaau

SEQ ID NO: 3736462 - RNA, 18 nt, Human
gcauaacugacaaaucaa

SEQ ID NO: 3736463 - RNA, 21 nt, Human
gcauaacugacaaaucaaguu

SEQ ID NO: 3736464 - RNA, 14 nt, Human
gcauaauaaaugcu

SEQ ID NO: 3736465 - RNA, 14 nt, Human
gcauaauaagcuaa

SEQ ID NO: 3736466 - RNA, 17 nt, Human
gcauaauaauccugcaa

SEQ ID NO: 3736467 - RNA, 16 nt, Human
gcauaauuuaaaaaua

SEQ ID NO: 3736468 - RNA, 20 nt, Human
gcauaauuuaaaaauauauu

SEQ ID NO: 3736469 - RNA, 13 nt, Human
gcauacaaucuga

SEQ ID NO: 3736470 - RNA, 22 nt, Human
gcauacacacacacacacagcc

SEQ ID NO: 3736471 - RNA, 17 nt, Human
gcauacauuuauaaugu

SEQ ID NO: 3736472 - RNA, 23 nt, Human
gcauaccagguuuuacacuugca

SEQ ID NO: 3736473 - RNA, 18 nt, Human
gcauacccaaaccaggug

SEQ ID NO: 3736474 - RNA, 16 nt, Human
gcauaccuuuauugug

SEQ ID NO: 3736475 - RNA, 20 nt, Human
gcauacgagagcagaggucu

SEQ ID NO: 3736476 - RNA, 16 nt, Human
gcauacguacacauuu

SEQ ID NO: 3736477 - RNA, 19 nt, Human
gcauacguacacauuuuau

SEQ ID NO: 3736478 - RNA, 14 nt, Human
gcauacuuuguaaa

SEQ ID NO: 3736479 - RNA, 15 nt, Human
gcauacuuuguaaau

SEQ ID NO: 3736480 - RNA, 12 nt, Human
gcauagaaggag

SEQ ID NO: 3736481 - RNA, 16 nt, Human
gcauagaggcuucucc

SEQ ID NO: 3736482 - RNA, 23 nt, Human
gcauagauaauauuguuugguaa

SEQ ID NO: 3736483 - RNA, 16 nt, Human
gcauagcaagacacau

SEQ ID NO: 3736484 - RNA, 16 nt, Human
gcauaggccugcuuug

SEQ ID NO: 3736485 - RNA, 17 nt, Human
gcauaggccugggugcu

SEQ ID NO: 3736486 - RNA, 20 nt, Human
gcauaggugauccauguaac

SEQ ID NO: 3736487 - RNA, 15 nt, Human
gcauaguuucuuuau

SEQ ID NO: 3736488 - RNA, 15 nt, Human
gcauauaaaauggca

SEQ ID NO: 3736489 - RNA, 16 nt, Human
gcauauaacuuauauu

SEQ ID NO: 3736490 - RNA, 15 nt, Human
gcauauaagggaagu

SEQ ID NO: 3736491 - RNA, 23 nt, Human
gcauauaagggaaguaguuauca

SEQ ID NO: 3736492 - RNA, 18 nt, Human
gcauauaaugaauaaauc

SEQ ID NO: 3736493 - RNA, 19 nt, Human
gcauauaaugaauaaauca

SEQ ID NO: 3736494 - RNA, 17 nt, Human
gcauauaggugauguuu

SEQ ID NO: 3736495 - RNA, 19 nt, Human
gcauauauuaaaagcaggc

SEQ ID NO: 3736496 - RNA, 14 nt, Human
gcauaucacuugau

SEQ ID NO: 3736497 - RNA, 18 nt, Human
gcauauccaccaccuccc

SEQ ID NO: 3736498 - RNA, 15 nt, Human
gcauauccugagcca

SEQ ID NO: 3736499 - RNA, 15 nt, Human
gcauaucugccuuua

SEQ ID NO: 3736500 - RNA, 16 nt, Human
gcauaucugccuuuau

SEQ ID NO: 3736501 - RNA, 15 nt, Human
gcauaugacaaaugu

SEQ ID NO: 3736502 - RNA, 18 nt, Human
gcauaugacaaauguuuc

SEQ ID NO: 3736503 - RNA, 19 nt, Human
gcauaugaguaagggcacu

SEQ ID NO: 3736504 - RNA, 22 nt, Human
gcauaugcuucuuuaaaaaagc

SEQ ID NO: 3736505 - RNA, 17 nt, Human
gcauauggguuagaugu

SEQ ID NO: 3736506 - RNA, 15 nt, Human
gcauauguaugacuc

SEQ ID NO: 3736507 - RNA, 21 nt, Human
gcauauguuucgcugauauau

SEQ ID NO: 3736508 - RNA, 18 nt, Human
gcauauucaggaagcuca

SEQ ID NO: 3736509 - RNA, 20 nt, Human
gcauauucaggaagcucagg

SEQ ID NO: 3736510 - RNA, 15 nt, Human
gcauauuccuuucua

SEQ ID NO: 3736511 - RNA, 22 nt, Human
gcauauucuaguaauaaagacu

SEQ ID NO: 3736512 - RNA, 23 nt, Human
gcauauucuaguaauaaagacuc

SEQ ID NO: 3736513 - RNA, 16 nt, Human
gcauauucuuauguau

SEQ ID NO: 3736514 - RNA, 15 nt, Human
gcauauuguacacuu

SEQ ID NO: 3736515 - RNA, 20 nt, Human
gcauauuguacacuuuuuug

SEQ ID NO: 3736516 - RNA, 19 nt, Human
gcauauuguuauuauauaa

SEQ ID NO: 3736517 - RNA, 19 nt, Human
gcauauuuauaaaaauaaa

SEQ ID NO: 3736518 - RNA, 18 nt, Human
gcauauuuguauaguugc

SEQ ID NO: 3736519 - RNA, 16 nt, Human
gcauauuuuucacaua

SEQ ID NO: 3736520 - RNA, 17 nt, Human
uaauaguaauuuguaaa

SEQ ID NO: 3736521 - RNA, 12 nt, Human
uaauaguuccug

SEQ ID NO: 3736522 - RNA, 13 nt, Human
uaauaguuccugc

SEQ ID NO: 3736523 - RNA, 13 nt, Human
uaauaguuugucu

SEQ ID NO: 3736524 - RNA, 18 nt, Human
uaauaguuugucuauuuu

SEQ ID NO: 3736525 - RNA, 20 nt, Human
uaauauaaaagaucuugcag

SEQ ID NO: 3736526 - RNA, 20 nt, Human
uaauauaaaguuuuauauau

SEQ ID NO: 3736527 - RNA, 18 nt, Human
uaauauaaauucacuuuc

SEQ ID NO: 3736528 - RNA, 13 nt, Human
uaauauaauggaa

SEQ ID NO: 3736529 - RNA, 17 nt, Human
uaauauacuuguggacu

SEQ ID NO: 3736530 - RNA, 21 nt, Human
uaauauacuuguggacuaaaa

SEQ ID NO: 3736531 - RNA, 19 nt, Human
uaauauagaaaaaaacauu

SEQ ID NO: 3736532 - RNA, 22 nt, Human
uaauauagaaaaaaacauucua

SEQ ID NO: 3736533 - RNA, 20 nt, Human
uaauauauauauauaucagu

SEQ ID NO: 3736534 - RNA, 14 nt, Human
uaauauauaugaau

SEQ ID NO: 3736535 - RNA, 16 nt, Human
uaauauauaugaauaa

SEQ ID NO: 3736536 - RNA, 18 nt, Human
uaauauauaugaauaaag

SEQ ID NO: 3736537 - RNA, 18 nt, Human
uaauauauauuaucuuuu

SEQ ID NO: 3736538 - RNA, 13 nt, Human
uaauauauguuua

SEQ ID NO: 3736539 - RNA, 14 nt, Human
uaauauauguuuac

SEQ ID NO: 3736540 - RNA, 14 nt, Human
uaauauauuuaaaa

SEQ ID NO: 3736541 - RNA, 15 nt, Human
uaauauauuuaaagg

SEQ ID NO: 3736542 - RNA, 19 nt, Human
uaauauauuuaaagggaaa

SEQ ID NO: 3736543 - RNA, 22 nt, Human
uaauauauuuaaagggaaauug

SEQ ID NO: 3736544 - RNA, 19 nt, Human
uaauauauuuguguauuua

SEQ ID NO: 3736545 - RNA, 22 nt, Human
uaauauauuuuuauauuuaguu

SEQ ID NO: 3736546 - RNA, 16 nt, Human
uaauaucacucauuaa

SEQ ID NO: 3736547 - RNA, 23 nt, Human
uaauaucaucaguauugaagcau

SEQ ID NO: 3736548 - RNA, 19 nt, Human
uaauauccaggucaacaga

SEQ ID NO: 3736549 - RNA, 24 nt, Human
uaauauccaggucaacagaaugaa

SEQ ID NO: 3736550 - RNA, 12 nt, Human
uaauauccuaaa

SEQ ID NO: 3736551 - RNA, 22 nt, Human
uaauaucuuucugcacacaaau

SEQ ID NO: 3736552 - RNA, 14 nt, Human
uaauaucuuuguga

SEQ ID NO: 3736553 - RNA, 23 nt, Human
uaauaugauuuuuuaaaagaaau

SEQ ID NO: 3736554 - RNA, 16 nt, Human
uaauaugcaaagucua

SEQ ID NO: 3736555 - RNA, 18 nt, Human
uaauaugcacacauuuuu

SEQ ID NO: 3736556 - RNA, 10 nt, Human
uaauaugcau

SEQ ID NO: 3736557 - RNA, 18 nt, Human
uaauaugcuuaaaauaag

SEQ ID NO: 3736558 - RNA, 20 nt, Human
uaauaugcuuauaaccuagu

SEQ ID NO: 3736559 - RNA, 15 nt, Human
uaauauggcaaaaau

SEQ ID NO: 3736560 - RNA, 22 nt, Human
uaauauggccacaguagucuug

SEQ ID NO: 3736561 - RNA, 22 nt, Human
uaauauggcucuucauaauucu

SEQ ID NO: 3736562 - RNA, 23 nt, Human
uaauauggcucuucauaauucua

SEQ ID NO: 3736563 - RNA, 18 nt, Human
uaauaugggcauuguagu

SEQ ID NO: 3736564 - RNA, 14 nt, Human
uaauauuaaaaaua

SEQ ID NO: 3736565 - RNA, 12 nt, Human
uaauauuaaagc

SEQ ID NO: 3736566 - RNA, 17 nt, Human
uaauauuaaagccaugu

SEQ ID NO: 3736567 - RNA, 16 nt, Human
uaauauuaaauauaug

SEQ ID NO: 3736568 - RNA, 22 nt, Human
uaauauuacuguuuauuucugu

SEQ ID NO: 3736569 - RNA, 21 nt, Human
uaauauucaggguaaauagga

SEQ ID NO: 3736570 - RNA, 22 nt, Human
uaauauugaaaauugaaaagua

SEQ ID NO: 3736571 - RNA, 16 nt, Human
uaauauugacuuguau

SEQ ID NO: 3736572 - RNA, 16 nt, Human
uaauauugauuuauua

SEQ ID NO: 3736573 - RNA, 19 nt, Human
uaauauuguuguauaauuu

SEQ ID NO: 3736574 - RNA, 15 nt, Human
uaauauuguuuuucu

SEQ ID NO: 3736575 - RNA, 20 nt, Human
uaauauuguuuuucuuucua

SEQ ID NO: 3736576 - RNA, 21 nt, Human
uaauauuuaacauuauuuaua

SEQ ID NO: 3736577 - RNA, 19 nt, Human
uaauauuuacaauguauua

SEQ ID NO: 3736578 - RNA, 13 nt, Human
uaauauuuauuaa

SEQ ID NO: 3736579 - RNA, 15 nt, Human
uaauauuuuguauua

SEQ ID NO: 3736580 - RNA, 21 nt, Human
uaaucaaguaaggauguaugu

SEQ ID NO: 3736581 - RNA, 17 nt, Human
uaaucaaguuguaacuu

SEQ ID NO: 3736582 - RNA, 16 nt, Human
uaaucaauaaacgauu

SEQ ID NO: 3736583 - RNA, 17 nt, Human
uaaucaaucaucugugu

SEQ ID NO: 3736584 - RNA, 20 nt, Human
uaaucaccauguaagcacuc

SEQ ID NO: 3736585 - RNA, 23 nt, Human
uaaucacccuaccaacuuuacug

SEQ ID NO: 3736586 - RNA, 22 nt, Human
uaaucacgaguaagauuaagag

SEQ ID NO: 3736587 - RNA, 12 nt, Human
uaaucacugugu

SEQ ID NO: 3736588 - RNA, 14 nt, Human
uaaucacuguguau

SEQ ID NO: 3736589 - RNA, 15 nt, Human
uaaucacuguguaua

SEQ ID NO: 3736590 - RNA, 18 nt, Human
uaaucagaaauuuuuauc

SEQ ID NO: 3736591 - RNA, 21 nt, Human
uaaucagcaagaauuugaucg

SEQ ID NO: 3736592 - RNA, 18 nt, Human
uaaucaguguagccccaa

SEQ ID NO: 3736593 - RNA, 17 nt, Human
uaaucagugucucacac

SEQ ID NO: 3736594 - RNA, 23 nt, Human
uaaucagugugucuaaauuugaa

SEQ ID NO: 3736595 - RNA, 13 nt, Human
uaaucauauaaau

SEQ ID NO: 3736596 - RNA, 17 nt, Human
uaaucauauaaauagaa

SEQ ID NO: 3736597 - RNA, 19 nt, Human
uaaucauauaaauagaaug

SEQ ID NO: 3736598 - RNA, 20 nt, Human
uaaucauauaaauagaaugu

SEQ ID NO: 3736599 - RNA, 15 nt, Human
uaaucauauaauaaa

SEQ ID NO: 3736600 - RNA, 20 nt, Human
uaaucauauaauaaauguac

SEQ ID NO: 3736601 - RNA, 22 nt, Human
uaaucauauuagacuucuguuu

SEQ ID NO: 3736602 - RNA, 18 nt, Human
uaaucaucaaguaauaca

SEQ ID NO: 3736603 - RNA, 16 nt, Human
uaaucaucuauaaaga

SEQ ID NO: 3736604 - RNA, 13 nt, Human
uaaucaugaaauu

SEQ ID NO: 3736605 - RNA, 17 nt, Human
uaaucaugaaauuacuu

SEQ ID NO: 3736606 - RNA, 18 nt, Human
uaaucaugaaauuacuua

SEQ ID NO: 3736607 - RNA, 17 nt, Human
uaaucaugaauguguaa

SEQ ID NO: 3736608 - RNA, 12 nt, Human
uaaucauuucuu

SEQ ID NO: 3736609 - RNA, 13 nt, Human
uaaucauuuguuu

SEQ ID NO: 3736610 - RNA, 14 nt, Human
uaaucauuuguuua

SEQ ID NO: 3736611 - RNA, 22 nt, Human
uaauccaagcaaaugugaauca

SEQ ID NO: 3736612 - RNA, 14 nt, Human
uaauccagaauaac

SEQ ID NO: 3736613 - RNA, 13 nt, Human
uaauccagcugau

SEQ ID NO: 3736614 - RNA, 19 nt, Human
uaauccaggcacagcugag

SEQ ID NO: 3736615 - RNA, 18 nt, Human
uaauccaggcagauccag

SEQ ID NO: 3736616 - RNA, 16 nt, Human
uaaucccagcacuuug

SEQ ID NO: 3736617 - RNA, 21 nt, Human
uaaucccagcacuuugggagg

SEQ ID NO: 3736618 - RNA, 19 nt, Human
uaauccccuaaaauaacag

SEQ ID NO: 3736619 - RNA, 15 nt, Human
uaauccccuucuccc

SEQ ID NO: 3736620 - RNA, 18 nt, Human
uaauccgccaauauuagu

SEQ ID NO: 3736621 - RNA, 20 nt, Human
uaauccucuaggaggucucu

SEQ ID NO: 3736622 - RNA, 18 nt, Human
uaauccuguaggaaggua

SEQ ID NO: 3736623 - RNA, 22 nt, Human
uaauccuuaaaucuuaauguuc

SEQ ID NO: 3736624 - RNA, 15 nt, Human
uaauccuugauaaua

SEQ ID NO: 3736625 - RNA, 17 nt, Human
uaauccuuucugccgac

SEQ ID NO: 3736626 - RNA, 14 nt, Human
uaauccuuuggaaa

SEQ ID NO: 3736627 - RNA, 23 nt, Human
uaauccuuuguuuucugacuaau

SEQ ID NO: 3736628 - RNA, 13 nt, Human
uaaucgaccugcc

SEQ ID NO: 3736629 - RNA, 17 nt, Human
uaaucgggguauaauag

SEQ ID NO: 3736630 - RNA, 11 nt, Human
uaaucuaaaug

SEQ ID NO: 3736631 - RNA, 22 nt, Human
uaaucuacuccuuguaaagacu

SEQ ID NO: 3736632 - RNA, 22 nt, Human
uaaucuagauaucgacuuguuu

SEQ ID NO: 3736633 - RNA, 20 nt, Human
uaaucuaguuuacagaaaaa

SEQ ID NO: 3736634 - RNA, 15 nt, Human
uaaucucguuucaaa

SEQ ID NO: 3736635 - RNA, 14 nt, Human
uaaucucuaggaag

SEQ ID NO: 3736636 - RNA, 19 nt, Human
uaaucucucugcagcugcc

SEQ ID NO: 3736637 - RNA, 18 nt, Human
uaaucucuguaaagcuaa

SEQ ID NO: 3736638 - RNA, 13 nt, Human
uaaucugaauaaa

SEQ ID NO: 3736639 - RNA, 14 nt, Human
uaaucugagaaaca

SEQ ID NO: 3736640 - RNA, 20 nt, Human
uaaucugauggcuucuccag

SEQ ID NO: 3736641 - RNA, 13 nt, Human
uaaucugccuccc

SEQ ID NO: 3736642 - RNA, 15 nt, Human
uaaucuggacuccuc

SEQ ID NO: 3736643 - RNA, 17 nt, Human
uaaucuggacuccucug

SEQ ID NO: 3736644 - RNA, 13 nt, Human
uaaucuguacauu

SEQ ID NO: 3736645 - RNA, 16 nt, Human
uaaucuguagggcugg

SEQ ID NO: 3736646 - RNA, 20 nt, Human
uaaucuguagggcuggaccu

SEQ ID NO: 3736647 - RNA, 18 nt, Human
uaaucuguauaauacuuu

SEQ ID NO: 3736648 - RNA, 11 nt, Human
uaaucugucaa

SEQ ID NO: 3736649 - RNA, 22 nt, Human
uaaucugucaaaacacugugga

SEQ ID NO: 3736650 - RNA, 23 nt, Human
uaaucugucaaaacacuguggaa

SEQ ID NO: 3736651 - RNA, 22 nt, Human
uaaucugugcuguuucaaaguu

SEQ ID NO: 3736652 - RNA, 13 nt, Human
uaaucuguguaca

SEQ ID NO: 3736653 - RNA, 14 nt, Human
uaaucuguguacaa

SEQ ID NO: 3736654 - RNA, 20 nt, Human
uaaucuguuauguacuagug

SEQ ID NO: 3736655 - RNA, 14 nt, Human
uaaucuuaauguau

SEQ ID NO: 3736656 - RNA, 15 nt, Human
uaaucuuaguguaug

SEQ ID NO: 3736657 - RNA, 18 nt, Human
uaaucuuaguguaugauu

SEQ ID NO: 3736658 - RNA, 18 nt, Human
uaaucuuauaauuguucu

SEQ ID NO: 3736659 - RNA, 22 nt, Human
uaaucuuauaauuguucucaga

SEQ ID NO: 3736660 - RNA, 13 nt, Human
uaaucuuauuagg

SEQ ID NO: 3736661 - RNA, 13 nt, Human
uaaucuucaguuu

SEQ ID NO: 3736662 - RNA, 14 nt, Human
uaaucuucugccuu

SEQ ID NO: 3736663 - RNA, 16 nt, Human
uaaucuugaauuguaa

SEQ ID NO: 3736664 - RNA, 14 nt, Human
uaaucuugcucugc

SEQ ID NO: 3736665 - RNA, 15 nt, Human
uaaucuugcucugcu

SEQ ID NO: 3736666 - RNA, 20 nt, Human
uaaucuugcucugcuugaca

SEQ ID NO: 3736667 - RNA, 14 nt, Human
uaaucuugcuuucu

SEQ ID NO: 3736668 - RNA, 15 nt, Human
uaaucuugcuuucuu

SEQ ID NO: 3736669 - RNA, 16 nt, Human
uaaucuugugaaaaua

SEQ ID NO: 3736670 - RNA, 12 nt, Human
uaccuuacugug

SEQ ID NO: 3736671 - RNA, 14 nt, Human
uaccuuagugcagu

SEQ ID NO: 3736672 - RNA, 16 nt, Human
uaccuuagugcaguua

SEQ ID NO: 3736673 - RNA, 17 nt, Human
uaccuuagugcaguuau

SEQ ID NO: 3736674 - RNA, 19 nt, Human
uaccuuagugcaguuauuu

SEQ ID NO: 3736675 - RNA, 16 nt, Human
uaccuuauaguuacug

SEQ ID NO: 3736676 - RNA, 18 nt, Human
uaccuuaucacugcauua

SEQ ID NO: 3736677 - RNA, 14 nt, Human
uaccuucaaacuuu

SEQ ID NO: 3736678 - RNA, 16 nt, Human
uaccuucaaacuuuag

SEQ ID NO: 3736679 - RNA, 13 nt, Human
uaccuucaauaaa

SEQ ID NO: 3736680 - RNA, 14 nt, Human
uaccuucaauaaag

SEQ ID NO: 3736681 - RNA, 16 nt, Human
uaccuucaauaaagua

SEQ ID NO: 3736682 - RNA, 17 nt, Human
uaccuucagauccuacc

SEQ ID NO: 3736683 - RNA, 16 nt, Human
uaccuucauaugcagu

SEQ ID NO: 3736684 - RNA, 14 nt, Human
uaccuucucccuca

SEQ ID NO: 3736685 - RNA, 22 nt, Human
uaccuucucccucauuucagga

SEQ ID NO: 3736686 - RNA, 14 nt, Human
uaccuucuguaguu

SEQ ID NO: 3736687 - RNA, 12 nt, Human
uaccuucuuuca

SEQ ID NO: 3736688 - RNA, 18 nt, Human
uaccuugaacacuggggg

SEQ ID NO: 3736689 - RNA, 16 nt, Human
uaccuugaccuuugua

SEQ ID NO: 3736690 - RNA, 16 nt, Human
uaccuugacuguugau

SEQ ID NO: 3736691 - RNA, 20 nt, Human
uaccuugccccaacccuucu

SEQ ID NO: 3736692 - RNA, 23 nt, Human
uaccuugccccaacccuucuuca

SEQ ID NO: 3736693 - RNA, 21 nt, Human
uaccuuucacagcuuuuauca

SEQ ID NO: 3736694 - RNA, 19 nt, Human
uaccuuucuccuucccaaa

SEQ ID NO: 3736695 - RNA, 16 nt, Human
uaccuuuuaauuaaug

SEQ ID NO: 3736696 - RNA, 13 nt, Human
uaccuuuuauuuu

SEQ ID NO: 3736697 - RNA, 14 nt, Human
uaccuuuucagggc

SEQ ID NO: 3736698 - RNA, 13 nt, Human
uaccuuuuuuaga

SEQ ID NO: 3736699 - RNA, 13 nt, Human
uaccuuuuuuaua

SEQ ID NO: 3736700 - RNA, 18 nt, Human
uaccuuuuuuauacauaa

SEQ ID NO: 3736701 - RNA, 21 nt, Human
uaccuuuuuuguuuuuucaaa

SEQ ID NO: 3736702 - RNA, 23 nt, Human
uaccuuuuuuguuuuuucaaaau

SEQ ID NO: 3736703 - RNA, 15 nt, Human
uacgaaacacaaacc

SEQ ID NO: 3736704 - RNA, 20 nt, Human
uacgaaauaauuguuguucu

SEQ ID NO: 3736705 - RNA, 12 nt, Human
uacgaacaaaac

SEQ ID NO: 3736706 - RNA, 16 nt, Human
uacgaacaaaacacac

SEQ ID NO: 3736707 - RNA, 21 nt, Human
uacgacaaaggacgcucccag

SEQ ID NO: 3736708 - RNA, 14 nt, Human
uacgacaacuugca

SEQ ID NO: 3736709 - RNA, 20 nt, Human
uacgagcaagcuuuuacaac

SEQ ID NO: 3736710 - RNA, 22 nt, Human
uacgagcaccuccagccugaac

SEQ ID NO: 3736711 - RNA, 21 nt, Human
uacgagugcuaaguguaggau

SEQ ID NO: 3736712 - RNA, 14 nt, Human
uacgauacgcuacu

SEQ ID NO: 3736713 - RNA, 22 nt, Human
uacgcagcgugcuuuaaaaaau

SEQ ID NO: 3736714 - RNA, 16 nt, Human
uacgcccaucucagga

SEQ ID NO: 3736715 - RNA, 13 nt, Human
uacgcucuccuuu

SEQ ID NO: 3736716 - RNA, 15 nt, Human
uacgcucuccuuucu

SEQ ID NO: 3736717 - RNA, 19 nt, Human
uacgcucuccuuucuuucu

SEQ ID NO: 3736718 - RNA, 21 nt, Human
uacgcucuccuuucuuucuaa

SEQ ID NO: 3736719 - RNA, 14 nt, Human
uacgcuguccagaa

SEQ ID NO: 3736720 - RNA, 13 nt, Human
uacggacaccccc

SEQ ID NO: 3736721 - RNA, 14 nt, Human
uacggacacccccu

SEQ ID NO: 3736722 - RNA, 17 nt, Human
uacggauuuucaguuac

SEQ ID NO: 3736723 - RNA, 13 nt, Human
uacggugggggua

SEQ ID NO: 3736724 - RNA, 20 nt, Human
uacgguuugccccuuuauaa

SEQ ID NO: 3736725 - RNA, 13 nt, Human
uacguacacauuu

SEQ ID NO: 3736726 - RNA, 14 nt, Human
uacguacacauuuu

SEQ ID NO: 3736727 - RNA, 15 nt, Human
uacguacacauuuua

SEQ ID NO: 3736728 - RNA, 16 nt, Human
uacguaguguagauuu

SEQ ID NO: 3736729 - RNA, 12 nt, Human
uacguaguucua

SEQ ID NO: 3736730 - RNA, 18 nt, Human
uacguaugucugguucuc

SEQ ID NO: 3736731 - RNA, 18 nt, Human
uacgucaaacaugaagug

SEQ ID NO: 3736732 - RNA, 15 nt, Human
uacgucugacaggca

SEQ ID NO: 3736733 - RNA, 21 nt, Human
uacgucugggagaaauugaca

SEQ ID NO: 3736734 - RNA, 14 nt, Human
uacgugagccaggu

SEQ ID NO: 3736735 - RNA, 15 nt, Human
uacguguagcuauau

SEQ ID NO: 3736736 - RNA, 14 nt, Human
uacgugucaaugug

SEQ ID NO: 3736737 - RNA, 17 nt, Human
uacgugucaaugugugc

SEQ ID NO: 3736738 - RNA, 16 nt, Human
uacguuauuguugacu

SEQ ID NO: 3736739 - RNA, 18 nt, Human
uacguuccuauugucauu

SEQ ID NO: 3736740 - RNA, 14 nt, Human
uacguugugcauuu

SEQ ID NO: 3736741 - RNA, 14 nt, Human
uacguuuguaugug

SEQ ID NO: 3736742 - RNA, 17 nt, Human
uacuaaaaagaaggaaa

SEQ ID NO: 3736743 - RNA, 14 nt, Human
uacuaaaaauacaa

SEQ ID NO: 3736744 - RNA, 15 nt, Human
uacuaaaaauacaaa

SEQ ID NO: 3736745 - RNA, 18 nt, Human
uacuaaaaauacaaacaa

SEQ ID NO: 3736746 - RNA, 19 nt, Human
uacuaaacaguaagauauc

SEQ ID NO: 3736747 - RNA, 12 nt, Human
uacuaaacauau

SEQ ID NO: 3736748 - RNA, 21 nt, Human
uacuaaauuuaaauuuaaaga

SEQ ID NO: 3736749 - RNA, 22 nt, Human
uacuaaauuuaaauuuaaagau

SEQ ID NO: 3736750 - RNA, 23 nt, Human
uacuaacaaucagcuccuuccug

SEQ ID NO: 3736751 - RNA, 17 nt, Human
uacuaacuucuaaaacu

SEQ ID NO: 3736752 - RNA, 19 nt, Human
uacuaacuucuaaaacugu

SEQ ID NO: 3736753 - RNA, 19 nt, Human
uacuaagaugacauugcua

SEQ ID NO: 3736754 - RNA, 19 nt, Human
uacuaaggauacaggcugg

SEQ ID NO: 3736755 - RNA, 15 nt, Human
uacuaaggcuuuccu

SEQ ID NO: 3736756 - RNA, 14 nt, Human
uacuaaguucacau

SEQ ID NO: 3736757 - RNA, 14 nt, Human
uacuaauaaacuaa

SEQ ID NO: 3736758 - RNA, 22 nt, Human
uacuaauaaacuaauaauugca

SEQ ID NO: 3736759 - RNA, 15 nt, Human
uacuaaugauguuuu

SEQ ID NO: 3736760 - RNA, 20 nt, Human
uacuaauguaaaaugauuug

SEQ ID NO: 3736761 - RNA, 15 nt, Human
uacuaauuaacauau

SEQ ID NO: 3736762 - RNA, 17 nt, Human
uacuaauuuuacacauu

SEQ ID NO: 3736763 - RNA, 16 nt, Human
uacuaauuuucuagau

SEQ ID NO: 3736764 - RNA, 16 nt, Human
uacuacaaaaaaguug

SEQ ID NO: 3736765 - RNA, 14 nt, Human
uacuacaauaugua

SEQ ID NO: 3736766 - RNA, 20 nt, Human
uacuacacuccaugucaggu

SEQ ID NO: 3736767 - RNA, 17 nt, Human
uacuacagucaagauag

SEQ ID NO: 3736768 - RNA, 20 nt, Human
uacuacaguccucccaucuc

SEQ ID NO: 3736769 - RNA, 18 nt, Human
uacuacaguucuuuuguu

SEQ ID NO: 3736770 - RNA, 23 nt, Human
uacuacaguuguuuuuugaaaac

SEQ ID NO: 3736771 - RNA, 13 nt, Human
uacuacaguuugu

SEQ ID NO: 3736772 - RNA, 20 nt, Human
uacuacaguuuguuaguaug

SEQ ID NO: 3736773 - RNA, 18 nt, Human
uacuacauugaguagaca

SEQ ID NO: 3736774 - RNA, 15 nt, Human
uacuaccuccucucc

SEQ ID NO: 3736775 - RNA, 14 nt, Human
uacuaccuugaaaa

SEQ ID NO: 3736776 - RNA, 16 nt, Human
uacuacuccuguaauu

SEQ ID NO: 3736777 - RNA, 20 nt, Human
uacuacugaaacagauuuca

SEQ ID NO: 3736778 - RNA, 21 nt, Human
uacuacugaaacagauuucau

SEQ ID NO: 3736779 - RNA, 17 nt, Human
uacuacuuaugaaaugu

SEQ ID NO: 3736780 - RNA, 12 nt, Human
uacuacuuuguu

SEQ ID NO: 3736781 - RNA, 22 nt, Human
uacuacuuuguuaggauuuuca

SEQ ID NO: 3736782 - RNA, 12 nt, Human
uacuagaacaca

SEQ ID NO: 3736783 - RNA, 18 nt, Human
uacuagaacacagaaagc

SEQ ID NO: 3736784 - RNA, 18 nt, Human
uacuagagauauuuugua

SEQ ID NO: 3736785 - RNA, 24 nt, Human
uacuagagauauuuuguaaaaugu

SEQ ID NO: 3736786 - RNA, 19 nt, Human
uacuagagucugaacagcu

SEQ ID NO: 3736787 - RNA, 15 nt, Human
uacuagaugucuuua

SEQ ID NO: 3736788 - RNA, 19 nt, Human
uacuagaugucuuuaggca

SEQ ID NO: 3736789 - RNA, 17 nt, Human
uacuagcaaaauaaaac

SEQ ID NO: 3736790 - RNA, 19 nt, Human
uacuagggagccauuugag

SEQ ID NO: 3736791 - RNA, 20 nt, Human
uacuagggagccauuugaga

SEQ ID NO: 3736792 - RNA, 18 nt, Human
uacuaguacuguguacug

SEQ ID NO: 3736793 - RNA, 22 nt, Human
uacuagucaccagagacuuuag

SEQ ID NO: 3736794 - RNA, 14 nt, Human
uacuaguuacacau

SEQ ID NO: 3736795 - RNA, 19 nt, Human
uacuaguuacacaucuuca

SEQ ID NO: 3736796 - RNA, 14 nt, Human
uacuauaaagagaa

SEQ ID NO: 3736797 - RNA, 16 nt, Human
uacuauaauuuaccug

SEQ ID NO: 3736798 - RNA, 16 nt, Human
uacuauagcaaaguag

SEQ ID NO: 3736799 - RNA, 19 nt, Human
uacuauauaugugaugauc

SEQ ID NO: 3736800 - RNA, 20 nt, Human
uacuauaucuguuuuacugc

SEQ ID NO: 3736801 - RNA, 13 nt, Human
uacuauauuugcu

SEQ ID NO: 3736802 - RNA, 21 nt, Human
uacuaucauacuacugaaaca

SEQ ID NO: 3736803 - RNA, 13 nt, Human
uacuauccuggcu

SEQ ID NO: 3736804 - RNA, 16 nt, Human
uacuauguaucaauga

SEQ ID NO: 3736805 - RNA, 12 nt, Human
uacuauuaaaaa

SEQ ID NO: 3736806 - RNA, 17 nt, Human
uacuauuaagcaguaaa

SEQ ID NO: 3736807 - RNA, 22 nt, Human
uacuauuguugcugaaacuugc

SEQ ID NO: 3736808 - RNA, 11 nt, Human
uacuauuuaaa

SEQ ID NO: 3736809 - RNA, 16 nt, Human
uacuauuuaacugacu

SEQ ID NO: 3736810 - RNA, 12 nt, Human
uacuauuuaaga

SEQ ID NO: 3736811 - RNA, 15 nt, Human
uacuauuuaagaugu

SEQ ID NO: 3736812 - RNA, 13 nt, Human
uacuauuucacaa

SEQ ID NO: 3736813 - RNA, 12 nt, Human
uacuauuucuug

SEQ ID NO: 3736814 - RNA, 21 nt, Human
uacuauuucuugugguuauaa

SEQ ID NO: 3736815 - RNA, 18 nt, Human
uacuauuuuacuucuaga

SEQ ID NO: 3736816 - RNA, 13 nt, Human
uacuauuuuuacu

SEQ ID NO: 3736817 - RNA, 19 nt, Human
uacucaagaggcugaggca

SEQ ID NO: 3736818 - RNA, 23 nt, Human
uacucaagagugguaucuugcag

SEQ ID NO: 3736819 - RNA, 19 nt, Human
uacucaaguagcauuuacu

SEQ ID NO: 3736820 - RNA, 22 nt, Human
uacucaauugauaaacauuuaa

SEQ ID NO: 3736821 - RNA, 15 nt, Human
gcauauuuuuuuucu

SEQ ID NO: 3736822 - RNA, 21 nt, Human
gcaucaaaagacaauucuuua

SEQ ID NO: 3736823 - RNA, 22 nt, Human
gcaucaaggggucacuuacaga

SEQ ID NO: 3736824 - RNA, 19 nt, Human
gcaucaauccugugugguu

SEQ ID NO: 3736825 - RNA, 12 nt, Human
gcaucacaguuu

SEQ ID NO: 3736826 - RNA, 16 nt, Human
gcaucacaugaacuug

SEQ ID NO: 3736827 - RNA, 15 nt, Human
gcaucaccucaggcc

SEQ ID NO: 3736828 - RNA, 15 nt, Human
gcaucaccuccacca

SEQ ID NO: 3736829 - RNA, 16 nt, Human
gcaucaccugccuguu

SEQ ID NO: 3736830 - RNA, 21 nt, Human
gcaucacuccccaaggaagag

SEQ ID NO: 3736831 - RNA, 16 nt, Human
gcaucacuuaaaacac

SEQ ID NO: 3736832 - RNA, 23 nt, Human
gcaucacuuaacggaccaaagca

SEQ ID NO: 3736833 - RNA, 10 nt, Human
gcaucagaaa

SEQ ID NO: 3736834 - RNA, 16 nt, Human
gcaucagaaagggagg

SEQ ID NO: 3736835 - RNA, 19 nt, Human
gcaucagaaagggagggcu

SEQ ID NO: 3736836 - RNA, 21 nt, Human
gcaucagaaagggagggcucu

SEQ ID NO: 3736837 - RNA, 22 nt, Human
gcaucagaaagggagggcucug

SEQ ID NO: 3736838 - RNA, 22 nt, Human
gcaucagacugugaaccccacg

SEQ ID NO: 3736839 - RNA, 12 nt, Human
gcaucagcugcu

SEQ ID NO: 3736840 - RNA, 23 nt, Human
gcaucagcugcugaaacaacaaa

SEQ ID NO: 3736841 - RNA, 17 nt, Human
gcaucagcuggcgucau

SEQ ID NO: 3736842 - RNA, 19 nt, Human
gcaucaggccuagaggccu

SEQ ID NO: 3736843 - RNA, 13 nt, Human
gcaucagggggaa

SEQ ID NO: 3736844 - RNA, 17 nt, Human
gcaucaguguuuuucaa

SEQ ID NO: 3736845 - RNA, 12 nt, Human
gcaucaugccuc

SEQ ID NO: 3736846 - RNA, 13 nt, Human
gcaucaugccucu

SEQ ID NO: 3736847 - RNA, 16 nt, Human
gcaucaugccucugag

SEQ ID NO: 3736848 - RNA, 17 nt, Human
gcaucaugccucugagg

SEQ ID NO: 3736849 - RNA, 18 nt, Human
gcaucaugccucugaggc

SEQ ID NO: 3736850 - RNA, 20 nt, Human
gcaucaugccucugaggcca

SEQ ID NO: 3736851 - RNA, 21 nt, Human
gcaucaugccucugaggccag

SEQ ID NO: 3736852 - RNA, 18 nt, Human
gcaucauuccaccauggc

SEQ ID NO: 3736853 - RNA, 15 nt, Human
gcaucauuccaggcc

SEQ ID NO: 3736854 - RNA, 20 nt, Human
gcaucauucuuguuaauuau

SEQ ID NO: 3736855 - RNA, 20 nt, Human
gcaucauuuugcauucaaau

SEQ ID NO: 3736856 - RNA, 15 nt, Human
gcauccaaaggugcu

SEQ ID NO: 3736857 - RNA, 12 nt, Human
gcauccaacuga

SEQ ID NO: 3736858 - RNA, 15 nt, Human
gcauccaaucucaag

SEQ ID NO: 3736859 - RNA, 12 nt, Human
gcauccaccucc

SEQ ID NO: 3736860 - RNA, 21 nt, Human
gcauccagagucccugccugg

SEQ ID NO: 3736861 - RNA, 19 nt, Human
gcauccagcagucucugcc

SEQ ID NO: 3736862 - RNA, 20 nt, Human
gcauccagcagucucugccu

SEQ ID NO: 3736863 - RNA, 12 nt, Human
gcauccaugggg

SEQ ID NO: 3736864 - RNA, 22 nt, Human
gcauccauggggucucucacag

SEQ ID NO: 3736865 - RNA, 23 nt, Human
gcauccauggggucucucacaga

SEQ ID NO: 3736866 - RNA, 15 nt, Human
gcauccauuccucag

SEQ ID NO: 3736867 - RNA, 16 nt, Human
gcauccauucuccuga

SEQ ID NO: 3736868 - RNA, 20 nt, Human
gcaucccagcaccugccucc

SEQ ID NO: 3736869 - RNA, 21 nt, Human
gcaucccaggggaccacaccu

SEQ ID NO: 3736870 - RNA, 14 nt, Human
gcaucccaguggcc

SEQ ID NO: 3736871 - RNA, 17 nt, Human
gcaucccaguggccuca

SEQ ID NO: 3736872 - RNA, 20 nt, Human
gcaucccaguggccucaacc

SEQ ID NO: 3736873 - RNA, 15 nt, Human
gcauccccugccucc

SEQ ID NO: 3736874 - RNA, 21 nt, Human
gcauccccuuggcugugaggc

SEQ ID NO: 3736875 - RNA, 18 nt, Human
gcaucccggaggaaaucu

SEQ ID NO: 3736876 - RNA, 12 nt, Human
gcaucccugaga

SEQ ID NO: 3736877 - RNA, 13 nt, Human
gcaucccugagac

SEQ ID NO: 3736878 - RNA, 15 nt, Human
gcaucccugggccuu

SEQ ID NO: 3736879 - RNA, 20 nt, Human
gcaucccugggccuugggcu

SEQ ID NO: 3736880 - RNA, 18 nt, Human
gcaucccuugaccaggcc

SEQ ID NO: 3736881 - RNA, 20 nt, Human
gcaucccuugaccaggccug

SEQ ID NO: 3736882 - RNA, 18 nt, Human
gcauccgcaggugcuggu

SEQ ID NO: 3736883 - RNA, 17 nt, Human
gcauccguaguucccug

SEQ ID NO: 3736884 - RNA, 19 nt, Human
gcauccuaaagauaaagcc

SEQ ID NO: 3736885 - RNA, 20 nt, Human
gcauccuaaagauaaagcca

SEQ ID NO: 3736886 - RNA, 19 nt, Human
gcauccuccaagaaucuau

SEQ ID NO: 3736887 - RNA, 12 nt, Human
gcauccuccagc

SEQ ID NO: 3736888 - RNA, 14 nt, Human
gcauccuccagccc

SEQ ID NO: 3736889 - RNA, 21 nt, Human
gcauccugagccccgcccucu

SEQ ID NO: 3736890 - RNA, 21 nt, Human
gcauccugccuuagagccagg

SEQ ID NO: 3736891 - RNA, 17 nt, Human
gcauccuggcacccggc

SEQ ID NO: 3736892 - RNA, 21 nt, Human
gcauccuggcacccggccccu

SEQ ID NO: 3736893 - RNA, 17 nt, Human
gcauccugugaaguccu

SEQ ID NO: 3736894 - RNA, 16 nt, Human
gcauccugugccacua

SEQ ID NO: 3736895 - RNA, 22 nt, Human
gcauccuuaaguaucagaaagc

SEQ ID NO: 3736896 - RNA, 13 nt, Human
gcauccuuccuau

SEQ ID NO: 3736897 - RNA, 15 nt, Human
gcauccuuccuauaa

SEQ ID NO: 3736898 - RNA, 13 nt, Human
gcauccuucugcc

SEQ ID NO: 3736899 - RNA, 23 nt, Human
gcauccuuuaggguucugccucu

SEQ ID NO: 3736900 - RNA, 13 nt, Human
gcaucgcaaugua

SEQ ID NO: 3736901 - RNA, 16 nt, Human
gcaucuaaacuuuaau

SEQ ID NO: 3736902 - RNA, 21 nt, Human
gcaucuaaacuuuaauaugua

SEQ ID NO: 3736903 - RNA, 22 nt, Human
gcaucuaaguuauaagacucuc

SEQ ID NO: 3736904 - RNA, 22 nt, Human
gcaucuagaggcuuccuucauu

SEQ ID NO: 3736905 - RNA, 20 nt, Human
gcaucuaguuccccuguuua

SEQ ID NO: 3736906 - RNA, 16 nt, Human
gcaucuaucugugcua

SEQ ID NO: 3736907 - RNA, 23 nt, Human
gcaucuaugggagagugucaacc

SEQ ID NO: 3736908 - RNA, 19 nt, Human
gugaaaaucuacacuccag

SEQ ID NO: 3736909 - RNA, 15 nt, Human
gugaaaaugguccag

SEQ ID NO: 3736910 - RNA, 21 nt, Human
gugaaacacaccaggcugugg

SEQ ID NO: 3736911 - RNA, 14 nt, Human
gugaaacacagcug

SEQ ID NO: 3736912 - RNA, 15 nt, Human
gugaaacacagcugu

SEQ ID NO: 3736913 - RNA, 24 nt, Human
gugaaacccagucacugugagcuc

SEQ ID NO: 3736914 - RNA, 12 nt, Human
gugaaacccugu

SEQ ID NO: 3736915 - RNA, 17 nt, Human
gugaaaccugugaagcu

SEQ ID NO: 3736916 - RNA, 18 nt, Human
gugaaaccuuuagggcag

SEQ ID NO: 3736917 - RNA, 19 nt, Human
gugaaaccuuuagggcagc

SEQ ID NO: 3736918 - RNA, 23 nt, Human
gugaaaccuuuagggcagcuugc

SEQ ID NO: 3736919 - RNA, 13 nt, Human
gugaaaccuuuuu

SEQ ID NO: 3736920 - RNA, 14 nt, Human
gugaaaccuuuuuu

SEQ ID NO: 3736921 - RNA, 21 nt, Human
gugaaaccuuuuuuaagauuu

SEQ ID NO: 3736922 - RNA, 21 nt, Human
gugaaacugcuuguuuccuag

SEQ ID NO: 3736923 - RNA, 23 nt, Human
gugaaacugcuuguuuccuagca

SEQ ID NO: 3736924 - RNA, 16 nt, Human
gugaaacuuccuaagu

SEQ ID NO: 3736925 - RNA, 14 nt, Human
gugaaacuuucauu

SEQ ID NO: 3736926 - RNA, 21 nt, Human
gugaaacuuuucuagaauuau

SEQ ID NO: 3736927 - RNA, 15 nt, Human
gugaaagaaaucaug

SEQ ID NO: 3736928 - RNA, 17 nt, Human
gugaaagaaaucauguu

SEQ ID NO: 3736929 - RNA, 19 nt, Human
gugaaagaaaucauguuau

SEQ ID NO: 3736930 - RNA, 20 nt, Human
gugaaagaaaucauguuaug

SEQ ID NO: 3736931 - RNA, 21 nt, Human
gugaaagaaaucauguuauga

SEQ ID NO: 3736932 - RNA, 13 nt, Human
gugaaagaaguaa

SEQ ID NO: 3736933 - RNA, 19 nt, Human
gugaaaggauaugaaucug

SEQ ID NO: 3736934 - RNA, 21 nt, Human
gugaaagggagcuaucaggaa

SEQ ID NO: 3736935 - RNA, 17 nt, Human
gugaaauaacaaaaugg

SEQ ID NO: 3736936 - RNA, 19 nt, Human
gugaaauaacaaaauggac

SEQ ID NO: 3736937 - RNA, 22 nt, Human
gugaaauaccaaccugaagaca

SEQ ID NO: 3736938 - RNA, 17 nt, Human
gugaaauaccagugugg

SEQ ID NO: 3736939 - RNA, 14 nt, Human
gugaaauguaacug

SEQ ID NO: 3736940 - RNA, 12 nt, Human
gugaaauuccca

SEQ ID NO: 3736941 - RNA, 23 nt, Human
gugaaauucccaacaaacauuga

SEQ ID NO: 3736942 - RNA, 20 nt, Human
gugaaauuuacaucauuucu

SEQ ID NO: 3736943 - RNA, 18 nt, Human
gugaaauuuuucauauuu

SEQ ID NO: 3736944 - RNA, 20 nt, Human
gugaaauuuuucauauuuua

SEQ ID NO: 3736945 - RNA, 18 nt, Human
gugaacaaaagaugcucu

SEQ ID NO: 3736946 - RNA, 18 nt, Human
gugaacaaagcagccacg

SEQ ID NO: 3736947 - RNA, 19 nt, Human
gugaacaagcaaacccaga

SEQ ID NO: 3736948 - RNA, 12 nt, Human
gugaaccaaaga

SEQ ID NO: 3736949 - RNA, 14 nt, Human
gugaaccaaugcaa

SEQ ID NO: 3736950 - RNA, 19 nt, Human
gugaaccaccacacccagc

SEQ ID NO: 3736951 - RNA, 22 nt, Human
gugaaccaccacacccagccca

SEQ ID NO: 3736952 - RNA, 23 nt, Human
gugaaccaccacacccagcccac

SEQ ID NO: 3736953 - RNA, 19 nt, Human
gucacacaguguuggaggu

SEQ ID NO: 3736954 - RNA, 20 nt, Human
gucacacaguguuggagguu

SEQ ID NO: 3736955 - RNA, 13 nt, Human
gucacaccagcca

SEQ ID NO: 3736956 - RNA, 12 nt, Human
gucacagccagg

SEQ ID NO: 3736957 - RNA, 13 nt, Human
gucacagccaggc

SEQ ID NO: 3736958 - RNA, 20 nt, Human
gucacaggaaguagaggagg

SEQ ID NO: 3736959 - RNA, 19 nt, Human
gucacaggacucugccucc

SEQ ID NO: 3736960 - RNA, 15 nt, Human
gucacaggcaggucc

SEQ ID NO: 3736961 - RNA, 21 nt, Human
gucacaguguuuacacuuugg

SEQ ID NO: 3736962 - RNA, 16 nt, Human
gucacaucagauaaga

SEQ ID NO: 3736963 - RNA, 13 nt, Human
gucacauugcauu

SEQ ID NO: 3736964 - RNA, 15 nt, Human
gucaccaagcccagu

SEQ ID NO: 3736965 - RNA, 16 nt, Human
gucaccaagcccaguu

SEQ ID NO: 3736966 - RNA, 13 nt, Human
gucaccaaggaaa

SEQ ID NO: 3736967 - RNA, 13 nt, Human
gucaccaccaccc

SEQ ID NO: 3736968 - RNA, 14 nt, Human
gucaccaccacccc

SEQ ID NO: 3736969 - RNA, 17 nt, Human
gucaccacccugcucau

SEQ ID NO: 3736970 - RNA, 11 nt, Human
gucaccaccuu

SEQ ID NO: 3736971 - RNA, 15 nt, Human
gucaccaccuuccca

SEQ ID NO: 3736972 - RNA, 16 nt, Human
gucaccacgacuggcc

SEQ ID NO: 3736973 - RNA, 17 nt, Human
gucaccacgacuggcca

SEQ ID NO: 3736974 - RNA, 19 nt, Human
gucaccacgacuggccagg

SEQ ID NO: 3736975 - RNA, 16 nt, Human
gucaccagcuccuccc

SEQ ID NO: 3736976 - RNA, 21 nt, Human
gucacccaaaccggcaggugc

SEQ ID NO: 3736977 - RNA, 20 nt, Human
gucacccaggcuggaguaca

SEQ ID NO: 3736978 - RNA, 20 nt, Human
gucacccagguuggagugca

SEQ ID NO: 3736979 - RNA, 13 nt, Human
gucaccccagagc

SEQ ID NO: 3736980 - RNA, 14 nt, Human
gucaccccagagcc

SEQ ID NO: 3736981 - RNA, 13 nt, Human
gucaccccggcca

SEQ ID NO: 3736982 - RNA, 18 nt, Human
gucaccccggccaccugc

SEQ ID NO: 3736983 - RNA, 22 nt, Human
gucaccccggccaccugcggug

SEQ ID NO: 3736984 - RNA, 20 nt, Human
gucaccccuccaggaaugau

SEQ ID NO: 3736985 - RNA, 14 nt, Human
gucacccuagcccu

SEQ ID NO: 3736986 - RNA, 23 nt, Human
gucaccggauccuggguggucug

SEQ ID NO: 3736987 - RNA, 19 nt, Human
gucaccguggaccuuccug

SEQ ID NO: 3736988 - RNA, 15 nt, Human
gucaccuagcaagcu

SEQ ID NO: 3736989 - RNA, 20 nt, Human
gucaccuaggaagccucaga

SEQ ID NO: 3736990 - RNA, 21 nt, Human
gucaccuaggaagccucagau

SEQ ID NO: 3736991 - RNA, 19 nt, Human
gucaccucacucagcacca

SEQ ID NO: 3736992 - RNA, 21 nt, Human
gucaccucacucagcaccacu

SEQ ID NO: 3736993 - RNA, 16 nt, Human
gucaccucagagacau

SEQ ID NO: 3736994 - RNA, 14 nt, Human
gucaccucauggaa

SEQ ID NO: 3736995 - RNA, 14 nt, Human
gucaccuuuuaaau

SEQ ID NO: 3736996 - RNA, 22 nt, Human
gucacguggaggagcagugcag

SEQ ID NO: 3736997 - RNA, 16 nt, Human
gucacuacgccuggcu

SEQ ID NO: 3736998 - RNA, 23 nt, Human
gucacuacgugacuguggcacac

SEQ ID NO: 3736999 - RNA, 17 nt, Human
gucacuacucacagucu

SEQ ID NO: 3737000 - RNA, 12 nt, Human
gucacuagaaug

SEQ ID NO: 3737001 - RNA, 23 nt, Human
gucacucaacaaaagugcuuugg

SEQ ID NO: 3737002 - RNA, 13 nt, Human
gucacucaaggcg

SEQ ID NO: 3737003 - RNA, 23 nt, Human
gucacucagauggaaccgcagga

SEQ ID NO: 3737004 - RNA, 15 nt, Human
gucacucaggcugga

SEQ ID NO: 3737005 - RNA, 20 nt, Human
gucacucauugcugagccuc

SEQ ID NO: 3737006 - RNA, 21 nt, Human
gucacucauugcugagccucu

SEQ ID NO: 3737007 - RNA, 24 nt, Human
gucacucauugcugagccucugcu

SEQ ID NO: 3737008 - RNA, 14 nt, Human
gucacucuggcagc

SEQ ID NO: 3737009 - RNA, 16 nt, Human
gucacucuggcagcuc

SEQ ID NO: 3737010 - RNA, 19 nt, Human
gucacucuggcagcucaga

SEQ ID NO: 3737011 - RNA, 22 nt, Human
gucacucuggcagcucagagag

SEQ ID NO: 3737012 - RNA, 16 nt, Human
gucacugacacaaagg

SEQ ID NO: 3737013 - RNA, 16 nt, Human
gucacugagacagccc

SEQ ID NO: 3737014 - RNA, 23 nt, Human
gucacugaggccugagacccagg

SEQ ID NO: 3737015 - RNA, 16 nt, Human
gucacugccauggagg

SEQ ID NO: 3737016 - RNA, 22 nt, Human
gucacugcugcuucauguuugc

SEQ ID NO: 3737017 - RNA, 12 nt, Human
gucacugcuguc

SEQ ID NO: 3737018 - RNA, 10 nt, Human
gucacugcuu

SEQ ID NO: 3737019 - RNA, 15 nt, Human
gucacugcuuaacuu

SEQ ID NO: 3737020 - RNA, 19 nt, Human
gucacugcuuuuggccugg

SEQ ID NO: 3737021 - RNA, 17 nt, Human
gucacuggcucuccaag

SEQ ID NO: 3737022 - RNA, 20 nt, Human
gucacuggcucuccaagugc

SEQ ID NO: 3737023 - RNA, 21 nt, Human
gucacuggcucuccaagugcc

SEQ ID NO: 3737024 - RNA, 22 nt, Human
gucacuggggcccaagagucug

SEQ ID NO: 3737025 - RNA, 18 nt, Human
gucacuuagguaguacca

SEQ ID NO: 3737026 - RNA, 24 nt, Human
gucacuucgcgugcccucgcugcu

SEQ ID NO: 3737027 - RNA, 13 nt, Human
gucacuucuucug

SEQ ID NO: 3737028 - RNA, 23 nt, Human
gucacuugaugugccauuuuaaa

SEQ ID NO: 3737029 - RNA, 18 nt, Human
gucacuugugcuuugcuc

SEQ ID NO: 3737030 - RNA, 17 nt, Human
gucacuuuguuuuacug

SEQ ID NO: 3737031 - RNA, 18 nt, Human
gucacuuuuugaggcaaa

SEQ ID NO: 3737032 - RNA, 19 nt, Human
gucacuuuuugaggcaaaa

SEQ ID NO: 3737033 - RNA, 16 nt, Human
gucagaaaguguaaau

SEQ ID NO: 3737034 - RNA, 18 nt, Human
gucagaaaguguaaaugu

SEQ ID NO: 3737035 - RNA, 15 nt, Human
gucagaacccugcca

SEQ ID NO: 3737036 - RNA, 19 nt, Human
gucagaauuagcugcuucu

SEQ ID NO: 3737037 - RNA, 16 nt, Human
gucagacauaaagcca

SEQ ID NO: 3737038 - RNA, 17 nt, Human
gucagacauaaagccau

SEQ ID NO: 3737039 - RNA, 18 nt, Human
gucagacauccauguuug

SEQ ID NO: 3737040 - RNA, 14 nt, Human
gucagacugcuggg

SEQ ID NO: 3737041 - RNA, 15 nt, Human
gucagacugcuggga

SEQ ID NO: 3737042 - RNA, 22 nt, Human
gucagacuggcuggcugcagug

SEQ ID NO: 3737043 - RNA, 16 nt, Human
gucagacuuuaaagaa

SEQ ID NO: 3737044 - RNA, 10 nt, Human
gucagagaca

SEQ ID NO: 3737045 - RNA, 16 nt, Human
gucagagacugcugug

SEQ ID NO: 3737046 - RNA, 17 nt, Human
gucagagaggagucaga

SEQ ID NO: 3737047 - RNA, 19 nt, Human
gucagagaggagucagaga

SEQ ID NO: 3737048 - RNA, 21 nt, Human
gucagagaggagucagagaga

SEQ ID NO: 3737049 - RNA, 14 nt, Human
gucagagccugcag

SEQ ID NO: 3737050 - RNA, 15 nt, Human
gucagagccugcagu

SEQ ID NO: 3737051 - RNA, 14 nt, Human
gucagagcugggag

SEQ ID NO: 3737052 - RNA, 15 nt, Human
gucagaggaccugua

SEQ ID NO: 3737053 - RNA, 23 nt, Human
gucagaggagagauagccugugg

SEQ ID NO: 3737054 - RNA, 14 nt, Human
gucagaggauggcc

SEQ ID NO: 3737055 - RNA, 19 nt, Human
gucagaguaagcugcuuuu

SEQ ID NO: 3737056 - RNA, 15 nt, Human
gucagaugagaacaa

SEQ ID NO: 3737057 - RNA, 13 nt, Human
gucagauguuuaa

SEQ ID NO: 3737058 - RNA, 17 nt, Human
gucagauguuuaaaaca

SEQ ID NO: 3737059 - RNA, 18 nt, Human
gucagauguuuaaaacac

SEQ ID NO: 3737060 - RNA, 15 nt, Human
gucagcaaaaagcaa

SEQ ID NO: 3737061 - RNA, 21 nt, Human
gucagcaaguccuaagccugu

SEQ ID NO: 3737062 - RNA, 14 nt, Human
gucagcaguugcug

SEQ ID NO: 3737063 - RNA, 15 nt, Human
gucagccaaauguaa

SEQ ID NO: 3737064 - RNA, 15 nt, Human
gucagccagggccag

SEQ ID NO: 3737065 - RNA, 13 nt, Human
gucagccauugca

SEQ ID NO: 3737066 - RNA, 23 nt, Human
gucagccauugcacccagcccag

SEQ ID NO: 3737067 - RNA, 20 nt, Human
gucagccgagccgggccugg

SEQ ID NO: 3737068 - RNA, 21 nt, Human
gucagccgagccgggccuggg

SEQ ID NO: 3737069 - RNA, 15 nt, Human
gucagccgggcccug

SEQ ID NO: 3737070 - RNA, 16 nt, Human
gucagccgggcccuga

SEQ ID NO: 3737071 - RNA, 16 nt, Human
gucagccuccagccuc

SEQ ID NO: 3737072 - RNA, 16 nt, Human
gucagccucgcaggcc

SEQ ID NO: 3737073 - RNA, 23 nt, Human
gucagccucgcaggccucccugc

SEQ ID NO: 3737074 - RNA, 16 nt, Human
gucagcguugcauguc

SEQ ID NO: 3737075 - RNA, 21 nt, Human
gucagcuccccucggagaaga

SEQ ID NO: 3737076 - RNA, 22 nt, Human
gucagcuccccucggagaagag

SEQ ID NO: 3737077 - RNA, 13 nt, Human
gucagcucucugc

SEQ ID NO: 3737078 - RNA, 12 nt, Human
gucagcugaggc

SEQ ID NO: 3737079 - RNA, 20 nt, Human
gucagcugcucccuggcauu

SEQ ID NO: 3737080 - RNA, 22 nt, Human
gucagcuguuucuagaguuccu

SEQ ID NO: 3737081 - RNA, 21 nt, Human
gucaggagaucgagaccaucc

SEQ ID NO: 3737082 - RNA, 22 nt, Human
gucaggaguuagaggccagccu

SEQ ID NO: 3737083 - RNA, 23 nt, Human
gucaggaguuagaggccagccug

SEQ ID NO: 3737084 - RNA, 13 nt, Human
gucaggaguuccu

SEQ ID NO: 3737085 - RNA, 12 nt, Human
gucaggaugacg

SEQ ID NO: 3737086 - RNA, 18 nt, Human
gucaggauugcgagagau

SEQ ID NO: 3737087 - RNA, 16 nt, Human
gucaggccacggcagc

SEQ ID NO: 3737088 - RNA, 11 nt, Human
gucaggcccug

SEQ ID NO: 3737089 - RNA, 12 nt, Human
gucaggcccugg

SEQ ID NO: 3737090 - RNA, 14 nt, Human
gucaggccgggcag

SEQ ID NO: 3737091 - RNA, 19 nt, Human
gucaggccgggcagagcac

SEQ ID NO: 3737092 - RNA, 23 nt, Human
gucaggccugugugugaaaggaa

SEQ ID NO: 3737093 - RNA, 16 nt, Human
gucaggcugaaaacaa

SEQ ID NO: 3737094 - RNA, 17 nt, Human
gucaggcugaaaacaau

SEQ ID NO: 3737095 - RNA, 14 nt, Human
gucaggcugcuggc

SEQ ID NO: 3737096 - RNA, 22 nt, Human
gucaggcugcuggcgccucugc

SEQ ID NO: 3737097 - RNA, 14 nt, Human
gucagggaccaagg

SEQ ID NO: 3737098 - RNA, 19 nt, Human
gucagggagugcuggcuca

SEQ ID NO: 3737099 - RNA, 17 nt, Human
gucagggaguguucccu

SEQ ID NO: 3737100 - RNA, 14 nt, Human
gucagggcccaagu

SEQ ID NO: 3737101 - RNA, 15 nt, Human
gucagggcccaaguc

SEQ ID NO: 3737102 - RNA, 18 nt, Human
gucaggggugacacagac

SEQ ID NO: 3737103 - RNA, 21 nt, Human
gagagccguggucccugagga

SEQ ID NO: 3737104 - RNA, 22 nt, Human
gagagccugcucccccaccccc

SEQ ID NO: 3737105 - RNA, 12 nt, Human
gagagccugcug

SEQ ID NO: 3737106 - RNA, 13 nt, Human
gagagccugcugc

SEQ ID NO: 3737107 - RNA, 14 nt, Human
gagagccugcuggc

SEQ ID NO: 3737108 - RNA, 11 nt, Human
gagagccuggu

SEQ ID NO: 3737109 - RNA, 14 nt, Human
gagagccuuccagg

SEQ ID NO: 3737110 - RNA, 15 nt, Human
gagagccuuccaggg

SEQ ID NO: 3737111 - RNA, 18 nt, Human
gagagccuuccaggggug

SEQ ID NO: 3737112 - RNA, 23 nt, Human
gagagcgugcuccagccuggcuc

SEQ ID NO: 3737113 - RNA, 17 nt, Human
gagagcuagaaccuaga

SEQ ID NO: 3737114 - RNA, 16 nt, Human
gagagcuagaaccugg

SEQ ID NO: 3737115 - RNA, 19 nt, Human
gagagcuagaaccuggaga

SEQ ID NO: 3737116 - RNA, 21 nt, Human
gagagcuagcagcagggaggg

SEQ ID NO: 3737117 - RNA, 23 nt, Human
gagagcuauggacagcauugcca

SEQ ID NO: 3737118 - RNA, 13 nt, Human
gagagcuggagcc

SEQ ID NO: 3737119 - RNA, 14 nt, Human
gagagcuggugccc

SEQ ID NO: 3737120 - RNA, 21 nt, Human
gagaggaaauauugcuggggu

SEQ ID NO: 3737121 - RNA, 22 nt, Human
gagaggaacuccuuggccuagc

SEQ ID NO: 3737122 - RNA, 19 nt, Human
gagaggaaugccuguguga

SEQ ID NO: 3737123 - RNA, 15 nt, Human
gagaggacccccuga

SEQ ID NO: 3737124 - RNA, 20 nt, Human
gagaggacuguagggagggc

SEQ ID NO: 3737125 - RNA, 14 nt, Human
gagaggagaaacac

SEQ ID NO: 3737126 - RNA, 18 nt, Human
gagaggagacggagggga

SEQ ID NO: 3737127 - RNA, 15 nt, Human
gagaggagagaggca

SEQ ID NO: 3737128 - RNA, 18 nt, Human
gagaggagaggagagagg

SEQ ID NO: 3737129 - RNA, 17 nt, Human
gagaggagccagacaga

SEQ ID NO: 3737130 - RNA, 15 nt, Human
gagaggagcccugcc

SEQ ID NO: 3737131 - RNA, 13 nt, Human
gagaggaggcaac

SEQ ID NO: 3737132 - RNA, 18 nt, Human
gagaggaguucaaugauc

SEQ ID NO: 3737133 - RNA, 20 nt, Human
gagaggaugagagcccagag

SEQ ID NO: 3737134 - RNA, 20 nt, Human
gagaggcagaagaacccugg

SEQ ID NO: 3737135 - RNA, 13 nt, Human
gagaggcagagag

SEQ ID NO: 3737136 - RNA, 16 nt, Human
gagaggcagagagcgg

SEQ ID NO: 3737137 - RNA, 11 nt, Human
gagaggcaggc

SEQ ID NO: 3737138 - RNA, 22 nt, Human
gagaggcauccaguaucuugaa

SEQ ID NO: 3737139 - RNA, 18 nt, Human
gagaggccaaaggcuggu

SEQ ID NO: 3737140 - RNA, 21 nt, Human
gagaggccaggugcagguugg

SEQ ID NO: 3737141 - RNA, 12 nt, Human
gagaggccauga

SEQ ID NO: 3737142 - RNA, 16 nt, Human
gagaggcccucuggag

SEQ ID NO: 3737143 - RNA, 20 nt, Human
gagaggcccucuggaguggc

SEQ ID NO: 3737144 - RNA, 21 nt, Human
gagaggcuaaaauguuuucag

SEQ ID NO: 3737145 - RNA, 18 nt, Human
gagagggaaacgugcccu

SEQ ID NO: 3737146 - RNA, 23 nt, Human
gagagggagaagaagucagagag

SEQ ID NO: 3737147 - RNA, 19 nt, Human
gagagggagagcagagaaa

SEQ ID NO: 3737148 - RNA, 18 nt, Human
gagagggaggcaagcccu

SEQ ID NO: 3737149 - RNA, 14 nt, Human
gagagggcagaggg

SEQ ID NO: 3737150 - RNA, 18 nt, Human
gagagggcaguguuuccu

SEQ ID NO: 3737151 - RNA, 17 nt, Human
gagagggcgcaggccgu

SEQ ID NO: 3737152 - RNA, 18 nt, Human
gagagggcgcaggccgug

SEQ ID NO: 3737153 - RNA, 11 nt, Human
gagagggcuuu

SEQ ID NO: 3737154 - RNA, 18 nt, Human
gagaggggaacagacugg

SEQ ID NO: 3737155 - RNA, 20 nt, Human
gagaggggaagaguguacug

SEQ ID NO: 3737156 - RNA, 21 nt, Human
gagaggggaagaguguacugg

SEQ ID NO: 3737157 - RNA, 16 nt, Human
gagaggggaagggcca

SEQ ID NO: 3737158 - RNA, 18 nt, Human
gagaggggaagggccagu

SEQ ID NO: 3737159 - RNA, 21 nt, Human
gagaggggaauaauagaagaa

SEQ ID NO: 3737160 - RNA, 18 nt, Human
gagagggggccaccuccc

SEQ ID NO: 3737161 - RNA, 19 nt, Human
gagagggggccugggacuu

SEQ ID NO: 3737162 - RNA, 23 nt, Human
gagagggugaguccuccagaacu

SEQ ID NO: 3737163 - RNA, 24 nt, Human
gagaggucaagcccaggaggacug

SEQ ID NO: 3737164 - RNA, 12 nt, Human
gagagguggagc

SEQ ID NO: 3737165 - RNA, 11 nt, Human
gagaguaacuu

SEQ ID NO: 3737166 - RNA, 19 nt, Human
gagaguacagugagccaag

SEQ ID NO: 3737167 - RNA, 15 nt, Human
gagaguagaacagau

SEQ ID NO: 3737168 - RNA, 20 nt, Human
gagaguagccgagagccugc

SEQ ID NO: 3737169 - RNA, 22 nt, Human
gagaguagccgagagccugcuc

SEQ ID NO: 3737170 - RNA, 15 nt, Human
gagaguauauuaugu

SEQ ID NO: 3737171 - RNA, 23 nt, Human
gagagucagcucucugcccugug

SEQ ID NO: 3737172 - RNA, 15 nt, Human
gagagucccagagca

SEQ ID NO: 3737173 - RNA, 17 nt, Human
gagagucccagagcagg

SEQ ID NO: 3737174 - RNA, 16 nt, Human
gagagucuagauucuc

SEQ ID NO: 3737175 - RNA, 16 nt, Human
gagagucucccaggga

SEQ ID NO: 3737176 - RNA, 14 nt, Human
gagagucugucuca

SEQ ID NO: 3737177 - RNA, 19 nt, Human
gagagugaacaaauuuaca

SEQ ID NO: 3737178 - RNA, 17 nt, Human
gagagugagcuacagag

SEQ ID NO: 3737179 - RNA, 15 nt, Human
gagagugagguggaa

SEQ ID NO: 3737180 - RNA, 13 nt, Human
gagaguggcuccu

SEQ ID NO: 3737181 - RNA, 18 nt, Human
gagagugucaaccagaca

SEQ ID NO: 3737182 - RNA, 20 nt, Human
gagagugucaaccagacaga

SEQ ID NO: 3737183 - RNA, 21 nt, Human
gagagugucuucacggcagga

SEQ ID NO: 3737184 - RNA, 20 nt, Human
gagagugugaaauagacauu

SEQ ID NO: 3737185 - RNA, 11 nt, Human
gagagugugac

SEQ ID NO: 3737186 - RNA, 22 nt, Human
gagaguucaauggcugcugaag

SEQ ID NO: 3737187 - RNA, 14 nt, Human
gagaguuuagcugu

SEQ ID NO: 3737188 - RNA, 14 nt, Human
gagaguuuccugaa

SEQ ID NO: 3737189 - RNA, 15 nt, Human
gagaguuuugucuug

SEQ ID NO: 3737190 - RNA, 17 nt, Human
gagaguuuugucuugaa

SEQ ID NO: 3737191 - RNA, 22 nt, Human
gagaguuuugucuugaaugucu

SEQ ID NO: 3737192 - RNA, 17 nt, Human
gagaguuuuuaauagaa

SEQ ID NO: 3737193 - RNA, 18 nt, Human
gagaguuuuuaauagaac

SEQ ID NO: 3737194 - RNA, 21 nt, Human
gagauaauguuagagguuuua

SEQ ID NO: 3737195 - RNA, 18 nt, Human
gagauacuuuuucuuuug

SEQ ID NO: 3737196 - RNA, 16 nt, Human
gagauagaagaacugc

SEQ ID NO: 3737197 - RNA, 20 nt, Human
gagauagcauugugaacuga

SEQ ID NO: 3737198 - RNA, 20 nt, Human
gagauagccaaggccaaagg

SEQ ID NO: 3737199 - RNA, 19 nt, Human
gagauagccuguggcccug

SEQ ID NO: 3737200 - RNA, 15 nt, Human
gagauaguuuucauc

SEQ ID NO: 3737201 - RNA, 11 nt, Human
gagauauuaau

SEQ ID NO: 3737202 - RNA, 22 nt, Human
gagauauuuauggggggagaac

SEQ ID NO: 3737203 - RNA, 20 nt, Human
gagauauuuuguaaaaugua

SEQ ID NO: 3737204 - RNA, 18 nt, Human
gagaucaaauggaaagga

SEQ ID NO: 3737205 - RNA, 16 nt, Human
gagaucacgccacugc

SEQ ID NO: 3737206 - RNA, 18 nt, Human
gagaucacgccacugcac

SEQ ID NO: 3737207 - RNA, 20 nt, Human
gagaucacgccacugcacuc

SEQ ID NO: 3737208 - RNA, 12 nt, Human
gagaucagaguc

SEQ ID NO: 3737209 - RNA, 13 nt, Human
gagaucaggaaga

SEQ ID NO: 3737210 - RNA, 13 nt, Human
gagaucaggcucu

SEQ ID NO: 3737211 - RNA, 14 nt, Human
gagaucaugagaaa

SEQ ID NO: 3737212 - RNA, 22 nt, Human
gagauccaaaagaagcccccag

SEQ ID NO: 3737213 - RNA, 13 nt, Human
gagauccaaagac

SEQ ID NO: 3737214 - RNA, 14 nt, Human
gagauccuccugca

SEQ ID NO: 3737215 - RNA, 17 nt, Human
gagauccuccugcagac

SEQ ID NO: 3737216 - RNA, 17 nt, Human
gagaucgagaccauccu

SEQ ID NO: 3737217 - RNA, 19 nt, Human
gagaucgagaccauccugg

SEQ ID NO: 3737218 - RNA, 21 nt, Human
gagaucgagaccauccuggcu

SEQ ID NO: 3737219 - RNA, 22 nt, Human
gagaucgagaccauccuggcua

SEQ ID NO: 3737220 - RNA, 20 nt, Human
gagaucgcgccacugcacuc

SEQ ID NO: 3737221 - RNA, 15 nt, Human
gagaucgugccacug

SEQ ID NO: 3737222 - RNA, 21 nt, Human
gagaucgugccauugcacucc

SEQ ID NO: 3737223 - RNA, 21 nt, Human
gagaucgugcuacugcacucc

SEQ ID NO: 3737224 - RNA, 20 nt, Human
gagaucuaagccuuuccaua

SEQ ID NO: 3737225 - RNA, 16 nt, Human
gagaugacugaguccu

SEQ ID NO: 3737226 - RNA, 18 nt, Human
gagaugaugaaaauauuu

SEQ ID NO: 3737227 - RNA, 19 nt, Human
gagaugaugaaaauauuua

SEQ ID NO: 3737228 - RNA, 21 nt, Human
gagaugaugccaugggcccuc

SEQ ID NO: 3737229 - RNA, 12 nt, Human
gagaugauuucc

SEQ ID NO: 3737230 - RNA, 18 nt, Human
gagaugcaccaccaagcc

SEQ ID NO: 3737231 - RNA, 12 nt, Human
gagaugcagagg

SEQ ID NO: 3737232 - RNA, 23 nt, Human
gagaugcauucuugguuggcugg

SEQ ID NO: 3737233 - RNA, 12 nt, Human
gagaugccuccc

SEQ ID NO: 3737234 - RNA, 15 nt, Human
gagaugccucccuga

SEQ ID NO: 3737235 - RNA, 14 nt, Human
gagaugcggccaag

SEQ ID NO: 3737236 - RNA, 18 nt, Human
gagaugcuggagaagaga

SEQ ID NO: 3737237 - RNA, 23 nt, Human
gagauggaacccuuuuggccccc

SEQ ID NO: 3737238 - RNA, 20 nt, Human
gagauggaaguugcagugag

SEQ ID NO: 3737239 - RNA, 15 nt, Human
gagauggaggaggag

SEQ ID NO: 3737240 - RNA, 18 nt, Human
gagauggaguucuugugc

SEQ ID NO: 3737241 - RNA, 23 nt, Human
gagauggaucaaucaaacccggc

SEQ ID NO: 3737242 - RNA, 17 nt, Human
gagauggcccucuggua

SEQ ID NO: 3737243 - RNA, 15 nt, Human
gagauggccugagaa

SEQ ID NO: 3737244 - RNA, 14 nt, Human
gagauggcucccag

SEQ ID NO: 3737245 - RNA, 15 nt, Human
gagauggcucccagg

SEQ ID NO: 3737246 - RNA, 16 nt, Human
gagaugggaaggcaca

SEQ ID NO: 3737247 - RNA, 21 nt, Human
gagaugggaaugaggugggag

SEQ ID NO: 3737248 - RNA, 19 nt, Human
gagaugggacugggagggc

SEQ ID NO: 3737249 - RNA, 14 nt, Human
gagauguaauuguu

SEQ ID NO: 3737250 - RNA, 16 nt, Human
gagauguaauuguuuu

SEQ ID NO: 3737251 - RNA, 14 nt, Human
gagauguagccccu

SEQ ID NO: 3737252 - RNA, 18 nt, Human
gagauguaugaaggcuuu

SEQ ID NO: 3737253 - RNA, 15 nt, Human
gugaaccaugucagc

SEQ ID NO: 3737254 - RNA, 22 nt, Human
gugaaccucaccccgaggcccu

SEQ ID NO: 3737255 - RNA, 23 nt, Human
gugaaccucaccccgaggcccug

SEQ ID NO: 3737256 - RNA, 14 nt, Human
gugaacgauuuaga

SEQ ID NO: 3737257 - RNA, 16 nt, Human
gugaacgauuuagaaa

SEQ ID NO: 3737258 - RNA, 24 nt, Human
gugaacgugggaguucagcugcuu

SEQ ID NO: 3737259 - RNA, 13 nt, Human
gugaacugaaauu

SEQ ID NO: 3737260 - RNA, 13 nt, Human
gugaacugacagg

SEQ ID NO: 3737261 - RNA, 17 nt, Human
gugaacugaucauguuu

SEQ ID NO: 3737262 - RNA, 18 nt, Human
gugaacuucuugaaucua

SEQ ID NO: 3737263 - RNA, 20 nt, Human
gugaacuuggggaacaaggg

SEQ ID NO: 3737264 - RNA, 13 nt, Human
gugaacuuguagc

SEQ ID NO: 3737265 - RNA, 18 nt, Human
gugaacuuguagcuguaa

SEQ ID NO: 3737266 - RNA, 15 nt, Human
gugaacuuuauuaaa

SEQ ID NO: 3737267 - RNA, 14 nt, Human
gugaacuuuuugua

SEQ ID NO: 3737268 - RNA, 13 nt, Human
gugaagaagccug

SEQ ID NO: 3737269 - RNA, 14 nt, Human
gugaagaauacuuc

SEQ ID NO: 3737270 - RNA, 21 nt, Human
gugaagaaugcacaagaaugg

SEQ ID NO: 3737271 - RNA, 18 nt, Human
gugaagacugggugagga

SEQ ID NO: 3737272 - RNA, 13 nt, Human
gugaagaggggca

SEQ ID NO: 3737273 - RNA, 14 nt, Human
gugaagaggggcag

SEQ ID NO: 3737274 - RNA, 18 nt, Human
gugaagauacuuuguauu

SEQ ID NO: 3737275 - RNA, 13 nt, Human
gugaagauguuug

SEQ ID NO: 3737276 - RNA, 18 nt, Human
gugaagauguuugcaaua

SEQ ID NO: 3737277 - RNA, 16 nt, Human
gugaagcauccaggca

SEQ ID NO: 3737278 - RNA, 16 nt, Human
gugaagccagggcccg

SEQ ID NO: 3737279 - RNA, 12 nt, Human
gugaagccuucc

SEQ ID NO: 3737280 - RNA, 15 nt, Human
gugaaggaauauaug

SEQ ID NO: 3737281 - RNA, 12 nt, Human
gugaaggacccu

SEQ ID NO: 3737282 - RNA, 13 nt, Human
gugaaggacccuu

SEQ ID NO: 3737283 - RNA, 21 nt, Human
gugaaggaccuucacucuaag

SEQ ID NO: 3737284 - RNA, 23 nt, Human
gugaaggaccuucacucuaagau

SEQ ID NO: 3737285 - RNA, 16 nt, Human
gugaaggaggcuccag

SEQ ID NO: 3737286 - RNA, 21 nt, Human
gugaaggaggcuccaggcagc

SEQ ID NO: 3737287 - RNA, 20 nt, Human
gugaaggccucgcaggaaga

SEQ ID NO: 3737288 - RNA, 12 nt, Human
gugaaggcuggc

SEQ ID NO: 3737289 - RNA, 13 nt, Human
gugaaggcuggca

SEQ ID NO: 3737290 - RNA, 14 nt, Human
gugaaggcuucucu

SEQ ID NO: 3737291 - RNA, 17 nt, Human
gugaaggugacagcagu

SEQ ID NO: 3737292 - RNA, 19 nt, Human
gugaaguacaauaauucau

SEQ ID NO: 3737293 - RNA, 23 nt, Human
gugaaguacaauaauucauauuc

SEQ ID NO: 3737294 - RNA, 17 nt, Human
gugaaguauacuguauu

SEQ ID NO: 3737295 - RNA, 21 nt, Human
gugaagucaugaccuccaggg

SEQ ID NO: 3737296 - RNA, 13 nt, Human
gugaagugcuugg

SEQ ID NO: 3737297 - RNA, 17 nt, Human
gugaaguuagaauuccu

SEQ ID NO: 3737298 - RNA, 13 nt, Human
gugaaguugcugc

SEQ ID NO: 3737299 - RNA, 15 nt, Human
gugaaguugcuucuu

SEQ ID NO: 3737300 - RNA, 18 nt, Human
gugaauaaacuucagcac

SEQ ID NO: 3737301 - RNA, 20 nt, Human
gugaauaaacuucagcacca

SEQ ID NO: 3737302 - RNA, 13 nt, Human
gugaauaaagugc

SEQ ID NO: 3737303 - RNA, 14 nt, Human
gugaauaaagugcu

SEQ ID NO: 3737304 - RNA, 14 nt, Human
gugaauaccccaag

SEQ ID NO: 3737305 - RNA, 23 nt, Human
gugaauaccccaagacucccaug

SEQ ID NO: 3737306 - RNA, 18 nt, Human
gugaauagccauauuugu

SEQ ID NO: 3737307 - RNA, 16 nt, Human
gugaauauaaaugugu

SEQ ID NO: 3737308 - RNA, 17 nt, Human
gugaauauaaaugugug

SEQ ID NO: 3737309 - RNA, 11 nt, Human
gugaaugaaag

SEQ ID NO: 3737310 - RNA, 12 nt, Human
gugaaugaaaga

SEQ ID NO: 3737311 - RNA, 21 nt, Human
gugaaugaugauccuaggcau

SEQ ID NO: 3737312 - RNA, 18 nt, Human
gugaaugauucauguuau

SEQ ID NO: 3737313 - RNA, 18 nt, Human
gugaaugccagugugcug

SEQ ID NO: 3737314 - RNA, 20 nt, Human
gugaaugcugggacucagcc

SEQ ID NO: 3737315 - RNA, 20 nt, Human
gugaauggauuggauuauuu

SEQ ID NO: 3737316 - RNA, 18 nt, Human
gugaauggcuuuguauag

SEQ ID NO: 3737317 - RNA, 19 nt, Human
gugaauggcuuuguauaga

SEQ ID NO: 3737318 - RNA, 21 nt, Human
gugaauuaauuaaacauugug

SEQ ID NO: 3737319 - RNA, 19 nt, Human
gugaauuacuaacuucuaa

SEQ ID NO: 3737320 - RNA, 18 nt, Human
gugaauuaggcuguaacu

SEQ ID NO: 3737321 - RNA, 19 nt, Human
gugaauuauugacacugaa

SEQ ID NO: 3737322 - RNA, 18 nt, Human
gugaauucuugaaggaaa

SEQ ID NO: 3737323 - RNA, 14 nt, Human
gugaauugauaaua

SEQ ID NO: 3737324 - RNA, 20 nt, Human
gugaauugccugcagagaga

SEQ ID NO: 3737325 - RNA, 15 nt, Human
gugaauuugaaucuc

SEQ ID NO: 3737326 - RNA, 16 nt, Human
gugaauuugaaugaaa

SEQ ID NO: 3737327 - RNA, 16 nt, Human
gugaauuuuuauuguu

SEQ ID NO: 3737328 - RNA, 19 nt, Human
gugaauuuuuauuguugua

SEQ ID NO: 3737329 - RNA, 14 nt, Human
gugaauuuuugcaa

SEQ ID NO: 3737330 - RNA, 16 nt, Human
gugaauuuuugcaaua

SEQ ID NO: 3737331 - RNA, 20 nt, Human
gugacaaaaaauuaaagcau

SEQ ID NO: 3737332 - RNA, 12 nt, Human
gugacaaaccau

SEQ ID NO: 3737333 - RNA, 19 nt, Human
gugacaaagauggcucaga

SEQ ID NO: 3737334 - RNA, 21 nt, Human
gugacaagcagauacugcugu

SEQ ID NO: 3737335 - RNA, 18 nt, Human
gugacaaggccccagaga

SEQ ID NO: 3737336 - RNA, 16 nt, Human
gugacaauucuguuuu

SEQ ID NO: 3737337 - RNA, 13 nt, Human
gugacacaaacac

SEQ ID NO: 3737338 - RNA, 20 nt, Human
gugacacacuacaccacaca

SEQ ID NO: 3737339 - RNA, 12 nt, Human
gugacacagacu

SEQ ID NO: 3737340 - RNA, 14 nt, Human
gugacacagacuca

SEQ ID NO: 3737341 - RNA, 22 nt, Human
gugacacagcagcuucaccaga

SEQ ID NO: 3737342 - RNA, 16 nt, Human
gugacacucuccuugc

SEQ ID NO: 3737343 - RNA, 20 nt, Human
gugacacucuccuugcaguu

SEQ ID NO: 3737344 - RNA, 18 nt, Human
gugacacuucagagagcu

SEQ ID NO: 3737345 - RNA, 15 nt, Human
gugacagacuccuga

SEQ ID NO: 3737346 - RNA, 20 nt, Human
gugacagacuccugaggaca

SEQ ID NO: 3737347 - RNA, 17 nt, Human
gugacagaguucacuau

SEQ ID NO: 3737348 - RNA, 16 nt, Human
gugacaggcagcagag

SEQ ID NO: 3737349 - RNA, 23 nt, Human
gugacagggccaguggggccugu

SEQ ID NO: 3737350 - RNA, 19 nt, Human
gugacagggcggggguggc

SEQ ID NO: 3737351 - RNA, 16 nt, Human
gugacagucaucauca

SEQ ID NO: 3737352 - RNA, 22 nt, Human
gugacaguugcagcccuuguga

SEQ ID NO: 3737353 - RNA, 23 nt, Human
gugacauaauauauucuauuuuu

SEQ ID NO: 3737354 - RNA, 18 nt, Human
gugacaucaguggcaugg

SEQ ID NO: 3737355 - RNA, 14 nt, Human
gugacauccaggag

SEQ ID NO: 3737356 - RNA, 20 nt, Human
gugacaucucuauuccccac

SEQ ID NO: 3737357 - RNA, 16 nt, Human
gugacauggugccuga

SEQ ID NO: 3737358 - RNA, 23 nt, Human
gugacauggugccugagaggcag

SEQ ID NO: 3737359 - RNA, 24 nt, Human
gugacauggugccugagaggcagg

SEQ ID NO: 3737360 - RNA, 17 nt, Human
gugacaugugaaaccuu

SEQ ID NO: 3737361 - RNA, 20 nt, Human
gugacaugugaaaccuuuuu

SEQ ID NO: 3737362 - RNA, 21 nt, Human
gugacauuuauuuuucucaug

SEQ ID NO: 3737363 - RNA, 17 nt, Human
gugacauuugucauuuu

SEQ ID NO: 3737364 - RNA, 21 nt, Human
gugacauuuuacauuaaauuu

SEQ ID NO: 3737365 - RNA, 15 nt, Human
gugaccaacuguguu

SEQ ID NO: 3737366 - RNA, 17 nt, Human
gugaccaaugaugguca

SEQ ID NO: 3737367 - RNA, 18 nt, Human
gugaccagcaccaucucu

SEQ ID NO: 3737368 - RNA, 21 nt, Human
gugaccagcaccaucucuccu

SEQ ID NO: 3737369 - RNA, 14 nt, Human
gugaccagggguga

SEQ ID NO: 3737370 - RNA, 14 nt, Human
gugacccagguccu

SEQ ID NO: 3737371 - RNA, 13 nt, Human
gugaccccagggc

SEQ ID NO: 3737372 - RNA, 14 nt, Human
gugaccccagggca

SEQ ID NO: 3737373 - RNA, 22 nt, Human
gugaccccagggcacaggagcu

SEQ ID NO: 3737374 - RNA, 14 nt, Human
gugaccccuccugg

SEQ ID NO: 3737375 - RNA, 20 nt, Human
gugaccccuccuggggccag

SEQ ID NO: 3737376 - RNA, 15 nt, Human
gugacccggaggcca

SEQ ID NO: 3737377 - RNA, 18 nt, Human
gugacccggaggccacau

SEQ ID NO: 3737378 - RNA, 21 nt, Human
gugacccggcacccccugcag

SEQ ID NO: 3737379 - RNA, 22 nt, Human
gugacccggcacccccugcagc

SEQ ID NO: 3737380 - RNA, 16 nt, Human
gugacccuggcuccuu

SEQ ID NO: 3737381 - RNA, 12 nt, Human
gugacccuuccc

SEQ ID NO: 3737382 - RNA, 15 nt, Human
gugaccggacuuuuc

SEQ ID NO: 3737383 - RNA, 21 nt, Human
gugaccggacuuuucugcaaa

SEQ ID NO: 3737384 - RNA, 18 nt, Human
gugaccuccacagcuacc

SEQ ID NO: 3737385 - RNA, 19 nt, Human
gugaccucuagcccugccc

SEQ ID NO: 3737386 - RNA, 13 nt, Human
gugaccucucucu

SEQ ID NO: 3737387 - RNA, 14 nt, Human
gugaccugaggaag

SEQ ID NO: 3737388 - RNA, 13 nt, Human
gugaccugagggc

SEQ ID NO: 3737389 - RNA, 18 nt, Human
gugaccugcuaggccaga

SEQ ID NO: 3737390 - RNA, 13 nt, Human
gugaccugcugag

SEQ ID NO: 3737391 - RNA, 14 nt, Human
gugaccugcugagc

SEQ ID NO: 3737392 - RNA, 15 nt, Human
gugaccugcugagcu

SEQ ID NO: 3737393 - RNA, 20 nt, Human
gugaccuuaguguuucugug

SEQ ID NO: 3737394 - RNA, 20 nt, Human
gugaccuuccaagagccuga

SEQ ID NO: 3737395 - RNA, 21 nt, Human
gugaccuuccaagagccugag

SEQ ID NO: 3737396 - RNA, 22 nt, Human
gugaccuuccaagagccugaga

SEQ ID NO: 3737397 - RNA, 14 nt, Human
gugacgaaaacauu

SEQ ID NO: 3737398 - RNA, 15 nt, Human
gugacgaaaacauug

SEQ ID NO: 3737399 - RNA, 17 nt, Human
gugacgcugaauaaaug

SEQ ID NO: 3737400 - RNA, 19 nt, Human
gugacggucccacacuggu

SEQ ID NO: 3737401 - RNA, 13 nt, Human
gugacgguuccua

SEQ ID NO: 3737402 - RNA, 15 nt, Human
gugacgucugggugg

SEQ ID NO: 3737403 - RNA, 20 nt, Human
gucaggggugacacagacuc

SEQ ID NO: 3737404 - RNA, 22 nt, Human
gucaggguuggugugcugaggu

SEQ ID NO: 3737405 - RNA, 13 nt, Human
gucagguugacag

SEQ ID NO: 3737406 - RNA, 19 nt, Human
gucaguacccaccugagcu

SEQ ID NO: 3737407 - RNA, 22 nt, Human
gucaguaccuucaaacuagggc

SEQ ID NO: 3737408 - RNA, 23 nt, Human
gucaguaucaggccugccagacg

SEQ ID NO: 3737409 - RNA, 14 nt, Human
gucaguaugacauu

SEQ ID NO: 3737410 - RNA, 21 nt, Human
gucaguauguggaaguguggg

SEQ ID NO: 3737411 - RNA, 14 nt, Human
gucagucacagcca

SEQ ID NO: 3737412 - RNA, 22 nt, Human
gucagucaugauggcaccacug

SEQ ID NO: 3737413 - RNA, 19 nt, Human
gucagucugcuuagaaaua

SEQ ID NO: 3737414 - RNA, 20 nt, Human
gucagucugcuuauccuucc

SEQ ID NO: 3737415 - RNA, 12 nt, Human
gucagucuugac

SEQ ID NO: 3737416 - RNA, 12 nt, Human
gucagucuuuag

SEQ ID NO: 3737417 - RNA, 21 nt, Human
gucagucuuuuucuguuguaa

SEQ ID NO: 3737418 - RNA, 14 nt, Human
gucagugaggccca

SEQ ID NO: 3737419 - RNA, 16 nt, Human
gucagugcagcccgug

SEQ ID NO: 3737420 - RNA, 17 nt, Human
gucagugccgccgccuc

SEQ ID NO: 3737421 - RNA, 14 nt, Human
gucagugcugccug

SEQ ID NO: 3737422 - RNA, 15 nt, Human
gucagugcugccugu

SEQ ID NO: 3737423 - RNA, 23 nt, Human
gucagugcugugcugugcuaugg

SEQ ID NO: 3737424 - RNA, 20 nt, Human
gucaguguccaaagcagggu

SEQ ID NO: 3737425 - RNA, 15 nt, Human
gucagugugacugau

SEQ ID NO: 3737426 - RNA, 19 nt, Human
gucaguuguguuuuuuaag

SEQ ID NO: 3737427 - RNA, 18 nt, Human
gucaguuguuauuuauug

SEQ ID NO: 3737428 - RNA, 17 nt, Human
gucaguuuauguuuugg

SEQ ID NO: 3737429 - RNA, 22 nt, Human
gucauaacuagaacugaauuuu

SEQ ID NO: 3737430 - RNA, 13 nt, Human
gucauacauagga

SEQ ID NO: 3737431 - RNA, 22 nt, Human
gucauacuaucuacucuccuca

SEQ ID NO: 3737432 - RNA, 19 nt, Human
gucauacucgagucugagg

SEQ ID NO: 3737433 - RNA, 20 nt, Human
gucauacucgagucugaggc

SEQ ID NO: 3737434 - RNA, 12 nt, Human
gucauagaaauu

SEQ ID NO: 3737435 - RNA, 22 nt, Human
gucauagaaauuacacccaaag

SEQ ID NO: 3737436 - RNA, 13 nt, Human
gucauagaagaac

SEQ ID NO: 3737437 - RNA, 15 nt, Human
gucauagguuaauau

SEQ ID NO: 3737438 - RNA, 14 nt, Human
gucauaucaaauaa

SEQ ID NO: 3737439 - RNA, 22 nt, Human
gucauaucaaauaaagagagaa

SEQ ID NO: 3737440 - RNA, 13 nt, Human
gucauaucuucac

SEQ ID NO: 3737441 - RNA, 18 nt, Human
gucauauguaggugucug

SEQ ID NO: 3737442 - RNA, 17 nt, Human
gucauauuuaaacagaa

SEQ ID NO: 3737443 - RNA, 12 nt, Human
gucauauuuuga

SEQ ID NO: 3737444 - RNA, 16 nt, Human
gucauauuuugauuau

SEQ ID NO: 3737445 - RNA, 15 nt, Human
gucaucacuuuucag

SEQ ID NO: 3737446 - RNA, 16 nt, Human
gucaucacuuuucagu

SEQ ID NO: 3737447 - RNA, 14 nt, Human
gucaucaucagggc

SEQ ID NO: 3737448 - RNA, 15 nt, Human
gucaucaucagggcc

SEQ ID NO: 3737449 - RNA, 20 nt, Human
gucaucaucagggccugggg

SEQ ID NO: 3737450 - RNA, 20 nt, Human
gucaucaucauggccagcug

SEQ ID NO: 3737451 - RNA, 22 nt, Human
gucauccucaaagaaaguguau

SEQ ID NO: 3737452 - RNA, 18 nt, Human
gucaucuaccuuuucucu

SEQ ID NO: 3737453 - RNA, 13 nt, Human
gucaucuagcauu

SEQ ID NO: 3737454 - RNA, 21 nt, Human
gucaucuagcauuagguauau

SEQ ID NO: 3737455 - RNA, 13 nt, Human
gucaucugagaau

SEQ ID NO: 3737456 - RNA, 15 nt, Human
gucaucugagaauga

SEQ ID NO: 3737457 - RNA, 19 nt, Human
gucaucugauuggacaggc

SEQ ID NO: 3737458 - RNA, 14 nt, Human
gucaucuugcuacc

SEQ ID NO: 3737459 - RNA, 18 nt, Human
gucaucuugcuaccagua

SEQ ID NO: 3737460 - RNA, 15 nt, Human
gucaucuuugaguuu

SEQ ID NO: 3737461 - RNA, 14 nt, Human
gucaugaagcccaa

SEQ ID NO: 3737462 - RNA, 20 nt, Human
gucaugaauucuuaugcuua

SEQ ID NO: 3737463 - RNA, 18 nt, Human
gucaugaucucccugccg

SEQ ID NO: 3737464 - RNA, 19 nt, Human
gucaugaucucccugccgc

SEQ ID NO: 3737465 - RNA, 20 nt, Human
gucaugaucucccugccgcc

SEQ ID NO: 3737466 - RNA, 13 nt, Human
gucaugauguuuu

SEQ ID NO: 3737467 - RNA, 14 nt, Human
gucaugauguuuuu

SEQ ID NO: 3737468 - RNA, 15 nt, Human
gucaugauguuuuua

SEQ ID NO: 3737469 - RNA, 16 nt, Human
gucaugauguuuuuaa

SEQ ID NO: 3737470 - RNA, 22 nt, Human
gucaugauguuuuuaaaaucuu

SEQ ID NO: 3737471 - RNA, 23 nt, Human
gucaugauguuuuuaaaaucuua

SEQ ID NO: 3737472 - RNA, 13 nt, Human
gucaugcauaaau

SEQ ID NO: 3737473 - RNA, 17 nt, Human
gucaugcauaaauaugc

SEQ ID NO: 3737474 - RNA, 15 nt, Human
gucaugccccccuca

SEQ ID NO: 3737475 - RNA, 17 nt, Human
gucaugcccuccucucc

SEQ ID NO: 3737476 - RNA, 15 nt, Human
gucaugcuccccugu

SEQ ID NO: 3737477 - RNA, 23 nt, Human
gucaugcuccccugugccagccc

SEQ ID NO: 3737478 - RNA, 15 nt, Human
gucaugcuuguguua

SEQ ID NO: 3737479 - RNA, 18 nt, Human
gucauggagaaccaccua

SEQ ID NO: 3737480 - RNA, 22 nt, Human
gucauggagaaccaccuacccc

SEQ ID NO: 3737481 - RNA, 15 nt, Human
gucauggcuuaaugu

SEQ ID NO: 3737482 - RNA, 21 nt, Human
gucaugguuucuuggagggcc

SEQ ID NO: 3737483 - RNA, 15 nt, Human
gucauguaaauacug

SEQ ID NO: 3737484 - RNA, 12 nt, Human
gucauguggcua

SEQ ID NO: 3737485 - RNA, 17 nt, Human
gucaugugggucuucca

SEQ ID NO: 3737486 - RNA, 20 nt, Human
gucaugugggucuuccaggg

SEQ ID NO: 3737487 - RNA, 21 nt, Human
gucaugugggucuuccagggg

SEQ ID NO: 3737488 - RNA, 17 nt, Human
gucauguuccuucaaga

SEQ ID NO: 3737489 - RNA, 16 nt, Human
gucauguuugcagggg

SEQ ID NO: 3737490 - RNA, 23 nt, Human
gucauguuugcaggggugacggc

SEQ ID NO: 3737491 - RNA, 17 nt, Human
gucauuaaauuacuaua

SEQ ID NO: 3737492 - RNA, 24 nt, Human
gucauuaaauuacuauagcaaagu

SEQ ID NO: 3737493 - RNA, 13 nt, Human
gucauuaaugugu

SEQ ID NO: 3737494 - RNA, 15 nt, Human
gucauucaauaaauu

SEQ ID NO: 3737495 - RNA, 14 nt, Human
gucauucagaaaaa

SEQ ID NO: 3737496 - RNA, 14 nt, Human
gucauucagaguca

SEQ ID NO: 3737497 - RNA, 17 nt, Human
gucauuccuucuuuuua

SEQ ID NO: 3737498 - RNA, 14 nt, Human
gucauucuucccua

SEQ ID NO: 3737499 - RNA, 11 nt, Human
gucauugcugu

SEQ ID NO: 3737500 - RNA, 22 nt, Human
gucauugcuguugucccucugc

SEQ ID NO: 3737501 - RNA, 22 nt, Human
gucauugcuucuucugaggccu

SEQ ID NO: 3737502 - RNA, 14 nt, Human
gucauuggcuuuau

SEQ ID NO: 3737503 - RNA, 13 nt, Human
gucauuguaaugu

SEQ ID NO: 3737504 - RNA, 21 nt, Human
gucauuguaauguugugaaua

SEQ ID NO: 3737505 - RNA, 15 nt, Human
gucauuuaaaugugu

SEQ ID NO: 3737506 - RNA, 23 nt, Human
gucauuuaacugaagauguugag

SEQ ID NO: 3737507 - RNA, 14 nt, Human
gucauuuauaaaac

SEQ ID NO: 3737508 - RNA, 23 nt, Human
gucauuuauauagauuauaacuu

SEQ ID NO: 3737509 - RNA, 15 nt, Human
gucauuucauuuccu

SEQ ID NO: 3737510 - RNA, 11 nt, Human
gucauuuccau

SEQ ID NO: 3737511 - RNA, 18 nt, Human
gucauuuccauguaugca

SEQ ID NO: 3737512 - RNA, 22 nt, Human
gucauuuccauguaugcauaau

SEQ ID NO: 3737513 - RNA, 19 nt, Human
gucauuugagcagggcuca

SEQ ID NO: 3737514 - RNA, 22 nt, Human
gucauuugagcagggcucagcg

SEQ ID NO: 3737515 - RNA, 22 nt, Human
gucauuugcugagcauguacug

SEQ ID NO: 3737516 - RNA, 21 nt, Human
gucauuuguugugaugucuuu

SEQ ID NO: 3737517 - RNA, 19 nt, Human
gucauuuugcagaggcuau

SEQ ID NO: 3737518 - RNA, 18 nt, Human
gucauuuuguguugaaga

SEQ ID NO: 3737519 - RNA, 20 nt, Human
gucauuuuguguugaagagc

SEQ ID NO: 3737520 - RNA, 13 nt, Human
gucauuuuuaugu

SEQ ID NO: 3737521 - RNA, 20 nt, Human
guccaaaaagcuccuggggc

SEQ ID NO: 3737522 - RNA, 21 nt, Human
guccaaaaccgccagcucugu

SEQ ID NO: 3737523 - RNA, 20 nt, Human
guccaaaauuuaagucucca

SEQ ID NO: 3737524 - RNA, 14 nt, Human
guccaaacugccua

SEQ ID NO: 3737525 - RNA, 15 nt, Human
guccaaagaggcugc

SEQ ID NO: 3737526 - RNA, 16 nt, Human
guccaaagaggcugcc

SEQ ID NO: 3737527 - RNA, 16 nt, Human
guccaaaggaggcugg

SEQ ID NO: 3737528 - RNA, 13 nt, Human
guccaaauaaaaa

SEQ ID NO: 3737529 - RNA, 20 nt, Human
guccaacccgaggcccgcau

SEQ ID NO: 3737530 - RNA, 17 nt, Human
guccaaccuaaccccuu

SEQ ID NO: 3737531 - RNA, 12 nt, Human
guccaacuccag

SEQ ID NO: 3737532 - RNA, 20 nt, Human
guccaagaagcccaggaaag

SEQ ID NO: 3737533 - RNA, 23 nt, Human
guccaagaauccacauuucuaaa

SEQ ID NO: 3737534 - RNA, 16 nt, Human
guccaagauuccggau

SEQ ID NO: 3737535 - RNA, 15 nt, Human
guccaagcugggaga

SEQ ID NO: 3737536 - RNA, 17 nt, Human
guccaaggaaaccacag

SEQ ID NO: 3737537 - RNA, 20 nt, Human
guccaagguuuaaagagucu

SEQ ID NO: 3737538 - RNA, 16 nt, Human
guccaaugagcuuucu

SEQ ID NO: 3737539 - RNA, 18 nt, Human
guccaaugagcuuucuga

SEQ ID NO: 3737540 - RNA, 23 nt, Human
guccaaugagcuuucugaacagc

SEQ ID NO: 3737541 - RNA, 17 nt, Human
guccaauuaguuuccuu

SEQ ID NO: 3737542 - RNA, 18 nt, Human
guccaauuuuaauuuagu

SEQ ID NO: 3737543 - RNA, 19 nt, Human
guccacacccaauuccacu

SEQ ID NO: 3737544 - RNA, 17 nt, Human
guccacagaugccucca

SEQ ID NO: 3737545 - RNA, 13 nt, Human
guccacaggaagu

SEQ ID NO: 3737546 - RNA, 22 nt, Human
guccacaggcuucugagcagcg

SEQ ID NO: 3737547 - RNA, 13 nt, Human
guccacagggcac

SEQ ID NO: 3737548 - RNA, 19 nt, Human
guccacaguggaaccagcc

SEQ ID NO: 3737549 - RNA, 21 nt, Human
guccacaguggaaccagccca

SEQ ID NO: 3737550 - RNA, 14 nt, Human
guccacccagcaaa

SEQ ID NO: 3737551 - RNA, 16 nt, Human
guccacccaggagccc

SEQ ID NO: 3737552 - RNA, 22 nt, Human
guccaccugagcugccauccag

SEQ ID NO: 3737553 - RNA, 21 nt, Human
gugacgucuggguggcccuua

SEQ ID NO: 3737554 - RNA, 22 nt, Human
gugacuaauuguauaacagguu

SEQ ID NO: 3737555 - RNA, 12 nt, Human
gugacuaggaaa

SEQ ID NO: 3737556 - RNA, 17 nt, Human
gugacuauauagagaug

SEQ ID NO: 3737557 - RNA, 21 nt, Human
gugacuauggagcugagcagg

SEQ ID NO: 3737558 - RNA, 20 nt, Human
gugacuauuauauuuccaag

SEQ ID NO: 3737559 - RNA, 18 nt, Human
gugacucauccucuugaa

SEQ ID NO: 3737560 - RNA, 14 nt, Human
gugacuccaggaga

SEQ ID NO: 3737561 - RNA, 18 nt, Human
gugacucgggcuccugug

SEQ ID NO: 3737562 - RNA, 20 nt, Human
gugacucgggcuccugugcc

SEQ ID NO: 3737563 - RNA, 22 nt, Human
gugacucuuuuuagggccaggc

SEQ ID NO: 3737564 - RNA, 23 nt, Human
gugacugagcaagacccugucuc

SEQ ID NO: 3737565 - RNA, 17 nt, Human
gugacugaucucucgug

SEQ ID NO: 3737566 - RNA, 21 nt, Human
gugacugauguuacaucacag

SEQ ID NO: 3737567 - RNA, 20 nt, Human
gugacugccccaacuccugg

SEQ ID NO: 3737568 - RNA, 17 nt, Human
gugacugcgaucuucag

SEQ ID NO: 3737569 - RNA, 20 nt, Human
gugacugguuaucacaccau

SEQ ID NO: 3737570 - RNA, 16 nt, Human
gugacuucagcucugu

SEQ ID NO: 3737571 - RNA, 21 nt, Human
gugacuuccucgccucuccca

SEQ ID NO: 3737572 - RNA, 15 nt, Human
gugacuucuccaggu

SEQ ID NO: 3737573 - RNA, 13 nt, Human
gugacuucugaga

SEQ ID NO: 3737574 - RNA, 21 nt, Human
gugacuugcaucguggagaca

SEQ ID NO: 3737575 - RNA, 23 nt, Human
gugacuugugucccaugaucccu

SEQ ID NO: 3737576 - RNA, 12 nt, Human
gugacuuugaaa

SEQ ID NO: 3737577 - RNA, 12 nt, Human
gugacuuuggau

SEQ ID NO: 3737578 - RNA, 18 nt, Human
gugacuuuggcugcaugc

SEQ ID NO: 3737579 - RNA, 13 nt, Human
gugacuuuugcuu

SEQ ID NO: 3737580 - RNA, 20 nt, Human
gugagaaauuucugugaaac

SEQ ID NO: 3737581 - RNA, 17 nt, Human
gugagaacccaguuucc

SEQ ID NO: 3737582 - RNA, 18 nt, Human
gugagaaucccuggcaaa

SEQ ID NO: 3737583 - RNA, 13 nt, Human
gugagacagcucu

SEQ ID NO: 3737584 - RNA, 18 nt, Human
gugagacaguccagccug

SEQ ID NO: 3737585 - RNA, 20 nt, Human
gugagacaguccagccugga

SEQ ID NO: 3737586 - RNA, 20 nt, Human
gugagacccagcccucaucc

SEQ ID NO: 3737587 - RNA, 15 nt, Human
gugagacccccacac

SEQ ID NO: 3737588 - RNA, 13 nt, Human
gugagaccugccc

SEQ ID NO: 3737589 - RNA, 23 nt, Human
gugagaccugccccuccucucug

SEQ ID NO: 3737590 - RNA, 19 nt, Human
gugagacgccaccauuccu

SEQ ID NO: 3737591 - RNA, 17 nt, Human
gugagacucgagaacuu

SEQ ID NO: 3737592 - RNA, 22 nt, Human
gugagacucgagaacuuucauu

SEQ ID NO: 3737593 - RNA, 14 nt, Human
gugagacucugucu

SEQ ID NO: 3737594 - RNA, 16 nt, Human
gugagacucugucuca

SEQ ID NO: 3737595 - RNA, 18 nt, Human
gugagacucugucucaaa

SEQ ID NO: 3737596 - RNA, 18 nt, Human
gugagagaguggcugggg

SEQ ID NO: 3737597 - RNA, 20 nt, Human
gugagagaguggcuggggca

SEQ ID NO: 3737598 - RNA, 16 nt, Human
gugagaggggaacaga

SEQ ID NO: 3737599 - RNA, 17 nt, Human
gugagaggggaggccaa

SEQ ID NO: 3737600 - RNA, 13 nt, Human
gugagagugagcu

SEQ ID NO: 3737601 - RNA, 19 nt, Human
gugagaugagggaugggcc

SEQ ID NO: 3737602 - RNA, 17 nt, Human
gugagaugcuggagaag

SEQ ID NO: 3737603 - RNA, 20 nt, Human
gugagaugcuggagaagaga

SEQ ID NO: 3737604 - RNA, 22 nt, Human
gugagaugcuggagaagagagg

SEQ ID NO: 3737605 - RNA, 19 nt, Human
gugagauuuuuuauugcua

SEQ ID NO: 3737606 - RNA, 15 nt, Human
gugagcaauccugca

SEQ ID NO: 3737607 - RNA, 19 nt, Human
gugagcacucccaagucua

SEQ ID NO: 3737608 - RNA, 19 nt, Human
gugagcagaaguggagcug

SEQ ID NO: 3737609 - RNA, 20 nt, Human
gugagcagaaguggagcugg

SEQ ID NO: 3737610 - RNA, 17 nt, Human
gugagcagacugguggg

SEQ ID NO: 3737611 - RNA, 17 nt, Human
gugagcaggaaggccug

SEQ ID NO: 3737612 - RNA, 17 nt, Human
gugagcaggcugugagu

SEQ ID NO: 3737613 - RNA, 22 nt, Human
gugagcauuguggcugucagca

SEQ ID NO: 3737614 - RNA, 18 nt, Human
gugagcccagcuggguca

SEQ ID NO: 3737615 - RNA, 17 nt, Human
gugagcccauggcccuc

SEQ ID NO: 3737616 - RNA, 14 nt, Human
gugagccccugguc

SEQ ID NO: 3737617 - RNA, 14 nt, Human
gugagcuacaaaug

SEQ ID NO: 3737618 - RNA, 15 nt, Human
gugagcuacagagcc

SEQ ID NO: 3737619 - RNA, 14 nt, Human
gugagcugagcagg

SEQ ID NO: 3737620 - RNA, 17 nt, Human
gugagcugcugccauga

SEQ ID NO: 3737621 - RNA, 11 nt, Human
gugagcuggag

SEQ ID NO: 3737622 - RNA, 14 nt, Human
gugaggaaaucaaa

SEQ ID NO: 3737623 - RNA, 11 nt, Human
gugaggaagcc

SEQ ID NO: 3737624 - RNA, 20 nt, Human
gugaggaauaguugagcccc

SEQ ID NO: 3737625 - RNA, 21 nt, Human
gugaggacaaauugagacagu

SEQ ID NO: 3737626 - RNA, 16 nt, Human
gugaggaccacuccug

SEQ ID NO: 3737627 - RNA, 21 nt, Human
gugaggagccccaucugucua

SEQ ID NO: 3737628 - RNA, 15 nt, Human
gugaggagcugcugg

SEQ ID NO: 3737629 - RNA, 13 nt, Human
gugaggagcuggg

SEQ ID NO: 3737630 - RNA, 16 nt, Human
gugaggcaggugacag

SEQ ID NO: 3737631 - RNA, 20 nt, Human
gugaggccacugaagaggag

SEQ ID NO: 3737632 - RNA, 14 nt, Human
gugaggccagggca

SEQ ID NO: 3737633 - RNA, 17 nt, Human
gugaggccagggcagag

SEQ ID NO: 3737634 - RNA, 13 nt, Human
gugaggccuggcc

SEQ ID NO: 3737635 - RNA, 14 nt, Human
gugaggccuggcca

SEQ ID NO: 3737636 - RNA, 16 nt, Human
gugaggccuggccagg

SEQ ID NO: 3737637 - RNA, 16 nt, Human
gugaggccugucugug

SEQ ID NO: 3737638 - RNA, 19 nt, Human
gugaggccugucugugacc

SEQ ID NO: 3737639 - RNA, 15 nt, Human
gugaggcucugcccu

SEQ ID NO: 3737640 - RNA, 17 nt, Human
gugaggcucugcccuug

SEQ ID NO: 3737641 - RNA, 18 nt, Human
gugaggcucugcccuugg

SEQ ID NO: 3737642 - RNA, 16 nt, Human
gugaggcuguccugua

SEQ ID NO: 3737643 - RNA, 21 nt, Human
gugagggaggggaaaagcauu

SEQ ID NO: 3737644 - RNA, 22 nt, Human
gugagggcuugucauuaccaga

SEQ ID NO: 3737645 - RNA, 15 nt, Human
gugaggguccugcag

SEQ ID NO: 3737646 - RNA, 18 nt, Human
gugaggguuucugagcug

SEQ ID NO: 3737647 - RNA, 19 nt, Human
gugaggguuucugagcugc

SEQ ID NO: 3737648 - RNA, 17 nt, Human
gugagguccugggggcc

SEQ ID NO: 3737649 - RNA, 20 nt, Human
gugagguuucccaauggugu

SEQ ID NO: 3737650 - RNA, 18 nt, Human
gugaguaauuuuggauuu

SEQ ID NO: 3737651 - RNA, 19 nt, Human
gugaguacuacaguccucc

SEQ ID NO: 3737652 - RNA, 21 nt, Human
gugaguacuacaguccuccca

SEQ ID NO: 3737653 - RNA, 22 nt, Human
gugagucaauacauagugcugc

SEQ ID NO: 3737654 - RNA, 14 nt, Human
gugagucaccacuu

SEQ ID NO: 3737655 - RNA, 17 nt, Human
gugagucauuuaaaugu

SEQ ID NO: 3737656 - RNA, 15 nt, Human
gugaguccauucucc

SEQ ID NO: 3737657 - RNA, 16 nt, Human
gugagucguuuccccu

SEQ ID NO: 3737658 - RNA, 17 nt, Human
gugagucuuggcggcag

SEQ ID NO: 3737659 - RNA, 17 nt, Human
gugagucuuugguucua

SEQ ID NO: 3737660 - RNA, 15 nt, Human
gugagugagccuggc

SEQ ID NO: 3737661 - RNA, 20 nt, Human
gugagugugaauauaaaugu

SEQ ID NO: 3737662 - RNA, 13 nt, Human
gugagugugacag

SEQ ID NO: 3737663 - RNA, 15 nt, Human
gugagugugacaggg

SEQ ID NO: 3737664 - RNA, 16 nt, Human
gugagugugacagggc

SEQ ID NO: 3737665 - RNA, 13 nt, Human
gugagugugugca

SEQ ID NO: 3737666 - RNA, 15 nt, Human
gugagugugugcaag

SEQ ID NO: 3737667 - RNA, 15 nt, Human
gugaguguuucuaug

SEQ ID NO: 3737668 - RNA, 23 nt, Human
gugaguguuucuaugaguggaaa

SEQ ID NO: 3737669 - RNA, 17 nt, Human
gugaguguuuuuaucuu

SEQ ID NO: 3737670 - RNA, 15 nt, Human
gugaguucucagggc

SEQ ID NO: 3737671 - RNA, 17 nt, Human
gugaguucucagggcuc

SEQ ID NO: 3737672 - RNA, 18 nt, Human
gugaguucucagggcucc

SEQ ID NO: 3737673 - RNA, 16 nt, Human
gugaguuggcuuaccu

SEQ ID NO: 3737674 - RNA, 18 nt, Human
gugaguuugagcugccuu

SEQ ID NO: 3737675 - RNA, 18 nt, Human
gugaguuuggucuggacu

SEQ ID NO: 3737676 - RNA, 22 nt, Human
gugaguuuguuucuuugaauuu

SEQ ID NO: 3737677 - RNA, 14 nt, Human
gugauaaacuuugc

SEQ ID NO: 3737678 - RNA, 20 nt, Human
gugauacaacuucaagugca

SEQ ID NO: 3737679 - RNA, 21 nt, Human
gugauacagaacucuuaaaaa

SEQ ID NO: 3737680 - RNA, 19 nt, Human
gugauagcauugcuuucgu

SEQ ID NO: 3737681 - RNA, 18 nt, Human
gugauagcuaacauuuua

SEQ ID NO: 3737682 - RNA, 22 nt, Human
gugauagucuuuugcuuuuggc

SEQ ID NO: 3737683 - RNA, 16 nt, Human
gugauauaaacagcuu

SEQ ID NO: 3737684 - RNA, 20 nt, Human
gugauauauuccuaaacuau

SEQ ID NO: 3737685 - RNA, 16 nt, Human
gugauauccugaaaaa

SEQ ID NO: 3737686 - RNA, 19 nt, Human
gugauauggcagaagacac

SEQ ID NO: 3737687 - RNA, 13 nt, Human
gugauauucuuug

SEQ ID NO: 3737688 - RNA, 18 nt, Human
gugauauuucagaaauac

SEQ ID NO: 3737689 - RNA, 18 nt, Human
gugaucaauaaaauguga

SEQ ID NO: 3737690 - RNA, 17 nt, Human
gugaucacagcagcuuc

SEQ ID NO: 3737691 - RNA, 23 nt, Human
gugaucacuuucugaaauucaca

SEQ ID NO: 3737692 - RNA, 20 nt, Human
gugaucagaccauaauguua

SEQ ID NO: 3737693 - RNA, 23 nt, Human
gugauccacccaacccuaucucc

SEQ ID NO: 3737694 - RNA, 15 nt, Human
gugauccacccaccu

SEQ ID NO: 3737695 - RNA, 22 nt, Human
gugauccacccaccucagccuc

SEQ ID NO: 3737696 - RNA, 22 nt, Human
gugaucccuagcugugaccucu

SEQ ID NO: 3737697 - RNA, 14 nt, Human
gugauccucccacc

SEQ ID NO: 3737698 - RNA, 20 nt, Human
gugauccucccaccucagcc

SEQ ID NO: 3737699 - RNA, 19 nt, Human
gugauccuuuuauguuauu

SEQ ID NO: 3737700 - RNA, 14 nt, Human
gugaucucagcuca

SEQ ID NO: 3737701 - RNA, 20 nt, Human
gugaucugcugcagagcagu

SEQ ID NO: 3737702 - RNA, 23 nt, Human
gagauguaugaaggcuuuugguc

SEQ ID NO: 3737703 - RNA, 16 nt, Human
gagaugucuuggaaca

SEQ ID NO: 3737704 - RNA, 16 nt, Human
gagauguguggacugu

SEQ ID NO: 3737705 - RNA, 17 nt, Human
gagauguguguugauac

SEQ ID NO: 3737706 - RNA, 22 nt, Human
gagauguguguugauacuguug

SEQ ID NO: 3737707 - RNA, 21 nt, Human
gagauguuuuuaaaaguuuca

SEQ ID NO: 3737708 - RNA, 17 nt, Human
gagauucaguuuucauu

SEQ ID NO: 3737709 - RNA, 14 nt, Human
gagauucccaagcc

SEQ ID NO: 3737710 - RNA, 16 nt, Human
gagauucccgcggguu

SEQ ID NO: 3737711 - RNA, 14 nt, Human
gagauucugccuuu

SEQ ID NO: 3737712 - RNA, 21 nt, Human
gagauucugccuuugccaggu

SEQ ID NO: 3737713 - RNA, 14 nt, Human
gagauugaccugga

SEQ ID NO: 3737714 - RNA, 21 nt, Human
gagauugcaccacugcacucc

SEQ ID NO: 3737715 - RNA, 23 nt, Human
gagauugcuguguguugccuggg

SEQ ID NO: 3737716 - RNA, 19 nt, Human
gagauuggaucaaguauua

SEQ ID NO: 3737717 - RNA, 21 nt, Human
gagauuggaucaaguauuacu

SEQ ID NO: 3737718 - RNA, 21 nt, Human
gagauugugccccugcacucc

SEQ ID NO: 3737719 - RNA, 23 nt, Human
gagauuguuguuugccauacuuu

SEQ ID NO: 3737720 - RNA, 15 nt, Human
gagauuucaagagau

SEQ ID NO: 3737721 - RNA, 23 nt, Human
gagauuucaucugcucuccuucc

SEQ ID NO: 3737722 - RNA, 16 nt, Human
gagauuuccuccuggc

SEQ ID NO: 3737723 - RNA, 18 nt, Human
gagauuucuuguugcuca

SEQ ID NO: 3737724 - RNA, 12 nt, Human
gagauuuuucau

SEQ ID NO: 3737725 - RNA, 19 nt, Human
gagcaaaaucgaugcagug

SEQ ID NO: 3737726 - RNA, 15 nt, Human
gagcaaaccugcccc

SEQ ID NO: 3737727 - RNA, 15 nt, Human
gagcaaacucugcug

SEQ ID NO: 3737728 - RNA, 22 nt, Human
gagcaaagccuguucauggcag

SEQ ID NO: 3737729 - RNA, 13 nt, Human
gagcaaagcugau

SEQ ID NO: 3737730 - RNA, 13 nt, Human
gagcaaaggcuga

SEQ ID NO: 3737731 - RNA, 16 nt, Human
gagcaaaggcugagaa

SEQ ID NO: 3737732 - RNA, 19 nt, Human
gagcaaauguuucugcagu

SEQ ID NO: 3737733 - RNA, 18 nt, Human
gagcaacaagaaucuaaa

SEQ ID NO: 3737734 - RNA, 20 nt, Human
gagcaacagagugagacccu

SEQ ID NO: 3737735 - RNA, 21 nt, Human
gagcaaccccuggaccccagc

SEQ ID NO: 3737736 - RNA, 16 nt, Human
gagcaaccguggcccu

SEQ ID NO: 3737737 - RNA, 20 nt, Human
gagcaaccguggcccuuccu

SEQ ID NO: 3737738 - RNA, 19 nt, Human
gagcaaccucucacucccc

SEQ ID NO: 3737739 - RNA, 15 nt, Human
gagcaagagagcagc

SEQ ID NO: 3737740 - RNA, 12 nt, Human
gagcaagagcug

SEQ ID NO: 3737741 - RNA, 13 nt, Human
gagcaagagcugg

SEQ ID NO: 3737742 - RNA, 15 nt, Human
gagcaagaggaggcc

SEQ ID NO: 3737743 - RNA, 18 nt, Human
gagcaagcaggaaucaga

SEQ ID NO: 3737744 - RNA, 20 nt, Human
gagcaagcauuuauguuuau

SEQ ID NO: 3737745 - RNA, 18 nt, Human
gagcaagggcagggacag

SEQ ID NO: 3737746 - RNA, 16 nt, Human
gagcaaugucugugcu

SEQ ID NO: 3737747 - RNA, 19 nt, Human
gagcacaaaaccuguccua

SEQ ID NO: 3737748 - RNA, 18 nt, Human
gagcacaaaagccucuca

SEQ ID NO: 3737749 - RNA, 22 nt, Human
gagcacaaaauucaaagcaugg

SEQ ID NO: 3737750 - RNA, 18 nt, Human
gagcacaaacauuuuuca

SEQ ID NO: 3737751 - RNA, 16 nt, Human
gagcacaaagacccug

SEQ ID NO: 3737752 - RNA, 22 nt, Human
gagcacaagaggagauccaggg

SEQ ID NO: 3737753 - RNA, 20 nt, Human
gagcacaauaaauggcugua

SEQ ID NO: 3737754 - RNA, 15 nt, Human
gagcacacccagccc

SEQ ID NO: 3737755 - RNA, 15 nt, Human
gagcacagcccuccc

SEQ ID NO: 3737756 - RNA, 14 nt, Human
gagcacaggcagcu

SEQ ID NO: 3737757 - RNA, 23 nt, Human
gagcacaggucccaccuccagcc

SEQ ID NO: 3737758 - RNA, 15 nt, Human
gagcacccucuggau

SEQ ID NO: 3737759 - RNA, 22 nt, Human
gagcaccgccugugaaauacca

SEQ ID NO: 3737760 - RNA, 12 nt, Human
gagcaccuccca

SEQ ID NO: 3737761 - RNA, 15 nt, Human
gagcaccucccagcc

SEQ ID NO: 3737762 - RNA, 12 nt, Human
gagcaccugcuu

SEQ ID NO: 3737763 - RNA, 17 nt, Human
gagcaccuuagacaguc

SEQ ID NO: 3737764 - RNA, 20 nt, Human
gagcaccuuagacagucccu

SEQ ID NO: 3737765 - RNA, 21 nt, Human
gagcaccuuagacagucccug

SEQ ID NO: 3737766 - RNA, 22 nt, Human
gagcaccuuagacagucccugc

SEQ ID NO: 3737767 - RNA, 17 nt, Human
gagcaccuuccucacuu

SEQ ID NO: 3737768 - RNA, 20 nt, Human
gagcaccuuccucacuucca

SEQ ID NO: 3737769 - RNA, 15 nt, Human
gagcacuaaggugug

SEQ ID NO: 3737770 - RNA, 14 nt, Human
gagcacugccagga

SEQ ID NO: 3737771 - RNA, 17 nt, Human
gagcacugccaggaggg

SEQ ID NO: 3737772 - RNA, 19 nt, Human
gagcacugccaggagggac

SEQ ID NO: 3737773 - RNA, 20 nt, Human
gagcacugccaggagggaca

SEQ ID NO: 3737774 - RNA, 13 nt, Human
gagcacugcucca

SEQ ID NO: 3737775 - RNA, 14 nt, Human
gagcacugggcucc

SEQ ID NO: 3737776 - RNA, 15 nt, Human
gagcacuguauaccc

SEQ ID NO: 3737777 - RNA, 16 nt, Human
gagcacuguauacccc

SEQ ID NO: 3737778 - RNA, 14 nt, Human
gagcacuguuuucu

SEQ ID NO: 3737779 - RNA, 16 nt, Human
gagcacuuaagagaau

SEQ ID NO: 3737780 - RNA, 18 nt, Human
gagcacuuaagagaauau

SEQ ID NO: 3737781 - RNA, 14 nt, Human
gagcacuugcugua

SEQ ID NO: 3737782 - RNA, 23 nt, Human
gagcagaaaacccuugggccaga

SEQ ID NO: 3737783 - RNA, 20 nt, Human
gagcagacacccuuggagcu

SEQ ID NO: 3737784 - RNA, 21 nt, Human
gagcagacaggaggaaucaug

SEQ ID NO: 3737785 - RNA, 12 nt, Human
gagcagagaagg

SEQ ID NO: 3737786 - RNA, 12 nt, Human
gagcagagacac

SEQ ID NO: 3737787 - RNA, 16 nt, Human
gagcagagaccauccc

SEQ ID NO: 3737788 - RNA, 20 nt, Human
gagcagagcugauggagaag

SEQ ID NO: 3737789 - RNA, 23 nt, Human
gagcagagcugauggagaaggaa

SEQ ID NO: 3737790 - RNA, 16 nt, Human
gagcagaggggcagag

SEQ ID NO: 3737791 - RNA, 16 nt, Human
gagcagaggggcugaa

SEQ ID NO: 3737792 - RNA, 20 nt, Human
gagcagagucuugcuaccuc

SEQ ID NO: 3737793 - RNA, 22 nt, Human
gagcagaugaggugaaaaggcc

SEQ ID NO: 3737794 - RNA, 18 nt, Human
gagcagaugcagagagcc

SEQ ID NO: 3737795 - RNA, 19 nt, Human
gagcagaugcagagagcca

SEQ ID NO: 3737796 - RNA, 15 nt, Human
gagcagcaccuccuc

SEQ ID NO: 3737797 - RNA, 20 nt, Human
gagcagcaccuccucagccu

SEQ ID NO: 3737798 - RNA, 18 nt, Human
gagcagccacauuccuga

SEQ ID NO: 3737799 - RNA, 21 nt, Human
gagcagccacauuccugaugc

SEQ ID NO: 3737800 - RNA, 21 nt, Human
gagcagccuggagcccuggag

SEQ ID NO: 3737801 - RNA, 11 nt, Human
gagcagccugu

SEQ ID NO: 3737802 - RNA, 15 nt, Human
gagcagccuguggca

SEQ ID NO: 3737803 - RNA, 16 nt, Human
gagcagccuguggcau

SEQ ID NO: 3737804 - RNA, 18 nt, Human
gagcagccuguggcaucu

SEQ ID NO: 3737805 - RNA, 14 nt, Human
gagcagcgagccug

SEQ ID NO: 3737806 - RNA, 18 nt, Human
gagcagcggacuucaaaa

SEQ ID NO: 3737807 - RNA, 17 nt, Human
gagcagcugagcagggc

SEQ ID NO: 3737808 - RNA, 19 nt, Human
gagcagcugagcagggccg

SEQ ID NO: 3737809 - RNA, 20 nt, Human
gagcagcuucugccacuucc

SEQ ID NO: 3737810 - RNA, 17 nt, Human
gagcagcuuuaaacuca

SEQ ID NO: 3737811 - RNA, 16 nt, Human
gagcaggaagcauuca

SEQ ID NO: 3737812 - RNA, 22 nt, Human
gagcaggaagcauucagagagc

SEQ ID NO: 3737813 - RNA, 23 nt, Human
gagcaggaagcauucagagagca

SEQ ID NO: 3737814 - RNA, 20 nt, Human
gagcaggaccucccuuccga

SEQ ID NO: 3737815 - RNA, 22 nt, Human
gagcaggaccucugaaacccug

SEQ ID NO: 3737816 - RNA, 19 nt, Human
gagcaggacuccaggccca

SEQ ID NO: 3737817 - RNA, 19 nt, Human
gagcaggacucuauuuuaa

SEQ ID NO: 3737818 - RNA, 18 nt, Human
gagcaggagauugagaag

SEQ ID NO: 3737819 - RNA, 16 nt, Human
gagcaggaggccccug

SEQ ID NO: 3737820 - RNA, 21 nt, Human
gagcaggaggccccuggccca

SEQ ID NO: 3737821 - RNA, 15 nt, Human
gagcaggcacaugga

SEQ ID NO: 3737822 - RNA, 19 nt, Human
gagcaggcacauggaggag

SEQ ID NO: 3737823 - RNA, 22 nt, Human
gagcaggcacgggugguccccg

SEQ ID NO: 3737824 - RNA, 19 nt, Human
gagcaggccuugcgcuguu

SEQ ID NO: 3737825 - RNA, 18 nt, Human
gagcaggcggugggcacc

SEQ ID NO: 3737826 - RNA, 22 nt, Human
gagcaggcggugggcacccacc

SEQ ID NO: 3737827 - RNA, 21 nt, Human
gagcaggcuacugucagcucc

SEQ ID NO: 3737828 - RNA, 18 nt, Human
gagcagggacagaucaua

SEQ ID NO: 3737829 - RNA, 20 nt, Human
gagcagggacagaucauaga

SEQ ID NO: 3737830 - RNA, 21 nt, Human
gagcagggauuaaccucugca

SEQ ID NO: 3737831 - RNA, 16 nt, Human
gagcagggccggggaa

SEQ ID NO: 3737832 - RNA, 21 nt, Human
gagcagggccggggaacuggc

SEQ ID NO: 3737833 - RNA, 14 nt, Human
gagcagggcucagc

SEQ ID NO: 3737834 - RNA, 13 nt, Human
gagcaggggcagg

SEQ ID NO: 3737835 - RNA, 15 nt, Human
gagcaggggcgugga

SEQ ID NO: 3737836 - RNA, 14 nt, Human
gagcagucaggaaa

SEQ ID NO: 3737837 - RNA, 18 nt, Human
gagcaguccaugcaugac

SEQ ID NO: 3737838 - RNA, 20 nt, Human
gagcaguccugccucagccu

SEQ ID NO: 3737839 - RNA, 14 nt, Human
gagcaguccuuggc

SEQ ID NO: 3737840 - RNA, 18 nt, Human
gagcaguccuuggccugc

SEQ ID NO: 3737841 - RNA, 15 nt, Human
gagcagugagcagaa

SEQ ID NO: 3737842 - RNA, 20 nt, Human
gagcagugauauucuuuguu

SEQ ID NO: 3737843 - RNA, 16 nt, Human
gagcagugcaggcaca

SEQ ID NO: 3737844 - RNA, 21 nt, Human
gagcagugcuuuuggcgggga

SEQ ID NO: 3737845 - RNA, 23 nt, Human
gagcaguggcugguccagggcua

SEQ ID NO: 3737846 - RNA, 17 nt, Human
gagcagugggccuggcc

SEQ ID NO: 3737847 - RNA, 18 nt, Human
gagcagugucuuccauaa

SEQ ID NO: 3737848 - RNA, 18 nt, Human
gagcagugugucuccugc

SEQ ID NO: 3737849 - RNA, 20 nt, Human
gagcaguuucuguccugcug

SEQ ID NO: 3737850 - RNA, 13 nt, Human
guccaccuguggg

SEQ ID NO: 3737851 - RNA, 14 nt, Human
guccaccugugggu

SEQ ID NO: 3737852 - RNA, 23 nt, Human
guccaccuguggguguagccagg

SEQ ID NO: 3737853 - RNA, 18 nt, Human
guccacgacugucuccau

SEQ ID NO: 3737854 - RNA, 16 nt, Human
guccacucccagugcu

SEQ ID NO: 3737855 - RNA, 17 nt, Human
guccacugguucuucuu

SEQ ID NO: 3737856 - RNA, 12 nt, Human
guccacugucac

SEQ ID NO: 3737857 - RNA, 17 nt, Human
guccacuucugacagcc

SEQ ID NO: 3737858 - RNA, 14 nt, Human
guccacuuuuccag

SEQ ID NO: 3737859 - RNA, 12 nt, Human
guccagaaaugg

SEQ ID NO: 3737860 - RNA, 15 nt, Human
guccagaagaauauu

SEQ ID NO: 3737861 - RNA, 19 nt, Human
guccagaagaauauucagg

SEQ ID NO: 3737862 - RNA, 16 nt, Human
guccagaaggagacag

SEQ ID NO: 3737863 - RNA, 21 nt, Human
guccagaaggagggggugacc

SEQ ID NO: 3737864 - RNA, 21 nt, Human
guccagacacaaagagacaaa

SEQ ID NO: 3737865 - RNA, 15 nt, Human
guccagacagccugu

SEQ ID NO: 3737866 - RNA, 18 nt, Human
guccagagagaccgagga

SEQ ID NO: 3737867 - RNA, 20 nt, Human
guccagagagaccgaggagg

SEQ ID NO: 3737868 - RNA, 21 nt, Human
guccagagcggaggcugugug

SEQ ID NO: 3737869 - RNA, 19 nt, Human
guccagcaccuugugccug

SEQ ID NO: 3737870 - RNA, 14 nt, Human
guccagcccuggcu

SEQ ID NO: 3737871 - RNA, 18 nt, Human
guccagcccuggcugaag

SEQ ID NO: 3737872 - RNA, 23 nt, Human
guccagcccuggcugaaggacug

SEQ ID NO: 3737873 - RNA, 20 nt, Human
guccagccgccauugccacc

SEQ ID NO: 3737874 - RNA, 14 nt, Human
guccagcuccaacc

SEQ ID NO: 3737875 - RNA, 21 nt, Human
guccagcucuggaggggaggg

SEQ ID NO: 3737876 - RNA, 17 nt, Human
guccagcugagcgccag

SEQ ID NO: 3737877 - RNA, 19 nt, Human
guccagcugcccuuccgca

SEQ ID NO: 3737878 - RNA, 14 nt, Human
guccagcuggccug

SEQ ID NO: 3737879 - RNA, 12 nt, Human
guccaggaacaa

SEQ ID NO: 3737880 - RNA, 13 nt, Human
guccagggaagag

SEQ ID NO: 3737881 - RNA, 13 nt, Human
guccagggaagcu

SEQ ID NO: 3737882 - RNA, 15 nt, Human
guccagggcccugag

SEQ ID NO: 3737883 - RNA, 20 nt, Human
guccagggcccugagcucgg

SEQ ID NO: 3737884 - RNA, 18 nt, Human
guccagggcuagugacuu

SEQ ID NO: 3737885 - RNA, 14 nt, Human
guccaggggccccu

SEQ ID NO: 3737886 - RNA, 19 nt, Human
guccaggggccccuccagc

SEQ ID NO: 3737887 - RNA, 17 nt, Human
guccagguccugguggg

SEQ ID NO: 3737888 - RNA, 22 nt, Human
guccagguccugguggggcagc

SEQ ID NO: 3737889 - RNA, 22 nt, Human
guccaggucgggcucagcucug

SEQ ID NO: 3737890 - RNA, 23 nt, Human
guccaggucgggcucagcucugg

SEQ ID NO: 3737891 - RNA, 14 nt, Human
guccaguaagauca

SEQ ID NO: 3737892 - RNA, 15 nt, Human
guccaguccaguccu

SEQ ID NO: 3737893 - RNA, 17 nt, Human
guccaguccuaucuggg

SEQ ID NO: 3737894 - RNA, 18 nt, Human
guccaguccuaucugggc

SEQ ID NO: 3737895 - RNA, 23 nt, Human
guccaguccuaucugggcuuccu

SEQ ID NO: 3737896 - RNA, 24 nt, Human
guccagugggaggugagaccaccu

SEQ ID NO: 3737897 - RNA, 19 nt, Human
guccaguucccagaaggca

SEQ ID NO: 3737898 - RNA, 13 nt, Human
guccauagcugug

SEQ ID NO: 3737899 - RNA, 19 nt, Human
guccaucugcccgccugcc

SEQ ID NO: 3737900 - RNA, 22 nt, Human
guccaucugcccgccugcccac

SEQ ID NO: 3737901 - RNA, 21 nt, Human
guccaugcagggggcuccugg

SEQ ID NO: 3737902 - RNA, 18 nt, Human
guccaugcuaacaaagac

SEQ ID NO: 3737903 - RNA, 14 nt, Human
guccaugcuucuca

SEQ ID NO: 3737904 - RNA, 21 nt, Human
guccauggaaugcuugaaaaa

SEQ ID NO: 3737905 - RNA, 13 nt, Human
guccaugggcaga

SEQ ID NO: 3737906 - RNA, 14 nt, Human
guccaugggcagag

SEQ ID NO: 3737907 - RNA, 16 nt, Human
guccaugggcagagcc

SEQ ID NO: 3737908 - RNA, 18 nt, Human
guccaugggcagagccca

SEQ ID NO: 3737909 - RNA, 13 nt, Human
guccaugugugug

SEQ ID NO: 3737910 - RNA, 13 nt, Human
guccauucucaag

SEQ ID NO: 3737911 - RNA, 13 nt, Human
guccauucuccca

SEQ ID NO: 3737912 - RNA, 14 nt, Human
guccauugacaugu

SEQ ID NO: 3737913 - RNA, 17 nt, Human
guccauugacauguaca

SEQ ID NO: 3737914 - RNA, 18 nt, Human
guccauugacauguacag

SEQ ID NO: 3737915 - RNA, 22 nt, Human
guccauugacauguacagagaa

SEQ ID NO: 3737916 - RNA, 16 nt, Human
guccauuguccaaucc

SEQ ID NO: 3737917 - RNA, 21 nt, Human
guccauuguccaauccuaugu

SEQ ID NO: 3737918 - RNA, 19 nt, Human
guccauuuauauaugaaaa

SEQ ID NO: 3737919 - RNA, 22 nt, Human
guccauuuggcagggguggcug

SEQ ID NO: 3737920 - RNA, 14 nt, Human
guccauuuugugaa

SEQ ID NO: 3737921 - RNA, 21 nt, Human
gucccaacaggaggacaauuc

SEQ ID NO: 3737922 - RNA, 23 nt, Human
gucccaacaggaggacaauucau

SEQ ID NO: 3737923 - RNA, 17 nt, Human
gucccaagguucugggu

SEQ ID NO: 3737924 - RNA, 14 nt, Human
gucccaagugccaa

SEQ ID NO: 3737925 - RNA, 20 nt, Human
gucccaaugguccugacuuu

SEQ ID NO: 3737926 - RNA, 14 nt, Human
gucccacagccacg

SEQ ID NO: 3737927 - RNA, 15 nt, Human
gucccacagccacgu

SEQ ID NO: 3737928 - RNA, 13 nt, Human
gucccacaucccu

SEQ ID NO: 3737929 - RNA, 14 nt, Human
gucccacaucccug

SEQ ID NO: 3737930 - RNA, 15 nt, Human
gucccacaucccugg

SEQ ID NO: 3737931 - RNA, 20 nt, Human
gucccaccaugcagugcccc

SEQ ID NO: 3737932 - RNA, 21 nt, Human
gucccaccccacacacgccag

SEQ ID NO: 3737933 - RNA, 19 nt, Human
gucccacccccacccccag

SEQ ID NO: 3737934 - RNA, 21 nt, Human
gucccacccccacccccagcu

SEQ ID NO: 3737935 - RNA, 17 nt, Human
gucccaccccucccucu

SEQ ID NO: 3737936 - RNA, 23 nt, Human
gucccaccucuucucuuccugua

SEQ ID NO: 3737937 - RNA, 14 nt, Human
gucccaccuuggcu

SEQ ID NO: 3737938 - RNA, 16 nt, Human
gucccaccuuggcugc

SEQ ID NO: 3737939 - RNA, 23 nt, Human
gucccaccuuggcugcagggagu

SEQ ID NO: 3737940 - RNA, 22 nt, Human
gucccacgaauuugcuggggaa

SEQ ID NO: 3737941 - RNA, 22 nt, Human
gucccacucaagccaagcagcc

SEQ ID NO: 3737942 - RNA, 21 nt, Human
gucccacucaguccauagcag

SEQ ID NO: 3737943 - RNA, 19 nt, Human
gucccacuccaagccagca

SEQ ID NO: 3737944 - RNA, 17 nt, Human
gucccacugccucaggu

SEQ ID NO: 3737945 - RNA, 16 nt, Human
gucccacuuccccucc

SEQ ID NO: 3737946 - RNA, 16 nt, Human
gucccagagcaggagg

SEQ ID NO: 3737947 - RNA, 18 nt, Human
gucccagagcaggaggcc

SEQ ID NO: 3737948 - RNA, 17 nt, Human
gucccagauacuugggg

SEQ ID NO: 3737949 - RNA, 20 nt, Human
gucccaggagcugcccagag

SEQ ID NO: 3737950 - RNA, 19 nt, Human
gucccaggcugagccucag

SEQ ID NO: 3737951 - RNA, 17 nt, Human
gucccagguuggcucug

SEQ ID NO: 3737952 - RNA, 22 nt, Human
gucccagguuggcucugccagu

SEQ ID NO: 3737953 - RNA, 11 nt, Human
gucccaguggg

SEQ ID NO: 3737954 - RNA, 18 nt, Human
gucccagugggaggcgcg

SEQ ID NO: 3737955 - RNA, 18 nt, Human
gucccagugggaggggca

SEQ ID NO: 3737956 - RNA, 23 nt, Human
gucccagugggaggggcaggcug

SEQ ID NO: 3737957 - RNA, 16 nt, Human
gucccauaggcccagu

SEQ ID NO: 3737958 - RNA, 16 nt, Human
gucccauagucccugc

SEQ ID NO: 3737959 - RNA, 17 nt, Human
gucccauagucccugcc

SEQ ID NO: 3737960 - RNA, 18 nt, Human
gucccauagucccugcca

SEQ ID NO: 3737961 - RNA, 14 nt, Human
gucccauccaggca

SEQ ID NO: 3737962 - RNA, 19 nt, Human
gucccaugacccaccccug

SEQ ID NO: 3737963 - RNA, 17 nt, Human
gucccaugugagcugcu

SEQ ID NO: 3737964 - RNA, 18 nt, Human
gucccaugugagcugcug

SEQ ID NO: 3737965 - RNA, 19 nt, Human
gucccauucccccagugcg

SEQ ID NO: 3737966 - RNA, 15 nt, Human
gucccauucccuggg

SEQ ID NO: 3737967 - RNA, 18 nt, Human
gucccauuucucacugag

SEQ ID NO: 3737968 - RNA, 17 nt, Human
guccccaaaccugcaag

SEQ ID NO: 3737969 - RNA, 15 nt, Human
guccccaacagcgcc

SEQ ID NO: 3737970 - RNA, 11 nt, Human
guccccacacu

SEQ ID NO: 3737971 - RNA, 16 nt, Human
guccccaccaucugcu

SEQ ID NO: 3737972 - RNA, 12 nt, Human
guccccaccccu

SEQ ID NO: 3737973 - RNA, 16 nt, Human
guccccacccuccacu

SEQ ID NO: 3737974 - RNA, 22 nt, Human
guccccagcccuuccucugcuc

SEQ ID NO: 3737975 - RNA, 13 nt, Human
guccccagccugg

SEQ ID NO: 3737976 - RNA, 19 nt, Human
guccccaggccccaggaag

SEQ ID NO: 3737977 - RNA, 23 nt, Human
guccccagggcugucaucugaau

SEQ ID NO: 3737978 - RNA, 18 nt, Human
guccccaguuugcagaaa

SEQ ID NO: 3737979 - RNA, 17 nt, Human
guccccaucaucccagc

SEQ ID NO: 3737980 - RNA, 20 nt, Human
guccccaucaucccagcugc

SEQ ID NO: 3737981 - RNA, 16 nt, Human
gucccccaacucugag

SEQ ID NO: 3737982 - RNA, 23 nt, Human
gucccccaacuucaucuggaagu

SEQ ID NO: 3737983 - RNA, 15 nt, Human
gucccccaacuugag

SEQ ID NO: 3737984 - RNA, 14 nt, Human
gucccccagcucug

SEQ ID NO: 3737985 - RNA, 11 nt, Human
guccccccacc

SEQ ID NO: 3737986 - RNA, 22 nt, Human
guccccccacccucauucuacu

SEQ ID NO: 3737987 - RNA, 12 nt, Human
guccccccacuc

SEQ ID NO: 3737988 - RNA, 17 nt, Human
guccccccacucccagc

SEQ ID NO: 3737989 - RNA, 13 nt, Human
gucccccucagca

SEQ ID NO: 3737990 - RNA, 19 nt, Human
gucccccucuguccaggca

SEQ ID NO: 3737991 - RNA, 22 nt, Human
gucccccuggggcuucuccuga

SEQ ID NO: 3737992 - RNA, 16 nt, Human
guccccgcugcugugc

SEQ ID NO: 3737993 - RNA, 15 nt, Human
guccccgugccccgc

SEQ ID NO: 3737994 - RNA, 14 nt, Human
guccccucccaucu

SEQ ID NO: 3737995 - RNA, 22 nt, Human
guccccucccccaccccugcug

SEQ ID NO: 3737996 - RNA, 16 nt, Human
guccccuccccggccc

SEQ ID NO: 3737997 - RNA, 22 nt, Human
guccccuccccggcccuaccag

SEQ ID NO: 3737998 - RNA, 13 nt, Human
guccccucuugcc

SEQ ID NO: 3737999 - RNA, 23 nt, Human
guccccugucgaguucggcucug

SEQ ID NO: 3738000 - RNA, 18 nt, Human
gugaucugggucucuaau

SEQ ID NO: 3738001 - RNA, 15 nt, Human
gugaucugucuugua

SEQ ID NO: 3738002 - RNA, 19 nt, Human
gugaucugucuuguaauau

SEQ ID NO: 3738003 - RNA, 20 nt, Human
gugaucuuuuguucccaucc

SEQ ID NO: 3738004 - RNA, 14 nt, Human
gugaugaacuuucu

SEQ ID NO: 3738005 - RNA, 22 nt, Human
gugaugacaacuggaauaguuu

SEQ ID NO: 3738006 - RNA, 16 nt, Human
gugaugagaggaaauc

SEQ ID NO: 3738007 - RNA, 20 nt, Human
gugaugagggcagcagccag

SEQ ID NO: 3738008 - RNA, 22 nt, Human
gugaugaucagcuguuugucau

SEQ ID NO: 3738009 - RNA, 15 nt, Human
gugaugauguaauug

SEQ ID NO: 3738010 - RNA, 17 nt, Human
gugaugccacacagagu

SEQ ID NO: 3738011 - RNA, 17 nt, Human
gugaugcgcaguugcug

SEQ ID NO: 3738012 - RNA, 19 nt, Human
gugaugcuugauauuuucu

SEQ ID NO: 3738013 - RNA, 16 nt, Human
gugauggagugcuguu

SEQ ID NO: 3738014 - RNA, 18 nt, Human
gugauggagugcuguuuu

SEQ ID NO: 3738015 - RNA, 19 nt, Human
gugauggcgaaagagggua

SEQ ID NO: 3738016 - RNA, 17 nt, Human
gugaugggaaagcauug

SEQ ID NO: 3738017 - RNA, 16 nt, Human
gugaugggcuuucucu

SEQ ID NO: 3738018 - RNA, 14 nt, Human
gugauggggcaagg

SEQ ID NO: 3738019 - RNA, 14 nt, Human
gugauggggcccug

SEQ ID NO: 3738020 - RNA, 19 nt, Human
gugauggggcccugccucc

SEQ ID NO: 3738021 - RNA, 23 nt, Human
gugaugguuccccuguucacucu

SEQ ID NO: 3738022 - RNA, 18 nt, Human
gugaugucauacagagaa

SEQ ID NO: 3738023 - RNA, 22 nt, Human
gugaugucauacagagaaguca

SEQ ID NO: 3738024 - RNA, 19 nt, Human
gugauguccuguaaacacu

SEQ ID NO: 3738025 - RNA, 18 nt, Human
gugaugucuuuucuuggc

SEQ ID NO: 3738026 - RNA, 18 nt, Human
gugaugugacauuuguca

SEQ ID NO: 3738027 - RNA, 15 nt, Human
gugauguucaugggu

SEQ ID NO: 3738028 - RNA, 14 nt, Human
gugauguuuguccu

SEQ ID NO: 3738029 - RNA, 15 nt, Human
gugauuaaacgugca

SEQ ID NO: 3738030 - RNA, 18 nt, Human
gugauuaaacgugcagac

SEQ ID NO: 3738031 - RNA, 19 nt, Human
gugauuaaagcuaaggacc

SEQ ID NO: 3738032 - RNA, 17 nt, Human
gugauuacauaaucugu

SEQ ID NO: 3738033 - RNA, 11 nt, Human
gugauuaccag

SEQ ID NO: 3738034 - RNA, 13 nt, Human
gugauuagugaaa

SEQ ID NO: 3738035 - RNA, 19 nt, Human
gugauuauuuguuauuugu

SEQ ID NO: 3738036 - RNA, 12 nt, Human
gugauucaaaug

SEQ ID NO: 3738037 - RNA, 21 nt, Human
gugauucagaaaauguucugu

SEQ ID NO: 3738038 - RNA, 17 nt, Human
gugauucuccugccuca

SEQ ID NO: 3738039 - RNA, 19 nt, Human
gugauucuccugccucagc

SEQ ID NO: 3738040 - RNA, 21 nt, Human
gugauugacagcuuugcugcu

SEQ ID NO: 3738041 - RNA, 18 nt, Human
gugauugcagcuuuaugu

SEQ ID NO: 3738042 - RNA, 23 nt, Human
gugauuguggaauggagauucag

SEQ ID NO: 3738043 - RNA, 20 nt, Human
gugauuuaauaguguuaauc

SEQ ID NO: 3738044 - RNA, 23 nt, Human
gugauuuagaacuguaugucaga

SEQ ID NO: 3738045 - RNA, 21 nt, Human
gugauuucuuuaaaagaauga

SEQ ID NO: 3738046 - RNA, 22 nt, Human
gugauuugaaaaauauaaaauu

SEQ ID NO: 3738047 - RNA, 18 nt, Human
gugauuuuaacucugucu

SEQ ID NO: 3738048 - RNA, 17 nt, Human
gugauuuucaagcagca

SEQ ID NO: 3738049 - RNA, 12 nt, Human
gugauuuucauu

SEQ ID NO: 3738050 - RNA, 16 nt, Human
gugauuuugcuguaga

SEQ ID NO: 3738051 - RNA, 16 nt, Human
gugauuuuuaugccac

SEQ ID NO: 3738052 - RNA, 17 nt, Human
gugauuuuuaugccacc

SEQ ID NO: 3738053 - RNA, 19 nt, Human
gugauuuuuaugccaccug

SEQ ID NO: 3738054 - RNA, 21 nt, Human
gugauuuuuaugccaccugaa

SEQ ID NO: 3738055 - RNA, 13 nt, Human
gugauuuuuguaa

SEQ ID NO: 3738056 - RNA, 14 nt, Human
gugauuuuuuucuu

SEQ ID NO: 3738057 - RNA, 14 nt, Human
gugcaaaaauuuuu

SEQ ID NO: 3738058 - RNA, 17 nt, Human
gugcaaaaccuuuuacu

SEQ ID NO: 3738059 - RNA, 15 nt, Human
gugcaacagcacugg

SEQ ID NO: 3738060 - RNA, 23 nt, Human
gugcaacagcacuggcucucucc

SEQ ID NO: 3738061 - RNA, 24 nt, Human
gugcaacaggguauggacuaucug

SEQ ID NO: 3738062 - RNA, 13 nt, Human
gugcaaccaggga

SEQ ID NO: 3738063 - RNA, 23 nt, Human
gugcaacccuuaccccuuagccu

SEQ ID NO: 3738064 - RNA, 23 nt, Human
gagcugcccuccuuguccaccca

SEQ ID NO: 3738065 - RNA, 15 nt, Human
gagcugccuggaccc

SEQ ID NO: 3738066 - RNA, 16 nt, Human
gagcugccuguucagc

SEQ ID NO: 3738067 - RNA, 21 nt, Human
gagcugccuguucagcuccag

SEQ ID NO: 3738068 - RNA, 23 nt, Human
gagcugccuguucagcuccagcu

SEQ ID NO: 3738069 - RNA, 13 nt, Human
gagcugccuuccc

SEQ ID NO: 3738070 - RNA, 14 nt, Human
gagcugccuucccu

SEQ ID NO: 3738071 - RNA, 18 nt, Human
gagcugcuauagccuggg

SEQ ID NO: 3738072 - RNA, 13 nt, Human
gagcugcucacua

SEQ ID NO: 3738073 - RNA, 16 nt, Human
gagcugcuggcuugca

SEQ ID NO: 3738074 - RNA, 21 nt, Human
gagcuggacaguggagugcaa

SEQ ID NO: 3738075 - RNA, 20 nt, Human
gagcuggagaugaggccaga

SEQ ID NO: 3738076 - RNA, 21 nt, Human
gagcuggagaugaggccagac

SEQ ID NO: 3738077 - RNA, 23 nt, Human
gagcuggagaugaggccagacca

SEQ ID NO: 3738078 - RNA, 13 nt, Human
gagcuggccccgc

SEQ ID NO: 3738079 - RNA, 17 nt, Human
gagcuggccccgccgcc

SEQ ID NO: 3738080 - RNA, 19 nt, Human
gagcuggccgugggccugg

SEQ ID NO: 3738081 - RNA, 11 nt, Human
gagcuggccuc

SEQ ID NO: 3738082 - RNA, 14 nt, Human
gagcuggcuccagc

SEQ ID NO: 3738083 - RNA, 23 nt, Human
gagcuggcucuauaaggcagccu

SEQ ID NO: 3738084 - RNA, 22 nt, Human
gagcuggcucugagcgccucca

SEQ ID NO: 3738085 - RNA, 13 nt, Human
gagcugggagccg

SEQ ID NO: 3738086 - RNA, 12 nt, Human
gagcugggaggc

SEQ ID NO: 3738087 - RNA, 17 nt, Human
gagcugggaggcauggc

SEQ ID NO: 3738088 - RNA, 19 nt, Human
gagcugggcccgacauggc

SEQ ID NO: 3738089 - RNA, 16 nt, Human
gagcugggccuggucu

SEQ ID NO: 3738090 - RNA, 21 nt, Human
gagcuggggaccagcagucug

SEQ ID NO: 3738091 - RNA, 20 nt, Human
gagcuggggagaauggggcu

SEQ ID NO: 3738092 - RNA, 19 nt, Human
gagcugggggccaugagcu

SEQ ID NO: 3738093 - RNA, 18 nt, Human
gagcugggugucaagagg

SEQ ID NO: 3738094 - RNA, 14 nt, Human
gagcuggugcauua

SEQ ID NO: 3738095 - RNA, 16 nt, Human
gagcuggugcccggag

SEQ ID NO: 3738096 - RNA, 17 nt, Human
gagcuggugcccggaga

SEQ ID NO: 3738097 - RNA, 21 nt, Human
gagcuggugcccggagauugg

SEQ ID NO: 3738098 - RNA, 20 nt, Human
gagcuggugcggcuggccau

SEQ ID NO: 3738099 - RNA, 17 nt, Human
gagcugucaccaaggaa

SEQ ID NO: 3738100 - RNA, 19 nt, Human
gagcugucaccaaggaaac

SEQ ID NO: 3738101 - RNA, 18 nt, Human
gagcuguccggcuggugg

SEQ ID NO: 3738102 - RNA, 17 nt, Human
gagcuguucacagccag

SEQ ID NO: 3738103 - RNA, 20 nt, Human
gagcuguucacagccagacu

SEQ ID NO: 3738104 - RNA, 22 nt, Human
gagcuguucacagccagacugg

SEQ ID NO: 3738105 - RNA, 19 nt, Human
gagcuguuuauggccucag

SEQ ID NO: 3738106 - RNA, 15 nt, Human
gagcuguuuauguuu

SEQ ID NO: 3738107 - RNA, 16 nt, Human
gagcuguuuauguuuu

SEQ ID NO: 3738108 - RNA, 17 nt, Human
gagcuuaaaauacaaga

SEQ ID NO: 3738109 - RNA, 17 nt, Human
gagcuuaagccacugcc

SEQ ID NO: 3738110 - RNA, 23 nt, Human
gagcuuaagccacugccucuccc

SEQ ID NO: 3738111 - RNA, 21 nt, Human
gagcuuaaucuuugaaagguu

SEQ ID NO: 3738112 - RNA, 22 nt, Human
gagcuuaaugcuacaugugagu

SEQ ID NO: 3738113 - RNA, 12 nt, Human
gagcuuagaaac

SEQ ID NO: 3738114 - RNA, 18 nt, Human
gagcuuagugaaauuacu

SEQ ID NO: 3738115 - RNA, 22 nt, Human
gagcuucaagucugugccugga

SEQ ID NO: 3738116 - RNA, 22 nt, Human
gagcuuccaaggggcaaauuuu

SEQ ID NO: 3738117 - RNA, 14 nt, Human
gagcuucucuguga

SEQ ID NO: 3738118 - RNA, 19 nt, Human
gagcuucucuuuaacucag

SEQ ID NO: 3738119 - RNA, 20 nt, Human
gagcuucugggguccccagg

SEQ ID NO: 3738120 - RNA, 18 nt, Human
gagcuucuguugcugccu

SEQ ID NO: 3738121 - RNA, 22 nt, Human
gagcuugaaacccguggcgcuu

SEQ ID NO: 3738122 - RNA, 15 nt, Human
gagcuugauuaaauc

SEQ ID NO: 3738123 - RNA, 19 nt, Human
gagcuugcuuugauuuaca

SEQ ID NO: 3738124 - RNA, 14 nt, Human
gagcuuggccagaa

SEQ ID NO: 3738125 - RNA, 11 nt, Human
gagcuuuaugg

SEQ ID NO: 3738126 - RNA, 21 nt, Human
gagcuuuaugguccuaaaagc

SEQ ID NO: 3738127 - RNA, 23 nt, Human
gagcuuucuguccuuuuggcacu

SEQ ID NO: 3738128 - RNA, 20 nt, Human
gagcuuugaaaauucagugg

SEQ ID NO: 3738129 - RNA, 14 nt, Human
gagcuuugcugcua

SEQ ID NO: 3738130 - RNA, 17 nt, Human
gagcuuugcugcuacag

SEQ ID NO: 3738131 - RNA, 18 nt, Human
gagcuuuggacgcacaca

SEQ ID NO: 3738132 - RNA, 14 nt, Human
gagcuuuuguagaa

SEQ ID NO: 3738133 - RNA, 18 nt, Human
gagcuuuuuucuuuaaga

SEQ ID NO: 3738134 - RNA, 14 nt, Human
gaggaaaaauaugu

SEQ ID NO: 3738135 - RNA, 13 nt, Human
gaggaaaauucuu

SEQ ID NO: 3738136 - RNA, 18 nt, Human
gaggaaacaacagcuuua

SEQ ID NO: 3738137 - RNA, 18 nt, Human
gaggaaacuacugccuuu

SEQ ID NO: 3738138 - RNA, 14 nt, Human
gaggaaacucaccu

SEQ ID NO: 3738139 - RNA, 20 nt, Human
gaggaaacucaccugcuggc

SEQ ID NO: 3738140 - RNA, 13 nt, Human
gaggaaaggccag

SEQ ID NO: 3738141 - RNA, 23 nt, Human
gaggaaaggccagcuggcagcag

SEQ ID NO: 3738142 - RNA, 20 nt, Human
gaggaaaguacauuuuuuga

SEQ ID NO: 3738143 - RNA, 12 nt, Human
gaggaaagucau

SEQ ID NO: 3738144 - RNA, 15 nt, Human
gaggaaaucccuuca

SEQ ID NO: 3738145 - RNA, 18 nt, Human
gaggaaaucugcagaggg

SEQ ID NO: 3738146 - RNA, 17 nt, Human
gaggaaauucuccacug

SEQ ID NO: 3738147 - RNA, 14 nt, Human
gaggaacaaggcaa

SEQ ID NO: 3738148 - RNA, 16 nt, Human
gaggaacaaggcaagg

SEQ ID NO: 3738149 - RNA, 22 nt, Human
gaggaaccagagccauggacuc

SEQ ID NO: 3738150 - RNA, 15 nt, Human
gaggaacuccuuggc

SEQ ID NO: 3738151 - RNA, 23 nt, Human
gaggaacuccuuggccuagccca

SEQ ID NO: 3738152 - RNA, 14 nt, Human
gaggaacugggccu

SEQ ID NO: 3738153 - RNA, 15 nt, Human
gaggaacuguacaga

SEQ ID NO: 3738154 - RNA, 16 nt, Human
gaggaacuguacagaa

SEQ ID NO: 3738155 - RNA, 19 nt, Human
gaggaacuguccagagagc

SEQ ID NO: 3738156 - RNA, 17 nt, Human
gaggaagaagcuuaggc

SEQ ID NO: 3738157 - RNA, 13 nt, Human
gaggaagagucuu

SEQ ID NO: 3738158 - RNA, 20 nt, Human
gaggaagcagaauaaagcaa

SEQ ID NO: 3738159 - RNA, 21 nt, Human
gaggaagcagaauaaagcaau

SEQ ID NO: 3738160 - RNA, 22 nt, Human
gaggaagcagaauaaagcaauu

SEQ ID NO: 3738161 - RNA, 14 nt, Human
gaggaagccgcugg

SEQ ID NO: 3738162 - RNA, 19 nt, Human
gaggaagccugauuaaaga

SEQ ID NO: 3738163 - RNA, 20 nt, Human
gaggaagcgugaaggccgag

SEQ ID NO: 3738164 - RNA, 18 nt, Human
gaggaaggaggacccagg

SEQ ID NO: 3738165 - RNA, 13 nt, Human
gaggaaggcaaga

SEQ ID NO: 3738166 - RNA, 19 nt, Human
gaggaaggggccagaggcu

SEQ ID NO: 3738167 - RNA, 13 nt, Human
gaggaaggggggu

SEQ ID NO: 3738168 - RNA, 14 nt, Human
gaggaaguucagau

SEQ ID NO: 3738169 - RNA, 19 nt, Human
gaggaauaguugagcccca

SEQ ID NO: 3738170 - RNA, 13 nt, Human
gaggaauaucaau

SEQ ID NO: 3738171 - RNA, 22 nt, Human
gaggaaucacucuuguggaugu

SEQ ID NO: 3738172 - RNA, 22 nt, Human
gaggaaucaugucaggccugug

SEQ ID NO: 3738173 - RNA, 15 nt, Human
gaggaauccagaccc

SEQ ID NO: 3738174 - RNA, 19 nt, Human
gaggaauccuggcagccca

SEQ ID NO: 3738175 - RNA, 20 nt, Human
gaggaauccuggcagcccag

SEQ ID NO: 3738176 - RNA, 17 nt, Human
gaggaaugaugaagcuu

SEQ ID NO: 3738177 - RNA, 13 nt, Human
gaggaaugcuccc

SEQ ID NO: 3738178 - RNA, 21 nt, Human
gaggaaugcucccccauccuc

SEQ ID NO: 3738179 - RNA, 14 nt, Human
gaggaauucuguau

SEQ ID NO: 3738180 - RNA, 22 nt, Human
gaggaauuuauaccucaaacua

SEQ ID NO: 3738181 - RNA, 14 nt, Human
gaggaauuucaccu

SEQ ID NO: 3738182 - RNA, 13 nt, Human
gaggaauuucuga

SEQ ID NO: 3738183 - RNA, 14 nt, Human
gaggacaaaacuuc

SEQ ID NO: 3738184 - RNA, 15 nt, Human
gaggacaaaacuucu

SEQ ID NO: 3738185 - RNA, 17 nt, Human
gaggacaaaacuucuug

SEQ ID NO: 3738186 - RNA, 12 nt, Human
gaggacacaugu

SEQ ID NO: 3738187 - RNA, 13 nt, Human
gaggacacucccg

SEQ ID NO: 3738188 - RNA, 17 nt, Human
gaggacagaugccuccu

SEQ ID NO: 3738189 - RNA, 20 nt, Human
gaggacagaugccuccuucc

SEQ ID NO: 3738190 - RNA, 16 nt, Human
gucucaaaaauacaaa

SEQ ID NO: 3738191 - RNA, 15 nt, Human
gucucaaacuccuga

SEQ ID NO: 3738192 - RNA, 22 nt, Human
gucucaagagggcacugguggc

SEQ ID NO: 3738193 - RNA, 14 nt, Human
gucucaaugaaaua

SEQ ID NO: 3738194 - RNA, 17 nt, Human
gucucaaugcucauaac

SEQ ID NO: 3738195 - RNA, 15 nt, Human
gucucacacuggcgu

SEQ ID NO: 3738196 - RNA, 19 nt, Human
gucucaccauuuccccagg

SEQ ID NO: 3738197 - RNA, 20 nt, Human
gucucaccauuuccccaggg

SEQ ID NO: 3738198 - RNA, 23 nt, Human
gucucaccauuuccccagggcac

SEQ ID NO: 3738199 - RNA, 18 nt, Human
gucucaccggcucucacc

SEQ ID NO: 3738200 - RNA, 19 nt, Human
gucucaccuggacuuaagc

SEQ ID NO: 3738201 - RNA, 23 nt, Human
gucucacgggcaugggcacuccc

SEQ ID NO: 3738202 - RNA, 19 nt, Human
gucucacuauguugcccag

SEQ ID NO: 3738203 - RNA, 11 nt, Human
gucucacucug

SEQ ID NO: 3738204 - RNA, 22 nt, Human
gucucacucugucgcccagucu

SEQ ID NO: 3738205 - RNA, 15 nt, Human
gucucacugaaacau

SEQ ID NO: 3738206 - RNA, 22 nt, Human
gucucacugagcacuguuuucu

SEQ ID NO: 3738207 - RNA, 13 nt, Human
gucucacuguugc

SEQ ID NO: 3738208 - RNA, 17 nt, Human
gucucacuguugcccag

SEQ ID NO: 3738209 - RNA, 19 nt, Human
gucucacuguugcccaggc

SEQ ID NO: 3738210 - RNA, 22 nt, Human
gucucacuugugcaguguugac

SEQ ID NO: 3738211 - RNA, 20 nt, Human
gucucagaaucuuuccuucc

SEQ ID NO: 3738212 - RNA, 19 nt, Human
gucucagccccuuucccuu

SEQ ID NO: 3738213 - RNA, 15 nt, Human
gucucaggcugccug

SEQ ID NO: 3738214 - RNA, 16 nt, Human
gucucaggcugccuga

SEQ ID NO: 3738215 - RNA, 18 nt, Human
gucucaggcuggugggag

SEQ ID NO: 3738216 - RNA, 15 nt, Human
gucucaggucccugc

SEQ ID NO: 3738217 - RNA, 16 nt, Human
gucucaguccaccuga

SEQ ID NO: 3738218 - RNA, 15 nt, Human
gucucagugaagacu

SEQ ID NO: 3738219 - RNA, 15 nt, Human
gucucaguuucacuu

SEQ ID NO: 3738220 - RNA, 21 nt, Human
gucucaguuugugugucuuaa

SEQ ID NO: 3738221 - RNA, 11 nt, Human
gucucauccca

SEQ ID NO: 3738222 - RNA, 15 nt, Human
gucucaucuggggag

SEQ ID NO: 3738223 - RNA, 22 nt, Human
gucucauuuuaauguaaagauu

SEQ ID NO: 3738224 - RNA, 20 nt, Human
gucuccaaccccccagcacu

SEQ ID NO: 3738225 - RNA, 16 nt, Human
gucuccaccaggaacc

SEQ ID NO: 3738226 - RNA, 20 nt, Human
gucuccaccaggaaccucuu

SEQ ID NO: 3738227 - RNA, 21 nt, Human
gucuccaccaggaaccucuuc

SEQ ID NO: 3738228 - RNA, 15 nt, Human
gucuccagaaagccc

SEQ ID NO: 3738229 - RNA, 16 nt, Human
gucuccaggggcugcu

SEQ ID NO: 3738230 - RNA, 20 nt, Human
gucuccaggggcugcuuccu

SEQ ID NO: 3738231 - RNA, 14 nt, Human
gucuccauggcccu

SEQ ID NO: 3738232 - RNA, 20 nt, Human
gucucccaguuaugaaucag

SEQ ID NO: 3738233 - RNA, 19 nt, Human
gucucccauaugcagaaau

SEQ ID NO: 3738234 - RNA, 18 nt, Human
gucucccaucuuaacucu

SEQ ID NO: 3738235 - RNA, 15 nt, Human
gucucccccacccuu

SEQ ID NO: 3738236 - RNA, 19 nt, Human
gucucccccguguuccccu

SEQ ID NO: 3738237 - RNA, 21 nt, Human
gucucccccguguuccccucu

SEQ ID NO: 3738238 - RNA, 23 nt, Human
gucucccccguguuccccucuug

SEQ ID NO: 3738239 - RNA, 15 nt, Human
gucuccccucugcug

SEQ ID NO: 3738240 - RNA, 16 nt, Human
gucucccucccuuggg

SEQ ID NO: 3738241 - RNA, 16 nt, Human
gucucccuggagugca

SEQ ID NO: 3738242 - RNA, 20 nt, Human
gucucccuggaucagaacag

SEQ ID NO: 3738243 - RNA, 13 nt, Human
gucucccuggccc

SEQ ID NO: 3738244 - RNA, 16 nt, Human
gucucccuggcccuca

SEQ ID NO: 3738245 - RNA, 18 nt, Human
gucucccuggcccucaag

SEQ ID NO: 3738246 - RNA, 12 nt, Human
gucucccuggcu

SEQ ID NO: 3738247 - RNA, 13 nt, Human
gucucccugggag

SEQ ID NO: 3738248 - RNA, 18 nt, Human
gucucccuuucccuucuu

SEQ ID NO: 3738249 - RNA, 18 nt, Human
gucuccgaaaugcugucu

SEQ ID NO: 3738250 - RNA, 19 nt, Human
gucuccggccucuccagcc

SEQ ID NO: 3738251 - RNA, 14 nt, Human
gucuccuauccugg

SEQ ID NO: 3738252 - RNA, 18 nt, Human
gucuccuauccugguuuu

SEQ ID NO: 3738253 - RNA, 15 nt, Human
gucuccucacucccu

SEQ ID NO: 3738254 - RNA, 13 nt, Human
gucuccucagccu

SEQ ID NO: 3738255 - RNA, 23 nt, Human
gucuccucagccuccucaucugg

SEQ ID NO: 3738256 - RNA, 12 nt, Human
gucuccuccacc

SEQ ID NO: 3738257 - RNA, 16 nt, Human
gucuccuccccuuccc

SEQ ID NO: 3738258 - RNA, 14 nt, Human
gucuccucuuaaaa

SEQ ID NO: 3738259 - RNA, 22 nt, Human
gucuccucuuaaaaaauaaaaa

SEQ ID NO: 3738260 - RNA, 20 nt, Human
gucuccugacuggugcugca

SEQ ID NO: 3738261 - RNA, 13 nt, Human
gucuccugccccc

SEQ ID NO: 3738262 - RNA, 13 nt, Human
gucuccuggcggu

SEQ ID NO: 3738263 - RNA, 16 nt, Human
gucuccuuaacacuga

SEQ ID NO: 3738264 - RNA, 22 nt, Human
gucuccuuaacacugagcuguc

SEQ ID NO: 3738265 - RNA, 19 nt, Human
gucucgaacuccugaccuu

SEQ ID NO: 3738266 - RNA, 14 nt, Human
gucucgagcgcccu

SEQ ID NO: 3738267 - RNA, 19 nt, Human
gucucgagcgcccugcaga

SEQ ID NO: 3738268 - RNA, 13 nt, Human
gucucgcucuguc

SEQ ID NO: 3738269 - RNA, 16 nt, Human
gucucgcuuuguugcc

SEQ ID NO: 3738270 - RNA, 23 nt, Human
gucucgcuuuguugcccaggcug

SEQ ID NO: 3738271 - RNA, 16 nt, Human
gucucguuugugauuc

SEQ ID NO: 3738272 - RNA, 21 nt, Human
gucucuaauucuauuaaagug

SEQ ID NO: 3738273 - RNA, 22 nt, Human
gucucuacuuuucccuguacuu

SEQ ID NO: 3738274 - RNA, 12 nt, Human
gucucuagagca

SEQ ID NO: 3738275 - RNA, 16 nt, Human
gucucuagccacuuug

SEQ ID NO: 3738276 - RNA, 17 nt, Human
gucucuaggcuggggaa

SEQ ID NO: 3738277 - RNA, 14 nt, Human
gucucuagugcugu

SEQ ID NO: 3738278 - RNA, 17 nt, Human
gucucuauaccaauaaa

SEQ ID NO: 3738279 - RNA, 20 nt, Human
gucucuauaccaauaaagug

SEQ ID NO: 3738280 - RNA, 21 nt, Human
gucucuauaccaauaaaguga

SEQ ID NO: 3738281 - RNA, 16 nt, Human
gucucuaucauuaaag

SEQ ID NO: 3738282 - RNA, 19 nt, Human
gucucuaucauuaaaguuc

SEQ ID NO: 3738283 - RNA, 17 nt, Human
gucucuauuuaaauucu

SEQ ID NO: 3738284 - RNA, 20 nt, Human
gucucuauuuaaauucuuuu

SEQ ID NO: 3738285 - RNA, 16 nt, Human
gucucucacagacagg

SEQ ID NO: 3738286 - RNA, 16 nt, Human
gucucucacagaugug

SEQ ID NO: 3738287 - RNA, 18 nt, Human
gucucucagggccaggcc

SEQ ID NO: 3738288 - RNA, 16 nt, Human
gucucucaugaaccuc

SEQ ID NO: 3738289 - RNA, 12 nt, Human
gucucuccuuuu

SEQ ID NO: 3738290 - RNA, 15 nt, Human
gucucuccuuuucuu

SEQ ID NO: 3738291 - RNA, 22 nt, Human
gucucuccuuuucuuuuguuac

SEQ ID NO: 3738292 - RNA, 23 nt, Human
gucucuccuuuucuuuuguuacu

SEQ ID NO: 3738293 - RNA, 18 nt, Human
gucucucuaugccucucu

SEQ ID NO: 3738294 - RNA, 22 nt, Human
gucucucuaugccucucuacag

SEQ ID NO: 3738295 - RNA, 14 nt, Human
gucucucucucucu

SEQ ID NO: 3738296 - RNA, 15 nt, Human
gucucucucucucua

SEQ ID NO: 3738297 - RNA, 19 nt, Human
gucucucucucucuacaaa

SEQ ID NO: 3738298 - RNA, 21 nt, Human
gucucucuucagacucucagc

SEQ ID NO: 3738299 - RNA, 19 nt, Human
gucucucuucucagagugg

SEQ ID NO: 3738300 - RNA, 14 nt, Human
gucucucuucucuc

SEQ ID NO: 3738301 - RNA, 11 nt, Human
gucucucuuug

SEQ ID NO: 3738302 - RNA, 19 nt, Human
gucucugaaguacuaacac

SEQ ID NO: 3738303 - RNA, 16 nt, Human
gucucugaugcagcuu

SEQ ID NO: 3738304 - RNA, 17 nt, Human
gucucugcaaacugccu

SEQ ID NO: 3738305 - RNA, 21 nt, Human
gucucugcauuuuucugcaga

SEQ ID NO: 3738306 - RNA, 21 nt, Human
gucucugccaugaacuggagg

SEQ ID NO: 3738307 - RNA, 15 nt, Human
gucucugccuugccu

SEQ ID NO: 3738308 - RNA, 14 nt, Human
gucucugcugcauu

SEQ ID NO: 3738309 - RNA, 15 nt, Human
gucucugcuggccca

SEQ ID NO: 3738310 - RNA, 20 nt, Human
gucucugcuggcccagccaa

SEQ ID NO: 3738311 - RNA, 21 nt, Human
gucucuggauuauauuaugaa

SEQ ID NO: 3738312 - RNA, 12 nt, Human
gucucuggccug

SEQ ID NO: 3738313 - RNA, 13 nt, Human
gucucugggccac

SEQ ID NO: 3738314 - RNA, 19 nt, Human
gucucugggccacuuggag

SEQ ID NO: 3738315 - RNA, 20 nt, Human
gucucugggccacuuggagu

SEQ ID NO: 3738316 - RNA, 19 nt, Human
gucucuggggcaggcugcu

SEQ ID NO: 3738317 - RNA, 16 nt, Human
gucucugguagccugc

SEQ ID NO: 3738318 - RNA, 17 nt, Human
gucucugguagccugca

SEQ ID NO: 3738319 - RNA, 14 nt, Human
gucucugugcuuug

SEQ ID NO: 3738320 - RNA, 11 nt, Human
gucucuucaga

SEQ ID NO: 3738321 - RNA, 14 nt, Human
gucucuucuccacu

SEQ ID NO: 3738322 - RNA, 15 nt, Human
gucucuucucccaga

SEQ ID NO: 3738323 - RNA, 16 nt, Human
gucucuucucccagaa

SEQ ID NO: 3738324 - RNA, 17 nt, Human
gucucuucucccagaau

SEQ ID NO: 3738325 - RNA, 23 nt, Human
gucucuucucccagaaucccagc

SEQ ID NO: 3738326 - RNA, 13 nt, Human
gucucuucuccuu

SEQ ID NO: 3738327 - RNA, 12 nt, Human
gucucuugcuug

SEQ ID NO: 3738328 - RNA, 18 nt, Human
gucucuugguccugcugc

SEQ ID NO: 3738329 - RNA, 19 nt, Human
gucucuugguccugcugca

SEQ ID NO: 3738330 - RNA, 20 nt, Human
gucucuugguccugcugcag

SEQ ID NO: 3738331 - RNA, 13 nt, Human
gucucuuguaauc

SEQ ID NO: 3738332 - RNA, 16 nt, Human
gucucuuguauuaaac

SEQ ID NO: 3738333 - RNA, 22 nt, Human
gucucuuuaaaaggaaagaaaa

SEQ ID NO: 3738334 - RNA, 17 nt, Human
gucucuuuaagggcaug

SEQ ID NO: 3738335 - RNA, 23 nt, Human
gucucuuuaaugucacaggcagg

SEQ ID NO: 3738336 - RNA, 17 nt, Human
gucucuuuuguaaauua

SEQ ID NO: 3738337 - RNA, 20 nt, Human
gucucuuuuuuuggcccagg

SEQ ID NO: 3738338 - RNA, 21 nt, Human
gucucuuuuuuuggcccaggc

SEQ ID NO: 3738339 - RNA, 14 nt, Human
gucugaaaauguug

SEQ ID NO: 3738340 - RNA, 17 nt, Human
guggcccugccaucuuc

SEQ ID NO: 3738341 - RNA, 21 nt, Human
guggcccugccaucuucccag

SEQ ID NO: 3738342 - RNA, 21 nt, Human
guggcccugcccucuccuucc

SEQ ID NO: 3738343 - RNA, 19 nt, Human
guggcccuggccugcuggg

SEQ ID NO: 3738344 - RNA, 16 nt, Human
guggcccugucccucc

SEQ ID NO: 3738345 - RNA, 20 nt, Human
guggcccuuaugacugccaa

SEQ ID NO: 3738346 - RNA, 15 nt, Human
guggcccuuccugga

SEQ ID NO: 3738347 - RNA, 16 nt, Human
guggcccuuccuggac

SEQ ID NO: 3738348 - RNA, 21 nt, Human
guggccucaacccucccucag

SEQ ID NO: 3738349 - RNA, 13 nt, Human
guggccucagaau

SEQ ID NO: 3738350 - RNA, 23 nt, Human
guggccucagcucccacaagccu

SEQ ID NO: 3738351 - RNA, 23 nt, Human
guggccucagcugaaugccuccu

SEQ ID NO: 3738352 - RNA, 13 nt, Human
guggccucccaac

SEQ ID NO: 3738353 - RNA, 21 nt, Human
guggccucuccuuguggccug

SEQ ID NO: 3738354 - RNA, 22 nt, Human
guggccucuccuuguggccugg

SEQ ID NO: 3738355 - RNA, 23 nt, Human
guggccucuccuuguggccuggg

SEQ ID NO: 3738356 - RNA, 20 nt, Human
guggccucugccccgucuca

SEQ ID NO: 3738357 - RNA, 13 nt, Human
guggccucuuugu

SEQ ID NO: 3738358 - RNA, 15 nt, Human
guggccuggucccug

SEQ ID NO: 3738359 - RNA, 15 nt, Human
guggccuguggccug

SEQ ID NO: 3738360 - RNA, 13 nt, Human
guggccugugugg

SEQ ID NO: 3738361 - RNA, 12 nt, Human
guggccuucccc

SEQ ID NO: 3738362 - RNA, 18 nt, Human
guggccuuccccagcaug

SEQ ID NO: 3738363 - RNA, 19 nt, Human
guggccuuccccagcaugc

SEQ ID NO: 3738364 - RNA, 21 nt, Human
guggccuuggccggcugugcu

SEQ ID NO: 3738365 - RNA, 20 nt, Human
guggccuuguucugucacca

SEQ ID NO: 3738366 - RNA, 19 nt, Human
guggccuuugcgcuccugg

SEQ ID NO: 3738367 - RNA, 22 nt, Human
guggcgcagcauauucaggaag

SEQ ID NO: 3738368 - RNA, 13 nt, Human
guggcggugccug

SEQ ID NO: 3738369 - RNA, 23 nt, Human
guggcuaaaggucccaaggcaag

SEQ ID NO: 3738370 - RNA, 18 nt, Human
guggcuacucugugccag

SEQ ID NO: 3738371 - RNA, 21 nt, Human
guggcuacucugugccagagc

SEQ ID NO: 3738372 - RNA, 23 nt, Human
guggcuacucugugccagagccu

SEQ ID NO: 3738373 - RNA, 22 nt, Human
guggcuagucaagcuccuccuc

SEQ ID NO: 3738374 - RNA, 20 nt, Human
guggcucaagucuggcccca

SEQ ID NO: 3738375 - RNA, 14 nt, Human
guggcucacgccug

SEQ ID NO: 3738376 - RNA, 23 nt, Human
guggcucacgccuguaaucccag

SEQ ID NO: 3738377 - RNA, 20 nt, Human
guggcucacgugugugacuc

SEQ ID NO: 3738378 - RNA, 14 nt, Human
guggcuccccucua

SEQ ID NO: 3738379 - RNA, 16 nt, Human
guggcucgggaggcga

SEQ ID NO: 3738380 - RNA, 19 nt, Human
guggcugacccagucccug

SEQ ID NO: 3738381 - RNA, 17 nt, Human
guggcugagccccuguc

SEQ ID NO: 3738382 - RNA, 17 nt, Human
guggcugaggaggccuc

SEQ ID NO: 3738383 - RNA, 17 nt, Human
guggcugaggccaccca

SEQ ID NO: 3738384 - RNA, 23 nt, Human
guggcugcagcagcgguggccuc

SEQ ID NO: 3738385 - RNA, 16 nt, Human
guggcugccucauuua

SEQ ID NO: 3738386 - RNA, 15 nt, Human
guggcugccuggagc

SEQ ID NO: 3738387 - RNA, 19 nt, Human
guggcugcuagcacuugga

SEQ ID NO: 3738388 - RNA, 12 nt, Human
guggcugcugcc

SEQ ID NO: 3738389 - RNA, 15 nt, Human
guggcugcugcccag

SEQ ID NO: 3738390 - RNA, 15 nt, Human
guggcugcuguggga

SEQ ID NO: 3738391 - RNA, 16 nt, Human
guggcugcuucaagga

SEQ ID NO: 3738392 - RNA, 22 nt, Human
guggcugcuucaaggauccuga

SEQ ID NO: 3738393 - RNA, 17 nt, Human
guggcuggaagauccug

SEQ ID NO: 3738394 - RNA, 20 nt, Human
guggcuggaagauccugcgg

SEQ ID NO: 3738395 - RNA, 11 nt, Human
guggcugggca

SEQ ID NO: 3738396 - RNA, 12 nt, Human
guggcugggcag

SEQ ID NO: 3738397 - RNA, 16 nt, Human
guggcugggggcagga

SEQ ID NO: 3738398 - RNA, 17 nt, Human
guggcugggggcaggag

SEQ ID NO: 3738399 - RNA, 22 nt, Human
guggcugggggcaggagggccc

SEQ ID NO: 3738400 - RNA, 18 nt, Human
guggcuggguuuacacgc

SEQ ID NO: 3738401 - RNA, 15 nt, Human
guggcugguccaggg

SEQ ID NO: 3738402 - RNA, 19 nt, Human
guggcuguccagugcccau

SEQ ID NO: 3738403 - RNA, 15 nt, Human
guggcugucuggaaa

SEQ ID NO: 3738404 - RNA, 23 nt, Human
guggcuguggagacaaugucugc

SEQ ID NO: 3738405 - RNA, 20 nt, Human
guggcuuacuacauguggga

SEQ ID NO: 3738406 - RNA, 19 nt, Human
guggcuucauuagagcagg

SEQ ID NO: 3738407 - RNA, 19 nt, Human
guggcuuuaggagcagugg

SEQ ID NO: 3738408 - RNA, 17 nt, Human
guggcuuucagagccuc

SEQ ID NO: 3738409 - RNA, 22 nt, Human
guggcuuugcauuuuaaaaaug

SEQ ID NO: 3738410 - RNA, 20 nt, Human
guggcuuuuuuccuccugug

SEQ ID NO: 3738411 - RNA, 12 nt, Human
gugggaaaacac

SEQ ID NO: 3738412 - RNA, 23 nt, Human
gugggaaagauuacuuuuucuuu

SEQ ID NO: 3738413 - RNA, 16 nt, Human
gugggaaaugguacug

SEQ ID NO: 3738414 - RNA, 20 nt, Human
gugggaacgagaggggaaga

SEQ ID NO: 3738415 - RNA, 21 nt, Human
gugggaacgagaggggaagag

SEQ ID NO: 3738416 - RNA, 17 nt, Human
gugggaagcgucugucc

SEQ ID NO: 3738417 - RNA, 20 nt, Human
gugggaaggacuuggcgcgc

SEQ ID NO: 3738418 - RNA, 14 nt, Human
gugggaagggagag

SEQ ID NO: 3738419 - RNA, 13 nt, Human
gugggacacccug

SEQ ID NO: 3738420 - RNA, 18 nt, Human
gugggacagcccagagcc

SEQ ID NO: 3738421 - RNA, 22 nt, Human
gugggacagcuuguaggggagg

SEQ ID NO: 3738422 - RNA, 21 nt, Human
gugggacagucaccucaugga

SEQ ID NO: 3738423 - RNA, 14 nt, Human
gugggaccccaggc

SEQ ID NO: 3738424 - RNA, 17 nt, Human
gugggaccccaggccca

SEQ ID NO: 3738425 - RNA, 17 nt, Human
gugggaccuagggaggc

SEQ ID NO: 3738426 - RNA, 22 nt, Human
gugggacuguacacacuuuauu

SEQ ID NO: 3738427 - RNA, 22 nt, Human
gugggagaccggccugccagga

SEQ ID NO: 3738428 - RNA, 14 nt, Human
gugggagagcccag

SEQ ID NO: 3738429 - RNA, 23 nt, Human
gugggagcaaacugcaugcccag

SEQ ID NO: 3738430 - RNA, 12 nt, Human
gugggagcagga

SEQ ID NO: 3738431 - RNA, 13 nt, Human
gugggagcaggag

SEQ ID NO: 3738432 - RNA, 15 nt, Human
gugggagcaggagau

SEQ ID NO: 3738433 - RNA, 18 nt, Human
gugggagcugccuguuca

SEQ ID NO: 3738434 - RNA, 17 nt, Human
gugggaggggcaggcug

SEQ ID NO: 3738435 - RNA, 21 nt, Human
gugggaggggcgcccaccucc

SEQ ID NO: 3738436 - RNA, 13 nt, Human
gugggagggggag

SEQ ID NO: 3738437 - RNA, 16 nt, Human
gugggaggucuugcua

SEQ ID NO: 3738438 - RNA, 13 nt, Human
gugggagugggcc

SEQ ID NO: 3738439 - RNA, 14 nt, Human
gugggagugggccc

SEQ ID NO: 3738440 - RNA, 17 nt, Human
gugggagugugugccug

SEQ ID NO: 3738441 - RNA, 15 nt, Human
gugggauccuccagg

SEQ ID NO: 3738442 - RNA, 18 nt, Human
gugggauccuccaggugc

SEQ ID NO: 3738443 - RNA, 19 nt, Human
gugggaucugccccucccu

SEQ ID NO: 3738444 - RNA, 16 nt, Human
gugggauggaggagaa

SEQ ID NO: 3738445 - RNA, 24 nt, Human
gugggauguucagcacugucccuu

SEQ ID NO: 3738446 - RNA, 22 nt, Human
gugggauuaugggucacaggaa

SEQ ID NO: 3738447 - RNA, 15 nt, Human
gugggauucagagaa

SEQ ID NO: 3738448 - RNA, 16 nt, Human
gugggcacuggcccag

SEQ ID NO: 3738449 - RNA, 18 nt, Human
gugggcaggugguggcac

SEQ ID NO: 3738450 - RNA, 17 nt, Human
gugggccaacaaagaac

SEQ ID NO: 3738451 - RNA, 13 nt, Human
gugggccagcccc

SEQ ID NO: 3738452 - RNA, 17 nt, Human
gugggccagccccuccc

SEQ ID NO: 3738453 - RNA, 19 nt, Human
gugggccagccccucccac

SEQ ID NO: 3738454 - RNA, 21 nt, Human
gugggccagggcugcccugag

SEQ ID NO: 3738455 - RNA, 17 nt, Human
gugggccagucugugga

SEQ ID NO: 3738456 - RNA, 19 nt, Human
gugggcccaggaccagcug

SEQ ID NO: 3738457 - RNA, 23 nt, Human
gugggcccaggaccagcuggggc

SEQ ID NO: 3738458 - RNA, 14 nt, Human
gugggccccacccu

SEQ ID NO: 3738459 - RNA, 19 nt, Human
gugggccucaaggacuuga

SEQ ID NO: 3738460 - RNA, 23 nt, Human
gugggccuccucuguccagggcc

SEQ ID NO: 3738461 - RNA, 18 nt, Human
gugggccugggcuccugg

SEQ ID NO: 3738462 - RNA, 20 nt, Human
gugggccugggcuccuggac

SEQ ID NO: 3738463 - RNA, 18 nt, Human
gugggccuugcuggggac

SEQ ID NO: 3738464 - RNA, 20 nt, Human
gugggccuuguccccugccu

SEQ ID NO: 3738465 - RNA, 22 nt, Human
gugggcgugagaccugccccuc

SEQ ID NO: 3738466 - RNA, 12 nt, Human
gugggcuaagca

SEQ ID NO: 3738467 - RNA, 15 nt, Human
gugggcuaguugggc

SEQ ID NO: 3738468 - RNA, 14 nt, Human
gugggcuccccucu

SEQ ID NO: 3738469 - RNA, 19 nt, Human
gugggcuccccucuuccuc

SEQ ID NO: 3738470 - RNA, 13 nt, Human
gugggcucccuuc

SEQ ID NO: 3738471 - RNA, 15 nt, Human
gugggcugagcccug

SEQ ID NO: 3738472 - RNA, 20 nt, Human
gugggcugcacucugugccc

SEQ ID NO: 3738473 - RNA, 16 nt, Human
gugggcuucccagugg

SEQ ID NO: 3738474 - RNA, 14 nt, Human
gugggcuugauucu

SEQ ID NO: 3738475 - RNA, 13 nt, Human
guggggacagggc

SEQ ID NO: 3738476 - RNA, 21 nt, Human
guggggacccaggcuccgccc

SEQ ID NO: 3738477 - RNA, 22 nt, Human
guggggagacaccucagagccc

SEQ ID NO: 3738478 - RNA, 13 nt, Human
guggggagggccg

SEQ ID NO: 3738479 - RNA, 12 nt, Human
guggggaguggg

SEQ ID NO: 3738480 - RNA, 15 nt, Human
guggggauugcccau

SEQ ID NO: 3738481 - RNA, 17 nt, Human
guggggauuucucccag

SEQ ID NO: 3738482 - RNA, 19 nt, Human
guggggcagcacagagagg

SEQ ID NO: 3738483 - RNA, 23 nt, Human
guggggcagcacagagagggggc

SEQ ID NO: 3738484 - RNA, 13 nt, Human
guggggcagggag

SEQ ID NO: 3738485 - RNA, 14 nt, Human
guggggcagugcuu

SEQ ID NO: 3738486 - RNA, 15 nt, Human
guggggccuagaucc

SEQ ID NO: 3738487 - RNA, 12 nt, Human
guggggccuggg

SEQ ID NO: 3738488 - RNA, 13 nt, Human
guggggccugugg

SEQ ID NO: 3738489 - RNA, 19 nt, Human
gucugaaaauguuguuaug

SEQ ID NO: 3738490 - RNA, 15 nt, Human
gucugaaacauuuca

SEQ ID NO: 3738491 - RNA, 16 nt, Human
gucugaaacauuucau

SEQ ID NO: 3738492 - RNA, 14 nt, Human
gucugaaggcuggg

SEQ ID NO: 3738493 - RNA, 16 nt, Human
gucugaagucacugca

SEQ ID NO: 3738494 - RNA, 17 nt, Human
gucugaagucacugcac

SEQ ID NO: 3738495 - RNA, 15 nt, Human
gucugaauguucuga

SEQ ID NO: 3738496 - RNA, 20 nt, Human
gucugaauguucugacauua

SEQ ID NO: 3738497 - RNA, 15 nt, Human
gucugacaggcaaug

SEQ ID NO: 3738498 - RNA, 14 nt, Human
gucugacccacugc

SEQ ID NO: 3738499 - RNA, 13 nt, Human
gucugacuguuuc

SEQ ID NO: 3738500 - RNA, 19 nt, Human
gucugacuuucuuuuuuga

SEQ ID NO: 3738501 - RNA, 22 nt, Human
gucugagacucacaggaaggag

SEQ ID NO: 3738502 - RNA, 13 nt, Human
gucugagagaggc

SEQ ID NO: 3738503 - RNA, 15 nt, Human
gucugagagaggcca

SEQ ID NO: 3738504 - RNA, 20 nt, Human
gucugagagcaaagugaccu

SEQ ID NO: 3738505 - RNA, 17 nt, Human
gucugagccaaagagaa

SEQ ID NO: 3738506 - RNA, 18 nt, Human
gucugagccaaagagaau

SEQ ID NO: 3738507 - RNA, 20 nt, Human
gucugagccacagcagcauu

SEQ ID NO: 3738508 - RNA, 14 nt, Human
gucugagguccuga

SEQ ID NO: 3738509 - RNA, 17 nt, Human
gucugagguccugagca

SEQ ID NO: 3738510 - RNA, 18 nt, Human
gucugagguccugagcac

SEQ ID NO: 3738511 - RNA, 19 nt, Human
gucugagguccugagcacu

SEQ ID NO: 3738512 - RNA, 23 nt, Human
gucugaguggcuucacuccugcu

SEQ ID NO: 3738513 - RNA, 19 nt, Human
gucugaucgugacgcugaa

SEQ ID NO: 3738514 - RNA, 17 nt, Human
gucugaucugugcuuuc

SEQ ID NO: 3738515 - RNA, 23 nt, Human
gucugaucugugcuuuccagcuc

SEQ ID NO: 3738516 - RNA, 21 nt, Human
gucugauucccaagcucugcu

SEQ ID NO: 3738517 - RNA, 13 nt, Human
gucugauuggcuu

SEQ ID NO: 3738518 - RNA, 18 nt, Human
gucugauuggcuuguaga

SEQ ID NO: 3738519 - RNA, 19 nt, Human
gucugauuggcuuguagaa

SEQ ID NO: 3738520 - RNA, 21 nt, Human
gucugcaaaaugaggaaugua

SEQ ID NO: 3738521 - RNA, 23 nt, Human
gucugcaacuuuaagcagcucuu

SEQ ID NO: 3738522 - RNA, 14 nt, Human
gucugcaagucaga

SEQ ID NO: 3738523 - RNA, 19 nt, Human
gucugcaagucagaggaug

SEQ ID NO: 3738524 - RNA, 16 nt, Human
gucugcacaugcagcu

SEQ ID NO: 3738525 - RNA, 15 nt, Human
gucugcacccagggg

SEQ ID NO: 3738526 - RNA, 22 nt, Human
gucugcacucuaacccuaggca

SEQ ID NO: 3738527 - RNA, 18 nt, Human
gucugcagcccggcgcca

SEQ ID NO: 3738528 - RNA, 12 nt, Human
gucugcaggcag

SEQ ID NO: 3738529 - RNA, 15 nt, Human
gucugcauuuucuga

SEQ ID NO: 3738530 - RNA, 17 nt, Human
gucugccacccaggauc

SEQ ID NO: 3738531 - RNA, 17 nt, Human
gucugccagccagcagc

SEQ ID NO: 3738532 - RNA, 18 nt, Human
gucugccagccagcagcc

SEQ ID NO: 3738533 - RNA, 14 nt, Human
gucugccaggcccc

SEQ ID NO: 3738534 - RNA, 21 nt, Human
gucugccauguugccccuuuc

SEQ ID NO: 3738535 - RNA, 12 nt, Human
gucugccccagc

SEQ ID NO: 3738536 - RNA, 17 nt, Human
gucugcccucugcaucc

SEQ ID NO: 3738537 - RNA, 23 nt, Human
gucugccggacccggaggccgag

SEQ ID NO: 3738538 - RNA, 14 nt, Human
gucugcgaaguccu

SEQ ID NO: 3738539 - RNA, 15 nt, Human
gucugcgaaguccua

SEQ ID NO: 3738540 - RNA, 15 nt, Human
gucugcgugggucag

SEQ ID NO: 3738541 - RNA, 15 nt, Human
gucugcuauauuuuc

SEQ ID NO: 3738542 - RNA, 21 nt, Human
gucugcucuagaugagcuggg

SEQ ID NO: 3738543 - RNA, 17 nt, Human
gucugcucuuucucugc

SEQ ID NO: 3738544 - RNA, 19 nt, Human
gucugcugcccuccauccc

SEQ ID NO: 3738545 - RNA, 20 nt, Human
gucugcuggucacuucuucu

SEQ ID NO: 3738546 - RNA, 16 nt, Human
gucugcuguuccagug

SEQ ID NO: 3738547 - RNA, 23 nt, Human
gucugcuucugcaccuuaucuua

SEQ ID NO: 3738548 - RNA, 22 nt, Human
gucugcuuuaaagggccugccu

SEQ ID NO: 3738549 - RNA, 19 nt, Human
gucuggaagaaagauaaaa

SEQ ID NO: 3738550 - RNA, 14 nt, Human
gucuggaaguccaa

SEQ ID NO: 3738551 - RNA, 18 nt, Human
gucuggacugacagcaug

SEQ ID NO: 3738552 - RNA, 17 nt, Human
gucuggagaagcaguga

SEQ ID NO: 3738553 - RNA, 19 nt, Human
gucuggagaagcagugagc

SEQ ID NO: 3738554 - RNA, 21 nt, Human
gucuggagaagcucccaggaa

SEQ ID NO: 3738555 - RNA, 22 nt, Human
gucuggagaagcucccaggaac

SEQ ID NO: 3738556 - RNA, 18 nt, Human
gucuggagaauaauucuu

SEQ ID NO: 3738557 - RNA, 10 nt, Human
gucuggaggg

SEQ ID NO: 3738558 - RNA, 14 nt, Human
gucuggagugggca

SEQ ID NO: 3738559 - RNA, 18 nt, Human
gucuggagugggcagagc

SEQ ID NO: 3738560 - RNA, 19 nt, Human
gucuggagugggcagagcc

SEQ ID NO: 3738561 - RNA, 16 nt, Human
gucuggcaaugccaca

SEQ ID NO: 3738562 - RNA, 18 nt, Human
gucuggcaaugccacagc

SEQ ID NO: 3738563 - RNA, 13 nt, Human
gucuggcacagcc

SEQ ID NO: 3738564 - RNA, 17 nt, Human
gucuggcacagccuggc

SEQ ID NO: 3738565 - RNA, 12 nt, Human
gucuggcagccu

SEQ ID NO: 3738566 - RNA, 19 nt, Human
gucuggcaguuuauauuua

SEQ ID NO: 3738567 - RNA, 12 nt, Human
gucuggcugcag

SEQ ID NO: 3738568 - RNA, 14 nt, Human
gucuggcugcagag

SEQ ID NO: 3738569 - RNA, 22 nt, Human
gucugggaaaugagcagggaug

SEQ ID NO: 3738570 - RNA, 14 nt, Human
gucugggacacaaa

SEQ ID NO: 3738571 - RNA, 16 nt, Human
gucugggagaaauuga

SEQ ID NO: 3738572 - RNA, 11 nt, Human
gucugggcuga

SEQ ID NO: 3738573 - RNA, 14 nt, Human
gucugggggucagg

SEQ ID NO: 3738574 - RNA, 20 nt, Human
gucugggugcuacuggggaa

SEQ ID NO: 3738575 - RNA, 20 nt, Human
gucuggucacacacaggugu

SEQ ID NO: 3738576 - RNA, 13 nt, Human
gucugguggcccc

SEQ ID NO: 3738577 - RNA, 18 nt, Human
gucugguucucaauucca

SEQ ID NO: 3738578 - RNA, 18 nt, Human
gucugguugggcagccag

SEQ ID NO: 3738579 - RNA, 22 nt, Human
gucugguuucaccgaggacaug

SEQ ID NO: 3738580 - RNA, 13 nt, Human
gucugguuucuag

SEQ ID NO: 3738581 - RNA, 21 nt, Human
gucugguuuuaacaauuuccu

SEQ ID NO: 3738582 - RNA, 14 nt, Human
gucuguaaaaucuu

SEQ ID NO: 3738583 - RNA, 14 nt, Human
gucuguagagggcc

SEQ ID NO: 3738584 - RNA, 18 nt, Human
gucuguagguugcacacu

SEQ ID NO: 3738585 - RNA, 13 nt, Human
gucuguccaucug

SEQ ID NO: 3738586 - RNA, 14 nt, Human
gucuguccaucugc

SEQ ID NO: 3738587 - RNA, 19 nt, Human
gucugucccaguuaacugu

SEQ ID NO: 3738588 - RNA, 23 nt, Human
gucugucccgggguccuguggca

SEQ ID NO: 3738589 - RNA, 17 nt, Human
gucuguccguguuauuu

SEQ ID NO: 3738590 - RNA, 14 nt, Human
gucugucuuccuuu

SEQ ID NO: 3738591 - RNA, 12 nt, Human
gucugucuucug

SEQ ID NO: 3738592 - RNA, 16 nt, Human
gucugucuuuccugaa

SEQ ID NO: 3738593 - RNA, 18 nt, Human
gucugugaacagagagac

SEQ ID NO: 3738594 - RNA, 22 nt, Human
gucugugaagugagaccuuccu

SEQ ID NO: 3738595 - RNA, 20 nt, Human
gucugugaccugcaucuaag

SEQ ID NO: 3738596 - RNA, 16 nt, Human
gucugugagaugcuag

SEQ ID NO: 3738597 - RNA, 23 nt, Human
gucugugagaugcuagaacuccc

SEQ ID NO: 3738598 - RNA, 22 nt, Human
gucugugccccuuccgccacug

SEQ ID NO: 3738599 - RNA, 16 nt, Human
gucugugccuggagcu

SEQ ID NO: 3738600 - RNA, 17 nt, Human
gucugugccuggagcuc

SEQ ID NO: 3738601 - RNA, 12 nt, Human
gucugugcuagg

SEQ ID NO: 3738602 - RNA, 14 nt, Human
gucugugcugaggc

SEQ ID NO: 3738603 - RNA, 14 nt, Human
gucugugugaaugu

SEQ ID NO: 3738604 - RNA, 16 nt, Human
gucugugugggacugu

SEQ ID NO: 3738605 - RNA, 21 nt, Human
gucugugugugugugugugcg

SEQ ID NO: 3738606 - RNA, 11 nt, Human
gucuguguguu

SEQ ID NO: 3738607 - RNA, 22 nt, Human
gucuguguugcgugucgugggu

SEQ ID NO: 3738608 - RNA, 15 nt, Human
gucuguuaccauguc

SEQ ID NO: 3738609 - RNA, 20 nt, Human
gucuguuaccaugucacugu

SEQ ID NO: 3738610 - RNA, 17 nt, Human
gucuguucacuuuuccu

SEQ ID NO: 3738611 - RNA, 21 nt, Human
gucuguuccccauggccacuu

SEQ ID NO: 3738612 - RNA, 17 nt, Human
gucuguucuuuccaaag

SEQ ID NO: 3738613 - RNA, 16 nt, Human
gucuguugauuaaaga

SEQ ID NO: 3738614 - RNA, 19 nt, Human
gucuguugauuaaagauga

SEQ ID NO: 3738615 - RNA, 14 nt, Human
gucuguuggcaggc

SEQ ID NO: 3738616 - RNA, 18 nt, Human
gucuguuggcaggcuggc

SEQ ID NO: 3738617 - RNA, 22 nt, Human
gucuguuggcaggcuggccagu

SEQ ID NO: 3738618 - RNA, 22 nt, Human
gucuguugugugucaugccagu

SEQ ID NO: 3738619 - RNA, 13 nt, Human
gucuguuuaaagu

SEQ ID NO: 3738620 - RNA, 14 nt, Human
gucuguuuaaagug

SEQ ID NO: 3738621 - RNA, 14 nt, Human
gucuguuuguuuca

SEQ ID NO: 3738622 - RNA, 17 nt, Human
gucuguuuguuucaaga

SEQ ID NO: 3738623 - RNA, 18 nt, Human
gucuguuuguuucaagaa

SEQ ID NO: 3738624 - RNA, 23 nt, Human
gucuguuuguuucaagaaccugg

SEQ ID NO: 3738625 - RNA, 20 nt, Human
gucuguuuuaaaaaccuguu

SEQ ID NO: 3738626 - RNA, 13 nt, Human
gucuuaaaaccug

SEQ ID NO: 3738627 - RNA, 15 nt, Human
gucuuaaaauaacuu

SEQ ID NO: 3738628 - RNA, 13 nt, Human
gucuuaaauaaaa

SEQ ID NO: 3738629 - RNA, 16 nt, Human
gucuuaaauaaaagaa

SEQ ID NO: 3738630 - RNA, 13 nt, Human
gucuuaaggacaa

SEQ ID NO: 3738631 - RNA, 20 nt, Human
gucuuaaugaaguuugaaug

SEQ ID NO: 3738632 - RNA, 18 nt, Human
gucuuaauuauuauuugu

SEQ ID NO: 3738633 - RNA, 19 nt, Human
gucuuaauuauuauuugug

SEQ ID NO: 3738634 - RNA, 22 nt, Human
gucuuaucugagcugagccagg

SEQ ID NO: 3738635 - RNA, 17 nt, Human
gucuucaaacugugaag

SEQ ID NO: 3738636 - RNA, 17 nt, Human
gucuucaacauccugcc

SEQ ID NO: 3738637 - RNA, 18 nt, Human
gucuucaacauccugcca

SEQ ID NO: 3738638 - RNA, 20 nt, Human
gucuucaacauccugccagc

SEQ ID NO: 3738639 - RNA, 15 nt, Human
gaggacagcuugagc

SEQ ID NO: 3738640 - RNA, 18 nt, Human
gaggacagcuugagccgg

SEQ ID NO: 3738641 - RNA, 23 nt, Human
gaggacagggaggugaccccagg

SEQ ID NO: 3738642 - RNA, 18 nt, Human
gaggacaugauggagcgc

SEQ ID NO: 3738643 - RNA, 21 nt, Human
gaggaccacaggugugagcca

SEQ ID NO: 3738644 - RNA, 13 nt, Human
gaggaccagcaca

SEQ ID NO: 3738645 - RNA, 19 nt, Human
gaggaccagggcagggcca

SEQ ID NO: 3738646 - RNA, 14 nt, Human
gaggacccaggaca

SEQ ID NO: 3738647 - RNA, 15 nt, Human
gaggacccagggcuc

SEQ ID NO: 3738648 - RNA, 13 nt, Human
gaggaccucuggg

SEQ ID NO: 3738649 - RNA, 14 nt, Human
gaggaccucugggc

SEQ ID NO: 3738650 - RNA, 12 nt, Human
gaggaccugagc

SEQ ID NO: 3738651 - RNA, 15 nt, Human
gaggaccugagccug

SEQ ID NO: 3738652 - RNA, 17 nt, Human
gaggaccugagccugcc

SEQ ID NO: 3738653 - RNA, 18 nt, Human
gaggaccugagccugccg

SEQ ID NO: 3738654 - RNA, 16 nt, Human
gaggaccuguauuuaa

SEQ ID NO: 3738655 - RNA, 22 nt, Human
gaggaccuguauuuaagcaaau

SEQ ID NO: 3738656 - RNA, 22 nt, Human
gaggacgagcgauugaggugua

SEQ ID NO: 3738657 - RNA, 18 nt, Human
gaggacucccaacccugg

SEQ ID NO: 3738658 - RNA, 23 nt, Human
gaggacugccccgugcagacugg

SEQ ID NO: 3738659 - RNA, 13 nt, Human
gaggacuguauuu

SEQ ID NO: 3738660 - RNA, 23 nt, Human
gaggacuguugacauccaagcuu

SEQ ID NO: 3738661 - RNA, 14 nt, Human
gaggacuugugucu

SEQ ID NO: 3738662 - RNA, 22 nt, Human
gaggacuugugucucugugcuu

SEQ ID NO: 3738663 - RNA, 23 nt, Human
gaggacuuugauugcacauuguu

SEQ ID NO: 3738664 - RNA, 15 nt, Human
gaggagacauuggcu

SEQ ID NO: 3738665 - RNA, 13 nt, Human
gaggagagaagaa

SEQ ID NO: 3738666 - RNA, 14 nt, Human
gaggagagaagaau

SEQ ID NO: 3738667 - RNA, 12 nt, Human
gaggagagagga

SEQ ID NO: 3738668 - RNA, 15 nt, Human
gaggagagucccaga

SEQ ID NO: 3738669 - RNA, 17 nt, Human
gaggagagucccagagc

SEQ ID NO: 3738670 - RNA, 16 nt, Human
gaggagcaaaggcuga

SEQ ID NO: 3738671 - RNA, 15 nt, Human
gaggagcagcaggag

SEQ ID NO: 3738672 - RNA, 21 nt, Human
gaggagcagcaggagggggga

SEQ ID NO: 3738673 - RNA, 16 nt, Human
gaggagccagacagac

SEQ ID NO: 3738674 - RNA, 23 nt, Human
gaggagcccacgacacugcagcc

SEQ ID NO: 3738675 - RNA, 14 nt, Human
gaggagccccagcu

SEQ ID NO: 3738676 - RNA, 18 nt, Human
gaggagccccaucugucu

SEQ ID NO: 3738677 - RNA, 21 nt, Human
gaggagcccccacccuguucc

SEQ ID NO: 3738678 - RNA, 11 nt, Human
gaggagccuuu

SEQ ID NO: 3738679 - RNA, 11 nt, Human
gaggagcugcu

SEQ ID NO: 3738680 - RNA, 13 nt, Human
gaggagcugcugg

SEQ ID NO: 3738681 - RNA, 15 nt, Human
gaggagcugcuggcu

SEQ ID NO: 3738682 - RNA, 19 nt, Human
gaggagcugggagccgggc

SEQ ID NO: 3738683 - RNA, 14 nt, Human
gaggagcuucuggg

SEQ ID NO: 3738684 - RNA, 16 nt, Human
gaggaggaaggcaaga

SEQ ID NO: 3738685 - RNA, 23 nt, Human
gaggaggaugucccugggccagg

SEQ ID NO: 3738686 - RNA, 18 nt, Human
gaggaggcaauugggaug

SEQ ID NO: 3738687 - RNA, 19 nt, Human
gaggaggccaccucuccaa

SEQ ID NO: 3738688 - RNA, 18 nt, Human
gaggaggcuccagagggc

SEQ ID NO: 3738689 - RNA, 17 nt, Human
gaggagggagagggagg

SEQ ID NO: 3738690 - RNA, 19 nt, Human
gaggagggaugcugccuga

SEQ ID NO: 3738691 - RNA, 11 nt, Human
gaggaggggag

SEQ ID NO: 3738692 - RNA, 21 nt, Human
gaggaggggccccccugcccu

SEQ ID NO: 3738693 - RNA, 20 nt, Human
gaggagggucggugccuuca

SEQ ID NO: 3738694 - RNA, 12 nt, Human
gaggaggguggg

SEQ ID NO: 3738695 - RNA, 22 nt, Human
gaggagguggcagcccuguagg

SEQ ID NO: 3738696 - RNA, 19 nt, Human
gaggaggugucucaggcug

SEQ ID NO: 3738697 - RNA, 22 nt, Human
gaggaggugucucaggcugccu

SEQ ID NO: 3738698 - RNA, 13 nt, Human
gaggagguuggga

SEQ ID NO: 3738699 - RNA, 12 nt, Human
gaggaguaacaa

SEQ ID NO: 3738700 - RNA, 20 nt, Human
gaggaguaacaauacaaaug

SEQ ID NO: 3738701 - RNA, 15 nt, Human
gaggaguacagguga

SEQ ID NO: 3738702 - RNA, 13 nt, Human
gaggagucugagg

SEQ ID NO: 3738703 - RNA, 18 nt, Human
gaggagucugagguccug

SEQ ID NO: 3738704 - RNA, 17 nt, Human
gaggagugguuuuucuu

SEQ ID NO: 3738705 - RNA, 18 nt, Human
gaggaguucaaugaucua

SEQ ID NO: 3738706 - RNA, 16 nt, Human
gaggaguuucgaggua

SEQ ID NO: 3738707 - RNA, 20 nt, Human
gaggaguuucgagguagagu

SEQ ID NO: 3738708 - RNA, 23 nt, Human
gaggaguuugggguaugggagag

SEQ ID NO: 3738709 - RNA, 23 nt, Human
gaggauaggaguucacuucaucu

SEQ ID NO: 3738710 - RNA, 17 nt, Human
gaggaucacuggagccc

SEQ ID NO: 3738711 - RNA, 14 nt, Human
gaggaucaguuuuu

SEQ ID NO: 3738712 - RNA, 17 nt, Human
gaggaucccucucugga

SEQ ID NO: 3738713 - RNA, 16 nt, Human
gaggaugagagcccag

SEQ ID NO: 3738714 - RNA, 20 nt, Human
gaggaugagagcccagaggu

SEQ ID NO: 3738715 - RNA, 17 nt, Human
gaggaugcuaaaaaugu

SEQ ID NO: 3738716 - RNA, 13 nt, Human
gaggauggagaga

SEQ ID NO: 3738717 - RNA, 15 nt, Human
gaggauggagagagg

SEQ ID NO: 3738718 - RNA, 13 nt, Human
gaggaugggcucg

SEQ ID NO: 3738719 - RNA, 22 nt, Human
gaggaugguagaaguuuggcug

SEQ ID NO: 3738720 - RNA, 20 nt, Human
gaggaugucccugggccagg

SEQ ID NO: 3738721 - RNA, 16 nt, Human
gaggaugugggcagcu

SEQ ID NO: 3738722 - RNA, 20 nt, Human
gaggauguucugggacacag

SEQ ID NO: 3738723 - RNA, 19 nt, Human
gaggauugcuugagcccag

SEQ ID NO: 3738724 - RNA, 20 nt, Human
gaggauuggcucccaucuuu

SEQ ID NO: 3738725 - RNA, 17 nt, Human
gaggauuguugaaucua

SEQ ID NO: 3738726 - RNA, 16 nt, Human
gaggcaaagcuggcuc

SEQ ID NO: 3738727 - RNA, 13 nt, Human
gaggcaagcccug

SEQ ID NO: 3738728 - RNA, 18 nt, Human
gaggcaagguuauaugca

SEQ ID NO: 3738729 - RNA, 21 nt, Human
gaggcaaugucaggaacagaa

SEQ ID NO: 3738730 - RNA, 13 nt, Human
gaggcacaagaau

SEQ ID NO: 3738731 - RNA, 11 nt, Human
gaggcacagca

SEQ ID NO: 3738732 - RNA, 14 nt, Human
gaggcacagcaaac

SEQ ID NO: 3738733 - RNA, 17 nt, Human
gaggcaccaggaagccg

SEQ ID NO: 3738734 - RNA, 23 nt, Human
gaggcagaaagcagaggcuggcc

SEQ ID NO: 3738735 - RNA, 23 nt, Human
gaggcagaagaauugaacccagg

SEQ ID NO: 3738736 - RNA, 19 nt, Human
gaggcagacagcagcucag

SEQ ID NO: 3738737 - RNA, 20 nt, Human
gaggcagacagcagcucagg

SEQ ID NO: 3738738 - RNA, 22 nt, Human
gaggcagacagcagcucaggca

SEQ ID NO: 3738739 - RNA, 18 nt, Human
gaggcagagaagaaagaa

SEQ ID NO: 3738740 - RNA, 11 nt, Human
gaggcagagag

SEQ ID NO: 3738741 - RNA, 13 nt, Human
gaggcagagagcg

SEQ ID NO: 3738742 - RNA, 13 nt, Human
gaggcagaggaca

SEQ ID NO: 3738743 - RNA, 14 nt, Human
gaggcagaggacag

SEQ ID NO: 3738744 - RNA, 16 nt, Human
gaggcagagugcccca

SEQ ID NO: 3738745 - RNA, 15 nt, Human
gaggcagcaggacug

SEQ ID NO: 3738746 - RNA, 17 nt, Human
gaggcagcaggacuguc

SEQ ID NO: 3738747 - RNA, 13 nt, Human
gaggcagccccau

SEQ ID NO: 3738748 - RNA, 18 nt, Human
gaggcagccccauucugc

SEQ ID NO: 3738749 - RNA, 12 nt, Human
gaggcagcccgc

SEQ ID NO: 3738750 - RNA, 21 nt, Human
gaggcagcgugaaagcagaug

SEQ ID NO: 3738751 - RNA, 19 nt, Human
gaggcaggcauggcccugg

SEQ ID NO: 3738752 - RNA, 14 nt, Human
gaggcagggaagga

SEQ ID NO: 3738753 - RNA, 17 nt, Human
gaggcagggaggcagcc

SEQ ID NO: 3738754 - RNA, 17 nt, Human
gaggcagggaggggacu

SEQ ID NO: 3738755 - RNA, 23 nt, Human
gaggcagggcaaaugacaugcac

SEQ ID NO: 3738756 - RNA, 20 nt, Human
gaggcagggccuugcccaga

SEQ ID NO: 3738757 - RNA, 22 nt, Human
gaggcagggccuugcccagaga

SEQ ID NO: 3738758 - RNA, 15 nt, Human
gaggcaggggcggag

SEQ ID NO: 3738759 - RNA, 16 nt, Human
gaggcaggggcuuccu

SEQ ID NO: 3738760 - RNA, 13 nt, Human
gaggcagggucag

SEQ ID NO: 3738761 - RNA, 16 nt, Human
gaggcagguccccaga

SEQ ID NO: 3738762 - RNA, 18 nt, Human
gaggcaggugacagugag

SEQ ID NO: 3738763 - RNA, 15 nt, Human
gaggcaggugagaga

SEQ ID NO: 3738764 - RNA, 22 nt, Human
gaggcaguaccugggcaagcug

SEQ ID NO: 3738765 - RNA, 14 nt, Human
gaggcagugggucc

SEQ ID NO: 3738766 - RNA, 20 nt, Human
gaggcaguugcccagccucu

SEQ ID NO: 3738767 - RNA, 14 nt, Human
gaggcauaaagacu

SEQ ID NO: 3738768 - RNA, 18 nt, Human
gaggcauccagcagucuc

SEQ ID NO: 3738769 - RNA, 19 nt, Human
gaggcauccuacccuuuuc

SEQ ID NO: 3738770 - RNA, 17 nt, Human
gaggcauggcccugggg

SEQ ID NO: 3738771 - RNA, 18 nt, Human
gaggccaaacaggcccuc

SEQ ID NO: 3738772 - RNA, 17 nt, Human
gaggccaaaggcuggug

SEQ ID NO: 3738773 - RNA, 18 nt, Human
gaggccaagaauauugca

SEQ ID NO: 3738774 - RNA, 16 nt, Human
gaggccaagaguggcc

SEQ ID NO: 3738775 - RNA, 17 nt, Human
gaggccaagaguggccc

SEQ ID NO: 3738776 - RNA, 22 nt, Human
gaggccaaggugggaggauugc

SEQ ID NO: 3738777 - RNA, 15 nt, Human
gaggccaagugcagg

SEQ ID NO: 3738778 - RNA, 16 nt, Human
gaggccacaugagucc

SEQ ID NO: 3738779 - RNA, 12 nt, Human
gaggccaccucc

SEQ ID NO: 3738780 - RNA, 14 nt, Human
gaggccaccucucc

SEQ ID NO: 3738781 - RNA, 16 nt, Human
gaggccaccucuccaa

SEQ ID NO: 3738782 - RNA, 17 nt, Human
gaggccaccucuccaag

SEQ ID NO: 3738783 - RNA, 15 nt, Human
gaggccacugaagag

SEQ ID NO: 3738784 - RNA, 17 nt, Human
gaggccacugaagagga

SEQ ID NO: 3738785 - RNA, 13 nt, Human
gaggccagagaca

SEQ ID NO: 3738786 - RNA, 16 nt, Human
gaggccagccccaccc

SEQ ID NO: 3738787 - RNA, 18 nt, Human
gaggccagccccacccag

SEQ ID NO: 3738788 - RNA, 22 nt, Human
gaggccagccccacccaggagg

SEQ ID NO: 3738789 - RNA, 11 nt, Human
gaggccagccu

SEQ ID NO: 3738790 - RNA, 19 nt, Human
guggggccuguggaaugag

SEQ ID NO: 3738791 - RNA, 15 nt, Human
guggggcucccgccu

SEQ ID NO: 3738792 - RNA, 17 nt, Human
guggggcucgccaugcc

SEQ ID NO: 3738793 - RNA, 12 nt, Human
guggggcugcuc

SEQ ID NO: 3738794 - RNA, 12 nt, Human
guggggcuuggc

SEQ ID NO: 3738795 - RNA, 13 nt, Human
guggggcuuggcg

SEQ ID NO: 3738796 - RNA, 15 nt, Human
guggggcuuggcgug

SEQ ID NO: 3738797 - RNA, 17 nt, Human
gugggggaagaccuggc

SEQ ID NO: 3738798 - RNA, 21 nt, Human
gugggggaagagcacagcccu

SEQ ID NO: 3738799 - RNA, 20 nt, Human
gugggggaucacagccucug

SEQ ID NO: 3738800 - RNA, 18 nt, Human
gugggggccaccugccug

SEQ ID NO: 3738801 - RNA, 12 nt, Human
gugggggcugca

SEQ ID NO: 3738802 - RNA, 12 nt, Human
guggggggaggc

SEQ ID NO: 3738803 - RNA, 23 nt, Human
guggggggggggcgcggcuggga

SEQ ID NO: 3738804 - RNA, 18 nt, Human
guggggggggugcugggc

SEQ ID NO: 3738805 - RNA, 13 nt, Human
gugggggguccuu

SEQ ID NO: 3738806 - RNA, 19 nt, Human
guggggguagagcugaucc

SEQ ID NO: 3738807 - RNA, 16 nt, Human
gugggggucugugugu

SEQ ID NO: 3738808 - RNA, 20 nt, Human
guggggguggaggcuuccug

SEQ ID NO: 3738809 - RNA, 14 nt, Human
guggggguggguca

SEQ ID NO: 3738810 - RNA, 21 nt, Human
guggggucacucuggcagcuc

SEQ ID NO: 3738811 - RNA, 22 nt, Human
guggggucacucuggcagcuca

SEQ ID NO: 3738812 - RNA, 15 nt, Human
guggggucaugcccu

SEQ ID NO: 3738813 - RNA, 20 nt, Human
guggggucuccucaggacca

SEQ ID NO: 3738814 - RNA, 13 nt, Human
gugggguggcugc

SEQ ID NO: 3738815 - RNA, 15 nt, Human
gugggguggcugcag

SEQ ID NO: 3738816 - RNA, 22 nt, Human
guggguaauccaggcacagcug

SEQ ID NO: 3738817 - RNA, 20 nt, Human
guggguacccccaggaccag

SEQ ID NO: 3738818 - RNA, 21 nt, Human
guggguagguuggacuggaaa

SEQ ID NO: 3738819 - RNA, 14 nt, Human
gugggucaaggaau

SEQ ID NO: 3738820 - RNA, 14 nt, Human
gugggucagaaccc

SEQ ID NO: 3738821 - RNA, 19 nt, Human
guggguccaggggccccuc

SEQ ID NO: 3738822 - RNA, 23 nt, Human
guggguccaggggccccuccagc

SEQ ID NO: 3738823 - RNA, 20 nt, Human
guggguccaugggcagagcc

SEQ ID NO: 3738824 - RNA, 21 nt, Human
gugggucccacuuccccuccu

SEQ ID NO: 3738825 - RNA, 18 nt, Human
gugggucccggcucugug

SEQ ID NO: 3738826 - RNA, 18 nt, Human
guggguccugaggccugc

SEQ ID NO: 3738827 - RNA, 13 nt, Human
gugggucugugug

SEQ ID NO: 3738828 - RNA, 13 nt, Human
gugggucuucagg

SEQ ID NO: 3738829 - RNA, 23 nt, Human
gugggugagaugcuggagaagag

SEQ ID NO: 3738830 - RNA, 15 nt, Human
guggguggggcagug

SEQ ID NO: 3738831 - RNA, 14 nt, Human
guggguggugggga

SEQ ID NO: 3738832 - RNA, 13 nt, Human
guggguugcuaac

SEQ ID NO: 3738833 - RNA, 18 nt, Human
guggguuuguggggggag

SEQ ID NO: 3738834 - RNA, 16 nt, Human
guggguuuucuuccca

SEQ ID NO: 3738835 - RNA, 18 nt, Human
gugguaagagaauguuau

SEQ ID NO: 3738836 - RNA, 21 nt, Human
gugguaagcaacauggcuuug

SEQ ID NO: 3738837 - RNA, 16 nt, Human
gugguaagcucuggcu

SEQ ID NO: 3738838 - RNA, 15 nt, Human
gugguacagagaagc

SEQ ID NO: 3738839 - RNA, 18 nt, Human
gugguacagagaagccag

SEQ ID NO: 3738840 - RNA, 13 nt, Human
gugguagagaagc

SEQ ID NO: 3738841 - RNA, 21 nt, Human
gugguagguacuuuuugugaa

SEQ ID NO: 3738842 - RNA, 18 nt, Human
gugguaguaaaacacaga

SEQ ID NO: 3738843 - RNA, 20 nt, Human
gugguaguaaaacacagagg

SEQ ID NO: 3738844 - RNA, 16 nt, Human
gugguauccugugaca

SEQ ID NO: 3738845 - RNA, 14 nt, Human
gugguaugucugcc

SEQ ID NO: 3738846 - RNA, 22 nt, Human
guggucacaacuugauggcugc

SEQ ID NO: 3738847 - RNA, 15 nt, Human
guggucacagcggag

SEQ ID NO: 3738848 - RNA, 14 nt, Human
guggucacagcugu

SEQ ID NO: 3738849 - RNA, 18 nt, Human
gugguccauggaaugcuu

SEQ ID NO: 3738850 - RNA, 14 nt, Human
guggucccacccca

SEQ ID NO: 3738851 - RNA, 16 nt, Human
guggucccaccccaca

SEQ ID NO: 3738852 - RNA, 17 nt, Human
guggucccaccccacac

SEQ ID NO: 3738853 - RNA, 18 nt, Human
gugguccuaaucuucuga

SEQ ID NO: 3738854 - RNA, 12 nt, Human
gugguccugacu

SEQ ID NO: 3738855 - RNA, 16 nt, Human
guggucggugggaccc

SEQ ID NO: 3738856 - RNA, 11 nt, Human
guggucucagg

SEQ ID NO: 3738857 - RNA, 12 nt, Human
guggucucagga

SEQ ID NO: 3738858 - RNA, 21 nt, Human
guggucucuucuuggggccca

SEQ ID NO: 3738859 - RNA, 17 nt, Human
guggucugaauguucug

SEQ ID NO: 3738860 - RNA, 14 nt, Human
guggucugcaggca

SEQ ID NO: 3738861 - RNA, 17 nt, Human
guggucuguuggcaggc

SEQ ID NO: 3738862 - RNA, 21 nt, Human
guggucuguuggcaggcuggc

SEQ ID NO: 3738863 - RNA, 23 nt, Human
guggucuguuggcaggcuggcca

SEQ ID NO: 3738864 - RNA, 17 nt, Human
guggugacaggacgcug

SEQ ID NO: 3738865 - RNA, 18 nt, Human
guggugaccccaggaggg

SEQ ID NO: 3738866 - RNA, 13 nt, Human
guggugagaucau

SEQ ID NO: 3738867 - RNA, 19 nt, Human
guggugaucaauuaaaugu

SEQ ID NO: 3738868 - RNA, 21 nt, Human
guggugauuugaaaaauauaa

SEQ ID NO: 3738869 - RNA, 14 nt, Human
guggugcagacaga

SEQ ID NO: 3738870 - RNA, 15 nt, Human
gugguggaaggguag

SEQ ID NO: 3738871 - RNA, 12 nt, Human
gugguggagcca

SEQ ID NO: 3738872 - RNA, 14 nt, Human
gugguggagccagu

SEQ ID NO: 3738873 - RNA, 23 nt, Human
gugguggcaggcaccuguagucc

SEQ ID NO: 3738874 - RNA, 17 nt, Human
gugguggcagggccuag

SEQ ID NO: 3738875 - RNA, 23 nt, Human
gugguggcagggccuagcugcua

SEQ ID NO: 3738876 - RNA, 22 nt, Human
gugguggcagugcagcaaccag

SEQ ID NO: 3738877 - RNA, 17 nt, Human
gugguggcaguggaggu

SEQ ID NO: 3738878 - RNA, 18 nt, Human
gugguggcccacgccugu

SEQ ID NO: 3738879 - RNA, 13 nt, Human
gugguggccuggu

SEQ ID NO: 3738880 - RNA, 18 nt, Human
gugguggcgggcgccugu

SEQ ID NO: 3738881 - RNA, 12 nt, Human
gugguggcucug

SEQ ID NO: 3738882 - RNA, 12 nt, Human
gugguggggagg

SEQ ID NO: 3738883 - RNA, 22 nt, Human
gugguggggaggggcgcuggcc

SEQ ID NO: 3738884 - RNA, 16 nt, Human
guggugguaacccugg

SEQ ID NO: 3738885 - RNA, 16 nt, Human
gugguggucccugggu

SEQ ID NO: 3738886 - RNA, 14 nt, Human
guggugguuuucug

SEQ ID NO: 3738887 - RNA, 12 nt, Human
gugguguaauuu

SEQ ID NO: 3738888 - RNA, 14 nt, Human
guggugugaucuua

SEQ ID NO: 3738889 - RNA, 20 nt, Human
gugguguuuccugcaggcca

SEQ ID NO: 3738890 - RNA, 23 nt, Human
gugguuaaugccauggacagaag

SEQ ID NO: 3738891 - RNA, 17 nt, Human
gugguuauaacuuaaug

SEQ ID NO: 3738892 - RNA, 14 nt, Human
gugguuauuucuca

SEQ ID NO: 3738893 - RNA, 22 nt, Human
gugguuauuucucaacaaagca

SEQ ID NO: 3738894 - RNA, 14 nt, Human
gugguuauuuuuau

SEQ ID NO: 3738895 - RNA, 23 nt, Human
gugguucacucuuggagccugca

SEQ ID NO: 3738896 - RNA, 16 nt, Human
gugguugaauaugauu

SEQ ID NO: 3738897 - RNA, 18 nt, Human
gugguugaauaugauuaa

SEQ ID NO: 3738898 - RNA, 18 nt, Human
gugguugcuguuuuccuc

SEQ ID NO: 3738899 - RNA, 20 nt, Human
gugguugcuguuuuccuccc

SEQ ID NO: 3738900 - RNA, 20 nt, Human
gugguuggggcccugcccug

SEQ ID NO: 3738901 - RNA, 20 nt, Human
gugguuuaguguaaaaauga

SEQ ID NO: 3738902 - RNA, 17 nt, Human
gugguuuauauauuuaa

SEQ ID NO: 3738903 - RNA, 15 nt, Human
gugguuucagaaaug

SEQ ID NO: 3738904 - RNA, 16 nt, Human
gugguuucagaaaugu

SEQ ID NO: 3738905 - RNA, 16 nt, Human
gugguuugagacacug

SEQ ID NO: 3738906 - RNA, 16 nt, Human
gugguuuguggcuuua

SEQ ID NO: 3738907 - RNA, 20 nt, Human
gugguuuuauacugaaggaa

SEQ ID NO: 3738908 - RNA, 16 nt, Human
gugguuuuccccuccc

SEQ ID NO: 3738909 - RNA, 21 nt, Human
gugguuuuccccucccugggu

SEQ ID NO: 3738910 - RNA, 17 nt, Human
gugguuuucuguucuuu

SEQ ID NO: 3738911 - RNA, 23 nt, Human
gugguuuucuuaaggugaggccu

SEQ ID NO: 3738912 - RNA, 15 nt, Human
guguaaaccaaagcc

SEQ ID NO: 3738913 - RNA, 13 nt, Human
guguaaauuaugu

SEQ ID NO: 3738914 - RNA, 15 nt, Human
guguaacagcuccuu

SEQ ID NO: 3738915 - RNA, 16 nt, Human
guguaacucccaguga

SEQ ID NO: 3738916 - RNA, 18 nt, Human
guguaacuggcaguuuuc

SEQ ID NO: 3738917 - RNA, 13 nt, Human
guguaauaaagug

SEQ ID NO: 3738918 - RNA, 18 nt, Human
guguaauaaaguguuuuc

SEQ ID NO: 3738919 - RNA, 20 nt, Human
guguaauaaaguguuuucag

SEQ ID NO: 3738920 - RNA, 14 nt, Human
guguaauauuacuu

SEQ ID NO: 3738921 - RNA, 19 nt, Human
guguaaucaauaaacgauu

SEQ ID NO: 3738922 - RNA, 12 nt, Human
guguaauuuaug

SEQ ID NO: 3738923 - RNA, 13 nt, Human
guguaauuucuuu

SEQ ID NO: 3738924 - RNA, 15 nt, Human
guguaauuugaagau

SEQ ID NO: 3738925 - RNA, 14 nt, Human
guguacaauguaca

SEQ ID NO: 3738926 - RNA, 23 nt, Human
guguacagaauuuuucuucauua

SEQ ID NO: 3738927 - RNA, 13 nt, Human
guguacagucuug

SEQ ID NO: 3738928 - RNA, 18 nt, Human
guguacauaguguaaugu

SEQ ID NO: 3738929 - RNA, 15 nt, Human
guguacauaugugcu

SEQ ID NO: 3738930 - RNA, 17 nt, Human
guguacauggaauaaca

SEQ ID NO: 3738931 - RNA, 17 nt, Human
guguacccccgcccagg

SEQ ID NO: 3738932 - RNA, 21 nt, Human
guguaccuccucucaguguuu

SEQ ID NO: 3738933 - RNA, 13 nt, Human
guguacucuggcc

SEQ ID NO: 3738934 - RNA, 16 nt, Human
guguacuggcuccucu

SEQ ID NO: 3738935 - RNA, 13 nt, Human
guguacuguguca

SEQ ID NO: 3738936 - RNA, 15 nt, Human
guguacuuaacuauu

SEQ ID NO: 3738937 - RNA, 19 nt, Human
guguacuucccgggccagg

SEQ ID NO: 3738938 - RNA, 15 nt, Human
guguagaacacuaau

SEQ ID NO: 3738939 - RNA, 17 nt, Human
guguagaagcauuccuu

SEQ ID NO: 3738940 - RNA, 18 nt, Human
guguagaguuaagaagcu

SEQ ID NO: 3738941 - RNA, 21 nt, Human
gucuucaaggcuucagucuca

SEQ ID NO: 3738942 - RNA, 14 nt, Human
gucuucaagggcug

SEQ ID NO: 3738943 - RNA, 15 nt, Human
gucuucacggcagga

SEQ ID NO: 3738944 - RNA, 12 nt, Human
gucuucacucuu

SEQ ID NO: 3738945 - RNA, 15 nt, Human
gucuucacucuuagg

SEQ ID NO: 3738946 - RNA, 18 nt, Human
gucuucagcauucccucc

SEQ ID NO: 3738947 - RNA, 13 nt, Human
gucuucagccuag

SEQ ID NO: 3738948 - RNA, 14 nt, Human
gucuucagccucuu

SEQ ID NO: 3738949 - RNA, 22 nt, Human
gucuucagccucuuucuguccc

SEQ ID NO: 3738950 - RNA, 13 nt, Human
gucuucaugaaau

SEQ ID NO: 3738951 - RNA, 15 nt, Human
gucuucaugaaaugc

SEQ ID NO: 3738952 - RNA, 17 nt, Human
gucuucauguucccacu

SEQ ID NO: 3738953 - RNA, 17 nt, Human
gucuuccacaaagaaaa

SEQ ID NO: 3738954 - RNA, 16 nt, Human
gucuuccaccuggaag

SEQ ID NO: 3738955 - RNA, 23 nt, Human
gucuuccagggggaaggccaagg

SEQ ID NO: 3738956 - RNA, 15 nt, Human
gucuuccauaaugua

SEQ ID NO: 3738957 - RNA, 15 nt, Human
gucuuccauuugcaa

SEQ ID NO: 3738958 - RNA, 15 nt, Human
gucuucccaggguag

SEQ ID NO: 3738959 - RNA, 18 nt, Human
gucuucccuaccucaggc

SEQ ID NO: 3738960 - RNA, 21 nt, Human
gucuucccuaccucaggcagg

SEQ ID NO: 3738961 - RNA, 23 nt, Human
gucuuccuauuucagaaguuuaa

SEQ ID NO: 3738962 - RNA, 23 nt, Human
gucuuccucaaaauaaagaagua

SEQ ID NO: 3738963 - RNA, 14 nt, Human
gucuuccucugucu

SEQ ID NO: 3738964 - RNA, 18 nt, Human
gucuuccugaaaugcagu

SEQ ID NO: 3738965 - RNA, 18 nt, Human
gucuuccugacacuuuaa

SEQ ID NO: 3738966 - RNA, 19 nt, Human
gucuuccugacacuuuaau

SEQ ID NO: 3738967 - RNA, 19 nt, Human
gucuuccugaguggugcca

SEQ ID NO: 3738968 - RNA, 17 nt, Human
gucuucggaaaccuugg

SEQ ID NO: 3738969 - RNA, 15 nt, Human
gucuucuaauuucaa

SEQ ID NO: 3738970 - RNA, 12 nt, Human
gucuucuauuua

SEQ ID NO: 3738971 - RNA, 19 nt, Human
gucuucucaggcucugccc

SEQ ID NO: 3738972 - RNA, 22 nt, Human
gucuucucaggcucugcccugc

SEQ ID NO: 3738973 - RNA, 19 nt, Human
gucuucucauagcauuaac

SEQ ID NO: 3738974 - RNA, 17 nt, Human
gucuucuccaccacgcu

SEQ ID NO: 3738975 - RNA, 20 nt, Human
gucuucuccaccacgcuggg

SEQ ID NO: 3738976 - RNA, 14 nt, Human
gucuucugccuguu

SEQ ID NO: 3738977 - RNA, 17 nt, Human
gucuucugccuguuaua

SEQ ID NO: 3738978 - RNA, 13 nt, Human
gucuucugcuuug

SEQ ID NO: 3738979 - RNA, 16 nt, Human
gucuucuuacaugcau

SEQ ID NO: 3738980 - RNA, 14 nt, Human
gucuucuucagggu

SEQ ID NO: 3738981 - RNA, 20 nt, Human
gucuucuuugcccacaaugc

SEQ ID NO: 3738982 - RNA, 17 nt, Human
gucuugaacuccuggcc

SEQ ID NO: 3738983 - RNA, 13 nt, Human
gucuugaaguccu

SEQ ID NO: 3738984 - RNA, 17 nt, Human
gucuugaaugucuuuug

SEQ ID NO: 3738985 - RNA, 19 nt, Human
gucuugaaugucuuuugaa

SEQ ID NO: 3738986 - RNA, 16 nt, Human
gucuugagcucuauua

SEQ ID NO: 3738987 - RNA, 17 nt, Human
gucuugauuuguuuuag

SEQ ID NO: 3738988 - RNA, 17 nt, Human
gucuugcaauggcagcc

SEQ ID NO: 3738989 - RNA, 18 nt, Human
gucuugcaauggcagccu

SEQ ID NO: 3738990 - RNA, 19 nt, Human
gucuugcagugauuaaggu

SEQ ID NO: 3738991 - RNA, 18 nt, Human
gucuuggagcugagccuc

SEQ ID NO: 3738992 - RNA, 23 nt, Human
gucuuggagcugagccucucacc

SEQ ID NO: 3738993 - RNA, 20 nt, Human
gucuuggcagcaccugucuc

SEQ ID NO: 3738994 - RNA, 16 nt, Human
gucuuggcggcagcag

SEQ ID NO: 3738995 - RNA, 16 nt, Human
gucuuggcuuucaugu

SEQ ID NO: 3738996 - RNA, 20 nt, Human
gucuuggcuuucauguuauu

SEQ ID NO: 3738997 - RNA, 20 nt, Human
gucuugggcagagcuggcuc

SEQ ID NO: 3738998 - RNA, 21 nt, Human
gucuugggcagagcuggcucu

SEQ ID NO: 3738999 - RNA, 16 nt, Human
gucuugguuccagccu

SEQ ID NO: 3739000 - RNA, 12 nt, Human
gucuuguaagag

SEQ ID NO: 3739001 - RNA, 19 nt, Human
gucuuguaauauuuuguau

SEQ ID NO: 3739002 - RNA, 15 nt, Human
gucuuguacaugugu

SEQ ID NO: 3739003 - RNA, 20 nt, Human
gucuugugacuagugcugaa

SEQ ID NO: 3739004 - RNA, 23 nt, Human
gucuuguguuuccacagccugca

SEQ ID NO: 3739005 - RNA, 20 nt, Human
gucuuguuaagugcagucug

SEQ ID NO: 3739006 - RNA, 21 nt, Human
gucuuguucugucacucaggc

SEQ ID NO: 3739007 - RNA, 19 nt, Human
gucuuuaaaggcccagccc

SEQ ID NO: 3739008 - RNA, 13 nt, Human
gucuuuaaaucau

SEQ ID NO: 3739009 - RNA, 17 nt, Human
gucuuuaaaugcugcuu

SEQ ID NO: 3739010 - RNA, 23 nt, Human
gucuuuaauuucugucagaaugc

SEQ ID NO: 3739011 - RNA, 16 nt, Human
gucuuuagcuauuacu

SEQ ID NO: 3739012 - RNA, 21 nt, Human
gucuuuaggucuuuguaagaa

SEQ ID NO: 3739013 - RNA, 16 nt, Human
gucuuucacagcuccu

SEQ ID NO: 3739014 - RNA, 21 nt, Human
gucuuucaggaccuuuugaag

SEQ ID NO: 3739015 - RNA, 13 nt, Human
gucuuucauggcu

SEQ ID NO: 3739016 - RNA, 22 nt, Human
gucuuuccacuccuccuagcca

SEQ ID NO: 3739017 - RNA, 14 nt, Human
gucuuuccacucug

SEQ ID NO: 3739018 - RNA, 16 nt, Human
gucuuucucaaagaaa

SEQ ID NO: 3739019 - RNA, 14 nt, Human
gucuuucuccaaag

SEQ ID NO: 3739020 - RNA, 16 nt, Human
gucuuucuccaaaguu

SEQ ID NO: 3739021 - RNA, 22 nt, Human
gucuuucuuuggugccuuuccu

SEQ ID NO: 3739022 - RNA, 13 nt, Human
gucuuugauaaag

SEQ ID NO: 3739023 - RNA, 15 nt, Human
gucuuugguucagcu

SEQ ID NO: 3739024 - RNA, 15 nt, Human
gucuuugguucuaag

SEQ ID NO: 3739025 - RNA, 15 nt, Human
gucuuuguaagagug

SEQ ID NO: 3739026 - RNA, 20 nt, Human
gucuuuguaagaguguagaa

SEQ ID NO: 3739027 - RNA, 21 nt, Human
gucuuuguaagaguguagaag

SEQ ID NO: 3739028 - RNA, 21 nt, Human
gucuuuguaagucaguguuga

SEQ ID NO: 3739029 - RNA, 19 nt, Human
gucuuuguaaugucaccac

SEQ ID NO: 3739030 - RNA, 19 nt, Human
gucuuuguuaagacugcug

SEQ ID NO: 3739031 - RNA, 23 nt, Human
gucuuuuaaaaaguauugccaaa

SEQ ID NO: 3739032 - RNA, 13 nt, Human
gucuuuuaaaaug

SEQ ID NO: 3739033 - RNA, 24 nt, Human
gucuuuuaggacccuucccuugag

SEQ ID NO: 3739034 - RNA, 13 nt, Human
gucuuuuauauuu

SEQ ID NO: 3739035 - RNA, 19 nt, Human
gucuuuuauauuuguaucg

SEQ ID NO: 3739036 - RNA, 14 nt, Human
gucuuuucaucugg

SEQ ID NO: 3739037 - RNA, 16 nt, Human
gucuuuucccauuuau

SEQ ID NO: 3739038 - RNA, 17 nt, Human
gucuuuuccucgcuucu

SEQ ID NO: 3739039 - RNA, 19 nt, Human
gucuuuucuugcaugaggc

SEQ ID NO: 3739040 - RNA, 23 nt, Human
gucuuuucuuggcaaaagccuug

SEQ ID NO: 3739041 - RNA, 14 nt, Human
gucuuuugacaugu

SEQ ID NO: 3739042 - RNA, 14 nt, Human
gucuuuuggaggac

SEQ ID NO: 3739043 - RNA, 16 nt, Human
gucuuuugguuaugaa

SEQ ID NO: 3739044 - RNA, 15 nt, Human
gucuuuuuaagcuua

SEQ ID NO: 3739045 - RNA, 16 nt, Human
gucuuuuucuggacug

SEQ ID NO: 3739046 - RNA, 17 nt, Human
gucuuuuucuguuguaa

SEQ ID NO: 3739047 - RNA, 19 nt, Human
gucuuuuucuguuguaacu

SEQ ID NO: 3739048 - RNA, 16 nt, Human
gucuuuuuuuguauag

SEQ ID NO: 3739049 - RNA, 17 nt, Human
gucuuuuuuuguauagu

SEQ ID NO: 3739050 - RNA, 18 nt, Human
gucuuuuuuuuaaugugc

SEQ ID NO: 3739051 - RNA, 19 nt, Human
gucuuuuuuuuaaugugcu

SEQ ID NO: 3739052 - RNA, 22 nt, Human
gucuuuuuuuuaaugugcugug

SEQ ID NO: 3739053 - RNA, 14 nt, Human
gucuuuuuuuuccu

SEQ ID NO: 3739054 - RNA, 15 nt, Human
gucuuuuuuuuccug

SEQ ID NO: 3739055 - RNA, 20 nt, Human
gucuuuuuuuuuuuugucua

SEQ ID NO: 3739056 - RNA, 15 nt, Human
gugaaaaaaaaaaug

SEQ ID NO: 3739057 - RNA, 19 nt, Human
gugaaaacaagugcuggca

SEQ ID NO: 3739058 - RNA, 17 nt, Human
gugaaaagaauagaagc

SEQ ID NO: 3739059 - RNA, 19 nt, Human
gugaaaaguccuugauugu

SEQ ID NO: 3739060 - RNA, 22 nt, Human
gugaaaauaagccaugagaaug

SEQ ID NO: 3739061 - RNA, 13 nt, Human
gugaaaauaauug

SEQ ID NO: 3739062 - RNA, 21 nt, Human
gugaaaauagguauacagugg

SEQ ID NO: 3739063 - RNA, 23 nt, Human
gugaaacacaccaggcugugggc

SEQ ID NO: 3739064 - RNA, 18 nt, Human
gugaaacauuuucucccu

SEQ ID NO: 3739065 - RNA, 19 nt, Human
gugaaacauuuucucccug

SEQ ID NO: 3739066 - RNA, 16 nt, Human
gugaaacccugucucu

SEQ ID NO: 3739067 - RNA, 22 nt, Human
gugaaaccuuuagggcagcuug

SEQ ID NO: 3739068 - RNA, 18 nt, Human
gugaaaccuuuuuuaaga

SEQ ID NO: 3739069 - RNA, 22 nt, Human
gugaaaccuuuuuuaagauuuu

SEQ ID NO: 3739070 - RNA, 12 nt, Human
gugaaacuggau

SEQ ID NO: 3739071 - RNA, 18 nt, Human
gugaaagaaaauaacaau

SEQ ID NO: 3739072 - RNA, 17 nt, Human
gugaaagcugagaacuc

SEQ ID NO: 3739073 - RNA, 21 nt, Human
gugaaagcugagaacuccuga

SEQ ID NO: 3739074 - RNA, 21 nt, Human
gugaaagucagaugcccagag

SEQ ID NO: 3739075 - RNA, 17 nt, Human
gugaaauaguucaaagc

SEQ ID NO: 3739076 - RNA, 16 nt, Human
gugaaauggccaggau

SEQ ID NO: 3739077 - RNA, 18 nt, Human
gugaaauuauucauaauu

SEQ ID NO: 3739078 - RNA, 20 nt, Human
gugaaauugcauacuuugua

SEQ ID NO: 3739079 - RNA, 12 nt, Human
gugaaauuuuuc

SEQ ID NO: 3739080 - RNA, 13 nt, Human
gugaaauuuuuca

SEQ ID NO: 3739081 - RNA, 14 nt, Human
gugaaauuuuucau

SEQ ID NO: 3739082 - RNA, 19 nt, Human
gugaacaaaagaugcucuu

SEQ ID NO: 3739083 - RNA, 17 nt, Human
gugaacaaagcagccac

SEQ ID NO: 3739084 - RNA, 22 nt, Human
gugaacacauaaauauauuuuu

SEQ ID NO: 3739085 - RNA, 15 nt, Human
gugaacacaucagcu

SEQ ID NO: 3739086 - RNA, 21 nt, Human
gugaacacuagccagacacuc

SEQ ID NO: 3739087 - RNA, 23 nt, Human
gugaaccaaagagacuggagcau

SEQ ID NO: 3739088 - RNA, 21 nt, Human
gugaaccaccacacccagccc

SEQ ID NO: 3739089 - RNA, 15 nt, Human
gugaacccaggacaa

SEQ ID NO: 3739090 - RNA, 20 nt, Human
guguagaguuaagaagcugu

SEQ ID NO: 3739091 - RNA, 17 nt, Human
guguagauuuguuuugu

SEQ ID NO: 3739092 - RNA, 18 nt, Human
guguagauuuuauagugu

SEQ ID NO: 3739093 - RNA, 23 nt, Human
guguagccagguauggcucugca

SEQ ID NO: 3739094 - RNA, 22 nt, Human
guguagccaggucccccugcag

SEQ ID NO: 3739095 - RNA, 16 nt, Human
guguagccuugcccgg

SEQ ID NO: 3739096 - RNA, 11 nt, Human
guguagccuuu

SEQ ID NO: 3739097 - RNA, 12 nt, Human
guguagccuuuu

SEQ ID NO: 3739098 - RNA, 16 nt, Human
guguagcuacagagaa

SEQ ID NO: 3739099 - RNA, 17 nt, Human
guguagcuacagagaaa

SEQ ID NO: 3739100 - RNA, 20 nt, Human
guguagcuacagagaaacca

SEQ ID NO: 3739101 - RNA, 17 nt, Human
guguagcugcaaaaaua

SEQ ID NO: 3739102 - RNA, 23 nt, Human
guguagcugcaaaaauaaucaug

SEQ ID NO: 3739103 - RNA, 18 nt, Human
guguagcugugaccugcu

SEQ ID NO: 3739104 - RNA, 19 nt, Human
guguagcugugaccugcug

SEQ ID NO: 3739105 - RNA, 20 nt, Human
guguagcugugaccugcuga

SEQ ID NO: 3739106 - RNA, 14 nt, Human
guguagcuuugcuc

SEQ ID NO: 3739107 - RNA, 12 nt, Human
guguaggcagac

SEQ ID NO: 3739108 - RNA, 14 nt, Human
guguaggcagacac

SEQ ID NO: 3739109 - RNA, 14 nt, Human
guguaguuaauuua

SEQ ID NO: 3739110 - RNA, 15 nt, Human
guguaguugaacuga

SEQ ID NO: 3739111 - RNA, 12 nt, Human
guguauaaaaau

SEQ ID NO: 3739112 - RNA, 14 nt, Human
guguauaaaaauaa

SEQ ID NO: 3739113 - RNA, 14 nt, Human
guguauaaacaaga

SEQ ID NO: 3739114 - RNA, 17 nt, Human
guguauaaacaagaaaa

SEQ ID NO: 3739115 - RNA, 17 nt, Human
guguauaagugcacaca

SEQ ID NO: 3739116 - RNA, 22 nt, Human
guguauagaagcgauuuaaguu

SEQ ID NO: 3739117 - RNA, 18 nt, Human
guguauagaaguagauua

SEQ ID NO: 3739118 - RNA, 15 nt, Human
guguauauauacaua

SEQ ID NO: 3739119 - RNA, 16 nt, Human
guguauauauacauac

SEQ ID NO: 3739120 - RNA, 13 nt, Human
guguauauaugug

SEQ ID NO: 3739121 - RNA, 18 nt, Human
guguauauauguguauau

SEQ ID NO: 3739122 - RNA, 22 nt, Human
guguauauauguguauauauac

SEQ ID NO: 3739123 - RNA, 13 nt, Human
guguauauggaca

SEQ ID NO: 3739124 - RNA, 17 nt, Human
guguauauguaugugug

SEQ ID NO: 3739125 - RNA, 14 nt, Human
guguauauuauuug

SEQ ID NO: 3739126 - RNA, 17 nt, Human
guguauauuauuuggca

SEQ ID NO: 3739127 - RNA, 12 nt, Human
guguauauuuga

SEQ ID NO: 3739128 - RNA, 13 nt, Human
guguauauuugau

SEQ ID NO: 3739129 - RNA, 14 nt, Human
guguauauuugauu

SEQ ID NO: 3739130 - RNA, 17 nt, Human
guguauauuugauuuau

SEQ ID NO: 3739131 - RNA, 15 nt, Human
guguaucaguguuua

SEQ ID NO: 3739132 - RNA, 19 nt, Human
guguaucaguguuuaugug

SEQ ID NO: 3739133 - RNA, 22 nt, Human
guguauccccccccuguauagu

SEQ ID NO: 3739134 - RNA, 14 nt, Human
guguaucucacacu

SEQ ID NO: 3739135 - RNA, 14 nt, Human
guguaugcacagua

SEQ ID NO: 3739136 - RNA, 21 nt, Human
guguauggaaaaaccauuuga

SEQ ID NO: 3739137 - RNA, 19 nt, Human
guguauggaaauaaaugua

SEQ ID NO: 3739138 - RNA, 20 nt, Human
guguauggagagaaaacaga

SEQ ID NO: 3739139 - RNA, 16 nt, Human
guguaugggugugugu

SEQ ID NO: 3739140 - RNA, 18 nt, Human
guguaugugcgugugugc

SEQ ID NO: 3739141 - RNA, 13 nt, Human
guguauguuuuuc

SEQ ID NO: 3739142 - RNA, 21 nt, Human
guguauguuuuucaguucaaa

SEQ ID NO: 3739143 - RNA, 16 nt, Human
guguauuaaaaaaaac

SEQ ID NO: 3739144 - RNA, 21 nt, Human
guguauucuuaaaaugcaaua

SEQ ID NO: 3739145 - RNA, 19 nt, Human
guguauuuauuuuacagcu

SEQ ID NO: 3739146 - RNA, 19 nt, Human
guguauuuauuuuccuccc

SEQ ID NO: 3739147 - RNA, 19 nt, Human
guguauuucuuauacgcuu

SEQ ID NO: 3739148 - RNA, 21 nt, Human
guguauuuggaaauaaaguca

SEQ ID NO: 3739149 - RNA, 21 nt, Human
gugucaacaccccugugugga

SEQ ID NO: 3739150 - RNA, 14 nt, Human
gugucaaccagaca

SEQ ID NO: 3739151 - RNA, 16 nt, Human
gugucaaccagacaga

SEQ ID NO: 3739152 - RNA, 21 nt, Human
gugucaagcugcucugagcca

SEQ ID NO: 3739153 - RNA, 15 nt, Human
gugucaagcuuccug

SEQ ID NO: 3739154 - RNA, 23 nt, Human
gugucaaguugugcuuguuuaca

SEQ ID NO: 3739155 - RNA, 19 nt, Human
gugucacccaaaccggcag

SEQ ID NO: 3739156 - RNA, 14 nt, Human
gugucaccccagag

SEQ ID NO: 3739157 - RNA, 21 nt, Human
gugucaccccagagccacaca

SEQ ID NO: 3739158 - RNA, 24 nt, Human
gugucaccccagagccacacaugg

SEQ ID NO: 3739159 - RNA, 14 nt, Human
gugucaccugugcu

SEQ ID NO: 3739160 - RNA, 17 nt, Human
gugucaccuuuucuugc

SEQ ID NO: 3739161 - RNA, 13 nt, Human
gugucacuggcug

SEQ ID NO: 3739162 - RNA, 14 nt, Human
gugucacuggcugc

SEQ ID NO: 3739163 - RNA, 18 nt, Human
gugucacuggcugccucc

SEQ ID NO: 3739164 - RNA, 19 nt, Human
gugucacuggcugccucca

SEQ ID NO: 3739165 - RNA, 20 nt, Human
gugucagacccuggaggccc

SEQ ID NO: 3739166 - RNA, 14 nt, Human
gugucaggcugcug

SEQ ID NO: 3739167 - RNA, 16 nt, Human
gugucaggcugcuggc

SEQ ID NO: 3739168 - RNA, 14 nt, Human
gugucagguggggc

SEQ ID NO: 3739169 - RNA, 18 nt, Human
gugucagguggggcagcu

SEQ ID NO: 3739170 - RNA, 18 nt, Human
gugucauaccaggccgcc

SEQ ID NO: 3739171 - RNA, 19 nt, Human
gugucauagaauagcaugu

SEQ ID NO: 3739172 - RNA, 23 nt, Human
gugucauauauggggggccaaca

SEQ ID NO: 3739173 - RNA, 21 nt, Human
gugucaugauucacccccaaa

SEQ ID NO: 3739174 - RNA, 18 nt, Human
gugucauuuaugaaaaga

SEQ ID NO: 3739175 - RNA, 16 nt, Human
gugucauuucucaucc

SEQ ID NO: 3739176 - RNA, 19 nt, Human
guguccaaaggaagacgug

SEQ ID NO: 3739177 - RNA, 15 nt, Human
guguccaacuccagu

SEQ ID NO: 3739178 - RNA, 12 nt, Human
guguccaccccc

SEQ ID NO: 3739179 - RNA, 19 nt, Human
guguccaugcgcucagggc

SEQ ID NO: 3739180 - RNA, 14 nt, Human
guguccaugugugu

SEQ ID NO: 3739181 - RNA, 21 nt, Human
guguccauugacauguacaga

SEQ ID NO: 3739182 - RNA, 23 nt, Human
guguccauugacauguacagaga

SEQ ID NO: 3739183 - RNA, 19 nt, Human
guguccauuuugugaagcc

SEQ ID NO: 3739184 - RNA, 20 nt, Human
guguccauuuugugaagccc

SEQ ID NO: 3739185 - RNA, 21 nt, Human
guguccauuuugugaagcccu

SEQ ID NO: 3739186 - RNA, 20 nt, Human
gugucccaaaaagaaaggag

SEQ ID NO: 3739187 - RNA, 19 nt, Human
gugucccaugacccacccc

SEQ ID NO: 3739188 - RNA, 22 nt, Human
guguccccagcccacuggauca

SEQ ID NO: 3739189 - RNA, 20 nt, Human
guguccccuccacugucaca

SEQ ID NO: 3739190 - RNA, 23 nt, Human
gugucccugcacuugcagacucu

SEQ ID NO: 3739191 - RNA, 14 nt, Human
guguccggucccug

SEQ ID NO: 3739192 - RNA, 14 nt, Human
guguccuacagaaa

SEQ ID NO: 3739193 - RNA, 15 nt, Human
guguccucacggugc

SEQ ID NO: 3739194 - RNA, 18 nt, Human
guguccucuucccucucu

SEQ ID NO: 3739195 - RNA, 16 nt, Human
guguccugaccacccu

SEQ ID NO: 3739196 - RNA, 18 nt, Human
guguccugaccacccucc

SEQ ID NO: 3739197 - RNA, 23 nt, Human
guguccugagccccagggagagg

SEQ ID NO: 3739198 - RNA, 15 nt, Human
guguccugagcucag

SEQ ID NO: 3739199 - RNA, 22 nt, Human
guguccugagcucagcguggag

SEQ ID NO: 3739200 - RNA, 21 nt, Human
guguccugcaccggggccugg

SEQ ID NO: 3739201 - RNA, 16 nt, Human
guguccugccugucug

SEQ ID NO: 3739202 - RNA, 16 nt, Human
guguccuggugcucuc

SEQ ID NO: 3739203 - RNA, 18 nt, Human
guguccuugcaccugcau

SEQ ID NO: 3739204 - RNA, 14 nt, Human
guguccuugugcau

SEQ ID NO: 3739205 - RNA, 16 nt, Human
guguccuuucccucca

SEQ ID NO: 3739206 - RNA, 17 nt, Human
guguccuuucccuccac

SEQ ID NO: 3739207 - RNA, 15 nt, Human
gugucguagccaagg

SEQ ID NO: 3739208 - RNA, 18 nt, Human
gugucuaagauucuagau

SEQ ID NO: 3739209 - RNA, 17 nt, Human
gugucucaggcugccug

SEQ ID NO: 3739210 - RNA, 13 nt, Human
gugucuccaaccc

SEQ ID NO: 3739211 - RNA, 21 nt, Human
gugucuccaaccccccagcac

SEQ ID NO: 3739212 - RNA, 15 nt, Human
gugucuccugcaugc

SEQ ID NO: 3739213 - RNA, 19 nt, Human
gugucucuugguccugcug

SEQ ID NO: 3739214 - RNA, 21 nt, Human
gugucucuugguccugcugca

SEQ ID NO: 3739215 - RNA, 19 nt, Human
gugucucuuuucucuuucu

SEQ ID NO: 3739216 - RNA, 14 nt, Human
gugucugcacccag

SEQ ID NO: 3739217 - RNA, 21 nt, Human
gugucugcacccagggguggg

SEQ ID NO: 3739218 - RNA, 21 nt, Human
gugucugcuuuaaagggccug

SEQ ID NO: 3739219 - RNA, 23 nt, Human
gugucuggaauuguggcuauccu

SEQ ID NO: 3739220 - RNA, 14 nt, Human
gugucuggcugcag

SEQ ID NO: 3739221 - RNA, 13 nt, Human
gugucugggcuga

SEQ ID NO: 3739222 - RNA, 21 nt, Human
gaguacuacaguccucccauc

SEQ ID NO: 3739223 - RNA, 23 nt, Human
gaguacuacaguccucccaucuc

SEQ ID NO: 3739224 - RNA, 16 nt, Human
gaguacuccacacugc

SEQ ID NO: 3739225 - RNA, 17 nt, Human
gaguacuccacacugca

SEQ ID NO: 3739226 - RNA, 15 nt, Human
gaguagaaaauguga

SEQ ID NO: 3739227 - RNA, 23 nt, Human
gaguagaaaggccuuuaaaauuu

SEQ ID NO: 3739228 - RNA, 17 nt, Human
gaguagagguauaauug

SEQ ID NO: 3739229 - RNA, 21 nt, Human
gaguagccaggguguggcccu

SEQ ID NO: 3739230 - RNA, 21 nt, Human
gaguagccagguucugccggu

SEQ ID NO: 3739231 - RNA, 14 nt, Human
gaguagcugggacu

SEQ ID NO: 3739232 - RNA, 19 nt, Human
gaguagcugggacuacagg

SEQ ID NO: 3739233 - RNA, 17 nt, Human
gaguagggcuuaguguu

SEQ ID NO: 3739234 - RNA, 21 nt, Human
gaguagugaagacuccagaaa

SEQ ID NO: 3739235 - RNA, 18 nt, Human
gaguauaagaaaugcaua

SEQ ID NO: 3739236 - RNA, 14 nt, Human
gaguauaugcacuu

SEQ ID NO: 3739237 - RNA, 23 nt, Human
gaguaucuccucgcaagcugggu

SEQ ID NO: 3739238 - RNA, 23 nt, Human
gaguaucucggaccuuucagcug

SEQ ID NO: 3739239 - RNA, 19 nt, Human
gaguauguguuugugugug

SEQ ID NO: 3739240 - RNA, 23 nt, Human
gaguauuaaaauguaugcauguu

SEQ ID NO: 3739241 - RNA, 21 nt, Human
gaguauucucggauaguugcu

SEQ ID NO: 3739242 - RNA, 14 nt, Human
gaguauuggucucc

SEQ ID NO: 3739243 - RNA, 20 nt, Human
gaguauuguuuaaaauguaa

SEQ ID NO: 3739244 - RNA, 17 nt, Human
gaguauuuuugacagaa

SEQ ID NO: 3739245 - RNA, 15 nt, Human
gagucaaaaauuaaa

SEQ ID NO: 3739246 - RNA, 20 nt, Human
gagucaaaacacuuguaauu

SEQ ID NO: 3739247 - RNA, 14 nt, Human
gagucaaggccugc

SEQ ID NO: 3739248 - RNA, 12 nt, Human
gagucacacagu

SEQ ID NO: 3739249 - RNA, 12 nt, Human
gagucacacuca

SEQ ID NO: 3739250 - RNA, 14 nt, Human
gagucaccaagccc

SEQ ID NO: 3739251 - RNA, 15 nt, Human
gagucaccaagccca

SEQ ID NO: 3739252 - RNA, 14 nt, Human
gagucaccuuccag

SEQ ID NO: 3739253 - RNA, 15 nt, Human
gagucaccuucccuu

SEQ ID NO: 3739254 - RNA, 15 nt, Human
gagucacugagacca

SEQ ID NO: 3739255 - RNA, 12 nt, Human
gagucacugccu

SEQ ID NO: 3739256 - RNA, 15 nt, Human
gagucacugccucuc

SEQ ID NO: 3739257 - RNA, 23 nt, Human
gagucacugccucucccuggccc

SEQ ID NO: 3739258 - RNA, 15 nt, Human
gagucagagccaugu

SEQ ID NO: 3739259 - RNA, 15 nt, Human
gagucagcucucugc

SEQ ID NO: 3739260 - RNA, 17 nt, Human
gagucagcucucugccc

SEQ ID NO: 3739261 - RNA, 15 nt, Human
gagucagcuguuucu

SEQ ID NO: 3739262 - RNA, 15 nt, Human
gagucagugccaggu

SEQ ID NO: 3739263 - RNA, 20 nt, Human
gagucauaaaccuuaaguaa

SEQ ID NO: 3739264 - RNA, 16 nt, Human
gagucaugaucucccu

SEQ ID NO: 3739265 - RNA, 18 nt, Human
gagucaugaucucccugc

SEQ ID NO: 3739266 - RNA, 20 nt, Human
gagucaugaucucccugccg

SEQ ID NO: 3739267 - RNA, 13 nt, Human
gagucauuugagu

SEQ ID NO: 3739268 - RNA, 16 nt, Human
gaguccaaacuggaau

SEQ ID NO: 3739269 - RNA, 11 nt, Human
gaguccacucc

SEQ ID NO: 3739270 - RNA, 13 nt, Human
gaguccacuuugu

SEQ ID NO: 3739271 - RNA, 14 nt, Human
gaguccaggcacag

SEQ ID NO: 3739272 - RNA, 15 nt, Human
gaguccaggcacagg

SEQ ID NO: 3739273 - RNA, 14 nt, Human
gaguccaggcccca

SEQ ID NO: 3739274 - RNA, 17 nt, Human
gaguccaucagccucca

SEQ ID NO: 3739275 - RNA, 16 nt, Human
gaguccauucucccag

SEQ ID NO: 3739276 - RNA, 18 nt, Human
gaguccauucucccaggu

SEQ ID NO: 3739277 - RNA, 20 nt, Human
gaguccauucucccagguac

SEQ ID NO: 3739278 - RNA, 19 nt, Human
gagucccacugccucaggu

SEQ ID NO: 3739279 - RNA, 18 nt, Human
gagucccagagcaggagg

SEQ ID NO: 3739280 - RNA, 21 nt, Human
gagucccagagcaggaggccc

SEQ ID NO: 3739281 - RNA, 22 nt, Human
guuacaugcauacuucaaaagu

SEQ ID NO: 3739282 - RNA, 16 nt, Human
guuacauuaauguuaa

SEQ ID NO: 3739283 - RNA, 22 nt, Human
guuacauugcuggucuuguaag

SEQ ID NO: 3739284 - RNA, 19 nt, Human
guuaccauuaaaccaucuc

SEQ ID NO: 3739285 - RNA, 21 nt, Human
guuaccauuaaaccaucuccc

SEQ ID NO: 3739286 - RNA, 21 nt, Human
guuaccauuggaaauuucacg

SEQ ID NO: 3739287 - RNA, 14 nt, Human
guuacccaugaaaa

SEQ ID NO: 3739288 - RNA, 22 nt, Human
guuaccuccaacagaacuaaau

SEQ ID NO: 3739289 - RNA, 17 nt, Human
guuaccucuauauacca

SEQ ID NO: 3739290 - RNA, 12 nt, Human
guuaccuuaaau

SEQ ID NO: 3739291 - RNA, 17 nt, Human
guuacuaacuaaacucu

SEQ ID NO: 3739292 - RNA, 13 nt, Human
guuacuaagaaga

SEQ ID NO: 3739293 - RNA, 23 nt, Human
guuacuaauuggccucuuuaaga

SEQ ID NO: 3739294 - RNA, 15 nt, Human
guuacuaccuccucu

SEQ ID NO: 3739295 - RNA, 16 nt, Human
guuacuagguaacuuc

SEQ ID NO: 3739296 - RNA, 16 nt, Human
guuacuauccuggcuu

SEQ ID NO: 3739297 - RNA, 12 nt, Human
guuacucagccc

SEQ ID NO: 3739298 - RNA, 20 nt, Human
guuacucagggcuccuccca

SEQ ID NO: 3739299 - RNA, 22 nt, Human
guuacucagggcuccucccagc

SEQ ID NO: 3739300 - RNA, 17 nt, Human
guuacugaucaugcauu

SEQ ID NO: 3739301 - RNA, 18 nt, Human
guuacuggauaaauuguu

SEQ ID NO: 3739302 - RNA, 17 nt, Human
guuacuguaaaaugcaa

SEQ ID NO: 3739303 - RNA, 19 nt, Human
guuacuguaaaaugcaaaa

SEQ ID NO: 3739304 - RNA, 13 nt, Human
guuacuguaauuc

SEQ ID NO: 3739305 - RNA, 15 nt, Human
guuacuguguaaacu

SEQ ID NO: 3739306 - RNA, 13 nt, Human
guuacuguguaau

SEQ ID NO: 3739307 - RNA, 18 nt, Human
guuacuguucuugcugcu

SEQ ID NO: 3739308 - RNA, 19 nt, Human
guuacuguucuugcugcua

SEQ ID NO: 3739309 - RNA, 20 nt, Human
guuacuguucuugcugcuag

SEQ ID NO: 3739310 - RNA, 23 nt, Human
guuacuguugugaccugaaguuc

SEQ ID NO: 3739311 - RNA, 16 nt, Human
guuacuucuucucuua

SEQ ID NO: 3739312 - RNA, 14 nt, Human
guuagaaaaaugga

SEQ ID NO: 3739313 - RNA, 13 nt, Human
guuagaacacuau

SEQ ID NO: 3739314 - RNA, 14 nt, Human
guuagaacacuauu

SEQ ID NO: 3739315 - RNA, 22 nt, Human
guuagaauauaggucucuucuc

SEQ ID NO: 3739316 - RNA, 14 nt, Human
guuagaaucuauuu

SEQ ID NO: 3739317 - RNA, 19 nt, Human
guuagaaucuauuuucuau

SEQ ID NO: 3739318 - RNA, 22 nt, Human
guuagaaucuauuuucuaugua

SEQ ID NO: 3739319 - RNA, 16 nt, Human
guuagaaugaggagga

SEQ ID NO: 3739320 - RNA, 13 nt, Human
guuagaauuccuu

SEQ ID NO: 3739321 - RNA, 13 nt, Human
guuagacagccaa

SEQ ID NO: 3739322 - RNA, 23 nt, Human
guuagaccgcucucuuuucugua

SEQ ID NO: 3739323 - RNA, 12 nt, Human
guuagacugcca

SEQ ID NO: 3739324 - RNA, 15 nt, Human
guuagacugccagcu

SEQ ID NO: 3739325 - RNA, 18 nt, Human
guuagagauuuuuuuguu

SEQ ID NO: 3739326 - RNA, 18 nt, Human
guuagagcaggacugaug

SEQ ID NO: 3739327 - RNA, 19 nt, Human
guuagagguucccuuugac

SEQ ID NO: 3739328 - RNA, 14 nt, Human
guuagaugcuacua

SEQ ID NO: 3739329 - RNA, 12 nt, Human
guuagauguuug

SEQ ID NO: 3739330 - RNA, 13 nt, Human
guuagauuaagaa

SEQ ID NO: 3739331 - RNA, 21 nt, Human
guuagcacuguugauguaucu

SEQ ID NO: 3739332 - RNA, 18 nt, Human
guuagcagacaggccccg

SEQ ID NO: 3739333 - RNA, 21 nt, Human
guuagcuaauaaaaagcuuuu

SEQ ID NO: 3739334 - RNA, 12 nt, Human
guuagcuccugu

SEQ ID NO: 3739335 - RNA, 19 nt, Human
guuagcuuuuuaaaacauu

SEQ ID NO: 3739336 - RNA, 13 nt, Human
guuaggagguccu

SEQ ID NO: 3739337 - RNA, 15 nt, Human
guuaggauggcagga

SEQ ID NO: 3739338 - RNA, 14 nt, Human
guuaggcaguauaa

SEQ ID NO: 3739339 - RNA, 19 nt, Human
guuaggccaaagacaaaua

SEQ ID NO: 3739340 - RNA, 22 nt, Human
guuaggccaaagacaaauagua

SEQ ID NO: 3739341 - RNA, 13 nt, Human
guuaggccuggca

SEQ ID NO: 3739342 - RNA, 15 nt, Human
guuaggccuggcaca

SEQ ID NO: 3739343 - RNA, 16 nt, Human
guuaggccuggcacag

SEQ ID NO: 3739344 - RNA, 13 nt, Human
guuaggcugggcc

SEQ ID NO: 3739345 - RNA, 23 nt, Human
guuagggaaaacauuccauccuu

SEQ ID NO: 3739346 - RNA, 13 nt, Human
guuagggaauggc

SEQ ID NO: 3739347 - RNA, 19 nt, Human
guuagggacugaccagcag

SEQ ID NO: 3739348 - RNA, 18 nt, Human
guuagguagagggaguug

SEQ ID NO: 3739349 - RNA, 21 nt, Human
guuagguagagggaguuguca

SEQ ID NO: 3739350 - RNA, 20 nt, Human
guuagguuuaacauaaaggu

SEQ ID NO: 3739351 - RNA, 17 nt, Human
guuaguaugaggcauuu

SEQ ID NO: 3739352 - RNA, 20 nt, Human
guuaguaugaggcauuuguu

SEQ ID NO: 3739353 - RNA, 18 nt, Human
guuagucgugagcucuug

SEQ ID NO: 3739354 - RNA, 21 nt, Human
guuagucuacucuuaagccau

SEQ ID NO: 3739355 - RNA, 22 nt, Human
guuagucuacucuuaagccauc

SEQ ID NO: 3739356 - RNA, 23 nt, Human
guuagucuacucuuaagccaucu

SEQ ID NO: 3739357 - RNA, 13 nt, Human
guuaguggcaccg

SEQ ID NO: 3739358 - RNA, 19 nt, Human
guuaguuauagaugucuag

SEQ ID NO: 3739359 - RNA, 24 nt, Human
guuaguucaaucuggauucauauu

SEQ ID NO: 3739360 - RNA, 19 nt, Human
guuaguuucuccaagcagg

SEQ ID NO: 3739361 - RNA, 22 nt, Human
guuauaaaagugauuguuggca

SEQ ID NO: 3739362 - RNA, 17 nt, Human
guuauaaagugugccac

SEQ ID NO: 3739363 - RNA, 17 nt, Human
guuauaaaucaauguca

SEQ ID NO: 3739364 - RNA, 13 nt, Human
guuauaagacucu

SEQ ID NO: 3739365 - RNA, 14 nt, Human
guuauaagacucuc

SEQ ID NO: 3739366 - RNA, 19 nt, Human
guuauaguauaucuggaca

SEQ ID NO: 3739367 - RNA, 17 nt, Human
guuauagugcaauauau

SEQ ID NO: 3739368 - RNA, 10 nt, Human
guuauauaaa

SEQ ID NO: 3739369 - RNA, 20 nt, Human
guuauauaaagagaaaauug

SEQ ID NO: 3739370 - RNA, 14 nt, Human
guuauauaauuuag

SEQ ID NO: 3739371 - RNA, 13 nt, Human
guuauauagguuu

SEQ ID NO: 3739372 - RNA, 14 nt, Human
guuauauauaaaua

SEQ ID NO: 3739373 - RNA, 19 nt, Human
guuauauauaaauauauua

SEQ ID NO: 3739374 - RNA, 15 nt, Human
guuauauuucagaug

SEQ ID NO: 3739375 - RNA, 23 nt, Human
guuauauuucagauguaauguuu

SEQ ID NO: 3739376 - RNA, 14 nt, Human
guuauauuuugcag

SEQ ID NO: 3739377 - RNA, 20 nt, Human
guuaucaccuagcugaaugu

SEQ ID NO: 3739378 - RNA, 13 nt, Human
guuaucagugcuu

SEQ ID NO: 3739379 - RNA, 17 nt, Human
guuaucaugaauuuuaa

SEQ ID NO: 3739380 - RNA, 22 nt, Human
guuaucaugaauuuuaaaguau

SEQ ID NO: 3739381 - RNA, 22 nt, Human
guuaucauguuaguaauaccuc

SEQ ID NO: 3739382 - RNA, 16 nt, Human
guuaucuaaaagaaau

SEQ ID NO: 3739383 - RNA, 19 nt, Human
guuaucugaagucagaucu

SEQ ID NO: 3739384 - RNA, 17 nt, Human
guuaucuggcuucaaau

SEQ ID NO: 3739385 - RNA, 19 nt, Human
guuaucugguuuuaaaaga

SEQ ID NO: 3739386 - RNA, 17 nt, Human
guuaucuguuugagaaa

SEQ ID NO: 3739387 - RNA, 19 nt, Human
guuaucuuauacuguacaa

SEQ ID NO: 3739388 - RNA, 20 nt, Human
guuaucuuauacuguacaau

SEQ ID NO: 3739389 - RNA, 21 nt, Human
guuaucuucucaaguucuaag

SEQ ID NO: 3739390 - RNA, 18 nt, Human
guuaugaaagaauauauu

SEQ ID NO: 3739391 - RNA, 18 nt, Human
guuaugauaaaaaauuuu

SEQ ID NO: 3739392 - RNA, 16 nt, Human
guuaugaugugcuuaa

SEQ ID NO: 3739393 - RNA, 16 nt, Human
guuaugcaaaagcaag

SEQ ID NO: 3739394 - RNA, 22 nt, Human
guuaugcaagggacuguguguu

SEQ ID NO: 3739395 - RNA, 13 nt, Human
guuaugcaucauu

SEQ ID NO: 3739396 - RNA, 21 nt, Human
guuauguaaaaggccaaaccu

SEQ ID NO: 3739397 - RNA, 13 nt, Human
guuauguacugua

SEQ ID NO: 3739398 - RNA, 14 nt, Human
guuauguacuguac

SEQ ID NO: 3739399 - RNA, 15 nt, Human
guuauguacuguacu

SEQ ID NO: 3739400 - RNA, 19 nt, Human
guuauguacuguacuaauu

SEQ ID NO: 3739401 - RNA, 18 nt, Human
guuaugucuguuuaagaa

SEQ ID NO: 3739402 - RNA, 22 nt, Human
guuaugugaaugaucucucuga

SEQ ID NO: 3739403 - RNA, 20 nt, Human
guuauguguaugugccauuu

SEQ ID NO: 3739404 - RNA, 11 nt, Human
guuaugugucu

SEQ ID NO: 3739405 - RNA, 19 nt, Human
guuauguguguauauguau

SEQ ID NO: 3739406 - RNA, 21 nt, Human
guuauuaacuuuaauguuuuu

SEQ ID NO: 3739407 - RNA, 14 nt, Human
guuauuauaauugu

SEQ ID NO: 3739408 - RNA, 18 nt, Human
guuauuauaauuguauca

SEQ ID NO: 3739409 - RNA, 22 nt, Human
guuauuaucugggcuuauaucu

SEQ ID NO: 3739410 - RNA, 23 nt, Human
guuauucauucugugaucauuua

SEQ ID NO: 3739411 - RNA, 14 nt, Human
guuauugaaaaaaa

SEQ ID NO: 3739412 - RNA, 19 nt, Human
guuauugagagagaugugu

SEQ ID NO: 3739413 - RNA, 21 nt, Human
guuauugagagagauguguaa

SEQ ID NO: 3739414 - RNA, 18 nt, Human
guuauugauaaguucaua

SEQ ID NO: 3739415 - RNA, 21 nt, Human
guuauugauaaguucauacau

SEQ ID NO: 3739416 - RNA, 13 nt, Human
guuauugcaguuu

SEQ ID NO: 3739417 - RNA, 23 nt, Human
guuauugcaguuuaucauucaag

SEQ ID NO: 3739418 - RNA, 20 nt, Human
guuauugggcaagugauuga

SEQ ID NO: 3739419 - RNA, 14 nt, Human
guuauugugaauga

SEQ ID NO: 3739420 - RNA, 23 nt, Human
guuauuuaacagcugaauuaucu

SEQ ID NO: 3739421 - RNA, 20 nt, Human
guuauuuauaaucacuuuuu

SEQ ID NO: 3739422 - RNA, 22 nt, Human
guuauuuauucugggaauguau

SEQ ID NO: 3739423 - RNA, 18 nt, Human
guuauuucccuuuagcug

SEQ ID NO: 3739424 - RNA, 14 nt, Human
guuauuucuuguuu

SEQ ID NO: 3739425 - RNA, 22 nt, Human
guuauuugaaaacauguuuauu

SEQ ID NO: 3739426 - RNA, 18 nt, Human
guuauuuguuauuuucag

SEQ ID NO: 3739427 - RNA, 17 nt, Human
guuauuuguuuaccacu

SEQ ID NO: 3739428 - RNA, 15 nt, Human
guuauuuuacuuuuu

SEQ ID NO: 3739429 - RNA, 13 nt, Human
guuauuuuaguuu

SEQ ID NO: 3739430 - RNA, 18 nt, Human
gugccagcaaagccccau

SEQ ID NO: 3739431 - RNA, 15 nt, Human
gugccagccugaggc

SEQ ID NO: 3739432 - RNA, 18 nt, Human
gugccaggacuccccagg

SEQ ID NO: 3739433 - RNA, 12 nt, Human
gugccaggcccg

SEQ ID NO: 3739434 - RNA, 13 nt, Human
gugccaggcccgg

SEQ ID NO: 3739435 - RNA, 16 nt, Human
gugccagggcagcacu

SEQ ID NO: 3739436 - RNA, 22 nt, Human
gugccaggugaggucagcacau

SEQ ID NO: 3739437 - RNA, 16 nt, Human
gugccaguauuuuaaa

SEQ ID NO: 3739438 - RNA, 17 nt, Human
gugccagucaagaagaa

SEQ ID NO: 3739439 - RNA, 18 nt, Human
gugccagucgcgcugccu

SEQ ID NO: 3739440 - RNA, 22 nt, Human
gugccagucgcgcugccugugu

SEQ ID NO: 3739441 - RNA, 20 nt, Human
gugcccaagaauagaugcug

SEQ ID NO: 3739442 - RNA, 12 nt, Human
gugcccaagcca

SEQ ID NO: 3739443 - RNA, 20 nt, Human
gugcccaagccagaggcugg

SEQ ID NO: 3739444 - RNA, 12 nt, Human
gugcccacagcc

SEQ ID NO: 3739445 - RNA, 15 nt, Human
gugcccacaucccag

SEQ ID NO: 3739446 - RNA, 21 nt, Human
gugcccacauguguccauccc

SEQ ID NO: 3739447 - RNA, 17 nt, Human
gugcccagaacuucccu

SEQ ID NO: 3739448 - RNA, 19 nt, Human
gugcccagaacuucccuga

SEQ ID NO: 3739449 - RNA, 20 nt, Human
gugcccagcuauaccugugc

SEQ ID NO: 3739450 - RNA, 12 nt, Human
gugcccagcuca

SEQ ID NO: 3739451 - RNA, 14 nt, Human
gugcccaugggcac

SEQ ID NO: 3739452 - RNA, 16 nt, Human
gugcccaugggcacug

SEQ ID NO: 3739453 - RNA, 19 nt, Human
gugcccaugggcacugcug

SEQ ID NO: 3739454 - RNA, 14 nt, Human
gugccccaggacca

SEQ ID NO: 3739455 - RNA, 16 nt, Human
gugccccaugccuguc

SEQ ID NO: 3739456 - RNA, 22 nt, Human
gugcccccaggguccugggagg

SEQ ID NO: 3739457 - RNA, 22 nt, Human
gugccccccauccuggcccauc

SEQ ID NO: 3739458 - RNA, 13 nt, Human
gugccccccuugc

SEQ ID NO: 3739459 - RNA, 17 nt, Human
gugcccccuccucuccc

SEQ ID NO: 3739460 - RNA, 17 nt, Human
gugcccccucuaccauu

SEQ ID NO: 3739461 - RNA, 21 nt, Human
gugccccucuccuucuuagcu

SEQ ID NO: 3739462 - RNA, 22 nt, Human
gugccccugcacuccagccuga

SEQ ID NO: 3739463 - RNA, 15 nt, Human
gugccccuuccgcca

SEQ ID NO: 3739464 - RNA, 17 nt, Human
gugccccuuccgccacu

SEQ ID NO: 3739465 - RNA, 19 nt, Human
gugccccuuccgccacugg

SEQ ID NO: 3739466 - RNA, 17 nt, Human
gugcccucaccacccac

SEQ ID NO: 3739467 - RNA, 20 nt, Human
gugcccuccacagccgcagc

SEQ ID NO: 3739468 - RNA, 14 nt, Human
gugcccuccacugc

SEQ ID NO: 3739469 - RNA, 20 nt, Human
gugcccuccacugcccucug

SEQ ID NO: 3739470 - RNA, 13 nt, Human
gugcccucuccca

SEQ ID NO: 3739471 - RNA, 15 nt, Human
gugcccucucccacc

SEQ ID NO: 3739472 - RNA, 17 nt, Human
gugcccucucccacccu

SEQ ID NO: 3739473 - RNA, 22 nt, Human
gugcccucucccacccucuucc

SEQ ID NO: 3739474 - RNA, 15 nt, Human
gugcccucugggcuc

SEQ ID NO: 3739475 - RNA, 17 nt, Human
gugcccucugggcucug

SEQ ID NO: 3739476 - RNA, 23 nt, Human
gugcccugguggagaaagcacug

SEQ ID NO: 3739477 - RNA, 17 nt, Human
gugccgccgccucgccc

SEQ ID NO: 3739478 - RNA, 22 nt, Human
gugccgccgccucgcccaccgc

SEQ ID NO: 3739479 - RNA, 21 nt, Human
gugccgccugcacuccucagg

SEQ ID NO: 3739480 - RNA, 13 nt, Human
gugccguggcacc

SEQ ID NO: 3739481 - RNA, 18 nt, Human
gugccgugugagugugac

SEQ ID NO: 3739482 - RNA, 19 nt, Human
gugccgugugagugugaca

SEQ ID NO: 3739483 - RNA, 21 nt, Human
gugccgugugagugugacagg

SEQ ID NO: 3739484 - RNA, 23 nt, Human
gugccgugugagugugacagggc

SEQ ID NO: 3739485 - RNA, 21 nt, Human
gugccguuacucuccaaccug

SEQ ID NO: 3739486 - RNA, 16 nt, Human
gugccuaaauaaguua

SEQ ID NO: 3739487 - RNA, 18 nt, Human
gugccuaggccugggcag

SEQ ID NO: 3739488 - RNA, 20 nt, Human
gugccuaggccugggcagug

SEQ ID NO: 3739489 - RNA, 16 nt, Human
gugccuaguauugaca

SEQ ID NO: 3739490 - RNA, 19 nt, Human
gugccuauugcuagagcuc

SEQ ID NO: 3739491 - RNA, 15 nt, Human
gugccucaagaggaa

SEQ ID NO: 3739492 - RNA, 22 nt, Human
gugccucaagaggaaugaaaaa

SEQ ID NO: 3739493 - RNA, 17 nt, Human
gugccuccaccaccacu

SEQ ID NO: 3739494 - RNA, 22 nt, Human
gugccuccaccaccacuggcca

SEQ ID NO: 3739495 - RNA, 16 nt, Human
gugccuccucccuccc

SEQ ID NO: 3739496 - RNA, 20 nt, Human
gugccucgcuccccacucug

SEQ ID NO: 3739497 - RNA, 12 nt, Human
gugccucucccu

SEQ ID NO: 3739498 - RNA, 22 nt, Human
gugccucucccugcugcuccua

SEQ ID NO: 3739499 - RNA, 23 nt, Human
gugccucucccugcugcuccuag

SEQ ID NO: 3739500 - RNA, 15 nt, Human
gugccucugccuguc

SEQ ID NO: 3739501 - RNA, 22 nt, Human
gugccucuggaggccucugggc

SEQ ID NO: 3739502 - RNA, 21 nt, Human
gugccugacacacuaaccaag

SEQ ID NO: 3739503 - RNA, 16 nt, Human
gugccugagaggcagg

SEQ ID NO: 3739504 - RNA, 17 nt, Human
gugccugagaggcaggc

SEQ ID NO: 3739505 - RNA, 12 nt, Human
gugccugagagu

SEQ ID NO: 3739506 - RNA, 14 nt, Human
gugccugcaccagg

SEQ ID NO: 3739507 - RNA, 18 nt, Human
gugccugcaccaggagac

SEQ ID NO: 3739508 - RNA, 23 nt, Human
gugccugccugggaguuuuguau

SEQ ID NO: 3739509 - RNA, 21 nt, Human
gugccugcuucagccucccac

SEQ ID NO: 3739510 - RNA, 12 nt, Human
gugccuggagcu

SEQ ID NO: 3739511 - RNA, 12 nt, Human
gugccuggccug

SEQ ID NO: 3739512 - RNA, 20 nt, Human
gugccuggcucagagccagu

SEQ ID NO: 3739513 - RNA, 22 nt, Human
gugccuggguggacauggcccc

SEQ ID NO: 3739514 - RNA, 15 nt, Human
gugccuuaccuccug

SEQ ID NO: 3739515 - RNA, 17 nt, Human
gugccuuaccuccugcc

SEQ ID NO: 3739516 - RNA, 20 nt, Human
gugccuuaccuccugcccag

SEQ ID NO: 3739517 - RNA, 23 nt, Human
gugccuuauggaacacucugaga

SEQ ID NO: 3739518 - RNA, 15 nt, Human
gugccuucagcucua

SEQ ID NO: 3739519 - RNA, 12 nt, Human
gugccuucauuu

SEQ ID NO: 3739520 - RNA, 22 nt, Human
gugccuuccagauccucucugg

SEQ ID NO: 3739521 - RNA, 23 nt, Human
gugccuuccagauccucucuggg

SEQ ID NO: 3739522 - RNA, 12 nt, Human
gugccuuccaua

SEQ ID NO: 3739523 - RNA, 22 nt, Human
gugccuuccauaauuaugacag

SEQ ID NO: 3739524 - RNA, 22 nt, Human
gugccuuccaugucggccucua

SEQ ID NO: 3739525 - RNA, 15 nt, Human
gugccuucucucucc

SEQ ID NO: 3739526 - RNA, 19 nt, Human
gugccuucuucagggccug

SEQ ID NO: 3739527 - RNA, 17 nt, Human
gugccuuugcagcucag

SEQ ID NO: 3739528 - RNA, 15 nt, Human
gugccuuuugcaccc

SEQ ID NO: 3739529 - RNA, 16 nt, Human
gugccuuuugcacccc

SEQ ID NO: 3739530 - RNA, 14 nt, Human
gugccuuuugccau

SEQ ID NO: 3739531 - RNA, 14 nt, Human
gugcgaauggacuu

SEQ ID NO: 3739532 - RNA, 18 nt, Human
gugcgaucucggcucagu

SEQ ID NO: 3739533 - RNA, 13 nt, Human
gugcgcccagggc

SEQ ID NO: 3739534 - RNA, 14 nt, Human
gugcgcccagggcu

SEQ ID NO: 3739535 - RNA, 21 nt, Human
gugcgcuaaacuuuucugaua

SEQ ID NO: 3739536 - RNA, 22 nt, Human
gugcgcucuguggaugccaggg

SEQ ID NO: 3739537 - RNA, 22 nt, Human
gugcgcugggcacuucccugcu

SEQ ID NO: 3739538 - RNA, 16 nt, Human
gugcggcuggccaugg

SEQ ID NO: 3739539 - RNA, 15 nt, Human
gugcgguggcucacg

SEQ ID NO: 3739540 - RNA, 19 nt, Human
gugcguaugcaguguagau

SEQ ID NO: 3739541 - RNA, 13 nt, Human
gugcgugaaugua

SEQ ID NO: 3739542 - RNA, 12 nt, Human
gugcgugcucag

SEQ ID NO: 3739543 - RNA, 21 nt, Human
gugcguggaaugcccuucacu

SEQ ID NO: 3739544 - RNA, 12 nt, Human
gugcguggguga

SEQ ID NO: 3739545 - RNA, 14 nt, Human
gugcgugggugaag

SEQ ID NO: 3739546 - RNA, 13 nt, Human
gugcguggugcga

SEQ ID NO: 3739547 - RNA, 15 nt, Human
gugcguggugguccc

SEQ ID NO: 3739548 - RNA, 19 nt, Human
gugcgugguggucccuggg

SEQ ID NO: 3739549 - RNA, 20 nt, Human
gugcgugguggucccugggu

SEQ ID NO: 3739550 - RNA, 13 nt, Human
gugcguguguaga

SEQ ID NO: 3739551 - RNA, 13 nt, Human
gugcgugugugca

SEQ ID NO: 3739552 - RNA, 13 nt, Human
gugcuaaaaaugg

SEQ ID NO: 3739553 - RNA, 21 nt, Human
gugcuaaaaaugggacuucuu

SEQ ID NO: 3739554 - RNA, 22 nt, Human
gugcuaaaaaugggacuucuuu

SEQ ID NO: 3739555 - RNA, 14 nt, Human
gugcuaaacgugua

SEQ ID NO: 3739556 - RNA, 13 nt, Human
gugcuaagguucu

SEQ ID NO: 3739557 - RNA, 14 nt, Human
gugcuaagguucua

SEQ ID NO: 3739558 - RNA, 16 nt, Human
gugcuaagguucuaag

SEQ ID NO: 3739559 - RNA, 13 nt, Human
gugcuaaguguga

SEQ ID NO: 3739560 - RNA, 16 nt, Human
gugcuaagugugaacu

SEQ ID NO: 3739561 - RNA, 17 nt, Human
gugcuaagugugaacug

SEQ ID NO: 3739562 - RNA, 15 nt, Human
gugcuaauuuugaaa

SEQ ID NO: 3739563 - RNA, 20 nt, Human
gugcuacaaaaacacagcaa

SEQ ID NO: 3739564 - RNA, 19 nt, Human
gugcuaccuggguccuuuu

SEQ ID NO: 3739565 - RNA, 19 nt, Human
gugcuacuggggaaacugg

SEQ ID NO: 3739566 - RNA, 20 nt, Human
gugcuacugucuuuggaaaa

SEQ ID NO: 3739567 - RNA, 22 nt, Human
gugcuaggaacacuccuucaca

SEQ ID NO: 3739568 - RNA, 20 nt, Human
gugcuagggaaacuucccgu

SEQ ID NO: 3739569 - RNA, 15 nt, Human
gugcuauaguauuug

SEQ ID NO: 3739570 - RNA, 20 nt, Human
gugcuauauauauaaauauu

SEQ ID NO: 3739571 - RNA, 22 nt, Human
gugcuaucucccccagccccau

SEQ ID NO: 3739572 - RNA, 12 nt, Human
gugcuauguucu

SEQ ID NO: 3739573 - RNA, 16 nt, Human
gugcuauuugucaucu

SEQ ID NO: 3739574 - RNA, 21 nt, Human
gugcuauuuuguuuguuuugu

SEQ ID NO: 3739575 - RNA, 13 nt, Human
gugcucaaggcca

SEQ ID NO: 3739576 - RNA, 16 nt, Human
gugcucagcccugagg

SEQ ID NO: 3739577 - RNA, 18 nt, Human
gugcucaggacucagaag

SEQ ID NO: 3739578 - RNA, 22 nt, Human
gugcucaggacucagaagccuc

SEQ ID NO: 3739579 - RNA, 13 nt, Human
gugcucagggcua

SEQ ID NO: 3739580 - RNA, 12 nt, Human
guuauuuucagu

SEQ ID NO: 3739581 - RNA, 12 nt, Human
guuauuuucuac

SEQ ID NO: 3739582 - RNA, 18 nt, Human
guuauuuugauguaaaga

SEQ ID NO: 3739583 - RNA, 20 nt, Human
guuauuuugauguaaagaug

SEQ ID NO: 3739584 - RNA, 17 nt, Human
guuauuuuguuuuuccu

SEQ ID NO: 3739585 - RNA, 20 nt, Human
guuauuuuuacauucugaau

SEQ ID NO: 3739586 - RNA, 15 nt, Human
guuauuuuuauacag

SEQ ID NO: 3739587 - RNA, 20 nt, Human
guuauuuuuauacaguagug

SEQ ID NO: 3739588 - RNA, 23 nt, Human
guuauuuuuauaucagccugagu

SEQ ID NO: 3739589 - RNA, 18 nt, Human
guuauuuuucaaggaagg

SEQ ID NO: 3739590 - RNA, 15 nt, Human
guuauuuuuguacau

SEQ ID NO: 3739591 - RNA, 22 nt, Human
guuauuuuuguuucuuccaaag

SEQ ID NO: 3739592 - RNA, 14 nt, Human
guucaaaauucuaa

SEQ ID NO: 3739593 - RNA, 21 nt, Human
guucaaagauauuuugcuuug

SEQ ID NO: 3739594 - RNA, 13 nt, Human
guucaaagucaug

SEQ ID NO: 3739595 - RNA, 19 nt, Human
guucaaagucaugauguuu

SEQ ID NO: 3739596 - RNA, 20 nt, Human
guucaaagucaugauguuuu

SEQ ID NO: 3739597 - RNA, 12 nt, Human
guucaaaugugu

SEQ ID NO: 3739598 - RNA, 14 nt, Human
guucaacuuauuaa

SEQ ID NO: 3739599 - RNA, 17 nt, Human
guucaagcgauucucuu

SEQ ID NO: 3739600 - RNA, 19 nt, Human
guucaagcgauucuucugc

SEQ ID NO: 3739601 - RNA, 14 nt, Human
guucaaggaccaac

SEQ ID NO: 3739602 - RNA, 23 nt, Human
guucaaggaccaacaagggcagu

SEQ ID NO: 3739603 - RNA, 22 nt, Human
guucaaggucacuguuuccugg

SEQ ID NO: 3739604 - RNA, 23 nt, Human
guucaagugauucucaugccuca

SEQ ID NO: 3739605 - RNA, 23 nt, Human
guucaauaaagcacugagcaagu

SEQ ID NO: 3739606 - RNA, 13 nt, Human
guucaauuagaau

SEQ ID NO: 3739607 - RNA, 19 nt, Human
guucaauuauuucccccau

SEQ ID NO: 3739608 - RNA, 23 nt, Human
guucaauucucauuugucacaca

SEQ ID NO: 3739609 - RNA, 14 nt, Human
guucacacccugca

SEQ ID NO: 3739610 - RNA, 15 nt, Human
guucacacccugcaa

SEQ ID NO: 3739611 - RNA, 15 nt, Human
guucacaccugcaga

SEQ ID NO: 3739612 - RNA, 17 nt, Human
guucacauuagaauuag

SEQ ID NO: 3739613 - RNA, 12 nt, Human
guucaccccucc

SEQ ID NO: 3739614 - RNA, 14 nt, Human
guucaccuuuguag

SEQ ID NO: 3739615 - RNA, 17 nt, Human
guucaccuuuguagcac

SEQ ID NO: 3739616 - RNA, 15 nt, Human
guucacgcaacuuga

SEQ ID NO: 3739617 - RNA, 19 nt, Human
guucacgugcagcucaagg

SEQ ID NO: 3739618 - RNA, 15 nt, Human
guucacuaaagcagu

SEQ ID NO: 3739619 - RNA, 24 nt, Human
guucacucuacuuagcaugucccu

SEQ ID NO: 3739620 - RNA, 19 nt, Human
guucacucuccauuuaaua

SEQ ID NO: 3739621 - RNA, 18 nt, Human
guucacucuuggagccug

SEQ ID NO: 3739622 - RNA, 20 nt, Human
guucacucuuggagccugca

SEQ ID NO: 3739623 - RNA, 14 nt, Human
guucacugaagacg

SEQ ID NO: 3739624 - RNA, 19 nt, Human
guucacugcaaccuccgcc

SEQ ID NO: 3739625 - RNA, 16 nt, Human
guucacuucaucuucu

SEQ ID NO: 3739626 - RNA, 21 nt, Human
guucacuucaucuucucagcu

SEQ ID NO: 3739627 - RNA, 16 nt, Human
guucacuuuugacaaa

SEQ ID NO: 3739628 - RNA, 20 nt, Human
guucacuuuugacaaaggca

SEQ ID NO: 3739629 - RNA, 21 nt, Human
guucagaaaugcugccugccu

SEQ ID NO: 3739630 - RNA, 14 nt, Human
guucagaagaaauu

SEQ ID NO: 3739631 - RNA, 13 nt, Human
guucagagcugcc

SEQ ID NO: 3739632 - RNA, 17 nt, Human
guucagagcugcccucu

SEQ ID NO: 3739633 - RNA, 20 nt, Human
guucagagcugcccucuccu

SEQ ID NO: 3739634 - RNA, 23 nt, Human
guucagagcugcccucuccuggg

SEQ ID NO: 3739635 - RNA, 13 nt, Human
guucagaguuuuc

SEQ ID NO: 3739636 - RNA, 20 nt, Human
guucagaucuuaauauaaau

SEQ ID NO: 3739637 - RNA, 19 nt, Human
guucagcauggcauccaag

SEQ ID NO: 3739638 - RNA, 17 nt, Human
guucagccccuccucug

SEQ ID NO: 3739639 - RNA, 22 nt, Human
guucagccccuccucugccacc

SEQ ID NO: 3739640 - RNA, 13 nt, Human
guucagccugccu

SEQ ID NO: 3739641 - RNA, 13 nt, Human
guucagcuccagc

SEQ ID NO: 3739642 - RNA, 18 nt, Human
guucagcuccagcucacc

SEQ ID NO: 3739643 - RNA, 21 nt, Human
guucagcuccagcucaccagc

SEQ ID NO: 3739644 - RNA, 12 nt, Human
guucagcuuggg

SEQ ID NO: 3739645 - RNA, 20 nt, Human
guucaggagucccaaggaaa

SEQ ID NO: 3739646 - RNA, 15 nt, Human
guucaggggacucag

SEQ ID NO: 3739647 - RNA, 20 nt, Human
guucaggggacucagcccug

SEQ ID NO: 3739648 - RNA, 17 nt, Human
guucaggguuggccccu

SEQ ID NO: 3739649 - RNA, 18 nt, Human
guucaggguuggccccug

SEQ ID NO: 3739650 - RNA, 19 nt, Human
guucaggguuggccccugc

SEQ ID NO: 3739651 - RNA, 14 nt, Human
guucaguaccacau

SEQ ID NO: 3739652 - RNA, 17 nt, Human
guucaguaccuggagga

SEQ ID NO: 3739653 - RNA, 13 nt, Human
guucagucuuuca

SEQ ID NO: 3739654 - RNA, 17 nt, Human
guucaguggcagggcuc

SEQ ID NO: 3739655 - RNA, 16 nt, Human
guucaguuacagaaag

SEQ ID NO: 3739656 - RNA, 17 nt, Human
guucaguuacagaaagu

SEQ ID NO: 3739657 - RNA, 19 nt, Human
guucauaacagugccauug

SEQ ID NO: 3739658 - RNA, 9 nt, Human
guucauaca

SEQ ID NO: 3739659 - RNA, 13 nt, Human
guucauacauauu

SEQ ID NO: 3739660 - RNA, 23 nt, Human
guucauacauauuuuuguagcac

SEQ ID NO: 3739661 - RNA, 13 nt, Human
guucauaccuaag

SEQ ID NO: 3739662 - RNA, 20 nt, Human
guucauagggucucuucagg

SEQ ID NO: 3739663 - RNA, 19 nt, Human
guucauauguaccauguac

SEQ ID NO: 3739664 - RNA, 22 nt, Human
guucauauguaccauguacaug

SEQ ID NO: 3739665 - RNA, 16 nt, Human
guucaucaaugaauga

SEQ ID NO: 3739666 - RNA, 13 nt, Human
guucaucaguguu

SEQ ID NO: 3739667 - RNA, 14 nt, Human
guucaucauccaga

SEQ ID NO: 3739668 - RNA, 19 nt, Human
guucauccaauccucacug

SEQ ID NO: 3739669 - RNA, 16 nt, Human
guucauccauucuauu

SEQ ID NO: 3739670 - RNA, 18 nt, Human
guucauccuauuguugau

SEQ ID NO: 3739671 - RNA, 12 nt, Human
guucaugaaaga

SEQ ID NO: 3739672 - RNA, 12 nt, Human
guucaugacaau

SEQ ID NO: 3739673 - RNA, 14 nt, Human
guucaugagaaucu

SEQ ID NO: 3739674 - RNA, 22 nt, Human
guucauggaacgcguugaaauu

SEQ ID NO: 3739675 - RNA, 18 nt, Human
guucauggauuacuucuc

SEQ ID NO: 3739676 - RNA, 16 nt, Human
guucauguagagaaaa

SEQ ID NO: 3739677 - RNA, 10 nt, Human
guucauguuu

SEQ ID NO: 3739678 - RNA, 14 nt, Human
guucauguuugcuu

SEQ ID NO: 3739679 - RNA, 16 nt, Human
guucauuaaagcauga

SEQ ID NO: 3739680 - RNA, 20 nt, Human
guucauuaaagcaugaaugg

SEQ ID NO: 3739681 - RNA, 19 nt, Human
guucauuagaaauauuuua

SEQ ID NO: 3739682 - RNA, 17 nt, Human
guucauucauauuacaa

SEQ ID NO: 3739683 - RNA, 15 nt, Human
guucauuccuccagg

SEQ ID NO: 3739684 - RNA, 18 nt, Human
guucauugcaauuaaacu

SEQ ID NO: 3739685 - RNA, 20 nt, Human
guucauuguaauguuacuga

SEQ ID NO: 3739686 - RNA, 21 nt, Human
guucauuguaauguuacugau

SEQ ID NO: 3739687 - RNA, 22 nt, Human
guucauuguaauguuacugauc

SEQ ID NO: 3739688 - RNA, 15 nt, Human
guucauuucauccuu

SEQ ID NO: 3739689 - RNA, 13 nt, Human
guucauuuccuca

SEQ ID NO: 3739690 - RNA, 13 nt, Human
guucauuugugua

SEQ ID NO: 3739691 - RNA, 17 nt, Human
guucauuugugugcuca

SEQ ID NO: 3739692 - RNA, 17 nt, Human
guucauuuugagcugaa

SEQ ID NO: 3739693 - RNA, 19 nt, Human
guuccaaaugaauguuguc

SEQ ID NO: 3739694 - RNA, 15 nt, Human
guuccaaauucaguu

SEQ ID NO: 3739695 - RNA, 14 nt, Human
guuccaagacauug

SEQ ID NO: 3739696 - RNA, 17 nt, Human
guuccaagacauuguca

SEQ ID NO: 3739697 - RNA, 20 nt, Human
guuccaagagucuaaagaug

SEQ ID NO: 3739698 - RNA, 18 nt, Human
guuccaagucuuugcuau

SEQ ID NO: 3739699 - RNA, 14 nt, Human
guuccaauaaacag

SEQ ID NO: 3739700 - RNA, 16 nt, Human
guuccaauccuggcuc

SEQ ID NO: 3739701 - RNA, 14 nt, Human
guuccacagaggac

SEQ ID NO: 3739702 - RNA, 21 nt, Human
guuccaccccaagagaacucg

SEQ ID NO: 3739703 - RNA, 21 nt, Human
guuccacgucccccuggggcu

SEQ ID NO: 3739704 - RNA, 16 nt, Human
guuccacguguuuuau

SEQ ID NO: 3739705 - RNA, 12 nt, Human
guuccacuaacc

SEQ ID NO: 3739706 - RNA, 12 nt, Human
guuccacugaga

SEQ ID NO: 3739707 - RNA, 19 nt, Human
guuccacuuauagccucug

SEQ ID NO: 3739708 - RNA, 17 nt, Human
guuccagaagugugacu

SEQ ID NO: 3739709 - RNA, 14 nt, Human
guuccagcaccaca

SEQ ID NO: 3739710 - RNA, 21 nt, Human
guuccagcagaugccacauaa

SEQ ID NO: 3739711 - RNA, 15 nt, Human
guuccagccugccac

SEQ ID NO: 3739712 - RNA, 12 nt, Human
guuccagcucuu

SEQ ID NO: 3739713 - RNA, 16 nt, Human
guuccagcucuuugaa

SEQ ID NO: 3739714 - RNA, 22 nt, Human
guuccaucuccuauaaucuguc

SEQ ID NO: 3739715 - RNA, 16 nt, Human
guuccaugaugcuggg

SEQ ID NO: 3739716 - RNA, 21 nt, Human
guuccauugaagccgacucug

SEQ ID NO: 3739717 - RNA, 23 nt, Human
guuccauugaagccgacucuggc

SEQ ID NO: 3739718 - RNA, 23 nt, Human
guucccaagagcaucaugccucu

SEQ ID NO: 3739719 - RNA, 21 nt, Human
guucccacauuaaagaagacc

SEQ ID NO: 3739720 - RNA, 19 nt, Human
guucccaccaggcugcuca

SEQ ID NO: 3739721 - RNA, 21 nt, Human
guucccagugacacuucagag

SEQ ID NO: 3739722 - RNA, 20 nt, Human
guucccaguuggagcuccag

SEQ ID NO: 3739723 - RNA, 16 nt, Human
guucccauuugcuccu

SEQ ID NO: 3739724 - RNA, 15 nt, Human
guuccccaagacauu

SEQ ID NO: 3739725 - RNA, 12 nt, Human
guuccccagaga

SEQ ID NO: 3739726 - RNA, 14 nt, Human
guuccccagagaaa

SEQ ID NO: 3739727 - RNA, 13 nt, Human
guucccccagccc

SEQ ID NO: 3739728 - RNA, 17 nt, Human
guucccccagcccugug

SEQ ID NO: 3739729 - RNA, 12 nt, Human
guucccccaucu

SEQ ID NO: 3739730 - RNA, 21 nt, Human
guuccccuaguaagugccuuc

SEQ ID NO: 3739731 - RNA, 23 nt, Human
gagucccagagcaggaggccccu

SEQ ID NO: 3739732 - RNA, 19 nt, Human
gagucccaggcugagccuc

SEQ ID NO: 3739733 - RNA, 18 nt, Human
gagucccagguuggcucu

SEQ ID NO: 3739734 - RNA, 21 nt, Human
gagucccagguuggcucugcc

SEQ ID NO: 3739735 - RNA, 16 nt, Human
gaguccccucaccucc

SEQ ID NO: 3739736 - RNA, 14 nt, Human
gaguccccuguuug

SEQ ID NO: 3739737 - RNA, 14 nt, Human
gagucccugccugg

SEQ ID NO: 3739738 - RNA, 15 nt, Human
gagucccugccugga

SEQ ID NO: 3739739 - RNA, 21 nt, Human
gaguccuacaguggcugucac

SEQ ID NO: 3739740 - RNA, 13 nt, Human
gaguccucugaau

SEQ ID NO: 3739741 - RNA, 16 nt, Human
gagucgaggacaggga

SEQ ID NO: 3739742 - RNA, 21 nt, Human
gagucgcaucucagugcagga

SEQ ID NO: 3739743 - RNA, 13 nt, Human
gagucggaagggc

SEQ ID NO: 3739744 - RNA, 23 nt, Human
gagucgucaucacuuuucaguga

SEQ ID NO: 3739745 - RNA, 17 nt, Human
gagucguggggugugcu

SEQ ID NO: 3739746 - RNA, 19 nt, Human
gagucguggggugugcugg

SEQ ID NO: 3739747 - RNA, 13 nt, Human
gagucuaaagaug

SEQ ID NO: 3739748 - RNA, 19 nt, Human
gagucuaauagucuuugcc

SEQ ID NO: 3739749 - RNA, 20 nt, Human
gagucuagcacucauuuucu

SEQ ID NO: 3739750 - RNA, 22 nt, Human
gagucuagcacucauuuucuau

SEQ ID NO: 3739751 - RNA, 21 nt, Human
gagucucacuguugcccaggc

SEQ ID NO: 3739752 - RNA, 14 nt, Human
gagucucccaaggc

SEQ ID NO: 3739753 - RNA, 21 nt, Human
gagucucgcucuguugcccag

SEQ ID NO: 3739754 - RNA, 13 nt, Human
gagucucucuggg

SEQ ID NO: 3739755 - RNA, 16 nt, Human
gagucucugaggggcu

SEQ ID NO: 3739756 - RNA, 12 nt, Human
gagucucuucuc

SEQ ID NO: 3739757 - RNA, 14 nt, Human
gagucucuucucca

SEQ ID NO: 3739758 - RNA, 23 nt, Human
gagucugaagcagaugcaaagag

SEQ ID NO: 3739759 - RNA, 23 nt, Human
gagucugaggccguugcugacuu

SEQ ID NO: 3739760 - RNA, 16 nt, Human
gagucugagguccuga

SEQ ID NO: 3739761 - RNA, 22 nt, Human
gagucugagguccugagcacug

SEQ ID NO: 3739762 - RNA, 12 nt, Human
gagucugccagg

SEQ ID NO: 3739763 - RNA, 20 nt, Human
gagucugccagggccccucu

SEQ ID NO: 3739764 - RNA, 18 nt, Human
gagucugcuauauuuuca

SEQ ID NO: 3739765 - RNA, 12 nt, Human
gagucugucucu

SEQ ID NO: 3739766 - RNA, 18 nt, Human
gagucugucucugucaug

SEQ ID NO: 3739767 - RNA, 22 nt, Human
gagucuugcuaccucagucagu

SEQ ID NO: 3739768 - RNA, 20 nt, Human
gagucuugcucugucgccca

SEQ ID NO: 3739769 - RNA, 20 nt, Human
gagucuuggcggcagcagcc

SEQ ID NO: 3739770 - RNA, 22 nt, Human
gagucuugguuucucucuacag

SEQ ID NO: 3739771 - RNA, 18 nt, Human
gagucuuugguucuaagg

SEQ ID NO: 3739772 - RNA, 22 nt, Human
gagucuuugguucuaaggaccu

SEQ ID NO: 3739773 - RNA, 21 nt, Human
gagugaaaccuuuagggcagc

SEQ ID NO: 3739774 - RNA, 19 nt, Human
gagugaaccccacgcccug

SEQ ID NO: 3739775 - RNA, 21 nt, Human
gagugaagaggggcagcccuu

SEQ ID NO: 3739776 - RNA, 16 nt, Human
gagugaauucccucac

SEQ ID NO: 3739777 - RNA, 19 nt, Human
gagugaggaauggcaguga

SEQ ID NO: 3739778 - RNA, 13 nt, Human
gagugagggccug

SEQ ID NO: 3739779 - RNA, 14 nt, Human
gagugagggccuga

SEQ ID NO: 3739780 - RNA, 22 nt, Human
gagugauacaacuucaagugca

SEQ ID NO: 3739781 - RNA, 10 nt, Human
gagugaucuu

SEQ ID NO: 3739782 - RNA, 20 nt, Human
gagugauugcagcuuuaugu

SEQ ID NO: 3739783 - RNA, 13 nt, Human
gagugcacagcug

SEQ ID NO: 3739784 - RNA, 14 nt, Human
gagugcacagcugu

SEQ ID NO: 3739785 - RNA, 16 nt, Human
gagugcacagcugucc

SEQ ID NO: 3739786 - RNA, 13 nt, Human
gagugcaggccca

SEQ ID NO: 3739787 - RNA, 19 nt, Human
gagugcaggccugcucagg

SEQ ID NO: 3739788 - RNA, 18 nt, Human
gagugcaguccugaucag

SEQ ID NO: 3739789 - RNA, 12 nt, Human
gagugcagugag

SEQ ID NO: 3739790 - RNA, 12 nt, Human
gagugccaggac

SEQ ID NO: 3739791 - RNA, 23 nt, Human
gagugcccacccugggagacaga

SEQ ID NO: 3739792 - RNA, 14 nt, Human
gagugcccagaacu

SEQ ID NO: 3739793 - RNA, 19 nt, Human
gagugccgcaucucacagc

SEQ ID NO: 3739794 - RNA, 14 nt, Human
gagugccuucugug

SEQ ID NO: 3739795 - RNA, 14 nt, Human
gagugcgugcucag

SEQ ID NO: 3739796 - RNA, 11 nt, Human
gagugcuaagu

SEQ ID NO: 3739797 - RNA, 14 nt, Human
gagugcuggcucac

SEQ ID NO: 3739798 - RNA, 18 nt, Human
gagugcuggcucacagua

SEQ ID NO: 3739799 - RNA, 20 nt, Human
gaguggaauaguauccucca

SEQ ID NO: 3739800 - RNA, 22 nt, Human
gaguggaauaguauccuccagg

SEQ ID NO: 3739801 - RNA, 23 nt, Human
gaguggaauaguauccuccaggu

SEQ ID NO: 3739802 - RNA, 11 nt, Human
gaguggaguua

SEQ ID NO: 3739803 - RNA, 22 nt, Human
gaguggaucuccaaggaccagg

SEQ ID NO: 3739804 - RNA, 15 nt, Human
gaguggcagcccagc

SEQ ID NO: 3739805 - RNA, 18 nt, Human
gaguggcagcccagccag

SEQ ID NO: 3739806 - RNA, 16 nt, Human
gaguggccccaccugg

SEQ ID NO: 3739807 - RNA, 19 nt, Human
gaguggccccaccuggccc

SEQ ID NO: 3739808 - RNA, 14 nt, Human
gaguggccuggcca

SEQ ID NO: 3739809 - RNA, 18 nt, Human
gaguggccuggccaggag

SEQ ID NO: 3739810 - RNA, 17 nt, Human
gaguggcuggggcaugg

SEQ ID NO: 3739811 - RNA, 15 nt, Human
gaguggcuucacucc

SEQ ID NO: 3739812 - RNA, 11 nt, Human
gagugggaagc

SEQ ID NO: 3739813 - RNA, 23 nt, Human
gagugggcagagcccccaggaag

SEQ ID NO: 3739814 - RNA, 13 nt, Human
gaguggggguggg

SEQ ID NO: 3739815 - RNA, 17 nt, Human
gaguggggguggggggu

SEQ ID NO: 3739816 - RNA, 15 nt, Human
gagugggugacaaga

SEQ ID NO: 3739817 - RNA, 19 nt, Human
gagugggugacaagagccu

SEQ ID NO: 3739818 - RNA, 20 nt, Human
gagugggugacaagagccug

SEQ ID NO: 3739819 - RNA, 21 nt, Human
gaguguaacaagaaaggagag

SEQ ID NO: 3739820 - RNA, 15 nt, Human
gaguguagaagcauu

SEQ ID NO: 3739821 - RNA, 18 nt, Human
gaguguagcaacuacagu

SEQ ID NO: 3739822 - RNA, 21 nt, Human
gagugucaaccagacagaggg

SEQ ID NO: 3739823 - RNA, 17 nt, Human
gagugucuggaauugug

SEQ ID NO: 3739824 - RNA, 22 nt, Human
gagugucuuuccacggagccac

SEQ ID NO: 3739825 - RNA, 18 nt, Human
gagugugaauauaaaugu

SEQ ID NO: 3739826 - RNA, 11 nt, Human
gagugugacag

SEQ ID NO: 3739827 - RNA, 12 nt, Human
gagugugacagg

SEQ ID NO: 3739828 - RNA, 15 nt, Human
gagugugacagggcc

SEQ ID NO: 3739829 - RNA, 21 nt, Human
gagugugaccaaaaguuacau

SEQ ID NO: 3739830 - RNA, 23 nt, Human
gagugugagccaccuaagaucuc

SEQ ID NO: 3739831 - RNA, 20 nt, Human
gagugugccugaagucccag

SEQ ID NO: 3739832 - RNA, 18 nt, Human
gagugugcggcugugugu

SEQ ID NO: 3739833 - RNA, 13 nt, Human
gaguguguaauuu

SEQ ID NO: 3739834 - RNA, 22 nt, Human
gaguguguaauuuaaaauugug

SEQ ID NO: 3739835 - RNA, 18 nt, Human
gaguguguauuguuccca

SEQ ID NO: 3739836 - RNA, 17 nt, Human
gagugugugauaaauca

SEQ ID NO: 3739837 - RNA, 18 nt, Human
gaguguguuuuauaaacu

SEQ ID NO: 3739838 - RNA, 15 nt, Human
gaguguuuaauaaag

SEQ ID NO: 3739839 - RNA, 23 nt, Human
gaguguuugggggacguuucuca

SEQ ID NO: 3739840 - RNA, 17 nt, Human
gaguuaaaaagggcagg

SEQ ID NO: 3739841 - RNA, 22 nt, Human
gaguuaaauagaguauaugcac

SEQ ID NO: 3739842 - RNA, 14 nt, Human
gaguuaagaccugg

SEQ ID NO: 3739843 - RNA, 13 nt, Human
gaguuacaguucu

SEQ ID NO: 3739844 - RNA, 16 nt, Human
gaguuacaguucugug

SEQ ID NO: 3739845 - RNA, 20 nt, Human
gaguuagaggccagccuggc

SEQ ID NO: 3739846 - RNA, 13 nt, Human
gaguuagccaucc

SEQ ID NO: 3739847 - RNA, 11 nt, Human
gaguuaggaac

SEQ ID NO: 3739848 - RNA, 20 nt, Human
gaguuaucaugaauuuuaaa

SEQ ID NO: 3739849 - RNA, 16 nt, Human
gaguuaucuaaaagaa

SEQ ID NO: 3739850 - RNA, 17 nt, Human
gaguuaugauguaaucu

SEQ ID NO: 3739851 - RNA, 22 nt, Human
gaguuaugauguaaucucucug

SEQ ID NO: 3739852 - RNA, 22 nt, Human
gaguucaauaaaugucuguuga

SEQ ID NO: 3739853 - RNA, 18 nt, Human
gaguucaaugaucuaggu

SEQ ID NO: 3739854 - RNA, 15 nt, Human
gaguucaauggcugc

SEQ ID NO: 3739855 - RNA, 19 nt, Human
gaguucaauggcugcugaa

SEQ ID NO: 3739856 - RNA, 16 nt, Human
gaguucagcugcuucu

SEQ ID NO: 3739857 - RNA, 21 nt, Human
gaguucagguagcugccccug

SEQ ID NO: 3739858 - RNA, 14 nt, Human
gaguucaguuuuac

SEQ ID NO: 3739859 - RNA, 14 nt, Human
gaguucauccaggc

SEQ ID NO: 3739860 - RNA, 14 nt, Human
gaguucaucuugaa

SEQ ID NO: 3739861 - RNA, 19 nt, Human
gaguucaucuugaauugua

SEQ ID NO: 3739862 - RNA, 18 nt, Human
gaguucauucauauuaca

SEQ ID NO: 3739863 - RNA, 15 nt, Human
gaguuccaguugaag

SEQ ID NO: 3739864 - RNA, 15 nt, Human
gaguuccaugaagac

SEQ ID NO: 3739865 - RNA, 18 nt, Human
gaguuccccaugcagaca

SEQ ID NO: 3739866 - RNA, 14 nt, Human
gaguuccugcaugc

SEQ ID NO: 3739867 - RNA, 18 nt, Human
gaguucgagaccagccug

SEQ ID NO: 3739868 - RNA, 21 nt, Human
gaguucgagaccagccuggcc

SEQ ID NO: 3739869 - RNA, 19 nt, Human
gaguucgaggcugcaguca

SEQ ID NO: 3739870 - RNA, 16 nt, Human
gaguucucagggcucc

SEQ ID NO: 3739871 - RNA, 16 nt, Human
gaguucugcucauucu

SEQ ID NO: 3739872 - RNA, 20 nt, Human
gaguucugcucauucuaaug

SEQ ID NO: 3739873 - RNA, 15 nt, Human
gaguucuuccuguaa

SEQ ID NO: 3739874 - RNA, 15 nt, Human
gaguucuugugccau

SEQ ID NO: 3739875 - RNA, 21 nt, Human
gaguucuuuuugaaguauuua

SEQ ID NO: 3739876 - RNA, 22 nt, Human
gaguugaaagaguuaagaaugu

SEQ ID NO: 3739877 - RNA, 19 nt, Human
gaguugaggaacuguacag

SEQ ID NO: 3739878 - RNA, 19 nt, Human
gaguugauacuacaguuug

SEQ ID NO: 3739879 - RNA, 19 nt, Human
gaguugaucuggaacccag

SEQ ID NO: 3739880 - RNA, 14 nt, Human
gaguugaugucucc

SEQ ID NO: 3739881 - RNA, 17 nt, Human
gugcucaguuguagaau

SEQ ID NO: 3739882 - RNA, 18 nt, Human
gugcuccauggcugccau

SEQ ID NO: 3739883 - RNA, 22 nt, Human
gugcuccauggcugccaucuca

SEQ ID NO: 3739884 - RNA, 15 nt, Human
gugcucccuaccacc

SEQ ID NO: 3739885 - RNA, 13 nt, Human
gugcuccgugccu

SEQ ID NO: 3739886 - RNA, 16 nt, Human
gugcuccgugccucca

SEQ ID NO: 3739887 - RNA, 22 nt, Human
gugcuccgugccuccaccacca

SEQ ID NO: 3739888 - RNA, 14 nt, Human
gugcucgcccugcg

SEQ ID NO: 3739889 - RNA, 22 nt, Human
gugcucgcuguugcugaauagg

SEQ ID NO: 3739890 - RNA, 13 nt, Human
gugcucucuuucu

SEQ ID NO: 3739891 - RNA, 16 nt, Human
gugcucucuuucuguc

SEQ ID NO: 3739892 - RNA, 14 nt, Human
gugcucuggacagg

SEQ ID NO: 3739893 - RNA, 15 nt, Human
gugcucuggacaggc

SEQ ID NO: 3739894 - RNA, 17 nt, Human
gugcucuucuucuuucu

SEQ ID NO: 3739895 - RNA, 22 nt, Human
gugcucuuuguuuugugucucu

SEQ ID NO: 3739896 - RNA, 23 nt, Human
gugcucuuuguuuugugucucuu

SEQ ID NO: 3739897 - RNA, 21 nt, Human
gugcugaacaguggaggaaga

SEQ ID NO: 3739898 - RNA, 23 nt, Human
gugcugaaugguuuucaaaauaa

SEQ ID NO: 3739899 - RNA, 16 nt, Human
gugcugacagcugcuc

SEQ ID NO: 3739900 - RNA, 21 nt, Human
gugcugacauggcucuggacu

SEQ ID NO: 3739901 - RNA, 14 nt, Human
gugcugacccuccu

SEQ ID NO: 3739902 - RNA, 14 nt, Human
gugcugaccucugg

SEQ ID NO: 3739903 - RNA, 16 nt, Human
gugcugacggccaggg

SEQ ID NO: 3739904 - RNA, 23 nt, Human
gugcugacggccagggagaagcu

SEQ ID NO: 3739905 - RNA, 11 nt, Human
gugcugagaag

SEQ ID NO: 3739906 - RNA, 14 nt, Human
gugcugagauuaca

SEQ ID NO: 3739907 - RNA, 22 nt, Human
gugcugaggccuuaucauucau

SEQ ID NO: 3739908 - RNA, 14 nt, Human
gugcugaguagaug

SEQ ID NO: 3739909 - RNA, 12 nt, Human
gugcugagucug

SEQ ID NO: 3739910 - RNA, 17 nt, Human
gugcugagucugaaggc

SEQ ID NO: 3739911 - RNA, 23 nt, Human
gugcugaguugguguugacaugu

SEQ ID NO: 3739912 - RNA, 22 nt, Human
gugcugcagcaccgaggggccu

SEQ ID NO: 3739913 - RNA, 12 nt, Human
gugcugcauuua

SEQ ID NO: 3739914 - RNA, 19 nt, Human
gugcugcauuuaaaagaua

SEQ ID NO: 3739915 - RNA, 20 nt, Human
gugcugcauuuaaaagauac

SEQ ID NO: 3739916 - RNA, 15 nt, Human
gugcugccauccagg

SEQ ID NO: 3739917 - RNA, 18 nt, Human
gugcugccauccagguuc

SEQ ID NO: 3739918 - RNA, 21 nt, Human
gugcugcccgucuucagccua

SEQ ID NO: 3739919 - RNA, 11 nt, Human
gugcugccucu

SEQ ID NO: 3739920 - RNA, 13 nt, Human
gugcugccugucc

SEQ ID NO: 3739921 - RNA, 15 nt, Human
gugcugcuaauucuu

SEQ ID NO: 3739922 - RNA, 19 nt, Human
gugcugcuaauucuuugca

SEQ ID NO: 3739923 - RNA, 17 nt, Human
gugcugcuacccucccu

SEQ ID NO: 3739924 - RNA, 23 nt, Human
gugcugcuacccucccugcuguc

SEQ ID NO: 3739925 - RNA, 15 nt, Human
gugcugcugcugcug

SEQ ID NO: 3739926 - RNA, 13 nt, Human
gugcugcuuugau

SEQ ID NO: 3739927 - RNA, 17 nt, Human
gugcuggagcacugggc

SEQ ID NO: 3739928 - RNA, 19 nt, Human
gugcuggagcacugggcuc

SEQ ID NO: 3739929 - RNA, 18 nt, Human
gugcuggagccacuaacu

SEQ ID NO: 3739930 - RNA, 24 nt, Human
gugcuggaggugggagcaggagau

SEQ ID NO: 3739931 - RNA, 18 nt, Human
gugcuggauggagcccag

SEQ ID NO: 3739932 - RNA, 22 nt, Human
gugcugggaaccucaggguauu

SEQ ID NO: 3739933 - RNA, 17 nt, Human
gugcugggacugagcca

SEQ ID NO: 3739934 - RNA, 17 nt, Human
gugcugggagaggcagc

SEQ ID NO: 3739935 - RNA, 18 nt, Human
gugcugggagaggcagcc

SEQ ID NO: 3739936 - RNA, 22 nt, Human
gugcugggagcuccacucugcu

SEQ ID NO: 3739937 - RNA, 15 nt, Human
gugcugggaggaggg

SEQ ID NO: 3739938 - RNA, 22 nt, Human
gugcugggauuacaagcgugag

SEQ ID NO: 3739939 - RNA, 20 nt, Human
gugcugggauuacaggugua

SEQ ID NO: 3739940 - RNA, 19 nt, Human
gugcugggccccugccucu

SEQ ID NO: 3739941 - RNA, 15 nt, Human
gugcugguguccuga

SEQ ID NO: 3739942 - RNA, 16 nt, Human
gugcuguauaaaauca

SEQ ID NO: 3739943 - RNA, 17 nt, Human
gugcuguauaaaaucag

SEQ ID NO: 3739944 - RNA, 15 nt, Human
gugcugugaccauuu

SEQ ID NO: 3739945 - RNA, 16 nt, Human
gugcugugcccaaguu

SEQ ID NO: 3739946 - RNA, 14 nt, Human
gugcuguggccagg

SEQ ID NO: 3739947 - RNA, 19 nt, Human
gugcuguggggcugguagc

SEQ ID NO: 3739948 - RNA, 23 nt, Human
gugcuguggggcugguagcucag

SEQ ID NO: 3739949 - RNA, 19 nt, Human
gugcuguuuauuaaucuua

SEQ ID NO: 3739950 - RNA, 14 nt, Human
gugcuguuucaaag

SEQ ID NO: 3739951 - RNA, 16 nt, Human
gugcuguuucaaaguu

SEQ ID NO: 3739952 - RNA, 16 nt, Human
gugcuguuuuguuaua

SEQ ID NO: 3739953 - RNA, 19 nt, Human
gugcuguuuuguuauauaa

SEQ ID NO: 3739954 - RNA, 13 nt, Human
gugcuuaaguucc

SEQ ID NO: 3739955 - RNA, 21 nt, Human
gugcuuaugcucuuaauugcc

SEQ ID NO: 3739956 - RNA, 16 nt, Human
gugcuucaacauucuu

SEQ ID NO: 3739957 - RNA, 13 nt, Human
gugcuuccuugua

SEQ ID NO: 3739958 - RNA, 22 nt, Human
gugcuucuaguucugccaggag

SEQ ID NO: 3739959 - RNA, 22 nt, Human
gugcuucugccacccugcugag

SEQ ID NO: 3739960 - RNA, 18 nt, Human
gugcuugaaggcccugcu

SEQ ID NO: 3739961 - RNA, 19 nt, Human
gugcuugaaggcccugcug

SEQ ID NO: 3739962 - RNA, 20 nt, Human
gugcuugaaggcccugcuga

SEQ ID NO: 3739963 - RNA, 16 nt, Human
gugcuugccacagagc

SEQ ID NO: 3739964 - RNA, 14 nt, Human
gugcuuggcccagg

SEQ ID NO: 3739965 - RNA, 15 nt, Human
gugcuuggcccagga

SEQ ID NO: 3739966 - RNA, 17 nt, Human
gugcuuggcccaggagu

SEQ ID NO: 3739967 - RNA, 24 nt, Human
gugcuuggcccaggaguuuggcca

SEQ ID NO: 3739968 - RNA, 18 nt, Human
gugcuuguguaauuuaug

SEQ ID NO: 3739969 - RNA, 15 nt, Human
gugcuugugugugug

SEQ ID NO: 3739970 - RNA, 20 nt, Human
gugcuuguucccucucccug

SEQ ID NO: 3739971 - RNA, 21 nt, Human
gugcuuguuugcucaccuggg

SEQ ID NO: 3739972 - RNA, 23 nt, Human
gugcuuguuugcucaccuggggu

SEQ ID NO: 3739973 - RNA, 13 nt, Human
gugcuuguuuuau

SEQ ID NO: 3739974 - RNA, 15 nt, Human
gugcuuuccagcuca

SEQ ID NO: 3739975 - RNA, 12 nt, Human
gugcuuucuauu

SEQ ID NO: 3739976 - RNA, 17 nt, Human
gugcuuucuauuguaca

SEQ ID NO: 3739977 - RNA, 22 nt, Human
gugcuuucuauuguacagaagc

SEQ ID NO: 3739978 - RNA, 15 nt, Human
gugcuuuuaaaugca

SEQ ID NO: 3739979 - RNA, 17 nt, Human
gugcuuuuccuauuugu

SEQ ID NO: 3739980 - RNA, 14 nt, Human
gugcuuuucuccaa

SEQ ID NO: 3739981 - RNA, 16 nt, Human
gugcuuuuuauaaaaa

SEQ ID NO: 3739982 - RNA, 16 nt, Human
gugcuuuuuuugugug

SEQ ID NO: 3739983 - RNA, 12 nt, Human
guggaaaaacac

SEQ ID NO: 3739984 - RNA, 13 nt, Human
guggaaaaauauu

SEQ ID NO: 3739985 - RNA, 21 nt, Human
guggaaaacuuaugcugauuu

SEQ ID NO: 3739986 - RNA, 14 nt, Human
guggaaagccucug

SEQ ID NO: 3739987 - RNA, 16 nt, Human
guggaaagugaauuug

SEQ ID NO: 3739988 - RNA, 16 nt, Human
guggaaaguguaaagc

SEQ ID NO: 3739989 - RNA, 20 nt, Human
guggaaauuaagaagaaacu

SEQ ID NO: 3739990 - RNA, 19 nt, Human
guggaacauaaaaaggaca

SEQ ID NO: 3739991 - RNA, 15 nt, Human
guggaaccaggaacc

SEQ ID NO: 3739992 - RNA, 17 nt, Human
guggaagaagagggaga

SEQ ID NO: 3739993 - RNA, 16 nt, Human
guggaagaagggagaa

SEQ ID NO: 3739994 - RNA, 14 nt, Human
guggaagagggcug

SEQ ID NO: 3739995 - RNA, 16 nt, Human
guggaagaggggacag

SEQ ID NO: 3739996 - RNA, 17 nt, Human
guggaagaggggacagg

SEQ ID NO: 3739997 - RNA, 15 nt, Human
guggaagagugugug

SEQ ID NO: 3739998 - RNA, 16 nt, Human
guggaagcccuccuuc

SEQ ID NO: 3739999 - RNA, 16 nt, Human
guggaagcuuggggaa

SEQ ID NO: 3740000 - RNA, 19 nt, Human
guggaagcuuggggaagac

SEQ ID NO: 3740001 - RNA, 16 nt, Human
guggaaggcaagccag

SEQ ID NO: 3740002 - RNA, 21 nt, Human
guggaagugugggucugugug

SEQ ID NO: 3740003 - RNA, 18 nt, Human
guggaaguuccaagucca

SEQ ID NO: 3740004 - RNA, 20 nt, Human
guggaauaguauccuccagg

SEQ ID NO: 3740005 - RNA, 22 nt, Human
guggaauaguauccuccagguu

SEQ ID NO: 3740006 - RNA, 18 nt, Human
guggaauauaaggaaagc

SEQ ID NO: 3740007 - RNA, 16 nt, Human
guggaauguuggauaa

SEQ ID NO: 3740008 - RNA, 16 nt, Human
guggaauuauuuuaaa

SEQ ID NO: 3740009 - RNA, 17 nt, Human
guggacaaacuggaguc

SEQ ID NO: 3740010 - RNA, 14 nt, Human
guggacacagcucu

SEQ ID NO: 3740011 - RNA, 16 nt, Human
guggacaccugcccug

SEQ ID NO: 3740012 - RNA, 17 nt, Human
guggacaccugcccugc

SEQ ID NO: 3740013 - RNA, 12 nt, Human
guggacaggacu

SEQ ID NO: 3740014 - RNA, 22 nt, Human
guggacagucugcucuagauga

SEQ ID NO: 3740015 - RNA, 14 nt, Human
guggaccaggacag

SEQ ID NO: 3740016 - RNA, 22 nt, Human
guggaccaucgcugucaugagu

SEQ ID NO: 3740017 - RNA, 19 nt, Human
guggacccagcgggcaggu

SEQ ID NO: 3740018 - RNA, 22 nt, Human
guggacccagggaugacauguc

SEQ ID NO: 3740019 - RNA, 16 nt, Human
guggacccugaaaugu

SEQ ID NO: 3740020 - RNA, 23 nt, Human
guggacccugaaaugugugugau

SEQ ID NO: 3740021 - RNA, 17 nt, Human
guggaccuuaggccuuc

SEQ ID NO: 3740022 - RNA, 18 nt, Human
guggacucuuugguggcu

SEQ ID NO: 3740023 - RNA, 17 nt, Human
guggacugagugggaag

SEQ ID NO: 3740024 - RNA, 18 nt, Human
guggacugagugggaagc

SEQ ID NO: 3740025 - RNA, 20 nt, Human
guggacugagugggaagccc

SEQ ID NO: 3740026 - RNA, 13 nt, Human
guggacuggaagg

SEQ ID NO: 3740027 - RNA, 16 nt, Human
guggacuggccccugg

SEQ ID NO: 3740028 - RNA, 22 nt, Human
guggacuguggcacuugccugg

SEQ ID NO: 3740029 - RNA, 16 nt, Human
guggacuuuccacccc

SEQ ID NO: 3740030 - RNA, 16 nt, Human
guggagaacuccuagg

SEQ ID NO: 3740031 - RNA, 23 nt, Human
guuccccucagaaaaaaauucau

SEQ ID NO: 3740032 - RNA, 12 nt, Human
guuccccucucc

SEQ ID NO: 3740033 - RNA, 16 nt, Human
guuccccucucccuuc

SEQ ID NO: 3740034 - RNA, 19 nt, Human
guuccccucucccuucccu

SEQ ID NO: 3740035 - RNA, 21 nt, Human
guuccccucuugucuccccug

SEQ ID NO: 3740036 - RNA, 21 nt, Human
guuccccuggaagcagugccc

SEQ ID NO: 3740037 - RNA, 15 nt, Human
guuccccuuccacug

SEQ ID NO: 3740038 - RNA, 22 nt, Human
guuccccuuccacugagggcag

SEQ ID NO: 3740039 - RNA, 16 nt, Human
guucccgcggggcugu

SEQ ID NO: 3740040 - RNA, 14 nt, Human
guucccggcuggac

SEQ ID NO: 3740041 - RNA, 15 nt, Human
guucccggucccgag

SEQ ID NO: 3740042 - RNA, 16 nt, Human
guucccguuucuccac

SEQ ID NO: 3740043 - RNA, 13 nt, Human
guucccucccaga

SEQ ID NO: 3740044 - RNA, 14 nt, Human
guucccucugagaa

SEQ ID NO: 3740045 - RNA, 22 nt, Human
guucccucugagaauuccaagg

SEQ ID NO: 3740046 - RNA, 19 nt, Human
guucccugaaaacccagag

SEQ ID NO: 3740047 - RNA, 21 nt, Human
guucccugaaaacccagagag

SEQ ID NO: 3740048 - RNA, 16 nt, Human
guucccugaaacacga

SEQ ID NO: 3740049 - RNA, 17 nt, Human
guucccuguucuuccuc

SEQ ID NO: 3740050 - RNA, 20 nt, Human
guucccuugagggcugcagu

SEQ ID NO: 3740051 - RNA, 16 nt, Human
guucccuuggccucag

SEQ ID NO: 3740052 - RNA, 19 nt, Human
guucccuuggccucagaau

SEQ ID NO: 3740053 - RNA, 20 nt, Human
guucccuuugcuccacccca

SEQ ID NO: 3740054 - RNA, 19 nt, Human
guucccuuugucuuucaaa

SEQ ID NO: 3740055 - RNA, 21 nt, Human
guucccuuuuuuggcugcuga

SEQ ID NO: 3740056 - RNA, 23 nt, Human
guuccgcacuuuccacuucuucc

SEQ ID NO: 3740057 - RNA, 19 nt, Human
guuccggaauccuguccuc

SEQ ID NO: 3740058 - RNA, 14 nt, Human
guuccggcauggac

SEQ ID NO: 3740059 - RNA, 17 nt, Human
guuccuacacaggacag

SEQ ID NO: 3740060 - RNA, 14 nt, Human
guuccuagagaaga

SEQ ID NO: 3740061 - RNA, 18 nt, Human
guuccuaggggaaugagg

SEQ ID NO: 3740062 - RNA, 20 nt, Human
guuccuaggggaaugagggg

SEQ ID NO: 3740063 - RNA, 15 nt, Human
guuccuauugucauu

SEQ ID NO: 3740064 - RNA, 20 nt, Human
guuccucaaagcuuggauua

SEQ ID NO: 3740065 - RNA, 22 nt, Human
guuccucauuagcauuuugcua

SEQ ID NO: 3740066 - RNA, 23 nt, Human
guuccuccccuccagcucccugu

SEQ ID NO: 3740067 - RNA, 16 nt, Human
guuccucgcccugggu

SEQ ID NO: 3740068 - RNA, 17 nt, Human
guuccucguucucccug

SEQ ID NO: 3740069 - RNA, 20 nt, Human
guuccucguucucccuggga

SEQ ID NO: 3740070 - RNA, 12 nt, Human
guuccucucugg

SEQ ID NO: 3740071 - RNA, 14 nt, Human
guuccucugccugc

SEQ ID NO: 3740072 - RNA, 15 nt, Human
guuccucugccugcc

SEQ ID NO: 3740073 - RNA, 16 nt, Human
guuccugaaccugaug

SEQ ID NO: 3740074 - RNA, 20 nt, Human
guuccugacaucacagcagc

SEQ ID NO: 3740075 - RNA, 22 nt, Human
guuccugaugacccaggcugcc

SEQ ID NO: 3740076 - RNA, 12 nt, Human
guuccugcagca

SEQ ID NO: 3740077 - RNA, 18 nt, Human
guuccugcagcagagccu

SEQ ID NO: 3740078 - RNA, 15 nt, Human
guuccugcugcuguc

SEQ ID NO: 3740079 - RNA, 21 nt, Human
guuccuggcaauaguguguuc

SEQ ID NO: 3740080 - RNA, 13 nt, Human
guuccugucccug

SEQ ID NO: 3740081 - RNA, 15 nt, Human
guuccugucccugcg

SEQ ID NO: 3740082 - RNA, 17 nt, Human
guuccuucccaauccag

SEQ ID NO: 3740083 - RNA, 17 nt, Human
guuccuuccucugagcc

SEQ ID NO: 3740084 - RNA, 23 nt, Human
guuccuuuccuuuucuuuaaaga

SEQ ID NO: 3740085 - RNA, 18 nt, Human
guuccuuuguguguacuc

SEQ ID NO: 3740086 - RNA, 19 nt, Human
guuccuuuguguguacuca

SEQ ID NO: 3740087 - RNA, 22 nt, Human
guucgacgagacggucgagcag

SEQ ID NO: 3740088 - RNA, 16 nt, Human
guucgacucagccuca

SEQ ID NO: 3740089 - RNA, 19 nt, Human
guucgagaccaaccugacc

SEQ ID NO: 3740090 - RNA, 15 nt, Human
guucgagaccagccu

SEQ ID NO: 3740091 - RNA, 18 nt, Human
guucgagaccagccuggc

SEQ ID NO: 3740092 - RNA, 22 nt, Human
guucgaggacuacaaccaauuu

SEQ ID NO: 3740093 - RNA, 16 nt, Human
guucgcagccacccug

SEQ ID NO: 3740094 - RNA, 15 nt, Human
guucgccuggagccc

SEQ ID NO: 3740095 - RNA, 13 nt, Human
guucguagcuuuc

SEQ ID NO: 3740096 - RNA, 14 nt, Human
guucguugguuaua

SEQ ID NO: 3740097 - RNA, 16 nt, Human
guucuaaaagguguga

SEQ ID NO: 3740098 - RNA, 14 nt, Human
guucuaaagcucug

SEQ ID NO: 3740099 - RNA, 14 nt, Human
guucuaaaguucua

SEQ ID NO: 3740100 - RNA, 15 nt, Human
guucuaaaguucuaa

SEQ ID NO: 3740101 - RNA, 20 nt, Human
guucuaagacucaaauguuc

SEQ ID NO: 3740102 - RNA, 14 nt, Human
guucuaagauucua

SEQ ID NO: 3740103 - RNA, 23 nt, Human
guucuaaggccuaggauucuaaa

SEQ ID NO: 3740104 - RNA, 12 nt, Human
guucuaaggcuc

SEQ ID NO: 3740105 - RNA, 13 nt, Human
guucuaaggcucu

SEQ ID NO: 3740106 - RNA, 16 nt, Human
guucuaaggcucugag

SEQ ID NO: 3740107 - RNA, 17 nt, Human
guucuaagucuuuccau

SEQ ID NO: 3740108 - RNA, 14 nt, Human
guucuaaguuucua

SEQ ID NO: 3740109 - RNA, 17 nt, Human
guucuaaguuucuaaga

SEQ ID NO: 3740110 - RNA, 18 nt, Human
guucuaaguuucuaagau

SEQ ID NO: 3740111 - RNA, 19 nt, Human
guucuaaguuucuaagauu

SEQ ID NO: 3740112 - RNA, 16 nt, Human
guucuacccaggugcu

SEQ ID NO: 3740113 - RNA, 21 nt, Human
guucuaccucaggcagcucaa

SEQ ID NO: 3740114 - RNA, 13 nt, Human
guucuacucaggc

SEQ ID NO: 3740115 - RNA, 12 nt, Human
guucuagaaaaa

SEQ ID NO: 3740116 - RNA, 14 nt, Human
guucuagaaaaaca

SEQ ID NO: 3740117 - RNA, 18 nt, Human
guucuagaaaaacaggca

SEQ ID NO: 3740118 - RNA, 18 nt, Human
guucuagcauggcauauu

SEQ ID NO: 3740119 - RNA, 17 nt, Human
guucuagcgcaguuuuu

SEQ ID NO: 3740120 - RNA, 17 nt, Human
guucuaggaaaauaaaa

SEQ ID NO: 3740121 - RNA, 21 nt, Human
guucuagucuccuuugcacug

SEQ ID NO: 3740122 - RNA, 23 nt, Human
guucuagucuccuuugcacugag

SEQ ID NO: 3740123 - RNA, 14 nt, Human
guucuaguuugcau

SEQ ID NO: 3740124 - RNA, 12 nt, Human
guucuauccaaa

SEQ ID NO: 3740125 - RNA, 22 nt, Human
guucuauccaaacauguauuua

SEQ ID NO: 3740126 - RNA, 17 nt, Human
guucuauuucuauccca

SEQ ID NO: 3740127 - RNA, 18 nt, Human
guucuauuucuaucccaa

SEQ ID NO: 3740128 - RNA, 14 nt, Human
guucuauuuggaau

SEQ ID NO: 3740129 - RNA, 16 nt, Human
guucucacuguucccu

SEQ ID NO: 3740130 - RNA, 15 nt, Human
guucucagggcuccu

SEQ ID NO: 3740131 - RNA, 16 nt, Human
guucucaucuuucuug

SEQ ID NO: 3740132 - RNA, 21 nt, Human
guucuccaacaucacagccca

SEQ ID NO: 3740133 - RNA, 21 nt, Human
guucuccguuagcuccugugg

SEQ ID NO: 3740134 - RNA, 18 nt, Human
guucuccucuccccucua

SEQ ID NO: 3740135 - RNA, 14 nt, Human
guucucuagaaaga

SEQ ID NO: 3740136 - RNA, 16 nt, Human
guucucuccuccccaa

SEQ ID NO: 3740137 - RNA, 18 nt, Human
guucucucuaugguaaag

SEQ ID NO: 3740138 - RNA, 13 nt, Human
guucucucugccu

SEQ ID NO: 3740139 - RNA, 15 nt, Human
guucucucuucucca

SEQ ID NO: 3740140 - RNA, 12 nt, Human
guucucugagga

SEQ ID NO: 3740141 - RNA, 17 nt, Human
guucucugcccuccaag

SEQ ID NO: 3740142 - RNA, 13 nt, Human
guucucugggaga

SEQ ID NO: 3740143 - RNA, 19 nt, Human
guucucugggagaaaauca

SEQ ID NO: 3740144 - RNA, 21 nt, Human
guucucugggagaaaaucauc

SEQ ID NO: 3740145 - RNA, 13 nt, Human
guucugaaauauu

SEQ ID NO: 3740146 - RNA, 13 nt, Human
guucugaagaaga

SEQ ID NO: 3740147 - RNA, 20 nt, Human
guucugaauaugcugcucau

SEQ ID NO: 3740148 - RNA, 15 nt, Human
guucugacauuaaca

SEQ ID NO: 3740149 - RNA, 16 nt, Human
guucugacauuaacag

SEQ ID NO: 3740150 - RNA, 21 nt, Human
guucugacauuaacaguuuuc

SEQ ID NO: 3740151 - RNA, 17 nt, Human
guucugaugaugugccu

SEQ ID NO: 3740152 - RNA, 14 nt, Human
guucugcaaauaga

SEQ ID NO: 3740153 - RNA, 21 nt, Human
guucugcaaauagaaaacagg

SEQ ID NO: 3740154 - RNA, 15 nt, Human
guucugcacugaaaa

SEQ ID NO: 3740155 - RNA, 20 nt, Human
guucugcagacacgccuucc

SEQ ID NO: 3740156 - RNA, 15 nt, Human
guucugccagaucuu

SEQ ID NO: 3740157 - RNA, 13 nt, Human
guucugccaggag

SEQ ID NO: 3740158 - RNA, 15 nt, Human
guucugcccccagcc

SEQ ID NO: 3740159 - RNA, 16 nt, Human
guucugcccccagccc

SEQ ID NO: 3740160 - RNA, 20 nt, Human
guucugcccccagcccaaag

SEQ ID NO: 3740161 - RNA, 11 nt, Human
guucugccucu

SEQ ID NO: 3740162 - RNA, 13 nt, Human
guucugccugcca

SEQ ID NO: 3740163 - RNA, 22 nt, Human
guucugccugccagcugcacug

SEQ ID NO: 3740164 - RNA, 17 nt, Human
guucugcuaaauuucaa

SEQ ID NO: 3740165 - RNA, 19 nt, Human
guucugcuaaauuucaaau

SEQ ID NO: 3740166 - RNA, 17 nt, Human
guucugcuccagacagg

SEQ ID NO: 3740167 - RNA, 11 nt, Human
guucugcuccu

SEQ ID NO: 3740168 - RNA, 19 nt, Human
guucugcuccucuccaggc

SEQ ID NO: 3740169 - RNA, 13 nt, Human
guucugcuggccu

SEQ ID NO: 3740170 - RNA, 23 nt, Human
guucugcuucaaggcuuccacug

SEQ ID NO: 3740171 - RNA, 16 nt, Human
guucuggccagaaugc

SEQ ID NO: 3740172 - RNA, 15 nt, Human
guucuggcccucacc

SEQ ID NO: 3740173 - RNA, 16 nt, Human
guucuggcuguuugag

SEQ ID NO: 3740174 - RNA, 16 nt, Human
guucuggggggaccca

SEQ ID NO: 3740175 - RNA, 23 nt, Human
guucugguaugaacuugaggaca

SEQ ID NO: 3740176 - RNA, 14 nt, Human
guucuggugaggcc

SEQ ID NO: 3740177 - RNA, 15 nt, Human
guucuggugaggccu

SEQ ID NO: 3740178 - RNA, 17 nt, Human
guucugguuagcucagc

SEQ ID NO: 3740179 - RNA, 14 nt, Human
guucuguagaaaug

SEQ ID NO: 3740180 - RNA, 22 nt, Human
guucuguagaaaugguuguauu

SEQ ID NO: 3740181 - RNA, 20 nt, Human
guucuguauuugaaagugcc

SEQ ID NO: 3740182 - RNA, 15 nt, Human
gaguugauucagcuc

SEQ ID NO: 3740183 - RNA, 16 nt, Human
gaguugauucagcucu

SEQ ID NO: 3740184 - RNA, 16 nt, Human
gaguugcauugauuca

SEQ ID NO: 3740185 - RNA, 18 nt, Human
gaguugcugcaaaccuga

SEQ ID NO: 3740186 - RNA, 20 nt, Human
gaguuggagacccgccuggc

SEQ ID NO: 3740187 - RNA, 20 nt, Human
gaguuggaguagaauguagu

SEQ ID NO: 3740188 - RNA, 12 nt, Human
gaguuguaaaua

SEQ ID NO: 3740189 - RNA, 19 nt, Human
gaguuguaaauauauaaau

SEQ ID NO: 3740190 - RNA, 15 nt, Human
gaguuguggguagug

SEQ ID NO: 3740191 - RNA, 22 nt, Human
gaguuguuacauuuuuaagugc

SEQ ID NO: 3740192 - RNA, 16 nt, Human
gaguuguuuuuguaua

SEQ ID NO: 3740193 - RNA, 13 nt, Human
gaguuuaaaaauc

SEQ ID NO: 3740194 - RNA, 16 nt, Human
gaguuuaaauuguaau

SEQ ID NO: 3740195 - RNA, 20 nt, Human
gaguuuagggaacaauuugg

SEQ ID NO: 3740196 - RNA, 14 nt, Human
gaguuuaggguggg

SEQ ID NO: 3740197 - RNA, 15 nt, Human
gaguuucauguacaa

SEQ ID NO: 3740198 - RNA, 19 nt, Human
gaguuucauucuccugccu

SEQ ID NO: 3740199 - RNA, 15 nt, Human
gaguuuccuaaaagu

SEQ ID NO: 3740200 - RNA, 17 nt, Human
gaguuuccuaugggaac

SEQ ID NO: 3740201 - RNA, 21 nt, Human
gaguuuccucaggcugcugga

SEQ ID NO: 3740202 - RNA, 13 nt, Human
gaguuucuaaggu

SEQ ID NO: 3740203 - RNA, 15 nt, Human
gaguuucuguuugau

SEQ ID NO: 3740204 - RNA, 20 nt, Human
gaguuugagaccagccuggc

SEQ ID NO: 3740205 - RNA, 19 nt, Human
gaguuuggagagagcagac

SEQ ID NO: 3740206 - RNA, 22 nt, Human
gaguuuggagagagcagacugg

SEQ ID NO: 3740207 - RNA, 12 nt, Human
gaguuuggccag

SEQ ID NO: 3740208 - RNA, 20 nt, Human
gaguuugggguaugggagag

SEQ ID NO: 3740209 - RNA, 12 nt, Human
gaguuugguccc

SEQ ID NO: 3740210 - RNA, 11 nt, Human
gaguuuguagg

SEQ ID NO: 3740211 - RNA, 18 nt, Human
gaguuugucgcucaugug

SEQ ID NO: 3740212 - RNA, 15 nt, Human
gaguuuuguguuugu

SEQ ID NO: 3740213 - RNA, 13 nt, Human
gauaaaaaauuuu

SEQ ID NO: 3740214 - RNA, 18 nt, Human
gauaaaaaauuuuguaau

SEQ ID NO: 3740215 - RNA, 19 nt, Human
gauaaaagacagugaaaga

SEQ ID NO: 3740216 - RNA, 23 nt, Human
gauaaaagauacauuuguauguu

SEQ ID NO: 3740217 - RNA, 19 nt, Human
gauaaaagggcaaaucugc

SEQ ID NO: 3740218 - RNA, 13 nt, Human
gauaaaaucauaa

SEQ ID NO: 3740219 - RNA, 23 nt, Human
gauaaaaucauaaguauuuggaa

SEQ ID NO: 3740220 - RNA, 16 nt, Human
gauaaaaugacuacuu

SEQ ID NO: 3740221 - RNA, 19 nt, Human
gauaaaauuauagauggga

SEQ ID NO: 3740222 - RNA, 16 nt, Human
gauaaacaacaaggug

SEQ ID NO: 3740223 - RNA, 14 nt, Human
gauaaacacaagau

SEQ ID NO: 3740224 - RNA, 22 nt, Human
gauaaacacaagauugguguuu

SEQ ID NO: 3740225 - RNA, 18 nt, Human
gauaaaccuagauaaaga

SEQ ID NO: 3740226 - RNA, 18 nt, Human
gauaaacuuuuagaaacu

SEQ ID NO: 3740227 - RNA, 15 nt, Human
gauaaagauaucaau

SEQ ID NO: 3740228 - RNA, 16 nt, Human
gauaaagauugugugg

SEQ ID NO: 3740229 - RNA, 21 nt, Human
gauaaagauugugugguguuu

SEQ ID NO: 3740230 - RNA, 19 nt, Human
gauaaagauuuuuuaauaa

SEQ ID NO: 3740231 - RNA, 16 nt, Human
gauaaagcagcucagg

SEQ ID NO: 3740232 - RNA, 17 nt, Human
gauaaagccacugaaaa

SEQ ID NO: 3740233 - RNA, 18 nt, Human
gauaaagguucaugcaaa

SEQ ID NO: 3740234 - RNA, 17 nt, Human
gauaaaguaguaaaaau

SEQ ID NO: 3740235 - RNA, 19 nt, Human
gauaaaguugguaaaccuu

SEQ ID NO: 3740236 - RNA, 18 nt, Human
gauaaauaaucggcccac

SEQ ID NO: 3740237 - RNA, 17 nt, Human
gauaaauaguguuauug

SEQ ID NO: 3740238 - RNA, 22 nt, Human
gauaaauaguuuaugauuccac

SEQ ID NO: 3740239 - RNA, 15 nt, Human
gauaaauauuauauu

SEQ ID NO: 3740240 - RNA, 19 nt, Human
gauaaaucauaaagucagu

SEQ ID NO: 3740241 - RNA, 11 nt, Human
gauaaaugcca

SEQ ID NO: 3740242 - RNA, 15 nt, Human
gauaaaugccaucaa

SEQ ID NO: 3740243 - RNA, 12 nt, Human
gauaaauuauaa

SEQ ID NO: 3740244 - RNA, 16 nt, Human
gauaaauuccacugga

SEQ ID NO: 3740245 - RNA, 11 nt, Human
gauaacaaaga

SEQ ID NO: 3740246 - RNA, 11 nt, Human
gauaacagcua

SEQ ID NO: 3740247 - RNA, 17 nt, Human
gauaaccuauaugauuu

SEQ ID NO: 3740248 - RNA, 21 nt, Human
gauaacgcuuaaaggaaguca

SEQ ID NO: 3740249 - RNA, 20 nt, Human
gauaacuagauggugcugag

SEQ ID NO: 3740250 - RNA, 17 nt, Human
gauaacuguuauuuaua

SEQ ID NO: 3740251 - RNA, 16 nt, Human
gauaacuuuacagaaa

SEQ ID NO: 3740252 - RNA, 19 nt, Human
gauaacuuuacagaaaugg

SEQ ID NO: 3740253 - RNA, 11 nt, Human
gauaagaaaac

SEQ ID NO: 3740254 - RNA, 20 nt, Human
gauaagagggcacacacugu

SEQ ID NO: 3740255 - RNA, 22 nt, Human
gauaagaguagaaacugcaggg

SEQ ID NO: 3740256 - RNA, 16 nt, Human
gauaagaguuggcugg

SEQ ID NO: 3740257 - RNA, 20 nt, Human
gauaaggacaugaugcuuuu

SEQ ID NO: 3740258 - RNA, 20 nt, Human
gauaagguaaaaugccauga

SEQ ID NO: 3740259 - RNA, 22 nt, Human
gauaaguguucugucugacuuu

SEQ ID NO: 3740260 - RNA, 14 nt, Human
gauaaguucauaca

SEQ ID NO: 3740261 - RNA, 23 nt, Human
gauaaguucuuaugccauguuaa

SEQ ID NO: 3740262 - RNA, 21 nt, Human
gauaauaaggaaaaguuuaau

SEQ ID NO: 3740263 - RNA, 22 nt, Human
gauaauaaggaaaaguuuaaua

SEQ ID NO: 3740264 - RNA, 17 nt, Human
gauaauaauauuguuuu

SEQ ID NO: 3740265 - RNA, 20 nt, Human
gauaauaauauuguuuuucu

SEQ ID NO: 3740266 - RNA, 12 nt, Human
gauaauacacca

SEQ ID NO: 3740267 - RNA, 22 nt, Human
gauaauacaccacuacauucug

SEQ ID NO: 3740268 - RNA, 24 nt, Human
gauaauacaccacuacauucuguu

SEQ ID NO: 3740269 - RNA, 22 nt, Human
gauaauauuguuugguaaaugu

SEQ ID NO: 3740270 - RNA, 15 nt, Human
gauaaucagccucuu

SEQ ID NO: 3740271 - RNA, 20 nt, Human
gauaaucucagugcuuuccu

SEQ ID NO: 3740272 - RNA, 18 nt, Human
gauaaucuuagcugccaa

SEQ ID NO: 3740273 - RNA, 15 nt, Human
gauaaugauaaaaca

SEQ ID NO: 3740274 - RNA, 19 nt, Human
gauaaugguguuuuuuaga

SEQ ID NO: 3740275 - RNA, 15 nt, Human
gauaauguauuuuaa

SEQ ID NO: 3740276 - RNA, 17 nt, Human
gauaauuccaguggucc

SEQ ID NO: 3740277 - RNA, 18 nt, Human
gauaauucuagcuuugag

SEQ ID NO: 3740278 - RNA, 11 nt, Human
gauaauugcua

SEQ ID NO: 3740279 - RNA, 12 nt, Human
gauaauuuuaaa

SEQ ID NO: 3740280 - RNA, 22 nt, Human
gauaauuuuccuuuaauaugaa

SEQ ID NO: 3740281 - RNA, 16 nt, Human
gauacaaaagcaugug

SEQ ID NO: 3740282 - RNA, 19 nt, Human
gauacaaacacuacagaca

SEQ ID NO: 3740283 - RNA, 16 nt, Human
gauacaaaugucuauc

SEQ ID NO: 3740284 - RNA, 17 nt, Human
gauacaaaugucuauca

SEQ ID NO: 3740285 - RNA, 16 nt, Human
gauacaaccucccucu

SEQ ID NO: 3740286 - RNA, 16 nt, Human
gauacaaucagcugcu

SEQ ID NO: 3740287 - RNA, 18 nt, Human
gauacaaugcugugcccu

SEQ ID NO: 3740288 - RNA, 18 nt, Human
gauacacucaagcaugaa

SEQ ID NO: 3740289 - RNA, 23 nt, Human
gauacacucaagcaugaagauaa

SEQ ID NO: 3740290 - RNA, 20 nt, Human
gauacacugaaguuaacaga

SEQ ID NO: 3740291 - RNA, 16 nt, Human
gauacagcaguagaca

SEQ ID NO: 3740292 - RNA, 18 nt, Human
gauacagcaguagacauu

SEQ ID NO: 3740293 - RNA, 20 nt, Human
gauacaggaaaagcugcuga

SEQ ID NO: 3740294 - RNA, 21 nt, Human
gauacauaacuaaauuugaua

SEQ ID NO: 3740295 - RNA, 17 nt, Human
gauacaugucuuucucc

SEQ ID NO: 3740296 - RNA, 21 nt, Human
gauacauuuguauguugugaa

SEQ ID NO: 3740297 - RNA, 21 nt, Human
gauaccaucagcaaagaauuu

SEQ ID NO: 3740298 - RNA, 13 nt, Human
gauacccauccca

SEQ ID NO: 3740299 - RNA, 21 nt, Human
gauaccuuaaaauuugaaaca

SEQ ID NO: 3740300 - RNA, 20 nt, Human
gauaccuucuuauuuaaucu

SEQ ID NO: 3740301 - RNA, 16 nt, Human
gauacgacaguacacu

SEQ ID NO: 3740302 - RNA, 21 nt, Human
gauacgaguuuuggccgggug

SEQ ID NO: 3740303 - RNA, 22 nt, Human
gauacgaguuuuggccgggugc

SEQ ID NO: 3740304 - RNA, 16 nt, Human
gauacgcaucagacag

SEQ ID NO: 3740305 - RNA, 15 nt, Human
gauacgugucaaugu

SEQ ID NO: 3740306 - RNA, 20 nt, Human
gauacuaaaaguucuucucc

SEQ ID NO: 3740307 - RNA, 22 nt, Human
gauacuaaaaguucuucuccaa

SEQ ID NO: 3740308 - RNA, 22 nt, Human
gauacuaauaaacuaauaauug

SEQ ID NO: 3740309 - RNA, 11 nt, Human
gauacuacagu

SEQ ID NO: 3740310 - RNA, 14 nt, Human
gauacucauuucuu

SEQ ID NO: 3740311 - RNA, 12 nt, Human
gauacucucuuc

SEQ ID NO: 3740312 - RNA, 13 nt, Human
gauacucugggaa

SEQ ID NO: 3740313 - RNA, 13 nt, Human
gauacugccuccc

SEQ ID NO: 3740314 - RNA, 17 nt, Human
gauacugccucccccag

SEQ ID NO: 3740315 - RNA, 15 nt, Human
gauacugcuguguaa

SEQ ID NO: 3740316 - RNA, 22 nt, Human
gauacuguaacacuuuacaaug

SEQ ID NO: 3740317 - RNA, 21 nt, Human
gauacuguaucaugacaaaga

SEQ ID NO: 3740318 - RNA, 22 nt, Human
gauacuuauauuuucguaugaa

SEQ ID NO: 3740319 - RNA, 22 nt, Human
gauacuucgacacuguucuuag

SEQ ID NO: 3740320 - RNA, 16 nt, Human
gauacuugaauaacca

SEQ ID NO: 3740321 - RNA, 22 nt, Human
gauacuuggucacagccaggcg

SEQ ID NO: 3740322 - RNA, 18 nt, Human
gauacuuugauauuuuca

SEQ ID NO: 3740323 - RNA, 20 nt, Human
gauagaaauaaauagcuaua

SEQ ID NO: 3740324 - RNA, 22 nt, Human
gauagaggaagccugauuaaag

SEQ ID NO: 3740325 - RNA, 14 nt, Human
gauagauaacucuu

SEQ ID NO: 3740326 - RNA, 16 nt, Human
gauagaugcuggccca

SEQ ID NO: 3740327 - RNA, 23 nt, Human
gauagcaaagcgacguuagucgu

SEQ ID NO: 3740328 - RNA, 20 nt, Human
gauagcaagugaauuuuucu

SEQ ID NO: 3740329 - RNA, 18 nt, Human
gauagcacagacccugcc

SEQ ID NO: 3740330 - RNA, 14 nt, Human
gauagcacuuucua

SEQ ID NO: 3740331 - RNA, 16 nt, Human
guucugucccuugccc

SEQ ID NO: 3740332 - RNA, 16 nt, Human
guucugugacuaggaa

SEQ ID NO: 3740333 - RNA, 11 nt, Human
guucuguggaa

SEQ ID NO: 3740334 - RNA, 20 nt, Human
guucuguggaaaguguaaag

SEQ ID NO: 3740335 - RNA, 22 nt, Human
guucuguggaaaguguaaagca

SEQ ID NO: 3740336 - RNA, 21 nt, Human
guucugugguuucauguuagu

SEQ ID NO: 3740337 - RNA, 19 nt, Human
guucugugguuuuccccuc

SEQ ID NO: 3740338 - RNA, 13 nt, Human
guucuguguauuu

SEQ ID NO: 3740339 - RNA, 15 nt, Human
guucugugucugugu

SEQ ID NO: 3740340 - RNA, 13 nt, Human
guucugugucuuu

SEQ ID NO: 3740341 - RNA, 22 nt, Human
guucugugucuuucacagcucc

SEQ ID NO: 3740342 - RNA, 21 nt, Human
guucuguguuuaauuucuuca

SEQ ID NO: 3740343 - RNA, 17 nt, Human
guucuguuaacugaaua

SEQ ID NO: 3740344 - RNA, 18 nt, Human
guucuguuaacugaauac

SEQ ID NO: 3740345 - RNA, 19 nt, Human
guucuguuaacugaauacc

SEQ ID NO: 3740346 - RNA, 14 nt, Human
guucuguuacaaaa

SEQ ID NO: 3740347 - RNA, 18 nt, Human
guucuguuacaaaaugua

SEQ ID NO: 3740348 - RNA, 19 nt, Human
guucuguuuacaucaguuu

SEQ ID NO: 3740349 - RNA, 14 nt, Human
guucuguuuguuau

SEQ ID NO: 3740350 - RNA, 16 nt, Human
guucuguuuugccuga

SEQ ID NO: 3740351 - RNA, 14 nt, Human
guucuuaauucuua

SEQ ID NO: 3740352 - RNA, 14 nt, Human
guucuuacugcuug

SEQ ID NO: 3740353 - RNA, 19 nt, Human
guucuuagcucaaugagca

SEQ ID NO: 3740354 - RNA, 15 nt, Human
guucuuaggcugcug

SEQ ID NO: 3740355 - RNA, 18 nt, Human
guucuuaggcugcuggga

SEQ ID NO: 3740356 - RNA, 18 nt, Human
guucuuaugcaaaaugga

SEQ ID NO: 3740357 - RNA, 17 nt, Human
guucuuauuuuuauaac

SEQ ID NO: 3740358 - RNA, 11 nt, Human
guucuucauga

SEQ ID NO: 3740359 - RNA, 15 nt, Human
guucuuccaaagcag

SEQ ID NO: 3740360 - RNA, 14 nt, Human
guucuuccucagcc

SEQ ID NO: 3740361 - RNA, 15 nt, Human
guucuuccucagcca

SEQ ID NO: 3740362 - RNA, 19 nt, Human
guucuucgacuguuguuau

SEQ ID NO: 3740363 - RNA, 14 nt, Human
guucuucgaggugg

SEQ ID NO: 3740364 - RNA, 22 nt, Human
guucuucgggaagagaggaguu

SEQ ID NO: 3740365 - RNA, 19 nt, Human
guucuucuaccacccacca

SEQ ID NO: 3740366 - RNA, 16 nt, Human
guucuucucaaaagaa

SEQ ID NO: 3740367 - RNA, 20 nt, Human
guucuucuuccugaagcuga

SEQ ID NO: 3740368 - RNA, 22 nt, Human
guucuucuuguucugagauuca

SEQ ID NO: 3740369 - RNA, 15 nt, Human
guucuugaagcagua

SEQ ID NO: 3740370 - RNA, 21 nt, Human
guucuugaggggaccaggagu

SEQ ID NO: 3740371 - RNA, 21 nt, Human
guucuugcagucaucagaagu

SEQ ID NO: 3740372 - RNA, 17 nt, Human
guucuugccacuuuuuu

SEQ ID NO: 3740373 - RNA, 16 nt, Human
guucuugcugcuagaa

SEQ ID NO: 3740374 - RNA, 19 nt, Human
guucuugcugcuagaacuu

SEQ ID NO: 3740375 - RNA, 20 nt, Human
guucuugcugcuagaacuuu

SEQ ID NO: 3740376 - RNA, 21 nt, Human
guucuugcugcuagaacuuuu

SEQ ID NO: 3740377 - RNA, 21 nt, Human
guucuuguauuaagaaugaaa

SEQ ID NO: 3740378 - RNA, 13 nt, Human
guucuuguuggug

SEQ ID NO: 3740379 - RNA, 18 nt, Human
guguauguuugcacacuu

SEQ ID NO: 3740380 - RNA, 22 nt, Human
guguauguuugcacacuugugu

SEQ ID NO: 3740381 - RNA, 15 nt, Human
guguauguuuuucag

SEQ ID NO: 3740382 - RNA, 17 nt, Human
guguauuuaauuguaaa

SEQ ID NO: 3740383 - RNA, 19 nt, Human
guguauuuaauuguaaacu

SEQ ID NO: 3740384 - RNA, 22 nt, Human
guguauuuaauuguaaacugua

SEQ ID NO: 3740385 - RNA, 21 nt, Human
guguauuuacgcuuugauuca

SEQ ID NO: 3740386 - RNA, 13 nt, Human
guguauuucaguu

SEQ ID NO: 3740387 - RNA, 14 nt, Human
guguauuugcuuuu

SEQ ID NO: 3740388 - RNA, 18 nt, Human
guguauuuuauaaaauua

SEQ ID NO: 3740389 - RNA, 23 nt, Human
guguauuuuucaauaaagcauuu

SEQ ID NO: 3740390 - RNA, 19 nt, Human
gugucaaauaaacacugug

SEQ ID NO: 3740391 - RNA, 16 nt, Human
gugucaagcugcucug

SEQ ID NO: 3740392 - RNA, 17 nt, Human
gugucaagcugcucuga

SEQ ID NO: 3740393 - RNA, 17 nt, Human
gugucaaguggcaaagc

SEQ ID NO: 3740394 - RNA, 13 nt, Human
gugucacaaagaa

SEQ ID NO: 3740395 - RNA, 18 nt, Human
gugucaccuuuucuugcc

SEQ ID NO: 3740396 - RNA, 23 nt, Human
gugucacuacucacagucucuuu

SEQ ID NO: 3740397 - RNA, 15 nt, Human
gugucacucaaggcg

SEQ ID NO: 3740398 - RNA, 15 nt, Human
gugucacuggcugcc

SEQ ID NO: 3740399 - RNA, 17 nt, Human
gugucacuggcugccuc

SEQ ID NO: 3740400 - RNA, 18 nt, Human
gugucacugucccuccug

SEQ ID NO: 3740401 - RNA, 19 nt, Human
gugucacuuacuguuucug

SEQ ID NO: 3740402 - RNA, 12 nt, Human
gugucagccauu

SEQ ID NO: 3740403 - RNA, 16 nt, Human
gugucagcugaggcug

SEQ ID NO: 3740404 - RNA, 17 nt, Human
gugucagcugaggcugg

SEQ ID NO: 3740405 - RNA, 18 nt, Human
gugucagcugaggcuggg

SEQ ID NO: 3740406 - RNA, 15 nt, Human
gugucaggcugcugg

SEQ ID NO: 3740407 - RNA, 22 nt, Human
gugucaggcugcuggcgccucu

SEQ ID NO: 3740408 - RNA, 20 nt, Human
gugucagguggggcagcuug

SEQ ID NO: 3740409 - RNA, 16 nt, Human
gugucaucagaagaua

SEQ ID NO: 3740410 - RNA, 20 nt, Human
gugucauccucacagugaac

SEQ ID NO: 3740411 - RNA, 23 nt, Human
gugucauuuggcuuuccagucau

SEQ ID NO: 3740412 - RNA, 14 nt, Human
guguccaacuccag

SEQ ID NO: 3740413 - RNA, 23 nt, Human
guguccaacuccaguacuggagc

SEQ ID NO: 3740414 - RNA, 17 nt, Human
guguccaagugugugug

SEQ ID NO: 3740415 - RNA, 13 nt, Human
guguccaccuggc

SEQ ID NO: 3740416 - RNA, 18 nt, Human
guguccacgacugucucc

SEQ ID NO: 3740417 - RNA, 18 nt, Human
guguccaugcgcucaggg

SEQ ID NO: 3740418 - RNA, 20 nt, Human
guguccaugcgcucagggcc

SEQ ID NO: 3740419 - RNA, 19 nt, Human
guguccauugacauguaca

SEQ ID NO: 3740420 - RNA, 14 nt, Human
gugucccaggcagg

SEQ ID NO: 3740421 - RNA, 21 nt, Human
gugucccaugacccaccccug

SEQ ID NO: 3740422 - RNA, 23 nt, Human
gugucccaugacccaccccugug

SEQ ID NO: 3740423 - RNA, 12 nt, Human
guguccccaaca

SEQ ID NO: 3740424 - RNA, 18 nt, Human
guguccccaacagcgccc

SEQ ID NO: 3740425 - RNA, 22 nt, Human
guguccccaccaucugcugucu

SEQ ID NO: 3740426 - RNA, 18 nt, Human
gugucccccucuguccag

SEQ ID NO: 3740427 - RNA, 21 nt, Human
guguccccgcugcugugcaac

SEQ ID NO: 3740428 - RNA, 16 nt, Human
gugucccucucucugg

SEQ ID NO: 3740429 - RNA, 13 nt, Human
gugucccugcacu

SEQ ID NO: 3740430 - RNA, 12 nt, Human
guguccuacaga

SEQ ID NO: 3740431 - RNA, 16 nt, Human
guguccuccaggagcu

SEQ ID NO: 3740432 - RNA, 18 nt, Human
guguccuccccucaagga

SEQ ID NO: 3740433 - RNA, 13 nt, Human
guguccugaccac

SEQ ID NO: 3740434 - RNA, 20 nt, Human
guguccugaccacccucccc

SEQ ID NO: 3740435 - RNA, 13 nt, Human
guguccugagcuc

SEQ ID NO: 3740436 - RNA, 13 nt, Human
guguccugccugu

SEQ ID NO: 3740437 - RNA, 23 nt, Human
guguccuggugcucucugccacu

SEQ ID NO: 3740438 - RNA, 16 nt, Human
guguccuuagaacauu

SEQ ID NO: 3740439 - RNA, 17 nt, Human
guguccuugcaccugca

SEQ ID NO: 3740440 - RNA, 14 nt, Human
gugucuaaaaacac

SEQ ID NO: 3740441 - RNA, 14 nt, Human
gugucuaagauucu

SEQ ID NO: 3740442 - RNA, 19 nt, Human
gugucuaagauucuagauc

SEQ ID NO: 3740443 - RNA, 14 nt, Human
gugucuacagagaa

SEQ ID NO: 3740444 - RNA, 19 nt, Human
gugucuaggcaggaccugu

SEQ ID NO: 3740445 - RNA, 15 nt, Human
gugucucaggcugcc

SEQ ID NO: 3740446 - RNA, 20 nt, Human
gugucucaggcugccugagu

SEQ ID NO: 3740447 - RNA, 17 nt, Human
gugucuccaacccccca

SEQ ID NO: 3740448 - RNA, 19 nt, Human
gugucuccaaccccccagc

SEQ ID NO: 3740449 - RNA, 22 nt, Human
gugucuccuuaagcugcagaga

SEQ ID NO: 3740450 - RNA, 21 nt, Human
gugucucggagggauuccccu

SEQ ID NO: 3740451 - RNA, 18 nt, Human
gugucucuuuucucuuuc

SEQ ID NO: 3740452 - RNA, 17 nt, Human
gugucugcgaaguccua

SEQ ID NO: 3740453 - RNA, 15 nt, Human
gugucugcucaguaa

SEQ ID NO: 3740454 - RNA, 19 nt, Human
gugucuggaauuguggcua

SEQ ID NO: 3740455 - RNA, 22 nt, Human
gugucuggacauucagaacacc

SEQ ID NO: 3740456 - RNA, 21 nt, Human
gugucuggauucccaggauga

SEQ ID NO: 3740457 - RNA, 21 nt, Human
gugucuguacacguguccugu

SEQ ID NO: 3740458 - RNA, 22 nt, Human
gugucuguacacguguccugua

SEQ ID NO: 3740459 - RNA, 13 nt, Human
gugucuguauuua

SEQ ID NO: 3740460 - RNA, 16 nt, Human
gugucuguuuugagcu

SEQ ID NO: 3740461 - RNA, 19 nt, Human
gugucuuaauuauuauuug

SEQ ID NO: 3740462 - RNA, 17 nt, Human
gugucuuccacuuugca

SEQ ID NO: 3740463 - RNA, 13 nt, Human
gugucuuccugug

SEQ ID NO: 3740464 - RNA, 18 nt, Human
gugucuugcaauggcagc

SEQ ID NO: 3740465 - RNA, 16 nt, Human
gugucuugggcagagc

SEQ ID NO: 3740466 - RNA, 20 nt, Human
gugucuugggcagagcuggc

SEQ ID NO: 3740467 - RNA, 19 nt, Human
gugucuuuaaaugcugcuu

SEQ ID NO: 3740468 - RNA, 18 nt, Human
gugucuuucacagcuccu

SEQ ID NO: 3740469 - RNA, 16 nt, Human
gugucuuucuaagaaa

SEQ ID NO: 3740470 - RNA, 12 nt, Human
gugucuuuggag

SEQ ID NO: 3740471 - RNA, 18 nt, Human
gugugaaagucagaugcc

SEQ ID NO: 3740472 - RNA, 13 nt, Human
gugugaaauauau

SEQ ID NO: 3740473 - RNA, 17 nt, Human
gugugaacuggacccug

SEQ ID NO: 3740474 - RNA, 18 nt, Human
gugugaagguccugcuau

SEQ ID NO: 3740475 - RNA, 12 nt, Human
gugugaaguuag

SEQ ID NO: 3740476 - RNA, 16 nt, Human
gugugaauaaagugcu

SEQ ID NO: 3740477 - RNA, 13 nt, Human
gugugaaugaaca

SEQ ID NO: 3740478 - RNA, 19 nt, Human
gugugaaugugggcacugg

SEQ ID NO: 3740479 - RNA, 21 nt, Human
gugugaaugugggcacuggcc

SEQ ID NO: 3740480 - RNA, 13 nt, Human
gugugacagggcc

SEQ ID NO: 3740481 - RNA, 14 nt, Human
gugugacagggcca

SEQ ID NO: 3740482 - RNA, 14 nt, Human
gugugacauuccag

SEQ ID NO: 3740483 - RNA, 18 nt, Human
gugugacauuuggagagg

SEQ ID NO: 3740484 - RNA, 15 nt, Human
gugugaccaacugug

SEQ ID NO: 3740485 - RNA, 15 nt, Human
gugugaccccuccug

SEQ ID NO: 3740486 - RNA, 17 nt, Human
gugugaccccuccuggg

SEQ ID NO: 3740487 - RNA, 22 nt, Human
gugugagaagugaaugcuggga

SEQ ID NO: 3740488 - RNA, 16 nt, Human
gugugaggagcugcug

SEQ ID NO: 3740489 - RNA, 19 nt, Human
gugugaggagcugcuggcu

SEQ ID NO: 3740490 - RNA, 17 nt, Human
gugugaggccagggcag

SEQ ID NO: 3740491 - RNA, 14 nt, Human
gugugagugugaca

SEQ ID NO: 3740492 - RNA, 19 nt, Human
gugugagugugacagggcc

SEQ ID NO: 3740493 - RNA, 22 nt, Human
gugugauauuucagaaauacag

SEQ ID NO: 3740494 - RNA, 18 nt, Human
gugugaucucuucagggu

SEQ ID NO: 3740495 - RNA, 16 nt, Human
gugugauugacagcuu

SEQ ID NO: 3740496 - RNA, 14 nt, Human
gugugauuuuucug

SEQ ID NO: 3740497 - RNA, 14 nt, Human
gugugcaaggcagc

SEQ ID NO: 3740498 - RNA, 19 nt, Human
gugugcaaugucugaguga

SEQ ID NO: 3740499 - RNA, 17 nt, Human
gugugcacuaaggggcc

SEQ ID NO: 3740500 - RNA, 14 nt, Human
gugugcauauugua

SEQ ID NO: 3740501 - RNA, 15 nt, Human
gugugcauauuguac

SEQ ID NO: 3740502 - RNA, 22 nt, Human
gugugcauggaggcccuccugu

SEQ ID NO: 3740503 - RNA, 12 nt, Human
gugugcaugugu

SEQ ID NO: 3740504 - RNA, 18 nt, Human
gugugcaugugugugcuc

SEQ ID NO: 3740505 - RNA, 20 nt, Human
gugugcaugugugugcucag

SEQ ID NO: 3740506 - RNA, 21 nt, Human
gugugccauagaguuuaacac

SEQ ID NO: 3740507 - RNA, 16 nt, Human
gugugccccccauccu

SEQ ID NO: 3740508 - RNA, 17 nt, Human
gugugccccccauccug

SEQ ID NO: 3740509 - RNA, 21 nt, Human
gugugccccccauccuggccc

SEQ ID NO: 3740510 - RNA, 23 nt, Human
gugugccccccauccuggcccau

SEQ ID NO: 3740511 - RNA, 19 nt, Human
gugugccucaguauauuua

SEQ ID NO: 3740512 - RNA, 11 nt, Human
gugugccucua

SEQ ID NO: 3740513 - RNA, 17 nt, Human
gugugccucuagcugaa

SEQ ID NO: 3740514 - RNA, 18 nt, Human
gugugccugacugcccag

SEQ ID NO: 3740515 - RNA, 18 nt, Human
gugugccugcagccccgc

SEQ ID NO: 3740516 - RNA, 16 nt, Human
gugugccugggggagu

SEQ ID NO: 3740517 - RNA, 22 nt, Human
gugugccugucuguuacacugg

SEQ ID NO: 3740518 - RNA, 12 nt, Human
gugugccuucca

SEQ ID NO: 3740519 - RNA, 16 nt, Human
gugugcguccugucgg

SEQ ID NO: 3740520 - RNA, 18 nt, Human
guuuauuaacaaauuaug

SEQ ID NO: 3740521 - RNA, 22 nt, Human
guuuauuaaucuuaguguauga

SEQ ID NO: 3740522 - RNA, 13 nt, Human
guuuauuacagua

SEQ ID NO: 3740523 - RNA, 17 nt, Human
guuuauuacaguauaau

SEQ ID NO: 3740524 - RNA, 13 nt, Human
guuuauuacguau

SEQ ID NO: 3740525 - RNA, 17 nt, Human
guuuauuacuuauuugg

SEQ ID NO: 3740526 - RNA, 21 nt, Human
guuuauuacuuccaugaauuu

SEQ ID NO: 3740527 - RNA, 13 nt, Human
guuuauucauaug

SEQ ID NO: 3740528 - RNA, 20 nt, Human
guuuauuccagagcugccag

SEQ ID NO: 3740529 - RNA, 18 nt, Human
guuuauucuugaugaaaa

SEQ ID NO: 3740530 - RNA, 14 nt, Human
guuuauuucuuaaa

SEQ ID NO: 3740531 - RNA, 13 nt, Human
guuuauuuuaaga

SEQ ID NO: 3740532 - RNA, 14 nt, Human
guuuauuuuauauu

SEQ ID NO: 3740533 - RNA, 17 nt, Human
guuuauuuucuacguuu

SEQ ID NO: 3740534 - RNA, 18 nt, Human
guuuauuuuuauauagcu

SEQ ID NO: 3740535 - RNA, 19 nt, Human
guuucaaaaacacaguguu

SEQ ID NO: 3740536 - RNA, 16 nt, Human
guuucaaaaaucugaa

SEQ ID NO: 3740537 - RNA, 19 nt, Human
guuucaaacacaaaugcag

SEQ ID NO: 3740538 - RNA, 21 nt, Human
guuucaaacauauauaacaau

SEQ ID NO: 3740539 - RNA, 17 nt, Human
guuucaaacuuuacuau

SEQ ID NO: 3740540 - RNA, 23 nt, Human
guuucaaccaagucaugugcauu

SEQ ID NO: 3740541 - RNA, 13 nt, Human
guuucaagaggag

SEQ ID NO: 3740542 - RNA, 18 nt, Human
guuucaauaaaguuugau

SEQ ID NO: 3740543 - RNA, 16 nt, Human
guuucaauugcaucuc

SEQ ID NO: 3740544 - RNA, 14 nt, Human
guuucacagaaaau

SEQ ID NO: 3740545 - RNA, 16 nt, Human
guuucacaguuugaaa

SEQ ID NO: 3740546 - RNA, 19 nt, Human
guuucacaguuugaaauaa

SEQ ID NO: 3740547 - RNA, 16 nt, Human
guuucacccuuaaccc

SEQ ID NO: 3740548 - RNA, 20 nt, Human
guuucacugacuuagaacca

SEQ ID NO: 3740549 - RNA, 16 nt, Human
guuucagauauauauc

SEQ ID NO: 3740550 - RNA, 18 nt, Human
guuucagcgacuccguug

SEQ ID NO: 3740551 - RNA, 23 nt, Human
guuucagcuaagggaagacauuu

SEQ ID NO: 3740552 - RNA, 22 nt, Human
guuucaggagagaguugaaccu

SEQ ID NO: 3740553 - RNA, 19 nt, Human
guuucagguagaggugcau

SEQ ID NO: 3740554 - RNA, 23 nt, Human
guuucagguagaggugcaugccu

SEQ ID NO: 3740555 - RNA, 16 nt, Human
guuucaggugacaugu

SEQ ID NO: 3740556 - RNA, 18 nt, Human
guuucauacucuagauuu

SEQ ID NO: 3740557 - RNA, 17 nt, Human
guuucauguuaguuacc

SEQ ID NO: 3740558 - RNA, 21 nt, Human
guuucauguuaguuaccuuau

SEQ ID NO: 3740559 - RNA, 19 nt, Human
guuucauguuuugugacua

SEQ ID NO: 3740560 - RNA, 15 nt, Human
guuucauucuccugc

SEQ ID NO: 3740561 - RNA, 19 nt, Human
guuucauucuccugccugu

SEQ ID NO: 3740562 - RNA, 21 nt, Human
guuucauuuagucaugugacc

SEQ ID NO: 3740563 - RNA, 16 nt, Human
guuuccaaccuggagu

SEQ ID NO: 3740564 - RNA, 14 nt, Human
guuuccaagcaaau

SEQ ID NO: 3740565 - RNA, 19 nt, Human
guuuccaaggagcugagaa

SEQ ID NO: 3740566 - RNA, 20 nt, Human
guuuccaaggagcugagaau

SEQ ID NO: 3740567 - RNA, 23 nt, Human
guuuccaauguuuagcaaauaca

SEQ ID NO: 3740568 - RNA, 17 nt, Human
guuuccagcagaagaca

SEQ ID NO: 3740569 - RNA, 19 nt, Human
guuuccagcauucccaggu

SEQ ID NO: 3740570 - RNA, 21 nt, Human
guuuccauagcaacaggaaaa

SEQ ID NO: 3740571 - RNA, 18 nt, Human
guuuccauuuuuuguucc

SEQ ID NO: 3740572 - RNA, 16 nt, Human
guuucccaagagcuac

SEQ ID NO: 3740573 - RNA, 19 nt, Human
guuucccaaugguguuuuu

SEQ ID NO: 3740574 - RNA, 21 nt, Human
guuucccauaauuuucuucau

SEQ ID NO: 3740575 - RNA, 17 nt, Human
guuuccccaccagugaa

SEQ ID NO: 3740576 - RNA, 13 nt, Human
guuuccgugcgug

SEQ ID NO: 3740577 - RNA, 15 nt, Human
guuuccuaaaaguuc

SEQ ID NO: 3740578 - RNA, 19 nt, Human
guuuccucaggcugcugga

SEQ ID NO: 3740579 - RNA, 20 nt, Human
guuuccucauuccugaaaga

SEQ ID NO: 3740580 - RNA, 18 nt, Human
guuuccucuaguucuuug

SEQ ID NO: 3740581 - RNA, 22 nt, Human
guuuccucuaguucuuuguuca

SEQ ID NO: 3740582 - RNA, 14 nt, Human
guuuccucuuccaa

SEQ ID NO: 3740583 - RNA, 16 nt, Human
guuuccugcaggccag

SEQ ID NO: 3740584 - RNA, 13 nt, Human
guuuccugcccug

SEQ ID NO: 3740585 - RNA, 22 nt, Human
guuuccugcccugggaggcagu

SEQ ID NO: 3740586 - RNA, 16 nt, Human
guuuccuggcacugcu

SEQ ID NO: 3740587 - RNA, 17 nt, Human
guuuccuggcacuggac

SEQ ID NO: 3740588 - RNA, 16 nt, Human
guuuccuuauauuaug

SEQ ID NO: 3740589 - RNA, 13 nt, Human
guuuccuucccuc

SEQ ID NO: 3740590 - RNA, 17 nt, Human
guuucgaagucauuaaa

SEQ ID NO: 3740591 - RNA, 17 nt, Human
guuucgagaagcugcuc

SEQ ID NO: 3740592 - RNA, 22 nt, Human
guuucggccuucauaauggccu

SEQ ID NO: 3740593 - RNA, 20 nt, Human
guuucgugaaguauacugua

SEQ ID NO: 3740594 - RNA, 23 nt, Human
guuucguggggaggucuaaucua

SEQ ID NO: 3740595 - RNA, 15 nt, Human
guuucguuauauuaa

SEQ ID NO: 3740596 - RNA, 16 nt, Human
guuucguuucuguaua

SEQ ID NO: 3740597 - RNA, 19 nt, Human
guuucuaaaggcuaccuuu

SEQ ID NO: 3740598 - RNA, 23 nt, Human
guuucuaacacuagucugugugc

SEQ ID NO: 3740599 - RNA, 18 nt, Human
guuucuaagauucuaaag

SEQ ID NO: 3740600 - RNA, 21 nt, Human
guuucuaagauucuaaagguc

SEQ ID NO: 3740601 - RNA, 11 nt, Human
guuucuaaggu

SEQ ID NO: 3740602 - RNA, 18 nt, Human
guuucuaauaaacuugga

SEQ ID NO: 3740603 - RNA, 18 nt, Human
guuucuaauuugcugcug

SEQ ID NO: 3740604 - RNA, 21 nt, Human
guuucuagcaugaagacagag

SEQ ID NO: 3740605 - RNA, 18 nt, Human
guuucuagcuagaaauau

SEQ ID NO: 3740606 - RNA, 23 nt, Human
guuucuagcuagaaauaugauuu

SEQ ID NO: 3740607 - RNA, 19 nt, Human
guuucuauguguagggcgg

SEQ ID NO: 3740608 - RNA, 23 nt, Human
guuucuauuuucucugauacuuu

SEQ ID NO: 3740609 - RNA, 11 nt, Human
guuucuccccc

SEQ ID NO: 3740610 - RNA, 17 nt, Human
guuucucccccugggcu

SEQ ID NO: 3740611 - RNA, 22 nt, Human
guuucucccccugggcucugcc

SEQ ID NO: 3740612 - RNA, 23 nt, Human
guuucucccccugggcucugccc

SEQ ID NO: 3740613 - RNA, 22 nt, Human
guuucucccucucacugucuga

SEQ ID NO: 3740614 - RNA, 15 nt, Human
guuucucugcuguug

SEQ ID NO: 3740615 - RNA, 17 nt, Human
guuucucuugagcuggc

SEQ ID NO: 3740616 - RNA, 21 nt, Human
guuucucuuugauuauuugca

SEQ ID NO: 3740617 - RNA, 21 nt, Human
guuucugaaaauuaacacugc

SEQ ID NO: 3740618 - RNA, 21 nt, Human
guuucugauuugcugcucuuc

SEQ ID NO: 3740619 - RNA, 22 nt, Human
guuucugcaguagucucugugc

SEQ ID NO: 3740620 - RNA, 20 nt, Human
guuucugcauucauuuuuau

SEQ ID NO: 3740621 - RNA, 16 nt, Human
guuucuggguccugaa

SEQ ID NO: 3740622 - RNA, 20 nt, Human
guuucuggucucuaggcugg

SEQ ID NO: 3740623 - RNA, 17 nt, Human
guuucugucguuaaaaa

SEQ ID NO: 3740624 - RNA, 14 nt, Human
guuucugucuccuc

SEQ ID NO: 3740625 - RNA, 13 nt, Human
guuucugucugua

SEQ ID NO: 3740626 - RNA, 22 nt, Human
guuucugugguuggcugggaaa

SEQ ID NO: 3740627 - RNA, 14 nt, Human
guuucuguuccaaa

SEQ ID NO: 3740628 - RNA, 15 nt, Human
guuucuguuccaaau

SEQ ID NO: 3740629 - RNA, 18 nt, Human
guuucuguucuguggaaa

SEQ ID NO: 3740630 - RNA, 17 nt, Human
guuucuguuugauucuu

SEQ ID NO: 3740631 - RNA, 20 nt, Human
guuucuucaacaggagaauu

SEQ ID NO: 3740632 - RNA, 14 nt, Human
guuucuuccuguua

SEQ ID NO: 3740633 - RNA, 20 nt, Human
guuucuuccuguuaauguau

SEQ ID NO: 3740634 - RNA, 22 nt, Human
guuucuugccucauuuuuuucc

SEQ ID NO: 3740635 - RNA, 23 nt, Human
guuucuugccucauuuuuuuccu

SEQ ID NO: 3740636 - RNA, 18 nt, Human
guuucuugcuuguaccuc

SEQ ID NO: 3740637 - RNA, 19 nt, Human
guuucuugcuuguaccucu

SEQ ID NO: 3740638 - RNA, 20 nt, Human
guuucuuuauuuuguguaaa

SEQ ID NO: 3740639 - RNA, 19 nt, Human
guuucuuuccugccuucuu

SEQ ID NO: 3740640 - RNA, 21 nt, Human
guuucuuuccugccuucuucu

SEQ ID NO: 3740641 - RNA, 18 nt, Human
guuucuuucuaguggucu

SEQ ID NO: 3740642 - RNA, 20 nt, Human
guuucuuugaucaugaauaa

SEQ ID NO: 3740643 - RNA, 17 nt, Human
guuucuuuuguauguaa

SEQ ID NO: 3740644 - RNA, 16 nt, Human
guuugaaacaaagaag

SEQ ID NO: 3740645 - RNA, 14 nt, Human
guuugaaaucuuuu

SEQ ID NO: 3740646 - RNA, 11 nt, Human
guuugaaauuc

SEQ ID NO: 3740647 - RNA, 16 nt, Human
guuugaaauucugaau

SEQ ID NO: 3740648 - RNA, 17 nt, Human
guuugaaauucugaauu

SEQ ID NO: 3740649 - RNA, 21 nt, Human
guuugaacacgaaagaaaugu

SEQ ID NO: 3740650 - RNA, 17 nt, Human
guuugaaggaggugagg

SEQ ID NO: 3740651 - RNA, 17 nt, Human
guuugaauauaaacacu

SEQ ID NO: 3740652 - RNA, 13 nt, Human
guuugaauaugga

SEQ ID NO: 3740653 - RNA, 14 nt, Human
guuugaauauggac

SEQ ID NO: 3740654 - RNA, 13 nt, Human
guuugaccucaca

SEQ ID NO: 3740655 - RNA, 21 nt, Human
guuugaccucacagugacccu

SEQ ID NO: 3740656 - RNA, 20 nt, Human
guuugagaagaaaacaucua

SEQ ID NO: 3740657 - RNA, 18 nt, Human
guuugagacacugguuua

SEQ ID NO: 3740658 - RNA, 22 nt, Human
guuugaggagcauguuuuguau

SEQ ID NO: 3740659 - RNA, 22 nt, Human
guuugaggauuaguuuagaaca

SEQ ID NO: 3740660 - RNA, 22 nt, Human
guuugaucuuccucugcuaaau

SEQ ID NO: 3740661 - RNA, 15 nt, Human
guuugaugaggcccu

SEQ ID NO: 3740662 - RNA, 20 nt, Human
guuugaugucauuaaugugu

SEQ ID NO: 3740663 - RNA, 20 nt, Human
guuugauucagacagcugcc

SEQ ID NO: 3740664 - RNA, 22 nt, Human
guuugcacguuaugguguuucu

SEQ ID NO: 3740665 - RNA, 22 nt, Human
guuugcacucaaaucuuaagaa

SEQ ID NO: 3740666 - RNA, 14 nt, Human
guuugcacuuccuc

SEQ ID NO: 3740667 - RNA, 22 nt, Human
guuugcagaaaagcaccugccg

SEQ ID NO: 3740668 - RNA, 19 nt, Human
gaucugcucagcccuggag

SEQ ID NO: 3740669 - RNA, 20 nt, Human
gaucugcucagcccuggagg

SEQ ID NO: 3740670 - RNA, 17 nt, Human
gaucugcugcagagcag

SEQ ID NO: 3740671 - RNA, 14 nt, Human
gaucuggaacccag

SEQ ID NO: 3740672 - RNA, 16 nt, Human
gaucuggaacccagac

SEQ ID NO: 3740673 - RNA, 17 nt, Human
gaucuggaacccagacu

SEQ ID NO: 3740674 - RNA, 22 nt, Human
gaucuggaagggccaaggucug

SEQ ID NO: 3740675 - RNA, 12 nt, Human
gaucuggcaugu

SEQ ID NO: 3740676 - RNA, 22 nt, Human
gaucugggacccuuuccuuccu

SEQ ID NO: 3740677 - RNA, 20 nt, Human
gaucuggguucacugcaacc

SEQ ID NO: 3740678 - RNA, 24 nt, Human
gaucugguuuugcuauuagacugu

SEQ ID NO: 3740679 - RNA, 15 nt, Human
gaucuguauauacaa

SEQ ID NO: 3740680 - RNA, 23 nt, Human
gaucuguauauuuuuuucuaaga

SEQ ID NO: 3740681 - RNA, 16 nt, Human
gaucugucacaccagc

SEQ ID NO: 3740682 - RNA, 15 nt, Human
gaucuguccaaggaa

SEQ ID NO: 3740683 - RNA, 12 nt, Human
gaucugucuugu

SEQ ID NO: 3740684 - RNA, 22 nt, Human
gaucugucuuguaauauuuugu

SEQ ID NO: 3740685 - RNA, 21 nt, Human
gaucugugaggggcucucuca

SEQ ID NO: 3740686 - RNA, 20 nt, Human
gaucugugcuuuccagcuca

SEQ ID NO: 3740687 - RNA, 13 nt, Human
gaucuguuuugaa

SEQ ID NO: 3740688 - RNA, 12 nt, Human
gaucuuaaauuu

SEQ ID NO: 3740689 - RNA, 13 nt, Human
gaucuuaaauuuu

SEQ ID NO: 3740690 - RNA, 19 nt, Human
gaucuuaagaggcugacag

SEQ ID NO: 3740691 - RNA, 14 nt, Human
gaucuuagauucuc

SEQ ID NO: 3740692 - RNA, 19 nt, Human
gaucuuauuuuucuaaacg

SEQ ID NO: 3740693 - RNA, 21 nt, Human
gaucuuauuuuucuaaacgua

SEQ ID NO: 3740694 - RNA, 24 nt, Human
gaucuucaaaaguaaugccucugu

SEQ ID NO: 3740695 - RNA, 13 nt, Human
gaucuucaacaaa

SEQ ID NO: 3740696 - RNA, 16 nt, Human
gaucuucaacaaauug

SEQ ID NO: 3740697 - RNA, 14 nt, Human
gaucuucaauggcu

SEQ ID NO: 3740698 - RNA, 15 nt, Human
gaucuucaauggcuu

SEQ ID NO: 3740699 - RNA, 16 nt, Human
gaucuucaucugacua

SEQ ID NO: 3740700 - RNA, 23 nt, Human
gaucuucaucugacuaugacaua

SEQ ID NO: 3740701 - RNA, 14 nt, Human
gaucuugaaugugg

SEQ ID NO: 3740702 - RNA, 22 nt, Human
gaucuugaauguggucucagga

SEQ ID NO: 3740703 - RNA, 15 nt, Human
gaucuuucagaaaua

SEQ ID NO: 3740704 - RNA, 16 nt, Human
gaucuuucagaaauau

SEQ ID NO: 3740705 - RNA, 11 nt, Human
gaucuuucagg

SEQ ID NO: 3740706 - RNA, 12 nt, Human
gaucuuucagga

SEQ ID NO: 3740707 - RNA, 14 nt, Human
gaucuuugcagaca

SEQ ID NO: 3740708 - RNA, 17 nt, Human
gaucuuugcagacaggc

SEQ ID NO: 3740709 - RNA, 13 nt, Human
gaucuuuggacag

SEQ ID NO: 3740710 - RNA, 14 nt, Human
gaucuuuguggcca

SEQ ID NO: 3740711 - RNA, 15 nt, Human
gaucuuuguggccaa

SEQ ID NO: 3740712 - RNA, 16 nt, Human
gaucuuuguggccaag

SEQ ID NO: 3740713 - RNA, 20 nt, Human
gaucuuuuaaaguguuacuu

SEQ ID NO: 3740714 - RNA, 24 nt, Human
gaucuuuuguucccauccucuucu

SEQ ID NO: 3740715 - RNA, 19 nt, Human
gaugaaaaagcauguacag

SEQ ID NO: 3740716 - RNA, 18 nt, Human
gaugaaaaauugcugacu

SEQ ID NO: 3740717 - RNA, 21 nt, Human
gaugaaaaguauauugauaac

SEQ ID NO: 3740718 - RNA, 18 nt, Human
gaugaaaauaaagaaugg

SEQ ID NO: 3740719 - RNA, 15 nt, Human
gaugaaaauauuuaa

SEQ ID NO: 3740720 - RNA, 17 nt, Human
gaugaaacuaaagcaau

SEQ ID NO: 3740721 - RNA, 19 nt, Human
gaugaaacuaaagcaauag

SEQ ID NO: 3740722 - RNA, 16 nt, Human
gaugaaacucacaaau

SEQ ID NO: 3740723 - RNA, 19 nt, Human
gaugaaagagaaggugggu

SEQ ID NO: 3740724 - RNA, 14 nt, Human
gaugaaagaggagg

SEQ ID NO: 3740725 - RNA, 19 nt, Human
gaugaaaucuuacagcugg

SEQ ID NO: 3740726 - RNA, 16 nt, Human
gaugaaauguaaauac

SEQ ID NO: 3740727 - RNA, 23 nt, Human
gaugaaauuuucuagacuuucug

SEQ ID NO: 3740728 - RNA, 13 nt, Human
gaugaacagacug

SEQ ID NO: 3740729 - RNA, 18 nt, Human
gaugaaccacauuauaaa

SEQ ID NO: 3740730 - RNA, 19 nt, Human
gaugaacucuuucuggccu

SEQ ID NO: 3740731 - RNA, 19 nt, Human
gaugaacuuauucuguaga

SEQ ID NO: 3740732 - RNA, 21 nt, Human
gaugaagagugagagggcaug

SEQ ID NO: 3740733 - RNA, 15 nt, Human
gaugaagcaaacaca

SEQ ID NO: 3740734 - RNA, 21 nt, Human
gaugaagcaaggaagauauac

SEQ ID NO: 3740735 - RNA, 23 nt, Human
gaugaagcaaggaagauauacau

SEQ ID NO: 3740736 - RNA, 15 nt, Human
gaugaagcauuuaca

SEQ ID NO: 3740737 - RNA, 19 nt, Human
gaugaagccgaccuuagau

SEQ ID NO: 3740738 - RNA, 16 nt, Human
gaugaaguuuuacauu

SEQ ID NO: 3740739 - RNA, 17 nt, Human
gaugaaguuuuacauug

SEQ ID NO: 3740740 - RNA, 23 nt, Human
gaugaaguuuuacauuguugagc

SEQ ID NO: 3740741 - RNA, 13 nt, Human
gaugaaucacugu

SEQ ID NO: 3740742 - RNA, 13 nt, Human
gaugaaugagaau

SEQ ID NO: 3740743 - RNA, 23 nt, Human
gaugaaugaggucccaggcagag

SEQ ID NO: 3740744 - RNA, 16 nt, Human
gaugaaugccguggau

SEQ ID NO: 3740745 - RNA, 14 nt, Human
gaugaauguauuua

SEQ ID NO: 3740746 - RNA, 22 nt, Human
gaugaaugucaguuguuauuua

SEQ ID NO: 3740747 - RNA, 18 nt, Human
gaugacaacuacagaaaa

SEQ ID NO: 3740748 - RNA, 19 nt, Human
gaugacaacuacagaaaaa

SEQ ID NO: 3740749 - RNA, 22 nt, Human
gaugacaagaaaggcugcugua

SEQ ID NO: 3740750 - RNA, 15 nt, Human
gaugacaauaaagcu

SEQ ID NO: 3740751 - RNA, 15 nt, Human
gaugacauucccugc

SEQ ID NO: 3740752 - RNA, 21 nt, Human
gaugacauugacuauuuuugu

SEQ ID NO: 3740753 - RNA, 23 nt, Human
gaugacauugacuauuuuuguuu

SEQ ID NO: 3740754 - RNA, 12 nt, Human
gaugaccccucc

SEQ ID NO: 3740755 - RNA, 15 nt, Human
gaugaccccugccca

SEQ ID NO: 3740756 - RNA, 17 nt, Human
gaugacccuuuucauga

SEQ ID NO: 3740757 - RNA, 17 nt, Human
gaugaccucauuaaccg

SEQ ID NO: 3740758 - RNA, 18 nt, Human
gaugaccuugaaugaugc

SEQ ID NO: 3740759 - RNA, 19 nt, Human
gaugacgguauuaugcuuc

SEQ ID NO: 3740760 - RNA, 21 nt, Human
gaugacguacaaguaguucug

SEQ ID NO: 3740761 - RNA, 14 nt, Human
gaugacugaguccu

SEQ ID NO: 3740762 - RNA, 11 nt, Human
gaugagaaagg

SEQ ID NO: 3740763 - RNA, 22 nt, Human
gaugagaaagguugaagcacca

SEQ ID NO: 3740764 - RNA, 14 nt, Human
gaugagaacaaagc

SEQ ID NO: 3740765 - RNA, 22 nt, Human
gaugagaacaaagcuguuaaac

SEQ ID NO: 3740766 - RNA, 15 nt, Human
gaugagagcccagag

SEQ ID NO: 3740767 - RNA, 18 nt, Human
gaugagagcccagaggua

SEQ ID NO: 3740768 - RNA, 14 nt, Human
gaugagaggaaauc

SEQ ID NO: 3740769 - RNA, 13 nt, Human
gaugagaguuuug

SEQ ID NO: 3740770 - RNA, 16 nt, Human
gaugagauuuuuaaaa

SEQ ID NO: 3740771 - RNA, 16 nt, Human
gaugagcauggagcug

SEQ ID NO: 3740772 - RNA, 12 nt, Human
gaugagcauuua

SEQ ID NO: 3740773 - RNA, 22 nt, Human
gaugagcauuuagggcaaggag

SEQ ID NO: 3740774 - RNA, 20 nt, Human
gaugagcucccacaagccug

SEQ ID NO: 3740775 - RNA, 20 nt, Human
gaugagcucuacccagggcc

SEQ ID NO: 3740776 - RNA, 14 nt, Human
gaugagcugggccg

SEQ ID NO: 3740777 - RNA, 15 nt, Human
gaugagcuuucuuuu

SEQ ID NO: 3740778 - RNA, 16 nt, Human
gaugagcuuucuuuuu

SEQ ID NO: 3740779 - RNA, 22 nt, Human
gaugaggccagaccauggacac

SEQ ID NO: 3740780 - RNA, 19 nt, Human
gaugaggccgcuagaggcc

SEQ ID NO: 3740781 - RNA, 14 nt, Human
gaugaggccucuug

SEQ ID NO: 3740782 - RNA, 22 nt, Human
gaugaggccucuuggaccucug

SEQ ID NO: 3740783 - RNA, 16 nt, Human
gaugagggaugggccu

SEQ ID NO: 3740784 - RNA, 18 nt, Human
gaugagggaugggccugg

SEQ ID NO: 3740785 - RNA, 14 nt, Human
gaugagggcagcag

SEQ ID NO: 3740786 - RNA, 17 nt, Human
gaugagggcagcagcca

SEQ ID NO: 3740787 - RNA, 20 nt, Human
gaugagggcagcagccagcc

SEQ ID NO: 3740788 - RNA, 16 nt, Human
gaugagguauuuuuuc

SEQ ID NO: 3740789 - RNA, 16 nt, Human
gaugaggugcugggag

SEQ ID NO: 3740790 - RNA, 17 nt, Human
gaugaggugcugggagg

SEQ ID NO: 3740791 - RNA, 20 nt, Human
gaugaguccccugugagauu

SEQ ID NO: 3740792 - RNA, 21 nt, Human
gaugaguguaacaagaaagga

SEQ ID NO: 3740793 - RNA, 18 nt, Human
gaugauacaagauuagaa

SEQ ID NO: 3740794 - RNA, 15 nt, Human
gaugauacuuggaug

SEQ ID NO: 3740795 - RNA, 18 nt, Human
gaugauauaaugcgggug

SEQ ID NO: 3740796 - RNA, 18 nt, Human
gaugaucaauccuuuauu

SEQ ID NO: 3740797 - RNA, 13 nt, Human
gaugaucaauuau

SEQ ID NO: 3740798 - RNA, 19 nt, Human
gaugaucagcuguuuguca

SEQ ID NO: 3740799 - RNA, 22 nt, Human
gaugauccaugaguuugcccug

SEQ ID NO: 3740800 - RNA, 15 nt, Human
gaugauccccacgcc

SEQ ID NO: 3740801 - RNA, 21 nt, Human
gaugauccggauuuaauuuga

SEQ ID NO: 3740802 - RNA, 13 nt, Human
gaugauccuaggc

SEQ ID NO: 3740803 - RNA, 14 nt, Human
gaugauccuaggca

SEQ ID NO: 3740804 - RNA, 16 nt, Human
gaugaucuuuaaaaua

SEQ ID NO: 3740805 - RNA, 21 nt, Human
gaugaugaaaugaggucagag

SEQ ID NO: 3740806 - RNA, 21 nt, Human
gaugauggucuucagccucuu

SEQ ID NO: 3740807 - RNA, 15 nt, Human
gaugaugguguuuug

SEQ ID NO: 3740808 - RNA, 14 nt, Human
gaugaugugccugg

SEQ ID NO: 3740809 - RNA, 13 nt, Human
gaugauucaagcc

SEQ ID NO: 3740810 - RNA, 15 nt, Human
gaugauucaggugca

SEQ ID NO: 3740811 - RNA, 16 nt, Human
gaugauucaggugcag

SEQ ID NO: 3740812 - RNA, 19 nt, Human
gaugauugacaacacccau

SEQ ID NO: 3740813 - RNA, 17 nt, Human
gaugauuuaaaagggaa

SEQ ID NO: 3740814 - RNA, 16 nt, Human
gaugauuucaguucua

SEQ ID NO: 3740815 - RNA, 19 nt, Human
gaugauuucaguucuagga

SEQ ID NO: 3740816 - RNA, 22 nt, Human
gaugauuucaguucuaggaaaa

SEQ ID NO: 3740817 - RNA, 23 nt, Human
gaugauuucaguucuaggaaaau

SEQ ID NO: 3740818 - RNA, 16 nt, Human
gugugcguguuugcac

SEQ ID NO: 3740819 - RNA, 22 nt, Human
gugugcucuccauucugcuccu

SEQ ID NO: 3740820 - RNA, 23 nt, Human
gugugcucuccauucugcuccuu

SEQ ID NO: 3740821 - RNA, 22 nt, Human
gugugcucugaucauccacugu

SEQ ID NO: 3740822 - RNA, 14 nt, Human
gugugcuggaggac

SEQ ID NO: 3740823 - RNA, 19 nt, Human
gugugcugggagcuccacu

SEQ ID NO: 3740824 - RNA, 13 nt, Human
guguggacaggac

SEQ ID NO: 3740825 - RNA, 21 nt, Human
guguggacuguggcacuugcc

SEQ ID NO: 3740826 - RNA, 19 nt, Human
guguggauugccucugaaa

SEQ ID NO: 3740827 - RNA, 15 nt, Human
guguggccccuucac

SEQ ID NO: 3740828 - RNA, 14 nt, Human
guguggcuccuucc

SEQ ID NO: 3740829 - RNA, 12 nt, Human
gugugggaaagc

SEQ ID NO: 3740830 - RNA, 15 nt, Human
gugugggacuguaca

SEQ ID NO: 3740831 - RNA, 11 nt, Human
gugugggagac

SEQ ID NO: 3740832 - RNA, 14 nt, Human
gugugggggccccg

SEQ ID NO: 3740833 - RNA, 21 nt, Human
gugugggggccccgucucagg

SEQ ID NO: 3740834 - RNA, 16 nt, Human
gugugggggcugcagc

SEQ ID NO: 3740835 - RNA, 17 nt, Human
guguggguaccuguauu

SEQ ID NO: 3740836 - RNA, 23 nt, Human
guguggguguccugccugucugc

SEQ ID NO: 3740837 - RNA, 17 nt, Human
gugugguacagagaagc

SEQ ID NO: 3740838 - RNA, 16 nt, Human
gugugguagagugugc

SEQ ID NO: 3740839 - RNA, 14 nt, Human
guguggugcagugu

SEQ ID NO: 3740840 - RNA, 18 nt, Human
guguggugcagugugaaa

SEQ ID NO: 3740841 - RNA, 19 nt, Human
guguggugcagugugaaaa

SEQ ID NO: 3740842 - RNA, 15 nt, Human
gugugguggccucag

SEQ ID NO: 3740843 - RNA, 21 nt, Human
gugugguguuagggugcagcc

SEQ ID NO: 3740844 - RNA, 19 nt, Human
gugugguguuuccuggcac

SEQ ID NO: 3740845 - RNA, 15 nt, Human
gugugguuuagugua

SEQ ID NO: 3740846 - RNA, 18 nt, Human
gugugguuuaguguaaaa

SEQ ID NO: 3740847 - RNA, 22 nt, Human
gugugguuuaguguaaaaauga

SEQ ID NO: 3740848 - RNA, 17 nt, Human
guguguacucuguccag

SEQ ID NO: 3740849 - RNA, 17 nt, Human
guguguagacaaauauu

SEQ ID NO: 3740850 - RNA, 19 nt, Human
guguguagacaaauauuug

SEQ ID NO: 3740851 - RNA, 22 nt, Human
guguguauaagugcacacagaa

SEQ ID NO: 3740852 - RNA, 18 nt, Human
guguguaugcgugugugu

SEQ ID NO: 3740853 - RNA, 15 nt, Human
guguguaugcugcuu

SEQ ID NO: 3740854 - RNA, 13 nt, Human
guguguaugugua

SEQ ID NO: 3740855 - RNA, 11 nt, Human
guguguauuaa

SEQ ID NO: 3740856 - RNA, 14 nt, Human
guguguauuaaaaa

SEQ ID NO: 3740857 - RNA, 22 nt, Human
guguguauucuuaaaaugcaau

SEQ ID NO: 3740858 - RNA, 20 nt, Human
guguguccacgacugucucc

SEQ ID NO: 3740859 - RNA, 18 nt, Human
guguguccuugugcauga

SEQ ID NO: 3740860 - RNA, 20 nt, Human
guguguccuugugcaugagc

SEQ ID NO: 3740861 - RNA, 16 nt, Human
gugugucuccugcaug

SEQ ID NO: 3740862 - RNA, 16 nt, Human
gugugucugcucagua

SEQ ID NO: 3740863 - RNA, 20 nt, Human
gugugucuuuccucccugaa

SEQ ID NO: 3740864 - RNA, 14 nt, Human
gugugugcagagcu

SEQ ID NO: 3740865 - RNA, 17 nt, Human
gugugugcagagcugaa

SEQ ID NO: 3740866 - RNA, 19 nt, Human
gugugugcccucugggcuc

SEQ ID NO: 3740867 - RNA, 16 nt, Human
gugugugggagugugu

SEQ ID NO: 3740868 - RNA, 23 nt, Human
guguguggucaacauuucucaug

SEQ ID NO: 3740869 - RNA, 13 nt, Human
gugugugugaaug

SEQ ID NO: 3740870 - RNA, 15 nt, Human
gugugugugcguguu

SEQ ID NO: 3740871 - RNA, 10 nt, Human
gugugugugu

SEQ ID NO: 3740872 - RNA, 12 nt, Human
guguguguguau

SEQ ID NO: 3740873 - RNA, 11 nt, Human
gugugugugug

SEQ ID NO: 3740874 - RNA, 14 nt, Human
gugugugugugcac

SEQ ID NO: 3740875 - RNA, 12 nt, Human
gugugugugugu

SEQ ID NO: 3740876 - RNA, 15 nt, Human
gugugugugugugca

SEQ ID NO: 3740877 - RNA, 17 nt, Human
guguguuaagcucugcu

SEQ ID NO: 3740878 - RNA, 14 nt, Human
guguguuauuuaaa

SEQ ID NO: 3740879 - RNA, 15 nt, Human
guguguuccaacugc

SEQ ID NO: 3740880 - RNA, 18 nt, Human
guguguucugauuagaaa

SEQ ID NO: 3740881 - RNA, 16 nt, Human
guguguugauacuguu

SEQ ID NO: 3740882 - RNA, 23 nt, Human
guguguugauacuguugcacgug

SEQ ID NO: 3740883 - RNA, 13 nt, Human
guguguuggacag

SEQ ID NO: 3740884 - RNA, 13 nt, Human
guguguugucuug

SEQ ID NO: 3740885 - RNA, 18 nt, Human
guguguugucuugaaaga

SEQ ID NO: 3740886 - RNA, 19 nt, Human
guguguugugcuuucaaga

SEQ ID NO: 3740887 - RNA, 12 nt, Human
guguguugugug

SEQ ID NO: 3740888 - RNA, 14 nt, Human
guguguuuaugugu

SEQ ID NO: 3740889 - RNA, 15 nt, Human
guguguuucuguccu

SEQ ID NO: 3740890 - RNA, 14 nt, Human
guguguuugugauu

SEQ ID NO: 3740891 - RNA, 14 nt, Human
guguguuuguguga

SEQ ID NO: 3740892 - RNA, 20 nt, Human
guguguuuugagaguauauu

SEQ ID NO: 3740893 - RNA, 14 nt, Human
guguguuuuucaua

SEQ ID NO: 3740894 - RNA, 20 nt, Human
guguguuuuucuauuaaaag

SEQ ID NO: 3740895 - RNA, 19 nt, Human
guguguuuuugggaugucu

SEQ ID NO: 3740896 - RNA, 23 nt, Human
guguuaacagaagggagggcaga

SEQ ID NO: 3740897 - RNA, 14 nt, Human
guguuaagauugca

SEQ ID NO: 3740898 - RNA, 20 nt, Human
guguuaaucuuaauguauau

SEQ ID NO: 3740899 - RNA, 13 nt, Human
guguuaauuuaag

SEQ ID NO: 3740900 - RNA, 12 nt, Human
guguuaauuuuu

SEQ ID NO: 3740901 - RNA, 16 nt, Human
guguuaccugugugcu

SEQ ID NO: 3740902 - RNA, 14 nt, Human
guguuacuaaguuu

SEQ ID NO: 3740903 - RNA, 23 nt, Human
guguuacuagccucaaaauacau

SEQ ID NO: 3740904 - RNA, 16 nt, Human
guguuacugcaguuga

SEQ ID NO: 3740905 - RNA, 19 nt, Human
guguuacuguaauuccuca

SEQ ID NO: 3740906 - RNA, 16 nt, Human
guguuacuuauggaag

SEQ ID NO: 3740907 - RNA, 21 nt, Human
guguuagccuuuuuuccccag

SEQ ID NO: 3740908 - RNA, 15 nt, Human
guguuaggccuggca

SEQ ID NO: 3740909 - RNA, 18 nt, Human
guguuaggccuggcacag

SEQ ID NO: 3740910 - RNA, 19 nt, Human
guguuaggccuggcacagu

SEQ ID NO: 3740911 - RNA, 12 nt, Human
guguuaguuccc

SEQ ID NO: 3740912 - RNA, 17 nt, Human
guguuauaugaacauac

SEQ ID NO: 3740913 - RNA, 13 nt, Human
guguuauguauuu

SEQ ID NO: 3740914 - RNA, 21 nt, Human
guguuauuuauugcuacuucc

SEQ ID NO: 3740915 - RNA, 13 nt, Human
guguuauuuuuca

SEQ ID NO: 3740916 - RNA, 23 nt, Human
guguucaaggccauccuucccug

SEQ ID NO: 3740917 - RNA, 17 nt, Human
guguucauacauuugag

SEQ ID NO: 3740918 - RNA, 15 nt, Human
guguucccuauccaa

SEQ ID NO: 3740919 - RNA, 20 nt, Human
guguucccuuugucuuucaa

SEQ ID NO: 3740920 - RNA, 11 nt, Human
guguuccuggc

SEQ ID NO: 3740921 - RNA, 15 nt, Human
guguuccuggcaaua

SEQ ID NO: 3740922 - RNA, 14 nt, Human
guguuccuuccgcu

SEQ ID NO: 3740923 - RNA, 21 nt, Human
guguucguucuuguucuguuu

SEQ ID NO: 3740924 - RNA, 20 nt, Human
guguucuccugcugcucccu

SEQ ID NO: 3740925 - RNA, 23 nt, Human
guguucuccugcugcucccucag

SEQ ID NO: 3740926 - RNA, 16 nt, Human
guguucugauuagaaa

SEQ ID NO: 3740927 - RNA, 15 nt, Human
guguucuguuacaaa

SEQ ID NO: 3740928 - RNA, 17 nt, Human
guguucuguuacaaaau

SEQ ID NO: 3740929 - RNA, 18 nt, Human
guguucuguuacaaaaug

SEQ ID NO: 3740930 - RNA, 14 nt, Human
guguucuguuguuu

SEQ ID NO: 3740931 - RNA, 13 nt, Human
guguucuguuuug

SEQ ID NO: 3740932 - RNA, 13 nt, Human
guguugaaaacca

SEQ ID NO: 3740933 - RNA, 15 nt, Human
guguugaaaaccaaa

SEQ ID NO: 3740934 - RNA, 21 nt, Human
guguugaaaaccaaaaugaca

SEQ ID NO: 3740935 - RNA, 21 nt, Human
guguugaaacggaugauuucu

SEQ ID NO: 3740936 - RNA, 11 nt, Human
guguugacauu

SEQ ID NO: 3740937 - RNA, 13 nt, Human
guguugauacugu

SEQ ID NO: 3740938 - RNA, 16 nt, Human
guguugauacuguugc

SEQ ID NO: 3740939 - RNA, 18 nt, Human
guguugauacuguugcac

SEQ ID NO: 3740940 - RNA, 17 nt, Human
guguugccaaauauguc

SEQ ID NO: 3740941 - RNA, 14 nt, Human
guguugccaagcuc

SEQ ID NO: 3740942 - RNA, 18 nt, Human
guguugccaagcuccaag

SEQ ID NO: 3740943 - RNA, 20 nt, Human
guguugcccaggcuggucuc

SEQ ID NO: 3740944 - RNA, 18 nt, Human
guguugcgugucgugggu

SEQ ID NO: 3740945 - RNA, 16 nt, Human
guguugcuuauguugu

SEQ ID NO: 3740946 - RNA, 12 nt, Human
guguuggaaaaa

SEQ ID NO: 3740947 - RNA, 16 nt, Human
guguuggacaaaugug

SEQ ID NO: 3740948 - RNA, 14 nt, Human
guguuggacagaga

SEQ ID NO: 3740949 - RNA, 17 nt, Human
guguuggcccaagcucu

SEQ ID NO: 3740950 - RNA, 21 nt, Human
guguuggcuugugaucuggga

SEQ ID NO: 3740951 - RNA, 14 nt, Human
guguuggguaaauu

SEQ ID NO: 3740952 - RNA, 18 nt, Human
guguuguaauucuucagu

SEQ ID NO: 3740953 - RNA, 19 nt, Human
guguuguauuaacaaaagu

SEQ ID NO: 3740954 - RNA, 19 nt, Human
guguugucagcaucuucuc

SEQ ID NO: 3740955 - RNA, 17 nt, Human
guguugucauuguaaac

SEQ ID NO: 3740956 - RNA, 12 nt, Human
guguugucucua

SEQ ID NO: 3740957 - RNA, 16 nt, Human
guguugucuugaaaga

SEQ ID NO: 3740958 - RNA, 17 nt, Human
guguuguugcucuagga

SEQ ID NO: 3740959 - RNA, 13 nt, Human
guguuuaagacau

SEQ ID NO: 3740960 - RNA, 16 nt, Human
guguuuaauuucuuca

SEQ ID NO: 3740961 - RNA, 17 nt, Human
guguuuaauuucuucaa

SEQ ID NO: 3740962 - RNA, 14 nt, Human
guguuuacauuuua

SEQ ID NO: 3740963 - RNA, 18 nt, Human
guguuuagaauugaaggu

SEQ ID NO: 3740964 - RNA, 22 nt, Human
guguuuauaaaauauaaacaaa

SEQ ID NO: 3740965 - RNA, 22 nt, Human
guguuuauccuaucucuccaac

SEQ ID NO: 3740966 - RNA, 15 nt, Human
guguuuauccuuuca

SEQ ID NO: 3740967 - RNA, 13 nt, Human
guguuuauuguca

SEQ ID NO: 3740968 - RNA, 10 nt, Human
guguuuauuu

SEQ ID NO: 3740969 - RNA, 12 nt, Human
guguuucccaua

SEQ ID NO: 3740970 - RNA, 21 nt, Human
guuugcagaagggggucucuu

SEQ ID NO: 3740971 - RNA, 16 nt, Human
guuugcagucccaagc

SEQ ID NO: 3740972 - RNA, 19 nt, Human
guuugcauaaacauucuuu

SEQ ID NO: 3740973 - RNA, 15 nt, Human
guuugccauacuuug

SEQ ID NO: 3740974 - RNA, 18 nt, Human
guuugccgguggugcagg

SEQ ID NO: 3740975 - RNA, 14 nt, Human
guuugccugagggc

SEQ ID NO: 3740976 - RNA, 13 nt, Human
guuugcuaauguu

SEQ ID NO: 3740977 - RNA, 20 nt, Human
guuugcuaauguuuccauag

SEQ ID NO: 3740978 - RNA, 15 nt, Human
guuugcucagaacac

SEQ ID NO: 3740979 - RNA, 14 nt, Human
guuugcuccccuuc

SEQ ID NO: 3740980 - RNA, 23 nt, Human
guuugcuccccuuccccuuccuu

SEQ ID NO: 3740981 - RNA, 18 nt, Human
guuugcuguugauuucuu

SEQ ID NO: 3740982 - RNA, 15 nt, Human
guuugcuuauuguuc

SEQ ID NO: 3740983 - RNA, 17 nt, Human
guuugcuuauuguucca

SEQ ID NO: 3740984 - RNA, 19 nt, Human
guuugcuucaacugucucc

SEQ ID NO: 3740985 - RNA, 17 nt, Human
guuugcuucauaaauga

SEQ ID NO: 3740986 - RNA, 20 nt, Human
guuugcuucaugugucccag

SEQ ID NO: 3740987 - RNA, 21 nt, Human
guuuggaaauugauuuugaac

SEQ ID NO: 3740988 - RNA, 13 nt, Human
guuuggaaugcuu

SEQ ID NO: 3740989 - RNA, 19 nt, Human
guuuggaccccagcuggga

SEQ ID NO: 3740990 - RNA, 13 nt, Human
guuuggagacaga

SEQ ID NO: 3740991 - RNA, 18 nt, Human
guuuggauucuuauguag

SEQ ID NO: 3740992 - RNA, 21 nt, Human
guuuggauuuuuaauuaaaaa

SEQ ID NO: 3740993 - RNA, 14 nt, Human
guuuggcaaggaaa

SEQ ID NO: 3740994 - RNA, 15 nt, Human
guuuggcaauaguuu

SEQ ID NO: 3740995 - RNA, 12 nt, Human
guuuggccagaa

SEQ ID NO: 3740996 - RNA, 23 nt, Human
guuuggccagaagucaaggcuua

SEQ ID NO: 3740997 - RNA, 16 nt, Human
guuuggcgggccaagg

SEQ ID NO: 3740998 - RNA, 20 nt, Human
guuuggcugugucuaaacug

SEQ ID NO: 3740999 - RNA, 21 nt, Human
guuuggcugugucuaaacugc

SEQ ID NO: 3741000 - RNA, 23 nt, Human
guuuggcugugucuaaacugcau

SEQ ID NO: 3741001 - RNA, 16 nt, Human
guuuggcuuccuccug

SEQ ID NO: 3741002 - RNA, 21 nt, Human
guuugggaagagcuuagaaac

SEQ ID NO: 3741003 - RNA, 22 nt, Human
guuugggaccccuggugguuca

SEQ ID NO: 3741004 - RNA, 19 nt, Human
guuuggggcagaaaggacu

SEQ ID NO: 3741005 - RNA, 16 nt, Human
guuuggggcgaggcag

SEQ ID NO: 3741006 - RNA, 17 nt, Human
guuugggugauuccuaa

SEQ ID NO: 3741007 - RNA, 16 nt, Human
guuugguaaauguuuc

SEQ ID NO: 3741008 - RNA, 19 nt, Human
guuugguaaauguuucuuu

SEQ ID NO: 3741009 - RNA, 15 nt, Human
guuugguauuguauu

SEQ ID NO: 3741010 - RNA, 15 nt, Human
guuuggucuggacug

SEQ ID NO: 3741011 - RNA, 14 nt, Human
guuugguucugggg

SEQ ID NO: 3741012 - RNA, 17 nt, Human
guuuguaaauuaacuuu

SEQ ID NO: 3741013 - RNA, 13 nt, Human
guuuguaagaaaa

SEQ ID NO: 3741014 - RNA, 15 nt, Human
guuuguauaacuucu

SEQ ID NO: 3741015 - RNA, 13 nt, Human
guuuguauauugu

SEQ ID NO: 3741016 - RNA, 14 nt, Human
guuuguauguauaa

SEQ ID NO: 3741017 - RNA, 12 nt, Human
guuuguauuugg

SEQ ID NO: 3741018 - RNA, 13 nt, Human
guuugucauuagc

SEQ ID NO: 3741019 - RNA, 13 nt, Human
guuugucuauuuu

SEQ ID NO: 3741020 - RNA, 16 nt, Human
guuugucuauuuuaaa

SEQ ID NO: 3741021 - RNA, 16 nt, Human
guuugucucuccuuuu

SEQ ID NO: 3741022 - RNA, 13 nt, Human
guuugucucuucu

SEQ ID NO: 3741023 - RNA, 16 nt, Human
guuugucuguuuguuu

SEQ ID NO: 3741024 - RNA, 23 nt, Human
guuugugccuuuuuauuuuuguu

SEQ ID NO: 3741025 - RNA, 23 nt, Human
guuugugcugguguaugugugaa

SEQ ID NO: 3741026 - RNA, 13 nt, Human
guuugugcuucua

SEQ ID NO: 3741027 - RNA, 16 nt, Human
guuuguggccucagaa

SEQ ID NO: 3741028 - RNA, 18 nt, Human
guuuguggcuauuaaaac

SEQ ID NO: 3741029 - RNA, 13 nt, Human
guuugugugucuu

SEQ ID NO: 3741030 - RNA, 15 nt, Human
guuuguguguugucu

SEQ ID NO: 3741031 - RNA, 17 nt, Human
guuuguguucuguuuug

SEQ ID NO: 3741032 - RNA, 16 nt, Human
guuuguuaaaaauaaa

SEQ ID NO: 3741033 - RNA, 19 nt, Human
guuuguuaaaaauaaaucc

SEQ ID NO: 3741034 - RNA, 13 nt, Human
guuuguuaaaacu

SEQ ID NO: 3741035 - RNA, 17 nt, Human
guuuguuacauagguau

SEQ ID NO: 3741036 - RNA, 14 nt, Human
guuuguuauauccu

SEQ ID NO: 3741037 - RNA, 19 nt, Human
guuuguuggaucuucaaug

SEQ ID NO: 3741038 - RNA, 22 nt, Human
guuuguugguugguuuucuucu

SEQ ID NO: 3741039 - RNA, 18 nt, Human
guuuguuuauuagaugaa

SEQ ID NO: 3741040 - RNA, 23 nt, Human
guuuguuucauauauacaggcau

SEQ ID NO: 3741041 - RNA, 11 nt, Human
guuuguuuguu

SEQ ID NO: 3741042 - RNA, 16 nt, Human
guuuguuuguuuuguu

SEQ ID NO: 3741043 - RNA, 17 nt, Human
guuuguuuuguuuuuua

SEQ ID NO: 3741044 - RNA, 14 nt, Human
guuuguuuuugcgu

SEQ ID NO: 3741045 - RNA, 12 nt, Human
guuuguuuuugg

SEQ ID NO: 3741046 - RNA, 15 nt, Human
guuuguuuuuuugcc

SEQ ID NO: 3741047 - RNA, 15 nt, Human
guuuuaaaaaaauaa

SEQ ID NO: 3741048 - RNA, 21 nt, Human
guuuuaaaaaaauaaaacauu

SEQ ID NO: 3741049 - RNA, 15 nt, Human
guuuuaaaaagccag

SEQ ID NO: 3741050 - RNA, 16 nt, Human
guuuuaaaaagccagu

SEQ ID NO: 3741051 - RNA, 21 nt, Human
guuuuaaaaaggaacugcagc

SEQ ID NO: 3741052 - RNA, 16 nt, Human
guuuuaaaagccuugg

SEQ ID NO: 3741053 - RNA, 14 nt, Human
guuuuaaaauacug

SEQ ID NO: 3741054 - RNA, 18 nt, Human
guuuuaaaauacuguaga

SEQ ID NO: 3741055 - RNA, 19 nt, Human
guuuuaaaauacuguagau

SEQ ID NO: 3741056 - RNA, 21 nt, Human
guuuuaaaauacuguagauaa

SEQ ID NO: 3741057 - RNA, 16 nt, Human
guuuuaaaaugagaaa

SEQ ID NO: 3741058 - RNA, 17 nt, Human
guuuuaaaaugagaaau

SEQ ID NO: 3741059 - RNA, 22 nt, Human
guuuuaaauacgcacuacaugu

SEQ ID NO: 3741060 - RNA, 15 nt, Human
guuuuaaauguacag

SEQ ID NO: 3741061 - RNA, 22 nt, Human
guuuuaaauguacagacauauu

SEQ ID NO: 3741062 - RNA, 16 nt, Human
guuuuaaauguacagu

SEQ ID NO: 3741063 - RNA, 17 nt, Human
guuuuaacaagaagcaa

SEQ ID NO: 3741064 - RNA, 13 nt, Human
guuuuaacuuugu

SEQ ID NO: 3741065 - RNA, 15 nt, Human
guuuuaagaaaugua

SEQ ID NO: 3741066 - RNA, 16 nt, Human
guuuuaagaaauguag

SEQ ID NO: 3741067 - RNA, 16 nt, Human
guuuuaagaggcaggg

SEQ ID NO: 3741068 - RNA, 18 nt, Human
guuuuaaggaagaaaaau

SEQ ID NO: 3741069 - RNA, 14 nt, Human
guuuuaaucugaaa

SEQ ID NO: 3741070 - RNA, 16 nt, Human
guuuuaaucugaaauu

SEQ ID NO: 3741071 - RNA, 20 nt, Human
guuuuaauuccaauaugaug

SEQ ID NO: 3741072 - RNA, 22 nt, Human
guuuuaauuccaugaaucgcuu

SEQ ID NO: 3741073 - RNA, 16 nt, Human
guuuuaauugaaggaa

SEQ ID NO: 3741074 - RNA, 17 nt, Human
guuuuaauugaaggaaa

SEQ ID NO: 3741075 - RNA, 20 nt, Human
guuuuaauuuaguaaaccaa

SEQ ID NO: 3741076 - RNA, 19 nt, Human
guuuuaauuuauacuggca

SEQ ID NO: 3741077 - RNA, 12 nt, Human
guuuuacauugu

SEQ ID NO: 3741078 - RNA, 21 nt, Human
guuuuacauuguugagcuauu

SEQ ID NO: 3741079 - RNA, 13 nt, Human
guuuuacuuuuaa

SEQ ID NO: 3741080 - RNA, 21 nt, Human
guuuuacuuuuaaacugugua

SEQ ID NO: 3741081 - RNA, 13 nt, Human
guuuuagaaaaca

SEQ ID NO: 3741082 - RNA, 16 nt, Human
guuuuagaagguucuc

SEQ ID NO: 3741083 - RNA, 23 nt, Human
guuuuagacaaauacucaugugu

SEQ ID NO: 3741084 - RNA, 19 nt, Human
guuuuagaguuaacaauga

SEQ ID NO: 3741085 - RNA, 20 nt, Human
guuuuagcuccuugacuccu

SEQ ID NO: 3741086 - RNA, 15 nt, Human
guuuuagguucuaaa

SEQ ID NO: 3741087 - RNA, 16 nt, Human
guuuuagguucuaaag

SEQ ID NO: 3741088 - RNA, 21 nt, Human
guuuuagguucuaaaguucua

SEQ ID NO: 3741089 - RNA, 15 nt, Human
guuuuaguuaaauuu

SEQ ID NO: 3741090 - RNA, 16 nt, Human
guuuuauaaaaucaag

SEQ ID NO: 3741091 - RNA, 23 nt, Human
guuuuauaagcaucauuauuuau

SEQ ID NO: 3741092 - RNA, 15 nt, Human
guuuuauaauuuugu

SEQ ID NO: 3741093 - RNA, 21 nt, Human
guuuuauacugaaggaaaaac

SEQ ID NO: 3741094 - RNA, 19 nt, Human
guuuuauauauuauaugga

SEQ ID NO: 3741095 - RNA, 15 nt, Human
guuuuauauccauuu

SEQ ID NO: 3741096 - RNA, 22 nt, Human
guuuuaucacauguauguuuug

SEQ ID NO: 3741097 - RNA, 21 nt, Human
guuuuaucguccagugacuuu

SEQ ID NO: 3741098 - RNA, 13 nt, Human
guuuuaugacuuc

SEQ ID NO: 3741099 - RNA, 21 nt, Human
guuuuauuauuucuauuaaau

SEQ ID NO: 3741100 - RNA, 18 nt, Human
guuuuauuuauauuuauu

SEQ ID NO: 3741101 - RNA, 17 nt, Human
guuuuauuuuauguuua

SEQ ID NO: 3741102 - RNA, 17 nt, Human
guuuucaaaauaaaaau

SEQ ID NO: 3741103 - RNA, 13 nt, Human
guuuucaaaugga

SEQ ID NO: 3741104 - RNA, 16 nt, Human
guuuucaaauggaguu

SEQ ID NO: 3741105 - RNA, 18 nt, Human
guuuucaaccucuagaau

SEQ ID NO: 3741106 - RNA, 13 nt, Human
guuuucaaugaug

SEQ ID NO: 3741107 - RNA, 20 nt, Human
guuuucaauuuuaaacauau

SEQ ID NO: 3741108 - RNA, 20 nt, Human
guuuucacauaaaugcagcc

SEQ ID NO: 3741109 - RNA, 22 nt, Human
guuuucacauaaaugcagccca

SEQ ID NO: 3741110 - RNA, 23 nt, Human
guuuucacauaaaugcagcccau

SEQ ID NO: 3741111 - RNA, 12 nt, Human
guuuucagaaaa

SEQ ID NO: 3741112 - RNA, 18 nt, Human
guuuucagaagaaauaaa

SEQ ID NO: 3741113 - RNA, 14 nt, Human
guuuucagacucag

SEQ ID NO: 3741114 - RNA, 10 nt, Human
guuuucaugg

SEQ ID NO: 3741115 - RNA, 21 nt, Human
guuuucauggugaaaauguac

SEQ ID NO: 3741116 - RNA, 16 nt, Human
guuuucauuaucucaa

SEQ ID NO: 3741117 - RNA, 14 nt, Human
guuuuccacccugg

SEQ ID NO: 3741118 - RNA, 16 nt, Human
guuuuccacccuggaa

SEQ ID NO: 3741119 - RNA, 14 nt, Human
guuuuccaugaaaa

SEQ ID NO: 3741120 - RNA, 17 nt, Human
guuuuccauuguuugaa

SEQ ID NO: 3741121 - RNA, 15 nt, Human
guguuucccauaauu

SEQ ID NO: 3741122 - RNA, 20 nt, Human
guguuuccuucauuucugau

SEQ ID NO: 3741123 - RNA, 16 nt, Human
guguuucuagcacugg

SEQ ID NO: 3741124 - RNA, 15 nt, Human
guguuucuagggaaa

SEQ ID NO: 3741125 - RNA, 21 nt, Human
guguuucucccucucacuguc

SEQ ID NO: 3741126 - RNA, 22 nt, Human
guguuucucccucucacugucu

SEQ ID NO: 3741127 - RNA, 12 nt, Human
guguuucuguau

SEQ ID NO: 3741128 - RNA, 19 nt, Human
guguuugcuccccuucccc

SEQ ID NO: 3741129 - RNA, 13 nt, Human
guguuugcuuucu

SEQ ID NO: 3741130 - RNA, 15 nt, Human
guguuugguuuacau

SEQ ID NO: 3741131 - RNA, 20 nt, Human
guguuugguuuacauuuaaa

SEQ ID NO: 3741132 - RNA, 12 nt, Human
guguuugucucu

SEQ ID NO: 3741133 - RNA, 17 nt, Human
guguuugucucuucugg

SEQ ID NO: 3741134 - RNA, 16 nt, Human
guguuuuaaagagaau

SEQ ID NO: 3741135 - RNA, 18 nt, Human
guguuuuaaagagaaugu

SEQ ID NO: 3741136 - RNA, 14 nt, Human
guguuuuaauuuaa

SEQ ID NO: 3741137 - RNA, 15 nt, Human
guguuuuauaaaaua

SEQ ID NO: 3741138 - RNA, 12 nt, Human
guguuuucagag

SEQ ID NO: 3741139 - RNA, 14 nt, Human
guguuuucauaaua

SEQ ID NO: 3741140 - RNA, 15 nt, Human
guguuuucauaauaa

SEQ ID NO: 3741141 - RNA, 13 nt, Human
guguuuucugaau

SEQ ID NO: 3741142 - RNA, 16 nt, Human
guguuuucuguguaac

SEQ ID NO: 3741143 - RNA, 15 nt, Human
guguuuugaaagaau

SEQ ID NO: 3741144 - RNA, 16 nt, Human
guguuuugcaagugcu

SEQ ID NO: 3741145 - RNA, 22 nt, Human
guguuuuguuuugauuuaauaa

SEQ ID NO: 3741146 - RNA, 15 nt, Human
guguuuuucuauuaa

SEQ ID NO: 3741147 - RNA, 17 nt, Human
guguuuuucuauuaaaa

SEQ ID NO: 3741148 - RNA, 12 nt, Human
guguuuuucuca

SEQ ID NO: 3741149 - RNA, 19 nt, Human
guguuuuucucauauuuga

SEQ ID NO: 3741150 - RNA, 15 nt, Human
guguuuuucuccagu

SEQ ID NO: 3741151 - RNA, 18 nt, Human
guguuuuucuccagugcu

SEQ ID NO: 3741152 - RNA, 21 nt, Human
guguuuuucuuguaaaugugu

SEQ ID NO: 3741153 - RNA, 19 nt, Human
guguuuuugggaugucuua

SEQ ID NO: 3741154 - RNA, 13 nt, Human
guguuuuuuaaga

SEQ ID NO: 3741155 - RNA, 19 nt, Human
guguuuuuuuauuucuacu

SEQ ID NO: 3741156 - RNA, 19 nt, Human
guuaaaaaaaauaauaaau

SEQ ID NO: 3741157 - RNA, 20 nt, Human
guuaaaagagguuuuucuua

SEQ ID NO: 3741158 - RNA, 21 nt, Human
guuaaaagagguuuuucuuaa

SEQ ID NO: 3741159 - RNA, 20 nt, Human
guuaaaagaugaaaauauuu

SEQ ID NO: 3741160 - RNA, 21 nt, Human
guuaaaauaacuaguguugcu

SEQ ID NO: 3741161 - RNA, 15 nt, Human
guuaaaauuccaucc

SEQ ID NO: 3741162 - RNA, 23 nt, Human
guuaaacuagcauaucugccuuu

SEQ ID NO: 3741163 - RNA, 13 nt, Human
guuaaacuguuag

SEQ ID NO: 3741164 - RNA, 22 nt, Human
guuaaacuguuagcacuguuga

SEQ ID NO: 3741165 - RNA, 19 nt, Human
guuaaacuuacuuaguguu

SEQ ID NO: 3741166 - RNA, 15 nt, Human
guuaaagaaaggaaa

SEQ ID NO: 3741167 - RNA, 13 nt, Human
guuaaagauguag

SEQ ID NO: 3741168 - RNA, 13 nt, Human
guuaaaggaaaaa

SEQ ID NO: 3741169 - RNA, 21 nt, Human
guuaaagugaggccacugaag

SEQ ID NO: 3741170 - RNA, 22 nt, Human
guuaaagugaggccacugaaga

SEQ ID NO: 3741171 - RNA, 17 nt, Human
guuaaauaaauuguaua

SEQ ID NO: 3741172 - RNA, 18 nt, Human
guuaaauaaauuguauau

SEQ ID NO: 3741173 - RNA, 22 nt, Human
guuaaauaaauuguauauucac

SEQ ID NO: 3741174 - RNA, 20 nt, Human
guuaaauacuguguggaacu

SEQ ID NO: 3741175 - RNA, 12 nt, Human
guuaaauauuua

SEQ ID NO: 3741176 - RNA, 13 nt, Human
guuaaauauuuac

SEQ ID NO: 3741177 - RNA, 15 nt, Human
guuaaauauuuacau

SEQ ID NO: 3741178 - RNA, 18 nt, Human
guuaaaugaaauuguaaa

SEQ ID NO: 3741179 - RNA, 11 nt, Human
guuaaauguuu

SEQ ID NO: 3741180 - RNA, 17 nt, Human
guuaaauguuuuguaaa

SEQ ID NO: 3741181 - RNA, 19 nt, Human
guuaaauguuuuguaaacu

SEQ ID NO: 3741182 - RNA, 23 nt, Human
guuaaauguuuuguaaacuuuga

SEQ ID NO: 3741183 - RNA, 13 nt, Human
guuaaauuuguaa

SEQ ID NO: 3741184 - RNA, 14 nt, Human
guuaaauuuguaag

SEQ ID NO: 3741185 - RNA, 15 nt, Human
guuaaauuuguaagu

SEQ ID NO: 3741186 - RNA, 17 nt, Human
guuaaauuuguaaguuu

SEQ ID NO: 3741187 - RNA, 19 nt, Human
guuaaauuuguaaguuuca

SEQ ID NO: 3741188 - RNA, 23 nt, Human
guuaaauuuguaaguuucaggug

SEQ ID NO: 3741189 - RNA, 23 nt, Human
guuaacaaugccuauuguaauau

SEQ ID NO: 3741190 - RNA, 21 nt, Human
guuaacacacuaccgaaugug

SEQ ID NO: 3741191 - RNA, 15 nt, Human
guuaacacauuuugu

SEQ ID NO: 3741192 - RNA, 19 nt, Human
guuaacacauuuuguauaa

SEQ ID NO: 3741193 - RNA, 21 nt, Human
guuaacagaagggagggcaga

SEQ ID NO: 3741194 - RNA, 23 nt, Human
guuaacagagacagauaacucuc

SEQ ID NO: 3741195 - RNA, 17 nt, Human
guuaacaggcaaacauu

SEQ ID NO: 3741196 - RNA, 23 nt, Human
guuaacauuccaagacucuagag

SEQ ID NO: 3741197 - RNA, 24 nt, Human
guuaacauuccaagacucuagagu

SEQ ID NO: 3741198 - RNA, 22 nt, Human
guuaacccuucaucuuccugug

SEQ ID NO: 3741199 - RNA, 17 nt, Human
guuaaccucagugucau

SEQ ID NO: 3741200 - RNA, 18 nt, Human
guuaacuauguacaauau

SEQ ID NO: 3741201 - RNA, 19 nt, Human
guuaacuauguacaauauu

SEQ ID NO: 3741202 - RNA, 16 nt, Human
guuaacugaauaccac

SEQ ID NO: 3741203 - RNA, 22 nt, Human
guuaacugaauaccacucugua

SEQ ID NO: 3741204 - RNA, 21 nt, Human
guuaacuuauucaaagagaaa

SEQ ID NO: 3741205 - RNA, 13 nt, Human
guuaacuuugggu

SEQ ID NO: 3741206 - RNA, 18 nt, Human
guuaagaaaaaaauaauu

SEQ ID NO: 3741207 - RNA, 14 nt, Human
guuaagaaaauaaa

SEQ ID NO: 3741208 - RNA, 21 nt, Human
guuaagaagcuguuguacauu

SEQ ID NO: 3741209 - RNA, 19 nt, Human
guuaagacaugauuuccuu

SEQ ID NO: 3741210 - RNA, 14 nt, Human
guuaagaccuggca

SEQ ID NO: 3741211 - RNA, 11 nt, Human
guuaagagaaa

SEQ ID NO: 3741212 - RNA, 12 nt, Human
guuaagagaaac

SEQ ID NO: 3741213 - RNA, 12 nt, Human
guuaagagaaau

SEQ ID NO: 3741214 - RNA, 12 nt, Human
guuaagcaucua

SEQ ID NO: 3741215 - RNA, 18 nt, Human
guuaagcauuaccacuca

SEQ ID NO: 3741216 - RNA, 15 nt, Human
guuaagcucugcuau

SEQ ID NO: 3741217 - RNA, 12 nt, Human
guuaaggaaacu

SEQ ID NO: 3741218 - RNA, 14 nt, Human
guuaaggaauauaa

SEQ ID NO: 3741219 - RNA, 11 nt, Human
guuaaggccug

SEQ ID NO: 3741220 - RNA, 17 nt, Human
guuaagguucaagacag

SEQ ID NO: 3741221 - RNA, 14 nt, Human
guuaaguaugugua

SEQ ID NO: 3741222 - RNA, 23 nt, Human
guuaaguccucccugacuuuucu

SEQ ID NO: 3741223 - RNA, 22 nt, Human
guuaagucuaaauauuuccuua

SEQ ID NO: 3741224 - RNA, 22 nt, Human
guuaagucuguuuuaugacuuc

SEQ ID NO: 3741225 - RNA, 22 nt, Human
guuaaguuacuucacuuuaauu

SEQ ID NO: 3741226 - RNA, 23 nt, Human
guuaaguuggcuucuguuucuag

SEQ ID NO: 3741227 - RNA, 12 nt, Human
guuaauaaaagu

SEQ ID NO: 3741228 - RNA, 14 nt, Human
guuaauaguuccug

SEQ ID NO: 3741229 - RNA, 21 nt, Human
guuaauauaucccagaaauua

SEQ ID NO: 3741230 - RNA, 21 nt, Human
guuaaucaauuuaaacccauu

SEQ ID NO: 3741231 - RNA, 23 nt, Human
guuaaucucuguuauguacugua

SEQ ID NO: 3741232 - RNA, 17 nt, Human
guuaaucuuaauguaua

SEQ ID NO: 3741233 - RNA, 19 nt, Human
guuaaucuuaauguauauc

SEQ ID NO: 3741234 - RNA, 14 nt, Human
guuaaucuucaugg

SEQ ID NO: 3741235 - RNA, 13 nt, Human
guuaaucuugcuu

SEQ ID NO: 3741236 - RNA, 16 nt, Human
guuaaugaaaauguca

SEQ ID NO: 3741237 - RNA, 18 nt, Human
guuaaugauagcuacugu

SEQ ID NO: 3741238 - RNA, 16 nt, Human
guuaauguauauaaaa

SEQ ID NO: 3741239 - RNA, 18 nt, Human
guuaauguauauaaaaau

SEQ ID NO: 3741240 - RNA, 21 nt, Human
guuaauucagcacugauuuca

SEQ ID NO: 3741241 - RNA, 23 nt, Human
guuaauuuaaaguuguuugugcc

SEQ ID NO: 3741242 - RNA, 19 nt, Human
guuaauuuaaguuuugaca

SEQ ID NO: 3741243 - RNA, 23 nt, Human
guuaauuuaaguuuugacaagcu

SEQ ID NO: 3741244 - RNA, 17 nt, Human
guuaauuuaucuaaauu

SEQ ID NO: 3741245 - RNA, 21 nt, Human
guuaauuuaucuaaauuaaag

SEQ ID NO: 3741246 - RNA, 22 nt, Human
guuaauuuggaccauuuuccug

SEQ ID NO: 3741247 - RNA, 18 nt, Human
guuaauuuguguguuuuu

SEQ ID NO: 3741248 - RNA, 12 nt, Human
guuaauuuuuga

SEQ ID NO: 3741249 - RNA, 14 nt, Human
guuaauuuuugaua

SEQ ID NO: 3741250 - RNA, 21 nt, Human
guuaauuuuuugguacaaaaa

SEQ ID NO: 3741251 - RNA, 16 nt, Human
guuacaaaauguaacu

SEQ ID NO: 3741252 - RNA, 17 nt, Human
guuacaaaauguaacug

SEQ ID NO: 3741253 - RNA, 21 nt, Human
guuacaaaauguaacuguuac

SEQ ID NO: 3741254 - RNA, 9 nt, Human
guuacaaac

SEQ ID NO: 3741255 - RNA, 20 nt, Human
guuacaaauuauaauguauu

SEQ ID NO: 3741256 - RNA, 14 nt, Human
guuacaacagauuu

SEQ ID NO: 3741257 - RNA, 18 nt, Human
guuacaacagauuuguga

SEQ ID NO: 3741258 - RNA, 19 nt, Human
guuacaacagauuugugaa

SEQ ID NO: 3741259 - RNA, 23 nt, Human
guuacaacagauuugugaacuca

SEQ ID NO: 3741260 - RNA, 22 nt, Human
guuacaaguauacuuauauuuc

SEQ ID NO: 3741261 - RNA, 17 nt, Human
guuacacauuuuucaga

SEQ ID NO: 3741262 - RNA, 16 nt, Human
guuacacuaaaaggug

SEQ ID NO: 3741263 - RNA, 22 nt, Human
guuacacuggaggagagaagaa

SEQ ID NO: 3741264 - RNA, 23 nt, Human
guuacacuggaggagagaagaau

SEQ ID NO: 3741265 - RNA, 22 nt, Human
guuacacuguuagaacacuauu

SEQ ID NO: 3741266 - RNA, 22 nt, Human
guuacacuguuauuuucagcau

SEQ ID NO: 3741267 - RNA, 13 nt, Human
guuacacuugugc

SEQ ID NO: 3741268 - RNA, 17 nt, Human
guuacacuuuuuggaag

SEQ ID NO: 3741269 - RNA, 18 nt, Human
guuacacuuuuuggaagu

SEQ ID NO: 3741270 - RNA, 12 nt, Human
gaugauuucuau

SEQ ID NO: 3741271 - RNA, 22 nt, Human
gaugauuucuugaaaagggugu

SEQ ID NO: 3741272 - RNA, 18 nt, Human
gaugauuugcaaugggau

SEQ ID NO: 3741273 - RNA, 20 nt, Human
gaugauuugcuaucaaaaua

SEQ ID NO: 3741274 - RNA, 14 nt, Human
gaugauuuuuguca

SEQ ID NO: 3741275 - RNA, 14 nt, Human
gaugcaaagaaaau

SEQ ID NO: 3741276 - RNA, 15 nt, Human
gaugcaaagaggcaa

SEQ ID NO: 3741277 - RNA, 16 nt, Human
gaugcaaagaggcaag

SEQ ID NO: 3741278 - RNA, 17 nt, Human
gaugcaaagaggcaaga

SEQ ID NO: 3741279 - RNA, 23 nt, Human
gaugcaaaguacaauguguuuuu

SEQ ID NO: 3741280 - RNA, 19 nt, Human
gaugcaaauagcaaaacua

SEQ ID NO: 3741281 - RNA, 20 nt, Human
gaugcaacacgcauggucaa

SEQ ID NO: 3741282 - RNA, 14 nt, Human
gaugcaaggaccag

SEQ ID NO: 3741283 - RNA, 17 nt, Human
gaugcaaggaccaggac

SEQ ID NO: 3741284 - RNA, 18 nt, Human
gaugcaaggaccaggacu

SEQ ID NO: 3741285 - RNA, 21 nt, Human
gaugcaaucgguuuaaacaug

SEQ ID NO: 3741286 - RNA, 17 nt, Human
gaugcaauguagagggg

SEQ ID NO: 3741287 - RNA, 14 nt, Human
gaugcacagagaag

SEQ ID NO: 3741288 - RNA, 17 nt, Human
gaugcacagagaagcug

SEQ ID NO: 3741289 - RNA, 19 nt, Human
gaugcacagagaagcuggg

SEQ ID NO: 3741290 - RNA, 15 nt, Human
gaugcacuucaaauu

SEQ ID NO: 3741291 - RNA, 23 nt, Human
gaugcagagguaaaagugugagc

SEQ ID NO: 3741292 - RNA, 23 nt, Human
gaugcagcauuugauaaugauaa

SEQ ID NO: 3741293 - RNA, 21 nt, Human
gaugcagcauuuuguauuugu

SEQ ID NO: 3741294 - RNA, 20 nt, Human
gaugcagccgccuuccuuga

SEQ ID NO: 3741295 - RNA, 14 nt, Human
gaugcagccucaca

SEQ ID NO: 3741296 - RNA, 19 nt, Human
gaugcagccucacaguccu

SEQ ID NO: 3741297 - RNA, 16 nt, Human
gaugcagcucuuccug

SEQ ID NO: 3741298 - RNA, 14 nt, Human
gaugcagcuuauac

SEQ ID NO: 3741299 - RNA, 21 nt, Human
gaugcaggauuuguucucugu

SEQ ID NO: 3741300 - RNA, 21 nt, Human
gaugcaggcacuuauuguaaa

SEQ ID NO: 3741301 - RNA, 12 nt, Human
gaugcaggcucc

SEQ ID NO: 3741302 - RNA, 16 nt, Human
gaugcaggcuccccug

SEQ ID NO: 3741303 - RNA, 14 nt, Human
gaugcagggcaguc

SEQ ID NO: 3741304 - RNA, 19 nt, Human
gaugcagucuccucuuuaa

SEQ ID NO: 3741305 - RNA, 22 nt, Human
gaugcagugccaggaacccuua

SEQ ID NO: 3741306 - RNA, 17 nt, Human
gaugcaugucuuuuaaa

SEQ ID NO: 3741307 - RNA, 22 nt, Human
gaugcaugucuuuuaaaaugca

SEQ ID NO: 3741308 - RNA, 17 nt, Human
gaugcauuaaaagaaaa

SEQ ID NO: 3741309 - RNA, 18 nt, Human
gaugcauuaaaagaaaau

SEQ ID NO: 3741310 - RNA, 15 nt, Human
gaugccaaccucugg

SEQ ID NO: 3741311 - RNA, 15 nt, Human
gaugccacaccaagc

SEQ ID NO: 3741312 - RNA, 21 nt, Human
gaugccacaccaagcugugcc

SEQ ID NO: 3741313 - RNA, 23 nt, Human
gaugccacuucuaagaaaagccu

SEQ ID NO: 3741314 - RNA, 18 nt, Human
gaugccagccaagcucug

SEQ ID NO: 3741315 - RNA, 22 nt, Human
gaugccagccaagcucugcagu

SEQ ID NO: 3741316 - RNA, 21 nt, Human
gaugccaguaggcucaacuag

SEQ ID NO: 3741317 - RNA, 15 nt, Human
gaugccauccucuuu

SEQ ID NO: 3741318 - RNA, 18 nt, Human
gaugccaucugugggcac

SEQ ID NO: 3741319 - RNA, 17 nt, Human
gaugcccaaauccuuag

SEQ ID NO: 3741320 - RNA, 19 nt, Human
gaugcccagagggcccagg

SEQ ID NO: 3741321 - RNA, 22 nt, Human
gaugcccagggccacucugccu

SEQ ID NO: 3741322 - RNA, 15 nt, Human
gaugcccuggaggug

SEQ ID NO: 3741323 - RNA, 12 nt, Human
gaugccucagaa

SEQ ID NO: 3741324 - RNA, 23 nt, Human
gaugccucaugauaugucagggc

SEQ ID NO: 3741325 - RNA, 12 nt, Human
gaugccuccacc

SEQ ID NO: 3741326 - RNA, 13 nt, Human
gaugccuccaccg

SEQ ID NO: 3741327 - RNA, 16 nt, Human
gaugccuccaccgcug

SEQ ID NO: 3741328 - RNA, 17 nt, Human
gaugccuccaccgcugc

SEQ ID NO: 3741329 - RNA, 18 nt, Human
gaugccucccugacccug

SEQ ID NO: 3741330 - RNA, 16 nt, Human
gaugccuccuuccucu

SEQ ID NO: 3741331 - RNA, 14 nt, Human
gaugccugguggca

SEQ ID NO: 3741332 - RNA, 20 nt, Human
gaugccugugaacugaacuc

SEQ ID NO: 3741333 - RNA, 15 nt, Human
gaugcgcaguugcug

SEQ ID NO: 3741334 - RNA, 23 nt, Human
gaugcgcauucuaaccuggaggu

SEQ ID NO: 3741335 - RNA, 21 nt, Human
gaugcgguggcucacgccugu

SEQ ID NO: 3741336 - RNA, 14 nt, Human
gaugcuaaaaccug

SEQ ID NO: 3741337 - RNA, 23 nt, Human
gaugcuaagagaaaaaaaagacu

SEQ ID NO: 3741338 - RNA, 18 nt, Human
gaugcuagaacucccuuu

SEQ ID NO: 3741339 - RNA, 20 nt, Human
gaugcucccuccccugcccu

SEQ ID NO: 3741340 - RNA, 21 nt, Human
gaugcucccuccccugcccug

SEQ ID NO: 3741341 - RNA, 16 nt, Human
gaugcuccuugggccc

SEQ ID NO: 3741342 - RNA, 21 nt, Human
gaugcugaaacaggagagaaa

SEQ ID NO: 3741343 - RNA, 20 nt, Human
gaugcugacuguacuccucc

SEQ ID NO: 3741344 - RNA, 18 nt, Human
gaugcugauguucagugu

SEQ ID NO: 3741345 - RNA, 12 nt, Human
gaugcugccccu

SEQ ID NO: 3741346 - RNA, 13 nt, Human
gaugcugccccuc

SEQ ID NO: 3741347 - RNA, 12 nt, Human
gaugcugcuuuc

SEQ ID NO: 3741348 - RNA, 15 nt, Human
gaugcugcuuucccc

SEQ ID NO: 3741349 - RNA, 14 nt, Human
gaugcuggagaggu

SEQ ID NO: 3741350 - RNA, 14 nt, Human
gaugcuggaugcuc

SEQ ID NO: 3741351 - RNA, 13 nt, Human
gaugcuggcccag

SEQ ID NO: 3741352 - RNA, 14 nt, Human
gaugcuggcccagg

SEQ ID NO: 3741353 - RNA, 16 nt, Human
gaugcuggcccagggc

SEQ ID NO: 3741354 - RNA, 16 nt, Human
gaugcugggcuggcuc

SEQ ID NO: 3741355 - RNA, 17 nt, Human
gaugcugggcugggugc

SEQ ID NO: 3741356 - RNA, 23 nt, Human
gaugcuggguuggugcacaguga

SEQ ID NO: 3741357 - RNA, 17 nt, Human
gaugcugguaauggcca

SEQ ID NO: 3741358 - RNA, 19 nt, Human
gaugcugugaaauucccaa

SEQ ID NO: 3741359 - RNA, 15 nt, Human
gaugcuucugggaga

SEQ ID NO: 3741360 - RNA, 18 nt, Human
gaugcuuguaacaagaaa

SEQ ID NO: 3741361 - RNA, 14 nt, Human
gaugcuuguacaua

SEQ ID NO: 3741362 - RNA, 21 nt, Human
gaugcuuuaagugcacaacau

SEQ ID NO: 3741363 - RNA, 20 nt, Human
gaugcuuuaccaaacagcaa

SEQ ID NO: 3741364 - RNA, 17 nt, Human
gaugcuuuucugucucu

SEQ ID NO: 3741365 - RNA, 20 nt, Human
gaugcuuuucugucucugcc

SEQ ID NO: 3741366 - RNA, 15 nt, Human
gauggaaaaggaaga

SEQ ID NO: 3741367 - RNA, 16 nt, Human
gauggaaacaaagugg

SEQ ID NO: 3741368 - RNA, 23 nt, Human
gauggaaaggauuguaggugcaa

SEQ ID NO: 3741369 - RNA, 22 nt, Human
gauggaaccgcaggaagcugcu

SEQ ID NO: 3741370 - RNA, 20 nt, Human
gauggaauuuuuuuguacga

SEQ ID NO: 3741371 - RNA, 14 nt, Human
gauggacacuccag

SEQ ID NO: 3741372 - RNA, 15 nt, Human
gauggacacuccagg

SEQ ID NO: 3741373 - RNA, 23 nt, Human
gauggacaguucacacccugcaa

SEQ ID NO: 3741374 - RNA, 14 nt, Human
gauggagaaggaag

SEQ ID NO: 3741375 - RNA, 15 nt, Human
gauggagaaggaagg

SEQ ID NO: 3741376 - RNA, 17 nt, Human
gauggagcccaggcggg

SEQ ID NO: 3741377 - RNA, 12 nt, Human
gauggaggagga

SEQ ID NO: 3741378 - RNA, 15 nt, Human
gauggagugcuguuu

SEQ ID NO: 3741379 - RNA, 16 nt, Human
gauggaguucuugugc

SEQ ID NO: 3741380 - RNA, 18 nt, Human
gauggauucucagauauu

SEQ ID NO: 3741381 - RNA, 19 nt, Human
gauggauucucagauauuu

SEQ ID NO: 3741382 - RNA, 22 nt, Human
gauggauuuccagccaaagccu

SEQ ID NO: 3741383 - RNA, 19 nt, Human
gauggauuugccugugcca

SEQ ID NO: 3741384 - RNA, 12 nt, Human
gauggauuuuau

SEQ ID NO: 3741385 - RNA, 15 nt, Human
gauggcaacagaucu

SEQ ID NO: 3741386 - RNA, 21 nt, Human
gauggcaacagaucuggaacc

SEQ ID NO: 3741387 - RNA, 21 nt, Human
gauggcaggauggccuggcca

SEQ ID NO: 3741388 - RNA, 15 nt, Human
gauggcauccuguga

SEQ ID NO: 3741389 - RNA, 20 nt, Human
gauggcccauucuacuugcu

SEQ ID NO: 3741390 - RNA, 20 nt, Human
gauggcccggaugcugcuuc

SEQ ID NO: 3741391 - RNA, 14 nt, Human
gauggcccucuggu

SEQ ID NO: 3741392 - RNA, 15 nt, Human
gauggcccuucccac

SEQ ID NO: 3741393 - RNA, 23 nt, Human
gauggcccuuccuccuccaccac

SEQ ID NO: 3741394 - RNA, 22 nt, Human
gauggccgggcgcgguggcuca

SEQ ID NO: 3741395 - RNA, 18 nt, Human
gauggccguggauggccg

SEQ ID NO: 3741396 - RNA, 20 nt, Human
gauggccuggccagggccug

SEQ ID NO: 3741397 - RNA, 18 nt, Human
gauggccuuaauuuccuu

SEQ ID NO: 3741398 - RNA, 14 nt, Human
gauggcgcaggaac

SEQ ID NO: 3741399 - RNA, 15 nt, Human
gauggcggguggggg

SEQ ID NO: 3741400 - RNA, 19 nt, Human
gauggcgugggcugcguga

SEQ ID NO: 3741401 - RNA, 24 nt, Human
gauggcucagagggggacugcugc

SEQ ID NO: 3741402 - RNA, 23 nt, Human
gauggcucccaggggcucccucc

SEQ ID NO: 3741403 - RNA, 13 nt, Human
gauggcuccucuc

SEQ ID NO: 3741404 - RNA, 20 nt, Human
gauggcugugccucugccug

SEQ ID NO: 3741405 - RNA, 16 nt, Human
gauggcuuacaaaaag

SEQ ID NO: 3741406 - RNA, 16 nt, Human
gaugggaaagcauugu

SEQ ID NO: 3741407 - RNA, 21 nt, Human
gaugggaacgcagaugaucca

SEQ ID NO: 3741408 - RNA, 18 nt, Human
gaugggaaggagggaggu

SEQ ID NO: 3741409 - RNA, 13 nt, Human
gaugggaaugaag

SEQ ID NO: 3741410 - RNA, 22 nt, Human
gaugggaaugaagcuuguguau

SEQ ID NO: 3741411 - RNA, 22 nt, Human
gaugggacaauuagauaaaugu

SEQ ID NO: 3741412 - RNA, 20 nt, Human
gaugggagcuccucuccugg

SEQ ID NO: 3741413 - RNA, 20 nt, Human
gaugggaggaaagagagcag

SEQ ID NO: 3741414 - RNA, 20 nt, Human
gaugggaugguggagggcca

SEQ ID NO: 3741415 - RNA, 17 nt, Human
gaugggauucuggacag

SEQ ID NO: 3741416 - RNA, 20 nt, Human
gaugggcaacccccagccug

SEQ ID NO: 3741417 - RNA, 21 nt, Human
gaugggcaacccccagccugc

SEQ ID NO: 3741418 - RNA, 18 nt, Human
gaugggccugagugagag

SEQ ID NO: 3741419 - RNA, 17 nt, Human
guuuuccccucccuggg

SEQ ID NO: 3741420 - RNA, 24 nt, Human
guuuuccuaaauguauaccuguaa

SEQ ID NO: 3741421 - RNA, 22 nt, Human
guuuuccuauaauauaauaaau

SEQ ID NO: 3741422 - RNA, 22 nt, Human
guuuuccucccuucugcuacug

SEQ ID NO: 3741423 - RNA, 22 nt, Human
guuuuccucuauacaucucucc

SEQ ID NO: 3741424 - RNA, 24 nt, Human
guuuuccucuauacaucucucccc

SEQ ID NO: 3741425 - RNA, 14 nt, Human
guuuucgaaaauca

SEQ ID NO: 3741426 - RNA, 20 nt, Human
guuuucgaagcucagcccac

SEQ ID NO: 3741427 - RNA, 23 nt, Human
guuuucgcaccuaccaucaggga

SEQ ID NO: 3741428 - RNA, 11 nt, Human
guuuucuaauu

SEQ ID NO: 3741429 - RNA, 12 nt, Human
guuuucuaauug

SEQ ID NO: 3741430 - RNA, 14 nt, Human
guuuucuaguguau

SEQ ID NO: 3741431 - RNA, 18 nt, Human
guuuucuauuuaugccuu

SEQ ID NO: 3741432 - RNA, 13 nt, Human
guuuucuccuccc

SEQ ID NO: 3741433 - RNA, 18 nt, Human
guuuucuccucccaggaa

SEQ ID NO: 3741434 - RNA, 19 nt, Human
guuuucuccugccugugcu

SEQ ID NO: 3741435 - RNA, 17 nt, Human
guuuucugagcccgggc

SEQ ID NO: 3741436 - RNA, 19 nt, Human
guuuucugagcccgggcug

SEQ ID NO: 3741437 - RNA, 23 nt, Human
guuuucuguagucauuuacuaaa

SEQ ID NO: 3741438 - RNA, 18 nt, Human
guuuucuguguaaccauu

SEQ ID NO: 3741439 - RNA, 14 nt, Human
guuuucuguucuuu

SEQ ID NO: 3741440 - RNA, 19 nt, Human
guuuucuguucuuucuggc

SEQ ID NO: 3741441 - RNA, 16 nt, Human
guuuucuuaaccaucu

SEQ ID NO: 3741442 - RNA, 17 nt, Human
guuuucuuaaccaucuu

SEQ ID NO: 3741443 - RNA, 15 nt, Human
guuuucuuguugcuu

SEQ ID NO: 3741444 - RNA, 20 nt, Human
guuuucuuuccuccuuuccu

SEQ ID NO: 3741445 - RNA, 20 nt, Human
guuuucuuucuuuaaauguu

SEQ ID NO: 3741446 - RNA, 21 nt, Human
guuuugaaaagcuauuagcca

SEQ ID NO: 3741447 - RNA, 20 nt, Human
guuuugaaauaaaaagagua

SEQ ID NO: 3741448 - RNA, 16 nt, Human
guuuugaagauucuau

SEQ ID NO: 3741449 - RNA, 18 nt, Human
guuuugaaugguguugua

SEQ ID NO: 3741450 - RNA, 19 nt, Human
guuuugauaaaguaguaaa

SEQ ID NO: 3741451 - RNA, 14 nt, Human
guuuugauaugagu

SEQ ID NO: 3741452 - RNA, 19 nt, Human
guuuugaugacuggcauuu

SEQ ID NO: 3741453 - RNA, 19 nt, Human
guuuugauuuguacugaaa

SEQ ID NO: 3741454 - RNA, 20 nt, Human
guuuugccauguuggccagg

SEQ ID NO: 3741455 - RNA, 17 nt, Human
guuuugcuacauaauua

SEQ ID NO: 3741456 - RNA, 15 nt, Human
guuuugcuuccccuc

SEQ ID NO: 3741457 - RNA, 16 nt, Human
guuuuggaagcucuga

SEQ ID NO: 3741458 - RNA, 22 nt, Human
guuuuggcugaaauucuccugg

SEQ ID NO: 3741459 - RNA, 23 nt, Human
guuuuggcugaaauucuccugga

SEQ ID NO: 3741460 - RNA, 16 nt, Human
guuuuggggacucauu

SEQ ID NO: 3741461 - RNA, 15 nt, Human
guuuugggggucagg

SEQ ID NO: 3741462 - RNA, 21 nt, Human
guuuugggggugugaguguuu

SEQ ID NO: 3741463 - RNA, 18 nt, Human
guuuuggguagcugccac

SEQ ID NO: 3741464 - RNA, 21 nt, Human
guuuugguccacuuuuccagu

SEQ ID NO: 3741465 - RNA, 14 nt, Human
guuuugguuaaguu

SEQ ID NO: 3741466 - RNA, 15 nt, Human
guuuuguaaaagaaa

SEQ ID NO: 3741467 - RNA, 13 nt, Human
guuuuguaaacau

SEQ ID NO: 3741468 - RNA, 18 nt, Human
guuuuguaaacuuugaaa

SEQ ID NO: 3741469 - RNA, 21 nt, Human
guuuuguaaacuuugaaauau

SEQ ID NO: 3741470 - RNA, 12 nt, Human
guuuuguaaauu

SEQ ID NO: 3741471 - RNA, 18 nt, Human
guuuuguaagaugcuggg

SEQ ID NO: 3741472 - RNA, 17 nt, Human
guuuuguacauagauuu

SEQ ID NO: 3741473 - RNA, 18 nt, Human
guuuuguacauagauuua

SEQ ID NO: 3741474 - RNA, 14 nt, Human
guuuuguaccagug

SEQ ID NO: 3741475 - RNA, 15 nt, Human
guuuuguaccaguga

SEQ ID NO: 3741476 - RNA, 17 nt, Human
guuuuguaccagugaau

SEQ ID NO: 3741477 - RNA, 17 nt, Human
guuuuguaggagacuug

SEQ ID NO: 3741478 - RNA, 12 nt, Human
guuuuguauucu

SEQ ID NO: 3741479 - RNA, 24 nt, Human
guuuugucaaacuguagaaaugau

SEQ ID NO: 3741480 - RNA, 14 nt, Human
guuuugucuugaau

SEQ ID NO: 3741481 - RNA, 18 nt, Human
guuuugugauguuugucc

SEQ ID NO: 3741482 - RNA, 19 nt, Human
guuuuguggaggagcucag

SEQ ID NO: 3741483 - RNA, 17 nt, Human
guuuugugguuuggaau

SEQ ID NO: 3741484 - RNA, 15 nt, Human
guuuuguguacuuuu

SEQ ID NO: 3741485 - RNA, 17 nt, Human
guuuuguguuuguugua

SEQ ID NO: 3741486 - RNA, 14 nt, Human
guuuuguucaccau

SEQ ID NO: 3741487 - RNA, 17 nt, Human
guuuuguuccccuccuc

SEQ ID NO: 3741488 - RNA, 20 nt, Human
guuuuguuccccuccuccac

SEQ ID NO: 3741489 - RNA, 16 nt, Human
guuuuguuuauuaaau

SEQ ID NO: 3741490 - RNA, 15 nt, Human
guuuuguuucugaaa

SEQ ID NO: 3741491 - RNA, 15 nt, Human
guuuuguuugcuauc

SEQ ID NO: 3741492 - RNA, 11 nt, Human
guuuuguuugu

SEQ ID NO: 3741493 - RNA, 12 nt, Human
guuuuguuuguc

SEQ ID NO: 3741494 - RNA, 14 nt, Human
guuuuguuuuuuag

SEQ ID NO: 3741495 - RNA, 13 nt, Human
guuuuguuuuuug

SEQ ID NO: 3741496 - RNA, 16 nt, Human
guuuuguuuuuugagu

SEQ ID NO: 3741497 - RNA, 14 nt, Human
guuuuuaaacugua

SEQ ID NO: 3741498 - RNA, 23 nt, Human
guuuuuaaauagaguuugcuauu

SEQ ID NO: 3741499 - RNA, 18 nt, Human
guuuuuaaaugaggauua

SEQ ID NO: 3741500 - RNA, 13 nt, Human
guuuuuaagcugu

SEQ ID NO: 3741501 - RNA, 14 nt, Human
guuuuuaagcuguu

SEQ ID NO: 3741502 - RNA, 15 nt, Human
guuuuuaagcuguuu

SEQ ID NO: 3741503 - RNA, 17 nt, Human
guuuuuaaguuugcacu

SEQ ID NO: 3741504 - RNA, 17 nt, Human
guuuuuaauaaagacag

SEQ ID NO: 3741505 - RNA, 13 nt, Human
guuuuuaauagaa

SEQ ID NO: 3741506 - RNA, 21 nt, Human
guuuuuacaaauguuaaaaug

SEQ ID NO: 3741507 - RNA, 17 nt, Human
guuuuuacaagauguau

SEQ ID NO: 3741508 - RNA, 13 nt, Human
guuuuuacccaua

SEQ ID NO: 3741509 - RNA, 16 nt, Human
guuuuuacugcucuga

SEQ ID NO: 3741510 - RNA, 17 nt, Human
guuuuuacuuucuguug

SEQ ID NO: 3741511 - RNA, 16 nt, Human
guuuuuagagacaggg

SEQ ID NO: 3741512 - RNA, 20 nt, Human
guuuuuaguaaucuguacau

SEQ ID NO: 3741513 - RNA, 23 nt, Human
guuuuuauaaaaaauggugccug

SEQ ID NO: 3741514 - RNA, 21 nt, Human
guuuuuaugaagaaaaaauac

SEQ ID NO: 3741515 - RNA, 17 nt, Human
guuuuuaugagaaacuu

SEQ ID NO: 3741516 - RNA, 19 nt, Human
guuuuuaugauaucccuga

SEQ ID NO: 3741517 - RNA, 19 nt, Human
guuuuuauggcuuuugugc

SEQ ID NO: 3741518 - RNA, 16 nt, Human
guuuuuauggggcuga

SEQ ID NO: 3741519 - RNA, 18 nt, Human
guuuuuauggggcugaac

SEQ ID NO: 3741520 - RNA, 17 nt, Human
guuuuuauuaauuuaua

SEQ ID NO: 3741521 - RNA, 16 nt, Human
guuuuuauuuccuaug

SEQ ID NO: 3741522 - RNA, 20 nt, Human
guuuuuauuuccuaugaugu

SEQ ID NO: 3741523 - RNA, 21 nt, Human
guuuuuauuuccuaugaugua

SEQ ID NO: 3741524 - RNA, 12 nt, Human
guuuuucacauu

SEQ ID NO: 3741525 - RNA, 14 nt, Human
guuuuucacauuuu

SEQ ID NO: 3741526 - RNA, 23 nt, Human
guuuuucagguauauaccuccau

SEQ ID NO: 3741527 - RNA, 12 nt, Human
guuuuucaguuc

SEQ ID NO: 3741528 - RNA, 21 nt, Human
guuuuucaguucaaagucaug

SEQ ID NO: 3741529 - RNA, 18 nt, Human
guuuuucauuaaauaaau

SEQ ID NO: 3741530 - RNA, 16 nt, Human
guuuuuccacuacugc

SEQ ID NO: 3741531 - RNA, 18 nt, Human
guuuuuccacuacugcua

SEQ ID NO: 3741532 - RNA, 20 nt, Human
guuuuucuaaaggaguuuau

SEQ ID NO: 3741533 - RNA, 12 nt, Human
guuuuucuacua

SEQ ID NO: 3741534 - RNA, 18 nt, Human
guuuuucuaggccugggg

SEQ ID NO: 3741535 - RNA, 17 nt, Human
guuuuucuauuaaaaga

SEQ ID NO: 3741536 - RNA, 18 nt, Human
guuuuucuauuaaaagac

SEQ ID NO: 3741537 - RNA, 23 nt, Human
ggcuguccaguucccagaaggca

SEQ ID NO: 3741538 - RNA, 17 nt, Human
ggcugucccggaggcgg

SEQ ID NO: 3741539 - RNA, 13 nt, Human
ggcuguccuguac

SEQ ID NO: 3741540 - RNA, 19 nt, Human
ggcuguccuuuccaguggc

SEQ ID NO: 3741541 - RNA, 16 nt, Human
ggcugucggugggacc

SEQ ID NO: 3741542 - RNA, 18 nt, Human
ggcugugcagccuguccu

SEQ ID NO: 3741543 - RNA, 16 nt, Human
ggcugugccucugccu

SEQ ID NO: 3741544 - RNA, 19 nt, Human
ggcugugcgcugacaacca

SEQ ID NO: 3741545 - RNA, 14 nt, Human
ggcugugcugcccu

SEQ ID NO: 3741546 - RNA, 15 nt, Human
ggcugugcugcccug

SEQ ID NO: 3741547 - RNA, 21 nt, Human
ggcuguggagacaaugucugc

SEQ ID NO: 3741548 - RNA, 21 nt, Human
ggcuguggccucccugcucua

SEQ ID NO: 3741549 - RNA, 14 nt, Human
ggcugugggcaagc

SEQ ID NO: 3741550 - RNA, 15 nt, Human
ggcuguggucacagc

SEQ ID NO: 3741551 - RNA, 20 nt, Human
ggcuguguaagauuuguuuu

SEQ ID NO: 3741552 - RNA, 13 nt, Human
gguaccacugaau

SEQ ID NO: 3741553 - RNA, 20 nt, Human
gguaccacugaaucuguaca

SEQ ID NO: 3741554 - RNA, 14 nt, Human
gguaccacugauuu

SEQ ID NO: 3741555 - RNA, 22 nt, Human
gguaccagaugcagcucaagag

SEQ ID NO: 3741556 - RNA, 21 nt, Human
gguaccagcagaaagguuagu

SEQ ID NO: 3741557 - RNA, 18 nt, Human
gguaccagcccuggggcu

SEQ ID NO: 3741558 - RNA, 15 nt, Human
gguaccagcugcgcu

SEQ ID NO: 3741559 - RNA, 20 nt, Human
gguaccaguugaaauuuuug

SEQ ID NO: 3741560 - RNA, 16 nt, Human
gguacccccuucuggg

SEQ ID NO: 3741561 - RNA, 14 nt, Human
gguaccuauuuuca

SEQ ID NO: 3741562 - RNA, 12 nt, Human
gguaccuugaac

SEQ ID NO: 3741563 - RNA, 18 nt, Human
gguaccuugaacacuggg

SEQ ID NO: 3741564 - RNA, 24 nt, Human
gguaccuugcacacaucaucugua

SEQ ID NO: 3741565 - RNA, 16 nt, Human
gguacgcacagacagg

SEQ ID NO: 3741566 - RNA, 13 nt, Human
gguacgugacccu

SEQ ID NO: 3741567 - RNA, 14 nt, Human
gguacuauauuugc

SEQ ID NO: 3741568 - RNA, 12 nt, Human
gguacucuccua

SEQ ID NO: 3741569 - RNA, 14 nt, Human
gguacucuccuaga

SEQ ID NO: 3741570 - RNA, 17 nt, Human
gguacuguaauguuaau

SEQ ID NO: 3741571 - RNA, 18 nt, Human
gguacuguacagcuggcu

SEQ ID NO: 3741572 - RNA, 21 nt, Human
gguacuguacagcuggcucua

SEQ ID NO: 3741573 - RNA, 18 nt, Human
gguacuguaugaucaaau

SEQ ID NO: 3741574 - RNA, 20 nt, Human
gguacuguaugaucaaaugu

SEQ ID NO: 3741575 - RNA, 13 nt, Human
gguacuuagaguu

SEQ ID NO: 3741576 - RNA, 22 nt, Human
gguacuucaaauccuugaagau

SEQ ID NO: 3741577 - RNA, 19 nt, Human
gguacuucuugaaggugcu

SEQ ID NO: 3741578 - RNA, 16 nt, Human
gguagaaaaaggguca

SEQ ID NO: 3741579 - RNA, 20 nt, Human
gguagaaagagauacagagg

SEQ ID NO: 3741580 - RNA, 14 nt, Human
gguagaacgccagg

SEQ ID NO: 3741581 - RNA, 22 nt, Human
gguagaagcccuucuaccuucc

SEQ ID NO: 3741582 - RNA, 20 nt, Human
gguagaaugaccuuguaaug

SEQ ID NO: 3741583 - RNA, 23 nt, Human
gguagaauguuuucaaauguucu

SEQ ID NO: 3741584 - RNA, 22 nt, Human
gguagaccugucuccuggcggu

SEQ ID NO: 3741585 - RNA, 18 nt, Human
gguagaucacgagaucaa

SEQ ID NO: 3741586 - RNA, 12 nt, Human
gguagauguuca

SEQ ID NO: 3741587 - RNA, 16 nt, Human
gguagccagcacacag

SEQ ID NO: 3741588 - RNA, 12 nt, Human
gguagccauccc

SEQ ID NO: 3741589 - RNA, 15 nt, Human
gguagcccuggccag

SEQ ID NO: 3741590 - RNA, 20 nt, Human
gguagcccuggccagaggcu

SEQ ID NO: 3741591 - RNA, 15 nt, Human
gguagcuagaggaac

SEQ ID NO: 3741592 - RNA, 12 nt, Human
gguagcuguaag

SEQ ID NO: 3741593 - RNA, 21 nt, Human
gguagcuguaaggcaugaagg

SEQ ID NO: 3741594 - RNA, 19 nt, Human
gguagcuucugaccucagc

SEQ ID NO: 3741595 - RNA, 20 nt, Human
gguagcuucugaccucagca

SEQ ID NO: 3741596 - RNA, 16 nt, Human
gguaggaacugcuggg

SEQ ID NO: 3741597 - RNA, 21 nt, Human
gguaggaauauuauauuugga

SEQ ID NO: 3741598 - RNA, 14 nt, Human
gguaggcagagccu

SEQ ID NO: 3741599 - RNA, 21 nt, Human
gguaggccaagguguccuaca

SEQ ID NO: 3741600 - RNA, 14 nt, Human
gguagggaggcagc

SEQ ID NO: 3741601 - RNA, 19 nt, Human
gguaggggccccucucagc

SEQ ID NO: 3741602 - RNA, 11 nt, Human
gguaggggcug

SEQ ID NO: 3741603 - RNA, 14 nt, Human
gguaggggcuggga

SEQ ID NO: 3741604 - RNA, 17 nt, Human
gguagggggcuggagga

SEQ ID NO: 3741605 - RNA, 14 nt, Human
gguaggguaaauca

SEQ ID NO: 3741606 - RNA, 11 nt, Human
gguaggguggg

SEQ ID NO: 3741607 - RNA, 23 nt, Human
gguagggugggccuucagggagu

SEQ ID NO: 3741608 - RNA, 19 nt, Human
gguagguggcacacugggu

SEQ ID NO: 3741609 - RNA, 17 nt, Human
gguagguucagccaagg

SEQ ID NO: 3741610 - RNA, 18 nt, Human
gguagguucagccaaggu

SEQ ID NO: 3741611 - RNA, 19 nt, Human
gguagguucagccaagguu

SEQ ID NO: 3741612 - RNA, 18 nt, Human
gguagguugggacaccag

SEQ ID NO: 3741613 - RNA, 13 nt, Human
gguagguugggag

SEQ ID NO: 3741614 - RNA, 22 nt, Human
gguaguacuccugcaaaauuuu

SEQ ID NO: 3741615 - RNA, 23 nt, Human
gguaguacuccugcaaaauuuua

SEQ ID NO: 3741616 - RNA, 13 nt, Human
gguaguucaagaa

SEQ ID NO: 3741617 - RNA, 13 nt, Human
gguaguuucugug

SEQ ID NO: 3741618 - RNA, 22 nt, Human
gguauaaaacuuuccucgccug

SEQ ID NO: 3741619 - RNA, 19 nt, Human
gguauaauugugugauauu

SEQ ID NO: 3741620 - RNA, 13 nt, Human
gguauagaaaugc

SEQ ID NO: 3741621 - RNA, 16 nt, Human
gguauagauguugcua

SEQ ID NO: 3741622 - RNA, 13 nt, Human
gguauauacuuug

SEQ ID NO: 3741623 - RNA, 13 nt, Human
gguauauauacau

SEQ ID NO: 3741624 - RNA, 12 nt, Human
gguauauuuucc

SEQ ID NO: 3741625 - RNA, 18 nt, Human
gguauccugcccaguguu

SEQ ID NO: 3741626 - RNA, 12 nt, Human
gguaucuccagg

SEQ ID NO: 3741627 - RNA, 13 nt, Human
gguaucuccagga

SEQ ID NO: 3741628 - RNA, 20 nt, Human
gguaugaacuugaggacaca

SEQ ID NO: 3741629 - RNA, 17 nt, Human
gguaugaagaguguuau

SEQ ID NO: 3741630 - RNA, 21 nt, Human
gguaugaccuucuaggaagcu

SEQ ID NO: 3741631 - RNA, 21 nt, Human
gguauggcguaaguacagaga

SEQ ID NO: 3741632 - RNA, 23 nt, Human
gguauggcguaaguacagagaag

SEQ ID NO: 3741633 - RNA, 18 nt, Human
gguauuaagauuauaauu

SEQ ID NO: 3741634 - RNA, 20 nt, Human
gguauuacacuguauuugua

SEQ ID NO: 3741635 - RNA, 14 nt, Human
gguauuagaaagug

SEQ ID NO: 3741636 - RNA, 18 nt, Human
gguauucgcuugagaaaa

SEQ ID NO: 3741637 - RNA, 17 nt, Human
gguauucguuaucuaau

SEQ ID NO: 3741638 - RNA, 23 nt, Human
gguauuggcuagagguucaaaga

SEQ ID NO: 3741639 - RNA, 18 nt, Human
gguauugguggcuuuccu

SEQ ID NO: 3741640 - RNA, 17 nt, Human
gguauuguauuuauuca

SEQ ID NO: 3741641 - RNA, 22 nt, Human
gguauuguauuuauucaauaaa

SEQ ID NO: 3741642 - RNA, 14 nt, Human
gguauuuauaauau

SEQ ID NO: 3741643 - RNA, 19 nt, Human
gguauuuggauaucuguua

SEQ ID NO: 3741644 - RNA, 16 nt, Human
gguauuuugaauacca

SEQ ID NO: 3741645 - RNA, 15 nt, Human
gguauuuuguuucuu

SEQ ID NO: 3741646 - RNA, 18 nt, Human
gguauuuuguuucuuuua

SEQ ID NO: 3741647 - RNA, 16 nt, Human
gguauuuuuuccuuuu

SEQ ID NO: 3741648 - RNA, 22 nt, Human
ggucaaaccgcacucacccaug

SEQ ID NO: 3741649 - RNA, 16 nt, Human
ggucaaaugcuagaaa

SEQ ID NO: 3741650 - RNA, 18 nt, Human
ggucaacagcuaugcugg

SEQ ID NO: 3741651 - RNA, 16 nt, Human
ggucaacaguuuuccu

SEQ ID NO: 3741652 - RNA, 23 nt, Human
ggucaacaucuuuuacauucugc

SEQ ID NO: 3741653 - RNA, 13 nt, Human
ggucaagcccagg

SEQ ID NO: 3741654 - RNA, 11 nt, Human
ggucaaggccu

SEQ ID NO: 3741655 - RNA, 21 nt, Human
ggucaagggcuuacuauuucu

SEQ ID NO: 3741656 - RNA, 13 nt, Human
ggucacaacuuga

SEQ ID NO: 3741657 - RNA, 19 nt, Human
ggucacacgaccggggcca

SEQ ID NO: 3741658 - RNA, 13 nt, Human
ggucacagccagg

SEQ ID NO: 3741659 - RNA, 15 nt, Human
ggucacagccuccuc

SEQ ID NO: 3741660 - RNA, 15 nt, Human
ggucacagcggaggu

SEQ ID NO: 3741661 - RNA, 19 nt, Human
ggucaccagacggggcugg

SEQ ID NO: 3741662 - RNA, 14 nt, Human
ggucaccaugaaac

SEQ ID NO: 3741663 - RNA, 20 nt, Human
ggucacguuuggugcuucuc

SEQ ID NO: 3741664 - RNA, 22 nt, Human
ggucacucuggcagcucagaga

SEQ ID NO: 3741665 - RNA, 22 nt, Human
ggucacucuuccugcaaggacu

SEQ ID NO: 3741666 - RNA, 13 nt, Human
ggucacugcuguc

SEQ ID NO: 3741667 - RNA, 13 nt, Human
ggucacuggaacu

SEQ ID NO: 3741668 - RNA, 18 nt, Human
ggucacuggcucuccaag

SEQ ID NO: 3741669 - RNA, 16 nt, Human
ggucagaaacaggacc

SEQ ID NO: 3741670 - RNA, 12 nt, Human
ggucagagccug

SEQ ID NO: 3741671 - RNA, 23 nt, Human
ggucagaggagagauagccugug

SEQ ID NO: 3741672 - RNA, 14 nt, Human
ggucagagggccca

SEQ ID NO: 3741673 - RNA, 18 nt, Human
ggucagcacaucucaaca

SEQ ID NO: 3741674 - RNA, 12 nt, Human
ggucagccaggg

SEQ ID NO: 3741675 - RNA, 19 nt, Human
ggucagccagggccugcga

SEQ ID NO: 3741676 - RNA, 18 nt, Human
ggucagcucccuucucug

SEQ ID NO: 3741677 - RNA, 22 nt, Human
ggucaggaaggaugagcauuua

SEQ ID NO: 3741678 - RNA, 21 nt, Human
ggucaggaguuagaggccagc

SEQ ID NO: 3741679 - RNA, 21 nt, Human
ggucaggaguuccuaaccagc

SEQ ID NO: 3741680 - RNA, 14 nt, Human
ggucaggcagccag

SEQ ID NO: 3741681 - RNA, 13 nt, Human
ggucaggcccugg

SEQ ID NO: 3741682 - RNA, 12 nt, Human
ggucaggccuuu

SEQ ID NO: 3741683 - RNA, 13 nt, Human
ggucaggcuccau

SEQ ID NO: 3741684 - RNA, 16 nt, Human
ggucagggagugcugg

SEQ ID NO: 3741685 - RNA, 19 nt, Human
ggucagguugacaggaggu

SEQ ID NO: 3741686 - RNA, 17 nt, Human
ggucagguuuaacauuu

SEQ ID NO: 3741687 - RNA, 12 nt, Human
ggucaguaccca

SEQ ID NO: 3741688 - RNA, 14 nt, Human
ggucagugcugccu

SEQ ID NO: 3741689 - RNA, 22 nt, Human
ggucauauguuugcuuguauuu

SEQ ID NO: 3741690 - RNA, 18 nt, Human
ggucauauuaauauauuu

SEQ ID NO: 3741691 - RNA, 17 nt, Human
ggucaugcccuccucuc

SEQ ID NO: 3741692 - RNA, 11 nt, Human
gguccaaauaa

SEQ ID NO: 3741693 - RNA, 16 nt, Human
gguccaacugcaacuc

SEQ ID NO: 3741694 - RNA, 18 nt, Human
gguccaauuaguuuccuu

SEQ ID NO: 3741695 - RNA, 20 nt, Human
gguccaauucucgagcuugg

SEQ ID NO: 3741696 - RNA, 16 nt, Human
gguccacaacacacag

SEQ ID NO: 3741697 - RNA, 20 nt, Human
gguccacaggaagugaagaa

SEQ ID NO: 3741698 - RNA, 14 nt, Human
gguccacagggcac

SEQ ID NO: 3741699 - RNA, 16 nt, Human
gguccacccagcaaag

SEQ ID NO: 3741700 - RNA, 12 nt, Human
gguccacccagg

SEQ ID NO: 3741701 - RNA, 13 nt, Human
gguccacccagga

SEQ ID NO: 3741702 - RNA, 15 nt, Human
gguccacccaggagc

SEQ ID NO: 3741703 - RNA, 21 nt, Human
ggcuguguguacuaauacaga

SEQ ID NO: 3741704 - RNA, 11 nt, Human
ggcugugugug

SEQ ID NO: 3741705 - RNA, 13 nt, Human
ggcuguucugcac

SEQ ID NO: 3741706 - RNA, 14 nt, Human
ggcuguucuggaag

SEQ ID NO: 3741707 - RNA, 20 nt, Human
ggcuguuggcugggggccuc

SEQ ID NO: 3741708 - RNA, 22 nt, Human
ggcuguuuuugggugcaagagg

SEQ ID NO: 3741709 - RNA, 23 nt, Human
ggcuuaaacccauauuguaaaac

SEQ ID NO: 3741710 - RNA, 23 nt, Human
ggcuuaccugaccucuugcuguc

SEQ ID NO: 3741711 - RNA, 16 nt, Human
ggcuuagacccucaug

SEQ ID NO: 3741712 - RNA, 14 nt, Human
ggcuuagucacuga

SEQ ID NO: 3741713 - RNA, 18 nt, Human
ggcuuauaucuggccucu

SEQ ID NO: 3741714 - RNA, 22 nt, Human
ggcuuauauucaaccauggacu

SEQ ID NO: 3741715 - RNA, 16 nt, Human
ggcuuauccagcuggu

SEQ ID NO: 3741716 - RNA, 18 nt, Human
ggcuuauuuuaaugugau

SEQ ID NO: 3741717 - RNA, 21 nt, Human
ggcuuauuuuaaugugaugau

SEQ ID NO: 3741718 - RNA, 20 nt, Human
ggcuucagcauauuuauagc

SEQ ID NO: 3741719 - RNA, 21 nt, Human
ggcuucagccuaguggcuugu

SEQ ID NO: 3741720 - RNA, 16 nt, Human
ggcuucagcugccagu

SEQ ID NO: 3741721 - RNA, 12 nt, Human
ggcuucauacac

SEQ ID NO: 3741722 - RNA, 22 nt, Human
ggcuucauccuccucagaucuu

SEQ ID NO: 3741723 - RNA, 14 nt, Human
ggcuucauucaagu

SEQ ID NO: 3741724 - RNA, 19 nt, Human
ggcuuccaagguggucugc

SEQ ID NO: 3741725 - RNA, 13 nt, Human
ggcuuccagagag

SEQ ID NO: 3741726 - RNA, 14 nt, Human
ggcuuccagagagu

SEQ ID NO: 3741727 - RNA, 21 nt, Human
ggcuuccagguaucuccagga

SEQ ID NO: 3741728 - RNA, 22 nt, Human
ggcuuccauuugugugugugca

SEQ ID NO: 3741729 - RNA, 20 nt, Human
ggcuucccaagggcugccgg

SEQ ID NO: 3741730 - RNA, 20 nt, Human
ggcuucccaguggcugcugc

SEQ ID NO: 3741731 - RNA, 18 nt, Human
ggcuucccgcucagcccu

SEQ ID NO: 3741732 - RNA, 19 nt, Human
ggcuucccgcucagcccuc

SEQ ID NO: 3741733 - RNA, 22 nt, Human
ggcuucccgcucagcccucccu

SEQ ID NO: 3741734 - RNA, 16 nt, Human
ggcuuccucauaguau

SEQ ID NO: 3741735 - RNA, 13 nt, Human
ggcuuccuccuga

SEQ ID NO: 3741736 - RNA, 21 nt, Human
ggcuuccuccugguguggaag

SEQ ID NO: 3741737 - RNA, 19 nt, Human
ggcuuccugcguccuccuc

SEQ ID NO: 3741738 - RNA, 20 nt, Human
ggcuuccugcguccuccuca

SEQ ID NO: 3741739 - RNA, 15 nt, Human
ggcuuccuggagcag

SEQ ID NO: 3741740 - RNA, 16 nt, Human
ggcuuccuggagcaga

SEQ ID NO: 3741741 - RNA, 11 nt, Human
ggcuuccuggu

SEQ ID NO: 3741742 - RNA, 17 nt, Human
ggcuuccuggugcugga

SEQ ID NO: 3741743 - RNA, 20 nt, Human
ggcuucucauacguccacca

SEQ ID NO: 3741744 - RNA, 12 nt, Human
ggcuucuccuga

SEQ ID NO: 3741745 - RNA, 13 nt, Human
ggcuucucucuca

SEQ ID NO: 3741746 - RNA, 16 nt, Human
ggcuucucugaggaag

SEQ ID NO: 3741747 - RNA, 14 nt, Human
ggcuucugagcagc

SEQ ID NO: 3741748 - RNA, 18 nt, Human
ggcuucugaugaaucuug

SEQ ID NO: 3741749 - RNA, 13 nt, Human
ggcuucugcaccc

SEQ ID NO: 3741750 - RNA, 15 nt, Human
ggcuucugcacccuc

SEQ ID NO: 3741751 - RNA, 13 nt, Human
ggcuucuggagcc

SEQ ID NO: 3741752 - RNA, 20 nt, Human
ggcuucuggagcccuugggu

SEQ ID NO: 3741753 - RNA, 19 nt, Human
ggcuucugugcaccugggc

SEQ ID NO: 3741754 - RNA, 15 nt, Human
ggcuucuguuucuag

SEQ ID NO: 3741755 - RNA, 20 nt, Human
ggcuucuucagaucagugcu

SEQ ID NO: 3741756 - RNA, 15 nt, Human
ggcuugaagccaaag

SEQ ID NO: 3741757 - RNA, 14 nt, Human
ggcuugccacaccc

SEQ ID NO: 3741758 - RNA, 13 nt, Human
ggcuuggccugcu

SEQ ID NO: 3741759 - RNA, 18 nt, Human
ggcuuggcguggagcagg

SEQ ID NO: 3741760 - RNA, 17 nt, Human
ggcuugggauuugcugu

SEQ ID NO: 3741761 - RNA, 19 nt, Human
ggcuuggggaccagagcug

SEQ ID NO: 3741762 - RNA, 16 nt, Human
ggcuuguagaauuguu

SEQ ID NO: 3741763 - RNA, 13 nt, Human
ggcuuguaguucu

SEQ ID NO: 3741764 - RNA, 16 nt, Human
ggcuuguaguucuuua

SEQ ID NO: 3741765 - RNA, 16 nt, Human
ggcuuguguguuucac

SEQ ID NO: 3741766 - RNA, 17 nt, Human
ggcuuguuuaccuuucu

SEQ ID NO: 3741767 - RNA, 12 nt, Human
ggcuuguuuauu

SEQ ID NO: 3741768 - RNA, 20 nt, Human
ggcuuuacauacuuuaucaa

SEQ ID NO: 3741769 - RNA, 18 nt, Human
ggcuuuauccucuuuaga

SEQ ID NO: 3741770 - RNA, 22 nt, Human
ggcuuuaugauaauagauucuc

SEQ ID NO: 3741771 - RNA, 23 nt, Human
ggcuuucaggagcuccauacaca

SEQ ID NO: 3741772 - RNA, 20 nt, Human
ggcuuucaugaggaggcaga

SEQ ID NO: 3741773 - RNA, 11 nt, Human
ggcuuucaugu

SEQ ID NO: 3741774 - RNA, 20 nt, Human
ggcuuucguccacagcuucc

SEQ ID NO: 3741775 - RNA, 23 nt, Human
ggcuuucguccacagcuuccugu

SEQ ID NO: 3741776 - RNA, 15 nt, Human
ggcuuucucuuuucu

SEQ ID NO: 3741777 - RNA, 21 nt, Human
ggcuuugcaaccauuuucauu

SEQ ID NO: 3741778 - RNA, 21 nt, Human
ggcuuuggagacuuucuuuaa

SEQ ID NO: 3741779 - RNA, 15 nt, Human
ggcuuugucccacag

SEQ ID NO: 3741780 - RNA, 16 nt, Human
ggcuuugucccacagc

SEQ ID NO: 3741781 - RNA, 13 nt, Human
ggcuuuguguugu

SEQ ID NO: 3741782 - RNA, 20 nt, Human
ggcuuuuacugaagccuuuc

SEQ ID NO: 3741783 - RNA, 20 nt, Human
ggcuuuuauuaaugcacuuu

SEQ ID NO: 3741784 - RNA, 22 nt, Human
ggcuuuucacugcuggcugccu

SEQ ID NO: 3741785 - RNA, 14 nt, Human
ggcuuuucucagcu

SEQ ID NO: 3741786 - RNA, 16 nt, Human
ggcuuuucugauccag

SEQ ID NO: 3741787 - RNA, 17 nt, Human
ggcuuuuguuuugcuuu

SEQ ID NO: 3741788 - RNA, 20 nt, Human
gggaaaaacuuuggaaccag

SEQ ID NO: 3741789 - RNA, 23 nt, Human
gggaaaagggaacaggaaaagaa

SEQ ID NO: 3741790 - RNA, 22 nt, Human
gggaaaauaaaaaaagaaaaaa

SEQ ID NO: 3741791 - RNA, 13 nt, Human
gggaaaaucagcc

SEQ ID NO: 3741792 - RNA, 16 nt, Human
gggaaaauguuuugua

SEQ ID NO: 3741793 - RNA, 17 nt, Human
gggaaaauuauuugcau

SEQ ID NO: 3741794 - RNA, 15 nt, Human
gggaaacacuccuug

SEQ ID NO: 3741795 - RNA, 19 nt, Human
gggaaacagguugggaugg

SEQ ID NO: 3741796 - RNA, 21 nt, Human
gggaaacaucacaccugcccu

SEQ ID NO: 3741797 - RNA, 21 nt, Human
gggaaacuggccauggccugc

SEQ ID NO: 3741798 - RNA, 17 nt, Human
gggaaacuugucacuug

SEQ ID NO: 3741799 - RNA, 21 nt, Human
gggaaagacauccauaaagaa

SEQ ID NO: 3741800 - RNA, 19 nt, Human
gggaaagccagugacucca

SEQ ID NO: 3741801 - RNA, 22 nt, Human
gggaaagccagugacuccagga

SEQ ID NO: 3741802 - RNA, 16 nt, Human
gggaaagccccugccc

SEQ ID NO: 3741803 - RNA, 23 nt, Human
gggaaaggaggcaugccucugau

SEQ ID NO: 3741804 - RNA, 15 nt, Human
gggaaaggauauuuu

SEQ ID NO: 3741805 - RNA, 20 nt, Human
gggaaagggguuggggugac

SEQ ID NO: 3741806 - RNA, 14 nt, Human
gggaaauaagagag

SEQ ID NO: 3741807 - RNA, 23 nt, Human
gggaaauauauacaaaaagaaaa

SEQ ID NO: 3741808 - RNA, 21 nt, Human
gggaaaugguacuguacagcu

SEQ ID NO: 3741809 - RNA, 19 nt, Human
gggaacaaggguggcaucc

SEQ ID NO: 3741810 - RNA, 13 nt, Human
gggaacacugccc

SEQ ID NO: 3741811 - RNA, 14 nt, Human
gggaacagacagga

SEQ ID NO: 3741812 - RNA, 22 nt, Human
gggaacagccacuccccuccac

SEQ ID NO: 3741813 - RNA, 12 nt, Human
gggaacagggcg

SEQ ID NO: 3741814 - RNA, 12 nt, Human
gggaacaguguu

SEQ ID NO: 3741815 - RNA, 15 nt, Human
gggaacaugcccccu

SEQ ID NO: 3741816 - RNA, 12 nt, Human
gggaacccugcu

SEQ ID NO: 3741817 - RNA, 16 nt, Human
gggaaccucccagagg

SEQ ID NO: 3741818 - RNA, 18 nt, Human
gggaaccuccccagccug

SEQ ID NO: 3741819 - RNA, 19 nt, Human
gggaaccuccccagccugc

SEQ ID NO: 3741820 - RNA, 13 nt, Human
gggaaccugaccc

SEQ ID NO: 3741821 - RNA, 13 nt, Human
gggaaccuguguc

SEQ ID NO: 3741822 - RNA, 12 nt, Human
gggaacgcccac

SEQ ID NO: 3741823 - RNA, 19 nt, Human
gggaacgcccacuucccug

SEQ ID NO: 3741824 - RNA, 20 nt, Human
gggaacgcccacuucccugg

SEQ ID NO: 3741825 - RNA, 15 nt, Human
gggaacguucucuuu

SEQ ID NO: 3741826 - RNA, 13 nt, Human
gggaacuccugga

SEQ ID NO: 3741827 - RNA, 15 nt, Human
gggaacugcagaccu

SEQ ID NO: 3741828 - RNA, 20 nt, Human
gggaacugcagaccuguccu

SEQ ID NO: 3741829 - RNA, 18 nt, Human
gggaacuggccaagcuga

SEQ ID NO: 3741830 - RNA, 21 nt, Human
gggaacuggccaagcugaggu

SEQ ID NO: 3741831 - RNA, 20 nt, Human
gggaagaaacacuuucucuu

SEQ ID NO: 3741832 - RNA, 17 nt, Human
gggaagaagcagagaga

SEQ ID NO: 3741833 - RNA, 18 nt, Human
gggaagaagcucucuccu

SEQ ID NO: 3741834 - RNA, 11 nt, Human
gggaagacagu

SEQ ID NO: 3741835 - RNA, 12 nt, Human
gggaagacagug

SEQ ID NO: 3741836 - RNA, 11 nt, Human
gggaagagagg

SEQ ID NO: 3741837 - RNA, 18 nt, Human
gggaagagaggaguucaa

SEQ ID NO: 3741838 - RNA, 16 nt, Human
gggaagagauccaaag

SEQ ID NO: 3741839 - RNA, 15 nt, Human
gggaagagcacagcc

SEQ ID NO: 3741840 - RNA, 14 nt, Human
gggaagagggggcg

SEQ ID NO: 3741841 - RNA, 18 nt, Human
gggaagaguggaggugga

SEQ ID NO: 3741842 - RNA, 16 nt, Human
gggaagaguguacugg

SEQ ID NO: 3741843 - RNA, 19 nt, Human
gggaagcccagcuccaggg

SEQ ID NO: 3741844 - RNA, 18 nt, Human
gggaagcgcucagaacag

SEQ ID NO: 3741845 - RNA, 19 nt, Human
gggaagcugcagcuuggga

SEQ ID NO: 3741846 - RNA, 15 nt, Human
gggaagcuggccuga

SEQ ID NO: 3741847 - RNA, 17 nt, Human
gggaaggaacucuggcu

SEQ ID NO: 3741848 - RNA, 17 nt, Human
gggaaggaggcuggcuu

SEQ ID NO: 3741849 - RNA, 15 nt, Human
gggaaggaucccaug

SEQ ID NO: 3741850 - RNA, 18 nt, Human
gggaaggcacagggagaa

SEQ ID NO: 3741851 - RNA, 14 nt, Human
gggaaggcaggcag

SEQ ID NO: 3741852 - RNA, 15 nt, Human
gggaaggcaggcagg

SEQ ID NO: 3741853 - RNA, 23 nt, Human
gaagcuacugugugugugaauga

SEQ ID NO: 3741854 - RNA, 18 nt, Human
gaagcuagacacaugaag

SEQ ID NO: 3741855 - RNA, 12 nt, Human
gaagcuagcucc

SEQ ID NO: 3741856 - RNA, 16 nt, Human
gaagcuagcuccccuc

SEQ ID NO: 3741857 - RNA, 19 nt, Human
gaagcuagcuccccuccuc

SEQ ID NO: 3741858 - RNA, 16 nt, Human
gaagcuagucuuuugc

SEQ ID NO: 3741859 - RNA, 19 nt, Human
gaagcuauaaauuccucuu

SEQ ID NO: 3741860 - RNA, 20 nt, Human
gaagcuauuuuuuucaguuu

SEQ ID NO: 3741861 - RNA, 12 nt, Human
gaagcucagccc

SEQ ID NO: 3741862 - RNA, 19 nt, Human
gaagcucagcccacccccc

SEQ ID NO: 3741863 - RNA, 21 nt, Human
gaagcucagcccaccccccuc

SEQ ID NO: 3741864 - RNA, 12 nt, Human
gaagcucagcug

SEQ ID NO: 3741865 - RNA, 17 nt, Human
gaagcucagggccuggc

SEQ ID NO: 3741866 - RNA, 19 nt, Human
gaagcucagggccuggcuc

SEQ ID NO: 3741867 - RNA, 21 nt, Human
gaagcucagggccuggcucag

SEQ ID NO: 3741868 - RNA, 15 nt, Human
gaagcuccacuguca

SEQ ID NO: 3741869 - RNA, 20 nt, Human
gaagcuccaguccugcucuc

SEQ ID NO: 3741870 - RNA, 14 nt, Human
gaagcucccaggaa

SEQ ID NO: 3741871 - RNA, 17 nt, Human
gaagcuccucuccccag

SEQ ID NO: 3741872 - RNA, 12 nt, Human
gaagcuccuggu

SEQ ID NO: 3741873 - RNA, 12 nt, Human
gaagcucuggcu

SEQ ID NO: 3741874 - RNA, 20 nt, Human
gaagcucuggcugaacccug

SEQ ID NO: 3741875 - RNA, 23 nt, Human
gaagcucuggcugaacccugugc

SEQ ID NO: 3741876 - RNA, 20 nt, Human
gaagcucuuggagcugugag

SEQ ID NO: 3741877 - RNA, 23 nt, Human
gaagcugaagugcauccaaaggu

SEQ ID NO: 3741878 - RNA, 17 nt, Human
gaagcugagcaccaggg

SEQ ID NO: 3741879 - RNA, 17 nt, Human
gaagcugagggcaaauc

SEQ ID NO: 3741880 - RNA, 17 nt, Human
gaagcugaugcuuugcu

SEQ ID NO: 3741881 - RNA, 13 nt, Human
gaagcugccugcu

SEQ ID NO: 3741882 - RNA, 20 nt, Human
gaagcugcuccaggccugca

SEQ ID NO: 3741883 - RNA, 13 nt, Human
gaagcugcuccgu

SEQ ID NO: 3741884 - RNA, 17 nt, Human
gaagcugcucuggaauu

SEQ ID NO: 3741885 - RNA, 18 nt, Human
gaagcugcucuggaauuu

SEQ ID NO: 3741886 - RNA, 10 nt, Human
gaagcugcug

SEQ ID NO: 3741887 - RNA, 22 nt, Human
gaagcugcugaccaauugugcu

SEQ ID NO: 3741888 - RNA, 21 nt, Human
gaagcugucauaaaaagacaa

SEQ ID NO: 3741889 - RNA, 19 nt, Human
gaagcugugcgugugugug

SEQ ID NO: 3741890 - RNA, 17 nt, Human
gaagcuguguccuugca

SEQ ID NO: 3741891 - RNA, 20 nt, Human
gaagcuguguccuugcaccu

SEQ ID NO: 3741892 - RNA, 24 nt, Human
gaagcuguguccuugcaccugcau

SEQ ID NO: 3741893 - RNA, 13 nt, Human
gaagcuguuguac

SEQ ID NO: 3741894 - RNA, 18 nt, Human
gaagcuguuguacauuua

SEQ ID NO: 3741895 - RNA, 19 nt, Human
gaagcuguuguacauuuau

SEQ ID NO: 3741896 - RNA, 16 nt, Human
gaagcuguugugugag

SEQ ID NO: 3741897 - RNA, 15 nt, Human
gaagcuuauuaaugc

SEQ ID NO: 3741898 - RNA, 16 nt, Human
gaagcuuauuaaugcu

SEQ ID NO: 3741899 - RNA, 19 nt, Human
gaagcuuauuaaugcuaag

SEQ ID NO: 3741900 - RNA, 20 nt, Human
gaagcuuauuaaugcuaagg

SEQ ID NO: 3741901 - RNA, 16 nt, Human
gaagcuucaugcacuu

SEQ ID NO: 3741902 - RNA, 15 nt, Human
gaagcuucuaauaaa

SEQ ID NO: 3741903 - RNA, 22 nt, Human
gaagcuucuggugaccuuccaa

SEQ ID NO: 3741904 - RNA, 23 nt, Human
gaagcuuguguauccauuaucau

SEQ ID NO: 3741905 - RNA, 15 nt, Human
gaagcuuucucugcu

SEQ ID NO: 3741906 - RNA, 20 nt, Human
gaagcuuucucugcuucagc

SEQ ID NO: 3741907 - RNA, 14 nt, Human
gaagcuuucugucu

SEQ ID NO: 3741908 - RNA, 19 nt, Human
gaagcuuuguccccugcuu

SEQ ID NO: 3741909 - RNA, 13 nt, Human
gaaggaaaaauuc

SEQ ID NO: 3741910 - RNA, 20 nt, Human
gaaggaaacccagcucuggu

SEQ ID NO: 3741911 - RNA, 19 nt, Human
gaaggaaagaaagaaggaa

SEQ ID NO: 3741912 - RNA, 20 nt, Human
gaaggaaaugaauuucucua

SEQ ID NO: 3741913 - RNA, 15 nt, Human
gaaggaacguccccu

SEQ ID NO: 3741914 - RNA, 23 nt, Human
gaaggaaggagacucaccucugc

SEQ ID NO: 3741915 - RNA, 18 nt, Human
gaaggaaggcagggagga

SEQ ID NO: 3741916 - RNA, 20 nt, Human
gaaggaaggcagggaggagg

SEQ ID NO: 3741917 - RNA, 20 nt, Human
gaaggaauauauggcagagu

SEQ ID NO: 3741918 - RNA, 16 nt, Human
gaaggaaugucuuugg

SEQ ID NO: 3741919 - RNA, 16 nt, Human
gaaggacaaggcuaga

SEQ ID NO: 3741920 - RNA, 20 nt, Human
gaaggacauugcggacagcc

SEQ ID NO: 3741921 - RNA, 21 nt, Human
gaaggacccuucagagguggc

SEQ ID NO: 3741922 - RNA, 19 nt, Human
gaaggacuaauagaaaagu

SEQ ID NO: 3741923 - RNA, 18 nt, Human
gaaggacugugacaggca

SEQ ID NO: 3741924 - RNA, 22 nt, Human
gaaggacugugacaggcagcag

SEQ ID NO: 3741925 - RNA, 23 nt, Human
gaaggacugugacaggcagcaga

SEQ ID NO: 3741926 - RNA, 16 nt, Human
gaaggagacaggcaga

SEQ ID NO: 3741927 - RNA, 17 nt, Human
gaaggagacucaccucu

SEQ ID NO: 3741928 - RNA, 23 nt, Human
gaaggagacucaccucugccuca

SEQ ID NO: 3741929 - RNA, 16 nt, Human
gaaggagagaaagugg

SEQ ID NO: 3741930 - RNA, 20 nt, Human
gaaggagagaaaguggguga

SEQ ID NO: 3741931 - RNA, 16 nt, Human
gaaggagagaagggga

SEQ ID NO: 3741932 - RNA, 18 nt, Human
gaaggagagaaggggagg

SEQ ID NO: 3741933 - RNA, 13 nt, Human
gaaggagagccug

SEQ ID NO: 3741934 - RNA, 12 nt, Human
gaaggagcugcc

SEQ ID NO: 3741935 - RNA, 15 nt, Human
gaaggagcugccugg

SEQ ID NO: 3741936 - RNA, 22 nt, Human
gaaggaggaaugcuggacugga

SEQ ID NO: 3741937 - RNA, 14 nt, Human
gaaggaggacccag

SEQ ID NO: 3741938 - RNA, 17 nt, Human
gaaggaggggaagcugc

SEQ ID NO: 3741939 - RNA, 19 nt, Human
gaaggaggggaagcugcag

SEQ ID NO: 3741940 - RNA, 15 nt, Human
gaaggaggugaggga

SEQ ID NO: 3741941 - RNA, 21 nt, Human
gaaggauacaaaagcauguga

SEQ ID NO: 3741942 - RNA, 21 nt, Human
gaaggaucccaugagcuccuu

SEQ ID NO: 3741943 - RNA, 10 nt, Human
gaaggauccg

SEQ ID NO: 3741944 - RNA, 10 nt, Human
gaaggauccu

SEQ ID NO: 3741945 - RNA, 15 nt, Human
gaaggauguacauuu

SEQ ID NO: 3741946 - RNA, 17 nt, Human
gaaggauguacauuucc

SEQ ID NO: 3741947 - RNA, 20 nt, Human
gaaggauguacauuuccaaa

SEQ ID NO: 3741948 - RNA, 16 nt, Human
gaaggauucugcuggc

SEQ ID NO: 3741949 - RNA, 13 nt, Human
gaaggauuguaaa

SEQ ID NO: 3741950 - RNA, 14 nt, Human
gaaggauuguaaaa

SEQ ID NO: 3741951 - RNA, 13 nt, Human
gaaggauuugugu

SEQ ID NO: 3741952 - RNA, 12 nt, Human
gaaggcaaaaaa

SEQ ID NO: 3741953 - RNA, 22 nt, Human
gaaggcaagaggggguggaggg

SEQ ID NO: 3741954 - RNA, 24 nt, Human
gaaggcacuaaaaagagcuguccu

SEQ ID NO: 3741955 - RNA, 15 nt, Human
gaaggcagaaagcaa

SEQ ID NO: 3741956 - RNA, 13 nt, Human
gaaggcagacagc

SEQ ID NO: 3741957 - RNA, 22 nt, Human
gaaggcagagaaagggacaaug

SEQ ID NO: 3741958 - RNA, 13 nt, Human
gaaggcaggaaga

SEQ ID NO: 3741959 - RNA, 18 nt, Human
gaaggcaggcagggcucu

SEQ ID NO: 3741960 - RNA, 21 nt, Human
gaaggcaggcagggcucuccu

SEQ ID NO: 3741961 - RNA, 14 nt, Human
gaaggcagggagga

SEQ ID NO: 3741962 - RNA, 16 nt, Human
gaaggcagggaggagg

SEQ ID NO: 3741963 - RNA, 20 nt, Human
gaaggcagggaggaggcaga

SEQ ID NO: 3741964 - RNA, 22 nt, Human
gaaggcagggagggccugggcc

SEQ ID NO: 3741965 - RNA, 17 nt, Human
gaaggcauuugcagggu

SEQ ID NO: 3741966 - RNA, 19 nt, Human
gaaggcauuugcagggucc

SEQ ID NO: 3741967 - RNA, 23 nt, Human
gaaggcauuugcaggguccucuu

SEQ ID NO: 3741968 - RNA, 13 nt, Human
gaaggccacaugu

SEQ ID NO: 3741969 - RNA, 18 nt, Human
gaaggccucuuggagacc

SEQ ID NO: 3741970 - RNA, 17 nt, Human
gaaggcuaaaaagcaac

SEQ ID NO: 3741971 - RNA, 21 nt, Human
gaaggcuacuucggggcuggg

SEQ ID NO: 3741972 - RNA, 17 nt, Human
gaaggcucgagcaugcc

SEQ ID NO: 3741973 - RNA, 21 nt, Human
gaaggcucgagcaugccugga

SEQ ID NO: 3741974 - RNA, 18 nt, Human
gaaggcucuucuccccag

SEQ ID NO: 3741975 - RNA, 15 nt, Human
gaaggcuggguucug

SEQ ID NO: 3741976 - RNA, 20 nt, Human
gaaggcuggguucugauccu

SEQ ID NO: 3741977 - RNA, 12 nt, Human
gaaggcuguccu

SEQ ID NO: 3741978 - RNA, 17 nt, Human
gaaggcuugggauuugc

SEQ ID NO: 3741979 - RNA, 20 nt, Human
gaaggcuuguugugcuuuua

SEQ ID NO: 3741980 - RNA, 24 nt, Human
gaaggcuuucagggccuccagccc

SEQ ID NO: 3741981 - RNA, 12 nt, Human
gaaggcuuugug

SEQ ID NO: 3741982 - RNA, 17 nt, Human
gaaggcuuuuggucucc

SEQ ID NO: 3741983 - RNA, 17 nt, Human
gaagggaauaagguaca

SEQ ID NO: 3741984 - RNA, 19 nt, Human
gaagggaauccuccuccag

SEQ ID NO: 3741985 - RNA, 15 nt, Human
gaagggaccaaggca

SEQ ID NO: 3741986 - RNA, 14 nt, Human
gaagggacugagag

SEQ ID NO: 3741987 - RNA, 16 nt, Human
gaagggagaagaaagg

SEQ ID NO: 3741988 - RNA, 22 nt, Human
gaagggagccaagggauggaca

SEQ ID NO: 3741989 - RNA, 23 nt, Human
gaagggagccaagggauggacau

SEQ ID NO: 3741990 - RNA, 17 nt, Human
gaagggagcuagccaga

SEQ ID NO: 3741991 - RNA, 15 nt, Human
gaagggagggcagag

SEQ ID NO: 3741992 - RNA, 16 nt, Human
gaagggagggcagagc

SEQ ID NO: 3741993 - RNA, 17 nt, Human
gaagggagggcagagcu

SEQ ID NO: 3741994 - RNA, 21 nt, Human
gaagggagggcagagcuggug

SEQ ID NO: 3741995 - RNA, 17 nt, Human
gaagggauggauuccaa

SEQ ID NO: 3741996 - RNA, 22 nt, Human
gaagggcaggaaggagagccug

SEQ ID NO: 3741997 - RNA, 23 nt, Human
gaagggcaggaaggagagccugc

SEQ ID NO: 3741998 - RNA, 10 nt, Human
gaagggccag

SEQ ID NO: 3741999 - RNA, 15 nt, Human
gaagggccagagcca

SEQ ID NO: 3742000 - RNA, 16 nt, Human
gaagggccagagccag

SEQ ID NO: 3742001 - RNA, 18 nt, Human
gaagggccagagccaggg

SEQ ID NO: 3742002 - RNA, 20 nt, Human
gguccacccaggagccccga

SEQ ID NO: 3742003 - RNA, 20 nt, Human
gguccacuuuuccaguauuu

SEQ ID NO: 3742004 - RNA, 23 nt, Human
gguccagcccuggcugaaggacu

SEQ ID NO: 3742005 - RNA, 14 nt, Human
gguccagcucugga

SEQ ID NO: 3742006 - RNA, 16 nt, Human
gguccagcucuggagg

SEQ ID NO: 3742007 - RNA, 13 nt, Human
gguccagcuggcc

SEQ ID NO: 3742008 - RNA, 20 nt, Human
gguccagcuggccuggacag

SEQ ID NO: 3742009 - RNA, 17 nt, Human
gguccagcuugcucuuc

SEQ ID NO: 3742010 - RNA, 18 nt, Human
gguccagcuugcucuuca

SEQ ID NO: 3742011 - RNA, 11 nt, Human
gguccaggaga

SEQ ID NO: 3742012 - RNA, 19 nt, Human
gguccaggauuccucuuuu

SEQ ID NO: 3742013 - RNA, 11 nt, Human
gguccagggaa

SEQ ID NO: 3742014 - RNA, 20 nt, Human
gguccaggggccccuccagc

SEQ ID NO: 3742015 - RNA, 21 nt, Human
gguccaggguugaucacacuc

SEQ ID NO: 3742016 - RNA, 15 nt, Human
gguccauagcugugg

SEQ ID NO: 3742017 - RNA, 17 nt, Human
gguccauggaaugcuug

SEQ ID NO: 3742018 - RNA, 13 nt, Human
gguccaugggcag

SEQ ID NO: 3742019 - RNA, 12 nt, Human
ggucccaacagg

SEQ ID NO: 3742020 - RNA, 15 nt, Human
ggucccaagcugggc

SEQ ID NO: 3742021 - RNA, 14 nt, Human
ggucccacagccac

SEQ ID NO: 3742022 - RNA, 21 nt, Human
ggucccacaucccugggccug

SEQ ID NO: 3742023 - RNA, 22 nt, Human
ggucccacgaauuugcugggga

SEQ ID NO: 3742024 - RNA, 14 nt, Human
ggucccacucaguc

SEQ ID NO: 3742025 - RNA, 11 nt, Human
ggucccagugg

SEQ ID NO: 3742026 - RNA, 21 nt, Human
ggucccagugggaggggcagg

SEQ ID NO: 3742027 - RNA, 23 nt, Human
ggucccaguuuuguugccccaga

SEQ ID NO: 3742028 - RNA, 11 nt, Human
ggucccaucca

SEQ ID NO: 3742029 - RNA, 17 nt, Human
ggucccauccaggcagu

SEQ ID NO: 3742030 - RNA, 23 nt, Human
gguccccagcccuuccucugcuc

SEQ ID NO: 3742031 - RNA, 18 nt, Human
gguccccaucaucccagc

SEQ ID NO: 3742032 - RNA, 20 nt, Human
ggucccccucagcaagcccu

SEQ ID NO: 3742033 - RNA, 16 nt, Human
ggucccccugcagcua

SEQ ID NO: 3742034 - RNA, 16 nt, Human
gguccccuccaggagu

SEQ ID NO: 3742035 - RNA, 13 nt, Human
gguccccuccuuc

SEQ ID NO: 3742036 - RNA, 20 nt, Human
ggucccggagaggccucgac

SEQ ID NO: 3742037 - RNA, 16 nt, Human
ggucccggcucugugg

SEQ ID NO: 3742038 - RNA, 13 nt, Human
ggucccuaauaaa

SEQ ID NO: 3742039 - RNA, 17 nt, Human
ggucccuccccuucucu

SEQ ID NO: 3742040 - RNA, 18 nt, Human
ggucccugcuguguuccc

SEQ ID NO: 3742041 - RNA, 13 nt, Human
ggucccugggagg

SEQ ID NO: 3742042 - RNA, 20 nt, Human
ggucccuggguagcggggga

SEQ ID NO: 3742043 - RNA, 20 nt, Human
ggucccuugagaccucagcc

SEQ ID NO: 3742044 - RNA, 21 nt, Human
ggucccuugagaccucagcca

SEQ ID NO: 3742045 - RNA, 21 nt, Human
gguccgaguguguuucauccu

SEQ ID NO: 3742046 - RNA, 18 nt, Human
gguccggacacuccuaga

SEQ ID NO: 3742047 - RNA, 18 nt, Human
gguccgugcuaaggacuu

SEQ ID NO: 3742048 - RNA, 13 nt, Human
gguccgugggacg

SEQ ID NO: 3742049 - RNA, 20 nt, Human
gguccuacccauccccgcag

SEQ ID NO: 3742050 - RNA, 16 nt, Human
gguccuauggccucau

SEQ ID NO: 3742051 - RNA, 14 nt, Human
gguccucagagaau

SEQ ID NO: 3742052 - RNA, 21 nt, Human
gguccucagagaauuucuacc

SEQ ID NO: 3742053 - RNA, 17 nt, Human
gguccugaaaguaacuc

SEQ ID NO: 3742054 - RNA, 21 nt, Human
gguccugagcacugccaggag

SEQ ID NO: 3742055 - RNA, 22 nt, Human
gguccugagcacugccaggagg

SEQ ID NO: 3742056 - RNA, 23 nt, Human
gguccugagcacugccaggaggg

SEQ ID NO: 3742057 - RNA, 13 nt, Human
gguccugcucagc

SEQ ID NO: 3742058 - RNA, 21 nt, Human
gguccugcugcaguugccagu

SEQ ID NO: 3742059 - RNA, 23 nt, Human
gguccugcugcaguugccaguca

SEQ ID NO: 3742060 - RNA, 17 nt, Human
gguccuggagcagacca

SEQ ID NO: 3742061 - RNA, 18 nt, Human
gguccuggaggcucaaau

SEQ ID NO: 3742062 - RNA, 22 nt, Human
gguccuggccagauggcccgga

SEQ ID NO: 3742063 - RNA, 13 nt, Human
gguccuggccauc

SEQ ID NO: 3742064 - RNA, 16 nt, Human
gguccuggccauccca

SEQ ID NO: 3742065 - RNA, 14 nt, Human
gguccuggggccuc

SEQ ID NO: 3742066 - RNA, 13 nt, Human
gguccuggugccc

SEQ ID NO: 3742067 - RNA, 14 nt, Human
gguccuggugcccu

SEQ ID NO: 3742068 - RNA, 19 nt, Human
gguccugguggggcagcuc

SEQ ID NO: 3742069 - RNA, 13 nt, Human
gguccugucuccc

SEQ ID NO: 3742070 - RNA, 23 nt, Human
gguccugucuccccucugcuggc

SEQ ID NO: 3742071 - RNA, 13 nt, Human
gguccuguggcag

SEQ ID NO: 3742072 - RNA, 14 nt, Human
gguccuguggcagg

SEQ ID NO: 3742073 - RNA, 16 nt, Human
gguccuguggcaggca

SEQ ID NO: 3742074 - RNA, 21 nt, Human
gguccuucaaguuagcucagg

SEQ ID NO: 3742075 - RNA, 16 nt, Human
gguccuuccaggcccc

SEQ ID NO: 3742076 - RNA, 19 nt, Human
gguccuucccucuccccaa

SEQ ID NO: 3742077 - RNA, 13 nt, Human
gguccuuggcccc

SEQ ID NO: 3742078 - RNA, 22 nt, Human
gguccuuuacacucaggcuuuc

SEQ ID NO: 3742079 - RNA, 18 nt, Human
gguccuuuugacacugcu

SEQ ID NO: 3742080 - RNA, 20 nt, Human
ggucgaccccaaagccccuu

SEQ ID NO: 3742081 - RNA, 17 nt, Human
ggucgacuucgggcugg

SEQ ID NO: 3742082 - RNA, 14 nt, Human
ggucgcccaggaga

SEQ ID NO: 3742083 - RNA, 14 nt, Human
ggucgcccuggacu

SEQ ID NO: 3742084 - RNA, 22 nt, Human
ggucgccuguccugccuguggg

SEQ ID NO: 3742085 - RNA, 13 nt, Human
ggucgcuccugcc

SEQ ID NO: 3742086 - RNA, 14 nt, Human
ggucgcuccugccc

SEQ ID NO: 3742087 - RNA, 13 nt, Human
ggucggaaaacau

SEQ ID NO: 3742088 - RNA, 14 nt, Human
ggucggaaaacaug

SEQ ID NO: 3742089 - RNA, 15 nt, Human
ggucggaacccaagc

SEQ ID NO: 3742090 - RNA, 20 nt, Human
ggucguggagagcuaggagc

SEQ ID NO: 3742091 - RNA, 14 nt, Human
ggucuaggacacag

SEQ ID NO: 3742092 - RNA, 14 nt, Human
ggucuagggagaga

SEQ ID NO: 3742093 - RNA, 14 nt, Human
ggucuauggggaga

SEQ ID NO: 3742094 - RNA, 13 nt, Human
ggucuauuccagc

SEQ ID NO: 3742095 - RNA, 15 nt, Human
ggucuauuccagcuc

SEQ ID NO: 3742096 - RNA, 16 nt, Human
ggucuauuccagcuca

SEQ ID NO: 3742097 - RNA, 17 nt, Human
ggucuauugucuguauu

SEQ ID NO: 3742098 - RNA, 17 nt, Human
ggucucaaacuccugac

SEQ ID NO: 3742099 - RNA, 19 nt, Human
ggucucacaguguugccca

SEQ ID NO: 3742100 - RNA, 16 nt, Human
ggucucacccuggagg

SEQ ID NO: 3742101 - RNA, 12 nt, Human
ggucucacucug

SEQ ID NO: 3742102 - RNA, 23 nt, Human
ggucucacucugucgcccagucu

SEQ ID NO: 3742103 - RNA, 18 nt, Human
ggucucagggugucccag

SEQ ID NO: 3742104 - RNA, 22 nt, Human
ggucuccagaaagccccaccca

SEQ ID NO: 3742105 - RNA, 18 nt, Human
ggucucccucuccugccu

SEQ ID NO: 3742106 - RNA, 14 nt, Human
ggucucccuggcuc

SEQ ID NO: 3742107 - RNA, 16 nt, Human
ggucucccuggcuccc

SEQ ID NO: 3742108 - RNA, 17 nt, Human
ggucuccgaaaugcugu

SEQ ID NO: 3742109 - RNA, 22 nt, Human
ggucuccgaaaugcugucuuuc

SEQ ID NO: 3742110 - RNA, 19 nt, Human
ggucuccucacucccuucu

SEQ ID NO: 3742111 - RNA, 19 nt, Human
ggucuccucuuuguuuugu

SEQ ID NO: 3742112 - RNA, 17 nt, Human
ggucucgaacuccugac

SEQ ID NO: 3742113 - RNA, 21 nt, Human
ggucucgcugaugcugggcug

SEQ ID NO: 3742114 - RNA, 22 nt, Human
ggucucgcugaugcugggcugg

SEQ ID NO: 3742115 - RNA, 20 nt, Human
ggucucgcuuuguugcccag

SEQ ID NO: 3742116 - RNA, 16 nt, Human
ggucucucccucaggu

SEQ ID NO: 3742117 - RNA, 21 nt, Human
ggucucucuugccccaccugg

SEQ ID NO: 3742118 - RNA, 13 nt, Human
ggucucucuuugg

SEQ ID NO: 3742119 - RNA, 20 nt, Human
ggucucugcauuuuucugca

SEQ ID NO: 3742120 - RNA, 22 nt, Human
ggucucugcauuuuucugcaga

SEQ ID NO: 3742121 - RNA, 13 nt, Human
ggucucugcugcc

SEQ ID NO: 3742122 - RNA, 14 nt, Human
ggucucugcugccg

SEQ ID NO: 3742123 - RNA, 16 nt, Human
ggucucuucucccaga

SEQ ID NO: 3742124 - RNA, 21 nt, Human
ggucucuugagggagcuuagc

SEQ ID NO: 3742125 - RNA, 13 nt, Human
ggucugaaaugga

SEQ ID NO: 3742126 - RNA, 11 nt, Human
ggucugaaugu

SEQ ID NO: 3742127 - RNA, 14 nt, Human
ggucugaauguucu

SEQ ID NO: 3742128 - RNA, 15 nt, Human
ggucugagcuccagc

SEQ ID NO: 3742129 - RNA, 16 nt, Human
ggucugagcuccagcu

SEQ ID NO: 3742130 - RNA, 20 nt, Human
ggucugagucauggccgggu

SEQ ID NO: 3742131 - RNA, 16 nt, Human
ggucugcaagucagag

SEQ ID NO: 3742132 - RNA, 17 nt, Human
ggucugcaagucagagg

SEQ ID NO: 3742133 - RNA, 14 nt, Human
ggucugcaggcagg

SEQ ID NO: 3742134 - RNA, 23 nt, Human
ggucugcaggcagggcugacucu

SEQ ID NO: 3742135 - RNA, 14 nt, Human
ggucugccaggccc

SEQ ID NO: 3742136 - RNA, 12 nt, Human
ggucugcuccca

SEQ ID NO: 3742137 - RNA, 22 nt, Human
ggucugcucccaaggggccuga

SEQ ID NO: 3742138 - RNA, 18 nt, Human
ggucugcucuuucucugc

SEQ ID NO: 3742139 - RNA, 19 nt, Human
ggucugcugccucaggaau

SEQ ID NO: 3742140 - RNA, 16 nt, Human
ggucuggacugacagc

SEQ ID NO: 3742141 - RNA, 19 nt, Human
ggucuggaggaccugcccg

SEQ ID NO: 3742142 - RNA, 22 nt, Human
ggucuggcagccucccauccag

SEQ ID NO: 3742143 - RNA, 13 nt, Human
ggucuggcugcuu

SEQ ID NO: 3742144 - RNA, 13 nt, Human
ggucuggcuggug

SEQ ID NO: 3742145 - RNA, 23 nt, Human
ggucuggcugguguuaacagaag

SEQ ID NO: 3742146 - RNA, 19 nt, Human
ggucugggagucacacagu

SEQ ID NO: 3742147 - RNA, 22 nt, Human
ggucugggcggcgggcggcugg

SEQ ID NO: 3742148 - RNA, 15 nt, Human
ggucugguugggcag

SEQ ID NO: 3742149 - RNA, 18 nt, Human
ggucuguagguugcacac

SEQ ID NO: 3742150 - RNA, 14 nt, Human
ggucugucccacca

SEQ ID NO: 3742151 - RNA, 15 nt, Human
ggucugucccaccag

SEQ ID NO: 3742152 - RNA, 19 nt, Human
gggaaggccccacagacaa

SEQ ID NO: 3742153 - RNA, 16 nt, Human
gggaagggagagcggg

SEQ ID NO: 3742154 - RNA, 14 nt, Human
gggaagggagccaa

SEQ ID NO: 3742155 - RNA, 21 nt, Human
gggaagggagccaagggaugg

SEQ ID NO: 3742156 - RNA, 22 nt, Human
gggaagggccagucugggcugc

SEQ ID NO: 3742157 - RNA, 21 nt, Human
gggaagggggggcuacauuau

SEQ ID NO: 3742158 - RNA, 18 nt, Human
gggaaggggggucagaag

SEQ ID NO: 3742159 - RNA, 17 nt, Human
gggaagggucauagaaa

SEQ ID NO: 3742160 - RNA, 16 nt, Human
gggaaggguuugaauu

SEQ ID NO: 3742161 - RNA, 12 nt, Human
gggaaggucacc

SEQ ID NO: 3742162 - RNA, 19 nt, Human
gggaaggucaccagcacca

SEQ ID NO: 3742163 - RNA, 14 nt, Human
gggaaguccucccu

SEQ ID NO: 3742164 - RNA, 24 nt, Human
gggaauaaaauccuaagacacaaa

SEQ ID NO: 3742165 - RNA, 19 nt, Human
gggaauaaauaugccucuc

SEQ ID NO: 3742166 - RNA, 14 nt, Human
gggaauaaccuucc

SEQ ID NO: 3742167 - RNA, 14 nt, Human
gggaauauuugaau

SEQ ID NO: 3742168 - RNA, 14 nt, Human
gggaauauuuuauu

SEQ ID NO: 3742169 - RNA, 12 nt, Human
gggaaucacauc

SEQ ID NO: 3742170 - RNA, 14 nt, Human
gggaaucagaacuc

SEQ ID NO: 3742171 - RNA, 21 nt, Human
gggaauccaagccuccacagc

SEQ ID NO: 3742172 - RNA, 22 nt, Human
gggaauccaagccuccacagcg

SEQ ID NO: 3742173 - RNA, 21 nt, Human
gggaaucuaauauccccaaau

SEQ ID NO: 3742174 - RNA, 14 nt, Human
gggaaugaaccugg

SEQ ID NO: 3742175 - RNA, 16 nt, Human
gggaaugaaccuggag

SEQ ID NO: 3742176 - RNA, 24 nt, Human
gggaaugaagcuuguguauccauu

SEQ ID NO: 3742177 - RNA, 16 nt, Human
gggaaugagcccagag

SEQ ID NO: 3742178 - RNA, 21 nt, Human
gggaaugaggcuugcugagag

SEQ ID NO: 3742179 - RNA, 11 nt, Human
gggaaugugaa

SEQ ID NO: 3742180 - RNA, 14 nt, Human
gggaauugaggaca

SEQ ID NO: 3742181 - RNA, 14 nt, Human
gggaauugugugau

SEQ ID NO: 3742182 - RNA, 18 nt, Human
gggacaaaacccaccuug

SEQ ID NO: 3742183 - RNA, 16 nt, Human
gggacaaaggagccug

SEQ ID NO: 3742184 - RNA, 18 nt, Human
gggacaaaggagccugug

SEQ ID NO: 3742185 - RNA, 22 nt, Human
gggacaaauuuaaaacaaacaa

SEQ ID NO: 3742186 - RNA, 19 nt, Human
gggacacaaaacuccgccc

SEQ ID NO: 3742187 - RNA, 20 nt, Human
gggacacaaaacuccgcccc

SEQ ID NO: 3742188 - RNA, 23 nt, Human
gggacacaaaacuccgcccccag

SEQ ID NO: 3742189 - RNA, 23 nt, Human
gggacacauucaacccuggagag

SEQ ID NO: 3742190 - RNA, 19 nt, Human
gggacaccagccaggcucu

SEQ ID NO: 3742191 - RNA, 20 nt, Human
gggacaccagccaggcucug

SEQ ID NO: 3742192 - RNA, 14 nt, Human
gggacacccagaaa

SEQ ID NO: 3742193 - RNA, 16 nt, Human
gggacaccugcccugc

SEQ ID NO: 3742194 - RNA, 20 nt, Human
gggacagagacaccugcacc

SEQ ID NO: 3742195 - RNA, 13 nt, Human
gggacagagcaga

SEQ ID NO: 3742196 - RNA, 19 nt, Human
gggacagaggccccagccu

SEQ ID NO: 3742197 - RNA, 21 nt, Human
gggacagaggccccagccucc

SEQ ID NO: 3742198 - RNA, 15 nt, Human
gggacagaggccugc

SEQ ID NO: 3742199 - RNA, 15 nt, Human
gggacagagucuggg

SEQ ID NO: 3742200 - RNA, 17 nt, Human
gggacagaucauagauu

SEQ ID NO: 3742201 - RNA, 21 nt, Human
gggacagcccagagccuggcu

SEQ ID NO: 3742202 - RNA, 15 nt, Human
gggacagcuccuucu

SEQ ID NO: 3742203 - RNA, 21 nt, Human
gggacagcuccuucuguccua

SEQ ID NO: 3742204 - RNA, 23 nt, Human
gggacagggaggugugaggcagg

SEQ ID NO: 3742205 - RNA, 20 nt, Human
gggacagggcuggcccagcc

SEQ ID NO: 3742206 - RNA, 22 nt, Human
gggacagggcuggcccagcccu

SEQ ID NO: 3742207 - RNA, 17 nt, Human
gggacagugcugcagcu

SEQ ID NO: 3742208 - RNA, 21 nt, Human
gggacaguuuaucaugaagcc

SEQ ID NO: 3742209 - RNA, 22 nt, Human
gggacaguuuaucaugaagccu

SEQ ID NO: 3742210 - RNA, 18 nt, Human
gggacaucacaggguggg

SEQ ID NO: 3742211 - RNA, 22 nt, Human
gggacaucacagggugggccuc

SEQ ID NO: 3742212 - RNA, 15 nt, Human
gggacaucucuuuga

SEQ ID NO: 3742213 - RNA, 22 nt, Human
gggacaugaaauaaaugcccca

SEQ ID NO: 3742214 - RNA, 22 nt, Human
gggacaugggucgcccaugaga

SEQ ID NO: 3742215 - RNA, 15 nt, Human
gggacauugggaagg

SEQ ID NO: 3742216 - RNA, 16 nt, Human
gggaccaacugggccc

SEQ ID NO: 3742217 - RNA, 13 nt, Human
gggaccaaggacc

SEQ ID NO: 3742218 - RNA, 23 nt, Human
gggaccaaggcaaggcaggugcc

SEQ ID NO: 3742219 - RNA, 23 nt, Human
gggaccacagcaaggcaccugca

SEQ ID NO: 3742220 - RNA, 12 nt, Human
gggaccagcuug

SEQ ID NO: 3742221 - RNA, 18 nt, Human
gggaccaggagugggugg

SEQ ID NO: 3742222 - RNA, 13 nt, Human
gggaccauguguc

SEQ ID NO: 3742223 - RNA, 13 nt, Human
gggacccaggcuc

SEQ ID NO: 3742224 - RNA, 17 nt, Human
gggacccaggcuccgcc

SEQ ID NO: 3742225 - RNA, 17 nt, Human
gggacccaguggcaggg

SEQ ID NO: 3742226 - RNA, 20 nt, Human
gggacccauagaucuucuga

SEQ ID NO: 3742227 - RNA, 11 nt, Human
gggacccccag

SEQ ID NO: 3742228 - RNA, 13 nt, Human
gggacccccagga

SEQ ID NO: 3742229 - RNA, 13 nt, Human
gggacccccgccc

SEQ ID NO: 3742230 - RNA, 21 nt, Human
gggacccccgcccccugcccu

SEQ ID NO: 3742231 - RNA, 23 nt, Human
gggacccccguggggcagggagc

SEQ ID NO: 3742232 - RNA, 18 nt, Human
gggaccccgagccuggcu

SEQ ID NO: 3742233 - RNA, 23 nt, Human
gggaccccgagccuggcuccaaa

SEQ ID NO: 3742234 - RNA, 13 nt, Human
gggaccccuccuc

SEQ ID NO: 3742235 - RNA, 13 nt, Human
gggacccugcuuu

SEQ ID NO: 3742236 - RNA, 23 nt, Human
gggaccgccagauggggccucug

SEQ ID NO: 3742237 - RNA, 18 nt, Human
gggaccgguacagaaagg

SEQ ID NO: 3742238 - RNA, 19 nt, Human
gggaccuagggaggcaugg

SEQ ID NO: 3742239 - RNA, 17 nt, Human
gggaccuauaacugccc

SEQ ID NO: 3742240 - RNA, 15 nt, Human
gggaccucaggccug

SEQ ID NO: 3742241 - RNA, 18 nt, Human
gggaccugccaggcaggg

SEQ ID NO: 3742242 - RNA, 13 nt, Human
gggaccuggaagg

SEQ ID NO: 3742243 - RNA, 15 nt, Human
gggaccuuuaguggu

SEQ ID NO: 3742244 - RNA, 13 nt, Human
gggaccuuuuggg

SEQ ID NO: 3742245 - RNA, 20 nt, Human
gggacgcuccgcugccgugc

SEQ ID NO: 3742246 - RNA, 22 nt, Human
gggacguucgugguccugcgcu

SEQ ID NO: 3742247 - RNA, 14 nt, Human
gggacguuucucau

SEQ ID NO: 3742248 - RNA, 17 nt, Human
gggacuaaaugcccugc

SEQ ID NO: 3742249 - RNA, 15 nt, Human
gggacuagccccugu

SEQ ID NO: 3742250 - RNA, 16 nt, Human
gggacucacuggcagc

SEQ ID NO: 3742251 - RNA, 21 nt, Human
gggacucacuggcagccccag

SEQ ID NO: 3742252 - RNA, 23 nt, Human
gggacucacuggcagccccagca

SEQ ID NO: 3742253 - RNA, 12 nt, Human
gggacucagccc

SEQ ID NO: 3742254 - RNA, 17 nt, Human
gggacucagcccugagg

SEQ ID NO: 3742255 - RNA, 20 nt, Human
gggacuccggcugugcuggg

SEQ ID NO: 3742256 - RNA, 15 nt, Human
gggacugagaaauuu

SEQ ID NO: 3742257 - RNA, 18 nt, Human
gggacugccaccuccccu

SEQ ID NO: 3742258 - RNA, 22 nt, Human
gggacugccaccuccccuugcc

SEQ ID NO: 3742259 - RNA, 15 nt, Human
gggacugccucugcc

SEQ ID NO: 3742260 - RNA, 16 nt, Human
gggacugccucugcca

SEQ ID NO: 3742261 - RNA, 17 nt, Human
gggacugcggaggaagg

SEQ ID NO: 3742262 - RNA, 17 nt, Human
gggacugcugcugccug

SEQ ID NO: 3742263 - RNA, 13 nt, Human
gggacugggaggg

SEQ ID NO: 3742264 - RNA, 17 nt, Human
gggacugggagggccca

SEQ ID NO: 3742265 - RNA, 20 nt, Human
gggacuggguuuggacccca

SEQ ID NO: 3742266 - RNA, 13 nt, Human
gggacuguacaca

SEQ ID NO: 3742267 - RNA, 20 nt, Human
gggacuuccuugcucucccu

SEQ ID NO: 3742268 - RNA, 17 nt, Human
gggacuuggaagcuccg

SEQ ID NO: 3742269 - RNA, 15 nt, Human
gggacuugugucugc

SEQ ID NO: 3742270 - RNA, 15 nt, Human
gggagaaaagacaug

SEQ ID NO: 3742271 - RNA, 22 nt, Human
gggagaaaaggaaaagaaaaaa

SEQ ID NO: 3742272 - RNA, 14 nt, Human
gggagaaaaucauc

SEQ ID NO: 3742273 - RNA, 20 nt, Human
gggagaaaaucaucaagaag

SEQ ID NO: 3742274 - RNA, 15 nt, Human
gggagaaaauucaau

SEQ ID NO: 3742275 - RNA, 19 nt, Human
gggagaaauacuugaacuu

SEQ ID NO: 3742276 - RNA, 23 nt, Human
gggagaaauagucggugaagaaa

SEQ ID NO: 3742277 - RNA, 12 nt, Human
gggagaagcucc

SEQ ID NO: 3742278 - RNA, 16 nt, Human
gggagaagggggucaa

SEQ ID NO: 3742279 - RNA, 19 nt, Human
gggagaaugucaguaugug

SEQ ID NO: 3742280 - RNA, 14 nt, Human
gggagacacuggcc

SEQ ID NO: 3742281 - RNA, 21 nt, Human
gggagaccggccugccaggag

SEQ ID NO: 3742282 - RNA, 13 nt, Human
gggagaccuggac

SEQ ID NO: 3742283 - RNA, 20 nt, Human
gggagacgguuuccagggag

SEQ ID NO: 3742284 - RNA, 14 nt, Human
gggagacugggcug

SEQ ID NO: 3742285 - RNA, 16 nt, Human
gggagacugggcugag

SEQ ID NO: 3742286 - RNA, 20 nt, Human
gggagacugggcugagggag

SEQ ID NO: 3742287 - RNA, 22 nt, Human
gggagagaccucaucaggauga

SEQ ID NO: 3742288 - RNA, 23 nt, Human
gggagagagagagagagaggaca

SEQ ID NO: 3742289 - RNA, 13 nt, Human
gggagagcaggcu

SEQ ID NO: 3742290 - RNA, 15 nt, Human
gggagagcaggcugg

SEQ ID NO: 3742291 - RNA, 12 nt, Human
gggagagcccag

SEQ ID NO: 3742292 - RNA, 17 nt, Human
gggagagcccaggagcu

SEQ ID NO: 3742293 - RNA, 15 nt, Human
gggagagccccuggg

SEQ ID NO: 3742294 - RNA, 22 nt, Human
gggagaggccaugauucgccca

SEQ ID NO: 3742295 - RNA, 16 nt, Human
gggagaggugccagca

SEQ ID NO: 3742296 - RNA, 15 nt, Human
gggagcacccugagg

SEQ ID NO: 3742297 - RNA, 11 nt, Human
gggagcacugg

SEQ ID NO: 3742298 - RNA, 14 nt, Human
gggagcacuggagu

SEQ ID NO: 3742299 - RNA, 16 nt, Human
gggagcacuggagugc

SEQ ID NO: 3742300 - RNA, 15 nt, Human
gggagcagggaaggc

SEQ ID NO: 3742301 - RNA, 20 nt, Human
gggagcagugucuuccauaa

SEQ ID NO: 3742302 - RNA, 13 nt, Human
ggucugucuuuua

SEQ ID NO: 3742303 - RNA, 14 nt, Human
ggucugucuuuuaa

SEQ ID NO: 3742304 - RNA, 13 nt, Human
ggucugugucucu

SEQ ID NO: 3742305 - RNA, 17 nt, Human
ggucugugugaaugugg

SEQ ID NO: 3742306 - RNA, 11 nt, Human
ggucugugugu

SEQ ID NO: 3742307 - RNA, 22 nt, Human
ggucugugugugugugugugcg

SEQ ID NO: 3742308 - RNA, 18 nt, Human
ggucuguucuugaagcag

SEQ ID NO: 3742309 - RNA, 19 nt, Human
ggucuguucuuuccaaagu

SEQ ID NO: 3742310 - RNA, 23 nt, Human
ggucuuaagaaauguauaaacuu

SEQ ID NO: 3742311 - RNA, 13 nt, Human
ggucuuauauuua

SEQ ID NO: 3742312 - RNA, 14 nt, Human
ggucuucagccauc

SEQ ID NO: 3742313 - RNA, 19 nt, Human
ggucuucagggggccaggu

SEQ ID NO: 3742314 - RNA, 17 nt, Human
ggucuucccaggcuggg

SEQ ID NO: 3742315 - RNA, 20 nt, Human
ggucuucccuaccucaggca

SEQ ID NO: 3742316 - RNA, 22 nt, Human
ggucuucccuaccucaggcagg

SEQ ID NO: 3742317 - RNA, 22 nt, Human
ggucuugaacuccuggccucaa

SEQ ID NO: 3742318 - RNA, 13 nt, Human
ggucuugaagucc

SEQ ID NO: 3742319 - RNA, 13 nt, Human
ggucuugaucucc

SEQ ID NO: 3742320 - RNA, 19 nt, Human
ggucuugcaaaauuccuga

SEQ ID NO: 3742321 - RNA, 21 nt, Human
ggucuuucauggggugaugcu

SEQ ID NO: 3742322 - RNA, 12 nt, Human
ggucuuuguaag

SEQ ID NO: 3742323 - RNA, 14 nt, Human
ggucuuuguaagaa

SEQ ID NO: 3742324 - RNA, 15 nt, Human
ggucuuuguaagaac

SEQ ID NO: 3742325 - RNA, 14 nt, Human
ggucuuuguaucuu

SEQ ID NO: 3742326 - RNA, 21 nt, Human
ggucuuuugacauguggaaag

SEQ ID NO: 3742327 - RNA, 19 nt, Human
ggugaaacauuuucucccu

SEQ ID NO: 3742328 - RNA, 17 nt, Human
ggugaaagaaaucaugu

SEQ ID NO: 3742329 - RNA, 19 nt, Human
ggugaacaaagcagccacg

SEQ ID NO: 3742330 - RNA, 22 nt, Human
ggugaacauugcaauagaaauc

SEQ ID NO: 3742331 - RNA, 18 nt, Human
ggugaaccacuucauucu

SEQ ID NO: 3742332 - RNA, 16 nt, Human
ggugaacuugguuccc

SEQ ID NO: 3742333 - RNA, 22 nt, Human
ggugaagaggaggggaagaggc

SEQ ID NO: 3742334 - RNA, 17 nt, Human
ggugaagcuauuuaucu

SEQ ID NO: 3742335 - RNA, 18 nt, Human
ggugaaggaggcuccagg

SEQ ID NO: 3742336 - RNA, 22 nt, Human
ggugaaggaggcuccaggcagc

SEQ ID NO: 3742337 - RNA, 16 nt, Human
ggugaagggagagcca

SEQ ID NO: 3742338 - RNA, 14 nt, Human
ggugaauggcuuug

SEQ ID NO: 3742339 - RNA, 21 nt, Human
ggugacaaagauggcucagag

SEQ ID NO: 3742340 - RNA, 17 nt, Human
ggugacaagauagagag

SEQ ID NO: 3742341 - RNA, 18 nt, Human
ggugacaagauagagagc

SEQ ID NO: 3742342 - RNA, 12 nt, Human
ggugacacagac

SEQ ID NO: 3742343 - RNA, 16 nt, Human
ggugacaccagccuuu

SEQ ID NO: 3742344 - RNA, 18 nt, Human
ggugacagucaucaucag

SEQ ID NO: 3742345 - RNA, 14 nt, Human
ggugacaugugaaa

SEQ ID NO: 3742346 - RNA, 15 nt, Human
ggugacaugugaaac

SEQ ID NO: 3742347 - RNA, 15 nt, Human
ggugaccccagggca

SEQ ID NO: 3742348 - RNA, 21 nt, Human
ggugaccccuuuucagcuucu

SEQ ID NO: 3742349 - RNA, 23 nt, Human
ggugacccggcacccccugcagc

SEQ ID NO: 3742350 - RNA, 12 nt, Human
ggugacggcccu

SEQ ID NO: 3742351 - RNA, 21 nt, Human
ggugacgggacucaggcggga

SEQ ID NO: 3742352 - RNA, 22 nt, Human
ggugacugguuaucacaccauc

SEQ ID NO: 3742353 - RNA, 14 nt, Human
ggugacuuuggaua

SEQ ID NO: 3742354 - RNA, 18 nt, Human
ggugacuuuggauaauaa

SEQ ID NO: 3742355 - RNA, 20 nt, Human
ggugacuuuggauaauaagg

SEQ ID NO: 3742356 - RNA, 12 nt, Human
ggugagaaaaaa

SEQ ID NO: 3742357 - RNA, 13 nt, Human
ggugagaaauuua

SEQ ID NO: 3742358 - RNA, 21 nt, Human
ggugagaaccuggguugcaga

SEQ ID NO: 3742359 - RNA, 12 nt, Human
ggugagaacucu

SEQ ID NO: 3742360 - RNA, 17 nt, Human
ggugaggaagcuccagu

SEQ ID NO: 3742361 - RNA, 13 nt, Human
ggugagggaugug

SEQ ID NO: 3742362 - RNA, 17 nt, Human
ggugaggggcuggcacu

SEQ ID NO: 3742363 - RNA, 16 nt, Human
ggugaggguuggcgcu

SEQ ID NO: 3742364 - RNA, 17 nt, Human
ggugaguccuccagaac

SEQ ID NO: 3742365 - RNA, 23 nt, Human
ggugaguggggagacaccucaga

SEQ ID NO: 3742366 - RNA, 14 nt, Human
ggugauaagggaaa

SEQ ID NO: 3742367 - RNA, 15 nt, Human
ggugauaagggaaaa

SEQ ID NO: 3742368 - RNA, 22 nt, Human
ggugauagguauaaguggugug

SEQ ID NO: 3742369 - RNA, 19 nt, Human
ggugaucaauuaaauguag

SEQ ID NO: 3742370 - RNA, 23 nt, Human
ggugauccacccaccucagccuc

SEQ ID NO: 3742371 - RNA, 20 nt, Human
ggugauccauguaacugccu

SEQ ID NO: 3742372 - RNA, 13 nt, Human
ggugaugagggca

SEQ ID NO: 3742373 - RNA, 18 nt, Human
ggugauuuaagggcccag

SEQ ID NO: 3742374 - RNA, 20 nt, Human
ggugauuuagcaggaagcug

SEQ ID NO: 3742375 - RNA, 17 nt, Human
ggugcaaaguauuguaa

SEQ ID NO: 3742376 - RNA, 18 nt, Human
ggugcaaaguucccuacu

SEQ ID NO: 3742377 - RNA, 22 nt, Human
ggugcacaagcuccaagcuccc

SEQ ID NO: 3742378 - RNA, 20 nt, Human
ggugcacagacgucccucca

SEQ ID NO: 3742379 - RNA, 14 nt, Human
ggugcacaggaggg

SEQ ID NO: 3742380 - RNA, 23 nt, Human
ggugcacuuggggcacagggaga

SEQ ID NO: 3742381 - RNA, 19 nt, Human
ggugcagagguacccuggg

SEQ ID NO: 3742382 - RNA, 22 nt, Human
ggugcagagguacccugggugu

SEQ ID NO: 3742383 - RNA, 16 nt, Human
ggugcagagugcccag

SEQ ID NO: 3742384 - RNA, 13 nt, Human
ggugcagccagag

SEQ ID NO: 3742385 - RNA, 12 nt, Human
ggugcaggcagg

SEQ ID NO: 3742386 - RNA, 16 nt, Human
ggugcagggauguggg

SEQ ID NO: 3742387 - RNA, 16 nt, Human
ggugcagugugaaaag

SEQ ID NO: 3742388 - RNA, 18 nt, Human
ggugcaguugacagcagg

SEQ ID NO: 3742389 - RNA, 22 nt, Human
ggugcauacacccccaccuccu

SEQ ID NO: 3742390 - RNA, 15 nt, Human
ggugcauagaacugg

SEQ ID NO: 3742391 - RNA, 18 nt, Human
ggugcauagaacugggua

SEQ ID NO: 3742392 - RNA, 21 nt, Human
ggugcauauuuauaaaaauaa

SEQ ID NO: 3742393 - RNA, 17 nt, Human
ggugcaugaucuugagc

SEQ ID NO: 3742394 - RNA, 19 nt, Human
ggugcauuacagagaggag

SEQ ID NO: 3742395 - RNA, 23 nt, Human
ggugccaauuucaaguuccaagu

SEQ ID NO: 3742396 - RNA, 12 nt, Human
ggugccagaagc

SEQ ID NO: 3742397 - RNA, 13 nt, Human
ggugccagcaaag

SEQ ID NO: 3742398 - RNA, 14 nt, Human
ggugccagccuucc

SEQ ID NO: 3742399 - RNA, 16 nt, Human
ggugccaucagugccc

SEQ ID NO: 3742400 - RNA, 18 nt, Human
ggugccaugucugcagug

SEQ ID NO: 3742401 - RNA, 23 nt, Human
ggugcccacagugucaggcacug

SEQ ID NO: 3742402 - RNA, 12 nt, Human
ggugcccaggag

SEQ ID NO: 3742403 - RNA, 13 nt, Human
ggugccccaggac

SEQ ID NO: 3742404 - RNA, 14 nt, Human
ggugccccaggacc

SEQ ID NO: 3742405 - RNA, 16 nt, Human
ggugccccaggaccag

SEQ ID NO: 3742406 - RNA, 20 nt, Human
ggugccccaggaccagcuca

SEQ ID NO: 3742407 - RNA, 23 nt, Human
ggugccccaggaccagcucagga

SEQ ID NO: 3742408 - RNA, 12 nt, Human
ggugcccccucc

SEQ ID NO: 3742409 - RNA, 17 nt, Human
ggugcccccuccucucc

SEQ ID NO: 3742410 - RNA, 22 nt, Human
ggugcccccuccucucccaucc

SEQ ID NO: 3742411 - RNA, 16 nt, Human
ggugcccuccacugcc

SEQ ID NO: 3742412 - RNA, 18 nt, Human
ggugcccuggaugcccag

SEQ ID NO: 3742413 - RNA, 19 nt, Human
ggugcccuggaugcccagg

SEQ ID NO: 3742414 - RNA, 18 nt, Human
ggugcccuuggaggccag

SEQ ID NO: 3742415 - RNA, 16 nt, Human
ggugccuaggccuggg

SEQ ID NO: 3742416 - RNA, 14 nt, Human
ggugccugaggucu

SEQ ID NO: 3742417 - RNA, 18 nt, Human
ggugccugauucggcugu

SEQ ID NO: 3742418 - RNA, 23 nt, Human
ggugccuggguggggcugcuccu

SEQ ID NO: 3742419 - RNA, 17 nt, Human
ggugccugucccacccc

SEQ ID NO: 3742420 - RNA, 21 nt, Human
ggugccugugaggcaggggcg

SEQ ID NO: 3742421 - RNA, 23 nt, Human
ggugccuucuuauucucacucca

SEQ ID NO: 3742422 - RNA, 20 nt, Human
ggugccuucuucagggccug

SEQ ID NO: 3742423 - RNA, 18 nt, Human
ggugccuuucaaauuuag

SEQ ID NO: 3742424 - RNA, 19 nt, Human
ggugccuuucaaauuuaga

SEQ ID NO: 3742425 - RNA, 22 nt, Human
ggugcggcugugcagccugucc

SEQ ID NO: 3742426 - RNA, 19 nt, Human
ggugcgucugggagguugg

SEQ ID NO: 3742427 - RNA, 21 nt, Human
ggugcuacuggggaaacuggc

SEQ ID NO: 3742428 - RNA, 17 nt, Human
ggugcuauaggcuggag

SEQ ID NO: 3742429 - RNA, 22 nt, Human
ggugcuaucucccccagcccca

SEQ ID NO: 3742430 - RNA, 19 nt, Human
ggugcucacaccccauugg

SEQ ID NO: 3742431 - RNA, 14 nt, Human
ggugcucagggggc

SEQ ID NO: 3742432 - RNA, 16 nt, Human
ggugcucucugccacu

SEQ ID NO: 3742433 - RNA, 17 nt, Human
ggugcugacggccaggg

SEQ ID NO: 3742434 - RNA, 13 nt, Human
ggugcugagaagc

SEQ ID NO: 3742435 - RNA, 18 nt, Human
ggugcugaguguacagag

SEQ ID NO: 3742436 - RNA, 21 nt, Human
ggugcugcagcaccgaggggc

SEQ ID NO: 3742437 - RNA, 16 nt, Human
ggugcugcuacccucc

SEQ ID NO: 3742438 - RNA, 19 nt, Human
ggugcugcuacccucccug

SEQ ID NO: 3742439 - RNA, 20 nt, Human
ggugcugcuacccucccugc

SEQ ID NO: 3742440 - RNA, 21 nt, Human
ggugcugcuucccucugccug

SEQ ID NO: 3742441 - RNA, 12 nt, Human
ggugcugggacu

SEQ ID NO: 3742442 - RNA, 18 nt, Human
ggugcugggagaggcagc

SEQ ID NO: 3742443 - RNA, 16 nt, Human
ggugcugggccccugc

SEQ ID NO: 3742444 - RNA, 15 nt, Human
ggugcuguccucagg

SEQ ID NO: 3742445 - RNA, 23 nt, Human
ggugcuguccucagguggccaug

SEQ ID NO: 3742446 - RNA, 22 nt, Human
ggugcuguugucauugcuuuac

SEQ ID NO: 3742447 - RNA, 21 nt, Human
ggugcuucuaguucugccagg

SEQ ID NO: 3742448 - RNA, 19 nt, Human
ggugcuuuuauagaggcua

SEQ ID NO: 3742449 - RNA, 19 nt, Human
gguggaaggcccgaggggc

SEQ ID NO: 3742450 - RNA, 13 nt, Human
gguggacacacaa

SEQ ID NO: 3742451 - RNA, 16 nt, Human
gaagggccaguccugc

SEQ ID NO: 3742452 - RNA, 19 nt, Human
gaagggccagucugggcug

SEQ ID NO: 3742453 - RNA, 20 nt, Human
gaagggcuagaaccuggaga

SEQ ID NO: 3742454 - RNA, 14 nt, Human
gaagggcugcauga

SEQ ID NO: 3742455 - RNA, 18 nt, Human
gaagggcugcaugauguu

SEQ ID NO: 3742456 - RNA, 22 nt, Human
gaagggcugcuucccugaagcu

SEQ ID NO: 3742457 - RNA, 16 nt, Human
gaaggggacccccgcc

SEQ ID NO: 3742458 - RNA, 21 nt, Human
gaaggggacccccgcccccug

SEQ ID NO: 3742459 - RNA, 18 nt, Human
gaaggggacugccaccuc

SEQ ID NO: 3742460 - RNA, 17 nt, Human
gaaggggaggagggcgg

SEQ ID NO: 3742461 - RNA, 23 nt, Human
gaaggggaggcagccggcaccca

SEQ ID NO: 3742462 - RNA, 14 nt, Human
gaaggggccagagg

SEQ ID NO: 3742463 - RNA, 16 nt, Human
gaaggggccagaggcu

SEQ ID NO: 3742464 - RNA, 22 nt, Human
gaaggggccucaccgagugggg

SEQ ID NO: 3742465 - RNA, 21 nt, Human
gaaggggcgucuguucccccu

SEQ ID NO: 3742466 - RNA, 19 nt, Human
gaaggggcuggacuggcug

SEQ ID NO: 3742467 - RNA, 14 nt, Human
gaagggggccauga

SEQ ID NO: 3742468 - RNA, 19 nt, Human
gaagggggggcuacauuau

SEQ ID NO: 3742469 - RNA, 20 nt, Human
gaagggggggcuacauuaua

SEQ ID NO: 3742470 - RNA, 17 nt, Human
gaaggggguccacccag

SEQ ID NO: 3742471 - RNA, 12 nt, Human
gaaggggguggu

SEQ ID NO: 3742472 - RNA, 22 nt, Human
gaagggguaggauuacuaggug

SEQ ID NO: 3742473 - RNA, 14 nt, Human
gaagggguuccuca

SEQ ID NO: 3742474 - RNA, 14 nt, Human
gaagggguuuucuu

SEQ ID NO: 3742475 - RNA, 17 nt, Human
gaagggugguggagcca

SEQ ID NO: 3742476 - RNA, 14 nt, Human
gaaggguuucucua

SEQ ID NO: 3742477 - RNA, 20 nt, Human
gaaggguuuuccacccugga

SEQ ID NO: 3742478 - RNA, 13 nt, Human
gaagguaaaauug

SEQ ID NO: 3742479 - RNA, 13 nt, Human
gaagguaaauaaa

SEQ ID NO: 3742480 - RNA, 20 nt, Human
gaagguauaucuagguuuau

SEQ ID NO: 3742481 - RNA, 14 nt, Human
gaaggucggaggcu

SEQ ID NO: 3742482 - RNA, 19 nt, Human
gaaggucuguuuuguguac

SEQ ID NO: 3742483 - RNA, 13 nt, Human
gaaggucuugauu

SEQ ID NO: 3742484 - RNA, 17 nt, Human
gaaggucuugauuuguu

SEQ ID NO: 3742485 - RNA, 19 nt, Human
gaaggugauaagggaaaag

SEQ ID NO: 3742486 - RNA, 22 nt, Human
gaaggugccccaaaaugcaaga

SEQ ID NO: 3742487 - RNA, 18 nt, Human
gaaggugcugacggccag

SEQ ID NO: 3742488 - RNA, 12 nt, Human
gaaggugcugga

SEQ ID NO: 3742489 - RNA, 20 nt, Human
gaaggugcuggaggugggag

SEQ ID NO: 3742490 - RNA, 22 nt, Human
gaagguggauggccccagcaca

SEQ ID NO: 3742491 - RNA, 14 nt, Human
gaaggugggaggau

SEQ ID NO: 3742492 - RNA, 20 nt, Human
gaagguuaggauuuaacagu

SEQ ID NO: 3742493 - RNA, 16 nt, Human
gaagguucugguguga

SEQ ID NO: 3742494 - RNA, 20 nt, Human
gaagguucuggugugaacua

SEQ ID NO: 3742495 - RNA, 20 nt, Human
gaagguuuacucuguggcca

SEQ ID NO: 3742496 - RNA, 13 nt, Human
gaagguuuauugu

SEQ ID NO: 3742497 - RNA, 22 nt, Human
gaagguuuguguuuucucugga

SEQ ID NO: 3742498 - RNA, 20 nt, Human
gaagguuuguguuuuucugc

SEQ ID NO: 3742499 - RNA, 17 nt, Human
gaaguaaaauguggcag

SEQ ID NO: 3742500 - RNA, 18 nt, Human
gaaguaaaauguggcagg

SEQ ID NO: 3742501 - RNA, 14 nt, Human
gaaguaacaguaac

SEQ ID NO: 3742502 - RNA, 19 nt, Human
gaaguaacuggugauauau

SEQ ID NO: 3742503 - RNA, 17 nt, Human
gaaguaacuugucuuaa

SEQ ID NO: 3742504 - RNA, 16 nt, Human
gaaguaagccucauca

SEQ ID NO: 3742505 - RNA, 20 nt, Human
gaaguaauaugcacacauuu

SEQ ID NO: 3742506 - RNA, 16 nt, Human
gaaguaccuuaucaaa

SEQ ID NO: 3742507 - RNA, 18 nt, Human
gaaguacuauaauuuacc

SEQ ID NO: 3742508 - RNA, 15 nt, Human
gaaguacuggagaaa

SEQ ID NO: 3742509 - RNA, 12 nt, Human
gaaguagcacag

SEQ ID NO: 3742510 - RNA, 21 nt, Human
gaaguaggggaagaauaauuu

SEQ ID NO: 3742511 - RNA, 13 nt, Human
gaaguaguuauca

SEQ ID NO: 3742512 - RNA, 19 nt, Human
gaaguaguuaucauguuag

SEQ ID NO: 3742513 - RNA, 23 nt, Human
gaaguauuauaaauuauguuuau

SEQ ID NO: 3742514 - RNA, 17 nt, Human
gaaguauuuuuagaaua

SEQ ID NO: 3742515 - RNA, 15 nt, Human
gaagucaaacauuuc

SEQ ID NO: 3742516 - RNA, 18 nt, Human
gaagucaaggcuuagacc

SEQ ID NO: 3742517 - RNA, 15 nt, Human
gaagucacagggcag

SEQ ID NO: 3742518 - RNA, 21 nt, Human
gaagucacauuccugaacagg

SEQ ID NO: 3742519 - RNA, 15 nt, Human
gaagucacugcacag

SEQ ID NO: 3742520 - RNA, 18 nt, Human
gaagucaucuugcuacca

SEQ ID NO: 3742521 - RNA, 19 nt, Human
gaagucaugaagcccaagu

SEQ ID NO: 3742522 - RNA, 23 nt, Human
gaaguccaagcauuuagauguau

SEQ ID NO: 3742523 - RNA, 17 nt, Human
gaaguccaauguggcaa

SEQ ID NO: 3742524 - RNA, 18 nt, Human
gaaguccuguaugucugu

SEQ ID NO: 3742525 - RNA, 19 nt, Human
gaagucucaucuggggagc

SEQ ID NO: 3742526 - RNA, 24 nt, Human
gaagucucaucuggggagcaggca

SEQ ID NO: 3742527 - RNA, 16 nt, Human
gaagucucugaaguga

SEQ ID NO: 3742528 - RNA, 17 nt, Human
gaagucuuaaggacaaa

SEQ ID NO: 3742529 - RNA, 17 nt, Human
gaagucuucaugaaaug

SEQ ID NO: 3742530 - RNA, 19 nt, Human
gaagucuuuguacagacaa

SEQ ID NO: 3742531 - RNA, 14 nt, Human
gaagucuuuuguuc

SEQ ID NO: 3742532 - RNA, 14 nt, Human
gaagugaacauuuc

SEQ ID NO: 3742533 - RNA, 17 nt, Human
gaagugaauaacugcaa

SEQ ID NO: 3742534 - RNA, 23 nt, Human
gaagugacaaggccccagagacu

SEQ ID NO: 3742535 - RNA, 14 nt, Human
gaagugacagggaa

SEQ ID NO: 3742536 - RNA, 15 nt, Human
gaagugacagggaag

SEQ ID NO: 3742537 - RNA, 20 nt, Human
gaagugacagggaagcuaca

SEQ ID NO: 3742538 - RNA, 12 nt, Human
gaagugagaccu

SEQ ID NO: 3742539 - RNA, 18 nt, Human
gaagugcagaacugcagu

SEQ ID NO: 3742540 - RNA, 14 nt, Human
gaagugcauccaaa

SEQ ID NO: 3742541 - RNA, 16 nt, Human
gaagugcaucuacuug

SEQ ID NO: 3742542 - RNA, 13 nt, Human
gaagugccccugc

SEQ ID NO: 3742543 - RNA, 14 nt, Human
gaagugccccugcu

SEQ ID NO: 3742544 - RNA, 22 nt, Human
gaagugccccugcugccucccc

SEQ ID NO: 3742545 - RNA, 21 nt, Human
gaagugcugccgcgcagugug

SEQ ID NO: 3742546 - RNA, 20 nt, Human
gaagugcuguuuauuaaucu

SEQ ID NO: 3742547 - RNA, 18 nt, Human
gaaguggaccaggacagg

SEQ ID NO: 3742548 - RNA, 16 nt, Human
gaagugggccaggaca

SEQ ID NO: 3742549 - RNA, 15 nt, Human
gaaguggggacagag

SEQ ID NO: 3742550 - RNA, 14 nt, Human
gaaguggggagagg

SEQ ID NO: 3742551 - RNA, 15 nt, Human
gaaguguauuuauuu

SEQ ID NO: 3742552 - RNA, 15 nt, Human
gaagugugacuggcu

SEQ ID NO: 3742553 - RNA, 11 nt, Human
gaagugugauu

SEQ ID NO: 3742554 - RNA, 17 nt, Human
gaaguguuaauacuagu

SEQ ID NO: 3742555 - RNA, 18 nt, Human
gaaguguugaagggaggu

SEQ ID NO: 3742556 - RNA, 21 nt, Human
gaaguguugcauggauguuuu

SEQ ID NO: 3742557 - RNA, 22 nt, Human
gaaguguuucacgagagcccgg

SEQ ID NO: 3742558 - RNA, 12 nt, Human
gaaguuaaaggg

SEQ ID NO: 3742559 - RNA, 14 nt, Human
gaaguuacugaaug

SEQ ID NO: 3742560 - RNA, 16 nt, Human
gaaguuacugaaugca

SEQ ID NO: 3742561 - RNA, 16 nt, Human
gaaguuacuuuauguu

SEQ ID NO: 3742562 - RNA, 15 nt, Human
gaaguuacuuucuua

SEQ ID NO: 3742563 - RNA, 21 nt, Human
gaaguuagaauuccuucaggg

SEQ ID NO: 3742564 - RNA, 19 nt, Human
gaaguuagcuuuaacuuaa

SEQ ID NO: 3742565 - RNA, 15 nt, Human
gaaguuaguggaaau

SEQ ID NO: 3742566 - RNA, 21 nt, Human
gaaguuauauuuccuauacca

SEQ ID NO: 3742567 - RNA, 13 nt, Human
gaaguuaugggaa

SEQ ID NO: 3742568 - RNA, 15 nt, Human
gaaguuauuuuccag

SEQ ID NO: 3742569 - RNA, 21 nt, Human
gaaguuauuuucuacaguggu

SEQ ID NO: 3742570 - RNA, 15 nt, Human
gaaguucaccauuaa

SEQ ID NO: 3742571 - RNA, 19 nt, Human
gaaguucaccauuaaaagg

SEQ ID NO: 3742572 - RNA, 20 nt, Human
gaaguucaccauuaaaaggg

SEQ ID NO: 3742573 - RNA, 22 nt, Human
gaaguucaccauuaaaagggau

SEQ ID NO: 3742574 - RNA, 20 nt, Human
gaaguucauaccuaaguacu

SEQ ID NO: 3742575 - RNA, 15 nt, Human
gaaguucuaguguuu

SEQ ID NO: 3742576 - RNA, 18 nt, Human
gaaguucugccucugaug

SEQ ID NO: 3742577 - RNA, 21 nt, Human
gaaguugacucugcucuugca

SEQ ID NO: 3742578 - RNA, 16 nt, Human
gaaguugaucucccca

SEQ ID NO: 3742579 - RNA, 16 nt, Human
gaaguuggacagcaaa

SEQ ID NO: 3742580 - RNA, 22 nt, Human
gaaguugggcaauauaaccaau

SEQ ID NO: 3742581 - RNA, 17 nt, Human
gaaguugugugacccua

SEQ ID NO: 3742582 - RNA, 14 nt, Human
gaaguuuaaaacag

SEQ ID NO: 3742583 - RNA, 19 nt, Human
gaaguuuaaaacaguauuu

SEQ ID NO: 3742584 - RNA, 14 nt, Human
gaaguuuaaauauu

SEQ ID NO: 3742585 - RNA, 13 nt, Human
gaaguuuacauuu

SEQ ID NO: 3742586 - RNA, 14 nt, Human
gaaguuuacauuuu

SEQ ID NO: 3742587 - RNA, 17 nt, Human
gaaguuuauucucauuu

SEQ ID NO: 3742588 - RNA, 15 nt, Human
gaaguuucaaguuuu

SEQ ID NO: 3742589 - RNA, 22 nt, Human
gaaguuucaaguuuuaaaguuc

SEQ ID NO: 3742590 - RNA, 11 nt, Human
gaaguuucauc

SEQ ID NO: 3742591 - RNA, 13 nt, Human
gaaguuucauuua

SEQ ID NO: 3742592 - RNA, 21 nt, Human
gaaguuuccuuggcuggugca

SEQ ID NO: 3742593 - RNA, 12 nt, Human
gaaguuucugcc

SEQ ID NO: 3742594 - RNA, 12 nt, Human
gaaguuugaaug

SEQ ID NO: 3742595 - RNA, 16 nt, Human
gaaguuugaauguuaa

SEQ ID NO: 3742596 - RNA, 20 nt, Human
gaaguuugagaucagccugg

SEQ ID NO: 3742597 - RNA, 20 nt, Human
gaaguuuguccauuuguaaa

SEQ ID NO: 3742598 - RNA, 11 nt, Human
gaaguuuucaa

SEQ ID NO: 3742599 - RNA, 23 nt, Human
gaaguuuucaggacuuggucuga

SEQ ID NO: 3742600 - RNA, 15 nt, Human
gaauaaaauguugaa

SEQ ID NO: 3742601 - RNA, 14 nt, Human
gggagccaagggau

SEQ ID NO: 3742602 - RNA, 15 nt, Human
gggagccaagggaug

SEQ ID NO: 3742603 - RNA, 19 nt, Human
gggagccaugcgcccccuc

SEQ ID NO: 3742604 - RNA, 10 nt, Human
gggagcccac

SEQ ID NO: 3742605 - RNA, 19 nt, Human
gggagcccacuguccuggg

SEQ ID NO: 3742606 - RNA, 13 nt, Human
gggagcccccagc

SEQ ID NO: 3742607 - RNA, 15 nt, Human
gggagcccccagccu

SEQ ID NO: 3742608 - RNA, 12 nt, Human
gggagcccccgc

SEQ ID NO: 3742609 - RNA, 16 nt, Human
gggagcccccgccccg

SEQ ID NO: 3742610 - RNA, 22 nt, Human
gggagcccccgccccgccccac

SEQ ID NO: 3742611 - RNA, 16 nt, Human
gggagccgggccgcag

SEQ ID NO: 3742612 - RNA, 13 nt, Human
gggagccuccugc

SEQ ID NO: 3742613 - RNA, 17 nt, Human
gggagcgugggaggcgg

SEQ ID NO: 3742614 - RNA, 18 nt, Human
gggagcuagccagaggac

SEQ ID NO: 3742615 - RNA, 12 nt, Human
gggagcucagga

SEQ ID NO: 3742616 - RNA, 22 nt, Human
gggagcucaggaaccgaggcag

SEQ ID NO: 3742617 - RNA, 16 nt, Human
gggagcugcaggggca

SEQ ID NO: 3742618 - RNA, 11 nt, Human
gggagcuggag

SEQ ID NO: 3742619 - RNA, 15 nt, Human
gggagcugggccugg

SEQ ID NO: 3742620 - RNA, 17 nt, Human
gggagcugggccugguc

SEQ ID NO: 3742621 - RNA, 18 nt, Human
gggagcugggccuggucu

SEQ ID NO: 3742622 - RNA, 16 nt, Human
gggaggaaagagagca

SEQ ID NO: 3742623 - RNA, 15 nt, Human
gggaggaagcagaau

SEQ ID NO: 3742624 - RNA, 19 nt, Human
gggaggaaucgaggaacca

SEQ ID NO: 3742625 - RNA, 20 nt, Human
gggaggaccacaggugugag

SEQ ID NO: 3742626 - RNA, 15 nt, Human
gggaggaccucuggg

SEQ ID NO: 3742627 - RNA, 14 nt, Human
gggaggagaaugag

SEQ ID NO: 3742628 - RNA, 17 nt, Human
gggaggaggccaccucu

SEQ ID NO: 3742629 - RNA, 17 nt, Human
gggaggagggagaggga

SEQ ID NO: 3742630 - RNA, 16 nt, Human
gggaggagggcaggca

SEQ ID NO: 3742631 - RNA, 20 nt, Human
gggaggagguggcagcccug

SEQ ID NO: 3742632 - RNA, 22 nt, Human
gggaggaucacuggagcccagg

SEQ ID NO: 3742633 - RNA, 18 nt, Human
gggaggcaagaggggugg

SEQ ID NO: 3742634 - RNA, 18 nt, Human
gggaggcaaguguggggg

SEQ ID NO: 3742635 - RNA, 20 nt, Human
gggaggcagagguugcagug

SEQ ID NO: 3742636 - RNA, 12 nt, Human
gggaggcagccu

SEQ ID NO: 3742637 - RNA, 23 nt, Human
gggaggccaagaguggccccacc

SEQ ID NO: 3742638 - RNA, 16 nt, Human
gggaggccccacuggg

SEQ ID NO: 3742639 - RNA, 15 nt, Human
gggaggccccuucuc

SEQ ID NO: 3742640 - RNA, 17 nt, Human
gggaggccuaggcgggc

SEQ ID NO: 3742641 - RNA, 14 nt, Human
gggaggcgcgagcc

SEQ ID NO: 3742642 - RNA, 15 nt, Human
gggaggcucaggucc

SEQ ID NO: 3742643 - RNA, 22 nt, Human
gggaggcucuggagcccacugu

SEQ ID NO: 3742644 - RNA, 10 nt, Human
gggaggcuga

SEQ ID NO: 3742645 - RNA, 13 nt, Human
gggaggcugacuc

SEQ ID NO: 3742646 - RNA, 20 nt, Human
gggaggcugacuccuggucc

SEQ ID NO: 3742647 - RNA, 13 nt, Human
gggaggcuucccc

SEQ ID NO: 3742648 - RNA, 20 nt, Human
gggagggaaaagggaaguag

SEQ ID NO: 3742649 - RNA, 15 nt, Human
gggagggaagggagc

SEQ ID NO: 3742650 - RNA, 13 nt, Human
gggagggauggcc

SEQ ID NO: 3742651 - RNA, 11 nt, Human
gggagggauua

SEQ ID NO: 3742652 - RNA, 18 nt, Human
gggagggcagagcuggug

SEQ ID NO: 3742653 - RNA, 11 nt, Human
gggagggcagc

SEQ ID NO: 3742654 - RNA, 13 nt, Human
gggagggccuggg

SEQ ID NO: 3742655 - RNA, 14 nt, Human
gggagggcuccaga

SEQ ID NO: 3742656 - RNA, 15 nt, Human
gggagggcucugagg

SEQ ID NO: 3742657 - RNA, 16 nt, Human
gggagggcucugaggc

SEQ ID NO: 3742658 - RNA, 10 nt, Human
gggaggggcg

SEQ ID NO: 3742659 - RNA, 21 nt, Human
gggaggggcgcuggcccagcc

SEQ ID NO: 3742660 - RNA, 16 nt, Human
gggagggggagaaaag

SEQ ID NO: 3742661 - RNA, 15 nt, Human
gggagggggauccga

SEQ ID NO: 3742662 - RNA, 15 nt, Human
gggaggguaccagca

SEQ ID NO: 3742663 - RNA, 17 nt, Human
gggaggucaggcccugg

SEQ ID NO: 3742664 - RNA, 16 nt, Human
gggaggugaccccagg

SEQ ID NO: 3742665 - RNA, 18 nt, Human
gggaggugagaccaccuc

SEQ ID NO: 3742666 - RNA, 20 nt, Human
gggagguggagguugcauug

SEQ ID NO: 3742667 - RNA, 17 nt, Human
gggaggugggauccucc

SEQ ID NO: 3742668 - RNA, 20 nt, Human
gggagguguuuaaagagagg

SEQ ID NO: 3742669 - RNA, 22 nt, Human
gggagguguuuaaagagagguu

SEQ ID NO: 3742670 - RNA, 19 nt, Human
gggagguuuucucccccag

SEQ ID NO: 3742671 - RNA, 16 nt, Human
gggaguaugcaaaagu

SEQ ID NO: 3742672 - RNA, 16 nt, Human
gggagucaccuucccu

SEQ ID NO: 3742673 - RNA, 16 nt, Human
gggaguccaggcacag

SEQ ID NO: 3742674 - RNA, 18 nt, Human
gggagugacagaggcagc

SEQ ID NO: 3742675 - RNA, 11 nt, Human
gggagugagcu

SEQ ID NO: 3742676 - RNA, 23 nt, Human
gggagugcuggcucacaguacag

SEQ ID NO: 3742677 - RNA, 17 nt, Human
gggaguggaguggaaga

SEQ ID NO: 3742678 - RNA, 17 nt, Human
gggaguggccacagaaa

SEQ ID NO: 3742679 - RNA, 18 nt, Human
gggagugggacagagucu

SEQ ID NO: 3742680 - RNA, 19 nt, Human
gggaguggggaagugaucu

SEQ ID NO: 3742681 - RNA, 11 nt, Human
gggagugggug

SEQ ID NO: 3742682 - RNA, 21 nt, Human
gggagugugguuucuuuuuga

SEQ ID NO: 3742683 - RNA, 13 nt, Human
gggagugugugcc

SEQ ID NO: 3742684 - RNA, 12 nt, Human
gggaguguuccc

SEQ ID NO: 3742685 - RNA, 16 nt, Human
gggaguuaagaccugg

SEQ ID NO: 3742686 - RNA, 20 nt, Human
gggaguuaagaccuggcagc

SEQ ID NO: 3742687 - RNA, 22 nt, Human
gggaguugucaagucucugcug

SEQ ID NO: 3742688 - RNA, 20 nt, Human
gggauaacccuacacccaga

SEQ ID NO: 3742689 - RNA, 13 nt, Human
gggauacaugcuc

SEQ ID NO: 3742690 - RNA, 13 nt, Human
gggauacugcagg

SEQ ID NO: 3742691 - RNA, 13 nt, Human
gggauagagagag

SEQ ID NO: 3742692 - RNA, 15 nt, Human
gggauaggggcagag

SEQ ID NO: 3742693 - RNA, 19 nt, Human
gggauagucaccuuuuaaa

SEQ ID NO: 3742694 - RNA, 23 nt, Human
gggaucaaaguucugcuuucucc

SEQ ID NO: 3742695 - RNA, 13 nt, Human
gggaucacagaga

SEQ ID NO: 3742696 - RNA, 14 nt, Human
gggaucacagggcc

SEQ ID NO: 3742697 - RNA, 15 nt, Human
gggcugcccgcuccc

SEQ ID NO: 3742698 - RNA, 13 nt, Human
gggcugcccugcc

SEQ ID NO: 3742699 - RNA, 13 nt, Human
gggcugcccuggu

SEQ ID NO: 3742700 - RNA, 15 nt, Human
gggcugcccuggugc

SEQ ID NO: 3742701 - RNA, 14 nt, Human
gggcugccugggcu

SEQ ID NO: 3742702 - RNA, 15 nt, Human
gggcugccugggcug

SEQ ID NO: 3742703 - RNA, 19 nt, Human
gggcugccugggcuguugg

SEQ ID NO: 3742704 - RNA, 21 nt, Human
gggcugccugggcuguuggca

SEQ ID NO: 3742705 - RNA, 20 nt, Human
gggcugcggcguacaggcug

SEQ ID NO: 3742706 - RNA, 22 nt, Human
gggcugcggcguacaggcuggc

SEQ ID NO: 3742707 - RNA, 23 nt, Human
gggcugcucccaccuggcucugu

SEQ ID NO: 3742708 - RNA, 14 nt, Human
gggcugcuccucau

SEQ ID NO: 3742709 - RNA, 19 nt, Human
gggcugcuccuccagggcc

SEQ ID NO: 3742710 - RNA, 11 nt, Human
gggcuggaaca

SEQ ID NO: 3742711 - RNA, 21 nt, Human
gggcuggaaucuggagagcua

SEQ ID NO: 3742712 - RNA, 14 nt, Human
gggcuggacugagg

SEQ ID NO: 3742713 - RNA, 16 nt, Human
gggcuggacuggcugu

SEQ ID NO: 3742714 - RNA, 18 nt, Human
gggcuggacuucuaccug

SEQ ID NO: 3742715 - RNA, 11 nt, Human
gggcuggagaa

SEQ ID NO: 3742716 - RNA, 13 nt, Human
gggcuggaggagc

SEQ ID NO: 3742717 - RNA, 19 nt, Human
gggcuggaggcccaggcug

SEQ ID NO: 3742718 - RNA, 15 nt, Human
gggcuggaugagcuc

SEQ ID NO: 3742719 - RNA, 18 nt, Human
gggcuggaugagcuccca

SEQ ID NO: 3742720 - RNA, 17 nt, Human
gggcuggcccagcccug

SEQ ID NO: 3742721 - RNA, 22 nt, Human
gggcuggccccagggcacccug

SEQ ID NO: 3742722 - RNA, 15 nt, Human
gggcuggccuaggag

SEQ ID NO: 3742723 - RNA, 11 nt, Human
gggcuggcugg

SEQ ID NO: 3742724 - RNA, 17 nt, Human
gggcuggcuucaggagg

SEQ ID NO: 3742725 - RNA, 17 nt, Human
gggcugggcacugcucu

SEQ ID NO: 3742726 - RNA, 12 nt, Human
gggcugggcaga

SEQ ID NO: 3742727 - RNA, 15 nt, Human
gggcugggcagagga

SEQ ID NO: 3742728 - RNA, 12 nt, Human
gggcuggggagg

SEQ ID NO: 3742729 - RNA, 22 nt, Human
gggcuggggcaggaggggagug

SEQ ID NO: 3742730 - RNA, 21 nt, Human
gggcugggggaugggccugag

SEQ ID NO: 3742731 - RNA, 19 nt, Human
gggcuggguuggcgcaccc

SEQ ID NO: 3742732 - RNA, 17 nt, Human
gggcugguagcucaggu

SEQ ID NO: 3742733 - RNA, 15 nt, Human
gggcuggugccagcc

SEQ ID NO: 3742734 - RNA, 16 nt, Human
gggcuggugccagccu

SEQ ID NO: 3742735 - RNA, 17 nt, Human
gggcuggugccagccuu

SEQ ID NO: 3742736 - RNA, 19 nt, Human
gggcuggugggugccuagg

SEQ ID NO: 3742737 - RNA, 23 nt, Human
gggcugguucuguaauugugugu

SEQ ID NO: 3742738 - RNA, 17 nt, Human
gggcuguaacugccagg

SEQ ID NO: 3742739 - RNA, 19 nt, Human
gggcuguaacugccaggcu

SEQ ID NO: 3742740 - RNA, 11 nt, Human
gggcugugcua

SEQ ID NO: 3742741 - RNA, 20 nt, Human
gggcuuaauggaguucuugu

SEQ ID NO: 3742742 - RNA, 14 nt, Human
gggcuuagagcagu

SEQ ID NO: 3742743 - RNA, 24 nt, Human
gggcuuagagcaguuucuguccug

SEQ ID NO: 3742744 - RNA, 20 nt, Human
gggcuuauaauaaaggacug

SEQ ID NO: 3742745 - RNA, 14 nt, Human
gggcuuauaucugg

SEQ ID NO: 3742746 - RNA, 17 nt, Human
gggcuucagcugccagu

SEQ ID NO: 3742747 - RNA, 16 nt, Human
gggcuucaguggcagc

SEQ ID NO: 3742748 - RNA, 19 nt, Human
gggcuucaguggcagcugc

SEQ ID NO: 3742749 - RNA, 13 nt, Human
gggcuucauacac

SEQ ID NO: 3742750 - RNA, 22 nt, Human
gggcuucccaguggcugcugcc

SEQ ID NO: 3742751 - RNA, 19 nt, Human
gggcuuccucuagaagcca

SEQ ID NO: 3742752 - RNA, 12 nt, Human
gggcuuccugga

SEQ ID NO: 3742753 - RNA, 14 nt, Human
gggcuuccuggagc

SEQ ID NO: 3742754 - RNA, 21 nt, Human
gggcuuccuggagcagaagca

SEQ ID NO: 3742755 - RNA, 16 nt, Human
gggcuucuccugaccc

SEQ ID NO: 3742756 - RNA, 23 nt, Human
gggcuucugcacccuccacccug

SEQ ID NO: 3742757 - RNA, 19 nt, Human
gggcuucugugcaccuggg

SEQ ID NO: 3742758 - RNA, 13 nt, Human
gggcuugacuuuu

SEQ ID NO: 3742759 - RNA, 16 nt, Human
gggcuugacuuuugua

SEQ ID NO: 3742760 - RNA, 16 nt, Human
gggcuuggccugcugu

SEQ ID NO: 3742761 - RNA, 11 nt, Human
gggcuugggcc

SEQ ID NO: 3742762 - RNA, 15 nt, Human
gggcuugggccuagg

SEQ ID NO: 3742763 - RNA, 17 nt, Human
gggcuuguaguucuuua

SEQ ID NO: 3742764 - RNA, 13 nt, Human
gggcuugugaaca

SEQ ID NO: 3742765 - RNA, 22 nt, Human
gggcuuugauguuccuuccagu

SEQ ID NO: 3742766 - RNA, 20 nt, Human
gggcuuugauuccaucuccu

SEQ ID NO: 3742767 - RNA, 14 nt, Human
ggggaaaaaaaugu

SEQ ID NO: 3742768 - RNA, 24 nt, Human
ggggaaaaucagccugcuccagcu

SEQ ID NO: 3742769 - RNA, 17 nt, Human
ggggaaacagguuggga

SEQ ID NO: 3742770 - RNA, 18 nt, Human
ggggaacucagauccagg

SEQ ID NO: 3742771 - RNA, 21 nt, Human
ggggaacucagauccagggac

SEQ ID NO: 3742772 - RNA, 13 nt, Human
ggggaacuccugg

SEQ ID NO: 3742773 - RNA, 13 nt, Human
ggggaacuggcca

SEQ ID NO: 3742774 - RNA, 21 nt, Human
ggggaacuggccaagcugagg

SEQ ID NO: 3742775 - RNA, 16 nt, Human
ggggaagacaguggcc

SEQ ID NO: 3742776 - RNA, 17 nt, Human
ggggaagacaguggccc

SEQ ID NO: 3742777 - RNA, 21 nt, Human
ggggaagacccauuccuuccc

SEQ ID NO: 3742778 - RNA, 22 nt, Human
ggggaagacccauuccuuccca

SEQ ID NO: 3742779 - RNA, 18 nt, Human
ggggaagagcacagcccu

SEQ ID NO: 3742780 - RNA, 19 nt, Human
ggggaagcugcagcuuggg

SEQ ID NO: 3742781 - RNA, 21 nt, Human
ggggaauauuuuauucaaggu

SEQ ID NO: 3742782 - RNA, 21 nt, Human
ggggaaugagcccagagaaca

SEQ ID NO: 3742783 - RNA, 20 nt, Human
ggggaaugagggggcucagu

SEQ ID NO: 3742784 - RNA, 18 nt, Human
ggggaauguuugccucug

SEQ ID NO: 3742785 - RNA, 20 nt, Human
ggggaauucucagugccaac

SEQ ID NO: 3742786 - RNA, 22 nt, Human
ggggacagaggccugcccgggc

SEQ ID NO: 3742787 - RNA, 13 nt, Human
ggggacagcugug

SEQ ID NO: 3742788 - RNA, 12 nt, Human
ggggacaggccu

SEQ ID NO: 3742789 - RNA, 19 nt, Human
ggggacagggcuggcccag

SEQ ID NO: 3742790 - RNA, 12 nt, Human
ggggaccagagc

SEQ ID NO: 3742791 - RNA, 13 nt, Human
ggggaccagagcu

SEQ ID NO: 3742792 - RNA, 14 nt, Human
ggggaccagcagcc

SEQ ID NO: 3742793 - RNA, 12 nt, Human
ggggaccaggag

SEQ ID NO: 3742794 - RNA, 13 nt, Human
ggggaccaggagu

SEQ ID NO: 3742795 - RNA, 13 nt, Human
guaaauguaaacu

SEQ ID NO: 3742796 - RNA, 15 nt, Human
guaaauguaguucau

SEQ ID NO: 3742797 - RNA, 14 nt, Human
guaaaugucuuugu

SEQ ID NO: 3742798 - RNA, 15 nt, Human
guaaaugucuuugua

SEQ ID NO: 3742799 - RNA, 16 nt, Human
guaaauguuaguuucu

SEQ ID NO: 3742800 - RNA, 15 nt, Human
guaaauguuauuucu

SEQ ID NO: 3742801 - RNA, 17 nt, Human
guaaauguuuagguuuu

SEQ ID NO: 3742802 - RNA, 14 nt, Human
guaaauguuucuuu

SEQ ID NO: 3742803 - RNA, 21 nt, Human
guaaauguuuguuaaaaauaa

SEQ ID NO: 3742804 - RNA, 15 nt, Human
guaaauuaacuuuua

SEQ ID NO: 3742805 - RNA, 16 nt, Human
guaaauuaacuuuuau

SEQ ID NO: 3742806 - RNA, 17 nt, Human
guaaauuaacuuuuaua

SEQ ID NO: 3742807 - RNA, 21 nt, Human
guaaauuaacuuuuauaaacu

SEQ ID NO: 3742808 - RNA, 23 nt, Human
guaaauuaacuuuuauaaacuuu

SEQ ID NO: 3742809 - RNA, 19 nt, Human
guaaauuauauuugugcua

SEQ ID NO: 3742810 - RNA, 22 nt, Human
guaaauuauuaauuuaugcaga

SEQ ID NO: 3742811 - RNA, 15 nt, Human
guaaauuauucaguu

SEQ ID NO: 3742812 - RNA, 14 nt, Human
guaaauuauuuuaa

SEQ ID NO: 3742813 - RNA, 22 nt, Human
guaaauuauuuuaaauuauaag

SEQ ID NO: 3742814 - RNA, 12 nt, Human
guaaauucugau

SEQ ID NO: 3742815 - RNA, 14 nt, Human
guaaauucugauuu

SEQ ID NO: 3742816 - RNA, 15 nt, Human
guaaauucugauuuc

SEQ ID NO: 3742817 - RNA, 22 nt, Human
guaaauuggcauggaaauuuaa

SEQ ID NO: 3742818 - RNA, 19 nt, Human
guaaauuuccccaacagug

SEQ ID NO: 3742819 - RNA, 13 nt, Human
guaaauuuguacu

SEQ ID NO: 3742820 - RNA, 15 nt, Human
guaaauuuguacuau

SEQ ID NO: 3742821 - RNA, 12 nt, Human
guaacaagaaaa

SEQ ID NO: 3742822 - RNA, 14 nt, Human
guaacaagaaaaca

SEQ ID NO: 3742823 - RNA, 14 nt, Human
guaacaagaaagga

SEQ ID NO: 3742824 - RNA, 14 nt, Human
guaacaagccagau

SEQ ID NO: 3742825 - RNA, 15 nt, Human
guaacaagccagauu

SEQ ID NO: 3742826 - RNA, 19 nt, Human
guaacaauacaaauggauu

SEQ ID NO: 3742827 - RNA, 19 nt, Human
guaacaauuuuaaugcuau

SEQ ID NO: 3742828 - RNA, 22 nt, Human
guaacacagcugagagacuuuu

SEQ ID NO: 3742829 - RNA, 14 nt, Human
guaacacaggccac

SEQ ID NO: 3742830 - RNA, 17 nt, Human
guaacacuuuacaaugu

SEQ ID NO: 3742831 - RNA, 12 nt, Human
guaacagaaagg

SEQ ID NO: 3742832 - RNA, 16 nt, Human
guaacagaaagggcaa

SEQ ID NO: 3742833 - RNA, 21 nt, Human
guaacagaaagggcaacaaua

SEQ ID NO: 3742834 - RNA, 15 nt, Human
guaacagaacagcuu

SEQ ID NO: 3742835 - RNA, 21 nt, Human
guaacagaacagcuucagguu

SEQ ID NO: 3742836 - RNA, 16 nt, Human
guaacagacauuguuu

SEQ ID NO: 3742837 - RNA, 12 nt, Human
guaacagcuccu

SEQ ID NO: 3742838 - RNA, 17 nt, Human
guaacagcuccuuggga

SEQ ID NO: 3742839 - RNA, 19 nt, Human
guaacaggaaaauuuuaaa

SEQ ID NO: 3742840 - RNA, 17 nt, Human
guaacaguucauguuug

SEQ ID NO: 3742841 - RNA, 18 nt, Human
guaacaguucauguuugc

SEQ ID NO: 3742842 - RNA, 20 nt, Human
guaacaguucauguuugcuu

SEQ ID NO: 3742843 - RNA, 22 nt, Human
guaacaguucauguuugcuuca

SEQ ID NO: 3742844 - RNA, 14 nt, Human
guaacauaauaaau

SEQ ID NO: 3742845 - RNA, 14 nt, Human
guaacauaugcaaa

SEQ ID NO: 3742846 - RNA, 15 nt, Human
guaacauaugcaaac

SEQ ID NO: 3742847 - RNA, 19 nt, Human
guaacauaugcaaacauaa

SEQ ID NO: 3742848 - RNA, 20 nt, Human
guaacaucacuauccaugca

SEQ ID NO: 3742849 - RNA, 22 nt, Human
guaacauguuuacuuuucaggg

SEQ ID NO: 3742850 - RNA, 22 nt, Human
guaacauuugcuguuuuaaaca

SEQ ID NO: 3742851 - RNA, 12 nt, Human
guaaccagccag

SEQ ID NO: 3742852 - RNA, 21 nt, Human
guaacccuggugguugcuguu

SEQ ID NO: 3742853 - RNA, 17 nt, Human
guaaccucagcucuggg

SEQ ID NO: 3742854 - RNA, 20 nt, Human
guaaccucuucagaggcccu

SEQ ID NO: 3742855 - RNA, 20 nt, Human
guaaccugagauggcccucu

SEQ ID NO: 3742856 - RNA, 21 nt, Human
guaaccugagauggcccucug

SEQ ID NO: 3742857 - RNA, 16 nt, Human
guaacgcgucuuccug

SEQ ID NO: 3742858 - RNA, 17 nt, Human
guaacgcgucuuccuga

SEQ ID NO: 3742859 - RNA, 15 nt, Human
guaacuaaaauaauu

SEQ ID NO: 3742860 - RNA, 20 nt, Human
guaacuaaaauaauuuugua

SEQ ID NO: 3742861 - RNA, 22 nt, Human
guaacuaaaauaauuuuguaau

SEQ ID NO: 3742862 - RNA, 16 nt, Human
guaacuaacuaaaaca

SEQ ID NO: 3742863 - RNA, 15 nt, Human
guaacucaucuguca

SEQ ID NO: 3742864 - RNA, 22 nt, Human
guaacugcauugagaacugcau

SEQ ID NO: 3742865 - RNA, 15 nt, Human
guaacugcugaaaac

SEQ ID NO: 3742866 - RNA, 15 nt, Human
guaacugcuuucugu

SEQ ID NO: 3742867 - RNA, 17 nt, Human
guaacugcuuucuguuc

SEQ ID NO: 3742868 - RNA, 20 nt, Human
guaacugcuuucuguuccaa

SEQ ID NO: 3742869 - RNA, 14 nt, Human
guaacuggcugugu

SEQ ID NO: 3742870 - RNA, 17 nt, Human
guaacuguccuguccug

SEQ ID NO: 3742871 - RNA, 21 nt, Human
guaacuguccuguccugcuca

SEQ ID NO: 3742872 - RNA, 22 nt, Human
guaacuguuaaauugcugugua

SEQ ID NO: 3742873 - RNA, 17 nt, Human
guaacuguuaccauugg

SEQ ID NO: 3742874 - RNA, 21 nt, Human
guaacuguuaccauuggaaau

SEQ ID NO: 3742875 - RNA, 22 nt, Human
guaacuguuuagaugaauguca

SEQ ID NO: 3742876 - RNA, 14 nt, Human
guaacuuaaaauag

SEQ ID NO: 3742877 - RNA, 23 nt, Human
guaacuuauauugaagacaauuu

SEQ ID NO: 3742878 - RNA, 21 nt, Human
guaacuucuuauggaauugau

SEQ ID NO: 3742879 - RNA, 16 nt, Human
guaacuuuauguguaa

SEQ ID NO: 3742880 - RNA, 19 nt, Human
guaacuuuuguaaauacac

SEQ ID NO: 3742881 - RNA, 13 nt, Human
guaagaaaauauu

SEQ ID NO: 3742882 - RNA, 23 nt, Human
guaagaaaauauuuugucuaaaa

SEQ ID NO: 3742883 - RNA, 18 nt, Human
guaagaacaacuaccuga

SEQ ID NO: 3742884 - RNA, 16 nt, Human
guaagaacuaaagaag

SEQ ID NO: 3742885 - RNA, 13 nt, Human
guaagaagagacu

SEQ ID NO: 3742886 - RNA, 15 nt, Human
guaagaagagacugg

SEQ ID NO: 3742887 - RNA, 11 nt, Human
guaagaagccg

SEQ ID NO: 3742888 - RNA, 13 nt, Human
guaagaaggcaau

SEQ ID NO: 3742889 - RNA, 13 nt, Human
guaagaaucauug

SEQ ID NO: 3742890 - RNA, 13 nt, Human
guaagaauucuga

SEQ ID NO: 3742891 - RNA, 21 nt, Human
guaagaccggaagcuccuggu

SEQ ID NO: 3742892 - RNA, 19 nt, Human
guaagagaaaagagagaaa

SEQ ID NO: 3742893 - RNA, 17 nt, Human
guaagagcaccuuccuc

SEQ ID NO: 3742894 - RNA, 14 nt, Human
guaagagcuggugu

SEQ ID NO: 3742895 - RNA, 16 nt, Human
guaagagcuggugucu

SEQ ID NO: 3742896 - RNA, 17 nt, Human
guaagagcuuuacaaaa

SEQ ID NO: 3742897 - RNA, 20 nt, Human
guaagaucacuguuuagauu

SEQ ID NO: 3742898 - RNA, 17 nt, Human
guaagaucucuuucuaa

SEQ ID NO: 3742899 - RNA, 14 nt, Human
guaagaugucuguu

SEQ ID NO: 3742900 - RNA, 18 nt, Human
guaagauuauagauucua

SEQ ID NO: 3742901 - RNA, 20 nt, Human
guaagauuauagauucuaaa

SEQ ID NO: 3742902 - RNA, 21 nt, Human
guaagauuauagauucuaaag

SEQ ID NO: 3742903 - RNA, 22 nt, Human
guaagauuauagauucuaaaga

SEQ ID NO: 3742904 - RNA, 23 nt, Human
guaagauuauagauucuaaagau

SEQ ID NO: 3742905 - RNA, 21 nt, Human
guaagauuguuauuaaaugua

SEQ ID NO: 3742906 - RNA, 18 nt, Human
guaagauuuccuucuuuu

SEQ ID NO: 3742907 - RNA, 17 nt, Human
guaagauuuguuuuuaa

SEQ ID NO: 3742908 - RNA, 21 nt, Human
guaagauuuguuuuuaaacug

SEQ ID NO: 3742909 - RNA, 13 nt, Human
guaagauuuugaa

SEQ ID NO: 3742910 - RNA, 20 nt, Human
guaagcacugacugggacca

SEQ ID NO: 3742911 - RNA, 17 nt, Human
guaagcacuguuuuucc

SEQ ID NO: 3742912 - RNA, 20 nt, Human
guaagcaggagagaaauuuc

SEQ ID NO: 3742913 - RNA, 23 nt, Human
guaagcauaagcuuaugcuuaaa

SEQ ID NO: 3742914 - RNA, 17 nt, Human
guaagccaaagaaauga

SEQ ID NO: 3742915 - RNA, 13 nt, Human
guaagccucauca

SEQ ID NO: 3742916 - RNA, 16 nt, Human
guaagcggcucaagcc

SEQ ID NO: 3742917 - RNA, 14 nt, Human
guaagcguauggcu

SEQ ID NO: 3742918 - RNA, 17 nt, Human
guaagcucuggcuuucu

SEQ ID NO: 3742919 - RNA, 11 nt, Human
guaagcucuuu

SEQ ID NO: 3742920 - RNA, 20 nt, Human
guaagcucuuugaaacaacu

SEQ ID NO: 3742921 - RNA, 20 nt, Human
guaaggaauaccuguccccc

SEQ ID NO: 3742922 - RNA, 13 nt, Human
guaaggaaugauu

SEQ ID NO: 3742923 - RNA, 20 nt, Human
guaaggcuguguacacugac

SEQ ID NO: 3742924 - RNA, 16 nt, Human
guaaggugcaguuccc

SEQ ID NO: 3742925 - RNA, 12 nt, Human
guaaggugccuu

SEQ ID NO: 3742926 - RNA, 17 nt, Human
guaaguaaaugucugug

SEQ ID NO: 3742927 - RNA, 23 nt, Human
guaaguaauuaucgggaacagug

SEQ ID NO: 3742928 - RNA, 15 nt, Human
guaaguaauuaugca

SEQ ID NO: 3742929 - RNA, 19 nt, Human
guaaguacagagaagccau

SEQ ID NO: 3742930 - RNA, 19 nt, Human
guaagucaguguugagaug

SEQ ID NO: 3742931 - RNA, 12 nt, Human
guaagucuuuuu

SEQ ID NO: 3742932 - RNA, 16 nt, Human
guaagugcuacauaaa

SEQ ID NO: 3742933 - RNA, 18 nt, Human
guaaguuaauaagcaaaa

SEQ ID NO: 3742934 - RNA, 21 nt, Human
guaaguuccuacuaggcaaaa

SEQ ID NO: 3742935 - RNA, 23 nt, Human
guaaguugaauggccugccuuga

SEQ ID NO: 3742936 - RNA, 17 nt, Human
guaaguugggcuugcua

SEQ ID NO: 3742937 - RNA, 18 nt, Human
guaaguugggcuugcuau

SEQ ID NO: 3742938 - RNA, 19 nt, Human
guaaguuuaugucuaaaga

SEQ ID NO: 3742939 - RNA, 22 nt, Human
guaaguuucaggugacauguga

SEQ ID NO: 3742940 - RNA, 12 nt, Human
guaauaaacuau

SEQ ID NO: 3742941 - RNA, 14 nt, Human
guaauaaacuauuu

SEQ ID NO: 3742942 - RNA, 15 nt, Human
guaauaaagacucua

SEQ ID NO: 3742943 - RNA, 15 nt, Human
guaauaaaguauaua

SEQ ID NO: 3742944 - RNA, 17 nt, Human
guaauaaaguguuuuca

SEQ ID NO: 3742945 - RNA, 13 nt, Human
gaauguaaucaau

SEQ ID NO: 3742946 - RNA, 16 nt, Human
gaauguaaucaauguu

SEQ ID NO: 3742947 - RNA, 13 nt, Human
gaauguaauuugu

SEQ ID NO: 3742948 - RNA, 21 nt, Human
gaauguagcagccccgggagg

SEQ ID NO: 3742949 - RNA, 23 nt, Human
gaauguagcagccccgggagggc

SEQ ID NO: 3742950 - RNA, 22 nt, Human
gaauguauaguauuugaaaaca

SEQ ID NO: 3742951 - RNA, 21 nt, Human
gaauguauauguuuuguggga

SEQ ID NO: 3742952 - RNA, 21 nt, Human
gaauguaugcuucauacaggg

SEQ ID NO: 3742953 - RNA, 23 nt, Human
gaauguauuguaccuuuuaacac

SEQ ID NO: 3742954 - RNA, 14 nt, Human
gaaugucaguguga

SEQ ID NO: 3742955 - RNA, 17 nt, Human
gaaugugauuuuaaaga

SEQ ID NO: 3742956 - RNA, 21 nt, Human
gaaugugcagguuuguuacau

SEQ ID NO: 3742957 - RNA, 13 nt, Human
gaauguggucuca

SEQ ID NO: 3742958 - RNA, 19 nt, Human
gaauguguuucaaacugua

SEQ ID NO: 3742959 - RNA, 19 nt, Human
gaauguuaagaauugacca

SEQ ID NO: 3742960 - RNA, 20 nt, Human
gaauguuaagacuugacagu

SEQ ID NO: 3742961 - RNA, 14 nt, Human
gaauguuaagcaga

SEQ ID NO: 3742962 - RNA, 15 nt, Human
gaauguuaagcagau

SEQ ID NO: 3742963 - RNA, 21 nt, Human
gaauguuccugccuccuugau

SEQ ID NO: 3742964 - RNA, 15 nt, Human
gaauguucugacauu

SEQ ID NO: 3742965 - RNA, 17 nt, Human
gaauguucugacauuaa

SEQ ID NO: 3742966 - RNA, 14 nt, Human
gaauguuggauaag

SEQ ID NO: 3742967 - RNA, 20 nt, Human
gaauguugguuuacuuucaa

SEQ ID NO: 3742968 - RNA, 16 nt, Human
gaauguuuauagcaaa

SEQ ID NO: 3742969 - RNA, 22 nt, Human
gaauguuucauuugcacaagua

SEQ ID NO: 3742970 - RNA, 13 nt, Human
gaauguuuccggg

SEQ ID NO: 3742971 - RNA, 14 nt, Human
gaauguuugucuca

SEQ ID NO: 3742972 - RNA, 20 nt, Human
gaauguuuuagcacagcguu

SEQ ID NO: 3742973 - RNA, 17 nt, Human
gaauguuuucaaauguu

SEQ ID NO: 3742974 - RNA, 15 nt, Human
gaauguuuuccuucu

SEQ ID NO: 3742975 - RNA, 14 nt, Human
gaauuaaaacuucu

SEQ ID NO: 3742976 - RNA, 17 nt, Human
gaauuaaaacuucuuaa

SEQ ID NO: 3742977 - RNA, 19 nt, Human
gaauuaaaaggauaguauu

SEQ ID NO: 3742978 - RNA, 18 nt, Human
gaauuaaaagucauuuaa

SEQ ID NO: 3742979 - RNA, 20 nt, Human
gaauuaaauuaggaauaaau

SEQ ID NO: 3742980 - RNA, 13 nt, Human
gaauuaaauuuaa

SEQ ID NO: 3742981 - RNA, 14 nt, Human
gaauuaacacauga

SEQ ID NO: 3742982 - RNA, 19 nt, Human
gaauuaaccuggugcugga

SEQ ID NO: 3742983 - RNA, 22 nt, Human
gaauuaaccuggugcuggauau

SEQ ID NO: 3742984 - RNA, 13 nt, Human
gaauuaagaauau

SEQ ID NO: 3742985 - RNA, 16 nt, Human
gaauuaagaggauaca

SEQ ID NO: 3742986 - RNA, 18 nt, Human
gaauuaaguuagggaaug

SEQ ID NO: 3742987 - RNA, 21 nt, Human
gaauuaaguuagggaauggca

SEQ ID NO: 3742988 - RNA, 22 nt, Human
gaauuaauaucccuacauguau

SEQ ID NO: 3742989 - RNA, 17 nt, Human
gaauuaauuaauuugga

SEQ ID NO: 3742990 - RNA, 23 nt, Human
gaauuacaauuacuccuuuuauu

SEQ ID NO: 3742991 - RNA, 15 nt, Human
gaauuacauuuguau

SEQ ID NO: 3742992 - RNA, 18 nt, Human
gaauuacauuuguauaaa

SEQ ID NO: 3742993 - RNA, 14 nt, Human
gaauuaccauuugu

SEQ ID NO: 3742994 - RNA, 16 nt, Human
gaauuacuaacuucua

SEQ ID NO: 3742995 - RNA, 18 nt, Human
gaauuacuaacuucuaaa

SEQ ID NO: 3742996 - RNA, 16 nt, Human
gaauuacuuuuuucca

SEQ ID NO: 3742997 - RNA, 15 nt, Human
gaauuaggcuguaac

SEQ ID NO: 3742998 - RNA, 19 nt, Human
gaauuaggcuguaacuacu

SEQ ID NO: 3742999 - RNA, 23 nt, Human
gaauuaggcuguaacuacuuuau

SEQ ID NO: 3743000 - RNA, 16 nt, Human
gaauuauaaaagccag

SEQ ID NO: 3743001 - RNA, 14 nt, Human
gaauuaucuaauuu

SEQ ID NO: 3743002 - RNA, 12 nt, Human
gaauuaugaaac

SEQ ID NO: 3743003 - RNA, 15 nt, Human
gaauuauugacacug

SEQ ID NO: 3743004 - RNA, 14 nt, Human
gaauuauuucuguc

SEQ ID NO: 3743005 - RNA, 13 nt, Human
gaauuauuuuaaa

SEQ ID NO: 3743006 - RNA, 21 nt, Human
gaauucaaacuggggccucca

SEQ ID NO: 3743007 - RNA, 22 nt, Human
gaauucacaaaguaauuuggaa

SEQ ID NO: 3743008 - RNA, 23 nt, Human
gaauucagaagaccccugacuca

SEQ ID NO: 3743009 - RNA, 13 nt, Human
gaauucagacauc

SEQ ID NO: 3743010 - RNA, 16 nt, Human
gaauucauucuggucu

SEQ ID NO: 3743011 - RNA, 14 nt, Human
gaauucccucacuc

SEQ ID NO: 3743012 - RNA, 17 nt, Human
gaauuccuucaggguga

SEQ ID NO: 3743013 - RNA, 17 nt, Human
gaauucggugugcacca

SEQ ID NO: 3743014 - RNA, 23 nt, Human
gaauucuaggcaucccaggggac

SEQ ID NO: 3743015 - RNA, 16 nt, Human
gaauucuagugcugcu

SEQ ID NO: 3743016 - RNA, 17 nt, Human
gaauucuagugcugcug

SEQ ID NO: 3743017 - RNA, 19 nt, Human
gaauucucuaguuugauua

SEQ ID NO: 3743018 - RNA, 14 nt, Human
gaauucuguauaga

SEQ ID NO: 3743019 - RNA, 19 nt, Human
gaauucuguucauuuguua

SEQ ID NO: 3743020 - RNA, 19 nt, Human
gaauucuguuuaauuuuca

SEQ ID NO: 3743021 - RNA, 19 nt, Human
gaauucuuacauguuuucu

SEQ ID NO: 3743022 - RNA, 18 nt, Human
gaauucuugaaggaaaau

SEQ ID NO: 3743023 - RNA, 19 nt, Human
gaauucuugguugaggaaa

SEQ ID NO: 3743024 - RNA, 14 nt, Human
gaauugaaaaguuu

SEQ ID NO: 3743025 - RNA, 17 nt, Human
gaauugaaaaguuuuug

SEQ ID NO: 3743026 - RNA, 14 nt, Human
gaauugaaacacuu

SEQ ID NO: 3743027 - RNA, 20 nt, Human
gaauugaaacacuuuuuugg

SEQ ID NO: 3743028 - RNA, 14 nt, Human
gaauugaagcagga

SEQ ID NO: 3743029 - RNA, 11 nt, Human
gaauugaaggu

SEQ ID NO: 3743030 - RNA, 18 nt, Human
gaauugaagguuuuugau

SEQ ID NO: 3743031 - RNA, 21 nt, Human
gaauugaccgacagcuuucca

SEQ ID NO: 3743032 - RNA, 17 nt, Human
gaauugagaugauuaaa

SEQ ID NO: 3743033 - RNA, 18 nt, Human
gaauugaggggauuaaua

SEQ ID NO: 3743034 - RNA, 15 nt, Human
gaauugaggucugcu

SEQ ID NO: 3743035 - RNA, 20 nt, Human
gaauugaucauuuucccccc

SEQ ID NO: 3743036 - RNA, 21 nt, Human
gaauugaucauuuucccccca

SEQ ID NO: 3743037 - RNA, 13 nt, Human
gaauugauuugca

SEQ ID NO: 3743038 - RNA, 15 nt, Human
gaauugauuugcauu

SEQ ID NO: 3743039 - RNA, 22 nt, Human
gaauugauuugcauugaacaca

SEQ ID NO: 3743040 - RNA, 20 nt, Human
gaauugccugcagagagaag

SEQ ID NO: 3743041 - RNA, 19 nt, Human
gaauuggaaugcacucaga

SEQ ID NO: 3743042 - RNA, 22 nt, Human
gaauuggaccauccuauuuaac

SEQ ID NO: 3743043 - RNA, 17 nt, Human
gaauugggagcuuggga

SEQ ID NO: 3743044 - RNA, 16 nt, Human
gaauugggcggcucug

SEQ ID NO: 3743045 - RNA, 17 nt, Human
gaauugggcggcucuga

SEQ ID NO: 3743046 - RNA, 14 nt, Human
gaauuguaucauuu

SEQ ID NO: 3743047 - RNA, 20 nt, Human
gaauuguggcuauccugauu

SEQ ID NO: 3743048 - RNA, 16 nt, Human
gaauugugguuuauau

SEQ ID NO: 3743049 - RNA, 22 nt, Human
gaauugugguuuauauauuuaa

SEQ ID NO: 3743050 - RNA, 16 nt, Human
gaauugugucugcagg

SEQ ID NO: 3743051 - RNA, 15 nt, Human
gaauuguuaguuucu

SEQ ID NO: 3743052 - RNA, 20 nt, Human
gaauuguuuagauuuugugu

SEQ ID NO: 3743053 - RNA, 22 nt, Human
gaauuguuuagauuuuguguuu

SEQ ID NO: 3743054 - RNA, 18 nt, Human
gaauuuaaaaauaagaaa

SEQ ID NO: 3743055 - RNA, 22 nt, Human
gaauuuaaagaaaaaaauguca

SEQ ID NO: 3743056 - RNA, 15 nt, Human
gaauuuaaauauaau

SEQ ID NO: 3743057 - RNA, 17 nt, Human
gaauuuaaauauaauuc

SEQ ID NO: 3743058 - RNA, 16 nt, Human
gaauuuaacaaugcga

SEQ ID NO: 3743059 - RNA, 17 nt, Human
gaauuuaacaaugcgaa

SEQ ID NO: 3743060 - RNA, 19 nt, Human
gaauuuagggagaaauguu

SEQ ID NO: 3743061 - RNA, 22 nt, Human
gaauuuauauacaaccugcuug

SEQ ID NO: 3743062 - RNA, 15 nt, Human
gaauuuaucuuugau

SEQ ID NO: 3743063 - RNA, 16 nt, Human
gaauuuaucuuugaua

SEQ ID NO: 3743064 - RNA, 17 nt, Human
gaauuuauuauuguucu

SEQ ID NO: 3743065 - RNA, 16 nt, Human
gaauuuauuggcuuuu

SEQ ID NO: 3743066 - RNA, 22 nt, Human
gaauuuauuggcuuuucugauc

SEQ ID NO: 3743067 - RNA, 18 nt, Human
gaauuucauaucuacaga

SEQ ID NO: 3743068 - RNA, 15 nt, Human
gaauuucccaaagca

SEQ ID NO: 3743069 - RNA, 18 nt, Human
gaauuucccaaagcagug

SEQ ID NO: 3743070 - RNA, 14 nt, Human
gaauuucccaggac

SEQ ID NO: 3743071 - RNA, 13 nt, Human
gaauuuccucuau

SEQ ID NO: 3743072 - RNA, 18 nt, Human
gaauuuccuuacucuuga

SEQ ID NO: 3743073 - RNA, 18 nt, Human
gaauuucuaaaaagauua

SEQ ID NO: 3743074 - RNA, 13 nt, Human
gaauuucuuaacu

SEQ ID NO: 3743075 - RNA, 19 nt, Human
gaauuucuuaacuucuugc

SEQ ID NO: 3743076 - RNA, 21 nt, Human
gaauuucuuaacuucuugcuu

SEQ ID NO: 3743077 - RNA, 20 nt, Human
gaauuucuucacuguugaaa

SEQ ID NO: 3743078 - RNA, 15 nt, Human
gaauuugaagacuuc

SEQ ID NO: 3743079 - RNA, 21 nt, Human
gaauuugaagacuucaaaaua

SEQ ID NO: 3743080 - RNA, 19 nt, Human
gaauuugaagcugcaguga

SEQ ID NO: 3743081 - RNA, 14 nt, Human
gaauuugaaucuca

SEQ ID NO: 3743082 - RNA, 14 nt, Human
gaauuugaaugaaa

SEQ ID NO: 3743083 - RNA, 16 nt, Human
gaauuugaaugaaaaa

SEQ ID NO: 3743084 - RNA, 15 nt, Human
gaauuugcaaaguac

SEQ ID NO: 3743085 - RNA, 23 nt, Human
gaauuugggacccugcuuuagag

SEQ ID NO: 3743086 - RNA, 16 nt, Human
gaauuuguaaccucag

SEQ ID NO: 3743087 - RNA, 21 nt, Human
gaauuuguaaccucagcucug

SEQ ID NO: 3743088 - RNA, 17 nt, Human
gaauuugugaacagcag

SEQ ID NO: 3743089 - RNA, 21 nt, Human
gaauuuguguugaaggaacuu

SEQ ID NO: 3743090 - RNA, 13 nt, Human
gaauuuguuauca

SEQ ID NO: 3743091 - RNA, 12 nt, Human
gaauuuuaaaag

SEQ ID NO: 3743092 - RNA, 23 nt, Human
gaauuuuaaaaucugagggaaau

SEQ ID NO: 3743093 - RNA, 20 nt, Human
gaauuuuaagccuuuguuga

SEQ ID NO: 3743094 - RNA, 11 nt, Human
ggggacccacg

SEQ ID NO: 3743095 - RNA, 13 nt, Human
ggggacccaggcu

SEQ ID NO: 3743096 - RNA, 19 nt, Human
ggggacccaggcuccgccc

SEQ ID NO: 3743097 - RNA, 13 nt, Human
ggggacccagugc

SEQ ID NO: 3743098 - RNA, 13 nt, Human
ggggaccucaggc

SEQ ID NO: 3743099 - RNA, 17 nt, Human
ggggaccucaggccugg

SEQ ID NO: 3743100 - RNA, 16 nt, Human
ggggaccuggaaggga

SEQ ID NO: 3743101 - RNA, 20 nt, Human
ggggaccuuuugggggaggg

SEQ ID NO: 3743102 - RNA, 23 nt, Human
ggggacggggggccccagucagc

SEQ ID NO: 3743103 - RNA, 15 nt, Human
ggggacucagcccug

SEQ ID NO: 3743104 - RNA, 16 nt, Human
ggggacucagcccuga

SEQ ID NO: 3743105 - RNA, 12 nt, Human
ggggacugcugc

SEQ ID NO: 3743106 - RNA, 21 nt, Human
ggggacuguaaguugggcuug

SEQ ID NO: 3743107 - RNA, 19 nt, Human
ggggacuuacaugauucau

SEQ ID NO: 3743108 - RNA, 15 nt, Human
ggggacuuggccucu

SEQ ID NO: 3743109 - RNA, 16 nt, Human
ggggagacaccucaga

SEQ ID NO: 3743110 - RNA, 17 nt, Human
ggggagacaccucagag

SEQ ID NO: 3743111 - RNA, 18 nt, Human
ggggagacugggcugagg

SEQ ID NO: 3743112 - RNA, 18 nt, Human
ggggagacuuugauguca

SEQ ID NO: 3743113 - RNA, 18 nt, Human
ggggagagccugcuggca

SEQ ID NO: 3743114 - RNA, 11 nt, Human
ggggagcccuc

SEQ ID NO: 3743115 - RNA, 16 nt, Human
ggggaggaccucuggg

SEQ ID NO: 3743116 - RNA, 13 nt, Human
ggggaggaggagg

SEQ ID NO: 3743117 - RNA, 12 nt, Human
ggggaggagggc

SEQ ID NO: 3743118 - RNA, 13 nt, Human
ggggaggccaagu

SEQ ID NO: 3743119 - RNA, 21 nt, Human
ggggaggccaagugcaggcug

SEQ ID NO: 3743120 - RNA, 15 nt, Human
ggggaggccaucugg

SEQ ID NO: 3743121 - RNA, 18 nt, Human
ggggaggcggcacuccaa

SEQ ID NO: 3743122 - RNA, 17 nt, Human
ggggaggguaggcagga

SEQ ID NO: 3743123 - RNA, 14 nt, Human
ggggagggugacag

SEQ ID NO: 3743124 - RNA, 20 nt, Human
ggggagggugacaguggccg

SEQ ID NO: 3743125 - RNA, 13 nt, Human
ggggaguggaaua

SEQ ID NO: 3743126 - RNA, 17 nt, Human
ggggaguuaagaccugg

SEQ ID NO: 3743127 - RNA, 21 nt, Human
ggggaguuaagaccuggcagc

SEQ ID NO: 3743128 - RNA, 13 nt, Human
ggggauagaugug

SEQ ID NO: 3743129 - RNA, 19 nt, Human
ggggaucauaaaguuagaa

SEQ ID NO: 3743130 - RNA, 13 nt, Human
ggggauccccgcc

SEQ ID NO: 3743131 - RNA, 13 nt, Human
ggggaucucaggg

SEQ ID NO: 3743132 - RNA, 20 nt, Human
ggggaugagagggugcuauc

SEQ ID NO: 3743133 - RNA, 21 nt, Human
ggggauuuccagccagggcug

SEQ ID NO: 3743134 - RNA, 15 nt, Human
ggggauuucucccag

SEQ ID NO: 3743135 - RNA, 15 nt, Human
ggggcaaacaccugc

SEQ ID NO: 3743136 - RNA, 16 nt, Human
ggggcaacccugguga

SEQ ID NO: 3743137 - RNA, 13 nt, Human
ggggcacaggagg

SEQ ID NO: 3743138 - RNA, 21 nt, Human
ggggcagacaauaaacccuca

SEQ ID NO: 3743139 - RNA, 13 nt, Human
ggggcagagccag

SEQ ID NO: 3743140 - RNA, 14 nt, Human
ggggcagagccagg

SEQ ID NO: 3743141 - RNA, 15 nt, Human
ggggcagagccuccc

SEQ ID NO: 3743142 - RNA, 17 nt, Human
ggggcagaggcaguacc

SEQ ID NO: 3743143 - RNA, 18 nt, Human
ggggcagagggcagaggc

SEQ ID NO: 3743144 - RNA, 22 nt, Human
ggggcagagggcagaggcugga

SEQ ID NO: 3743145 - RNA, 16 nt, Human
ggggcagcagcagugg

SEQ ID NO: 3743146 - RNA, 12 nt, Human
ggggcagccucu

SEQ ID NO: 3743147 - RNA, 20 nt, Human
ggggcagcugauacaaauug

SEQ ID NO: 3743148 - RNA, 14 nt, Human
ggggcagcugccag

SEQ ID NO: 3743149 - RNA, 19 nt, Human
ggggcaggaguagcugagc

SEQ ID NO: 3743150 - RNA, 21 nt, Human
ggggcaggaguagcugagcuc

SEQ ID NO: 3743151 - RNA, 10 nt, Human
ggggcaggca

SEQ ID NO: 3743152 - RNA, 13 nt, Human
ggggcaggcacag

SEQ ID NO: 3743153 - RNA, 15 nt, Human
ggggcaggcacagca

SEQ ID NO: 3743154 - RNA, 12 nt, Human
ggggcaggcagu

SEQ ID NO: 3743155 - RNA, 13 nt, Human
ggggcaggcuggg

SEQ ID NO: 3743156 - RNA, 17 nt, Human
ggggcagggagcugggc

SEQ ID NO: 3743157 - RNA, 20 nt, Human
ggggcagugcucacccacac

SEQ ID NO: 3743158 - RNA, 23 nt, Human
ggggcagugcuuggcccaggagu

SEQ ID NO: 3743159 - RNA, 16 nt, Human
ggggcaucuggccugg

SEQ ID NO: 3743160 - RNA, 17 nt, Human
ggggcaugaccagaugc

SEQ ID NO: 3743161 - RNA, 23 nt, Human
ggggcauguauuggccuggaggu

SEQ ID NO: 3743162 - RNA, 19 nt, Human
ggggcauugaguauuguuu

SEQ ID NO: 3743163 - RNA, 21 nt, Human
ggggcauugcugacuguguau

SEQ ID NO: 3743164 - RNA, 14 nt, Human
ggggccaccaaagc

SEQ ID NO: 3743165 - RNA, 18 nt, Human
ggggccaccaaagcugcc

SEQ ID NO: 3743166 - RNA, 15 nt, Human
ggggccaccugccug

SEQ ID NO: 3743167 - RNA, 12 nt, Human
ggggccagagga

SEQ ID NO: 3743168 - RNA, 13 nt, Human
ggggccagaucca

SEQ ID NO: 3743169 - RNA, 14 nt, Human
ggggccagauccag

SEQ ID NO: 3743170 - RNA, 13 nt, Human
ggggccaggcugg

SEQ ID NO: 3743171 - RNA, 14 nt, Human
ggggccaggcuggg

SEQ ID NO: 3743172 - RNA, 19 nt, Human
ggggccaugccuccucagg

SEQ ID NO: 3743173 - RNA, 23 nt, Human
ggggccaugccuccucaggagcc

SEQ ID NO: 3743174 - RNA, 21 nt, Human
ggggccauuugcaauaacagc

SEQ ID NO: 3743175 - RNA, 20 nt, Human
ggggcccaaaugcuggcugg

SEQ ID NO: 3743176 - RNA, 22 nt, Human
ggggcccaaggcggccccuccc

SEQ ID NO: 3743177 - RNA, 12 nt, Human
ggggcccagugc

SEQ ID NO: 3743178 - RNA, 17 nt, Human
ggggcccaugaaagagg

SEQ ID NO: 3743179 - RNA, 14 nt, Human
ggggccccagggcu

SEQ ID NO: 3743180 - RNA, 15 nt, Human
ggggccccccugccc

SEQ ID NO: 3743181 - RNA, 17 nt, Human
ggggccccucucagccc

SEQ ID NO: 3743182 - RNA, 10 nt, Human
ggggccccuu

SEQ ID NO: 3743183 - RNA, 16 nt, Human
ggggcccgccuggcag

SEQ ID NO: 3743184 - RNA, 21 nt, Human
ggggcccgcuugccucggcuc

SEQ ID NO: 3743185 - RNA, 23 nt, Human
ggggcccgcuugccucggcuccu

SEQ ID NO: 3743186 - RNA, 23 nt, Human
ggggcccggacgcccaggacccc

SEQ ID NO: 3743187 - RNA, 22 nt, Human
ggggcccguugucucccuggcc

SEQ ID NO: 3743188 - RNA, 15 nt, Human
ggggcccugccuccu

SEQ ID NO: 3743189 - RNA, 19 nt, Human
ggggcccugccuccuuugu

SEQ ID NO: 3743190 - RNA, 18 nt, Human
ggggcccuggagcagcca

SEQ ID NO: 3743191 - RNA, 21 nt, Human
ggggcccugguccuuccaggc

SEQ ID NO: 3743192 - RNA, 14 nt, Human
ggggcccuuggagc

SEQ ID NO: 3743193 - RNA, 20 nt, Human
ggggccggcccugugugcag

SEQ ID NO: 3743194 - RNA, 20 nt, Human
ggggccuaauaaaacugaug

SEQ ID NO: 3743195 - RNA, 23 nt, Human
ggggccuaggccucagccagaga

SEQ ID NO: 3743196 - RNA, 14 nt, Human
ggggccucagacga

SEQ ID NO: 3743197 - RNA, 12 nt, Human
ggggccugagca

SEQ ID NO: 3743198 - RNA, 17 nt, Human
ggggccugagcaguccu

SEQ ID NO: 3743199 - RNA, 20 nt, Human
ggggccugccaccuggaccc

SEQ ID NO: 3743200 - RNA, 22 nt, Human
ggggccugccaccuggaccccu

SEQ ID NO: 3743201 - RNA, 23 nt, Human
ggggccugcccagugcacuugcu

SEQ ID NO: 3743202 - RNA, 15 nt, Human
ggggccuggaccugc

SEQ ID NO: 3743203 - RNA, 12 nt, Human
ggggccuggcag

SEQ ID NO: 3743204 - RNA, 22 nt, Human
ggggccuguacaaaagggacau

SEQ ID NO: 3743205 - RNA, 14 nt, Human
ggggccuguacugc

SEQ ID NO: 3743206 - RNA, 15 nt, Human
ggggccuguacugcc

SEQ ID NO: 3743207 - RNA, 12 nt, Human
ggggccugugga

SEQ ID NO: 3743208 - RNA, 21 nt, Human
ggggccuugcgguauccgccc

SEQ ID NO: 3743209 - RNA, 15 nt, Human
ggggcgcggcuggga

SEQ ID NO: 3743210 - RNA, 15 nt, Human
ggggcgcuggcccag

SEQ ID NO: 3743211 - RNA, 18 nt, Human
ggggcgucuguucccccu

SEQ ID NO: 3743212 - RNA, 14 nt, Human
ggggcuaccaggaa

SEQ ID NO: 3743213 - RNA, 13 nt, Human
ggggcucccgccc

SEQ ID NO: 3743214 - RNA, 13 nt, Human
ggggcucuggaga

SEQ ID NO: 3743215 - RNA, 16 nt, Human
ggggcucuggagagaa

SEQ ID NO: 3743216 - RNA, 15 nt, Human
ggggcugacagacag

SEQ ID NO: 3743217 - RNA, 23 nt, Human
ggggcugaccuuccucgcagaga

SEQ ID NO: 3743218 - RNA, 12 nt, Human
ggggcugcaccg

SEQ ID NO: 3743219 - RNA, 23 nt, Human
ggggcugcccgcucccagugucu

SEQ ID NO: 3743220 - RNA, 14 nt, Human
ggggcugcucccac

SEQ ID NO: 3743221 - RNA, 14 nt, Human
ggggcugcuccucc

SEQ ID NO: 3743222 - RNA, 20 nt, Human
ggggcugcuccuccagggcc

SEQ ID NO: 3743223 - RNA, 21 nt, Human
ggggcugcugaccuccacagc

SEQ ID NO: 3743224 - RNA, 16 nt, Human
ggggcugcuuccuccu

SEQ ID NO: 3743225 - RNA, 23 nt, Human
ggggcuggaggagcccaggccag

SEQ ID NO: 3743226 - RNA, 17 nt, Human
ggggcuggcacugacug

SEQ ID NO: 3743227 - RNA, 12 nt, Human
ggggcuggccua

SEQ ID NO: 3743228 - RNA, 19 nt, Human
ggggcuggcggcuacucag

SEQ ID NO: 3743229 - RNA, 11 nt, Human
ggggcugggcc

SEQ ID NO: 3743230 - RNA, 18 nt, Human
ggggcuggggaaggaagc

SEQ ID NO: 3743231 - RNA, 15 nt, Human
ggggcuggggcagga

SEQ ID NO: 3743232 - RNA, 18 nt, Human
ggggcuggggcaggaggg

SEQ ID NO: 3743233 - RNA, 21 nt, Human
ggggcuucugugcaccugggc

SEQ ID NO: 3743234 - RNA, 11 nt, Human
ggggcuuggcg

SEQ ID NO: 3743235 - RNA, 22 nt, Human
ggggcuuucguccacagcuucc

SEQ ID NO: 3743236 - RNA, 18 nt, Human
gggggaaggccaagggga

SEQ ID NO: 3743237 - RNA, 21 nt, Human
gggggacucugagcgggaggc

SEQ ID NO: 3743238 - RNA, 21 nt, Human
gggggacuuacaugauucauu

SEQ ID NO: 3743239 - RNA, 19 nt, Human
gggggagcacccugagggc

SEQ ID NO: 3743240 - RNA, 22 nt, Human
gggggaggugggauccuccagg

SEQ ID NO: 3743241 - RNA, 22 nt, Human
gggggagucugaagcagaugca

SEQ ID NO: 3743242 - RNA, 20 nt, Human
gggggcaagaaguagcagug

SEQ ID NO: 3743243 - RNA, 12 nt, Human
gggggcagaagu

SEQ ID NO: 3743244 - RNA, 21 nt, Human
gggggcagcacaggagggcgg

SEQ ID NO: 3743245 - RNA, 15 nt, Human
gaauuuuacauggua

SEQ ID NO: 3743246 - RNA, 23 nt, Human
gaauuuuacuguguuucuuuugg

SEQ ID NO: 3743247 - RNA, 15 nt, Human
gaauuuuagcuuuug

SEQ ID NO: 3743248 - RNA, 23 nt, Human
gaauuuuauacuuucccuacccu

SEQ ID NO: 3743249 - RNA, 20 nt, Human
gaauuuucaagcaucuccug

SEQ ID NO: 3743250 - RNA, 22 nt, Human
gaauuuucacaugaacauacug

SEQ ID NO: 3743251 - RNA, 22 nt, Human
gaauuuucauuuuacaguuacu

SEQ ID NO: 3743252 - RNA, 17 nt, Human
gaauuuucuguguuuug

SEQ ID NO: 3743253 - RNA, 21 nt, Human
gaauuuucuuuguguagcuuu

SEQ ID NO: 3743254 - RNA, 22 nt, Human
gaauuuugcaaagauuuaaucu

SEQ ID NO: 3743255 - RNA, 16 nt, Human
gaauuuuguguuagag

SEQ ID NO: 3743256 - RNA, 16 nt, Human
gaauuuuguucucugg

SEQ ID NO: 3743257 - RNA, 20 nt, Human
gaauuuuguucucugggaga

SEQ ID NO: 3743258 - RNA, 23 nt, Human
gaauuuuguucucugggagaaaa

SEQ ID NO: 3743259 - RNA, 22 nt, Human
gaauuuuguuuggacuucuuuu

SEQ ID NO: 3743260 - RNA, 18 nt, Human
gaauuuuuaaacaaguau

SEQ ID NO: 3743261 - RNA, 16 nt, Human
gaauuuuuauuaugca

SEQ ID NO: 3743262 - RNA, 19 nt, Human
gaauuuuuauuaugcauaa

SEQ ID NO: 3743263 - RNA, 13 nt, Human
gaauuuuuauugu

SEQ ID NO: 3743264 - RNA, 15 nt, Human
gaauuuuugcaauaa

SEQ ID NO: 3743265 - RNA, 20 nt, Human
gaauuuuuuucaucuucucu

SEQ ID NO: 3743266 - RNA, 16 nt, Human
gaauuuuuuuuaacau

SEQ ID NO: 3743267 - RNA, 17 nt, Human
gaauuuuuuuuaacauu

SEQ ID NO: 3743268 - RNA, 19 nt, Human
gaauuuuuuuuaacauucc

SEQ ID NO: 3743269 - RNA, 21 nt, Human
gaauuuuuuuuguuguuucag

SEQ ID NO: 3743270 - RNA, 18 nt, Human
gacaaaaaauuaaagcau

SEQ ID NO: 3743271 - RNA, 14 nt, Human
gacaaaaagcuacu

SEQ ID NO: 3743272 - RNA, 17 nt, Human
gacaaaaauuaucuauu

SEQ ID NO: 3743273 - RNA, 20 nt, Human
gacaaaaccccccagauauc

SEQ ID NO: 3743274 - RNA, 18 nt, Human
gacaaaaccuaacuugcg

SEQ ID NO: 3743275 - RNA, 12 nt, Human
gacaaaacuucu

SEQ ID NO: 3743276 - RNA, 14 nt, Human
gacaaaagucuguc

SEQ ID NO: 3743277 - RNA, 18 nt, Human
gacaaaaucaucuuugug

SEQ ID NO: 3743278 - RNA, 12 nt, Human
gacaaaauguua

SEQ ID NO: 3743279 - RNA, 16 nt, Human
gacaaaauguuauuuc

SEQ ID NO: 3743280 - RNA, 19 nt, Human
gacaaacaccucccaggag

SEQ ID NO: 3743281 - RNA, 15 nt, Human
gacaaaccagaagca

SEQ ID NO: 3743282 - RNA, 20 nt, Human
gacaaacugccaguuuuguu

SEQ ID NO: 3743283 - RNA, 18 nt, Human
gacaaacuggagucugga

SEQ ID NO: 3743284 - RNA, 19 nt, Human
gacaaacuguaaaaaaugu

SEQ ID NO: 3743285 - RNA, 19 nt, Human
gacaaagaauuccaaagca

SEQ ID NO: 3743286 - RNA, 14 nt, Human
gacaaagacaaauu

SEQ ID NO: 3743287 - RNA, 21 nt, Human
gacaaagacaaauucuguuuc

SEQ ID NO: 3743288 - RNA, 20 nt, Human
gacaaagaggccuuuaacca

SEQ ID NO: 3743289 - RNA, 22 nt, Human
gacaaagaugauuuaaaaggga

SEQ ID NO: 3743290 - RNA, 20 nt, Human
gacaaagcugcuaaaucucc

SEQ ID NO: 3743291 - RNA, 18 nt, Human
gacaaaggagccugugaa

SEQ ID NO: 3743292 - RNA, 13 nt, Human
gacaaaggcaagc

SEQ ID NO: 3743293 - RNA, 16 nt, Human
gacaaagucuccagcc

SEQ ID NO: 3743294 - RNA, 19 nt, Human
gacaaagucuccagcccac

SEQ ID NO: 3743295 - RNA, 12 nt, Human
gacaaagugcca

SEQ ID NO: 3743296 - RNA, 23 nt, Human
gacaaaguuacugauucacugca

SEQ ID NO: 3743297 - RNA, 19 nt, Human
gacaaauacucauguguau

SEQ ID NO: 3743298 - RNA, 18 nt, Human
gacaaauagaaaaugguc

SEQ ID NO: 3743299 - RNA, 14 nt, Human
gacaaauaguaggc

SEQ ID NO: 3743300 - RNA, 15 nt, Human
gacaaauaguaggca

SEQ ID NO: 3743301 - RNA, 22 nt, Human
gacaaauauuccuuugcauauu

SEQ ID NO: 3743302 - RNA, 12 nt, Human
gacaaaucaagu

SEQ ID NO: 3743303 - RNA, 20 nt, Human
gacaaaucacauauuuuaaa

SEQ ID NO: 3743304 - RNA, 12 nt, Human
gacaaaucugug

SEQ ID NO: 3743305 - RNA, 21 nt, Human
gacaaaugcugcgcccuuccc

SEQ ID NO: 3743306 - RNA, 13 nt, Human
gacaaaugugaag

SEQ ID NO: 3743307 - RNA, 16 nt, Human
gacaaaugugaagaug

SEQ ID NO: 3743308 - RNA, 14 nt, Human
gacaaauguuucua

SEQ ID NO: 3743309 - RNA, 19 nt, Human
gacaaauucauauucuuuu

SEQ ID NO: 3743310 - RNA, 17 nt, Human
gacaaauucuguuucuu

SEQ ID NO: 3743311 - RNA, 15 nt, Human
gacaaauuuaaaaca

SEQ ID NO: 3743312 - RNA, 17 nt, Human
gacaaauuuaaaacaaa

SEQ ID NO: 3743313 - RNA, 21 nt, Human
gacaacaaauuagguuuugua

SEQ ID NO: 3743314 - RNA, 16 nt, Human
gacaacacagccuaua

SEQ ID NO: 3743315 - RNA, 17 nt, Human
gacaacagaagucauga

SEQ ID NO: 3743316 - RNA, 19 nt, Human
gacaacagauuggauuuua

SEQ ID NO: 3743317 - RNA, 20 nt, Human
gacaacagguaaaacagggc

SEQ ID NO: 3743318 - RNA, 12 nt, Human
gacaacauuaaa

SEQ ID NO: 3743319 - RNA, 22 nt, Human
gacaacauuucuauagccaaaa

SEQ ID NO: 3743320 - RNA, 18 nt, Human
gacaaccaccgcucccca

SEQ ID NO: 3743321 - RNA, 22 nt, Human
gacaaccaccgcuccccagccc

SEQ ID NO: 3743322 - RNA, 15 nt, Human
gacaaccacuggucu

SEQ ID NO: 3743323 - RNA, 12 nt, Human
gacaaccaugac

SEQ ID NO: 3743324 - RNA, 17 nt, Human
gacaacugcucccaccu

SEQ ID NO: 3743325 - RNA, 17 nt, Human
gacaacuggcaggcagg

SEQ ID NO: 3743326 - RNA, 22 nt, Human
gacaagaaaggcugcuguacug

SEQ ID NO: 3743327 - RNA, 19 nt, Human
gacaagacuucaguauguu

SEQ ID NO: 3743328 - RNA, 20 nt, Human
gacaagacuucaguauguug

SEQ ID NO: 3743329 - RNA, 24 nt, Human
gacaagacuucaguauguugucaa

SEQ ID NO: 3743330 - RNA, 22 nt, Human
gacaagaguuggggacagaacu

SEQ ID NO: 3743331 - RNA, 14 nt, Human
gacaagauauugua

SEQ ID NO: 3743332 - RNA, 20 nt, Human
gacaagauuuuuuaauuguu

SEQ ID NO: 3743333 - RNA, 19 nt, Human
gacaagccaacuuguaaau

SEQ ID NO: 3743334 - RNA, 22 nt, Human
gacaagccaacuuguaaauaca

SEQ ID NO: 3743335 - RNA, 23 nt, Human
gacaagccaacuuguaaauacac

SEQ ID NO: 3743336 - RNA, 16 nt, Human
gacaagccagaacuug

SEQ ID NO: 3743337 - RNA, 12 nt, Human
gacaagccccag

SEQ ID NO: 3743338 - RNA, 17 nt, Human
gacaagccccaggcagg

SEQ ID NO: 3743339 - RNA, 14 nt, Human
gacaagcuggcuua

SEQ ID NO: 3743340 - RNA, 20 nt, Human
gacaagcuggcuuacacugg

SEQ ID NO: 3743341 - RNA, 20 nt, Human
gacaagcuguugaccaggca

SEQ ID NO: 3743342 - RNA, 22 nt, Human
gacaagcuguugaccaggcacc

SEQ ID NO: 3743343 - RNA, 13 nt, Human
gacaagcuucuga

SEQ ID NO: 3743344 - RNA, 17 nt, Human
gacaaggaaaggcaaau

SEQ ID NO: 3743345 - RNA, 19 nt, Human
gacaaggaaaggcaaaugc

SEQ ID NO: 3743346 - RNA, 19 nt, Human
gacaaggagaagagcaagg

SEQ ID NO: 3743347 - RNA, 19 nt, Human
gacaagggcugaccugccu

SEQ ID NO: 3743348 - RNA, 21 nt, Human
gacaagguagcccuggccaga

SEQ ID NO: 3743349 - RNA, 18 nt, Human
gacaaggugcaggcaggc

SEQ ID NO: 3743350 - RNA, 22 nt, Human
gacaagguucuucccuuuuaca

SEQ ID NO: 3743351 - RNA, 19 nt, Human
gacaagugacuguaucugu

SEQ ID NO: 3743352 - RNA, 15 nt, Human
gacaaguggacucag

SEQ ID NO: 3743353 - RNA, 13 nt, Human
gacaauaaagcuu

SEQ ID NO: 3743354 - RNA, 14 nt, Human
gacaauaaagcuug

SEQ ID NO: 3743355 - RNA, 19 nt, Human
gacaauaauuucagguuuu

SEQ ID NO: 3743356 - RNA, 16 nt, Human
gacaauacguuugaua

SEQ ID NO: 3743357 - RNA, 15 nt, Human
gacaauacugggguu

SEQ ID NO: 3743358 - RNA, 17 nt, Human
gacaauagcauuagaaa

SEQ ID NO: 3743359 - RNA, 14 nt, Human
gacaaucagucccc

SEQ ID NO: 3743360 - RNA, 16 nt, Human
gacaaucaguccccuc

SEQ ID NO: 3743361 - RNA, 17 nt, Human
gacaaucaguccccucc

SEQ ID NO: 3743362 - RNA, 14 nt, Human
gacaaucauuguuu

SEQ ID NO: 3743363 - RNA, 21 nt, Human
gacaaugacuuacuguacaug

SEQ ID NO: 3743364 - RNA, 20 nt, Human
gacaaugaugaugauaauga

SEQ ID NO: 3743365 - RNA, 22 nt, Human
gacaaugcaaaccaucauugaa

SEQ ID NO: 3743366 - RNA, 16 nt, Human
gacaauggaccggaga

SEQ ID NO: 3743367 - RNA, 16 nt, Human
gacaauggcagaugua

SEQ ID NO: 3743368 - RNA, 18 nt, Human
gacaaugugaaaagaaaa

SEQ ID NO: 3743369 - RNA, 12 nt, Human
gacaauguuuac

SEQ ID NO: 3743370 - RNA, 13 nt, Human
gacaauucuuuau

SEQ ID NO: 3743371 - RNA, 15 nt, Human
gacaauucuuuauac

SEQ ID NO: 3743372 - RNA, 13 nt, Human
gacaauuuauaau

SEQ ID NO: 3743373 - RNA, 19 nt, Human
gacaauuugauacauaaua

SEQ ID NO: 3743374 - RNA, 17 nt, Human
gacacaaaacuccgccc

SEQ ID NO: 3743375 - RNA, 22 nt, Human
gacacaaaacuccgcccccagc

SEQ ID NO: 3743376 - RNA, 14 nt, Human
gacacaaaugcaug

SEQ ID NO: 3743377 - RNA, 13 nt, Human
gacacaacuauuu

SEQ ID NO: 3743378 - RNA, 22 nt, Human
gacacaacugugugauuaaaag

SEQ ID NO: 3743379 - RNA, 22 nt, Human
gacacaaguggaccuuaggccu

SEQ ID NO: 3743380 - RNA, 12 nt, Human
gacacacacaca

SEQ ID NO: 3743381 - RNA, 18 nt, Human
gacacacacacgcacgca

SEQ ID NO: 3743382 - RNA, 14 nt, Human
gacacacacagcuu

SEQ ID NO: 3743383 - RNA, 14 nt, Human
gacacacagccuag

SEQ ID NO: 3743384 - RNA, 18 nt, Human
gacacacagcucuguccu

SEQ ID NO: 3743385 - RNA, 19 nt, Human
gacacacagcucuguccug

SEQ ID NO: 3743386 - RNA, 15 nt, Human
gacacaccaggcgcu

SEQ ID NO: 3743387 - RNA, 18 nt, Human
gacacaccaggcgcuaau

SEQ ID NO: 3743388 - RNA, 15 nt, Human
gacacacgcacacac

SEQ ID NO: 3743389 - RNA, 15 nt, Human
gacacacuaaccaag

SEQ ID NO: 3743390 - RNA, 14 nt, Human
gacacacugaagaa

SEQ ID NO: 3743391 - RNA, 15 nt, Human
gacacacugaagaag

SEQ ID NO: 3743392 - RNA, 20 nt, Human
gacacagacucauccugaac

SEQ ID NO: 3743393 - RNA, 15 nt, Human
gacacagcagcuuca

SEQ ID NO: 3743394 - RNA, 19 nt, Human
guaauaaaguguuuucaga

SEQ ID NO: 3743395 - RNA, 15 nt, Human
guaauaacugugaag

SEQ ID NO: 3743396 - RNA, 13 nt, Human
guaauaagacaua

SEQ ID NO: 3743397 - RNA, 19 nt, Human
guaauaagggaaaaaucaa

SEQ ID NO: 3743398 - RNA, 21 nt, Human
guaauaagguuuuaauuuagu

SEQ ID NO: 3743399 - RNA, 13 nt, Human
guaauaauagacu

SEQ ID NO: 3743400 - RNA, 18 nt, Human
guaauacuucuugugugu

SEQ ID NO: 3743401 - RNA, 15 nt, Human
guaauagagcaaaau

SEQ ID NO: 3743402 - RNA, 14 nt, Human
guaauauaauacac

SEQ ID NO: 3743403 - RNA, 21 nt, Human
guaauauaauacacaaaauca

SEQ ID NO: 3743404 - RNA, 22 nt, Human
guaauauaauacacaaaaucaa

SEQ ID NO: 3743405 - RNA, 22 nt, Human
guaauauaauggaagagaaauc

SEQ ID NO: 3743406 - RNA, 12 nt, Human
guaauauauugc

SEQ ID NO: 3743407 - RNA, 16 nt, Human
guaauauauugcugcu

SEQ ID NO: 3743408 - RNA, 20 nt, Human
guaauauauugcugcuggua

SEQ ID NO: 3743409 - RNA, 14 nt, Human
guaauaugcacaca

SEQ ID NO: 3743410 - RNA, 17 nt, Human
guaauauuuacaaugua

SEQ ID NO: 3743411 - RNA, 21 nt, Human
guaauauuuacaauguauuaa

SEQ ID NO: 3743412 - RNA, 13 nt, Human
guaauauuuugua

SEQ ID NO: 3743413 - RNA, 13 nt, Human
guaauauuuuuau

SEQ ID NO: 3743414 - RNA, 20 nt, Human
guaaucaauaaacgauuuaa

SEQ ID NO: 3743415 - RNA, 22 nt, Human
guaaucaaucuacucaaagcau

SEQ ID NO: 3743416 - RNA, 19 nt, Human
guaaucaaugaauauugaa

SEQ ID NO: 3743417 - RNA, 21 nt, Human
guaaucaaugaauauugaagu

SEQ ID NO: 3743418 - RNA, 15 nt, Human
guaaucauauuagac

SEQ ID NO: 3743419 - RNA, 15 nt, Human
guaaucaucuaaguc

SEQ ID NO: 3743420 - RNA, 20 nt, Human
guaaucauuucuugggcccu

SEQ ID NO: 3743421 - RNA, 22 nt, Human
guaaucauuucuugggcccucc

SEQ ID NO: 3743422 - RNA, 23 nt, Human
guaaucauuucuugggcccuccu

SEQ ID NO: 3743423 - RNA, 15 nt, Human
guaauccaccugccu

SEQ ID NO: 3743424 - RNA, 20 nt, Human
guaaucccagcacuuuggga

SEQ ID NO: 3743425 - RNA, 13 nt, Human
guaaucccagcag

SEQ ID NO: 3743426 - RNA, 17 nt, Human
guaaucccagcuacuca

SEQ ID NO: 3743427 - RNA, 18 nt, Human
guaaucccagcuacucag

SEQ ID NO: 3743428 - RNA, 22 nt, Human
guaauccucaagaaauaaaagg

SEQ ID NO: 3743429 - RNA, 17 nt, Human
guaaucgaccugccucg

SEQ ID NO: 3743430 - RNA, 16 nt, Human
guaaucguuaugugug

SEQ ID NO: 3743431 - RNA, 18 nt, Human
guaaucguuaugugugua

SEQ ID NO: 3743432 - RNA, 22 nt, Human
guaaucuaugaauucuaaguga

SEQ ID NO: 3743433 - RNA, 16 nt, Human
guaaucucguuucaaa

SEQ ID NO: 3743434 - RNA, 14 nt, Human
guaaucucucugca

SEQ ID NO: 3743435 - RNA, 17 nt, Human
guaaucucucugcagcu

SEQ ID NO: 3743436 - RNA, 19 nt, Human
guaaucugagaaacaauga

SEQ ID NO: 3743437 - RNA, 21 nt, Human
guaaucugaucguucuuucua

SEQ ID NO: 3743438 - RNA, 16 nt, Human
guaaucugauggcuuc

SEQ ID NO: 3743439 - RNA, 23 nt, Human
guaaucuguacauuuuguuguaa

SEQ ID NO: 3743440 - RNA, 20 nt, Human
guaaucuguguacaaagaaa

SEQ ID NO: 3743441 - RNA, 11 nt, Human
guaaugaaaac

SEQ ID NO: 3743442 - RNA, 17 nt, Human
guaaugaaaaugaauau

SEQ ID NO: 3743443 - RNA, 10 nt, Human
guaaugaaac

SEQ ID NO: 3743444 - RNA, 15 nt, Human
guaaugaaacuugga

SEQ ID NO: 3743445 - RNA, 16 nt, Human
guaaugaaacuuggau

SEQ ID NO: 3743446 - RNA, 22 nt, Human
guaaugacagaacaugcuguua

SEQ ID NO: 3743447 - RNA, 17 nt, Human
guaaugaccaugaaaga

SEQ ID NO: 3743448 - RNA, 14 nt, Human
guaaugagggacug

SEQ ID NO: 3743449 - RNA, 20 nt, Human
guaaugauauagccagaaaa

SEQ ID NO: 3743450 - RNA, 18 nt, Human
guaaugaugucguuugaa

SEQ ID NO: 3743451 - RNA, 16 nt, Human
guaaugccucugucua

SEQ ID NO: 3743452 - RNA, 17 nt, Human
guaaugcgccaauaaac

SEQ ID NO: 3743453 - RNA, 20 nt, Human
guaaugcuuagagaauguuc

SEQ ID NO: 3743454 - RNA, 16 nt, Human
guaaugcuucaaucag

SEQ ID NO: 3743455 - RNA, 23 nt, Human
guaauggcaguuauauuuugcag

SEQ ID NO: 3743456 - RNA, 19 nt, Human
guaaugguacugacuuugc

SEQ ID NO: 3743457 - RNA, 16 nt, Human
guaaugguguagaaca

SEQ ID NO: 3743458 - RNA, 17 nt, Human
guaauguaaaauccauc

SEQ ID NO: 3743459 - RNA, 14 nt, Human
guaauguaacugcu

SEQ ID NO: 3743460 - RNA, 12 nt, Human
guaaugucacca

SEQ ID NO: 3743461 - RNA, 19 nt, Human
guaaugucaccaccuuccc

SEQ ID NO: 3743462 - RNA, 19 nt, Human
guaaugucuugagcucuau

SEQ ID NO: 3743463 - RNA, 17 nt, Human
guaauguggaagaaaau

SEQ ID NO: 3743464 - RNA, 20 nt, Human
guaaugugugguggccucag

SEQ ID NO: 3743465 - RNA, 13 nt, Human
guaauguuacuga

SEQ ID NO: 3743466 - RNA, 18 nt, Human
guaauuaaaagcaaauca

SEQ ID NO: 3743467 - RNA, 20 nt, Human
guaauuaaaagcaaaucauu

SEQ ID NO: 3743468 - RNA, 14 nt, Human
guaauuaaguacua

SEQ ID NO: 3743469 - RNA, 22 nt, Human
guaauuaucgggaacaguguuu

SEQ ID NO: 3743470 - RNA, 13 nt, Human
guaauuaugauuu

SEQ ID NO: 3743471 - RNA, 17 nt, Human
guaauucuuauucuuuc

SEQ ID NO: 3743472 - RNA, 15 nt, Human
guaauucuucaguug

SEQ ID NO: 3743473 - RNA, 13 nt, Human
guaauugaacuua

SEQ ID NO: 3743474 - RNA, 15 nt, Human
guaauugaacuuauc

SEQ ID NO: 3743475 - RNA, 15 nt, Human
guaauugacaugugc

SEQ ID NO: 3743476 - RNA, 18 nt, Human
guaauugacgguuuuuua

SEQ ID NO: 3743477 - RNA, 15 nt, Human
guaauugcuuacauu

SEQ ID NO: 3743478 - RNA, 15 nt, Human
guaauuggaaaggca

SEQ ID NO: 3743479 - RNA, 12 nt, Human
guaauuguucca

SEQ ID NO: 3743480 - RNA, 21 nt, Human
guaauuguuccagagacaaau

SEQ ID NO: 3743481 - RNA, 14 nt, Human
guaauuguuccuuu

SEQ ID NO: 3743482 - RNA, 21 nt, Human
guaauuguugcuaaucuucuu

SEQ ID NO: 3743483 - RNA, 21 nt, Human
guaauuguuguuuguauguau

SEQ ID NO: 3743484 - RNA, 10 nt, Human
guaauuuaaa

SEQ ID NO: 3743485 - RNA, 20 nt, Human
guaauuuaaaauugugaugu

SEQ ID NO: 3743486 - RNA, 23 nt, Human
guaauuuaaaauugugauguguc

SEQ ID NO: 3743487 - RNA, 14 nt, Human
guaauuuaaacagg

SEQ ID NO: 3743488 - RNA, 20 nt, Human
guaauuuaaacaggcccagc

SEQ ID NO: 3743489 - RNA, 21 nt, Human
guaauuuaaaugaaagaaaau

SEQ ID NO: 3743490 - RNA, 17 nt, Human
guaauuuagauuguaaa

SEQ ID NO: 3743491 - RNA, 19 nt, Human
guaauuuaggguacuaaau

SEQ ID NO: 3743492 - RNA, 17 nt, Human
guaauuuaguuauugau

SEQ ID NO: 3743493 - RNA, 14 nt, Human
guaauuuguaaagu

SEQ ID NO: 3743494 - RNA, 15 nt, Human
guaauuugugauaca

SEQ ID NO: 3743495 - RNA, 22 nt, Human
guaauuugugauacaaugcugu

SEQ ID NO: 3743496 - RNA, 18 nt, Human
guaauuuuauaugaagau

SEQ ID NO: 3743497 - RNA, 16 nt, Human
guaauuuuauuuuaaa

SEQ ID NO: 3743498 - RNA, 19 nt, Human
guaauuuuauuuuaaaauu

SEQ ID NO: 3743499 - RNA, 20 nt, Human
guaauuuuauuuuaaaauuu

SEQ ID NO: 3743500 - RNA, 23 nt, Human
guaauuuucggaugggagaguuu

SEQ ID NO: 3743501 - RNA, 13 nt, Human
guaauuuucuuga

SEQ ID NO: 3743502 - RNA, 14 nt, Human
guaauuuugccaaa

SEQ ID NO: 3743503 - RNA, 14 nt, Human
guaauuuuguguaa

SEQ ID NO: 3743504 - RNA, 16 nt, Human
guaauuuuucuguaua

SEQ ID NO: 3743505 - RNA, 16 nt, Human
guaauuuuuuucuuau

SEQ ID NO: 3743506 - RNA, 19 nt, Human
guacaaaaaaaaaguuuua

SEQ ID NO: 3743507 - RNA, 20 nt, Human
guacaaaaaaaaaguuuuau

SEQ ID NO: 3743508 - RNA, 21 nt, Human
guacaaaaaaaucuuccaauu

SEQ ID NO: 3743509 - RNA, 14 nt, Human
guacaaaagggaca

SEQ ID NO: 3743510 - RNA, 20 nt, Human
guacaaauauaagaauaaaa

SEQ ID NO: 3743511 - RNA, 23 nt, Human
guacaaauauaagaauaaaaugu

SEQ ID NO: 3743512 - RNA, 22 nt, Human
guacaaccuguucugcuuuccu

SEQ ID NO: 3743513 - RNA, 14 nt, Human
guacaacggaggcc

SEQ ID NO: 3743514 - RNA, 16 nt, Human
guacaauaaaaguaaa

SEQ ID NO: 3743515 - RNA, 22 nt, Human
guacaauaaguguuuuuguauu

SEQ ID NO: 3743516 - RNA, 16 nt, Human
guacaauaauucauau

SEQ ID NO: 3743517 - RNA, 13 nt, Human
guacaauauuuaa

SEQ ID NO: 3743518 - RNA, 16 nt, Human
guacaauauuuuaagc

SEQ ID NO: 3743519 - RNA, 20 nt, Human
guacaauauuuuaagcauua

SEQ ID NO: 3743520 - RNA, 22 nt, Human
guacaauauuuuaagcauuacu

SEQ ID NO: 3743521 - RNA, 14 nt, Human
guacaaucucaaau

SEQ ID NO: 3743522 - RNA, 22 nt, Human
guacaaugugacuuugaaaaua

SEQ ID NO: 3743523 - RNA, 13 nt, Human
guacaauguguuu

SEQ ID NO: 3743524 - RNA, 16 nt, Human
guacacacacauacac

SEQ ID NO: 3743525 - RNA, 15 nt, Human
guacacacuuuauuu

SEQ ID NO: 3743526 - RNA, 18 nt, Human
guacacccaugaaagaaa

SEQ ID NO: 3743527 - RNA, 14 nt, Human
guacacucugcugu

SEQ ID NO: 3743528 - RNA, 14 nt, Human
guacacugaauauu

SEQ ID NO: 3743529 - RNA, 17 nt, Human
guacacugaauuuuuau

SEQ ID NO: 3743530 - RNA, 16 nt, Human
guacacugacuugaga

SEQ ID NO: 3743531 - RNA, 21 nt, Human
guacacuguuucaaacuuuac

SEQ ID NO: 3743532 - RNA, 14 nt, Human
guacagaaagcugc

SEQ ID NO: 3743533 - RNA, 17 nt, Human
guacagaaucauugcuu

SEQ ID NO: 3743534 - RNA, 20 nt, Human
guacagaauucugcuaccuc

SEQ ID NO: 3743535 - RNA, 17 nt, Human
guacagaauuugaauua

SEQ ID NO: 3743536 - RNA, 17 nt, Human
guacagacauauuuaac

SEQ ID NO: 3743537 - RNA, 12 nt, Human
guacagagaagc

SEQ ID NO: 3743538 - RNA, 13 nt, Human
guacagagaagga

SEQ ID NO: 3743539 - RNA, 12 nt, Human
guacagagccca

SEQ ID NO: 3743540 - RNA, 20 nt, Human
guacagagccguaaaaacug

SEQ ID NO: 3743541 - RNA, 21 nt, Human
guacagaguguggacucuggu

SEQ ID NO: 3743542 - RNA, 13 nt, Human
guacagcugggcu

SEQ ID NO: 3743543 - RNA, 15 nt, Human
guacaggacauauau

SEQ ID NO: 3743544 - RNA, 14 nt, Human
gggggccaccugcc

SEQ ID NO: 3743545 - RNA, 14 nt, Human
gggggccaugagcu

SEQ ID NO: 3743546 - RNA, 15 nt, Human
gggggccaugagcuc

SEQ ID NO: 3743547 - RNA, 21 nt, Human
gggggccaugaggccucagug

SEQ ID NO: 3743548 - RNA, 19 nt, Human
gggggccccagucagccuc

SEQ ID NO: 3743549 - RNA, 15 nt, Human
gggggcggccuauga

SEQ ID NO: 3743550 - RNA, 16 nt, Human
gggggcucagcaaggc

SEQ ID NO: 3743551 - RNA, 20 nt, Human
gggggcucagcaaggccacc

SEQ ID NO: 3743552 - RNA, 14 nt, Human
gggggcugcuccca

SEQ ID NO: 3743553 - RNA, 15 nt, Human
gggggcugggcagag

SEQ ID NO: 3743554 - RNA, 19 nt, Human
gggggcuggugccagccuu

SEQ ID NO: 3743555 - RNA, 22 nt, Human
gggggcuucauacacaugagau

SEQ ID NO: 3743556 - RNA, 12 nt, Human
gggggcuuucug

SEQ ID NO: 3743557 - RNA, 16 nt, Human
ggggggauguggauca

SEQ ID NO: 3743558 - RNA, 11 nt, Human
ggggggcagag

SEQ ID NO: 3743559 - RNA, 20 nt, Human
ggggguagagcugauccaga

SEQ ID NO: 3743560 - RNA, 16 nt, Human
ggggguccacccagca

SEQ ID NO: 3743561 - RNA, 22 nt, Human
gggggucccagugggaggggca

SEQ ID NO: 3743562 - RNA, 18 nt, Human
gggggucucacccaugca

SEQ ID NO: 3743563 - RNA, 12 nt, Human
gggggucuggcu

SEQ ID NO: 3743564 - RNA, 16 nt, Human
gggggucuggcuggug

SEQ ID NO: 3743565 - RNA, 20 nt, Human
ggggguggccaggccgggaa

SEQ ID NO: 3743566 - RNA, 23 nt, Human
ggggguggccgcugaguggcagg

SEQ ID NO: 3743567 - RNA, 18 nt, Human
ggggguuuuuacuccagu

SEQ ID NO: 3743568 - RNA, 24 nt, Human
ggggguuuuuacuccaguggugaa

SEQ ID NO: 3743569 - RNA, 16 nt, Human
gggguaaggugcaucu

SEQ ID NO: 3743570 - RNA, 18 nt, Human
gggguagcuagaggaacc

SEQ ID NO: 3743571 - RNA, 19 nt, Human
gggguagcuagaggaacca

SEQ ID NO: 3743572 - RNA, 22 nt, Human
gggguauuuaccacagcagcug

SEQ ID NO: 3743573 - RNA, 18 nt, Human
ggggucaugcccuccucu

SEQ ID NO: 3743574 - RNA, 14 nt, Human
ggggucccagcagc

SEQ ID NO: 3743575 - RNA, 23 nt, Human
gggguccccaucaucccagcugc

SEQ ID NO: 3743576 - RNA, 16 nt, Human
ggggucccuagcagcc

SEQ ID NO: 3743577 - RNA, 15 nt, Human
gggguccuguggcag

SEQ ID NO: 3743578 - RNA, 13 nt, Human
ggggucucccugg

SEQ ID NO: 3743579 - RNA, 21 nt, Human
ggggucucccuggcucccucc

SEQ ID NO: 3743580 - RNA, 16 nt, Human
ggggucuggcuggugu

SEQ ID NO: 3743581 - RNA, 23 nt, Human
ggggucugggaggaauggacaga

SEQ ID NO: 3743582 - RNA, 15 nt, Human
ggggucuguaaaauc

SEQ ID NO: 3743583 - RNA, 22 nt, Human
ggggucuuugugagagugagcu

SEQ ID NO: 3743584 - RNA, 18 nt, Human
ggggugaccuccggccag

SEQ ID NO: 3743585 - RNA, 18 nt, Human
ggggugacggcccucauc

SEQ ID NO: 3743586 - RNA, 17 nt, Human
ggggugauuucagagag

SEQ ID NO: 3743587 - RNA, 18 nt, Human
ggggugcagggauguggg

SEQ ID NO: 3743588 - RNA, 23 nt, Human
ggggugcccccuccucucccauc

SEQ ID NO: 3743589 - RNA, 13 nt, Human
ggggugccgccug

SEQ ID NO: 3743590 - RNA, 14 nt, Human
ggggugccgccugc

SEQ ID NO: 3743591 - RNA, 22 nt, Human
ggggugcggcggucccagcucc

SEQ ID NO: 3743592 - RNA, 20 nt, Human
ggggugcuuuuauagaggcu

SEQ ID NO: 3743593 - RNA, 18 nt, Human
gggguggcugcagccuca

SEQ ID NO: 3743594 - RNA, 15 nt, Human
ggggugggagagguc

SEQ ID NO: 3743595 - RNA, 13 nt, Human
ggggugggccagg

SEQ ID NO: 3743596 - RNA, 14 nt, Human
ggggugggccucug

SEQ ID NO: 3743597 - RNA, 20 nt, Human
gggguggggggggugcuggg

SEQ ID NO: 3743598 - RNA, 19 nt, Human
gggguguggcuccuuccca

SEQ ID NO: 3743599 - RNA, 13 nt, Human
gggguuacaaacu

SEQ ID NO: 3743600 - RNA, 15 nt, Human
gggguuaucucugug

SEQ ID NO: 3743601 - RNA, 21 nt, Human
gggguuccguguccaccccca

SEQ ID NO: 3743602 - RNA, 15 nt, Human
gggguuguguuguca

SEQ ID NO: 3743603 - RNA, 21 nt, Human
ggguaagggauuucuuagggg

SEQ ID NO: 3743604 - RNA, 13 nt, Human
ggguaaggugccu

SEQ ID NO: 3743605 - RNA, 17 nt, Human
ggguaaucccugcuuuu

SEQ ID NO: 3743606 - RNA, 13 nt, Human
ggguacagcuggg

SEQ ID NO: 3743607 - RNA, 15 nt, Human
ggguacauuuauaau

SEQ ID NO: 3743608 - RNA, 19 nt, Human
ggguacauuucccugugcu

SEQ ID NO: 3743609 - RNA, 23 nt, Human
ggguagagcggagaaaggaaggg

SEQ ID NO: 3743610 - RNA, 14 nt, Human
ggguagagcugauc

SEQ ID NO: 3743611 - RNA, 15 nt, Human
ggguagcagcuggac

SEQ ID NO: 3743612 - RNA, 22 nt, Human
ggguagcagcuggacuacccac

SEQ ID NO: 3743613 - RNA, 12 nt, Human
ggguagcccgcc

SEQ ID NO: 3743614 - RNA, 16 nt, Human
ggguagcgggggaggg

SEQ ID NO: 3743615 - RNA, 20 nt, Human
ggguaggcaggauuggggaa

SEQ ID NO: 3743616 - RNA, 24 nt, Human
ggguaggggaagaagagcuaucag

SEQ ID NO: 3743617 - RNA, 22 nt, Human
ggguaggguaaaucaguaagag

SEQ ID NO: 3743618 - RNA, 23 nt, Human
ggguauaaaacuuuccucgccug

SEQ ID NO: 3743619 - RNA, 20 nt, Human
ggguaucaggugcugccauc

SEQ ID NO: 3743620 - RNA, 20 nt, Human
ggguauccaaguuggacugg

SEQ ID NO: 3743621 - RNA, 21 nt, Human
ggguauccaaguuggacuggg

SEQ ID NO: 3743622 - RNA, 13 nt, Human
ggguauggcguaa

SEQ ID NO: 3743623 - RNA, 23 nt, Human
gggucaaguuauuaauuucuuca

SEQ ID NO: 3743624 - RNA, 17 nt, Human
gggucacccucuccagc

SEQ ID NO: 3743625 - RNA, 19 nt, Human
gggucagacgccugaggaa

SEQ ID NO: 3743626 - RNA, 13 nt, Human
gggucagccaggg

SEQ ID NO: 3743627 - RNA, 19 nt, Human
gggucagccagggccaggg

SEQ ID NO: 3743628 - RNA, 14 nt, Human
gggucaggagaggg

SEQ ID NO: 3743629 - RNA, 15 nt, Human
gggucaggccacggc

SEQ ID NO: 3743630 - RNA, 17 nt, Human
gggucaggccacggcag

SEQ ID NO: 3743631 - RNA, 21 nt, Human
gggucaggccacggcagccua

SEQ ID NO: 3743632 - RNA, 18 nt, Human
gggucaggccgggcagag

SEQ ID NO: 3743633 - RNA, 21 nt, Human
gggucaggccgggcagagcac

SEQ ID NO: 3743634 - RNA, 18 nt, Human
gggucagggaccaaggac

SEQ ID NO: 3743635 - RNA, 18 nt, Human
gggucagguugacaggag

SEQ ID NO: 3743636 - RNA, 14 nt, Human
gggucauagaaauu

SEQ ID NO: 3743637 - RNA, 16 nt, Human
gggucaugcccuccuc

SEQ ID NO: 3743638 - RNA, 20 nt, Human
ggguccacccagcaaagagu

SEQ ID NO: 3743639 - RNA, 17 nt, Human
ggguccagaaggagaca

SEQ ID NO: 3743640 - RNA, 12 nt, Human
ggguccaggagg

SEQ ID NO: 3743641 - RNA, 12 nt, Human
ggguccaugggc

SEQ ID NO: 3743642 - RNA, 13 nt, Human
gggucccaagcug

SEQ ID NO: 3743643 - RNA, 17 nt, Human
gggucccaagcugggcc

SEQ ID NO: 3743644 - RNA, 14 nt, Human
gggucccaguggga

SEQ ID NO: 3743645 - RNA, 16 nt, Human
ggguccccagcccuuc

SEQ ID NO: 3743646 - RNA, 17 nt, Human
gggucccuagcagccca

SEQ ID NO: 3743647 - RNA, 20 nt, Human
ggguccuccuccagggacag

SEQ ID NO: 3743648 - RNA, 15 nt, Human
ggguccucugagacu

SEQ ID NO: 3743649 - RNA, 13 nt, Human
ggguccucuucug

SEQ ID NO: 3743650 - RNA, 21 nt, Human
ggguccugaggccugcagcac

SEQ ID NO: 3743651 - RNA, 19 nt, Human
ggguccugcagccugcagg

SEQ ID NO: 3743652 - RNA, 13 nt, Human
ggguccuggccau

SEQ ID NO: 3743653 - RNA, 16 nt, Human
ggguccuggccauccc

SEQ ID NO: 3743654 - RNA, 18 nt, Human
ggguccuguggcaggcag

SEQ ID NO: 3743655 - RNA, 19 nt, Human
ggguccuguggcaggcagc

SEQ ID NO: 3743656 - RNA, 19 nt, Human
ggguccuuuugacacugcu

SEQ ID NO: 3743657 - RNA, 16 nt, Human
gggucgaaagcucuag

SEQ ID NO: 3743658 - RNA, 20 nt, Human
gggucggcugaccaugcuca

SEQ ID NO: 3743659 - RNA, 20 nt, Human
gggucgucaccaccucuccu

SEQ ID NO: 3743660 - RNA, 14 nt, Human
gggucuagggagag

SEQ ID NO: 3743661 - RNA, 14 nt, Human
gggucucacucugu

SEQ ID NO: 3743662 - RNA, 15 nt, Human
gggucucccucuccu

SEQ ID NO: 3743663 - RNA, 20 nt, Human
gggucucccucuccugccua

SEQ ID NO: 3743664 - RNA, 16 nt, Human
gggucucccuggcucc

SEQ ID NO: 3743665 - RNA, 22 nt, Human
gggucucccuggcucccuccuc

SEQ ID NO: 3743666 - RNA, 17 nt, Human
gggucuccucaggacca

SEQ ID NO: 3743667 - RNA, 24 nt, Human
gggucucucacagacaggaccccu

SEQ ID NO: 3743668 - RNA, 18 nt, Human
gggucucugcugccgccc

SEQ ID NO: 3743669 - RNA, 17 nt, Human
gggucugagcuccagcu

SEQ ID NO: 3743670 - RNA, 21 nt, Human
gggucugcucccaaggggccu

SEQ ID NO: 3743671 - RNA, 20 nt, Human
gggucugcucuuucucugcc

SEQ ID NO: 3743672 - RNA, 21 nt, Human
gggucugcucuuucucugcca

SEQ ID NO: 3743673 - RNA, 22 nt, Human
gggucugcucuuucucugccag

SEQ ID NO: 3743674 - RNA, 20 nt, Human
gggucuggaguugaucugga

SEQ ID NO: 3743675 - RNA, 21 nt, Human
gggucuggucuccucagccuc

SEQ ID NO: 3743676 - RNA, 17 nt, Human
gggucuguaaaaucuuu

SEQ ID NO: 3743677 - RNA, 20 nt, Human
gggucuguaaaaucuuucuu

SEQ ID NO: 3743678 - RNA, 15 nt, Human
gggucugugucucuu

SEQ ID NO: 3743679 - RNA, 15 nt, Human
gggucugugugaaug

SEQ ID NO: 3743680 - RNA, 24 nt, Human
gggucugugugaaugugggcacug

SEQ ID NO: 3743681 - RNA, 21 nt, Human
gggucuucagcauucccuccc

SEQ ID NO: 3743682 - RNA, 11 nt, Human
gggucuuccua

SEQ ID NO: 3743683 - RNA, 21 nt, Human
gggucuuuucaucugggaaag

SEQ ID NO: 3743684 - RNA, 19 nt, Human
gggugaagagaaccgagca

SEQ ID NO: 3743685 - RNA, 13 nt, Human
gggugaagggaga

SEQ ID NO: 3743686 - RNA, 13 nt, Human
gggugacaagaua

SEQ ID NO: 3743687 - RNA, 23 nt, Human
gggugacauguguuggcagccuc

SEQ ID NO: 3743688 - RNA, 18 nt, Human
gggugacggcccucaucu

SEQ ID NO: 3743689 - RNA, 17 nt, Human
gggugagaacaaccaaa

SEQ ID NO: 3743690 - RNA, 15 nt, Human
gggugagaugcugga

SEQ ID NO: 3743691 - RNA, 18 nt, Human
gggugaggaccacuccug

SEQ ID NO: 3743692 - RNA, 14 nt, Human
gggugaggauaaca

SEQ ID NO: 3743693 - RNA, 17 nt, Human
gggugagggucccaugu

SEQ ID NO: 3743694 - RNA, 13 nt, Human
gggugcacaggag

SEQ ID NO: 3743695 - RNA, 14 nt, Human
gggugcagaggcug

SEQ ID NO: 3743696 - RNA, 17 nt, Human
gggugcagcaucuggaa

SEQ ID NO: 3743697 - RNA, 21 nt, Human
gggugcgaccccaucugccca

SEQ ID NO: 3743698 - RNA, 22 nt, Human
gggugcgaccccaucugcccag

SEQ ID NO: 3743699 - RNA, 13 nt, Human
gggugcucagaau

SEQ ID NO: 3743700 - RNA, 18 nt, Human
gggugcucagaauaaggc

SEQ ID NO: 3743701 - RNA, 20 nt, Human
gggugcugcuaauucuuugc

SEQ ID NO: 3743702 - RNA, 21 nt, Human
gggugcugcuucccucugccu

SEQ ID NO: 3743703 - RNA, 20 nt, Human
gggugcuuuuauagaggcua

SEQ ID NO: 3743704 - RNA, 22 nt, Human
gggugcuuuuauagaggcuagc

SEQ ID NO: 3743705 - RNA, 12 nt, Human
ggguggagaagc

SEQ ID NO: 3743706 - RNA, 13 nt, Human
ggguggagaagcc

SEQ ID NO: 3743707 - RNA, 14 nt, Human
ggguggagaagcca

SEQ ID NO: 3743708 - RNA, 16 nt, Human
ggguggagaagccauu

SEQ ID NO: 3743709 - RNA, 16 nt, Human
ggguggaggcuuccug

SEQ ID NO: 3743710 - RNA, 21 nt, Human
ggguggauauaaauauauaua

SEQ ID NO: 3743711 - RNA, 14 nt, Human
ggguggcacugcca

SEQ ID NO: 3743712 - RNA, 12 nt, Human
ggguggccaggc

SEQ ID NO: 3743713 - RNA, 14 nt, Human
ggguggccaggccg

SEQ ID NO: 3743714 - RNA, 18 nt, Human
ggguggcccauccccccu

SEQ ID NO: 3743715 - RNA, 19 nt, Human
ggguggcccauccccccuc

SEQ ID NO: 3743716 - RNA, 17 nt, Human
ggguggccgcugagugg

SEQ ID NO: 3743717 - RNA, 23 nt, Human
ggguggccuaagaguugagcucu

SEQ ID NO: 3743718 - RNA, 18 nt, Human
ggguggcgcuagaggcca

SEQ ID NO: 3743719 - RNA, 16 nt, Human
ggguggcuagucagag

SEQ ID NO: 3743720 - RNA, 17 nt, Human
ggguggcugcagccuca

SEQ ID NO: 3743721 - RNA, 19 nt, Human
gggugggagagcccagcca

SEQ ID NO: 3743722 - RNA, 15 nt, Human
gggugggcaggaaaa

SEQ ID NO: 3743723 - RNA, 15 nt, Human
gggugggcaguuuuu

SEQ ID NO: 3743724 - RNA, 14 nt, Human
gggugggccaggcu

SEQ ID NO: 3743725 - RNA, 11 nt, Human
gggugggccuc

SEQ ID NO: 3743726 - RNA, 13 nt, Human
gggugggccucgg

SEQ ID NO: 3743727 - RNA, 23 nt, Human
ggguggggacguccugccaccug

SEQ ID NO: 3743728 - RNA, 12 nt, Human
ggguggggcugc

SEQ ID NO: 3743729 - RNA, 14 nt, Human
ggguggggcugcuc

SEQ ID NO: 3743730 - RNA, 14 nt, Human
gggugggggcagca

SEQ ID NO: 3743731 - RNA, 21 nt, Human
gggugggggccaccugccugc

SEQ ID NO: 3743732 - RNA, 19 nt, Human
ggguggggggcuucauaca

SEQ ID NO: 3743733 - RNA, 15 nt, Human
ggguggggggggugc

SEQ ID NO: 3743734 - RNA, 16 nt, Human
gggugggguagggcug

SEQ ID NO: 3743735 - RNA, 16 nt, Human
gggugggguggcugca

SEQ ID NO: 3743736 - RNA, 22 nt, Human
ggguggucucuucuuggggccc

SEQ ID NO: 3743737 - RNA, 16 nt, Human
ggguggucugcaggca

SEQ ID NO: 3743738 - RNA, 12 nt, Human
ggguggugcugg

SEQ ID NO: 3743739 - RNA, 13 nt, Human
ggguggugucaga

SEQ ID NO: 3743740 - RNA, 18 nt, Human
gggugucauuucauucca

SEQ ID NO: 3743741 - RNA, 13 nt, Human
gggugucccagac

SEQ ID NO: 3743742 - RNA, 18 nt, Human
gggugucugucuuccuuu

SEQ ID NO: 3743743 - RNA, 15 nt, Human
gggugucuugggcag

SEQ ID NO: 3743744 - RNA, 20 nt, Human
gggugucuuuuuuuggugau

SEQ ID NO: 3743745 - RNA, 21 nt, Human
gggugugcaaugucugaguga

SEQ ID NO: 3743746 - RNA, 13 nt, Human
gggugugcuggga

SEQ ID NO: 3743747 - RNA, 17 nt, Human
ggguguggcgcagcaua

SEQ ID NO: 3743748 - RNA, 11 nt, Human
ggguguggguu

SEQ ID NO: 3743749 - RNA, 17 nt, Human
ggguuaaaucaaagaua

SEQ ID NO: 3743750 - RNA, 16 nt, Human
ggguuaagaagacuuu

SEQ ID NO: 3743751 - RNA, 17 nt, Human
ggguuagacugccagcu

SEQ ID NO: 3743752 - RNA, 13 nt, Human
ggguuaucucugu

SEQ ID NO: 3743753 - RNA, 14 nt, Human
ggguuaugaauauu

SEQ ID NO: 3743754 - RNA, 19 nt, Human
ggguuauguaucagaagag

SEQ ID NO: 3743755 - RNA, 23 nt, Human
ggguucaagcgauucuucugcuu

SEQ ID NO: 3743756 - RNA, 19 nt, Human
ggguucagaaaugcugccu

SEQ ID NO: 3743757 - RNA, 20 nt, Human
ggguucagaaaugcugccug

SEQ ID NO: 3743758 - RNA, 19 nt, Human
ggguucagagacucagggc

SEQ ID NO: 3743759 - RNA, 13 nt, Human
ggguucagccccu

SEQ ID NO: 3743760 - RNA, 17 nt, Human
ggguucagccccuccuc

SEQ ID NO: 3743761 - RNA, 22 nt, Human
ggguuccagcaauucuccugcc

SEQ ID NO: 3743762 - RNA, 21 nt, Human
ggguucccuuuccuuccaucc

SEQ ID NO: 3743763 - RNA, 18 nt, Human
ggguuccuccccuccagc

SEQ ID NO: 3743764 - RNA, 19 nt, Human
ggguuccuuccucugagcc

SEQ ID NO: 3743765 - RNA, 13 nt, Human
ggguuccuucugg

SEQ ID NO: 3743766 - RNA, 18 nt, Human
ggguucguggaaagggug

SEQ ID NO: 3743767 - RNA, 20 nt, Human
ggguucugccugccagcugc

SEQ ID NO: 3743768 - RNA, 15 nt, Human
ggguucugcugggac

SEQ ID NO: 3743769 - RNA, 14 nt, Human
ggguucuuucuucc

SEQ ID NO: 3743770 - RNA, 16 nt, Human
ggguucuuucuuccuc

SEQ ID NO: 3743771 - RNA, 17 nt, Human
ggguucuuucuuccucu

SEQ ID NO: 3743772 - RNA, 12 nt, Human
ggguugagggga

SEQ ID NO: 3743773 - RNA, 17 nt, Human
ggguugauuaaggcagu

SEQ ID NO: 3743774 - RNA, 19 nt, Human
ggguugcaguggagaggga

SEQ ID NO: 3743775 - RNA, 20 nt, Human
ggguugcguccugacggcgc

SEQ ID NO: 3743776 - RNA, 14 nt, Human
ggguugcuggagcc

SEQ ID NO: 3743777 - RNA, 15 nt, Human
ggguugcuggagccu

SEQ ID NO: 3743778 - RNA, 15 nt, Human
ggguugugugucugu

SEQ ID NO: 3743779 - RNA, 15 nt, Human
ggguuuauucacuga

SEQ ID NO: 3743780 - RNA, 19 nt, Human
ggguuuggaccccagcugg

SEQ ID NO: 3743781 - RNA, 21 nt, Human
ggguuuggaccccagcuggga

SEQ ID NO: 3743782 - RNA, 17 nt, Human
ggguuuuccacccugga

SEQ ID NO: 3743783 - RNA, 20 nt, Human
ggguuuugccauguuggcca

SEQ ID NO: 3743784 - RNA, 23 nt, Human
ggguuuugccauguuggccaggc

SEQ ID NO: 3743785 - RNA, 22 nt, Human
ggguuuuuuaguugaauuuuuu

SEQ ID NO: 3743786 - RNA, 22 nt, Human
gguaaaaaaaaauuacuguuua

SEQ ID NO: 3743787 - RNA, 16 nt, Human
gguaaaaaauuuauaa

SEQ ID NO: 3743788 - RNA, 13 nt, Human
gguaaaacacuug

SEQ ID NO: 3743789 - RNA, 18 nt, Human
gguaaaacagggccacau

SEQ ID NO: 3743790 - RNA, 13 nt, Human
gguaaaaugccau

SEQ ID NO: 3743791 - RNA, 17 nt, Human
gguaaaauguauuuuuc

SEQ ID NO: 3743792 - RNA, 13 nt, Human
gguaaaauuuugu

SEQ ID NO: 3743793 - RNA, 15 nt, Human
gguaaauaaaaagaa

SEQ ID NO: 3743794 - RNA, 20 nt, Human
gguaaauaccaaguauuuau

SEQ ID NO: 3743795 - RNA, 22 nt, Human
gguaaaucagacuaugaaguuu

SEQ ID NO: 3743796 - RNA, 13 nt, Human
gguaaaugaugug

SEQ ID NO: 3743797 - RNA, 13 nt, Human
gguaaaugccaca

SEQ ID NO: 3743798 - RNA, 20 nt, Human
gguaaaugccacacaccuuu

SEQ ID NO: 3743799 - RNA, 13 nt, Human
gguaaauguuucu

SEQ ID NO: 3743800 - RNA, 22 nt, Human
gguaaauuuccccaacagugug

SEQ ID NO: 3743801 - RNA, 18 nt, Human
gguaacagaacagcuuca

SEQ ID NO: 3743802 - RNA, 14 nt, Human
gguaacaggcagau

SEQ ID NO: 3743803 - RNA, 16 nt, Human
gguaacucuucuugau

SEQ ID NO: 3743804 - RNA, 23 nt, Human
gguaagaaguuuuaaaaagccag

SEQ ID NO: 3743805 - RNA, 17 nt, Human
gguaagagaauguuaua

SEQ ID NO: 3743806 - RNA, 23 nt, Human
gguaagagacagaauguaucugu

SEQ ID NO: 3743807 - RNA, 17 nt, Human
gguaagcaacauggcuu

SEQ ID NO: 3743808 - RNA, 19 nt, Human
gguaagcaacauggcuuug

SEQ ID NO: 3743809 - RNA, 18 nt, Human
gguaagcuuccaggaaaa

SEQ ID NO: 3743810 - RNA, 22 nt, Human
gguaaucaaugaauauugaagu

SEQ ID NO: 3743811 - RNA, 15 nt, Human
gguaaucauauuaga

SEQ ID NO: 3743812 - RNA, 20 nt, Human
gguaauccaggcacagcuga

SEQ ID NO: 3743813 - RNA, 14 nt, Human
gguaaucgaccugc

SEQ ID NO: 3743814 - RNA, 20 nt, Human
gguaaucuugcucugcuuga

SEQ ID NO: 3743815 - RNA, 20 nt, Human
gguaauuuuuacccuaaugu

SEQ ID NO: 3743816 - RNA, 19 nt, Human
gguacacaacuaguuuugu

SEQ ID NO: 3743817 - RNA, 15 nt, Human
gguacacuugugaau

SEQ ID NO: 3743818 - RNA, 10 nt, Human
gguacagaga

SEQ ID NO: 3743819 - RNA, 13 nt, Human
gguacagagaagc

SEQ ID NO: 3743820 - RNA, 15 nt, Human
gguacagagaaggaa

SEQ ID NO: 3743821 - RNA, 18 nt, Human
gguacaugguguuugugg

SEQ ID NO: 3743822 - RNA, 18 nt, Human
gguacauuucccugugcu

SEQ ID NO: 3743823 - RNA, 16 nt, Human
gguacauuuuucaacu

SEQ ID NO: 3743824 - RNA, 17 nt, Human
gguacauuuuucaacuu

SEQ ID NO: 3743825 - RNA, 14 nt, Human
gguaccagcugcgc

SEQ ID NO: 3743826 - RNA, 11 nt, Human
gguacccacug

SEQ ID NO: 3743827 - RNA, 13 nt, Human
gguacccacugcu

SEQ ID NO: 3743828 - RNA, 20 nt, Human
gguacccagccaucugccca

SEQ ID NO: 3743829 - RNA, 17 nt, Human
gguacccggggcccagg

SEQ ID NO: 3743830 - RNA, 13 nt, Human
gguacccugggug

SEQ ID NO: 3743831 - RNA, 11 nt, Human
gguaccuugca

SEQ ID NO: 3743832 - RNA, 12 nt, Human
gguaccuugcac

SEQ ID NO: 3743833 - RNA, 15 nt, Human
gguacgcacagacag

SEQ ID NO: 3743834 - RNA, 21 nt, Human
gguacuguaugaucaaauguu

SEQ ID NO: 3743835 - RNA, 21 nt, Human
gguacuuagaguuucuguuug

SEQ ID NO: 3743836 - RNA, 16 nt, Human
gguacuuguggacaca

SEQ ID NO: 3743837 - RNA, 21 nt, Human
gguacuuguggacacagcucu

SEQ ID NO: 3743838 - RNA, 22 nt, Human
gguacuuguggacacagcucuu

SEQ ID NO: 3743839 - RNA, 22 nt, Human
gguacuuuuaugauguauauuu

SEQ ID NO: 3743840 - RNA, 13 nt, Human
gguagaaaaacau

SEQ ID NO: 3743841 - RNA, 23 nt, Human
gguagaaauaucugaaaauguau

SEQ ID NO: 3743842 - RNA, 11 nt, Human
gguagaacaca

SEQ ID NO: 3743843 - RNA, 23 nt, Human
gguagaacgccagggaccccaga

SEQ ID NO: 3743844 - RNA, 17 nt, Human
guacaggacauauauuu

SEQ ID NO: 3743845 - RNA, 23 nt, Human
guacaggacauauauuuuuuaaa

SEQ ID NO: 3743846 - RNA, 13 nt, Human
guacaggcuggcg

SEQ ID NO: 3743847 - RNA, 15 nt, Human
guacagguacuuugu

SEQ ID NO: 3743848 - RNA, 16 nt, Human
guacagguacuuuguc

SEQ ID NO: 3743849 - RNA, 21 nt, Human
guacaguauggggguuguaaa

SEQ ID NO: 3743850 - RNA, 22 nt, Human
guacaguauggggguuguaaau

SEQ ID NO: 3743851 - RNA, 21 nt, Human
guacagucugucuucuguaua

SEQ ID NO: 3743852 - RNA, 13 nt, Human
guacagucuugua

SEQ ID NO: 3743853 - RNA, 15 nt, Human
guacagugucuuuuu

SEQ ID NO: 3743854 - RNA, 20 nt, Human
guacagugucuuuuuuugua

SEQ ID NO: 3743855 - RNA, 21 nt, Human
guacagugucuuuuuuuguau

SEQ ID NO: 3743856 - RNA, 17 nt, Human
gaccacaccucccugaa

SEQ ID NO: 3743857 - RNA, 20 nt, Human
gaccacaccucccugaacca

SEQ ID NO: 3743858 - RNA, 16 nt, Human
gaccacaccugccucu

SEQ ID NO: 3743859 - RNA, 16 nt, Human
gaccacacuccagcug

SEQ ID NO: 3743860 - RNA, 17 nt, Human
gaccacacuuccugucc

SEQ ID NO: 3743861 - RNA, 21 nt, Human
gaccacagcaaggcaccugca

SEQ ID NO: 3743862 - RNA, 21 nt, Human
gaccacaggguucaaaauguc

SEQ ID NO: 3743863 - RNA, 18 nt, Human
gaccacauuuuauauuua

SEQ ID NO: 3743864 - RNA, 12 nt, Human
gaccaccaagcc

SEQ ID NO: 3743865 - RNA, 15 nt, Human
gaccaccaagccuug

SEQ ID NO: 3743866 - RNA, 13 nt, Human
gaccaccagggca

SEQ ID NO: 3743867 - RNA, 22 nt, Human
gaccaccagggcaucucugggc

SEQ ID NO: 3743868 - RNA, 18 nt, Human
gaccaccccgccugcccu

SEQ ID NO: 3743869 - RNA, 20 nt, Human
gaccaccccgccugcccuca

SEQ ID NO: 3743870 - RNA, 20 nt, Human
gaccaccccugccuccaccc

SEQ ID NO: 3743871 - RNA, 22 nt, Human
gaccaccccugccuccacccuc

SEQ ID NO: 3743872 - RNA, 19 nt, Human
gaccacccucacuggcucu

SEQ ID NO: 3743873 - RNA, 14 nt, Human
gaccacccuccccu

SEQ ID NO: 3743874 - RNA, 15 nt, Human
gaccacccuccccuc

SEQ ID NO: 3743875 - RNA, 16 nt, Human
gaccacccuccccucu

SEQ ID NO: 3743876 - RNA, 19 nt, Human
gaccacccuccccucucuu

SEQ ID NO: 3743877 - RNA, 14 nt, Human
gaccacccugagcc

SEQ ID NO: 3743878 - RNA, 14 nt, Human
gaccaccugcccaa

SEQ ID NO: 3743879 - RNA, 21 nt, Human
gaccacgcccguccugccugu

SEQ ID NO: 3743880 - RNA, 21 nt, Human
gaccacgcuuucuagcuguug

SEQ ID NO: 3743881 - RNA, 21 nt, Human
gaccacggacguuuccaucag

SEQ ID NO: 3743882 - RNA, 14 nt, Human
gaccacguuucuaa

SEQ ID NO: 3743883 - RNA, 13 nt, Human
gaccacucagaga

SEQ ID NO: 3743884 - RNA, 19 nt, Human
gaccacucagagacaugca

SEQ ID NO: 3743885 - RNA, 19 nt, Human
guagcccccuggccucugu

SEQ ID NO: 3743886 - RNA, 17 nt, Human
guagcccucccacuuug

SEQ ID NO: 3743887 - RNA, 14 nt, Human
guagcccuuucugu

SEQ ID NO: 3743888 - RNA, 19 nt, Human
guagccgagagccugcucc

SEQ ID NO: 3743889 - RNA, 14 nt, Human
guagccuuccucca

SEQ ID NO: 3743890 - RNA, 11 nt, Human
guagccuuuuu

SEQ ID NO: 3743891 - RNA, 23 nt, Human
guagcgggggaggguaggcagga

SEQ ID NO: 3743892 - RNA, 18 nt, Human
guagcguuuuuuaaaugu

SEQ ID NO: 3743893 - RNA, 16 nt, Human
guagcuaacuuuuauu

SEQ ID NO: 3743894 - RNA, 15 nt, Human
guagcuacagagaaa

SEQ ID NO: 3743895 - RNA, 17 nt, Human
guagcuagaggaaccaa

SEQ ID NO: 3743896 - RNA, 11 nt, Human
guagcucaggu

SEQ ID NO: 3743897 - RNA, 10 nt, Human
guagcuccuc

SEQ ID NO: 3743898 - RNA, 13 nt, Human
guagcuccucccc

SEQ ID NO: 3743899 - RNA, 19 nt, Human
guagcuccuccccuggagg

SEQ ID NO: 3743900 - RNA, 14 nt, Human
guagcugaaaugca

SEQ ID NO: 3743901 - RNA, 17 nt, Human
guagcugcaaaggacag

SEQ ID NO: 3743902 - RNA, 23 nt, Human
guagcugccacuugaacaaaauc

SEQ ID NO: 3743903 - RNA, 15 nt, Human
guagcugccccuggc

SEQ ID NO: 3743904 - RNA, 17 nt, Human
guagcuggauuacaggc

SEQ ID NO: 3743905 - RNA, 22 nt, Human
guagcugggaaagcauaaagcu

SEQ ID NO: 3743906 - RNA, 19 nt, Human
guagcugggacuacaggca

SEQ ID NO: 3743907 - RNA, 21 nt, Human
guagcugggauuacaggugug

SEQ ID NO: 3743908 - RNA, 22 nt, Human
guagcugggauuuuaaacuaga

SEQ ID NO: 3743909 - RNA, 24 nt, Human
guagcugggauuuuaaacuagaug

SEQ ID NO: 3743910 - RNA, 14 nt, Human
guagcugugaccug

SEQ ID NO: 3743911 - RNA, 17 nt, Human
guagcugugaccugcug

SEQ ID NO: 3743912 - RNA, 18 nt, Human
guagcugugaccugcuga

SEQ ID NO: 3743913 - RNA, 19 nt, Human
guagcugugaccugcugag

SEQ ID NO: 3743914 - RNA, 21 nt, Human
guagcugugaccugcugagcu

SEQ ID NO: 3743915 - RNA, 18 nt, Human
guagcuguggugaggugg

SEQ ID NO: 3743916 - RNA, 18 nt, Human
guagcuuaccugacacaa

SEQ ID NO: 3743917 - RNA, 16 nt, Human
guagcuucagucauua

SEQ ID NO: 3743918 - RNA, 11 nt, Human
guagcuuugca

SEQ ID NO: 3743919 - RNA, 14 nt, Human
guaggaaagggcaa

SEQ ID NO: 3743920 - RNA, 13 nt, Human
guaggaaaugugg

SEQ ID NO: 3743921 - RNA, 22 nt, Human
guaggaaccgugguaugucugc

SEQ ID NO: 3743922 - RNA, 16 nt, Human
guaggaacugcugggc

SEQ ID NO: 3743923 - RNA, 15 nt, Human
guaggaaguaggaag

SEQ ID NO: 3743924 - RNA, 17 nt, Human
guaggaauauuauauuu

SEQ ID NO: 3743925 - RNA, 20 nt, Human
guaggacaaggugcaggcag

SEQ ID NO: 3743926 - RNA, 19 nt, Human
guaggaccaagcaucuugg

SEQ ID NO: 3743927 - RNA, 19 nt, Human
guaggacuuuccuaaaugu

SEQ ID NO: 3743928 - RNA, 18 nt, Human
guaggagcccagcucuga

SEQ ID NO: 3743929 - RNA, 17 nt, Human
guaggagggugggaagg

SEQ ID NO: 3743930 - RNA, 15 nt, Human
guaggaugaaaagau

SEQ ID NO: 3743931 - RNA, 18 nt, Human
guaggcaagauggcacag

SEQ ID NO: 3743932 - RNA, 11 nt, Human
guaggcagaca

SEQ ID NO: 3743933 - RNA, 23 nt, Human
guaggcagacacagggacuugaa

SEQ ID NO: 3743934 - RNA, 22 nt, Human
guaggcagccugagagucuaga

SEQ ID NO: 3743935 - RNA, 17 nt, Human
guaggcaugagggauca

SEQ ID NO: 3743936 - RNA, 23 nt, Human
guaggcaugagggaucacagggc

SEQ ID NO: 3743937 - RNA, 14 nt, Human
guaggcauuuccua

SEQ ID NO: 3743938 - RNA, 15 nt, Human
guagggaggcagccu

SEQ ID NO: 3743939 - RNA, 13 nt, Human
guagggagggcgg

SEQ ID NO: 3743940 - RNA, 16 nt, Human
guagggcgggaggaug

SEQ ID NO: 3743941 - RNA, 12 nt, Human
guagggcugacu

SEQ ID NO: 3743942 - RNA, 20 nt, Human
guaggggccccucucagccc

SEQ ID NO: 3743943 - RNA, 13 nt, Human
guaggggcuggga

SEQ ID NO: 3743944 - RNA, 17 nt, Human
guaggggcugggaacag

SEQ ID NO: 3743945 - RNA, 18 nt, Human
guagggguaccacugaau

SEQ ID NO: 3743946 - RNA, 15 nt, Human
guagggguggcccga

SEQ ID NO: 3743947 - RNA, 21 nt, Human
guagggucaggccacggcagc

SEQ ID NO: 3743948 - RNA, 22 nt, Human
guagggucaggccacggcagcc

SEQ ID NO: 3743949 - RNA, 15 nt, Human
guagggugggagugg

SEQ ID NO: 3743950 - RNA, 17 nt, Human
guagggugggccuucag

SEQ ID NO: 3743951 - RNA, 16 nt, Human
guaggguuauaauaau

SEQ ID NO: 3743952 - RNA, 22 nt, Human
guagguaaaauguauuuuucua

SEQ ID NO: 3743953 - RNA, 20 nt, Human
guagguacuuuuugugaaga

SEQ ID NO: 3743954 - RNA, 19 nt, Human
guagguugcacacuuuggu

SEQ ID NO: 3743955 - RNA, 15 nt, Human
guaguaaauaaugcu

SEQ ID NO: 3743956 - RNA, 15 nt, Human
guaguaacacuaaua

SEQ ID NO: 3743957 - RNA, 19 nt, Human
guaguacuccuuaagaaca

SEQ ID NO: 3743958 - RNA, 20 nt, Human
guaguacuccuuaagaacac

SEQ ID NO: 3743959 - RNA, 17 nt, Human
guaguacuucuucugua

SEQ ID NO: 3743960 - RNA, 22 nt, Human
guaguacuucuucuguaauauu

SEQ ID NO: 3743961 - RNA, 21 nt, Human
guaguagcccuuucugugugc

SEQ ID NO: 3743962 - RNA, 17 nt, Human
guaguauggccuguguc

SEQ ID NO: 3743963 - RNA, 19 nt, Human
guaguauuuuuuguauaau

SEQ ID NO: 3743964 - RNA, 23 nt, Human
guaguauuuuuuguauaauugga

SEQ ID NO: 3743965 - RNA, 17 nt, Human
guagucaagauuguguu

SEQ ID NO: 3743966 - RNA, 14 nt, Human
guagucaggugccu

SEQ ID NO: 3743967 - RNA, 18 nt, Human
guagucuaaccaaaugca

SEQ ID NO: 3743968 - RNA, 20 nt, Human
guagucucacugcuugaacu

SEQ ID NO: 3743969 - RNA, 18 nt, Human
guagucucauuacuuuug

SEQ ID NO: 3743970 - RNA, 16 nt, Human
guagucuugaugacca

SEQ ID NO: 3743971 - RNA, 22 nt, Human
guagugaaauaauagaaugagc

SEQ ID NO: 3743972 - RNA, 20 nt, Human
guaguguccauuuugugaag

SEQ ID NO: 3743973 - RNA, 14 nt, Human
guaguguuggagaa

SEQ ID NO: 3743974 - RNA, 17 nt, Human
guaguguuggagaagaa

SEQ ID NO: 3743975 - RNA, 20 nt, Human
guaguguuggagaagaacug

SEQ ID NO: 3743976 - RNA, 23 nt, Human
guaguuaaaaaaaaaaaaaggaa

SEQ ID NO: 3743977 - RNA, 20 nt, Human
guaguuaggaaauaaaaccu

SEQ ID NO: 3743978 - RNA, 13 nt, Human
guaguuaguagca

SEQ ID NO: 3743979 - RNA, 15 nt, Human
guaguuaucauguua

SEQ ID NO: 3743980 - RNA, 19 nt, Human
guaguucaagaaaugaaga

SEQ ID NO: 3743981 - RNA, 15 nt, Human
guaguucauguaaau

SEQ ID NO: 3743982 - RNA, 17 nt, Human
guaguucccugaaaacc

SEQ ID NO: 3743983 - RNA, 23 nt, Human
guaguucccugaaaacccagaga

SEQ ID NO: 3743984 - RNA, 13 nt, Human
guaguucuaagac

SEQ ID NO: 3743985 - RNA, 16 nt, Human
guaguucugcuccaga

SEQ ID NO: 3743986 - RNA, 14 nt, Human
guaguucuguauuu

SEQ ID NO: 3743987 - RNA, 15 nt, Human
guaguucuguauuug

SEQ ID NO: 3743988 - RNA, 16 nt, Human
guaguucuguauuuga

SEQ ID NO: 3743989 - RNA, 20 nt, Human
guaguugaggaaagcacaga

SEQ ID NO: 3743990 - RNA, 20 nt, Human
guaguuuuauuuuauguuua

SEQ ID NO: 3743991 - RNA, 14 nt, Human
guaguuuuuucauc

SEQ ID NO: 3743992 - RNA, 17 nt, Human
guaguuuuuucaucuuc

SEQ ID NO: 3743993 - RNA, 15 nt, Human
guauaaaacuuuccu

SEQ ID NO: 3743994 - RNA, 16 nt, Human
guauaaaacuuuccuc

SEQ ID NO: 3743995 - RNA, 23 nt, Human
guauaaaagauggggucuguaaa

SEQ ID NO: 3743996 - RNA, 18 nt, Human
guauaaaagccuguuuaa

SEQ ID NO: 3743997 - RNA, 21 nt, Human
guauaaaagccuguuuaagag

SEQ ID NO: 3743998 - RNA, 19 nt, Human
guauaaaagggacugagaa

SEQ ID NO: 3743999 - RNA, 21 nt, Human
guauaaaauaauuuuuauauu

SEQ ID NO: 3744000 - RNA, 17 nt, Human
guauaaacaagaaaaau

SEQ ID NO: 3744001 - RNA, 22 nt, Human
guauaaacaagaaaaauaaaga

SEQ ID NO: 3744002 - RNA, 11 nt, Human
guauaaacauu

SEQ ID NO: 3744003 - RNA, 19 nt, Human
guauaaacauuaaaugucu

SEQ ID NO: 3744004 - RNA, 16 nt, Human
guauaaagcucagaag

SEQ ID NO: 3744005 - RNA, 18 nt, Human
guauaaaggcauugauau

SEQ ID NO: 3744006 - RNA, 11 nt, Human
guauaaaugua

SEQ ID NO: 3744007 - RNA, 17 nt, Human
guauaaauguauauaca

SEQ ID NO: 3744008 - RNA, 22 nt, Human
guauaaauugucuuuaaaaacu

SEQ ID NO: 3744009 - RNA, 23 nt, Human
guauaaauuuauuuacugcuagu

SEQ ID NO: 3744010 - RNA, 13 nt, Human
guauaacagguua

SEQ ID NO: 3744011 - RNA, 23 nt, Human
guauaacuuuaacuucuguuuua

SEQ ID NO: 3744012 - RNA, 14 nt, Human
guauaagaaaugca

SEQ ID NO: 3744013 - RNA, 18 nt, Human
guauaagauccuagaucc

SEQ ID NO: 3744014 - RNA, 22 nt, Human
guauaagauccuagauccuaag

SEQ ID NO: 3744015 - RNA, 22 nt, Human
guauaagcacugaaaaacaaca

SEQ ID NO: 3744016 - RNA, 23 nt, Human
guauaaguccuugcaagaaucag

SEQ ID NO: 3744017 - RNA, 12 nt, Human
guauaaguuauu

SEQ ID NO: 3744018 - RNA, 21 nt, Human
guauaaguuauuuuuguacau

SEQ ID NO: 3744019 - RNA, 22 nt, Human
guauaaguuauuuuuguacaug

SEQ ID NO: 3744020 - RNA, 23 nt, Human
guauaaguuauuuuuguacaugu

SEQ ID NO: 3744021 - RNA, 22 nt, Human
guauaauacuuuguauacaagu

SEQ ID NO: 3744022 - RNA, 13 nt, Human
guauaauauaaaa

SEQ ID NO: 3744023 - RNA, 15 nt, Human
guauaauauugaaaa

SEQ ID NO: 3744024 - RNA, 18 nt, Human
guauaauguuuauuaaau

SEQ ID NO: 3744025 - RNA, 20 nt, Human
guauaauguuuauuaaaugc

SEQ ID NO: 3744026 - RNA, 17 nt, Human
guauaauuaacauguua

SEQ ID NO: 3744027 - RNA, 19 nt, Human
guauaauuaacauguuaaa

SEQ ID NO: 3744028 - RNA, 22 nt, Human
guauaauucacccaccagacuu

SEQ ID NO: 3744029 - RNA, 23 nt, Human
guauaauugugugauauuucaga

SEQ ID NO: 3744030 - RNA, 17 nt, Human
guauaauuucgagauuu

SEQ ID NO: 3744031 - RNA, 18 nt, Human
guauaauuucgagauuug

SEQ ID NO: 3744032 - RNA, 19 nt, Human
guauacaacccuggcauua

SEQ ID NO: 3744033 - RNA, 21 nt, Human
guauacaguggauuaauuaaa

SEQ ID NO: 3744034 - RNA, 15 nt, Human
ggugcugggccccug

SEQ ID NO: 3744035 - RNA, 13 nt, Human
ggugcuggucccg

SEQ ID NO: 3744036 - RNA, 11 nt, Human
ggugcugucca

SEQ ID NO: 3744037 - RNA, 20 nt, Human
ggugcuguccucagguggcc

SEQ ID NO: 3744038 - RNA, 14 nt, Human
ggugcugugaggga

SEQ ID NO: 3744039 - RNA, 17 nt, Human
ggugcugugagggaggg

SEQ ID NO: 3744040 - RNA, 16 nt, Human
ggugcuguggccaggg

SEQ ID NO: 3744041 - RNA, 21 nt, Human
ggugcuuguucccucucccug

SEQ ID NO: 3744042 - RNA, 10 nt, Human
ggugcuuucc

SEQ ID NO: 3744043 - RNA, 21 nt, Human
ggugcuuuuauagaggcuagc

SEQ ID NO: 3744044 - RNA, 21 nt, Human
gguggaaaggugugagacugg

SEQ ID NO: 3744045 - RNA, 19 nt, Human
gguggaacauauggucucc

SEQ ID NO: 3744046 - RNA, 13 nt, Human
gguggaagcccuc

SEQ ID NO: 3744047 - RNA, 18 nt, Human
gguggaagcccuccuucc

SEQ ID NO: 3744048 - RNA, 16 nt, Human
gguggaaggcccgagg

SEQ ID NO: 3744049 - RNA, 15 nt, Human
gguggaauuauuuua

SEQ ID NO: 3744050 - RNA, 14 nt, Human
gguggacaguccug

SEQ ID NO: 3744051 - RNA, 15 nt, Human
gguggacaguccugg

SEQ ID NO: 3744052 - RNA, 18 nt, Human
gguggacaguccugggag

SEQ ID NO: 3744053 - RNA, 15 nt, Human
gguggacauggcccc

SEQ ID NO: 3744054 - RNA, 18 nt, Human
gguggacccagggaacag

SEQ ID NO: 3744055 - RNA, 22 nt, Human
gguggaccuuuuaaaguguuuc

SEQ ID NO: 3744056 - RNA, 18 nt, Human
gguggacuuagaaagcag

SEQ ID NO: 3744057 - RNA, 14 nt, Human
gguggagaagccau

SEQ ID NO: 3744058 - RNA, 23 nt, Human
gguggagggccacaugggaggcu

SEQ ID NO: 3744059 - RNA, 19 nt, Human
gguggagugcaguggugcg

SEQ ID NO: 3744060 - RNA, 15 nt, Human
gguggaguuaaucuu

SEQ ID NO: 3744061 - RNA, 15 nt, Human
gguggauauaaauau

SEQ ID NO: 3744062 - RNA, 15 nt, Human
gguggaucacagagg

SEQ ID NO: 3744063 - RNA, 20 nt, Human
gguggaugauccccacgcca

SEQ ID NO: 3744064 - RNA, 13 nt, Human
gguggaugccugg

SEQ ID NO: 3744065 - RNA, 22 nt, Human
gguggauggccccagcacagcu

SEQ ID NO: 3744066 - RNA, 16 nt, Human
gguggcacuuuuucau

SEQ ID NO: 3744067 - RNA, 17 nt, Human
gguggcaucccaguggc

SEQ ID NO: 3744068 - RNA, 20 nt, Human
gguggccacuccagaccccu

SEQ ID NO: 3744069 - RNA, 22 nt, Human
gguggccacuccagaccccugg

SEQ ID NO: 3744070 - RNA, 20 nt, Human
gguggccaugccucagcccu

SEQ ID NO: 3744071 - RNA, 15 nt, Human
gguggccaugcuccu

SEQ ID NO: 3744072 - RNA, 20 nt, Human
gguggcccucuccccugccc

SEQ ID NO: 3744073 - RNA, 21 nt, Human
gguggcccucuccccugcccc

SEQ ID NO: 3744074 - RNA, 23 nt, Human
gguggcccuuaugacugccaaga

SEQ ID NO: 3744075 - RNA, 19 nt, Human
gguggccuaagaguugagc

SEQ ID NO: 3744076 - RNA, 22 nt, Human
gguggccucccaacucacccca

SEQ ID NO: 3744077 - RNA, 22 nt, Human
gguggcgcuagaggccauggag

SEQ ID NO: 3744078 - RNA, 21 nt, Human
gguggcgggcgccuguaaucc

SEQ ID NO: 3744079 - RNA, 19 nt, Human
gguggcgggugccuguaau

SEQ ID NO: 3744080 - RNA, 19 nt, Human
gguggcuacucugugccag

SEQ ID NO: 3744081 - RNA, 17 nt, Human
gguggcuagucagagag

SEQ ID NO: 3744082 - RNA, 14 nt, Human
gguggcucacgccu

SEQ ID NO: 3744083 - RNA, 17 nt, Human
gguggcucaugccugua

SEQ ID NO: 3744084 - RNA, 13 nt, Human
gguggcugaccca

SEQ ID NO: 3744085 - RNA, 23 nt, Human
gguggcugacccagucccugggg

SEQ ID NO: 3744086 - RNA, 15 nt, Human
gguggcugcagccuc

SEQ ID NO: 3744087 - RNA, 16 nt, Human
gguggcugcagccuca

SEQ ID NO: 3744088 - RNA, 11 nt, Human
gguggcugggc

SEQ ID NO: 3744089 - RNA, 23 nt, Human
gguggcuuuccuuguggcagagg

SEQ ID NO: 3744090 - RNA, 15 nt, Human
ggugggaaggggagc

SEQ ID NO: 3744091 - RNA, 23 nt, Human
ggugggaaggggagcacaauuuc

SEQ ID NO: 3744092 - RNA, 15 nt, Human
ggugggagagcccag

SEQ ID NO: 3744093 - RNA, 20 nt, Human
ggugggaggauugcuugagc

SEQ ID NO: 3744094 - RNA, 15 nt, Human
ggugggauccuccag

SEQ ID NO: 3744095 - RNA, 14 nt, Human
ggugggcagguggu

SEQ ID NO: 3744096 - RNA, 16 nt, Human
ggugggccagccccuc

SEQ ID NO: 3744097 - RNA, 12 nt, Human
ggugggccaggc

SEQ ID NO: 3744098 - RNA, 14 nt, Human
ggugggccaggcug

SEQ ID NO: 3744099 - RNA, 20 nt, Human
ggugggcccaggaccagcug

SEQ ID NO: 3744100 - RNA, 21 nt, Human
ggugggcccaggaccagcugg

SEQ ID NO: 3744101 - RNA, 22 nt, Human
ggugggcccaggaccagcuggg

SEQ ID NO: 3744102 - RNA, 20 nt, Human
ggugggcggcacagccuucu

SEQ ID NO: 3744103 - RNA, 20 nt, Human
ggugggcuucccaguggcug

SEQ ID NO: 3744104 - RNA, 11 nt, Human
gguggggaggg

SEQ ID NO: 3744105 - RNA, 14 nt, Human
gguggggaggggcg

SEQ ID NO: 3744106 - RNA, 13 nt, Human
gguggggcagcuc

SEQ ID NO: 3744107 - RNA, 13 nt, Human
gguggggcagcuu

SEQ ID NO: 3744108 - RNA, 16 nt, Human
gguggggcgaggcagg

SEQ ID NO: 3744109 - RNA, 13 nt, Human
gguggggcugcuc

SEQ ID NO: 3744110 - RNA, 17 nt, Human
gguggggcugcuccucc

SEQ ID NO: 3744111 - RNA, 22 nt, Human
gguggggcugcuccuccagggc

SEQ ID NO: 3744112 - RNA, 12 nt, Human
ggugggggagga

SEQ ID NO: 3744113 - RNA, 13 nt, Human
ggugggggccucg

SEQ ID NO: 3744114 - RNA, 19 nt, Human
ggugggggggcagagcccu

SEQ ID NO: 3744115 - RNA, 10 nt, Human
ggugggggua

SEQ ID NO: 3744116 - RNA, 20 nt, Human
gguggggguagggggcugga

SEQ ID NO: 3744117 - RNA, 23 nt, Human
gguggggguaggguuucccuacu

SEQ ID NO: 3744118 - RNA, 17 nt, Human
ggugggggugggucaga

SEQ ID NO: 3744119 - RNA, 14 nt, Human
ggugggguccugga

SEQ ID NO: 3744120 - RNA, 11 nt, Human
gguggggugga

SEQ ID NO: 3744121 - RNA, 14 nt, Human
gguggguauaaaag

SEQ ID NO: 3744122 - RNA, 14 nt, Human
gguggguccauggg

SEQ ID NO: 3744123 - RNA, 20 nt, Human
gguggguccaugggcagagc

SEQ ID NO: 3744124 - RNA, 19 nt, Human
ggugggucccggcucugug

SEQ ID NO: 3744125 - RNA, 12 nt, Human
ggugggugaaag

SEQ ID NO: 3744126 - RNA, 15 nt, Human
ggugggugaaaggaa

SEQ ID NO: 3744127 - RNA, 12 nt, Human
ggugggugcuca

SEQ ID NO: 3744128 - RNA, 20 nt, Human
ggugguauuuucaauagcca

SEQ ID NO: 3744129 - RNA, 14 nt, Human
gguggucaggcgua

SEQ ID NO: 3744130 - RNA, 14 nt, Human
gguggucccugggu

SEQ ID NO: 3744131 - RNA, 18 nt, Human
gguggucugaauguucug

SEQ ID NO: 3744132 - RNA, 19 nt, Human
gguggucugaauguucuga

SEQ ID NO: 3744133 - RNA, 17 nt, Human
gguggucugcaggcagg

SEQ ID NO: 3744134 - RNA, 19 nt, Human
gguggucugcucgggccca

SEQ ID NO: 3744135 - RNA, 22 nt, Human
gguggucuguuggcaggcuggc

SEQ ID NO: 3744136 - RNA, 16 nt, Human
gguggugaccucugcc

SEQ ID NO: 3744137 - RNA, 21 nt, Human
ggugguggaucuguccaagga

SEQ ID NO: 3744138 - RNA, 15 nt, Human
ggugguggcucggga

SEQ ID NO: 3744139 - RNA, 19 nt, Human
gguggugucgggcccuucu

SEQ ID NO: 3744140 - RNA, 21 nt, Human
gguggugucuccaacccccca

SEQ ID NO: 3744141 - RNA, 21 nt, Human
ggugguuauggagaggguguc

SEQ ID NO: 3744142 - RNA, 23 nt, Human
ggugguucacucuuggagccugc

SEQ ID NO: 3744143 - RNA, 21 nt, Human
ggugguugcuguuuuccuccc

SEQ ID NO: 3744144 - RNA, 18 nt, Human
ggugguuucagaaaugug

SEQ ID NO: 3744145 - RNA, 15 nt, Human
ggugguuuucuguuc

SEQ ID NO: 3744146 - RNA, 16 nt, Human
gguguaaccugagaug

SEQ ID NO: 3744147 - RNA, 14 nt, Human
gguguaauaagaca

SEQ ID NO: 3744148 - RNA, 15 nt, Human
gguguaauaagacau

SEQ ID NO: 3744149 - RNA, 16 nt, Human
gguguaauaagacaua

SEQ ID NO: 3744150 - RNA, 18 nt, Human
gguguaauaagacauaac

SEQ ID NO: 3744151 - RNA, 14 nt, Human
gguguaauggagca

SEQ ID NO: 3744152 - RNA, 12 nt, Human
gguguagccagg

SEQ ID NO: 3744153 - RNA, 16 nt, Human
gguguagcuacagaga

SEQ ID NO: 3744154 - RNA, 16 nt, Human
gguguauuuaaacuau

SEQ ID NO: 3744155 - RNA, 17 nt, Human
gguguauuuauuuuccu

SEQ ID NO: 3744156 - RNA, 19 nt, Human
ggugucacauggugccccu

SEQ ID NO: 3744157 - RNA, 13 nt, Human
ggugucaccccag

SEQ ID NO: 3744158 - RNA, 16 nt, Human
ggugucaccccagagc

SEQ ID NO: 3744159 - RNA, 22 nt, Human
ggugucaccccagagccacaca

SEQ ID NO: 3744160 - RNA, 19 nt, Human
ggugucaccugaagacuca

SEQ ID NO: 3744161 - RNA, 14 nt, Human
ggugucacuguccc

SEQ ID NO: 3744162 - RNA, 17 nt, Human
ggugucacuuacuguuu

SEQ ID NO: 3744163 - RNA, 19 nt, Human
ggugucacuuacuguuucu

SEQ ID NO: 3744164 - RNA, 20 nt, Human
ggugucagccauugcaccca

SEQ ID NO: 3744165 - RNA, 21 nt, Human
gguguccccaccaucugcugu

SEQ ID NO: 3744166 - RNA, 20 nt, Human
gguguccccgcugcugugca

SEQ ID NO: 3744167 - RNA, 12 nt, Human
gguguccuacag

SEQ ID NO: 3744168 - RNA, 15 nt, Human
gguguccuacagaaa

SEQ ID NO: 3744169 - RNA, 12 nt, Human
gguguccugacc

SEQ ID NO: 3744170 - RNA, 18 nt, Human
gguguccugaccacccuc

SEQ ID NO: 3744171 - RNA, 20 nt, Human
gguguccugccugucugccc

SEQ ID NO: 3744172 - RNA, 21 nt, Human
gguguccugccugucugcccc

SEQ ID NO: 3744173 - RNA, 19 nt, Human
ggugucuccaaccccccag

SEQ ID NO: 3744174 - RNA, 21 nt, Human
ggugucucuucuuuagaacag

SEQ ID NO: 3744175 - RNA, 23 nt, Human
ggugucuguguuccaaccacuga

SEQ ID NO: 3744176 - RNA, 20 nt, Human
ggugucuugggcagagcugg

SEQ ID NO: 3744177 - RNA, 20 nt, Human
ggugugaaagucagaugccc

SEQ ID NO: 3744178 - RNA, 16 nt, Human
ggugugaccacugcag

SEQ ID NO: 3744179 - RNA, 18 nt, Human
ggugugcacaucucugcu

SEQ ID NO: 3744180 - RNA, 24 nt, Human
ggugugcacguggcauguggccug

SEQ ID NO: 3744181 - RNA, 13 nt, Human
ggugugccugcag

SEQ ID NO: 3744182 - RNA, 15 nt, Human
ggugugccugcagcc

SEQ ID NO: 3744183 - RNA, 16 nt, Human
gguguggagccgaggc

SEQ ID NO: 3744184 - RNA, 12 nt, Human
gguguggcuccu

SEQ ID NO: 3744185 - RNA, 11 nt, Human
gguguggggga

SEQ ID NO: 3744186 - RNA, 13 nt, Human
ggugugggggaag

SEQ ID NO: 3744187 - RNA, 19 nt, Human
gguguggguguccugccug

SEQ ID NO: 3744188 - RNA, 15 nt, Human
ggugugguacagaga

SEQ ID NO: 3744189 - RNA, 19 nt, Human
ggugugguacagagaagcc

SEQ ID NO: 3744190 - RNA, 23 nt, Human
ggugugguacagagaagccagcu

SEQ ID NO: 3744191 - RNA, 19 nt, Human
gguguguuccaacugcccc

SEQ ID NO: 3744192 - RNA, 22 nt, Human
gguguuauuuggaaccuuguuu

SEQ ID NO: 3744193 - RNA, 22 nt, Human
gguguugccaaauauguccugg

SEQ ID NO: 3744194 - RNA, 15 nt, Human
gguguuuaguugcag

SEQ ID NO: 3744195 - RNA, 22 nt, Human
gguguuucucccucucacuguc

SEQ ID NO: 3744196 - RNA, 23 nt, Human
gguguuucucccucucacugucu

SEQ ID NO: 3744197 - RNA, 14 nt, Human
gguguuugaaaaua

SEQ ID NO: 3744198 - RNA, 22 nt, Human
gguguuuuuuaugaagugcgug

SEQ ID NO: 3744199 - RNA, 16 nt, Human
gguuaaaaaaaaaagu

SEQ ID NO: 3744200 - RNA, 21 nt, Human
gguuaaaacuguacauuuaaa

SEQ ID NO: 3744201 - RNA, 22 nt, Human
gguuaaaacuguacauuuaaaa

SEQ ID NO: 3744202 - RNA, 14 nt, Human
gguuaaauacugug

SEQ ID NO: 3744203 - RNA, 13 nt, Human
gguuaacaaauaa

SEQ ID NO: 3744204 - RNA, 13 nt, Human
gguuaaggccuga

SEQ ID NO: 3744205 - RNA, 14 nt, Human
gguuaaggccugaa

SEQ ID NO: 3744206 - RNA, 16 nt, Human
gguuaagucuguuuua

SEQ ID NO: 3744207 - RNA, 15 nt, Human
gguuaauaccagcuu

SEQ ID NO: 3744208 - RNA, 14 nt, Human
gguuacaacagauu

SEQ ID NO: 3744209 - RNA, 21 nt, Human
gguuacacuguuagaacacua

SEQ ID NO: 3744210 - RNA, 16 nt, Human
gguuaccaagaagccu

SEQ ID NO: 3744211 - RNA, 18 nt, Human
gguuaccgauuucaaagu

SEQ ID NO: 3744212 - RNA, 17 nt, Human
gguuacuucuucucuua

SEQ ID NO: 3744213 - RNA, 13 nt, Human
gguuagaccuaca

SEQ ID NO: 3744214 - RNA, 17 nt, Human
gguuagcagagcuggac

SEQ ID NO: 3744215 - RNA, 22 nt, Human
gguuaggaggguuucauugucu

SEQ ID NO: 3744216 - RNA, 12 nt, Human
gguuauacauga

SEQ ID NO: 3744217 - RNA, 14 nt, Human
gguuauacaugaca

SEQ ID NO: 3744218 - RNA, 23 nt, Human
gguuauagacagucguucccagu

SEQ ID NO: 3744219 - RNA, 14 nt, Human
gguuaucucugugu

SEQ ID NO: 3744220 - RNA, 20 nt, Human
gguuaucugaagucagaucu

SEQ ID NO: 3744221 - RNA, 16 nt, Human
gguuauuuaaaaugua

SEQ ID NO: 3744222 - RNA, 23 nt, Human
gguuauuuuaguuucuguucugu

SEQ ID NO: 3744223 - RNA, 12 nt, Human
gguuauuuuuau

SEQ ID NO: 3744224 - RNA, 13 nt, Human
gguucaaaugugu

SEQ ID NO: 3744225 - RNA, 14 nt, Human
gguucaacuuauua

SEQ ID NO: 3744226 - RNA, 21 nt, Human
gguucaagcgauucuucugcu

SEQ ID NO: 3744227 - RNA, 16 nt, Human
gguucaaggucacugu

SEQ ID NO: 3744228 - RNA, 15 nt, Human
gguucaccagccucu

SEQ ID NO: 3744229 - RNA, 22 nt, Human
gguucacgccuguaaucccagc

SEQ ID NO: 3744230 - RNA, 15 nt, Human
gguucacuaaagcag

SEQ ID NO: 3744231 - RNA, 18 nt, Human
gguucagaaaugcugccu

SEQ ID NO: 3744232 - RNA, 19 nt, Human
gguucagaaaugcugccug

SEQ ID NO: 3744233 - RNA, 22 nt, Human
gguucagaaaugcugccugccu

SEQ ID NO: 3744234 - RNA, 18 nt, Human
gguucagaauuaaacuuu

SEQ ID NO: 3744235 - RNA, 19 nt, Human
gguucagaauuaaacuuuu

SEQ ID NO: 3744236 - RNA, 14 nt, Human
gguucagccccucc

SEQ ID NO: 3744237 - RNA, 16 nt, Human
gguucagccccuccuc

SEQ ID NO: 3744238 - RNA, 18 nt, Human
gguucagccccuccucug

SEQ ID NO: 3744239 - RNA, 19 nt, Human
gguucagccccuccucugc

SEQ ID NO: 3744240 - RNA, 21 nt, Human
gguucagccccuccucugcca

SEQ ID NO: 3744241 - RNA, 22 nt, Human
gguucagccccuccucugccac

SEQ ID NO: 3744242 - RNA, 12 nt, Human
gguucaggcccg

SEQ ID NO: 3744243 - RNA, 18 nt, Human
gguucaggguuggccccu

SEQ ID NO: 3744244 - RNA, 21 nt, Human
gguucauaggucacuggcucu

SEQ ID NO: 3744245 - RNA, 14 nt, Human
gguucaucaguguu

SEQ ID NO: 3744246 - RNA, 15 nt, Human
gguucaucaguguua

SEQ ID NO: 3744247 - RNA, 19 nt, Human
gguucaucaguguuaaaaa

SEQ ID NO: 3744248 - RNA, 22 nt, Human
gguucaucaguguuaaaaaauu

SEQ ID NO: 3744249 - RNA, 13 nt, Human
gguucaugaugca

SEQ ID NO: 3744250 - RNA, 14 nt, Human
gguucaugaugcag

SEQ ID NO: 3744251 - RNA, 17 nt, Human
gguucauuauuggaauu

SEQ ID NO: 3744252 - RNA, 23 nt, Human
gguucauuuucagauucaggcau

SEQ ID NO: 3744253 - RNA, 16 nt, Human
gguuccaauccuggcu

SEQ ID NO: 3744254 - RNA, 24 nt, Human
gguuccagcaauucuccugccuca

SEQ ID NO: 3744255 - RNA, 13 nt, Human
gguucccccagcc

SEQ ID NO: 3744256 - RNA, 15 nt, Human
gguucccccagcccu

SEQ ID NO: 3744257 - RNA, 13 nt, Human
gguucccuguucu

SEQ ID NO: 3744258 - RNA, 16 nt, Human
gguucccuguucuucc

SEQ ID NO: 3744259 - RNA, 16 nt, Human
gguucccuuccuauuc

SEQ ID NO: 3744260 - RNA, 21 nt, Human
gguucccuuugacgccauccc

SEQ ID NO: 3744261 - RNA, 22 nt, Human
gguucccuuugacgccauccca

SEQ ID NO: 3744262 - RNA, 22 nt, Human
gguucccuuuuuuggcugcuga

SEQ ID NO: 3744263 - RNA, 16 nt, Human
gguuccggcauggaca

SEQ ID NO: 3744264 - RNA, 17 nt, Human
gguuccguguccacccc

SEQ ID NO: 3744265 - RNA, 19 nt, Human
gguuccguguccaccccca

SEQ ID NO: 3744266 - RNA, 12 nt, Human
gguuccucugcc

SEQ ID NO: 3744267 - RNA, 14 nt, Human
gguuccucugccug

SEQ ID NO: 3744268 - RNA, 23 nt, Human
gguucguggaaagggugcugcuu

SEQ ID NO: 3744269 - RNA, 14 nt, Human
gguucuaaaaggug

SEQ ID NO: 3744270 - RNA, 11 nt, Human
gguucuaaagu

SEQ ID NO: 3744271 - RNA, 12 nt, Human
gguucuaaaguu

SEQ ID NO: 3744272 - RNA, 15 nt, Human
gguucuaaaguucua

SEQ ID NO: 3744273 - RNA, 17 nt, Human
gguucuaaaguucuaag

SEQ ID NO: 3744274 - RNA, 12 nt, Human
gguucuaaggcc

SEQ ID NO: 3744275 - RNA, 23 nt, Human
gguucuacagccuugucccccuc

SEQ ID NO: 3744276 - RNA, 21 nt, Human
gguucuaggcaucucuguacu

SEQ ID NO: 3744277 - RNA, 15 nt, Human
gguucuagguuucaa

SEQ ID NO: 3744278 - RNA, 16 nt, Human
gguucuauuuggaauu

SEQ ID NO: 3744279 - RNA, 14 nt, Human
gguucucaaugaaa

SEQ ID NO: 3744280 - RNA, 20 nt, Human
gguucuccguuagcuccugu

SEQ ID NO: 3744281 - RNA, 17 nt, Human
gguucuccucuccccuc

SEQ ID NO: 3744282 - RNA, 21 nt, Human
gguucugaugaugugccuggg

SEQ ID NO: 3744283 - RNA, 20 nt, Human
gguucugccugccagcugca

SEQ ID NO: 3744284 - RNA, 13 nt, Human
gguucuggcuguu

SEQ ID NO: 3744285 - RNA, 12 nt, Human
gguucuggggcc

SEQ ID NO: 3744286 - RNA, 18 nt, Human
gguucuggugugaacuaa

SEQ ID NO: 3744287 - RNA, 13 nt, Human
gguucuucccuuu

SEQ ID NO: 3744288 - RNA, 19 nt, Human
gguucuugaggggaccagg

SEQ ID NO: 3744289 - RNA, 22 nt, Human
gguucuugaggggaccaggagu

SEQ ID NO: 3744290 - RNA, 17 nt, Human
gguucuugguagagauu

SEQ ID NO: 3744291 - RNA, 14 nt, Human
gguucuuucuuccu

SEQ ID NO: 3744292 - RNA, 17 nt, Human
gguucuuucuuccucug

SEQ ID NO: 3744293 - RNA, 19 nt, Human
gguugaagaggugagcacg

SEQ ID NO: 3744294 - RNA, 17 nt, Human
gguugaagccaugucua

SEQ ID NO: 3744295 - RNA, 11 nt, Human
gguugaauaaa

SEQ ID NO: 3744296 - RNA, 14 nt, Human
gguugacaggaggu

SEQ ID NO: 3744297 - RNA, 15 nt, Human
gguugaccccagagg

SEQ ID NO: 3744298 - RNA, 13 nt, Human
gguugagaaauga

SEQ ID NO: 3744299 - RNA, 21 nt, Human
gguugauaaaucauuuuaugu

SEQ ID NO: 3744300 - RNA, 20 nt, Human
gguugauuaaggcaguacaa

SEQ ID NO: 3744301 - RNA, 16 nt, Human
gguugcaaggccgcug

SEQ ID NO: 3744302 - RNA, 14 nt, Human
gguugcagacagga

SEQ ID NO: 3744303 - RNA, 15 nt, Human
gguugcuaacugaac

SEQ ID NO: 3744304 - RNA, 20 nt, Human
gguugcuguuuuccucccuu

SEQ ID NO: 3744305 - RNA, 21 nt, Human
gguugcuguuuuccucccuuc

SEQ ID NO: 3744306 - RNA, 11 nt, Human
gguuggagccc

SEQ ID NO: 3744307 - RNA, 14 nt, Human
gguuggagcccagg

SEQ ID NO: 3744308 - RNA, 18 nt, Human
gguuggcaaaaaggcagg

SEQ ID NO: 3744309 - RNA, 17 nt, Human
gguuggcgcacccuccc

SEQ ID NO: 3744310 - RNA, 20 nt, Human
gguuggcucugccaguccug

SEQ ID NO: 3744311 - RNA, 15 nt, Human
gguuggcugggccca

SEQ ID NO: 3744312 - RNA, 19 nt, Human
gguugggagaaugucagua

SEQ ID NO: 3744313 - RNA, 17 nt, Human
gguugggcccagaucug

SEQ ID NO: 3744314 - RNA, 13 nt, Human
gguugguagggug

SEQ ID NO: 3744315 - RNA, 14 nt, Human
gguuggugcacagu

SEQ ID NO: 3744316 - RNA, 13 nt, Human
gguuggugggggc

SEQ ID NO: 3744317 - RNA, 14 nt, Human
gguuguauucuuug

SEQ ID NO: 3744318 - RNA, 20 nt, Human
gguuguauucuuugauguua

SEQ ID NO: 3744319 - RNA, 22 nt, Human
gguuguauucuuugauguuaac

SEQ ID NO: 3744320 - RNA, 15 nt, Human
gguugucacucaaca

SEQ ID NO: 3744321 - RNA, 13 nt, Human
gguugugaggccu

SEQ ID NO: 3744322 - RNA, 22 nt, Human
gguugugaggccuggccaggca

SEQ ID NO: 3744323 - RNA, 14 nt, Human
gguugugcacuguu

SEQ ID NO: 3744324 - RNA, 12 nt, Human
gguuguuucugu

SEQ ID NO: 3744325 - RNA, 21 nt, Human
gguuuaaaacuaguuagauuc

SEQ ID NO: 3744326 - RNA, 19 nt, Human
gguuuaaacuucucugaag

SEQ ID NO: 3744327 - RNA, 20 nt, Human
gguuuaaagagucuagauuc

SEQ ID NO: 3744328 - RNA, 13 nt, Human
gguuuaacucaga

SEQ ID NO: 3744329 - RNA, 17 nt, Human
gguuuaacucagaucac

SEQ ID NO: 3744330 - RNA, 18 nt, Human
gguuuaacucagaucacu

SEQ ID NO: 3744331 - RNA, 20 nt, Human
gguuuaacucagaucacuac

SEQ ID NO: 3744332 - RNA, 13 nt, Human
gguuuaauauuac

SEQ ID NO: 3744333 - RNA, 13 nt, Human
gguuuaauguuuu

SEQ ID NO: 3744334 - RNA, 21 nt, Human
gguuuacaauuuacaaagugu

SEQ ID NO: 3744335 - RNA, 19 nt, Human
guauacaguucaauaaacu

SEQ ID NO: 3744336 - RNA, 20 nt, Human
guauacauccuggguaauga

SEQ ID NO: 3744337 - RNA, 13 nt, Human
guauaccucacuu

SEQ ID NO: 3744338 - RNA, 13 nt, Human
guauacuuccuua

SEQ ID NO: 3744339 - RNA, 19 nt, Human
guauacuuccuuaugcuuc

SEQ ID NO: 3744340 - RNA, 13 nt, Human
guauacuuuaaau

SEQ ID NO: 3744341 - RNA, 20 nt, Human
guauacuuuaaauaauuuaa

SEQ ID NO: 3744342 - RNA, 14 nt, Human
guauagaaaaucuu

SEQ ID NO: 3744343 - RNA, 15 nt, Human
guauagaaaugcugg

SEQ ID NO: 3744344 - RNA, 19 nt, Human
guauagaaccucuuugucu

SEQ ID NO: 3744345 - RNA, 17 nt, Human
guauagaagucuucaug

SEQ ID NO: 3744346 - RNA, 21 nt, Human
guauagaagucuucaugaaau

SEQ ID NO: 3744347 - RNA, 23 nt, Human
guauagaagucuucaugaaaugc

SEQ ID NO: 3744348 - RNA, 21 nt, Human
guauagaauaggcacuuuaaa

SEQ ID NO: 3744349 - RNA, 21 nt, Human
guauagacaggagaagaaaga

SEQ ID NO: 3744350 - RNA, 20 nt, Human
guauagauauaaugaacaaa

SEQ ID NO: 3744351 - RNA, 18 nt, Human
guauagaugcaagauauu

SEQ ID NO: 3744352 - RNA, 15 nt, Human
guauagauguugcua

SEQ ID NO: 3744353 - RNA, 20 nt, Human
guauagcaugaaauaaaaua

SEQ ID NO: 3744354 - RNA, 18 nt, Human
guauagcaugcaucuguu

SEQ ID NO: 3744355 - RNA, 21 nt, Human
guauagccuauggcagaaaaa

SEQ ID NO: 3744356 - RNA, 14 nt, Human
guauagcuguauug

SEQ ID NO: 3744357 - RNA, 23 nt, Human
guauagcuguauugaaucaugua

SEQ ID NO: 3744358 - RNA, 14 nt, Human
guauaguuauguaa

SEQ ID NO: 3744359 - RNA, 15 nt, Human
guauaguuauguaaa

SEQ ID NO: 3744360 - RNA, 16 nt, Human
guauaguugcuugccu

SEQ ID NO: 3744361 - RNA, 17 nt, Human
guauaguugcuugccug

SEQ ID NO: 3744362 - RNA, 18 nt, Human
guauaguugcuugccuga

SEQ ID NO: 3744363 - RNA, 13 nt, Human
guauaguugcuuu

SEQ ID NO: 3744364 - RNA, 14 nt, Human
guauauaaaaaugg

SEQ ID NO: 3744365 - RNA, 13 nt, Human
guauauaaauggg

SEQ ID NO: 3744366 - RNA, 14 nt, Human
guauauacacauau

SEQ ID NO: 3744367 - RNA, 18 nt, Human
guauauacacauauaccu

SEQ ID NO: 3744368 - RNA, 23 nt, Human
guauauacuuugaaaggagaugu

SEQ ID NO: 3744369 - RNA, 12 nt, Human
guauauacuuuu

SEQ ID NO: 3744370 - RNA, 13 nt, Human
guauauacuuuuu

SEQ ID NO: 3744371 - RNA, 15 nt, Human
guauauagcccagcc

SEQ ID NO: 3744372 - RNA, 15 nt, Human
guauauauaagaaag

SEQ ID NO: 3744373 - RNA, 15 nt, Human
guauauauacauaca

SEQ ID NO: 3744374 - RNA, 17 nt, Human
guauauauacauacacu

SEQ ID NO: 3744375 - RNA, 18 nt, Human
guauauauacauauauau

SEQ ID NO: 3744376 - RNA, 14 nt, Human
guauauauagaauc

SEQ ID NO: 3744377 - RNA, 10 nt, Human
guauauauau

SEQ ID NO: 3744378 - RNA, 12 nt, Human
guauauaugugu

SEQ ID NO: 3744379 - RNA, 20 nt, Human
guauauauguguauauauac

SEQ ID NO: 3744380 - RNA, 16 nt, Human
guauauauguguguuu

SEQ ID NO: 3744381 - RNA, 21 nt, Human
guauauauuuuuuaaaaaucu

SEQ ID NO: 3744382 - RNA, 17 nt, Human
guauauauuuuuuuuua

SEQ ID NO: 3744383 - RNA, 13 nt, Human
guauaucauucua

SEQ ID NO: 3744384 - RNA, 20 nt, Human
guauauccuuuucuguguuu

SEQ ID NO: 3744385 - RNA, 20 nt, Human
guauaucuagguuuaugaca

SEQ ID NO: 3744386 - RNA, 16 nt, Human
guauauguaugugugu

SEQ ID NO: 3744387 - RNA, 13 nt, Human
guauaugucucag

SEQ ID NO: 3744388 - RNA, 14 nt, Human
guauauuaaaaaug

SEQ ID NO: 3744389 - RNA, 18 nt, Human
guauauuaaaaaugguaa

SEQ ID NO: 3744390 - RNA, 22 nt, Human
guauauuaaaaaugguaaaauu

SEQ ID NO: 3744391 - RNA, 12 nt, Human
guauauucagga

SEQ ID NO: 3744392 - RNA, 23 nt, Human
guauauucaggacuugaaagaaa

SEQ ID NO: 3744393 - RNA, 16 nt, Human
guauauucauuucaaa

SEQ ID NO: 3744394 - RNA, 22 nt, Human
guauauugauccagaaagaaaa

SEQ ID NO: 3744395 - RNA, 19 nt, Human
guauauugcacaauuauaa

SEQ ID NO: 3744396 - RNA, 22 nt, Human
guauauuguauaggggcaacug

SEQ ID NO: 3744397 - RNA, 15 nt, Human
guauauuuauauaau

SEQ ID NO: 3744398 - RNA, 17 nt, Human
guauauuuauauaauua

SEQ ID NO: 3744399 - RNA, 20 nt, Human
guauauuugauuuauuaacu

SEQ ID NO: 3744400 - RNA, 23 nt, Human
guauauuugauuuauuaacuuaa

SEQ ID NO: 3744401 - RNA, 15 nt, Human
guauauuuguaugau

SEQ ID NO: 3744402 - RNA, 20 nt, Human
guauauuuguauuuaaauga

SEQ ID NO: 3744403 - RNA, 20 nt, Human
guauauuugugauagcacuu

SEQ ID NO: 3744404 - RNA, 23 nt, Human
guauauuugugauagcacuuucu

SEQ ID NO: 3744405 - RNA, 16 nt, Human
guauauuuuauaucaa

SEQ ID NO: 3744406 - RNA, 15 nt, Human
guauauuuuauuuca

SEQ ID NO: 3744407 - RNA, 20 nt, Human
guauauuuuauuucaaugua

SEQ ID NO: 3744408 - RNA, 22 nt, Human
guauauuuuauuucaauguaau

SEQ ID NO: 3744409 - RNA, 17 nt, Human
guauauuuuuguuuguu

SEQ ID NO: 3744410 - RNA, 21 nt, Human
guauauuuuuuucuaagagaa

SEQ ID NO: 3744411 - RNA, 14 nt, Human
guaucaaaaugcuc

SEQ ID NO: 3744412 - RNA, 19 nt, Human
guaucaaacagcucaggcu

SEQ ID NO: 3744413 - RNA, 15 nt, Human
guaucaaacccacga

SEQ ID NO: 3744414 - RNA, 17 nt, Human
guaucaacccagaaaca

SEQ ID NO: 3744415 - RNA, 18 nt, Human
guaucaaguauagaaaau

SEQ ID NO: 3744416 - RNA, 22 nt, Human
guaucacauuuuaguccagaga

SEQ ID NO: 3744417 - RNA, 21 nt, Human
guaucacucugugucugagug

SEQ ID NO: 3744418 - RNA, 18 nt, Human
guaucagaagagagggga

SEQ ID NO: 3744419 - RNA, 22 nt, Human
guaucagagauguccauuuuua

SEQ ID NO: 3744420 - RNA, 19 nt, Human
guaucaguguuuaugugcu

SEQ ID NO: 3744421 - RNA, 23 nt, Human
guaucaguguuuuaaauucugag

SEQ ID NO: 3744422 - RNA, 17 nt, Human
guaucaguugcaauaau

SEQ ID NO: 3744423 - RNA, 14 nt, Human
guaucaugaagccu

SEQ ID NO: 3744424 - RNA, 14 nt, Human
guauccacuuugca

SEQ ID NO: 3744425 - RNA, 20 nt, Human
guauccauauuuuauuacug

SEQ ID NO: 3744426 - RNA, 14 nt, Human
guauccaugcucuu

SEQ ID NO: 3744427 - RNA, 16 nt, Human
guauccaugggggcag

SEQ ID NO: 3744428 - RNA, 18 nt, Human
guauccaugggggcaggg

SEQ ID NO: 3744429 - RNA, 16 nt, Human
guauccauuaucaugu

SEQ ID NO: 3744430 - RNA, 19 nt, Human
guaucccaugagccucagc

SEQ ID NO: 3744431 - RNA, 15 nt, Human
guaucccuacuguaa

SEQ ID NO: 3744432 - RNA, 17 nt, Human
guaucccuucucacagc

SEQ ID NO: 3744433 - RNA, 19 nt, Human
guaucccuucucacagcac

SEQ ID NO: 3744434 - RNA, 14 nt, Human
guauccuccagguu

SEQ ID NO: 3744435 - RNA, 15 nt, Human
guauccuccagguuu

SEQ ID NO: 3744436 - RNA, 23 nt, Human
guauccuccagguuuuucaauua

SEQ ID NO: 3744437 - RNA, 16 nt, Human
guauccugcccagugu

SEQ ID NO: 3744438 - RNA, 23 nt, Human
guauccuggaacaauauuuuaug

SEQ ID NO: 3744439 - RNA, 13 nt, Human
guauccuggggcu

SEQ ID NO: 3744440 - RNA, 17 nt, Human
guauccuggggcucccu

SEQ ID NO: 3744441 - RNA, 14 nt, Human
guaucgauguuuua

SEQ ID NO: 3744442 - RNA, 16 nt, Human
guaucguaaccagcca

SEQ ID NO: 3744443 - RNA, 17 nt, Human
guaucguauucaccuuc

SEQ ID NO: 3744444 - RNA, 16 nt, Human
guaucuaaaaguguca

SEQ ID NO: 3744445 - RNA, 14 nt, Human
guaucuagcaauca

SEQ ID NO: 3744446 - RNA, 24 nt, Human
guaucuagcaaucacaacacuggc

SEQ ID NO: 3744447 - RNA, 16 nt, Human
guaucuagugcagcug

SEQ ID NO: 3744448 - RNA, 20 nt, Human
guaucuauauauguguaugu

SEQ ID NO: 3744449 - RNA, 14 nt, Human
guaucucagaaagu

SEQ ID NO: 3744450 - RNA, 20 nt, Human
guaucucagaaagugccuga

SEQ ID NO: 3744451 - RNA, 22 nt, Human
guaucucagaaagugccugaca

SEQ ID NO: 3744452 - RNA, 15 nt, Human
guaucuccucgcaag

SEQ ID NO: 3744453 - RNA, 20 nt, Human
guaucucggaccuuucagcu

SEQ ID NO: 3744454 - RNA, 19 nt, Human
guaucucugaagcauguuu

SEQ ID NO: 3744455 - RNA, 20 nt, Human
guaucucugaagcauguuuc

SEQ ID NO: 3744456 - RNA, 22 nt, Human
guaucucuuucacauuguuugc

SEQ ID NO: 3744457 - RNA, 15 nt, Human
guaucugaguugcca

SEQ ID NO: 3744458 - RNA, 19 nt, Human
guaucuggugacuuuccuc

SEQ ID NO: 3744459 - RNA, 16 nt, Human
guaucuguaucucucu

SEQ ID NO: 3744460 - RNA, 13 nt, Human
guaucugucuuuc

SEQ ID NO: 3744461 - RNA, 19 nt, Human
guaucugucuuuccacucu

SEQ ID NO: 3744462 - RNA, 20 nt, Human
guaucugucuuuccacucug

SEQ ID NO: 3744463 - RNA, 22 nt, Human
guaucugucuuuccacucugga

SEQ ID NO: 3744464 - RNA, 12 nt, Human
guaucugugaac

SEQ ID NO: 3744465 - RNA, 23 nt, Human
guaucuuguuuuuccacuacugc

SEQ ID NO: 3744466 - RNA, 18 nt, Human
guaucuuugcacuccaau

SEQ ID NO: 3744467 - RNA, 22 nt, Human
guaucuuugggucuuugauaaa

SEQ ID NO: 3744468 - RNA, 13 nt, Human
guaucuuuugaua

SEQ ID NO: 3744469 - RNA, 20 nt, Human
guaugaaaacauggaacagu

SEQ ID NO: 3744470 - RNA, 19 nt, Human
guaugaaacuaaagccuuu

SEQ ID NO: 3744471 - RNA, 22 nt, Human
guaugaaagauggcugugccuc

SEQ ID NO: 3744472 - RNA, 23 nt, Human
guaugaaagauggcugugccucu

SEQ ID NO: 3744473 - RNA, 11 nt, Human
guaugaaauau

SEQ ID NO: 3744474 - RNA, 17 nt, Human
guaugaaauauauguga

SEQ ID NO: 3744475 - RNA, 17 nt, Human
guaugaaccaccgcgcc

SEQ ID NO: 3744476 - RNA, 16 nt, Human
guaugaacuugaggac

SEQ ID NO: 3744477 - RNA, 19 nt, Human
guaugaacuugaggacaca

SEQ ID NO: 3744478 - RNA, 20 nt, Human
guaugaacuugaggacacau

SEQ ID NO: 3744479 - RNA, 22 nt, Human
guaugaacuugaggacacaugu

SEQ ID NO: 3744480 - RNA, 19 nt, Human
guaugaagagcuugcuuug

SEQ ID NO: 3744481 - RNA, 18 nt, Human
guaugaauaaagacaccu

SEQ ID NO: 3744482 - RNA, 15 nt, Human
guaugaaucuaugcc

SEQ ID NO: 3744483 - RNA, 16 nt, Human
guaugaaucuaugcca

SEQ ID NO: 3744484 - RNA, 15 nt, Human
gaccacucagccccu

SEQ ID NO: 3744485 - RNA, 21 nt, Human
gaccacugcaugagcuuuuau

SEQ ID NO: 3744486 - RNA, 18 nt, Human
gaccacuguuucuugcuu

SEQ ID NO: 3744487 - RNA, 14 nt, Human
gaccagagcucugg

SEQ ID NO: 3744488 - RNA, 15 nt, Human
gaccagagcucugga

SEQ ID NO: 3744489 - RNA, 17 nt, Human
gaccagagcucuggagc

SEQ ID NO: 3744490 - RNA, 11 nt, Human
gaccagagcug

SEQ ID NO: 3744491 - RNA, 19 nt, Human
gaccagagcugccaccugc

SEQ ID NO: 3744492 - RNA, 18 nt, Human
gaccagaggagccuuuuu

SEQ ID NO: 3744493 - RNA, 17 nt, Human
gaccagcacugucucag

SEQ ID NO: 3744494 - RNA, 15 nt, Human
gaccagcagacagag

SEQ ID NO: 3744495 - RNA, 18 nt, Human
gaccagcagacagagcca

SEQ ID NO: 3744496 - RNA, 20 nt, Human
gaccagcagacagagccagg

SEQ ID NO: 3744497 - RNA, 16 nt, Human
gaccagcagaucccag

SEQ ID NO: 3744498 - RNA, 16 nt, Human
gaccagcagccccaca

SEQ ID NO: 3744499 - RNA, 13 nt, Human
gaccagcagcgcc

SEQ ID NO: 3744500 - RNA, 23 nt, Human
gaccagcagcgccuuucccaacu

SEQ ID NO: 3744501 - RNA, 12 nt, Human
gaccagccagca

SEQ ID NO: 3744502 - RNA, 11 nt, Human
gaccagccagg

SEQ ID NO: 3744503 - RNA, 14 nt, Human
gaccagcccacgcu

SEQ ID NO: 3744504 - RNA, 23 nt, Human
gaccagcccacgcugacuacagg

SEQ ID NO: 3744505 - RNA, 11 nt, Human
gaccagccugg

SEQ ID NO: 3744506 - RNA, 12 nt, Human
gaccagccuggc

SEQ ID NO: 3744507 - RNA, 18 nt, Human
gaccagccuggccaacau

SEQ ID NO: 3744508 - RNA, 20 nt, Human
gaccagccuggccaacaugg

SEQ ID NO: 3744509 - RNA, 22 nt, Human
gaccagccuggccaacauggua

SEQ ID NO: 3744510 - RNA, 23 nt, Human
gaccagccuguuggacccgcucu

SEQ ID NO: 3744511 - RNA, 13 nt, Human
gaccagcuccccc

SEQ ID NO: 3744512 - RNA, 13 nt, Human
gaccagcugcucc

SEQ ID NO: 3744513 - RNA, 12 nt, Human
gaccagcugggg

SEQ ID NO: 3744514 - RNA, 22 nt, Human
gaccagcuuggcucaggcugag

SEQ ID NO: 3744515 - RNA, 14 nt, Human
gaccaggacucccu

SEQ ID NO: 3744516 - RNA, 16 nt, Human
gaccaggacucccucc

SEQ ID NO: 3744517 - RNA, 17 nt, Human
gaccaggacucccuccu

SEQ ID NO: 3744518 - RNA, 16 nt, Human
gaccaggagggcacug

SEQ ID NO: 3744519 - RNA, 12 nt, Human
gaccaggauccc

SEQ ID NO: 3744520 - RNA, 20 nt, Human
gaccaggaucccaagccucc

SEQ ID NO: 3744521 - RNA, 22 nt, Human
gaccaggaucccaagccuccug

SEQ ID NO: 3744522 - RNA, 16 nt, Human
gaccaggcaccaggca

SEQ ID NO: 3744523 - RNA, 15 nt, Human
gaccaggcugccucc

SEQ ID NO: 3744524 - RNA, 13 nt, Human
gaccaggcuguag

SEQ ID NO: 3744525 - RNA, 23 nt, Human
gaccagggacagauccagcaggc

SEQ ID NO: 3744526 - RNA, 14 nt, Human
gaccagggagccuu

SEQ ID NO: 3744527 - RNA, 18 nt, Human
gaccagggauuuccauga

SEQ ID NO: 3744528 - RNA, 15 nt, Human
gaccagggcagggcc

SEQ ID NO: 3744529 - RNA, 16 nt, Human
gaccagggcagggcca

SEQ ID NO: 3744530 - RNA, 13 nt, Human
gaccagggccgag

SEQ ID NO: 3744531 - RNA, 19 nt, Human
gaccagggccuuuucuggc

SEQ ID NO: 3744532 - RNA, 18 nt, Human
gaccagucaaccugggca

SEQ ID NO: 3744533 - RNA, 16 nt, Human
gaccagucccagagca

SEQ ID NO: 3744534 - RNA, 15 nt, Human
gaccagucugacccu

SEQ ID NO: 3744535 - RNA, 14 nt, Human
gaccaguggucuca

SEQ ID NO: 3744536 - RNA, 22 nt, Human
gaccaguggugccuuggaggga

SEQ ID NO: 3744537 - RNA, 22 nt, Human
gaccagugguuuccagucauga

SEQ ID NO: 3744538 - RNA, 15 nt, Human
gaccaguugcacuug

SEQ ID NO: 3744539 - RNA, 14 nt, Human
gaccaguugcaguc

SEQ ID NO: 3744540 - RNA, 17 nt, Human
gaccaguugggagcacu

SEQ ID NO: 3744541 - RNA, 20 nt, Human
gaccaguugggagcacugga

SEQ ID NO: 3744542 - RNA, 13 nt, Human
gaccauacuaauu

SEQ ID NO: 3744543 - RNA, 19 nt, Human
gaccauccacucuacccuc

SEQ ID NO: 3744544 - RNA, 16 nt, Human
gaccaucccugaaggc

SEQ ID NO: 3744545 - RNA, 20 nt, Human
gaccauccuggccaacauga

SEQ ID NO: 3744546 - RNA, 21 nt, Human
gaccaugcucaucugcugguc

SEQ ID NO: 3744547 - RNA, 22 nt, Human
gaccaugcucaucugcuggucc

SEQ ID NO: 3744548 - RNA, 19 nt, Human
gaccaugcugucuggcaca

SEQ ID NO: 3744549 - RNA, 16 nt, Human
gaccauggacacuaca

SEQ ID NO: 3744550 - RNA, 15 nt, Human
gaccaugugucacuu

SEQ ID NO: 3744551 - RNA, 21 nt, Human
gaccauucuccaccugccagg

SEQ ID NO: 3744552 - RNA, 22 nt, Human
gaccauucuccaccugccaggg

SEQ ID NO: 3744553 - RNA, 19 nt, Human
gaccauuggggcucccagc

SEQ ID NO: 3744554 - RNA, 21 nt, Human
gaccauuggggcucccagcca

SEQ ID NO: 3744555 - RNA, 13 nt, Human
gaccauuuauaau

SEQ ID NO: 3744556 - RNA, 21 nt, Human
gaccauuuauaauguuaguag

SEQ ID NO: 3744557 - RNA, 11 nt, Human
gaccauuuucc

SEQ ID NO: 3744558 - RNA, 13 nt, Human
gaccauuuuccug

SEQ ID NO: 3744559 - RNA, 20 nt, Human
gaccauuuuuuaauuuacuu

SEQ ID NO: 3744560 - RNA, 19 nt, Human
gacccaaaaggcagaagca

SEQ ID NO: 3744561 - RNA, 18 nt, Human
gacccaaggaaaacugca

SEQ ID NO: 3744562 - RNA, 18 nt, Human
gacccaccccugugcucc

SEQ ID NO: 3744563 - RNA, 12 nt, Human
gacccacugcuu

SEQ ID NO: 3744564 - RNA, 18 nt, Human
gacccacugguuccuucu

SEQ ID NO: 3744565 - RNA, 18 nt, Human
gacccacuucucaucaca

SEQ ID NO: 3744566 - RNA, 19 nt, Human
gacccacuucucaucacac

SEQ ID NO: 3744567 - RNA, 16 nt, Human
gacccagacccagugg

SEQ ID NO: 3744568 - RNA, 15 nt, Human
gacccagauccucac

SEQ ID NO: 3744569 - RNA, 15 nt, Human
gacccagccaggccc

SEQ ID NO: 3744570 - RNA, 17 nt, Human
gacccagccaggcccag

SEQ ID NO: 3744571 - RNA, 12 nt, Human
gacccaggacag

SEQ ID NO: 3744572 - RNA, 22 nt, Human
gacccaggacaggauccaggcc

SEQ ID NO: 3744573 - RNA, 11 nt, Human
gacccaggccg

SEQ ID NO: 3744574 - RNA, 22 nt, Human
gacccaggccgcagcucuugcc

SEQ ID NO: 3744575 - RNA, 17 nt, Human
gacccaggcuccgcccu

SEQ ID NO: 3744576 - RNA, 17 nt, Human
gacccagggaacagcca

SEQ ID NO: 3744577 - RNA, 19 nt, Human
gacccagggaacagccacu

SEQ ID NO: 3744578 - RNA, 22 nt, Human
gacccagugagauuacagagga

SEQ ID NO: 3744579 - RNA, 10 nt, Human
gacccagugc

SEQ ID NO: 3744580 - RNA, 12 nt, Human
gacccagugcag

SEQ ID NO: 3744581 - RNA, 14 nt, Human
gacccagugcagaa

SEQ ID NO: 3744582 - RNA, 17 nt, Human
gacccagugcccccacu

SEQ ID NO: 3744583 - RNA, 18 nt, Human
gacccaguggcagggcac

SEQ ID NO: 3744584 - RNA, 20 nt, Human
gacccaguggcagggcacag

SEQ ID NO: 3744585 - RNA, 16 nt, Human
gacccaugcugcccug

SEQ ID NO: 3744586 - RNA, 18 nt, Human
gacccaugcugcccugug

SEQ ID NO: 3744587 - RNA, 19 nt, Human
gacccaugcugcccuguga

SEQ ID NO: 3744588 - RNA, 14 nt, Human
gacccaugggcagg

SEQ ID NO: 3744589 - RNA, 18 nt, Human
gacccaugggcaggagac

SEQ ID NO: 3744590 - RNA, 14 nt, Human
gacccauuccuucc

SEQ ID NO: 3744591 - RNA, 22 nt, Human
gacccauuugauauuuuuuaaa

SEQ ID NO: 3744592 - RNA, 16 nt, Human
gaccccaaagagccug

SEQ ID NO: 3744593 - RNA, 18 nt, Human
gaccccaaagagccugga

SEQ ID NO: 3744594 - RNA, 20 nt, Human
gaccccaaagagccuggaga

SEQ ID NO: 3744595 - RNA, 22 nt, Human
gaccccacuccggcccuccaga

SEQ ID NO: 3744596 - RNA, 11 nt, Human
gaccccagaau

SEQ ID NO: 3744597 - RNA, 14 nt, Human
gaccccagcuggga

SEQ ID NO: 3744598 - RNA, 16 nt, Human
gaccccagcugggagg

SEQ ID NO: 3744599 - RNA, 11 nt, Human
gaccccagggc

SEQ ID NO: 3744600 - RNA, 15 nt, Human
gaccccagggcacag

SEQ ID NO: 3744601 - RNA, 19 nt, Human
gaccccaucaccuacucac

SEQ ID NO: 3744602 - RNA, 19 nt, Human
gaccccaucugugaauaag

SEQ ID NO: 3744603 - RNA, 14 nt, Human
gacccccaccccuu

SEQ ID NO: 3744604 - RNA, 16 nt, Human
gacccccaccccuucc

SEQ ID NO: 3744605 - RNA, 21 nt, Human
gacccccaccccuuccccacu

SEQ ID NO: 3744606 - RNA, 22 nt, Human
gacccccaccccuuccccacug

SEQ ID NO: 3744607 - RNA, 19 nt, Human
gacccccacucucauuccc

SEQ ID NO: 3744608 - RNA, 17 nt, Human
gacccccagcuccggcc

SEQ ID NO: 3744609 - RNA, 23 nt, Human
gacccccagcuccggccuguccu

SEQ ID NO: 3744610 - RNA, 12 nt, Human
gacccccaggac

SEQ ID NO: 3744611 - RNA, 17 nt, Human
gaccccccgugggcucc

SEQ ID NO: 3744612 - RNA, 18 nt, Human
gaccccccucaggacccu

SEQ ID NO: 3744613 - RNA, 15 nt, Human
gacccccgcccccug

SEQ ID NO: 3744614 - RNA, 17 nt, Human
gacccccucucccugca

SEQ ID NO: 3744615 - RNA, 17 nt, Human
gaccccgacgccacagc

SEQ ID NO: 3744616 - RNA, 22 nt, Human
gaccccgacgccacagcccagc

SEQ ID NO: 3744617 - RNA, 21 nt, Human
gaccccuaguucccucugcuc

SEQ ID NO: 3744618 - RNA, 13 nt, Human
gaccccucaccuu

SEQ ID NO: 3744619 - RNA, 22 nt, Human
gaccccucaccuugcaacacac

SEQ ID NO: 3744620 - RNA, 11 nt, Human
gaccccuccuc

SEQ ID NO: 3744621 - RNA, 12 nt, Human
gaccccuccuca

SEQ ID NO: 3744622 - RNA, 15 nt, Human
gaccccuccucacug

SEQ ID NO: 3744623 - RNA, 13 nt, Human
gaccccuccuccc

SEQ ID NO: 3744624 - RNA, 14 nt, Human
gaccccuccucccu

SEQ ID NO: 3744625 - RNA, 14 nt, Human
gaccccuccugggg

SEQ ID NO: 3744626 - RNA, 17 nt, Human
gaccccuccuggggcca

SEQ ID NO: 3744627 - RNA, 13 nt, Human
gaccccucuggcc

SEQ ID NO: 3744628 - RNA, 14 nt, Human
gaccccugaccccu

SEQ ID NO: 3744629 - RNA, 15 nt, Human
gaccccuggccuccg

SEQ ID NO: 3744630 - RNA, 21 nt, Human
gaccccuggcuuuucacugcu

SEQ ID NO: 3744631 - RNA, 22 nt, Human
gaccccuggcuuuucacugcug

SEQ ID NO: 3744632 - RNA, 13 nt, Human
gaccccugucucc

SEQ ID NO: 3744633 - RNA, 16 nt, Human
gaccccuguucaugcc

SEQ ID NO: 3744634 - RNA, 18 nt, Human
gaccccuuuucagcuucu

SEQ ID NO: 3744635 - RNA, 14 nt, Human
gguuuacuuucaaa

SEQ ID NO: 3744636 - RNA, 20 nt, Human
gguuuaggcugguggcccag

SEQ ID NO: 3744637 - RNA, 18 nt, Human
gguuuauaauuuucugaa

SEQ ID NO: 3744638 - RNA, 21 nt, Human
gguuuaugacaguaauugugu

SEQ ID NO: 3744639 - RNA, 20 nt, Human
gguuucacccuuaacccaag

SEQ ID NO: 3744640 - RNA, 13 nt, Human
gguuucagaaaug

SEQ ID NO: 3744641 - RNA, 19 nt, Human
gguuucccuacugaagccc

SEQ ID NO: 3744642 - RNA, 15 nt, Human
gguuuccugcccugg

SEQ ID NO: 3744643 - RNA, 16 nt, Human
gguuucgcagccugag

SEQ ID NO: 3744644 - RNA, 16 nt, Human
gguuucuaaagcugcc

SEQ ID NO: 3744645 - RNA, 21 nt, Human
gguuucucgcauaggaccuuu

SEQ ID NO: 3744646 - RNA, 18 nt, Human
gguuucucucuacagugc

SEQ ID NO: 3744647 - RNA, 13 nt, Human
gguuucucuucuc

SEQ ID NO: 3744648 - RNA, 15 nt, Human
gguuucucuucuccc

SEQ ID NO: 3744649 - RNA, 13 nt, Human
gguuucugaaaau

SEQ ID NO: 3744650 - RNA, 17 nt, Human
gguuucugcccugccca

SEQ ID NO: 3744651 - RNA, 13 nt, Human
gguuucuguuggc

SEQ ID NO: 3744652 - RNA, 22 nt, Human
gguuucuuucagauuuuuugaa

SEQ ID NO: 3744653 - RNA, 22 nt, Human
gguuucuuuuugaaucuuuaau

SEQ ID NO: 3744654 - RNA, 21 nt, Human
gguuugaaagugaauaaacuu

SEQ ID NO: 3744655 - RNA, 15 nt, Human
gguuugaagccugga

SEQ ID NO: 3744656 - RNA, 22 nt, Human
gguuugagauugccccaggucu

SEQ ID NO: 3744657 - RNA, 14 nt, Human
gguuugcaaggaag

SEQ ID NO: 3744658 - RNA, 17 nt, Human
gguuugccgguggugca

SEQ ID NO: 3744659 - RNA, 19 nt, Human
gguuuggaccccagcuggg

SEQ ID NO: 3744660 - RNA, 20 nt, Human
gguuuggaccccagcuggga

SEQ ID NO: 3744661 - RNA, 15 nt, Human
gguuuggagcugauc

SEQ ID NO: 3744662 - RNA, 19 nt, Human
gguuuggcgggccaaggac

SEQ ID NO: 3744663 - RNA, 14 nt, Human
gguuugggaccccu

SEQ ID NO: 3744664 - RNA, 19 nt, Human
gguuuggggagcagagaca

SEQ ID NO: 3744665 - RNA, 15 nt, Human
gguuuggucugggac

SEQ ID NO: 3744666 - RNA, 17 nt, Human
gguuugguuccucucug

SEQ ID NO: 3744667 - RNA, 15 nt, Human
gguuugguuugcuuu

SEQ ID NO: 3744668 - RNA, 22 nt, Human
gguuuguuuagaagaagugugu

SEQ ID NO: 3744669 - RNA, 15 nt, Human
gguuuuaaaaaaauc

SEQ ID NO: 3744670 - RNA, 13 nt, Human
gguuuuaaacuuu

SEQ ID NO: 3744671 - RNA, 14 nt, Human
gguuuuaaacuuuc

SEQ ID NO: 3744672 - RNA, 17 nt, Human
gguuuuaaguuguuugc

SEQ ID NO: 3744673 - RNA, 17 nt, Human
gguuuuaauuuaguaaa

SEQ ID NO: 3744674 - RNA, 21 nt, Human
gguuuuaauuuaguaaaccaa

SEQ ID NO: 3744675 - RNA, 17 nt, Human
gguuuuagguagaaaaa

SEQ ID NO: 3744676 - RNA, 16 nt, Human
gguuuuagguucuaaa

SEQ ID NO: 3744677 - RNA, 17 nt, Human
gguuuuauaaggcugau

SEQ ID NO: 3744678 - RNA, 16 nt, Human
gguuuuauacugaagg

SEQ ID NO: 3744679 - RNA, 17 nt, Human
gguuuucacauuggaaa

SEQ ID NO: 3744680 - RNA, 13 nt, Human
gguuuuccacgcu

SEQ ID NO: 3744681 - RNA, 18 nt, Human
gguuuuccccucccuggg

SEQ ID NO: 3744682 - RNA, 22 nt, Human
gguuuuccgcauucuuuguaca

SEQ ID NO: 3744683 - RNA, 13 nt, Human
gguuuuccugaaa

SEQ ID NO: 3744684 - RNA, 13 nt, Human
gguuuucgagauu

SEQ ID NO: 3744685 - RNA, 13 nt, Human
gguuuucuguucu

SEQ ID NO: 3744686 - RNA, 15 nt, Human
gguuuucuguucuuu

SEQ ID NO: 3744687 - RNA, 18 nt, Human
gguuuucuuaaccaucuu

SEQ ID NO: 3744688 - RNA, 13 nt, Human
gguuuugacugga

SEQ ID NO: 3744689 - RNA, 21 nt, Human
gguuuuggcaaacgcuaaaga

SEQ ID NO: 3744690 - RNA, 17 nt, Human
gguuuuguaagaugcug

SEQ ID NO: 3744691 - RNA, 13 nt, Human
gguuuuguacaau

SEQ ID NO: 3744692 - RNA, 17 nt, Human
gguuuugugccaucugu

SEQ ID NO: 3744693 - RNA, 19 nt, Human
gguuuuguuccccuccucc

SEQ ID NO: 3744694 - RNA, 22 nt, Human
gguuuuguuccccuccuccacu

SEQ ID NO: 3744695 - RNA, 13 nt, Human
gguuuuuaccugu

SEQ ID NO: 3744696 - RNA, 22 nt, Human
gguuuuuaccugucacauugca

SEQ ID NO: 3744697 - RNA, 19 nt, Human
gguuuuuacugcucugaga

SEQ ID NO: 3744698 - RNA, 20 nt, Human
gguuuuuacugcucugagaa

SEQ ID NO: 3744699 - RNA, 14 nt, Human
gguuuuuacuguua

SEQ ID NO: 3744700 - RNA, 17 nt, Human
gguuuuuauuucuccuu

SEQ ID NO: 3744701 - RNA, 20 nt, Human
gguuuuuuguguacuuuuug

SEQ ID NO: 3744702 - RNA, 9 nt, Human
gguuuuuuu

SEQ ID NO: 3744703 - RNA, 21 nt, Human
gguuuuuuuguacuuuguaca

SEQ ID NO: 3744704 - RNA, 23 nt, Human
guaaaaaaaaaaaaaauguucuu

SEQ ID NO: 3744705 - RNA, 16 nt, Human
guaaaaaaaaaaaagu

SEQ ID NO: 3744706 - RNA, 23 nt, Human
guaaaaaaaccaccaaaaacaaa

SEQ ID NO: 3744707 - RNA, 23 nt, Human
guaaaaaauuuaaaaagcccaac

SEQ ID NO: 3744708 - RNA, 13 nt, Human
guaaaaaauuuau

SEQ ID NO: 3744709 - RNA, 18 nt, Human
guaaaaacaaagaaauua

SEQ ID NO: 3744710 - RNA, 18 nt, Human
guaaaaacagcauugcuu

SEQ ID NO: 3744711 - RNA, 19 nt, Human
guaaaaacagcauugcuuu

SEQ ID NO: 3744712 - RNA, 14 nt, Human
guaaaaacugaagu

SEQ ID NO: 3744713 - RNA, 22 nt, Human
guaaaaacugaaguucugccuc

SEQ ID NO: 3744714 - RNA, 19 nt, Human
guaaaaaguauuuuuucaa

SEQ ID NO: 3744715 - RNA, 13 nt, Human
guaaaaauaaaau

SEQ ID NO: 3744716 - RNA, 18 nt, Human
guaaaaauaaaauacuuu

SEQ ID NO: 3744717 - RNA, 17 nt, Human
guaaaaauggaaacuau

SEQ ID NO: 3744718 - RNA, 14 nt, Human
guaaaaauuaaaaa

SEQ ID NO: 3744719 - RNA, 12 nt, Human
guaaaacaaaaa

SEQ ID NO: 3744720 - RNA, 20 nt, Human
guaaaacaaaaauguaauga

SEQ ID NO: 3744721 - RNA, 17 nt, Human
guaaaacagggccacau

SEQ ID NO: 3744722 - RNA, 20 nt, Human
guaaaacagggccacauaga

SEQ ID NO: 3744723 - RNA, 14 nt, Human
guaaaaccacagca

SEQ ID NO: 3744724 - RNA, 19 nt, Human
guaaaacgcugucaaaagu

SEQ ID NO: 3744725 - RNA, 13 nt, Human
guaaaacugaggc

SEQ ID NO: 3744726 - RNA, 19 nt, Human
guaaaagaaagaaagaaaa

SEQ ID NO: 3744727 - RNA, 18 nt, Human
guaaaagcaacaucagcu

SEQ ID NO: 3744728 - RNA, 19 nt, Human
guaaaagcaacaucagcuu

SEQ ID NO: 3744729 - RNA, 11 nt, Human
guaaaagcauc

SEQ ID NO: 3744730 - RNA, 20 nt, Human
guaaaaggccaaaccucugu

SEQ ID NO: 3744731 - RNA, 20 nt, Human
guaaaauaaauauugucuuu

SEQ ID NO: 3744732 - RNA, 22 nt, Human
guaaaauacuuuuacucugccu

SEQ ID NO: 3744733 - RNA, 16 nt, Human
guaaaauauagcugua

SEQ ID NO: 3744734 - RNA, 16 nt, Human
guaaaaucuugucaug

SEQ ID NO: 3744735 - RNA, 18 nt, Human
guaaaaucuugucaugug

SEQ ID NO: 3744736 - RNA, 19 nt, Human
guaaaaucuugucaugugu

SEQ ID NO: 3744737 - RNA, 20 nt, Human
guaaaaucuugucaugugua

SEQ ID NO: 3744738 - RNA, 21 nt, Human
guaaaaucuugucauguguau

SEQ ID NO: 3744739 - RNA, 23 nt, Human
guaaaaucuugucauguguauaa

SEQ ID NO: 3744740 - RNA, 14 nt, Human
guaaaaucuuucuu

SEQ ID NO: 3744741 - RNA, 16 nt, Human
guaaaaugaagaauuu

SEQ ID NO: 3744742 - RNA, 17 nt, Human
guaaaaugaagaauuua

SEQ ID NO: 3744743 - RNA, 21 nt, Human
guaaaaugacaaucaugugug

SEQ ID NO: 3744744 - RNA, 13 nt, Human
guaaaauggaaaa

SEQ ID NO: 3744745 - RNA, 20 nt, Human
guaaaauggaaaacuuaguu

SEQ ID NO: 3744746 - RNA, 19 nt, Human
guaaaauguauuauguccu

SEQ ID NO: 3744747 - RNA, 17 nt, Human
guaaaaugucuuuccaa

SEQ ID NO: 3744748 - RNA, 12 nt, Human
guaaaaugugaa

SEQ ID NO: 3744749 - RNA, 19 nt, Human
guaaaaugugaagugaaug

SEQ ID NO: 3744750 - RNA, 15 nt, Human
guaaaauguugaaua

SEQ ID NO: 3744751 - RNA, 12 nt, Human
guaaaauucuaa

SEQ ID NO: 3744752 - RNA, 13 nt, Human
guaaaauucuaaa

SEQ ID NO: 3744753 - RNA, 22 nt, Human
guaaaauucuaaauaaaauaua

SEQ ID NO: 3744754 - RNA, 16 nt, Human
guaaaauugaaaggca

SEQ ID NO: 3744755 - RNA, 13 nt, Human
guaaaauugcaug

SEQ ID NO: 3744756 - RNA, 14 nt, Human
guaaaauugccaua

SEQ ID NO: 3744757 - RNA, 19 nt, Human
guaaaauugcugugcuuua

SEQ ID NO: 3744758 - RNA, 14 nt, Human
guaaacaaacucuu

SEQ ID NO: 3744759 - RNA, 18 nt, Human
guaaacagugccugcuga

SEQ ID NO: 3744760 - RNA, 20 nt, Human
guaaacaguuuuuauuaaaa

SEQ ID NO: 3744761 - RNA, 22 nt, Human
guaaacauguguuuuaauucca

SEQ ID NO: 3744762 - RNA, 20 nt, Human
guaaaccacugaaaaaauau

SEQ ID NO: 3744763 - RNA, 14 nt, Human
guaaacgacacucu

SEQ ID NO: 3744764 - RNA, 16 nt, Human
guaaacguuucaguaa

SEQ ID NO: 3744765 - RNA, 22 nt, Human
guaaacuaucuuggugaauuuu

SEQ ID NO: 3744766 - RNA, 16 nt, Human
guaaacuauuuaucug

SEQ ID NO: 3744767 - RNA, 15 nt, Human
guaaacucaaaacuu

SEQ ID NO: 3744768 - RNA, 19 nt, Human
guaaacuguacuagucugu

SEQ ID NO: 3744769 - RNA, 16 nt, Human
guaaacuguggaugau

SEQ ID NO: 3744770 - RNA, 19 nt, Human
guaaacuuuaucacuuaaa

SEQ ID NO: 3744771 - RNA, 16 nt, Human
guaaacuuugaaauau

SEQ ID NO: 3744772 - RNA, 16 nt, Human
guaaacuuuuugugcu

SEQ ID NO: 3744773 - RNA, 14 nt, Human
guaaagaaagagag

SEQ ID NO: 3744774 - RNA, 15 nt, Human
guaaagaaagagaga

SEQ ID NO: 3744775 - RNA, 22 nt, Human
guaaagaaauuuaaaagacacu

SEQ ID NO: 3744776 - RNA, 14 nt, Human
guaaagaaauuuac

SEQ ID NO: 3744777 - RNA, 15 nt, Human
guaaagacuggcuuu

SEQ ID NO: 3744778 - RNA, 14 nt, Human
guaaagagaaacuu

SEQ ID NO: 3744779 - RNA, 15 nt, Human
guaaagagaaacuuu

SEQ ID NO: 3744780 - RNA, 23 nt, Human
guaaagagaccuaccucagguug

SEQ ID NO: 3744781 - RNA, 22 nt, Human
guaaagauauuuuuaucuuuau

SEQ ID NO: 3744782 - RNA, 16 nt, Human
guaaagaucaauaaaa

SEQ ID NO: 3744783 - RNA, 20 nt, Human
guaaagcuaaaauaaagaaa

SEQ ID NO: 3744784 - RNA, 12 nt, Human
guaaagcuccua

SEQ ID NO: 3744785 - RNA, 21 nt, Human
guaugaaucuaugccaaagau

SEQ ID NO: 3744786 - RNA, 15 nt, Human
guaugaaucuauuug

SEQ ID NO: 3744787 - RNA, 15 nt, Human
guaugaaugcagugg

SEQ ID NO: 3744788 - RNA, 14 nt, Human
guaugaauuauuca

SEQ ID NO: 3744789 - RNA, 12 nt, Human
guaugaauuuga

SEQ ID NO: 3744790 - RNA, 17 nt, Human
guaugacgcugauacau

SEQ ID NO: 3744791 - RNA, 20 nt, Human
guaugaggcauuuguuugaa

SEQ ID NO: 3744792 - RNA, 16 nt, Human
guaugauacuucgaca

SEQ ID NO: 3744793 - RNA, 14 nt, Human
guaugaucaaaugu

SEQ ID NO: 3744794 - RNA, 19 nt, Human
guaugaucggcaggacacc

SEQ ID NO: 3744795 - RNA, 14 nt, Human
guaugcacacacau

SEQ ID NO: 3744796 - RNA, 15 nt, Human
guaugcaugugaaga

SEQ ID NO: 3744797 - RNA, 17 nt, Human
guaugcaugugaagaaa

SEQ ID NO: 3744798 - RNA, 18 nt, Human
guaugcauuauuaaauug

SEQ ID NO: 3744799 - RNA, 20 nt, Human
guaugccaccaacuuacaaa

SEQ ID NO: 3744800 - RNA, 13 nt, Human
guaugcugcuuuu

SEQ ID NO: 3744801 - RNA, 16 nt, Human
guaugcuuauuuuaaa

SEQ ID NO: 3744802 - RNA, 13 nt, Human
guaugcuucauac

SEQ ID NO: 3744803 - RNA, 13 nt, Human
guauggaaauaaa

SEQ ID NO: 3744804 - RNA, 20 nt, Human
guauggaagguggagcguuc

SEQ ID NO: 3744805 - RNA, 18 nt, Human
guauggaauacaguguua

SEQ ID NO: 3744806 - RNA, 14 nt, Human
guauggcucugcac

SEQ ID NO: 3744807 - RNA, 22 nt, Human
guauggcuuuauuuuuuugaac

SEQ ID NO: 3744808 - RNA, 15 nt, Human
guaugggagagaaga

SEQ ID NO: 3744809 - RNA, 19 nt, Human
guauggguuaaaucaaaga

SEQ ID NO: 3744810 - RNA, 13 nt, Human
guaugguggcugg

SEQ ID NO: 3744811 - RNA, 16 nt, Human
guaugguggcuggguu

SEQ ID NO: 3744812 - RNA, 14 nt, Human
guauguaaacagga

SEQ ID NO: 3744813 - RNA, 18 nt, Human
guaugucaacuuuaugca

SEQ ID NO: 3744814 - RNA, 19 nt, Human
guaugucugccauguugcc

SEQ ID NO: 3744815 - RNA, 23 nt, Human
guaugugacaccaaagccaccuc

SEQ ID NO: 3744816 - RNA, 16 nt, Human
guaugugcacugucac

SEQ ID NO: 3744817 - RNA, 11 nt, Human
guaugugccau

SEQ ID NO: 3744818 - RNA, 14 nt, Human
guaugugccauuua

SEQ ID NO: 3744819 - RNA, 16 nt, Human
guaugugcuguaauuu

SEQ ID NO: 3744820 - RNA, 17 nt, Human
guauguggaaguguggg

SEQ ID NO: 3744821 - RNA, 21 nt, Human
guauguggaagugugggucug

SEQ ID NO: 3744822 - RNA, 20 nt, Human
guaugugggggucugugugu

SEQ ID NO: 3744823 - RNA, 15 nt, Human
guauguguaauaaau

SEQ ID NO: 3744824 - RNA, 13 nt, Human
guaugugugugug

SEQ ID NO: 3744825 - RNA, 16 nt, Human
guauguguuugugugu

SEQ ID NO: 3744826 - RNA, 18 nt, Human
guauguuaagcucuuuau

SEQ ID NO: 3744827 - RNA, 17 nt, Human
guauguugucaaagaga

SEQ ID NO: 3744828 - RNA, 19 nt, Human
guauguuuaaucuguuaug

SEQ ID NO: 3744829 - RNA, 14 nt, Human
guauguuuacacug

SEQ ID NO: 3744830 - RNA, 21 nt, Human
guauguuugcacacuugugug

SEQ ID NO: 3744831 - RNA, 15 nt, Human
guauguuuuacacug

SEQ ID NO: 3744832 - RNA, 13 nt, Human
guauguuuuucag

SEQ ID NO: 3744833 - RNA, 20 nt, Human
guauguuuuucaguucaaag

SEQ ID NO: 3744834 - RNA, 21 nt, Human
guauguuuuucaguucaaagu

SEQ ID NO: 3744835 - RNA, 14 nt, Human
guauuaaaacauug

SEQ ID NO: 3744836 - RNA, 17 nt, Human
guauuaaaacauuggau

SEQ ID NO: 3744837 - RNA, 19 nt, Human
guauuaaaggggggagggg

SEQ ID NO: 3744838 - RNA, 13 nt, Human
guauuaaaugcca

SEQ ID NO: 3744839 - RNA, 22 nt, Human
guauuaaauuacauuuguaauu

SEQ ID NO: 3744840 - RNA, 15 nt, Human
guauuaagaaaggaa

SEQ ID NO: 3744841 - RNA, 21 nt, Human
guauuaagcccacaguauauu

SEQ ID NO: 3744842 - RNA, 18 nt, Human
guauuaagucaagaauau

SEQ ID NO: 3744843 - RNA, 19 nt, Human
guauuaauaaauagagcaa

SEQ ID NO: 3744844 - RNA, 21 nt, Human
guauuaauacuaaaauauguc

SEQ ID NO: 3744845 - RNA, 22 nt, Human
guauuaauacuaaaauaugucu

SEQ ID NO: 3744846 - RNA, 18 nt, Human
guauuacacucuguaauu

SEQ ID NO: 3744847 - RNA, 13 nt, Human
guauuacacugua

SEQ ID NO: 3744848 - RNA, 23 nt, Human
guauuacccaagaaguaaagaug

SEQ ID NO: 3744849 - RNA, 19 nt, Human
guauuagggguaauauauu

SEQ ID NO: 3744850 - RNA, 21 nt, Human
guauuagugauauuucucuag

SEQ ID NO: 3744851 - RNA, 22 nt, Human
guauuauacaugugauacauuu

SEQ ID NO: 3744852 - RNA, 22 nt, Human
guauuaucaaagggauaaagaa

SEQ ID NO: 3744853 - RNA, 17 nt, Human
guauuaugcuucuugga

SEQ ID NO: 3744854 - RNA, 16 nt, Human
guauuaugucucuucu

SEQ ID NO: 3744855 - RNA, 16 nt, Human
guauuauucugcagca

SEQ ID NO: 3744856 - RNA, 17 nt, Human
guauuauugcuguugcu

SEQ ID NO: 3744857 - RNA, 16 nt, Human
guauuauuuacauuua

SEQ ID NO: 3744858 - RNA, 19 nt, Human
guauucauauuuguacuuu

SEQ ID NO: 3744859 - RNA, 23 nt, Human
guauucauauuuguacuuucugu

SEQ ID NO: 3744860 - RNA, 15 nt, Human
guauuccaccuuaaa

SEQ ID NO: 3744861 - RNA, 20 nt, Human
guauuccaccuuaaauuaaa

SEQ ID NO: 3744862 - RNA, 21 nt, Human
guauucccaaaaauuacuuug

SEQ ID NO: 3744863 - RNA, 19 nt, Human
guauucccauuagaccaag

SEQ ID NO: 3744864 - RNA, 16 nt, Human
guauuccccuucccac

SEQ ID NO: 3744865 - RNA, 14 nt, Human
guauuccugccucc

SEQ ID NO: 3744866 - RNA, 19 nt, Human
guauucuaauaagcuaguu

SEQ ID NO: 3744867 - RNA, 22 nt, Human
guauucuaauaagcuaguugaa

SEQ ID NO: 3744868 - RNA, 19 nt, Human
guauucucugagcugugca

SEQ ID NO: 3744869 - RNA, 23 nt, Human
guauucugccuuugcagaaacag

SEQ ID NO: 3744870 - RNA, 15 nt, Human
guauucuuaaaaugc

SEQ ID NO: 3744871 - RNA, 19 nt, Human
guauucuuaaaaugcaaua

SEQ ID NO: 3744872 - RNA, 14 nt, Human
guauucuugucaaa

SEQ ID NO: 3744873 - RNA, 23 nt, Human
guauucuuugauguuaacacauu

SEQ ID NO: 3744874 - RNA, 18 nt, Human
guauugaagcauuuuaua

SEQ ID NO: 3744875 - RNA, 12 nt, Human
guauugaaucau

SEQ ID NO: 3744876 - RNA, 11 nt, Human
guauugacaaa

SEQ ID NO: 3744877 - RNA, 15 nt, Human
guauugacaaaaugu

SEQ ID NO: 3744878 - RNA, 16 nt, Human
guauugacaaaauguu

SEQ ID NO: 3744879 - RNA, 17 nt, Human
guauugacaaaauguua

SEQ ID NO: 3744880 - RNA, 14 nt, Human
guauugagauacuu

SEQ ID NO: 3744881 - RNA, 17 nt, Human
guauugagauauuacac

SEQ ID NO: 3744882 - RNA, 16 nt, Human
guauugagauuucuua

SEQ ID NO: 3744883 - RNA, 14 nt, Human
guauugcacauugu

SEQ ID NO: 3744884 - RNA, 18 nt, Human
guauugcacauuguaaaa

SEQ ID NO: 3744885 - RNA, 20 nt, Human
guauugcuguccuugaaugc

SEQ ID NO: 3744886 - RNA, 10 nt, Human
guauuggaaa

SEQ ID NO: 3744887 - RNA, 13 nt, Human
guauuggcaaaga

SEQ ID NO: 3744888 - RNA, 14 nt, Human
guauuggccuggag

SEQ ID NO: 3744889 - RNA, 17 nt, Human
guauuguaaacaugugu

SEQ ID NO: 3744890 - RNA, 13 nt, Human
guauuguaaauua

SEQ ID NO: 3744891 - RNA, 20 nt, Human
guauuguaccuuuuaacacc

SEQ ID NO: 3744892 - RNA, 22 nt, Human
guauuguauuuauucaauaaag

SEQ ID NO: 3744893 - RNA, 17 nt, Human
guauugucugaacuugc

SEQ ID NO: 3744894 - RNA, 14 nt, Human
guauugugcaaugu

SEQ ID NO: 3744895 - RNA, 19 nt, Human
guauugugcaauguguaua

SEQ ID NO: 3744896 - RNA, 22 nt, Human
guauugugcaauguguauaaac

SEQ ID NO: 3744897 - RNA, 23 nt, Human
guauugugcaauguguauaaaca

SEQ ID NO: 3744898 - RNA, 18 nt, Human
guauugugucuuuugcau

SEQ ID NO: 3744899 - RNA, 16 nt, Human
guauuguuagauguuu

SEQ ID NO: 3744900 - RNA, 14 nt, Human
guauuguucccagu

SEQ ID NO: 3744901 - RNA, 20 nt, Human
guauuguuguccuuuucaua

SEQ ID NO: 3744902 - RNA, 18 nt, Human
guauuguuuaaaauguaa

SEQ ID NO: 3744903 - RNA, 17 nt, Human
guauuuaaaaauagaaa

SEQ ID NO: 3744904 - RNA, 18 nt, Human
guauuuaaacuaucuugu

SEQ ID NO: 3744905 - RNA, 9 nt, Human
guauuuaac

SEQ ID NO: 3744906 - RNA, 17 nt, Human
guauuuaacagaaauug

SEQ ID NO: 3744907 - RNA, 19 nt, Human
guauuuaacagaaauugua

SEQ ID NO: 3744908 - RNA, 15 nt, Human
guauuuaagcaaaua

SEQ ID NO: 3744909 - RNA, 19 nt, Human
guauuuaauuagugcuaag

SEQ ID NO: 3744910 - RNA, 18 nt, Human
guauuuaauuguaaacug

SEQ ID NO: 3744911 - RNA, 19 nt, Human
guauuuaauuguaaacugu

SEQ ID NO: 3744912 - RNA, 22 nt, Human
guauuuaauuguaaacuguacu

SEQ ID NO: 3744913 - RNA, 16 nt, Human
guauuuaauuuugaca

SEQ ID NO: 3744914 - RNA, 20 nt, Human
guauuuaccaaaaauuuugu

SEQ ID NO: 3744915 - RNA, 19 nt, Human
guauuuacgcuuugauuca

SEQ ID NO: 3744916 - RNA, 12 nt, Human
guauuuauauau

SEQ ID NO: 3744917 - RNA, 19 nt, Human
guauuuauucaauaaagua

SEQ ID NO: 3744918 - RNA, 22 nt, Human
guauuuauucaauaaaguauuu

SEQ ID NO: 3744919 - RNA, 13 nt, Human
guauuuauuccau

SEQ ID NO: 3744920 - RNA, 21 nt, Human
guauuuauuccauauucaugu

SEQ ID NO: 3744921 - RNA, 23 nt, Human
guauuuauuccauauucauguaa

SEQ ID NO: 3744922 - RNA, 13 nt, Human
guauuuauuuaaa

SEQ ID NO: 3744923 - RNA, 14 nt, Human
guauuuauuuaaaa

SEQ ID NO: 3744924 - RNA, 18 nt, Human
guauuuauuuaaaagauu

SEQ ID NO: 3744925 - RNA, 21 nt, Human
guauuuauuuaaaagauucau

SEQ ID NO: 3744926 - RNA, 14 nt, Human
guauuuauuuaugu

SEQ ID NO: 3744927 - RNA, 17 nt, Human
guauuuauuuuccuccc

SEQ ID NO: 3744928 - RNA, 20 nt, Human
guauuuauuuuccuccccag

SEQ ID NO: 3744929 - RNA, 22 nt, Human
guauuuauuuuccuccccagca

SEQ ID NO: 3744930 - RNA, 16 nt, Human
guauuuauuuuguaau

SEQ ID NO: 3744931 - RNA, 23 nt, Human
guauuuauuuuguaauuaugauu

SEQ ID NO: 3744932 - RNA, 19 nt, Human
guauuuauuuuuucuuuuc

SEQ ID NO: 3744933 - RNA, 13 nt, Human
guauuucaaauug

SEQ ID NO: 3744934 - RNA, 21 nt, Human
guauuucaguguaguuaauuu

SEQ ID NO: 3744935 - RNA, 13 nt, Human
gacccgcucugga

SEQ ID NO: 3744936 - RNA, 14 nt, Human
gacccgcucuggac

SEQ ID NO: 3744937 - RNA, 15 nt, Human
gacccggaggccaca

SEQ ID NO: 3744938 - RNA, 18 nt, Human
gacccggaggggccuggc

SEQ ID NO: 3744939 - RNA, 13 nt, Human
gacccggcugcgu

SEQ ID NO: 3744940 - RNA, 14 nt, Human
gacccuacaggaga

SEQ ID NO: 3744941 - RNA, 20 nt, Human
gacccuaugggucuaggaca

SEQ ID NO: 3744942 - RNA, 15 nt, Human
gacccucaucuuucu

SEQ ID NO: 3744943 - RNA, 14 nt, Human
gacccucaugcugc

SEQ ID NO: 3744944 - RNA, 22 nt, Human
gacccucaugcugccaauaucc

SEQ ID NO: 3744945 - RNA, 13 nt, Human
gacccuccaaggc

SEQ ID NO: 3744946 - RNA, 21 nt, Human
gacccuccaccgcagaaggaa

SEQ ID NO: 3744947 - RNA, 22 nt, Human
gacccuccaccgcagaaggaag

SEQ ID NO: 3744948 - RNA, 23 nt, Human
gacccuccuguugcacccagccc

SEQ ID NO: 3744949 - RNA, 20 nt, Human
gacccucgcuggcccccacu

SEQ ID NO: 3744950 - RNA, 18 nt, Human
gacccucuaaccucgccc

SEQ ID NO: 3744951 - RNA, 16 nt, Human
gacccucuccacccca

SEQ ID NO: 3744952 - RNA, 23 nt, Human
gacccucugaaugguccaggguu

SEQ ID NO: 3744953 - RNA, 15 nt, Human
gacccucugccacca

SEQ ID NO: 3744954 - RNA, 11 nt, Human
gacccucugcu

SEQ ID NO: 3744955 - RNA, 13 nt, Human
gacccucugggaa

SEQ ID NO: 3744956 - RNA, 23 nt, Human
gacccucugggaaccucccagag

SEQ ID NO: 3744957 - RNA, 19 nt, Human
gacccucuugcccauccug

SEQ ID NO: 3744958 - RNA, 22 nt, Human
gacccucuugcccauccugacu

SEQ ID NO: 3744959 - RNA, 14 nt, Human
gacccugaaaugug

SEQ ID NO: 3744960 - RNA, 17 nt, Human
gacccugaccagcuccc

SEQ ID NO: 3744961 - RNA, 18 nt, Human
gacccugaccagcucccc

SEQ ID NO: 3744962 - RNA, 23 nt, Human
gacccugaccagcucccccuccc

SEQ ID NO: 3744963 - RNA, 18 nt, Human
gacccugaggcccagagg

SEQ ID NO: 3744964 - RNA, 21 nt, Human
gacccugaggcccagagggcc

SEQ ID NO: 3744965 - RNA, 23 nt, Human
gacccugaggcccagagggccug

SEQ ID NO: 3744966 - RNA, 13 nt, Human
gacccugcacccu

SEQ ID NO: 3744967 - RNA, 12 nt, Human
gacccugccagg

SEQ ID NO: 3744968 - RNA, 14 nt, Human
gacccugccaggca

SEQ ID NO: 3744969 - RNA, 12 nt, Human
gacccugcccug

SEQ ID NO: 3744970 - RNA, 13 nt, Human
gacccugcccugu

SEQ ID NO: 3744971 - RNA, 17 nt, Human
gacccugcccugugggc

SEQ ID NO: 3744972 - RNA, 13 nt, Human
gacccugcccuug

SEQ ID NO: 3744973 - RNA, 12 nt, Human
gacccugccucu

SEQ ID NO: 3744974 - RNA, 16 nt, Human
gacccugccucuccca

SEQ ID NO: 3744975 - RNA, 16 nt, Human
gacccuggaggcccca

SEQ ID NO: 3744976 - RNA, 17 nt, Human
gacccugggggcacagg

SEQ ID NO: 3744977 - RNA, 18 nt, Human
gacccugggggcacagga

SEQ ID NO: 3744978 - RNA, 23 nt, Human
gacccuggguaggggaagagaag

SEQ ID NO: 3744979 - RNA, 18 nt, Human
gacccugggugggcucug

SEQ ID NO: 3744980 - RNA, 15 nt, Human
gacccuguugcuaag

SEQ ID NO: 3744981 - RNA, 17 nt, Human
gacccuuacagccucug

SEQ ID NO: 3744982 - RNA, 20 nt, Human
gacccuuacagccucugacu

SEQ ID NO: 3744983 - RNA, 17 nt, Human
gacccuuauaaaauccu

SEQ ID NO: 3744984 - RNA, 20 nt, Human
gacccuuccagacauacgaa

SEQ ID NO: 3744985 - RNA, 23 nt, Human
gacccuucccaaucagcacugaa

SEQ ID NO: 3744986 - RNA, 17 nt, Human
gacccuugacaccugcu

SEQ ID NO: 3744987 - RNA, 21 nt, Human
gacccuuguggucccacccca

SEQ ID NO: 3744988 - RNA, 20 nt, Human
gacccuuuccuuccuucccu

SEQ ID NO: 3744989 - RNA, 22 nt, Human
gacccuuuccuuccuucccugg

SEQ ID NO: 3744990 - RNA, 18 nt, Human
gacccuuuuggguuucug

SEQ ID NO: 3744991 - RNA, 22 nt, Human
gaccgccagauggggccucugu

SEQ ID NO: 3744992 - RNA, 15 nt, Human
gaccgcccccuccuc

SEQ ID NO: 3744993 - RNA, 22 nt, Human
gaccgcccuccgcgaaaauagu

SEQ ID NO: 3744994 - RNA, 20 nt, Human
gaccgcuacaccacucuggc

SEQ ID NO: 3744995 - RNA, 21 nt, Human
gaccgcuacaccacucuggca

SEQ ID NO: 3744996 - RNA, 22 nt, Human
gaccgcuacaccacucuggcag

SEQ ID NO: 3744997 - RNA, 22 nt, Human
gaccgcuuguggggacccaggc

SEQ ID NO: 3744998 - RNA, 14 nt, Human
gaccggaagcuccu

SEQ ID NO: 3744999 - RNA, 17 nt, Human
gaccggacuuuucugca

SEQ ID NO: 3745000 - RNA, 16 nt, Human
gaccggccugccagga

SEQ ID NO: 3745001 - RNA, 19 nt, Human
gaccggccugccaggagga

SEQ ID NO: 3745002 - RNA, 20 nt, Human
gaccggcggaccccagccau

SEQ ID NO: 3745003 - RNA, 13 nt, Human
gaccguccucacc

SEQ ID NO: 3745004 - RNA, 20 nt, Human
gaccgugggcggggccuugc

SEQ ID NO: 3745005 - RNA, 19 nt, Human
gaccuaaaauuugcccucc

SEQ ID NO: 3745006 - RNA, 19 nt, Human
gaccuaaccagggccagaa

SEQ ID NO: 3745007 - RNA, 21 nt, Human
gaccuaaccuaagcaaaacca

SEQ ID NO: 3745008 - RNA, 13 nt, Human
gaccuacaaauca

SEQ ID NO: 3745009 - RNA, 13 nt, Human
gaccuacaggcug

SEQ ID NO: 3745010 - RNA, 21 nt, Human
gaccuacagggggucuggcug

SEQ ID NO: 3745011 - RNA, 23 nt, Human
gaccuacagggggucuggcuggu

SEQ ID NO: 3745012 - RNA, 17 nt, Human
gaccuacuacgcagagg

SEQ ID NO: 3745013 - RNA, 17 nt, Human
gaccuacuguucuaaag

SEQ ID NO: 3745014 - RNA, 19 nt, Human
gucaugaugaaucaguccu

SEQ ID NO: 3745015 - RNA, 16 nt, Human
gucaugaugcucuuuc

SEQ ID NO: 3745016 - RNA, 22 nt, Human
gucaugcagaguauuucuaaag

SEQ ID NO: 3745017 - RNA, 18 nt, Human
gucaugcauaaauaugca

SEQ ID NO: 3745018 - RNA, 19 nt, Human
gucaugcauaaauaugcag

SEQ ID NO: 3745019 - RNA, 16 nt, Human
gucaugccccccucaa

SEQ ID NO: 3745020 - RNA, 16 nt, Human
gucaugcccuccucuc

SEQ ID NO: 3745021 - RNA, 20 nt, Human
gucaugcuccccugugccag

SEQ ID NO: 3745022 - RNA, 14 nt, Human
gucaugcugccuua

SEQ ID NO: 3745023 - RNA, 12 nt, Human
gucauggccaca

SEQ ID NO: 3745024 - RNA, 15 nt, Human
gucauggccacacug

SEQ ID NO: 3745025 - RNA, 18 nt, Human
gucauggccacacuguga

SEQ ID NO: 3745026 - RNA, 20 nt, Human
gucauggccacacugugaca

SEQ ID NO: 3745027 - RNA, 20 nt, Human
gucauggcuuaauguuuauu

SEQ ID NO: 3745028 - RNA, 23 nt, Human
gucaugggccacugcuuuucccu

SEQ ID NO: 3745029 - RNA, 20 nt, Human
gucauguaagcugaaaauau

SEQ ID NO: 3745030 - RNA, 13 nt, Human
gucauguauguuu

SEQ ID NO: 3745031 - RNA, 14 nt, Human
gucauguauguuuc

SEQ ID NO: 3745032 - RNA, 16 nt, Human
gucauguguucccuuu

SEQ ID NO: 3745033 - RNA, 18 nt, Human
gucauguguucccuuugu

SEQ ID NO: 3745034 - RNA, 13 nt, Human
gucauguuuaucu

SEQ ID NO: 3745035 - RNA, 21 nt, Human
gucauguuuuaaauguacagu

SEQ ID NO: 3745036 - RNA, 22 nt, Human
gucauuaaaauaaauaaaugca

SEQ ID NO: 3745037 - RNA, 13 nt, Human
gucauuaaacugg

SEQ ID NO: 3745038 - RNA, 14 nt, Human
gucauuaauguguu

SEQ ID NO: 3745039 - RNA, 16 nt, Human
gucauuagacuccucc

SEQ ID NO: 3745040 - RNA, 21 nt, Human
gucauuaugagaggcaaugau

SEQ ID NO: 3745041 - RNA, 19 nt, Human
gucauuauguuaauauuuc

SEQ ID NO: 3745042 - RNA, 20 nt, Human
gucauucagagucagccagg

SEQ ID NO: 3745043 - RNA, 19 nt, Human
gucauugcacauaagcuuc

SEQ ID NO: 3745044 - RNA, 15 nt, Human
gucauugcuguagga

SEQ ID NO: 3745045 - RNA, 14 nt, Human
gucauugcuucuuc

SEQ ID NO: 3745046 - RNA, 17 nt, Human
gucauuggcuuuauccu

SEQ ID NO: 3745047 - RNA, 16 nt, Human
gucauuuacuaaacau

SEQ ID NO: 3745048 - RNA, 21 nt, Human
gucauuuaugugucaguucau

SEQ ID NO: 3745049 - RNA, 12 nt, Human
gucauuucauuc

SEQ ID NO: 3745050 - RNA, 14 nt, Human
gucauuucauucca

SEQ ID NO: 3745051 - RNA, 21 nt, Human
gucauuuccauguaugcauaa

SEQ ID NO: 3745052 - RNA, 12 nt, Human
gucauuucugau

SEQ ID NO: 3745053 - RNA, 21 nt, Human
gucauuugcgcacaacuuaaa

SEQ ID NO: 3745054 - RNA, 21 nt, Human
gucauuugcugagcauguacu

SEQ ID NO: 3745055 - RNA, 11 nt, Human
gucauuuucau

SEQ ID NO: 3745056 - RNA, 13 nt, Human
gucauuuucauua

SEQ ID NO: 3745057 - RNA, 12 nt, Human
gucauuuugaag

SEQ ID NO: 3745058 - RNA, 14 nt, Human
gucauuuugaagcu

SEQ ID NO: 3745059 - RNA, 18 nt, Human
gucauuuugcuucauagc

SEQ ID NO: 3745060 - RNA, 20 nt, Human
gucauuuugguacuuuggug

SEQ ID NO: 3745061 - RNA, 17 nt, Human
gucauuuuuacaaugua

SEQ ID NO: 3745062 - RNA, 20 nt, Human
gucauuuuucagaccuuuua

SEQ ID NO: 3745063 - RNA, 21 nt, Human
gucauuuuuuuuaagaaaaag

SEQ ID NO: 3745064 - RNA, 23 nt, Human
gucauuuuuuuucuuugaauaaa

SEQ ID NO: 3745065 - RNA, 15 nt, Human
guccaaaaccgccag

SEQ ID NO: 3745066 - RNA, 18 nt, Human
guccaaaaccgccagcuc

SEQ ID NO: 3745067 - RNA, 23 nt, Human
guccaaaaccgccagcucuguuc

SEQ ID NO: 3745068 - RNA, 17 nt, Human
guccaaacguccucuuu

SEQ ID NO: 3745069 - RNA, 19 nt, Human
guccaaagaggcugccccu

SEQ ID NO: 3745070 - RNA, 14 nt, Human
guccaaaggaggcu

SEQ ID NO: 3745071 - RNA, 11 nt, Human
guccaaauaaa

SEQ ID NO: 3745072 - RNA, 15 nt, Human
guccaaauaaaaacu

SEQ ID NO: 3745073 - RNA, 18 nt, Human
guccaaauaaaaacuaaa

SEQ ID NO: 3745074 - RNA, 16 nt, Human
guccaaccagaccugg

SEQ ID NO: 3745075 - RNA, 14 nt, Human
guccaaccuaaccc

SEQ ID NO: 3745076 - RNA, 20 nt, Human
guccaacguggggcagcaca

SEQ ID NO: 3745077 - RNA, 21 nt, Human
guccaacguggggcagcacag

SEQ ID NO: 3745078 - RNA, 14 nt, Human
guccaacuaaaaac

SEQ ID NO: 3745079 - RNA, 13 nt, Human
guccaacuccagu

SEQ ID NO: 3745080 - RNA, 15 nt, Human
guccaacugcaacuc

SEQ ID NO: 3745081 - RNA, 13 nt, Human
guccaagaagccc

SEQ ID NO: 3745082 - RNA, 15 nt, Human
guccaagaagcccag

SEQ ID NO: 3745083 - RNA, 16 nt, Human
guccaagaagcccagg

SEQ ID NO: 3745084 - RNA, 22 nt, Human
guccaagauuccggauccuaag

SEQ ID NO: 3745085 - RNA, 20 nt, Human
guccaagggguccccuccag

SEQ ID NO: 3745086 - RNA, 21 nt, Human
guccaaugagcuuucugaaca

SEQ ID NO: 3745087 - RNA, 12 nt, Human
guccaauguggc

SEQ ID NO: 3745088 - RNA, 13 nt, Human
guccacagagagg

SEQ ID NO: 3745089 - RNA, 14 nt, Human
guccacaguggaac

SEQ ID NO: 3745090 - RNA, 16 nt, Human
guccacaguggaacca

SEQ ID NO: 3745091 - RNA, 20 nt, Human
guccacccaccuaugugcca

SEQ ID NO: 3745092 - RNA, 11 nt, Human
guccacccagc

SEQ ID NO: 3745093 - RNA, 12 nt, Human
guccacccagga

SEQ ID NO: 3745094 - RNA, 14 nt, Human
guccacccaggagc

SEQ ID NO: 3745095 - RNA, 18 nt, Human
guccacccgccccugccc

SEQ ID NO: 3745096 - RNA, 21 nt, Human
guccaccuggccccaugucuc

SEQ ID NO: 3745097 - RNA, 15 nt, Human
guccacgacugucuc

SEQ ID NO: 3745098 - RNA, 16 nt, Human
guccacgacugucucc

SEQ ID NO: 3745099 - RNA, 19 nt, Human
guccacgcgugccguggca

SEQ ID NO: 3745100 - RNA, 22 nt, Human
guccacgcgugccguggcacca

SEQ ID NO: 3745101 - RNA, 12 nt, Human
guccacuuuucc

SEQ ID NO: 3745102 - RNA, 15 nt, Human
guccacuuuuccagu

SEQ ID NO: 3745103 - RNA, 22 nt, Human
guccagaagaauauucaggacu

SEQ ID NO: 3745104 - RNA, 14 nt, Human
guccagacagccug

SEQ ID NO: 3745105 - RNA, 16 nt, Human
guccagacagccugua

SEQ ID NO: 3745106 - RNA, 17 nt, Human
guccagagcugcuuccc

SEQ ID NO: 3745107 - RNA, 15 nt, Human
guccagauuuacacu

SEQ ID NO: 3745108 - RNA, 23 nt, Human
guccagcaccuugugccuggggu

SEQ ID NO: 3745109 - RNA, 14 nt, Human
guccagcagucacu

SEQ ID NO: 3745110 - RNA, 21 nt, Human
guccagcauugcuggacucug

SEQ ID NO: 3745111 - RNA, 15 nt, Human
guccagcccaucucg

SEQ ID NO: 3745112 - RNA, 19 nt, Human
guccagcccaucucggagc

SEQ ID NO: 3745113 - RNA, 22 nt, Human
guccagccugccccggagcugg

SEQ ID NO: 3745114 - RNA, 12 nt, Human
guccagcucugg

SEQ ID NO: 3745115 - RNA, 21 nt, Human
guccagcugcccuuccgcagu

SEQ ID NO: 3745116 - RNA, 22 nt, Human
guccagcugcccuuccgcagug

SEQ ID NO: 3745117 - RNA, 13 nt, Human
guccagcuggccu

SEQ ID NO: 3745118 - RNA, 17 nt, Human
guccagcuggccuggac

SEQ ID NO: 3745119 - RNA, 18 nt, Human
guccagcuggccuggaca

SEQ ID NO: 3745120 - RNA, 19 nt, Human
guccagcuggccuggacag

SEQ ID NO: 3745121 - RNA, 16 nt, Human
guccagcuugcucuuc

SEQ ID NO: 3745122 - RNA, 17 nt, Human
guccagcuugcucuuca

SEQ ID NO: 3745123 - RNA, 15 nt, Human
guccaggaacaagcu

SEQ ID NO: 3745124 - RNA, 14 nt, Human
guccaggcacagga

SEQ ID NO: 3745125 - RNA, 17 nt, Human
guccaggccccaaaacc

SEQ ID NO: 3745126 - RNA, 19 nt, Human
guccaggccuacuccuguc

SEQ ID NO: 3745127 - RNA, 13 nt, Human
guccaggcugccg

SEQ ID NO: 3745128 - RNA, 15 nt, Human
guccagggaagcugg

SEQ ID NO: 3745129 - RNA, 14 nt, Human
guccagggcccuga

SEQ ID NO: 3745130 - RNA, 17 nt, Human
guccagggcccugagcu

SEQ ID NO: 3745131 - RNA, 18 nt, Human
guccaggggaggccuucc

SEQ ID NO: 3745132 - RNA, 18 nt, Human
guccaggggccccuccag

SEQ ID NO: 3745133 - RNA, 20 nt, Human
guccaggggccccuccagcu

SEQ ID NO: 3745134 - RNA, 23 nt, Human
guccaggggccccuccagcuugu

SEQ ID NO: 3745135 - RNA, 15 nt, Human
guccagguccuggug

SEQ ID NO: 3745136 - RNA, 16 nt, Human
guccagguccuggugg

SEQ ID NO: 3745137 - RNA, 23 nt, Human
guccagguccugguggggcagcu

SEQ ID NO: 3745138 - RNA, 19 nt, Human
guccaggucgggcucagcu

SEQ ID NO: 3745139 - RNA, 22 nt, Human
guccagguggagguggcauccc

SEQ ID NO: 3745140 - RNA, 20 nt, Human
guccagugcaaccacacacc

SEQ ID NO: 3745141 - RNA, 12 nt, Human
guccagugccca

SEQ ID NO: 3745142 - RNA, 13 nt, Human
guccagugcccau

SEQ ID NO: 3745143 - RNA, 14 nt, Human
guccagugcccauu

SEQ ID NO: 3745144 - RNA, 15 nt, Human
guccaguguuucuuu

SEQ ID NO: 3745145 - RNA, 14 nt, Human
guccaguucccaga

SEQ ID NO: 3745146 - RNA, 14 nt, Human
guccauagagagca

SEQ ID NO: 3745147 - RNA, 17 nt, Human
guccaucagccaggaca

SEQ ID NO: 3745148 - RNA, 15 nt, Human
guccaucagccccuc

SEQ ID NO: 3745149 - RNA, 12 nt, Human
guccaucccagc

SEQ ID NO: 3745150 - RNA, 14 nt, Human
guccaucugcccgc

SEQ ID NO: 3745151 - RNA, 21 nt, Human
guccaucugcccgccugccca

SEQ ID NO: 3745152 - RNA, 23 nt, Human
guccaugaagauguagaggagaa

SEQ ID NO: 3745153 - RNA, 22 nt, Human
guccaugcaugacagccucuau

SEQ ID NO: 3745154 - RNA, 20 nt, Human
guccauggaaugcuugaaaa

SEQ ID NO: 3745155 - RNA, 23 nt, Human
guccaugggcagagcccaaggga

SEQ ID NO: 3745156 - RNA, 19 nt, Human
guccaugugguucuucaaa

SEQ ID NO: 3745157 - RNA, 15 nt, Human
guccauucucccagg

SEQ ID NO: 3745158 - RNA, 23 nt, Human
guccauuuauauaugaaaacuau

SEQ ID NO: 3745159 - RNA, 21 nt, Human
guccauuuauccacaggaaag

SEQ ID NO: 3745160 - RNA, 13 nt, Human
guccauuuguaaa

SEQ ID NO: 3745161 - RNA, 16 nt, Human
guccauuuugugaagc

SEQ ID NO: 3745162 - RNA, 20 nt, Human
guccauuuugugaagcccug

SEQ ID NO: 3745163 - RNA, 18 nt, Human
gucccaagguucugggug

SEQ ID NO: 3745164 - RNA, 13 nt, Human
gucccaagugcca

SEQ ID NO: 3745165 - RNA, 17 nt, Human
gucccacaaaugggcgc

SEQ ID NO: 3745166 - RNA, 18 nt, Human
gucccacaaaugggcgcc

SEQ ID NO: 3745167 - RNA, 12 nt, Human
gucccacagcuu

SEQ ID NO: 3745168 - RNA, 15 nt, Human
gucccacagcuuggg

SEQ ID NO: 3745169 - RNA, 18 nt, Human
gucccacaucccugggcc

SEQ ID NO: 3745170 - RNA, 15 nt, Human
gucccaccccacaca

SEQ ID NO: 3745171 - RNA, 19 nt, Human
gucccacccccuuccccca

SEQ ID NO: 3745172 - RNA, 21 nt, Human
gucccaccgguugcuucuggg

SEQ ID NO: 3745173 - RNA, 22 nt, Human
gucccaccgguugcuucuggga

SEQ ID NO: 3745174 - RNA, 15 nt, Human
gucccaccuccagcc

SEQ ID NO: 3745175 - RNA, 14 nt, Human
gucccaccucuucu

SEQ ID NO: 3745176 - RNA, 21 nt, Human
gucccaccucuucucuuccug

SEQ ID NO: 3745177 - RNA, 22 nt, Human
gucccaccuuggcugcagggag

SEQ ID NO: 3745178 - RNA, 14 nt, Human
gucccacgugucuu

SEQ ID NO: 3745179 - RNA, 18 nt, Human
gucccacgugucuuccac

SEQ ID NO: 3745180 - RNA, 17 nt, Human
gucccacuaucugggug

SEQ ID NO: 3745181 - RNA, 12 nt, Human
gucccacucaag

SEQ ID NO: 3745182 - RNA, 21 nt, Human
gucccacuuccccuccuaccc

SEQ ID NO: 3745183 - RNA, 22 nt, Human
gucccagagcaggaggccccug

SEQ ID NO: 3745184 - RNA, 21 nt, Human
gucccagauuggcucacacug

SEQ ID NO: 3745185 - RNA, 17 nt, Human
gucccagcagccagcca

SEQ ID NO: 3745186 - RNA, 15 nt, Human
gucccagccaccccg

SEQ ID NO: 3745187 - RNA, 16 nt, Human
gucccagccaccccgg

SEQ ID NO: 3745188 - RNA, 23 nt, Human
gucccagccaccccgggcucucu

SEQ ID NO: 3745189 - RNA, 14 nt, Human
gucccagcuacucg

SEQ ID NO: 3745190 - RNA, 11 nt, Human
gucccagcucc

SEQ ID NO: 3745191 - RNA, 12 nt, Human
gucccaggcaga

SEQ ID NO: 3745192 - RNA, 15 nt, Human
gucccaggcugagcc

SEQ ID NO: 3745193 - RNA, 16 nt, Human
gucccaggcugagccu

SEQ ID NO: 3745194 - RNA, 18 nt, Human
gucccaggcugagccuca

SEQ ID NO: 3745195 - RNA, 19 nt, Human
gucccagguuggcucugcc

SEQ ID NO: 3745196 - RNA, 10 nt, Human
gucccagugg

SEQ ID NO: 3745197 - RNA, 14 nt, Human
gucccagugggagg

SEQ ID NO: 3745198 - RNA, 15 nt, Human
gucccagugggaggc

SEQ ID NO: 3745199 - RNA, 17 nt, Human
gucccagugggaggcgc

SEQ ID NO: 3745200 - RNA, 13 nt, Human
gucccauccaggc

SEQ ID NO: 3745201 - RNA, 16 nt, Human
gucccauccaggcagu

SEQ ID NO: 3745202 - RNA, 17 nt, Human
gucccaugacccacccc

SEQ ID NO: 3745203 - RNA, 18 nt, Human
gucccaugacccaccccu

SEQ ID NO: 3745204 - RNA, 20 nt, Human
gucccaugacccaccccugu

SEQ ID NO: 3745205 - RNA, 22 nt, Human
gucccaugacccaccccugugc

SEQ ID NO: 3745206 - RNA, 23 nt, Human
gucccaugacccaccccugugcu

SEQ ID NO: 3745207 - RNA, 23 nt, Human
gucccauggacacuccagugcca

SEQ ID NO: 3745208 - RNA, 20 nt, Human
gucccaugugagcugcugcc

SEQ ID NO: 3745209 - RNA, 21 nt, Human
gucccaugugagcugcugcca

SEQ ID NO: 3745210 - RNA, 14 nt, Human
gucccauucccugg

SEQ ID NO: 3745211 - RNA, 22 nt, Human
gucccauugguguugucauugu

SEQ ID NO: 3745212 - RNA, 16 nt, Human
gucccauuucucacug

SEQ ID NO: 3745213 - RNA, 18 nt, Human
guccccaaaccugcaagg

SEQ ID NO: 3745214 - RNA, 19 nt, Human
guccccaacagcgcccaaa

SEQ ID NO: 3745215 - RNA, 21 nt, Human
guccccaagauucacaccuga

SEQ ID NO: 3745216 - RNA, 16 nt, Human
guccccaaugaauaua

SEQ ID NO: 3745217 - RNA, 15 nt, Human
guccccaccaucugc

SEQ ID NO: 3745218 - RNA, 17 nt, Human
guccccaccaucugcug

SEQ ID NO: 3745219 - RNA, 18 nt, Human
guccccaccaucugcugu

SEQ ID NO: 3745220 - RNA, 14 nt, Human
guccccaccccugc

SEQ ID NO: 3745221 - RNA, 15 nt, Human
guccccaccccugcc

SEQ ID NO: 3745222 - RNA, 18 nt, Human
guccccacccuccacuca

SEQ ID NO: 3745223 - RNA, 17 nt, Human
guccccaccgcagacag

SEQ ID NO: 3745224 - RNA, 22 nt, Human
guccccagacuccaccaagccu

SEQ ID NO: 3745225 - RNA, 23 nt, Human
guccccagagaaagcgcagaugc

SEQ ID NO: 3745226 - RNA, 18 nt, Human
guccccagagaccaggcu

SEQ ID NO: 3745227 - RNA, 14 nt, Human
guccccagcagaga

SEQ ID NO: 3745228 - RNA, 19 nt, Human
guccccaguuugcagaaaa

SEQ ID NO: 3745229 - RNA, 17 nt, Human
guccccauacuccuaug

SEQ ID NO: 3745230 - RNA, 17 nt, Human
gucccccaaccccagcc

SEQ ID NO: 3745231 - RNA, 16 nt, Human
gucccccaacuugaga

SEQ ID NO: 3745232 - RNA, 12 nt, Human
guccccccaccc

SEQ ID NO: 3745233 - RNA, 21 nt, Human
guccccccccaaccuuucccu

SEQ ID NO: 3745234 - RNA, 17 nt, Human
gucccccuauccuuggc

SEQ ID NO: 3745235 - RNA, 18 nt, Human
gucccccuauccuuggca

SEQ ID NO: 3745236 - RNA, 15 nt, Human
gucccccugcagcua

SEQ ID NO: 3745237 - RNA, 18 nt, Human
gucccccuuccauggacu

SEQ ID NO: 3745238 - RNA, 13 nt, Human
guccccgcagccc

SEQ ID NO: 3745239 - RNA, 15 nt, Human
guccccggggcccag

SEQ ID NO: 3745240 - RNA, 22 nt, Human
guccccgugccccgccuccccg

SEQ ID NO: 3745241 - RNA, 13 nt, Human
guccccucagcuc

SEQ ID NO: 3745242 - RNA, 22 nt, Human
guccccucccagagcuggugga

SEQ ID NO: 3745243 - RNA, 12 nt, Human
guccccucccau

SEQ ID NO: 3745244 - RNA, 15 nt, Human
guccccucccaucug

SEQ ID NO: 3745245 - RNA, 22 nt, Human
guccccuguuuguuucugaaag

SEQ ID NO: 3745246 - RNA, 23 nt, Human
guccccuguuuguuucugaaagg

SEQ ID NO: 3745247 - RNA, 13 nt, Human
guccccuuccauc

SEQ ID NO: 3745248 - RNA, 22 nt, Human
guccccuuuucuuuucuacccu

SEQ ID NO: 3745249 - RNA, 16 nt, Human
gucccgauuguaacuc

SEQ ID NO: 3745250 - RNA, 17 nt, Human
gucccggcucugugggu

SEQ ID NO: 3745251 - RNA, 22 nt, Human
gucccggggccagcacuuccau

SEQ ID NO: 3745252 - RNA, 16 nt, Human
gucccgggguccugug

SEQ ID NO: 3745253 - RNA, 19 nt, Human
gucccgggguccuguggca

SEQ ID NO: 3745254 - RNA, 20 nt, Human
gucccgggguccuguggcag

SEQ ID NO: 3745255 - RNA, 15 nt, Human
gucccuaauaaagcu

SEQ ID NO: 3745256 - RNA, 16 nt, Human
gucccuaauaaagcug

SEQ ID NO: 3745257 - RNA, 22 nt, Human
gucccuaccgagucucuucucc

SEQ ID NO: 3745258 - RNA, 15 nt, Human
gucccuagcagccca

SEQ ID NO: 3745259 - RNA, 21 nt, Human
gucccuagcagcccacccugc

SEQ ID NO: 3745260 - RNA, 22 nt, Human
gucccuauguauuugcaguuca

SEQ ID NO: 3745261 - RNA, 12 nt, Human
gucccucccacc

SEQ ID NO: 3745262 - RNA, 14 nt, Human
gucccucccaccuc

SEQ ID NO: 3745263 - RNA, 16 nt, Human
gucccucccaccucug

SEQ ID NO: 3745264 - RNA, 21 nt, Human
gucccucccaccucugugacc

SEQ ID NO: 3745265 - RNA, 12 nt, Human
gucccuccuggu

SEQ ID NO: 3745266 - RNA, 22 nt, Human
gucccuccuggugucaccccag

SEQ ID NO: 3745267 - RNA, 23 nt, Human
gucccuccuggugucaccccaga

SEQ ID NO: 3745268 - RNA, 16 nt, Human
gucccucucaggcaug

SEQ ID NO: 3745269 - RNA, 18 nt, Human
gucccugccccagcaaga

SEQ ID NO: 3745270 - RNA, 17 nt, Human
gucccugcccccucccc

SEQ ID NO: 3745271 - RNA, 12 nt, Human
gucccugccuca

SEQ ID NO: 3745272 - RNA, 20 nt, Human
gucccugccuggaccagccu

SEQ ID NO: 3745273 - RNA, 23 nt, Human
gucccugccuggaccagccucuc

SEQ ID NO: 3745274 - RNA, 14 nt, Human
guaccuugaacacu

SEQ ID NO: 3745275 - RNA, 18 nt, Human
guaccuugaacacugggg

SEQ ID NO: 3745276 - RNA, 17 nt, Human
guaccuugcacacauca

SEQ ID NO: 3745277 - RNA, 23 nt, Human
guaccuuugcucuugcagagaag

SEQ ID NO: 3745278 - RNA, 13 nt, Human
guaccuuuuaaca

SEQ ID NO: 3745279 - RNA, 19 nt, Human
guacgacgucagauguuua

SEQ ID NO: 3745280 - RNA, 12 nt, Human
guacgcacagac

SEQ ID NO: 3745281 - RNA, 14 nt, Human
guacgcacagacag

SEQ ID NO: 3745282 - RNA, 21 nt, Human
guacguuauuguugacuuauu

SEQ ID NO: 3745283 - RNA, 18 nt, Human
guacuaacauuuauuuga

SEQ ID NO: 3745284 - RNA, 20 nt, Human
guacuaaggauacaggcugg

SEQ ID NO: 3745285 - RNA, 17 nt, Human
guacuacaguccuccca

SEQ ID NO: 3745286 - RNA, 18 nt, Human
guacuacaguccucccau

SEQ ID NO: 3745287 - RNA, 19 nt, Human
guacuacaguccucccauc

SEQ ID NO: 3745288 - RNA, 19 nt, Human
guacuaguacuguguacug

SEQ ID NO: 3745289 - RNA, 13 nt, Human
guacuauucugau

SEQ ID NO: 3745290 - RNA, 14 nt, Human
guacuauuuaacug

SEQ ID NO: 3745291 - RNA, 15 nt, Human
guacuauuuaacuga

SEQ ID NO: 3745292 - RNA, 21 nt, Human
guacuauuuagauauaacacu

SEQ ID NO: 3745293 - RNA, 15 nt, Human
guacucacugaagcc

SEQ ID NO: 3745294 - RNA, 16 nt, Human
guacucacugaagccu

SEQ ID NO: 3745295 - RNA, 23 nt, Human
guacucaggaggcugaggggagg

SEQ ID NO: 3745296 - RNA, 20 nt, Human
guacucaucaucaacccuaa

SEQ ID NO: 3745297 - RNA, 20 nt, Human
guacucccucucaggaucca

SEQ ID NO: 3745298 - RNA, 14 nt, Human
guacuccucccagg

SEQ ID NO: 3745299 - RNA, 16 nt, Human
guacucugcacauacg

SEQ ID NO: 3745300 - RNA, 23 nt, Human
guacucuuccgaaaaauccucuu

SEQ ID NO: 3745301 - RNA, 22 nt, Human
guacugaaagccuuagggaagc

SEQ ID NO: 3745302 - RNA, 22 nt, Human
guacugaauuuuuuuguaauaa

SEQ ID NO: 3745303 - RNA, 14 nt, Human
guacugacuuugcu

SEQ ID NO: 3745304 - RNA, 20 nt, Human
guacugacuuugcuugcuuu

SEQ ID NO: 3745305 - RNA, 12 nt, Human
guacugagauuu

SEQ ID NO: 3745306 - RNA, 16 nt, Human
guacugagccuuguaa

SEQ ID NO: 3745307 - RNA, 14 nt, Human
guacugauuucagu

SEQ ID NO: 3745308 - RNA, 13 nt, Human
guacugcauuauu

SEQ ID NO: 3745309 - RNA, 15 nt, Human
guacugcauuauuug

SEQ ID NO: 3745310 - RNA, 21 nt, Human
guacugccccccaugaggaag

SEQ ID NO: 3745311 - RNA, 22 nt, Human
guacugccccccaugaggaagg

SEQ ID NO: 3745312 - RNA, 22 nt, Human
guacugcucaggcugcagcugg

SEQ ID NO: 3745313 - RNA, 16 nt, Human
guacuguaaagagacc

SEQ ID NO: 3745314 - RNA, 13 nt, Human
guacuguaauaau

SEQ ID NO: 3745315 - RNA, 17 nt, Human
guacuguaauaauaccu

SEQ ID NO: 3745316 - RNA, 20 nt, Human
guacuguacagcuggcucua

SEQ ID NO: 3745317 - RNA, 14 nt, Human
guacuguaguuuuu

SEQ ID NO: 3745318 - RNA, 17 nt, Human
guacuguauagacaguu

SEQ ID NO: 3745319 - RNA, 18 nt, Human
guacuguauagacaguuu

SEQ ID NO: 3745320 - RNA, 20 nt, Human
guacuguauagacaguuugu

SEQ ID NO: 3745321 - RNA, 21 nt, Human
guacuguaugaucaaauguuu

SEQ ID NO: 3745322 - RNA, 21 nt, Human
guacugugggcaauuuagaaa

SEQ ID NO: 3745323 - RNA, 23 nt, Human
guacuguucucuucuugaacacu

SEQ ID NO: 3745324 - RNA, 15 nt, Human
guacuguucuguguc

SEQ ID NO: 3745325 - RNA, 19 nt, Human
guacuguuuaauguucugu

SEQ ID NO: 3745326 - RNA, 19 nt, Human
guacuuaaaugaaagcaug

SEQ ID NO: 3745327 - RNA, 15 nt, Human
guacuuaauaaauuc

SEQ ID NO: 3745328 - RNA, 17 nt, Human
guacuuagaguuucugu

SEQ ID NO: 3745329 - RNA, 16 nt, Human
guacuuagcagcuauc

SEQ ID NO: 3745330 - RNA, 19 nt, Human
guacuuagcagcuaucucu

SEQ ID NO: 3745331 - RNA, 16 nt, Human
guacuuauaaagaagg

SEQ ID NO: 3745332 - RNA, 13 nt, Human
guacuuauuacug

SEQ ID NO: 3745333 - RNA, 21 nt, Human
guacuucaaauccuugaagau

SEQ ID NO: 3745334 - RNA, 16 nt, Human
guacuucagcaagaga

SEQ ID NO: 3745335 - RNA, 18 nt, Human
guacuucagcaagagaga

SEQ ID NO: 3745336 - RNA, 14 nt, Human
guacuuccacugau

SEQ ID NO: 3745337 - RNA, 13 nt, Human
guacuucccgggc

SEQ ID NO: 3745338 - RNA, 20 nt, Human
guacuucccgggccagggcu

SEQ ID NO: 3745339 - RNA, 15 nt, Human
guacuucuccacccu

SEQ ID NO: 3745340 - RNA, 17 nt, Human
guacuucuccacccugc

SEQ ID NO: 3745341 - RNA, 21 nt, Human
guacuucuccacccugcucuc

SEQ ID NO: 3745342 - RNA, 16 nt, Human
guacuucuucuguaau

SEQ ID NO: 3745343 - RNA, 23 nt, Human
guacuugcccugaccaugcauuu

SEQ ID NO: 3745344 - RNA, 14 nt, Human
guacuugcucuuga

SEQ ID NO: 3745345 - RNA, 18 nt, Human
guacuugcucuugaugcc

SEQ ID NO: 3745346 - RNA, 21 nt, Human
guacuuggaguauuggggucu

SEQ ID NO: 3745347 - RNA, 22 nt, Human
guacuugguccaacugcaacuc

SEQ ID NO: 3745348 - RNA, 16 nt, Human
guacuugucaaagaag

SEQ ID NO: 3745349 - RNA, 17 nt, Human
guacuugucauauguag

SEQ ID NO: 3745350 - RNA, 19 nt, Human
guacuugucauauguagcc

SEQ ID NO: 3745351 - RNA, 22 nt, Human
guacuugugaaacacagcuguu

SEQ ID NO: 3745352 - RNA, 14 nt, Human
guacuuuaaaaauu

SEQ ID NO: 3745353 - RNA, 22 nt, Human
guacuuuauagaagaaugcaug

SEQ ID NO: 3745354 - RNA, 16 nt, Human
guacuuucuguuaaaa

SEQ ID NO: 3745355 - RNA, 21 nt, Human
guacuuucuguuaaaaugcau

SEQ ID NO: 3745356 - RNA, 13 nt, Human
guacuuugauuca

SEQ ID NO: 3745357 - RNA, 15 nt, Human
guacuuugauucaca

SEQ ID NO: 3745358 - RNA, 16 nt, Human
guacuuuuaaaaacau

SEQ ID NO: 3745359 - RNA, 18 nt, Human
guacuuuucauucucuuu

SEQ ID NO: 3745360 - RNA, 21 nt, Human
guacuuuucauucucuuuuaa

SEQ ID NO: 3745361 - RNA, 22 nt, Human
guacuuuucauucucuuuuaau

SEQ ID NO: 3745362 - RNA, 19 nt, Human
guacuuuugagugugugug

SEQ ID NO: 3745363 - RNA, 22 nt, Human
guacuuuugagugugugugugc

SEQ ID NO: 3745364 - RNA, 24 nt, Human
guacuuuugagugugugugugcau

SEQ ID NO: 3745365 - RNA, 21 nt, Human
guacuuuuuggcauaacauaa

SEQ ID NO: 3745366 - RNA, 20 nt, Human
guagaaaaaaaaauucacau

SEQ ID NO: 3745367 - RNA, 17 nt, Human
guagaaaauauguccca

SEQ ID NO: 3745368 - RNA, 18 nt, Human
guagaaaaugugacccuc

SEQ ID NO: 3745369 - RNA, 14 nt, Human
guagaaaggccuuu

SEQ ID NO: 3745370 - RNA, 16 nt, Human
guagaaaggccuuuaa

SEQ ID NO: 3745371 - RNA, 14 nt, Human
guagaaaugaugau

SEQ ID NO: 3745372 - RNA, 22 nt, Human
guagaaaugguuguauuagaug

SEQ ID NO: 3745373 - RNA, 17 nt, Human
guagaacacuaauucau

SEQ ID NO: 3745374 - RNA, 16 nt, Human
guagaacucacucugg

SEQ ID NO: 3745375 - RNA, 19 nt, Human
guagaacucacucugggcu

SEQ ID NO: 3745376 - RNA, 17 nt, Human
guagaacuccaggcccu

SEQ ID NO: 3745377 - RNA, 13 nt, Human
guagaacuuugua

SEQ ID NO: 3745378 - RNA, 15 nt, Human
guagaacuuuguaua

SEQ ID NO: 3745379 - RNA, 12 nt, Human
guagaagauggc

SEQ ID NO: 3745380 - RNA, 21 nt, Human
guagaagcauuccuucuuuga

SEQ ID NO: 3745381 - RNA, 13 nt, Human
guagaaggagaca

SEQ ID NO: 3745382 - RNA, 15 nt, Human
guagaaggagacaga

SEQ ID NO: 3745383 - RNA, 19 nt, Human
guagaagguugacacaguu

SEQ ID NO: 3745384 - RNA, 19 nt, Human
guagaaguucuaguguuuu

SEQ ID NO: 3745385 - RNA, 17 nt, Human
guagaauguauuguacc

SEQ ID NO: 3745386 - RNA, 14 nt, Human
guagaauguuuuca

SEQ ID NO: 3745387 - RNA, 17 nt, Human
guagaauuaucuaauuu

SEQ ID NO: 3745388 - RNA, 22 nt, Human
guagaauuaucuaauuuauaaa

SEQ ID NO: 3745389 - RNA, 14 nt, Human
guagaauugcauug

SEQ ID NO: 3745390 - RNA, 19 nt, Human
guagacacaggauagauaa

SEQ ID NO: 3745391 - RNA, 14 nt, Human
guagacauuuuaac

SEQ ID NO: 3745392 - RNA, 14 nt, Human
guagaccaaaauaa

SEQ ID NO: 3745393 - RNA, 15 nt, Human
guagaccaaaauaaa

SEQ ID NO: 3745394 - RNA, 16 nt, Human
guagaccaaaauaaaa

SEQ ID NO: 3745395 - RNA, 15 nt, Human
guagaccacugccau

SEQ ID NO: 3745396 - RNA, 20 nt, Human
guagaccuuguuacuucuga

SEQ ID NO: 3745397 - RNA, 15 nt, Human
guagacuauauacau

SEQ ID NO: 3745398 - RNA, 12 nt, Human
guagagacaggg

SEQ ID NO: 3745399 - RNA, 15 nt, Human
guagagccagagguc

SEQ ID NO: 3745400 - RNA, 11 nt, Human
guagagccagg

SEQ ID NO: 3745401 - RNA, 15 nt, Human
guagagccagggucu

SEQ ID NO: 3745402 - RNA, 18 nt, Human
guagagccagggucucac

SEQ ID NO: 3745403 - RNA, 21 nt, Human
guagagcuagaacauggagag

SEQ ID NO: 3745404 - RNA, 16 nt, Human
guagagggugcugccc

SEQ ID NO: 3745405 - RNA, 20 nt, Human
guagagguacacuugugaau

SEQ ID NO: 3745406 - RNA, 15 nt, Human
guagagguauaauug

SEQ ID NO: 3745407 - RNA, 21 nt, Human
guagagucugagggcuuguag

SEQ ID NO: 3745408 - RNA, 13 nt, Human
guagagugggagc

SEQ ID NO: 3745409 - RNA, 15 nt, Human
guagagugugccuga

SEQ ID NO: 3745410 - RNA, 15 nt, Human
guagaguuaagaagc

SEQ ID NO: 3745411 - RNA, 16 nt, Human
guagaguuaagaagcu

SEQ ID NO: 3745412 - RNA, 15 nt, Human
guagaguugcugaga

SEQ ID NO: 3745413 - RNA, 15 nt, Human
guagauaaauauuug

SEQ ID NO: 3745414 - RNA, 17 nt, Human
guagauaauuucagggu

SEQ ID NO: 3745415 - RNA, 18 nt, Human
guagauaauuucagggug

SEQ ID NO: 3745416 - RNA, 12 nt, Human
guagauagaaau

SEQ ID NO: 3745417 - RNA, 13 nt, Human
guagauagaaaua

SEQ ID NO: 3745418 - RNA, 16 nt, Human
guagauaguaugcacu

SEQ ID NO: 3745419 - RNA, 15 nt, Human
guagauauuacuuua

SEQ ID NO: 3745420 - RNA, 22 nt, Human
guagauauuggacaaagaaccu

SEQ ID NO: 3745421 - RNA, 22 nt, Human
guagauccauuuccauugcuua

SEQ ID NO: 3745422 - RNA, 21 nt, Human
guagaucuauauuagaucaaa

SEQ ID NO: 3745423 - RNA, 15 nt, Human
guagaugcauuuggg

SEQ ID NO: 3745424 - RNA, 19 nt, Human
gacucugcacaugucuugu

SEQ ID NO: 3745425 - RNA, 16 nt, Human
gacucugcagccucag

SEQ ID NO: 3745426 - RNA, 19 nt, Human
gacucugcaucccagcacc

SEQ ID NO: 3745427 - RNA, 21 nt, Human
gacucugcaucccagcaccug

SEQ ID NO: 3745428 - RNA, 13 nt, Human
gacucugcccccu

SEQ ID NO: 3745429 - RNA, 12 nt, Human
gacucugccucc

SEQ ID NO: 3745430 - RNA, 17 nt, Human
gacucuggacuuucucu

SEQ ID NO: 3745431 - RNA, 18 nt, Human
gacucuggcccuggcccu

SEQ ID NO: 3745432 - RNA, 16 nt, Human
gacucuggggacuccg

SEQ ID NO: 3745433 - RNA, 20 nt, Human
gacucuggguccuuccugaa

SEQ ID NO: 3745434 - RNA, 19 nt, Human
gacucugguuucucauucu

SEQ ID NO: 3745435 - RNA, 13 nt, Human
gacucuguccuga

SEQ ID NO: 3745436 - RNA, 13 nt, Human
gacucugugcugg

SEQ ID NO: 3745437 - RNA, 18 nt, Human
gacucugugcuggccagc

SEQ ID NO: 3745438 - RNA, 15 nt, Human
gacucuuaagaagac

SEQ ID NO: 3745439 - RNA, 17 nt, Human
gacucuuaagaagacug

SEQ ID NO: 3745440 - RNA, 10 nt, Human
gacucuuccc

SEQ ID NO: 3745441 - RNA, 18 nt, Human
gacucuugacucuugccu

SEQ ID NO: 3745442 - RNA, 16 nt, Human
gacucuugcucuuucu

SEQ ID NO: 3745443 - RNA, 14 nt, Human
gacucuuguuuuca

SEQ ID NO: 3745444 - RNA, 22 nt, Human
gacucuuuauugucuguaaauc

SEQ ID NO: 3745445 - RNA, 19 nt, Human
gacucuuugguggcuuugc

SEQ ID NO: 3745446 - RNA, 21 nt, Human
gacucuuugguggcuuugcau

SEQ ID NO: 3745447 - RNA, 22 nt, Human
gacucuuuuccaaacacaggca

SEQ ID NO: 3745448 - RNA, 19 nt, Human
gacucuuuuuagggccagg

SEQ ID NO: 3745449 - RNA, 18 nt, Human
gacucuuuuuguaccugg

SEQ ID NO: 3745450 - RNA, 16 nt, Human
gacugaaaaccucucc

SEQ ID NO: 3745451 - RNA, 19 nt, Human
gacugaaaauauuguuuua

SEQ ID NO: 3745452 - RNA, 18 nt, Human
gacugaagaugcagcuca

SEQ ID NO: 3745453 - RNA, 16 nt, Human
gacugaauggacuuug

SEQ ID NO: 3745454 - RNA, 20 nt, Human
gacugaauuaugaaacuuuu

SEQ ID NO: 3745455 - RNA, 12 nt, Human
gacugaauucca

SEQ ID NO: 3745456 - RNA, 14 nt, Human
gacugaauuucuuu

SEQ ID NO: 3745457 - RNA, 20 nt, Human
gacugacagcaugugcccuc

SEQ ID NO: 3745458 - RNA, 13 nt, Human
gacugaccagcag

SEQ ID NO: 3745459 - RNA, 15 nt, Human
gacugaccuggucca

SEQ ID NO: 3745460 - RNA, 23 nt, Human
gacugaccugguccacagggcac

SEQ ID NO: 3745461 - RNA, 11 nt, Human
gacugagaaau

SEQ ID NO: 3745462 - RNA, 13 nt, Human
gacugagaaauuu

SEQ ID NO: 3745463 - RNA, 18 nt, Human
gacugagcacccucugga

SEQ ID NO: 3745464 - RNA, 15 nt, Human
gacugagcaccugcu

SEQ ID NO: 3745465 - RNA, 12 nt, Human
gacugagccagu

SEQ ID NO: 3745466 - RNA, 13 nt, Human
gacugagcucaag

SEQ ID NO: 3745467 - RNA, 21 nt, Human
gacugaggccugagcgcuccu

SEQ ID NO: 3745468 - RNA, 15 nt, Human
gacugagggggccug

SEQ ID NO: 3745469 - RNA, 16 nt, Human
gacugagggggccugg

SEQ ID NO: 3745470 - RNA, 19 nt, Human
gacugagggggccuggaug

SEQ ID NO: 3745471 - RNA, 23 nt, Human
gacugaguacguugugcauuugg

SEQ ID NO: 3745472 - RNA, 17 nt, Human
gacugagugggaagccc

SEQ ID NO: 3745473 - RNA, 12 nt, Human
gacugaucucag

SEQ ID NO: 3745474 - RNA, 15 nt, Human
gacugaugucuccua

SEQ ID NO: 3745475 - RNA, 16 nt, Human
gacugauguuugugca

SEQ ID NO: 3745476 - RNA, 13 nt, Human
gacugauucuuca

SEQ ID NO: 3745477 - RNA, 14 nt, Human
gacugauuucagag

SEQ ID NO: 3745478 - RNA, 13 nt, Human
gacugauuuuaau

SEQ ID NO: 3745479 - RNA, 23 nt, Human
gacugcaacaggaacuuggagug

SEQ ID NO: 3745480 - RNA, 18 nt, Human
gacugcacagcggccccu

SEQ ID NO: 3745481 - RNA, 21 nt, Human
gacugcagggacacgggcagc

SEQ ID NO: 3745482 - RNA, 17 nt, Human
gacugcaugguaauuua

SEQ ID NO: 3745483 - RNA, 18 nt, Human
gacugcaugguaauuuau

SEQ ID NO: 3745484 - RNA, 19 nt, Human
gacugcaugguaauuuaua

SEQ ID NO: 3745485 - RNA, 23 nt, Human
gacugcauguaccauuugcaugg

SEQ ID NO: 3745486 - RNA, 16 nt, Human
gacugcauuauauuua

SEQ ID NO: 3745487 - RNA, 20 nt, Human
gacugccaagacugcugugg

SEQ ID NO: 3745488 - RNA, 12 nt, Human
gacugccaagcc

SEQ ID NO: 3745489 - RNA, 14 nt, Human
gacugccaagccau

SEQ ID NO: 3745490 - RNA, 15 nt, Human
gacugccaagccaug

SEQ ID NO: 3745491 - RNA, 14 nt, Human
gacugccaccuccc

SEQ ID NO: 3745492 - RNA, 15 nt, Human
gacugccaccucccc

SEQ ID NO: 3745493 - RNA, 16 nt, Human
gacugccaccuccccu

SEQ ID NO: 3745494 - RNA, 15 nt, Human
gacugccagcucuuc

SEQ ID NO: 3745495 - RNA, 21 nt, Human
gacugccagcucuuccuagcu

SEQ ID NO: 3745496 - RNA, 20 nt, Human
gacugccagucccccugccc

SEQ ID NO: 3745497 - RNA, 15 nt, Human
gacugccccgugcag

SEQ ID NO: 3745498 - RNA, 17 nt, Human
gacugccccgugcagac

SEQ ID NO: 3745499 - RNA, 23 nt, Human
gacugccccgugcagacuggagg

SEQ ID NO: 3745500 - RNA, 15 nt, Human
gacugcccggcaggg

SEQ ID NO: 3745501 - RNA, 20 nt, Human
gacugccgaccgaggcugga

SEQ ID NO: 3745502 - RNA, 13 nt, Human
gacugccucugcc

SEQ ID NO: 3745503 - RNA, 21 nt, Human
gacugccucugccacacucug

SEQ ID NO: 3745504 - RNA, 18 nt, Human
gacugcuaguguucuguc

SEQ ID NO: 3745505 - RNA, 22 nt, Human
gacugcugcugccuggccacug

SEQ ID NO: 3745506 - RNA, 14 nt, Human
gacugcugggacug

SEQ ID NO: 3745507 - RNA, 15 nt, Human
gacugcugguuugua

SEQ ID NO: 3745508 - RNA, 16 nt, Human
gacugcuguggccagg

SEQ ID NO: 3745509 - RNA, 15 nt, Human
gacugcuucccaucc

SEQ ID NO: 3745510 - RNA, 16 nt, Human
gacugcuucccauccu

SEQ ID NO: 3745511 - RNA, 20 nt, Human
gacugcuucccauccuaccc

SEQ ID NO: 3745512 - RNA, 15 nt, Human
gacugcuugcccuaa

SEQ ID NO: 3745513 - RNA, 14 nt, Human
gacuggaagcacag

SEQ ID NO: 3745514 - RNA, 15 nt, Human
gacuggacagcuugu

SEQ ID NO: 3745515 - RNA, 21 nt, Human
gacuggacagcuuguggcaag

SEQ ID NO: 3745516 - RNA, 16 nt, Human
gacuggagacaaugca

SEQ ID NO: 3745517 - RNA, 15 nt, Human
gacuggaggccccug

SEQ ID NO: 3745518 - RNA, 16 nt, Human
gacuggaggccccugg

SEQ ID NO: 3745519 - RNA, 15 nt, Human
gacuggagucccugu

SEQ ID NO: 3745520 - RNA, 15 nt, Human
gacuggauacugccc

SEQ ID NO: 3745521 - RNA, 16 nt, Human
gacuggauaguccguc

SEQ ID NO: 3745522 - RNA, 17 nt, Human
gacuggauaguccgucu

SEQ ID NO: 3745523 - RNA, 18 nt, Human
gacuggcacaguuuucug

SEQ ID NO: 3745524 - RNA, 22 nt, Human
gacuggcacaguuuucugagaa

SEQ ID NO: 3745525 - RNA, 16 nt, Human
gacuggccccuggguc

SEQ ID NO: 3745526 - RNA, 18 nt, Human
gacuggcggggggcccau

SEQ ID NO: 3745527 - RNA, 17 nt, Human
gacuggcuagaguccuc

SEQ ID NO: 3745528 - RNA, 14 nt, Human
gacuggcuggcugc

SEQ ID NO: 3745529 - RNA, 21 nt, Human
gacuggcuuuuauuaaugcac

SEQ ID NO: 3745530 - RNA, 22 nt, Human
gacuggcuuuuauuaaugcacu

SEQ ID NO: 3745531 - RNA, 16 nt, Human
gacugggaacagaacu

SEQ ID NO: 3745532 - RNA, 22 nt, Human
gacugggaagauaggcucugca

SEQ ID NO: 3745533 - RNA, 16 nt, Human
gacugggaccaggcac

SEQ ID NO: 3745534 - RNA, 18 nt, Human
gacugggaccaggcacca

SEQ ID NO: 3745535 - RNA, 20 nt, Human
gacugggaccaggcaccagg

SEQ ID NO: 3745536 - RNA, 17 nt, Human
gacugggagcccccagc

SEQ ID NO: 3745537 - RNA, 16 nt, Human
gacugggcugagggag

SEQ ID NO: 3745538 - RNA, 21 nt, Human
gacugggcugagggagccugg

SEQ ID NO: 3745539 - RNA, 16 nt, Human
gacuggggauguggga

SEQ ID NO: 3745540 - RNA, 23 nt, Human
gacuggggaugugggagggagca

SEQ ID NO: 3745541 - RNA, 11 nt, Human
gacuggggcag

SEQ ID NO: 3745542 - RNA, 13 nt, Human
gacuggggcaggg

SEQ ID NO: 3745543 - RNA, 14 nt, Human
gacuggggggcuug

SEQ ID NO: 3745544 - RNA, 15 nt, Human
gacuggggugggagg

SEQ ID NO: 3745545 - RNA, 16 nt, Human
gacuggggugggaggu

SEQ ID NO: 3745546 - RNA, 16 nt, Human
gacuggguuuaugucc

SEQ ID NO: 3745547 - RNA, 21 nt, Human
gacuggguuuggaccccagcu

SEQ ID NO: 3745548 - RNA, 22 nt, Human
gacuggguuuggaccccagcug

SEQ ID NO: 3745549 - RNA, 18 nt, Human
gacuggugacugauucuu

SEQ ID NO: 3745550 - RNA, 17 nt, Human
gacuggugagcagacug

SEQ ID NO: 3745551 - RNA, 20 nt, Human
gacuggugcuauaggcugga

SEQ ID NO: 3745552 - RNA, 18 nt, Human
gacugguuuacaggcccu

SEQ ID NO: 3745553 - RNA, 14 nt, Human
gacugguuuucugc

SEQ ID NO: 3745554 - RNA, 15 nt, Human
gacugguuuucugcc

SEQ ID NO: 3745555 - RNA, 16 nt, Human
gacugguuuucugcca

SEQ ID NO: 3745556 - RNA, 22 nt, Human
gacuguacaaaguagaagucuu

SEQ ID NO: 3745557 - RNA, 16 nt, Human
gacuguacacacuuua

SEQ ID NO: 3745558 - RNA, 21 nt, Human
gacuguagauugcuucuguag

SEQ ID NO: 3745559 - RNA, 14 nt, Human
gacuguauauaaag

SEQ ID NO: 3745560 - RNA, 15 nt, Human
gacugucauagaaau

SEQ ID NO: 3745561 - RNA, 19 nt, Human
gacuguccucuccccucca

SEQ ID NO: 3745562 - RNA, 22 nt, Human
gacuguccucuccccuccagcc

SEQ ID NO: 3745563 - RNA, 19 nt, Human
gacugucucacuuaauccu

SEQ ID NO: 3745564 - RNA, 19 nt, Human
gacugucuggccccccugg

SEQ ID NO: 3745565 - RNA, 15 nt, Human
gacugugauucagaa

SEQ ID NO: 3745566 - RNA, 13 nt, Human
gacugugcuacug

SEQ ID NO: 3745567 - RNA, 16 nt, Human
gacuguggagacugcu

SEQ ID NO: 3745568 - RNA, 19 nt, Human
gacuguggagacugcuccu

SEQ ID NO: 3745569 - RNA, 21 nt, Human
gacuguggcacuugccugggu

SEQ ID NO: 3745570 - RNA, 12 nt, Human
gacuguggcugc

SEQ ID NO: 3745571 - RNA, 19 nt, Human
gacuguggguuuguggggg

SEQ ID NO: 3745572 - RNA, 13 nt, Human
gacugugugcuca

SEQ ID NO: 3745573 - RNA, 15 nt, Human
gacugugugugcccu

SEQ ID NO: 3745574 - RNA, 14 nt, Human
gacuguucaagagc

SEQ ID NO: 3745575 - RNA, 15 nt, Human
gucccuggggcuagg

SEQ ID NO: 3745576 - RNA, 21 nt, Human
gucccugggggaagcccugga

SEQ ID NO: 3745577 - RNA, 22 nt, Human
gucccugggggaagcccuggau

SEQ ID NO: 3745578 - RNA, 17 nt, Human
gucccugucaccucuuc

SEQ ID NO: 3745579 - RNA, 12 nt, Human
gucccuguuaga

SEQ ID NO: 3745580 - RNA, 19 nt, Human
gucccuguuuucugagccc

SEQ ID NO: 3745581 - RNA, 20 nt, Human
gucccuguuuucugagcccg

SEQ ID NO: 3745582 - RNA, 19 nt, Human
gucccuuacgugaguccug

SEQ ID NO: 3745583 - RNA, 18 nt, Human
gucccuucaccuccucgc

SEQ ID NO: 3745584 - RNA, 20 nt, Human
gucccuuccacacccccacc

SEQ ID NO: 3745585 - RNA, 13 nt, Human
gucccuuccccuc

SEQ ID NO: 3745586 - RNA, 14 nt, Human
gucccuuccccucc

SEQ ID NO: 3745587 - RNA, 17 nt, Human
gucccuuccccucccug

SEQ ID NO: 3745588 - RNA, 19 nt, Human
gucccuuccccucccuggc

SEQ ID NO: 3745589 - RNA, 16 nt, Human
gucccuugagaccuca

SEQ ID NO: 3745590 - RNA, 20 nt, Human
gucccuugagaccucagcca

SEQ ID NO: 3745591 - RNA, 19 nt, Human
gucccuugaugcacagaga

SEQ ID NO: 3745592 - RNA, 19 nt, Human
gucccuugccccccuggcc

SEQ ID NO: 3745593 - RNA, 16 nt, Human
gucccuugcuguaugc

SEQ ID NO: 3745594 - RNA, 23 nt, Human
gucccuuucgacuugcauuuuug

SEQ ID NO: 3745595 - RNA, 13 nt, Human
gucccuuuuccuu

SEQ ID NO: 3745596 - RNA, 22 nt, Human
guccgaaagggacuuggaagcu

SEQ ID NO: 3745597 - RNA, 20 nt, Human
guccgaccuggccugucugu

SEQ ID NO: 3745598 - RNA, 18 nt, Human
guccgcccugcuccuccc

SEQ ID NO: 3745599 - RNA, 21 nt, Human
guccgcccugcuccucccugg

SEQ ID NO: 3745600 - RNA, 19 nt, Human
guccggacccaccucaccc

SEQ ID NO: 3745601 - RNA, 18 nt, Human
guccggcagcuucugccc

SEQ ID NO: 3745602 - RNA, 21 nt, Human
guccggucccugucccagugc

SEQ ID NO: 3745603 - RNA, 15 nt, Human
guccgguguucuaag

SEQ ID NO: 3745604 - RNA, 17 nt, Human
guccgguguucuaagau

SEQ ID NO: 3745605 - RNA, 15 nt, Human
guccgguuuacuuua

SEQ ID NO: 3745606 - RNA, 15 nt, Human
guccgugcuaaggac

SEQ ID NO: 3745607 - RNA, 15 nt, Human
guccgugcugacagc

SEQ ID NO: 3745608 - RNA, 19 nt, Human
guccgugcugacagcugcu

SEQ ID NO: 3745609 - RNA, 21 nt, Human
guccgugcugacagcugcucc

SEQ ID NO: 3745610 - RNA, 22 nt, Human
guccgugcugacagcugcuccu

SEQ ID NO: 3745611 - RNA, 18 nt, Human
guccguggguugcuaacu

SEQ ID NO: 3745612 - RNA, 14 nt, Human
guccguuuacucca

SEQ ID NO: 3745613 - RNA, 15 nt, Human
guccuaaggaaccuu

SEQ ID NO: 3745614 - RNA, 18 nt, Human
guccuaagucccugcccc

SEQ ID NO: 3745615 - RNA, 20 nt, Human
guccuaauaauaucccacug

SEQ ID NO: 3745616 - RNA, 14 nt, Human
guccuacagaaaaa

SEQ ID NO: 3745617 - RNA, 15 nt, Human
guccuacccacccuc

SEQ ID NO: 3745618 - RNA, 14 nt, Human
guccuacccauccc

SEQ ID NO: 3745619 - RNA, 16 nt, Human
guccuacccauccccg

SEQ ID NO: 3745620 - RNA, 12 nt, Human
guccuacucugu

SEQ ID NO: 3745621 - RNA, 21 nt, Human
guccuacuuuacauaugcuuu

SEQ ID NO: 3745622 - RNA, 17 nt, Human
guccuagacuucaggga

SEQ ID NO: 3745623 - RNA, 20 nt, Human
guccuagaggcccuuugcug

SEQ ID NO: 3745624 - RNA, 21 nt, Human
guccuagcacagauggccagc

SEQ ID NO: 3745625 - RNA, 18 nt, Human
guccuagccacucaggag

SEQ ID NO: 3745626 - RNA, 19 nt, Human
guccuagccacucaggagg

SEQ ID NO: 3745627 - RNA, 12 nt, Human
guccuaggagua

SEQ ID NO: 3745628 - RNA, 14 nt, Human
guccuaggccucaa

SEQ ID NO: 3745629 - RNA, 14 nt, Human
guccuaguaagaag

SEQ ID NO: 3745630 - RNA, 18 nt, Human
guccuaucuaucuuccaa

SEQ ID NO: 3745631 - RNA, 20 nt, Human
guccuaucuccagcggcccu

SEQ ID NO: 3745632 - RNA, 18 nt, Human
guccuaucugggcuuccu

SEQ ID NO: 3745633 - RNA, 24 nt, Human
guccuaucugggcuuccuggagca

SEQ ID NO: 3745634 - RNA, 16 nt, Human
guccuaugaaugcuuu

SEQ ID NO: 3745635 - RNA, 14 nt, Human
guccuaugcaauaa

SEQ ID NO: 3745636 - RNA, 20 nt, Human
guccuauuaguguuauauga

SEQ ID NO: 3745637 - RNA, 19 nt, Human
guccuauuauauucauucu

SEQ ID NO: 3745638 - RNA, 21 nt, Human
guccuauuauauucauucuuu

SEQ ID NO: 3745639 - RNA, 20 nt, Human
guccucaaggggccauccug

SEQ ID NO: 3745640 - RNA, 18 nt, Human
guccucacaucuuucaca

SEQ ID NO: 3745641 - RNA, 17 nt, Human
guccucaccccuguccu

SEQ ID NO: 3745642 - RNA, 23 nt, Human
guccucaccccuguccucacugc

SEQ ID NO: 3745643 - RNA, 16 nt, Human
guccucacucccaguc

SEQ ID NO: 3745644 - RNA, 20 nt, Human
guccucagagaauuucuacc

SEQ ID NO: 3745645 - RNA, 13 nt, Human
guccucagccagu

SEQ ID NO: 3745646 - RNA, 14 nt, Human
guccucagccuugc

SEQ ID NO: 3745647 - RNA, 16 nt, Human
guccucagccuugcca

SEQ ID NO: 3745648 - RNA, 13 nt, Human
guccucagcuucu

SEQ ID NO: 3745649 - RNA, 22 nt, Human
guccucagggagcagggaaggc

SEQ ID NO: 3745650 - RNA, 14 nt, Human
guccucagguggcc

SEQ ID NO: 3745651 - RNA, 16 nt, Human
guccucagguggccau

SEQ ID NO: 3745652 - RNA, 17 nt, Human
guccucauucaaaggga

SEQ ID NO: 3745653 - RNA, 20 nt, Human
guccuccagaagccucuggc

SEQ ID NO: 3745654 - RNA, 22 nt, Human
guccuccaucccaacagccaug

SEQ ID NO: 3745655 - RNA, 15 nt, Human
guccucccagcuccu

SEQ ID NO: 3745656 - RNA, 20 nt, Human
guccucccauccccuggacu

SEQ ID NO: 3745657 - RNA, 12 nt, Human
guccucccaucu

SEQ ID NO: 3745658 - RNA, 23 nt, Human
guccucccaucucacacaugagc

SEQ ID NO: 3745659 - RNA, 16 nt, Human
guccucccccugccag

SEQ ID NO: 3745660 - RNA, 19 nt, Human
guccucccccugccagugc

SEQ ID NO: 3745661 - RNA, 20 nt, Human
guccucccccugccagugcc

SEQ ID NO: 3745662 - RNA, 21 nt, Human
guccuccccucacagccucug

SEQ ID NO: 3745663 - RNA, 21 nt, Human
guccucccgagcuccucuucc

SEQ ID NO: 3745664 - RNA, 12 nt, Human
guccucccgggc

SEQ ID NO: 3745665 - RNA, 15 nt, Human
guccucccgggcccu

SEQ ID NO: 3745666 - RNA, 20 nt, Human
guccucccucacccccuccu

SEQ ID NO: 3745667 - RNA, 15 nt, Human
guccucccugacuuu

SEQ ID NO: 3745668 - RNA, 18 nt, Human
guccuccgccuuaccagg

SEQ ID NO: 3745669 - RNA, 17 nt, Human
guccuccucaccucaug

SEQ ID NO: 3745670 - RNA, 13 nt, Human
guccuccuccagg

SEQ ID NO: 3745671 - RNA, 20 nt, Human
guccuccuccagggacagca

SEQ ID NO: 3745672 - RNA, 14 nt, Human
guccuccugcugcc

SEQ ID NO: 3745673 - RNA, 21 nt, Human
guccuccugguggguccaggg

SEQ ID NO: 3745674 - RNA, 13 nt, Human
guccucgauggga

SEQ ID NO: 3745675 - RNA, 20 nt, Human
guccucuccccuccagccuu

SEQ ID NO: 3745676 - RNA, 16 nt, Human
guccucucuggcuggg

SEQ ID NO: 3745677 - RNA, 17 nt, Human
guccucucuggcugggg

SEQ ID NO: 3745678 - RNA, 18 nt, Human
guccucucuggcugggga

SEQ ID NO: 3745679 - RNA, 15 nt, Human
guccucugagacucc

SEQ ID NO: 3745680 - RNA, 18 nt, Human
guccucuggagcccuaac

SEQ ID NO: 3745681 - RNA, 18 nt, Human
guccucuggauggcacca

SEQ ID NO: 3745682 - RNA, 17 nt, Human
guccucuugccuccugg

SEQ ID NO: 3745683 - RNA, 17 nt, Human
guccucuuuaguuuuug

SEQ ID NO: 3745684 - RNA, 19 nt, Human
guccucuuucagaaaacag

SEQ ID NO: 3745685 - RNA, 23 nt, Human
guccucuuucagaaaacagaaaa

SEQ ID NO: 3745686 - RNA, 14 nt, Human
guccucuuucagcu

SEQ ID NO: 3745687 - RNA, 17 nt, Human
guccucuuucagcuccu

SEQ ID NO: 3745688 - RNA, 17 nt, Human
guccugaagaggcgggc

SEQ ID NO: 3745689 - RNA, 22 nt, Human
guccugaagaggcgggccagcc

SEQ ID NO: 3745690 - RNA, 14 nt, Human
guccugaaggccug

SEQ ID NO: 3745691 - RNA, 14 nt, Human
guccugaccacccu

SEQ ID NO: 3745692 - RNA, 17 nt, Human
guccugaccacccuccc

SEQ ID NO: 3745693 - RNA, 19 nt, Human
guccugaccacccuccccu

SEQ ID NO: 3745694 - RNA, 16 nt, Human
guccugacggcgcccc

SEQ ID NO: 3745695 - RNA, 21 nt, Human
guccugacuucaggggcugcc

SEQ ID NO: 3745696 - RNA, 22 nt, Human
guccugagcacugccaggaggg

SEQ ID NO: 3745697 - RNA, 13 nt, Human
guccugagcucag

SEQ ID NO: 3745698 - RNA, 15 nt, Human
guccugagcucagcg

SEQ ID NO: 3745699 - RNA, 18 nt, Human
guccugaggguccccacc

SEQ ID NO: 3745700 - RNA, 17 nt, Human
guccugaucagagccgu

SEQ ID NO: 3745701 - RNA, 15 nt, Human
guccugaucugugau

SEQ ID NO: 3745702 - RNA, 17 nt, Human
guccugauggucagcuc

SEQ ID NO: 3745703 - RNA, 23 nt, Human
guccugauggucagcucccuucu

SEQ ID NO: 3745704 - RNA, 20 nt, Human
guccugcaccggggccuggg

SEQ ID NO: 3745705 - RNA, 20 nt, Human
guccugcagcaaacacucca

SEQ ID NO: 3745706 - RNA, 18 nt, Human
guccugcagccugcagga

SEQ ID NO: 3745707 - RNA, 18 nt, Human
guccugccaccuggggca

SEQ ID NO: 3745708 - RNA, 18 nt, Human
guccugccggagaggaag

SEQ ID NO: 3745709 - RNA, 19 nt, Human
guccugccuggccaggcag

SEQ ID NO: 3745710 - RNA, 14 nt, Human
guccugccugucug

SEQ ID NO: 3745711 - RNA, 23 nt, Human
guccugccugucugaagccaaug

SEQ ID NO: 3745712 - RNA, 15 nt, Human
guccugccugucugc

SEQ ID NO: 3745713 - RNA, 15 nt, Human
guccugccuguggcg

SEQ ID NO: 3745714 - RNA, 19 nt, Human
guccugcuccacaguguug

SEQ ID NO: 3745715 - RNA, 12 nt, Human
guccugcuccag

SEQ ID NO: 3745716 - RNA, 16 nt, Human
guccugcugcaguugc

SEQ ID NO: 3745717 - RNA, 17 nt, Human
guccuggcaugggaaug

SEQ ID NO: 3745718 - RNA, 20 nt, Human
guccuggccuggcuucuccu

SEQ ID NO: 3745719 - RNA, 19 nt, Human
guccugggagaaccucagg

SEQ ID NO: 3745720 - RNA, 15 nt, Human
guccugggaggagag

SEQ ID NO: 3745721 - RNA, 14 nt, Human
guccugggccugca

SEQ ID NO: 3745722 - RNA, 16 nt, Human
guccuggggcucugug

SEQ ID NO: 3745723 - RNA, 14 nt, Human
guccugggggccug

SEQ ID NO: 3745724 - RNA, 16 nt, Human
guccuggugcucucug

SEQ ID NO: 3745725 - RNA, 18 nt, Human
guccuggugcucucugcc

SEQ ID NO: 3745726 - RNA, 22 nt, Human
guccugguggggcagcuccucu

SEQ ID NO: 3745727 - RNA, 16 nt, Human
guccuggugucacuua

SEQ ID NO: 3745728 - RNA, 16 nt, Human
guccuguaaacacuca

SEQ ID NO: 3745729 - RNA, 21 nt, Human
guccuguaaacacucagcugu

SEQ ID NO: 3745730 - RNA, 15 nt, Human
guccuguacauugug

SEQ ID NO: 3745731 - RNA, 14 nt, Human
guccugucagugcc

SEQ ID NO: 3745732 - RNA, 16 nt, Human
guccugucagugccgc

SEQ ID NO: 3745733 - RNA, 18 nt, Human
guccuguccacacccagc

SEQ ID NO: 3745734 - RNA, 22 nt, Human
guccuguccacacccagcucag

SEQ ID NO: 3745735 - RNA, 17 nt, Human
guccuguggcaggcagc

SEQ ID NO: 3745736 - RNA, 22 nt, Human
guccugugucaguuuauguuuu

SEQ ID NO: 3745737 - RNA, 19 nt, Human
guccuuaaaaaucacacug

SEQ ID NO: 3745738 - RNA, 22 nt, Human
guccuuaaaaaucacacuguaa

SEQ ID NO: 3745739 - RNA, 20 nt, Human
guccuuaaugauccguucca

SEQ ID NO: 3745740 - RNA, 15 nt, Human
guccuuaccagcaga

SEQ ID NO: 3745741 - RNA, 16 nt, Human
guccuuaccagcagag

SEQ ID NO: 3745742 - RNA, 15 nt, Human
guccuuacuccugug

SEQ ID NO: 3745743 - RNA, 17 nt, Human
guccuuacuccuguggg

SEQ ID NO: 3745744 - RNA, 22 nt, Human
guccuuacuccugugggagccu

SEQ ID NO: 3745745 - RNA, 17 nt, Human
guccuuagaacauuuua

SEQ ID NO: 3745746 - RNA, 13 nt, Human
guccuuagccugg

SEQ ID NO: 3745747 - RNA, 19 nt, Human
guccuuagccuggaccucu

SEQ ID NO: 3745748 - RNA, 22 nt, Human
guccuucaaaauccuuccaaag

SEQ ID NO: 3745749 - RNA, 14 nt, Human
guccuuccaccucg

SEQ ID NO: 3745750 - RNA, 21 nt, Human
guccuucccucuccccaagac

SEQ ID NO: 3745751 - RNA, 19 nt, Human
guccuucucucaccuccua

SEQ ID NO: 3745752 - RNA, 14 nt, Human
guccuugaaaauau

SEQ ID NO: 3745753 - RNA, 16 nt, Human
guccuugaaugccaua

SEQ ID NO: 3745754 - RNA, 19 nt, Human
guccuugauuucaaaguuu

SEQ ID NO: 3745755 - RNA, 12 nt, Human
guccuugcacac

SEQ ID NO: 3745756 - RNA, 22 nt, Human
guccuugcacacuccccugcac

SEQ ID NO: 3745757 - RNA, 16 nt, Human
guccuugcaccccuca

SEQ ID NO: 3745758 - RNA, 16 nt, Human
guccuugcaccugcau

SEQ ID NO: 3745759 - RNA, 17 nt, Human
guccuuggaaguuucau

SEQ ID NO: 3745760 - RNA, 12 nt, Human
guccuuuagaaa

SEQ ID NO: 3745761 - RNA, 14 nt, Human
guccuuuaguaccu

SEQ ID NO: 3745762 - RNA, 22 nt, Human
guccuuuccaaggcuucuccaa

SEQ ID NO: 3745763 - RNA, 11 nt, Human
guccuuucccu

SEQ ID NO: 3745764 - RNA, 13 nt, Human
guccuuucccucc

SEQ ID NO: 3745765 - RNA, 14 nt, Human
guccuuucccucca

SEQ ID NO: 3745766 - RNA, 13 nt, Human
guccuuucuuccg

SEQ ID NO: 3745767 - RNA, 21 nt, Human
guccuuuggggcauagaucag

SEQ ID NO: 3745768 - RNA, 15 nt, Human
guccuuuugacacug

SEQ ID NO: 3745769 - RNA, 17 nt, Human
guccuuuugacacugcu

SEQ ID NO: 3745770 - RNA, 19 nt, Human
guccuuuugacacugcucu

SEQ ID NO: 3745771 - RNA, 15 nt, Human
guccuuuugucuucu

SEQ ID NO: 3745772 - RNA, 22 nt, Human
guccuuuugucuucucugucuc

SEQ ID NO: 3745773 - RNA, 16 nt, Human
gucgaaagcucuagaa

SEQ ID NO: 3745774 - RNA, 17 nt, Human
gucgaauuaauagcuuu

SEQ ID NO: 3745775 - RNA, 18 nt, Human
gucgacuucgggcuggcc

SEQ ID NO: 3745776 - RNA, 14 nt, Human
gucgaggacaggga

SEQ ID NO: 3745777 - RNA, 14 nt, Human
gucgaggggcucuc

SEQ ID NO: 3745778 - RNA, 13 nt, Human
gucgauuagacug

SEQ ID NO: 3745779 - RNA, 14 nt, Human
gucgauuagacugg

SEQ ID NO: 3745780 - RNA, 13 nt, Human
gucgccaggcuag

SEQ ID NO: 3745781 - RNA, 14 nt, Human
gucgcccuggacug

SEQ ID NO: 3745782 - RNA, 18 nt, Human
gucgcccuggacugugug

SEQ ID NO: 3745783 - RNA, 17 nt, Human
gucgcccuuugcugcau

SEQ ID NO: 3745784 - RNA, 22 nt, Human
gucgcccuuugcugcauggcag

SEQ ID NO: 3745785 - RNA, 18 nt, Human
gucgccuuagcauguuug

SEQ ID NO: 3745786 - RNA, 20 nt, Human
gucgccuuagcauguuugcu

SEQ ID NO: 3745787 - RNA, 21 nt, Human
gucgcucaugugugcaacagg

SEQ ID NO: 3745788 - RNA, 17 nt, Human
gucgcugugccacaggc

SEQ ID NO: 3745789 - RNA, 21 nt, Human
gucggaaaacaugcuacacac

SEQ ID NO: 3745790 - RNA, 16 nt, Human
gucggagcccugucuc

SEQ ID NO: 3745791 - RNA, 23 nt, Human
gucggccucuaaccccaggcccc

SEQ ID NO: 3745792 - RNA, 16 nt, Human
gucgggcagcugcagg

SEQ ID NO: 3745793 - RNA, 16 nt, Human
gucgggcaugacacga

SEQ ID NO: 3745794 - RNA, 16 nt, Human
gucgggggcuggccua

SEQ ID NO: 3745795 - RNA, 17 nt, Human
gucgguccuggugcccu

SEQ ID NO: 3745796 - RNA, 14 nt, Human
gucggucugugccc

SEQ ID NO: 3745797 - RNA, 15 nt, Human
gucguaguuacucuc

SEQ ID NO: 3745798 - RNA, 17 nt, Human
gucgugagcucuuguga

SEQ ID NO: 3745799 - RNA, 14 nt, Human
gucgugccuguguc

SEQ ID NO: 3745800 - RNA, 17 nt, Human
gucgugccuguguccau

SEQ ID NO: 3745801 - RNA, 18 nt, Human
gucguggagagcuaggag

SEQ ID NO: 3745802 - RNA, 20 nt, Human
gucguggagagcuaggagca

SEQ ID NO: 3745803 - RNA, 22 nt, Human
gucguggcagauaaucagccuc

SEQ ID NO: 3745804 - RNA, 17 nt, Human
gucguggggugugcugg

SEQ ID NO: 3745805 - RNA, 23 nt, Human
gucguuaaaaacagauuuggaaa

SEQ ID NO: 3745806 - RNA, 15 nt, Human
gucguucccagugug

SEQ ID NO: 3745807 - RNA, 13 nt, Human
gucguugugaggg

SEQ ID NO: 3745808 - RNA, 12 nt, Human
gucguuuuccaa

SEQ ID NO: 3745809 - RNA, 12 nt, Human
gucuaaaaacac

SEQ ID NO: 3745810 - RNA, 14 nt, Human
gucuaaaaauaaaa

SEQ ID NO: 3745811 - RNA, 11 nt, Human
gucuaaaacuc

SEQ ID NO: 3745812 - RNA, 14 nt, Human
gucuaaagagcuuu

SEQ ID NO: 3745813 - RNA, 20 nt, Human
gucuaaagauggaguuucua

SEQ ID NO: 3745814 - RNA, 23 nt, Human
gucuaaagauggaguuucuaagg

SEQ ID NO: 3745815 - RNA, 21 nt, Human
gucuaaagcugguuuaauguu

SEQ ID NO: 3745816 - RNA, 23 nt, Human
gucuaaauauuuccuuaaacugu

SEQ ID NO: 3745817 - RNA, 15 nt, Human
gucuaaauuuauuau

SEQ ID NO: 3745818 - RNA, 17 nt, Human
gucuaaccaaaugcauc

SEQ ID NO: 3745819 - RNA, 22 nt, Human
gucuaaccacagcuccuuuucc

SEQ ID NO: 3745820 - RNA, 21 nt, Human
gucuaagauaguaacaaugaa

SEQ ID NO: 3745821 - RNA, 23 nt, Human
gucuaagauaguaacaaugaaga

SEQ ID NO: 3745822 - RNA, 16 nt, Human
gucuaagauucuagau

SEQ ID NO: 3745823 - RNA, 22 nt, Human
gucuaauuaaaacacuuucaaa

SEQ ID NO: 3745824 - RNA, 15 nt, Human
gucuacaaauauaag

SEQ ID NO: 3745825 - RNA, 20 nt, Human
gucuacaaauauaagauuuu

SEQ ID NO: 3745826 - RNA, 17 nt, Human
gucuacacacccugcau

SEQ ID NO: 3745827 - RNA, 16 nt, Human
gucuacacugcaauca

SEQ ID NO: 3745828 - RNA, 22 nt, Human
gucuacacugcaaucauaugug

SEQ ID NO: 3745829 - RNA, 21 nt, Human
gucuacagcucccccagcucc

SEQ ID NO: 3745830 - RNA, 12 nt, Human
gucuacauuuca

SEQ ID NO: 3745831 - RNA, 17 nt, Human
gucuacccagagaagcc

SEQ ID NO: 3745832 - RNA, 21 nt, Human
gucuacccagagaagccccuu

SEQ ID NO: 3745833 - RNA, 22 nt, Human
gucuacccugggauucaggaaa

SEQ ID NO: 3745834 - RNA, 20 nt, Human
gucuacucauuccccggggc

SEQ ID NO: 3745835 - RNA, 17 nt, Human
gucuacucuuaagccau

SEQ ID NO: 3745836 - RNA, 19 nt, Human
gucuacucuuaagccaucu

SEQ ID NO: 3745837 - RNA, 15 nt, Human
gucuacuugcucagg

SEQ ID NO: 3745838 - RNA, 21 nt, Human
gucuagauggcuccucucagu

SEQ ID NO: 3745839 - RNA, 21 nt, Human
gucuagauucaaagguucuag

SEQ ID NO: 3745840 - RNA, 12 nt, Human
gucuagauucuc

SEQ ID NO: 3745841 - RNA, 14 nt, Human
gucuagcaugccaa

SEQ ID NO: 3745842 - RNA, 23 nt, Human
gucuagccuauguggauuuuuuc

SEQ ID NO: 3745843 - RNA, 22 nt, Human
gucuagucacgcaugcaguguu

SEQ ID NO: 3745844 - RNA, 19 nt, Human
gucuaguuaacauuucaag

SEQ ID NO: 3745845 - RNA, 20 nt, Human
gucuauaaucccagcacuuu

SEQ ID NO: 3745846 - RNA, 22 nt, Human
gucuaugggacucaaugcacug

SEQ ID NO: 3745847 - RNA, 15 nt, Human
gucuauguuccgaau

SEQ ID NO: 3745848 - RNA, 13 nt, Human
gucuauucagcuu

SEQ ID NO: 3745849 - RNA, 13 nt, Human
gucuauucuaguc

SEQ ID NO: 3745850 - RNA, 12 nt, Human
gucuauuuaagc

SEQ ID NO: 3745851 - RNA, 16 nt, Human
gucuauuuaagccuca

SEQ ID NO: 3745852 - RNA, 20 nt, Human
gucuauuuacggaacucaaa

SEQ ID NO: 3745853 - RNA, 20 nt, Human
gucuauuucaucagaacagc

SEQ ID NO: 3745854 - RNA, 17 nt, Human
gucuauuucugcugaau

SEQ ID NO: 3745855 - RNA, 20 nt, Human
gucuauuuggauuauucuuu

SEQ ID NO: 3745856 - RNA, 16 nt, Human
gucuauuuuugucuua

SEQ ID NO: 3745857 - RNA, 17 nt, Human
gucucaaaaaaagaaaa

SEQ ID NO: 3745858 - RNA, 13 nt, Human
gucucaaacaagg

SEQ ID NO: 3745859 - RNA, 20 nt, Human
gucucaaaccuccaaaagcc

SEQ ID NO: 3745860 - RNA, 22 nt, Human
gucucaaacuccugaccucagg

SEQ ID NO: 3745861 - RNA, 20 nt, Human
gucucaaacuccugggcuca

SEQ ID NO: 3745862 - RNA, 22 nt, Human
gucucaaacucuugaccucagg

SEQ ID NO: 3745863 - RNA, 21 nt, Human
gucucaacccuuuugucugcc

SEQ ID NO: 3745864 - RNA, 23 nt, Human
gucucaacugcucuuuuauacug

SEQ ID NO: 3745865 - RNA, 17 nt, Human
gucucaagagggcacug

SEQ ID NO: 3745866 - RNA, 20 nt, Human
gucucaagagggcacuggug

SEQ ID NO: 3745867 - RNA, 19 nt, Human
gucucaagggcuagcaucc

SEQ ID NO: 3745868 - RNA, 15 nt, Human
gucucaaugaaauag

SEQ ID NO: 3745869 - RNA, 15 nt, Human
gucucaccauuuccc

SEQ ID NO: 3745870 - RNA, 18 nt, Human
gucucaccauuuccccag

SEQ ID NO: 3745871 - RNA, 13 nt, Human
gucucacccaugc

SEQ ID NO: 3745872 - RNA, 20 nt, Human
gucucacccuggaggcaccu

SEQ ID NO: 3745873 - RNA, 21 nt, Human
guagaugugcauuuuugugaa

SEQ ID NO: 3745874 - RNA, 16 nt, Human
guagauguucuacuuu

SEQ ID NO: 3745875 - RNA, 16 nt, Human
guagauucuguggaac

SEQ ID NO: 3745876 - RNA, 13 nt, Human
guagauugcagaa

SEQ ID NO: 3745877 - RNA, 19 nt, Human
guagauuuauuucaucaua

SEQ ID NO: 3745878 - RNA, 19 nt, Human
guagcagggucgggaaagg

SEQ ID NO: 3745879 - RNA, 17 nt, Human
guagcagguaccacuga

SEQ ID NO: 3745880 - RNA, 18 nt, Human
guagcagguaccacugau

SEQ ID NO: 3745881 - RNA, 22 nt, Human
guagcagugagucauaucuuaa

SEQ ID NO: 3745882 - RNA, 13 nt, Human
guagcauacauuu

SEQ ID NO: 3745883 - RNA, 16 nt, Human
guagcauccuggaaua

SEQ ID NO: 3745884 - RNA, 16 nt, Human
guagcaucuucuggag

SEQ ID NO: 3745885 - RNA, 14 nt, Human
guagcauuuacugu

SEQ ID NO: 3745886 - RNA, 21 nt, Human
guagcauuuguguugaagagg

SEQ ID NO: 3745887 - RNA, 15 nt, Human
guagcauuuuaaaca

SEQ ID NO: 3745888 - RNA, 18 nt, Human
guagccaaggugggcuga

SEQ ID NO: 3745889 - RNA, 18 nt, Human
guagccagcacacagggc

SEQ ID NO: 3745890 - RNA, 21 nt, Human
guagccagcacacagggcagu

SEQ ID NO: 3745891 - RNA, 11 nt, Human
guagccagccg

SEQ ID NO: 3745892 - RNA, 23 nt, Human
guagccagggggacuagccccug

SEQ ID NO: 3745893 - RNA, 20 nt, Human
guagccauguuaacaugaca

SEQ ID NO: 3745894 - RNA, 21 nt, Human
guagccccaagaaggcugggg

SEQ ID NO: 3745895 - RNA, 16 nt, Human
guagccccagugacag

SEQ ID NO: 3745896 - RNA, 19 nt, Human
guagcccccucuucccugg

SEQ ID NO: 3745897 - RNA, 16 nt, Human
guagcccccuggccuc

SEQ ID NO: 3745898 - RNA, 23 nt, Human
guagcccccuggccucugugccu

SEQ ID NO: 3745899 - RNA, 16 nt, Human
guagcccgccugccag

SEQ ID NO: 3745900 - RNA, 15 nt, Human
guagcccucccacuu

SEQ ID NO: 3745901 - RNA, 16 nt, Human
guagccuauguugugg

SEQ ID NO: 3745902 - RNA, 20 nt, Human
guagccuauuuuuuuagauu

SEQ ID NO: 3745903 - RNA, 21 nt, Human
guagccucaaucgagugagac

SEQ ID NO: 3745904 - RNA, 22 nt, Human
guagccucaaucgagugagaca

SEQ ID NO: 3745905 - RNA, 21 nt, Human
guagccucuccuguauuuaac

SEQ ID NO: 3745906 - RNA, 12 nt, Human
guagccugcugg

SEQ ID NO: 3745907 - RNA, 15 nt, Human
guagccuugcccgga

SEQ ID NO: 3745908 - RNA, 16 nt, Human
guagccuuuugacuuu

SEQ ID NO: 3745909 - RNA, 18 nt, Human
guagccuuuuuguauaaa

SEQ ID NO: 3745910 - RNA, 18 nt, Human
guagcggaugauucuuca

SEQ ID NO: 3745911 - RNA, 18 nt, Human
guagcgucuuucuuuuuu

SEQ ID NO: 3745912 - RNA, 17 nt, Human
guagcguuuuuuaaaug

SEQ ID NO: 3745913 - RNA, 22 nt, Human
guagcguuuuuuaaauguauac

SEQ ID NO: 3745914 - RNA, 16 nt, Human
guagcuacagagaaac

SEQ ID NO: 3745915 - RNA, 23 nt, Human
guagcuacagagaaaccagcuuc

SEQ ID NO: 3745916 - RNA, 15 nt, Human
guagcuagaggaacc

SEQ ID NO: 3745917 - RNA, 16 nt, Human
guagcuauaucuauau

SEQ ID NO: 3745918 - RNA, 14 nt, Human
guagcucagguggg

SEQ ID NO: 3745919 - RNA, 23 nt, Human
guagcuccucaacucaccuaaug

SEQ ID NO: 3745920 - RNA, 20 nt, Human
guagcucuuugucagggagu

SEQ ID NO: 3745921 - RNA, 21 nt, Human
guagcucuuugucagggagug

SEQ ID NO: 3745922 - RNA, 12 nt, Human
guagcugagcuc

SEQ ID NO: 3745923 - RNA, 21 nt, Human
guagcugagcucacaaggcag

SEQ ID NO: 3745924 - RNA, 22 nt, Human
guagcugagcucacaaggcagc

SEQ ID NO: 3745925 - RNA, 12 nt, Human
guagcugccccu

SEQ ID NO: 3745926 - RNA, 17 nt, Human
guagcugggacuacagg

SEQ ID NO: 3745927 - RNA, 18 nt, Human
guagcugggacuacaggc

SEQ ID NO: 3745928 - RNA, 17 nt, Human
guagcugggauuuuaaa

SEQ ID NO: 3745929 - RNA, 16 nt, Human
guagcuguaaaacgcu

SEQ ID NO: 3745930 - RNA, 20 nt, Human
guagcuguaaggcaugaagg

SEQ ID NO: 3745931 - RNA, 16 nt, Human
guagcugugaccugcu

SEQ ID NO: 3745932 - RNA, 15 nt, Human
guagcuuaagaaaaa

SEQ ID NO: 3745933 - RNA, 17 nt, Human
guagcuuaccagaagcu

SEQ ID NO: 3745934 - RNA, 17 nt, Human
guagcuuaccugacaca

SEQ ID NO: 3745935 - RNA, 19 nt, Human
guagcuuaccugacacaag

SEQ ID NO: 3745936 - RNA, 11 nt, Human
guagcuucuga

SEQ ID NO: 3745937 - RNA, 19 nt, Human
guagcuucugaccucagca

SEQ ID NO: 3745938 - RNA, 17 nt, Human
guagcuuucccaaauaa

SEQ ID NO: 3745939 - RNA, 13 nt, Human
guagcuuugcacu

SEQ ID NO: 3745940 - RNA, 15 nt, Human
guaggaaaaaaauag

SEQ ID NO: 3745941 - RNA, 16 nt, Human
guaggaaagaggaagc

SEQ ID NO: 3745942 - RNA, 15 nt, Human
guaggaagacuuugg

SEQ ID NO: 3745943 - RNA, 19 nt, Human
guaggaagguacuguauga

SEQ ID NO: 3745944 - RNA, 16 nt, Human
guaggaauauuauauu

SEQ ID NO: 3745945 - RNA, 18 nt, Human
guaggaauauuauauuug

SEQ ID NO: 3745946 - RNA, 20 nt, Human
guaggaauauuauauuugga

SEQ ID NO: 3745947 - RNA, 18 nt, Human
guaggacccaagcagaga

SEQ ID NO: 3745948 - RNA, 15 nt, Human
guaggacuccuuauu

SEQ ID NO: 3745949 - RNA, 14 nt, Human
guaggagcugccuu

SEQ ID NO: 3745950 - RNA, 16 nt, Human
guaggagggugggaag

SEQ ID NO: 3745951 - RNA, 20 nt, Human
guaggauauuuugucaccag

SEQ ID NO: 3745952 - RNA, 13 nt, Human
guaggcagacaca

SEQ ID NO: 3745953 - RNA, 14 nt, Human
guaggcagagccuu

SEQ ID NO: 3745954 - RNA, 13 nt, Human
guaggcaggauug

SEQ ID NO: 3745955 - RNA, 20 nt, Human
guaggcaugagggaucacag

SEQ ID NO: 3745956 - RNA, 22 nt, Human
guaggcaugagggaucacaggg

SEQ ID NO: 3745957 - RNA, 18 nt, Human
guaggccaagguguccua

SEQ ID NO: 3745958 - RNA, 15 nt, Human
guaggccucagguga

SEQ ID NO: 3745959 - RNA, 18 nt, Human
guaggccuuuuaacauuu

SEQ ID NO: 3745960 - RNA, 17 nt, Human
guaggcuacagagaagc

SEQ ID NO: 3745961 - RNA, 17 nt, Human
guaggcucaacuaggga

SEQ ID NO: 3745962 - RNA, 17 nt, Human
guaggcuuuacuuagcu

SEQ ID NO: 3745963 - RNA, 15 nt, Human
guagggaacucuggg

SEQ ID NO: 3745964 - RNA, 13 nt, Human
guagggaauaaaa

SEQ ID NO: 3745965 - RNA, 14 nt, Human
guagggaggcagcc

SEQ ID NO: 3745966 - RNA, 23 nt, Human
guagggcgggaggauguucuggg

SEQ ID NO: 3745967 - RNA, 22 nt, Human
guaggggcuuauaauaaaggac

SEQ ID NO: 3745968 - RNA, 17 nt, Human
guagggggcuggaggag

SEQ ID NO: 3745969 - RNA, 22 nt, Human
guaggguaauuaguaacaugug

SEQ ID NO: 3745970 - RNA, 14 nt, Human
guagggugggccuu

SEQ ID NO: 3745971 - RNA, 12 nt, Human
guaggguuucua

SEQ ID NO: 3745972 - RNA, 18 nt, Human
guagguaaaauguauuuu

SEQ ID NO: 3745973 - RNA, 15 nt, Human
guaggugauuugaag

SEQ ID NO: 3745974 - RNA, 23 nt, Human
guagguggaagcuagacacauga

SEQ ID NO: 3745975 - RNA, 17 nt, Human
guagguucagccaaggu

SEQ ID NO: 3745976 - RNA, 18 nt, Human
guagguugcacacuuugg

SEQ ID NO: 3745977 - RNA, 17 nt, Human
guaguaaauaaugcuuu

SEQ ID NO: 3745978 - RNA, 21 nt, Human
guaguaaauaaugcuuugaaa

SEQ ID NO: 3745979 - RNA, 14 nt, Human
guaguaacacuaau

SEQ ID NO: 3745980 - RNA, 16 nt, Human
guaguaccaaaugcuu

SEQ ID NO: 3745981 - RNA, 19 nt, Human
guaguaccaaaugcuuuaa

SEQ ID NO: 3745982 - RNA, 20 nt, Human
guaguagcccuuucugugug

SEQ ID NO: 3745983 - RNA, 16 nt, Human
guaguaggcauuuuua

SEQ ID NO: 3745984 - RNA, 17 nt, Human
guagucauuuacuaaac

SEQ ID NO: 3745985 - RNA, 12 nt, Human
guagucccagcc

SEQ ID NO: 3745986 - RNA, 12 nt, Human
guagucccagcu

SEQ ID NO: 3745987 - RNA, 22 nt, Human
guaguccgugcugacagcugcu

SEQ ID NO: 3745988 - RNA, 21 nt, Human
guaguccuuggcauagacaug

SEQ ID NO: 3745989 - RNA, 14 nt, Human
guagucuaaccaaa

SEQ ID NO: 3745990 - RNA, 12 nt, Human
guagucuugaug

SEQ ID NO: 3745991 - RNA, 13 nt, Human
guagugagcagug

SEQ ID NO: 3745992 - RNA, 19 nt, Human
guagugauuuuuaugccac

SEQ ID NO: 3745993 - RNA, 20 nt, Human
guagugccgcucuuggggac

SEQ ID NO: 3745994 - RNA, 23 nt, Human
guagugcuacaggguccaacaua

SEQ ID NO: 3745995 - RNA, 13 nt, Human
guagugcuuugag

SEQ ID NO: 3745996 - RNA, 18 nt, Human
guaguggggaagaggguu

SEQ ID NO: 3745997 - RNA, 19 nt, Human
guaguguaagcuagaagaa

SEQ ID NO: 3745998 - RNA, 19 nt, Human
guaguguccauuuugugaa

SEQ ID NO: 3745999 - RNA, 23 nt, Human
guaguguccauuuugugaagccc

SEQ ID NO: 3746000 - RNA, 19 nt, Human
guagugucuggaucaguaa

SEQ ID NO: 3746001 - RNA, 15 nt, Human
guaguguuggagaag

SEQ ID NO: 3746002 - RNA, 13 nt, Human
guaguuaauuuau

SEQ ID NO: 3746003 - RNA, 14 nt, Human
guaguuaggaaaua

SEQ ID NO: 3746004 - RNA, 17 nt, Human
guaguuauauaauuguu

SEQ ID NO: 3746005 - RNA, 12 nt, Human
guaguuaucaug

SEQ ID NO: 3746006 - RNA, 13 nt, Human
guaguuaucaugu

SEQ ID NO: 3746007 - RNA, 14 nt, Human
guaguuaucauguu

SEQ ID NO: 3746008 - RNA, 15 nt, Human
guaguucaagaaaug

SEQ ID NO: 3746009 - RNA, 20 nt, Human
guaguucaagaaaugaagag

SEQ ID NO: 3746010 - RNA, 22 nt, Human
guaguuccacuuauagccucug

SEQ ID NO: 3746011 - RNA, 16 nt, Human
guaguucuaccggcuu

SEQ ID NO: 3746012 - RNA, 20 nt, Human
guaguucuguauuugaaagu

SEQ ID NO: 3746013 - RNA, 14 nt, Human
guaguugaauauug

SEQ ID NO: 3746014 - RNA, 12 nt, Human
guaguugaaugg

SEQ ID NO: 3746015 - RNA, 20 nt, Human
guaguuuuuauauguuguaa

SEQ ID NO: 3746016 - RNA, 17 nt, Human
guaguuuuucuucaaca

SEQ ID NO: 3746017 - RNA, 15 nt, Human
guaguuuuuucaucu

SEQ ID NO: 3746018 - RNA, 12 nt, Human
guauaaaaacaa

SEQ ID NO: 3746019 - RNA, 16 nt, Human
guauaaaaauaaaaaa

SEQ ID NO: 3746020 - RNA, 11 nt, Human
guauaaaagau

SEQ ID NO: 3746021 - RNA, 14 nt, Human
guauaaaauacaua

SEQ ID NO: 3746022 - RNA, 18 nt, Human
guauaaaauacauaguga

SEQ ID NO: 3746023 - RNA, 20 nt, Human
guauaaaauacauagugaaa

SEQ ID NO: 3746024 - RNA, 23 nt, Human
gacuguucaagagcacacuuggc

SEQ ID NO: 3746025 - RNA, 11 nt, Human
gacuguugaug

SEQ ID NO: 3746026 - RNA, 14 nt, Human
gacuguuguuaucu

SEQ ID NO: 3746027 - RNA, 21 nt, Human
gacuguuguuaucuguuugag

SEQ ID NO: 3746028 - RNA, 21 nt, Human
gacuguuuucucucggcuccc

SEQ ID NO: 3746029 - RNA, 13 nt, Human
gacuguuuuuacc

SEQ ID NO: 3746030 - RNA, 21 nt, Human
gacuguuuuuuccugagcuug

SEQ ID NO: 3746031 - RNA, 16 nt, Human
gacuuaaaaaaaccau

SEQ ID NO: 3746032 - RNA, 13 nt, Human
gacuuaaagcaga

SEQ ID NO: 3746033 - RNA, 22 nt, Human
gacuuaagcaucuggcucuaau

SEQ ID NO: 3746034 - RNA, 14 nt, Human
gacuuaaugugauu

SEQ ID NO: 3746035 - RNA, 15 nt, Human
gacuuaaugugauua

SEQ ID NO: 3746036 - RNA, 18 nt, Human
gacuuacaugauucauuu

SEQ ID NO: 3746037 - RNA, 14 nt, Human
gacuuacucuaaga

SEQ ID NO: 3746038 - RNA, 16 nt, Human
gacuuacuguacauga

SEQ ID NO: 3746039 - RNA, 21 nt, Human
gacuuagaaaaccagcucagc

SEQ ID NO: 3746040 - RNA, 23 nt, Human
gacuuagaaaaccagcucagcac

SEQ ID NO: 3746041 - RNA, 18 nt, Human
gacuuagaaagcaggggc

SEQ ID NO: 3746042 - RNA, 19 nt, Human
gacuuagaaagcaggggcu

SEQ ID NO: 3746043 - RNA, 15 nt, Human
gacuuagcugggaga

SEQ ID NO: 3746044 - RNA, 15 nt, Human
gacuuauaguacaug

SEQ ID NO: 3746045 - RNA, 18 nt, Human
gacuuauaguacaugaua

SEQ ID NO: 3746046 - RNA, 23 nt, Human
gacuuauuguggauaacaaagau

SEQ ID NO: 3746047 - RNA, 17 nt, Human
gacuuauuucuucaaau

SEQ ID NO: 3746048 - RNA, 17 nt, Human
gacuucaaaauauugag

SEQ ID NO: 3746049 - RNA, 19 nt, Human
gacuucaaaauauugagca

SEQ ID NO: 3746050 - RNA, 13 nt, Human
gacuucacacugc

SEQ ID NO: 3746051 - RNA, 22 nt, Human
gacuucacgaaguguugcaugg

SEQ ID NO: 3746052 - RNA, 18 nt, Human
gacuucaggggcugcccg

SEQ ID NO: 3746053 - RNA, 19 nt, Human
gacuucaguauguugucaa

SEQ ID NO: 3746054 - RNA, 21 nt, Human
gacuucaguauguugucaaag

SEQ ID NO: 3746055 - RNA, 12 nt, Human
gacuucaucccu

SEQ ID NO: 3746056 - RNA, 23 nt, Human
gacuucauugucccucuucacuc

SEQ ID NO: 3746057 - RNA, 16 nt, Human
gacuucauuuuuccua

SEQ ID NO: 3746058 - RNA, 15 nt, Human
gacuuccaaagaaug

SEQ ID NO: 3746059 - RNA, 12 nt, Human
gacuucccagcu

SEQ ID NO: 3746060 - RNA, 13 nt, Human
gacuucccagcua

SEQ ID NO: 3746061 - RNA, 18 nt, Human
gacuuccccaauaucuug

SEQ ID NO: 3746062 - RNA, 20 nt, Human
gacuuccccgcauuccaggc

SEQ ID NO: 3746063 - RNA, 19 nt, Human
gacuuccccggagggcugc

SEQ ID NO: 3746064 - RNA, 20 nt, Human
gacuuccccggagggcugcg

SEQ ID NO: 3746065 - RNA, 21 nt, Human
gacuuccugauugguuucucu

SEQ ID NO: 3746066 - RNA, 19 nt, Human
gacuuccuguccagcucca

SEQ ID NO: 3746067 - RNA, 14 nt, Human
gacuuccuugagac

SEQ ID NO: 3746068 - RNA, 17 nt, Human
gacuuccuugcucuccc

SEQ ID NO: 3746069 - RNA, 17 nt, Human
gacuucggaccgcuugu

SEQ ID NO: 3746070 - RNA, 19 nt, Human
gacuucuaauaucauucac

SEQ ID NO: 3746071 - RNA, 12 nt, Human
gacuucugagau

SEQ ID NO: 3746072 - RNA, 13 nt, Human
gacuucugccugg

SEQ ID NO: 3746073 - RNA, 14 nt, Human
gacuucugccugga

SEQ ID NO: 3746074 - RNA, 16 nt, Human
gacuucugccuggaga

SEQ ID NO: 3746075 - RNA, 18 nt, Human
gacuucuguuuucaaucu

SEQ ID NO: 3746076 - RNA, 20 nt, Human
gacuucuuuaauuuuggaau

SEQ ID NO: 3746077 - RNA, 16 nt, Human
gacuucuuuucacauu

SEQ ID NO: 3746078 - RNA, 17 nt, Human
gacuugaaagcauccau

SEQ ID NO: 3746079 - RNA, 17 nt, Human
gacuugaacuuuccugg

SEQ ID NO: 3746080 - RNA, 12 nt, Human
gacuugaaguug

SEQ ID NO: 3746081 - RNA, 13 nt, Human
gacuugaaguugu

SEQ ID NO: 3746082 - RNA, 21 nt, Human
gacuugaauuuucccacugca

SEQ ID NO: 3746083 - RNA, 16 nt, Human
gacuugacagaacacu

SEQ ID NO: 3746084 - RNA, 18 nt, Human
gacuugacagaacacugu

SEQ ID NO: 3746085 - RNA, 19 nt, Human
gacuugacuuuagucugca

SEQ ID NO: 3746086 - RNA, 17 nt, Human
gacuugcacagggauuc

SEQ ID NO: 3746087 - RNA, 13 nt, Human
gacuugcauuuuu

SEQ ID NO: 3746088 - RNA, 22 nt, Human
gacuugccuuccuaagccugug

SEQ ID NO: 3746089 - RNA, 19 nt, Human
gacuugcuguuuuguucug

SEQ ID NO: 3746090 - RNA, 20 nt, Human
gacuugcuguuuuguucugu

SEQ ID NO: 3746091 - RNA, 21 nt, Human
gacuuggaggguugguccucu

SEQ ID NO: 3746092 - RNA, 13 nt, Human
gacuuggccucuc

SEQ ID NO: 3746093 - RNA, 14 nt, Human
gacuuggccucucu

SEQ ID NO: 3746094 - RNA, 14 nt, Human
gacuugggcacccc

SEQ ID NO: 3746095 - RNA, 18 nt, Human
gacuugggcacccccagc

SEQ ID NO: 3746096 - RNA, 20 nt, Human
gacuugggcacccccagccu

SEQ ID NO: 3746097 - RNA, 23 nt, Human
gacuugggcacccccagccuggg

SEQ ID NO: 3746098 - RNA, 20 nt, Human
gacuuggggagauggaguuc

SEQ ID NO: 3746099 - RNA, 20 nt, Human
gacuugggucucauuuagaa

SEQ ID NO: 3746100 - RNA, 20 nt, Human
gacuugguugguaggguggg

SEQ ID NO: 3746101 - RNA, 18 nt, Human
gacuuguagcauauucuu

SEQ ID NO: 3746102 - RNA, 21 nt, Human
gacuuguauauucuauuuuac

SEQ ID NO: 3746103 - RNA, 18 nt, Human
gacuugucccgggacacc

SEQ ID NO: 3746104 - RNA, 17 nt, Human
gacuugugcacaggcag

SEQ ID NO: 3746105 - RNA, 19 nt, Human
gacuugugcacaggcagag

SEQ ID NO: 3746106 - RNA, 18 nt, Human
gacuugugucccaugauc

SEQ ID NO: 3746107 - RNA, 16 nt, Human
gacuugugucucugug

SEQ ID NO: 3746108 - RNA, 12 nt, Human
gacuugugucug

SEQ ID NO: 3746109 - RNA, 18 nt, Human
gacuuguuugucuuccau

SEQ ID NO: 3746110 - RNA, 22 nt, Human
gacuuguuugucuuccauucca

SEQ ID NO: 3746111 - RNA, 16 nt, Human
gacuuguuuuugcaca

SEQ ID NO: 3746112 - RNA, 18 nt, Human
gacuuguuuuugcacaug

SEQ ID NO: 3746113 - RNA, 14 nt, Human
gacuuuaacauaag

SEQ ID NO: 3746114 - RNA, 19 nt, Human
gacuuuagaaagcugacau

SEQ ID NO: 3746115 - RNA, 17 nt, Human
gacuuuagaaauaaaug

SEQ ID NO: 3746116 - RNA, 15 nt, Human
gacuuuagcuuucug

SEQ ID NO: 3746117 - RNA, 17 nt, Human
gacuuuagucugcaaaa

SEQ ID NO: 3746118 - RNA, 13 nt, Human
gacuuuauaagcc

SEQ ID NO: 3746119 - RNA, 21 nt, Human
gacuuucaaaauuaaaucugu

SEQ ID NO: 3746120 - RNA, 21 nt, Human
gacuuucaaaguggaugcaau

SEQ ID NO: 3746121 - RNA, 19 nt, Human
gacuuuccacccccucccu

SEQ ID NO: 3746122 - RNA, 12 nt, Human
gacuuuccccac

SEQ ID NO: 3746123 - RNA, 20 nt, Human
gacuuuccccaccagaugcu

SEQ ID NO: 3746124 - RNA, 23 nt, Human
gacuuucucagccucugaauaug

SEQ ID NO: 3746125 - RNA, 18 nt, Human
gacuuucucuaauaauaa

SEQ ID NO: 3746126 - RNA, 18 nt, Human
gacuuucuuuuuugauau

SEQ ID NO: 3746127 - RNA, 21 nt, Human
gacuuugcagccggcacaggg

SEQ ID NO: 3746128 - RNA, 19 nt, Human
gacuuuggcugcaugcgag

SEQ ID NO: 3746129 - RNA, 13 nt, Human
gacuuugugaucc

SEQ ID NO: 3746130 - RNA, 21 nt, Human
gacuuuuaaugucauuuguua

SEQ ID NO: 3746131 - RNA, 14 nt, Human
gacuuuucaaguau

SEQ ID NO: 3746132 - RNA, 14 nt, Human
gacuuuuccaaccc

SEQ ID NO: 3746133 - RNA, 19 nt, Human
gacuuuuccaacccucauc

SEQ ID NO: 3746134 - RNA, 17 nt, Human
gacuuuuccauguaucu

SEQ ID NO: 3746135 - RNA, 18 nt, Human
gacuuuucuguaauucag

SEQ ID NO: 3746136 - RNA, 21 nt, Human
gacuuuucuguccgagcuuug

SEQ ID NO: 3746137 - RNA, 21 nt, Human
gacuuuucuuuguggcuuccu

SEQ ID NO: 3746138 - RNA, 15 nt, Human
gacuuuuguacaucu

SEQ ID NO: 3746139 - RNA, 19 nt, Human
gacuuuuguacaucuggcu

SEQ ID NO: 3746140 - RNA, 23 nt, Human
gacuuuuguauagguagauguuc

SEQ ID NO: 3746141 - RNA, 12 nt, Human
gacuuuugugaa

SEQ ID NO: 3746142 - RNA, 22 nt, Human
gacuuuuuauggcacuaguauu

SEQ ID NO: 3746143 - RNA, 16 nt, Human
gacuuuuugcauuuaa

SEQ ID NO: 3746144 - RNA, 23 nt, Human
gacuuuuugguggauguaaauaa

SEQ ID NO: 3746145 - RNA, 10 nt, Human
gagaaaaaaa

SEQ ID NO: 3746146 - RNA, 11 nt, Human
gagaaaaacaa

SEQ ID NO: 3746147 - RNA, 14 nt, Human
gagaaaaagaaaug

SEQ ID NO: 3746148 - RNA, 21 nt, Human
gagaaaacgucuugcuuggga

SEQ ID NO: 3746149 - RNA, 16 nt, Human
gagaaaacuaaagaaa

SEQ ID NO: 3746150 - RNA, 16 nt, Human
gagaaaacuuauuuga

SEQ ID NO: 3746151 - RNA, 18 nt, Human
gagaaaacuuauuugagu

SEQ ID NO: 3746152 - RNA, 9 nt, Human
gagaaaaga

SEQ ID NO: 3746153 - RNA, 10 nt, Human
gagaaaagaa

SEQ ID NO: 3746154 - RNA, 11 nt, Human
gagaaaagaaa

SEQ ID NO: 3746155 - RNA, 13 nt, Human
gagaaaagaaaaa

SEQ ID NO: 3746156 - RNA, 20 nt, Human
gagaaaagaaaaaaaaagaa

SEQ ID NO: 3746157 - RNA, 13 nt, Human
gagaaaagacaug

SEQ ID NO: 3746158 - RNA, 13 nt, Human
gagaaaaggaaaa

SEQ ID NO: 3746159 - RNA, 12 nt, Human
gagaaaauaaaa

SEQ ID NO: 3746160 - RNA, 14 nt, Human
gagaaaauaaaaag

SEQ ID NO: 3746161 - RNA, 16 nt, Human
gagaaaauaaaaaguu

SEQ ID NO: 3746162 - RNA, 19 nt, Human
gagaaaauaaaaaguuaaa

SEQ ID NO: 3746163 - RNA, 16 nt, Human
gagaaaauauauguau

SEQ ID NO: 3746164 - RNA, 17 nt, Human
gagaaaauauauguauu

SEQ ID NO: 3746165 - RNA, 11 nt, Human
gagaaaaucau

SEQ ID NO: 3746166 - RNA, 16 nt, Human
gagaaaaucaucaaga

SEQ ID NO: 3746167 - RNA, 23 nt, Human
gagaaaaucaucaagaagggcug

SEQ ID NO: 3746168 - RNA, 13 nt, Human
gagaaaauugaau

SEQ ID NO: 3746169 - RNA, 15 nt, Human
gagaaaauugaauuu

SEQ ID NO: 3746170 - RNA, 19 nt, Human
gagaaacacugaaaagaag

SEQ ID NO: 3746171 - RNA, 23 nt, Human
ggagcugguuagaaaugcagaau

SEQ ID NO: 3746172 - RNA, 20 nt, Human
ggagcugugaguucucccug

SEQ ID NO: 3746173 - RNA, 21 nt, Human
ggagcuuagccaaugugggag

SEQ ID NO: 3746174 - RNA, 20 nt, Human
ggagcuucauggcagaaggc

SEQ ID NO: 3746175 - RNA, 19 nt, Human
ggagcuuccuguccuccca

SEQ ID NO: 3746176 - RNA, 20 nt, Human
ggagcuuucaaagaaggaau

SEQ ID NO: 3746177 - RNA, 20 nt, Human
ggagcuuugacucaggagcc

SEQ ID NO: 3746178 - RNA, 19 nt, Human
ggagcuuuguuuugggggu

SEQ ID NO: 3746179 - RNA, 23 nt, Human
ggagcuuuguuuugggggucagg

SEQ ID NO: 3746180 - RNA, 21 nt, Human
ggaggaaaaccaagccguggc

SEQ ID NO: 3746181 - RNA, 15 nt, Human
ggaggaaagggagga

SEQ ID NO: 3746182 - RNA, 19 nt, Human
ggaggaaccagagugcuga

SEQ ID NO: 3746183 - RNA, 12 nt, Human
ggaggaagagaa

SEQ ID NO: 3746184 - RNA, 17 nt, Human
ggaggaagcagaauaaa

SEQ ID NO: 3746185 - RNA, 19 nt, Human
ggaggaagcagaauaaagc

SEQ ID NO: 3746186 - RNA, 22 nt, Human
ggaggaagcagaauaaagcaau

SEQ ID NO: 3746187 - RNA, 11 nt, Human
ggaggaagccc

SEQ ID NO: 3746188 - RNA, 20 nt, Human
ggaggaaggaaacccagcuc

SEQ ID NO: 3746189 - RNA, 23 nt, Human
ggaggaaggaaacccagcucugg

SEQ ID NO: 3746190 - RNA, 13 nt, Human
ggaggaaggagag

SEQ ID NO: 3746191 - RNA, 11 nt, Human
ggaggaaggau

SEQ ID NO: 3746192 - RNA, 14 nt, Human
ggaggaaggcaaga

SEQ ID NO: 3746193 - RNA, 12 nt, Human
ggaggaauacug

SEQ ID NO: 3746194 - RNA, 19 nt, Human
ggaggaaucgaggaaccag

SEQ ID NO: 3746195 - RNA, 21 nt, Human
ggaggaaucgaggaaccagag

SEQ ID NO: 3746196 - RNA, 16 nt, Human
ggaggaaugcuggacu

SEQ ID NO: 3746197 - RNA, 21 nt, Human
ggaggaauuucugaguggcca

SEQ ID NO: 3746198 - RNA, 14 nt, Human
ggaggacaauucau

SEQ ID NO: 3746199 - RNA, 22 nt, Human
ggaggacaggcgggaggaggug

SEQ ID NO: 3746200 - RNA, 16 nt, Human
ggaggaccaaaaaaau

SEQ ID NO: 3746201 - RNA, 20 nt, Human
ggaggaccagggcagggcca

SEQ ID NO: 3746202 - RNA, 22 nt, Human
ggaggaccagggcuggggcagc

SEQ ID NO: 3746203 - RNA, 12 nt, Human
ggaggacccagg

SEQ ID NO: 3746204 - RNA, 16 nt, Human
ggaggacccaggacag

SEQ ID NO: 3746205 - RNA, 16 nt, Human
ggaggacccagggcuc

SEQ ID NO: 3746206 - RNA, 18 nt, Human
ggaggacccagggcucug

SEQ ID NO: 3746207 - RNA, 19 nt, Human
ggaggacccagggcucugu

SEQ ID NO: 3746208 - RNA, 17 nt, Human
ggaggaccugagccugc

SEQ ID NO: 3746209 - RNA, 19 nt, Human
ggaggaccugagccugccg

SEQ ID NO: 3746210 - RNA, 18 nt, Human
ggaggaccuggggcacag

SEQ ID NO: 3746211 - RNA, 19 nt, Human
ggaggaccuggggcacagu

SEQ ID NO: 3746212 - RNA, 20 nt, Human
ggaggacgcucucuggccuu

SEQ ID NO: 3746213 - RNA, 21 nt, Human
ggaggacgcucucuggccuuc

SEQ ID NO: 3746214 - RNA, 16 nt, Human
ggaggacuagaaccug

SEQ ID NO: 3746215 - RNA, 21 nt, Human
ggaggacuagaaccuggaggg

SEQ ID NO: 3746216 - RNA, 19 nt, Human
ggaggacuccaggcagcag

SEQ ID NO: 3746217 - RNA, 13 nt, Human
ggaggagagaaga

SEQ ID NO: 3746218 - RNA, 15 nt, Human
ggaggagcacaguuu

SEQ ID NO: 3746219 - RNA, 12 nt, Human
ggaggagcaggg

SEQ ID NO: 3746220 - RNA, 12 nt, Human
ggaggagcccag

SEQ ID NO: 3746221 - RNA, 15 nt, Human
ggaggagccuguccu

SEQ ID NO: 3746222 - RNA, 21 nt, Human
ggaggagccuguccugccugu

SEQ ID NO: 3746223 - RNA, 17 nt, Human
ggaggaggcagagaaga

SEQ ID NO: 3746224 - RNA, 12 nt, Human
ggaggagggaga

SEQ ID NO: 3746225 - RNA, 14 nt, Human
ggaggagggcaggc

SEQ ID NO: 3746226 - RNA, 20 nt, Human
ggaggagggcaggcaucggg

SEQ ID NO: 3746227 - RNA, 19 nt, Human
ggaggagggcggggggcac

SEQ ID NO: 3746228 - RNA, 19 nt, Human
ggaggagggucggugccuu

SEQ ID NO: 3746229 - RNA, 17 nt, Human
ggaggaggugccaacag

SEQ ID NO: 3746230 - RNA, 20 nt, Human
ggaggagguggcagcccugu

SEQ ID NO: 3746231 - RNA, 23 nt, Human
ggaggagguuuaggucaagaaga

SEQ ID NO: 3746232 - RNA, 15 nt, Human
ggaggagugagacag

SEQ ID NO: 3746233 - RNA, 16 nt, Human
ggaggaucacuggagc

SEQ ID NO: 3746234 - RNA, 17 nt, Human
ggaggaucacuggagcc

SEQ ID NO: 3746235 - RNA, 19 nt, Human
ggaggaucacuggagccca

SEQ ID NO: 3746236 - RNA, 21 nt, Human
ggaggaucacuggagcccagg

SEQ ID NO: 3746237 - RNA, 22 nt, Human
ggaggaucacuggagcccagga

SEQ ID NO: 3746238 - RNA, 17 nt, Human
ggaggaucucuugagcc

SEQ ID NO: 3746239 - RNA, 14 nt, Human
ggaggauggagaga

SEQ ID NO: 3746240 - RNA, 21 nt, Human
ggaggauggagagaggggaau

SEQ ID NO: 3746241 - RNA, 13 nt, Human
ggaggaugugaau

SEQ ID NO: 3746242 - RNA, 20 nt, Human
ggaggcaaagcuggcucacc

SEQ ID NO: 3746243 - RNA, 23 nt, Human
ggaggcaagagggguggagacug

SEQ ID NO: 3746244 - RNA, 20 nt, Human
ggaggcagagguuguaguga

SEQ ID NO: 3746245 - RNA, 12 nt, Human
ggaggcagaguu

SEQ ID NO: 3746246 - RNA, 14 nt, Human
ggaggcagcaggac

SEQ ID NO: 3746247 - RNA, 17 nt, Human
ggaggcagggaggcagc

SEQ ID NO: 3746248 - RNA, 18 nt, Human
ggaggcagggaggcagcc

SEQ ID NO: 3746249 - RNA, 18 nt, Human
ggaggcagggccuugccc

SEQ ID NO: 3746250 - RNA, 19 nt, Human
ggaggcagggccuugccca

SEQ ID NO: 3746251 - RNA, 17 nt, Human
ggaggcaggggcuuccu

SEQ ID NO: 3746252 - RNA, 21 nt, Human
ggaggcaggggcuuccuggug

SEQ ID NO: 3746253 - RNA, 14 nt, Human
ggaggcaucugcac

SEQ ID NO: 3746254 - RNA, 15 nt, Human
ggaggcauggcccug

SEQ ID NO: 3746255 - RNA, 23 nt, Human
ggaggccaagaguggccccaccu

SEQ ID NO: 3746256 - RNA, 12 nt, Human
ggaggccaccuc

SEQ ID NO: 3746257 - RNA, 18 nt, Human
ggaggccaccuccuaaaa

SEQ ID NO: 3746258 - RNA, 19 nt, Human
ggaggccaccucuccaagg

SEQ ID NO: 3746259 - RNA, 21 nt, Human
ggaggccaccucuccaagggc

SEQ ID NO: 3746260 - RNA, 13 nt, Human
ggaggccagccag

SEQ ID NO: 3746261 - RNA, 13 nt, Human
ggaggccagccuu

SEQ ID NO: 3746262 - RNA, 16 nt, Human
ggaggccagugagcca

SEQ ID NO: 3746263 - RNA, 17 nt, Human
ggaggccagugagccac

SEQ ID NO: 3746264 - RNA, 12 nt, Human
ggaggccaucug

SEQ ID NO: 3746265 - RNA, 13 nt, Human
ggaggccaucugg

SEQ ID NO: 3746266 - RNA, 21 nt, Human
ggaggcccagcgcggacaucc

SEQ ID NO: 3746267 - RNA, 14 nt, Human
ggaggcccaggcug

SEQ ID NO: 3746268 - RNA, 14 nt, Human
ggaggccccagggg

SEQ ID NO: 3746269 - RNA, 17 nt, Human
ggaggccccuggcccag

SEQ ID NO: 3746270 - RNA, 23 nt, Human
ggaggcccuccugugcuggggga

SEQ ID NO: 3746271 - RNA, 15 nt, Human
ggaggcccugugccc

SEQ ID NO: 3746272 - RNA, 13 nt, Human
ggaggccgaggcc

SEQ ID NO: 3746273 - RNA, 18 nt, Human
ggaggccgaggccaugug

SEQ ID NO: 3746274 - RNA, 13 nt, Human
ggaggccucuggg

SEQ ID NO: 3746275 - RNA, 20 nt, Human
ggaggccugcgacccugggg

SEQ ID NO: 3746276 - RNA, 18 nt, Human
ggaggccugggggcaggg

SEQ ID NO: 3746277 - RNA, 13 nt, Human
ggaggcgcccuug

SEQ ID NO: 3746278 - RNA, 22 nt, Human
ggaggcggacguuccagccggc

SEQ ID NO: 3746279 - RNA, 12 nt, Human
ggaggcggagag

SEQ ID NO: 3746280 - RNA, 20 nt, Human
ggaggcggagcuugcaguga

SEQ ID NO: 3746281 - RNA, 18 nt, Human
ggaggcgucucgggagag

SEQ ID NO: 3746282 - RNA, 16 nt, Human
ggaggcuccagagggc

SEQ ID NO: 3746283 - RNA, 22 nt, Human
ggaggcuccugccugagcuucc

SEQ ID NO: 3746284 - RNA, 21 nt, Human
ggaggcuccuguuagcuccuc

SEQ ID NO: 3746285 - RNA, 14 nt, Human
ggaggcugacuccu

SEQ ID NO: 3746286 - RNA, 18 nt, Human
ggaggcugagacaggaga

SEQ ID NO: 3746287 - RNA, 19 nt, Human
ggaggcugagacaggagaa

SEQ ID NO: 3746288 - RNA, 12 nt, Human
ggaggcugaggc

SEQ ID NO: 3746289 - RNA, 14 nt, Human
ggaggcugaggcag

SEQ ID NO: 3746290 - RNA, 15 nt, Human
ggaggcugaggcaga

SEQ ID NO: 3746291 - RNA, 12 nt, Human
ggaggcugcccc

SEQ ID NO: 3746292 - RNA, 21 nt, Human
ggaggcugcccccggcccccu

SEQ ID NO: 3746293 - RNA, 12 nt, Human
ggaggcuggagg

SEQ ID NO: 3746294 - RNA, 21 nt, Human
ggagggaagggagccaaggga

SEQ ID NO: 3746295 - RNA, 21 nt, Human
ggagggaaugaaccuggaggg

SEQ ID NO: 3746296 - RNA, 19 nt, Human
ggagggaauugaggucugc

SEQ ID NO: 3746297 - RNA, 21 nt, Human
ggagggacaaaggagccugug

SEQ ID NO: 3746298 - RNA, 13 nt, Human
ggagggacauggc

SEQ ID NO: 3746299 - RNA, 16 nt, Human
ggagggagcagacagg

SEQ ID NO: 3746300 - RNA, 13 nt, Human
ggagggagggcuc

SEQ ID NO: 3746301 - RNA, 22 nt, Human
ggagggauucugguuccagggu

SEQ ID NO: 3746302 - RNA, 20 nt, Human
ggagggauuggccgcuuggc

SEQ ID NO: 3746303 - RNA, 23 nt, Human
ggagggcaagggccaugcugaag

SEQ ID NO: 3746304 - RNA, 21 nt, Human
ggagggcacauuccuugccug

SEQ ID NO: 3746305 - RNA, 22 nt, Human
ggagggccugggccuggcuccc

SEQ ID NO: 3746306 - RNA, 17 nt, Human
ggagggcggcacagguc

SEQ ID NO: 3746307 - RNA, 20 nt, Human
ggagggcggcaggggccugg

SEQ ID NO: 3746308 - RNA, 16 nt, Human
ggagggcuagaaccug

SEQ ID NO: 3746309 - RNA, 22 nt, Human
ggagggcuagaaccuggagagc

SEQ ID NO: 3746310 - RNA, 19 nt, Human
ggagggcuagaacuggaga

SEQ ID NO: 3746311 - RNA, 22 nt, Human
ggagggcuagaaucuggagagc

SEQ ID NO: 3746312 - RNA, 15 nt, Human
gcuuuccaugggacc

SEQ ID NO: 3746313 - RNA, 16 nt, Human
gcuuuccauguugcug

SEQ ID NO: 3746314 - RNA, 19 nt, Human
gcuuuccauguugcugcca

SEQ ID NO: 3746315 - RNA, 21 nt, Human
gcuuuccauguugcugccaac

SEQ ID NO: 3746316 - RNA, 15 nt, Human
gcuuucccacuuccc

SEQ ID NO: 3746317 - RNA, 22 nt, Human
gcuuucccacuucccacccugc

SEQ ID NO: 3746318 - RNA, 22 nt, Human
gcuuuccccaugucucgacuca

SEQ ID NO: 3746319 - RNA, 16 nt, Human
gcuuuccccugugggg

SEQ ID NO: 3746320 - RNA, 15 nt, Human
gcuuucccugccucu

SEQ ID NO: 3746321 - RNA, 16 nt, Human
gcuuucccuuaucaaa

SEQ ID NO: 3746322 - RNA, 15 nt, Human
gcuuuccuaaaucag

SEQ ID NO: 3746323 - RNA, 17 nt, Human
gcuuuccuacuugcacu

SEQ ID NO: 3746324 - RNA, 11 nt, Human
gcuuuccugaa

SEQ ID NO: 3746325 - RNA, 11 nt, Human
gcuuuccugcc

SEQ ID NO: 3746326 - RNA, 14 nt, Human
gcuuuccugcccca

SEQ ID NO: 3746327 - RNA, 18 nt, Human
gcuuuccugugccaggug

SEQ ID NO: 3746328 - RNA, 17 nt, Human
gcuuuccuuuuuuaaaa

SEQ ID NO: 3746329 - RNA, 19 nt, Human
gcuuucguccacagcuucc

SEQ ID NO: 3746330 - RNA, 22 nt, Human
gcuuucuacccagcgagcccug

SEQ ID NO: 3746331 - RNA, 23 nt, Human
gcuuucuacccagcgagcccugg

SEQ ID NO: 3746332 - RNA, 18 nt, Human
gcuuucuaugcuguuugu

SEQ ID NO: 3746333 - RNA, 15 nt, Human
gcuuucucuucauau

SEQ ID NO: 3746334 - RNA, 16 nt, Human
gcuuucugaacagcug

SEQ ID NO: 3746335 - RNA, 20 nt, Human
gcuuucugaacagcuggugu

SEQ ID NO: 3746336 - RNA, 15 nt, Human
gcuuucugccaucua

SEQ ID NO: 3746337 - RNA, 13 nt, Human
gcuuucugcucag

SEQ ID NO: 3746338 - RNA, 19 nt, Human
gcuuucugcucagcuucuc

SEQ ID NO: 3746339 - RNA, 22 nt, Human
gcuuucuggaaaagaggaguuu

SEQ ID NO: 3746340 - RNA, 11 nt, Human
gcuuucugucu

SEQ ID NO: 3746341 - RNA, 12 nt, Human
gcuuucuguucc

SEQ ID NO: 3746342 - RNA, 20 nt, Human
gcuuucuugcucccuucagc

SEQ ID NO: 3746343 - RNA, 21 nt, Human
gcuuucuuucacaaaaaagaa

SEQ ID NO: 3746344 - RNA, 20 nt, Human
gcuuucuuucguuuguuugu

SEQ ID NO: 3746345 - RNA, 21 nt, Human
gcuuucuuucguuuguuuguu

SEQ ID NO: 3746346 - RNA, 22 nt, Human
gcuuucuuuuuaaagcuuuuga

SEQ ID NO: 3746347 - RNA, 21 nt, Human
gcuuugaaagccccagaaauc

SEQ ID NO: 3746348 - RNA, 17 nt, Human
gcuuugaaauugaaccu

SEQ ID NO: 3746349 - RNA, 19 nt, Human
gcuuugaaauugaaccuuu

SEQ ID NO: 3746350 - RNA, 17 nt, Human
gcuuugaauaaaugugu

SEQ ID NO: 3746351 - RNA, 24 nt, Human
gcuuugacucaggagccugugaca

SEQ ID NO: 3746352 - RNA, 21 nt, Human
gcuuugacuggaggguccauu

SEQ ID NO: 3746353 - RNA, 14 nt, Human
gcuuugagaagccu

SEQ ID NO: 3746354 - RNA, 19 nt, Human
gcuuugagguggaagaggg

SEQ ID NO: 3746355 - RNA, 17 nt, Human
gcuuugaucccuucuua

SEQ ID NO: 3746356 - RNA, 20 nt, Human
gcuuugauguuccuuccagu

SEQ ID NO: 3746357 - RNA, 21 nt, Human
gcuuugauuaguuuucuuguu

SEQ ID NO: 3746358 - RNA, 12 nt, Human
gcuuugcaguga

SEQ ID NO: 3746359 - RNA, 18 nt, Human
gcuuugcauguuccacua

SEQ ID NO: 3746360 - RNA, 20 nt, Human
gcuuugcauguuccacuaac

SEQ ID NO: 3746361 - RNA, 21 nt, Human
gcuuugcauuuuaaaaaugaa

SEQ ID NO: 3746362 - RNA, 14 nt, Human
gcuuugccagcugc

SEQ ID NO: 3746363 - RNA, 15 nt, Human
gcuuugccagcugcu

SEQ ID NO: 3746364 - RNA, 18 nt, Human
gcuuugccagcugcugcu

SEQ ID NO: 3746365 - RNA, 16 nt, Human
gcuuugccaugugcuu

SEQ ID NO: 3746366 - RNA, 20 nt, Human
gcuuugcccaacaccagccc

SEQ ID NO: 3746367 - RNA, 22 nt, Human
gcuuugcccaacaccagccccu

SEQ ID NO: 3746368 - RNA, 23 nt, Human
gcuuugcccugcugcccuccccc

SEQ ID NO: 3746369 - RNA, 13 nt, Human
gcuuugccuucca

SEQ ID NO: 3746370 - RNA, 21 nt, Human
gcuuugcucuugucccacgug

SEQ ID NO: 3746371 - RNA, 12 nt, Human
gcuuugcugcua

SEQ ID NO: 3746372 - RNA, 19 nt, Human
gcuuugcugcugaaggcuc

SEQ ID NO: 3746373 - RNA, 15 nt, Human
gcuuugcuguuucau

SEQ ID NO: 3746374 - RNA, 18 nt, Human
gcuuugcuuucugcucag

SEQ ID NO: 3746375 - RNA, 14 nt, Human
gcuuugcuuugucu

SEQ ID NO: 3746376 - RNA, 16 nt, Human
gcuuugcuuugucugg

SEQ ID NO: 3746377 - RNA, 21 nt, Human
gcuuuggaaguuuagcucuga

SEQ ID NO: 3746378 - RNA, 23 nt, Human
gcuuuggaaguuuagcucugaga

SEQ ID NO: 3746379 - RNA, 19 nt, Human
gcuuuggacccaaggaaaa

SEQ ID NO: 3746380 - RNA, 22 nt, Human
gcuuugggaauguuuuuagcug

SEQ ID NO: 3746381 - RNA, 15 nt, Human
gcuuugggcugcccu

SEQ ID NO: 3746382 - RNA, 16 nt, Human
gcuuugggcugcccug

SEQ ID NO: 3746383 - RNA, 19 nt, Human
gcuuugggcugcccuggug

SEQ ID NO: 3746384 - RNA, 15 nt, Human
gcuuugggcuugggc

SEQ ID NO: 3746385 - RNA, 17 nt, Human
gcuuuggugagaaccug

SEQ ID NO: 3746386 - RNA, 15 nt, Human
gcuuugguuuauauu

SEQ ID NO: 3746387 - RNA, 16 nt, Human
gcuuuguaggugucuc

SEQ ID NO: 3746388 - RNA, 14 nt, Human
gcuuuguauagaac

SEQ ID NO: 3746389 - RNA, 12 nt, Human
gcuuugucccac

SEQ ID NO: 3746390 - RNA, 16 nt, Human
gcuuuguccccugcuu

SEQ ID NO: 3746391 - RNA, 21 nt, Human
gcuuuguccccugcuucagau

SEQ ID NO: 3746392 - RNA, 19 nt, Human
gcuuugucguauuuggcac

SEQ ID NO: 3746393 - RNA, 18 nt, Human
gcuuugucuacuucaaaa

SEQ ID NO: 3746394 - RNA, 13 nt, Human
gcuuugucuccuc

SEQ ID NO: 3746395 - RNA, 18 nt, Human
gcuuugucuggaagaaag

SEQ ID NO: 3746396 - RNA, 15 nt, Human
gcuuugugugauuga

SEQ ID NO: 3746397 - RNA, 21 nt, Human
gcuuuguguuugguuuacauu

SEQ ID NO: 3746398 - RNA, 22 nt, Human
gcuuuguguuugguuuacauuu

SEQ ID NO: 3746399 - RNA, 15 nt, Human
gcuuuguuaaaaaaa

SEQ ID NO: 3746400 - RNA, 16 nt, Human
gcuuuguugcacugaa

SEQ ID NO: 3746401 - RNA, 19 nt, Human
gcuuuguugugugccucua

SEQ ID NO: 3746402 - RNA, 15 nt, Human
gcuuuguuuguucuu

SEQ ID NO: 3746403 - RNA, 14 nt, Human
gcuuuuaaaagauu

SEQ ID NO: 3746404 - RNA, 14 nt, Human
gcuuuuaaaauuuu

SEQ ID NO: 3746405 - RNA, 20 nt, Human
gcuuuuaccaugccccugag

SEQ ID NO: 3746406 - RNA, 19 nt, Human
gcuuuuaguuuuucugucc

SEQ ID NO: 3746407 - RNA, 16 nt, Human
gcuuuuauagaggcua

SEQ ID NO: 3746408 - RNA, 19 nt, Human
gcuuuuauagaggcuagcu

SEQ ID NO: 3746409 - RNA, 22 nt, Human
gcuuuuaucucagauguuaaaa

SEQ ID NO: 3746410 - RNA, 21 nt, Human
gcuuuuaugugaaacauguuu

SEQ ID NO: 3746411 - RNA, 15 nt, Human
gcuuuuauuaaugca

SEQ ID NO: 3746412 - RNA, 18 nt, Human
gcuuuuauuaaugcacuu

SEQ ID NO: 3746413 - RNA, 16 nt, Human
gcuuuuauuuugaaaa

SEQ ID NO: 3746414 - RNA, 13 nt, Human
gcuuuucaaacaa

SEQ ID NO: 3746415 - RNA, 18 nt, Human
gcuuuucaaacaagaaug

SEQ ID NO: 3746416 - RNA, 17 nt, Human
gcuuuucacugcugcaa

SEQ ID NO: 3746417 - RNA, 23 nt, Human
gcuuuucacugcuggcugccuua

SEQ ID NO: 3746418 - RNA, 18 nt, Human
gcuuuucaugcaaacucu

SEQ ID NO: 3746419 - RNA, 22 nt, Human
gcuuuuccccggucccuugaga

SEQ ID NO: 3746420 - RNA, 19 nt, Human
gcuuuucccuaagccaagg

SEQ ID NO: 3746421 - RNA, 14 nt, Human
gcuuuucccucuuu

SEQ ID NO: 3746422 - RNA, 15 nt, Human
gcuuuuccugggaca

SEQ ID NO: 3746423 - RNA, 15 nt, Human
gcuuuuccuuggcau

SEQ ID NO: 3746424 - RNA, 21 nt, Human
gcuuuuccuuggcauuccgca

SEQ ID NO: 3746425 - RNA, 12 nt, Human
gcuuuucugauc

SEQ ID NO: 3746426 - RNA, 16 nt, Human
gcuuuucugcccuggc

SEQ ID NO: 3746427 - RNA, 12 nt, Human
gcuuuucuguuu

SEQ ID NO: 3746428 - RNA, 13 nt, Human
gcuuuugcauauu

SEQ ID NO: 3746429 - RNA, 20 nt, Human
gcuuuugcccauuuugaauc

SEQ ID NO: 3746430 - RNA, 14 nt, Human
gcuuuuggucauca

SEQ ID NO: 3746431 - RNA, 18 nt, Human
gcuuuuguuccaauguca

SEQ ID NO: 3746432 - RNA, 21 nt, Human
gcuuuuguuuccuuuuucaga

SEQ ID NO: 3746433 - RNA, 21 nt, Human
gcuuuuuauuucugcauaugu

SEQ ID NO: 3746434 - RNA, 13 nt, Human
gcuuuuucacagu

SEQ ID NO: 3746435 - RNA, 16 nt, Human
gcuuuuuccuccugga

SEQ ID NO: 3746436 - RNA, 18 nt, Human
gcuuuuucugacuccagu

SEQ ID NO: 3746437 - RNA, 16 nt, Human
gcuuuuugaaaugaaa

SEQ ID NO: 3746438 - RNA, 20 nt, Human
gcuuuuugagguggcacuuu

SEQ ID NO: 3746439 - RNA, 12 nt, Human
gcuuuuuggaau

SEQ ID NO: 3746440 - RNA, 18 nt, Human
gcuuuuugguguauagaa

SEQ ID NO: 3746441 - RNA, 16 nt, Human
gcuuuuuguguuuuuu

SEQ ID NO: 3746442 - RNA, 18 nt, Human
gcuuuuuuaucaugugaa

SEQ ID NO: 3746443 - RNA, 21 nt, Human
gcuuuuuuugaaacuuugaga

SEQ ID NO: 3746444 - RNA, 17 nt, Human
gcuuuuuuuguguguau

SEQ ID NO: 3746445 - RNA, 15 nt, Human
gcuuuuuuuuccuuc

SEQ ID NO: 3746446 - RNA, 16 nt, Human
gcuuuuuuuuuuccag

SEQ ID NO: 3746447 - RNA, 19 nt, Human
ggaaaaaaaucaucuauuu

SEQ ID NO: 3746448 - RNA, 21 nt, Human
ggaaaaaaaucaucuauuuug

SEQ ID NO: 3746449 - RNA, 19 nt, Human
ggaaaaaaaucguccaggg

SEQ ID NO: 3746450 - RNA, 16 nt, Human
ggaaaaaauaacaaug

SEQ ID NO: 3746451 - RNA, 23 nt, Human
ggaaaaaauugcuuuugagagaa

SEQ ID NO: 3746452 - RNA, 19 nt, Human
ggaaaaacuuuggaaccag

SEQ ID NO: 3746453 - RNA, 13 nt, Human
ggaaaaagaaaau

SEQ ID NO: 3746454 - RNA, 16 nt, Human
ggaaaaagcacaagaa

SEQ ID NO: 3746455 - RNA, 23 nt, Human
ggaaaaagcuccaugugccucuu

SEQ ID NO: 3746456 - RNA, 12 nt, Human
ggaaaaaggaca

SEQ ID NO: 3746457 - RNA, 13 nt, Human
ggaaaaauagccu

SEQ ID NO: 3746458 - RNA, 12 nt, Human
ggaaaaauaugu

SEQ ID NO: 3746459 - RNA, 16 nt, Human
ggaaaaauaugugaag

SEQ ID NO: 3746460 - RNA, 17 nt, Human
ggaaaaaugagagaagg

SEQ ID NO: 3746461 - RNA, 19 nt, Human
ggaaaaaugccaucaaaug

SEQ ID NO: 3746462 - RNA, 18 nt, Human
cuuucaauacagauauau

SEQ ID NO: 3746463 - RNA, 19 nt, Human
cuuucaauacagauauauu

SEQ ID NO: 3746464 - RNA, 20 nt, Human
cuuucaauacagauauauuu

SEQ ID NO: 3746465 - RNA, 14 nt, Human
cuuucaauaggaaa

SEQ ID NO: 3746466 - RNA, 20 nt, Human
cuuucaauaggaaaaacuga

SEQ ID NO: 3746467 - RNA, 13 nt, Human
cuuucaauucugu

SEQ ID NO: 3746468 - RNA, 14 nt, Human
cuuucacaaaaaag

SEQ ID NO: 3746469 - RNA, 16 nt, Human
cuuucacaaaaaagaa

SEQ ID NO: 3746470 - RNA, 20 nt, Human
cuuucacaacauuugcagau

SEQ ID NO: 3746471 - RNA, 19 nt, Human
cuuucacaguaccaucuga

SEQ ID NO: 3746472 - RNA, 20 nt, Human
cuuucacccacagaaagaga

SEQ ID NO: 3746473 - RNA, 16 nt, Human
cuuucaccccagggcc

SEQ ID NO: 3746474 - RNA, 14 nt, Human
cuuucacccuuuuc

SEQ ID NO: 3746475 - RNA, 16 nt, Human
cuuucacuucuuuccc

SEQ ID NO: 3746476 - RNA, 20 nt, Human
cuuucacuucuuucccuucc

SEQ ID NO: 3746477 - RNA, 14 nt, Human
cuuucagaaaacag

SEQ ID NO: 3746478 - RNA, 20 nt, Human
cuuucagaaaacgggaagcg

SEQ ID NO: 3746479 - RNA, 14 nt, Human
cuuucagaauaugu

SEQ ID NO: 3746480 - RNA, 16 nt, Human
cuuucagacuugccau

SEQ ID NO: 3746481 - RNA, 18 nt, Human
cuuucagacuugccaugu

SEQ ID NO: 3746482 - RNA, 19 nt, Human
cuuucagacuugccaugug

SEQ ID NO: 3746483 - RNA, 13 nt, Human
cuuucagagccuc

SEQ ID NO: 3746484 - RNA, 14 nt, Human
cuuucagauacugg

SEQ ID NO: 3746485 - RNA, 12 nt, Human
cuuucagauguc

SEQ ID NO: 3746486 - RNA, 22 nt, Human
cuuucagaugucuucugccugu

SEQ ID NO: 3746487 - RNA, 23 nt, Human
cuuucagaugucuucugccuguu

SEQ ID NO: 3746488 - RNA, 20 nt, Human
cuuucagcaagacuucucuu

SEQ ID NO: 3746489 - RNA, 17 nt, Human
cuuucagcagacugauc

SEQ ID NO: 3746490 - RNA, 13 nt, Human
cuuucagcuccug

SEQ ID NO: 3746491 - RNA, 15 nt, Human
cuuucagcuccugac

SEQ ID NO: 3746492 - RNA, 22 nt, Human
cuuucagcugucuuuuggagga

SEQ ID NO: 3746493 - RNA, 21 nt, Human
cuuucaggaucuauuuuugga

SEQ ID NO: 3746494 - RNA, 20 nt, Human
cuuucagggaauuucaggaa

SEQ ID NO: 3746495 - RNA, 16 nt, Human
cuuucagggccauggu

SEQ ID NO: 3746496 - RNA, 17 nt, Human
cuuucagggccaugguu

SEQ ID NO: 3746497 - RNA, 21 nt, Human
cuuucagggggguugugaggc

SEQ ID NO: 3746498 - RNA, 14 nt, Human
cuuucaguacuuuu

SEQ ID NO: 3746499 - RNA, 15 nt, Human
cuuucagugaaagca

SEQ ID NO: 3746500 - RNA, 14 nt, Human
cuuucaguuagccu

SEQ ID NO: 3746501 - RNA, 13 nt, Human
cuuucauauaguu

SEQ ID NO: 3746502 - RNA, 16 nt, Human
cuuucauauuuuaaac

SEQ ID NO: 3746503 - RNA, 21 nt, Human
cuuucaucaaucauuguacag

SEQ ID NO: 3746504 - RNA, 19 nt, Human
cuuucaucacacugggugg

SEQ ID NO: 3746505 - RNA, 17 nt, Human
cuuucauccacuagugc

SEQ ID NO: 3746506 - RNA, 18 nt, Human
cuuucauccugacucugc

SEQ ID NO: 3746507 - RNA, 16 nt, Human
cuuucauccuugacua

SEQ ID NO: 3746508 - RNA, 22 nt, Human
cuuucaugaguuuuucccagcu

SEQ ID NO: 3746509 - RNA, 21 nt, Human
cuuucauguaaacugugcacc

SEQ ID NO: 3746510 - RNA, 22 nt, Human
cuuucaugugugccaaggcuga

SEQ ID NO: 3746511 - RNA, 18 nt, Human
cuuucauugccagugucu

SEQ ID NO: 3746512 - RNA, 18 nt, Human
cuuucauuucuugaggua

SEQ ID NO: 3746513 - RNA, 19 nt, Human
cuuucauuuucucucaggu

SEQ ID NO: 3746514 - RNA, 14 nt, Human
cuuucauuuugcuu

SEQ ID NO: 3746515 - RNA, 16 nt, Human
cuuucauuuugcuuua

SEQ ID NO: 3746516 - RNA, 17 nt, Human
cuuucauuuugcuuuaa

SEQ ID NO: 3746517 - RNA, 19 nt, Human
cuuucauuuugcuuuaauu

SEQ ID NO: 3746518 - RNA, 15 nt, Human
cuuucauuuuugaua

SEQ ID NO: 3746519 - RNA, 15 nt, Human
cuuucauuuuuuucc

SEQ ID NO: 3746520 - RNA, 22 nt, Human
cuuuccaaaccuuaucuccaca

SEQ ID NO: 3746521 - RNA, 20 nt, Human
cuuuccaaagccaaugugaa

SEQ ID NO: 3746522 - RNA, 21 nt, Human
cuuuccaaaggccauggagag

SEQ ID NO: 3746523 - RNA, 16 nt, Human
cuuuccaaaugcccag

SEQ ID NO: 3746524 - RNA, 15 nt, Human
cuuuccaaggcuucu

SEQ ID NO: 3746525 - RNA, 17 nt, Human
cuuuccaauucuccuuu

SEQ ID NO: 3746526 - RNA, 22 nt, Human
cuuuccaccacagccagcaccu

SEQ ID NO: 3746527 - RNA, 17 nt, Human
cuuuccacccccucccu

SEQ ID NO: 3746528 - RNA, 22 nt, Human
cuuuccacccccucccuggccu

SEQ ID NO: 3746529 - RNA, 21 nt, Human
cuuuccacuccuccuagccac

SEQ ID NO: 3746530 - RNA, 13 nt, Human
cuuuccagcucac

SEQ ID NO: 3746531 - RNA, 23 nt, Human
cuuuccauauccauagugacuuu

SEQ ID NO: 3746532 - RNA, 15 nt, Human
cuuuccauccauggc

SEQ ID NO: 3746533 - RNA, 20 nt, Human
cuuuccauccauggccagca

SEQ ID NO: 3746534 - RNA, 21 nt, Human
cuuuccauccauggccagcag

SEQ ID NO: 3746535 - RNA, 14 nt, Human
cuuuccauguugcu

SEQ ID NO: 3746536 - RNA, 17 nt, Human
cuuuccauguugcugcc

SEQ ID NO: 3746537 - RNA, 14 nt, Human
cuuuccauuucucu

SEQ ID NO: 3746538 - RNA, 17 nt, Human
cuuucccaacaccucuu

SEQ ID NO: 3746539 - RNA, 11 nt, Human
cuuucccaagc

SEQ ID NO: 3746540 - RNA, 18 nt, Human
cuuucccacccagccugg

SEQ ID NO: 3746541 - RNA, 19 nt, Human
cuuucccacccagccuggg

SEQ ID NO: 3746542 - RNA, 21 nt, Human
cuuucccaccccaaccugcuc

SEQ ID NO: 3746543 - RNA, 22 nt, Human
cuuucccaccccaaccugcucu

SEQ ID NO: 3746544 - RNA, 22 nt, Human
cuuucccaccccacgccuuauc

SEQ ID NO: 3746545 - RNA, 16 nt, Human
cuuucccacccuguuc

SEQ ID NO: 3746546 - RNA, 16 nt, Human
cuuucccaucuuccaa

SEQ ID NO: 3746547 - RNA, 19 nt, Human
cuuuccccaccagaugcug

SEQ ID NO: 3746548 - RNA, 20 nt, Human
cuuuccccagcaucacuccc

SEQ ID NO: 3746549 - RNA, 13 nt, Human
cuuuccccagccc

SEQ ID NO: 3746550 - RNA, 17 nt, Human
cuuuccccagcccaggg

SEQ ID NO: 3746551 - RNA, 19 nt, Human
cuuuccccauuccuaccca

SEQ ID NO: 3746552 - RNA, 17 nt, Human
cuuuccccuguggggau

SEQ ID NO: 3746553 - RNA, 13 nt, Human
cuuucccuacccu

SEQ ID NO: 3746554 - RNA, 16 nt, Human
cuuucccuacccucua

SEQ ID NO: 3746555 - RNA, 11 nt, Human
cuuucccuccc

SEQ ID NO: 3746556 - RNA, 14 nt, Human
cuuucccuccuugg

SEQ ID NO: 3746557 - RNA, 20 nt, Human
cuuucccugaacugggaccu

SEQ ID NO: 3746558 - RNA, 13 nt, Human
cuuucccugccuc

SEQ ID NO: 3746559 - RNA, 13 nt, Human
cuuucccuggucc

SEQ ID NO: 3746560 - RNA, 13 nt, Human
cuuucccuuccag

SEQ ID NO: 3746561 - RNA, 12 nt, Human
cuuucccuuccu

SEQ ID NO: 3746562 - RNA, 17 nt, Human
cuuucccuuccucuucg

SEQ ID NO: 3746563 - RNA, 13 nt, Human
cuuucccuugcuu

SEQ ID NO: 3746564 - RNA, 22 nt, Human
cuuucccuugcuuuucccucuu

SEQ ID NO: 3746565 - RNA, 17 nt, Human
cuuucccuuggugcccu

SEQ ID NO: 3746566 - RNA, 20 nt, Human
cuuucccuuuuccauuugaa

SEQ ID NO: 3746567 - RNA, 22 nt, Human
cuuuccgucaacguuguacugu

SEQ ID NO: 3746568 - RNA, 17 nt, Human
cuuuccguggcacugca

SEQ ID NO: 3746569 - RNA, 20 nt, Human
cuuuccuaagaccugggguu

SEQ ID NO: 3746570 - RNA, 21 nt, Human
cuuuccuagauggcagucacu

SEQ ID NO: 3746571 - RNA, 19 nt, Human
cuuuccucaaauguugaca

SEQ ID NO: 3746572 - RNA, 18 nt, Human
cuuuccucauuaaauuac

SEQ ID NO: 3746573 - RNA, 22 nt, Human
cuuuccuccucaggcacacagc

SEQ ID NO: 3746574 - RNA, 17 nt, Human
cuuuccuccuuuaucac

SEQ ID NO: 3746575 - RNA, 13 nt, Human
cuuuccuccuuuc

SEQ ID NO: 3746576 - RNA, 14 nt, Human
cuuuccuccuuucc

SEQ ID NO: 3746577 - RNA, 16 nt, Human
cuuuccucucuauauu

SEQ ID NO: 3746578 - RNA, 18 nt, Human
cuuuccucucuauauuuc

SEQ ID NO: 3746579 - RNA, 21 nt, Human
cuuuccugaggcugggcuccc

SEQ ID NO: 3746580 - RNA, 20 nt, Human
cuuuccugagucccaucccu

SEQ ID NO: 3746581 - RNA, 21 nt, Human
cuuuccugcaacucaaggacu

SEQ ID NO: 3746582 - RNA, 21 nt, Human
cuuuccuggagagucucacuc

SEQ ID NO: 3746583 - RNA, 9 nt, Human
cuuuccugu

SEQ ID NO: 3746584 - RNA, 23 nt, Human
cuuuccuguauuuguucccaaga

SEQ ID NO: 3746585 - RNA, 13 nt, Human
cuuuccugugcca

SEQ ID NO: 3746586 - RNA, 14 nt, Human
cuuuccugugccag

SEQ ID NO: 3746587 - RNA, 13 nt, Human
cuuuccuguucag

SEQ ID NO: 3746588 - RNA, 14 nt, Human
cuuuccuguucagc

SEQ ID NO: 3746589 - RNA, 17 nt, Human
cuuuccuguucagcauu

SEQ ID NO: 3746590 - RNA, 19 nt, Human
cuuuccuguucagcauucu

SEQ ID NO: 3746591 - RNA, 17 nt, Human
cuuuccuguuucucagu

SEQ ID NO: 3746592 - RNA, 14 nt, Human
cuuuccuucuugcc

SEQ ID NO: 3746593 - RNA, 17 nt, Human
cuuuccuuggcucccau

SEQ ID NO: 3746594 - RNA, 15 nt, Human
cuuuccuuggcuuua

SEQ ID NO: 3746595 - RNA, 21 nt, Human
cuuuccuuuucgccuuuccuc

SEQ ID NO: 3746596 - RNA, 20 nt, Human
cuuucgacuugcauuuuugc

SEQ ID NO: 3746597 - RNA, 21 nt, Human
cuuucgacuugcauuuuugca

SEQ ID NO: 3746598 - RNA, 19 nt, Human
cuuucgauacccaggacca

SEQ ID NO: 3746599 - RNA, 18 nt, Human
cuuucguccacagcuucc

SEQ ID NO: 3746600 - RNA, 22 nt, Human
cuuucguguaaauuauguaaug

SEQ ID NO: 3746601 - RNA, 14 nt, Human
cuuucuaagaaauc

SEQ ID NO: 3746602 - RNA, 14 nt, Human
cuuucuaaugcuga

SEQ ID NO: 3746603 - RNA, 17 nt, Human
cuuucuaaugugugaau

SEQ ID NO: 3746604 - RNA, 20 nt, Human
cuuucuacaaugugaacuuu

SEQ ID NO: 3746605 - RNA, 16 nt, Human
cuuucuacucauuuua

SEQ ID NO: 3746606 - RNA, 18 nt, Human
cuuucuagaaagaauaaa

SEQ ID NO: 3746607 - RNA, 23 nt, Human
cuuucuagaaguuucccuuccuc

SEQ ID NO: 3746608 - RNA, 16 nt, Human
cuuucuagccuggcua

SEQ ID NO: 3746609 - RNA, 23 nt, Human
cuuucuagcuguugagcuguuuu

SEQ ID NO: 3746610 - RNA, 20 nt, Human
cuuucuaguccuauucuauu

SEQ ID NO: 3746611 - RNA, 23 nt, Human
ggaaaaauggauccccagugaaa

SEQ ID NO: 3746612 - RNA, 12 nt, Human
ggaaaaauguuu

SEQ ID NO: 3746613 - RNA, 14 nt, Human
ggaaaaauguuugu

SEQ ID NO: 3746614 - RNA, 17 nt, Human
ggaaaacacccagggaa

SEQ ID NO: 3746615 - RNA, 15 nt, Human
ggaaaacagaacacu

SEQ ID NO: 3746616 - RNA, 15 nt, Human
ggaaaacauuccauc

SEQ ID NO: 3746617 - RNA, 21 nt, Human
ggaaaaccaagccguggcuuc

SEQ ID NO: 3746618 - RNA, 15 nt, Human
ggaaaacgauuuaau

SEQ ID NO: 3746619 - RNA, 14 nt, Human
ggaaaacgcucucu

SEQ ID NO: 3746620 - RNA, 22 nt, Human
ggaaaacuaccuguauuuaaaa

SEQ ID NO: 3746621 - RNA, 23 nt, Human
ggaaaacuuauuuuauauuuucc

SEQ ID NO: 3746622 - RNA, 22 nt, Human
ggaaaacuugcagcuaaggagg

SEQ ID NO: 3746623 - RNA, 22 nt, Human
ggaaaagaaaaaaaaaagaaga

SEQ ID NO: 3746624 - RNA, 10 nt, Human
ggaaaagaau

SEQ ID NO: 3746625 - RNA, 18 nt, Human
ggaaaagaauacagaaag

SEQ ID NO: 3746626 - RNA, 13 nt, Human
ggaaaagacacau

SEQ ID NO: 3746627 - RNA, 17 nt, Human
ggaaaagacacauuuuu

SEQ ID NO: 3746628 - RNA, 15 nt, Human
ggaaaagacuaagau

SEQ ID NO: 3746629 - RNA, 22 nt, Human
ggaaaagagcgcaucaggccug

SEQ ID NO: 3746630 - RNA, 22 nt, Human
ggaaaagauaaagaccagaaau

SEQ ID NO: 3746631 - RNA, 18 nt, Human
ggaaaagcagcucucccc

SEQ ID NO: 3746632 - RNA, 20 nt, Human
ggaaaagccaagaggcugca

SEQ ID NO: 3746633 - RNA, 19 nt, Human
ggaaaagcggacaucagcu

SEQ ID NO: 3746634 - RNA, 14 nt, Human
ggaaaagcugcuga

SEQ ID NO: 3746635 - RNA, 20 nt, Human
ggaaaagcugcugacagugu

SEQ ID NO: 3746636 - RNA, 11 nt, Human
ggaaaaggaag

SEQ ID NO: 3746637 - RNA, 12 nt, Human
ggaaaaggccug

SEQ ID NO: 3746638 - RNA, 17 nt, Human
ggaaaaggccuggggug

SEQ ID NO: 3746639 - RNA, 12 nt, Human
ggaaaagggaag

SEQ ID NO: 3746640 - RNA, 21 nt, Human
ggaaaagggucuugggaaaua

SEQ ID NO: 3746641 - RNA, 18 nt, Human
ggaaaagguuuuauuuug

SEQ ID NO: 3746642 - RNA, 15 nt, Human
ggaaaaguacauuua

SEQ ID NO: 3746643 - RNA, 14 nt, Human
ggaaaaguuuaaua

SEQ ID NO: 3746644 - RNA, 13 nt, Human
ggaaaauacccca

SEQ ID NO: 3746645 - RNA, 14 nt, Human
ggaaaaugaauaau

SEQ ID NO: 3746646 - RNA, 20 nt, Human
ggaaaaugcagcagggaugc

SEQ ID NO: 3746647 - RNA, 15 nt, Human
ggaaaaugccaaucu

SEQ ID NO: 3746648 - RNA, 19 nt, Human
ggaaaaugccaugaauuac

SEQ ID NO: 3746649 - RNA, 22 nt, Human
ggaaacaaagcuuagcaggaga

SEQ ID NO: 3746650 - RNA, 19 nt, Human
ggaaacacuaaauguuaaa

SEQ ID NO: 3746651 - RNA, 23 nt, Human
ggaaacacuaaauguuaaagaug

SEQ ID NO: 3746652 - RNA, 17 nt, Human
ggaaacacuccuugcau

SEQ ID NO: 3746653 - RNA, 16 nt, Human
ggaaacagaggaccag

SEQ ID NO: 3746654 - RNA, 17 nt, Human
ggaaacagaggaccagc

SEQ ID NO: 3746655 - RNA, 17 nt, Human
ggaaacagaugaaaagc

SEQ ID NO: 3746656 - RNA, 17 nt, Human
ggaaacaguugcaugua

SEQ ID NO: 3746657 - RNA, 15 nt, Human
ggaaaccacagcugc

SEQ ID NO: 3746658 - RNA, 21 nt, Human
ggaaaccacagcugcuggaga

SEQ ID NO: 3746659 - RNA, 15 nt, Human
ggaaacccagcucug

SEQ ID NO: 3746660 - RNA, 14 nt, Human
ggaaacccgagggu

SEQ ID NO: 3746661 - RNA, 15 nt, Human
ggaaaccuuggugua

SEQ ID NO: 3746662 - RNA, 23 nt, Human
ggaaacgcuaccucucugucccu

SEQ ID NO: 3746663 - RNA, 15 nt, Human
ggaaacgugcccucu

SEQ ID NO: 3746664 - RNA, 16 nt, Human
ggaaacuaagauucuu

SEQ ID NO: 3746665 - RNA, 17 nt, Human
ggaaacuaauaaaauau

SEQ ID NO: 3746666 - RNA, 18 nt, Human
ggaaacucacacuccccu

SEQ ID NO: 3746667 - RNA, 16 nt, Human
ggaaacuccugugacc

SEQ ID NO: 3746668 - RNA, 20 nt, Human
ggaaacucuugcuauugaau

SEQ ID NO: 3746669 - RNA, 17 nt, Human
ggaaacuggccauggcc

SEQ ID NO: 3746670 - RNA, 18 nt, Human
ggaaacuguugccagaga

SEQ ID NO: 3746671 - RNA, 17 nt, Human
ggaaacuugucacuugc

SEQ ID NO: 3746672 - RNA, 15 nt, Human
ggaaagaaaguugca

SEQ ID NO: 3746673 - RNA, 21 nt, Human
ggaaagaagaaggugggagga

SEQ ID NO: 3746674 - RNA, 22 nt, Human
ggaaagacuggacucuaaaguc

SEQ ID NO: 3746675 - RNA, 17 nt, Human
ggaaagaguaggaagac

SEQ ID NO: 3746676 - RNA, 23 nt, Human
ggaaagaugguguggguguccug

SEQ ID NO: 3746677 - RNA, 16 nt, Human
ggaaagcaagaaucag

SEQ ID NO: 3746678 - RNA, 21 nt, Human
ggaaagcaagaaucagagaag

SEQ ID NO: 3746679 - RNA, 14 nt, Human
ggaaagcacagagg

SEQ ID NO: 3746680 - RNA, 19 nt, Human
ggaaagcagccuggccaac

SEQ ID NO: 3746681 - RNA, 15 nt, Human
ggaaagcagcucaaa

SEQ ID NO: 3746682 - RNA, 19 nt, Human
ggaaagcagcucaaaggca

SEQ ID NO: 3746683 - RNA, 22 nt, Human
ggaaagcagcucaaaggcacag

SEQ ID NO: 3746684 - RNA, 21 nt, Human
ggaaagcagguggcaucucua

SEQ ID NO: 3746685 - RNA, 16 nt, Human
ggaaagcccugugcuc

SEQ ID NO: 3746686 - RNA, 13 nt, Human
ggaaagccucugc

SEQ ID NO: 3746687 - RNA, 16 nt, Human
ggaaagccucugcugc

SEQ ID NO: 3746688 - RNA, 21 nt, Human
ggaaagcuuuucuauuuuaau

SEQ ID NO: 3746689 - RNA, 24 nt, Human
ggaaaggaagugggacuggcacua

SEQ ID NO: 3746690 - RNA, 17 nt, Human
ggaaaggaaugcaaaga

SEQ ID NO: 3746691 - RNA, 15 nt, Human
ggaaaggagaggaaa

SEQ ID NO: 3746692 - RNA, 21 nt, Human
ggaaaggaguagaaaaagcag

SEQ ID NO: 3746693 - RNA, 20 nt, Human
ggaaaggcaaaugcccaagg

SEQ ID NO: 3746694 - RNA, 20 nt, Human
ggaaaggccagcuggcagca

SEQ ID NO: 3746695 - RNA, 15 nt, Human
ggaaaggcucugaaa

SEQ ID NO: 3746696 - RNA, 23 nt, Human
ggaaagggauuuucagcccucag

SEQ ID NO: 3746697 - RNA, 21 nt, Human
ggaaagggcccuccuuccuaa

SEQ ID NO: 3746698 - RNA, 13 nt, Human
ggaaaggggagag

SEQ ID NO: 3746699 - RNA, 20 nt, Human
ggaaaggggucggcugacca

SEQ ID NO: 3746700 - RNA, 16 nt, Human
ggaaagucauuggcuu

SEQ ID NO: 3746701 - RNA, 19 nt, Human
ggaaagugaauuugaauga

SEQ ID NO: 3746702 - RNA, 18 nt, Human
ggaaagugcuuuccagaa

SEQ ID NO: 3746703 - RNA, 23 nt, Human
ggaaaguggccaagaagcagugg

SEQ ID NO: 3746704 - RNA, 15 nt, Human
ggaaauaaaaaaguc

SEQ ID NO: 3746705 - RNA, 16 nt, Human
ggaaauaaaaccuuuc

SEQ ID NO: 3746706 - RNA, 23 nt, Human
ggaaauacccuucuuuuaugagc

SEQ ID NO: 3746707 - RNA, 12 nt, Human
ggaaauauuaaa

SEQ ID NO: 3746708 - RNA, 14 nt, Human
ggaaauauuaaaag

SEQ ID NO: 3746709 - RNA, 15 nt, Human
ggaaauauuuauuuu

SEQ ID NO: 3746710 - RNA, 18 nt, Human
ggaaauauuuauuuuaau

SEQ ID NO: 3746711 - RNA, 12 nt, Human
ggaaauauuuua

SEQ ID NO: 3746712 - RNA, 20 nt, Human
ggaaaucaaagugcuauuac

SEQ ID NO: 3746713 - RNA, 17 nt, Human
ggaaaucaaauguaaag

SEQ ID NO: 3746714 - RNA, 18 nt, Human
ggaaaucagccaaguuuu

SEQ ID NO: 3746715 - RNA, 18 nt, Human
ggaaaugaucaguuuuuu

SEQ ID NO: 3746716 - RNA, 17 nt, Human
ggaaaugccuaagaaga

SEQ ID NO: 3746717 - RNA, 22 nt, Human
ggaaauggaaccccaccacugu

SEQ ID NO: 3746718 - RNA, 13 nt, Human
ggaaauggugccu

SEQ ID NO: 3746719 - RNA, 12 nt, Human
ggaaauuaaagu

SEQ ID NO: 3746720 - RNA, 19 nt, Human
ggaaauuaagaagaaacua

SEQ ID NO: 3746721 - RNA, 16 nt, Human
ggaaauugauuuugaa

SEQ ID NO: 3746722 - RNA, 17 nt, Human
ggaaauuggaagagcac

SEQ ID NO: 3746723 - RNA, 12 nt, Human
ggaaauuucacg

SEQ ID NO: 3746724 - RNA, 16 nt, Human
ggaacaaaaaaaccac

SEQ ID NO: 3746725 - RNA, 14 nt, Human
ggaacaaacagggc

SEQ ID NO: 3746726 - RNA, 15 nt, Human
ggaacaaaucuuccu

SEQ ID NO: 3746727 - RNA, 23 nt, Human
ggaacaaggcaaggcugucaauu

SEQ ID NO: 3746728 - RNA, 13 nt, Human
ggaacaaguugag

SEQ ID NO: 3746729 - RNA, 14 nt, Human
ggaacacggccaca

SEQ ID NO: 3746730 - RNA, 15 nt, Human
ggaacacucugagac

SEQ ID NO: 3746731 - RNA, 16 nt, Human
ggaacacucugagacu

SEQ ID NO: 3746732 - RNA, 16 nt, Human
ggaacacugcccucgc

SEQ ID NO: 3746733 - RNA, 11 nt, Human
ggaacagaagg

SEQ ID NO: 3746734 - RNA, 13 nt, Human
ggaacagaaggau

SEQ ID NO: 3746735 - RNA, 12 nt, Human
ggaacagaaugu

SEQ ID NO: 3746736 - RNA, 16 nt, Human
ggaacagaauguuuua

SEQ ID NO: 3746737 - RNA, 21 nt, Human
ggaacagacaacagaagucau

SEQ ID NO: 3746738 - RNA, 16 nt, Human
ggaacagacaggagaa

SEQ ID NO: 3746739 - RNA, 17 nt, Human
ggaacagacaggagaaa

SEQ ID NO: 3746740 - RNA, 23 nt, Human
ggaacagcuaugggagccccagg

SEQ ID NO: 3746741 - RNA, 23 nt, Human
ggaacaggcucagaucucauggg

SEQ ID NO: 3746742 - RNA, 18 nt, Human
ggaacaguguuucccaua

SEQ ID NO: 3746743 - RNA, 23 nt, Human
ggaacaucaucaaggcacugccu

SEQ ID NO: 3746744 - RNA, 20 nt, Human
ggaacauccuuugcagggca

SEQ ID NO: 3746745 - RNA, 22 nt, Human
ggaacauccuuugcagggcagc

SEQ ID NO: 3746746 - RNA, 15 nt, Human
ggaacaugcccccug

SEQ ID NO: 3746747 - RNA, 17 nt, Human
ggaacauuuauuuuaug

SEQ ID NO: 3746748 - RNA, 18 nt, Human
ggaacauuucuguaaaua

SEQ ID NO: 3746749 - RNA, 19 nt, Human
ggaacauuucuguaaauac

SEQ ID NO: 3746750 - RNA, 22 nt, Human
ggaaccaaagcgaauuuuaaaa

SEQ ID NO: 3746751 - RNA, 13 nt, Human
ggaaccagagcca

SEQ ID NO: 3746752 - RNA, 14 nt, Human
ggaaccaggcuugg

SEQ ID NO: 3746753 - RNA, 17 nt, Human
ggaaccagggagaccga

SEQ ID NO: 3746754 - RNA, 18 nt, Human
ggaaccaugaagacagga

SEQ ID NO: 3746755 - RNA, 14 nt, Human
ggaacccagacuca

SEQ ID NO: 3746756 - RNA, 15 nt, Human
ggaaccccccuccca

SEQ ID NO: 3746757 - RNA, 21 nt, Human
ggaaccccccucccacccacc

SEQ ID NO: 3746758 - RNA, 13 nt, Human
ggaaccccuuucc

SEQ ID NO: 3746759 - RNA, 14 nt, Human
ggaaccccuuuccc

SEQ ID NO: 3746760 - RNA, 16 nt, Human
ggaaccccuuucccac

SEQ ID NO: 3746761 - RNA, 12 nt, Human
ggagggcuccag

SEQ ID NO: 3746762 - RNA, 14 nt, Human
ggagggcuccagac

SEQ ID NO: 3746763 - RNA, 17 nt, Human
ggagggcuccagacaca

SEQ ID NO: 3746764 - RNA, 16 nt, Human
ggagggcucugaggcg

SEQ ID NO: 3746765 - RNA, 21 nt, Human
ggagggcucugaggcgcccca

SEQ ID NO: 3746766 - RNA, 14 nt, Human
ggaggggagacuuu

SEQ ID NO: 3746767 - RNA, 15 nt, Human
ggaggggcagagcca

SEQ ID NO: 3746768 - RNA, 14 nt, Human
ggaggggcaggcug

SEQ ID NO: 3746769 - RNA, 22 nt, Human
ggaggggcccgcuugccucggc

SEQ ID NO: 3746770 - RNA, 17 nt, Human
ggaggggcgcccaccuc

SEQ ID NO: 3746771 - RNA, 15 nt, Human
ggaggggcugugggc

SEQ ID NO: 3746772 - RNA, 15 nt, Human
ggagggggagaaaag

SEQ ID NO: 3746773 - RNA, 21 nt, Human
ggagggggcuugaagccaaag

SEQ ID NO: 3746774 - RNA, 18 nt, Human
ggagggguaggggcuggg

SEQ ID NO: 3746775 - RNA, 17 nt, Human
ggagggguguggcagug

SEQ ID NO: 3746776 - RNA, 16 nt, Human
ggagggguugccacag

SEQ ID NO: 3746777 - RNA, 18 nt, Human
ggagggguugccacaggc

SEQ ID NO: 3746778 - RNA, 22 nt, Human
ggagggguugccacaggccucc

SEQ ID NO: 3746779 - RNA, 18 nt, Human
ggaggguacagcugggcu

SEQ ID NO: 3746780 - RNA, 13 nt, Human
ggaggguaggcag

SEQ ID NO: 3746781 - RNA, 19 nt, Human
ggagggucuagaggccuga

SEQ ID NO: 3746782 - RNA, 19 nt, Human
ggaggguuggggaggggcg

SEQ ID NO: 3746783 - RNA, 21 nt, Human
ggaggguuucauugucuguga

SEQ ID NO: 3746784 - RNA, 21 nt, Human
ggagguagcuuugagguggaa

SEQ ID NO: 3746785 - RNA, 22 nt, Human
ggagguauucguaaggauggga

SEQ ID NO: 3746786 - RNA, 20 nt, Human
ggaggucaaggcugcaguga

SEQ ID NO: 3746787 - RNA, 14 nt, Human
ggaggucgaggcag

SEQ ID NO: 3746788 - RNA, 15 nt, Human
ggaggucgaggcagg

SEQ ID NO: 3746789 - RNA, 13 nt, Human
ggaggugagggau

SEQ ID NO: 3746790 - RNA, 16 nt, Human
ggaggugccacuggag

SEQ ID NO: 3746791 - RNA, 13 nt, Human
ggaggugccagca

SEQ ID NO: 3746792 - RNA, 16 nt, Human
ggaggugggagcagga

SEQ ID NO: 3746793 - RNA, 13 nt, Human
ggaggugucucag

SEQ ID NO: 3746794 - RNA, 12 nt, Human
ggaggugugagg

SEQ ID NO: 3746795 - RNA, 13 nt, Human
ggagguguucacu

SEQ ID NO: 3746796 - RNA, 14 nt, Human
ggagguguucacug

SEQ ID NO: 3746797 - RNA, 21 nt, Human
ggagguguuuaaagagagguu

SEQ ID NO: 3746798 - RNA, 19 nt, Human
ggagguuaaggcugaggaa

SEQ ID NO: 3746799 - RNA, 21 nt, Human
ggagguuaaggcugaggaaag

SEQ ID NO: 3746800 - RNA, 12 nt, Human
ggagguugauaa

SEQ ID NO: 3746801 - RNA, 14 nt, Human
ggagguugcaggga

SEQ ID NO: 3746802 - RNA, 21 nt, Human
ggagguugcagugagcugaga

SEQ ID NO: 3746803 - RNA, 17 nt, Human
ggagguuggagggaaag

SEQ ID NO: 3746804 - RNA, 22 nt, Human
ggaguaacaauacaaauggauu

SEQ ID NO: 3746805 - RNA, 17 nt, Human
ggaguaccauguggcaa

SEQ ID NO: 3746806 - RNA, 22 nt, Human
ggaguagagauggggaaagaau

SEQ ID NO: 3746807 - RNA, 14 nt, Human
ggaguagcugagcu

SEQ ID NO: 3746808 - RNA, 15 nt, Human
ggaguaugcaaaagu

SEQ ID NO: 3746809 - RNA, 16 nt, Human
ggaguauugaauggug

SEQ ID NO: 3746810 - RNA, 21 nt, Human
ggaguauugaaugguggugga

SEQ ID NO: 3746811 - RNA, 16 nt, Human
ggagucaaaaauuaaa

SEQ ID NO: 3746812 - RNA, 15 nt, Human
ggagucaagugugga

SEQ ID NO: 3746813 - RNA, 14 nt, Human
ggagucagagagaa

SEQ ID NO: 3746814 - RNA, 14 nt, Human
ggagucagugccag

SEQ ID NO: 3746815 - RNA, 18 nt, Human
ggagucagugccaggucc

SEQ ID NO: 3746816 - RNA, 21 nt, Human
ggagucauuuuguguugaaga

SEQ ID NO: 3746817 - RNA, 16 nt, Human
ggaguccacuuuguuu

SEQ ID NO: 3746818 - RNA, 20 nt, Human
ggaguccaggacaggagaug

SEQ ID NO: 3746819 - RNA, 20 nt, Human
ggagucccacuccaagccag

SEQ ID NO: 3746820 - RNA, 13 nt, Human
ggaguccccuccc

SEQ ID NO: 3746821 - RNA, 24 nt, Human
ggagucguggggugugcugggagc

SEQ ID NO: 3746822 - RNA, 13 nt, Human
ggagucugagguc

SEQ ID NO: 3746823 - RNA, 17 nt, Human
ggagucugccacccagg

SEQ ID NO: 3746824 - RNA, 21 nt, Human
ggagucugccacccaggaucc

SEQ ID NO: 3746825 - RNA, 13 nt, Human
ggagucugccagg

SEQ ID NO: 3746826 - RNA, 16 nt, Human
ggagucugccagggcc

SEQ ID NO: 3746827 - RNA, 20 nt, Human
ggagucugccagggccccuc

SEQ ID NO: 3746828 - RNA, 23 nt, Human
ggagugaaaccuuuagggcagcu

SEQ ID NO: 3746829 - RNA, 12 nt, Human
ggagugaagagg

SEQ ID NO: 3746830 - RNA, 16 nt, Human
ggagugaagaggggca

SEQ ID NO: 3746831 - RNA, 18 nt, Human
ggagugacagaggcagcc

SEQ ID NO: 3746832 - RNA, 19 nt, Human
ggagugacagaggcagccc

SEQ ID NO: 3746833 - RNA, 12 nt, Human
ggagugagcugg

SEQ ID NO: 3746834 - RNA, 12 nt, Human
ggagugcaguga

SEQ ID NO: 3746835 - RNA, 14 nt, Human
ggagugcagugagc

SEQ ID NO: 3746836 - RNA, 19 nt, Human
ggagugcccacccugggag

SEQ ID NO: 3746837 - RNA, 18 nt, Human
ggagugcggaccacccuc

SEQ ID NO: 3746838 - RNA, 18 nt, Human
ggagugcuggcucacagu

SEQ ID NO: 3746839 - RNA, 19 nt, Human
ggaguggaagaagagggag

SEQ ID NO: 3746840 - RNA, 23 nt, Human
ggaguggaauaguauccuccagg

SEQ ID NO: 3746841 - RNA, 16 nt, Human
ggaguggcagcccagc

SEQ ID NO: 3746842 - RNA, 22 nt, Human
ggagugggcccaaugcacuuug

SEQ ID NO: 3746843 - RNA, 23 nt, Human
ggagugggguggugucagacccu

SEQ ID NO: 3746844 - RNA, 17 nt, Human
ggagugggucuggagga

SEQ ID NO: 3746845 - RNA, 13 nt, Human
ggaguguccucuu

SEQ ID NO: 3746846 - RNA, 20 nt, Human
ggaguguccucuucccucuc

SEQ ID NO: 3746847 - RNA, 19 nt, Human
ggaguguguauuguuccca

SEQ ID NO: 3746848 - RNA, 17 nt, Human
ggagugugugugagugu

SEQ ID NO: 3746849 - RNA, 12 nt, Human
ggaguguucccc

SEQ ID NO: 3746850 - RNA, 20 nt, Human
ggaguguuccccuuccacug

SEQ ID NO: 3746851 - RNA, 16 nt, Human
ggaguuaagaccuggc

SEQ ID NO: 3746852 - RNA, 12 nt, Human
ggaguucaauga

SEQ ID NO: 3746853 - RNA, 13 nt, Human
ggaguucaaugau

SEQ ID NO: 3746854 - RNA, 14 nt, Human
ggaguucaaugauc

SEQ ID NO: 3746855 - RNA, 15 nt, Human
ggaguuccaugaaga

SEQ ID NO: 3746856 - RNA, 20 nt, Human
ggaguucgagaccagccugg

SEQ ID NO: 3746857 - RNA, 20 nt, Human
ggaguucgaggcugcaguca

SEQ ID NO: 3746858 - RNA, 22 nt, Human
ggaguucuaacaaaacaaguug

SEQ ID NO: 3746859 - RNA, 19 nt, Human
ggaguuggcauugcauuua

SEQ ID NO: 3746860 - RNA, 21 nt, Human
ggaguuuauguuccauuaaac

SEQ ID NO: 3746861 - RNA, 20 nt, Human
ggaguuugaggcugcagcga

SEQ ID NO: 3746862 - RNA, 15 nt, Human
ggaguuuugcaaagu

SEQ ID NO: 3746863 - RNA, 21 nt, Human
ggaguuuugcucuuguagccc

SEQ ID NO: 3746864 - RNA, 17 nt, Human
ggaguuuuguuuccucu

SEQ ID NO: 3746865 - RNA, 20 nt, Human
ggaguuuuuguuuggagagc

SEQ ID NO: 3746866 - RNA, 18 nt, Human
ggauaaaaagccagggcu

SEQ ID NO: 3746867 - RNA, 21 nt, Human
ggauaaaaagccagggcugga

SEQ ID NO: 3746868 - RNA, 17 nt, Human
ggauaaaauaaugcugc

SEQ ID NO: 3746869 - RNA, 18 nt, Human
ggauaacaaagauaucuu

SEQ ID NO: 3746870 - RNA, 14 nt, Human
ggauaaccuauaug

SEQ ID NO: 3746871 - RNA, 20 nt, Human
ggauaacuuuacagaaaugg

SEQ ID NO: 3746872 - RNA, 22 nt, Human
ggauaauaaggaaaaguuuaau

SEQ ID NO: 3746873 - RNA, 16 nt, Human
ggauacugcagggcca

SEQ ID NO: 3746874 - RNA, 17 nt, Human
ggauacuggcacagagg

SEQ ID NO: 3746875 - RNA, 14 nt, Human
ggauagaugcuggc

SEQ ID NO: 3746876 - RNA, 18 nt, Human
ggauagaugcuggcccag

SEQ ID NO: 3746877 - RNA, 20 nt, Human
ggauagaugcuggcccaggg

SEQ ID NO: 3746878 - RNA, 15 nt, Human
ggauagaugugugga

SEQ ID NO: 3746879 - RNA, 13 nt, Human
ggauagcauuuuu

SEQ ID NO: 3746880 - RNA, 14 nt, Human
ggauaggagccugc

SEQ ID NO: 3746881 - RNA, 15 nt, Human
ggauaggagccugcu

SEQ ID NO: 3746882 - RNA, 21 nt, Human
ggauaggaguucacuucaucu

SEQ ID NO: 3746883 - RNA, 14 nt, Human
ggauaggccagccg

SEQ ID NO: 3746884 - RNA, 21 nt, Human
ggauaggccuucauuaacaaa

SEQ ID NO: 3746885 - RNA, 13 nt, Human
ggauauaaauaua

SEQ ID NO: 3746886 - RNA, 14 nt, Human
ggauauaaauauau

SEQ ID NO: 3746887 - RNA, 13 nt, Human
ggauauguggaga

SEQ ID NO: 3746888 - RNA, 21 nt, Human
ggauauuagucauagaagaac

SEQ ID NO: 3746889 - RNA, 16 nt, Human
ggauauuuaagaaaau

SEQ ID NO: 3746890 - RNA, 22 nt, Human
ggauauuuaagaaaauacaaua

SEQ ID NO: 3746891 - RNA, 12 nt, Human
ggauauuuaagg

SEQ ID NO: 3746892 - RNA, 13 nt, Human
ggauauuuucaaa

SEQ ID NO: 3746893 - RNA, 14 nt, Human
ggaucacaagaugg

SEQ ID NO: 3746894 - RNA, 16 nt, Human
ggaucacagccucuga

SEQ ID NO: 3746895 - RNA, 22 nt, Human
ggaucacaggugucagccauug

SEQ ID NO: 3746896 - RNA, 19 nt, Human
ggaucacuggagcccagga

SEQ ID NO: 3746897 - RNA, 16 nt, Human
ggaucagagcaggacc

SEQ ID NO: 3746898 - RNA, 21 nt, Human
ggaucagaugaacucuuagaa

SEQ ID NO: 3746899 - RNA, 16 nt, Human
ggaucagauugcaugu

SEQ ID NO: 3746900 - RNA, 16 nt, Human
ggaucaggcucccagg

SEQ ID NO: 3746901 - RNA, 19 nt, Human
ggaucaugaaaguagacag

SEQ ID NO: 3746902 - RNA, 19 nt, Human
ggaucaugguguaauaaga

SEQ ID NO: 3746903 - RNA, 14 nt, Human
ggauccacaccugg

SEQ ID NO: 3746904 - RNA, 12 nt, Human
ggauccaggccc

SEQ ID NO: 3746905 - RNA, 17 nt, Human
ggauccaggccccuccc

SEQ ID NO: 3746906 - RNA, 21 nt, Human
ggaucccaagccuccugcugc

SEQ ID NO: 3746907 - RNA, 18 nt, Human
ggaucccucugggcacug

SEQ ID NO: 3746908 - RNA, 18 nt, Human
ggauccuagccuuauccu

SEQ ID NO: 3746909 - RNA, 20 nt, Human
ggauccuagccuuauccucu

SEQ ID NO: 3746910 - RNA, 13 nt, Human
ggauccugagcca

SEQ ID NO: 3746911 - RNA, 16 nt, Human
ggauccugagccagau

SEQ ID NO: 3746912 - RNA, 18 nt, Human
ggauccugagccagauuu

SEQ ID NO: 3746913 - RNA, 20 nt, Human
ggauccugagccagauuuca

SEQ ID NO: 3746914 - RNA, 16 nt, Human
ggauccuguguggaga

SEQ ID NO: 3746915 - RNA, 13 nt, Human
ggaucuaccagca

SEQ ID NO: 3746916 - RNA, 17 nt, Human
ggaucuaccuggaggga

SEQ ID NO: 3746917 - RNA, 17 nt, Human
ggaucucaccaggcagc

SEQ ID NO: 3746918 - RNA, 22 nt, Human
ggaucucaccaggcagccucug

SEQ ID NO: 3746919 - RNA, 15 nt, Human
ggaucucagcuuuga

SEQ ID NO: 3746920 - RNA, 16 nt, Human
ggaucucagcuuugag

SEQ ID NO: 3746921 - RNA, 10 nt, Human
ggaucucagg

SEQ ID NO: 3746922 - RNA, 17 nt, Human
ggaucucauuggacccu

SEQ ID NO: 3746923 - RNA, 24 nt, Human
ggaucucauuggacccuuccaugg

SEQ ID NO: 3746924 - RNA, 21 nt, Human
ggaucucccugagaugggcuu

SEQ ID NO: 3746925 - RNA, 13 nt, Human
ggaucucucagga

SEQ ID NO: 3746926 - RNA, 23 nt, Human
ggaucucucuagugauggucaga

SEQ ID NO: 3746927 - RNA, 17 nt, Human
ggaucugccccucccug

SEQ ID NO: 3746928 - RNA, 20 nt, Human
ggaucugccccucccugcuu

SEQ ID NO: 3746929 - RNA, 17 nt, Human
ggaucuggagaaccuca

SEQ ID NO: 3746930 - RNA, 19 nt, Human
ggaucugggacccuuuccu

SEQ ID NO: 3746931 - RNA, 15 nt, Human
ggaucugugcccaga

SEQ ID NO: 3746932 - RNA, 15 nt, Human
ggaucuucaauggcu

SEQ ID NO: 3746933 - RNA, 22 nt, Human
ggaucuugcauucccagugguc

SEQ ID NO: 3746934 - RNA, 15 nt, Human
ggaucuuuguggcca

SEQ ID NO: 3746935 - RNA, 18 nt, Human
ggaugaaugaggucccag

SEQ ID NO: 3746936 - RNA, 17 nt, Human
ggaugaauuguaaaagc

SEQ ID NO: 3746937 - RNA, 20 nt, Human
ggaugaauuguaaaagcaac

SEQ ID NO: 3746938 - RNA, 20 nt, Human
ggaugacaugucccuacacc

SEQ ID NO: 3746939 - RNA, 23 nt, Human
ggaugagaauuugagugcucuga

SEQ ID NO: 3746940 - RNA, 14 nt, Human
ggaugagagcccag

SEQ ID NO: 3746941 - RNA, 20 nt, Human
ggaugagagcccagagguaa

SEQ ID NO: 3746942 - RNA, 14 nt, Human
ggaugagcucccac

SEQ ID NO: 3746943 - RNA, 22 nt, Human
ggaugagcucccacaagccuga

SEQ ID NO: 3746944 - RNA, 17 nt, Human
ggaugaggugcugggag

SEQ ID NO: 3746945 - RNA, 16 nt, Human
ggaugauccccacgcc

SEQ ID NO: 3746946 - RNA, 21 nt, Human
ggaugauccccacgccacagc

SEQ ID NO: 3746947 - RNA, 22 nt, Human
ggaugauccccacgccacagcc

SEQ ID NO: 3746948 - RNA, 22 nt, Human
ggaugaucuaggaagacuuugg

SEQ ID NO: 3746949 - RNA, 20 nt, Human
ggaugauucagaaauuggaa

SEQ ID NO: 3746950 - RNA, 15 nt, Human
ggaugauuguacaga

SEQ ID NO: 3746951 - RNA, 13 nt, Human
ggaugauuuaagu

SEQ ID NO: 3746952 - RNA, 23 nt, Human
ggaugcacagaguuguuacauuu

SEQ ID NO: 3746953 - RNA, 16 nt, Human
ggaugcagagucagca

SEQ ID NO: 3746954 - RNA, 18 nt, Human
ggaugcagagucagcaga

SEQ ID NO: 3746955 - RNA, 16 nt, Human
ggaugcagccucacag

SEQ ID NO: 3746956 - RNA, 19 nt, Human
ggaugcagccucacagucc

SEQ ID NO: 3746957 - RNA, 15 nt, Human
ggaugcauuucucug

SEQ ID NO: 3746958 - RNA, 22 nt, Human
ggaugccaauauuaaaucugcu

SEQ ID NO: 3746959 - RNA, 19 nt, Human
ggaugccacuccucccucc

SEQ ID NO: 3746960 - RNA, 15 nt, Human
ggaugcccaaagaug

SEQ ID NO: 3746961 - RNA, 18 nt, Human
ggaugcccaaagaugcag

SEQ ID NO: 3746962 - RNA, 19 nt, Human
ggaugccugguggcagcug

SEQ ID NO: 3746963 - RNA, 20 nt, Human
ggaugccugguggcagcugc

SEQ ID NO: 3746964 - RNA, 21 nt, Human
ggaugcuccucccuucucuac

SEQ ID NO: 3746965 - RNA, 15 nt, Human
ggaugcuuguacaua

SEQ ID NO: 3746966 - RNA, 21 nt, Human
ggauggaggggugguccugac

SEQ ID NO: 3746967 - RNA, 22 nt, Human
ggauggcaggacgugggcuggg

SEQ ID NO: 3746968 - RNA, 13 nt, Human
ggauggccagugu

SEQ ID NO: 3746969 - RNA, 14 nt, Human
ggauggccaguguc

SEQ ID NO: 3746970 - RNA, 22 nt, Human
ggauggcccuucccacuggagg

SEQ ID NO: 3746971 - RNA, 23 nt, Human
ggauggcccuuccuccuccacca

SEQ ID NO: 3746972 - RNA, 18 nt, Human
ggauggccguggauggcc

SEQ ID NO: 3746973 - RNA, 16 nt, Human
ggauggccuggccagg

SEQ ID NO: 3746974 - RNA, 14 nt, Human
ggauggcuugucua

SEQ ID NO: 3746975 - RNA, 15 nt, Human
ggaugggaaggaggg

SEQ ID NO: 3746976 - RNA, 14 nt, Human
ggaugggccaccgc

SEQ ID NO: 3746977 - RNA, 20 nt, Human
ggaugggggaaauggugccu

SEQ ID NO: 3746978 - RNA, 22 nt, Human
ggaugggggaacucagauccag

SEQ ID NO: 3746979 - RNA, 16 nt, Human
ggaugggucagagcua

SEQ ID NO: 3746980 - RNA, 16 nt, Human
ggauggguggauggcc

SEQ ID NO: 3746981 - RNA, 20 nt, Human
ggaugguaguuuuuucaucu

SEQ ID NO: 3746982 - RNA, 19 nt, Human
ggauggucuuacagcaggc

SEQ ID NO: 3746983 - RNA, 18 nt, Human
ggauggugugccuuccag

SEQ ID NO: 3746984 - RNA, 17 nt, Human
ggauguaaacagugccu

SEQ ID NO: 3746985 - RNA, 18 nt, Human
ggauguaaacagugccug

SEQ ID NO: 3746986 - RNA, 20 nt, Human
ggauguaaacagugccugcu

SEQ ID NO: 3746987 - RNA, 21 nt, Human
ggauguacaaggacagccccu

SEQ ID NO: 3746988 - RNA, 18 nt, Human
ggauguauaugucaucuc

SEQ ID NO: 3746989 - RNA, 20 nt, Human
ggauguaugaauacagcagc

SEQ ID NO: 3746990 - RNA, 21 nt, Human
ggauguaugaauacagcagca

SEQ ID NO: 3746991 - RNA, 15 nt, Human
ggaugucacagggcc

SEQ ID NO: 3746992 - RNA, 13 nt, Human
ggaugucaccaau

SEQ ID NO: 3746993 - RNA, 18 nt, Human
ggaugucacucagaugga

SEQ ID NO: 3746994 - RNA, 15 nt, Human
ggauguccccagcag

SEQ ID NO: 3746995 - RNA, 20 nt, Human
ggaugucugccaauuuuugc

SEQ ID NO: 3746996 - RNA, 13 nt, Human
ggaugucugggcc

SEQ ID NO: 3746997 - RNA, 17 nt, Human
ggaugucuuccuuggag

SEQ ID NO: 3746998 - RNA, 22 nt, Human
ggaugugaauugccugcagaga

SEQ ID NO: 3746999 - RNA, 17 nt, Human
ggauguggcugcagcag

SEQ ID NO: 3747000 - RNA, 15 nt, Human
ggaugugggagggag

SEQ ID NO: 3747001 - RNA, 13 nt, Human
ggaugugggcagc

SEQ ID NO: 3747002 - RNA, 22 nt, Human
ggaugugggguccccaucaucc

SEQ ID NO: 3747003 - RNA, 18 nt, Human
ggauguuacucucuugca

SEQ ID NO: 3747004 - RNA, 23 nt, Human
ggauguuauuauccuugggggcu

SEQ ID NO: 3747005 - RNA, 20 nt, Human
ggauguucagcacugucccu

SEQ ID NO: 3747006 - RNA, 15 nt, Human
ggauguucugggaca

SEQ ID NO: 3747007 - RNA, 16 nt, Human
ggauguucugggacac

SEQ ID NO: 3747008 - RNA, 14 nt, Human
ggauguugcucaga

SEQ ID NO: 3747009 - RNA, 23 nt, Human
ggauguuuuaauuccaugaaucg

SEQ ID NO: 3747010 - RNA, 18 nt, Human
ggauguuuuucaugaaaa

SEQ ID NO: 3747011 - RNA, 23 nt, Human
ggauuaaacuuaaucuaaaugga

SEQ ID NO: 3747012 - RNA, 15 nt, Human
ggauuaauaugaaaa

SEQ ID NO: 3747013 - RNA, 15 nt, Human
ggauuacccaagcaa

SEQ ID NO: 3747014 - RNA, 21 nt, Human
ggauuagguuucagcagagcu

SEQ ID NO: 3747015 - RNA, 17 nt, Human
ggauuaguuuagaacag

SEQ ID NO: 3747016 - RNA, 15 nt, Human
ggauuauaaucagaa

SEQ ID NO: 3747017 - RNA, 19 nt, Human
ggauuauucauuuaaaaug

SEQ ID NO: 3747018 - RNA, 19 nt, Human
ggauuauuuaauaacauua

SEQ ID NO: 3747019 - RNA, 19 nt, Human
ggauuauuuuuucagaccg

SEQ ID NO: 3747020 - RNA, 20 nt, Human
ggauucacaccccaccugcg

SEQ ID NO: 3747021 - RNA, 23 nt, Human
ggauucagccuucuuuuucugga

SEQ ID NO: 3747022 - RNA, 21 nt, Human
ggauucaggaauguguggccu

SEQ ID NO: 3747023 - RNA, 22 nt, Human
ggauucauugucucucacagau

SEQ ID NO: 3747024 - RNA, 18 nt, Human
ggauucuccuuuuuaccc

SEQ ID NO: 3747025 - RNA, 16 nt, Human
ggauucucuaaccuuu

SEQ ID NO: 3747026 - RNA, 21 nt, Human
ggauucugaggcccugcccaa

SEQ ID NO: 3747027 - RNA, 13 nt, Human
ggauucugggagg

SEQ ID NO: 3747028 - RNA, 16 nt, Human
ggauucuuauggacaa

SEQ ID NO: 3747029 - RNA, 19 nt, Human
ggauucuuguuuugcuucc

SEQ ID NO: 3747030 - RNA, 12 nt, Human
ggauucuuuaaa

SEQ ID NO: 3747031 - RNA, 14 nt, Human
ggauugaagcccuc

SEQ ID NO: 3747032 - RNA, 13 nt, Human
ggauugacaguaa

SEQ ID NO: 3747033 - RNA, 16 nt, Human
ggauugacaguaacuu

SEQ ID NO: 3747034 - RNA, 13 nt, Human
ggauugagucugu

SEQ ID NO: 3747035 - RNA, 18 nt, Human
ggauugauuaugcagaau

SEQ ID NO: 3747036 - RNA, 17 nt, Human
ggauugcgagagaugug

SEQ ID NO: 3747037 - RNA, 14 nt, Human
ggauugcugccacu

SEQ ID NO: 3747038 - RNA, 15 nt, Human
ggauugcugccacuu

SEQ ID NO: 3747039 - RNA, 17 nt, Human
ggauugcuugagcccag

SEQ ID NO: 3747040 - RNA, 22 nt, Human
ggauuggauuauuuaauaacau

SEQ ID NO: 3747041 - RNA, 19 nt, Human
ggauuggggaagacugugg

SEQ ID NO: 3747042 - RNA, 14 nt, Human
ggauugggggcugg

SEQ ID NO: 3747043 - RNA, 18 nt, Human
ggauugggggcuggugcc

SEQ ID NO: 3747044 - RNA, 23 nt, Human
ggauuguaaaaaaaaaugccuuu

SEQ ID NO: 3747045 - RNA, 16 nt, Human
ggauuguccccgaccc

SEQ ID NO: 3747046 - RNA, 23 nt, Human
ggauugugccuaauguguuugag

SEQ ID NO: 3747047 - RNA, 19 nt, Human
ggauuguuaauuucagucc

SEQ ID NO: 3747048 - RNA, 18 nt, Human
ggauuuaaaaacuggaac

SEQ ID NO: 3747049 - RNA, 14 nt, Human
ggauuuaauuucca

SEQ ID NO: 3747050 - RNA, 23 nt, Human
ggauuuagaagugucauguuuau

SEQ ID NO: 3747051 - RNA, 19 nt, Human
ggauuuauuuaaaauagca

SEQ ID NO: 3747052 - RNA, 13 nt, Human
ggauuucucccag

SEQ ID NO: 3747053 - RNA, 21 nt, Human
ggauuugaggagcagcuucag

SEQ ID NO: 3747054 - RNA, 14 nt, Human
ggauuuguucucug

SEQ ID NO: 3747055 - RNA, 15 nt, Human
ggauuuguugccaug

SEQ ID NO: 3747056 - RNA, 12 nt, Human
ggauuuucagcc

SEQ ID NO: 3747057 - RNA, 23 nt, Human
ggauuuuuguuuuguuuuuacaa

SEQ ID NO: 3747058 - RNA, 12 nt, Human
ggauuuuuucca

SEQ ID NO: 3747059 - RNA, 21 nt, Human
cuuucuaguggucuuuguaag

SEQ ID NO: 3747060 - RNA, 21 nt, Human
cuuucuaguugaaaauaaagu

SEQ ID NO: 3747061 - RNA, 17 nt, Human
cuuucuauaauuuuaca

SEQ ID NO: 3747062 - RNA, 19 nt, Human
cuuucuaugcugcuuuuau

SEQ ID NO: 3747063 - RNA, 18 nt, Human
cuuucucaauaagccuca

SEQ ID NO: 3747064 - RNA, 22 nt, Human
cuuucucacuaaaucuuuuaua

SEQ ID NO: 3747065 - RNA, 22 nt, Human
cuuucucagccgcuucugacug

SEQ ID NO: 3747066 - RNA, 17 nt, Human
cuuucucaguuuucaua

SEQ ID NO: 3747067 - RNA, 20 nt, Human
cuuucucaguuuucauaagu

SEQ ID NO: 3747068 - RNA, 23 nt, Human
cuuucuccaaaguuauccagagg

SEQ ID NO: 3747069 - RNA, 14 nt, Human
cuuucuccagccag

SEQ ID NO: 3747070 - RNA, 19 nt, Human
cuuucuccagccagcaaug

SEQ ID NO: 3747071 - RNA, 20 nt, Human
cuuucuccagccagcaauga

SEQ ID NO: 3747072 - RNA, 19 nt, Human
cuuucucccaggccaggcu

SEQ ID NO: 3747073 - RNA, 14 nt, Human
cuuucuccccugcc

SEQ ID NO: 3747074 - RNA, 18 nt, Human
cuuucuccccugccccca

SEQ ID NO: 3747075 - RNA, 22 nt, Human
cuuucuccccugcccccaggac

SEQ ID NO: 3747076 - RNA, 24 nt, Human
cuuucuccccugcccccaggacug

SEQ ID NO: 3747077 - RNA, 12 nt, Human
cuuucuccuguu

SEQ ID NO: 3747078 - RNA, 20 nt, Human
cuuucuccuuagucuucuca

SEQ ID NO: 3747079 - RNA, 15 nt, Human
cuuucuccuugaaua

SEQ ID NO: 3747080 - RNA, 23 nt, Human
cuuucuccuuuguacuuugugcu

SEQ ID NO: 3747081 - RNA, 18 nt, Human
cuuucucgauuuuaucuu

SEQ ID NO: 3747082 - RNA, 17 nt, Human
cuuucucuaauaauaaa

SEQ ID NO: 3747083 - RNA, 13 nt, Human
cuuucucuacuuu

SEQ ID NO: 3747084 - RNA, 16 nt, Human
cuuucucuccuuucuu

SEQ ID NO: 3747085 - RNA, 17 nt, Human
cuuucucuccuuucuuu

SEQ ID NO: 3747086 - RNA, 22 nt, Human
cuuucucucuuuauacagcugu

SEQ ID NO: 3747087 - RNA, 18 nt, Human
cuuucucugccagugaca

SEQ ID NO: 3747088 - RNA, 12 nt, Human
cuuucucugcuu

SEQ ID NO: 3747089 - RNA, 14 nt, Human
cuuucucugcuuca

SEQ ID NO: 3747090 - RNA, 19 nt, Human
cuuucucuuuucucuuuuu

SEQ ID NO: 3747091 - RNA, 13 nt, Human
cuuucugaaauaa

SEQ ID NO: 3747092 - RNA, 14 nt, Human
cuuucugaacagcu

SEQ ID NO: 3747093 - RNA, 20 nt, Human
cuuucugagugccuucugug

SEQ ID NO: 3747094 - RNA, 17 nt, Human
cuuucugaucuucacua

SEQ ID NO: 3747095 - RNA, 15 nt, Human
cuuucugcagaaaca

SEQ ID NO: 3747096 - RNA, 19 nt, Human
cuuucugcaguuuuucagg

SEQ ID NO: 3747097 - RNA, 20 nt, Human
cuuucugcaguuuuucagga

SEQ ID NO: 3747098 - RNA, 21 nt, Human
cuuucugccaucuagccagcc

SEQ ID NO: 3747099 - RNA, 22 nt, Human
cuuucugccaucuagccagccc

SEQ ID NO: 3747100 - RNA, 15 nt, Human
cuuucugccucucaa

SEQ ID NO: 3747101 - RNA, 11 nt, Human
cuuucugccug

SEQ ID NO: 3747102 - RNA, 13 nt, Human
cuuucugcucagc

SEQ ID NO: 3747103 - RNA, 19 nt, Human
cuuucugcucagcuucucc

SEQ ID NO: 3747104 - RNA, 18 nt, Human
cuuucuggcagguccucc

SEQ ID NO: 3747105 - RNA, 18 nt, Human
cuuucuggcuaugcauuu

SEQ ID NO: 3747106 - RNA, 18 nt, Human
cuuucugggguuuuucug

SEQ ID NO: 3747107 - RNA, 13 nt, Human
cuuucuguaaacu

SEQ ID NO: 3747108 - RNA, 13 nt, Human
cuuucuguauaua

SEQ ID NO: 3747109 - RNA, 16 nt, Human
cuuucuguauugagua

SEQ ID NO: 3747110 - RNA, 14 nt, Human
cuuucugugcccua

SEQ ID NO: 3747111 - RNA, 15 nt, Human
cuuucuguuaaaaug

SEQ ID NO: 3747112 - RNA, 19 nt, Human
cuuucuguuaaaaugcaug

SEQ ID NO: 3747113 - RNA, 12 nt, Human
cuuucuguucca

SEQ ID NO: 3747114 - RNA, 13 nt, Human
cuuucuguuccaa

SEQ ID NO: 3747115 - RNA, 20 nt, Human
cuuucuguuccaaauucagu

SEQ ID NO: 3747116 - RNA, 23 nt, Human
cuuucuguuccaaauucaguuuc

SEQ ID NO: 3747117 - RNA, 13 nt, Human
cuuucuguugcca

SEQ ID NO: 3747118 - RNA, 21 nt, Human
cuuucuguugucauugcuguu

SEQ ID NO: 3747119 - RNA, 21 nt, Human
cuuucuuauaauacucuguug

SEQ ID NO: 3747120 - RNA, 11 nt, Human
cuuucuuccuc

SEQ ID NO: 3747121 - RNA, 13 nt, Human
cuuucuuccucug

SEQ ID NO: 3747122 - RNA, 14 nt, Human
cuuucuuccucugc

SEQ ID NO: 3747123 - RNA, 12 nt, Human
cuuucuucuccc

SEQ ID NO: 3747124 - RNA, 14 nt, Human
cuuucuucucugcu

SEQ ID NO: 3747125 - RNA, 22 nt, Human
cuuucuugaucaacaucuuuuc

SEQ ID NO: 3747126 - RNA, 14 nt, Human
cuuucuugcucccu

SEQ ID NO: 3747127 - RNA, 19 nt, Human
cuuucuugcucccugacug

SEQ ID NO: 3747128 - RNA, 20 nt, Human
cuuucuugguucauaaauga

SEQ ID NO: 3747129 - RNA, 17 nt, Human
cuuucuuuaaaguucuu

SEQ ID NO: 3747130 - RNA, 15 nt, Human
cuuucuuuaaauguu

SEQ ID NO: 3747131 - RNA, 13 nt, Human
cuuucuuuaaauu

SEQ ID NO: 3747132 - RNA, 15 nt, Human
cuuucuuuaccugag

SEQ ID NO: 3747133 - RNA, 15 nt, Human
cuuucuuuauuuuga

SEQ ID NO: 3747134 - RNA, 17 nt, Human
cuuucuuugauucuccu

SEQ ID NO: 3747135 - RNA, 18 nt, Human
cuuucuuugggaauauuu

SEQ ID NO: 3747136 - RNA, 21 nt, Human
cuuucuuugggaauauuugaa

SEQ ID NO: 3747137 - RNA, 13 nt, Human
cuuucuuuggugc

SEQ ID NO: 3747138 - RNA, 23 nt, Human
cuuucuuuggugccuuuccuguu

SEQ ID NO: 3747139 - RNA, 21 nt, Human
cuuucuuuucgccguggcugc

SEQ ID NO: 3747140 - RNA, 11 nt, Human
cuuucuuuucu

SEQ ID NO: 3747141 - RNA, 10 nt, Human
cuuucuuuuu

SEQ ID NO: 3747142 - RNA, 20 nt, Human
cuuucuuuuucuucuucccu

SEQ ID NO: 3747143 - RNA, 16 nt, Human
cuuucuuuuuguagcu

SEQ ID NO: 3747144 - RNA, 18 nt, Human
cuuucuuuuuuggccauc

SEQ ID NO: 3747145 - RNA, 19 nt, Human
cuuucuuuuuuggccaucu

SEQ ID NO: 3747146 - RNA, 16 nt, Human
cuuucuuuuuuucccc

SEQ ID NO: 3747147 - RNA, 17 nt, Human
cuuugaaaaaaaauaaa

SEQ ID NO: 3747148 - RNA, 23 nt, Human
cuuugaaaaaucacuugauucau

SEQ ID NO: 3747149 - RNA, 13 nt, Human
cuuugaaacagaa

SEQ ID NO: 3747150 - RNA, 21 nt, Human
cuuugaaagacuuccaaagaa

SEQ ID NO: 3747151 - RNA, 20 nt, Human
cuuugaaagccccagaaauc

SEQ ID NO: 3747152 - RNA, 16 nt, Human
cuuugaaauaccucau

SEQ ID NO: 3747153 - RNA, 20 nt, Human
cuuugaaauaccucauguuu

SEQ ID NO: 3747154 - RNA, 19 nt, Human
cuuugaaauagucugugug

SEQ ID NO: 3747155 - RNA, 21 nt, Human
cuuugaaauagucugugugaa

SEQ ID NO: 3747156 - RNA, 23 nt, Human
cuuugaaauauauggucuaaugu

SEQ ID NO: 3747157 - RNA, 16 nt, Human
cuuugaaaugaauaua

SEQ ID NO: 3747158 - RNA, 14 nt, Human
cuuugaaauguguu

SEQ ID NO: 3747159 - RNA, 20 nt, Human
cuuugaaauuauguaaauua

SEQ ID NO: 3747160 - RNA, 18 nt, Human
cuuugaaauugaaccuuu

SEQ ID NO: 3747161 - RNA, 13 nt, Human
cuuugaagccuca

SEQ ID NO: 3747162 - RNA, 21 nt, Human
cuuugaaguuagcuuuaacuu

SEQ ID NO: 3747163 - RNA, 17 nt, Human
cuuugaauaaaaaugca

SEQ ID NO: 3747164 - RNA, 18 nt, Human
cuuugaauccucucucug

SEQ ID NO: 3747165 - RNA, 13 nt, Human
cuuugaaugcuuu

SEQ ID NO: 3747166 - RNA, 16 nt, Human
cuuugaaugcuuuuug

SEQ ID NO: 3747167 - RNA, 14 nt, Human
cuuugaauguuaau

SEQ ID NO: 3747168 - RNA, 11 nt, Human
cuuugaauuuu

SEQ ID NO: 3747169 - RNA, 18 nt, Human
cuuugaauuuucauuuua

SEQ ID NO: 3747170 - RNA, 19 nt, Human
cuuugaauuuucauuuuac

SEQ ID NO: 3747171 - RNA, 21 nt, Human
cuuugaauuuucauuuuacag

SEQ ID NO: 3747172 - RNA, 17 nt, Human
cuuugacaaagguaaau

SEQ ID NO: 3747173 - RNA, 19 nt, Human
cuuugacaaagguaaauca

SEQ ID NO: 3747174 - RNA, 20 nt, Human
cuuugacagcgcacagcugc

SEQ ID NO: 3747175 - RNA, 22 nt, Human
cuuugacagcgcacagcugcuc

SEQ ID NO: 3747176 - RNA, 14 nt, Human
cuuugacauuuaau

SEQ ID NO: 3747177 - RNA, 14 nt, Human
cuuugaccucugca

SEQ ID NO: 3747178 - RNA, 15 nt, Human
cuuugaccucugcag

SEQ ID NO: 3747179 - RNA, 18 nt, Human
cuuugaccucugcagcaa

SEQ ID NO: 3747180 - RNA, 20 nt, Human
cuuugaccugccucccuuca

SEQ ID NO: 3747181 - RNA, 23 nt, Human
cuuugaccugccucccuucaugc

SEQ ID NO: 3747182 - RNA, 17 nt, Human
cuuugacgccaucccag

SEQ ID NO: 3747183 - RNA, 21 nt, Human
cuuugacgccaucccagcccc

SEQ ID NO: 3747184 - RNA, 16 nt, Human
cuuugacucaccuguu

SEQ ID NO: 3747185 - RNA, 17 nt, Human
cuuugacuuuuugcauu

SEQ ID NO: 3747186 - RNA, 17 nt, Human
cuuugagaagccuucag

SEQ ID NO: 3747187 - RNA, 16 nt, Human
cuuugagacaguuucu

SEQ ID NO: 3747188 - RNA, 18 nt, Human
cuuugagagagaaaggac

SEQ ID NO: 3747189 - RNA, 18 nt, Human
cuuugagauagaagaacu

SEQ ID NO: 3747190 - RNA, 16 nt, Human
cuuugagaucuaaaaa

SEQ ID NO: 3747191 - RNA, 22 nt, Human
cuuugagaucuaaaaauaacug

SEQ ID NO: 3747192 - RNA, 17 nt, Human
cuuugagccugggaaau

SEQ ID NO: 3747193 - RNA, 22 nt, Human
cuuugagcuacugccgucagug

SEQ ID NO: 3747194 - RNA, 16 nt, Human
cuuugagcuuaagaau

SEQ ID NO: 3747195 - RNA, 14 nt, Human
cuuugagggacugc

SEQ ID NO: 3747196 - RNA, 16 nt, Human
cuuugagggacugccu

SEQ ID NO: 3747197 - RNA, 20 nt, Human
cuuugagggacugccucugc

SEQ ID NO: 3747198 - RNA, 21 nt, Human
cuuugagggacugccucugcc

SEQ ID NO: 3747199 - RNA, 23 nt, Human
cuuugaguagauccauuuccauu

SEQ ID NO: 3747200 - RNA, 19 nt, Human
cuuugagucccccagagau

SEQ ID NO: 3747201 - RNA, 19 nt, Human
cuuugaguuaagucuaucu

SEQ ID NO: 3747202 - RNA, 16 nt, Human
cuuugaguuuccucag

SEQ ID NO: 3747203 - RNA, 22 nt, Human
cuuugaguuuccucaggcugcu

SEQ ID NO: 3747204 - RNA, 14 nt, Human
cuuugauaaaauaa

SEQ ID NO: 3747205 - RNA, 18 nt, Human
cuuugauaaaauaaauga

SEQ ID NO: 3747206 - RNA, 14 nt, Human
cuuugauaauguua

SEQ ID NO: 3747207 - RNA, 15 nt, Human
cuuugauaauguuaa

SEQ ID NO: 3747208 - RNA, 16 nt, Human
cuuugauaauguuaaa

SEQ ID NO: 3747209 - RNA, 17 nt, Human
ggaaccccuuucccacc

SEQ ID NO: 3747210 - RNA, 23 nt, Human
ggaaccgagggggcugcucccac

SEQ ID NO: 3747211 - RNA, 16 nt, Human
ggaaccguaggaccca

SEQ ID NO: 3747212 - RNA, 12 nt, Human
ggaaccucacuc

SEQ ID NO: 3747213 - RNA, 21 nt, Human
ggaaccucaggguauugcuug

SEQ ID NO: 3747214 - RNA, 13 nt, Human
ggaaccucccaga

SEQ ID NO: 3747215 - RNA, 16 nt, Human
ggaaccuccccagccu

SEQ ID NO: 3747216 - RNA, 17 nt, Human
ggaaccuccccagccug

SEQ ID NO: 3747217 - RNA, 16 nt, Human
ggaaccucgaguacug

SEQ ID NO: 3747218 - RNA, 17 nt, Human
ggaaccucgaguacugu

SEQ ID NO: 3747219 - RNA, 22 nt, Human
ggaaccucgaguacugugggca

SEQ ID NO: 3747220 - RNA, 19 nt, Human
ggaaccuuccuuccugcuu

SEQ ID NO: 3747221 - RNA, 15 nt, Human
ggaaccuugcugucc

SEQ ID NO: 3747222 - RNA, 17 nt, Human
ggaaccuugcuguccug

SEQ ID NO: 3747223 - RNA, 14 nt, Human
ggaacgacugggca

SEQ ID NO: 3747224 - RNA, 15 nt, Human
ggaacgaugugucug

SEQ ID NO: 3747225 - RNA, 13 nt, Human
ggaacgcagauga

SEQ ID NO: 3747226 - RNA, 13 nt, Human
ggaacgcccacuu

SEQ ID NO: 3747227 - RNA, 19 nt, Human
ggaacgcccacuucccugg

SEQ ID NO: 3747228 - RNA, 23 nt, Human
ggaacguagucggcacagccugg

SEQ ID NO: 3747229 - RNA, 14 nt, Human
ggaacuaauaaaua

SEQ ID NO: 3747230 - RNA, 18 nt, Human
ggaacuagacugccuggg

SEQ ID NO: 3747231 - RNA, 21 nt, Human
ggaacuagagggauacacuga

SEQ ID NO: 3747232 - RNA, 15 nt, Human
ggaacucagauccag

SEQ ID NO: 3747233 - RNA, 16 nt, Human
ggaacucagauccagg

SEQ ID NO: 3747234 - RNA, 22 nt, Human
ggaacuccuaaaccuuugcccc

SEQ ID NO: 3747235 - RNA, 17 nt, Human
ggaacuccuuggccuag

SEQ ID NO: 3747236 - RNA, 13 nt, Human
ggaacucugacaa

SEQ ID NO: 3747237 - RNA, 14 nt, Human
ggaacucugacaag

SEQ ID NO: 3747238 - RNA, 21 nt, Human
ggaacucugacaagggcugac

SEQ ID NO: 3747239 - RNA, 21 nt, Human
ggaacugaagggggcggccua

SEQ ID NO: 3747240 - RNA, 14 nt, Human
ggaacugcagaccu

SEQ ID NO: 3747241 - RNA, 15 nt, Human
ggaacugcagaccug

SEQ ID NO: 3747242 - RNA, 15 nt, Human
ggaacugcugccacu

SEQ ID NO: 3747243 - RNA, 16 nt, Human
ggaacugcugccacug

SEQ ID NO: 3747244 - RNA, 21 nt, Human
ggaacugcugccacugagggg

SEQ ID NO: 3747245 - RNA, 14 nt, Human
ggaacuggccaagc

SEQ ID NO: 3747246 - RNA, 19 nt, Human
ggaacuggccaagcugagg

SEQ ID NO: 3747247 - RNA, 14 nt, Human
ggaacuguccagag

SEQ ID NO: 3747248 - RNA, 14 nt, Human
ggaacuucagagau

SEQ ID NO: 3747249 - RNA, 18 nt, Human
ggaacuugaacugauuca

SEQ ID NO: 3747250 - RNA, 22 nt, Human
ggaacuuggggaguuaagaccu

SEQ ID NO: 3747251 - RNA, 11 nt, Human
ggaacuugucu

SEQ ID NO: 3747252 - RNA, 18 nt, Human
ggaacuugucucuucauc

SEQ ID NO: 3747253 - RNA, 23 nt, Human
ggaagaaaaaaaucuucuccaga

SEQ ID NO: 3747254 - RNA, 12 nt, Human
ggaagaaacaaa

SEQ ID NO: 3747255 - RNA, 21 nt, Human
ggaagaacggggcucuucuca

SEQ ID NO: 3747256 - RNA, 19 nt, Human
ggaagaagcuuaggcaggg

SEQ ID NO: 3747257 - RNA, 13 nt, Human
ggaagaagggaga

SEQ ID NO: 3747258 - RNA, 16 nt, Human
ggaagaagggagaaga

SEQ ID NO: 3747259 - RNA, 17 nt, Human
ggaagacaaaauguuuu

SEQ ID NO: 3747260 - RNA, 14 nt, Human
ggaagacaauguga

SEQ ID NO: 3747261 - RNA, 12 nt, Human
ggaagacagaga

SEQ ID NO: 3747262 - RNA, 23 nt, Human
ggaagacagagaccuccugccuc

SEQ ID NO: 3747263 - RNA, 14 nt, Human
ggaagacagcucuu

SEQ ID NO: 3747264 - RNA, 14 nt, Human
ggaagacaguggcc

SEQ ID NO: 3747265 - RNA, 23 nt, Human
ggaagacaguucuacagaaaaac

SEQ ID NO: 3747266 - RNA, 15 nt, Human
ggaagacauuucuuu

SEQ ID NO: 3747267 - RNA, 15 nt, Human
ggaagaccccaccca

SEQ ID NO: 3747268 - RNA, 19 nt, Human
ggaagaccccacccaagcu

SEQ ID NO: 3747269 - RNA, 15 nt, Human
ggaagacgccugagc

SEQ ID NO: 3747270 - RNA, 13 nt, Human
ggaagagaaacag

SEQ ID NO: 3747271 - RNA, 17 nt, Human
ggaagagaaggagcaga

SEQ ID NO: 3747272 - RNA, 17 nt, Human
ggaagagaggaguucaa

SEQ ID NO: 3747273 - RNA, 18 nt, Human
ggaagagaggaguucaau

SEQ ID NO: 3747274 - RNA, 20 nt, Human
ggaagagaggaguucaauga

SEQ ID NO: 3747275 - RNA, 22 nt, Human
ggaagagaggaguucaaugauc

SEQ ID NO: 3747276 - RNA, 14 nt, Human
ggaagagcacagcc

SEQ ID NO: 3747277 - RNA, 17 nt, Human
ggaagagcagcaccucc

SEQ ID NO: 3747278 - RNA, 22 nt, Human
ggaagagcagcaccuccucagc

SEQ ID NO: 3747279 - RNA, 20 nt, Human
ggaagagcccagucuguuga

SEQ ID NO: 3747280 - RNA, 13 nt, Human
ggaagaggccugu

SEQ ID NO: 3747281 - RNA, 23 nt, Human
ggaagaggccuguuuggccucuc

SEQ ID NO: 3747282 - RNA, 19 nt, Human
ggaagagugacucuccagg

SEQ ID NO: 3747283 - RNA, 16 nt, Human
ggaagaguguacuggg

SEQ ID NO: 3747284 - RNA, 16 nt, Human
ggaagauaaguuggaa

SEQ ID NO: 3747285 - RNA, 17 nt, Human
ggaagauaggcucugca

SEQ ID NO: 3747286 - RNA, 18 nt, Human
ggaagauggggaccagca

SEQ ID NO: 3747287 - RNA, 18 nt, Human
ggaagaugggggcaagaa

SEQ ID NO: 3747288 - RNA, 19 nt, Human
ggaagaugggggcaagaag

SEQ ID NO: 3747289 - RNA, 14 nt, Human
ggaagauuucuaaa

SEQ ID NO: 3747290 - RNA, 20 nt, Human
ggaagauuugcccauuuaca

SEQ ID NO: 3747291 - RNA, 18 nt, Human
ggaagauuuuaaauucac

SEQ ID NO: 3747292 - RNA, 22 nt, Human
ggaagcaaaaacgaaagcuggg

SEQ ID NO: 3747293 - RNA, 15 nt, Human
ggaagcacaugccuc

SEQ ID NO: 3747294 - RNA, 21 nt, Human
ggaagcacaugccucucucag

SEQ ID NO: 3747295 - RNA, 13 nt, Human
ggaagcaccccau

SEQ ID NO: 3747296 - RNA, 22 nt, Human
ggaagcaccccaugccaaagcu

SEQ ID NO: 3747297 - RNA, 13 nt, Human
ggaagcagaauaa

SEQ ID NO: 3747298 - RNA, 15 nt, Human
ggaagcagaauaaag

SEQ ID NO: 3747299 - RNA, 21 nt, Human
ggaagcagaauaaagcaauuu

SEQ ID NO: 3747300 - RNA, 22 nt, Human
ggaagcagaauaaagcaauuuu

SEQ ID NO: 3747301 - RNA, 12 nt, Human
ggaagcagcagc

SEQ ID NO: 3747302 - RNA, 22 nt, Human
ggaagcagguuaaauguuuugu

SEQ ID NO: 3747303 - RNA, 11 nt, Human
ggaagcagugc

SEQ ID NO: 3747304 - RNA, 12 nt, Human
ggaagcagugcc

SEQ ID NO: 3747305 - RNA, 21 nt, Human
ggaagcagugccuuccauaau

SEQ ID NO: 3747306 - RNA, 16 nt, Human
ggaagcauucagagag

SEQ ID NO: 3747307 - RNA, 14 nt, Human
ggaagccaaagagu

SEQ ID NO: 3747308 - RNA, 15 nt, Human
ggaagccaaauuuau

SEQ ID NO: 3747309 - RNA, 21 nt, Human
ggaagccacccucccagcucu

SEQ ID NO: 3747310 - RNA, 23 nt, Human
ggaagccacccucccagcucuga

SEQ ID NO: 3747311 - RNA, 14 nt, Human
ggaagccagcaggc

SEQ ID NO: 3747312 - RNA, 17 nt, Human
ggaagccagcaggcucu

SEQ ID NO: 3747313 - RNA, 20 nt, Human
ggaagccagcaggcucucag

SEQ ID NO: 3747314 - RNA, 22 nt, Human
ggaagccagcaggcucucaggc

SEQ ID NO: 3747315 - RNA, 16 nt, Human
ggaagccagcuuuccc

SEQ ID NO: 3747316 - RNA, 21 nt, Human
ggaagcccccaccgugggcag

SEQ ID NO: 3747317 - RNA, 18 nt, Human
ggaagccccugggcccag

SEQ ID NO: 3747318 - RNA, 19 nt, Human
ggaagccccugggcccagu

SEQ ID NO: 3747319 - RNA, 11 nt, Human
ggaagcccucc

SEQ ID NO: 3747320 - RNA, 12 nt, Human
ggaagcccuccu

SEQ ID NO: 3747321 - RNA, 15 nt, Human
ggaagcccuccuucc

SEQ ID NO: 3747322 - RNA, 16 nt, Human
ggaagcccuccuucca

SEQ ID NO: 3747323 - RNA, 12 nt, Human
ggaagcccugga

SEQ ID NO: 3747324 - RNA, 15 nt, Human
ggaagccgcuggggc

SEQ ID NO: 3747325 - RNA, 20 nt, Human
ggaagccggaggguguuuau

SEQ ID NO: 3747326 - RNA, 16 nt, Human
ggaagccggcggccca

SEQ ID NO: 3747327 - RNA, 20 nt, Human
ggaagccggcggcccaagcc

SEQ ID NO: 3747328 - RNA, 22 nt, Human
ggaagccucagauuccuuccca

SEQ ID NO: 3747329 - RNA, 21 nt, Human
ggacuaagccuaccugcucuc

SEQ ID NO: 3747330 - RNA, 14 nt, Human
ggacuacaggugug

SEQ ID NO: 3747331 - RNA, 14 nt, Human
ggacuagccccugu

SEQ ID NO: 3747332 - RNA, 22 nt, Human
ggacuagccccuguggagacug

SEQ ID NO: 3747333 - RNA, 16 nt, Human
ggacucaaugcacuga

SEQ ID NO: 3747334 - RNA, 21 nt, Human
ggacucacagguuggaagaga

SEQ ID NO: 3747335 - RNA, 16 nt, Human
ggacucacuggcagcc

SEQ ID NO: 3747336 - RNA, 23 nt, Human
ggacucacuggcagccccagcac

SEQ ID NO: 3747337 - RNA, 15 nt, Human
ggacucacuugccca

SEQ ID NO: 3747338 - RNA, 17 nt, Human
ggacucagcuccccaga

SEQ ID NO: 3747339 - RNA, 15 nt, Human
ggacucagggcagcg

SEQ ID NO: 3747340 - RNA, 16 nt, Human
ggacucaucuuucccu

SEQ ID NO: 3747341 - RNA, 19 nt, Human
ggacucaucuuucccuccu

SEQ ID NO: 3747342 - RNA, 23 nt, Human
ggacucaucuuucccuccuuggu

SEQ ID NO: 3747343 - RNA, 24 nt, Human
ggacucauuucauuccuaacacag

SEQ ID NO: 3747344 - RNA, 14 nt, Human
ggacuccaggccca

SEQ ID NO: 3747345 - RNA, 15 nt, Human
ggacuccaggcccaa

SEQ ID NO: 3747346 - RNA, 22 nt, Human
ggacuccaggcccaaggcuccc

SEQ ID NO: 3747347 - RNA, 16 nt, Human
ggacuccggcugugcu

SEQ ID NO: 3747348 - RNA, 21 nt, Human
ggacuccuccccacccuccug

SEQ ID NO: 3747349 - RNA, 23 nt, Human
ggacuccuccccacccuccuggc

SEQ ID NO: 3747350 - RNA, 15 nt, Human
ggacuccucugucca

SEQ ID NO: 3747351 - RNA, 16 nt, Human
ggacuccugaaaaaaa

SEQ ID NO: 3747352 - RNA, 14 nt, Human
ggacucgcuuguaa

SEQ ID NO: 3747353 - RNA, 11 nt, Human
ggacucugagg

SEQ ID NO: 3747354 - RNA, 21 nt, Human
ggacucugaggcucuuucugg

SEQ ID NO: 3747355 - RNA, 11 nt, Human
ggacucugccu

SEQ ID NO: 3747356 - RNA, 17 nt, Human
ggacucugggguuuuua

SEQ ID NO: 3747357 - RNA, 18 nt, Human
ggacucuggugccuccag

SEQ ID NO: 3747358 - RNA, 14 nt, Human
ggacucuguccuga

SEQ ID NO: 3747359 - RNA, 21 nt, Human
ggacucuguccugaaggccug

SEQ ID NO: 3747360 - RNA, 16 nt, Human
ggacucuugcucuuuc

SEQ ID NO: 3747361 - RNA, 18 nt, Human
ggacugaaaaccucuccu

SEQ ID NO: 3747362 - RNA, 17 nt, Human
ggacugaagccugcagg

SEQ ID NO: 3747363 - RNA, 19 nt, Human
ggacugaagccugcaggag

SEQ ID NO: 3747364 - RNA, 19 nt, Human
ggacugaauuguccccagu

SEQ ID NO: 3747365 - RNA, 13 nt, Human
ggacugacagcau

SEQ ID NO: 3747366 - RNA, 17 nt, Human
ggacugacugaggcagu

SEQ ID NO: 3747367 - RNA, 12 nt, Human
ggacugagccag

SEQ ID NO: 3747368 - RNA, 17 nt, Human
ggacugagccaguccca

SEQ ID NO: 3747369 - RNA, 12 nt, Human
ggacugagcccc

SEQ ID NO: 3747370 - RNA, 15 nt, Human
ggacugagccccgca

SEQ ID NO: 3747371 - RNA, 13 nt, Human
ggacugagccugg

SEQ ID NO: 3747372 - RNA, 13 nt, Human
ggacugaggccug

SEQ ID NO: 3747373 - RNA, 17 nt, Human
ggacugagugggaagcc

SEQ ID NO: 3747374 - RNA, 18 nt, Human
ggacugagugggaagccc

SEQ ID NO: 3747375 - RNA, 22 nt, Human
ggacugcaagcagggcucugcc

SEQ ID NO: 3747376 - RNA, 22 nt, Human
ggacugcacagcguccugucca

SEQ ID NO: 3747377 - RNA, 10 nt, Human
ggacugccac

SEQ ID NO: 3747378 - RNA, 11 nt, Human
ggacugccacc

SEQ ID NO: 3747379 - RNA, 14 nt, Human
ggacugccaccucc

SEQ ID NO: 3747380 - RNA, 17 nt, Human
ggacugccaccuccccu

SEQ ID NO: 3747381 - RNA, 12 nt, Human
ggacugccucug

SEQ ID NO: 3747382 - RNA, 14 nt, Human
ggacugccucugcc

SEQ ID NO: 3747383 - RNA, 15 nt, Human
ggacugcggaggaag

SEQ ID NO: 3747384 - RNA, 16 nt, Human
ggacugcggaggaagg

SEQ ID NO: 3747385 - RNA, 23 nt, Human
ggacugcuaccuuucaaagcuug

SEQ ID NO: 3747386 - RNA, 20 nt, Human
ggacugcugcugccuggcca

SEQ ID NO: 3747387 - RNA, 14 nt, Human
ggacuggaaccagg

SEQ ID NO: 3747388 - RNA, 15 nt, Human
ggacuggaaccaggg

SEQ ID NO: 3747389 - RNA, 18 nt, Human
ggacuggaaccagggaga

SEQ ID NO: 3747390 - RNA, 22 nt, Human
ggacuggaaccagggagaccga

SEQ ID NO: 3747391 - RNA, 17 nt, Human
ggacuggaggccccugg

SEQ ID NO: 3747392 - RNA, 19 nt, Human
ggacuggcuagaguccuca

SEQ ID NO: 3747393 - RNA, 20 nt, Human
ggacuggcuagaguccucac

SEQ ID NO: 3747394 - RNA, 17 nt, Human
ggacugggaacagaacu

SEQ ID NO: 3747395 - RNA, 19 nt, Human
ggacugggagcccccagcc

SEQ ID NO: 3747396 - RNA, 20 nt, Human
ggacugggagcccccagccu

SEQ ID NO: 3747397 - RNA, 13 nt, Human
ggacuggguuugg

SEQ ID NO: 3747398 - RNA, 18 nt, Human
ggacuggguuuggacccc

SEQ ID NO: 3747399 - RNA, 19 nt, Human
ggcauuguaucugucuuuc

SEQ ID NO: 3747400 - RNA, 16 nt, Human
ggcauuucccacccug

SEQ ID NO: 3747401 - RNA, 11 nt, Human
ggcauuuccua

SEQ ID NO: 3747402 - RNA, 19 nt, Human
ggcauuuguaaauauuaaa

SEQ ID NO: 3747403 - RNA, 18 nt, Human
ggcauuuuacuguacaga

SEQ ID NO: 3747404 - RNA, 15 nt, Human
ggcauuuuuauuuua

SEQ ID NO: 3747405 - RNA, 15 nt, Human
ggccaaaagcuuccc

SEQ ID NO: 3747406 - RNA, 14 nt, Human
ggccaaaaggaaaa

SEQ ID NO: 3747407 - RNA, 15 nt, Human
ggccaaacaggcccu

SEQ ID NO: 3747408 - RNA, 16 nt, Human
ggccaaaccucuguuc

SEQ ID NO: 3747409 - RNA, 20 nt, Human
ggccaaacucaccugccccu

SEQ ID NO: 3747410 - RNA, 11 nt, Human
ggccaaacugc

SEQ ID NO: 3747411 - RNA, 11 nt, Human
ggccaaagaac

SEQ ID NO: 3747412 - RNA, 13 nt, Human
ggccaaagacaaa

SEQ ID NO: 3747413 - RNA, 16 nt, Human
ggccaaagagucucca

SEQ ID NO: 3747414 - RNA, 12 nt, Human
ggccaaaggaag

SEQ ID NO: 3747415 - RNA, 13 nt, Human
ggccaaaggaagc

SEQ ID NO: 3747416 - RNA, 21 nt, Human
ggccaaaggagggucaggaag

SEQ ID NO: 3747417 - RNA, 21 nt, Human
ggccaaaggggaccuggaagg

SEQ ID NO: 3747418 - RNA, 22 nt, Human
ggccaaauauauucucuuuggu

SEQ ID NO: 3747419 - RNA, 22 nt, Human
ggccaaauccgcucucuuccug

SEQ ID NO: 3747420 - RNA, 12 nt, Human
ggccaacaaagc

SEQ ID NO: 3747421 - RNA, 15 nt, Human
ggccaacaaagcugu

SEQ ID NO: 3747422 - RNA, 16 nt, Human
ggccaacaaagcuguu

SEQ ID NO: 3747423 - RNA, 17 nt, Human
ggccaacauggcgaaac

SEQ ID NO: 3747424 - RNA, 17 nt, Human
ggccaaccccaaagaag

SEQ ID NO: 3747425 - RNA, 16 nt, Human
ggccaacccuucuccu

SEQ ID NO: 3747426 - RNA, 23 nt, Human
ggccaacccuucuccucuuguaa

SEQ ID NO: 3747427 - RNA, 21 nt, Human
ggccaacuugagggcccagag

SEQ ID NO: 3747428 - RNA, 22 nt, Human
ggccaacuugagggcccagagc

SEQ ID NO: 3747429 - RNA, 23 nt, Human
ggccaacuugagggcccagagca

SEQ ID NO: 3747430 - RNA, 17 nt, Human
ggccaagaauauugcaa

SEQ ID NO: 3747431 - RNA, 23 nt, Human
ggccaagacuuggcaacagaagc

SEQ ID NO: 3747432 - RNA, 23 nt, Human
ggccaagagaaaggccugcacac

SEQ ID NO: 3747433 - RNA, 20 nt, Human
ggccaagaguggccccaccu

SEQ ID NO: 3747434 - RNA, 21 nt, Human
ggccaagaguggccccaccug

SEQ ID NO: 3747435 - RNA, 20 nt, Human
ggccaagcugaggugcccag

SEQ ID NO: 3747436 - RNA, 13 nt, Human
ggccaaggagcug

SEQ ID NO: 3747437 - RNA, 15 nt, Human
ggccaaggagcugcu

SEQ ID NO: 3747438 - RNA, 19 nt, Human
ggccaaggccuucuccucc

SEQ ID NO: 3747439 - RNA, 13 nt, Human
ggccaauccccag

SEQ ID NO: 3747440 - RNA, 17 nt, Human
ggccacacaagugcagu

SEQ ID NO: 3747441 - RNA, 12 nt, Human
ggccacacagcu

SEQ ID NO: 3747442 - RNA, 20 nt, Human
ggccacagggcgagacuccg

SEQ ID NO: 3747443 - RNA, 19 nt, Human
ggccacaugggaggcucac

SEQ ID NO: 3747444 - RNA, 16 nt, Human
ggccacauggggcugg

SEQ ID NO: 3747445 - RNA, 17 nt, Human
ggccacauggggcuggg

SEQ ID NO: 3747446 - RNA, 13 nt, Human
ggccaccaaagcu

SEQ ID NO: 3747447 - RNA, 18 nt, Human
ggccaccaaagcugccca

SEQ ID NO: 3747448 - RNA, 20 nt, Human
ggccaccacgccuagccuca

SEQ ID NO: 3747449 - RNA, 14 nt, Human
ggccaccaggaugg

SEQ ID NO: 3747450 - RNA, 15 nt, Human
ggccaccaggcuggc

SEQ ID NO: 3747451 - RNA, 13 nt, Human
ggccaccucucca

SEQ ID NO: 3747452 - RNA, 14 nt, Human
ggccaccucuccaa

SEQ ID NO: 3747453 - RNA, 16 nt, Human
ggccaccucuuccugg

SEQ ID NO: 3747454 - RNA, 16 nt, Human
ggccaccugagguggg

SEQ ID NO: 3747455 - RNA, 19 nt, Human
ggccaccugaggugggccc

SEQ ID NO: 3747456 - RNA, 20 nt, Human
ggccaccugaggugggccca

SEQ ID NO: 3747457 - RNA, 14 nt, Human
ggccaccugcaggu

SEQ ID NO: 3747458 - RNA, 23 nt, Human
ggccaccugcccccuucucccac

SEQ ID NO: 3747459 - RNA, 22 nt, Human
ggccaccugcggugcuaucucc

SEQ ID NO: 3747460 - RNA, 18 nt, Human
ggccacgcagccaggaca

SEQ ID NO: 3747461 - RNA, 23 nt, Human
ggccacgugggcaaacaggcagu

SEQ ID NO: 3747462 - RNA, 16 nt, Human
ggccacguucuuacua

SEQ ID NO: 3747463 - RNA, 17 nt, Human
ggccacuccagaccccu

SEQ ID NO: 3747464 - RNA, 12 nt, Human
ggccacuccucc

SEQ ID NO: 3747465 - RNA, 14 nt, Human
ggccacuccuuccu

SEQ ID NO: 3747466 - RNA, 17 nt, Human
ggccacuccuuccugcc

SEQ ID NO: 3747467 - RNA, 20 nt, Human
ggccacuccuuccugcccca

SEQ ID NO: 3747468 - RNA, 22 nt, Human
ggccacucugccucugccugca

SEQ ID NO: 3747469 - RNA, 17 nt, Human
ggccacugaagaggagg

SEQ ID NO: 3747470 - RNA, 19 nt, Human
ggccacugaagaggaggag

SEQ ID NO: 3747471 - RNA, 15 nt, Human
ggccacugcacagag

SEQ ID NO: 3747472 - RNA, 20 nt, Human
ggccacugcucccuaagcca

SEQ ID NO: 3747473 - RNA, 15 nt, Human
ggccacuucugucca

SEQ ID NO: 3747474 - RNA, 21 nt, Human
ggccacuuuaagagagaaauc

SEQ ID NO: 3747475 - RNA, 21 nt, Human
ggccagaaaccuuccugcuga

SEQ ID NO: 3747476 - RNA, 15 nt, Human
ggccagaaguagcuu

SEQ ID NO: 3747477 - RNA, 18 nt, Human
ggccagacaugccacaag

SEQ ID NO: 3747478 - RNA, 11 nt, Human
ggccagagcca

SEQ ID NO: 3747479 - RNA, 14 nt, Human
ggccagagccaagg

SEQ ID NO: 3747480 - RNA, 13 nt, Human
ggccagagccagg

SEQ ID NO: 3747481 - RNA, 22 nt, Human
ggccagagcuacccgcagaguu

SEQ ID NO: 3747482 - RNA, 17 nt, Human
ggccagagcugggaggc

SEQ ID NO: 3747483 - RNA, 16 nt, Human
ggccagaggcccccag

SEQ ID NO: 3747484 - RNA, 19 nt, Human
ggccagaggcccccagccc

SEQ ID NO: 3747485 - RNA, 17 nt, Human
ggccagagggagugaca

SEQ ID NO: 3747486 - RNA, 18 nt, Human
ggccagauccagccuggg

SEQ ID NO: 3747487 - RNA, 21 nt, Human
ggccagaucuguuaagugguu

SEQ ID NO: 3747488 - RNA, 16 nt, Human
ggccagaugcaccagc

SEQ ID NO: 3747489 - RNA, 22 nt, Human
ggccagcaagguggaguggaug

SEQ ID NO: 3747490 - RNA, 15 nt, Human
ggccagccagccacu

SEQ ID NO: 3747491 - RNA, 12 nt, Human
ggccagccaggc

SEQ ID NO: 3747492 - RNA, 13 nt, Human
ggccagccaggcg

SEQ ID NO: 3747493 - RNA, 18 nt, Human
ggccagccccacagccca

SEQ ID NO: 3747494 - RNA, 13 nt, Human
ggccagccccacc

SEQ ID NO: 3747495 - RNA, 14 nt, Human
ggccagccccaccc

SEQ ID NO: 3747496 - RNA, 14 nt, Human
ggccagccccucca

SEQ ID NO: 3747497 - RNA, 16 nt, Human
ggccagccccucccac

SEQ ID NO: 3747498 - RNA, 15 nt, Human
ggccagccccuuaga

SEQ ID NO: 3747499 - RNA, 15 nt, Human
ggccagcccuggagg

SEQ ID NO: 3747500 - RNA, 21 nt, Human
ggccagccgcgcaucagacug

SEQ ID NO: 3747501 - RNA, 13 nt, Human
ggccagccgcucu

SEQ ID NO: 3747502 - RNA, 21 nt, Human
ggccagccgcucuccugccac

SEQ ID NO: 3747503 - RNA, 22 nt, Human
ggccagccuccgagagggagag

SEQ ID NO: 3747504 - RNA, 15 nt, Human
ggccagccuggccuc

SEQ ID NO: 3747505 - RNA, 16 nt, Human
ggccagccuggccucc

SEQ ID NO: 3747506 - RNA, 19 nt, Human
ggccagccuggccuccugc

SEQ ID NO: 3747507 - RNA, 22 nt, Human
ggccagccuggccuccugccuc

SEQ ID NO: 3747508 - RNA, 15 nt, Human
ggccagccuggggcc

SEQ ID NO: 3747509 - RNA, 12 nt, Human
ggccagcuccgc

SEQ ID NO: 3747510 - RNA, 17 nt, Human
ggccagcugcuugggcu

SEQ ID NO: 3747511 - RNA, 14 nt, Human
ggccagcuggcagc

SEQ ID NO: 3747512 - RNA, 20 nt, Human
ggccagcugggaucugacug

SEQ ID NO: 3747513 - RNA, 19 nt, Human
ggccaggaaguagcacagg

SEQ ID NO: 3747514 - RNA, 21 nt, Human
ggccaggaaguagcacaggcu

SEQ ID NO: 3747515 - RNA, 15 nt, Human
ggccaggacaggccc

SEQ ID NO: 3747516 - RNA, 15 nt, Human
ggccaggacucugca

SEQ ID NO: 3747517 - RNA, 21 nt, Human
ggccaggacucugcagccuca

SEQ ID NO: 3747518 - RNA, 13 nt, Human
ggccaggagcagg

SEQ ID NO: 3747519 - RNA, 13 nt, Human
ggccaggaggugc

SEQ ID NO: 3747520 - RNA, 23 nt, Human
ggccaggaguuuaagaccagccu

SEQ ID NO: 3747521 - RNA, 20 nt, Human
ggccaggcaggagcccuucu

SEQ ID NO: 3747522 - RNA, 19 nt, Human
ggccaggcauguggcaggg

SEQ ID NO: 3747523 - RNA, 15 nt, Human
ggccaggccaccagg

SEQ ID NO: 3747524 - RNA, 16 nt, Human
ggccaggccaccagga

SEQ ID NO: 3747525 - RNA, 17 nt, Human
ggccaggccaccaggau

SEQ ID NO: 3747526 - RNA, 21 nt, Human
ggccaggccaccuccagaaac

SEQ ID NO: 3747527 - RNA, 15 nt, Human
ggccaggccagcugc

SEQ ID NO: 3747528 - RNA, 17 nt, Human
ggccaggcccucugccc

SEQ ID NO: 3747529 - RNA, 18 nt, Human
ggccaggcuggucucaaa

SEQ ID NO: 3747530 - RNA, 18 nt, Human
ggccaggcuugucucgaa

SEQ ID NO: 3747531 - RNA, 23 nt, Human
ggccagggccccucacccugccu

SEQ ID NO: 3747532 - RNA, 13 nt, Human
ggccagggcccug

SEQ ID NO: 3747533 - RNA, 20 nt, Human
ggccagggcugcccugagaa

SEQ ID NO: 3747534 - RNA, 23 nt, Human
ggccagggucacugaaggccugg

SEQ ID NO: 3747535 - RNA, 11 nt, Human
ggccaggucac

SEQ ID NO: 3747536 - RNA, 14 nt, Human
ggccaggugcagug

SEQ ID NO: 3747537 - RNA, 16 nt, Human
ggccaggugccuccug

SEQ ID NO: 3747538 - RNA, 17 nt, Human
ggccagguuucugccca

SEQ ID NO: 3747539 - RNA, 21 nt, Human
ggccaguaucuauauaugugu

SEQ ID NO: 3747540 - RNA, 15 nt, Human
ggccaguccaggcug

SEQ ID NO: 3747541 - RNA, 23 nt, Human
ggccagucccugaggcagguccc

SEQ ID NO: 3747542 - RNA, 19 nt, Human
ggccaguccugccuggcca

SEQ ID NO: 3747543 - RNA, 23 nt, Human
ggccagucuguggaucagagaug

SEQ ID NO: 3747544 - RNA, 22 nt, Human
ggccagugcaguuugguguguc

SEQ ID NO: 3747545 - RNA, 20 nt, Human
ggccagugcccugaucccag

SEQ ID NO: 3747546 - RNA, 21 nt, Human
ggccagugcccugaucccaga

SEQ ID NO: 3747547 - RNA, 13 nt, Human
ggccagugcucca

SEQ ID NO: 3747548 - RNA, 14 nt, Human
ggccaguggcggaa

SEQ ID NO: 3747549 - RNA, 24 nt, Human
ggacuggguuuggaccccagcugg

SEQ ID NO: 3747550 - RNA, 11 nt, Human
ggacuggugcc

SEQ ID NO: 3747551 - RNA, 14 nt, Human
ggacugguuugaga

SEQ ID NO: 3747552 - RNA, 18 nt, Human
ggacuguagggagggcgg

SEQ ID NO: 3747553 - RNA, 20 nt, Human
ggacugugauuugaauccag

SEQ ID NO: 3747554 - RNA, 19 nt, Human
ggacuguggcacuugccug

SEQ ID NO: 3747555 - RNA, 22 nt, Human
ggacuguggguuugugggggga

SEQ ID NO: 3747556 - RNA, 14 nt, Human
ggacuguucuuuug

SEQ ID NO: 3747557 - RNA, 13 nt, Human
ggacuguuucaaa

SEQ ID NO: 3747558 - RNA, 19 nt, Human
ggacuuagaaaaccagcuc

SEQ ID NO: 3747559 - RNA, 23 nt, Human
ggacuuagaaaaccagcucagca

SEQ ID NO: 3747560 - RNA, 18 nt, Human
ggacuuagaaagcagggg

SEQ ID NO: 3747561 - RNA, 17 nt, Human
ggacuuagcugggagaa

SEQ ID NO: 3747562 - RNA, 19 nt, Human
ggacuuauuacaauuuguu

SEQ ID NO: 3747563 - RNA, 11 nt, Human
ggacuuccuga

SEQ ID NO: 3747564 - RNA, 23 nt, Human
ggacuuccuguccagcuccaacc

SEQ ID NO: 3747565 - RNA, 18 nt, Human
ggacuuccuugcucuccc

SEQ ID NO: 3747566 - RNA, 16 nt, Human
ggacuucggaccgcuu

SEQ ID NO: 3747567 - RNA, 23 nt, Human
ggacuucggaccgcuugugggga

SEQ ID NO: 3747568 - RNA, 14 nt, Human
ggacuucuggggua

SEQ ID NO: 3747569 - RNA, 18 nt, Human
ggacuucuuuaauuuugg

SEQ ID NO: 3747570 - RNA, 21 nt, Human
ggacuucuuuaauuuuggaau

SEQ ID NO: 3747571 - RNA, 15 nt, Human
ggacuugaacccagg

SEQ ID NO: 3747572 - RNA, 19 nt, Human
ggacuugcaaaaaggguca

SEQ ID NO: 3747573 - RNA, 14 nt, Human
ggacuuggaagcuc

SEQ ID NO: 3747574 - RNA, 13 nt, Human
ggacuuggccucu

SEQ ID NO: 3747575 - RNA, 14 nt, Human
ggacuuguauauuu

SEQ ID NO: 3747576 - RNA, 15 nt, Human
ggacuuguauauuug

SEQ ID NO: 3747577 - RNA, 15 nt, Human
ggacuuguuagaucu

SEQ ID NO: 3747578 - RNA, 20 nt, Human
ggacuuuauagaucagccag

SEQ ID NO: 3747579 - RNA, 22 nt, Human
ggacuuucaaaauuaaaucugu

SEQ ID NO: 3747580 - RNA, 17 nt, Human
ggacuuuccacccccuc

SEQ ID NO: 3747581 - RNA, 20 nt, Human
ggacuuuccacccccucccu

SEQ ID NO: 3747582 - RNA, 21 nt, Human
ggacuuuccacccccucccug

SEQ ID NO: 3747583 - RNA, 22 nt, Human
ggacuuugcagccggcacaggg

SEQ ID NO: 3747584 - RNA, 19 nt, Human
ggacuuuguauacuuuaaa

SEQ ID NO: 3747585 - RNA, 12 nt, Human
ggacuuuguuac

SEQ ID NO: 3747586 - RNA, 19 nt, Human
ggagaaaauggacguguua

SEQ ID NO: 3747587 - RNA, 13 nt, Human
ggagaaacagaga

SEQ ID NO: 3747588 - RNA, 15 nt, Human
ggagaaacagagaca

SEQ ID NO: 3747589 - RNA, 19 nt, Human
ggagaaacccuugaaaaga

SEQ ID NO: 3747590 - RNA, 15 nt, Human
ggagaaagcugacuu

SEQ ID NO: 3747591 - RNA, 14 nt, Human
ggagaaauugacag

SEQ ID NO: 3747592 - RNA, 11 nt, Human
ggagaacaaau

SEQ ID NO: 3747593 - RNA, 22 nt, Human
ggagaaccaaaaagaggcuaug

SEQ ID NO: 3747594 - RNA, 20 nt, Human
ggagaaccaaaucuggaagc

SEQ ID NO: 3747595 - RNA, 13 nt, Human
ggagaaccaccua

SEQ ID NO: 3747596 - RNA, 13 nt, Human
ggagaacuagaga

SEQ ID NO: 3747597 - RNA, 21 nt, Human
ggagaacuccuaggguggcug

SEQ ID NO: 3747598 - RNA, 12 nt, Human
ggagaagaaaau

SEQ ID NO: 3747599 - RNA, 20 nt, Human
ggagaagaaagaggugaccc

SEQ ID NO: 3747600 - RNA, 14 nt, Human
ggagaagagaggag

SEQ ID NO: 3747601 - RNA, 18 nt, Human
ggagaagcaugaaaaagc

SEQ ID NO: 3747602 - RNA, 20 nt, Human
ggagaagccacaggccugag

SEQ ID NO: 3747603 - RNA, 11 nt, Human
ggagaagccau

SEQ ID NO: 3747604 - RNA, 12 nt, Human
ggagaagccauu

SEQ ID NO: 3747605 - RNA, 16 nt, Human
ggagaagccauugucu

SEQ ID NO: 3747606 - RNA, 18 nt, Human
ggagaagcccgugugaga

SEQ ID NO: 3747607 - RNA, 17 nt, Human
ggagaagcggcuggcag

SEQ ID NO: 3747608 - RNA, 19 nt, Human
ggagaagcuccucucccca

SEQ ID NO: 3747609 - RNA, 13 nt, Human
ggagaagcugaug

SEQ ID NO: 3747610 - RNA, 12 nt, Human
ggagaagcugca

SEQ ID NO: 3747611 - RNA, 12 nt, Human
ggagaaggaucu

SEQ ID NO: 3747612 - RNA, 14 nt, Human
ggagaagggaugga

SEQ ID NO: 3747613 - RNA, 13 nt, Human
ggagaagucucag

SEQ ID NO: 3747614 - RNA, 15 nt, Human
ggagaaucaucagga

SEQ ID NO: 3747615 - RNA, 17 nt, Human
ggagaaucaucaggacc

SEQ ID NO: 3747616 - RNA, 14 nt, Human
ggagaaucauguga

SEQ ID NO: 3747617 - RNA, 22 nt, Human
ggagaaugucaguauguggaag

SEQ ID NO: 3747618 - RNA, 22 nt, Human
ggagaauuuagguuuuuauuag

SEQ ID NO: 3747619 - RNA, 15 nt, Human
ggagacaaaagagca

SEQ ID NO: 3747620 - RNA, 18 nt, Human
ggagacaagaaaucccug

SEQ ID NO: 3747621 - RNA, 21 nt, Human
ggagacaaugucugcagcccu

SEQ ID NO: 3747622 - RNA, 21 nt, Human
ggagacacaacaacuccuagg

SEQ ID NO: 3747623 - RNA, 12 nt, Human
ggagacacagau

SEQ ID NO: 3747624 - RNA, 14 nt, Human
ggagacaccucaga

SEQ ID NO: 3747625 - RNA, 15 nt, Human
ggagacagccccaga

SEQ ID NO: 3747626 - RNA, 19 nt, Human
ggagacagccccagagcag

SEQ ID NO: 3747627 - RNA, 23 nt, Human
ggagacagccccagagcagggug

SEQ ID NO: 3747628 - RNA, 11 nt, Human
ggagacagggu

SEQ ID NO: 3747629 - RNA, 14 nt, Human
ggagacaugugaca

SEQ ID NO: 3747630 - RNA, 19 nt, Human
ggagacaugugacauuuau

SEQ ID NO: 3747631 - RNA, 17 nt, Human
ggagaccaaggcgggag

SEQ ID NO: 3747632 - RNA, 22 nt, Human
ggagacccugcaaacagaacag

SEQ ID NO: 3747633 - RNA, 23 nt, Human
ggagacccugcaaacagaacagg

SEQ ID NO: 3747634 - RNA, 17 nt, Human
ggagaccggccugccag

SEQ ID NO: 3747635 - RNA, 22 nt, Human
ggagaccggccugccaggagga

SEQ ID NO: 3747636 - RNA, 21 nt, Human
ggagaccuggacacaggccug

SEQ ID NO: 3747637 - RNA, 19 nt, Human
ggagacguggaaccucugu

SEQ ID NO: 3747638 - RNA, 23 nt, Human
ggagacguggaaccucugucuca

SEQ ID NO: 3747639 - RNA, 22 nt, Human
ggagacguuuauaaacagaaau

SEQ ID NO: 3747640 - RNA, 10 nt, Human
ggagacuaga

SEQ ID NO: 3747641 - RNA, 16 nt, Human
ggagacucaccucugc

SEQ ID NO: 3747642 - RNA, 19 nt, Human
ggagacucaccucugccuc

SEQ ID NO: 3747643 - RNA, 18 nt, Human
ggagacuccaugagaagc

SEQ ID NO: 3747644 - RNA, 16 nt, Human
ggagacuccuaggcag

SEQ ID NO: 3747645 - RNA, 18 nt, Human
ggagacuccuaggcagga

SEQ ID NO: 3747646 - RNA, 12 nt, Human
ggagacuccugc

SEQ ID NO: 3747647 - RNA, 17 nt, Human
ggagacuccugcccugu

SEQ ID NO: 3747648 - RNA, 20 nt, Human
ggagacucuguggggccuug

SEQ ID NO: 3747649 - RNA, 15 nt, Human
ggagacugcccagcu

SEQ ID NO: 3747650 - RNA, 19 nt, Human
ggagacugcuccugagccc

SEQ ID NO: 3747651 - RNA, 15 nt, Human
ggagacuggggggcu

SEQ ID NO: 3747652 - RNA, 18 nt, Human
ggagacuggggggcuuga

SEQ ID NO: 3747653 - RNA, 16 nt, Human
ggagacugucucaaga

SEQ ID NO: 3747654 - RNA, 19 nt, Human
ggagacugucuggcccccc

SEQ ID NO: 3747655 - RNA, 18 nt, Human
ggagacugugugugcccu

SEQ ID NO: 3747656 - RNA, 22 nt, Human
ggagacuuagggcaccaggggu

SEQ ID NO: 3747657 - RNA, 12 nt, Human
ggagagaaaaca

SEQ ID NO: 3747658 - RNA, 18 nt, Human
ggagagaaacaauaaaga

SEQ ID NO: 3747659 - RNA, 12 nt, Human
ggagagaagaau

SEQ ID NO: 3747660 - RNA, 17 nt, Human
ggagagacacugguggg

SEQ ID NO: 3747661 - RNA, 15 nt, Human
ggagagaccucauca

SEQ ID NO: 3747662 - RNA, 19 nt, Human
ggagagacucccaugaagc

SEQ ID NO: 3747663 - RNA, 12 nt, Human
ggagagagaaag

SEQ ID NO: 3747664 - RNA, 20 nt, Human
ggagagagaaagccaggcag

SEQ ID NO: 3747665 - RNA, 19 nt, Human
ggagagagagagagagagg

SEQ ID NO: 3747666 - RNA, 10 nt, Human
ggagagaggc

SEQ ID NO: 3747667 - RNA, 12 nt, Human
ggagagagggga

SEQ ID NO: 3747668 - RNA, 21 nt, Human
ggagagaggggaauaauagaa

SEQ ID NO: 3747669 - RNA, 17 nt, Human
ggagagaguugaaccua

SEQ ID NO: 3747670 - RNA, 11 nt, Human
ggagagcagcg

SEQ ID NO: 3747671 - RNA, 20 nt, Human
ggagagcaucggccuagggc

SEQ ID NO: 3747672 - RNA, 16 nt, Human
ggagagccagaaccug

SEQ ID NO: 3747673 - RNA, 14 nt, Human
ggagagccagagaa

SEQ ID NO: 3747674 - RNA, 11 nt, Human
ggagagccagc

SEQ ID NO: 3747675 - RNA, 15 nt, Human
ggagagccagcccuc

SEQ ID NO: 3747676 - RNA, 21 nt, Human
ggagagcccaggagcuccccu

SEQ ID NO: 3747677 - RNA, 11 nt, Human
ggagagcccug

SEQ ID NO: 3747678 - RNA, 13 nt, Human
ggagagcccuggg

SEQ ID NO: 3747679 - RNA, 14 nt, Human
ggagagcccuggga

SEQ ID NO: 3747680 - RNA, 13 nt, Human
ggagagccugcug

SEQ ID NO: 3747681 - RNA, 16 nt, Human
ggagagccuuccaggg

SEQ ID NO: 3747682 - RNA, 20 nt, Human
ggagagcgccugccccuccc

SEQ ID NO: 3747683 - RNA, 16 nt, Human
ggagagcuagaaccug

SEQ ID NO: 3747684 - RNA, 17 nt, Human
ggagagcuagcagcagg

SEQ ID NO: 3747685 - RNA, 21 nt, Human
ggagagcuagcagcagggagg

SEQ ID NO: 3747686 - RNA, 13 nt, Human
ggagagcuaggag

SEQ ID NO: 3747687 - RNA, 14 nt, Human
ggagagcuaggagc

SEQ ID NO: 3747688 - RNA, 13 nt, Human
ggagagcuggagc

SEQ ID NO: 3747689 - RNA, 22 nt, Human
ggagagcuggagccuggugccc

SEQ ID NO: 3747690 - RNA, 19 nt, Human
ggagagcuuagggucucag

SEQ ID NO: 3747691 - RNA, 12 nt, Human
ggagaggagaga

SEQ ID NO: 3747692 - RNA, 18 nt, Human
ggagaggagagaggcaga

SEQ ID NO: 3747693 - RNA, 20 nt, Human
ggagaggagugacugagcuu

SEQ ID NO: 3747694 - RNA, 14 nt, Human
ggagaggaguguga

SEQ ID NO: 3747695 - RNA, 22 nt, Human
ggagaggaugagagcccagagg

SEQ ID NO: 3747696 - RNA, 17 nt, Human
ggagaggccccagccgc

SEQ ID NO: 3747697 - RNA, 21 nt, Human
ggagaggcuagaaccaagaag

SEQ ID NO: 3747698 - RNA, 24 nt, Human
ggagagggaugaggugcugggagg

SEQ ID NO: 3747699 - RNA, 13 nt, Human
ggagagggcgcag

SEQ ID NO: 3747700 - RNA, 19 nt, Human
cuuuuaucacgauauuauu

SEQ ID NO: 3747701 - RNA, 13 nt, Human
cuuuuaucucaga

SEQ ID NO: 3747702 - RNA, 14 nt, Human
cuuuuaugagcuca

SEQ ID NO: 3747703 - RNA, 18 nt, Human
cuuuuaugauguauauuu

SEQ ID NO: 3747704 - RNA, 22 nt, Human
cuuuuaugauugccuuuuuaua

SEQ ID NO: 3747705 - RNA, 21 nt, Human
cuuuuaugcagauagaaucaa

SEQ ID NO: 3747706 - RNA, 15 nt, Human
cuuuuauguaguaau

SEQ ID NO: 3747707 - RNA, 22 nt, Human
cuuuuauguaguaauugacaug

SEQ ID NO: 3747708 - RNA, 14 nt, Human
cuuuuaugugaaac

SEQ ID NO: 3747709 - RNA, 20 nt, Human
cuuuuauguuauuuauauau

SEQ ID NO: 3747710 - RNA, 13 nt, Human
cuuuuauguuuga

SEQ ID NO: 3747711 - RNA, 15 nt, Human
cuuuuauguuugaau

SEQ ID NO: 3747712 - RNA, 19 nt, Human
cuuuuauuaaugcacuuuc

SEQ ID NO: 3747713 - RNA, 19 nt, Human
cuuuuauuguauaaacuau

SEQ ID NO: 3747714 - RNA, 13 nt, Human
cuuuuauugucag

SEQ ID NO: 3747715 - RNA, 19 nt, Human
cuuuuauuugcaacauuua

SEQ ID NO: 3747716 - RNA, 20 nt, Human
cuuuuauuuuacacagaaac

SEQ ID NO: 3747717 - RNA, 19 nt, Human
cuuuuauuuugaaaagcuu

SEQ ID NO: 3747718 - RNA, 18 nt, Human
cuuuucaaacaagaaugu

SEQ ID NO: 3747719 - RNA, 16 nt, Human
cuuuucaaggcuuaua

SEQ ID NO: 3747720 - RNA, 14 nt, Human
cuuuucaaguauuu

SEQ ID NO: 3747721 - RNA, 18 nt, Human
cuuuucaauauauuugua

SEQ ID NO: 3747722 - RNA, 15 nt, Human
cuuuucaaugacauu

SEQ ID NO: 3747723 - RNA, 13 nt, Human
cuuuucacaaaua

SEQ ID NO: 3747724 - RNA, 21 nt, Human
cuuuucacauccauuuccccu

SEQ ID NO: 3747725 - RNA, 17 nt, Human
cuuuucacauucuuaua

SEQ ID NO: 3747726 - RNA, 19 nt, Human
cuuuucaccuccuucaauu

SEQ ID NO: 3747727 - RNA, 12 nt, Human
cuuuucaccuuu

SEQ ID NO: 3747728 - RNA, 23 nt, Human
cuuuucagcgauguaugcagcua

SEQ ID NO: 3747729 - RNA, 19 nt, Human
cuuuucagcuucugcuggg

SEQ ID NO: 3747730 - RNA, 16 nt, Human
cuuuucagggcuggcu

SEQ ID NO: 3747731 - RNA, 18 nt, Human
cuuuucauauuugcacua

SEQ ID NO: 3747732 - RNA, 13 nt, Human
cuuuucaucuggg

SEQ ID NO: 3747733 - RNA, 17 nt, Human
cuuuucaucugggaaag

SEQ ID NO: 3747734 - RNA, 19 nt, Human
cuuuucaugcaaacucuuu

SEQ ID NO: 3747735 - RNA, 15 nt, Human
cuuuucauucucauu

SEQ ID NO: 3747736 - RNA, 13 nt, Human
cuuuuccaacccu

SEQ ID NO: 3747737 - RNA, 13 nt, Human
cuuuucccacucc

SEQ ID NO: 3747738 - RNA, 19 nt, Human
cuuuucccccauuaaucag

SEQ ID NO: 3747739 - RNA, 23 nt, Human
cuuuucccccauuaaucaguuca

SEQ ID NO: 3747740 - RNA, 20 nt, Human
cuuuuccccuuuccuguccc

SEQ ID NO: 3747741 - RNA, 21 nt, Human
cuuuuccccuuuccuguccca

SEQ ID NO: 3747742 - RNA, 22 nt, Human
cuuuuccccuuuccugucccac

SEQ ID NO: 3747743 - RNA, 22 nt, Human
cuuuucccucuuuggcuccccu

SEQ ID NO: 3747744 - RNA, 16 nt, Human
cuuuucccucuuuucu

SEQ ID NO: 3747745 - RNA, 15 nt, Human
cuuuucccugcuucc

SEQ ID NO: 3747746 - RNA, 18 nt, Human
cuuuucccugcuuccagg

SEQ ID NO: 3747747 - RNA, 19 nt, Human
cuuuucccuuugugaguca

SEQ ID NO: 3747748 - RNA, 20 nt, Human
cuuuuccuauuuucagccca

SEQ ID NO: 3747749 - RNA, 16 nt, Human
cuuuuccucgcuucuu

SEQ ID NO: 3747750 - RNA, 17 nt, Human
cuuuuccucgcuucuuu

SEQ ID NO: 3747751 - RNA, 16 nt, Human
cuuuuccucucucccg

SEQ ID NO: 3747752 - RNA, 15 nt, Human
cuuuuccuucccaaa

SEQ ID NO: 3747753 - RNA, 15 nt, Human
cuuuuccuugcauac

SEQ ID NO: 3747754 - RNA, 20 nt, Human
cuuuucgcaggauucuuccu

SEQ ID NO: 3747755 - RNA, 21 nt, Human
cuuuucgcaggauucuuccuc

SEQ ID NO: 3747756 - RNA, 15 nt, Human
cuuuucgccuuuccu

SEQ ID NO: 3747757 - RNA, 16 nt, Human
cuuuucguuaacauug

SEQ ID NO: 3747758 - RNA, 18 nt, Human
cuuuucuaaaagacuucc

SEQ ID NO: 3747759 - RNA, 23 nt, Human
cuuuucuaaacuaggcuccuuca

SEQ ID NO: 3747760 - RNA, 20 nt, Human
cuuuucuaacagaaagcaug

SEQ ID NO: 3747761 - RNA, 22 nt, Human
cuuuucuaaccaagaggcuggu

SEQ ID NO: 3747762 - RNA, 17 nt, Human
cuuuucuacagcaaauu

SEQ ID NO: 3747763 - RNA, 19 nt, Human
cuuuucuacagcaaauuua

SEQ ID NO: 3747764 - RNA, 20 nt, Human
cuuuucuacagcaaauuuau

SEQ ID NO: 3747765 - RNA, 22 nt, Human
cuuuucuacccuagccauuccu

SEQ ID NO: 3747766 - RNA, 20 nt, Human
cuuuucuauuuucccucgcu

SEQ ID NO: 3747767 - RNA, 18 nt, Human
cuuuucucauguguuugc

SEQ ID NO: 3747768 - RNA, 17 nt, Human
cuuuucuccaauaucag

SEQ ID NO: 3747769 - RNA, 17 nt, Human
cuuuucuccucacugua

SEQ ID NO: 3747770 - RNA, 12 nt, Human
cuuuucucugcc

SEQ ID NO: 3747771 - RNA, 16 nt, Human
cuuuucucuuuuuagu

SEQ ID NO: 3747772 - RNA, 11 nt, Human
cuuuucugaua

SEQ ID NO: 3747773 - RNA, 12 nt, Human
cuuuucugcaga

SEQ ID NO: 3747774 - RNA, 15 nt, Human
cuuuucugcagaggg

SEQ ID NO: 3747775 - RNA, 23 nt, Human
cuuuucugcaucaucuguagaua

SEQ ID NO: 3747776 - RNA, 13 nt, Human
cuuuucugcccug

SEQ ID NO: 3747777 - RNA, 14 nt, Human
cuuuucuggcaccg

SEQ ID NO: 3747778 - RNA, 15 nt, Human
cuuuucuggcaccgc

SEQ ID NO: 3747779 - RNA, 16 nt, Human
cuuuucuguaauucag

SEQ ID NO: 3747780 - RNA, 13 nt, Human
cuuuucuguauuu

SEQ ID NO: 3747781 - RNA, 12 nt, Human
cuuuucuguuuc

SEQ ID NO: 3747782 - RNA, 19 nt, Human
cuuuucuguuuccuguacc

SEQ ID NO: 3747783 - RNA, 15 nt, Human
cuuuucuuaaaccuu

SEQ ID NO: 3747784 - RNA, 13 nt, Human
cuuuucuuaacaa

SEQ ID NO: 3747785 - RNA, 17 nt, Human
cuuuucuuacuccuccu

SEQ ID NO: 3747786 - RNA, 23 nt, Human
cuuuucuuacuccuccucuuucu

SEQ ID NO: 3747787 - RNA, 17 nt, Human
cuuuucuuauuuuugua

SEQ ID NO: 3747788 - RNA, 14 nt, Human
cuuuucuuccuggc

SEQ ID NO: 3747789 - RNA, 14 nt, Human
cuuuucuucuaugu

SEQ ID NO: 3747790 - RNA, 18 nt, Human
cuuuucuucuauugccuc

SEQ ID NO: 3747791 - RNA, 19 nt, Human
cuuuucuucuauugccucu

SEQ ID NO: 3747792 - RNA, 21 nt, Human
cuuuucuugacuauuggagga

SEQ ID NO: 3747793 - RNA, 14 nt, Human
cuuuucuuggacac

SEQ ID NO: 3747794 - RNA, 22 nt, Human
cuuuucuuggcaaaagccuugu

SEQ ID NO: 3747795 - RNA, 16 nt, Human
cuuuucuuguaucugg

SEQ ID NO: 3747796 - RNA, 18 nt, Human
cuuuucuuuaaagaaguu

SEQ ID NO: 3747797 - RNA, 14 nt, Human
cuuuucuuuaacuu

SEQ ID NO: 3747798 - RNA, 22 nt, Human
cuuuucuuuagagcauugccau

SEQ ID NO: 3747799 - RNA, 17 nt, Human
cuuuucuuucagccaag

SEQ ID NO: 3747800 - RNA, 23 nt, Human
cuuuucuuugaaggaugacuaca

SEQ ID NO: 3747801 - RNA, 13 nt, Human
cuuuucuuuguau

SEQ ID NO: 3747802 - RNA, 15 nt, Human
cuuuucuuuucuaac

SEQ ID NO: 3747803 - RNA, 17 nt, Human
cuuuucuuuucuacccu

SEQ ID NO: 3747804 - RNA, 13 nt, Human
cuuuucuuuuguu

SEQ ID NO: 3747805 - RNA, 18 nt, Human
cuuuugaacccaggaguu

SEQ ID NO: 3747806 - RNA, 21 nt, Human
cuuuugaacgcccccccccac

SEQ ID NO: 3747807 - RNA, 20 nt, Human
cuuuugaaguaguuuguaua

SEQ ID NO: 3747808 - RNA, 21 nt, Human
cuuuugaauccaugcuugggu

SEQ ID NO: 3747809 - RNA, 12 nt, Human
cuuuugacacug

SEQ ID NO: 3747810 - RNA, 10 nt, Human
cuuuugaccu

SEQ ID NO: 3747811 - RNA, 18 nt, Human
cuuuugagaacuuuuggu

SEQ ID NO: 3747812 - RNA, 15 nt, Human
cuuuugagacuuuuu

SEQ ID NO: 3747813 - RNA, 15 nt, Human
cuuuugagugugugu

SEQ ID NO: 3747814 - RNA, 22 nt, Human
cuuuugauaaucaacugggcug

SEQ ID NO: 3747815 - RNA, 23 nt, Human
cuuuugauaugcauauuuguuua

SEQ ID NO: 3747816 - RNA, 16 nt, Human
cuuuugcaaccaggaa

SEQ ID NO: 3747817 - RNA, 14 nt, Human
cuuuugcaccccuc

SEQ ID NO: 3747818 - RNA, 16 nt, Human
cuuuugcaccccuccc

SEQ ID NO: 3747819 - RNA, 22 nt, Human
cuuuugcaccugcucucuugua

SEQ ID NO: 3747820 - RNA, 18 nt, Human
cuuuugcagaagagggug

SEQ ID NO: 3747821 - RNA, 15 nt, Human
cuuuugcaucauugu

SEQ ID NO: 3747822 - RNA, 20 nt, Human
cuuuugcccuucacaguguu

SEQ ID NO: 3747823 - RNA, 23 nt, Human
cuuuugcgguucaggaaaauuga

SEQ ID NO: 3747824 - RNA, 20 nt, Human
cuuuugcuugccaaaguaca

SEQ ID NO: 3747825 - RNA, 18 nt, Human
cuuuugcuuuaauuccau

SEQ ID NO: 3747826 - RNA, 14 nt, Human
cuuuugcuuuauuc

SEQ ID NO: 3747827 - RNA, 15 nt, Human
cuuuugcuuuuggca

SEQ ID NO: 3747828 - RNA, 20 nt, Human
cuuuuggaaucuagaagaaa

SEQ ID NO: 3747829 - RNA, 21 nt, Human
cuuuuggaaucuagaagaaau

SEQ ID NO: 3747830 - RNA, 22 nt, Human
cuuuuggaaucuagaagaaaug

SEQ ID NO: 3747831 - RNA, 23 nt, Human
cuuuuggaaucuagaagaaauga

SEQ ID NO: 3747832 - RNA, 18 nt, Human
cuuuuggauuggacaaaa

SEQ ID NO: 3747833 - RNA, 15 nt, Human
cuuuuggcacugaga

SEQ ID NO: 3747834 - RNA, 15 nt, Human
cuuuuggcauuuuac

SEQ ID NO: 3747835 - RNA, 20 nt, Human
cuuuuggcccccgagcuggg

SEQ ID NO: 3747836 - RNA, 17 nt, Human
cuuuuggcggggaggag

SEQ ID NO: 3747837 - RNA, 15 nt, Human
cuuuugggggagggc

SEQ ID NO: 3747838 - RNA, 17 nt, Human
cuuuuggguuucugccc

SEQ ID NO: 3747839 - RNA, 21 nt, Human
cuuuugguaaagacuggcuuu

SEQ ID NO: 3747840 - RNA, 18 nt, Human
cuuuugguguguuggaca

SEQ ID NO: 3747841 - RNA, 20 nt, Human
cuuuugguuaagucuguuuu

SEQ ID NO: 3747842 - RNA, 22 nt, Human
cuuuuguaaagaaauuuacuau

SEQ ID NO: 3747843 - RNA, 23 nt, Human
cuuuuguaaagaaauuuacuaua

SEQ ID NO: 3747844 - RNA, 14 nt, Human
cuuuuguaaauaca

SEQ ID NO: 3747845 - RNA, 15 nt, Human
cuuuuguaaauuaaa

SEQ ID NO: 3747846 - RNA, 14 nt, Human
cuuuuguaauaaac

SEQ ID NO: 3747847 - RNA, 17 nt, Human
cuuuuguacugaauuuu

SEQ ID NO: 3747848 - RNA, 19 nt, Human
cuuuuguagaagucacauu

SEQ ID NO: 3747849 - RNA, 15 nt, Human
ggccaguggggccug

SEQ ID NO: 3747850 - RNA, 18 nt, Human
ggccaguggggccugugg

SEQ ID NO: 3747851 - RNA, 23 nt, Human
ggccagugucugucccggggucc

SEQ ID NO: 3747852 - RNA, 14 nt, Human
ggccaguugguccc

SEQ ID NO: 3747853 - RNA, 13 nt, Human
ggccauaagcaac

SEQ ID NO: 3747854 - RNA, 23 nt, Human
ggccauaagcaacaauuuucaga

SEQ ID NO: 3747855 - RNA, 17 nt, Human
ggccauagcuccugcuc

SEQ ID NO: 3747856 - RNA, 21 nt, Human
ggccauauuuaccucagccug

SEQ ID NO: 3747857 - RNA, 14 nt, Human
ggccaucccacaag

SEQ ID NO: 3747858 - RNA, 19 nt, Human
ggccauccggcccccagag

SEQ ID NO: 3747859 - RNA, 14 nt, Human
ggccaucgguccug

SEQ ID NO: 3747860 - RNA, 22 nt, Human
ggccaucgguccugucuccccu

SEQ ID NO: 3747861 - RNA, 18 nt, Human
ggccaucuccacccccag

SEQ ID NO: 3747862 - RNA, 14 nt, Human
ggccaucugcuccu

SEQ ID NO: 3747863 - RNA, 14 nt, Human
ggccaucuggagag

SEQ ID NO: 3747864 - RNA, 22 nt, Human
ggccaucugguuaggauggcag

SEQ ID NO: 3747865 - RNA, 17 nt, Human
ggccaucuuccaggugg

SEQ ID NO: 3747866 - RNA, 18 nt, Human
ggccaucuuccagguggg

SEQ ID NO: 3747867 - RNA, 22 nt, Human
ggccaucuuccaggugggguga

SEQ ID NO: 3747868 - RNA, 23 nt, Human
ggccaugaccacuuuccccgugg

SEQ ID NO: 3747869 - RNA, 17 nt, Human
ggccaugacccugccuc

SEQ ID NO: 3747870 - RNA, 16 nt, Human
ggccaugagcuccaga

SEQ ID NO: 3747871 - RNA, 21 nt, Human
ggccaugagcuccagaccccc

SEQ ID NO: 3747872 - RNA, 21 nt, Human
ggccaugaggccucaguggac

SEQ ID NO: 3747873 - RNA, 15 nt, Human
ggccaugaguaaaau

SEQ ID NO: 3747874 - RNA, 22 nt, Human
ggccaugauggcaacagaucug

SEQ ID NO: 3747875 - RNA, 19 nt, Human
ggccaugcaauucauccca

SEQ ID NO: 3747876 - RNA, 21 nt, Human
ggccaugccuccucaggagcc

SEQ ID NO: 3747877 - RNA, 22 nt, Human
ggccaugcuccucuuccccaga

SEQ ID NO: 3747878 - RNA, 14 nt, Human
ggccaugcugaggc

SEQ ID NO: 3747879 - RNA, 15 nt, Human
ggccaugcugaggcc

SEQ ID NO: 3747880 - RNA, 18 nt, Human
ggccaugcugaggccugg

SEQ ID NO: 3747881 - RNA, 19 nt, Human
ggccaugcugaggccuggg

SEQ ID NO: 3747882 - RNA, 17 nt, Human
ggccauggacucugucc

SEQ ID NO: 3747883 - RNA, 18 nt, Human
ggccauggacucuguccu

SEQ ID NO: 3747884 - RNA, 15 nt, Human
ggccauggagaaagc

SEQ ID NO: 3747885 - RNA, 14 nt, Human
ggccauggagagcu

SEQ ID NO: 3747886 - RNA, 23 nt, Human
ggccauguccaaagaggcugccc

SEQ ID NO: 3747887 - RNA, 17 nt, Human
ggccauguuccaauaaa

SEQ ID NO: 3747888 - RNA, 14 nt, Human
ggccauuaggaaac

SEQ ID NO: 3747889 - RNA, 17 nt, Human
ggccauuaggaaacugu

SEQ ID NO: 3747890 - RNA, 20 nt, Human
ggccauucuauuguggcaag

SEQ ID NO: 3747891 - RNA, 20 nt, Human
ggccauucuccacagcaacc

SEQ ID NO: 3747892 - RNA, 14 nt, Human
ggccauucugccgc

SEQ ID NO: 3747893 - RNA, 21 nt, Human
ggccauucuuuuuuucuuggc

SEQ ID NO: 3747894 - RNA, 22 nt, Human
ggccauuugcaauaacagcugc

SEQ ID NO: 3747895 - RNA, 23 nt, Human
ggccauuugcaauaacagcugca

SEQ ID NO: 3747896 - RNA, 22 nt, Human
ggcccaagagucuggggaccag

SEQ ID NO: 3747897 - RNA, 17 nt, Human
ggcccaaggcggccccu

SEQ ID NO: 3747898 - RNA, 22 nt, Human
ggcccaagucccuguuuucuga

SEQ ID NO: 3747899 - RNA, 12 nt, Human
ggcccacacaca

SEQ ID NO: 3747900 - RNA, 13 nt, Human
ggcccacagcucc

SEQ ID NO: 3747901 - RNA, 17 nt, Human
ggcccacagcucccacc

SEQ ID NO: 3747902 - RNA, 18 nt, Human
ggcccacagcucccaccc

SEQ ID NO: 3747903 - RNA, 18 nt, Human
ggcccacaggaggcaagc

SEQ ID NO: 3747904 - RNA, 20 nt, Human
ggcccacagggaacccugcu

SEQ ID NO: 3747905 - RNA, 18 nt, Human
ggcccaccaggccccccu

SEQ ID NO: 3747906 - RNA, 19 nt, Human
ggcccaccccacccacuuc

SEQ ID NO: 3747907 - RNA, 22 nt, Human
ggcccaccccacccacuucugc

SEQ ID NO: 3747908 - RNA, 23 nt, Human
ggcccaccccacccacuucugca

SEQ ID NO: 3747909 - RNA, 18 nt, Human
ggcccacccggugggacc

SEQ ID NO: 3747910 - RNA, 20 nt, Human
ggcccacccggugggacccc

SEQ ID NO: 3747911 - RNA, 21 nt, Human
ggcccacccgguucaguguuu

SEQ ID NO: 3747912 - RNA, 22 nt, Human
ggcccaccuaccuucaaagcug

SEQ ID NO: 3747913 - RNA, 19 nt, Human
ggcccaccuggccaccuga

SEQ ID NO: 3747914 - RNA, 22 nt, Human
ggcccaccuggccaccugaggu

SEQ ID NO: 3747915 - RNA, 14 nt, Human
ggcccacugcaucg

SEQ ID NO: 3747916 - RNA, 15 nt, Human
ggcccagagaagcca

SEQ ID NO: 3747917 - RNA, 18 nt, Human
ggcccagagagaagagcc

SEQ ID NO: 3747918 - RNA, 12 nt, Human
ggcccagagagg

SEQ ID NO: 3747919 - RNA, 14 nt, Human
ggcccagagcagga

SEQ ID NO: 3747920 - RNA, 16 nt, Human
ggcccagagcaggaag

SEQ ID NO: 3747921 - RNA, 15 nt, Human
ggcccagagcccagc

SEQ ID NO: 3747922 - RNA, 19 nt, Human
ggcccagagcccagcucca

SEQ ID NO: 3747923 - RNA, 17 nt, Human
ggcccagaggcacagcc

SEQ ID NO: 3747924 - RNA, 20 nt, Human
ggcccagagggccugcaagg

SEQ ID NO: 3747925 - RNA, 22 nt, Human
ggcccagaucuggucccuugca

SEQ ID NO: 3747926 - RNA, 15 nt, Human
ggcccagcauugcug

SEQ ID NO: 3747927 - RNA, 21 nt, Human
ggcccagcccccacagugcug

SEQ ID NO: 3747928 - RNA, 12 nt, Human
ggcccagcccgg

SEQ ID NO: 3747929 - RNA, 14 nt, Human
ggcccagcccugcu

SEQ ID NO: 3747930 - RNA, 17 nt, Human
ggcccagccggccucuc

SEQ ID NO: 3747931 - RNA, 19 nt, Human
ggcccagccggccucucug

SEQ ID NO: 3747932 - RNA, 20 nt, Human
ggcccagccggccucucugg

SEQ ID NO: 3747933 - RNA, 23 nt, Human
ggcccagccuuuguuccccacug

SEQ ID NO: 3747934 - RNA, 18 nt, Human
ggcccagcggccccuccc

SEQ ID NO: 3747935 - RNA, 15 nt, Human
ggcccagcucccccg

SEQ ID NO: 3747936 - RNA, 14 nt, Human
ggcccagcugggcu

SEQ ID NO: 3747937 - RNA, 17 nt, Human
ggcccagcugggcucug

SEQ ID NO: 3747938 - RNA, 16 nt, Human
ggcccaggaccagcug

SEQ ID NO: 3747939 - RNA, 17 nt, Human
ggcccaggaccagcugg

SEQ ID NO: 3747940 - RNA, 18 nt, Human
ggcccaggaccagcuggg

SEQ ID NO: 3747941 - RNA, 11 nt, Human
ggcccaggccu

SEQ ID NO: 3747942 - RNA, 16 nt, Human
ggcccagggcaucugg

SEQ ID NO: 3747943 - RNA, 14 nt, Human
ggcccagggcccag

SEQ ID NO: 3747944 - RNA, 18 nt, Human
ggcccagggcccagagcc

SEQ ID NO: 3747945 - RNA, 19 nt, Human
ggcccagggggcuuccuga

SEQ ID NO: 3747946 - RNA, 22 nt, Human
ggcccaguaccuagcuggcucu

SEQ ID NO: 3747947 - RNA, 15 nt, Human
ggcccagugcauggu

SEQ ID NO: 3747948 - RNA, 22 nt, Human
ggcccauagaaacaugacacug

SEQ ID NO: 3747949 - RNA, 24 nt, Human
ggcccauaucugugaaaugcuggc

SEQ ID NO: 3747950 - RNA, 22 nt, Human
ggcccaucaguguacccccgcc

SEQ ID NO: 3747951 - RNA, 16 nt, Human
ggcccauccccccuca

SEQ ID NO: 3747952 - RNA, 18 nt, Human
ggcccauccccccucacc

SEQ ID NO: 3747953 - RNA, 19 nt, Human
ggcccauccccccucacca

SEQ ID NO: 3747954 - RNA, 17 nt, Human
ggcccauguauggccag

SEQ ID NO: 3747955 - RNA, 21 nt, Human
ggcccauguauggccaggaag

SEQ ID NO: 3747956 - RNA, 23 nt, Human
ggcccauucuacuugcucuggac

SEQ ID NO: 3747957 - RNA, 16 nt, Human
ggccccaaaaccacag

SEQ ID NO: 3747958 - RNA, 21 nt, Human
ggccccaaaaccacagcccug

SEQ ID NO: 3747959 - RNA, 18 nt, Human
ggccccaacucgggcucc

SEQ ID NO: 3747960 - RNA, 22 nt, Human
ggccccaauaccccauggacca

SEQ ID NO: 3747961 - RNA, 15 nt, Human
ggccccaccaccuag

SEQ ID NO: 3747962 - RNA, 15 nt, Human
ggccccaccagugcc

SEQ ID NO: 3747963 - RNA, 12 nt, Human
ggccccacccuc

SEQ ID NO: 3747964 - RNA, 17 nt, Human
ggccccacccucgggga

SEQ ID NO: 3747965 - RNA, 13 nt, Human
ggccccacccugg

SEQ ID NO: 3747966 - RNA, 16 nt, Human
ggccccaccugcagcu

SEQ ID NO: 3747967 - RNA, 19 nt, Human
ggccccagaaggcagggaa

SEQ ID NO: 3747968 - RNA, 12 nt, Human
ggccccagagac

SEQ ID NO: 3747969 - RNA, 14 nt, Human
ggccccagagacuc

SEQ ID NO: 3747970 - RNA, 13 nt, Human
ggccccagcacua

SEQ ID NO: 3747971 - RNA, 16 nt, Human
ggccccagcacuaaag

SEQ ID NO: 3747972 - RNA, 13 nt, Human
ggccccagccaga

SEQ ID NO: 3747973 - RNA, 15 nt, Human
ggccccagcccaccc

SEQ ID NO: 3747974 - RNA, 16 nt, Human
ggccccagcccacccu

SEQ ID NO: 3747975 - RNA, 19 nt, Human
ggccccagcccacccuccu

SEQ ID NO: 3747976 - RNA, 14 nt, Human
ggccccagcccugc

SEQ ID NO: 3747977 - RNA, 22 nt, Human
ggccccagcccugcuggggauc

SEQ ID NO: 3747978 - RNA, 14 nt, Human
ggccccagccuggc

SEQ ID NO: 3747979 - RNA, 20 nt, Human
ggccccagccuggcccagcu

SEQ ID NO: 3747980 - RNA, 21 nt, Human
ggccccagccuggcccagcuc

SEQ ID NO: 3747981 - RNA, 14 nt, Human
ggccccaggaagcc

SEQ ID NO: 3747982 - RNA, 15 nt, Human
ggccccagucagccu

SEQ ID NO: 3747983 - RNA, 16 nt, Human
ggccccagucagccuc

SEQ ID NO: 3747984 - RNA, 16 nt, Human
ggcccccacuggcugu

SEQ ID NO: 3747985 - RNA, 17 nt, Human
ggcccccacuggcugug

SEQ ID NO: 3747986 - RNA, 18 nt, Human
ggcccccacuugccucuu

SEQ ID NO: 3747987 - RNA, 17 nt, Human
ggcccccagagcgcccc

SEQ ID NO: 3747988 - RNA, 17 nt, Human
ggcccccagcccagggc

SEQ ID NO: 3747989 - RNA, 20 nt, Human
ggcccccagcccagggcucc

SEQ ID NO: 3747990 - RNA, 12 nt, Human
ggcccccagcug

SEQ ID NO: 3747991 - RNA, 14 nt, Human
ggcccccaucucau

SEQ ID NO: 3747992 - RNA, 21 nt, Human
ggcccccaucucaugccccug

SEQ ID NO: 3747993 - RNA, 17 nt, Human
ggccccccagcucaggg

SEQ ID NO: 3747994 - RNA, 23 nt, Human
ggccccccagcucaggggcagcu

SEQ ID NO: 3747995 - RNA, 17 nt, Human
ggcccccucccuggaug

SEQ ID NO: 3747996 - RNA, 13 nt, Human
ggcccccugcccg

SEQ ID NO: 3747997 - RNA, 12 nt, Human
ggcccccugccu

SEQ ID NO: 3747998 - RNA, 18 nt, Human
ggagaggggaagggccag

SEQ ID NO: 3747999 - RNA, 18 nt, Human
ggagaggucuuuuuuaaa

SEQ ID NO: 3748000 - RNA, 23 nt, Human
ggagagguuauaggucacuccug

SEQ ID NO: 3748001 - RNA, 16 nt, Human
ggagagguugucugug

SEQ ID NO: 3748002 - RNA, 17 nt, Human
ggagagucucccaggga

SEQ ID NO: 3748003 - RNA, 21 nt, Human
ggagaguggccauucuuuuuu

SEQ ID NO: 3748004 - RNA, 12 nt, Human
ggagagugucaa

SEQ ID NO: 3748005 - RNA, 22 nt, Human
ggagauacuuggucacagccag

SEQ ID NO: 3748006 - RNA, 14 nt, Human
ggagauagggaaag

SEQ ID NO: 3748007 - RNA, 12 nt, Human
ggagauauuuaa

SEQ ID NO: 3748008 - RNA, 22 nt, Human
ggagauauuuauggggggagaa

SEQ ID NO: 3748009 - RNA, 18 nt, Human
ggagauccuuguguuuau

SEQ ID NO: 3748010 - RNA, 19 nt, Human
ggagaucggggccagaggc

SEQ ID NO: 3748011 - RNA, 20 nt, Human
ggagauggaaguugcaguga

SEQ ID NO: 3748012 - RNA, 17 nt, Human
ggagauggggagaaacc

SEQ ID NO: 3748013 - RNA, 13 nt, Human
ggagauguaagag

SEQ ID NO: 3748014 - RNA, 14 nt, Human
ggagauguaagagc

SEQ ID NO: 3748015 - RNA, 12 nt, Human
ggagauuauaau

SEQ ID NO: 3748016 - RNA, 14 nt, Human
ggagauuauaauaa

SEQ ID NO: 3748017 - RNA, 22 nt, Human
ggagauucucauaacuugagac

SEQ ID NO: 3748018 - RNA, 23 nt, Human
ggagauucucauaacuugagacc

SEQ ID NO: 3748019 - RNA, 14 nt, Human
ggagauugagaagg

SEQ ID NO: 3748020 - RNA, 17 nt, Human
ggagauugagaaggaga

SEQ ID NO: 3748021 - RNA, 21 nt, Human
ggagauugagaaggagagaaa

SEQ ID NO: 3748022 - RNA, 17 nt, Human
ggagauuuuccuuccua

SEQ ID NO: 3748023 - RNA, 19 nt, Human
ggagcaaacugcaugccca

SEQ ID NO: 3748024 - RNA, 15 nt, Human
ggagcaaagccuguu

SEQ ID NO: 3748025 - RNA, 14 nt, Human
ggagcaaaggcuga

SEQ ID NO: 3748026 - RNA, 13 nt, Human
ggagcaagggcag

SEQ ID NO: 3748027 - RNA, 21 nt, Human
ggagcaauuacggggugaccu

SEQ ID NO: 3748028 - RNA, 15 nt, Human
ggagcacaggcagcu

SEQ ID NO: 3748029 - RNA, 15 nt, Human
ggagcacagguccca

SEQ ID NO: 3748030 - RNA, 17 nt, Human
ggagcacaggucccacc

SEQ ID NO: 3748031 - RNA, 14 nt, Human
ggagcacccugagg

SEQ ID NO: 3748032 - RNA, 16 nt, Human
ggagcacccugagggc

SEQ ID NO: 3748033 - RNA, 12 nt, Human
ggagcagaacug

SEQ ID NO: 3748034 - RNA, 14 nt, Human
ggagcagaagcagc

SEQ ID NO: 3748035 - RNA, 15 nt, Human
ggagcagaccacccc

SEQ ID NO: 3748036 - RNA, 16 nt, Human
ggagcagagaaggcca

SEQ ID NO: 3748037 - RNA, 17 nt, Human
ggagcagagcucugccg

SEQ ID NO: 3748038 - RNA, 14 nt, Human
ggagcagaguguuc

SEQ ID NO: 3748039 - RNA, 12 nt, Human
ggagcagcagga

SEQ ID NO: 3748040 - RNA, 19 nt, Human
ggagcagcaggagggggga

SEQ ID NO: 3748041 - RNA, 21 nt, Human
ggagcagcaggaggggggagg

SEQ ID NO: 3748042 - RNA, 13 nt, Human
ggagcagccacau

SEQ ID NO: 3748043 - RNA, 16 nt, Human
ggagcaggcacgggug

SEQ ID NO: 3748044 - RNA, 21 nt, Human
ggagcaggcgguggggagaga

SEQ ID NO: 3748045 - RNA, 17 nt, Human
ggagcagggaaggccug

SEQ ID NO: 3748046 - RNA, 12 nt, Human
ggagcagugucu

SEQ ID NO: 3748047 - RNA, 18 nt, Human
ggagcauagaaggcaggu

SEQ ID NO: 3748048 - RNA, 16 nt, Human
ggagcaucaagccacu

SEQ ID NO: 3748049 - RNA, 17 nt, Human
ggagcaucaagccacuc

SEQ ID NO: 3748050 - RNA, 16 nt, Human
ggagcaucagugcccu

SEQ ID NO: 3748051 - RNA, 13 nt, Human
ggagcaucccgga

SEQ ID NO: 3748052 - RNA, 14 nt, Human
ggagcaucccggag

SEQ ID NO: 3748053 - RNA, 21 nt, Human
ggagcaucucuugaggccagg

SEQ ID NO: 3748054 - RNA, 20 nt, Human
ggagccaacagaagcuucca

SEQ ID NO: 3748055 - RNA, 23 nt, Human
ggagccaaggguucagagacuca

SEQ ID NO: 3748056 - RNA, 16 nt, Human
ggagccaccuguccca

SEQ ID NO: 3748057 - RNA, 21 nt, Human
ggagccacuccucugacucag

SEQ ID NO: 3748058 - RNA, 13 nt, Human
ggagccaggaggg

SEQ ID NO: 3748059 - RNA, 18 nt, Human
ggagccaguaaacagagg

SEQ ID NO: 3748060 - RNA, 14 nt, Human
ggagccauuugaga

SEQ ID NO: 3748061 - RNA, 15 nt, Human
ggagcccacuguacu

SEQ ID NO: 3748062 - RNA, 18 nt, Human
ggagcccacuguacuugc

SEQ ID NO: 3748063 - RNA, 22 nt, Human
ggagcccaggccaggacucugc

SEQ ID NO: 3748064 - RNA, 13 nt, Human
ggagcccagggca

SEQ ID NO: 3748065 - RNA, 22 nt, Human
ggagcccauuuggagggccugg

SEQ ID NO: 3748066 - RNA, 15 nt, Human
ggagccccacugccc

SEQ ID NO: 3748067 - RNA, 13 nt, Human
ggagccccaggcc

SEQ ID NO: 3748068 - RNA, 14 nt, Human
ggagccccaggccu

SEQ ID NO: 3748069 - RNA, 13 nt, Human
ggagccccagggu

SEQ ID NO: 3748070 - RNA, 12 nt, Human
ggagccccaucu

SEQ ID NO: 3748071 - RNA, 16 nt, Human
ggagccccaucugucu

SEQ ID NO: 3748072 - RNA, 22 nt, Human
ggagcccccacccuguuccugc

SEQ ID NO: 3748073 - RNA, 14 nt, Human
ggagcccccagccu

SEQ ID NO: 3748074 - RNA, 15 nt, Human
ggagcccccagccug

SEQ ID NO: 3748075 - RNA, 18 nt, Human
ggagccccuucugcucag

SEQ ID NO: 3748076 - RNA, 20 nt, Human
ggagcccugccucuccgccc

SEQ ID NO: 3748077 - RNA, 23 nt, Human
ggagcccugucuccucucucugu

SEQ ID NO: 3748078 - RNA, 13 nt, Human
ggagccgcuggca

SEQ ID NO: 3748079 - RNA, 23 nt, Human
ggagccgguaacuguccuguccu

SEQ ID NO: 3748080 - RNA, 16 nt, Human
ggagccuagaagcugg

SEQ ID NO: 3748081 - RNA, 21 nt, Human
ggagccuagagugagggccug

SEQ ID NO: 3748082 - RNA, 22 nt, Human
ggagccuaggaccacucagccc

SEQ ID NO: 3748083 - RNA, 16 nt, Human
ggagccuaggccaggu

SEQ ID NO: 3748084 - RNA, 20 nt, Human
ggagccucauccgaggcagg

SEQ ID NO: 3748085 - RNA, 20 nt, Human
ggagccuccacugccucugg

SEQ ID NO: 3748086 - RNA, 14 nt, Human
ggagccucccugcc

SEQ ID NO: 3748087 - RNA, 14 nt, Human
ggagccuccugccc

SEQ ID NO: 3748088 - RNA, 15 nt, Human
ggagccuccugccca

SEQ ID NO: 3748089 - RNA, 18 nt, Human
ggagccucgcaacccgug

SEQ ID NO: 3748090 - RNA, 16 nt, Human
ggagccugacagccag

SEQ ID NO: 3748091 - RNA, 17 nt, Human
ggagccugacagccaga

SEQ ID NO: 3748092 - RNA, 21 nt, Human
ggagccugagucagggcccag

SEQ ID NO: 3748093 - RNA, 22 nt, Human
ggagccugagucagggcccaga

SEQ ID NO: 3748094 - RNA, 22 nt, Human
ggagccugcaggguggugcugg

SEQ ID NO: 3748095 - RNA, 23 nt, Human
ggagccugcauuuccucgcagcc

SEQ ID NO: 3748096 - RNA, 22 nt, Human
ggagccugcuggucacagccuc

SEQ ID NO: 3748097 - RNA, 16 nt, Human
ggagccuggcacagga

SEQ ID NO: 3748098 - RNA, 13 nt, Human
ggagccuguccug

SEQ ID NO: 3748099 - RNA, 21 nt, Human
ggagccugugaacccaggaca

SEQ ID NO: 3748100 - RNA, 15 nt, Human
ggagccuguguaaca

SEQ ID NO: 3748101 - RNA, 18 nt, Human
ggagccuguguaacagcu

SEQ ID NO: 3748102 - RNA, 20 nt, Human
ggagccuguguaacagcucc

SEQ ID NO: 3748103 - RNA, 22 nt, Human
ggagccuucccaaguugugcuu

SEQ ID NO: 3748104 - RNA, 23 nt, Human
ggagccuucccaaguugugcuug

SEQ ID NO: 3748105 - RNA, 16 nt, Human
ggagccuuuuaacugu

SEQ ID NO: 3748106 - RNA, 19 nt, Human
ggagccuuuuuaaaacaca

SEQ ID NO: 3748107 - RNA, 16 nt, Human
ggagcgggaccugugg

SEQ ID NO: 3748108 - RNA, 22 nt, Human
ggagcgguggcccugucccucc

SEQ ID NO: 3748109 - RNA, 15 nt, Human
ggagcguggacuggu

SEQ ID NO: 3748110 - RNA, 19 nt, Human
ggagcguggacugguuggu

SEQ ID NO: 3748111 - RNA, 14 nt, Human
ggagcgugggaggc

SEQ ID NO: 3748112 - RNA, 14 nt, Human
ggagcuaccugugu

SEQ ID NO: 3748113 - RNA, 15 nt, Human
ggagcuaucaggaac

SEQ ID NO: 3748114 - RNA, 12 nt, Human
ggagcuauuuua

SEQ ID NO: 3748115 - RNA, 12 nt, Human
ggagcuauuuuc

SEQ ID NO: 3748116 - RNA, 17 nt, Human
ggagcucaucugcaaaa

SEQ ID NO: 3748117 - RNA, 17 nt, Human
ggagcuccacucugcuu

SEQ ID NO: 3748118 - RNA, 20 nt, Human
ggagcuccacucugcuucuc

SEQ ID NO: 3748119 - RNA, 18 nt, Human
ggagcuccagccugacau

SEQ ID NO: 3748120 - RNA, 17 nt, Human
ggagcuccaguguccug

SEQ ID NO: 3748121 - RNA, 20 nt, Human
ggagcuccaguguccugagc

SEQ ID NO: 3748122 - RNA, 17 nt, Human
ggagcuccucuccugga

SEQ ID NO: 3748123 - RNA, 20 nt, Human
ggagcuccucuccuggagga

SEQ ID NO: 3748124 - RNA, 17 nt, Human
ggagcucuucaggccuc

SEQ ID NO: 3748125 - RNA, 18 nt, Human
ggagcucuucaggccucc

SEQ ID NO: 3748126 - RNA, 15 nt, Human
ggagcugaaaaauca

SEQ ID NO: 3748127 - RNA, 16 nt, Human
ggagcugaguggggga

SEQ ID NO: 3748128 - RNA, 22 nt, Human
ggagcugaucgcuucuccccca

SEQ ID NO: 3748129 - RNA, 14 nt, Human
ggagcugcaggggc

SEQ ID NO: 3748130 - RNA, 13 nt, Human
ggagcugcccaga

SEQ ID NO: 3748131 - RNA, 14 nt, Human
ggagcugccuggac

SEQ ID NO: 3748132 - RNA, 12 nt, Human
ggagcugccugu

SEQ ID NO: 3748133 - RNA, 18 nt, Human
ggagcugcuauagccugg

SEQ ID NO: 3748134 - RNA, 15 nt, Human
ggagcuggccccgcc

SEQ ID NO: 3748135 - RNA, 16 nt, Human
ggagcuggccccgccg

SEQ ID NO: 3748136 - RNA, 20 nt, Human
ggagcuggccccgccgccug

SEQ ID NO: 3748137 - RNA, 18 nt, Human
ggagcuggcuccagccug

SEQ ID NO: 3748138 - RNA, 12 nt, Human
ggagcugggccc

SEQ ID NO: 3748139 - RNA, 20 nt, Human
ggagcuggggagaggaaaga

SEQ ID NO: 3748140 - RNA, 21 nt, Human
ggagcuucugggguccccagg

SEQ ID NO: 3748141 - RNA, 15 nt, Human
ggagcuugggaaugg

SEQ ID NO: 3748142 - RNA, 22 nt, Human
ggagcuuugacucaggagccug

SEQ ID NO: 3748143 - RNA, 20 nt, Human
ggaggaaaaccaagccgugg

SEQ ID NO: 3748144 - RNA, 21 nt, Human
ggaggaagaacugaaaggcuu

SEQ ID NO: 3748145 - RNA, 14 nt, Human
ggaggaagaauagg

SEQ ID NO: 3748146 - RNA, 13 nt, Human
ggaggaagcagaa

SEQ ID NO: 3748147 - RNA, 15 nt, Human
ggaggaagcagaaua

SEQ ID NO: 3748148 - RNA, 23 nt, Human
ggaggaagcagaauaaagcaauu

SEQ ID NO: 3748149 - RNA, 23 nt, Human
cuuuuguauacauccuggguaau

SEQ ID NO: 3748150 - RNA, 13 nt, Human
cuuuuguauguaa

SEQ ID NO: 3748151 - RNA, 17 nt, Human
cuuuuguauguaaaugu

SEQ ID NO: 3748152 - RNA, 17 nt, Human
cuuuugucauguggcua

SEQ ID NO: 3748153 - RNA, 14 nt, Human
cuuuugucccagaa

SEQ ID NO: 3748154 - RNA, 21 nt, Human
cuuuuguccugcaucaucuug

SEQ ID NO: 3748155 - RNA, 16 nt, Human
cuuuugucuaauuaaa

SEQ ID NO: 3748156 - RNA, 13 nt, Human
cuuuugugaauua

SEQ ID NO: 3748157 - RNA, 22 nt, Human
cuuuugugauggagugcuguuu

SEQ ID NO: 3748158 - RNA, 13 nt, Human
cuuuugugcauua

SEQ ID NO: 3748159 - RNA, 14 nt, Human
cuuuugugcauuau

SEQ ID NO: 3748160 - RNA, 16 nt, Human
cuuuuguguaaugaaa

SEQ ID NO: 3748161 - RNA, 10 nt, Human
cuuuuguuac

SEQ ID NO: 3748162 - RNA, 20 nt, Human
cuuuuguuacucuugggaca

SEQ ID NO: 3748163 - RNA, 20 nt, Human
cuuuuguuacuguucuugcu

SEQ ID NO: 3748164 - RNA, 23 nt, Human
cuuuuguuacuguucuugcugcu

SEQ ID NO: 3748165 - RNA, 22 nt, Human
cuuuuguucagggcugugaucg

SEQ ID NO: 3748166 - RNA, 22 nt, Human
cuuuuguucauuucauccuuuc

SEQ ID NO: 3748167 - RNA, 17 nt, Human
cuuuuguucccauccuc

SEQ ID NO: 3748168 - RNA, 11 nt, Human
cuuuuguucuu

SEQ ID NO: 3748169 - RNA, 12 nt, Human
cuuuuguucuug

SEQ ID NO: 3748170 - RNA, 20 nt, Human
cuuuuguucuugguuuguaa

SEQ ID NO: 3748171 - RNA, 12 nt, Human
cuuuuguuuggu

SEQ ID NO: 3748172 - RNA, 14 nt, Human
cuuuuguuugguaa

SEQ ID NO: 3748173 - RNA, 15 nt, Human
cuuuuguuugguaaa

SEQ ID NO: 3748174 - RNA, 16 nt, Human
cuuuuguuugguaaau

SEQ ID NO: 3748175 - RNA, 15 nt, Human
cuuuuguuuugcuuu

SEQ ID NO: 3748176 - RNA, 18 nt, Human
cuuuuguuuuuugaagug

SEQ ID NO: 3748177 - RNA, 14 nt, Human
cuuuuuaaaacaca

SEQ ID NO: 3748178 - RNA, 23 nt, Human
cuuuuuaaagcuuuugauguggu

SEQ ID NO: 3748179 - RNA, 16 nt, Human
cuuuuuaaaguguuuc

SEQ ID NO: 3748180 - RNA, 16 nt, Human
cuuuuuaaccugcaaa

SEQ ID NO: 3748181 - RNA, 19 nt, Human
cuuuuuaagcuuauuuaau

SEQ ID NO: 3748182 - RNA, 18 nt, Human
cuuuuuaaguaaugugga

SEQ ID NO: 3748183 - RNA, 16 nt, Human
cuuuuuaauaugcuua

SEQ ID NO: 3748184 - RNA, 21 nt, Human
cuuuuuaaucaugaauaugau

SEQ ID NO: 3748185 - RNA, 15 nt, Human
cuuuuuaauuguugu

SEQ ID NO: 3748186 - RNA, 22 nt, Human
cuuuuuaauuguuguuucuuuc

SEQ ID NO: 3748187 - RNA, 19 nt, Human
cuuuuuacauaacugccuu

SEQ ID NO: 3748188 - RNA, 15 nt, Human
cuuuuuacuccccuu

SEQ ID NO: 3748189 - RNA, 14 nt, Human
cuuuuuauaaaaag

SEQ ID NO: 3748190 - RNA, 15 nt, Human
cuuuuuauaaaaaga

SEQ ID NO: 3748191 - RNA, 19 nt, Human
cuuuuuauaaaaagauaau

SEQ ID NO: 3748192 - RNA, 12 nt, Human
cuuuuuauaacu

SEQ ID NO: 3748193 - RNA, 16 nt, Human
cuuuuuauuaaaauau

SEQ ID NO: 3748194 - RNA, 17 nt, Human
cuuuuuauugaaucuau

SEQ ID NO: 3748195 - RNA, 13 nt, Human
cuuuuuauugccu

SEQ ID NO: 3748196 - RNA, 12 nt, Human
cuuuuuauuuau

SEQ ID NO: 3748197 - RNA, 13 nt, Human
cuuuuuauuuaua

SEQ ID NO: 3748198 - RNA, 17 nt, Human
cuuuuuauuuauaugua

SEQ ID NO: 3748199 - RNA, 19 nt, Human
cuuuuuauuuauauguaug

SEQ ID NO: 3748200 - RNA, 13 nt, Human
cuuuuuauuugca

SEQ ID NO: 3748201 - RNA, 14 nt, Human
cuuuuuauuugcau

SEQ ID NO: 3748202 - RNA, 21 nt, Human
cuuuuuauuuuuuaauuauug

SEQ ID NO: 3748203 - RNA, 17 nt, Human
cuuuuucaggagaauua

SEQ ID NO: 3748204 - RNA, 17 nt, Human
cuuuuucauccccuuac

SEQ ID NO: 3748205 - RNA, 13 nt, Human
cuuuuucauuugc

SEQ ID NO: 3748206 - RNA, 17 nt, Human
cuuuuucauuugccuau

SEQ ID NO: 3748207 - RNA, 15 nt, Human
cuuuuucauuuucca

SEQ ID NO: 3748208 - RNA, 18 nt, Human
cuuuuucauuuuccaaua

SEQ ID NO: 3748209 - RNA, 17 nt, Human
cuuuuuccaacaagaag

SEQ ID NO: 3748210 - RNA, 22 nt, Human
cuuuuuccagacacuuuuuuga

SEQ ID NO: 3748211 - RNA, 16 nt, Human
cuuuuucccaauaaau

SEQ ID NO: 3748212 - RNA, 18 nt, Human
cuuuuucuaaugugguua

SEQ ID NO: 3748213 - RNA, 20 nt, Human
cuuuuucucuuuccaugaca

SEQ ID NO: 3748214 - RNA, 11 nt, Human
cuuuuucugac

SEQ ID NO: 3748215 - RNA, 16 nt, Human
cuuuuucugauuagcu

SEQ ID NO: 3748216 - RNA, 16 nt, Human
cuuuuucugcacuaua

SEQ ID NO: 3748217 - RNA, 19 nt, Human
cuuuuucuggacucuggac

SEQ ID NO: 3748218 - RNA, 12 nt, Human
cuuuuucuuaau

SEQ ID NO: 3748219 - RNA, 14 nt, Human
cuuuuucuuccuca

SEQ ID NO: 3748220 - RNA, 19 nt, Human
cuuuuucuucuucccuccc

SEQ ID NO: 3748221 - RNA, 15 nt, Human
cuuuuugaaaugaaa

SEQ ID NO: 3748222 - RNA, 18 nt, Human
cuuuuugaaaugaaauuu

SEQ ID NO: 3748223 - RNA, 22 nt, Human
cuuuuugaaaugaaauuuaaac

SEQ ID NO: 3748224 - RNA, 21 nt, Human
cuuuuugaaguguaggcagac

SEQ ID NO: 3748225 - RNA, 23 nt, Human
cuuuuugaaguguaggcagacac

SEQ ID NO: 3748226 - RNA, 15 nt, Human
cuuuuugaaucuuua

SEQ ID NO: 3748227 - RNA, 17 nt, Human
cuuuuugaaucuuuaau

SEQ ID NO: 3748228 - RNA, 18 nt, Human
cuuuuugaaucuuuaauu

SEQ ID NO: 3748229 - RNA, 20 nt, Human
cuuuuugagguggcacuuuu

SEQ ID NO: 3748230 - RNA, 18 nt, Human
cuuuuugcucuaaaauau

SEQ ID NO: 3748231 - RNA, 16 nt, Human
cuuuuuggcauaacau

SEQ ID NO: 3748232 - RNA, 17 nt, Human
cuuuuugggagagacuu

SEQ ID NO: 3748233 - RNA, 19 nt, Human
cuuuuuguaagugagugug

SEQ ID NO: 3748234 - RNA, 16 nt, Human
cuuuuuguaccuggug

SEQ ID NO: 3748235 - RNA, 18 nt, Human
cuuuuuguauaaaauaga

SEQ ID NO: 3748236 - RNA, 13 nt, Human
cuuuuugugaaga

SEQ ID NO: 3748237 - RNA, 21 nt, Human
cuuuuuguuguaaaacaaaau

SEQ ID NO: 3748238 - RNA, 19 nt, Human
cuuuuuuaaauaaacuuuu

SEQ ID NO: 3748239 - RNA, 18 nt, Human
cuuuuuuaaauauuuucu

SEQ ID NO: 3748240 - RNA, 18 nt, Human
cuuuuuuaaaugaagaaa

SEQ ID NO: 3748241 - RNA, 14 nt, Human
cuuuuuuaaauuaa

SEQ ID NO: 3748242 - RNA, 21 nt, Human
cuuuuuuaagauuuuucucaa

SEQ ID NO: 3748243 - RNA, 16 nt, Human
cuuuuuuaauaaacua

SEQ ID NO: 3748244 - RNA, 13 nt, Human
cuuuuuuacucau

SEQ ID NO: 3748245 - RNA, 21 nt, Human
cuuuuuuacuuaguagauuaa

SEQ ID NO: 3748246 - RNA, 16 nt, Human
cuuuuuuagaguugau

SEQ ID NO: 3748247 - RNA, 17 nt, Human
cuuuuuuauacauaaac

SEQ ID NO: 3748248 - RNA, 14 nt, Human
cuuuuuuauaucuu

SEQ ID NO: 3748249 - RNA, 20 nt, Human
cuuuuuuauuaaucacugug

SEQ ID NO: 3748250 - RNA, 16 nt, Human
cuuuuuucaaaagaaa

SEQ ID NO: 3748251 - RNA, 22 nt, Human
cuuuuuucauggacacuuugaa

SEQ ID NO: 3748252 - RNA, 15 nt, Human
cuuuuuuccccagac

SEQ ID NO: 3748253 - RNA, 18 nt, Human
cuuuuuuccuuaauccag

SEQ ID NO: 3748254 - RNA, 18 nt, Human
cuuuuuuccuuuccaccu

SEQ ID NO: 3748255 - RNA, 20 nt, Human
cuuuuuucucugauacagaa

SEQ ID NO: 3748256 - RNA, 14 nt, Human
cuuuuuucugccuc

SEQ ID NO: 3748257 - RNA, 16 nt, Human
cuuuuuucuuauuuaa

SEQ ID NO: 3748258 - RNA, 16 nt, Human
cuuuuuucuuuuuccu

SEQ ID NO: 3748259 - RNA, 18 nt, Human
cuuuuuugauaaaguuuc

SEQ ID NO: 3748260 - RNA, 19 nt, Human
cuuuuuugauaaaguuucu

SEQ ID NO: 3748261 - RNA, 16 nt, Human
cuuuuuuggcugcuga

SEQ ID NO: 3748262 - RNA, 22 nt, Human
cuuuuuuggcugcugaaggcuc

SEQ ID NO: 3748263 - RNA, 23 nt, Human
cuuuuuuggcugcugaaggcucg

SEQ ID NO: 3748264 - RNA, 23 nt, Human
cuuuuuuggcuuuagacacuggc

SEQ ID NO: 3748265 - RNA, 11 nt, Human
cuuuuuugucc

SEQ ID NO: 3748266 - RNA, 22 nt, Human
cuuuuuuguuuguuucuuugug

SEQ ID NO: 3748267 - RNA, 16 nt, Human
cuuuuuuguuuuuuca

SEQ ID NO: 3748268 - RNA, 12 nt, Human
cuuuuuuucaau

SEQ ID NO: 3748269 - RNA, 13 nt, Human
cuuuuuuucaaug

SEQ ID NO: 3748270 - RNA, 15 nt, Human
cuuuuuuucaaugug

SEQ ID NO: 3748271 - RNA, 19 nt, Human
cuuuuuuuccaucuuuaca

SEQ ID NO: 3748272 - RNA, 11 nt, Human
cuuuuuuuccc

SEQ ID NO: 3748273 - RNA, 19 nt, Human
cuuuuuuucuauauuauug

SEQ ID NO: 3748274 - RNA, 15 nt, Human
cuuuuuuucuuuggu

SEQ ID NO: 3748275 - RNA, 22 nt, Human
cuuuuuuugagcgacaucucug

SEQ ID NO: 3748276 - RNA, 15 nt, Human
cuuuuuuuggcccag

SEQ ID NO: 3748277 - RNA, 16 nt, Human
cuuuuuuuggcccagg

SEQ ID NO: 3748278 - RNA, 13 nt, Human
cuuuuuuuguaua

SEQ ID NO: 3748279 - RNA, 16 nt, Human
cuuuuuuuguauaguu

SEQ ID NO: 3748280 - RNA, 17 nt, Human
cuuuuuuuuaaugugcu

SEQ ID NO: 3748281 - RNA, 18 nt, Human
cuuuuuuuucuauuucac

SEQ ID NO: 3748282 - RNA, 22 nt, Human
cuuuuuuuugacagcuuccugu

SEQ ID NO: 3748283 - RNA, 23 nt, Human
cuuuuuuuugacagcuuccuguc

SEQ ID NO: 3748284 - RNA, 21 nt, Human
cuuuuuuuuuaaguucuuaug

SEQ ID NO: 3748285 - RNA, 18 nt, Human
cuuuuuuuuuuuguuuga

SEQ ID NO: 3748286 - RNA, 16 nt, Human
cuuuuuuuuuuuucca

SEQ ID NO: 3748287 - RNA, 20 nt, Human
cuuuuuuuuuuuugagacag

SEQ ID NO: 3748288 - RNA, 22 nt, Human
cuuuuuuuuuuuuuaaagacag

SEQ ID NO: 3748289 - RNA, 17 nt, Human
gaaaaaaaaaaaagagg

SEQ ID NO: 3748290 - RNA, 21 nt, Human
gaaaaaaaaaaaagaggaaaa

SEQ ID NO: 3748291 - RNA, 16 nt, Human
gaaaaaaaaaagaaga

SEQ ID NO: 3748292 - RNA, 19 nt, Human
gaaaaaaaaaagaagaaga

SEQ ID NO: 3748293 - RNA, 18 nt, Human
gaaaaaaaaaaugcugaa

SEQ ID NO: 3748294 - RNA, 18 nt, Human
gaaaaaaaaagaaaaaag

SEQ ID NO: 3748295 - RNA, 15 nt, Human
gaaaaaaaaaugcca

SEQ ID NO: 3748296 - RNA, 20 nt, Human
gaaaaaaaaaugccauaaua

SEQ ID NO: 3748297 - RNA, 18 nt, Human
gaaaaaaaaauucacaug

SEQ ID NO: 3748298 - RNA, 21 nt, Human
gaaaaaaaaccugagauuuau

SEQ ID NO: 3748299 - RNA, 17 nt, Human
ggcccccuggucucugg

SEQ ID NO: 3748300 - RNA, 19 nt, Human
ggccccgaggacccagacc

SEQ ID NO: 3748301 - RNA, 18 nt, Human
ggccccggaucagagcag

SEQ ID NO: 3748302 - RNA, 17 nt, Human
ggccccggccccagcca

SEQ ID NO: 3748303 - RNA, 18 nt, Human
ggccccgucucaggucug

SEQ ID NO: 3748304 - RNA, 17 nt, Human
ggccccuccccuccaaa

SEQ ID NO: 3748305 - RNA, 21 nt, Human
ggccccucccuaccucaaccu

SEQ ID NO: 3748306 - RNA, 23 nt, Human
ggccccucccucuccagcaggcc

SEQ ID NO: 3748307 - RNA, 20 nt, Human
ggccccucucagcccucaca

SEQ ID NO: 3748308 - RNA, 16 nt, Human
ggccccucugcccagc

SEQ ID NO: 3748309 - RNA, 17 nt, Human
ggccccucugcccagcu

SEQ ID NO: 3748310 - RNA, 19 nt, Human
ggccccugccagacccccu

SEQ ID NO: 3748311 - RNA, 20 nt, Human
ggccccugccagacccccug

SEQ ID NO: 3748312 - RNA, 15 nt, Human
ggccccugcccggcu

SEQ ID NO: 3748313 - RNA, 17 nt, Human
ggccccugccucucugc

SEQ ID NO: 3748314 - RNA, 13 nt, Human
ggccccugcuggu

SEQ ID NO: 3748315 - RNA, 14 nt, Human
ggccccugcugguu

SEQ ID NO: 3748316 - RNA, 12 nt, Human
ggccccuggagg

SEQ ID NO: 3748317 - RNA, 15 nt, Human
ggccccuggcccagc

SEQ ID NO: 3748318 - RNA, 21 nt, Human
ggccccugggcuuggccugcu

SEQ ID NO: 3748319 - RNA, 18 nt, Human
ggccccuuugcugacccu

SEQ ID NO: 3748320 - RNA, 18 nt, Human
ggccccuuugggcccugc

SEQ ID NO: 3748321 - RNA, 19 nt, Human
ggccccuuugggcccugca

SEQ ID NO: 3748322 - RNA, 17 nt, Human
ggcccgacagccuggca

SEQ ID NO: 3748323 - RNA, 13 nt, Human
ggcccgacauggc

SEQ ID NO: 3748324 - RNA, 16 nt, Human
ggcccgcacagagcug

SEQ ID NO: 3748325 - RNA, 19 nt, Human
ggcccgccuggcagaacug

SEQ ID NO: 3748326 - RNA, 23 nt, Human
ggcccgccuggcagaacugagcu

SEQ ID NO: 3748327 - RNA, 23 nt, Human
ggcccgcgauguggaacugcugc

SEQ ID NO: 3748328 - RNA, 14 nt, Human
ggcccgcgccacag

SEQ ID NO: 3748329 - RNA, 17 nt, Human
ggcccgcgccacaggac

SEQ ID NO: 3748330 - RNA, 18 nt, Human
ggcccgcgccacaggacc

SEQ ID NO: 3748331 - RNA, 17 nt, Human
ggcccgcuugccucggc

SEQ ID NO: 3748332 - RNA, 23 nt, Human
ggcccggagcugccccucucugg

SEQ ID NO: 3748333 - RNA, 13 nt, Human
ggcccggcagggc

SEQ ID NO: 3748334 - RNA, 12 nt, Human
ggcccggccagc

SEQ ID NO: 3748335 - RNA, 13 nt, Human
ggcccggccucuc

SEQ ID NO: 3748336 - RNA, 23 nt, Human
ggcccggcgcgguggcucacgcc

SEQ ID NO: 3748337 - RNA, 13 nt, Human
ggcccggggcugg

SEQ ID NO: 3748338 - RNA, 14 nt, Human
ggcccgucugucca

SEQ ID NO: 3748339 - RNA, 20 nt, Human
ggcccgucuguccaucugcc

SEQ ID NO: 3748340 - RNA, 20 nt, Human
ggcccguugaggaugaggcc

SEQ ID NO: 3748341 - RNA, 22 nt, Human
ggcccguugaggaugaggccgc

SEQ ID NO: 3748342 - RNA, 19 nt, Human
ggcccguugucucccuggc

SEQ ID NO: 3748343 - RNA, 20 nt, Human
ggcccguugucucccuggcc

SEQ ID NO: 3748344 - RNA, 22 nt, Human
ggcccguugucucccuggcccu

SEQ ID NO: 3748345 - RNA, 24 nt, Human
ggcccguugucucccuggcccuca

SEQ ID NO: 3748346 - RNA, 16 nt, Human
ggcccuaccagcgccc

SEQ ID NO: 3748347 - RNA, 23 nt, Human
ggcccuagcccagcgcucugccu

SEQ ID NO: 3748348 - RNA, 16 nt, Human
ggcccucaaggccucc

SEQ ID NO: 3748349 - RNA, 19 nt, Human
ggcccucaaggccucccac

SEQ ID NO: 3748350 - RNA, 18 nt, Human
ggcccucaccccugcccu

SEQ ID NO: 3748351 - RNA, 22 nt, Human
ggcccucaccccugcccuggga

SEQ ID NO: 3748352 - RNA, 21 nt, Human
ggcccucaucuaugaggaaag

SEQ ID NO: 3748353 - RNA, 14 nt, Human
ggcccuccagagcc

SEQ ID NO: 3748354 - RNA, 21 nt, Human
ggcccuccagagccccacagc

SEQ ID NO: 3748355 - RNA, 20 nt, Human
ggcccucccuguuccccaga

SEQ ID NO: 3748356 - RNA, 13 nt, Human
ggcccucccuugg

SEQ ID NO: 3748357 - RNA, 16 nt, Human
ggcccuccuacccugc

SEQ ID NO: 3748358 - RNA, 19 nt, Human
ggcccuccuacccugcgcc

SEQ ID NO: 3748359 - RNA, 15 nt, Human
ggcccucgacacuca

SEQ ID NO: 3748360 - RNA, 15 nt, Human
ggcccucgcugccag

SEQ ID NO: 3748361 - RNA, 21 nt, Human
ggcccucgcugccagcucugu

SEQ ID NO: 3748362 - RNA, 15 nt, Human
ggcccucgggcccag

SEQ ID NO: 3748363 - RNA, 16 nt, Human
ggcccucgggcccagc

SEQ ID NO: 3748364 - RNA, 18 nt, Human
ggcccucgggcccagccc

SEQ ID NO: 3748365 - RNA, 12 nt, Human
ggcccucucccc

SEQ ID NO: 3748366 - RNA, 21 nt, Human
ggcccucucugaaggaggcca

SEQ ID NO: 3748367 - RNA, 14 nt, Human
ggcccucucugcuc

SEQ ID NO: 3748368 - RNA, 18 nt, Human
ggcccucucuucucaccu

SEQ ID NO: 3748369 - RNA, 19 nt, Human
ggcccucugcccacucccu

SEQ ID NO: 3748370 - RNA, 21 nt, Human
ggcccucugcccacucccugc

SEQ ID NO: 3748371 - RNA, 19 nt, Human
ggcccucuggaguggccac

SEQ ID NO: 3748372 - RNA, 13 nt, Human
ggcccugagcuga

SEQ ID NO: 3748373 - RNA, 17 nt, Human
ggcccugaggugugggg

SEQ ID NO: 3748374 - RNA, 18 nt, Human
ggcccugagucugggcag

SEQ ID NO: 3748375 - RNA, 22 nt, Human
ggcccugcaaaaggacucucag

SEQ ID NO: 3748376 - RNA, 14 nt, Human
ggcccugcacuguc

SEQ ID NO: 3748377 - RNA, 16 nt, Human
ggcccugcacuguccu

SEQ ID NO: 3748378 - RNA, 18 nt, Human
ggcccugcacuguccugc

SEQ ID NO: 3748379 - RNA, 20 nt, Human
ggcccugcacuguccugcuc

SEQ ID NO: 3748380 - RNA, 22 nt, Human
ggcccugcaguguucgcuuggc

SEQ ID NO: 3748381 - RNA, 18 nt, Human
ggcccugcccugaggaag

SEQ ID NO: 3748382 - RNA, 17 nt, Human
ggcccugcccuggcagg

SEQ ID NO: 3748383 - RNA, 22 nt, Human
ggcccugcccugguuuccugcc

SEQ ID NO: 3748384 - RNA, 10 nt, Human
ggcccugccu

SEQ ID NO: 3748385 - RNA, 15 nt, Human
ggcccugcuccugca

SEQ ID NO: 3748386 - RNA, 14 nt, Human
ggcccugcuuccug

SEQ ID NO: 3748387 - RNA, 16 nt, Human
ggcccugcuuccugcu

SEQ ID NO: 3748388 - RNA, 15 nt, Human
ggcccuggaacucua

SEQ ID NO: 3748389 - RNA, 13 nt, Human
ggcccuggcagcc

SEQ ID NO: 3748390 - RNA, 12 nt, Human
ggcccuggccug

SEQ ID NO: 3748391 - RNA, 14 nt, Human
ggcccuggccugcu

SEQ ID NO: 3748392 - RNA, 16 nt, Human
ggcccuggccugcugg

SEQ ID NO: 3748393 - RNA, 19 nt, Human
ggcccuggcugagggcagc

SEQ ID NO: 3748394 - RNA, 15 nt, Human
ggcccugggcuggaa

SEQ ID NO: 3748395 - RNA, 17 nt, Human
ggcccugguccuuccag

SEQ ID NO: 3748396 - RNA, 15 nt, Human
ggcccugucccuccc

SEQ ID NO: 3748397 - RNA, 16 nt, Human
ggcccugucccuccca

SEQ ID NO: 3748398 - RNA, 12 nt, Human
ggcccugugccu

SEQ ID NO: 3748399 - RNA, 20 nt, Human
ggcccuuacuugcuucucua

SEQ ID NO: 3748400 - RNA, 21 nt, Human
ggcccuucacugccuuugcuc

SEQ ID NO: 3748401 - RNA, 17 nt, Human
ggcccuuccucuccacu

SEQ ID NO: 3748402 - RNA, 19 nt, Human
ggcccuuccucuccacugc

SEQ ID NO: 3748403 - RNA, 15 nt, Human
ggcccuuccuggaca

SEQ ID NO: 3748404 - RNA, 20 nt, Human
ggcccuuccuggacagcugu

SEQ ID NO: 3748405 - RNA, 22 nt, Human
ggcccuuccuggacagcugugc

SEQ ID NO: 3748406 - RNA, 23 nt, Human
ggcccuucucuccagccccugga

SEQ ID NO: 3748407 - RNA, 10 nt, Human
ggcccuugga

SEQ ID NO: 3748408 - RNA, 16 nt, Human
ggcccuuuccucaggc

SEQ ID NO: 3748409 - RNA, 19 nt, Human
ggcccuuuccuuccagauc

SEQ ID NO: 3748410 - RNA, 19 nt, Human
ggcccuuugaagccucagc

SEQ ID NO: 3748411 - RNA, 18 nt, Human
ggccgaagcuaacaggga

SEQ ID NO: 3748412 - RNA, 20 nt, Human
ggccgaagcuaacagggaag

SEQ ID NO: 3748413 - RNA, 14 nt, Human
ggccgaagcucugg

SEQ ID NO: 3748414 - RNA, 16 nt, Human
ggccgaagcucuggcu

SEQ ID NO: 3748415 - RNA, 17 nt, Human
ggccgaagcucuggcug

SEQ ID NO: 3748416 - RNA, 16 nt, Human
ggccgacauugucucc

SEQ ID NO: 3748417 - RNA, 17 nt, Human
ggccgacauugucuccc

SEQ ID NO: 3748418 - RNA, 16 nt, Human
ggccgacggagccggg

SEQ ID NO: 3748419 - RNA, 14 nt, Human
ggccgagugagagc

SEQ ID NO: 3748420 - RNA, 14 nt, Human
ggccgauggagaca

SEQ ID NO: 3748421 - RNA, 20 nt, Human
ggccgcagcucuugcccuuc

SEQ ID NO: 3748422 - RNA, 21 nt, Human
ggccgcagcucuugcccuucc

SEQ ID NO: 3748423 - RNA, 22 nt, Human
ggccgcagcucuugcccuuccc

SEQ ID NO: 3748424 - RNA, 23 nt, Human
ggccgcagcucuugcccuucccu

SEQ ID NO: 3748425 - RNA, 15 nt, Human
ggccgcauucccuga

SEQ ID NO: 3748426 - RNA, 17 nt, Human
ggccgcauucccugagu

SEQ ID NO: 3748427 - RNA, 18 nt, Human
ggccgccccagccucuga

SEQ ID NO: 3748428 - RNA, 14 nt, Human
ggccgccgccucuu

SEQ ID NO: 3748429 - RNA, 15 nt, Human
ggccgccugggucca

SEQ ID NO: 3748430 - RNA, 16 nt, Human
ggccgcgggggcaggg

SEQ ID NO: 3748431 - RNA, 14 nt, Human
ggccgcuagaggcc

SEQ ID NO: 3748432 - RNA, 17 nt, Human
ggccgcuagaggccuga

SEQ ID NO: 3748433 - RNA, 21 nt, Human
ggccgcuagaggccugaggau

SEQ ID NO: 3748434 - RNA, 14 nt, Human
ggccgcuccaccag

SEQ ID NO: 3748435 - RNA, 19 nt, Human
ggccgcuccaccagcauca

SEQ ID NO: 3748436 - RNA, 16 nt, Human
ggccgcuccaggggug

SEQ ID NO: 3748437 - RNA, 19 nt, Human
ggccgcuccagggguggcu

SEQ ID NO: 3748438 - RNA, 20 nt, Human
ggccggagucagugccaggu

SEQ ID NO: 3748439 - RNA, 20 nt, Human
ggccggcagccccagccugc

SEQ ID NO: 3748440 - RNA, 12 nt, Human
ggccggccagcc

SEQ ID NO: 3748441 - RNA, 14 nt, Human
ggccggccagccag

SEQ ID NO: 3748442 - RNA, 15 nt, Human
ggccggccagccagc

SEQ ID NO: 3748443 - RNA, 17 nt, Human
ggccggccaggugggcg

SEQ ID NO: 3748444 - RNA, 18 nt, Human
ggccggcgagcccugugg

SEQ ID NO: 3748445 - RNA, 22 nt, Human
ggccggcuucaugccagcuacu

SEQ ID NO: 3748446 - RNA, 18 nt, Human
ggccggcuuucaggagcu

SEQ ID NO: 3748447 - RNA, 19 nt, Human
ggccggcuuucaggagcuc

SEQ ID NO: 3748448 - RNA, 23 nt, Human
ggccgggaccccgagccuggcuc

SEQ ID NO: 3748449 - RNA, 22 nt, Human
ggaggaaggagccuauggcauc

SEQ ID NO: 3748450 - RNA, 13 nt, Human
ggaggaaggcaag

SEQ ID NO: 3748451 - RNA, 23 nt, Human
ggaggaauaagcucccagggccu

SEQ ID NO: 3748452 - RNA, 16 nt, Human
ggaggaaugcuccccc

SEQ ID NO: 3748453 - RNA, 18 nt, Human
ggaggaaugcucccccau

SEQ ID NO: 3748454 - RNA, 15 nt, Human
ggaggaauuucugag

SEQ ID NO: 3748455 - RNA, 14 nt, Human
ggaggacaaaacuu

SEQ ID NO: 3748456 - RNA, 19 nt, Human
ggaggacaauucaugaacu

SEQ ID NO: 3748457 - RNA, 17 nt, Human
ggaggaccaaaaaaaua

SEQ ID NO: 3748458 - RNA, 15 nt, Human
ggaggacccagggcu

SEQ ID NO: 3748459 - RNA, 14 nt, Human
ggaggaccucuggg

SEQ ID NO: 3748460 - RNA, 13 nt, Human
ggaggaccugagc

SEQ ID NO: 3748461 - RNA, 16 nt, Human
ggaggaccugagccug

SEQ ID NO: 3748462 - RNA, 18 nt, Human
ggaggaccugagccugcc

SEQ ID NO: 3748463 - RNA, 16 nt, Human
ggaggagccuguccug

SEQ ID NO: 3748464 - RNA, 13 nt, Human
ggaggaggaaggc

SEQ ID NO: 3748465 - RNA, 18 nt, Human
ggaggaggcagagaagaa

SEQ ID NO: 3748466 - RNA, 15 nt, Human
ggaggagggggccgg

SEQ ID NO: 3748467 - RNA, 15 nt, Human
ggaggaggugccaac

SEQ ID NO: 3748468 - RNA, 23 nt, Human
ggaggaucacuugaguccagaag

SEQ ID NO: 3748469 - RNA, 13 nt, Human
ggaggauggagag

SEQ ID NO: 3748470 - RNA, 21 nt, Human
ggaggaugucccugggccagg

SEQ ID NO: 3748471 - RNA, 15 nt, Human
ggaggaugugggcag

SEQ ID NO: 3748472 - RNA, 12 nt, Human
ggaggcaagcaa

SEQ ID NO: 3748473 - RNA, 14 nt, Human
ggaggcaagcccug

SEQ ID NO: 3748474 - RNA, 17 nt, Human
ggaggcacacagcugca

SEQ ID NO: 3748475 - RNA, 21 nt, Human
ggaggcacagcaaacuguccc

SEQ ID NO: 3748476 - RNA, 22 nt, Human
ggaggcacuuuagggcuguaaa

SEQ ID NO: 3748477 - RNA, 15 nt, Human
ggaggcagagaagaa

SEQ ID NO: 3748478 - RNA, 16 nt, Human
ggaggcagcaggacug

SEQ ID NO: 3748479 - RNA, 11 nt, Human
ggaggcagccu

SEQ ID NO: 3748480 - RNA, 14 nt, Human
ggaggcaggcaugg

SEQ ID NO: 3748481 - RNA, 18 nt, Human
ggaggcaggggcuuccug

SEQ ID NO: 3748482 - RNA, 19 nt, Human
ggaggcaggggcuuccugg

SEQ ID NO: 3748483 - RNA, 16 nt, Human
ggaggcauggcccugg

SEQ ID NO: 3748484 - RNA, 21 nt, Human
ggaggcaugugaugagaggaa

SEQ ID NO: 3748485 - RNA, 18 nt, Human
ggaggccaagugcaggcu

SEQ ID NO: 3748486 - RNA, 13 nt, Human
ggaggccaccucc

SEQ ID NO: 3748487 - RNA, 14 nt, Human
ggaggccaccuccu

SEQ ID NO: 3748488 - RNA, 17 nt, Human
ggcucuaauucacagug

SEQ ID NO: 3748489 - RNA, 12 nt, Human
ggcucuacacau

SEQ ID NO: 3748490 - RNA, 23 nt, Human
ggcucuauuccaauaaacuauga

SEQ ID NO: 3748491 - RNA, 12 nt, Human
ggcaacagagca

SEQ ID NO: 3748492 - RNA, 16 nt, Human
ggcaacagagcaagac

SEQ ID NO: 3748493 - RNA, 20 nt, Human
ggcaacagagcaagacucca

SEQ ID NO: 3748494 - RNA, 19 nt, Human
ggcaacagagcaagauccu

SEQ ID NO: 3748495 - RNA, 20 nt, Human
ggcaacagaucaguaaagaa

SEQ ID NO: 3748496 - RNA, 14 nt, Human
ggcaacagaucugg

SEQ ID NO: 3748497 - RNA, 15 nt, Human
ggcaacagaucugga

SEQ ID NO: 3748498 - RNA, 22 nt, Human
ggcaacaugccugcuuuagaau

SEQ ID NO: 3748499 - RNA, 19 nt, Human
ggcaacauugcuggcugga

SEQ ID NO: 3748500 - RNA, 21 nt, Human
ggcaaccacaggcagcauuua

SEQ ID NO: 3748501 - RNA, 17 nt, Human
ggcaaccccaguucugc

SEQ ID NO: 3748502 - RNA, 18 nt, Human
ggcaaccccaguucugcu

SEQ ID NO: 3748503 - RNA, 21 nt, Human
ggcaaccccaguucugcuccu

SEQ ID NO: 3748504 - RNA, 16 nt, Human
ggcaacccccagccug

SEQ ID NO: 3748505 - RNA, 17 nt, Human
ggcaacccccagccugc

SEQ ID NO: 3748506 - RNA, 19 nt, Human
ggcaaccuugucucuaugc

SEQ ID NO: 3748507 - RNA, 14 nt, Human
ggcaacugaacaaa

SEQ ID NO: 3748508 - RNA, 23 nt, Human
ggcaacugaggcagacagcagcu

SEQ ID NO: 3748509 - RNA, 23 nt, Human
ggcaacuugggaacuagacuccc

SEQ ID NO: 3748510 - RNA, 18 nt, Human
ggcaagaaggaauugacu

SEQ ID NO: 3748511 - RNA, 16 nt, Human
ggcaagagggggugga

SEQ ID NO: 3748512 - RNA, 14 nt, Human
ggcaagaggggugg

SEQ ID NO: 3748513 - RNA, 18 nt, Human
ggcaagauugugucccau

SEQ ID NO: 3748514 - RNA, 18 nt, Human
ggcaagcuagaaccugga

SEQ ID NO: 3748515 - RNA, 22 nt, Human
ggcaagcugugacuucuccagg

SEQ ID NO: 3748516 - RNA, 22 nt, Human
ggcaagcuuggcuguagaagga

SEQ ID NO: 3748517 - RNA, 17 nt, Human
ggcaaggaaaaagaaaa

SEQ ID NO: 3748518 - RNA, 14 nt, Human
ggcaaggacacaga

SEQ ID NO: 3748519 - RNA, 23 nt, Human
ggcaaggacgcuucacaggacag

SEQ ID NO: 3748520 - RNA, 22 nt, Human
ggcaaggcaggugccuccaggu

SEQ ID NO: 3748521 - RNA, 15 nt, Human
ggcaaggcugucaau

SEQ ID NO: 3748522 - RNA, 16 nt, Human
ggcaaggcugucaauu

SEQ ID NO: 3748523 - RNA, 14 nt, Human
ggcaaggcugugcu

SEQ ID NO: 3748524 - RNA, 16 nt, Human
ggcaaggggaaucugg

SEQ ID NO: 3748525 - RNA, 15 nt, Human
ggcaauaaauuuuga

SEQ ID NO: 3748526 - RNA, 16 nt, Human
ggcaauaaauuuugaa

SEQ ID NO: 3748527 - RNA, 17 nt, Human
ggcaauaaauuuugaaa

SEQ ID NO: 3748528 - RNA, 20 nt, Human
ggcaauagaccgagacuccg

SEQ ID NO: 3748529 - RNA, 16 nt, Human
ggcaauauaaccaaug

SEQ ID NO: 3748530 - RNA, 21 nt, Human
ggcaauauagcaagaucccau

SEQ ID NO: 3748531 - RNA, 14 nt, Human
ggcaauauuaaccu

SEQ ID NO: 3748532 - RNA, 19 nt, Human
ggcaauauucucuguacau

SEQ ID NO: 3748533 - RNA, 15 nt, Human
ggcaaucaauguuca

SEQ ID NO: 3748534 - RNA, 18 nt, Human
ggcaaucuauuaauagcu

SEQ ID NO: 3748535 - RNA, 15 nt, Human
ggcaaugauggcaau

SEQ ID NO: 3748536 - RNA, 18 nt, Human
ggcaaugccacagcccug

SEQ ID NO: 3748537 - RNA, 14 nt, Human
ggcaaugcuggcug

SEQ ID NO: 3748538 - RNA, 15 nt, Human
ggcaaugcuggcugu

SEQ ID NO: 3748539 - RNA, 18 nt, Human
ggcaaugucaggaacaga

SEQ ID NO: 3748540 - RNA, 22 nt, Human
ggcaauguuaauuuaguggaaa

SEQ ID NO: 3748541 - RNA, 19 nt, Human
ggcaauuccaauauuucug

SEQ ID NO: 3748542 - RNA, 17 nt, Human
ggcacaaagggcccaga

SEQ ID NO: 3748543 - RNA, 22 nt, Human
ggcacaacugcaauaacuucug

SEQ ID NO: 3748544 - RNA, 13 nt, Human
ggcacaagacuga

SEQ ID NO: 3748545 - RNA, 11 nt, Human
ggcacaauaaa

SEQ ID NO: 3748546 - RNA, 22 nt, Human
ggcacaaucucggcucacugca

SEQ ID NO: 3748547 - RNA, 14 nt, Human
ggcacacaccacca

SEQ ID NO: 3748548 - RNA, 13 nt, Human
ggcacacaccugu

SEQ ID NO: 3748549 - RNA, 22 nt, Human
ggcacaccuccucccacugccc

SEQ ID NO: 3748550 - RNA, 21 nt, Human
ggcacacgcugcucugcccca

SEQ ID NO: 3748551 - RNA, 21 nt, Human
ggcacacucugccagcaaaga

SEQ ID NO: 3748552 - RNA, 19 nt, Human
ggcacagaaaauggaagac

SEQ ID NO: 3748553 - RNA, 20 nt, Human
ggcacagaaaauggaagaca

SEQ ID NO: 3748554 - RNA, 21 nt, Human
ggcacagaaaauggaagacag

SEQ ID NO: 3748555 - RNA, 11 nt, Human
ggcacagauug

SEQ ID NO: 3748556 - RNA, 23 nt, Human
ggcacagccggggccugccuagc

SEQ ID NO: 3748557 - RNA, 12 nt, Human
ggcacagccugg

SEQ ID NO: 3748558 - RNA, 13 nt, Human
ggcacagccuucu

SEQ ID NO: 3748559 - RNA, 12 nt, Human
ggcacagcugug

SEQ ID NO: 3748560 - RNA, 13 nt, Human
ggcacaggagcua

SEQ ID NO: 3748561 - RNA, 19 nt, Human
ggcacaggagcuaccugug

SEQ ID NO: 3748562 - RNA, 19 nt, Human
ggcacaggaguguccucuu

SEQ ID NO: 3748563 - RNA, 12 nt, Human
ggcacaggcagg

SEQ ID NO: 3748564 - RNA, 13 nt, Human
ggcacaggcaggg

SEQ ID NO: 3748565 - RNA, 15 nt, Human
ggcacaggcagggca

SEQ ID NO: 3748566 - RNA, 23 nt, Human
ggcacaggccauggauggaaaac

SEQ ID NO: 3748567 - RNA, 13 nt, Human
ggcacagggccug

SEQ ID NO: 3748568 - RNA, 14 nt, Human
ggcacagggccugg

SEQ ID NO: 3748569 - RNA, 15 nt, Human
ggcacagggccuggc

SEQ ID NO: 3748570 - RNA, 14 nt, Human
ggcacaggucaggg

SEQ ID NO: 3748571 - RNA, 15 nt, Human
ggcacagugucuggg

SEQ ID NO: 3748572 - RNA, 18 nt, Human
ggcacagugucugggcug

SEQ ID NO: 3748573 - RNA, 12 nt, Human
ggcacauagaga

SEQ ID NO: 3748574 - RNA, 18 nt, Human
ggcacaucagcacgauuu

SEQ ID NO: 3748575 - RNA, 19 nt, Human
ggcacaugcugagucuccc

SEQ ID NO: 3748576 - RNA, 16 nt, Human
ggcacauuuccccaga

SEQ ID NO: 3748577 - RNA, 21 nt, Human
ggcacauuuccccagaccuga

SEQ ID NO: 3748578 - RNA, 15 nt, Human
ggcaccaaagaugca

SEQ ID NO: 3748579 - RNA, 17 nt, Human
ggcaccagacacccagg

SEQ ID NO: 3748580 - RNA, 18 nt, Human
ggcaccagacacccagga

SEQ ID NO: 3748581 - RNA, 20 nt, Human
ggcaccagacacccaggacu

SEQ ID NO: 3748582 - RNA, 19 nt, Human
ggcaccagaggcugcagaa

SEQ ID NO: 3748583 - RNA, 18 nt, Human
ggcaccagcagccuggac

SEQ ID NO: 3748584 - RNA, 13 nt, Human
ggcaccagccagc

SEQ ID NO: 3748585 - RNA, 14 nt, Human
ggcaccagccagcg

SEQ ID NO: 3748586 - RNA, 17 nt, Human
ggcaccagggguuucuc

SEQ ID NO: 3748587 - RNA, 19 nt, Human
ggcaccaguagcaggcccg

SEQ ID NO: 3748588 - RNA, 14 nt, Human
ggcaccagucccug

SEQ ID NO: 3748589 - RNA, 16 nt, Human
ggcacccacaaauaaa

SEQ ID NO: 3748590 - RNA, 20 nt, Human
ggcacccaccaucaugucug

SEQ ID NO: 3748591 - RNA, 20 nt, Human
ggcacccagugagcacuccc

SEQ ID NO: 3748592 - RNA, 18 nt, Human
ggcacccccagccugggc

SEQ ID NO: 3748593 - RNA, 21 nt, Human
ggcacccccagccugggccua

SEQ ID NO: 3748594 - RNA, 14 nt, Human
ggcacccccugcag

SEQ ID NO: 3748595 - RNA, 15 nt, Human
ggcacccggccccug

SEQ ID NO: 3748596 - RNA, 19 nt, Human
ggcacccggccccugcugg

SEQ ID NO: 3748597 - RNA, 22 nt, Human
ggcacccggccccugcugguuc

SEQ ID NO: 3748598 - RNA, 12 nt, Human
ggcacccucugg

SEQ ID NO: 3748599 - RNA, 17 nt, Human
ggcacccuucuuuccuc

SEQ ID NO: 3748600 - RNA, 22 nt, Human
ggcacccuucuuuccucuuccc

SEQ ID NO: 3748601 - RNA, 16 nt, Human
ggcaccgaagcccaga

SEQ ID NO: 3748602 - RNA, 14 nt, Human
ggcaccgagaaugu

SEQ ID NO: 3748603 - RNA, 18 nt, Human
ggcaccggggccucggac

SEQ ID NO: 3748604 - RNA, 15 nt, Human
ggcaccuaauccagg

SEQ ID NO: 3748605 - RNA, 18 nt, Human
ggcaccuaauccaggcag

SEQ ID NO: 3748606 - RNA, 17 nt, Human
ggcaccuauaaaacagg

SEQ ID NO: 3748607 - RNA, 16 nt, Human
ggcaccugcagguugg

SEQ ID NO: 3748608 - RNA, 22 nt, Human
ggcaccugggcccuggggccug

SEQ ID NO: 3748609 - RNA, 16 nt, Human
ggcaccugucgcccag

SEQ ID NO: 3748610 - RNA, 13 nt, Human
ggcaccugucugc

SEQ ID NO: 3748611 - RNA, 19 nt, Human
ggcacgaacccaccugcug

SEQ ID NO: 3748612 - RNA, 20 nt, Human
ggcacgagcaaagugaagac

SEQ ID NO: 3748613 - RNA, 17 nt, Human
ggcacgcacuggguugc

SEQ ID NO: 3748614 - RNA, 13 nt, Human
ggcacgcuguggg

SEQ ID NO: 3748615 - RNA, 21 nt, Human
ggcacgcuugcguaugucugu

SEQ ID NO: 3748616 - RNA, 14 nt, Human
ggcacggguggucc

SEQ ID NO: 3748617 - RNA, 18 nt, Human
ggcacgucaucuaguuuu

SEQ ID NO: 3748618 - RNA, 19 nt, Human
ggcacgugguugagugggg

SEQ ID NO: 3748619 - RNA, 23 nt, Human
ggcacucaaugcagccagaccua

SEQ ID NO: 3748620 - RNA, 22 nt, Human
ggcacucacagaccuggagccc

SEQ ID NO: 3748621 - RNA, 18 nt, Human
ggcacucagaagacacug

SEQ ID NO: 3748622 - RNA, 19 nt, Human
ggcacucagaagacacuga

SEQ ID NO: 3748623 - RNA, 23 nt, Human
ggcacucagaagacacugauggg

SEQ ID NO: 3748624 - RNA, 19 nt, Human
ggcacuccaaccuaaccug

SEQ ID NO: 3748625 - RNA, 13 nt, Human
ggcacucuagauu

SEQ ID NO: 3748626 - RNA, 17 nt, Human
ggcacugagauauuuau

SEQ ID NO: 3748627 - RNA, 22 nt, Human
ggcacugauuguuuuagagacu

SEQ ID NO: 3748628 - RNA, 24 nt, Human
ggcacugcccugguggcccucucc

SEQ ID NO: 3748629 - RNA, 13 nt, Human
ggcacuggcccag

SEQ ID NO: 3748630 - RNA, 16 nt, Human
ggcacuggcgaggaga

SEQ ID NO: 3748631 - RNA, 15 nt, Human
ggcacugggcaugag

SEQ ID NO: 3748632 - RNA, 22 nt, Human
ggcacugggcuguuguuccauu

SEQ ID NO: 3748633 - RNA, 20 nt, Human
ggcacugguuuguucccugu

SEQ ID NO: 3748634 - RNA, 13 nt, Human
ggcacuguacaaa

SEQ ID NO: 3748635 - RNA, 17 nt, Human
ggcacuguaguucuaag

SEQ ID NO: 3748636 - RNA, 15 nt, Human
ggcacuucacagagu

SEQ ID NO: 3748637 - RNA, 21 nt, Human
ggcacuucacagagugugcug

SEQ ID NO: 3748638 - RNA, 21 nt, Human
ggcacuucauguaaaguguca

SEQ ID NO: 3748639 - RNA, 16 nt, Human
ggcacuugccuggguc

SEQ ID NO: 3748640 - RNA, 18 nt, Human
ggcacuuggcagccuugu

SEQ ID NO: 3748641 - RNA, 13 nt, Human
aacuccaguagcu

SEQ ID NO: 3748642 - RNA, 15 nt, Human
aacucccauuaccau

SEQ ID NO: 3748643 - RNA, 13 nt, Human
aacucccugcccc

SEQ ID NO: 3748644 - RNA, 12 nt, Human
aacuccggauug

SEQ ID NO: 3748645 - RNA, 19 nt, Human
aacuccucgacaucacugu

SEQ ID NO: 3748646 - RNA, 22 nt, Human
aacuccucgacaucacuguuca

SEQ ID NO: 3748647 - RNA, 17 nt, Human
aacuccugaccucaggc

SEQ ID NO: 3748648 - RNA, 14 nt, Human
aacuccuguccuuu

SEQ ID NO: 3748649 - RNA, 13 nt, Human
aacuccugugacc

SEQ ID NO: 3748650 - RNA, 19 nt, Human
aacucgaggacuguauuug

SEQ ID NO: 3748651 - RNA, 22 nt, Human
aacucgaggacuguauuuguga

SEQ ID NO: 3748652 - RNA, 18 nt, Human
aacucgcuucucugugac

SEQ ID NO: 3748653 - RNA, 17 nt, Human
aacucgguguccccacc

SEQ ID NO: 3748654 - RNA, 22 nt, Human
aacucgguguccccaccaucug

SEQ ID NO: 3748655 - RNA, 23 nt, Human
aacucgguguccccaccaucugc

SEQ ID NO: 3748656 - RNA, 19 nt, Human
aacucguauagcaugcauc

SEQ ID NO: 3748657 - RNA, 14 nt, Human
aacucuaaaagauc

SEQ ID NO: 3748658 - RNA, 17 nt, Human
aacucuaaguguuugcu

SEQ ID NO: 3748659 - RNA, 15 nt, Human
aacucuaauagugcu

SEQ ID NO: 3748660 - RNA, 13 nt, Human
aacucuaauucua

SEQ ID NO: 3748661 - RNA, 22 nt, Human
aacucuauauuguucagcaugc

SEQ ID NO: 3748662 - RNA, 23 nt, Human
aacucuauggguaucaaacagcu

SEQ ID NO: 3748663 - RNA, 22 nt, Human
aacucuccucugcugcuggcug

SEQ ID NO: 3748664 - RNA, 23 nt, Human
aacucuccucugcugcuggcugg

SEQ ID NO: 3748665 - RNA, 20 nt, Human
aacucucuggaagccccugg

SEQ ID NO: 3748666 - RNA, 10 nt, Human
aacucucuuu

SEQ ID NO: 3748667 - RNA, 19 nt, Human
aacucucuuugggaauguu

SEQ ID NO: 3748668 - RNA, 14 nt, Human
aacucugaacuuug

SEQ ID NO: 3748669 - RNA, 18 nt, Human
aacucugaacuuuggaga

SEQ ID NO: 3748670 - RNA, 15 nt, Human
aacucugaauaagca

SEQ ID NO: 3748671 - RNA, 19 nt, Human
aacucugaauuuuaaagca

SEQ ID NO: 3748672 - RNA, 15 nt, Human
aacucugacaagggc

SEQ ID NO: 3748673 - RNA, 17 nt, Human
aacucugacaagggcug

SEQ ID NO: 3748674 - RNA, 19 nt, Human
aacucugacaagggcugac

SEQ ID NO: 3748675 - RNA, 22 nt, Human
aacucugacaagggcugaccug

SEQ ID NO: 3748676 - RNA, 23 nt, Human
aacucugagagauuuggggcuaa

SEQ ID NO: 3748677 - RNA, 18 nt, Human
aacucugagugcaaacuu

SEQ ID NO: 3748678 - RNA, 20 nt, Human
aacucugagugcaaacuuca

SEQ ID NO: 3748679 - RNA, 22 nt, Human
aacucugagugcaaacuucaga

SEQ ID NO: 3748680 - RNA, 13 nt, Human
aacucugauguaa

SEQ ID NO: 3748681 - RNA, 20 nt, Human
aacucugauguaaaugaagu

SEQ ID NO: 3748682 - RNA, 15 nt, Human
aacucugcacuacuc

SEQ ID NO: 3748683 - RNA, 15 nt, Human
aacucugcauguaga

SEQ ID NO: 3748684 - RNA, 12 nt, Human
aacucugccugc

SEQ ID NO: 3748685 - RNA, 15 nt, Human
aacucugcugagggu

SEQ ID NO: 3748686 - RNA, 21 nt, Human
aacucugcugaggguccagaa

SEQ ID NO: 3748687 - RNA, 13 nt, Human
aacucugguggca

SEQ ID NO: 3748688 - RNA, 15 nt, Human
aacucuuaucucagu

SEQ ID NO: 3748689 - RNA, 21 nt, Human
aacucuucaaucucuugcacu

SEQ ID NO: 3748690 - RNA, 16 nt, Human
aacucuucucauuacu

SEQ ID NO: 3748691 - RNA, 12 nt, Human
aacucuuucaaa

SEQ ID NO: 3748692 - RNA, 15 nt, Human
aacucuuuguuauuu

SEQ ID NO: 3748693 - RNA, 12 nt, Human
aacugaaaacau

SEQ ID NO: 3748694 - RNA, 18 nt, Human
aacugaaaacauaaaaag

SEQ ID NO: 3748695 - RNA, 13 nt, Human
aacugaaaagaga

SEQ ID NO: 3748696 - RNA, 14 nt, Human
aacugaaaagagag

SEQ ID NO: 3748697 - RNA, 19 nt, Human
aacugaaaagagagcagag

SEQ ID NO: 3748698 - RNA, 20 nt, Human
aacugaaaagagagcagaga

SEQ ID NO: 3748699 - RNA, 22 nt, Human
aacugaaaagagagcagagaau

SEQ ID NO: 3748700 - RNA, 19 nt, Human
aacugaaaaucuaauauua

SEQ ID NO: 3748701 - RNA, 16 nt, Human
aacugaaacaugcuua

SEQ ID NO: 3748702 - RNA, 13 nt, Human
aacugaaaucaua

SEQ ID NO: 3748703 - RNA, 20 nt, Human
aacugaaaucauacuucuua

SEQ ID NO: 3748704 - RNA, 16 nt, Human
aacugaaaugccugcu

SEQ ID NO: 3748705 - RNA, 16 nt, Human
aacugaacaaaaaaau

SEQ ID NO: 3748706 - RNA, 22 nt, Human
aacugaacaccauugaaggcuu

SEQ ID NO: 3748707 - RNA, 15 nt, Human
aacugaacuucagag

SEQ ID NO: 3748708 - RNA, 20 nt, Human
aacugaacuuugaagacccg

SEQ ID NO: 3748709 - RNA, 13 nt, Human
aacugaagagaca

SEQ ID NO: 3748710 - RNA, 13 nt, Human
aacugaagccaga

SEQ ID NO: 3748711 - RNA, 21 nt, Human
aacugaaggcuaaaaagcaac

SEQ ID NO: 3748712 - RNA, 16 nt, Human
aacugaaguuucacau

SEQ ID NO: 3748713 - RNA, 10 nt, Human
aacugaauaa

SEQ ID NO: 3748714 - RNA, 13 nt, Human
aacugaauaccac

SEQ ID NO: 3748715 - RNA, 14 nt, Human
aacugaauaccacu

SEQ ID NO: 3748716 - RNA, 15 nt, Human
aacugaauaccacuc

SEQ ID NO: 3748717 - RNA, 17 nt, Human
aacugaauaccacucug

SEQ ID NO: 3748718 - RNA, 21 nt, Human
aacugaauaccacucuguaau

SEQ ID NO: 3748719 - RNA, 15 nt, Human
aacugacaaaucaag

SEQ ID NO: 3748720 - RNA, 18 nt, Human
aacugacaaaucaaguuu

SEQ ID NO: 3748721 - RNA, 13 nt, Human
aacugacacagga

SEQ ID NO: 3748722 - RNA, 23 nt, Human
aacugacacaugcugaacaucac

SEQ ID NO: 3748723 - RNA, 14 nt, Human
aacugaccagccuc

SEQ ID NO: 3748724 - RNA, 22 nt, Human
aacugacuaucauaaaaucaaa

SEQ ID NO: 3748725 - RNA, 20 nt, Human
aacugacuauucuugaugua

SEQ ID NO: 3748726 - RNA, 19 nt, Human
aacugacucuuaagaagac

SEQ ID NO: 3748727 - RNA, 13 nt, Human
aacugacuugcug

SEQ ID NO: 3748728 - RNA, 13 nt, Human
aacugacuuuauc

SEQ ID NO: 3748729 - RNA, 13 nt, Human
aacugagcuugga

SEQ ID NO: 3748730 - RNA, 17 nt, Human
aacugagcuuggaagcu

SEQ ID NO: 3748731 - RNA, 21 nt, Human
aacugagcuuggaagcuucug

SEQ ID NO: 3748732 - RNA, 12 nt, Human
aacugaggaauu

SEQ ID NO: 3748733 - RNA, 16 nt, Human
aacugaggaauuuucu

SEQ ID NO: 3748734 - RNA, 20 nt, Human
aacugaggaauuuucuuugu

SEQ ID NO: 3748735 - RNA, 20 nt, Human
aacugaggcagacagcagcu

SEQ ID NO: 3748736 - RNA, 16 nt, Human
aacugagugccuuuug

SEQ ID NO: 3748737 - RNA, 23 nt, Human
aacugauaguuacuguugugacc

SEQ ID NO: 3748738 - RNA, 16 nt, Human
aacugaucauguuuau

SEQ ID NO: 3748739 - RNA, 17 nt, Human
aacugcaaccuuguuua

SEQ ID NO: 3748740 - RNA, 17 nt, Human
aacugcaagucacaaag

SEQ ID NO: 3748741 - RNA, 23 nt, Human
aacugcaagucacaaaggaaugg

SEQ ID NO: 3748742 - RNA, 17 nt, Human
aacugcaauagagacug

SEQ ID NO: 3748743 - RNA, 16 nt, Human
aacugcacaugauuuc

SEQ ID NO: 3748744 - RNA, 21 nt, Human
aacugcacaugauuucacaaa

SEQ ID NO: 3748745 - RNA, 17 nt, Human
aacugcagaccuguccu

SEQ ID NO: 3748746 - RNA, 18 nt, Human
aacugcagaccuguccuc

SEQ ID NO: 3748747 - RNA, 19 nt, Human
aacugcagaccuguccucc

SEQ ID NO: 3748748 - RNA, 10 nt, Human
aacugcagca

SEQ ID NO: 3748749 - RNA, 19 nt, Human
aacugcaggcccuggccuc

SEQ ID NO: 3748750 - RNA, 20 nt, Human
aacugcaggcccuggccucc

SEQ ID NO: 3748751 - RNA, 23 nt, Human
aacugcagggaaaauuauuugca

SEQ ID NO: 3748752 - RNA, 18 nt, Human
aacugcaugcccagagac

SEQ ID NO: 3748753 - RNA, 16 nt, Human
aacugcaugcugcugg

SEQ ID NO: 3748754 - RNA, 19 nt, Human
aacugcauguauaaaugaa

SEQ ID NO: 3748755 - RNA, 22 nt, Human
aacugcauuaccgcguuguaaa

SEQ ID NO: 3748756 - RNA, 16 nt, Human
aacugcauuagaaauu

SEQ ID NO: 3748757 - RNA, 18 nt, Human
aacugccaaaaugcucua

SEQ ID NO: 3748758 - RNA, 15 nt, Human
aacugccaagaaauu

SEQ ID NO: 3748759 - RNA, 14 nt, Human
aacugccaguuuug

SEQ ID NO: 3748760 - RNA, 16 nt, Human
aacugcccaguuucca

SEQ ID NO: 3748761 - RNA, 21 nt, Human
aacugcccccucugcccugcg

SEQ ID NO: 3748762 - RNA, 16 nt, Human
aacugcguuaaaggcu

SEQ ID NO: 3748763 - RNA, 19 nt, Human
aacugcucuugggcaauau

SEQ ID NO: 3748764 - RNA, 22 nt, Human
aacugcucuugggcaauauucu

SEQ ID NO: 3748765 - RNA, 23 nt, Human
aacugcucuugggcaauauucuc

SEQ ID NO: 3748766 - RNA, 21 nt, Human
aacugcugacuguuuucucuu

SEQ ID NO: 3748767 - RNA, 23 nt, Human
aacugcugacuguuuucucuuga

SEQ ID NO: 3748768 - RNA, 18 nt, Human
aacugcugaugcucaugg

SEQ ID NO: 3748769 - RNA, 19 nt, Human
aacugcugaugcucauggu

SEQ ID NO: 3748770 - RNA, 22 nt, Human
aacugcugccccaaaggaagcu

SEQ ID NO: 3748771 - RNA, 23 nt, Human
aacugcuggacgucuuucuuuuu

SEQ ID NO: 3748772 - RNA, 15 nt, Human
aacugcuuucuuucg

SEQ ID NO: 3748773 - RNA, 17 nt, Human
aacuggaaaacagaaca

SEQ ID NO: 3748774 - RNA, 19 nt, Human
aacuggaaaacagaacacu

SEQ ID NO: 3748775 - RNA, 16 nt, Human
aacuggaaguuauuua

SEQ ID NO: 3748776 - RNA, 14 nt, Human
aacuggaauaagaa

SEQ ID NO: 3748777 - RNA, 15 nt, Human
aacuggaauaagaag

SEQ ID NO: 3748778 - RNA, 17 nt, Human
aacuggaauaguuuuuu

SEQ ID NO: 3748779 - RNA, 16 nt, Human
aacuggaaucagcuca

SEQ ID NO: 3748780 - RNA, 17 nt, Human
aacuggacccuguugcu

SEQ ID NO: 3748781 - RNA, 22 nt, Human
aacuggacucaggaugcccagg

SEQ ID NO: 3748782 - RNA, 16 nt, Human
aacuggauuaaacuua

SEQ ID NO: 3748783 - RNA, 19 nt, Human
aacuggcaauugucuauuu

SEQ ID NO: 3748784 - RNA, 17 nt, Human
aacuggcaguuuuccau

SEQ ID NO: 3748785 - RNA, 18 nt, Human
aacuggccauggccugca

SEQ ID NO: 3748786 - RNA, 14 nt, Human
aacuggcccucuuc

SEQ ID NO: 3748787 - RNA, 15 nt, Human
aacuggcccucuucu

SEQ ID NO: 3748788 - RNA, 16 nt, Human
aacuggcccucuucuu

SEQ ID NO: 3748789 - RNA, 11 nt, Human
aacuggcugca

SEQ ID NO: 3748790 - RNA, 18 nt, Human
aacugggaaccccuuucc

SEQ ID NO: 3748791 - RNA, 18 nt, Human
ggcucuccaagugccaga

SEQ ID NO: 3748792 - RNA, 19 nt, Human
ggcucuccaagugccagag

SEQ ID NO: 3748793 - RNA, 20 nt, Human
ggcucuccaagugccagagg

SEQ ID NO: 3748794 - RNA, 22 nt, Human
ggcucuccaccucagccuugga

SEQ ID NO: 3748795 - RNA, 14 nt, Human
ggcucuccuggccc

SEQ ID NO: 3748796 - RNA, 21 nt, Human
ggcucucgcggccucuucucu

SEQ ID NO: 3748797 - RNA, 12 nt, Human
ggcucucuccag

SEQ ID NO: 3748798 - RNA, 22 nt, Human
ggcucugaagcaaggcggugga

SEQ ID NO: 3748799 - RNA, 20 nt, Human
ggcucugacaaagcuucccg

SEQ ID NO: 3748800 - RNA, 13 nt, Human
ggcucugaccagu

SEQ ID NO: 3748801 - RNA, 14 nt, Human
ggcucugagcgccu

SEQ ID NO: 3748802 - RNA, 15 nt, Human
ggcucugagcgccuc

SEQ ID NO: 3748803 - RNA, 14 nt, Human
ggcucugaggcgcc

SEQ ID NO: 3748804 - RNA, 22 nt, Human
ggcucugaugaaaaauugcuga

SEQ ID NO: 3748805 - RNA, 12 nt, Human
ggcucugcacag

SEQ ID NO: 3748806 - RNA, 12 nt, Human
ggcucugcaguc

SEQ ID NO: 3748807 - RNA, 22 nt, Human
ggcucugcaguccuacucaagc

SEQ ID NO: 3748808 - RNA, 17 nt, Human
ggcucugccaguccugu

SEQ ID NO: 3748809 - RNA, 20 nt, Human
ggcucugccaguccuguccu

SEQ ID NO: 3748810 - RNA, 17 nt, Human
ggcucugccccagaggc

SEQ ID NO: 3748811 - RNA, 14 nt, Human
ggcucugccccagc

SEQ ID NO: 3748812 - RNA, 21 nt, Human
ggcucugccccagcucuggcu

SEQ ID NO: 3748813 - RNA, 15 nt, Human
ggcucugcccuuggu

SEQ ID NO: 3748814 - RNA, 16 nt, Human
ggcucugccucccauc

SEQ ID NO: 3748815 - RNA, 18 nt, Human
ggcucuggacucuaaaga

SEQ ID NO: 3748816 - RNA, 12 nt, Human
ggcucuggagac

SEQ ID NO: 3748817 - RNA, 16 nt, Human
ggcucuggagacagcc

SEQ ID NO: 3748818 - RNA, 21 nt, Human
ggcucuggagacagccccaga

SEQ ID NO: 3748819 - RNA, 16 nt, Human
ggcucuggagcccacu

SEQ ID NO: 3748820 - RNA, 23 nt, Human
ggcucuguccccagccugggaaa

SEQ ID NO: 3748821 - RNA, 15 nt, Human
ggcucugucccccug

SEQ ID NO: 3748822 - RNA, 15 nt, Human
ggcucugugcaggga

SEQ ID NO: 3748823 - RNA, 19 nt, Human
ggcucugugcugacccucc

SEQ ID NO: 3748824 - RNA, 18 nt, Human
ggcucuguggcuugcuag

SEQ ID NO: 3748825 - RNA, 12 nt, Human
ggcucugugggc

SEQ ID NO: 3748826 - RNA, 18 nt, Human
ggcucugugggcugcacu

SEQ ID NO: 3748827 - RNA, 19 nt, Human
ggcucugugggugaugggg

SEQ ID NO: 3748828 - RNA, 20 nt, Human
ggcucuuagcagcuuccaga

SEQ ID NO: 3748829 - RNA, 21 nt, Human
ggcucuuagcagcuuccagau

SEQ ID NO: 3748830 - RNA, 12 nt, Human
ggcucuucucau

SEQ ID NO: 3748831 - RNA, 17 nt, Human
ggcucuucuccccagag

SEQ ID NO: 3748832 - RNA, 13 nt, Human
ggcucuucuccuu

SEQ ID NO: 3748833 - RNA, 20 nt, Human
ggcucuugaacugagcuugg

SEQ ID NO: 3748834 - RNA, 23 nt, Human
ggcucuugugcuggauggagccc

SEQ ID NO: 3748835 - RNA, 15 nt, Human
ggcucuuuccuugcu

SEQ ID NO: 3748836 - RNA, 15 nt, Human
ggcucuuugggcugg

SEQ ID NO: 3748837 - RNA, 22 nt, Human
ggcucuuuggggucagccaggg

SEQ ID NO: 3748838 - RNA, 11 nt, Human
ggcugaaagcc

SEQ ID NO: 3748839 - RNA, 21 nt, Human
ggcugaacccugugcuggugu

SEQ ID NO: 3748840 - RNA, 15 nt, Human
ggcugaacggggaga

SEQ ID NO: 3748841 - RNA, 13 nt, Human
ggcugaaggacug

SEQ ID NO: 3748842 - RNA, 18 nt, Human
ggcugaaggacugugaca

SEQ ID NO: 3748843 - RNA, 22 nt, Human
ggcugacacuucaaggugacag

SEQ ID NO: 3748844 - RNA, 22 nt, Human
ggcugacaugaagcuguugugu

SEQ ID NO: 3748845 - RNA, 13 nt, Human
ggcugaccacagc

SEQ ID NO: 3748846 - RNA, 15 nt, Human
ggcugaccacagcac

SEQ ID NO: 3748847 - RNA, 17 nt, Human
ggcugacccagucccug

SEQ ID NO: 3748848 - RNA, 18 nt, Human
ggcugaccccaaagagcc

SEQ ID NO: 3748849 - RNA, 22 nt, Human
ggcugaccccaaagagccugga

SEQ ID NO: 3748850 - RNA, 23 nt, Human
ggcugaccuuccucgcagagagg

SEQ ID NO: 3748851 - RNA, 22 nt, Human
ggcugacggugcagucugggug

SEQ ID NO: 3748852 - RNA, 16 nt, Human
ggcugacugggccagg

SEQ ID NO: 3748853 - RNA, 14 nt, Human
ggcugagaacacug

SEQ ID NO: 3748854 - RNA, 21 nt, Human
ggcugagacugcgggaugguc

SEQ ID NO: 3748855 - RNA, 15 nt, Human
ggcugagauaugaac

SEQ ID NO: 3748856 - RNA, 11 nt, Human
ggcugagccug

SEQ ID NO: 3748857 - RNA, 15 nt, Human
ggcugagccuggcug

SEQ ID NO: 3748858 - RNA, 19 nt, Human
ggcugagcggaugcaucug

SEQ ID NO: 3748859 - RNA, 19 nt, Human
ggcugaggaggccuccauc

SEQ ID NO: 3748860 - RNA, 13 nt, Human
ggcugaggcagaa

SEQ ID NO: 3748861 - RNA, 14 nt, Human
ggcugaggcagaag

SEQ ID NO: 3748862 - RNA, 14 nt, Human
ggcugaggcaggag

SEQ ID NO: 3748863 - RNA, 16 nt, Human
ggcugaggcaggagaa

SEQ ID NO: 3748864 - RNA, 23 nt, Human
ggcugaggcaggagaauggugug

SEQ ID NO: 3748865 - RNA, 13 nt, Human
ggcugaggccacc

SEQ ID NO: 3748866 - RNA, 16 nt, Human
ggcugaggccuggacu

SEQ ID NO: 3748867 - RNA, 12 nt, Human
ggcugagggccu

SEQ ID NO: 3748868 - RNA, 14 nt, Human
ggcugagggccugc

SEQ ID NO: 3748869 - RNA, 15 nt, Human
ggcugagggccugcu

SEQ ID NO: 3748870 - RNA, 15 nt, Human
ggcugaggugggagg

SEQ ID NO: 3748871 - RNA, 16 nt, Human
ggcugagguuccucug

SEQ ID NO: 3748872 - RNA, 17 nt, Human
ggcugagguuccucugc

SEQ ID NO: 3748873 - RNA, 19 nt, Human
ggcugagguuccucugccu

SEQ ID NO: 3748874 - RNA, 17 nt, Human
ggcugagucaggacuug

SEQ ID NO: 3748875 - RNA, 22 nt, Human
ggcugagucaugaucucccugc

SEQ ID NO: 3748876 - RNA, 16 nt, Human
ggcugagugcaggccc

SEQ ID NO: 3748877 - RNA, 17 nt, Human
ggcugagugcaggccca

SEQ ID NO: 3748878 - RNA, 19 nt, Human
ggcugagugcaggcccacc

SEQ ID NO: 3748879 - RNA, 15 nt, Human
ggcugaucucaggga

SEQ ID NO: 3748880 - RNA, 19 nt, Human
ggcugaucucagggaagcc

SEQ ID NO: 3748881 - RNA, 18 nt, Human
ggcugaugucaauuucug

SEQ ID NO: 3748882 - RNA, 17 nt, Human
ggcugcaccggcuggcc

SEQ ID NO: 3748883 - RNA, 16 nt, Human
ggcugcagaggccaga

SEQ ID NO: 3748884 - RNA, 18 nt, Human
ggcugcagaggccagagg

SEQ ID NO: 3748885 - RNA, 16 nt, Human
ggcugcagccaggcca

SEQ ID NO: 3748886 - RNA, 18 nt, Human
ggcugcagccucaggacu

SEQ ID NO: 3748887 - RNA, 15 nt, Human
ggcugcagccugcgc

SEQ ID NO: 3748888 - RNA, 17 nt, Human
ggcugcaguagccaugu

SEQ ID NO: 3748889 - RNA, 22 nt, Human
ggcugcaguucgacucugugcu

SEQ ID NO: 3748890 - RNA, 16 nt, Human
ggcugcauagaaggag

SEQ ID NO: 3748891 - RNA, 21 nt, Human
ggcugccaaugggagcucaug

SEQ ID NO: 3748892 - RNA, 13 nt, Human
ggcugccaccaag

SEQ ID NO: 3748893 - RNA, 20 nt, Human
ggcugcccacacaccccaau

SEQ ID NO: 3748894 - RNA, 19 nt, Human
ggcugcccccggcccccug

SEQ ID NO: 3748895 - RNA, 13 nt, Human
ggcugccccucuc

SEQ ID NO: 3748896 - RNA, 13 nt, Human
ggcugcccgcucc

SEQ ID NO: 3748897 - RNA, 18 nt, Human
ggcugcccgcucccagug

SEQ ID NO: 3748898 - RNA, 14 nt, Human
ggcugcccuccugu

SEQ ID NO: 3748899 - RNA, 20 nt, Human
ggcugcccuccugugcucag

SEQ ID NO: 3748900 - RNA, 13 nt, Human
ggcugcccugaga

SEQ ID NO: 3748901 - RNA, 12 nt, Human
ggcugcccugcc

SEQ ID NO: 3748902 - RNA, 12 nt, Human
ggcugcccuggc

SEQ ID NO: 3748903 - RNA, 19 nt, Human
ggcugcccuggcccugagg

SEQ ID NO: 3748904 - RNA, 21 nt, Human
ggcugcccuggcccugaggug

SEQ ID NO: 3748905 - RNA, 15 nt, Human
ggcugccggggcagc

SEQ ID NO: 3748906 - RNA, 21 nt, Human
ggcugccggguucuagucucc

SEQ ID NO: 3748907 - RNA, 23 nt, Human
ggcugccguggggccgccgccuc

SEQ ID NO: 3748908 - RNA, 19 nt, Human
ggcugccuccacucccacu

SEQ ID NO: 3748909 - RNA, 12 nt, Human
ggcugccuccca

SEQ ID NO: 3748910 - RNA, 20 nt, Human
ggcugccucccuuguggcag

SEQ ID NO: 3748911 - RNA, 15 nt, Human
ggcugccuggagccc

SEQ ID NO: 3748912 - RNA, 11 nt, Human
ggcugccuggg

SEQ ID NO: 3748913 - RNA, 15 nt, Human
ggcugccugggcugu

SEQ ID NO: 3748914 - RNA, 15 nt, Human
ggcugcgcacugugu

SEQ ID NO: 3748915 - RNA, 17 nt, Human
ggcugcggcgucugucu

SEQ ID NO: 3748916 - RNA, 16 nt, Human
ggcugcuacccagaaa

SEQ ID NO: 3748917 - RNA, 12 nt, Human
ggcugcucccac

SEQ ID NO: 3748918 - RNA, 21 nt, Human
ggcugcucccaccuggcucug

SEQ ID NO: 3748919 - RNA, 22 nt, Human
ggcugcucccaccuggcucugu

SEQ ID NO: 3748920 - RNA, 12 nt, Human
ggcugcuccucc

SEQ ID NO: 3748921 - RNA, 19 nt, Human
ggcugcuccuccagggcca

SEQ ID NO: 3748922 - RNA, 22 nt, Human
ggcugcucggggugcacaggag

SEQ ID NO: 3748923 - RNA, 13 nt, Human
ggcugcugaagcu

SEQ ID NO: 3748924 - RNA, 15 nt, Human
ggcugcugaaggcuc

SEQ ID NO: 3748925 - RNA, 16 nt, Human
ggcugcugaccuccac

SEQ ID NO: 3748926 - RNA, 19 nt, Human
ggcugcugaucgccuuccc

SEQ ID NO: 3748927 - RNA, 11 nt, Human
ggcugcugccc

SEQ ID NO: 3748928 - RNA, 14 nt, Human
ggcugcugcccagg

SEQ ID NO: 3748929 - RNA, 13 nt, Human
ggcugcugccccc

SEQ ID NO: 3748930 - RNA, 12 nt, Human
ggcugcuggagg

SEQ ID NO: 3748931 - RNA, 14 nt, Human
ggcugcuggcgccu

SEQ ID NO: 3748932 - RNA, 18 nt, Human
ggcugcuggcgccucugc

SEQ ID NO: 3748933 - RNA, 22 nt, Human
ggcugcugggggcaacuggcca

SEQ ID NO: 3748934 - RNA, 14 nt, Human
ggcugcuuagaauc

SEQ ID NO: 3748935 - RNA, 11 nt, Human
ggcugcuucaa

SEQ ID NO: 3748936 - RNA, 14 nt, Human
ggcugcuucaagga

SEQ ID NO: 3748937 - RNA, 19 nt, Human
ggcugcuucaaggauccug

SEQ ID NO: 3748938 - RNA, 16 nt, Human
ggcugcuuccuccugg

SEQ ID NO: 3748939 - RNA, 19 nt, Human
ggcugcuuccuccuggaaa

SEQ ID NO: 3748940 - RNA, 18 nt, Human
ggcugcuucugccacugc

SEQ ID NO: 3748941 - RNA, 15 nt, Human
ggcugcuuuccaaag

SEQ ID NO: 3748942 - RNA, 16 nt, Human
ggcacuuuaaaacacu

SEQ ID NO: 3748943 - RNA, 22 nt, Human
ggcacuuugaaggggccucacc

SEQ ID NO: 3748944 - RNA, 16 nt, Human
ggcacuuugacagcgc

SEQ ID NO: 3748945 - RNA, 14 nt, Human
ggcacuuuuuaauu

SEQ ID NO: 3748946 - RNA, 22 nt, Human
ggcagaaagguucugcccggga

SEQ ID NO: 3748947 - RNA, 14 nt, Human
ggcagaacacuaac

SEQ ID NO: 3748948 - RNA, 15 nt, Human
ggcagaacacuaacc

SEQ ID NO: 3748949 - RNA, 14 nt, Human
ggcagaacagccgc

SEQ ID NO: 3748950 - RNA, 15 nt, Human
ggcagaagacaccag

SEQ ID NO: 3748951 - RNA, 16 nt, Human
ggcagaagacaccaga

SEQ ID NO: 3748952 - RNA, 21 nt, Human
ggcagaagacaccagagcaga

SEQ ID NO: 3748953 - RNA, 12 nt, Human
ggcagaaggaag

SEQ ID NO: 3748954 - RNA, 18 nt, Human
ggcagaaugcuagcucug

SEQ ID NO: 3748955 - RNA, 17 nt, Human
ggcagacacagggacuu

SEQ ID NO: 3748956 - RNA, 14 nt, Human
ggcagacagcagcu

SEQ ID NO: 3748957 - RNA, 20 nt, Human
ggcagacagcagcucaggca

SEQ ID NO: 3748958 - RNA, 17 nt, Human
ggcagacagcaggcagc

SEQ ID NO: 3748959 - RNA, 23 nt, Human
ggcagacagcaggcagcgccaag

SEQ ID NO: 3748960 - RNA, 16 nt, Human
ggcagacgccggggac

SEQ ID NO: 3748961 - RNA, 19 nt, Human
ggcagacucuuuaugcuug

SEQ ID NO: 3748962 - RNA, 14 nt, Human
ggcagagaaagaag

SEQ ID NO: 3748963 - RNA, 17 nt, Human
ggcagagaaagaagaga

SEQ ID NO: 3748964 - RNA, 20 nt, Human
ggcagagaagaaagaacgga

SEQ ID NO: 3748965 - RNA, 16 nt, Human
ggcagagagagagaaa

SEQ ID NO: 3748966 - RNA, 16 nt, Human
ggcagagaggcugugg

SEQ ID NO: 3748967 - RNA, 16 nt, Human
ggcagagaugccuccc

SEQ ID NO: 3748968 - RNA, 22 nt, Human
ggcagagaugccucccugagcu

SEQ ID NO: 3748969 - RNA, 10 nt, Human
ggcagagcag

SEQ ID NO: 3748970 - RNA, 20 nt, Human
ggcagagcagagaccauccc

SEQ ID NO: 3748971 - RNA, 17 nt, Human
ggcagagccaggaagau

SEQ ID NO: 3748972 - RNA, 12 nt, Human
ggcagagcccaa

SEQ ID NO: 3748973 - RNA, 20 nt, Human
ggcagagcccugcucccucc

SEQ ID NO: 3748974 - RNA, 12 nt, Human
ggcagagcuggu

SEQ ID NO: 3748975 - RNA, 14 nt, Human
ggcagagcuggugc

SEQ ID NO: 3748976 - RNA, 13 nt, Human
ggcagagcuucuu

SEQ ID NO: 3748977 - RNA, 21 nt, Human
ggcagagcuuggacuggaugc

SEQ ID NO: 3748978 - RNA, 14 nt, Human
ggcagaggcccagg

SEQ ID NO: 3748979 - RNA, 21 nt, Human
ggcagaggcccaggcugccgu

SEQ ID NO: 3748980 - RNA, 22 nt, Human
ggcagaggcccaggcugccguc

SEQ ID NO: 3748981 - RNA, 17 nt, Human
ggcagaggccugggcug

SEQ ID NO: 3748982 - RNA, 18 nt, Human
ggcagaggccugggcugg

SEQ ID NO: 3748983 - RNA, 19 nt, Human
ggcagaggcuggaggcagg

SEQ ID NO: 3748984 - RNA, 13 nt, Human
ggcagagggcugg

SEQ ID NO: 3748985 - RNA, 21 nt, Human
ggcagagggcuggaggcccag

SEQ ID NO: 3748986 - RNA, 15 nt, Human
ggcagaguccuggag

SEQ ID NO: 3748987 - RNA, 16 nt, Human
ggcagagugccccacc

SEQ ID NO: 3748988 - RNA, 21 nt, Human
ggcagagugccccaccugcca

SEQ ID NO: 3748989 - RNA, 22 nt, Human
ggcagagugccccaccugccac

SEQ ID NO: 3748990 - RNA, 19 nt, Human
ggcagaguugaagacagag

SEQ ID NO: 3748991 - RNA, 21 nt, Human
ggcagaguugaagacagagcu

SEQ ID NO: 3748992 - RNA, 14 nt, Human
ggcagaguuguaaa

SEQ ID NO: 3748993 - RNA, 15 nt, Human
ggcagaguuguaaau

SEQ ID NO: 3748994 - RNA, 18 nt, Human
ggcagaguuguaaauaua

SEQ ID NO: 3748995 - RNA, 23 nt, Human
ggcagaguuguaaauauauaaau

SEQ ID NO: 3748996 - RNA, 20 nt, Human
ggcagauaaucagccucuua

SEQ ID NO: 3748997 - RNA, 14 nt, Human
ggcagauccaggac

SEQ ID NO: 3748998 - RNA, 13 nt, Human
ggcagaucuccca

SEQ ID NO: 3748999 - RNA, 19 nt, Human
ggcagaucucccacaugcc

SEQ ID NO: 3749000 - RNA, 16 nt, Human
ggcagaucugugcccc

SEQ ID NO: 3749001 - RNA, 18 nt, Human
ggcagaucugugccccau

SEQ ID NO: 3749002 - RNA, 15 nt, Human
ggcagauggggagac

SEQ ID NO: 3749003 - RNA, 14 nt, Human
ggcagauguaggag

SEQ ID NO: 3749004 - RNA, 16 nt, Human
ggcagauguaggaggg

SEQ ID NO: 3749005 - RNA, 24 nt, Human
ggcagauuuagugaaagcuagaga

SEQ ID NO: 3749006 - RNA, 21 nt, Human
ggcagauuuuacaaaagaugu

SEQ ID NO: 3749007 - RNA, 20 nt, Human
ggcagauuuuacagagcgca

SEQ ID NO: 3749008 - RNA, 17 nt, Human
ggcagcaacaauaaaua

SEQ ID NO: 3749009 - RNA, 22 nt, Human
ggcagcaacaauaaauagacac

SEQ ID NO: 3749010 - RNA, 12 nt, Human
ggcagcaaggcc

SEQ ID NO: 3749011 - RNA, 17 nt, Human
ggcagcaaggcccgagc

SEQ ID NO: 3749012 - RNA, 19 nt, Human
ggcagcaaggcccgagcag

SEQ ID NO: 3749013 - RNA, 23 nt, Human
ggcagcaaggcccgagcagcuga

SEQ ID NO: 3749014 - RNA, 16 nt, Human
ggcagcaauuuaaaug

SEQ ID NO: 3749015 - RNA, 18 nt, Human
ggcagcagaagggggugg

SEQ ID NO: 3749016 - RNA, 14 nt, Human
ggcagcagacacau

SEQ ID NO: 3749017 - RNA, 16 nt, Human
ggcagcagacacaugc

SEQ ID NO: 3749018 - RNA, 14 nt, Human
ggcagcagcagccc

SEQ ID NO: 3749019 - RNA, 14 nt, Human
ggcagcagccagcc

SEQ ID NO: 3749020 - RNA, 18 nt, Human
ggcagcagccagcccugc

SEQ ID NO: 3749021 - RNA, 15 nt, Human
ggcagcagcccccag

SEQ ID NO: 3749022 - RNA, 21 nt, Human
ggcagcagggcuacccugagc

SEQ ID NO: 3749023 - RNA, 19 nt, Human
ggcagcagugugaggccag

SEQ ID NO: 3749024 - RNA, 14 nt, Human
ggcagccagaccag

SEQ ID NO: 3749025 - RNA, 19 nt, Human
ggcagccagcaucugggcc

SEQ ID NO: 3749026 - RNA, 20 nt, Human
ggcagccagcaucugggccu

SEQ ID NO: 3749027 - RNA, 13 nt, Human
ggcagccaggcca

SEQ ID NO: 3749028 - RNA, 15 nt, Human
ggcagccaggcugcc

SEQ ID NO: 3749029 - RNA, 19 nt, Human
ggcagccagugcccugagc

SEQ ID NO: 3749030 - RNA, 15 nt, Human
ggcagcccagagacu

SEQ ID NO: 3749031 - RNA, 14 nt, Human
ggcagcccagccag

SEQ ID NO: 3749032 - RNA, 15 nt, Human
ggcagcccagccagc

SEQ ID NO: 3749033 - RNA, 18 nt, Human
ggcagcccagccagcguc

SEQ ID NO: 3749034 - RNA, 13 nt, Human
ggcagccccagca

SEQ ID NO: 3749035 - RNA, 23 nt, Human
ggcagccccagcaccaccagguc

SEQ ID NO: 3749036 - RNA, 13 nt, Human
ggcagccccagcc

SEQ ID NO: 3749037 - RNA, 19 nt, Human
ggcagccccagccugcuag

SEQ ID NO: 3749038 - RNA, 21 nt, Human
ggcagccccauucugccugcc

SEQ ID NO: 3749039 - RNA, 13 nt, Human
ggcagccgagcuc

SEQ ID NO: 3749040 - RNA, 19 nt, Human
ggcagccgcggugcccaac

SEQ ID NO: 3749041 - RNA, 21 nt, Human
ggcagccgugccuucagcucu

SEQ ID NO: 3749042 - RNA, 22 nt, Human
ggcagccuacuagggaccuggg

SEQ ID NO: 3749043 - RNA, 21 nt, Human
ggcagccucccauccagggcc

SEQ ID NO: 3749044 - RNA, 13 nt, Human
ggcagccucuggg

SEQ ID NO: 3749045 - RNA, 16 nt, Human
ggcagccucugggggg

SEQ ID NO: 3749046 - RNA, 19 nt, Human
ggcagccucuggggggugg

SEQ ID NO: 3749047 - RNA, 23 nt, Human
ggcagccucugggggguggccag

SEQ ID NO: 3749048 - RNA, 14 nt, Human
ggcagccugagagu

SEQ ID NO: 3749049 - RNA, 19 nt, Human
ggcagccugccuugcccac

SEQ ID NO: 3749050 - RNA, 11 nt, Human
ggcagccugga

SEQ ID NO: 3749051 - RNA, 19 nt, Human
ggcagccuggcucccagga

SEQ ID NO: 3749052 - RNA, 20 nt, Human
ggcagccuggcucccaggac

SEQ ID NO: 3749053 - RNA, 21 nt, Human
ggcagccuggcucccaggaca

SEQ ID NO: 3749054 - RNA, 22 nt, Human
ggcagccuggcucccaggacac

SEQ ID NO: 3749055 - RNA, 14 nt, Human
ggcagccuugugau

SEQ ID NO: 3749056 - RNA, 20 nt, Human
ggcagcgccaagugcgugcc

SEQ ID NO: 3749057 - RNA, 12 nt, Human
ggcagcucaccu

SEQ ID NO: 3749058 - RNA, 22 nt, Human
ggcagcucaccucucccuugga

SEQ ID NO: 3749059 - RNA, 13 nt, Human
ggcagcucagaga

SEQ ID NO: 3749060 - RNA, 21 nt, Human
ggcagcucagagaggguggga

SEQ ID NO: 3749061 - RNA, 15 nt, Human
ggcagcucaucucug

SEQ ID NO: 3749062 - RNA, 21 nt, Human
ggcagcuccucugucucgagc

SEQ ID NO: 3749063 - RNA, 13 nt, Human
ggcagcucuccag

SEQ ID NO: 3749064 - RNA, 21 nt, Human
ggcagcucuccagucaggagg

SEQ ID NO: 3749065 - RNA, 20 nt, Human
ggcagcucuggacagcccca

SEQ ID NO: 3749066 - RNA, 11 nt, Human
ggcagcugcca

SEQ ID NO: 3749067 - RNA, 15 nt, Human
ggcagcugccagaga

SEQ ID NO: 3749068 - RNA, 22 nt, Human
ggcagcugcuauuuauuuuccu

SEQ ID NO: 3749069 - RNA, 19 nt, Human
ggcagcugggcccaacccu

SEQ ID NO: 3749070 - RNA, 17 nt, Human
ggcagcuuagggcccug

SEQ ID NO: 3749071 - RNA, 18 nt, Human
ggcagcuuagggcccugg

SEQ ID NO: 3749072 - RNA, 19 nt, Human
ggcagcuuagggcccugga

SEQ ID NO: 3749073 - RNA, 21 nt, Human
ggcagcuucugcccccugcag

SEQ ID NO: 3749074 - RNA, 13 nt, Human
ggcagcuugcccc

SEQ ID NO: 3749075 - RNA, 14 nt, Human
ggcagcuuucuaga

SEQ ID NO: 3749076 - RNA, 15 nt, Human
ggcaggaaggagagc

SEQ ID NO: 3749077 - RNA, 23 nt, Human
ggcaggaaggagagccugcugca

SEQ ID NO: 3749078 - RNA, 18 nt, Human
ggcaggacaacgaggaag

SEQ ID NO: 3749079 - RNA, 21 nt, Human
ggcaggacaacgaggaagccc

SEQ ID NO: 3749080 - RNA, 14 nt, Human
ggcaggacaggaaa

SEQ ID NO: 3749081 - RNA, 15 nt, Human
ggcaggaccucagag

SEQ ID NO: 3749082 - RNA, 16 nt, Human
ggcaggacucagcucc

SEQ ID NO: 3749083 - RNA, 23 nt, Human
ggcaggacucagcuccccagagu

SEQ ID NO: 3749084 - RNA, 13 nt, Human
ggcaggagcucag

SEQ ID NO: 3749085 - RNA, 14 nt, Human
ggcaggagcucaga

SEQ ID NO: 3749086 - RNA, 18 nt, Human
ggcaggaguagcugagcu

SEQ ID NO: 3749087 - RNA, 19 nt, Human
ggcaggaguagcugagcuc

SEQ ID NO: 3749088 - RNA, 15 nt, Human
ggcaggaugacccug

SEQ ID NO: 3749089 - RNA, 17 nt, Human
ggcaggauuggggaaga

SEQ ID NO: 3749090 - RNA, 17 nt, Human
ggcaggcagaggcccag

SEQ ID NO: 3749091 - RNA, 23 nt, Human
ggcaggcagaggcccaggcugcc

SEQ ID NO: 3749092 - RNA, 23 nt, Human
gaaaagcuuagcuuuagaaacag

SEQ ID NO: 3749093 - RNA, 16 nt, Human
gaaaagcuucuuaauu

SEQ ID NO: 3749094 - RNA, 23 nt, Human
gaaaagcuucuuaauuaauuuga

SEQ ID NO: 3749095 - RNA, 14 nt, Human
gaaaagcuuuguuu

SEQ ID NO: 3749096 - RNA, 16 nt, Human
gaaaagcuuuguuugu

SEQ ID NO: 3749097 - RNA, 14 nt, Human
gaaaaggaaaagaa

SEQ ID NO: 3749098 - RNA, 16 nt, Human
gaaaaggaaaagaaaa

SEQ ID NO: 3749099 - RNA, 17 nt, Human
gaaaaggaaaagaaaaa

SEQ ID NO: 3749100 - RNA, 18 nt, Human
gaaaaggaaaagaaaaaa

SEQ ID NO: 3749101 - RNA, 23 nt, Human
gaaaaggaaucacguuagaggaa

SEQ ID NO: 3749102 - RNA, 11 nt, Human
gaaaaggcagg

SEQ ID NO: 3749103 - RNA, 12 nt, Human
gaaaaggccugg

SEQ ID NO: 3749104 - RNA, 20 nt, Human
gaaaagggacugcugggagg

SEQ ID NO: 3749105 - RNA, 21 nt, Human
gaaaagggagauucagacugu

SEQ ID NO: 3749106 - RNA, 17 nt, Human
gaaaagggaguuuaaaa

SEQ ID NO: 3749107 - RNA, 19 nt, Human
gaaaagguugaauaauaua

SEQ ID NO: 3749108 - RNA, 22 nt, Human
gaaaagguuuaugaaaaagaag

SEQ ID NO: 3749109 - RNA, 14 nt, Human
gaaaagguuuuauu

SEQ ID NO: 3749110 - RNA, 17 nt, Human
gaaaagguuuuauuuug

SEQ ID NO: 3749111 - RNA, 19 nt, Human
gaaaaguaauauuuauuaa

SEQ ID NO: 3749112 - RNA, 14 nt, Human
gaaaaguacauuua

SEQ ID NO: 3749113 - RNA, 13 nt, Human
gaaaagucaaacu

SEQ ID NO: 3749114 - RNA, 14 nt, Human
gaaaagucaaacug

SEQ ID NO: 3749115 - RNA, 22 nt, Human
gaaaagucaaggguaggguggg

SEQ ID NO: 3749116 - RNA, 16 nt, Human
gaaaagucguuuucca

SEQ ID NO: 3749117 - RNA, 16 nt, Human
gaaaagugaauugaag

SEQ ID NO: 3749118 - RNA, 20 nt, Human
gaaaagugcauauuuaucca

SEQ ID NO: 3749119 - RNA, 18 nt, Human
gaaaaguggcaagaccaa

SEQ ID NO: 3749120 - RNA, 19 nt, Human
gaaaaguuuaauauuaaag

SEQ ID NO: 3749121 - RNA, 20 nt, Human
gaaaaguuuaauauuaaagc

SEQ ID NO: 3749122 - RNA, 13 nt, Human
gaaaauaaaaagu

SEQ ID NO: 3749123 - RNA, 15 nt, Human
gaaaauaaaaaguua

SEQ ID NO: 3749124 - RNA, 14 nt, Human
gaaaauaaaauuaa

SEQ ID NO: 3749125 - RNA, 19 nt, Human
gaaaauaacgauaaaagac

SEQ ID NO: 3749126 - RNA, 15 nt, Human
gaaaauaacugaauu

SEQ ID NO: 3749127 - RNA, 18 nt, Human
gaaaauaagaauagaaau

SEQ ID NO: 3749128 - RNA, 19 nt, Human
gaaaauaagagcucaggau

SEQ ID NO: 3749129 - RNA, 13 nt, Human
gaaaauaaggcac

SEQ ID NO: 3749130 - RNA, 15 nt, Human
gaaaauaauugacag

SEQ ID NO: 3749131 - RNA, 14 nt, Human
gaaaauacaauaaa

SEQ ID NO: 3749132 - RNA, 15 nt, Human
gaaaauacuuaaaug

SEQ ID NO: 3749133 - RNA, 16 nt, Human
gaaaauacuuaaaugu

SEQ ID NO: 3749134 - RNA, 19 nt, Human
gaaaauaggaacgacucua

SEQ ID NO: 3749135 - RNA, 13 nt, Human
gaaaauaguuugu

SEQ ID NO: 3749136 - RNA, 14 nt, Human
gaaaauaguuuguu

SEQ ID NO: 3749137 - RNA, 21 nt, Human
gaaaauauaaaacaaauaaaa

SEQ ID NO: 3749138 - RNA, 14 nt, Human
gaaaauauaaguaa

SEQ ID NO: 3749139 - RNA, 13 nt, Human
gaaaauauacugu

SEQ ID NO: 3749140 - RNA, 16 nt, Human
gaaaauauacuguaaa

SEQ ID NO: 3749141 - RNA, 19 nt, Human
gaaaauauacuguaaagaa

SEQ ID NO: 3749142 - RNA, 16 nt, Human
gaaaauauauguauuu

SEQ ID NO: 3749143 - RNA, 22 nt, Human
gaaaauauauguauuuuuauau

SEQ ID NO: 3749144 - RNA, 13 nt, Human
gaaaauauucucu

SEQ ID NO: 3749145 - RNA, 13 nt, Human
gaaaauauuuaaa

SEQ ID NO: 3749146 - RNA, 12 nt, Human
gaaaauauuuuc

SEQ ID NO: 3749147 - RNA, 21 nt, Human
gaaaauauuuugucuaaaaug

SEQ ID NO: 3749148 - RNA, 14 nt, Human
gaaaaucaaauaca

SEQ ID NO: 3749149 - RNA, 15 nt, Human
gaaaaucaaauggua

SEQ ID NO: 3749150 - RNA, 14 nt, Human
gaaaaucauauugc

SEQ ID NO: 3749151 - RNA, 15 nt, Human
gaaaaucaucaagaa

SEQ ID NO: 3749152 - RNA, 16 nt, Human
gaaaaucaucaagaag

SEQ ID NO: 3749153 - RNA, 20 nt, Human
gaaaaucaucaagaagggcu

SEQ ID NO: 3749154 - RNA, 14 nt, Human
gaaaauccuaccaa

SEQ ID NO: 3749155 - RNA, 14 nt, Human
gaaaauccucuggc

SEQ ID NO: 3749156 - RNA, 20 nt, Human
gaaaaucuaauauuaaaaau

SEQ ID NO: 3749157 - RNA, 21 nt, Human
gaaaaucuaauauuaaaaaua

SEQ ID NO: 3749158 - RNA, 20 nt, Human
gaaaaucugaauuggaaugc

SEQ ID NO: 3749159 - RNA, 18 nt, Human
gaaaaucuuauaauuuaa

SEQ ID NO: 3749160 - RNA, 20 nt, Human
gaaaaucuuauaauuuaaaa

SEQ ID NO: 3749161 - RNA, 19 nt, Human
gaaaaucuuuauaaaugua

SEQ ID NO: 3749162 - RNA, 13 nt, Human
gaaaaugaaagcu

SEQ ID NO: 3749163 - RNA, 22 nt, Human
gaaaaugaauaucuauuaauau

SEQ ID NO: 3749164 - RNA, 16 nt, Human
gaaaaugaaucccucu

SEQ ID NO: 3749165 - RNA, 18 nt, Human
gaaaaugaguugugaaag

SEQ ID NO: 3749166 - RNA, 15 nt, Human
gaaaaugauacagca

SEQ ID NO: 3749167 - RNA, 16 nt, Human
gaaaaugaucugaguc

SEQ ID NO: 3749168 - RNA, 22 nt, Human
gaaaaugaucugagucccagga

SEQ ID NO: 3749169 - RNA, 19 nt, Human
gaaaaugcuagaagaaaac

SEQ ID NO: 3749170 - RNA, 20 nt, Human
gaaaaugcuagaagaaaaca

SEQ ID NO: 3749171 - RNA, 15 nt, Human
gaaaauggaaccagg

SEQ ID NO: 3749172 - RNA, 18 nt, Human
gaaaauggaaccaggcuu

SEQ ID NO: 3749173 - RNA, 23 nt, Human
gaaaauggacguguuaugacucc

SEQ ID NO: 3749174 - RNA, 17 nt, Human
gaaaauguaagcuguuu

SEQ ID NO: 3749175 - RNA, 20 nt, Human
gaaaauguaaguaaaugucu

SEQ ID NO: 3749176 - RNA, 12 nt, Human
gaaaauguacug

SEQ ID NO: 3749177 - RNA, 21 nt, Human
gaaaaugucagaaaccaguua

SEQ ID NO: 3749178 - RNA, 17 nt, Human
gaaaaugucuguaauaa

SEQ ID NO: 3749179 - RNA, 14 nt, Human
gaaaaugucuugug

SEQ ID NO: 3749180 - RNA, 18 nt, Human
gaaaaugugacccuccaa

SEQ ID NO: 3749181 - RNA, 20 nt, Human
gaaaaugugacccuccaaau

SEQ ID NO: 3749182 - RNA, 22 nt, Human
gaaaaugugacccuccaaaugg

SEQ ID NO: 3749183 - RNA, 15 nt, Human
gaaaaugugugugug

SEQ ID NO: 3749184 - RNA, 15 nt, Human
gaaaauguguguuuu

SEQ ID NO: 3749185 - RNA, 14 nt, Human
gaaaauguucauca

SEQ ID NO: 3749186 - RNA, 15 nt, Human
gaaaauguucuucca

SEQ ID NO: 3749187 - RNA, 17 nt, Human
gaaaauguugagaaucc

SEQ ID NO: 3749188 - RNA, 22 nt, Human
gaaaauguuuuguaagaaacca

SEQ ID NO: 3749189 - RNA, 20 nt, Human
gaaaauguuuuucugccagg

SEQ ID NO: 3749190 - RNA, 15 nt, Human
gaaaauuaacacugc

SEQ ID NO: 3749191 - RNA, 14 nt, Human
gaaaauuagacugu

SEQ ID NO: 3749192 - RNA, 14 nt, Human
gaaaauuaguuccc

SEQ ID NO: 3749193 - RNA, 16 nt, Human
gaaaauuauuugcaua

SEQ ID NO: 3749194 - RNA, 19 nt, Human
gaaaauucaaaaaguguuu

SEQ ID NO: 3749195 - RNA, 18 nt, Human
gaaaauucacuauuggcu

SEQ ID NO: 3749196 - RNA, 22 nt, Human
gaaaauucauuucacauuaaug

SEQ ID NO: 3749197 - RNA, 14 nt, Human
gaaaauuccagaaa

SEQ ID NO: 3749198 - RNA, 18 nt, Human
gaaaauuccuauaaggaa

SEQ ID NO: 3749199 - RNA, 22 nt, Human
gaaaauucuaacccagguaucc

SEQ ID NO: 3749200 - RNA, 16 nt, Human
gaaaauucuuaaaagg

SEQ ID NO: 3749201 - RNA, 19 nt, Human
gaaaauugaaauaaagcua

SEQ ID NO: 3749202 - RNA, 13 nt, Human
gaaaauugaauuu

SEQ ID NO: 3749203 - RNA, 17 nt, Human
gaaaauugaauuuaaca

SEQ ID NO: 3749204 - RNA, 20 nt, Human
gaaaauugaauuuaacaaug

SEQ ID NO: 3749205 - RNA, 22 nt, Human
gaaaauugaauuuaacaaugcg

SEQ ID NO: 3749206 - RNA, 12 nt, Human
gaaaauugaguu

SEQ ID NO: 3749207 - RNA, 19 nt, Human
gaaaauugcauugaagccc

SEQ ID NO: 3749208 - RNA, 19 nt, Human
gaaaauugccuuucugugu

SEQ ID NO: 3749209 - RNA, 20 nt, Human
gaaaauugccuuucuguguu

SEQ ID NO: 3749210 - RNA, 21 nt, Human
gaaaauuuguuauuuugcaac

SEQ ID NO: 3749211 - RNA, 19 nt, Human
gaaaauuuuaaaaauacau

SEQ ID NO: 3749212 - RNA, 18 nt, Human
gaaaauuuugauguuuua

SEQ ID NO: 3749213 - RNA, 13 nt, Human
gaaacaaaauaca

SEQ ID NO: 3749214 - RNA, 12 nt, Human
gaaacaaacuuu

SEQ ID NO: 3749215 - RNA, 12 nt, Human
gaaacaaagaug

SEQ ID NO: 3749216 - RNA, 24 nt, Human
gaaacaaagcauuugacuuucugu

SEQ ID NO: 3749217 - RNA, 15 nt, Human
gaaacaaagcuuagc

SEQ ID NO: 3749218 - RNA, 18 nt, Human
gaaacaaaguggaaggaa

SEQ ID NO: 3749219 - RNA, 20 nt, Human
gaaacaaaguggaaggaaag

SEQ ID NO: 3749220 - RNA, 14 nt, Human
gaaacaaauaauca

SEQ ID NO: 3749221 - RNA, 18 nt, Human
gaaacaacauuuauaugu

SEQ ID NO: 3749222 - RNA, 17 nt, Human
gaaacaagugaaagcau

SEQ ID NO: 3749223 - RNA, 14 nt, Human
gaaacacaauauuu

SEQ ID NO: 3749224 - RNA, 15 nt, Human
gaaacacaauauuuu

SEQ ID NO: 3749225 - RNA, 16 nt, Human
gaaacacaccaggcug

SEQ ID NO: 3749226 - RNA, 19 nt, Human
gaaacacacugaggcaggg

SEQ ID NO: 3749227 - RNA, 23 nt, Human
gaaacacacugaggcagggaagu

SEQ ID NO: 3749228 - RNA, 15 nt, Human
gaaacacagagaagc

SEQ ID NO: 3749229 - RNA, 15 nt, Human
gaaacacagcuguuc

SEQ ID NO: 3749230 - RNA, 20 nt, Human
gaaacacauaauuaacacuu

SEQ ID NO: 3749231 - RNA, 17 nt, Human
gaaacacccacaggcau

SEQ ID NO: 3749232 - RNA, 19 nt, Human
gaaacacccucacacuggg

SEQ ID NO: 3749233 - RNA, 18 nt, Human
gaaacaccuagaucagaa

SEQ ID NO: 3749234 - RNA, 14 nt, Human
gaaacaccuucucu

SEQ ID NO: 3749235 - RNA, 23 nt, Human
gaaacacuaaauguuaaagaugu

SEQ ID NO: 3749236 - RNA, 15 nt, Human
gaaacacuccuugca

SEQ ID NO: 3749237 - RNA, 16 nt, Human
gaaacacuccuugcau

SEQ ID NO: 3749238 - RNA, 15 nt, Human
gaaacacuggggcug

SEQ ID NO: 3749239 - RNA, 13 nt, Human
gaaacacugguuu

SEQ ID NO: 3749240 - RNA, 22 nt, Human
gaaacacuuugccuccugugua

SEQ ID NO: 3749241 - RNA, 11 nt, Human
gaaacagaaaa

SEQ ID NO: 3749242 - RNA, 14 nt, Human
gaaacagaaacaaa

SEQ ID NO: 3749243 - RNA, 14 nt, Human
ggcuggaaggagga

SEQ ID NO: 3749244 - RNA, 16 nt, Human
ggcuggaaucuggaga

SEQ ID NO: 3749245 - RNA, 23 nt, Human
ggcuggacuccagaucugcaccg

SEQ ID NO: 3749246 - RNA, 17 nt, Human
ggcuggacugaggccug

SEQ ID NO: 3749247 - RNA, 18 nt, Human
ggcuggacugaggccuga

SEQ ID NO: 3749248 - RNA, 20 nt, Human
ggcuggacuucuaccugccc

SEQ ID NO: 3749249 - RNA, 16 nt, Human
ggcuggagaggacaag

SEQ ID NO: 3749250 - RNA, 18 nt, Human
ggcuggagcuagaauuug

SEQ ID NO: 3749251 - RNA, 16 nt, Human
ggcuggaggagcccag

SEQ ID NO: 3749252 - RNA, 13 nt, Human
ggcuggaggccca

SEQ ID NO: 3749253 - RNA, 20 nt, Human
ggcuggaguacaguggugcc

SEQ ID NO: 3749254 - RNA, 20 nt, Human
ggcuggagugcaguggugug

SEQ ID NO: 3749255 - RNA, 20 nt, Human
ggcuggaguucaguggugug

SEQ ID NO: 3749256 - RNA, 23 nt, Human
ggcuggaugagcucccacaagcc

SEQ ID NO: 3749257 - RNA, 19 nt, Human
ggcuggaugugguggcaua

SEQ ID NO: 3749258 - RNA, 15 nt, Human
ggcuggcacaggaca

SEQ ID NO: 3749259 - RNA, 15 nt, Human
ggcuggcagggcugg

SEQ ID NO: 3749260 - RNA, 12 nt, Human
ggcuggcaugau

SEQ ID NO: 3749261 - RNA, 21 nt, Human
ggcuggccacugcacagagcu

SEQ ID NO: 3749262 - RNA, 15 nt, Human
ggcuggccagcccca

SEQ ID NO: 3749263 - RNA, 17 nt, Human
ggcuggccagccccaca

SEQ ID NO: 3749264 - RNA, 19 nt, Human
ggcuggccagccccacagc

SEQ ID NO: 3749265 - RNA, 20 nt, Human
ggcuggccaguccaggcugc

SEQ ID NO: 3749266 - RNA, 14 nt, Human
ggcuggcccagccc

SEQ ID NO: 3749267 - RNA, 18 nt, Human
ggcuggcccagcccugcu

SEQ ID NO: 3749268 - RNA, 16 nt, Human
ggcuggccccagggca

SEQ ID NO: 3749269 - RNA, 14 nt, Human
ggcuggcccugccc

SEQ ID NO: 3749270 - RNA, 15 nt, Human
ggcuggccuggcccc

SEQ ID NO: 3749271 - RNA, 22 nt, Human
ggcuggccuggccccucagggu

SEQ ID NO: 3749272 - RNA, 13 nt, Human
ggcuggccuuccu

SEQ ID NO: 3749273 - RNA, 16 nt, Human
ggcuggcgcagccaag

SEQ ID NO: 3749274 - RNA, 14 nt, Human
ggcuggcuccccug

SEQ ID NO: 3749275 - RNA, 13 nt, Human
ggcuggcuccuga

SEQ ID NO: 3749276 - RNA, 14 nt, Human
ggcuggcugcagug

SEQ ID NO: 3749277 - RNA, 13 nt, Human
ggcuggcuggccu

SEQ ID NO: 3749278 - RNA, 15 nt, Human
ggcuggcuggccuca

SEQ ID NO: 3749279 - RNA, 13 nt, Human
ggcuggcuggggc

SEQ ID NO: 3749280 - RNA, 21 nt, Human
ggcugggaauggaggggcaga

SEQ ID NO: 3749281 - RNA, 22 nt, Human
ggcugggaauggaggggcagag

SEQ ID NO: 3749282 - RNA, 23 nt, Human
ggcugggacguggcucagccagc

SEQ ID NO: 3749283 - RNA, 13 nt, Human
ggcugggagagcc

SEQ ID NO: 3749284 - RNA, 16 nt, Human
ggcugggagagccuuc

SEQ ID NO: 3749285 - RNA, 18 nt, Human
ggcugggagagccuucca

SEQ ID NO: 3749286 - RNA, 23 nt, Human
ggcugggagagccuuccaggggu

SEQ ID NO: 3749287 - RNA, 20 nt, Human
ggcugggaggagggcaggca

SEQ ID NO: 3749288 - RNA, 21 nt, Human
ggcugggaggagggcaggcau

SEQ ID NO: 3749289 - RNA, 13 nt, Human
ggcugggaguggu

SEQ ID NO: 3749290 - RNA, 14 nt, Human
ggcugggcacugcu

SEQ ID NO: 3749291 - RNA, 20 nt, Human
ggcugggcacugcucucacc

SEQ ID NO: 3749292 - RNA, 14 nt, Human
ggcugggcagagcu

SEQ ID NO: 3749293 - RNA, 13 nt, Human
ggcugggcagcua

SEQ ID NO: 3749294 - RNA, 14 nt, Human
ggcugggcagcugu

SEQ ID NO: 3749295 - RNA, 18 nt, Human
ggcugggccaagccaggg

SEQ ID NO: 3749296 - RNA, 22 nt, Human
ggcugggccaagccagggaugg

SEQ ID NO: 3749297 - RNA, 11 nt, Human
ggcugggccau

SEQ ID NO: 3749298 - RNA, 17 nt, Human
ggcugggccauguccaa

SEQ ID NO: 3749299 - RNA, 20 nt, Human
ggcugggccauguccaaaga

SEQ ID NO: 3749300 - RNA, 21 nt, Human
ggcugggccauguccaaagag

SEQ ID NO: 3749301 - RNA, 13 nt, Human
ggcugggcccaga

SEQ ID NO: 3749302 - RNA, 14 nt, Human
ggcugggcccagag

SEQ ID NO: 3749303 - RNA, 16 nt, Human
ggcugggcccagaggc

SEQ ID NO: 3749304 - RNA, 17 nt, Human
ggcugggcccagaggca

SEQ ID NO: 3749305 - RNA, 21 nt, Human
ggcugggccccccagcucagg

SEQ ID NO: 3749306 - RNA, 22 nt, Human
ggcugggcucccuucccaccuc

SEQ ID NO: 3749307 - RNA, 18 nt, Human
ggcugggcugggcacugc

SEQ ID NO: 3749308 - RNA, 11 nt, Human
ggcugggcuuc

SEQ ID NO: 3749309 - RNA, 13 nt, Human
ggcugggcuucag

SEQ ID NO: 3749310 - RNA, 21 nt, Human
ggcugggcuucaguggcagcu

SEQ ID NO: 3749311 - RNA, 17 nt, Human
ggcuggggaaguccucu

SEQ ID NO: 3749312 - RNA, 18 nt, Human
ggcuggggaaguccucug

SEQ ID NO: 3749313 - RNA, 14 nt, Human
ggcuggggcagccu

SEQ ID NO: 3749314 - RNA, 20 nt, Human
ggcuggggcagccucugggc

SEQ ID NO: 3749315 - RNA, 20 nt, Human
ggcuggggccuaucagugug

SEQ ID NO: 3749316 - RNA, 21 nt, Human
ggcuggggccuaucagugugc

SEQ ID NO: 3749317 - RNA, 18 nt, Human
ggcugggggaugggccug

SEQ ID NO: 3749318 - RNA, 16 nt, Human
ggcugggggcaggagg

SEQ ID NO: 3749319 - RNA, 14 nt, Human
ggcugggggccuca

SEQ ID NO: 3749320 - RNA, 16 nt, Human
ggcuggggucccagca

SEQ ID NO: 3749321 - RNA, 18 nt, Human
ggcuggggucccagcagc

SEQ ID NO: 3749322 - RNA, 10 nt, Human
ggcugggugc

SEQ ID NO: 3749323 - RNA, 14 nt, Human
ggcugggugcccac

SEQ ID NO: 3749324 - RNA, 22 nt, Human
ggcugggugcccacagcccgca

SEQ ID NO: 3749325 - RNA, 19 nt, Human
ggcuggguggcaccagcag

SEQ ID NO: 3749326 - RNA, 22 nt, Human
ggcuggguucuacccaggugcu

SEQ ID NO: 3749327 - RNA, 16 nt, Human
ggcugguagcucaggu

SEQ ID NO: 3749328 - RNA, 17 nt, Human
ggcugguagcucaggug

SEQ ID NO: 3749329 - RNA, 23 nt, Human
ggcugguccagggcuagugacuu

SEQ ID NO: 3749330 - RNA, 21 nt, Human
ggcugguccuauggccucaug

SEQ ID NO: 3749331 - RNA, 23 nt, Human
ggcuggucuugaaguccuggcuu

SEQ ID NO: 3749332 - RNA, 16 nt, Human
ggcugguggcccagga

SEQ ID NO: 3749333 - RNA, 17 nt, Human
ggcuggugggaggggcg

SEQ ID NO: 3749334 - RNA, 15 nt, Human
ggcuggugugguaca

SEQ ID NO: 3749335 - RNA, 17 nt, Human
ggcuggugugguacaga

SEQ ID NO: 3749336 - RNA, 19 nt, Human
ggcuggugugguacagaga

SEQ ID NO: 3749337 - RNA, 22 nt, Human
ggcugguucggauuuggggugg

SEQ ID NO: 3749338 - RNA, 14 nt, Human
ggcuguaaggcucu

SEQ ID NO: 3749339 - RNA, 20 nt, Human
ggcuguacugcucaggcugc

SEQ ID NO: 3749340 - RNA, 21 nt, Human
ggcuguacugcucaggcugca

SEQ ID NO: 3749341 - RNA, 19 nt, Human
ggcuguaucccaugagccu

SEQ ID NO: 3749342 - RNA, 23 nt, Human
ggcugucaaugggaccuguggcu

SEQ ID NO: 3749343 - RNA, 17 nt, Human
ggcugucagcaggaagc

SEQ ID NO: 3749344 - RNA, 22 nt, Human
ggcuguccuuuccaguggccug

SEQ ID NO: 3749345 - RNA, 15 nt, Human
ggcugucggcgcugc

SEQ ID NO: 3749346 - RNA, 17 nt, Human
ggcugucuguuguauuc

SEQ ID NO: 3749347 - RNA, 23 nt, Human
ggcugucuucucaggcucugccc

SEQ ID NO: 3749348 - RNA, 10 nt, Human
ggcugugcua

SEQ ID NO: 3749349 - RNA, 13 nt, Human
ggcugugcuggga

SEQ ID NO: 3749350 - RNA, 16 nt, Human
ggcugugcugggagaa

SEQ ID NO: 3749351 - RNA, 16 nt, Human
ggcuguggcuggugag

SEQ ID NO: 3749352 - RNA, 22 nt, Human
ggcugugggccucaaggacuug

SEQ ID NO: 3749353 - RNA, 14 nt, Human
ggcugugggcguga

SEQ ID NO: 3749354 - RNA, 22 nt, Human
ggcugugggcucccuuccuccc

SEQ ID NO: 3749355 - RNA, 14 nt, Human
ggcugugucuaaac

SEQ ID NO: 3749356 - RNA, 18 nt, Human
ggcuguguuuccaucuca

SEQ ID NO: 3749357 - RNA, 20 nt, Human
ggcuguguuugcagccugcu

SEQ ID NO: 3749358 - RNA, 15 nt, Human
ggcuguucugcacug

SEQ ID NO: 3749359 - RNA, 17 nt, Human
ggcuguucugcacugaa

SEQ ID NO: 3749360 - RNA, 19 nt, Human
ggcuguucugcacugaaaa

SEQ ID NO: 3749361 - RNA, 21 nt, Human
ggcuguucugcacugaaaagg

SEQ ID NO: 3749362 - RNA, 17 nt, Human
ggcuguuggcacucaca

SEQ ID NO: 3749363 - RNA, 14 nt, Human
ggcuguuggcuggg

SEQ ID NO: 3749364 - RNA, 14 nt, Human
ggcuguuugaggau

SEQ ID NO: 3749365 - RNA, 16 nt, Human
ggcuuaaugcuucuuu

SEQ ID NO: 3749366 - RNA, 13 nt, Human
ggcuuacacccac

SEQ ID NO: 3749367 - RNA, 14 nt, Human
ggcuuaccuggccc

SEQ ID NO: 3749368 - RNA, 22 nt, Human
ggcuuacuacaugugggagcuu

SEQ ID NO: 3749369 - RNA, 20 nt, Human
ggcuuagacccucaugcugc

SEQ ID NO: 3749370 - RNA, 22 nt, Human
ggcuuagacccucaugcugcca

SEQ ID NO: 3749371 - RNA, 23 nt, Human
ggcuuagacccucaugcugccaa

SEQ ID NO: 3749372 - RNA, 21 nt, Human
ggcuuagucacugagacagcc

SEQ ID NO: 3749373 - RNA, 23 nt, Human
ggcuuaguguuuuaaaacaccuc

SEQ ID NO: 3749374 - RNA, 22 nt, Human
ggcuuaguuuguguguugucuc

SEQ ID NO: 3749375 - RNA, 14 nt, Human
ggcuuauaaaacag

SEQ ID NO: 3749376 - RNA, 19 nt, Human
ggcuuauaauaaaggacug

SEQ ID NO: 3749377 - RNA, 20 nt, Human
ggcuuauauucaaccaugga

SEQ ID NO: 3749378 - RNA, 23 nt, Human
ggcuuauauucaaccauggacuu

SEQ ID NO: 3749379 - RNA, 12 nt, Human
ggcuuauuuuaa

SEQ ID NO: 3749380 - RNA, 20 nt, Human
ggcuuauuuuaaugugauga

SEQ ID NO: 3749381 - RNA, 21 nt, Human
ggcuucacggaagagccuugc

SEQ ID NO: 3749382 - RNA, 22 nt, Human
ggcuucacuguauaaauaggag

SEQ ID NO: 3749383 - RNA, 17 nt, Human
ggcuucagcauauuuau

SEQ ID NO: 3749384 - RNA, 13 nt, Human
ggcuucagcucca

SEQ ID NO: 3749385 - RNA, 15 nt, Human
ggcuucagcuccagc

SEQ ID NO: 3749386 - RNA, 20 nt, Human
ggcuucagcuccagccccuu

SEQ ID NO: 3749387 - RNA, 19 nt, Human
ggcuucaggcaauucuccu

SEQ ID NO: 3749388 - RNA, 16 nt, Human
ggcuucagggcaggug

SEQ ID NO: 3749389 - RNA, 18 nt, Human
ggcuucagggcagguggg

SEQ ID NO: 3749390 - RNA, 16 nt, Human
ggcuucaguggcagcu

SEQ ID NO: 3749391 - RNA, 15 nt, Human
ggcuucaugccagcu

SEQ ID NO: 3749392 - RNA, 17 nt, Human
ggcuucauucaagucua

SEQ ID NO: 3749393 - RNA, 22 nt, Human
ggcuuccaagguggucugcucg

SEQ ID NO: 3749394 - RNA, 17 nt, Human
ggcuuccauuugugugu

SEQ ID NO: 3749395 - RNA, 12 nt, Human
ggcuucccaagg

SEQ ID NO: 3749396 - RNA, 19 nt, Human
ggcuucccaguggcugcug

SEQ ID NO: 3749397 - RNA, 17 nt, Human
ggcuucccauccccagc

SEQ ID NO: 3749398 - RNA, 17 nt, Human
ggcuucccgcucagccc

SEQ ID NO: 3749399 - RNA, 21 nt, Human
ggcuuccucaguuccugcccu

SEQ ID NO: 3749400 - RNA, 14 nt, Human
ggcuuccuggagca

SEQ ID NO: 3749401 - RNA, 21 nt, Human
ggcuuccuggagcagaagcag

SEQ ID NO: 3749402 - RNA, 12 nt, Human
ggcuuccuggug

SEQ ID NO: 3749403 - RNA, 12 nt, Human
ggcuuccuuucu

SEQ ID NO: 3749404 - RNA, 16 nt, Human
ggcuucuccgccagcc

SEQ ID NO: 3749405 - RNA, 16 nt, Human
ggcuucuccugaccca

SEQ ID NO: 3749406 - RNA, 11 nt, Human
ggcuucucucu

SEQ ID NO: 3749407 - RNA, 15 nt, Human
ggcuucucucucacc

SEQ ID NO: 3749408 - RNA, 22 nt, Human
ggcuucugagcagcgagccugc

SEQ ID NO: 3749409 - RNA, 18 nt, Human
ggcuucugcacccuccac

SEQ ID NO: 3749410 - RNA, 20 nt, Human
ggcuucugcacccuccaccc

SEQ ID NO: 3749411 - RNA, 12 nt, Human
ggcuucugcugg

SEQ ID NO: 3749412 - RNA, 15 nt, Human
ggcuucugcuggggc

SEQ ID NO: 3749413 - RNA, 19 nt, Human
ggcuucugcuggggccugg

SEQ ID NO: 3749414 - RNA, 21 nt, Human
ggcuucugcuggggccuggga

SEQ ID NO: 3749415 - RNA, 18 nt, Human
ggcuucuggccaggaagc

SEQ ID NO: 3749416 - RNA, 18 nt, Human
ggcuucugugaugagcug

SEQ ID NO: 3749417 - RNA, 21 nt, Human
ggcuucugugaugagcugauc

SEQ ID NO: 3749418 - RNA, 22 nt, Human
ggcuucugugcaccugggcucu

SEQ ID NO: 3749419 - RNA, 16 nt, Human
ggcuucugugcccaga

SEQ ID NO: 3749420 - RNA, 20 nt, Human
ggcuugaagccaaagaaaaa

SEQ ID NO: 3749421 - RNA, 13 nt, Human
ggcuugaagcugu

SEQ ID NO: 3749422 - RNA, 18 nt, Human
ggcuugaauaaggaaaug

SEQ ID NO: 3749423 - RNA, 15 nt, Human
ggcuugacucaggau

SEQ ID NO: 3749424 - RNA, 21 nt, Human
ggcuugagaaauauggacacu

SEQ ID NO: 3749425 - RNA, 20 nt, Human
ggcuugagcccccgcgccca

SEQ ID NO: 3749426 - RNA, 22 nt, Human
ggcuugaguuuaaauuguaaua

SEQ ID NO: 3749427 - RNA, 23 nt, Human
ggcuugcaaguauguuuuagcau

SEQ ID NO: 3749428 - RNA, 15 nt, Human
ggcuugccacacccc

SEQ ID NO: 3749429 - RNA, 15 nt, Human
ggcuugcuauucugu

SEQ ID NO: 3749430 - RNA, 17 nt, Human
ggcuuggccacagccag

SEQ ID NO: 3749431 - RNA, 18 nt, Human
ggcuuggccacagccagg

SEQ ID NO: 3749432 - RNA, 14 nt, Human
ggcuuggccugcug

SEQ ID NO: 3749433 - RNA, 15 nt, Human
ggcuuggccugcugu

SEQ ID NO: 3749434 - RNA, 16 nt, Human
ggcuuggccugcugug

SEQ ID NO: 3749435 - RNA, 13 nt, Human
ggcuugggccuag

SEQ ID NO: 3749436 - RNA, 18 nt, Human
ggcuugggccuaggcugc

SEQ ID NO: 3749437 - RNA, 23 nt, Human
ggcuugggcuuccauuugugugu

SEQ ID NO: 3749438 - RNA, 22 nt, Human
ggcuuggggcucacacaccugu

SEQ ID NO: 3749439 - RNA, 15 nt, Human
ggcuuggggcuuccu

SEQ ID NO: 3749440 - RNA, 16 nt, Human
ggcuugucagagcugg

SEQ ID NO: 3749441 - RNA, 16 nt, Human
ggcuugucauagccag

SEQ ID NO: 3749442 - RNA, 22 nt, Human
ggcuugucuauacuccuucccu

SEQ ID NO: 3749443 - RNA, 16 nt, Human
ggcuuguggggccugg

SEQ ID NO: 3749444 - RNA, 19 nt, Human
ggcuuguucaucauccaga

SEQ ID NO: 3749445 - RNA, 15 nt, Human
ggcuuguuguaaagc

SEQ ID NO: 3749446 - RNA, 13 nt, Human
ggcuuuagacacu

SEQ ID NO: 3749447 - RNA, 15 nt, Human
ggcuuuauccucuuu

SEQ ID NO: 3749448 - RNA, 20 nt, Human
ggcuuuauccucuuuagagu

SEQ ID NO: 3749449 - RNA, 20 nt, Human
ggcuuuaugauaauagauuc

SEQ ID NO: 3749450 - RNA, 22 nt, Human
ggcuuuauuuuuuugaacucuu

SEQ ID NO: 3749451 - RNA, 19 nt, Human
ggcuuucagaaaacgggaa

SEQ ID NO: 3749452 - RNA, 13 nt, Human
ggcuuucagcuua

SEQ ID NO: 3749453 - RNA, 19 nt, Human
ggcuuuccugugccaggug

SEQ ID NO: 3749454 - RNA, 13 nt, Human
ggcuuuccuugug

SEQ ID NO: 3749455 - RNA, 22 nt, Human
ggcuuucguccacagcuuccug

SEQ ID NO: 3749456 - RNA, 14 nt, Human
ggcuuucuggggcc

SEQ ID NO: 3749457 - RNA, 15 nt, Human
ggcuuucuguugcca

SEQ ID NO: 3749458 - RNA, 24 nt, Human
ggcuuugauuccaucuccuugucu

SEQ ID NO: 3749459 - RNA, 18 nt, Human
ggcuuugccauuaaaaug

SEQ ID NO: 3749460 - RNA, 13 nt, Human
ggcuuuucacugc

SEQ ID NO: 3749461 - RNA, 15 nt, Human
ggcuuuucucagcug

SEQ ID NO: 3749462 - RNA, 12 nt, Human
ggcuuuucugau

SEQ ID NO: 3749463 - RNA, 17 nt, Human
ggcuuuucugauccagu

SEQ ID NO: 3749464 - RNA, 14 nt, Human
ggcuuuugugcauu

SEQ ID NO: 3749465 - RNA, 15 nt, Human
gggaaaaaaauguug

SEQ ID NO: 3749466 - RNA, 23 nt, Human
gggaaaaucagccugcuccagcu

SEQ ID NO: 3749467 - RNA, 21 nt, Human
gggaaaauguuuuguaagaaa

SEQ ID NO: 3749468 - RNA, 18 nt, Human
gggaaaauuauuugcaua

SEQ ID NO: 3749469 - RNA, 13 nt, Human
gggaaagacacug

SEQ ID NO: 3749470 - RNA, 18 nt, Human
gggaaagacacugccugg

SEQ ID NO: 3749471 - RNA, 22 nt, Human
gggaaagacacugccugggcug

SEQ ID NO: 3749472 - RNA, 14 nt, Human
gggaaagcaaagca

SEQ ID NO: 3749473 - RNA, 22 nt, Human
gggaaaucaaaagggccaaaga

SEQ ID NO: 3749474 - RNA, 14 nt, Human
gggaaauggugccu

SEQ ID NO: 3749475 - RNA, 21 nt, Human
gggaacaauuuggcaauuuug

SEQ ID NO: 3749476 - RNA, 22 nt, Human
gggaacacuggggacuuggccu

SEQ ID NO: 3749477 - RNA, 15 nt, Human
gggaacagacaggag

SEQ ID NO: 3749478 - RNA, 18 nt, Human
gggaacagacaggagaaa

SEQ ID NO: 3749479 - RNA, 10 nt, Human
gggaacauuu

SEQ ID NO: 3749480 - RNA, 21 nt, Human
gggaacauuuauuuuaugaga

SEQ ID NO: 3749481 - RNA, 22 nt, Human
gggaaccaagcuauuccuuucc

SEQ ID NO: 3749482 - RNA, 19 nt, Human
gggaaccaugaagacagga

SEQ ID NO: 3749483 - RNA, 20 nt, Human
gggaacccaaguccaagcau

SEQ ID NO: 3749484 - RNA, 14 nt, Human
gggaaccccuuucc

SEQ ID NO: 3749485 - RNA, 19 nt, Human
gggaaccucacucuugcca

SEQ ID NO: 3749486 - RNA, 15 nt, Human
gggaaccuguguccg

SEQ ID NO: 3749487 - RNA, 16 nt, Human
gggaacgaugugucug

SEQ ID NO: 3749488 - RNA, 14 nt, Human
gggaacgugacugc

SEQ ID NO: 3749489 - RNA, 17 nt, Human
gggaacgugacugcccc

SEQ ID NO: 3749490 - RNA, 18 nt, Human
gggaacgugacugcccca

SEQ ID NO: 3749491 - RNA, 22 nt, Human
gggaacucaccuggggcugcug

SEQ ID NO: 3749492 - RNA, 23 nt, Human
gggaacucaccuggggcugcugg

SEQ ID NO: 3749493 - RNA, 22 nt, Human
gggaacucccaagaacagcagg

SEQ ID NO: 3749494 - RNA, 13 nt, Human
gggaacucugaca

SEQ ID NO: 3749495 - RNA, 13 nt, Human
gggaacuggccaa

SEQ ID NO: 3749496 - RNA, 19 nt, Human
gggaacuggccaagcugag

SEQ ID NO: 3749497 - RNA, 19 nt, Human
gggaagaagcagagagaug

SEQ ID NO: 3749498 - RNA, 17 nt, Human
gggaagacgccugagcu

SEQ ID NO: 3749499 - RNA, 14 nt, Human
gggaagagaaacag

SEQ ID NO: 3749500 - RNA, 13 nt, Human
gggaagagacuug

SEQ ID NO: 3749501 - RNA, 24 nt, Human
gggaagagaggaguucaaugaucu

SEQ ID NO: 3749502 - RNA, 14 nt, Human
gggaagagcacagc

SEQ ID NO: 3749503 - RNA, 18 nt, Human
gggaagagcacagcccuc

SEQ ID NO: 3749504 - RNA, 22 nt, Human
gggaagagcacagcccucccgc

SEQ ID NO: 3749505 - RNA, 19 nt, Human
gggaagaggguuaggaggg

SEQ ID NO: 3749506 - RNA, 23 nt, Human
gggaagaggguuaggaggguuuc

SEQ ID NO: 3749507 - RNA, 21 nt, Human
gggaagagugacucuccaggg

SEQ ID NO: 3749508 - RNA, 17 nt, Human
gggaagaguggaggugg

SEQ ID NO: 3749509 - RNA, 22 nt, Human
gggaagcaaaaacgaaagcugg

SEQ ID NO: 3749510 - RNA, 17 nt, Human
gggaagcagcagccucg

SEQ ID NO: 3749511 - RNA, 13 nt, Human
gggaagcccagcu

SEQ ID NO: 3749512 - RNA, 14 nt, Human
gggaagcccagcuc

SEQ ID NO: 3749513 - RNA, 19 nt, Human
gggaagcccauccugacca

SEQ ID NO: 3749514 - RNA, 12 nt, Human
gggaagccuuua

SEQ ID NO: 3749515 - RNA, 14 nt, Human
gggaaggacagaaa

SEQ ID NO: 3749516 - RNA, 13 nt, Human
gggaaggagccag

SEQ ID NO: 3749517 - RNA, 15 nt, Human
gggaaggaggagccu

SEQ ID NO: 3749518 - RNA, 21 nt, Human
gggaaggaggguacagcuggg

SEQ ID NO: 3749519 - RNA, 16 nt, Human
gggaaggauacaaaag

SEQ ID NO: 3749520 - RNA, 21 nt, Human
gggaaggauacaaaagcaugu

SEQ ID NO: 3749521 - RNA, 21 nt, Human
gggaaggauucugcuggccuc

SEQ ID NO: 3749522 - RNA, 18 nt, Human
gggaaggccaccugcagg

SEQ ID NO: 3749523 - RNA, 15 nt, Human
gggaaggccugacuu

SEQ ID NO: 3749524 - RNA, 22 nt, Human
gggaaggcuacuucggggcugg

SEQ ID NO: 3749525 - RNA, 14 nt, Human
gggaagggacacac

SEQ ID NO: 3749526 - RNA, 13 nt, Human
gggaagggccagu

SEQ ID NO: 3749527 - RNA, 14 nt, Human
gggaagggggcugg

SEQ ID NO: 3749528 - RNA, 21 nt, Human
gggaaggugggguccuggagc

SEQ ID NO: 3749529 - RNA, 16 nt, Human
gggaaguaguccuugg

SEQ ID NO: 3749530 - RNA, 23 nt, Human
gggaagugaagacuggaagcuaa

SEQ ID NO: 3749531 - RNA, 23 nt, Human
gggaagugacuuagcagaugcug

SEQ ID NO: 3749532 - RNA, 17 nt, Human
gggaaguuaaagggaag

SEQ ID NO: 3749533 - RNA, 22 nt, Human
gggaaguuaaagggaagaaaac

SEQ ID NO: 3749534 - RNA, 14 nt, Human
gggaauaaauaugc

SEQ ID NO: 3749535 - RNA, 19 nt, Human
gggaauacuagggagaagg

SEQ ID NO: 3749536 - RNA, 23 nt, Human
gggaauagucuagauggcuccuc

SEQ ID NO: 3749537 - RNA, 22 nt, Human
gggaauaugagugcguggugcg

SEQ ID NO: 3749538 - RNA, 22 nt, Human
gggaauccccgaaggugcugga

SEQ ID NO: 3749539 - RNA, 22 nt, Human
gggaaucuaagagagcugccau

SEQ ID NO: 3749540 - RNA, 13 nt, Human
gggaaugaagaua

SEQ ID NO: 3749541 - RNA, 22 nt, Human
gaaacagacuuguauauucuau

SEQ ID NO: 3749542 - RNA, 14 nt, Human
gaaacagagacagg

SEQ ID NO: 3749543 - RNA, 15 nt, Human
gaaacagauaccaua

SEQ ID NO: 3749544 - RNA, 14 nt, Human
gaaacagauuuggu

SEQ ID NO: 3749545 - RNA, 15 nt, Human
gaaacagccagcaag

SEQ ID NO: 3749546 - RNA, 16 nt, Human
gaaacagccugugucu

SEQ ID NO: 3749547 - RNA, 13 nt, Human
gaaacagcugccu

SEQ ID NO: 3749548 - RNA, 15 nt, Human
gaaacagcugccuua

SEQ ID NO: 3749549 - RNA, 16 nt, Human
gaaacagcugccuuag

SEQ ID NO: 3749550 - RNA, 20 nt, Human
gaaacagcugccuuagcuuc

SEQ ID NO: 3749551 - RNA, 16 nt, Human
gaaacagcuuucaagu

SEQ ID NO: 3749552 - RNA, 18 nt, Human
gaaacagcuuucaagugc

SEQ ID NO: 3749553 - RNA, 17 nt, Human
gaaacaggagagaaagg

SEQ ID NO: 3749554 - RNA, 18 nt, Human
gaaacaguugguaacuuu

SEQ ID NO: 3749555 - RNA, 19 nt, Human
gaaacaguugguaacuuuu

SEQ ID NO: 3749556 - RNA, 23 nt, Human
gaaacaucaguuacucugaaggg

SEQ ID NO: 3749557 - RNA, 15 nt, Human
gaaacaucauagaaa

SEQ ID NO: 3749558 - RNA, 13 nt, Human
gaaacaugacacu

SEQ ID NO: 3749559 - RNA, 18 nt, Human
gaaacauugcuuuuaaaa

SEQ ID NO: 3749560 - RNA, 13 nt, Human
gaaacauuggaag

SEQ ID NO: 3749561 - RNA, 12 nt, Human
gaaacauuuaua

SEQ ID NO: 3749562 - RNA, 13 nt, Human
gaaacauuuauau

SEQ ID NO: 3749563 - RNA, 19 nt, Human
gaaacauuuauauuuuuau

SEQ ID NO: 3749564 - RNA, 16 nt, Human
gaaacauuuuuuaaaa

SEQ ID NO: 3749565 - RNA, 22 nt, Human
gaaaccaaagauauauacacag

SEQ ID NO: 3749566 - RNA, 21 nt, Human
gaaaccaaucaagauaaagga

SEQ ID NO: 3749567 - RNA, 13 nt, Human
gaaaccagcuucc

SEQ ID NO: 3749568 - RNA, 22 nt, Human
gaaaccagcuuccuucagagag

SEQ ID NO: 3749569 - RNA, 23 nt, Human
gaaaccagcuuccuucagagagc

SEQ ID NO: 3749570 - RNA, 18 nt, Human
gaaacccaagcuccuccu

SEQ ID NO: 3749571 - RNA, 23 nt, Human
gaaacccaagcuccuccucggaa

SEQ ID NO: 3749572 - RNA, 21 nt, Human
gaaacccagacugaacuuacc

SEQ ID NO: 3749573 - RNA, 19 nt, Human
gaaacccagcucuggucca

SEQ ID NO: 3749574 - RNA, 19 nt, Human
gaaacccauaggcccacac

SEQ ID NO: 3749575 - RNA, 21 nt, Human
gaaacccauaggcccacacac

SEQ ID NO: 3749576 - RNA, 16 nt, Human
gaaacccccacacaca

SEQ ID NO: 3749577 - RNA, 17 nt, Human
gaaacccccacacacac

SEQ ID NO: 3749578 - RNA, 19 nt, Human
gaaaccccuguaggccuca

SEQ ID NO: 3749579 - RNA, 19 nt, Human
gaaaccccuucucugugac

SEQ ID NO: 3749580 - RNA, 20 nt, Human
gaaaccccuucucugugacc

SEQ ID NO: 3749581 - RNA, 21 nt, Human
gaaacccugcacccauuagca

SEQ ID NO: 3749582 - RNA, 21 nt, Human
gaaacccuggaccaguggucu

SEQ ID NO: 3749583 - RNA, 14 nt, Human
gaaacccugucucu

SEQ ID NO: 3749584 - RNA, 17 nt, Human
gaaaccuacagaauacu

SEQ ID NO: 3749585 - RNA, 18 nt, Human
gaaaccugaaaaaaaguu

SEQ ID NO: 3749586 - RNA, 13 nt, Human
gaaaccugcccug

SEQ ID NO: 3749587 - RNA, 14 nt, Human
gaaaccugcccugc

SEQ ID NO: 3749588 - RNA, 18 nt, Human
gaaaccugcccugccuga

SEQ ID NO: 3749589 - RNA, 19 nt, Human
gaaaccugcucuguaggag

SEQ ID NO: 3749590 - RNA, 18 nt, Human
gaaaccuguauaacccug

SEQ ID NO: 3749591 - RNA, 19 nt, Human
gaaaccuuuagggcagcuu

SEQ ID NO: 3749592 - RNA, 20 nt, Human
gaaacgaagccaucuuucuu

SEQ ID NO: 3749593 - RNA, 13 nt, Human
gaaacgcuaccuc

SEQ ID NO: 3749594 - RNA, 20 nt, Human
gaaacgcuaccucucugucc

SEQ ID NO: 3749595 - RNA, 13 nt, Human
gaaacuaaagcaa

SEQ ID NO: 3749596 - RNA, 14 nt, Human
gaaacuaauaaaau

SEQ ID NO: 3749597 - RNA, 16 nt, Human
gaaacuaauaaaauau

SEQ ID NO: 3749598 - RNA, 22 nt, Human
gaaacuaauaaaauauuuucug

SEQ ID NO: 3749599 - RNA, 23 nt, Human
gaaacuacugccuuuagaaaaua

SEQ ID NO: 3749600 - RNA, 22 nt, Human
gaaacuagacuugaggaaacca

SEQ ID NO: 3749601 - RNA, 13 nt, Human
gaaacuaggucug

SEQ ID NO: 3749602 - RNA, 19 nt, Human
gaaacuauguguuuuucuc

SEQ ID NO: 3749603 - RNA, 17 nt, Human
gaaacucaccauguaaa

SEQ ID NO: 3749604 - RNA, 21 nt, Human
gaaacucacccccaaggggca

SEQ ID NO: 3749605 - RNA, 23 nt, Human
gaaacucauaauagacuucccac

SEQ ID NO: 3749606 - RNA, 20 nt, Human
gaaacuccaccuugcgggga

SEQ ID NO: 3749607 - RNA, 18 nt, Human
gaaacucccauguaugga

SEQ ID NO: 3749608 - RNA, 22 nt, Human
gaaacuccgucuuagaagugga

SEQ ID NO: 3749609 - RNA, 23 nt, Human
gaaacucuuaucucagucaugca

SEQ ID NO: 3749610 - RNA, 22 nt, Human
gaaacucuugcuauugaauuga

SEQ ID NO: 3749611 - RNA, 13 nt, Human
gaaacuggauuaa

SEQ ID NO: 3749612 - RNA, 17 nt, Human
gaaacuggauuaaacuu

SEQ ID NO: 3749613 - RNA, 14 nt, Human
gaaacuggccaugg

SEQ ID NO: 3749614 - RNA, 12 nt, Human
gaaacuggcccc

SEQ ID NO: 3749615 - RNA, 15 nt, Human
gaaacuggccccgga

SEQ ID NO: 3749616 - RNA, 16 nt, Human
gaaacuggccccggau

SEQ ID NO: 3749617 - RNA, 17 nt, Human
gaaacuggguuccugca

SEQ ID NO: 3749618 - RNA, 20 nt, Human
gaaacuguucccaccugcug

SEQ ID NO: 3749619 - RNA, 21 nt, Human
gaaacuuaaauguuauuaucu

SEQ ID NO: 3749620 - RNA, 21 nt, Human
gaaacuuaucuuacaaagugu

SEQ ID NO: 3749621 - RNA, 19 nt, Human
gaaacuuauuuuuuucuga

SEQ ID NO: 3749622 - RNA, 13 nt, Human
gaaacuuccaaga

SEQ ID NO: 3749623 - RNA, 11 nt, Human
gaaacuuggau

SEQ ID NO: 3749624 - RNA, 17 nt, Human
gaaacuuguuagaaaug

SEQ ID NO: 3749625 - RNA, 16 nt, Human
gaaacuuguuauugug

SEQ ID NO: 3749626 - RNA, 17 nt, Human
gaaacuuuauacauuag

SEQ ID NO: 3749627 - RNA, 19 nt, Human
gaaacuuuauacauuagua

SEQ ID NO: 3749628 - RNA, 20 nt, Human
gaaacuuuauacauuaguaa

SEQ ID NO: 3749629 - RNA, 22 nt, Human
gaaacuuugagaucuaaaaaua

SEQ ID NO: 3749630 - RNA, 15 nt, Human
gaaacuuuuggaagg

SEQ ID NO: 3749631 - RNA, 21 nt, Human
gaaacuuuuguaaagaaauuu

SEQ ID NO: 3749632 - RNA, 22 nt, Human
gaaagaaaguugcacggcugcu

SEQ ID NO: 3749633 - RNA, 20 nt, Human
gaaagaacauggacuuguau

SEQ ID NO: 3749634 - RNA, 17 nt, Human
gaaagaacuaucuucau

SEQ ID NO: 3749635 - RNA, 21 nt, Human
gaaagaacuaucuucaucuga

SEQ ID NO: 3749636 - RNA, 19 nt, Human
gaaagaagagccggagccu

SEQ ID NO: 3749637 - RNA, 13 nt, Human
gaaagaauagaaa

SEQ ID NO: 3749638 - RNA, 19 nt, Human
gaaagaaugaaagaguaaa

SEQ ID NO: 3749639 - RNA, 13 nt, Human
gaaagacacugcc

SEQ ID NO: 3749640 - RNA, 17 nt, Human
gaaagacagcuucucau

SEQ ID NO: 3749641 - RNA, 14 nt, Human
gaaagacaucuuuc

SEQ ID NO: 3749642 - RNA, 15 nt, Human
gaaagacgcacuuug

SEQ ID NO: 3749643 - RNA, 21 nt, Human
gaaagacggauugcauuagaa

SEQ ID NO: 3749644 - RNA, 15 nt, Human
gaaagacuauucaaa

SEQ ID NO: 3749645 - RNA, 22 nt, Human
gaaagacuauucaaacagucuc

SEQ ID NO: 3749646 - RNA, 15 nt, Human
gaaaugcugccugcc

SEQ ID NO: 3749647 - RNA, 16 nt, Human
gaaaugcugcuggcca

SEQ ID NO: 3749648 - RNA, 19 nt, Human
gaaaugcugggcugacggu

SEQ ID NO: 3749649 - RNA, 21 nt, Human
gaaauggaggaucucuaaaga

SEQ ID NO: 3749650 - RNA, 24 nt, Human
gaaauggaggaucucuaaagagca

SEQ ID NO: 3749651 - RNA, 17 nt, Human
gaaauggaugcaaagua

SEQ ID NO: 3749652 - RNA, 18 nt, Human
gaaauggcuugaagccaa

SEQ ID NO: 3749653 - RNA, 19 nt, Human
gaaaugggacuuaacuccu

SEQ ID NO: 3749654 - RNA, 15 nt, Human
gaaaugggcagagca

SEQ ID NO: 3749655 - RNA, 15 nt, Human
gaaaugguggaacug

SEQ ID NO: 3749656 - RNA, 19 nt, Human
gaaaugguuguauuagaug

SEQ ID NO: 3749657 - RNA, 20 nt, Human
gaaaugguuguauuagaugu

SEQ ID NO: 3749658 - RNA, 22 nt, Human
gaaauguaagggaaacugccag

SEQ ID NO: 3749659 - RNA, 18 nt, Human
gaaauguagguccucaga

SEQ ID NO: 3749660 - RNA, 21 nt, Human
gaaaugucacguacugucuga

SEQ ID NO: 3749661 - RNA, 17 nt, Human
gaaaugucaguucugau

SEQ ID NO: 3749662 - RNA, 15 nt, Human
gaaaugucccuuucu

SEQ ID NO: 3749663 - RNA, 17 nt, Human
gaaaugucccuuucuuc

SEQ ID NO: 3749664 - RNA, 20 nt, Human
gaaaugugaauuuuuauugu

SEQ ID NO: 3749665 - RNA, 23 nt, Human
gaaaugugguagccucacuuuua

SEQ ID NO: 3749666 - RNA, 16 nt, Human
gaaaugugugugaugu

SEQ ID NO: 3749667 - RNA, 23 nt, Human
gaaauguuacaaaaauaaacuau

SEQ ID NO: 3749668 - RNA, 21 nt, Human
gaaauguuacagcauauuuua

SEQ ID NO: 3749669 - RNA, 21 nt, Human
gaaauguuauuuuuuaauuau

SEQ ID NO: 3749670 - RNA, 22 nt, Human
gaaauguuauuuuuuaauuauu

SEQ ID NO: 3749671 - RNA, 16 nt, Human
gaaauguuugcugaac

SEQ ID NO: 3749672 - RNA, 22 nt, Human
gaaauguuuuuaauaaaagaaa

SEQ ID NO: 3749673 - RNA, 13 nt, Human
gaaauuaagaaga

SEQ ID NO: 3749674 - RNA, 17 nt, Human
gaaauuaagaaggcaaa

SEQ ID NO: 3749675 - RNA, 20 nt, Human
gaaauuaccagaguuguucu

SEQ ID NO: 3749676 - RNA, 17 nt, Human
gaaauuaccuguggaua

SEQ ID NO: 3749677 - RNA, 19 nt, Human
gaaauuaccuguggauauu

SEQ ID NO: 3749678 - RNA, 21 nt, Human
gaaauuacuuaucauccacau

SEQ ID NO: 3749679 - RNA, 13 nt, Human
gaaauuagccggg

SEQ ID NO: 3749680 - RNA, 16 nt, Human
gaaauuagcuguguga

SEQ ID NO: 3749681 - RNA, 18 nt, Human
gaaauuagguugaaacau

SEQ ID NO: 3749682 - RNA, 20 nt, Human
gaaauuagguugaaacauau

SEQ ID NO: 3749683 - RNA, 23 nt, Human
gaaauuauauaaguauucuaaau

SEQ ID NO: 3749684 - RNA, 15 nt, Human
gaaauuauaucugug

SEQ ID NO: 3749685 - RNA, 19 nt, Human
gaaauuauaucuguggucu

SEQ ID NO: 3749686 - RNA, 22 nt, Human
gaaauuaugugacauuuuacau

SEQ ID NO: 3749687 - RNA, 13 nt, Human
gaaauuauuuaau

SEQ ID NO: 3749688 - RNA, 15 nt, Human
gaaauuauuuaauaa

SEQ ID NO: 3749689 - RNA, 23 nt, Human
gaaauucaacguuaauaauucug

SEQ ID NO: 3749690 - RNA, 15 nt, Human
gaaauucccuggacc

SEQ ID NO: 3749691 - RNA, 18 nt, Human
gaaauucccuggaccaga

SEQ ID NO: 3749692 - RNA, 22 nt, Human
gaaauucccuggaccagaugcu

SEQ ID NO: 3749693 - RNA, 12 nt, Human
gaaauuccugua

SEQ ID NO: 3749694 - RNA, 16 nt, Human
gaaauuccuguagcau

SEQ ID NO: 3749695 - RNA, 17 nt, Human
gaaauucguguguuuuu

SEQ ID NO: 3749696 - RNA, 20 nt, Human
gaaauucuauuuauaauaca

SEQ ID NO: 3749697 - RNA, 14 nt, Human
gaaauucuccugga

SEQ ID NO: 3749698 - RNA, 16 nt, Human
gaaauucuccuggagg

SEQ ID NO: 3749699 - RNA, 16 nt, Human
gaaauucugaauuugc

SEQ ID NO: 3749700 - RNA, 18 nt, Human
gaaauucugaauuugcaa

SEQ ID NO: 3749701 - RNA, 12 nt, Human
gaaauucuguuu

SEQ ID NO: 3749702 - RNA, 18 nt, Human
gaaauucuuuauacauuc

SEQ ID NO: 3749703 - RNA, 16 nt, Human
gaaauucuuucagcua

SEQ ID NO: 3749704 - RNA, 22 nt, Human
gaaauucuuucccagucugucg

SEQ ID NO: 3749705 - RNA, 14 nt, Human
gaaauugaaccuuu

SEQ ID NO: 3749706 - RNA, 21 nt, Human
gaaauugaaccuuugugcccu

SEQ ID NO: 3749707 - RNA, 17 nt, Human
gaaauugagcugcuuuu

SEQ ID NO: 3749708 - RNA, 20 nt, Human
gaaauugccuauccugcugu

SEQ ID NO: 3749709 - RNA, 21 nt, Human
gaaauugccuauccugcuguu

SEQ ID NO: 3749710 - RNA, 17 nt, Human
gaaauuguaauuauauc

SEQ ID NO: 3749711 - RNA, 16 nt, Human
gaaauuguauuacaaa

SEQ ID NO: 3749712 - RNA, 18 nt, Human
gaaauuguauuacaaauc

SEQ ID NO: 3749713 - RNA, 20 nt, Human
gaaauugucuagcagagcag

SEQ ID NO: 3749714 - RNA, 13 nt, Human
gaaauuuaaacua

SEQ ID NO: 3749715 - RNA, 12 nt, Human
gaaauuuagcau

SEQ ID NO: 3749716 - RNA, 14 nt, Human
gaaauuuagcauug

SEQ ID NO: 3749717 - RNA, 16 nt, Human
gaaauuuagcauugua

SEQ ID NO: 3749718 - RNA, 21 nt, Human
gaaauuuauuaguuaauauau

SEQ ID NO: 3749719 - RNA, 12 nt, Human
gaaauuucacgu

SEQ ID NO: 3749720 - RNA, 11 nt, Human
gaaauuucaga

SEQ ID NO: 3749721 - RNA, 19 nt, Human
gaaauuuccacucaggucu

SEQ ID NO: 3749722 - RNA, 17 nt, Human
gaaauuucucaucacag

SEQ ID NO: 3749723 - RNA, 14 nt, Human
gaaauuucugugaa

SEQ ID NO: 3749724 - RNA, 24 nt, Human
gaaauuugaauuuuguguuagaga

SEQ ID NO: 3749725 - RNA, 15 nt, Human
gaaauuugauuucua

SEQ ID NO: 3749726 - RNA, 23 nt, Human
gaaauuugggagagccauacaua

SEQ ID NO: 3749727 - RNA, 15 nt, Human
gaaauuuuacaauag

SEQ ID NO: 3749728 - RNA, 12 nt, Human
gaaauuuuacca

SEQ ID NO: 3749729 - RNA, 16 nt, Human
ggcccccagagcgccc

SEQ ID NO: 3749730 - RNA, 19 nt, Human
ggcccccagagcgccccuc

SEQ ID NO: 3749731 - RNA, 18 nt, Human
ggcccccagcccagggcu

SEQ ID NO: 3749732 - RNA, 19 nt, Human
ggcccccaucauccucugg

SEQ ID NO: 3749733 - RNA, 15 nt, Human
ggccccccagcucag

SEQ ID NO: 3749734 - RNA, 21 nt, Human
ggccccccagcucaggggcag

SEQ ID NO: 3749735 - RNA, 19 nt, Human
ggcccccgccuuggccugu

SEQ ID NO: 3749736 - RNA, 23 nt, Human
ggcccccgccuuggccuguguuc

SEQ ID NO: 3749737 - RNA, 13 nt, Human
ggcccccucccug

SEQ ID NO: 3749738 - RNA, 11 nt, Human
ggcccccugcc

SEQ ID NO: 3749739 - RNA, 17 nt, Human
ggcccccuuucccgggc

SEQ ID NO: 3749740 - RNA, 18 nt, Human
ggccccgaggacccagac

SEQ ID NO: 3749741 - RNA, 14 nt, Human
ggccccgcccaggc

SEQ ID NO: 3749742 - RNA, 14 nt, Human
ggccccgccgccug

SEQ ID NO: 3749743 - RNA, 17 nt, Human
ggccccggaucagagca

SEQ ID NO: 3749744 - RNA, 21 nt, Human
ggccccggccccagccagagu

SEQ ID NO: 3749745 - RNA, 22 nt, Human
ggccccucacccugccuuaucu

SEQ ID NO: 3749746 - RNA, 16 nt, Human
ggccccucaggguccc

SEQ ID NO: 3749747 - RNA, 22 nt, Human
ggccccucccacacacacccac

SEQ ID NO: 3749748 - RNA, 22 nt, Human
ggccccucccacacccaaagcu

SEQ ID NO: 3749749 - RNA, 17 nt, Human
ggccccucccuaccuca

SEQ ID NO: 3749750 - RNA, 12 nt, Human
ggccccucucag

SEQ ID NO: 3749751 - RNA, 16 nt, Human
ggccccucucagcccu

SEQ ID NO: 3749752 - RNA, 14 nt, Human
ggccccucugaccu

SEQ ID NO: 3749753 - RNA, 13 nt, Human
ggccccugccacc

SEQ ID NO: 3749754 - RNA, 16 nt, Human
ggccccugccacccug

SEQ ID NO: 3749755 - RNA, 17 nt, Human
ggccccugccagacccc

SEQ ID NO: 3749756 - RNA, 20 nt, Human
ggccccugcccggcugcgga

SEQ ID NO: 3749757 - RNA, 13 nt, Human
ggccccugccucu

SEQ ID NO: 3749758 - RNA, 14 nt, Human
ggccccugccuugg

SEQ ID NO: 3749759 - RNA, 19 nt, Human
ggccccugcuucuccagcc

SEQ ID NO: 3749760 - RNA, 21 nt, Human
ggccccugcuucuccagccug

SEQ ID NO: 3749761 - RNA, 13 nt, Human
ggccccuggagcc

SEQ ID NO: 3749762 - RNA, 22 nt, Human
ggccccuggaggcugccuccca

SEQ ID NO: 3749763 - RNA, 13 nt, Human
ggccccuggccca

SEQ ID NO: 3749764 - RNA, 22 nt, Human
ggccccugggcuuggccugcug

SEQ ID NO: 3749765 - RNA, 23 nt, Human
ggccccugggucagucugguggg

SEQ ID NO: 3749766 - RNA, 22 nt, Human
ggccccuucacuucugaccaca

SEQ ID NO: 3749767 - RNA, 18 nt, Human
ggccccuuuucacucccu

SEQ ID NO: 3749768 - RNA, 13 nt, Human
ggcccgagcagcu

SEQ ID NO: 3749769 - RNA, 16 nt, Human
ggcccgagcagcugag

SEQ ID NO: 3749770 - RNA, 13 nt, Human
ggcccgcuugccu

SEQ ID NO: 3749771 - RNA, 14 nt, Human
ggcccgcuugccuc

SEQ ID NO: 3749772 - RNA, 22 nt, Human
ggcccgcuugccucggcuccug

SEQ ID NO: 3749773 - RNA, 21 nt, Human
ggcccgucuguccaucugccc

SEQ ID NO: 3749774 - RNA, 23 nt, Human
ggcccguggggccggggcuucug

SEQ ID NO: 3749775 - RNA, 23 nt, Human
ggcccguugucucccuggcccuc

SEQ ID NO: 3749776 - RNA, 21 nt, Human
ggcccuaccagcgcccgcugg

SEQ ID NO: 3749777 - RNA, 22 nt, Human
ggcccuaccagcgcccgcuggg

SEQ ID NO: 3749778 - RNA, 18 nt, Human
ggcccucaaggccuccca

SEQ ID NO: 3749779 - RNA, 20 nt, Human
ggcccucaccccugcccugg

SEQ ID NO: 3749780 - RNA, 21 nt, Human
ggcccucaccccugcccuggg

SEQ ID NO: 3749781 - RNA, 22 nt, Human
ggcccucaucuaugaggaaagg

SEQ ID NO: 3749782 - RNA, 20 nt, Human
ggcccucauuaaugacacuu

SEQ ID NO: 3749783 - RNA, 16 nt, Human
ggcccuccacaccugc

SEQ ID NO: 3749784 - RNA, 21 nt, Human
ggcccuccacaccugcggccc

SEQ ID NO: 3749785 - RNA, 17 nt, Human
ggcccuccagagcccca

SEQ ID NO: 3749786 - RNA, 23 nt, Human
ggcccucccuuggaaaccugccc

SEQ ID NO: 3749787 - RNA, 20 nt, Human
ggcccuccuacccugcgccc

SEQ ID NO: 3749788 - RNA, 16 nt, Human
ggcccucgcugccagc

SEQ ID NO: 3749789 - RNA, 23 nt, Human
ggcccucgcugccagcucuguau

SEQ ID NO: 3749790 - RNA, 20 nt, Human
ggcccucgggcccagccccc

SEQ ID NO: 3749791 - RNA, 13 nt, Human
ggcccucuacccc

SEQ ID NO: 3749792 - RNA, 15 nt, Human
ggcccucuccccugc

SEQ ID NO: 3749793 - RNA, 15 nt, Human
ggcccucucugcucu

SEQ ID NO: 3749794 - RNA, 12 nt, Human
ggcccucucuuc

SEQ ID NO: 3749795 - RNA, 20 nt, Human
ggcccucugcccacucccug

SEQ ID NO: 3749796 - RNA, 18 nt, Human
ggcccucuggaguggcca

SEQ ID NO: 3749797 - RNA, 22 nt, Human
ggcccugaggugugggggcugc

SEQ ID NO: 3749798 - RNA, 19 nt, Human
ggcccugcaaaaggacucu

SEQ ID NO: 3749799 - RNA, 15 nt, Human
ggcccugcacugucc

SEQ ID NO: 3749800 - RNA, 19 nt, Human
ggcccugcacuguccugcu

SEQ ID NO: 3749801 - RNA, 10 nt, Human
ggcccugcau

SEQ ID NO: 3749802 - RNA, 20 nt, Human
ggcccugccaucuucccagc

SEQ ID NO: 3749803 - RNA, 15 nt, Human
ggcccugcccucucc

SEQ ID NO: 3749804 - RNA, 21 nt, Human
ggcccugcccucuccuuccuu

SEQ ID NO: 3749805 - RNA, 14 nt, Human
ggcccugcccugag

SEQ ID NO: 3749806 - RNA, 20 nt, Human
ggcccugcccugguuuccug

SEQ ID NO: 3749807 - RNA, 13 nt, Human
ggcccugccuccu

SEQ ID NO: 3749808 - RNA, 14 nt, Human
ggcccugccuccuu

SEQ ID NO: 3749809 - RNA, 15 nt, Human
ggcccugccuccuuu

SEQ ID NO: 3749810 - RNA, 17 nt, Human
ggcccugcuccugcagc

SEQ ID NO: 3749811 - RNA, 20 nt, Human
ggcccugcugagucaucugu

SEQ ID NO: 3749812 - RNA, 16 nt, Human
ggcccuggagcagcca

SEQ ID NO: 3749813 - RNA, 12 nt, Human
ggcccuggaggc

SEQ ID NO: 3749814 - RNA, 17 nt, Human
ggcccuggaucagcgug

SEQ ID NO: 3749815 - RNA, 18 nt, Human
ggcccuggaucagcgugg

SEQ ID NO: 3749816 - RNA, 23 nt, Human
ggcccuggaucagcguggccuug

SEQ ID NO: 3749817 - RNA, 12 nt, Human
ggcccuggcccu

SEQ ID NO: 3749818 - RNA, 17 nt, Human
ggcccuggccuccccug

SEQ ID NO: 3749819 - RNA, 22 nt, Human
ggcccuggccugcugggcucuc

SEQ ID NO: 3749820 - RNA, 13 nt, Human
ggcccuggccuug

SEQ ID NO: 3749821 - RNA, 22 nt, Human
ggcccuggcucccacaggcccu

SEQ ID NO: 3749822 - RNA, 15 nt, Human
ggcccuggcucugcu

SEQ ID NO: 3749823 - RNA, 21 nt, Human
ggcccugggcucggaggcugc

SEQ ID NO: 3749824 - RNA, 14 nt, Human
ggcccugggcugga

SEQ ID NO: 3749825 - RNA, 13 nt, Human
ggcccuggggccu

SEQ ID NO: 3749826 - RNA, 15 nt, Human
ggcccuggggccugu

SEQ ID NO: 3749827 - RNA, 15 nt, Human
ggcccugggguccca

SEQ ID NO: 3749828 - RNA, 15 nt, Human
ggcccuggguuccuc

SEQ ID NO: 3749829 - RNA, 15 nt, Human
ggcccugguccuucc

SEQ ID NO: 3749830 - RNA, 22 nt, Human
ggcccuggugcgaauggacuuu

SEQ ID NO: 3749831 - RNA, 18 nt, Human
ggcccugucccucccacc

SEQ ID NO: 3749832 - RNA, 23 nt, Human
ggcccugucccucccaccucugu

SEQ ID NO: 3749833 - RNA, 15 nt, Human
ggcccugugugcagg

SEQ ID NO: 3749834 - RNA, 22 nt, Human
ggcccuuccucuccacugccuu

SEQ ID NO: 3749835 - RNA, 23 nt, Human
ggcccuuccucuccacugccuuc

SEQ ID NO: 3749836 - RNA, 13 nt, Human
ggcccuuccugga

SEQ ID NO: 3749837 - RNA, 14 nt, Human
ggcccuuccuggac

SEQ ID NO: 3749838 - RNA, 14 nt, Human
ggcccuuccuuuuc

SEQ ID NO: 3749839 - RNA, 17 nt, Human
ggcccuucucuccagcc

SEQ ID NO: 3749840 - RNA, 20 nt, Human
ggcccuucucuccagccccu

SEQ ID NO: 3749841 - RNA, 19 nt, Human
ggcccuucuugcugcccug

SEQ ID NO: 3749842 - RNA, 19 nt, Human
ggcccuugaguccccauug

SEQ ID NO: 3749843 - RNA, 17 nt, Human
ggcccuugucggcccca

SEQ ID NO: 3749844 - RNA, 16 nt, Human
ggccgaaggcagugca

SEQ ID NO: 3749845 - RNA, 19 nt, Human
ggccgacauugucucccgc

SEQ ID NO: 3749846 - RNA, 19 nt, Human
ggccgagccugccuccugc

SEQ ID NO: 3749847 - RNA, 13 nt, Human
ggccgaggacuuu

SEQ ID NO: 3749848 - RNA, 14 nt, Human
ggccgaggcgggug

SEQ ID NO: 3749849 - RNA, 13 nt, Human
ggccgaguccaag

SEQ ID NO: 3749850 - RNA, 16 nt, Human
ggccgaguccaagcug

SEQ ID NO: 3749851 - RNA, 19 nt, Human
ggccgaucggggcacugca

SEQ ID NO: 3749852 - RNA, 16 nt, Human
ggccgauggggcaguc

SEQ ID NO: 3749853 - RNA, 22 nt, Human
ggccgcaccuaaagcagccagc

SEQ ID NO: 3749854 - RNA, 23 nt, Human
ggccgcccccagcccccuccugg

SEQ ID NO: 3749855 - RNA, 18 nt, Human
ggccgcccccugcccccc

SEQ ID NO: 3749856 - RNA, 19 nt, Human
ggccgcccccugcccccca

SEQ ID NO: 3749857 - RNA, 22 nt, Human
ggccgccggcaauaaaagccca

SEQ ID NO: 3749858 - RNA, 23 nt, Human
ggccgccggcaauaaaagcccag

SEQ ID NO: 3749859 - RNA, 12 nt, Human
ggccgccucacc

SEQ ID NO: 3749860 - RNA, 14 nt, Human
ggccgccucacccc

SEQ ID NO: 3749861 - RNA, 13 nt, Human
ggccgcuagaggc

SEQ ID NO: 3749862 - RNA, 20 nt, Human
ggccgcuagaggccugagga

SEQ ID NO: 3749863 - RNA, 16 nt, Human
ggccgcuccaccagca

SEQ ID NO: 3749864 - RNA, 13 nt, Human
ggccgcuccaggg

SEQ ID NO: 3749865 - RNA, 21 nt, Human
ggccgcugccacccaccuccc

SEQ ID NO: 3749866 - RNA, 22 nt, Human
ggccgcugccacccaccucccu

SEQ ID NO: 3749867 - RNA, 16 nt, Human
ggccgcuguucaccca

SEQ ID NO: 3749868 - RNA, 14 nt, Human
ggccggccaggugg

SEQ ID NO: 3749869 - RNA, 16 nt, Human
ggccggccaggugggc

SEQ ID NO: 3749870 - RNA, 12 nt, Human
ggccggcccugu

SEQ ID NO: 3749871 - RNA, 14 nt, Human
ggccggcccugugu

SEQ ID NO: 3749872 - RNA, 15 nt, Human
ggccggcccugugug

SEQ ID NO: 3749873 - RNA, 18 nt, Human
ggccggcggccucagagu

SEQ ID NO: 3749874 - RNA, 19 nt, Human
ggccggcugugcucagaga

SEQ ID NO: 3749875 - RNA, 12 nt, Human
ggccgggcacag

SEQ ID NO: 3749876 - RNA, 16 nt, Human
ggccgggcagaggggc

SEQ ID NO: 3749877 - RNA, 18 nt, Human
ggccggggaacuggccaa

SEQ ID NO: 3749878 - RNA, 13 nt, Human
ggccggggcugag

SEQ ID NO: 3749879 - RNA, 11 nt, Human
gggcccaggga

SEQ ID NO: 3749880 - RNA, 13 nt, Human
gggcccaucucuu

SEQ ID NO: 3749881 - RNA, 15 nt, Human
gggccccaccaccua

SEQ ID NO: 3749882 - RNA, 14 nt, Human
gggccccagaggcu

SEQ ID NO: 3749883 - RNA, 12 nt, Human
gggccccagccc

SEQ ID NO: 3749884 - RNA, 13 nt, Human
gggccccagccca

SEQ ID NO: 3749885 - RNA, 14 nt, Human
gggccccagcccac

SEQ ID NO: 3749886 - RNA, 16 nt, Human
gggccccagcccaccc

SEQ ID NO: 3749887 - RNA, 17 nt, Human
gggccccagucagccuc

SEQ ID NO: 3749888 - RNA, 23 nt, Human
gggcccccagcgagagucccugc

SEQ ID NO: 3749889 - RNA, 23 nt, Human
gggccccccagcucaggggcagc

SEQ ID NO: 3749890 - RNA, 17 nt, Human
gggccccccuccuugcu

SEQ ID NO: 3749891 - RNA, 19 nt, Human
gggccccccuccuugcucu

SEQ ID NO: 3749892 - RNA, 19 nt, Human
gggccccucacccugccuu

SEQ ID NO: 3749893 - RNA, 15 nt, Human
gggccccuccagcuu

SEQ ID NO: 3749894 - RNA, 20 nt, Human
gggccccucccuaccucaac

SEQ ID NO: 3749895 - RNA, 14 nt, Human
gggccccucucagc

SEQ ID NO: 3749896 - RNA, 15 nt, Human
gggccccucucagcc

SEQ ID NO: 3749897 - RNA, 15 nt, Human
gggccccucugccca

SEQ ID NO: 3749898 - RNA, 15 nt, Human
gggccccugccucuc

SEQ ID NO: 3749899 - RNA, 18 nt, Human
gggccccugccucucugc

SEQ ID NO: 3749900 - RNA, 19 nt, Human
gggccccugccucucugca

SEQ ID NO: 3749901 - RNA, 21 nt, Human
gggccccugccucucugcagg

SEQ ID NO: 3749902 - RNA, 14 nt, Human
gggccccugggcuu

SEQ ID NO: 3749903 - RNA, 20 nt, Human
gggcccgccuggcagaacug

SEQ ID NO: 3749904 - RNA, 23 nt, Human
gggcccgcuugccucggcuccug

SEQ ID NO: 3749905 - RNA, 12 nt, Human
gggcccggacgc

SEQ ID NO: 3749906 - RNA, 21 nt, Human
gggcccggguugggucaccag

SEQ ID NO: 3749907 - RNA, 14 nt, Human
gggcccucccuugg

SEQ ID NO: 3749908 - RNA, 16 nt, Human
gggcccuccgacagcc

SEQ ID NO: 3749909 - RNA, 19 nt, Human
gggcccuccgacagccccc

SEQ ID NO: 3749910 - RNA, 23 nt, Human
gggcccuccugaaacuuacacac

SEQ ID NO: 3749911 - RNA, 22 nt, Human
gggcccugagcucgguggaccc

SEQ ID NO: 3749912 - RNA, 21 nt, Human
gggcccugcagcucucaugcu

SEQ ID NO: 3749913 - RNA, 15 nt, Human
gggcccuggagcagc

SEQ ID NO: 3749914 - RNA, 12 nt, Human
gggcccuggagg

SEQ ID NO: 3749915 - RNA, 17 nt, Human
gggcccugggccugccu

SEQ ID NO: 3749916 - RNA, 14 nt, Human
gggcccuggggccu

SEQ ID NO: 3749917 - RNA, 15 nt, Human
gggcccuggggccug

SEQ ID NO: 3749918 - RNA, 21 nt, Human
gggcccugguguuucuagcac

SEQ ID NO: 3749919 - RNA, 21 nt, Human
gggcccuucacugccuuugcu

SEQ ID NO: 3749920 - RNA, 19 nt, Human
gggcccuucuugcugcccu

SEQ ID NO: 3749921 - RNA, 17 nt, Human
gggcccuuugagugcag

SEQ ID NO: 3749922 - RNA, 20 nt, Human
gggccgaccagaggagccuu

SEQ ID NO: 3749923 - RNA, 16 nt, Human
gggccgaugcccagag

SEQ ID NO: 3749924 - RNA, 20 nt, Human
gggccgcccgggcccagagg

SEQ ID NO: 3749925 - RNA, 20 nt, Human
gggccgcguggugccauccc

SEQ ID NO: 3749926 - RNA, 15 nt, Human
gggccgcugccaccc

SEQ ID NO: 3749927 - RNA, 15 nt, Human
gggccggagggucag

SEQ ID NO: 3749928 - RNA, 20 nt, Human
gggccggggaacuggccaag

SEQ ID NO: 3749929 - RNA, 15 nt, Human
gggccguaccccacc

SEQ ID NO: 3749930 - RNA, 16 nt, Human
gggccguaccccaccc

SEQ ID NO: 3749931 - RNA, 16 nt, Human
gggccguaucuccggc

SEQ ID NO: 3749932 - RNA, 24 nt, Human
gggccguaucuccggcucccagcc

SEQ ID NO: 3749933 - RNA, 13 nt, Human
gggccgugcccag

SEQ ID NO: 3749934 - RNA, 14 nt, Human
gggccgugcccagg

SEQ ID NO: 3749935 - RNA, 21 nt, Human
gggccuagcgaucucuccugg

SEQ ID NO: 3749936 - RNA, 23 nt, Human
gggccuagcgaucucuccuggcc

SEQ ID NO: 3749937 - RNA, 23 nt, Human
gggccuagcugcuacaaagaaga

SEQ ID NO: 3749938 - RNA, 17 nt, Human
gggccuaggccucagcc

SEQ ID NO: 3749939 - RNA, 15 nt, Human
gggccuaggcugcau

SEQ ID NO: 3749940 - RNA, 15 nt, Human
gggccuaucagugug

SEQ ID NO: 3749941 - RNA, 20 nt, Human
gggccuaucagugugccccc

SEQ ID NO: 3749942 - RNA, 16 nt, Human
gggccuauggagagcc

SEQ ID NO: 3749943 - RNA, 20 nt, Human
gggccuauggagagcccugg

SEQ ID NO: 3749944 - RNA, 22 nt, Human
gggccuauggagagcccuggga

SEQ ID NO: 3749945 - RNA, 13 nt, Human
gggccucacucca

SEQ ID NO: 3749946 - RNA, 14 nt, Human
gggccucacuccag

SEQ ID NO: 3749947 - RNA, 19 nt, Human
gggccucagggcagccugc

SEQ ID NO: 3749948 - RNA, 19 nt, Human
gggccuccauuccuggagc

SEQ ID NO: 3749949 - RNA, 22 nt, Human
gggccucggacuuagcugggag

SEQ ID NO: 3749950 - RNA, 15 nt, Human
gggccucggagccuc

SEQ ID NO: 3749951 - RNA, 23 nt, Human
gggccucugcggagcacacuggc

SEQ ID NO: 3749952 - RNA, 23 nt, Human
gggccucugguuuggggcgaggc

SEQ ID NO: 3749953 - RNA, 23 nt, Human
gggccucuugcggucccuucuua

SEQ ID NO: 3749954 - RNA, 18 nt, Human
gggccugaccucccccuc

SEQ ID NO: 3749955 - RNA, 19 nt, Human
gggccugaccucccccucc

SEQ ID NO: 3749956 - RNA, 17 nt, Human
gggccugacugcucaga

SEQ ID NO: 3749957 - RNA, 20 nt, Human
gggccugagcaguccuuggc

SEQ ID NO: 3749958 - RNA, 17 nt, Human
gggccugaggcuccuua

SEQ ID NO: 3749959 - RNA, 18 nt, Human
gggccugcaggaccugcc

SEQ ID NO: 3749960 - RNA, 11 nt, Human
gggccugccac

SEQ ID NO: 3749961 - RNA, 13 nt, Human
gggccugccaccu

SEQ ID NO: 3749962 - RNA, 16 nt, Human
gggccugccaccugga

SEQ ID NO: 3749963 - RNA, 18 nt, Human
gggccugccaccuggacc

SEQ ID NO: 3749964 - RNA, 23 nt, Human
gggccugccaccuggaccccugc

SEQ ID NO: 3749965 - RNA, 15 nt, Human
gggccugccgggcug

SEQ ID NO: 3749966 - RNA, 20 nt, Human
gggccugccgggcugagggc

SEQ ID NO: 3749967 - RNA, 17 nt, Human
gggccugcuccagaccu

SEQ ID NO: 3749968 - RNA, 11 nt, Human
gggccugcugc

SEQ ID NO: 3749969 - RNA, 12 nt, Human
gggccugcugcu

SEQ ID NO: 3749970 - RNA, 15 nt, Human
gggccugcugcugag

SEQ ID NO: 3749971 - RNA, 18 nt, Human
gggccugcugcugagaac

SEQ ID NO: 3749972 - RNA, 19 nt, Human
gggccugcugcugagaacc

SEQ ID NO: 3749973 - RNA, 14 nt, Human
gggccuggaccugc

SEQ ID NO: 3749974 - RNA, 12 nt, Human
gggccuggaugc

SEQ ID NO: 3749975 - RNA, 21 nt, Human
gggccuggauucauuuccugc

SEQ ID NO: 3749976 - RNA, 12 nt, Human
gggccuggcuca

SEQ ID NO: 3749977 - RNA, 14 nt, Human
gggccuggcuggcu

SEQ ID NO: 3749978 - RNA, 21 nt, Human
gggccuggcuggcugagggca

SEQ ID NO: 3749979 - RNA, 22 nt, Human
gggccuggcuggcugagggcag

SEQ ID NO: 3749980 - RNA, 12 nt, Human
gggccugggcag

SEQ ID NO: 3749981 - RNA, 15 nt, Human
gggccugggcaggag

SEQ ID NO: 3749982 - RNA, 17 nt, Human
gggccugggcaggaggg

SEQ ID NO: 3749983 - RNA, 11 nt, Human
gggccugggcc

SEQ ID NO: 3749984 - RNA, 16 nt, Human
gggccugggcuccugg

SEQ ID NO: 3749985 - RNA, 19 nt, Human
gggccuggucccugggagg

SEQ ID NO: 3749986 - RNA, 20 nt, Human
gggccuggucucacccugga

SEQ ID NO: 3749987 - RNA, 12 nt, Human
gggccuguacag

SEQ ID NO: 3749988 - RNA, 16 nt, Human
gggccuguacugccug

SEQ ID NO: 3749989 - RNA, 20 nt, Human
gggccuguacugccugcuug

SEQ ID NO: 3749990 - RNA, 23 nt, Human
gggccuguccacaggcuucugag

SEQ ID NO: 3749991 - RNA, 22 nt, Human
gggccuguggaaugagugugca

SEQ ID NO: 3749992 - RNA, 12 nt, Human
gggccuguugcc

SEQ ID NO: 3749993 - RNA, 16 nt, Human
gggccuuaaaagccau

SEQ ID NO: 3749994 - RNA, 20 nt, Human
gggccuuagugggccagggc

SEQ ID NO: 3749995 - RNA, 23 nt, Human
gggccuuaucgggcuccagccau

SEQ ID NO: 3749996 - RNA, 15 nt, Human
gggccuugcccagag

SEQ ID NO: 3749997 - RNA, 17 nt, Human
gggccuugcccagagau

SEQ ID NO: 3749998 - RNA, 22 nt, Human
gggccuuggccuccccugcuga

SEQ ID NO: 3749999 - RNA, 16 nt, Human
gggccuuggccuggag

SEQ ID NO: 3750000 - RNA, 17 nt, Human
gggccuuggccuggagc

SEQ ID NO: 3750001 - RNA, 24 nt, Human
gggccuugggcuccgugugggaga

SEQ ID NO: 3750002 - RNA, 16 nt, Human
gggccuuuggcaggug

SEQ ID NO: 3750003 - RNA, 16 nt, Human
gggcgaggcagaggac

SEQ ID NO: 3750004 - RNA, 18 nt, Human
gggcgaucgcggcggagc

SEQ ID NO: 3750005 - RNA, 12 nt, Human
gggcgcaggccg

SEQ ID NO: 3750006 - RNA, 19 nt, Human
gggcgccccccccucccca

SEQ ID NO: 3750007 - RNA, 22 nt, Human
gggcgccgugcugggcagcccg

SEQ ID NO: 3750008 - RNA, 22 nt, Human
gggcgccuguagucccagccac

SEQ ID NO: 3750009 - RNA, 16 nt, Human
gggcgcgguggcucac

SEQ ID NO: 3750010 - RNA, 20 nt, Human
gggcgcucgcuuccgcaucc

SEQ ID NO: 3750011 - RNA, 14 nt, Human
gggcggcagagagg

SEQ ID NO: 3750012 - RNA, 15 nt, Human
gggcggcaggaggga

SEQ ID NO: 3750013 - RNA, 21 nt, Human
gggcggcaggggccuggagau

SEQ ID NO: 3750014 - RNA, 15 nt, Human
gggcggcucugaagc

SEQ ID NO: 3750015 - RNA, 12 nt, Human
gggcggcugggu

SEQ ID NO: 3750016 - RNA, 17 nt, Human
gggcgggacccaggcac

SEQ ID NO: 3750017 - RNA, 15 nt, Human
gggcgggaggauguu

SEQ ID NO: 3750018 - RNA, 17 nt, Human
gggcgggcagagggcug

SEQ ID NO: 3750019 - RNA, 15 nt, Human
gggcgggcagcacag

SEQ ID NO: 3750020 - RNA, 16 nt, Human
gggcgugacucaccca

SEQ ID NO: 3750021 - RNA, 14 nt, Human
gggcgugagguccc

SEQ ID NO: 3750022 - RNA, 16 nt, Human
gggcgugaggucccag

SEQ ID NO: 3750023 - RNA, 13 nt, Human
gggcguggagggc

SEQ ID NO: 3750024 - RNA, 14 nt, Human
gggcguguuguuuu

SEQ ID NO: 3750025 - RNA, 20 nt, Human
gggcuaagagcuagcgcugc

SEQ ID NO: 3750026 - RNA, 15 nt, Human
gggcuacaaggaccc

SEQ ID NO: 3750027 - RNA, 20 nt, Human
gggcuacccgugagcccuuc

SEQ ID NO: 3750028 - RNA, 16 nt, Human
gggcuacccugagcug

SEQ ID NO: 3750029 - RNA, 14 nt, Human
ggccguaccccacc

SEQ ID NO: 3750030 - RNA, 22 nt, Human
ggccguaccccacccucagcac

SEQ ID NO: 3750031 - RNA, 19 nt, Human
ggccguaucuccggcuccc

SEQ ID NO: 3750032 - RNA, 20 nt, Human
ggccguaucuccggcuccca

SEQ ID NO: 3750033 - RNA, 21 nt, Human
ggccguaucuccggcucccag

SEQ ID NO: 3750034 - RNA, 22 nt, Human
ggccguaucuccggcucccagc

SEQ ID NO: 3750035 - RNA, 21 nt, Human
ggccguccucccgggcccucc

SEQ ID NO: 3750036 - RNA, 22 nt, Human
ggccguccucccgggcccuccc

SEQ ID NO: 3750037 - RNA, 13 nt, Human
ggccguggcugcc

SEQ ID NO: 3750038 - RNA, 13 nt, Human
ggccguggcugcu

SEQ ID NO: 3750039 - RNA, 14 nt, Human
ggccguggcugcug

SEQ ID NO: 3750040 - RNA, 17 nt, Human
ggccuaaaaguaaacau

SEQ ID NO: 3750041 - RNA, 14 nt, Human
ggccuaaacuucag

SEQ ID NO: 3750042 - RNA, 19 nt, Human
ggccuaaauuuauuaaaua

SEQ ID NO: 3750043 - RNA, 22 nt, Human
ggccuaagaggcugcccuccug

SEQ ID NO: 3750044 - RNA, 19 nt, Human
ggccuaagaguugagcucu

SEQ ID NO: 3750045 - RNA, 22 nt, Human
ggccuaauaaaacugaugugaa

SEQ ID NO: 3750046 - RNA, 20 nt, Human
ggccuacagcuuugaucccu

SEQ ID NO: 3750047 - RNA, 18 nt, Human
ggccuacaugcuuuguga

SEQ ID NO: 3750048 - RNA, 14 nt, Human
ggccuacuccuguc

SEQ ID NO: 3750049 - RNA, 18 nt, Human
ggccuacuggggaucaga

SEQ ID NO: 3750050 - RNA, 14 nt, Human
ggccuagaccagca

SEQ ID NO: 3750051 - RNA, 18 nt, Human
ggccuagacucugucuac

SEQ ID NO: 3750052 - RNA, 13 nt, Human
ggccuagaggccu

SEQ ID NO: 3750053 - RNA, 20 nt, Human
ggccuagcauacguacacau

SEQ ID NO: 3750054 - RNA, 19 nt, Human
ggccuagcgaucucuccug

SEQ ID NO: 3750055 - RNA, 22 nt, Human
ggccuagcgaucucuccuggcc

SEQ ID NO: 3750056 - RNA, 23 nt, Human
ggccuagcgaucucuccuggccu

SEQ ID NO: 3750057 - RNA, 16 nt, Human
ggccuagcugcuacaa

SEQ ID NO: 3750058 - RNA, 20 nt, Human
ggccuagcugcuacaaagaa

SEQ ID NO: 3750059 - RNA, 13 nt, Human
ggccuaggauucu

SEQ ID NO: 3750060 - RNA, 14 nt, Human
ggccuaggccucag

SEQ ID NO: 3750061 - RNA, 20 nt, Human
ggccuaggccucagccagag

SEQ ID NO: 3750062 - RNA, 12 nt, Human
ggccuaggcugc

SEQ ID NO: 3750063 - RNA, 15 nt, Human
ggccuaucagugugc

SEQ ID NO: 3750064 - RNA, 17 nt, Human
ggccuaucagugugccc

SEQ ID NO: 3750065 - RNA, 20 nt, Human
ggccuaugcacauauggacu

SEQ ID NO: 3750066 - RNA, 21 nt, Human
ggccuaugcacauauggacuc

SEQ ID NO: 3750067 - RNA, 22 nt, Human
ggccuauggagagcccugggac

SEQ ID NO: 3750068 - RNA, 14 nt, Human
ggccuauuucauca

SEQ ID NO: 3750069 - RNA, 23 nt, Human
ggccucaaagcaagcauucagaa

SEQ ID NO: 3750070 - RNA, 18 nt, Human
ggccucaaaggcccgcuc

SEQ ID NO: 3750071 - RNA, 20 nt, Human
ggccucaaaggcccgcucua

SEQ ID NO: 3750072 - RNA, 16 nt, Human
ggccucaacccucccu

SEQ ID NO: 3750073 - RNA, 19 nt, Human
ggccucaacccucccucag

SEQ ID NO: 3750074 - RNA, 21 nt, Human
ggccucaacccucccucagcc

SEQ ID NO: 3750075 - RNA, 12 nt, Human
ggccucaagauc

SEQ ID NO: 3750076 - RNA, 23 nt, Human
ggccucaagugauucuccugccu

SEQ ID NO: 3750077 - RNA, 18 nt, Human
ggccucacuccaggaagg

SEQ ID NO: 3750078 - RNA, 21 nt, Human
ggccucagcaccccugucucu

SEQ ID NO: 3750079 - RNA, 20 nt, Human
ggccucagccagagaagcua

SEQ ID NO: 3750080 - RNA, 15 nt, Human
ggccucagcugccuc

SEQ ID NO: 3750081 - RNA, 11 nt, Human
ggccucagggc

SEQ ID NO: 3750082 - RNA, 13 nt, Human
ggccucagggcuc

SEQ ID NO: 3750083 - RNA, 14 nt, Human
ggccucagggcucc

SEQ ID NO: 3750084 - RNA, 15 nt, Human
ggccucagggcuccu

SEQ ID NO: 3750085 - RNA, 18 nt, Human
ggccucagggcuccuugu

SEQ ID NO: 3750086 - RNA, 16 nt, Human
ggccucaggugcuguc

SEQ ID NO: 3750087 - RNA, 20 nt, Human
ggccucagucucccuucucc

SEQ ID NO: 3750088 - RNA, 13 nt, Human
ggccucagugcca

SEQ ID NO: 3750089 - RNA, 16 nt, Human
ggccucauguggcugg

SEQ ID NO: 3750090 - RNA, 22 nt, Human
ggccuccagcccucucacugug

SEQ ID NO: 3750091 - RNA, 23 nt, Human
ggccuccaggcccgucuguccau

SEQ ID NO: 3750092 - RNA, 23 nt, Human
ggccuccauuccuggagcccgag

SEQ ID NO: 3750093 - RNA, 13 nt, Human
ggccucccaaagu

SEQ ID NO: 3750094 - RNA, 23 nt, Human
ggccucccaacucaccccagccc

SEQ ID NO: 3750095 - RNA, 17 nt, Human
ggccucccacagacuca

SEQ ID NO: 3750096 - RNA, 15 nt, Human
ggccucccacaguga

SEQ ID NO: 3750097 - RNA, 15 nt, Human
ggccuccccugcuga

SEQ ID NO: 3750098 - RNA, 12 nt, Human
ggccucccugcc

SEQ ID NO: 3750099 - RNA, 13 nt, Human
ggccucccugcca

SEQ ID NO: 3750100 - RNA, 14 nt, Human
ggccuccggccucc

SEQ ID NO: 3750101 - RNA, 14 nt, Human
ggccuccucuucac

SEQ ID NO: 3750102 - RNA, 14 nt, Human
ggccuccugccucu

SEQ ID NO: 3750103 - RNA, 17 nt, Human
ggccuccuugcuuguua

SEQ ID NO: 3750104 - RNA, 15 nt, Human
ggccucgccuggccu

SEQ ID NO: 3750105 - RNA, 17 nt, Human
ggccucggacuuagcug

SEQ ID NO: 3750106 - RNA, 20 nt, Human
ggccucggacuuagcuggga

SEQ ID NO: 3750107 - RNA, 22 nt, Human
ggccucggagccucauccgagg

SEQ ID NO: 3750108 - RNA, 16 nt, Human
ggccucgggacaccug

SEQ ID NO: 3750109 - RNA, 23 nt, Human
ggccucgggacaccugcccugcc

SEQ ID NO: 3750110 - RNA, 20 nt, Human
ggccucgguguggagaagcg

SEQ ID NO: 3750111 - RNA, 23 nt, Human
ggccucucaccucugugccucug

SEQ ID NO: 3750112 - RNA, 20 nt, Human
ggccucucauuccagaggaa

SEQ ID NO: 3750113 - RNA, 19 nt, Human
ggccucuccagccucagcc

SEQ ID NO: 3750114 - RNA, 19 nt, Human
ggccucuccuuguggccug

SEQ ID NO: 3750115 - RNA, 22 nt, Human
ggccucucuauccucucuuccu

SEQ ID NO: 3750116 - RNA, 16 nt, Human
ggccucucuggccucc

SEQ ID NO: 3750117 - RNA, 20 nt, Human
ggccucucuggccucccacc

SEQ ID NO: 3750118 - RNA, 13 nt, Human
ggccucugcacuc

SEQ ID NO: 3750119 - RNA, 15 nt, Human
ggccucugcacuccc

SEQ ID NO: 3750120 - RNA, 18 nt, Human
ggccucugcacuccccug

SEQ ID NO: 3750121 - RNA, 19 nt, Human
ggccucugcacuccccugc

SEQ ID NO: 3750122 - RNA, 21 nt, Human
ggccucuggaaagcaaagggc

SEQ ID NO: 3750123 - RNA, 16 nt, Human
ggccucugugccuucu

SEQ ID NO: 3750124 - RNA, 16 nt, Human
ggccucuucucucaga

SEQ ID NO: 3750125 - RNA, 13 nt, Human
ggccucuugagca

SEQ ID NO: 3750126 - RNA, 17 nt, Human
ggccucuuggaccucug

SEQ ID NO: 3750127 - RNA, 22 nt, Human
ggccucuuggaccucugcucug

SEQ ID NO: 3750128 - RNA, 19 nt, Human
ggccucuugggucccccac

SEQ ID NO: 3750129 - RNA, 16 nt, Human
ggccugaaauccuggu

SEQ ID NO: 3750130 - RNA, 13 nt, Human
ggccugaagaguc

SEQ ID NO: 3750131 - RNA, 19 nt, Human
ggccugaagaguccucuga

SEQ ID NO: 3750132 - RNA, 16 nt, Human
ggccugaagccagcug

SEQ ID NO: 3750133 - RNA, 17 nt, Human
ggccugaagccagcugc

SEQ ID NO: 3750134 - RNA, 17 nt, Human
ggccugaaucaugagcc

SEQ ID NO: 3750135 - RNA, 21 nt, Human
ggccugaaucaugagccugcu

SEQ ID NO: 3750136 - RNA, 22 nt, Human
ggccugaaucaugagccugcug

SEQ ID NO: 3750137 - RNA, 16 nt, Human
ggccugaauccaaaag

SEQ ID NO: 3750138 - RNA, 16 nt, Human
ggccugacugccaagc

SEQ ID NO: 3750139 - RNA, 19 nt, Human
ggccugacugccaagccau

SEQ ID NO: 3750140 - RNA, 20 nt, Human
ggccugacugccaagccaug

SEQ ID NO: 3750141 - RNA, 17 nt, Human
ggccugagacccaggac

SEQ ID NO: 3750142 - RNA, 18 nt, Human
ggccugagacccaggacu

SEQ ID NO: 3750143 - RNA, 21 nt, Human
ggccugagagucagcucucug

SEQ ID NO: 3750144 - RNA, 15 nt, Human
ggccugagcugggau

SEQ ID NO: 3750145 - RNA, 17 nt, Human
ggccugaggagcagcag

SEQ ID NO: 3750146 - RNA, 19 nt, Human
ggccugaggaugagcugga

SEQ ID NO: 3750147 - RNA, 21 nt, Human
ggccugaggucucgcugaugc

SEQ ID NO: 3750148 - RNA, 22 nt, Human
ggccugaggucucgcugaugcu

SEQ ID NO: 3750149 - RNA, 21 nt, Human
ggccugaggucuggcugcuug

SEQ ID NO: 3750150 - RNA, 20 nt, Human
ggccugagugagaggggagg

SEQ ID NO: 3750151 - RNA, 17 nt, Human
ggccugaugcucccucc

SEQ ID NO: 3750152 - RNA, 15 nt, Human
ggccugcaaacuggg

SEQ ID NO: 3750153 - RNA, 14 nt, Human
ggccugcacacaag

SEQ ID NO: 3750154 - RNA, 19 nt, Human
ggccugcacggugggccuu

SEQ ID NO: 3750155 - RNA, 19 nt, Human
ggccugcagcaggaguggu

SEQ ID NO: 3750156 - RNA, 18 nt, Human
ggccugccaccuggaccc

SEQ ID NO: 3750157 - RNA, 19 nt, Human
ggccugccaccuggacccc

SEQ ID NO: 3750158 - RNA, 22 nt, Human
ggccugccaccuggaccccugc

SEQ ID NO: 3750159 - RNA, 23 nt, Human
ggccugccaccuggaccccugca

SEQ ID NO: 3750160 - RNA, 13 nt, Human
ggccugccaggag

SEQ ID NO: 3750161 - RNA, 15 nt, Human
ggccugcccaguugc

SEQ ID NO: 3750162 - RNA, 17 nt, Human
ggccugccuagcacuca

SEQ ID NO: 3750163 - RNA, 14 nt, Human
ggccugccuggccc

SEQ ID NO: 3750164 - RNA, 23 nt, Human
ggccugccuggccccucgccugu

SEQ ID NO: 3750165 - RNA, 16 nt, Human
ggccugcgacccuggg

SEQ ID NO: 3750166 - RNA, 18 nt, Human
ggccugcgccaguccugc

SEQ ID NO: 3750167 - RNA, 13 nt, Human
ggccugcuccaga

SEQ ID NO: 3750168 - RNA, 15 nt, Human
ggccugcuccagacc

SEQ ID NO: 3750169 - RNA, 17 nt, Human
ggccugcuccagaccug

SEQ ID NO: 3750170 - RNA, 17 nt, Human
ggccugcucccagcagc

SEQ ID NO: 3750171 - RNA, 19 nt, Human
ggccugcugcugagaaccu

SEQ ID NO: 3750172 - RNA, 20 nt, Human
ggccugcugcugagaaccug

SEQ ID NO: 3750173 - RNA, 18 nt, Human
ggccugcuggaggccuca

SEQ ID NO: 3750174 - RNA, 17 nt, Human
ggccugcugggcucucc

SEQ ID NO: 3750175 - RNA, 19 nt, Human
ggccugcugggcucuccac

SEQ ID NO: 3750176 - RNA, 20 nt, Human
ggccugcugggcucuccacc

SEQ ID NO: 3750177 - RNA, 15 nt, Human
gaaauuuuauaugcu

SEQ ID NO: 3750178 - RNA, 19 nt, Human
gaaauuuuauaugcuuacu

SEQ ID NO: 3750179 - RNA, 14 nt, Human
gaaauuuuccaaug

SEQ ID NO: 3750180 - RNA, 16 nt, Human
gaaauuuugcaaauau

SEQ ID NO: 3750181 - RNA, 14 nt, Human
gaaauuuuguaaga

SEQ ID NO: 3750182 - RNA, 19 nt, Human
gaaauuuuuauuaaauuau

SEQ ID NO: 3750183 - RNA, 17 nt, Human
gaaauuuuucagaugcu

SEQ ID NO: 3750184 - RNA, 20 nt, Human
gaaauuuuucagaugcuucu

SEQ ID NO: 3750185 - RNA, 16 nt, Human
gaaauuuuucauauuu

SEQ ID NO: 3750186 - RNA, 19 nt, Human
gaacaaaaaaaucugcaga

SEQ ID NO: 3750187 - RNA, 13 nt, Human
gaacaaaaggguc

SEQ ID NO: 3750188 - RNA, 14 nt, Human
gaacaaaauaaauu

SEQ ID NO: 3750189 - RNA, 14 nt, Human
gaacaaaauuauuu

SEQ ID NO: 3750190 - RNA, 14 nt, Human
gaacaaagcagcca

SEQ ID NO: 3750191 - RNA, 16 nt, Human
gaacaaagcagccacg

SEQ ID NO: 3750192 - RNA, 19 nt, Human
gaacaaagcagccacgagg

SEQ ID NO: 3750193 - RNA, 15 nt, Human
gaacaaagcuguuaa

SEQ ID NO: 3750194 - RNA, 15 nt, Human
gaacaaagugagaca

SEQ ID NO: 3750195 - RNA, 13 nt, Human
gaacaaaucuucc

SEQ ID NO: 3750196 - RNA, 14 nt, Human
gaacaaaucuuccu

SEQ ID NO: 3750197 - RNA, 17 nt, Human
gaacaaauuuacagaga

SEQ ID NO: 3750198 - RNA, 16 nt, Human
gaacaaccucggcucc

SEQ ID NO: 3750199 - RNA, 21 nt, Human
gaacaaggcaaggcugucaau

SEQ ID NO: 3750200 - RNA, 21 nt, Human
gaacaaguuguuucauugacu

SEQ ID NO: 3750201 - RNA, 20 nt, Human
gaacaauauugacuuugucu

SEQ ID NO: 3750202 - RNA, 16 nt, Human
gaacaauauuuuaugg

SEQ ID NO: 3750203 - RNA, 21 nt, Human
gaacaaugugcuaugugaaga

SEQ ID NO: 3750204 - RNA, 13 nt, Human
gaacaauuuucuu

SEQ ID NO: 3750205 - RNA, 22 nt, Human
gaacacaaacacauuguuauuu

SEQ ID NO: 3750206 - RNA, 19 nt, Human
gaacacaaacuguaaauaa

SEQ ID NO: 3750207 - RNA, 14 nt, Human
gaacacacuccauc

SEQ ID NO: 3750208 - RNA, 13 nt, Human
gaacacagaacug

SEQ ID NO: 3750209 - RNA, 20 nt, Human
gaacacagcaguucugcaga

SEQ ID NO: 3750210 - RNA, 17 nt, Human
gaacacauaauucagga

SEQ ID NO: 3750211 - RNA, 20 nt, Human
gaacacauaauucaggaagc

SEQ ID NO: 3750212 - RNA, 14 nt, Human
gaacacccucgaag

SEQ ID NO: 3750213 - RNA, 18 nt, Human
gaacaccuaugcaaagau

SEQ ID NO: 3750214 - RNA, 22 nt, Human
gaacacggccacaucaaagagg

SEQ ID NO: 3750215 - RNA, 22 nt, Human
gaacacguccagaauuuuucau

SEQ ID NO: 3750216 - RNA, 17 nt, Human
gaacacuagacaagcca

SEQ ID NO: 3750217 - RNA, 19 nt, Human
gaacacuagacaagccaga

SEQ ID NO: 3750218 - RNA, 16 nt, Human
gaacacuccuucacag

SEQ ID NO: 3750219 - RNA, 21 nt, Human
gaacacucuauaacaaaggau

SEQ ID NO: 3750220 - RNA, 17 nt, Human
gaacacugcccucgcac

SEQ ID NO: 3750221 - RNA, 13 nt, Human
gaacacuggggac

SEQ ID NO: 3750222 - RNA, 16 nt, Human
gaacacugggggaggg

SEQ ID NO: 3750223 - RNA, 17 nt, Human
gaacacugggggagggg

SEQ ID NO: 3750224 - RNA, 20 nt, Human
gaacacugggggaggggaca

SEQ ID NO: 3750225 - RNA, 11 nt, Human
gaacagaaaac

SEQ ID NO: 3750226 - RNA, 12 nt, Human
gaacagaaaaca

SEQ ID NO: 3750227 - RNA, 13 nt, Human
gaacagaaaacaa

SEQ ID NO: 3750228 - RNA, 23 nt, Human
gaacagaaaacaacaaaaaauaa

SEQ ID NO: 3750229 - RNA, 13 nt, Human
gaacagaagaaaa

SEQ ID NO: 3750230 - RNA, 14 nt, Human
gaacagaagaaaau

SEQ ID NO: 3750231 - RNA, 19 nt, Human
gaacagaaggaugaaugag

SEQ ID NO: 3750232 - RNA, 19 nt, Human
gaacagacaacagaaguca

SEQ ID NO: 3750233 - RNA, 16 nt, Human
gaacagacaggagaaa

SEQ ID NO: 3750234 - RNA, 15 nt, Human
gaacagacuggaagc

SEQ ID NO: 3750235 - RNA, 19 nt, Human
gaacagacuggaagcacag

SEQ ID NO: 3750236 - RNA, 15 nt, Human
gaacagacuggccug

SEQ ID NO: 3750237 - RNA, 21 nt, Human
gaacagagagacccuuguggg

SEQ ID NO: 3750238 - RNA, 17 nt, Human
gaacagauaaucccugu

SEQ ID NO: 3750239 - RNA, 20 nt, Human
gaacagcagacucagcucug

SEQ ID NO: 3750240 - RNA, 14 nt, Human
gaacagcaggccca

SEQ ID NO: 3750241 - RNA, 15 nt, Human
gaacagcaggcccac

SEQ ID NO: 3750242 - RNA, 21 nt, Human
gaacagcaggcccaccuaccu

SEQ ID NO: 3750243 - RNA, 13 nt, Human
gaacagcauggca

SEQ ID NO: 3750244 - RNA, 18 nt, Human
gaacagcauggcacuccc

SEQ ID NO: 3750245 - RNA, 21 nt, Human
gaacagcgaaguagcuugcuc

SEQ ID NO: 3750246 - RNA, 14 nt, Human
gaacagcuggugua

SEQ ID NO: 3750247 - RNA, 15 nt, Human
gaacagcugguguag

SEQ ID NO: 3750248 - RNA, 12 nt, Human
gaacagcuguug

SEQ ID NO: 3750249 - RNA, 14 nt, Human
gaacagcuucaggu

SEQ ID NO: 3750250 - RNA, 14 nt, Human
gaacaggcugggcu

SEQ ID NO: 3750251 - RNA, 21 nt, Human
gaacagggaaaauaggcagga

SEQ ID NO: 3750252 - RNA, 13 nt, Human
gaacaguaaacau

SEQ ID NO: 3750253 - RNA, 21 nt, Human
gaacagugauuuuuuuuuaga

SEQ ID NO: 3750254 - RNA, 21 nt, Human
gaacaguuaagcagccgccac

SEQ ID NO: 3750255 - RNA, 22 nt, Human
gaacaguuguguuugaagcaca

SEQ ID NO: 3750256 - RNA, 23 nt, Human
gaacaguuuaugcagugcugcuu

SEQ ID NO: 3750257 - RNA, 14 nt, Human
gaacaguuuguaca

SEQ ID NO: 3750258 - RNA, 18 nt, Human
gaacauaaaaaggacauc

SEQ ID NO: 3750259 - RNA, 22 nt, Human
gaacauaaagcaaauagacaca

SEQ ID NO: 3750260 - RNA, 21 nt, Human
gaacauaaagguaaaacaaaa

SEQ ID NO: 3750261 - RNA, 13 nt, Human
gaacauacaaaug

SEQ ID NO: 3750262 - RNA, 22 nt, Human
gaacauacuguucacucacucu

SEQ ID NO: 3750263 - RNA, 12 nt, Human
gaacauauuguu

SEQ ID NO: 3750264 - RNA, 12 nt, Human
gaacauccaagg

SEQ ID NO: 3750265 - RNA, 20 nt, Human
gaacauccaaggagaaacag

SEQ ID NO: 3750266 - RNA, 23 nt, Human
gaacauccuuugcagggcagccc

SEQ ID NO: 3750267 - RNA, 22 nt, Human
gaacaucgcgaugggaaccgau

SEQ ID NO: 3750268 - RNA, 17 nt, Human
gaacaucugaguccugg

SEQ ID NO: 3750269 - RNA, 15 nt, Human
gaacaugaaucaaaa

SEQ ID NO: 3750270 - RNA, 15 nt, Human
gaacaugcaguuuga

SEQ ID NO: 3750271 - RNA, 18 nt, Human
gaacaugcaguuugaaau

SEQ ID NO: 3750272 - RNA, 19 nt, Human
gaacaugcaguuugaaauu

SEQ ID NO: 3750273 - RNA, 15 nt, Human
gaacauggggaggag

SEQ ID NO: 3750274 - RNA, 20 nt, Human
gaacauguagaaaacaaaau

SEQ ID NO: 3750275 - RNA, 17 nt, Human
gaacauguugguauuua

SEQ ID NO: 3750276 - RNA, 20 nt, Human
gaacauguugguauuuaucu

SEQ ID NO: 3750277 - RNA, 21 nt, Human
gaacauugcauauaacuuaua

SEQ ID NO: 3750278 - RNA, 23 nt, Human
gaacauugcauauaacuuauauu

SEQ ID NO: 3750279 - RNA, 22 nt, Human
gaacauuggaauguucucagau

SEQ ID NO: 3750280 - RNA, 16 nt, Human
gaacauuuauuuuaug

SEQ ID NO: 3750281 - RNA, 18 nt, Human
gaacauuuauuuuaugag

SEQ ID NO: 3750282 - RNA, 19 nt, Human
gaacauuuauuuuaugaga

SEQ ID NO: 3750283 - RNA, 13 nt, Human
gaacauuugugau

SEQ ID NO: 3750284 - RNA, 20 nt, Human
gaaccaaaacauuccguuua

SEQ ID NO: 3750285 - RNA, 21 nt, Human
gaaccaaagagacuggagcau

SEQ ID NO: 3750286 - RNA, 20 nt, Human
gaaccaaagcgaauuuuaaa

SEQ ID NO: 3750287 - RNA, 19 nt, Human
gaaccaacaaguaaauauu

SEQ ID NO: 3750288 - RNA, 23 nt, Human
gaaccaaguggaccuugagacca

SEQ ID NO: 3750289 - RNA, 19 nt, Human
gaaccaauaaaauaauuuu

SEQ ID NO: 3750290 - RNA, 23 nt, Human
gaaccaccacacccagcccacuu

SEQ ID NO: 3750291 - RNA, 21 nt, Human
gaaccacgcgggggccuugag

SEQ ID NO: 3750292 - RNA, 19 nt, Human
gaaccacuacaugcagccc

SEQ ID NO: 3750293 - RNA, 11 nt, Human
gaaccagacuc

SEQ ID NO: 3750294 - RNA, 12 nt, Human
gaaccagagcca

SEQ ID NO: 3750295 - RNA, 19 nt, Human
gaaccagagccauggacuc

SEQ ID NO: 3750296 - RNA, 17 nt, Human
gaaccagccggggccuu

SEQ ID NO: 3750297 - RNA, 15 nt, Human
gaaccaggcuuggaa

SEQ ID NO: 3750298 - RNA, 18 nt, Human
gaaccagggagaccgagc

SEQ ID NO: 3750299 - RNA, 13 nt, Human
gaaccauaaauuc

SEQ ID NO: 3750300 - RNA, 23 nt, Human
gaaccauaguuacuguaaaaugc

SEQ ID NO: 3750301 - RNA, 22 nt, Human
gaaccauaguugacaguuccaa

SEQ ID NO: 3750302 - RNA, 18 nt, Human
gaaccaugaagacaggau

SEQ ID NO: 3750303 - RNA, 13 nt, Human
gaacccacacugc

SEQ ID NO: 3750304 - RNA, 12 nt, Human
gaacccaccugc

SEQ ID NO: 3750305 - RNA, 13 nt, Human
gaacccagacuca

SEQ ID NO: 3750306 - RNA, 17 nt, Human
gaacccagacucagaca

SEQ ID NO: 3750307 - RNA, 19 nt, Human
gaacccagcaguucuguua

SEQ ID NO: 3750308 - RNA, 15 nt, Human
gaacccaggacgcuu

SEQ ID NO: 3750309 - RNA, 14 nt, Human
gaacccaggaggca

SEQ ID NO: 3750310 - RNA, 14 nt, Human
gaacccagggcucu

SEQ ID NO: 3750311 - RNA, 21 nt, Human
gaacccagggcucugccccag

SEQ ID NO: 3750312 - RNA, 23 nt, Human
gaacccauuccauuuaucuuucu

SEQ ID NO: 3750313 - RNA, 18 nt, Human
gaaccccuggcuccaggc

SEQ ID NO: 3750314 - RNA, 17 nt, Human
gaaccccuucauccucu

SEQ ID NO: 3750315 - RNA, 19 nt, Human
gaacccgggaggcagaggu

SEQ ID NO: 3750316 - RNA, 22 nt, Human
gaacccugccauggaacuguuu

SEQ ID NO: 3750317 - RNA, 16 nt, Human
gaacccuggggccuga

SEQ ID NO: 3750318 - RNA, 17 nt, Human
gaacccuggggccugac

SEQ ID NO: 3750319 - RNA, 13 nt, Human
gaacccuuuauuu

SEQ ID NO: 3750320 - RNA, 20 nt, Human
gaacccuuuguuucuuguuu

SEQ ID NO: 3750321 - RNA, 23 nt, Human
gaacccuuuguuucuuguuuauu

SEQ ID NO: 3750322 - RNA, 15 nt, Human
gaaccgcacagcuca

SEQ ID NO: 3750323 - RNA, 21 nt, Human
gaaccgcagaagccuccccag

SEQ ID NO: 3750324 - RNA, 16 nt, Human
gaaccgcaggaagcug

SEQ ID NO: 3750325 - RNA, 20 nt, Human
gaaccgcaggaagcugcucc

SEQ ID NO: 3750326 - RNA, 16 nt, Human
gaaccgcucaccuaga

SEQ ID NO: 3750327 - RNA, 22 nt, Human
gggcuacccugagcugaggcag

SEQ ID NO: 3750328 - RNA, 14 nt, Human
gggcuagaaccugg

SEQ ID NO: 3750329 - RNA, 15 nt, Human
gggcuagaaccugga

SEQ ID NO: 3750330 - RNA, 17 nt, Human
gggcuagaaccuggaga

SEQ ID NO: 3750331 - RNA, 21 nt, Human
gggcuauuuuguuugcuucau

SEQ ID NO: 3750332 - RNA, 21 nt, Human
gggcucaaucucugggggcug

SEQ ID NO: 3750333 - RNA, 22 nt, Human
gggcucagcaaaagaugcuucu

SEQ ID NO: 3750334 - RNA, 16 nt, Human
gggcucagcaaggcca

SEQ ID NO: 3750335 - RNA, 19 nt, Human
gggcucagcaaggccaccu

SEQ ID NO: 3750336 - RNA, 18 nt, Human
gggcucaguucuggacug

SEQ ID NO: 3750337 - RNA, 10 nt, Human
gggcuccaga

SEQ ID NO: 3750338 - RNA, 23 nt, Human
gggcuccagccccucuuggagaa

SEQ ID NO: 3750339 - RNA, 19 nt, Human
gggcucccagccaggcccu

SEQ ID NO: 3750340 - RNA, 13 nt, Human
gggcucccagggc

SEQ ID NO: 3750341 - RNA, 23 nt, Human
gggcucccaggggucucccuggc

SEQ ID NO: 3750342 - RNA, 12 nt, Human
gggcuccccucu

SEQ ID NO: 3750343 - RNA, 14 nt, Human
gggcucccuuccca

SEQ ID NO: 3750344 - RNA, 18 nt, Human
gggcuccgugugggagac

SEQ ID NO: 3750345 - RNA, 23 nt, Human
gggcuccuccaggguggcagcaa

SEQ ID NO: 3750346 - RNA, 11 nt, Human
gggcuccugca

SEQ ID NO: 3750347 - RNA, 14 nt, Human
gggcuccugcaggc

SEQ ID NO: 3750348 - RNA, 17 nt, Human
gggcuccugccuucugu

SEQ ID NO: 3750349 - RNA, 11 nt, Human
gggcuccugga

SEQ ID NO: 3750350 - RNA, 21 nt, Human
gggcuccuggggguggggagg

SEQ ID NO: 3750351 - RNA, 18 nt, Human
gggcuccuugugggccug

SEQ ID NO: 3750352 - RNA, 22 nt, Human
gggcuccuugugggccugggcu

SEQ ID NO: 3750353 - RNA, 23 nt, Human
gggcuccuugugggccugggcuc

SEQ ID NO: 3750354 - RNA, 22 nt, Human
gggcuccuuucuccagccagca

SEQ ID NO: 3750355 - RNA, 14 nt, Human
gggcucgccaugcc

SEQ ID NO: 3750356 - RNA, 14 nt, Human
gggcucgucuuugc

SEQ ID NO: 3750357 - RNA, 17 nt, Human
gggcucgucuuugcaga

SEQ ID NO: 3750358 - RNA, 23 nt, Human
gggcucucauguuuucaacugcc

SEQ ID NO: 3750359 - RNA, 14 nt, Human
gggcucuccaccuc

SEQ ID NO: 3750360 - RNA, 19 nt, Human
gggcucuccaccucagccu

SEQ ID NO: 3750361 - RNA, 12 nt, Human
gggcucuccugg

SEQ ID NO: 3750362 - RNA, 11 nt, Human
gggcucugagg

SEQ ID NO: 3750363 - RNA, 10 nt, Human
gggcucugau

SEQ ID NO: 3750364 - RNA, 21 nt, Human
gggcucugcaauuccccucug

SEQ ID NO: 3750365 - RNA, 19 nt, Human
gggcucugccccagcucug

SEQ ID NO: 3750366 - RNA, 16 nt, Human
gggcucugcccucccu

SEQ ID NO: 3750367 - RNA, 22 nt, Human
gggcucugcccucccuccuucc

SEQ ID NO: 3750368 - RNA, 13 nt, Human
gggcucugccucc

SEQ ID NO: 3750369 - RNA, 17 nt, Human
gggcucugccucccauc

SEQ ID NO: 3750370 - RNA, 13 nt, Human
gggcucuggagag

SEQ ID NO: 3750371 - RNA, 15 nt, Human
gggcugaauguaugu

SEQ ID NO: 3750372 - RNA, 20 nt, Human
gggcugacuagaagggccag

SEQ ID NO: 3750373 - RNA, 15 nt, Human
gggcugagccugguc

SEQ ID NO: 3750374 - RNA, 14 nt, Human
gggcugagggccug

SEQ ID NO: 3750375 - RNA, 12 nt, Human
gggcugaggggc

SEQ ID NO: 3750376 - RNA, 16 nt, Human
gggcugaggugggagg

SEQ ID NO: 3750377 - RNA, 18 nt, Human
gggcugaucucagggaag

SEQ ID NO: 3750378 - RNA, 21 nt, Human
gggcugcaccggcuggccugg

SEQ ID NO: 3750379 - RNA, 22 nt, Human
gggcugcaccggcuggccuggc

SEQ ID NO: 3750380 - RNA, 16 nt, Human
gggcugcacucugugc

SEQ ID NO: 3750381 - RNA, 15 nt, Human
gggcugcagagugcc

SEQ ID NO: 3750382 - RNA, 11 nt, Human
gggcugcagca

SEQ ID NO: 3750383 - RNA, 22 nt, Human
gggcugcagcauguugcugagg

SEQ ID NO: 3750384 - RNA, 20 nt, Human
gggcugcaugauguuugccc

SEQ ID NO: 3750385 - RNA, 21 nt, Human
gggcugcaugcgggcuuccuc

SEQ ID NO: 3750386 - RNA, 18 nt, Human
gggcugcccgcucccagu

SEQ ID NO: 3750387 - RNA, 22 nt, Human
gggcugcccgcucccagugucu

SEQ ID NO: 3750388 - RNA, 13 nt, Human
gggcugcccugag

SEQ ID NO: 3750389 - RNA, 14 nt, Human
gggcugcccugaga

SEQ ID NO: 3750390 - RNA, 16 nt, Human
gggcugcccugagaag

SEQ ID NO: 3750391 - RNA, 12 nt, Human
gggcugccuggg

SEQ ID NO: 3750392 - RNA, 17 nt, Human
gggcugccuucuggccu

SEQ ID NO: 3750393 - RNA, 18 nt, Human
gggcugcucccaccuggc

SEQ ID NO: 3750394 - RNA, 17 nt, Human
gggcugcugaccuccac

SEQ ID NO: 3750395 - RNA, 17 nt, Human
gggcugcugcugggcuc

SEQ ID NO: 3750396 - RNA, 12 nt, Human
gggcugcuguga

SEQ ID NO: 3750397 - RNA, 19 nt, Human
gggcuggacugaggccuga

SEQ ID NO: 3750398 - RNA, 14 nt, Human
gggcuggaggagcc

SEQ ID NO: 3750399 - RNA, 15 nt, Human
gggcuggaggagccc

SEQ ID NO: 3750400 - RNA, 17 nt, Human
gggcuggaggagcccag

SEQ ID NO: 3750401 - RNA, 15 nt, Human
gggcuggaggcccag

SEQ ID NO: 3750402 - RNA, 13 nt, Human
gggcuggcccagc

SEQ ID NO: 3750403 - RNA, 19 nt, Human
gggcuggcccagcccugcu

SEQ ID NO: 3750404 - RNA, 12 nt, Human
gggcuggcuuca

SEQ ID NO: 3750405 - RNA, 20 nt, Human
gggcuggcuuuucuguuucc

SEQ ID NO: 3750406 - RNA, 21 nt, Human
gggcugggaaacacuccuugc

SEQ ID NO: 3750407 - RNA, 16 nt, Human
gggcugggcacugcuc

SEQ ID NO: 3750408 - RNA, 14 nt, Human
gggcugggcagcua

SEQ ID NO: 3750409 - RNA, 22 nt, Human
gggcugggcccacccaagcagg

SEQ ID NO: 3750410 - RNA, 22 nt, Human
gggcugggccucggaccccacu

SEQ ID NO: 3750411 - RNA, 11 nt, Human
gggcuggggca

SEQ ID NO: 3750412 - RNA, 17 nt, Human
gggcuggguucuaccca

SEQ ID NO: 3750413 - RNA, 16 nt, Human
gggcuggguuggcgca

SEQ ID NO: 3750414 - RNA, 21 nt, Human
gggcuggguuggcgcacccuc

SEQ ID NO: 3750415 - RNA, 18 nt, Human
gggcugguagcucaggug

SEQ ID NO: 3750416 - RNA, 21 nt, Human
gggcuggugacccagucagag

SEQ ID NO: 3750417 - RNA, 19 nt, Human
gggcuguaacguggcacug

SEQ ID NO: 3750418 - RNA, 16 nt, Human
gggcugucggcgcugc

SEQ ID NO: 3750419 - RNA, 23 nt, Human
gggcugugcuugaaggcccugcu

SEQ ID NO: 3750420 - RNA, 21 nt, Human
gggcuguugaagucaccuugu

SEQ ID NO: 3750421 - RNA, 22 nt, Human
gggcuguuuaggggaucuggaa

SEQ ID NO: 3750422 - RNA, 22 nt, Human
gggcuuaccuguacacugacuu

SEQ ID NO: 3750423 - RNA, 16 nt, Human
gggcuuacggcccugg

SEQ ID NO: 3750424 - RNA, 18 nt, Human
gggcuuacggcccuggcc

SEQ ID NO: 3750425 - RNA, 19 nt, Human
gggcuuauaucuggccucu

SEQ ID NO: 3750426 - RNA, 21 nt, Human
gggcuucaaccuugagacagc

SEQ ID NO: 3750427 - RNA, 16 nt, Human
gggcuucacuguauaa

SEQ ID NO: 3750428 - RNA, 14 nt, Human
gggcuucagggcag

SEQ ID NO: 3750429 - RNA, 19 nt, Human
gggcuucagggcagguggg

SEQ ID NO: 3750430 - RNA, 17 nt, Human
gggcuucaguggcagcu

SEQ ID NO: 3750431 - RNA, 21 nt, Human
gggcuucaguggcagcugcuu

SEQ ID NO: 3750432 - RNA, 19 nt, Human
gggcuucauccuccucaga

SEQ ID NO: 3750433 - RNA, 20 nt, Human
gggcuucccaguggcugcug

SEQ ID NO: 3750434 - RNA, 23 nt, Human
gggcuucccaguggcugcugccc

SEQ ID NO: 3750435 - RNA, 13 nt, Human
gggcuuccuggag

SEQ ID NO: 3750436 - RNA, 13 nt, Human
gggcuugaagcca

SEQ ID NO: 3750437 - RNA, 17 nt, Human
gggcuugaagccaaaga

SEQ ID NO: 3750438 - RNA, 13 nt, Human
gggcuugccuucu

SEQ ID NO: 3750439 - RNA, 21 nt, Human
gggcuugcuauucugucccua

SEQ ID NO: 3750440 - RNA, 14 nt, Human
gggcuuggcgugga

SEQ ID NO: 3750441 - RNA, 20 nt, Human
gggcuuggcguggagcaggc

SEQ ID NO: 3750442 - RNA, 22 nt, Human
gggcuuggggaccagagcugcc

SEQ ID NO: 3750443 - RNA, 17 nt, Human
gggcuugucauagccag

SEQ ID NO: 3750444 - RNA, 18 nt, Human
gggcuuguggggccuggg

SEQ ID NO: 3750445 - RNA, 19 nt, Human
gggcuuucguccacagcuu

SEQ ID NO: 3750446 - RNA, 14 nt, Human
gggcuuucuggaga

SEQ ID NO: 3750447 - RNA, 15 nt, Human
gggcuuucuggagag

SEQ ID NO: 3750448 - RNA, 20 nt, Human
gggcuuugugugaaggcaga

SEQ ID NO: 3750449 - RNA, 17 nt, Human
ggggaaaaucagccugc

SEQ ID NO: 3750450 - RNA, 23 nt, Human
ggggaaagacacugccugggcug

SEQ ID NO: 3750451 - RNA, 18 nt, Human
ggggaaagcaaagcacag

SEQ ID NO: 3750452 - RNA, 21 nt, Human
ggggaaagcaaagcacagaga

SEQ ID NO: 3750453 - RNA, 17 nt, Human
ggggaaaggcaaggucc

SEQ ID NO: 3750454 - RNA, 22 nt, Human
ggggaaaggcaagguccggccc

SEQ ID NO: 3750455 - RNA, 21 nt, Human
ggggaaccugccaugccagga

SEQ ID NO: 3750456 - RNA, 14 nt, Human
ggggaagagcacag

SEQ ID NO: 3750457 - RNA, 16 nt, Human
ggggaagaguguacug

SEQ ID NO: 3750458 - RNA, 13 nt, Human
ggggaagcccugg

SEQ ID NO: 3750459 - RNA, 14 nt, Human
ggggaagcccugga

SEQ ID NO: 3750460 - RNA, 15 nt, Human
ggggaaggagccagu

SEQ ID NO: 3750461 - RNA, 21 nt, Human
ggggaaggaggguacagcugg

SEQ ID NO: 3750462 - RNA, 22 nt, Human
ggggaaggaggguacagcuggg

SEQ ID NO: 3750463 - RNA, 13 nt, Human
ggggaagggccag

SEQ ID NO: 3750464 - RNA, 23 nt, Human
ggggaagggccagucugggcugc

SEQ ID NO: 3750465 - RNA, 16 nt, Human
ggggaaguccucuggg

SEQ ID NO: 3750466 - RNA, 12 nt, Human
ggggaaucuaag

SEQ ID NO: 3750467 - RNA, 23 nt, Human
ggggaaugagcccagagaacagc

SEQ ID NO: 3750468 - RNA, 12 nt, Human
ggggaaugaggg

SEQ ID NO: 3750469 - RNA, 20 nt, Human
ggggacaaccuuggcuuggc

SEQ ID NO: 3750470 - RNA, 17 nt, Human
ggggacacauguauuug

SEQ ID NO: 3750471 - RNA, 19 nt, Human
ggggacacauguauuuggu

SEQ ID NO: 3750472 - RNA, 20 nt, Human
ggggacagcuccuucugucc

SEQ ID NO: 3750473 - RNA, 15 nt, Human
ggggacagggcuggc

SEQ ID NO: 3750474 - RNA, 15 nt, Human
ggggacagguccuca

SEQ ID NO: 3750475 - RNA, 15 nt, Human
ggggaccagcuuggc

SEQ ID NO: 3750476 - RNA, 15 nt, Human
ggggacccagugcag

SEQ ID NO: 3750477 - RNA, 22 nt, Human
ggccugcugggcucuccaccuc

SEQ ID NO: 3750478 - RNA, 10 nt, Human
ggccugcugu

SEQ ID NO: 3750479 - RNA, 17 nt, Human
ggccugcuuccugucuu

SEQ ID NO: 3750480 - RNA, 13 nt, Human
ggccuggaccugc

SEQ ID NO: 3750481 - RNA, 21 nt, Human
ggccuggacuuuccugcaacu

SEQ ID NO: 3750482 - RNA, 19 nt, Human
ggccuggagcaggccuugc

SEQ ID NO: 3750483 - RNA, 20 nt, Human
ggccuggaugcccccugugg

SEQ ID NO: 3750484 - RNA, 20 nt, Human
ggccuggauucauuuccugc

SEQ ID NO: 3750485 - RNA, 22 nt, Human
ggccuggauucauuuccugccc

SEQ ID NO: 3750486 - RNA, 12 nt, Human
ggccuggcacag

SEQ ID NO: 3750487 - RNA, 14 nt, Human
ggccuggcagccgu

SEQ ID NO: 3750488 - RNA, 15 nt, Human
ggccuggcagggagg

SEQ ID NO: 3750489 - RNA, 15 nt, Human
ggccuggcauucuug

SEQ ID NO: 3750490 - RNA, 14 nt, Human
ggccuggccaggag

SEQ ID NO: 3750491 - RNA, 15 nt, Human
ggccuggccaggagc

SEQ ID NO: 3750492 - RNA, 18 nt, Human
ggccuggccaggagcucu

SEQ ID NO: 3750493 - RNA, 22 nt, Human
ggccuggccagggccuggaaga

SEQ ID NO: 3750494 - RNA, 14 nt, Human
ggccuggccagugc

SEQ ID NO: 3750495 - RNA, 13 nt, Human
ggccuggccccuc

SEQ ID NO: 3750496 - RNA, 14 nt, Human
ggccuggccccuca

SEQ ID NO: 3750497 - RNA, 17 nt, Human
ggccuggccccucaggg

SEQ ID NO: 3750498 - RNA, 21 nt, Human
ggccuggccggcaaccccagu

SEQ ID NO: 3750499 - RNA, 14 nt, Human
ggccuggccugagc

SEQ ID NO: 3750500 - RNA, 16 nt, Human
ggccuggccuggcccu

SEQ ID NO: 3750501 - RNA, 17 nt, Human
ggccuggccuggcccug

SEQ ID NO: 3750502 - RNA, 23 nt, Human
ggccuggcucccucacucucagg

SEQ ID NO: 3750503 - RNA, 18 nt, Human
ggccuggcuccgcugugu

SEQ ID NO: 3750504 - RNA, 12 nt, Human
ggccuggcuccu

SEQ ID NO: 3750505 - RNA, 14 nt, Human
ggccuggcuggcug

SEQ ID NO: 3750506 - RNA, 14 nt, Human
ggccuggcuugucu

SEQ ID NO: 3750507 - RNA, 15 nt, Human
ggccugggcaggagg

SEQ ID NO: 3750508 - RNA, 17 nt, Human
ggccugggcaggaggga

SEQ ID NO: 3750509 - RNA, 15 nt, Human
ggccugggccuggcu

SEQ ID NO: 3750510 - RNA, 17 nt, Human
ggccugggccuggcucc

SEQ ID NO: 3750511 - RNA, 17 nt, Human
ggccugggcuccuggac

SEQ ID NO: 3750512 - RNA, 16 nt, Human
ggccuggggccugaga

SEQ ID NO: 3750513 - RNA, 14 nt, Human
ggccuggggcuccu

SEQ ID NO: 3750514 - RNA, 14 nt, Human
ggccugggggcugg

SEQ ID NO: 3750515 - RNA, 15 nt, Human
ggccuggggugaccc

SEQ ID NO: 3750516 - RNA, 19 nt, Human
ggccuggggugacccggca

SEQ ID NO: 3750517 - RNA, 16 nt, Human
ggccuguacagucugu

SEQ ID NO: 3750518 - RNA, 17 nt, Human
ggccuguacugccugcu

SEQ ID NO: 3750519 - RNA, 20 nt, Human
ggccugucagcuaaagaagu

SEQ ID NO: 3750520 - RNA, 14 nt, Human
ggccuguccuccaa

SEQ ID NO: 3750521 - RNA, 17 nt, Human
ggccugucucaucccca

SEQ ID NO: 3750522 - RNA, 18 nt, Human
ggccugucucauccccag

SEQ ID NO: 3750523 - RNA, 16 nt, Human
ggccuguggaaugagu

SEQ ID NO: 3750524 - RNA, 18 nt, Human
ggccuguggaaugagugu

SEQ ID NO: 3750525 - RNA, 20 nt, Human
ggccuguggaucaaauccag

SEQ ID NO: 3750526 - RNA, 18 nt, Human
ggccuguggccugugucc

SEQ ID NO: 3750527 - RNA, 17 nt, Human
ggccugugggagccugc

SEQ ID NO: 3750528 - RNA, 17 nt, Human
ggccuguguagcuguga

SEQ ID NO: 3750529 - RNA, 21 nt, Human
ggccugugucccaugacccac

SEQ ID NO: 3750530 - RNA, 11 nt, Human
ggccuguugcc

SEQ ID NO: 3750531 - RNA, 21 nt, Human
ggccuguugcuauagagccua

SEQ ID NO: 3750532 - RNA, 12 nt, Human
ggccuuaagcuu

SEQ ID NO: 3750533 - RNA, 14 nt, Human
ggccuuaccccugc

SEQ ID NO: 3750534 - RNA, 19 nt, Human
ggccuuacuuaaacccagc

SEQ ID NO: 3750535 - RNA, 15 nt, Human
ggccuuaggaagagc

SEQ ID NO: 3750536 - RNA, 20 nt, Human
ggccuuagggcacugggcug

SEQ ID NO: 3750537 - RNA, 21 nt, Human
ggccuuaucgggcuccagcca

SEQ ID NO: 3750538 - RNA, 22 nt, Human
ggccuuaucgggcuccagccau

SEQ ID NO: 3750539 - RNA, 12 nt, Human
ggccuucacaau

SEQ ID NO: 3750540 - RNA, 14 nt, Human
ggccuuccagcugc

SEQ ID NO: 3750541 - RNA, 17 nt, Human
ggccuuccagcugcugu

SEQ ID NO: 3750542 - RNA, 15 nt, Human
ggccuuccccagccu

SEQ ID NO: 3750543 - RNA, 16 nt, Human
ggccuucggccuccau

SEQ ID NO: 3750544 - RNA, 22 nt, Human
ggccuucuuucuagagagggaa

SEQ ID NO: 3750545 - RNA, 22 nt, Human
ggccuugcgguauccgccccca

SEQ ID NO: 3750546 - RNA, 16 nt, Human
ggccuuggccuggagc

SEQ ID NO: 3750547 - RNA, 12 nt, Human
ggccuugggcuc

SEQ ID NO: 3750548 - RNA, 12 nt, Human
ggccuuguccca

SEQ ID NO: 3750549 - RNA, 13 nt, Human
ggccuuucccacu

SEQ ID NO: 3750550 - RNA, 16 nt, Human
ggccuuugagcucaga

SEQ ID NO: 3750551 - RNA, 23 nt, Human
ggccuuugcgcuccuggcccagc

SEQ ID NO: 3750552 - RNA, 14 nt, Human
ggccuuuggcuuca

SEQ ID NO: 3750553 - RNA, 17 nt, Human
ggccuuuguucuggggg

SEQ ID NO: 3750554 - RNA, 16 nt, Human
ggcgaagcccaggccc

SEQ ID NO: 3750555 - RNA, 22 nt, Human
ggcgaagcguuguccucagccc

SEQ ID NO: 3750556 - RNA, 17 nt, Human
ggcgaaucucaaaauua

SEQ ID NO: 3750557 - RNA, 23 nt, Human
ggcgacagagcgagagucugucu

SEQ ID NO: 3750558 - RNA, 20 nt, Human
ggcgaccccgucacagccuc

SEQ ID NO: 3750559 - RNA, 22 nt, Human
ggcgagaccugauuucuccugc

SEQ ID NO: 3750560 - RNA, 15 nt, Human
ggcgagagaggagcc

SEQ ID NO: 3750561 - RNA, 21 nt, Human
ggcgagccauuugucccaagu

SEQ ID NO: 3750562 - RNA, 21 nt, Human
ggcgagcccuguggaugagcc

SEQ ID NO: 3750563 - RNA, 12 nt, Human
ggcgaggcagag

SEQ ID NO: 3750564 - RNA, 17 nt, Human
ggcgaugccagccaagc

SEQ ID NO: 3750565 - RNA, 18 nt, Human
ggcgaugccagccaagcu

SEQ ID NO: 3750566 - RNA, 14 nt, Human
ggcgcacugccucu

SEQ ID NO: 3750567 - RNA, 16 nt, Human
ggcgcacugccucuca

SEQ ID NO: 3750568 - RNA, 14 nt, Human
ggcgcagccaaggc

SEQ ID NO: 3750569 - RNA, 15 nt, Human
ggcgcagccaaggcc

SEQ ID NO: 3750570 - RNA, 11 nt, Human
ggcgcaggagg

SEQ ID NO: 3750571 - RNA, 14 nt, Human
ggcgcaggugggcu

SEQ ID NO: 3750572 - RNA, 15 nt, Human
ggcgcaggugggcug

SEQ ID NO: 3750573 - RNA, 20 nt, Human
ggcgcaggugggcuggacuu

SEQ ID NO: 3750574 - RNA, 16 nt, Human
ggcgccaccagcucug

SEQ ID NO: 3750575 - RNA, 12 nt, Human
ggcgcccaccuc

SEQ ID NO: 3750576 - RNA, 16 nt, Human
ggcgccccaacccgug

SEQ ID NO: 3750577 - RNA, 14 nt, Human
ggcgcccccagugu

SEQ ID NO: 3750578 - RNA, 13 nt, Human
ggcgccccugcca

SEQ ID NO: 3750579 - RNA, 19 nt, Human
ggcgccgcaaaccacacug

SEQ ID NO: 3750580 - RNA, 16 nt, Human
ggcgccgugcugggca

SEQ ID NO: 3750581 - RNA, 20 nt, Human
ggcgccgugcugggcagccc

SEQ ID NO: 3750582 - RNA, 15 nt, Human
ggcgccugugguucu

SEQ ID NO: 3750583 - RNA, 22 nt, Human
ggcgcgaucucggcucacugca

SEQ ID NO: 3750584 - RNA, 14 nt, Human
ggcgcggccagccc

SEQ ID NO: 3750585 - RNA, 16 nt, Human
ggcgcggcugggagga

SEQ ID NO: 3750586 - RNA, 14 nt, Human
ggcgcgugaggccc

SEQ ID NO: 3750587 - RNA, 12 nt, Human
ggcgcuaacuug

SEQ ID NO: 3750588 - RNA, 23 nt, Human
ggcgcuaacuugcuuaaauguga

SEQ ID NO: 3750589 - RNA, 23 nt, Human
ggcgcugccccuggcagccccug

SEQ ID NO: 3750590 - RNA, 11 nt, Human
ggcgcuggccc

SEQ ID NO: 3750591 - RNA, 13 nt, Human
ggcgcuggcccag

SEQ ID NO: 3750592 - RNA, 15 nt, Human
ggcgcuggcccagcc

SEQ ID NO: 3750593 - RNA, 18 nt, Human
ggcgcuggcccagccggc

SEQ ID NO: 3750594 - RNA, 19 nt, Human
ggcgcuggcccagccggcc

SEQ ID NO: 3750595 - RNA, 20 nt, Human
ggcgcuggcccagccggccu

SEQ ID NO: 3750596 - RNA, 20 nt, Human
ggcggacaccuggcccccga

SEQ ID NO: 3750597 - RNA, 15 nt, Human
ggcggacguuccagc

SEQ ID NO: 3750598 - RNA, 16 nt, Human
ggcggacguuccagcc

SEQ ID NO: 3750599 - RNA, 21 nt, Human
ggcggagaguacagugagcca

SEQ ID NO: 3750600 - RNA, 23 nt, Human
ggcggagcuggccccgccgccug

SEQ ID NO: 3750601 - RNA, 20 nt, Human
ggcggaucaucuaauucucu

SEQ ID NO: 3750602 - RNA, 20 nt, Human
ggcggauguugaagugagcu

SEQ ID NO: 3750603 - RNA, 20 nt, Human
ggcggcacaggucgggcgca

SEQ ID NO: 3750604 - RNA, 14 nt, Human
ggcggcagcagcca

SEQ ID NO: 3750605 - RNA, 16 nt, Human
ggcggcagcagccauc

SEQ ID NO: 3750606 - RNA, 17 nt, Human
ggcggcaggggccugga

SEQ ID NO: 3750607 - RNA, 18 nt, Human
ggcggcaggggccuggag

SEQ ID NO: 3750608 - RNA, 17 nt, Human
ggcggccaugauggugc

SEQ ID NO: 3750609 - RNA, 13 nt, Human
ggcggccccagca

SEQ ID NO: 3750610 - RNA, 22 nt, Human
ggcggccuaugacuugggcacc

SEQ ID NO: 3750611 - RNA, 19 nt, Human
ggcggcuggggucccagca

SEQ ID NO: 3750612 - RNA, 16 nt, Human
ggcgggaugggccacc

SEQ ID NO: 3750613 - RNA, 18 nt, Human
ggcgggcagagggcugga

SEQ ID NO: 3750614 - RNA, 12 nt, Human
ggcgggccagcc

SEQ ID NO: 3750615 - RNA, 14 nt, Human
ggcgggccagccag

SEQ ID NO: 3750616 - RNA, 19 nt, Human
ggcggggguggcggcggcc

SEQ ID NO: 3750617 - RNA, 15 nt, Human
ggcggucccagcucc

SEQ ID NO: 3750618 - RNA, 20 nt, Human
ggcggucuucaacauccugc

SEQ ID NO: 3750619 - RNA, 21 nt, Human
ggcggugggcacccacccugg

SEQ ID NO: 3750620 - RNA, 16 nt, Human
ggcguaaguacagaga

SEQ ID NO: 3750621 - RNA, 17 nt, Human
ggcguacgcuggugcug

SEQ ID NO: 3750622 - RNA, 15 nt, Human
ggcguaggcuacaga

SEQ ID NO: 3750623 - RNA, 19 nt, Human
ggcguaggcuacagagaag

SEQ ID NO: 3750624 - RNA, 20 nt, Human
ggcguaggcuacagagaagc

SEQ ID NO: 3750625 - RNA, 21 nt, Human
ggcguaggcuacagagaagcc

SEQ ID NO: 3750626 - RNA, 18 nt, Human
ggcgucagccuccagccu

SEQ ID NO: 3750627 - RNA, 16 nt, Human
ggcgucuguauauuuu

SEQ ID NO: 3750628 - RNA, 16 nt, Human
gaaccggagagccagc

SEQ ID NO: 3750629 - RNA, 17 nt, Human
gaaccggagagccagcu

SEQ ID NO: 3750630 - RNA, 15 nt, Human
gaaccguaggaccca

SEQ ID NO: 3750631 - RNA, 17 nt, Human
gaaccguuuugaagcua

SEQ ID NO: 3750632 - RNA, 16 nt, Human
gaaccuaacuguaucu

SEQ ID NO: 3750633 - RNA, 20 nt, Human
gaaccuaacuguaucuugag

SEQ ID NO: 3750634 - RNA, 14 nt, Human
gaaccuagaagggc

SEQ ID NO: 3750635 - RNA, 15 nt, Human
gaaccuaugaagcaa

SEQ ID NO: 3750636 - RNA, 16 nt, Human
gaaccuauuucucuuu

SEQ ID NO: 3750637 - RNA, 21 nt, Human
gaaccucaccccgaggcccug

SEQ ID NO: 3750638 - RNA, 11 nt, Human
gaaccucaccu

SEQ ID NO: 3750639 - RNA, 17 nt, Human
gaaccucacucuugcca

SEQ ID NO: 3750640 - RNA, 18 nt, Human
gaaccucacucuugccaa

SEQ ID NO: 3750641 - RNA, 19 nt, Human
gaaccucacucuugccaac

SEQ ID NO: 3750642 - RNA, 22 nt, Human
gaaccucccagagguccagccc

SEQ ID NO: 3750643 - RNA, 15 nt, Human
gaaccuccccagccu

SEQ ID NO: 3750644 - RNA, 17 nt, Human
gaaccuccccagccugc

SEQ ID NO: 3750645 - RNA, 18 nt, Human
gaaccuccccagccugcg

SEQ ID NO: 3750646 - RNA, 15 nt, Human
gaaccuccucuguga

SEQ ID NO: 3750647 - RNA, 15 nt, Human
gaaccucgaguacug

SEQ ID NO: 3750648 - RNA, 14 nt, Human
gaaccucugauuua

SEQ ID NO: 3750649 - RNA, 18 nt, Human
gaaccucugucucauccu

SEQ ID NO: 3750650 - RNA, 17 nt, Human
gaaccucuuccccagaa

SEQ ID NO: 3750651 - RNA, 16 nt, Human
gaaccugaugaaaaua

SEQ ID NO: 3750652 - RNA, 20 nt, Human
gaaccuggaacuuggggagu

SEQ ID NO: 3750653 - RNA, 15 nt, Human
gaaccuggaguuccu

SEQ ID NO: 3750654 - RNA, 11 nt, Human
gaaccuggccu

SEQ ID NO: 3750655 - RNA, 13 nt, Human
gaaccuggccuuc

SEQ ID NO: 3750656 - RNA, 15 nt, Human
gaaccuguagagcua

SEQ ID NO: 3750657 - RNA, 21 nt, Human
gaaccuucuggccucccacag

SEQ ID NO: 3750658 - RNA, 16 nt, Human
gaaccuugugccuggc

SEQ ID NO: 3750659 - RNA, 18 nt, Human
gaaccuuguuauuucuca

SEQ ID NO: 3750660 - RNA, 18 nt, Human
gaaccuuuugagugccuu

SEQ ID NO: 3750661 - RNA, 19 nt, Human
gaaccuuuugagugccuua

SEQ ID NO: 3750662 - RNA, 21 nt, Human
gaaccuuuugagugccuuaca

SEQ ID NO: 3750663 - RNA, 18 nt, Human
gaacgauccuucaaaguc

SEQ ID NO: 3750664 - RNA, 16 nt, Human
gaacgaugugucugua

SEQ ID NO: 3750665 - RNA, 18 nt, Human
gaacgauuuagaaagaag

SEQ ID NO: 3750666 - RNA, 22 nt, Human
gaacgcagcccuagagccugcc

SEQ ID NO: 3750667 - RNA, 13 nt, Human
gaacgccagggac

SEQ ID NO: 3750668 - RNA, 20 nt, Human
gaacgcguguguacacggga

SEQ ID NO: 3750669 - RNA, 19 nt, Human
gaacggaacguuggacuuu

SEQ ID NO: 3750670 - RNA, 23 nt, Human
gaacggagccccaggccucugug

SEQ ID NO: 3750671 - RNA, 15 nt, Human
gaacggggagaaaag

SEQ ID NO: 3750672 - RNA, 19 nt, Human
gaacggggcucuucucauu

SEQ ID NO: 3750673 - RNA, 17 nt, Human
gaacguggcucugcugg

SEQ ID NO: 3750674 - RNA, 23 nt, Human
gaacgugggaguucagcugcuuc

SEQ ID NO: 3750675 - RNA, 13 nt, Human
gaacguucucuuu

SEQ ID NO: 3750676 - RNA, 19 nt, Human
gaacguuuuuuccucagug

SEQ ID NO: 3750677 - RNA, 19 nt, Human
gaacuaaacuaguuuuucc

SEQ ID NO: 3750678 - RNA, 12 nt, Human
gaacuaaacuuu

SEQ ID NO: 3750679 - RNA, 17 nt, Human
gaacuaaacuuucacac

SEQ ID NO: 3750680 - RNA, 19 nt, Human
gaacuaaagguggccacaa

SEQ ID NO: 3750681 - RNA, 21 nt, Human
gaacuaaagugcugcacucaa

SEQ ID NO: 3750682 - RNA, 12 nt, Human
gaacuaaauguu

SEQ ID NO: 3750683 - RNA, 13 nt, Human
gaacuaaauguuc

SEQ ID NO: 3750684 - RNA, 15 nt, Human
gaacuaaauguucua

SEQ ID NO: 3750685 - RNA, 18 nt, Human
gaacuaacacgugaugug

SEQ ID NO: 3750686 - RNA, 17 nt, Human
gaacuaacacuauuuua

SEQ ID NO: 3750687 - RNA, 15 nt, Human
gaacuaauaaaagca

SEQ ID NO: 3750688 - RNA, 19 nt, Human
gaacuaauuucuucuccug

SEQ ID NO: 3750689 - RNA, 22 nt, Human
gaacuacaaacaaaauuucuau

SEQ ID NO: 3750690 - RNA, 17 nt, Human
gaacuagagaugugcaa

SEQ ID NO: 3750691 - RNA, 22 nt, Human
gaacuagagguuuuaugauauu

SEQ ID NO: 3750692 - RNA, 21 nt, Human
gaacuagaguuuagcuggaaa

SEQ ID NO: 3750693 - RNA, 18 nt, Human
gaacuagcauauagccau

SEQ ID NO: 3750694 - RNA, 21 nt, Human
gaacuagcauauagccauuga

SEQ ID NO: 3750695 - RNA, 23 nt, Human
gaacuagccaccaacucuugcag

SEQ ID NO: 3750696 - RNA, 19 nt, Human
gaacuagcuggaauuuuuu

SEQ ID NO: 3750697 - RNA, 17 nt, Human
gaacuaggcugagcaau

SEQ ID NO: 3750698 - RNA, 19 nt, Human
gaacuagugguggcucuga

SEQ ID NO: 3750699 - RNA, 19 nt, Human
gaacuauuuucaaagacuu

SEQ ID NO: 3750700 - RNA, 20 nt, Human
gaacuauuuucaaagacuua

SEQ ID NO: 3750701 - RNA, 22 nt, Human
gaacucaaauggggccagaucc

SEQ ID NO: 3750702 - RNA, 15 nt, Human
gaacucaacuuugac

SEQ ID NO: 3750703 - RNA, 21 nt, Human
gaacucaccuggggcugcugg

SEQ ID NO: 3750704 - RNA, 22 nt, Human
gaacucaccuggggcugcuggc

SEQ ID NO: 3750705 - RNA, 14 nt, Human
gaacucacucuggg

SEQ ID NO: 3750706 - RNA, 18 nt, Human
gaacucacucugggcugu

SEQ ID NO: 3750707 - RNA, 18 nt, Human
gaacucagauccagggac

SEQ ID NO: 3750708 - RNA, 21 nt, Human
gaacucagauccagggacaga

SEQ ID NO: 3750709 - RNA, 17 nt, Human
gaacucagccaagcaca

SEQ ID NO: 3750710 - RNA, 19 nt, Human
gaacucagccaagcacagu

SEQ ID NO: 3750711 - RNA, 21 nt, Human
gaacucagcugucuguggcuu

SEQ ID NO: 3750712 - RNA, 18 nt, Human
gaacucaucacuguggcu

SEQ ID NO: 3750713 - RNA, 19 nt, Human
gaacucaucacuguggcug

SEQ ID NO: 3750714 - RNA, 20 nt, Human
gaacucaucuagguaaauua

SEQ ID NO: 3750715 - RNA, 14 nt, Human
gaacuccaggcccu

SEQ ID NO: 3750716 - RNA, 17 nt, Human
gaacucccagcaacaca

SEQ ID NO: 3750717 - RNA, 15 nt, Human
gaacuccuaaaucaa

SEQ ID NO: 3750718 - RNA, 16 nt, Human
gaacuccuaaaucaag

SEQ ID NO: 3750719 - RNA, 14 nt, Human
gaacuccugaccuc

SEQ ID NO: 3750720 - RNA, 20 nt, Human
gaacuccuggaaauaucagu

SEQ ID NO: 3750721 - RNA, 14 nt, Human
gaacuccuggccuc

SEQ ID NO: 3750722 - RNA, 15 nt, Human
gaacuccuggccuca

SEQ ID NO: 3750723 - RNA, 20 nt, Human
gaacuccugggcucaagcag

SEQ ID NO: 3750724 - RNA, 15 nt, Human
gaacuccuugauuuu

SEQ ID NO: 3750725 - RNA, 20 nt, Human
gaacuccuuggccuagccca

SEQ ID NO: 3750726 - RNA, 17 nt, Human
gaacucgcgcucaguaa

SEQ ID NO: 3750727 - RNA, 19 nt, Human
gaacucgcgcucaguaaac

SEQ ID NO: 3750728 - RNA, 20 nt, Human
gaacucgcuucucugugacu

SEQ ID NO: 3750729 - RNA, 23 nt, Human
gaacucuagggauagucaccuuu

SEQ ID NO: 3750730 - RNA, 21 nt, Human
gaacucuaucugggccugggc

SEQ ID NO: 3750731 - RNA, 22 nt, Human
gaacucuaucugggccugggcu

SEQ ID NO: 3750732 - RNA, 12 nt, Human
gaacucugaaau

SEQ ID NO: 3750733 - RNA, 17 nt, Human
gaacucugaacuuugga

SEQ ID NO: 3750734 - RNA, 15 nt, Human
gaacucugacaaggg

SEQ ID NO: 3750735 - RNA, 17 nt, Human
gaacucugacaagggcu

SEQ ID NO: 3750736 - RNA, 20 nt, Human
gaacucuggcuuccagguau

SEQ ID NO: 3750737 - RNA, 22 nt, Human
gaacucugggcucaagcaaucc

SEQ ID NO: 3750738 - RNA, 14 nt, Human
gaacucugguggca

SEQ ID NO: 3750739 - RNA, 13 nt, Human
gaacucuuaauca

SEQ ID NO: 3750740 - RNA, 20 nt, Human
gaacucuuaaucaaauagca

SEQ ID NO: 3750741 - RNA, 13 nt, Human
gaacugaaaacau

SEQ ID NO: 3750742 - RNA, 13 nt, Human
gaacugaaaagag

SEQ ID NO: 3750743 - RNA, 21 nt, Human
gaacugaacaccauugaaggc

SEQ ID NO: 3750744 - RNA, 18 nt, Human
gaacugaacuaauccuuc

SEQ ID NO: 3750745 - RNA, 19 nt, Human
gaacugaagggggcggccu

SEQ ID NO: 3750746 - RNA, 16 nt, Human
gaacugagcuuggaag

SEQ ID NO: 3750747 - RNA, 13 nt, Human
gaacugauaguua

SEQ ID NO: 3750748 - RNA, 17 nt, Human
gaacugauguaaguaaa

SEQ ID NO: 3750749 - RNA, 20 nt, Human
gaacugcacaugaagaaaua

SEQ ID NO: 3750750 - RNA, 11 nt, Human
gaacugcagca

SEQ ID NO: 3750751 - RNA, 21 nt, Human
gaacugcauauguuucgcuga

SEQ ID NO: 3750752 - RNA, 19 nt, Human
gaacugcaugcugcuggac

SEQ ID NO: 3750753 - RNA, 15 nt, Human
gaacugcauggaccu

SEQ ID NO: 3750754 - RNA, 22 nt, Human
gaacugcauggaccuaacauuc

SEQ ID NO: 3750755 - RNA, 20 nt, Human
gaacugcauguauaaaugaa

SEQ ID NO: 3750756 - RNA, 23 nt, Human
gaacugccauuauuuucugucag

SEQ ID NO: 3750757 - RNA, 17 nt, Human
gaacugccucuuuccug

SEQ ID NO: 3750758 - RNA, 21 nt, Human
gaacugccuuuggcagaguuc

SEQ ID NO: 3750759 - RNA, 21 nt, Human
gaacugcuuuaucccacggaa

SEQ ID NO: 3750760 - RNA, 22 nt, Human
gaacuggacccuguugcuaagc

SEQ ID NO: 3750761 - RNA, 15 nt, Human
gaacuggacucagga

SEQ ID NO: 3750762 - RNA, 16 nt, Human
gaacuggaggcaggga

SEQ ID NO: 3750763 - RNA, 15 nt, Human
gaacuggaggccagg

SEQ ID NO: 3750764 - RNA, 16 nt, Human
gaacugggcauauuuc

SEQ ID NO: 3750765 - RNA, 19 nt, Human
gaacugggcauauuucuaa

SEQ ID NO: 3750766 - RNA, 17 nt, Human
gaacugggccuguugcc

SEQ ID NO: 3750767 - RNA, 18 nt, Human
gaacuguagaugauguau

SEQ ID NO: 3750768 - RNA, 20 nt, Human
gaacuguagcugccauggcu

SEQ ID NO: 3750769 - RNA, 13 nt, Human
gaacuguccagag

SEQ ID NO: 3750770 - RNA, 14 nt, Human
gaacuguccagaga

SEQ ID NO: 3750771 - RNA, 16 nt, Human
gaacuguccagagagc

SEQ ID NO: 3750772 - RNA, 17 nt, Human
gaacugucucucaugaa

SEQ ID NO: 3750773 - RNA, 17 nt, Human
gaacugucugugaacag

SEQ ID NO: 3750774 - RNA, 19 nt, Human
gaacugugcauagugcugg

SEQ ID NO: 3750775 - RNA, 14 nt, Human
gaacugugccacaa

SEQ ID NO: 3750776 - RNA, 16 nt, Human
gaacugugccacaaug

SEQ ID NO: 3750777 - RNA, 16 nt, Human
ggcgucuguucccccu

SEQ ID NO: 3750778 - RNA, 17 nt, Human
ggcgugacucacccaag

SEQ ID NO: 3750779 - RNA, 16 nt, Human
ggcguggcccaaggcu

SEQ ID NO: 3750780 - RNA, 18 nt, Human
ggcgugggagccagccuc

SEQ ID NO: 3750781 - RNA, 17 nt, Human
ggcguggucaagcacuc

SEQ ID NO: 3750782 - RNA, 22 nt, Human
ggcguguaucugguauauguaa

SEQ ID NO: 3750783 - RNA, 23 nt, Human
ggcguugggagggggagaaaagg

SEQ ID NO: 3750784 - RNA, 13 nt, Human
ggcguuuguaaug

SEQ ID NO: 3750785 - RNA, 22 nt, Human
ggcuaaaaaagcugaaucagac

SEQ ID NO: 3750786 - RNA, 20 nt, Human
ggcuaaaugccuaauaaaca

SEQ ID NO: 3750787 - RNA, 17 nt, Human
ggcuaacuauauuugcu

SEQ ID NO: 3750788 - RNA, 16 nt, Human
ggcuaagaggcugcug

SEQ ID NO: 3750789 - RNA, 15 nt, Human
ggcuaaggcaccagc

SEQ ID NO: 3750790 - RNA, 19 nt, Human
ggcuaaggcguggagcugc

SEQ ID NO: 3750791 - RNA, 19 nt, Human
ggcuaauucccagagugug

SEQ ID NO: 3750792 - RNA, 13 nt, Human
ggcuaauuuuugu

SEQ ID NO: 3750793 - RNA, 12 nt, Human
ggcuacacaggg

SEQ ID NO: 3750794 - RNA, 18 nt, Human
ggcuacagagaagccuuc

SEQ ID NO: 3750795 - RNA, 19 nt, Human
ggcuacagagaagccuuca

SEQ ID NO: 3750796 - RNA, 14 nt, Human
ggcuacauuauaaa

SEQ ID NO: 3750797 - RNA, 17 nt, Human
ggcuacccgugagcccu

SEQ ID NO: 3750798 - RNA, 19 nt, Human
ggcuacccugagcugaggc

SEQ ID NO: 3750799 - RNA, 20 nt, Human
ggcuacucagcagcccuccu

SEQ ID NO: 3750800 - RNA, 21 nt, Human
ggcuacucagcagcccuccuc

SEQ ID NO: 3750801 - RNA, 16 nt, Human
ggcuacucugugccag

SEQ ID NO: 3750802 - RNA, 22 nt, Human
gagaaccuagggugauauuaac

SEQ ID NO: 3750803 - RNA, 22 nt, Human
gagaaccucacgcaccucccau

SEQ ID NO: 3750804 - RNA, 14 nt, Human
gagaaccucaggcu

SEQ ID NO: 3750805 - RNA, 13 nt, Human
gagaaccuggccu

SEQ ID NO: 3750806 - RNA, 16 nt, Human
gagaaccuggccuuca

SEQ ID NO: 3750807 - RNA, 13 nt, Human
gagaacgcagccc

SEQ ID NO: 3750808 - RNA, 24 nt, Human
gagaacgcagcccuagagccugcc

SEQ ID NO: 3750809 - RNA, 22 nt, Human
gagaacuaaacuaguuuuuccu

SEQ ID NO: 3750810 - RNA, 20 nt, Human
gagaacuagugguggcucug

SEQ ID NO: 3750811 - RNA, 23 nt, Human
gagaacucaucccuaaugcugca

SEQ ID NO: 3750812 - RNA, 15 nt, Human
gagaacuccugacug

SEQ ID NO: 3750813 - RNA, 19 nt, Human
gagaacugcauauguuucg

SEQ ID NO: 3750814 - RNA, 22 nt, Human
gagaacuuccagauccuggaaa

SEQ ID NO: 3750815 - RNA, 16 nt, Human
gagaacuuucauuuuu

SEQ ID NO: 3750816 - RNA, 18 nt, Human
gagaagaaaauguucuuc

SEQ ID NO: 3750817 - RNA, 16 nt, Human
gagaagaaagaacgga

SEQ ID NO: 3750818 - RNA, 21 nt, Human
gagaagaaagaacggaagaag

SEQ ID NO: 3750819 - RNA, 22 nt, Human
gagaagaaagaggugaccccag

SEQ ID NO: 3750820 - RNA, 16 nt, Human
gagaagaacugaaauc

SEQ ID NO: 3750821 - RNA, 11 nt, Human
gagaagaagaa

SEQ ID NO: 3750822 - RNA, 14 nt, Human
gagaagagaaugca

SEQ ID NO: 3750823 - RNA, 19 nt, Human
gagaagagagaaauagccu

SEQ ID NO: 3750824 - RNA, 12 nt, Human
gagaagagagga

SEQ ID NO: 3750825 - RNA, 16 nt, Human
gagaagagaggagagg

SEQ ID NO: 3750826 - RNA, 15 nt, Human
gagaagagccccacu

SEQ ID NO: 3750827 - RNA, 21 nt, Human
gagaagagccccacucucaga

SEQ ID NO: 3750828 - RNA, 15 nt, Human
gagaagagcuguuca

SEQ ID NO: 3750829 - RNA, 13 nt, Human
gagaagaggcugg

SEQ ID NO: 3750830 - RNA, 14 nt, Human
gagaagagggccug

SEQ ID NO: 3750831 - RNA, 16 nt, Human
gagaagagggccugug

SEQ ID NO: 3750832 - RNA, 20 nt, Human
gagaagauggauaugaccag

SEQ ID NO: 3750833 - RNA, 16 nt, Human
gagaagcagaggaagg

SEQ ID NO: 3750834 - RNA, 18 nt, Human
gagaagcauauagaggca

SEQ ID NO: 3750835 - RNA, 11 nt, Human
gagaagccagc

SEQ ID NO: 3750836 - RNA, 13 nt, Human
gagaagccagcuu

SEQ ID NO: 3750837 - RNA, 14 nt, Human
gagaagccagcuug

SEQ ID NO: 3750838 - RNA, 12 nt, Human
gagaagccagga

SEQ ID NO: 3750839 - RNA, 22 nt, Human
gagaagccaggaauuucccagg

SEQ ID NO: 3750840 - RNA, 20 nt, Human
gagaagccagugcggcaggu

SEQ ID NO: 3750841 - RNA, 23 nt, Human
gagaagccaucaccucagauggc

SEQ ID NO: 3750842 - RNA, 15 nt, Human
gagaagccccuuccc

SEQ ID NO: 3750843 - RNA, 21 nt, Human
gagaagccccuuccccauggg

SEQ ID NO: 3750844 - RNA, 14 nt, Human
gagaagcccgugug

SEQ ID NO: 3750845 - RNA, 12 nt, Human
gagaagccuuca

SEQ ID NO: 3750846 - RNA, 19 nt, Human
gagaagccuucaagcucug

SEQ ID NO: 3750847 - RNA, 15 nt, Human
gagaagcggcuggca

SEQ ID NO: 3750848 - RNA, 21 nt, Human
gagaagcguauguuuuuuauu

SEQ ID NO: 3750849 - RNA, 20 nt, Human
gagaagcuaaaaccugagcu

SEQ ID NO: 3750850 - RNA, 15 nt, Human
gagaagcuacuuugu

SEQ ID NO: 3750851 - RNA, 21 nt, Human
gagaagcucucgggcuaggaa

SEQ ID NO: 3750852 - RNA, 12 nt, Human
gagaagcugcag

SEQ ID NO: 3750853 - RNA, 14 nt, Human
gagaagcugcaucc

SEQ ID NO: 3750854 - RNA, 22 nt, Human
gagaagcugcucaacuugcaaa

SEQ ID NO: 3750855 - RNA, 20 nt, Human
gagaagcugcuccaggccug

SEQ ID NO: 3750856 - RNA, 12 nt, Human
gagaagcugcug

SEQ ID NO: 3750857 - RNA, 17 nt, Human
gagaagcugcugaccaa

SEQ ID NO: 3750858 - RNA, 18 nt, Human
gagaagcugcugaccaau

SEQ ID NO: 3750859 - RNA, 18 nt, Human
gagaaggaaaauuuuagc

SEQ ID NO: 3750860 - RNA, 12 nt, Human
gagaaggaagcc

SEQ ID NO: 3750861 - RNA, 23 nt, Human
gagaaggacccggaggggccugg

SEQ ID NO: 3750862 - RNA, 22 nt, Human
gagaaggauaggccuucauuaa

SEQ ID NO: 3750863 - RNA, 17 nt, Human
gagaaggaucuagaaug

SEQ ID NO: 3750864 - RNA, 13 nt, Human
gagaaggcaggaa

SEQ ID NO: 3750865 - RNA, 20 nt, Human
gagaagggauaacccuacac

SEQ ID NO: 3750866 - RNA, 21 nt, Human
gagaagggcagaguuacuuga

SEQ ID NO: 3750867 - RNA, 15 nt, Human
gagaaggggaggagg

SEQ ID NO: 3750868 - RNA, 14 nt, Human
gagaagucaaacau

SEQ ID NO: 3750869 - RNA, 18 nt, Human
gagaagucaaacauuuca

SEQ ID NO: 3750870 - RNA, 16 nt, Human
gagaagucacagggca

SEQ ID NO: 3750871 - RNA, 22 nt, Human
cuccccgccuuccgccccuucc

SEQ ID NO: 3750872 - RNA, 14 nt, Human
cuccccgcuucugc

SEQ ID NO: 3750873 - RNA, 15 nt, Human
cuccccggcacccuc

SEQ ID NO: 3750874 - RNA, 16 nt, Human
cuccccggcccuacca

SEQ ID NO: 3750875 - RNA, 14 nt, Human
cuccccggcucgag

SEQ ID NO: 3750876 - RNA, 20 nt, Human
cuccccuaaccucuuuucug

SEQ ID NO: 3750877 - RNA, 21 nt, Human
cuccccuauccacccagccca

SEQ ID NO: 3750878 - RNA, 20 nt, Human
cuccccucaaagucugcaac

SEQ ID NO: 3750879 - RNA, 20 nt, Human
cuccccucacagccucugac

SEQ ID NO: 3750880 - RNA, 21 nt, Human
cuccccucagccucuccccug

SEQ ID NO: 3750881 - RNA, 20 nt, Human
cuccccuccaaaaugugccu

SEQ ID NO: 3750882 - RNA, 12 nt, Human
cuccccuccagc

SEQ ID NO: 3750883 - RNA, 13 nt, Human
cuccccuccagcu

SEQ ID NO: 3750884 - RNA, 23 nt, Human
cuccccuccaucccuggcccccu

SEQ ID NO: 3750885 - RNA, 14 nt, Human
cuccccuccccugc

SEQ ID NO: 3750886 - RNA, 18 nt, Human
cuccccuccccugcugca

SEQ ID NO: 3750887 - RNA, 20 nt, Human
cuccccuccuccuggacucc

SEQ ID NO: 3750888 - RNA, 13 nt, Human
cuccccuccucug

SEQ ID NO: 3750889 - RNA, 14 nt, Human
cuccccucggagaa

SEQ ID NO: 3750890 - RNA, 10 nt, Human
cuccccucua

SEQ ID NO: 3750891 - RNA, 21 nt, Human
cuccccucuauuuagcaugac

SEQ ID NO: 3750892 - RNA, 16 nt, Human
cuccccucuccuuccu

SEQ ID NO: 3750893 - RNA, 15 nt, Human
cuccccucucuugca

SEQ ID NO: 3750894 - RNA, 13 nt, Human
cuccccucuuccu

SEQ ID NO: 3750895 - RNA, 22 nt, Human
cuccccugaccugugagcccag

SEQ ID NO: 3750896 - RNA, 13 nt, Human
cuccccugaggcu

SEQ ID NO: 3750897 - RNA, 22 nt, Human
cuccccugauuacaccagccuc

SEQ ID NO: 3750898 - RNA, 13 nt, Human
cuccccugcacug

SEQ ID NO: 3750899 - RNA, 15 nt, Human
cuccccugcacugga

SEQ ID NO: 3750900 - RNA, 14 nt, Human
cuccccugcacugu

SEQ ID NO: 3750901 - RNA, 16 nt, Human
cuccccugcacuguaa

SEQ ID NO: 3750902 - RNA, 17 nt, Human
cuccccugcacuguaaa

SEQ ID NO: 3750903 - RNA, 18 nt, Human
cuccccugccaccaggcc

SEQ ID NO: 3750904 - RNA, 15 nt, Human
cuccccugcccccag

SEQ ID NO: 3750905 - RNA, 16 nt, Human
cuccccugcccccagg

SEQ ID NO: 3750906 - RNA, 17 nt, Human
cuccccugcccccagga

SEQ ID NO: 3750907 - RNA, 18 nt, Human
cuccccugcccccaggac

SEQ ID NO: 3750908 - RNA, 19 nt, Human
cuccccugcccccaggacu

SEQ ID NO: 3750909 - RNA, 21 nt, Human
cuccccugcccccaggacugg

SEQ ID NO: 3750910 - RNA, 18 nt, Human
cuccccugcccccugcag

SEQ ID NO: 3750911 - RNA, 23 nt, Human
cuccccugcccccugcaggaagg

SEQ ID NO: 3750912 - RNA, 13 nt, Human
cuccccugcccuc

SEQ ID NO: 3750913 - RNA, 14 nt, Human
cuccccugcccugc

SEQ ID NO: 3750914 - RNA, 16 nt, Human
cuccccugcccugcug

SEQ ID NO: 3750915 - RNA, 15 nt, Human
cuccccugcugcagg

SEQ ID NO: 3750916 - RNA, 16 nt, Human
cuccccugcugcaggg

SEQ ID NO: 3750917 - RNA, 14 nt, Human
cuccccugcugggu

SEQ ID NO: 3750918 - RNA, 12 nt, Human
cuccccuggacu

SEQ ID NO: 3750919 - RNA, 18 nt, Human
cuccccuggggugcaggc

SEQ ID NO: 3750920 - RNA, 14 nt, Human
cuccccuguaccuu

SEQ ID NO: 3750921 - RNA, 17 nt, Human
cuccccuguuccccucu

SEQ ID NO: 3750922 - RNA, 18 nt, Human
cuccccuguuccccucuc

SEQ ID NO: 3750923 - RNA, 11 nt, Human
cuccccuuccc

SEQ ID NO: 3750924 - RNA, 12 nt, Human
cuccccuuccca

SEQ ID NO: 3750925 - RNA, 19 nt, Human
cuccccuuccccuuccuuc

SEQ ID NO: 3750926 - RNA, 15 nt, Human
cuccccuucccugca

SEQ ID NO: 3750927 - RNA, 14 nt, Human
cuccccuugagcug

SEQ ID NO: 3750928 - RNA, 22 nt, Human
cuccccuugauuuaaacacaca

SEQ ID NO: 3750929 - RNA, 17 nt, Human
cuccccuugccagcugc

SEQ ID NO: 3750930 - RNA, 13 nt, Human
cuccccuugccug

SEQ ID NO: 3750931 - RNA, 18 nt, Human
cuccccuugccugugcca

SEQ ID NO: 3750932 - RNA, 18 nt, Human
cuccccuugggcggcuga

SEQ ID NO: 3750933 - RNA, 16 nt, Human
cuccccuuuuuuuccc

SEQ ID NO: 3750934 - RNA, 16 nt, Human
cucccgaauagcuggg

SEQ ID NO: 3750935 - RNA, 17 nt, Human
cucccgaauagcuggga

SEQ ID NO: 3750936 - RNA, 19 nt, Human
cucccgaauagcugggacu

SEQ ID NO: 3750937 - RNA, 18 nt, Human
cucccgagaccgggcccu

SEQ ID NO: 3750938 - RNA, 23 nt, Human
cucccgagaccgggcccuggguu

SEQ ID NO: 3750939 - RNA, 20 nt, Human
cucccgagacggcacugaga

SEQ ID NO: 3750940 - RNA, 19 nt, Human
cucccgagcuccucuucca

SEQ ID NO: 3750941 - RNA, 17 nt, Human
cucccgauucccaacug

SEQ ID NO: 3750942 - RNA, 23 nt, Human
cucccgcccaaaccuuuccccca

SEQ ID NO: 3750943 - RNA, 13 nt, Human
cucccgcccccca

SEQ ID NO: 3750944 - RNA, 16 nt, Human
cucccgccccuuccca

SEQ ID NO: 3750945 - RNA, 21 nt, Human
cucccgccccuuccccgaggg

SEQ ID NO: 3750946 - RNA, 17 nt, Human
cucccgcuccgggcucc

SEQ ID NO: 3750947 - RNA, 20 nt, Human
cucccgcugcccaggggagc

SEQ ID NO: 3750948 - RNA, 14 nt, Human
cucccggcacucca

SEQ ID NO: 3750949 - RNA, 17 nt, Human
cucccggcaugggaaag

SEQ ID NO: 3750950 - RNA, 17 nt, Human
cucccggcccugccugc

SEQ ID NO: 3750951 - RNA, 22 nt, Human
cucccgggacucacuggcagcc

SEQ ID NO: 3750952 - RNA, 23 nt, Human
cucccgggacucacuggcagccc

SEQ ID NO: 3750953 - RNA, 18 nt, Human
cucccgggccccacagac

SEQ ID NO: 3750954 - RNA, 17 nt, Human
cucccggggcagggcag

SEQ ID NO: 3750955 - RNA, 15 nt, Human
cucccgguucuucca

SEQ ID NO: 3750956 - RNA, 15 nt, Human
cucccgucagggccc

SEQ ID NO: 3750957 - RNA, 19 nt, Human
cucccgucagggcccaagu

SEQ ID NO: 3750958 - RNA, 14 nt, Human
cucccuaaacugua

SEQ ID NO: 3750959 - RNA, 16 nt, Human
cucccuaagccagccu

SEQ ID NO: 3750960 - RNA, 18 nt, Human
cucccuaagccagccugg

SEQ ID NO: 3750961 - RNA, 22 nt, Human
cucccuaccaccuccccagccu

SEQ ID NO: 3750962 - RNA, 17 nt, Human
cucccuaccucaaccug

SEQ ID NO: 3750963 - RNA, 23 nt, Human
cucccuagugacccggaggccac

SEQ ID NO: 3750964 - RNA, 17 nt, Human
cucccuauaaugcugga

SEQ ID NO: 3750965 - RNA, 18 nt, Human
cucccuauacugcuugga

SEQ ID NO: 3750966 - RNA, 15 nt, Human
cucccucaaagcaca

SEQ ID NO: 3750967 - RNA, 14 nt, Human
cucccucaacccca

SEQ ID NO: 3750968 - RNA, 18 nt, Human
cucccucacccccuccuu

SEQ ID NO: 3750969 - RNA, 14 nt, Human
cucccucacucuca

SEQ ID NO: 3750970 - RNA, 22 nt, Human
cucccucaucaaggacacgggc

SEQ ID NO: 3750971 - RNA, 13 nt, Human
cucccucauucca

SEQ ID NO: 3750972 - RNA, 14 nt, Human
cucccucauuccac

SEQ ID NO: 3750973 - RNA, 22 nt, Human
cucccuccaccucccugcaaua

SEQ ID NO: 3750974 - RNA, 13 nt, Human
cucccuccagcac

SEQ ID NO: 3750975 - RNA, 16 nt, Human
cucccuccagcacaaa

SEQ ID NO: 3750976 - RNA, 21 nt, Human
cucccucccagagcaccugcu

SEQ ID NO: 3750977 - RNA, 11 nt, Human
cucccuccccu

SEQ ID NO: 3750978 - RNA, 15 nt, Human
cucccuccccugcca

SEQ ID NO: 3750979 - RNA, 18 nt, Human
cucccuccccugcccucg

SEQ ID NO: 3750980 - RNA, 21 nt, Human
cucccuccccuugccugugcc

SEQ ID NO: 3750981 - RNA, 13 nt, Human
cucccucccgcac

SEQ ID NO: 3750982 - RNA, 14 nt, Human
cucccucccucucc

SEQ ID NO: 3750983 - RNA, 18 nt, Human
cucccuccgauccuuccu

SEQ ID NO: 3750984 - RNA, 16 nt, Human
cucccuccgcccccag

SEQ ID NO: 3750985 - RNA, 17 nt, Human
cucccuccucaccucug

SEQ ID NO: 3750986 - RNA, 16 nt, Human
cucccuccuccaggcc

SEQ ID NO: 3750987 - RNA, 12 nt, Human
cucccuccucug

SEQ ID NO: 3750988 - RNA, 15 nt, Human
cucccuccucugucc

SEQ ID NO: 3750989 - RNA, 20 nt, Human
cucccuccuuccuucuugcu

SEQ ID NO: 3750990 - RNA, 21 nt, Human
cucccucgaacccacacugca

SEQ ID NO: 3750991 - RNA, 22 nt, Human
cucccucgaacccacacugcaa

SEQ ID NO: 3750992 - RNA, 22 nt, Human
cucccucuaggcucugccuucg

SEQ ID NO: 3750993 - RNA, 19 nt, Human
cucccucucaacacccagu

SEQ ID NO: 3750994 - RNA, 15 nt, Human
cucccucucccuguc

SEQ ID NO: 3750995 - RNA, 12 nt, Human
cucccucuccug

SEQ ID NO: 3750996 - RNA, 13 nt, Human
cucccucuccugc

SEQ ID NO: 3750997 - RNA, 17 nt, Human
cucccucuccugccuac

SEQ ID NO: 3750998 - RNA, 16 nt, Human
cucccucucucuucug

SEQ ID NO: 3750999 - RNA, 13 nt, Human
cucccucugaccu

SEQ ID NO: 3751000 - RNA, 14 nt, Human
cucccucugaccug

SEQ ID NO: 3751001 - RNA, 18 nt, Human
cucccucugaccugcagg

SEQ ID NO: 3751002 - RNA, 20 nt, Human
cucccucugaggcuguagga

SEQ ID NO: 3751003 - RNA, 17 nt, Human
cucccucugccggcucu

SEQ ID NO: 3751004 - RNA, 15 nt, Human
cucccucuggcccug

SEQ ID NO: 3751005 - RNA, 14 nt, Human
cucccucuucuuuc

SEQ ID NO: 3751006 - RNA, 12 nt, Human
cucccucuuguu

SEQ ID NO: 3751007 - RNA, 19 nt, Human
cucccucuuucccucccuu

SEQ ID NO: 3751008 - RNA, 20 nt, Human
cucccucuuucccucccuuc

SEQ ID NO: 3751009 - RNA, 19 nt, Human
cucccugaagccagccuuc

SEQ ID NO: 3751010 - RNA, 18 nt, Human
cucccugaagccuuugca

SEQ ID NO: 3751011 - RNA, 23 nt, Human
cucccugacccuguauauagccc

SEQ ID NO: 3751012 - RNA, 14 nt, Human
cucccugcaauaaa

SEQ ID NO: 3751013 - RNA, 16 nt, Human
cucccugcaauaaaau

SEQ ID NO: 3751014 - RNA, 20 nt, Human
cucccugcacaagccagggu

SEQ ID NO: 3751015 - RNA, 15 nt, Human
cucccugcagaugcc

SEQ ID NO: 3751016 - RNA, 23 nt, Human
cucccugcagaugccacccuagc

SEQ ID NO: 3751017 - RNA, 23 nt, Human
cucccugcauggcauccuccagc

SEQ ID NO: 3751018 - RNA, 18 nt, Human
cucccugccagcaccccc

SEQ ID NO: 3751019 - RNA, 12 nt, Human
cucccugccagu

SEQ ID NO: 3751020 - RNA, 17 nt, Human
cucccugccccccagcc

SEQ ID NO: 3751021 - RNA, 23 nt, Human
cucccugccccccagcccuccuu

SEQ ID NO: 3751022 - RNA, 23 nt, Human
gacuugccaugugacucuggcuu

SEQ ID NO: 3751023 - RNA, 16 nt, Human
gacuugccuccguguc

SEQ ID NO: 3751024 - RNA, 17 nt, Human
gacuugccuccguguca

SEQ ID NO: 3751025 - RNA, 17 nt, Human
gacuuggcaacagaagc

SEQ ID NO: 3751026 - RNA, 12 nt, Human
gacuuggccucu

SEQ ID NO: 3751027 - RNA, 22 nt, Human
gacuuggcuggugugguacaga

SEQ ID NO: 3751028 - RNA, 23 nt, Human
gacuuggcuggugugguacagag

SEQ ID NO: 3751029 - RNA, 16 nt, Human
gacuuggucaccagcu

SEQ ID NO: 3751030 - RNA, 23 nt, Human
gacuugguguccuuucccuccac

SEQ ID NO: 3751031 - RNA, 19 nt, Human
gacuuguauauuuguacaa

SEQ ID NO: 3751032 - RNA, 13 nt, Human
gacuugugucucu

SEQ ID NO: 3751033 - RNA, 18 nt, Human
gacuuuaacauaagcuau

SEQ ID NO: 3751034 - RNA, 19 nt, Human
gacuuuaacauaagcuauu

SEQ ID NO: 3751035 - RNA, 15 nt, Human
gacuuuaauuuaugu

SEQ ID NO: 3751036 - RNA, 21 nt, Human
gacuuuacccauuuggguggg

SEQ ID NO: 3751037 - RNA, 13 nt, Human
gacuuuagaaaua

SEQ ID NO: 3751038 - RNA, 22 nt, Human
gacuuuagccuaccuaacccag

SEQ ID NO: 3751039 - RNA, 17 nt, Human
gacuuuaggcuuucagc

SEQ ID NO: 3751040 - RNA, 19 nt, Human
gacuuuauagaucagccag

SEQ ID NO: 3751041 - RNA, 21 nt, Human
gacuuuaucuaauaccucugu

SEQ ID NO: 3751042 - RNA, 22 nt, Human
gacuuuaucuaauaccucugug

SEQ ID NO: 3751043 - RNA, 14 nt, Human
gacuuuauuauuua

SEQ ID NO: 3751044 - RNA, 14 nt, Human
gacuuucagguacu

SEQ ID NO: 3751045 - RNA, 15 nt, Human
gacuuucauuggaaa

SEQ ID NO: 3751046 - RNA, 18 nt, Human
gacuuuccacccccuccc

SEQ ID NO: 3751047 - RNA, 14 nt, Human
gacuuuccauuaca

SEQ ID NO: 3751048 - RNA, 18 nt, Human
gacuuuccccaccagaug

SEQ ID NO: 3751049 - RNA, 11 nt, Human
gacuuuccugc

SEQ ID NO: 3751050 - RNA, 12 nt, Human
gacuuuccugca

SEQ ID NO: 3751051 - RNA, 18 nt, Human
gacuuucggaguuggggg

SEQ ID NO: 3751052 - RNA, 19 nt, Human
gacuuucggaguugggggu

SEQ ID NO: 3751053 - RNA, 13 nt, Human
gacuuucucuaau

SEQ ID NO: 3751054 - RNA, 16 nt, Human
gacuuucucuaauaau

SEQ ID NO: 3751055 - RNA, 19 nt, Human
gacuuucucuaauaauaaa

SEQ ID NO: 3751056 - RNA, 15 nt, Human
gacuuucugccugga

SEQ ID NO: 3751057 - RNA, 23 nt, Human
gacuuucuuuuuugauauagaag

SEQ ID NO: 3751058 - RNA, 18 nt, Human
gacuuugaugucagcagu

SEQ ID NO: 3751059 - RNA, 20 nt, Human
gacuuugauugcacauuguu

SEQ ID NO: 3751060 - RNA, 14 nt, Human
gacuuugcuugcuu

SEQ ID NO: 3751061 - RNA, 14 nt, Human
gacuuuggaaagag

SEQ ID NO: 3751062 - RNA, 19 nt, Human
gacuuuggauaauaaggaa

SEQ ID NO: 3751063 - RNA, 22 nt, Human
gacuuugguuauuuuacuuuuu

SEQ ID NO: 3751064 - RNA, 15 nt, Human
gacuuuguuacacug

SEQ ID NO: 3751065 - RNA, 12 nt, Human
gacuuuguucac

SEQ ID NO: 3751066 - RNA, 17 nt, Human
gacuuuguuuuuaaaau

SEQ ID NO: 3751067 - RNA, 22 nt, Human
gacuuuucaaguauuuaagccu

SEQ ID NO: 3751068 - RNA, 20 nt, Human
gacuuuuccaacccucauca

SEQ ID NO: 3751069 - RNA, 17 nt, Human
gacuuuuccaauaugug

SEQ ID NO: 3751070 - RNA, 18 nt, Human
gacuuuuccauguaucua

SEQ ID NO: 3751071 - RNA, 18 nt, Human
gacuuuucguuaacauug

SEQ ID NO: 3751072 - RNA, 19 nt, Human
gacuuuucguuaacauuga

SEQ ID NO: 3751073 - RNA, 14 nt, Human
gacuuuucugcaaa

SEQ ID NO: 3751074 - RNA, 18 nt, Human
gacuuuugaaaagaggug

SEQ ID NO: 3751075 - RNA, 14 nt, Human
gacuuuugcuuuaa

SEQ ID NO: 3751076 - RNA, 18 nt, Human
gacuuuuuucuaguacac

SEQ ID NO: 3751077 - RNA, 19 nt, Human
gacuuuuuuuuuuuauaau

SEQ ID NO: 3751078 - RNA, 16 nt, Human
gagaaaaaaaaaauag

SEQ ID NO: 3751079 - RNA, 14 nt, Human
gagaaaaaagaagu

SEQ ID NO: 3751080 - RNA, 13 nt, Human
gagaaaaaugcuu

SEQ ID NO: 3751081 - RNA, 19 nt, Human
gagaaaagaaaaaaaaaga

SEQ ID NO: 3751082 - RNA, 18 nt, Human
gagaaaagcacacuugua

SEQ ID NO: 3751083 - RNA, 16 nt, Human
gagaaaaggaaaagaa

SEQ ID NO: 3751084 - RNA, 11 nt, Human
gagaaaauaaa

SEQ ID NO: 3751085 - RNA, 15 nt, Human
gagaaaauaaaaagu

SEQ ID NO: 3751086 - RNA, 21 nt, Human
gagaaaauggacguguuauga

SEQ ID NO: 3751087 - RNA, 18 nt, Human
gagaaaauugaauuuaac

SEQ ID NO: 3751088 - RNA, 17 nt, Human
gagaaacaauaaagaga

SEQ ID NO: 3751089 - RNA, 13 nt, Human
gagaaacacuuga

SEQ ID NO: 3751090 - RNA, 16 nt, Human
gagaaacagccugugu

SEQ ID NO: 3751091 - RNA, 21 nt, Human
gagaaacaguugguaacuuuu

SEQ ID NO: 3751092 - RNA, 15 nt, Human
gagaaaccagcuucc

SEQ ID NO: 3751093 - RNA, 21 nt, Human
gagaugacugaguccucguag

SEQ ID NO: 3751094 - RNA, 20 nt, Human
gagaugaggaguaaaauuca

SEQ ID NO: 3751095 - RNA, 17 nt, Human
gagaugaggccgccaug

SEQ ID NO: 3751096 - RNA, 22 nt, Human
gagaugauacauccaaagcaga

SEQ ID NO: 3751097 - RNA, 17 nt, Human
gagaugauucagaaggg

SEQ ID NO: 3751098 - RNA, 14 nt, Human
gagaugccuccacc

SEQ ID NO: 3751099 - RNA, 20 nt, Human
gagaugccuccaccgcugcc

SEQ ID NO: 3751100 - RNA, 22 nt, Human
gagaugccuccaccgcugccua

SEQ ID NO: 3751101 - RNA, 14 nt, Human
gagaugccucccug

SEQ ID NO: 3751102 - RNA, 16 nt, Human
gagaugcuagaacucc

SEQ ID NO: 3751103 - RNA, 20 nt, Human
gagaugcuagaacucccuuu

SEQ ID NO: 3751104 - RNA, 15 nt, Human
gagaugcuggagaag

SEQ ID NO: 3751105 - RNA, 16 nt, Human
gagaugcuggagaaga

SEQ ID NO: 3751106 - RNA, 19 nt, Human
gagaugcuggagaagagag

SEQ ID NO: 3751107 - RNA, 19 nt, Human
gagaugcuggcuugggcag

SEQ ID NO: 3751108 - RNA, 15 nt, Human
gagauggcccucugg

SEQ ID NO: 3751109 - RNA, 16 nt, Human
gagauggcccucuggu

SEQ ID NO: 3751110 - RNA, 22 nt, Human
gagaugggagcuccucuccugg

SEQ ID NO: 3751111 - RNA, 14 nt, Human
gagaugggcuuccc

SEQ ID NO: 3751112 - RNA, 16 nt, Human
gagaugggcuucccaa

SEQ ID NO: 3751113 - RNA, 17 nt, Human
gagauguaaaagguauu

SEQ ID NO: 3751114 - RNA, 12 nt, Human
gagaugucucuu

SEQ ID NO: 3751115 - RNA, 14 nt, Human
gagaugugcaccca

SEQ ID NO: 3751116 - RNA, 16 nt, Human
gagauguguaucagug

SEQ ID NO: 3751117 - RNA, 20 nt, Human
gagauguguggacuguggca

SEQ ID NO: 3751118 - RNA, 21 nt, Human
gagauguguguugauacuguu

SEQ ID NO: 3751119 - RNA, 14 nt, Human
gagauguuuuagag

SEQ ID NO: 3751120 - RNA, 18 nt, Human
gagauguuuuuaaaaguu

SEQ ID NO: 3751121 - RNA, 13 nt, Human
gagauuauaauaa

SEQ ID NO: 3751122 - RNA, 15 nt, Human
gagauuauguucuuu

SEQ ID NO: 3751123 - RNA, 14 nt, Human
gagauucagacugu

SEQ ID NO: 3751124 - RNA, 13 nt, Human
gagauucauuuuc

SEQ ID NO: 3751125 - RNA, 21 nt, Human
gagauucauuuucuagauaca

SEQ ID NO: 3751126 - RNA, 20 nt, Human
gagauucucauaacuugaga

SEQ ID NO: 3751127 - RNA, 15 nt, Human
gagauucugccuuug

SEQ ID NO: 3751128 - RNA, 15 nt, Human
gagauucugugaucu

SEQ ID NO: 3751129 - RNA, 13 nt, Human
gagauugagaagg

SEQ ID NO: 3751130 - RNA, 20 nt, Human
gagauugagaaggagagaaa

SEQ ID NO: 3751131 - RNA, 16 nt, Human
gagauuggcauggcuu

SEQ ID NO: 3751132 - RNA, 17 nt, Human
gagauugguuuuccugu

SEQ ID NO: 3751133 - RNA, 23 nt, Human
gagauuuaauuaaucaugaaugu

SEQ ID NO: 3751134 - RNA, 14 nt, Human
gagauuuauauaaa

SEQ ID NO: 3751135 - RNA, 16 nt, Human
gagauuuauauaaaug

SEQ ID NO: 3751136 - RNA, 17 nt, Human
gagauuucaucugcucu

SEQ ID NO: 3751137 - RNA, 19 nt, Human
gagauuucaucugcucucc

SEQ ID NO: 3751138 - RNA, 20 nt, Human
gagauuucaucugcucuccu

SEQ ID NO: 3751139 - RNA, 21 nt, Human
gagauuucaucugcucuccuu

SEQ ID NO: 3751140 - RNA, 20 nt, Human
gagauuuggggcuaaagacu

SEQ ID NO: 3751141 - RNA, 21 nt, Human
gagauuuucaacauuucaaaa

SEQ ID NO: 3751142 - RNA, 16 nt, Human
gagauuuuuuauugcu

SEQ ID NO: 3751143 - RNA, 20 nt, Human
gagcaaaaauaucccuuccg

SEQ ID NO: 3751144 - RNA, 12 nt, Human
gagcaaaauaau

SEQ ID NO: 3751145 - RNA, 18 nt, Human
gagcaaaaugcauguaau

SEQ ID NO: 3751146 - RNA, 19 nt, Human
gagcaaacugcaugcccag

SEQ ID NO: 3751147 - RNA, 20 nt, Human
gagcaaacugcaugcccaga

SEQ ID NO: 3751148 - RNA, 13 nt, Human
gagcaaagaucaa

SEQ ID NO: 3751149 - RNA, 13 nt, Human
gagcaaagccugu

SEQ ID NO: 3751150 - RNA, 14 nt, Human
gagcaaagccuguu

SEQ ID NO: 3751151 - RNA, 23 nt, Human
gagcaaagccuguucauggcaga

SEQ ID NO: 3751152 - RNA, 22 nt, Human
gagcaaaggcugagaacacugu

SEQ ID NO: 3751153 - RNA, 14 nt, Human
gagcaaauguuucu

SEQ ID NO: 3751154 - RNA, 22 nt, Human
gagcaaccccuggaccccagcc

SEQ ID NO: 3751155 - RNA, 15 nt, Human
gagcaaccucucacu

SEQ ID NO: 3751156 - RNA, 18 nt, Human
gagcaagacccugucucu

SEQ ID NO: 3751157 - RNA, 22 nt, Human
gagcaagacgcugugcugcccu

SEQ ID NO: 3751158 - RNA, 14 nt, Human
gagcaagacucugu

SEQ ID NO: 3751159 - RNA, 17 nt, Human
gagcaagcuuuuuuauu

SEQ ID NO: 3751160 - RNA, 15 nt, Human
gagcaagucugcagg

SEQ ID NO: 3751161 - RNA, 21 nt, Human
gagcaagucugcaggugcacc

SEQ ID NO: 3751162 - RNA, 18 nt, Human
gagcaaguuccuucuggu

SEQ ID NO: 3751163 - RNA, 15 nt, Human
gagcaaugucugugc

SEQ ID NO: 3751164 - RNA, 16 nt, Human
gagcacaaaauucaaa

SEQ ID NO: 3751165 - RNA, 15 nt, Human
gagcacaaacauuuu

SEQ ID NO: 3751166 - RNA, 16 nt, Human
gagcacaaacauuuuu

SEQ ID NO: 3751167 - RNA, 19 nt, Human
gagcacaacccccagcucc

SEQ ID NO: 3751168 - RNA, 13 nt, Human
gagcacacccagc

SEQ ID NO: 3751169 - RNA, 18 nt, Human
gagcacacuuggcccaag

SEQ ID NO: 3751170 - RNA, 17 nt, Human
gagcacagaucuguuuc

SEQ ID NO: 3751171 - RNA, 18 nt, Human
gagcacagcccucccgcc

SEQ ID NO: 3751172 - RNA, 13 nt, Human
gagcacaggcagc

SEQ ID NO: 3751173 - RNA, 13 nt, Human
gagcacagguccc

SEQ ID NO: 3751174 - RNA, 22 nt, Human
gagcacaggucccaccuccagc

SEQ ID NO: 3751175 - RNA, 15 nt, Human
gagcaccaggcacga

SEQ ID NO: 3751176 - RNA, 17 nt, Human
gagcaccgaauauugag

SEQ ID NO: 3751177 - RNA, 23 nt, Human
gagcaccgugucaagcugcucug

SEQ ID NO: 3751178 - RNA, 14 nt, Human
gagcaccuccacau

SEQ ID NO: 3751179 - RNA, 16 nt, Human
gagcaccucccagccc

SEQ ID NO: 3751180 - RNA, 16 nt, Human
gagcaccugcugucug

SEQ ID NO: 3751181 - RNA, 17 nt, Human
gagcaccugcugucugg

SEQ ID NO: 3751182 - RNA, 19 nt, Human
gagcaccuuagacaguccc

SEQ ID NO: 3751183 - RNA, 22 nt, Human
gagcacggcucuguccccagcc

SEQ ID NO: 3751184 - RNA, 23 nt, Human
gagcacggcucuguccccagccu

SEQ ID NO: 3751185 - RNA, 21 nt, Human
gagcacuaaggugugcucuga

SEQ ID NO: 3751186 - RNA, 15 nt, Human
gagcacucccaaguc

SEQ ID NO: 3751187 - RNA, 21 nt, Human
gagcacucugaguuuaccauu

SEQ ID NO: 3751188 - RNA, 15 nt, Human
gagcacugccaggag

SEQ ID NO: 3751189 - RNA, 18 nt, Human
gagcacugccaggaggga

SEQ ID NO: 3751190 - RNA, 13 nt, Human
gagcacuggguug

SEQ ID NO: 3751191 - RNA, 17 nt, Human
gagcacuggguugacuu

SEQ ID NO: 3751192 - RNA, 22 nt, Human
gagcacuguuuucuaguguauc

SEQ ID NO: 3751193 - RNA, 15 nt, Human
gagcacuuaagagaa

SEQ ID NO: 3751194 - RNA, 15 nt, Human
gagcacuuacuguaa

SEQ ID NO: 3751195 - RNA, 14 nt, Human
gagcagaaauucug

SEQ ID NO: 3751196 - RNA, 17 nt, Human
gagcagaaauucuguuu

SEQ ID NO: 3751197 - RNA, 12 nt, Human
gagcagaagcag

SEQ ID NO: 3751198 - RNA, 14 nt, Human
gagcagaagcagca

SEQ ID NO: 3751199 - RNA, 17 nt, Human
gagcagaaguggagcug

SEQ ID NO: 3751200 - RNA, 14 nt, Human
gagcagacaggagg

SEQ ID NO: 3751201 - RNA, 19 nt, Human
gagcagacuggugagcaga

SEQ ID NO: 3751202 - RNA, 20 nt, Human
gagcagacuggugagcagac

SEQ ID NO: 3751203 - RNA, 23 nt, Human
gagcagacuggugagcagacugg

SEQ ID NO: 3751204 - RNA, 17 nt, Human
gagcagagaaggccagg

SEQ ID NO: 3751205 - RNA, 16 nt, Human
gagcagagaauucucu

SEQ ID NO: 3751206 - RNA, 12 nt, Human
gagcagagacca

SEQ ID NO: 3751207 - RNA, 18 nt, Human
gagcagagaccaucccug

SEQ ID NO: 3751208 - RNA, 21 nt, Human
gagcagagaccaucccugaag

SEQ ID NO: 3751209 - RNA, 23 nt, Human
gagcagagaccaucccugaaggc

SEQ ID NO: 3751210 - RNA, 20 nt, Human
gagcagagaucacaccacug

SEQ ID NO: 3751211 - RNA, 22 nt, Human
gagcagagaucacaccacugca

SEQ ID NO: 3751212 - RNA, 20 nt, Human
gagcagaggggcagaggccc

SEQ ID NO: 3751213 - RNA, 14 nt, Human
gagcagaugcagag

SEQ ID NO: 3751214 - RNA, 17 nt, Human
cuccugcccaguccccc

SEQ ID NO: 3751215 - RNA, 23 nt, Human
cuccugcccgcagaccucuggau

SEQ ID NO: 3751216 - RNA, 11 nt, Human
cuccugcccuu

SEQ ID NO: 3751217 - RNA, 16 nt, Human
cuccugccgacuccug

SEQ ID NO: 3751218 - RNA, 17 nt, Human
cuccugccgacuccugg

SEQ ID NO: 3751219 - RNA, 18 nt, Human
cuccugccgcagagcugg

SEQ ID NO: 3751220 - RNA, 15 nt, Human
cuccugccucagccu

SEQ ID NO: 3751221 - RNA, 21 nt, Human
cuccugccucagccuccugag

SEQ ID NO: 3751222 - RNA, 22 nt, Human
cuccugccucgaacuggcugca

SEQ ID NO: 3751223 - RNA, 22 nt, Human
cuccugccucuacugggaaggc

SEQ ID NO: 3751224 - RNA, 14 nt, Human
cuccugccugcccc

SEQ ID NO: 3751225 - RNA, 19 nt, Human
cuccugccuguagcaguga

SEQ ID NO: 3751226 - RNA, 14 nt, Human
cuccugccugugcu

SEQ ID NO: 3751227 - RNA, 20 nt, Human
cuccugccuuccuccugggc

SEQ ID NO: 3751228 - RNA, 16 nt, Human
cuccugccuucugucc

SEQ ID NO: 3751229 - RNA, 22 nt, Human
cuccugccuucuguccuggugu

SEQ ID NO: 3751230 - RNA, 14 nt, Human
cuccugcugcacca

SEQ ID NO: 3751231 - RNA, 18 nt, Human
cuccugcugcaccaaccc

SEQ ID NO: 3751232 - RNA, 22 nt, Human
cuccugcugcaccaacccagcc

SEQ ID NO: 3751233 - RNA, 16 nt, Human
cuccugcugcagaggg

SEQ ID NO: 3751234 - RNA, 16 nt, Human
cuccugcugcucccuc

SEQ ID NO: 3751235 - RNA, 20 nt, Human
cuccugcugcucccucagac

SEQ ID NO: 3751236 - RNA, 17 nt, Human
cuccuggaaaggcucag

SEQ ID NO: 3751237 - RNA, 14 nt, Human
cuccuggaaauauu

SEQ ID NO: 3751238 - RNA, 17 nt, Human
cuccuggaaccuugcug

SEQ ID NO: 3751239 - RNA, 18 nt, Human
cuccuggaaccuugcugu

SEQ ID NO: 3751240 - RNA, 19 nt, Human
cuccuggaaccuugcuguc

SEQ ID NO: 3751241 - RNA, 22 nt, Human
cuccuggaaccuugcuguccug

SEQ ID NO: 3751242 - RNA, 11 nt, Human
cuccuggacuc

SEQ ID NO: 3751243 - RNA, 15 nt, Human
cuccuggacuccugc

SEQ ID NO: 3751244 - RNA, 10 nt, Human
cuccuggagg

SEQ ID NO: 3751245 - RNA, 15 nt, Human
cuccuggaucucccu

SEQ ID NO: 3751246 - RNA, 19 nt, Human
cuccuggaucucccugaga

SEQ ID NO: 3751247 - RNA, 21 nt, Human
cuccuggaucucccugagaug

SEQ ID NO: 3751248 - RNA, 16 nt, Human
cuccuggcccacugca

SEQ ID NO: 3751249 - RNA, 19 nt, Human
cuccuggcccacugcaucg

SEQ ID NO: 3751250 - RNA, 12 nt, Human
cuccuggcccag

SEQ ID NO: 3751251 - RNA, 15 nt, Human
cuccuggcccagccu

SEQ ID NO: 3751252 - RNA, 18 nt, Human
cuccuggcccagccuuug

SEQ ID NO: 3751253 - RNA, 14 nt, Human
cuccuggcccaggu

SEQ ID NO: 3751254 - RNA, 13 nt, Human
cuccuggccuauc

SEQ ID NO: 3751255 - RNA, 22 nt, Human
cuccuggccuauccgcugccag

SEQ ID NO: 3751256 - RNA, 19 nt, Human
cuccuggccucaagugauu

SEQ ID NO: 3751257 - RNA, 15 nt, Human
cuccuggccucagac

SEQ ID NO: 3751258 - RNA, 18 nt, Human
cuccuggccucagacugc

SEQ ID NO: 3751259 - RNA, 23 nt, Human
cuccuggccucagacugcaccca

SEQ ID NO: 3751260 - RNA, 22 nt, Human
cuccuggcucuugauacccccc

SEQ ID NO: 3751261 - RNA, 18 nt, Human
cuccuggcugucugaggc

SEQ ID NO: 3751262 - RNA, 19 nt, Human
cuccuggcugucugaggcu

SEQ ID NO: 3751263 - RNA, 21 nt, Human
cuccuggcuucccauccccag

SEQ ID NO: 3751264 - RNA, 23 nt, Human
cuccugggauuggcugugaacug

SEQ ID NO: 3751265 - RNA, 12 nt, Human
cuccugggcagc

SEQ ID NO: 3751266 - RNA, 14 nt, Human
cuccugggcagcug

SEQ ID NO: 3751267 - RNA, 20 nt, Human
cuccugggccccucccuacc

SEQ ID NO: 3751268 - RNA, 15 nt, Human
cuccugggcccucuc

SEQ ID NO: 3751269 - RNA, 21 nt, Human
cuccugggcccucucugcucu

SEQ ID NO: 3751270 - RNA, 22 nt, Human
cuccugggcccucucugcucug

SEQ ID NO: 3751271 - RNA, 13 nt, Human
cuccugggcucag

SEQ ID NO: 3751272 - RNA, 19 nt, Human
cuccuggggcgcgugaggc

SEQ ID NO: 3751273 - RNA, 20 nt, Human
cuccuggggguucuuucuuc

SEQ ID NO: 3751274 - RNA, 19 nt, Human
cuccuggguucaagcgauu

SEQ ID NO: 3751275 - RNA, 15 nt, Human
cuccugguccuaggc

SEQ ID NO: 3751276 - RNA, 23 nt, Human
cuccuggucuugagaugucuucu

SEQ ID NO: 3751277 - RNA, 17 nt, Human
cuccugguggguccagg

SEQ ID NO: 3751278 - RNA, 19 nt, Human
cuccuggugucaccccaga

SEQ ID NO: 3751279 - RNA, 22 nt, Human
cuccuggugucaccccagagcc

SEQ ID NO: 3751280 - RNA, 21 nt, Human
cuccuguaaaugguguacaua

SEQ ID NO: 3751281 - RNA, 20 nt, Human
cuccuguaagccaaagaaau

SEQ ID NO: 3751282 - RNA, 17 nt, Human
cuccuguacuuuuucca

SEQ ID NO: 3751283 - RNA, 20 nt, Human
cuccuguccaucagccagga

SEQ ID NO: 3751284 - RNA, 13 nt, Human
cuccuguccccug

SEQ ID NO: 3751285 - RNA, 21 nt, Human
cuccuguccccugcuacaccu

SEQ ID NO: 3751286 - RNA, 12 nt, Human
cuccuguccucc

SEQ ID NO: 3751287 - RNA, 15 nt, Human
cuccuguccucccau

SEQ ID NO: 3751288 - RNA, 13 nt, Human
cuccuguccuuua

SEQ ID NO: 3751289 - RNA, 16 nt, Human
cuccugucucccuccu

SEQ ID NO: 3751290 - RNA, 14 nt, Human
cuccugucuuccca

SEQ ID NO: 3751291 - RNA, 15 nt, Human
cuccugucuucccag

SEQ ID NO: 3751292 - RNA, 18 nt, Human
cuccugucuucccagggu

SEQ ID NO: 3751293 - RNA, 13 nt, Human
cuccugucuucug

SEQ ID NO: 3751294 - RNA, 17 nt, Human
cuccugucuucugcuuu

SEQ ID NO: 3751295 - RNA, 11 nt, Human
cuccugugacc

SEQ ID NO: 3751296 - RNA, 17 nt, Human
cuccugugcucagcccu

SEQ ID NO: 3751297 - RNA, 18 nt, Human
cuccuguggaacccagca

SEQ ID NO: 3751298 - RNA, 20 nt, Human
cuccuguggaacccagcagu

SEQ ID NO: 3751299 - RNA, 20 nt, Human
cuccuguggccccacccugg

SEQ ID NO: 3751300 - RNA, 13 nt, Human
cuccugugggagc

SEQ ID NO: 3751301 - RNA, 17 nt, Human
cuccugugggagccucg

SEQ ID NO: 3751302 - RNA, 19 nt, Human
cuccugugggagccucgca

SEQ ID NO: 3751303 - RNA, 11 nt, Human
cuccuguguaa

SEQ ID NO: 3751304 - RNA, 14 nt, Human
cuccuguguacugu

SEQ ID NO: 3751305 - RNA, 14 nt, Human
cuccugugugugcg

SEQ ID NO: 3751306 - RNA, 23 nt, Human
cuccuguuagcuccucacugugg

SEQ ID NO: 3751307 - RNA, 17 nt, Human
cuccuguugcacccagc

SEQ ID NO: 3751308 - RNA, 20 nt, Human
cuccuguugcacccagcccu

SEQ ID NO: 3751309 - RNA, 21 nt, Human
cuccuguugcacccagcccug

SEQ ID NO: 3751310 - RNA, 23 nt, Human
cuccuuaagcugcagagauuucu

SEQ ID NO: 3751311 - RNA, 22 nt, Human
cuccuuaaggcucuuuuguaag

SEQ ID NO: 3751312 - RNA, 20 nt, Human
cuccuuagaaguggaaguag

SEQ ID NO: 3751313 - RNA, 14 nt, Human
cuccuuagcugcca

SEQ ID NO: 3751314 - RNA, 18 nt, Human
cuccuuaggguuuucucu

SEQ ID NO: 3751315 - RNA, 22 nt, Human
cuccuuaucaaaggacaccauu

SEQ ID NO: 3751316 - RNA, 21 nt, Human
cuccuucaacaauucuaaaau

SEQ ID NO: 3751317 - RNA, 13 nt, Human
cuccuucaccuuu

SEQ ID NO: 3751318 - RNA, 14 nt, Human
cuccuucaccuuug

SEQ ID NO: 3751319 - RNA, 16 nt, Human
cuccuucaccuuuguc

SEQ ID NO: 3751320 - RNA, 13 nt, Human
cuccuucacuguu

SEQ ID NO: 3751321 - RNA, 15 nt, Human
cuccuucacuguuuc

SEQ ID NO: 3751322 - RNA, 15 nt, Human
cuccuucagcccuca

SEQ ID NO: 3751323 - RNA, 20 nt, Human
cuccuucagcccucaccccu

SEQ ID NO: 3751324 - RNA, 15 nt, Human
cuccuuccaacugcu

SEQ ID NO: 3751325 - RNA, 22 nt, Human
cuccuucccaaaggacuccacc

SEQ ID NO: 3751326 - RNA, 15 nt, Human
cuccuucccacucuu

SEQ ID NO: 3751327 - RNA, 18 nt, Human
cuccuucccacucuucuc

SEQ ID NO: 3751328 - RNA, 20 nt, Human
cuccuucccacucuucucau

SEQ ID NO: 3751329 - RNA, 14 nt, Human
cuccuucccagcug

SEQ ID NO: 3751330 - RNA, 15 nt, Human
cuccuucccagcugc

SEQ ID NO: 3751331 - RNA, 16 nt, Human
cuccuucccagcugcc

SEQ ID NO: 3751332 - RNA, 17 nt, Human
cuccuucccagcugccc

SEQ ID NO: 3751333 - RNA, 20 nt, Human
cuccuucccagcugccccuc

SEQ ID NO: 3751334 - RNA, 12 nt, Human
cuccuuccccau

SEQ ID NO: 3751335 - RNA, 17 nt, Human
cuccuucccuugcuacc

SEQ ID NO: 3751336 - RNA, 14 nt, Human
cuccuuccggggaa

SEQ ID NO: 3751337 - RNA, 20 nt, Human
cuccuuccggggaaggauuu

SEQ ID NO: 3751338 - RNA, 12 nt, Human
cuccuuccuaaa

SEQ ID NO: 3751339 - RNA, 21 nt, Human
cuccuuccugccccaacuccu

SEQ ID NO: 3751340 - RNA, 13 nt, Human
cuccuuccuggag

SEQ ID NO: 3751341 - RNA, 14 nt, Human
cuccuuccuggccu

SEQ ID NO: 3751342 - RNA, 17 nt, Human
cuccuuccuggccugag

SEQ ID NO: 3751343 - RNA, 15 nt, Human
cuccuuccugucuuc

SEQ ID NO: 3751344 - RNA, 18 nt, Human
cuccuuccuucaccucug

SEQ ID NO: 3751345 - RNA, 14 nt, Human
cuccuuccuugacc

SEQ ID NO: 3751346 - RNA, 20 nt, Human
cuccuucuaaaaacuucuca

SEQ ID NO: 3751347 - RNA, 21 nt, Human
cuccuucucugucucaugugu

SEQ ID NO: 3751348 - RNA, 13 nt, Human
cuccuucugagcu

SEQ ID NO: 3751349 - RNA, 16 nt, Human
cuccuucugagcuccu

SEQ ID NO: 3751350 - RNA, 11 nt, Human
cuccuucuucc

SEQ ID NO: 3751351 - RNA, 21 nt, Human
cuccuugaaaacacuguucuc

SEQ ID NO: 3751352 - RNA, 15 nt, Human
cuccuugaauaucuu

SEQ ID NO: 3751353 - RNA, 17 nt, Human
cuccuugauaacagcua

SEQ ID NO: 3751354 - RNA, 16 nt, Human
cuccuugcaucaaggg

SEQ ID NO: 3751355 - RNA, 14 nt, Human
cuccuugcucugca

SEQ ID NO: 3751356 - RNA, 11 nt, Human
cuccuuggccu

SEQ ID NO: 3751357 - RNA, 14 nt, Human
cuccuuggccuagc

SEQ ID NO: 3751358 - RNA, 13 nt, Human
cuccuuggcuuac

SEQ ID NO: 3751359 - RNA, 17 nt, Human
cuccuugggaggaagca

SEQ ID NO: 3751360 - RNA, 21 nt, Human
cuccuugggaggaagcagaau

SEQ ID NO: 3751361 - RNA, 13 nt, Human
cuccuugggaggc

SEQ ID NO: 3751362 - RNA, 21 nt, Human
cuccuugggaggccccacugg

SEQ ID NO: 3751363 - RNA, 15 nt, Human
cuccuugggcacuuu

SEQ ID NO: 3751364 - RNA, 16 nt, Human
cuccuugggcccuuug

SEQ ID NO: 3751365 - RNA, 16 nt, Human
gagcagaugcagagag

SEQ ID NO: 3751366 - RNA, 19 nt, Human
gagcagcaccuccucagcc

SEQ ID NO: 3751367 - RNA, 21 nt, Human
gagcagcaggaggggggaggg

SEQ ID NO: 3751368 - RNA, 22 nt, Human
gagcagccacauuccugaugcu

SEQ ID NO: 3751369 - RNA, 20 nt, Human
gagcagcccuggagucaugc

SEQ ID NO: 3751370 - RNA, 18 nt, Human
gagcagcgguuuggggag

SEQ ID NO: 3751371 - RNA, 18 nt, Human
gagcagcugagcagggcc

SEQ ID NO: 3751372 - RNA, 17 nt, Human
gagcagcuucugccacu

SEQ ID NO: 3751373 - RNA, 21 nt, Human
gagcagcuucugccacuuccc

SEQ ID NO: 3751374 - RNA, 17 nt, Human
gagcaggaaggccuggg

SEQ ID NO: 3751375 - RNA, 12 nt, Human
gagcaggaccuc

SEQ ID NO: 3751376 - RNA, 13 nt, Human
gagcaggaccucc

SEQ ID NO: 3751377 - RNA, 15 nt, Human
gagcaggacuccagg

SEQ ID NO: 3751378 - RNA, 16 nt, Human
gagcaggacuccaggc

SEQ ID NO: 3751379 - RNA, 16 nt, Human
gagcaggcagccagca

SEQ ID NO: 3751380 - RNA, 19 nt, Human
gagcaggcagccagcaucu

SEQ ID NO: 3751381 - RNA, 19 nt, Human
gagcaggcuggcagcucuc

SEQ ID NO: 3751382 - RNA, 21 nt, Human
gagcaggcuggcagcucucca

SEQ ID NO: 3751383 - RNA, 13 nt, Human
gagcagggaaggc

SEQ ID NO: 3751384 - RNA, 14 nt, Human
gagcagggaaggcc

SEQ ID NO: 3751385 - RNA, 17 nt, Human
gagcagggaaggccuga

SEQ ID NO: 3751386 - RNA, 18 nt, Human
gagcagggaaggccugac

SEQ ID NO: 3751387 - RNA, 22 nt, Human
gagcagggauuaaccucugcac

SEQ ID NO: 3751388 - RNA, 22 nt, Human
gagcagggccggggaacuggcc

SEQ ID NO: 3751389 - RNA, 16 nt, Human
gagcaggggcagggug

SEQ ID NO: 3751390 - RNA, 20 nt, Human
gagcagggguccuuggugug

SEQ ID NO: 3751391 - RNA, 16 nt, Human
gagcaguccugccuca

SEQ ID NO: 3751392 - RNA, 16 nt, Human
gagcaguccuuggccu

SEQ ID NO: 3751393 - RNA, 17 nt, Human
gagcaguccuuggccug

SEQ ID NO: 3751394 - RNA, 23 nt, Human
gagcaguccuuggccugcuaagg

SEQ ID NO: 3751395 - RNA, 21 nt, Human
gagcagugaaugauucagugu

SEQ ID NO: 3751396 - RNA, 14 nt, Human
gagcagugcaggca

SEQ ID NO: 3751397 - RNA, 23 nt, Human
gagcagugcuuuuggcggggagg

SEQ ID NO: 3751398 - RNA, 18 nt, Human
gagcagugggccuggcca

SEQ ID NO: 3751399 - RNA, 12 nt, Human
gagcagugucuu

SEQ ID NO: 3751400 - RNA, 19 nt, Human
gagcagugucuuccauaau

SEQ ID NO: 3751401 - RNA, 20 nt, Human
gagcauaauuuaaaaauaua

SEQ ID NO: 3751402 - RNA, 21 nt, Human
gagcauaggugauccauguaa

SEQ ID NO: 3751403 - RNA, 22 nt, Human
gagcauaggugauccauguaac

SEQ ID NO: 3751404 - RNA, 12 nt, Human
gagcaucacaga

SEQ ID NO: 3751405 - RNA, 13 nt, Human
gagcaucacagaa

SEQ ID NO: 3751406 - RNA, 12 nt, Human
gagcaucaggcc

SEQ ID NO: 3751407 - RNA, 15 nt, Human
gagcaucaggccagg

SEQ ID NO: 3751408 - RNA, 16 nt, Human
gagcaucaggccaggc

SEQ ID NO: 3751409 - RNA, 17 nt, Human
gagcaucaggccaggcc

SEQ ID NO: 3751410 - RNA, 22 nt, Human
gagcaucaggccaggcccucug

SEQ ID NO: 3751411 - RNA, 13 nt, Human
gagcaucaugccu

SEQ ID NO: 3751412 - RNA, 18 nt, Human
gagcaucaugccucugag

SEQ ID NO: 3751413 - RNA, 23 nt, Human
gagcaucaugccucugaggccag

SEQ ID NO: 3751414 - RNA, 14 nt, Human
gagcauccaccucc

SEQ ID NO: 3751415 - RNA, 13 nt, Human
gagcaucccggag

SEQ ID NO: 3751416 - RNA, 14 nt, Human
gagcauccugagcc

SEQ ID NO: 3751417 - RNA, 20 nt, Human
gagcaucggccuagggcccc

SEQ ID NO: 3751418 - RNA, 19 nt, Human
gagcaucucuugaggccag

SEQ ID NO: 3751419 - RNA, 14 nt, Human
gagcauggagcugg

SEQ ID NO: 3751420 - RNA, 17 nt, Human
gagcauggguucauccu

SEQ ID NO: 3751421 - RNA, 20 nt, Human
gagcauguuuuguauacaaa

SEQ ID NO: 3751422 - RNA, 21 nt, Human
gagcauuacgugagccaggua

SEQ ID NO: 3751423 - RNA, 22 nt, Human
gagcauuauaaucaccagggcc

SEQ ID NO: 3751424 - RNA, 13 nt, Human
gagcauuccaguc

SEQ ID NO: 3751425 - RNA, 15 nt, Human
gagcauuucucauca

SEQ ID NO: 3751426 - RNA, 19 nt, Human
gagcauuucucaucaguag

SEQ ID NO: 3751427 - RNA, 21 nt, Human
gagccaagaucgcgccacugc

SEQ ID NO: 3751428 - RNA, 22 nt, Human
gagccaauggaguagaccccug

SEQ ID NO: 3751429 - RNA, 14 nt, Human
gagccacaguggga

SEQ ID NO: 3751430 - RNA, 14 nt, Human
gagccaccaguucu

SEQ ID NO: 3751431 - RNA, 12 nt, Human
gagccaccucac

SEQ ID NO: 3751432 - RNA, 19 nt, Human
gagccaccugucccaccuc

SEQ ID NO: 3751433 - RNA, 12 nt, Human
gagccacucugu

SEQ ID NO: 3751434 - RNA, 18 nt, Human
gagccacugcaccgggcc

SEQ ID NO: 3751435 - RNA, 17 nt, Human
gagccagagaagugaca

SEQ ID NO: 3751436 - RNA, 18 nt, Human
gagccagagaagugacag

SEQ ID NO: 3751437 - RNA, 20 nt, Human
gagccagagaagugacaggg

SEQ ID NO: 3751438 - RNA, 19 nt, Human
gagccagauuucacucucc

SEQ ID NO: 3751439 - RNA, 20 nt, Human
gagccagauuucacucuccu

SEQ ID NO: 3751440 - RNA, 15 nt, Human
gagccagcagacauu

SEQ ID NO: 3751441 - RNA, 17 nt, Human
gagccagcagacauugu

SEQ ID NO: 3751442 - RNA, 23 nt, Human
gagccagcagacauugucagcaa

SEQ ID NO: 3751443 - RNA, 15 nt, Human
gagccagccacacuu

SEQ ID NO: 3751444 - RNA, 14 nt, Human
gagccagcccuccc

SEQ ID NO: 3751445 - RNA, 21 nt, Human
gagccagcccucccuguccuc

SEQ ID NO: 3751446 - RNA, 21 nt, Human
gagccagccgagcaggaggcc

SEQ ID NO: 3751447 - RNA, 22 nt, Human
gagccagcuaagggguggggcu

SEQ ID NO: 3751448 - RNA, 20 nt, Human
gagccaggaagaucccccag

SEQ ID NO: 3751449 - RNA, 13 nt, Human
gagccaggagaag

SEQ ID NO: 3751450 - RNA, 14 nt, Human
gagccaggagaagc

SEQ ID NO: 3751451 - RNA, 17 nt, Human
gagccaggagaagcuca

SEQ ID NO: 3751452 - RNA, 21 nt, Human
gagccaggagaagcucagcug

SEQ ID NO: 3751453 - RNA, 13 nt, Human
gagccaggcacac

SEQ ID NO: 3751454 - RNA, 22 nt, Human
gagccaggccugggucuguguc

SEQ ID NO: 3751455 - RNA, 22 nt, Human
gagccaggcuagcuggagccug

SEQ ID NO: 3751456 - RNA, 18 nt, Human
gagccagguaaugaggga

SEQ ID NO: 3751457 - RNA, 23 nt, Human
gagccaguucaguaccuggagga

SEQ ID NO: 3751458 - RNA, 14 nt, Human
gagccaugcuggga

SEQ ID NO: 3751459 - RNA, 21 nt, Human
gagccauguagaagcugcauc

SEQ ID NO: 3751460 - RNA, 18 nt, Human
gagccaugucuucucccu

SEQ ID NO: 3751461 - RNA, 13 nt, Human
gagccauuugaga

SEQ ID NO: 3751462 - RNA, 16 nt, Human
gagccauuugucccaa

SEQ ID NO: 3751463 - RNA, 18 nt, Human
gagccauuugucccaagu

SEQ ID NO: 3751464 - RNA, 21 nt, Human
gagccauuuuggggggccccc

SEQ ID NO: 3751465 - RNA, 23 nt, Human
gagccauuuuggggggccccccu

SEQ ID NO: 3751466 - RNA, 21 nt, Human
gagccauuuugugaauggauu

SEQ ID NO: 3751467 - RNA, 17 nt, Human
gagcccaccuuggcuca

SEQ ID NO: 3751468 - RNA, 12 nt, Human
gagcccacgccc

SEQ ID NO: 3751469 - RNA, 16 nt, Human
gagcccacgcccccac

SEQ ID NO: 3751470 - RNA, 14 nt, Human
gagcccacuccauc

SEQ ID NO: 3751471 - RNA, 23 nt, Human
gagcccacugcccacccccucaa

SEQ ID NO: 3751472 - RNA, 11 nt, Human
gagcccacugu

SEQ ID NO: 3751473 - RNA, 23 nt, Human
gagcccacuguacuugcucuuga

SEQ ID NO: 3751474 - RNA, 16 nt, Human
gagcccagagaacagc

SEQ ID NO: 3751475 - RNA, 23 nt, Human
gagcccagagguaacagaacagc

SEQ ID NO: 3751476 - RNA, 18 nt, Human
gagcccagagucccccca

SEQ ID NO: 3751477 - RNA, 22 nt, Human
gagcccagccauuaccauggag

SEQ ID NO: 3751478 - RNA, 12 nt, Human
gagcccagcucc

SEQ ID NO: 3751479 - RNA, 14 nt, Human
gagcccagcuccaa

SEQ ID NO: 3751480 - RNA, 14 nt, Human
gagcccagcucuga

SEQ ID NO: 3751481 - RNA, 13 nt, Human
gagcccagcuggg

SEQ ID NO: 3751482 - RNA, 19 nt, Human
gagcccagcugggucaggc

SEQ ID NO: 3751483 - RNA, 12 nt, Human
gagcccaggagc

SEQ ID NO: 3751484 - RNA, 13 nt, Human
gagcccaggagcu

SEQ ID NO: 3751485 - RNA, 17 nt, Human
gagcccaggagcucccc

SEQ ID NO: 3751486 - RNA, 18 nt, Human
gagcccaggccaggacuc

SEQ ID NO: 3751487 - RNA, 12 nt, Human
gagcccaggccu

SEQ ID NO: 3751488 - RNA, 13 nt, Human
gagcccaggcggg

SEQ ID NO: 3751489 - RNA, 17 nt, Human
gagcccagggaggccga

SEQ ID NO: 3751490 - RNA, 20 nt, Human
gagcccagggaggccgaagc

SEQ ID NO: 3751491 - RNA, 16 nt, Human
gagcccauacucagcc

SEQ ID NO: 3751492 - RNA, 18 nt, Human
gagcccauacucagccug

SEQ ID NO: 3751493 - RNA, 22 nt, Human
gagcccauacucagccugcugc

SEQ ID NO: 3751494 - RNA, 11 nt, Human
gagccccaagu

SEQ ID NO: 3751495 - RNA, 13 nt, Human
gagccccaagucc

SEQ ID NO: 3751496 - RNA, 15 nt, Human
gagccccaaguccug

SEQ ID NO: 3751497 - RNA, 14 nt, Human
gagccccacacgga

SEQ ID NO: 3751498 - RNA, 12 nt, Human
gagccccacacu

SEQ ID NO: 3751499 - RNA, 12 nt, Human
gagccccacagc

SEQ ID NO: 3751500 - RNA, 13 nt, Human
gagccccacagcc

SEQ ID NO: 3751501 - RNA, 20 nt, Human
gagccccacagccccaucug

SEQ ID NO: 3751502 - RNA, 14 nt, Human
gagccccacucuca

SEQ ID NO: 3751503 - RNA, 14 nt, Human
gagccccacugccc

SEQ ID NO: 3751504 - RNA, 15 nt, Human
gagccccacugcccu

SEQ ID NO: 3751505 - RNA, 12 nt, Human
gagccccagccc

SEQ ID NO: 3751506 - RNA, 13 nt, Human
gagccccagcccc

SEQ ID NO: 3751507 - RNA, 17 nt, Human
gagccccaggccucugu

SEQ ID NO: 3751508 - RNA, 13 nt, Human
gagccccaggguc

SEQ ID NO: 3751509 - RNA, 12 nt, Human
gagccccagugc

SEQ ID NO: 3751510 - RNA, 14 nt, Human
gagccccagugcca

SEQ ID NO: 3751511 - RNA, 12 nt, Human
gagccccaucug

SEQ ID NO: 3751512 - RNA, 13 nt, Human
gagccccaucuuc

SEQ ID NO: 3751513 - RNA, 23 nt, Human
gagcccccacccuguuccugcug

SEQ ID NO: 3751514 - RNA, 13 nt, Human
gagcccccagccu

SEQ ID NO: 3751515 - RNA, 15 nt, Human
gagcccccagccugu

SEQ ID NO: 3751516 - RNA, 14 nt, Human
gagcagccuguggc

SEQ ID NO: 3751517 - RNA, 17 nt, Human
gagcagcgagccugcua

SEQ ID NO: 3751518 - RNA, 15 nt, Human
gagcagcugagcagg

SEQ ID NO: 3751519 - RNA, 16 nt, Human
gagcagcugagcaggg

SEQ ID NO: 3751520 - RNA, 20 nt, Human
gagcagcugagcagggccgg

SEQ ID NO: 3751521 - RNA, 15 nt, Human
gagcagcuucaguug

SEQ ID NO: 3751522 - RNA, 16 nt, Human
gagcagcuucugccac

SEQ ID NO: 3751523 - RNA, 18 nt, Human
gagcagcuuuaaacucag

SEQ ID NO: 3751524 - RNA, 21 nt, Human
gagcagcuuuaaacucaggga

SEQ ID NO: 3751525 - RNA, 22 nt, Human
gagcagcuuuaaacucagggac

SEQ ID NO: 3751526 - RNA, 23 nt, Human
gagcagcuuuaaacucagggaca

SEQ ID NO: 3751527 - RNA, 18 nt, Human
gagcaggaaggccugggu

SEQ ID NO: 3751528 - RNA, 14 nt, Human
gagcaggaauggga

SEQ ID NO: 3751529 - RNA, 20 nt, Human
gagcaggacugaugucuccu

SEQ ID NO: 3751530 - RNA, 20 nt, Human
gagcaggagauugagaagga

SEQ ID NO: 3751531 - RNA, 22 nt, Human
gagcaggagauugagaaggaga

SEQ ID NO: 3751532 - RNA, 23 nt, Human
gagcaggagauugagaaggagag

SEQ ID NO: 3751533 - RNA, 17 nt, Human
gagcaggaggccccugg

SEQ ID NO: 3751534 - RNA, 11 nt, Human
gagcaggcagc

SEQ ID NO: 3751535 - RNA, 17 nt, Human
gagcaggcagccagcau

SEQ ID NO: 3751536 - RNA, 18 nt, Human
gagcaggcgguggggaga

SEQ ID NO: 3751537 - RNA, 20 nt, Human
gagcagggauuaaccucugc

SEQ ID NO: 3751538 - RNA, 15 nt, Human
gagcagggccgggga

SEQ ID NO: 3751539 - RNA, 21 nt, Human
gagcagggcucagcggggaca

SEQ ID NO: 3751540 - RNA, 16 nt, Human
gagcaggguguuggga

SEQ ID NO: 3751541 - RNA, 16 nt, Human
gagcaguaucaugaag

SEQ ID NO: 3751542 - RNA, 15 nt, Human
gagcagugcaggcac

SEQ ID NO: 3751543 - RNA, 13 nt, Human
gagcagugcuuuu

SEQ ID NO: 3751544 - RNA, 21 nt, Human
gagcagugggaggguaccagc

SEQ ID NO: 3751545 - RNA, 15 nt, Human
gagcagugggccugg

SEQ ID NO: 3751546 - RNA, 23 nt, Human
gagcagugugucuccugcaugca

SEQ ID NO: 3751547 - RNA, 16 nt, Human
gagcauaguccaaaaa

SEQ ID NO: 3751548 - RNA, 16 nt, Human
gagcaucaugccucug

SEQ ID NO: 3751549 - RNA, 19 nt, Human
gagcaucaugccucugagg

SEQ ID NO: 3751550 - RNA, 17 nt, Human
gagcauccaccuccuuc

SEQ ID NO: 3751551 - RNA, 18 nt, Human
gagcauccaccuccuucu

SEQ ID NO: 3751552 - RNA, 19 nt, Human
gagcaucccccaaaguuca

SEQ ID NO: 3751553 - RNA, 20 nt, Human
gagcaucccggaggaaaucu

SEQ ID NO: 3751554 - RNA, 16 nt, Human
gagcauccugagcccc

SEQ ID NO: 3751555 - RNA, 18 nt, Human
gagcauccugagccccgc

SEQ ID NO: 3751556 - RNA, 22 nt, Human
gagcauccugagccccgcccuc

SEQ ID NO: 3751557 - RNA, 22 nt, Human
gagcaucucuugaggccaggag

SEQ ID NO: 3751558 - RNA, 13 nt, Human
gagcaucugacuc

SEQ ID NO: 3751559 - RNA, 17 nt, Human
gagcaugacagccugca

SEQ ID NO: 3751560 - RNA, 23 nt, Human
gagcaugagaggaggcagcagga

SEQ ID NO: 3751561 - RNA, 15 nt, Human
gagcaugggccuggc

SEQ ID NO: 3751562 - RNA, 22 nt, Human
gagcaugguacuuggccuuugg

SEQ ID NO: 3751563 - RNA, 19 nt, Human
gagcauguaaaagcggaaa

SEQ ID NO: 3751564 - RNA, 22 nt, Human
gagcauguacugagccuuguaa

SEQ ID NO: 3751565 - RNA, 15 nt, Human
gagcaugucguggac

SEQ ID NO: 3751566 - RNA, 15 nt, Human
gagcauuacaggcaa

SEQ ID NO: 3751567 - RNA, 16 nt, Human
gagcauuacaggcaag

SEQ ID NO: 3751568 - RNA, 18 nt, Human
gagcauuacgugagccag

SEQ ID NO: 3751569 - RNA, 23 nt, Human
gagcauuauaaucaccagggcca

SEQ ID NO: 3751570 - RNA, 17 nt, Human
gagcauugccauucccu

SEQ ID NO: 3751571 - RNA, 15 nt, Human
gagcauuggcugaga

SEQ ID NO: 3751572 - RNA, 21 nt, Human
gagcauuggggauguuuuucu

SEQ ID NO: 3751573 - RNA, 14 nt, Human
gagccaaagagaau

SEQ ID NO: 3751574 - RNA, 15 nt, Human
gagccaacugcugcu

SEQ ID NO: 3751575 - RNA, 18 nt, Human
gagccaagggauggacau

SEQ ID NO: 3751576 - RNA, 19 nt, Human
gagccaagggauggacauc

SEQ ID NO: 3751577 - RNA, 19 nt, Human
gagccaaggguucagagac

SEQ ID NO: 3751578 - RNA, 18 nt, Human
gagccacacaugggcauc

SEQ ID NO: 3751579 - RNA, 16 nt, Human
gagccacagcagcauu

SEQ ID NO: 3751580 - RNA, 12 nt, Human
gagccaccaguu

SEQ ID NO: 3751581 - RNA, 13 nt, Human
gagccaccaguuc

SEQ ID NO: 3751582 - RNA, 20 nt, Human
gagccaccugucccaccuca

SEQ ID NO: 3751583 - RNA, 14 nt, Human
gagccacuccucug

SEQ ID NO: 3751584 - RNA, 15 nt, Human
gagccacuccucuga

SEQ ID NO: 3751585 - RNA, 18 nt, Human
gagccacucucuucccuu

SEQ ID NO: 3751586 - RNA, 19 nt, Human
gagccacugcaccgggcca

SEQ ID NO: 3751587 - RNA, 22 nt, Human
gagccacugcaccgggccacag

SEQ ID NO: 3751588 - RNA, 12 nt, Human
gagccagagaag

SEQ ID NO: 3751589 - RNA, 13 nt, Human
gagccagagaagu

SEQ ID NO: 3751590 - RNA, 14 nt, Human
gagccagagaagug

SEQ ID NO: 3751591 - RNA, 16 nt, Human
gagccagagaagugac

SEQ ID NO: 3751592 - RNA, 22 nt, Human
gagccagagaagugacagggaa

SEQ ID NO: 3751593 - RNA, 15 nt, Human
gagccagauggcaag

SEQ ID NO: 3751594 - RNA, 20 nt, Human
gagccagcagacauugucag

SEQ ID NO: 3751595 - RNA, 21 nt, Human
gagccagcagccuggcucucc

SEQ ID NO: 3751596 - RNA, 20 nt, Human
gagccagcccucccuguccu

SEQ ID NO: 3751597 - RNA, 14 nt, Human
gagccagccgagca

SEQ ID NO: 3751598 - RNA, 20 nt, Human
gagccagccgagcaggaggc

SEQ ID NO: 3751599 - RNA, 21 nt, Human
gagccagcuaagggguggggc

SEQ ID NO: 3751600 - RNA, 13 nt, Human
gagccagcucccu

SEQ ID NO: 3751601 - RNA, 21 nt, Human
gagccaggaagaucccccaga

SEQ ID NO: 3751602 - RNA, 12 nt, Human
gagccaggaggg

SEQ ID NO: 3751603 - RNA, 12 nt, Human
gagccagggucu

SEQ ID NO: 3751604 - RNA, 19 nt, Human
gagccagggucucacuaug

SEQ ID NO: 3751605 - RNA, 13 nt, Human
gagccagucccag

SEQ ID NO: 3751606 - RNA, 15 nt, Human
gagccagucccaggg

SEQ ID NO: 3751607 - RNA, 17 nt, Human
gagccaguuugccggau

SEQ ID NO: 3751608 - RNA, 17 nt, Human
gagccaugggcacaaag

SEQ ID NO: 3751609 - RNA, 12 nt, Human
gagccauguuuc

SEQ ID NO: 3751610 - RNA, 17 nt, Human
gagccauuugucccaag

SEQ ID NO: 3751611 - RNA, 22 nt, Human
gagccauuugucccaagugcca

SEQ ID NO: 3751612 - RNA, 23 nt, Human
gagccauuugucccaagugccaa

SEQ ID NO: 3751613 - RNA, 16 nt, Human
gagccauuuugugaau

SEQ ID NO: 3751614 - RNA, 13 nt, Human
gagcccaccuugg

SEQ ID NO: 3751615 - RNA, 22 nt, Human
gagcccacggcuaagaggcugc

SEQ ID NO: 3751616 - RNA, 20 nt, Human
gagcccacugcccacccccu

SEQ ID NO: 3751617 - RNA, 18 nt, Human
gagcccacuguacuugcu

SEQ ID NO: 3751618 - RNA, 21 nt, Human
gagcccacuguacuugcucuu

SEQ ID NO: 3751619 - RNA, 14 nt, Human
gagcccagaggagg

SEQ ID NO: 3751620 - RNA, 16 nt, Human
gagcccagaguccccc

SEQ ID NO: 3751621 - RNA, 18 nt, Human
gagcccagcccuccccau

SEQ ID NO: 3751622 - RNA, 18 nt, Human
gagcccagcccuguucug

SEQ ID NO: 3751623 - RNA, 21 nt, Human
gagcccaggagcuccccuccc

SEQ ID NO: 3751624 - RNA, 12 nt, Human
gagcccaggagu

SEQ ID NO: 3751625 - RNA, 13 nt, Human
gagcccaggccag

SEQ ID NO: 3751626 - RNA, 21 nt, Human
gagcccaggccaggacucugc

SEQ ID NO: 3751627 - RNA, 23 nt, Human
gagcccaggccaggacucugcag

SEQ ID NO: 3751628 - RNA, 24 nt, Human
gagcccaggccaggacucugcagc

SEQ ID NO: 3751629 - RNA, 11 nt, Human
gagcccaggcu

SEQ ID NO: 3751630 - RNA, 12 nt, Human
gagcccaggcuc

SEQ ID NO: 3751631 - RNA, 11 nt, Human
gagcccaggga

SEQ ID NO: 3751632 - RNA, 15 nt, Human
gagcccagggaggcc

SEQ ID NO: 3751633 - RNA, 19 nt, Human
gagcccauacucagccugc

SEQ ID NO: 3751634 - RNA, 18 nt, Human
gagcccauguucugcccc

SEQ ID NO: 3751635 - RNA, 21 nt, Human
gagcccauguucugcccccag

SEQ ID NO: 3751636 - RNA, 16 nt, Human
gagccccacacggagg

SEQ ID NO: 3751637 - RNA, 22 nt, Human
gagccccacacuggggugccgc

SEQ ID NO: 3751638 - RNA, 17 nt, Human
gagccccacccucagau

SEQ ID NO: 3751639 - RNA, 20 nt, Human
gagccccacucucagaggcc

SEQ ID NO: 3751640 - RNA, 21 nt, Human
gagccccacucucagaggccc

SEQ ID NO: 3751641 - RNA, 22 nt, Human
gagccccacucucagaggcccc

SEQ ID NO: 3751642 - RNA, 19 nt, Human
gagccccacugcccuucuc

SEQ ID NO: 3751643 - RNA, 13 nt, Human
gagccccagcuga

SEQ ID NO: 3751644 - RNA, 14 nt, Human
gagccccagggucu

SEQ ID NO: 3751645 - RNA, 19 nt, Human
gagccccagggucuucccu

SEQ ID NO: 3751646 - RNA, 19 nt, Human
gagccccagggugcccaga

SEQ ID NO: 3751647 - RNA, 17 nt, Human
gagccccagugccaagc

SEQ ID NO: 3751648 - RNA, 18 nt, Human
gagccccaucuucaccca

SEQ ID NO: 3751649 - RNA, 16 nt, Human
gagccccauuccuggg

SEQ ID NO: 3751650 - RNA, 17 nt, Human
gagccccauuccuggga

SEQ ID NO: 3751651 - RNA, 14 nt, Human
gagcccccagccug

SEQ ID NO: 3751652 - RNA, 17 nt, Human
gagcccccgccccgccc

SEQ ID NO: 3751653 - RNA, 14 nt, Human
gagccccgaggccu

SEQ ID NO: 3751654 - RNA, 17 nt, Human
gagccccgaggccuucu

SEQ ID NO: 3751655 - RNA, 22 nt, Human
gagccccgcagaccuccccagc

SEQ ID NO: 3751656 - RNA, 13 nt, Human
gagccccgcccuc

SEQ ID NO: 3751657 - RNA, 14 nt, Human
gagccccgcccucu

SEQ ID NO: 3751658 - RNA, 20 nt, Human
gagccccgcccucuuccuga

SEQ ID NO: 3751659 - RNA, 17 nt, Human
gagccccuaccccacac

SEQ ID NO: 3751660 - RNA, 20 nt, Human
gagccccuaccccacaccag

SEQ ID NO: 3751661 - RNA, 20 nt, Human
gagccccuccuccagccccu

SEQ ID NO: 3751662 - RNA, 22 nt, Human
gagccccuccuccagccccugu

SEQ ID NO: 3751663 - RNA, 11 nt, Human
gagccccuucc

SEQ ID NO: 3751664 - RNA, 21 nt, Human
gagccccuuccuugcucugca

SEQ ID NO: 3751665 - RNA, 16 nt, Human
gagcccccagccuguc

SEQ ID NO: 3751666 - RNA, 17 nt, Human
gagcccccagccuguca

SEQ ID NO: 3751667 - RNA, 18 nt, Human
gagcccccagccugucag

SEQ ID NO: 3751668 - RNA, 17 nt, Human
gagcccccagcuuccag

SEQ ID NO: 3751669 - RNA, 22 nt, Human
gagcccccagcuuccagcagga

SEQ ID NO: 3751670 - RNA, 22 nt, Human
gagcccccccaacacugugccc

SEQ ID NO: 3751671 - RNA, 17 nt, Human
gagccccgcccucuucc

SEQ ID NO: 3751672 - RNA, 12 nt, Human
gagccccuccua

SEQ ID NO: 3751673 - RNA, 15 nt, Human
gagccccuccuccag

SEQ ID NO: 3751674 - RNA, 21 nt, Human
gagccccuccuccagccccug

SEQ ID NO: 3751675 - RNA, 13 nt, Human
gagccccugggug

SEQ ID NO: 3751676 - RNA, 14 nt, Human
gagccccugggugg

SEQ ID NO: 3751677 - RNA, 12 nt, Human
gagccccugguc

SEQ ID NO: 3751678 - RNA, 14 nt, Human
gagccccugguccu

SEQ ID NO: 3751679 - RNA, 20 nt, Human
gagccccugucuagagaggg

SEQ ID NO: 3751680 - RNA, 17 nt, Human
gagcccgcacccccacc

SEQ ID NO: 3751681 - RNA, 19 nt, Human
gagcccgcacccccacccu

SEQ ID NO: 3751682 - RNA, 17 nt, Human
gagcccggaugcuucuc

SEQ ID NO: 3751683 - RNA, 16 nt, Human
gagcccuaaccccuuc

SEQ ID NO: 3751684 - RNA, 18 nt, Human
gagcccuaaccccuucca

SEQ ID NO: 3751685 - RNA, 21 nt, Human
gagcccuaaccccuuccagau

SEQ ID NO: 3751686 - RNA, 19 nt, Human
gagcccuacucccugcaga

SEQ ID NO: 3751687 - RNA, 15 nt, Human
gagcccucaaaguga

SEQ ID NO: 3751688 - RNA, 13 nt, Human
gagcccuccccag

SEQ ID NO: 3751689 - RNA, 14 nt, Human
gagcccuccccagg

SEQ ID NO: 3751690 - RNA, 18 nt, Human
gagcccuccgccuucaca

SEQ ID NO: 3751691 - RNA, 23 nt, Human
gagcccuggcaggaugacccugc

SEQ ID NO: 3751692 - RNA, 12 nt, Human
gagcccugggag

SEQ ID NO: 3751693 - RNA, 17 nt, Human
gagcccugggaggcucu

SEQ ID NO: 3751694 - RNA, 18 nt, Human
gagcccugggaggcucug

SEQ ID NO: 3751695 - RNA, 19 nt, Human
gagcccugggaggcucugg

SEQ ID NO: 3751696 - RNA, 13 nt, Human
gagcccugguggc

SEQ ID NO: 3751697 - RNA, 14 nt, Human
gagcccugguggca

SEQ ID NO: 3751698 - RNA, 15 nt, Human
gagcccugguggcag

SEQ ID NO: 3751699 - RNA, 16 nt, Human
gagcccugguggcagu

SEQ ID NO: 3751700 - RNA, 18 nt, Human
gagcccuugcccaugcug

SEQ ID NO: 3751701 - RNA, 16 nt, Human
gagcccuugccucccc

SEQ ID NO: 3751702 - RNA, 14 nt, Human
gagccgaagcccag

SEQ ID NO: 3751703 - RNA, 15 nt, Human
gagccgaagcccagg

SEQ ID NO: 3751704 - RNA, 22 nt, Human
gagccgagaucacgccacugca

SEQ ID NO: 3751705 - RNA, 13 nt, Human
gagccgcccaagg

SEQ ID NO: 3751706 - RNA, 19 nt, Human
gagccgcugugagccccug

SEQ ID NO: 3751707 - RNA, 22 nt, Human
gagccgggaaagaagagccgga

SEQ ID NO: 3751708 - RNA, 21 nt, Human
gagccgggcacauugagcugu

SEQ ID NO: 3751709 - RNA, 16 nt, Human
gagccgggccccuggg

SEQ ID NO: 3751710 - RNA, 14 nt, Human
gagccgggccuggg

SEQ ID NO: 3751711 - RNA, 19 nt, Human
gagccggggaguuucuuuc

SEQ ID NO: 3751712 - RNA, 20 nt, Human
gagccggggugggguggcug

SEQ ID NO: 3751713 - RNA, 22 nt, Human
gagccggggugggguggcugca

SEQ ID NO: 3751714 - RNA, 17 nt, Human
gagccgggucugccucu

SEQ ID NO: 3751715 - RNA, 20 nt, Human
gagccggguggaucgccuga

SEQ ID NO: 3751716 - RNA, 21 nt, Human
gagccgguaacuguccugucc

SEQ ID NO: 3751717 - RNA, 22 nt, Human
gagccgguaacuguccuguccu

SEQ ID NO: 3751718 - RNA, 16 nt, Human
gagccguggucccuga

SEQ ID NO: 3751719 - RNA, 13 nt, Human
gagccgugguccu

SEQ ID NO: 3751720 - RNA, 17 nt, Human
gagccgugguccuuugg

SEQ ID NO: 3751721 - RNA, 15 nt, Human
gagccuaaaaauaaa

SEQ ID NO: 3751722 - RNA, 15 nt, Human
gagccuagaagcugg

SEQ ID NO: 3751723 - RNA, 15 nt, Human
gagccucacagcagu

SEQ ID NO: 3751724 - RNA, 17 nt, Human
gagccucccaaggagaa

SEQ ID NO: 3751725 - RNA, 12 nt, Human
gagccucccugc

SEQ ID NO: 3751726 - RNA, 13 nt, Human
gagccucccugcc

SEQ ID NO: 3751727 - RNA, 15 nt, Human
gagccuccugcccag

SEQ ID NO: 3751728 - RNA, 19 nt, Human
gagccucgcaacccgugcc

SEQ ID NO: 3751729 - RNA, 16 nt, Human
gagccugacagccaga

SEQ ID NO: 3751730 - RNA, 15 nt, Human
gagccugagucaggg

SEQ ID NO: 3751731 - RNA, 16 nt, Human
gagccugagucagggc

SEQ ID NO: 3751732 - RNA, 15 nt, Human
gagccugaucucuuc

SEQ ID NO: 3751733 - RNA, 16 nt, Human
gagccugaucucuucc

SEQ ID NO: 3751734 - RNA, 18 nt, Human
gagccugaucucuuccug

SEQ ID NO: 3751735 - RNA, 21 nt, Human
gagccugcaaacucacugcuc

SEQ ID NO: 3751736 - RNA, 15 nt, Human
gagccugcagagcug

SEQ ID NO: 3751737 - RNA, 15 nt, Human
gagccugcaggaucu

SEQ ID NO: 3751738 - RNA, 16 nt, Human
gagccugcaggguggu

SEQ ID NO: 3751739 - RNA, 22 nt, Human
gagccugcaggguggugcuggg

SEQ ID NO: 3751740 - RNA, 18 nt, Human
gagccugcaggugcugcu

SEQ ID NO: 3751741 - RNA, 15 nt, Human
gagccugcaguuauu

SEQ ID NO: 3751742 - RNA, 23 nt, Human
gagccugcauuuccucgcagccu

SEQ ID NO: 3751743 - RNA, 17 nt, Human
gagccugccccagcgcu

SEQ ID NO: 3751744 - RNA, 18 nt, Human
gagccugccccagcgcug

SEQ ID NO: 3751745 - RNA, 15 nt, Human
gagccugccgagcaa

SEQ ID NO: 3751746 - RNA, 16 nt, Human
gagccugccgagcaac

SEQ ID NO: 3751747 - RNA, 21 nt, Human
gagccugccgagcaaccgugg

SEQ ID NO: 3751748 - RNA, 14 nt, Human
gagccugccuggag

SEQ ID NO: 3751749 - RNA, 19 nt, Human
gagccugcggccugcugga

SEQ ID NO: 3751750 - RNA, 11 nt, Human
gagccugcugg

SEQ ID NO: 3751751 - RNA, 12 nt, Human
gagccugcuggc

SEQ ID NO: 3751752 - RNA, 14 nt, Human
gagccuggagaagc

SEQ ID NO: 3751753 - RNA, 18 nt, Human
gagccuggcacaggacug

SEQ ID NO: 3751754 - RNA, 18 nt, Human
gagccuggcccauagaaa

SEQ ID NO: 3751755 - RNA, 12 nt, Human
gagccuggcucu

SEQ ID NO: 3751756 - RNA, 21 nt, Human
gagccugggauuucuaugcag

SEQ ID NO: 3751757 - RNA, 11 nt, Human
gagccuggggc

SEQ ID NO: 3751758 - RNA, 14 nt, Human
gagccuggugcccu

SEQ ID NO: 3751759 - RNA, 16 nt, Human
gagccuggugcugcug

SEQ ID NO: 3751760 - RNA, 17 nt, Human
gagccuggugcugcugc

SEQ ID NO: 3751761 - RNA, 12 nt, Human
gagccuguccug

SEQ ID NO: 3751762 - RNA, 21 nt, Human
gagccuguccugccuguggcc

SEQ ID NO: 3751763 - RNA, 16 nt, Human
gagccugugaacccag

SEQ ID NO: 3751764 - RNA, 17 nt, Human
gagccugugaacccagg

SEQ ID NO: 3751765 - RNA, 19 nt, Human
gagccugugaacccaggac

SEQ ID NO: 3751766 - RNA, 20 nt, Human
gagccugugaacccaggaca

SEQ ID NO: 3751767 - RNA, 21 nt, Human
gagccugugaacccaggacaa

SEQ ID NO: 3751768 - RNA, 23 nt, Human
gagccugugaacccaggacaagc

SEQ ID NO: 3751769 - RNA, 13 nt, Human
gagccuguguaac

SEQ ID NO: 3751770 - RNA, 17 nt, Human
gagccuguguaacagcu

SEQ ID NO: 3751771 - RNA, 17 nt, Human
gagccuucagccuuaau

SEQ ID NO: 3751772 - RNA, 15 nt, Human
gagccuuccacccag

SEQ ID NO: 3751773 - RNA, 12 nt, Human
gagccuuccagg

SEQ ID NO: 3751774 - RNA, 14 nt, Human
gagccuuccagggg

SEQ ID NO: 3751775 - RNA, 15 nt, Human
gagccuuccaggggu

SEQ ID NO: 3751776 - RNA, 16 nt, Human
gagccuuccaggggug

SEQ ID NO: 3751777 - RNA, 20 nt, Human
gagccuuccaggggugggac

SEQ ID NO: 3751778 - RNA, 13 nt, Human
gagccuucucaga

SEQ ID NO: 3751779 - RNA, 13 nt, Human
gagccuugaacuu

SEQ ID NO: 3751780 - RNA, 20 nt, Human
gagccuugguguccaccugg

SEQ ID NO: 3751781 - RNA, 18 nt, Human
gagccuugguucaucagu

SEQ ID NO: 3751782 - RNA, 18 nt, Human
gagccuuugguucuggcc

SEQ ID NO: 3751783 - RNA, 20 nt, Human
gagccuuuuuaaaacacaug

SEQ ID NO: 3751784 - RNA, 21 nt, Human
gagcgaggagaugcuccuugg

SEQ ID NO: 3751785 - RNA, 12 nt, Human
gagcgcaagaua

SEQ ID NO: 3751786 - RNA, 21 nt, Human
gagcgcacagggagugcacau

SEQ ID NO: 3751787 - RNA, 20 nt, Human
gagcgcaccugcccccuggu

SEQ ID NO: 3751788 - RNA, 15 nt, Human
gagcgcauggcaagu

SEQ ID NO: 3751789 - RNA, 12 nt, Human
gagcgccccucc

SEQ ID NO: 3751790 - RNA, 12 nt, Human
gagcgcccugca

SEQ ID NO: 3751791 - RNA, 16 nt, Human
gagcgcccugcagacc

SEQ ID NO: 3751792 - RNA, 22 nt, Human
gagcgcccugcagacccugccc

SEQ ID NO: 3751793 - RNA, 23 nt, Human
gagcgcccugcagacccugcccu

SEQ ID NO: 3751794 - RNA, 23 nt, Human
gagcgccuccauccaaggccagg

SEQ ID NO: 3751795 - RNA, 13 nt, Human
gagcgccugcccc

SEQ ID NO: 3751796 - RNA, 15 nt, Human
gagcgccugccccuc

SEQ ID NO: 3751797 - RNA, 16 nt, Human
gagcgccugccccucc

SEQ ID NO: 3751798 - RNA, 18 nt, Human
gagcgccugccccuccca

SEQ ID NO: 3751799 - RNA, 14 nt, Human
gagcggaaagcagc

SEQ ID NO: 3751800 - RNA, 17 nt, Human
gagcggaaagcagcuca

SEQ ID NO: 3751801 - RNA, 18 nt, Human
gagcggagaaaggaaggg

SEQ ID NO: 3751802 - RNA, 16 nt, Human
gagcggauugcaaagc

SEQ ID NO: 3751803 - RNA, 18 nt, Human
gagcggauugcaaagcaa

SEQ ID NO: 3751804 - RNA, 14 nt, Human
gagcgggaccugug

SEQ ID NO: 3751805 - RNA, 16 nt, Human
gagcgggaccuguggc

SEQ ID NO: 3751806 - RNA, 14 nt, Human
gagcgggaggcaga

SEQ ID NO: 3751807 - RNA, 15 nt, Human
gagcgggaggcagag

SEQ ID NO: 3751808 - RNA, 17 nt, Human
gagcgggucugcuccca

SEQ ID NO: 3751809 - RNA, 23 nt, Human
gagcggucucaggcuggugggag

SEQ ID NO: 3751810 - RNA, 14 nt, Human
gagcgguggcccug

SEQ ID NO: 3751811 - RNA, 17 nt, Human
gagcgugagcugagcag

SEQ ID NO: 3751812 - RNA, 22 nt, Human
gagcguggacugguugguuuug

SEQ ID NO: 3751813 - RNA, 22 nt, Human
gagcgugggaggcgggagugga

SEQ ID NO: 3751814 - RNA, 20 nt, Human
gagcguuagacugacuuguu

SEQ ID NO: 3751815 - RNA, 18 nt, Human
gagcuaaacuccuuccug

SEQ ID NO: 3751816 - RNA, 18 nt, Human
cuccuugggcccuuugag

SEQ ID NO: 3751817 - RNA, 15 nt, Human
cuccuuggugccugg

SEQ ID NO: 3751818 - RNA, 22 nt, Human
cuccuuggugccuggccuggca

SEQ ID NO: 3751819 - RNA, 21 nt, Human
cuccuugguucuugaggggac

SEQ ID NO: 3751820 - RNA, 18 nt, Human
cuccuuguggccugggcc

SEQ ID NO: 3751821 - RNA, 17 nt, Human
cuccuugugguuuaugu

SEQ ID NO: 3751822 - RNA, 13 nt, Human
cuccuuguuccua

SEQ ID NO: 3751823 - RNA, 17 nt, Human
cuccuuuaagagcucug

SEQ ID NO: 3751824 - RNA, 22 nt, Human
cuccuuuacaaaagaaauaccu

SEQ ID NO: 3751825 - RNA, 21 nt, Human
cuccuuuacccucaucugucu

SEQ ID NO: 3751826 - RNA, 17 nt, Human
cuccuuuagggacagcu

SEQ ID NO: 3751827 - RNA, 15 nt, Human
cuccuuucaccacau

SEQ ID NO: 3751828 - RNA, 14 nt, Human
cuccuuucagggcc

SEQ ID NO: 3751829 - RNA, 18 nt, Human
cuccuuuccccuuccuuu

SEQ ID NO: 3751830 - RNA, 14 nt, Human
cuccuuucuccagc

SEQ ID NO: 3751831 - RNA, 18 nt, Human
cuccuuucuccagccagc

SEQ ID NO: 3751832 - RNA, 12 nt, Human
cuccuuucugug

SEQ ID NO: 3751833 - RNA, 20 nt, Human
cuccuuucuuuuucuucuuc

SEQ ID NO: 3751834 - RNA, 18 nt, Human
cuccuuugcacugagggc

SEQ ID NO: 3751835 - RNA, 16 nt, Human
cuccuuugcaggcuca

SEQ ID NO: 3751836 - RNA, 18 nt, Human
cuccuuuguauucugucu

SEQ ID NO: 3751837 - RNA, 23 nt, Human
cuccuuugugaggaagccgcugg

SEQ ID NO: 3751838 - RNA, 14 nt, Human
cuccuuuuaaagaa

SEQ ID NO: 3751839 - RNA, 23 nt, Human
cuccuuuuaaagaaaaaaauuga

SEQ ID NO: 3751840 - RNA, 16 nt, Human
cuccuuuuccagagca

SEQ ID NO: 3751841 - RNA, 10 nt, Human
cuccuuuucu

SEQ ID NO: 3751842 - RNA, 18 nt, Human
cuccuuuucuuuuguuac

SEQ ID NO: 3751843 - RNA, 19 nt, Human
cuccuuuucuuuuguuacu

SEQ ID NO: 3751844 - RNA, 13 nt, Human
cuccuuuuguguu

SEQ ID NO: 3751845 - RNA, 18 nt, Human
cuccuuuuuauguugcca

SEQ ID NO: 3751846 - RNA, 14 nt, Human
cuccuuuuucuccc

SEQ ID NO: 3751847 - RNA, 15 nt, Human
cucgaaacacagaaa

SEQ ID NO: 3751848 - RNA, 22 nt, Human
cucgaacauggaacucauuccu

SEQ ID NO: 3751849 - RNA, 23 nt, Human
cucgaacauggaacucauuccug

SEQ ID NO: 3751850 - RNA, 18 nt, Human
cucgaacccacacugcaa

SEQ ID NO: 3751851 - RNA, 20 nt, Human
cucgaacuauuuucaaagac

SEQ ID NO: 3751852 - RNA, 13 nt, Human
cucgaacuccuga

SEQ ID NO: 3751853 - RNA, 16 nt, Human
cucgaacuccugaccu

SEQ ID NO: 3751854 - RNA, 15 nt, Human
cucgaacuccugggc

SEQ ID NO: 3751855 - RNA, 14 nt, Human
cucgaacuggcugc

SEQ ID NO: 3751856 - RNA, 15 nt, Human
cucgaacuggcugca

SEQ ID NO: 3751857 - RNA, 21 nt, Human
cucgaaguugaucuccccagc

SEQ ID NO: 3751858 - RNA, 14 nt, Human
cucgaaucucugug

SEQ ID NO: 3751859 - RNA, 17 nt, Human
cucgaaucucugugccu

SEQ ID NO: 3751860 - RNA, 18 nt, Human
cucgaaucucugugccuu

SEQ ID NO: 3751861 - RNA, 23 nt, Human
cucgacacgugggcuccccucuu

SEQ ID NO: 3751862 - RNA, 19 nt, Human
cucgacaugaaaauucaga

SEQ ID NO: 3751863 - RNA, 19 nt, Human
cucgacauuuuauggaaag

SEQ ID NO: 3751864 - RNA, 14 nt, Human
cucgacucugugcc

SEQ ID NO: 3751865 - RNA, 22 nt, Human
cucgacuggaggaccacacuca

SEQ ID NO: 3751866 - RNA, 13 nt, Human
cucgagaucccaa

SEQ ID NO: 3751867 - RNA, 21 nt, Human
cucgagaucccaacacugcca

SEQ ID NO: 3751868 - RNA, 15 nt, Human
cucgagcaacugcug

SEQ ID NO: 3751869 - RNA, 17 nt, Human
cucgagcaguccugccu

SEQ ID NO: 3751870 - RNA, 13 nt, Human
cucgagcaugccu

SEQ ID NO: 3751871 - RNA, 15 nt, Human
cucgagcaugccugg

SEQ ID NO: 3751872 - RNA, 19 nt, Human
cucgagcaugccuggaugg

SEQ ID NO: 3751873 - RNA, 22 nt, Human
cucgagcaugccuggauggggc

SEQ ID NO: 3751874 - RNA, 16 nt, Human
cucgagcgcccugcag

SEQ ID NO: 3751875 - RNA, 18 nt, Human
cucgagcgcccugcagac

SEQ ID NO: 3751876 - RNA, 20 nt, Human
cucgagcgcccugcagaccc

SEQ ID NO: 3751877 - RNA, 21 nt, Human
cucgagcgcccugcagacccu

SEQ ID NO: 3751878 - RNA, 20 nt, Human
cucgaggacuguauuuguga

SEQ ID NO: 3751879 - RNA, 19 nt, Human
cucgaggggugggcuggua

SEQ ID NO: 3751880 - RNA, 20 nt, Human
cucgaggugccuucuucagg

SEQ ID NO: 3751881 - RNA, 14 nt, Human
cucgaguacugugg

SEQ ID NO: 3751882 - RNA, 16 nt, Human
cucgaguacugugggc

SEQ ID NO: 3751883 - RNA, 15 nt, Human
cucgauccaaauugu

SEQ ID NO: 3751884 - RNA, 19 nt, Human
cucgauccaaauugugcuu

SEQ ID NO: 3751885 - RNA, 23 nt, Human
cucgaugcagacagggggccaga

SEQ ID NO: 3751886 - RNA, 17 nt, Human
cucgauucauauugaau

SEQ ID NO: 3751887 - RNA, 18 nt, Human
cucgauuuuguaucugca

SEQ ID NO: 3751888 - RNA, 16 nt, Human
cucgcaacccgugcca

SEQ ID NO: 3751889 - RNA, 16 nt, Human
cucgcaccccccuguu

SEQ ID NO: 3751890 - RNA, 19 nt, Human
cucgcaccccccuguucua

SEQ ID NO: 3751891 - RNA, 15 nt, Human
cucgcaccuuuccaa

SEQ ID NO: 3751892 - RNA, 19 nt, Human
cucgcagccucucagugcc

SEQ ID NO: 3751893 - RNA, 19 nt, Human
cucgcauaggaccuuucca

SEQ ID NO: 3751894 - RNA, 14 nt, Human
cucgcaucuuccca

SEQ ID NO: 3751895 - RNA, 18 nt, Human
cucgcccagucccagcag

SEQ ID NO: 3751896 - RNA, 20 nt, Human
cucgcccagucccagcagcc

SEQ ID NO: 3751897 - RNA, 19 nt, Human
cucgcccauccccuugagg

SEQ ID NO: 3751898 - RNA, 14 nt, Human
cucgccccuggcag

SEQ ID NO: 3751899 - RNA, 16 nt, Human
cucgccccuggcagag

SEQ ID NO: 3751900 - RNA, 20 nt, Human
cucgccccuggcagagaugc

SEQ ID NO: 3751901 - RNA, 12 nt, Human
cucgcccgccca

SEQ ID NO: 3751902 - RNA, 19 nt, Human
cucgcccuccuuucugugc

SEQ ID NO: 3751903 - RNA, 15 nt, Human
cucgcccugggucua

SEQ ID NO: 3751904 - RNA, 17 nt, Human
cucgccggaucugaggg

SEQ ID NO: 3751905 - RNA, 15 nt, Human
cucgccgucugugaa

SEQ ID NO: 3751906 - RNA, 18 nt, Human
cucgccucggaucagcug

SEQ ID NO: 3751907 - RNA, 13 nt, Human
cucgccucuccca

SEQ ID NO: 3751908 - RNA, 15 nt, Human
cucgcgacaaugcaa

SEQ ID NO: 3751909 - RNA, 16 nt, Human
cucgcggcccucagua

SEQ ID NO: 3751910 - RNA, 19 nt, Human
cucgcuauugucaccaggg

SEQ ID NO: 3751911 - RNA, 21 nt, Human
cucgcuauugucaccagggcu

SEQ ID NO: 3751912 - RNA, 16 nt, Human
cucgcuccccacucug

SEQ ID NO: 3751913 - RNA, 17 nt, Human
cucgcuccccacucugc

SEQ ID NO: 3751914 - RNA, 15 nt, Human
cucgcucugucaccc

SEQ ID NO: 3751915 - RNA, 16 nt, Human
cucgcucuguuaccca

SEQ ID NO: 3751916 - RNA, 20 nt, Human
cucgcucuguugcccaggcu

SEQ ID NO: 3751917 - RNA, 12 nt, Human
cucgcugagggc

SEQ ID NO: 3751918 - RNA, 19 nt, Human
cucgcugaugcugggcugg

SEQ ID NO: 3751919 - RNA, 20 nt, Human
cucgcugaugcugggcuggg

SEQ ID NO: 3751920 - RNA, 12 nt, Human
cucgcugccagc

SEQ ID NO: 3751921 - RNA, 13 nt, Human
cucgcugccagcu

SEQ ID NO: 3751922 - RNA, 20 nt, Human
cucgcugcugcgcccugggc

SEQ ID NO: 3751923 - RNA, 12 nt, Human
cucgcuggcccc

SEQ ID NO: 3751924 - RNA, 16 nt, Human
cucgcuggcccccacu

SEQ ID NO: 3751925 - RNA, 17 nt, Human
cucgcuggcccccacug

SEQ ID NO: 3751926 - RNA, 13 nt, Human
cucgcuguugcug

SEQ ID NO: 3751927 - RNA, 16 nt, Human
cucgcuucccccauag

SEQ ID NO: 3751928 - RNA, 11 nt, Human
cucgcuucuuu

SEQ ID NO: 3751929 - RNA, 13 nt, Human
cucgcuuguaaau

SEQ ID NO: 3751930 - RNA, 14 nt, Human
cucgcuuguaaaua

SEQ ID NO: 3751931 - RNA, 22 nt, Human
cucgcuugugcagaaaacauug

SEQ ID NO: 3751932 - RNA, 19 nt, Human
cucgcuuucuauguaguuu

SEQ ID NO: 3751933 - RNA, 20 nt, Human
cucggaaauuaaaguuugcu

SEQ ID NO: 3751934 - RNA, 19 nt, Human
cucggaacugcaugcugcu

SEQ ID NO: 3751935 - RNA, 22 nt, Human
cucggaacugcaugcugcugga

SEQ ID NO: 3751936 - RNA, 18 nt, Human
cucggacuuagcugggag

SEQ ID NO: 3751937 - RNA, 17 nt, Human
cucggagaagagcgcag

SEQ ID NO: 3751938 - RNA, 20 nt, Human
cucggagaagagcuguucac

SEQ ID NO: 3751939 - RNA, 12 nt, Human
cucggagccuca

SEQ ID NO: 3751940 - RNA, 13 nt, Human
cucggaggaagcc

SEQ ID NO: 3751941 - RNA, 13 nt, Human
cucggaggcccca

SEQ ID NO: 3751942 - RNA, 15 nt, Human
cucggaggccccaaa

SEQ ID NO: 3751943 - RNA, 18 nt, Human
cucggaggccccaaagga

SEQ ID NO: 3751944 - RNA, 16 nt, Human
cucggaggcugccccc

SEQ ID NO: 3751945 - RNA, 16 nt, Human
cucggaguucuucuug

SEQ ID NO: 3751946 - RNA, 20 nt, Human
cucggaucaccgagaguagc

SEQ ID NO: 3751947 - RNA, 14 nt, Human
cucggaucagcuga

SEQ ID NO: 3751948 - RNA, 17 nt, Human
cucggaucaggcuccca

SEQ ID NO: 3751949 - RNA, 23 nt, Human
cucggcagcccuuccaaacucuu

SEQ ID NO: 3751950 - RNA, 15 nt, Human
cucggccucccaaag

SEQ ID NO: 3751951 - RNA, 18 nt, Human
cucggccucccaaagugc

SEQ ID NO: 3751952 - RNA, 22 nt, Human
cucggccucccaaagugcuggg

SEQ ID NO: 3751953 - RNA, 17 nt, Human
cucggccuucacaaucu

SEQ ID NO: 3751954 - RNA, 17 nt, Human
cucggcucacugcaucc

SEQ ID NO: 3751955 - RNA, 16 nt, Human
cucggcucagugcaac

SEQ ID NO: 3751956 - RNA, 18 nt, Human
cucggcucagugcaaccu

SEQ ID NO: 3751957 - RNA, 15 nt, Human
cucggcuccugcugc

SEQ ID NO: 3751958 - RNA, 19 nt, Human
cucggcuccugcugcacca

SEQ ID NO: 3751959 - RNA, 12 nt, Human
cucggcuccugg

SEQ ID NO: 3751960 - RNA, 16 nt, Human
cucggcuggcuccccu

SEQ ID NO: 3751961 - RNA, 18 nt, Human
cucggcuuuucucagcug

SEQ ID NO: 3751962 - RNA, 15 nt, Human
cucgggacaccugcc

SEQ ID NO: 3751963 - RNA, 20 nt, Human
cucgggacaccugcccugcc

SEQ ID NO: 3751964 - RNA, 21 nt, Human
cucgggaggcugagacaggag

SEQ ID NO: 3751965 - RNA, 19 nt, Human
cucgggaggcugaggcaca

SEQ ID NO: 3751966 - RNA, 19 nt, Human
gagcuaacacuggccccua

SEQ ID NO: 3751967 - RNA, 13 nt, Human
gagcuaaggcucu

SEQ ID NO: 3751968 - RNA, 22 nt, Human
gagcuaagggugggugcucaga

SEQ ID NO: 3751969 - RNA, 22 nt, Human
gagcuaauuuacuggacaaaga

SEQ ID NO: 3751970 - RNA, 15 nt, Human
gagcuacauaauuua

SEQ ID NO: 3751971 - RNA, 22 nt, Human
gagcuaccuguguggacaggac

SEQ ID NO: 3751972 - RNA, 20 nt, Human
gagcuacuugggccauagcu

SEQ ID NO: 3751973 - RNA, 14 nt, Human
gagcuagaaccugg

SEQ ID NO: 3751974 - RNA, 18 nt, Human
gagcuagcgcugccgcac

SEQ ID NO: 3751975 - RNA, 19 nt, Human
gagcuaggagcaaagccug

SEQ ID NO: 3751976 - RNA, 20 nt, Human
gagcuaggagcaaagccugu

SEQ ID NO: 3751977 - RNA, 19 nt, Human
gagcuauacaguuuuccua

SEQ ID NO: 3751978 - RNA, 23 nt, Human
gagcuauauuuaaguauucaaga

SEQ ID NO: 3751979 - RNA, 13 nt, Human
gagcuaugacuua

SEQ ID NO: 3751980 - RNA, 14 nt, Human
gagcuauuaaaacu

SEQ ID NO: 3751981 - RNA, 16 nt, Human
gagcuauuaaaacuca

SEQ ID NO: 3751982 - RNA, 13 nt, Human
gagcuauuuccau

SEQ ID NO: 3751983 - RNA, 21 nt, Human
gagcuauuuccauuccagaau

SEQ ID NO: 3751984 - RNA, 16 nt, Human
gagcuauuuuaaacca

SEQ ID NO: 3751985 - RNA, 22 nt, Human
gagcucacaaggcagcaaggcc

SEQ ID NO: 3751986 - RNA, 19 nt, Human
gagcucacuguggugucug

SEQ ID NO: 3751987 - RNA, 19 nt, Human
gagcucagaaaauaucccu

SEQ ID NO: 3751988 - RNA, 23 nt, Human
gagcucagaaaauaucccuccug

SEQ ID NO: 3751989 - RNA, 18 nt, Human
gagcucagagagggcagg

SEQ ID NO: 3751990 - RNA, 17 nt, Human
gagcucaggacacuaau

SEQ ID NO: 3751991 - RNA, 15 nt, Human
gagcucauguagcaa

SEQ ID NO: 3751992 - RNA, 19 nt, Human
gagcuccaacucagaaggg

SEQ ID NO: 3751993 - RNA, 20 nt, Human
gagcuccagacccccagcaa

SEQ ID NO: 3751994 - RNA, 22 nt, Human
gagcuccagacccccagcaacc

SEQ ID NO: 3751995 - RNA, 19 nt, Human
gagcuccagcuccuuuggg

SEQ ID NO: 3751996 - RNA, 20 nt, Human
gagcuccagcuccuuugggc

SEQ ID NO: 3751997 - RNA, 21 nt, Human
gagcuccauacacacgcugcc

SEQ ID NO: 3751998 - RNA, 22 nt, Human
gagcuccauacacacgcugccu

SEQ ID NO: 3751999 - RNA, 23 nt, Human
gagcuccauacacacgcugccuu

SEQ ID NO: 3752000 - RNA, 19 nt, Human
gagcucccacaagccugag

SEQ ID NO: 3752001 - RNA, 20 nt, Human
gagcucccacaagccugagg

SEQ ID NO: 3752002 - RNA, 20 nt, Human
gagcucccacuucugccaga

SEQ ID NO: 3752003 - RNA, 21 nt, Human
gagcucccaggugcagccaga

SEQ ID NO: 3752004 - RNA, 22 nt, Human
gagcucccaggugcagccagag

SEQ ID NO: 3752005 - RNA, 20 nt, Human
gagcuccccaccaccccagc

SEQ ID NO: 3752006 - RNA, 22 nt, Human
gagcuccccaccaccccagcug

SEQ ID NO: 3752007 - RNA, 19 nt, Human
gagcuccccuacggaccag

SEQ ID NO: 3752008 - RNA, 17 nt, Human
gagcuccccuccccaac

SEQ ID NO: 3752009 - RNA, 14 nt, Human
gagcuccucugggc

SEQ ID NO: 3752010 - RNA, 16 nt, Human
gagcuccucugggcag

SEQ ID NO: 3752011 - RNA, 18 nt, Human
gagcuccucugggcagga

SEQ ID NO: 3752012 - RNA, 22 nt, Human
gagcuccucugggcaggaccuc

SEQ ID NO: 3752013 - RNA, 13 nt, Human
gagcuccucuucc

SEQ ID NO: 3752014 - RNA, 17 nt, Human
gagcuccuguccccugc

SEQ ID NO: 3752015 - RNA, 20 nt, Human
gagcuccuuaaggcucuuuu

SEQ ID NO: 3752016 - RNA, 15 nt, Human
gagcucgguggaccc

SEQ ID NO: 3752017 - RNA, 21 nt, Human
gagcucguguauccuggggcu

SEQ ID NO: 3752018 - RNA, 22 nt, Human
gagcucguguauccuggggcuc

SEQ ID NO: 3752019 - RNA, 23 nt, Human
gagcucguguauccuggggcucc

SEQ ID NO: 3752020 - RNA, 14 nt, Human
gagcucuacccagg

SEQ ID NO: 3752021 - RNA, 21 nt, Human
gagcucuacccagggccugca

SEQ ID NO: 3752022 - RNA, 14 nt, Human
gagcucucucuaca

SEQ ID NO: 3752023 - RNA, 15 nt, Human
gagcucugaaaucuu

SEQ ID NO: 3752024 - RNA, 19 nt, Human
gagcucugaaaucuuccca

SEQ ID NO: 3752025 - RNA, 13 nt, Human
gagcucugagagg

SEQ ID NO: 3752026 - RNA, 20 nt, Human
gagcucugagaggcccugga

SEQ ID NO: 3752027 - RNA, 16 nt, Human
gagcucugcagagcag

SEQ ID NO: 3752028 - RNA, 15 nt, Human
gagcucugcagccca

SEQ ID NO: 3752029 - RNA, 13 nt, Human
gagcucuggagcc

SEQ ID NO: 3752030 - RNA, 19 nt, Human
gagcucuggagccaccugu

SEQ ID NO: 3752031 - RNA, 20 nt, Human
gagcugaaaaaucacauccu

SEQ ID NO: 3752032 - RNA, 22 nt, Human
gagcugaagguuguggccuuug

SEQ ID NO: 3752033 - RNA, 13 nt, Human
gagcugacaaaau

SEQ ID NO: 3752034 - RNA, 14 nt, Human
gagcugagaagacu

SEQ ID NO: 3752035 - RNA, 13 nt, Human
gagcugagccagg

SEQ ID NO: 3752036 - RNA, 14 nt, Human
gagcugagccaggc

SEQ ID NO: 3752037 - RNA, 23 nt, Human
gagcugagguuucacccuuaacc

SEQ ID NO: 3752038 - RNA, 15 nt, Human
gagcugaguggggga

SEQ ID NO: 3752039 - RNA, 14 nt, Human
gagcugaugaaacu

SEQ ID NO: 3752040 - RNA, 18 nt, Human
gagcugauggagaaggaa

SEQ ID NO: 3752041 - RNA, 19 nt, Human
gagcugauggagaaggaag

SEQ ID NO: 3752042 - RNA, 16 nt, Human
gagcugcaccagguag

SEQ ID NO: 3752043 - RNA, 19 nt, Human
gagcugcaggggcauggga

SEQ ID NO: 3752044 - RNA, 15 nt, Human
gagcugccaccugcc

SEQ ID NO: 3752045 - RNA, 16 nt, Human
gagcugccaccugccu

SEQ ID NO: 3752046 - RNA, 13 nt, Human
gagcugccagugg

SEQ ID NO: 3752047 - RNA, 20 nt, Human
gagcugccauccagggaugc

SEQ ID NO: 3752048 - RNA, 18 nt, Human
gagcugcccacagcaggc

SEQ ID NO: 3752049 - RNA, 19 nt, Human
gagcugcccacagcaggcc

SEQ ID NO: 3752050 - RNA, 15 nt, Human
gagcugccccucucu

SEQ ID NO: 3752051 - RNA, 15 nt, Human
gagcugcccucuccu

SEQ ID NO: 3752052 - RNA, 19 nt, Human
gagcugcccucuccugggc

SEQ ID NO: 3752053 - RNA, 19 nt, Human
gagcugccuaagaggcaau

SEQ ID NO: 3752054 - RNA, 22 nt, Human
gagcugccuguucagcuccagc

SEQ ID NO: 3752055 - RNA, 19 nt, Human
gagcugccuucccuagcuu

SEQ ID NO: 3752056 - RNA, 15 nt, Human
gagcugccuuggcuc

SEQ ID NO: 3752057 - RNA, 14 nt, Human
gagcugcucugaau

SEQ ID NO: 3752058 - RNA, 16 nt, Human
gagcugcucuggaaaa

SEQ ID NO: 3752059 - RNA, 15 nt, Human
gagcugcugccauga

SEQ ID NO: 3752060 - RNA, 13 nt, Human
gagcugcugcccu

SEQ ID NO: 3752061 - RNA, 13 nt, Human
gagcugcuucccc

SEQ ID NO: 3752062 - RNA, 18 nt, Human
gagcugcuuuuuuugaaa

SEQ ID NO: 3752063 - RNA, 17 nt, Human
gagcuggaccucaccaa

SEQ ID NO: 3752064 - RNA, 12 nt, Human
gagcuggagccu

SEQ ID NO: 3752065 - RNA, 20 nt, Human
gagcuggcaaagguggcucu

SEQ ID NO: 3752066 - RNA, 17 nt, Human
gagcuggccgugggccu

SEQ ID NO: 3752067 - RNA, 20 nt, Human
gagcuggccgugggccuggg

SEQ ID NO: 3752068 - RNA, 16 nt, Human
gagcuggcgucugucu

SEQ ID NO: 3752069 - RNA, 19 nt, Human
gagcuggcuccagccugga

SEQ ID NO: 3752070 - RNA, 12 nt, Human
gagcuggcucug

SEQ ID NO: 3752071 - RNA, 21 nt, Human
gagcugggacacuuaacagau

SEQ ID NO: 3752072 - RNA, 17 nt, Human
gagcugggaggaaaaga

SEQ ID NO: 3752073 - RNA, 21 nt, Human
gagcugggccuggucucaccc

SEQ ID NO: 3752074 - RNA, 12 nt, Human
gagcuggggaag

SEQ ID NO: 3752075 - RNA, 15 nt, Human
gagcuggggaccugg

SEQ ID NO: 3752076 - RNA, 19 nt, Human
gagcuggggaugucucuca

SEQ ID NO: 3752077 - RNA, 24 nt, Human
gagcugggggccaugagcuccaga

SEQ ID NO: 3752078 - RNA, 18 nt, Human
gagcuggugcauuacaga

SEQ ID NO: 3752079 - RNA, 15 nt, Human
gagcuggugcccgga

SEQ ID NO: 3752080 - RNA, 21 nt, Human
gagcugugagaaggguguugu

SEQ ID NO: 3752081 - RNA, 20 nt, Human
gagcuguggacuuuguucac

SEQ ID NO: 3752082 - RNA, 17 nt, Human
gagcuguuuacuaggga

SEQ ID NO: 3752083 - RNA, 17 nt, Human
gagcuguuuauggccuc

SEQ ID NO: 3752084 - RNA, 18 nt, Human
gagcuguuuauggccuca

SEQ ID NO: 3752085 - RNA, 17 nt, Human
gagcuguuuauguuuuu

SEQ ID NO: 3752086 - RNA, 16 nt, Human
gagcuuaaaauacaag

SEQ ID NO: 3752087 - RNA, 15 nt, Human
gagcuuaacagugug

SEQ ID NO: 3752088 - RNA, 22 nt, Human
gagcuuaagccacugccucucc

SEQ ID NO: 3752089 - RNA, 21 nt, Human
gagcuuaaugcuacaugugag

SEQ ID NO: 3752090 - RNA, 13 nt, Human
gagcuuaccuccc

SEQ ID NO: 3752091 - RNA, 16 nt, Human
gagcuuaccucccacc

SEQ ID NO: 3752092 - RNA, 16 nt, Human
gagcuuagcauaucug

SEQ ID NO: 3752093 - RNA, 17 nt, Human
gagcuuagccaaugugg

SEQ ID NO: 3752094 - RNA, 13 nt, Human
gagcuuagggucu

SEQ ID NO: 3752095 - RNA, 16 nt, Human
gagcuucauggcagaa

SEQ ID NO: 3752096 - RNA, 19 nt, Human
gagcuucauggcagaaggc

SEQ ID NO: 3752097 - RNA, 17 nt, Human
gagcuucucuuuaacuc

SEQ ID NO: 3752098 - RNA, 22 nt, Human
gagcuucucuuuaacucaggac

SEQ ID NO: 3752099 - RNA, 14 nt, Human
gagcuucuggcacu

SEQ ID NO: 3752100 - RNA, 18 nt, Human
gagcuucuuguuuccuug

SEQ ID NO: 3752101 - RNA, 15 nt, Human
gagcuuggccagaag

SEQ ID NO: 3752102 - RNA, 20 nt, Human
gagcuugggggaugacuaga

SEQ ID NO: 3752103 - RNA, 22 nt, Human
gagcuuuauguaauaaugugaa

SEQ ID NO: 3752104 - RNA, 15 nt, Human
gagcuuucaaagaag

SEQ ID NO: 3752105 - RNA, 18 nt, Human
gagcuuucaaagaaggaa

SEQ ID NO: 3752106 - RNA, 18 nt, Human
gagcuuuccauguugcug

SEQ ID NO: 3752107 - RNA, 22 nt, Human
gagcuuucugaacagcuggugu

SEQ ID NO: 3752108 - RNA, 21 nt, Human
gagcuuugcauguuccacuaa

SEQ ID NO: 3752109 - RNA, 23 nt, Human
gagcuuugucuacuucaaaaguu

SEQ ID NO: 3752110 - RNA, 15 nt, Human
gagcuuuucuaggcu

SEQ ID NO: 3752111 - RNA, 17 nt, Human
gaggaaaaauaugugaa

SEQ ID NO: 3752112 - RNA, 12 nt, Human
gaggaaaauucu

SEQ ID NO: 3752113 - RNA, 17 nt, Human
gaggaaacucaccugcu

SEQ ID NO: 3752114 - RNA, 16 nt, Human
gaggaaagaaugaaag

SEQ ID NO: 3752115 - RNA, 20 nt, Human
gagccccuucugcucagcuc

SEQ ID NO: 3752116 - RNA, 21 nt, Human
gagccccuucugcucagcucu

SEQ ID NO: 3752117 - RNA, 15 nt, Human
gagcccgaggaggug

SEQ ID NO: 3752118 - RNA, 24 nt, Human
gagcccgaggaggugucucaggcu

SEQ ID NO: 3752119 - RNA, 16 nt, Human
gagcccgaggcaccag

SEQ ID NO: 3752120 - RNA, 20 nt, Human
gagcccgcacccccacccuu

SEQ ID NO: 3752121 - RNA, 17 nt, Human
gagcccggcgccccugc

SEQ ID NO: 3752122 - RNA, 14 nt, Human
gagcccgggcugcc

SEQ ID NO: 3752123 - RNA, 18 nt, Human
gagcccgggcugccuggg

SEQ ID NO: 3752124 - RNA, 16 nt, Human
gagcccuacuuccagg

SEQ ID NO: 3752125 - RNA, 23 nt, Human
gagcccuccgccuucacauuccc

SEQ ID NO: 3752126 - RNA, 14 nt, Human
gagcccugcucccu

SEQ ID NO: 3752127 - RNA, 16 nt, Human
gagcccugggaggcuc

SEQ ID NO: 3752128 - RNA, 20 nt, Human
gagcccugggaggcucugga

SEQ ID NO: 3752129 - RNA, 17 nt, Human
gagcccugguggcagug

SEQ ID NO: 3752130 - RNA, 18 nt, Human
gagcccugguggcagugg

SEQ ID NO: 3752131 - RNA, 22 nt, Human
gagcccuguccugccuaaggcu

SEQ ID NO: 3752132 - RNA, 12 nt, Human
gagcccugucuc

SEQ ID NO: 3752133 - RNA, 18 nt, Human
gagcccuuaucugugcuc

SEQ ID NO: 3752134 - RNA, 24 nt, Human
gagcccuucggaggaccagggcug

SEQ ID NO: 3752135 - RNA, 17 nt, Human
gagcccuugccucccca

SEQ ID NO: 3752136 - RNA, 20 nt, Human
gagccgagaucacgccacug

SEQ ID NO: 3752137 - RNA, 22 nt, Human
gagccggacuuucggaguuggg

SEQ ID NO: 3752138 - RNA, 20 nt, Human
gagccgggcaaacuggccgc

SEQ ID NO: 3752139 - RNA, 15 nt, Human
gagccgggccccugg

SEQ ID NO: 3752140 - RNA, 14 nt, Human
gagccgggccgcag

SEQ ID NO: 3752141 - RNA, 15 nt, Human
gagccgggccgcaga

SEQ ID NO: 3752142 - RNA, 22 nt, Human
gagccggggaguuucuuuccug

SEQ ID NO: 3752143 - RNA, 21 nt, Human
gagccgggucugccucuucug

SEQ ID NO: 3752144 - RNA, 22 nt, Human
gagccgggucugccucuucugg

SEQ ID NO: 3752145 - RNA, 20 nt, Human
gagccuaggaccacucagcc

SEQ ID NO: 3752146 - RNA, 22 nt, Human
gagccuaggaccacucagcccc

SEQ ID NO: 3752147 - RNA, 21 nt, Human
gagccucaaaugagaaaaugu

SEQ ID NO: 3752148 - RNA, 17 nt, Human
gagccucagcauccugg

SEQ ID NO: 3752149 - RNA, 20 nt, Human
gagccucagcauccuggcac

SEQ ID NO: 3752150 - RNA, 18 nt, Human
gagccucagucucccucc

SEQ ID NO: 3752151 - RNA, 19 nt, Human
gagccucagucucccuccc

SEQ ID NO: 3752152 - RNA, 23 nt, Human
gagccucagucucccucccuugg

SEQ ID NO: 3752153 - RNA, 17 nt, Human
gagccucauccgaggca

SEQ ID NO: 3752154 - RNA, 18 nt, Human
gagccucauccgaggcag

SEQ ID NO: 3752155 - RNA, 19 nt, Human
gagccucauccgaggcagg

SEQ ID NO: 3752156 - RNA, 20 nt, Human
gagccucauccgaggcaggg

SEQ ID NO: 3752157 - RNA, 21 nt, Human
gagccucccucaauucccccu

SEQ ID NO: 3752158 - RNA, 13 nt, Human
gagccuccugccc

SEQ ID NO: 3752159 - RNA, 14 nt, Human
gagccuccugccca

SEQ ID NO: 3752160 - RNA, 18 nt, Human
gagccuccugcccagucc

SEQ ID NO: 3752161 - RNA, 20 nt, Human
gagccucgcaacccgugcca

SEQ ID NO: 3752162 - RNA, 17 nt, Human
gagccucugcuccccag

SEQ ID NO: 3752163 - RNA, 19 nt, Human
gagccugaauuuuguugcu

SEQ ID NO: 3752164 - RNA, 21 nt, Human
gagccugacccucaucuuucu

SEQ ID NO: 3752165 - RNA, 12 nt, Human
gagccugaggga

SEQ ID NO: 3752166 - RNA, 22 nt, Human
gagccugagucagggcccagag

SEQ ID NO: 3752167 - RNA, 17 nt, Human
gagccugcacggugaau

SEQ ID NO: 3752168 - RNA, 13 nt, Human
gagccugcaggga

SEQ ID NO: 3752169 - RNA, 15 nt, Human
gagccugcagggugg

SEQ ID NO: 3752170 - RNA, 20 nt, Human
gagccugcaggguggugcug

SEQ ID NO: 3752171 - RNA, 18 nt, Human
gagccugccgagcaaccg

SEQ ID NO: 3752172 - RNA, 22 nt, Human
gagccugccgagcaaccguggc

SEQ ID NO: 3752173 - RNA, 10 nt, Human
gagccugcug

SEQ ID NO: 3752174 - RNA, 16 nt, Human
gagccugcuggaagcc

SEQ ID NO: 3752175 - RNA, 13 nt, Human
gagccugcuggca

SEQ ID NO: 3752176 - RNA, 12 nt, Human
gagccugcuggu

SEQ ID NO: 3752177 - RNA, 23 nt, Human
gagccugcuggucacagccuccu

SEQ ID NO: 3752178 - RNA, 13 nt, Human
gagccuggagaag

SEQ ID NO: 3752179 - RNA, 15 nt, Human
gagccuggagaagcu

SEQ ID NO: 3752180 - RNA, 19 nt, Human
gagccuggcacaggacuga

SEQ ID NO: 3752181 - RNA, 15 nt, Human
gagccuggccagccu

SEQ ID NO: 3752182 - RNA, 14 nt, Human
gagccuggcuccaa

SEQ ID NO: 3752183 - RNA, 13 nt, Human
gagccugggaggu

SEQ ID NO: 3752184 - RNA, 15 nt, Human
gagccuguccugccu

SEQ ID NO: 3752185 - RNA, 21 nt, Human
gagccuguguaacagcuccuu

SEQ ID NO: 3752186 - RNA, 19 nt, Human
gagccuuagccgcccaugc

SEQ ID NO: 3752187 - RNA, 13 nt, Human
gagccuuccaggg

SEQ ID NO: 3752188 - RNA, 23 nt, Human
gagccuuccaggggugggacacc

SEQ ID NO: 3752189 - RNA, 18 nt, Human
gagccuucucagaagcac

SEQ ID NO: 3752190 - RNA, 17 nt, Human
gagccuuuggaugacca

SEQ ID NO: 3752191 - RNA, 19 nt, Human
gagccuuuuaacugugcaa

SEQ ID NO: 3752192 - RNA, 14 nt, Human
gagcgacagagcag

SEQ ID NO: 3752193 - RNA, 15 nt, Human
gagcgacagagcagu

SEQ ID NO: 3752194 - RNA, 19 nt, Human
gagcgagagaucaaagaug

SEQ ID NO: 3752195 - RNA, 20 nt, Human
gagcgagagaucaaagauga

SEQ ID NO: 3752196 - RNA, 16 nt, Human
gagcgaguggagucug

SEQ ID NO: 3752197 - RNA, 20 nt, Human
gagcgaguggagucugccac

SEQ ID NO: 3752198 - RNA, 23 nt, Human
gagcgaguggagucugccaccca

SEQ ID NO: 3752199 - RNA, 13 nt, Human
gagcgcaagauag

SEQ ID NO: 3752200 - RNA, 12 nt, Human
gagcgcagcccg

SEQ ID NO: 3752201 - RNA, 22 nt, Human
gagcgcagccgccuucacagca

SEQ ID NO: 3752202 - RNA, 16 nt, Human
gagcgcaucaggccug

SEQ ID NO: 3752203 - RNA, 14 nt, Human
gagcgcccugcaga

SEQ ID NO: 3752204 - RNA, 20 nt, Human
gagcgcccugcagacccugc

SEQ ID NO: 3752205 - RNA, 22 nt, Human
gagcgccgugaguucucagggc

SEQ ID NO: 3752206 - RNA, 20 nt, Human
gagcgccugccccucccaga

SEQ ID NO: 3752207 - RNA, 17 nt, Human
gagcgccugugcacaca

SEQ ID NO: 3752208 - RNA, 16 nt, Human
gagcgcgccccuagcc

SEQ ID NO: 3752209 - RNA, 15 nt, Human
gagcgcuacccacuu

SEQ ID NO: 3752210 - RNA, 15 nt, Human
gagcgcuccugccgc

SEQ ID NO: 3752211 - RNA, 22 nt, Human
gagcgcuccugccgcagagcug

SEQ ID NO: 3752212 - RNA, 23 nt, Human
gagcgcuccugccgcagagcugg

SEQ ID NO: 3752213 - RNA, 12 nt, Human
gagcgcuugggc

SEQ ID NO: 3752214 - RNA, 15 nt, Human
gagcggaaagcagcu

SEQ ID NO: 3752215 - RNA, 17 nt, Human
gagcggagaaaggaagg

SEQ ID NO: 3752216 - RNA, 17 nt, Human
gagcgggaccuguggcu

SEQ ID NO: 3752217 - RNA, 12 nt, Human
gagcgggaggca

SEQ ID NO: 3752218 - RNA, 13 nt, Human
gagcgggaggcag

SEQ ID NO: 3752219 - RNA, 16 nt, Human
gagcgggaggcagagu

SEQ ID NO: 3752220 - RNA, 15 nt, Human
gagcgggucugcucc

SEQ ID NO: 3752221 - RNA, 17 nt, Human
gagcgguggcccugucc

SEQ ID NO: 3752222 - RNA, 20 nt, Human
gagcuaaacuccuuccuggc

SEQ ID NO: 3752223 - RNA, 22 nt, Human
gagcuaaacuccuuccuggccu

SEQ ID NO: 3752224 - RNA, 14 nt, Human
gagcuaacacuggc

SEQ ID NO: 3752225 - RNA, 14 nt, Human
gagcuaaggcucua

SEQ ID NO: 3752226 - RNA, 15 nt, Human
gagcuaagggugggu

SEQ ID NO: 3752227 - RNA, 20 nt, Human
gagcuaagggugggugcuca

SEQ ID NO: 3752228 - RNA, 11 nt, Human
gagcuacugcc

SEQ ID NO: 3752229 - RNA, 17 nt, Human
gagcuagaacccucugu

SEQ ID NO: 3752230 - RNA, 19 nt, Human
gagcuagaaccuggagagc

SEQ ID NO: 3752231 - RNA, 15 nt, Human
gagcuagaagcugga

SEQ ID NO: 3752232 - RNA, 18 nt, Human
gagcuagaagcuggagga

SEQ ID NO: 3752233 - RNA, 13 nt, Human
gagcuagagaaau

SEQ ID NO: 3752234 - RNA, 15 nt, Human
gagcuagcagcaggg

SEQ ID NO: 3752235 - RNA, 15 nt, Human
gagcuagccagagga

SEQ ID NO: 3752236 - RNA, 14 nt, Human
gagcuagcgcugcc

SEQ ID NO: 3752237 - RNA, 17 nt, Human
gagcuaggaagagucua

SEQ ID NO: 3752238 - RNA, 17 nt, Human
gagcuaggagcaaagcc

SEQ ID NO: 3752239 - RNA, 18 nt, Human
gagcuaggagcaaagccu

SEQ ID NO: 3752240 - RNA, 14 nt, Human
gagcuauacaguuu

SEQ ID NO: 3752241 - RNA, 20 nt, Human
gagcuauacaguuuuccuaa

SEQ ID NO: 3752242 - RNA, 19 nt, Human
gagcucaagggacaaggac

SEQ ID NO: 3752243 - RNA, 16 nt, Human
gagcucacaaggcagc

SEQ ID NO: 3752244 - RNA, 20 nt, Human
gagcucacaaggcagcaagg

SEQ ID NO: 3752245 - RNA, 14 nt, Human
gagcucagaccccc

SEQ ID NO: 3752246 - RNA, 21 nt, Human
gagcucagagagggcaggcau

SEQ ID NO: 3752247 - RNA, 23 nt, Human
gagcucagccccgagcugucccc

SEQ ID NO: 3752248 - RNA, 21 nt, Human
gagcucaggaaccgaggcagg

SEQ ID NO: 3752249 - RNA, 23 nt, Human
gagcucaggaaccgaggcaggga

SEQ ID NO: 3752250 - RNA, 12 nt, Human
gagcucaggaug

SEQ ID NO: 3752251 - RNA, 23 nt, Human
gagcucaggaugagggaaaagaa

SEQ ID NO: 3752252 - RNA, 19 nt, Human
gaggggacucugggcuaug

SEQ ID NO: 3752253 - RNA, 14 nt, Human
gaggggagccagga

SEQ ID NO: 3752254 - RNA, 17 nt, Human
gaggggagccaggaggg

SEQ ID NO: 3752255 - RNA, 15 nt, Human
gaggggaggaacagg

SEQ ID NO: 3752256 - RNA, 20 nt, Human
gaggggcaacgaagaaaaaa

SEQ ID NO: 3752257 - RNA, 14 nt, Human
gaggggcaggcuga

SEQ ID NO: 3752258 - RNA, 17 nt, Human
gaggggccccccugccc

SEQ ID NO: 3752259 - RNA, 17 nt, Human
gaggggccggcccugug

SEQ ID NO: 3752260 - RNA, 21 nt, Human
gaggggccggcccugugugca

SEQ ID NO: 3752261 - RNA, 22 nt, Human
gaggggccuaggccucagccag

SEQ ID NO: 3752262 - RNA, 13 nt, Human
gaggggccugcca

SEQ ID NO: 3752263 - RNA, 17 nt, Human
gaggggccugccaccug

SEQ ID NO: 3752264 - RNA, 21 nt, Human
gaggggccugccaccuggacc

SEQ ID NO: 3752265 - RNA, 18 nt, Human
gaggggcgcuggcccagc

SEQ ID NO: 3752266 - RNA, 19 nt, Human
gaggggcgcuggcccagcc

SEQ ID NO: 3752267 - RNA, 20 nt, Human
gaggggcgcuggcccagccg

SEQ ID NO: 3752268 - RNA, 22 nt, Human
gaggggcgcuggcccagccggc

SEQ ID NO: 3752269 - RNA, 16 nt, Human
gaggggcgggacccag

SEQ ID NO: 3752270 - RNA, 12 nt, Human
gaggggcuccug

SEQ ID NO: 3752271 - RNA, 14 nt, Human
gagggggagggggu

SEQ ID NO: 3752272 - RNA, 14 nt, Human
gagggguaggcaga

SEQ ID NO: 3752273 - RNA, 17 nt, Human
gagggguaggggcuggg

SEQ ID NO: 3752274 - RNA, 22 nt, Human
gaggggugcggcggucccagcu

SEQ ID NO: 3752275 - RNA, 22 nt, Human
gagggguuccuccccuccagcu

SEQ ID NO: 3752276 - RNA, 22 nt, Human
gagggguugccacaggccuccc

SEQ ID NO: 3752277 - RNA, 14 nt, Human
gaggguaggcagga

SEQ ID NO: 3752278 - RNA, 15 nt, Human
gaggguaggcaggau

SEQ ID NO: 3752279 - RNA, 13 nt, Human
gagggucaggaag

SEQ ID NO: 3752280 - RNA, 19 nt, Human
gagggucaggacugugacu

SEQ ID NO: 3752281 - RNA, 22 nt, Human
gaggguccagaaggagggggug

SEQ ID NO: 3752282 - RNA, 20 nt, Human
gagggucccaagcugggccc

SEQ ID NO: 3752283 - RNA, 13 nt, Human
gaggguccugcag

SEQ ID NO: 3752284 - RNA, 15 nt, Human
gagggucggugccuu

SEQ ID NO: 3752285 - RNA, 17 nt, Human
gagggucugggggcaca

SEQ ID NO: 3752286 - RNA, 23 nt, Human
gagggucuugguuccagccugcc

SEQ ID NO: 3752287 - RNA, 15 nt, Human
gagggugagugcaag

SEQ ID NO: 3752288 - RNA, 13 nt, Human
gaggguggcaggu

SEQ ID NO: 3752289 - RNA, 17 nt, Human
gagggugggggagggag

SEQ ID NO: 3752290 - RNA, 19 nt, Human
gagggugggggccaccugc

SEQ ID NO: 3752291 - RNA, 22 nt, Human
gagggugggggccaccugccug

SEQ ID NO: 3752292 - RNA, 14 nt, Human
gaggguuggggagg

SEQ ID NO: 3752293 - RNA, 13 nt, Human
gaggguugugcua

SEQ ID NO: 3752294 - RNA, 18 nt, Human
gaggguuguucuccuaga

SEQ ID NO: 3752295 - RNA, 22 nt, Human
gaggguuugagagagcagccag

SEQ ID NO: 3752296 - RNA, 21 nt, Human
gaggguuuuagguagaaaaac

SEQ ID NO: 3752297 - RNA, 23 nt, Human
gaggguuuuuaaaaauaaagcaa

SEQ ID NO: 3752298 - RNA, 18 nt, Human
gagguaacagaacagcuu

SEQ ID NO: 3752299 - RNA, 21 nt, Human
gagguaaggaauaccuguccc

SEQ ID NO: 3752300 - RNA, 24 nt, Human
gagguaaggaauaccugucccccu

SEQ ID NO: 3752301 - RNA, 13 nt, Human
gagguacccuggg

SEQ ID NO: 3752302 - RNA, 17 nt, Human
gagguagaaaagauugg

SEQ ID NO: 3752303 - RNA, 19 nt, Human
gagguagaaugacuccuug

SEQ ID NO: 3752304 - RNA, 18 nt, Human
gagguaucuuacuuuccu

SEQ ID NO: 3752305 - RNA, 14 nt, Human
gaggucaacagaga

SEQ ID NO: 3752306 - RNA, 16 nt, Human
cucuccugggcagcug

SEQ ID NO: 3752307 - RNA, 15 nt, Human
cucuccugggccccu

SEQ ID NO: 3752308 - RNA, 18 nt, Human
cucuccugggccccuccc

SEQ ID NO: 3752309 - RNA, 12 nt, Human
cucuccuguaag

SEQ ID NO: 3752310 - RNA, 19 nt, Human
cucuccuguaagccaaaga

SEQ ID NO: 3752311 - RNA, 20 nt, Human
cucuccuguaagccaaagaa

SEQ ID NO: 3752312 - RNA, 18 nt, Human
cucuccuguaccucuuga

SEQ ID NO: 3752313 - RNA, 22 nt, Human
cucuccuguaccucuugagccu

SEQ ID NO: 3752314 - RNA, 16 nt, Human
cucuccuguccucccu

SEQ ID NO: 3752315 - RNA, 17 nt, Human
cucuccugucucccucc

SEQ ID NO: 3752316 - RNA, 16 nt, Human
cucuccuuccuggagc

SEQ ID NO: 3752317 - RNA, 17 nt, Human
cucuccuuccuuaccca

SEQ ID NO: 3752318 - RNA, 14 nt, Human
cucuccuuccuugu

SEQ ID NO: 3752319 - RNA, 20 nt, Human
cucuccuugcuccuggccuu

SEQ ID NO: 3752320 - RNA, 14 nt, Human
cucuccuuucuuuu

SEQ ID NO: 3752321 - RNA, 21 nt, Human
cucuccuuucuuuuucuucuu

SEQ ID NO: 3752322 - RNA, 13 nt, Human
cucuccuuugaaa

SEQ ID NO: 3752323 - RNA, 13 nt, Human
cucuccuuuguau

SEQ ID NO: 3752324 - RNA, 15 nt, Human
cucuccuuuguauau

SEQ ID NO: 3752325 - RNA, 12 nt, Human
cucuccuuuucu

SEQ ID NO: 3752326 - RNA, 13 nt, Human
cucuccuuuucuu

SEQ ID NO: 3752327 - RNA, 17 nt, Human
cucuccuuuucuuuugu

SEQ ID NO: 3752328 - RNA, 21 nt, Human
cucuccuuuucuuuuguuacu

SEQ ID NO: 3752329 - RNA, 17 nt, Human
cucucgcaucuucccaa

SEQ ID NO: 3752330 - RNA, 19 nt, Human
cucucggaaggcuggcugg

SEQ ID NO: 3752331 - RNA, 18 nt, Human
cucucuacagucucgucu

SEQ ID NO: 3752332 - RNA, 13 nt, Human
cucucuacccagc

SEQ ID NO: 3752333 - RNA, 23 nt, Human
cucucuacuaaaacuacaaaaau

SEQ ID NO: 3752334 - RNA, 22 nt, Human
cucucuacuccuaccucagccu

SEQ ID NO: 3752335 - RNA, 14 nt, Human
cucucuacuggucc

SEQ ID NO: 3752336 - RNA, 13 nt, Human
cucucuagcacaa

SEQ ID NO: 3752337 - RNA, 16 nt, Human
cucucuauagcaccag

SEQ ID NO: 3752338 - RNA, 18 nt, Human
cucucuaugguaaagaua

SEQ ID NO: 3752339 - RNA, 20 nt, Human
cucucuaugguaaagauauu

SEQ ID NO: 3752340 - RNA, 21 nt, Human
cucucuauuucccccuuucuu

SEQ ID NO: 3752341 - RNA, 22 nt, Human
cucucuauuucccccuuucuuc

SEQ ID NO: 3752342 - RNA, 15 nt, Human
cucucucacuccuug

SEQ ID NO: 3752343 - RNA, 13 nt, Human
cucucucaggcca

SEQ ID NO: 3752344 - RNA, 12 nt, Human
cucucuccagau

SEQ ID NO: 3752345 - RNA, 17 nt, Human
cucucuccagucuucca

SEQ ID NO: 3752346 - RNA, 18 nt, Human
cucucuccagucuuccac

SEQ ID NO: 3752347 - RNA, 14 nt, Human
cucucuccaucaga

SEQ ID NO: 3752348 - RNA, 17 nt, Human
cucucuccccugcucca

SEQ ID NO: 3752349 - RNA, 14 nt, Human
cucucuccuccugc

SEQ ID NO: 3752350 - RNA, 20 nt, Human
cucucuccuguacuuuuucc

SEQ ID NO: 3752351 - RNA, 22 nt, Human
cucucuccuguuucccuucccu

SEQ ID NO: 3752352 - RNA, 19 nt, Human
cucucucuaaggaggaugu

SEQ ID NO: 3752353 - RNA, 15 nt, Human
cucucucucucuccc

SEQ ID NO: 3752354 - RNA, 14 nt, Human
cucucucugacucu

SEQ ID NO: 3752355 - RNA, 12 nt, Human
cucucucuucug

SEQ ID NO: 3752356 - RNA, 18 nt, Human
cucucucuucugcuccac

SEQ ID NO: 3752357 - RNA, 14 nt, Human
cucucugacucuca

SEQ ID NO: 3752358 - RNA, 19 nt, Human
cucucugaguccuggccca

SEQ ID NO: 3752359 - RNA, 17 nt, Human
cucucugcagccagccc

SEQ ID NO: 3752360 - RNA, 19 nt, Human
cucucugcagccagcccag

SEQ ID NO: 3752361 - RNA, 20 nt, Human
cucucugcagccagcccagc

SEQ ID NO: 3752362 - RNA, 12 nt, Human
cucucugcagcu

SEQ ID NO: 3752363 - RNA, 14 nt, Human
cucucugcagcugc

SEQ ID NO: 3752364 - RNA, 15 nt, Human
cucucugcagcugcc

SEQ ID NO: 3752365 - RNA, 16 nt, Human
cucucugcaggucccu

SEQ ID NO: 3752366 - RNA, 19 nt, Human
cucucugcaggucccuaau

SEQ ID NO: 3752367 - RNA, 16 nt, Human
cucucugcaucugacc

SEQ ID NO: 3752368 - RNA, 13 nt, Human
cucucugcccuaa

SEQ ID NO: 3752369 - RNA, 13 nt, Human
cucucugcccugu

SEQ ID NO: 3752370 - RNA, 15 nt, Human
cucucugcccugugu

SEQ ID NO: 3752371 - RNA, 17 nt, Human
cucucugcccuguguac

SEQ ID NO: 3752372 - RNA, 20 nt, Human
cucucugccugugagccagu

SEQ ID NO: 3752373 - RNA, 13 nt, Human
cucucugcuguac

SEQ ID NO: 3752374 - RNA, 18 nt, Human
cucucuggccucccaccc

SEQ ID NO: 3752375 - RNA, 19 nt, Human
cucucuggccuuuuccuau

SEQ ID NO: 3752376 - RNA, 15 nt, Human
cucucugguggcucu

SEQ ID NO: 3752377 - RNA, 16 nt, Human
cucucuguauaaacau

SEQ ID NO: 3752378 - RNA, 20 nt, Human
cucucuuaaaguuggaauuu

SEQ ID NO: 3752379 - RNA, 20 nt, Human
cucucuuaggagcagagcuc

SEQ ID NO: 3752380 - RNA, 23 nt, Human
cucucuuauugccucacuucagg

SEQ ID NO: 3752381 - RNA, 15 nt, Human
cucucuucagacucu

SEQ ID NO: 3752382 - RNA, 23 nt, Human
cucucuucagacucucagcccag

SEQ ID NO: 3752383 - RNA, 12 nt, Human
cucucuucccuc

SEQ ID NO: 3752384 - RNA, 15 nt, Human
cucucuucccucaga

SEQ ID NO: 3752385 - RNA, 20 nt, Human
cucucuucccuuuccccagc

SEQ ID NO: 3752386 - RNA, 14 nt, Human
cucucuuccuaucc

SEQ ID NO: 3752387 - RNA, 15 nt, Human
cucucuuccuauccc

SEQ ID NO: 3752388 - RNA, 16 nt, Human
cucucuuccuauccca

SEQ ID NO: 3752389 - RNA, 11 nt, Human
cucucuuccug

SEQ ID NO: 3752390 - RNA, 12 nt, Human
cucucuuccugc

SEQ ID NO: 3752391 - RNA, 17 nt, Human
cucucuucucagagugg

SEQ ID NO: 3752392 - RNA, 19 nt, Human
cucucuucucagaguggug

SEQ ID NO: 3752393 - RNA, 16 nt, Human
cucucuucucuccagc

SEQ ID NO: 3752394 - RNA, 12 nt, Human
cucucuucugcu

SEQ ID NO: 3752395 - RNA, 14 nt, Human
cucucuugcacccg

SEQ ID NO: 3752396 - RNA, 18 nt, Human
cucucuuuauacagcugu

SEQ ID NO: 3752397 - RNA, 20 nt, Human
cucucuuuccuucuugccuu

SEQ ID NO: 3752398 - RNA, 18 nt, Human
cucucuuugggaauguuu

SEQ ID NO: 3752399 - RNA, 15 nt, Human
cucucuuuguucuca

SEQ ID NO: 3752400 - RNA, 21 nt, Human
cucucuuuguucucagcuccc

SEQ ID NO: 3752401 - RNA, 18 nt, Human
cucucuuuuuggaggugc

SEQ ID NO: 3752402 - RNA, 19 nt, Human
cucucuuuuuggaggugcu

SEQ ID NO: 3752403 - RNA, 11 nt, Human
cucugaaacag

SEQ ID NO: 3752404 - RNA, 12 nt, Human
cucugaaacagc

SEQ ID NO: 3752405 - RNA, 19 nt, Human
cucugaaacagcugccuua

SEQ ID NO: 3752406 - RNA, 23 nt, Human
cucugaaacagcugccuuagcuu

SEQ ID NO: 3752407 - RNA, 13 nt, Human
cucugaaagagaa

SEQ ID NO: 3752408 - RNA, 17 nt, Human
cucugaaaguuguacau

SEQ ID NO: 3752409 - RNA, 17 nt, Human
cucugaaauaucccggg

SEQ ID NO: 3752410 - RNA, 16 nt, Human
cucugaaaucugaaga

SEQ ID NO: 3752411 - RNA, 22 nt, Human
cucugaaaucugaagaccucga

SEQ ID NO: 3752412 - RNA, 16 nt, Human
cucugaacacaggcag

SEQ ID NO: 3752413 - RNA, 17 nt, Human
cucugaacacaggcagc

SEQ ID NO: 3752414 - RNA, 22 nt, Human
cucugaacacaggcagcuuucu

SEQ ID NO: 3752415 - RNA, 13 nt, Human
cucugaacacauu

SEQ ID NO: 3752416 - RNA, 16 nt, Human
cucugaacuuuggaga

SEQ ID NO: 3752417 - RNA, 15 nt, Human
cucugaagcaaggcg

SEQ ID NO: 3752418 - RNA, 17 nt, Human
cucugaagcauguuuca

SEQ ID NO: 3752419 - RNA, 20 nt, Human
cucugaagcauguuucaugu

SEQ ID NO: 3752420 - RNA, 16 nt, Human
cucugaagccucuggg

SEQ ID NO: 3752421 - RNA, 19 nt, Human
cucugaaggacccuucaga

SEQ ID NO: 3752422 - RNA, 14 nt, Human
cucugaaggaggcc

SEQ ID NO: 3752423 - RNA, 16 nt, Human
cucugaaggaggccac

SEQ ID NO: 3752424 - RNA, 19 nt, Human
cucugaaggaggccaccuc

SEQ ID NO: 3752425 - RNA, 20 nt, Human
cucugaaggaggccaccucc

SEQ ID NO: 3752426 - RNA, 13 nt, Human
cucugaagggagg

SEQ ID NO: 3752427 - RNA, 13 nt, Human
cucugaagucaca

SEQ ID NO: 3752428 - RNA, 18 nt, Human
cucugaaugguccagggu

SEQ ID NO: 3752429 - RNA, 20 nt, Human
cucugaauuuacuuccuugc

SEQ ID NO: 3752430 - RNA, 22 nt, Human
cucugaauuuaucuuugauaac

SEQ ID NO: 3752431 - RNA, 12 nt, Human
cucugacagcag

SEQ ID NO: 3752432 - RNA, 17 nt, Human
cucugacagcagcaucu

SEQ ID NO: 3752433 - RNA, 23 nt, Human
cucugacagcagcaucucuaccu

SEQ ID NO: 3752434 - RNA, 23 nt, Human
cucugacauuaugugguuuuaga

SEQ ID NO: 3752435 - RNA, 13 nt, Human
cucugaccacuug

SEQ ID NO: 3752436 - RNA, 20 nt, Human
cucugaccacuugaggccug

SEQ ID NO: 3752437 - RNA, 19 nt, Human
cucugaccgaaacagcgcu

SEQ ID NO: 3752438 - RNA, 22 nt, Human
cucugaccgaaacagcgcuggg

SEQ ID NO: 3752439 - RNA, 12 nt, Human
cucugaccugca

SEQ ID NO: 3752440 - RNA, 13 nt, Human
cucugaccugcag

SEQ ID NO: 3752441 - RNA, 16 nt, Human
cucugacucagggcuc

SEQ ID NO: 3752442 - RNA, 20 nt, Human
cucugacucagggcuccugg

SEQ ID NO: 3752443 - RNA, 21 nt, Human
cucugacucccaaagagcugc

SEQ ID NO: 3752444 - RNA, 15 nt, Human
cucugacucucaaau

SEQ ID NO: 3752445 - RNA, 16 nt, Human
cucugacucucaaauc

SEQ ID NO: 3752446 - RNA, 18 nt, Human
cucugacuggcacagucu

SEQ ID NO: 3752447 - RNA, 19 nt, Human
cucugacuuaagcaaaaga

SEQ ID NO: 3752448 - RNA, 22 nt, Human
cucugacuuaagcaaaagaaaa

SEQ ID NO: 3752449 - RNA, 14 nt, Human
cucugacuucugcc

SEQ ID NO: 3752450 - RNA, 15 nt, Human
cucugacuucugccu

SEQ ID NO: 3752451 - RNA, 19 nt, Human
cucugacuucugccuggag

SEQ ID NO: 3752452 - RNA, 21 nt, Human
cucugacuucugccuggagac

SEQ ID NO: 3752453 - RNA, 18 nt, Human
cucugagaagaggagccc

SEQ ID NO: 3752454 - RNA, 15 nt, Human
cucugagacuccaga

SEQ ID NO: 3752455 - RNA, 23 nt, Human
cucugagacuccagaccugaggc

SEQ ID NO: 3752456 - RNA, 13 nt, Human
cucugagaggccc

SEQ ID NO: 3752457 - RNA, 21 nt, Human
gagggagacacuggccccuca

SEQ ID NO: 3752458 - RNA, 13 nt, Human
gagggagagagag

SEQ ID NO: 3752459 - RNA, 15 nt, Human
gagggagagagagag

SEQ ID NO: 3752460 - RNA, 16 nt, Human
gagggagagucuccca

SEQ ID NO: 3752461 - RNA, 12 nt, Human
gagggagcagac

SEQ ID NO: 3752462 - RNA, 17 nt, Human
gagggaggccccagggg

SEQ ID NO: 3752463 - RNA, 16 nt, Human
gagggagggcuccaga

SEQ ID NO: 3752464 - RNA, 20 nt, Human
gagggagggcuccagacaca

SEQ ID NO: 3752465 - RNA, 18 nt, Human
gagggagguguuuaaaga

SEQ ID NO: 3752466 - RNA, 13 nt, Human
gagggagugacag

SEQ ID NO: 3752467 - RNA, 15 nt, Human
gagggaucacagggc

SEQ ID NO: 3752468 - RNA, 23 nt, Human
gagggaucacagggccccagaag

SEQ ID NO: 3752469 - RNA, 17 nt, Human
gagggaugaugccacac

SEQ ID NO: 3752470 - RNA, 16 nt, Human
gagggaugggccuggc

SEQ ID NO: 3752471 - RNA, 21 nt, Human
gagggauucugguuccagggu

SEQ ID NO: 3752472 - RNA, 18 nt, Human
gagggcaagggccaugcu

SEQ ID NO: 3752473 - RNA, 22 nt, Human
gagggcacagaaaauggaagac

SEQ ID NO: 3752474 - RNA, 23 nt, Human
gagggcacagaaaauggaagaca

SEQ ID NO: 3752475 - RNA, 12 nt, Human
gagggcacuggu

SEQ ID NO: 3752476 - RNA, 21 nt, Human
gagggcagacuggggcauccu

SEQ ID NO: 3752477 - RNA, 23 nt, Human
gagggcagacuggggcauccugu

SEQ ID NO: 3752478 - RNA, 19 nt, Human
gagggcagcagaagggggu

SEQ ID NO: 3752479 - RNA, 21 nt, Human
gagggcagcagaagggggugg

SEQ ID NO: 3752480 - RNA, 22 nt, Human
gagggcagcagaaggggguggu

SEQ ID NO: 3752481 - RNA, 13 nt, Human
gagggcagcagcc

SEQ ID NO: 3752482 - RNA, 16 nt, Human
gagggcagcagccagc

SEQ ID NO: 3752483 - RNA, 19 nt, Human
gagggcagcagggcuaccc

SEQ ID NO: 3752484 - RNA, 16 nt, Human
gagggcagcgggagcc

SEQ ID NO: 3752485 - RNA, 18 nt, Human
gagggcagcgggagccuc

SEQ ID NO: 3752486 - RNA, 23 nt, Human
gagggcagcgggagccucccugc

SEQ ID NO: 3752487 - RNA, 17 nt, Human
gagggcauccauaccag

SEQ ID NO: 3752488 - RNA, 18 nt, Human
gagggcaugcgcacaagg

SEQ ID NO: 3752489 - RNA, 18 nt, Human
gagggccaagacuuggca

SEQ ID NO: 3752490 - RNA, 16 nt, Human
gagggccacaugggag

SEQ ID NO: 3752491 - RNA, 15 nt, Human
gagggcccagagcag

SEQ ID NO: 3752492 - RNA, 20 nt, Human
gagggcccagagcaggaagc

SEQ ID NO: 3752493 - RNA, 16 nt, Human
gagggcccaggcaggc

SEQ ID NO: 3752494 - RNA, 12 nt, Human
gagggccccucu

SEQ ID NO: 3752495 - RNA, 15 nt, Human
gagggccccucugcc

SEQ ID NO: 3752496 - RNA, 20 nt, Human
gagggccccucugcccagcu

SEQ ID NO: 3752497 - RNA, 15 nt, Human
gagggcccuaccuga

SEQ ID NO: 3752498 - RNA, 17 nt, Human
gagggccguaccccacc

SEQ ID NO: 3752499 - RNA, 20 nt, Human
gagggccguaccccacccuc

SEQ ID NO: 3752500 - RNA, 21 nt, Human
gagggccguaccccacccuca

SEQ ID NO: 3752501 - RNA, 14 nt, Human
gagggccugcugga

SEQ ID NO: 3752502 - RNA, 12 nt, Human
gagggccugggc

SEQ ID NO: 3752503 - RNA, 17 nt, Human
gagggccugggccuggc

SEQ ID NO: 3752504 - RNA, 20 nt, Human
gagggccugggccuggcucc

SEQ ID NO: 3752505 - RNA, 16 nt, Human
gagggcggagccggcc

SEQ ID NO: 3752506 - RNA, 19 nt, Human
gagggcggcaggggccugg

SEQ ID NO: 3752507 - RNA, 17 nt, Human
gagggcuagaaccuaga

SEQ ID NO: 3752508 - RNA, 18 nt, Human
gagggcuagaaccuggag

SEQ ID NO: 3752509 - RNA, 18 nt, Human
gagggcuagaacuggaga

SEQ ID NO: 3752510 - RNA, 12 nt, Human
gagggcuccaga

SEQ ID NO: 3752511 - RNA, 13 nt, Human
gagggcucugagg

SEQ ID NO: 3752512 - RNA, 14 nt, Human
gagggcucugugcu

SEQ ID NO: 3752513 - RNA, 9 nt, Human
gagggcugc

SEQ ID NO: 3752514 - RNA, 16 nt, Human
gagggcuggaggccca

SEQ ID NO: 3752515 - RNA, 20 nt, Human
gagggcuggaggcccaggcu

SEQ ID NO: 3752516 - RNA, 10 nt, Human
gagggcuggc

SEQ ID NO: 3752517 - RNA, 15 nt, Human
gaggggaacacugcc

SEQ ID NO: 3752518 - RNA, 16 nt, Human
gaggggaagaggccug

SEQ ID NO: 3752519 - RNA, 14 nt, Human
gaggggaagggcca

SEQ ID NO: 3752520 - RNA, 12 nt, Human
gaggggaccagg

SEQ ID NO: 3752521 - RNA, 16 nt, Human
gaggggaccaggagug

SEQ ID NO: 3752522 - RNA, 21 nt, Human
gaggggaccaggagugggugg

SEQ ID NO: 3752523 - RNA, 22 nt, Human
gaggggacuauuuaugaaggca

SEQ ID NO: 3752524 - RNA, 23 nt, Human
gaggggacucugggcuauggaca

SEQ ID NO: 3752525 - RNA, 20 nt, Human
gaggggagacuuugauguca

SEQ ID NO: 3752526 - RNA, 18 nt, Human
gaggggagcucugucugu

SEQ ID NO: 3752527 - RNA, 21 nt, Human
gaggggaggaucacuggagcc

SEQ ID NO: 3752528 - RNA, 17 nt, Human
gaggggauggggcuggg

SEQ ID NO: 3752529 - RNA, 23 nt, Human
gaggggaugugugugugcagagc

SEQ ID NO: 3752530 - RNA, 18 nt, Human
gaggggcagaacagccgc

SEQ ID NO: 3752531 - RNA, 13 nt, Human
gaggggcagagcc

SEQ ID NO: 3752532 - RNA, 14 nt, Human
gaggggcagcccuu

SEQ ID NO: 3752533 - RNA, 15 nt, Human
gaggggcagcccuug

SEQ ID NO: 3752534 - RNA, 16 nt, Human
gaggggcagcccuugc

SEQ ID NO: 3752535 - RNA, 13 nt, Human
gaggggcaggccc

SEQ ID NO: 3752536 - RNA, 14 nt, Human
gaggggcaggcccu

SEQ ID NO: 3752537 - RNA, 15 nt, Human
gaggggcaggcccug

SEQ ID NO: 3752538 - RNA, 16 nt, Human
gaggggcaggcugaca

SEQ ID NO: 3752539 - RNA, 17 nt, Human
gaggggcaucugccccu

SEQ ID NO: 3752540 - RNA, 22 nt, Human
gaggggcaucugccccuccccc

SEQ ID NO: 3752541 - RNA, 19 nt, Human
gaggggccgaugcccagag

SEQ ID NO: 3752542 - RNA, 12 nt, Human
gaggggccucuu

SEQ ID NO: 3752543 - RNA, 20 nt, Human
gaggggccugccaccuggac

SEQ ID NO: 3752544 - RNA, 16 nt, Human
gaggggcgcccaccuc

SEQ ID NO: 3752545 - RNA, 13 nt, Human
gaggggcgcuggc

SEQ ID NO: 3752546 - RNA, 14 nt, Human
gaggggcgcuggcc

SEQ ID NO: 3752547 - RNA, 15 nt, Human
gaggggcgcuggccc

SEQ ID NO: 3752548 - RNA, 16 nt, Human
gaggggcgcuggccca

SEQ ID NO: 3752549 - RNA, 16 nt, Human
gaggggcucaggaaaa

SEQ ID NO: 3752550 - RNA, 17 nt, Human
gaggggcugugggcgug

SEQ ID NO: 3752551 - RNA, 14 nt, Human
gagggggacugcug

SEQ ID NO: 3752552 - RNA, 21 nt, Human
gagggggacugcugcugccug

SEQ ID NO: 3752553 - RNA, 14 nt, Human
gagggggagagggc

SEQ ID NO: 3752554 - RNA, 20 nt, Human
gagggggccaccuccccagg

SEQ ID NO: 3752555 - RNA, 21 nt, Human
gagggggccgggcgcgguggc

SEQ ID NO: 3752556 - RNA, 21 nt, Human
gagggggcuauagcuacagga

SEQ ID NO: 3752557 - RNA, 15 nt, Human
gagggggcugcuccc

SEQ ID NO: 3752558 - RNA, 21 nt, Human
gagggggucguggagagcuag

SEQ ID NO: 3752559 - RNA, 13 nt, Human
gaggggguggagg

SEQ ID NO: 3752560 - RNA, 19 nt, Human
gaggggguuacaaacugca

SEQ ID NO: 3752561 - RNA, 16 nt, Human
gagggguaaaagcuga

SEQ ID NO: 3752562 - RNA, 20 nt, Human
gaggggucccuagcagccca

SEQ ID NO: 3752563 - RNA, 18 nt, Human
gaggggucuccaggagga

SEQ ID NO: 3752564 - RNA, 17 nt, Human
gaggggugcagaggcug

SEQ ID NO: 3752565 - RNA, 19 nt, Human
gaggggugcggcgguccca

SEQ ID NO: 3752566 - RNA, 17 nt, Human
gagggguguggcagugg

SEQ ID NO: 3752567 - RNA, 23 nt, Human
gagggguugccacaggccucccu

SEQ ID NO: 3752568 - RNA, 15 nt, Human
gaggguacagcuggg

SEQ ID NO: 3752569 - RNA, 15 nt, Human
gagggucaggaagga

SEQ ID NO: 3752570 - RNA, 19 nt, Human
gaggguccccaccugggac

SEQ ID NO: 3752571 - RNA, 13 nt, Human
gagggucugagga

SEQ ID NO: 3752572 - RNA, 14 nt, Human
gagggucugaggaa

SEQ ID NO: 3752573 - RNA, 15 nt, Human
gagggucuggagaag

SEQ ID NO: 3752574 - RNA, 22 nt, Human
gagggucugggaaaugagcagg

SEQ ID NO: 3752575 - RNA, 13 nt, Human
gaggguggagacu

SEQ ID NO: 3752576 - RNA, 18 nt, Human
gagggugggagagcccag

SEQ ID NO: 3752577 - RNA, 14 nt, Human
gagggugggggagg

SEQ ID NO: 3752578 - RNA, 13 nt, Human
gaggguguccugc

SEQ ID NO: 3752579 - RNA, 16 nt, Human
gaggguucagagagga

SEQ ID NO: 3752580 - RNA, 15 nt, Human
gagguaacagaacag

SEQ ID NO: 3752581 - RNA, 17 nt, Human
gagguaacagaacagcu

SEQ ID NO: 3752582 - RNA, 21 nt, Human
gagguaacagaacagcuucag

SEQ ID NO: 3752583 - RNA, 16 nt, Human
gagguaagggaggagg

SEQ ID NO: 3752584 - RNA, 21 nt, Human
gagguagaccaggauuucuaa

SEQ ID NO: 3752585 - RNA, 19 nt, Human
gagguagaguuugaaggag

SEQ ID NO: 3752586 - RNA, 21 nt, Human
gagguagcuuugagguggaag

SEQ ID NO: 3752587 - RNA, 21 nt, Human
gagguagguggaucaccugag

SEQ ID NO: 3752588 - RNA, 16 nt, Human
gagguaguuaagggau

SEQ ID NO: 3752589 - RNA, 15 nt, Human
gagguauaauugugu

SEQ ID NO: 3752590 - RNA, 13 nt, Human
gagguaugagguc

SEQ ID NO: 3752591 - RNA, 22 nt, Human
gagguauucaauauccuuugcc

SEQ ID NO: 3752592 - RNA, 22 nt, Human
gaggucaacagagaaggcagga

SEQ ID NO: 3752593 - RNA, 12 nt, Human
gaggucaagaga

SEQ ID NO: 3752594 - RNA, 15 nt, Human
gaggucaagcccagg

SEQ ID NO: 3752595 - RNA, 19 nt, Human
gaggucaagcccaggagga

SEQ ID NO: 3752596 - RNA, 20 nt, Human
gaggucaagcccaggaggac

SEQ ID NO: 3752597 - RNA, 17 nt, Human
gaggucaaggcugcagu

SEQ ID NO: 3752598 - RNA, 19 nt, Human
gaggucaaggcugcaguga

SEQ ID NO: 3752599 - RNA, 16 nt, Human
gaggucaaguaagaag

SEQ ID NO: 3752600 - RNA, 16 nt, Human
gaggucacauucagga

SEQ ID NO: 3752601 - RNA, 19 nt, Human
gaggucacauucaggaaga

SEQ ID NO: 3752602 - RNA, 20 nt, Human
gaggucacuggaaaggggag

SEQ ID NO: 3752603 - RNA, 12 nt, Human
gaggucagagcc

SEQ ID NO: 3752604 - RNA, 13 nt, Human
gaggucaggaguu

SEQ ID NO: 3752605 - RNA, 14 nt, Human
gaggucagggagug

SEQ ID NO: 3752606 - RNA, 18 nt, Human
gagguccacaacacacag

SEQ ID NO: 3752607 - RNA, 12 nt, Human
gagguccagccc

SEQ ID NO: 3752608 - RNA, 16 nt, Human
gaggucaacagagaag

SEQ ID NO: 3752609 - RNA, 17 nt, Human
gaggucagagccugcag

SEQ ID NO: 3752610 - RNA, 17 nt, Human
gaggucagcauuugauc

SEQ ID NO: 3752611 - RNA, 22 nt, Human
gaggucaggaaacuuuuaacug

SEQ ID NO: 3752612 - RNA, 14 nt, Human
gaggucaggcccug

SEQ ID NO: 3752613 - RNA, 15 nt, Human
gaggucaggcccugg

SEQ ID NO: 3752614 - RNA, 19 nt, Human
gagguccagcccuggcuga

SEQ ID NO: 3752615 - RNA, 22 nt, Human
gagguccagcccuggcugaagg

SEQ ID NO: 3752616 - RNA, 13 nt, Human
gaggucccaggaa

SEQ ID NO: 3752617 - RNA, 16 nt, Human
gagguccucuggagcc

SEQ ID NO: 3752618 - RNA, 20 nt, Human
gagguccucuggagcccuaa

SEQ ID NO: 3752619 - RNA, 16 nt, Human
gagguccugagcacug

SEQ ID NO: 3752620 - RNA, 18 nt, Human
gagguccugagcacugcc

SEQ ID NO: 3752621 - RNA, 13 nt, Human
gagguccuggggg

SEQ ID NO: 3752622 - RNA, 22 nt, Human
gaggucgaccccaaagccccuu

SEQ ID NO: 3752623 - RNA, 15 nt, Human
gaggucgaggcagga

SEQ ID NO: 3752624 - RNA, 20 nt, Human
gaggucgggaguucgagacc

SEQ ID NO: 3752625 - RNA, 23 nt, Human
gaggucgguagguucagccaagg

SEQ ID NO: 3752626 - RNA, 21 nt, Human
gaggucucagccccuuucccu

SEQ ID NO: 3752627 - RNA, 17 nt, Human
gaggucucgcugaugcu

SEQ ID NO: 3752628 - RNA, 15 nt, Human
gaggucucuugaggg

SEQ ID NO: 3752629 - RNA, 18 nt, Human
gaggucucuugagggagc

SEQ ID NO: 3752630 - RNA, 23 nt, Human
gaggucugcucggccgucuucac

SEQ ID NO: 3752631 - RNA, 13 nt, Human
gaggucugugcug

SEQ ID NO: 3752632 - RNA, 16 nt, Human
gaggucugugcugagg

SEQ ID NO: 3752633 - RNA, 19 nt, Human
gaggucugugcugaggccu

SEQ ID NO: 3752634 - RNA, 12 nt, Human
gaggucuguuua

SEQ ID NO: 3752635 - RNA, 22 nt, Human
gaggucuugcuagaaugggaag

SEQ ID NO: 3752636 - RNA, 19 nt, Human
gaggucuuuugacaugugg

SEQ ID NO: 3752637 - RNA, 15 nt, Human
gaggugaaaaggcca

SEQ ID NO: 3752638 - RNA, 21 nt, Human
gaggugauuccagugaagaua

SEQ ID NO: 3752639 - RNA, 19 nt, Human
gaggugcagagugcccaga

SEQ ID NO: 3752640 - RNA, 21 nt, Human
gaggugcagagugcccagaac

SEQ ID NO: 3752641 - RNA, 13 nt, Human
gaggugccacugg

SEQ ID NO: 3752642 - RNA, 14 nt, Human
gaggugccagcaaa

SEQ ID NO: 3752643 - RNA, 15 nt, Human
gaggugccagcaaag

SEQ ID NO: 3752644 - RNA, 19 nt, Human
gaggugccagcaaagcccc

SEQ ID NO: 3752645 - RNA, 17 nt, Human
gaggugccagcaacuga

SEQ ID NO: 3752646 - RNA, 20 nt, Human
gaggugccagcaacugaaua

SEQ ID NO: 3752647 - RNA, 13 nt, Human
gaggugcccagga

SEQ ID NO: 3752648 - RNA, 16 nt, Human
gaggugcccaggagaa

SEQ ID NO: 3752649 - RNA, 15 nt, Human
gaggugccuguccca

SEQ ID NO: 3752650 - RNA, 17 nt, Human
gagguggaagaagggag

SEQ ID NO: 3752651 - RNA, 18 nt, Human
gagguggaauuauuuuaa

SEQ ID NO: 3752652 - RNA, 19 nt, Human
gagguggaggcugcaguga

SEQ ID NO: 3752653 - RNA, 20 nt, Human
gagguggaucacagaggcuu

SEQ ID NO: 3752654 - RNA, 17 nt, Human
gagguggccagagcugg

SEQ ID NO: 3752655 - RNA, 22 nt, Human
gagguggccagagcugggaggc

SEQ ID NO: 3752656 - RNA, 14 nt, Human
gagguggcugccug

SEQ ID NO: 3752657 - RNA, 13 nt, Human
gaggugggagcag

SEQ ID NO: 3752658 - RNA, 15 nt, Human
gaggugggagcagga

SEQ ID NO: 3752659 - RNA, 18 nt, Human
gaggugggagcaggagau

SEQ ID NO: 3752660 - RNA, 16 nt, Human
gaggugggauaucccu

SEQ ID NO: 3752661 - RNA, 17 nt, Human
gaggugggauccuccag

SEQ ID NO: 3752662 - RNA, 18 nt, Human
gaggugggauccuccagg

SEQ ID NO: 3752663 - RNA, 23 nt, Human
gaggugggcaggugguggcacug

SEQ ID NO: 3752664 - RNA, 17 nt, Human
gaggugggccagucugu

SEQ ID NO: 3752665 - RNA, 12 nt, Human
gaggugggccca

SEQ ID NO: 3752666 - RNA, 15 nt, Human
gaggugggcccagga

SEQ ID NO: 3752667 - RNA, 13 nt, Human
gagguggucugaa

SEQ ID NO: 3752668 - RNA, 14 nt, Human
gaggugucaggcug

SEQ ID NO: 3752669 - RNA, 18 nt, Human
gaggugucaggcugcugg

SEQ ID NO: 3752670 - RNA, 22 nt, Human
gaggugucaggcugcuggcgcc

SEQ ID NO: 3752671 - RNA, 17 nt, Human
gaggugucucaggcugc

SEQ ID NO: 3752672 - RNA, 20 nt, Human
gaggugucucaggcugccug

SEQ ID NO: 3752673 - RNA, 16 nt, Human
gagguguggagccgag

SEQ ID NO: 3752674 - RNA, 15 nt, Human
gaggugugggggcug

SEQ ID NO: 3752675 - RNA, 16 nt, Human
gaggugugggggcugc

SEQ ID NO: 3752676 - RNA, 19 nt, Human
gagguguuuaaagagaggu

SEQ ID NO: 3752677 - RNA, 21 nt, Human
gagguuacagguaccaguucu

SEQ ID NO: 3752678 - RNA, 19 nt, Human
gagguuauaggucacuccu

SEQ ID NO: 3752679 - RNA, 14 nt, Human
gagguucccuuuga

SEQ ID NO: 3752680 - RNA, 17 nt, Human
gagguuccucugccugc

SEQ ID NO: 3752681 - RNA, 18 nt, Human
gagguuccucugccugcc

SEQ ID NO: 3752682 - RNA, 13 nt, Human
gagguugaagcca

SEQ ID NO: 3752683 - RNA, 15 nt, Human
gagguugaagccaag

SEQ ID NO: 3752684 - RNA, 15 nt, Human
gagguugauaacuuu

SEQ ID NO: 3752685 - RNA, 20 nt, Human
gagguugaucagaucugaca

SEQ ID NO: 3752686 - RNA, 15 nt, Human
gagguugggaggcca

SEQ ID NO: 3752687 - RNA, 17 nt, Human
gagguugggaggccauu

SEQ ID NO: 3752688 - RNA, 14 nt, Human
gagguugggugggc

SEQ ID NO: 3752689 - RNA, 18 nt, Human
gagguuguagugagccca

SEQ ID NO: 3752690 - RNA, 18 nt, Human
gagguuuauaguuaaucu

SEQ ID NO: 3752691 - RNA, 21 nt, Human
gagguuucacccuuaacccaa

SEQ ID NO: 3752692 - RNA, 19 nt, Human
gagguuucccaaugguguu

SEQ ID NO: 3752693 - RNA, 20 nt, Human
gagguuucucaaagaaauuu

SEQ ID NO: 3752694 - RNA, 16 nt, Human
gagguuugcaguccca

SEQ ID NO: 3752695 - RNA, 15 nt, Human
gagguuuuaaaguga

SEQ ID NO: 3752696 - RNA, 16 nt, Human
gagguuuuaugauauu

SEQ ID NO: 3752697 - RNA, 16 nt, Human
gagguuuucuccccca

SEQ ID NO: 3752698 - RNA, 16 nt, Human
gaguaaauacagguag

SEQ ID NO: 3752699 - RNA, 20 nt, Human
gaguaaaucagauguugaau

SEQ ID NO: 3752700 - RNA, 15 nt, Human
gaguaacaauacaaa

SEQ ID NO: 3752701 - RNA, 20 nt, Human
gaguaacaauacaaauggau

SEQ ID NO: 3752702 - RNA, 16 nt, Human
gaguaacauuugcugu

SEQ ID NO: 3752703 - RNA, 17 nt, Human
gaguaacauuugcuguu

SEQ ID NO: 3752704 - RNA, 21 nt, Human
gaguaacuauuauuauaggua

SEQ ID NO: 3752705 - RNA, 13 nt, Human
gaguaagacauug

SEQ ID NO: 3752706 - RNA, 14 nt, Human
gaguaagcugcuuu

SEQ ID NO: 3752707 - RNA, 15 nt, Human
gaguaagcugcuuuu

SEQ ID NO: 3752708 - RNA, 17 nt, Human
gaguaauaguaaacaca

SEQ ID NO: 3752709 - RNA, 13 nt, Human
gaguaaucaaucu

SEQ ID NO: 3752710 - RNA, 15 nt, Human
gaguaaucugagaaa

SEQ ID NO: 3752711 - RNA, 17 nt, Human
gaguaaucuuguugguu

SEQ ID NO: 3752712 - RNA, 22 nt, Human
gaguaaugguguagaacacuaa

SEQ ID NO: 3752713 - RNA, 14 nt, Human
gaguaauuuauugu

SEQ ID NO: 3752714 - RNA, 17 nt, Human
gaguaauuuuggauuuu

SEQ ID NO: 3752715 - RNA, 16 nt, Human
gaguacaggugaagca

SEQ ID NO: 3752716 - RNA, 18 nt, Human
gaguacguugugcauuug

SEQ ID NO: 3752717 - RNA, 20 nt, Human
gaguacuacaguccucccau

SEQ ID NO: 3752718 - RNA, 20 nt, Human
gaguacuccacacugcacaa

SEQ ID NO: 3752719 - RNA, 21 nt, Human
gaguacuccacacugcacaau

SEQ ID NO: 3752720 - RNA, 15 nt, Human
gaguacugugggcaa

SEQ ID NO: 3752721 - RNA, 17 nt, Human
gaguacugugggcaauu

SEQ ID NO: 3752722 - RNA, 16 nt, Human
gaguagaaaaugugac

SEQ ID NO: 3752723 - RNA, 19 nt, Human
gaguagaaacugcagggaa

SEQ ID NO: 3752724 - RNA, 17 nt, Human
gaguagaaagacagagc

SEQ ID NO: 3752725 - RNA, 20 nt, Human
gaguagaaagacagagcugg

SEQ ID NO: 3752726 - RNA, 22 nt, Human
gaguagaaagacagagcuggga

SEQ ID NO: 3752727 - RNA, 15 nt, Human
gaguagacacauuua

SEQ ID NO: 3752728 - RNA, 18 nt, Human
gaguagacacauuuaagg

SEQ ID NO: 3752729 - RNA, 17 nt, Human
gaguagaccccuggcug

SEQ ID NO: 3752730 - RNA, 12 nt, Human
gaguagagaagu

SEQ ID NO: 3752731 - RNA, 18 nt, Human
gaguagauauuacuuuau

SEQ ID NO: 3752732 - RNA, 23 nt, Human
gaguagccccaacccaaaccugg

SEQ ID NO: 3752733 - RNA, 18 nt, Human
gaguagccgagagccugc

SEQ ID NO: 3752734 - RNA, 21 nt, Human
gaguagccgagagccugcucc

SEQ ID NO: 3752735 - RNA, 12 nt, Human
gaguagcuggau

SEQ ID NO: 3752736 - RNA, 12 nt, Human
gaguagcuggga

SEQ ID NO: 3752737 - RNA, 21 nt, Human
gaguagcugggacuacaggca

SEQ ID NO: 3752738 - RNA, 17 nt, Human
gaguaggaagacuuugg

SEQ ID NO: 3752739 - RNA, 19 nt, Human
gaguaggaagacuuuggaa

SEQ ID NO: 3752740 - RNA, 14 nt, Human
gaguaguguggaau

SEQ ID NO: 3752741 - RNA, 20 nt, Human
gaguaguugauguugcauuu

SEQ ID NO: 3752742 - RNA, 15 nt, Human
gaguauaagaaaugc

SEQ ID NO: 3752743 - RNA, 17 nt, Human
gaguauaagaaaugcau

SEQ ID NO: 3752744 - RNA, 22 nt, Human
gaguauguuaagcucuuuauga

SEQ ID NO: 3752745 - RNA, 22 nt, Human
gaguauuaaaauguaugcaugu

SEQ ID NO: 3752746 - RNA, 20 nt, Human
gaguauuuaggcagauugaa

SEQ ID NO: 3752747 - RNA, 16 nt, Human
gaguauuuuugacaga

SEQ ID NO: 3752748 - RNA, 18 nt, Human
gaguauuuuugacagaau

SEQ ID NO: 3752749 - RNA, 17 nt, Human
gagucaaaacacuugua

SEQ ID NO: 3752750 - RNA, 21 nt, Human
gagucaaggccugcucccugu

SEQ ID NO: 3752751 - RNA, 20 nt, Human
gagucaauccccucauucag

SEQ ID NO: 3752752 - RNA, 15 nt, Human
gagucaaugugcagu

SEQ ID NO: 3752753 - RNA, 22 nt, Human
gagucacaaagaacauguagaa

SEQ ID NO: 3752754 - RNA, 13 nt, Human
gagucaccaagcc

SEQ ID NO: 3752755 - RNA, 16 nt, Human
gagucaccaagcccag

SEQ ID NO: 3752756 - RNA, 17 nt, Human
gagucaccaagcccagu

SEQ ID NO: 3752757 - RNA, 14 nt, Human
gagucaccaggaau

SEQ ID NO: 3752758 - RNA, 14 nt, Human
cucugagaggcccu

SEQ ID NO: 3752759 - RNA, 16 nt, Human
cucugagaggcccugg

SEQ ID NO: 3752760 - RNA, 18 nt, Human
cucugagagucuagauuc

SEQ ID NO: 3752761 - RNA, 19 nt, Human
cucugagagucuagauucu

SEQ ID NO: 3752762 - RNA, 16 nt, Human
cucugagcaaaugugg

SEQ ID NO: 3752763 - RNA, 13 nt, Human
cucugagcaguga

SEQ ID NO: 3752764 - RNA, 18 nt, Human
cucugagccaguucagua

SEQ ID NO: 3752765 - RNA, 13 nt, Human
cucugagccccug

SEQ ID NO: 3752766 - RNA, 22 nt, Human
cucugagccccugggacugcug

SEQ ID NO: 3752767 - RNA, 16 nt, Human
cucugagcgggaggca

SEQ ID NO: 3752768 - RNA, 17 nt, Human
cucugagcgggaggcag

SEQ ID NO: 3752769 - RNA, 19 nt, Human
cucugagcugucaacgaga

SEQ ID NO: 3752770 - RNA, 12 nt, Human
cucugaggacac

SEQ ID NO: 3752771 - RNA, 19 nt, Human
cucugaggaugauguacuu

SEQ ID NO: 3752772 - RNA, 10 nt, Human
cucugaggcg

SEQ ID NO: 3752773 - RNA, 19 nt, Human
cucugaggcgccccaaccc

SEQ ID NO: 3752774 - RNA, 21 nt, Human
cucugaggcuggauccuagcc

SEQ ID NO: 3752775 - RNA, 21 nt, Human
cucugaggcuuccagagaguc

SEQ ID NO: 3752776 - RNA, 18 nt, Human
cucugagggcuuccuuug

SEQ ID NO: 3752777 - RNA, 19 nt, Human
cucugaggugccuguccca

SEQ ID NO: 3752778 - RNA, 16 nt, Human
cucugaguaucuccuc

SEQ ID NO: 3752779 - RNA, 22 nt, Human
cucugaguguuuuaugagaaag

SEQ ID NO: 3752780 - RNA, 22 nt, Human
cucugaguuuaccauuuguaau

SEQ ID NO: 3752781 - RNA, 23 nt, Human
cucugauaaaagggcaaaucugc

SEQ ID NO: 3752782 - RNA, 17 nt, Human
cucugauacccagagca

SEQ ID NO: 3752783 - RNA, 18 nt, Human
cucugauacuuuuuugaa

SEQ ID NO: 3752784 - RNA, 14 nt, Human
cucugauaugggac

SEQ ID NO: 3752785 - RNA, 20 nt, Human
cucugauauuccaugaaugu

SEQ ID NO: 3752786 - RNA, 22 nt, Human
cucugaucuccauggcuuccuc

SEQ ID NO: 3752787 - RNA, 20 nt, Human
cucugaugcaucagaaaggg

SEQ ID NO: 3752788 - RNA, 13 nt, Human
cucugauguauuu

SEQ ID NO: 3752789 - RNA, 16 nt, Human
cucugauguauuuugu

SEQ ID NO: 3752790 - RNA, 15 nt, Human
cucugauucugucaa

SEQ ID NO: 3752791 - RNA, 14 nt, Human
cucugauuugcaaa

SEQ ID NO: 3752792 - RNA, 19 nt, Human
cucugauuuucaaagcuuu

SEQ ID NO: 3752793 - RNA, 22 nt, Human
cucugauuuucaaagcuuuuuc

SEQ ID NO: 3752794 - RNA, 22 nt, Human
cucugcaagaauugaagcagga

SEQ ID NO: 3752795 - RNA, 18 nt, Human
cucugcaaugggcacugg

SEQ ID NO: 3752796 - RNA, 15 nt, Human
cucugcaauuccccu

SEQ ID NO: 3752797 - RNA, 16 nt, Human
cucugcaauuccccuc

SEQ ID NO: 3752798 - RNA, 18 nt, Human
cucugcaauuccccucug

SEQ ID NO: 3752799 - RNA, 20 nt, Human
cucugcaauuccccucugcu

SEQ ID NO: 3752800 - RNA, 10 nt, Human
cucugcacaa

SEQ ID NO: 3752801 - RNA, 13 nt, Human
cucugcacaagcu

SEQ ID NO: 3752802 - RNA, 14 nt, Human
cucugcacaagcug

SEQ ID NO: 3752803 - RNA, 15 nt, Human
cucugcacaagcugc

SEQ ID NO: 3752804 - RNA, 19 nt, Human
cucugcacaagcugcaccc

SEQ ID NO: 3752805 - RNA, 20 nt, Human
cucugcacacccuccagaga

SEQ ID NO: 3752806 - RNA, 14 nt, Human
cucugcacagaugg

SEQ ID NO: 3752807 - RNA, 13 nt, Human
cucugcacauguc

SEQ ID NO: 3752808 - RNA, 13 nt, Human
cucugcaccccuc

SEQ ID NO: 3752809 - RNA, 23 nt, Human
cucugcacuacuccucugcagug

SEQ ID NO: 3752810 - RNA, 16 nt, Human
cucugcacuacugaca

SEQ ID NO: 3752811 - RNA, 20 nt, Human
cucugcacucccaccugaca

SEQ ID NO: 3752812 - RNA, 21 nt, Human
cucugcacuccccugcugggu

SEQ ID NO: 3752813 - RNA, 18 nt, Human
cucugcagacugcuagug

SEQ ID NO: 3752814 - RNA, 19 nt, Human
cucugcagacuucccagcu

SEQ ID NO: 3752815 - RNA, 13 nt, Human
cucugcagcaaua

SEQ ID NO: 3752816 - RNA, 23 nt, Human
cucugcagcaauaaagcagcguu

SEQ ID NO: 3752817 - RNA, 13 nt, Human
cucugcagccagc

SEQ ID NO: 3752818 - RNA, 14 nt, Human
cucugcagccagcc

SEQ ID NO: 3752819 - RNA, 16 nt, Human
cucugcagccagccca

SEQ ID NO: 3752820 - RNA, 16 nt, Human
cucugcagcccaggga

SEQ ID NO: 3752821 - RNA, 13 nt, Human
cucugcagccuca

SEQ ID NO: 3752822 - RNA, 15 nt, Human
cucugcagcugaccu

SEQ ID NO: 3752823 - RNA, 12 nt, Human
cucugcagcugc

SEQ ID NO: 3752824 - RNA, 13 nt, Human
cucugcagggccg

SEQ ID NO: 3752825 - RNA, 13 nt, Human
cucugcagguccc

SEQ ID NO: 3752826 - RNA, 16 nt, Human
cucugcaggucccuaa

SEQ ID NO: 3752827 - RNA, 21 nt, Human
cucugcaggucccuaauaaag

SEQ ID NO: 3752828 - RNA, 14 nt, Human
cucugcagugccuu

SEQ ID NO: 3752829 - RNA, 14 nt, Human
cucugcauccagag

SEQ ID NO: 3752830 - RNA, 13 nt, Human
cucugcaucccag

SEQ ID NO: 3752831 - RNA, 19 nt, Human
cucugcaucccagcaccug

SEQ ID NO: 3752832 - RNA, 22 nt, Human
cucugcaucccagcaccugccu

SEQ ID NO: 3752833 - RNA, 20 nt, Human
cucugcaucuacucccaagu

SEQ ID NO: 3752834 - RNA, 14 nt, Human
cucugcaucugacc

SEQ ID NO: 3752835 - RNA, 16 nt, Human
cucugcaugcggccca

SEQ ID NO: 3752836 - RNA, 15 nt, Human
cucugcauucuagua

SEQ ID NO: 3752837 - RNA, 19 nt, Human
cucugcauuugucuauucu

SEQ ID NO: 3752838 - RNA, 19 nt, Human
cucugcauuuuucugcaga

SEQ ID NO: 3752839 - RNA, 19 nt, Human
cucugccaacuucuucaga

SEQ ID NO: 3752840 - RNA, 14 nt, Human
cucugccacacucu

SEQ ID NO: 3752841 - RNA, 18 nt, Human
cucugccacccuaccugu

SEQ ID NO: 3752842 - RNA, 19 nt, Human
cucugccacugacugcagg

SEQ ID NO: 3752843 - RNA, 17 nt, Human
cucugccagaagauccc

SEQ ID NO: 3752844 - RNA, 18 nt, Human
cucugccagggcagugcu

SEQ ID NO: 3752845 - RNA, 19 nt, Human
cucugccagggcagugcua

SEQ ID NO: 3752846 - RNA, 17 nt, Human
cucugccaguccugucc

SEQ ID NO: 3752847 - RNA, 20 nt, Human
cucugcccagagcuggguga

SEQ ID NO: 3752848 - RNA, 13 nt, Human
cucugcccagcuu

SEQ ID NO: 3752849 - RNA, 22 nt, Human
cucugcccagcuuuucauugcu

SEQ ID NO: 3752850 - RNA, 14 nt, Human
cucugcccauuccc

SEQ ID NO: 3752851 - RNA, 18 nt, Human
cucugcccauuccccagc

SEQ ID NO: 3752852 - RNA, 15 nt, Human
cucugccccagaggc

SEQ ID NO: 3752853 - RNA, 18 nt, Human
cucugccccagaggccuc

SEQ ID NO: 3752854 - RNA, 12 nt, Human
cucugccccagc

SEQ ID NO: 3752855 - RNA, 17 nt, Human
cucugcccccugcuggc

SEQ ID NO: 3752856 - RNA, 23 nt, Human
cucugccccucccccagccaugc

SEQ ID NO: 3752857 - RNA, 20 nt, Human
cucugcccgggagcucagga

SEQ ID NO: 3752858 - RNA, 21 nt, Human
cucugcccuaaugcgcaggcu

SEQ ID NO: 3752859 - RNA, 23 nt, Human
cucugcccucauuacugggccuu

SEQ ID NO: 3752860 - RNA, 23 nt, Human
cucugcccuccaagaccuucucc

SEQ ID NO: 3752861 - RNA, 16 nt, Human
cucugcccugcccuag

SEQ ID NO: 3752862 - RNA, 23 nt, Human
cucugcccugcccuagcuccaca

SEQ ID NO: 3752863 - RNA, 12 nt, Human
cucugcccugcg

SEQ ID NO: 3752864 - RNA, 13 nt, Human
cucugcccugugu

SEQ ID NO: 3752865 - RNA, 21 nt, Human
cucugcccuugaucagcccca

SEQ ID NO: 3752866 - RNA, 19 nt, Human
cucugcccuuguucccuag

SEQ ID NO: 3752867 - RNA, 20 nt, Human
cucugccgcuaccucccucc

SEQ ID NO: 3752868 - RNA, 13 nt, Human
cucugccggcucu

SEQ ID NO: 3752869 - RNA, 15 nt, Human
cucugccggcucuuu

SEQ ID NO: 3752870 - RNA, 22 nt, Human
cucugccggcucuuuccuugcu

SEQ ID NO: 3752871 - RNA, 15 nt, Human
cucugccgucucugg

SEQ ID NO: 3752872 - RNA, 16 nt, Human
cucugccgucucugga

SEQ ID NO: 3752873 - RNA, 15 nt, Human
cucugccuacagaac

SEQ ID NO: 3752874 - RNA, 16 nt, Human
cucugccucccaucac

SEQ ID NO: 3752875 - RNA, 20 nt, Human
cucugccucccucacccuga

SEQ ID NO: 3752876 - RNA, 20 nt, Human
cucugccucugacacacagc

SEQ ID NO: 3752877 - RNA, 18 nt, Human
cucugccugaaccuucca

SEQ ID NO: 3752878 - RNA, 21 nt, Human
cucugccugaagucacacagu

SEQ ID NO: 3752879 - RNA, 14 nt, Human
cucugccugcauuc
